United States Patent Application Publication US 2013/0332133 A1 - sequence listing, part 28

SEQ ID NO: 225734 - DNA, 229 bp, Unknown
  Bacterial polypeptide expressing nucleotide sequence isolated from the Sargasso Sea
agtttttcaggtcacatttatggagctacattctatttggccacagggtttcatggtttccacgttttagttgggactattttcttagcagtttgcttatggagaggtaaattaggacattttactaaagaacatcattttggtttcgaggccgctgcttggtactggcactttgttgacgttgtctggttgttcttatttgcagctatttacatttggggaagttaat

SEQ ID NO: 225735 - DNA, 1588 bp, Unknown
  Bacterial polypeptide expressing nucleotide sequence isolated from the Sargasso Sea
aatgagtgcagtagttgaaaataacgatcatcatgatgaccatcatcatgggccaagaaaaggcatctggagatggatgacaacaacgaaccataaagatataggaacactttatctatggtttagttttttagcattcttggttggcggtgcttttgctatgggtatcagagcagagctatttgagcctggtcttcagcttatggatcctattaggtataaccagttagtcacaatgcatggactaataatgatttttggaggagttatgccagcatttgttggactagcaaattggttaattccaatgcaaataggtgcaccagatatggctttaccaagaatgaataacttaagtttttggttgttgccaactgcttttgctattttaatgtcaacagcatttatggaaggtggtatgccaggttttggttggactttctatgcaccactatcaacaaattatcctaatgttgcattctttgtgtttgctgtacacataatgggcgtctcttcgatcatggggtcaattaatgtgatagtaactatcatgaacatgagagcaccaggcatgacacttatgcaaatgccattatttacatggtcatggttaattacagcttatttgttgatagcagtaatgccagttcttgcaggagcggtcactatgttgcttatggatgcatattttggaacttcattttttgatgcagccggtggaggagaccctgttctctttcagcatgtattctggttttttggtcatcctgaggtttatataatgattcttccagcttttggaatcacatcacatattatctcaacattttcacgaaagcctctttttggacatgcttctatgatttatgcaatgtcttctattgcaattctttcttttgttgtttgggctcatcacatgtttactgttggaatgcctttagctgctgagctattcttcatgtgggcgacgatgctaatagccattccaacaggcgttaaagtttttaattggtgcgcaacaatatttaaaggttcgatcacgtatgaaacaccgatgctattcgcaatcgcctttgttgttttatttacaataggcggcttctcaggactcatgttggcaataacgcctgcagattttcaatatcacgatacttattttgttgtggctcatttccattatgttcttgtgccaggatcggttttttcaattatggcagcagtttatttttggcttccgaaatggactggtaacatgtatgacgaaaaattaggaaaacttcacttctggctgtcttttataggcgtcaatgtaactttctttcctcaacattttgtaggtcttgctggtatgccaagaagatatgctgactatgcgttgcaatttgctgaatggaatgctgtttcttcagtaggagcatttttatttggattctctcagcttctatttttatacatagtattaaaaacaatatttgttggtaaaaaggcaaccccacaggtgtgggaaggtgctgatggtcttgaatggaccgttgattcgcctgcgccatatcatacatttgaaacaccaccgaagataaatggctaa

SEQ ID NO: 225736 - DNA, 1840 bp, Unknown
  Bacterial polypeptide expressing nucleotide sequence isolated from the Sargasso Sea
atgtcagaagattttaacgataacaaaacaatacaagcccaatcctcagaagctatttcaggaggtggttcaggtataggagcagatgcagattatgttagacctgcagaagttgcagatcaagatttatatcacggccatagtttcataacaaaatggattttttgtcaggatgcaaaagttatcggagtacaatattttcttttagcaacttttacaggaataattggtttaattctttcttggttaatgcgtttacaattaggctttccaggattagctcccttcatgacagcagagcattattatcaatttgtaactatgcacggaatgataatggtagtttattttttaaccgcactctttctaggaggatttggaaattatttaataccactaatggttggtgcaagggacatggtctttccgtatcttaatatggtaagtttttggagtttctttgttgcagttgcagttttattagcaagcttttttgttccaggaggaccaacaggatcaggttggactctttatccacctcaagcaattttagaaggcactccagggtcaggatggggaataatgttaatgtgcatatctctgattttatttgtagcagggtttactatgggcggtttaaactatttgattactgttcttcaagctagaacaagaggaatgacactaatgagaatgcccctaacagtttgggggatttttactgctacagtattagcaatgttagctttcccagcattattggtaggtgcactaatgatgagtttagacaatgtgcttggaacaagctttttcatgccaacaatattaaaagcaggagaagttttagaatatggtggtggaagtcctattctttttcaacatttattctggttctttggacaccctgaagtgtatattgttgcactacccgcatttggaataatttcagatttaatctctgttcacgccagaaaaaatatatttggttatagaatgatggtttgggcaatagtcggcataggtgcgctaagcttttttgtatgggcacaccacatgtatgttagtggaatgaatccttggtttggattcttttttgcaacaactactcttataatagctgttcctacagcaatgaaagtttataactggatcctaacgctttggagaggaaacattagacttaacactgttatgttatggtgtttaggttttattgttactttcgtgaatggtggaattacgggaattttcttaggaaatgttagtgtagatgttccattgtcagacacatactttgttattgcgcactttcacatggttatgggtattgcgccacttatggtaattatgggagctgtttatcattggttccctttagtagcaggaagatttttggatgaaaaattaggcaaatggcacttctggttaacatttttaggtgcttattcaatttatttccctatgcactacttaggatttattggagtaccaagaagatactttgaaatgtatgacagtccatatgttacatctgctgttggaatgaatgaatttattagtttagcagcctttatagttggtgctgcacaatttattttaatttacaatattattaaaactttaaagacaggaaaacctgcaggacataatccttggcaagcttgttcactagaatggttaacaccatcagtgccacctgaacatggtaattggggtgatagacttccaacagttcatagatgggcttatgattacagtgttcctggagcaaaagaagactttataactcaaactacaccaccaagtgaagttgcacacacggaagtagaaaaaacataaa

SEQ ID NO: 225737 - DNA, 352 bp, Unknown
  Bacterial polypeptide expressing nucleotide sequence isolated from the Sargasso Sea
tatgtatacacaaacagcatcacacgaagatcatcatacaccaactggttggaaacgttgggcttattcaaccaaccacaaagatattggaactatgtatctaatatttgcaattattgcaggtgttattggtactgcattctcagttttaatgagaatggaactgatgcatccaggtgatgggattttaggtggaaattatcatttatataacgtcttagttactggtcatggtttaataatgattttctttatggttatgccagcaatgataggtggttttggtaattggtttgttccaataatgattggtgcacctgatatggcttttcctagaatgaataatatttca

SEQ ID NO: 225738 - DNA, 1404 bp, Unknown
  Bacterial polypeptide expressing nucleotide sequence isolated from the Sargasso Sea
gcttacaaatacttggaatttcttctcttgtatcagcatttaatttcatcgtaacaatattaaatatgaggactcaaggaatgagattgatgagaatgcctgtatttacctggatgacttttgctgtggcttttcttcttgccttttcattaccaataattgcaattgctctcttttacgtaacttttgatagacaatttggtactactttcttcttgactgaaggtggaggagatcctgttttatggcagcatttattctggctatttggtcaccccgaagtatatattcttattcttcctgcttttggaattgtttctgaaatactacctacattttcaagaaagcctctcttcggttatccagcgatagtttttgcaggttttggtattgcatttatcggattcggagtctgggcacaccatatgtttgcttcagcaatcagccctgttgcgcaagctgggtttggtatctcaactatgattattgctgttcccacaggggtaaaaatatttaattggttaggaacaatatggggaggtaagttaaatctaaaaacccctatgttgtttgctcttggttttataggaatgtttgttattggtggtttaagtggagtaacccactcggttgttccagctgatacacaacaaactgatacgtattatattgttgcccactttcattatgttctgttcggtggtgcaatgtttgggatttttgctggtttatattattggtttccaaaagtctggggaaaaatgtataacgaaactcttggtcaaatacacttttggacaatgctcattgggtttaatttaacgtttggacctatgcactggcttggtcttcaaggacaggttagaagaacatgggtatatgcagaggagacaaatttaggcttttggaatcttatagtttcaattggagcctttattatcgcattatcaatacttatatttatggccaactggatgtactcaaaaagaaaaggagaaaaagctccttttgatccttgggatgcgagaacaattgaatggactattccttctcctacaccagtgtggaatttttcaaaagcacctcatgttaaggcattagatgatttctggcatgcaaaatatgacgaggatgaagaaggaagagcagtaagaagagattctgctgacgccttactaactcaacttgaagaagaaggtttaaacccagaagaggaaatagaattgcctaatccttcttactacccatttgttctatcatcaggtctgccatttttaggatatgctgtaatttacaaatcaattcctttagccttaattggagtcgttcttatattggtagggtcttttggttgggctacagagccacttgaagaagagtttaggtcagaagaagaagaatgag

SEQ ID NO: 225739 - DNA, 1597 bp, Unknown
  Bacterial polypeptide expressing nucleotide sequence isolated from the Sargasso Sea
tatgagttacggaaaagcagttagtcacgaagatcacgatcatagacctggttttattaagagatggtttttctcaactaatcataaggacataggaactttatatataatttttgctatcttagcaggtttagtaggtggttatttctctctaataatgagagcggagctcgcagctccaggtttagatgttgtagcagatggtcaagcttggaatgttatcataaccgctcatggactgctaatggtcttttttgttgtaatgccggccttaatcggtggatttggcaactggtttgttccattaatgattggtgctccagatatggcatttcccagaatgaataattttagtttttggatattagttccagctgttatactcttagtggtttcagcaacaattggaacaggtgctggtaccggttggacaatttacccaccgctttctaataaacttggacacccaggaccttcagttgatatggcaatttttgctcttcatttagcaggagcatcttctattcttggtgcagtcaactttataacaactattctcaatatgagaacacccgggatgactcttcacaaaatgcctctttttgtatggtcaatgttaataactgcatttcttcttcttcttgctgttcctgttctagccggagctataacaatgttactgacagatcgtaattttggaacaacattcttcaatcctgctggtggtggagatccagtattgttccaacatctattttggttttttggacatccagaagtttacattatgatcttacctgcttttggaatagttagccaggttatatcaaccttttctagaaaacctgtttttggatatctaggaatggtttatgcaatgatctcaattggatttattggctttatagtatgggctcatcacatgttcactgttggtttaagtgcggaccttagagcatattttatgttagctacaatcattatagcagtaccaacaggtatcaaaatctttagttggatcgcaactatgtggggtggttcattaacttttgaaacgcctatgcttttcgccataggttttgtttttttatttactctcggtggagtgacaggagttatcttagcaaacgcaggaattgatactgttatgcatgatacatattatgtagttgctcatttccattacgtattaagtatgggagcgatgtttgggatttttgcaggtatctactattggtttggaaaaatgtctggaagaaaatataatgagtatttaggtaaactacacttttggttattttttataggtgtaaatgtaacttttttccctcagcattttttaggattagctgggatgccaagaagaatacctgattacccagatgcatatgcaggctggaatcttgtctcaacttacggatcttatatttcttttgcagctactttagtattcttatttgcgataatttactcacttttctttggaaaaaaagaggcatcaaatccttggggagaaggagcagatactttagaatggactttatcttctccaccgcctttccatcaatttgaaactcttcctaaatttaaaggttaa

SEQ ID NO: 225740 - DNA, 802 bp, Unknown
  Bacterial polypeptide expressing nucleotide sequence isolated from the Sargasso Sea
tatggcacatgtaaaaaatcacgattatcatattttaaatccatcattatggccatttattggggcagtcgcagccttcatcatgctgtttggggctgtgttgtttttccatgataacggtccttggcttcttcttataggcttcgtcggtgttctttatgtcatgtttggatggtgggcagataccgttaccgaaaataaagagggtgatcacacccccgtagttttaattggacttcgttatggttttattctttttattatgtctgaagtcatgttttttgcggcatggttctggagcttctttaagcacgccatgtatccaatgtcagagcagtccccgatggttgatggagtttggccgcccgtcggaattgaaacttttgacccatggcatctacctctgataaatacacttattttactatgttctggagctgctgcaacttgggcacatcacgctttagtacatgaaaataatcgcaaagacattaaaaatggtttgattattgcaatcttgctaggagctatttttactgttttccaagcctacgaatatagtcacgcagccttcggtttcagtggaaatatttatggcgctaattttttcatggcaactgggttccatggatttcatgtgatcgtaggtacgatatttttatttatttgtttattgaggactatgcgtggtcatttttcacctgaaagccaccttggttttgaggctgcggcttggtattggcattttgtggacgtagtttggctattcttgtttgcagctgtctatgtatggggtggatga

SEQ ID NO: 225741 - DNA, 983 bp, Unknown
  Bacterial polypeptide expressing nucleotide sequence isolated from the Sargasso Sea
gtcactacctgtattagcgggtgcgattacaatgctgctaactgacagaaattttggcacgacattttttgatcctgcaggaggtggtgatccagtactttatcagcatctattatggttttttggccacccagaagtttacatgattgttattcctgggtttggaatagtaagtcatgttatttcaactttttctaagaagccagtattcggatatctaccaatggtgtacgctatgatagcaattggtgctttgggttttgttgtatgggcccatcatatgtatacggttggtatgtctgttacacagcaagcttattttatgcttgcaacaatggttatagcggttcctaccgggataaaaattttttcatggattgccacaatgtggggaggatcagttgagtttaaaacaccgatgttatggtcgataggcttcctgtttcttttcactgtcggtggagtgacaggcatagttttaagccaagcagggattgatagagcctaccacgacacttactatgttgtggctcactttcactacgtaatgtctttaggtgccgtcttttgcatctttgccgggatatattattggatagggaaaatgtctggtcgtcagtatccagaatgggcaggaaaactacacttctgggccatgttcattggatcaaatatcacatttttcccacaacattttcttgggaggcaaggtatgcctcgacggtacatagattacccagagcaatttgcattatggaattatgtatcatctattggcgctttcatatcctttggatcatttatatttttctttggtataattttttatacattgatgtggggtagacgtgtaacagaggaagcttattgggggaaacacgccgatacgttggagtggacgttaccaaatccaccacccgagcacacctttgaaacattacctacacgagacatgtgggagtccaaatcaactagccactaat

SEQ ID NO: 225742 - DNA, 973 bp, Unknown
  Bacterial polypeptide expressing nucleotide sequence isolated from the Sargasso Sea
ctggattcttcaaacccagctctcggaggcaatgtcgttgtttatcaacatctcttctggttttattcccacccagcggtttacatcatggtgctgccggccttcggcctggtgagcgaaattctgccagtacacgcgcgcaaaccgctgttcggctacgtgacgatggtctattcgatcatggccattgtggtgctcggcctggtcgtctgggcgcaccacatgttcaccagtggcacgccgccctggatgcgcttgttcttcacgatcgccaccgccttcattgccgttccgacaggaatcaaattcttcaactggctggccaccctctggggagggcgcatcaccctgaacagcgcgatgctgttttcctgcggcttcatcgtcaatttcgtgctggggggcatcaccggtgtggccctcgcccaggttcccttcgacattcatgtgcacgacacctacttcgtggtggctcacttccactacatcgtctttggtgggtcggtgttcgtgatcttcgcctcggtgtaccactggtatccgaagttcacgggacggatgcttaatgaagatctagggcgccttcactgcgccctcaccttcatcgggttcaacctctgttttggtccccagcactggctgggtctgaatggcatgccgcggcgcgtcgccgaatacgacccgcagttcacgttgatcaatcagatcagttcggttggagctttgctcatggcgatcagcacccttccatttctctggaacgttgtgcaaagcgccctcagcggcaaacccgccggagacaacccctggaatgccctcacaccggaatggctgaccagttcaccgccaccggtggagaactggatcggggaagctcctcttgtggaggagccctatggctacggcgttcccgttgatcaacttgacctgaccgccaccagcggtcgtgacctctggagcagcggcaaatgac

SEQ ID NO: 225743 - DNA, 1240 bp, Unknown
  Bacterial polypeptide expressing nucleotide sequence isolated from the Sargasso Sea
tttgagtttctggatattgccttttgctttctttattcttttatcatcccttttcatggagggcggagctcctaactttggatggacattttatgcaccactttcaacaacatatgcaccgccaagcgtaacgttttttatattttctgttcacataatgggagcttcttcaattatgggtgcaattaatgtggttgtaacaatcatgaatatgagagcaccaggcgtaaccttaatgaaaatgccattatttgtatggtcatggctaataactgcatatttgttaatagctgtaatgcctgttttggccggagcagtaacaatgatgttaatggacatccactttggaacaagtttcttcaatgcagctggtggcggagatcctgttctctttcaacatattttttggttctttggccatcctgaggtttacataatgattctgccagcctttggaattgtctcccatatcattgagactttttccagaaaacaactatttggttattcttcaatggtttgggctatgctttcaattgcaatcctttcttttgtggtatgggctcaccacatgtttacagttggtctgccattagcagctgaaatattttttatgtgggcaactatgttgatagccgtgcctactggtgtaaaagtatttaattgggtagcgactatgtttagaggatctctaacatttgaaacgcctatgctttttgcagttgcatttgttgttttatttactatcggaggattgtcaggattgatgcttgctattgttcctgctgattttcaatatcatgatacatattttgttgttgctcattttcactatgttttggttcctggagcaatattctctatcatggccgctgtttattattggattccaaaatggtctggaaatatgtatgacgaaagactcggcaaacttcatttttggctttcatttataggtgtaaacgttacattctttccacaacattttattggtttagctggaatgccaagaagatatcctgactatgctctcatatttgctgactggaacatggtttctagtattggagcatttctatttgggttctctcaattactgtttttattcatcgttatcaagactgtgatgggtggcaaaaaggcaacagatcaagtttgggaaggcgctaaaggacttgagtggacagttgcttcaccagctccgtaccatacattttcaacaccaccaaaggttgattga

SEQ ID NO: 225744 - DNA, 711 bp, Unknown
  Bacterial polypeptide expressing nucleotide sequence isolated from the Sargasso Sea
tatgacaacaatcgcttcacaagatcattcacatcaccatccaacaggatggaaacgatgggcttattccacaaatcataaagatataggtacaatgtatttaatctttgcgattattgctggaataatcggaactgctttttcagttttaatgagaatggagttgatgcatccaggcgatgggatactaggtggcaattatcacttatataatgttttagtaactggtcacggtttgataatgattttctttatggtcatgccagcaatgattggcggttttggaaattggtttgtaccaattatgataggggccccagacatggcttttccaagaatgaataatatatctttttggttattaccagtgtcattcattttattactttcatcaatatttgtagatggacctccaggcgcacaaggtgtaggaggaggctggacaatctatccaccattgtcatctaaaactggtcaaccaggtcctgcaatggatttagcaatacttagtctacatatagcaggagcatcttcgatactcggtgcagtaaactttataactactatattaaatatgagaactccaggtatgaccttacacaagatgccattgtttgcttggtcaattcttgtaacagcatttttattattattatctttaccagttttagcgggagcaataacaatgttattaacggacaggaattttgg

SEQ ID NO: 225745 - DNA, 1153 bp, Unknown
  Bacterial polypeptide expressing nucleotide sequence isolated from the Sargasso Sea
gattcagctttcacaaccagataacaatttcttaacagccgcagagtacaatgcaatgtttacaatgcacggaaccacgatgattttcttggcaattatgccaattagtgctgccttctttaattatcttcttccgctacaaattggagcgcgtgatgttgcttttccaaggctaaatgctctttccttttggatatttattttcggaggagcatttttatattctacatttatatttggtactgcaggagcaccagagggcggatacttagctgaggaagttggttggctaggctcagcgcctaacgggggttggtttggctatcaaccaaatgcaggtatgaaatactccccagggactgccatggattattgggctataggactacagatacttggaatagcttctttaatttctgcattcaattttattacaaccattatcaacatgagaactgaaggcatgcggttcatgagaatgccagtatttacttggatgacttttgctgtctcttttttgcttgcattttctttaccaataattgcaatagcactcttctatgtaacatttgatagaaaatttggaactacgtttttcttaacagaaggcggaggtgatccaattttatggcagcatcttttctggctatttggacatccagaagtttatattctaatcctgcctgcatttggaattgtctcggaagttcttccaactttttcaagaaagccactttttggttatgccgcaatagtttttgcaggatttggaatcgcgtttataggctttggagtgtgggctcaccacatgtttgcttctgcgattagcccggttgctcaagctggttttggtttatcaacaatggttattgctgtcccaacaggtgtaaaaatatttaattggcttggcacaatatggggaggaaagctaaagctgaataccccaatgctattttcgttaggttttataggtatgtttgttattggtggattaagtggtgttactcactcaatagttccagccgatactcagcaaacagatacctactacgttgtagctcactttcactacgttttatttggtggggctttgtttggaattttttctggactttattattggtttccaaaagtttggggcaataatgtataa

SEQ ID NO: 225746 - DNA, 1606 bp, Unknown
  Bacterial polypeptide expressing nucleotide sequence isolated from the Sargasso Sea
aatgtcagcaactactgcagatcacgaacaccatcataatccaactggttggaagagatgggcctattcaacaaatcataaagatattggtacgatgtatcttatctttgcaattattgctggtttaattggatctgctttctcagttttaatgagaatggaattaatgcatccaggggacggaattctaggaggtgattatcatttatataacgttttagtaactggtcacggtctaatcatgattttctttatggtcatgccagcaatgatcggtggatttggtaactggtttgttcccatcatgattggtgcaccagatatggcctttccaagaatgaacaatatttctttttggctattaccagtcgctctaattttattactggtatcgatttttgttgatggtcctccgggagcaaaaggagtaggaggaggttggacaatttatccaccgttatcatcaaaaactggtcaaccaggtcctgcaatggacttagcaattttaagtttacacgtggctggcgcttcgtcaatcttaggagcaattaactttattacaacaattttaaatatgagaactccaggtatgactttacacaaaatgccattgttcgcatggtcaatattagtaacagcatttttacttttattatcattaccagttttagcaggggctataacaatgcttttaactgacagaaattttggaactgctttctttgaagctcaaacaggtggagatccagttctattccaacatttattttggttttttggtcacccagaggtgtacattttaattttaccaggctttggaatgatcagccatattgtctcaactttttcaagaaagcctgtgtttggttatctcggaatggcttatgccatggtagctattggagttgtaggtttcgtagtttgggctcaccacatgtacacagttggacttgacacagatacaaaagcttatttcttagcggcaacaatgattatcgcagtcccaaccggaattaaaattttttcttggatagcaacaatgtggggtggatctataagctttcagactcctatgttatgggctattggttttattttcttatttactttaggaggtgtaactggagttgttctagcaaatgctggtgttgatactgcacttcatgacacttattatgtagtagcgcatttccattacgtattatctatgggcgctgtttacgcaattttcgcaggattttattattggtttagtaaaatgacgggttatgaatactctgaatttttgggaaaattacatttttggttgacgtttataggggtaaacttaatatttttcccacaacatttcttaggattagcaggaatgcctagaagatatgccgattatccggatgcatttgctggttggaattatatttcttcaattggttcgtatatatccattatcggcttagcagtatttttattaaatcttttatatgcttttatgaaaaagaaaaaagctgaacaaaatccatggggagaaggagcaacaactctagaatggacagtgtcatcaccgccaccattccatacttttgaagagctacctaaagtaaagtaa

SEQ ID NO: 225747 - DNA, 1021 bp, Unknown
  Bacterial polypeptide expressing nucleotide sequence isolated from the Sargasso Sea
agtattcttgtagttctatcaactcctgttctcgctggtactctaatactcctgagctttgacatagttgctcataccggtttcttcaacccaagccttggtgggaatgtaatcgtttatcaacatcttttttggttttactctcatcctgctgtttatatcatggtcttacctgcctttggtttagtaagtgaaatacttccaatccatagtaggaaaccactttttggctatacaacaatggtcttctcaattatgggaatagttgtgttgggtctagttgtttgggctcatcatatgtttacaagcggtactcctccttggatgcgcttattttttacaatcgctactgcattcatagctgttccaacaggtataaaattttttaattgggttgcgaccttatggggaggaaaaatatcacttaatgctgcaatgttattttcctgcggatttattattaactttgttttaggtggaataacgggagttgccctagcgcaagtaccttttgatgttcatgtacacgacacttattttgttgttgcccattttcattacatagtctatggcggttctgtctttgttatcttctcctcgatttatcactggttcccaaaatttactggaaaaatgctcaatgaaaatcttggaagattccactttataattacttttataggctttaatctttgttttgctcctcaacattggctaggtttaaacggaatgcctcgacgagttgccgaatacgatccacaatttcagttaatcaatcaaattagtagtgtaggtgcattattaatggctttaagtactttacctttcttatggaatattcttcaaagcatcctcttcggggaagaagctggtgataacccatggaatgcactaactcctgagtggttaacaagttctcctcctcctgttgagaattgggacggagaagccccacttgttcttgaaccttatggttatggaaaaaaagattcaaatgagactcaggaggcaatcagatgac

SEQ ID NO: 225748 - DNA, 1840 bp, Unknown
  Bacterial polypeptide expressing nucleotide sequence isolated from the Sargasso Sea
aatgtcacattatggtatttggtcgtggttaggaacagtagatcataaaaaaataggaactatgtatggaatagtttcattcttttggtttattatgggtggaatcgaagccttgcttattagagttcaactttcacacgctgaagctgaaattataagccctgaactctataaccaactatttaccatgcatggaacaactatggtatttttagttgtaatgccactttcagctgcattttttaactggctggttcctcttcaaattggagctagagacgtagcttttccgaggcttaatgctcttagtttatgggtttttattttcggttcaatacttatgaacattagttggtttactggaggggctcctaatggcggttggttcggttatcctccaaactcaactgttcagttcaaccctggtcatggaatgacttattgggttatgggacttaacgtacttggagtagcatcgatagctgctggtttgaactttatagtaactataataaatatgagagctactggaatgtctctaatgaaaatgcctgtatttacatggatgacctttattacttcaatacttattgtattagcacttcctgtacttggtgtagcaggaatacaaatgactgctgatagagtatatggaactaattttttcaactctgaagctggtggagatcctatattctggcaacatattttttggttatttggacaccctgaagtttatatattgatacttcctgctatgggaattgtttcagaagttttgcctactttttcccgaaagcctctatttggttatagcttcatagtgttttctggtgcaggtattggatttatgggatggtttgtatggagccatcatatgtttactgttggcctaggccctgcagcaaatactgcatttacaatttctacaatgtttattgctgtacccactggtgtaaaaatatttaactggatggcaactctttggggtggatctataagatttactacctctatgctattttcaattggttttatagcaatgtttaccattggaggactgtctggtgtaactcatgctgtatcaccgtctgatgcacaacaacaagatacttattatattgttgctcacttccattatgttctatttggaggagcaatttttgcaatattttctggactatatttttggtggccaaagttttttggatatttcttgaacgataaaattggaaaagttaactttatactgatgatgatagggttcaatcttcaatttgctcctatgcactgggttggtcttgatggtatgcctagaagaatatatacatatgcagataatatgggttgggaagcctctaatttagctgctactctaggtgggtttatcattgctgtgtctgtttcattatttatattcaatgtaatctattcaatgaaaaaaagagtagttgcctccggtgacccatgggatggaagaactttagaatggtctatatcatctcctccacctcactataatttcgcaaaacttcctgaagtgactcatatagatgattggtggtataaaaaatatcctagtcttttagaaggtagccctaaagggtctctagaacctaaagctaaagttgaagacacttcaaaagttaatgaagatgatattcatctacctgatttatcatactatcctctttttataggtataggattgtcgatagcagctttaggtgtaatgtacacttatgctttagtaacaataggattaatactagttttttggggttctataggttggtcgactgagcctgtaaatgaacctcatgataaaagccatcattag

SEQ ID NO: 225749 - DNA, 721 bp, Unknown
  Bacterial polypeptide expressing nucleotide sequence isolated from the Sargasso Sea
aatgtcagcagaaaaaaaacatgattatcatttagtagacccaagtccttggcctatttacgtttcattatcatgtttagtattggcattagggtctgtttattatcttcatacagatgtttcatggggaatgtatcttggttttgctcttttaatttatggggcctacatgtggtttagagatgttgttatcgaagctgaacatcaaggtcatcacacgcctgtagttcaaattcaccacagatatggaatgacattgtttattgcttctgaggtaatgttctttgttgcatggttttgggcatattttgatgtaagtttatttccaaatgaatttgtgggaaatgtttggccaccaaaagatattaaaacttttgatccttgggacattccattaatcaatacattaatattattattatcaggtacgacagttacatggtctcaccatgctcttttagaagatgatagaaaaagttttattcaaggtttgtggttaactgttattttagggttttgttttactcttttgcaaatttatgagtatcagcatgcatcattttctttttcagatcatatttatggatcagtattttacatggcaacaggatttcatggtttccatgtgcttgttggaactatatttttagccgtatgtttgtttagaggtaagagaggccattttaataaagatcaccattttggatttgaagctgcagct

SEQ ID NO: 225750 - DNA, 577 bp, Unknown
  Bacterial polypeptide expressing nucleotide sequence isolated from the Sargasso Sea
tatgagttacggagaatcagttagtcacgatcacgatcaccacgatcacaagcctggctttataaaacgctggtttttctcaactaatcataaagatattggaactttatatataatttttgctttaattgcaggcttgataggaggcttcttttctctgcttatgcgagctgaattagctgctccagggttagatgttgtcgctgatggtcaggcttggaatgttatcattaccgcgcatggactgctaatggtattctttgtagttatgcctgcactgattggtggatttggtaattggtttgtccctatcatgattggggctcctgatatggcctttcctagaatgaataattttagcttttgggttcttgtgccagctttagttcttttagtagtatctgcaacaattgggacaggtgctggtacaggttggacgatttatccaccattatctaacaaactcgggcacgcaggtccttctgttgatatggcaatctttgcattacatttagctggagcttcctcaatattaggggctgtgaatttcataacgacaattttaaatatgagaact

SEQ ID NO: 225751 - DNA, 567 bp, Unknown
  Bacterial polypeptide expressing nucleotide sequence isolated from the Sargasso Sea
ttagaggttcaatgacttttgaaactccaatgttattttcaataggattcgtcacgctctttactataggtggcttttcaggactaatgcttgcaatagttccagccgactttcaataccacgatacctattttgtggtggctcatttccattatgttttagtgcctggcgcactctttggaataatagcgggagcctattactggctacctaaatggacaggatatatgtatgacgaaacattaggtaagttgcatttttggcttactttcatctccgttaacataactttcttcccaatgcattttgtaggattagcaggaatgcctcgaagatatcctgattacgctctccaattcgctgattttaacgcgatgattagcgtaggggcgttcatgtttggaattactcagttgttattcttattcatagttataaaaaccatacgatcaggaaaacaagctaaacccgaagtttgggaaggtgcaggagagttaggtttagaatggaccttgagctcacctcctccttatcactcttttactgttcaaccggaagttaagtagg

SEQ ID NO: 225752 - DNA, 511 bp, Unknown
  Bacterial polypeptide expressing nucleotide sequence isolated from the Sargasso Sea
tatgagtgcgcaagcccacgcagaccacggtgctccaataagttttgttcgccgttggctgtactctacaaatcacaaagacatcggtactatgtatctggtgtttgccatccttgccgccttcattggtgggggcatgtcgatttatatgcggatggaattgatgaacccgggtgtccaatatatggacagcggtcatgtctggaacgtatttaccacggcacatggtttgattatggtgtttttcgtggttatgcccggcctgattggtgggtttggcaactggtttgtgccaatcatgatcggtgcgccggatatggcatttccgcggatgaacaatatcagcttttggctgttgccgcccgcatttgtgttactgcttctctcggcggtaatggatggcggtgccggtgttggctggaccatttatccgccattgtcatcgacagctggatcgcccggcatgtcgatggatttggcgattttctcacttcatctggctggggtctca

SEQ ID NO: 225753 - DNA, 631 bp, Unknown
  Bacterial polypeptide expressing nucleotide sequence isolated from the Sargasso Sea
aatgagttctaaagatcaaaaacatgattatcacttagttgacccaagtccgtggccaatctatacatcttttgctactttaataactgcaatagggtcagtctactattttcactcgaaagttatgtgggcaatgttacttggttttgctctcttaatttatggagcgtatatgtggttcagagatgttgttaatgaggccgaacatcaaggtcaccataccccagtagttcagatacatcaccgttatggaatgacattgtttatagcatctgaggtaatgttttttgttgcttggttttgggcttactttgatgctagtctgtatccaagcgcttttgtcggtggagtttggccgcctaaagatattgaagtttttaacccatgggatattccattaatcaacacactggttttattactatctggaacaactgttacatgggctcatcactctttattagaggatgatagaaaaggttttatccaaggtttatgggcaacagttctactaggtttcttttttactcttcttcaaatatatgaatatcaacatgcaagttttgatttttcaggacatatttacggtgcaacattttatatggccacgggctttcatggatttcacgtg

SEQ ID NO: 225754 - DNA, 1633 bp, Unknown
  Bacterial polypeptide expressing nucleotide sequence isolated from the Sargasso Sea
aatgagcactgcagctacacatcacgatcatcacacaccaactggatggaaaagatgggcatattcaacaaaccataaagacattggaactatgtatttaatctttgcaattattgcaggattaattggaactgcattttcagttttaatgagaatggaacttatgcatccaggagatggcattctaggtggagactatcatttatataatgtcttagtaactggacatggattaataatgattttctttatggtaatgccagcaatgataggtggatttggaaattggtttgtaccaataatgatcggtgcacctgatatggcatttcctagaatgaacaatatttcattttggctattacctgttgcatttattttgttattatcatcaatttttgtagatggacctcctggagctcaaggtgttggaggaggctggacaatttatccgccactatcatccaaaacaggtcaaccaggtcctgcaatggacttagcaattttaagtctgcacgttgctggagcatcttcaattcttggagcagtaaatttcataactactattttgaatatgagaactccgggaatgacacttcacaagatgcctttatttgcatggtcaattttagtaacagcatttttattattattatcattaccagtattagcaggagcaataacaatgctcttaacagacagaaattttggaaccgcgttttttgacgctcaaacaggtggagaccctacactgtttcaacatttattttggttttttggtcatccagaagtttacatattaatattaccaggatttggaatgataagtcatatagtttcaacattttcaaaaaaaccagtttttggatatctaggtatggcttatgcaatggttgcaattggctttgtaggatttgtggtttgggcccatcatatgtacacggttggcttagatacagatactaaagcttattttcttgcagcgacaatgattattgcagttccaacaggaattaaaattttttcatggattgcaacaatgtggggaggatcaatttcttttaaaacgccaatgctttgggcacttggatttatatttttatttactgtaggaggtgtaactggggtagtgcttgctaatgcgggtgttgatacagctttacatgatacgtattacgttgttgcacactttcattacgttctatctttaggtgcagtttttgcaatatttgctggatggtattattggtttggaaaaatgtcaggatatcaatattcagagtggatgggcaaactccacttctggttaacctttataggtgtgaacttaatattcttccctcaacactttttaggtttagcaggaatgccaagaaggtatgcagattatccagatgcatttgctgattggaactacatttcttcggtcggctcatatatatcagtagccggtgtagtagtatttctaataaatttattatattcatttattactaagaaagcctcatcatctaatccatggggagaaggggcaacaacacttgagtggacagtgccatcaccgccaaatttccacacttttgatgaactacctaaattggacgtttacgaaggagcagagaaatctaaatcttaa

SEQ ID NO: 225755 - DNA, 793 bp, Unknown
  Bacterial polypeptide expressing nucleotide sequence isolated from the Sargasso Sea
aatgtctgcaaaagatcaaaaacatgattatcatttagtagacccaagtccttggccgatttatacttcattcgctacgttaataactgctattggtaccgtctattattttcactcaaaagttatgtgggctatgctttttggttttgctcttttaatttatggtgctttcatgtggttcagagatgttgttaacgaagcagaacatcaaggacatcatactccagtagttcaaattcatcataggtatggaatgacattattcattgcgtctgaagtcatgttttttgttgcatggttttgggcttatttcgatgcaagtctttttccaggtgaatttgtaggcaatgtttggcctccaaaagatattgaaacttttgatccttgggacattcctttaattaacactttagttttgttgttgtcaggcacaacggtaacatggtcccaccacgctttacttgaagatgatagaaaaagttttattcaaggtttgtggctcacagttatattaggtgcatgtttcactgcattgcaaatttacgagtatcagcatgctagcttcaatttctctggtcatatatatggtgcaacattttatatggcaactggtttccatggttttcatgttttagttggaactatatttttagcagtatgtttatggagaggtaaacttggtcattttaacaaagatcatcatttcggttttgaagcagcggcatggtattggcattttgttgatgtagtttggctatttttatttgcagcaatatatatttggggcagttaa

SEQ ID NO: 225756 - DNA, 1591 bp, Unknown
  Bacterial polypeptide expressing nucleotide sequence isolated from the Sargasso Sea
aatgcgtttacaattgggttttccagggttagctccattcatgacagcagaacactattatcaatttgtaactatgcacggaatgataatggtagtttattttttaaccgcactctttctaggtggatttggaaattatttaataccattgatggttggtgcaagagatatggtttttccatatcttaacatggtaagtttttggagtttttttgttgcagttggagttttattagcaagtttttttgttccaggtgggccgacaggatcaggttggacactttatcctcctcaagcaattttagaaggtacaccaggatcgggatacggaataatgttaatgtgcatatccctaattttatttgtagctggatttacaatgggtggtttaaattatttaattaccgtcctgcaagctagaacaagaggaatgacgttaatgagaatgcccttaacagtttggggaatttttactgcaacagtattagcgatgttagcgttcccagcgttattggtgggtgcattaatgatgagtttagacaatgttcttggaacaagtttttttatgccaaccattttaaaagcaggagaagttttagaatatggtggtggaagtcctattctttttcaacatttattctggttcttcggacaccctgaagtttatatagttgcactacctgcatttgggataatttcagatttaatttctgttcatgctagaaaaaatatatttggttatagaatgatggtttgggcaatagttggcataggtgcactaagcttttttgtatgggcacaccatatgtatgttagcggaatgaatccttggtttggattcttttttgcaactaccacccttataatagccgttcccacagcaatgaaagtctataactggattttaactctttggagaggaaatattcgacttaatactgttatgttatggtgtttaggttttattgttacttttgtaaacggtggaattacaggaatttttttaggaaatgtcagcgtagatgttccgttatcagatacttattttgttattgcacactttcatatggtaatgggtattgcgccactcatggtaattatgggagctgtttaccactggtttcctttagtagctggaagattcttagacgaaaaattaggaaaatggcatttctggttaacttttttaggcgcttattcaatttatttcccaatgcactatttaggatttattggagtaccaagaaggtattttgaaatgtatgacagcccatatgttacatcggctgtaggaatgaatgaatttattagtttagcagcatttatagttggagctgcacaatttattttaatttacaatattattaaaactttaaaaacagggaaacccgcaggacataatccttggcaagcatgttcactagaatggctaacaccaaaagttccacctgaacacggtaattggggagatagacttccggtagttcatagatgggcttatgattttagtgttcctggagcaaaagaagattttataactcaaactacaccaccaagtgaagtgacacacacgaaagtagaaaaaacataa

SEQ ID NO: 225757 - DNA, 790 bp, Unknown
  Bacterial polypeptide expressing nucleotide sequence isolated from the Sargasso Sea
aatgtcagctcagaaaaaacatgattaccatttagtagatccaagcccttggcctatatatacttcattttcatgtttggttttggcgctaggatcagtttattattttcattacgatgtatcttggggcatgtatcttggtttagctttagttatttacggagcatatatgtggtttagagatgttgtaattgaagcagaacatcagggtcatcacactcctgtagttcaaatacatcatcgatatggtatgacattatttatcgcttcagaagtaatgttttttgtagcttggttttgggcatattttgacgtaagtctctttccaaatgaatttgttggaaatgtttggccaccaaaagacatagaaacattcgatccttgggatattccattaattaatacattaattttactactatcaggaacaacagtcacttggtctcatcatgctcttctagaggatgatagaaaaagctttatacaaggattatggttgactgttattttaggattttgttttactcttctgcaaatttatgaatatcaacatgcatcattttctttttcagaccacatttatggatccgtattttacatggctacaggatttcatggcttccatgtgcttgttggaactatatttttagccgtatgtctatttagaggtaaaagagggcacttcaacaaagatcatcattttggttttgaagcagcagcttggtattggcactttgttgatgttgtgtggctatttttatttgctgcaatctatatctggggaagttaa

SEQ ID NO: 225758 - DNA, 1222 bp, Unknown
  Bacterial polypeptide expressing nucleotide sequence isolated from the Sargasso Sea
tatgagctcagttattgaaagccaccacgatgatcatcatcacggccctgcaaaaggcttgatgcgatggcttcttacaactaaccataaagatataggtacattatatctatggtttagttttgcaatgttcttaattggcggagcaatggcaatggttattagagccgagcttttccagccggggatgcagatagtagaacctgaattctataatcagatgcttacacttcatgggcttattatggtttttggtgcggtaatgccagcctttgttggattggctaactggcttgtgcctatgatggttggagctccagatatggccctcccacgattgaataatttaagtttttggctactcccgtttgcctttggtatcttactctcttcattatttatggaaggtggagcaccaaattttgggtggacattctatgcacctctatctacaacgtatgcacctccgagtgtaaccttttttattttctcagttcatattatgggagcgtcctcaattatgggatccattaatgtaatcgtaaccataatgaatatgagagccccaggaatggatttaatgaagatgccactatttgtatggtcttggttaattaccgcttatcttcttattgctgttatgccggttctagctggtgcagtaactatgatgttaatggatatccattttggcacaagtttctttaatgcagctggaggtggtgatccggtattatttcagcacattttttggttctttggtcatcctgaagtttatattatgattttgccagcctttggaattgtctctcacattattgagaccttctccagaaagcagttatttggttattcatctatggtttgggcgatgctgtctattgcaattctttcttttgttgtttgggctcatcacatgtttactgttggtatgccattagcagccgagcttttctttatgtgggcaacgatgcttatagcagtcccaaccggtgtcaaggtatttaactgggttgcaacaatgtttaaaggttccattacatatgagactccaatgctgtttgcaatctcctttgtagttctctttacaattggcgggttttcaggacttatgctctcaatagtacctgctgattttcaatatcatgatacttattttgtagtggctcatttccattacgtcctagtgcctggatcaatattctcaataatggcagcagtt

SEQ ID NO: 225759 - DNA, 1207 bp, Unknown
  Bacterial polypeptide expressing nucleotide sequence isolated from the Sargasso Sea
gttgagtgcgttcggtgccggcaatcctagcgctccgaactttggctggaccttctacgcgccgttgtccaccaagtacgggccggcgtccaccgatttgttcattctgtcggttcacatgatgggtatctcctccatcatgggtgctatcaacgtggtggtaacggtcttcaatatgcgtgcccctggcatgacattgatgaagatgccgctgttcgtatggacttggctaatcactgccttcctgctgatcgcggtcattccagttctggccggtgcggtaaccatgatgctgacggaccgtcatttcggaaccagcttcttcgatgctgccggtggtggtgatccagtattattccagcacgtgttttggttcttcgggcatcctgaagtgtacatcatgatcctgccgagcttcggtatcgtgtcagcgatcattccggcgtttgctcgcaagccgttgttcggttacgcctccatggtgtacgccaccgcgtccattgccctgttgtccttcgtggtatgggcccaccacatgttcactgtaggtatgccgttggcgggcaccttattcttcatgtacatgaccatgttgatctctgtgcctaccggcgtgaaggtgttcaactgggtggccaccatgtggcgcggatctatgaccttcgaactgccaatgaagtgggcgattgcctttgtggtgttgtttacctgcggcggtctgtccggtttgatgctggcgattaccccggtagacttccagtatcatgatacctatttcgtggtggcgcatttccactacgtattggtgactggcgcgatcttctccatttacgctgctgcctattattggctgccgaagtggtctggcatcatgcctaacaaaaccctgggtgaactacacttttggaactccttgatttccgccaacctgctgttcttccccatgcactttgtgggcttggcgggtatgccgcgtcgttacgctgactacgcgctgcagtttgcggactacaacttctggatttccattggtggcttctggttcggcttgtcgcagctgtttttcttggcggtggctgtgctgtgtgccctgaagaaaggcgagaaagccccggctaaaccatgggaaggtgcggaaggtctggaatgggaagtgccgtctccggcgccgttccatacctttgagaccccgccggtggtgaagtaa

SEQ ID NO: 225760 - DNA, 1636 bp, Unknown
  Bacterial polypeptide expressing nucleotide sequence isolated from the Sargasso Sea
tatgacaacagttgcttcacaagatcattcacatcaccatccaacaggatggaaacgatgggcttattcaacaaatcataaagatataggtacaatgtatttaatctttgcgattattgctggaataattggaactgctttttcagttttaatgagaatggagttgatgcatccaggcgatggaatactaggtggtaattatcacttatataatgttttagttactggtcacggtttgataatgattttctttatggtcatgccggcaatgattggtggttttggaaattggtttgtaccaattatgataggggccccagacatggcttttccaagaatgaataatatatctttttggttactaccagtgtcattcattttattactttcatcaatatttgttgatggacctccaggtgcgcaaggtgtaggaggaggctggacaatctatccaccactgtcatctaaaactggtcaaccaggtcctgcaatggatttagcaatacttagtcttcatatagctggagcttcttcaatactcggtgctgtaaattttattactacgatattaaatatgagaacaccaggaatgactttgcataagatgccattgtttgcttggtcaattcttgtaacagcctttttattacttttatctttaccagttttagctggagcaataacaatgttgttaacagacaggaattttggaacagcattctttgatgcgcaaacaggtggagatccacttttatttcaacatttattttggttctttggtcatccagaggtttatattttgattttaccaggttttggaatgataagtcatattgtttcaactttttctaaaaaaccagtttttggatatttaggtatggcttatgcgatggtcgcgattggtattgttggttttgtagtttgggcacatcacatgtatacggtaggattgaacactgatacaaaagcatattttcttgcagcaacaatgatcattgctgttcccacaggaataaaaattttctcttggatagcaactatgtggggtggctctatatcttttaaaactccaatgatgtgggctcttggttttattttcttatttacagttggaggtgttactggagtagttctagctaacgctggtgttgatacagccttacacgatacatattatgtagtagcacactttcattacgtgttgtctctcggagcagtttttgcaatttttgcagggttctattattggtttggaaaaatgtctggttacgaatattctgaatggcttggacaactacatttttggctaacatttattggagtaaatttaatatttttccctcaacattttttaggactagctggtatgccaagaagatatgctgattatccagatgcttttgcagattggaactatatctcttcaattggatcatatatttcagtggtaggattagcagtatttttaattaatttagcttacgcatttatgaagaaaaaagcagcagctcaaaatccatggggcgaaggcgcaactactttagagtggacagtaccatcaccaccaaactttcatacatttgaggaattacctaaagtaaatgagtacggggaagcagagaaaacaagcacataa

SEQ ID NO: 225761 - DNA, 790 bp, Unknown
  Bacterial polypeptide expressing nucleotide sequence isolated from the Sargasso Sea
aatgtcagctgaaaaaaaacatgattatcacttagtagacccaagtccttggcctatttatgtttcattttcatgtttagtattggcattaggatctgtttattaccttcatacagatgtttcatggggaatgtatcttggttttgctcttttaatttatggagcctacatgtggtttagagatgttgttattgaagctgaacatcaaggtcatcatacacctgtagttcaaatccaccacagatacggaatgacattgtttattgcatctgaagtaatgttctttgttgcatggttttgggcatattttgatgtgagtttatttccaaatgaatttgttggaaatgtttggccaccaaaggatattgaaacttttgatccttgggatattccattaatcaatacactaattttattattatcaggtacgacggttacttggtctcaccatgctcttttagaagatgatagaaaaagttttatccaaggtttatggttaactgttattttagggttttgttttactcttttacaaatatatgagtatcaacatgcatcattttctttttcagatcatatttacggatcagtattctacatggcaacaggatttcatggtttccatgtgcttgttggaactatatttttagccgtatgtttgtttagaggtaagagaggtcattttaataaagatcaccattttggatttgaagctgcagcttggtattggcattttgttgacgttgtgtggttatttttgttcgctgcaatctatatttggggaagttaa

SEQ ID NO: 225762 - DNA, 1015 bp, Unknown
  Bacterial polypeptide expressing nucleotide sequence isolated from the Sargasso Sea
atgtatacacaaacagaatcacacgacgatcatcatacaccaactggttggaagcgttgggcttattcaactaaccataaagacattggaacaatgtatctaatatttgcaattattgcaggtgtgattgggactgcattctcagttttaatgagaatggaattgatgcatccaggtgatggaattttaggtggaaattatcatttatataacgttttagttactggtcatggtctgataatgattttcttcatggttatgccagcaatgataggtggttttggtaactggtttgttccaattatgataggtgctccagatatggcgtttccaagaatgaataacatttcattctggttattacctacatcttttattttattaataatgtctattttcatggatggccctccaggccaaacaggagtaggaggaggatggacaatatatcctccattatcatctactgcaggtcaacctggtccagctatggattttgcaattttaagtttacacttagctggtgcttcttcaattttaggtgcagtaaactttattactacgattttaaatatgagaactcctggtatgacacttcataaaatgccattatttgcttggtcaattttagtgacagcctttttattacttttatctttacctgttctagctggagctatcacaatgcttttaactgatagaaattttggaacagcattctttgatgcacaaactggtggtgatccagtattgttccaacacttattttggttctttggtcacccagaagtttatattttaattttacctggttttggaatgattagtcatattgtttcaacattttctagaaaaccagtttttggatatttaggaatggcttacgcaatggttgcaattggaatagttggttttgttgtttgggctcaccacatgtatacggttggtttaagtacagatacaaaagcatactttttagctgcaacgatgatcattgcagttccaaccggtataa

SEQ ID NO: 225763 - DNA, 1585 bp, Unknown
  Bacterial polypeptide expressing nucleotide sequence isolated from the Sargasso Sea
atgagctcagttattgaaagccaccatgatgatcatcatcacggtcctgcaaaaggcttaatgagatggcttcttacaactaaccataaagatataggtacattatatctatggtttagttttgcaatgttcttaattggcggggcaatggcaatggttattagggccgagcttttccagcctgggatgcagatagtagaaccagagttctataatcagatgctcacacttcatggacttattatggtttttggagctgtaatgccagcctttgttggattggctaactggcttgtgcctatgatggtcggggctccagatatggctctcccacgattaaataatttaagtttttggctacttccatttgcgtttggtattttactctcttcattatttatggaaggaggagcaccaaattttggatggacattctatgcacctctctctacaacgtatgcacctccgagtgtaacctttttcattttctcggttcacattatgggagcttcatcaattatgggatctattaacgtaatcgtaaccataatgaatatgagagctccaggaatggatttaatgaagatgccactctttgtatggtcatggttaattactgcttatcttcttattgctgttatgccggttctagctggtgcagtaactatgatgttaatggatatccattttggtacaagcttctttaatgcagctggcggcggtgatccggtattatttcagcatattttttggttcttcggtcaccctgaagtttatattatgattttgccagcctttggaattgtctctcacattattgagactttctccagaaaacagctgttcggttattcatctatggtttgggcgatgctatctattgcaattctttcttttgttgtttgggctcatcacatgtttacagttggtatgccacttgcagccgagcttttctttatgtgggcaacgatgcttatagcagttccaactggagtgaaggtgtttaactgggttgcaacaatgttcaaaggttccatcacttatgaaactccaatgctatttgcaatttcctttgtagttctctttacaattggtggattctcaggacttatgctttcaatagtacccgctgattttcaatatcatgatacttattttgtagtggctcatttccattacgtcctagtgcctggatcaatattttcaataatggcagcagtttattactggataccaaagtggacaggcaacatgtatgacgaaagaatgggcagattgcatttctggctttcgtttgtgggagtaaatgtcacatttttccctcagcattggattggattagcaggaatgccaagaagatatccggactatgctcttcagtttgcagactggaatatggtttcaactgcaggagctttcttatttggagcttctcaaatcctgttcttatttattgttctaaaaacagtaatgggtggaaagaaagctactccacaagtttgggaaggagcaagaggtttggagtggtcagttgaatcaccagcaccctatcatacgttttcaacaccacctaaagtcaattaat

SEQ ID NO: 225764 - DNA, 1196 bp, Unknown
  Bacterial polypeptide expressing nucleotide sequence isolated from the Sargasso Sea
aatgtcatcaattactgcaaattcacatcatacaccaacaggttggaagagatgggcttattcaactaatcacaaagatattggtacaatgtatcttgtttttgcaataatcgctggtttaataggttcagctttctcagttgttatgcgaatggagttaatgcaccctggcgatggaattctgggtggaaattatcatttatataatgttttagttaccgggcacggtctgattatgattttctttatggtaatgcctgcgatgattggaggatttggaaattggtttgtgccaataatgattggcgcacccgacatggcttttccaagaatgaataatatttcgttttggctgctaccagttgcttttatcttacttttatcctctattttcgtggatggtcctcctggtcaaaccggagttggcggaggatggacaatatatccaccattatcttcaaagacaggtcaaccaggtccagctatggatttagcaatattaagtttacatattgctggagcctcctcaattttgggagctataaattttataactactattttaaatatgagaactcctgggatgacattacataagatgcctttatttgcttggtcaattttagttacagcttttttattactgttgtctttaccagtgttagccggtgcaattacaatgcttttaactgatcgaaattttggtacagctttttttgaagctcaaacaggtggtgatccggttttatttcagcatttattttggttttttggtcatccagaagtttacatattaatcttaccaggctttggcatgataagtcatattgtttcaactttttctaaaaaacctgtttttggttatctaggaatggcttacgcaatggtggcgatcggagttgtaggatttgtagtctgggctcaccatatgtatacagtcggattggatacagatacaaaagcttattttttagccgctacaatgatcatagctgtaccaacaggcataaaagttttttcttggatagcaacaatgtggggaggttcaattagttttaaaacaccaatgttatgggcaattggatttattgtattattcacccttggaggagtaactggagtagttttggctaacgccggagtcgacacagctcttcacgacacatattatgtagttgctcattttcactatgtac

SEQ ID NO: 225765 - DNA, 94 bp, Unknown
  Bacterial polypeptide expressing nucleotide sequence isolated from the Sargasso Sea
cattttggttttgaagcagcagcatggtattggcactttgtcgatgttgtttggttatttttatttgccgcaatttatatttggggaagttaat

SEQ ID NO: 225766 - DNA, 1060 bp, Unknown
  Bacterial polypeptide expressing nucleotide sequence isolated from the Sargasso Sea
aatgagcacaatagtagaaacacatgatcatggacatcatggcccggcaaaaggactaactcgctggctgtttacaaccaaccacaaggatataggtactttatacctttggttcagctttattatgttgtttattggaggcggaatggctatggtcatcagggccgagttatttcagcctggtcttcaaatagtgcagcctgaattctttaatcaaatgacaacaaaccatggcttaattatggtttttggggtcataatgccggcctttgttggcctggctaactggatgttgcctatgcaaattggggctcccgatatggccttgccacgactaaataatcttagtttttggttactgccaatggcttttggaattttaatatctacgctttttatgcccgaaggtggaccaaactttggttggacgttttatgccccgctatcaacaacctacgccccttcaacggttaacttttttatattttctgttcatattatgggcgtttcttcgattcttggttcgataaatattattacaactatttttaatatgagagctcctggcatgacgttaatgaaaatgcctttgtttgtgtggagctggttaattactgcctatttactaattgcggttatgcccgttttggctggagttgtaacaatgatgttaatggacatcaattttggtaccagtttcttcaatgctgccggcgggggagaccctgttttattccagcatgtgttttggttttttggccatcctgaagtttacatcatgatacttcccgcgtttgggattgtttctcatataattgaaactttctctagaaaaccaatcttcggctattcatcaatggtgtatgcaatggcatcaatagctatattgtcttttgtggtatgggctcaccacatgttcacggttggaatgcctcttgcaggagagcttttctttatgtattcaactatgttgatagctataccaaccggagtaaaagtgtttaattgggtagcaaccatgttcaaaggttcaataacctttgaaactcctatgttattt

SEQ ID NO: 225767 - DNA, 790 bp, Unknown
  Bacterial polypeptide expressing nucleotide sequence isolated from the Sargasso Sea
aatgtcagctgaaaaaaaacacgattaccatttagtagacccaagtccttggcctatctatgtttcattttcatgtttagttttagctgttggcgccgtttactacatgcattatgaggtttcatggggaatgtaccttggatttgctttattaatttatggagcatacatgtggtttagagatgtagttattgaagctgagcatcaaggacatcatacacctgtggttcaaatacatcatcgttatggaatgactttattcattgcctctgaggtaatgttttttgttgcttggttttgggcatactttgatgtgagtctttttccaaatgactttgttggaaatgtatggccaccgaaagatatagaaacttttgatccttgggatataccattaataaatacattggttcttttgttatctggaactactgtaacttggtctcatcatgctctcttagaggatgatagaaaaggatttattcaaggattagttctaacagttatattgggagtttgttttactgctttacaagcttacgaatatcatcatgctacatttgctttttctgatcacatatatggttcagtattttacatggcaacaggatttcatggttttcacgtgatcgtgggtacaatcttcttggctgtttgtttgtggagaggaaagttaggtcactttaacaaggatcatcactttggttttgaggcggcagcctggtactggcactttgttgacgtagtttggctattcttatttgctgcgatctatatttggggaagctaa

SEQ ID NO: 225768 - DNA, 790 bp, Unknown
  Bacterial polypeptide expressing nucleotide sequence isolated from the Sargasso Sea
aatgtcagcagaaaaaaaacacgattaccacttagttgatccgagcccttggccaatttatacatcttttgcatgcttagtattagctataggtgcaattttttatatgcacaacggtatttcttgggggatgtatctaggtttggctttattaatctatggtgcttacatgtggtttagagatgttgtaattgaagccgaacatcaaggccatcatactccagtagtacaaattcatcatagatatggaatgactctattcattgcttcagaggtaatgttttttgttgcatggttctgggcttactttgatataagtttatttccaaatgaatttgttggaaatgtatggccaccaaaagatattgaaacatttgatccttgggacattcctttgataaatactttagttttattactatcaggaacaactgtcacttgggcccatcactctctattggaggatgatagaaaaggatttatacaagggttaactttaactgtaatactgggtttcttttttactttattacaagcatatgaataccatcatgctacgtttacctactcgggccatatttatggagcagtcttttatatggcaacaggttttcacggttttcacgtgattattggaacaatttttttagcggtatgtttgtggagaggaagacttggtcatttcacaaaagatcatcattttggatttgaagcggctgcttggtactggcattttgttgatgtagtgtggctatttttatttgctgcaatatatatttggggaagttag

SEQ ID NO: 225769 - DNA, 1585 bp, Unknown
  Bacterial polypeptide expressing nucleotide sequence isolated from the Sargasso Sea
tatgagctcagttattgaaagccaccatgatgatcatcatcacggtcctgcaaaaggcttgatgagatggcttcttacaactaaccataaagacataggtacattatatctatggtttagttttgcaatgtttttaattggcggagcaatggcaatggttattagagccgagcttttccagcccggaatgcagatagtagaacctgaattctataatcagatgcttacattgcatggacttattatggtttttggtgctgtaatgccagcctttgttggattggccaactggcttgtgcctatgatggttggggctccagatatggccctaccacgtttaaataatttaagtttttggctacttccatttgcttttggtatcttgctctcctcattatttatggaagggggagcgccaaattttggatggacattctatgctcctctctctacaacgtatgcacctccgagtgtaaccttttttattttctcggttcacattatgggagcgtcatcaattatgggatctattaacgtaatcgtaaccataatgaatatgagagctccaggaatggatttgatgaagatgccgctctttgtatggtcttggttaattactgcttaccttcttattgctgttatgccagttctggctggtgcagtaaccatgatgttaatggatatccattttggaacaagtttttttaatgcagctggtggcggtgatccggtattattccagcacattttttggttcttcggtcaccctgaagtttatattatgattttgccagcatttggaattgtctctcacattattgagactttctccagaaagcagctatttggttattcatctatggtttgggcaatgctgtccattgcaattctttcttttgttgtttgggctcatcacatgtttacagttggtatgccactagcagctgagcttttctttatgtgggcaacgatgcttatagcagttccaactggagtgaaggtgtttaactgggtcgcaacaatgttcaaaggttccatcacttatgagacaccaatgttatttgcaatttcctttgtagtcctttttacaattggtgggttctcaggacttatgcttgcaatagtacctgctgactttcaatatcatgatacttattttgtggtagctcatttccattacgtcctagtgcctggatcaatattttcaataatggctgcagtttattattggataccaaagtggacaggcaacatgtatgacgaaagattaggcagattgcatttttggctttcatttgtgggtgtaaatgtcacctttttccctcaacactggattggtctagctggaatgccaagaagatatccggactacgctcttcagttcgcagattggaatatggtttcaactgctggagcatttttatttggcgcttctcaaatcttattcttatttattgttcttaaaacagtaatgggtggaaagaaagcttctcctcaagtttgggaaggggcaagaggtttggagtggtcagttgaatcaccagcaccctatcatacgttttcaacaccacctaaagtcaactaa

SEQ ID NO: 225770 - DNA, 907 bp, Unknown
  Bacterial polypeptide expressing nucleotide sequence isolated from the Sargasso Sea
atgagttatcaaaaatactatgtaccagaggatagtaaatatcccatatatattgcaatagcactttttctactagtgatgggagcggccagcacaattaatgatctaggaaaacctaatagtaattccgtatatattctttattctggatttaccatttttgcaataaccttatatttttggtttagagcagtgataagagaacatattgctggcctcgatagtgctcagcttcaaaaatcctttgtatttggcatgggctggtttattttttccgaagtaatgttctttgcagcattctttggagcactgttttatgtaagaaatttttccgttccatggctcggtggagatggcgagaaaggattagctaatatgttatgggaaggttttgaagcctcatggcctgtcatgtcaactcctgatgctggatcagcatatgttcttgcagataaaaacatgagttggccaggctggggtaatgcattaaagtggttaccattgtggaacacgattgtacttcttagttcaagtgtaaccgttcactttgctcatcttgctctcaaaaatgataataaaaaaagttttaacacctggcttggtgttactgttactcttgctttgatatttgttggattacaggctgctgagtactatgaggcatatgcacattatgggttaacacttaactctggaatatatggctcaacttttttcatgttaactggatttcatggctttcacgtcatgatgggtggatttatgcttgctgtgatgctttccagatcagttttttataatcactttgatcctcataaccattttgggtttgaagcagcgtcttggtattggcactttgttgatgtggtttgggtaatgttatttctttttgtatacatactttaag

SEQ ID NO: 225771 - DNA, 538 bp, Unknown
  Bacterial polypeptide expressing nucleotide sequence isolated from the Sargasso Sea
tttatttacagttggaggagtaactggtgtagttctagcaaacgctggagtagatactgcattgcatgatacttattatgttgtagctcacttccactatgtattatctttgggagctgtttttgcgatatttgcaggcttctattattggtttggtaaaatgtcagggtatgaatattctgagtggatgggacaacttcatttttggttaactttcataggtgtaaatttagttttctttccacaacacttcttaggattagctggaatgccaagaagatacgctgattatccggatgcattcgctgattggaattatatttcttcaatcggttcatatatttctgtagttggcttagtggtatttttcgctaatttaatctacgcttttgcaaaaaagaaaaaagcagcacaaaacccatggggagaaggggccacaacattagagtggacagttccatcaccaccaaattttcatacttttgacgaactgccgaagtttgaagattatgaaggcactgaaaaatctagtagttag

SEQ ID NO: 225772 - DNA, 1786 bp, Unknown
  Bacterial polypeptide expressing nucleotide sequence isolated from the Sargasso Sea
atgtctgacgctataattccagaaagagaagttgaagaacaggaactctaccatgctaaaagctggtggacagaaaaagttttttctcaagatgcaaagattattgggatacaatatttttgtacagctacagctattgcgttaattggtttagttttatcttggtttatgaggatgcaaattggttttcctggtttatcaattattagtgaaagtttctattatcaagccataactatgcatggcatgataatggtagtttatttcctaaccgctttatttcttggaggattcggtaattatttgattcctctaatggttggggcgagagatatggtatttccttatttaaatatgataagttattggacctttttattggcttgtttagttttagttgccagtttctttacacctggaggacctacaggtgctggatggacgctttatcctcctcaagcaatattgggtggaactcctggtcaagagagtggaattattcttatgttaatttccttatccatatttatcgttggtttcacaatgggcggtttgaactatattgtaaccattcttcaagcaagaactagaggtatgacacttatgcgtatgcctctcgcggtatggggtattttcacagctactgtgttggctatgtttgcattcccagctcttcttgtgagtgcaataatgatgattttagacaagacacttatgacaagtttctttatgccagcattagtagagatgggtgagcaattaagttatggtggcggtagcccaatcttattccaacacttgttttggttctttggtcatcctgaagtatatattgttgcccttccagcctttggaatagtttctgatgttttatcagtccattctagaaaaaatatttttggataccgtatgatggtgtgggcaattgttgcaattggagcattaagtttcattgtttgggctcatcatatgtatgttagtggtatgcatccatattttgggtttttctttgcaactacaacattaattatagccgtgccaacagccataaaggtatacaattgggttttaacactttggagaggaaatatttccctaactgttccaatgttattttgtatatcgtttataataacattccttaatggaggtttgacaggtttattccttggcaatgttattgttgatgttcctttatcagatacatattttgttgttgcacactttcatatggtgatgggtattgctcctgttcaggttgtttttgccgcaatatatcactggttccctctaatgactggtcggatgtacaatgaaacacttggaagattgcatttttggttcacctttttagggtcatatttgatttatttcccaatgcactatctaggattgattggagtgcctcgaaggtattatgagatgggtcaaacagaagccctatacactcaatctgcggctgatttaaatgtcttcatcacattaactgctctagtaacaggttttgcacagatctttttctttataaatgtattctggagtagaaaatatggtgttcctgctgagaaaaacccttggcaagcaaactcactagaatggagaaccccttctatgcctcctggacatggtaattttggtaaagagcttccagttgtttacagatggccttacgactttaatgttccaggcgcaaaagatgattttgttccacaagatgtaccaaattcagatgttgaactggctgaaggttttgagggtacagaaataaaggctgaaaaaacatgag

SEQ ID NO: 225773 - DNA, 790 bp, Unknown
  Bacterial polypeptide expressing nucleotide sequence isolated from the Sargasso Sea
atgtcagctgaaaaaaaacatgattatcacttagtagatccaagtccttggcctatttacgtttcgttttcttgcttagtattagctataggtgctgtgtattacatgcattcagatgtttcatggggaatgtatcttggattagctcttttaatttatggcgcatatatgtggttcagagatgtggtcattgaagcagaacatcaaggtcatcataccccagtagtccaaattcatcaccgttatggaatgactttatttatcgcatctgaggtaatgttttttgtagcttggttttgggcttactttgacgttagtcttttcccaaatgattttgtaggaaacgtatggccacctaaagatattgtgacttttgatccttgggatatacctttgattaacacattagttttactattatcaggtacaacagtcacttggtctcaccattcattattagaaggtgacagaaaaggttttatacaaggattagtgctaacagtaattcttggggcattttttacagcacttcaagcatatgaatatcatcatgctacatttgctttttcagatcatatttatggttctgttttttacatggcaacaggctttcatggcttccatgttatagttggaacaatttttttagcagtatgtttatggagaggaaaattaggtcattttaccaaagaccatcattttggttttgaagcagctgcatggtactggcattttgttgacgttgtttggttatttttgtttgctgcaatatatatttggggaagttaac

SEQ ID NO: 225774 - DNA, 921 bp, Unknown
  Bacterial polypeptide expressing nucleotide sequence isolated from the Sargasso Sea
tatgagcgcagtaatagaaaatcatcatgacgaccatcatcatgggcctgctaaaggcataacaagatggttgtatacaacaaatcataaggatataggaactctttatttatggttcagttttgccatgttcttaattggtggtgcaatggcaatggttattagagcagagcttttccagcctggaatgcaaatagttgaacctgaattttataatcaaatgattacgctgcatggattgataatgatttttggaggggtaatgcctgcttttgttggattagcaaactggttagttccaatgatgattggagcaccagatatggctttaccaagaatgaataatttaagtttctggatactgccttttgcattctttattttattatcatcattatttatggagggcggagctccaaactttggatggacgttttatgctccgctttcaacaacctatgctcctccaagtgttaccttttttatattttctgttcatataatgggagcatcttcaataatgggctcaattaatgttgttgtcactattatgaatatgagagctcctggcgtagatttaatgaaaatgcctttgtttgtatggtcgtggttaattaccgcgtatttattaattgcagtgatgccagttcttgccggtgctgtaacaatgatgttaatggatattcattttggaacaagtttctttaatgcagctggaggtggagatccagttttatttcagcatatattttggttctttggtcacccagaggtatatattatgattttgcccgcctttggtattgtttctcatattattgaaacattttctaggaaacagctctttggatattcatcaatggtctgggcgatgctttcaattgccatactctcttttgtagtttgggcacatcacatgtt

SEQ ID NO: 225775 - DNA, 1594 bp, Unknown
  Bacterial polypeptide expressing nucleotide sequence isolated from the Sargasso Sea
gatgagcacactgactcaagatcaaattgccgcccatgatgaacaccatcacggtgcacctaaaggcatcatgcgctggttactcaccaccaaccacaaggacattggcaccctgtacctatggtttagtttcataatgtttttaaccggtggtgcgatggccatggtgatccgcgccgaactctttcagcccggattacaactcgttgagcctaacttcttcaaccagatgactacagtacatgggttaatcatggtattcggcgctgtgatgccagcctttaccggactagctaactggttaatcccgatgatgattggtgcgccggatatggcgcttccacgtatgaacaactggagtttttggatcctgcccttcgcctttgcaatattgttgagttcattgtttatggaaggcggcggccctaactttggttggaccttctacgcaccactctcgaccacttatagccctgacagcacagcattatttgtattctcgatccatatcatggggataagttcgatcatgggtgccatcaacgtgatcgtaaccatagtcaacctgcgcgctcccggcatgacgtggatgaagttaccgctgttcgtctggacctggctgattaccgccttcttgctgatcgccgttatgcccgtactcgctggcgccgtcactatggtgttaaccgataagttttttggcacaagcttcttcgaggcggcaggcggcggcgatcctgtgatgttccagcatatcttctggttcttcggtcaccccgaagtctacatcatgattttgccatcattcggcattatctctgccatagtcccggctttcagccgtaaaccattattcggctatgcatccatggtgtatgccacggcgagtattgcgattctgtccttcctcgtgtgggcgcaccatatgttcaccaccggtatgccagtgtttgcagagttattttttatgtactgcactatgctgattgccgtgccgactggagtaaaagtgtttaactgggtagcgaccatgtggcgcggctcactgagttttgaaaccccaatgttgttcgcggtggcctttattattctgttcactattggcggcttctctggcctgatgctcgccatcacgccagccgacttccaataccacgatacttactttgtggtggctcacttccactacgtgttggtcactggtgcgattttctccatcatggcagcggcctattattggctgccaaaatggaccggccatatgtacagcgaaaagctcggccagtggcatttttggtgttcggtgatttcggtcaacgtgttatttttcccgatgcatttcttaggtcttgcgggtatgccaaggcgtattcccgattactcgattcaatttgccgatgtaaatcaaatcgtgtcgattgggggttttgcctttggcctatcacagctgatcttcctcgtgctggtgattaagtgtattcggggcggtgaaaaggcgcccgccaaaccttgggaaggcagcgaaggcttagagtggaccctacccagccccgcgccctatcactctttcaccacgccacccgaggtgaaataa

SEQ ID NO: 225776 - DNA, 1033 bp, Unknown
  Bacterial polypeptide expressing nucleotide sequence isolated from the Sargasso Sea
cacaaagatattggaaccatgtatctaatatttgcaattattgcaggtgtgattggtacagcattctctgttttaatgagaatggaattgatgcatcctggtgatggaattttaggtggaaactatcatttatacaatgtcttagtgactggtcatggcttgattatgatattctttatggtgatgccagcaatgattggtggatttggaaattggtttgttccaattatgattggtgcacctgatatggcattcccaagaatgaataacatttcgttttggttattacccacatcattcatattattaataatgtcaattttcatggatggccctccaggtcaaacaggtgttggtggtggatggacaatatatcctccattgtcatccacagctggtcaaccaggtccagcaatggattttgcaattttaagtttacacttggctggagcttcttcaattttaggtgcagtaaactttattactacaattttaaatatgagaacacctggcatgacacttcataaaatgccattatttgcttggtcaatattagttactgctttcttattattgttatcattaccagttttagcaggagcaattacgatgcttcttacagataggaattttggaacagctttctttgatgcacaaactggaggagatccagttttattccaacatttattttggttttttggtcacccggaagtttatattttaattttaccaggttttggaatgatcagtcatattgtttcaacattttctagaaaaccagtttttggatacttaggaatggcttatgcaatggttgcgattggaatagttggttttgttgtttgggctcaccacatgtatacagttggtttgagtacagataccaaagcatattttttagctgcaacaatgatcatcgcagttcctactggtattaaatattttcttggatcgcaaccatgtggggtggatctatttcgtttaaacaccaatggtttgggcattaggatttatatttttatttaccggt

SEQ ID NO: 225777 - DNA, 1564 bp, Unknown
  Bacterial polypeptide expressing nucleotide sequence isolated from the Sargasso Sea
tcatgatcataacccagggtttataaaaagatggtttttttctaccaatcataaagatatcggaactctctacataatatttgccatactagctggtttagttggaggtttcttttcattattaatgagagctgaattagctgctccaggcttagatgttgttgctgatggtcaagtttggaatgtaattatcactgctcatggtttgttaatggtattttttgttgtaatgcctgcattaataggtggctttggaaactggtttgtcccattaatgattggtgcacctgatatggcttttccaagaatgaataattttagtttttggatacttgtgcctgctttggttttattagttgtttcagcaacaataggaactggtgctggtacagggtggacaatctatcctccactctcaaataaacttggtcacgcaggaccttctgttgatatggcgatttttgctcttcatttagcaggtgcttcctcaatcttaggtgcagttaattttataacaacaatacttaatatgagaacgcctggaatgactttgcataagatgcctctctttgtatgggctatgttaattacagcattcttacttttattagctgttcctgttttagctggagcaattacaatgcttctaactgatagaaactttggtacaacattttttaatcctgcaggtggtggagatccagttcttttccaacacttattttggttctttggtcatccagaagtttacatcatgatattaccagcttttggaattgtaagtcaggtcatttctactttttcaagaaaaccagtatttggatatctaggaatggtgtatgctatgatatctataggctttataggctttattgtttgggctcatcatatgttcacagttggtatgagtgcagatttaagagcatattttatgctagctacaattattattgctgttccaacaggtataaaaatctttagttggattgcaactatgtggggtggatcacttacatttgaaactccaatgttgtttgcaattggttttgttttcttatttacactcggtggtgtaacaggtgttattttggccaatgctggaatagatacagtaatgcatgatacgtattatgttgttgcacacttccattatgttctgagtatgggggctatgtttggaattttcgcaggtatttactattggtttggaaaaatgtctggaagaaaatataacgaattcttaggtaaactacatttttggttattttttattggggtaaatgtaactttctttcctcaacattttttaggacttgctggtatgcctagaagaattccagattatccagacgcttatgcaggatggaatcttgtatcaacttatggttcttacatctcttttgctgctactttgatatttcttttcgcaattgtgtatgctttactttatggaaagaaagaagttgcaaatccttggggagagggagctgatactcttgaatggacactgtcttcacctccaccattccatcagtttgagactttacctaaattcaaaggataa

SEQ ID NO: 225778 - DNA, 109 bp, Unknown
  Bacterial polypeptide expressing nucleotide sequence isolated from the Sargasso Sea
ttcaataaagatcatcactttggatttgaggctgcagcgtggtactggcattttgtggacgtggtttggttgtttttatttgcagctatatatgtttggggtagttaaa

SEQ ID NO: 225779 - DNA, 1618 bp, Unknown
  Bacterial polypeptide expressing nucleotide sequence isolated from the Sargasso Sea
tatgacaatatcaattgatccacaaaaaaataataatgaaagcctccaacctgtaggctggcttagatactttagttttagccttgatcataaagtaattggaatacaatacttagtctgcggttttcttttttatttaataggcgggaccttagcgagcgctataagaattgaactagctagtccaatgtctgattttatgccaagagatgtttataaccaagttttaactctgcatggaacaataatgatattcctttggatagtgccagtagtaaacggcgcttttgggaattatttaattccattttatgtaggtgcgagagatatggcattcccaagattaaatgccgtagctttttggttaattcctccttcaggtttgatgctggtagcaagctatttcgttgagggtgcggctcaggctggatggactgcttatccacctttgagcataactactcctcaatctggacaaattatttggattctgagcgttctattacttggaggcagttctatatttggtggaataaactttatcgcgaccattatcaaattaagaaggccaggattaaaacttatgcaattgccaatgtattgttgggcaatgcttggaacaagtctattagttgttttgtcaactcctgttttagcaggcactttaattctacttagcttcgatatcatcgctaatacaggttttttcaatcctgttttaggtggcaatgtcgtagtttatcagcatttattttggttttattctcatccagctgtatacattatggtccttcctgcctttggtttagttagtgaaatacttcctgtacatgctagaaaaccactttttggatatacaacaatggttttttcaataatggggatagtagttttaggtttagttgtttgggcgcatcacatgtttacgagtggaacgcccccttggatgagattgttctttactattgccacagcatttattgctgttccaacaggtataaaatttttcaattgggttgcaacattatggggaggtaaaatttccatcaatagtgcaatgttattctcttgcggatttattataaattttgtttttggaggtattacaggagttgctttggcacaggtacctttcgatattcacgtacatgatacctatttcgttgtagcccattttcattacatagtttatggagggactgtttttattattttctcttcaatttatcattggttccccaaagtaactggaaaaatgctcaatgaaaaattaggaattttacattttatcattacctttattggatttaacttgtgctttgctcctcaacattggcttggtttaaatggaatgccaagaagagttgcagaatatgatcctcaattccagttcgttaatcaaattagtagccttggagctcttttgatggctatcagtacaattccttttttaattaatgtattccttagtgtgagaaatggaaaagatgctggagataacccttggaatgctcttacacctgaatggttaacatcttctccacctccagttgaaaattgggaaggagaagctccattagttgaagaaccttatggttatggtaaagaaatttcttaa

SEQ ID NO: 225780 - DNA, 370 bp, Unknown
  Bacterial polypeptide expressing nucleotide sequence isolated from the Sargasso Sea
tatgatcaactttattaaccgttggatcttttcaacaaaccacaaagacattggaacactttatcttatttttggagcattctctggagttttaggatcatgtttttctgtccttatccgtatggaacttgctcaaccggggaaccaaattcttgcagggaaccatcagttatataacgttcttattacagcacacgcttttctgatgattttttttatggttatgccagctcttattggaggttatggaaattggtttgtaccaattatgattggtgcaccagaccatggcattcccacgactaaacaacatcagtttttggttgttgccaccttcactaattcttctattaagcagcgcactcgttga

SEQ ID NO: 225781 - DNA, 1036 bp, Unknown
  Bacterial polypeptide expressing nucleotide sequence isolated from the Sargasso Sea
catgaatatgagagcaccaggcgtaaccttaatgaagatgccattatttgtatggtcatggttaataactgcatatttgttaatagctgtaatgcctgttttggccggagcagtaacaatgatgttaatggatatccattttggaacaagtttctttaatgcagctggtggcggagatcctgttctctttcaacatattttttggttctttggccatcctgaggtttacataatgattttgccagcctttggtatcgtttcccatatcattgagactttttctaggaaacaattatttggatattcttcaatggtttgggctatgctttcaattgcaatcctttcttttgtagtatgggctcaccacatgtttacagttggtttgccattagcagctgaaatattttttatgtgggcaactatgttgatagctgtgcctactggtgtaaaagtatttaattgggtagcgactatgtttagaggatctctaacatttgaaacgcctatgctttttgcagttgcatttgttgttttatttactattggaggattatcaggattgatgcttgctattgttcctgctgatttccaatatcatgatacatattttgttgttgctcattttcattatgttttggttcctggagcaatattctctatcatggccgctgtttattactggattccaaaatggtctggaaatatgtatgacgaaagacttggtaaacttcatttttggctttcatttataggtgtaaacgtaacattctttccacaacattttattggtttagctggaatgccaagaagatatcctgattatgctctaatatttgctgactggaacatggtttctagtattggagcatttttatttgggttctctcaattactatttttatttattgttatcaagactgtgatgggtggcaaaaaggcaacagatcaagtttgggaaggcgctaaagggcttgagtggacagttgcttcaccagctccatatcatacattttcaacaccaccaaaggttgattga

SEQ ID NO: 225782 - DNA, 532 bp, Unknown
  Bacterial polypeptide expressing nucleotide sequence isolated from the Sargasso Sea
ttttcaataggtttcgttttcttattcactcttggtggagtaaccggagttattcttgcaaatgctggaattgatacggtaatgcatgatacatattatgttgttgcgcacttccactatgtattaagcatgggtgctatgtttggcatttttgctggaatttattactggtttggcaaaatgacaggaaggcaatacaatgaattttttggtaaacttcatttttggctcttcttcattggagtcaatataacatttttcccgcagcactttttaggattagcaggaatgccaagacgtatacccgactatccggatgcctatgcaggttggaacttagtctcatcgtatggatcttatttatcttttggagctacgttgatctttttctttgcaatcgtatatgcactattttttggtaaaaaagctgaagctaatccatggggagaaggagctgatactcttgagtggactttgtcgtctccacctccatttcaccagtttgaaactttaccagagtttaaagaataaa

SEQ ID NO: 225783 - DNA, 160 bp, Unknown
  Bacterial polypeptide expressing nucleotide sequence isolated from the Sargasso Sea
tattggactatctttttagctgtttgtttgtggagaggaaaacttggtcactttaatcaagatcatcattttggatttgaagctgcagcatggtactggcattttgttgatgtagtttggttgtttttatttgcagcaatctacgtttggggaagctaat

SEQ ID NO: 225784 - DNA, 1137 bp, Unknown
  Bacterial polypeptide expressing nucleotide sequence isolated from the Sargasso Sea
cctttatctacaaattatccaatgtggcttattttgtttttgctattcatatcatgggagcctcgtcaattatggggtctattaatgtgatagtaactatcatgaatatgagggcacctgggatgactttgatgaagatgccactttttgtctggtcttggctaattactgcttatttattaattgcagtaatgcctgttttagcaggtgcagtaactatgctattgatggatgcatattttggcacgtctttttttgatgcagcgggtggtggtgaccctgttctttttcaacatgtcttttggttttttggtcatccagaggtatatatcatgatattgccagcattcggtattacctctcatataatttcaactttttcaagaaaaccactattcggccattcttcaatggtttatgcgatggtatctatcgcagttttatcttttgttgtttgggctcaccatatgtttaccgtaggcatgcctttagtagcagagctcttctttatgtgggccacaatgcttattgcaatccctacaggtgtcaaagtatttaattggtgcgcaactctattcaaaggatcaattacttatgagacgccaatgttatttgctattgcatttgtagttctgtttactatagggggtttttcaggccttatgcttgcaattacaccagcagattttcaatatcatgacacttattttgtggtcgctcattttcattatgttcttgtccctggctcagttttttcaataatggcagctgtttattattggttacctaaatggacagggaacatgtacgatgaaaaaatgggtagattacatttttggctctcctttattggagtaaatattacattcttcccacaacactttgttggtcttgcaggaatgcctagaagatatgcagactatgcgttgcaatttgccgagtggaatgctgtttcttcagttggtgcatttttgtttggtttatctcaacttttattcttatacattgttgtaaaaaccgtctttgctggcaaaaaggctactccacaagtttgggatggtgcagacggtcttgaatggacagtagattctccagctccttatcatacatttgatgtgcctcctaaagttaaatgag

SEQ ID NO: 225785 - DNA, 916 bp, Unknown
  Bacterial polypeptide expressing nucleotide sequence isolated from the Sargasso Sea
aatgagtggaggaagttactacgtacctgatcaaagcaggtttcctatatttatggcggtctccttatttcttctcgtaatgggtgcctctagcacaataaataacttagacgatccttctagtaactcagtttacatattgtattttggttttggatgtctttttttaacaatgtttttttggtttagacaggttattaaagagcacctggcaggcttagattcaaatcaattaaaacaatcttatgtttatggcatggcttggttcattttttctgaagtcatgtttttcgctgcattttttggagctttattttatgtaagaaccttagccgttccgtggttagcaggtgaaggttcaaaaggtgcttatatttctgctattgagctatggcctgcttttgagtcttcatggcctgttatgacaactccagatcaaggaactgagtatgatttggctgataagagtatggcatggccaggatgggaccatgctctaaagtggttacctctttggaatacgattgtgctcttaagctcatctgtaacagtccacatagctcatctcggactaaaaaaaggcaataggaaaagatttaacacttttttaggaataacagtattcttagctttaatttttgttggattacaagctgcagaatattacgaagcttacgctcattatggtctaacgttaaactctggaatatatgggtcaacttttttcatgttaacaggttttcacggcttccatgtaatgatgggaggtttcatgttggcaattatgcttggcaggtctgtttttgcaggccattttgaagaacatgaccactttggatttgaggcagcctcatggtattggcattttgttgatgttgtatgggttatgctttttttgtttgtatatattctttaa

SEQ ID NO: 225786 - DNA, 1594 bp, Unknown
  Bacterial polypeptide expressing nucleotide sequence isolated from the Sargasso Sea
atgagcacactgactcaagatcaaattgccgcccatgatgatcaccatcacggtgcacctaaaggcatcatgcgctggttactcaccaccaaccacaaggacataggcaccctgtacctatggtttagtttcataatgtttttaaccggtggtgcaatggccatggtgatccgcgccgaactctttcagcccggattacaactcgttgaacctaacttcttcaaccaaatgaccacagtgcatgggttaatcatggtattcggcgccgtgatgccggcctttacagggctggctaactggctgatcccgatgatgattggtgcgcccgatatggcgcttccacggatgaataactggagtttttggatcctccccttcgcctttgctattttactaagctcactgtttatggaaggtggcggccctaacttcggttggaccttctacgcaccactctccactacttatagccctgatagtacagcattatttgtattctcgattcatatcatggggataagttcgatcatgggcgccatcaacgtgatcgtcaccatagtcaacctacgcgctcccggcatgacatggatgaagttaccgctgtttgtctggacctggctgattaccgccttcttgctgatcgccgtcatgccagtgctcgcaggcgccgtcactatggtgttaaccgataagtttttcggtactagcttcttcgaggcggctggcggtggtgaccctgtgatgttccagcatatcttctggttcttcggtcaccccgaagtctacatcatgattttgccttccttcggcattatctccgccatagttccggctttcagccgtaaaccattatttggctattcatccatggtgtatgccacggcgagtattgcgattctgtccttcctcgtgtgggcacaccatatgttcaccaccggtatgcctgtgtttgccgagttgttttttatgtactgcactatgctaattgccgtgccgactggggtaaaagtgtttaactgggtagcgaccatgtggcgcggctcactgagttttgaaaccccaatgttgttcgcggtggcctttattatcttatttactattggcggcttctctggcctgatgctcgccatcacaccggctgacttccaataccacgatacttactttgtggtggctcactttcactatgtgttagtcaccggtgcgattttctccatcatggcggcggcctattactggctgccaaaatggaccggccatatgtacagcgaaaagctcggccagtggcatttttggtgttcggtaatttcggtcaacgtgttgtttttcccgatgcatttcttaggtcttgcgggtatgccaaggcgtattcccgattactcgattcaatttgccgatgtaaaccaaatcgtgtcgattgggggttttgcctttggtctttctcagctgatcttccttgtgctggtgattaagtgcattcggggcggtgaaaaggcgcccgccaaaccttgggaaggcagcgaaggcttagaatggactctaccaagtcccgcgccctaccactctttcaccacgccacccgaggtgaaataac

SEQ ID NO: 225787 - DNA, 1855 bp, Unknown
  Bacterial polypeptide expressing nucleotide sequence isolated from the Sargasso Sea
atgtggagcaagctaaccatcacgcttggggggcctgtagaggtgttggaggccgctgatccgttcgtagtgctgggcgtcctcatcattgtctcagcgacactactagcattcacactagtgttcgttttctacaggaaggacccagaggccttcgattgggacaacttcgcaccatggctagcagactggctgaccagcacagatcacaagaagataggcacattgtacttcgtagccgggctcttcttcctcggagtagggggaataatggctatgatcatcaggatccagctatccgttcccggtaacgacttcctgactcaggagcagtacaaccagttcttcacgctccacggtaccacgatgatcttcctagcggcaatgccgatgatcaacggattcgcgaactggatgatccccctccaactgggagcggcggacctagctcttcccaggataaacgccatgtccttctggttgcagccattcgcagccctgcttatcttcacaggggttttctcaggccatggtgctgacactggatggacaggttacgccccgtacgtagtgagcgagggagcgcactacgggaccaccatgtgggccgccgggcagataatgctggttgcttcctcgacgctgaccggaatcaacttcctcactaccatggcggtcatgagggctcctgggatggggtggatgcagatgcccctcttcagctggtctgtactagttgccaacgtgatgctgttcctctcaataccggcattcggtgtgggattgatacaagtctacctagacagggtgatcgggactgcgttctacgacatagcggccgggggagacccgttgctgtggagtcacctgttctggtacttcggccaccccgaggtctacgtcgtgatagtgccatcgttcggaatcatctccgaggtgattgcaaccagctccaggagatcggtgttcggctaccgatccatggtgtacgcgctggctgggatcggagtagtggcattcatcgtttacggccatcacatgttcacaagcggcatgagcccgacactgaggttcgtaacgatgctcacaacgatgcttgtagccgttcccacgggcatcaagatattcaactggctgatgacgatgcacgggggttccctagtctacaggacccatacactctgggctctaggcttcctggtaaccttcacacttggaggaatttcagggatgttcttcccatcaatagcaatggacacccacctgcacgagtcgtacttcgtagtcgcccacttccactacgtactagttggaggcaccgtcttcggtttcttcgccggaatctactactggtggccgaaggctacggggaagatgctcagcgagaagctcggagtcctgcacttcctaacggcattcgtctcctacaacgccctcttctggccaatgcacagactgggcgtatgggggatgacccgcaggcaccacacgtacttcgtgacgaccgaggaggccctgggatcgctcccgatggaggcggctggatggaacatgttcatcacggtctccggattcatcttcttcttctccaacttcatcatggtgttcaacatgattgtatcgtccgtaaggggcgaggatgccccggacgacccatggggagggtggtccttcgagtggatgaccagctcacctcctccaaaccacactctctacaagctcgatgacgggtcctgggggctaccgaccctgaaggatgcgaacgagcacattgcgaacgagccagggtggctctccagctggttccagaggctgatggtcgaagacgaagaaacaggggaggcgtcgcattgag

SEQ ID NO: 225788 - DNA, 1306 bp, Unknown
  Bacterial polypeptide expressing nucleotide sequence isolated from the Sargasso Sea
ccaccacaagcaattttagaaggcactcctggttcaggtgcagggatattatttatgttaatttctttatcactttttgtaataggttttacaatgggtggtttaaattatttaattacagttttacaagctagaactagaggcatgacattaatgagattacctttgactatttggggtatttttacagccacagtactagcgatgttagcttttccagctcttttagtaagttctataatgatgactttagataaggtattgggaacaagtttttttatgccaacaattattaaagcaggtgaagttttagagtatggtgggggaagtccaatattatttcaacatttattttggttttttggacatccagaagtttatattgttgctttgccagcttttggaatagtttcagacttaatatcagttcatgctagaaaaaacatctttggttatagaatgatggtatgggcaattgttggaataggagccttaagctttttcgtatgggctcaccacatgtatgttagcggaatgaacccttggtttggattttttttcgcaactactacacttattatagcagttccaacagccatgaaggtttataattggattttaactttgtggagaggaaatataagaattaatacagttatgctgtggtgtttaggtttcatagttacgtttgtgaatggtggaataactggaatctttttaggaaatgtgtctgttgatgtaccgttgtcagatacttattttgttgttgcacactttcatatggtcatgggtattgcacctttgatggttataatgggtgcgatatatcactggtttccacttgtatcaggaagacttttagacgaaaaacttggcaagtggcatttttgggcaaccttcttaggtgcttactcaatatatttcccaatgcattatcttggatttataggggtcccaagaagatattttgaaatgtatgacagcccgtacatgacttctggagtaggtttaaacgaatttattagtacagctgctttcctagttggagctgcacaattcattttaatttataatattattaaaactctaaaaacaggtaagcccgcaggtaaaaatccttggcaggctaattctttggagtggtttacatcaactgtgccaccagaacatggaaattttggagatagacttccggtagttcatagatgggcttacgattatagtgtaccaggtgcaaaagaggattatatccctcaaacaacaccaccgagcgaggttgctgataccgaggtagaaaaaacttaaa

SEQ ID NO: 225789 - DNA, 1420 bp, Unknown
  Bacterial polypeptide expressing nucleotide sequence isolated from the Sargasso Sea
tatagggcagagttatttgaaccaggtcttcagctcatggatccaataaggtataaccagcttgtaacaatgcatggtttaattatgattttcgggggcgttatgcctgcttttgtaggtctcgctaattggcttataccattacagattggcgcaccagatatggctatgcctagaatgaataacctcagtttttggttactaccgactgcttttgctatcctcctttcgacggcttttatggaaggtggaatgccaggttttgggtggacattctatgctcctttatcaaccaattatccaaatgtagcttattttgtttttgctatccatattatgggggcttcatcaataatgggctcaattaatgtaattgtaactatcatgaatatgagagcacctggaatgactctgatgaagatgcctctttttgtctggtcttggctaattactgcttatcttttaatagctgttatgcctgtcttagcaggcgcagtaacaatgttactaatggatgcatatttcggaacatctttttttgatgctgcaggtggtggtgacccagttctctttcaacatgtcttctggttttttggtcatcctgaggtttatataatgattttgcctgcatttggcattacctcacacataatttctacattctcaagaaagcctctatttggacactcttcaatggtctatgcaatggtatctatcgcagttttatcatttgttgtctgggcgcatcatatgtttacagtaggaatgccgcttgtcgcagaattatttttcatgtgggcaacaatgcttatagcaataccaactggtgttaaagttttcaattggtgtgcgacaatatttaaaggttcaattacatatgaaacaccaatgctattttcaattgcttttgttgttttgtttacaattggaggtttctcaggcctcatgctcgcaattacaccagcagactttcagtatcatgatacttatttcgtagttgcgcacttccactatgtgcttgtgccgggtgcagtattttcaataatggcagcggtttactattggttgccaaaatggacgggaaatatgtatgacgaaaaaatgggtagacttcatttctggctttcatttgcaggggtgaatattacgtttttcccacaacactttgtgggtctagcaggaatgccaagaagatatgcagattacgcactgcaatttgctgaatggaatgcagtctcttcagtaggggcattcttatttggcttatcacaacttttatttttatacatagttgtgaaaacagtatttgctggtaaaaaagctactccacaggtttgggatggtgcagatggtcttgaatggacagttgattcaccagctccctaccatacatttgacgtaccacctaaagttaaatgag

SEQ ID NO: 225790 - DNA, 469 bp, Unknown
  Bacterial polypeptide expressing nucleotide sequence isolated from the Sargasso Sea
gctattactcccgctgattttcaataccacgacacttattttgtagtggctcactttcattatgtgttagtgacaggggcggtattttctatcatggctggtgcttattactggctgccaaaatggactggcaatatgtttaatatcacgctggctaagtggcatttttggttgtcgttagtcagtgtaaatgtgctgttttttccaatgcattttgtgggtttggctggtatgcctcgtcgtattcctgattatgcactgcaatttgcagacttcaacgcaattataagtattggtggttttgcatttggtttatctcagctgttgtttgtagtggttgtttttaaatgtgcaagaggcggcgaaaaagtccctgcaaaagtatgggatggcgctgaagggttagagtgggaagttgaatcccctgcgccttaccataccttttcaacaccaccggaaattaaataat

SEQ ID NO: 225791 - DNA, 566 bp, Unknown
  Bacterial polypeptide expressing nucleotide sequence isolated from the Sargasso Sea
aatgatgtgggcattaggttttatttttatgtttacggttggtggggtaactggagtagttttagctaatgcaggagtagatacagcaatgcatgatacttattacgttgtagctcactttcattatgttctctcattaggagctgtatttgcaatatttgctggtttctattattggttttcaaaaatgtccggttacgaatattcagagtggctaggtcaattacatttttggttaacttttattggtgtaaatttgattttctttccacagcattttttaggattagcaggtatgcctagaagatatgctgattatccagatgcatttgctggctggaattatatttcttcaataggatcctatatagcagttgctggcttagctgtattcttcgtgaacttgatttacgcttttgcaaaaaagaaagctgcagcacagaatccttggggtgaaggagcaacaactttagagtggaccgttccatctccaccaaatttccacacttttgaagaattaccaaagtttgtagatgatcaagagactaggaaatctcatagctagg

SEQ ID NO: 225792 - DNA, 706 bp, Unknown
  Bacterial polypeptide expressing nucleotide sequence isolated from the Sargasso Sea
atgtatacacaaacagcttcgcacaacgatcatcatacaccaacaggttggaaacgttgggcttattctacaaatcataaagacataggaacaatgtatttaatttttgcaattgttgcaggagttattggaactgcattttctgttttaatgagaatggaattaatgcatccaggcgatggaattttgggtggaaattatcatttgtacaacgtgttagtgacaggtcatggtttaataatgattttcttcatggtaatgccagccatgataggtggttttggaaattggtttgttccaattatgattggtgcacctgatatggcattcccgcgaatgaataatatttctttctggttactacctgtttcattaacattattaatattgtcaatttttgctgatggccctccagggcaaactggagttggaggtggatggacaatatatcctcctttatcgtcaaaagctggacaacctggtcctgcaatggatttagcgattttaagtttacacttggctggtgcttcatcaattttaggagctgttaattttattacaacaattctaaatatgagaactcctggaatgactttacacaagatgccattgtttgcttggtcaattctagtaacagcctttttattgttattgtctttaccagttctagcaggagcaaataacatgctattaaccgataggaact

SEQ ID NO: 225793 - DNA, 1430 bp, Unknown
  Bacterial polypeptide expressing nucleotide sequence isolated from the Sargasso Sea
actttacaatgtattaattactgctcatgcgttcttgatgatttttttcatggtaatgccagcattaattggtgggtatggtaattggttcgttcctattatgattggtgctccagatatggcgtttccacgtctaaacaatattagtttttggctcctcccgccatctcttcttcttttattaagttctgcacttgttgaagtaggagcagggacaggttggacagtttatccaccgttaagccatattacaagtcactctgggggatctgtagacttagctattttcagcttacacgtatcaggtgcaagtagtattttaggggcaattaattttattactactatttttaacatgcgaggacctgggcttttaatgcatagattacctctttttgtttggagcgtcttaatcacagcttttcttctcttgttgtcactaccagtattagcaggagcaattacaatgctattaacagaccggaacttttcaacaagcttttttgacccaagtggaggtggtgatcccattttatatcaacatcttttttggttttttgggcaccctgaagtttatattttgattttacctgcaatgggtattgtatctcatgtaattatgacattcagccgaaaaagtatctttggtcaaattggtatgatttatgcgatgttaagtattggtttgcttggttttatcgtttgggcacaccatatgtatacggttggtttagacgtagatacgcgagcatatttcactgcggcaactatgattattgctgtaccaacaggaattaagatctttagctggattgctacaatgtggggagggtcaattcatcttcgcacgcctatgctctttgctatcggttttattttcttatttactgttggtggacttacaggcgttattcttgcgaatgctggaattgatattgctttacatgatacatattacgttgttgcacattttcactacgtattatctatgggagcagtttttggtttatttgctggattctattattggattggtaaaatttcagggtaccaatatcctgaaacattaggtcaaatccatttctggctcttttttattggggtaaatttgacattttttccaatgcattttttaggattagcggggatgcctcgccgtattccagactaccctgatgcatttgcacaatggaatgtcgtatgtagttatggatcatatttatctatcttagcaagtgtcttttttttctatgttgtgtttaaaacactcacaggaaatgatgtagtggatgaaaatccatggcaattcgaagaagaagaatcatctgtaatgtcgcttgaatggacggtagcatctccaccaccatttcatacattcgaagaaattccggctgtaaaggaaacgcaatttccacaattacaaaaatagg

SEQ ID NO: 225794 - DNA, 676 bp, Unknown
  Bacterial polypeptide expressing nucleotide sequence isolated from the Sargasso Sea
tcttacgtctatggtatggcttggtttattttctctgaagtaatgttttttgctgcattctttggcgctttattttatgttagaacctttgcagtcccatggttagcaggagaaggtgaaaaaggaataggaatagctgcaacagaattatggcaaggatttgaatcaacatggcctgttattactacgcctgaccaaggagaagcttacgagttagctaagaaaagcatggcatggcctggatgggatcatgctttaaaatggctaccactttggaacacaatagttcttttaagctctagtgttactgtccatttcgcacatcttgctttaaaaaatggtaatagaaaaaactttaatatattactaggcgttactgtttttcttgctctaatttttgtcggtcttcaggcagcagaatactatgaagcatacgcacattatggtttgacattaaattctggtatttatgggtcaaccttctttatgttaacgggctttcatgggttccacgtaatgatgggcgggcttatgcttacaataatgttggcaaggtctgtttttgcaggtcattttgaagatcatgatcacttcggatttgaagccgcgtcatggtattggcattttgttgatgtggtatgggtgatgttgtttttattcgtttatatactttaat

SEQ ID NO: 225795 - DNA, 1249 bp, Unknown
  Bacterial polypeptide expressing nucleotide sequence isolated from the Sargasso Sea
attaaataatttaagtttttggctacttccatttgcctttggtatcttgctctcctcgttatttatggaagggggagctccaaattttggatggacattctatgctcctctctctacgacgtatgcgcctccaagtgtaaccttttttattttctcggttcatattatgggagcgtcatcaatcatgggatctattaatgtaatcgtaaccataatgaatatgagagctccaggaatggatttaatgaagatgccactctttgtatggtcttggttaattactgcttaccttcttattgctgttatgccagttctagctggcgcagtaaccatgatgttaatggatatccattttggaacaagcttctttaatgcagctggtggcggtgatccggtattattccagcacattttttggttcttcggtcaccctgaggtttatattatgattttgccagcatttggaattgtctctcacattattgagactttctccagaaagccgctatttggttattcatctatggtttgggcaatgttgtctattgcaatcctttcttttgttgtttgggctcatcacatgtttacagttggtatgccattagcagctgagcttttcttcatgtgggcaacaatgctaatagctgttccaaccggagttaaagttttcaattgggttgcaacaatgtttaaaggctccattacatatgagacaccaatgttattcgcaatttcctttgtagtactttttacaattggcggattctcaggacttatgcttgcaatagtgcctgctgactttcaatatcatgatacttattttgtggtagcccatttccattatgtgttggtacctggatcaatattttcaataatggccgcagtttattactggatacctaaatggacaggtaatatgtatgacgaaagaatgggtagattacatttttggctttcatttgtgggcgtaaacgtcaccttttttcctcaacactggattggtctagctggaatgccaagaagatatccggactacgctcttcagtttgcggactggaatatggtttcaactgctggagcatttttgtttggtgcttctcaaattttatttttatttatcgttcttaaaacagtaatgggtggaaagaaagctactcgtcaagtttgggaaggagcaaaaggcttagagtggtcagttgaatcaccagctccttatcatacgttctcaacaccgccaaaagtaaactaa

SEQ ID NO: 225796 - DNA, 1477 bp, Unknown
  Bacterial polypeptide expressing nucleotide sequence isolated from the Sargasso Sea
tctttggtttagctttgccatgttcttaattggcggtgcgatggctatggttataagagctgaattatttcaaccaggcatgcaaatagtcgagcctgagttttataaccagatgataactcttcatggactgataatgatatttggcggggtaatgcctgcattcgttggtcttgcaaactggctagttccaatgatgattggtgcgcctgatatggccttacccagaatgaataatttaagtttttggattttgccttttgcgttttttgtcttactttcttctttatttatggaaggtggagcacctaactttggctggactttttatgctcccttatcaacaacatatgcaccaccaagtgtaactttctttatattctccgttcatataatgggagcttcatctatcatggggtcaataaatgttgtagtcactataatgaatatgagagctcctggtattactttaatgaagatgcctttatttgtttggtcctggttaataacagcatatttattgatagcagttatgcctgttttagctggcgctgtaacgatgatgttaatggatatccattttggaaccagcttctttaatgctgctggaggaggagacccagtattatttcaacatattttttggttttttggccaccctgaagtttacatcatgatccttcctgcctttgggattgtctctcacattattgaaactttctcaaggaagcagctttttggctattcttctatggtatgggcgatgctgtccattgcaattctatcatttgtggtctgggcccatcatatgttcacagtaggtatgccgttagctgcagaaatattctttatgtgggcgactatgctaattgctgtgccaactggtgttaaggtttttaactgggtggcaactatgttccgtggctcaataacatttgaaacgcctatgctatttgctgtttcattcgttgtactttttacaattggcggtctatcgggattaatgttggcaattgttccagctgacttccagtatcatgacacctattttgtagttgctcattttcattatgttttagtgccaggcgcaatattttctatcatggctgctgtctattattggataccaaaatggtgtggaaatatgtatgacgaaaggcttggaaagcttcatttttggttatcgtttattggtgtaaatgtaactttcttccctcagcattttatcggtttagctgggatgccaagaagatatccagactatgctctacagtttgctgattggaatatggtttctagtgttggcgctttcttatttgggttctctcagcttttatttttattcatagttgttaaaactgtaatgggtggaaaaaaggcaacacctcaagtttgggaaggtgcaaaaggtcttgaatggactgttgcatcacctgctccttatcatacattttcaacaccacctaaggttgattaa

SEQ ID NO: 225797 - DNA, 565 bp, Unknown
  Bacterial polypeptide expressing nucleotide sequence isolated from the Sargasso Sea
tgttcaaattcatcatagatatggaatgactttatttattgcttcagaggtaatgttctttgttgcatggttctgggcttactttgatataagtttgtttccaaatgaatttgttggaaatgtatggccaccaaaagatattgaaacatttgatccttgggacattcctttgataaatactttagttttattattatcaggaacaactgtcacttgggcccatcactctttattagaagatgatagaaaaggatttattcaagggttaactttaacagtaatccttggtttcttttttacattattgcaagcatatgaataccatcacgctacttttacttactcaggccatatttatggagctgtattttatatggcaacaggttttcatggttttcacgttataattggaacaatatttttagcagtatgtttgtggagaggaagacttggacattttactaaagatcatcattttggatttgaagcggctgcatggtactggcattttgttgacgtagtgtggctatttttatttgctgcaatatatatttggggaagttaa

SEQ ID NO: 225798 - DNA, 1128 bp, Unknown
  Bacterial polypeptide expressing nucleotide sequence isolated from the Sargasso Sea
ttatcccaaatgttgcattctttgtatttgctgtacacataatgggaatttcttcgatcatgggctcaattaacgtgatagtaactattatgaatatgagagctccaggcatgacgctaatgcagatgccattatttacatggtcttggctaattacagcttatttattaattgcagtaatgccagttcttgcaggtgcagtgactatgttgcttatggatgcatattttggaacttcattctttgatgccgctggcggaggagatccagttctctttcaacatatattttggttttttggacatcctgaagtttatataatgattcttccagcctttggtattacatcacacataatatcaacgttttcccgaaagccactttttggacatgcttctatgatatatgcgatgtcatcaatcgcgatactatcatttgttgtttgggctcatcacatgttcactgttggaatgcctttagccgctgagctattcttcatgtgggcgacgatgctaatagccattccaacaggtgttaaagtttttaattggtgcgccacaatatttaaaggctcaattacatatgaaacgccaatgcttttcgcaattgcctttgttgttttatttacaataggagggttttcaggcctcatgttggcaattactcctgcagactttcagtaccatgatacttactttgttgtagctcattttcattatgtgctagtgccaggctcagttttttcaattatggcagcagtttatttctggcttccaaaatggactggaaacatgtacgacgaaaaattaggaaaattacatttttggctttctttcataggcgtgaatgtaactttcttcccacagcattttgtaggtcttgctggtatgccaagaagatatgcagattacgcattacaatttgctgaatggaacgctatctcctcagtaggagcattcttattcggcttctctcaacttttattcttatacatagtattaaaaacaatatttgttggtaaaaaagcaactccacgagtatgggatggtgccgaaggccttgaatggactgtagattcacctgccccttatcacacattcgaaacaccaccgaaaatcaatggctaag

SEQ ID NO: 225799 - DNA, 1840 bp, Unknown
  Bacterial polypeptide expressing nucleotide sequence isolated from the Sargasso Sea
aatgtcagaggattttaacgataacaaaacaatacaagctcaatcttcagaaactatttctggaggaggtgcaggtataactccggatatggattatgtaagaccagcagaagttggagatcaagatttataccatggccatagtttcataacaaaatggattttttgccaagatgcaaaagttatcggcgtacaatattttcttttagctacatttactggaataattggtttaattctttcttggttaatgcgtttgcaattaggatttccaggattagctccttttatgactgcagaacattattatcaatttgttactatgcatggaatgataatggtagtttattttttaaccgcactctttctaggtggatttggaaattatttaattccattgatggtaggagcaagagatatggtctttccatatcttaatatggttagtttttggagtttttttgtagcggttgcagttttgctagctagctttttcgttccaggaggaccaacaggttcaggatggacgctttatcctcctcaagcaattttagaaggaacccctggttcaggttatggaataatgttgatgtgtatatctctaattttattcgtagcaggatttactatgggtggtttaaactatttgattactgttcttcaagctagaacaagaggaatgacattaatgagaatgcctttaacagtttggggaatttttacggctacagtattagcaatgttagctttcccagcattattggtaggtgcattaatgatgagcttggacaatgttcttggaacaagctttttcatgccaaccatattaaaagcaggagaagttttagaatatggcggaggaagtcctattctttttcaacatttattctggttcttcggacacccagaagtttatatagttgcactacctgcatttggaataatttcagatttaatttctgttcacgctagaaaaaatatatttggatacagaatgatggtttgggcaatagttggtataggtgcactaagcttttttgtatgggcacaccatatgtatgttagtggaatgaatccttggtttggattcttctttgcaactaccactctcataatagccgttcctacagcaatgaaagtttataactggatcttaacgctttggagaggaaatattagacttaatactgttatgttatggtgtttaggttttatagtgacttttgtgaatgggggaattacaggaattttcttaggaaatgttagtgttgatgttccattgtcagacacatacttcgtaatcgcgcacttccatatggttatgggtatagcgccacttatggtaattatgggagctgtttaccattggtttccattagtagcaggaagattcttggatgaaaaattaggcaaatggcacttctggttaactttcttgggagcttattcaatttatttcccaatgcactacttaggatttattggagtaccaagaagatattttgaaatgtatgatagtccatatgttacatctgctattggaatgaatgaatttattagtttagcagcatttatcgttggtgctgcacaatttattttaatttacaatattattaaaactttaaagacagggaaacctgcaggacataatccttggcaagcttgttctctagaatggctaacaccatcagtgccacctgagcatggtaactggggggatagacttccaacagttcatagatgggcttatgactatagtgttcctggagcaaaagaagattttataacacaaactactcctccaagtgaagtgacacatacgaaagtagaaaaaacataa

SEQ ID NO: 225800 - DNA, 1450 bp, Unknown
  Bacterial polypeptide expressing nucleotide sequence isolated from the Sargasso Sea
aatgtcagaagattttaacaataataaaacaatacaggctcagtcctcagaaactatttctggtggaggtgcaggcgtaacacctgatatggattacgtaagacctgcagagatacctgatcaagatttataccatggacatagttttattactaaatgggttttttgtcaggatgctaaagttattggagtacaatattttcttacggcagtatttacaggtataattggtcttattctttcttggttgatgcgtttacaattaggttttccaggattagcaggctttatgacagccgaacactactaccaattcgttactatgcacggaatgataatggttgtttattttttaacagcactttttcttggaggttttggtaattatcttattccattaatggttggagcaagagatatggtttttccatatgttaatatggttagttactggatgttttttgttgcagtcggagttttaatggctagtttttttgttccaggtggaccaacaggttcgggatggacactttatcctccacaagctattttagaaggaactccaggatcaggtatgggaatactcttaatgttaatttctttatctctatttgtaattggatttacaatgggtggtttaaattatttaattactgttttgcaagctcgtacaagaggaatgacgttgatgagaatgccattaaccgtttggggtatttttacagcaacagtattagcaatgttagcttttcctgcacttttagtaagctcaataatgatgacattagacaaggttttaggaacaagtttctttatgcccacaatattaaaagcaggcgaagtattagaatacggaggaggaagtcctattcttttccaacatttattctggttttttggtcaccctgaagtttatatagttgcattaccagcttttggaattgtatctgatttaatatctgttcactctagaaaaaatatatttggttatagaatgatggtttgggccattgtaggtattggagctcttagtttttttgtttgggctcaccacatgtatgttagcggaatgaatccatggtttgggtttttctttgctactacaactctaatcatagctgtcccaactgctatgaaagtttataattggatactaactctttggagaggaaatattaggctgaacactgttatgctatggtgtctaggttttattgtaacatttgtaaatggtggtataacaggaatttttttaggcaacgtaacagtagatgttccattgtcagacacatatttcgtaattgctcactttcatatggtgatgggtattgctccacttatggtaataatgggagcagtttatcactggtttccattagttgcaggcagaatgttagatgaaggtttaggaaaatggcacttttggttaactttcttgggcgcttattca

SEQ ID NO: 225801 - DNA, 1440 bp, Unknown
  Bacterial polypeptide expressing nucleotide sequence isolated from the Sargasso Sea
tatgtcagacgaatacgaaaataaatcaggttaccaggctcaatcttcagagacgatttcaggtggagggtctggaataactcctgatatggattatgtaagacctgctgaaaaccctgaacaggatttatatcatgcgcatagttttctagaaaaatgggttttttgtcaggacgcaaaagttataggtgttcaatattttttaacagctgttttcacaggtatagttggattaattctttcgtggttaatgagattgcaattaggcttcccaggacttgctggtttcataacagctgagcattattatcagtttgtaacaatgcatggaatgataatggtggtttattttcttacagcattatttctcggaggatttggaaattatttaattccactgatggttggtgctagagatatggttttcccatatgtgaacatgttgagcttttggatgtttttcgtagcagttatggttttgatggcaagtttcttcgttccaggaggtccaacaggttcaggatggaccttatacccaccacaagcaattttagaaggtactccaggctcaggtatgggaatacttttaatgctaatttcattatctttgtttgtcattggttttacaatgggggggctaaattatatgattacaatacttcaagccagaacaagaggaatgactttgatgagaatgccacttacggtctggggaatatttacagctacagttttagcaatgttagcttttcccgctttgttagttagttcaataatgatgacattagataaagtgattgggactagtttctttatgcctacaattttaaaggctggagaggtcttggaatatggaggtggtagtccgatactttttcaacacttattctggttttttggtcacccagaggtatacatagtagctcttcctgcatttggtattgtttcagatttaatatctgttcatgcaagaaaaaacatttttggatacagaatgatggtttgggcaattgttggtattggagctttaagtttctttgtctgggcgcaccatatgtatgttagtggaatgaatccttggtttggtttcttttttgcttcgactactcttatcattgcagttccaaccgccatgaaagtttataactggattctaactctatggagaggaaacataaggatcaatactgttatgctttggtgtttaggatttattgtaacttttgtaaatggtgggattacagggatatttttaggtaatgtttcagttgatgttcctttatctgatacttatttcgtagtagcccattttcatatggtaatgggaatagcaccacttatggttataatgggtgcagtttatcactggttccctttagttgctggaaaaatgctaaacgaaaaaaaaggcaaatggcacttttggacgacatttctagg

SEQ ID NO: 225802 - DNA, 1840 bp, Unknown
  Bacterial polypeptide expressing nucleotide sequence isolated from the Sargasso Sea
tatgtcagacgaatacgataataataaatcataccaggcgcaatcatcagaggttttagatggttcagctggatcaattaatcccgatatggattatgtaagaccagccgaaatacctgaacaagatttatatcatgcacatagttttatagaaaaatggattttttgtcaggatgctaaggttattggtgttcaatactttttaacggcagtattcactgggatcgtaggattaattttatcatggttaatgagactacaacttggttttcctgagttagcaggtttcatgacagctgaacattattatcaatttgtgactatgcatggaatgataatggtagtttacttcttaactgcactatttcttggaggctttggaaattatctaattccacttatggtaggagcaagagatatggttttcccatatgtaaatatgcttagcttctggatgttttttgttgcagttgcagttttaatggcaagtttctttgttccaggcggaccaacaggagcaggatggacattatatcctcctcaaacaattctagagggaaccccaggatctggcacgggaatacttctaatgcttatatctttatctttatttgtaattggtttcacaatgggtggactaaattatatgattactattcttcaagctagaactagaggaatgactttaatgagaatgcccttaacagtttggggtatatttacagcaactgtacttgctatgttagcattcccagcactactagttagtgcaataatgatgacattagataaggttctacaaacaagtttctttatgccaacaattttaaaagcaggagaggttcttgaatacggtggtggaagcccaattctcttccaacacttattttggttctttggacaccctgaggtttatatagttgcattgcccgcatttggaatagtttctgacttaatttctgttcatgctagaaaaaatatttttggttatagaatgatggtttgggcgatcgtaggtattggaggtttaagtttcttcgtatgggctcaccacatgtatgttagtggaatgaatccttggtttggatttttctttgcaacaaccacattaattattgcagttccaaccgccatgaaggtttataactggatactaactttatggagaggaaatattagaattaatactgtaatgttatggtgcttaggatttatcgtgacttttgtaaatggaggaattactggaatatttttaggaaatgtttcagttgatgtcccattatctgatacatattttgtagtagcacacttccatatggttatgggtattgcaccactaatggttattatgggggcagtttatcattggttcccattagtagctggaaaaatgctaagtgaaacattgggtaaatggcacttctggatcactttcttaggagcttactcaatatacttcccaatgcattacttaggttttattggagttccaagaagatattttgaaatgtatgatagtccatatatgacatctacagttggaatgaatgaatttataagtgttgcagcatttatagtaggtgcagcacaatttattttagttttcaatattattaaaacattaaaaacaggaaaaaaagctgaacagaacccttggaaagctaattcacttgaatggtatacttctactgttccaccagaacacggtaactttggtgaaagacttccagttgttcacagatggccttacgattttagtgttccaggagcgaaagatgattttattccacaaacaactgctccgagtgaagtagcaaatactgaagtagagaaaacttaa

SEQ ID NO: 225803 - DNA, 698 bp, Unknown
  Bacterial polypeptide expressing nucleotide sequence isolated from the Sargasso Sea
cactcctttgaatcctgtggcactgttgatggcccgggcatccgttttattaccttctttcagggctgcctgatgcgctgcctgtattgccataaccgcgacacgtgggatacgcacggcggtaaagaagttaccgttgacgaattaatgaaagaggtggtgacctaccgccactttatgaacgcctccggaggcggcgtgacagcgtctggcggcgaagctatcttgcaagctgaattcgtacgtgactggttccgggcctgtaaaaaagaaggtattcatacttgtctggatactaacggttttgttcgccgctacgatccggtgatcgatgagctgctggaagtcaccgacctggtcatgctcgatctcaaacagatgaacgatgaaatccatcagaatctggtgggtgtgtctaaccatcgtacactcgagttcgcgcgttacctgtccaacaaagacatcaaagtgtggatccgctatgttgtcgtacctggctggtctgacgatgacgactccgcacaccgccttggcgaatttacccgcgatatgggcaacgttgaaaaaatcgagctgctgccttaccacgagctgggcaaacacaaatgggtggcaatgggcgaagagtacaaactggatggcgtcaaaccgccgaagaaagagaccatggagcgcgtgaagggtattctcgagcaata

SEQ ID NO: 225804 - DNA, 702 bp, Unknown
  Bacterial polypeptide expressing nucleotide sequence isolated from the Sargasso Sea
gcacagtggatggtccaggcatacggtttatcacctttatgcagggctgtttaatgcgctgtcagtattgtcataaccgtgatacttgggatcttgatggtggcaaagaagtacaggtcgacgagttaatgagccaaatcattagctaccgccccttcctcgatgccagcaacggcggtgtgaccgccagcggtggcgaagccatattacaggcggagtttgtcgccgaactctttaaagcctgtaaaaaagaaggcattcatacctgtttagataccaacggctttgtgcgtaagtacacgccagtgattgatgagctactcgataataccgatctggtgttgctcgatatcaaacaaatgaatgacgataaacacattgaactgactaaggtcagtaaccacagaacgctgcaatttgccgagtatctcgccaaacgcaatcagcctacctggatacgttatgtggtcgtgggtggatttaccgacgatgaagcctcggcattacagctggccgaatttatcaagccaatgaaaaatattgaaaaagttgaactcctgccctaccacgaactgggtaaacacaagtgggaagcgatgggagaaacctatcaactcgatggcgttgcaccaccgagtcgcgacaccatggaaaaaattaaagccgtgtttagctcacaggggattaatgcggtgtattaag

SEQ ID NO: 225805 - DNA, 726 bp, Unknown
  Bacterial polypeptide expressing nucleotide sequence isolated from the Sargasso Sea
aatggcagttaccggtcggatccactcagtggaatcctttggcacagtggatggtccaggcatacggtttatcacctttatgcagggctgtttaatgcgctgtcagtattgtcataaccgtgatacttgggatcttgatggtggcaaagaagtacaggtcgacgagttaatgagccaaatcattagctaccgccccttcctcgatgccagcaacggcggtgtgaccgccagcggtggcgaagccatattacaggcggagtttgtcgccgaactctttaaagcctgtaaaaaagaaggcattcatacctgtttagataccaacggctttgtgcgtaagtacacgccagtgattgatgagctactcgataataccgatctggtgttgctcgatatcaaacaaatgaatgacgataaacacattgaactgactaaggtcagtaaccacagaacgctgcaatttgccgagtatctcgccaaacgcaatcagcctacctggatacgttatgtggtcgtgggtggatttaccgacgatgaagcctcggcattacagctggccgaatttatcaagccaatgaaaaatattgaaaaagttgaactcctgccctaccacgaactgggtaaacacaagtgggaagcgatgggagaaacctatcaactcgatggcgttgcaccaccgagtcgcgacaccatggaaaaaattaaagccgtgtttagctcacaggggat

SEQ ID NO: 225806 - DNA, 820 bp, Unknown
  Bacterial polypeptide expressing nucleotide sequence isolated from the Sargasso Sea
atgtctgtcattaatcggatccccgctgtcgaagtcagcgccaccgccgctgaaaccagtgtgaccgccgatgcatccggggtcattggccggatccattccgttgaaacctgcggcaccgtcgatggccccggaatacgcttcatcgtgttcatgcagggctgcctgatgcgctgcaagtactgccacaaccgcgacacctgggacactcagggcggccgcgaggtgacagtgccggagttgatgagcgacatcaccagttatcgtcacttcatgaatgcctcgggcggcggcgtcaccgcctccggtggcgaagccatgctgcagcaaaatttcatcgccgaactgttcgccgcctgcaaggagaagggcatccacacctgcctcgacaccaacggtttcgtgcgccactacgacgagcagctcgacaaggtgctcgacaataccgatctggtgctgctcgacatcaagcagatcaacgacgacaagcacattccgctgactcacgtcagcaacaagtacaccctggagtttgcccgttatctggccgccaagggcaagaccatgtggatccgctacgtggtggtgccgacctggtcggacgatgacgagagcgccgaagggctcggccagttcatcgccgaactgggcgagtgcgtcgagaaggtggagctgctgccctaccacgaactcggcaagcacaagtgggacgtactgggcgacacctatgatctcaacgggatcaagccgcccagcaaggagaccatggaccgcgtccagggcatcctcgccaagtaccacaacaacgtaaaatactgat

SEQ ID NO: 225807 - DNA, 742 bp, Unknown
  Bacterial polypeptide expressing nucleotide sequence isolated from the Sargasso Sea
aatggcagttaccggtcggatccactcagtggaatcctttggcacagtggatggtccaggcatacggtttatcacctttatgcagggctgtttaatgcgctgtcagtattgtcataaccgtgatacttgggatcttgatggtggcaaagaagtacaggtcgacgagttaatgagccaaatcattagctaccgccccttcctcgatgccagcaacggcggtgtgaccgccagcggtggcgaagccatattacaggcggagtttgtcgccgaactctttaaagcctgtaaaaaagaaggcattcatacctgtttagataccaacggctttgtgcgtaagtacacgccagtgattgatgagctactcgataataccgatctggtgttgctcgatatcaaacaaatgaatgacgataaacacattgaactgactaaggtcagtaaccacagaacgctgcaatttgccgagtatctcgccaaacgcaatcagcctacctggatacgttatgtggtcgtgggtggatttaccgacgatgaagcctcggcattacagctggccgaatttatcaagccaatgaaaaatattgaaaaagttgaactcctgccctaccacgaactgggtaaacacaagtgggaagcgatgggagaaacctatcaactcgatggcgttgcaccaccgagtcgcgacaccatggaaaaaattaaagccgtgtttagctcacaggggattaatgcggtgtattaa

SEQ ID NO: 225808 - DNA, 742 bp, Unknown
  Bacterial polypeptide expressing nucleotide sequence isolated from the Sargasso Sea
atggcagttaccggtcggatccactcagtggaatcctttggcacagtggatggtccaggcatacggtttatcacctttatgcagggctgtttaatgcgctgccaatattgccacaaccgtgatacttgggatctcgatggaggtaaggaagtacaagtcgacgagttaatgagccaaatcattagctaccgccccttcctcgatgccagcaacggcggcgtcaccgctagcggcggcgaagccatattacaagcggagtttgtcgccgaactctttaaagcctgtaaaaaagaaggcattcatacctgtttagatactaatggctttgtgcgtaagtacacaccagtgattgatgagctactcgataataccgatctggttttgctcgatatcaaacagatgaatgacgataaacacattgaactgaccaaggttagcaaccacagaacgctgcaatttgccgagtacctcgccaaacgcaatcagccaacttggatacgttatgtggtcgtgggtggatttactgatgatgaagcctcggcattacaactggccgaatttatcaaacccatgaagaatattgaaaaagtagaactcctaccctaccacgagcttggtaaacacaagtgggaagcgatgggagaaagctatcaacttgatggtgtcgcaccacctagtcgcgaaaccatggaaaaaattaaagccgtgtttagctcacaggggattaacgcggcatattaag

SEQ ID NO: 225809 - DNA, 706 bp, Unknown
  Bacterial polypeptide expressing nucleotide sequence isolated from the Sargasso Sea
aatgtttaaatttttaaaagtttttctaaaatcatttactcataaaaaaatatcgtattcttatggtggaatagactctcttgttttaaatattttcaaaaatcaaaaaaacggtttttatttagacataggttgtggtcaccctattaaaaataataatacttacttattaaataaaagaggatggagcggtataaatatagacttagacaaggataatattgatttattcaattcttaccgaaaaaaagatgttaatatagcaactgcagtttctgataaagaaggggagacagatctatatttttaccacaataaatcagcattaaatacaataagtaaggaaaatgcagattttcagaaagcaaaagtctctgctattaaaaagattaaaactcaaacaattaacaagattatagaaaattctccatttaaagatagaaaaattgattttttatctgtcgatgtagagggttcagaattggctatattaaagaattttgattttaaaaaatattcacccaaagtaattgtcgtcgagtatttagatttatcattaaaaaaattggaaataaaaaatttaaatattaataatattatcaaatcagaaatatataaacttatattttcaaacaattatactctagcaaacatacttcactctgatttagtttttattaataataattttagagatcagatttaa

SEQ ID NO: 225810 - DNA, 675 bp, Unknown
  Bacterial polypeptide expressing nucleotide sequence isolated from the Sargasso Sea
aatgaaaaatttaaaaaattgggatgataatacatggctgtcgtcaaaaaagtatattaaagatttctgtgcatttgtagaaaataaaaaaaaattaaagaaagatactaagattcttgatattggttgtggtagagcaagaattataagcagacttgcagcaaaatacaatttcaaagttaggcctactggaatagatataattaaacataagaatttagataacaatatcaaatttataaacataagtgctttaaaatttctaaagagaactagaaaatttgatttaattttaattaagcaagccatacaccttatgagtaaaaaaaatcaaacaattttattaaaattgtgtaaaaattccttatctgataaaggtaaattacttattttttctctaaaaactaaaaataaccagatacctgtttttaaattattcaaaaaaaaattaaatataagtctaaaaaaagatgaaaaaatatttttgaatataaaaaaaatactaaaaaatgtaaaaataagtaattttaattttaaggttagtttaaaaaaaagtgattatattaaaatgataaaaaaacgttatatttcgtgtttattgaaaatgaaacaaagcgaaattaatagtggagccgatgaaattaaacttaagtataaaaatcaaattaaatttat

SEQ ID NO: 225811 - DNA, 720 bp, Unknown
  Bacterial polypeptide expressing nucleotide sequence isolated from the Sargasso Sea
aatgactactataaataaagaggaaattcaaaagttttcaaaattagctgatgaatggtgggacgtaaatggtaagttcaaaccgttacatatgttcaatcctataagaattgaatacatagttgaaaaaattaaagatcactttaatagagtagataaaggcgaaagtcctctgcaagggattgaaatattggatattgggtgtggaggtggtttaatttgtgagccattaactcgtctgggaggatcagttactggaatagatgcttcggaaaaaaacattaatgttgcaaaattacatgcagagaaaaatgatttaaaaataaattatcttaataaatctccagagcaaatggatactgaaaaaaaatttgatattgttttaaatcttgaaattgttgaacatgtaaacgatgtaaatttatacatagaatcatgctctaatttattaaaaacaaatggacttatgtttacagctacattaaatagaacgatttcatcttatctaaaagcaataattggtgcggagtatttattaagatggttgcccatagggacacatgattggaataaatttataaagccagaggaattagaaaagaaattatcgagtaatagtcttagaactgtagatgttaaaggacttgagtttataccattaataaacaaatggaaaaaaactgataacctgtctgtaaattacataatttgtagcaataa

SEQ ID NO: 225812 - DNA, 685 bp, Unknown
  Bacterial polypeptide expressing nucleotide sequence isolated from the Sargasso Sea
gatgaataaaattaatagcataagaaaagattggtctcttattgaaacacttatcgcagaagatagaaaaatcctagatattggatgtggtgatggcggtcttatggaacaattagaaaataatcgtaatgcgataactcatggcattgaattaaatagagatctagctgcaaatgctatcgcaagaggtttcaatgttgtacatggaaatgccgaattggatttgtcccaatattcaaataatagttttgattatgtaattttaagtcaaactttacaagcaatgatgaagcccaaagatattctgtctgaattattaagaataggatcaaaagcaatagtttcttttcctaactttggacattggaaaataagattacagcttttaatatctggaaaaatgccagtaacagaaagtttaccttatacatggtatgacacacctaacattcatttttttacaattaaggattttttgaatttgtgtaatgaaatgaatattgtgattgaaaaaagtattggattaacatcaaaaggtaagcaatttgatataagtgaatcagttactggagttaattttttcactcacgaagctatctttttattaagttataaaaattttgaaccaataaaaattaaatcatcaaaaaaagtttttgcaaaaaattctgttattgcaaattag

SEQ ID NO: 225813 - DNA, 544 bp, Unknown
  Bacterial polypeptide expressing nucleotide sequence isolated from the Sargasso Sea
tttgcaaaaaaaattaaaagaatctgaacaatatcttcctgctgaagatacattctttcttgcagatcagctgaaagatctttctggaaaatatgcactcgacataggatgtggttctggctatttgactgatattctaaattcaaattttcagttagttgttggaactgatattagtttcaatacactttgcacacaaaatttcaaaactcaaaattccatatgctgtcactcagctgatgcattgaatttgcaatttgatcttatcatttgtaatcttccttatcttgcaactgatgaaattatagatgttgcaactgatggtggaaaagatggattagaaattccactggaaataatatcttctgcattgcctcatatagaaaaaaatggaaaattcttgtttgtaacttcgtcactgtctgattatatgggactaattgattttgtaaattctaaaaaattccatgcaaaaattgttgataaaaaaaaattattctttgaagaattgattattgtagaagtaaaacactcactttcttag

SEQ ID NO: 225814 - DNA, 544 bp, Unknown
  Bacterial polypeptide expressing nucleotide sequence isolated from the Sargasso Sea
ttgcaagaaaaattagaaaattctaaacagtatttacctgcagaagatacattttttcttgcagataatattgaaggagaaactggaaatctggcattagatattggatgcggttctggttatcttactaacattcttaagaattcgtttaatctagttataggaactgatattagctattacacattacgacaacaaaactataaggttgacaatgtaatatgctgtaattctgcagatgcactacgaataaattttgatttcataatttgtaatcttccgtatcttgctactgatgaaattgctgatgtggctacagatggtgggaaggatgggttagaacttccacttgtaattatagcatctgcgctagaccatctttcaaatgatggtaaatttatttttgttacatcatcattatctgattatatgggtttgattgattttgttaaatcaaaaaaatttactgccaagattatttcaaagaagaaactattttttgaagaattaatcctagttaaggttgaaagattatcttcttaga

SEQ ID NO: 225815 - DNA, 494 bp, Unknown
  Bacterial polypeptide expressing nucleotide sequence isolated from the Sargasso Sea
aatgaaaacaactacgataaataaagaagaaattgataaattttctaaaatagccgaagagtggtgggatcccgaaggaaaatttaaaccgctacatatatttaatcctcttaggataaaatatattaaaaatagtataattaaacattttaaaattaaaaaaaaaaaattacctttatctggcttaaagattctagatataggttgtggaggtggattaatttctgaacctatgagtaggttaggtgcaaatattacaggtatagatgcttccgaaaagaatataaaaatcgctaaagcacatttaaaaaagaataaattaaaaataaattatagatgtgcttcacctgaaaatttaaatcaaaaagaaaacttcgatgtaattttaaatttagaaattattgaacacgtggaagatgtggaattatttatggaaaaaagctcaaaactattgaaaaaggatggtttaatgtttgtagcaacaataaataaaa

SEQ ID NO: 225816 - DNA, 727 bp, Unknown
  Bacterial polypeptide expressing nucleotide sequence isolated from the Sargasso Sea
aatgactacaataaatcaagaggaaattcaaaagttttcaaagttagctgatcaatggtgggatgcaaatggtaaatttaaacctttgcatgctttcaatcctataagaattaaatatatattagataaatgcacttttcattttgatataaaaaaggatcaaaaaaaaccacttaacaaacttaaaattttagacataggttgtggaggtggtttagtatgtgagccacttgctagattgggggcagaagtcactggtatagatgcatcatacaaaaatattgaagttgcgaaaattcattcaaaaaaaagtaatttgaatataaagtatgtaaacacttcaccagaaaaaaaaataattactgaaaaatttgacgtagtattaaatcttgaagttgttgaacatgtagaaaatcttgatttatttttaaagtctgcaagtgatttattaaaaaagaacggtataatgtttattgctacaataaatagaacattggagtcatatatcaaagctattgttggcgcagaatatattttaagatggttgccaataggaacgcatgactggcaaaaatttttaaaacctatagaaattgagaaaaaaaattatcactttaatcttaagaaaattgagcttgatggacttagatttagtattatttttaataaatggagtttaacaaaagattgttcggttaattatattatggtttttcaaaaaaactag

SEQ ID NO: 225817 - DNA, 550 bp, Unknown
  Bacterial polypeptide expressing nucleotide sequence isolated from the Sargasso Sea
atgaccaatattgcttcgggtgaaaccctcagatccgacctaaaaattatcagtgatttaattccaccaagtagtagggtcctagacatcggatgtggtgatggtgcccttttatcttttctcgctgaaaacaaaaatatagatgcacgaggcatagaactcagccaggaaggtgtcaacgcctgcgttgctaaaggcttgtcagtaattcagggtaatgctgatacagacttaattgattatccatcaaatgcgtttgactacgttgtattgagtcaaacattgcaggccacgcgtgaccccaaagaaattcttacaaccctagtgaggataggtaagaacgctatagtttcattcgtcaattttgggcattggcgcaccagactctcactaatgctcaacgggcgagtgccggtacctgaaaaaaatggttttaactggtatgacaacccgaatattcatttgtgcacaatcctcgatttcgtcgacctttgcggcaatctgggtttaaaaatcaacattggcctatcgcttgatagaaatagccgtg

SEQ ID NO: 225818 - DNA, 616 bp, Unknown
  Bacterial polypeptide expressing nucleotide sequence isolated from the Sargasso Sea
ttggagggtttccccagggttctagacattggatgcggtgaaggtcagacaacgcgagcggcgagtgttgggagccagttgagtgtgggcgttgacgcatcttgggcccaagtctctgttgcaggcgagcgagctttgagcgaaaaatatgtacggggttccgcttcggaccttccttttagggcctcctcgtttgatgccgtcctagcgtgtttagtcttcgaacacgttaccgatatgtcggtggccgtcgcagaggtatcgcgaattctcgtgccagggggccgttttgttctcatgctgaaccaccccttattgcagacacctggtagtggttgggtggaggatcatatgagtgatccaacggaccaatattggcgcgtgggcgattacttaaccgttcaggagacagtcgaagaggtcgaactcggggttcatatcccctttgtgcatcggccattgagttcgtacgtcaatgagttaagcgaaaacgaactttccgtaacccggatgctcgagccagcgccgccaccgggattcttaactcagagtcccgcctattcgtcggcggcacatatcccgcgacttttagttttgatttgcgagaagcggtgaa

SEQ ID NO: 225819 - DNA, 555 bp, Unknown
  Bacterial polypeptide expressing nucleotide sequence isolated from the Sargasso Sea
aatgcaattagctagatttttaaataatgtttttaaaaaagatggatttatattagttgatgctaattcaaaaagttacattattggaaatccaaaaagtgaaaaccctataaaagtaaaaattttaaataaaaatcttcattataagttactaattcatccagatttatattttggtgaagcatatacagatggcgaaataactattgaaaatggaacattaactgatttcttggatctttctttgatgaactttggaagaggagacttaaatttttttagttatttacttaatagattaagaggttcttatagatatttaactaattttaattttataaaaaaatctaagatgaatgtctctcatcactatgatatttcggacgatctttatgacttatttttagatcctaaaagacaatattcatgtgcatattttaaaaatgaaacagatacattggaaactgctcaaaataataaaattcaacacataataaaaaaactcagcataaaaccaaatcaaaaagttttagatattggatgtggatggggttc

SEQ ID NO: 225820 - DNA, 994 bp, Unknown
  Bacterial polypeptide expressing nucleotide sequence isolated from the Sargasso Sea
tatgcaacttgcaagatttttaaataaggtttttaaaaagaatggttttatcttaactgatgctaattcaaaagattacattattggtagtccaggtaaaaatcccattaaattaaaaattttaaataaaaatcttcattacaaactattacttcatcccgatctctattttggtgaagcttatacagatggagaaataataatagaaaatggatctcttactgattttttagatttagcattaatgaattttggtagaggtgatctgaatttttttagttatttgattaatagacttagaggatcttataggtatttaacaaattttaattttattaaaaaatctaaaatgaatgtttctcatcattatgatatttcagatgatctttatgatttatttttagattcaaagagacaatattcgtgtgcttactttaaaaatgaaaatgatagtttggaaacagcacaaaataataaaattaagcacattataaaaaaactaaatattaaacctaatcaaaaaattttagatataggttgtggttggggatcattagcaattgatatagctaaaagtgcaaaatgtgaggttactggaataactttatcagaaaatcaaattaattattgcacaaaaaaagcaaaagaaatgaatttagaaaatcagattaaatttaaattaatggactatagagagcttaatgaaaaatttgacagaattgtaagtgttggaatgttcgagcatgtaggaagaaaattttataagaaattttttaaacaaatagaaaatttattaaaagacgatggtatttcattaatacacaccataggatcagttaatccaccaagagacccacatccttggataacaaaatatattttccctggaggttatactccgagcttaagtgaagtaacaactcccatagaaaaagcagggttaatagtgactgatatagaagttttgagacttcattattcacatactctaaga

SEQ ID NO: 225821 - DNA, 565 bp, Unknown
  Bacterial polypeptide expressing nucleotide sequence isolated from the Sargasso Sea
atgaatagcaaaaaagattttgataagcctttattgttagatattggttgtggaaaaaataagctgagtagacctggctataaaattatagggatagacatttgggaaaattcagatgcagatctaataatacctgctaataaacttccatttgataatgaatcagtagatgtgattcatactaggcattttcttgagcacttcacctatgatgaaacagttgacttattcagtgaattttttcgagtactaaaaccaaaaagcaagttagagattattgtgcctcatgtaagttgcatcgctgcatttcaggatccaactcataaggcattttttacaaaaagatcattttataaatatcagcacactggatttagtgtaaaaaatatcgaatttttttggtttagaaatccttacaaagggtggttccctttcttagtttatcccataaataaactgttaaatactttccatggtcttgaaagatttgcatctataattggggggatatatgagttacaatgcgttatggagaaagatcaattggagttagactttttacata

SEQ ID NO: 225822 - DNA, 289 bp, Unknown
  Bacterial polypeptide expressing nucleotide sequence isolated from the Sargasso Sea
tatgtatttagattttttaacctcgttacataagtccacaaaaagagattatcttaaaagggtaaatgataaagattttccaaaaaataaagcagcaagacttgctaaaaagtggggatatcattattgggacggagatagaagaataaattatggaggatataaatatattgctggtagatgggcaaaagttgcaaaaaaacttattgaacattacaacattaaagatggagatcgtgttttagatataggatgtggaaaaggatatttgttgtatgaaatttataaa

SEQ ID NO: 225823 - DNA, 361 bp, Unknown
  Bacterial polypeptide expressing nucleotide sequence isolated from the Sargasso Sea
atgaataaaattaatagcataagaaaagattggtctcttattgaaacacttatcgcagaagatagaaaaatcctagatattggatgtggtgatggcggtcttatggaacaattagaaaataatcgtaatgcgataactcatggcattgaattaaatagagatctagctgcaaatgctattgcaagaggtttcaatgttgtacatggaaatgccgaattagatttgtcccaatattcaaataatagttttgattatgtaattttaagtcaaactttacaagcaatgatgaagcccaaagatattctgtctgaattattaagaataggatcaaaagcaatagtttcttttcctaactttgaca

SEQ ID NO: 225824 - DNA, 613 bp, Unknown
  Bacterial polypeptide expressing nucleotide sequence isolated from the Sargasso Sea
tctgatcaaaagaacatcaaaaacctacatagaaaaaactctttcagaaaatccagactggaaaattttggacattggttgtggatatggtgctaataaacatgcaacaacaatcagtgatatactagatttatcaaatcactacaaagataagtcatttgtaaagattactgaaaaaaaattgccatttaaagataaggagtttgattttgttattgcctcccacgtagctgaacatgttgaggatgtttcttattttttaaatgaattatctagagtaggaaaaaaaggatatattgaagtacctacaagactcgaggacaatttggtttttgaaaataaaaaagctcatatttggcacttagtatttgatgatgttaataatcaaattaatatttcaagaaaacagcaatattttgaaccagttttaaccgtaggaacaattaaaaaattaaatgaatattttcgtgaaagtttagtgatcgaattaagctgggaagatagtattaaatttaatatggttgaaaataatttgaaaactccagttaaaatatcgattttaaacttgttaaaaaaatacttttcaaaaaaaattaggttattaattaaataa

SEQ ID NO: 225825 - DNA, 884 bp, Unknown
  Bacterial polypeptide expressing nucleotide sequence isolated from the Sargasso Sea
tatgcaattagcaagatttttaaatagtgtttttaagaaagatggttttattcttatcgatgctaattcaaaaaattatataattggaaatcctaaaaatgaaaaccccataaagcttaaaattttaaataaacacttaaattataaattattatttcatccggatctttatttcggtgaagcttatactaatggtgagattgtcatagaaaatggatctcttacagattttttagatttagcattaatgaattttggtaggggagaacttaatttctttagctacttaattaatagattaaggggatcttatagatacctaactaattttaattttatcaaaaagtcgaaaatgaacgtttcacatcattatgatatttctgatgatttatacgatttgtttttagatccaaaaagacaatactcatgtgcatattttaatgatgtaaatgattcattggaaactgctcaaaataataaaattagtcatataataaaaaaactaaatattaaacctaaccaaaaagttttagatataggttgtggctggggttcactagcaatagatattgctaaaagtgctaactgtgaagtaattggcataacattatctgaaaaccaatttaactattgtaaaaaaagagcaaaagagctcaatttagaaaatcaactaaattttaaattgatggactacagagagcttgatgaaaaatttgacagaattgtaagtgttggaatgtttgagcatgttggaagaaaattttatcgtaaatttttcacacaagtcgaaaaattacttaaagatgacggtgtttctttaatacatactatcggatcagtaaatccacctagggacccacatccttggatcacaaagtatatat

SEQ ID NO: 225826 - DNA, 718 bp, Unknown
  Bacterial polypeptide expressing nucleotide sequence isolated from the Sargasso Sea
aatgactacaataaatcaagaagaaattcaaaagttttcaaaattagctgatgaatggtgggatgctgacggtaaatttaaacctttacataaatttaatcccataagaattgagtatattttaaatgtagccacttctcattttaaactaagtaaatcacaaaagctcccattaaaaaatttaaaaattcttgatattggttgtggaggaggtttaattagtgaaccgatgtatagattgggtgcatctgttacaggaattgatgcatcaaaaaaaaatataaatgttgcatcgcttcatgctaaaaaaaatggtttaaaaattaaatatataaatactactccagaaaaaaatattattaatgataaatttgatttaattttaaatttggaggtagtagagcatgttgaaaatttagaattatttttaaagtcttcttgtggtttattaaaagagaatggtattatttttgttgctacaataaacagaacaattcaatcatacattaaagcaatagtcggagcagaatacatattaaaatggttaccaattgggactcatgattggcaaaagtttcctaaacctgaggaaattgagaaaatttttaatcaaaataactttaaaaaaattaagctcgatggatttcagtttaatataatatctaataagtggcgtttaagcagtgacaattcggttaattatatgcttgttgccaag

SEQ ID NO: 225827 - DNA, 682 bp, Unknown
  Bacterial polypeptide expressing nucleotide sequence isolated from the Sargasso Sea
aatgactacaataaatcaggaagaaattcaaaagttttcaaaattagctgatgaatggtgggatgctaatggcaagttcaaacctttacatgcatttaacccggttagaatcaaatacataattgataaatgtaagtatcattttaagctcaaaaaaaaagatgaaaaacctctgtctactttaaaggtattagatattggttgtggaggtggtctcgtgtgtgaaccattaagtagactaggcgcagatgtaaccggcgtcgatgcctcctctagaaatatagaagttgctaaaattcatgcaaaaaaaagtggtcttaaaataaaatattttaatacatcccccgaaaagaaagaggtaaatgaaaaatttgatgtaatattaaatctagaagtcgttgaacatgtagaagacctggatttatttttaaaatcatcaagtgatctccttaaaaaaaatggaattatgtttatagcaacaatcaacagaacttttgaatcctatataaaagcaattataggtgcagaatacttgttgaggtggctgccaattggaactcatagttgggaaaaatttcttaaacctgaagaaatagaagagaagttgattaaattgaattttaataaacttaatttggatggactgaagtttaatattatatctaataattggagcttaagc

SEQ ID NO: 225828 - DNA, 798 bp, Unknown
  Bacterial polypeptide expressing nucleotide sequence isolated from the Sargasso Sea
acaccaaagagtgataatccaattaaacttaaaatcttagataaaaaacttcactacaaattgttattacaacctaatttacactttggtgaagcttacacagatggtgatataataattgagaatggaagtctcactgattttttagacctagctttaaagaatattggaagaggtgaaattaatttttatagttatttaattaatagaattagaggctcgtatagatatttaacgaattttaattttataaaaaagtcgaagatgaacgtatctcatcactatgatatttcagatgatctttatgatttatttttagatccaaagagacaatattcttgtgcttattttaaaaatgaaaatgatactttggaaacagctcaaaataataaaatacaacatattattaagaaacttaatattaaggaaaatcaaaaagtattagatattggttgtggatggggatcattagcaattgatattgctaaaagtgctaactgcgaagttactggaattacattatcagaaaatcaatataactattgcaataaaaaggctaaagaacttaacttagaaaatcaagtaaggtttaaattgatagattatagagaattagatgaaaaatttgatagaattgtaagtgtagggatgtttgaacatgtaggtagaaaattctataaaaaattctttcagcaggtagaaaaattgcttaaagatgatggtgtttccttaattcacacaataggttcagtaaatcctccaagagaccctcatccctggattacaaatatatattcc

SEQ ID NO: 225829 - DNA, 709 bp, Unknown
  Bacterial polypeptide expressing nucleotide sequence isolated from the Sargasso Sea
atgaaaaaacttaaaaactgggataataaaacctggttatcgtctaaatcgtatatctctcaatttaatagatttcttaagaaaaaaattaatttaaataaaaattcaaaaatattggacattggatgtggaagagcaaatattatcagtgcccttcaaaagaaatataaatttaaaaataagcccataggaatagatgttgtagcaaataaggatgttaaaaagaatattgtatttaagaaaattgaggctttaaaatatctaaagaaacaagaaaaatatgatttaatcttaatcaaacaaactattcatttttttacaaaaacaaagttaaaccgccttctaaaccttgctaaaaaaagattaaatcccagaggcagaatattaattttttcgcttaaaacaaaaaataataagataccttgctttaaaaaaatgagaaaaaatttagaaaaaagtttaaaaagagatgaagttttatttaagataatcaaaaaaaacttaaaaaaaataagctatacaaactttaattataaagtaaatatctctaaacaaaaatacgtgagaatgattagagagagatacatttcatgcttattaaatatgagtaataaagaaataaaatttggtatcagtgaaatcaaatctaaatataaagatcaaataaaattcactgataccttaaaatgtattagctacagaaaataat

SEQ ID NO: 225830 - DNA, 842 bp, Unknown
  Bacterial polypeptide expressing nucleotide sequence isolated from the Sargasso Sea
tttaataaacaaatttcgtggatcgtatagatatttgacaaactttaattttattaaaaaatctaagatgaatgtttctcatcattacgatatcaaagatgaattatatgacttatttttagatccaaaaagacaatactcttgtgcctattttaaaaatgaaaatgactctctcgaaatagcacagaataataaaattcaacatattataaaaaaattaaatttaaaacctaatcaaaaagttttagacattggttgtggatggggttcccttgcaattgatattgcaaaaagctcaaaatgtgaagttacaggtataactttatcagaaaagcaattaaaatattgtaatgaaaaagtaaaagaaatgaatcttgagaatcaagttaaattcaaattaatggattatagagaacttaatgagaaatttgatagaatagtaagtgtgggaatgtttgagcatgtaggacgaaaattttataaaaaattttttaatcaaatagaaaaattattaaaagatgatggtatttcattaatacacactataggatcagtaaatcctccaagagaccctcacccatggattactaaatatatctttccaggaggttacacgccaagcttgagtgaggtttcagttcctatagaaagagctggtttagttgtgacagatattgaggttttaagattacattattcgcatactctgagacattggaaagagaactgcatgagaaataaagaaaaaattattcaaatgtttgatgaaaaattttttagaatgtgggagttttatttagtcggatgtgaaatggcgtttaagtggggcgaccaagttgtat

SEQ ID NO: 225831 - DNA, 849 bp, Unknown
  Bacterial polypeptide expressing nucleotide sequence isolated from the Sargasso Sea
actaataaatccagacttaaatttccctgaagcttacatgcgcggtgaaattaaaattgataacggttcacttttagattttttaaatctcacttttgaaaatattggtcgtgaagaaataaatatttacggatatatgtttaaaaaacttttacatatctggaggtttgctactaactataatttaccaaaaaaatccaaaaaaaatgtagaacgtcattatgatataggtgaagatctttatgatttatttttagataaaaaacacagacaatactcttgcgcatattttttaaatgaaaatgatagtttggaggatgcgcagcaaaataaaattaatcatataattaaaaagttagatttacgccctggacaaaaagttttagacatcggatgcggctggggcggaatggcttttgagatagccagacaaagtcaatgtgaggtaacaggtgtctcattaagtgaaaatcaaatcaattattgcaaaaaaaaagcaaaagaattaaaaatggataatcaagtaaatttcgaacttcgtgattatcgagaagtaaaagaaaaatttcaaaagattgttagtgttggggcattcgagcattttggtagaaagttttacaaaactttttttaagaaagtaaaagatattatgactgatgatgggatttgtttattgcacacaataggttctgtagacgcgcctggaccggttcaaccttttatacaaaaaagaatttttccaggaggaattgttccaagcttgtctgaagtggttgggccaattgaaaaaactggcttaataattgctgattgtgaaactttaatacatcactatgataagacattaaa

SEQ ID NO: 225832 - DNA, 457 bp, Unknown
  Bacterial polypeptide expressing nucleotide sequence isolated from the Sargasso Sea
aatgactacaataaatcaagaggaaattcaaaagttttcaaaaatagctgatgaatggtgggatgcaaaaggtaagtttaaacctttgcacaggttcaatccaataagaattaaatatattatagataaatgtactgcccactttaatctatcaaataataataatgagattctttcaggattgaaatttttagatattggatgtggtggaggtcttgtaagtgaaccactttgtaggctaggcgcaaatgtaacagggattgatgcttcggcaaaaaatatagaggttgctaaaatacatgcaaaaaaaaataatttaaaaataaaatatttagccacgtcacctgaaaaaaaaataatccaagataaatttgatgtaatactaaatcttgaggttatagagcacgttgaaaatgtcgatttatttatgatggcagcaactgatcttttaaaaaaa

SEQ ID NO: 225833 - DNA, 208 bp, Unknown
  Bacterial polypeptide expressing nucleotide sequence isolated from the Sargasso Sea
atgactagtgtaaataaaaaagaaatagataaattttctaaaatagccgatgaatggtgggatcctgagggtaaattcaaacctcttcataaatttaatccaataagaataaaatatataaaggaaaatattattaataattttaaattaaaaaataaatacagaccattatcaggaataaatatcttagatattggatgtggtggag

SEQ ID NO: 225834 - DNA, 861 bp, Unknown
  Bacterial polypeptide expressing nucleotide sequence isolated from the Sargasso Sea
aatgaagttatcaaaaatagttagagccatttcaaataaattaactacaagcaattatatatctaaatcaaagagaaatgttgctcatcattatgatctttctgataagctttatgatctatttttagaccctgatagacaatattcttgcgcttattttaactctccaaatgatactttggagcaagcgcaaattaataaaaaagaactaatttcaaaaaagttactacttgaagaaaatcaatctgttttagatattgggtgcggttggggtggaatggcctcgcatatttataaaaaatcaaacgcaagtgttgtaggcgtaactttatctgaagaacaaattgcgtatgctcaacaaagaaaagtaagagagaagttggataaggttgaatacagacttcaggattacagaaacgtaaacgaaaaatatgatcgaattgtatctgttggtatgtttgaacatgttggtacagcacattaccaggaattctttaacaaggtttatgatctattaaacgatagtggagttgcgcttattcatacaattggtcggttgaatgagcctggaaatacagacccgtggatagataaatatatttttcctggaggatatattccagcgctgagtgaaacagtctctagagttgagaaatcaggcttatcactgactgatgtacagatattaaaatttcattatgcagaaacattaaaaagatggagatacaatttttacgacaatatagataaggttaaagaaatttatgatgaaaaattctgcagaatgtgggatttttatttatcttcatcccaggcttcattcgaagagtcgacattagttgtatttcagcttcaactttc

SEQ ID NO: 225835 - DNA, 379 bp, Unknown
  Bacterial polypeptide expressing nucleotide sequence isolated from the Sargasso Sea
ctgattaaaagaacttcaaaattccatatagaaaaaatcctctcagaaaacccagactggaaaatcctagatataggatgtggatatggagcaaataaatttgctactaccataagtgatataatggatttatccgaacactataaagaaaaaacttttgttaaaataacagaaaaaaaattaccttttaaagataaagagtttgattttattattgcatcccatgttattgaacatgttgatgatatttcatattttttaaatgaattaacaagaattggaaaaaaaggatatatcgaagttccaactagacttgaggacaatttagtttttgaaaataaaaaagctcatctttggcatttagtttttgatgatgtaa

SEQ ID NO: 225836 - DNA, 274 bp, Unknown
  Bacterial polypeptide expressing nucleotide sequence isolated from the Sargasso Sea
tatgagtttaacggacgaaggacactatggaccaaaacaacttaatttactaaaagttgtttggggcgaaggttttctttctcctggtggtactgatgaaattgatgaaataatgacaggtgtgaatgctaaagacaaaacagtacttgatattggttgtggatgtggtggagctgcttttcatttattaaaaaaatacaatgttaaatcagttgaagggattgatcctgagcctcttgttattcaaacagcaaatcagttagctataaaaaat

SEQ ID NO: 225837 - DNA, 148 bp, Unknown
  Bacterial polypeptide expressing nucleotide sequence isolated from the Sargasso Sea
taatgctaacggtaaaactgtacttgatattggttgtgggtgcggcggagctgcttttcatttactaaaaaaatacaatgttaaatcagttgaaggaatagatcctgagccacttgttattaaaacagcaaatcagttagctatataa

SEQ ID NO: 225838 - DNA, 346 bp, Unknown
  Bacterial polypeptide expressing nucleotide sequence isolated from the Sargasso Sea
aatgactaatacagtagaccaaagagaaatagaacaattttcttcattaagcaatagatggtgggataaatcgggtccatttgctgcgttacacaaaatgtcaaacgcaagaattgaattcattaaattaaatgcaagtagaattacaaataaagttcatgaaagttctaaatcacttgatggaatttcctgcttggatgtgggctgtggtggtggaattttatcagaacctctaactaggctaggagctgcagttacaggaattgatgcatcgaaaactgccattcaaaccgctaaaaagcacgctttaaaaagtcgtttaaaaattaattataaatgcattaca

SEQ ID NO: 225839 - DNA, 544 bp, Unknown
  Bacterial polypeptide expressing nucleotide sequence isolated from the Sargasso Sea
ttgcaaacaaaattaaaaagatctgagcaatatctacctgcagaagatacttttttccttgcagatataattgaaaaggaaagtggaaatatggcattagatattggatgtggctctggttatcttactaatattctcaagaattcatttaatttggttgttggaactgatattagttacaatacacttagagttcaaaattataaagttgaaaatgtagtttgttgtaattcagctgatgctttacaacttaaatttgatcttataatttgtaatctaccatatcttgccacagatgaaattattgatgttgctacagatggtggtaaggatggtctagaattacccattgaaattatatcctccgcattaagtcatatttcaaataatggtaaatttctttttgtaacttcatcactatctaattatactgaactgattaattttgttgaatctaaaaattatagtgcaaaaataatttcaaagaaaaaactattttatgaagaattgattattgttaaggttgagaatttactttcgtaaa

SEQ ID NO: 225840 - DNA, 554 bp, Unknown
  Bacterial polypeptide expressing nucleotide sequence isolated from the Sargasso Sea
gaatgtactagatattggatgtggctatagtcctcacccagcagcaagtacaatttgtgacgttcaggactttgagaaaaattatttagataaaaaatttgttcaattaaaagaaaaaaaattcccttttaaagataaagaatttgattttgttatagctagccacgtcattgaacatgttgaagatgttgatttttttattaaagaattacagagagttgcaaaaaaaggttatatcgaagtaccaacaaaattagaggataatcttgtttttgaaaataaaaatgatcatgtgtggcatatggattttgatgatgtagataataaattaattataacaaaaagaattcaaattattgagcctattttaacagtttcatcaataaaaaaatttaatgaaaattttaggaaaagtttagttatagaactactttgggaagataaaataaattatagagtcgaatctcacgatgtaacaaatgataataaaatatccattttaaacttagtgcgaaagtatatttctaaaaagattagaacaatttttaaataaa

SEQ ID NO: 225841 - DNA, 685 bp, Unknown
  Bacterial polypeptide expressing nucleotide sequence isolated from the Sargasso Sea
atgaataatcttagaagtattagaaaagattgggatctcattgaatcattgatcaaagataactcacgtattttagatattggttgtggagagggagatttgatacaacaacttgaaaaaaaccttacagctaaagttcatggaattgaaaaaagtagagaattagctctaaaaggaattgccaaaggtttaaatgtaactcatggtgatgctgaaaaggatcttttacagtattcaaatcacagctttgattatgtgattcttagtcaaactctacaagcaatgattgagcctaaaaagattctaaaagaattattaagaataggatctaaagctattgtttcatttcctaattttggacattggaaaatcagactacaattactatttaacgggaaaatgccaataactgaaggccttccttattcttggtatgatacaccaaacatacatttttttactttaaaagattttcaaaacctctgtagcgaaatgaatattgttattgagaatagcattgggcttactaataaaggtaaacaattttcaattaatgactcattacttccagcaaatattataacaaatgaagcaatctttctccttagttataaagactttgagccaattaaactaaaatcaacaaataaaatttttaataaaaactcagctattgttaattaat

SEQ ID NO: 225842 - DNA, 325 bp, Unknown
  Bacterial polypeptide expressing nucleotide sequence isolated from the Sargasso Sea
atgactacaataaatgagagggaaattcaaaagttttcaaaattagctgatgaatggtgggatgctaatggtaaatttaaacccttgcatgtgttcaatccaattagaattaaatacataattgataagtgtagctcccattttaatctagaaaaaaaaggtaaagaacctttgtcgactttaaaagtattagatattggttgcggcggtggccttgtctgtgaaccattaagcagattaggagctagtgtaacgggtatcgatgcatcatccaaaaatatagaagttgctaaaattcatgccaaaaaaaataatttagaaataa

SEQ ID NO: 225843 - DNA, 244 bp, Unknown
  Bacterial polypeptide expressing nucleotide sequence isolated from the Sargasso Sea
atgtctgaagtgaataaaaatcaaaaggatttctggtcaggaaaaggtggagacatttgggttgaacgtcaaaatgctatggacaacatgttaagtcctcttggtgaagccgcccttaacaaacttaattttaatgaagaggaaaatgtcctagacattggatgtggatgtggtgacacaactcttaatatagcaaaaaggattgggccattaggaaatgtcactggattagatatttcagaac

SEQ ID NO: 225844 - DNA, 543 bp, Unknown
  Bacterial polypeptide expressing nucleotide sequence isolated from the Sargasso Sea
attggtcgatgcaaattctaaaaattatattattggaaatcctaaaagtgaaaatccaataaaactaagaattttaaataaaaatcttcactataagttgttatttcatccagacctttattttggtgaagcttatatgaatggcgaaataactatagaaaatggaactttaaccgattttttagatctttctttaatgaattttggtagaggaaatttaaatttttttagttatttaattaataaatttagaggttcttatagatatttaactaattttaattttataaaaaaatctaagagcaatgtttcacatcattatgatatttcggaagatctatataatttgtttttggatcccaaaaggcaatattcatgtgcatattttaaaaatgaaacagattctttagaaacagcacaaaataataagattcaacatataataaaaaaacttaatataaaacctaaccaaaaagttttagacattggatgtggatggggttctttggcaatagatatagcaaagagtgcaaattgtgaagt

SEQ ID NO: 225845 - DNA, 394 bp, Unknown
  Bacterial polypeptide expressing nucleotide sequence isolated from the Sargasso Sea
tatgactacaataaataaagaggaaattcaaaagttttcagaattagcggacgaatggtggaaccccgagggtaaatttaaaccattacatatgtttaacccaatcaggattgagtacattgtagaaaaaattaaagaacattacggtcttaaaaaccataatgattataatcttaaaggatttaaaatattagatatagggtgtggcgggggactaataagtgaaccaatgtgtcgtcttggggcaaatgttactggaatagacgcatcagatagaaatataaaagttgcaaaattacactcatctaagcaacaactaaaaattaattatttgataaagtcaccagagcaactaaatgaggttgaaaaatacgatgtaattttaaatttagaa

SEQ ID NO: 225846 - DNA, 588 bp, Unknown
  Bacterial polypeptide expressing nucleotide sequence isolated from the Sargasso Sea
aagaatttaaagtaatcgctgatttactgcctgacaatagtaaagtattagatattggttgcggagacggttctttaatgtatttgctaaaaaataaaaaaaatattgaagttcgaggattggaacttgatcaaaacaatgttcaacaatgtattcacaagggtttacctgttatacaaggtaatgctgaaactgaacttcaccaatttcctaaccaatcatttgactatgttgttttaagtcaaactcttcaagctttttacaatcctgaaaaagtattaagagaactcttaagaatcggtaagtcagtaattatttcaattccgaattttggatactggaaagtaagaacaaaactgttattttttggaaaaatgccagtaactaaaactttacctaatacttggtataatactccaaatttgcatatgtgtacaattaaagatcttttcaatttttgtgatgaaaaaaatataaacattataaaagtagtaggagtaaatgaaaatcaaacctctttaatcaaaaaaggtaatcttgaaatcaagaaccttttttccaaattaggaatatttttaattggataga

SEQ ID NO: 225847 - DNA, 712 bp, Unknown
  Bacterial polypeptide expressing nucleotide sequence isolated from the Sargasso Sea
tatggcatcagttgtcattaaaaattgggacaataaaacttggttatcttcacaaaattatattaattcatttaataattttttaatcaaaaataccaaaattaattcaaattttaaaattttagatattggttgtggaagagggaagattttaggttctttaaaatcaaggttaaaacttaaatataaacctttaggtatagatattgttaatcataaagatagagataaaagaattaattttaaaaaagcaaatattttaaatctttctttgacaaaaaatcaaaagttcgatttaattttgattaaacaaactattcatttaataaaattaagtgaagtaaaaaaattattaaaatcattaagaaaaatattaaatacaaaaggtaaaattatgatttttactttagatacagaaaataatgaaattccaacttttaaattaatgaaactaaaacttaataaatctcttataagagataaaaagatatttaagattattacaaatttatatcctcaaagaattcaaaaaaaatttatttttaatgtgagaataagcaaaaagaaatatctcggtatgattaataatagatatatttctacgctaataccattatcaaaaaaacaacttatccaagggattgaagaaattaaattaagttataaaaatcaactgaaatttaaagataagttaacttgtattattttataa

SEQ ID NO: 225848 - DNA, 376 bp, Unknown
  Bacterial polypeptide expressing nucleotide sequence isolated from the Sargasso Sea
atgaccaatcttataaatcaaaatttgatctcttcacttataaataaccatgataaggttttagatataggttgtggaagcggagagcttctttattttttagaaaaaacaaaaaatattcaaggtcaaggaattgagattagtcacctaggagtaaaagaatcagtttctaaaggtctatctgttatacagggagatgctgatgaagatctaataaactttcctgatcatacttttgatattgtaatattaagtgacactttacaagctactcataaacctaaagaagttttagagcaaatgcttagaattggtaagaaatgtataatctgtattcctaattttggatattggaaatatagattacaaattttat

SEQ ID NO: 225849 - DNA, 231 bp, Unknown
  Bacterial polypeptide expressing nucleotide sequence isolated from the Sargasso Sea
tatgactacaataaataaagacgaaattcaaaagttttcaaacttagctgatgagtggtgggacccgaatggcatatttaaaccattacacatgtttaatcccacgagaattgaatatattttagacgatatttctaaatatttttctttggataagaataaacaatttatgctaaaaaaatttgagatattagatataggctgtggtgggtggttgatgagcgaacctat

SEQ ID NO: 225850 - DNA, 667 bp, Unknown
  Bacterial polypeptide expressing nucleotide sequence isolated from the Sargasso Sea
ttggaagatactaacaaaaaactaattttagatataggctgtggatcaaagaaaaagccaggatcaattggtattgattattcttattcaacaggtgtagatcatgttttaaatattgaaaatgatgcacttccatttgcagatgaaagtgttgattatatttactcatctcattgttttgaacatttaaaagatgaaggtgtaggtaatgtttggaaggagatcagtcgcgttgcaaagaataatgcaactatagaaatatggactccttatccacataccgatcaacaatggttattaggacatgtagcaggatggggacccttaagatgggatcatttatctagctcgcatcgtgatatttattccaatagttttcttgatgggggatattggaggtggaatgaagcgcaatttgttattaaacctgaaactataaaggagttggatgaaatgaatattcctcatgaatttgctataagacacatgaataatatttgtactgaatggggatgttttttctcatatgtaaaagaagatccaggaattcatgcccccaaaagaagcatttccttaggagggaggtattcttgtgatgaatatgtaaaatttgaaggaaaaagaacagaacttcatgcccccaaaaagaaacatttccttaggaggg

SEQ ID NO: 225851 - DNA, 520 bp, Unknown
  Bacterial polypeptide expressing nucleotide sequence isolated from the Sargasso Sea
gatggttgattttacccaggcgcgacaaaatatgattgattgtcagcttagaacaaatgaaattgctgatgaggcattagtagaggcctttcttcacgttccgagagaagtttttgttgaacctaaatttcaaggagttgcctacacggataatgatgtttcaattggctttggtcgtcatttaattgctccaatgatttttggtcggctgttgcaagctttaaatgcacaaccggaagaagttgccctcgatattggttgcggcacggggtattcaagttctgttcttgcgcaattggttactactgtcgtagcactagagtctgaaaaacaattggcgttaacggctgaaaagaattttcgcgagctagctgtggataatgctgttttggttgaaggagtgctagaggaagggtacgcgactcaagggccatatgatatcataaatttctctgcgggtattccatttattccttcaactcttaaatctcaactttctgatggtggaagactgtgtgca

SEQ ID NO: 225852 - DNA, 815 bp, Unknown
  Bacterial polypeptide expressing nucleotide sequence isolated from the Sargasso Sea
atattattggcaatcctgggtgataaccccattaaattaaagattctaaaaaaaaatcttcattataaattactttttcatcccgatttgtattttggagaagcttatactgacggtgaaataattatagaaaacggaactcttacagattttttagatttagcgctaatgaattttggtagaggtaatttaaacttttttagttatttaattaataggctgagagggtcatatagatatttaactaatttcaattttattaaaaaatctaaaatgaacgtatctcatcattacgatatctcagacgatttatatgatttgtttttagatccaaaaagacagtactcgtgtgcttattttaaaaatgaaaatgaaagtttggaaacagcacaaaataataagatccaacatattattaaaaagttaaatattaaaccaaatcaaaaagttttagatataggttgtggctggggttcgttagcaattgatattgccaaaagttcaagttgcgaagttactggaataacattatcagaaaatcaacttaattattgtaaaaaaaaaacaaaagagatgaatttagaaaatcaggttaaatttaaattaatggactatagggagcttaatgaaaaatttgatagaattgttagtgttggaatgtttgaacatgttggaagaaaattttacaataaattttttaaacaaattgaaaatttattaaaagatgatgggatttcgttaatacatactataggatcagtagaaccgcccagagatcctcatccttggataacaaaatatatttttccaggagg

SEQ ID NO: 225853 - DNA, 739 bp, Unknown
  Bacterial polypeptide expressing nucleotide sequence isolated from the Sargasso Sea
acattactgtaataagtgttatctcatctataaaagcaaagattctgaaaatatgattattaatgtgaatgaaggtgactattattcattaaaaaaaataggatcaaaagttaacgatagatatataaaacatttcaacagaagagctaaagatcactatgcacacatagaaagctacctaccaaagaattcaaataaatgcgcattagatatcggctgcggtgctgggctttttattgcacatcttaaatctaagggatggcaagttaacggaatagaaccagacccattgatgtataaccatgcgaagaatgtaatggggctagatgtagaacaaacaacatttgatgtttggaaacaagataaaaaatatggattgatttatctttctcatgttcttgatgatcttcctaacataaatcaagtaatagaaaaaattactgagcatctagagccgaatgggatattgtttatagaagtaccaaatttttcatggtcattccgaatgaattttgaaaaaaaagaagatttatatataaataagtattttttttctatagcttcattaacatcattattaacaaacaataactttaatattttaaacacgaaaacattccaattagttcacaggaatactttttttcaaaaattgataagtcctattatgttgctcatgaagttaaagccaaaaaaatataggccatatttaagaataatttccagaaaaaatgtttga

SEQ ID NO: 225854 - DNA, 502 bp, Unknown
  Bacterial polypeptide expressing nucleotide sequence isolated from the Sargasso Sea
atgagaaaagattcaattcaatcagttttggacattggatgcggtccagggcatctagtagttaaacttttagaaattggaaaagatgtaacagccctagatatcgctccaaatatgttagaaataacacaacttagagtcgattctatgaatttaaaatctaattttaaaactattcttgctgattattcagagcataaatttgatgaacaatttgatgcaatttccgtaatggggttttttgattatgtagaagatccagtttcagttttgaaaaagttacttttagatgcaaaaaaagaaatttatatctctatacctggggacacaggttttctggcttggcaacgtaaagttaggtacaaacaaagaaattgtccgttatatttatactcaagagagtctttgactcaacatcttaaagatgccggatgctatgagcatactgagattgttgatacagaaagaggtttttatgttgttattaggaagcagtcctgaa

SEQ ID NO: 225855 - DNA, 808 bp, Unknown
  Bacterial polypeptide expressing nucleotide sequence isolated from the Sargasso Sea
atgtcttttaaaatacttaaatttatactaaaaaaattaatcaaatccagatctatattaataaagtcagataattcagaatatataatcgataatggtaatgacgctgtaattctaaaaattaacaacaaaaactttcttaaaaaaatttattatgcgccatctctagtgttaactgaaggttacatgaataaagactacgagttagaaaatgcctctttttatgaattttcagatctattgattgaaaattataataaatatcttgaaaaagtaacaaaatctattttctttagaatttttcttatcattaatccattttttcaacttaattttgtaaaaaaatctaaaaataatattgccaatcattacgacttatctgacaaattgtatgacttatttttagatgaaactagacaatattcatgtgcctattttgaaaaagatactgatactttaagcgatgcacaaaataataaaatgaatagattagctgacaaacttttacttaattcatctgataatgttttggatattggttgcggttggggctctttgagtaaaaattttgtagacaattataagtgtaatgttaaaggaatatcactatctgaagaacaaattaaatactgtaatgaacaactcgaaaataataataatagagaaaaattaaattattctcttcaagattatagagatgaaaatagaagctactcaaaaatagtatctgttggaatgtttgagcatgttggaaaacctttttacaaaacctattttaagaaaatacatgagttgctaaccagatgat

SEQ ID NO: 225856 - DNA, 353 bp, Unknown
  Bacterial polypeptide expressing nucleotide sequence isolated from the Sargasso Sea
tatgagtttaacagacgaaggacattacggaccaaaacaacttaatttactaaaagttgtttggggcgaaggttttctctctcctggtggtactgatgaaattgatgaaataatgacaggtgtaaatgctaaagataaaactgtacttgatattggatgtggatgtggtggtgctgcttttcatttattaaaaaaatacaatgttaaatcagttgaagggattgatcctgagcctcttgttattcaaacagcaaatcagttagctataaaaaataatcttcaagatgtcacaatttttaagcaaataaatccaggtccacttgattatgatgatgaatcatttgatatgatct

SEQ ID NO: 225857 - DNA, 634 bp, Unknown
  Bacterial polypeptide expressing nucleotide sequence isolated from the Sargasso Sea
atgagtttaacggacgaaggacactatggaccaaaacaacttaatttactaaaagttgtttggggtgaaggctttctttctcctggtggtactgatgaaattgatgaaataatgacaggtgtgaatgctaaagacaaaaacgtacttgatattggttgtggatgtggtggcgctgcttttcatttattaaaaaaatacaatgttaaatcagttgaaggaatagatcctgaacctcttgttattcaaacagcaaatcagttagcaataaaaaataaccttcaagatgttgttacgtttaaacaagtaaatccaggaccacttaattatgatgatgagtcatttgatatgatctttagtaaagaggcttttttacatattcctaataaagaagcattattaaaaaatgttcaccgaatattaaaacctggtggattaattgtggttagtgactggatgcgcatggatgacaatccgccctccaaacaaatgcaagagtatatagatgcagaaggccttgatatgttaatgtgttctctagaaaagtataaagaattacttcaagaaaacaattttactgatattgtaataaaagatcgtcatgattggtacttaaagaaagcaaaaaaagaattag

SEQ ID NO: 225858 - DNA, 211 bp, Unknown
  Bacterial polypeptide expressing nucleotide sequence isolated from the Sargasso Sea
aatgaataatattataagcattaggaaagactggaatctgattgagtcattaattagagaaaatgcacgaattttagatataggctgcggagaaggagatttaattcaacagcttgaaaaaaacctttcagctaaagttcatggtattgaaaaaaagccaaaaactagccttgaaaggaattgccaagggactaaatgtaacccacggtga

SEQ ID NO: 225859 - DNA, 607 bp, Unknown
  Bacterial polypeptide expressing nucleotide sequence isolated from the Sargasso Sea
ttggagaccccggaccagcatcggaaattttatgatgattgggcggaaagctacgattcagggtttgccgcatcgaagggctatgattatccaaggttgattgccgaatattttgccggtcgggtgagcccagaccaaagtccggtgctggacatcggttgcggcaccggtctggtcggtgtttctctgagggaggaaggctggtcctccgagttgaccggggtcgacatttcccaggggatgctggaggtggcggaaaggaaaaaggtctatcaaaagttgatatgtgcagacctgaacgagactttgcaactgcctcaaccccattttggcggaatgatcagtgccggaactttcacccatggacaccttggtccggaagtcctttttcatcttttttcccttgcaagaccgggagcccatgctgtgatcgggatcaatgccaagcatcatgggaaccaggacttttcaggtgcattccgggaatgggaggaaaagggaatcgtcggcaaaactaaatggacagaaatccaaatctatcaggcccctgaaggaaaagaaccggaaaagaagctggcactgattgcggattttaaaattttatagc

SEQ ID NO: 225860 - DNA, 517 bp, Unknown
  Bacterial polypeptide expressing nucleotide sequence isolated from the Sargasso Sea
aatgactacagtaaataaagaggaaattcaaaagttttcaaaaatagctgatgagtggtgggatacaaaaggcaaatttaaacctttgcatatgtttaatcctacaagaataaaatacataaaggaaaaatgtatttatcactttaaattaaaagaaaataatttaaaaccattagcctcattagaaattttagatataggttgtggtgggggtttaattagtgaaccgatgcacagactaggtgcaaaagtcacaggtatggatgcgtctgaaagaaatattgctgttgcaaaacttcatgcaaaaaaaaatggattaaatataaattatataaaatcatcaccagaaaaaaatactataaaaaaaaactttgatgtaattttaaatttagaaattatcgaacatgttcaagacgttaatctctttttaaagtcatgcagtaaaatgttaaacaagggtggaataatgttcgtagcaacactgaataggactttcgaatcttatattaaggcaatc

SEQ ID NO: 225861 - DNA, 457 bp, Unknown
  Bacterial polypeptide expressing nucleotide sequence isolated from the Sargasso Sea
aatgaaaaaaagttttgttacagaattgcataaaaaaacaaaaagaaattacaaagaaaggatgattaacaataaagtaaaatgtatgaaaattgcaaaaatgtactcaaaagattactgggatggaaatagaaaatttggttatggtggatatagatatatcgatggatattggaaaaaaacagctttaagaattataaaaaattacagcttaaaaggaaattctaaagttttagatataggatgtggaaagggatttttaatttttgagattaaaaaattgattccttcaattaatattgtgggaattgataattcgcaatatgcaattttaaatgcaaaaaatgaaataaaaaagaatttaagagtttttgacgcaagaaaaaaacttccattcaaaaagaaaagttttgatttagtaatttcgttaggaaccttacataatttttcacttaaa

SEQ ID NO: 225862 - DNA, 238 bp, Unknown
  Bacterial polypeptide expressing nucleotide sequence isolated from the Sargasso Sea
ttgacggatttagtggtcgaaggtggcagagtccttgatattgggtgcggcgaagggcaggtggctcgacttctctcatcgaactcaaccaaggtctttggcgtcgatccagcatggagccaggtcagtgaagccacacgccgtagcactcgcgaggtatatggccaagcttccgcaacggcgctcccatttgcggcagaagtattcgacacagcggtggcatgtcttgtcttgagca

SEQ ID NO: 225863 - DNA, 724 bp, Unknown
  Bacterial polypeptide expressing nucleotide sequence isolated from the Sargasso Sea
acaaaaagataaaaaagaacacattattaaaaaacttcaaataaatgaaaagatgaatgttttagatataggttgtggatggggtggaatggccattgaaattgctaagtcaacaggggcaaaagttaaaggtataactttatctgaaaatcagtttaaaactgcatctgaaagagctcaaaaggaagggttgagtgataaagtttcattttcattgcaagattatagaaatgaaaaaaatcaatatgatagaatagtttctgttggtatgtttgaacatgttggagttaaatattttagaacctatcttaaaaaagcaaatgatattttaaaagataatggcgtatttttgctgcatacaattggccaaagaggcataccaacagccaccagtccttggataagaaaatatatttttccaggagggtatataccatcgttatctgaaattatgaaggaatcacaaaaacttaatataaatgtaactgatatagaggttttaagacttcattatgcctatacactttctcattggtataaaaatataattagaaataaagacaaaattataaaaatgtttgatcaaagattttatagaatgtgggagttttatttattagctagcaaatattcttttgttaatatgggaaatgttgtatttcaaatacaaattgcaaaaaatattaacaatttacctttaactagaaactatatttacaactaa

SEQ ID NO: 225864 - DNA, 421 bp, Unknown
  Bacterial polypeptide expressing nucleotide sequence isolated from the Sargasso Sea
atgacggatgatgccatcaaacacagcagcgaaactgcgtaccggttggagaccccggaccagcatcgtaaattctatgatgattgggcggaaagctacgattcggggtttgccgcatcgatgggttacgattatccaagattgattgccgaacattttgtcggtcgggtgaatccggaccaaagtccggtgctggacatcggttgcgggaccggtctggtaggcgcttcactgaggaatcaaggctggtcctctgagttgaccggggtcgatatttcccaggggatgctggaggtggcggaaaggaaaaaagtctatgaaaagttgatatgtgcagacctgaacgagactttgcaactgcctcaatcccattttcgcggaatgatcagtgccggaactttcacccatgggcaccttggtc

SEQ ID NO: 225865 - DNA, 605 bp, Unknown
  Bacterial polypeptide expressing nucleotide sequence isolated from the Sargasso Sea
aagaccccggacccagcatcgtaaattctatgatgatggggcggaaagctacgattcggggtttgccgcatcgaagggctacgattatccaaggttgattgccgaatattttatcaggcgggtgagccgggaccaaagtccggtgttggacatcggttgcgggaccggtctggtgggtgtttctctgaggaagcaagggtggtcctccgagttgaacggggttgatatttcacaagggatgctggaggtggcggaaaagaaaaaggtctatgagcagttgatatgtgcagaccttaccaattctttgcaactgcctcaatcccattttggtggaatgatcagtgccggaactttcacccatgggcatcttggtccggaagtccttttccatcttttttcccttgcaagaccgggagcccatgctgtgatcgggatcaatgctgagcattatgggaaccaggaattttcaggagcattcaaagaatgggaggaaaagggaatcgtcggcaaaaccgaatggttagaaatccaaatttaccaggccccggatgggaaagaaacggaaaagaagctggcgctgattgtggattttaaaattttatagt

SEQ ID NO: 225866 - DNA, 443 bp, Unknown
  Bacterial polypeptide expressing nucleotide sequence isolated from the Sargasso Sea
tatgagtacaatgactacaataaataataaggaaattcaaaagttttcaaaattagctgatgaatggtgggatgccaacggtaagtttaaacctttgcatgcatttaacccgattagaattaaatacatcatcgataaatgcagttcccactttagtattcaaaaagatagcaaaaaatttttatcacctttaaatatactagatattggttgtggtggaggtcttgtatgtgaacccttgagtaggttgggtgccaaagtaacaggtattgacgcatcatataaaaatattgaagtggcaaaaattcatgcaaaaaaaaataatttaaaaataaattatttaaatacatctccggaaaaagaggacataaatgaaaaatttgatgttgtgctaaatttagaggttgttgaacatgtggaaaatttagatttgtttttaaaat

SEQ ID NO: 225867 - DNA, 513 bp, Unknown
  Bacterial polypeptide expressing nucleotide sequence isolated from the Sargasso Sea
tctgattaaaagaagttcaaaatttcatatagaaaaaactctcttggaaaatcctaattggaaaatattagatataggttgtggatataatgcgaataatttcgctacgacactaagtgacataactgacttatctgaatattataaagaaaaaacttttgtaaggattacagaaaaaaagctaccattcaaagataaagagtttgactttgttattgcatctcatgttgtcgaacatgtcaaagatatcaaatattttttaaatgaattaaatagaattggaaaaaaagggtatatcgaggttccaacaagacttgaggataatttagtttttgaaaataaaaaagcacacctttggcatttagtgtatgatgatgtcaaaaataaattaatcatatatgataaaatacaatattttgagcctatcttttcaattggtacaataaagaaatttaataaatattttagagaaagtttggtaatagaattattttgggatgggacgattgaatt

SEQ ID NO: 225868 - DNA, 682 bp, Unknown
  Bacterial polypeptide expressing nucleotide sequence isolated from the Sargasso Sea
attttaaaaggattaaatctaaaaaataaaaaagttctggatattggatgtggaacgggcggtgcagtctttcatatgattgaaaaatatggtgcaaaggaagttattggaatagatccagaaccgttagtaattgaaacagcaaataatttagcgttaaagaaaaatttatctgataaagcaaaatttatttgtacgaagccaggtgaatataaatttgaagataaaagttttgaggcagtatttagtaaagaagcatttttacatattatcgataaaaaaaatctgctgaaagaaataaacgacatcttagctgatgatggtattcttgcagttggcgattggatgagaaacgatgatggcgaaccatcggagcagatgaaagaatatattgctgcagaaggcctcgatatgtttatgtgctcattagaaaagtacgaaagtcttttaaaagaaacaggatttaaagttctctcattaaatgatcgtaataaatggtatctcgaaaaagttaagaccgaaatatcagatataaaagggccactttatgatgatgttgtaaatctaataggaaaagaagaggcagacggtgcactagaaatttgggaaaaacttcttggcgttgtggaaaaaggagaacatcgccccggtaattttcaagctgtaaaaatttcaacctaat

SEQ ID NO: 225869 - DNA, 415 bp, Unknown
  Bacterial polypeptide expressing nucleotide sequence isolated from the Sargasso Sea
aatgaaaaaagatataagtattagaaaagattggaaattaattgaatccatgattgactctaattcaagggtcttagatattggttgtggagatggaggattgattaaacagctggaaaaaaatattgctgcaaaaactagtggcatagaaattaatcctaaattagttcagactgcaattggtgatggtagcaaggtagtcctaggcaatgcagaacaagatttagaacaatattctaatcatagttatgattatgttattttaagccaaaccttgcaagcgatgttaaaaccaaaaagtgtacttttagaattattaagaataggaagaaaggctatagtttcttttcctaattttggatattggcaaataagattacaattactattattaggaaaaatgcctataacaaaa

SEQ ID NO: 225870 - DNA, 211 bp, Unknown
  Bacterial polypeptide expressing nucleotide sequence isolated from the Sargasso Sea
atgaaaaataacacaattaataaaaaagaaatagaaaaattttctaaaattgcagaagaatggtggaatccaaacggaaaatttaagccattacataaatttaaccccattagaattaaatatattaaagaaaatatagtaaatgactttaaaataaaaaaaaaaatcaaacctctacatggcttgaatattctagatattggatgtggtg

SEQ ID NO: 225871 - DNA, 515 bp, Unknown
  Bacterial polypeptide expressing nucleotide sequence isolated from the Sargasso Sea
tatgggttctattccaaataaaactaatattaattctagagaattaatatggagtgaggaaaatgcattatggtatgctgaccaatatggtaatcatatttcaaacgagcttacgattaatagtattcctttagatccaaatgatatccttcttgatatcggatgtggaataggtaccgcagtaaaaatagctgcgaaaagatgtaagaaaggaaaagtctacggagttgaccctattgaaactatgataaagattgctaaaaaagatcaagttaaaaattcaaatatagagtttagtattgggattgcagaggatattccactacagaatgaatctgtaaataaaataataaccattaactcaattcatcattggagcgactataaaaaaggtctatcagaagtaaaaagagtattgatatccgatggattattctttatttctagtgatattgttaataataatgattgtggtcatggcccagggccattgcaagcaaacgaagatattggta

SEQ ID NO: 225872 - DNA, 532 bp, Unknown
  Bacterial polypeptide expressing nucleotide sequence isolated from the Sargasso Sea
tatgtctgaaattaataaaaatcaaaaagagttttggtccggtaaaggtggagatatttgggttaatcaacaagaagctatggattctatgctgagcccccttggcaaggctgctctaaacaagctaaatttagatcaaaaagaaaatattcttgatattggttgtggttgtggacaaacaactctagaaatagcagaaatgatccctgagggaaaaattaccggtctagatatatctgtacctatgctagaaagagcaaaagatacagcaatgaaaaaaaatttacctaatgtctcttttgaatgtaaggatgttcaaactgatgatttaggaaattcaactttcactaaatgcttttctcgatttggagtgatgttttttgaagatcccgttagagcctttaagaatataaacagtagcttagttgatggaggctctctttcctttgtctgttggcaagctccttctttaaacccttggcaatcattatctgtaagagcggtaaaaaaatatcttgatctaccttcacct

SEQ ID NO: 225873 - DNA, 562 bp, Unknown
  Bacterial polypeptide expressing nucleotide sequence isolated from the Sargasso Sea
atgactactataaataaagaagaaattcaaaagttttcaaagttagccgatgaatggtgggacgccaaaggtaaatttaaacctttgcatatgtttaaccctattagaattgagtatataacagaaaaaataaagtcccattttaatctgagtaatgaccttggcaataattttttacaaggaaaaaagatattagatatcggatgtggcggagggttaataagcgaaccacttgctagattgggaggagcaatcactggtatagatgcatcaaaaaaaaatatagaagtcgctaaactccactcaaagaaaggtaatctgaaaataaattaccaaaataagtctccagaacaactagatagtagagaagaatttgatattattttgaatttagaaataattgaacacgtcgaggacgtaaatctttacctaaaatcttgcagtgacttaattaaaaagggcggtttaatgtttacagctactttaaatagaactgctatatcatatgtaaaggcaatcgtaggtgcagagtatattttgagatggcttcctatggaacgca

SEQ ID NO: 225874 - DNA, 677 bp, Unknown
  Bacterial polypeptide expressing nucleotide sequence isolated from the Sargasso Sea
aaatcaatctgttttagatattgggtgcggttggggtggaatggcctctcatatttataagaagtcaaatgcaaatgttgttggtgtaactctgtcagaagaacaaattgcttatgcccaacaacgaaaagtaagagagaagctggataaagttgagtacagacttcaggattatcgaaacgtgaatgaaaaatacgatagaattgtatctgtcggcatgtttgaacatgttggaactgcacattatcaggaattttttaataaagtttacgatctattaaacgatagtggagtggctcttatacatacgatcggcagattaaacgagcctggaaacactgacccgtggatagataaatatatttttcctggaggatacataccagcacttagtgaaacagtatctagggtagaaaaatcaggattatctctcactgatgtgcaaattctaaaatttcattacgctgaaacattaaagagatggagatataatttttacgacaacatagataaagtaaaagagatatatgatgacaaattttgtagaatgtgggatttctatctttcctcatctcaggcatcatttgaggagtcaactttagttgtatttcaaatgcagctttctaaaaacaaaaagactgttcctgataaaagagattatatgcttatggaatagc

SEQ ID NO: 225875 - DNA, 608 bp, Unknown
  Bacterial polypeptide expressing nucleotide sequence isolated from the Sargasso Sea
aaattcaaaaatattggatattggatgtggaagagcaaatattattagtgctcttcaaaagaaatataaatttagaaataaacccatagggattgatattgttgcgaataaggatgttaaaaagaatattgtatttaagagagtgaatgccctaaaatatttaaataaaaatgaaaaatatgatctaatcttaatcaaacaaacaattcattttttttcaaaatcaaatttaaatcgtcttctaagcctttctaaaaaaagtttaaataataacggaaaaatattaattttttcactaaaaacaaataataataaattaccttgttttaaaaaaatgagaaaaaatttagaaaagagtttaaaaagagatgaagtattatttaagattataaaaaaaaaatttaaagaaataagctacgcaaactttaactttaaagtaaatatatctaaacaaaaatacattagaatgattagagaaagatacatttcatgcttattaaatatgagcaataaagaaattaaacttggtatcagtgaaatagaatctaagtataaaaatcaaataaaattcactgataccttaaaatgtataagctacagaaaataat

SEQ ID NO: 225876 - DNA, 586 bp, Unknown
  Bacterial polypeptide expressing nucleotide sequence isolated from the Sargasso Sea
ttaaaaaaaaaaattcttgatattggctgtggtatgggaggatttatagagattgctaaaaaaaataaatggatttctgagggtatagaatttaataagtatgcatctaaatatttaagaaaaaagggctttaaagtttacaatgattatttggaaaatttaaacctaaaaaaagattattcctgcgtatcaatgtggaatttatttgaacatttagaaaatccacatcagatgttaaaaaatataaaaaaagttttagttccgggtggtttggtttttgttttagtcccaaatattgatggtttagtaaatagaattttaaaaaaggatgcagtagcttttgctggctacacacacttgaatttttataatcataaaacattaatgaagacttttaaaaaaaatgaatttagagttttacattttgaaactattttcacagaaatagagtctattaagaattatttaaattttgaagatccttattttggtgagtcaaataaaaatcaaaattatttctcatcaaaattcttacataaaaattatttaggcagtaaattaatgatgattgcacaaaataaatgaa

SEQ ID NO: 225877 - DNA, 470 bp, Unknown
  Bacterial polypeptide expressing nucleotide sequence isolated from the Sargasso Sea
gatgaaaattttagataaatcattacattggaaactcttaataaatccagatttatatttaggtgaaggttatatgaatggatcaattataattgaaaacggttcattgactgaatttttagatatagctcttaaaaatgttggtagaaaacccaccaatgaattaacaaatatactagcaagatttagaagaatttatagatatttaacaaattttaatttaattggaaaatcaaaagaaaatgttgctcatcattatgatatatctgaaaagttttatgatttatttttagatgaaaaaaggcaatactcatgtgcttattttaaagatgaagacaatacacttgaggaagctcaaaataataaaatcgatcatataattaaaaaattaaatcttaagcctaatcagagagtgttagatataggatgtggatggggaactcttgctattgatattgcaaaaaaaactc

SEQ ID NO: 225878 - DNA, 661 bp, Unknown
  Bacterial polypeptide expressing nucleotide sequence isolated from the Sargasso Sea
atgttatttaacgatggaggcgcttacgagacgtctatggggacctggagtcgtctagtaggggaggtttttattaaatggctgcgagctgacggaaatttaaaatggttggatgtgggttgtggtaatggagcattttcggggttgatcaaaacctcctgctttccaagtcaagtcgacgcaattgatccgtcagccgagcaaattgattttgcgcgttcccgctcagacgcagaaaatgtgaactttgaagttggcgatgcaatgtctatagcatcggatgataacacctttgacatagcggtgatggcgctcgtcattttttttgtgcctgacccaccaaagggtttgtcagaaatggtaagggtagttaaaagaggtgggcttgtaaccagttatacctgggataccataaacaaagggtcgccttccagtttgataaccgggcaccttaccgagatgggatttaagcccgacgcgccgccgaaccctcaggtttccgagatgtctgctcttaataaactttggtccagtggcggtctggtagatctaagaagcgatgtcattaccgtagaacgtcggttcaaagatatcgatgaatattggaaaatagcatctttgtttcctaaatattcagaaaggatcgtacccctgttttaac

SEQ ID NO: 225879 - DNA, 847 bp, Unknown
  Bacterial polypeptide expressing nucleotide sequence isolated from the Sargasso Sea
tggtagagaggatacaaatattttcaataaaattattaactcttttagaggatcttatcgtgccttaactaactttaattttatctcaaaatcaaaaaaaaatgttgctcaccattatgatatttcagagaagctttatgatttatttcttgataaaaatcgacaatactcatgtgcatattttaaaaataaaaatgatagtattgatcaggcccagataaataagattaatcacattataaaaaaacttaatttaaaaaaaaatcaaaaagttttagatattggctgcggatggggttcacttgctattgaaattgcgaaacaatcccaatgtgaggtcgtaggaattactttgtcagagaatcaactaaattattgtaaagaaaatgctaaaaaaaataatctggaaaatcaagttcaatttaaattattagattatagagagatgaaagaaaaatttgatagagttgtaagcgtaggcatgttcgaacatgtaggaagaaaattttacaaaagattttttaataaagtttctgaattattaaatgaaaatggactagcattgatacatacaataggatcgataaattccccacgagatcctcatccttggataactaaatatatatttccgggagggtatactccatctttatcagaggttgcattaccaatagaaaaatctggcttgataatttctgatctggaggtcttaagaatgcattatgctcacacccttagacattggaaagatagatttttgggaaatagagataaagtattagagctttttgatgaaaaatttattcgaatgtgggagttttatttggttggatgtgaaatggca

SEQ ID NO: 225880 - DNA, 817 bp, Unknown
  Bacterial polypeptide expressing nucleotide sequence isolated from the Sargasso Sea
tcgcttgttttaactgaaggttatatggataaagattatgaattagaaaatacctctttttttgaattttcagatctactgattgaaaattataataaatatcttgaaaaaatatcaaatactattttttttagagtctttcttattatcaatcctttgtttcaactcaattttataaagaattctaaaaataatgttgccagtcattatgacttatctgacaaactttatgacttatttttagatgaaactagacaatattcgtgtgcctattttgaaaaagatactgatactttgaacgatgctcaaaacaataaaatgaatagattagctgataaactattacttaattcatctgataatgttttagatattggctgtggttggggatctttgagtaaaaattttgcaaataattataagtgtaatgttaaaggaatatcactatctgaagaacaaattaaatattgcaatgaacaacttgaaaataacgaaaataaggaaaaattaaattattctctccaagattatagagatgaaaataatagttacacaaaaatagtttcagttggtatgtttgaacatgttggaaagcctttttataaaacttattttaagaaaataaatgaattgttatcagatgaaggaatagctgtagttcacactattggcaatataagaacacctaagttaaccccaacttttataagaaaatatatatttccaggtggatatattccatcactatcagaaattatgcctgcaatagaaagatcaggattaataatatctgatattgaggttttaagattacatt

SEQ ID NO: 225881 - DNA, 387 bp, Unknown
  Bacterial polypeptide expressing nucleotide sequence isolated from the Sargasso Sea
gatgaatataaaatcaaaaaatgaagaatttacgttgtttaatcagctttctgacgaatggtgggatgaaaaaggtaaatttagaattcttcatcaaatcaaaagtcatagaatgacttatattttacaacaaattaataaaaagaatattaaaaaattaaaaatacttgatatcggttgtggtggaggaattatttgtgaaccactagcaagactaggagctaaagttacaggaatagattttgctcctaataatatcaaagctgctaaattacattcaaaaaaaaataaactaaaaattaactatatttataaagatattgaaaaatcaaaaatagatgaaaaatttgatataatactaatggttgaagttctagaacatttaga

SEQ ID NO: 225882 - DNA, 664 bp, Unknown
  Bacterial polypeptide expressing nucleotide sequence isolated from the Sargasso Sea
tatgagcaagagtgctgatagattttttaaattatcttactggttaagaaaattttatgtatctaaattttcgaatttttttttttctaatgaaacaataagaaagaatgtattcacaaatatatatttatctaatcattggcaaaactattttaaaataaatttgcaaaagtctagaagtggtcctggttcagacttaaataatacatcaaatatgagcaaggaacttgaaaaattttttgtaagcaaaaatataaaaaaaattctagacataggttgtggagattttatttggatgaatttattactaaataattattataaatatgataaatatttaggactagatattgttgatgagttaataaaagataataatttaaaatattcaaacgataaaatttcatttaaaacatttgatttagttaaagatgaaattccaaaaggctttgacataattttaattagagatgtatttatacatcttaaaaatgaacaaataattaattttctgaatcatcttaagaatttagatataaaattttttggagttacctctacaccttcattaaataaaaataatgaattaaaaacagtgggaagatatagagatataaataaagaaattgaaccattcaatcttaaagactttttgcataaaatt

SEQ ID NO: 225883 - DNA, 691 bp, Unknown
  Bacterial polypeptide expressing nucleotide sequence isolated from the Sargasso Sea
aaaaaagatatttgtttagagttgataaatttttacaaaaatctaaaaataaacagagacaggatgaaatttgagaatgctttggacataggctgtggatcaggctttatgacaaatcaaataaatagattagaaaattttagtaaaattcatttaattgatatttcaaaaaaaatgatttcaaaagcaaaacaaaatttatcaaatgaaaaattttcctttgaagttgcagacttcgataattttaaatgttatggaatttatgatttagttttttctaatatgtcattacattggtcaggaaattttactaaacttttttttaatttgttaaatcagattccctgcggtggctcatttattttttcaattccaaattcaataaaatttgattttgaatcatctgaaataagtaaggacttttttgaaaaattgattaacatgctaccagactctgatgatttaaatagaatgattgataaagacaagttttattttttatcaaaaaaaaaagtttttagtgaaaaatttaaaaaaccacttgatttttttttgaatttaaaaagcatcggagcaaacattaatttaaaaaaaactaaaataaatttattttttttaagaagaatgacttcagaaataaaaataaattatcatataagttttttttttattaaaaaaattaaagaataaa

SEQ ID NO: 225884 - DNA, 218 bp, Unknown
  Bacterial polypeptide expressing nucleotide sequence isolated from the Sargasso Sea
aatgagtactactataaataaagaagaaattcaaaagttttcaagattagctgaggaatggtgggatgttaatggaaaatttaaacctcttcatatgtttaatcccattaggattgagtacattacagagaaaattaaaattcactttaagttaaaaaaagatagatctaattatttagagggattaaatattttagatattggttgtggtggtggac

SEQ ID NO: 225885 - DNA, 619 bp, Unknown
  Bacterial polypeptide expressing nucleotide sequence isolated from the Sargasso Sea
ttgctaaaaagaacaaatttaaaatttattaacagtttattaaaagaaaataaagattggaaaattctagatataggttgtggatattctgcaaatgaaaatgcgaatgttatagcagatgcaaaagatttgtctttattttataaagaaaaacagtttgtacaaataaaagataaaaaactaccttttaaagataaagaatttaattttgtaatagctagtcatgtcctagaacatgttgaagaaattggattttttatatctgaattagagagaatatctattcaaggatatatagaacttccaacaatactagaagataatttggtgttcgaaaacaaaaaagaccatgtttggtccatgaagtttgatgatacaaaaaataaattattaattaataaaagagttcaatttatagatcctattctatcagtatcttcaataaaaaaattaaataaatattttagagagagttttattatagaaattttatggagagaaaaaatagattatgaaattgttgagactgaaaaaaatttaaacaaaatttcaaggcttaatcttcttaaaaagtttttttctaaaagtataagaagtttttttaaacaaataactgaat

SEQ ID NO: 225886 - DNA, 235 bp, Unknown
  Bacterial polypeptide expressing nucleotide sequence isolated from the Sargasso Sea
aatgaaaaataacacaattaataaaaaagaaatagaaaaattttctaaaattgctgaagagtggtggaatcctcaaggaaaatttaaacctttacataaatttaacccaattagaattagatacattagagataatattatagatcattttgcaataaaaagtaaaacaagacccttaagaaatattaatattttggatatcggatgtggaggaggttattatctgagcaaatga

SEQ ID NO: 225887 - DNA, 790 bp, Unknown
  Bacterial polypeptide expressing nucleotide sequence isolated from the Sargasso Sea
tatgagcttaaccgatgaaggacattacggcccaaaacaactaaatatgctcaaaactgtctggggtgagggttttctatcacctggcgggacagaagaaattgatcagattttaaaaggattaaatctaaaaaataaaaaagttctagatattggatgtggaacgggcggtgcagtttttcatatgattgaaacatatggtgcaaaagaagttattggaatagatccagaaccgttagtaattgaaacagcaaataatttagcgttaaagaaaaatttatctgataaagcaaaatttatttgtacaaagcctggagaatataaatttgaagataaaagttttgaggcagtatttagtaaagaagcatttttacatattatcgataaaaaaaacttgctcaaagagataaacgagatcttagctgacaatggtattcttgcggttggtgattggatgagaaatgatgacaacgaaccatcagagcagatgaaagaatatattgccgcagaaggcctcgatatgtttatgtgctcattagaaaagtacgaaagtcttttaaaagaaacaggatttgaagttctctcactaaatgatcgtaataaatggtatctcgaaaaagttaagacagaaatatcagatataagaggaccactttatgatgatgtcgtaaatctaataggaaaagaagaggcagacggtgcactggaaatttgggaaaaacttcttggcgttgtggaaaaaggggaacatcgtcctggtaattttcaagctgtaaaaatttcaacataa

SEQ ID NO: 225888 - DNA, 193 bp, Unknown
  Bacterial polypeptide expressing nucleotide sequence isolated from the Sargasso Sea
atgaataaaaacaaaagtattagaaaagactggaaattaattgaatcttttattgaaaataattcaaaagtacttgatatcggatgtggagaaggggaattaattaaacaattagaaaataatattcaagcagatactagaggtattgaaatagatcctaattggcaagaaatgctatatcaactggtttaag

SEQ ID NO: 225889 - DNA, 736 bp, Unknown
  Bacterial polypeptide expressing nucleotide sequence isolated from the Sargasso Sea
cctagaggaagcgcaggaaaataaaattcaacatataattaaaaaacttgatattaaaaacaatcaacgcgtattagatattggatgcggatggggaggtctgtgttttgaaatagcgaaacagtttaattgtgaagtaaccggagtttcattaagcactaatcaaataaattattgtaaagaaaaagcaaaagagcttggattagaaaatcaagtcaaattcgagttacttgactatcgtttggttaagggaaactatgaccgtatcgtgagtgtaggttttggggaacacatcgggattaagttttataatgcattttttaaaaaaataaatagcatattaaaaccaagtggagtcttcttattccatttaatcggtgtagttgataaacctactgctcctaatcaatttattaataaatatatttttccaggtggagtttgcccttcgttgagtcaacttattaaacccattgaaaaaacaggtttaatagttgcggatacagaaactttaattaggcattacgataaaacgcttgaagcttggttagacagatttcttgcaaaaagaagccaaattaaagatttatttgatgagaaattttgcaaaatgtgggaattttacttagccagttgtgctgcagcatttagatatagagacttggcagtatttcaattacaaattgtgaagaactttaatgctgctcgacccacaagagactatatatattcataa

SEQ ID NO: 225890 - DNA, 592 bp, Unknown
  Bacterial polypeptide expressing nucleotide sequence isolated from the Sargasso Sea
ttggcatcaactgtcattaaaaactgggataataaaacttggctttcttccaatgattacattaagtcatttaataaatttttattcaaaaatataaaattaaacccaaattctaaaatattagatattggatgtggtcgaggaaaaattcttggcaatttatgctcaaagttgaaattaaaacaaaagcctcttggaatagatataattgatcacaaagatagagataaaagaattagttttaaaaagacaagtgcttcaactttttttctaaaaaataaaaaaaaatttgatttgatattaatcaagcaaactattcatttgatgaacataaaagaaataaaaaaattattaaattcattaaggaaaaatttaaatcaaaatggcaagatttttatattcactttagacacaaatgaaaatgaattaccaacctttaagttaatgaaaaaaaaactaataaaatctcttaaaagagacaagaaaataataaaaattattttagatcttgatttagtaaagattaaaaaaaagtttatttttaaagtaaaaatatctaaacagaattatttagatatgataaaaaaaagat

SEQ ID NO: 225891 - DNA, 298 bp, Unknown
  Bacterial polypeptide expressing nucleotide sequence isolated from the Sargasso Sea
tatgaaaagtaaacatataaaagaaatctctaaattatattcaaaaagatttaatgacataacattaagtaaaataaataaaattggatggggaagtactaaaagtcagaaacttagatttaaattattgacagaaaattttgattttaaaaataaaacagtactagatattggatgtggctttggagatctgtatagttttattgagaatcaatatagcataaagttaaaaaaatatgttggtatagatgtttgtgatgattttattgtgagcaataaaaaaaaatttataaaaaat

SEQ ID NO: 225892 - DNA, 619 bp, Unknown
  Bacterial polypeptide expressing nucleotide sequence isolated from the Sargasso Sea
atgacaaaaaaaaaatttgattatgaagaaatagatgtggggttttatgatcatatttaccaaaaaaaagagggtgttagaagtgcttggcatcatattaaatttaattttgttagagaaaaaatagataatcagaatcatcatttagatattggttgtggaagtggtacttttttatcaatattaaataataaattctcagctggaattgatatttctgaaaaacaaatcaattatgctaataaaaaatatagtacagatagtaaaaaatttttgcaatttgacaaagtaattccatttgaagacaatagttttgactcagtttcaatgattgaattaattgaacatttgtctgatgatgaaattgcaagtatatttcaacaaatacatagagttcttaagaaaggtggaaaaatttatataaccactcctaattatttgtcattgtggcccattttagaatttattttaaataaagtttcaaaggtttcgtatgaagatcagcatataagtaaatttaattttttaaatataaataaaattattaataatgataaatttaatataataaaaaaaaattcgtttatatttttaagtccttttacagcttttttttcat

SEQ ID NO: 225893 - DNA, 421 bp, Unknown
  Bacterial polypeptide expressing nucleotide sequence isolated from the Sargasso Sea
atgtctcaatggtttaaccaattttacgctgcaattgcacaaagcccacttagccactggctagaaacgctacctgcccaattaaaacattggcagttagaggcaagccatggtgatttaccacaatggcaaaaagtgcttaaaaatttgcctgaaataaacacaactcacgttgatatagccactaaagtagaaattggctcaaaaggggaaatgagtgaaggccaacaaaagcaaactacacacttattaaagcgcatgatgccttggcgaaaaggcccattcagtgtgcacggtattgaaataaacaccgaatggcgcagtgattggaaatgggatcgcctccttccacatattgagccattaaaaggccgtacagtgttagatattggttgtggctctggctatcatttatggcgca

SEQ ID NO: 225894 - DNA, 892 bp, Unknown
  Bacterial polypeptide expressing nucleotide sequence isolated from the Sargasso Sea
agcaaaactttttcgtaatcccggtctttattttggtgaaggttatattaacgaagaaattattatagaaaaaggtactatagaacaattgattgatatagtaactgcaagttatgatagttttgttttaaacaatagtttttataaaaattacgaatatttttcttcaataataaaaccttttcaacaaattaacaaattggttgtatcaaaaaaaaatgtagcacaccattatgatttagatgaaaatctttataagttatttttagataaagatatgcagtattcctgtgcatattttcataaccaaaatataggtttggatcaagctcaatcagataaaaaaaaacatattattaataagctagaaattaaacaaaatatgaatgttttagatattggctgtggctggggtggtatggctatagaaatagctaaatcaacaggagctaatgttaaaggaattacattatccgaaaatcaatttgcaacagcttctaaaagagcacaagaagaaggattaaatgataaagttaaatttgcattacaagattaccgagatgaatcagagacatatgatagaatagtatctgtagggatgtttgaacatgtaggtataaaatattttaatacttttttaaaaaaaacttacaatttaatgaatgataaaggtgtttttttattacatacaattggacaaagaggtagacctacagccactagtccttggattcgaaaatatatatttccaggaggttatataccttcgttgtctgatattattattgaaactgaaaaactaaatttaaacataacagatatagaaattttaagacttcattatgcttacacattgtcacattggtataataatgtaattaaaaacaaagaa

SEQ ID NO: 225895 - DNA, 769 bp, Unknown
  Bacterial polypeptide expressing nucleotide sequence isolated from the Sargasso Sea
aatgccttgtctaaattgtaattcaataaatttcaaaaaaaaatttaaatcttattctggcgtaatgttcaaaatttgtaaagattgtaaatgtgtatatcaagatcccctaatcgaaactaattattcagattcatattggcaaggcgggtatgacagagatggtaactatagagattttacaaaggaaagagattttaaaattaaaaattggtatggcagtattataaattatttgaatacggataaaagaaatctttctgttttagatattgggtgtggtcttggctatcttttaagtgcgcttaataaaaattatgataaatatggcatcgaaagctcagattttgccacaaattatattaaaaaaaattttaccgatataaagattgaaaacggtgattacaaaaacataggagtttttaataaaaaattcgatgtgattagtttatatcatgtaatcgaacatctaaaaaatcctccagaggcaattgaactagtttataaatttttaaaaaatgatgggattttaattattggcacaccaaatactgatagttttgtagcaaaagtgtttggtaaaaattttagacacttcacttatgatcatacatgtctttatggaagacatagtctaacaaaattattaacaaaaaataaattcaaagttttcagagaggaaaaaccttttttttcaacaatttacaataattttagtaattattataaactttttttattaaataaactctctcccgctttttacgga

SEQ ID NO: 225896 - DNA, 563 bp, Unknown
  Bacterial polypeptide expressing nucleotide sequence isolated from the Sargasso Sea
aatgaaaacaactacgataaataaagaagaaattgataaattttctaaaatagccgaagagtggtgggatcctgaaggaaaatttaaaccactacatatatttaatcctcttaggataaaatatattaaagatagtataatcaaacattttaaaattaaaaaaaaaaaattacctttatctggcttaaagattttagatataggttgtggaggcggattgatcgctgaacctatgagtaggttaggtgcaaatattacaggtatagatgcttccgaaaagaatataaaaattgctaaagcacatttaaaaaagaataaattaaaaataaattataaatgtgcttcacctgaaaatttaaatcaaaaagaaaacttcgatgtaattttaaatttagaaattattgaacacgtggaagatgtggaattatttatggagaaaagctcaaaactattgaaaaaggatggtttaatgtttgtagcaacaataaataaaacattaaaatcttatttatttgcaataataggagcggaatatattcttagatggcttccaattggtactc

SEQ ID NO: 225897 - DNA, 658 bp, Unknown
  Bacterial polypeptide expressing nucleotide sequence isolated from the Sargasso Sea
aatgaaaaataaacaaagccttttcctttcaaaaaaaaaattactaaaagaagcgggttgtgatgattacgaagactcagcaaaacggttgttttcaaaagcttttggaatgtccccggctcagatttataaagatcaaatccatgaaagatcaaatgaaaaggcttctctattctcggaaatggttagctgcagagcagtaggcgtgccaacctctcatatagtctgctcaaggtcgttttggaagaatgatttctatgttgatgggactgtattggatccaaggcctgagagtgaattgattatagatgttactaaaaatctactttttgatggaatgacggtacttgatatagggtgtggaagtggctgtataggaatatcattgtacaaagaaaaccctaacatcacactccttctagcagacttttcgaagaaagctttaagcctttcaaagaagaatgctgaagagctacaggctgattgcaaatttattcgttcagatttattctcaaatattgatagtaaatttgacttaatcgtaactaatcttccatatattgcaaaagacgatttctgttatttgcaaaaagaaattatcctttatgaaccacatgaagcgctttacggagggcaacatggattagatatgataaag

SEQ ID NO: 225898 - DNA, 586 bp, Unknown
  Bacterial polypeptide expressing nucleotide sequence isolated from the Sargasso Sea
ttgattgatcatgacggacaaaaatatatttgtggagaaccaaaaagtaaaaaacctattgttcttaaattattagacaaaaatttaaattggaaattagttttaaatccagacctcttatttccagaagcatatatggatggaaaaataataattgaaaatggaagtttaagtgaatttttaaatttaatatttaaaaatattggtaggcaagaaataactacatcaggttacttatttaaacaaatcttgcaaatctggagatacttaagcaattataattttcctctaaaatctcgaaaagatattcaacaccattatgacgttggaggcgagaaaggtgaaaaactatatgatatatttttggatgagaaacacagacaatattcatgtgcttattggaaaaatactagtgaaacgttggaacaagctcaacaaaataaattaaatcatataattactaaattaaatattaaacctggacaaaaagtattagatataggttgtggttggggaggtatgaccttcgagattgcaagacaaaaaaattgtgaagtagtagggatatctttaagcaagaatcaaa

SEQ ID NO: 225899 - DNA, 565 bp, Unknown
  Bacterial polypeptide expressing nucleotide sequence isolated from the Sargasso Sea
aatggataaaacctcgaaattatttgatgtatgggcaaagactggtcgttccgaagaaatggaaaaaggacatggcaccacggtaaatcaatttttagacaaactctcactgaaagagaaatttagatttcttgacattggttgtggcaatggctgggtggtacgaaaaatgtcacaaaagccatcttgtgtaaaagcaattggaattgataaaagtaaaatgatgatcaaaaatgcaaaatcaaaaatttcctctactaaagaaagtttttttgttactgatcttgaatcatggaatacaaaagaaaaatttgatgtaattttctctatggaatcattatactattctgtaccgatggagcctgcattggaaaaggtattcaaactactcaaaaaaggtggcaccttttattgtggaactgatttttacagtgataatactctgacgactaggtgggtaaaagacatgaatattccaatggatttacgttctgaaaaagaatggaaaaaaatgttcagagagattggatttactactcgttcaaaacatgtacagatccaaaaa

SEQ ID NO: 225900 - DNA, 629 bp, Unknown
  Bacterial polypeptide expressing nucleotide sequence isolated from the Sargasso Sea
aatgaaaagcataagaaaagactggcgactaatagaatcattaataaaaaataattctagagttttagacattggttgtggcggcggagaattaattgaacagcttgaaaaaaatattaatgccaaaactcatggtatagaattaaattcaactctagtccttgatgctatatcaaaaggatataatgtagtacatggaaatgcagaaatagatttaaatcaatattcagatcaaagtttcgattacgttattttaagtcaaacacttcaagctatgatgaagcctaaagaaattctttctgatctattaagaattggttcaaaagcaatagtttcgttcccaaattttggatattggaaaattagacttcagttgctcttatctggtaagatgcccgttacagaaggcttgccttttacttggcatgatacaccaaacattcatttttttacaataaaagattttcaaaatctttgtaaagatatgaatataattattgaacaaagtattggacttacatcaaagggtaagcaaataattattaatgataattttaatagtgcaaatctgttaacacatgaagctatttttctcttaagctataaaacttttgaaccaattcaaataa

SEQ ID NO: 225901 - DNA, 682 bp, Unknown
  Bacterial polypeptide expressing nucleotide sequence isolated from the Sargasso Sea
atgaaagaacaaaacaaagatattgaccaactaaaggtcttcttcaacaattactcttcaagattttcgggtatatatgtcgaggacgaaaatccaagaagttggtttgattcaattattgacaaatattttcgtcaaacagtataccaacgttatgccaatactgtttctcatcttgaaaatcctgaattaaatacagtattagatattggatgtggtccgggacattatgtcatgtcagctttaaaactcggaaagaaagtaaccgctttggatatcgcctcgaaaatgttagatctaacaaaggcaagggtagatgaatctgaatttggggctagtgttgattatttactagccgattatatggaacacactttccaaaacaaatttgatgcaacaatagtaatgggattctttgattatgtcgctgatcctgtaccttttataaagaagctccttgcagacacttctaaagaaatttacatttcagttcctaaaaatgacggatggcaagcttttcagagaaaaattagatactggattaataaatgcccattgtatctatttagctttgatcaacttaaaagcatcttaactgactcagagtgtttgtcagaatcagagattattccaatgaaagacggatggtttgttgttattaggccaggagctactcattaaa

SEQ ID NO: 225902 - DNA, 421 bp, Unknown
  Bacterial polypeptide expressing nucleotide sequence isolated from the Sargasso Sea
atgaaaaaactaaaaaattgggataataaaacctggttatcatctaaatcgtatatctctcaatttaataaatttcttaaaagaaaaagtaatttaaataaaaattcaaaaatattggacattggatgtggaagagcaaatattattagcgcccttcaacagaaatataaatttagaaataaacctattggaattgacattgttagtaataagggtgttaaaaaaaatattatatttaagaaagtagaagctttaaaatatttagataaacaagaaaaatacgatctaatcttaatcaagcaaactattcattttttttcaaaaaaaaatttaaatcgtcttcttaatcttgctaaaaaaagattaaacactaaaggtaaaatattaattttatctctaaaaacaaaaaataataagatac

SEQ ID NO: 225903 - DNA, 679 bp, Unknown
  Bacterial polypeptide expressing nucleotide sequence isolated from the Sargasso Sea
gatgaatggtgggatgtgaatgggaaattcaaacctcttcatatgtttaatccaataagaattgaatacataatagaaaaaattaaaaatcattacaagattgataaaaacaaaacaaattttttaaatggttttgatgttctggatatcggatgtggaggaggtctaataagtgaaccaatgacaagattgggcgctaatttgacaggtatagacgcatctgaaaaaaatattagtgttgcaaaattacattccaaaaaaagtaacttaaaaataaaatatatctcaacctctcctgagaaattacaagataatgaaaaatttgatataattctaaatcttgaaatagtcgagcatgttgatgacgtcgatttgtacattagatcttgttccaagttactaaaaaagaatgggttaatgtttacggctacattaaatagatctttttcctcttatgtgaaagcaataatcggtgcggagtatattttgcggtggcttcctataggaacacatgattggaataaatttattaagcctgaagaattagagaaaattttaattgcaaataaattcaatacattagatattagtggtcttcaatttaatccaattattaaacgatggaaaagatctagagacctatcagtgaattatataatttgtagtttaaaaagttaat

SEQ ID NO: 225904 - DNA, 499 bp, Unknown
  Bacterial polypeptide expressing nucleotide sequence isolated from the Sargasso Sea
gaaggtcgctgggagaaggttgcgatggcgatggctgctcactacaaattgcctcccaatcctaaaatcttagatataggttgtggcaaaggatttttgctttatgactttataaaggtgataccagatgcagagatttatggcatagatgtttctccttacgcgatttccaatagcaaagagaacattcgcgatcgcctacaggttggttccgcgaccgatctgccctggcccgatgattactttgatctggtaatctcaataaatactcttcataatctgcacgcctatgaattaaactccgctcttaaagagatggagcgtgttggcaaaggctataaatatctttgcgttgaaagttatcgaagcgaacatgagaaggttaaccttctttattggcaggttacatgtgaggcttttaatacgccgaaagaatggctttggtggtttgagcaaactggctataaaggtgattattcattcatttatttcgaatgat

SEQ ID NO: 225905 - DNA, 202 bp, Unknown
  Bacterial polypeptide expressing nucleotide sequence isolated from the Sargasso Sea
aatgtggaaatcaaaaactcctggaattccagatgaagaatttgaaagaactgaatctgtcccaataacaaaagaggaaattcgtgccatacaaatcagtaaaggtagattatctgcaggacaaactgttttagatattggatgtggaagtggctctgttacagtagaggcagcaattcaattgaagattccggaaaagtag

SEQ ID NO: 225906 - DNA, 715 bp, Unknown
  Bacterial polypeptide expressing nucleotide sequence isolated from the Sargasso Sea
aatgagacctttaaaaaactgggataataaaacttggttgtcatcaaaaatttacatttctcattttcataaatttttaagaacaaagataaaatttaaaaaacattttgcaattttagatattggttgtggtaggggaaatattactggtaatttacaaaaaaaatacaaatttaaaactaaaccaattggaattgatataatcaaaaacaaagatataaataagaatatattatttaaaaaaatagatgcaaagaaatttttaatccaaaactccaaaaaatatgatctaatattgattaaacaaataatgcatttattagataaaaataaaagacattctataattcaattatcaaaaaaaaaattaaaaaaaaatggagtcttgttgatattgtctttaagtccttttaatactgaattaccaacatttaaaaagttttcgataaatcttaaaaaaagtctaaaaaaagataaagtagtaataaaagaaattaaaagaaaattaaaaaattataaaatttcttattttaattttaaagtaaggattaaaaagttagattatattaatatgattagaaatagatatatctcttgcttattaaatatgtcagttcttgaaattgataatggtgtaaaagagattgaaaaaaaatacaaaaataatttagtttttaccgacaagcttttgtgtattgagtataaaaagaattaa

SEQ ID NO: 225907 - DNA, 322 bp, Unknown
  Bacterial polypeptide expressing nucleotide sequence isolated from the Sargasso Sea
cttgacggatgattccataaagcacagcagcgaaaccgcgtatcgtttggagaccccggagcagcatcgtacattctatgatgattgggcgaaaagctacgattcggggtttgccacatcgaagggctacgattatccaaagttgattgccgaatattttgtcggtcgggtgagcccggaccaaagttcggtgctggacatcggttgcgggaccggtctggtcggtgtttctctgaggaaggaaggctggtcctccgagttgaccggggtcgatatttccgaaggaatgctaggaggtggtggaaaggaaaaaggtctatga

SEQ ID NO: 225908 - DNA, 262 bp, Unknown
  Bacterial polypeptide expressing nucleotide sequence isolated from the Sargasso Sea
atggtgacgaataccgagcaatccgttgcagaccattacacaaggggtagcctgcttgagaccatcctgaatggaatcaaaaaagcaggcaaatccgttgattcgatccagcatgaagaccttgcccccttggatgaattccacctgggcagcagggaggcaaccaggcatttcctcgggcaaatgggtttaaccagggaaatgagcgtgttggacatcggttgcggactaggaggagcagcgagattttgcgcccattgaa

SEQ ID NO: 225909 - DNA, 268 bp, Unknown
  Bacterial polypeptide expressing nucleotide sequence isolated from the Sargasso Sea
aatgaaaattgaagataatgtacttttaaatttaattgaagctaaatctaaagttctcgatataggatgcggtgatggaaacttactcttaattttaaaaaaaaataaaagtattaatggtagaggtatagaaattaatcaaaagaaagtcacagagtgcctatctaaaggtcttgcagtgatagagggtgatgcagaaaaagatttaataaattatccagataattcatttgattttgcaatcttaaatcaatcacttcaacaattt

SEQ ID NO: 225910 - DNA, 520 bp, Unknown
  Bacterial polypeptide expressing nucleotide sequence isolated from the Sargasso Sea
atgaaaaaacttaaaaactgggataataaaaattggttatcatccaaaaagtatatctcagaatttaataaatttcttaaaaacagaattaatttaaataaaaattcaaaaatattggatattggatgtggaagagcaaatattataagtgctcttcaaaagaaatataaatttaaaaataaacccatagggattgatattgttgcaaataaggaagtaaaaaagaatattatatttaagaaaattggtgccttaaaatatttaaagaaaaaagaaaaatatgatcttattttaatcaaacaaaccattcattttttttctaaatcaaatttaaatcatcttctaaatcttgcccagaaaagcttaaataacaaaggtaaaatattaattttttcacttaaaacaaataataataaaataccttgtttcaaaaaaatgagaaaaaatttagaaaaaagtttaaaaagagatgaagttttatttaagataattaaaaaaaacttaaaaaaaataagctaca

SEQ ID NO: 225911 - DNA, 441 bp, Unknown
  Bacterial polypeptide expressing nucleotide sequence isolated from the Sargasso Sea
tatggcatcagttgtcattaaaaattgggacaataaaacttggttatcttcacaaaattatattaattcatttaataattttttaatcaaaaataccaaaattaattcaaattttaaaattttagatattggttgtggaagagggaagattttaggttctttaaaatcaaggttaaaacttaaatataaacctctaggcatagatattgttaatcacaaagatagagataaaagaattaaatttaaaaaagcaaatattttaaatctttctttaagaaaaagtcaaaagtttgatttaattatgattaaacaaacaattcatttaataaaattaagtaaggtaaaaaaattattaaaatcattagaaaaaatattaaatacaaaaggtaaaattataattttcactttagatacagaaaataatgaaatccaacttttaaa

SEQ ID NO: 225912 - DNA, 904 bp, Unknown
  Bacterial polypeptide expressing nucleotide sequence isolated from the Sargasso Sea
atgcatttagctagttttttaaataaagtatttaaaaaaggtggctttattttgactgacgctaacttaaaagactatattattggaagtcctgagagtaatccaataagaataaagattttaaataaaaatcttcattataaattattgtttcacccagatttatattttggtgaagcttatacgaatggtgaaatcaaaatagaaaatggaacacttagtgattttttagatttagcattaatgaatttcggaaggggtgaacttaatttctttagttatttgataaatagaatcagaggttcttttagatacctcacaaattttaattttattaagaaatctaaaatgaatgtgtcgcatcattatgatatctcggatgatctctatgatttgtttttagatccgaagagacaatactcatgtgcttattttaaaaatgaaaaagatagtttaactaccgctcaaaataataaaattcaacacattataaaaaaattaaatattcaatcaaatcaaaaagttttagatatagggtgtggttggggatctttagctatagatatagctaaaagtgcaaaatgtgaagtcacggggattacattatcagaaaatcaatttaattattgcaaacttaaagcaaaagaaatgaatttagaaaatcaggttaaatttagattaattgactatagagaacttgacgaaaaatttgatagaattgttagtgttgggatgtttgaacatgttggtaggaaattttataaaaaattctttaatcaaattgaaaatttactcaaagaagacggtatttcgctaattcacacaattggctctgtaaatcctcctagggatcctcacccatggataacaaaatatatttttcccaggtggttatactcctagt

SEQ ID NO: 225913 - DNA, 580 bp, Unknown
  Bacterial polypeptide expressing nucleotide sequence isolated from the Sargasso Sea
tatgaataaaaaaaaaattttagattactggaatttaagagctggaaaaaaaatcttaaagtgtacaaatgatataaatttagaaaagaacgaaataggtatttttttgtcaatcattaaaaacaaaaaaaatgtcttagatataggttgtggcgatggtgaacttttaagaaatcttaaaaaaaaaaataaatgtaattgctatggtatagattttagtcagaatttaattaaaatagcaaaacggaaatctagaaatatcaattattactgcattgatatgaataaaattaaagatgagtttaaaataaaaataaaattcgattatataattaccaaaagatcaattcaaaatttaacttcatggaaggatcaaaaaaaatttattgatcaattaaaatttttttcaggcccgaaaacaaaaattctacttatggaaagctctaacaatggtctacgaaaaattaatgagatgagaaataagcttaaattaaaaaaaatcataaaaccttggcacaatctatatttagaagactcgaagataaataaaacaaattttaatggtttgaaattagttaat

SEQ ID NO: 225914 - DNA, 574 bp, Unknown
  Bacterial polypeptide expressing nucleotide sequence isolated from the Sargasso Sea
atgggtaataatttcaatttaaataaaaataaatatggtttttaccaaataaatccaaccccttcgagtgaagaaattacaaaattttatgccgatgaattttatactggtgaatacaaaaattttaacgactcatctctagaggttcaattaaatgataaagaattttttttcggaaagtggcaggatatgtatgatacatttattgagatcaatccaaacttaaaaaaaaaatgctcaattttagatatcggttgtggatgggcccaagcactacttttttttaagaataaaggatttgattgttacggttttgatccagctccagaagcagttgactatggaaaaaaaaaaggattaaatttaaaacatgcaggtttagatggaatggatgtttttgacggtaaacagtttgatgtggtatgtttgttaaatgttctagagcacgtcgctgatccagaaaaaacaattcttcaaattaaaaaaattttaaaaaatgatggtatccttttaatagacgtacctaatgaatttaatgattttcaaattgctggaagagatcttcactctctaa

SEQ ID NO: 225915 - DNA, 283 bp, Unknown
  Bacterial polypeptide expressing nucleotide sequence isolated from the Sargasso Sea
atgactacagtaaataaagaggaaattcaaaagttttcaaaaatagcagatgagtggtgggatacaaaaggaaaattcaaacctttacatatgtttaatcctataaggattaaatatattaaagaaaaatgtatttcacattttaaattaaaagaagataaccctaaaccactcacaaatttagagttactggatatagggtgtggaggtggcttgataagtgagccaatgtgtaggctaggagcaaaagtaactgggattgatgcatcaaacaaaaatataa

SEQ ID NO: 225916 - DNA, 736 bp, Unknown
  Bacterial polypeptide expressing nucleotide sequence isolated from the Sargasso Sea
atgtatttattaaattttttaagaaggttaattaaagaggatggatttgaactagtagatgcaaataacaaatcatacttaattggaaaaccaaaaaaagaaaaccctataagactaaaacttttagataagtcattacattggaagcttttgataaatccagatttatatttaggtgaaggttatatggatgggtcaattgtaatcgaaaatggaacattaacagagtttttagatattgctttaaagaatgttgggagacagcctactaataaaataacaaatttgttagggaggtgtagaagagtttatagatatataacaaactttaacttaataccaaaatcaaaaaaaaatgtttcacatcattatgatatttctgaaaaattttatgatttgtttttagataaaaaaagacagtactcatgtgcatattttaaaaatgaaaatgatacattagagtcggcacaaaataataagatagatcatataattaaaaaattaaatcttaaacctaatcaaaaagttttagacataggttgtgggtggggaactcttgcacttgatatagcaaaaaaaactcaatgtgaagttgttggcattactctatctgaaaatcaattagaatatgcaaatcaaaaagctaaagaaatgaatttagaaaaccaggtagagtttagacttgcagattatagacagcttgacgaaaagtttgatcgtgttgttagtgttggta

SEQ ID NO: 225917 - DNA, 551 bp, Unknown
  Bacterial polypeptide expressing nucleotide sequence isolated from the Sargasso Sea
tatgctttattctgttttaaaaaaagtaaattttaaaggaaaaattttaattgtagatagtagtgataaaactcatgagtttggaagcggttcagataatttaaaaattaaactaactactaaatcaatagaaaaaaaattgtttagaaacccaggtctttacttcggagaaggctacatgaataaagaaatattaataaaagagggcacaatagagcaattggttgatttgataacttcatgttacgatgattttattcaaaataattttatatatagaatatatgaaaatttttctggctatattaaaattttccaacagctgaatgaagctgtaaaatcaaaacaaaatgttgcacatcattatgatttaaaagaagatttgtataaactttttttagatcaagacatgcaatactcttgtgcctattttcataacgaaaatattagtttagatcaggctcaaattgataaaaaaaatcatataattaacaagcttaatattactgagaatatgaatgtattagatattggatgtggatggggtggta

SEQ ID NO: 225918 - DNA, 244 bp, Unknown
  Bacterial polypeptide expressing nucleotide sequence isolated from the Sargasso Sea
aatgaatgtttcccatcattatcatatttctgatgatttatatgatttatttctagatccaaagagacaatattcatgtgcttatttcaaaaaaaagactgatagtttagaagttgctcaaaataataaaattcaacatattataaaaaaattaaatatcaaaaaaaatcaaaaagttttagacataggttgtggctggggttcattaacatttgatatagcaaaaagtgcaagttgtgaggtt

SEQ ID NO: 225919 - DNA, 364 bp, Unknown
  Bacterial polypeptide expressing nucleotide sequence isolated from the Sargasso Sea
tattattaaaaaattaaatcttaaacctaatcaaaagattttagatataggttgtgggtggggaatactagctattgatatagcaaaaaaaactcaatgtgaagttgttggaattactttttctgaaaatcaactagcatatgcaaaacaaaaagcaaaagaattgaatcttgaaaaccaggtagaatttagactcgcagattacaggcagttaaatgaaaaatttgatagagttgtaagtgttggtatgtttgaacatgttggaagaaaattttacagtaaatattttaaaaaggtttttgaatttttaaatgatgatggtgttgcaataatacatactatcggatcaataaatccaccaaga

SEQ ID NO: 225920 - DNA, 472 bp, Unknown
  Bacterial polypeptide expressing nucleotide sequence isolated from the Sargasso Sea
catgtataaaaattttaaaattgataaagcattatataagaatggcaaatatgatgtttttaaatatatcaataaaatagaagcttccacaaacggcttcttttatcagaagaaaaaaaataagaatgtttcaattccaaatattgatttaaagacggcaaataatagagatttacttttagatattggatgtggctggggtagatggtgcttttctgcttcaaaaaaaaattatttacctgtgggtgttgatactctctttagttatttattagcagcaaaaagatatagtgaagaaaataatattaatgcttattttatttatgccgatgcattaaatttaccttttaagaagaatatatttgatgcaattttttcatttagtgtttttcagcattttcctaaaaaagattttttttctatgttaaaaaaaactaaaaaaattttaaaaaaaaatggtttatttaaattt

SEQ ID NO: 225921 - DNA, 877 bp, Unknown
  Bacterial polypeptide expressing nucleotide sequence isolated from the Sargasso Sea
gtcgattatagcggacaaaaaattatatgcggggaacctagaaaagaaaatccaataacagtaaagctacttaaaaaaaatctaaattggaaattagttatcaatccagacttatctttcccagaagcttatatgaacggtgaaataataattgaaaatgctactttaagtgaatttttagatcttgcttttaaaaatgttggcagaagtgaaattactacttctgcatacataattaagaaaatattacagctatggagatttatgagtaattataattttcctttaaaatctaaaaaagacattcaacatcattatgatgttggaggtgaaaaaggtgaaaaactttacgatatttttttagacaaaaaacacagacaatactcttgtgcttattttaagaccccaaacgatacacttgagcaagcacaacaaaataaaatagaccatataattaaaaaattaaatattaagccaggtcaaaaattgttagatataggttgtggctggggagggttagcgtttgagattgcgagacaaaaacaatgtgaagtattgggaatttctttaagcgaaaatcaaataaaatactgtaaagaaaaagcaaaagaacataatttagataaccaggtaagatttgaactgattgactacagacacgcaaaaggaaaattcgacaggatagtttcagtgggcatggcggaacacttgggtaaaaaattttataaaacttattttaaaaaaattaatgaattattaaaaaatgatggcattggcttaattcacaccataggctctatagatcatcctcagccacccgccccctttattcaaaaatatatttttcctggaggagtagtcccttctttaagtgatt

SEQ ID NO: 225922 - DNA, 559 bp, Unknown
  Bacterial polypeptide expressing nucleotide sequence isolated from the Sargasso Sea
atgaaattatcaaatttgcaaaaaaaattaaaaaaatctgaacaataccttcctgctgaagatacattctttcttgcagataggctaaaggatctttgtggtaaatctgcattagacataggatgcggttctggctatctgaccgacattctaaactcaaattttcaattagttgttggaaccgatattagtttcaacaccctttgtacacaaaattataaaactcaaaatgctatatgctgtcattctgcagatgcattgaatttacaatttgatctcatcatttgcaatctcccttatctcgcaactgatgaaattattgatgttgcaactgatggtggaaaagatggattggaaattccattagaaattatcacttcagcattacctcatttagacaagaatggaaaattcctgtttgtaacttcatcattatctgactatatgggattagttaattttgtaaattccaaaggttttcaagcaaaaataattgataaaaaaaaattattttttgaagaactgattattgtagaagtaaaacactcactttcttaaa

SEQ ID NO: 225923 - DNA, 673 bp, Unknown
  Bacterial polypeptide expressing nucleotide sequence isolated from the Sargasso Sea
ttggtagatgcgaactcaaaatcgtacataattggaaagtcaaaaaaagttaatcctataaaacttaagattttggataagacactgcattggaaacttttaataaatccagatttatatctaggtgaaggttatatgaatggatcaatcgtaattgaaaatggtactttgacagaatttctagacattgttcttaaaaatgttggaagacaacctaccaatgaaataacaggtatattagcaagatttagaagagtttatagatatataacaaattttaacttgattggaaaatcaaaagaaaatgtggcgcatcattatgatatatctgaaaagttttatgatttatttttagatgaaaaaagacaatattcttgtgcttattttaaaagtgaagacaatacacttgaagaagctcaaaataataagatagaccatataattaaaaaattaaatcttaaacctaatcaaagagtattagatatagggtgtggatggggaacacttgctatcgatattgcaaaaaaaactcaatgcgaagttgttggaattactctatcagaaaatcaattagagtacgcaaaacaaaaagctcaagaaatgaatttagaaaatcaagtagagttcagacttgcagattataggcaacttaatgaaaaatttgatcgagttg

SEQ ID NO: 225924 - DNA, 772 bp, Unknown
  Bacterial polypeptide expressing nucleotide sequence isolated from the Sargasso Sea
gctgtgccaacaggtcatcgccaaccgttttctgccgatcccgcccgaagaagacgtctttgtcggcgatggcgattaccgcgccatcggggcggagttcctggatcattttgtccgcatgggcgggcttaaaaccaccgaggatgttcttgatatcggttgtggcatcggccgcattgccgtcccgctgacacagttcctgaaccgcgaaaaggcgatctatcgcggcatggatccggtgcgcggcggcattgactggtgcaaacgtgccatcacgcctgcctatccgaatttccggtttgaatgttcggacatccgcaatgaactctacaaccccgaaggcgaaatcagcgggcgcagcatgcgactgccttttcaggacggaacattcgatttcactgcaatgatctcggtggcaacccacctgccgccagacgaaatcgaagcctattgttccgaggtctttcgtgtgctgcgtccgggcgggcggctgtttctgacggcttttgtcatccgcgaggatgacgatccctcgcatcccgaccgcgatgcccgcctcaaggggttcgagaaggccgaaggccaaccctgctggcacctgcgcggtgaaaacccgatggcggctgtcggcattgaggatgcttttctgggtggtgccctgaccactgccgggttcgatatccacgccaaaagcttcggcgcatggcgcggtgttgcttctgcccactaccaggatttcctgatagcccagaaaccacggaggagtgcatga

SEQ ID NO: 225925 - DNA, 255 bp, Unknown
  Bacterial polypeptide expressing nucleotide sequence isolated from the Sargasso Sea
actgaaggtactagagaagagcactcgcgatgtttatgagcgaaacgccaggctatttgatagtgagcggtcgaaaaggctcgaggaaaaaggctggctagatcgcttttcggacttgttacccaaaagggctaaagttcttgatatcggttgcggtgctggtgaacctattgctcagtatttgattagtcaagggttcgaagtagaggggatagatttttctgaggcgatgcttggaattgttagaggacgatt

SEQ ID NO: 225926 - DNA, 574 bp, Unknown
  Bacterial polypeptide expressing nucleotide sequence isolated from the Sargasso Sea
gatgttgctcgaacagactgtttctgaacattatgccaacaccggtcttttagagaaaatatacgacggcttgggggaacttggtattgataaggataaattaatacagtctgatttatcttctgttgatgaatttcacattggtgggtcggaaggcacattgatgctggcagagaagttatccataaacgcatcgagttatgtattggacattggatgcggaatagggggacccgcacgtttattatcaagcaaaattggctgtaaagtttctggcattgatctcaccgcagatttcgtcaataccggcaattcacttactgaaaaagtcggattatctggtaacgtaaagttgatagaggcgagcgctctcaacatcccattcgccgataacagttttgatgtcagctatatgatccatgtggggatgaatattgcagataaagatgtacttttctcagaagcatttagagttacaaagccgggcggattgttcgggatatatgatgtcatgctcgttggaaattgtgaacttcaataccctttaccttgggcggcaaaggaaaatggaaat

SEQ ID NO: 225927 - DNA, 667 bp, Unknown
  Bacterial polypeptide expressing nucleotide sequence isolated from the Sargasso Sea
aatgactagtactataaataaagaagaaattcaaaagttttcagatatcgctgatgaatggtgggatgtaaaaggtaaatttaaacctttgcatatgtttaatcctgttagaattgaatatatttcagaaaaaattattcaatattttaatttgaagaataaaaaaacaaaaccttttcaaggtttgaaattactagatattggatgtggtggtggtctgataagtgagccgatgtcgagattaggtgcttcagtaactggaattgatgcatccgaaaaaaatattaaagtagcaagtattcatgctaaaaaaaataatcttaatataaattatatcaataaatcaccagaacaaatgaaaaattccgaaaaatttaatattatcctaaatcttgaaattgttgagcatgttaatgatattgatctatatatagaatcttgccaaaatttacttgataaaaaaggtttaatgtttacagcaacattaaataggacaatgtcttcatattttaaagctataataggcgcagaatacattttaagatggctgcctattggaacacacgattggaataaatttttcaaacctgaagaattagaaaaaaaattggaaaacaataaactcaaaaccttagaaataaaaggtcttgaatttaaccctttaaca

SEQ ID NO: 225928 - DNA, 403 bp, Unknown
  Bacterial polypeptide expressing nucleotide sequence isolated from the Sargasso Sea
atgactaaaaaaaacaaaaagaaatcatcgagagcggacttgcagataatatcctctcttgttaaaagtgattctaagattcttgatattggatgtggagatggtgatttgcttgaagttctatcaaagcaaaataattgtaattgcaggggtattgaaatatcgcatcatgctgttagtaaggctttaatgaaaggtttgtcagtagttcagggcgatgctgaagattgtttggatttctatcctgatcgtgaatttgattatgcaattatgtctcatactattcaggcaactaaaaggcctgatcttatgcttgaacaaatgcttcgaattggtgataaggtaatagtatcattgccaaattttgcgaattttaaaaacaagatttcatcttttttttaaa

SEQ ID NO: 225929 - DNA, 234 bp, Unknown
  Bacterial polypeptide expressing nucleotide sequence isolated from the Sargasso Sea
tatgactacaataaataaagaggaaattcaaaagttttcaaatttggcagaagaatggtgggatgtaaatggtaaatttaaacctttgcatatgtttaatcctattagaattgaatatattttagaccaaatttcaaaacattttaaacttgatagaaaaaaaaatttttttctaaaagatttagaaattctagatattggttgtggaggaggcctcattagtgaaccaatggc

SEQ ID NO: 225930 - DNA, 724 bp, Unknown
  Bacterial polypeptide expressing nucleotide sequence isolated from the Sargasso Sea
tttagatattggttgcggatggggtggtttgggattgtctatttacaattgtaatccttcaacaagaattactggaattactttatctaagaaacaacatatttattttaatcaacttataaaaaaaaataaattaacaggtaaagttgagtgtttattaaaagattacagagaactagataataaatatgacagaatagtatcagttggaatgttggaacacgtaggacaccataattttgaaaaatttttcaaatttattgaaaatcatttaaaaccaaaaggtgtagcggtcatacattcaattggaagatatggtcttcctacacatacaaatccttggctagagaaatatatattcccagggggatatttacctacatttagtcaaatgactaatgctatcgaaaaaacttctcttaaaataacagacatagaagttatgcgcttacattatgctgaaacattaaaaaaatggagagaaaaattttttaaaaataaatcatttttgcctaaaacatatgatgaaaagttttctagaatgtgggaattttatcttttagcaagtgagtatttttttagatccggtggaggaatggtatttcaatatcagcttgcaaaagaccaagaggtggttccattagacaggaagtacatatcttctttggaaaaaaaatattctaaattattaaagcaaaaagaatttacttacatattaaactag

SEQ ID NO: 225931 - DNA, 701 bp, Unknown
  Bacterial polypeptide expressing nucleotide sequence isolated from the Sargasso Sea
caaagttttagatattggttgtggaggtggcattacatcatttgaagcatcaaaaatagtaggaaaatacggatatgtcttaggagccgatatttctaaaattctattagatttagcgaagaaaaatttttcagatattaaaaacttagaatttaaatattgcgatgttcaaaactataattttaaaaaaaatattttcagtaaagttatttctagatttggagttatgtttttcgaaaatccaatactagcttttaaaaatatttataattcaattcaagatggtggttcattgcattttgtttgctggacaaacgtaatggaaaatgagttttttactgctgcagctaatattattataaaacatctaaataaggaatttccaaaagttacacggtcaccaggtccatttgcctttagcgaagaaaaatatataaaacaaattttagattcttcaggatttaaaaatattaaagtagataaagtctacacatcgctatctactaatgacgatgctgcaaaagatggggaactcctctttaaaataggtttagcaggaagactattatcagaagaaaatttatcagaaaaagagctttcaaacataaaagataaaataattgcaatgtctaaaaaccgacaagtagatggtaagataacatatagggcatgtttaaattttgtttcggcaactaaataat

SEQ ID NO: 225932 - DNA, 181 bp, Unknown
  Bacterial polypeptide expressing nucleotide sequence isolated from the Sargasso Sea
tatgacaccttcaaaaaatagcataagaaaagattggagtttaattgaatcttttattgagactaaatctaaagttcttgatattggatgtggagaaggtggtcttttaaaacaattagaaaataatattcttgctgataccagaggaattgaaattgatcctgatttagctagaaaagct

SEQ ID NO: 225933 - DNA, 691 bp, Unknown
  Bacterial polypeptide expressing nucleotide sequence isolated from the Sargasso Sea
tcaaacttagctcatgaatggtgggatgtagatggtaaatttaaacctttacacatgtttaatccaataagaattgaatatattttagatcaaatttctaaatattataaattagacagaggaaaaaaacattaccttaaaggtttaaaaatactagatattggatgtggagggggattaattagcgaaccgatggctcgtttaggtggcgaggtaactggtattgatgctgcagaaaaaaatatcaaagttgcaattcttcatagcaaaacgagtaatttaaaaattaattatttaaataaatcacctgagcaattaaacattaaagaaaattttgatataatacttaatcttgaaattgtggaacatgtaaataatttagatctgtatctgaaatcttgttataacttactaaaaaaagatgggttgatgttcactgcaacaattaatagaacattcgcctcttacgtcaaagctatagtcggggctgaatatatattaagatggcttccgataggtacccatgaatggaataaatttataaaaccagaagaattacaaaataaacttaataatataaaatttataactaatagtataaaagggttagaatttaatcctattttaagaaagtggaaaaaatctgataatttatcagttaattatattgttagcagtataaaaaattaat

SEQ ID NO: 225934 - DNA, 739 bp, Unknown
  Bacterial polypeptide expressing nucleotide sequence isolated from the Sargasso Sea
acacttgaggaagctcagaataataagattcaacatataataaaaaaacttaacattaaaactaatcaaaaagttttagatattggttgtggctgggggtctttggcaattgatattgccaaaagcgctaactgtgaggttactggaatcacattgtctgaaaatcaattgaactattgcaggaaaaaagcaaaagaacttaatttagaaaatcagttaaattttaaattaatagactatagagaacttaatgaaaaatttgatagaattgtaagcgttggaatgtttgagcatgttggcagaaagttttataaaaaattttttaaacaaattgataaattacttaatgaagatggaatttccttaattcataccataggatctgttaatccaccaagagacccgcatccatggatcaccaaatatatatttcctggtggttatactccaagtttgagcgaggtaactacacctattgaaaaagcggggttaatagtagctgatgttgaagtattgagacttcattattctcatacacttagacactggaaagaaaattgtatgaataacaaagaaaaaattattcaaatttttgatgaaaaattttttagaatgtgggaattttatttagcaggatgtgaaatggcattcaaatggggagatcaggttgtatatcaatttcaactaacaaaaaattatacatcaacaccagtcacaagagactatatttatcaataat

SEQ ID NO: 225935 - DNA, 138 bp, Unknown
  Bacterial polypeptide expressing nucleotide sequence isolated from the Sargasso Sea
aatgaaaattgaagataatgtacttttaaatttaattgaggctaaatctagagttcttgatataggttgtggtgatgggaacttactcttaattttaaaaaaaaataaaagtattaatggtagaggtatagaaattaa

SEQ ID NO: 225936 - DNA, 594 bp, Unknown
  Bacterial polypeptide expressing nucleotide sequence isolated from the Sargasso Sea
aatgttacttgcaaaaattctaaataaaaaaattaaatttggaggctttatacttgaggaggctaattcaaaaaaacactctataggagttgctaattcagataataatattttaacattaaaactcttaaaaaaagatcttaattggaagctagttttgttaccggagttatatctcggtgaggaatattttaaaggaaatatagagatcaaaaacgggactatttatgattttttatatctcattcttcatagagaaaattttggtaggggaaaagtcaattcattatctgcgattttaaattttttaagatatggctttagttttctaactaaacataatttaataggagcatcaaagcgtaatgccatgcatcattattcaagaggagaggatatttatgactggatgttagacaaagagcatcgacaatactcatgcgcttactttaaggatctcaatgaaacattagagcaagcacaaacaaataaacttgaattaattttaagaaaactaaatttgaaaccaagtgatactgttttagatataggatgtggctggggagggctctcacgttatattcataaaaaaat

SEQ ID NO: 225937 - DNA, 667 bp, Unknown
  Bacterial polypeptide expressing nucleotide sequence isolated from the Sargasso Sea
atgaattatatagattttgttggatctactcacaaatcaacaaaaagaaattatcttgagagagttaatgagcatgataaatctatttgtgctgaagttgcttctaaatttgattacgaatattgggatggtgaacgaaagtatggttttggaggttatcgatatgatggacgatggaaaactgtagctaaaaaatatgtagattattataatataaaaccaggagatagtgttttagatattggttgtggtaaaggttttttattatatgaaatttataatttggttcccaatcttaatgtggctggaatagatatatctaattatgcagttaataatgcaaaggaagaaattaaggaatttataaagataggctcgatttctgagtctttaccatggaatgataattcttttgattttgtttatagtataaataccttacacaatttatataattatgagataaatacagcaatcaaagaaataaatagagtttcaaaaaataaatctcatattacagttgaatcatatagaaatgaaaaagaaaaagttaatttaatgtattggcaacttacatgtcgagcattcatgactcctagtgaatgggaatggttatttaattattactcctataatggtgattacgggtgtatctattttgaataaa

SEQ ID NO: 225938 - DNA, 373 bp, Unknown
  Bacterial polypeptide expressing nucleotide sequence isolated from the Sargasso Sea
ttgattggagtttatagattctttaaaaaacagtcagaaaagtggttcaataagtcgtatgaaccaaaagccagatatttttttgtgtcaaattgcccattgtgcttgagtgatgatagcaatgaagtttataaaatagatggcttttcataccatgagtgtcaatcctgtaattcattgtatacgaagccaaccttacgtcatgatgttttagaatcactttatagtgatgggacatatcaggtttaccatgacagtcttgtgaagacaagtttagatcttagaaaaggtattcttgaagaaaggaagcactcccaaatcgatgctctggtaaagtgcgtgaaaccttcgctgttagatataggttgcggtg

SEQ ID NO: 225939 - DNA, 712 bp, Unknown
  Bacterial polypeptide expressing nucleotide sequence isolated from the Sargasso Sea
tacaactaaagattatttagtctccggtgaaccttttgatatagttgaatgtgaaatatgttctttacgaatcacaacaccattcccagataaagaaataattggtaattattattcttctgatgattacatatcgcacaatgataaagtatctggaatatttgatagtatttatagatttgtacgcacgtatcaattaaataagaaaaagaaattaattggaagatattttaataaaacaaatggtaaaattcttgatattggatgtggcacaggtgattttttgcaacatatgaaagaaaatcattggaacataaatggcgtagacacgtcaaataaggcaagaaaaatagtaaaaaagaagttaaatattaatgttatggatcctcaagattggataaataataatgaaaaatatgatgtaattacatgctggcatagcttagaacatgtacatgaaccttgggtatatcttgataaaataaaaaagagtttaacgctggatggatttttaattgtagcattacctaattatcaatcaacagatgcaaaaatatataaagagttttgggctgcttatgatacacctcgccatctatatcattttacaataaaatctatgaataaaactataaatcctcacgggctaaatatagaatcaatatatagaatgaattttgacccattttatgtttcaatgttaagcgcaaaa

SEQ ID NO: 225940 - DNA, 748 bp, Unknown
  Bacterial polypeptide expressing nucleotide sequence isolated from the Sargasso Sea
gaaacagataccattggaaaccgctcaaaataataaaatccaacatataataaaaaaacttaatataaaaccaaatcaaaaagttttagatattggatgtggatggggttctttagcagtggatatagccaaaagtgcaaactgcgaagtaacaggtattacactttcagaaaatcaatttaattactgcaagaaaagagcaaaagaactaaatttagaaaatcaattaaactttaagttaatggattatagagagctcaatgaaaaatttgatagaatagtcagtgttgggatgtttgaacatgtaggaagaaaattttataaaaaatttttttcacaagttgaaaaacttttaaaagatgatggagtatcattaattcatactataggatcagtaaatccaccaagagatccacatccatggatcactaagtatatttttccaggaggctatactccaagtttaagtgaggtaacaacaccaattgaaaaagcaggcttaattgttgcagatattgaggttttaagacttcattactcacatacactaagacattggaaagaaaattgtattcgaaataaagacaaaataattcaaatgttcgatgaaagattttttaggatgtgggaattttatcttgctggttgtgagatggcatttaaatggggtgatcaagttgtataccaattgcaattaacaaagaattattcttctacacctgttacaagagactatatttatcaataa

SEQ ID NO: 225941 - DNA, 401 bp, Unknown
  Bacterial polypeptide expressing nucleotide sequence isolated from the Sargasso Sea
aatgagtcaaaaaaagagtttaatttacaatataatatcaagacccctagcatacatgatgatacaaaaattggcatcgggaagctcttttcaagaaaatatggttttaaaatatatcaagaaaaaaaatgaaattaatattctagatattggttgtgggcctgctgaaatattagatgtcttaccaaaatgtaattattatggttacgatgtagataaagattcaataaattatgcaaaaaaaaaatataaaaaaaaaaatataaacttttattgtaaaaaatttggcgttagagatattagtaagcttcctaaatttgattatgtttttgttatttgggatcatgcatcatttaaacgatgcagagtgtataaaattgttttaagtaatttaaaaaagt

SEQ ID NO: 225942 - DNA, 610 bp, Unknown
  Bacterial polypeptide expressing nucleotide sequence isolated from the Sargasso Sea
tatgaaaaatttaaaaatgaaaaaagaatttaaagtaattgcagatttattacctaataatacgagagttcttgatataggatgtggagacggatctttaatgcatcttctcagagtagaaaaaaatatggaggtacgtggactagaacttaatcaagacaatgttaaagaatgtatttataaaggtttaccagtaattcaaggtaatgcagaaactgaattacatcaatttcctgataaatcatttgactatgttgtgctgagtcaaactctacaagcattttatgaaccagagaaagttttaaaaaatctcttaagaataggaaaatcagttattatctcgattcctaattttggctattggaaagtgagaacaaaacttttaatttttggtaagatgccggttacaaaaacactaccaaatacttggtacaatacacctaatttacacatgtgcacaataaaagatttgtttaatttttgtgatgaaaaaaatattattattcaaaaagttgttggggttaatgaaaataaaacttcattaataaaaaaaagtaatttagaaattaaaaatcttttttcaaaagttggtatttttttaatcggttaa

SEQ ID NO: 225943 - DNA, 315 bp, Unknown
  Bacterial polypeptide expressing nucleotide sequence isolated from the Sargasso Sea
cgctgcagaaggttctgctgagcagcaagcttttatgcgaaagcagctggagcaatttatcccttggcgtaaagggccgtttaaattatttgaaatcgatattgatacagaatggcgttctaattggaaaggggatcgtttaaaagacaagattaaaccgttagaagataaaatggtgctagatataggctgtggcaatggttattacggctggcgtatgttaggtgagaaagcaaagtatgttgtcggtatggatccgactttattatttttaatgcaatttcttgcagttaaagaatatatgccgaacgccaa

SEQ ID NO: 225944 - DNA, 538 bp, Unknown
  Bacterial polypeptide expressing nucleotide sequence isolated from the Sargasso Sea
ggctcaagatctgaaggttatggtggttataagtatatcccgggatactggaaaggtttagctagaaagtttataaatttttataaattaaaaaaaaatgcaaaaatacttgatataggatgtggtaaaggatttttactttatgaaattattaaattaagaccagaccttaatgttacaggagttgacatttcttattatgctttaaaacatgcaattggaaaagaaaagattaaatataagcttcataaagcgcaaaagaattttaaatataaaaataaatattttgatcttgtcatttcaataggaactttacataatttagaaatatttgatctcaaaaaatcattaaatgaaatttctaggatatctaaaaattcttatataatggtggaaagctacaaaaataatttagagctatttaatcttcaatgctgggcacttacatgtgagtcatttttttctcaaaacgagtggaaatggatatttaaagaatttaaatataatggtgattatgaatttatattctttaaataaa

SEQ ID NO: 225945 - DNA, 265 bp, Unknown
  Bacterial polypeptide expressing nucleotide sequence isolated from the Sargasso Sea
atgactactataaataaagaagaaattcaaaagttttcaaatttagctgaagaatggtgggatgttaatggtaaatttaaacctttacacatgtttaatcctactagaattgagtacattacagaaaagataaaacatcattttgagatacgaaataataaagaaaattttttagaaaatttaaatatactggacattggatgtggcggaggtttgataagcgaaccattatctcgtttaggaggttcggtaactggtattgatg

SEQ ID NO: 225946 - DNA, 598 bp, Unknown
  Bacterial polypeptide expressing nucleotide sequence isolated from the Sargasso Sea
ctgttaaactttttaagaagattaattaaagatgatggatttgaattagtggatgcaaattcaaaatcatatataattggaaaaccaaaaaaagaaattcctataaggattaaaattttagataaatcattacattggaaactcttaataaatccagatttatatttaggtgaaggctatatgaatggatcaattataattgaaaacggttcattaactgaatttttagatatagctcttaaaaatgttggtagaaaacccaccaatgaattaacaaatatattagcaagatttagaagaatttatagatatttaacaaattttaatttaattggaaaatcaaaagaaaatgttgctcatcattatgatatatctgaaaagttttatgatttatttttagatgaaaaaaggcaatactcatgtgcttattttaaagacgaagacaatacacttgaagaagctcaaaataataaaatcgaccatataattaaaaaattaaatcttaagcctaaccagagagtgttagatataggatgtggatggggaactcttgctattgataaagcaaaaaaaactcaatgtgaagttgttggaatta

SEQ ID NO: 225947 - DNA, 304 bp, Unknown
  Bacterial polypeptide expressing nucleotide sequence isolated from the Sargasso Sea
aatggaagcacgagattactataacaaaagaggagcaacgtgtcgttctatttacgatggtgattctacaagaaatacacacaattttataaagtcagttttaattcaatcttatacacctgaaaaggctaaaatattagatattggttgtggtcaaggcaatgatttattgaaattgacatatgttaatcctgtgttttattttggaatagatatttccaatgaatctataatagcagcaatcaaaagaagcaaaaacacaaaaatatcatttcgaacaaaatttatgtgtttagattttgca

SEQ ID NO: 225948 - DNA, 433 bp, Unknown
  Bacterial polypeptide expressing nucleotide sequence isolated from the Sargasso Sea
atgaagccattaaaaaactgggataataggacgtggctttcttcgaaaagatacatcagtcaatttcataaatttataaaaagaaaagttaaattaaataagaatacggaaattttagatataggttgtggtagagctaatataattagctttcttcaaagaaaatataaatttaaaaaaaaagctattggtatagatgttttaaaaaataaaaacactcgaaaaaatatattatttaagaaatcagatgctttaaaatatctaaaaaaagggaaaaaatttgatattataatcattaaacaaacaatacattttttctctaaaacaaaaattgtttcactgttaaatttagcgaaaaagaatttaaataaaagaggaacgcttttaattttttctcttaaaacaaaaaataataaaataccttgttttaaaa

SEQ ID NO: 225949 - DNA, 543 bp, Unknown
  Bacterial polypeptide expressing nucleotide sequence isolated from the Sargasso Sea
tatggcggccagcacagcaggcattcacagacggcaggaagtttttcgatctcttgaagtcaagactggtcagatcattctagatatcggttgtggcggtggtcatttgcttcaggacttagcattggccgttggagaaaccggtaaagtctatggtcttgacccaagcgaagctcagctaaaaactgcaagagatcgatgttcccacttaacgaacgtcgagctcctttgccatccagctaacaaaatgacattagaagacaatctacttgatattgcaacttcaacgcaaacattagaatatgtaaaggatattgatagtgtcctaatcgaaatagcaagagttctaaagcgcgactctaaatttgttaatgtatctattctctgggaacattttaaatttcatgggcctgaaacccatttgaacgaactcattcatgatgctttcaaagctcactgttatcatcaaatgcttccaatggagttaaaaatgcggttagatcgcgtaggttttgataacattaagagtactggtttagcttt

SEQ ID NO: 225950 - DNA, 655 bp, Unknown
  Bacterial polypeptide expressing nucleotide sequence isolated from the Sargasso Sea
gcttgatataggttgtggaggtggacatcttcttgaagaattagcaaaagctgttggtcctaaaggtaaagcaattgggttagatacaagtgaagatcaacttaaacaagctaaagaaagatgcgccttatatgataatgctttcacactcctaggttttgctaataggataaatttggagagtaatagttgtgatgctgttgcctctgtacaaacttttgaatatatagaggatgttgatgagtcaattgaagaagttgctagaattcttaaaccatcatctatttttgtaaatatatctattctttgggattattacaaattttatggtgctgatgataacttaaacaatcttatccaagatacattcaaggctcattgttttcatcaaatgcttcccacaacattatctggcagacttaaaaagtttggttttaaacagcttaaacataaaccattaccaatgtttataacaaagacagacgataactcgccagctaaatatgcggctgaggttatggcacaatttgccatacaacaaggagtttcaaaagacaaagttgatgaatggcaaaatcaattaaaattagctgaagatacgggacactttgcttacacaaacctcccaatattaacttatggttatctaagttag

SEQ ID NO: 225951 - DNA, 281 bp, Unknown
  Bacterial polypeptide expressing nucleotide sequence isolated from the Sargasso Sea
aatgagccaaaaaactgacagaatatatagtttgctttcaaacacttttctttattcttttgttcaaagaataatgtcaggtacatcctttagagagaaaattgttaaaaaatatattaaaaaagataaatcaactgtattagatataggatgtggacctgcagacatattagattcattaccttcggttaaatattttggttatgacataaattctaattatattaatcacgcaaaaaaaaaatacaaagatagaggaaatttttattgtaaaaaagtca

SEQ ID NO: 225952 - DNA, 685 bp, Unknown
  Bacterial polypeptide expressing nucleotide sequence isolated from the Sargasso Sea
tatgaataaaattcaaagcataaggaaagattgggatctaatagagtctttaataagagataattcgcgtattttagatataggttgtggagaaggtgatctgattcaacaacttgaaaaaaatctcagtgccaaagtacatggaattgaaaaaaatcaagagttagctctaaaagcgattgcaaaaggcttaagcgttacccatggagatgcagaaaaagatctttcacaatactcaaatcaaagttttgattatgtaatactcagtcaaacacttcaagctatgattgagccaaaaaaaattcttaacgaattattaagagttggatcaaaggctattgtgtcatttccaaactttggtcactggaaaattagattacaattactttttaaaggcaaaatgcccattacagagggtcttccatactcatggtatgatactcctaatattcatttttttaccttaaaagactttgaaaatctatgcaatgaaatgaatattgttattgaaaacagtattggtcttacaagtaaaggaaagcaatttccaattaatggctcattactttcagctaatataataactagtgaagcgatctttcttcttagttataaagattttgaaccaataaagattaaatcatcaaataaaatctttgctaaaaattcagccattgctaattga

SEQ ID NO: 225953 - DNA, 202 bp, Unknown
  Bacterial polypeptide expressing nucleotide sequence isolated from the Sargasso Sea
atgagtactataaataaagaggaaattcaaaagttttcaaatttagctgatgaatggtgggatataaaaggtaagtttaaacctctgcacatgtttaatcccataaggattaactacataacagaaaagatcaagtatcactttaatttacaagaaaaagaaaatttgctcaaaggtcttaaagtgctagatataggatgcg

SEQ ID NO: 225954 - DNA, 613 bp, Unknown
  Bacterial polypeptide expressing nucleotide sequence isolated from the Sargasso Sea
atgaaaaaacttaaaaactgggataataaaacctggctatcatctaaatcgtatatctcccaatttagtaaatttcttaaaacaaaaattaatttgaataaaaattcaaaaatattggatattggatgtggaagagcaaatattataagtgctcttcaaaaaaaatataaatttaaagataaacccataggaattgatgtagttgcaaataaggatgttaaaaagaatatcgtatttaagaaaattgatgccttaaagtatttaaagaaaaaagaaaaatatgatctaattttaatcaaacaaacaattcattttttttcaaaaacaaatttaaatcgcctacttaaccttgctaaaaatagtttaaattcaaaaggcaaaatattgattttttctcttaaaacaaaaaatagtaaaataccttgttttaaaaaaatgagaaaaaatttagaaaaaagtttaaaaagagatgaagctttattaaaattaatcaaaaaaaacttaaatgaaataagctacacaaactttaattttaaagtaaagatcactaagcaaaaatacattaaaatgattaagaacagaatatatttcttgtttgctgagtgtatcgaga

SEQ ID NO: 225955 - DNA, 275 bp, Unknown
  Bacterial polypeptide expressing nucleotide sequence isolated from the Sargasso Sea
gatgaataaaattaatagcttaagaaaagattggtctcttattgaaacacttatcgcagaagatagaaaaatcctagatattggatgtggtgatggcggtcttatggaacaattagaaattaatcgtaatgcgataactcatggcattgaattaaatagagatctagctgcaaatgctattgcaagaggcttcaatgttgtacatgggaatgccgaattggatttgtcccaatattcaaataatagttttgattatgtaattttaagtcaaactt

SEQ ID NO: 225956 - DNA, 709 bp, Unknown
  Bacterial polypeptide expressing nucleotide sequence isolated from the Sargasso Sea
aattttttcagttatttaatcaatagattaagaggttcttatagatatttaacaaattttaattttataaaaaaatctaagatgaatgtttcacatcattacgatatttcagatgatctttatgatttatttttagattctaaaagacaatattcatgtgcatattttaaaaatgaaacagatacattggaaactgcccaaaataataaaattcaacatataatcaaaaaactaaatataaagccaaatcaaaaagttttagatattggatgtgggtggggttctctagcaatagatattgcaaaaagtgcaaattgcgaagtaacaggtatcacactttcagaaaaccaatttaattactgcaagaatagagcaaaagaacttaatttagaaaatcagttgcactttaagttaatggattatagggagctcaatgaaaaatttgatagaatagtcagtgtaggaatgtttgaacatgttggaagaaaattttatagaaaatttttttcacaagttgaaaaacttttaaaagacgatggagtatcattaattcatactatagggtcagtgaatccaccaagagatccacacccatggatcactaagtatatttttccaggaggttatactccgagtttaagtgaggtaacaacaccaattgaaaaagcaggcttaattgttgcagatattgaggttttaagacttcatt

SEQ ID NO: 225957 - DNA, 780 bp, Unknown
  Bacterial polypeptide expressing nucleotide sequence isolated from the Sargasso Sea
gctgactatatctctcaaaataaagcatttaaatttaccgaatcgatttctacattttttaaatcttttcaacaaattaataagcatggttaaatcaaaagaaaatgttgcacatcattatgatttgaatgaagatttatataaactatttcttgataaggatatgcaatactcttgtgcctattttcacaatgaaaatattagtttagatcaagcacaatttgataaaaaaaaacatattattgaaaaacttcaaattaaagaaaatatgactgttttagatattggttgtgggtggggtggcatggctttgcaaattgctaaagatactggagcaaaagttaaaggcataactttatctgaaaatcaaattgccactgcaaagcgtagaactcaagaagaagggttaaatgaaaaagttacctttgctttacaagattatcgccatgaaactaataaatatgatcgaatagtttctgtaggcatgtttgaacatgttggagttaattattatccagtttttttttccaaaacatatgaaattttaaaagaatcaggagtttttttattacatacaattggtcaaagaagcgctcccagtgcaactagtccttggataagaaaatatatttttcctggaggttatattccctccttatctgaaattttaaatgttactgaaaaacaaaatattaatgtaacagatgttgaagtattacgcttgcattatgcatacacgttagagaattggtataaaaatactatgaaaaataaagatgc

SEQ ID NO: 225958 - DNA, 931 bp, Unknown
  Bacterial polypeptide expressing nucleotide sequence isolated from the Sargasso Sea
tcctgatttatattttggggaagcttatactgatggtgaaataattattgaaaatggaacgctaactgattttatagatctttctttaatgaattttggcagaggagaattaaatttttttagttatttaattaatagattaagaggttcttatagatatttaactaattttaattttataaaaaaatctaagatgaatgtttcgcatcattatgatatttcggatgatctttatgacttatttttggatcctaaaagacaatattcatgtgcatattttaaaaatgaaacagatacattggaaactgcccaaaataataaaattcaacatataataaaaaaacttaacataaaaccaaatcaaaaagttttagatattggatgtggatggggttctctagcgatagatattgcaaaaagtgcaaactgtgaagtaacaggtattacactttcagaaaatcaatttaattactgcaagaaaaaggcaaaagaacttaatttagaaaatcaattgaactttaaattaatggactatagagagctcaatgaaaaatttgatagaatagtcagtgttgggatgtttgagcatgtaggaagaaaattttataaaaaatttttttcacaagttgaaaaacttttaaaagatgacggagtatcattaattcatactataggatcagtaaatccgccaagagatccacatccatggatcactaaatatatttttccaggaggttatactcctagtttaagtgaggtaacaacaccaattgaaaaagcaggcttaatcgttgcagatattgaggttttaaggcttcattactcacacacactaagacattggaaagaaaattgtattcgaaataaagacaaaataattgaaatgtttgatgaaagattttttaggatgtgggaattttatcttgctggt

SEQ ID NO: 225959 - DNA, 629 bp, Unknown
  Bacterial polypeptide expressing nucleotide sequence isolated from the Sargasso Sea
aatgctttttacaattttaaataaaattaattttaagggtaaattagtagttactaattacaaaggtaaaacttttcattttggaaatggctcagatcttgtcaaaataagacttacaaataaatccatagaaaataaactttttcgcaatcccagtctttatcttggtgaaggatatatgaataaagaaattgttatagaagaaggaactcttgatgattttttaaaaattataacagcatcttataatgattatatgtctaataattttgtttttaagatgtatgaatcaatatctactttctttaaatcatttcagcaaattaataaattggtcagatcaaaagaaaatgtagctcatcattatgatattgatgaaaagatgtataagttatttcttgataaagatatgcagtattcgtgcgcttattttcataatcaaaatattggaatagaccaagcacagatcgataaaaaaaaacatataatagaaaaattacaaattaaagaaggaatgtcagttttagatattggatgtggatggggaggtatggctatacaaattgctaaagatacaggagccagagttaagggtattactttatctgaaaatcaatttgctactgcca

SEQ ID NO: 225960 - DNA, 863 bp, Unknown
  Bacterial polypeptide expressing nucleotide sequence isolated from the Sargasso Sea
cgttggacgcatcaggcgggccaagcggcggattgatcagttcaatccggtcggcaaagcgcaagcaaatgtcgcccaccattatgaccttgatgcggggctctatgacctcttcctggatacagacaagcaatattcctgcgcctattttgagacgcctgacatgagcctggaggcggcccagcttgccaagaagcgccatattgcggcgaaactgaacctctccccagagacccatgttctggacataggctgcggctggggcggcatggccctttacatcgcgcgggagaccggagctcgcgtaaccggcgtcacgttgagcgaagaacagcataaaatcgcgactgaaagagccgctcttgccggcctctcagatcgtgtgaagtttcgccttcaggactatcgcgaggtcgaggaaacatttgatcgaattgtgtccgtgggcatgtatgagcatgtcggcgtgcatcattatgatgagtttgcaaccaagcttcacgcgcttctcaaacccaatggcattgccctcattcacacgatcgggcgtttggatgagccaggtgccacaaacccctggatcgctaaatacattttccccggcgggtacattccggcgctgagtgaagtcgccccaacactggagcggcaacaattgctcctgaatgaccttgaagtcttgcggctgcactatgcatcgacgctacgacattggcgcaaccgcttcctcgcacgctgggatgatgctgtcgccctctacgacgaacagttcgcgcgtatgtgggaattttatctcgccggttcagagacgtcatttcgccacgaaggcatggtggtgtttcaattccaactcaccccgggaa

SEQ ID NO: 225961 - DNA, 295 bp, Unknown
  Bacterial polypeptide expressing nucleotide sequence isolated from the Sargasso Sea
atgtattttcccaaattgcaaagaatgctggacattccagttttatatttggcttacagaacgatagttggaggtcatagagccacgtcaatttacgtcaatgaatacgtaaggcctaaatgtaaggatagaattctcgatattggttgtggtcctgctgaaaccgttgagcatttttcagatgtcgaatacattggttttgataataaccccgcatacattgaattagcaaaaaaacgatatggtgatcaggggcattttttctgcgggcagatagatcaggtagccctgaaga

SEQ ID NO: 225962 - DNA, 520 bp, Unknown
  Bacterial polypeptide expressing nucleotide sequence isolated from the Sargasso Sea
catgacggatgatcccatccagcacagcagcgaaaccgcgtaccgttttgagaccccggatcagcatcggaaattttatgatgattgggcggaaaactacgattcaggttttgccacatcgaagggctatgattatccaaggttgattgccgaatattttgtcggtcgggtgagcccggaccaaagtccggtgctggacatcggttgcgggaccggtctggtcgttgtttctctgaggaagcaaggctggtcctccgagttgatcggggtcgatatttcccaggagatgttggaggtggcggaaaggaaaaaggtctatcaaaagttgatatgtgcagacctgaacgagactttgcaactgcctcaatcccattttggcggaatgatcagtgcaggaactttcacccatgggcacctggggcccgaagttctttttcatcttttttcccttgcaagaccaggagcccatgctgtgatcgggatcaatgccgagcatcatgagaaccaggatttttcagga

SEQ ID NO: 225963 - DNA, 772 bp, Unknown
  Bacterial polypeptide expressing nucleotide sequence isolated from the Sargasso Sea
tatttttatgccttttcaacaaattaatcagcttataaattccaaaaaaaatgtagctcatcactacgatataaatgaggatttatataagttatttctcgataaggatatgcaatattcttgcgcatattttcacaatcctaatattagtttgaaccaagcacagaaagataaaaaacaacatattattaaaaaactacaaattacagaaaatatggatgtacttgatattggatgtggttggggcggaatggcaattgaaatagcaaaatctactggagctaaagtaaagggaattacactttcagaaaatcaatttaagactgcttctgaaagagcgcaaaaagagggtttgagtgacaaagtttcttttgcattacaagattatagaaatgagactgaaaaatatgaccgtatagtatcagttggaatgtttgagcatgttggtgtcaaatattttaaaacttatctaagtaaagctaataatattttaaaagagaacggagttttccttttacacacaattggtcaaagaggtaagccaactgctacaagtccatggatacgaaaatatatttttccaggtggttatattccatctctgtctgaagttatgaaagaaacacaaaaacttaatttaaatgtcactgatattgaagtattaagactacattatgctcatactctttcacgttggtatcaaaatgttttagaaaataaagataaaattataaagatgttcgatcagcggttttttagaatgtgggagttt

SEQ ID NO: 225964 - DNA, 433 bp, Unknown
  Bacterial polypeptide expressing nucleotide sequence isolated from the Sargasso Sea
tatgactacaataaatcaagaggaaattcaaaaattttcaaagcttgctgaggaatggtgggatgtatcaggtaaatttaaacctcttcatatgtttaatccaatcagaatagaatacattttggaaaaaatatctaatcattttaaaagggaagatgaagatttgcctctaaagggattaaaacttttagatattgggtgtggtggaggattaattgcagaacctatgagtaggctgggggcaaacgtaactggtatagatgcttctttaaataacattaagatcgcagaaacccactctaaaaaaaataatcttaaaataaattatttaaacacatccccagagcagtttcctaatgaccaagagtttgacgtaattttaaatcttgaaataattgaacatgtcgaagatgtaaatttatatttcaaaagt

SEQ ID NO: 225965 - DNA, 226 bp, Unknown
  Bacterial polypeptide expressing nucleotide sequence isolated from the Sargasso Sea
atgaaaacaactacgataaataaagaagaaattgataaattttctaaaatagccgaagagtggtgggatcctgaaggaaaatttaaaccactacatatatttaatcctcttaggataaaatatattaaagatagtataatcaaacattttaaaattaaaaaaaaaaaattacctttatctggcttaaagattttagatataggttgtggaggcggattgatcgctg

SEQ ID NO: 225966 - DNA, 846 bp, Unknown
  Bacterial polypeptide expressing nucleotide sequence isolated from the Sargasso Sea
catgctatttagtgtacttaaaaaactaaattttgacggaacattagaaataatcgactctaacgataaaatttttaaatttggaagttcaaatccactagttcgtattagattaaaaaataaatctattgagaaaaaacttttttttaatcccaatttacatattggtgaagcttatatgaatgaagagttaataattgaaaagggaactatagaagaatttcttaacttaattactaattgttacgatgattttatttcaaacaataaattttataaattttacgaatacttatcttctatttttatgccacttcagcaaattaatcagcttattaattcaaaaaataatgttgcgcatcactatgatttaaatgaagatttgtacaaattatttttagacaaagatatgcagtattcttgtgcatactttcataatcctaacattagtttggaacaagctcaaaaagataaaaaagaacacataatcagaaaactgcaaattgataaaaatatgaatgttctcgatattggatgtggttggggtggtatggcaatagagatagcaaaatctactggagctaaagtcaaaggaattacactttcagaaaatcaattcaaaacagcctctgcacgtgcacaaaaagaaggtttaagtgataaagttacttttgcattacaagattatagaaatgagacagaaaaatatgatcgtatagtatctgttgggatgtttgaacatgttggagttaaatattttaaaacatatctcagtaaagctaatgatattttgaaagagaatggagtttttcttttacacacaattggccaaagaggtaaaccact

SEQ ID NO: 225967 - DNA, 421 bp, Unknown
  Bacterial polypeptide expressing nucleotide sequence isolated from the Sargasso Sea
catgactacaataaataaagaagaaattcaaaagttttcagatttggctgaagaatggtgggacgtgaatggtaaatttaaaccattacatatgtttaaccctgttagaattgaatatattttagatgaaacttcaaaacactttaaattagacagaaaaaaaaaccacttatttaagaatttagatattctggacattggatgcggcggtgggttaatcagcgagccaatgtctcgtttaggagcaaacgtaacaggtatagatgctgcagaaaaaaatattaagattgcttctgtccatagtgaaaaaaataatttgaaaataaattatatgaataaatctcctgaacaattagataataaagaaaaattcgatatgatattaaatcttgaagtagtagagcatgttgacaatttagaa

SEQ ID NO: 225968 - DNA, 538 bp, Unknown
  Bacterial polypeptide expressing nucleotide sequence isolated from the Sargasso Sea
atgactacaataaataaagaggaaattcaaaagttttcaaacttggctaacgaatggtgggatgtgaatggtaaattcaaacccttgcatatgtttaatcctataagaattgaatatatattaggtgaaatctcaaaacattttaaaatagatggggaaaaaaaacttttacttaaaaacctagaaattctcgatatcgggtgtggtgggggattaatgagtgagccaatggctcgtttaggtggaaatgtaactggcatagacgcttcggaaaaaaatataaaaattgcttctcttcatagcaaggaaagtaatttgaagatcagttatattaataaatcacccgagcaactaaaagaaaaagaaaaatttgatataattttaaatcttgaaattgtggaacatgtcgataatttagatttatatcttaaatcctgcaaaaatttattaaaaaaaaatggtttaatgttcaccgcaacaattaatagaacgctatcatcttatattaaggcaattttaggcgctgaatatatattaa

SEQ ID NO: 225969 - DNA, 598 bp, Unknown
  Bacterial polypeptide expressing nucleotide sequence isolated from the Sargasso Sea
atgtatcttgcaagtttcttaaataaaatttttaaaaaaggtggtttcatcttaactgatgctgactcgaaagattatataataggcaatcctggagaacagcctatgaaaataaaacttttgaataaaaagcttcattataaacttttgttacatcccgacttatattttggtgaggcatacacagaaggagatttgattatagaaaatggaaatttaagtgattttttagatttagcattaatgaatttcggaagagggcctttgaatttttttagttacataataaatagacttagaggatcttacagatacttaacaaattttaattttattaaaaaatctaaaatgaatgtttcccaccattatgatatttctgatgatttatatgatttatttctagatccaaagagacaatattcatgtgcttatttcaaaaaagagactgatagtttagaagttgctcaaaataataaaattcaacatattataaaaaaattaaatattaaaaaaaatcaaaaagttttagacataggttgtggttggggttcattagcatttgatatagcaaaaagtgcaaaggttgtgaggttaccgg

SEQ ID NO: 225970 - DNA, 559 bp, Unknown
  Bacterial polypeptide expressing nucleotide sequence isolated from the Sargasso Sea
atgaaaaacgaaaaaaaaaataaagaatttgagcatttttctgaacttgctaatgattggtggtcaaaaaatggtaaatttaaaattcttcatgacatacaaccaattagaataaaatatattttagaagttcttaataaaaaaaatttaaataatactaaagttctagatattggatgtggtggtggattaatctctgaaggattatctaaaattggtgctaatgttacaggaatagattttattaaagaaaacataaacgttgcaaaaacacatgcaaaaaataataatttaaaaataaattatttagttaaagattttgagaaagaaaaaataacttctaagtatgatgtaattataatttttgaagttttagagcatttaagtaactgggaagaattcataaaaaaaataaaatcaagtctaaaaaaaaatggagtgttaattatatccacaataaatagaaatttaatttcaaagtttttaacattagatatagctgaaaacttactcaatctaatacctctgaacacacataccttttataaatttataaaac

SEQ ID NO: 225971 - DNA, 397 bp, Unknown
  Bacterial polypeptide expressing nucleotide sequence isolated from the Sargasso Sea
atgactaaagcaggaataaatattaaaaatacagttgacctctcggaagtcgaacgtttctcagccttatccaacgcttggtgggatccagagggcgactttcggccacttcaccgctttaatccggtgcgtttggaatatattcgaggacaaatttgtacacatttcgaccgggaccctcttaatttaagaaccttagagggtttaagtgtcctggatattgggtgcggtggtggtttagtcgccgagccaatggcgcgcatgggcgctagcacttcagctatcgatgcatctaacaaaaatattgaggtagcccgtttacacgccaatcaaagcggattgaatattaattatcgtgtttctactgccgagaagttagcatcagaaaacacccaat

SEQ ID NO: 225972 - DNA, 685 bp, Unknown
  Bacterial polypeptide expressing nucleotide sequence isolated from the Sargasso Sea
tatgaataaaattcaaagcataaggaaagattgggatctaatagagtctttaataagagataattcgcgtattttagatataggttgtggagagggtgatctgattcaacagcttgaaaaaaatctcagtgccaaagtatatggaattgaaaaaaatcaagagttagctctaaaagcgattgcaaaaggcttaagcgttactcacggagatgcagaaaaagatctttcacaatactcaaatcaaagttttgattatgtgatactcagccaaacacttcaagctatggttgagccaaaaaaaattcttaacgaattattaagagttggatcaaaggctattgtgtcatttccaaactttggtcattggaaaattagattacaattactttttaatggcaaaatgcccattacggaaggtcttccttactcatggtatgatactcctaatattcatttttttaccttaaaagactttgaaaatctatgtaatgaaatgaatattgttattgaaaacagtattggtcttacaagtaaaggaaagcaatttccaattaatggctcattactatcagctaatataataacgagtgaagcgatctttcttcttagttataaagatttcgagccaataaagattaaatcatcaaataaaatctttgctaaaaactcagccattgctaattga

SEQ ID NO: 225973 - DNA, 744 bp, Unknown
  Bacterial polypeptide expressing nucleotide sequence isolated from the Sargasso Sea
aatgcaactagctagatttttaaataatgtttttaaaaaagatggatttatattagttgacgctaattcaaaaagttacatcattggaaatccaaaaagtgaaaacccaataacagttaaaattttaaataaaaatcttcattataagttactatttcatcctgatttatattttggtgaagcatacacagatggtgaaataactatcgaaaatgggacactaactgattttttggatctttctttaatgaattttggaagaggagacttaaatttttttagctatttaattaatagatttagaggttcttatagatatttaactaattttaattttataaaaaaatctaagatgaatgtttcgcatcattatgatatttcagatgatctttatgacttatttttagatcctaaaagacaatattcatgtgcatattttaaaaatgaaacagatacattggaaactgctcaaaataataaaattcaacatataataaaaaaacttaatataaaaccaaatcaaaaagttttagatattggatgtggatggggttctctagcaatagatattgcaaaaagtgcaaactgcgaagtcacaggtatcacactttcagaaaatcaatttaattactgcaagaaaagagcaaaagaacttaatttagaaaatcaattaaactttaagttaatggattatagagagctaaatgaaaagtttgatagaatagttagtgtttgggatgttga

SEQ ID NO: 225974 - DNA, 358 bp, Unknown
  Bacterial polypeptide expressing nucleotide sequence isolated from the Sargasso Sea
aatggaaaatatcaacaaagaccaaaaggaattttggaacggcaagaaaggaaatatttgggtatccttagaacagaaaatcgatgtgatgctggatccgcttggggatgcagccttaaaagttttagctcctaaaactaatgagagagtgcttgatattggatgtggaactgctacgactactcttaagatagcaaaattggtcggtaataatggtttagtaactggcgttgatgtatccaaacccatccttgaatgtgccagacaaaaggcaaaaaagaaattaaagtataacattgattttgtccttgctgatgctcaaaattataaattcgaaccaaatagccaggatgctatt

SEQ ID NO: 225975 - DNA, 742 bp, Unknown
  Bacterial polypeptide expressing nucleotide sequence isolated from the Sargasso Sea
attggtttagaccaagcgcaaaaagataaaaaacaacatattattaataaattacaaattaaccaaaatatgaatgtacttgatattggttgtggatggggtggtatggcaatagaaatcgcgaaatcaacaggagcaaaagttaaaggtatcactttgtctgaaaatcaatttaatactgcatctgaaagagctcacaaagagggattaagtgaaaaagtaacttttgctcttcaagattatagaaaagaaaaagaatcttttgatagaatagtttccgttggtatgtttgagcatgttggtgttaaatatttcaaaacttacttaaaaaaaactaatgaattattaaaagataacggagtatttcttttgcacacaattggccaaagaggaaaaccaacagcaacaagtccgtggataaggaaatatatatttcctgggggttatataccgtcactatcggaaataattaaagagacacaaaaacttaacattaatgttacagacattgaggtgttaagattacattatgctcatacgctctctcattggtacaaaaacgtaatagaaaataaagataaagttattaaaatgtttgatgaacgtttttttagaatgtgggaattttatcttctgataagcaaatattcttttgttaatatggggaatattgtctttcaaatacaaatatcaaaaaatattaacaatttgcctctaacaagaaattatatttataactaat

SEQ ID NO: 225976 - DNA, 441 bp, Unknown
  Bacterial polypeptide expressing nucleotide sequence isolated from the Sargasso Sea
aatgaaattaaaaattcgtgataaaaaacttcattacaaattattatttcatcctgatctttatttcggtgaggcatatacagatggagacataattattgaaaatggatctctaacagaatttttagatttagcattaatgaatattggaagaggagaattaaatgtattcagttatcttattaatagatttagaggttcatataggtatttaacaaattttaattttatcaagaaatctaaaatgaatgtatctcatcattatgatattaaagatgacctttatgatttatttttggatcctaaaagacaatattcttgtgcttattttaaaaatgaaaacgatagcctcgaaactgctcagaacaataagattcaacatataattaaaaaattaaatattaaacctgatcaaaaagttttagatataggctgtggatg

SEQ ID NO: 225977 - DNA, 574 bp, Unknown
  Bacterial polypeptide expressing nucleotide sequence isolated from the Sargasso Sea
gatgaattgggcggaaagctacgattcggggtttgccgcatcgaagggctacgattatccaaggttgattgccgaacattttgtcgatcgggtgagcccggaccaaagtccggttctggacatcggttgcgggaccggtctggtcggtgtttctctgaggaaggaaggctggtcctctgagttgaacggggtcgatatttccgaagggatgctggaggtggcggaaaggaaaaaggtctatgaaaagttgatatgtgcagaccttagcgatactttgcaactgcctcaatcccattttggcggaatgatcagtgccggaactttcacccatgggcatcttggtcccgaagtcctttttcatctttttcccctttcaagaccgggagcccatgctgtgatcgggatcaacgccgagtatcatgggaaccaggacttttcaggagcattccgggaatgggaggaaaagggaatcgtcggcaaaaccaaatggacagaaattcaaatctaccaggccccggaagggaaggaaccggaaaagaagttggcgctgattgcggatttcaggattctatag

SEQ ID NO: 225978 - DNA, 709 bp, Unknown
  Bacterial polypeptide expressing nucleotide sequence isolated from the Sargasso Sea
atgaaaaaacttaaaaactgggataatagaacctggttatcgtctaaatcatatatatctcaatttaatagatttcttaagaaaaaaattaatttgaataaaaattcaaaaatattggacattggatgcggaagagcaaatattattagtgcccttcaaaagaaatataaatttagaaataaacccataggaattgacattgttgtgaataaagatgttaaaaagaatattgtatttaaaaatattggtgccttaaaatatttaaagaaacaagaaaaatatgatcttattttaatcaaacaaactattcattttttttcaaaatcaaatttaaatcttcttctaaatcttgctcagaaaagcttaaataagaaaggtaaaatattaattttttcactaaaaacaaacgataataaaataccttgttttaaaaaaatgagaaaagatttggaaaagagtttaaaaagagatgaagttttatttaagattatcaaaaaaaatttaaaaaaagtaagctacacaaactttaactttaaagtaaatatctctaaacaaaaatacataagaatgatcagagaaagatacatttcatgcttgttaaacatgagtagtagagaaattaatctaggtatcagtgaaattaaattaaagtataaaaatcaaataaaattcactgataccctaaaatgtattagctatagaaaataat

SEQ ID NO: 225979 - DNA, 724 bp, Unknown
  Bacterial polypeptide expressing nucleotide sequence isolated from the Sargasso Sea
atgactacaataaatcaagaggaaattcaaaaattttcaaaacttgctgaagaatggtgggatgtatcaggtaaatttaaacctcttcatatgtttaatcctattagaatcgaatatattttagataaaacatcaagtcattttaaaagaaatgataaaaaacttcctcttaaagggttaaaatttttggatataggttgtggtggcggattaatatctgagcctatgtgcaggttaggagcagatgtaactggtatagatgcctctttaaaaaatataaaaattgcagaaactcactctaaaaaaaataatcttaaaataaattatctaaatacttcaccagaaaagtttgaagagtatgaaaaatttgatgtaattttaaatcttgagatagtggagcatgttgaggatgttgatttatactttaaaagttgtgcaaaattattaaaaaaaaatggtataatgtttacagcaactttaaatcgaactttcatgtcatatttaaaagcaataataggagcagaatatattttaagatggttacctattggtactcatgattggaacaaattttttaaaccaagcgaaattgaagaaaaaattagtagcttagatttctcagttatagaaaccaaaggtttagaatttaatccttttacccaaaaatggaaaacatcaaacaatttatctgtgaactatattgtaacaagtgtaaaaaactaat

SEQ ID NO: 225980 - DNA, 481 bp, Unknown
  Bacterial polypeptide expressing nucleotide sequence isolated from the Sargasso Sea
attggataaagaacaactccattatgatacagtgcatattggttttttagaaaagctatggggagatggttttatgtctcctggtggctacggagaggttaaaaggcttttaatagatacaaatatgtctgggagtaaggtattggatatagggtgtggggcaggtgggataacattgagccttgttaaggattttgaggccaaaatggttatcggtgtagatgttgaagccgatgttgttaaaaaagcaaaaactaaagttaagaaagcatcattggatgatcaaataaagatcttacttatagggcaaggtaagttaccattcaaagctaagacctttgatatagttttctccaaggattcaattgtacatatttcgaataaggaaaaaatcttcaatgaggttttcagagttttaattccaggtggaatttttgttttctctgattggctaatttcacacgatcaagaaccatctcca

SEQ ID NO: 225981 - DNA, 181 bp, Unknown
  Bacterial polypeptide expressing nucleotide sequence isolated from the Sargasso Sea
catgaccatagataacgccacacaaatcgaattctggaacggcgagacgggtcgcaactgggtcacccaggatgcactcatggaagccatgttgcagccactgggtgagtatgtgatggacacgctggcgccgcagccgggagaacacgtgctcgacattggctgtggttgggccacacct

SEQ ID NO: 225982 - DNA, 394 bp, Unknown
  Bacterial polypeptide expressing nucleotide sequence isolated from the Sargasso Sea
tcaacatataataaaaaaacttaacattaaaactaatcaaaaagttttagatattggttgtggctgggggtctttagcaattgatattgctaaaagtgccaattgtgaggttactggaatcacattgtctgaaaatcaattgaattattgcaggaaaaaagcaaaagaacttaatttagaaaatcagttaaattttaaattaatagactatagagaacttaatgaaaaatttgatagaattgtaagcgttggaatgtttgagcatgtcggcagaaagttttataaaaaattttttaaacaaattgataaattgcttaatgaagatggaatttccttaattcataccataagatctgttaatccaccaagagacccgcatccatggatcaccaaa

SEQ ID NO: 225983 - DNA, 685 bp, Unknown
  Bacterial polypeptide expressing nucleotide sequence isolated from the Sargasso Sea
atgaataaaattgtaagtataagaaaagattggaaattaattgaaaccttgatggaggaaaatagaagtatattggatattggttgtggtgatggaatgcttttagaaatgcttgaaaaaaatcttaatgctaaaacacatgggatagagctaaatagagatttagcttcaaaagcaattgcgaaaggatttaatgttatccatggtaatgctgagatagatctttcacaatattctaataatagctttgactatgttattttaagtcaaactttacaagcgatgatgaagccaagggaaatattattagaactcttaagaatagggtcaaaggcaattgtttcttttccaaattttggacactggaaaattagatttcaattattgttttctggaagaatgcctattacagaaagtctaccttataattggtatgatacaccaaatattcatttctttacaattaaagattttttaaaactttgtaatgatatgaatattgtaattgaaaaaagtattggccttacatctaaaggtaaacaatttgatataaatgaatctttaacaagtgtaaatttttttactcatgaagctatttttttgctaagttataaaaattataaaccaataaaaataaaatcttcgaaaaaaattttcaataaaaattctgtaatagctagttaat

SEQ ID NO: 225984 - DNA, 546 bp, Unknown
  Bacterial polypeptide expressing nucleotide sequence isolated from the Sargasso Sea
catggaagagattaacaagaagcaaaaggatttctggtcaggtgcaggaggagatgtttgggtagataaacaaaaagaaatggacatcatgcttaatcctcttggaaataaagccatcaacaacattaatttttcagaccatcttacaatattagatatagggtgcggttgcggagaaacaacgctagatattgccaagaaagtgccaaatggaaaaataataggattagatatttcagagcctatgcttcaaaaggcaagattatctgctgatgagaggtctctaagtaatatacagtttgaggtaaaagatgttcaaattgactcgatgccgcctgaatactttgatgtagctttttcgagatttggtgtaatgttttttgaagatccttatcaagcatttaaaagtattcattcgactttaaaacaatccggccagttaagttttgtttgttggcagaatccttcactcaatccttggcaaagtctttctatagctgtaattaaagagttcttggaattaccttcccctccacctaaaagtcc

SEQ ID NO: 225985 - DNA, 542 bp, Unknown
  Bacterial polypeptide expressing nucleotide sequence isolated from the Sargasso Sea
tttgataacttgtgaaatttgtagttctaaaaaaattaatatcttattcaacaatgatcgctatggaattaatcaaaaaacatgtgtttgtaataattgtggttttattttttccaatccaagaatgacacaaaaatcaactgaatatttttataattctgatttatacagattaatttatgacaaaagtggaaaaaatttcaataaagaagaaatattaaaaaattctattaatttaatgaaagaacacaaaccatcacttccaaaaaaacctgattttaataattattatccaaatttatattttgattttattaattatcaaattaaagactttgaaactgtattagatattggttgtggaagaggaaaaaagctagttgaatttaacgctcttggtaaaaaaacatatggaattgaaccatcgaatacttatcataaggttcatagtgaattaggtctaaatactaaaataggttttatcaaagatgttgaagataaatacgatttagtaatattaacccatgtttttgaacacttaa

SEQ ID NO: 225986 - DNA, 439 bp, Unknown
  Bacterial polypeptide expressing nucleotide sequence isolated from the Sargasso Sea
atgagcagagggctaagttacccagtagaacttattaattgtcttgaggttttttggggccctggctttttatcgccaggcggatctctggaagtcttcgagattttgagaggtattccaatcagaggtaggtctgtattggatattggatgtggtatcgcgggaccggcaattgtaatggctcgtgatatgtgtgcccaaagagttgttggagttgacgtcgagcctcaagtgatagcgcgggggacactcaacgttacaaatgctaatttaagatccgcaatagaactaaaattgataaaaccaggtcctttaccgttctctaatgaaaaattcgatgtcgtttttagcaaggattccttaatccacattcaggataaggcaacattcttccaaagagattttgcgggtcttgaaaccaaacggcatattgccgcaa

SEQ ID NO: 225987 - DNA, 730 bp, Unknown
  Bacterial polypeptide expressing nucleotide sequence isolated from the Sargasso Sea
aatgagtagtactataaataaagacgaaattcaaaagttttcaagtttagctaatgaatggtgggatgttaatggaaaatttaaaccccttcacatgtttaaccctattaggattgagtatatatcggagaacattaaaaaatattttaagattaaaggtgaaaaaaataattttttaaaagggctacatattttggacatcggttgtggcggtggccttataagcgaacctatggctagattgggtgcaaatgtaactgggatagatgcatctgaaaaaaatataaatattgcaaaattgcattctaaaaaaagtgggcttaagattgaatacttacatacctcacctgaaaatcttaaagaaattgaaaaatttgatataattttaaatcttgaaattgttgagcatgtagaagacgtgaatttatatataaaatcttgttataatcttttaaaaaaaaacggtatgatgttcacagctactctaaacagatcttttatatcttacgttaaagcaatcattggagcagaatatatacttagatggttgccaattggaacgcatgattggaataaatttataaaacctgaggagttagaaaagattttatctgaagaaaaattttcaacattcgatattaaaggtttaaactttaatccgttcttaaataagtggaaaaaatctaataatttgtcggtaaattatattattagcagtttgaagaattaa

SEQ ID NO: 225988 - DNA, 685 bp, Unknown
  Bacterial polypeptide expressing nucleotide sequence isolated from the Sargasso Sea
atgaataatatcaaaagtattcgtaaagattgggatctcattgagtcattaatcaaagaaaaatcacgtattttggacattggttgtggagagggagacctaatacaacaacttaaaaaaaatcttgaagcaaaagttcatggcattgaaaaaagtcaagagttagctctaaaaggaattgctaaaggcttaaatgttactcatggtgatgcagaaaaagatctatcacagtatgcaaatcatagttttgattatgtaatacttagtcaaacactccaagcaatggttgaaccgaaaaaaattcttaaagagttattaagagtgggatcaaaggctattgtgtcatttccaaattttggacattggaaaattagactgcaattactttttaatggacaaatgccaataactgaaggtcttccctattcatggtatgacacaccaaatatacatttttttacacttaaagattttcaaaatctttgtagagaaatgaatattgtgattgaaaatagtattggccttacaaataagggtaaacaatttgcgattagtggttcattactcccagccaatataataactaatgaggctatctttcttcttagttataaggattttgaaccaattaaaattaaatcatcaaacaaaatctttgctaaaaaatcagctattgtaaattaat

SEQ ID NO: 225989 - DNA, 302 bp, Unknown
  Bacterial polypeptide expressing nucleotide sequence isolated from the Sargasso Sea
aatgactacaataaataaagaggaaattcaaaagttttcaatgcttgccgacgaatggtgggatgttgagggcaaatttaaacctcttcatatgtttaatcctactcgaattgaatacatactaactatatgttcttcgtattttaaagttgataaagatctgccattaaaaaatttaaaaatcttggatataggttgtggaggaggtttaataagcgaacctatgtgtagattaggagctaaagtaacaggcatagatgcatcttcaaaaaatatcaatgttgctaaatctcatgcatata

SEQ ID NO: 225990 - DNA, 251 bp, Unknown
  Bacterial polypeptide expressing nucleotide sequence isolated from the Sargasso Sea
aatgaaaaaaaaaaatcttgttaaatactggaataaattttacaaaaaaaaatcaataatatctgagtctacatttgcaaaattcacatataaaaaaatattaaataaaaaagttaaacttttagatataggatgtggtaatgggagagattcatactttttcaataaaaaaggttttcatgtaactggcatcgatatttcacaaaaagctatacaaaaaaactcaaaaaataaaatcaaaaacttgtcgt

SEQ ID NO: 225991 - DNA, 622 bp, Unknown
  Bacterial polypeptide expressing nucleotide sequence isolated from the Sargasso Sea
cttgatagaaagaacatctttaaaagtaatcaataaaactttagaagaaaataaaaactggaaaattttagatatcggttgtgggtacactgcaaatcctaacgcaaattatattgcagatgttcaagatttttcagatttttataaaaatagaaaaatttttacaagaataactgataaaattttgccatttaaagataatgaatttgattttgttatagcaagtcatgtaatagaacatgttgaggactttgagttttttttaaaagaattagaaagaatctccaaaaaaggttatattgaattaccaacaaggttaggtgataaccttgtttttgaaaatacatctgaccatatttggtggtttactttttgcgatatagaaaaaaaactcttagcatcaagaagaaatcaaacattagaaccattcctatcagtaaatactggtaaaaaaatttctgactcatttagagaaagttttgtcctagaacttttatggaaagataaaattgattatagatttgatgaagagataaacaacgaaagaattagtaaattttcatttttgaatatagtaaaaaaatatttcagtaaaaaaattagaagattattttctcgctaa

SEQ ID NO: 225992 - DNA, 709 bp, Unknown
  Bacterial polypeptide expressing nucleotide sequence isolated from the Sargasso Sea
ctttttcgagtcccgcggacaacgtgaatattccaatctacttagtgcaaccatgtatcaggatcgtgagcccgatcttgtggagtcacgtgatctggccgagaaagcggctgtcgcatcggtattgggactcagcggtgtcaggcatgttctcgatatcggctgtggtattggtcgctgggggtggttcctggtggagcattgcccccaactgcagtatctagggctggatttctctgccagcctgatcggcaaggcgcagcaggaggctcagcggcgtggtgctacggagctgagctttcaggtcatgtctgcaaccgatatccagggcgatgcgcttgttctacctggccctttcgatctcctgctcatatccggacttctgatctatttgaatgacagtgactgtgtaaaggtcctgcgtgacgctgcgcgtttttgtactgccggaggcgccatatatttgcgtgagcctgtcgggattactgagcgtttcactctggatcgctattactccgaagagttggccgatgagtactcggcaatctatcgcacggtcgatgagttgtacgccgccatgaatgaggccttcgctgggatgaatgtaacagttgagcgtgagggattccttttccccgatgggttggagaagcgtgtggaaactcgtcagtatttcttcgttctgcggcgtgaagggaaacaggtatga

SEQ ID NO: 225993 - DNA, 826 bp, Unknown
  Bacterial polypeptide expressing nucleotide sequence isolated from the Sargasso Sea
ggaagaggagacttaaatttttttagttattttcttaatagattaagaggttcttatagatatttaactaattttaattttataaaaaaatccaagatgaatgtctcccatcactatgatatttcggatgatctttatgacttatttttagatcctaaaaggcaatattcatgtgcatattttaaaaatgaaacagatacattggaaactgctcaaaataataaaattcaacatataataaaaaaactcaacataaaaccaaatcaaaaagttttagatattggatgtggatggggttctctagcaatagatattgcaaaaagtgcaaactgtgaggtaacgggtattacactttcagaaaatcaatttaattattgcaagaaaagagcaaaagaaattaatctagaaaatcaattaaactttaagttaatggattatagagagcttaatgaaaaattcgatagaatagtcagtgttggaatgtttgaacatgtaggaagaaaattttataaaaaatttttttcacaagttgaaaaacttttaaaagacgatggtgtttcattaattcatactattggatcagtaaatcctccaagagaccctcatccatggataacaaaatatatatttcctggtggttacacaccaagcttaagtgaagtaactaccccaattgaaaaagctggcttaattgtatctgatattgaggtattaagaatgcattattctcatacattaagacattggaaagaaaattgcctgaataataaagataaaattatcaatatgtttgatgaacgtttttttagaatgtgggaattttatt

SEQ ID NO: 225994 - DNA, 454 bp, Unknown
  Bacterial polypeptide expressing nucleotide sequence isolated from the Sargasso Sea
aatgtggaaatcaaaaactcctggtatcccagacgaagaatttgaaagaacagaatctgtaccaatcactaaagaagaaatccgtgctatacaaattagtaaaggtagactctctgtaggacaaactgttttagatattgggtgtggaagtggttctataacaatagaggctgcaatacaagttgaagaatcaggtaaggtgattggtgttgatattgatcctaatgcaattgaactaacagaaaaaaatctaaaaaaatttgggattaaaaattatgtactaattgaaggaaatgctaaagaaaaaatctctgaattaccacaagctgatactgtatttattggaggtactggtggtgatacaaaagatattgtagaattatgccaaaataaaataaaatctggtggaagaatagtaattggtgttatactaattgaaacactttattctgta

SEQ ID NO: 225995 - DNA, 688 bp, Unknown
  Bacterial polypeptide expressing nucleotide sequence isolated from the Sargasso Sea
ttgacaaagagtagatcatttcaatttaaacaattttcaattcatcaagagcagtctgccatgaaggtagggaccgatggtgttttgctgggtgcatggacaatgcctgaaggtgcccaaaacattcttgacattggctgtgggaccggtctaatttctttaatgctagcacaaaaaagcaaggccaaaattacggcgattgaaattgagcctaaggctgctgaagaagccaagttgaacgtaaaggaaagcccttggcagaatcgcataaaggtgatccatcagagttttcagaagtatattgatagcaacagtgagaaagccgtcgatttaatcgtgtgcaatcctcccttttatcgatcaaatcaagcaaagggtcaacgttccctggcgagagaaaatgaacaccttcctttttcagaacttattcaggagacagcaaaactgctctcagatgacggaaaattctgcgttattgtgcctgcaacagagggtgaagaatttctccgcttttccaaaatgcatggactttacgcaagtcgcattacatttatatgcggtaacaaaaacactgctgttaaacggcatttaatacaattggaaagaagagaaaataccccaaaagtgaataccataatcatcgaaacaagtaggaacaattataccccagaatatcaaaacctatgaa

SEQ ID NO: 225996 - DNA, 820 bp, Unknown
  Bacterial polypeptide expressing nucleotide sequence isolated from the Sargasso Sea
aatgagatgtaatgattgccatcttgattacttggaaacgtgggatcgtccaatagatgtatataaattctatgaaaataataactacgtttgtgaacctaatataacaaaaggtacgttaaaatatgatgagagaaaaaaaagggttgagagagttcttccgtatgtaaataagaaaactagattactagatattggatgtggaaatggcacatttttaaaagacttaaaaaaacatgttaaaattattgagggaatggaactcactaaagagcatgtggatcaattaactagggaagggatcaaagtatgggattgttttttagaagatttcgagcctgaagttccttacgatgttgttgtaatgcacgcaacattagagcatattgcggatataaatcaatttatggttgatttgaagcgaatcattcatgaaaaaactaaagtattcgtagaagttcctaatatgagagatcctttggcttacatttttaatatagaaccgtatcgtaagtttttttatagagaatatcatttatactatttttctgaaataagccttttcaaaatttttaataaatttgattttaaacaatcagaaatatggcctgaaatggtggcatcattgagcaatcattttcactggattaatttaaacatagggcagtctgatactaacacaatggtaaacatggtattaaattgtgattacctcggcacaaaattgccaaatgggaatgattttaaagatattatggatgaaatagataacacgtatagagttaaattgcaagaagctggagttggagactattgttag

SEQ ID NO: 225997 - DNA, 547 bp, Unknown
  Bacterial polypeptide expressing nucleotide sequence isolated from the Sargasso Sea
atgcaactagtaagttttttaaataaggtttttaaaaaaggaggctttgtattaatcgatgcaaactcaaaagagcatgtaattggtgaaccttcaaaaaatcctattagattaaaaattttggataaaagattgcattataagttgttgtttcatcctgatttatattttggtgaggcatacacaaatggagacttaatcgttgaaaacggaactcttagcgactttttaaatttagctttaatgaattttggcaggggtgagttaaatttttttagttacttattaaatagattgagaggttcttatagatatttaacaaactttaattttataaaaaagtctaaaatgaatgtctctcaccattatgatatctcagatgatttatatgatttatttttagatccaaaaagacaatactcttgtgcatattttaaaaatgaaaaagatagtttagaaacagcacaaaacaataagatacaacatattataaaaaaacttaatattaaagataaccaaaaagttttagacattggttgtggttggg

SEQ ID NO: 225998 - DNA, 686 bp, Unknown
  Bacterial polypeptide expressing nucleotide sequence isolated from the Sargasso Sea
aatgaaaaaagaatttaaagttatatctgatttgatcgaggaaagatcaagagcacttgatattggttgtggagacggaaatttaatggaatatctattacaaaataaaacaaaagatataagaggattggaaatttctaaagaaaaagtacaaaaatgtctgtcgaaaggtttgacggttatagaaggagacgctgaaaatgatttaaaacagttcccaaacaaatcttttgattatgttattttaagtcaaactcttcaagcttttttaaaacctgaaaatgtaataaacgaactactaagagtgggaaatagagccatagttacaattcctaatttcggacactggaaagttagaatagatttgttaacaaaaggtacaatgccagtcactaaaaatttacctaatgaatggtttaatacccctaatttacatatgtgtacaattttagatttttacaatttttgcaaaaaaagagatattaaaatttttaaatcgttatccctaaatggtgaaaagatttcaaatataaaaatttcaaatctgaaaattaaaaatttaatttctgaattaggtatatttttaattgaaaataaaaatgaaaataaaataataaaatgttttacagataattattcatatcttttaatagataaaataaataattctgcttgtgttattgacc

SEQ ID NO: 225999 - DNA, 613 bp, Unknown
  Bacterial polypeptide expressing nucleotide sequence isolated from the Sargasso Sea
tctgattaaaagaacatcaaaaacctacatagaaaaaactctttcagaaaatccagaatggaaaattttagatattggttgtggatatggtgcaaataaatatgcgacaacagttagtgatatactagatttatcaaatcattataaagataaatcatttgtaaagattactgaaaaaaaattaccctttaaagataaagaatttgactttgttattgcctcccatgtagtcgaacatgttgaggatatttcctattttttaaatgaattatctagagtaggaaaaaaaggatatattgaagtacctacaagacttgaagataatttggtttttgaaaataaaaaagctcatatttggcacttagtatttgatgatgttaataatcaaattaatatttcaaaaaaacaacaatacttagaaccagttttaactgtaggaacaataaaaaaattaaatgaatattttcgtgaaagtttagtaatcgagttaagttgggaagaaagtattaaatttaatatagatgaagataattttaaaacacctgttaaaatatctactttaaacttgttaaaaaaatatttttcaaaaaaaattaggttactaattaaataa

SEQ ID NO: 226000 - DNA, 210 bp, Unknown
  Bacterial polypeptide expressing nucleotide sequence isolated from the Sargasso Sea
tatggctaataacacaattattaaagaagaaatagaaaaatttaataaaatggcagaggaatggtgggaccctaatggaaaatttaagccattacataaatttaatccaataagaatagaatatattaaaaataatataattaaagaattcaatattaaaaatagaaaaaaaccattttcaggtttagaaatcttggatattggatgtgg

SEQ ID NO: 226001 - DNA, 322 bp, Unknown
  Bacterial polypeptide expressing nucleotide sequence isolated from the Sargasso Sea
gatggaaaaaaatttaacaagtattagaaaagattgggaattaattcaaaatctaatagaaaaggataggaaagtattagatattggctgtggttctggtggtttaatgaaaagattgaaagaaaaatgcatgtcagatgtaaaaggtattgaaataaaaggcgattttgtaagaaaagcattgtctaaaggtctagttgtaattcaaggtgatgctgagaaagatttaaatcaatttaatgataaaagttttgattatgtaatattaagtcaaacacttcaagcaatgtataatccaaaaaattacttactgaaatgttaa

SEQ ID NO: 226002 - DNA, 558 bp, Unknown
  Bacterial polypeptide expressing nucleotide sequence isolated from the Sargasso Sea
gtgaccgtagagtgggatatggcgggtactattacgatggacgctgggtagggatttctgagcgagctatacaattgtttgatctaagtcctggcgacagggttcttgatattggatgtgggaagggtttctttgtctatgaccttgttaagagcttccaaattgatgcttatggtttagatatttctacttatgccctgaaagaggcaactctagagattcaaggccgtttacaacggcatgatatgcgggctcaacttaatttccccgatgatttctttgatgccgttttttgtataaacacacttcataatttggatcgcttagaggcctctttctctgtgtcagaaatgattcgagtcgtaaagaaaaaggagaatatttttatccaagtagacagttacaagaatcctgaagatcttgagatttttgaaaaatgggttttgacagcaaagttatatatgccacccgacgattggttagagtttttagcggattgtggatacaaaggggcctattactggacagttcttttgggagacgggtccgttgaataat

SEQ ID NO: 226003 - DNA, 445 bp, Unknown
  Bacterial polypeptide expressing nucleotide sequence isolated from the Sargasso Sea
tttgaaagaaaaaaaaataatcacttctctccatatacaaacaaaaagaaattatttgcaaagaatgattaatcaaaaagtaaaatgtatgcaaattgcaaaaaaatacggttacgattattgggatggtaatagaaagtatggatatggtggatacaaatatattcctgatagatggaaaaaacctgcccaaaatctcattaaaacctataaattaaacaataaatcaaaaattctagacattggatgtggaaaaggatttttaatttatgaaataaaaaaaatattacctaaaattaaagtagtgggacttgatatatcaagtcatgcaattaagaattctaaaaaagaaataaaaaagtatttgattaaaaaagatataagaaattccttgagatataaatctaaacagtttgatttagtaatttctatcaataccttacat

SEQ ID NO: 226004 - DNA, 667 bp, Unknown
  Bacterial polypeptide expressing nucleotide sequence isolated from the Sargasso Sea
attagaaaagattgggatttaattgagtctctaattaaaagaaattcaagaattttagatataggatgtggagaaggagatttaattcaacaattagaaaaaaatttagaagctaatgtacatggaattgaaaagaatcaagatatggctttaaggggaatagagaaaggtctaaacattactcatggtgatgctgaaaaagatctaacacaatatgcaaatcaaagttttgattatgtgattcttagtcaaactttacaagcaatgttagagccaaaaaaaatattaacagaattattaagagttggatctaaagcaattgtttcctttcctaattttggtcattggaagattagattacaattacttttatggggtaagatgccaataacagaaggtcttccctattcttggtatgacacccctaatattcatttttttactttaaaagatttcgaaaacttatgtaatgaaatgaatatagtgattgaaactagtataggtctttctagtagaggtaaacaatttataattaatggctcattacttcctgcaaatttaattacacatgaagctatctttcttttaagttataaaaattttgaaccaataaaaataaaatcaacaaacaaagtttttgcgaaaaactctgcaattataaattgat

SEQ ID NO: 226005 - DNA, 409 bp, Unknown
  Bacterial polypeptide expressing nucleotide sequence isolated from the Sargasso Sea
aatgactacaataaataaggaagaaattcaaaagttttcaagattggccgatgaatggtgggatgcaaacggaaagtttaaacctttacatgcttttaatccggttaggatcaagtacataattgataaatgcaaatcccattttaagcttgaaaaaaaagacgagaaaactctatctgttttaaaaatattggatattggttgtggtggtggtcttgtgtgtgagccgctaagtaggttgggtgcaaatgtaaccggaattgacgcatcctataaaaacatagaagttgccaaaatccatgcaaaaaaaagtggtcttaaaataaaatattttaatacatctcctgaaaagaaagaaataaatgaaaagtttgatgtggtattaaatttggaagtagttgaacatgta

SEQ ID NO: 226006 - DNA, 358 bp, Unknown
  Bacterial polypeptide expressing nucleotide sequence isolated from the Sargasso Sea
atgaaaacaactacgataaataaagaagaaattgataaattttctaaaatagctgatgagtggtgggatccagatggaaaatttaaacctttgcatgcttttaatcctataaggataaaatacattaaagataacatcatcaaacattttaaaattgaaaaaaaaattttacctttgtctaaattaaagatcttagatattggttgtggtggtgggttaattgctgaacctatgacaaggttgggagcaagtgttacagggatagatgcctctgaaaaaaatataaaaattgcaaaagcgcatttaaggaaaaataaattaaaaataaattataagtgtgcctcacctgaaaatttta

SEQ ID NO: 226007 - DNA, 598 bp, Unknown
  Bacterial polypeptide expressing nucleotide sequence isolated from the Sargasso Sea
attaaaaaatattacaaaatcaaaagtaataaatcaaattccttagaaggcctaaaaatcctggacattggttgtggcggaggcctcataagcgaacccatggcaagattgggcgcaaaagtaactggtattgacgcttcggaaaaaaatattgaagttgcaaaacttcattctaaaaaaagcaatcttcaaattaattatcttagttgttcgcctgaaaacttaaatgacctaaatgaatatgatgtaattttaaatttagaaattgttgaacatgtcgaaaatgtaaatttgtatataaattcatgttataaattattgaaaaataaaggcttaatgtttacagcaactctcaatagaactttaacgtcatatattaaagcgattattggagcagagtatattttaagatggctgccgattggtacgcatgactggaataaatttattaaacctgaggagttagaaaaaacgttatctcaacagaaatttttaaccgtagatataaggggtatgaaatttaacccattttcaaaaaaatggagaatatcatccgacttatcagtgaattatattattagtagttttaaaagctagt

SEQ ID NO: 226008 - DNA, 279 bp, Unknown
  Bacterial polypeptide expressing nucleotide sequence isolated from the Sargasso Sea
aatggctaatgaagagcaatttgagttatggaatgagggtattggtaaaaaatgggttgaagaagatgactctatgaacgagagattatccattttgactaaagagttatttttaagattaaatataaaccgaggtgataaaattttagatattggatgtggaggaggacagacatcctttgaggcatctgaaatagttggtgaaaatgggtatgtggtaggagctgatatatctaaaattttattagatttagcaaagagtaaatatgcaaatacaaa

SEQ ID NO: 226009 - DNA, 691 bp, Unknown
  Bacterial polypeptide expressing nucleotide sequence isolated from the Sargasso Sea
attgaattttttaagaaaattaattaaagaggatggattcgaatttgtggacgtaaattcaaaatcatacacaattggaaaaccaaaaaaagaatatcctataaaaattaagattttagataaaacactgcattggaaacttttaataaatccagatttatatttaggcgaaggttatatgaatggatcaattgtaattgaaaatggtactttgacagattttttagacattgttcttaaaaatgttggaagacaaccaaccaatacaatgacaaatatattgggaagatttagaagaatttatagatatataacaaattttaatctaatcggaaaatcaaaagaaaatgttgcccatcactatgatatttcagaaaaattttatgatttatttttagatgaaaaaagacaatattcatgtgcttattttaaaagtgaagataatacacttgaagaagcacaaaataacaagatagatcatataattaaaaaattaaatcttaaacccaatcagagagttttagatattgggtgtggatggggaactcttgctcttgatattgcaaaaaaaacccaatgtgaagttgttggaattactttatcagaaaatcaattagagtatgccaaacaaaaagctaaagaaatgaatttagaaaatcaagtagagtttagacttgcagattataggcaa

SEQ ID NO: 226010 - DNA, 842 bp, Unknown
  Bacterial polypeptide expressing nucleotide sequence isolated from the Sargasso Sea
gatgctaattcaaaaagttacattcattggaaatccaaaaagtgaaaaccctataaaactaaaaattttaaataaaaatcttcattataagttgctgtttcatcctgatttatattttggcgaagcatatacagatggtgaaataatcattgaaaatggaactctaactgattttttggatctttctttaatgaattttggaagaggaaacttaaattttttcagttatttaataaacagattaagaggttcttatagatatctaactaattttaattttataaaaaaatcaaaaatgaatgtttcacatcattatgatatttcggatgatctttatgacttatttttggatcctaaaagacaatattcatgtgcatattttaaaaatgaaacagatacattagaaactgctcaaaataataaaattcaacatataataaaaaaacttaatataaaaccaaatcaaaaagttttagatattggatgtggatggggttctcttgcaatagatattgcaaaaagtgcaaactgcgaagtaacaggtattacactttcagaaaaccaatttaattactgcaagaaaagagcaaaagaacttaatttagaaaatcaattaaactttaagttaatggattatagagagcttaatgaaaaatttgatagaatagtcagtgttgggatgtttgaacatgtaggaagaaaattttataaaaaatttttttcacaagttgaaaaacttttaaaagatgatggagtatcattaattcatactataggatcagtaaatccaccaagagatccacatccatggatcactaagtatatttttccaggaggctata

SEQ ID NO: 226011 - DNA, 502 bp, Unknown
  Bacterial polypeptide expressing nucleotide sequence isolated from the Sargasso Sea
atgctttttgaaaaattaaatagcgccccattccaggaccacgaaaagacaattaataatttaattaacgtgaataatagagttgttttagatattggttgcggcgctggcagaatagctcgaatattagccaaaaatggcggtcgtgttattggaattgatccgtcagttactcaattggatcgggcaaaagtactatctgcatcaaatactgtaaaatatgtaagaggtttgggagagcgtctacctgttagaaatagtagtattgatttttgtatattttttaatagcctacaccatgtaccttccgattatcttgagagggctattcatgaagctggcctaagcttaaagaaaaatggtatcttatacgttgcagaaccaatagcttatggtcctctatttgaacttagtaagagttttaatgacgagactattgttcgggaaaaagcatactcggctctgctaaatataaaacaatcagaaatgataatggactcgg

SEQ ID NO: 226012 - DNA, 490 bp, Unknown
  Bacterial polypeptide expressing nucleotide sequence isolated from the Sargasso Sea
atgactacaataaataaagaggaaattcaaaagttttcaaatttagctgatgaatggtgggatgtgaacggtaaatttaaacctttgcatatgtttaatcctatcagaattgaatatatcttagaagaaatatcaaagcatttcaaattagacagaaacaaaaaatccctcttaaaaaatttaaaaattctcgatataggatgtggaggtggtctcataagcgaaccaatggctcgactaggtggaagagtaaccgggatcgatgcctcggaaaaaaatattaaagttgcttctattcatagtaaaaaaaataaccttgagataaattatttaaacaaatcacctgaacaattaaaagttaaagaagaatttgatataatattaaatttagaaattgttgaacatgttgataacctggatctttatcttgagtcttgcaataagttattaaaaagaaatggattaatgtttactgccactattaaataga

SEQ ID NO: 226013 - DNA, 487 bp, Unknown
  Bacterial polypeptide expressing nucleotide sequence isolated from the Sargasso Sea
gaatccagtagcagaaggactaatcaaagagtacagcttaacagaagaatctcaagtgttggacattggctgtggaaaggctttcttactccacgaactaaaactgttgcttcctggtataaaggtctgtggaattgatatctcagaacatggtttgaagcacgcaactgaagaaatcagaccctatcttttacgccaaagagcacaagatccgttgccttttgaggacaacgagttcgatctagtaatttcactcggtatgttccacaaccttaaactctttgaattacagtcatcaatccaagaaatgcaaagggttggtcagcagggatacttaatgctggaaagttaccgtaatgaacaagaattgttcaatctccagtgctgggcacttaccgcagagtccttcttagagatgtcagaatggatctggttgtacaatcactttggctataaaggggattatgagtttatatattttcaatga

SEQ ID NO: 226014 - DNA, 776 bp, Unknown
  Bacterial polypeptide expressing nucleotide sequence isolated from the Sargasso Sea
aatgcaattagcaagatttctaaacagtgtttttaagaaagatggatttatattagtagatgcaaattccaaaaattatatcatcggaaatcccaaaagtaataatcctattaaagttaaaattttaaacaaaaatctacattataaattgttatttcatccagatctttattttggagaagcttacacggatggtgaaatagtttttgaaaatggcactcttactgattttctaaatttatcattaatgaattttggaagaggagatttaaatttttttagttatttaatcaatagattgagaggttcttatagatacttaactaatttcaattttattaaaaaatcaaaaatgaatgtttcgcatcactatgatatctcagataatctttatgagttgtttctagatcctaaaagacaatactcttgtgcttattttaaaagcgagaccgatggtttagaaactgcacagaacaacaaaattcaacatataattaaaaaattaaatataaaaccaaatcaaaaggttttggatataggatgtggatggggctcactagcaatagatattgctaaaagtgttaattgtgaagttacaggaataacactttcagaaaaccaatttaattattgcaaaaaaaaggcaaaggaacttaatttagaaaatcaattaaattttaaattaatggattatagagaacttaatgaaaagtttgacagaatagttagtgttggaatgtttgagcatgtaggaagaaaattttatggaaaatttt

SEQ ID NO: 226015 - DNA, 595 bp, Unknown
  Bacterial polypeptide expressing nucleotide sequence isolated from the Sargasso Sea
aatgtggaaatcaaaaactcctggaattccagatgaagaatttgaaagaactgaatctgtcccaataacaaaagaggaaattcgtgccatacaaatcagtaaaggtagattatctgcaggacaaactgttttagatattggatgtggaagtggctctgttacagtagaggcagcaatacaaattgaagattctggaaaagtagttggtgttgacattgatcctaatgcaattgaactaacagaaaaaaatctaaaaaaatttggaatttcaaattataccttaatcgaaggaaatgcaaaagaaaagatcatcgaattgcctaacgcagatacagtattcattggtggaactggtggagatacaaaagatattgttgaactatgtcaagaaaaaatcaaaactggtggacgaatagttattggcgttatactcatagaaacactctattccgtattgcaaacaattgaaaaattagactttgaatcaattgatattactcaaattacaattggaaaaagtcgtaaaactaaaacgggtacgatgatgcttgcaagaaacccagttacagtcatctctgcaactaaaaaaataatc

SEQ ID NO: 226016 - DNA, 355 bp, Unknown
  Bacterial polypeptide expressing nucleotide sequence isolated from the Sargasso Sea
atgtttgatttctctaaagcaagacaagaaatggttgattgtcaaataagaactgctgatgtaactaactattctattttacaagcactatcaagagtcgctcgagaaaaatttgttcccgatgagtatgtttcaattgcgtacggtgaaaccaacattaatttaggaagtggtagatatttattagaacctagaatttttgctaaaatgcttgaattattaagtgtgaattctaatgatttagtgttagacataggttgtggcttaggatattcatctgcaatactttctcaactagctgaggtagtcattgccctagaaaatgaatttttcttcaaaaatgctcaaaaacttc

SEQ ID NO: 226017 - DNA, 880 bp, Unknown
  Bacterial polypeptide expressing nucleotide sequence isolated from the Sargasso Sea
atgccatttcaacaattaaaccaacttgtaaattctaaaaaaaatgttgctcatcattacgatattgatgaaaatttatataaattatttttagataaagatatgcaatattcttgtgcatactttcataatcaaaatatagatttagatcaggcacaaaaagataaaaaaatacatataattaacaaactacaaattaatgaacaaatgaatgtgcttgacattggttgtggttggggtggtatggctattgaaattgctaaggtaacaggtgctaaagttaaaggaataactttatctgaaaatcaatataaaacagcatcagaaagagcgcagaaggaaggcttaaacgataaagtatctttttttttacaggactatcgtaatgaaaaagaaaaatatgatagaattgtttcagtagggatgtttgaacatgttggtgtaaaatattttaaaacatacttaaaaaaagcaaacgatttattaaaggataatggtatttttcttctacatactattggtcaaagaggcaaacctactgcaacaagcccatggattagaaagtatattttccccggaggatatatcccctcattgtctgagataatgaatgaaacacaaaagcttaatataaatgtaacagatattgaaattttaagattgcactatgctcatacactttcacattggtataaaaacataaaagaaaataaggaaaaaattataaaaatgtttgataagcggttttttaggatgtgggaattttatcttcttgcaagcaaatattcttttgtaaatatggggaatgttgtttttcaaatacaaatttcaaaaaatattaacagtttaccattaacaagaaattatatttataattagt

SEQ ID NO: 226018 - DNA, 874 bp, Unknown
  Bacterial polypeptide expressing nucleotide sequence isolated from the Sargasso Sea
cttacaaactttaattttataaaaaaatccaaaatgaatgtatcccatcattatgacatttcagatgatttgtatgatttatttttagacccaaaaagacaatactcttgtgcatattttaaaaataaaaatgatagtttggaaactgctcaaaataataaaatccagcatataattaaaaaattaaatattaagactaatcaaaaagttttagatataggttgtggctggggatcactagcatttgatattgcaaaaagcgctagttgtgaagttactgggattactttatcacaaaatcagtttaattactgtaaccaaaaagcaaaagatttaaatttagaaaatcaagtaaaatttaagttaatggactacagagaacttaatgaaaagttcgatagaatagtaagcgtgggtatgtttgaacatgtcggaagaaagttttataaaaaattctttaaccaaattgaaagactcttaaaagatgatggcatctctttaatacacactattggatctgtaaatcctccaagagatcctcatccttggataactaaatacatttttccggggggttatacaccaagtttaagtgaagttactactcctattgaacgagcaggattaattgttacagatatagaagttttaagacttcattattcatatactctaagacattggaaagaaaactgtatgaaaaataaagcaaaaattattaaaatgtttgatgaaagattttttagaatgtgggaattttaccttacaggatgcgaaatggcttttaagtacggggaacaagttgtttaccaatttcaactttcaaaaaattattactccactcccgttacaagagactatatttatcaataat

SEQ ID NO: 226019 - DNA, 253 bp, Unknown
  Bacterial polypeptide expressing nucleotide sequence isolated from the Sargasso Sea
gatgactacagtaaataaagaggaaattcaaaagttttcaaaaatagcagatgagtggtgggatacaaaaggaaaattcaaacctttgcacatgtttaatcctataaggataaaatacattaaagaaaaatgtatttcacattttaaactaaaagaagatcaccctaaaccactcacgaatatagagttattggacatagggtgtggaggcggattgataagcgagccaatgtgtaagctaggagcaaaataa

SEQ ID NO: 226020 - DNA, 277 bp, Unknown
  Bacterial polypeptide expressing nucleotide sequence isolated from the Sargasso Sea
tatgactacaataaatcaagacgaaattcaaaaatttacaaaacttgcagacgaatggtgggatgtttcaggtaaattcaaacctttacacatgtttaatcctataagaatagaatatattttggataaaacaattgaacatttcaacattaaaggcgttaaacttcctcttaaggggttaaaaattttagatataggttgtggtggtggtttaatttcagaacctatgagtagacttggtgcaagtgtaactggtatagacgcctcattaaaaaat

SEQ ID NO: 226021 - DNA, 616 bp, Unknown
  Bacterial polypeptide expressing nucleotide sequence isolated from the Sargasso Sea
tttgataaacagaacttcattaaaaaaaattgaaaaaaaactaaacgaaaataaaaattggaaagttttagatataggctgtggttatacagcaaacaaatttgcaacaactattgctgatgttcttgatttgcaagacttttataaagataaaaattttgtaaaaattgaaaataagaaacttcctttcaaagacaatgcttttgattttgtgatagcaagtcatgttattgaacatattgaggacataactttcttcttaaaagaaattcaaagaatctcaaataaaggttacatcgaactgccaacaagattaggtgataatctagtttttgaaaatcaaaaggaacatttgtggtggttcacctttgacgatcaaaacaaaatattgattgctgaaaaaaaaaaacaaattttagaaccattcatgtcagttgctacagcaaaacaagtgtcagataattttagagaaagttttgtattggagttatactgggaaaataatattgaatacaatataaaatctgaagaagataaaaaatatgaacaattaactttctttacaattataaaaaaattttttagtaaaaaattaagaagattaattaaaggctaa

SEQ ID NO: 226022 - DNA, 664 bp, Unknown
  Bacterial polypeptide expressing nucleotide sequence isolated from the Sargasso Sea
tatgtatgtagcaaaactattatctcaaatatataaaaaaaatggagttattttgattgactctgaagggcaaaaatatatttgcggtaagccagatttacaaaagccattgacgataaaattgttaaaaaaagatttaaattggaaactattattgaatccagatttaaattttccagaagcatacgcgcgaggggagattgaatttgaaaatggtacactactagattttttaaatatgacttttgaaaacttagggcgtaaagaaattaatctttttggatcttcattaaaaaaaattttacatatttggagattttttacaaattttaatttacctacaaaatccaaaaaagatattgaacatcattatgataaaggtgaagagttgtatgatttatttttagataaaaaacatagacaatattcgtgtgcatatttttcatcagatactgaaagtttggaggacgcgcagcaaaataaaatcaaccacataattaaaaaattagatttacgttctaatcaaaaggttttagatataggctgtggatggggtggaatggtttttgaaatagccagacaaagccagtgcgaagttaaaggcatatccttaagtgaaaatcaaattaattactgtaataaaaaagcaaaagaattaaaacta

SEQ ID NO: 226023 - DNA, 316 bp, Unknown
  Bacterial polypeptide expressing nucleotide sequence isolated from the Sargasso Sea
atgtggaaatcaaaaactcctggaattccagatgaagaatttgaaagaactgaatctgtcccaataacaaaagaggaaattcgtgccatacaaatcagtaaaggtagattatctgcaggacaaactgttttagatattggatgtggaagtggctctgttacagtagaggcagcaatacaaattgaagattctggaaaagtagttggtgttgacattgatcctaatgcaattgaactaacagaaaaaaatctaaaaaaatttggaatttcaaattataccttaatcgaaggaaatgcaaaagaaaagatcatcgaat

SEQ ID NO: 226024 - DNA, 475 bp, Unknown
  Bacterial polypeptide expressing nucleotide sequence isolated from the Sargasso Sea
atgaagcaggatattgtaaatatcgatcaatctgaatattggaatgagaaatctggaccaaagtgggtcaaacttgatgatgcgatgaatgaaaggttttccattttaacggataagctctttgcgagagccaatataaataagaatgagagaattttggacattggttgtggtgggggcgaaacatcctttcgtgcgtcaaaattggtcggtcccgatggttacgtgatgggagcagatatttctgaaacattattaagttttgcacggaaaaaattttcaactattcgtaatttagagttcaatacctgtgacgcacaaagctacaaatttgagaaagcaaattttgatagagtaatctctagatttggagttatgttttttgaaaacccagtagaagcttttagaaatattagatcatctttgaaggacggaggcacaataagttgtgtttctggtcagatattagaaaaat

SEQ ID NO: 226025 - DNA, 842 bp, Unknown
  Bacterial polypeptide expressing nucleotide sequence isolated from the Sargasso Sea
tatgtcttttagggtacttaaatttttaattaaacatttaattaaaacaagatctgttgttataaaatttgagggaaatgaacattttattgacaacggaacagatccattaattttacagatcaataataagaaatttttaaataaaattttttatgcaccttctctcgtactcacagaaggatatatggataaagattacgagttaaacaattcgactttttatgagttttctgaattacttattgaaaattataataaataccttgaaaaaatatcaaatacactaatattcagaattattttaatcattaatccactattccagttaaattttgtaaagagttcaaaaagtaatgtcgcaagtcactatgacttatctgataggttgtatgacttatttttggatgaaactaggcaatattcatgcgcatactttgaaaatgaaaacgactcattaacacaagcacaaactaacaaaatgagcagattagctgacaaattattattaaattctaatgatagagttttagacatagggtgtgggtggggatcacttagtagacactttgcagatcatcatgattgtaaagtaaagggtgtttcattatctgaagagcaaattaaatactgtaatgaccaacttaaaaagtcagataaaaaagaaaatttatcctattctttacaagattatagagatgaggagaattcttattcaaaaatagtttctgtaggaatgtttgagcatgtaggaaaacccttctacaaaacctattttaaaaaaatatataatttattatctgatgatggcatagcggtagtacatacaattggtaacatta

SEQ ID NO: 226026 - DNA, 688 bp, Unknown
  Bacterial polypeptide expressing nucleotide sequence isolated from the Sargasso Sea
tcatatcaagccaaaccaaaaagtattagatattggttgtggatgggggtcattagcattcgatatagccaaaagcgcaaactgtgaagttactggaattacattatccgaaaatcagtataattattgtaaacaaaaagcaaaagaacataatttagataatcaagtaaactttaagttaatagattatagagagcttgatgaaaaatttgacagaatagtaagcgtaggaatgtttgaacacgtaggtagaaaattctacaaaaagttctttaaccaggtagaaaaattgcttaaagatgatggaatttcattaatacacactataggctcagtaaatccacctagggatcctcatccgtggattacaaaatatatatttccaggaggatatacgccgagcttaagtgaagttagtaatcctattgaaaaatctgggctaattgtttctgatctagaggtattaaaactacactatatgcatactttaagaaactggaaagaaaattgtattaacaataaagaaaaaattattcaaatgtttgatgaaagattttttagaatgtgggaattttatttagctggatgtgaaatggcatttaagtggggagatcaggttgtatttcaatttcaattgacaaaaaattataggtcaactccagttacaagagactatatttatcaataa

SEQ ID NO: 226027 - DNA, 461 bp, Unknown
  Bacterial polypeptide expressing nucleotide sequence isolated from the Sargasso Sea
aatgaataaaattaatagcataagaaaagattggtcccttattgaaacacttatcacacaagatagaaaaatcttagatattggatgcggtgatggtggacttatggaacaattagaaaataatagtaatgcaataactcatggcattgaattaaatcgagatttagctgctaatgctatcgcaagaggtttcaacgttgtacatggaaatgcagaattagatttgtctcaatattcaaataatagttttgattacgtaattttaagtcaaaccttacaagcaatgatgaagcccaaagatattctgtctgagttattaagaataggatctaaggcaatagtttcttttccgaactttggtcattggaaaataagattgcaacttttaatatctggaaaaatgccggtaacagaaagtttaccttatacatggtatgacacaccaaacattcattttttac

SEQ ID NO: 226028 - DNA, 697 bp, Unknown
  Bacterial polypeptide expressing nucleotide sequence isolated from the Sargasso Sea
aataagttacaaattaataatgatatgaaagttcttgatataggttgtggttggggaggtatggcaatagaaattgcaaaattaacaggggcaaaggttaagggtataactttatctgaaaatcaatttaaaactgcatctgaaagagcacaaaaagaaggattaagtgacaaggtttcatttgctcttcaagactatagaaatgaaaatgataaatatgatcgtatagtctctgttggaatgtttgaacatgtaggagtaaaatattttaaaacttattttcaaaaagcatacaacatcttaaatgataatggagtatttcttttacacactataggacaaagaggtaagcctacagcaaccagcccttggataaggaaatatatttttcctggaggatatattccatctttatcagaaatagtgaaagaaacacaaaaactaaatatcaatgtaacagatatagaaattttaaggctgcattatgcacatacactttcacattggtataagaatgtaattgaaaacaaagataaaattattgaaatgtttgataagcgtttttttagaatgtgggaattttaccttttagcaagtaaatactcttttgtgaatatgggcaatgttgtatttcaaatacaaatttcaaaaaatattaacaatttacctttgactagaaattatatttataactaat

SEQ ID NO: 226029 - DNA, 436 bp, Unknown
  Bacterial polypeptide expressing nucleotide sequence isolated from the Sargasso Sea
caaaatccttgacatcggctgcggcaaaggatatttgctttatgacttccagaaagtcataccaaaagctgagatttacgggattgacatttcttcgtacgccattaaaaatagcaagccagaaattcgcaatcgattgcatttagggtcagccacaaatctaccctggcctgatggatatttcgatctcgtcatatccatcaataccctccactgcctgcatgctcatgacctaagtgatgcactcaaagaaatgcaacgagtaggcaagaacaacaaatacctctgcgtcgagagctggagaaatcagtcagaaaaagcaaaccttttgtattggcaggtttcatgcgaggcctttaatactccagaagcttggctttggtggtttaaacatgccggttacaacggagattactctttcatctacttcgaatga

SEQ ID NO: 226030 - DNA, 700 bp, Unknown
  Bacterial polypeptide expressing nucleotide sequence isolated from the Sargasso Sea
ttgattagcatatacagatatttttattatatatatgctaagtttaaattttataaacttagtaataaaaaaatattttctaaaatatataaagataaaatgtggggatatgattatggttcagtttactactcaggttacggaagtaataataatataattgttaatgaatttattttaagtattaaaaatttttttgaagaaattaaaattaaaccaaagattttagatattggatgtggagatttcgaagtaggtaaaaatatctaccccttttcgagtgagtatacagcttgtgatatagtaccagagttaattgagtataataaaacaaaatttaattatcctaatcttagatttttatgttttgatgcaacaaataataaagacttgcctaaatctgacgttgtattactcagacaagttttacaacatctttgcaattcacaaattaagataatacttgataaaattaaaggtaatttcaagtatttaatattatcagagcatatcccaattaataaatttattccaaataaagatattcatacgggtgatttatctagagtttttataaattcaggtatagatatagaaaaaaaaccttttaattataaatttaaaaaaaaaattattttaaatgaagtgtttgaaaaagaaggtaaggttcaaacaatagtttttaaattagatgaataaa

SEQ ID NO: 226031 - DNA, 562 bp, Unknown
  Bacterial polypeptide expressing nucleotide sequence isolated from the Sargasso Sea
aaaacgtgattggaagattttggatattggttgtggctatggtgctaatgaattcgcaaatacaatctgtgatgttcaagatttatcaaagttttataaagataaaaattttataaaattagaaaataaacagttaccttttaaagataatgaatttgactttgtaatcgctagccatgtattggagcatgtagaagattttaaattttttattagtgaattagaaagagtctcaaaaaaaggctatatagaattacctactaaacttgaagataatttggtatttgaaaataaaaatgaccatttgtggcatatggattttgacgatgtgaactcaaaattattaatctcaaataaacttcagtatatagaacctattttaactgtatcaatgatacagaacctacgtgaaaattttaaagctagtttggttttggaattatattgggaggataaaattgattatgattttgttgcaaataatcagaatataaaaaaacacaatttattaaatttatttagaaagtttatttcaaaaaaattaagatctatttacaattaa

SEQ ID NO: 226032 - DNA, 403 bp, Unknown
  Bacterial polypeptide expressing nucleotide sequence isolated from the Sargasso Sea
atgtttgatttctctaaagcaagacaagaaatggttgattgtcaaataagaacttctgatgtaactaactactctattctacaagcactatcaaaagtctctcgtgaaaaatttgttcctgatgaatatgtttcaattgcttatggtgaaaccaacatttatttaggaaatggtagatatttattagaacctagaatttttgctaaaatgctagaattattaagagtgaattccaatgatttagtgttagacataggttgtggtttaggatattcatctgcaatactttcccaactagctgaggtagttattgccctagaagatgaattcttctttaaaaatgcacaaaaacttctctcggaaacttctattgaaaatactgtaatttatgaaggaagtcttt

SEQ ID NO: 226033 - DNA, 193 bp, Unknown
  Bacterial polypeptide expressing nucleotide sequence isolated from the Sargasso Sea
tatgaataaaattcaaagcataaggaaagattgggatctaatagagtctttaataagagataattcacgtattttagatataggttgtggagagggtgatctgattaaacagcttgaaaaaaatctcagtgccaaagtacatggaattgaaaaaaatcaagagttagctctaaaagcgattgcaaaaggctta

SEQ ID NO: 226034 - DNA, 367 bp, Unknown
  Bacterial polypeptide expressing nucleotide sequence isolated from the Sargasso Sea
atgaataatattaaaagcattagaaaagactggaatctaattgaatcattaataaaagaaaattcaagaatcttagatattggttgtggaaaaggagaattaatagaacaacttgagaaaaatttaaaagcaaatgttcatggaattgaaaaaagccaaaatatggcattacagggtatagctaatgggttaagcattattcaaggagatgcagaaaaagatcttttccagtattctaatcaaagttttgattatgtcatacttagtcaaactttgcaggcaatgatgaaaccacagaaaatattatctgaattactaagaatcggctctaaagcgattgtatcatttcctaattttggtcattgaa

SEQ ID NO: 226035 - DNA, 607 bp, Unknown
  Bacterial polypeptide expressing nucleotide sequence isolated from the Sargasso Sea
aatgaataaaatagcaagtataagaaaagattggggtttaattgaaactttaattgaagataatagaaatattttggacataggttgtggtgatggcatgcttatggaacaacttcagaaaaatttaaatgctaaaacttatggtattgaaatagacagagaattagcatctaaagcaattgccaaaggtttcaatgttattcatggagatgctgaaattgatcttgtgcaatactcaaataacagttttgattatgttattttgagtcaaacattacaagcaatgatgaagcctaaagatatattatctgaacttttacgaattggctcaaaagctattgtgtcatttcctaattttggccactggaaaattcgctttcaattactaatatccgggagaatgcctgttacagaaagcctaccttatacatggtatgatactccaaatattcatttttttacaataaaagatttcttaaaactttgtaatgatatgaatattgtagttgaaaaaagtattggtttaacttcaagaggtaaacaatttgatattagtcagtctttaacaagtgttaatttttttactcatgaagcaatattcttacta

SEQ ID NO: 226036 - DNA, 660 bp, Unknown
  Bacterial polypeptide expressing nucleotide sequence isolated from the Sargasso Sea
aaaattatattaattcatttaataattttttaattaaaaatactaaaattaattcgaaatttaaaattttagatattggttgtggtaggggaaagattttaggctctttaagctcaagattaaatcttaaatataaacctttaggtatagatgtagttaatcacaaagatagagataaaagaattaattttaaaagagcaaatattttagatctttctttgaagaaaaatcaaaaatttgatttaattttgattaaacaaacaattcatttaataaaattaagtgaggtaaaaaaattattaaaatcattagtaaaaattttaaatactaaaggtaaaattctaatttttactctagatacagcaaataacgaaattccaacttttaaattaatgaaatttaaacttaataaatctcttatgcgagataaaaaaataatgaagattattacaaatttatatcctaaaagaatcaaaaaaaaatttatttttaaagttaagataagtaaagagaaatatattgaaatgattgaaagtagatatatctcaactttaatacctctatcaaaaaaacaacttaaccaaggtattcaagaaatcaaattaagttataaaaatcaattaaaatttaaagacaaattaatttgtattattttataaa

SEQ ID NO: 226037 - DNA, 940 bp, Unknown
  Bacterial polypeptide expressing nucleotide sequence isolated from the Sargasso Sea
attgggcaatccaataaaagaaaaaccaattaaacttaaaattctaaataaaaatctacattataaattattatttcatccagatctatattttggagaagcttacacggatggggaaatcgtaattgaaaatggaagtcttacagattttttagaccttgctttaatgaattttggaagaggagatttgaatttttttagttacctaataaatagattaagaggatcgtatagatatttaactaactttaattttataaaaaaatcaaaaatgaatgtttctcatcattacgatatttcagatgatctttatgatttatttttagatcctaagagacaatactcctgtgcttattttaaaaatgaaacagattctttagaaacagctcaaaacaacaagattgaacatataattaagaaacttaatattaaatcgaatcaaaaagttttagatattggatgtggatggggatctttagctattgatattgcgaaaagtgcaaattgtgaagttacagggatcactctatcagaaaatcaatttaattattgtaataaaaaagcaaaggaacttaatttagaaaatcaattaagttttaaattaatggattatagagaacttaatgaaaagtttgacagaatagttagtgttggaatgtttgagcatgtcggtagaaaattttataaaaaatttttttcacaggttgaaaaattattaaaagatgacggtgtatctttaattcatactattgggtctgtaaatccaccaagggatcctcatccttggatcacgaagtatatatttcctggtggttacactccaagcttgagtgaagttacaacgccaatagaaaaagcaggtttaattgttgcagatattgaggttttgaggatgcattattcgcatacattaagacattggaaagaaattgtctcaaaa

SEQ ID NO: 226038 - DNA, 766 bp, Unknown
  Bacterial polypeptide expressing nucleotide sequence isolated from the Sargasso Sea
ccgtgaagaagtaaatacccaagaggtaactgacgaacaagtacaagttcgtgaaaatgtagaaccagtaactgataaagtttctgaaactgaaattgagtcagttcaagaagaaccaattgatttagatcaaattgacggtcagccattaacccaagaagcgtttgctgacctagatgataattatcttaaatcagatccacaagtagttggttatagatcattagaagaacaggaagttatgtatgatttcattgcttctaattttgattgtactcaagaatcaattcttgatattggttgtggtagaggtgattttttaagacacgtacaagaattatatcaagcagatattagatatcatggtattgatatgaataaaatattaattcaaacagcaaaagaaatgagccctggtgcaacatttactgctagtaatttatttaaattagatggtaattttgcagcagattgggtaattaatattggaggtctatctataatgtatgaaccagtaaaagaagactttgacattatggatgctttaaaaaatactgttacaaagatgatggaactagctgatacaggtatagtaatttcattattaagtatgaatacgtcagaagattatgatgaatcatatttagtttatgatccagttgaagttctagattgggctttaaatgagtatggacaattaggaggaaatgtaagactagatcatagtgttgcagattcgatatttacattaacaatttttaaataa

SEQ ID NO: 226039 - DNA, 793 bp, Unknown
  Bacterial polypeptide expressing nucleotide sequence isolated from the Sargasso Sea
gagcataggcaatattcatgtgcacttttcaaagatcccaatgaaacattagatcaagcacaaactaataaactttctcacatagtaaaaaaattaaatacaaaaccaggacataagatattagatattggttgtggttggggaggacttagcagatatatagctaaagaaactggttgtgtagttcatggaattagccttgcttcaaatcaaatagaatattgtaaagaaaaagcaagagaattaaaacttgataatttgcttagttataagttatgcgattatagacaattaaaaggttcttgggatcgaatagttaacgttggtttttttgaacacgtttctccgaaattttataaaactttttttaaaaaaattaatgatttattaaaagacaatggtgattctctttgtttaacccacactattgctacaaccaatccacctggaccagcaaatccttttataaacaaatatatatttaacggagggaaagtgccctcagctagtcagattacaaaagcattagaagaaagtgggcttattatttctgggtgggaaagtttaatagatcattataatttgaccttagatcattggagaaaaaattttttaaataatgtttatgaggctagaaaagcttatggaagtaattttataagactttgggatttttatctctcaagttgtagtgcagcatttaaatggtctgatttattagtttatcaaattgaaactgtgaaagattttaagtctgtacctggaagaacaagagactatatttacaaataac

SEQ ID NO: 226040 - DNA, 532 bp, Unknown
  Bacterial polypeptide expressing nucleotide sequence isolated from the Sargasso Sea
tctgaaaaatgaaataccaattttttttagcgacattaatcatggtgattattttaaatggatgaaatatattgatgaattaccaaacatatctgtctcgaaattcgattttacattagatgccgttacaattggagataaatctgattgctcaattgaagagagagcaatattaaaaaataatttaatgaaattaaaaccatggcgtaaagggccttttaatatttttggtttattcttagatgcagaatggcaatcaaatatgaagtggaatagactcgtggaacatataaagccacttgaaaataaattagtgttagatatcggatgtggaaatggatactacggatggcggatgcttggtaaaaaagcagagtatgttttaggacttgatccatcgttattattttattctcagttcatagcaacaaaaaaatatttaccggatgctaatatagattatgtaccgtttgggattgaatctatagctcatgaaaacctatgttttgattcagtattttctatgggcgta

SEQ ID NO: 226041 - DNA, 757 bp, Unknown
  Bacterial polypeptide expressing nucleotide sequence isolated from the Sargasso Sea
cttgcaagttttttaaataaagtttttacacatagtggttttattttaattgatgctaattccaaagattatattataggtaatccaggaaaaaatcctatcaaattaaaaatcttaaataaaaaccttcattacaaattattatttcatccagatttatattttggggaagcttatacagatggtgaaataattattgaagatggaactcttactgattttttagacttagcattaatgaattttggaagaggcgatttaaatttttttagttatttaattaatagactcaggggatcatatagatatttaacaaatttcaattttatcaaaaaatctaagatgaatgtatctcatcattacgatatttcggatgatttatatgatttatttttagatacaaagaaacaatattcatgtgcttattttaaaaatgaaaatgatagtttagaagtggcacaaaataataagattcaacacataataaaaaagcttaacattcaaccaaatcaaaaagttttagatattggatgtggatggggctcattagcaattgatatagctaaaagtacaaaatgtgaagttacaggaattacactgtcagaaaatcagtttaattattgcaatcagcaagcaaaagaaatgaatttggaaaatcaagttaaatttaaattaatagattacagagagctcaatgaaaaatttgatagaatagtaagtgttggaatgtttgaacatgtaggtagaaaattttata

SEQ ID NO: 226042 - DNA, 490 bp, Unknown
  Bacterial polypeptide expressing nucleotide sequence isolated from the Sargasso Sea
aatgagtcaaagggaaaatatcagctcagaagaagttgagaaatttaatgatttagccagagaatggtggaatccacatggaagctttgctcccttacacaaactcaatccacttcgttttgaatacattcgggaaaaatcctctctagagggaaaaactgccattgatgttggatgcggaggaggaatacttactgaatcattggccagcgtcgcgtctaatgttcatggaattgatatggcggaaaaaggtttggctgttgcaaatatccataaaaataaatccaaattagcgaatatcaaatattcacagagtactatcgaagattatgctctaaagagtaatgaaaaatttgatgttctgacatgcatggaaatgcttgagcatgttccatcaccaggtgaaaccatacaagcttgttctgatattgtcatcgatgggggagatcttttttttgcaacaatcaacaggaatatcaagtcttatatc

SEQ ID NO: 226043 - DNA, 328 bp, Unknown
  Bacterial polypeptide expressing nucleotide sequence isolated from the Sargasso Sea
atgaaaaaacttaaaaactgggataataaaacatggctatcatctaaatcgtatatctcccaatttagtaaatttctcaaaacgaaaattaatttgaataagaattcaaaaatattggatattggatgtggtagagcaaatattattagttatttacaaaaaaaatatagatttgataaaaaagcaataggagttgatattgtcaaaaataaagaaataaaaaaaaatataatcttcaaaaaaattgatgctattcaatatttaagaaaaacaaatattctttttgatataatcttaattaagcaaacaatacattttttaaattaaa

SEQ ID NO: 226044 - DNA, 574 bp, Unknown
  Bacterial polypeptide expressing nucleotide sequence isolated from the Sargasso Sea
ttttaacgaaaatccaaactggaaaatattagatattggttgtggttataccgctcataaaaatgcaactgttatttgtgatgttcaagatctatctgactattataaagataagagttttataaaattaaacaataataatttaccatttaaagataaagaatttgattttgtagtagcatctcatgttattgaacatgttaaagatgtagatttttttattaaggaactagaaagagtttcatctaaaggctatattgaattaccaacaatccttgaagacaatttagtatttgagaacaaagatgatcatttatggcacatggaatttaatgatgttgataacgagctaattgtatctaaaaaagttcagtatttggaaccaatacttacagtttcttctgcaaagaagttctcaaaatatttcaaacagagtttagtattagaattattttgggaagatacaattcaatataaaatagttaaaaaagattttgagataaatcaaaagatatcaagactatctttattcaggaagtttttttctaaattattaagaaatataattagataa

SEQ ID NO: 226045 - DNA, 727 bp, Unknown
  Bacterial polypeptide expressing nucleotide sequence isolated from the Sargasso Sea
atgtcagcaggttttcagtgtaaacaattttatatcggccatcagcactgcgcgatgaaagtcggcaccgatgcgctgttattgggcgcctgggcaactttgcccaccgcgttacaggcgacacccgccatgctggatattggctgtggcagtggcattttaagtttaatgctggcacagcgcaccgggggccaaattccgatcacggcagtggagctggatgcccgcgccgctgcccaggctgccgctaatgtggcactcagcccctggcctgacgctattcgcgtgataaagggcgatattctaacctatagcaccgccgagcgttacgctttaattatttctaacccgcctttttttcagcatgcgctgccaagtcaggatgccacgcggcaacaggcccggcataccgatagcttgccctttgctgcgttgttaaagaaagcggcgcaatgtttggcgcctggcggagagttttgtttaattttaccggccagcagtcaggcggcttttgcgcaagccgcgctagagcaaggttggcagtgtcgggctcgctgcgctgtacaaagcaaggccggcaagccggtgagtcgctatttacaaagctgggttaaagctgacactgaacttgacactgagatcagtcagctgcagatccatgatagcagcggcggctattcggcagcgtaccggcaactgctgcaggcattttacctaaacttctgac

SEQ ID NO: 226046 - DNA, 721 bp, Unknown
  Bacterial polypeptide expressing nucleotide sequence isolated from the Sargasso Sea
actataaataaagaagaaattcaaaagttttcagatttggctgatgaatggtgggatgtaaacggtaaatttaaacctttacacatgtttaatccaataaggattcagtatattactgagaaaattaaacaggtgtttaaccttaaaaatcaaaataataactttctaaaagatcttaaaattttagatattggatgtggtggaggtttaataagtgaaccgttggcaaggttaggaggtaaaataactggaattgatgcctctgaaaaaaatataaaaattgcaaaattacattcaaaaaaaaataatttatatattaattatttaaataaatcacctgaacaattaaatacttctgataaatttgatataattttaaatctcgaggtcgtagaacatgttgaaaatgtagatctttatattagatcatgtagtaatcttttaaagaccgatggcattatgtttacagctacattaaataggacaatagtttcatatattaaagcaatagttggagcggaatatattttgagatggttaccaataggtactcacgattggaacaaattttttaaaccagaagaactagagaaaaaattgtctttatcaaattttagtactattgatgttaaaggcttagagttcaatcctttttttaacaagtggaagaaatctgataatttatcagtaaattatattatttgtagcaagaaaaattaat

SEQ ID NO: 226047 - DNA, 712 bp, Unknown
  Bacterial polypeptide expressing nucleotide sequence isolated from the Sargasso Sea
atgaaaaaattaaaaaactgggacaaccaaacttggttgtcttcgaaaaattatatttaccatttcaatgaatttttaaataaaagggtaagatttaataaaaatacaaaaatactagatattggctgtggtagagcaaatataataagcgccttacaaaaaagctataaattcaaagaaaaaccgattggtctagatattgtgaaaaataatggaattaaaaaaaatattagttttaaaaaaatagatggtttcgattatttaaaaagaaaaaatgaaaaatacgacctaattttattgaaacaaactattcattttttctcatcttcaaagctgaaagttctaataaatatcgcaaaaaaaagactggaaagaggaggaaaaatattaatttttactattaaaactgcaaataatgaaattccttgctttaaaaagatgagacaaaagctcgataatagtcttaagagagatgaaaaattatttaagataattgataaaaaattaaaaaaaactagtgtgacttatttcaattttaaagtaaatatttcaaaacaaaaatatttaaagatggtaaaatcaagatacatttcttgcttacttgatttaaaaaattatgaaatttcaaaaggtatcagtgagcttcaatctaagtataagcatcaaataaaattcactgataccttgaaatgtatttcttacaaaaaataat

SEQ ID NO: 226048 - DNA, 652 bp, Unknown
  Bacterial polypeptide expressing nucleotide sequence isolated from the Sargasso Sea
catgacgatagataacgccacacaaatcgaattctggaacggcgagacgggccacaactgggtcacccacgacgcgctcatggaagccatgttgcagccactaggtgagtctgtgatggacacgctggcgccccagcccggggagcacgtcctcgatattggctgtggttgtggccacacctcgctaagcctcgcccagcgggttggagcagaaggctcggtaaccggagtcgatatctccacacccatgttggccgctgcgagtcacttggcggctgaacacagctcgattcagtttgtcgaagcagatgcgcaaatccacgcttttgaaacagagcgttatgacgtggtcttctcgcgctttggcgtaatgttcttcgaagacccggtcgccgccttcgccaatatctggagcgctctgcgaacatcaggccgtctcgcgttttgctgctggcaacctcgcgccgtgaacccgttcatgaccgtgccggcgatagcggccctcgagctgttgccggcaccccccgagatgccgccgcgcaccccgggccccttcgcgtttgaggaggctgattatgttaccgacgtgctaaccagcgcggggtttgggaacgtcgctgtgacggcgcttaaacagccattgaccttcgga

SEQ ID NO: 226049 - DNA, 499 bp, Unknown
  Bacterial polypeptide expressing nucleotide sequence isolated from the Sargasso Sea
attaaagatgatctttatgatttatttttagaccctaaaagacaatactcatgtgcttatttcaaaaatgaaaatgatactttggaggatgcccaaaataataaaattcaacatataattaagaaattaaatataaagccaaaccaaaaagttcttgatattggatgtggatggggatctttagcagtcgatattgcaaaatcagctaattgtgaagtcactggaataacattatcagaaaatcaattaaaatattgcaaacaaaaagctaaagaactgaatttagaaaatcaattaagatttaggttaatggattatagggagctagatgaaaaatttgataggattgtaagtgttggaatgtttgaacacgttggaagaaagttttataaaaaatttttctcacaagttgaaaaacttcttaaagatgatggagtttcactaattcataccattggatcaagtcaatcctccaaagagaccctcatccatggataac

SEQ ID NO: 226050 - DNA, 565 bp, Unknown
  Bacterial polypeptide expressing nucleotide sequence isolated from the Sargasso Sea
aatgagtactactataaataaagaggaaattcaaaagttttcaaaactagctgatgaatggtgggatgttaatggaaaatttaaacccctccatatgttcaatccaattagaattgaatatataactgatagtataaaaaatcattttaaacttaaaaaagataaaatcaattatcttgagggtctagaaattttagatattggatgcggtggtggactaattagtgaaccgatgtcaagacttggtgcttcggtcacgggaattgatgcatctgaaaagaacattaatgtagcaaaaatccattctaaggatagtggtcttaaaataaattacattagcacttcacctgaaaaattaaaagattatgaaaaatatgatataattttaaatttagagattgtagaacacgtagataatgttgaattttatatacaatcctgtcaaaaattactaaaaaaaaatgggcttatgttcactgctactttaaatagatctttaacttcttacataaaagcaataattggggctgaatatattttaagatggcttcctgtgggcacccat

SEQ ID NO: 226051 - DNA, 940 bp, Unknown
  Bacterial polypeptide expressing nucleotide sequence isolated from the Sargasso Sea
aattgtagatagcagtgataaaattcacgagtttggaattggtgcaaataatttaaaaattaaactaactaccaaatcaatagaaaaaaaattatttagaaatccaggtctttacttcggagaaggctatatgaatcaagaaatattaatattagatggcacaatagagcaattaattgatttgataacttcatgttacgatgattttattcaaaataattttatatatagaatatatgagaatttctctggttattttaaaattttccagcagctcaatgaagctgttaaatcaaaacaaaatgttgcacatcattatgatttaaaagaagatttgtataaactttttttagatcaagatatgcaatactcctgtgcgtattttcataacgaaaatattagtttagagcaggcgcaaattgataaaaaaaaacatataattaacaagcttcaaattacggagaatatgaatgtattagatattggatgtggatggggaggtatggctatagaaatcgctaagcagactggggctaatgttaaaggaattactctatctgaaaatcaatttaacactgcttctaaaagagctcaagaagagggtttgtctgataaaattgcatttaaaatacaagactatagaaatgagactcatacatatgatcggattgtatctgtgggaatgttcgagcatgttggtattaaatactttaaagcttatttaaaaaaaacatatgatttattaaaagaaaatggagtatttcttcttcacacaattggtcaaagaggtgttccaactgcaacaagcccatggataagaaaatatatttttcctggaggatatataccttctctatctgatattattaatgaaactcaaaaactaaatataaatataactgatattgagatacttaggttacattatgctcatacgtta

SEQ ID NO: 226052 - DNA, 986 bp, Unknown
  Bacterial polypeptide expressing nucleotide sequence isolated from the Sargasso Sea
gatggagagataataattgaaaatggatctttaactgattttttgaatttggctctaatgaatattggtagaggtgaattaaacttttttagttacctaataaatagattgagaggttcttataggtatttaactaattttaatttcataaaaaaatccaaaatgaatgtgtcccatcattatgatattaaagatgacttatatgatttattccttgatccaaagagacagtattcatgtgcttattttaagaatgaaagtgatagtcttgaggctgctcaaaataataagattcaacatattataaaaaaattaaacatcaaaccaaatcaaaaagttttagatatcggatgtggttggggctcattagcaattgatatcgcaaaaagtgcgggctgtgaagtaactgggattactctatcagaaaatcaacttaactattgcaatcaaaaagcaaaagaaatgaatctgcaaaatcaggtaaagttcaagttaatggattatagagagttaaaagaaaaatttgatagaatagtaagtgttggaatgtttgaacatgttggcagaaaattttataaaaaattctttaaacagatcgaaaatttgttgaaagacgatggtatctcactaatacacacaataggatctgttaatcctcctagagatccacatccatggattacaaaatatatttttcctggtggatacacaccaagcttgagtgaggttactacaccaatagaaaatgctggtttgattgttactgatatagaggttttaagacttcattattcccacacattgagacattggaaagagaattgtttaaaaaataaagataaaattgtgaatatgtttgatgaaaagttttttagaatgtgggaattttatctcgctggttgtgaaatggcctttaagtggggcgatcaagttgtatatcagtttcaacttactaaaaattatagatcaacgcctgtgactagaga

SEQ ID NO: 226053 - DNA, 346 bp, Unknown
  Bacterial polypeptide expressing nucleotide sequence isolated from the Sargasso Sea
aatggaaaatttggaccctgaggaaattaaaaaattcaatgaaatggcttctacttggtgggacccaaacggcgactttaaagcgcttcatgacattaatccaacccgtttagattacattgtaagtagggtaaggaaaccactatcagcggttttggatgtaggctgtggcgggggtatcttgacagaatctttagaagcgcacaccgacgaaataatcggaatcgatgccgctcccaaacctctcaaggttgctcagctacacgcgattgatcagggtttagaaatcgactaccgattaagtaccgtggaaaccttgtctaaggaataccgaaaaccactttga

SEQ ID NO: 226054 - DNA, 559 bp, Unknown
  Bacterial polypeptide expressing nucleotide sequence isolated from the Sargasso Sea
aaaatacatagacaatcaaatagaacaaaatcaaaattggaatatattagatataggttgcggatatactgctcatgaaaaagcaagtgtaatctgtgatatccaagatttatcagatttttacaaaaataaaaaatttgtaaaacttgatagtaaaaaattaccttttaaagataaagagttcgattttgtgatttcttctcacgtaattgaacatgttgaggatgtaagtttttttataaaagagttagaaagagtttcatcaaaaggatatatcgagcttccgacatctttagaagataatttagtttttgaaaacaagaatgatcatgtttggcatacagaatttgatgatattaattttaaattattaattaaaaaaagagttcaatatttagaacctatgataactgtatccactgccaaaaaattatcaaaatattttagacaaagtttaattttagaattattttgggaaaattcaattgattttgatttgctagaaaatgatcaatttaaattagaaaaaatatcaagaataactttagtgagaaagttt

SEQ ID NO: 226055 - DNA, 727 bp, Unknown
  Bacterial polypeptide expressing nucleotide sequence isolated from the Sargasso Sea
aatgactacaataaacaaagaagaaatacaaaaattttcaaatctagctgatgaatggtgggatgtaaacggaaaattcaaaccattgcatatgtttaatccaatacggatcgaatatattttggataaattggcaaatcattttaaactaaataaacaagagaatttgtggctcaaaaaactgaacatattagacataggctgtggagggggattaatctctgagcccatgtgcagactgggtgctaaagttactggtatagatgcttcagaaaaaaatgttaaaattgccaaagcccacgcagaaaaaagtgatctaaatattaattacttaaatgcctcaccagaaagtttagacacaaattcaaaatttgacgtaatacttaatttagaagttgtagagcacgtagaagatttgaatttatatcttttatcttgttcaaatttaataaaaaaaggtggaataatgtttacggcaaccttaaacagaacttttgtatcttacataaaggcaatcataggcgcagaatacattttaagatggctgcctattggcacccatgactggaacaagtttataaagccagaggaacttgagggaatgctaatgaaatcaaaatttaaaaatctagagacaaaaggattgcaattcaatccattttacagatcttggtcaaaatccgataatcattcagttaattacattatggtttctgaaaagatttaa

SEQ ID NO: 226056 - DNA, 793 bp, Unknown
  Bacterial polypeptide expressing nucleotide sequence isolated from the Sargasso Sea
gtttttagatcctaaaagacagtattcatgcgcatactttaaaaacgaaacagatacacttgaaacagcacaaaataataaaattcaacatctaattaaaaaacttaatataaaaccaaatcaaaaagtcttagatattggatgtggatggggatccttagcaattgatatagcaaaaagtgcaaattgcgaagttacgggaattactctttctgaaaatcaatttgattattgtaaaaaaaaagcgaaagaacttaatttagaaaatcaattacattttaaattaattgattatagagagctgaatgaaaaatttgatagaatagtaagtgttggaatgtttgagcatgttggaagaaaattttatagaaaatttttttcacaggtcgaaaaacttttgaaagatgatggtgtatctttaattcatacaattggatcagtgaatcccccaagagatccacatccctggatcacaaaatatatttttcctggtggatatactccaagtttgagtgaggtaagtcctcatattgaaaagtctggattaattgttgcagatattgaggttttaaggcttcattacatgcacactttaagacattggaaagaaaattgtcttaaaaacaaagaaaaaataattcaaatgtttgatgaaaggttttttagaatgtgggaattttatcttgcaggttgtgagatggcatttaaatggggtgatcaagttgtataccaatttcaattaacaaaaaactattcctcaacaccggttacaagagactatatttatcaataa

SEQ ID NO: 226057 - DNA, 784 bp, Unknown
  Bacterial polypeptide expressing nucleotide sequence isolated from the Sargasso Sea
tatgaattttgatgaacgtaaaaaatcgattattgagtattcaaaccaaattgctcataaaagagactattggataaaaaaaaatcatagcttttactctgatgatcgttcttttatgagtttcttgattgattcaaatcttaaaattttagatataggttgtgggacaggtgatttactatcttcaataaaaccaaaatacggcatgggaatagatttaagccccaatatgattcagatagcaaaaaaacgatatccaaatatagattttttggaaggtgatgtggaagataaaaattttgtttcaaaaattaacaaaaaatttgatgttattattttatctgatgtatttggatattttaatgattgtcaaaatacattaaataaccttcagcatttttgtgattttaatacccgaatcattattgcttaccattcttggttttgggaaccaattttaaaagttggagaaaagcttggtctaaaaatgccttctgtcgaacttaattggttgtcaaatgatgaaatattgaacttcctgaaattaactaattttgaacctataaaacatgaaactagacaaattctaccaaaaagacttttaggtttgggcactttttttaacaaatacattggtactttgccaattataaaaaaattatcgatgagaaattatctgatagcaagatcattaaattatagtttttccgataaaaatcaaccctctacaagcgtaataattccatgcagaaatgaaaaaggtaatgttgaaaacattatttaa

SEQ ID NO: 226058 - DNA, 241 bp, Unknown
  Bacterial polypeptide expressing nucleotide sequence isolated from the Sargasso Sea
atgagaacagtaaacaaaacagaaattaaaaaatttaacaaattggcggccgaatggtgggaccccgaaggtagttttaagccactacacaaatttaaccctataagaattaaatatataaaagaaagtattataaattattttaatattaaatctaagaagctcccactaaaaaatataaatatattagatattggttgtggagggggtttaatttctgttccaattaaaaaaaattagg

SEQ ID NO: 226059 - DNA, 859 bp, Unknown
  Bacterial polypeptide expressing nucleotide sequence isolated from the Sargasso Sea
aatgctttcccaatactacgatgaccaaaataaattaagagaagaatttacagtagaagtaaattgtcctcattgtgattcaaatgagccacatttatcttttaatttaaatggattcaatcatcacaaatgtagaaattgtgggagtgtatatgtcagcccaagattaaatgatgagtgcctacacaagctttattctgataattattattcagaaatgtttacaaaatctatgatcccaatatttgaaaagagaaaagagctaatcggagttaataaatttaaccaaattattgaaaatatttctcccaaattatcgaatgatagggtgttggatataggctgtggtgttggtgaagtgatagatgtattcaatgataatgggtgggattgtgaagcggtagagttgaatccaattgcttctaaatggctcatagagaaaggaattaaagtgttcaatgatactcttgataattacatttcggacaagaaatttgacttaatcatggcatggaatgttgttgaacatgttactaacccaaaagagtttgtaaaaaaggctttcgatctactcaagccaggtggattatttgttacagaagtcccacatggaaactctatgcttgttgattattgtagatcttcaggcctagacccactcagaatcctccaaggagagcaacatattatgttgtattccatctctgcctataaggaattacattccatgtcaggttttcaattacattcaatacaaactaatgggctcgatattggtacgattttagattgtctagaggctgatgtatcaagagattcaatttctctaatgcaagacttaatcgattccaagttatat

SEQ ID NO: 226060 - DNA, 661 bp, Unknown
  Bacterial polypeptide expressing nucleotide sequence isolated from the Sargasso Sea
atgaaaaaacttaaaaactgggataataaaacctggttatcgtctaaatcatatatctctcaatttaatagatttcttaagaaaaaaattaatttaaataaagattcaataatattggacattggatgtggaagagcaaatattattagtgcccttcaaaagaaatataaatttagaaataaacccatagggattgatattgttgttaataaagatgttaaaaagaatattatatttaaaaaaattggtgccttaaaatatttaaataaacaagaaaaatatgatcttattttaatcaaacaaactatacattttttttcaaaatcaaatttaaatcttcttctaaatcttgctaaaaaaagtttaaataacaaaggtaaaatattaattttttcactaaaaacaaacaataataaaataccttgttttaaaaaaatgagaaaaaatttggaaaagagtttaaaaagagacgaagttttatttaagatcattaaaaaaaacttaaaaaaaataagttacacaaactttaactttaaagtgaatatctcaaaacaaaaatacgttagaatgattaaagaaagatatatttcatgcttgttaaatttgagtaataaagaaattaaatttggtatcagtgaaattaaatctaaatataaaaatc

SEQ ID NO: 226061 - DNA, 261 bp, Unknown
  Bacterial polypeptide expressing nucleotide sequence isolated from the Sargasso Sea
tatgaaatcaaaaaataaagaatatgaattatttgatagtttatcagaagaatggtgggatgaggagggaaaattcaaagttttacatgatataaaacccttaagaatgcaatatatcctagatcaacttaaagatagaaaaataagtgatttggaaattttggacattggttgtggcggaggtttaatttgtgaacctttatgtagattaggaggtaaggttacaggtatagattttgtaaaaaataatattaatgtagc

SEQ ID NO: 226062 - DNA, 511 bp, Unknown
  Bacterial polypeptide expressing nucleotide sequence isolated from the Sargasso Sea
aatgaaaaaacttaaaaactgggataataaaacctggttatcatctaaatcgtatatctctcaatttaataaatttcttaaaaaaaaaagtaatttaaataaaaattcaaaaatattggacattggatgtggaagagcaaatattataagcgctcttcaacagaaatataaattcagaaataaacccattggaattgatattgttggtaataagggtgttagaaagaatattatatttaagagagtagaagctttaaaatatttaaataaacaagagaaatatgatctaatattaattaaacaaactattcattttttttcaaaaacaaatttaaatcgccttctaaatcttgctaaaaaaagattaaacaccaaaggtaaaatattaattttttctctaaaaacaaaaaataataagataccttgttttaaaaaaatgagaaaaaatttagaaataagtttaaaaagggacgaagttttatttaaaataatcaaaaaaaacctaaaaaaa

SEQ ID NO: 226063 - DNA, 488 bp, Unknown
  Bacterial polypeptide expressing nucleotide sequence isolated from the Sargasso Sea
tatgagtactataaataaagatgaaattcaaaagttttcaagtcttgctgctgaatggtgggatgcaaatggcaaattcaaaccattacacatgtttaatcctataagaattgaatacatattagaaatgtgttcttcccactttaagaaccagaaagataaaaatttaccacttaagaatttaaaattattagacattggatgtggaggtggtttaataagtgaacctatgtgtagattgggtgcacaagtaacagggattgatgcatcaaacaaaaatattcaagttgcaaaaattcacgctaaacaaaacaatttaaatatagtttatttaaataattctccagaacaattaagtcaaaaaccaaattatgatataattttaaatttagaagttgttgaacatgttgatgatctaaatctatatcttaaatcatgttataatattcttaacagtggaggcctgatgattacagcaactctgaata

SEQ ID NO: 226064 - DNA, 916 bp, Unknown
  Bacterial polypeptide expressing nucleotide sequence isolated from the Sargasso Sea
gaagatgtatgtgtaagtataaatgattggaggttctgcgatgaactccttttgaaaggagatgttggattaggagaatcttatgtattaggatattgggactgtgacaacattaacaagctcgtaaagtggggtatagaaaacaaagaaccactagaaagggcaataaaaggctcttttacaaaaattttgtttttcaggtttaaacattttctaaaaagaaattctaaaaaaggcagcgttaagaacatacatgcgcattatgatattggtaacaagttttatcaattatggttggactcaactatgacttattcaagtgctatttttaagagtgcaaatgaaaaattatccaaggcccaagagaataaatatcagagcattttaaacaaactgaagcccaaatctggagatcatattttagatgtgggctgtggttggggaggttttatggagtatgctgcaaaaaatgggtttaaagttacaggtattacaatatctaaagaacaatatgagtattctaaaaagcgtttaacaaaatatggagaccttgtggatgtaaagttacttgactatcgtgacatcgtaggtaaatacaatcatattgtttcaattgaaatgtttgaagcattaggatttcaatattggaaaaagtatttcaatgtcctctattcgatcttaaggcccggcgggaaactggttattcaaagtattactataaacaatgatgattttctctcttacaaaaaatgcagtgacttcatacagcaatatattttccctggaggtatgcttccatcatctaagatcgtaaaggaaattgccaccaaacaaggttttcttcataatgataactttgaatttggtttagaaaatggagctacacttaaaaaatgggaagaaaacttttcgaatg

SEQ ID NO: 226065 - DNA, 187 bp, Unknown
  Bacterial polypeptide expressing nucleotide sequence isolated from the Sargasso Sea
atgtggaaatcaaaaactcctggaattccagatgaagaatttgaaagaattgaatctgtcccaataacaaaagaggaaattcgtgccatacaaatcagtaaaggtagattatttgcaggacaaactgttttagatattggatgtggaagtggctctgttacagtagaggctagcaatacaaattgaa

SEQ ID NO: 226066 - DNA, 109 bp, Unknown
  Bacterial polypeptide expressing nucleotide sequence isolated from the Sargasso Sea
atgaataatattagaagcattagaaaagactgggatctcatacaatcattgatcaaagataattcacgtattttagatataggttgtggagaaggggatttaatacaac

SEQ ID NO: 226067 - DNA, 505 bp, Unknown
  Bacterial polypeptide expressing nucleotide sequence isolated from the Sargasso Sea
attgttaagtagaacttctttaaattttgtaaataattttctcagcaaaaaaaataattggaaaatactagatattggatgtggttatagggcaaataaaaatgcaactgtaattgcagacataaaagatttttctgattattataaaaataaaaattttgttaggattgatggtaaaaaattaccatttaatgataatgaatttgattacgtaatagcaagtcacgtaatcgagcacgtagaagattttgaattttttgttagagaacttgaacgaatttctcaacaaggatatatagaattaccaactagattaggagacaatcttgtatttgaaaataaaaaagatcacatttggtggtttaaatatgatgatgtaaataatcaaataattgcttcaaaaaaaaatcaattaatatcaccatttattactgtttccatggctaaattttttgaagatatatttagagaaagccatggtaatggaactagcttggagaaaaaa

SEQ ID NO: 226068 - DNA, 391 bp, Unknown
  Bacterial polypeptide expressing nucleotide sequence isolated from the Sargasso Sea
atggcatcagttgtcattaaaaattgggacaataaaacttggttatcttcacaaaattatattaattcatttaataattttttaatcaaaaataacaaaattaattcaaattttaaaattttagatattggttgtggaagagggaagattttgggttctttaaaatcaagattaaaacttaaacataaacctttaggcatagatattgttaatcataaagatagagataaaagaattaaatttaaaaaagcaaatattttaaatctgtctttgagaaaaagtcaaaagtttgatttaattatgattaaacaaacaattcatttaataaaattaagtaaggtaaaaaaattaataaaatcattagaaaaaatattaaatacaaaaaggtaaa

SEQ ID NO: 226069 - DNA, 381 bp, Unknown
  Bacterial polypeptide expressing nucleotide sequence isolated from the Sargasso Sea
tatggtaaaaaaagatattaaaaattgggataataaaacatggctttcttcaaatagttacattaaatcttttaacaaattcttaataaaagagactaaactaaataagaattctaaaattttagatattggatgtggtcgaggcaagattattggctcattaagttcaaaaattaagcttataaataaaccaatcggtatagatttggttaatcataaagataaagataaaagagtcactttcaaaaaagttgatgctttatctttttttagaaataataaaaaaaggtttgatttaattttggttaaacaaaccgtccatttacttcaacttaaatcaataaaaattctattaagaaaaatgagcaaaagtttaatata

SEQ ID NO: 226070 - DNA, 561 bp, Unknown
  Bacterial polypeptide expressing nucleotide sequence isolated from the Sargasso Sea
tatgaaaaaattaaaaaactgggacaaccaaacttggttatcctcaaaaaattatatcaatcaattcaataaatttttaaataaaagggtaaaatttaataaaaatacaaaaatactagatatcggctgtggtagagcaaatataataagtaacttagaaaaaaagtataaattcaaagaaaaaccaattggtctagacatcatagaaaataaggggataaagaaaaatataatttttaaaaaaatagatgggtacaattatttaaaaagaaaaaatgaaaaatatgacttaattttattgaaacagactattcattttttctcgccttcaacgttgaaggcgctattagatattgcaaaaaaaagattgaaaatagagggaaaaatattaattttttctcttaaaaccacaaataataaaattccttgctttaaaaagatgaagcaaaaactcgatagtagcctaaagagagacgaaaaattatttaagataattaaaaaaaaattaaaaagaactaatgagtcttatttccattttgatgtgaggatctcaaagcaaaa

SEQ ID NO: 226071 - DNA, 355 bp, Unknown
  Bacterial polypeptide expressing nucleotide sequence isolated from the Sargasso Sea
ttgatcaaacgatcttcaaagcaatacatagataatctaatagaccaaaaccctaactggaaaattttagatataggttgtggttatacggcacataaaaaagcgagtgtaatttgcgacgtaaaagatttatccgagttttataaagatcgacagtttgtgaaacttgaaaataaagaattaccttttaaagataaagaatttgatttcgtaattacatctcatgttattgaacatgtggatgatgtaaatttttttataaatgagctacaaagaatttcatctaaaggatacatcgaactaccaacaatactggaagataacttagtttttgaaaataaacacgatcatcttt

SEQ ID NO: 226072 - DNA, 489 bp, Unknown
  Bacterial polypeptide expressing nucleotide sequence isolated from the Sargasso Sea
tatgaaaaaattaaaaaactgggacaaccaaacttggttatcatcaaaaaattatatttatcagttcaataaatttttaaataaaagagtaagactcaataaaaatacaaaaatactagatattggctgtggtagagcaaatataataagtgccctacaaaaaaggtataaattcagggaaaaacctattggcctggatattatgaaaaataaaggagtaaaaaaaaacattatctttaaaaaaatagatggctacaattatttaaaaaataaaaattctaaatatgacttaattttattaaaacaaactattcattttttctcgtcttcaaaactgaaagttctaataaatatcgcaaaaaaaagactggaaagaggaggaaaaatattaatttttactcttaaaaccacaaataataaaattccttgttttaaaaagatgaagcaaaagctcgatggtagtcttaagagagatgaaaaatatttaag

SEQ ID NO: 226073 - DNA, 592 bp, Unknown
  Bacterial polypeptide expressing nucleotide sequence isolated from the Sargasso Sea
aaatgacattttagagaataatcctaattggaaaattcttgatataggttgtggttataacgcacataatagagctaatgtaattgctgatgtaaaagatttaggaacatattataagaaaaaaaaatttgttaaaattgatggaagcagattaccttttggtgaccaagaatttgattttgttatatccagtcatgtaatagaacatgttgagaattttgaatttttcataaaagaattagaaagaatttcgtcgcaaggttacattgaattgccgtcaagactaggtgataattttgtttttgaaaatctaaaagatcatatttggtggtttaagtttgatgattctgataatagtctcgtagtttcaaaaaagaatcaattaatagaaccatttattacagtatcaacatcaagaaatttctttgagaaaatttttagagaaagctttgtaattgagttgatatggcaaaaaaaaattgaatataagatagatgatacaattaaatttgaaacatttaaaaaaatgagttttttaaaaatctttagaaagtatttaagcaaaaagtttagaagtatttataaaaagtaa

SEQ ID NO: 226074 - DNA, 604 bp, Unknown
  Bacterial polypeptide expressing nucleotide sequence isolated from the Sargasso Sea
aatttcaataaaatatttaaataaagtaataaaagataatcctaaatggaaaattttagatattggctgtggatatagagctcatccaagcgcttctataatagcagacatacaagatttatctaatttttataaagaaaaaaaatttataaaaattaatggaaaaaacttaccatttaaggataaagaatttgatttcgtaatagcaagccatgtgattgagcacgtagaagattttgaattttttataaatgaattagaaagaatatccagtaaaggttatatagaattgcctactagattgggagacaatttagtatttgaaaataagaatgatcatatttggtggttttgttatgatgatataaataataatcttatagcatcaagacgcaatcaattaattgaaccatttattacagtatcatccgcaaaaaatttagaaaaaatttttagagaaagtttagttattgagttaatgtgggaaaaaaaaatagattataaaattgataacacaataagagaagaggaaagcaaacaaattccttttctaagactggtaagaaaatatttgagtaaaaaaattagaacaatttttaaatag

SEQ ID NO: 226075 - DNA, 421 bp, Unknown
  Bacterial polypeptide expressing nucleotide sequence isolated from the Sargasso Sea
ttgattaaaagaacttcaaaatcacacataaataatattattaaggaaaactctaaatggaatatattagacatcggatgtgggtactctgctcacgaaaatgctaatgtagtatgtgatgttcaagatttatcaaattattacaaagaaaaaaaatttgtaaaattaaacgataaaattttaccattccaagataaagaatttgattttgttgtagcttcacatgtaatagaacatgtagaagatgttgatacatttgtgagtgaattagaaagagtatcaaatgctggttatatagaattaccaactattcttgaagataatttagtttttgaaaacaaaaatgatcatctttggcaaatggaatttgataatgtaaataataaattaatagtatcaaatagagttcagtatatagaac

SEQ ID NO: 226076 - DNA, 397 bp, Unknown
  Bacterial polypeptide expressing nucleotide sequence isolated from the Sargasso Sea
aatgcaaaaacttaaaaattgggacaataaaacttggctttcttcaaaaagatatatttctaattttaataaatttttaaaattaaaagtaaatttgaataaaaattctaaaattcttgatattggatgtggacgagcaaatattataagtgctcttcaaaataaatataaatttaaaacgaaacctactggtatagatattattaaaaataaagatctcaaaaaaaacatagtatttaagaaatttgatggtattaaatatctaaaaaatgaaaaacaaaaattcgatttgattttaataaaacaaacaattcattttttttcaaaaaaaaaattaaatattttactaaacctatctaagaaaaacttgaactataaaggaacaatcttaatttct

SEQ ID NO: 226077 - DNA, 509 bp, Unknown
  Bacterial polypeptide expressing nucleotide sequence isolated from the Sargasso Sea
gatgcacaatcttagaaattgggacaacaaaacttggctttcttcaaaaaaatatattttagattttaataaatttttaaaatcaaaaataaaattaaataaagacactaaaattcttgatattggatgtggaagagcaaatattataagcgctcttcaaaaaaagtataaatttaaaaataaacctattggtatagatatagttaaaaataagaatcttaaaaaaaatataatatttagaaataatgatggaattagttatcttagaagagaaaaacagaaatatgatttaattttgataaaacaaacaattcattttttttcaaaaaacaaactaaatactttattaaatctttctaaaaaaagtttaaattctaaaggaatattattaatcttttctctcgtgacaagagataataaaataccttgttttaaaaaaatgaaaaaaaacttgaataaaagtttaaaaacagatgaaattttattaagaattattaaaaagaatttaa

SEQ ID NO: 226078 - DNA, 460 bp, Unknown
  Bacterial polypeptide expressing nucleotide sequence isolated from the Sargasso Sea
ctggagattaaaaaaatttggtattgcgtgtcattaaagaattgggacaataaaacttggctttcatctaaaaaatatatttattcctttaataattttttactaaaacaagttaaattagataaaaattcccatattctagatattggttgtggaagaggcaagatattaggatctttatattcaagattaagattaaaaaataaaccaattggaattgatatagaaagtcatcaagatagagataaaagaattcattttaaaaaaattgatgcaacaacatatcttaagagtaataagaaaaaatttgatttaattttaattaaacaaacaattcatcttttaaattttaaagaaattaaaaagttaatttttatttgtaaatatagacttaaaaataagggaaatattgctatatttactttaaagacttctaaaaatgaaattcctgctttttcat

SEQ ID NO: 226079 - DNA, 490 bp, Unknown
  Bacterial polypeptide expressing nucleotide sequence isolated from the Sargasso Sea
tataaatagtatcttagatattggatgtggattaggcattgttcaaatttttttttataaaaaatataaaaacgatttaaagttttttatgttagataaagataaaatagataaaagtattaggtatggatttaatgaaaactatgaaagttacaatgatttaagtgaaacaaaaaatctgctatgcgagaatggaattcctgaaaaacaaatttttataaaagatgttgataaaccaatagatattgatactaaaattgattttgttctttcgctaaaatcaatgggttatcattatccaatagaaaaatattttgaattatttaaaaaagtatgtactaaagaaactgaatttgtgtttgatataacaagtggtcaatataattataagattattgaaaattattttaatcaatgtcaaattatttttagtgaagatagtttacaccccttaaaaagactttattgtaaaggatttaaattgatttga

SEQ ID NO: 226080 - DNA, 1192 bp, Unknown
  Bacterial polypeptide expressing nucleotide sequence isolated from the Sargasso Sea
gatgcaattagcaagatttttaaataaagttattaagaaagatggttttatattaatcgatgctaactcaaaaagttatataattggaactcctaaaagtgataatccaattaagattaaaattttagataaaaaacttcattataagttattatttcacccagatttatattttggtgaggcgtatacagatggagatatagtaattgaaaatggaagccttactgattttttagatcttgcgttaatgaattttggaagaggtgaaattaatttttttagctatttaatgaatagagttagaggatcttatagatatttaacaaattttaattttataaaaaattcaaaaaaaaatgtatcacatcattatgatatttcagatgatctttataatttatttttagacccaaaaagacaatactcatgtgcatattttaaaaatgaaaatgatactttagaaagtgctcaaaataataagatccaacatattattaagaaacttcatatcaagccaaaccaaaaagtattagatattggttgtggatggggttcattagcattcgatatagcaaaaagtgcaaactgtgaagttactggaattacattatccgaaaatcagtataattattgtaaacaaaaagcaaaagaacataatttagataatcaagtaaactttaagttaatagattatagagagcttaatgaaaaatttgacagaatagtaagtgtaggaatgtttgaacacgtaggtagaaaattctacaaaaagttctttaaccaggtagaaaaattgcttaaagatgatggaatttcattaatacacactataggctcagtaaatccacctagggatcctcatccgtggattacaaaatatatatttccaggaggatatacgccgagtttaagtgaagttagtaatcctattgaaaaatctgggctaattgtttctgatctagaggtgttaaaactacactatatgcatactctaagaaactggaaagaaaattgtattaacaataaagaaaaaattattcaaatgtttgatgaaagattttttagaatgtgggaattttatttagctggatgtgaaatggcatttaagtggggagatcaggttgtatttcaatttcaattgacaaaaaattataggtcaactccagttacaagagactatatttatcaataa

SEQ ID NO: 226081 - DNA, 1129 bp, Unknown
  Bacterial polypeptide expressing nucleotide sequence isolated from the Sargasso Sea
taattcaaaaagttacattattggaaatccaaaaagtgaaaaccctataagagttaaaattttaaataaaaatcttcactataagttactatttcatccagatttatattttggtgaagcatacacagatggagaaataactattgaaaatggaacattaactgatttcttggatctttctttgatgaactttggaagaggtgacttaaatttttttagttatttacttaatagattaagaggttcttatagatatttaactaattttaattttataaaaaaatctaagatgaatgtctctcatcactatgatatttcggatgatctttatgacttgtttttagatcctaaaagacaatattcatgtgcatattttaaaaatgaaacagatacattggaaactgctcaaaataataaaattcaacatataataaaaaaacttaacataaaaccaaatcaaaaagttttagatattggatgtgggtggggttctctagcaatagatattgcaaaaagtgcaaactgtgaagtaacaggcattacactttcagaaaatcaatttaattactgcaagaaaagagcaaaagaacttaatttagaaaatcaattaaattttaagttaatggattatagagagctcaatgaaaaatttgatagaatagtcagtgttggaatgtttgaacatgtaggaagaaaattttataaaaaatttttttcacaagttgaaaaacttttaaaagatgatggggtatcattaattcatactataggatcagtaaatccaccaagagatccacatccatggatcactaagtatatttttccaggaggttatactcctagtttaagtgaagtaacaacaccgattgaaaaagcaggcttaattgttgcagatattgaggttttaagacttcattactcacatacattaagacattggaaagaaaattgcattcgaaataaagacaaaataattcaaatgttcgatgaaagattttttaggatgtgggaattttatcttgctggttgtgagatggcattcaaatggggtgatcaagttgtataccaatttcaattaacaaagaattattcttctacacctgttacaagagactatatttatcaataa

SEQ ID NO: 226082 - DNA, 826 bp, Unknown
  Bacterial polypeptide expressing nucleotide sequence isolated from the Sargasso Sea
atgctgatctgtcccatctgccaagcgccgctgatgcccagcggcaacggcctggcctgcgcaaaccggcacagcttcgaccgcgcgcgccaggggtacttcaacctgctgccggtgcaacacaagaacagccgcgaccccggcgacaacgccgccatggtcgaggcccgccggcgctttctcgagggtggccactacgcaccgctggccgcacgcctggccacactggctgccgagtacaagccggcgcgctggctggatatcggttgtggcgagggttactacaccgaacagattgcccgtggcctaccccatgccgagggttatgccctggatatctcccgcgaggcggtgaaacgcgcgtgcaaacgtgctccgcagttgagctggctggtggcgagcatggcccgtgtgccattggccgatgccagttgcggcctgctggccagcgtcttcagcccgctggactggagcgaagccaaacgcctgctcgcccccggcggcggcttgctgcgcatgggcccaacccgcgtgcacctgatggaactgcggcagaagctgtacgacgaagtacgcgactacgacgacgagaagcacctggcgctgatcccgcccggcatgcacctggcccatagcgaaaccctagaattcccgctgcacctggccgacgctcaggctcgcgccgacctgctggccatgaccccacacggctggcgcgccagcgccgaacgtcgcgaagcggtgatcgccgaacccttcgaagttaccgtcgccatccgctacgattggatcgtcaaaacccagagcccacgctctcaggactgaa

SEQ ID NO: 226083 - DNA, 908 bp, Unknown
  Bacterial polypeptide expressing nucleotide sequence isolated from the Sargasso Sea
ttatcaagcatggagatttatctctaattttaattttccaggtaaatcaaaaaaaaatgttgaagctcattatgatattggcggaagaaaaggtgaaattctttatgatgtaatgcttgataagcaccatcgtcaatatagttgtggctactggaaagaagaaactaaaactttagaagaggcacaagaaaataaaatccaacatataataaaaaaacttgatattaaaaaaaatcaaaaagtattagatattggttgcgggtggggcggtctttgttttgagatagcaaaacagtttgactgtgaagtaactggaatttcattaagtaccaatcaaataaattattgcaaagagaaagccaagaagttaggactagaaaatcaagttaaatttgaattaatagattatagattggtaaagggaaactacgatcgtattgtgtcagtcggttttggtgaacacctaggagtaaagttctacaacactttttttaagaaaattaacagtattttaaatgaaaatggaaatttcctatttcatctaattggtgtggtggacaaaccgtctgctccaaatcaattcataaataaatatattttcccaggaggtgtatgcccttcactaagtcagcttataaaacctatagaaaaaactggtttaatcgttgctgatacagaaactttaataagacactacgataaaacacttgaggcttggctggaaagatttttagcaaaaaggaatgagataaaagatttgtttgatgaaaaattttgtaaaatatgggaattttatttagcaagctgtgcagcagctttcagataccgcgatcttgttgtttttcaattacaaattgtcaagaattttcattctgctcatagaacaagagactatatatattcataaa

SEQ ID NO: 226084 - DNA, 784 bp, Unknown
  Bacterial polypeptide expressing nucleotide sequence isolated from the Sargasso Sea
atgagtttaacggacgaaggacactatggaccaaaacaacttaatttactaaaagttgtttggggtgaaggctttctttctcctggtggttctgatgaaattgatgaaataatgacgggtgtaaatgctaaagacaaaactgtacttgatattggttgtggatgtggtggtgctgcttttcatttgctaaaaaaatataatgttaaatcagttgaagggattgatcctgagccacttgttattcaaacagcaaatcagttagctataaaaaataatcttcaagatgtcacaatttttaagcaaataaatccaggtccacttgattatgatgatgaatcatttgatatgatctttagtaaagaagcttttttgcacattcctgataaagaagcattattaaaaaatgttcaccgaatattaaaacctggtggactaattgtggttagtgactggatgcgcatggatgacaatccaccctcaaaacaaatgcaagagtatatagatgcagaaggccttgatatgctaatgtgctctctagaaaagtacaaaaaattacttcaagaaagcaattttactgatattgtaataaaagaccgtaatgattggtacttaaagaaagcaaaaaaagaattagaagatattgaaggcccgctttaccaaaaagttcttgatgtacttggtttagaagaaactattggtgcaattgatatttggaaaaaattaattggtgttttagaaattggtgagcacagacctggtcatttcagggcaaaaaaaaattagg

SEQ ID NO: 226085 - DNA, 1207 bp, Unknown
  Bacterial polypeptide expressing nucleotide sequence isolated from the Sargasso Sea
tatgattttagcaagagtgttttcaaatatttataaagaaggtggaattattcttatcgattctaaaggtcagaaatatatttgcggtaatccaagacgagacaaccctattacagttaagttattaaaagaaaatttaaattggaaaattatattaaatccagaactagagtttcctgaaggttacatgagaggagaaatcatcattgaaaatgcgtcattgaaagaatttttaatggaccttgtgaaaaatttgggaagaagagaggtaaatactgctagtttattttataaaaaaatttatcaagtgtggagatttatctctaattataattttccaggaaaatctaaaaaaaatgctgaagcacattacgatattggaggtaaaaaaggagaacatctttacgatgtgatgttagataaaaatcatagacaatactcttgtgcatattggaaacatgacacaaaaactctagaagaagctcaagaaaataagattcaacatataataaaaaaactttatattaaaaaaaatgataaagttttggatataggctgtggttggggtggcttgtgttttgaaatagcaaaaaagtttgactgcgaagtcaccggagtttctttaagcactaatcagatcaagtattgtaaagaaaaagccaaagaacttggtttagaaaatcaagttaaattcgaactaaaagattatcgtttagtcgaaggtagttttgatagaatcgtgagtgttgggtttggggaacaccttggtgttaaattttataatactttttttaaaaagataaatagcattttaaaacccaatggaattttcttattccatcttataggggtagttgatcaaccttcagcacccaatcaatttattaataagtatattttcccaggaggagtttgcccttctttaagtcagataattaaaccaatagaaaaaacaggattaattgttggtgatactgagaccttaatcagacattatgataaaactttggaagcatggttagagagatttttatcgaaaaggagtgaaattaaagatttatttgatgaaaagttttgcagaatgtgggagttttatttagcaagttgtgccgcagctttcaaatatagggacctagctgtttttcaattacaaattgtgaaaaactttcaatcagcacatagaacaagagactatatatattcataa

SEQ ID NO: 226086 - DNA, 1186 bp, Unknown
  Bacterial polypeptide expressing nucleotide sequence isolated from the Sargasso Sea
atgataacaaaaagccttctctctaaaatcattaaaacaggtaaccttacatgggtaatgccgaatggtgaaatcaacacttacggcgatggtactggagaccctataaaaataagaactacaaataacttttcagagataaaattattaatgaacccttcaattcattttggtgaaagttatatgaatggatcacttgtggtagaggagggacgtattcatgatttcttaaaacttatttttgctaatacggaagtagatattgatcattgggtaatgaagctctcaaaaatagttagagccatttcaaataaattaactacaagcaattatatttctaaatcaaagaaaaatgttgctcatcattatgatctttctgataagctttatgatctgtttttagatccagatagacaatattcttgtgcttattttaattccccaaatgattctttggagcaggcgcaaattaataaaaaagaattaatttcaaagaagttattgctcgaagaaaatcaatctgttttagatattggttgcggttggggtgggatggcctcgcatatttataaaaaatcaaacgcaaatgttgtaggtgtaactttatctgaagaacaaattgcatatgctcaacagagaaaagtgagagagaagttggataaggttgaatacagacttcaggattacaggaacgtaaatgagaaatatgatcgaattgtatctgttggtatgtttgagcatgttggtacagcacactatcaggaattttttaacaaggtttatgatctattaaacgatagtggagtggctcttatacatacgataggtagattaaacgagcctgggaacactgacccgtggatagataaatatatttttcctggaggatatattccagcgcttagtgaaacagtttctcgagttgagaaatcaggactatctcttactgatgtgcaaattttaaaatttcattatgccgaaacattaaaaagatggagatataatttttacgacaacatagataaagtaaaagagatatatgatgataaattttgtagaatgtgggatttctacctctcatcatcccaagcttcctttgaagagtcaactttagttgtctttcaaatgcaattatcaaaaaataaaaaaaccgttcctgataaaagagattacatgcttgcatagc

SEQ ID NO: 226087 - DNA, 1186 bp, Unknown
  Bacterial polypeptide expressing nucleotide sequence isolated from the Sargasso Sea
tatgcttttttcaatattaaaaaaaattaaatttactggtactttggtaatagttgattctaataatgtttcgcataagtttggaaataataacccatatgtaaaaattcgattaaaatcaaaatccatagaaagaaaattatttcgaaatccaagtctacatcttggtgagggttatatgaatagtgaaataattattgaggaggggactattgaacagtttatagatattgtaacttcaagttacgatgattttattaaacaaaatatttttttcaaatactatgaaaatgtatcttcattcctaaagccttttcatcaagtaaatcaaattgtgaactcaaaaaaaaatgtagcacatcattatgacttgaatgaagatttatataaactttttcttgataaagatatgcagtactcatgtgcgtattttcacaatcctaatataagtcttgatcaggctcaaatagataaaaaaaatcatataattaataaattaaaaattaatgaaaatatgagagttttagatataggctgtggatggggaggtatggcaatagaaattgctaaaactactggagctaaagtgaaaggtattacattatcagagaatcagtttgctactgcaaaaaaaagagcacaagatgaaggattgtctgaaaaagttgattttgcaattcaggattataggcatgaaaatggtatatatgatagaatagtttctgttggtatgtttgaacatgttggtgttaaatattttaaaacttttttaaaaaaatcttatgaacttttaaatgatagtggagtatttctactgcatacaattggccaaagaggaaagccaactgcaacaagtccatggataagaaaatatatttttccaggcggatatataccctcattgtctgaaatattaactatttgtgagaaacaaaacataaatattacagatattgaaattttacgtctgcattatgcccatactttgtcacattggtatcgtaacactctaaataacaaagataaaatagtaaaaatgtttgattctaggttttttagaatgtgggaattttatttattggcaagtaaatattcatttgtaaacatgggaaatgtagttttccagattcaaatagccaaaaacataaacaatctgccacttactagaaattacatctataattaa

SEQ ID NO: 226088 - DNA, 526 bp, Unknown
  Bacterial polypeptide expressing nucleotide sequence isolated from the Sargasso Sea
atgagtcaaagggaaaatatcagctcagaagaagttgagaaatttaatgatttagccaaagaatggtggaatccacatggaagctttgctccgttacacaaactcaatccacttcgttttgaatacattcgggagaactcctcactagagggaaaatctgccattgatgttggctgcggaggaggaatacttaccgaatcattggctagtgtagctgctaatgtccatggaatagatatggcagaaaaaggtttggctgttgcaaatatccataaaaataaatccaaattagcgaatatcaaatattcacagagtactgtcgaagattatgctctaaagagtaatgaaaaatttgatgtcctgacatgcatggaaatgcttgaacatgttccatcaccaggcgaaacaatacaagcttgttctgatattgtcattgatggcggagatcttttttttgcaacaatcaacagaaatatcaagtcttatatcatggcaattgttggagcagaatacatactcaatttac

SEQ ID NO: 226089 - DNA, 1216 bp, Unknown
  Bacterial polypeptide expressing nucleotide sequence isolated from the Sargasso Sea
aaaatcctaaagtcattatttaatttctgcatgattacaaaaagccttcttggaaaaattatcaaggttggaaatttaacttggataagtcctaatggtgaattaaacacctacggcgatggctctggagaacccatacgtatccgtacaacaaatagtttttctgaactaaagtttcttatggatccctctgttcattttggtgaaagttatatgaatgggtccctgattgttgaagaaggccaaatacatgattttctaaaacttattttcttgaatactagtagtgagattgaccattgggtcatgaaattatctaagatcgtaagaaaaatacaaaataaaatcagaacaagtaattatatttctaagtcgaaacataatgttgctcatcattatgacttatcagataaattgtatgaattgttcctagatcccgatagacaatattcttgtgcatattttaattcacctaatgatacattggaacaagctcagattaacaaaaaggaattaatctctaaaaagctactcttggaagaagggcagtcagttttagacattggatgtggatggggcggtatggcttcgcatatttataaaaaatctaatgccaatgtagtaggggttactctatcagaagagcaaattgcatatgctaagcaaagaaaaattgatgaaaagcttgataaagttgaatacagattacaagactatagaaatgtaaatgaaacttatgatcgtatcgtatcagttggaatgtttgagcatgtaggaacatctcattatcaagagtttttcaataaagttcatgatttacttaatgatactggagtagccttaattcataccattggaagactcacagagcctacaaacaacgatccttggattgaaaaatatatttttccgggtggatatattcctgcattaagcgaaacaatgtctcgtatagaaaaatctggattatcattaactgatgttcaggtattgagatttcattacgcagaaacgcttaagcgatggcgttacaatttctatgataatatagataaagttaaagaactgtatgatgaaaaattttgtcgcatgtgggacttctacttgtcatcctctcaagcatctttcgaggaagcaggtttggtagtttttcagttgcagttatctaagaacaagaaaacagtaccagattcaagaaattatatgcttacttagt

SEQ ID NO: 226090 - DNA, 1183 bp, Unknown
  Bacterial polypeptide expressing nucleotide sequence isolated from the Sargasso Sea
tttgttaaattttttaagaaaattaattaaagatgacggttttgaattagtggatgcaaataaaaaatcctacataattggaaagccaaaaaaagaaaatcctataaagctaaagattttagacaaatcgttacattggaagcttttaatgaatccagatttatatttaggtgaaggttatatggatggatcaattgtaattgaaaatggaacactaactgaatttttggatatagctctaaaaaatgttggaagaagacccactaatgaaatatcaaatgtattaggaaaatttagaagagtttatagatatttaacaaacttaaatttaattggaaaatcaaaagaaaatgttgctcatcattacgatatttcagaaaagttttatgatttatttttagatgaaaaaagacaatactcatgtgcttattttaaaaatgaagatgacacattagaaatagcacaaaataataagatagatcatataattaaaaaattaaatcttaagcctaatcaaaaagttctagatataggatgtggctgggggaccttagccattgatattacaaaaaaaactcaatgcgaggtagttgggattactttgtctgaaaatcaactggaatatgcaaagaaaaaagctaaagaaatgaatttagaaaaccaagtagaatttagacttgcagattataggcagcttaatgaaaaatttgaccgtgtagttagcgttggtatgtttgagcatgtaggaagaaatttttataaaaaatattttaataaagtttatgattttttaaatgaagatggtgttgcattaattcatactattggatcagtaaaccctccaagaccacctcaaccatggataacaaaatatatatttccaggaggatatacaccaagtttaagtgaagtatcagcgccaattgaaaagtctggattaattctatctgatattgaagttttaagaactcattatcaacatacattaagaaattggaaagatagatttatgtctaaaaaagaacatgttttagaaatgtttgacgaaaagtttttcagaatgtgggaattttatcttgttggttgtgaaatggcctttaaatggggtgatcaggttgtatttcaattacaactaacaaaaaaacttaaagcaactcccataacaagagactatatttattaa

SEQ ID NO: 226091 - DNA, 817 bp, Unknown
  Bacterial polypeptide expressing nucleotide sequence isolated from the Sargasso Sea
aatgcaatatatatgtcctttgtgtgccttaccgctcaccttgactgaacgaacttggggatgcccgcaggcacacaagttcgacatggccaaagaaggctatgtgaatctgcttcccgtgcagaagaaaaattccaaagatcccggtgacaatcaacagatgatgttggctcgcagggagtttttaactgcgggttactatcaaagtttgagtgacagagtgaatgaacttgcacttgcgtatgcctgcggggcgctgcagatcctcgatatcggctgtggtgaggggtattacagccatcgtttgtacaatacgcttgtcgccgagcatccgtgccagttacagggcgtggacatctccaaatcggcgataaaatatgcgtctaaacgttacccgaacctcagcttttgtgtggcgagtgcctacgaaatgcctattccatcgcatagtatcaatttagcgattcgtatttatgcgccatcgaaggcggaagagttacagcgggtcatggcgcccaatggcattttgatcactgtatcgccaggacctttacatcattttgcgctaaaacagcaaatttatgccgaaccgagattgcatccagcatccgatgcaaagatagaggggttcgaatgtttacaccaagagcgccttaggtcacaacttgagctaaataatagccaagatattagccattttctggaaatgaccccctacgcttggaagtttacggtcgaacaaaagcacacatttgcacagagtggattaagctgcgaattagactttcagattgaagtacatcgcatttcagtctag

SEQ ID NO: 226092 - DNA, 733 bp, Unknown
  Bacterial polypeptide expressing nucleotide sequence isolated from the Sargasso Sea
atggatataaattcaattgataagactgaaattgagaaattcagaagtctctcaaaagagtggtggaagcacgatggtaaattcaaaactttacacaaatttaaccctgttcgtctctcttatataattcaaactataaaagatcatttttcaataaattcagaaaaagataaaccacttaaagatttatcaattttggatataggctgtggtggtggattaatgtgcgaaccactagccagactaggtgccaaggtaactggaattgatgcattagaaaaaaactgtcttacagcaaaaattcatgctgaagagagtggattagacattaactatattatgagtactgttgaagagctacccaaaaaaaatcaatatgatgtaatattaaatttagaagttattgaacatgtcaataatccgaaagaatttattaataaaagttgcaatctagtaaacaataatggattaatgtttattgcaacaattaataaaacattattttctctggtgttcgctaaatttacagctgaatatatattaggatttcttccgaagggcactcataattggaataagttcttaacacccgaagaaatttattctttccttattcaaaacaaatttgatgttattggaagtgcgggagttaattataatcctttaggcgatatatggtacaagtctcaaaatatgaacgctaattatatggtagctggtaaaaaaatttaat

SEQ ID NO: 226093 - DNA, 1189 bp, Unknown
  Bacterial polypeptide expressing nucleotide sequence isolated from the Sargasso Sea
atgcaattagcaagatttcttaacaaagtttttaaaaaaggtggttttgtattaactgatgctaattcaaaagattatattataggacaaccagacaataaccctattaaattaaagattttaaataaaaatcttcattataaattattatttcatcctgatttatattttggtgaagcatataccaacggtgaaattgtaattgaaaacggcacacttacagattttttagatcttgccttaatgaattttggaaggggtgaattaaactttttcagttatttaattaatagattaaggggatcatatagatatttaactaactttaattttattaaaaaatccaaaatgaatgtatctcaccattatgatattaaggacgacttgtatgacttatttttagatccaaaaagacaatattcatgtgcatattttaaaaatgaaaatgatagtttagaaacagctcaaaataataaaattcaacatataattaaaaaattaaatataaaacctaaccaaaaagttttggatattggatgtggctggggttcacttgccatcgatatagccaaaagtgctcaatgtgaagtaacaggtattactttatcagagaaccaacttaattattgtacccaaaaagctcaagaattgaatttagaaaatcaagtaaagtttaaactaatggattatagagaattaaatgaaaaatttgatagaatagtaagtgttgggatgtttgaacatgttggaaggaaattttataaaaaattttttaaacaaatcgaaaaaatgttgaaagaggatggggtttcactgatacacaccatcggatctgtaaatcctccaagagatcctcatccatggattacaaaatatatttttcctggtggttatactccgagtttgagcgaagtaaccaaccctattgaaaaagctggcttaatagtaacagatattgaggttttaaggcttcattatgcacacacgttgagacattggaaagaaaattgcttaaaaaataaagataaaattatccaaatgtttgatgaaaaattttttagaatgtgggagttttatcttgctggttgtgaaatggcattcaagtggggagatcaagttgtatatcaatttcaacttactaaaaattatagttcaacacctgtgactagagactatatttatcaataaa

SEQ ID NO: 226094 - DNA, 1013 bp, Unknown
  Bacterial polypeptide expressing nucleotide sequence isolated from the Sargasso Sea
tatgttattagcaagagtcttgtcaaaaatttataaggaagacggtataattttacaagatgaaaatgttaagtactttattggtaaaccaaactctaaaaaacctataactgttaaactattaaacaaaaaactaaaatatttattattggtagagccagaatattattttcccgaagcttatattaatgaggaaataataatagaaaatgcaacactgcatgaatttttgatggtttttgtaaaaaatcttgggcgagctgaaattactttatatagcgatttggtaaaaaaattgtttggtatttggagatatatttcaaattttaatacaaagtcaaaatcaaaacagcagatatcgagccattatgatttaggaggtaagaaaggaataaaattgtatacaaatatgctttgcagtaatatgcaatattcctgtgcgatttggaaagatgacacaaaaacattagaagaagctcaaataaataaactcaatcatattataaaaaaactaaaaattaaaaaaggagataaaattctagatatcggttgtggttttggaactgccgctgcatacatagctaaacaaactggttgtgaagtaactggtataacgttgagcaaaaaccaactagattatgctgtgcaaaatgcaaaggaattaaatttagataatcaaatcaattttgagcttaaagactatagagatatgggaggtaaattcgataaactctactcaattggcatgttcgaacacacatctttgaagtactataataccttttttaaaaaaacttacgacttattaaaagataatggaacttttttacttcacacaattggggtcgttggaccgccatcagcaccatctcgctggataaatactcgtatttttccaggtggaagatgtccatcctatagtcaaatcattaaaccaattgaaaaatcaggtttcattgtgaatgattgtgaaactttaatcaaacattacgatttaactttggaagcatgga

SEQ ID NO: 226095 - DNA, 574 bp, Unknown
  Bacterial polypeptide expressing nucleotide sequence isolated from the Sargasso Sea
caacatattgatgtcaatggtctaaagattttagatgttggttgtggaggtggaattttagctgaagaattaacaaaaaaaggtgcaatagttaccggattagatgcatcaaaaaagacaattaaagttgcacaaaatcatgcgaaagagcaaaaactaaaaataaaatatctcgataagagtctagatgaacatgctgagagctctaatgataagtatgatatggtgatttgttttgaattaattgaacatattccagatcaaatgaaactaattcaagatatatcatctgtttgtaaaaaagggacaaaaatatttatatcaacaataaatagaaatattgtctcttttgctctagcaaaaataatggcagagtatgtattaaaaattgtcccagaaggcacacatcaatacaaaaaatttttgaaaccttctgagttagtaaaaatgttagagatagaaaaatttcaaatgaacgatattaaaggtgtgacactaaatccaattgattatagtttttcactctctcccataactaaaattaattactttatggtagctacaaaaaaatgaa

SEQ ID NO: 226096 - DNA, 1186 bp, Unknown
  Bacterial polypeptide expressing nucleotide sequence isolated from the Sargasso Sea
catgttattcagtgtactgaaaaaacttaactttgatggaacattagaaatcatagattctaatgacaagatttataaatttggaaattcaaatccacacgtttgtataagattaaaaaacaaatctattgaaagaaaactattcttaaaccctaatcttcatataggtgaagcatatatgaatgaagagttagttattgaaaaaggcactatagaagactttcttaatttaataactaattgttacgatgactttatttctaacaataagttttataaattttatgaatatttatcttctatttttatgccatttcagcagattaatcagcttgtaaattcaaaaaaaaatgtagcacaccactacgatataaatgaggatttatataaattatttcttgatcaggatatgcaatattcttgcgcatattttcataatcccaatatgagtttggatcaagcgcagaaagataaaaaacaacatataattaaaaaacttcaaattacagaaaatatggatgttcttgatattgggtgtggttggggaggaatggcaattgaaatagctaaatctactggcgccaaagttaaaggaattacactttcagaaaatcaatttaaaactgcatctgagcgagcacaaaaagaaggtttgagtgataaagtttcatttgcactacaagattatagaaatgagactgaaaaatatgatcgtatagtatcagttggaatgtttgagcatgttggtgttaaatacttcaaaacttatttaagtaaagctaatgatattctgaaagaaaatggtgtttttcttttgcatactattggtcaaaggggtaaaccaacagctactagtccttggataagaaaatatattttccctggtggttatattccatcattatctgaagtaatgaatgaaacacaaaaacttaatataaatgtaacagatgttgaggttttaagactacattacgcgcacactctttcaaagtggtatcaaaatgttatcgaaaataaagataaaattataaatatgtttgatcaacgtttctttagaatgtgggagttttatctattggcaagtaagtattcctttgtaaatatgggtaatgttgtttttcaaatacaaatagcaaagaatattaacaatctgcctctcacaagaaattatatatacaactaa

SEQ ID NO: 226097 - DNA, 844 bp, Unknown
  Bacterial polypeptide expressing nucleotide sequence isolated from the Sargasso Sea
aatgaaatttaaatttgtgactaaagattatttagttactggcgaatcttttgatattgttgaatgtgaagcatgctctataagaactacaacaccattcccagataaaaaaataattggtaattattattcttcagatgattacatatcacatgatgataaagtatctggaatatttgatagtatttatggattagtacgtacctatcaattaaataagaaaaagaaattaattggaaaatattttaataaatcgaatggtaaaattcttgatattggatgcggcgcgggtgactttttgcaatacatgaaagaaaatcattggaatataaatggcgtagacacgtcaaataaggcaagaaaaatagcaaataagaagttaaatattaaagtaatggatcctaaagattggataaataataaagaaaaatatgatgtaattacatgctggcacagtctagagcatgtacacgaaccttgggtatatcttgataaaataaaaaagagtttaacactggatggatttttaattgtcgcattacctaactatcaatcaacagatgcaaaaatatataaagagttttgggctgcttatgatactcctcgccatctatatcattttacaataaagtctatgaataaaactataaaacctcatgggctaaatatagaatcaatatatagaatgaattttgatcccttttatgtttcaatgttaagcgcaaaacatatgggaaaatcttttatgagtggtttaataaatggttttaaatcatggacattatcaattttctccaaagataagtgtagttctcttatatttattataaaaaagaatgcatag

SEQ ID NO: 226098 - DNA, 1453 bp, Unknown
  Bacterial polypeptide expressing nucleotide sequence isolated from the Sargasso Sea
atgaataataaatttagcataagaaaagactggagtttaatagaatctttaatcgttgaaaactctagaattttagatattgggtgtggagaaggcggtttaatttcacaacttgaaaaaaatataaatgcaaaaacttatggtattgaagttaattcagagctagcaagaaaagctattgcggaaggattaaatgttattgaaggaaatgctgaaaaggacttagaccaatattcaaataatagttttgattatgttattttaagccaaacattacaagctatgctaaaacctaaagatgttttattggagctattaagaattgggtcaaaagcaattgtatcatttccaaattttggccattggagaattcggttacaattattatttactggaaaaatgccaatgactaaaggactaccatatcagtggtatgaaactcctaatattcatttctttacgataaaagattttgaaaacttgtgtaaagagttaaatatagtaatagaaaaaagtattgggctaacaagtagtggtaaacaattttctatttccaaaaaattatctaatgaaaatctatttacaagtgaagctatatttctattaagttatcaaaattttgaacctattaaattgaaatcaaaacaaaaaaccttttgttggaaattcaatcatagcaagataatgttaataaaatcagtttcgattgaattaattccgcaacttaaagataattattcttatgttattaaagataatctttctaatgatataataataattgatcccgctgaatcagaattgattctagaaaaaataaagaataaaaaacttcaattaaaagcaatcttattaactcatcatcataatgatcacactgcaggagtaagtgatatattaaaattttttagtgtgccagtttatagtccttcaaaaaatatattgagaacaagttttgaagtatcggataatgatgaaattaaaacaagctttataaattttaaagtaatatcaacaaagggacacaccttagatcacatagtattttataataaggacaatggaatacttttttctggagatactctatttagattaggttgtggaagggtatttgaaggaacatttgaagatatgcatactagtttaaaaaagcttgaaaaaatagataacgaaacattagttttttgtggacatgaatacacattaaataatctagcttttttaaaaagtacattcccagaatttaatggcttagatgaagaagaaaaagaaataaaagatcaattaaagaaaacgaatagttcaataccttttaatctcggcaaagaaaaagcgattaatccttttttgtcatcaaaagctatgtattatgaaaagtttaaaaaaaccaaaaatcttaatgattttgaaatgttttcatttattagaaaattaaaggacaatttttagt

SEQ ID NO: 226099 - DNA, 1192 bp, Unknown
  Bacterial polypeptide expressing nucleotide sequence isolated from the Sargasso Sea
atgcaacttgcaagatttttaaatagtgtttttaagaaagatggctttatattagttgatgctaattcgaaaagttacattattggaaacccaaaaaaagaaaatcctattaaacttaaaattcataataaaaaacttcattacaaattattatttcatccagatctttattttggtgaagcatatacagatggtgaaattacaatagaaaatggaagtctgactgattttctagatcttgcacttatgaattttggaagaggagatcttaatttttttagttacttaattaatagattaaggggatcttatagatatttaacaaattttaattttataaaaaaatcgaaaatgaatgtttcgcatcattatgatatttctgatgatctatatgatttatttttagatccaaaaagacaatactcatgtgcttattttaaaaatgctgatgatactttagaagacgcacaaaataataaaattagacacattataaaaaaattaaatatcaaacctaatcaaaaagttttagatattggttgtggttggggatcattagcaattgacatagccaaaagtgctaattgtgaggttactggaataactttatctcaaaatcaatttaactattgtcaaaaaaaagcaaaagaacttaatctagaaaatcaagttaattttaagttaatggattatagagagttagatgagaagtttgataggatagtgagtgttggaatgtttgagcatgtaggtagaaaattttaccgtaaattcttctcacaaattgaaaaattgcttgaagatgatggagtttcgctgatacatactattggctccgtaaacccacctagggaccctcatccatggattacgaaatatatttttccaggtggttacacaccaagtttaagtgaggttaccacaccaattgaaaaagcaggtttaatagtagctgatattgaagttttacgacttcattattctcatactttgcgacactggaaagaaaactgtatcaaaaataaggaaaaaataattcaaatgtttgatgaaagattttttaggatgtgggaattttatttagctggttgtgagatggcatttaaatggggtgatcaggttgtttatcaatttcaattaacaaaaaattacagatccactccagttacaagagactatatttatcaataaa

SEQ ID NO: 226100 - DNA, 1053 bp, Unknown
  Bacterial polypeptide expressing nucleotide sequence isolated from the Sargasso Sea
tatgcacttgcaagattctaaacaaagttttaagaaaggtggtttcattctaattgatgcatactcaaaggaatacataattggcattcctgaaaatattcctattaaattgaaaattttaaataaaacccttcattataaattattatttcttccagatttgtattttggagaggcttatactgatggtgagatagtaattgaaaatggatccttgacagatttcctagatttagcattgatgaatattggcaggggtgaattaaatttttttagttatcttttgaatagattgagaggttcttatagatatttaactaactttaattttattaaaaaatctaaaatgaatgtttcccatcattatgatatcaaagacgatttatatgatttatttttagatcctaaaagacaatattcctgtgcatattttaaaaatgaggaagacagtttagaaactgcccaaaataataagattctacatataattaaaaaactcaacattaaagctgatcaaaaagttttagacataggttgtgggtggggatcgttggccattgacatagccaaaagtgcaggatgtgaagtgactggcataaccttatcacaaaatcaattaaattattgtaatcaaaaaataaaagaaatgaatttagaaaatcaagtgaaatttaaattgatggattacagagaattaaatgaaaaatttgacagaatagtaagtgttggtatgtttgaacatgttggtaggaaattttacagaaaatttttcaatcaaatagaaaatttattaaaggaagatggtgtttcactaattcacactattgggtctgttaaccctcctagagacccccatccttggattacaaaatatatatttcccggtggttataccccaagcttaagcgaggtaacatccccaatagaaaatgcaggtttaatagtaacagatattgaagttttgaggatgcattactcgcatactttaagaaattggaaagaaaattgtataaaaaataaagataaaattattaacatgtttgatgaaagatt

SEQ ID NO: 226101 - DNA, 829 bp, Unknown
  Bacterial polypeptide expressing nucleotide sequence isolated from the Sargasso Sea
tatgaaaaatatcaaaaataagataatgtgttcttttgataaaaaagcctcatcttatgataagtattctttaattcaagatgaagttgctcaaagactttgtgacagactctctaatattacaatcaaacccgtgagcatattggatattggttgtggtactggatatttatcagacatgttattcaaattgtatccgcatgctaatattacatgtcttgatatctcgctcaatatgctagaagagtcgcataaaaaaaattcgaatcttaactgtatattgtctgatgctgaaaatatgccttttaaaaataataaatttgatttaattatttccagttttacattgcattggtgttttgagattgaaaaaatatttttcgatatacatcgctttcttaaagataaaggactttttttatttacaaccgtgggcccaaacactttagctgaacttgatactgcttattatgaagctgtagactctgtaaggcatataaattatttttcagatatgcacacatatggagatttattattaaaatttggttttcaagatccagtgatggatatggaaaaaatcatcatagaatataaaacatttaaagacgtcttggattcactaaggaaaactggagcaaatacggttatagagaacattcctagttatactagtaaagattcctatcgaaaattatctgaggcttatccaactaatcatagtactaagagatatcctgtcacgtatgagatgatatatggcacagcttggaaaaatctggaaaatactgatgaaaatactggggttataccaataaaaaagatctaa

SEQ ID NO: 226102 - DNA, 964 bp, Unknown
  Bacterial polypeptide expressing nucleotide sequence isolated from the Sargasso Sea
tttttagatattgccttaatgaattttggcagaggagatattaatttttttagtaacctaattaacaaaataaggggatcctatagatatttaacaaattttaattttataaagaaatctaaaatgaatgtctcacatcattatgatatctcagataatttatatgatttatttcttgatcccaaaagacaatattcatgtgcatattttaaaaatgaaaatgacacgctcgaggatgctcaaaataataaaattaaacacatcataaaaaagttaaacatcatgccaaatcaaaaagttttagatattggttgtggctgggggtctttagcaatggatatggcaaaaagtatgaattgtgaggtgacagggattacactttcagaaaatcagcttaattattgtaacaaaaaagctcaagaacttaatcttcaaaatcaggttaattttaagctaatggattacagagaacttgatgagaagtttgatagaattgtgagtgttgggatgcttgaacatgtaggaagaaaattttaccggaaatttttctcacagattgaaaaacttttaaaagacgatggagtatcactaatacatactattggatctgttaatccaccaagagacccacatccctggattactaaatatatttttcctggtggttacacaccaagtttaagcgaggttacaacaccaattgaaaaagcaggtttgattgttgcagatattgaagttttacgccttcattatactcatactttaagacactggaaagaaaactgtatcaaaaatagggaaaaaattattcaaatgtttgatgaaagattttttagaatgtgggaattttatcttgctggttgtgagatggcatttaaatggggtgatcaagttgtatatcaatttcaattaacaaaagattattcatcaacaccagttacaagagactatatttatcaataaa

SEQ ID NO: 226103 - DNA, 847 bp, Unknown
  Bacterial polypeptide expressing nucleotide sequence isolated from the Sargasso Sea
aatggaagataagaatgtaaagcaaaaggaattttggtcaggtgctggaggtgatgtatgggtaaataaacaaaaggaaatggatattatgctcaatccccttggacagagggcaatcgataaattggatttatctaacggtaaaacaatactagatatcggatgtggttgtggtgccacaactttagaaattgcaaaaatgattcctgaaggaaaaataattggtgtggatatttcagagcctatgctaaaccaagctcgcaaagatgcactggagatgtctctatcgaatactgaattcgttgttcaggatgtacagacggacgaaatttccaaagatgcctttgatatagctttttctagatttggggttatgttttttgaagattcttacgaagcatttaaaaatataaataatgctctaaaaattggtggccaacttagttttgtttgttggcaagaacctttattgaatccttggcaaagtttatctattcaagtaattaagcagtttatagatttacctgcaccgccacctaagagtcctggtccattcgcatttgaagataaaagctatattgaagatattttagatcgttcaaattttaaagaaattaacatagatgataatcaagaagagataatcatgttttcaggtaaaagtctaaaagaagcttctgaggattatttaacaatcaatcctgttgtaactgaaatgttaaaaaattctcctaaggaattaaaagaagaaatcttagaagctttgataataaaattttctgattttcatgaagatcatggtcttgtctttccaagtgcgacttggatagtcacagcaaagaagtaa

SEQ ID NO: 226104 - DNA, 1155 bp, Unknown
  Bacterial polypeptide expressing nucleotide sequence isolated from the Sargasso Sea
aatgcaattattaaattttttaagaaagttaattaaagatgacggttttgaacttgtggatgcaaattccaaatcatatataattggaaaaccgaaaaaagaaaatcccataaaacttaagattttagataagacattacattggaaacttttgataaatccagatttatatttaggcgaagggtatatgaatggatcaattgtaattgaaaatggtacgttgacagattttttagatattgctcttaaaaatgttggaagacaacctactaatactatgacaaatttattaggaagatttagaagagtttatagatatatcacaaattttaatttaattggaaaatcaaaagaaaatgttgctcatcactatgatatttcagaaaaattttatgatttatttttagatgaaaaaagacaatattcttgtgcttattttaaaagtgaagataatacacttgaggaagctcaaaataataagatagatcacataataaaaaaattaaatctcaaacctaatcagagagtattagacatagggtgtggatggggaactcttgctattgatattgcaaaaaaaactcaatgcgaagttgttggaattacgctatctgaaaatcaattagagtatgcaaaacaaaaagctaaagaaatgaatttagaaaatcaagtagagtttaggcttgcagactataggcaacttaatgaaaaatttgatcgcgttgtaagcgttggaatgtttgagcatgtaggaagaaaattttataaaaaatattttaataaagtttttgactttttaaacgaagatggtgttgctttaattcacacaattggttcaataaacccaccaagaggacctcagccatggatcacgaagtatatatttccaggtggttatacaccaagtttaagcgaagtaacattacccattgaaaaatccggcttaattgtatctgatatagaagttttgagaactcactaccaacatacactaagaaattggaaagataggttcatctctaagaaagaagaggttttagaaatgtttgatgaaaaattttttagaatgtgggaattttacttagttggctgtgaaatggcctttaaatggagtgatcaggttgtatttcagtttcaattaacaaaaaaactaaa

SEQ ID NO: 226105 - DNA, 547 bp, Unknown
  Bacterial polypeptide expressing nucleotide sequence isolated from the Sargasso Sea
atggatcagagagataatatcaatacagaggaagtagataagttcaatgatttagcgaacgaatggtggaatccatacggaagttttgcaccactccataaactcaatccacttcgtttcgaatatatacgagcaaatagtaacttagacggaaaaacagctattgatgttggatgtggcggtggaatactcactgaagcacttgcgagtgtcgcatctgaggttcacggaattgatatggctgaaaagggcttagcagttgcaaatattcataaaaacaaatcaaatataacgaatattaaatatagtcagagcacaatcgaagattatgccttaaaacatgagaataaatttgatgtcttaacatgtatggaaatgcttgagcatgtaccatcaccagaagaaactatcaaagcatgttcagatattgtcatcgaaggcggagacctttatttcgcaacaatcaataggaatataaaatcttatgtcatggcaataattggtgcagagtacatacttaatttactcccacaaaggaacccatgaa

SEQ ID NO: 226106 - DNA, 664 bp, Unknown
  Bacterial polypeptide expressing nucleotide sequence isolated from the Sargasso Sea
tatgcctgttgttccagtttatgaaatgatgaaagaagaattcgcatgggagaagaactttgctccatcaaaggatatcagaatgtcaaaaaagatcagaagatcaataaaaagtttaataaaaagaaataaactattgtatttattaaataaatttataaaaaatggtgaagttcttgatattggatgtggttctggtgttaaatttaatgaaatacctcataattatattccttacggtatagatatttctaaaaaatcagctcttgaggcaaaaattaactttgaaaaaagagggggaactgccatttgtgcgcctgctacagatgtattaaaagaatatgggcagagtaaatttaagggagccattttaaggtcttatttggagcatgagcattatccatttgaagttttggaaggacttagagaaacattaactagtaatggaagtataataattaaagttccaaattatgcctcagttaatagaaagataagaggcaagaattggtgtggttataggtttcctgaccatgtaaatcaatttactccatacactttagaaaaaatcgtaataaaagccggttataaaattataaagtttaattatttagataaacagattacaagtgataatatgtggatggtagctcaaccaatttaa

SEQ ID NO: 226107 - DNA, 592 bp, Unknown
  Bacterial polypeptide expressing nucleotide sequence isolated from the Sargasso Sea
aatgtggaaatcaaaaactcctggtattccagatgaagaatttgagagaacagaatctgtaccaattactaaagaagaagttcgtgcaatacaaattagcaaaggtagattgtctgtaggacaaacagttttggatattggatgtggtagtggttctgtaactgttgaagcagctattcaaattgaagagtcaggaaaagtaattggtgttgatattgatccaaatgcaattgaattaacagaaaaaaatcttaaaaaatttgggatttcaaattatacattagttgaaggaaatgctaaagaaaaaatttctgaattaccacaagcagatactgttttcataggtggaacaggtggtgatacaagagatattgtagaattatgtcaagataaaatcaaatctggaggaaggatagtaattggtgttattttgattgaaacactttattctgtattacaaacaattgaaaaattagattttgaatcaattgatattactcagatcacaataggaaaaagtagaaaaaccaaaacaggcacaatgatgcttgcaagaaaccccgtaactgtcatctctgcaacaaaaaaataa

SEQ ID NO: 226108 - DNA, 703 bp, Unknown
  Bacterial polypeptide expressing nucleotide sequence isolated from the Sargasso Sea
atgaatattaaaaattgggataataaaacttggctttcttccaatgattatattaggtcatttaataattttttattcaaaaatataaaattaaactcaaattctgaaatattagatattggatgtggtcgaggtaaaattttaggaacaataaaatcaagtttaaaacttaaaagtaaaccaattggtattgatatcataaatcacaaagataaagataaaaggataaattttaaaaaatcagatgctacatcgttctttttaactaatacgaaaaaatttgatttaattttgattaaacaaacaattcatttattaacctttaaaaaaataaaaaaattattatttctttgtaagaaaaatttgaaacataatggtaaaatttttattttaacattagatggtaaaaaaaatgaattacctacctttagaaaaatgaaaataagacttaataattctcttaaaagagataataaagttttaaaactcatcactagactttttcctcaacgaaaaagaacaaactttatctataaagttaaaatcaataaaaaaaaatatcttaccatgattgagaacaagtatatctcaattttactaccattatctaaaagagaaattttagaaggtattgaagaaataaatcatgaatataaaaattacattcaatttagagataaactggattgctttattttataag

SEQ ID NO: 226109 - DNA, 526 bp, Unknown
  Bacterial polypeptide expressing nucleotide sequence isolated from the Sargasso Sea
atgaaaaaacttaaaaactgggataataaaacctggttatcatctaaatcgtatatctctcaatttaatagatttcttaaaaaaaaaattaatttagataaaaattcaaaaatattggacattggatgtggaagagcaaatattattagtgcccttcaaaagaaatataaatttagaaataaacccatagggattgatattgttgcaaataaggatgttaaaaagaatattgtatttaagaaaattggtgccttaaaatatttaaagaaaaaagaaaaatacgatctaattttaattaaacaaactattcattttttttcaaaatcaaatttaaatcatcttctaaatcttgctaaaaaaagtttaaataataaaggtaaaatattaattttttcactaaaaacaaataataataaaataccttgttttgaaaaaatgagaaaaaatttagaaaaaagtttaaaaagagatgaagttttatttgagattgtcaaaaaaaacttaaaagaaataagctacacaaact

SEQ ID NO: 226110 - DNA, 787 bp, Unknown
  Bacterial polypeptide expressing nucleotide sequence isolated from the Sargasso Sea
atgaacactccaaaaataaaatttaataatgcagctggttacgatcggatgatgggtgtatggagtcagttaattggcgatatatttttggattggttaagctttgaagagaaaggttgctggcttgacattggttgcggtacgggggcgtttacgcaacaaattaaagagcgatgtgcgccatcagaaataattggtgtagatccatctgatgttcaattggagtttgctcggaccagaaaagggatgggagattgtattttccagagtgccgatgctatggcgcttccatttgaaaatcaaaaatttgattcttcgacgatggcattggtattattttttgttccggacccggcgaagggactttcagagatgattagagtcacaaaaaaaaatggaactgtgtcagcttatgtttgggatatcctaggaggaggatttccagcagaaccgatacaggcaggacttcgttcgatgaattataaatatgcactccctcccagcgtagatatttctcttatggataatttaaaagaatgttgggaaagtgctgggcttcagtccatccaaacgcaagttttcgaggtagagagaacctttgatgattttgaagagttttgggaggtcacatctaattctgcttctataaaatcagtattagccgatatggataaacaaaaaaagagtgagttacaaaacctcgtcaaacaacagttaccgccaagtgggaacggcgccatcaagtattcctcctgggccaatgctattcaaggtgtagttaaataaa

SEQ ID NO: 226111 - DNA, 1039 bp, Unknown
  Bacterial polypeptide expressing nucleotide sequence isolated from the Sargasso Sea
caagagatgtttcaacaccgttgaggcatcagccagagatcgtgcgcgatggataagcgccaatctgtattaccacaaacgtgacttagcctatttgaatttcatcctggcaaaagactgcagtgttttggatattggctgtggtaatggctggttgctcggtcaactcgatgctaaggtaaagtgtgggattgatttgtcaccgtcaatggttgatgtcgcacagaaacattgcccagaagcaacggttattcaggcagacatagaggctagctcagacttaaaaaaaatcagagatcacgggccatttgactatatcattttatcggacacgcttgcgtttcttgatgatattgaactgggtttatctcatgtaagacaattatgcgacccatacacacgcgtgatcttgtcgcgatataatcaattgtgggaaccggtgctgaaatttggtgaattgattggtcgaaaacagcgtatgaagtttgaccttaactggatcagccgtgatgatgtgcgtagcttttgtgcgttgtcgggactggatctgctaacaagcgagtcgcatcaaattatcccatttcgtctgctgggtctggggcatctgatgaacaaatggctggctccattgccaattattcgtgctttgaatttacgccaatatgttgttgcaaggccgacgttacatcaaaaacgtttgaaaccaagtgtatcggtgattgtgccagtgcgcaacgaagctggcaatatcgagccagcggtaaagcgcttgagcaaatttcctggagattttgaactgatttatgttgaaggcaacagctcagacaattcgtgggacgaaattcagcgtgttaaaggggcatataaagacacaaacatagttgcattaaagcaaccgggaaagggtaaaggggacgctgtccattatgcgtttcagcaggccagtggtgatattttgatgatccttgacggggacctgactgtgccgccagaagatatgatcaaattttacaatgtgctgggctcttggcatcggtga

SEQ ID NO: 226112 - DNA, 1162 bp, Unknown
  Bacterial polypeptide expressing nucleotide sequence isolated from the Sargasso Sea
ttgatcaaaaatgatggatttgaattattagatgcaaataataaatcttatatcattggaaaaccaaaaaaagaaaaacctataagacttaaaattttagataaatcattacattggaagctcattataaatccagatttatattttggagaggcttatatgaatggatcaattgtaattgagaatggttctttgactgagtttttggatattgcacttaaaaatgtaggaagagaacccactaatgcaataacagatgtactagcaagatttagaagagtttatagatatataacaaactttaatctaattggaaaatcaaaagaaaatgttgctcatcattatgacatatcagaaaagttttatgatttatttttagatgaaaagagacaatactcatgtgcttattttaaaaatgaagatgatacattagaagaagcacagaataataagataaatcatattattaaaaaattaaatcttaaacctaatcaaaaagttttggatataggatgtggttggggaacgttggctcttgatatagcaaaaaaaactcaatgtgaagttgttggaattactctatctgaaaatcaatttgaatacgcaaaacaaaaggctaaagaaatgaaccttgaaaatcaagtagagtttagattagcagattatagacagctaaatgaaaaatttgatagagttgttagcgttggtatgtttgaacatgttggtagaaaattttatagaaagtattttaataaagtttttgattttttaaaagaagatggagttgcgctaattcatacaattggctcaataaatccaccaaggggacctcaaccgtggattactaaatatatatttcctggaggctatacaccaagcttaagtgaagttgctttaccaattgaaaaatcaggtttaattatttcagatttagaagttctaaggactcattatgaatatacactaagaaactggaaggaaagatttatgagcaaaaaaggagaagttctagagatgtttgatgaaaaattttttagaatgtgggaattttatcttgtaggctgtgaaatggcgtttaaatggagtgatcaggttgtatttcagttgcaattgtcaaaaaaacttaaagcaacacctataacaagagactatatttattaat

SEQ ID NO: 226113 - DNA, 721 bp, Unknown
  Bacterial polypeptide expressing nucleotide sequence isolated from the Sargasso Sea
ttgaaatcagctgtcattaaaaattgggataataaaacttggctttcttcatatgattatattaagtcatttaataaatttttatctaaaaatactaaatttaggtctaattcaaaaattttagatattggatgtggccggggaaaaatcattggagatttaagctctcaattaaatcttaaaataaaaccaataggaatagatttaataaatcacactgataaagacaaaagaattaaattcataaaaaaagatgctttatctttttttataaataataaacaaaaatttgatttaattttaattaaacaaacaattcatttgttaagtctaaatagtataaaaaaattggttaaagaatgtaaaaaaaaacttaatacagacgggaaaatatttatttttacgttggacccttttaaaaatgaaataccgtcatttgaattgatgaaaaaaaagctaaaaagatctctcaaaagagacgaaatgatattaaaatttttgtcccaacttaattctagtaaaaatccaaaaaaatttttttacaaagtaaaaataacaaaaaaaaaatatttaaaaatgattcaaaatagatttatatcgaccttattgcctatgacaaaaaagcagatatcaaatggaattaaagagatagatttaaaatttaacaaaatattgaaatttaatgataatttaatttgtgttattttaaaaaaaaattaaa

SEQ ID NO: 226114 - DNA, 576 bp, Unknown
  Bacterial polypeptide expressing nucleotide sequence isolated from the Sargasso Sea
cctgattgagtttctgggcaccggaaagggaagactcctcgatatcggctgcggcgaaggggcactcagcgatacgctctcgcagcatggctataccgtcaccggaattgatccgctagtgggcaacggcacctctgcatggcgcgtgcgcgcgagtgccggagctgttccgcttgcgagcgacagtttcgatatcgcggtgtttcactggtcactgcatcacgtccctgaagagttgatgtcggctgcgcttgccgaagcgcagcgggtgctcaccggcgccggcaggctttttgtgattgagccggaacctgtcggcagctggcaagaggtgtcacagccgtttcacgacgaaaccgaggttcaggcaaaggcggtgaaggcggtcgacaaagttgtcagcgccagcgccttaaccaggcgacgtcagtattacctcagtgaagactgttacaacagttttgacgaatttgttgagtcaatgatgtcgtatgcgtataaccgctacacagaagatcaaattcgccagcaacgcgtgcgggatgcgttcgagtctcgccgcgaaggcgatatctt

SEQ ID NO: 226115 - DNA, 976 bp, Unknown
  Bacterial polypeptide expressing nucleotide sequence isolated from the Sargasso Sea
aatgaaaaaacaagctgttataaatgcgtctgatgtaaaacctaacttctccaaagtaaaggaagcatggaatgagatgctatctgattattatacaagtgaaaatattcttaatgaaaagtatacagtggaagttaattgcccccattgtgattcagacgaaacacactcgtcattcatattaaatggatttaatcacgtcacatgcaagaattgtgacagtgtttacgtgagccctagactcaatgatgaatgtttgcataagctatactccgatgaatattattcagagatgtttacaaaatccatgatcccattcttcgataaaaggaaggtgctaataggagaaaataaatttaatcagattttagattttttctcagcagatgagtctaagaaaaaggtgctagatataggatgcggcgtgggtgaagtaatagatgtttttaatgataatggctggcagtgtgaggcaatagagctaaatccagttgcatcagagtggttaagaggaaagggcataaaggtttttaatgataccttggataattatcagacctctgaaaaattcgatttgattatggcatggaatgtagttgagcatgttacaaatcctaaagagttcattagaaaatcatttgatttattgaggcctggtggtttatttgtaacagaagttcctcatggtaattcaatgcttattgattattgcagaaaaactggcatggaccctttgagaattctccagggcgaacaacatattatgctctactcaataaatgcttataaagaattgcatcaattacccggatttgaagaagttcacatacagacaaatggcctggatattggaacgatctttgattgcagtaagctagagatagaaagaaatgttgtatcaacaatgcaagatctagtcgattcaaagctttatggcgaccttctaaggggattttggaaaaaacctggcatataa

SEQ ID NO: 226116 - DNA, 592 bp, Unknown
  Bacterial polypeptide expressing nucleotide sequence isolated from the Sargasso Sea
atgtggaaatcaaaaactcctggtattccagatgaagaatttgaaagaactgaatctgtcccaataacaaaagaggaaattcgtgccatacaaatcagtaaaggtagattatctgcaggacaaactgttttagatattggatgtggaagtggttctgtcactgtagaggctgcaatacaaattgaagattctggaaaggtagtcggtgttgacattgatcctaacgcaattgaactaacagaaaaaaatctaaaaaaatttgggatttcaaattataccttaatcgaaggaaatgctaaagaaaaaatttctgaattacctgaagcagatactgttttcattggaggaactggtggagatacaaaagatattgttgaactatgtcaagaaaaaatcaaaaccggtggacgaatagttattggcgtcatactcatcgaaacactctattccgtattgcaaacaattgaaaaattagactttgaatcaattgatattactcaaattacaattggaaaaagtcgtaaaactaaaacgggcacgatgatgcttgcaagaaacccagttacagtcatctctgcaactaaaaaataat

SEQ ID NO: 226117 - DNA, 685 bp, Unknown
  Bacterial polypeptide expressing nucleotide sequence isolated from the Sargasso Sea
atgaataaaattaatagcataagaaaagattggtcccttattgaaacacttatcacacaagatagaaaaatcttagatattggatgcggtgatggtggacttatggaacaattagaaaataatagtaatgcgataactcatggcattgaattaaatagagatttagctgctaatgctatcgcaagaggtttcaatgttgtacatggaaatgcagaattagatttgtctcaatattcaaataatagttttgattatgtaattttaagtcaaaccttacaagcaatgatgaaacccaaagatattctgtctgaattattaagaataggatcaaaagcaatagtttcttttcctaactttggacattggaaaataagattacagcttttaatatctggaaaaatgccagtaacagaaagtttaccttatacatggtatgacacacctaacattcatttttttacaattaaggattttttgaatttgtgtaatgaaatgaatattgtgattgaaaaaagtattggattaacatcaaaaggtaagcagtttgatataagtgaatcagttactggagttaattttttcactcacgaagctatctttttattaagttataaaaattttgaaccaataaaaattaaatcttcaaaaaaagtttttgcaaaaaattctgttattgcaaattagt

SEQ ID NO: 226118 - DNA, 493 bp, Unknown
  Bacterial polypeptide expressing nucleotide sequence isolated from the Sargasso Sea
atgtccttcgacgcgggcgttgcagttcaagctgagggttctgctaacgctaaaggctcactcaacgctaaaggcgttttcaaagccgaagaggctagtactactcccgcaattaatgagcagaacgttgcacatcgcttctcaaaagcagcagccaagtacaacagtattgcatctattcagcgtgttattgccgagcaggcgttggcaaacttgccaaaggccttgcagggcgaggccctcgatataggctgtgggacgggcattcatacacaggcgttggtgaaaaaaggtgcaacggtaaccggtgtagacatcgccaaaggcatgttagcgcaggctcgaaaaatgtactctgaccccatttttgttcaggggagtgccgttgatttaccgtttgttgatagtgcgttttcaacggtgttttcgtctatggcgcttcagtgggtgagcgatacacatcttgtagccaacgagatagcgcgggtgctaa

SEQ ID NO: 226119 - DNA, 1192 bp, Unknown
  Bacterial polypeptide expressing nucleotide sequence isolated from the Sargasso Sea
aatgcagttagcaaggttcttaaatagtgtttttaagaaagatggttttattttagtggatgcaaactctaaaagttatatcatcggaaatcctgaaaaggaaaatcctataaaagttaaaatattaaataaaaatcttcattataaacttttattccatcccgatctttattttggagaagcttatacagacggagagatagttattgagaatggaagtcttacagattttttagatttgtctttgatgaattttggaagaggaaatttaaatttttttagttatttaattaatagattaagaggttcatatagatatttaacaaattttaattttattaaaaaatctaaaatgaatgtttcacatcactatgacatcaaagatgatctttatgatttatttttagatcctaaaagacaatattcttgtgcttacttcaaaaatgaaaatgatactctagagactgctcaaaataataaaattcaacatataattaagaaactaaatataaagccaaaccaaaaagtattagatattggatgtggatggggctctttagcagtcgatattgcgcggtcagcaaattgtgaagtgactggaatcacattatcagaaaatcaattaaaatattgcaaacaaaaagccaaagaacttaatttagaaaatcaattaagatttattttaatggattacagagaacttgatgaaaaatttgatagaattgtaagtgttggaatgtttgaacatgttggaagaaaattttataaaaaatttttctcacaagttgaaaaacttctaaaagacgatggagtttcattaattcatactattggatcagtaaatcctccaagggaccctcatccatggataacaaaatatatatttcctggtggttacacaccaagcttaagtgaagtaactaccccaattgaaaaagctggcttaattgtatctgatattgaggtattaagaatgcattattctcacacattaagacattggaaagaaaattgcctgaataataaagataaaattatcaatatgtttgatgaacgtttttttagaatgtgggaattttatttagcaggttgtgaaatggcttttaaatggggagaccaagttgtatatcagtttcaacttactaaaaactatacttctacacctgttacaagagactatatttatcaataa

SEQ ID NO: 226120 - DNA, 428 bp, Unknown
  Bacterial polypeptide expressing nucleotide sequence isolated from the Sargasso Sea
tatgactacaataaataaagaagaaattcaaaaattttcaaaaatggctgatgaatggtgggatacttcaggaaaattcaaaccattacacatgtttaatcctgtccgaattgaatatattttagaaaaaatatgtgaatattataaattaagtgaaaaaaaatcttttcccttagaaaaaattaaaatcttagacattggctgtggaggtggacttatatcagagcctatggcgagactcggtgctaatgttactggaatagatgcgtcttttaaaaatatggaaattgcaaaaattcacgcaaaaaaaagtggtctgaaaattgattattttaataagtctcctgagcagatgaatgaacaggaaaaatatgatgttattttgaacttagaaatagttgaacatgttgaaaatttagatttgtatt

SEQ ID NO: 226121 - DNA, 1186 bp, Unknown
  Bacterial polypeptide expressing nucleotide sequence isolated from the Sargasso Sea
aatgctttttacaattttaaataaaattaattttaagggtaaattagtagttactaattacaaaggtaaaacttttcattttggaaatggtgcagatcttgtcaaaataagactcacaaataaatccatagaaaataaactttttcgcaatcccagtctttatcttggtgaaggatatatgaataaagaaattgttatagaagaaggaactcttgatgattttttaaaaattataacagcatcttataatgattatatgtctaataattttgtttttaagatgtatgaatcagtatctactttctttaaatcatttcagcaaattaataaattggttagatcaaaagaaaatgtagctcatcattatgatattgatgaaaaaatgtataagttatttcttgataaagatatgcaatattcgtgcgcttattttcataatcaaaatattggaatagaccaagcacagtttgataaaaaaaaacatataatagaaaaattacaaattaaagaaggaatgtcagttttagatattggatgtggatggggaggtatggctatacaaatcgctaaagatacaggagccagagttaagggcattactttatctgaaaatcaatttgctactgctaagaaaagagctcatgaagagggattggcagataaagttacttttgcacttcaagattatagaaatgagaaggatacatatgatagaattgtctctgttggaatgtttgaacatgtgggagtagattatttccctgcttttttttcaaaaacttatgaaattctcaaagatacaggtgtttttttattgcacactattgggcaaagaactaagccaagcgctacaagcccttggataagaaaatatatttttccaggtggttatattccttctttgtcagaagtattaaaagaaactgaaaaacaaaatattattgtcacggatatagagattctaagaatgcattatgctcatactttagatcattggtataaaaatactatgcagcataaagagactatagtgaaaatgtttgacgagaaatttctaagaatgtgggaattttacttattgattagtaaatactcatttatcaatatggggaatgtagtatttcaaatacaaattgctaaaaatatcaacaatttacctcttactcgtaactatatatataattaa

SEQ ID NO: 226122 - DNA, 709 bp, Unknown
  Bacterial polypeptide expressing nucleotide sequence isolated from the Sargasso Sea
atgaagcctttaaaaaactgggataataggacgtggctttcttcgaaaagatatatcagtcaatttcataaatttataaaaagaaaaactaaatttaataagaatacaagagttttagatataggttgtggtagagctaatataataagctttcttcaaaaaaaatataaatttaaaacaagagctatcggaatagatattttaaaaaataaaaatacccgaaaaaatatattatttaagaaatcagatgctttaaaatatcttaaaaaggggaaaaaatttgatgttataatcattaaacaaacaattcattttttctcacaaacaaaaattgtttctttattaaacttagtcaaaaagaatttaaatgaaaaaggaacactattaattttttctcttaagacaaaaaataataaaataccttgttttaaaataatgaaaaaacaacttaataatagtctcaaaaaagatgaaaaattatttaaaatcatcagaaaaaatttaacaagaataaaagaaacaaatttcaattttaatgtaaaaattactaagagaaagtatgtgtcgatgattaaaaatagatatatgtcttgtcttttaagtttatccaaaaaagagatagaaaaaggtatcgatgagattaatttaaattttaaaaatcaattaaatttcaccgataccctaaaatgtattagctttagaaaataat

SEQ ID NO: 226123 - DNA, 676 bp, Unknown
  Bacterial polypeptide expressing nucleotide sequence isolated from the Sargasso Sea
aatgcaatatatatgtcctttgtgtgccttaccgctcaccttgactgaacgaacttggggatgcccgcaggcacacaagttcgacatggccaaagaaggctatgtgaatctgcttcccgtgcagaagaaaaattccaaagatcccggtgacaatcaacagatgatgttggcccgcagggagtttttaactgcgggttactatcaaagtttgagtgacagagtgaatgcgttggcacttgagtatgccagcgaggctcagcagatcctcgatatcggctgtggtgaggggtattacagccatcgtttgtacaatacgcttgtcgccgagcatccttgccagttacagggcgtggatatctccaaatcggcgataaaatatgcggctaaacgttacccgaatctcagcttttgtgtggcgagcgcctacgaaatgcctattccatcgcatagtatcgatttagcgattcgtatctatgcgccatcgaaggtggaagagttacagcgggtcatggcgtccaatggcattttgatcacagtatcgccaggacctttacatcattttgcactgaaacagcaaatttatgccgaaccgagattgcatcccgcgtccgatgccaagatagaggggttcgaatgcttacaccaagagcggcttaggtcacaacttgagctaaat

SEQ ID NO: 226124 - DNA, 793 bp, Unknown
  Bacterial polypeptide expressing nucleotide sequence isolated from the Sargasso Sea
aatgagtaatgatataaaaataaaaaaaaggaaaaattgtcctttatgtaatgccgaaaatagtgaaattagtattttaatgcatgataactgggaattagtagaatgctcagaatgttcttttgtttatatgcctgaagttccagtatatgaaatgatgaaagaagaatttgcctgggagaaaaactttagtccttcaaaagatataaaattatcaaaaaaaataagaagatctattaaaggtttaataaaaagaaataaattattgtttttattagataaatatataaaagaaggccaagttcttgatattggatgcggttcaggtattaaatttgatgatattcctcaaaaatttatcccatttggaatagatatatcagaaaaatcagcctttgaagcaaaaaccaactttgaaaaaagagggggaacagctatatgcgcccctgccacagatgttttgaaagaatatggtaagaataaattcaagggcgcaatcttaaggtcatatctagagcatgagcatcacccatttgaagttttagatgaacttaaggaaacattaactagtgatggaagtataataataaaggttccaaattatgcttcagtcaatagaagtgtaagaggaaaaaattggtgcggctatagatttcctgatcatgtaaatcaatttacaccatttactctgacgaagatggtaaaaaaagcaggatacaaaattataaagtttaattatttagataaacagattacaagtgataacatgtggatggtagcgcaaccaatttaa

SEQ ID NO: 226125 - DNA, 665 bp, Unknown
  Bacterial polypeptide expressing nucleotide sequence isolated from the Sargasso Sea
tttagatatcggttgtggttttggaactgctgctgcgtatattgcaaagcaaactggttgtgaagtaactggtataactttaagtaaaaaccaactggattatgctctgcaaaatgcaaaggaattaaatttagataatcaaattaattttgagctgaaagactatagagaaatgggtggtaaattcgataaatgctactcaattgggatgtttgagcacacatctttaaaatactataacacctactttaaaaaagttttcgacttattaaaagataatggaacttttttacttcacacaattggaatagttggaccaccatcagcaccatctcgatggataaatagtcgaatttttcctggaggaagatgtccatcttacagtcaaataattaaaccaatagaaaaatcaggttttatagtcaatgactgtgagactttgatcagacattacgatttaacactagaagcatggagagaaagatttttagctaaaagaaccgaaatgaaggatttatttgatgaaaagttctgtaaaatgtgggaattttacttaagttcaacggcttcaagttttcggtttcgtgatctctgtgtctaccagattcaacttgttaagaacttttcaactgcctctaaaaccagagattacatttacaaataat

SEQ ID NO: 226126 - DNA, 1186 bp, Unknown
  Bacterial polypeptide expressing nucleotide sequence isolated from the Sargasso Sea
ctggcaagatttttaaataatgtttttaaaaaagatggatttatcttaattgatgctaattctaaaagctatattattggtaatccaaaaagtgaaaaccctattaaggttaaaatattaaataaaaacctccattataaattattatttcatcccgatttatattttggtgaagcttatacagatggtgaaataattatagaaaatggaacgctaacagattttttagatctttccttaatgaattttggaagaggagagttaaattttttcagttctttaattaataaattaagaggttcttacaggtattttactaattttaattttataaaaaaatcaaaaatgaacgtttcgcatcattatgatatttcagatgatctttatgatttatttttggatcctaaaagacaatattcatgtgcgtactttaaaaacgaaacagacacgcttgaaacagcacaaaataataaaattcaacatattataaaaaaactcaatataaagcctaatcaaaaagtcttagatattggatgcggatggggatcgcttgcaactgatatagcaaagagtgcaaattgtgaagtcacaggcatcaccctttctgaaaatcaatttaattattgtaaaaaaagagcaaaagaacttaatttagaaaatcagttacactttaaacttatggattatagggagctagacgaaaaattcgatagaatagtaagtgttggaatgtttgagcatgtaggaagaaaattttatagaaaatttttttcacaagtcgaaaaacttttgaaagatgatggagtttcattgattcatactatagggtcagtaaatccacctcgagatccacatccgtggattacgaaatatatttttcctggtggatatacaccaagcttgagtgaggtaagtccacatatagaaaagtcgggattaatcgttgcagatattgaagttttaaggctacattacatgcacactttaagacattggaaagaaaattgtctcaaaaataaagaaaaaataattgaaatgtttgatgaaaaattttttagaatgtgggaattttatcttgcaggttgtgagatggcatttaaatggggtgatcaagttgtatatcaatttcaattaacaaaaaattattcttcaacaccagttacaagagactatatttatcaataaa

SEQ ID NO: 226127 - DNA, 479 bp, Unknown
  Bacterial polypeptide expressing nucleotide sequence isolated from the Sargasso Sea
aatgaataatcttagaagtattagaaaagattgggatctcattgaatcattgatcaaagataactcacgtattttagatattggttgtggagagggagatttgatacaacaacttgaaaaaaaccttacagctaaagttcatggaattgaaaaaagtagagaattagctctaaaaggaattgccaaaggtttaaatgtaactcatggtgatgctgaaaaggatcttttacagtattcaaatcacagctttgattatgtgattcttagtcaaactctacaagcaatgattgagcctaaaaagattctaaaagaattattaagaataggatctaaagctattgtttcatttccaaattttggatattggaaaatcagactacaattactatttaacgggaaaatgccaataactgaaggccttccttattcttggtatgatacaccaaacatacatttttttactttaaaagattttcaaa

SEQ ID NO: 226128 - DNA, 170 bp, Unknown
  Bacterial polypeptide expressing nucleotide sequence isolated from the Sargasso Sea
aatgtggaaatcaaaaactcctggtattccagatgaagaatttgagagaactgaatctgttccaatcactaaagaagaaatccgtgctatacaaatcagtaaaggtagattatctgcagggcaaactgttttagacattggttgtggtagtggttctgtaactgttgagg

SEQ ID NO: 226129 - DNA, 1189 bp, Unknown
  Bacterial polypeptide expressing nucleotide sequence isolated from the Sargasso Sea
atgtcttttagggtactcaaatttttaattaaacacttaatcaaaacaagatctgttattataaaacttgagggaaatgaccatcttattgacaacggcacagatccgttaattttacagatcaataataagaaatttttaaataaaattttttatgcaccttctctcgtgcttacagaaggatatatggataaagattacgagttaagcaattcgactttttatgagttttctgaattacttattgaaaattataataaataccttgaaaaaatatcaaatacgctaatattcagaattattttaatcattaatccactatttcagttaaatttcattaagagttcaaaaagtaatgtcgcaagtcactacgacttatctgataggttgtatgacttatttttggatgaaactaggcaatattcatgcgcatactttgaaaatgaaaacgatacattaacacaagctcaaactaacaaaatgagcagattagctgacaaattattattaaattccaatgatagagttttagacataggttgtggttggggatcacttagtagacattttgcagatcatcataactgtaaagtaaagggtgtttcattatctgaagagcaaattaaatactgtaatgaccaacttaaaaagtcagataaaaaagaaaatttatcctattctttacaagattatagagatgaagagaattcttatacaaaaatagtttctgttggaatgtttgagcatgtaggaaaacctttttacaaaacatattttaaaaaaatatataatttattatctaatgatggcatagcggtagtacatacaattggtaacattagagttccgaaaatgactcctgcatttattaggaaatatatttttcctggcggctatataccatctttgtctgaggtaatgccagctgttgaaaaatctggacttataatctcagatatagaggttcttagattacattatgctaaaacactttctcattggtttaaaaattttaaaaaagaagaaaaagaagttcttaaattatatgatgatagatttataagaatgtgggaagcttatttaaatttaagtgaattatcttttactaaaggtgataatgtgattttccaactagttttaactaaaaaaagagactcatttcctttggtaagaaaaaaaattagttaaa

SEQ ID NO: 226130 - DNA, 610 bp, Unknown
  Bacterial polypeptide expressing nucleotide sequence isolated from the Sargasso Sea
tatgggctctattccaaataaaactaaaattaattcgagtgaattaatatggaatgatgaaaatgcattatggtatgctgaccaatatggtaatcatatttcaaacgagcttacgattaatagtattactattgatccaaatgatattcttcttgatatcggatgtggaataggtgcagcagtaaaaatagctgcaaaaagatgtaataatggaaaagtctatggaattgatcctattgaaactatgataaagattgctaaaaaaaatcaacttacaaattcaaatatagagtttagtattggaacagcagaaaatattccacttgagaatgaatctgtaaataaaataatatctattaactcaattcatcattggagagattataaaaaaggtctatcagaagtaaaacgagtattgatatccgatggattattctttatttctagtgatattgttaataataatgattgcggtcatggcccagggccattgcaaacaaacaaagatattgtaaaagaattagaaattgcaggatttaaggatataacattacgtaattattcattggatgacgaaggcatacatctagtaagatgtaaaaaagaataa

SEQ ID NO: 226131 - DNA, 709 bp, Unknown
  Bacterial polypeptide expressing nucleotide sequence isolated from the Sargasso Sea
atgcaacctttaaaaaattgggacaataaaacttggttatcatctaaaaaatatattttatattttcataaatttttgaataaaaaatttgattttaattcaaatactaagattttagatataggttgtggtagagcacatataataagttttttacatagaaaatacaaatttaaaaaacaacctatcggtatagatataataaaaaacaaaaatataaaaaaaaacattacttttataaaaacagatgcaaataaatatttaaaaaaaaataaaaggtttgacttaatcatcataaaacaaactgttcatttctttaataaaaaaaaaataactttcttacttgagaaaattaaaaaaagtttaaatccaaggggtaaacttttaattttatcacttaaaataaaaaataacaggattccgtgctttaaaaagatgaaacttaagttaaatgaaagtttaaaaaaagataaaaaattaatagattttattaaaaaaaatctaccaaattacaaattatcctatttcaaatttaaagtaagtattacaaaaaaaagatatttaagaatgattaaagaccgatatatttcatgcttattgaaattatcaaatcaggatattaaaaatggtataagtgaaattaatttaaaatatagtagaaaaattcaatttatagatactttattatgtatctcatttagaaaataaa

SEQ ID NO: 226132 - DNA, 151 bp, Unknown
  Bacterial polypeptide expressing nucleotide sequence isolated from the Sargasso Sea
aatgagtgatgatgtctacgttcatggccaccatgagtcggtccttagatcacatacatggcggaccattgaaaattccgcaaagtatttggagcaacatcttgaagataggtccagccttctagatatcgggtgtgggccaggaacataa

SEQ ID NO: 226133 - DNA, 1087 bp, Unknown
  Bacterial polypeptide expressing nucleotide sequence isolated from the Sargasso Sea
catgattacaaaaagccttcttggaaaaattatcaaggttggcaacttaacttggattagtcctaatggtgaattaaacacttacggtgacggtactggagaaccaatacgtatccgtacaacaaatagtttttctgaattaaaacttcttatgaacccttctgttcattttggcgaaagttatatgaatggttccctaattgttgaagaaggtcgaatacatgactttttaaaacttattttctcaaatacgagtagtgagattgaccattgggtcatgaaattatctaaaatagtaagaatgatacaaaacaaaatcagaacgagtaactatatttctaagtcaaaagataatgttgctcatcattatgacttatcagataaattgtatgaattgtttctagatcccgatagacagtattcctgtgcatattttaattcaccaaatgatactttggagcaagcgcaaattaataaaaaggaattgatatcaaaaaaattgctcttagaagaagggcaatcagtattagacataggatgtggatggggcggtatggcttcgcatatttataaaaaatctaatgccaatgtagtaggggttactctatcagaagagcaaattgcatatgctaagcaaagaaaaattgatgaaaagcttgataaagttgaatatagattgcaagactatagaaatgtaaatgaaacttatgatcgtatcgtgtcagttggaatgtttgagcatgtaggaacatctcattatcaagagttttttgataaagttcatgatttacttaatgatactggagtagccttaattcatacgattggaagactcacagagcctacaaataacgatccttggattgaaaaatacatattcccaggtggatatattcccgcattaagcgaaacaatgtctcgtgtagaaaaatctggattatcattaactgatgttcaagtgttgagatttcattacgcggaaacgctcaagcgatggcgttacaatttctatgataatatagataaagttaaagaactgtatgatgaaaaattttgccgccatgtgggacttctacttgtcatctcc

SEQ ID NO: 226134 - DNA, 1186 bp, Unknown
  Bacterial polypeptide expressing nucleotide sequence isolated from the Sargasso Sea
catgataacaaaaagccttctctctaaaatcataaaaacaggaaaccttacatgggtaatgccgaatggtgaaattaatacgtacggcgatggaacaggagatcccataaagataagaactacaaataacttctcagagataaaattattaatgaacccatcaatacattttggcgaaagttatatgaatggatcacttgtggtagaggagggacgtattcatgatttcttaaaactaatttttgctaacacggaagtagatattgatcattgggttatgaagctctcaaaagtagttagagcaatatcaaataaacttactacaagtaactacatatcaaaatcaaaacgaaacgttgcccatcattatgatctatctgataaactctacgaactatttttagatccggatagacaatattcttgtgcctactttaactctccaaatgatacgttagaacaggctcaaattaataaaaaagaattaatttcaaaaaaacttcttcttgaagaaaatcaatcagtcttagatattggctgcggttggggtggaatggcagcacacatttataaaaaatcaaatgcaaatgttgttggggtaacgctatccgaagagcaaattgcttatgcacagcaaagaaaaatcagagaaaagttagaaaaggttgaatatagattgcaggattacagaaatgttaatgaaaaatatgatcgaatagtatctgttggtatgtttgagcacgttggaacagctcattatcaggaattttttaataaggtctatgatcttttaaatgatagtggagtggcccttattcatactattggaagattaaacgagccaggtaatactgacccttggattgataaatatatatttccaggtggatatattcctgcacttagtgaaacagtatctagagtagaaaaatcaggcctttcattaacagatgttcaggttttaagatttcattatgcagaaactttaaaaagatggagatacaacttttatgataacatagacaagatcaaagaaatttatgatgaaaaattttgcagaatgtgggacttctacctttcatcctctcaagcttcctttgaagagtccaccttagtggtctttcaaatgcaattatctaaaaacaagaaaactgttccagactcaagaaattatatgttgacataa

SEQ ID NO: 226135 - DNA, 1156 bp, Unknown
  Bacterial polypeptide expressing nucleotide sequence isolated from the Sargasso Sea
catgaactcgctttgttcagatgctgtcatcgtcaatgaaacaaatgataactggacccgaatgggaaaagagctgctttcacaagcggatatcagaattaatggctcacgcgcctgggacattcaacttcatcataccggtttctttaaacgagtattgcagcaaggctcattagggcttggcgaaagctatatggaaggctggtgggactgcgaacggctcgatattctgttctgcaaaatcctgaaagcaaaactcgaccagcagatgccaggcaatctgaaagatattttacgcattgccagcgcgcgcctgtttaatttgcagtcacgtagccgtgcatggatcgtcggtaaagagcattatgatattggtaacgatctctttgcgctgatgcttgatccgcatatgcaatattcctgcggttactggaaagatgcaaccacattaaacgatgcgcaaaatgccaaattaaaaatgatctgcgagaagctgcagcttaaaccgggtatgcgtttactcgatatcggttgtggctggggcgggctggcggaatatgcggcgcgtcattatggcgtggcagtagaaggcgttaccatttccaaagagcagcagaaaatggcgcagcagcgctgtgaagggttggacgttaacattctgctgcaggattatcgcgatcttaataaacactacgatcgcattgtctccgtggggatgtttgaacatgtcgggccgaaaaactacgacacctatttcagtatcgccgaccgttgtttaaaaccagacggactgttcctgctgcataccattggtagcaataaaaaagggatgagcgtcgatccgtggatcaataaatacattttcccaaatggctgcttaccggcgatttcccatattgccgaggccagcgaatcacggtttgtgatggaagactggcataacttcggcagcgattacgataaaacgctgatggcctggcatgagcgctttaatcaggcatggccggagctgtcatcacgttattccgccaccttcagaagaatgtttaattactatttatgcgcgtgcgcaggggctttccgcgccagagatattgagctttggcaggtgctgtttagccgcggcgtagagggtgggatccgcgtttatcgttaa

SEQ ID NO: 226136 - DNA, 625 bp, Unknown
  Bacterial polypeptide expressing nucleotide sequence isolated from the Sargasso Sea
aatggataaaacttcaaaattatttgatgtatgggcaaagactggtcgctctgaagaaatggaaaagggacatggaactacagtaaatcaatttttagacaaactctcattgaaagaaaaattcagatttcttgacattggctgtggtaatggttgggtagtacgaaaaatgtcccaaaagtcatcttgtgtaaaagcaattggaattgataaaagtaaaatgatgattaaaaatgcaaaatcaaaaatttcctctacaaaagaaagtttttttgttactgatcttgaatcatgggatacaaaagaaaagtttgatataattttctctatggaatcattatactattctgtaccgatggagcctgcattgaaaaaggtattcaaattactcaaaaaaggagggactttttactgtggaactgatttttacagtgataatactttgactactagatgggtaaaagacatgaatattccaatggatttacgttctgaaaaagaatggaaaaaaatgttcagagagattggatttactactcgctcaaaacatgttacagatccaaaaaataaatccaaatggaaacgtgaatttggaactctatttgttattggcagaaagccttga

SEQ ID NO: 226137 - DNA, 730 bp, Unknown
  Bacterial polypeptide expressing nucleotide sequence isolated from the Sargasso Sea
aatgagtactactataaataaagcagaaattcaaaagttttcaagattagctgatgaatggtgggatgttaatggaaaatttaaacctctccatatgtttaatccagtgagaatcgagtacattacagacaagattaaaaatcattttaagcttcaaaaaaataaagggaattatttaaaaggtataaatattttggatattggttgtggtggtggactaataagtgaaccgatggccagactaggtgctaaagtaactggcattgacgcctctgaaaaaaatataaatattgcaaaattacattcaaaaaaaagcggtcttcaaataaattatttaaatacatctccagaaaatttagatgattttgagaaatatgatgtaattttaaaccttgaaattgttgagcacgtaaataatgttaatttatatattaaatcttgtcacaaattgcttaaaaaaaatggcctaatgtttaccgctactttaaatagatctttcacttcttatgtaaaagcaattattggtgctgaatatttattgcggtggctccctataggaactcatgattggaataaatttataaaacctgaggagcttgagaagtttttatttaatgaaaaattttctacattagacatttcaggtctaaattttaatccatttttaggaaaatggaaaaaatctaaaaatttgtcagtaaattatataatttgtagtctaaaaggttaa

SEQ ID NO: 226138 - DNA, 1094 bp, Unknown
  Bacterial polypeptide expressing nucleotide sequence isolated from the Sargasso Sea
aaagctacttaaaaaaaatcttaatttgaagttagttattaacccagacttatcgttccccgaagcttatatgaacggtgatataataattgagaatgctactttgagtgaatttttagatcttgctttcaaaaatgtgggaagaggtgaaattactacttccgcatatataattaagaaaatattacagctatggagatttataagcaattataattttcctttaaaatctaaaaaagacatacaacatcattacgatgttggaggtgaaaaaggtgaaaaactttacgatatttttttagacaaaaaacacagacaatattcttgcgcttattttaagaccccaaacgaaacacttgagcaagcacaacaaaataaattagaccatataattaaaaaattaaatattaagccaggtcaaaaattgttagatataggttgtggttggggagggttagcatttgagattgcgagacaaaaacaatgtgaagtattaggaatttctttaagtgaaaatcaaataaaatactgtaaagaaaaagcaaaagaacataatttagataatcaagtaagatttgaactgattgactatagacatgcaaaaggaaaattcgacaggatagttagtgtcggtatggctgaacatttaggtaaaaaattttataaaacttattttaaaaaaattaatgaactattaaaaaatgatggcgttggcttagttcacaccataggttctatagctcatcctcagccacctgccccctttattcaaaaatatatttttccaggaggagtagttccctctttaagtgatctaattagtcccatagaaaaaactggattaattgtaaatgatgtagaaactttaattagacattatgataaaactctggagggctggttatcaagatttatgagcaaaagatcagaggtaaaagacctatttgatgaaaaatttgttaagtgttgggaattttatctagccagttgtgcatctgctttcaaatatagagatcttgttgtttttcaattacagcttgtgaagaactttgacgcaattccaagcaatcgaagagactatatttattcataaa

SEQ ID NO: 226139 - DNA, 727 bp, Unknown
  Bacterial polypeptide expressing nucleotide sequence isolated from the Sargasso Sea
gatgactacagtaaataaagaggaaattcaaaagttttcaaaaatagcagatgagtggtgggatacaaaaggaaaattcaaacctttacacatgtttaatcctataaggattaaatatattaaagaaaaatgtatttcacattttaaattaaaagaagatcaccctaaaccactcatgcctttagagttactggatatagggtgtggaggcggcttgataagcgagccaatgtgtaggctaggagcaaaagtaactgggattgatgcatcaaataaaaatataaatgttgcaacacttcatgcaaagaaaagtggtctggatataaattatgtaaatacatcacctgagcaaaaagtaattaaaaaaaaatttgatgttgttttaaatttagaaattatagagcatgtagacaatgttgatttatttttggaatcctcaagtaaattattaaaagaaaatggcataatgtttattgcgaccataaatagaacttttgagtcttatataaaagcaatagttggtgcagaatatattttaagatggcttccaataggaacccacgaatggaataaatttcttagaccaaatgagatacatgaaagattaaaaaaattaaactttgaaaatattgaaacagatggatttaattttaatttatttttacaaaactggaaaaaatctaaagattgttctgtaaactatattattgtagctaaaaaaaattaa

SEQ ID NO: 226140 - DNA, 625 bp, Unknown
  Bacterial polypeptide expressing nucleotide sequence isolated from the Sargasso Sea
atggataaaacctcaaaattatttgatgtatgggcaaagactggtcgctccgaagaaatggaaaagggacatggcaccacggtaaatcaatttttaggcaaactctcactgaaagaaaaattcagatttcttgacattggttgtggtaatggctgggtagtacgaaaaatgtcacaaaagccatcttgtgtaaaagcaattggaattgacaaaagtaaaatgatgatcaaaaacgcagaatcaaaaatttcctctacaaaagaaagtttttttgttactgatcttgaatcatgggatacaaaagaaaagtttgatgtaattttttctatggaatcattatactattctgtaccgatggagcccgcattggaaaaagtattcaaattactcaaaaaaggagggactttttactgtggaactgatttttacagtgataatactttgaccactagatgggtaaaagatatgaatattccaatggatttacgttctgaaaaagagtggaaaaaaatgttcagagagattggatttactactcgctcaaaacatgtcacagatccaaaaaataaatccaaatggaaacgtgaatttggaactctatttgttattggcagaaagccttgat

SEQ ID NO: 226141 - DNA, 841 bp, Unknown
  Bacterial polypeptide expressing nucleotide sequence isolated from the Sargasso Sea
atgaatgtttcgcatcattatgatatttcggatgatctttatgacttatttttggatcctaaaagacaatattcatgtgcatattttaaaaatgaaacagatacattggaaactgcccaaaataataaaattcaacatataataaaaaaacttaacataaaaccaaatcaaaaagttttagatattggatgtggatggggttctctagcgatagatattgcaaaaagtgcaaactgtgaagtaacaggtattacactttcagaaaatcaatttaattactgcaagaaaaaggcaaaagaacttaatttagaaaatcaattgaactttaaattaatggactatagagagctcaatgaaaaatttgatagaatagtcagtgttgggatgtttgagcatgtaggaagaaaattttataaaaaatttttttcacaagttgaaaaacttttaaaagatgacggagtatcattaattcatactataggatcagtaaatccgccaagagatccacatccatggatcactaaatatatttttccaggaggttatactcctagtttaagtgaggtaacaacaccaattgaaaaagcaggcttaatcgttgcagatattgaggttttaaggcttcattactcacacacactaagacattggaaagaaaattgtattcgaaataaagacaaaataattgaaatgttcgatgaaagattttttaggatgtgggaattttatcttgctggttgtgagatggcatttaaatggggtgatcaagttgtataccaatttcaattaacaaagaattattcttctacgcctgttacaagagactatatttatcaataaa

SEQ ID NO: 226142 - DNA, 1139 bp, Unknown
  Bacterial polypeptide expressing nucleotide sequence isolated from the Sargasso Sea
cattgttgatagtaagaataacactcaccaatttggtagtggtacaggtaatttaaaaataagattaaaaaataagtcaatagaaaaaaaattatttagaaatccaagccttcattttggagagggttatatgaataaagaaatactaatagaggaagggtcaatagaggagttaattgatctgataacatcatgctatgatgattttataaaacataattctatttatagaatgtatgaaaatttttcaggctattttaaaatttttcaacagctgaatgaagttgtaaaatcaaaacaaaatgttgcacatcattatgatttaaaagaagatttgtacaaactttttttagataaagatatgcaatactcatgtgcttattttcataatgaaaatattagtttggatcaggctcaaatcgataaaaaaaatcatataataaataaacttcaaatttcagaaaaaatgaaagttttagatattggatgtggatggggcggtatggcaatcgaaattgctaaacagactggggcaaaagtaaaaggtattactctgtcagaaaatcaatttgagactgcatcacaaagagcacaagaagaaggtctatccgaaaagataacattcaaattacaggattatagagatgaaaatgaaacctatgatcgaattgtatctgttggaatgtttgagcatgtaggtattaaatacttcaaagagtatttaaaaaaaacatatgacttattaaaagatagtggtgtatttcttctgcatacaattggccaaagaggtgttccaacagcaacaagcccttggataagaaaatatatctttccaggtgggtatattccttctttatctgatattattcatgagactgaaaaattaaatattaacataactgatattgaaatactcagactccattatgctcacacgctaagtcgatggtataaaaatgttcaaaaaaataagagccaaataattaatatgtttgatgaaagattttaccggatgtgggaattttatttgctagccagcaaatactcctttgtaaatatgggaaacgttgtttttcaaattcaaatctctaagaatattaacaatttacctttaactagaaattatatgtataattgac

SEQ ID NO: 226143 - DNA, 784 bp, Unknown
  Bacterial polypeptide expressing nucleotide sequence isolated from the Sargasso Sea
tatgagtttgactgatgaaggacattacggtccaaaacaactaaatatgcttaaagtgatctggggtgaaggctatctatcacccggtggatctttggaaattgatgaaattatcggagatcttgatttatctaataaaaaaatcttagacatcggttgtggcacaggaggcgctgtttttcatttattagaaaaacataacgcagctgaagcaattggatatgacccagaacctcttgtaattgaaaaagcaaatgaattagctgcagaaaaaaatttatctgatagggctaactttcactgtattgaacctggtccaattcaagcggacgatgaatcaatggatgtagtatttagtaaagaaacatttattcatatacctgacaagaatgaactcatgaaagatattcatcgtgttttaaaaccaaatggactgttaacagttggagattggatgagaagtgatgacggccctccatctgagcaaatgatagaatatattaaagctgaaggattagactttttcatgtgctcacttgaaaaatatagagaagttttagaaaattcaggttttaaaataatttcaatgactgatcgtaatcaatggtatctagaaaaggttagaaatgaagttaaacaaattgaaggtccattatggagtaaggttgttgatgctataggtcctgaagagggtgcctatgcacttgatatatggaaaaagttattaggagtagtagaaaagggcgaacatcgaccaggtaattttagagcaatcaaagtatag

SEQ ID NO: 226144 - DNA, 685 bp, Unknown
  Bacterial polypeptide expressing nucleotide sequence isolated from the Sargasso Sea
aatgaataatattagaagtattagaaaagattgggatctcattgaatcattgataagagatagttcgcgaattttagatataggctgcggagaaggagatttgattcaacaacttgaaaaaaatcttgcagctaaagttcatggaattgaaaaaagccgagacttggccctaaaaggaattgccaaaggtttaaatgtaactcatggtgatgcagaaaaagatcttttacaatatgcaaatcatagctttgattatgtgattcttagtcaaacactacaagcaatgattgagccaaaaaaaattctaaatgaattattaagaataggatctaaagctattgtttcatttcctaattttgggcattggaaaatcagattgcaattactgtttaacgggaaaatgccaataactgaaggtctcccttattcttggtatgatacaccaaacatacatttttttaccttaaaagattttcaaaacctgtgtaacgaaatgaatattgttattgagaatagcattgggcttacaaataaaggtaagcaatttgctattaatggttcattacttccagcaaatataattacaaatgaagcaatctttcttcttagttacaagaactttgaaccaattaaactaaaatcaacaaataaaatttttactaaaaactcagctattgttaattaa

SEQ ID NO: 226145 - DNA, 1189 bp, Unknown
  Bacterial polypeptide expressing nucleotide sequence isolated from the Sargasso Sea
atgtcttttagaatacttaaatttatccttagaaaattaattaaatccaaatctatattaataaagtcagataattctgaatatttaattgataatggtaatgacgctgtaattcttaaaattaacaacaaaaaatttcttaaaaaaatttattatgcaccttctctagtgttaacagaaggatacatggataaagactatgagttaaaaaatgcttctttttatgaattttcagatctattgattgaaaattacaataaataccttgaaaaagtatctaaatctattttcttcagaatttttcttataattaatccatttttccaacttaattttgtcaaaaggtctaaaaataatatagccaatcattacgacttatctgacaaactctatgacttatttttagatgatactagacaatattcatgtgcctattttgaaaaagaaactgatactttgagcgatgcacaaaataataaaatgaatagattagctgataaactattacttaattcatctgataatgttttggatattggttgtggttggggctctttgagtaaaaattttgttgataattataagtgtaatgtcaaaggaatttcattatctgaagaacaaattaaatactgtaatgaacaacttgaaaataacaaaaataaggaaaaattaaattattctcttcaagattatagagatgaaaataatagttactcaaaaatagtatctgttggaatgtttgagcatgttggaaaacctttttacaaaacctattttaataaaatacatgaattgctatcagatgatgggatagctgtagttcacactattggtaatataaggactccaaagttaacaccggcttttataagaaaatatatatttccaggtggatatataccttcactttcagaaattatgcctgcaatagaaagatcaggattgatcatatctgacattgaggttttaagattacactatgctaaaacactctcacattggtttcaaaattttaaaaattctaaagatgaagttttaaaattatacgacaagcgttttattagaatgtgggaggcatatttaaatttaagtgaattatcatttattaagggtgaaaacgttatttttcagcttgtattaacaaaaaaaagggactcttttccattagttcgtaaaaaaataaattaaa

SEQ ID NO: 226146 - DNA, 892 bp, Unknown
  Bacterial polypeptide expressing nucleotide sequence isolated from the Sargasso Sea
atgattttagcaaaattatttacgaaaattttcaaagaaggtggaataatactaattgactctgaaaatcaaaaatatatttgtggttcaccaagacagatcaaccctataactttaaaacttttgaaaaaagatttaaattggaaaattttgctcaatcctgaacttgaatttcctgaaggttttatgagaggagatatagtcattgaaaatgcctcattgaaggaatttttaatggaagttctaaaaaatctaggaagaagtgaagttagcacagcaagtattttttttaaaaaagtttatcaagcatggagatttattactaatttcaattttccaggtaaatcaaaaaaaaatgttgaggctcactatgatattggtggaagaaaaggtgaaattctttatgatgtgatgcttgataagcaccatcgtcaatatagctgtggttactggaaagatgaaactaaaactttagaagaggcacaagaaaataaaatccaacatataataaaaaaacttgatattaaaaaaaatcaaagagttttagatattggttgtgggtggggcggcctttgttttgagatagcaaaacagtatgactgtgaagtaactggaatttcattaagcactaatcaaataaattactgtaaagagaaggccaagaagttaggtttggaaaatcaggttaaattcgaattaatagattatagattagtaaagggaaactacgatcgtattgtgtcagtaggttttggggaacacttaggagtaaagttctacaacactttttttaagaaaattaacagtcttttaaatgaaaatggaaatttcctgtttcatctaatttggtgttgtggacaaaccttctgctccaaatcaattcataaataaa

SEQ ID NO: 226147 - DNA, 600 bp, Unknown
  Bacterial polypeptide expressing nucleotide sequence isolated from the Sargasso Sea
aatgcagttagcaagattcttaaataaattatttaaagatgatgggtttgttttaatagatgcagacctaaaaaaatatattatcggaaatccaaaaaaggaaaatcctattactgtaaaattattagataaaaaacttaattataaacttttattatatccagatttataccttggggaagcatacactgacggaactcttataattgaaaatggttctctaactaattttttaaatattgctatgaaaaatatcggtagaaatgaaattaatacatttggtagaataataaaaaaaataagaggaacttacagatatttgacaaactttaattttgcaaaaaaatctaaggataacgttgcacatcactatgatatttcggatgatttatatgatctctttcttgatccaaaaagacaatattcttgtggatactttaaggatgaaaattctagtttagagacggcacaagaagataaaattaatcatataattaaaaaattaaatcttaaacctaatcaaaaagttttggatattggatgtggttggggctcactcgcaattgacatagcaaaaaagtctaaatgcgaagttacagg

SEQ ID NO: 226148 - DNA, 559 bp, Unknown
  Bacterial polypeptide expressing nucleotide sequence isolated from the Sargasso Sea
gatgaaatcatcaaatttgcaaaaaacattagctaaatctgaacagtatcttcctgctgaagatacattttttcttgcggatcatttggaaggtctaagtggtgattcagctcttgatattggttgtggttctggttatctaactgatattctaaaatcaacttttcgtttagtggttggaactgatattagttttaacactcttgttgaacaaaacttcaaaactcaaaatgtaatctgttgtaattctgctgatgcattgaacctagattttgatgttataatttgcaaccttccatatcttgccactgatgaaattatcgatgttgcaactgatggtggaaaagatggactagaaataccacaaaaaatcatctcttcagcactaccacatctttctaaacaaggaaaatttctatttgttacatcatcactatctgattacatgggattaattgattttgtacaatcaaaaaactttaaagcaaaaatcattgataggaagaaattattttatgaagaattaattattgtggaagtaaaacacttactttcttaa

SEQ ID NO: 226149 - DNA, 222 bp, Unknown
  Bacterial polypeptide expressing nucleotide sequence isolated from the Sargasso Sea
aatgaataatattaaaagtattaggaaagattggaaccttatcgagtcattaattagagaaaattcaagagttttagatataggctgtggagagggagacttaattcaacaacttgaaaaaaatcttacagctaaagttcatggaattgagaaaagtcaagacttagcgttaaaaggaattgccaaaggactaaatataactcaaggtgatgcagaaaagga

SEQ ID NO: 226150 - DNA, 730 bp, Unknown
  Bacterial polypeptide expressing nucleotide sequence isolated from the Sargasso Sea
aatgaaaaaattatacatttccaaagattactatgcgccaataaagagaaataataatttttcgaaggacgattactggcttgaaagtgttgatccagatgggaataaaaggaatcgtattgatgaaaaagaacaatatatatctgatatttcagctgagatggattacatcaacaagcttaagccaggtaaaattttagatattggttgcggattaggatggttgttatcggcagtagatgacgcttgggagaagcatggagttgaaatttcacaatacgcctcagaatatgcaactaagtacgcaaatattaaaaatgatgattttttaaatgttgattatgatagtaatttttttgatttaatagtaatgcatcatgttattgaacatatggaaaatcctattgaaaacttaaaacaagctataagaatgttaaaagatgggggaacgatgataatcgcaacaccaaattttgattcaggatgcgctagactttttggtaataattatcgattattgcatgactcaacacatataagcctcttttctgatgattctatgcaacgtatgttaagagatcattcattgctagttgattatgtggattatccgtattttaataccagatattttaataaagagaatctagacaaattattcaaaaccaatgaaatttcaccagcattttatggaaattttatgacattttattgtagaaaaaataaataa

SEQ ID NO: 226151 - DNA, 559 bp, Unknown
  Bacterial polypeptide expressing nucleotide sequence isolated from the Sargasso Sea
atgaaattatcaaatttgcaaaaaaaattaaaaaaatctgaacaataccttcctgctgaagatacattctttcttgcagataggctaaaggatctttgtggtaaatctgcattagacataggatgcggttctggctatctaactgaaattctaaactcaaattttcaattagttgttggaaccgatattagtttcaacaccctttgtacacaaaattataaaactcaaaatgccatatgctgtcattctgctgatgcattgaatttacaatttgatctcatcatttgcaatcttccttatctcgcaactgatgaaattattgatgttgcaactgatggtggaaaagatggattggaaatcccattagaaattatctcttcagcattgcctcatttagataagaatggaaaattcctgtttgtaacttcatcattatctgactatatggggctagttaattttgttaaatctaaaaattttcaagcaaaaattattgataaaaaaaaattattttttgaagaactgattattgtagaagtaaaacacttactttcttaga

SEQ ID NO: 226152 - DNA, 909 bp, Unknown
  Bacterial polypeptide expressing nucleotide sequence isolated from the Sargasso Sea
catggcgcttcgtcgagcgctctcgcgcggagcacgcgcggcgttcgccacgttcgacgcgccttcaacgagaacatgtggtctctcgtcgacgcgcgcgctctctcgcgcgcacaacaccgcgtcggcgtcgacgtcggcgagcgaagatgcgcccatcggtcaagtcgatgccagggaaaaggcaaagtttgagtccgacgccgcgctttggtggaacgaggacgagggcccgttcgcggcgttacacgccatgaatcctgtgcgcgtgcgattcattcgagacgcgctgatgcggcggtttgagaaggaattggctcagaacccgccctatgcggcgctgcgaggggtgaagattttagacgtcgggtgcggtggggggattttagcggagagtttagcgagattaggagcggacgtcacggcgatcgatgcgggggcggcgaatatcgcgatcgctgaagcgcacgcggcgttagatcccgacttggcgaagaatttgaggtacgaggcggtgaccgcggaggagctcgcgtctcgcggcgagactttcgactgcgtgacgagtttagaagtgatcgaacacgtcaccgatccgcttgaattcacgctatcgatcagtcaactcgtgaagccgagcggttcgctcttcatcagcaccatcaatcgcacggcgagatcctttgtgatggctatattagccgccgagcgcattctcggcatcgtgccgccgggaactcaccaatttacaaagtttttgacgcctggtgaggtggcggtgatggcgagtcgtgcggagtgtgagatgaaagagctcgcggggatggtctacgatcctctgcgcaacaagtggtcgctttcgtcagacacccagatcaactttatagccccactgcgtcaaggagacgc

SEQ ID NO: 226153 - DNA, 714 bp, Unknown
  Bacterial polypeptide expressing nucleotide sequence isolated from the Sargasso Sea
aatgactactactataaatagagaagaaattcaaaagttttcagatttggctgatgaatggtgggatgtaaacggtaaatttaaacctttacacatgtttaatcctatcaggatcgagtatattactgagaaaattaaacaagagtttaatcttataaatcgaaataataactttctaaaagaccttaaaattttagacattggatgtggtggaggtttaataagtgagccgttggcaaggttaggaggtgaagttactggtattgatgcctctgaaaaaaatataaaagtagcaaaattacattcaaaaaaaaataatttaaatattaattattttaataaatcccctgagcaattaaatgattctgagaaattcgatatagttttaaatcttgaaatcgtggaacacgttgaaaatgtagatctttatattaaatcatgtagcaatcttttaaaaaaaaatggcataatgtttactgctacattaaatagaacaataatttcatacattaaagcgatagttggagcggaatatattttgagatggttgccaataggtacacatgattggaacaaatttattaaaccagaggagctagagaaaaaattgtctttagcaaatttttgcactattgatgttaaaggcttagaattcaatcctttatttaacaagtggaagcaatctgataatttgtcagtaaattatataatttg

SEQ ID NO: 226154 - DNA, 712 bp, Unknown
  Bacterial polypeptide expressing nucleotide sequence isolated from the Sargasso Sea
atggcatcagttgtcattaaaaattgggacaataaaacttggttatcttcacaaaattatattaattcttttaataattttttaatcaaaaatactaaaattaactcaaattttaaaattttagatattggttgtggaagagggaagattttaggttctttaaaatcaagattaaaacttaaatataaacctttaggcatagatattgttaatcacaaagatagagataaaagaattaaatttaaaaaagcaaatattttaaatctgtctttgagaaaaagtcaaaagttcgatttaattatgattaaacaaacaattcatttaataaaattaagtaaggtaaaaaaattattaaaatcattagaaaaaatattaaatacaaaaggtaaaattataatttttactttagatacagaaaataacgaaattccaacttttaaattaatgaaacttaaacttaataaatctcttataagagataaaaaaatatttaagattattacaaatttatatcctcaaagaattcaaaaaaaatttatttttaatgtaagaataagcaaaaagaaatatctcgatatgattaaaaatagatatatttctactttaatacctttatcaaaaaaacaacttatacaaggtattcaagaaatcgaattaaattataaaaataaattaaaatttaaagacaaattaacttgtattattttataaa

SEQ ID NO: 226155 - DNA, 595 bp, Unknown
  Bacterial polypeptide expressing nucleotide sequence isolated from the Sargasso Sea
atgaaaaaagaatttaaagtaattgcagatttattacctaataatacgagggttcttgatataggatgtggagacggatctttaatgcatcttcttagaatagaaaaaaacatagaggtacgtggactagagcttaatcaagataatgttaaagaatgtatttataaaggtttgccagttattcagggtaatgcagaaactgaattacatcaatttcctgacaaatcatttgactatgttgtgctgagtcaaactctacaagcattttatgagccagagaaagttttaaaaaatcttttaagaataggaaaatcagttattatctcaattcctaattttggctattggaaagtaagaacaaaacttttactttttggtgaaatgccggttacaaagacactgccaaatacttggtataatactcctaatttacacatgtgcacaataaaagatttatttaatttttgtgatgaaaaaaatattattattaaaaaagttgttggagtaaatgaaaataaaacttcgttaataagtaaaagtaatttagaaattaaaaatcttttttcaaaagttggtatttttttaatcagttaat

SEQ ID NO: 226156 - DNA, 724 bp, Unknown
  Bacterial polypeptide expressing nucleotide sequence isolated from the Sargasso Sea
aatgaaaaataaaattaaagaattaaagaactgggataataaaacatggttatcttcatcagcttatattaattcatttaatatttttttactaaagaagaaaaaactaaataaaaattctcaaatattagatattggatgtggtagaggtaaaattattggtgctatatctaggaagattaaactacttaataaaccaattggaattgatccgatagttcataaggatgttgataaaagtatagattttagaaatgaggatgtatttaaattctttaaaactaatcaaattaaatttgatttaataatgattaagcaaacccttcatttttttaataaaaataaaagatctaaattaataaaagtttgtaaaaataatttaaagaaaaatggtgtgttaattattttttctttaaataccataaataatgaaatcccatgttttaaactgatgaaacaaaaactaaataagggattaattagagattcaataatgattaaatctacttgtaaaatattaaaaaattataaaattgataaatttaagtttaaagtttcaataactaaaagtaaatacattcaaatgttaaaacagagatatatttcatgtcttgttaatcttaataaagaacaaatcaataaagggattaaagaaataaaagatatttaccctaataagattttattcaaagatattttaatttgtttaaaatataagagttaa

SEQ ID NO: 226157 - DNA, 616 bp, Unknown
  Bacterial polypeptide expressing nucleotide sequence isolated from the Sargasso Sea
ttgtcatttttagcggacaccccatcacaagagcctgatacggtgcctagcgaagcgcttgataagggagaagcgcttgataagggaaaagcgagcaataaagacaaaccaaagaaacgaggttacgcactagacataggttgcggatgcaccaatcgttttgtcccggttatcgaaagcgcagggctagcttacgaaggcattgatgtttccaaaaatatgctggccattgcgacgtcccaattacccgctcatatcttctattgcgccgacgtgtgtacattcactatccccaagcactattcgtttattagcgcttgggatagcttttggcatattcccctaacgcagcaagagcctttgcttaagaagctagtggatcacttagacgatgacggtgtgttgctttttagctgtggaggtacagatgaaagcggccaacacacaaacgaagtgatgggcccagaagtctactacgcctcgctggggctacatagatacatagaaatattgatagaagcaggcgggtttgttcgtcacgttgaattcgatcagcaccctgaactacacactattatcattgtgcaaaaaagaaccgcgcaaaaaacacagtagc

SEQ ID NO: 226158 - DNA, 817 bp, Unknown
  Bacterial polypeptide expressing nucleotide sequence isolated from the Sargasso Sea
aatgcaatatatatgtcctttgtgcgcgttacccctcaccctaacacaacgaacttggggatgcccgcaggcacacaagtttgacatggcgaaagaaggttatgtcaatttgcttcccgttcagaaaaaaaactcgaaagatccgggtgataatcagcaaatgatgtttgctcgtcgggagttcttaaatgcgggttattatcaaatcttaagtgatagagttaatcaactggcactccaatatgccagtagtgcacagcagatccttgatataggttgtggtgagggttactacagtcatcgtttatataatgcccttgttgctcatcatttttgttatttacagggcgttgatatctctaagtcggcaataaaatatgcagccaagcgctatcctaacttaagcttttgtgtagcgagtgcctatgaaatgccgatcccatctaatagcattgatttagcgattcgaatttatgcaccatcaaaagtagaagaacttcagcggatcatggcacctagcggcattcttatcacggtatcgccagggcctttgcatcattttgcgctaaaacaacagatttatgaccagccaagattgcatcctgagtctgaggccagagttgatggatttgaatgcctacatcaagagcggcttagcgcgcaactcgatcttaatgacagtaaagatatcggcaattttctcgaaatgactccctatgcgtggaagtttaccgcagagcagaaacaagcattttctcagcgcggattaagctgtgagttagatttccagattgaagtacatcgcatttcagtctag

SEQ ID NO: 226159 - DNA, 1132 bp, Unknown
  Bacterial polypeptide expressing nucleotide sequence isolated from the Sargasso Sea
aatgttgtctaatataagccacggttctttaaaagtaattactcctgacggtaagcatcatcatttttctggaaccaaaactggagaagatgtttatgtatgtataaatgattggaggttttgtgatgagctgcttttgaaaggagatgtgggattgggagaatcatatgttttagggtattgggactgtgaaaacattaacatgcttgttaagtggggtatagaaaacaaagaaccattggagagagccataaaaggctcttttacaaaaattttgttctacaggtttaaacactttctgaaaagaaattctaaaaaaggcagcattaaaaacatacatgcgcattatgatattggtaacaaattttatcaattatggttggactcaaccatgacttactcaagtgcaatctttaagagttcaaatgaaaaattatcagaagctcaggaaaataagtatcaaaacattttaaataaacttaagcctaaagatggagaccatattttagatgtaggatgtggatggggcggtttcatggaatatgctgcaagaaataggtttaaagttaccggcattacgatatctcaagaacaatatgagtatgcaaaaaagcgtttatcaaaatatggagaccttgctgaagtaaagttacttgactatcgtgacatcgcaggtaaatacaatcatattgtgtcaattgaaatgtttgaagcattaggatttcactactggaaaaagtattttaatgtcctttattcaatcttacgtcccggtggtaaactgattattcagagtattaccataaataatgatgattttttgtcatataaaaaatgcagcgacttcatacagcagtatatttttccgggaggtatgcttccttcgtcaaagattgtaaaggaaattgccaccaaacaaggtttcctgcacaatgataactttgaatttggattggattatggagctactttaaaaaaatgggaagaaaacttttcgaatgctctggataaaatcaaaatgctaggatttgatgaaagattcataagaacatggcgtttttatttgaagtactgccaagggggatttgagtctaagaaactaagtgtatctcagtttaattttgtaaaataa

SEQ ID NO: 226160 - DNA, 1192 bp, Unknown
  Bacterial polypeptide expressing nucleotide sequence isolated from the Sargasso Sea
atgcaacttgctagatttttaaatagtgtatttaagaaagatggctttatattagttgatgctaactcaaaaagttacattattggaaacccaaaaaaagaaaatcctattaaacttaaaattcttaataaaaaacttcattacaaattattatttcatccagatctttattttggtgaagcatatacagatggtgaaattaaaatagaaaatggaagtcttactgattttctagatcttgcacttatgaactttggaagaggagatcttaatttctttagttatttaataaatagattaagaggatcttaccgatatttaacaaattttaattttataaaaaaatcgaaaatgaatgtttcgcatcattatgatatttctgatgatctatatgatttatttttagatccaaaaagacaatactcatgtgcttattttaaaaatgaagatgaatctttagaagatgcacaaaataataaaataggacacattataaaaaaattaaatatcaaacctaatcaaaaagttttagatattggttgtggttggggatcattagcaattgatatagcaaaaagtgctaattgtgaggttactggaataactttatctcaaaatcaatttaactattgtcaaaaaaaagcaaaagaacttaatttagaaaatcaacttaactttaagttaatggattatagggagttggatgagaagtttgacaggatagtgagtgttggaatgtttgagcatgtaggtagaaaattttaccgtaaattcttctcacaagttgaaaaattgcttaaagatgatggagtttcgctgatacatactatcggttcggtaaatccacccagggaccctcatccatggattacgaaatatatttttccaggtggttacacaccaagtttaagcgaggttacaaccccaattgaaaaagcaggtttaatagtagctgatattgaagttttacgacttcattattcacatactctgcgacactggaaagaaaactgtatcaaaaataaggaaaaaataattcaaatgtttgatgaaagattttttagaatgtgggaattttatttagctggttgcgagatggcatttaaatggggtgatcaggttgtttatcaatttcaattaacaaaaaattacagatctactccagttacaagagactatatttatcaataaa

SEQ ID NO: 226161 - DNA, 631 bp, Unknown
  Bacterial polypeptide expressing nucleotide sequence isolated from the Sargasso Sea
aatgaagcaagagtcaataaacaaaattataaacaggtatagaaagagaatttctgagtatgggacaacatttgaaagtcttggatcaggttctttagagcatcagtctattagatttgagatgctcaagacaggaataaagccaggcgattcggttctggatattggttgtggattaggtgacttttaccactatcttctatcgtgtgatatagatgttgattaccatggggtagatatagttcctgaatttattaaaacagctgaggagaaatatccccaagcagaattccaggttagaaatattcttgaagaaccattcaaagatgattctttcgattttgttgtatgttcccaagtcttaaatttcaagttaagagaggaagataatcttcagcatgctaaagatatgctaaagaatatgaatagtttcagcagaaagtccgttgcatgtgactttctaacaagctatgtggactatgaggaggatcacttattttactataagcctgagcagatatttgaattctgtaaatcactaactaagagggtaaatctaattcactcctatcctttatttgagttctgcatattcttatataaagattttgatggatggagaaatgagtaa

SEQ ID NO: 226162 - DNA, 727 bp, Unknown
  Bacterial polypeptide expressing nucleotide sequence isolated from the Sargasso Sea
atgactacaataaataaagaggaaattcaaaagttttcaaaattagctgacgaatggtgggatgttaatggtaaatttaaacctttacatatgtttaatcctatcagaattgaatatattttagacgaaatttcaaaacattttaaattagataaaaacaaaaaatttttcctcaaaaatttggagattttagatattggttgtggaggtggactgataagtgaacctatggcacgcttaggaggtaatgtaacaggcatagatgcctcagaaaaaaatataaaagttgcatctcttcatagtaaagaaaataatttaaagattgcttatttaaataaatctccagaacaattagatgataaagaaaaatttgatataattcttaatcttgaagtcgttgaacatgtcgataatttagatctatatcttaagtcttgttataaattattaaaaccaaacggattaatgtttaccgcaacaattaatagaacatttacatcttatgttaaagcaatcattggtgcagaatacatattaagatggctgcctattggtacacatgattggaataagtttattaaaccagaagaaatgcaaaagaaattggtcgatataaatcttttaacaaataatattaaaggactagaatttaatcctatttttaataaatggaaaaaaactgaaaatctctcagtaaattatattattagtagttataaaaattaat

SEQ ID NO: 226163 - DNA, 772 bp, Unknown
  Bacterial polypeptide expressing nucleotide sequence isolated from the Sargasso Sea
atgctattagcaagattactttctaaaatttataaaaaaaatggaattattttaatagattcccaagaacaaaagtatatttgtggcaaaccagatctaaaaaatccacttacattaaaattattaaagaaaaatttaaattggaagctagcactaaatccggatttaaacttccctgaggcttatatacgtggtgaaattaaaattgaaaatggttctttattggatttattaaatatgacttttgaaaacttaggaagagatgaaattaatatgtatggttatattataaaaaaaatttttcatagttggagatttcttacaaactataattttccaggaaaatcaaagcaaaattctaaatatcactacgatataggcgaagaactctatgacctttttttagataaaaaacatagacaatattcatgtgcgtatttcacaaaagagaatgaaagtttagaggatgcacaacaaaataaaattaatcatataattaaaaaattaaatttaaaacctgggcagaaagttttggatataggttgcggatggggagggatggcatttgaaattgctagacaaagtaaatgtgaagtaaaaggaatatcattaagtgaaaaccaaattaattactgcaacaaaaaagctaaagaattaaatatggataatcaggtacattttgaattttgtgattatcgttcaataaacgataaatttgatcgaattgttagcgtgggtgcatttgaacatttcggggaaaaaattttataaa

SEQ ID NO: 226164 - DNA, 1192 bp, Unknown
  Bacterial polypeptide expressing nucleotide sequence isolated from the Sargasso Sea
aatgcaattagcaagattcctaaacagtgtttttaagaaagatggatttatattagttgatgctaattctaaaaattatattattggaaatccaaaaagtgacaatcctattaaagttaaaattttaaacaaaaatcttaattataagctgttatttcatccagatctttattttggagaagcttatacggatggtgagatagttattgaaaatggaagtcttactgattttctagatttatcattaatgaattttggaagaggggatttaaatttttttagttatttaatcaatagattgaggggttcttatagatacttaactaatttcaattttattaaaaaatcaaaaatgaatgtttcgcatcactacgatatctcagatgatctttatgacttgtttctagatcctaaaagacaatactcttgtgcttattttaaaagcgagaccgatagtttagaaactgcacaaaacaacaaaattcaacatataattaaaaaattaaatataaaaccaaatcaaaaggttttagatataggatgcggatggggttcactagctatagatattgctaaaagcgcaaattgtgaagttacaggaataacactctcagaaaaccaatttaattattgcaaaaaaaaagcgaaggaacttaatttagaaaatcaattaaattttaaattaatggattatagagaacttaatgaaaagtttgacagaatagttagcgttggaatgtttgaacatgttggtagaaaattttataaaaaatttttttcacaagttgaaaaattattaaaagatgatggtgtatctttaattcatactattggatcagtaaatccaccaagggatccacacccatggattacgaagtatatatttccaggtggttacactccaagcttgagtgaagttacaacgccaatagaaaaagcaggtttaatcgttgcagatattgaggttttgaggatgcattattcgcatacccttagacattggaaagaaaattgcctcaaaaataaagagaaaataattcatatgtttgacgaaagatttttcagaatgtgggaattttatcttgctggttgtgagatggcatttaaatggggtgatcaagttgtatatcaatttcaattaacaaaagattattcatcaactccagttacaagagactatatttatcaataa

SEQ ID NO: 226165 - DNA, 277 bp, Unknown
  Bacterial polypeptide expressing nucleotide sequence isolated from the Sargasso Sea
atgaaaaaggaatttaaagtcatctctgatttgattgaagaaaaatcaagagcacttgatattgggtgtggagatggaaatttaatggaatatttattacaaaataaaacaaaagatataagaggattagaaatatctaaagaaaaagtacaaaactgtctttcaaaaggattggctgttatagaaggagatgctgaaaacgatttaaaacagtttccaaataaatcttttgactatgttattttaagtcaaactcttcaagcctttttaagtcctg

SEQ ID NO: 226166 - DNA, 1135 bp, Unknown
  Bacterial polypeptide expressing nucleotide sequence isolated from the Sargasso Sea
atggatgcaaattcaaaatcatacataattggaaagccaaaaaaaaaaattccaataagacttaagattttggaaaaatcattacattggaagctattaataaatccagatttatatttaggcgaaggttatatggatggatcaattgtaattgagaatggtacattgaccgagtttttagatatagctcttaaaaatgttggtagacaacctaccaatgaaataacaaatatattagcaaggtttagaagagtttatagatatataacaaattttaatttaattggaaaatcaaaagaaaatgttgctcatcattatgatatttcagaaaagttttatgatttatttttagatgaaaaaagacaatactcatgtgcttactttaaagatgtagataatacactagaagaggctcaaaataataaaatagatcatataattaaaaaattaaatcttaaacctaatcagagagtattagatatagggtgcggatggggaacgcttgctattgatattgcaaaaaaaactcaatgcgaagttgttgggattactctatcagaaaatcaattagagtacgcaaaacaaaaagctagagaaacgaacttagagaatcaattagaatttagacttgtagattataggcaaattaatgaaaaatttgatcgtgttgtaagtgttggaatgtttgaacatgttggaagaaaattttataaaaaatattttaataaagtttatgattttttaaatgaagatggtgttgcgctaattcatacaattggctcgataaacccaccaagaggccctcagccttggattacaaagtatatatttccaggaggatatactccaagcttaagcgaagtatcattacctgttgaagaatctggtttaattatatctgacttagaagttttgagaactcattaccaacatacactaagaaattggaaagaaagatttatttctaaaaaaggagaagttttagaaatgtttgatgaaaaattttttagaatgtgggaattttacttagttggttgcgaaatggcctttaaatggagtgatcaggttgtatttcagtttcaactaacgaaaaaatttaaagcaactcctataacaagagactatatttattaat

SEQ ID NO: 226167 - DNA, 793 bp, Unknown
  Bacterial polypeptide expressing nucleotide sequence isolated from the Sargasso Sea
attgagttttgtaactattaattgtccagtttgcgataacgattattttagtatttttaaagaagtttttgatgatagatatggggagcctaataaatataatctggcaaaatgtagtagatgtagtcatatatcaacatatccaatattagatcaaaaagaattaggagaactttatagtaaatactatccaagaaaaaatataaattacaaagatgttcaagcaaatgtaaaattaaataaaaattttttttcaagattcttaaattggtttcaaggaataagtaatcaaggccaactttacgccaaaaaaaatgatcaagttttagacataggttgtggagattgttcttctttgatctatttaaggaaattaggtgccatcccatatggagttgaagctgacataaatgtaaagccaattgctaaatccttaaatttttcagtgcattttggaggtattgaggataaccctttttcaaaagtattttttgatctaatagttatgaatcaagttcttgagcatatgcctgaacctgcaaaaactttaaatttaattaaagagagattaaaacgaaaaggaagaattattatagttattcctaacaacgaatctttttggcataaagtaacaggatataaatggataaattggcatgttccatatcatttgcatcattttaaacagaaaaatattgagagaatgctaaggaaaaatgatttgaaaatcatcaaaatcccgaaacaattacaccaaatatatgggacatttttacaaataaagcactttttt

SEQ ID NO: 226168 - DNA, 967 bp, Unknown
  Bacterial polypeptide expressing nucleotide sequence isolated from the Sargasso Sea
atgcaattagcaagttttttaaatagaatatttaaaaaaggtggttttatattaacagatgctaattctaaagattatataataggcgaacccgataaaaatcctattagacttaaaattttaaataaaaaccttcactataaactattgttacatccagacttatattttggagaagcttatactaatggtgagatcataatagaaaatggatcattaactgatttcttagatttatctttaatgaatattggaaggggagaattaaatttttttagttatcttataaatagacttagaggatcatacagatatctaacaaattttaattttattaagaaatcaaaaatgaatgtttcacatcattatgatattaaagatgatttatatgatttgttcttggatccaaaacgacaatactcatgtgcttactttaaaaatgataatgatgatttagaaactgctcaaaataataaaattcaacacataattaagaaattgaatattcagcctaatcaaaaagttttagatattggctgtggctggggttctttagccatagatatcgctaaaagtgctggttgtgaagtaacaggtataacactgtcagaaaatcaattaaattattgtaaacaaaaagccaaagaaatgaatttagaaaatcaagtaaaatttaaattaatggattatagagagcttaaagaaaaatttgatagaatagttagtgttgggatgtttgagcatgttggaagaaaattttataaaaaatttttctatcaaattgaaaaattattaaaagatgatggagtttcattaattcacaccattggttcagttaaccctccaagagatcctcatccttggattacaaaatatatatttcctggtggttatacaccaagcttaagtgaggtaacaacaccaatagaaaaagcaggattgattgttactgatatagaggtttaag

SEQ ID NO: 226169 - DNA, 946 bp, Unknown
  Bacterial polypeptide expressing nucleotide sequence isolated from the Sargasso Sea
gatgcaactagctagatttttaaataatgtttttaaaaaagacggatttatattagttgatgcaaattcaaaaagttacattattggtaatccaaaaagtgaaaatcctataaaattaaaaatattaaataagaatcttcattataagttattatttcatccagacttgtattttggggaagcttatactgatggggaaataattatagaaaatggaacactaactgatttcttagacctttctttaatgaattttggtagaggagatttaaattttttcagttatttaataaacagactaagaggctcttatagatatttaactaattttaattttataaaaaaatctaagatgaatgtttcgcatcactacgatatttcggatgatctttatgacttatttttagatcctaagagacaatattcatgtgcatattttaaaaatccaacagatacattggaaactgctcaaaataataaaattcaacatataataaaaaaacttaacataaagccaaatcaaaaagttttagatattggatgtggatggggttctctagcaatagatattgcaaaaagtgcaaactgtgaagtaacaggcattacactttcagaaaatcaatttaattactgcaagaaaagagcaaaagaacttaatttggaaaatcaattaaactttaagttaatggattatagagagctcaatgaaaaatttgatagaatagtcagtgttggcatgtttgaacatgtaggaagaaaattttatagaaagtttttttcacaagttgaaaaacttttaaaagatgatggagtatcattaattcatactataggatcagtaaacccgccaagagatccacatccatggattactaagtatatttttccaggaggctatactccaagtttaagtgaagtaacaacaccaatgaaaaagcaggcttaa

SEQ ID NO: 226170 - DNA, 787 bp, Unknown
  Bacterial polypeptide expressing nucleotide sequence isolated from the Sargasso Sea
atgagtataacagacgaaggtgaatatgggaagaagcaaattgatactctggaaatgatatggggtgagggttatttatctcctggaggtgcttctgaaattgatttgattttaaatgataaatcattaaaaaataaaaaaattttagatattgggtgtggttgtggtagcgctgcattccattttatcaaaaatcattcaccaaattatgttttgggggttgacgttgaggaaatggttattgataaagctaacgtgcttaaatcaagtttaatagaaaaaaagaaagttgattttaaggttattcaaccaggtgaactgccatttgatgatctttcttttgatgtaatatttagtaaagatacgtttttgcatattcttgataaagagaggttagtagaggatttgtatagagttttaaaaccagatggatttttatgtgttggtgactggatgcgaatagacgataatgcgccttctaaattaatgcaagaatacataaaattagagggactaagcatgaacatgtgttcacttcagagatatggtaatgcccttaataatgctggatttaataatataaaacttactgacaggaataaatggtatttaaatttagcaaaaaaagaattaaatgatttatcaactatttataaagaaaaattaattaaaatacttggtattgaggatgctgaaggcacaataaatatttggaagaaaatgattgaagttcttgagaagggtgagcacagaccaggtcatttttatgcagaaaaacgaacttaaa

SEQ ID NO: 226171 - DNA, 595 bp, Unknown
  Bacterial polypeptide expressing nucleotide sequence isolated from the Sargasso Sea
aatgaaaaaagaatttaaagtaattgcagatttattaccaaatgactctagggttcttgacataggatgcggagacggatctttaatgcatcttcttaaaatagaaaagaacatagaggtacgtggactagagcttaatcaagataatgttcaagaatgtatttataaaggcttaccagttatacagggtaatgcagaaactgaattacatcaatttcctgataaatcatttgactatgttgtgttgagtcaaaccttgcaagcattttatgaaccggaaaaagttttaaaaaatcttttaagaattggaaaatcagttattatttctattcctaattttggctattggaaagtaagaacaaagcttttactttttggtgaaatgccggttacaaaaacactaccaaattcttggtataatactcctaatttacacatgtgtacaataaaagatttatttaatttttgtgataagaaaaatattattattaagaaagttgttggggttaatgagaataaaacttcattgataaaaaaaagtaatttagaaattaaaaatcttttttcaaaagttggtatttttttaatcagttaa

SEQ ID NO: 226172 - DNA, 706 bp, Unknown
  Bacterial polypeptide expressing nucleotide sequence isolated from the Sargasso Sea
ctggctagatttttaaataatgtttttaaaaaagatggatttatattagttgatgctaattcaaaaaattacattattggaaatccaaaaagtgaaaacccaataaaagttaaaattttaaataaaaatcttcattataaattattgtttcatcctgatttatactttggtgaagcttatacagatggtgaaataactattgagaatggaacattaactgattttttggatctttctttaatgaattttggaagaggtgacttaaatttttttagttatataattaatagattaagaggttcttatagatatttaactaattttaattttataaaaaaatctaagatgaatgtttcgcatcattatgatatttcggatgatctttatgacttatttttggatcctaaaagacaatattcatgtgcatattttaaaaatgaaacagatacattggaaactgctcaaaataataaaattcaacatataataaaaaaacttaatataaagccaaatcaaaaagttttagatattggatgtggatggggttctttagcagtagatattgcaaaaagtgcaaactgcgaagtaacaggtattacactttcagaaaaccagtttaattactgtaagaaaaaagcaaaagaacttaatttagaaaatcaattaaactttaagttaatggattatagagagctcaatgaaaaat

SEQ ID NO: 226173 - DNA, 682 bp, Unknown
  Bacterial polypeptide expressing nucleotide sequence isolated from the Sargasso Sea
ttgcgtcgtttacacaattcggaaaagcgaaaactcatagagagtgtcgctaaaccgggatatagtgtactcgacgtcggatgtgggtttgggggtgatcttcaaaagtggaatggcgttggtgtgaacatcagtatgtgtgaaccatccgaagaagcactcaaagaagctaagtcacgtgcgaaaaatatgaagatacgtgtaaacttttatcacggagatatacacgcgtgtccgaatagaaaatatgatatcatctgttataattttgctcttcattatatttttcagtcacatggacttttcatgtcaactcttcgcgaaataaaaaaaagaatgaaacctggtggtatgtgtattggaattattcccgattcagaaaaaattttatttaaaacacctttacacgatacgtatggtaatttttttaaaatgaagtcaacgagcaatggagatttcggtgaaaaattatttgttcatttagtcgatacaccttattatgctgatggaccaaaatcagaaccgatcgcacacaaggatttactcgtgacacacatggaaaataacgggttttctatggaactatgggaaggactgtcaggaaacccgatttcagaattgtacagtaaatttatgttcgtatatagaaatgataactctgatcgctcttctggtgattaat

SEQ ID NO: 226174 - DNA, 589 bp, Unknown
  Bacterial polypeptide expressing nucleotide sequence isolated from the Sargasso Sea
attggccatacttactcattttggattaacggcgtcttcaatggtcttagacatcggctgcggctgccttagaggaggcaggtggctcattccctacctaaattcggactgttacttcggtgtggagcctaatgtagaaatgcttgagataggaaaaaaaatagtaatcgattctaaaatactacaagataagaaaccaaaattcaacacgaattcagacttcgagttcgacgtattcggaacaactttcgattatttcatcgcaagatcaatatggacccattcttctaaaaaacagatagaaaagatgcttgatcaatttgtcagacattcgtccccctcggctagattcctgacttcctacatgaggccaagaataccattcctcgacggctacaagggagagagttgggttggcaagagtcacgaatctgatcaaccgggaattgctaggcatagtctaagatggatcgagaaggcctgtttaaacaggggactgaaggtaagtagtatagatgagccaaagctgaactacggagcacaaatatggctgttgatagagaggacgcaggaggatactgacctctaa

SEQ ID NO: 226175 - DNA, 1141 bp, Unknown
  Bacterial polypeptide expressing nucleotide sequence isolated from the Sargasso Sea
atggaacttagccagtactacactcccacatcatttagctcaatattaattgctaatatgctcacaatagatgccgatagtgttttggatattggttgtggtcaagcgagcttgttagaggctgcccggcatagatggagcacggctaaacttattggatatgatatcgatccaacaaattacagtttgaaagggaaaaatttacacattggctttggcgatggattagatccagacttatcatctaaaattttagatacttttggtaatattgatatttcagttgctaaccctccatatacaagtgtagatatgaatagagggatagtaagaatactcaaacaagcatgcctatttgattgtcttcctcgaaatataaaaaagattccctcagaaattgtttttctagcacaaaattttttagttttaaaggattgtggtgagctcggcgcaattttacctgctagtataataagtggtgaaaaatggaaacatcttagggagtatttaataactgaaaaaaggatcggtaaagttattcagttgcctaagaaagctttttctaacacggaggctgcaacatttgcggttgttttagataatagaaaaagtaatagtgactctattgaactaagtagtattgatagcaaaacttctttgaaaattgataatgtaagatgtattaagaggttggattattgctatcattcaaatgggttaaatatgcacatttcaaaagtaaatgatggtttgataatttttagaggtaataaatcatctaaagaaattacttctagttcagagccatttatacatacctctgatttgaaaaatatttttcagatattaagttttgaaaagcgaaattatcctaaaggtgcaaaggtagcaaagaagggagactttgttgtatctcgcgttggttctagatgtataggtaaagcagcttatattaatgaaggggaagtggaagtatcagattgtataactgtattaagtggattagacaaggaattatatatcccattttttaaatttggaaagttttatgaaaatgcgttgtctaatgcacttggaactggtgctcaatatttaacttttgaaataatcagggaggcactggggatgtatgacttttaaa

SEQ ID NO: 226176 - DNA, 952 bp, Unknown
  Bacterial polypeptide expressing nucleotide sequence isolated from the Sargasso Sea
ctggttaccagcaaaaccgtcgcatccgcgtcgtcattgaacgatcggcgtcgccagccattcgcggccgttcgaggccaactgcaaaacgattacgaatcgcgggtcatggaggcctaccaggacgatccggcgcagtggagcaaggcgattggcgatcgcctctggttccagttcggcgtctatgacgatccccagtcgcccaggccggccgacctcgacgaatcgggcctcaggtatttcgaacggcaactgaagatcgccggcctggacacgcccgggcgccagccgatcaaccggatactcgacatcggatgcggctggggaacggtgctgcgcgatctgtccgagcggtttcccggctgtcatcgcctggacggcatcaacatcagcgatcgccagctcgaatactgcgccgaagtcaacgccgcgcgcggcgtctccgacaggatcaacctgttccggtgcaatgcactggacatcgacctgctgccggacttcgacgtgccctacgacctcgcgatcatgcgcggcgtgatctcccatttcccctatgatctcttcgagatcgtgatggccaagttgcgccggcggctggccgcaaacgggacggtcatcgtttcggataacttatataacgtcgacctctccgaataccgttccgatacgcccgacctggtcgacaggctcgcgtgcaagtatcgcaagacgcccgcatacctgcgccaggtgttcgagcaaagcggcttccgcgtccacgacatgcaggtcctgccgaaccggacggacgcgacgcgatggctgctggacgttcaggacaacatcgagcgccatttcccgacgggcgcggtcggcgcgctggaagaactccgcgtgatgtgcgaaagcctggccgtcgccatcgtcaagcgtcaggtttccatctacagcttcgtgctcaagcacggttgac

SEQ ID NO: 226177 - DNA, 1826 bp, Unknown
  Bacterial polypeptide expressing nucleotide sequence isolated from the Sargasso Sea
ttatgatacagatattcttcactcattagcatcaatacatatagccctgaaggaagaaaatgatgcaattcatttattaaataaagttaaacaattagaaaaagatacagcaactacatatttttttttaggacttgcttataataatttaaaagatgaaaaaaatattatccgaagctttctagatggcgctaaaaaagatccacaaaataaagcaatagcaaaatatcttaactcttatatgcttacatatctcgattttaaaaatgttcctcataaagaagatattatgattttctatattaatactatcgaatttaatgttttagaaattgaagacataaagccagttgcgcaagaatttttaatacaggaatttgattttataaagaatattgatctaaaaaatttaaatattgaaaacataaaaaataaaatattcacatctataaataataagcttttattacagattattgaaaacacaagaatatcaaatcaatttttagaagaattaatattaaaactttacattgcaattattacgctactcaaaactaataattttagtaaagttgaagaattaatattaataaacttttttaacgctctaagaaaacaaaacatacttaaagaggtgctatggattaaatcaaatgaagaattgtcaatcattaatgaacataaaaaagaaattataaataaaatagaaaaaaataaaaatttaactgatttagagtttttaagtttttacaaacaatttgttaatgaggaagatcaaaaagctgataaaatatttgatacctataaaaagaaaaatcaagctatagctgaagaaattgaagatatctcaaaaatgcaaaaaatcgataagaaattcgataaaaaactatctataaataaagaaattaaaaataaaaatactatcgaagttatggaatattataacttatttccttgtaagccttggacaaaagtaaaaatagatcaaaaaatagcttttgaaaacttcctaacaaatgatcttcttccaacaaaaatattaggtaaaagagaaatatttaacaaaaaagatacttttaatgttttagatattggttgtggaacaggaagagatgcgattttattaagttcaatagaaaactctgaaatagatgcgcttgatgttagtaggcaaaatttaaaatatgcattaacaaaggccgatgagcataatacaaaaaatataaacttcatgaaacttgatttcttggacattaaaataatgaaaaagcaatatgattttataaactgttctttttcccttaatgaatttgaagatgtaaataaagttttcaaaatgatgaaagaaattttaaaacctgggggatttatacgtttaagaataaatagtgagcttggaaataagaatgttgaactactcaaatcaaaaataagtagttcaaaagatgtaaaaaaagaaaaactaaaattttgggaagatataaaaaaacaaattctgcttattaatgatccacaatttgaatttattaaaaaagataatagcttatcaagtgtatcaaatttggctcactctctttttccgattagaacaaaaaattttaccattgatgaaattattaattatataagtaagaatgatttaacttttttaggttggtctgattttgttaataaagaatataagatgtctatattttcaaattatcaaaaagagtatccaaatgatacaaactttaaaaatttgacaaattggaaaaaacttgagatcaagcatccaattatttttactaattcatatagtttttggttagaaaaaaaataaa

SEQ ID NO: 226178 - DNA, 936 bp, Unknown
  Bacterial polypeptide expressing nucleotide sequence isolated from the Sargasso Sea
gaagaaacgagttaaacatttttagttatcttttaaataaactaagagggtcatatcgatatcttaccaattttaactttatcaaaaaatctaaaatgaatgtttcacatcattatgatatcaaagatgatctctatgatttgtttttagatcctaaaagacaatattcatgtgcttattttaaaaatgaaaatgatagtcttgaaactgcacagaataataagattcaacatataattaaaaaattaaatattaaacctgaccaaaaagttttagacataggatgtggctggggatcattagcaattgatattgctaaaaatgctaaatgtgaaattacaggaataactctatcagaaaatcaactaaactattgtaatcaaaaagcaaaagaaatgaatttacagaaccaagtaaaatttaaactgatggattatagagagctggatgagaaatttgatagaatagtgagtgttggcatgtttgaacacgttggaaggaaattttataaaaagttttttaaacaaattgaaaaattgttgaaagatgatggtgtttcgttaattcacactatcgggtctgttaacccaccaagagaccctcatccttggattacaaaatatatttttcctggtggttatacaccaagcttaagtgaagtgacgaatcctattgaaaaagctggcttaattgtaaccgacattgaagttttaagacttcattatgctcatactttaagacactggaaagaaaactgtttaaaaaataaagataaaataatccaaatgttcgatgaaaaattttttagaatgtgggagttttatctcgctggttgtgaaatggcatttaagtggggtgatcaagttgtttatcaatttcaactcactaaaaattatagatcaacccccgtgactagagactatatttatcaataaa

SEQ ID NO: 226179 - DNA, 673 bp, Unknown
  Bacterial polypeptide expressing nucleotide sequence isolated from the Sargasso Sea
acaagataaaaaagcatacccgagagaacctatctcagctcgcttggttgctgatttatttatatcagcaggtgcagatagaattgtatccattgatttacatacacaacaaattcaaggatttataagtcaaccttttgatcaccttactgcaatgccactattcgtaaattatttcaaagataaatataaagaaccaataacaatcatttcacctgatgcaggtggtgttcgaagagcgactacttttgcaaaaaacatggaggcgtatgttggttttgttcataaaaaaagagatccaaaaattcacaatgaagtcaaggcatttaccgtaattggagaagtcgaagatagacatgcgattttatttgatgacattattgatacaggaggaactattgcagctgcttcgcgagcattgattgaaagaggggcaaagtcagtaagtgttgctgctactcatggtatattttctgacgaaagtgtagagaaattaaaagatacaccaattgatgaaatcattgtcactgacactcttaaacaaaatggaaatattgaaaaaattggtaatgttaaaatcctctccgtttcttctattattgcaactgcactaacatctatttttgcggatgattctgtctctgcaatatttatgggtgaaaacgttttataa

SEQ ID NO: 226180 - DNA, 613 bp, Unknown
  Bacterial polypeptide expressing nucleotide sequence isolated from the Sargasso Sea
tctgatcaaaagaacatcaaaaacctacatagaaaaaactctttcagaaaatccagactggaaaattttggatattggttgtggatatggtgctaataaacatgcaacaacagtcagtgatatactagatctatcaaatcactacaaagataagtcatttgtaaagattactgaaaaaaaattaccatttaaagataaggagtttgactttgtttttgcctcccatgtagctgaacatgttgaggatgtttcttattttttaaatgaattatctagaataggaaaaaaaggatacattgaagtacctacaagacttgaagataatttggtttttgaaaataaaaaagctcatatttggcatctagtatttgatgatgttaatagtcaaattaatatctcaaaaaaacaacaatattttgaaccagttttaactgtaggaacaataaaaaaattaaatgaatattttcgtgaaagtttagtaatcgagttaagttgggagggtagtattaaatttaatatggttgaagataatttaaaaactccagttaaaatatcgattttaaacttgctaaaaaagtatttctcaaaaaaaattaggttgttaattaaataa

SEQ ID NO: 226181 - DNA, 200 bp, Unknown
  Bacterial polypeptide expressing nucleotide sequence isolated from the Sargasso Sea
tttgataaaaagaacatcaaaaacctacatagaaaacattatttcacaaaatcctaactggaaagttttagacattggttgtggttacgatgcaaacaaatatgcaactactgtcagcgatattttagacctatcagagcattacagagataaaaattttgtaaaaataacggaaaaaaaattaccatttaaagataaag

SEQ ID NO: 226182 - DNA, 148 bp, Unknown
  Bacterial polypeptide expressing nucleotide sequence isolated from the Sargasso Sea
tatggcatcagttgtcattaataattgggacaataaaacttggttatcttcacaaaattatattaattcttttaataattttttaatcaaaaatactaaaattaactcaaattttaaaattttagatattggttgtggaagagggaag

SEQ ID NO: 226183 - DNA, 697 bp, Unknown
  Bacterial polypeptide expressing nucleotide sequence isolated from the Sargasso Sea
gttgattaaattaaataagaaatcaaaaaaacttattcttctacaaagaaacgaacttctttccgaaaaacaaaaaatattacgtaaacggtttggacgttttttatttacgaatttttttgtacatttttttcaaaatcaaaagctagatgagtctgtgcaaaatttatttgaaaaagaatatgagacaataaaaaattttttaccatcaaatgcttcaaacatcttagatatcggttgtggtttagcgattttagatatttttttggctcaaaattatgaaaaaccaaattttttcttaattgataagaataaagttgatcttaaaataaaatatggattttcaaaaaactatgaaagctacaacaatcttaatgaaactaaaaaagttcttcttgcaaataatatacttgatgagcaaatttttattaaaaatgctgaagaaaaaatcgatattaataaaaaaatggatctagtcttatctataaaatcaatggcttttcattatccattagaaaattatctagatttattaagaagggtgtgtactcaaaatacagagtttatttttgatatttcaacagagcgatatcaattagatagtttatcagaatattttgaaaaaattgatttaatctatgaggaagatagtcaacaaccgctcaaaagagttcattgtaaaaactttaaactttaa

SEQ ID NO: 226184 - DNA, 616 bp, Unknown
  Bacterial polypeptide expressing nucleotide sequence isolated from the Sargasso Sea
tttgataaaacgatcatcaaaaaaatatatagataaattactttctgaaaacccaagttggaaaattcttgatattggatgcggatacaacgcaagcaaatatgcaacgactgtatgtgatattttagatttgtcttctttttacaaaaataaagaatttataagaatagatgataaaaattttccatttaaagataaagaatttgattttgttatagcttctcatgttttagaacatgttaaggatatatcttattttattaaggaattagaaagaatatctacaagaggatatattgaagtaccaacaaaacttgaagataacttagtttttgaaaataaaaaagcacatatttggcagctttcttttgacgatgatcaaaatcagataataataaataataaattgcaatattttgaacctattttaacagtcggaagtattaaaaaattgaaccattattttagagacagtctcgtaattgaattaaattgggaaggaaaaattgattataaaattgaaagcattgaattattaaataatgataaaatttcaatttttagcttatttaaaaaatacttttctaagaaattaaggatgattttttctaggtag

SEQ ID NO: 226185 - DNA, 343 bp, Unknown
  Bacterial polypeptide expressing nucleotide sequence isolated from the Sargasso Sea
atgacaaattttaaagaagaatacggagaagtagagacaccacttttttttatagaaaaaatgtttgaaatgattccagataagttatttaaaaataaaaatttaaaatggttggatattgggtgtggaaatggagcattttcgatgtatttatttaatattttatttaaatctctccaggaagaaattccagaaccaaatttaagaaggaaccacatcattgaaaacatgctttatatggttgaggtaaacaaagtttgcgaattaaatttaatattttttttcgggaataaagcaaatatatatatcaaggattatttacaggatttccatttaccagata

SEQ ID NO: 226186 - DNA, 733 bp, Unknown
  Bacterial polypeptide expressing nucleotide sequence isolated from the Sargasso Sea
gatgaatacaactatagatcctgtagaaagagaaaagttttctaaaatggcagaagaatggtgggatccatcaggaaaattcaaagctctacataaatttaaccctaaaaggattgaatttataagaaataaaatcattgatcacttttcaattgaaccaaacgcagaaaatcctttttcaaatctagatatattagatattggatgcggaggaggtcttctatccgaaccaatgtcaagattaggaggaaatgtttcaggaattgatattgttgaaaaaaatatcaatgtagcaaaaactcattctgaagaacaaaacctagaaattaattataaaatgacaactgcagaggaattggctctaggtaagaaaaagtttgatgtaattttaaatatggaagttatcgaacatgtctctgatttaaatcttttcatagagtcatgtgaaaaattattgaaaaaaaatggtctgcttttttttgctacactgaatagaaatctattatcctttggtttagccatagttggtgcagaatatattcttggctggctacctaaaggcacccataattggaaaaaatttatcacacctgaggaattgaaaataattttcagatcaagcggattaaatatcactgatattatgggaatgaaatataaccctatttacgatagttggtatttgtctgaagacacaagcgtaaattatcttggtactgctattaagtcttaa

SEQ ID NO: 226187 - DNA, 619 bp, Unknown
  Bacterial polypeptide expressing nucleotide sequence isolated from the Sargasso Sea
atgaataccgtaaacaaaaaagaaattgaaaaattttcaaaaatttccaatgaatggtgggatatagaagggaagttcaagcctttacataagtttaatccatcaagaataaaatatataaaaaataaggtaataacacactacaatattatttctaaacaacagcctcttaaaaatattcaacttttagatattggatgtggtggaggtcttttatcagagcctatgtgtaggttgggagcaaaagtaacagctatagatgcctcacaaaataatatcaatgttgcaaaatatcatgcaaaaaaaaataatttaaaaataaattatttatgtacatccccggaaaaggttatttttaaaaaaaaatttgatgtgattttaaatatggaaattgtagaacatgtagacgacttaaatctttttataaaaaaaagctcttttttactaaaaaaaaatggtttgatgtttgtagcaactttaaacagaactcttaagtcttatttatttgcaataataggtgcagagtattttttaagatggctaccaattgggactcatgactggaataaatttgttgaacctaaagagttagaagatatggaaaaaaaaatagtttaga

SEQ ID NO: 226188 - DNA, 233 bp, Unknown
  Bacterial polypeptide expressing nucleotide sequence isolated from the Sargasso Sea
aatgagcaataatactataaacagggaagaagtcgaaaaatttaacaaaattgctgaagaatggtggaatcctaatggaaaatttaaaccacttcacaaatttaatccaattagaattgagtatattaaaaataatattattaaagattttaacatttcatcaaatgataaaccactaaaaggaattagtattcttgatattggatgtggagggggtttgctatctgagcctt

SEQ ID NO: 226189 - DNA, 426 bp, Unknown
  Bacterial polypeptide expressing nucleotide sequence isolated from the Sargasso Sea
aatgagtagtgtaaataaaatagaaatagaaaaattttcaaatatggcggatgaatggtgggatccccatggaaaatttaaacctttacataaattcaatccaatacgtattaaatatattaaagaaaatataattagacaatttaaaataaaaaataagaataagcctctttctggaattaatattttagatatcggttgtggtggtggtttgctttctgaaccaatgtgtagattgggtgctaatgtaactggaattgatgcatcaataaagaatattaagatttcaaaactacatgcaaaaaaagataatcttaaaattaattatatttgttcatcccctgaaaaattaaaaattagtaaaaaatttgatgtaatactcaatatggaaatagttgagcatgtagaggatatttcttttttttt

SEQ ID NO: 226190 - DNA, 418 bp, Unknown
  Bacterial polypeptide expressing nucleotide sequence isolated from the Sargasso Sea
atgaaaaatagcacaattaataaagaagaaatagaaaaattttctaaaattgcagaagaatggtgggatccagcaggaaaatttaaaccattacataaatttaatccaattagaattgaatatattaaaaataacattattaaaacgtttaaacttgataataagaagaagcctttagacaagattaaaatattagatattggttgtggaggtggcttactttcagagccaatgtctagaatgggagcaagtgttactggtatagacgcatcaaataaaaatatcactgttgcaaaacttcatgcaaaaaaaaataaacttggaataaaatatatttgttcttcaccagaaatatttaaaacaaatataaaatatgatgtaattcttaatatggaaattattgagcatgttgaagata

SEQ ID NO: 226191 - DNA, 461 bp, Unknown
  Bacterial polypeptide expressing nucleotide sequence isolated from the Sargasso Sea
aatgaaaagaagtacaataaataaagaagaaatagataaattttctaagctatctgatgagtggtgggaccctgatgggaaatttaaaccattacataaatttaatccagtaagaatcgaatatattaaaaaacatattattaaccacttcaaaattaataaaacacaatttccactaaaaaatttaaaaattttagatataggttgcggaggtggtttactttctgaaccaatgtctaggctcggagctaatgtaactggcatagatgcttcagaaaaaaatataaaaatagctaaagcacatttaaagaaaagtaaattaaaaataaaatatttttgtgactctccagaaaatttcaaaaaaaaagaagaatatgatgtaatcttaaatatggaaatagttgaacatgtagatgatgttgaattatttataagaaaaagttctgaactattaaaaaaaa

SEQ ID NO: 226192 - DNA, 262 bp, Unknown
  Bacterial polypeptide expressing nucleotide sequence isolated from the Sargasso Sea
atgagcacaattaacaaaaaagaaattgagaaattttctaaaatagccgctgaatggtggaatccaaatggaaaatttaaacctttgcataagttcaatcctattagaataaagtatattagggataatatagtaaaaaaattcaatttaaaatcttcaagaaaacctcttaaaaatattagcatccttgatattggttgtggtggaggtttgttgtctgaacctataagtagaatgggagcaaaaggttgttgggattgat

SEQ ID NO: 226193 - DNA, 402 bp, Unknown
  Bacterial polypeptide expressing nucleotide sequence isolated from the Sargasso Sea
aatgaaaaataacacaattaataaaaaagaaatagaaaaattttctaaaattgctgatgaatggtggaatccagagggtaaatttaaaccattacataaatttaaccctatcagaatttcatatttaaaagaaaatataatcaaaacctttaaattaaataataaaaaaagcccacttaaaaacgttaagatactcgatataggttgtggcggtggtttattatcagaacctatgtgtagattgggtgcttcagttactgggatcgatgcttctaagaaaaatattgatatagcaaagttacattctaaaaaaaataatcttaaaatagattatttttgctcatcacctgaaaaatacaaagttaaagataaatttgatgtgattttaaacatggaaattgt

SEQ ID NO: 226194 - DNA, 709 bp, Unknown
  Bacterial polypeptide expressing nucleotide sequence isolated from the Sargasso Sea
aatgaaaaataacacaataaataaaaaagaaatagaaaaattttcaaaaatagctgaggaatggtgggatcctaatggaaaatttaagccattacataaatttaaccctatcagaattaaatatataagagatacaattttatctgaatttaaaattaaaaaagagcatgagccctttaaaggattaagcattttagatattggatgcggtggtggattactttcagaacctatggcaaaacttggaggggatgttgttggtatagatgcttcttttaaaaatatacaagtggctaagtatcatttaaagaaaagtaaacttaaaataaaatattacaattcctctccagaaaatttaaaaataaaaaaaaaatttgatataattttgaacatggaaattgttgaacacgttgaagatgttgatttttttattaaagaaagttcaaaatttttaaaacaatcaggtgtaatgttcattgctaccttaaacaaaacacttaaatcatacttatttgcaattataggggcagagtatgttttaaagtggcttccgataggcactcatgattgggaaaaatttgttaaaccagagtatttaacaaatatttgtaaaaaaaattcattaaaattaaaaaagattgatggaatgacttttaaccctatcttagataaatggtctgttacatctgacaaatctgtaaattatatt

SEQ ID NO: 226195 - DNA, 772 bp, Unknown
  Bacterial polypeptide expressing nucleotide sequence isolated from the Sargasso Sea
atgactaacacagtagacaaaagagaaatagaacaattttcttcattaagcaacaaatggtgggatatgtctggtcctttttcagctttacataaaatgtcaaatgcaagaatggagtttataactcagaattcaaccagaattttaaaaaaagataatataggagttaatcttcttgatggtttaaattgtttagatattggttgtggtggtggtatcttatctgaaaaattaagaagattaggagcaaatgttacaggaattgacgcttcaaaaaggtcaatagatattgccaaagatcatgcaaaaaaaagtcgattagaaataaattataaatgtattacaacaagtgaacttctagagattaaagaagaaaaagctctaaataaatttgacttagtaattgcttctgaagtaattgaacatgttcataacagaaaaatatttctatctgatatttctaatttatgccgtcctggtgggctagttatatttactacaattaataactctgttttaggtatattattaggaaaatattttgcagaagatattttaaagataattccatcaggaactcacgaggtggaaaagcttatttctccagaaaatttagcaaaagaagctgagcagcatggtataatattggatagttttacaggttttgcaccaacatttagacttaaaaatataattaacaaagaatttggaaacttcaaactttcatcaaacatgcaggtcaattatggtgcagcgggaattaaattataat

SEQ ID NO: 226196 - DNA, 730 bp, Unknown
  Bacterial polypeptide expressing nucleotide sequence isolated from the Sargasso Sea
aatgaaaaataacacaattaataaaaaagaaatagagaaattttcaaaaattgctgaagaatggtgggatccaaatggcaaatttaaaccattacataaatttaatccaattaggattgcctatataagagataatataattaagacctttaagattaatcaaaaaaagagtccattgagtaaactaaaaattttagatattggctgtggtggtggtttattatctgagcctatgtgcagattgggagcgactgtaacagcaatcgatgcatctgaaaaaaatattaatgttgcaaaacttcatgcaaataaaaataatcttaaaataaattatatttgcacatcaccagaaaaaatgaatattaaaaatcattttgatgtaattttaaatatggaaattgtagaacacgtagaggatgtagaattttttttaaaaacttgcagtggtttattaaaaaaaaatggaattatgtttgttgcgactttaaataaaactttaaaatcatatgtctttgcaatagttggagcagagtatattttacgatggcttcccatcggaactcatgattgggagaaatttttaaaacctgaagaactaatatctatactcaaaaactataatttaagtttagataaaataaatgggatgcaattcaatattttaactgataaatggaaagttagtgaagataaatcagtaaattatattgccaaatttatcaaaaactaa

SEQ ID NO: 226197 - DNA, 597 bp, Unknown
  Bacterial polypeptide expressing nucleotide sequence isolated from the Sargasso Sea
atattattaatcatttcaaaaaaaataaaaaaataaatcaattaaaaggtttaaaaattttggatataggctgcggaggaggactcctttcagaaccttttgctagattaggcgcaaatgttactgggatagacgcttcttataaaaatattaaagttgcaaaaattcatgcaaaaaaatcaaaattaaatattaattacatttgttgtacacctgaaaacttaaattctgataaaagatttgatgtagtgcttaatatggaagttgttgagcatgttgaagatatagatttttttatgaaacaaagtacaaaatttttgaaaaaaaatggcttaatgtttgttgcaaccttaaacaaaacacttaaatcttatgtttttgcaattattggtgctgaatatatattaagatggcttcctataggaactcataactgggagaaatttgttgaaccatcacggttaataaaaatcggtgcaaacaataatttaaaaatggatttgatagatggaataaaatacaatcctatattagaccagtggaatataagtaaagacaagtctgtaaactatatttctaaatttattaaaatttaat

SEQ ID NO: 226198 - DNA, 442 bp, Unknown
  Bacterial polypeptide expressing nucleotide sequence isolated from the Sargasso Sea
atgaaaaataacacaataaataaaaaagaaatagaaaaatttacaaaaattgctgaagaatggtgggatccgaatggaaaatttaagcctttacataaatttaatccaattagaattaaatacataagagatacaatcatatcagaatttaaaataaaaaaagatcatgaaccatttaaaggtttaagtatcctagatataggttgtggtggaggattactttcagaacctatggcaaggttaggagcagaagttactggaatagatgcatctaataaaaatattcaagttgctaaatatcacctaaaaaaaagcaaattaaaaattaattattataattcatcgccagaaaacttaaaaataaaaaaaaaatttgatgtagttttaaatatggagatcgttgaacatgttgaaaatgttgaccattttataaaagaaagct

SEQ ID NO: 226199 - DNA, 448 bp, Unknown
  Bacterial polypeptide expressing nucleotide sequence isolated from the Sargasso Sea
atgactagcgtaaataaaaaagaaatagataaattttctaaaatggctgatgaatggtggaatccacaaggaaaatttaaaccactacataaatttaatccaacaagaattaaatatataaaagaaaacgttattcataattttaaattaaagaataaatctaaacctttatctggaataaatattttagatattggatgtggtggaggattattatctgaaccaatgtcaagaatgggtgccaatgtaacaggtattgatgcgtctgataaaaatataaaaattgcaaaactccactcaaaaaagaataaattaaaaattaattatttgtgttcatcacctgaaaaacttagagttaaaaagaaatttgatgtaattttaaacatggaaattgtagagcatgtagaagatatagatttttttctaaaatcatgttcaaaactttaaa

SEQ ID NO: 226200 - DNA, 392 bp, Unknown
  Bacterial polypeptide expressing nucleotide sequence isolated from the Sargasso Sea
aatgagtagcgtaaataaaaaagaaatagaaaaattttcaaatatggcggatgaatggtgggatccccatggaaaatttaaacctttacataaattcaatccaatacgtattaaatatattaaagaaaacataattagacaatttaaaataaaaaataagaataagcctctttctggaattaatattttggatatcggttgtggtggtggtttgctttctgaaccaatgtgtagattgggtgctaatgtaactggaattgatgcatcaacaaagaatgtaaaaatttcaaaactacatgcaaaaaaagataatcttaaaattaattatatttgttcgtctcctgaaaaattaaaaattagtaaaaaatttgatgtaatactcaatatggaaa

SEQ ID NO: 226201 - DNA, 276 bp, Unknown
  Bacterial polypeptide expressing nucleotide sequence isolated from the Sargasso Sea
gatgaaaactagcacaataaatataaaagaaatagaaaaattttcaaaaatggcagatgaatggtgggatcctaatggcaaatttaaaccactccataattttaatcctgtaagaatagattacattaaaagaaatgtaatttctcactttaaaattaaaaattctgaaaatcctttatatggtaaagatattctagacattggatgtggtggtggattgttaagtgaacctatgtctaaattgggcggtaatgtaactggaatagatgcatcaga

SEQ ID NO: 226202 - DNA, 720 bp, Unknown
  Bacterial polypeptide expressing nucleotide sequence isolated from the Sargasso Sea
cttgaatataaagtcaagtctaatgaaatctaacacaataaataaaaaagaaatagaaaaattttctaaaatagctgaagaatggtgggatccacagggaaaatttaaacctttacataaatttaatccaattagaatatcctatattaaagaaaatataattaaatcgtttaaattaaattatcaaaaaaaccctttaaacaaaattaaaattttagatattggatgtggtggtggattacttgcagaaccaatgagcagattaggtgccgatgtaactggaatagatgcatctttcaaaaatattgaagttgcaaaacttcattcaaaaaaaaataatttaaaaattagatatctttgctcttcaccagaaaaacttaaaattaaaacaaaatttgatgttatcttaaatatggaaattattgaacacgtagaagatgtaaatttttttttgaaatcatgttcaaaacttttaaaaaaaaatggattaatgtttgttgcaactttaaataaaactcttaaatcatatctttttgctattataggagctgaatacatcttgcggtggcttcctattggcacacatgaatgggaaaaatttataactccagaagatttaattaatctcttaaaaagaaataatttaaaattagaaagattggatggaatgaattttaatataattaaagatgaatggaaagtaagctcagataaatctat

SEQ ID NO: 226203 - DNA, 660 bp, Unknown
  Bacterial polypeptide expressing nucleotide sequence isolated from the Sargasso Sea
ctaatggaaaatttaaaccattgcataaatttaatcctatcagaataggatatattaaaaacagtataataaaacactttaaaataaaatcctcaataaaacctctaaaaaaaattaatattttagatataggctgtgggggtggtcttctatcagaacctatgagtaaattgggagcaaatgttgtcggaatagatgcatcaaaaaaaaatattgaagttgcgaaacttcattcaaaaaaaaatggccttaaaataaattatatatgttcttctcctgaaatattaaaaattgaaaaaaaatttgatgtaattttaaacatggaaatattagaacatgtagaagatgtaaatttttttattaaaaaaagttcagaattattaaaaaagaatggattaatgtttatagcaactcttaacaaaacattaaaatcatatgcttttgcaattattggagctgaatatattttaagatggctaccaattggaacgcatgattgggaaaaatttatcagacctgaagacttaatcaaaatatcaaaaaaaaataatttggtaattaaaaatttagatggtttaaagtatgatttattagaagataaatggagattaagtagcgataaatcagtaaattacatagctagatttaaaaaaaattagt

SEQ ID NO: 226204 - DNA, 730 bp, Unknown
  Bacterial polypeptide expressing nucleotide sequence isolated from the Sargasso Sea
atgaaaaataacacaataaataaaaaagaaatagaaaaattttcaaaaatagctgaggaatggtgggatcctaacggaaaatttaagccattgcataaatttaacccgatcagaataaaatatattagagatactattttatctgagtttaaaattaaaaaagaccatgaaccctttaaaggcttaagtcttttagatattggatgtggtggtggattactatcagagcctatggctagacttggagcagatgttgttggaatagatgcttctttaaagaatatacaagttgctaagtatcatttaaaaaaaagtaaacttaaaattaaatattataattcctctccagaaaatttaaaaattaagaaaagatttgatattattttgaatatggaaattgttgaacatgtcgaagatgttgatttttttattaaagaaagttcaaaatttttaaagaaatcaggtgttatgtttatagctactttaaacaaaacacttaaatcttatttgtttgcgattgtaggtgctgagtatgttttaaagtggttaccaatagggactcacgattgggaaaaatttgttaaaccagaatatttgacaaatatttgtaaaaaaaattcattagaattaaaaaaaattgatggaatgaccttcaaccccattttaggtaaatggtctgttacgtctgataaatctgtaaattatatttcggaatttaagaaagtttaat

SEQ ID NO: 226205 - DNA, 577 bp, Unknown
  Bacterial polypeptide expressing nucleotide sequence isolated from the Sargasso Sea
aatgaataataatactataaacaaagaagaaatcgaaaaatttaacaaaatcgctgaagaatggtgggatcctaatggaaaatttaaaccacttcacaaatttaatccaataagaatagagtacataaaaaacaatattattaaagattttaacatttcatcaaatcataaaccactaaaagggataagtattcttgatattggatgtggaggaggcttactatccgaacctttagcaagacttggagcaaatgttgtaggtatcgatgcgtccaaaaaaaatattgatattgcaaaacatcatttaaaaaaaagtaatttaaaaattgaatattatgatagatctccagagaattttaattatgaaaaaaaatttgatgtaattcttaatatggaaatagttgaacatgtagaagatattcctaaatttataaatcaaagtacaaaatttttaaaagataatggtttaatgtttattgctaccttaaaccaaaccttgaaatcttatgtatttgcaattataggagctgaatatattttaagatggcttccaatcggaacacatgatttggagtaa

SEQ ID NO: 226206 - DNA, 562 bp, Unknown
  Bacterial polypeptide expressing nucleotide sequence isolated from the Sargasso Sea
aatgacgagtgtaaataaaaaagaaatagaaaaattttccaaaatagctgatgaatggtggaatccacagggaaaatttaaaccacttcataaatttaacccaatcagaattaaatatattaaagaaaatattatcaataattttaaattaaaaaataaagctaaacctttattgggagttaatattttagatattgggtgtggtggagggttactttctgaaccaatatcaagactgggcgcaaacgtaactggaattgatgcatcagaaaaaaatataaaaattgctaaattacattcaaaaaagaataatttaaaaattaattatttatgttcttcacctgaaaaggttaaatttaaaaataaatttgatgtcatattaaacatggaaatagttgaacatgtagaagatatagatttttttttaaagtcttgctcaaaacttttaaaaaaaaacggtataatgtttgttgcaacaattaataaaactttaaaatcttatgtttttgctattgttggtgcagagtatcttttgagatggctacccaataggaacacacga

SEQ ID NO: 226207 - DNA, 571 bp, Unknown
  Bacterial polypeptide expressing nucleotide sequence isolated from the Sargasso Sea
atgaaatctaacacaataaataaaaaagaaatagaaaaattttctaaaattgctgaggaatggtgggatccaaatggtaaatttaaacctcttcacaaatttaatccaattagaatatcttacataaaagagaatattataaaatccttaaatttaagagataatgaaaagcctcttaacaaagttaaaattttagatattggttgtggaggaggtttactttcagagccaatgtgtaggttaggagctgacgtaacaggtatagatgcatcaagtaagaatataagtgttgcaaaaactcacgcaaaacaaaataatttaaatattaaatatttttgctcatcccctgaaaatctcaaaactaaatcaaattttgatgtaattcttaatatggaaattattgaacatgttgaagatgtaaatttttttttaaatacatgcacaaaactcttgaaaaaaaacgggattatgttcgtagcaacattaaacagaactcttaagtcgtatttatttgcaattattggagctgagtacattttaagatggcttcctataggaactcaccaatggg

SEQ ID NO: 226208 - DNA, 415 bp, Unknown
  Bacterial polypeptide expressing nucleotide sequence isolated from the Sargasso Sea
gaagaaatagaaaaattttcgaaaatggcttcacagtggtgggatcctaatgggaaatttaaaccattgcacaaatttaatcccgttagaataggatatattaaaaatagtataataaaacacttcaaattaaaacactcaacaaatcctcttaaaaaaattaatattttagatattggttgtggtggaggtctattatccgagcccatgtacaaactgggagcaaatgttgtcggtatagatgcatctaagaaaaatattgaaattgcaaaatttcatgcaaaaaaaaataaccttagaattaattatatatgctcttctccagaaatattaagaaccaaaaaaaaatttgatgtaattttaaacatggaaataattgaacatgtggaagatatagatttttttataaaaaaaa

SEQ ID NO: 226209 - DNA, 438 bp, Unknown
  Bacterial polypeptide expressing nucleotide sequence isolated from the Sargasso Sea
aatgaaaagtaacacaataaatgcagaagagataaaaaaattttctaaaatttcttctgaatggtggaatcctgaaggaaagtttaagcccctacacaaatttaatcctataaggatacattacataaaatacaatattataaataattttaaaattaagaacaaaattaaacctctaaaagatattgatatattagacataggatgtggaggtgggttactttctgaaccgatcagtagactgggcgcaaaagttacaggaattgatgcttcagaaaaaaatattaatgttgcaaaatttcatgcaaaaaaaaataaattaaaaataaattatatttgctcatcaccagaaaaattaaagttaaaaaaaaagtttgacgtaattttaaatatggaaattgtcgaacatgtagatgatgtaaatttttttattaataa

SEQ ID NO: 226210 - DNA, 724 bp, Unknown
  Bacterial polypeptide expressing nucleotide sequence isolated from the Sargasso Sea
atgagtacagtaaacaaaaaagaaatagaaaaattttcaaacatagctgctgaatggtggaatccagatggaaaattcaaacctttgcataaattcaatcctataagaataagatatttaaaagaaaacatcattaatcattttgggattaaatcaaaaaatcagccattaaaaaaattagacattttagatattggatgcggaggtggtttactatctgaaccattttcacgtttaggtgcaaatgttacagctattgacgcttcaaaaaaaaatatagaagtagcaaaatttcatgcaaaaaaaaataatctcaaaattaactataaatgtattttgccagaaaaacttaaagtaaaaaaaaaatttgatgtaattttaaacatggaaatagttgaacatgtaaatgatctaaatttttttattaaaaaaacttctgaattactaaaaaaaaatggactaatgtttgttgctactttaaataaaaccttaaagtcatatttgtttgcaataattggtgctgaatatattcttaattggctgccgataggcactcatgattgggataaatttgtaaaaccaaatgaactaattgaaattgcaaaaaaaaataatcttaaactaataaaaatagatggaatgaaattcaatcctttttttgaccaatggaatattagtgatgataactcagtaaattatatttctgaatttgaaaaaaattaat

SEQ ID NO: 226211 - DNA, 499 bp, Unknown
  Bacterial polypeptide expressing nucleotide sequence isolated from the Sargasso Sea
aatgaaaaataacacaattaataaaaaagaaatagaaaaattttctaaaattgccgaagaatggtggaatcctgaaggtaaatttaaaccattacacaaattcaaccctattagaattacatatattaaagaaaatataatcaaaacatttaagataaaccaaaaaaaaaatcctttaaaaaatattaaaattttagatattggttgtggaggtggattgctttcagagcctatgtgcagattaggagctaatgttactgcaatagatgcatctaataaaaatattagaattgcaaaattacatgcaaaaaataatggacttaaaattaaatatatttgtacttcacctgaaaaaattaaaattgaaaataaatttgatgttattttaaatatggagattgttgaacatgttgaggatattaatttttttttaaaatcttcctcaaaacttttaaaaaaaaatgggattatgtttgttgctaccttaaataaaaccctt

SEQ ID NO: 226212 - DNA, 463 bp, Unknown
  Bacterial polypeptide expressing nucleotide sequence isolated from the Sargasso Sea
atgcacaatatcaacgacgccgaaatcaaaaagttcgacgagctagctcataaatggtgggatacagacggcgaattccgagccttacacgatataaaccaactgcggctggacttcattcttcagagatctaacttgacaagtggtccagccattgacgttggctgtggaggaggaatccttacggagagtctcgcgaaaatttctccgacaaacgtcaccggtatagatctggccaataaggcgctggaagtggcaaagctgcacgcaaaaatctccggagttgaagtagattatagagccatctccgctgaagatctgtctatcgaatatgagagtcactttgagacactttcatgcatggagatgctagaacacgtgcccagtgtagaagagagcattgactcttgtgcaagactcattaaacctggcggcaacttgtttttctcaacaattaataaaa

SEQ ID NO: 226213 - DNA, 355 bp, Unknown
  Bacterial polypeptide expressing nucleotide sequence isolated from the Sargasso Sea
aatgaaaaataacacattagataaaaaagaaatagaaaaattttcaaaaattgctgaggattggtggaatccaactggtaaattcaagcctttacataaatttaacccaattagaataaaatatataaaagataatttgattaaagaatttaatcttaaaaataaaaaaaaacccctacatggattaaatatattagatataggatgtggaggggggttgttatcggaaccaatggcaagacttggggcaaatgttactggaatagacccagtaaaaagaaatatagaaattgcaaaacatcacttaaaaaaaagtaatttaaatataaaatatttcaacttttctcctgaaaaa

SEQ ID NO: 226214 - DNA, 715 bp, Unknown
  Bacterial polypeptide expressing nucleotide sequence isolated from the Sargasso Sea
tgataattttaccgggccctatcggatcatttggtgggatcaaaaagggccgatggcacctttacatgctttcacccccgtacggattgactatattttgcacgcaatcagaaggttttttccaatccaaaccagaatgctaggcaacgcaagtgaggtacttggcggtctaaaaattctagatattggctgtggtggcggcttgcttgccgaaccaatggcccggcttggcgcaagtgttaccggcattgacgttactaatgctgctgttactgctgccaaagcacatgcgaagaccatgcatctgagcattaattaccaaacaatttccgccgaagagctggctaaaagcgggataatcttcgatgttatttatgcttccgaagtgattgagcatgttgccgaccggccaatattcgtaaaggccattgcccaaatgctggctccaaacggtgtggtgatcataaccacaatcaaccgtagcttgccagccctggtatttgccaaatttgctctcgagtatatcgctcgaattgtgcctgttggcactcatgatccacaaaagttcgttaaaccaagcgaattgcgcgccgaatttaacaacgctggcattctgcttgatgacatgacagggtttgcaccgcgccttggaggcggctttgtgcctactggctcgctcgcggtgaattacgcggcaagtggtgggttccgctag

SEQ ID NO: 226215 - DNA, 697 bp, Unknown
  Bacterial polypeptide expressing nucleotide sequence isolated from the Sargasso Sea
agaaaaattttctaaaatggctaatgaatggtggaatcctgagggaaaatttaaaccattgcatagatttaacccaataagaattgaatatatcaaaaattgtataataaatcactttaatattaaaaataaaactcaacctttaaaaaatctaagtattttagacataggatgtggaggaggcctgctttcagaacctatgtataaaatgggagcagatgttacaggtttagatgcttcaaaaaaaaatattcatattgctaaaattcattctaaaaaaaataaattaaaaattaattatatttgctcttctccagaaaagttaaaaatgaaaagaaaatttgatattgttttaaacatggaaattgtggaacatgtgaatgatgttgatttttttttaaaaaaaagttcagagttattaaaaaaaaatggattaatgtttgtagctactttaaataaaactttaaaatcatatttttttgcaataattggagcagaatatattcttaaatggttgccaataggcacgcatgactggaatagatttgttgaaccacacaaactcattaaattaggtaaaaatagttcattaaaattaaaaaaaattgatggaatgaaatttaatcctctttctaatgaatggaaaataagtaaagataaatctgttaattacattgtaaaatttataaaattttaa

SEQ ID NO: 226216 - DNA, 555 bp, Unknown
  Bacterial polypeptide expressing nucleotide sequence isolated from the Sargasso Sea
tatgaccagtgtaaataaaaaagaaatagaaaaattttctaaaatggctgctgaatggtggaatccagagggaaaattcaaaccattacataaatttaacccaatcagaattcaatacattaaagaaaatattattaataatttcaaattaaaaaataaaaacaaacctttgtcaggggtaaacattctagatattggctgtggtgggggtttgctatctgaaccaatgtcaagaatgggggctaatgtaactggaattgatgcttcagataaaaatataaaaattgctaaattacattcaaaaaaaaataagttaaaaataaattatttatgctcatcacctgaaaaacttaaggttaaaaaaaaattcgatgtaattttaaacatggaaattgttgaacatgtagaagatatagatttttttctcaaatcatgctcggaacttctaaaaaaaaatggactgatgtttgttgcaacaataaataaaactttaaaatcttatgtatttgcaattgttggtgcggagtatgtattgaaatggcttccaataggaac

SEQ ID NO: 226217 - DNA, 770 bp, Unknown
  Bacterial polypeptide expressing nucleotide sequence isolated from the Sargasso Sea
catgaacccctctgagccacgttctgagacaatagaccaaaatgatattgacaggtttaatgcccttgcggagcagtggtgggatgaaaatgggcccatgaaaccccttcatctgttcactcctgtgaggttggactatatcctaaaagctatccgtaaccgtggacttgctatagaaaacactccccctcaaaccaacaacacgctaaaaccactttcagggctgaaaatattggatatcgggtgcggtggcggacttttagcagagccgcttacacggcttggggccgcactgacaggcattgatgcatctaggggcgcggtggcggcagccacagcacatgcacaggccgaagagctcaccattgattttcgttgccttgcatcagaagagcttgcagcctttcctcactatcacggatattttgacgtgatttatgcctcagaagtcatagaacacgtatctgacattcactcatttgcctcatccatagcgcaaatgctttcaccaaaaggtgttgttgtgatcacgacaatcaatcgtacaataccagcccttctctttgcaaaatttgccgccgaatatgttcttaagcttatccctgccggcacccaccaatttgaaaaatttgtgcggccatcggaattgcgaagcgtatttcgtgactctggcatattaattgatgatgtgacaggatttgtgccgaattcacaaggtggttttagcatgtctccactaacatcggtgaattatggcgcatccggtagtt

SEQ ID NO: 226218 - DNA, 256 bp, Unknown
  Bacterial polypeptide expressing nucleotide sequence isolated from the Sargasso Sea
aatgaataataccacaataaacaaattagaaatagaaaaattttctaaattagctgaagagtggtgggatccttttggaaaattcaggactcttcacaaatttaatcctgtgagaataaaatatattaaagaggctattattttaaatcattcaataaaattaaaagataaaccactaaaaaaaattgaaattcttgatatcggttgcggtggtggactgttatcagaacctatgagtaaacttggtgctaatgtt

SEQ ID NO: 226219 - DNA, 625 bp, Unknown
  Bacterial polypeptide expressing nucleotide sequence isolated from the Sargasso Sea
atgaatagcgtaaataaaacagaaatagaaaaattttcaaatatggcggaccaatggtgggatccccatggaaaatttaaacctttgcataaattcaatccgatacgaattaaatatattaaagaaaatataattagacaatttaatataaaaaatacgaataagcctctatctgggattaatattttagatatcggttgtggaggaggtctgctttctgagccaatgtgtagattgggtgctaacgtaactggaattgatgcatcaataaagaatatcaagatttcaaaactccatgcaaaaaaagacaggcttaaaattaattatatttgttcatctcctgaaaaattaaaaattagtaaaaaatttgatgtaatactcaatatggaaataattgagcatgtggaggatatttctttctttttaaaatcatgctctaaacttttaaataaaaatggattgatgttcgttgcaacaattaataaaactttaaaatcttatgtattcgctatagttggagcggaatatattttaagatggttacctataggaacacatgactgggaaaagtttgttaaaccagaagaacttaaaaaaattttatccaaaaacaatttatcctaaa

SEQ ID NO: 226220 - DNA, 555 bp, Unknown
  Bacterial polypeptide expressing nucleotide sequence isolated from the Sargasso Sea
attgaaaaagtttaaattcggagaaaattggaatagcttttctaagcttataaacaataaaaaactaaaatattctgtaaattcacttcaaaaattgacagatatgaaaagttttaaaaacatgacttttcttgacataggttgtggttctggcctttcatctttagcagcaatcaatttaaaatgtaaaagcttatttgcaatagacgatgatccacaatcagttttaacgacaaagttagttttaaaaaaatataaaaaaaaggctaaagttaaaaaaattagcgtttttgatttaaatgaacaaaataaatttgatatagtttactcttggggtgtgttgcatcatacaggatttatgattaaagccataaagaagacctgtaaaatggttgataatgacggtttgctaattatttctttgtataaaaaaacttatttgtgttccttttggaaagttgaaaaattgatttataataaatctccaatttttattcagaaaattataaaaaatgcttttatattttttttcaaatttggtttttttttaacaaa

SEQ ID NO: 226221 - DNA, 284 bp, Unknown
  Bacterial polypeptide expressing nucleotide sequence isolated from the Sargasso Sea
tatgaacagtattaataaaaaagaaatagaaaaattttcaaatatggcagccgaatggtgggatcctgaaggaaaatttaaacctcttcataaatttaatcctataagaataaaatatataaaagaaaatataattaaggaatttaaacttaaaaataagaaatatcctctttctggaataaatgtccttgatattggatgtggaggtggattgttatctgagcccatgtgtagattaggagctaatgttacagcaatcgatgcttcaaataaaaatattgcca

SEQ ID NO: 226222 - DNA, 457 bp, Unknown
  Bacterial polypeptide expressing nucleotide sequence isolated from the Sargasso Sea
aatgactagcataaataaaaaagaaatagataaattttctaaaatagctgatgaatggtgggatccagaaggtaaatttaaaccacttcataaatttaatccaacaagaataaaatatattaaggaaaatattattaataatttcaaattaaaaaataaatccaaacctttattaggaataaaaattttagatattggatgtggtggcggattgttatctgaaccaatgtcaagaatgggtgctaatgtaacaggtattgatgcatctgataaaaatataaaaattgcaaaacttcattcaaaaaaaaataagctaaaaattaaatatttatgttcatcaccagaaaaacttaaaattgaaagaaaatttgatgtcattttaaatatggaaattgttgaacacgtggaagatatagatttttttctaaagtcatgctcaaaacttttgaaaaaaaat

SEQ ID NO: 226223 - DNA, 738 bp, Unknown
  Bacterial polypeptide expressing nucleotide sequence isolated from the Sargasso Sea
aacaaattatctctatgaaaactgtaaataaaaaagaaatagaaaaattttcaaaaatggcctctgaatggtggaatcctcatggaaaatttaaacctcttcataaatttaaccctataagaattcaatatattaaagaaaatataattaaaaattttaatttaaaaaataataataaaccactatctggaattaatattttggatataggttgtggtggtggattgctttctgagccaatgagtagattgggtgctaatgtaactggaatagatgcttccaataaaaatattaaaatagcaaaaatacattcaaaaaaaaataaattaaaaataaattatttttgttcttcaccagagagatttaagtctgaaaaaaaatttgatgttattttaaatatggaaattatcgagcatgtagaagatattgatttttttttaaaatcttgctcaaaacttttaaaaaaaaatggagtaatgtttgttgcaaccattaacaaaacttttaaatcttatatttttgcgattattggtgcggagtatattttaagatggttaccaataggaacacacgaatgggaaaaatttgttaaaccacaggatctaaaagaaattttgatcaaaaataatttatctttaaaaaaattagatggaatgagttttaacattcttaaagatgagtggaacgtctcgaaagatttatcaatcaattatatagcaaaatttattaaagattaat

SEQ ID NO: 226224 - DNA, 323 bp, Unknown
  Bacterial polypeptide expressing nucleotide sequence isolated from the Sargasso Sea
catgaatacaaacaataataatcaagaagaccttttcgacgaatatgcatatgattggtggaataaaacaggtaattataaacttctccataagttaaacccattgagattggaatatatcttatctaaacttgagataaaaaataaaaagattttagatattggctgcggtggaggaatactgtctgaggagttaagtaaaatgggtgcaaaagtcactggagttgattcttcaaaaaaatcaatcaatattgcgaaaaagcatgcgaaagaacaagatctagaaatagagtacattaatggatcaatactagatttatcaa

SEQ ID NO: 226225 - DNA, 334 bp, Unknown
  Bacterial polypeptide expressing nucleotide sequence isolated from the Sargasso Sea
atgactaaagaaaaatttcttaatcagacgtataaacttgcaactcctgatgatactttcgcacattacgaagcctgggctgaaacatacgacgaagagatcacagaaaatgactacgcacaaccgagaaggtgtgccgatgctcttgctcaatattcaattagtagtgaaatcaatatattagatattggttgtggtagtgggctttccggtgtggcgttaaatagctctgggttcaaaaacattgatgggtgtgatttttcacctgcgatgctagaaaaagctaaaaatacagatgtttatcaaaaactatttttggccgatataaatcaag

SEQ ID NO: 226226 - DNA, 730 bp, Unknown
  Bacterial polypeptide expressing nucleotide sequence isolated from the Sargasso Sea
atggctattaacacaataaacaaagaagaaatagaaaaatttaacagcttagctgaggaatggtgggaccaggaaggaaaatttaagcccttacataaatttaatccaacaagaatagaatatataaaaaataatttaattaaagactttaatattaaaaataaaaaaaaaccattttcgaatttagaaatactggacataggatgtggtggaggcttgttgacagagccaatgcacagactgggtggaaaattaactggaatagatccctcaaaaaaaaatattgaaattgcaaaagttcatgccagaaaaaataatttgaaaataaattatatttgttgttcacctgaaaatttgaaatctaaaaaaaaatttgatgtaatattaaatatggaagttgttgaacatgtggatgatttaaatttttttattaaatcaagctcttctttattaaaaaaaaatggaataatgtttattgcaactttaaacaaaacatttaagtcttacttgtttgctattataggtgcagaatatgtcttaaattggcttccggtaggtactcatgattggtttaaatttgtggaaccagaaaagttacaaaatatatgtaaaaaaaataatttaaaattattgaatgtagatggtttaagctacaatattctaacagacaaatggaaccttaataaaaatactgctgttaattatattagtaaatttaagagatattaat

SEQ ID NO: 226227 - DNA, 721 bp, Unknown
  Bacterial polypeptide expressing nucleotide sequence isolated from the Sargasso Sea
atgaaaagtaacacaataaataaacaagaaatagaaaaattttctaaaatagcctctcaatggtggaatcctaatggaaaatttaaaccattacacaagtttaatccaatcagaataagatacattaaagatagtataataaaacactttaaaataaaatctccaacacaacctttgaaaggaattaatattttagatattggttgtggtggtggtctactttgtgaaccaatgagtagattgggagcaaatgttgttgggatagatgcatccaaaaataatattcaaactgcaaagcttcatgcaaaaaaaaataatcttaaaattaattacatatgctcttcccctgaagtattaaaaacaagagaaaaatttgatgtaattttaaatatggaaatagtagagcatgttaatgatgtaaatttttttataaaaaaaagctcagaattattaaaaaaaaatggattaatgtttgttgcaactctaaacaaaacacttaaatcatatatgtttgcaattattggagctgaatacatattacgatggcttccaattggaacccataattgggaaaaatttgttaagcctgaagatttaataaaaatatcaaagaaaaataatttagaaattaaaaatttagatggtttaaactttaatccgttaagcaataaatggaaaatcagtagtgataattcagtaaattacattgctaaattaaaaa

SEQ ID NO: 226228 - DNA, 472 bp, Unknown
  Bacterial polypeptide expressing nucleotide sequence isolated from the Sargasso Sea
atggctattaacacaataaataaagaagaaatagagaaatttagtcttttagctgaagaatggtggaatccagagggaaagtttaaacctttgcataagtttaatccaattagaattgaatatataaaaaatagtataattaaagaatttaatattaaaaataaaacaaaaccattatcaaatttagaaattttagacataggatgtgggggtggtttattaactgagccaatgtatagacttggcggaaaattaacaggaattgatgcttcagaaaaaaatattaacattgcgaaagcacactctaaaaaagacaatttgaaaataaattatatttgttcatctcctgagaagttaaaaattactaaaaaatttgatgttatattaaatatggagatagtagaacatgtgagtgatttagatatatttataaagtcaagctcacttcttttaaagaaaaatggtttaatgt

SEQ ID NO: 226229 - DNA, 329 bp, Unknown
  Bacterial polypeptide expressing nucleotide sequence isolated from the Sargasso Sea
tatgaaaaataacacaattaacaaaaaagaaatagaaaaattttcaaaaattgctgatgagtggtggaatcccacaggaaaatttaaaccattacataaatttaatccaattaggataaaatatattaaagaaaatctaattgaacatttttcattaaaaaaaaataataaaccattaaaaaacttagaaattttagatattggttgcgggggtggattactttcagagccaatgtcaagattgggtgcgaatgtaactggaattgatgcatctaaaaataatattaatattgcaaaacaccactttaaaaaaagtaaattaaaaataa

SEQ ID NO: 226230 - DNA, 538 bp, Unknown
  Bacterial polypeptide expressing nucleotide sequence isolated from the Sargasso Sea
tttagatattggatgtggtggtggattactttcagaacctatggctagacttggggctgatgttgtaggaatagatgcttcttctaaaaatatacaagtggctaagtatcatttaaaaaaaagcaaacttaaaatcaaatattataattcctctccagaaaatttaaagattaagaaaagatttgatattattttgaatatggaaattgttgaacatgttgaagatgttgattttttcataaaagaaagttcaaaatttttaaaaaaatcaggtgttatgttcattgctactttaaacaaaacacttaaatcatatttatttgcaattgtaggagcagaatatgttttaaagtggcttccaatcggtactcacgattgggagaaatttgttaaaccagagtatttgacagatatttgtaaaaaaaattcattaaaattaaaaaaaattgatggaatgagttttaatcctatcttaaataaatggtctgtcacttctgacaaatctgtaaattatatttcagaattcaaaaaagtttaa

SEQ ID NO: 226231 - DNA, 516 bp, Unknown
  Bacterial polypeptide expressing nucleotide sequence isolated from the Sargasso Sea
tttgagtacaattgataaaaaagaagtagaaaagttttcgaaattagctaaagattggtggaatccaaacggaaaatttaaaccattacatctttttaaccctgctagaattagtttcattaagaaaaaattaatccagtattataaactagatagtagttcagatagtcccttaaaaaaattaaatatattagatattggttgtgggggcggtttattatgtgagcccttgaaaagattaggcgcaaatataactggaatagatgcctcaaaaaataacattgaagttgcaaaattacactctaatgaaatgggtttggacataaaatattttcactcctctccagaaaaatttaaaatcgactctaaatatgatgtaatattaaatatggaaatagttgagcatgtttctgatgtaaatatatttttaaaaaattgttcaaatatgatccaaaaaaatggactcatgtttgttgcaactttaaatagaaatctaaaatcatattttttcgcaat

SEQ ID NO: 226232 - DNA, 541 bp, Unknown
  Bacterial polypeptide expressing nucleotide sequence isolated from the Sargasso Sea
aatgaaaaataacacaataaataaaaaagaaatagaaaaattttcaaaaatagctgaggaatggtgggatcctaatggaaaatttaagccattacataaatttaaccccatcagaataaaatacataagagatacaattttatctgagtttaaaattaaaaaagaacatcagccgtttaaaggcataagtattttagatatcggatgtggtggtggattactttcagagcccatggctagacttggagcagatgttgttggtatagatgcttcttttaaaaatataaaagttgctaagtatcatttaaaaaaaagtaaacttaaaattaaatattataattcctctccagaaaatttaaaaattaagaaaagatttgatattattttaaatatggaaattgttgaacatgttgaagatgttgattttttcattaaagaaagttcaaagtttttaaaaaaatcaggtgtgatgttcattgctaccttgaacaaacacttaaatcatatttatttgcgattgtgggagcagaatatattttaa

SEQ ID NO: 226233 - DNA, 628 bp, Unknown
  Bacterial polypeptide expressing nucleotide sequence isolated from the Sargasso Sea
aaccctattagaataaaatatataaaagataatttaatcattgattttaatctaaaaaataaaaaaaaacctcttcagggattaaatatattagacataggatgtggaggcggattattgtcagaaccattggcaagactaggggcggaggtgactggaatagaccccataaaaagaaatatagaaattgcaaaacatcatttaaaaaaaagtaagcttaatataaaatattataattattctcctgaaaaatttaaattgaataaaaaatatgatgtaattttaaatatggaaattgtagaacatgttgaaaatgtaaatttatttatcaaacatagtacaagatttttaaaaaaatctggaataatgtttattgcaacgctaaatcaaacattaaaatcttatatttttgcaatagttggtgctgagtatatattaaaatggttaccaatcggcactcatgattgggaaaaatttattaaacctgatgaacttataaaaatatgcaaaaaaaactcattaaccttaaaaagttttaatggaatgagttttaacccaatattggataagtggaatatttctgaagataaatcggttaactatattacgaaatttaaaaaaaattaat

SEQ ID NO: 226234 - DNA, 556 bp, Unknown
  Bacterial polypeptide expressing nucleotide sequence isolated from the Sargasso Sea
tatgaaaaataacacaataaataaaaaagaaatagaaaaattttccgaaatcgcagaagaatggtggaatcctgaaggtaaatttaaaccattacataaatttaaccccataagaatttcatacataaaaaataatataattaatgcttttcaacttaaaaatactagcgaacctcttaaaagtgtcaaaattttagatatcggttgtggtggtggcttattatctgaaccaatgagtaaattgggtgcagaagtaacagctattgatgcatcagaaaaaaatattaatgttgctaaaatacactcaaaaaaaaataaccttaatattaattatctatgtacttctccagaaaattttaaagtaaaagaaaagtttgatgtgatactaaacatggaaattattgaacacgttgaggatgttgatctttttttaaagtcttgctcaaaacttttaaaaaaaaatgggattatgtttgttgctactctcaataaaacattaaagtcgtatgtttttgctataattggtgcagagtatgtcatgcgctggcttccatag

SEQ ID NO: 226235 - DNA, 293 bp, Unknown
  Bacterial polypeptide expressing nucleotide sequence isolated from the Sargasso Sea
aatgactagtgtaaataaaaaagaaatagataaattttctaaaatggccaatgaatggtgggatccagagggtaaattcaaaccacttcataaatttaatccaacaagaataaaatatataaaagaaaatattattaataatttcaaattaaaaaataaatccaaacctttattaggaataaaaattttagatattggatgtggtggaggattgttatctgaaccaatgtcaagaatgggtgctaatgtaacaggtattgatgcatcagataaaaatattaaaatttgcaaaa

SEQ ID NO: 226236 - DNA, 448 bp, Unknown
  Bacterial polypeptide expressing nucleotide sequence isolated from the Sargasso Sea
atgactagtgtaaataaaaaagaaatagataaattttctaaaatggccgacgaatggtgggatcctgaaggtaaattcaaaccacttcacaaatttaatccaacaagaataaaatatttaaaggaaaatatagtttacaatttcaaattaaaaaataaatccaaaccattatcaggtataaaaattttagatattggatgtggtggaggattgttatctgaaccaatgtcaagaatgggtgctaatgtaacgggtattgatgcatctgataaaaatataaaaattgcaaaagttcattcaaaaaaaaataaactaaaaattaattatgtatgttcgtcgccagaaaaacttaaaattggaaataaatttgatgtcattttaaatatggaaattgttgaacatgtggaggatattgatttttttctaaagtcatgttcaaagcttttaa

SEQ ID NO: 226237 - DNA, 556 bp, Unknown
  Bacterial polypeptide expressing nucleotide sequence isolated from the Sargasso Sea
atgagtactataaacaaaaaagaaattgaaaaattttcaaaaatagccaatgaatggtgggatatagaaggaaagttcaagcctttacataaatttaatcccttaagaataaaatatatcaaagacaaggtaatagatcacttcaaaattaattcaaaatcacaaccattaaaaaatcttgaacttttagatattggttgtggtggaggtcttttatctgaacctatgtgtagactaggagctaaagttacagctatagatgcatctcaaaaaaatatagatgtagcgtcttatcattcaaaaaaaaataacttaaaaattaattacttatgttcctctcctgaaaaaattagtttaaataaaaagtttgatataattttaaatatggaaattgtagaacatgttaatgatttaaatttttttttaaaaaaaagttctttactattaaaaaaaaatggattgatgtttgtagctactttaaacaaaacacttaaatcatatatgtttgcaataatcggagccgaatatgttttaaaatggcttccaataggaacac

SEQ ID NO: 226238 - DNA, 493 bp, Unknown
  Bacterial polypeptide expressing nucleotide sequence isolated from the Sargasso Sea
aatgaaaaaaatcacaattaataaaaaagaaattaataagttttctaaactagctgaagaatggtgggaccctaatggaaaatttaaaccattacataattttaacccagttcggctaaaatatattaaagacagtattttaaaaaaatataaaaataatgataaaaaacgaccacttaagaatataagaatattagatattggatgtggtggcggtctattgtgtgagccattatctaaattaggagctgaagttgtgggtattgacgcatctgaaaaaaatatcaaaatagcgaaattacattctagagaaaataatttaaaaattaattatttttgtgcttcaccggagaattttaaaattaaaggaaagtttgatgttattttaaatatggagattgttgagcatgtagaaaatgtgaatttttttttaaatcagagcacaaaatttttaaaaaaaaaaggtctgatgtttgttgcaactttaaaataa

SEQ ID NO: 226239 - DNA, 598 bp, Unknown
  Bacterial polypeptide expressing nucleotide sequence isolated from the Sargasso Sea
atgaatgatcataaaattcattgtatgaaaattgcaaaaaaatatggaaaggaatattgggatggcaataggagatatggatatggaggttataaatatatcgaaggaaaattagaaaaagttgcaaaaagaattataaaaaattacggattaaataattcctcaaaaattttagatattggttgtggtaaaggatatctattatatgaaattaaaaaagttttgcctaagatcaaagtttatggatttgacgtgtcgaagtatgcaattgttaattcaaaaaaagagataaaaaaatatttattcaccggagatattcgaaaaacattcaaatttaagaaaaaatattttgatttggtgttttgtttaggggtatttcataatttaaatttaattgaaattgagagatctttaaaaaaaataaataaaattgcaaaaaaatcttttataatggttgagagctatagaaatgaaaaagaattgtttaatttacaatgctgggctctaacttgcgatagttttttctctccatctgaatggaaatatattttcaaaaaaaacgcgtataaaggtgattttgaattcatttatttttaga

SEQ ID NO: 226240 - DNA, 460 bp, Unknown
  Bacterial polypeptide expressing nucleotide sequence isolated from the Sargasso Sea
tatgagcacaataaacaaaaaagaaatagaaaaattttcaaagattgcttctgaatggtggaatcctaatggaaaattcaaacctttgcataaattcaaccctataagaataaaatatataaaagaaaatataattcaaaattttaagattaattctgaaaacaaacctttaaaaaaaattaaaattttagacattggatgtggtggaggacttttatcagaaccaatgtgcagactgggtgcagaagtagttggaattgatgcttcgaaaaaaaatattgaaatagcaaaaattcatgcaaaagaaaacaatttaaaaattaattatatgtgtgcaacacctgaaattttaaagaatcaaaaatttgatgttattttaaatatggaaatagttgaacatgtggaagatgtaagtttttttatgaagaaaagttcggagttgctaaaaaaaaatggtctt

SEQ ID NO: 226241 - DNA, 411 bp, Unknown
  Bacterial polypeptide expressing nucleotide sequence isolated from the Sargasso Sea
aatgaaaagtaacacaataaatattaaagaaatacaaaaattttccaaaatggctgatgagtggtgggacccaaatggaaaatttaaaccattacacaaatttaatcctgttagaattcattatatcaaaaataatattattaaacatttcaaattaaaaaatagaaacaaaccattaaaaaatttaaatattttagatattggttgtggaggaggtttattgtctgagccaatgtgtagattgggagccagcgttacaggaatagatgctgctgaaaaaaacataaaaattgccaaaattcatgccaaaaaaaataagttaaatataaaatatatttacaattcacctgaaaattttttaagcaaaaaaaaatttgatattgttttgaacatggaaatagttgaacatgt

SEQ ID NO: 226242 - DNA, 625 bp, Unknown
  Bacterial polypeptide expressing nucleotide sequence isolated from the Sargasso Sea
atggctaataacacaataaataaacaagaaatagaaaaatttaatagattagctgaggaatggtgggatccagagggtaaatttaagccattgcataaatttaatcctgtaaggatcgaatatattaaaaataatataatcaaaaaatttaaaataaaaaataaaaaaaaacctttttcaaatttaaacatattagatattggatgtggcggtggtttattagcagaaccaatgcatcgtctgggtggcaagataactggaatagacgcttcaaataagaatattcaaattgcaaaaatacatgcaaaaaaaaacaattttaaaatagattatatttgttcttctcctgaaaattttgaatcaaaaaaaaaatttgatgtaatattaaatatggaagttgtagaacatgttgataatcttaatttttttattaaatcgagttcatctttattaaaaaaagatggagtcatgtttatagcaactataaacaaaactttaaaatcatacatctttgcaatcattggtgctgaatatatattaaattggttaccagtgggaactcacgattggtttaaatttgtagaaccttcaaaattacaaaaaatattgaaagaaataatttaaa

SEQ ID NO: 226243 - DNA, 532 bp, Unknown
  Bacterial polypeptide expressing nucleotide sequence isolated from the Sargasso Sea
atgaaaagtatcacaataaataaacaagaaattgcaaaattttctaaaatagccacagagtggtggaaccctgaaggaaaatttaaaccattgcacaaatttaaccctataagaataaagtacataaaagacaatataattaaaaactttaaattaaattcaacaattaaacccttaaaaaaaattaatattttagatattggatgtggaggaggattgttaactgaaccaatgtgtagattgggtgcaaatgtagtgggtatagatgcctctcaaaaaaatattgatattgcaaaatatcatgcaaaaaaaaacagactaaaaataaattatttgtgtactacgcctgaagatttaaagataaaaaaaaaatttgatgtaattttaaatatggaaatagttgaacatgttgaaaacgtaaatttttttcttaaaaaaagttcagaattattaaaaaaaaatggtttaatgtttatagcaactttaaataaaactttaaaatcatatgcatttgcaattataggtgctgaat

SEQ ID NO: 226244 - DNA, 688 bp, Unknown
  Bacterial polypeptide expressing nucleotide sequence isolated from the Sargasso Sea
agaatttaataaatttaacaaattgttaaagaaaagaaataataggcagccactagctcaaataataaataaaaaagaattttggaagaaaaatttgtatatagatgacaatgtactaattcccagaccggaatcagaacatttagtcgaggaaacaataaatttaattaaggatgcagccaattacagcatattggatataggatgtggttctgggtgtttgataatttcaattttattagaaaaaattaaatgtagaggaattgcattagatgtttctaaaaaagcgatcaaagtgtcaaaaattaatgcaaaaatgcaacatattgaaaatagaataaaatttatacattcagatattgacaaactaatagttggaaaatatgatttaattgtaactaatccaccatatataagtaaacataaaataaaatatttggatgatgaggttagaatatttgagccaaaattagcattagatggcggcattgatggtctttcaaaaattagaaacataattttaaaatcatcaaaattaattaaaagaggtggtaaattgattatagagattggatttgatcaaaaatataaagtactggaaatattgaaaaaaaattttttttacgtaaataaggttgttaaagattatagtggcaaagacagatgtataatatccaccaaattataa

SEQ ID NO: 226245 - DNA, 712 bp, Unknown
  Bacterial polypeptide expressing nucleotide sequence isolated from the Sargasso Sea
aaataaaaaagaaatagaaaaattttcaaaaatagctgaggaatggtggaatcctaacggaaaatttaagccattacataaatttaaccctatcagaatcaagtacataagggatacaattttaaatgaatttaaaataaaaaaagaacatcaaccgtttaaaggtttaagtattctagatataggatgtggtggtggtttactttcagaaccgatggcaaaacttggaggtgatgtttttggtatagatgcttctaataaaaatatacaggtagctaagtatcatctaaaaaaaagtaaactaaaaattaaatattataatactgcccctgaaaattttaaaataaaaaaaaaattcgatataattctaaatatggaaattgttgagcacgttgaagatgtggatttttttattaaagaaagttcaaaatttttaaaaaaatcaggtttgatgttcgttgcaaccttgaataaaactcttaaatcttacttatttgcaattgtaggagctgagtatgtcttaaagtggctgccaataggtactcatgattgggaaaaatttgttaaacctgaatatttaacagatatttgtaaaaaaaattctttaaaattgaaaaaaatcgatggaatgacttttaaccctttattaaatgaatggtcgttaacatctgacaagtctgtaaattatatttcagaatttaagaaaatttaa

SEQ ID NO: 226246 - DNA, 361 bp, Unknown
  Bacterial polypeptide expressing nucleotide sequence isolated from the Sargasso Sea
atgaaaaataacacaattaacaaaaaagaaatagaaaaattttcaaaaattgctgatgagtggtggaatccaacaggaaaatttaaaccattacataaatttaatcctataaggataaaatatattaaagaaaatctaattgaacatttttcattaaaaaaaaataataaaccattaaaaaaattagaaattttagatattggttgtgggggtggattactttcggagccaatgtcaagattgggtgcgaatgtaactggtattgatgcatctaaaaataatattaatattgccaaacaccacttaaaaaaaagtaaattaaaaataaattatttaaattgttcaccagaaaacttaaata

SEQ ID NO: 226247 - DNA, 713 bp, Unknown
  Bacterial polypeptide expressing nucleotide sequence isolated from the Sargasso Sea
aaataaaaaagaaatagagaaattttctaaaatggcatctgagtggtggaatccactaggtaaatttaaaccattgcataaatttaaccccataagaataaagtatattagagatagtgcggctaaacattttaaaataaagtcaaataatctacctctaaaaaatcttagcattttagatattggttgtggtggagggctattgtctgagcctatgaacaaattgggagcgtccgtaactgggattgatgcttcagaaacaaatattaatatcgcaaaaattcactcaaaaaaaaataaattaaaaataaattatatttgtgcatcgcccgaaaaattaaaaataaatcaaaaattcgacataatattaaatatggaaattgttgaacatgtagaggatgtaaattattttatcagtaaaagttctcaatttttaaaaaaaggtggtttaatgtatgtggcaacactaaataaaactttaaagtcttacctttttgcaattattggagcagaatatattttaaggtggcttccaataggaacacatgaatgggataaatttattgaaccttcaaaattaattaaatatggaaaaaaaaattctttggaattaaaaaaattagacggcatggtatttaatcctattatggataggtggaatataagtagtgataattcagttaattatattgttcaatttaaaaaaatttaat

SEQ ID NO: 226248 - DNA, 313 bp, Unknown
  Bacterial polypeptide expressing nucleotide sequence isolated from the Sargasso Sea
aatggaaactaacacaataaacaaaaaagaaatagaaaaattttctaaaatcgctgaagaatggtgggatccgaatggtcaatttaaacctttacataattttaatccaataagaatttcttatatcaaagaaaatattattaaaactttcggccttaggagtgaagacaaaatcctatctgggattaaaattttagatattggttgtggaggtggattattatctgagccaatgtcaagacttggagctgaagtttatggaattgacgcgtcaaaaaaaaatatgaagttgcaaaaattcacgcaaaaaaaa

SEQ ID NO: 226249 - DNA, 461 bp, Unknown
  Bacterial polypeptide expressing nucleotide sequence isolated from the Sargasso Sea
aatgaatacaataaataaaaaagaaatagacaaattctctaaaattgcaaatgaatggtggaatccagagggaaaatttaagcctcttcataaatttaaccctataagaattgattatttaaaaaagaacataattaaacattttgatataaaaaacaaaaaaaataataaaccactaaatggagttagtattttagatattggatgtggaggaggtttgttatctgaaccaatgtttagactaggtgcaaaagttactggtatagatgcatctgaaaaaaatataaaaattgctaagttccattcaaaaaaacaaaatctcaaaataaactatctatgtacttcaccagataatatgaaaggtaacgaaaaatttgatgttatattaaatatggaaattgttgagcatgtagataatttagatttattttttaaagaaagctctactcattttaagaaaa

SEQ ID NO: 226250 - DNA, 322 bp, Unknown
  Bacterial polypeptide expressing nucleotide sequence isolated from the Sargasso Sea
atggaaaataacacaattaatataaaagaaatagaaaaattttcagctatggcagatgaatggtgggatcccaatggaaaatttaaaccattacatagatttaatcctatcagaatagaatatattaaaaaaacattacttttacattttaaaattaaagacggattaagacctctttcaggtttaaatattttagacattggatgcggcggaggtttactgagtgagccaatgtataatttaggagctaatgtgacaggcatagatgcttcagataaaaatatcaatattgcaaaatcacatgctaaaagaaataatctta

SEQ ID NO: 226251 - DNA, 643 bp, Unknown
  Bacterial polypeptide expressing nucleotide sequence isolated from the Sargasso Sea
ttatggtgggataaaagcggtccatttaaagcacttcatttactgaatccgatcaggtttaaatttattacaaaattttcagacatcaaggataaagaggttttagatgttggatgtggaggtgggatattatctgaagaacttgcaaaaaataaagcttttgtaactggactcgatttatctgaagagtctataaaaattgctgacatccacaaggaagtttcgggcttagaaataaattatattaattgtagtacaaagtctcttttatctaggggaaaaaaatatgacatcatttgttgctttgaaatgcttgaacatgtcgatgatccaaaagaaatcattaaagagtgtctgagtcttttaaaaccaaatggatccttttatatgtctacactgaatagaaatttaaaatcgtttgtatctattattgttggtgcagagtatttattaaatatggtgccaaaaggtactcatagttattcaaaatttattaaaccatcagaaataaacaattacctaattcaaaacaaatatgttataaaaaatatttctggtattaaatataattttttgtataaaaatttttatgaatcttcagatgtaagtactaactatattcttcatgcacaaaaaatctaat

SEQ ID NO: 226252 - DNA, 288 bp, Unknown
  Bacterial polypeptide expressing nucleotide sequence isolated from the Sargasso Sea
attgatttctcactttaagcttaattttaacgatgaaaaacctctaaaaaaaataaaaattttggatattggttgtggtggtggacttttgtgtgagccattaagtgtgcttggagctaatatgacaggtattgatgcatccattaataatattaaagtcgcaaaaatgcattcaaaagaaatggatttaaaaattaattatattcattgcgctcctgaaaatttgaattttaaaaatgaatttgatgtaattttaaatatggaagttgtagaacatgttgcagatgt

SEQ ID NO: 226253 - DNA, 488 bp, Unknown
  Bacterial polypeptide expressing nucleotide sequence isolated from the Sargasso Sea
aatgagtagcgtaaataaaatagaaatagaaaaattttcaaatatggcggatgaatggtgggatccccatggaaaatttaaacctttacataaattcaatccaatacgtattaaatatattaaagaaaacataattagacaatttaaaataaaaaataagaataagcctctttctggaattaatattttggatatcggttgtggtggtggtttgctttctgaaccaatgtgtagattgggtgctaatgtaactggaattgatgcatcaacaaagaatgtaaaaatttcaaaactccatgcgaaaaaagataatcttaaaattaattatatttgttcgtctcctgaaaaattaaaaattagtaaaaaatttgatgtaatactcaatatggaaatagttgagcatgtagaggatatttctttttttttaaaatcatgctctaagcttttaaataaaaatggattaatgtttgttgcaacgattaataaaa

SEQ ID NO: 226254 - DNA, 268 bp, Unknown
  Bacterial polypeptide expressing nucleotide sequence isolated from the Sargasso Sea
atgaaaaaagataccattaataaaaaggaaattgataaattttcaaaattagctgatgagtggtgggacccagagggtaagtttaaaccattgcataattttaatccagtcagactaagatatattaaagatacaattataaaaagatttggaaatagatcagaaaaattgcctttaaaagacataaagatattggacattggatgcggtggaggtcttttaagcgaacctctttcaagattaggcgcaacagttacaggtatagatg

SEQ ID NO: 226255 - DNA, 472 bp, Unknown
  Bacterial polypeptide expressing nucleotide sequence isolated from the Sargasso Sea
aatgaaaaataacacaataaataaaaaagaaatagaaaaattttctaaaattgccgaagaatggtggaatcccgaaggtaaatttaaaccattacataaatttaacccaattagaatttcatacataaaagaaaatattattgagacattcaaactcggttataataagactcccctcaaagatatcaaaattctagatataggatgtggggggggtttattatcagaacccatgtgtagattgggtgctaaagtgactggaatagatgcatctgataaaaatattaaagttgcaaaacttcattcaaaaaaaagtaatcttcaaatagattatttctgttcatcacctgaaaaatttgatgcaaaagaaaagtttgatgttatcttaaatatggaaatcgtagaacacgtcgaagatgtaaatttttttttaaaatcatgcagcaaactactaaaaaaaaatggaattatg

SEQ ID NO: 226256 - DNA, 730 bp, Unknown
  Bacterial polypeptide expressing nucleotide sequence isolated from the Sargasso Sea
atgaacaataatactattaacaaggaagaattagaaaaatttaataaaatagccaatgaatggtgggatcctaagggaaaatttaaaccacttcacaaatttaatccaattagaatagagtacataaaaaacaatattattaaagattttaagatttcatctaatcacaagccgctaaagggaataagtattcttgatattggatgcggaggaggtttattatctgagcctttggcaagacttggagcagaagttgtgggcattgatgcatcgaaaaaaaatattgagattgcaaaacatcatttaaaaaaaagtaatttgaagattgaatattatgataaatccccagagaattttaactatgaaaaaaaatttgatgtaattcttaacatggaaataattgagcatgttgaagatattcctaaatttataaatcaaagtgctaaatttttaaaagataatggagtaatgtttatagctactttaaaccaaacattaaaatcgtatatatttgcaataattggagctgaatatattttaagatggcttccgattgggactcatgattggaataaatttgttaaacctgaaaatctagaaaatatctgcaataaaaattcacttatattaaaaagaattgatggagttaaatttaatccacttttaaataaatggagtctctcaagtgataaatccataaattatatcacgaaatataaaaagggctaat

SEQ ID NO: 226257 - DNA, 616 bp, Unknown
  Bacterial polypeptide expressing nucleotide sequence isolated from the Sargasso Sea
atgaatagcataaataaaaaagaaatagaaaaattttctaaaatagcctctgaatggtggaatccagaaggaaaatttaaaccactacataaatttaacccaatcagaattaagtatattaaagaaaatataattaataattttaaattaaaaaacaaaagtaaacctttatcaggagtaaacattttagacattggctgtggtggaggattgctttctgaaccaatgtcaaggatgggtgctaatgtaactggaattgatgcatcagaaaaaaatataaaagtcgctaaactacattcgaaagaaaataaattaaaaattaattatttatgttcatcacctgaaaaacttattattaaaaaaaagtttgatgtcattttaaatatggagattgtcgaacatgttgaagatttagatttttttttaaagtcgtgctcaaatcttttaaaaaaaaatggtataatgtttgttgcaacaataaataaaactttaaaatcttatgtttttgcgattgttggtgcagaatatattttaagatggcttccaataggaacacatgaatgggaaaaatttgtaaagcctgaagaacttaaaaatattcttatgaaatataatt

SEQ ID NO: 226258 - DNA, 608 bp, Unknown
  Bacterial polypeptide expressing nucleotide sequence isolated from the Sargasso Sea
tatgagtacagtaaacaaaaaagaaatagaaaaattttcaaagatagctactgaatggtggaatcctgatggaaaattcaaacctttgcataaattcaatcctataagaataaggtatttaaaagaaaacattattaatcattttggaattaaatcaaaaaatcaaccattaagaaaattagacattttagatattggatgtggaggtggattgctatccgaaccattttcacgtttaggtgcaaatgttatggctattgatgcttcaaaaaaaaatatagaagtagcaaaatttcatgccaaaaaaagtaaccttaaaattaactataaatgtgtttcgccagaaaaacttaaagtaaaaaaaaaatttgatgtagtgctaaatatggaaatagtagaacatgttagtgacttaaatttttttataaaaaaaagttctgacttagtaaaaaaagatggtttaatgtttatagcaactttaaacaaaacactaaaatcatatatatttgcgatagttggtgctgaatatattcttagatggttgccaataggtactcatgattggagcaaatttgtaaaacctgatgaattaattgaaattgccaaga

SEQ ID NO: 226259 - DNA, 621 bp, Unknown
  Bacterial polypeptide expressing nucleotide sequence isolated from the Sargasso Sea
aatgaatacagtaaacaaaaaagaaattgaaaaattttcaaaaattgctgatgaatggtgggatatagaagggaagtttaagcccttacacaagtttaatcctttaagaattaaatacattaaagaaaaaatagtctctcacttcaatatagattccaaattacagccacttaaaaatattgaacttttagatattggttgtggtggaggtctcttatctgaaccaatgtgtagattgggtgcgaaagttactgcaattgatgcatcaaaaaaaaatatagatgttgctagttatcattcaaaaaaaaataatttaaaaattgattacctgtgttcttcacctgaaaatattaaattaaataaaaaatttgatgtaattttaaatatggaaattgtagagcatgttgatgatttaaatctttttataaaaaaaagtagtttattattaaaaaaaaatggtctgatgtttattgctactttaaataaaacgctaaaatcttatttgtttgctatagttggcgcagagtatatcttgaaatggcttccaataggaacacatgattggaacaaatttgttaaaactaaagatctaattgatatagcaaataaaaatgatttgga

SEQ ID NO: 226260 - DNA, 631 bp, Unknown
  Bacterial polypeptide expressing nucleotide sequence isolated from the Sargasso Sea
aatgaaaagtagcacaataaataaaaaagaaatagagaaattttctaaaatggcatctgagtggtggaatccactaggtaaatttaaaccattacataaattcaaccctataagaataaagtatattagagatagtgcagctaaacattttaaaataaagtcaaataacgaacctctaaaaaatcttaatattttagatattggttgtggtggaggactattatctgagcctatgaataaattaggagcatccgtaaccggaattgatgcttcaaaaacaaatattaatatcgcgaaaatccactcaaaaaaaaataaattaaaaataaattacatttgtgcatcgcccgaaaacttaaaaacaagtaaaaagtttgatataatattaaatatggaaattgttgaacatgtggaagatgtaaattattttatcaataaaagttctcaatttttgaaaaaaaatggtttaatgtatgttgcaacccttaataaaaccttaaagtcttatctcttagcaattattggagcagaatatattttgagatggctgccaataggaactcacaaatgggataaatttattgaaccttcaaaattaattcaatatggaaaacaaaattctttgaaatag

SEQ ID NO: 226261 - DNA, 373 bp, Unknown
  Bacterial polypeptide expressing nucleotide sequence isolated from the Sargasso Sea
atgagtaatacagtagacaaaaaagaaatagaacaattttcttcattaagcaaccaatggtgggaaaagtctggtcctttttcagcattacacaagatgtcaaatgcaagaattgaatttataatacaaaacgcaagtagaattataaataataatattggaataaattctttggatggtttgaattgtctagatattggttgtggaggaggaattttatcagaaaagctagtgaggttaggggcatttgtaactgggatagatgcctcagaagattcaataaaagtagcgaaagaacatgcagaaaacagtcgattaaatataaattataagtgtatttcaactagtgatcttctgaaatttgaaaaagaaa

SEQ ID NO: 226262 - DNA, 538 bp, Unknown
  Bacterial polypeptide expressing nucleotide sequence isolated from the Sargasso Sea
cttgatataggatgtggtggaggtttattatcagaacctatgtgtagattgggtgctagagtgactggaatagatgcatctgacaaaaatatcaaagttgcgagactacattcaaaaaaaaataatcttcaaatagattacttctgttcatcacctgaaaaattcgacactaaagaaaagtttgatgttatcttaaatatggaaatcgtagaacatgtcgaagatgtaaatttttttttaaaatcatgcagtaaactactaaaaaaaaatggaattatgtttgtggcaaccttaaataaaacattgaaatcttatatttttgcgattgtaggagctgaatacatattacgttggcttccaataggaacacatgaatggggaaaatttttaaaacctgaagatttaatttcaatacttgaaaaaaatgatcttagggtagatagagtagatggaatgaattttaatttaattaaagataaatggagtgtaggtaatgataagtcagtaaattatattgccatgtttattaaaaattaat

SEQ ID NO: 226263 - DNA, 475 bp, Unknown
  Bacterial polypeptide expressing nucleotide sequence isolated from the Sargasso Sea
atgaaaagtaacacaattaataaaaaagaaatagaaaaattttctaaaattgctgaagaatggtggaatcctgagggaaaatttaaaccactgcataaatttaacccaataagaatttcttatattaaagaaaatataattaatacatttaacttaaatcataaaaatgctccattaaaaaatattaaaattctagatattggttgtggaggaggtttattatcagagcctatgtgcagactaggtgccaaagtaactgcaattgacgcatctaaaaaaaatataagtgttgcaaaattacattctaaaaaaaataatcttaacataaattatttatgtacatcacctgaaaaattaaaaactaaagataagtttgatgtaatcttaaatatggagattgtagaacatgttgcagatgtaaattattttttaaaaacatgtagtaaacttttaaaaaaaaaatggaataatgttc

SEQ ID NO: 226264 - DNA, 688 bp, Unknown
  Bacterial polypeptide expressing nucleotide sequence isolated from the Sargasso Sea
atgaaaaaaaatattgaagtagacaaggatgaaattttaaaattcgaagcaatggcttctgaatggtgggatccttacggtaaattcaagcccttacacatgctcaatccttgcagattagagtatattacatctcaaatcaaaactcattttaattgtgattataaagacttagagccttttaaaggattaagaattttggatattggttgtggaggaggtctattgacagaaccaatggcaagattaggcgcatccgtagttggtgtagaccctgttgagaaaaatataaaagttgctaaattgcactcagaaaaatctggtttagaaataaattatatggcctctacggctgaaaatcttttgtctaaaaaagaactttttgatgtaattttgaatatggaagttatcgaacatgtgcctaaccctcaaagttatctccatacctgttctaaacttctgaaaaaaaatggtttaatgacctgctctactattaacagaaattacaaaagttatttatttgcaattattggagcggaatatgtaatgaaatggcttcccaaaaaaactcatgaatggagtaaatttattaaacctgaggaattatttgatttaactgaaaaatccgatttaaaagttttagataaacgaggttttgtttttaattttttgaagtgggattggagtt

SEQ ID NO: 226265 - DNA, 538 bp, Unknown
  Bacterial polypeptide expressing nucleotide sequence isolated from the Sargasso Sea
atggtgacaacagccgataagagagaaattgataattttgctgctctatctgatcactggtgggacgtgcgcgggccaatggcaccacttcatgctttcacgccgatcagaatcgattatattttgactaatgttgaacggttttggccgcgtaaagcacgtccgagtgcttcagcatcgtatccgctgactggattacgcatcctcgatattggatgtggcggcggcttacttgctgaaccaatggcacggcttggcgcaacgatgaccggcattgacgtaaccgaaacagcaatcatggccgccactgcgcacaccaaacaggtcggtctggatattgattaccattgttgcactgccgaggagatggccagcagtggagcgtcttttgacgtcatctatgcatcagaagtgattgaacatgtcgcaaaccgtagcttatttgtgactgcgattgccagcatgctggatccaaagggcgtggtcattgtgaccacaatcaaccgcagcttgccagcttttttgctagcaaaattgc

SEQ ID NO: 226266 - DNA, 421 bp, Unknown
  Bacterial polypeptide expressing nucleotide sequence isolated from the Sargasso Sea
aatgaaaaataacacaattaataaagaagaaatagaaaaattttcaaaaatcgcagatgaatggtggaatccaacaggcaaattcaaaccattacacaaatttaatcccataagaatttcatacattagagataatataacaagctcttttaaacttaaaaataaaagaaaacctcttgaaaaggttaaaattttagacataggctgtgggggaggattgttatctgaaccaatgagtagattaggtgcagaggtagttgggattgatgcttcagaaaaaaatattcaagttgcaaaactacatgccaaaaaaaatggtttaaatattaaatatcattgctcttcacctgaaaattttgttacaaatacaaaatttgacgtgattctaaatatggaaattgtcgaacatgttgaggatgta

SEQ ID NO: 226267 - DNA, 613 bp, Unknown
  Bacterial polypeptide expressing nucleotide sequence isolated from the Sargasso Sea
agatacattaaagatgcaattacgcaaaaatttgggaataagtcagaaaaattacctttaaaaaatattaagatattagacattggatgtggtggaggtcttttaagcgagcctctttcaagattaggtgcaacggttacaggtatagatgcctcggatagaaacatcaaaattgctaaaatgcatttggaaaaaagtaaattagaaattaattattactgttcatctccagagaagtttgttgctaaagaaaaatttgatgtagtgttaaatatggagatagtagaacatgtagataatgttgatttttttttatttaagagctcagaacttttgaagaagaatggtttaatgtttattgcaactttaaataaaacattaaagtcttatgcctttgcaataataggtgctgaatacatcttaaaatggttgccaataggcacccatgactggaacaaatttttaaaacctaacgatttaattaaaatttgtaagaacaattcattaaatttaaaaaacttggttggtgtaaagtttaacgttttgaaaaatgaatggattatatctaaagatagctctgtaaattatctcgcagaattttctaaaaattaat

SEQ ID NO: 226268 - DNA, 612 bp, Unknown
  Bacterial polypeptide expressing nucleotide sequence isolated from the Sargasso Sea
aatgaaaaatattactattaataaaaaggaaattgataaattttcaaaattagcgtcagaatggtgggaccctgagggaaaatttaaacctttgcataaatttaatcccgtaagacttaattatattaaaaaatgtatagttgaaaatgttaaaaaaaaaaatactgcaaaacctttaagaaatattaaaatattggatataggttgtggaggtggcctcctttgtgagcctctctcaaaattgggtgctaaagtcgtaggtatagatgcctcagagaaaaatataaaaattgccaaaacccacgcaaaacaaagtaatttgaaaataaactatttttgtgcttctccagaaaagtttaattttaaagggaaatttgatgtggtcttaaatatggaaattgtagaacatgtaggaaatgtgagtttatttattaaggaaagtgcaaaatttttgaaaaaggatggaataatgtttattgcaactttaaacaaaacactaaaatcatatatctttgcaatactgggtgcagaatatattttgagatggttgccgattggtactcatgattggaatatgtttgtagaaccacttaagcttaaacaaatatgtaa

SEQ ID NO: 226269 - DNA, 664 bp, Unknown
  Bacterial polypeptide expressing nucleotide sequence isolated from the Sargasso Sea
aatgaaaagtaacacaattaataaaaaagaaatagataaattttcaaaaattgctgaagaatggtggaatacaaacggaaaatttaagcctttgcacatatttaatcccataagaattaaatatattaaagaaaacattgtaaaaaatcttaaaattaaaaataaaataaagtcaaaaaattttagtgatttaaacttgttagatataggatgcggaggtggattgttatctgagcccatggcaagactgggagccaatgttataggtattgatgcttcagatcaaaatataaaagttgcaaaacatcatttaaataaaactaaacttaatattaagtatattaatacctctccagaaaattttagaactaataaaaaatttgatgtaattttaaatatggaaatagtagaacatgtagaagatttaaatttatacattcaagaaagttcaaaatttttaaagaaatctggtataatgtttgtagccacattaaatcaaactttaaaatcatatatatttgctattgttggagctgaatatattttaagatggcttccaattggaacacatgattggaataaatttgttaaaccaaaaaatttgattgatatttgtaaaaaaaattctttaagtttaaaaaaaattgatggaataaaatttaat

SEQ ID NO: 226270 - DNA, 311 bp, Unknown
  Bacterial polypeptide expressing nucleotide sequence isolated from the Sargasso Sea
aatgaaaaataacacattagataaaaaagaaatagaaaaattttcaaaaattgcagaagaatggtggaatccttccggtaaatttaagcctttacataaatttaaccctattagaataaaatatataaaagattatttaataaatgatcttgatattaaaaaaaaaaagaaacctttaaaaggtcttaatatgctagatataggttgcggtggaggattgctgtctgaaccgatggcaagactaggagcaaaagttacaggtatagatcctatacaaagaaatatagaaatagcaaaacatcatttaaaaa

SEQ ID NO: 226271 - DNA, 493 bp, Unknown
  Bacterial polypeptide expressing nucleotide sequence isolated from the Sargasso Sea
atgagcacaataaacaaaaaagaaatagaaaaattttcaaagattgcttctgaatggtggaatcctaatggaaaatttaaaccattgcacaagtttaaccctataagaataagatacataaaagacaatgtaattgaaaattttaaattgagcccttcttctaaaccattaaagaaaattaaaattttagatattggatgcggaggaggacttttatcagaacctatgtgcagactaggtgcagatgtaatgggtattgatgcatcaaaaaataatattgaaatagcaaaaaaccatgcaaaaaaaaataaattaaaaattaattatatgtgtgcaactccagaaattttaaaaaataaaaaatttgatgttattctaaatatggaaatagtcgagcatgtagaggatgtaaatttttttataaaaaaaagttctgaattattaaaaaaaaatggcttgatgtttgttgccaccattaaacaaaaactttaaa

SEQ ID NO: 226272 - DNA, 646 bp, Unknown
  Bacterial polypeptide expressing nucleotide sequence isolated from the Sargasso Sea
taagccattacataaatttaatcctttaagaatagagtacataaaaaataatattattagagaatttaaaattaaaaaaaaaaataaacctctaaacaatttagaaattttagatataggctgtggaggtggattactatctgagccaatgagtaggttaggtggaaaagtaacaggaattgatgcctcaattaaaaatatcaatattgctagagcacatgcttttaaaaataatttgaaaataaattatattaatgcctcgccagaaaagttaaaatataaaaaaaagtatgatgtaattttaaatatggaggtagttgaacacgttgatgatataaatctttttataaaatcttgctccttattgttaaaaaaaaatggaattatgtttttagcaacaattaataaaacattaaaatcctatttatttgcaataattggtgctgagtatgttttgaattggctacccgtaggcactcatgattggttcaaatttgtagacccgaaagaattagacttaatttgtaaaaaaaatacgcttcagttattagaaataaaaggtatgaaatttaatatatttcagaatgagtggaatatttctaaaaatacagatgttaactatataagtaaatttaaaaaattttaa

SEQ ID NO: 226273 - DNA, 552 bp, Unknown
  Bacterial polypeptide expressing nucleotide sequence isolated from the Sargasso Sea
aaaatttaaatattttagatattggatgtgggggtggattactttcagaacctcttactagacttggagcaaatgtaactggtatagatgcttcaaaaagaaatataagtgttgctaaagcacatttaaaaacaagtaaattaaaaattaattatataaatactagtcctgagaaactaaaaataaaaaagaagtttgatgtggttttaaatatggaaattgttgaacatgtagataatttagatttatttattaaggacacatcattttttttaaaaaaaaatggaataatgtttattgcaacgttaaataaaacattgaaatcttatatatttgcaattataggtgctgagtatattctcagatggctaccaatcggtacacatgattgggaaaaatttgtatcacctaaagaattaatagacaaaggtaacaaaaattctctaaagctaaaaaatataactggagttaattttgatttgctaaaaaaagaatggaaaacttcaaaagataaatcagtgaattatatagctgaatttattaaaacttaat

SEQ ID NO: 226274 - DNA, 656 bp, Unknown
  Bacterial polypeptide expressing nucleotide sequence isolated from the Sargasso Sea
aatgaaaaataacacaattaataaaaaagaaatagaaaaattttctaaaattgcatctgaatggtggaatccagaaggtaaattcaaacctttgcataaatttaatcctgtaagaataaaatatataaaagataatagcattaaacattttaaactgaaatcgaataattttcccttaagaaagttaaaaattctggatattggttgtggaggtgggctgctcagtgagccaatgagcaggttgggagctgacgtgattggtattgatgcatcgcagcaaaatattaatgtagctaaactacattcatcaaaaaaaaaacttaaaataaaatatatttgctcatcccctgaaaaactgaacatcaaagaaaaatttgatattatattaaatatggaaattattgagcatgttgatgatgtaaattttttcattaaaaatagcactaaatttttaaaaaaaaatggaataatgtttgttgctactttaaataaaacctttaaatcttatatttttgctattgttggcgcagaatatatcttgaaatggctcccaataggaacgcatgaatggaataaatttgtaaaaccatctgaattaattgaaattgcagagaaaaattcaatgaaaattgaaaaagttgatggtgttgttttta

SEQ ID NO: 226275 - DNA, 518 bp, Unknown
  Bacterial polypeptide expressing nucleotide sequence isolated from the Sargasso Sea
aatgaaaaataacacaataaataaaaaagaaatagaaaaattttctagtattgctgaggaatggtgggatccaactggtaaatttaaaccgttacacaagttcaacccaattagaatttcatatattaaaaataatatcatcaaaagcctaaaactaaataataacgaaaaacccttaaaaaaagtgaaaattttagatattggatgcggtggcggcttactaactgaaccgatgaaaaaattaggagcagatgtagttggaattgatgcctcagaaaaaaatataaagattgctaaattacattcaaaaaaaaataatttaaatattaaatatctatgtgtctcacctgagaattttattgcaaaagaaaaatttgatgtgatactgaatatggaaatagtggaacatgttgaagatatagatttttttttaaaatcatcatcaaaacttttaaagaaaggtggaataatgtttgtagcaactttaaataaaacacttaaatcgtacttatttgcta

SEQ ID NO: 226276 - DNA, 415 bp, Unknown
  Bacterial polypeptide expressing nucleotide sequence isolated from the Sargasso Sea
aatgcaagaatatctagaaattcaaagtctagatgggaaaacttttctagatattggatgtgggagcggcttaatgagtctcgcagcaagaaaactaggggcaaaggtattatctttcgattatgataagaattcagtggagtgcacgaggtttttgaaagaattgtattttaaggatgatatctattggacgattgaagagggatcagtactcaataaagattatttaaggactattggaaaatttgattttgtttattcatggggagttttgcatcatactggcagtatgaatactgctttaaataatgtacttatacctttatcttgtgatgatggtgttttggctatcgcaatttataatcaaaatggggtagaaactgatttttggaaaaaggtaaaaagttttttataa

SEQ ID NO: 226277 - DNA, 724 bp, Unknown
  Bacterial polypeptide expressing nucleotide sequence isolated from the Sargasso Sea
atgagcactataaataaaaaagaaattgaaaaattttcaaaaatggctgacgaatggtgggatactgaaggtaagtttaagccattacataaatttaatccattaaggataaattatataaagaaaaaaattatcacacactttaatattaagtcaaagtcccaacctttaaaaaacattaaacttttagatattggttgtggaggaggcctcttgtctgagccaatgtgtagattgggtgcaaatgttactggaattgacgcttcgcaaaaaaatataaatgttgcatcattacattcaagtaaaaataacttaaaaattaattacttatgctcatctccagaaaaaataaatttaaagaaaaaatttgatgtaattttaaatatggaaattgtagaacatgttgaggatttaaatctttttttaaaaaaaagttcattacttttaaaaaaaaacggattaatgttcgtagctactataaacaaaactctaaagtcatatattttcgctatagttggagcagagtatattttgcaatggttaccaattggtactcatgattggagcaagtttgtaaagccagaagaattaattggattaggtaaaaaaaataatttaaaattggtagaaattagtggtgttaaatttgatatactcaaaaatgaatggatgacttctgaggatagctctgtaaattatataactaagttcaaaaaaatttaat

SEQ ID NO: 226278 - DNA, 613 bp, Unknown
  Bacterial polypeptide expressing nucleotide sequence isolated from the Sargasso Sea
aatgaaaaataacacaataaataaaaaagaaatagaaaaattttcaaaaatagctgaggaatggtggaatcctaatggaaaatttaagccattgcataaatttaaccctatcagaatcaaatacataagagatacgattttgaaagaatttaaaataaaaaaagaacatcagccgtttaaaggtttaaatattcttgatataggatgtggtggtggattactttcagaacccatggctaagcttggtgcggatgttgttggtatagatgcttctcttaaaaatatacaagtggctaagtatcatttaaagaaaagcaaacttaaaattaaatattataagtcctctccagaaaatttaaaacttaagaaaaaatttgatataattttaaacatggaaattgttgaacatgtggaagatattgatttttttataaaagaaagttcaaagtttttaaaaagatcaggtgtgatgttcattgctaccttaaacaaaacacttaaatcatacgtatttgcgataataggggctgagtatgttttaaagtggcttccaataggcactcatgattgggaaaaatttgttaaaccaggaagatttaacaaatatttgtaa

SEQ ID NO: 226279 - DNA, 637 bp, Unknown
  Bacterial polypeptide expressing nucleotide sequence isolated from the Sargasso Sea
cataaatttaaccctatcagaattaaatacataaaagatacgattttaaacgagtttaaaataaaacaagaacatcagccatttaaaggtttaagtattctagatataggatgtggcggtggattgctttcagaacctatggcaaaacttggaggggacgttgttggtatagatgcttcaaataaaaatatatatgtagctaagtatcatttaaaaaaaagtaaacttaaaatcaattattataactcttctcctgaaaatttaaaaattaaaaaaaggttcgacattattctgaatatggaaattgtagaacatgttgatgatgttgatttttttattaaagaaagttcaaaatttttaaaaaaatcaggtgtgatgttcatcgcaactttgaacaaaactcttaaatcttacttatttgcaattgtgggagctgagtatgtcttaaagtggctgccaataggtactcatgattgggaaaaatttgttaaacccgaagatttaacaaatatttgtaaaaaaaattctttaaagttaaaaaaaattgatggaatgactttcaaccctatcttaaataaatggtctgtaacatctgataagtctgtaaattatatttcagaatttaaaaaagtttaat

SEQ ID NO: 226280 - DNA, 730 bp, Unknown
  Bacterial polypeptide expressing nucleotide sequence isolated from the Sargasso Sea
atgaaaaataacacaataaataaaaaagaaatagaaaaattttcaaaaatagcagaggaatggtgggatcctaatggaaaatttaagccattacataaatttaaccccatcagaataaaatacataagagatacaattttatctgagtttaaaattaaaaaagaacatcagccatttaaaggcttaagtattttggatattggatgtggtggtggattactttcagagcccatggctaaacttggagcagatgttgttggtatagatgcttcttttaaaaatatacaagttgctaagtatcatttaaaaaaaagtaaacttaaaattaaatattataattcctctccagaaaatttaaaaattaagaaaagatttgatattattttgaatatggaaattgttgaacatgttgaagatgttgattttttcattaaagaaagttcaaagtttttaaaaaaatcaggtgtgatgttcattgctaccttaaacaaaacacttaaatcatatctatttgcgattgtgggagcagagtatattttaaagtggcttccaataggcactcatgattgggaaaaatttgtaaaaccagagtatttaacaaatatttgcaaaaaaaattcattaaaattaaaaaaaattgatggaatgacttttaaccctatcttaaataagtggtctgttacatctgacaaatctgtaaattatatttcagaattcaaaaaggtttaat

SEQ ID NO: 226281 - DNA, 724 bp, Unknown
  Bacterial polypeptide expressing nucleotide sequence isolated from the Sargasso Sea
tatgagcacagtaaacaaaaaagaaatagaaaaattttcgaaaatagcaactgaatggtggaatcctaatgggaaatttaaacccctacacaaatttaatccaataagaattcaatatttaaaagataatattattaaacattttggtcttaaaatagaaaaaaaacctcttaaaaatttaaacattttagatattggatgtggaggtggattgctttctgagccattaagtaggttgggtgcaaatgtaacgggtattgatgcatcaaaaaaaaatattcaaatagcaaaatttcatgcgaaagaaaataatctgaaaataaactatttttgtttagcaccagaaaaattcaatgttaaaaaaaaatatgacattattttgaatatggaaatagttgaacatgtagaagatgtaaatttttttataaatgaaacttcaaatttgttaaaaaaaaatggtcttatgtttgttgcgactcttaataaaactttgaaatcgtatttatttgctatccttggagcagaatatattctcagatggcttccgattggaactcacgaatgggaaaaatttgttaaaccaaatgaacttgtcgatattggtaaaagaaataatctcaaattaaaaaaaataaatggactccagtttaatccttttatagataagtggagtctatctaatgatacttcggttaactatataataaattttgaaaaaacttaa

SEQ ID NO: 226282 - DNA, 727 bp, Unknown
  Bacterial polypeptide expressing nucleotide sequence isolated from the Sargasso Sea
atgagtagtgtaaataaaaaagaaatcgaaaaattttcaaaaatagctgaggagtggtgggatcctctaggtaaatttaaacctcttcataaatttaacccaataagaatttcctatattaaagaaaatataattaaaagtcttaatcttaaaaataataaaaataccccattaaaaaaagttaaaattttagatattggatgtggaggaggtttattatcagagcctatgtgtcgtctaggagctgaaataactgggatcgatgcatccataaaaaatattaatatagctaaattacacgcaaaaaagaatgagttaaatattaagtatttatgtacaactcccgaaaatttaaaaataaaagaaaaatttgatgttatcctaaatatggaaatagttgaacatgttgaaaatatcaatttctttttaaattcttgttcaaaactattaaaaaaaaatggaataatgtttgtggcaactattaataaaacattgaaatcttatttatttgcaatagttggtgccgaatatattttgcgatggctccctattggaactcatgaatgggaaaaatttgtaaaaccagaagaattgattaaaattcaaaaagaaaataattttaagttagaaagacttgatggcatgaaatttgacttaataaaagaccaatggaatttgagttcagataaatctgtaaattatatttccaaatttattaaaaattaat

SEQ ID NO: 226283 - DNA, 730 bp, Unknown
  Bacterial polypeptide expressing nucleotide sequence isolated from the Sargasso Sea
atggctaataacacaataaataaagaagaaatagataaatttagtagaatgtcagaagaatggtgggatccagatggcaaatttaagccattacataagtttaatccaattagaatagaatatattaagaataacgtaatcaaagagtttaaaataaaaaaaaaaacaaaaccattttctaacttagagatattagatataggatgtggaggtggtttactcactgaaccaatgcatcgattgggtggaaaattaactggaatagatgcttccggaaaaaatataaatatagcgaaaatacatgcaaaaaagaaaggtttaaaaattaattatatatgttcttcacctgaaaacatgaaaccgaaaaaaaaatatgatgtaatcttgaatatggaagttgttgaacacgtaaatgatttagatttttttataaatacgagttcaaaacttttaaagaaaaatggcataatgtttattgcaacattaaataaaactcttaaatcctacttatttgcaattgttggagctgagtatatcctaaattggctgccagtaggaactcatgattggttcaagtttgttgagccaacaaaattacaaaatatttgtaagaaaaataacttaaaattatctgagatagatgggttaaattacaatttattttttgataaatggcaaaaaagtaaaaatactgatgtgaactacataagtatttttaaaaaaatttagt

SEQ ID NO: 226284 - DNA, 724 bp, Unknown
  Bacterial polypeptide expressing nucleotide sequence isolated from the Sargasso Sea
tatgagcactataaataaaaaagaaattgaaaaattttccaaaatggctgatgaatggtgggatcccgaaggtaagtttaagccattacacaaatttaatcctctaaggataagttatattaagaaaaaagttatgtctcattttaatattagctcaaaattattaccattaaaaaatatagaacttttagatattggttgtggaggaggcctcttatctgagccgatgtgtagattgggagctagagttactgcaattgatgcttctcaaaaaaatataaacgttgcttcattccattcaaataaaaataaattaaaaataaattatttatgttcctctccagaaaaaataaatatagaaaaaaaatttgatgtaattttaaatatggaaattgtagaacatgtcgatgacttaaatttttttttagaaaaaagttcattacttttaaaaaaaaatggactgatgtttgtcgcaactttaaatagaactcttaaatcctatttatttgcaatagttggagcagaatatattctacgatggttaccaattggaactcatgaatggaataaatttgtaaaaccagaggagttaattgattttggaaaaaaaaatagtttgaaattaatgcaaattgatggtgtcaaattaaatattttaaaaaacgaatggaatatttcggaagataaatcaataaattatataactcaatttcaaaaaatttaa

SEQ ID NO: 226285 - DNA, 724 bp, Unknown
  Bacterial polypeptide expressing nucleotide sequence isolated from the Sargasso Sea
atgagtactgtagataaaaaagaaatacaaaaattttcaagaattgctgacgaatggtgggatgtggaaggaaagtttaagcctttgcataaatttaatcctctaagaataaattatattaaaaaaacaataatggatcattttaacattaactcaaaatcacaacctttaaaaaatattgaacttttagacattggatgtggagggggcctattatcagaaccaatgtgtagattgggtgcaaaagttactgctatcgatgcttcaaaaaaaaatattgatgttgcaagttttcattcaaaaaaaaataacttaaaaattaattataaatgttcttcaccagaaaagattaatctaaataaaaaatttgatgtaattctaaatatggaaatagtggaacatgtagatgatttgaatttctttttaaaaaaaagttctttgttgttaaaaaaaaatggattaatgtttattgcaactttaaacaaaacaattaaatcttatttgtttgctataattggtgcagaatatattttaaaatggcttccaatagggactcatgattggaataagttcgttgagccggaaaagttaattgatataaacaagggaaataatttggatttaattaaagtagatggagtcagttttaatatattaaaaaaagaatggattatttcaaaagatgaatcggtaaattatattgctcagtttaaaaaaaattaat

SEQ ID NO: 226286 - DNA, 733 bp, Unknown
  Bacterial polypeptide expressing nucleotide sequence isolated from the Sargasso Sea
gatgaatacaactatagatcctgtagaaagagaaaagttttctaaaatggcagaagaatggtgggatccatcaggaaaattcaaagccctacataaatttaaccctaaaaggattgaatttataagaaataaaatcattgaccacttttcaatagaaccaaacgcagaaaatcctttttcaaatctagatatattagatattggatgcggaggaggtcttctctccgaaccaatgtcgagattaggaggaaatgtttcaggaattgatattgttgaaaaaaatatcaatgtagcaaaaactcattctgaagaacaaaacctagaaattaattataaaatgacaactgcagaggaactagcggtaggtaagaaaaagtttgatgtaattttaaatatggaagttattgaacatgtatctgatttaaatcttttcatagagtcatgtgaaaaattattgaaaaaaaatggtctacttttttttgctacactgaatagaaatttattgtcctttggtttagccatagttggtgcagaatatattcttggctggctacctaaaggtacccataattggaaaaaatttattacacctgaggaattgaaaataatttttaaatcaagcggattaaatattactgacattatgggaatgaaatataaccctatttacgatagttggtatttatctgatgacacaagtgtaaattatcttggcactgctattaaatcttaa

SEQ ID NO: 226287 - DNA, 730 bp, Unknown
  Bacterial polypeptide expressing nucleotide sequence isolated from the Sargasso Sea
tatgaaaaataacacaattaataaaaaagaaatagaaaaatttacaaaaatttctgaagaatggtggaatcctgagggaaaatttaaacctctgcataaatttaaccccattagaatttcttacattaaagaaaatataataaaaacttttggattaaaaaatgaggataagcctttaaaaaaaattagagttttagatattggatgtggtggaggtttgctatcagagccaatgaaaaaattaggagcagaagtgacaggcatagatgcatctggaaagaatattgaaatagcaaaattgcatgcaaaaaaaagtaatttaggtattgaatatatttgtacctcaccagaaaaatttaatacaaaaatcaaatttgatgtaatacttaatatggaaataattgaacatgtggaaaatgtagatttttttttaaaagcgtgtacaaaattactcaaaaaaaatggcactatgtttgttgcaactttaaacaaaactttaaagtcttatttttttgcaataattggagcagagtatgtgatgcggtggctaccgattggaactcacgattgggaaaaatttgtgaaacctgaagaccttattaatttacaaaaaaaaaataaaatgaaactaaaaaaaatagatggtatgaaatttaatttaatcacagatttatggagtttaagtaacgataaatcagttaattatatcgctcaatttgttaaagactaa

SEQ ID NO: 226288 - DNA, 1222 bp, Unknown
  Bacterial polypeptide expressing nucleotide sequence isolated from the Sargasso Sea
atgttctgggaaaagaagctggcacagtgggcggacgaagtacgggcgaaagcgaacataccggcgcgcctcgtgctgtggaacggcgatcaactcgatttcggcaccttcagcgcgccgcaggtcacgctgaaggtcaacagcgcgtcggcgttgccgctcctgctcgaaccgagcctcgacaatctcggcgaggcgtacgtgaagggcaagatcgacatcgagggcaagctgtcggacatcatcaacatcggctactcgctcgcgcgcagcacggtgacgagcgcgagcaagctggcgcgcgtgaagcgctacttcaatcactcgaagagcaccgacaagaaggcgatccagtatcactacgacgtctcgaacgagttctacaagctgtggctcgacgagaacatggtgtactcgtgcgcgtacttcgagaacggcgacgaggatctcgccaccgcgcagatcaagaagatcgaccacatcctcaccaagatccggcttcagcccggccagcgcctgctcgacatcggctgcggctggggcgcgctcgtgctgcgcgccgcgcagaagttcggcgcgcagtgcctcggcgtcacgctgtcgcagaaccagttcgacctggcaaccgcgcgcgtgaaggccgccgggctggaagacaggatcgagatccggctgcaggactaccgcgagatcgacggccagttcgaccgcatcacgagcgtcgggatgttcgagcacgtcgggcgcaagaacctgccgctctatttctcgcgcatccacgacctgctcgccgacgacggcatcgcgatgaaccacggcatcacgtccaccgacgcggaaagcggcgagacggcgctcggcggcggcgagttcatcgaccgctacgtgttcccggacggcgaactgccgcacatcagcctcgcgctggaagccgcacagcgcggcggcctcgaagcgattgacgtcgaaagcctgcggcggcactatgcgcgcacgctcgatatctggacggaaaacttcgaggcgaaggccgacgccgcgcgacaactcgtcgacgacgaaaaattccgtatctggcgcgtgtatctcgccggctgcgcgtatgcattcgagcacgacgacgtgtcgatcttccagatcgtgtgccgcaaggccgggcagagcgcgaaaacgctgccgtggtcgcggcgctatatgtacgaacacgcgctgccgcgctagg

SEQ ID NO: 226289 - DNA, 730 bp, Unknown
  Bacterial polypeptide expressing nucleotide sequence isolated from the Sargasso Sea
atgagcaataatactataaacaaagaagaagtagaaaaatttagcaaaattgctgaagaatggtggaatcctaatggaaaatttaaaccacttcacaaatttaatccaataagaatagaatatataaaaaacaatattattaaagattttaacatttcatcaaatcataaaccattagcaggaataagtattcttgatattggatgtggaggaggcttactatccgaacctttagcaagacttggagcagatgttgtaggtatagatgcgtccaaaaaaaatattgatattgcaaaacatcatttaaaaaaaagtaatttaaaaattgaatatcatgatagatctccagagaattttaattatgaaaaaaaatttgatgtaattcttaatatggaaatagttgaacatgtcgaagatattcctaaatttataaatcaaagttcaaaatttttaaaaaacaatggtttaatgttcattgccaccttaaaccaaacgttaaaatcttatgtatttgcaattataggcgctgaatatattttaagatggcttccaatcggaacacatgattggaataaatttgtaaaacctgaaaatctagaaaatatctgcaataaaaattcacttaaattaaaaagtattgatggtgttaaatttaacccaattttaaataagtggaaactttcaaatgacaaatccgtaaattatataacaaagtacaaaaagagttaat

SEQ ID NO: 226290 - DNA, 730 bp, Unknown
  Bacterial polypeptide expressing nucleotide sequence isolated from the Sargasso Sea
tatgaaaactaacacaataaataaaaaagaaatagaaaaattttcaaaaattgcaaaagaatggtgggatccaattggaaaattcaagcctttacataaatttaacccaataagaattaaatatataaaagataatttaataaaagattttagtctaaaaaataaaaaaaaaccacttactgatttagaaatattagatatagggtgtggaggaggtttgctatctgaaccaatggcgagattgggggcaaaagttactggaattgatccttccctaaaaagtataaatgtcgcaaaacatcatttaacaattagtaatcttaaaataaaatattttaattgttctccagaaaattttaattctaaaaataaatttgatgtaattttaaatatggaaataattgaacatgttgaagacattgatatttttttaaaacaaagttcaaaatttttgaaaaaatcgggaataatgtttgtcgctacattaaatcagactttaaaatcttatctttttgcaattataggagctgaatatattttaaaatggttgccaataggaacccatgattggtataaatttgttaaaccaaaagatcttattttaaactgtaaaaaacattctcttaatttaaaaaatattgatggcatgatttataatccaatctttgataaatggaaaatttctaatgataaatcaataaactatattgctaaatttaaaaaagtttaa

SEQ ID NO: 226291 - DNA, 730 bp, Unknown
  Bacterial polypeptide expressing nucleotide sequence isolated from the Sargasso Sea
atgaaaaaagatactattaataaaaaggaaattgataaattttcaaagttagctgatgaatggtgggatcccgagggtaagtttaaaccattgcataattttaatccggtaagactaagatatattaaagacacaattactaaaaaatttggaaataaatcagaaaaattacctttaaaagatattaagatattagatattggatgtggtggaggtcttttaagtgaacctctttcaagattaggtgcaacggttacgggtatagatgcctcggacagaaacatcaaaattgctaaaatgcatttaaaaaaaagtaaattagatgttgattattactgttcatctccagataaatttgttgcaaaagaaaagtttgatgtagtattaaatatggagatagttgaacatgttgataatgttgatttttttttatttaaaagctcagaacttttaaagaaaaacgggttaatgtttattgcaactttaaataaaacattaaagtcatatatatttgcaataataggtgctgaatatatcttaaaatggttgccaataggtactcataactggaacaaatttttaacacctggggatttaatcaatatttgtaaaaacaattcgttaaatttgaatgacttaattggtgtaaagtttgatattcttaaaaatgaatggattgtatctgaagatagctctgtaaattatcttgcgcaattttctaaaacttaat

SEQ ID NO: 226292 - DNA, 730 bp, Unknown
  Bacterial polypeptide expressing nucleotide sequence isolated from the Sargasso Sea
atgaaaaataacacaataaataaaaaagaaatagaaaaattttcaaaaatagctgaggaatggtgggatcctaatggtaaatttaagccattacataaatttaaccctatcagaatcaaatatataagagatacaattttatctgaatttaaaattaaaaaagagcataagccctttaaaggcttaagcattttagatattggatgcggtggtggattactttcagaacctatggcaaaacttggaggagatgttgttggtatagatgcttctaataaaaatatacaggtggccaagtatcatttaaaaaaaagtaaacttaaaattaaatattataattcttctcctgaaaatttaaaaattaagaaaaaatttgatataattttgaacatggaaattgttgagcatgttgaagatgttgatttttttattaaagaaagttcaaattttttaaaaaaatcgggtgtgatgttcattgctactttaaacaaaacactcaaatcatatttatttgcgattgtaggagctgagtatattttaaagtggcttccaataggtactcacgattgggaaaaatttattaaaccagagaatttaacaaatatttgtaaaaaaaattcattaaaattaaaaaaaattgatggaatgacctttaatccaatattaaataaatggtctgttacatctgacaaatctgtaaattatatttcagagttcaaaaaaatttaat

SEQ ID NO: 226293 - DNA, 1216 bp, Unknown
  Bacterial polypeptide expressing nucleotide sequence isolated from the Sargasso Sea
catgttctgggagaaaaagctggcgcagtgggtggaagaggtaaaaaccaaggctaacctgccagcacgccttgtgctgtgggacggtcagcaacatgacttcgggcagttcgccgcgcctcaagtcacgctacatgtcaaaagcgctacggcgctgccttacctgctcgaaccgagcctcgacaatctcggcgaggcgtatgtgaagggcaagatcgatatcgaaggcaagctgtccgatatcatcaacgtcggctatcagctggcgcgcaacaccgtcacgagcgcaagcaagctggcgcgcgtgcgacgctatttcaatcactcgaagtcgtcggacaagaaggccattcagtatcactacgacgtctcgaacgagttctacaagctgtggctcgacgagaatatggtgtactcgtgtgcgtacttcgaaaacggcaatgaagatctcgccaccgcgcagatcaagaagatcgatcacatcctcaccaagatccagttgcaaccggggcagcgcctgctcgatatcggctgcggctggggcgcactcgtcctgcgcgccgcgcagaaattcggcgcgaagtgtgtcggcgtgacgttgtcgcagaaccagttcgatctcgcgaccgcgcgtgtgaaagccgcgggcctggaaaaccagattgagattcgtctgcaggattatcgcgacgtcgaggggcaattcgatcgcatcaccagcgtcggcatgttcgagcacgtcggccgcaagaatctgccgggctacttccagaagattcacgatctactcgtcgacgacggcatcgccatgaatcacggtatcacgtcgagcgatgcggatagcggcgaaaccgcgctgggcggcggcgaatttatcgaccgttatgtgttcccggacggcgaactgccgcacatcagccttgcgctcgaatcgatgcagcgcggtgggcttgaagcggttgacgtcgaaagcctgcgccgtcactatgcgcgcacgctggacatctgggcggataacttcgaaacgcacgcggacgaagcccgcaagctggtcgacgacgaaaaattccgcatctggcgcgtgtatctcgccggttgcgcgtatgcattcgaaaacgacgacgtctcgatctaccaggtggtgtgccgcaaagccggccgcagcgcgaaaaccttgccgtggtcgcgtcgctatatgtacgacaaaacgttgtga

SEQ ID NO: 226294 - DNA, 171 bp, Unknown
  Bacterial polypeptide expressing nucleotide sequence isolated from the Sargasso Sea
cctgcatgaactcaatccgatccgcttggggtggatcgacgcgcacgcgcacctcgccggcaagaccgtgctggatatcggctgcggcggcggcattctgacggagtcgatggcgggattgggggcgcacgtaaaaggaatcgacctgtcgagccaggcgctcggcgtggc

SEQ ID NO: 226295 - DNA, 772 bp, Unknown
  Bacterial polypeptide expressing nucleotide sequence isolated from the Sargasso Sea
atgactaatacagtagacaaaaaagaaatagaacaattttcttcattaagcaacaaatggtgggatatgtctggccctttttcagctttacataaaatgtcaaatgcaagaattgagtttataactcggaattcaaccagaattttaaaaaaagaaaatataggaattaatcttcttgatggtttaaattgtttagatattggttgtggcggtggtattttatctgaaaaattaaaaagattaggcgccaaggttactggcattgacgcttctaaaagctcaatagatgtcgccaaagagcatgcaagaaaaagtcgattagaaatcaattacaaatgtattacaactagtgaactcttagagattaaaaaagaaaaagctctaaataaatttgacttagtaattgcttctgaagtaattgaacatgtatatgacagaaaaatatttctatctgatatttctaatttatgccgtcctggtgggctggttatatttactacaattaataactcttttttaggtatattattaggaaaatattttgcagaagatattttaaaaatacttccttcaggaactcacaaggtggaaaaatttatatctccaattaatttagcaaaagaagctgaggagcatgctataatattggatagttttacaggttttacgcctacatttggatttaaaaatataataaccaaagaatttggaaacttcaaactttcatcaaacatgcaggtcaattatggtgcagcaggaattaaattataac

SEQ ID NO: 226296 - DNA, 572 bp, Unknown
  Bacterial polypeptide expressing nucleotide sequence isolated from the Sargasso Sea
tcaaagtctctaccttttaaaaaatattgagcttttagatattggttgtgggggtggtctcttatctgaaccaatgtgtagattgggtgcaaaagttacagctgttgatgcgtcgcaaaaaaatataaacgtagcttcctatcattcaaataaaaataaattaaagattaattatttatgtgcatctccagataatttaaatttaaaaaaaaaatttgatgtaattttaaatatggaggtggtagagcatgtagataacttggatttttttttaaaaaaaagctcaatacttttgaataaaaatggcatcatgtttatctctactataaataaaactcttaaatcttacttatttgcaatagttggagctgaatatgttttaaaatggctgccaattgggacgcatgattggaataagtttgtaaaacctaaagaattgatcgagattggtgcaaaaaataatttaaaattagttaaaatcaatggtgttaattttaatattctaaaaaatgagtgggttattacaagtgacaattcagtgaattatataagtcagtttaggaaaatttaat

SEQ ID NO: 226297 - DNA, 370 bp, Unknown
  Bacterial polypeptide expressing nucleotide sequence isolated from the Sargasso Sea
atgaaaactaacacaattaataaagaagaaatagaaaaattttctcgaattgctgaagaatggtgggatccatcaggaaaatttaaacccttgcataaatttaatccaataagaatttcttatattaaggaaaatattatcaattcttttaaaattaaaaatcaagataaaccattaaaaaatttaaaaatattagatattgggtgtggtggtggattgttatctgagcccatgaggaggttgggtgcagacgtgactgggatagatgcttcagagaaaaatgtcaaggtagccaaaatacatgcaaaaaaaaataatttagatatcaaatattattgtacttctcctgaaaacctaaaaacaagctaaa

SEQ ID NO: 226298 - DNA, 654 bp, Unknown
  Bacterial polypeptide expressing nucleotide sequence isolated from the Sargasso Sea
gtaaattcaaaccacttcataagtttaatccaacaagaattaaatatattaaagaaaatattattaataatttcaaattaaaaaataaattcaaacctttgtcaggaataaatattttagatattggatgtggaggaggattattatcagaaccaatgtcaaaaatgggtgcaaatgtgacaggtattgatgcatctgataaaaatataaaaattgcaaaactccattcaaaaaaaaataaactaaaaattaattatttatgttcttcgcctgaaaaacttaaaattaaaaaaaaatttgatgtaattttaaatatggaaattgttgaacatgtggaagatatagatttttttctaaagtcctgctcaaaacttttgaaaaaaaatggactaatgtttgttgcaacaataaataaaactctaaaatcttatatttttgcaattgttggagcagaatatatactaagatggcttccaattggaacacacgaatgggaaaaatttgttaaacctgaggatcttaaaaaaattttaatgaaatatgatttatctctcaataaattggagggaatgaattttaacattattaaggatgaatggaatatttctagagatttatctgtaaactatatagcaaagtttattaaaaactaat

SEQ ID NO: 226299 - DNA, 583 bp, Unknown
  Bacterial polypeptide expressing nucleotide sequence isolated from the Sargasso Sea
aatgaaaaaagatactattaataaaaaggaaatagataaattttcaaaattagctgaagagtggtgggaccctgagggtaagtttaaaccattacataattttaatccagtaagacttaaatatattaaggatacaataattaaaaattttggaaataaatctgaaaagttacctttaaaagacataaaaatattagacattggatgtggtggaggtcttttaagcgaacctctttcaagattaggtgcaacagttacaggtatagatgcctcggatagaaacataaaaattgctaaaatgcattcggaaaaaagtaaattggatataaattattactgttcatcacctgagaaattcaatgctaaagaaaaatttgatgtaatcttaaatatggagatagttgagcatgtagaaaatgttgatttttttttgttaaaaagttcagaacttttaaggaaaaatggtttaatgtttattgcaactttaaataaaacattaaagtcttatatctttgcaataataggtgctgagtatttcttaaaatggctgcctaataggtacacacgattggaacaaattttt

SEQ ID NO: 226300 - DNA, 769 bp, Unknown
  Bacterial polypeptide expressing nucleotide sequence isolated from the Sargasso Sea
atgagtaatacagtagacaaaaaagaaatagaacaattttcttcattaagcaaccaatggtgggaaaagtctggtcctttttcagcattacacaagatgtcaaatgcaagaattgaatttataatacaaaacgcaagtagaattataaataataatattggaataaattctttggatggtttgaattgtctagatattggttgtggaggaggaattttatcagaaaagctagtgaggttaggggcatttgtaactgggatagatgcctcaaaagattcaataaaagtagcgaaagaacatgcagaaaaaagtcgattaaatataaattataagtgtatttcaactagtgatcttctgaaatttgaaaaagaaaaagttttaaataaatttgatctggttatcgcttctgaagtaatcgaacatgtgaatgatagaaaggtttttttatctgatattgctaacttatgtcgcaaaggtggcattgtagtatttacaaccatcaataaatcttttttgggaattttttttggaaaatattttgcagaaaatattttaaaaattgtcccaaaaggaactcataatgttcaaaaattgatcactcctgagactttagcaaaagaatctgcagaacataatattattctggatagttttacgggcttcaaacctacttttaaaattgaagatataataaatagagaatttggagattttaaactaacttcaagtttagaaataaattatggagcagcgggtataaaaatataat

SEQ ID NO: 226301 - DNA, 697 bp, Unknown
  Bacterial polypeptide expressing nucleotide sequence isolated from the Sargasso Sea
gaaaaattttctaaaatagctgaggaatggtgggatcctaatggaaaatttaagccattacataaatttaaccctataagaataaaatacataagagatacaattttatctgaatttaaaattaaaaaagagcatcagccatttaaaggcttaagtattttagatatcggatgtggcggcggattactttcagagcccatggctagacttggagcagatgttgttggtatagatgcttcttttaaaaatatacaagttgctaagtatcatttaaaaaaaagtaaacttagaattaaatattataattcctctccagaaaatttaaaaattaaaaaaagatttgatataattctaaatatggaaattgttgaacatgttgaagatgttgatttttttattaaagaaagttcaaaatttttaaaaaaatcaggtgtgatgttcattgctaccttaaacaaaacacttaaatcatacttatttgcgatcataggggcagagtatgttttaaagtggcttccaataggcactcatgattgggaaaaatttgttaaaccagagtatttaaaaaatatttgtaaaaaaaattctttaaaattaaaaaaaattgatggaatgacttttaaccctatcttaaatagatggtctgttacatctgataaatctgtaaattatatttctgaattcaaaaaggtttaat

SEQ ID NO: 226302 - DNA, 337 bp, Unknown
  Bacterial polypeptide expressing nucleotide sequence isolated from the Sargasso Sea
aatgaaaagtaacacaataaatattaaagaaatacaaaaattttctaaaatggctgatgagtggtgggatcctaatggaaaatttaaaccactgcataaatttaaccctgttagaattcactatataaaaaataatattattaaacactttaaattaaaaaataaacataactcgttaaaaaatttaaatattttagatattggatgtggaggtggtttattatctgaaccaatgtgcagattaggtgccaatgtaactggcatcgatgcggcagaaaaaaatataaaaattgcgaaagttcatgcaaaaaaaaataaactaaatataaaatatatt

SEQ ID NO: 226303 - DNA, 517 bp, Unknown
  Bacterial polypeptide expressing nucleotide sequence isolated from the Sargasso Sea
atgaaaaataacacaatagataaaaaagaaatagaaaaattttcaaaaattgcagaagaatggtggaatcctactggtaaatttaagcctttacataaatttaatccaattagaataaaatatataaaggacaatttaattaaagattttaatctaaaaaataaaaaaaaaccactccaaggcttaaatttactagatataggatgtggaggaggattgttgtcagaaccattatcaagacttggagcaaaagttactgggatcgaccctataaaaagaaatatagaaattgcaaaacatcatttaaaaaaaagcaaactgaatataaaatattacaatgtatctcctgaaaaatttaaaccaattaataaatatgatgtaattttaaatatggaaattatagagcacgttgaaaatgtagatttttttattaaacaaagctcaagattattaaaaaaatctggaataatgtttgttgcaacattaaatcaaacattaaaatcttatctttttgcaa

SEQ ID NO: 226304 - DNA, 626 bp, Unknown
  Bacterial polypeptide expressing nucleotide sequence isolated from the Sargasso Sea
aatgaaatatttagaagcagcaaaatttggaaatgattatttaattaataaaaatattcaaaattataaactagatgtagaaatcttagcatctgaaacaataaataaaagtagagaacattttttattaaatgaaaaaaataaattcacaaaaaaagaatttaaaaaatttaacaaattgctaaagcaaagaaataataggcagccaatagctcaaattataaataaaaaagaattttggaaaaaaaatttgtatatagatggcaatgtactaattcccagaccagaatcagagcatttagtcgaggaaacaataaatttaattaaggatgaagcaaattatagcatattggatataggatgtggttctggttgcttgataatttcaattttattagaaagaattaaatgcagaggaactgcagtagatgtttctaaaaaagctatcaaagtgtcaaaaattaatgcaaaaatgcaacatattcaaaatagaataaaatttatacattcagatattgacaaagtaatcgttggaaaatatgatttaattgtaactaatccaccatatataaataaacataaaattaaatatttggatgatgaggttagaatatttgagccaaaat

SEQ ID NO: 226305 - DNA, 730 bp, Unknown
  Bacterial polypeptide expressing nucleotide sequence isolated from the Sargasso Sea
aatgaaaaaagatactattaataaaaaggaaattgataaattttcaaagttagctgatgaatggtgggatcccgagggtaagtttaaaccattgcataattttaatccggtcagactaagatatattaaagatacaattgctaaaaaatttggaaataaatcagaaaaattacctttaaaagatattaagatattagatattggatgtgggggaggtcttttaagtgaacctctttcaagattaggcgcaactgttacaggtatagatgcctcagacagaaacatcaaaattgctaaaatgcatttgaaaaaaagtaaattagatattaattattactgttcatctccagagagttttgaagctaaggaaaaatttgatgtagtgttaaatatggagatagttgaacacgtagataatgttgatttttttttattgaaaagctcagaacttttgaaaaaagacggtttaatgttcattgcaactttaaataaaacattaaagtcttatgtctttgcaattataggagctgaatatatcttaaaatggctgccaatcggtacacatgattggaataaatttttaaaacctgacgatttaatcaatatttgtaaaaataattcattaaatttaaataacttaattggtgtcaagtttgacattttgaaaaatgaatggattgtatctaatgataaatctataaactatcttgcacaattttctaaaacttaa

SEQ ID NO: 226306 - DNA, 268 bp, Unknown
  Bacterial polypeptide expressing nucleotide sequence isolated from the Sargasso Sea
aatgaaaaataacacaataaataaaaaagaaatagaaaaattttcaaaaattgctgaggaatggtggaatccaaatggaaaattcaagccattacataaatttaacccaattagaatcaaatatattaaagatacaatcgtatcagagtacaaaattaaaaaagaggataaaccttttaaagggttgagcattttagatattggatgtggtggtggattactttcagaaccaatggcaaaactaggagctgaagttgttggtatagat

SEQ ID NO: 226307 - DNA, 2062 bp, Unknown
  Bacterial polypeptide expressing nucleotide sequence isolated from the Sargasso Sea
ttgggtaaagcacttcttactaaggatcagcccgtatatgttcagttttatgtcaccgccagatgtaatctgacttgtgagcaatgtaacataatatattccaatgctgatgtgcctgaatgttccctagatgatgtaaaaagaattgcagataactttgctgaaatgggtgttgcgatagttttactgacaggtggtgagcccttcgcaagaaaagatctccccgaaattatttcagcctttgaatctcgcggtgtgcatgtaaggatgcaaactaatggttttgctacagaagaacagatacaagctgcagttgaagctggagggaaagatatatctatttctcttgatagcctaaatcctggactgcaagatgagattaatggaggatttccttcctcctggcataaagcaataaaaagtattgagctttttagcaaatatcttcctaaagagggaagttttgcatctctggggtgtgtgcttcagccatataatattggagatgtagaagacgtcattagatttggtacttcaataggctggtatacctctatggtccccatccatgttagcaatcatgcaaaccctagaggctttaggacctttaatgacaaattaaagtttgaagaaaaagaattaatcgaagttgataggttaatacacagagtcaagaagatgaggaaagaaggttatctcctttatgatagtgacgaataccttgcaaacataaaactttttttaagagatcaaacgtcaacaaactggagaagaaaaaataagggcagttgtgattcaccaaatctttactttgccttactgcctaatggcgaatttgcaccttgttgtgattttagacataacgattcgcgtatggctcaagatcctgattttcctaaagtttataaggatcccatatggaggcagagtgtagagaaaataacaacaaaatgtgacggttgtatgtatggaagttatcctgaaatttccatatctatgaggttcttctctgctactttacaaagaattggtacttttggcttaaagaacaaaaataaaaattggcctataaattatgaagagcttattaaaaaagctaatgcgatagcttcagaaaaaaggaataggcttacttcaagagaagagattcagaaaataagaataatagaggcctcgatgccaaaaaaaataaaatttgaaagctttaaatacagattgcttgctgctgctgaggaatatcaaattctggattatgaagacctaacatgggacgaatttctgaattcactatctttcaaatatgaaaaaaataagatattcgtcgagtctatttattttaagactgctcttgagccctttgatttacagcaaccaaaattttataaatctaagagcagtgctgatagcgaggaaggcagtagagattataaaaaatataatgaagagtactttaatactgttctgacaaagattattaataatactgaatttccggtaaaaaaaattaaaaaatctataaactctcttgaagaagaaagaatatttcatgacgagtgggcaaaaaatgaaaatgttactgagattgatttaaggactagaaatgaggcccttacagcccctgagatgagatatattatgagcgaactaggaaatttagaagggaaaactttactggatgtaggctgtggactaggtgaggctagtgtatattttgctctaaaaggtgcttcagtgacttcgagcgatttatctgctgagatgcttatcaagactcaaagtttagctgaacaccacggcgttaaattaaaaatacataatgcttcatcagacgaaatacagttagcaactaactcttttgacataatttatgcaggtaatttgatgcatcatgttgaaatagaagacaccgtcaaaggattaaaaaaattgctcaaagaagatgggttacttgtaacttgggaccccttgacttacaacccagcaatcaatgtttatagaaatatagagacagaggtaagaacacccgaggaacatccacttacctggtcagatataaaaattt

SEQ ID NO: 226308 - DNA, 187 bp, Unknown
  Bacterial polypeptide expressing nucleotide sequence isolated from the Sargasso Sea
tgggacaaggacggccttacttcaaaaatagaatctattattggagcaggtgtggatgtgatgcaaagtttaattgttcgtcagcacacttttgatttgatttttgttgatgcagataaaaataactacccaaattattatgcactatctctaagtctagttccatcaaatggaatcatcattattg

SEQ ID NO: 226309 - DNA, 797 bp, Unknown
  Bacterial polypeptide expressing nucleotide sequence isolated from the Sargasso Sea
gctacaaacgcaagggattggggaaattgaatatgaagactaccataaccgcttgggcttgactggtgaagacccgcttccaatcaatgagcggatatcccatctactggagtttcatacccgcgaagccaagccggtatggtggaacatctttgaacgccagaccaagcttcaggacgaattaattgatgacgccgaatgcctaggtggattacagcaagttggatcaccagaacctgaaaagcgttccctgatttacagctaccgtttcccgccacaggagtataagctaaaggtcggatccagtgtcgtcgaagtcgacgtggtgcacagagaaactgctggtacggttgtcgatatcaatgaggactcctgcatcgttaaaattaagcgcggagctaccaaagatcgattaccagaaatcctgtctattggtcctggacaaccgattagcagcaaggttattcgcgcatccatataccgatatgctgatcgtgtacttcaaaaccctgactccctcaatgtagcgacagagctacttaatcgaaatgtgccgcgtattttgggtaagatacccggcgaagcgattattacctctgatgatctgcaatctgatgctttggaagccattgctgcactggaaaacagctatctgtttatccaaggacctcctggtgcaggtaagacctatactagcagccatatcattgtagatctgatgaaacgtggtaaaaagatcggcgttacttcaaactctcataaggtgattcataacctgctggaacaagtcgaaaagg

SEQ ID NO: 226310 - DNA, 551 bp, Unknown
  Bacterial polypeptide expressing nucleotide sequence isolated from the Sargasso Sea
aataaatcatctacttgtgaagtatgctaaagaagggaaaaaagttcttcgtcttaaaggtggggaccctttcatctttggacgcggaggtgaggagattgaaaccctagcagaagagaaaataccatttcaagttgtaccaggtattacaagcgcaagtggatgttcggcatacagtggaatccctttaactcatagagattatgctcaaagttgtatttttgtaacaggacatcttaaagaaggaaagcttgacttagattggaaaaacctagtacaacctaatcaaacaattgttttctatatgggccttgtatcgattaacataatttgtaatgaattaattaataatggcatggatgaagaaactccatgtgctctagttcaacaaggtactaccaatacacaaaaagaatacatatcagtactaaaagatatgccaagattagttgaagccaagaaacccaaagcaccaacaatatttattattggaggagtggtatcgttaagagataagcttaagtggtatacgactaacgctgaagattaaa

SEQ ID NO: 226311 - DNA, 580 bp, Unknown
  Bacterial polypeptide expressing nucleotide sequence isolated from the Sargasso Sea
cgtgccgcaggaggggatcaaccagctcttgctggacgaagcgaagaagggccagcgggtggtgcggctgaaggggggcgaccccttcatcttcggccgtggcggcgaggagctggagaccctggtcggtagcggcgtgggcttccaggtggtaccggggatcacggcggcgagcggctgcgcagcctatgcgggcattcctctcacccatcgcgatcacgcccagagcgtgcgcttcgtcaccgcccacggcaaggggggcgcccgggatctcgactggccgctgctggccagagacaaacagaccctggtgttctatatggggctctcctcctgcgcaaccatccgcgagcaactgatggcccacggcaaggggggcgacaccccggtggcgctgatcgagcgcggcacccagccgagccagcggatcattcgcggcaccctcgaccagttacccgagctggcggtcggggtcgagagcccggccctcatcatggtgggttcagtggtgacgctggcggaccagctcgcctggttcggccagggcaacgacgcagcgcggatcgcggcatcggcctga

SEQ ID NO: 226312 - DNA, 967 bp, Unknown
  Bacterial polypeptide expressing nucleotide sequence isolated from the Sargasso Sea
cccggcataacatcatccatcgcagctgctgcttatgcaggtataccggtgacacatagggggattgcgactaattttactgttattagtgggagcgaagaccctacaaaacctaccagtatggtcccctgggacgttctcgctaagactcaaggcactctggtggtactaatggggtgggcatcccttcccaaaattatcgaggttttggtcgaaaatggcagaaaggctgatactcctatttcattagttcagtggggtacatggactaaacaaaaaaccgtaactggaatattaactgacattgtggataaagcgcggaatgaaaatttgggatctcctgtggttgccgtgataggagacgtagtgaaccttagaccagatatacaatggtttgactccaaacctctatttgggacaagagttttggtaactaggtcaaggactcagtcttctaaacttaaatctctgttgtttgaattgggcgctgaagtaattgaattgcccatgattgagataactaaattggaagattatgcacaattagatactgaattgaaatctgtacaatcattcagttggttgtttttcacaagcgtcaattctgtagaagctgtgtttgagcgtttgcatgagttaggaaaagacgcaagacatttggctcatgtgaaaatcatggctattggtgacgccactagagataaattgctcagtaaaggtatagtagcggatttcatgccttccaaatcttcttctgaggaagtagttaaagagctacattcatttgactggaaagatgccaaggtgctgattcctgcatcgaacatagcaaggacagtaattaaaggcggcttgattgaatttggtgcagaagtggttcagattaacgcatataagaatcaaactccagaggatatctcacatcttgctgtcaaaatactaaaagaaggagttgatgtgataacat

SEQ ID NO: 226313 - DNA, 653 bp, Unknown
  Bacterial polypeptide expressing nucleotide sequence isolated from the Sargasso Sea
tgtattgtacgatagacttgttagcaaaaaaataatttctatgattcctaaacgcactaaagcaatctatgttggtcgtgcagttggcgatgatacgagacatcaagatggaacaaatgaactaatggtaaaatatgcaaaattaaacaaaaatgtagttcgactgaaaggtggtgatcctataatttttggtagaggtggtgaagaagctgaatttctaaaatcattcaaagtaaaatatgagatagttcctggaattacttccggaataggctcttcaacttatgctggaattccattgacgcatagaaaacatgcttcctctgtagtatttgtaacaggacatgaagatcctgaaaaaaaaactgaaattgtaaaatggaaaagattagcaaaatctgtggatacaattgtaatcatgatgggattatctagaattggaattatttctaaacaattggttgacggtggaatgaaaaaatccacacctgttgcagtaattcaaaatggaacaaccccaaaacagaaaatggttgttggaacacttagtacaatttctagtaaagtcaagaaagaaaaaatcactcctcctgcgaatataattataggtgatgttgttgatttacataaaactataggatggaaaaaatgag

SEQ ID NO: 226314 - DNA, 351 bp, Unknown
  Bacterial polypeptide expressing nucleotide sequence isolated from the Sargasso Sea
gctcgtaggagctggtccgggcgatccaggcttgatgtcgcttgccggactacacgctctgcaaacctccgacgtgatcatctatgacgctttggtaggggacgacatcttaaaacttgcccggccagaggcacagcaagaatatgcgggtaaacgcggcggaaaaccatcgccaaaacaaactgacattaccgagcgactggtcgaactcgctcgggacggaaagcgggtgctgcgcctcaaaggcggcgatccttttgtatttggtcggggtgctgaagaatgcttccggctcatagaggccgatatcccgttccgcgtagtacccggtatcaccgccggcgtaggcgg

SEQ ID NO: 226315 - DNA, 706 bp, Unknown
  Bacterial polypeptide expressing nucleotide sequence isolated from the Sargasso Sea
aatgactggaaaagtatacttagttggtgcgggacctggagatccaaaattaatcacattacgtgcaattgaattaatcaaagaagccgacgttgttctatatgatagattggtcagcaaaaaaatcatttcaatgattccaaaacgtgcaaaatctatctatgtcggtcgtgcagttggtgatgacacacgacatcaagatggaacaaatgaactaatggtaaagtatgcaaaattaaataaaaaagttgttcggttaaagggtggtgatccaataatttttggacgtggtggtgaagaagctgaatttcttaaatctttcaaagtaaaatatgaaattgttcctggaataacttctggaattgggtctgcaacgtatgcaggaattccattaacgcataggaaatatgcctcttctgcagtatttgtaacaggtcatgaagatccagaaaagaatgaggaaattgtaaaatggaaaaaacttgcaaaatctgttgacaccatagtgataatgatgggactttcaagaattggaattatctcgaaacaacttattgatggcggaatgaaaaaaacaacacctgttgcagtaattcaaaatggaacgacaccaaaacaaaaaatgattgttggcactctaactaacatttcaggtaaaattaaaaaagaaaaaatgactcctcctgcaaatataattataggtgag

SEQ ID NO: 226316 - DNA, 535 bp, Unknown
  Bacterial polypeptide expressing nucleotide sequence isolated from the Sargasso Sea
ctgatgttgcgttatgcacgccagggtaagtgcgtagtacgccttaaaggcggtgacccgtgtatttttggccgcggtggcgaggaggcaacctggctgcgcgagcgtggaatcgaggtggaattggtcaatggcatcacctcagggctggccggggcgacccagtgtgacatccctttgaccttgcgcggagtgagccgtggagtgaccttggtcaccgcgcatacccaggatgacagtagcttgaactggcgtgcgctggcggagggtggaaccacgctggtggtgtatatgggcgtggccaagctggaagaaatccgcgaacagctgctcaacggcggcatggctgcggatatgccggtggcaatgatcgaaaacgcttcattgccccagcaacgcgaatgccgcagctccctggcggccatgcatgaagctgcaaaagcctttgcactgaagagcccggccatcctggtgattggccaggttgccggcgccgcacagatggctagcatcgccgctgcggcaagcgcctgag

SEQ ID NO: 226317 - DNA, 772 bp, Unknown
  Bacterial polypeptide expressing nucleotide sequence isolated from the Sargasso Sea
ctggaacgaccctccgcggatgacgttgcttcgacctcgtcgatcccccggcgagacccgaacgccggcaaggtctacctcatcggcaccggcccgggcgaccccgggctcctcacgctgaaggcgtaccacctcatgcagaccgccgacgtcgtcctctacgaccgactcgtctccccgcagatcctcgacctcgtctccacggactccaccatgctgtacgtcggcaagcaatccgggtaccacacccgaacgcaggacgagatcgaggcgatgatgctcgcgttcgcggcgaacggcgcgacgatcgtcaggctcaagggcggcgacccgctcgtgttcggcaggggcggcgaggagatggaggcgctcgccgcgcgggggcacgaggtgcgcatcgtccccggcatcaccgccgccgcgggggttggttcggagctcggcatcccgctcacccaccgaggggtggcgacgtcggtgcggctgctcacggggcacctgcgcgagggcgccgcgaaagaggcggtcagcggcgacggtaacgcgatcgccgacgccgtggacttcgccgtcaccagcgcggacctcgacacgacgctcgtcgtgtacatgggcctcgccacgctcccggcgttggcggctaagctgctcgcctccggcttccccgccgatactcccgcggtggcggtggaacggggaaccacgcaccacgagcggcgggtgttcagcaccatcgaggacctcccggaatccgtcgcgacgtgcggcctga

SEQ ID NO: 226318 - DNA, 705 bp, Unknown
  Bacterial polypeptide expressing nucleotide sequence isolated from the Sargasso Sea
tatggaactgcttcccaaagacctaccagattttaagccaggatgggtttggttggcaggtgctggaccgggagatgtaggacttttaacgcttcatgctttaaatgctctaaggcaagccgatgttcttgtatacgatgctcttgttgggagggaaattattgaactggtatcttcagaatgtgagcttgagtatgctggtaaacgaggaggaaaaccttcaccaaaacagaaagatatttctctgcgtattgtggaattggcaaaacaagaaaagagggttttgagactcaaggggggagatccctttatttttggaagaggaggagaagaggctttgcatttgttcaaagctgggattccattcagaataataccaggagttacagcaggtattggagggactgcatatgctgggattccattgacccatcgtgattttaattccgccgttacatttattgcaggacgtgactctgctggagaattacctgtacggcataattgggaagcaattgctaagggatctcctgttatagtgatgtatatggctactaaatatattcacgaaattgtcagtcgtttactaaattacggacgaaaaccagatgaacctgtagcagtgattgcaaaggcgagccttcccgagcaaatagttcttgaaactagactctgtgaatgtgttgaagaaattaaaaaaaataa

SEQ ID NO: 226319 - DNA, 964 bp, Unknown
  Bacterial polypeptide expressing nucleotide sequence isolated from the Sargasso Sea
acacgggcccgtatcgagaccctgttccccgctgcctatggccgcctggcacagctggccaagcgtttccgccagcaggtgaaggatgcgtttccgaccatcaaccagcgccgcgccttctgggagaacatcttccagggcgaagtggctgagcgtgtgttcgccggccgtgatggggaggcggcggtcatgttggaagcagaactgcgcggccagcgcgacaaggtctatcaaggcgaggtctacctggtgggggccggcccgggcgacccggacctgctgacatttcgtgcactgcgcctgatgcagcaggccgacgtggtactgcatgaccgcctggtagcaccggcgatcattgacctctgccgccgcgatgctgatcgcatctacgttggcaaggcacgcagcgaccacgcggtgccgcaggaggaaatcaaccagttgctggtgcgtctggcccagcagggcaagcgtgtgctcaggctcaaaggcggtgaccccttcatctttggccgtggcggcgaagaaatcgaagagctggcaacccacggcgtgccgtttcaggttgtacccggcattaccgctgccaatggctgctcggcctacgcgggcatcccgctgacccaccgtgactacgcgcaatcagtgcgctttgtcactggtcatctgaaagacggcagcaccaatctgccatggcgtgatctggtcgcgccggggcagacgctggtgttctacatggggttggtggggctgcctgacatttgcagccagctgattgcccatgggcgcgatgcgcagacacccattgcgctggtacagcagggtacaacccacaatcagaaggtgctgatcggcaccctggccgacatggccgagcgggtggccggggagacgatcaagccgccgacgctgctgattgtcggcgaagtggttcagctgcacgacaaactcaagtgggtttgag

SEQ ID NO: 226320 - DNA, 755 bp, Unknown
  Bacterial polypeptide expressing nucleotide sequence isolated from the Sargasso Sea
ggaacaaacaatgactggaaaagtgtatttggtaggagcagggcctggagaccctaaattgattactttacgtgcagttgaactattgaaagaagctgacgttgtattgtatgatagacttgttagcaaaaaaataatttctatgattcctaagcgtgctaaagcaatctatgttggtcgtgcagttggtgatgatacaagacatcaagatgggacaaacgaattgatggtaaaatatgcaaaattaaacaaaaatgtagttcgactgaaaggtggtgatcctataatttttggcagaggaggtgaagaggctgaatttctaaaatcgttcaaagttaaatatgaaatagttcctggaataacttctggaataggctcttcaacctatgctggaattcctttgacacatagaaaacatgcttcatctgtagtatttgtaacaggtcatgaagatcctgagaaaaaaacagaaattgtaaaatggaaaagattggcaaaatccgttgacacaattgtgattatgatggggttatcccgaattggaatcatttctaaacaattagttgaaggtggaatgaaaaaatccacacctgttgcagtaattcaaaatggaactacacctaaacaaaaaatgattgttggaacacttagtacaatttctagtaaagttaagaaggaaaaaatctctccacctgcgaatataattataggtgatgtagttgatttacataaaacaataggatggaaaaaatgag

SEQ ID NO: 226321 - DNA, 646 bp, Unknown
  Bacterial polypeptide expressing nucleotide sequence isolated from the Sargasso Sea
atggaactgtttcccaatgacttaccagaatttaaaccaggatgggtttggttagctggagcaggaccaggagatgtaggattgttgacacttcatgctttaaatgctctcaggcaagcggatgtgctggtctatgatgctcttgttgggggggaaataattgaactcgtatcttctgattgtgagcttgaatatgcaggtaaaagaggtggaaaaccttcaccaaagcagaaagatatttctctacgtcttgcggaattggcgcagcagggaaagagggttttgagactcaagggtggagatccatttatttttggaagaggaggagaagaggctttgcatttgttcaaagctgggattccattcagaataatacccggaattactgcaggaattggaggtcctgcgtatgctggaattccgttaacccatcgtgattacaattccaccgttacatttattgcagggcggggttcagccggcgaattgcctgaacggcataattgggaagcaattgctaagggatctcctgttatagtgatgtatatggctacaaaatatattcgccaaattgcggatcatttgctaaatcacggacgaaaaccagaaaaacctgtagcggtgattgcaaaggctagccttccgg

SEQ ID NO: 226322 - DNA, 232 bp, Unknown
  Bacterial polypeptide expressing nucleotide sequence isolated from the Sargasso Sea
tgcaaaagcacaccccaggccttcatcgaaaagctcatgctgatggccgtgaacgaaggcgagaacgtggtgcgcctcaagggcggcgacccgttcatctttggccggggcggcgaagaggtggagcacctgcgtgccgcaggcgtgcaggtcaccgtcatcaacggcatcaccgcagggctcgcagggctgacctcgctgggcgcaccgctcacccaccgcgagcacgcgc

SEQ ID NO: 226323 - DNA, 322 bp, Unknown
  Bacterial polypeptide expressing nucleotide sequence isolated from the Sargasso Sea
tatgttggttgaaggatttgagtttcctgtattcgaacctggctgggtctggctcactggcgcaggaccgggagatctgggtttgttgacccttcatgctctgaatgggcttaagcaggccgatgtggtgatttacgatgcattggtcgatgaaaaaatcctgggactcacccgatcctcctgcgaactggaatacgcaggcaaacgcggagggaagccatctcctaaacaaacggacatttcctaccgcatcattcaacgggcaagaaaccagaaacgggtgttgcggctcaaagggggtgatccctttgtcttcggcaga

SEQ ID NO: 226324 - DNA, 625 bp, Unknown
  Bacterial polypeptide expressing nucleotide sequence isolated from the Sargasso Sea
gaaaagatttatgttggcaaacaaagagccgaccatgcaatgccacaagaaaatattaatcagttactagcaagacttgctcttgaaggaaaaaaagtattaagacttaaaggtggagatccatttatatttgggcgaggaggggaagaaattgaaagcttaataaatgatgatataccatttcaaattgttcctggcattactgcagcatcaggttgcgcaagctacgctggtattccattgacacatagagaccactctcaagcctgtatatttgtaacaggccatcttagagatggcacagtaaatttaaattggaaaatgttagctcacgaaaagcaaactcttgttttttacatgggaatgcatggatcaaaaataatatgcgagcaattgataaaacacggcttaaataataatacacctgctgctcttatagtaaaaggtacaacggcaaatcaaaaagtaattatcggtgatcttgaaagcatgccaaatattattgagaaaaataaaatagttcccccgactcttttgataatagggagcgtggtaagtcttcatgataaacttaagtggtttaatccgttttcaaaagaactagaaaaaaactttcacttataag

SEQ ID NO: 226325 - DNA, 892 bp, Unknown
  Bacterial polypeptide expressing nucleotide sequence isolated from the Sargasso Sea
attttcccgtcgatcgttgaccgttcgccgctgctggtggcgatctcctccggcggtaccgcaccggtgctggcgcgcgtgctgcgggaaaaaatcgaagcgctgctgccgaccagcctcgggcgcatggcggagaaagccagctactggcgcaaccatttgaaaacccgcctgaccagcgtgacggaacgccgtcgcttctgggaacgcgtgtttcgcggccgctttgccagcctgatgcatgccggtaatgagactgcggcgcagaaaatcctcgaggacgaactggataaccccggcagtacgggcggggagatcattctggtgggcgcggggccgggcgatgccgggctcctgacgctgcgcggcctgcaggtgctgcaggatgcggacgtggtgttctacgaccacctggtcaccgacggcgtgcgcgagctgatccgtcgcgacgcggagcaaatctgcgtcggcaaacgggcgggcgaacactcggtgccgcagcacgacaccaaccagatgctaattgacgccgcgaaagcgggcaaaaccgtggtgcgcctgaaggggggcgatccgttcattttcggtcgcggcggcgaagagctgcaggcggcagccgaagcgggcgttccgttccaggtggtgcccggcatcacggcggcttctgcggtaacggcctacgccggtatcccgttgacccaccgcgattacgcccagagcgttacctttgtgaccggccactacaaggcggacagcacgccgttcgactggtcgcatctcgcccagagccgccagacgctggcgatatacatgggcacgatgaaggcggcggacatcagcgaacagcttattcagcacggtcgcgaggcgacgacccccgtcgccgtcattc

SEQ ID NO: 226326 - DNA, 1309 bp, Unknown
  Bacterial polypeptide expressing nucleotide sequence isolated from the Sargasso Sea
ggtgaagtagcagcccgtaagctagagcttattatgaagacacctgcgaccatcactgtagtggcgccttgggtttgcgatacggtgaagcaattggcgcaaaatgagaaagtaacacttattgaacgagagtttgaaaatagtgatctcacccataaagatatggtcttcattgccacagataaaggcgatgttaatcaacatattcacgacttagcgcgcgctaacaaagtgttggtgaacgtggtggacaatacgccgctttgccaattcatcaccccctctattgttgaccgctctcctatcgttattgctatgagtagtggtggtgtagcgcctgttttgcttcgttatttacgtcaaaagttagagactgtactgcctgctaacttaagtcgacttggcgcattttctgaaaaattccgcgaaaaagtaaaacaaacgcttaatggcgttaccgctcgtcgatacttttgggaagacgtgctcgatggtgacattgctgaaatggtagaaaagggccaagacagcaaagccgatgatgcattcgaattagcactgcaagccgcggctcaggacaaaaaagtagaagggcaagtgtatttggttggagcaggtcctggcgaccccgatcttcttacctttcgcgccttgcgcttaatgcaaaaggccgacgtggtagtctatgatcgcttagtatcgccgcaaattcttgagcttgtacgccgtgacgctgagaaaatctacgtgggtaaggccaaaagcaatcacacgcttcctcaagacgacattaaccaactaatggttgatgaggccaaaaaaggcaatcgcgtagtgcgcctaaaaggcggcgacccattcatatttggacgcggtggagaagaaattcaaaccctcattaagcacggcatcgactttcaggtagttcccggcattaccgccgcaagcggggcgtctagctatgctggcattccacttactcatcgcgatcacgcccagtctgtggtattcgccactggtcacctaaaaaatggcactatcgacctcaactggcctgcccttgcacagaagaatcaaaccgctgtgttttatatgggtttgacaggcttgccgattatctgcgaaaagctcattgaacacggtcttgatgccaatacgcctatcgctttagttcaatcggcgactaccgaaaagcaggcggtactaacaggcacgctgagtaatattgtggctaagcaagagaggcgcaattacagcctcctacacttattatcgtcggttcagttgttagtttacgtgacgaactaaa

SEQ ID NO: 226327 - DNA, 670 bp, Unknown
  Bacterial polypeptide expressing nucleotide sequence isolated from the Sargasso Sea
attgaaagaagctgatgtggtgctatatgatagattggtcagcaaaaaaataatttctatgattccaaagcgtacaaaagctatctatgttggccgtgctgttggtgatgatacaagacatcaagatggaacaaatgacttaatggtgaaatatgcaaaattaaacaaaaaagttgttcgactaaaaggtggtgatccaattatttttggacgaggtggagaagaagctgaatttcttaaatctttcaaagtaaagtatgaaattgttcctggaataacttctggaattggttctgcaacatatgctggaattccgttaacacatagaaaatatgcttcctctgctgtatttgtgactggtcatgaggacccagaaaagaatgaagaaattgtcaaatggaaaaaacttgcaaaatcagtagacaccattgtaataatgatgggactctcaagaattggaataatatcaaaacaactcattgatggtggaatgaagaaatcaactcctgttgcagtaattcaaaatggaacaaccccaaaacaaaaaatgattgttggcactttaactagtattgctggtaaaattaaaaaagaaaaaatgactcctcctgcaaatataattataggtgaggttgttaaactgcataaaactattggatggaaaaaatga

SEQ ID NO: 226328 - DNA, 1408 bp, Unknown
  Bacterial polypeptide expressing nucleotide sequence isolated from the Sargasso Sea
aatgaagtattttcctttttacatagatttaaagaaaaaatcagtacttttaataggaggaggggaagtagcagagagaaaattagatctacttataaaagctaaagctgatgtaacacttatctctccagaaactactctctacatatcagatattgcagaaaaaaataatataaaaattatcaatgaaaaatattcatctcagtacttagataagaaatattcatttgtaattgcggctacgaataatgaaaagttaaataaatctatcgctttagatgcaaataaaaataatattcttgtaaatgtagttgataggccagagatatgtgattttatttttccatccatactagaaagaggcgatataacagtatcagtatcaacaggtggagcctctcctgttttagctaggatgttacgaactaaacttgaaacaatgatacccggagcgtacggcaaagttgcaaagattattgctgaaaatcgtgtaatggtaagagagaaacttaagcagtctcaatctaataaaatattttgggagcagatgttaaatagcaaatttttagagttagtattaagcggacaggaagcggaagcattagagtacttgaatacatccattgataatattaatgaagataaaataaaccaaggtgaagtatatctagtaggagcaggtcctggtgatcctgaccttttaacctttagagctcttaggctaatgcaacaatgtgatgtggttttatatgatcgtttagtgcaaccagcaataatggatttagttagaagagatgcaaagaaaatttacgttggtaaagagagagataatcatgttgtaagacagcatgagattaataatcttcttgtggagtatgctaaaaaaggcaataaagtacttcgcttaaaaggaggagacccttttatttttgggagaggcggagaagaaatcgatacactggttgatcataaggtatcctttcaggttgtaccgggcataacaagtgccagtggttgttcagcatatagcggtattcctcttactcatcgtgatcatgctcagtcatgtatttttgtaactggtcatcttaaagatggaaagttagaacttaattgggagaagttaattcaacctaatcaaactattgttttctatatgggtcttgtcagtatagatataatttgcactgagttaacaaaacatggattagacaaaaacacgctctgcgcacttgtccaacaaggtactactgttaatcagagagtatttacatctaatctcagagagcttccagagcttgttaagaaagaaaaaccaaaaccaccaacaattctcatcataggtagtgtcgtcagtttacgtgataaattgagatggtatgaaggcactatttcgcatagagattaa

SEQ ID NO: 226329 - DNA, 778 bp, Unknown
  Bacterial polypeptide expressing nucleotide sequence isolated from the Sargasso Sea
tatggaactgcttcccaaagacttaccagattttaagccaggatgggtttggttggcaggtgcaggaccgggagatgtaggacttttaacgcttcatgctttaaatgctctcaggcaagcggatgttctcgtatacgatgctcttgttggagaaaaaatcatggaactcgtatcttccaattgtgaacttgaatatgcaggtaaacgaggaggaaaaccttcaccaaagcagaaagatatttctttacgtcttgcggaattggcacagcagggaaagagggttttgagactcaaggggggcgatccctttatttttggaagaggaggtgaagaggctttgcatctattcaaggctggaataccattcagaataatacctggtataactgcaggaattggggggactgcttatgctggaattcctttaacccatcgtgatatcaattcctccgttacatttattgctgggcggggttcagctggagaattacctgaacggcataattgggaagcaattgctaagggatctcctgttatagtgatgtatatggctacaaaatatattcacgaaattgtcggtcgtctactaaattacggacgaaaaccagatgaacctgtagcagtgattgcaaaggcgagccttcccgagcaaatggttcttgaaaccagactctgtgaatgtgttgaagaaattaaaaaaaataagattgaaccaccagctttgattgttgtgggggaggtagtttctttacggagttacatgaaatggatggattag

SEQ ID NO: 226330 - DNA, 691 bp, Unknown
  Bacterial polypeptide expressing nucleotide sequence isolated from the Sargasso Sea
acattacgtgcaattgaattattgaaagaagctgatgtggtgctatatgatagattggtcagcaaaaaaataatttctatgattccaaagcgtacaaaagctatctatgttggccgtgctgttggtgatgatacaagacatcaagatggaacaaatgaattaatggtgaaatatgcaaaattaaacaaaaaagttgttcgactaaaaggtggtgatccaattatttttggacgaggcggagaagaagctgaatttcttaaatctttcaaagtaaagtatgaaattgttcctggaataacttctggaattggttctgcaacatatgctggaattccgttaacacatagaaaatatgcttcttctgctgtatttgtgactggtcatgaagatccagaaaagaatgaagaaattgtcaaatggaaaaaacttgcaaaatcagttgataccattgtaataatgatgggactctcaagaattggaataatttcaaaacaactcattgctggcggaatgaaaaaatcaactcctgttgcggtaattcaaaatggaacaactccaaaacaaaaaatgattgttggtactttaactagtattgctggtaaaattaaaaaagaaaaaatggctcctcctgcaaatataattataggtgaggttgttaaactgcataaaactattggatggaaaaaatgag

SEQ ID NO: 226331 - DNA, 1414 bp, Unknown
  Bacterial polypeptide expressing nucleotide sequence isolated from the Sargasso Sea
aatggattatttgccgatgtttgccaaattggacggtcgcccggtgctgctggtgggagggggcgaagtggccctgcgcaaggcgcgcctgctgctggcggccggcgccaggctgactctggtctcccccgagctggaacccgacttccaccaatttgccggtcgcttcacccatctggcggagcgcttcactccggcccatctggctggccagatcctggtggtggccgccaccgacgatctcgaggtgaacgctttggtctatcagagcgccaaccagctcggtctgttcgtcaacgtggtggacgaccccaagcgctccagcttcatcttcccttccatcatcgatcgcagccccatcatggtggccgtctccagcggcggcaaggcgccggtactggtgcgcctgttgcgcgagcggctcgagagcctgctgccccgccatctcggtgggctggccgagctgtccggccgggtgcgcgaccaggccaaacgggtgctttcctcgatctccgaccgtcgccgcttctgggagcgcgcctttgcctccaacaccctggccggtctgattgagaaagaggattggcagggggccgagcagtggctgaacgatggcctcgaccaggcgaaaagcgaagtgggcgaggtggtgctggtgggggcgggccccggcgatccgggcctgttgaccctcaaggcgctgcaacagattcagcaggccgaagtggtgctctatgaccagctggtctccgccgagatcctcgatctggtgcgccgcgatgccaacctggtgtcggtcggcaagaaggcgggcgcccacagcgtgccgcaggaggagaccaatcgcctgctggtggaatacgccaaagcgggcaaccgggtggtgcgactcaaggggggcgatcccttcatgtttggccgtggcggcgaagagctggaagtgctggcagaggagggcatccccttctcggtggtgcctggcatcacggccgccgccggtgccaccgcctatgccggcattccgctcactcaccgcgactatgcccagagcgccgtcttcattaccggccactgccagatcgatggcaaggagcccgactggcagcagctcgccgctaccagccagaccctggtcatctacatggggctgatgcgctccgagcatatccgccagcagttggtgagccatggccgcagcagcgccacccccatcgccatcatcgagcgcggcaccaccgcccgccagcgggtgctgaccggcactctagcggatctggccgaactggccgcccaggcggtgagcccgtcgctcatcgtcatcggcgaagtggtggccctgcgcgagcggctcgcctggtttggcgaggggcaacagcagggcacctgcgacctcaagctggtgagcctggcctga

SEQ ID NO: 226332 - DNA, 760 bp, Unknown
  Bacterial polypeptide expressing nucleotide sequence isolated from the Sargasso Sea
atgagccaaatcagtctggtaggggccggtcccggcccgctcgagttgttgaccctgcgtgcgctgcagcggatcgaggcggcggaggtggtggtctatgaccgcctggtgggggaagagatcctggcccgcattccccagggggcggcccgcttcgacgtgggcaagcgctgcggcgagccgagcccgagtcaggcacagatcaacgccctgttgctggcgctggctcgcaccggcaagcgggtggtgcggctcaaggggggcgatcccctggtgttcggccgtggtggtgaggaggcgctgcacctggcgcgccacggcatcgccgccgagctggtgcccggcatcacggcggcgctgggctgcgccgccagcagcctgatcccgctgacccacagggggctggcccgctccctgaccctggtcaccggccacctgatggacgagggcgactatcagggctggcaggggctgacccgggccggccacactctggtgttctacatggggctggagcgggcggccgagatccggcaggggttgctggcggccggtgcctcaccggatctgccggtggcactggtggtggccggctgcagcgcccgccagcaagtccatgagaacacgctggacgggctggcgcaggccgccggggccctgctcggccagagcccggtgctgatgatcatgggggaggtggtgcgccttcgcgccgagctgcagggcctgctgggactggcgctggatcgggtggcctgag

SEQ ID NO: 226333 - DNA, 1246 bp, Unknown
  Bacterial polypeptide expressing nucleotide sequence isolated from the Sargasso Sea
atggactatttcccgatatttcttgatttaaaaaataaaaaatgtgtaattgtgggtggcggagaggtagcacatagaaagaccaaagctgtcctaaaatctggtgctatcgttaatattgtttcaattgagtttagtaaaaaatttaatgcctttcctgaagctaggtgttttttaatcaaagatgaatttaatgtaagacatttgactgatgcaacactagttatagcagctaccgattctttgagcatgaacaaaaaggttgctaacgaagcgaataaattaggtatccctgtcaacgttgttgatgaaccatcactttgttcgttcatcatgccagcattaattgataaatctccagttatcatcggcatatcaacgggtggtaattcacccgtattaactcgcacaattaaagaaataattgaggttaacttacctagtaacgtaggtttactggctaagatgatgggctcatggcgtcaacgagttaaagaaagatttaactcttttgatatgagactgaaattttgggaaaaactaatggacagtgaagtcccacaattagttttcaaaaataagttagtgctagctgataaaagaattcaagaacaactcagaaataatagttttgagaattctataggtgaggtttatcttgtgggtggtggtcctggggatccagaacttctcacgctaaaggctctccgtctaatgtatcaatgtgatgtggttttgtatgaccgactagtatccaaagaagttttgaacaaggtccgtccggatgcagagtttatctcggtgggcaaatctgaatcccaacataccgttgaacaacacaagatcaatgaaatgctaattctcctggcaaaagaagggaaaaaggtgttgaggttgaaaggaggagatccttttatattcgggcggggcggtgaagagattaacgaattagccaaatctaacattccatttcaagttgtgcccggagtgacagccgcttcggggtgcggctcgtatgctggaatacccttaactcaccgtgattatgctcaatcagttcgattcctcactggccacctgaaggatggaaagctagatatagattggaaaaacttaaataagaaacaggagacacttgtcttttatatggggttattgtcgctaccaaaaatttgtgaggagcttatgaaacacggaatgccggccagtatgccgatcgcagctatagagcacggcacaacttata

SEQ ID NO: 226334 - DNA, 802 bp, Unknown
  Bacterial polypeptide expressing nucleotide sequence isolated from the Sargasso Sea
tatgccgggcatcgtttatttggtgggagcaggcccaggagatccggaattgttgacgttgcgggcccatcgactgctgcaacgttgtgatgctttggtgcatgactccttggtgcccatggagctcctggagttggtccccgaaggctgtgaaattcacgcggttggcaagcggcgcggtcatcattccgtgcctcagcccagcaccaacgcgttgttgcagcagttggctggccgttgccggtgtgtggtgcgtcttaagggcggcgatccatttctgtttggtcgcggcggtgaagaagcggcatatctagccaaacggggagtggcggtagaggtggtccctggtgtgacttccggaattgccgcgccggcttatgtgggaattccgatcacgcaccgccgggccggctcatcggtgaccttcgtcaccggccacgaagagattgacaagggccggccagccgttgattggagagcgctggctgcctgcagtgatggccttgtgatctacatgggtctccacaacctggcccggatctgtgaggagttgcaggccggtggactgctcggaaccacgccagcggcgatcattcagcaaggcagcgtcaacggccagaagcatctgattgcaacgctcgaagatttggctgacgccgctcaggagcagggtttcagtgctccgtccatcgttgtcatcggcgaggtggttgagcagcgaattcccagttgtgcgccgatgccagcgcccgtgacgatgccctcgcctattccgctgagcccacaaaacgcccctgcttaa

SEQ ID NO: 226335 - DNA, 1030 bp, Unknown
  Bacterial polypeptide expressing nucleotide sequence isolated from the Sargasso Sea
agttgctgtatcgacaggaggagcatctcctgttttagccagagttttgagaacaaaacttgagacaatggttccagcaagttatggcaagctcgctgacatagtgtcctcaaaccgaattagagttcgtgataagatgaaaaaattttcatcaaataaaatcttttgggagaagatgctcaatgggaaatttgtagaactcgttttatcaggtaagactgacgaagctaagtcattccttgataaacaaatcgatgattttgatgaggatattgcaaaccaaggagaagtgtaccttgtaggcgcaggacctggtgatcctgatttattgacatttaaagccttacgtttgatgcagcaagctgatattgcactatacgacagactagttcatccctcgattgttgatctaatcagaagagatgcaacaaaaatatatgtaggtaaagagagagataaccatgttgttagacaagaggaaatcaatgatttactggttaaatatgccaaaaaaggcaaaaaagttttgcgacttaaaggaggagacccttttatttttggaagaggtggagaggagatagagactcttgctgatgaaaaaatagcattccaagttgttcccggtatcacgagtgcaagcggctgctcaacttacagtggaataccattgacgcatagagattacgctcaaagttgtatatttgttaccggacacctgaaagagggtaaattagatcttcaatgggataagttgattcaaccaaatcaaacaatagtcttttatatgggattagtatctattgatattatctgtaagcaattagtaaaacacggattgagcaaatcaactccttgcgcacttgttcaacaagggacaactaatactcagagagagtacatatcaactcttcaagacatgcctatgcttgtcaaaacagaaaagccaaaagctccaactatactaattattggtggtgttgtctcgttaagagataagctcaaatggtattctactgacgctgaagactaa

SEQ ID NO: 226336 - DNA, 468 bp, Unknown
  Bacterial polypeptide expressing nucleotide sequence isolated from the Sargasso Sea
aatgacgtcacttgaaacaggtatcgattttccggaattttcccccggcagtgtctggctggtcggggcaggccccggcgaccccggtctattgaccgctctggctctctatgccttgcagcaatgcgacgtccttgtttacgacgcactggtcggcgacgggattctgaaactggttggcgaaaagactgaaaaaatctatgccggaaaacgcggtgggaaaccctcaccgaagcagcctgatatcacggcccggctggtcgcgcttgcccgggaaaacaaacgtgtcctgcggctcaagggcggtgacccctttgtgttcggacgcggcggtgaagaagcccttgtcctgaaatcgaacgaggtgccgttccggatcgtgccggggatttcgtccggcatcggcggtctggcctatgccggtatcccggtcacccacagggacaccaattcagccatcaccatcct

SEQ ID NO: 226337 - DNA, 431 bp, Unknown
  Bacterial polypeptide expressing nucleotide sequence isolated from the Sargasso Sea
catggcaaatccatcggcatctcttgagttcgcaggtaaaagaggtggaaagccctcaccaaagcaagtcgatatttctcttagattaatacaccttgctagaaaaaataagcgcgttcttaggctgaaaggaggggatccttttgtttttggacggggaggtgaagaagctacagcgctctatgaagcgggtattccttttagaattattccaggaataacttcaggcattggaggactggcgtatgccgggataccgcttactcatcgcgacacaaaccatgccgtcacccttgtcaccggacacgacgccgtaggcggaatttcgactattgactgggcctcgataagtaaaagtgcacctgtcattgtaatttatatggcaataaaacatctagactccatagtgaattctctgttagcagcaggca

SEQ ID NO: 226338 - DNA, 731 bp, Unknown
  Bacterial polypeptide expressing nucleotide sequence isolated from the Sargasso Sea
cgagttgctcacgctgaaggcgcatcggctcttgggccagtgcgatgccctggtttacgactcgttggtgcccgaagaagtgctggatcttgtgccggcaaactgcgaacgccgttttgtcggcaagcgtcgcggacatcattcggtgccacaacccagcaccaatgccgtgctggttgaaatggcccagaagcacagcacggtggtgcgcttgaaggggggtgatcccttcctgtttggtcgtggaggtgaagaagccgcatacctggcggagcggaacattcctgttcaggtggtgcctggtgttaccgctggcatcgctgcccctgcctacgccggaattcccgttacccaccggcgagcggggtcatcggtgaccttcgtcaccggtcatgaggaaatcgacaagcgccgtccttccgtggattggcgtgctctggctgcggccagtgacggattggtgatctacatggggctgcacaacctgcctcggatcgcagaagagctgatggcgggtggtttggctgagacaacccccgtggcggtgatccagcagggcacggtggcggggcaacgctgcctcaaagccagcttggttgacgttgccgatcaatgccgagccgaggccttcaagtcaccttctatcgttgtggtgggtgaggtgattgatcagcaggttgaagcctgcaggcccacaccagcagcggtcacgatgccgattccgttctgaa

SEQ ID NO: 226339 - DNA, 368 bp, Unknown
  Bacterial polypeptide expressing nucleotide sequence isolated from the Sargasso Sea
tatgttggttgaagggtttgagtttcctgttttcgaacctggctgggtctggctcactggtgcaggacctggagatccgggtttgttgacccttcatgctctgaatgggctcaagcaggctgatgtggtgatttacgatgcattggtcgatgaaaaaatcctggggctcacccgatcctcctgcgaattggaatacgcaggcaaacgcggagggaagccatctcccaaacaagcggatatttcctaccgcatcattcaacgggcacgaaaccagaaacgggtgttgcggctcaaaggaggtgatccctttgtctttggcagagggggtgaggaagcatttgattttggtggaagcgggcattctcttt

SEQ ID NO: 226340 - DNA, 730 bp, Unknown
  Bacterial polypeptide expressing nucleotide sequence isolated from the Sargasso Sea
gatgttggttgaaggatttgagtttcctgtattcgaacctggctgggtctggctcactggtgcaggacctggagatccgggtttgttgacccttcatgctctgaatgggctaaagcaggctgatgtggtgatctacgatgcattggtcgatgaaaaaatcctgggactcacccgatcctcctgcgaactggaatacgcaggcaaacgcggagggaagccatctcccaaacaagcggacatttcctaccgcatcattcaacgggcacgaaaccagaaacgggtgttgcggctcaaaggtggtgatccctttgtctttggcagagggggcgaggaagcactgaatttggtggaagcgggcattccctttcgggttattcctggagtgacatcagggactgcggctccggcttatgcagggattccggtgactcaccgggataccaactccgcggtcaccttcatcaccggtcatggggcaaacggcctcgtcccggaacgccatgattgggagggaatcgcaaagggttctcccgtaattgtcatgtacatggcagtcaagcatctgcattccattgcatccaaattgatggaatacggacgtagtccggaagaacctttggcgctcatttccaaagcatgcacctctgagcagcagatcctggaaaccacccttggaaacgcttcgatcgatgcactcgatgcggggatcgaaccgccggcggtggtcgtg

SEQ ID NO: 226341 - DNA, 499 bp, Unknown
  Bacterial polypeptide expressing nucleotide sequence isolated from the Sargasso Sea
tatgttggttgaaggatttgagtttcctgtattcgaacctggctgggtctggctcaccggcgcaggacctggagatccgggtttgttgacccttcatgctctgaatgggataaagcaggccgacgtggtgatctacgatgcattggtcgatgaaaaaatcctggggctcacccgatcctcctgcgaactggaatacgcaggcaaacggggagggaagccatctcccaaacaagcggatatttcctaccgcatcattcaacgggcacgaaaccagaaacgggtgttgcgtctcaaaggcggcgacccctttgtcttcggcagagggggggaggaagcactgaatttagtggaagcggggattccctttcgggttattcctggagtcacatcggggactgcggctccggcttatgcagggattccggtgactcaccgggataccaactccgcggttaccttcatcaccggtcatggggcaaacggcctcgtcccggaacgc

SEQ ID NO: 226342 - DNA, 550 bp, Unknown
  Bacterial polypeptide expressing nucleotide sequence isolated from the Sargasso Sea
tcaaggcggcgatccctttgtcttcggcagagggggcgaggaagcactgaatttggtggaagcgggcatcccctttcgggttattcctggagtgacatctgggactgcggctccagcttatgcagggattccggtgactcaccgggataccaactccgcggttaccttcatcaccggtcatggggtaaacggcctcgtcccggaacgccatgattgggagggaatcgctaagggatctccggtaattgtgatgtacatggcagtcaagcatttgcattccattgcatccaagttgatggaatacggacgtagtccgaaagaacctttggctctcatttccaaagcatgtacttctgagcagcagatcctggaaaccacccttggaaacgcttcgatcgatgcattcgatgccgggatcgaaccgccggcggtggtcgtggtaggtgaggtggtgagaatgcgtcaaagcctagattggctgggagccttggaagggaaggtgttacagcgggatccactgggaaaacgaactttaccggagacaggctga

SEQ ID NO: 226343 - DNA, 406 bp, Unknown
  Bacterial polypeptide expressing nucleotide sequence isolated from the Sargasso Sea
tatgttggttgaaggatttgagtttcctgtattcgaacctggctgggtctggcttactggtgcaggacccggtgatccgggtttgttgacccttcatgctctgaatgggctgaagcaggcggatgtggtgatctacgatgcattggtggatgaaaaaatcctggggctcacccgatcctcctgcgaactggaatacgcaggcaaacgcggagggaagccatctcccaaacaagcggacatttcctaccgcatcattcaacgggcacgtaaccagaaacgggtgttgcggctcaaaggcggtgatccctttgtcttcggcagagggggcgaggaagcactgaatttggtggaagccagggataccctttcgcgttattcctggagtgacatcggggacggcggctcc

SEQ ID NO: 226344 - DNA, 832 bp, Unknown
  Bacterial polypeptide expressing nucleotide sequence isolated from the Sargasso Sea
atggaaattttatctttaccaggccaaagcgctaagggcaaagtctggctggttggtgcgggccccggcgatgtggagttattaacccttaaagcgtggcgcattctaaagtctgccgatgcggtgttatacgatgcgctcgtcagccaagatatcctcgatttgatccctaaagatgctgaaaaaattgccgtcggtaagcgtgcaggcaagcatagcgcggcgcaagatgaaattaatcagttactggtgacgaaagcctatacccgtaaaaacgtggtacgcctcaagggcggcgatccgtttatttttggtcgcggtggtgaagagttacaaaccttagtcgaagcgggcgtcgaatttgaagtggttcccgggattaccgccgccagcggcacttcggcctatgcgggcattccattaacccatagggattacgcccaaggggtaacgttcatcactggccattgtcagttagaaaaccgtccgatggattggcagggttatgctaatcccaacaataccttagttgtatatatggggattttaaacgcgggcattatccgtcaagggttaatcaacgcaggtcgtagtccagagacacctgtggccatcgtctcgaaggcgaccactcagtcgcagcaacgttttattgggcaattagattcactcgaacaacttgctgctgatccgcagttgcaaatgcccgcattaatgattattggcgaagtggtggggttgtccgaaaccttaaattggtttcagcccaagggccaaggctcgcagccgcttgatgctttaaacacgaccaaagttgcagcaaaaatttagt

SEQ ID NO: 226345 - DNA, 1142 bp, Unknown
  Bacterial polypeptide expressing nucleotide sequence isolated from the Sargasso Sea
tttggtaaaaagtgggtataaaaaaattgtaagattgaagggcggggatccttttctttttggtagaggtggtgaagaagctgaggaacttaaaaaaaatagaataaattttgagatagtccccggaataacttcagcaattgcagtaccagcatacgcagggatacctgtaactcacagagatatgactagcactctttcaattgttaccggtcatgaagatccagataaaaatgaaagttccatagattggagttcattatcaagaatgaaatctataattttcttaatgggaacgaagaatttaaagaaaaatcttaataatttaataaacaatggaatgcctaaaaaaactaatattgctgttataaattggggaacttattctaaacaaaaaactgtcactggaaacttgataaatattcatgaagaaatccaaaaaaataaaatcaaatctccttcaatagtagtaattggggatatatgcaagatgagatctaaattgaattggtttgaaaaaaaaccattatttggaaaaaatattgttgtcactagggccagaaaaaactctagtaaattatcaaaaaaaataattgaattaggtggaaacccaattgaaataccgactatagaaataaaacctaaatcttcaaaaacattaagaactaatttaaataaaattaatagttatgaatggttagtttttacaagtgttaatggagttgaaattttttttgatgaattcctaaagattaataatgatattagaaaactaggaaatttaaaaatagcaaccataggatcagaaactgcaagatcattaaataaattaaacctatcagttgatttaattccggataaatttactgctgaaggacttcttaattccttcaaaaaattaaaaattaggaaatcaaagatattcatacctagagcttctctagcaagagatactctagttagtgggctgagaaaaattggaaatgaagtaaaagaagtaaagatttacgatactatattgccctcaaagctaactaaaaaagatgttttaaataaagttagtggtgtgaatattgatttcataacctttactagttcctcaaccgttgataatttttttaaatatataactccaaaaaaag

SEQ ID NO: 226346 - DNA, 841 bp, Unknown
  Bacterial polypeptide expressing nucleotide sequence isolated from the Sargasso Sea
atgttggttgaaggatttgagtttcctgtattcgaacctggctgggtctggctcactggtgcaggacccggagatccgggtttgttgacccttcatgctctgaatgggcttaagcaggccgacgtagtgatttacgatgcattggtgggtgaaaaaatcctggggctcacccgatcctcctgcgaactggaatacgcaggcaaacgcggagggaagccatctcccaaacaagcggacatttcctaccgcatcattcaacgggcacgaaaccagaaacgggtgttgcggctcaaaggcggcgatccatttgtcttcggcagagggggtgaggaagcactgaatttggtggaagcgggcattccctttcgcgttattcctggagtcacatcggggactgcggctcccgcttatgcagggattcccgtgactcaccgggataccaactccgcggtcaccttcatcaccggtcatggggcaaacggcctcgtcccggaacgccatgattgggagggaatcgccaagggatctcccgtaattgtcatgtacatggcagtcatgcatctgcattccattgcatccaaattgatggaatacggacgcagtccggaagaacctttggcgctcatttccaaagcatgcacttctgagcagcagatcctggaaaccacccttagaaacgcttcgatggatgcactcgatgccgggatcgaaccgccggcggtggtcgtagtaggtgaagtggtaagaatgcgtcaaaaccttgattggctgggagccctggaagggaaggtgttacgacgggatccaatgggaaaacgaaatttaccggagacaggctgat

SEQ ID NO: 226347 - DNA, 832 bp, Unknown
  Bacterial polypeptide expressing nucleotide sequence isolated from the Sargasso Sea
atggaaattttatctttaccgggccaaagggcgaagggcaaagtctggctggttggcgcaggccccggagacgttgaactcttaaccctcaaggcttggcgcattcttaagtccgccgacgctgtgttatacgatgcgcttgtcagccaagagatcctcgatttgatccctaaggatgctgagaagattgccgtcggcaaacgtgccggtaagcatagtgctgcgcaagatgaaattaatcagttactggtgactaaagcctatacccgtaaaaacgtggtacgcctcaagggcggcgatccgtttatttttggccgcggtggtgaagagttacaaaccttagtcgaagcgggcgtcgaatttgaagtggttcctggcattaccgccgccagcggcacttcggcctatgcgggcattccattgactcacagggattatgcccaaggggtgacttttattactggccattgtcagcttgaaagccgtccgatggactggcagggttacgctaatccaaacaataccttagttgtgtatatggggattttaaatgcgggcattattcgtcaaggattaatcgatgctggccgtagcccaaacacacctgtggcgattgtctctaaggcgaccactcagtcgcagcagcgttttattggtcaattagattcactcgaacagctcgcggccgatccgcaattgcaaatgcccgctctgatgattattggcgaagtggttgcgttagctgacagcttaaactggttccaacctaagggtgaaggcgagtcagcactcaataccactgatgccgccaagattgtggcaaaagtttagt

SEQ ID NO: 226348 - DNA, 757 bp, Unknown
  Bacterial polypeptide expressing nucleotide sequence isolated from the Sargasso Sea
aaaagttgctaggacagggaattataaatgctggttaccaacaataacttcaaaagttaaagcaaaagaatcttttttagttgaagagtggaaaaaaaatcagagtttaacgaataaagatttaaaaattactatacctggaccaatgactataacagacaccatagcaaatacattttatgattcagatgagcatatgggtgaagacttagctgatgctgttaatgtagaaattaaaagattggttgatgtaggatgtaaatatattcaagtcgatgaaccgttgtttgctagaaaaccagaaaatgctcttaattttggaatcaaaaacctagaaagatgttttaaggatattaataatcaaagtatagaaaaaattactcatatttgttgcggctatcctgataaattagatgcagtagattatccaaaagcgcctttagattcttacagtaaaattagtaaagctttagatgagtcaattatagatacagtttctattgaagatgctcatcgatataatgatttaaaatttttaaaagattttaaacaaacaaaagttatttttggtttagtaaaaatagcaagctctcaagttgagactaaagaagaaattgtctcaagaataaatgatgcattaaggtttattgataaggaacaattaattgtcgctcctgattgcggccttggtcacttacctcgagatttggcaaaaataaaattaaagataatggtagaagcttctagtagtttctag

SEQ ID NO: 226349 - DNA, 529 bp, Unknown
  Bacterial polypeptide expressing nucleotide sequence isolated from the Sargasso Sea
attaaaagactagttgatgctggatgtaaatatattcaagttgatgaaccattatttgctagaaaacctgaaaatgcgttattgtttggaataaaaaatttagaaaaatgtttttcaggaataaatcaaaatgatgttgaaaaaattacacatatttgttgtggttacccagataaacttgatgtagttgattatcctaaagcacctctagattcttatagaaaaattgctctttctcttgataattcaataattgatactgtatctattgaagatgctcatcggtacaacgatttaacattactaaaagattacaaacagacaaaaataatttttggattaattaaaattgctagttctaaaattgaaactgttgaagaaattgaagacagaattaaagaagcactaaaatttatctctaaagaacaattaattgctgcccctgattgcggtcttggtcatttaagcagagaactggcaatgaaaaaattacaaataatgtgcttagctgctaacaaatttaattaat

SEQ ID NO: 226350 - DNA, 561 bp, Unknown
  Bacterial polypeptide expressing nucleotide sequence isolated from the Sargasso Sea
aactgggagccgatttagggaatgcgctgaatcagaaaatactctctttagttgaggctggttgtcagtacattcaggtagatgaacctgtctttgccagaaaacctgagaaggcccttaaatacggagtggaaaatcttgaacggtgttttgctggtgttccggatcatgttacgcgagcaatgcatgcttgttgtgggtatcccaatgctcttgatactaataattattataaagctcccccacaatcctattttgatattgctgcggcgattgaccaatcttcgattaatgcaatatcaatcgaagacgctcatcgtcccaatgatccaaaattactggaactatttcaaaataccaccgttatcatgggacttgttgatgtagcaaaaagtaaacttgaagaagttgatcaggtaaaagaacgaataaaactttgtttagaacatatagaccgagaacgctttattgctgcccctgattgcggcttaggtcttttgaacagagatcttgctaaggcaaaattaaagaatctctgtcaagcggctcacagtatttaaa

SEQ ID NO: 226351 - DNA, 876 bp, Unknown
  Bacterial polypeptide expressing nucleotide sequence isolated from the Sargasso Sea
tatgttaacttcagttattggcgcttatccaaaaccttcttatataaaaattaccgattggtttaatgcgaaaggtggaactgatactgaacatcctactaaattttataataatgaaattaataaaatgggtaatagagttgaagaactattcaatagagcaactaaagaaataattagtgaccaagaggagtgtggtatagatattttaacagatggcgaagttagaagagaaaattatattcattatcattgtagatatcttgaaggtatagattttgataatcttaccgaaaaagttgcaaggactggaaattacaaatgttggctaccgaccataactggaaaggttaaagctaaagactcttttttagttgaagagtggaagagtaatcaaaaacttacctcaaaaccaataaaaattacaataccaggaccgatgactataacagatactatagcaaatacattttataattcagatcaagagatgggtgaggatctagctgatgcaataaacatagaaataaaaagattagctgatgctggttgtaaatatatacaagttgatgaaccattgtttgcaagaaaaccagaaaatgcattaaattttggaattaaaaatttagaaagatgttttaaagatataaaagatcaaaatatcgaaaaaataactcatatttgttgcggctatcctgataaattagatgtaattgattatccaaaagctcctttagactcatatagtaaaattagtaaagagctagatgattcaattatagatacagtttctattgaagatgctcataggtataacgaccttaagtttttaaaagattttaaaaatacaaaagttatttttggattaataaaaat

SEQ ID NO: 226352 - DNA, 829 bp, Unknown
  Bacterial polypeptide expressing nucleotide sequence isolated from the Sargasso Sea
agaagttcgcagggagaattacatcttttaccaatgtcgtagaattaagggcatagattttaatactgttacaaacacaagtgtcaggtccggggcataccaagctgatttgcctacaattacaggccctgtaactcttgaaaaaactatgttagggagagactatatcaccgcacagaaattctgttcaaaccctgtgaagataactatacctggcccaatgacaattatagattccattgctgatgattattataacaatgataagaaacttggattagatcttgccaatgctctaaatactgaaatattaaatttggttgaagcaggctgccaaaacattcaggttgatgagccagtttttgctcgaaaacccgaaaaagcattagagtacggaatcgaaaatcttgagagatgttttgatggtgtacctgaaaatgtaactaaaatatctcacatgtgctgcggttatcctaatgctttggattctgaaaactatcttaaagcaaagccttctgcatattttaaaattgcagaagctctagatgagtctattctggatgcaatttcaattgaagatgcacatcgaccaaatgatcttaagctgcttgaaatctttaaagagacatcaataattttggggtttattgatgttgcaaaaagcaaattggaagaagttgatcaaataagagaaagaattcaacaatgtctaaaccatattgatcatcaccgattaattgctgctccagattgtggcctcggtttattaaacagacagcttgctattgacaaaatgaaaaacctttgtattgctgctcattcgatttaa

SEQ ID NO: 226353 - DNA, 586 bp, Unknown
  Bacterial polypeptide expressing nucleotide sequence isolated from the Sargasso Sea
catgttaacaactgttattggagcttaccctaaaccaaattatttaaaaattactgattggtttaatgcatcaggaggtactgatactcaatttcctactaaatattataatgatgagattaaacaaatgggcaatgaagctgaaaaattatttcttcgcgctacgaaagaaattattcatgatcaagaaaagtgtgatgttgatataataacagatggtgaagttcgtagagaaaattatattcattatcactgtagacatttggcaggtatagattttaataatcttacagaaaaagttgcaagaacaggaaattataaatgttggcttccaacaataacaaataaaatatctgcaaaagatcctttcttagttgatgattggaaaaataatcaaaacctgtcaaaaaaaccagttaaagttactattcctgggccaatgacaattacggacactattgctaacacattttataaatcggatgaagaactgggttatgatttagctattgctattaataaagagattaaaagattagtagaagctggatgtaaatttattcaagttgatgaaccattattttgc

SEQ ID NO: 226354 - DNA, 799 bp, Unknown
  Bacterial polypeptide expressing nucleotide sequence isolated from the Sargasso Sea
atgggtgatagagttgaagaactgttcaatagagcaactaaagaaataattagtgatcaggaagaatgtggtatagatattttaactgatggtgaagttagaagagaaaattatatccattatcattgtagatatcttgaaggtatagattttgataatcttaccgaaaaagttgcaaggactggcaattacaaatgttggctaccaaccataactggaaaggttagagccacaggttcttttttagttgaagagtggaaaaataatcaaaaaattacctcaaaaccaataaaaattacaattccaggacctatgactataacagatactatagcaaatacattttataattcagatcaagagatgggtgaggatctagctgatgcaataaatgtagaaataaaaagattagttgatgctggatgcaaatatatacaagtagatgaaccattgtttgcaagaaaaccagaaaatgctctaaattttggaattaaaaatttagagagatgttttaaaaatattgaagatcaaaatattgagaaaataactcacatttgttgtggttatcctgatagattagatgcaattgattatccaaaagcacctttagattcttatagtaaaattagtagagaactagatgactcaattatagatacggtttctattgaagatgctcatcgttataacaacctagaatttttaaaagattttaaaaatacaaaaattatttttggattaataaaaattgcaagttctcaaatagaaagtaaagaagaaattgttacaagaataaaag

SEQ ID NO: 226355 - DNA, 815 bp, Unknown
  Bacterial polypeptide expressing nucleotide sequence isolated from the Sargasso Sea
ttatattcactatcattgtagatatttagaaggaattgattttacaaatctcactgaaaaagttgctaggactgggaattataaatgctggttaccaacaataacttcaaaggttagagcaaaagaatctttcttagttgaagagtggaaaaaaaatcagagcttaactaataaggatttgaaaattactattcctggaccaatgactataacagacaccatagcaaatacattttatgattcagatgaacgtatgggtgaagacttagctaatgccattaatgtagaaattaaaagactagttgatgcaggatgtaaatatattcaagtcgatgaaccgttgtttgcgagaaaacctgagaatgctataaaatttggaatcaaaaatttagagagatgctttaagaatataaataatcaaagtattgaaaaaatcactcatatttgttgtggttatcctgataaattagatgcagtggattatccaaaagcacccctagactcttacggtaaaattagtaaagctttagataactcaattatagatacagtttctattgaagatgctcatcggtataatgatttaaattttttaaaagattttaatcaaactaaagttatttttggtttaataaaaattgcaagctctcaagttgagactaaagaagaaattgtctcaagaataaatgatgcattaaagtttattgataaggaacaattaattgttgctcctgattgtggccttggtcacttacctcgagatttggcaaaaataaaattaaagataatggtagaagcttctaatagtttctagt

SEQ ID NO: 226356 - DNA, 788 bp, Unknown
  Bacterial polypeptide expressing nucleotide sequence isolated from the Sargasso Sea
taatgtttttgattttaaaaatcttgagcgtagggtcttcagggatggcgcatatgactcacatctaccagctattagaaaaaaaatagagcataccaatgtgggctatgcggcctttgattacataagcagccaaaaagtttctccagttcccataaaatttacgctaccgggaccacttactataatggatacaacggctgactgttattatgatgaccgcccaaaactcaatagagacctggccgatacaatcaacaaagaaattttgaggttagtggacgcaggttgccgatatattcaggttgatgagcccctttttgcccgtcaagttgatgatgcgtcctcctttggtatggaaggtattgagagatgttttcacggtgtgccaaaagatgttaaaaagataatgcacatgtgttgcggttacccggatcatttggatgacaaagattacaagaaggctgacccagacagttaccatcagttagctagagaggttgatgatttgaatattgatgaggtatcaattgaggacgctcattgccaaaacaatctcaatttattggaaaaatttgagaaaaaatcagtcatctttggagcagttgcaatcgcttcaagccgaattgaaacagaggatgaaatcataaacagaattaattcggctcttaatcatatcgatagaaatagactagtcattgctcctgattgtggtctcggattactcactccagatttagcagaagcaaaattacgtgtgatgtgctctgccgttaaaaaaatataaa

SEQ ID NO: 226357 - DNA, 730 bp, Unknown
  Bacterial polypeptide expressing nucleotide sequence isolated from the Sargasso Sea
aatgttggctgccacaataactggaagggttagagctaatgcatcttttttagttgatgaatggaaaaataatcaacaacttacttcaaaacatctcaagattacaattcctggacctatgactataacagacaccatcgctaatacttattacaagtctgatgaagaaatgggagtagatttagcagatgcaataaatgttgaaattaagagactggttgatgctggttgcaagtacatacaagttgatgaaccattgtttgcaagaaaaccagagaatgctctaaattttggaattaaaaatttagaaaggtgttttaaagatataaataataaaaatgttgaaaaaataactcacatttgttgcggttatccagataagttagacgcaattaattatccgaaggcacctctaaattcttatagtaaaattagtaaagagctagataaatcaattattgatacagtttctattgaagatgcacatagatataataaccttgaatttttaaaagattttaacaatacaaaagttatttttggattaataaaaattgcaagttctcaaatagaaactaaagaggaaatagttagcagaataaaagaagtaattaaatttatagataagaaacaactaatagtagctcctgattgtggattaggacatttgccaagagatttagcaaagaataagcttaaaattatggttgaagctgcaaaaagtttttaa

SEQ ID NO: 226358 - DNA, 772 bp, Unknown
  Bacterial polypeptide expressing nucleotide sequence isolated from the Sargasso Sea
tgtagataccttaatggttttgattttaaaaatcttgagcgtagggtcttcagggatggcgcatatgactcacacctgccagccattaggaaaaaaatagagcataccaatgtgggctatgcagctttcgattacataagtagccaaaaagtgtctcctgttcctataaaatttacgcttccggggccacttactattatggatacaacggctgactgttattatgaggaccgcccaaaactcaatagagacctagccgatacaatcaacaaagaaattttgaggttagtggatgcaggttgccgatatattcaggttgatgagcccctttttgctcgtcaagttgatgatgcgtcctcctttggtatggaaggtattgagagatgttttcacggtgtaccaaaagaagttaaaaagataatgcacatgtgttgcggttacccggatcatttggatgacgaagattacaagaaggctgacccaggcagttaccatcaattagctagagaggttgatgatttgaatattgatgaggtatcaattgaggacgctcattgccaaaatgatctcaatttgttggaaaggtttgagaaaaaatcagtcatctttggagcagttgcaatcgcttcaagccgaattgaaacagaagatgaaatcataaacagaattaattcggcgcttaatcatatcgatagaaatagactagtcattgctcctgattgtggtctcggattactaaccccagatttagcagtgacaaaattaagcgtga

SEQ ID NO: 226359 - DNA, 531 bp, Unknown
  Bacterial polypeptide expressing nucleotide sequence isolated from the Sargasso Sea
aaatcaaaagattagttgacgctggatgtaaatatatacaagttgatgaacctctttttgcacgaaaaccagacaatgctcttaaatttggggttagtaatcttgaaaaatgttttgaaggaattaatgttagtgatattgaaaaaatcactcacatttgctgcggctatcctgataaaattgatgcaattgaatatccaaaagcaccattagactcatataagaaaattgcaaaagcattagataattcaattattgatagcgtctcaattgaagatgcgcaccgttataataatttgagcttactatctgattttgaacagacaaaagtaatttttggtgttatcaaaattgctagttcttcaattgaaactgaagaagaaattgaaaatagaattaatgaagctcttaaatatatttcaaaagaacaacttattttggctccagattgtgggcttggacatttgtctagagaacttgcaattcaaaaactaaagataatgtcttcagtggcaagaaaatttaattaat

SEQ ID NO: 226360 - DNA, 905 bp, Unknown
  Bacterial polypeptide expressing nucleotide sequence isolated from the Sargasso Sea
tactgcgaagaataccgcagtattttatgaagatataaagattaatatattggatacccctggccacgcagacttcggcggcgaggtagagaggagcttaaatcttgttgatggtgctttgcttcttgttgatgcgagcgagggccctcttcctcaaacaaggtttgtactcaaaaaagcattagagaaggatctaccaatcatattagttatcaataaaattgatcgttctgatgctagaattactgaggtggttaatgaggtttatgatctttttattgatcttgatgcatccgaagatcaaatagaatttcctattatttatacaaatgcaaagcttggtgttgctcatatagaacttgaaagcgattcatcagatcttactcctttatttaaaacaatactaagtactgttgagggtccaaaggctgatgataaccacgtaccacagtttctcataaccagtctggactatgactcttacgttgggcagattgcggtgggtagattaaataatggtaagttaaacatgaacgggtcttattcactctgtaaggtagatgaggtcaggcctaaccaaaaattttctgcgctatatacctttcaaggattaaaaaaggttcctgtagatgaggtagagtctggagatatcattgcatttgctggcgttgatgatatttcaataggagatactatgtcagataatgaatcaccagatccattgccacgaattcaggttgatgagccaacagtttccatgctgttttatgtaaatgatagtccttttgctggacaggatggaaagtttctaactacaaggcatatctcagagagattaaatagagaaacactaagcaacgtatctctgcaggtcactgctacggagagaccaaaatgtatttgag

SEQ ID NO: 226361 - DNA, 535 bp, Unknown
  Bacterial polypeptide expressing nucleotide sequence isolated from the Sargasso Sea
aatgaccattacggactcaattgcagatgatttttacaatgatgataagaaattgggagccgatttagggaatgcgctgaatcaggaaatactctctttagttgaggctggttgccagtacattcaggtagatgaacctgtctttgccagaaaacctgagaaggcccttgaatacggggtggaaaatctggaaaggtgttttgctggtgttccggatcatgttacacgggcaatgcatgcttgttgtgggtatcccaatgctcttgatactgataattattataaagctcctccacaatcctattttgatatagctgaagcgattgaccaatcttcgattaatgcaatatcaatcgaagatgctcatcgtcccaatgattcgaaattactggaactatttcaaaataccaccgttatgatgggacttgttgatgtagcaaaaagtaaacttgaagaagttgatcagataaaacaaaggattaaactttgtttagaacatatagaccgagaacgctttattgctgcccctgattgc

SEQ ID NO: 226362 - DNA, 623 bp, Unknown
  Bacterial polypeptide expressing nucleotide sequence isolated from the Sargasso Sea
aatacctggccccatgacaatcactgattccattgcagacgattactataacaatgataagaaacttggaatagatcttgggaatgctttaaattctgaaatattgaatttagttgaggcaggttgcaaaaatattcaggttgatgagccagtttttgcccgaaaaccagaaaaagcgttagagtacggaattgaaaatcttgaaagatgttttgctggtgtccctggaaatgtcaccaaaatagctcatatgtgctgtggttacccgaatgctttagattcgcagaactatcttaaagcatcaccttctgcctattttaatattgctgaagctttagatgaatctgacctggatgcaatttcaattgaagatgcacatcgccccaatgatctaaagctgcttgaaatttttaaaaagacatctgtcattatgggcttaattgatgtggcaaaaagcaaattggaagaggtttatcaaataacagaaagaattcaagagtgtctgaaccatatagaccctcaccgattaattgctgctccagactgtggcctcgggttattgaacagaaaactcgctataaataagatgaaaaatctttgcaaagcagcacattcaatttaat

SEQ ID NO: 226363 - DNA, 682 bp, Unknown
  Bacterial polypeptide expressing nucleotide sequence isolated from the Sargasso Sea
atggcgaataaacccctgataactacagtgatcggatcatttcctaaaccttcttatcttcctattgaagactggtttgatggtgccagaaatgatggaggaatgaataccgaacgtgtaacaaaggaatttactcagtatatagaaaaaaagtctgaaagcgatgaacatttatttgttagagctgcaaaggaagttataaatttgcagatagatgcagggatagatatcccaactgatggagaagtcagaagagaaaactatatccactatcactgcagatatttagaaggttttgattttaaaaatctggagcaccgtgtcttaagagatggcgcatatgaaacaaatcttccagcagttcgtaataaaatcaaacataatggttccagctactccgttcatgactttaaaagcagccaaagtgtatcttcagcaccagttaaatttacacttccgggaccacttacgattatggatacaacagcagattgtttctatgacgacagaccaaagctcaatcgcgatttagctgaaacggtaaataaggaaattttgtcattagttgacgctggatgcaaatatatccaggttgatgaacctctttttgcacgccaagttgatgatgcctcatcttttggcatggaaggtatagagcgttgtttccacggcgtcccaaaag

SEQ ID NO: 226364 - DNA, 591 bp, Unknown
  Bacterial polypeptide expressing nucleotide sequence isolated from the Sargasso Sea
atacatattacaaatcagatgaagaacttgggtatgatttagcaattgctattaatacagagattaaaagattagtagatgcgggatgtaaatatattcaagttgatgaaccattatttgcaagaaaacctgcaaatgctctagcttttggaatacagaatttagaaaaatgttttgaaggaataaatcaaaatgatgtagaaaaaataacacatatctgctgcggatacccggataaaattgatgtagttgattatcctaaagcacctttagattcatataaaaaaatcgctatgcagcttgataattcaataattgatagtgtatctattgaagatgctcaccgctataatgatttaacattacttaaagattataaacagacaaaagtaatttttggacttatcaagatagctagttctaaaattgaaactgttgaagaaatagaagaaagaatatttgaggcgcttaaaaatatttctaaagatcaattaattgctgcccctgattgtggtcttggacatttaagtagagatttagcaataaaaaaactaaaaataatgtctcaagctgttaaaaagtttaactaat

SEQ ID NO: 226365 - DNA, 862 bp, Unknown
  Bacterial polypeptide expressing nucleotide sequence isolated from the Sargasso Sea
atgaagaaagccggtgaaagtgcagaatcagactttcttaatgctattcaagaagtagtggatgatcaggtacaagctggaattgatatacccacagatggagaagttcgaagggagaattacattttttaccaatgtcgcagaattaaaggcatagattttaatactgttacaaatacaagtgtcaggtccggagcataccaagctgatttacctacaattacaggccctgtagctctcgcaaaaactatgttagggagagactatagcaccgcacagaaattttgttcaaaccctgtgaagataactatacctggcccaatgacaataatagattccattgcagacgcttattataacaacgataagaaactggggttagatcttgctaatgctctaaatactgaaatattaaatttagttgaagcaggttgccaaaacattcaggttgatgagccagtttttgctcgaaaaccagaaaaagcattagagtacggaattgaaaatcttgagagatgttttgctggtgtacctgaaaatgttactaaaatatctcacatgtgctgcggttatcctaatgctttggattctgaaaactatcttaaagcaaagccttctgcctattttaaaattgccgaagctttagatgaatccattttagatgcaatttcaattgaagatgcacatagaccaaatgatcttaagctgcttgaaatatttaaaaagacatcaatcattttaggttttattgatgttgcaaaaagcaaattggaagaagttgatcaaattagaaaaagaattcaacaatgtcttaaccatattgatcgtcacagattaattgctgctcctgactgtggactcg

SEQ ID NO: 226366 - DNA, 661 bp, Unknown
  Bacterial polypeptide expressing nucleotide sequence isolated from the Sargasso Sea
ccgcacaaaaattcttgttcaaaccccggtgaagataactatacctggcccaatgacaattatagattccattgctgatgattattataacaatgataagaaacttggattagatcttgccagtgctataaatactgaaatattaaatttggttgaagcaggctgccaaaacattcaggttgatgagccagtttttgctcgaaaaccagaaaaagcattagagtacggaatcgaaaatcttgagagatgttttgacggtgtacctgaaaatgtaactaaaatatctcacatgtgctgcggttatcctaatgctttagattctgaaaattatctaaaagcaaagccttctgcatattttaaaattgcagaagctttagatgagtctattctggatgcaatttcaattgaagatgcacatcgaccaaatgatcttaagctacttgaaatctttaaagaaacatcaatcattttggggtttattgatgttgcaaaaagcaaattggaagaagttgatcaaataagagaaagaattcaacaatgtctaaaccatattgatcatcaccgattaattgctgctccagattgtggcctgggtttattaaacagacaacttgctattgacaaaatgaaaaacctttgtattgctgctcattcgatttaa

SEQ ID NO: 226367 - DNA, 840 bp, Unknown
  Bacterial polypeptide expressing nucleotide sequence isolated from the Sargasso Sea
catggttgcgggatcgcgttccgcggcgatttcgaggagagaatgaagaaggtcctcaaggagattaaaaaccgcggggacatcatcctgttcattgacgagatccacacccttgttggcgccggtgccgccgaaggggcaatcgacgctgccagcatgctcaagccgatgctggctcgcggcgagctgcagactatcggtgcgacaaccctcgacgagtaccgtaagtacatcgagaaggacgccgccctggagcgtcgcttccagccgatccaggtagacgagccctcgatccccctggccatcgagatccttaagggtctgcgcgaccgatacgaggcccaccacaagatcaccatcaccgacgaggcgatcacctccgcggcgaatcttgcgtcccgttacatccaagaccgcttcctgccggacaaggccatcgatctcattgacgaggccggtgcccggatgaacatccgccgtatgacggctccgccggatctgcgcgagttcgacgagcggatcgctcgtgtgcgagtggagaaagaggccgccatcgacgcccaggattttgagcgtgctgctgggttgcgcgacgacgagaagaaacttctcgctgaacgtgaggccaaggaggaggagtggaagcagggtgacgagtcggtgccagccgtggtcggccccgacgagatcgccgaggtgctctctggagctaccggcattccggtcttcaagctcacggaggaggaatcccagcgtctgctccacatggaggatgagatcggcaagcgctacgtcggccaggaggacgccgtcaaggccctgtgccgctctatccgacgc

SEQ ID NO: 226368 - DNA, 673 bp, Unknown
  Bacterial polypeptide expressing nucleotide sequence isolated from the Sargasso Sea
atgttaacaacagttattggatcttaccccaaaccaagttatttaaaaattactgattggtttaatgcaacaggggggacagacactcaatttcctacgaagtattatagtaatgagattaaacaaatgggtaatgaagctgaagaattatttattcgtgctactaaagaaattattcatgatcaagaagagtgtggaattgatataattacagatggtgaagttcgtagagaaaattatattcattatcactgtagacatttagaaggtatagattttaatcatcttactgaaaaagttgcaagaacagggaattataaatgttggctgccaacaataacaaacaaaatatcagcagcagatcctttcttagtagatgaatggaaaagtaatcagactctaacagataaaccaataaaaattacaattcctggacctatgacaattacggatactattgctaatacatattacaaatcagatgaagaactcgggaatgatttagcaattgctattaatacagagattaaaagattagtagatgcgggatgtaaatatattcaagttgatgaaccattatttgcacgaaaacctgcaaatgctctagcctttgggatacagaatttagaaaaatgttttgagggaataaatcaaaatgatgtagaaaaaataa

SEQ ID NO: 226369 - DNA, 607 bp, Unknown
  Bacterial polypeptide expressing nucleotide sequence isolated from the Sargasso Sea
aatgaaacaaagttcaatagtaacaacagttataggttcatttcctaagcctaagtatttgccaattgaagattggtttgatgctacaagaaaaaaccaaggaatgaatacttcaaatattactcgtctatatactgattatagtaaaaatcaaaatcctaatgatgaaaaattatttataaaagcagcaaaagagataatcaatttgcagttaaatgcaggaattatgattccaacagatggagaagttcgacgcgaaaattatattcattatcattgcagatatttagatggtttcgattttgataatttagaatttcaagtttggagagatggtgcatatgaatcctatttgcctgctattcgcaataaaatttttcataatcggaatagttattcagtgcatgatttcaaagctagtcaaaatgtttcacctgtgcctattaaatttacactaccaggtccattgactataatggatacagctgttgattgttgttattttaatcgaccaaaattaaattatgatcttgctgagactgtaaataaagaaattttagcgttggttgattctggctgttcttttatacaagtcgatgaaccactt

SEQ ID NO: 226370 - DNA, 670 bp, Unknown
  Bacterial polypeptide expressing nucleotide sequence isolated from the Sargasso Sea
aatgggtaatgaagctgaagaattatttattcgtgctactaaagaaataattcatgatcaagaagagtgtggcattgatataattacagatggtgaagttcgtagagaaaattatattcattatcactgtagacatttagaaggtatagattttaatcatcttactgaaaaagttgcaagaacagggaattataaatgttggctgccgacaataacaaacaaagtatcagcagcagatcctttcttagtagatgaatggaaaagtaatcagactctaacagataaaccattaaaaattacaattcctgggcctatgacaattacggatactattgctaatacatattacaaatcagatgaggaactcggtaatgatttagcaattgctattaatacagagataaaaagattagtagatgtgggatgtaaatatattcaagttgatgaaccattatttgcaagaaaacctgcaaatgctctagcctttgggatacagaatttagaaaaatgtttcgaaggaattaatcaaaatgatgtagaaaaaataacacatatctgctgcggatatccggataaaattgatgcagttgattatcctaaagcacctctagattcatataaaaaaattgctatgcagcttgataattcaataattgatagtgtatctatt

SEQ ID NO: 226371 - DNA, 932 bp, Unknown
  Bacterial polypeptide expressing nucleotide sequence isolated from the Sargasso Sea
gacttacaaactagacggaattaaaatgccactcccgctcctaacgacaacaattggttcatttcccaagcccaaatacacacccataagagattggtttgatatctctcgggaaaaaggtggtatgaattgcgcacaaacaacccgaaattatgcagcagacctttcaaaaaataaggaaaaaaacgaggaattatttgtaaaagctgcaaaagaagtgatcgatatccaaataagagccggtattgatattccgacagatggagaagtccgacgagaaaactacattcactaccattgtagacacttgtcaggatttgatttcagtaaacttgaacatcgaattttgcgagatggcgcttatgagacagacctgcctgccataagaaacgatatatcacatagtggagctgcctattcagtgagtgactttacaacagctcaaaagctgtcaccgaagcccctaaagttcacattgcctggtccactgacgattatggacacaactgcagattgtttttatgacgacagaccaaggctcaataaggttttggcagagacaatcaataaggaaattcttgctctggtagacgcgggttgcgagcatattcaggtagacgaaccactttttgcaagacaggtaaatgatgctttatcatttggttttgaagggatcgatagatgttttcataaagttccaaattcagtaaaacgcatagtgcatatgtgttgtggatatcctgatcatttagacgattcagaatacaagaaggccgaccctcagagctatattgatcttagttcgatgatagatgacgctgagtttgatcaaatttcaattgaagacaaacactgctgcaatgatcttgaccttctcgaaaaatttaaaaagaagacagtgattttggaagtatgccatcgcgtcaagtaag

SEQ ID NO: 226372 - DNA, 691 bp, Unknown
  Bacterial polypeptide expressing nucleotide sequence isolated from the Sargasso Sea
agaagttcgaagggagaattacattttttaccaatgtcgcagaattaaaggcatagattttaatactgttacaaatacaagtgtcaggtccggagcataccaagctgatttacctacaattacaggccctgtagctctcgcaaaaactatgttagggagagactatagcaccgcacagaaattttgttcaaaccctgtgaagataactatacctggcccaatgacaataatagattccattgcagacgcttattataacaacgataagaaactggggttagatcttgctaatgctctaaatactgaaatattaaatttagttgaagcaggttgccaaaacattcaggttgatgagccagtttttgctcgaaaaccagaaaaagcattagagtacggaattgaaaatcttgagagatgttttgctggtgtacctgaaaatgttactaaaatatctcacatgtgctgcggttatcctaatgctttggattctgaaaactatcttaaagcaaagccttctgcctattttaaaattgccgaagctttagatgaatccattttagatgcaatttcaattgaagatgcacatagaccaaatgatcttaagctgcttgaaatatttaaaaagacatcaatcattttaggttttattgatgttgcaaaaagcaaattggaagaagttgatcaaatttag

SEQ ID NO: 226373 - DNA, 724 bp, Unknown
  Bacterial polypeptide expressing nucleotide sequence isolated from the Sargasso Sea
ctgccagctattagaaaaaaaatagagcacaccaatgtgggctatgcggcccttgattacataagtagtcaaaaagtttctccagttcccataaaatttaccctgccgggaccacttactattatggatacaacagccgactgttattacgatgaccgcccaaaactcaatagagacctcgccgatacaatcaacaaagaaattttgaggttagtggacgcaggttgccgatatattcaagttgatgagcccctttttgctcgtcaagttgatgatgcgtcctcctttggtatggaaggtattgagagatgttttcacggtgtaccaagagatattaaaaaaattatgcatatgtgttgtggttatccagatcatttggatgacgaagattacaagaaggctgatcctggtagttaccatcagttagctagtgaggttgatgcgttaaacatcgatgaggtatcaattgaggacgctcattgccaaaacaatctcgatctattggaaaagtttaaaaaaaaatctgttatctttggagcagttgcgatcgcttcaagccgaattgaaacagaggatgaaatcataagtagaattaattcggcgcttaatcatatcgatagaaatagactagtcattgcacccgattgtggtctcggattactaactccagatttagcagtggcaaaattaagcgtgatgtgctctgcggttaaaaaaatttaaa

SEQ ID NO: 226374 - DNA, 391 bp, Unknown
  Bacterial polypeptide expressing nucleotide sequence isolated from the Sargasso Sea
accaatgtgggctatgcagctttcgattacattagtagccaaaaagtttctcctgttcttataaaatttacgcttccggggccacttactattatggatacaacggctgactgttattatgagaaccgcccaaaactcaatagagacctagccgatacaatcaacaaagaaattttgaggttagtggacgcaggttgccgatatattcaggttgatgagcccctttttgctcgtcaagttgacgatgcatcctcctttggtatggaaggtattgagagatgttttcacggtgtgccaaaagacgttaaaaagataatgcacatgtgttgcggttacccggatcatttggatgacaaagattacaagaaggctgacccagacagttactatc

SEQ ID NO: 226375 - DNA, 628 bp, Unknown
  Bacterial polypeptide expressing nucleotide sequence isolated from the Sargasso Sea
aatgttaacaacagttatcggtgcttatcctaaaccagactatctaaaaattacagactggtttaatgctaaaggaggtactgatactgctaacccaacaaagttttatgagaacgaaataaaaaaaatggggagtaatgctgagctaatttttaataaagcagctaaggaagttattagggatcaattagattgcggaattgatattattactgatggagaaatcagaagagaaaattatattcattatcactgtagacatttaaatggagttgattttaatacacttacagaaaaggttgcaagaacaggaaattataaatgttggttaccaactataacaaataaaatatctgcagcagatccttttttagtggatgaatggaagaataatcaaagtctatctaacaaaccagttaaagttaccattcctggacccatgacaattacggacacaattgctaatacatattacaaatcagatgaagaaatgggctatgatttagcaattgctattaacacagaaattaaaagattagttgatgctggatgtaaatatatccaagttgatgaacctttatttgcaagaaaacctgataatgctctagcttttggaataaaaatttag

SEQ ID NO: 226376 - DNA, 685 bp, Unknown
  Bacterial polypeptide expressing nucleotide sequence isolated from the Sargasso Sea
tttttagttgaggaatggaggagtaatcaaaaacttactacaaaacatcttaaaattacaattcctggtcctatgaccataacagatactattgctaatactttctataaatcagatgaggaaatgggggaggacttagcagatgcaataaatattgaaattaagagattagttgatgttgggtgtaaatatatacaagttgatgaaccattgtttgctagaaaaccagaaaatgcattaaattttggtattaaaaatttagagagatgttttagagatataattgatgacagtgtagaaaaaataactcatatttgctgcggatacccagataaactagatgcaattaattacccaaaagcacctttagactcttataacaaaattagtaaagagttagataactctattatagatacagtttctattgaagatgctcataggtataacaatcttcagtttttaaaagattttaaaaatacaaaaattatttttggattaataaaaattgcaagctcggaaatagaaacggaagaggaaatagtcgcaagaataaaagatgctctagagtttattgacaaagaacaactaattgtagctccggattgtggattaggacatttaccaagagatttagcaaaaactaaactaaagattatggttaatgctgcaaataatttctaat

SEQ ID NO: 226377 - DNA, 842 bp, Unknown
  Bacterial polypeptide expressing nucleotide sequence isolated from the Sargasso Sea
aatgggtaatgaagctgaagaattatttattcgtgctactaaagaaataattcatgatcaagaagagtgtggcattgatataattacagatggtgaagttcgtagagaaaattatattcattatcactgtagacatttagaaggtatagattttaatcatcttactgaaaaagttgcaagaacagggaattataaatgttggctgccgacaataacaaacaaagtatcagcagcagatcctttcttagtagatgaatggaaaagtaatcagactctaacagataaaccattaaaaattacaattcctgggcctatgacaattacggatactattgctaatacatattacaaatcagatgaggaactcggtaatgatttagcaattgctattaatacagagataaaaagattagtagatgtgggatgtaaatatattcaagttgatgaaccattatttgcaagaaaacctgcaaatgctctagcctttgggatacagaatttagaaaaatgtttcgaaggaattaatcaaaatgatgtagaaaaaataacacatatctgctgcggatatccggataaaattgatgcagttgattatcctaaagcacctctagattcatataaaaaaattgctatgcagcttgataattcaataattgatagtgtatctattgaagatgcgcaccgctataatgatttaacattacttaaggattataaaaagacaaaagtaatttttggacttatcaagatagctagttctaaaattgaaactgttgaagaaattgaaggaagaatagttgaggcgcttaaaaatatttctaaagatcaattaattgctgccc

SEQ ID NO: 226378 - DNA, 807 bp, Unknown
  Bacterial polypeptide expressing nucleotide sequence isolated from the Sargasso Sea
attgggagctgatgctaaatcaatttttgaaaaagcagctaaagaagttattagagatcaattagattgtgggatagatattattactgatggagaaatcaaaagagaaaattatattcattatcattgcaggcatttaaatggagttgattttaatacacttacagaaaaagtagcaagaacaggaaattataagtgttggttacctactataactaataaaatatcagctacagatccattcttagtagatgaatggaaaagtaatcaaagtctttccaacaaaccagttaaagttaccattcctggacctatgacaattacagacactatttcaaatatgcattacacatcagatgaagaaatgggctacgatttagctattgctattaatacagaaattaaaagattagtagatgcaggatgtaaatatattcaagttgatgaacctttatttgctagaaagcctgataatgctttagcttttggaataaaaaatttagaaaaatgttttgaagaaataaaccaaagtgatgttgaaaaaataacacatatttgttgtggttatccagataaaatagatgctgaaaattatcctaaagcaccattagattcttatacaaaaattgctaaagctcttgataattccaaaattgatagtgtatctattgaagacgcacatcgatataatgatttatcattgctaaaaaattataaaaatacaaaaataatttttggggttattaaaattgctagttctaaaattgaaacagttgaagaaatagaaagtagaataaaagaaacatt

SEQ ID NO: 226379 - DNA, 680 bp, Unknown
  Bacterial polypeptide expressing nucleotide sequence isolated from the Sargasso Sea
tattcccacagatggagaggtgcgcagggaaaattacatctattaccagtgtcgcagaattacaggcatcgattttcatactgtgacgcacaagagcgtaaggtctggtgcgtttcaggctgatttgcccacaattactggccctgtatctcttagtaaaccagtgttaggtcatgactatcgcacagcccagaaattctgctcaaatcctgtgaagatcacaatacctggcccaatgacaattactgattccatagcagatgattactacaacaatgataagaaactgggaatagatcttgggtatgccttaaatgctgaaattttgaatttagttgaggcaggttgcataaatattcaggttgatgagccagtttttgccagaaaaccggaaaaagcattagagtacggaattgaaaatcttgagagatgttttgctggtgtccctgaaaatgtcactaaaatagctcatatgtgctgcggttacccgaatgctttagattcagagaactaccttaaagcctcaccttctgcctattttagtattgctgaagctttagatgaatctgatctagacgcaatttcaattgaagatgcacatcgccccaatgatcttaagctgcttgaaatctttaaaaagacatcagtcattatgggcttaattgatgtggcaaaatagc

SEQ ID NO: 226380 - DNA, 1081 bp, Unknown
  Bacterial polypeptide expressing nucleotide sequence isolated from the Sargasso Sea
aatgccactaacgacaacaacaattggagctttccccaaacctaaatcaacaccagtacaagattggtttttaggctctaagtcagatgaagaaaaaaaagcatcaaaaggtttgctagctaattggtcaccaggagcatatgaaaaagcattagaagaagctggagaaaatgctgaaaagctttttttacaggcgattgaggaagttgttacagatcaagtaaatgccggcatagacgtgccaacagatggtgaagtaagaagagaaagttatgttttatatcaatgtcgttttttaaatggaattagttttaaagaagtcactcacaaatcagttcgacaaggtgcttttgaagcagatttgccaactattattggtcctatatcgagcaaagaggttaggttgcatcatgattggaaaagcgctcaacagtttacaaaaaaacctcttaagataacattacctggaccaatgactattacagattcaattgctaataattattatgatgatcttaaaaaattaggctttgattttgctatggcacttaataaagaagtcaaagctttagtagatgctggttgtcaatatatccaagtggatgaacctgtttttgcaagaaaaccagaacaagcaatagagtatggtatggaaaatttagagagaacaatgcatggtataccaaaagaagtgcaacgtgtgtgtcatatatgttgtggctatccaaattctctggattcagaaggatataaaaaagcagatcttgatgcttatgataggattgccgatcttgttgatcaatcttccatagatgaagtatctttagaagattctcatcgacacaatgatttatctttattggaaaaatttgagaaaacaaaagtcatttttggtgtaattgatattgcaagaagcagaatggaagacgttgaggaggttcgctctagaatactagatgctttaaatcatattgatgagaatcggttaatagcagccccagattgtggtttaggttttttttcacgagagcaagcaattgaaaaaatgtctattttgtctaaagcagcaaaatctatataa

SEQ ID NO: 226381 - DNA, 1048 bp, Unknown
  Bacterial polypeptide expressing nucleotide sequence isolated from the Sargasso Sea
tatgattttaacaactacaattggcgcctaccctaagccagatttcttaactttacctgattggttcaaagatgagaaaggaacagatgctgaatacccaacatcgaagtgggaacaggcaaaactaaaaatgggagaagaatatgaggtccaaataaaacttgcctcagagagtattattaaagatcaaattgagtgcgggattgatattattacagacggtgaagtgagacgagaaaattatattcattatcactgcaggcatctcggtgggatcgattttgaaaagttaacaaagaaaacagcgagaactggtaattatgattgttggcttccaacaatcacaaataaagttgaatttcttggatcgtttttaaataaagaatacgaaattaatcagtcaatatcaaaaaatcctattaaagttacaatacctggaccattgaccatcacagatacgattgctgatgaattttataatgatcataaaatgttaggagtagatttaggggaggcaataaataaagaaataaagtcattagtcaattctggctgtaaatatatacaagtagacgaacctttatttgcaagaaaatcaaaagaggccatcgaatttggaatagataatcttgaaagatgttttcatggagtcacagactgtgaaaagataactcatatatgttgtggatatccagataaaattgatgctgatgattatcctaaagcgccgttaataagttattttgaaattgcagatgccctagagaatagtctgattgataccatatctattgaagatgctcatagacacaatgatttaaaactacttgagttatataaatcaaaaaaaataatatttggattaataaaggttgcctcaagtgaagtggaagaaattgatgtgataagggatagattgctgtcctgtcttaaccatattgataaagagagacttatagcagctcctgattgtggtcttggatatttaagtagagatatggcaatgcttaaattaaaaaatctatcaaaggcagcaaaaagtatttaa

SEQ ID NO: 226382 - DNA, 580 bp, Unknown
  Bacterial polypeptide expressing nucleotide sequence isolated from the Sargasso Sea
ttttatgacgacagaccaaggctcaataaagttttggcagagacaatcaataaggaaattcttgctctagtagacgcaggttgcaagcatattcaggtagacgaaccactttttgcgagacaggtaaatgacgctttatcatttggttttgaagggatcgatagatgttttcataaagttccaaattcagtaaaacgcatagtgcatatgtgttgtggataccctgatcatttagacgattcagaatacaagaaggccgaccctcagagctatattgatcttagttcgatgatagatgacgctgagtttgatcaaatttcaattgaagacaaacactgctgcaatgatcttgaccttctcgaaaaatttaaaaagaaggcagtgatttttggaagtattgccatagcgtcaagtaagatcgaaactttagacgaattagttaatcgcctcaaacaagcgcttagccatatagatagagaacgattaatagttgcaccagactgtggattgggcctgctaccacccaacctggccgaggaaaaattaaaaataatgtgccaagcagcggccattgtgtagg

SEQ ID NO: 226383 - DNA, 838 bp, Unknown
  Bacterial polypeptide expressing nucleotide sequence isolated from the Sargasso Sea
atgttaacaactgttataggcgcctatccaaaaccaaactacttaaacataactgattggtttaatgcttcaggtggtacagatacagaatatcctactaaattttacgaagatgaaatcaaaaagatgggtgataatattgaagaattatttaataaagctaccaaagaaataattagtgatcaggaagaatgtggtattgatatcctcaccgatggtgaagttagaagagaaaattatattcactatcattgcagatatttagaaggaattgattttacaaatctcacagaaaaagttgctagaacaggaaattataaatgctggttaccaacaataacatcaaaagttaaagcaaaagaatcttttttagttgaagaatggaaaaaaaatcagagttttaccaataaggatttgaaaattactattcctggaccaatgacaataacagataccatagcaaatacattttatgattcagatgaacatatgggtgaagatttagctgatgccattaatgtagaaattaaaagactagttgatgcgggatgtaaatatattcaagtcgatgaaccgttgtttgcgagaaaacctgaaaatgccctgaaatttggaatcaaaaatttagagagatgttttaaggatataaacaatcaaagtattgaaaaaatcactcatatttgttgtggctatcctgataaattagatgcagtagattatccaaaagctcctttagattcttacagtaaaattagtaaagctctagatgaatcaattatagatacagtttctatagaagatgctcaccgatataatgatctagattttttaaaaaatt

SEQ ID NO: 226384 - DNA, 901 bp, Unknown
  Bacterial polypeptide expressing nucleotide sequence isolated from the Sargasso Sea
gcgctgtttcggcgtgcgactgaagaagtagtcaaggcgcaaatatcatgtgacattacaattcctacggatggtgagcaacgtcgggaaaattatgtacattaccaatgccgtaatatttccgggttcgattttgaaaatctggaacatcgaatcatgcgcaatggagcatatgaaacggatttgcctgctattcggggcaaaatcaaagctggtcagccggtgctgccgagagattaccttgaggcgcaggccgcttcggatcgccccgtcaaaatcactcttccaggcccattaaccatcatggataccacggcggattgccattataacgataggaataaactcgcccgggatctggctgatgcgcttaacgtggaagtattggagctggcacaggcaggatgccagcacattcaagttgatgagccgatctttgcccgaaaacctaaagacgctatgagttttggaattgaagccctagagcgagttttccacggcgtttcggataatgttgttcgcaccgcacatatgtgctgtggctatcctgaccgtattgacaaccccgattatcctaaggcagatcacatggtttatcatgatctggtggaagctttagatggcaagatagaagccttgtcaatcgaagactgccattgcaagaatgatcttgaattgttcgagaaattcaaaaaaacaacggcgattgtcggctttgtcgatatctctgtcagcaaaattgaagtcgttgacgaagttgtcgagcggatgaaatacgttctgcaggtcttgccacaggaacgtctgattgcagcgccagattgtggcctcggttttctcagaacccacctgtcaatggaaaaactcaccgtactatgcgatgcagcgaatcagatctagg

SEQ ID NO: 226385 - DNA, 1057 bp, Unknown
  Bacterial polypeptide expressing nucleotide sequence isolated from the Sargasso Sea
ctgaaagttcaggtgttttgggtggagaaaaagaagcacgaaataggattaattggtggtacttttgatagattccatgccggacacatgtccttgattgctgcaggtcttgcacattgcaagaacatccaagtctggataaccaatgatgagttagctaggtcgaaggatcgacgtatacgggactggtatgatagggagtccgatttgattgatgccacatccgaacactcctctcgaattacaactcatcaactcgatgacaaattcgggccatccttgcaatccactgaggcatcagcaattatatgcactgctgaaacaattcagggatgcctggaaatcaactctctcagggaaaaagaaggattttatcctctagatattatctccgttgagagggtcacttcttgggatggggagccaatttctagctcaagaatcagagatggccacatagacagggaggggatgccatggattcccgaacctttcagaacttcagacccaattatgactcccgaggtagagtcccaactcaaagaaccatttggcgaactaatcgaggggcccgaggaggatattaccgtggctgctttggaagccatctctaggatagtagaatctacaaaattttccggcccactaattgcagtcggagatgtcaccgtcctagcctttcagaattcaggaagaccagcagatatagcaatagtcgacggacaaaccaagcgcgaagaatgggagggctcgaatgaaattgacttcagtttgtatgataatcttctcgaatgtattagtccagcaggatctttatccagatcgctcctaaaatcatgtgaatcttcaatctcatcatggatggaaaacgaagagagcagcataatcagagtagtcggtgaagaggatctttctccgcttcttctacatccgatggcacccataggctctgtagttctttatggtcaaccagaaaggggcttagtcattaggtggtgtgacgaagaatcaaagattagatgcagaaatctcctcagaggtttttccacagactagt

SEQ ID NO: 226386 - DNA, 1051 bp, Unknown
  Bacterial polypeptide expressing nucleotide sequence isolated from the Sargasso Sea
atgttaacgactgttataggtgcctatccaaaaccaagttatttaagaataactgattggtttaatgcttctggtggtacagataccgaatacccaacaaaattttatgaagaagaaataaaaaaaatgggcgataatgttgaagagttatttaataaagctaccaaagaaataattagtgatcaggaagaatgcggtattgatatcctaaccgatggtgaagttagaagagaaaattatattcactatcattgtagatatttagaaggaattgattttgcaaatctcacagaaaaagttgctaggacagggaattataaatgctggttaccaacaataacttcaaaagttaaagcaaaagaatcttttttagttgaagagtggaaaaaaaatcagagcttaacgaataaagatttaaaaattactatacctggaccaatgactataacagacaccatagcaaatacattttatgattctgatgaacatatgggtgaagacttagctgatgctattaatgtagaaattaaaagattggttgatgcaggatgtaaatatattcaagtcgatgaaccgttgtttgctagaaaaccagaaaatgctcttaaatttggaatcaaaaacctagaaagatgttttaaggatcttaataatcaaagtatagaaaaaattactcatatttgttgcggctatcctgataaattagatgcagtagattatccaaaagcgcctttagattcttacagtaaaattagtaaagctttagatgagtcaattatagatacagtttctattgaagatgcgcatcgatataatgatttaaattttttaaaagattttaaacaaacaaaagttatttttggtttagtaaaaatagcaagctctcaagtagagtctaaagaagaaattgtctcgagaataaatgatgcattaaagtttattgataaggaacaattaattgttgctcctgattgtggccttggtcacttacctcgagatttggcaaaaataaaattaaagataatggtagaggcttctaatagtttttagt

SEQ ID NO: 226387 - DNA, 686 bp, Unknown
  Bacterial polypeptide expressing nucleotide sequence isolated from the Sargasso Sea
aatgaaaatcaaaaccacaaccatcggtgcttatcccaaaccttcatgcacacctattggggattggtttccagatgctgatgatgaagaagctaaaggagctgacaaggggcttttacaacgttggagcatcacagattatgaagaaaatattgagcaagctggtgatgaagcagaatcactttttcttcaagccatcagagaggtgattgaagatcaaactcaaactggaatcgatattcctactgatggagaggtgagaagagaaaattacatctattatcaatgccgccaaattgaagggattgatttcaaaacagtcacccataaaagtgttcgggctggagcatttgaggcagatcttccaacgattatcaaacctgtaagtcttctagcacccattttaggccgtgattataaaacggctcagcaattcaccaataacccggtgaaaattaccattccaggaccaatgaccattacggactcaattgcagatgatttttacaatgatgataagaaattgggggccgatttagggaatgcgctgaatcaggaaatactctctttagttgaggctggttgccagtacattcaggtagatgaacctgtctttgccagaaaacctgagaaggcccttgaatacggggtggaaaatcttgaaaggtgttttgctggtgttccgg

SEQ ID NO: 226388 - DNA, 1051 bp, Unknown
  Bacterial polypeptide expressing nucleotide sequence isolated from the Sargasso Sea
tatgttaactacagtaattggcgcttatcccaaaccatcttatatagaaattactgattggtttaatgctaaaggtggaactgatactgaacatccaactaaattttataataatgaaattaataaaatgggtgatagagttgaagaactgttcaataaagcaactaaagaaataattagtgatcaagaagaatgtggtatagatattttaactgatggtgaagttagaagagaaaattatattcattatcattgtagatatcttgaaggtatagattttgataatcttactgaaaaagttgcaaggactggtaattacaaatgttggcttccaaccataactgaaaagattaaagctaaaggctcttttttagttgaggagtggaaaaataatcaaaaacttacctcaaaaccaataaaaattacaattccaggacccatgactataacagatactatagcaaatacattttataattcagatcaagagatgggtgaggatctagctgatgcaataaatgtagaaataaaaagattagttgatgctggatgtaaatatatacaagttgatgaaccattgtttgcaagaaaaccagaaaatgctctaaatttcggaattaaaaatttagaaagatgttttaaaaatattgaagatcaaaatattgaaaaaataactcacatttgttgtggttaccctgataaattagatgcaattgattatccaaaagcacctttaaattcttatagtaaaattagtagagagctggatgagtcaattatagatacggtttctatcgaagatgctcatcgttacaacaacctagaatttttaaaagattttaaaaatacaaaaattatttttggattaataaaaattgcaagttctcaaatagaaagcaaagaagaaatagttacaagaataaaagatgctttacaatttattgataaggagcaattaattgtagctccagattgtggactaggtcatttaactagaggtttggcaaaaattaaattaaaaattatggttcaagctgctagaagtttctag

SEQ ID NO: 226389 - DNA, 499 bp, Unknown
  Bacterial polypeptide expressing nucleotide sequence isolated from the Sargasso Sea
tgccgatatattcaggttgatgaacctctttttgctcgtcaagttaatgacgcatcatcctttggtatggaaggtattgagagatgttttcacggtgtgccaaaagatgtgacaaagatcatgcatatgtgttgtggttatccagatcatttggatgacgaagattacaaaaaggctgacccaggcagttaccatcagttagctagagaggttgatgatttgaatattgatgaggtatcaattgaggacgctcattgccaaaataatctcaatttattggaaaaatttgagaaaaaatcagtcatctttggagcagttgcaatcgcttcaagccgaattgaaacagaggatgaaatcataaacagaattaattcggcgcttaatcatatcgatagaaatagactagtcattgctcctgattgtggtctcggcttactaactccagagttagcggtggcaaaattaagcatgatgtgctctgcggttaaaaaaatttaaa

SEQ ID NO: 226390 - DNA, 679 bp, Unknown
  Bacterial polypeptide expressing nucleotide sequence isolated from the Sargasso Sea
agttgatgaatggaacagtaaccaaaaacttacttcaaaacctctaaaaattacaattccaggtccaatgaccatagcagacactattgccaacacttactataaatctgatgaaaagatgggagaagatttagcggatgcaataaatattgaaattaaaagattagttgatgtcggatgtaagtatatacaagtagatgaaccgcttttcgcaagaaaaccagaaaatacattaaattttggtattaaaaacttagagagatgctttaaggatatcaatgacgacagtgtagaaaaaataacacatatttgctgcggatatcctgataaattagatgttattgattatccaaaagctcctttagattcttatagaaaagttagtgaggatttagataactctattatagatacagtttcaatcgaagatgctcacagatataatgatctaaattttttaaaaaattttaaaaatacaaaaattatttttggattaataaaaattgcaagttcagagatagaaactaaagaagaaatcatttcaagaataaaagatgtattacactttattgataaagaacaacttatagtagcaccagattgtggactaggacatttatctagagatttagcaaaaactaaactaaagattatggtagatgctgctaaaagtttctag

SEQ ID NO: 226391 - DNA, 794 bp, Unknown
  Bacterial polypeptide expressing nucleotide sequence isolated from the Sargasso Sea
catgttaacaacagttattggagcttatcctaaaccaaattatttaaaaattactgattggtttaatgcatcaggtgggacagacactcaatttcctacgaagttttataataatgagattaaacaaatgggtaatgaagctgaaaaattgtttattcgtgctactaaagaaataattcatgatcaagaagagtgtggcattgatataattacagatggtgaagttcgtagagaaaattatattcattatcactgtagacatttagaaggtatagattttaataatcttactgaaaaagttgcaagaacaggaaattataaatgttggctgccaacaataacgaacaaagtatcagcagcagatcctttcttagtagatgaatggaaaagtaatcagactctaacagataaaccattaaaaattacaattcctggacctatgacgattacggatactattgctaatacatattacaaatcagatgaggaactcggtaatgatttagcaattgctattaatatagagataaaaagattagtaaatgcgggctgtaaatatattcaagttgatgaaccattatttgcaagaaaaccagcaaatgctctagcctttggaatacaaaatttagaaaaatgtttcgagggaataaatcaaaatgatgtagaaaaaataactcatatctgctgcggatatcctgataaaattgatgcagttgattatcctaaagcacctttagattcatataaaaaaatcgctatgcagcttgataaattcataattgatagtgtatcta

SEQ ID NO: 226392 - DNA, 1051 bp, Unknown
  Bacterial polypeptide expressing nucleotide sequence isolated from the Sargasso Sea
tatgttaacaactgttataggcgcctatccaaaaccaagttacttaaaaataactgattggtttaatgcttctggtggtacagatactgaatatccaactaaattttatgaagatgaaataaaaaaaatgggcgataatgttgaagagttatttaataaagctaccaaagaaataattagtgatcaggaagaatgtgggattgatattctcaccgacggtgaagttagaagagaaaattatattcactatcattgtagatatttagaaggaattgattttgcaaatctcacagaaaaagttgctaggacagggaattataaatgctggttaccaacaataacttcaaaagttaaagcaaaagaatcttttctagttgatgagtggaaaaaaaatcagagtttaaccaataaggatttaaaaattactattcctggaccaatgactataactgataccatagcaaatatattttatgattcagatgaacatttgggtgaagacttggctgatgccattaatgtagaaattagaagattggttgatgcaggatgtaaatatattcaagtcgatgaaccattgtttgctagaaaaccagaaaatgctcttaattttggaattaaaaacctagaaagatgttttaagaatattaataatcaaagtattgaaaaaattactcatatttgttgtggctatcctgataaattagatgcagtagattatccaaaagcgcctttagattcttacagtaaaattagtaaagctttagatgaatcaattatagatacagtttctatagaagatgctcatcgatataatgatttaaattttttaaaagattttaaacaaacaaaagtgatttttggtttggtaaaaatagcaagctctaaagttgagactaaagaagaaattgtctcaagaataaatgatgcattagggtttattgataaggaacaattaattgttgcccctgattgcggccttggtcacttacctcgagatttggcaaaaataaaattaaatataatggtagaagcttctaatagtttttag

SEQ ID NO: 226393 - DNA, 737 bp, Unknown
  Bacterial polypeptide expressing nucleotide sequence isolated from the Sargasso Sea
agcttttgaagcagatcttccaacgattatcaaacctgtaagtcttcgagcacccattttaggccgtgattataaaacggctcagcaattcaccaaaaacccggtgaaaattaccattccaggtccaatgaccattacagactcaattgcagatgaattttacaatgatgataagaaattgggagccgatttagggaatgcgctgaatcaggaaatactcactttagttgaggctggttgccagttcattcaggtagatgaacctgtctttgccagaaaacctgagaaggcccttgaatacggggtggaaaatcttgaaaggtgttttgctggtgttccggatcatgttacacgggcaatgcatgcttgttgtgggtatcccaatgctcttgatactgataattattataaagctcctccacaatcctattttgacatagctgtggcgattgaccaatcttcgattaatgcaatatcaattgaagacgctcatcgtcccaatgatccaaaattactggaactatttcaaaataccaccgttatgatgggacttgttgatgtagcaaaaagtaaacttgaagaagttgatcaggtaaaagaaaggatcaaactttgtttagaacatatagaccgagaacgctttattgctgcccctgattgcggcttaggtcttttaaacagagatcttgcaaaggcaaaattgaagaatctctgtcaagcagctcacagtatttaaa

SEQ ID NO: 226394 - DNA, 1044 bp, Unknown
  Bacterial polypeptide expressing nucleotide sequence isolated from the Sargasso Sea
tatgaaaataaaaaccactactataggagcctatcccaaacctgcatgtacaccaattggagattggttccctgacacagaagatgaagatgctaggggagcagacaaaggccttttacaacgctggagcattactgattatgaagaaaatatgaagaaagccggtgaaagtgcagaaacagactttcttaatgccattcatgaagtagtggatgaccaggtacaagctggaattgatatccccacagatggagaagttcgcagggagaattatatcttttaccaatgtcgcagaattaaaggcatagattttaatactgttacaaacacaagtgtcaggtccggtgcataccaagctgatttgcctacaattacaggccctgtaactcttgaaaaaactatgttagggagagactatagcaccgcacaaaaattctgttcaaaccctgtaaagataactatacctggcccaatgacaattatagattccattgcggacgattattataacaatgataagaaactgggattagatcttgccaatgctttaaatactgaaatattgaatttagttgaagcaggctgccaaaacattcaggttgatgagccagtttttgctcgaaaacccgaaaaagccttagagtacgggattgaaaatcttgagagatgttttgatggtgtccctgaaaatgtaactaaaatatctcacatgtgctgcggttatcctaatgctttggattctgaaaactatcttaaagcaaagccttctgcgtattttaaaatagcagaggctttagatgagtctattctggatgcaatttcaattgaagatgcacatcgacctaatgatcttaagctgcttgaaatctttaaagagacgtcaatcattttgggttttattgatgttgcaaaaagcaaattggaagaagttgatcaaataagagaaagaattaaacaatgtctaagccatattgatcatcaccgattaattgctgctccagattgtggactcggtttattaaacagacagcttgctatgacaaa

SEQ ID NO: 226395 - DNA, 856 bp, Unknown
  Bacterial polypeptide expressing nucleotide sequence isolated from the Sargasso Sea
ctgggaatcgatattcctaccgatggagaggttagaagagaaaattacatctattatcaatgccgccaagttgaagggattgatttcaaaacagtcacccataaaagtgttcgggctggagcttttgaagcagatcttccaacgattatcaaacctataagtcttcgagcacccattttaggccgtgattataaaacggctcagcaattcaccaataacccggtgaaaattaccattccaggtccaatgaccattacggactcaattgcagatgatttttacaatgatgataagaaattgggggccgatttagggaatgcgctgaatcaggaaatactctctttagttgaggctggttgccagtacatccaggtagatgaacctgtctttgctagaaaacctgagaaggcccttgaatacggggtggaaaatctggaaaggtgttttgctggtgttccggatcatgttacaaaggcaatgcatgcttgttgtgggtatcccaatgctcttgatactgataattattacaaagctcccccacaatcctattttgatatagctgaagcgattgaccaatcttcgattaatgcaatatcaatcgaagacgctcatcgtcccaatgatccaaaattactggaactatttaaaaatacgaccgttatgatgggacttgttgatgtagcaaaaagtaaacttgaagaagttgatcaggtaaaagaaaggatcaaactttgtttagaacatatagaccgagaacgctttattgctgcccctgattgcggcttaggtcttttaaacagagatcttgcaaaggcaaaattgaagaatctctgtcaagcagctcacagcatttaaa

SEQ ID NO: 226396 - DNA, 1072 bp, Unknown
  Bacterial polypeptide expressing nucleotide sequence isolated from the Sargasso Sea
aatggcccattcacttttaacgaccgtaatcggatcattccctaaaccagagtatctcccaattgaggactggtttgatgctgctaggaatgagggtgcgatgaattctgagcgcgtcacagaaaacttcactaaataccaagagaatacaaaagaaagtgacgaacaacttttcatcaaagccgctgaagaagtgatcaatttacaaattaattctggaatagatatacccacagacggtgaagtacgtcgtgaaaattatgtgcactatcattgtagataccttactggttttgattttaaaaatcttgagcgtagagtcttcagggatggtgcatatgactcacacctgccggccattaggaaaaaaatagagcataccaatgtgggctatgcagctttcgattacataagtagccaaaaagtgtctcctgttcctataaaatttacgcttccggggccacttactattatggatacaacggctgattgttattatgaggaccgcccaaaactcaatagagacctagccgatacaatcaacaaagaaattttgaagttagtggacgcaggttgccgatatattcaagttgatgagcccctttttgctcgtcaagttgatgatgcgtcctcctttggtatggaaggtattgagagatgttttcacggtgtaccaaaagaagttaaaaagataatgcacatgtgttgtggttacccggatcatttggatgacgaagattacaagaaggctgatccaggcagttaccatcagttagctagagaggttgatgatttgaatattgatgaggtatcaattgaggacgctcattgcaaaaatgatctcaaattattagaaaaatttgagaaaaaatcagtcatctttggagcagtcgcaatcgcttcaagccgaattgaaacggaggatgaaatcataaacagaattaattcggcgcttaatcatatcgatagaaatagactagtcattgctcctgattgtggtctcggattactaacccaagatttagcagtggcaaaattaagcgtgatgtgctctgcggttaaaaaaatttaa

SEQ ID NO: 226397 - DNA, 367 bp, Unknown
  Bacterial polypeptide expressing nucleotide sequence isolated from the Sargasso Sea
ctgggttttccgcgcatcggtgcgcggcgagaattgaagtttgcccaggaagccttctggaaaggcgagaaaagcgaagccgaactgctgcagaccgccgccgagctgcgggcgcagaactggaaacgtcaggcgggactcgatctggtcccggtgggggatttttccctttatgatcaggtgctggatctgagctttaccctcggcaacctgccggcccgagtacaggggctgcaaggctccgagctggatcagtacttccgcgttgcccgtggccgctccgccaatgacagcggctgcaactgtgtgcatgccggcgagatgaccaagtggtttgataccaactaccactacatcgtgccggagt

SEQ ID NO: 226398 - DNA, 373 bp, Unknown
  Bacterial polypeptide expressing nucleotide sequence isolated from the Sargasso Sea
aatgactttaactcataatcttgggtatcctcgcattggagaaaaacgcgagttaaaacgggccacagaggcgttttggaaaggcgagctttccattgatgaattactaaaggaagggtccgcgcttcgtaaaacaaattggctgaagcaaaaaaaagcaggcatagaacttatccctgtaaacgatttctcgttctatgatcaaatgctggatatgagttgcttattaggtaacgtgcctcctcgctttcaatggaatggtggcaaaactgatattaacaccgtttttactgttgcccgtggcacgcaaggtggtgcttccttagttgaggatgaaaaagattgccaaactggaaaagtatcaactattgct

SEQ ID NO: 226399 - DNA, 967 bp, Unknown
  Bacterial polypeptide expressing nucleotide sequence isolated from the Sargasso Sea
taaaaaaccaatacatttaattggtccatatacttttttaaagttatcaaaaggttcgtttgattttaaaactaaattaatggaattaactgatgtatatttagagatactaaataaaaaaggttcttatagtagttttcatattgacgaaccagcatttgtaatggatactacaccagaagaaattgaaatgattacagaagtctatactaaattatctaataaagcagataatataaatatctttacttattatgaagatgtggaatggttacgagaattatttgaattacctgtaaatggaattggattagattttgttaatggtagaaataatttacgagaaattttaagtcttggttctctttcattaaaagataaagtattatatgcaggatttgtcgatggtatcaatgtttggaaaactgatataagacacgcttgtattaatatagattatctatctaaaatggcaaaagatgttgtagttacaaatgcaggaccactttaccatttaccagtaacaacagaaggtgagaataatattccagaggaattaaaaaaacacttatcttttgctaccgaaaagttacaagagttagatgatattaaacatagagattataccaagtatgataaatatgtaggttcttggaataatatggtttcagatagagtagataatcttactgatgaagactttgtaaaatcaaaagatgttgtagaaagaagagaaattcaagatagaatattaggattaccagaattacctacaacaacaattggaagttttccacaaactaaagaagtgagagtaaatagattacatcacaaaaaaggtaagataaatactggtgaatattcaagtaaagtagctaaatttataaaagaagctatagatatacaagaagatataggaaatggatgttttggtacacggagaaaccagaacgaagtgatatggtag

SEQ ID NO: 226400 - DNA, 1282 bp, Unknown
  Bacterial polypeptide expressing nucleotide sequence isolated from the Sargasso Sea
aatggatatacttagtttaagaaagaaatttataagtccatcattaagtttatcctatgataaaccaatccattttgttaaaggtaaaggtcaatatctttatgatatagatggtaaaagatatttggacgcagtaaataatattcagcatgtaggtcattgtcatccaaaaatcgttgaggcagcacatgaacaaaatgcactgcttaatatcaatactcgctatttagatgaaaaaatcattgattatgcacaatctcttacagagaaattaccggaggggttagatgtttgtttctttacaaactctggtagtgagtcaaatgatcttgctattagaattgctagatctatttctaattcaaaagaaacaatcgttcttgattcagcttatcatggacatctttcttcattaatcgatttaagtccttacaaacacaatagtataggaggatcaggcccccctgattttgtttatacagtcccattgcctgacacatttagaggtatgtacagaggtgataattgttcaattgattatatcaatgaagtaaaaagaataatcaatacaatcaaaaataaaggtaatcaattatccgcattttttgtagaatcattaatgggttgtggaggtcaaataattttaccagatgggtttataaaaaaatcttttgaattggttcgtgaatctggaggcctttgtatagcagatgaagttcaaactggatttggtagagttggtgcccactattggggatttgaaacttgtgatgtgatcccagacattgtcacaatgggaaaatcgatgggaaatggacaccctctttcagcattagtaacaacaaaagagattgctgaaaaattcaataatggaatggaatattttaattcttttgggggtaatccagtttcatgtgctattgggaaagcagtccttgacgtaattgataaagaggaattgcaaaaaaatgcaaaattagttggtgattatctaattaaaaaattaaaaggattacaatctaattatgaatttattggacaagttagagggcagggattatttataggaattgaaatgataaatgatgtagagacattaaaacctgataaagattcagcaaaaataatagctaatgaaatgaaaaaatctggaattttaataagtgtagatggacctgatcataatgtgttaaaaattaaacccccaattatatttaactatgaaaatgctgatgaattggtatttaatttcagatctattttgaataaatattatgcatag

SEQ ID NO: 226401 - DNA, 713 bp, Unknown
  Bacterial polypeptide expressing nucleotide sequence isolated from the Sargasso Sea
catggcccgcactcacatatccggctttccgcgcatcggcgcgcatcgcgaactcaagttcgcccaggaatctttctggcgcggagaatccgacgacgcctatcttcgtgaagtcggaaaagcgttgcgcgcgcgtcactgggaattgcagcgcgccgccgggctggatttcgtcgcggccggcgatttcgcgtggtacgacccgatgctgaacctgaccgccctgctcggtgcgttgccggagcgcttcggcttcgagccgaagaccctgtcgctcgcccagtatcacgaactggcgcggggcaacaaggcgcagccggccatggaaatgaccaagtggttcgataccaactaccactacctggtgccggaactcggtcccgacacgacattcgacggcggcgtcgactggctgttcgaggaaatcgacgaggcactcgcgctggatctcgcggtcaagccggtgttgatcggacccatcacctatctgtggctggccaaaagccgcgtggcgggttttgaccgcctgtcgctgctgcctcggctggtcatccgctacctgcgtattctcgacacgctgaaagcgcgaggtatcgagtgggttcaactcgacgaacccgcgctctgcgtcgatctcgaagcggactggctcgaagcgttttccgccgtgtacaccgtgctgggcgactccggcgtcaaggtgctgctggcaa

SEQ ID NO: 226402 - DNA, 160 bp, Unknown
  Bacterial polypeptide expressing nucleotide sequence isolated from the Sargasso Sea
gatggccgggctgttgcgtaaggcggcacggcgcatcccgctcgagcgcctgtgggtcaaccccgattgcggcctgaaaacccgcgcctggccggaaaccgaggcagcgctggtgaacatggtggccgcagccaggcagttgcgtgtcgagctggcctga

SEQ ID NO: 226403 - DNA, 513 bp, Unknown
  Bacterial polypeptide expressing nucleotide sequence isolated from the Sargasso Sea
aatgccaagagttggcaggaagagagaattaaagttcgcaactgaaaaatactggcgacaagaaattactgcaagcgaacttcttagcacagcaactgatgttgttgatgatatttacactcagcaactcaatgcaggtatagatctgattccagtaaatgatttttctttttacgacagagtcttggatctatgttgttttcttggcattacgccagaaaggttttcccaaaacgtgaagcctcttttcttggacgaatattttagacttgctcgaggtgatggcgaaatagctgcaatggaaatgaccaaatggtttgataccaattatcattacctagtgcctgaaattgaagcaacaacaaacccttctttttccgatcaactgtttgctcaacaaatctttccagaattagattctaaaaaacaaaagttctgtctcattgggcctgtgacttttctcgctcttgctaaaggagcagattcagtcgataaatattccatcaaaaaaga

SEQ ID NO: 226404 - DNA, 874 bp, Unknown
  Bacterial polypeptide expressing nucleotide sequence isolated from the Sargasso Sea
ttttgatagcgttcatctagatttgattaccgatgacagtaatttggaaaatataaagaacgttaactgcaaaaatatttctttgggtattatttctgggaggaacatttggaggcttaattgggagaagacacttagaaaaattgattcccttcccttgaaagattttgaaacaatataccttgggccatccacttctcttcaacatttaccctactccatagagttagaaaaaaagatagatgatgaacttttatcttggcttgcatttgctaaagaaaaaatttcagaacttgctttattagcaaatcatttctccgatcaatcttcagaagaggaaatagaaaatataaaagctgctaatgaagcgcggcagacctcaaacagggtcacaaaaacttctgtaagagaaagaatgtctggtctctcagagaaagacttcgagcgaaacagtgcttttgcagttagacaaagtgctcaaaaagaaaaatttaattttccaattttgcctactacgactataggttcttttcctcaaacgacggatattagaaaagccagagctagactaacaaaaggagaaatttctcaagaagaatatgagactttcatgcaagaatccatcattgaatgtatcaaaattcaggaggacttggatttggatgtcttggttcatggtgagcccgaaagaaatgatatggttcaatattttggtgaactgctttccggttttgcctttacaagttttggttgggtgcagtcatacggaaccagatgcgtaaagccaccaattatctttggagacgtagagagacctgaggcaatgacagtgaaatggtctgaatttgctccaaaaacacaaaaaaagttatga

SEQ ID NO: 226405 - DNA, 667 bp, Unknown
  Bacterial polypeptide expressing nucleotide sequence isolated from the Sargasso Sea
tgattggattacttatgcacaaagcaaaaccaataaaattatgaaaggaatgttaacaggtccggtgacgattgtcaactggtcatttgtaagagatgataaacccaaagaggaagtatcaaaacagattgccattgccttaagtgatgagattaatgatttacaaaacgctggtataaaaatcattcaagtggatgaagctgcctttaaagagggttaccctttgcgtcaagagaatattattgattatgaatcatgggcaaccagagattttaaaattgcggtcagttctgccaaaacccaaacacaaattcatacacacatgtgttacagtgagtttaatgatattattaaaaccattgaagatatggatgcagatgtcatttccattgaaactgcacgaagtggcaatgaattactcaaaatttttcaacatgtaggctacaaacaagaagtaggtcctggagtatatgatattcatagtccaagaattccaagtgtggaagagttaaaacaacaaatcaaacgattattagaagtattacctaaagaacaattgtggattaaccctgattgtggtttgaaaaccagaaaatgggaagaggttattcccagtttaaaaaacatggttcaagcagtacaagaggtacgatctgaacttagatag

SEQ ID NO: 226406 - DNA, 970 bp, Unknown
  Bacterial polypeptide expressing nucleotide sequence isolated from the Sargasso Sea
gtggacggcctgcatatcgacctggtgcgtgcgccggagcaatacccgaccattctcgatcggctgcctgcttataaagtgttgtcgctgggcgtggtcaacgggcgtaacgtctggcgctgcgatctggaaaaggcactcgaggtgctgcgtcacgctcacgaacgtctgggcgagcggttgtgggtggcgccgtcctgttcgctgctgcacagcccggtggatctggctcgtgaagaccagctcgatgccgagctgaaaggctggctggcctttgccgtgcagaagtgtcaggaggttgcgttgctcggcaaggccctggaggagccggcagacgcctctgtgcaagccgccttgcaagcgagccgcgcagtgcaggccgcccgtgctgcatcgacgcgcattcacaagcctgaggtacaggcgcgcctggcggcgattcgtccgcgccatgctcagcgccagtcgccgttcgccgagcgcatcgaacaacagcgtgagcgtctgcagctgcctttgctgccaaccacgaccatcggctccttcccgcagacctcggcgattcgcctggcgcgacagtcgttcaagcagggcaagctcagcgcggccgagtacaccgaggccatgcacagcgaaattcgccatgcggtgcaggtgcaggagcgcctgggtctggacgtgctggtgcatggcgaagccgagcgcaacgacatggtcgagtacttcgccgagcaactcgatggctatgccttcacccgcttcggctgggtgcagagctacggctcacgctgcgtcaaaccggcggtgatagtcggtgatctgagccgcccgcaggcgatgactgtggagtggatcacctacgcccagggcctgaccgacaagatcatgaaaggcatgctgaccggcccggtgaccatgctgatgtggtccttcccgcgtgaggacgtgtcccgcgaagtgcaggcgcggc

SEQ ID NO: 226407 - DNA, 899 bp, Unknown
  Bacterial polypeptide expressing nucleotide sequence isolated from the Sargasso Sea
gacttttccttctacgatcaggtcctggacatgagctttaccctgggcaacctgcccgagcgggtacgcgacttccgaggtgatgagctggacaactacttccgcgtggcccgtggccgctctgcccaatcagccgaagagcacgcacaatgctgcggcggcgtagccgccggcgagatgaccaagtggttcgacaccaactaccactacattgtcccggagttcacacaggacaccgccttcaccctgaacgcctcacggctgatcgaacagctgcgcgaggccaaggcgcacaatgtggccgccaaaccggtgatcatcggcccgctcacctatctggcgcttggcaaagaaaaggacgacagcgaccgctttgacctgctggcgcgcctgctgccggtttatcttgagctacttaacgcgctggctgtcgaaggtgtggagtgggtgcaaatcgatgaaccgattctggtcaccgaattgcccagcggcctggatgtggccttcgagcaggcctaccacgcgctggctgccgcgccagtcaaactgctgctggccacctacttcggtcgcctgcaggaaaacctgcctctggtcacccgcctgccggttgccggcgtgcacctggacgcggttaacgcagccgacgaggttgaagcgctggccgcgcaactaccacaggacagcgtgctgtcccttggcgtgatcaacggccgcaatatctggaagaccgacctgaacgccacgctgcaatggctgacgccgcttgcaacagcgcggggagaacgcctgtgggttgccccctcctgctccttgctgcacgtgccagtggacctggccagtgaacagacgctggacacggaaatcgccagctggctggcctttgccctgcaaaagct

SEQ ID NO: 226408 - DNA, 424 bp, Unknown
  Bacterial polypeptide expressing nucleotide sequence isolated from the Sargasso Sea
cgactgggcacgtatctggagtgggcgatcaacagcttccgcatcgccgccaatggcgtggatgacagcacccagatccatacccatatgtgctactcggagttcaacgacatcatcgaagccattgcccgtatggatgccgatgtcatcaccatcgagacctcacggtcagacatggagctgctggatgccttccggagctttgaataccccaacgacattggtccgggcgtatacgacattcattcgcccaacattccggacaaggagcacatcatcaacctgatgactctggcggctgaacgtatccccgcagaacggctgtggattaacccggactgcggcctgaaaacccggaagtgggaagaagtgacgccggcactggaaaccatggtagcggcagcgcgggagctgcgcagctgag

SEQ ID NO: 226409 - DNA, 764 bp, Unknown
  Bacterial polypeptide expressing nucleotide sequence isolated from the Sargasso Sea
cttgaaagattttgaaacaatatatcttgggccatctacttctcttcaacatttaccctactctatagagttagaaaaaaagatagatgatgaacttttatcttggcttgcatttgctaaagaaaaaatttcagaacttgctttattagcaaatcatttctcagatcaatcttcagacgaagaaatagaaaatataaaagctgctaatgaagcgcgacagacttcaaatagagtcacaaaagcttctgtaacagaaagaatgtctggtctttcagagaaagacttcgagaggaacagtgcttttccaattagacaaagtgctcaaaaagaaaaatttaattttccaattttgcccactacgactataggttcttttcctcaaacaacggatattagaaaagccagagctagactaacaaaaggagaaatttctcaagaagaatatgagactttcatgcaagaatccatcattgaatgtatcaaaattcaagaggacttggacttggatgtcttagttcatggtgagcccgaaagaaatgatatggttcaatattttggagaattgctatctggttttgcctttacaagttttggttgggtgcagtcatacggaaccagatgcgttaagccaccaattatctttggagacgttgaaaggccagaagcgatgacagtgaaatggtctgaatttgctcaaaaaaacacaaaaaaagttatgaaaggaatgttaaccggtccggttaccattttacagtggtcttttg

SEQ ID NO: 226410 - DNA, 964 bp, Unknown
  Bacterial polypeptide expressing nucleotide sequence isolated from the Sargasso Sea
tttgagagaaacaatgtgttctcaatcaggcaagatgcacaaaagaaaaagttaatttttcctattttgcctacaactacgatcggctctttccctcagacgacagatataagaaaagctagagctagtttaactaaaggagaaatctctcaacaagagtatgaatcattcatgcaagattccatcgttgaatgtattaagattcaagaagacttagacttagatgtcttggtgcatggcgaaccagaaaggaatgatatggtccaatattttggtgaactgctttccggttttgcttttacaagttttggatgggttcaatcttacggaaccagatgcgtgaaaccaccaattatttatggtgacgtagaaagacctgaagcaatgacagttaaatggtcagagtttgcccaacaaaatactaagaaggttatgaaaggaatgttaaccggcccggttacaattttacaatggtcttttgtcagagacgaccaacctagaaaagacacttgctaccaaatagccctagccataagagatgaagttaaagatctagaagatgccggcatccatgttattcaagttgatgaggcagcatttagagaaggtcttcctgtgaggcgcgcacaatggaacgaatatttaaagtgggctgttgatacttttagactcacgactgcttgcgtagaagattcaactcagattcattcgcatatgtgttattcagaatttaatgatgtaattgaggatattgctgcaatggatgctgatgtaatctcaattgaatgttctagatcaaatatggaattattaaaggcctttaaagactttgattatcctaatgaaataggtccaggtgtatgggatatccattctccaagagttcctagccaaagtgaaatagaaaacttgattgaaaaagccaagaattctgtgaaacttgagaatttgtggattaatccag

SEQ ID NO: 226411 - DNA, 763 bp, Unknown
  Bacterial polypeptide expressing nucleotide sequence isolated from the Sargasso Sea
cttgtcgaagaaatttgaattatcttttggcgtaattgatggaagatctatttggaaatcaaatattctagatttgattaattggttaaataaattaggaattgaaaattatattgtttcttcctcgtgctcctttttgcattcaccctattcattagaagaagaaagcatcttagatccggatttaaaaaacattctttcatttgggtatgagaaattaaatgagcttaagcttatagtaacttcactaaataaagctgaagtttcagaagaagcaaaagaatttaataactcatttcaattatcaaataaacaattaagcgggagagttaatcctgaagtgagagaaagagtcgaaggtcttaatgaaaaagactttaatagaagtactaaaagagaagaaaggctgttgtttcagaatgaaaatttaaacattccacctcttccaacaacaaccattggctcctttcctcaaactgctgaaacaagaaatttaaggaaaaagtacaaagcaaacgaaataaacgatgaagagtatcatgaagggctaaaagagataataaaagaaacagtcgaaattcaagaatctcttgatttagatatattagttcatggcgaagcagagagaaacgatatggtcgagtattttggtgagcttttagatggatttgcgtttacaaaatttggctgggtccagagttatggaagtcgatgtgtaaagccaccaataatctatggagatgttaatagagtagacccgatg

SEQ ID NO: 226412 - DNA, 685 bp, Unknown
  Bacterial polypeptide expressing nucleotide sequence isolated from the Sargasso Sea
acgcggcatcgagtgtgtgcagattgacgagccggcgctggtactggagctgccgcaggcgtggctggatgcattcaaaccggcatatgatgcgctcgcgggccagcttaagctgctgctgaccacctactttgaaggcatcgccgcgaacctcgacaccatcaccgcgctgccggtgcagggcctgcacgttgacctggtgcacggtaaagatgatgtggctgctctgcatcagcgtctgccgtccgactggctgctctctgcgggcctgatcaacgggcgcaacgtctggcgcgccgatctgaccgagaaatatgcgcaaattaaagacctcgtcggccagcgtgcgctgtggatcgcttcttcctgctccctgctgcacagcccgatcgatctgagcgtggaaacccgtctcgacgcggaagtgaaaagctggttcgccttcgccctgcaaaaatgtgaagagctggcgctgctgcgcgatgcgctgaacagcggcgagaccgcaaaactggctgaatggagcgcaccgattcaggctcgccgtcactcgccccgcgtacataatgcggcggtggaaaaacgtctggcggccattaccgctcaggacagccagcgcaacagcccatacgctgagcgtgccagggcacagcgtacgcgcttcaatctaccggcgtggccgacc

SEQ ID NO: 226413 - DNA, 745 bp, Unknown
  Bacterial polypeptide expressing nucleotide sequence isolated from the Sargasso Sea
tactcgtgtcccaacgccgcagtggaaaaacgtctgggcggcaatcaccgcccaggacagccagcgcgccaacgcttacccggttcgcgccgaggctcaacgtgcccgctttaatctgccggcatggccgaccacgactatcggctcattcccgcaaaccaccgaaatacgcggtctgcgtctggacttcaaaaagggcaacctggatgccggtaactaccgcaccggtattgcggaacatatcaaacaggcgatcgccgaacaggagcgtctggggctcgacgtgctggtacacggtgaagccgagcgtaacgacatggtggaatactttggtgagcatctggacgggttcgtctttacccagaacggttgggtacagagctatggctcccgttgcgtgaagccaccggtagtcattggcgacgtcagccgcccggaagcgatcaccgtggagtgggcgaagtatgcccagtcgctgaccgacaaaccggtaaaaggtatgctgaccggtccggtgaccattctttgctggtcattcccgcgtgaagacgtgacgcgtgaaaccatcgcgaagcagattgcgctggcgttgcgtgatgaagttgcggatctggaagcggcggggatcggcatcatccagattgatgaacctgcactgcgtgaaggtttaccgctgcgtcgcagcgactgggcggcgtatctggaatggggcgtggaggctttccgcattaacgcggcagtggcg

SEQ ID NO: 226414 - DNA, 298 bp, Unknown
  Bacterial polypeptide expressing nucleotide sequence isolated from the Sargasso Sea
catggatgccgacgtgatcaccatcgaaacgtcgcgctcggacatggagctgctggatgccttcaagcacttccagtacccgaacgagatcggccccggtgtgtacgatatccactcgccgaacattccgacccaggagtacatggtcaagctgatgcagctggctgccgaacgtgtaccggcgcagcgcctctgggtaaacccggactgtggcctgaaaacccgccaatgggctgaagtaaggccagcgctggccaacatggtggcagccgctcgggcactacgcgccacactgtga

SEQ ID NO: 226415 - DNA, 2266 bp, Unknown
  Bacterial polypeptide expressing nucleotide sequence isolated from the Sargasso Sea
atgacctgcgcacacaccctgggctttccccgtatcggcgccaagcgcgagctgaaatttgccctcgaatcctactggcgcggcgaaaccagccaggccgaactcatcgccaccggcaagagcctgcgtgagcgtcactggcaggcccagcaacaggccggtgtgaccctgctgccggtgggtgacttcgcctggtacgatcaggtgctcggcaccagcctgctggtggatgccatccccgcccgccaccgtcatggcgacaccgatctcgataccctgttccgggtcgcccgtggccgtgcgccgaccggtccggccgccgccgccgccgagatgaccaagtggttcaacaccaactaccactacctggtgcccgagttcagccgcgaccagcgcttcaaactgggctggagccagctgtttgacgaagtggaagaggccaaggcgctggggctgccggtcaaggcggtgctgctgggcccggtctcctacctgtggcttggcaaggagaaagagagcggcttctcccgtctcgaactgctcgaccgcctgctcatcgtctatcaggagatcctggcgaaactggccgcccagggggtggagtgggtgcagatcgacgagccggcgctggcgctggacctgccggacgagtggcgcctcgcctacctcaacgcttacgagcgtctggccggcccctgcaagctgctgctcactacctatttcggttcggtggctcatcagcgcgacatcatcaccagcctgaaggtggatggcctgcacctggatctggtggcggcccccgagcagttggagaccctggtcccgcacctgccggcccagtgggtcatctcggccggggtcatcaacggtcgcaacgtctggcgtgccaacctggccaagctggtaccgactctaaaatcgctgaaggataagcttggcgagcggctctgggtggcctcctcctgctccttgctgcacagcccggtggacttgaccctcgaactggagctggatgcccagacccgcagctggttcgccttcgccctgcaaaaatgctacgagctggggctgctggctgaccatctcaatggcggggagctggacaagatcaccgcctacagccagcccatcgtggatcgggagtccgacagccgggtgcacaagaaggcggtgcagtcacggcttgccagcctgaccaaccgcgatttcgatcgccacagcgcctacccggtgcgggccgaggcgcagcgctcggatctcaagctgccgctgctgccgaccaccaccatcggctccttcccgcagacctcggaaattcgggtgctgcgccaggattggcgggccggccgcatcgacgaccaggcctacgaggcgggcattcaggcccagatcaaggatgcgattgagcgccaggaggccatcgggctggacgtgctggtgcacggcgaagccgagcgcaacgacatggtggagtatttcggtgagctgctggatggctttgccatcacccgcttcggctgggtacagagctatggctcgcgctgcgtcaagccgccggtgatcacccgtgacatcgaccgcccgaccccgatgacccttgagtggacgaagtttgcccagagcctgaccgacaagccggtcaagggcatgctgaccggcccggtgaccatcctctgctggtccttcccgcgcgaggacgtgagccgcgagcaatccgccctgcagattggcctggccattcgcgacgaggtggctgatctggaagccgccggcatcaagattatccagatcgacgagccggcgatccgtgaagggctgcccctgcgcaaacaggatcaccaggcctatctcgactgggcggtgcgggccttccgtctgagcgcaagcccggtggcggacagcacccagatccacacccacatgtgttacagcgacttcaacctcatcatcgaggcggtggctgcgctggatgcggacgtgatcaccatcgagaccagccgcagccagatgcagctgctcgaagcgttcgagcgcttcaactaccccaacgaaatcggcccgggcgtctatgacatccactcgccgaacgtgccgagccagagctggattgaaggcctgctgcgcaaggcggccaagcagatcccggccgagcggctgtgggtcaacccggattgcggcctcaagacccgcggctgggaagagaccgaggccgccctcaaggtgatggtcgatgccaccaaggcgctgcgtgccgagctggcctgaa

SEQ ID NO: 226416 - DNA, 2296 bp, Unknown
  Bacterial polypeptide expressing nucleotide sequence isolated from the Sargasso Sea
catggtcacgacacacaacctcggttttccgcgcatcggcgcgaagcgcgaactcaagttcggtctcgaacgctactggaaaggtgaatcgtcgcgcgacgagctgaaggcgcttggcgccgagttgcgccagcgtcactggaacgatcagcgcggcctggacctggcgccgatcggcgacttcgcgttctacgatcaggtgctggacatgagcttcacgctcggcaacctgccgaagcgcgtgcagggtttccacggcgacgtgctcgacaactatttccgtgtcgcgcgcggccgttcggcgcagtcggcggacgcgcatgccgcgtgctgcggcggcgtcgcggccggtgaaatgacgaagtggttcgacacgaactaccactacatcgtgccggaattccacgcggacacgaacttctcgctcgatccgtcgcgtctgctccagcaactggcggaagcgcaggcgcagggcgtggccgcgaagccggtgatcctcggccccgtcacgtatctgtggctcggcaaggcgaaggacgattccgaccgcctcgcgctgctgccgaagctgctgccggtgtacggcgcgctgctcgacacgctgaccgcgcagggcgtcgaatgggtgcagatcgacgagccgatcctcgtcaccgaactcgacgccgagtggcaacaagccttcgagaccgcgtacgccgcgctcgaaacgcgtcgcatcaaggtgctgctcgcgacgtactttggccaactgcagggcaatctggcgctcgcgagttcgctgtcggtcgacggcctgcatgtcgatgcgatcaacgcacgcgacgaagtcgccgcgctggtgcgtgaactgccggcctcgcgcgtgctgtcggtgggtgcgatcaacggccgcaacatctggaagaccgacctgaacgcgacgctcgactggctcgagccgctcgcgaagcaactgggcgatcgcctgtggctcgcgccgtcgtgctcgctgctgcacgtgccggtcgatctcgcgagcgaggagaagctcgatgcggaaatccggtcatggctcgcgttcgcgctacagaagctcgacgagctgaaggtactcgcgaccgcactgaacgaaggccgcgacaaggtggccgatgcgctggccgcgaacgccgccgcgattcattcgcgtcgctattcgccgcgcgtgaacaacccggtggtgaaggccgcgatcgcccggatcgatgcgcagctcggcaaccgcgtgagcccctatacgcagcgcgcgccgaagcagtcggcacgcctgaacctgcccgcgttcccgacgacgacgatcggctcgttcccgcagaccggcgaaatccgccaggcccgcagccagttcaaggccggcgcgctggatgaagccggctaccgcgcggcgatgcgcgccgagatcgagcgcagcgtccgcgagcaggaatcgctcgaactcgacgtgctcgtgcacggcgaagccgagcgcaacgacatggtcgaatacttcggcgagcagctcgacggctacgcgttcagccagttcggctgggtgcagtcgtacggatcgcgctgcgtgaagccgccgatcctgttcggcgacatcagccgcccgaaggcgatgacggtcgagtggatcacgtacgcgcagtcgctgacgaacaagccgataaagggcatgctgaccggcccggtgacgatcctgaactggtcgttcgtgcgcgacgaccagccgcgctcggtgtcgtgctaccagcttgcgctggcgatccgtgaagaagtgctcgatctcgagaaggccggcgtgcgcgtgatccagatcgacgaggcggcgctgcgcgaagggctgccgctgcgccgcgcgcagtgggacgcgtacctgaagtgggcggtcgaatcgttccgcatcaccgcgaacggcgtacaggacgatacgcagatccacacgcacatgtgctattcggagttcaacgacatcatcgcgtcgatcgccgacatggatgcggacgtgatcacgatcgagacgtcgcgctcggacatggagctgctcgatgcgttcgacgacttcaagtatccgaacgaaatcgggccaggcgtgtacgacattcattcgccgaacatcccgacgcaggagcatatcgtcggcctgatgaagaaggcggctgagcggattccggcggaacgcctgtgggtgaacccggactgcggcctgaagacgcgccagtgggcggaagtgattccggcgctgacgaacatggtcgccgccgcgaagacgctgcgcaacccggtgcagtaa

SEQ ID NO: 226417 - DNA, 2272 bp, Unknown
  Bacterial polypeptide expressing nucleotide sequence isolated from the Sargasso Sea
tatgcaattaaacagtcttggttttccccgtatcgggcgtcgtcgtgaactgaaatttgccctcgaaaaatactggcgtggtgagagcactcaagctgaactgcatgaggtggccaaggagttacgtcgtacccattggcaatggcaagtggccgccgggatcgagcaagtgccagtgggtgattttgccttttacgatcaagtgttaaccctaagcgcgaccctaaacgccattccagatcgccaccgcggcgagggcgctatcgatcttgataccttattccgcgttgcccgtggccgtgcgccaactggaacagatgcgccagcctcggaaatgactaagtatttcaacactaactatcactatttagtgccagagcttaagcaagaccaagtgttctctatcgcctatgagcagttttttgatgaagtggccgaggcacaggcgctgggttatcaagccaagcccgtgttgttaggtcctgtgagttacttgtatctggccaaaaccgtgggtcaggatttcgataaactcagcctattgcccaatctgttaaaggcctatgccgacattcttgcgcgttttgccgcgcagggcgtgacttgggtacagcttgaggagccaatcctagcactcgaattaaccgccgattggcaagcggcgattagcgaagcttatcaagcgcttaaaacggctcaagtaaagattttactcactagctactatggcagcatcagtcatcatcaggcactggtttccgcgctgccagtggcgggtctgcacctcgatttagtgacagcccctgaacaattggccttgtttgccaatgccttaagagcaaatcaaattctctctgcgggtgtagttaatggccgtaacgtgtgggcggcagaggttgacctgattgtcgagcgtatcggcagtgttgccagagacttaggtgcgcgcctatggattggctcttcctgttcactgcttcacagccctgtggatttagaggtggagacaacgctcacgccggcactacgtcagcagcttgcgtttgctaagcaaaagctgttggaactggccaatgtgcgccaattgttacaggctcctgagtctgtcgccgccaaagagatagttaacacttgtttggcacgtcgtgaggctaaagcactggcggcggatgctaaggtgatcgcccgtgtggctgcgctgacccaagccgactatgaacgtgtgagcgaatttactgagcgccaagcagtgcagcagcgcaagtatcgtttgccattactgccaacgaccacaattggctcattcccacaaacgcctgctatccgtggcttacgtagccgctggcgcaaaggggagctaagcgatgcccaatataccgagcagttgcagcaagtgacccgcgataccatcgaccgccaacttaaactcggtatcgatgtgctagtacacggtgaggccgagcgtaacgacatggtggaatacttcggcgagcagctcgaaggcgtgggatttaccaaaaatggttgggtgcagagttatggttctcgctgcgttaagtcgccattgatttatggtgatgtgagccgcccgaaagcgatgacggtagagtgggccgaattcgcacaaagcctgacggacaaaccggtcaaaggcatgctaacgggcccggtgacgattctacattggtcgtttgcccgtgaagatatcagccgcgataccattgccacccaattggcgctggctattcgtgatgaagtggtggatttacaagatgcgggtattggcattatccaaattgatgagccagccttccgcgaaggtttgccattaaagcaaagcgagtggcaagcttacttagattgggcggtgaatgcctttaaactgagtgcagcgggtgttgtggatgaaacccaaatccacacccatatgtgctatagcgagtttaacgacacgattgccgccattgccgccatggatgcggatgtgattaccatcgagacctcgcgttcacgcatggaactgctcaacgcctttgaagattttgaatatccaaatgaaattggcccaggcgtttacgatatccattcgccaaataccccaagtgtggaggccatggtgcaccttatcgaaaaagcggcgcaaaaagtgccagtacgccagctgtgggttaaccccgattgcggccttaagacccgcacttgggatgaggttgagcccgcgctgaagaacatggtcgatgcgacccgcgaactgcgtcgccgccttggctaa

SEQ ID NO: 226418 - DNA, 2272 bp, Unknown
  Bacterial polypeptide expressing nucleotide sequence isolated from the Sargasso Sea
atgcaattaaacagtcttggttttccccgtatcgggcgtcgtcgtgaattaaagtttgcccttgaaaaatactggcgtggtgagagcactcaagctgaactgcatgaggtggctagggagttacgccgcactcattggcaatggcaagtggccgcagggatagagcaagtacctgtaggggattttgccttttacgatcaagtgttaaccctgagtgcgaccttaaacgctatccccgatcgccaccgtggcgagggtgctatcgatcttgataccttattccgcgttgcccgtggtcgtgcaccaagtggcaccgatgcgccagcctcggaaatgactaagtatttcaacactaactatcactacttagtgccagagcttaagcaagaccaagtgttctctatcgcctatgagcagttatttgatgaagtggccgaggcgcaggcgctgggttatcaagccaagcctgtgttgttaggccctgtgagttacttgtatctggccaaaactgtaggtcaggatttcgataagctgagtttattgcccaatctagtaaaggcttatgccgacattcttgcgcgttttgctgcgcagggcgtaacttgggtgcaacttgaagaaccgattctggcactcgaattagccgccgattggcaagcagcgattagccaagcttatcaagcgcttaaaacggctcaagtgaagattttactcaccagttactatggcagcattagccatcatcaggcattggtttccgcgctgccggtggcgggggtgcacctagatttagtgactgcccctgaacaattggccttgtttgctaatgcattaagaccagatcaaattctgtcggcgggtgtagttaatggccgtaacgtgtgggcggcggaggttgacctgattgttgagcgtatcggcggtgttgcccgagacttaggagcgcgcctatggattggcacttcgtgttcactgctgcacagccctgtggatttagaggtagagacaacgctcacgccgacgctgcgtcagcagcttgcgtttgccaagcaaaagctgttggaactggcaaatgtgcgccaattgttgcaggcccctgagtctgtcgcggccaaagagatagttaactcctgcgtggctcgccgtgaggctaaggcacaggcggcggatgctaaagtgatcgcccgtgtcgctgcgctgaccccagccgactatgaacgggtgagtgaatttactgagcgccaagtggtgcagcagcgtaagtatcgtttgccattgttgccaacgactacgattggctcattcccacaaacaccggcaatccgcggactacgtagccgctggcgcaagggtgagctaagcgatgcccaatatactgagcagttgcagcaagtgacccgcgataccatcgaccgccagcttaaactcggtatcgatgtgctggtacacggtgaggccgagcgtaacgacatggtggaatacttcggtgagcagctcgaaggcgtgggctttaccaaaaatggttgggtacagagttatggttctcgctgcgttaagccgccattgatttatggtgatgtgagtcgcccgaaagccatgacggttgattgggccgaatttgcccaaagcctgacggacaaaccggtcaaaggcatgctaacgggcccggtgacgattctacattggtcgtttgcccgtgaagatatcagccgcgataccattgccacccaattggcgctggcaattcgtgatgaagtggtggatttacaaaatgcaggtattggcattattcaaattgatgagccagccttccgcgaaggtttgccattaaagcaaagccagtggcaggcttacttagattgggcggtgaatgcctttaaactgagtgcggcgggtgtgattgatgaaacccaaatccatacccatatgtgttacagcgagtttaacgatacgattgccgcgattgccgccatggatgcggacgtgatcaccatagagacttcgcgctcacgcatggaactgctcaacgcctttgaagattttgaatatccaaatgaaattggccctggcgtttacgatatccactcgccaaatacgccaagtgttgaggctatggtacaccttatcgaaaaagcggcgcaaaaagtgccagtgcgccaactctgggttaaccccgactgcggccttaagacccgcacgtgggctgaggtagaacccgcgctgaaaaacatggtcgatgcaacccgcgaactgcgtcgccgccttggctaag

SEQ ID NO: 226419 - DNA, 771 bp, Unknown
  Bacterial polypeptide expressing nucleotide sequence isolated from the Sargasso Sea
catggccctgtctcattccctcggttttccgcgcatcggccgcgaccgcgaactgaaaaaagccctcgaagcccactggaaaggtgagctggatgaagccggcctgcgcgccgtcggccagcgtctgcgcgccgagcactggcaactgcagaaggatgccggtatcgacctgctgccggtgggcgacttcgcctggtacgaccaggtgctcgctcattcgctggccttcggtgtgattcccgagcgctttcgcccggccgccggcaagccgacgctggataccctgttcgccatggcccgtggggccgttgcaaacaagagcagtggcagttgctgcggtggtgcccacgcccaggaaatgacgaagtggttcgataccaactaccactacctggtgccggagttcagtgctgaccagcagttcgccctgagctgggagcaactattcgaggaggtggctgaggcgcatgccctcggtcacgacgtcaagccggtgctgatcggtccgctgacctatctatggctgggcaaggccaagggtggcgacttcgacaagcttgagttacttgaaagcctgctgccggtctatggcgagatcttccagcgtctggccgcgcagggcgtggagtgggtacagatcgacgagccgattctggtgctcgatctgccgcaggcgtggaagaacgccttcgagcgcgcctacaacctgattcagcgcgaaccctgcaagaagctgatcgccacctatttcggcggcctggaagacacctc

SEQ ID NO: 226420 - DNA, 1363 bp, Unknown
  Bacterial polypeptide expressing nucleotide sequence isolated from the Sargasso Sea
gctgtggatcgcgccgtcctgctcgctggcccatgtgccggtcacgctcgcgtccgaaaagaaactcgatgccgaactcaaatcgtggcttgccttcgcgactgaaaaactcgatgagctcagcacgattgcactggcgctgcgccacctgggcgccgggctgccgggcgccgggctgccggcagcagcccgggcggcgctcgccgcagcgaccaccgcactcgagtcgcgccgccactccggagcggtattcaatgtgctggttcagcggcgcgtcgccgctatcgccgagaccatggccagccgcaagagcccgttcgccgaacgcagccgtgtgcagcgccactcgctcaaattgccgctcctgcccaccacgacaatcggttcgtttccgcaaacgccggcgatccggcaagcgcgcgccgcctatcgccgcggcgaaatgcgcgcgctcgagtatctcgaacgtatgcgggccgaaacggcgaccgtcgtgcggcgacaggaagaactcgggctcgacgtgctggtgcacggcgaagtcgaacgcaacgacatggtcgaattctttgcggacaagctctgggggtatgcgctcaccgaaaacggatggatccagaactacggctcgcaatgcgtcaagccgccgatcatttacggcgacatctaccggcccgagccgatgatcgtggacgcagcctgccatgcgcagtcgttgaccgaccgcctggtgaaaggcgtactgaccggaccggtcaccatgctcgaatggtcgtttgttcgtgacgaccagccgcgttcgaccacggcgctccaattggcgctcgtcattcgcgacgaagttatggacctcgaaaaggccggcatccgcatcattcagatcgatgagcccgcctttcgcgagggcttgccgttgcgtaaggcggactggtcagactacctcgactgggcgacccgggccttcaggatttcggcgggcggcgtttccgacgccacgcagatccacacccatatgtgctattcggaattcaacgacatcctgccgtcgatcgccgcgctggatgcggacgtgatcacgatcgagacatcgcgctcttcgatggagctgctcgacggcttcggcgagttcgcctatcccaacggaatcggacccggcgtatacgacacccattcgtcgcgcgtgccgagtgctgaagccatgcagcgcctgctcgaacgcgcctgcgaggtcatccccgccgaccgtttgtgggtcaaccccgactgcggcctgaaaacccggggctggccggagacggaagccgccttgtccaatatggtactggcggcgaggacactgcggcaaaggcttgcagtccagtaa

SEQ ID NO: 226421 - DNA, 1940 bp, Unknown
  Bacterial polypeptide expressing nucleotide sequence isolated from the Sargasso Sea
gatggcaaccacacataatctgggcttcccccgcatcggcgcgaagcgcgaactgaaattcgcgctcgagtcctactggaagggcgaatcctcgctcgccgaactgaaagcgctgggcgccgaactgcgccagcgtcattgggcgcaccaggccgacctcggcttcgccgccgtcggcgatttcgccttctacgaccacgtgctggacatgagcttcatgctgggcaacctgccggaacgcgtgcggggcttccagggcgatgcgctcgacaacgccttccgcgtcgcccgcggccgttcggccaaaggcgccgaagagcacggcgcgtgctgcggcggcgttgctgccggcgagatgaccaagtggttcgacaccaactatcacttcatcgtccccgaattcagcgccggtaccgagttcaagctcgacccgtcgcgtctgctcgaacaactggctgaggccaacgcacaaggcgtcaaggccaagccggtgatcgtcggcccggtgacctacctggcgctaggcaaggccaaggacgactccgacaagctggcgctgctgccgcgtctgctgccggtctacgccgaactgctggccgcgctggcggcgcaaggcgtcgaatgggtgcagatcgacgaaccggtcctcgtcaccgaactgtccgccgagtggcaacaggcgtacgtcaccgcatacgacgcgctggcgaacagcaaggtcaagctgctgctggcgacgtacttcggccagttgctcgacaacctgccgctggcctgcaagctgccggtgcaaggcctgcatctggatgcaatcaatgcgcgcgctgaagtcgctgccgcgattgcacaattgccgcaggaccgcgtgctgtcgctcggcgtgatcaacggccgcaacatctggaagaccgacctcaacggcgtgctcgactggctcgagccggtcgcgaagcaactgggcgagcgcctctggattgcaccgtcgtgctcgctgctgcatgtgccggtggacctggaaagcgaacagaagctggatgcggaagtccgctcgtggctcgccttcgcactgcaaaagctgggcgaactgaaggtgctggcgagcgcgctgaacaatggccgcgacgctgtcaaggcagagttggccgctaacggtgcagcgattgccgcgcgccgcgcgtcaccgcgtgtgaataacccggcggtcaaggctgccctcgcgaagatcagcccggccctcggtcagcgcaagaacacctacccggcgcgcgccgacaagcaggctgccctgttgaagctgccgccctacccgaccacgaccatcggctcgtttccgcagaccggcgcgatccgtcatgcacgcagccagttcaggagcggcgcattggacgaagccggttacaaggccgcgatgcgggccgagatcgaacgcagcgtgcgcgagcaggaaacgctggggctggacgtgctggtgcacggtgaagccgagcgtaacgacatggtggaatacttcggcgaacagctcgacggctatgcgttcagccagttcggctgggtgcagtcgtacggttcgcgctgcgtgaagccgcctgttctgttcggcgacatcagccgcccgaaggcgatgacggtggaatggatcaagtatgcgcagtcgctcaccagcaaaccgatgaagggcatgctcacaggcccggtcacgatcctgaactggtcgttcgtgcgcgacgaccaaccgcgttcggtgtcgtgctaccagttggcgctggcgatccgcgaagaagtgctcgacctcgaaaagaccggcgtacgcgtgatccagatcgacgaagcagccttgcgcgaaggtctgccgctgcgcaagtcgcaatggcaggaatacctggactgggcagtgacgtcgttccgtatcgccgccaacggcgtggatgacgaaacgcaga

SEQ ID NO: 226422 - DNA, 511 bp, Unknown
  Bacterial polypeptide expressing nucleotide sequence isolated from the Sargasso Sea
tttagaagacgctggtatccatgtcattcaagttgacgaagcagcttttagagaaggtcttcctgtgagacgcgctcaatgggacgaatacctaaagtgggctgttgatacttttagattaaccactgcttgtgttgaagattcaacccaaatccactcgcatatgtgttattcagaatttaatgatgtgattgagaacattgctgcaatggacgctgatgtgatctcgattgaatgttcaagatcaaacatggaattattaaaggcgtttaaagactttgattacccgaacgaaattggtccaggggtatgggatattcattctccaagagttccaagtcaggttgaaattgagagtttaattgaaaaagcaaagagttcagtaaagcttgagaatctatggattaacccagattgcggattaaaaacaagaggttggccagaggtgaaaaacaccatagaacatatggttaatgctactaagaaagctagagagcaattagataattaa

SEQ ID NO: 226423 - DNA, 718 bp, Unknown
  Bacterial polypeptide expressing nucleotide sequence isolated from the Sargasso Sea
cgactggaacccttcgctttatttgcaatataaaactgaacgttcaagacccgcaacggaattacttagcagagtggcgttagaaagtgttcgttcagttgtcgatcttggctgtggcccgggaaacagtacagcattactgcatcagcgctggccttcagctcaaataactggggttgatacctcacccgcgatgctgaatgaagcgcgcaacacattaccaaaatgccattttattgaagcggatatcagtacgtttcaggcagagcaccccgtggatctgctttatgccaatgcatcgttacagtgggtacccgatcactatgagttattcccgcacctggtctcacaactgagtcacaatggcgttctggccgtgcaaatgccagataactggctggagccaacgcatgtattgatgcgcgaagtggcttatgaacaagattacccagaccgtggccgtgctccgcttcctggcgttcacgcctactatgatattttgaccgaagcgggttgtgatgtagatatctggcgtacaacgtattatcacattatggattcgcatcaggcaattatcgactgggtaagctcgacgggcctgcgcccctggttgcaggatttgagcgaaagcgagcaacgtcattacctggcgcgctaccatgaactgctccaggaacaatatccgttgcaggagaacggcaaaattttactggcattt

SEQ ID NO: 226424 - DNA, 787 bp, Unknown
  Bacterial polypeptide expressing nucleotide sequence isolated from the Sargasso Sea
atgacgaccccactcgatcgatacgctgcgcagtacgtgcaattcgaggacgaacgcacgcggccgatccgcgacctgctggccgccgtgccgaacacgccgatccataccgcgatcgacatcggctgcgggcccggcaattcgaccgaggcgctgatcgcacgtgcgccgcacgcaacggtccacgggatcgatgcgtcggcggacatgatcgacgccgcgcgcaagcgcctgccggacgtgcgattcgatgtcgtcgatatttcgacatgggacgatccgggcggctacgacctgattctcgcgaatgcggtgctgcaatgggtgcccgcccacgacacgctgtttccggcacttgtcggccggctcgcgccgggcggccatctcgcggtgcagatgcccgacaacctcgacgaacccgcgcaccggctgatgcgcgaagtcgccgcggccgggccgtgggcggacaagctgaagggtgctgcgcgtaccgagcggttcgatgcgcgctactaccacgcgctgctgtcgccgttgtgctcgcgggtggacgtgtggcgcacgacttactaccacccgctgcgcggcggtgccgacgcggtcgtcgagtggttcaagggcagcgcgctgcgaccgttcctcgcggcgctcgacgatggcgagcgcgcggcgtttctcgcgcagtatcgcgatgcggtcgccggcccgggcggctatccggcgctcgctgacggcaccgtgctgctgccgttcccgcgcctgttcatcgtcgcgacgcgggcgtaaa

SEQ ID NO: 226425 - DNA, 724 bp, Unknown
  Bacterial polypeptide expressing nucleotide sequence isolated from the Sargasso Sea
ctcaggtcttataaaatatttaatgagacattggcatagtacaccatttgaaatgtgtgagataaagtatcatgttaagcttccaatttttattgcaagacaatggataagacataggacagccaatgttaacgagtattcggcaagatattctattttagacaaagaattttatctaccttcaaaagaaaatcttgctgctcaatctacgaataatagacaaggaagaggcaatgtaattagtggtggtcaagctgaggaggtgttaagtcttttaaaggatgatgctgaacgtacatataaaaattacgaggaaatgttaaatgaaagatacgatggctcagtaattgatgaaagtaaaactggtttagctagagagctggctcgtatgaatcttacattaaatacatatacccaatggtattggaaaactgatctattaaatttaatgaattttttacgtttgagagctgaccatcatgctcaatacgaaataagagcatatgcagatgtgatgcttaacacattaaagagatgggtcccaattacttatgacgcgtttatagattatagagtaggtggtacagaaatatcttcgaaaggtaaagagattataaaaaaactaattaaaggagaaaaaatttctatagaagagacagatttatcaaaaagagaatggaatgagttgatgttagcttttagtctcaaagataaattgatttaa

SEQ ID NO: 226426 - DNA, 181 bp, Unknown
  Bacterial polypeptide expressing nucleotide sequence isolated from the Sargasso Sea
cacatcactccatttgaaatgtgtgaaattaaatatcatgttaagcttccaatatttattgccagacagtggattagacacagaactgcaaatgtaaatgaatattctgcaaggtattcaattctagataaagaattttatttgccatcacaagaaaatttacgctgctcaatcaactagt

SEQ ID NO: 226427 - DNA, 718 bp, Unknown
  Bacterial polypeptide expressing nucleotide sequence isolated from the Sargasso Sea
ttaattaaatatcttatgagacactggcattctactcccttcgaaatgtgcgagataaagtatcatgtaaagcttccgatatttattgctcgacaatggattagacatagaacagcaaatgtaaatgaatattccgcaaggtattcaatactagataaagaattttatattccatctaaagaccagttgtcaaaacaatcgacagccaacagacaaggaagaggcgatttaataactggcgaacaagctgacgaagttttaaaaattttgaaggatgatgctacaagaacttatagtaattatgaaaaaatgttaaatgaaagatatgacggatcaaccattgacgagagtaaaacgggattagcaagagagttagctagaatgaatttaactttaaattcctatactcagtggtactggaaaacagatttgctaaatttacttaattttttatttttacgagcagatagccatgcacaatatgaaataagagtttacgcagagacaatgttagacacagtcaaaaagtgggtcccaattacacactctgcttttctagattatagagtaggcgcagttcatgtttcctcaaaaggaaaaaaagtaattcaaaaaatggccagaggtgaaaaaatcacaattgataattcgggactttctaaaagagagtggaacgaattaatgacctcatttggttttaatgaaaagattgtttaat

SEQ ID NO: 226428 - DNA, 697 bp, Unknown
  Bacterial polypeptide expressing nucleotide sequence isolated from the Sargasso Sea
atttgggcacagcacaccttttgaaatgtgtgaaattaaatatcatgtaaagctaccaatatttattgcaagacaatggattagacacagaactgcaaatgtaaatgaatattcagcaagatattctatattagacaaagaattttatttacccgaaacagaacatttggcttcacaatctcaaattaatagacaaggaagaggagatgtcattaaaggggaccaagcaaaactagttttggaacttttaaaaaaagatgcggagcaaacttataaaaattatgaaacaatgctaaatgaacgatatgatggcagcataattaaagaaggtaaaattggattagcaagagaacttgcaagaatgaacttaactttaaatacatacactcaatggtactggaaaactgatttattgaatttaatgaattttttgaggcttagagcagatcgtcatgctcaatatgaaataagatcctacgcaaatgcaatgttagacactctaaaaaaatgggttccaataacttatgaggctttcatggattatagagtaggtggtacagaagtttcttctaaaggaaaagaaattattcaaaaactaattaaaggtgaaaaagtatcacttgaacaatcaggtttatccaaacgcgaatggaatgaattaatgattgcatttgatctaagtgatcaaattatttaa

SEQ ID NO: 226429 - DNA, 337 bp, Unknown
  Bacterial polypeptide expressing nucleotide sequence isolated from the Sargasso Sea
catgaaattaactacagaacaagctaaagagattaaagaccaacaaaatcaacaaaacgaaacaaaaagagttaccgctccagaattagaaaaaatactatatgaagcgatacctcttttagatcatggctttataagagtagtcgactatatgggcgatgatacatctatagttcaagctgcaagagtttcttatggaaagggaacaaaaaaagtttcaacagactctggtttaattaaatatttaatgaggcattggcacagcactccttttgaaatgtgtgaaattaaatatcatgtgaaacttccaatttttatagcaagacaatggataagg

SEQ ID NO: 226430 - DNA, 754 bp, Unknown
  Bacterial polypeptide expressing nucleotide sequence isolated from the Sargasso Sea
cgagtatcttatggaaaaggaacaaagaaagtttctgaagattcaggtttaatcaaatatcttatgcgacattctcattcaacaccttttgaaatgtgtgagatcaaattacatgtcaagctgccaatttttatagcaaggcaatgggtcaggcatcgtacagcaaatataaatgaatattctgcaagatattcaatactagataatgaattttatgtaccagatattaataatctaggcgcacaatcacaaagtaacaggcaagggcgtgatgaagtattaactggagatgaagccaatgaagttttagagatattaaaaaatgatgctttaaatctatacggtaactatgaaaaaatgatgaatgtagatagtcaaggagatcaaatagatcctgaacgtcaaggacttgctagagagcttgcaagaatgaatctgtcactgaattattacacacaatggtattggaaaattgacttacataacctgcttcattttttacgactgcgtgcagattcacatgctcaattagagattagagaatatgcggatgtaatattaaatgttgttgagaaatgggtgcctgaaacatataaagcttttgttgaataccaaatgaatggtgttaagctatcagcaactgcatggtcagcagtgaaaaacatgataaacggtaaattgcctagtcataaagagttaaatatgtcaaaaagagagtgggatgagttaaaggatatgataagtggagaataat

SEQ ID NO: 226431 - DNA, 318 bp, Unknown
  Bacterial polypeptide expressing nucleotide sequence isolated from the Sargasso Sea
catgaaacttactaaagaacaagaaaaagagataaaagatttacaatctcaacatcatcaaactaaaagagttacggctcctgagttggaaaaaatactttatgaacctatttcaatattagatcatggttttgtgagggttattgattacatgggtgatgatacatcaatagttcaagcagcgagggtttcatatggaaaaggtactaagcaagtctcaacggactcggggttaatcaaatatttaatgagacattggcatagcactccatttgaaatgtgtgaaattaaatatcatgtaaaactacctatatttat

SEQ ID NO: 226432 - DNA, 343 bp, Unknown
  Bacterial polypeptide expressing nucleotide sequence isolated from the Sargasso Sea
atgaaattaaccaaagaacaatcccaagaaattaaagaccaacaatcgcaatcaaataatactaaaagaattactgcacccgagctagaaaaaatattatacgaagcaataccagtattggatcatggatttattagagttattgattatatgggtgacgatacatctattgttcaagcagctagggtttcatatggcaagggaacaaaaaaagttaataccgatgctggtttaataaagtacttaatgagacattggcacagcacaccttttgaaatgtgtgagatcaagtatcatgtaaaactccccaatttttattgcaaggcaatggataagacataga

SEQ ID NO: 226433 - DNA, 196 bp, Unknown
  Bacterial polypeptide expressing nucleotide sequence isolated from the Sargasso Sea
aatgaggcattggcatagtactccttttgaaatgtgtgaaataaaatatcatgtaaagttacctatatttatagcaagacaatggattagacacagaacagcaaatgtaaatgaatattccgcaagatactcaattttagataaagaattttatctacctgagccacaacatctctgctgctcaatcacaaagtaa

SEQ ID NO: 226434 - DNA, 670 bp, Unknown
  Bacterial polypeptide expressing nucleotide sequence isolated from the Sargasso Sea
gtgtgagattaaatatcatataaagcttccaatttttatagcaagacaatggattaggcatagaacagcaaacgtaaatgaatattcagcgaggtattcaattttagataaagaattttatttacctgaacaaaaacacttagcggcacaatctaaaagcaacagacaaggacgtggacaaacccttaaaggagatcaagcaaaaaaagttttggatttattgaagaaagatgccgaaacaacatataaaaattatgaaattatgcttaatgaaaaatatgatggttctattatagatgaaaatcaaaatggacttgcaagagagctggctagaatgaatttaactttaaatacttatactcaatggtattggaaaactgaccttttaaacttaatgaactttcttagattaagagcagatcatcatgctcaatatgaaataagagcctatgcagatgtaatgttagatacattaaaaagatggacacctactacctatgaagcctttatggattacagagttggtgggacggaagtatcatcgaagggaaaacaaattttaaaaaaatttattaaaggtgaaaaagttaactatgacgactctgggctttctaaaagagaatggaacgaattaatggaagcattcgatcaaaaggataaacttatttag

SEQ ID NO: 226435 - DNA, 754 bp, Unknown
  Bacterial polypeptide expressing nucleotide sequence isolated from the Sargasso Sea
tggaaaaggcactaaacaagtttcaactgataaaggtttaataaaatatttgatgagacattggcatagtaccccattcgaaatgtgtgaaattaaatatcatgtaaagcttccaatatttattgcaagacaatggattagacatagaacagcaaatgtgaatgaatactctgcaaggtattcaattctagataaagaattttatttaccatcacaagaaaatttagctgcccaatcaactagtaacagacagggtagaggagatgtcttggaaggaaaacaggcagaggaagtattagaacttttaaaaagtgatgcagagagaacttatgataattatgagactatgcttaatgaaagatttgatggatcaactattgatgaaaataaaaaaggtttagcaagagaacttgcaagaatgaatttaacactaaatacctatactcaatggtattggaaaacagatttattaaacttaatgaattttttaagattaagagctgatagtcacgctcaatatgaaattagagtttatgctgacataatgttggatactttaaataaatgggttcctataacctataatgcttttatggattatagagtgggtggaacagaggtttctgcaaaaggaaaattaattattcaaaaacttatcaaaggtgaaaaagtttctatcgaagaatcgggtctttcaaaaagagaatggaatgaactaatggagtcattcgaacaaaatgatcttttgatataa

SEQ ID NO: 226436 - DNA, 327 bp, Unknown
  Bacterial polypeptide expressing nucleotide sequence isolated from the Sargasso Sea
catgaaattaacaaaagaacaagaacgagagattaaagaacaacaaagccaagaaactagcacaaaaagagttactgcacctaatcttgaaaaaattctctatgaagcaatacctattttagaccatggttttatacgagttgttgattatatgggtaacgacacatctatagttcaggcagcaagagtctcatatggaaaaggtacaaaaaaagtttcaaccgatgcaggcctaataaaatatttgatgagacattggcatagcactccatttgaaatgtgtgaaataaaatatcatgtaaagttaccaatatttattgcaaggca

SEQ ID NO: 226437 - DNA, 347 bp, Unknown
  Bacterial polypeptide expressing nucleotide sequence isolated from the Sargasso Sea
aatgaaattaactaaagaacaaaagcaagaaattgcagatcaacaagctcaaaaaaatcagaccaaaagagtaacttctccagagttagaaaaaatactttatgaagccctcccagttttagaccatggttttgttagagttgtagattatatgggagatgatagttctattgttcaatctgcaagagtttcatatggcaaaggtacaaaaaaagtttcaacagatgagggtttaataaaatatctaatgaggcattggcactcaacgccatttgaaatgtgcgaaattaaatatcatgttaaacttccaatcttcattgcgcgacaatggattaggcatagaactg

SEQ ID NO: 226438 - DNA, 529 bp, Unknown
  Bacterial polypeptide expressing nucleotide sequence isolated from the Sargasso Sea
atgaaattaactagcgaacaagcacaagaaataaaagatcaacaatcacaggaatttaagactaaaagagtaacagcaccagaattagagaaaattttttatgaagctcttccaatattagatcacggatttattcgggtagttgactatatgggtgatgatacctcaatagttcaatcagcgagagtttcttacggtaaaggcacaaagaaagtctcaacagatgaaggattaattaaatatttaatgagacactggcatagcactccatttgaaatgtgtgaaattaaatatcatgtaaagcttccaatttttatagctagacaatggattaggcacagaactgcaaatgtaaatgaatactatgcgagatattctattcttgataaggagttttacctaccagcacctgagcatctagcagctcaatctcaaagcaatagacaaggaagaggtgatattcttgaaggtgacaaagctaaacaagttttagatcttttaaaagtgagatgcagaacaaacatataac

SEQ ID NO: 226439 - DNA, 319 bp, Unknown
  Bacterial polypeptide expressing nucleotide sequence isolated from the Sargasso Sea
atgaaactaacaaaagaacagcagcaagaaattgcagaccagcaaactcaaaaaaatcaaacaaaaagagtaacctctcccgaattggaaaaaatactttacgaagcactcccagttttagaccatggttttgtaagagtagtagattacatgggagacgatagttctattgttcaatcggccagagtttcatacggaaaaggtacaaaaaaagtttcaacagacgagggtctaataaaatatttaatgagacactggcactcaacaccatttgaaatgtgcgaaattaaataccacgttaaattacctattttatagc

SEQ ID NO: 226440 - DNA, 363 bp, Unknown
  Bacterial polypeptide expressing nucleotide sequence isolated from the Sargasso Sea
catgaaattaactaaagagcaatcagaagagataaaaagtcaacagtcccaaagcaatcaaacaaaaagagttactgccccagagcttgaaaaaattctttatgatgcaattccagctttggaccatggttttgtaagagtagttgattatatgggcgatgatacatctatagttcaatcagcaagagtttcttatggaaaaggaactaaacaggtttcaacagataaaggtttaattaaatatctaatgagacattggcatagtaccccatttgagatgtgtgaaataaaatatcatgttaaacttccgatatttatagcaagacaatggattaaacacagaactgcaaatgtaaatgaata

SEQ ID NO: 226441 - DNA, 733 bp, Unknown
  Bacterial polypeptide expressing nucleotide sequence isolated from the Sargasso Sea
tctactgatgaaggattaattaaatatttgatgagacactggcattctacaccatttgaaatgtgtgaaataaaatatcatgtcaaacttccaatctttatcgctcgacaatggataaggcacagaactgcaaatgtaaatgaatattctgctcgatattctattttagacaaggaattctatattccggcaaaagaacagctgtctgctcaatcgacaattaatagacagggtagaggagatttaattaccggcaatcaagctgatgaagttctaaaaattttaaaagatgatgcaactagaacttatgggaattacgagaaaatgcttaacgaaagatttgatggcacaacaatagatgaaggtaaagcaggtcttgcgagagaacttgccagaatgaatttaacgttaaattcttatacacagtggtattggaaaacagacttattaaatttacttaactttttatttcttagagctgatagtcatgctcaatatgagataagagtttacgcagaagctatgttagatactgttaaaaaatgggtacccataactcacgctgcatttttagattacagagtaggagcagttcatgtttcagctaaaggtaaaaaagttattcaacagatggcaaaaggtgaaaaagtgagtcacgaaaactcaggtctttcaaaaagagaatggaatgaattgatgacttcttttaattttactgaaaagattgtttaat

SEQ ID NO: 226442 - DNA, 358 bp, Unknown
  Bacterial polypeptide expressing nucleotide sequence isolated from the Sargasso Sea
catgaaattaactaaagaacaatcacaagagattaaagatcaacaatcacaacaaaatcctactaaaagagttactgctcctgaacttgaaaaaatactttatgaggcaatcccagctttagatcatggatttgtaagagtaatcgattatatgggtgatgatacatcaattgtacagtctgcaagagtttcatatggaaagggaactaaacaagtttcaacagactctggattaataaaatatttgatgagacactggcatagcacaccattcgaaatgtgtgaaattaagtatcatgttaagcttccaatatttattgctagacaatggattaggcataggacagccaatgtaaac

SEQ ID NO: 226443 - DNA, 322 bp, Unknown
  Bacterial polypeptide expressing nucleotide sequence isolated from the Sargasso Sea
atgaaactaacaaaagaacaaatacaagatattaaagatcaacaatctcaagaaaatataactaagagagtaaatgctcctgagcttgaaaaaattctatatgaggcaattccagttttagatcacggttttattagagttgtagattatatgggtaacgatacttcaatcgttcaagctgcaagagtttcttatggaaaaggaacaaagaaagtttctactgatgcgggtttaattaaatatttaatgagacattggcatagcacaccttttgaaatgtgcgaaataaaatatcatgtaaaacttcccaatatttattgct

SEQ ID NO: 226444 - DNA, 303 bp, Unknown
  Bacterial polypeptide expressing nucleotide sequence isolated from the Sargasso Sea
catgaagttaactgacgaacaaataaaagaaataaaagaccagcaatctcagcaaaattcaacaaaaagagtaacagccccagaacttgaaaaaattctatacgatgcaattccaatattagaccacggttttataagagttgttgactatatgggtgatgatacctccgtagttcaatcagctagagtttcttatggaaaaggcacaaaaaaagtttcaacagattctggtttaataaaatatttgatgagacattggcacagcactccttttgaaatgtgtgaaataaaatatcatgtaaa

SEQ ID NO: 226445 - DNA, 745 bp, Unknown
  Bacterial polypeptide expressing nucleotide sequence isolated from the Sargasso Sea
acaaaaaaagttcaaaccgacgcaggtctaataaaatatttgatgagacattggcatagtaccccatttgaaatgtgtgaaataaaatatcatgtaaagttacccatctttatagcaaggcaatggatcagacatagaacagcaaatgtcaacgaatactccgcaagatattcaattttagataaagagttttatttgcccaaaacagaaaatctagcagctcaatctcaaagcaatagacagggaagaggagatgtgctccaaggcgagcaagccaaaaaagttttggatcttttaaaaaatgatgcggaacaaacttataataattatgaaatgatgcttaacgaacgttatgatggttctgttatagatgaaaaagaaattggcctagctagggaacttgctaggatgaatttaactttaaatacttatactcaatggtactggaaaactgatttgctcaatctaatgaactttttaagattaagagcagaccatcatgctcagtatgaaataagaacttatgcagatgcaatgttagatacactaaaaaaatgggttccaattacttatgaagcattcatggattacagagtcggtggcacagaagtttcagcaaagggaaaaattatattacaaaaattaatcaaaggtgaagaggtcagcttagatcagtcaggtttatcaaaaagagaatggaatgaattaatgactgcttttggtcttaaagataagttgatttgat

SEQ ID NO: 226446 - DNA, 304 bp, Unknown
  Bacterial polypeptide expressing nucleotide sequence isolated from the Sargasso Sea
atgaagcttacatctgaacaaaaaaaagaaataacagaacagcagtctcaaaaaaatcagacaaaaagagttacatctccggaattagaaaaaattctttatgaggcgattccagttttagaccatggttttgtaagagttgttgattacatgggtgatgatagttctattgtgcagtcggcaagagtttcttatggaaaaggaactaaaaaagtatccacagatgaaggtttaattaaatatttaatgagacactggcattcgactccttttgaaatgtgtgaaataaaatatcacgttaagc

SEQ ID NO: 226447 - DNA, 685 bp, Unknown
  Bacterial polypeptide expressing nucleotide sequence isolated from the Sargasso Sea
cactccatttgaaatgtgtgaaatcaaatatcacgttaaacttcctatttttattgcacgacaatggattagacatagaactgcaaacgttaatgaatattctgctcgatattcaattttagataaagaattttatttaccgacatctgaaaatttagctgcgcagtctcaaagcaataggcagggaagaggagaagtgatcgaaggagaacaagcaaaacaagtattagatttattaaaaactgacgctgaacgtacttataaaaattacgaagagatgcttaatcaaagatttgatggatcaactattgatgaaaataaaaaaggattagcaagagaacttgcaagaatgaatttaactttaaatacttatactcaatggtattggaaaactgatttattaaatttaatgaattttttaagactgagagcagatagtcatgcacaatatgaaataagagcatacgccgatgcaatgttggatacagtaaaaaaatgggttccaattacttatgaggcatttatggattatagagtaggtggtacggaggtttcctccaaaggtaagaaagtcattcaaaagctaattagtggtggaaaagtagatattgagcaatcaggactatcaaaaagagagtggaatgagcttatgttggctttggaactaaaagataaattgatatag

SEQ ID NO: 226448 - DNA, 370 bp, Unknown
  Bacterial polypeptide expressing nucleotide sequence isolated from the Sargasso Sea
atgaaattaactaaagagcaatcagaagagataaaaagtcaacagtcccaaagcaatcaaacaaaaagagttactgccccagagcttgaaaaaattctttacgatgcaattccagcattggatcatggttttgtaagagtagttgattatatgggcgatgatacatctatagttcaatcagcaagagtttcttatggaaaaggaactaaacaggtttcaacagataaaggtttaattaaatatctaatgagacattggcatagtaccccatttgagatgtgtgaaataaaatatcatgtgaaacttccgatatttatagcaagacaatggattagacacagaactgcaaatgtaaatgaatactcagcaa

SEQ ID NO: 226449 - DNA, 847 bp, Unknown
  Bacterial polypeptide expressing nucleotide sequence isolated from the Sargasso Sea
atgaaacttactaaaaaacagcaagaagaaataaaaaatcaacaaactcaaagcaatcaaacaaaaagagttactgctcctgaacttgaaaaaattttatatgaagcaattcctgccttagatcatggttttgttagagtggttgattatatgggtgatgatacatcaatagttcaatcagctagagtatcatatggaaaaggaacaaaacaagtttcgactgacaaaggtttaattaaatatttaatgaggcactggcacagtacaccatttgaaatgtgtgaagttaaatatcatgttaagcttccaatatttattgccagacaatggatcagacacagaactgcaaatgttaatgagtattctgcaaggtattcaattcttgataaagaattttatttgccatctcaagcaaatttagctgctcaatcaaatagtaacagacagggtagaggagaagttttggaaggacagcaggcagaagaagtcttagaacttttaaaaagtgatgcagaaagaacttatgataattacgaaacaatgcttaatgaaagatttgatggctcaactattgatgaaaataaaaaaggtttagcaagagagcttgcaagaatgaatttaactttaaatacctatacacaatggtattggaaaacagacttattaaatcttatgaattttttaagattaagagcagataaccatgctcaatatgaaattagagtttatgctgatataatgttaaatacgttaaaaagatgggttcctattacttacgatgcctttatggattatagagttggaggcactgaagtatcagctaaaggaaaattaattattcaaaaat

SEQ ID NO: 226450 - DNA, 715 bp, Unknown
  Bacterial polypeptide expressing nucleotide sequence isolated from the Sargasso Sea
ataaaatatttgatgaggcattggcacagcactccattcgaaatgtgtgaaattaaatatcatgttaagcttccaatatttattgcaagacaatggattagacatagaactgcaaatgtaaatgaatattctgcaaggtattcaattttggataaagaattttatttgccatcacaagaaaatttagccgctcaatcaactagtaacagacagggtagaggagatgtattggaaggaaaacaggcagaggaagttttagaacttctaaaaagcgatgcagagagaacttatgataattatgagactatgcttaatgaaagatttgatggatcaactattgatgaaaataaaaaaggtctagcgagagaacttgcaagaatgaatttaacactaaatacttatactcaatggtattggaaaactgatttattaaatttaatgaattttttaagattaagagctgatagtcacgctcaatatgaaattagagtttatgcagacattatgctggatactgtgaaaaaatgggttcctataacttatgatgcatttatggattatagagtaggaggtacagaagtttccgcaaaaggaaaagttataattcaaaaacttattaaaggtgaaactttagatgttgaaagttctggattgtctaaaagagagtggaatgaattaatgactgcttttgatcttaaagataagttgatttaat

SEQ ID NO: 226451 - DNA, 346 bp, Unknown
  Bacterial polypeptide expressing nucleotide sequence isolated from the Sargasso Sea
catgaaattaactaaagaacaacaagaagaaataaaaaatcaacaatctcaaagcaaccagaccaagagagttaccgctcctgaacttgaaaaaatcttatatgaagcaatcccagctttagatcatggttttgttagagtggtcgattatatgggtgatgatacatcaatagttcaatcagccagagtatcgtatggaaaaggtacaaaacaagtttcaactgacaaaggtttaattaaatatttgatgaggcattggcacagtactccatttgaaatgtgtgaaattaaataccatgtaaagctcccaatattttatgcaagacaatggattagacacaaaact

SEQ ID NO: 226452 - DNA, 391 bp, Unknown
  Bacterial polypeptide expressing nucleotide sequence isolated from the Sargasso Sea
atgaagttaacacctgaacaaaagcgagaaataaatgagcagcagtctcaaaaaaatgagactaaaagagttacctcctctgaattagaaaaaattctttatgaagcacttcctgtattagatcatggctttgttcgagtggtggactatatgggtgacgactcctccatcgttcaatctgctagagtatcttatggaaaaggtacaaagaaagtttcaacagacgaaggattgataaaatatttgatgagacattggcactctactccgtttgaaatgtgtgagattaaatatcatgtaaaacttccaatctttattgcgcgtcagtggattagacacagaacagcaaatgtaaatgaatattcagccaagatattctattttagataaa

SEQ ID NO: 226453 - DNA, 706 bp, Unknown
  Bacterial polypeptide expressing nucleotide sequence isolated from the Sargasso Sea
ttgatgagacattggcacagcaccccgttcgaaatgtgcgaaattaaatatcatgttaagcttccaatatttattgcaagacaatggattagacatagaacagcaaatgtaaatgaatattctgcaaggtattcaattctggacaaggaattttatttgccatcacaagaaaatttagctgctcaatcaactagcaatagacagggtagaggagatgtattggaaggaaaacaggcaaaggaagttttagaacttttaaaaagcgatgcagagagaacttatgataattatgagactatgcttaatgagagatttgatggatcaactatcgatgaaaataaaaaaggtttagcaagagaacttgcaagaatgaatttaactctaaatacctacactcaatggtattggaaaactgatttattaaacttaatgaattttttaagattaagagctgatagtcatgctcaatatgaaatcagagtttatgctgacataatgctagatactgtaaaaaaatgggttcctatcacttatgatgcttttatagattatagggttggtgggaccgaggtttccgcaaaaggaaaattaattattcaaaaacttatcaaaggcgaaaatgtagatgttgaaagttctggattgtctaaaagagaatggaatgaattaatgaatgcttttgatcttaaagataagttaatttaat

SEQ ID NO: 226454 - DNA, 300 bp, Unknown
  Bacterial polypeptide expressing nucleotide sequence isolated from the Sargasso Sea
catgaaattaactaaagaacaagaacaagagattaaagagcaacaaagtcaagaatctagcacaaaaagagttacagctcccgaacttgaaaaaatactttacgaagcaatacctattctggatcatggttttgtaagagttgttgattatatgggcaatgactcatcaattgttcaggcagctagagtttcttatggaaagggaacaaaaaaagtttcaaccgattcaggtttaataaaatatttaatgagacactggcatagcactccatttgaaatgtgtgaaataaaatatcacgt

SEQ ID NO: 226455 - DNA, 318 bp, Unknown
  Bacterial polypeptide expressing nucleotide sequence isolated from the Sargasso Sea
catgaaattaactaaagaacaacaagaagagataaaaaatcaacaatctcaaagcaaccaaacaaaaagagttactgctcctgagcttgaaaaaatcctatatgaagcaataccagctttagatcatggttttgttagagtggttgattatatgggggatgatacgtccatcgttcaatcagcaagagtttcatatggaaaaggaacgaaacaagtttcaacagacaaaggactaataaaatatttgatgaggcattggcacagcactccattcgaaatgtgtgaaattaaatatcatgttaagcttccaatttttat

SEQ ID NO: 226456 - DNA, 310 bp, Unknown
  Bacterial polypeptide expressing nucleotide sequence isolated from the Sargasso Sea
gatgacctctgaaaacgaattttcttcttcggaacgccctcaacgcttcgaaacgggcagggtgaccgtgcccatgctagaggagaatttaaataaaccttttacggtactggatcatggatttgtccgaatcattgattatatgggtgatgataatgctgtggttcaggctgctcgcgtatcgtatgggtctgggaccaaacgagttagggaggaccgaggcctcatccgttaccttatgcgtcaccgtcatacaacgccgttcgaaatgtgtgaaattaagtttcatgtcaaacttccgatatttgtt

SEQ ID NO: 226457 - DNA, 853 bp, Unknown
  Bacterial polypeptide expressing nucleotide sequence isolated from the Sargasso Sea
atgtcaaagattcctgaagatgcaataagatgcctagataaagggtttgtacgattagtagatgcaatggggggagatgatgctatcgttcaagctgcccgagtcagttatggtaaaggtactgcaaaggtatctcaagatagaggattgattcgatatcttatgcgtcatagacacaccaccccatttgaaatggttgaatttaaattccattgtaaaatgccaatatttgttgcccgtcagtgggttagacatcgtacggctaatataaatgaatattctctaagatattcggaagcaagggatgaattctattgtccagacccagaacatattcaatttcaaagttcactaaataaacaaggtcgacttggagaagtctctgagtctttgaagacaaaagtacaagattattttcaggagatatcaaatagaagttttgaaatatactctgaactaaatgatgcaggtgtagcaagagaattagctagggcaattcttccagtgaatctttatacagaatggtattggaaaaatgatttacataatcttctgcattttgtaggattacgttctgatagtcatgctcaatatgagattcgtgttttttcagatgcaatggcagagtcagtaaaaaaagtagcaccttttgcatgggaggcctatcaggattatgtagtgagtggtctgagattttctagaatagagcaaggcctccttgaacaaaatctcccagatcgtgtgattgatgacattatggaagatatagtctatcagatcacagcatctcttcacaataacaaaccgcgtgaggatcatgacctttttcctctttataaaaagcaaggggcca

SEQ ID NO: 226458 - DNA, 532 bp, Unknown
  Bacterial polypeptide expressing nucleotide sequence isolated from the Sargasso Sea
atgagtgatttacccaacgatgccatcaagtgcctagacaaaggttttgtaaggctagttgactctatgggtggcgatgatgctatagttcagtctgctagagtaagctacggaaagggaacgagcaaactatctcaagatcgtggattgattagatatttgatgcgtcacaggcatactactccatttgaaatggttgagtttaaattccattgtaagatgcctatttttgttgcaagacagtgggtaaggcatcgcacggcaaacattaatgaatattctctaagatactccgaagcacgcgatgagttttattttccagatccgaatcacatcgaatttcaaagcgcggttaataagcagggtagaatgggggaagttgacaaaaagctaaaacagaaagttcaagcttattttaaagaaatttctgataggagctttgagatttatagtgaattaaatgaagcaggtgttgcgcgtgagcttgctcgtgcaattttacctgtaaatctctatacagaatggtatggaa

SEQ ID NO: 226459 - DNA, 964 bp, Unknown
  Bacterial polypeptide expressing nucleotide sequence isolated from the Sargasso Sea
atgtcaaacattcctgatgatgcaattaaatgtctggacaaaggttttgtccgtttagtagactcaatgggtggtgatgatgcgattgtacaagccgccagagtgagttatggaaaggggacctctaaagtttcacaggatagagggctaattagatacctaatgcgtcatagacacacaacaccatttgagatggtagagtttaaattccactgcaaaatgcccatttttgttgcgcggcaatgggttcgacatcgtacagcaaatataaatgaatactctctaaggtactccgaggcaagagatgagttctatcttcctgatccagagcatatccaatttcaaagttctttgaacaaacaaggaagattaggagaagtttctgattctttgaaagcaaaagttagtgactattttcaagagatatcaaacaggagctttgaaatatactcagaattaaatgatgcaggtgttgcgagagaattagctagagctgtattacctgtaaatctttatacagaatggtattggaaaaatgatctacataatctgttacactttgtgggcctgcgttcagatagccatgctcagtatgaaattcgtgtattttcagatgcgatggcagagtcagttaaaaaagtagccccgtttgcatgggaggcttatcaagattacgtcattagtggtttacgtttctctagaattgaacagagcttactcgaacaaaaccttccagagcgtgtgatagatgatattttagaggatattgcataccaaataacagcctctcttcataataataagccgcgtcaggagagtgaactttttgcactttataaaaagcaaggtggccatgattctgaagaggattttaaattaaagtgggattctggagaaattgaggttggtaacgttcgcgagcttagagaattcaagggaaagttatcctcattgaaaaaataaa

SEQ ID NO: 226460 - DNA, 737 bp, Unknown
  Bacterial polypeptide expressing nucleotide sequence isolated from the Sargasso Sea
cagtttcactgataaaggtttaataaaatatttgatgaggcattggcatagcactccattcgaaatgtgtgagattaaatatcatgttaagcttccaatatttattgcgagacaatggattagacatagaacggcaaatgttaatgaatattctgctagatattcaattttagataaagaattttatttgccatcacaagaaaatttagctgctcaatcaactagtaaccgacagggtagaggagatgtattacaaggaaaacaggcagaggaagttttggaacttttaaaaagtgatgcagagagaacttatgataattatgagactatgcttaatgaaagatttgatggatcaactattgatgaaaataaaaaaggtttagcaagagaacttgcaagaatgaatttaacactaaatacttatactcaatggtattggaaaactgatttattaaatttgatgaattttttaagattaagagctgatagtcatgctcaatatgaaattagagtttatgccgacataatgctggatactgtaaaaaaatgggttcccactacttatgatgcttttatggattatagagttggtggcaccgaagtttctgcaaaaggaaaattaattattcaaaaacttattaaaggtgagaatgtagatgttgaaagttctggcctttctaaaagagagtggaatgaattaatgactgcttttgatcttaaagataagttgatttaat

SEQ ID NO: 226461 - DNA, 484 bp, Unknown
  Bacterial polypeptide expressing nucleotide sequence isolated from the Sargasso Sea
atggaatataaggtgctcgatcatgggtttgtcagactcgttgaccatatgccacgccaagatctcgacaattctatcgtacaagccgctagagtctcgtacggcgacggaacgacgacttctcgaggtgatactggacttatacgatacttgatgcgccattggcacacgacgccatttgagatggtcgagtttaagtttcatattaaaatgcctatctacatcgctcgtcaacacttacgtcatcgcacggctagtgtgaacgaactttccgctcgttattccgtagttcctaaagaatattacgaaccagacacatttagaggacagtctacggtgaatcaccagggctcggaaggtgtcgtagacatcgataaaactgacatgagttctcacctttctcaatcgtttgatatctacgaaaaacttttacaggatggatgttgtcgtgaacaggctagagggaatcttccccagtccacat

SEQ ID NO: 226462 - DNA, 301 bp, Unknown
  Bacterial polypeptide expressing nucleotide sequence isolated from the Sargasso Sea
atgaaactaaccaaagaacaaaaaaaagaaataaaaaatcaacagtcacaagaaaataaaaccaaaagagtaaattcacctgaattagaaaaaattttatacgaagctatgccggttctggaccatggatttgtacgagtagttgattatatgggcaatgatacttcaatagttcaggccgcaagagtttcttatggaactggtacaaaacaggtttcaaccgatagcggattaattaagtacttaatgagacattggcatagtactccgtttgaaatgtgtgaaataaaatatcatataa

SEQ ID NO: 226463 - DNA, 739 bp, Unknown
  Bacterial polypeptide expressing nucleotide sequence isolated from the Sargasso Sea
aaagtttcaactgatgaaggtttaataaaatatttaatgagacattggcattcaactccattcgaaatgtgtgaaataaaatatcatgttaaacttccaatctttattgcaagacaatggatacgacacagaactgcaaatgtgaatgaatattcagcaagatattctattttagataaagaattttatattccagctaaagaacaattatcagcccaatctatttcaaatagacaaggaagaggggacttaattacgggtgagcaagcagatgaagtgcttaaaattttaaaagatgatgccacaagaacttacgataattatgaaaaaatgcttaacgaaagatttgacggaactataattgatgaagataaagcaggtttagcgagggagttagcaagaatgaacttaactttaaattcatatactcaatggtactggaaaacagatttactaaatttgttaaactttttatttcttagagctgatagtcatgctcagtatgaaattagagtttatgcagaaactatgttggacactgtaaaaaaatgggttccaataactcattcagctttcttagattatagagttggagcggtacatgtctctgctaaaggtaaaaaagtaattcaacaaatggcaaaaggtaaaaaagtttcttacgagaactcaggtctatctaagagagagtggaatgagttaatgaattcttttgaatttaaagaaaagattgtttaat

SEQ ID NO: 226464 - DNA, 967 bp, Unknown
  Bacterial polypeptide expressing nucleotide sequence isolated from the Sargasso Sea
aatgaatgaattaccaaaagacgcaattaaatgccttgacaaaggttttgtccggcttgttgattcgatgggcggggatgatgcaatcgtacagtcagcgagagtaagttatggcaaaggcacgagcaaggtgtcacaagaccgcggtcttattagatatttaatgcggcatcgccacactactccctttgaaatggttgagtttaaattccattgcaagatgccaatctttgttgcaagacaatgggtaaggcaccgcactgcaaatattaatgaatattcacttagatattctgaagctcgagatgaattttattaccccgatccagataacattgaatttcaaagtgcgctaaataagcaaggcagaatgggtgaagtagatcctgaattaaaagaaaaggtacaaaaatattttaaagaaatctctgagcgaagcttcgctatttatagcgaattaaatgatgccggtgttgcacgcgagctcgcacgcgctattcttccagtaaatctttacactgaatggtattggaaaaacgatcttcacaatctcttgcatttcattggactgcgctcagatggccacgctcagtatgaaattagagttttttctgacgccatggcatcttttgttaagaatgttgctccatttgcatgggaggcatatcaggactatgtagttaaaggtatgagattttccaaaatcgaacaatctttgctagagaaaaatcttcctgatagagtaattgatgatattcaagaagacttggcctatcaattgaccgcttcattgcatattaataaaccacgctctgatgaagatttatttcctctttacaaagatcaaggcggtacagatagtaaagaggactttaatttgaaatggacctcaggagagatcgatgctggtaatgttagagagctcagagaattcaaatcaaaaatcgagacgcttagacagtcttag

SEQ ID NO: 226465 - DNA, 964 bp, Unknown
  Bacterial polypeptide expressing nucleotide sequence isolated from the Sargasso Sea
tatgtcaaaaattcctgaagatgctattcaatgtttagataaaggttttgtacgtctagtggactctatgggaggcgatgaagcaattgtacaagcagcccgtgtcagctatggtaaagggacaacaaagctttctcaagatagaggtctgatccgatatcttatgcgacatcgacacactactccgtttgaaatggttgaatttaaattccattgtaaaatgcccatattcgtagcgcgccagtgggttaggcatcgtacagcaaatataaatgagtattcactcagatactcagaagcccgggatgaattttattatccagatccagagcatatccaatttcagtctgcattaaataagcagggtaggatgggagatgtcccagatgatctaaagaaaaaggtccaagattatttcaaagagatatccaataggagttttgaaatctattctgaattaaataccgccggtgtttcacgagaattagcccgtgctattttaccggtgaacctatacacagaatggtactggaagaatgatctacataacctccttcactttgtaggacttcgatctgatagccatgctcagtatgagatacgtgttttttcagatgctatggcagagtctgttaaagccgtagccccatttgcctgggaagcctatcaagattatgcggttagtggtctacgattttctaagatcgagcaaggtctacttgagcaaaatttaccagagagagtgattgatgatataatagaagatgttgtataccagatcacggcaacccttcatcataataaaccacgccaagaaaatgagatataccccctttatcaaaagcagaatggaactgattctgaagcagattttaaattaaaatgggattcaggcgagatcaagactggtaatgtccgggaacttcgtgagttcaaggaaaagctactttccctaaaaaaataa

SEQ ID NO: 226466 - DNA, 964 bp, Unknown
  Bacterial polypeptide expressing nucleotide sequence isolated from the Sargasso Sea
catgaataatactccaaaagatgcaataaagtgcttagataaaggttttgtacgcttagttgattcaatgggcggagatggcgccatagttcaggctgcacgtgtaagttatggaaaaggtacaagtaaggtgagtcaagatagaggtcttattcgatatttaatgaggcacaggcacactaccccttttgaaatggtagagtttaaatatcattgtaagatgcctatttttgtagctcgacaatgggtaaggcaccgtactgccaatatcaacgaatattctttacgctattccgaagcacgagatgagttttactatccagatccggagaacattcaatttcaaagcgctctgaataagcaaggtagattaggtgaagtttctgatgaattgaaaaagaaagtaaatacatattttaaagaaatatctgatagaagttttgaaatttattcggaattaaataatgcaggagtggcgagagagcttgctagagcagtattacctgtaaatctatatactgaatggtattggaaaaatgatttacataatcttcttcattttattggtttaagatctgatgatcatgctcaatatgaaattagagttttttcagatgccatggctgaatctgtaaaaaaagttgcaccatttgcttgggaagcatatcaggattatgtagtgagcggcctgcgattctctaggatcgagcgtggtattttagaaaaaaaattaccaaaaagagtaattgaagatcttcttgaagatttagcctatcagattactgcatcgttgcataataataagccccgcagtgataaagatctatttcctctttatactaagcaaggaggctccgattcaaaaggtgatttttttcttaaatggaattctggagaaattcatccaagtaatgtgagagagttgcgagagtttaaaaccaagcttaaaaggttaatgaaataa

SEQ ID NO: 226467 - DNA, 768 bp, Unknown
  Bacterial polypeptide expressing nucleotide sequence isolated from the Sargasso Sea
caagagtctcttatgaaaaaggaactaaacaagtttcaacggacagtggattaatcaaatatctaatgcgtcactggcatagcactccatttgaaatgtgtgagattaaatatcatgtcaaattacccatttttattgctagacaatggattagacatcgtacagcaaatgtcaatgaatattccgcaagatattcaattttagataaagaattttatttaccagatccagaaaatttagcagcgcaatcaattgcaaacagacaaggccgaggtgatgttattgagggggaacaagcaaaagaagttttagaacttttaaaaaatgatgcagaaagaacctatcataactatgagactatgctaaatcaaaaatatgatggatccacaatagatgaaaacaaaaaagggctggctagggagttagcaagaatgaacttaacactaaatacatatactcagtggtactggaaaacagacttacttaatttaatgaattttttaagattgcgtgcagatcatcatgcgcaatacgaaattagagtttatgcagatataatgttggatacattaaagagatgggttccaataacttatgatgcttttatggattatagagtaggtggaacagaagtttcagctaaaggtaaaattattattcaaaagttattaaaaggtgaaaatgtaaacatcgataattctgggctttcaaaaagagaatggaacgagcttatggaagcttttgaaattaaagataagattgtttaat

SEQ ID NO: 226468 - DNA, 421 bp, Unknown
  Bacterial polypeptide expressing nucleotide sequence isolated from the Sargasso Sea
aatggtggaggtggtgggtactgcccccacgtccgcaatggttattacgaaattcgtttatcgtcgtagttggaaaaccaacactattaatataaaaacaattattaaagattcaataaaaatcatgaaactaacaaaagatcaaattaatgagataaaagaacaacaatctcaacagcatcaaacaaaaagagttacagctcctgcacttgaaaagattctttatgaggctattccagctttagaccatggatttgttagagtcgtggattatatgggtgatgatacttctatagttcagtcagcaagagtttcttatggaaaaggaactaaaaaagtttctaccgatagtggtttaataaaatatttaatgcgccactggcatagcactccttttgagatgtgcgaaattaaatatcat

SEQ ID NO: 226469 - DNA, 481 bp, Unknown
  Bacterial polypeptide expressing nucleotide sequence isolated from the Sargasso Sea
aatggtggaggtggtgggtactgcccccacgtccgtaatgtttattacgaaattcgtttatcgtcatagttggaaaaccaacactattaatataaaagttatatgtaaagattcaataaaattcatgaaattaactaaagaacaaattaaagaaatccaagatcttcaatcccaaaaaaatgaaactaaaagagtaacagctcctaatttagaaaaaataatgtacgaggcgataccaatattagatcatggatttatcagggtgattgattacatgggtaacgatacatcaattgtccaagcagctcgtgtatcttatggcaaaggaacaaaacaagtttctacagacagtggtctaattaaatatttaatgagacattggcacagcacaccatttgaaatgtgcgaaataaaatatcatgtaaaattacccatctttattgccagacaatggattacggcacagaaccgcgaacgttaa

SEQ ID NO: 226470 - DNA, 445 bp, Unknown
  Bacterial polypeptide expressing nucleotide sequence isolated from the Sargasso Sea
catgaaattaactaaagaacaagaacaagagattaaagagcaacaaagtcaagaaactagcacaaaaagagttaccgcgcctaatcttgaaaaaattctctatgaagcaatacccattctagatcatggttttataagagttgttgattatatgggcaacgacacatctatagttcaggcagcaagagtttcttatggaaaaggtacaaaaaaagtttcaaccgatgcaggtttaataaaatatttgatgagacattggcatagtaccccatttgaaatgtgcgaaataaaatatcacgtaaagttgccaatctttatagcaaggcaatggattagacatagaacagcaaatgtcaatgaatactctgcaagatattctattttagacaaagaattttatttacctaaaacagaaaatttagcggctcaatctcaaagcaataga

SEQ ID NO: 226471 - DNA, 481 bp, Unknown
  Bacterial polypeptide expressing nucleotide sequence isolated from the Sargasso Sea
atgaaattaactaaagaacaacaacaagaaattaaagagttacaatctcaagacaataaaacaagaagaattatctctccaggattggagaaaatactatttgaggcgataccaattttagatcatggttttgttagagttatagattacatgggggatgacacctcaatagttcaagcagcaagagtatcgtatggaaagggtacaaaaaaagtttctacagactctggattgataaaatatctaatgagacattggcacagcactccttttgaaatgtgtgaaatcaaataccatataaaattaccaatttttatagcaagacaatggattagacacaggacggctaatgttaatgaatattcagctagatattctattttggataaggaattttatctaccatcaaaagaaaatttagctgcacaatcaaaaagtaacagacaaggaagaggcgacattttaacaggggatcaagcaa

SEQ ID NO: 226472 - DNA, 862 bp, Unknown
  Bacterial polypeptide expressing nucleotide sequence isolated from the Sargasso Sea
aatgaagctcacaaaagaacaaaaacaagaaattaaagaccaacaatctcaaaaaaatgttaccaaaagagtgacatcacctgaattagaaaaaattctttatgaagctaatccggttttagaccatggatttgtaagagtggttgattacatgggtgatgatacatctatcgttcaggccgctagagtttcatatggcaaaggaactaaaaaagtttcatctgatagtggtttaataaaatatttactaagacatagacacagcaccccttttgaaatgtgtgaaattaaatttcatgttaagcttccaatatttgttgcaagacaatggattagacatcgaacagcaaatgtaaatgaatattcagctagatactctattttggataaagaattttatattccagacaaacaacatcttgcagcacaatcagaaattaatcgtcaagggagaggaaatttaatcaacggcaaacaagctgatgaaatattagatatgctaaaagaggatgcgcaaaaaaattatgatgattatgaaaaaatgcttaatcaaaaatatgacggaacaattattgatgaaaaaaaacaaggtttagccagagaacttgcaagaatgaatcttacattaaatgcatacacccaatggtactggaaaacggatttattaaatctactaaattttttatctctgagagcagaaagtcatgctcaatacgaaattagagcttacgcagatgtaatgattgactctcttaaaagatgggtgccaataacatatgaagcatttatggattatagagttggtgcagttgaagtctcatctaaaggaaaagcagttatagaaaaactttttaaaaggtaa

SEQ ID NO: 226473 - DNA, 861 bp, Unknown
  Bacterial polypeptide expressing nucleotide sequence isolated from the Sargasso Sea
tgaaaattctctatgaagcaatacccattctggatcatggttttataagagttgttgattatatgggcaacgatacttctatagtgcaagctgcaagagtttcttatggaaaaggtactaaaaaggtttcaactgactcaggtttaattaaatatttaatgagacattggcatagtaccccatttgaaatgtgtgaaataaaatatcatgtaaaacttcctatctttattgcaagacagtggattagacatagaactgcaaatgttaatgaatactcagcaagatattcaattttagataaagaattttatttacctaatatagaaaatttagcagctcaatcccagagcaatagacaaggaagaggagatacacttcaaggagaacaagcacagaaagttttgagtctattaaaaaaggatgccgaacaaacttatgataattatgagatgatgcttaacgaacgttatgatggttctgtaattaatgaaaatgctgttggtcttgcaagagagcttgctagaatgaatttaactttaaatacttatacacaatggtattggaaaactgacttacttaacctaatgaactttttaagactaagagcagatcatcatgcgcaatatgaaattagaacatatgcagaagcaatgttagatacattaaaaaaatgggtccctatcacatatgaagcgtttatggattatagagttggtggtacagaagtatcagcaaaaggaaaaataatattacaaaaattaattaaaggtgaagaagttaatgtagatcaatcaggtttatcgaaaagagaatggaatgaattaatgattgcctttggtcttaaagataagttgatttaat

SEQ ID NO: 226474 - DNA, 354 bp, Unknown
  Bacterial polypeptide expressing nucleotide sequence isolated from the Sargasso Sea
catgaaattaacaaaagaacaatcagaagaaattaaaaatcaacaaagccaaagtaatcaaactaaaagagttacatcaccagaacttgaaaaaatcctttatgaggctattccagctttagaccatgggtttgtaagggtagttgattatatgggtgacgatacatcaattgttcagtcagcaagagtatcttatggaaaaggaactaaacaagtttctacagataaaggattaattaaatatttgatgagacactggcacagtactccatttgaaatgtgtgaaataaaatatcatataaaattacctatatttattgctaggcaatggattagacatagaaccgctaatgt

SEQ ID NO: 226475 - DNA, 808 bp, Unknown
  Bacterial polypeptide expressing nucleotide sequence isolated from the Sargasso Sea
tgttgattatatgggtgatgacacatctatagttcaatcagctagagtatcgtacggaaaaggaaccaaacaagtttcaactgacaaaggtttaataaaatatttgatgagacattggcacagtaccccattcgaaatgtgcgaaattaaatatcatgttaagctaccaatatttattgcaagacaatggattagacatagaacagcaaatgtaaatgaatattctgcaaggtattcaattctggataaggaattttatttgccatcaaaagaaaatttagctgctcaatcaactagtaatagacagggtagaggtgatgtattggaaggaaaacaagcagaggaagttttagaacttttaaaaagcgatgcaaagagaacttatgataattatgagactatgcttaatgaaagatttgatggatcaactattgatgaaaacaaaaaaggtttagcaagagaacttgcaagaatgaatttaacactaaatacctatactcaatggtattggaaaactgatttattaaacttaatgaattttttaagactaagagctgatagtcatgctcaatatgaaattagagtttatgccgacataatgctggatactgtaaagaaatgggttccaataacttatgatgcttttatggattatagagttggtggcactgaagtttctgcaaaaggaaaattaattattcaaaaacttattaaaggtgaaaatgtagatgttgaaagttctggactgtctaaaagagagtggaatgaattaatgactgcttttgatcttaaagataagttgatttaa

SEQ ID NO: 226476 - DNA, 895 bp, Unknown
  Bacterial polypeptide expressing nucleotide sequence isolated from the Sargasso Sea
attggttgatcaacaatcgcaaaaaagcacaactaaaagagttacctcccaagagttagaaaaaattctttatgaagcattacccgtgttagaccatggatttattagagtgattgattatatgggagacgacacatcaattgttcagtcagcacgtgtttcttatggaaaaggaactaaaaaagtttctacagatgaaggattaataaaatatttaatgagacattggcactcaacaccttttgaaatgtgtgaaattaaatatcatgtaaaattaccaatatttattgctcgtcaatggattagacatcgtacagcaaatgtaaatgaatactcagcaagatattctattttagataaagaattttatataccttccaaagatcaactatcagcacaatcaatatctaatagacaaggaagaggagatctaattaccggtaagcaagcagatgaagtacttaatattttaaaagatgatgcgacaagaacatatgataattatgaaaaaatgcttaacgaaagatttgatggaaccacaatagatgaaagcaaaacaggccttgcacgtgaactagcgagaatgaatttaacacttaattcttacacacagtggtattggaaaacagatttgttaaatcttttaaactttttatttttaagagctgatagtcatgctcagtatgagattagagtatacgcagatgcaatgttagaaacagttaaaaaatgggttccaattactcatgcggcatttttagattatagagttggagcaattaatgtttctgctaaaggaaaaaaagtaatccagaaaatggctaagggtgaaaaagttgatatagaaaactctggtctttcaaagagagagtggaatgaattaatgacttctttt

SEQ ID NO: 226477 - DNA, 820 bp, Unknown
  Bacterial polypeptide expressing nucleotide sequence isolated from the Sargasso Sea
tttgtaagagtcgttgactatatgggtgatgacagctcaattgttcaagcagcaagagtctcatatgggaaaggaacaaagaaagtttcaactgatagtggtttaataaaatatttaatgaggcatcgacatagcacaccttttgaaatgtgcgaaataaaatatcatgtaaaattaccaatctttgtagcgcgacaatggattagacatagaacagcaaatgtaaatgaatattctgcaagatactcaattttggataaagaattctatttaccatcaaaagaaaatttagccgctcaatcgactagcaatagacagggaagaggagaagtaattaacggaaaacaagctgataacattttggatatgttgaaaaaagatgcagaacaaacatatgctaattatgaaacaatgttgaatgaaaaatttgatggaagcacgataaatgaaaataataaaggtttggctagagaactagcaagaatgaacttaaccttaaatacttatacgcagtggtattggaaaacagatttgttgaatttattaaattttttatctttacgtgcagacagtcatgctcagtacgaaataagagcatatgcagatgtaatgattgactccttaaaaaaatgggtacctataacctttgatgcatttatggattatagagttggtggaatggaattatctgctaagggaaaaaaagtaattcaaaaattaataaaaggagaaaagtgtgatcttgaaagttcgaatctttcaaaaagagagtggaatgagttaatgcaatcctttggttttaacgaaaagattgtttaat

SEQ ID NO: 226478 - DNA, 718 bp, Unknown
  Bacterial polypeptide expressing nucleotide sequence isolated from the Sargasso Sea
atgaaattaacaaaagatcaacaagaagagataaaaaatcaacaatcccagagtagtaacacaaaaagagttacagcccctgaattggaaaaaatattatacgaagcaatgccagctctagatcatggttttgttagagtagttgattatatgggagatgatacttcaattgttcaatcggcaagagtttcatatggaaaaggtaccaaacaagtttctactgacaaaggtttaattaaatatttaatgcgtcattggcatagtactccatttgaaatgtgtgaaataaagtatcatataaaattaccaatatttattgcacgtcaatggatcagacacagaactgcaaatgtaaacgaatattctgcaagatactcgattttagataaagagttctatttaccgaccaatgaaaatttggctgctcaatcgaaaagtaacagacaaggaagaggagatgttcttgaaggagatcaagcaaaagaagttttaagtctcttgaaaaatgatgctgaaagaacttatgcaaattatgaaacaatgttaaatgaaagatatgatggaacaaccattgacgaaaacaaaaaaggcttagcaagagaacttgcaagaatgaatttgacattaaatacttacacacaatggtattggaaaacagacttactaaatcttatgaattttttgagattgagggctgatagtcatgcctcagtatgaa

SEQ ID NO: 226479 - DNA, 754 bp, Unknown
  Bacterial polypeptide expressing nucleotide sequence isolated from the Sargasso Sea
atgaaattaactaaagaacaagctcaagaaataaaagatcaacaatctcaagaaaatagtacaaaaagagtcatcgcagcagaacttgaaaatatattatatgaagcgttaccaattttagatcatggctttataagagtagtagattatatgggaaacgatacatccattgttcaagctgcaagagtatcatatggaaaaggaacaaaaaaagtaaatacagattccggtttaataaaatatttaatgagacactggcatagcactccttttgaaatgtgcgaaattaaatatcatgttaagcttccaatatttattgctcgacaatggattagacatcgaacagcaaatgtaaatgagtattctgcaagatactcaattttagataaagaattttatttgccttcacaagaaaatttagcagcacaatcacaaagcaacagacagggtagaggtgatgtccttgagggagaacaagcaacaaaagttttagatttactcaaaactgatgccgaaagaacttacaacaattatgaggaaatgttgaatcaaagatatgacggttcaacaattgatgaaagcaaaattggtttagccagagagcttgcaagaatgaatttaactttaaatacttatacacagtggtattggaaaaccgacttattaaacttgatgaactttttaaggcttcgtgctgatcatcacgcacaatatgaaataagagcgtatgcagatacaatgttagatacttgaa

SEQ ID NO: 226480 - DNA, 841 bp, Unknown
  Bacterial polypeptide expressing nucleotide sequence isolated from the Sargasso Sea
cttgaaaaaatactttatgaggctcttcctgcactggatcatggctttgtaagagttgtggattatatgggggacgatacttctatagttcagtctgcaagagtttcttatggaaaaggcactaagcaagtttcaacagataaaggattaataaaatatttaatgagacattggcatagtacgccatttgaaatgtgcgaaattaaataccatatcaaactcccaatatttatagctagacaatggattagacatagaactgctaatgtaaatgaatattctgctagatactcaattctagataaagaattttatttaccttcattagaaaacctagcagcgcaatcaactagtaatcgacaaggcagaggagatgtccttgtaggaaaacaggcagaggaggttttagaacttttaaaaaccgatgcagagcgaacctatgataattacgagacaatgctaaatgaaagatatgatggttcaacaattgatgaaaacaaaaaaggattagcaagagagcttgcaagaatgaacttaactttaaatacttatactcagtggtactggaagactgacttattaaatttaatgaactttttaagattaagagctgatagtcatgcccaatatgaaattagagtttatgctgacataatgctggatactgtaaaaaaatgggttcctataacttatgatgcttttatggattatagagttggtggtactgaggtttctgcaaaaggaaaattaattattcaaaaacttattagaggtgaaaatgtggatgttgaaagttctggattgtctaaaagagagtggaatgaattaatgactgcttttg

SEQ ID NO: 226481 - DNA, 935 bp, Unknown
  Bacterial polypeptide expressing nucleotide sequence isolated from the Sargasso Sea
agagcaaaaacaggaaattttagaccacaaatcacaaaaaaatattactaaaagagtaacctcaccagaattagaaaaggttctttatgaggcaatgcccgtattagaccacggttttgttagagtagtagattatatgggtgatgatacatctatagttcaatctgctagagtttcttatggtaaaggaactaaaaaagtttcaacagatagtggtttaataaaatatttaatgagacacagacacagcactccatttgagatgtgcgaaataaaataccacataaaacttccaatctttattgcaagacaatggatcaggcatagaacagctaatgtaaatgagtattctgcaagatattcaattatggataaagaattttatgttccagaaagacaaaacttagcagcacaatcaacaaataacagacaaggtagaggtgatttaataaatggaaaacaggctgacagtattttaaaaattttaaaagaagacgcagaaagaaattatcaacattatgaagagatgctaaatgaaaagtatgatggaagtataattgacaacaagaaacagggattagccagagaacttgcaagaatgaatcttacactaaattcttatacgcagtggtattggaaaacagatttattaaatcttttaaattttttagcgttaagagctgatagtcatgcacaatatgaaattagagaatacgcaaatgttatgttgaacacagtgaagaaatgggttcctacaacttatgatgcttttattgactatagagttggaggtatggaactttctgctaaaggtaaaatagtaatacaaaaaatgattaaaggtgagaaatgtgatatagagacttctggcctttctaaaagagagtggaatgaattaatggattcttttggttgtaaacaacatcttgcataac

SEQ ID NO: 226482 - DNA, 892 bp, Unknown
  Bacterial polypeptide expressing nucleotide sequence isolated from the Sargasso Sea
agcacaaaaagagttaccgcgcctaatcttgaaaaaatcctctatgaagcaatacccattctggatcatggttttttaagagttgttgattatatgggcaacgatacgtctatagttcaagcagcaagagtctcttatggaaaaggtacaaaaaaagtttctactgacgcaggtctaataaaatatttgatgagacattggcacagcactccatttgaaatgtgtgaaataaaatatcatgtaaagttgccaatctttatagcaagacagtggattagacatagaacagcaaatgtcaatgaatactcggcaagatattcaattttagataaagaattttatttgcctaaaatagaaaatttagcagctcaatctcaaagtaataggcagggaagaggagatgtgctccaaggagaacaagccaaaaaagttttagaacttttaaaaaatgatgcagaacaaacttacaataattatgaaatgatgcttaacgaacgttatgacggttctctaattaatgaaaaagaagcgggcctagcaagagagcttgctagaatgaatttaactttaaatacttacactcaatggtattggaaaactgatttacttaatttaatgaattttttaagattaagagcagaccatcatgcacaatatgaaataagaacttatgctgatgcgatgttagacacattaaaaaaatgggtgccaataacatttgaagcttttatggactatagagtaggaggaacagaagtttcttctaagggtaaggcaattattcaaaaattaataaaaggtgaaaaagttagcgttcaagaatcgggtttatctaaaagagaatggaatgaattaatgactgcttttgatcttaaagataaattaatttaaa

SEQ ID NO: 226483 - DNA, 676 bp, Unknown
  Bacterial polypeptide expressing nucleotide sequence isolated from the Sargasso Sea
atgaaattaacaaaagatcaaattgctgaaataagacaacaacaaactcaaagattttcaactaagagagttgtttcaccggaattagagaaaattttatatgaagctatgccagttttggatcatggctttgtaagagtagttgattatatgggtgatgatacatcaatcgttcaagctgcaagagtttcatatggcaaaggtacaaagaaagtctcaacagatagtggtttgattaaatatttaatgaggcatagacacagcacaccttttgaaatgtgtgaaattaaatatcatattaaattaccaatttttatcgcaagacaatggattagacacagaactgcaaatgtaaatgaatactctgcaagatactctataatggataaagaattttatgttccatctaaagcaaacttagcagctcaatcaacaaacaaccgacaaggtagaggaaatttaataaacggtactcaagcagatagcattttaaaaattttaaaagaagatgcagaaagaaattacaaacattatgaggaaatgttaaacgaaaaatatgatggtactattattgatgataagaaaaaaggattagcaagagaattagcaagaatgaacctgacattaaactcatacactcaatggtatggaaaactgatttacttaatttattgaa

SEQ ID NO: 226484 - DNA, 523 bp, Unknown
  Bacterial polypeptide expressing nucleotide sequence isolated from the Sargasso Sea
atgaaattaaccagggaacaatcagaggaaataaagaatcaacagtctcaaagtaatacaacaaaaagagttacagctccagagttagaaaaaattttatatgaagcaatgccagctttagatcatggatttgtaagagtagttgattatatgggagatgatacatctattgttcagtcagccagagtttcttatggaaaaggaacaaagcaagtttcgacagatgctggattaattaaatatttgatgcgacattggcatagcaccccttttgagatgtgtgaaattaaatatcatataaagttaccaatatttattgcacgtcaatggattagacatagaactgctaatgtaaatgaatattctgccagatattcaattttagataaagaattttatctaccaacttctgaaaacttggctgctcaatcaacaagtaatagacaaggaagaggagatgtattggaaggagaacaagcaaaagaggttttagaacttttaaaaaatgatgcagaaagaactt

SEQ ID NO: 226485 - DNA, 637 bp, Unknown
  Bacterial polypeptide expressing nucleotide sequence isolated from the Sargasso Sea
atgaaattaacaaaagaacaacaagaaaatattaaagaacaacaatcacaaactagtaaaactaaaagagtcacagctgctgaattagaaaaaattttatatgaagcaattccaattttagaccatggttttatcagagttgttgattatatgggtgatgacacttcagttgttcaagcagcaagagtttcttatggaaaaggaaccaaaaaagtctcaactgattcaggcctgataaaatacttgatgagacattggcatagtactccatttgagatgtgtgaaataaaatatcatgttaagcttccaatatttatagcaagacaatggataaggcatagaacagcaaatgttaatgagtattctgcaagatattcaattttagataaagagttttatttgcctgaaactgaaaacctagcagctcagtctcaaagtaacagacagggtagaggagatgtgcttcaaggagaccaagcaaaaaaagttttaaaccttttaaaacatgatgcagagcaaacttacaacaattatgaaacaatgcttaatgaacgttatgatggatctacaattgatgaaaaagaagtaggattagcaagagaacttgctagaatgaatttgactcttaatacatata

SEQ ID NO: 226486 - DNA, 412 bp, Unknown
  Bacterial polypeptide expressing nucleotide sequence isolated from the Sargasso Sea
catgaaattaactaaagaacaatcggaagaaatcaaaaatcagcaatcacaaagtagtcaaactaaaagagttacagcaccagagcttgaaagaatactctatgaagcccttccagctttagatcatggttttgtaagagtcgttgattatatgggagatgacacttccattgttcagtcagctagagtttcttacggaaaagggaccaaacaggtttcaactgataaaggtttaataaaatatttaatgaggcattggcatagtacaccattcgaaatgtgtgaaattaaatatcatataaaacttcctatatttatagcgagacaatggattagacatcgaacagcaaatgtaaatgaatattctgcaagatattcaattttagataaagaattttatttaccttctaaa

SEQ ID NO: 226487 - DNA, 550 bp, Unknown
  Bacterial polypeptide expressing nucleotide sequence isolated from the Sargasso Sea
atgaaattaactaaagaacaaactcaggagattaaggatcaacaatcccaagtaaatagtacaaaaagagtaattgcacctcaattagaagaaatactttatgaggcagttcctattttggatcatggatttgtaagagttgttgattatatgggaaatgatacctctatagttcaagcagctagagtttcatatggaaaaggtacaaaaaaagtttctacagatgaaggtttaattaaatatttaatgagacactggcatagcacaccttttgaaatgtgtgaaattaaatatcatgttaaacttcctatatttattgcaaggcaatggatcaggcatagaacagcaaatgtaaatgaatattctgcaagatattcaattctagataaagagttttatttaccatcatccaagcatttggctgcgcaatctcaaagtaatagacaaggaagaggcgatattcttgaaggcgaaaaagcaaaacaggtcttaaaccttttaaaaggtgatgctgaacaaacttataacaattatgaaatgagtaaatcaa

SEQ ID NO: 226488 - DNA, 444 bp, Unknown
  Bacterial polypeptide expressing nucleotide sequence isolated from the Sargasso Sea
gttcaggccgcgagagtctcttatggaaagggtacaaaaaaagtttcaactgatgcaggtttaattaaatatttgatgagacactggcatagtactccatttgaaatgtgtgaaataaaatatcacgtaaagttaccaatctttattgcaagacaatggattaggcatagaacggcaaatgtcaatgaatactcagcaagatattcaattttagataaagaattttatttgcccaaaacagaaaatttggcagctcaatctcaaattaatagacaaggaagaggtgatgtgctccagggagagcaagcaaaaaaagttttaagccttttaaaaaatgatgcagaacaaacttataataattacgaaatgatgcttaacgagcgttatgatggttctgtaattaatgaaaaagaatcaggtcttgcaagagagcttgctagaatg

SEQ ID NO: 226489 - DNA, 791 bp, Unknown
  Bacterial polypeptide expressing nucleotide sequence isolated from the Sargasso Sea
actgaggtccgagcaaaaccagacacttcgagcggtcagcgtgggcatggaaaaccacttgtataaggtttatcctgttctagatcatggctttgtaagagtggtagattacatgggtgacgatgctgcaatatgtcaagcagcccgtgtcagctatggccgtggtacaaagtcagtacaaaatgatgaggggctcatcagatatttaatgaggcactggcattcaacgccgtttgaaatgtgcgaagtgaaattacacgttaaattaccggtttttgttgctaggcaatggatccgtcacagaacagccaatgtaaacgaatattcagcgcgttactctattcttgatcgggaattttatatccctgagccagaggcattggcggctcaatcagttataaacaatcaaggtcgaggagaggtgttgactggagaagaggcagaagaagttcttcgattgctcaaaaatgactcggctcagacttatgatcattacgaacaaatgataagccaagagggccaaaagggtctggcgcgtgagcttgcgcgaatgaatttaccagcaaatatttatacccaatggtactggaaagtagatctgcataacttatttcattttttgcggttacgggcagatagtcacgcacagtttgaaattagagtatatgctgatgaaatttgtaaattaattagcgattgggttccattcgcatatggggccttcgaagattatagactaggcggggcgacattatcctctaaggcattagattgcatcaaacgaatgatta

SEQ ID NO: 226490 - DNA, 781 bp, Unknown
  Bacterial polypeptide expressing nucleotide sequence isolated from the Sargasso Sea
atgacgatttcagaacaacaaaaaaaagaaatatcagaacagcaaaatcaaaaaaatattacaaagagagttacctctccagagcttgaaaagattttatacgaagttatgcctgtattagaccatggcttcgttagagttgttgattatatgggtgacgatagttcaattgttcaagcagcaagagtttcctacgggaaaggaaccaagaaagtttcaacggatagtggtttaataaagtatttaatgagacatcgacacagcacaccttttgaaatgtgcgagataaaatatcatgtaaaattaccaatctttgtagcacgacaatggattagacatagaacagcaaatgtaaatgaatattctgcaagatattcaattttggataaagaattttatttaccatcaaaagaaaatttagcagcacagtcaatcagcaatagacagggaagaggagaagtaataaatggaaagcaagctgataatattttagatatgctaaaaaaagatgcagaacaaacatatgcaaattatgaaacaatgctgaatgaaaaatttgatggaagcacaataaatgaaaataataaaggtttagctagagaacttgctagaatgaatttaaccttaaatacttatacgcaatggtattggaaaacagatctattaaatttactaaattttttatctctacgcgcagatagtcatgcgcagtatgaaataagagcatatgcagatgcaatgattgattctttaaaaaaaatgggtacctataacttttgat

SEQ ID NO: 226491 - DNA, 499 bp, Unknown
  Bacterial polypeptide expressing nucleotide sequence isolated from the Sargasso Sea
atgaaattaactaaagaacaaattaacgagattaagacacttcagtctcaatcgaataaaacaaaaagagtagttgctccagaattagaaaaaattctatacgaagctattccagcattagatcatggttttgtgagagttatagattacatgggtgatgatgcgtcgatagtgcaggcagctagagtttcatatgggaaaggcacaaaacaagtttcaactgacaaaggtttaatcaaatacttaatgagacactggcatagcactccatttgaaatgtgtgaaattaaatatcatataaagttaccaatttttattgctcgtcagtggataagacacagaacagctaatgtaaatgaatactctgcaagatattctattttagataaagaattttatttgccatccgtacaaaatcttgcagcacaatcaaaaagcaacagacaaggaagaggagatttattagagggtgcgcaagccaaagaagtcttggatcttt

SEQ ID NO: 226492 - DNA, 805 bp, Unknown
  Bacterial polypeptide expressing nucleotide sequence isolated from the Sargasso Sea
gactacatgggtgatgatacttcaatagttcaagcagctagagtttcgtatggcaaaggcaccaagcaagtttcaacagattctggattaattaaatatttgatgcgtcattggcacagtacaccttttgaaatgtgtgaaattaaatatcatatcaagttaccaatatttatagctcgtcaatggattagacacagaactgcaaatgtgaatgaatattctgcaagatattcaattttagataaagaattttatcttccagcttctgaaaatttagcagctcaatctacaagtaatagacaaggaagaggtgatgtattggagggtgcacaagcaaaagaggttttagaacttttaaaaaatgatgcggagagaacttattcaaattatgaaatgatgcttaatgaaagatatgatggttctacaattgatgaaaataaaaaaggattagctagagagcttgcaaggatgaatttaactttaaatacttatacgcagtggtattggaaaactgatttattaaatttaatgaattttttaagattaagagcagaccaccatgctcaatatgaaataagagtttatgcagacataatgttagatacattaaagaaatgggtaccaattacttatgaggcattcatggattacagagtaggtggaacagaagtttctgcaaaaggaaaaatagttcttcaaaaattaattgaaggtgaaaatgtttcaatagaagattcaggattgtctaagagggaatggaatgaattgatggaagcttttcatcttaaagataagttgatttaat

SEQ ID NO: 226493 - DNA, 817 bp, Unknown
  Bacterial polypeptide expressing nucleotide sequence isolated from the Sargasso Sea
gtagaagagcttgaaaatattctgtatgaggcaattcctattttggatcatggttttataagggttattgattacatgggtgatgacacatcaattgttcaagctgcaagagtttcttatggaaagggaacaaaaaaagtttcaacagactcaggactaattaaatacctaatgaggcactggcatagcacaccttttgaaatgtgtgaaataaagtatcatgttaaacttccaatttttattgcacgtcaatggattagacacagaacagctaatgtaaatgaatactctgcaagatattctattttagataaagaattttatttaccttccgttgaaaacttagctgctcaatctcaaagtaatcgtcaaggccgaggagaagttttaaagggagatcaagcaaaaaaagttttagatttattaaaaaaagatgctgaacaaacttacgataattatgaaacaatgttaaatgaaagatatgacggttcagtaattgatgaaaaacaagttggattagcaagagaacttgcaagaatgaatttaactttaaacacttatactcaatggtactggaaaacagatcttttaaatttaatgaattttttaagactaagagctgatcatcatgcgcaatatgaaataagagcttacgccgatgcaatgcttgatacagtaaaaaaatgggttcctattacctatgaagcatttatggattatagggtaggaggaacagaagtatcttcaaatggtaaagaaataattaaaaaattaataaatggtgaaaaaattgatcctgaaaaatcaggattatcca

SEQ ID NO: 226494 - DNA, 866 bp, Unknown
  Bacterial polypeptide expressing nucleotide sequence isolated from the Sargasso Sea
actgtcagaacaacaaaaaaaagagatagctgaacaacaagcgcaacaaaacactacaaaaagagtcacgtcatcagaattagaaaaaattctatatgaagctttgcccgtgcttgatcatggatttgtaagggtggttgattatatgggtgatgacagttccattgtgcaagcggctagggtttcatatgggaaaggtacaaaaaaagtttcaacagatagtggcttaataaaatatttaatgagacatagacatagtacaccttttgaaatgtgtgaaataaaatatcacgtaaagttaccaatatttgtagcgaggcagtggataagacatagaacagctaatgttaacgaatattctgcaagatattctattttagataaagaattttatttaccatccaaggacaatctagcagcccaatctacaaataatagacaaggaagaggtgagttaattaatggaactcaagcagataatattttaaatattttaaaaaaagatgctgaaaaaacttatgctgattatgaattaatgttaaacgaaagatatgatggaagcacaataaatgaaaacaacaaaggtctagctagagaattagcaagaatgaatttaactttaaatacttatactcaatggtactggaaaacagatttactaaatttattaaattttttatctttacgtgcagatagtcatgctcaatatgaaataagagcatatgcagatgttatgatcgaatctttaaaaagatgggttccaattacttttgatgcatttatggattatagagtaggaggtatggagttatcgtcaaaaggaaaaattgttattcaaaaaaatgttgaagggacaaaaatgtaat

SEQ ID NO: 226495 - DNA, 895 bp, Unknown
  Bacterial polypeptide expressing nucleotide sequence isolated from the Sargasso Sea
atgaaacttacaaatgaacaaaagcaagaaattgccgaccaacaatcccaaaaaaatactactaaaagagttacctctctcgaattagaaaagattctttacgaggctttaccagttttagaccatggatttgtgagagtagtagactatatgggagatgacagctcaatagttcaatcagcaagagtttcatatggaaaaggaactaaaaaagtttcaacagatgaaggccttattaaatatttaatgagacattggcattctacacctttcgaaatgtgtgaaataaaatatcatgttaaattaccaattttcatagcaagacaatggattagacatagaacagcgaatgtaaatgaatattctgcaaggtattcgattttagataaagagttttatattcctgcgaaagatcaattgtcagcacaatcagcttcaaatcgtcaaggaagaggagatctaataactggagagcaagcagatgaagttttaaaaattttaaaagatgatgcaacaagaacttatgataattatgaaaaaatgcttaatgaaagatatgatggcacgactatcgataaagaaaaaactggtctagcaagagaacttgcaagaatgaatttaactttaaactcttatactcaatggtattggaaaacagatttattaaatttattaaactttttgtttttgagagctgacagtcacgctcaatatgaaataagagtatacgcagagacaatgcttaatactgtaaaaaaatgggttcctatcacacatgcagcatttttagattatagagttggcgctgttcatgtctcagccaacggaaagaaagttattcaacaaatggcaaaaggtgaaaaagtatcccatgaaagctcaaggtttatcaaaa

SEQ ID NO: 226496 - DNA, 613 bp, Unknown
  Bacterial polypeptide expressing nucleotide sequence isolated from the Sargasso Sea
catgaaattaactaaagaacaacaagaagaaataaaaaaccaacaatctcaaagtaatcaaacaaaaagagttactgctcctgagcttgaaaaaatcttatatgaagcaatcccagctttagattatggttttgttagagtaattgattatatgggtgatgatacatcaatagttcaatcagctagagtgtcatatggaaaaggaacaaaacaagtttcaactgacaaaggtttaattaaatatttgatgaggcactggcatagcacaccatttgaaatgtgcgaaattaaataccacgttaaacttccaatatttattgcaagacaatggattagacacagaactgcaaatgtgaatgaatactccgcaaggtattcaattctagataaagaattttatttgccatcacaaaaaaatttagctgctcaatcaactagtaacagacaaggtagaggagatgtcttagaaggaaaacaggcagaggaagttttggaacttttaaaaagtgatgcggagagaacttataataattacgagactatgcttaatgaaagatttgatggatcaactattgacgaaaataaaaaaggtttagcacgaagacttgcaaga

SEQ ID NO: 226497 - DNA, 371 bp, Unknown
  Bacterial polypeptide expressing nucleotide sequence isolated from the Sargasso Sea
catgaaattaactaaagaacaacaagaagatataaaaaatcaacaatcacagtgtaattcaacaaaaagagtaacctctcctgagttagaaaaaattctttacgaagcattaccagcacttgatcatggctttgtgcgagttgttgattacatgggagatgatacatcaatagtgcagtctgctagagtttcatatggcaaaggcacaaaacaagtttctacagactcaggattaatcaaatatttaatgcgccattggcatagtacgccgttcgagatgtgtgaaattaaatatcatatcaagttaccaatttttattgctcgtcaatggattagacatagaactgcgaatgtaaatgaatattcagcaa

SEQ ID NO: 226498 - DNA, 617 bp, Unknown
  Bacterial polypeptide expressing nucleotide sequence isolated from the Sargasso Sea
catgaaattaactaaagaacaacaagaagagataaaaaaccaacaatctcaaagcaaccaaacaaaaagagttactgctcctgagcttgaaaaaatcctatatgaagcaataccagctttagatcatggttttgttagagtggttgattatatgggggatgatacgtccatcgttcaatcagcaagagtttcatatggaaaaggaacgaaacaagtttcaacagacaaaggactaattaaatatttgatgaggcattggcacagcactcctttcgaaatgtgtgaaattaaatatcatgttaagcttccgatatttattgcaagacaatggattagacatagaactgcaaatgtaaatgaatattctgcaaggtattcaattttggataaagaattttatttgccatcacaagaaaatttagccgctcaatcaactagtaacagacagggtagaggagatgtcttggaaggaaaacaggcagaggaagttttagaacttctaaaaagtgatgcagagagaacttatgataattatgagactatgcttaatgaaagatttgatggatcaactattgatgaaaataaaaaaggtttagcaagagagcttgctaggatga

SEQ ID NO: 226499 - DNA, 402 bp, Unknown
  Bacterial polypeptide expressing nucleotide sequence isolated from the Sargasso Sea
catgaaacttacaaaggaacaaataaacgacataaaagatcaacaatctcaagagaatgttactaaaagagtaaccgctcctgaattagaaaaagtattatatgaagcgatgccagccttagatcatggctttataagagttatcgactacatgggagatgatagctctattgtgcagtctgcaagagtttcttatggaaaaggaactaaacaggtttcaacagatagcggtctaataaaatatctaatgcgtcactggcatagcactccatttgaaatgtgtgaaattaaatatcatgtaaaattaccaatatttatagcaagacaatggattagacatcgaacagcaaatgtcaacgaatactctgcaagatattctattttagataaagaattttattt

SEQ ID NO: 226500 - DNA, 500 bp, Unknown
  Bacterial polypeptide expressing nucleotide sequence isolated from the Sargasso Sea
aatgaaacttacaacagaacaaaagcaagaaattgcagatcaacaagcccaaaaacacgaaactaaaagagttacctctcctgagttagaaaaaattctttatgaagctttacctgttttagatcatggttttgttcgagtagtagattatatgggagacgatagttctattgtccaatctgcaagagtttcttatggaaaaggaactaaaaaagtttctaccgatgaaggattaattaaatacctaatgagacattggcactcaacgccgtttgaaatgtgcgaaattaaatatcacgttaaacttccaatttttatagctagacaatggattagacatagaactgcaaatgtaaatgaatattctgctcgatattctattttagataaggaattttatattccggcaaaagaacagttatctgcacaatcaacaataaatagacagggtagagggaatttaattaccggtaatcaagctgatgaagttcttaaaattt

SEQ ID NO: 226501 - DNA, 819 bp, Unknown
  Bacterial polypeptide expressing nucleotide sequence isolated from the Sargasso Sea
tcataagggtgatagattacatgggtaacgatacatcaattgtccaagcagctcgtgtatcttatggcaaaggaacaaaacaagtttctacagacagtggtctaattaaatatttaatgagacattggcacagtacaccttttgaaatgtgcgaaataaaatatcatgttaagctaccgatctttattgctagacaatggattaggcacagaactgcaaatgttaatgaatattcagccagatattcaattttggataaagaattttatttaccaaaaaaagaacatctagcagcccaatcaaaaaataacaggcaaggtaggggagaggtgctcgaaggagatcaggctaataaagttttatctttgttgaaggatgatgctgaaagaacttatgataattatgagacaatgcttaatgaaagatacgatggatcagttgtcgatgaaaatgagcctggtcttgcaagagaattagctagaatgaatctaacacttaatacttatactcaatggtactggaaaactgatctattaaacttgatgaattttttaagattaagagcagatagccacgcacaatatgaaataagagcatatgctgatgcaatgttagaaaccttaaaaagttgggttccaattacttatgatgcttttttagactacagagttggtggtactgaagtttcatcaaaaggtaaatttttaattcaaaaactgatcaaaggagaaaaaatcgatatggaaagttccgggctttctaaaagagagtggaatgaattgatggaggcttttaatttaaaagataaattgatttaat

SEQ ID NO: 226502 - DNA, 556 bp, Unknown
  Bacterial polypeptide expressing nucleotide sequence isolated from the Sargasso Sea
atgacaatatctgaagaagataaaaagtcagtagaggaagaaaggaaaaaatctttcactactaaaagagccaccgtagaggacctcgaaaatagcctctttacaatccatcctgttttagaccacggcctagtaagggtaatagactatatgggtgatgatgacgcaattgttcaggcagcacgtgtttcatatggagcaggaactaaaaaagcgcaagacgataattctttaattcgttatttaatacggcactggcactctacgccatttgaaatgtgtgaaataaagcttcatgtgaagctcccggtatttgtggctaggcaatggattagacacaggaccgctaatgttaatgagtattctgcccgctattccattctcgacaaagagttttatatccctgaccctagtaatttagctgctcaatccaagttcaataatcagggtaggggagaaatattagaagcagaggatgcacaaaaagttctagagattttaaaacatgatagtgatagcagctacgcaaattatgaaaatttgctttccttctgat

SEQ ID NO: 226503 - DNA, 496 bp, Unknown
  Bacterial polypeptide expressing nucleotide sequence isolated from the Sargasso Sea
catgaaacttaccaaagaacaagcggaagagataaaaaatcaacaatctcaaagcaatcaaactaaaagagttacagtgccagaacttgaaaatgtcctttacgaagcacttcctgctttagaccacggttttgttcgagtggttgattatatgggggatgatacttcaattgttcaatcagctagagtttcttatggaaaaggaactaagcaagtttcaactgataaaggattaatcaaatatttaatgagacattggcacagtactccgtttgaaatgtgtgaaataaaatatcatataaagttaccaatatttattgctcgacagtggattagacacagaactgcgaatgttaatgaatattctgcaagatattcaattctagataaagagttttatttacctacgcaagaaaatttagctgctcaatctactagcaatagacaaggtagaggagatgttttggagggcaaacaagcagaagaagttttagaa

SEQ ID NO: 226504 - DNA, 550 bp, Unknown
  Bacterial polypeptide expressing nucleotide sequence isolated from the Sargasso Sea
atgaaacttactaaagaacaaataaaagatataaaagagcaacaatcccagaataatacaactaaaagagttacagttcctgagttagaaaaagtattatatgaagcgatgccagctctagatcacggatttataagagttattgattatatgggtgatgatagttcgattgttcagtctgctagagtctcctatggtaaaggaactaaacaggtttcaacagatagtggtctaataaaatatttaatgcgtcattggcatagcactccattcgaaatgtgtgaaattaaatatcatgttaaattaccaatatttatagcaagacaatggattagacatcgtacggcaaatgttaatgaatactccgcaagatattctattttagataaagaattttatttacctgatccacaaaatttagcagcgcaatcaattgcaaacagacaaggaagaggtgatgtgattgagggggatcaagcaaaggaagtattagaacttttaaaaaatgatgctgaaagaacatatgataattatgaaactatgcttaatc

SEQ ID NO: 226505 - DNA, 787 bp, Unknown
  Bacterial polypeptide expressing nucleotide sequence isolated from the Sargasso Sea
aatgaaattaaccaaagaacaattacaagaaataaaagatcaacaatcacaagaaaatagcactaaaagagttatagctcccgatcttgaaaaagttctttatgaagcaatacctattttagatcatgggttcataagagttgttgattatatgggcaatgatagctcaatagttcaagctgcaagagtatcttatggaaaaggaactaaaaaagttaataccgatgcagggctaattaaatatttaatgagacattggcacagcacaccatttgaaatgtgtgaaataaaatatcatgtgaaattaccaatatttatcgcaagacaatggattagacatcgaacagctaatgttaatgaatactcagccagatattcaattttagacaaagaattttatttaccttcgccagaaaatctagccgctcaatctcaaagtaacagacagggcagaggcgatgttcttgaaggagaagatgctaaaaaagttttagatataattaaatctgactcagaaagaacttatagcaactatgaagagatgttaaatgaaagatatgatggatcaaagatagaggaaaataaatctggattagcaagagaattagctagaatgaatttaactttaaatacttatacccagtggtattggaaaacagatctattaaacttaatgaattttttaagacttagagctgatagtcatgcacaatatgaaattagagcatacgcagatgtaatgttagatacgttaaaaaagatggtttcaacaacatatgaagccttt

SEQ ID NO: 226506 - DNA, 388 bp, Unknown
  Bacterial polypeptide expressing nucleotide sequence isolated from the Sargasso Sea
catgaaattaactactgaacaagctcaagaaattaaagatcagcaaaatcaagataataaaacaaagagagttacagctcctgaattagaaaaaatactttatgaggcaataccacttttagatcatgggtttataagggttgttgattatatgggtgatgatacttcaattgttcaagcagcaagagtatcttatggaaaaggaacaaaaaaagtatcaactgatgcagggttaataaaatatttaatgagacactggcacagcacgccttttgaaatgtgtgaaataaaatatcacgttaaacttccaatttttatagcaagacaatggataagacatagaacggcaaatgtgaatgagtattctgcaagatactcaatattagat

SEQ ID NO: 226507 - DNA, 643 bp, Unknown
  Bacterial polypeptide expressing nucleotide sequence isolated from the Sargasso Sea
aatgactgcaaaaaaattaaaaaaagattcagaaaaagaccttaaaagtcttagaaggattaggaacataacaagcagagctacggttaaaaaacttgaaaatgttatttataaaaaatttaaagttctagaccatggttttgtaagattaatagattatatgggcgatgattcttcaattgttcaggctgcgcgagtttcatatggaaaaggaacaaaaaaaataaatgaggataaaaatttgataaattacctacttagtcatcgtcattcaacgccatttgaaatgaatgaaataaaattacatataaaacttccaatttttgttgcaagacagtggattagacatcgaacagctaatgtaaatgagtattctgctagatattcaattttagaaaaagaattttatattccagaattaaaacacatgcagacacagtcttcagtaaacaatcaaggaagaggagaaaaaattgataaggaaaatgctttaaagaaaagacaagttataaaaaaacattcggaatcttcatttgaaaaatatagttacttgttaaatgaaaatttggttggagagactctggatttaaataatgttggattagcaagagaattagcgagaatgacactacccttaaatgct

SEQ ID NO: 226508 - DNA, 394 bp, Unknown
  Bacterial polypeptide expressing nucleotide sequence isolated from the Sargasso Sea
atgaaattaaacaaagaacagcaacaggaaattaaagaacttcaatctcaagagttcaaaacaaaaagagttactgctcctgaacttgagaaagttctattcgaagcaattccagttttagatcatgggtttataagagttattgattacatgggcgatgatacatcgatagttcaagctgcaagagtttcatatggaaaaggaacaaaaaaagtttcaacagactcaggtttgataaaatatttaatgagacattggcacagtacaccttttgagatgtgcgaaataaaatatcatgtaaaacttccaatttttatagcaagacagtggataagacacagaactgcaaatgtaaatgaatattctgcaaggtattcaatattagataaagaat

SEQ ID NO: 226509 - DNA, 652 bp, Unknown
  Bacterial polypeptide expressing nucleotide sequence isolated from the Sargasso Sea
atgaagttaaccgaagatcaaattaaagaaataaaagagcagcaatctcagcaaaattcaacaaaaagagttacagctccagagctcgaaaaaattttatatgacgcaataccaatattagatcatggttttattagagttatagattatatgggagatgatacttcaatagttcaagctgctagagtatcctatgggaagggaacaaagaaagtttcaaccgattctggtttaataaaatatttaatgagacattggcatagtaccccttttgaaatgtgtgagataaaatatcacataaagcttccaatttttatagccagacaatggataagacatagaacagcaaatgttaatgaatattctgcaagatattctattttagataaagaattttatcttccaaaggctgaacatttggcagcacaatcccaaaataatcggcaaggaagaggacaagtgctagaaggagataaagcaaaaaaagttctagatttactcaaaagtgatgcggagcaaacctataaaaattatgagatgatgctcaatgaaaagtacgatggatctactattgataaaaactctccaggtttagcaagagagctagcaagaatgaacttaacattgaatacttacacacaatggtattgga

SEQ ID NO: 226510 - DNA, 703 bp, Unknown
  Bacterial polypeptide expressing nucleotide sequence isolated from the Sargasso Sea
aatgagacattggcatagtactccattcgaaatgtgtgagataaaataccatataaaattaccaatatttatagctcgacaatggattagacacagaactgccaatgtaaatgaatattccgcaagatactcaattttagataaagaattttatttacctgcaaaagaaaacttagctgcacaatctatcagtaatagacaaggtagaggagatgtgttggagggcaaacaagcagaagatgttttagaacttttaaaaagtgatgctgagagaacttacgacaattatgaaacaatgcttaatgaaagatttgatggctcaactatagatgaaaataaaaaaggcttagcaagagaacttgcaagaatgaatttgactttaaatacctacactcaatggtattggaaaactgatcttttaaacctaatgaattttttaagattaagagctgatagtcatgcacagtacgaaataagagtgtacgctgatataatgttagatacacttaaaaaatgggttcctataacttatgaggcttttatggattatagggttggaggcacagaagtatctgctaaaggaaaaactgttcttcaaaaatttttaaaaaataaaaatgtgtctttagaaagctctggtctgtctaaaagagagtggaatgaattaatggctgctttcgatttaaaagagagaattttatag

SEQ ID NO: 226511 - DNA, 652 bp, Unknown
  Bacterial polypeptide expressing nucleotide sequence isolated from the Sargasso Sea
atgaaattaactactgaacaagctcaagaaattaaagatcaacaaaatcaagataataaaacaaagagagttactgctccagaattagaaaaaatattatatgaggctatacctcttttagatcatggctttataagggttgttgattatatgggcgatgacacttcaattgttcaggcagctagagtttcttatggaaaaggaacaaaaaaagtatcaaccgattcaggattaataaaatatttaatgagacactggcatagcacaccttttgaaatgtgtgaaataaaatatcacgttaaacttcctatttttatagcaagacaatggattagacatagaacagcaaatgtaaatgaatactctgctaggtattctatattagataaagaattttacttaccagcccaagaacatttggcagcacaatctaaaagtaacagacaaggaagaggagatgtgcttgaaggagatcaagcaaaaaaagtcttagaccttcttaaaaatgatgcagaaagaacatatgataattatgaaatgatgttgaacgaaagatatgatggatcaacaattgatgaaaatggagttggtttagctagagagttagcaagaatgaacttaactttaaacacttatacccagtggtattgga

SEQ ID NO: 226512 - DNA, 703 bp, Unknown
  Bacterial polypeptide expressing nucleotide sequence isolated from the Sargasso Sea
atgagacataggcacagcacaccatttgagatgtgtgaaataaaatatcatattaaacttccaatttttattgcgagacaatggatcagacacagaacagcaaatgtaaacgaatattctgccagatattcaattatggataaagaattttatgttccatcaaaagaaaatttagccgcacaatcttcaaataatagacaaggaagaggagatcttattaatggaaaacaagcagataatattctaaaaattttaaaagaagacgcggaaaggaattatcaacattatgaagaaatgcttaacgaaaagtacgatggaagcattatagatgataaaaaacaaggattggctagggaacttgccagaatgaatttgacacttaattcttatacacaatggtattggaaaacagatttattaaatttactaaattttttagcattgagggcagatagtcatgctcagtttgagattagagaatatgcaaatacaatgctggatactgttaagaaatgggttccaataacttttgatgcctttattgattatagagttggaggaatggaactttcagcaaaaggcaaaatagtaattcaaaaaatgattaaaggtgaaaaatgtgaaattaatagttctggactttcaaaaagagaatggaatgaattaatggactcctttggttttaagcaaaatttagtataat

SEQ ID NO: 226513 - DNA, 817 bp, Unknown
  Bacterial polypeptide expressing nucleotide sequence isolated from the Sargasso Sea
catgaaacttaccaaagaacaatcagaagaaataaaaaatcaacaatctcaaagcaatcaaactaaaagagttacggtaccagagcttgaagatattctttatgaagcgattcctgctttagaccacggttttgttcgggtagtggactatatgggggatgatacttcaattgttcaatcagctagagtttcttatgggaagggtaccaaaaaggtttcaactgataaaggattaattaaatatttaatgaggcactggcatagcactccatttgagatgtgtgaaataaaatatcacataaagttaccaatatttattgctcgacaatggattagacatagaactgctaatgttaatgaatattctgcaagatattctattttggataaagaattttatttacctacacaagaaaatttagctacccaatctactagtaatagacaaggtagaggagatgtattagagggcgaacaagcaaaggaggttttagaaattttaaaaaatgatgctgtgagaacttatgataactatgaaacaatgcttaacgaaagatttgatggctcaactatagatgaaaataaaaaaggcctagcaagagaacttgctagaatgaatttgactttaaatacctatacccaatggtattggaaaactgatcttttaaacctaatgaattttttaagattaagagctgatagtcatgcacaatatgaaatacgagtttttgcagacataatgctagatacagtaaaaaaatgggttcctataactcatgaggcttttatggattatagagttggaggtacagaagtt

SEQ ID NO: 226514 - DNA, 652 bp, Unknown
  Bacterial polypeptide expressing nucleotide sequence isolated from the Sargasso Sea
atgaaattaactagcgaacaagcacaagaaattaaagatcaacaatcacaggaatataagactaaaagagtaacagcaccagaattagagaaaattctctatgaagctcttccaatattagatcatggatttattagggtagtcgattatatgggtgatgacacctcgatagttcagtcagctagagtttcttatggcaaagggacaaagaaagtctcaacagacgaaggattaataaaatacttaatgagacactggcatagcactccatttgaaatgtgtgaaattaaataccacgttaaacttccaatatttattgcaagacaatggatcaggcacagaactgcaaatgtaaatgaatactctgcaagatattcaattcttgataaagagttttatttaccagcacctgaacatttagcagcgcaatcgcagagtaatagacaaggaagaggtgatgttctcgaaggtgataaagctaaacaagttttagaacttttaaaaggagatgctgaacagacttataataattatcaaacaatgctcaatgaaagatatgatggatctgtgattgatgaaaatgcagtgggacttgctagagaacttgcaagaatgaatttaaccttaaacacctatacgcagtggtattgaa

SEQ ID NO: 226515 - DNA, 769 bp, Unknown
  Bacterial polypeptide expressing nucleotide sequence isolated from the Sargasso Sea
cgcaagagtttcttatggaaaagggactaaacaagtttcaacagatagtgggttaattaagtatcttatgcgtcactggcatagtactccatttgaaatgtgtgaaatcaaatatcatgtcaaattacccatctttattgctagacaatggatcagacatcgaacagcaaatgtaaatgaatattcagcaagatattcaattttagataaagaattttatttaccagatccagaaaatttagctgctcaatcagttgcaaacagacaaggccgaggtgatgttattaatggggaacaagcaaaagaagttttagaacttttaaaaaatgatgcagaaagaacatatcataattatgagaccatgctaaatcaaagatatgatggatctaccattgatgagaataaaaaaggtctagctagggagttagcgagaatgaatttaactttaaatacatatacccagtggtactggaaaacagatttgcttaacctaatgaattttttaagattacgtgcagatcatcatgcacaatacgaaataagagtttatgcagatataatgttagatactttaaagagatgggttccaattacttatgatgcgtttatggattatagagtaggtggaacagaagtttcagccaaaggaaaaatcattattcagaaattaataaaaggaaaagaagttaattttgacaattctggactttcaaaaagagaatggaatgaacttatggaaacttttgaaattaaagataagatcgtttaa

SEQ ID NO: 226516 - DNA, 762 bp, Unknown
  Bacterial polypeptide expressing nucleotide sequence isolated from the Sargasso Sea
aatgaaattaacaaaagaacaagctcaagaaattagagatcaacaatctcaagaaaatttaactaaaagagtgaattcacctgaactagaaaaagtactttatgaagcaataccaatattagatcacggttttataagagtagtagattatatgggcaatgatacttctattgttcaagcagctagagtttcatatggaaaaggaacaaaaaaagttaatactgactcaggtctaataaagtatttaatgagacattggcatagtacaccctttgaaatgtgtgaaattaaatatcacattaaacttccaatatttatagcaagacaatggattagacataggactgctaatgtaaatgaatactctgccagatattcaattttagataaagaattttatttaccaaattcagaaaatttagcggctcaatctcaaagcaatagacaaggaagaggagatgttcttcaaggtgatcaagcaaaaaaagttttagaattattaaaaagtgatgctgaaaaaacttatagcaattatgaagagatgttaaaccaacgttatgatggaacagtcattgatgaaaataaaattggtcttgcaagagaacttgcaaggatgaatttaactttaaatacttatactcaatggtattggaaaactgatttattgaatctaatgaattttttaagattacgtgcagaccatcatgctcaatatgagattagagcatatgcagatgcaatgttagatacattaaaaaaatg

SEQ ID NO: 226517 - DNA, 497 bp, Unknown
  Bacterial polypeptide expressing nucleotide sequence isolated from the Sargasso Sea
tatgaaattaactaaagagcaaaaactagaaatagaagatcaacaatctcaaaaaaatcaaactaagagagtaactgctcctgagcttgaaaaaattctttatgaagcaatacctattttagatcatggttttataagagttgttgactatatgggtaatgattcttcaattgttcaagcagcaagagtttcttacggcaaaggaacaaaaaaagtctcaaccgatgcaggacttataaagtatcttatgagacattggcacagcacaccatttgaaatgtgtgaaattaaataccatgtaaaacttccaatatttattgcaagacagtggatcaggcatagaactgcaaatgtaaatgagtattctgctagatattctatattagataaagaattttatttacctgctccagaacatttagccgctcaatcaaaaagtaatagacaaggaagagggaatatccttgaaggagaaaaagcaaaagaggttttaaata

SEQ ID NO: 226518 - DNA, 462 bp, Unknown
  Bacterial polypeptide expressing nucleotide sequence isolated from the Sargasso Sea
aatgaaactaacaaaagaacaaaagcaagaaattgcagaccaacagtctcaaaaaaatcaaacaaaaagagtaacatcacctgaattagaaaaaattctctacgaagctattcctgttcttgatcacggatttgtaagagtagttgactacatgggcgatgatacttctatagtccaatccgctagagtttcatatggaaaaggaactaagaaagtttcaactgacgaaggattgattaaatatttaatgagacactggcattcaactccttttgaaatgtgtgaaattaaataccatgtaaaacttccaatatttattgctcgtcaatggatcagacatcgaactgcaaatgttaacgaatattcagcaagatattctattttagataaagaattttatattccagcgaaagaacaattatcagctcaatcaacgattaacagacaaggcaggggagattt

SEQ ID NO: 226519 - DNA, 465 bp, Unknown
  Bacterial polypeptide expressing nucleotide sequence isolated from the Sargasso Sea
actgaggtccgggcaaaaccagacacttcgggcggtcagcgtgggcatggaaaaccacctgtacaaggtttatcctgttctggatcatggttttgtgagagtggtagattacatgggtgacgatgctgcaatatgtcaagcggctcgtgtcagctatggccgcggtacaaagtcagtacaaaacgatgagggcctcatcagatatttaatgaggcattggcattcaacgccgtttgaaatgtgcgaagtgaagttacacgttaaattaccagtttttgttgctaggcaatggatccgccacagaacagccaatgtaaacgaatattcagcgcgttactctattcttgatcgggagttttatattcctgagccagaggcattggcggctcaatcagttataaataaccaaggtcgaggagaggtattgactggagaagaggcagaaaaagtgctgcgattgctgaa

SEQ ID NO: 226520 - DNA, 760 bp, Unknown
  Bacterial polypeptide expressing nucleotide sequence isolated from the Sargasso Sea
cgctagggtatcttatggcaaggggacaaaaaagatttcaaatgaccaaggcttaataaattatctaatgcggcatcgccatagtactccattcgaaatgtgtgaaataaaatttcacgtaaaactgccaatttttatagcccgccagtggattagacacagaacggccaacgttaacgagtattcggcgcgttattcagttttagatagggagttttacgttcctgatcctaaaaaccttgctgttcagtctgactcgaatcgtcagggaaggggcgaaacattaactgcagaggacgcgcaaagggttcttgaaattttgcgcggggatgctgaatcaacttataaccactatattgagatgttaaatgaaaatgaatctggggaagttattgataaatcaaaaaagggactaacgagagagctcgctagaatgaatttaaccctcaacacctatacgcagtggtattggaaaatagacctacacaatcttttacattttttgagtttgcgagctgatgaacatgcgcagtatgaaatacgcgcttatgctgaggaaatattaaaagttgtaaagcgctggtgcccaattacttaccaagcgtttatcaactatcgaataaaaggtgtcgcgctatccgggcaagccctcgaggtaatcaaagcaatagttggaggagaaaaaattgagcttgagaacagtgggctcagtaagagggaatggagggagttgatggcaacattggagcttgatgaataa

SEQ ID NO: 226521 - DNA, 913 bp, Unknown
  Bacterial polypeptide expressing nucleotide sequence isolated from the Sargasso Sea
catgaaattaactaaagaacaagctcaagaaataaaagatcaacaatctcaagaaaatatcacaaaaagagttggtgcaccggaactcgaaaaaatattatatgaagtattaccaattttagatcatggatttataagagtcgtggactatatgggaaatgacacttcaattgtacaggcggcaagagtttcttatggaaagggaacaaaaaaagtaaataccgattcaggtttaataaaatatttaatgagacattggcacagtactccctttgaaatgtgtgaaattaaatatcatattaaacttccgatatttatcgctcgacaatggattaggcatcgaactgcaaatgttaatgagtactctgctagatattcaatcttagataaggaattctatttaccagcaccagaacatttggcagcacaatcacaaagtaatcgacaaggaagaggaaatattcttgaaggagaaaaagcacaaaaagttttagatcttttaaaaggagatgctgaacaaacatatagcaattatgaaatgatgcttaatgaaagatatgatgggtctgtgatagacaaaaatgcagttggtttagcaagagaacttgcaagaatgaatttaactttaaatacatatacccagtggtattggaaaacagatttattaaatcttatgaattttttaaaattaagagcagatcatcatgcacaatatgaaataagagtttatgcagatgcaatgctggatactttgaaaaagtgggtaccaattacttacgaggcctttatggattatagagttggaggattagaaatttctgcaaacggaaaaaaagtaattcaaaagttaattaaaggagaagaaatttcaatagaacattctggtctttcaaaagagagtggaatgaactaa

SEQ ID NO: 226522 - DNA, 592 bp, Unknown
  Bacterial polypeptide expressing nucleotide sequence isolated from the Sargasso Sea
aatgaaattaactaaagaacaagaacaagagataaaagatttacagtctcaagaaaataaaactaagagagtagttgccacagaacttgaaaagattctttatgatgcaatttcagtattagatcatggatttgtgagggttatagattacatgggagacgatacatctatcgttcaagcagcaagagtatcatatggaaaaggtacaaaaaaagtatctacagatagcggattgataaaatatttaatgcgtcattggcacagcacaccatttgaaatgtgtgaaattaaatatcatgtaaagcttcctatatttattgcaagacaatggataagacataggacagctaatgtaaatgaatactcagcacgttattcaattttagataaagaattttaccttccaaaaaatgaacacttagctgcacaatcaaaaagtaacagacaaggtagaggagaggtgctccaaggtgaacaagcaaaaaaggttttaagtcttttaaaaaatgatgctgaacgaacatacgaaaattatgaaacaatgttaaatgaaagatacgatggttcagttgttgatgaaaaagaaactgga

SEQ ID NO: 226523 - DNA, 910 bp, Unknown
  Bacterial polypeptide expressing nucleotide sequence isolated from the Sargasso Sea
cacaaatctcaaagcaatcaaacaaaaagagttactgctcctgaccttgaaaaaatcctatatgaagcaattccagctttagatcatggttttgtaagagttgttgattacatgggtgacgacacatccatagttcaatcagctagagtatcgtatggaaaaggaaccaaacaagtttcaactgacaaaggtttaataaaatatttgatgagacattggcacagtactccatttgaaatgtgcgaaattaaatatcatgttaagcttccaatatttattgcaagacaatggattagacatagaacagcaaatgttaatgaatattctgcaaggtattcaattctggataaagaattttatctgccatcacacgaagatttagctgctcaatcaactagtaatagacagggtagaggagatgtcttggaaggaaaacaggcagaggaagttttggaacttttaaaaagtgatgcggagagaacttatgaaaattatgagactatgcttaatgaaagatttgatggatcaactattgatgaaaataaaaaaggtttagctagagaacttgcaagaatgaatttaacattgaatacctatactcaatggtattggaaaactgatttattaaatttaatgaattttttaagattaagagctgatagtcatgctcaatatgaaattagagtttatgctgatataatgttagataccgtaaaaaaatgggtccctataacttatgatgcttttatggattatagagttggtggaacagaagtttctgcaaaaggaaaagttataattcaaaaacttatcaaaggggaggatgttgatactgaaagttctggtctatccaaaagagaatggaatgagcttatgattgcttttgaccttaatgataaaattatttaaa

SEQ ID NO: 226524 - DNA, 763 bp, Unknown
  Bacterial polypeptide expressing nucleotide sequence isolated from the Sargasso Sea
atgaaacttaccaaagaacagacagaagaaataaaaaatcaacaatctcaaagtaatcaaactaaaagagttacagtaccagagcttgaaaatatcctatacgaggcaattcctgcgttagaccatggttttgtaagagtagttgattatatgggggatgatacctcaattgttcaatctgcgagagtctcgtatggaaaaggaaccaagcaagtttcaactgataagggactgattaaatacttgatgaggcattggcatagcactccattcgagatgtgtgaaataaaatatcatataaaattaccaatatttattgctcgacaatggattagacacagaactgctaatgttaatgaatattctgcaagatattcaattttagataaagaattttatttacctttacaagaaaacttagctgctcaatctactagtaatagacagggcagaggagatgtattagagggcaaacaagcagaggaagttttagaacttttaaaaagtgatgcagagagaacatatgataattatgaaacaatgcttaatgaaagatttgacggatcaactatagatgaaaataaaaaaggcttagcaagagaacttgcaagaatgaatttgactttaaatacctatacccaatggtactggaaaactgatcttttaaaccttatgaattttttaagattaagagctgatagtcatgcacaatacgaaattagagtttatgcagatataatgctggatactggaaaaaatgggt

SEQ ID NO: 226525 - DNA, 638 bp, Unknown
  Bacterial polypeptide expressing nucleotide sequence isolated from the Sargasso Sea
aatgaaattaacaaaagaacagcaacaagagataaaagatttacaatctcaagaaaataaaactaaaagggttattgcaccagagttagaaaaaatattatttgaggttataccaattcttgatcatggttttgttagagtaattgattatatgggagacgatacctctattgtgcaggctgcacgggtttcctatggcaagggtacaaaaaaagtttcaacagacgcagggttaattaaatatttaatgaggcattggcatagtacaccttttgaaatgtgtgaaattaaatatcacattaaacttccaatttttattgcaagacaatggataagacacaggactgcaaatgtaaatgaatattcagcacgatattctattcttgataaggaattttatttaccttcacaagaaaacttagctgcacagtcaaaaaataacagacaagggagaggtgaaataattagcggagagcaagcaaaagaagttttaaaattattaaaaactgatgctgaaagaacgtatgataattacgagacaatgttaaatgaaagatatgatggatcggtaattgatgagaaaaaatcaggtttggctagagaacttgcaagaatgaacttaactttaaatacatata

SEQ ID NO: 226526 - DNA, 712 bp, Unknown
  Bacterial polypeptide expressing nucleotide sequence isolated from the Sargasso Sea
catgaaattaactaaaaaacaggctgaagaaataaaaaatcaacaatctcagaccaatcaaactaaaagagttacagccccagagcttgaaaaaattctttatgaggcaattccagctttagatcatggttttgtaagagtaattgattatatgggcgatgatacctcaattgtacagtctgcgagagtctcatatggtaaaggaacaaaacaggtttcaactgacaaaggtttaataaaatatttaatgaggcattggcacagtactccatttgaaatgtgtgaaattaaatatcatgttaagcttccaatatttattgctagacaatggattagacatagaactgcaaatgttaatgaatattctgcaagatattcaattttagataaagaattttatttgccatcaaaagaaaatttagctgctcaatcaatcagtaataggcaaggaagaggagatgttttagaaggtaaacaagcagaggaagttttagaacttttaaaaagtgatgcagaaagaacttatgacaattatgaaacaatgcttaatgaaagatttgatggctcaaccatagatgaaaacaaaaaaggtttagcaagagagctcgctagaatgaatttaacattaaacacttatactcaatggtattggaaaactgatcttttaaatctaatgaactttttaagattaagagcagatagtcatgcacag

SEQ ID NO: 226527 - DNA, 856 bp, Unknown
  Bacterial polypeptide expressing nucleotide sequence isolated from the Sargasso Sea
tttatacgaagcaatcccaattttagatcatggatttataagagttgtagattacatgggtgatgatacatctatagttcaagcggcaagagtttcttatggaaaaggaacaaaaaaagtttcaactgacgcaggtttaattaaatatttaatgagacattggcacagtacaccttttgaaatgtgcgaaattaaatatcatattaaattacctatattcatagcaaggcaatggataagacatagaacagcaaatgttaatgagtactcagcaagatattctatattagataaagaattttatttaccttctgcagaacatttagctgctcaatctcaaatcaatagacagggtagaggagatgttcttaagggagagcaagcaacaaaagttttagatttattaaaaaatgatgctgaaagaacttacaataattatgaagaaatgcttaatcagagatatgatggtacggtgattgatgaaaaaaaagttgggttagcaagagaattagctcgtatgaatttgactttaaacacttatactcaatggtattggaaaacagatttattaaatttaatgaattttttaagacttagagcagatcgtcatgcacagtatgaaataagagaatatgctgatgcgatgttagatactgtaaaaaaatgggttccaattacttatgatgcatttatggattatagagttggtggaacagaagtttctgccaaaggaaaaaaagttattcaacaattaattaaaggtgaagaagtatcaatagagcaatctggtttatctaaaagggagtggaacgaattgatggaagcttttgatctcgaagataaatctttaaaatga

SEQ ID NO: 226528 - DNA, 858 bp, Unknown
  Bacterial polypeptide expressing nucleotide sequence isolated from the Sargasso Sea
aaattctttatgaagcgattcctattcttgatcatggttttatacgagtcgttgactatatgggagatgacagttcaatcgttcaatccgcaagagtgtcttatggaaagggaactaaaaaagtttcgacagatgctggcttaattaaatatctcatgagacatcgccacagtacaccttttgaaatgtgtgaaataaaataccatgtcaaacttcctatttttgttgccagacaatggataagacacagaactgcaaatgtaaacgaatactccgcaagatactctatcttggataaagaattttacttgccttcaaaagagaatttagcagctcaatcaacgagcaacagacaaggaagaggaacagttattaatggaaaacaggcagataatattttggaaatgttaaaaaaagatgctgaacaaacatataataattatgagaccatgcttaatgaaagatatgatggaagtataatagataaaaaaaaccagggcttggcaagagagctagcaagaatgaatttaactttgaatacttatacacagtggtattggaaaaccgatcttttaaatttattaaattttttatcacttcgtgcagatagtcatgcgcaatatgaaatcagggcatacgctgacgcaatgacagaaactttaaaaaaatgggttccaataactttcgaggcttttatggattacagggttggggcaatggaattgtctgccaaaggtaaagctgtaatacaaaaaatgatcaaaggcgagtcttgtgattttgaaagctcaaaactttctaaaagagaatggaatgagttaatgcagtctttgggttttaatgaaaaaatgctttaat

SEQ ID NO: 226529 - DNA, 457 bp, Unknown
  Bacterial polypeptide expressing nucleotide sequence isolated from the Sargasso Sea
atgaaactaacaaaagaacaatcagcagatattaaaaatcaacaatctcaaagtaattcaacaaaaagagtaacagtaccacttttggaagaagttctatacgaggcgataccagcacttgatcatggatttgttagagttgttgattatatgggggacgatacttcaatagttcaatctgcaagagtttcatatggcaaaggaacaaaaaaagtttccacagatgcaggtttaataaaatatttaatgcgacattggcatagtacaccttttgaaatgtgtgaaattaaatatcatataaaattaccaatttttatagctcgtcaatggataagacacaggactgcaaatgttaatgaatattctgcaagatactcaattttggataaagaattttatttaccaactattgaaaatcttgcagcacaatcttcatctaatagacaaggtagaggtg

SEQ ID NO: 226530 - DNA, 799 bp, Unknown
  Bacterial polypeptide expressing nucleotide sequence isolated from the Sargasso Sea
catgggcgatgatagttccatagtacaatctgcaagagtttcttatggaaagggtacaaagaaggtttcaactgatgaaggattaattaaatatttaatgagacattggcattcaacaccttttgaaatgtgcgaaattaagtaccatgttaaacttcctatttttattgctcgtcaatggattagacatagaacagcaaatgttaatgagtactcggcaagatattcgattttagataaagaattttatattccttctaaggatcaactttcagcacaatcaacatccaatcgccaaggtagaggagatttaatcactggaaatcaagcagatgaggttttaaaaattcttaaagatgatgctacaaggacttatgataattatgaaaaaatgctcaatgaacgatatgatggaaccactatagatgaaaataaagctggtcttgcaagagagcttgctagaatgaatttaacattaaactcttatactcaatggtattggaaaacagatttgttaaacttacttaatttcttgtttctaagagcagatagtcacgcccaatatgagataagagtttatgcagaagcaatgctcgatacagtaaaaaaatgggttccaatcactcatgcagcatttttagattacagggtgggagctgttcatgtttctgccaaaggtaaaaaggtaatccaacttatggcaaaaggcgaaaaagtttctcatgaaagttcaggcttatcgaaacgagaatggaatgagttaatgaattcttttggttttactgaaaagactgtttaa

SEQ ID NO: 226531 - DNA, 352 bp, Unknown
  Bacterial polypeptide expressing nucleotide sequence isolated from the Sargasso Sea
atgccagtaaacaaagaacaacttgaagaaattgaagccttaaggtctgaaatatcagaaacagctcgtgttacagcgcctgaattagaagcagttttgtacaagccaattgaagtgctcgatcatggctttattcgtgtcattgactatatgggggatgacagttcaatagtgcagtcggcaagagtatcatatggtaaaggcaccaagaagatttcaaacgacaaaggacttattaaatacttaatgaggcaccgtcactcgacaccgtttgaaatgtgtgaaattaagtttcatattaaacttccaattttcatagctcggcaatggatacgacacagaacagcaaacg

SEQ ID NO: 226532 - DNA, 402 bp, Unknown
  Bacterial polypeptide expressing nucleotide sequence isolated from the Sargasso Sea
catgaaattaactaaagaacaatcagatgaaatcaataatcaacagtcccaaagcaatgagactaaaagggtcactgcccctgagctagaaaacatactttatgaagcaattccagctttagatcatgggtttgtcagagtagttgattacatgggtgacgatacatcaattgtccaatctgcaagagtttcttatggaaaaggaactaagcaagtatctacagataaaggtttaataaaatatttaatgagacattggcatagtacaccatttgaaatgtgtgaaattaaatatcatattaaattaccaatttttattgcacgtcaatggattagacatagaactgcaaatgtaaatgagtattctgcaagatattcaatcttagataaagaattttatct

SEQ ID NO: 226533 - DNA, 839 bp, Unknown
  Bacterial polypeptide expressing nucleotide sequence isolated from the Sargasso Sea
gttgcctgctcttgatcatggttttgtaagagtcgttgattatatgggagatgatacttcaattgttcagtcagctagagtttcgtacggcaaaggtactaaacaagtttctacagatgcaggtttaattaaatacttaatgcgacattggcatagtacgccattcgagatgtgcgaaattaaatatcatattaaactaccaatttttattgctcgtcaatggattagacatagaactgcaaatgtaaatgaatattctgcaaggtattcaattttagataaagaattctatctaccaacaaaagaaaatcttgctgctcaatcaacatccaatagacaaggtagaggagatattttggaaggtgatcaagcaaatgaagttttagaactgttaaagaatgatgctgagagaacttatgcaaattatgaaacgatgctaaatgaaaaatatgacggatccactatcgatgaggataaaaaaggtttggcaagagaacttgcaagaatgaacttgacattgaatacttatactcaatggtattggaaaacagatcttttaaaccttatgaattttttaagattaagagcggatcatcatgcacaatacgagattagagtttatgcagatattatgttagatacattaaaaaagtgggttccgataacttatgatgcttttatggattacagagtaggtggaacagaagtatcggctaagggaaaaataattattcaaaatttggctaaaggaaaaaaaatttctttagaagattcaggtttatcaaaacgagaatggaatgaattaatggaggcttttgattttaaagataggttgattt

SEQ ID NO: 226534 - DNA, 795 bp, Unknown
  Bacterial polypeptide expressing nucleotide sequence isolated from the Sargasso Sea
ggtaactgtaacagagcttgaaaatattctttacgatgcaattcctgcgttagatcacggttttgttcgtgtagtggactatatgggggatgatacctcaattgttcaatctgccagagtttcatatggaaaaggaactaagcaagtttcaactgacaaaggactaattaagtatcttatgagacactggcatagcacaccgtttgaaatgtgtgaaataaaataccacatcaaacttccaatattcattgcacgtcagtggataagacatagaactgcaaacgttaatgagtattcagcaagatattcgattttagataaagagttttatttaccatctccagagaatttagctgcgcaatctactagtaacagacaaggaagaggagatatcttagaaggtaaacaagctaaggaagtattagagcttttaaaaagagatgctgaaactagttatgatgactatgaaaccatgttgaatgaaagatttgatggatctactattgatgaaaataaaaaaggtttagcgagagaacttgcaagaatgaatttaactttaaacacatacacccaatggtattggaaaactgatctattgaatttgatgaattttttaagacttagagctgacagccatgcacaatacgaaataagagtttatgcagatattatgctagatacactaaaaaaatgggttccaataacacatgaagcatttatggattacagagtaggtggcattgaagtttcatcaaaagggaagctaattttacaaaaacttattaatggtaagaa

SEQ ID NO: 226535 - DNA, 814 bp, Unknown
  Bacterial polypeptide expressing nucleotide sequence isolated from the Sargasso Sea
atgaaattaacaaaagaacaaataaaagaaattagagatcaacaaactcaacaaaataagacaaaaagagtaacagttccagagcttgaaagcattctttttgaggcaatgccagcattggatcacggattcgtaagagtcatagattatatgggagatgattcctcaattgttcaatcagcaagagtttcgtatggaaaaggtacaaaacaagtttcatcagatagcggattaataaaatatttaatgagacattggcatagtacaccttttgagatgtgtgaaattaagtatcacataaaattaccaatttttattgccagacaatggataagacatagaactgcaaatgtaaacgaatattcagcaagatattctattttagataaagaattttaccttccaactgctgaaaacttagctgcacaatcttctagtaacaggcaaggaagaggcgatattttagacgacaaacaagcaaaagaagttttagaattgttaaaaaatgatgcagaacaaacttataataattatgagacaatgttaaatcaaagatatgatggatcaacaattgatgaaaataaaaagggattagctagagagcttgcaagaatgaatttaactcttaatacttatactcagtggtattggaaaactgatttgttaaatctaatgaactttttaagactcagagcagatagtcatgcacaatatgaaataagagtattcgcagatataatgttggatactcttaaaagatgggtgcctattacttatgaagcatttatggattatagagttggaggtacagaag

SEQ ID NO: 226536 - DNA, 846 bp, Unknown
  Bacterial polypeptide expressing nucleotide sequence isolated from the Sargasso Sea
catgaaattaaccaaagaacaatctgcagaaattaagaatcagcagtctcaaagtaataaaacaaaaagggttgtagtatcagagttggaaaatattctttatgaggcaattccagctttagatcatggttttgtaagggtagttgattatatgggtgatgatacatctatcgttcaagctgcaagagtttcttatggaaaaggaactaaacaggtatcaacagattctggattgataaaatatttgatgcgtcattggcacagcacaccatttgaaatgtgtgagattaaatatcatatcaaattaccgatttttatagcacgtcaatggataagacacagaactgcaaatgttaatgagtattctgcaagatattctattttagataaagaattttatttaccagcttcagaaaatttagcagctcaatcaacaagtaatagacaaggaaggggagatgttcttgagggaactcaagcaaaagaggtcttagagcttttgaaaaatgatgctgaaagaacttactccaattatgaaaccatgcttaatgaaagatacgatggatccactatagatgataataaaaaaggtttagccagagaacttgctagaatgaatttaactctaaatacttacacacaatggtattggaaaacagatcttttaaatttaatgaattttttaaggttgagagcagatcatcatgctcaatatgaaattagagtttatgctgacataatgttggatacattaaaaaagtgggtaccaataactcatgaagcttttatggattatagagtaggtggtacagaagtttctgccaaaggaaatgttgtaattcaaaa

SEQ ID NO: 226537 - DNA, 361 bp, Unknown
  Bacterial polypeptide expressing nucleotide sequence isolated from the Sargasso Sea
tatgaaaaacaaacaatcaaatgaaataaaaaatcttaggtctaaagtaaaaaaaacactaagagtcacttcatcttctttagaaaacattctttataaaccttttaaagttttagattcaggttttataagagtaattgattacatgggagacgattcagcaatagttcaatctgctcgtgtttcttatggagaaggtacaaaaaaagtatcaaatgataaaggattaataagatatctaatgaaaaattggcatacaacaccttttgaaatgtgtgaaattaaatttcatattaaactccccatttttattgcaaggcagtggataagacatagaactgcaaatgttaatgaatattca

SEQ ID NO: 226538 - DNA, 397 bp, Unknown
  Bacterial polypeptide expressing nucleotide sequence isolated from the Sargasso Sea
atgaaactaacaaaagagcaaaaacaagaaatagccgatcaacaatctcaaaaaaatgagactaaaagagttacctcgcctgaattagaaaaaattctatacgaagctttgccagttttagaccatggatttgtaagagtgatagattatatgggtgatgatacttctattgtgcaatcagctagagtttcatacggcaagggaacaaaaaaagtttcaactgacgaaggtttaataaaatatttaatgagacactggcattcaacaccttttgaaatgtgtgaaataaaataccatgtaaaacttccaatttttattgctagacaatggataagacatagaactgctaatgttaacgaatattcagcaagatattcaatattagataaagaatttt

SEQ ID NO: 226539 - DNA, 505 bp, Unknown
  Bacterial polypeptide expressing nucleotide sequence isolated from the Sargasso Sea
catgaaacttactaaagaacaagaaaaagagataaaagatttacaatctcaacatcatcaaactaagagagttacggctcctgagttagaaaaaatactttatgaacctatttcaatattagatcatggctttgtgagggttattgattacatgggtgatgatacatcaatagttcaagcagcaagagtttcatatggaaaaggcactaagcaagtctcaacggactcaggattaatcaaatatttaatgagacattggcacagcactccatttgaaatgtgtgaaattaaatatcatgtaaaactacctatatttattgcaagacaatggataagacacagaactgcaaatgttaatgagtattcggcaagatattcaattctagataaagagttttatcttccctccccagagcatttagccgctcaatccaaaaacaatagacaaggaagaggaaaaattattgaaggagagcaagctaaaaaagttttagatttgttaaaa

SEQ ID NO: 226540 - DNA, 919 bp, Unknown
  Bacterial polypeptide expressing nucleotide sequence isolated from the Sargasso Sea
ttgcagatcaacagtcccaaaaaaaccaaacaaaaagggttacttcccccagaattagaaaaaattctttacgaagctctacctgtcttggatcacggatttgttagagttgtagattatatgggggacgatacatctattgtccaatctgcaagagtttcttacggaaaaggaactaaaaaagtctctaccgatgaaggtttaattaaatatttgatgagacattggcattcaactcctttcgagatgtgtgaaataaaatatcacgttaaacttccgatatttattgctcgtcaatggataagacatagaacggcaaatgttaatgagtattctgccaggtactcaatattggataaagaattttatcttccggccaaagaacagttatctgctcagtcaacttcaaatcgtcaaggaagaggagatttaattacaggcaaacaagctgatgaagttttacaaattttaaaagatgatgctacaagaacttatggtaattatgaaaaaatgctaaatgaaaaatttgatggcacaacaattgataaaaataaagctggtcttgcaagagaacttgctagaatgaatttaactttaaactcatatactcagtggtattggaaaactgatttactaaatttattgaattttttgtttcttcgagcagatagtcacgctcaatatgaaataagagtttacgctgataaaatgttagagacagtaaaaaaatgggttccaataactcacgctgcatttttagattatagagtaggggcagttcacgtttcagctaaaggaaaaaaagtaattcagcaaatggctaaaggtgaaaagattgatattgaaagttcagggctatcaaaaagagagtggaatgagttaatgacttcttttggatttactgaaaagcaagtttaat

SEQ ID NO: 226541 - DNA, 753 bp, Unknown
  Bacterial polypeptide expressing nucleotide sequence isolated from the Sargasso Sea
aaagaacaagaacaagagattaaagagcaacaaagtcaagaaactagcacaaaaagagttaccgcacctaatcttgaaaaaattctctatgaagcaatacccattctggatcatggttttataagagttgttgattatatgggcaacgatacatctatagttcaggcggcaagggtttcttatggaaaaggtacaaaaaaagtttcaaccgatgcaggtctaataaaatatttgatgagacattggcatagcactccatttgaaatgtgtgaaataaaatatcatgtaaagttgccaatctttatagcaaggcaatggattagacatagaacagcaaatgttaatgaatactctgcaagatattcaattttagacaaagagttttatttgcctaaaacagaaaatttagctgctcaatctcaaagcaatagacaaggaagaggggatgtcctacgaggagaacaagctaaaaaagttttagaacttttaaaaaatgatgctgaacaaacttacgataattatgaaatgatgcttaacgagcgttatgacggttctgtaattaatgaaaaagaagtaggtcttgcaagagagcttgctagaatgaatttaactttaaatacttacactcaatggtattggaaaactgatttgcttaatttaatgaattttttaagattaagagcagaccatcatgcacaatacgaaataagaacttatgcagatgcaatgctagacacattaaaaagaatgggt

SEQ ID NO: 226542 - DNA, 538 bp, Unknown
  Bacterial polypeptide expressing nucleotide sequence isolated from the Sargasso Sea
atgacactatcgcaagagcagaaaaacgcaatattagagcaacagactcaaaaaaatacaacaaaaagagttacatcgccagaattagaaaatatcctctacgaagcaattcctgtactagaccatggatttgtgagagtggttgattatatgggtgatgacagttctgttgttcaagctgcgagagtttcgtatggaaaagggacaaaaaaagtttcaacggacagtggcttaataaaatatttaatgagacatcgtcatagcactccattcgaaatgtgtgaaataaaatatcatgttaaattacctatatttgtggcaagacagtggattagacacaggacagcaaatgttaatgaatactctgcgagatactcaattttagataaagaattttatttaccttcaaaggaaaatttagctgctcaatctaaaagcaatagacaaggaaggggagaggtaattaatggaaaacaagctgacaatattcttgatattttaaaaaaaggatgcagaacaaacctatgcaaattatgag

SEQ ID NO: 226543 - DNA, 457 bp, Unknown
  Bacterial polypeptide expressing nucleotide sequence isolated from the Sargasso Sea
atgaaattaactaaagagcaatcagaagaaataaaaaatcagcaatctcaaagtaatcaaactaaaagagttactgctcctgagcttgaaaaaatactatacgaagcaattccagctttagatcacggttttgttagagtaattgattatatgggtgatgatacatctatagttcaatcagccagagtgtcatatgggaaaggaacaaaacaagtttcaactgataaaggtttgataaaatatttgatgagacactggcacagcactccatttgaaatgtgtgaaattaaataccatgtgaagctcccaatatttattgctagacaatggattagacataggactgcaaatgtgaatgagtattctgcaagatattcaattttagataaagaattttatttaccatcaacggaaaatttagccgctcaatcatcaagcaatagacaaggtagaggag

SEQ ID NO: 226544 - DNA, 405 bp, Unknown
  Bacterial polypeptide expressing nucleotide sequence isolated from the Sargasso Sea
aatgaaactaacaaaagagcaaaaactagaaattttagaccaacaatctcaaaaaaacgttaccaaaagggtgacatctcccgaattagaaaaaattctttatgaagccatgccggttctcgatcatggttttgttagagtagttgactatatgggcgatgatacttcgattgtacaatcggctagagtttcatatggaaaaggtacaaaaaaagtttctactgatagcggtcttataaaatatttaatgagacacagacacagtactccatttgagatgtgtgagataaaatatcatattaaacttccaatttttatcgcaagacaatggattaggcatagaacggccaatgttaatgaatattctgcaaggtattcaattatggataaagaattttatgttcc

SEQ ID NO: 226545 - DNA, 497 bp, Unknown
  Bacterial polypeptide expressing nucleotide sequence isolated from the Sargasso Sea
aatgaagctcacaaaggaacaaaaacaagaaattttagaccaacagtctcaaaaaaatgttactaaaagagtaacatcacctgaattggaaaaaattctttatgaagccatgccggttttagaccatggatttgttagagttgtagattatatgggtgacgacacttcaattgttcaatcggcaagagtttcttatggaaaaggaacaaaaaaagtttctacagatagtggccttataaaatatttgatgagacatagacacagcactccttttgagatgtgtgaaattaaatatcatattaaattaccaatttttatcgccagacaatggatcagacatcgaacagctaatgtaaatgagtattcagcaagatattcaattatggataaagaattttatgttccttcaaaagaaaatttagccgcacaatctttaaacaacagacagggcagaggagatttaattaatggaaaagcagcagacagtattttaaaaa

SEQ ID NO: 226546 - DNA, 703 bp, Unknown
  Bacterial polypeptide expressing nucleotide sequence isolated from the Sargasso Sea
atgagacatagacacagcactcctttcgagatgtgcgaaatcaaatatcatattaaactaccaattttcattgcaagacagtggatcaggcatagaactgcaaacgtaaatgaatattcagcaagatattctattatggataaagaattttacgtcccgtcaaaagaaaatttagctgcccaatctacaaataatagacagggcagaggtgatttaattaatggaacacaagcagacagtattttaaaaattttaaaagaagatgctgaacgaaactataagcattacgaagaaatgcttaatgaaaaatatgatggcagtattattgatgataaaaaacaaggtttggcaagagagttggcaagaatgaatttaactctaaattcatacacccagtggtattggaaaacagatttattaaatttattaaattttttatctttaagagcagacagtcatgctcaatatgaaattagagaatatgcaaatgcaatgatggatagtgtcaaaaaatgggttccgataacttatgatgctttcatagattatagagtagggggcatggaactttcagctaaaggcaaaattgtaattcaaaagatgataaaaggtgaaaaatgcgacattagttcatcgggtttatctaaaagagaatggaacgaattaatggaatcttttggatttaaacaacatctcgcataac

SEQ ID NO: 226547 - DNA, 727 bp, Unknown
  Bacterial polypeptide expressing nucleotide sequence isolated from the Sargasso Sea
atgaaattaactaaagatcaaataaatgaaataaaagctcttcagtctcagtcaaatccaacaaaaagagttatagcaccagatcttgaaaaaattctatatgaagctattccagcattagatcatggttttgttagagttgtggattatatgggagacgatgcatcaatagtgcaggcagctagagtttcttatggcaaaggaacaaaacaagtttccacagataaaggtttaattaaatatcttatgagacactggcacagcaccccttttgaaatgtgtgaaataaaatatcacattaagctaccaatatttattgcacgccagtggataagacacagaacagccaatgtaaacgagtattccgcaaggtattctattttagataaagaattttatttaccttctgcagaaaatcttgctgcacaatcaaaaagcaacagacaaggaagaggggatttattagaaggtgctcaagcaaaggaagttttggagcttttaaaaaatgatgcagaaagaacttatgcgaattatgaaacaatgttgaacgaaaaatatgatggctctaccattgatactaaaaaaaaaggtttagcaagagaacttgcgagaatgaatttgacattaaacacttatacacaatggtattggaagactgacttacttaatcttatgaattttttaagattaagagcagaccatcatgcacaatatgaaattagagtat

SEQ ID NO: 226548 - DNA, 368 bp, Unknown
  Bacterial polypeptide expressing nucleotide sequence isolated from the Sargasso Sea
aatgaaattaactaaagaacaaaaacaagaaatattagaacaacagtctcaaaaaaacataactaaaagagtaacttctcctgaacttgaaaaaatactctatgatgcattgcccgtactcgaccatggttttgttagagtagttgattatatgggtgacgatacctcgatagttcaatctgccagagtatcttatggaaagggaaccaaaaaagtttctacagatagtggtttaataaaatatttgatgaggcatagacacagcactccttttgagatgtgcgaaataaaatatcatgtaaaacttccaatttttgttgcaagacaatggattagacatagaacagcaaatgttaatgagtactctg

SEQ ID NO: 226549 - DNA, 691 bp, Unknown
  Bacterial polypeptide expressing nucleotide sequence isolated from the Sargasso Sea
aaagtttcaacagatagtggtttaataaaatacttaatgagacacagacacagcactccatttgagatgtgtgaaataaaatatcacatcaaacttccaatctttattgcaagacaatggatcaggcatagaacagctaatgtaaatgagtattctgcaagatactcaattatggataaagaattttatgttccagaaagagaaaacttagcagcacaatctacgagtaacagacaaggtagaggtgatttgattaatggaaaacaggcagacaatattttaaaaattttaaaagaggatgctgaaagaaattatcaacattatgaagagatgctaaatgaaaagtatgatggaagcataattgatgataagaaacagggattagcaagagaacttgcaagaatgaatcttacactaaattcttatacacaatggtattggaaaacagatttattaaatcttttgaattttttagcgttaagggctgatagccatgcacaatatgaaattagggaatatgcaaatgttatgttgaatacagtgaagaaatgggttcctacaacatatgatgcttttattgactatagagttggaggtatggagctttctgctaaaggtaaaatagtaatacaaaaaatgatcaaaggtgagaaatgcgatatagagacttctggcctttctaaaagagagt

SEQ ID NO: 226550 - DNA, 673 bp, Unknown
  Bacterial polypeptide expressing nucleotide sequence isolated from the Sargasso Sea
aatgccgctatcgcccgaacagacggaagaaataaacgctcaacgcgagcagttagctaaaacgcgcagggttgtaagtgctggtatggaagagaaactatatacagcttttcaggttcttgatcatgggtttgtgcgggttgtcgattatatgggagatgatagtgcaatatgccaagccgctagggttagttatgggaagggtactaagtcagtccagaacgatgaagggcttataaggtatttaatgcgtcattggcattcaacgccatttgaaatgtgtgagataaaattacatgtcaaactgccggtttttgtggcgcgacaatggatccgacatcgaactgcaaatgttaatgaatattcagcacgatactcaatattagatagagagttttatataccaagccctgagcatattgcagcgcaatccgttataaataatcaggggcggggtgaaaccttaaaagatgaagaggcccaaactgttctagagcttttaaaagctgacagtgcaaggtgctatgataattatgagaaaatgatctctcaagacggacaacagggattagcacgcgaactggcgcgtatgaacttgccggccaacatttacacacaatggtattggaaggttgatttgcataatttacttcattttttgaggcttagggct

SEQ ID NO: 226551 - DNA, 432 bp, Unknown
  Bacterial polypeptide expressing nucleotide sequence isolated from the Sargasso Sea
catgaaattaactaaagaacaaataaacgaaataaaggctcttcagtcacaatctaatcaaacaaaaagagtaattgctccagaactagagaaaatattatatgaagctatcccagcattggaccatggattcgttagagtggtggattatatgggagatgacgcttcaatagttcaagcagctagagtttcttacggcaaaggtacaaaacaggtttcaactgacaaaggtttaatcaaatatttgatgagacattggcatagcacaccttttgaaatgtgtgaaattaaatatcatataaagttaccaatatttatcgcacgccagtggataagacacagaacagcaaatgtaaatgaatattcggcaagatattctatcttggataaagaattctatttaccttccccagaaaatctcgcagcacaatc

SEQ ID NO: 226552 - DNA, 387 bp, Unknown
  Bacterial polypeptide expressing nucleotide sequence isolated from the Sargasso Sea
actgacaaaagaacaaaagcaagaaattgcagatcaacaatcgcaaaaaaataccacaaaaagagttacttctccagaattagaaaaaatcctttatgaagcgataccagttttagatcatggatttgtaagagtagttgattacatgggtgatgatagttcaattgttcagtctgcaagagtttcttatggtaaaggtacaaaaaaagtttcgacagacgaaggtttgattaaatatttaatgaggcattggcattcaacaccatttgagatgtgtgaaattaaatatcatgtgaagcttccaatttttattgcacgacagtggataagacacagaaccgctaacgtaaatgagtactcagccagatattcaattttagataaaga

SEQ ID NO: 226553 - DNA, 459 bp, Unknown
  Bacterial polypeptide expressing nucleotide sequence isolated from the Sargasso Sea
agagttgttgattacatgggtaatgataattcaattgtgcaagctgccagagtgtcttatggcaagggcacaaaacaagtttcaactgacagtggtttaatcaaatatttgatgagacactggcacagtacaccatttgaaatgtgtgaaattaaatatcatataaaattaccaatctttatcgcaagacaatggataaggcataggacagctaatgttaatgagtattcagcaagatattcaattttagataaagaattctatcttcctgcttcagagaatttagctgctcagtcattaagtaatagacaaggaaggggagatgttttggaaggtgatcaagccaaagaagttttagatttgttaaagaatgatgcagagcaaacttataagaattatgaaataatgcttaatcaaaagtatgatggatcttcaattgatgataataaaaaatggttt

SEQ ID NO: 226554 - DNA, 577 bp, Unknown
  Bacterial polypeptide expressing nucleotide sequence isolated from the Sargasso Sea
atgaaattaacaaaagagcagttacaagaaatcaaagatcaacaagatcaggaaaataaaactaaaagagtaactgctcaagagttagaaaaaattttatatgaagcgattcctgtattggatcatggatttataagagttgtagattatatgggtaatgatacttcaattgtgcaagctgctagagtttcatatggaaagggaactaaaaaagttaacacagatgctggcctgataaaatatctaatgagacattggcataccaccccatttgaaatgtgcgaaatcaagtatcatgttaaactccctatttttatcgccagacaatggataagacatagaacagcgaatgttaatgaatattctgctagatattcaatattggataaagaattctatcttccaaataatgaaaatttagccgcacaatctaagaacaatagacaaggaagaggagaagtgctcgaaggcaatcaagctaaagaagttttagatttattaaaaaaggatgctgaaaaaacttataatgattatgaaatgatgcttaatgagcgatttgatggaacaacaatagaga

SEQ ID NO: 226555 - DNA, 502 bp, Unknown
  Bacterial polypeptide expressing nucleotide sequence isolated from the Sargasso Sea
tcgtcgccattaccatactacgcccagcgagatgatcgaactgaaatttcactgtgcaatgcccatgttcgttgcaaggcaatggattaggcataggactgcttcagtcaatgaatacagcggtcgctattcattgatgccactgcttttctataagccagagtcagagcatttttcgctacagagtgcagacaacgctcaaggtcgtcagaacgatgctgcttccaacgagctttacaaaaaagcagtgaaacactgggagaagatgcgcactgaggtttctcaggggtaccgctggatggtggaggaggatgtggcaagagaattagcgcgtattgatttacctttgtcgacgtatactcagtggtattggaagatcgacctacacaatctttttcattttttgacacttagagatgaccctcacgctcagtgggaaatccaggcctttgctcgcgtgatggcaggtaatgctaaaaagggtagctccattgagctatga

SEQ ID NO: 226556 - DNA, 698 bp, Unknown
  Bacterial polypeptide expressing nucleotide sequence isolated from the Sargasso Sea
acatagacacagcacaccatttgaaatgtgcgaaattaaatatcatgtaaagttaccaatatttgtagccagacaatggatcagacatagaacagccaatgttaatgaatattcagccagatattctattttagataaagaattttatttaccatcaaaagaaaatttagctgctcaatctacaattaatagacaaggaagaggagatttaatcaacggcaagcaagctgacagtattttaagcattttaaaaaaagatgcagaacaaacatatgcaaattatgaattgatgttaaatgaaaaatacgatgggagtaaaattaatgaaagcaacaaaggtttagcaagagaattagctagaatgaatttgactttaaatacttatactcaatggtactggaaaacggacttattaaatttattaaattttttgtcattgcgagcagacagtcatgcacaatatgaaataagagcatatgccgatgttatgattgattctttgaaaagatgggttccgataacatttgatgcttttatggattatagagttggtggtatggaattatctgccaaagcgaaaattatcattcagaaaatggtaaaaggagaaaattgtaaatttgaaaattcaaatctatcaaaaagagaatggaatgaattaatggaatcttttggttttactgaaaagataatttaat

SEQ ID NO: 226557 - DNA, 540 bp, Unknown
  Bacterial polypeptide expressing nucleotide sequence isolated from the Sargasso Sea
catgaaattaactaaagaacagacgctagaaataaaagagcagcaatcacaagaaaataaaactaaaagggtaacagctccagagcttgaaaagatactctatgatgcaattcctatattagatcacggatttattagagttgtggattatatgggagatgacacatcaattgttcaggctgcaagggtttcttacggcaaaggaacaaaaaagatttcaacagatgctggcttaataaaatatttaatgagacattggcacagtacaccttttgaaatgtgtgagattaaatatcatgtaaagctgccaatatttattgcaagacagtggattagacatagaaccgctaatgtaaatgagtactcagcaaggtattcaatattagataaagaattttatttacctgaactagaacatttagcagctcagtctcaaatcaatagacaaggaagaggggacgtccttaagggagatcaagcaaaaaaagttttagatttgctaaaaaatgatgctgaacgaacttattctaattacgaaac

SEQ ID NO: 226558 - DNA, 874 bp, Unknown
  Bacterial polypeptide expressing nucleotide sequence isolated from the Sargasso Sea
aatgactttatcagaagagcaaaaaaaagatattcaaaatcaaagaaacaaatttaatcaaacaagaagatccatatccaaaggaatggaagataatctttatagcattaataaaatattagatcatggttttataagagttatagattacatgggtaatgatgattcaatagttcaagcagctagagtctcatacggagaagggacaaaaaaatctcgggatgataaatcattaatcttttacttaatgagacattggcattccactccatttgaaatgtgtgaagtgaaatttcatgtaaaactacctgtatttgttgcaagacaatggataagacacaggacagcaaatgttaacgaatattcagcaagatattctatattagataaggagttttatattccaaaatttgaaaacttagcctctcagtctagttcaaataatcagggacgaggcgaaaaattagatgaggaagaagcaagcagggttattgaaattcttaaaaatgatagcttaaaaaattacgaaaattatgtggaaatgctatcccaagataataaaaaaggtctggcaagggaattagccaggatgaatttacctacaaatatttatactcagtggtattggaaaacagatcttcataatctatttaattttattaggctgagaaatgataaacacgcacaatatgaaataagggtatatgcagaagcaatagcaaaaatagtaaaatcttgggttccttttgcttatgaagcttttgaacaatatcaattaaacagcagtcaattgtctgcaaatggattatcttgcttaaaaagaataataggtggagaagacgttgccaagaaacatctggcatggaaaaagaga

SEQ ID NO: 226559 - DNA, 334 bp, Unknown
  Bacterial polypeptide expressing nucleotide sequence isolated from the Sargasso Sea
atgaataaaaataagaaggaaaatctaaaagaaaaaagctttcaaacttatagaccagtttctaaagaacttgaaaaaattctttacaagcctcttaaggtacttgaccgtggatttattagagtagttgattacatgggaaatgatgcatctgttgtgcaggccgcgcgggtttcttacggaaaaggtacaaaaaaaaaatctgaagacaataatctgattagatatctattaagacataaacatacaactccatttgaaatgtgtgaaattaagcttcacataaaattgcctatttttattgcgaggccaatggataagacacagaactgca

SEQ ID NO: 226560 - DNA, 739 bp, Unknown
  Bacterial polypeptide expressing nucleotide sequence isolated from the Sargasso Sea
atgaaattaactaaagaacaatcggaagaaatcaaaaatcagcaattacaaagtagtcaaactaaaagagttacagcaccagagcttgaaaaaatactctatgaagcccttccagctttagatcatggttttgttagagtcgttgattatatgggagatgacacttccatagtgcagtcagctagggtttcttacggaaaaggaactaaacaagtttcaactgacaaaggtttaataaaatatttaatgaggcattggcatagtacaccatttgaaatgtgtgaaattaaatatcatataaaacttcctatatttatagcgagacaatggattagacaccgaacagcaaatgttaatgaatattctgcaagatattcaattttagataaagaattttatttacctgctaaagaaaatttagccgcacaatcgattagtaatagacaaggtagaggagatgttcttgaagggaagcaggcagaggaagttttaaatctcctaaaaagtgatgcagagagaacttatgataattacgaaactatgcttaacgaaaaatatgatggttcaaagattgatgaaaacaaaaaaggtttagctagagagcttgcaagaatgaaccttaccttaaatacttatacacagtggtattggaaaacagatttattaaatttgatgaactttttaagattaagagctgatagtcatgctcaatatgaaataagagtttatgcagatataa

SEQ ID NO: 226561 - DNA, 563 bp, Unknown
  Bacterial polypeptide expressing nucleotide sequence isolated from the Sargasso Sea
catgaaattaactaaagaacaagcaaacgaaataaaagaccagcaatcacagagcaataaaactaaaagagtgacagcgccagaactagagaaaattatttatgaagcaattcccatattagatcatggttttattagagtggttgattatatgggagacgatacttctgtagtccaagcagctagagtttcttacggaaaaggtacaaaaaaagtttcaacagattctgggttaattaaatatttaatgagacattggcacagcacaccttttgaaatgtgcgagataaaatatcatattaaacttccaatatttattgcaagacaatggattagacatagaactgcaaatgtaaatgaatattctgcaagatattctatattagataaagaattttatttacctgaggccgaacatttagcagcacaatcacaaattaacagacaaggaagaggagatgttcttaaaggagaacaagcaaaaaaagttttagatttattgaaatatgatgcagaaagaacttataaaaattatgaacaaatgcttaacgaacgttatgatg

SEQ ID NO: 226562 - DNA, 907 bp, Unknown
  Bacterial polypeptide expressing nucleotide sequence isolated from the Sargasso Sea
acaatcccaaagcaatgaaacaaaaagggttactgctccagaacttgaaaaaattctttacgaagcaattccagcattagatcacggatttgttagagttgttgattatatgggtgacgatacatcaatagttcaatcagctagggtatcatatggaaaaggaacaaaacaagtttcaactgataaaggtttaataaaatatttgatgaggcactggcacagcactccattcgaaatgtgtgaaattaaataccatgttaagcttccaatatttattgccagacaatggattagacacagaactgcaaatgtaaatgaatattctgcaaggtattcaatactagataaagaattttatttgccatcaaaagaaaatttagctgctcaatcaactagcaacagacagggtagaggagatgtgttggaaggaaaacaggcagaggaagttttagaacttttaaaaagtgatgcggagagaacttatgataattatgagactatgcttaatgaaaggtttgatggatcaactattaatgaaaataaaaaaggtttagcaagagaactagctagaatgaatttgacactaaatacttacactcaatggtattggaaaactgatttattaaatttaatgaattttttaagattaagagccgatagtcatgctcaatatgaaattagagtttatgcagatataatgttagatactgttaaaaaatgggttcctataacttatgatgcttttatggattatagggttggtggaacagaggtttctgcaaaaggaaaattaattattcaaaaacttatcaaaggtgaaaatgtagatgttgaaagttctggtttgtccaaaagagagtggaatgaattaatgaatgcttttgatcttaaagataagttgatttaa

SEQ ID NO: 226563 - DNA, 775 bp, Unknown
  Bacterial polypeptide expressing nucleotide sequence isolated from the Sargasso Sea
catggttttgtgagagtagtggattatatgggagacgatacgtcaattgttcaatcggcaagagtttcttatggaaaaggaactaaacaggtttcaactgataaaggattaatcaaatacttaatgaggcattggcatagcactccatttgagatgtgtgaaataaaatatcatataaagttaccaatatttattgctcgtcagtggattagacacagaactgcaaatgttaatgaatattctgcgagatattcaattctagataaagaattttatttacctacacaagaaaacttagctgcacaatctactagcaatagacaaggtagaggagatgtactggaaggcaagcaagctgaagaagttttagagcttttaaaaagtgatgctgagagaacttatgataattatgaaacaatgcttaatgaaagatttgatggatcaactatagatgaaaataaaaaaggcctagcaagagaactggcaagaatgaatttgaccttaaatacctacacccaatggtattggaaaactgatcttttaaacttaatgaattttttaagattaagagctgatagtcatgctcaatatgaaataagagtttatgcagatattatgttggaaacagttaaaaaatgggttccgataacttatgatgcatttatggattatagagtaggagggacagaagtttcggctaaaggaaaagtaattattcaaaaacttattaaaggtgaaaatattgatatagatagttcagatatttctaaaagag

SEQ ID NO: 226564 - DNA, 820 bp, Unknown
  Bacterial polypeptide expressing nucleotide sequence isolated from the Sargasso Sea
tttataagagttattgattatatgggtgatgatagttcgattgttcagtctgcgagagtgtcttatggtaaaggaactaaacaagtttcaacagatagcggtctaataaaatatctaatgcgtcactggcatagtactcctttcgaaatgtgcgaaattaaatatcatgtaaaattaccaatatttatcgcaagacaatggattagacaccgtacagctaacgtcaacgaatactctgcaagatattcaattttagataaagaattttatttacccgatccacaaaatttagcagctcaatcaattgcaaacagacaaggtagaggtgatgtgattgagggagatcaggcaaaggaagttttagaactattaaaaaatgatgctgaaagaacatatgacaattatgaaactatgcttaatcagaaatttgatgggtccacaattgatgaaaataaaaaaggattagctagagagttagcgagaatgaaccttactttgaatacgtatacccagtggtattggaaaactgatcttttaaacttaatgaattttttaagattacgcgctgatcatcatgctcaatatgaaattagagtttatgcagatataatgttggatacattaaaaaaatgggttcctattacatacgatgcattcatggattatagagtaggtggtactgaagtctctgctaaaggaaaagttactattcaaaaattattaaaaggtgaggaaataaatttagaacaatctggactttcaaaaagagagtggaatgaacttatggaagcttttgaaattacagataagattgtttaat

SEQ ID NO: 226565 - DNA, 806 bp, Unknown
  Bacterial polypeptide expressing nucleotide sequence isolated from the Sargasso Sea
agattatatgggtgacgatacatctatagtgcaatcagccagagtttcatacgggaaaggcacaaaaaaagtttcaacagatacaggtttaataaaatatttaatgagacattggcatagcacaccttttgaaatgtgtgaaataaagtatcatgtcaaattaccaatattcatagcaagacagtggatcaggcatagaactgcaaatgtaaatgaatattctgcaagatattcaattttagataaagaattttatttaccatcgtcagaaaatttagctgctcaatcttcaagtaacagacaaggaagaggcgatgttttagaaggtgaacaagcaaaagaggttttaaagcttttaaaaaacgatgccgagagaacatatgataattacgaaactatgcttaatgagaggtttgatggttcaaaaatcgatgaaaataagaaaggattagcaagagaacttgcgaggatgaatttaacattaaacacatatacccaatggtattggaaaacagacttattaaatcttatgaattttttgagattaagagcagatcatcatgcacaatatgagataagaatttatgcagatattatgttaaatactttaaaaagttgggtaccaataacttatgaagctttcatggattacagagtaggtggaacagaagtttctgcaaaaggaaaagaaataataaaaaaaataatcaatggtgaaaatccttcattagaggaatctggattatcaaaaagagagtggaatgaactaatggaagcctttagtataagaaataaattaatttagt

SEQ ID NO: 226566 - DNA, 859 bp, Unknown
  Bacterial polypeptide expressing nucleotide sequence isolated from the Sargasso Sea
atgaaattaacaaaagaacaaactgaggaaataaaaaatcaacaattacagaacaattcaacaaaaagagtaacatctccagaattagaaaaaattttatatgaagctatgcccgcacttgaccatggatttgtaagagttgtagattacatgggagatgatacttcaatcgttcaatcagcaagagtctcttatggcaaaggcacaaaaaaagtttcgacagactctggattgataaaatatcttatgcgacattggcatagtacaccattcgaaatgtgtgaaattaaatatcatgtgaaattaccaatatttattgctcgacagtggattagacacagaacagcaaatgtaaatgaatattctgcaagatattcaatattagacaaagagttttatttaccaaatttaaataatcttgctgcacaatcaacaagcaacagacaaggaagaggaaatattttggagggtgatcaagctaaaaaagttttagaacttttaaaagatgatgcagaaagaacttataataattatgaaacgatgcttaatgaaagatttgacggctccactatagacgaaaataaaaagggactagcaagagagcttgcaagaatgaatttaacattgaacacatacactcagtggtattggaaaacggatttgttgaatttaatgaattttttaaggttaagagctgatcatcatgctcaatatgaaataagagtttatgcagatattatgctcaatactttaaaaaagtgggttccaattacgtatgaagcttttatggattacagagtgggcggtactgaagtttcttcaaaaggaaaaaaaattattcaaaaattaatcaaaggag

SEQ ID NO: 226567 - DNA, 850 bp, Unknown
  Bacterial polypeptide expressing nucleotide sequence isolated from the Sargasso Sea
atgaagttaactgacgaacaaataaaagaaataaaagaccagcaatctcagcaaaattcaacaaaaagagtgacagctccagaacttgaaaaaattctgtatgatgcaattccaatattagaccacggttttattagagttgttgactatatgggcgatgatacctcagtagttcaatcagctagagtttcttatggaaaaggcacaaaaaaagtttcaacagatgctggtctaataaaatatttgatgagacattggcacagcactccttttgaaatgtgtgaaataaaatatcatgtaaagttacccatatttatagcaagacaatggattagacacagaacagcaaatgtaaatgaatattctgcaagatattcaattttagataaagaattttatttacctgagccgcaacatctcgctgctcaatcacaaagtaatagacaaggtagaggtgacattttagatgcagaaaaagcaaaaaaagttttgaatttattaaaaggagatgctgaacaaacttataataattatgaaactatgcttaatgaaagatatgatggatcaactattgacgaaaatgctgtaggtttagcaagagagcttgctagaatgaatttaacattaaatacttatactcaatggtattggaaaacagatttattaaatctaatgaattttttgaggcttagagcagataatcatgcacagtacgagattagagcttatgcagatgctatgctcgataccttaaaaaaatgggtaccaataacttatgaggcttttatggattatagggttggtggaacaagaagtttctgcaaaaggaaaaattattattcaaaaactt

SEQ ID NO: 226568 - DNA, 461 bp, Unknown
  Bacterial polypeptide expressing nucleotide sequence isolated from the Sargasso Sea
catgaaacttaccaaagaacaagcagcagaaataaaaaatcaacaatctcaaagcaatcaaactaaaagagttacagtaccagaacttgaaaaaatactatacgaggcaattcctgcgctagatcatggttttgtgagagtagttgattatatgggggatgatacttcaattgttcaatcagcaagagtctcttatggaaaaggaactaagcaagtttcaactgataaaggattaatcaaatacttaatgagacattggcatagtactccatttgaaatgtgcgaaataaaataccatataaaattaccaatatttattgctcgacaatggatcagacatagaactgcaaatgttaatgaatattctgcaagatattctattttagacaaggaattttatttacccacccaagaaaatttagctgctcaatctaccagtaacagacaaggtagaggaaatg

SEQ ID NO: 226569 - DNA, 799 bp, Unknown
  Bacterial polypeptide expressing nucleotide sequence isolated from the Sargasso Sea
ctgacaccagagcaaaaacaagaaattgcggaccaacaatcacagaagaatcaaacaaaaagagtaacatcacctgagttagaaaaaattctctacgaggctcttcctgttttagaccatggatttattcgagtagttgattatatgggagacgatacttctatagttcaatcggctagagtttcttatggaaaaggaactaaaaaagtttcaaccgatgaaggtttaattaaatatttgatgagacactggcattctactccttttgaaatgtgtgaaattaaataccatgttaagcttccaatattcatagctcgtcaatggataaggcatagaacggcaaatgttaatgagtattcagctaggtactcaatattagataaagaattttatctcccagccaaagaacaactatcagcccaatcaaaagttaacagacaaggtagaggagatttaattactggcgatcaagcagatgaagttcttaaaattttaaaagatgatgcaactagaacttatgataattatgaaacaatgcttaatgaaagatttgatggaactgtgattaatgaaagtaaagctggactagctagggagcttgccagaatgaatttaacattaaattcttatacacaatggtattggaaaacagatctactaaatcttttgaattttttatttttaagagctgatagtcatgctcaatatgagattagagtttatgcggaagcaatgcttgaaactgttaagaagtgggttccaattactcatgccgctttcatggattacagagtggagc

SEQ ID NO: 226570 - DNA, 817 bp, Unknown
  Bacterial polypeptide expressing nucleotide sequence isolated from the Sargasso Sea
gagcttgaaaaaatcctatatgaagcaatcccagctttagaccatggttttgtaagggttattgattatatgggtgatgatacatccatagttcaatcagctagagtatcatatggaaaaggaactaaacaagtttcaactgataaaggtttaataaaatacttgatgagacattggcatagtaccccattcgaaatgtgcgaaattaaataccatgtaaagctcccaatatttattgcaagacaatggataagacatagaactgcaaatgttaatgaatactctgctagatattcaattctagataaagaattttatttaccatcacaagaaaatttagcagctcaatcaactagtaatagacagggtagaggagatgtcttggaaggaaaacaggcagaggaagttttagaacttttaaaaagcgatgcagagagaacttatgataattatgagactatgcttaatgaaagatttgatggatcaactattgatgagaataaaaaaggtttagcaagggaacttgcaagaatgaatttaacattaaatacctatacccaatggtattggaaaactgatttattaaacttaatgaattttttaaggttaagagctgatagtcatgctcaatacgaaattagagtttatgcagatataatgttagatactgtaaaaaaatgggttcctataacttatgatgcttttatggattatagagttggtggaaccgaggtttctgcaaaaggaaaattaattattcaaaaacttattaaaggtgaaaatgtagatgttgaaagttctggatgtctaaaagaga

SEQ ID NO: 226571 - DNA, 682 bp, Unknown
  Bacterial polypeptide expressing nucleotide sequence isolated from the Sargasso Sea
atgaaacttactaaagaacaaaagcatgaaattgcagaccaacaagctcagaaaaatcaaacaaaaagagtaacttctcctgaattggaaaaaattctttacgaagcactacctgttttagaccatggatttgtgagagttgttgattacatgggagatgatagttctattgttcaatctgctagagtctcatacggaaaaggaactaaaaaagtttctacggacgaagggttaattaaatacttaatgcgacattggcattcaacccctttcgaaatgtgtgaaatcaaatatcatgtaaagcttcctatatttattgcacgccaatggattaggcatagaacagctaatgtaaatgaatattcagcaagatattctatacttgataaagaattttatatccctgcaaaagatcagctatcagcacaatcaacttccaacagacaaggtcgaggtgaccttataactggagatcaagccgatgaagttttaaaaattttaaaagacgatgctacaagaacttacgataactacgaaaagatgcttaatgagagatacgatggaactacaattgatgaaagtaaaactggattagctagagaattagctagaatgaacttaactttgaattcatatacacaatggtattggaaaacagatttactaaatttattaaactttt

SEQ ID NO: 226572 - DNA, 949 bp, Unknown
  Bacterial polypeptide expressing nucleotide sequence isolated from the Sargasso Sea
aatgaaattaactaaagaacaaaaagaagagattaaagaacaacagtcccaagaaactaaaaccaaaagagtaactgcaccagagttagaaaaagttttatatgaagccattccaatattagaccatggtttcataagagtcattgattatatgggcgatgatacgtcaatcgttcaagctgcaagagtttcttatggaaaaggaacaaaaaaagtttctacagactctggtttaattaaatatttgatgagacattggcacagcacaccttttgaaatgtgtgaaataaagtatcatattaaattaccaatttttatagcaagacaatggattagacacagaacagctaatgtaaatgaatactcagcaagatactcaattttagataaagagttttacttaccatctcctaaacatttagccgctcaatcgaaaaataatcgacaaggtcgaggagacattcttgaaggagagcaagcaaaaaaagtcctagacctattaaaaaatgatgcagagcaaacatataataattatgaaacaatgttgaatgaaaaatatgatggaactgtaattgatgagagtactagtggactcgcaagagaattagccagaatgaatttaactttaaatacttatacccaatggtattggaaaactgatttattaaatttaatgaattttttaagactgcgtgcggaccatcatgcacaatatgaaattagagcatatgcagatacaatgctagaaacagtaaaaaaatgggtgccaataacatatgaagcatttatggattacagagtaggaggaacagaagtttcttcaaaaggaaaaaagataattcaaaaactaattaaaggtgaaaaagtaaatattgaagactccggactttcaaaaagagagtggaatgaattaatggaagcttttagtttaaaagataaattgatttaa

SEQ ID NO: 226573 - DNA, 817 bp, Unknown
  Bacterial polypeptide expressing nucleotide sequence isolated from the Sargasso Sea
catgaaacttacacaagatcaaataaacgatataaaagaacaacaatctcaagataacaagaccaaaagagttaccgctcctgaattagaaaatattttatatgaggctttgccagccttagatcacggatttattagagttattgattatatgggggatgatagctcaattgttcagtctgcaagagtttcatatggtaaggggactaaacaagtttcaacagatagtggattaattaagtatctgatgcgtcattggcatagcactccatttgaaatgtgtgagattaaatatcatgtcaaattaccaatatttattgctagacaatggatcagacatcgtacggcgaatgtaaatgaatactcggcaagatattcaatattagataaagaattttatttacctgatccagaaaatttagctgcacaatcaatagcaaacagacaaggtcgaggtgatgttattgaaggagaacaagcaaaagaagttttagaacttttaaaaaatgatgcagaaagaacatatcataactatgagactatgctaaatcaaaaatatgatggatccaccattgatgataataaaaaagggctggccagggagttagcgagaatgaacttaactttgaatacatatacacagtggtactggaaaacagatttgcttaacttaatgaattttttaagattgcgtgcagatcaccatgcacaatacgaaataagagtttacgcagatattatgttagacacattaaagagatgggttccaattacttatgatgcttttatggattatagagtaggtggtactgaagtt

SEQ ID NO: 226574 - DNA, 949 bp, Unknown
  Bacterial polypeptide expressing nucleotide sequence isolated from the Sargasso Sea
tatgaagctcactaaagaacaaaaaaaagaaatttcagatcaacagtcacagaaaaatgtaacaaaaagagttacatctcctgaattagaaaaaattctatatgaggctatgcctgttttagatcatggatttgttagagtggtagattacatgggagatgatacttctatagttcagtcagcaagagtatcttatggcaagggaacaaaaaaagtttcgacggatagtggtttaataaaatatttgatgagacatagacacagtactccatttgaaatgtgtgaaataaaatatcatatcaaacttcctatttttattgctcggcaatggattaggcatagaactgctaacgtaaatgagtattcagccagatattcaattatggataaagaattttatgttccatcaaaagaaaatcttgccgctcaatcaactatcaatagacaaggaagaggtaacttaattaacggaactcaagcggatagtattttaaaaattttaaaagaggatgcagaaagaaactatcagcattatgaagagatgctaaatgaaaaattcgatggaagtattatagatgaaaaaaaacaaggactagcaagagaacttgctaggatgaatttgacattaaattcttatactcaatggtattggaaaacagacttattaaatctcctaaattttttagctttaagagctgatagccacgcacaatttgaaatacgcgaatacgctaatgttatgatgaatactgttgcgaaatgggttccaacaacttacgaagcctttgtagattatagggttggtggtttggaaatttcctctaaaggaaaagcagttattcaaaaaatgattaagggtgaaaaatgcgatttaaaaacttctggcttatcaaaaagggaatggaatgagctaatgaattcctttggttttagtcaacatcttttataa

SEQ ID NO: 226575 - DNA, 892 bp, Unknown
  Bacterial polypeptide expressing nucleotide sequence isolated from the Sargasso Sea
agcacaaaaagagttacagctcctaatcttgaaaaaattctctatgaggcaatacccattcttgatcatggttttataagagttgttgattatatgggcaacgatacatctatagttcaggcagcaagagtctcttatggaaagggtacaaaaaaagtttcaactgatgcaggtttaattaaatatttgatgagacactggcatagcactccatttgaaatgtgtgaaataaaatatcacgtaaagttgccaatctttattgcaaggcaatggattaggcatagaacggcaaatgttaatgaatactcagcaagatattctattttagataaagaattttatttgcccaaaacagaaaatttggctgctcaatctcaaattaatagacagggaagaggtgatgtgctccagggagagcaagcaaaaaaagttttaagccttttaaaaaatgatgcagaacaaacttataataattacgaaatgatgcttaacgagcgttatgatggttctgtaattaatgaaaaagaatcaggtcttgcaagagagcttgctagaatgaatttaactttaaatacttatactcagtggtactggaaaacagatttacttaatttaatgaattttttgagattaagagctgatcatcacgcacaatatgaaataagaacttacgcagatgcaatgttagatacattaaaaaaatgggttcctacaacatacgaagcatttatggattatagagtaggcggcacagaagtatcagcaaaaggaaaaattatattgcaaaagttaatcaaaggtgaagatgtcgatgtagaccaatcaggtttatccaaaagagaatggaatgaattaatgattgcttttgatcttaaagataaattgatttaat

SEQ ID NO: 226576 - DNA, 949 bp, Unknown
  Bacterial polypeptide expressing nucleotide sequence isolated from the Sargasso Sea
catgaaattaactaaagaacaagaacaagagattaaagagcaacaaaaccaagaaactagcacaaaaagagttactgctccggaacttgaaaaagtcctctatgaagcaatacctattttagatcatggttttataagagtcgtcgattatatgggaaatgacacatctattgttcaagcagcacgagtctcttacggcaaaggaactaaaaaagtttcaactgattcaggattaattaaatatctaatgagacattggcatagtactccttttgaaatgtgtgaaataaaatatcatgtaaaattacctatctttattgcaagacaatggattagacatagaacagcaaatgttaacgaatactcagcaagatattcaattttagataaagagttttatttacctgaaaaagaaaatttagcagctcaatcccaaagcaacagacaaggaagaggggacgtccttcaaggaaagcaggcagagaaagttttgaatcttttaaaaagtgatgcagaacaaacttatgataattatgaaatgatgcttaacgaacgttacgatggttctgtaattaatgaaaaagaagtaggtcttgcaagagaacttgccagaatgaatttaactttaaatacttatacacaatggtattggaagactgatttacttaacttgatgaattttttaaggttaagagcagatcaccacgcacaatatgaaataagagcttatgcggaagtaatgctagatacattaaaaaaatgggtaccaattacttttgaagcatttatggattatagagttggtggcaccgaagtatcagcaaaaggaaaaattatattacaaaaattaattaaaggtgaggatgtgagtgtagatcaatcaggattatcaaaaagagaatggaatgaattaatgattgcttttgatcttaaagataagttgatttaa

SEQ ID NO: 226577 - DNA, 949 bp, Unknown
  Bacterial polypeptide expressing nucleotide sequence isolated from the Sargasso Sea
catgaaattaacaaaagaacaggctcaagaaataaaagatcaacagtcacaatcaaatagtacaaaaagagttactgctcccgaattagagaagattctatatgaagcaattcctatacttgatcatggattcataagagtcgtagattatatgggagacgatacctcgatagtacaagccgcaagagtctcttatggaaaaggaaccaaaaaagtttctacagatagtgggcttataaaatacttaatgcgtcattggcatagtactccatttgaaatgtgtgaaataaaatatcatgttaagcttcctatttttattgctcgtcaatggataagacatagaactgcaaatgttaatgaatattcagcgcggtactcaattttagataaagaattttatttgccatcatctgaaaacttagctgctcaatcactaagcaatagacaaggtagaggagaagttatcgaaggagaacaagcaaaacaagttttggaattattaaagaatgatgctgaacgtacttacaaaaattatgaagagatgcttaatcaaagatttgacggctcaactattgatgaaaataaaaaaggattagcaagagaacttgcaagaatgaatttaactttaaatacttatactcaatggtactggaaaactgatttattaaatttaatgaattttttaagactaagagcagacagtcatgcacaatatgaaataagagcatacgctgatgcaatgttggatacagtaaaaaaatgggttccaattacttatgaggcatttatggattatagagtaggtggtacggaagtttcctctaaaggtaagaaagtcattcaaaagcttattaatggcgaaaaagttgatattgagcaatcaggactatcaaaaagagagtggaatgagcttatgttggctttggaactaaaagataaattgatatag

SEQ ID NO: 226578 - DNA, 640 bp, Unknown
  Bacterial polypeptide expressing nucleotide sequence isolated from the Sargasso Sea
atgaaacttacaaaagagcaaataaacgacataaaagatcaacaatctcaagagaatgttactaaaagagttactgctcctgaattagaaaaagtattatttgaagcgatgccagctttagatcatggctttataagagttattgactacatgggagatgatagctcaattgttcagtctgcaagagtttcttacggtaaaggaactaaacaagtttcaacagatagtggtctaattaaatatcttatgcgacattggcatagcactccattcgaaatgtgtgaaattaagtatcatgtaaaattgccaatatttatagcaagacaatggattagacatcgtacagcaaacgttaatgaatactctgcaagatactcaattttagataaagaattttatttacctgatccacaaaatttagcagctcaatcaatttcaaacagacaaggtagaggtgatgtgattgagggagatcaggcaaaagaagttttagaactgttaaaaaatgatgctgagagaacatatgataattatgaaactatgcttaatcaaaaatttgatggttcaactattgatgaaaataaaaaaggattggctagagagttagctagaatgaacctaactttgaatacatatactc

SEQ ID NO: 226579 - DNA, 541 bp, Unknown
  Bacterial polypeptide expressing nucleotide sequence isolated from the Sargasso Sea
catgaaactaaccaaagagcaaaaacaagaaataagagaccagcaaaatcaagaaaataaaacaaaaagagttaccgctcctgagcttgaaaaaatactttatgaggcaattccaattttagatcatggatttgtaagagtagttgattacatgggggatgacagctcaattgttcagtctgcaagagtatcttatggaaaaggaactaagaaagtttctactgacgagggccttataaagtatttgatgagacattggcatagtactccatttgaaatgtgtgaaataaaatatcatgtaaaacttccaatatttattgcacgacaatggattagacatagaacagcaaatgtaaatgaatattctgccaggtattcaattttagacaaagaattttatttaccatctaaaaagcatttagctgcacaatcccaaagcaatagacaaggaagaggtgaggtgttagagggcgatcaagctaagaaagttttaaacttactaaaacaagacgcagaacaaacatatgaaaattatgaaaca

SEQ ID NO: 226580 - DNA, 949 bp, Unknown
  Bacterial polypeptide expressing nucleotide sequence isolated from the Sargasso Sea
atgaaattaacacctgaacaagctcaagaaattaaagatcaacagaatcaggaaaataaaacaaagagagtaactgctcctgaattagaaaaaatattgtatgaagctatacctcttttagatcatggttttataagggtcgttgattatatgggcgatgatacttctattgttcaggcagccagagtttcttatggcaagggaacaaaaaaagtttcaactgatgcaggactaattaaatatttaatgagacactggcacagcacaccttttgaaatgtgcgaaataaaataccacgttaaacttccaatttttatagcaaggcaatggattagacatagaacagcaaatgtaaatgaatactctgccaggtattctattttagataaagaattttatttacctgctcaagaacatttggcagcacaatctaaaagtaacagacaaggaagaggagatgtgcttgaaggagaacaagcaaaaaaagttttagacctattaaaaaatgatgctgaaaggacatatgaaaattatgaaacgatgctaaatgaaaaatatgatggatcaataattgatgaaaatggagttggtcttgcaagagaattagcaaggatgaatttaactctcaatacttatacacagtggtattggaaaactgatctattaaatttaatgaattttttgagactccgagcagaccaccatgcccaatatgaaattagaacatatgcagatgcaatgttagatacgttaaaaagatgggttccgataacttatgatgcatttatggattaccgagttggtggcactgaagtatctgataaaggaaaaaaagttatccaaaaacttataaaaggagataaagtttcaatggaagagtctggtctttcaaagagagagtggaatgaattaatggaagcttttaaccttaaagataagttgatttaat

SEQ ID NO: 226581 - DNA, 949 bp, Unknown
  Bacterial polypeptide expressing nucleotide sequence isolated from the Sargasso Sea
atgaaattaactaaagaacaagaacaagagattaaagagcaacaaagtcaagaaactagtacaaaaagagttaccgcgcctaatcttgaaaaaattctctatgaagcaatacccattctagatcatggttttataagagttgttgattatatgggcaacgacacatctatagttcaggcagcaagagtttcttatggaaaaggtacaaaaaaagtttcaactgatgcagggttaataaaatatttgatgagacattggcatagcaccccatttgaaatgtgcgaaataaaatatcacgttaagttgccaatctttatagcaagacaatggattagacacagaacagcaaatgtcaatgaatattctgcaagatattctattttagacaaagaattttatttacctaaaacagaaaatttagcggctcaatctcaaagcaatagacaaggaagaggagatgtgctccaaggagatcaagcaaaaaaagttttagaacttttaaaaaatgatgcagagcaaacttataataattatgaaatgatgcttaatgaacgttatgatggttctgtaataaatgaaaaagaaataggtctcgcaagagagcttgctagaatgaatttaactttaaatacttatactcaatggtactggaaaactgatttacttaatttaatgaattttttaagattaagagcagaccatcatgcacaatatgaaataagaacttatgcggatgcaatgctaaacacgttaaaaaaatgggttcctataacatatgaagcatttatggattatagggtaggtggcaccgaagtttcagcaaaaggaaaaattatattacaaaaactaattaaaggtgaagatgtaaatttagatcaatcaggtttatccaaaagagaatggaacgaattaatgattgcttttgatcttaaagataagttgatttaat

SEQ ID NO: 226582 - DNA, 949 bp, Unknown
  Bacterial polypeptide expressing nucleotide sequence isolated from the Sargasso Sea
atgaaactaacaaaagaacaaacccaagagattaaagatcagcaatcccaagaaaataaaacaaaaagggttactgcgcctgaacttgaaaatatattatatgaggcaattccaatattggatcatggttttattagagtagtcgattatatgggaaatgatacctctatagttcaagctgctagagtttcttatggtaaaggcacaaaaaaagttaataccgattctggattgataaaatatctaatgagacattggcatagtactccatttgaaatgtgcgagataaaatatcatgtaaaacttccaatttttattgcgagacaatggattagacacagaactgcaaatgtaaatgaatactctgcaagatattcaatactagataaagaattttatttaccaaaatctgagcatttagctgcacaatctcaaattaacagacaaggtaggggagaaattcttgaaggtgatcaagcaaaaaaagtattagatctacttaaaacagatgctgaaaggacctacaataattatgaagaaatgctcaatgaaagatatgatgggacagtaatagatgaaaatgtgattggattagcaagagagctagcaagaatgaatctaacattaaatacatacactcaatggtactggaaaacagatttacttaatcttatgaattttttgagacttagagcagatcagcatgctcaatacgagatcagaacttatgctgaagcaatgttggaaactttaaaaaaatgggttccaattacatacgaagctttcatggattatagagtaggaggaactgaaatttcttcaaaaggaaaattaattataaagaaattaattaagggtgaaaaagttagtatagaggaatcgggtttatctaaaagagaatggaatgagttaatggttgctttggatcttaaagataaattgatttaat

SEQ ID NO: 226583 - DNA, 949 bp, Unknown
  Bacterial polypeptide expressing nucleotide sequence isolated from the Sargasso Sea
catgaaattaactaaagaacaatctgcagaaataaagcatcaacaatctcaaagcaattcaaccaaaagagttactgttccacagctagaaaagatactttatgaagctcttccagcattagatcatggatttgtaagagtagttgattatatgggtgatgatacttcaatagtgcaatccgctagagtttcttatggtaaaggaacaaaacaagtttctacggataagggtttaataaaatatttaatgcgtcattggcatagtaccccgtttgaaatgtgtgaaatcaaatatcatatcaaattaccaatatttattgctcgtcaatggataagacatagaactgctaatgttaacgagtattctgcaagatattctattttagataaagaattttatttaccaacttctgataatcttgctgctcaatcaactagtaacagacaaggaagaggagatgtactcgagggacaacaagccaaagaagttttagaacttttgaaaaatgatgctgaaagaacttatgataactatgagacaatgcttaatgagaggtatgatggatcaaccattgatgaaaataaaaaaggattagctagagagttagcaaggatgaatttgactttaaatacatatactcaatggtattggaaaacagatttattaaatttgatgaattttttaaggttaagggctgacagtcacgctcagtatgaaattagagtttatgctgatataatgttagacactgtaaaaaaatgggttccaattacttatgatgcatttatggattatagagtaggtggaacagaagtatctgcaaaaggaaaagttattatccaaaaattaattaaaggtgaatctattttaatggaagattctggtttatcaaaacgagaatggaatgaattaatggaagcttttgatcttaaagataagttgatttaa

SEQ ID NO: 226584 - DNA, 900 bp, Unknown
  Bacterial polypeptide expressing nucleotide sequence isolated from the Sargasso Sea
catgaaacttactaaggaacaagagcaggaaataaaggatttacaatctcaagaaaataaaactaaaagagtagtcgctcctgaactagaaaaaatactttacgatgcaatttctgttttagatcatggttttgttagagttatagattatatgggcgatgacacttctatcgttcaagcagctagagtatcatacggtaaaggaactaaaaaggtctcaacagatagtggactcataaaatatttaatgcgtcattggcatagcacaccattcgagatgtgtgaaattaaatatcatgtgaaattaccaatttttattgcaagacaatggatcagacatagaactgcaaatgttaatgaatactcagcacgttattcaattttagataaagaattttatcttcctaaaaatgaacacttagcggctcaatcaaaaagtaacagacaaggtagaggagatgtgcttcaaggagaacaagccaaaaaagttttaagccttttaaaaaatgatgcagagagaacatatgaaaattatgaaactatgcttaatgaaagatacgatggttcagtcgttgatgaaaaagaaacaggtcttgcaagagaacttgctagaatgaatttaactttaaacacttatacccagtggtattggaaaacagatcttttaaatttaatgaattttttaagactaagagctgaccaccatgctcaatatgaaattagagcttatgcagatgtaatgttggatactttaaaaagatgggtgccaacaacttatgatgcatttatggattatagattgggcggtaccgaagtatcatcaaaaggtaaaataattatccaaaaactaatcagtggtgaaaaagtagattctgaacagtcaggccttcaaaaagggag

SEQ ID NO: 226585 - DNA, 519 bp, Unknown
  Bacterial polypeptide expressing nucleotide sequence isolated from the Sargasso Sea
actgaggtccgagaaaaaccagacatttcgagcagtcagcgtgggcatggaaaaacatctttataaggtttaccctgttctagatcacggctttgtaagggtagtagattacatgggtgacgatgctgcaatatgtcaggcagcccgtgttagctatggccgtggcacaaagtcagtacaaaatgatgagggactcatcagatatttaatgaggcactggcattcaacaccttttgaaatgtgtgaagtgaaattacacgttaaattaccggtttttgttgctagacaatggatccgccacagaacagctaatgtaaacgaatattcagcgcgttactctattctggatcgggaattttatatccctgagccagaggcattggcggctcaatcagttataaacaatcaaggtcgaggagaggtgttgactggagaagaggcagaaaaggttctgcgattgcttaaaaatgactcggctcagacttatgatcattacgaacaaatgataagccaagaggg

SEQ ID NO: 226586 - DNA, 943 bp, Unknown
  Bacterial polypeptide expressing nucleotide sequence isolated from the Sargasso Sea
ctgacaaaagaacaaaaacaagaaattttagaccaacaatctcaaaaaaacgtcactaaaagagttacttctccagaattggaaaaaattctttatgaggctatgcctgtgctcgatcacggttttgttagggtggttgattacatgggggacgatacttccatagttcaatctgcaagagtttcgtatggcaaaggaacaaaaaaagtttcaactgatagtgggttaatcaaatatttaatgagacacagacacagtacaccttttgaaatgtgtgaaattaagtaccatattaaacttccaattttcatcgcaaggcaatggattagacacagaaccgcaaatgtaaatgagtattcagccagatattcaattatggataaagaattttatgttccatcaagagaaaatttagctgcacaatcaactaataacagacagggtagaggcgagttaataaatggaaaacaagctgataatattttaaaaattttaaaagaagatgcagaaagaaattatcaacattatgaagaaatgttaaatgagaaatatgatggtaaaattattgacgaaaataaacagggtttagctagagagttagccagaatgaatcttactcttaattcttatacccagtggtattggaaaactgatttattaaatttattaaactttttagctttgagggcagatagccatgctcaatttgaaattagagaatacgctgacgtaatgatgaatactgtaaaaaaatgggttccaatatcttatgacgcttttattgattatagagtaggtggcatggagctttcagcaaaaggcaaaacagtaatacagaaaatgattaaaggcgagaaatgtaatattgattcatcaggtctttcaaaaagagagtggaacgaactgatggactcttttggttttaaacaacaccttgtttaat

SEQ ID NO: 226587 - DNA, 949 bp, Unknown
  Bacterial polypeptide expressing nucleotide sequence isolated from the Sargasso Sea
aatgaaactaacaaaagaacaaaagcaagaaattgcagatcaacaagctcaaaaaaaccaaacaaaaagagttacttctcccgaattagaaaaaattttatatgaagctttgccagtcttagaccatggttttgtaagagtgatagattacatgggagacgatagttcaattgttcaatcagctagagtttcatacggaaaaggaacaaaaaaagtttcaacagatgaaggtttaattaaatatttaatgagacattggcattctaccccatttgagatgtgcgaaattaaatatcatgttaaacttccaatttttattgctcgccagtggatcagacatagaactgctaatgtaaatgagtattcagcaagatattcaatattagataaagaattttatattccttcaaaagaccaactttcagctcaatcaacttcaaatcgtcagggtagaggggacttgatctcaggagagcaagctgatgaagttttaaaaattttgaaagatgatgccacaaggacttatgataattacgaaaagatgcttaatgaaaggtacgatggaaccactattaatgaaggtaaagccggtttagcaagagaacttgcgagaatgaatttaactttaaactcttacacccaatggtattggaaaacagatctattaaatttattaaactttttatttctaagagcagatagtcatgcgcagtatgaaattagagtttacgcagaagcaatgctggatacactaaaaaaatgggttcccattacgcattcagcatttttagattacagggtgggagccgtccatgtttctgctaaaggtaaaaaagtaattcaacttatggcaaaaggtaaaaaagtatctcatgaaagttcaggcttatcaaagagagaatggaatgaattaatgaactcttttggttttaccgaaaagaccgtttaa

SEQ ID NO: 226588 - DNA, 766 bp, Unknown
  Bacterial polypeptide expressing nucleotide sequence isolated from the Sargasso Sea
aatgaaacttacaaaagagcaaaaacaggaaattttagatcaacaagcgcaaaaaaacgttacaaaaagagttacgtccccagaattggagaagattctttatgaagcaatgccagtacttgaccatggttttgttagagtggttgattacatgggtgacgatacatcaatagttcaatctgcaagagtctcttacggaaaaggaacaaaaaaagtttctactgatagcggattaataaaatatttaatgagacatagacacagcactccattcgaaatgtgtgagataaagtatcatattaaacttccaatttttatagcaagacaatggattagacacagaactgcaaatgtaaatgagtattccgcaagatattcaattatggataaagaattttatgttccttcaaaagaaaatttggctgctcagtcaaccaataatagacaagggaggggcgagttaataaatggtaaacaagctgacaatattttaaaaattttaaaagaagatgctgaaagaaattatcaacattacgaggaaatgctgaatgagaaatacgacggaagtattattgatgataaaaagaaggggctggcccgtgaattagccagaatgaatcttacactaaattcttatactcaatggtattggaaaacagatttactaaatttgttaaatttcttagccctaagagcagatagccacgcgcaatatgagattagagaatatgcagatgtaatgatgaatactgtaaaaaaatgggtt

SEQ ID NO: 226589 - DNA, 949 bp, Unknown
  Bacterial polypeptide expressing nucleotide sequence isolated from the Sargasso Sea
atgaaattaactaaagaacaaaagcaagaaattgcagaccagcaaacacaaaaaaatacaacaaaaagagtaacttctccagaattagaaaaaatcctttatgaagcattaccagttttagatcatggatttgttagagtagttgattacatgggtgacgacagctcaatagttcaatctgctagagtttcttacggtaaaggaacaaaaaaagtttcaacagatgaaggtttgatcaaatatttaatgcgtcattggcattccactccatttgaaatgtgtgaaatcaaatatcatgtcaaacttccaatttttatagctcgtcaatggataagacacagaacagcgaatgttaatgaatactctgcaagatattctattttagataaggagttctatattcctgcaaaagaccaactctcagcccaatcaacttcaaatcgtcaaggaagaggagatttgataactggagatcaagcagatgaagttttaaaaattttaaaagaagacgcaacaagaacttatgataattacgaaaagatgcttaatgaaagatatgatgggacaactatagatgaaaacaagtctggcttagcaagagaacttgctagaatgaatttaactttaaattcatatacccagtggtattggaagacagatttattaaatcttttaaattttttatttttgagagctgatagtcatgcgcaatacgaaataagagtttacgctgaaacaatgctcaatacagtaaaaaagtgggtcccaattactcacgcagcatttctagattatagagttggagctgtgcatgtctctgctaagggaaaaaaagttattcagctaatggcaaaaggtgaaaaagtatctcatgtaagctcaggtctttcaaaaagagagtggaacgaattgatgacatcttttggttttacagaaaagattgtttaat

SEQ ID NO: 226590 - DNA, 949 bp, Unknown
  Bacterial polypeptide expressing nucleotide sequence isolated from the Sargasso Sea
atgaaattaactaaagaacagcaacaagaaatcaaagatcaacagtcccaagaaaataaaaccaaaagagttactgttaaagaacttgaaaatattctctacgaggcaatacctattcttgatcatggttttataagagtaattgattatatgggtgacgatacttctatagttcaagctgcaagagtctcctacggtaagggtacaaaaaaagtttcaacagactcaggactaattaaatacttaatgagacactggcatagcactccatttgaaatgtgtgaaataaagtatcatgttaaactgccaatttttattgcaagacaatggatcagacatagaacagcaaatgtaaatgaatattcagcaagatactcgatattagacaaggagttttacttaccagaacctaatcatttagcagcacaatcaaaaaataatagacagggcagaggagatattttgcaaggtgaacaagcaaaaaaagttttagatttgctgaaaggtgatgctgaaagaacatatgacaattatgaaaacatgttaaatgagagatatgacggttctgtaatagatgaatcacagaatggtttagctagagaactagctagaatgaatcttactttaggaacatatacacagtggtattggaaaacagatttattaaatttaatgaattttttaagattaagagctgatcatcatgcgcaatatgaaataagagcctacgctgatgtcatgctagatacattaaaaagatgggtcccaattacttatgaagcgtttttagactatagagtaggtggaacagaagtttccagcaaaggtaagaaagttttgaaaaaattaataagtggagatactgttgatttagaaagttctggactttcaaaaagagaatggaatgaattagtggaggcttttgaaattaaagataagactctttaat

SEQ ID NO: 226591 - DNA, 898 bp, Unknown
  Bacterial polypeptide expressing nucleotide sequence isolated from the Sargasso Sea
catgaaacttacaaaagaacaaataaacgacataaaagatcaacaatctcaagagaatgttactaaaagagtaaccgctcctgaattagaaaaagtattatatgaagcgatgccagccttagatcatggctttataagagttatcgactacatgggagatgatagctccattgtgcagtccgcaagagtttcttatgggaaaggaactaaacaggtttcaacagatagcggtttaataaaatatctaatgcgtcactggcatagtactccatttgaaatgtgtgaaattaaatatcatgtaaaattaccaatatttatagcaagacaatggattagacatcgaacagcaaacgtcaatgaatactctgcaagatattctattttagataaagaattttatttacctgatgcgcaaaatttagcagctcaatcaattgcaaacagacaaggtagaggtgatgtgattgaaggagaacaagcaaaagaagttttagaacttttaaaaaatgatgctgaaagaacatatgataattatgaaactatgcttaatcaaaaatttgatgggtctacaattgatgaaaataaaaaaggattagctagagagttagcgagaatgaacttaactttgaatacgtatacccagtggtattggaaaactgatcttttaaacttaatgaattttttaagattacgtgctgatcaccatgctcaatatgaaattagagtttatgcagatataatgttggatacattaaaaagatgggttccaataacatatgacgcctttatggattacagagtaggtggcacggaggtttctgctaaaggaaaagcaattatacaaaaattattgaaaggcgaggaaataaatttagaacaatctggactttcaaaaaga

SEQ ID NO: 226592 - DNA, 949 bp, Unknown
  Bacterial polypeptide expressing nucleotide sequence isolated from the Sargasso Sea
catgaaattaactgaagaacaaattaaagaaattaataatcagcaaaatcaaaaatatacaacaaaaagagttactgcacctgaattagaaaaaattctttacgatgcaattcctattttagatcacggttttattagggttgttgattatatgggagatgacacatcagttgttcaatcagcaagagtttcctatgggaagggaacaaaaaaagtatcaactgactcaggtttaataaaatatttaatgaggcattggcatagtacaccatttgaaatgtgtgaaataaaatatcatatcaagcttccgatatttatagctagacagtggatcagacatagaactgcaaatgttaacgaatattctgctaggtattcaattttagacaaagaattttatttgccagaacctaaaaatctagcagcacaatctcaaagtaatagacagggcagaggtgatattttagatggtgatagggcaaaaaaagttttagatttattaaaaagagatgctgagcaaacttacaataattatgaaatcatgttgaacgaaagatatgatggatcaacaatagatgagaatggtttaggtttagcaagagaactcgctagaatgaatttaactttaaatacttacacacaatggtattggaaaaccgatctattaaatctcatgaattttttaagactaagagcagatcatcatgctcagtatgagataagagcttatgctgatgcaatgcttgatacacttaagaaatgggtaccaataacttatgaagcttttatggactatagagtaggtggaacagaagtctcttcaaagggaaaaaatgttattcaaaaacttataaaaggtgaaaatgtttccattgaagaatcaggtttgtcaaaaagagaatggaatgagcttatggaagcttttgacctcaaagataatttgatttaa

SEQ ID NO: 226593 - DNA, 949 bp, Unknown
  Bacterial polypeptide expressing nucleotide sequence isolated from the Sargasso Sea
atgaaattaaataaagaacagcaacaagaaattaaagatcttcaatctcaagagtttaaaacaaaaagggtcactgctcctgaactcgagaaagttcttttcgaagcaattccagttttggatcatgggtttataagagttattgattacatgggagatgatacatcgatagttcaagctgcaagagtttcatacggaaaaggaacaaaaaaagtttcaacagactcaggtctgataaaatatctaatgagacattggcacagtacaccttttgagatgtgtgaaataaaatatcacgtaaaactcccaatttttattgcaagacaatggattagacacagaacagcaaatgttaatgagtattcagcaagatactcaattttagataaagaattttatcttccttccccagagcatcttgcagctcaatcaaaaaacaataggcaaggaagaggaaacattattgagggcgatcaggctaagaaagttttaaatttgttaaagaaagatgcagagcaaacttacgataactatgaaatgatgttaaatgaaagatatgatggatctgtaattgatgaaaaagaaactggactagcaagagagttagctagaatgaatttaacattaaatacttatacccaatggtattggaaaactgacttattaaatttaatgaattttttaagattaagagttgaccatcatgcacagtatgaaattagggcatacgcagatgtaatgcttgattctttaaaaaaatgggtaccaatcacttacgatgctttcatggattaccgagttggaggaacggaagtttcagctaagggtaaaataataattcaaaaattaattaaaggtgaaaaagttaatgtagaagagtcaggattatcaaaaagagagtggaatgagttgatggaggcttttaatcttaaagataaatcgatttaat

SEQ ID NO: 226594 - DNA, 949 bp, Unknown
  Bacterial polypeptide expressing nucleotide sequence isolated from the Sargasso Sea
aatgaaattaactaaagagcaagcacaagaaataaaagatcaacaatctcaggaaaataacacaaaaagagttactgctcctgagcttgaaaaaatactatatgaagctttagcaattttagatcacggattcataagagtagttgattatatgggaaacgatacatccattgttcaagcagcaagagtttcttatggaaaaggcacaaaaaaagtaaatactgatgcaggattaattaagtatttaatgagacactggcacagcaccccttttgaaatgtgcgaaattaaatatcatgttaaacttccaatatttatcgctagacaatggattagacatagaacggcaaatgttaatgagtattctgccagatattcaattttagataaagaattttacttaccagctcaggaaaatttagctgcacaatcacaaagtaataggcaaggaagaggagaagttcttgaaggtgaacaggcaaaaaaagttttagatttgcttaaaactgatgccgaaagaacttatagcaattatgaagaaatgcttaacgagagatttgatgggtcaataattaatgataaccaaattggcttagcaagagagcttgcaagaatgaacttaaccttgaacacctatacacagtggtattggaaaacagatttactaaatttaatgaactttttaagacttagagcagatcatcatgctcaatatgaaattagagcatatgccgatgtaatgttagatacattaaaaaaatgggttccaattacttatgaagcttttatggattatcgagttggaggcacagaagtatctgcaaaaggtaaattaattattcaaaagttaataaaaggagaagaagtttctatggaaggttctggactttcaaaaagagaatggaatgaattaatggaagcttttaatcttaaagataaattgatttaa

SEQ ID NO: 226595 - DNA, 949 bp, Unknown
  Bacterial polypeptide expressing nucleotide sequence isolated from the Sargasso Sea
ttgaaacttacaaaagaacaattagacgaaattaagaagcagcagctacaaagtaatcaaactaaaagagttacctcgatagaacttgaaaaaattttatatgaagcaattcctgcattagaccacggatttgtaagagttgttgattatatgggggatgatacatctattgttcagtctgcgagagtttcttatggaaaaggaactaaacaagtttccactgataatggtttaataaaatatttaatgagacactggcatagtaccccatttgaaatgtgtgaaataaaatatcatattaagcttcctatatttattgctagacaatggattagacatagaactgcaaatgttaatgaatattctgcaagatattcaattttagataaagaattttatttacctactaaagaaaatttagcagcacaatctactagcaacaggcaaggaagaggagaagttcttgaaggggaccaggctcaaaaagtattagaactcttaaaaaatgatgctgaaagaacttataacaattacgagactatgcttaatgaaagatatgatggttcgaaaatagacgaaaaaaaaaggggacttgctagagaacttgccagaatgaacctaactttaaatacttatacgcagtggtactggaaaacagatttattaaatttaatgaatttcttaagattgagagctgatagtcacgctcaatatgaaattagagtttatgctgatataatgctggatacattaaaaaggtgggttccaataacctatgaggcatttatggattacagagtaggaggaactgaggtttctaataaaggaaaaaatataattaaaagattaatcaaaggcgagaaaatttcgttagaaggctcgggtctatctaaaagagaatggaacgaattaatggaagcttttgatcttaaagataaattgatttaat

SEQ ID NO: 226596 - DNA, 949 bp, Unknown
  Bacterial polypeptide expressing nucleotide sequence isolated from the Sargasso Sea
catgaaattaactaaagaacaagaacaagagattaaagagcaacaaagccaagaaactaccacaaaaagagttgtagcacctgagcttgagagaatactttatgaagcaatacctattctagatcatggttttgtgagagttgttgattatatgggtaatgatacatctattgttcaggcagctagagtttcttatggaaaaggaacaaaaaaagtttcaacagattcaggtttaataaaatatttaatgagacactggcatagtactccatttgaaatgtgtgaaataaaatatcatgtaaagcttccgatatttattgcacgacaatggatcagacacagaacagcaaatgtcaatgaatactctgcaagatattcaattttagataaagaattttatttacctaaagcagaacatttggccgctcaatctcaaagtaacaggcaaggaagaggagatgtgcttcaaggcgagcaagctaaaaaagttttagaccttttaaaaaatgatgcagaacaaacttacaataattatgaaatgatgcttaatgagcgttatgatggttctgtaatagacgaaaaaaaatctggtcttgcgagagaacttgctagaatgaatttaactttgaacacctatacacagtggtattggaaaactgatttactcaatctaatgaactttttaagattaagagcagatcatcatgctcaatatgaaataagaacttatgccgaaacaatgctagacacattaaaaaaatgggtaccaataacttatgaagcatttatggattatagagtaggaggcacagaagtatcagcaaaagggaaaattatattacagaaattaattaaaggtgaaaatatcagcttagatcagtcaggtttatctaaaagagaatggaatgaattaatgattgcttttgatcttaaagataagttgatttaa

SEQ ID NO: 226597 - DNA, 949 bp, Unknown
  Bacterial polypeptide expressing nucleotide sequence isolated from the Sargasso Sea
atgaagttaactgacgaacaaataaaagaaataaaagaccagcaatctcagcaaaattcaacaaaaagagtaacagctccagaacttgaaaaaattctgtacgatgcaattccaatattagaccacggttttataagagttgttgactatatgggtgatgatacctccgtagttcaatcagctagagtttcttatggaaaaggcacaaaaaaagtttcaacagattctggtttaataaaatatttaatgaggcattggcatagtactccttttgaaatgtgtgaaataaaatatcatgtaaaactacctatatttatagcaagacaatggattagacatagaacagcaaatgtaaatgaatactctgcaagatactcaattttagataaagaattttatctacctgagccacaacatcttgctgctcaatcacaaagtaatagacaaggtagaggcgatattttagatggagaaaaagcaaaaaaagttttgaatttattaaaaggagatgctgaacaaacttataataattatgaaactatgcttaatgaaagatatgatggatcaactatagatgaaaatgctgtaggtttagcaagagagcttgctagaatgaacttaacattaaatacttatactcaatggtattggaaaacagatttattaaatctgatgaattttttgagactcagagcagatcatcatgctcagtacgagattagagcttacgcagatgctatgcttgatactgttaaaaaatgggtaccaataacttatgaagcttttatggattatagggttggtggaacagaagtttctgcaaaaggaaaaattattattcaaaaacttataaaaggtgaaaatgtttctatcgatgacacaggtttatcgaaaagagaatggaacgaacttatggaagcttttgatcttaaagataaattgatttaat

SEQ ID NO: 226598 - DNA, 949 bp, Unknown
  Bacterial polypeptide expressing nucleotide sequence isolated from the Sargasso Sea
atgaaattaaccaaagaacaatctcaagagattaaagatcagcaatctcaagcaaataataccaaaagggttacagcgccagaactagaaaaaatactatatgaagcaattccaattttagaccatggatttattagggtagttgattatatgggagatgatacttcaattgtacaagcagctagagtttcttatggcaaaggaactaaaaaaatatcaaccgattcaggtctaataaaatatttaatgaggcattggcacagcacaccttttgaaatgtgcgagattaagtatcatgtaaaacttccaatttttattgccagacagtggataagacatagaactgcaaatgtgaatgagtattcagccagatattctattttagataaagaattttatttgccttctaaagaaaatttggccgcacaatccaaaagtaacagacaaggaagaggcgaagttcttcaaggagaaaaagctaaaaaagtgctagatttattaaagggagatgcagaacaaacttatagtaactatgaaaaaatgttaaatgaaaggtacgatggttccgttatcgataacaattcaacaggacttgcgagagaacttgccagaatgaatttgactttaaatacatatactcaatggtattggaagactgatttattaaacttaatgaattttttaagattacgtgcagacgtccacgcacaatatgaaataagagcctatgcagacgtaatgttagacacgttaaaaaaatgggtaccaataacttacgatgcatttattgattacagagtaggtggtacagaagtttcttctaaaggaaaaattgttatacaaaaactaattaaaggagaaaaaatttcaattgagcaatctggattatcaaaaagagaatggaatgaattaatgacatcatttgatcttaatgataaattaatttaaa

SEQ ID NO: 226599 - DNA, 937 bp, Unknown
  Bacterial polypeptide expressing nucleotide sequence isolated from the Sargasso Sea
atgaaattaactaaagaacagacacaagaaataaaagaccaacaatcacaagaaaataaaactaagaggataacagccccagagcttgaaaaaatactctatgacgcaattcctatattagatcacggatttattagagttgtggactatatgggagatgacacatctattgttcaggccgcaagagtgtcttatggaaaaggtacaaaaaaggtttcaacagattctggcttaataaaatatttaatgagacactggcatagtactccttttgagatgtgtgagattaaatatcatataaaacttccaatatttattgcaaggcaatggattagacatagaactgcaaatgtaaatgaatactctgcaaggtattctatactagataaagaattttatttacccaactcagaacacctggcagcacaatctcaaattaatagacaaggaagaggagatgttcttaaaggagatcaagcaaaaaaagttttagatttattaaaaaatgatgcagagcaaacatataaaaattatgaagaaatgttgaatgagcgttatgatggtactgtaattgatgaaggcaaaactggattagcaagagaacttgctagaatgaatttaacattaaatacttatactcagtggtactggaaaactgatttattaaacttaatgaattttttaagattaagagcggatcatcatgcacaatatgaaataagaacatatgctaatgcaatgctggatactgttaaaaaatgggtacccataacctatgaagcatttatggattatagagttggaggtacagaaatttcatcaaaaggaaaaactgttatccaaaaaatgataagtggggaaaaaatatcaattgaagagtcggacctttcaaaaagggaatggaatgagttaatgaatgcttttggattaagagaaa

SEQ ID NO: 226600 - DNA, 949 bp, Unknown
  Bacterial polypeptide expressing nucleotide sequence isolated from the Sargasso Sea
atggaattaactaaagaacaaatacaagaaattaaagatcaacaatctcaaaaaaacgaaaccaagagagtaactgcgccaaacttagagaaaattttgtatgagataatgcccgtacttgaccatggatttataagggttattgattatatgggtgatgatagttctatcgtgcaatcagcaagagtttcatatggtaaaggaaccaaaaaaatatctacagatagcggtttaataaaatatttaatgcgacactggcatagtacgccttttgaaatgtgtgaaattaaatatcatgttaaacttccaatatttatagctcgtcaatggatcagacacagaactgctaatgtaaatgaatactctgcaagatactcaatccttgacaaagaattttatttaccatcatcagaaaatttagctgcacagtcaaaaagtaatagacaaggaagaggagaagttcttaaaggtgagcaggctaatgaagttttaaaattattaaaaagtgatgcagaaaggacatatgataattatgaaacaatgcttaatgaaagatttgatggaacgacaatagatgaaaataaaaatggattagcaagagagcttgctagaatgaacctaactttaaacacatatacccaatggtattggaaaacagatctattaaacctaatgaattttttaagacttagagctgatagtcatgcccaatatgaaattagagcttatgcagaagtaatgttagatacattaaaaaaatgggtgccaactacatatgaagcttttatggattatagagttggaggaactgaagtttcagcaaaaggaaaaattattattcaaaaacttatcaaaggtgaaaaaataacattagatgaatctggtttgtcaaaaagagaatggaacgaattaatgattgcctttgatcttaaagataagacgatttaat

SEQ ID NO: 226601 - DNA, 949 bp, Unknown
  Bacterial polypeptide expressing nucleotide sequence isolated from the Sargasso Sea
tatgaaacttacatcagaacaagttgaagaaataaaagatcagcaagaacaaaaaaatattacaaaaagagtaacgtcacctgatttagagagactcttatatgaagttattccaatacttgatcatggatttataagagtagttgattatatgggtaatgactcttcaatagtacaagcagcaagagtttcttatggaaaaggaacaaaaaaagtttctacagattcaggtttaataaaatatttaatgaggcattggcatagtaccccatttgaaatgtgcgaaataaaataccatgttaagcttccaatttttattgcaagacaatggattagacatcgaactgcgaatgttaatgagtattctgccagatattcaattttagataaagaattttatttaccttcagaagaaaatttagcagcacaatcaaaaagcaatagacaaggaagaggagatgttattgaaggtgaacaagcaaaaaaagttttgaatttacttaaaactgatgccgaaagaacatacaataactatgaagagatgttgaacgaaagatatgatggttcagtaattgaagaaaataaaattggtttagcaagagagcttgcaagaatgaatttaacattaaacacatatacccaatggtattggaaaactgatttactaaacttaatgaattttttaaggcttcgtgcagatcaccatgctcaatatgaaataagagcttatgcagatgcaatgttagatactttaaaaagatgggttccaattacttatgatgcttttatggattatagagtagggggaactgaagtttcatcaaaaggaaaattaataatccaaaaactaataaaaaaagaaaatgttactattgaagaatctggtctttcaaaaagagaatggaatgaattgatggaagcttttaatcttaaagataagttgatttaa

SEQ ID NO: 226602 - DNA, 949 bp, Unknown
  Bacterial polypeptide expressing nucleotide sequence isolated from the Sargasso Sea
aatgaaactcacaaaagagcaaaaaagcgaaattttagaacaacaatcacaaaagaatgctactaaaagggtgacttctcctgaactagaaaaaattctttatgaagcaatgccagtcttagaccatggttttgtgagagtagtagattatatgggggatgatacttctatagttcaatctgcaagagtttcatacgggaaaggcacaaaaaaagtttcaacagacagtggtttgataaaatatctaatgagacatcgacatagcaccccttttgaaatgtgtgaaattaaatatcatattaaacttccaatttttattgccagacaatggattagacatagaacagcaaatgttaacgagtattctgcaagatattctattatggataaagagttttacgttccttcaaaagaaaatctagctgctcaatctaaaaataatagacaaggtagaggtgatttaataaacggaacacaagctgatagtattttaaaaatattaaaggaagatgctgaaagaaactataaacactacgaagagatgcttaatgaaaaatatgatggaagtatcatagatgataataaaaaaggtttggcaagagaattagctagaatgaatttaacacttaattcttatacccaatggtattggaaaactgatttattaaatcttctaaattttttagccttaagggcagatagtcatgcgcaatttgaaatcagagagtacgcaagtacaatgttaaacacggtaaaaaagtgggtgcccataacttatgatgcttttattgattacagagttggaggaatggagatttcagcaaaaggcaaaatagtaattcaaaaaatgattaaaggtgaaaagtgtgatatcaacagctcaggcttgtcaaaaagagaatggaatgagttgatgcaatcgtttggttttacccaacatcttgcataa

SEQ ID NO: 226603 - DNA, 655 bp, Unknown
  Bacterial polypeptide expressing nucleotide sequence isolated from the Sargasso Sea
atgtctgattcaaaaaataatctatctagtgaacaaataaaagaaattaattctttaagagaaaattctaataaaactataagacctgttgccccaggcatagaaaaaatactatatgatgtatttccagcattagatcatggatttgttagagtagtagattatatgggagatgatcaagcaatagttcaggctgcaagagtttcctatggtaaaggaactactcgcgtttcagaagatagaggtttaattaggtatttaatgaggcatagacattcgacgccatttgaaatgtgtgaaattaaactacacgtaaagttaccaatgtttattgctagacagtggattaggcaccgtactgcaagtataaatgagtattcagcaaggtactctgtattagataaggagttttatattccagaagaaaaagatttagcagtgcagtctaaatctaataagcaaggtagaggtgatactttatcatcaaaagattctgaagaagcactatttttactaaaaagagatgcagaaaagtcatatgaaacttatgaatatttactaaacgaaagtccggaaggtgaagtagtagataataatagggatggtttatctagagaattagcaagaattaatcttactttaaatacttatactc

SEQ ID NO: 226604 - DNA, 952 bp, Unknown
  Bacterial polypeptide expressing nucleotide sequence isolated from the Sargasso Sea
catgaaattaactaaagaacaagaaaaagagattaaagaccaacaaaaacaacagagtaacactaaaagagttactgcccccgagttagaaaaaatactttatgaagcaatacctatattagatcacggatttattagagttgtagactacatgggcgacgatacttcaattgttcaagcagcaagagtttcctacggcaagggtacaaaaaaagtttcaactgattcaggtttaataaaatatttaatgagacattggcatagcactccatttgaaatgtgtgaaataaaataccatgtaaagttaccaatatttatagccagacaatggattagacatagaacagctaatgtaaatgaatattcagcaagatattcaattttagataaagaattttatctaccagaattagaaaacttagccgctcaatctcaaagcaatagacaaggaagaggtgatgttcttaaaggagaacaagcaaaaaaagttttaaatcttttaaaaaatgatgcagaacaaacttataacaactatgaaacaatgcttaacgaacgttatgatggatcagtaataaataataaagaagtcgggttagctagagaacttgctagaatgaatttaaccttaaacacttatactcaatggtattggaaaactgatcttttaaatttaatgaattttttaaggcttagagcagatcatcatgcccaatacgaaataagagcttatgccgaagcaatgcttaaaacattaaaaaaatgggtaccaataacatatgaagcatttatagattatagagttggaggaactgaagtatcctctaaaggtaaaattatattgcagaaattaattcaaggcgaaaatattaatatagatgagtctggtctttcaaaaagagaatggaatgaattaatgaattcatttggacttagtgataaaatagtaaaataa

SEQ ID NO: 226605 - DNA, 1078 bp, Unknown
  Bacterial polypeptide expressing nucleotide sequence isolated from the Sargasso Sea
tatggtggaggtggtgggtactgcccccacgtccgcaatgtttattacgaaattcgtttatcgtcgtagttggaaaaccaacacttataatataaaacattattctaaagattcaatttatttgtgttatatggcgctttctgaacagcaaaaaaaagatatattagaccaacaggctcaaaaaaacactacaaaaagagtcacttctccagaattagaaaaaattttatacgaagcgattcctgttctcgatcatggatttgtaagagttgttgattatatgggcgatgacagttctattgttcaagcagcaagagtttcttatggaaaaggaacaaaaaaagtttcaacagacagcggtttaataaaatatttaatgagacatcgtcacagcactccttttgagatgtgtgaaataaaatatcacgttaaattaccaatttttatagcaagacaatggattaggcatagaactgctaatgtaaacgaatattcagctagatattctatattagataaggagttttatatgccaacaaaagatcatctagccgcgcaatcatcaagtaatagacaaggtagaggagagctgattaacggaaaacaagctgatgaaattttaaatattttaaaaaaggatgctaaacaaacatatgaaaattatgaattaatgttgaatgaaagatttgatggtactgttataaatgaaagcaataagggtttagcaagagaactggctagaatgaatttaactttaaatacctatactcagtggtattggaaaacggatttattaaatcttttaaattttttatctcttcgcgctgatagtcatgcccagtatgaaattagagcttatgctgacgttatgactaataccttaaaaaaatgggtacctattacatttgatgcatttatggattacagagtgggagggatggaattatctgctaaaggaaaatctgtgattaaaaaaatgatcaaaggtgagaaatgtgattttgattcatcatttctttcaaaaagagaatggaacgaattaatggaatcttttggttttaaagaaaagatcctttaa

SEQ ID NO: 226606 - DNA, 1072 bp, Unknown
  Bacterial polypeptide expressing nucleotide sequence isolated from the Sargasso Sea
atggtggaggtggtgggtactgcccccacgtccgcaatggttattacgaaattcgtttatcgtcgtagttggaaatccaacattattaatataaaagtaattacaacagattcaataacaatcatgaaattaactaaagaacaacaagaagaaataaaaaatcaacaatctcaaaggaatcatacaaaaagagttactgctcctgagcttgaaaaaatcctatatgaagcactcccagctttagatcatggctttgttagagtagttgattatatgggtgatgatacatcaatagttcaatcagctagagtgtcatatggaaaaggaacaaaacaagtttcaacagacaaaggtttgattaaatatttgatgaggcactggcacagcactccattcgaaatgtgtgaaattaaatatcatgtaaagcttccaatatttattgctagacaatggattagacacagaactgcaaatgttaatgaatattccgcaagatattcaattctggacaaagagttttacttgccatcacaagaaaatttagctgctcaatcaacaagtaacagacaaggtagaggagatgtcttggaaggaaaacaggcagaggaagtcttagaacttttaaaaagtgatgcagaaagaacttatgataattatgagactatgcttaatgaaagatttgatggatcaactatcgatgaaaataaaaaaggtttagctagagaacttgcaagaatgaatttaacattgaatacctatacacaatggtattggaaaactgatttattaaatttgatgaattttttaagattaagagctgatagtcatgctcaatatgaaattagagtttatgctgatattatgttagataccgtaaaaaaatgggtccctattacttatgatgcttttatggattatagagttggtggtaccgaggtttctgcaaaaggaaaattaattattcaaaaacttatcaaaggtgaaaatgtggatgttgaaagttctgggttgtctaaaagagagtggaatgaattaatgactgcttttgatcttaaagataagttgatttaat

SEQ ID NO: 226607 - DNA, 1024 bp, Unknown
  Bacterial polypeptide expressing nucleotide sequence isolated from the Sargasso Sea
atggtggaggtggtgggtactgcccccacgtccgtaatgtttattacgaaattcgtttatcgtcatagttggaaaaccaactctattaatataaaagttatctataaagattcaataaaattcatgaaacttactaaagaacaaactcaagaaatccgtgatcttcaggcacagaaaaatgaaacgaaaagagtgacagctccaaatttagaaaaaattttatatgaagcaataccaatattggatcatggatttataagagtaatagattacatgggtaacgatacatcaatagtccaagcagctcgtgtatcttatggtaaaggtactaaacaagtttctacggacagtggtctaattaaatatttgatgagacattggcacagcacaccttttgagatgtgtgaaataaaataccatgttaaattaccaatatttattgctagacaatggattagacatagaactgcaaacgttaatgagtattcagcgagatattcaattttggataaagaattttacttaccaaaaaaagaacatcttgcagcacaatcaaaaaataacagacaaggcagaggagaggtgcttgaaggagatcaggctaataaagttttatctttattgaaggatgatgctgaaagaacttatgataattatgaaacaatgcttaatgaaagatatgatggatcagttgtcgatgagaatgaacatggtctcgcaagagaattggcaagaatgaatttgacgttgaatacctatactcaatggtactggaagacagatttattaaacttaatgaattttttgagactaagagctgatcatcatgctcagtacgaaatcagagcatatgcagatgtaatgttagatactttaaaaaaatggacacctataacttatgatgcttttatggattatagagtcggaggcacagaagtctctgcaaaaggtaagcttatagttcaaaaattgattaagggagaaaaaagtgatatagaaagttctggtttgtctaaaaagagag

SEQ ID NO: 226608 - DNA, 499 bp, Unknown
  Bacterial polypeptide expressing nucleotide sequence isolated from the Sargasso Sea
aatggtggaggtggtgggtactgcccccacgtccgcaatggttattacgaaattcgtttatcgtcatagttggaaatccaactttattaatataaaaggaattgctaaagattcaataacaatcatgaaattaacaaaacaacaaaaagaagatattaaaaaccaacaatcacaaagcaatttaacaaaaagagtcactgctcctgaattagagaaaattctctatgaggctttacccgctcttgatcatggttttgttagagttattgattatatgggagacgatacatcaatagttcagtcagctagagtttcatatggcaagggaacaaaacaagtttcaacggattcaggattgattaaatatttaatgcgtcattggcacagcacaccttttgaaatgtgtgaaattaaatatcatattaagcttccaatatttattgcacgacaatggattaggcatcgaactgctaatgtaaacgaatattcagcgagatat

SEQ ID NO: 226609 - DNA, 1072 bp, Unknown
  Bacterial polypeptide expressing nucleotide sequence isolated from the Sargasso Sea
aatggtggaggtggtgggtactgcccccacgtccgcaatggttattacgaaattcgtttatcgtcatagttggaaatccaactttattaatataaaaggaattgctaaagattcaataacaatcatgaaattaacaaaagagcaaattgctgaaattaaaagtcaacaattacaaagtaattcaacaaaaagagtgacctctccagaattagaaaaaattctttatgaagcactgccagcactcgatcacggatttgttcgagttgttgattacatgggagatgatacatcaatagtgcaatcagctagagtttcttatggcaaaggaacaaaacaagtttcaactgactcagggttaattaaatatttaatgcgtcattggcatagtacaccctttgaaatgtgtgaaattaaataccatatcaaactgccaatttttattgctcgtcaatggattagacataggactgcaaatgtaaatgaatattctgcaaggtattcaattttagataaagaattttacttaccatcaaaagagaatcttgcagctcaatcgacatctaataggcaaggtagaggagatgttctcgaaggtgaacaagcaaatgaagttttagaacttttaaaaaatgatgctgaaagaacatatgcaaattatgagacaatgctcaatgaaaaatatgatggatctatgattgatgaaaataaaaagggattagctagagaacttgcaagaatgaacttaactttaaatacatatactcagtggtattggaaaacagatttgttaaatcttatgaattttttaagattaagagcagaccatcatgcccagtacgaaattagagtttacgcagatataatgttggatacacttaaaaaatgggttccaataacttatgaggcctttatggattatagagttgggggaaccgaagtttcagcaaagggaaaaattattattcagaaactcatcaagggtgaaaaaatttctatgggagactctggtttatctaagagagaatggaatgaacttatggaggcttttgatcttaaagataagttgatttaa

SEQ ID NO: 226610 - DNA, 1054 bp, Unknown
  Bacterial polypeptide expressing nucleotide sequence isolated from the Sargasso Sea
actgcccccacgtccgcaatggttattacgaaattcgtttatcgtcataggttggaaaaccaactttaataatataaaaggaaatagaacagattcaataacaatcatgaaattaacaaaagaacaatctgaagaaataaaaaatcaacaatctcaaagcaatcaaaccaaaagagttacagcaccagagcttgaaaatatcctttatgaggcaattccagctctagatcatggttttgttagagttgtagattatatgggtgacgatacttcaatagttcaatctgctagagtttcttacggcaaaggaaccaaacaagtttctacagataaaggtttaattaagtatctgatgagacattggcatagcaccccttttgaaatgtgtgaaataaaatatcatataaaattaccaatatttattgcaagacaatggataagacatagaactgcaaatgttaatgaatactctgcaagatattcaattttggataaagaattttatctaccatcctcagaaaatttagctgcccaatctaccagtaatagacaaggaagaggagatgtattggaaggtaaacaagctaaagaagttttagaacttttaaaaagcgatgcagaaagaacttatgataattatgagacaatgcttaatgaaagatttgatggctcaactatagatgaaagcaaaaaaggtttagcaagagagcttgcaaggatgaatttaactttaaatacttatacccaatggtattggaaaacagatcttttaaatttgatgaattttttaagattaagagcagatagtcacgctcaatatgaaataagagtttatgccgacataatgttagacactgttaaaaaatgggttccaattacctacgatgcttttatggattacagagttggagggaccgaagtttcagcaaaaggaaaaataattatgcaaaaacttattagaggtgaaaatattgatttagatagctctggtttgtccaaaagagaatggaatgagttaatgattgcttttgatcttaaagataagttgatttaa

SEQ ID NO: 226611 - DNA, 1072 bp, Unknown
  Bacterial polypeptide expressing nucleotide sequence isolated from the Sargasso Sea
atggtggaggtggtgggtactgcccccacgtccgcaatggttattacgaaattcgtttatcgtcgtagttggaaaaccaacattattaatataaaaggaattacaacagattcaataacaatcatgaaacttaccaaagaacaagcagaagaaataaaaaatcaacaatctcaaagcaatcaaactaaaagagttacagtaccagaacttgaaaatatactatacgaggcaattcctgcgttagatcatggttttgtgagagtagttgattatatgggggatgatacttcaattgttcaatcagcaagagtctcttatggaaaaggaactaagcaagtttcaactgataaaggattaatcaaatacttaatgagacattggcatagtactccatttgaaatgtgcgaaataaaataccatataaaattaccaatatttattgctcgacaatggatcagacatagaactgcaaatgttaatgagtattctgcaagatactctattttagacaaggaattttatttacccacccaagaaaatttagctgctcaatctaccagtaacagacaaggtagaggagatgtgttggagggcaaacaagcagaagaagttttagaacttttaaaaagtgatgctgagagaacttacgacaattatgaaacaatgcttaatgaaagatttgatggctcaactatagatgaaaataaaaaaggcttagcaagagaacttgcaagaatgaatttgactttaaatacctacacccaatggtattggaaaactgatcttttaaacctaatgaattttttaagattaagagctgatagtcatgcacaatatgaaataagagtttacgcagatataatgctggatactgtgaaaaaatgggttcctataacttatgaagcttttatggattatagagttggaggcacagaagtttcagctaaaggaaaattaattattcaaaaacttattaaaggtgaaaatgttgaagtagatagctcaggtctttcaaaaagagagtggaatgagctaatgattgcttttgatcttaaagataagttgatttaat

SEQ ID NO: 226612 - DNA, 1072 bp, Unknown
  Bacterial polypeptide expressing nucleotide sequence isolated from the Sargasso Sea
aatggtggaggtggtgggtactgcccccacgtccgcaatggttattacgaaattcgtttatcgtcgtagttggaaatccaacattattaatataaaagtaattgaaatagattcaataacaatcatgaaattaactaaagaacaagaagaagaaataaaaaatcaacaatctcaaagttatcaaactaaaagggttactgcacctgagcttgagaaagtcctatatgaagcattaccagctttggaccatggttttgttagagtagttgattatatgggtgatgattcatccatagttcaatcagctagagtgtcatatggaaaaggaacaaaacaagtttcaactgacaaaggtttgattaagtatttgatgagacattggcacagtacaccatttgaaatgtgtgaaattaaatatcatgttaagcttccaatatttattgcaagacaatggattagacatagaacagcaaacgtgaatgaatactccgcaagatattcaatacttgataaagaattttatttaccatcacaagaaaatttagctgcccaatcaacaagtaacagacaaggcagaggagatgttttggaaggaaaacaggcagaagaagttttagaactgttaaaaagtgatgcagagagaacttatgagaattatgaaacaatgcttaatgaaagatatgatggttcaaaaattgatgaaaataaaaaaggattagcaagagaacttgcaagaatgaatctaacattaaatacttatactcagtggtattggaaaactgacttattaaatttaatgaattttttaaggttgagagctgacagtcacgctcagtatgaaattagagtttatgcagatataatgttagatacagttaaaaaatgggtaccaataacatatgatgcatttatggattacagagtagggggtacagaggtctcagcaaaaggaaaagttataattcaaaaacttattaaaggtgaaaatgtagatattgagagttcaggtctatctaaaagagaatggaatgaattaatgactgcttttgatcttaaagataagttgatttaa

SEQ ID NO: 226613 - DNA, 514 bp, Unknown
  Bacterial polypeptide expressing nucleotide sequence isolated from the Sargasso Sea
aatggtggaggtggtgggtactgcccccacgtccgcaatggttattacgaaattcgtttatcgtcgtagttggaaatccaacattattaatataaaagtaattacaatagattcaataacaatcatgaaattaactaaagaacaaacagaagaaattaaaaaccaacaatcgcagagtaatcagaccaaaagagttaccgctccagagcttgaaaaaatactatatgaagcgctgccggcattagatcatggatttgtaagagtagttgattatatgggcgatgacagctctatagttcagtccgctagagtatcttatggaaaagggacaaagcaagtttcaacagataaaggtttaataaaatacttgatgagacattggcacagtacgccatttgaaatgtgtgaaataaaatatcatattaaacttccaatatttatcgcaagacagtggatcagacatagaactgctaacgtgaatgaatactctgccagatatttcattttagattaa

SEQ ID NO: 226614 - DNA, 1072 bp, Unknown
  Bacterial polypeptide expressing nucleotide sequence isolated from the Sargasso Sea
atggtggaggtggtgggtactgcccccacgtccgcaatggttattacgaaattcgtttatcgtcgtagttggaaaaccaactttattaatataaaaccatttataagagattcaataaaaatcatgaaattaactagcgaacaagcacaagaaattaaagaacaacagtctcagaaaaatcaaactaaaagagttacggcacctgctcttgaaaatattctctatgaagcattaccagctttagatcatggatttgtaagagttattgattatatgggtgatgatacatctatagtccaatctgctagagtttcctatggaaaaggaactaaaaaagtttcaacagatgcaggtttaattaaatatttaatgagacattggcatagtacaccttttgaaatgtgtgaaattaaatatcatgttaaacttccgatttttattgctcgtcaatggataagacatagaacagcaaatgttaacgagtactctgcaaggtattcaattttagataaagaattctatctaccctcttcagaaaatttagcaacacaatctattagtaacagacaaggtcgaggagatgttttggagggcgaacaagcaaaagaagttttagatcttctaaaaaatgatgcagaaagaacatataataattatgaaactatgttgaatgaaaaatttgatggctcgactatagatgaaaataaaaaaggtttagcaagagaacttgcaagaatgaatttaactttaaacacttatactcaatggtattggaaaactgatttattaaacttgatgaattttttaagattaagagcagatagtcatgcccaatatgaaataagagtatatgctgatataatgttagatactgttaaaaaatgggtaccaataacttatgatgcatttatggattacagagtaggtggaacagaagtttctgcaaaaggtaaaataattattcaaaaacttattaaaggtgaaaacgttgatgttgataactcgggtctatcgaaaagagaatggaatgaactaatgattgcctttgatcttaaagataaattgatttaat

SEQ ID NO: 226615 - DNA, 467 bp, Unknown
  Bacterial polypeptide expressing nucleotide sequence isolated from the Sargasso Sea
actggaagaaattagtaatttaaagttttctaccaaaagagcaacagtcgctaaattagaaaaaattctctataaaccccgcaaagttttggatcatggttttataagattaattgattacatgggagatgattcttcaattgttcaggctgcaagggtttcttatggaaaaggaactaaaaaattaaaccaagacaagagtttaattaattatcttttaagtcataaacattcaactccctttgaaatgaatgagataaaatttcatattaaacttcctatatttgtagccagacaatggattagacacagaacagcaaatgtaaatgaatattcagctcgttattcaattcttgatgaggagttttacatccccaaaattgatgatctaaaacctcaatcacagcaaaataatcagggtaggtctggagagattgataagaatctacgaaaacactacctatcat

SEQ ID NO: 226616 - DNA, 865 bp, Unknown
  Bacterial polypeptide expressing nucleotide sequence isolated from the Sargasso Sea
aatgccggtaaacaaagaacaacttgatgaaattgaagccttaaggtctgaaatatcagaaacagctcgtgttacagctcctgaattagaagcagttttgtacaggccaatagaagtgctcgatcatggctttattcgtgtcattgattatatgggggatgacagttcaatagtgcagtcggcaagagtatcatatggtaaaggcacaaagaagatttcaaatgacaaagggcttattaaatatttgatgaggcaccgtcattcaaccccttttgaaatgtgtgaaattaaatttcatattaaacttccaattttcattgctcgacaatggatacgacacagaacggcaaacgttaatgagtactcggctcgctactcaattcttgataaagaattctatattccttcagcagaaaacctagcagcacagtcagcaatcaataatcagggtagaggggaagtcttaacagatgatgaagcctctaatgttatacaaatactaaaaaaggatgccgagcagacatattctaattacgaaactctattaaatgagagttctgagggcaacataattgatgaaagtaaatctggaattgcaagagaattggcccgaatgaatcttaccctcaatacctatacacaatggtactggaagattgacctgaataatttattgcactttcttgctctaagagctgacgaccatgcgcagtatgaaatacgtgtttatgcagatgccatgttagatattgtaaaaaaatgggttcctcttacttacgaagcatttgaagattatagaattggtggaacagaactctccgccaaagaggtaaatctaatgagaaaacttctaaaagggggagaa

SEQ ID NO: 226617 - DNA, 814 bp, Unknown
  Bacterial polypeptide expressing nucleotide sequence isolated from the Sargasso Sea
tatgaagaaaaaaatcactaaagtgccaaaatttaaagattttataactactagagctacgtcgtctgctttagaaaaaatactatataagcaaatatctattttagaccatggcttcatcagagttattgactatatgggaactgatcagtctatagtccaagcggcaagagtttcttatggtgagggaacaaaaaaattacgtgaagataggggccttattagatatttgttaagtcattggcatacaactccgtttgagatgtgtgaaattaagtttcatattaaactgcctatttttgttgctagacaatggattagacatagaactgcaaatgtaaatgaatactctgcaagatactcagtactagataaagaattttatgttccagaaatggatcaactaggatctcaatcgactacaaataaacaaggtagatcaaatactttagataaaaaatttgcgaagcaggctcaagatttaattcaaaagaattcggagcaactttatgacgactaccaaaatttattgaatggtaaacttttgaataacgatgaatacgttgaaggggaaggattagcgagagaactagctcgaacaactcttccattaaattattacactcaatggtattggaaggtagaccttcataatctcatgcattttttgagattaagagctgatagtcatgctcagtatgaaatacaaatttatgctgaaaaaatggttgaaattttaaaaaagtgggttcctttaacatacgaagctttcgaagattaccgttcagactcattccaactctctaaggaagct

SEQ ID NO: 226618 - DNA, 684 bp, Unknown
  Bacterial polypeptide expressing nucleotide sequence isolated from the Sargasso Sea
tatgaagaaaaaaatcactaaagtgccaaaatttaaagattttaaaactactagagctacttcatctgctttagaaaaaattctatataaacaaatcccaattttagaccatggtttcataagggttattgattacatgggaacagatcagtcaatagtccaagcagccagagtctcctatggtgagggaacaaaaaaattacgtgaggaccgtggtcttattagatatcttttaagtcactggcatacaactccgtttgagatgtgtgaaattaagtttcatattaaacttcctatttttgttgctagacaatggattagacacagaactgcaaatgtaaatgaatactctgcgagatattcagtattagataaagagttttatgttccagaaatggatcaacttggatctcaatccactacaaacaagcaagggagatcaaatactttagataaaaagtttgcaaaacaagctcaagatttaattcaaaagaattccgaacaactctatgatgattaccaaaatttattgaatggtaagcttttgaataatgatgaatacgttgaaggggagggtctagctagagaactagctcgaacaactcttccattaaattattacacacaatggtattggaaagtagaccttcataatcttatgcattttttaagattacgagcaga

SEQ ID NO: 226619 - DNA, 552 bp, Unknown
  Bacterial polypeptide expressing nucleotide sequence isolated from the Sargasso Sea
aatgacaatatctgaacaacaaaaaaaagagatagaagaagaaaaaaggaagtcttttgtaacaaaaagaacatcggttgataatatcgaaaaaaagctatactcaattaatcccgttttagaccatggctttataagagtgattgattatatgggagacgatagcgcgattgttcaggcagcaagagtttcatatggctcgggtactaagaaatctcaagatgatagttcattaattaggtaccttatgagacattggcactcaaccccttttgagatgtgtgaaattaaattccatataaaattacctgtttttgttgcaaggcaatggatacgacataggaccgcaaatgttaatgaatactcagcacgatattccatattggaaaaggaattctacataccagaagaaggaaatttagccatgcaatcgagcacaaataaccagggcaggggcgaaactctgagctcggctgaagcgcacaaagtattagaaatattaaagctagatactgatagatcttacaaaaactatgaaactcttttgtcttc

SEQ ID NO: 226620 - DNA, 517 bp, Unknown
  Bacterial polypeptide expressing nucleotide sequence isolated from the Sargasso Sea
atgaaaaaaaaatcggatacccaagatctaaaaaaaattttaaattcagaatttaaaaccagaagggtaactgcgagtaaattagataaagttttatacaaaccattcaaagttttagaccacggattcgtaagggtcattgactacatgggggatgattcatctattgttcaagcagctagagtttcatatggaaaaggaactaaaaagttaaatcaggataaaaatttaataaattacttattgagtcatagacataccactccctttgagatgaatgaaataaaatttcatatcaaacttccaatttttgttgcacgtcaatggatcagacatcgaacagcaaacgtcaatgaatattcagcaagatattcaatacttgataacgaattttatattccaaaaattgatgatgttaaaccccaatcccaatcaaacaaccaaggaaggcatggtgaaatagaaaaagatttaaaaaaacactacctttctttgattagagaaaatgccaaaatta

SEQ ID NO: 226621 - DNA, 454 bp, Unknown
  Bacterial polypeptide expressing nucleotide sequence isolated from the Sargasso Sea
ttgtcagatttaactaaagagcaaattgaggagattaattcacaaaggtccaaagttgaaggaactaagagggttgtttctaatggtttagaggagataatttatcaatctttgcctgtgctagatcatggttttattagggtaattgattacatgggagacgattcatcaatcgttcaagctgctagagtatcatatggaaaaggaacgaaacatgtctcagctgacaagggcttgattaattatcttatgaggcataggcattcaactccctttgaaatgtgtgaaataaaatatcatgtaaagttaccaatatttgtcgctcgacaatggattaggcatagaacggctagtgttaatgaatactctgcacgttattcagttttagataaagaatattatattcctgagcctcaaaatttagctgctcaaagtagctcaaataaacaaggca

SEQ ID NO: 226622 - DNA, 916 bp, Unknown
  Bacterial polypeptide expressing nucleotide sequence isolated from the Sargasso Sea
actggaagagatagaagctttacgctctgaaaaaactgagactgccagagttactgctccagagttagaggctgttttgtaccagcccattgaagttcttgaccatggcttcgttcgcgttattgactatatgggtgatgacagttctgttgttcaatcagcaagagtttcttatggcaaaggtacaaagaaaatttcaaatgataagggtctaattaaatacttgatgagacatcgccactcaacgccatttgaaatgtgtgagattaagtttcatataaagttaccaatttttattgcccgtcagtggattagacatagaactgcgaatgtgaatgaatattcagctaggtattcaatacttgataaagagttctatataccttctgcagaaaatttagcagcccaatcacagattaacaatcagggtcggggagatgcgctaactgatgacgaagcatcaaatgttattcaaattttaaaaaatgatgcagaacaaacgtatgcaaactatgagacacttttaaatgaaaattcctcaggaggagttttagatgagagcaagtcaggtattgctcgcgaacttgctagaatgaatcttacattaaatacgtatacgcaatggtactggaaaatagaccttaacaatttgctccattttttagctttaagagccgatgatcatgctcaatacgaaattagagtttatgccgatgtaatgcttgatctcgtaaaaaaatgggttcctttaacttatgaggcatttgaagactatcgaatgggcggaaccgagttatctgcaaaagaaattaaattaatgcgaaaacttcttaagggagaaaaagtttcatttgaagaagaaggtttatctaaaagagagtggagcgagcttcaaagaaaatttgacattaattag

SEQ ID NO: 226623 - DNA, 937 bp, Unknown
  Bacterial polypeptide expressing nucleotide sequence isolated from the Sargasso Sea
atgccggtaaacaaagaacaacttgatgaaattgaagccttaaggtctgaaatatcagaaacagctcgtgttacagcccctgaattagaagcagttttgtacaagccaatagaagtgctcgatcatggctttattcgtgtcattgattatatgggggatgacagttcaatagtgcagtcggcaagagtatcatatggtaaaggcacaaagaagatttcaaatgataaagggcttattaaatatttgatgaggcaccgtcactcaaccccttttgaaatgtgtgaaattaaatttcatattaaacttccaattttcattgctcgacaatggatacgacacagaacggcaaacgttaatgagtactcggctcgctactcaatccttgataaagagttctatattccatcagcagaaaacctagcagcacagtcagcaatcaataatcagggtagaggtgatgcgttaacagatgatgaagcttctaatgttatacaaatactaaaaaaggatgcagagcagacatattctaattatgaaacgttattaaacgaaagttctgagggcaacataattgatgaaagtaaatctggaattgcaagagaattggcccgaatgaatcttaccctcaatacctatacacaatggtactggaagattgacctgaataatttattgcactttcttgctctaagagctgatgaccatgcgcagtatgaaatacgtgtttatgcggatgccatgttagatattgtaaaaaaatgggttcctcttacttacgaagcatttgaagattatagaattggtggaacagaactctccgccaaagaggtcaatctgatgagaaaacttctaaaaggcgagaaagtatcttttgaagaagaaggtctgtctaaaagagaatggagcgaactgcaaagaaagtttgaaattagttagt

SEQ ID NO: 226624 - DNA, 678 bp, Unknown
  Bacterial polypeptide expressing nucleotide sequence isolated from the Sargasso Sea
gttgtcgggtttaactaaagagcaaattgaagaaataaaagttcaaagagcagaaactaaagagacaaagagagttgtttctagtggcttggaaaatattttatatgaatctattccagttttagatcatgggtttattagagtaattgattatatgggagacgatacttccattgttcaagcagcgagagtttcttatggtaaaggcactaagcacgtatcagctgataggggtttaattaactatctaatgagacatagacactcaacaccttttgaaatgtgtgaaattaaataccatgttaaactgccaatttttgttgcaagacagtggataaggcataggacagcaagcgtgaatgaatattctgctagatattcagtacttgataaagagtattacattcctgatgctaagaatttagcttctcaaagtaattcaaataaacaaggcagaggtgcggtattagaaggggataatgccaggaaagttttggaccttttaatagaagattctgaaaaagtatatgatgattatgaaaaacttctcgttgggtttcctgaaaaaaatgatgaagaaaatggtttgtcaagagaacttgcccgcatgaacttatctttaaattattatacacaatggtattggaagattgatttacataatcttctccacttttt

SEQ ID NO: 226625 - DNA, 193 bp, Unknown
  Bacterial polypeptide expressing nucleotide sequence isolated from the Sargasso Sea
atgtggaaggctcgaatatttaccctatatcctgaaatttttcccggaccattaaataagggtctttacggaaaagctttacaaaaaaaaatttgggatttagaagttattgatatccgagactccgctgaagataaacataagacagtagacgacacacctttggaggaggtagtggaatgttatgaaacca

SEQ ID NO: 226626 - DNA, 182 bp, Unknown
  Bacterial polypeptide expressing nucleotide sequence isolated from the Sargasso Sea
agaatatcctcaatatacaaaaccacaaaattgggaaggtaaaagcacacctgaagtacttttatcaggtgatcatgccaaaattaaaagctggcgtttagcacaatcagaggctataacacgacgccagaggcctgatctttgggaaaaatatttaaataaaaaaaatgaaaaatattgaa

SEQ ID NO: 226627 - DNA, 445 bp, Unknown
  Bacterial polypeptide expressing nucleotide sequence isolated from the Sargasso Sea
agtttattatctaacaccaaaaggtaaagtttttaatcaaaatattgcaaagaatattgttaaaaaaaacaaagttaatattttatgtgggcacttcgagggagttgatcaacgagttctagactcaagaaaagtagaagagataagtataggtgactttatcctttcaggtggagagatggcttcttttgttgttttagatacggttttaagattagtgcctggagtattaggaaatctaaattctacaaaagatgaaagttttgaaaatgggcttttggagtatccacaatatactaaaccacaaatatgggagaaattaagtgttcctgacatacttttatctggagatcataacaaaattaaaagctggcgtttatcacaatctgaggctataacacggcaccgaagaccagatttatggcaaaaatataaaaaggattaa

SEQ ID NO: 226628 - DNA, 757 bp, Unknown
  Bacterial polypeptide expressing nucleotide sequence isolated from the Sargasso Sea
gttgcttgagcggcgaggcataacgcttgccgttgagcgggatcatgaagcccacgataacccccgccagggtcgcatggacgcccgacttcagcaccgccacccagagcaccagccccaccaacatgtagaggctgatcctatcctcgccgcggcggttcatccacagcagggtcagggtcgccaggatgccgatcgccagcgccgtcagcgacagctgctgggtgtagaacagcgcgatgatgatgatcacgcccaggtcatccatgatggccagcgccagcaggaacaccttgaggctgaccggcacccgcttgcccagcagcgccatcaccccgagggcgaaggcgatgtcggtggcggcgggaatggcccagccggcgcgcgccacttcatcggaatagttgaagaaggcatagatgagcgcgggcgccagcatgccgcccaccgcagcgatggccgggaaggtggcctgcacccgggaagagagggccccttccagcatctcgcgcttcacctcgaggccgaccagcaggaagaagacggccatgaagccatcgttgatccagagcagcagcggcttgttgatgtcgagggcggcgatgcgcacctgcacctgggtatcgaggaaggcctgatagctgccggccaggccgctgttggccaggatcatcgccagcatggccgccatgatcagaattattccggaggcggcctccagcttgaggaactttttgattacgtcgctcatggttaa

SEQ ID NO: 226629 - DNA, 428 bp, Unknown
  Bacterial polypeptide expressing nucleotide sequence isolated from the Sargasso Sea
aatgctcgatgtacaaatatttactttgtatccagatttatttcctgggcttttagatgtaggcatctataagaaagctaaggaaaaacaaaaatggagtctcaaaattatagatattagagactatgcttttgatgataatcggacagttgatgatacaccttttggtggtggaagtggtatgttattaaaaccagatgttgtagcatctgctttagataaaaacataaaaggcaaagagaagataatttatctatctcctaaaggtaaaagactagatcaaaaagaagtgaaatccttaagtaagctaaataaaataaatattttatgtggtcattttgaaggtattgatcaaagacttttagagacgcgaaatatagaagaatacagtattggagattttattttatctggaggtgagagcgcat

SEQ ID NO: 226630 - DNA, 373 bp, Unknown
  Bacterial polypeptide expressing nucleotide sequence isolated from the Sargasso Sea
aatgattaatgtaaaaattttgacaggctacccagagatgtttccaggagggttaactcattctttaatgggtaaagcacttaaagaaaatatttttacaattgagactgtaaatttacatgattttggaattgacaatagaatgagtgttgatgatgagccttttggtggaggtcctgggatggttttaagaccagatgtagttgaaaaagcactattatcagtttcaaataataaaaatctaaaatctagcaagatatatcttactccctcaggatctttattaaaccaagaaaaacttggtattttagccaaattagatgaaattattatcctttgtggtcgttttgagggtgttgatcaaagagctatt

SEQ ID NO: 226631 - DNA, 370 bp, Unknown
  Bacterial polypeptide expressing nucleotide sequence isolated from the Sargasso Sea
atgtggaaggctcgagtatttactttgtatccagaaatttttccaggtccactaaataaagggctgtacggaaaagctttagaaaaaaaaatatggagcttagagattataaatattcgagacgtagcagaagataaacacaaaacggttgatgataaaccttttggtggtggaaatggaatgcttttaaaaccagacatcctaggaaagtctttagatagtaaaataaaaaaaaatgagaaaattttttatctttctccgaaagggaaaaaattcgatcaaaattttgctaaaaacttaacaaaagagaagaccatcaatataatttgtggtcatttcgaaggtattgatgagcgtgttttaggtacaa

SEQ ID NO: 226632 - DNA, 343 bp, Unknown
  Bacterial polypeptide expressing nucleotide sequence isolated from the Sargasso Sea
tatgtggcaagctcaagtgtttacactttatccagaggtttttcctggtcctttatctaaaggactttacggaaaagctttatacaataatttatggaaacttaaagttgtaaacataagagatgcagctgatgacaaacataaaacagtagatgatacaccttatgggggtggttcaggaatgttgttaaaagcaaatgttcttgcaaagtctttagatgaaaacaaaaatgagagtgagagaattttatacttatcgccaaaaggaaaaaaatttgatcaaaacttagcaaaagagctatctaatgaaaaatctctgtctttaatttgtggtcatttttga

SEQ ID NO: 226633 - DNA, 130 bp, Unknown
  Bacterial polypeptide expressing nucleotide sequence isolated from the Sargasso Sea
cagttaataattatctgtgggcaatatgaaggttttgatgagagagtaagatacttggcggatgaagaagtttctataggtgattatgtcctcacaggtggggatatgaaggttttgatgagagagtaag

SEQ ID NO: 226634 - DNA, 664 bp, Unknown
  Bacterial polypeptide expressing nucleotide sequence isolated from the Sargasso Sea
atgtatttaataagaggacaaaacaacttaaagttattcaaatcaagatatcctgatgttcttttatcaggaacaatagggaattttgacggattgcacttaggacatcaggcaattttaggaaaaataaaaaataatgcacaaaaatataatgcaaaaacaatagttttttttacagaacctcatgctgcagagtatttttcaaaagtaagagataggaatcaaatcccacctccaagaatatgtccatggagagaaaaagttcaacttctaaaaaaaagtaaaatagatttcgcttgttttttaaaatttaataataaactcagaacaatgtcacccgatgattttatttctcaaattttagattcaataaatttagtaagttttaccgtaggggatgattttcgatttggagcagacagaaaaggggatactgatttattaaaaaattggggagagaaaaaaggaattttggtagaaaacaccgaaacaatatgtttagacggccaaagagtaagtagtacaagaataagagaggaactcttaaataataattttaataatgctgaaaagttacttggaagaccatatacattttctggaaaaatagttcatggtcaacatttaggaagaacgattaacattccaactgcaaatatatggc

SEQ ID NO: 226635 - DNA, 339 bp, Unknown
  Bacterial polypeptide expressing nucleotide sequence isolated from the Sargasso Sea
tatgtggcaagctcaagtgtttacactttatccagatatttttcctggtcctttgtctaaaggtctatatggaaaagcaatgtctaaaaatatttggaatttaaaagtagtaaacattagagatgctgctgaggataaacataaaactgtagatgatactccttatggaggtggttctggtatgttgatgaaagctgatgtattagcaaaatcattagatcaaaataaaaatgagggagaaaagatattatatttatctccaagaggaaaaaaatttgatcaaaattatgccaaagaattatcaaaggaaaaatcggtttcgataatttgtggacactt

SEQ ID NO: 226636 - DNA, 292 bp, Unknown
  Bacterial polypeptide expressing nucleotide sequence isolated from the Sargasso Sea
gactttatcctttccggaggagagatggcttcctttgttgttttagacacagttttaagattagtgcctggagtattaggaaatctaaattctacaaaagatgatttttttgaaaatgggcttttagagtatccacaatataccaaacctcaaatatgggagaaattaagtgttcctgacatacttttatctggagatcataacaaaattaaaagctggcgtttgtcacaatctgaggctataacacggcaccgaagaccagatttatggcaaaaatataaaaaggattaaa

SEQ ID NO: 226637 - DNA, 745 bp, Unknown
  Bacterial polypeptide expressing nucleotide sequence isolated from the Sargasso Sea
aatgcaaactatatcccccattctcaatattatgataaaggcttgtgaaaaagcttcaaaaattttgaaaagagattatggagaaattgaaaatcttcaagtatcattaaaaggacctggggattttgtaacaagttctgataaaaaatgtgaaaaaataattattcaagaattattaaaagcaaaaaaagattattcattaatcactgaagaaagtggaatattaaaaaataaagataaagataatatttggattgtagatccaattgatggaacaacaaactttatgcatagtatacctcattttgcaatatcattggctctaaaatcaaaaaatgaaattattgctggagttatttatgacccaataaaggacgagattttttatggagagaaaaatagtggagcatatttaaacaatcaccgaataagagtatctaaaagaaaaaatataaaccaaagtctttttgcttctggagataaaaatttaagccaatacaataatattaatataagaaaatctggaagcgctgctcttgatcttgcatatgttgcatgcggtagatatgaaggatattttcaaaaaaatttatctatttgggacattgctgcaggtttgattattttaaaagaggccggaggaataataagtgaattaaatatcaataatcagaccaatttaaaaattattgcatcaaatccttatattaatgaaaatttgttaaatatattaagtaagttttaa

SEQ ID NO: 226638 - DNA, 691 bp, Unknown
  Bacterial polypeptide expressing nucleotide sequence isolated from the Sargasso Sea
aatggccaaaaaccggttcaacattgcggtaatcgctggcgatggcatcggcactgaagtgatgccagaggggctgcgcgcgctctctgctgctgctactaaatttgatatcgatcttcattttgatcactttgattttgccagttataactactataccaaacacggtgaaatgttgcccgaagattggcaggaaaagattggtaaccataatgcgatcttctttggtgcggtgggcctgccagacaagatacctgaccacatttccctatgggggtcattgctgaaattccgccgggaatttgatcaatatatcaatcttagaccggtccgtctgcttcccggtgtgccatctccgcttgccaaccgtcagcctggcgatattgatttcatgattgtcagggaaaataccgagggtgaatattcgtccattggcggaaaaatgtttgccggtaccaagcgtgagattgtgatgcagcaaacagtgatgagccgtattggtgttgaccgtgtcctgcggtttgcttttgagttggcgcaaagccgcccaaagagacatctaacatctgcaacgaagtcgaacggtatttcgattactatgccatattgggatgagcgtgttgaggaaatggcgctgtcctatcctaatgtcgcatgggacaaatttcacattgatattctaactgcacat

SEQ ID NO: 226639 - DNA, 374 bp, Unknown
  Bacterial polypeptide expressing nucleotide sequence isolated from the Sargasso Sea
ttttgagggagtagatcaaagagcaattgatatattagattttgaggaaattagtataggggactatgttttagctggaggagagattgctgcacaagtgttacttgaaggttgtattcgtctcattcctggagtattagggcatccgaaaagtatattggaagaaagtttttctaataatttgctggagtatcctcaatatacaagaccaaaggtttgggaggattctctagggaataaacatgatgtccctgaagttttaactacaggccatcataataatataaaaaaatggagactaaataaatcggttgaaaaaactaaaaaaataagaccagatttatatgttaaaaaaaaacaagaacaggattaga

SEQ ID NO: 226640 - DNA, 313 bp, Unknown
  Bacterial polypeptide expressing nucleotide sequence isolated from the Sargasso Sea
tatgctgcaagttcaattattcactctgtatcccgaaatttttcctgggcccttaaacaaaggtctttatggaaaagcaatcaaaaaaaaactttggaaccttaatgtaattaatattagagactcagcattagataaacataagactgttgatgacaccccttatggtggtggaaatggcatgttgcttaaatcagatgttttggcaaattctattgatcaaaatgttaataaaggtgatagaattttttatctttctccaaaaggcaaaatatttgatcagacgctagcaaaagaattatcaaaacaaaaa

SEQ ID NO: 226641 - DNA, 245 bp, Unknown
  Bacterial polypeptide expressing nucleotide sequence isolated from the Sargasso Sea
aatgcttagcaagagaaacccttggtctattggaatgcttactttgtttccagagatgttccctggaccactaggattttcactagctggccgagctttagatgaaaagttgtggaaccttaatatctatgacattagacgcttttgtgagaaaagtgccgaagtggatagttctccatttggcggtggaaatggaatggtgatgagagcggatgtaattgatagggtcttgtctactgttactc

SEQ ID NO: 226642 - DNA, 383 bp, Unknown
  Bacterial polypeptide expressing nucleotide sequence isolated from the Sargasso Sea
gatggatattaaattcaatcttattaccttatttcctgaaatctatgatgctttggatcatggattaatcggtaaggccattgaaaataatgtaatcgagttaaataagattcaattacgagatttcgcaattaataaacatggtcagatagatggaaaaccgtttggaggagaaaagggcatgattatgatggttgagccgcttgaaaatgcattgaaatcaatatcgcccaagaaaaaacacatcgttataaatttctcaccacaaggaaagcaattaagtcaaaacctagctaaaaaaatgcttgattatgatgaaattactattgtgaacggaagatatgaaggtattgatgaaaggtttattgataaatatgtcgatt

SEQ ID NO: 226643 - DNA, 172 bp, Unknown
  Bacterial polypeptide expressing nucleotide sequence isolated from the Sargasso Sea
atgtgggaagcaagaatatttactttatatccagagatattccctggacctttgcaaaaaggtttatatggtaaagcattatcaaataaaatttggaatttagaagtaataaatattagagattctgcagaagacaagcataaaacagttgatgacactccttttggtggcg

SEQ ID NO: 226644 - DNA, 242 bp, Unknown
  Bacterial polypeptide expressing nucleotide sequence isolated from the Sargasso Sea
tttaattcctggagtattagggcattcagatagtgttttagaagagagtttttctaaagaactattagaatatccacactatactagacctaaaacttgggtggataaaaaaggaaacgcacataatgttccagaaatattagtttctggacatcatgaaaagattagagaatggagaaaaaataaatctttagaaataacaaaaaagtttagacctgacttattaaaaaataaagattaat

SEQ ID NO: 226645 - DNA, 139 bp, Unknown
  Bacterial polypeptide expressing nucleotide sequence isolated from the Sargasso Sea
ggaatgcaagttccagacatacttttatcgggaaatcatagcaagattactgactggaaaaaagaacagcaaattgaaatcaccaagtcaagacgtcctgatatatggaaaaaatacttaaataataaatcggagtaaa

SEQ ID NO: 226646 - DNA, 460 bp, Unknown
  Bacterial polypeptide expressing nucleotide sequence isolated from the Sargasso Sea
aaaggtcaagaaaaaataatttatttaagtcataaaggaaaattatttaatcatgaatatgctaaaaaactttctagcgaaaaaactttaaatttagtttgtggtcattttgaaggagtagatgagagagttcttgaaagtagaaatatagaagaaattagtattggagattatattttatcaggaggagaagttgcagcttttgttgttctagactctatcttaagatttgtacctggaatactaggcaatgcaaattcatcgattgaagaaagttttgagaatggtctactagaatatcctcagtttacaaaacctcaaatttgggaggaaaaaagtgtaccaaaagtgctaatttcaggagatcacgccaaaattaaagactggcgtttatctcaatctgaggctataacacgcgaccgaagaccagatttgtggcaaaaatataaaaaaaattaaa

SEQ ID NO: 226647 - DNA, 481 bp, Unknown
  Bacterial polypeptide expressing nucleotide sequence isolated from the Sargasso Sea
tatgggtgaaaggaaaaaaactttttacataaatactttaactatttttcctgaggcatttatcaactttcaggatatttcaattattggaaatgcaagaagaaaaaaaatatgggatttacaaataacagacataaaaaaattttctgataagaataataatattgatgataaaccatacggaggtggcccaggcatgattttaaaagccgatgttttacaaaatgcatacgagcaagcaatttgtgatatggaaaaaaaaattactcattatcataaaattatgctcactccaagaggagaacgactaaagcaaaaaactatagaagatttaagtgcaagtgaaggtatgattattattaatggacgatatgagggagtagatcaaagatttgttgattataataatttgagagaggtttctataggagactttgtaataagtggcggggaggctgctgctattacattaatagatgca

SEQ ID NO: 226648 - DNA, 496 bp, Unknown
  Bacterial polypeptide expressing nucleotide sequence isolated from the Sargasso Sea
agcagatgtattagcacgatcaatagatgataatgtaaaaggtaaagaaaaaataatttatttaagtcctaaaggaaaattgtttaatcatgaatatgctaaaaaactttctagcgaaaaaactttaaatttagtctgtggtcattttgaaggagtagatgagagagttcttgaaagtagaaatatagaagaaattagtattggagattatattttatcaggaggagaagttgcagcttttgttgttctagactccatcttaagatttgtacctgggatattaggcaacgcaaattcatcggttgaagaaagttttgagaatggtctactagaatatcctcagtttacaaaacctcaaatttgggaggaaaaaagtgtaccaaacgtgctaatttcaggagatcacgctaaaattaaagactggcgtttatctcaatctgaggctataacacgcgaccgaagaccagatttgtggcaaaaatataaaaaaaattaa

SEQ ID NO: 226649 - DNA, 148 bp, Unknown
  Bacterial polypeptide expressing nucleotide sequence isolated from the Sargasso Sea
cctcaaaaatgggaagaaaaggacattcccgaagtattattatctggagatcatgctaaaattaaggactggcgtttgtctcaatctgaggatataacacgacgccggcgtccagatttatggaaaaaatataaaaaaaacaaatgaa

SEQ ID NO: 226650 - DNA, 199 bp, Unknown
  Bacterial polypeptide expressing nucleotide sequence isolated from the Sargasso Sea
gatttgcttgaatttccgcaatatacaaggcctaagatttggaataaccttgaaattcctaaagttttgacgagtggaaaccataagaaaatagctctttggaggaaagatatggctgagaaactaacaaaaaaagttaggccggatttattggaaaaaatacaaaaaaaacaagacaataaagaaataaagtattaaa

SEQ ID NO: 226651 - DNA, 258 bp, Unknown
  Bacterial polypeptide expressing nucleotide sequence isolated from the Sargasso Sea
aatgttgcaagctcaagtatttacactttatccggatatttttcctgggcctttaggaaaaggtctttatggaaaagcaatgtctaaaaaattgtggagtttgaatgtgataaatattagagatgcagctacagacaaacataaaacagttgatgatactccttacggtggtggaacaggtatgttattaaaacctgatgttttagcaaattctatcgatcaaaacataaataaaggagataggattttgtatctttt

SEQ ID NO: 226652 - DNA, 475 bp, Unknown
  Bacterial polypeptide expressing nucleotide sequence isolated from the Sargasso Sea
aaagcaatttaaccaggcatatagtcaggaactgtttgaacataataaacatgttattttaattgcaggttactatgagggtgttgatgaacgcttgtttgatatgttgcccattcaacgtgtatctattggagattatattgtaaatagcggcgattgcgctgtagctgtaattgccgaatccattattcggcaagtacctggtgtactcggaaacaaagattgcatttacgaggattcttattgtaacggtttactcgaagcccctaaatacacacagccgcttaccctagataaatacagtgttccatctctcttacgggaaggaaatcaccaagctattgccagatatactcaaaaaatggcattatatacgactctggtccagcgaccagacctattaggttcttacagttgcaataagcaacaacaagatcttataacaacattattaaatgaaatggcggtgacataa

SEQ ID NO: 226653 - DNA, 457 bp, Unknown
  Bacterial polypeptide expressing nucleotide sequence isolated from the Sargasso Sea
atgttacttgctcgaatatttacactttatccagaattttttccaggacctctcggaaaaggtttgtatggtaaagcattggcagaaaaaatttggaaactagagacagtaaatattagggattatacaatcgacaaacataagacagttgatgatactacttatggaggaggttcaggaatgctaatcaaacctgatgtgcttgcaaactctttggataagaacttaagttctagagaaaaaataatttatttaagtcctaagggaaaattatttaaccaagaattagcaaaagaactttcaagggagaaaactattaatttaatatgtggacattttgaaggaattgatcaaagagtaatagaagcaagaaatatagaagaagtgagtataggcgactttgttttatctggaggagaaagtgctgcttttgtcatgttagatgcaattatacgat

SEQ ID NO: 226654 - DNA, 237 bp, Unknown
  Bacterial polypeptide expressing nucleotide sequence isolated from the Sargasso Sea
gattaattcccggcgtgcttggaaacccaggttcgttaacagaagaaacattcgagggaaatttattagaatatcctcaatatacgaaaccacaaaaatgggaaaaaaaggaggttccagatgtgttattgacaggagatcacgctaaaattaaagactggcgtttagcccaatcagaggatataacacgacgccggcgtccagatttatgggaaaaatataaaaaaaacaaatgaa

SEQ ID NO: 226655 - DNA, 250 bp, Unknown
  Bacterial polypeptide expressing nucleotide sequence isolated from the Sargasso Sea
atgtttatagctcaagtatttacattatatcctgagtactttcctggaccttttaaaaatggactttatggaaaagctattgaaaaaaaaatttgggatttgagaactgtaaatattagagattatgcaattgataaacataagacagttgatgatactccttatggaggaggctcaggaatgttaatcaagcctgacgtcctcgcaaagtcgttagataaaaacattaatcgagatgagaaaattgtta

SEQ ID NO: 226656 - DNA, 439 bp, Unknown
  Bacterial polypeptide expressing nucleotide sequence isolated from the Sargasso Sea
tatgattgatataaaaatattaacagcatatcctgaaatgtttccaggaagtttagagcattctgttataggcaaagctcttaaggaaaatatttttaaaattgatacaataaatctgcatgaatttggtatcgatgatcgaatgagtattgatgatgagccttttggcggtggacctggaatggttttaagaccagatgtggttgaaaaggcattaaagtctatgccagaacaatataacaaggagtctaaaaaaatatatcttacgccttcaggaactatattgaatcaagaaaaactgggaaatttatctaaacttgagaaaataactattctttgtggtcgttttgaaggagttgatcaaagagcaatagatgttttaggttttgaggaagtgagtataggaaattatgtcctggctggaggagagattgcagca

SEQ ID NO: 226657 - DNA, 280 bp, Unknown
  Bacterial polypeptide expressing nucleotide sequence isolated from the Sargasso Sea
aatgttgcaagcccaaatatttacactttatccagatatttttcctgggccattaggaaagggtctttatggaaaagcaatgtctaaaaaattgtggagcttgaatgtgataaatataagagatgcagctacagacaaacataaaacagttgacgatactccttatggaggtggaactggtatgttattaagaccagatgttttagcaaattctattgatcaaaacacaagtaaaggagataggattttgtatctttcaccaaagggtaaagtatttaat

SEQ ID NO: 226658 - DNA, 160 bp, Unknown
  Bacterial polypeptide expressing nucleotide sequence isolated from the Sargasso Sea
atacacaaaaccacaaatatgggaaaaaaagaggttcccgaagtacttttgtctggggatcatggtaaaattaaacactggcgtttatctcaatctgaggctataacacgcgtccgaagaccagatttgtggctaaaatataaaaaaaaaagtgattaga

SEQ ID NO: 226659 - DNA, 444 bp, Unknown
  Bacterial polypeptide expressing nucleotide sequence isolated from the Sargasso Sea
aatgtttttgtatagaatatttacattatatccagaatatttcccaggctatttgaataaaggtttgtttggaaaagctatgaatgaaaaaatttggaatttagaaacagtaaatataagagatcactcattggataagcataatacagttgatgacacaccatatggaggtggcagtggaatgttaataaaagcagatgtattagctaaatctttagatgataatattaaagaaaaagaaaaaataatttatttaagcccaaaagggaaattgtttgatcatcaatatgctaaaaaactttcaaatgaaaaaactataaattttatatgtggtcactttgaaggtattgatgaaagaataattcagagtagaaatatagaagaagtaagtattggtgattttattttatctggaggagaagtggcaacttttgtagttcttga

SEQ ID NO: 226660 - DNA, 325 bp, Unknown
  Bacterial polypeptide expressing nucleotide sequence isolated from the Sargasso Sea
atgtggcaagctcaagtgtttacactttatccagagattttccctggtcctttatctaaaggactttatggaaaagctttatcaaataatttatggaaacttaaagttgtaaacataagagatgcagctgacgacaaacataaaacagtagatgatacaccttatgggggtggttcagggatgttgttaaaagcagatgttctcgcaaagtctttagatgaaaacaaaaatgagagtgagagaattttatacttatcgccaaaaggaaaaaaatttgatcaaaatttagcaaaagagctagctaatgaaaaatctctgtctttaa

SEQ ID NO: 226661 - DNA, 442 bp, Unknown
  Bacterial polypeptide expressing nucleotide sequence isolated from the Sargasso Sea
ttgatgaaaaaagtttggacaacaaaagtaattacgctctaccctgaaatgttccctggggctctgaaatattctgtgacaggtaaagcactggaaaataaattatggtccatcaaaataataaacctgcgagattttggctgcggtaaacataaaaatgtcgatgacagcccggcgggaggtggagctggcatgatattaagagcagatgttgttagcagatcactagattctgcaactgcggacttagacacgctgaatgaaacctggcccattatttgtttaacgcctcggggtaatccgctatcgcagaatatttcaaaaacctttgcaaagagtaacggtataattgtcctctgtggcaaatttgaaggtattgatgaacgcgttataaaaaaatggaaaatgcttgaggtttcaattggcgattttattatttctg

SEQ ID NO: 226662 - DNA, 303 bp, Unknown
  Bacterial polypeptide expressing nucleotide sequence isolated from the Sargasso Sea
cattaattctattagagggtatttcaagattagttgaaggaattttaggagatgaaaattctattctagaagaatcatttaatgatggtctattagaatttccacaatacactagaccagaaaatagtgaatatggaaatgttcctgaagtcttattaaatggtaatcattcagacataagaagatggaggcttaaagaatctttaagaaggacattatctcttagaccagatttaatggaatctagacaacttacttctgaagaaaaagaattaattgatgaaattaaaggtgaaggttaat

SEQ ID NO: 226663 - DNA, 184 bp, Unknown
  Bacterial polypeptide expressing nucleotide sequence isolated from the Sargasso Sea
ttgcctaccaatacttatagaaattggaaagcaaatgtgcttaccctttatcctgaaatgtttcctggttcattaaattttggagttattggaaacgctctaaagcgaggcatctggtctttagaaattacagatataaaaaaatttgctattggaaagcataaaaatgttgatgagcggccaa

SEQ ID NO: 226664 - DNA, 148 bp, Unknown
  Bacterial polypeptide expressing nucleotide sequence isolated from the Sargasso Sea
ccgcaatacacgcgtcctcgcgaatatcgtggcctccgtgtacccgatgtcctattaactggtgaccatcaacgaattgctgattggcgtaaagcccaggcaactcatgccactcacgggcaaacaaacaaccacacagaaaaataat

SEQ ID NO: 226665 - DNA, 337 bp, Unknown
  Bacterial polypeptide expressing nucleotide sequence isolated from the Sargasso Sea
aatgtttttatctcgaatatttacattatatccagaatacttcccaggctatttaaataaaggtttgtttggaaaggcgatgaacgaaaaaatttggaatttagaaactgtaaatataagagattattcatttgataagcataagaccgttgatgacacaccttatggaggtggtaacgggatgttaattaaagcagatgttttagctaaatctttagataataatattaaagaaaaagaaagaataatttatttaagtccaaaaggaaaattatttgactacaagtatgcaaaagaactttcaaatgaaaaaacaatcaatttcatatgtggtcat

SEQ ID NO: 226666 - DNA, 370 bp, Unknown
  Bacterial polypeptide expressing nucleotide sequence isolated from the Sargasso Sea
atgattgatgtaaaaatattaacagcctatcctgaaatgtttccaggaagtttacagcattctattgtaggtaaagctcttaaagaaaatatttttaaaattgatactataaatctgcatgaatttgggatcgatgatcgaatgagtattgatgacgagccttttggcggtggaccgggaatggttttaagaccagatgtggttgaaaaggcactaaaagctattccagaacaacataaccaggagtctaaaaaaatatatcttacgccttcaggaactatattaaatcaagcaaaactgggaattttatctaaactaaagaaactaactattctttgcggtcgttttgaaggggtagatcaaagggcaa

SEQ ID NO: 226667 - DNA, 127 bp, Unknown
  Bacterial polypeptide expressing nucleotide sequence isolated from the Sargasso Sea
gtggaacttaagcataataaacattagagatgcggcaactgataaacacaaaacagttgacgatactccttatggtgggtggaacaggaatgttgctaaaagcagatgttttagcaaatgcgcttga

SEQ ID NO: 226668 - DNA, 187 bp, Unknown
  Bacterial polypeptide expressing nucleotide sequence isolated from the Sargasso Sea
aatgtttttgtctagagtatttacgttgtatcctgaatactttccaggttatttgagcaaaggactttttggcaagtcaaaaggaaaagaatgggatttagaaacagtaaacataagagattatgctttagacaaacataaaactgtagatgacactccttatggtggtggaaatggaatgattatg

SEQ ID NO: 226669 - DNA, 240 bp, Unknown
  Bacterial polypeptide expressing nucleotide sequence isolated from the Sargasso Sea
aatgtttttatccagagtatttactttgtatccagattattttcctggttatctcgataaaggtctttttggtaagtctaagggaaaagaatggaatttagaaattataaatataagagactatgctttggacaaacataaaactgttgatgacactccatatggtggcggaaatggaatgataatgaaagcagatgttttggcaagctcattagatgcgaatgttaaaagtggagaaaa

SEQ ID NO: 226670 - DNA, 289 bp, Unknown
  Bacterial polypeptide expressing nucleotide sequence isolated from the Sargasso Sea
atgtggcaagctcaagtgtttacactttatccagaagtttttcctggacctctttctaagggtatgtatggaaaagcaatgtcaaaagatttatggaagttaaaagttgtaaatattagagatgcggctgaagataaacacaaaactgtggatgatactccttatggaggaggatcaggaatgctattaaaaccagatgtccttgctaaatcattagatcaaaataaaattgaaggtgaaagaattttatatttatctccaaaaggaaaaaaatttgatcaaaattaaa

SEQ ID NO: 226671 - DNA, 879 bp, Unknown
  Bacterial polypeptide expressing nucleotide sequence isolated from the Sargasso Sea
tttgaaaagattggtataaataaaggttatttttttggtaaatgtgctcaaactcatacagttaatcattttagacctctcttagaaagaggttgggtctttggagcattagatgaggagggattacttccagtaaatttggaaagatttgcaagatacagattttcagatgaaagtgcagaggtttttgatgatgtttttttctttggaaatgcgcaaaaggagatatttgaaaaaatttttggggcacaaaagtcctttatagtatctggaaatccaagaacagatatgtggcagtcaaactgctacaatattcacaactctgtagctaacgaaatatcagaatctttaggagattttgttttacttccgcttaacttcagtatgtatactaataaagaaagaaatgcagtactttcagatgaccatcttaaatataaaaaagatttagcaaaaaattctgaaatactattcgatagtttttgtaaattatcgcagagaatagtggatgaggttggaattaatgttgttatgcgaccccacccagctgatgatcctagtaaaattaaggaattaatgtttaaacatggtattagatctgaacgtgttaaatgtattgctaagaatgaagtttttccatggatttcagcagctcaactagtgattcataattgttgcaccacctctttagaagctgggtttcttggaactccagtagtcacttatgccccctccgggactcttcttttacaggatgattcagatggacttcacaagtacatgaataagctttttactattgcttttaatgaaaatgatattcttaatattttaaagtcagatcatgagttggaaaatgaaaagttccagtcaagcata

SEQ ID NO: 226672 - DNA, 460 bp, Unknown
  Bacterial polypeptide expressing nucleotide sequence isolated from the Sargasso Sea
tatgttaattgcaagaatatttacactttacccagaattttttccaggaccacttggaaaaggtttgtatggaaaagcgctagatgaagaactatggaagctcgagacagtaaatattagagattacacaactgataaacataagactgttgatgatactacttatggaggaggctcaggtatgttaattaaacctgatgttcttgcaaactctttagataaaaatttgaattctaatgagaaaataatttatttaagcccaaagggaaaattatttaatcaaaaattagcaaaagagctttccaaagagaaaacaattaatttgatatgtggacattttgaaggaattgatcaaagagttatagaagcaagaaatatagaagaagtaagtattggagactttgtattatctggtggagaaagtgctgcatttgtgattttagatgcaatcataagatta

SEQ ID NO: 226673 - DNA, 347 bp, Unknown
  Bacterial polypeptide expressing nucleotide sequence isolated from the Sargasso Sea
aatgaatataaatgttttaacaatttttccagaaatatttgaaattttaaattctggtgtaatttctaaagctatgaaaaaagacatattgtcaatcaaagctattgatataagaaaaaacactactaataagcataaaaatgttgattcaaagccatatgggggtggggaaggtatggttattatggcagaaccattgattaagactattaaaagtattcataaaagaaaacttggaccaattatttatatgtcaccacagggacaattactaactcaaaaaaaagtaatttcattatctaaactcaaaaatatgacagtaatctgcggaagatatgagggaattg

SEQ ID NO: 226674 - DNA, 388 bp, Unknown
  Bacterial polypeptide expressing nucleotide sequence isolated from the Sargasso Sea
atgttgctagttaaaattatcactgcttttccagaaatgtttcctggtgttttgggtcattcaattattggaaattcttttaaaaagaaatgggatttagaaataattaatcttagaaattttggtattgatgagagaaaaaccattgatgatactccatttggaggtggtcctggtatgataattagaccagatgttgtagaaaaagctttaatacaaaatcaaaatagctcaaatattaatgctaaattaatttatatgagcccttctggaagacaactaaaacaacaagatttattaaaatattgtaaatttgaggaaattattattttatgtggtcgatttgaaggagtagataccatgagctatagaagttttgggatttgag

SEQ ID NO: 226675 - DNA, 235 bp, Unknown
  Bacterial polypeptide expressing nucleotide sequence isolated from the Sargasso Sea
catgtgggaagcaagagtatttactttgtatccagaaatatttcctggacctttgcaaaaaggtttatatgggaaagcattatctaataaaatttggagtttagatgttataaatattagagattctgcagaagacaaacataaaacagttgatgatactccttttggtggtggatctgggatgttgattaagccagatgtattagctaaatcaattgataaacatattaataaa

SEQ ID NO: 226676 - DNA, 574 bp, Unknown
  Bacterial polypeptide expressing nucleotide sequence isolated from the Sargasso Sea
tgatactccatttgggggtggtggaggtatgattttgaagccagagccactttttaatgctatcgactttgcaataagttggatgaaagacaatagagacattagagtcattttcccttctccggtaggtaaaaattggaatcaagcactagcgcacaagctaagtaaaaaaaacaaaattatactaatctgtggtcactataaaggtatagatgaaagagttattgagcagtatgttactgatcagtattccataggagattttgttatgacaaatggagaaatcccggcaatgataatcatggacagcatagtccggttaataccaggtgctttaaataacttacgttcagttttgaatgatacattttcgcatgatttattagatcatcctcattacactagtcctagagagtataaggaaaaatatgttccagatatattattaagtggcaaccaccgggatatcgatcgatggagattacaacatagaaaaaaacgtactattaatttcagaccagacatctgggaaaaatataaaaatattaaagaattggagaataaaaatgaataa

SEQ ID NO: 226677 - DNA, 250 bp, Unknown
  Bacterial polypeptide expressing nucleotide sequence isolated from the Sargasso Sea
atgtggacggcaagagtatttactttatatcctgaattgtttccaggaccgctgaatattggcctttataaaaaagccttggaaaaaaagttatggtcattggaagttgttaacataagagaatatgcctcagataaacataaaacagtggacgacactccttttggaggcggaagtgggatgttaatgagggcagatgttttagctaattctttagataaaaatattacaaataaaaaagaatcaatta

SEQ ID NO: 226678 - DNA, 228 bp, Unknown
  Bacterial polypeptide expressing nucleotide sequence isolated from the Sargasso Sea
aatgtttttatctcgaatatttacattatatccagaatacttcccaggctatttgaataaaggtttgtttggaaaagctatgaatgaaaaaatttggaatttagaaacagtaaatataagagattattcaattgataagcacaagactgttgatgatactccttatggaggtggcaatggaatgtttataaaagctgatgtcttagccaaatctttagatgataatat

SEQ ID NO: 226679 - DNA, 214 bp, Unknown
  Bacterial polypeptide expressing nucleotide sequence isolated from the Sargasso Sea
aatgttagaagctcgtatattcacactctatccagatttttttccaggttatttaggtcaaggtatttttggtaaagcactatcagagaataaatggaaaatagatactgtggatataagagagtatgcatttgataaacataaaactgttgatgacactccctatggaggaggtgaaggtatgttaatgaaagcagatgtattagcaaaatca

SEQ ID NO: 226680 - DNA, 256 bp, Unknown
  Bacterial polypeptide expressing nucleotide sequence isolated from the Sargasso Sea
atgttccaagtcaaaatatttacactttatccagagttttttcctggtccttttgataaaggaatttatggaaatgcacttgagaaaaaaatatgggatttgaatattgtgaatataagagactttgcagaagataaacacaaaacagtcgatgacacaccttatggaggtggctctggaatggtaatgagagcagatgtagttgcgaattcattagataataatttagaggctaaagagaaagtctattatttaa

SEQ ID NO: 226681 - DNA, 189 bp, Unknown
  Bacterial polypeptide expressing nucleotide sequence isolated from the Sargasso Sea
aagattttgagtctatgaaagtcccagatgaactattatccggaaatcataaaaaaattgatgattggcgtgatgaaaactcattacttaaaacttttctaaaaagacctgatcttttaaatcaaataaaattatcaaaaaaacaaaaaaaactcttggaagaatgggaatctaaggctatcctatagc

SEQ ID NO: 226682 - DNA, 298 bp, Unknown
  Bacterial polypeptide expressing nucleotide sequence isolated from the Sargasso Sea
atgtttatcacaagattatttactttgtatccagaaatgtttccaggtccattaagcgaaggtttatttggaaaagcaatggagaacaaattatggaaattggaaaatattgacatacgtaaatattcaagtgataaaaatctgaaagttgacgacaccccttatggaggtggatcaggtatgttaataaaaccagatgttgtaggaagtgcgttagataataatgttgtaaaaggagaaaaagtcatctttctaaccccaaggggtaaaatttttaatcaaaaagatcgcaaaagag

SEQ ID NO: 226683 - DNA, 203 bp, Unknown
  Bacterial polypeptide expressing nucleotide sequence isolated from the Sargasso Sea
aatgtttttatctaaagtttttactttatatccagaatattttcctggttacttaaacaaaggtttatttggaaaagctaaaggagaaaaatggaatttagaaaccgttgatattagaaattattcatctgataaacataaaactgttgatgatactccgtatggaggaggagatggaatgataataaaagcaaatattttag

SEQ ID NO: 226684 - DNA, 211 bp, Unknown
  Bacterial polypeptide expressing nucleotide sequence isolated from the Sargasso Sea
aacattaattcaattaatgaagagacttttgagaacggattacttgaatatccacaatacacaaaaccgcaaatttgggagaaaaaaagtgttcccgaggtacttttatcaggggatcatgctaaaattaaagactggcgtttatcacaatcagaggctataacacgcgaccgaagaccagatttgtggcaaaaatataaaaaaaattaaa

SEQ ID NO: 226685 - DNA, 269 bp, Unknown
  Bacterial polypeptide expressing nucleotide sequence isolated from the Sargasso Sea
aatgtttatttttcaaatttttacgctttacccagagttttttcctggcctttttaaagatggactttatggaaaagctttagaaaaaaaaatttggaaatttaaaatagtaaatataagagaatatgcaaatgacaaacacaaaactgttgatgatactccctacggaggaggctctggaatgcttttaaaaccagatgtcattgcaagtgctttagatcaaaatacttctataaatgaaaaaattttttacctttcacctagaggga

SEQ ID NO: 226686 - DNA, 538 bp, Unknown
  Bacterial polypeptide expressing nucleotide sequence isolated from the Sargasso Sea
atgtggacagcaagagtatttactttatatcctgaattatttccaggaccgttagccagtggtttatttaaaaaagcactagaaaaaaaattatggtctttggaagtagtgaatatcagagattatgccttagataaacataagacagttgacgaaactccttttggaggcggaagtggaatgttaatgaaagctgatgttattgccaactcattagataaaaacatttctaataaaagtgagccaattatttatttgtcaccgaaaggtaaaaaatttgatcaaacttacgcaaagaaaattttgagtacaaatatcaatattatttgtggtcattttgaaggaatagatcaaaggttattagagacaagaaatatagaagaaattagcgtaggagattttattttatcaggtggtgaaattggttcttttatacttatagatactattgttagattaattccaggtgtacttggaaatcctaattcattaactgatgagacttttgaaaaaaatttgttggaatatccgcaatagt

SEQ ID NO: 226687 - DNA, 199 bp, Unknown
  Bacterial polypeptide expressing nucleotide sequence isolated from the Sargasso Sea
atgttagaagctcgtatattcacactctatccagatttttttccaggttatttaggtcaaggtatttttggtaaagcactatcagagaataaatggaaaatagatactgtggatataagagagtatgcatttgataaacataaaactgttgatgacactccctatggaggaggtgaaggtatgttaatgaaagcagatg

SEQ ID NO: 226688 - DNA, 192 bp, Unknown
  Bacterial polypeptide expressing nucleotide sequence isolated from the Sargasso Sea
aagaccttcttgaataccctcagtatacaaggcctaaaaaatggaaaaatttgacaattccagacatattgctctctggaaatcacagaaatattagtgagtggcgcttaaaacaatctgaaaaactgacacagaaagttaggccagatttatggaaaaactacaaaaaaagcaagacaagaaagaaataaa

SEQ ID NO: 226689 - DNA, 244 bp, Unknown
  Bacterial polypeptide expressing nucleotide sequence isolated from the Sargasso Sea
atgtggacagctcgagtatttacattatatccagaagtatttcctgggcctctaagcaaaggtctatacgggaaagcactagctaaaaaaatttggaatataaaagtggttaatattcgagagtcagcagaagataagcataaaactgttgatgatacacctttcggtggaggcaaaggtatgctcatgaaagcagatgttcttagcaaatctttagataaaaatgtaagtaagagcgaaagaa

SEQ ID NO: 226690 - DNA, 166 bp, Unknown
  Bacterial polypeptide expressing nucleotide sequence isolated from the Sargasso Sea
atgattaaaaataacacttggaccgctaatgtagtaacattattccccgaaatgtttccgggaagtttgtcgtattcactaactggaaaagctttaaaaaataacttgtggaacttaaaaacttataaccttagaaaatttgccaatggtaaaagaaaaacagtag

SEQ ID NO: 226691 - DNA, 510 bp, Unknown
  Bacterial polypeptide expressing nucleotide sequence isolated from the Sargasso Sea
aatgaccaaaaaccggttcaacatcgcggtgattgccggtgacggtatcggcaccgaagttatgcccgagggattgcgggcacttttggcagcttcaactaaatttgatattgatttgcattttgatcactttgattttgcaagctatgattactattcgagacatggcgatatgttgccagaagactggcagacacagatcggtgaccatgatgcaatcttctttggcgcggttggcttgcctgacaagatacccgatcatgtttccctgtggggatcaatattgaaattccgccgcgaattcgatcaatacatcaaccttagacctgtacgtctgcttccaggggttcaatcaccacttgccaatcgttggcccggcgatattgatttcatgatcgtcagggagaatactgaaggtgagtattcatctataggtggtaaaatgtttgccggcacggagcgtgagattgtggttcaggaaacagtgatgagtcgcctcggtgtcgaccg

SEQ ID NO: 226692 - DNA, 226 bp, Unknown
  Bacterial polypeptide expressing nucleotide sequence isolated from the Sargasso Sea
tatgtggcaagctcaagtgtttacactttatccagaagtttttcctggtcctctctctaagggaatgtatggaaaagcaatgtcaaaagatttatggaatttaaaaattgtaaatattagagatgcggctgaagataaacataaaactgtggatgacactccttatggaggaggatcaggaatgctattaaaaccagatgtccttgccaaatcattagatcaaaat

SEQ ID NO: 226693 - DNA, 275 bp, Unknown
  Bacterial polypeptide expressing nucleotide sequence isolated from the Sargasso Sea
ttttgtatttattgatgctttaattagactattacctggagtgttaggaaataaagattctgttaaagaagaaagttttgaaaatcaccttttagaatatcctcaatatactaaacctagggaatgggaaggcaaaagtccgccagaggtcttattttcaggcgatcatgctaaaataaaagggtggcgtttatctcaatcagaggctataacacgtcgccagagacctgatctttggaaaaaatatttagaaaaaaaaaatgaaaaacattgaa

SEQ ID NO: 226694 - DNA, 165 bp, Unknown
  Bacterial polypeptide expressing nucleotide sequence isolated from the Sargasso Sea
aatgttagaagctcgtatattcacactctatccagatttttttccaggttatttaggtcagggtatttttggtaaagcactatcagagaataaatggaaaatagatactgtggatataagagagtatgcatttgataaacataaaactgttgatgacactcccta

SEQ ID NO: 226695 - DNA, 213 bp, Unknown
  Bacterial polypeptide expressing nucleotide sequence isolated from the Sargasso Sea
catgttccaagctcaagtatttactttgtacccagaattttttcctggccctcttgctaagggtctttatggaaaagctctatctaataagttatggaatttgaatgttgtaaatataagggatgcagcaacagataaacataaaactgttgatgacactccgtatggaggtggaacaggaatgttacttaaaccagatatattagcaaaaat

SEQ ID NO: 226696 - DNA, 375 bp, Unknown
  Bacterial polypeptide expressing nucleotide sequence isolated from the Sargasso Sea
aatgaaaaaaaatacctttaaagtaaaagtaataactttatttcccgaaagctttccaggagttttaggagttggtgtaattggtagagctcttaagaaaaaaatatggtctctgaagttatttaatccacgtaattatgcaaaagacaatcacaagtcagtcgatgatactacatctggaggtgggcctggaatgattttaagagcagatataatcggtaaggctattgattcttcattacgaggggttaaagaaaaaaagaaaatatctctcattaacttaactccaagaggtaaaccaattacacaaaaagatataaaaagattcacaaagaagaatgagttaatcattttatgtggcagatatgaaggcat

SEQ ID NO: 226697 - DNA, 745 bp, Unknown
  Bacterial polypeptide expressing nucleotide sequence isolated from the Sargasso Sea
atgcaaactatatcgccgattcttaatataatgataaaagcttgtgaaaaagcttcaaagattttgaaaagagattatggggaaatcgaaaatctacaagtgtcagtaaaagggcctggcgattttgtaacaagtgctgacaaaaaatgtgaaaaaataattattcaagaattgttaaaagcaaaaaaagacttttcattaataactgaagaaagtggagcattaaaaaataaagataaagacaatatctggattttggatccaattgatggaacaagtaactttatgcatggtgttcctcattttgcaatatcattagctttaaaatcaaaaaatgaaattatagctggagtaatttatgatcctataaaagatgaaattttttatggagaaaaaaataatggagcatatttaaataattatagaattagagtgtcaaaaagacaaaatattagtcaaagtctttttgcttcgggagataaaaatctggataaatacaacaatattaatataagaagatcgggaagtgccgcgctagatattgcttatgttgcatgtggaaggtacgaaggatattttcaaaaaaatttgtctatatgggatattgctgccggtttaatcattcttaaagaagcaggaggagttgtaaatgaattagatattaataatcaaaataatttaaaaattattgcatcaaatccttatattaatgaaaattttttaaatatattaagtaagttttaat

SEQ ID NO: 226698 - DNA, 685 bp, Unknown
  Bacterial polypeptide expressing nucleotide sequence isolated from the Sargasso Sea
tatggaagtttttataataacgccttttccaaatacgattaatgtattaatcgaaaacaatattgctaatcaaggaatcaaaaaaaaacttctcaatgttgaagttgtcaatcttagagattttgctaacgataattacaaaaaaattgatgatgagccttacggtggaggtagtggaatggtaatgatgtgtcagccattatttaatgcgattgattattgtattgataaatcgcaaaaaaagcctaaagtaatttttccctctcctaaaggaaaagttttgaatcataaaatgagtagtgatctgagtaatgaaaattcacttatttttatttgtggtcactataaaggaattgatgagagagtaattgataaatatgttgatttagaaatatcaataggagattttatcatttcaaacggtgaactttcaaccatgattatatttgattcaattgcaagattggttcctggagttttgaatgatttaaattccgctatgacggattcttttgttgacgatttactcgatgctccttattttacgcggcctaatgaaattgatggattaaaagttccagaagtattattatctggcgatcataaagcaattgaaaaatggcgaaatgataaaaagttagaaattacaaaagacagaaaacctgatcttttaaaagaaaagtaa

SEQ ID NO: 226699 - DNA, 406 bp, Unknown
  Bacterial polypeptide expressing nucleotide sequence isolated from the Sargasso Sea
atgtttattgctcaaatatttacactttatcctgattattttcctgggccacttaataaaggactttacggaaaggctatggaaaaaaaaatctgggatttaaaaactatagatattagagaatatgctttagataaacataaaaccgttgatgatacaccttatggtggcggatctggaatgcttcttaaaccggatgttgtcgcaaaatctatagatgcaaatactaaaaaaggagaaaaaattttctatttgtctcctaggggaaaaaaatttaatcagagtatagctagggaaatctctaaagaaaaaaaagtaaatttaatttgtgggcattttgaaggtgttgatcaaagggttttggataacagagaaattgatgaattaagtgttggtgacttttgtt

SEQ ID NO: 226700 - DNA, 340 bp, Unknown
  Bacterial polypeptide expressing nucleotide sequence isolated from the Sargasso Sea
atgtttttatctcgtatatttactttatatcctgaatactttcctggttatttaagcaaaggattatttggaaaagctctgaatgaaaaaatttggaatttagaaactgtaaatataagaaactattcatctgataaacacaaaacagttgatgatacaccctatggaggtggaaatggtatgttaattaaagctgatgttttggcaaaatctttagatgaaaatataaaagaaaaagaaaagataatttatttaagtccaaaaggtaaattatttaatcataagtatgccaaggaactttcatcagaaaaatctttaaatctcatttgtggtcattttg

SEQ ID NO: 226701 - DNA, 481 bp, Unknown
  Bacterial polypeptide expressing nucleotide sequence isolated from the Sargasso Sea
atgtttgttgcaagaatatttactttatatccagagttttttcctggaccattaggaaagggtttgtatggtaaagctttagacgaaaaaatttggaaattagaaacagtaaatattagagattatgcagaagataaacataaaactgtagatgatacaacttatggcggaggatcgggtatgttaatgaaacctgatgtaatagctaaatcattagataaaaacattaaatcctcagaaaaaataatttatttatctccaaaaggtaaactatttaaccagagtcttgctaaaaaattatcaaaagaaaaaactataaatttactttgtggtcattttgaaggtatagatcagagagtaatagaaggtagaaacatagaagaagtcagcataggtgattttgtattatcaggaggtgagagtgctgctattgttgtaatagactctatattaaggttattacaaaaagttctaggtaatg

SEQ ID NO: 226702 - DNA, 712 bp, Unknown
  Bacterial polypeptide expressing nucleotide sequence isolated from the Sargasso Sea
atgcttaaaattaaagttatatctgcacatcctgaaatgttcccaggtaccttaggttattctattataggaaaggctcttaaggaaaaaaaatttatgcttgaggtcattaatttacacgattttggtattgataatcgaaaaacaattgatgatgagccatttggcggaggtccaggaatgattttaagacctgatgtagtagaaaaagccctattatcaatagattctgaagctaaaaaggacaagactctgcgcatatttctaacaccatctggaaaaacattaaatcagaaaaaattgacagaatatagtaaattggaagagttaattatactttgtgggcgttttgaaggagtagatcaaagggcaataaatgtattaaattttgaagaaattagcttaggagactatattctagctggtggagagtctgctgctcaagtgttagttgaaggttgtattcgtctcattcctggagtattagggcagcctgaaagtttattagaagaaagtttttcaaataaccttttggagtaccctcaatttacacgaccaaaagtgtgggaggatgctaataattttaaacatgaagttcctgagattttaacttcagggcatcatgaaaagattaaaaaatggagacatgaaaaatctatagaaaaaacaaatttgtttagaccagatttgttaaaaaaagataaaatataaa

SEQ ID NO: 226703 - DNA, 581 bp, Unknown
  Bacterial polypeptide expressing nucleotide sequence isolated from the Sargasso Sea
ttattccaaagataagcacggtgctgtagacgatactccttttggaggaggaagcggaatgcttttacgccctgacgtgttagcatctgcaattgatgagaatattaaagaaggtgaaaaaattatctacttaactcctagaggtaaaaaatttgaccaaaatgcagctagagctttaagtaaagaaaaaaacctaaatcttatctgcggccattttgaaggagttgaccagagagttttagagacaagaaatattgaagaatatagtttaggtgattttgttctgtcaggtggagaaccagcatcttttgtatttatagatgctttagtcagattaatccctggagtgttaggaaacagagaatctgttaaggaggaaagttttgaaaatcatcttctagaatatcctcaatatactaaacctagagaatgggaaggtaaaaccccgccagaggtcctattttcaggagatcatgccaaaataaaagggtggcgtttgtctcaatcagaggctataacacgtcgccagagacctgatctttggaaaaaatatttagagaaaaaaaatgaaaaacattgaa

SEQ ID NO: 226704 - DNA, 466 bp, Unknown
  Bacterial polypeptide expressing nucleotide sequence isolated from the Sargasso Sea
aatgtttttgtctagagtatttacgttgtatcctgaatattttcctggttatttgagtaaaggcctttttggaaagtcaaaaggaaaagaatgggatttagaaacagtaaacataagagattatgctttagataaacataaaactgttgacgatactccttatggtggagggaatggaatgattatgaaagcagatgttttggcaaattcattagatgcaaatatcaaggctaaagaaaagaccctttatttaagtccaagaggaaaagtttttaattctaaacttgcaagagagttttcgagtgaaaaaacaatcaatttaatttgtggacacttcgaaggagtagatgagagaatactagaaagtagagatattgaagagattagcattggtgactttatattgtcagggggtgaggttgctgcatttgttgtaacagactctattttaagatttattccagga

SEQ ID NO: 226705 - DNA, 511 bp, Unknown
  Bacterial polypeptide expressing nucleotide sequence isolated from the Sargasso Sea
aatgtacgcagtaaaaatatttactttatatccagagactttccccggccctttagctggaggaatttacggaaaggctatgagaaatggcttgtggagtttaaaaactgtaaatattagagactacgctgatgataaacacaaaactgttgacgacactgtatttggtggcggaagcggaatgttaatgaagcccgatatagtagcgaattctttagataaaaatatttctaagggagaaaaaattttttatttgtctccaaaaggtaaaaaatttaatcaaagttttgctaattccttaagtaaacaaaatggcattaatttaatttgcggtcactttgaaggaatagatgatcgtttattatccacgagaaatattgaggaaataagcataggagattatgttttatcaggcggtgaaaccgctgcatttgtaatattagatgctgttttaagacttataccaggagtgttaggaaacaaagactccataaaagatgaaactttttga

SEQ ID NO: 226706 - DNA, 388 bp, Unknown
  Bacterial polypeptide expressing nucleotide sequence isolated from the Sargasso Sea
cttaaccttatctgtggtcattttgaaggtgttgatcaaaggcttctagagacacgaaacattgaagaatatagtttaggtgatttcgttttatctggaggtgaaccagcttcttttgtactagttgacgctttaattagattattacctggagtgcttggaaacaaagactccgtcaaagaagaaagttttgaaaatcatcttttagaatatcctcaatatactaaaccaagagaatgggaaggtaaaagcccaccagaggtcttattttcgggagatcacgccaaaataaaagggtggcgtttatctcaatctgaggctataacacgtcgccagagacccgatctttggaaaaaatatttagagaaaaaaaatgaaaaacattgaa

SEQ ID NO: 226707 - DNA, 199 bp, Unknown
  Bacterial polypeptide expressing nucleotide sequence isolated from the Sargasso Sea
tgaaaatggtttgcttgaatatcctcaatatacaaaaccacaaatttgggaaaaacaaagcgttcctgatgtactattatcaggagatcatgcaaaaattaaggactggcgtttatcacaatctagggatataacacgtcgccagagacccgatctttgggaaaaatatttaaataagaaaaaaaatgaaaaatattga

SEQ ID NO: 226708 - DNA, 583 bp, Unknown
  Bacterial polypeptide expressing nucleotide sequence isolated from the Sargasso Sea
atgttaaaagctcgtatattcacactctatccagatttttttccaggttatttaggtcaaggtatttttggtaaagcactatcagagaataaatggaaaatagatactgtggatataagagagtatgcatttgataaacataaaactgttgatgacactccctatggaggaggtgaaggtatgttaatgaaagcagatgtattagcaaaatcaatagatatgaatgttaaagatggcgaaaagattatttatctaagtccgaagggtaagttgttcaatcatcaattagcaaaacaactatctcaagaaaaaacaataaatataatttgtggacattttgaaggagttgatgaaagattattaaaaacaagaaatattgaggaagtaagtataggagactttgttttatctggaggtgaaggagcttcatttgtaattcttgatgcaattttaagatttattcctggtattcttggcaatacaaattcagctaaagaagaaagttttgaaaacggacttttagagtatcctcaatttacaaaacctcaaatatgggaggaaaaaagtgttccagatgtgctat

SEQ ID NO: 226709 - DNA, 229 bp, Unknown
  Bacterial polypeptide expressing nucleotide sequence isolated from the Sargasso Sea
atgagtagttttaattttgatgtaattacattgttccctaaagcttttgaattaataaataatttaggtgtcataacaaaagctctagataagagtttgatcaatgtaaatttacatgatttaagagaatacggagaaggttcttacagacaagtagacgataggccttatggaggaggagcaggtatggtattaaaacctgaacctatttataaggcacatgaatcaa

SEQ ID NO: 226710 - DNA, 686 bp, Unknown
  Bacterial polypeptide expressing nucleotide sequence isolated from the Sargasso Sea
agtaaaaatatttactttatatccagagacttttcctggccctttagctggagggatttacggaaaggctatgagaaatggcctatggagtttaaaaactgtaaatattagagactacgctgatgataaacacaaaactgttgacgacactgtatttggtggtggaagtggaatgttaatgaagcctgatatagtagcgaattctttagataaaaatatttccaagggagaaaaaattttttatttgtctccaaaaggtaaaaaatttaatcaaagttttgctaattctttaagtaaacaaaatggcattaatttaatttgtggtcattttgaaggagtagatgatcgtttattgtccacgagaaatattgaggaaataagcataggagattacgttttatcaggcggtgaaactgctgcatttgtaatattagatgctgttttaagacttataccaggagtgttaggaaacaaagactccataaaagatgaaacttttgaaaatagtcttttggagtaccctcaatttacaaaacctaaaatttgggaaggcaaaagtgttccagatgtactattttcaggtgatcatgcgaaaattaaaagctggcgtttatctcaatctgaggatataacacgtcgccagagacctgatctttgggaaaaatatttaaaagataaaaaataat

SEQ ID NO: 226711 - DNA, 685 bp, Unknown
  Bacterial polypeptide expressing nucleotide sequence isolated from the Sargasso Sea
atgtttttgtctagagtatttacgttgtatcctgaatattttcctggttatttgagtaaaggcctttttggaaagtcaaaaggaaaagaatgggatttagaaacagtaaacataagagattatgctttagataaacataaaactgttgacgatactccttatggtggagggaatggaatgattatgaaagcagatgttttggcaaattcattagatgcaaatatcaaggctaaagaaaagaccctttatttaagtccaagaggaaaagtttttaattctaaacttgcaagagagttttcgagtgaaaaaacaatcaatttaatttgtggacacttcgaaggagtagatgagagaatactagaaagtagagatattgaagagattagcattggtgactttatattgtcagggggtgaggttgctgcatttgttgtaacagactctattttaagatttattccaggaattctaggtaatattaattcctcaagagatgagagttttgagaatggccttcttgaatatccacaattcacaaaacctcaagtttgggaggaaaaaaaggtcccaaatgtgctaatttcaggtgatcacgccaaaattaaagactggcgtttatcccaatctgaggctataacacgcgaccgaagaccagacttgtggcaaaaatataagaaaaattaaa

SEQ ID NO: 226712 - DNA, 697 bp, Unknown
  Bacterial polypeptide expressing nucleotide sequence isolated from the Sargasso Sea
acaaatcgccattataacaccggttcctgatatgatagaatcggttgttcaaaactctatgttgaggcaggcgattgaaagagaaaaggttgatttccatataattaaccttcgtgattttggtgaaggtaattatcatcaaatagatgataaaccatatggtggaggaccagggatggtactaatggcgggtcctttattcaaagcaattgaagatgctattgaaaaagtgggaggagaagatgatcttagagtcatttttccatctccacaaggtattcaatggagtcacactgttgctgaagaaaacagtaaaataactaggcttattgtcatatgtggacattacaagggtattgatgagcgtgtaattgaaaaatatgtcacgcatgaatactctataggagatttcgttgttacaagtggagaaattcctacaatgattattattgatagcattgttcgattggttccaggtgtaatgaataatctagaatctgcgttaagtgattcttttgcagaaaatttactagattcaccattttacacgcaaccaagagaaattgaaggtctaactgtgccgaaagtcttattatctggaaatcataaagaaattgatttatggagaaaagatcatagattaaaaaggacgaaaaaaaatcgtcctgatttaatggaaaaaaataaaaaaaaataa

SEQ ID NO: 226713 - DNA, 691 bp, Unknown
  Bacterial polypeptide expressing nucleotide sequence isolated from the Sargasso Sea
atgtgggtagcaagagtatttactttatatcctgaattgtttcctgggcctttaggtagcggactctataaaaaagcacttgaaaaaaagctatggtcactggagattgttaatataagagattatgctacagacaaacacaagactgtagatgacactccattcggtggaggaagtggcatgttaatgagagcagacgttatagctaactccctagataaaaatatttctgataaaaacgaaccaattatttatttatcgcctaaaggaaaaaaatttgatcaaagttatgcaaaaaaaatattagataaaaacataaatattatttgtggtcacttcgaaggtgtggatgaaagattattggaaacaagaaatatagaagaagttagtgttggagattttattttatcaggtggtgaaataggcgcttttgtatttattgatacagtcgtaagattaatttctggtgtccttggaaattctaattcattaactgatgaaacgttcgaaaaaaatttgctggaatacccgcaatatacaaaacctcaaaaatgggaaaaaagtgatgttccagacgtactattaacaggagatcacgctaaaattaaaggctggcgtttaaggcaatctgaggatataacacgacgccggcgtcctgatttatgggaaaaatataaaaaaaataaatgaa

SEQ ID NO: 226714 - DNA, 712 bp, Unknown
  Bacterial polypeptide expressing nucleotide sequence isolated from the Sargasso Sea
gatgttagatgttaaaatattaactgcttacccaaatatgtttcctgggacattgaattactctttaataggaagtgcattaaaagagaaaaaatggacgcttgaagtgattaatttacataattttggttatgataataataaaagtattgatgatgaaccttttggaggtggtcctggcatgatcattcgtgctgatgtagtagaaaaagccttactttctatagaatatcctaataatattaagagaaaattgatatatttaactccttcaggtaagcccttaaaacaggcaaatttattagaattttcaagatttgatcaattaattatactttgtgggagatttgaaggagtagatcagagagcaataaatgttttagatttctcagaaattagcattggagattatattttaatgggaggagaaacagcagctcaagtattagttgaaggttgtattcgtttgcttcctggagtattagggcagcctaaaagtttattagaagaaagtttttctaatgatcttttggagtatccacattataccagacctaaagtttggaaggatactaataacaataatcatgaaattcctgaagttttaatttcagggcatcatgaaaagattaaagagtggagattaaaaaagtctattgagagaacaaaaataactagacctgatttattaattaaagacaagaaagtataa

SEQ ID NO: 226715 - DNA, 193 bp, Unknown
  Bacterial polypeptide expressing nucleotide sequence isolated from the Sargasso Sea
atgtttcaagtaaaaatattcactttatatccagacttttttccaggaattctaagcaaaggtatctatggaagagcaattgagaaaagtttgtggaacttggatgtaatcaatattagagactacgcaaaggataagcataaaacagtagatgatactccttacggaggtggtgaaggaatggttttaaaac

SEQ ID NO: 226716 - DNA, 664 bp, Unknown
  Bacterial polypeptide expressing nucleotide sequence isolated from the Sargasso Sea
actgtatcctgaaatttttcccggtcctttatctaaagggttatatggaaaggcacttacaaaaaagatatggaatttaaaaattgtagatattagagactctgcaaaagataagcataaaactgtagacgatactccattcggaggaggttcaggaatgttaatcaaaccagacattttggcaagatccattgatcaaaattataaagagggtgaaagaattttttatctttctccaaaaggaaaaaaatttgatcaaaaacttgctaaagaactatctaaacaaaaatcaataaatttaatttgtggacattttgaaggaattgatgagagagttttaaatacaagaaatatagaagaaattagcatcggtgatttcgtattatcaggcggtgaaactgcagcctttatagttatagatagtattttaagattattacctggcatacttggaaataacaaatctcaaattgaagagagttttgaaaatggattattagaatatccacaatatacaaaacctcaaatttgggagggaaaaagtgttccagcagtgttattatcaggagatcacgccaaaattaaagactggcgtttatctcaatctgaggctataacacgcgaccgaagaccagatttatggcaaaaatataaaaagaattaa

SEQ ID NO: 226717 - DNA, 145 bp, Unknown
  Bacterial polypeptide expressing nucleotide sequence isolated from the Sargasso Sea
taccgcacggtcgacgatcgtccgtacggcggcggtccgggcatggtgatgctggccaggccgctcgaagccgcgatcgatgccgcgaaagcggcgcaggcggagcagggcatcgcgagcacgcgtgtcgtgatgatgtcgccgc

SEQ ID NO: 226718 - DNA, 718 bp, Unknown
  Bacterial polypeptide expressing nucleotide sequence isolated from the Sargasso Sea
atgattgatgtaaaaatattaacagcatatcctgaaatgtttccaggaattttagaacattctgttataggcaaagctcttaaggaaaatatttttaaaattgatactataaatcttcatgaatttgggatcgatgatcgaatgagtattgatgatgagccttttggtggtgggccaggaatggttttaagaccagatgtagttgaaaaggcactaaagtctatttcagaaaaacataacaaggagtctaaaaagatatatcttacgccttcaggaactttattaaatcaagaaaaactaggaaatttatctaaacttgagaaaataactattctttgtggtcgttttgaaggagttgatcaaagagcaatagatgttttgggttttgaggaagttagtataggaaattatgtcctggctggaggagagattgcagcgcaagtgttacttgaaggttgtattcgtctcattcctggagtattagggcatccggaaagtttattagaagagagtttttctaataatcttctagagtatcctcattatactagacctcaggtctgggtggactctctaggaaataaacatgatgtaccagaagttttaacatcaggtcatcatagtaatataaaaaaatggagactaaacaagtctattgaaaaaactaaaaatattcgaccagatatgtatattaataaggaacaaaaacaggactaga

SEQ ID NO: 226719 - DNA, 319 bp, Unknown
  Bacterial polypeptide expressing nucleotide sequence isolated from the Sargasso Sea
aaatatagaagaagttagtgtaggagatttcattttatcaggtggagaagtagcggcttttttaattattgatactattgttagattaattccagaagtgcttggaaattcaaattcattaatcgaggagacttttgaaagaagtctactggagtatccccagtatacaaaacctcaaaaatgggaaaaaaaggacgttccagatgttttattatcaggagatcacgctaaaattaaagactggcgtttagttcaatcagaggatataacacgacgccgacgaccagatttgtggaaaaaatataagaaaaaaaaatga

SEQ ID NO: 226720 - DNA, 429 bp, Unknown
  Bacterial polypeptide expressing nucleotide sequence isolated from the Sargasso Sea
aaggaaaaaaatttgatcaaaaatacgctaaaaaaattattaagaaaaaggatttgaacataatatgtggccattttgaaggtatagatgaacgactaattgaaaatagaaatatagaggagattagcattggagattttatattgtctggaggagaaactgcaaccttcgtttttcttgatgcaattattagacttttgccaggagttttaggaaacatagattcattaaaggaagaaacattcgaaaactatcttcttgaatatccccaatatacaaaacctcaaaaatgggaaaaaaaagaggtaccatctgtgttattatcaggagatcatgctaaaattaaaggctggcgtttgtctaaatcacaggatataacacgacgccgacgtcctgatttatgggaaaaatataaaaagaataattagt

SEQ ID NO: 226721 - DNA, 496 bp, Unknown
  Bacterial polypeptide expressing nucleotide sequence isolated from the Sargasso Sea
ttttcaaacaatcataatctaaaatcaactaaaatatatcttactccttctggatccttattaaatcaagaaaaaattgggattttagctaaattagaagaaattattatcctttgcggtcgttttgaaggagttgatcaaagggcaattgatgtattagggtttgaagagatttctataggagattatgttttatctggaggagagattgcagctcaggtgttacttgaaggttgtattcgtctcattcctggagtattagggcatccgaaaagtttattagaagagagtttttcaaataatcttctagagtatcctcattatacgagaccaaaggtctgggaggactctctaggagaaaaacatgatgttcctgaagtattaacctcaggccatcataataatataaaaaaatggagactagataaatcggttgaaaaaactaaaaaaattagaccagatttatatataaaaaaagaacaagaacaggattagc

SEQ ID NO: 226722 - DNA, 382 bp, Unknown
  Bacterial polypeptide expressing nucleotide sequence isolated from the Sargasso Sea
aatgtttcaagctcaagtatttactctttatccagaagtctttcctggacctttatctaaaggtctttatggaaaagcgttgtcgaataaattgtggaacttaagtataataaacataagagactcagccaccgataaacacaaaacagttgacgacactccttacgggggaggaacgggaatgttattaaaagcagatgttttagctagttctcttgatcaaaaagttaaaaaaggagagagagttttttatctttcacctaaaggaaagaagtttgatcaaaaacttgctcaagatctatctaaagaaaaatctatatctttaatatgcggtcattttgaaggggtggatgaaagagttttggccacaaggaatatttga

SEQ ID NO: 226723 - DNA, 688 bp, Unknown
  Bacterial polypeptide expressing nucleotide sequence isolated from the Sargasso Sea
tatgtttcaagcgaaaatttttactttgtatcctgaatattttccaggacccttcgaaataggtatttgcaaaaaagcttttgagaaaaagctttgggatttaaaacttataaatattagggattatgcagatgataaacataaaaccgttgatgatactccatacggcggtggcgtaggcatgttaatgagaccagacgtagtagcaaaatctttggacgcaaatttggaagaaaaagagacagtctattatctaacacctaagggtaaaatttttaatcaagatattgcaaaggatattgttaaaaaaaacaaagttaatattttatgtgggcactttgagggagtcgatcaacgagttctagactcaagaaatatagaggagataagtataggagactttatactctctggaggagagatggcttcttttgttgttctagatacggttttaagattagtgcctggagtgttaggaaatcttaattctacaaaagatgaaagttttgaaaacgggcttttggagtatccacaatataccaaacctcaaatatgggagaaattaagtgttcctgacatacttttatctggagatcataataaaattaaaagctggcgtttatcacaatctgaggctataacacggctccgaagaccagatttatggcaaaaatataaaaaggattaa

SEQ ID NO: 226724 - DNA, 565 bp, Unknown
  Bacterial polypeptide expressing nucleotide sequence isolated from the Sargasso Sea
tatgctttagataaacataaaactgttgacgacactccttatggtggcggaaatggaatgattatgaaagcagatgttttggcaaattcattagatgcaaatatcaaggctaaagaaaagaccctttatttaagtccaagaggaaaagtttttaattctaaacttgcaagagagttttcgagtgaaaaaacaatcaatttaatttgtggacacttcgaaggagtagatgagagaatactagaaaatagagatattgaggagattagcattggcgactttatattgtcagggggtgaggttgctgcatttgttgtaacagactctattttaagatttattccaggaattctaggtaatattaattcctcaagagatgagagttttgagaatggccttcttgaatatccacaattcacaaaacctcaagtttgggaggaaaaaaaggtcccaaatgtgctaatttcaggtgatcacgccaaaattaaagactggcgtttatcccaatctgaggctataacacgcgaccgaagaccagacttgtggcaaaaatataagaaaaattaaa

SEQ ID NO: 226725 - DNA, 355 bp, Unknown
  Bacterial polypeptide expressing nucleotide sequence isolated from the Sargasso Sea
atggataaggaattcagaacagatttgcttgatatagaagctgctaaagcttggaaagctactgtgttaacgctatatcccgaaatgtttccaggaacgcttgatcatgcgctggctggccgcgcgcttgaacataatatttggcagctggatgttgtaaatattcgtgatttcgcaaccgataagcatcgcactgtggatgataccccgctcggcggtggtcctggtatgatattgcgtccagacgtaattgatgccgcattaggggcaactacagaagccccgggacctcgcttttatccaagtcctaggggtagaagattaactcaatctgatgttcgtgcattaagtaagg

SEQ ID NO: 226726 - DNA, 419 bp, Unknown
  Bacterial polypeptide expressing nucleotide sequence isolated from the Sargasso Sea
tatgtttgaagctagaatatttactttgtatccagatttatatccaggtcctttaggtgaaggattatatgggaaagcacttaatgaaaaaaagtggaatctagagatcgtaaatataagagactctgcaaaagataagcataaaactgttgatgatgctccatatggagggggatctggaatgttaattaggcctgatgtaattgccaattcactagaccaaaaaataaatccagatgaaaaagtcatatatcttagtccaaaaggtaaattgtttaatcaagatgttgcaaaagaactttctaaaaaaaaaaaattaaatcttatttgtgggcatttcgaaggtattgaccaaagagttattgatacaagaaatatagaagaattaagtattggcgattttattttatcaggaggtg

SEQ ID NO: 226727 - DNA, 316 bp, Unknown
  Bacterial polypeptide expressing nucleotide sequence isolated from the Sargasso Sea
aatgagaattgatatcataagcgtacttcctgaacttatggaaagtccgtttaaaacttctattttgaaaagagcagtagataaaggaattgtagaagtacattttcatcagttaagagactggtcggtcaacaaacacaggcaaattgatgatgaaccttatggtggcggcgcaggaatggtaatgatggtagagcctttagacaagtgtatttctgagcttaaatctcagcgtaattatgatgagatcatctatcttactccggatggcgaaactttaaatcaaaaaatggctaactcgctatccatcaaaaaa

SEQ ID NO: 226728 - DNA, 685 bp, Unknown
  Bacterial polypeptide expressing nucleotide sequence isolated from the Sargasso Sea
atgtttttgtctagagtatttacgttgtatcctgaatattttcctggttatttgagtaaaggcctttttggaaagtcgaaaggaaaagaatgggatttagaaacagtaaacataagagattatgctttagataaacataaaactgttgacgacactccttatggtggaggaaatggaatgattatgaaagcagatgttttggcaaattcattagatgcaaatattaaggctaaagaaaaaaccctctatctaagtccaagaggaaaagtatttaattctaaacttgcaagagagttttcgaatgaaaaaacaatcaatttaatttgtggacacttcgaaggagtagatgagagaatactagaaagtagagatattgaagagattagcattggcgactttatactgtcagggggtgagattgctgcatttgttgtaacagattctattctaagatttattccaggaattctaggtaatattaattcctcaagagatgagagttttgagaatggccttcttgaatatccgcaattcacaaaacctcaagtttgggaggaaaaaaaggtcccaaatgtgctaatttcaggtgatcatgccaaaattaaagactggcgtttatctcaatctgaggctataacacgcgaccgaagaccagacttatggcaaaaatataagaaaaattaaa

SEQ ID NO: 226729 - DNA, 520 bp, Unknown
  Bacterial polypeptide expressing nucleotide sequence isolated from the Sargasso Sea
gcttttacgtcctgatatattagcatcagctcttgataagaatataaaaaaaggagaaaaaattatttacttatctccaagaggaaaaaaatttgatcaaaacgttgctagatcattaagtaaagagaaaaacttaaaccttatatgtggtcattttgaaggtgttgatcaaaggatcctagagacacgaaacattgaagaatatagtttaggtgatttcgttttatctgggggtgaaccagcttcttttgtactagttgacgctttaattagattattacccggagtacttggaaataaagactccgtcaaagaagaaagttttgaaaatcatcttttagaatatcctcaatatactaaaccaagagaatgggaaggtaaaagcccaccagaggtcttattttcgggagatcacgccaaaataaaagggtggcgtttatctcaatctgaggctataacacgtcgccagagacccgatctttggaaaaaatatttagagaaaaaaaatgaaaaacattga

SEQ ID NO: 226730 - DNA, 613 bp, Unknown
  Bacterial polypeptide expressing nucleotide sequence isolated from the Sargasso Sea
atgacttggaaagcaaatattttaactttatatccagagatatatcctggttatttgagctatagtttacttggtaaagctcttgaaaaaaaaatttgggaactgaatatatataatttgcgcgattttggtgaaggaaagcacaaaactattgatgataaaccttttggtggcggtgctggaatgataataaagccagatattctaggtaatgctattgaagaaacacttattaaaaaccatgatcgacaatctttagtttatttatcgcctaagggaaggccctttaaacaaattgatgctaaaaatttttctcaaagttctggggtatctatattatgtggtcattttgaaggaattgaccaaagagtccttgatatttatgaaatagaagaaatatcaatgggagattatattttaagcggtggtgaagtagcttcctttacttttttggattcaattttaagattactaccaggtgttcttggaaatgaagcatctattgaggatgagtccttttccgacgatttacttgaatatcctcaatacaccaaaccacaagagtataaaaatattaaagttccagaatatattactatctggcaatcatgaa

SEQ ID NO: 226731 - DNA, 391 bp, Unknown
  Bacterial polypeptide expressing nucleotide sequence isolated from the Sargasso Sea
tcaccaaatggtaacaattttgatgaaaaaaaagttttagagctttctaaaaaagaatctgtttacatactttgcggcagatatgaaggggtcgatcaaagagttaatgaattagtagtagatgaggaaataagcgtaggtaattttattgttagcggaggagaagtacccgccatgataatttctgattcaattataagaaaaattccaggaattttaggttcttcagaatctaataaaaatgaaaccttttccatttataatgattattcaaaaaaggaacctgtttatacaaagccaaggttattcatgggtgctgaagtaccaaatgttttactcagtggagaccattcaaaaattgatcaatggaaaaaagataatcgattttaaa

SEQ ID NO: 226732 - DNA, 510 bp, Unknown
  Bacterial polypeptide expressing nucleotide sequence isolated from the Sargasso Sea
ttagaaaatcatctaaaagtaaaactttgttgatgactccacagggtaaagtcttacagcaaaaggatcttgcgagatggaccactttggatcaaataataattatttgtggtcaatatgaaggttttgatgaaagggttagatgcttagctgatgaggagatatctataggagattatgtgctttctggaggagaaattcctgctatatcaataattaacggtttgactagattattgcctggtacactcggggatccagactctttgatcaatgagagtcataactcgcccttactagagtatccacattacacaagacctcaagtttttagggacatgaaagttcccgatgttctcattagtgggaatcacaaagaaattgaattttggagagaagagcagatgttaaaaagaacattaaaaagaagaaaagatctaattaaaagtgaatttcgagatttgcaaatcgataaatatgatcctgatgattggctctgggatttataga

SEQ ID NO: 226733 - DNA, 208 bp, Unknown
  Bacterial polypeptide expressing nucleotide sequence isolated from the Sargasso Sea
ttgaaaaaaatatttatcattacaccaactcctgagatcatagcttcagttatgcaaaattcaattgttataaaagctaaaaataataacatagttgattttgaaatcatcaatcttagagactacagtgataaaaagtacaaaaaagtcgatgataacccttacggtggtggagcaggcatggtgatgatggctgaaccgtttttta

SEQ ID NO: 226734 - DNA, 416 bp, Unknown
  Bacterial polypeptide expressing nucleotide sequence isolated from the Sargasso Sea
aatgtttttgtctagagtatttacgttgtatcctgaatattttcctggttatttaagtaaaggcctttttggaaagtcaaaaggaaaagaatgggatttagaaacagtaaacataagagattatgctttagataaacataaaactgttgacgacactccttatggtggcggaaatggaatgattatgaaagcagatgttttggcaaattcattagatgcaaatatcaaggctaaagaaaagaccctttatttaagtccaagaggaaaagtttttaattctaaacttgcaagagagttttcgagtgaaaaaacaatcaatttaatttgtggacacttcgaaggagtagatgagagaatactagaaaatagagatattgaggagattagcattggtgactttatattgtcagggggtg

SEQ ID NO: 226735 - DNA, 586 bp, Unknown
  Bacterial polypeptide expressing nucleotide sequence isolated from the Sargasso Sea
aatgtacgctgtaaaaatatttactttatatccagagacttttcccggtcctttagctggaggaatttacggaaaggctatgagaaatggcctatggagtttaaaaactgtaaatattagagactacgctgatgataaacacaaaactgttgacgacactgtatttggtggtggaagtggaatgttaatgaagcctgatatagtagcgaattctttagataaaaatatttcaaagggagaaaaaattttttatttgtctccaaaaggtaaaaaatttaatcaaagttttgctaattctttaagtaaacaaaatggtgttaatttaatctgcggtcattttgaaggagtagatgatcgtttattgtctacgagaaatattgaggaaataagcataggagattatgttttatcaggcggtgaaaccgctgcatttgtaatattagatgctgttttaagacttataccaggagtgttaggaaataaagactccataaaagatgaaacttttgaaaatagtcttttggagtaccctcaaattacaaacctaaaatttgggaaggcaaaagtgttccagatgtactatttt

SEQ ID NO: 226736 - DNA, 387 bp, Unknown
  Bacterial polypeptide expressing nucleotide sequence isolated from the Sargasso Sea
aagaaatgcttattttatgtggaagatttgagggagtagaccaaagagctatagaaatactaggttttcaggaaataagtattggtgattatgttctttcaggtggggagattgcatctcaagtactagttgaaggttgtattcgtctcattcctggagtattagggcatccacaaagtttattggaagaatcattttctaataatcttcttgaatatcctcattacacaagacctaaggtctgggaggataagcagggaaataagcatgaggtaccagatgttttaacttcaggtcatcatgaaaaaattgataagtggagaaaagaaaaatcggttgagaaaactaaaaatataagaccagatcttttgaaaaaaggaatataaa

SEQ ID NO: 226737 - DNA, 267 bp, Unknown
  Bacterial polypeptide expressing nucleotide sequence isolated from the Sargasso Sea
attacgaaatttcaattggtcaatctgttgtttctgggggagaagtaccagctttgtatttattagaagcgttgattaggaaaatcccagatgtgttaggaaatcctgaatcattaataagtgaaactttcacagataacaaaattgatcatccagtctatacaagacctgaaatctttaaaaataaggaagttccagaggtacttctgtccggaaatcatcaaaaaatagatgaatggaaaaagaataatttaaaagacatataaa

SEQ ID NO: 226738 - DNA, 223 bp, Unknown
  Bacterial polypeptide expressing nucleotide sequence isolated from the Sargasso Sea
ctctaatgagtcttttcaaaatgaactagttgaacacgatcaatttacaagaccaaacccatggttagctcctgaccatacagacattgaagtcccagctgttcttttaagtggtaatcatgcagatatagatttatggaaacaccagaattcaaaggaaaatactgaaaaaaataggccagatttatttaaaaagtatttaaaaaaaaacaaaaatgagtag

SEQ ID NO: 226739 - DNA, 277 bp, Unknown
  Bacterial polypeptide expressing nucleotide sequence isolated from the Sargasso Sea
gatgaaatttaatattatcactatttttcccaatgaactcatgcggtcattgaattatggagttattggcaatgcaataaatgataataaaattagaattgattgccatgatccaaggatacatgctgataataagcataactccattgatgataagccatatggtggagggcctggtatggttatgcaagctgagccggttttaaagtcaattcagcaagcaagaaatggtgatatcaatattccggtagttttcttatccccacaaggaaaaaca

SEQ ID NO: 226740 - DNA, 485 bp, Unknown
  Bacterial polypeptide expressing nucleotide sequence isolated from the Sargasso Sea
tatgtttgaagctagaatatttactttgtatccagatttatatccaggtcctttaggtgaaggattatatgggaaagcacttaatgaaaaaaagtggaatctagagatcgtaaatataagagactctgcaaaagataagcataaaactgttgatgatgctccatatggagggggatctggaatgttaattaggcctgatgtaattgccaattcactagaccaaaaaataaatccagatgaaaaagtcatatatcttagtccaaaaggtaaattgtttaatcaagatgttgcaaaagaactttctaaaaaaaaaaaattaaatcttatttgtgggcatttcgaaggtattgaccaaagagttattgatacaagaaatatagaagaactaagtattggcgattttattttatcaggaggtgaaacagctgcatttgtagttttagatgtaattttacgattacttccaggtgtcatcggaaacaaaa

SEQ ID NO: 226741 - DNA, 669 bp, Unknown
  Bacterial polypeptide expressing nucleotide sequence isolated from the Sargasso Sea
gcagacgctcctaaagaagaagcaaaaacagaagctaaaacagaagaagcaaaaaaggaagcaaaagcagaaacttctaaagaagaagcaaaagcagacgctcctaaagaagagaaaaaataatatgtttttatcaagagtatttactttgtatccagaatacttccctggttatttaaataaaggcgtgtttggaaaagccatgggaaaaatatggaatttggaaatagtaaatattagagattatgcaaatgataaacataagacagttgacgatactccatatggaggtggcaatggaatgattataaagccagatgttttagcaaaatcattagatgaaaatataaaaaaaaaagaaaaaatagtttatttaagtccaagaggtaaattatttaattataaaaatgcaaaagaatttgcaaatgaaaaatcaataaattttatttgtggtcattttgaaggagttgatgaaagggttattaaaagtagaaatatagaagagtttagtattggagactttgtattatccggtggagagactgctgcatttgtaattttagactctattttaaggtttgttcctggaattttgggaaatgaaaattcatctaaagaggaaagttttgagaatggtcttttagaatatcctcatttcaccaagcctca

SEQ ID NO: 226742 - DNA, 670 bp, Unknown
  Bacterial polypeptide expressing nucleotide sequence isolated from the Sargasso Sea
aatgctcaaaattaaaattataactgcttatccagaaatgtttcctggtaatttaggattttcactaattggtaaagctcttaaggaaaaaaaatttttactagaaacaattaatttacacaattttggaattgataatagaagaacaatagatgatgaaccttttggaggagggcctgggatggttataaggccagatgtagtagaaaaggcattgttgtcaatcaaatctaattctccagacaataagaaattacagagaatttatttaacaccaagtgggaaaccactaaaccaacacaaattaacaaaattagcaaatttagatgagttaattatactttgtggcagatttgaaggagttgatcaaagagctatagatgttctcggttttgaagagattagtataggggattatatattatctggaggtgaaatagcggcacaagtgatagttgaaggttgtattcgtctcattcctggagtattaggtcagccggaaagcttattagaagaaagcttttctgataacttgcttgagtatcctcatttcacacgtccaaaggtgtggactgatgcaaaaaaagctaaccatgaagtaccagaagtgctaatttctggacatcatgaaaaaataaaagaatggagaaaaaaaaaaatctgtcggtaa

SEQ ID NO: 226743 - DNA, 305 bp, Unknown
  Bacterial polypeptide expressing nucleotide sequence isolated from the Sargasso Sea
tggagattttattttatctggaggcgagtcagcatcttttgtagtaattgatagtattttaagattgctacctaatgtgcttggaaatgatatgtcaaaaaacgatgaaacttttgagagtggattattggaatacccacaatacacaaaaccccaaatttgggaaaaaaaaagcgtacctgatgtcttattatcaggtgatcacaacaaaattaaggactggcgtttatcacaatcagaggatataacacgtcgccggcgaccagatttgtggaaaaaatatatagaaaaagataaaaaatgaa

SEQ ID NO: 226744 - DNA, 536 bp, Unknown
  Bacterial polypeptide expressing nucleotide sequence isolated from the Sargasso Sea
atttggcggtggtagcggaatgttattaaaaccagatgttttaggaaaatctatagacagtaatataaaaaaaggtgaaagaattttctatctttctccaaagggaaaaaaatttgatcaaaaaattgcaaaagagctatccaaagaaaaaactatcaatttagtatgtggacactttgagggagttgacgaacgtattttagatacaagaaatatagaggaaattagcattggggattatattttatctggaggagagtcagcctcttttgtagtaattgatgctgttttaagattattacctaatgttattggaaatgatatatcaaaaaatgaagaaagttttgaaaatggattgttagaatatcctcaatatacaaaacctcagatttgggaaaaaaaaagtgttccagaagtcttattatcgggcgatcatgctaaaattaaggactggcgtttatcacaatcaaaggatataacacgacgccgaagacccgatttgtggaaaaaatatttaaacaaagataaaaaatgaa

SEQ ID NO: 226745 - DNA, 313 bp, Unknown
  Bacterial polypeptide expressing nucleotide sequence isolated from the Sargasso Sea
atgagtggttttaattttgatgtaattacattgttccctaaagcttttgaattaataaataatttaggggtcataacaagagctctagataagaatatgatcgatgtaaatttacatgatttaagagaatatggagaaggttcttacagacaagtagacgataagccttatggaggaggcgcaggtatggtattaaaacctgaacctatttataaagcatatgaatcaattagaaaatcacctagaagtaaaacgttgctgatgacccctcagggtaaagtcttaaagcaaaaggatcttatgagatggtcca

SEQ ID NO: 226746 - DNA, 292 bp, Unknown
  Bacterial polypeptide expressing nucleotide sequence isolated from the Sargasso Sea
tatgcttaaaaaaataagagtattaacaatatttccaaaattttttgatcaattttcagaatacggggttgtcggtaaagctattaaatcaaaaaagattgatttttcaacttttgatattagatcccatggaattggaaataataaaagtgttgatgacactccatatggtggtggacctggaatggttatgagacctgagccatttgttaattctgttttagaacttaaagaaagtgatcaatacacgccttacgtcattatgacttcaccaaatggtaacaattttgat

SEQ ID NO: 226747 - DNA, 253 bp, Unknown
  Bacterial polypeptide expressing nucleotide sequence isolated from the Sargasso Sea
agttcttgatagcgtattgagacttttacctgaggttttaggtaacgaaaaatcagtttctgaggaaacttttgaaaatggtcttctagagtatcctcaatatacaaaaccacagatctgggagcaaaaatcagtaccagatgtgttattatcaggtgatcatgctaaaattaaagactggcgtttatctcaatctgaggctataacacgcgtccgaagaccagatatgtggcaaaaatataagaagaattaa

SEQ ID NO: 226748 - DNA, 418 bp, Unknown
  Bacterial polypeptide expressing nucleotide sequence isolated from the Sargasso Sea
ctcatcaaatgcagaagttaatgtttttctaacaccatcaggagagcagttggatgaaactctattgattaaattattatcatttaattccataaatttaattgcaggaagatatgaaggttttgaccaaagaatcttagacatccatgcagattataaaatatctgtgggacatgctgttatttctggaggagaaattccagctatgtatatcctcgaagctttaataagaaggattccaggtgtattaggaaatccagattcattaaaatttgagacatttactgataacaaatatgattttcctgtctatacaaggcctgaaacattcaatgatttgtcagtccctgaagttttattatcaggcaatcataaagatattgaagagtggaaaaagaataatttaaaagacatataa

SEQ ID NO: 226749 - DNA, 595 bp, Unknown
  Bacterial polypeptide expressing nucleotide sequence isolated from the Sargasso Sea
atggtaaagcaggcaaaatcgcacggacttaaaaggataagtttatccgaaaaacccacatcgttaattaccaacaatgaagttataaacggctcatggaatgtacaaatcattactttattccctgaggcatttcccggagttctgggtttaagtctgaccggaaaagctttgcaacagagagtctggactttatctactatcaatctgcgagattttggcattgggaaacataaaaaagttgatgatactccaagtggtggtggtccaggactagtcatacgggcagacgttctgggaccagctatagaaaaagcattatctcgcgcaggagcctctacgccattggtatacctatcgcctcgtggaaaaacttttaatcagtcattggcacaaaactggtcaaagactgaaggcatcattttaatatgtggtcggtttgagggaatagatcaacgtgttatagatcactacggggttgaagaagtttctatgggtgattttgtgatgacaggtggtgagattgcagctcaggctatgatcgataccactgttcgattattaccaaatgtaatagggaatcaagatagtctga

SEQ ID NO: 226750 - DNA, 339 bp, Unknown
  Bacterial polypeptide expressing nucleotide sequence isolated from the Sargasso Sea
tgttaaaaacaagaaatattgaggaagtaagtataggagactttgttttatctggaggtgaaggagcttcgtttgtaattcttgatgcaattttaagatttattcctggtattcttggtaatacaaattcagctaaagaagaaagttttgaaaacggacttttagagtatcctcaatttacaaaacctcaaatatgggaggaaaaaagtgttccagatgtgctattatcaggcgatcacgccaaaattaaagactggcgtttatctcaatctgaggctataacacgcgaccgaagaccggatttgtggcaattatataaaaagactaaagagaattaaa

SEQ ID NO: 226751 - DNA, 118 bp, Unknown
  Bacterial polypeptide expressing nucleotide sequence isolated from the Sargasso Sea
ccagatgtattattatcaggggatcatagcaaaattaaagactggcgtttatctcaatcagaggctataacacgcgaccgaagaccagatttatgggaaaaatataagaagaattaat

SEQ ID NO: 226752 - DNA, 181 bp, Unknown
  Bacterial polypeptide expressing nucleotide sequence isolated from the Sargasso Sea
tgaaaatggtctattagagtatccacaatatacaaaacctcaaatttgggaggaaaaagcagtaccagatgtgttattatcaggtgatcataataaaattaaagactggcgtttgtctcaatctgaggctataacacgcgaccgaagaccagatttatgggaaaaatataagaaagactaa

SEQ ID NO: 226753 - DNA, 568 bp, Unknown
  Bacterial polypeptide expressing nucleotide sequence isolated from the Sargasso Sea
tatgccggaagacaaacataaaactgttgatgatacgccgtatggcgggggatcaggcatgttaattaagccagatgtaatcggtaatgcattggataaaaatacaaaaaaaggtgaaaaaataatatttttaacaccaagaggaaaagtgtttaatcatgaatatgctaaaaaactttcgaaagaaaaaatcataaatataatttgtggacactttgagggaattgatcaaagagtcatagactctagaaacattgaggagattagtattggtgattttgttttatccggtggcgaaacagcatcttatgtttttttagatgcgattttaagattgatcccaggagtaattggcaatgaaaattcaatcgcagaagaaagctttgaaaatggacttttagagtatcctcaatacacaaaacctcaaatttgggagaaaaaaagtgtacccaatgtccttttgtcaggagatcatgctaaaattaaagactggcgtttattgcaatctgaggctataacacgcgaccgaaggccagatttatggcaaaaatataataaaaaaaattaa

SEQ ID NO: 226754 - DNA, 444 bp, Unknown
  Bacterial polypeptide expressing nucleotide sequence isolated from the Sargasso Sea
tgtggtctcatagtaaagcaatggaaaatagtaattttgaaaacttaatttttatctgcggccattataaagacattgatcagcgtgtaattgataagtatgtgacaaatgaatattcgataggtgattatgtagttacaaatggtgaaattccagcaatgattatgatagatagcatagtaagattaataccaggtgtgcttaacaattatgattctgtaaaaacagattctttttttactggtagtgagcttgatggtccatactatactaaaccatctgaaattgataacttaagggttccagaagttttattgagtggtgatcacaaaaaaataaataaatggcgtaaatttgaaagaagtttaagaactaaaaataaacgtcccgatttatggttaaagaggacgaaagaatttgaatcattggaggataaatcatgaa

SEQ ID NO: 226755 - DNA, 263 bp, Unknown
  Bacterial polypeptide expressing nucleotide sequence isolated from the Sargasso Sea
tgcactagtagtacttgatagcattctaagacttttgccaggggttttgggaaatgaaaaatcttccattgatgaaacctttgaaaatggtcttttagagtaccctcaatatacaaaacctcaaatttgggaagaaaagtcagtccctgaagtattattgtctggagatcatgctaaaattaaagactggcgtttatctcaatcagaggctataacacgcgtccgaagaccagatttgtggcaaaaatataagaaagattaat

SEQ ID NO: 226756 - DNA, 669 bp, Unknown
  Bacterial polypeptide expressing nucleotide sequence isolated from the Sargasso Sea
aatgattaatgtaaaaattttgacaggctatcctgaaatgtttccaggtggattagcccattcattaatgggtaaagcacttaaagaaaatattttcacaatagaaactataaatttacatgattttggtatcgataatagaaagagtgttgacgatgaaccttttggagggggtccaggtatgattttaaggccagatgtggttgaaaaagcaattttgtcaatttcaatcaataaaaatattaaatcaaccaagatatatctcactccttctggatctttactaacccaagaaaaactcggtattttggctaaattagatgaaattattatcctttgtggtcgttttgagggtgtggatcaaagagcaattgatgtattaggttttgaagaagttagcataggagattatgttttagctggaggagagattgcagctcaagtgctacttgaaggttgtattcgtctcattcctggagtattagggcatgcggaaagtttatcagaagagagtttctctggtaatcttctagagtatcctcactatacgagaccaaaaacatgggaggactctctaggtaacaaacatgatgttcctgatgttttaatatcaggtcatcatagtaatataaaaaaatggagattagataaatcggtggaaaaaactaa

SEQ ID NO: 226757 - DNA, 476 bp, Unknown
  Bacterial polypeptide expressing nucleotide sequence isolated from the Sargasso Sea
aaaaggtgaaagaattttttatctttcaccaaagggaaaaaaatttgatcaaaaaattgcaaaagaattatccaaagaaaaaactattaatttaatatgcggacattttgaaggagttgatgatcgcattttgaacacaagaaatatagaggaaatcagtataggagattatattttgtctggaggagagtcagcttcttttgtagtaattgacactattttaagattattacctaatgtacttggaaatgatatgtcaaaaaaggatgagagctttgaaaatggattattagaatatcctcaatacacaaaacctcaaatttgggagaaaaaaagtgttcctgaggtcttattatctggagatcatgctaaaattaaagactggcgtttagcgcaatcagaggctataacacgacgccagagaccagatttgtgggaaaaatacactaaagagaaaaaaaatgaaaaatattgag

SEQ ID NO: 226758 - DNA, 296 bp, Unknown
  Bacterial polypeptide expressing nucleotide sequence isolated from the Sargasso Sea
ttatttatcgcctaagggaaggccctttaaacaaattgatgctaaaaatttttcccaaagttctggggtatctatattatgtggtcattttgaaggaattgaccaaagggtccttgatatttatgaaataaaagaaatatcaatgggagattatattttaagcggtggtgaagtcgcttcctttacttttttggattcaattttaagattactaccaggtgttcttggaaatgaagcatctattgaagatgagtccttttccgacgatttacttgaatatcctcaatacactaaac

SEQ ID NO: 226759 - DNA, 697 bp, Unknown
  Bacterial polypeptide expressing nucleotide sequence isolated from the Sargasso Sea
aatgttgaccgttaaagtttttactctttacccagaaatattcccaggtccacttaaaaaagggctttttgggaaagctttaaccaaaaaactctgggacttaaaagtaatagatattcgtgactttgcagaagacaaacacaaaactgttgacgataaacctttcggtggaggtagtggtatgcttttaagagctgatgtcttaagcaagtctatagataaaaatgtaaagcaaaaagaaaagattttttatctttctcctaaaggtaaaatttttgatcaaaaaaaagccaagcaattatcaaatgaaaaagttataaatttaatttgtgggcattttgaaggtattgatgaaagggttttagaagctaggaatattgaccaaattagtataggtgattatattttgtccgggggggagtcagcctcatttgtaataatagatgctgttttaagacttttgcccggtgtaattggtaactcttcctcaaaaattgatgaaagttttgagaacgaccttttagagtaccctcagtacacaaaacctcaaatttgggaaaaaagaagtgtaccaaaagtccttttatcgggggatcataagcaaattaaggactggcgtttatcccaatcagaggatataacacgtcgcctaagacctgatttatggaaaaaatatttagacaaagataaaaaatga

SEQ ID NO: 226760 - DNA, 151 bp, Unknown
  Bacterial polypeptide expressing nucleotide sequence isolated from the Sargasso Sea
gagatttcattaggagatttcgttttaagtaatggagattttgcatcaattgtatttattgacgcattatcaaggcttataaaaggcgttgcaaaggaagaaaattcaattttgaatgattcattctacaatggattactcaaaggtcctg

SEQ ID NO: 226761 - DNA, 667 bp, Unknown
  Bacterial polypeptide expressing nucleotide sequence isolated from the Sargasso Sea
aatgtggacggcaagagtatttactttatatcctgaattatttccaggaccgttagatattggtctttataaaaaggcacgtgaaaaaaaactgtggtctctggaagtggttaacattagagactatgctacagataaacataagacagtagacgacactccttttggtggaggaagcagcatgctaatgagggcggatgttatagctaattctttagataaaaatatttctaataaaaatgaaccaattatttatttaacgcctaaaggaaaaaagtttgaccaaatttatgcaaaaaaggcaatgcagaaaaatataaatattatttgtggtcactttaaaggtgtggatcaaagattattggaaacaagaaatatagaagaagttagcattggagattatattttatcaggtggcgaaataggagctttcgtactaattgatgcaattgttagaatgattccaggtgtaattggaaattctaaatcattacccgaggaaacatttgaaaagaatctgttagaatgtccacagtatacaaaacctcaaaaatgggaaaaaaaggaggtaccagacgtgttaatatctggagatcatgctaaaattaaggactggcgtttagtccaatctgaggatataacacgacgccgacgtccggacttatgg

SEQ ID NO: 226762 - DNA, 148 bp, Unknown
  Bacterial polypeptide expressing nucleotide sequence isolated from the Sargasso Sea
accccaaaaatgggaggaaaaagaggtcccagatgtattattatcaggagatcatgctaaaattaaggactggcgtttgtctcaatcagaggatataacacgacgccgacgcccagacttatgggaaaaatataaaaaaaacaaatga

SEQ ID NO: 226763 - DNA, 170 bp, Unknown
  Bacterial polypeptide expressing nucleotide sequence isolated from the Sargasso Sea
tttgaagtatccacatatacccaacccccagatttgggagcaaaaatcagtcccagatgtgttattatctggtgatcacgctaaaattaaagactggcgtttatctcaatctgaggctataacacgcgaccgaagaccagatttgtggcataaatataagaagaattaat

SEQ ID NO: 226764 - DNA, 454 bp, Unknown
  Bacterial polypeptide expressing nucleotide sequence isolated from the Sargasso Sea
tatgtggcaagctcaagtttttacactttatccagaagtttttcctggacctttatcaaaaggtttatatgggaaggctttatctaaaaatttgtggaatttaaagattataaatattcgtgatgcagctgatgataaacacaaaacagtcgatgatactccttatggaggtggatcaggaatgttattaaaagctgatgttttagcaaaatctttagatcaaaataaaataaaagatcacaaaattatttatttatctcctagaggtaaaaaattcgatcaagattatgcgcaacaattatcaaaagaaaaatcaatatctttaatctgtggacatttcgagggagttgatgagagaatattatcaacaaggaatattgaagaaattagcgttggagattatgttttatcaggtggagaaacagctgcatttgttatattgatacagttctaa

SEQ ID NO: 226765 - DNA, 571 bp, Unknown
  Bacterial polypeptide expressing nucleotide sequence isolated from the Sargasso Sea
atgcatatttattctattattagcttgtttcctggaatgtttgatcctttgaaaaaccttggaatatcaggaagagtgatcaaaaaagatatagcaaaattaaatttttttaatcctagagattatgcagatgacaagtataagactgtagatgattcaccttttggtggaggcccaggaatggttatgaaggctgaacctttatttttggcgcataaagatgcttgtaattcaattttaaatagttcatacaatctaaagaataaaaaaattaaaactatttactttagcccgcaaggaaaggttttaagtcaaaaaaaaatatgtgattacgcaaattcaggggataacttaatattggtttgtggtcgttatgaaggagttgatcagcgttttatagatacttgtgtagatgaagttgtttcagttggtgattatgttttatctggtggtgaaatacctgctatgacaatgttagatggtgtgtttaggcttttgcctggaagtttgaaaggggagtcagttaataatgactctttttctgataatttattagggttgctgaggctcc

SEQ ID NO: 226766 - DNA, 371 bp, Unknown
  Bacterial polypeptide expressing nucleotide sequence isolated from the Sargasso Sea
tataatttgtgaaagatttgaaggtatagatcaaagagttatagagacaagaaatatcgaggaatatagtttgggtgattttgttctttctggaggagagacagcctcattcgtatttatagatgcaatattaagactgatacctggaattattggtaatgagaattcaataaaagatgaaagcttcgaaaatggccttttagagtatcctcaatacacaaaaccacaaatttgggagaaaaaagaagtcccgaatgtactattatctggagatcatgctaaaattaaacactggcgtttatctcaatctgaggctataacacgcgaccgaagaccagatttatggcaaaaatataacaaaaagaactagt

SEQ ID NO: 226767 - DNA, 263 bp, Unknown
  Bacterial polypeptide expressing nucleotide sequence isolated from the Sargasso Sea
aatgtttcaagtaaaaatattcactttatatccagacttttttccaggaattctaagcaaaggtatttatggaagagcaattgagaaaagtttgtggaacttggatgtaatcaatattagagactacgcaaaagataagcataaaacagtagatgatactccttacggaggtggtgaaggaatggttttaaaacctgatgtagtcgcaaaagcactagatcaaaatttaaaaaaaaatgaaaaaattatttatttaacaccta

SEQ ID NO: 226768 - DNA, 364 bp, Unknown
  Bacterial polypeptide expressing nucleotide sequence isolated from the Sargasso Sea
atgtggcaagctcaagtgtttacactttatccagaggtttttcctggtcctttatctaaaggactttatggaaaagctttatcaaataatttatggaaacttaaagttgtaaacataagagatgcagctgatgacaaacataaaacagtagatgatacaccttatgggggcggttcagggatgttattaaaagcagatgttcttgcaaagtctttagatgaaaacaaaaatgagagtgagagaattttatacttatcgccaaaaggaaaaaaatttgatcaaaatttagcaaaagagctagctaatgaaaaatctctgtctttaatttgtggtcattttgaaggtgtggacgaaagaatacttt

SEQ ID NO: 226769 - DNA, 307 bp, Unknown
  Bacterial polypeptide expressing nucleotide sequence isolated from the Sargasso Sea
aataagcataggagattatattatttctggaggtgaaactgcttgctatatagttttagatagtgttttgagattattacctggagttttgggaaacaaagactctattgtcgatgaaagttttgagaacggacttttggaatatcctcaatatacaaaacctcaaatttggcagaaaaataaggttccagaggtcttattatcaggagatcatgctaaaattaaagactggcgtttatctcaatctgaggctataacacgcgaccgaagaccagatttgtggcagaaacataacaaaaaaaattaa

SEQ ID NO: 226770 - DNA, 358 bp, Unknown
  Bacterial polypeptide expressing nucleotide sequence isolated from the Sargasso Sea
tatgttgcaggctcaaatatttacactttatccagaaatttttcctgggcctttagacaaaggtctttacggaaaagcaatggctaaaaaattgtggagcttgaatgtgattaatattagagatgcagcaaaagataaacataagacagttgatgataccccatacggtggtggaactggtatgctgcttaaaccagatgttttagcaaattccattgatcaaaatgtgagtaaaagagaaagaattttttatctttcaccaaaaggtaaaaaatttgatcaaaagctcgctcaagatttatctaaagaaaaatcattttctttaatttgtggacattttgagggagttgatgaaaga

SEQ ID NO: 226771 - DNA, 463 bp, Unknown
  Bacterial polypeptide expressing nucleotide sequence isolated from the Sargasso Sea
ttgacgccaaaaggacagatatttactcaggagattgcagaggcattctcaaaaacttcaggtataaatattttatgtgggcgctttggtggagtcgacgaacgagtaattcaacattataagccaattgaaatatctattggagatttcattttatccggagctgaggttgcagcacaagtgctgattgatagtatagtaaggttattacctggaaccctaggcaatatagattcaacatataaagagtctttttcccaaaatttactcgaacatccacagtatactaagccaaatgtttggaataacaccgaagtgccgaaagttttgttatccggaaatcacaaagagatcgaattttggagatcagaacaatcaaaaagaattactaaagaaagacgatctgatctctggcaaaagtatttaaatagtgatatagaagctcgaaagttaaaaaaataat

SEQ ID NO: 226772 - DNA, 425 bp, Unknown
  Bacterial polypeptide expressing nucleotide sequence isolated from the Sargasso Sea
tatgttgcaagttcaattattcacactttatccagaagtttttccgggacctatgaacaaaggtctttacggcaaagcattagctaaaaaattgtggagcctcaatgtggttaatattagagatgcagcaaaagataaacacaagacagttgatgatactccctatggcggcggctcaggcatgttgcttaaacctgatgttttggcaaattctatggatgaaaatgttaaaaagggagaaagaattttttatctttcaccaaagggtaaaaaatttgatcaaaagcttgctcaagatttatcaaaagaaaattcattctctttaatttgtggacattttgagggagttgatgagaggattttatctacaagaaatattgaggaaataagcataggtgattatatcttatcaggtggagaaacag

SEQ ID NO: 226773 - DNA, 404 bp, Unknown
  Bacterial polypeptide expressing nucleotide sequence isolated from the Sargasso Sea
aatgttgcaagcccaagtatttacactttatccagatatttttcctgggcctttaggaaaaggtctttacggaaaagcaatgtctaaaaaactgtggagtttgaatgtgataaatataagagatgcagctacagacaaacacaaaacagttgatgatacaccttatggcggtggaacaggcatgttattaaaaccagatgttttagcaaattctatcgatcgaaacataaataaaggagacaggattttgtatctttcaccaaagggcagagtatttaatcaaaagcttgcgcacgatctatcatttgaaaagtccttttccttaatttgtggtcattttgaaggagttgatgagagagtattatctacaagaaatattgaagagataagtgtaggggattata

SEQ ID NO: 226774 - DNA, 156 bp, Unknown
  Bacterial polypeptide expressing nucleotide sequence isolated from the Sargasso Sea
aatatacaaaacctcaaatttgggaagaaaaaacagttccagatgtactattatcaggtgatcacgccaaaattaaagactggcgtttatctcaatctgaggctataacacgcgaccgtagaccagatttgtggcaaaaatataaaaagaattaat

SEQ ID NO: 226775 - DNA, 691 bp, Unknown
  Bacterial polypeptide expressing nucleotide sequence isolated from the Sargasso Sea
aatgtttactgcaagaatatttactttgtatccagacatgtttccgggccccctaaacgaaggattatttcgtaaggccatggaaaagaatatttggaatttagaaaaagtagatattagaaaatatgctgctgataaacatactacagttgatgatactccatatggtggaggctctggaatgctaatgaagccagatgtagtagctagtgcgatagataaaaatgttaaaaagggtgaaaaggtaatttttttaacacctaggggaaaaatttttaatcaaaatattgctaaagaactttcgttggagaaaacaataaatataatttgtggtcgcttcgaaggcatagaccaaagagttgttgaaactagaaatattcaagaatatagcttaggtgatttcattttatcaggtggggagacagcagcatttgtctttatcgatgcaataataagattgttacctgggattcttggtaatgaaaattcaataaaagatgaaagttttgaaaatggtcttttagagtatcctcagtatacaaaacctcaaatttgggaggaaaaagaagtcccaaatgtgcttttatcaggagatcatgctaaaattaaacactggcgtttgtctcaatctgaggctataactcgcgaccgaagaccagatttatggcaaaaatataataaaaaaaactaa

SEQ ID NO: 226776 - DNA, 454 bp, Unknown
  Bacterial polypeptide expressing nucleotide sequence isolated from the Sargasso Sea
ttatttatctccgagaggtaaaaaatttgatcaaaacgttgctagatctttaagtaaagaaacaaacttaaaccttatctgtggtcattttgagggtgtggatcaaagactccttgagacaagaaatattgaggaatatagtttgggtgattttgttctatcagggggtgagccagcatcttttgtttttgttgacgctttaataagactattacctggagtgctaggaaatgatgactccaccaaagaagaaagttttgaaaaccacctattagaatatcctcaatataccaaacctagggaatgggaaggtaaaagccctcctgaggtcttattttcaggcgatcatgccaaaataaaagggtggcgtttatctcaatcagaggctataacacgacgccaaagacctgatctttggaaaaaatatttagagaaaaaaaatgaaaaacattga

SEQ ID NO: 226777 - DNA, 457 bp, Unknown
  Bacterial polypeptide expressing nucleotide sequence isolated from the Sargasso Sea
ctgcaaaatttttctaacaccgtcaggtcagaaatatctcaagccaaacttaataatctatcaaaacatgatgaaatgcttattttatgcggaagatttgaaggggttgaccaaagagctatagaaattcttgattttcaggaaataagtatcggtgattacgtcctttctggtggtgagattgctgcccaggtgttagttgaaggttgtattcgtctcattcctggagtattagggcagccacaaagtttattagaagaatctttttctaataatctgcttgaatatcctcattataccagaccacaaacctgggaagatattcagggaaataaacatgaagttccagatgttttaacatcaggtcatcatgaaaaaattgataaatggagaaaagaaaaatcggttgaaaaaactaaagaattaagaccagatctttataaaaaggaaatataaa

SEQ ID NO: 226778 - DNA, 739 bp, Unknown
  Bacterial polypeptide expressing nucleotide sequence isolated from the Sargasso Sea
atgaattttaatattgtaactatctttcctaatgaactgagtcaggcattaagttttggagtcatcggtaatgcaatcagagatgacatcatcaagattaattactttgatccaaggatccatgctgacaacaagcataattcaatagatgacaagccatatggcggcgggcctgggatggtcattcaagccaagccagttttagaatcaattgatcaagccagagatggtaatagtgacattccggtattttttctttcgccccagggaaagaagtttaaccaagaaaaggcaaaagaaatttctatgcttgatcaaatcattattgtttcttctaggtatgaaggcttagatcaaagagcgatggatcaaactgataaccatgaggaaatttcaattggtgattttattctttctggaggggaaacagcttgcacagttgtaatagattctgtagcgagattgattccaggtgttcttggtgatgatgattcagtagttgaggagtcatttagtaatggactgcttgaatatccacactatacaaggccttctgaggtgcatgggcaaggagtaccagagatattactaagtggagatcatgaaaaaataaaagattggagaaaaatccagtccttaaggaatacatttattaagagacctgatttaattgatgaatctaaattaacagtcgaagaacttaaggttattgatgatataaaaaatgatctagaataat

SEQ ID NO: 226779 - DNA, 403 bp, Unknown
  Bacterial polypeptide expressing nucleotide sequence isolated from the Sargasso Sea
aatgttgcaagctcaagtatttacactttatccagatctttttcctggacctttagacaaagggctttatggaaaagcaatgtctaaaaaattgtggagtttgaacgtgataaatataagagatgcagcaacagataaacataaaacagttgacgatactccttatggcggtggaacaggcatgttgttaaaaccagatgtcttagctaattctatcgataaaaatgtaaataaaggagaaaggattttgtatctttcaccaaaaggtaaagtatttaatcaaaaacttgctcaagacctatcattagaaaaatccttttctttaatttgtggtcattttgaaggagtggatgagagagtgctatctacaagaaatattgaggagataagtataggagattat

SEQ ID NO: 226780 - DNA, 265 bp, Unknown
  Bacterial polypeptide expressing nucleotide sequence isolated from the Sargasso Sea
ggcgtttgtttttatagatgcaatcctaagactattaccaggagttttgggcaacgataattcgacaaaagacgaaagttttgaaaacggtcttttggagtatcctcagtacacaaaacctcaaatttgggaggaaaaagaagttccaaatgtacttttatcaggggatcatgctaaaattaaacactggcgtttatctcaatctgaggctataactcgcgaccgaagaccagatttatggcaaaaatataataaaaaaaattaa

SEQ ID NO: 226781 - DNA, 459 bp, Unknown
  Bacterial polypeptide expressing nucleotide sequence isolated from the Sargasso Sea
aaaaacttgaaacaataatttatttaactcctagaggaaaattatttaatcataaaattgcaaaagatttatcaaacaaaaaagtaattaatttaatatgtggtcattttgagggagttgatgaacgagttttagaaaaaaaaaatattcaagaaataagcattggagattttgtactgtctggtggagaaactgctgcttatgctgttttagatgcaacattgagatatatcccaggtattcttggaaataaaaattctatagaagatgaaagctttgaaaatggtcttctagagtacccgcagttcacaaaacctcagatttggcaggaaatggaggttccagaggtacttttatcaggagatcatgcgaaaattaaagactggcgtttatctaaatcagaggatataactcgcgaccgaagaccagatttgtggaaaaaatataaaagaaattaat

SEQ ID NO: 226782 - DNA, 280 bp, Unknown
  Bacterial polypeptide expressing nucleotide sequence isolated from the Sargasso Sea
agcgggtggtgaaatagcttcccaggttttggtggagtcaatagtgagactgttgccaggaacacttggtgacgtgaattctgctagttcagagactttctcaaaagaccttcttgaatacccccagtatacaaggcctaaaaaatggaaaaatttaacaattccagacatattgctctctggaaatcacagaaatattagtgagtggcgcttaaaacaatctgaaaaactgacgcaaaaagttaggccagatatatggaaaaactacaaaaaaagcaag

SEQ ID NO: 226783 - DNA, 439 bp, Unknown
  Bacterial polypeptide expressing nucleotide sequence isolated from the Sargasso Sea
atgtggactgtaagagtatttacactttatccagatatatttcctggtcctttaaataaaggactttatggaaaagcattacaaaaaaaattgtgggatttaaaagttataaatatccgtgattcagcatcggataaacacaaaactgttgatgataaaccttttggtggaggaactggaatgcttattaaaccagatgttttaggaaaatccatagataaaaatgtaaagaagagtgaaagaatattttatctgtctccaaagggaaaaaaatttgatcaaaaatttgcaaaagaacttgttaaagaaaaagctataaacttagtatgcggacattttgagggagtagatgagagaattttgtcgtcaagaaatatagaggaaattagtattggggattacattctgtcgggtggagagtcagcttcaattgtttgat

SEQ ID NO: 226784 - DNA, 307 bp, Unknown
  Bacterial polypeptide expressing nucleotide sequence isolated from the Sargasso Sea
attagccttaatagatgcattatccagaaagattccaggtgttcttggtaaccaggaatcttttaaaaacgattcatttgaaaataatcttttaaaagggcctgtatataccagacctcagatatttgaagaaaaagatgtaccagaaattttattgtcagggaatcatgagaaaattaatgattggaagattttatcttcattacaacgaaccattgaaagaagacccgatctcttagatggtgtaaaattaacaaaaaaacaaaaaaaactcttggataatttgttatctaagcgtatcctatag

SEQ ID NO: 226785 - DNA, 570 bp, Unknown
  Bacterial polypeptide expressing nucleotide sequence isolated from the Sargasso Sea
aatgtttttatccagagtatttactttgtatccagattattttcctggttatctagataaaggtctttttggtaagtctaagggaaaagaatggaatttagaaattataaatataagagactatgctttggacaaacataaaactgttgatgacactccatatggcggcggaaatggaatgataatgaaagcagatgttttggcaagctcattagatgcgaatgttaaaagtggagaaaaaaccatttatttaagtcctagagggaaagtatttaactcaaaacttgcaagagaattttctaatgaaaattcaataaatttaatttgtggtcatttcgaaggtgtagatgaaaggatactagaaagcagaaatattgaggaaattagtattggtgattttatattgtcaggaggtgaagttgctgcttttgtcgtgattgactctatccttagatttattccaggaattttaggtaatctaaattcatcaagagatgaaagttttgaaaatggtcttctagagtatcctcaatttacaaaaccccaaatttgggaggaaaaaaaggtccc

SEQ ID NO: 226786 - DNA, 372 bp, Unknown
  Bacterial polypeptide expressing nucleotide sequence isolated from the Sargasso Sea
aatgtatcgagtaaaaattatcacacttttcccaaatagttttcctggacttttaaatacaggagtcgtgggtaaggcattaaagaaaaaaatatggtcattaaaaacaattgatccgagaaaatattcaaaaggtaattacaaaaaagtagatgataccacagctggtggcggtcctggtatggttttaaaagcagatgtaatcggaaaatctgttgatgcttgttacaagaatataaaatctaaagatagttatccaatgatatatttaagtcctcgcggtactcctttaactcaaagtaaagttattaatttttcaaagatgaaaggaattaatattctgtgtggtagatatgaaggcattgatcaacg

SEQ ID NO: 226787 - DNA, 354 bp, Unknown
  Bacterial polypeptide expressing nucleotide sequence isolated from the Sargasso Sea
aaggaattgaccaaaggctacttgatgcgagagagattgaggaaattagtttgggggattatgttttgtctggtggtgagtcagcatcatttgtttttctggatagtattttaagattattacctaatgttctcggtaataaagagtcactcatagaagagagctttgaaaaaggcttgttagagcatccacactatacaaaaccagaaaaatgggagaaaaaaaggcctccagacgtcctattatcaggagatcatgcaaaaattaatgactggcgtttgtctcaatctgaggatataacacgacgccagagacctgatctttggaaaaaatatttagagaaaaaaaaatgaa

SEQ ID NO: 226788 - DNA, 429 bp, Unknown
  Bacterial polypeptide expressing nucleotide sequence isolated from the Sargasso Sea
gatgaaatttaatattgttactatttttcccaatgaactcatgcggtcattgaattatggagttattggcaatgcaataaatgataataaaattagaattgattgccatgatccaaggatacacgctgataataagcataaatccattgatgataagccatatggtggagggcctggtatggttatgcaagctgagccggttttaaagtcaattcagcaagcaagaaatggtgaaatcaatattccggtagttttcttatccccacaaggaaaaacatttaatcaagataaggcaaaagagctttctaaacttgatgagatcataattgtttcatcaagatatgaaggtcttgatcaaagagcgatcgatcaaactgataaccatgaggaactctccattggtgaatacatcctttcaggaggagaaac

SEQ ID NO: 226789 - DNA, 130 bp, Unknown
  Bacterial polypeptide expressing nucleotide sequence isolated from the Sargasso Sea
aaaaaagctgttccagacgtactattatcaggtgatcataataaaattaaacactggcgtttatctcaatctgaggctataacacgcgaccgaagaccagatttatgggaaaaatataagaagaattaac

SEQ ID NO: 226790 - DNA, 611 bp, Unknown
  Bacterial polypeptide expressing nucleotide sequence isolated from the Sargasso Sea
aaaaaaaatatgggatttaaaaataattgacattagagaatacgcaaatgataaacataaaacagttgatgacacaccttatggaggtggatcaggaatgcttttaaaaccagatgtaattgctaaatctttagatataaataccactaaaaatgaaaaaattttttatctatcacccagaggaaaaatttttaatcaaaatattgcaaaaaatttatcaaaagaaaaaaaaataaatattatttgtggacattttgaaggtatagatcaaagggttttagaccatagaaatatagaagagataagtattggcgattttgttttatctggaggggaaactgcatcatacgtttttcttgatgcaatacttagattaattcctggagtaatcggaaatgaaaattctaaaaatgaggaaagcttcgaaaatggtttattagaatacccacagtacacaaagccacaaatttgggaggaaaaaagtgtaccaaacgtgctattatcaggagatcatgcgaaaattaaagactggcgtttatctcaatctgaggctataactcgcgtccgaagaccagatttatggcaaaaatataataacaaaaaaaattaac

SEQ ID NO: 226791 - DNA, 650 bp, Unknown
  Bacterial polypeptide expressing nucleotide sequence isolated from the Sargasso Sea
tggccctttagctggagggatttacggaaaggctatgagaaatggcctatggggtttaaaaactgtaaatattagagactacgctgatgataaacacaaaactgttgacgatactgtatttggcggtggaagtggaatgttaatgaagcctgatatagtagcgaattctttagataaaaatatttccaagggggaaaaaattttttatttgtctccaaaaggtaaaaaatttaatcaaagctttgctaattctttaagtaaacaaaatggcattaatttaatttgtggtcatttcgaaggagtagatgatcgtttattgtccacgagaaatattgaggaaataagcataggagattatgttttatcaggcggtgaaaccgcagcatttgtaatattggatgctgtactaagacttataccaggagtgctaggaaacaaagattccataaaagatgaaacttttgaaaatagtcttttagagtaccctcaatttacaaaacctaaaatttgggaaggcaaaagtgttccagatgtactattttcaggtgatcatgcgaaaattaaaagctggcgtttatctcaatctgaggatataacacgtcgccagagacctgatctttgggaaaaatatttaaaagataaaaaataat

SEQ ID NO: 226792 - DNA, 619 bp, Unknown
  Bacterial polypeptide expressing nucleotide sequence isolated from the Sargasso Sea
ttggaaagtcaaaaggaaaaagaatgggatttagaaacagtaaacataagagattatgcattagataaacataaaactgttgacgacactccttatggtggtggaaatggaatgattatgaaagcagatgttttagcaaattcattagatgcaaatatcaagactaaagaaaaaaccctttatttaagtccaagaggaaaagtttttaattctaaactcgcaagagagttttcaaatgaaaaaacaatcaatttaatttgtggtcatttcgagggagtagatgaaagaataatagaaagtagggatattgaagagattagcattggtgactttatattatcagggggtgaagttgctgcatttgttgtaatagattctattctaagatttattccgggaattctaggtaatattaattcctcaagagatgagagttttgagaatggccttcttgaatatccgcaattcacaaaacctcaagtttgggaggaaaaaaaggtcccaaatgtgctaatttcaggtgatcacgctaaaattaaagactggcgtttatctcaatctgaggctataacacgcgaccgaagaccagacttatggcaaaaatataagaaaaattaaa

SEQ ID NO: 226793 - DNA, 292 bp, Unknown
  Bacterial polypeptide expressing nucleotide sequence isolated from the Sargasso Sea
ttgggatttgaggaagtaagtataggggattatgtactaaatggtggtgaagtggctgcacaggtattacttgaaggttgtattcgactcattcctggagtattagggcatccggaaagtattttagaagagagcttttctgaagaacttttagaacatcctcattataccaaacctcaagtttggattgatgagaataaaacaaaacataatgttcctgatatattattatcaggacaccacgaaaaaattaaagaatggagattaaaaaagtcagttaaaaaacaaagaa

SEQ ID NO: 226794 - DNA, 694 bp, Unknown
  Bacterial polypeptide expressing nucleotide sequence isolated from the Sargasso Sea
aatgtacgaagtaaaaatatttactttatatccagaaattttccctggcccattggctgggggaatatatggcaaagccatgagcaaaggtttatggaatttaaaaactgtaaatataagagactacgctgatgataaacacaaaactgttgacgacactgtatttggtggtggaagtggaatgttaatgaagcctgatatagtagcgaattctttagataaaaatatttccaagggagaaaaaatttattatttgtctccgaaaggtaaaaaatttaatcaaagtttcgctaattctttaagtaaacaaaatggtattaatttaatttgcggtcattttgaaggagtagatgatcgtttattgtccacgagaaatattgaggaaataagtattggagattatattttatcaggcggtgaaactgcggcatttgtaatattagatgctgttctaagactcataccgggagtgttaggaaacaaagactctataaaagatgaaacttttgaaaatagtcttttggagtaccctcaatttacaaaacctaaaatttgggaaggtaaaagtgttccagatgtactattttcaggtgatcatgcgaaaattaaaagctggcgtttgtctcaatctgaggatataacacgtcgccagagacccgatctttgggaaaaatatttaaaagataaaaaataa

SEQ ID NO: 226795 - DNA, 193 bp, Unknown
  Bacterial polypeptide expressing nucleotide sequence isolated from the Sargasso Sea
catgcagatcaacatagtctccatctttccaggtttttttgacggtccgcttggcttgtcgattccagcccgagcggaggcggctggtttggtggagtatcaaatggtcgacctccgggactacacgtatgaccgtcacaagactgtagacgatttgccatacgggggcggcgcagggatggtcatgaagcca

SEQ ID NO: 226796 - DNA, 598 bp, Unknown
  Bacterial polypeptide expressing nucleotide sequence isolated from the Sargasso Sea
atgttaagcgttaaggtatttactttgtatccggaattttttccaggaccattaggtcatggcttatacaagaaagctatggaaaataaaatttggtcattaaaaactattaacattagagacttttctttagataagcacaaagcagtcgatgatactcctttcgggggcggttccggtatggttatgaggtgtgatgtgttggctaacgcaatagataaaaatgttaaaggtaaaaatgagcaaataatttacttatctcctaaaggaaaaaaatttgatcaaaaatatgctaaaaaaattattaaaaaaaacaacctaaacataatatgtggccattttgaaggtatagatgaaagactaattgaaaatagaaatatagaagaagttagtattggagatttcatattatctggaggagaaactgcaactttcgtttttctggatgcaattattagacttttgccaggagttttagggaatacagattcattaaaagaagaaacattcgaaaacaatcttcttgaatatccacaatatacaaaacctcaaaaatgggaaaaaaaagaggtgccatctgtgttattatcaggagatc

SEQ ID NO: 226797 - DNA, 691 bp, Unknown
  Bacterial polypeptide expressing nucleotide sequence isolated from the Sargasso Sea
aatgtttaaagtaaatatattcacattatatccagaattttttccaggaccttttgataaaggaatttatggcaatggacttaggaaaaaaatttgggatataaatattgtaaatattagagactttgcggatgataaacacaaaacagtcgatgataccccttatggtgggggctccgggatggtaatgagagctgatgtaattgctaactcattggatagcaatttgcataaaaatgaaaaagtgtattacttaagtccaaggggaaaattacttaaccaagaaattgtaaaaaaaatttctaaagaaaaatctctaaacattctttgtggtcattttgaaggtgtagatcagagagttcttgataacagaaatattgaggaaatcagtataggggattatataatttcaggaggagagactgcctcctatgtagttttagatagcgtcctaagattaataccgggaatgataggaaatgaagagtcaattattgaagagagttttgaaaatggacttttagaatatccacaatacacaaaacctcaaatttggcaggaaaataaggttccagaggtcctattatcaggtgatcatgctaaaattaaacactggcgtttatcacaatctgaggctataacacgcgaccgaagaccggatttgtggcataaacataacaaaaaaaattaa

SEQ ID NO: 226798 - DNA, 630 bp, Unknown
  Bacterial polypeptide expressing nucleotide sequence isolated from the Sargasso Sea
tttacggaaaggctatgagaaatggcttgtggagtctaaaaactgtaaatattagagactacgctgatgataaacacaaaactgttgacgacactgtatttggtggcggaagcggaatgttaatgaagcctgatatagtagcgaattctttagataaaaatatttctaagggagaaaaaattttttatttgtctccaaaaggtaaaaaatttaatcaaagttttgctaattctttaagtaaacaaaatggcattaatttaatttgcggtcattttgaaggagtagatgatcgtttattatccacgagaaatattgaggaaataagcataggagattatgttttatcaggcggtgaaaccgctgcatttgtaatattagatgctgttttaagacttataccaggagtgttaggaaacaaagactccataaaagatgaaacttttgaaaatagtcttttggagtaccctcaatttacaaaacccaaaatttgggaaggcaaaagtgttccagatgtactattttcaggtgatcatgcgaaaattaaaagctggcgtttatctcaatctgaggatataacacgtcgccagagacctgatctttgggaaaaatatttaaaagataaaaaataat

SEQ ID NO: 226799 - DNA, 521 bp, Unknown
  Bacterial polypeptide expressing nucleotide sequence isolated from the Sargasso Sea
aatgtggacagctcgagtatttacattatatccagaagtatttcctgggcctctaagcaaaggtctatacgggaaagcactagctaaaaaaatttggaatataaaagtggttaatattcgagagtcagcagaagataagcataaaactgttgatgatacacctttcggtggaggcaaaggtatgctcatgaaagcagatgttcttagcaaatctttagataaaaatgtaagtaagagcgaaagaattatttatttatctccgaaaggaaaaaaatttgatcaagatatagcaaaggagctttcaaaagaaaaaatattaaatctggtatgtggaaatttcgagggtgttgatgaacgaattcttgaaacaagaaacatagaagaaataagcattggtgactatattctttctggcggtgaatcagcctcatttgtaataatcgatgctattctaaggttgttacctggtgtaataggaaacgaggagtcaaaaaatgaagaaagttttgaaaatggacttt

SEQ ID NO: 226800 - DNA, 190 bp, Unknown
  Bacterial polypeptide expressing nucleotide sequence isolated from the Sargasso Sea
cctcaatatacaagacctaaaaattggattgatgatgaaggtaatgaacataaagttccagaagttttattatctggtaaccatgaaaaaattatagaatggaaaaaaaatcaatcaatagaaataactaaaaaaaataggcctgatattataaaaaaaaaattaaaagaaagcaaaaataatgaataat

SEQ ID NO: 226801 - DNA, 736 bp, Unknown
  Bacterial polypeptide expressing nucleotide sequence isolated from the Sargasso Sea
gatgtatagaactcaactaagcgctaaggttataactcttttcccggaactttttcctggtccattatcagcctcagttacgggtagagcattagaaaacaagctttggtccctagaaaccatcgacttgaaaaaatatggtaagggtagacacaaaaaagtagatgataaaccaatttcgggtgggccgggaatgattttaatgcctgatgttttagatgaagccatactaaaagcaaatagtttaatcagtggtaaaaataagcttatagtttgtatgagcccaaagggtattcctctgaatcaaaacttagtgaagaatatgcttcaatacaatgaaataataattgtttgtggcaggtttgaaggtatcgatcagagggttattgacaaacataagatgaaagaaatatctattggtgacttcattttaacgggaggtgaattgggagctatggttttattagataccctagttagattgcttcctggcactttaggcaatgcggaatctattatttcagaaagtttcacagatgagttgcttgaagcgccgcagttcacgaaaccaatagactggaatgggatgaaagtaccagaaattcttcaaactggtaatcacaaaagaatattggagtggaaaaatacagcatcggaacaaatcacaaaaaaaaatagacccgatttatttattaaatacattgaaaaaaataaaaaaaagattaaaagaaaatag

SEQ ID NO: 226802 - DNA, 430 bp, Unknown
  Bacterial polypeptide expressing nucleotide sequence isolated from the Sargasso Sea
tccagtttggatcaaataataattatttgtggacaatatgagggctttgatgaaaggattagatgtttagctgatgaagagatatcgataggcgattatgtactttctggaggtgaaatacccgctataacaataattaacggtttgactagattattaccaggaactcttggtgatccagactccttagtggatgaaagtcataattccaatttattagagtatccccattacacaagaccaaaagttttcaaaagaatgtgtgttccggatgttttaattagtggggatcataaagaaatagaagtttggagaaaaaaacaaatgttaaaaaggacatttaaaagaagaaaagatttaatcaataatgggaacctaacttttgaacaaaataattatgatgagaatagttggttttgggatatttaag

SEQ ID NO: 226803 - DNA, 514 bp, Unknown
  Bacterial polypeptide expressing nucleotide sequence isolated from the Sargasso Sea
aagaccccttttccttttagatccagtgggttcacccttcgaccagtccatggctagagacctagctgcactcagtggtttctcgctgttgtgtggacgttacgaaggcgttgaccagcgaattcgagaggaactagtagacgcgacaatctctattggcgattttgtgatggcaggcggagagtttgcggcgatggttattgttgaaactgtcgcccgcttaatacctggggtgttgggcaacgatatctcgattgaagacgaaagcttcggtgatggtctcctcgagtaccctcaatggactagacctgccgaatttagagaaatggcagtacctgaggttcttcgaagcggtgatcatgctcgaattgaaagatggcgccgagccgcctcgatagaacgcactgcgacactccgaccggacttgcttgaccagaggggcgtgtctccagaagagattgcgttactcaaagagttcaatataagcatcgatgaccgcttcctttcggactaa

SEQ ID NO: 226804 - DNA, 700 bp, Unknown
  Bacterial polypeptide expressing nucleotide sequence isolated from the Sargasso Sea
catgagatttataattcttacatcgtatccacaaatgtttccaggaagtctaggtcattcagttataggtaatgctttagacagtaaaaaatttaatcttgaaataattaatttacatgattttggcattgatcaaagaggcagcattgatgatgaaccatttggtggtggaccaggaatggttataagacctgatgttgtagaaaacgcaatggaatcaatatcgctaaaatctaacaatgtttcaaaagtttttcttactccttctggtgaaaaattaacccagaacaaacttgaagacttatcacaatttgatgaaatagtgattttgtgcgggagatttgaaggggttgatcaaagagtcatagaaatcttaggttttcaagaggttagcattggcgattatgtactttcaggaggagagattgctgcgcaagtgttagttgaaggttgtattcgtctcattcctggagtattaggtcagccacaaagtttattggaggagtctttttccaataatctgttggaatatcctcattataccaggccaaaagtttgggaggataaaaaaggtaacaaacatgaagtaccagatgtattagtttctggacatcatgaaaaaattgggagatggagaaaagataaggcattagaaaaaactaaaaacttaaggcctgatcttttaaaaaaaggactataa

SEQ ID NO: 226805 - DNA, 358 bp, Unknown
  Bacterial polypeptide expressing nucleotide sequence isolated from the Sargasso Sea
ttaataatactttgtggtcataataaaggagtagatcaacgagtaagggatcatcttatcacacatgaaatatcagttggagattttgttctttctggtggcgaactcgctgcggccgtattatgtgatagtattataagacttattccaggagttctcggtgacgaatcatctgccctttcagatagtttccaagacggcctacttgcacccccaatttatactcgcccatcagattacaatggttggaaagtccctgaaattttaacttcaggaaatacttataaaattaatgaatggcgtgatgaaaaagctttagagcgaacacaattaagacgacctgatcttttaaagtgaa

SEQ ID NO: 226806 - DNA, 478 bp, Unknown
  Bacterial polypeptide expressing nucleotide sequence isolated from the Sargasso Sea
tcctaataatattaagagaaaattgatatattttactccttcaggtaggcctttaaaacaagcaaatttattagaattttcaagatttgatcaattaattatactttgtgggagatttgaaggggtagaccagagagcaataaatgttttagatttcacagaaattagcattggagattatattttaatgggaggagaaacagcagctcaagtattagttgaaggttgtattcgtttgcttcctggagtattagggcagcctaaaagtttattagaagaaagtttttctaatgatcttttagagtatccgcattataccagacctaaagtttggaaagatactaataacaataatcatgaaattcctgatattttaatttcagggcatcatgaaaagattaaagagtggagattaaaaaaatctattgaaagaaccaaaataactaggccggatttaattaaagacaagaaagcataa

SEQ ID NO: 226807 - DNA, 685 bp, Unknown
  Bacterial polypeptide expressing nucleotide sequence isolated from the Sargasso Sea
aatgtttttatctagagtatttactttgtatccagaatattttcctggttatctaaaaaaaggtttgtttggaagagcaatgaataaaatttggaatttagaaacagttaatattagagattatgcaattgataaacacaaaacagtagatgataccccttatggtggcggaagtggtatgatcataaaagcagatgttctagcaagatcaattgatgaaaatgtaaaaagtaatgaaaaaataatttatctaagccctaaaggcaaattatttaattatgaatatgctaaaaaactttcaaaagaaaaatctataaacataatttgtggtcattttgaaggagtggatgagcgagttcttgaagccagaaatattgaggaaattagtattggagattttattttatcaggtggagaagttgcagcgtttgttattctagactctacgttgagatttatacctggaatattaggtaacataaattcacctattgaagaaagttttgagaatggtctattagaatatcctcagtttaccaaacctcaaatttgggaggaaaaaagtgtaccaaatgtgctaatttcaggagatcacgccaaaattaaagactggcgtttatctcaatctgaggctataacacgcgaccgaagaccagatttgtggcaaaaatataaaaaaaattaa

SEQ ID NO: 226808 - DNA, 155 bp, Unknown
  Bacterial polypeptide expressing nucleotide sequence isolated from the Sargasso Sea
aacatggaaaaatatgactattccagatgtattactgtcaggtaatcataagaatataagtaaatggcgcttggacatgtccgagaaaataacaaagaaaatgaggccagacatatggaaaaactacaaaaaaaacaagacaagcaagaaataaa

SEQ ID NO: 226809 - DNA, 464 bp, Unknown
  Bacterial polypeptide expressing nucleotide sequence isolated from the Sargasso Sea
gatgagaacttttaactttattactatttttccagatataataaataatttcttaaaatacggtctagttaatagagcaattgaaaaaaaaatcatcgaaataaatacgatatacttgagggatttttcagatgactctaatttaagaattgatgataaatcttatggtggtggacctgggatggtcatgagatacaagcctgttgaagatgccctcaaaagcattacaagaaaatcctatgtaatttatttatcacctcatggaagtaaactcgaccagcataaaatatctgaacttacaaaagcgcaaaatcttacttttttatgtggtcgttatgaaggatatgatcagagagtagtagatgatttggtagatgagcagatatctctcggagattatgtaatatctggaggtgaattacctagcttaatactttctgagggtatcactagattactaccaa

SEQ ID NO: 226810 - DNA, 430 bp, Unknown
  Bacterial polypeptide expressing nucleotide sequence isolated from the Sargasso Sea
ggtaaaaaatttaatcaaagttttgctaattctttaagtaaacaaaatggcattaatttaatttgcggtcattttgaaggaatagatgatcgtttattatccacgagaaatattgaggaaataagcataggagattatgttttatcaggcggtgaaaccgctgcatttgtaatattagatgctgttttaagacttataccaggagtgttaggaaacaaagactccataaaagatgaaacttttgaaaatagtcttttggagtaccctcaatttacaaaacccaaaatttgggaaggtaaaagtgttccagatgtactattttcaggtgatcatgcgaaaattaaaagctggcgtttatctcaatctgaggatataacacgtcgccagagacctgatctttgggaaaaatatttaaaagataaaaaataat

SEQ ID NO: 226811 - DNA, 245 bp, Unknown
  Bacterial polypeptide expressing nucleotide sequence isolated from the Sargasso Sea
aatgacgagcggtgagaaaaaagatcataagatttggatcatttctttatttccagattttttcaaagcttttttggagacagggctctccggtcgagctttaaaaggcgagagggagtcaggtctttctgtccatttggttcagttaagagattattcaagtaattcttataagggtgtagacgattctccttatgggggagggcctggcatggtgatgaggcctgatacccttcaaaaggcat

SEQ ID NO: 226812 - DNA, 466 bp, Unknown
  Bacterial polypeptide expressing nucleotide sequence isolated from the Sargasso Sea
tatgtggcaggcacaaatatttactttatatccagaattttttcctgggcctttatcaagaggtctttacggaaaagcgttagagaaaaaaatatggaatttaaaagttgtaaatataagagatgccgcagaagataagcataaaactgtagatgacactccgttcggaggtggagcaggaatgcttttgaaagctgatattttagcaagatcaattgataaaaatttagtagaaaagagtagaattttttatttgtctccaaaaggtaaaaaatttgatcaaaaacttgccaaagaactttcaaaagaaaaatcaataaatttaatatgtgggcattttgagggagttgatgagagattattatccacaagaaatattgaagaaataagtattggagactttattttatccggaggagagtcagcagcatttgtgataattgatagcattctcagattgttacct

SEQ ID NO: 226813 - DNA, 712 bp, Unknown
  Bacterial polypeptide expressing nucleotide sequence isolated from the Sargasso Sea
atgtggacagcaagagtatttactttatatcctgagttatttccgggaccgctagatagtggtttatataaaaaagcactagaaaaaaaattatggtctttgaaagtagtaaatattagggattatgctttagacaaacacaagaaggttgacgatacaccatttggaggcggaagtggaatgctaatgagagcagatgttattgctaactcactagataaaaatgtttttgataaaaatgaaccggtaatttatttatcacctaaaggtaaaagtttcgatcaaacttatgcaaagcagatggtaaaaaaaaacataaacattatatgtggacattttgaaggaatagaccaaagaatattagaaaaaagaaatatagaagaagttagtgttggtgattttattttatcaggcggagaaattggtgcttttatagtcattgatacgattgtcagactaattcctggtgtacttggaaatgctaattctttaaccgaagaaacatttgaaaataatctattagagtaccctcagtatacaaaacctacaaaatgggaagaaattaatgttcctgatgtattattaacgggagatcatgccaaaattaaggactggcgtttatctcaatctgaggatataacacgacgccgacgcccagatttgtgggaaaaatataaaaaaaaaaatgaaaaatatagaagaaataaataaa

SEQ ID NO: 226814 - DNA, 793 bp, Unknown
  Bacterial polypeptide expressing nucleotide sequence isolated from the Sargasso Sea
attgactaagaaatatgcttttatttctgttttcccagaaatttttgttccattctctcaatccggaatcgtaaagaaagctacagattcaggattaattcaaatcaaaagttttaaccccagagattttttaagtaataaagacagaatagacgataaggtttacgggggagggccaggaatggtattcaaatcagaaccgatacaaaaatgcattaaccatgctaaagatactttttcaggcttatcaaaagtaatccatctatcagcatctggagaaaccttttcagctcagacagctagagagctttctaaagaggattcattaatatttttatcatcgcgatacgaaggtctggatcagcgcgtcatagatgcagaggttgatatggagattagcattggagactatgtattaacaggaggtgaaattccgtctatggttctcttagaggccatcattagatttattgatggcgtggttggcgacgaagaatctgtgaaaaatgattccttcgagaatgctcttttggaacatcctcaatacacccgaccagaaaaaaatgaacttggagaagtccctgaaaccttattatcaggaaatcatgatcaaattgaaaaatggaagagaaaacattcacttggtaagacttttttaagaagacaagatctgatcaaacaacatgatctaaaccagcaagatacagacctaattaaagattttcttagtgaccttggctacgaatctgatagaattgccgagcttttaagcataattaatgatgaaaactag

SEQ ID NO: 226815 - DNA, 484 bp, Unknown
  Bacterial polypeptide expressing nucleotide sequence isolated from the Sargasso Sea
atgtttaaagtaaaaatatttacaatatatccacaattttttcctggcccttttgatacaggaatttatggaaatgctcttgaaaaaaaaatttgggacttaaaaactgtaaatattagagactttgcagaagataaacataaaactgttgacgataccccatatggcggaggatcaggaatggtaatgagagcagatgtaattgctaattctctagacaaaaatttagatacaggggaaaaagtttactacctaagtcctaggggaaaactcttcaatcaagaaattgcaaaaaaaatttcaaaagaaaaatctttaaacattttatgtggtcatttcgaaggagttgatcaaagagttcttgataataaaaatatagaagaaattagtataggagactatgtaatttctggaggagaaactgcatcttatgtagttctagacagtgttttaagattaataccctggagtattaggaaatgag

SEQ ID NO: 226816 - DNA, 688 bp, Unknown
  Bacterial polypeptide expressing nucleotide sequence isolated from the Sargasso Sea
tatgtggacagcaaagatatttacattatatcccgaaatgtttccaggtcccttatcaaaaggattatatggtaaggcactttctaaaaaaatatgggaattaaaaattgtaaatattagaaattttgcaacagataagcataaaaccgtagacgatagtcctttcggtggaggctcagggatgctgttaaaaccagatattttagcaaaatctattgatgcaaattatgagtttggtgaaaaaattttttatttatcacctaaaggaaaaaaatttaatcaaaaacttgctaaagagctttctatggaaaaatcaataaacttaatttgtggacattttgaaggagttgatgaaagagtattgaatacgagaaatatagaagaaatcagtatcggtgatttcattttatcaggtggtgaatcagctgcttttgtagttatagatagtattttaagattattaccaggagtaattggcaataaagaatctaaacttgatgaaagttttgaaaatggattgttagaatatcctcaatatacaaaacctcaaatttgggaggaaaaaagtgttccaaaagtgttattatcaggggatcacgctaaaattaaagactggcgtttatctcaatcagaggctataacacgcgaccgaagaccagatttgtggcaaaaatataaaaaaaattaa

SEQ ID NO: 226817 - DNA, 712 bp, Unknown
  Bacterial polypeptide expressing nucleotide sequence isolated from the Sargasso Sea
atgttagatgttaaaatattaaccgcttatcctaatatgtttcctgggacactaaatcattctttaattggaagtgcattaaaagagaaaaaatggacgcttgaggtgattaatttacataattttggttatgataatactaaaagtattgatgatgagccttttggaggtggtcctggcatgattattcgagctgatgtagtagaaaaagccttactttctatagaatatcctaataatattaagagaaaattaatatatttaactccttcaggcacccctttaaagcaagcaaatttattagaattttcaagatttaaccaattaattatactttgtgggagatttgaaggggtagaccagagagcaataaatgttttggatttctcagaaattagcattggagattatattttaatgggaggagaaacagcagctcaagtattagttgaaggttgtattcgtttgcttcctggagtattagggcagcctaaaagtttattagaagaaagtttttctaatgatcttttagagtatccgcattataccagacctaaagtttggagagatactaataacaataatcatgaaattcctgaagtattaatttcaggacatcatgaaaagattaaagagtggagattaaaaaagtctattgagagaactaaaataattaggccagatttattaattaaagataagaaagcataag

SEQ ID NO: 226818 - DNA, 643 bp, Unknown
  Bacterial polypeptide expressing nucleotide sequence isolated from the Sargasso Sea
aatgagttgttttaattttgatgtaattacattattccctaaagcttttgaattaataaataatttaggggtaataacaagagctctagataagaatttgatcgatgtaaatttacatgatttaagagaatatggagaaggttcttaccgacaagtagacgataagccttatggaggaggagtaggtatggtattaaaacctgaacctatttataaggcatatgaatcgattagaaaattacctaaaagtaaaactttgctgatgaccccacagggtaaagttttaaagcaaaaggatcttgtgagatggtccactttggatcaaataataattatttgtggtcaatatgaaggttttgatgaaaggattagatttttagctgatgaggagatatcagtgggcgattatgtactttctggaggtgaaatacccgctatatcaataattaatggtttgactagattattaccaggaactcttggtgatccagactccttagtagatgagagtcataattcgtctttgttggaatatcctcattacactagacctcaagtttttaggaatatgaaagttcctgatattctgactaatggtaaccacaaacaaattgaactttggagagaaaagcaaatgttaaaa

SEQ ID NO: 226819 - DNA, 685 bp, Unknown
  Bacterial polypeptide expressing nucleotide sequence isolated from the Sargasso Sea
atgtttttgtctagagtatttactttgtatccagaatattttcctggttatttaaataagggtttgtttggaagagcaatgggtaaattttggaatttagaaactgtcgatattagaaattatgctactgacaaacataagacagtagacgatactccttatggtggtggtaatggaatgataataaaagcagatattttagcaagatcaatagatgaaaatgtaaaagataacgaaaaaataatttatttaagtcctagaggaaagttgtttaactatgaatatgctaaaaaactttcaaatgaaaaaactttaaatttagtttgtggtcattttgaaggagtagacgagagagttctagaaactagaaatattgaggaaattagtattggagattatattttatcaggtggtgaagctgctgcttttgttgtgttagattccatcttaagatttgttcctagaatattgggaaatgcaaattcatcaattgatgaaacttttgagaatggtttgctagaatatcctcagtttactaaacctcaaatttgggagggaaaaagtgtaccaaacgtgctaatttcaggagatcatgctaaaattaaagactggcgtttatctcaatctgaggctataacacgcgaccgaagaccagatttgtggcaaaaatataaaaagaattaaa

SEQ ID NO: 226820 - DNA, 688 bp, Unknown
  Bacterial polypeptide expressing nucleotide sequence isolated from the Sargasso Sea
tatgtttgttgcaagaatatttactttgtatcctgaattttttcctggcccattagcaaaaggcttgtacggaaaagctttagttgaaaaaatttggaaattagaaacagtgaatattagagattatgcggaagataaacataaaactgtagacgatacaacttatggcggtggttctggtatgttaatgaaacctgatgtacttgctaaatcattagatcaaaatataaaatcttcagaaaaaataatttatttgtctcctaaaggtaaattatttaatcaaaatcttgctaaaaagttagcaaaagaaaaaacactaaatttaatatgtggacactttgagggtgttgatgagagagttataaatagcagaaatattgaagaggttagtattggtgattttgttttatctggaggagaaagcgctgctatagttttattagactctgtattaaggttattgccaaaagttcttggcaatgagctttctaacaaagaagaaagttttgaaaatggtcttttagagtacccacagtataccaaacctcaaatttgggaggaaaaacctgtaccaaatgtgctattatcaggggatcatgcgaaaattaaagactggcgtttatctcaatcagaggctataacacgcgaccgaagaccagatttgtggcaaaaatataaaaagaattaa

SEQ ID NO: 226821 - DNA, 623 bp, Unknown
  Bacterial polypeptide expressing nucleotide sequence isolated from the Sargasso Sea
tatgaagtttaatattataactatttttccaaatgaactgagtcaggcattaagttatggagtcattggaaatgcgataagggacaatataatcaaaattaattatcttgacccaaggacccattctgataacaagcatgattcaatagatgacaagccatatggtggcggacctggtatggtaatgcaagccaagccagttttagaatcaattaagcaagccagagatggtaataacgatattccagtatattttctttcccctcaaggaaagatatttaaccaggaaaaggcaaaagagctttcagagcttgatcaaatcataattgtttcctctaggtatgaaggcttagatcaaagagcaatggatcagactgataaccatgaggaaatttcaattggtgattttgtactctctggtggagaaacagcttgtgcagttgtaatagactctgttgcaagattgattccaggtgttcttggtgatgatgagtcagtaattgaggagtcatttagtaatgcattacttgaatatccacattatacaagaccttctgaggtgaatggacagggtgtaccagaaatattaataagcggagaccatgaaaaaataaaagagtgga

SEQ ID NO: 226822 - DNA, 447 bp, Unknown
  Bacterial polypeptide expressing nucleotide sequence isolated from the Sargasso Sea
attatgatgaaataatttatttaacgccagatggagagttattgaaccaaaaggaatcaaattatctatcaacactaaaaaatatcataattatttgtggacattataaaggtgttgatcacagggttagagaacatattgttaccaaagagatctcaattggagattatgtcttatcaggaggtgagcttccagctgctgtcctttgtgactctataatcagacttttacctggtattattggtgatgaatcgtctgcactttcagatacttttcaagataatttaatagcaccccccatttatactagacctgaaatctataaaggtttaaaagtaccaaaagttctcttatctggtaatcaaagtgaaattcaaaaatggaatgatgataaatcattagaaaggacaaaattacttaggccaaatctttttgataatgaataaa

SEQ ID NO: 226823 - DNA, 697 bp, Unknown
  Bacterial polypeptide expressing nucleotide sequence isolated from the Sargasso Sea
aatgtggacagctcgagtatttacattatatccagaagtatttcctgggcctctaagcaaaggtctatacgggaaagcactagctaaaaaaatttggaatataaaagtggttaatattcgagagtcagcagaagataagcataaaactgttgatgatacacctttcggtggaggcaaaggtatgctcatgaaagcagatgttcttagcaaatctttagataaaaatgtaagtaagagcgaaagaattatttatttatctccgaaaggaaaaaaatttgatcaagatatagcaaaggagctttcaaaagaaaaaatattaaatctggtatgtggaaatttcgagggtgttgatgaacgaattcttgaaacaagaaacatagaagaaataagcattggtgattatattctttctggcggtgaatcagcctcatttgtaataatcgatgccattctaagattgttacctggtgtaataggaaacgaggagtcaaaaaatgaagaaagttttgaaaacggacttttggaatatcctcaatacacaaaacctcaaatttgggaaaaaaaaagtgttccaaatgtcttaatatcgggagatcatagtaaaattaaggactggcgtttgtctcaatcaaaggatataacacgacgccgaagacctgatttgtggaaaaaatatttagataaagaaaaaaaatga

SEQ ID NO: 226824 - DNA, 691 bp, Unknown
  Bacterial polypeptide expressing nucleotide sequence isolated from the Sargasso Sea
atgtttactgcaagaatatttactttgtatccagacatgttcccgggccccctaaacgaaggattatttcgtaaggccatggaaaagaatatttggaatttagaaaaagtagatattagaaaatatgctactgataaacatactacagtcgatgatactccatacggtggaggctctggaatgctaatgaagccagatgtagtagctagtgcgatagataaaaatgttaaaaagggtgaaaaggtaatttttttaacacctagaggaaaaatttttaatcaaaatattgctaaagaactttcgtctgagaaaacaataaatataatttgtggtcgcttcgaaggcatagaccaaagagttgttgaaactaggaatattcaagaatatagcttaggtgatttcattttatcaggtggggagacagcagcatttgtctttatagacgcaatactaagattgttacccggaattcttggtaatgaaaattcaataaaagatgaaagttttgaaaatggtcttttagagtatcctcagtatacaaaacctcaaatttgggaggaaaaagaagtcccaaatgtacttttatcaggagatcatgctaaaattaaacactggcgtttgtctcaatctgaggctataactcgcgaccgaagaccagatttatggcaaaaatataataaaaaaaactaat

SEQ ID NO: 226825 - DNA, 739 bp, Unknown
  Bacterial polypeptide expressing nucleotide sequence isolated from the Sargasso Sea
gatgaaatttaatattgtcactattttccccaatgaactcatgcggtcattgaattatggagttattggcaatgcaataaatgataataaaattagaattgattgccatgatccaaggatacatgctgataataagcataactccattgatgataagccatatggtggagggcctggtatggttatgcaagctgagccggttttaaagtcaattcagcaagcaagaaatggtgatatcaatattccggtagttttcttatccccacaaggaaaaacatttaatcaagataaggcaaaagagctttctaaacttgatgagattataattgtttcatcaagatatgaaggtcttgatcaaagggcgatcgatcaaactgataaccatgaggaactctcaattggcgaatacatcctttcaggaggagaaacagcatgtgctgtagtgatagattccatctcaagactgattccaggggttctaggcgacagggagtctattcttgaggaatcattcagtgatggcctattggaatatcctcactacacgagacctcctgaggttaatggagataaagtaccagaaattttactaagcggtgatcatcaaaaaataaatcagtggagaagaatgcaatccttgaagaatacctacctaaagaggcctgacttaattgatagatccaatcttagtgaagatgagattgagattattgatgctataaaaaatgatccagaataa

SEQ ID NO: 226826 - DNA, 688 bp, Unknown
  Bacterial polypeptide expressing nucleotide sequence isolated from the Sargasso Sea
aatgtttaaagctcaagtatttacactttatccagaagttttccctggtcctttgaacaaaggtttgtacgggaatgctttaaaaaaaaacttatggagcttaaaaattgtaaatatgagagattatgcagaggataagcacaaaactgtagatgacaccccttacggtggaggatcaggaatgataattaaaccagatgttgtagcaaaatcattagactttaatttagaaaaaggtgaaaagatttattacctatcaccaaaaggaaaagtttatgatcaaaaaattgcgaacgaaatatcaaaaaaaaaatatataaatcttttatgtggacattttgaaggaatagatcaaagagttattgaagccagaaaaattgaagaattaagtataggagattttattttgtctggcggagaaacagcagcgctagtggtaattgactctatcttaaggttaattccaggtattataggaaatgaaaaatctataaaagaagaaacctttgaaaatggacttttggagtatccacaatttacaaaacctaaaatatgggaaaaaatgagcgtaccagatgtacttttaacaggggaccatggtaaaattaaacactggcgtttagcccaatcagaggctataacacgagctttgagaccagatttgtggcaaaaatataaaaaaaattaa

SEQ ID NO: 226827 - DNA, 685 bp, Unknown
  Bacterial polypeptide expressing nucleotide sequence isolated from the Sargasso Sea
tatggaagtttatattataacgccattccctgattcgataaatattctaatcgaaaataatatagccaatcaaggggttaaaaaaggtctccttaccattgaaactgttaatcttagagatttcaccaaagataattataaaaagatcgatgatgaaccttatggaggtggaagtggaatggttatgatgtgcgaaccattgtttagcgccattgaatattgtatatcaaaatcacaaaaaaagcctaaaataatttttccttcgccaaaaggaaaagttttaaatcataaaataagtagtaatcttagcaatgagaactctttaatttttatttgtggacattataaaggtatagatgaaagagttattgaaaaatatgtcgatttagaaatatcaattggcgattttatcatatcaaacggtgaattatcaacaatgattatttttgattcaattgcacgattagttccaggtgttttaaacgatttaaattcagcaatgactgattcttttgttgacgatttacttgatgctccttattttacgcggcctaatgaaattgatggattaaaagttccagaagtattattatctggcgatcataaggcaattgaaaaatggcgtaatgataaaaaattagaaattacaaaagacagaagacccgatcttttggagaaaaaataa

SEQ ID NO: 226828 - DNA, 220 bp, Unknown
  Bacterial polypeptide expressing nucleotide sequence isolated from the Sargasso Sea
atgaaaattcttacagaagaagaaagttttgaaaatgggcttttagagtatccccaatacaccaagcctcaaatttgggaagataaaagcgttccagatgttctattatcgggcgatcatgccaaaattaaagactggcgtttgactcaatctgaggctataacacgcgaccgaagaccagatttgtggcaaaagtataaaaaatttaaaaagaattaat

SEQ ID NO: 226829 - DNA, 691 bp, Unknown
  Bacterial polypeptide expressing nucleotide sequence isolated from the Sargasso Sea
aatgtttattgccaaagtatttactctttatccagattattttcctggaccacttaacaaaggtctttacggaaaagctatggaaaaaaaaatttggggtttaaaaactgtagatattagagaatacgcattggataagcacaaaacagttgatgacacaccttatggaggtggatcaggaatgcttcttaaaccagatgttattgcaaaatcaatagatgcaaatactaaaaatggagaaaaaatttattacctttctccaaggggcaaagtatttaatcaaaatattgcaaaagaaatatctaaagaaaataaggtaaatataatttgcggacattttgaaggtatcgatcaaagagttttagataatagaaaaatagaggaaataagtattggtgactttattttatctggaggtgaaactgcttcgtatgtttttttagactccattttgagattgataccaggcgttattggcaacgaagattccaaaaacgaggaaagctttgaaaatggcttactagagtatcctcagtatacaaagccacagatttgggaggaaaaaagcgttccaaatgtacttttatcaggtgatcatgcgaaaattaaagactggcgtttaacgcaatcaaaggctataacacgcgaccgaagaccagatttatggcaaaaatataataaaaagaattaa

SEQ ID NO: 226830 - DNA, 428 bp, Unknown
  Bacterial polypeptide expressing nucleotide sequence isolated from the Sargasso Sea
gatgctagaagtaaaaatttttactttatatccagatttgtttcctggtcctttgaacattggaatatttaaaaaggcaagggaaaacaaaatttggaatttaaaagtaataaatattagagaatattcgaaagataatcacggcacagtagacgatactccttttggaggaggaaatggaatgcttttacgtcctgatatattagcatcagctcttgataaaaatataaaaaaaggagaaaaaattatttacttatctccaagaggaaaaaaatttgatcaaaacgttgctaggtcattaagtaaagagaaaaacttaaaccttatctgtggtcattttgaaggtgttgatcaaaggctcctagagacacgagaaattgaaaaaggtagtttaggtgatttcgttttatctgtggtcattttgaagg

SEQ ID NO: 226831 - DNA, 623 bp, Unknown
  Bacterial polypeptide expressing nucleotide sequence isolated from the Sargasso Sea
aatgtttatcgctaaagtatttactctttatcctgatttttttcctggaccacttgataaaggtctgtatggaaaagctatggaaaaaaaaatatgggatttaaaaactgtcaatattagggaatatgctttggacaagcacaaaacagttgatgatacaccgtatggtggtgggtcaggaatgcttctaaaaccggatgttgtcgcaaaatctttagatgcaaatattaaaaatggggagaaaattttttacctttcccctaggggtaaagtatttaatcaaaatattgcaaaagaaatatcaaaagaaaataaagtaaatctaatttgtggacattttgaaggtattgatcaaagagttttagataatagagaaatagaagaaataagtattggtgacttcgttttatctggaggcgaaacagcctcgtatgtttttttagatgctatattgagattgataccaggtgtaattggtaacgaggaatctaaaaacgaggaaagttttgaaaatggtttattagagtatcctcagtatacaaagcctcaaatttgggaggaaaaaagcgttccaaatgtgcttttatcaggcgatcacgcgaaaattaaagactggcgtttaa

SEQ ID NO: 226832 - DNA, 601 bp, Unknown
  Bacterial polypeptide expressing nucleotide sequence isolated from the Sargasso Sea
atgaaagaaaacattatagattgctttatagatcttggaaagttatttaatgatttaggattaaatactagttatgaagattcaaataagaactgttcgaaagatgaatatcaaaaattcaatgaagtaattaatagtcataaggcatctaacccttggtttacggaaaaatacattaggaaatcaattctttcattggcttcaatgtgtcacaaaaatgagttgaattcatttatatccgattataatattggtcaaaaatcaaccaatcgtattgctattattatggctggaaacataccacttgttggatttcatgactttttatgtgttcttttatctggaaaccatgcaaagatcaaattaagttctgatgataaaattttacttcccttatttttgaattttttatcagataagtatactttttttaaaaataaatatgagtttgtaaattctaaaatgaaagatgtagatgctgtaattgcaacaggaagtgataattcaaatttatattttaaaaagtattttggtcatttaccccatatttttagaaaaaacagaacctctatagctgtaatttcagaaaatggaatctaaa

SEQ ID NO: 226833 - DNA, 283 bp, Unknown
  Bacterial polypeptide expressing nucleotide sequence isolated from the Sargasso Sea
tttgtcaggtggcgagacagctgcatacgtaattttggatagcatattaagacttgtgccgggtgttctaggaaatgaaaattcttacaaagacgaaagttttgaaaatggtttattggagtatcctcagtatacaaaaccacaaatatgggaaaaaacaccagttcctgaggtgcttttatcaggagatcatagcaaaattaaagactggcgtttatctcaatcagaggctataacacgccaccgaagaccagacttgtggcaaaaatataaaaagaattaa

SEQ ID NO: 226834 - DNA, 727 bp, Unknown
  Bacterial polypeptide expressing nucleotide sequence isolated from the Sargasso Sea
attgaagaccatttcaattattactccaatacccaatatgataaattcaatagttgagcaatctattttgcataaagctatcgataatgattcagttaaacttcatgtagtagatttaagagagtttggtttaggaaattataggcaaattgatgatacaccctatggtgggggtggcggtatgattttaatggcagagccattgtttgcagcattagatcaggtaattaataatttgaaagataatgataatacaagaataatatacccttcaccccagggtcaattatggtcacataataaagcaatcgaaaacagaaattttgataatctaatatttatttgtgggcattataaagatattgatcaacgagtcattgataagtatgttactaatgaatattccattggcgattatgttgttacaaatggtgaaattccagcaatgatcatggttgatagtattgtaagattaattcctggtgttttaaataattatgattctgtaaagacagactctttttattctggattagagttagatgctccatattacacaaagccttctgagatagataatttgtcagtcccaaatgttttattaagtggtaatcatgagaaaattaataaatggcgaatgaaagaaagacgtcaaagaacaaaaaataaacgtccagatatatggtctaaaagaattgagaaacttgaatcgttggaggataagtaa

SEQ ID NO: 226835 - DNA, 700 bp, Unknown
  Bacterial polypeptide expressing nucleotide sequence isolated from the Sargasso Sea
atgagagttataatattaacatcatatcctaaaatgtttcccggaagtttgggccactcaataattggtaatgctttagaaaatcaaaaatttacccttgaaacaattaatttacatgattttggaatagattctagaggcagcatagatgatgagccttttggaggtggccctggaatggttatacgtccagatgtaattgaaagagctattaattcaatacaaaaaattgatgataatgtcttaaagatatttttaactccatctggtaaaaaactgacccaaacaaaactagaagaattttcaaaatgtagtgaaatgattatcttatgtggtagatttgagggagtagatcaaagagccatagaaatattgggttttcaagagatcagtataggggattatgttctttctggtggtgagattgctgctcaagtgttacttgaaggttgtattcgtctcattcctggagtattagggcatccgaaaagcttgttggaggaaactttcgtcaatgaacttttggaatatcctcactatacaagaccaaaaatatgggtggataaagaaggaaataaccatgaggtacctgatgtattaacatctggtcatcatgaaaaaatagaaatatggagaaaaaagaaggcaattgaaaaaaccaaaagtattaggcctgatcttttaaaaaagggattataaa

SEQ ID NO: 226836 - DNA, 409 bp, Unknown
  Bacterial polypeptide expressing nucleotide sequence isolated from the Sargasso Sea
atgtggaaagcccgtgtatttaccttgtatcctgaaatttttcctggaccattaagtaagggtctttacggaaaagctttacaaaaaaaaatttgggatttagaagttattgatattcgagactctgctgaagacaaacacaagacagttgatgatacaccatttggaggaggcagcggaatgttattaaaaccaaatgttttaggaaaatctttggatagtaaattaaaaaataatgaaagagttttctatctttccccaaaaggtaaaaagttcgaccaaaaatttgcaaaaaatctcactaaagagaaaacaataaatttaatttgtggtcattttgagggaattgatgctcgtattataagcacaagaaatattgaggaaattagcattggtgattatgttttgt

SEQ ID NO: 226837 - DNA, 642 bp, Unknown
  Bacterial polypeptide expressing nucleotide sequence isolated from the Sargasso Sea
gggagggcgctgagagaaaaaaattttctatggatattataaatctacatgactttgggataagtcagcgtaaaaatattgatgatattccttttggaggtggccccggaatggttatcaggcctgacgtaattgaaaaagctattttatcaattaatattaatcctaaattattgagtcaccgtatttatttaacccctgcaggaaaatcattgaatcaggaaaaattaggaaaaatggcaaaatttgacgaactaattatattatgtggaaggtttgagggggttgataaaagggcaattgatgtgctaaattttgaggagattagtatcggggattatgtcttatcaggaggagagattgccgctcaagtgttagttgaaggttgtattcgtctcattcctggagtattagggcaaccggaaagtttattgcaagaaagcttttcagaaaatttgcttgaatatcctcactttacaagaccaagggtgtggaccgactcaaagcaaaaaaaacatgaagtgcctgaagttctaacttcaggtaaccataaaaaaattgaagaatggagatataaacaatcggttgaaaaaacaaaatctattagaccagatttatatattagagaacaaggaaaataaa

SEQ ID NO: 226838 - DNA, 240 bp, Unknown
  Bacterial polypeptide expressing nucleotide sequence isolated from the Sargasso Sea
ttttaagattactacctgatgtgctaggaaatgaaaaatcaatagaagaagaaagctttgagaatgactttttagagtatcctcaatatacaaaacctcaaatttgggaagaaaaaacagttccagatgtattattatcaggagatcatgcgaaaattaaagactggcgtttatctcaatctgaggctataacacgcgtccgaagaccagatttgtggcaaaaatataaaaagaattaat

SEQ ID NO: 226839 - DNA, 278 bp, Unknown
  Bacterial polypeptide expressing nucleotide sequence isolated from the Sargasso Sea
gatgttatcaaaatataatgtaattacattatttcctaatttatttgatgaatggatgaaaactggaattatttctaacggattagacaaaaatattttacaatttcaaactactaatttacgagattttggtataggtaattataaacaaacagatgatgcgccctacggaggtggaccaggtatggttatgatggttgaacctcttgataatgcaatattaaataacaaagcagatataaatgtatttttaacaccatcaggttcaaaactcgatg

SEQ ID NO: 226840 - DNA, 757 bp, Unknown
  Bacterial polypeptide expressing nucleotide sequence isolated from the Sargasso Sea
atgagatcgaataagagtatgaagtttaatattgtaactattttcccaaatgaactgagtcagtcattaagttatggagtcatcggtaatgcgataagggataatataatcaaaattaattattttgacccaaggatccatgctgataacaagcatgattcaatagatgataagccatatggtggcgggcctggtatggtaatgcaagccaagccagttatagaatcaattgagcaagccagagatggtaatagtgacataccagtattcttcctttctcctcaaggaaagagatttaaccaagagaaggcaaaagagctttctgagcttgatcagatcataattgtttcctctaggtatgaaggcttagatcaaagggcaatagatcagactgataaccatgaggaaatttcaattggtgattttgtgctgtctggtggagaaacagcttgtgcagttgtagtagacgctgttacgagattgattccaggtgttcttggtgatgatgagtcagtaattgaggagtcatttagcaatggattacttgaataccctcattatacaagaccttccgaagtaaatggacaagatgtaccaggaatattattaagcggagaccatgaaaaaataaaagagtggagaaaaatccaatccttaaggaatacctttatcaagagacctgatttaattgatgagtctaaacttaccgatgatgagattaaggttattgatgatataaaaaatgatccagaatagt

SEQ ID NO: 226841 - DNA, 685 bp, Unknown
  Bacterial polypeptide expressing nucleotide sequence isolated from the Sargasso Sea
aatgtttttgtctagagtatttacgttgtatcctgaatattttccaggttatttgagcaaaggtctttttggaaagtcaaaaggaaaagaatgggatttagaaacagtaaacataagagattatgcattagataaacataaaactgttgacgacactccttatggtggcggaaatggaatgattatgaaagcagatgttttagcaaattcattagacgcaaatatcaagactaaagaaaaaaccctttatttaagtccaagaggaaaagtttttaattctaaacttgcaagagagttttcaaatgaaaaaacaatcaatttaatttgtggtcatttcgaaggagtagatgaaagaatactagaaagtagggatattgaagagattagcattggtgactttatattatcagggggtgaagttgctgcatttgttgtaacagattctattctaagatttattccaggaattctaggtaatattaattcctcaagagatgagagttttgagaatggccttcttgaatatccgcaattcacaaaacctcaagtttgggaggaaaaaaaggtcccaaatgtgctgatttcaggtgatcacgccaaaattaaagactggcgtttatcccaatctgaggctataacacgcgaccgaagaccagacttatggcaaaaatataagaaaaattaa

SEQ ID NO: 226842 - DNA, 685 bp, Unknown
  Bacterial polypeptide expressing nucleotide sequence isolated from the Sargasso Sea
aatgtttttgtctagagtatttacgttgtatcctgaatattttcctggttatttgagtaaaggcctttttggaaagtcaaaaggaaaagaatgggatttagaaacagtaaacataagagattatgctttagataaacataaaactgttgacgatactccttatggtggagggaatggaatgattatgaaagcagatgttttggcaaattcattagatgcaaatatcaaggctaaagaaaagaccctttatttaagtccaagaggaaaagtttttaattctaaacttgcaagagagttttcgagtgaaaaaacaatcaatttaatttgtggacacttcgaaggagtagatgagagaatactagaaagtagagatattgaagagattagcattggtgactttatattgtcagggggtgaggttgctgcatttgttgtaacagactctattttaagatttattccaggaattctaggtaatattaattcctcaagagatgagagttttgagaatggccttcttgaatatccacaattcacaaaacctcaagtttgggaggaaaaaatggtcccaaatgtgctaatttcaggtgatcacgccaaaattaaagactggcgtttatcccaatctgaggctataacacgcgaccgaagaccagacttgtggcaaaaatataagaaaaattaa

SEQ ID NO: 226843 - DNA, 472 bp, Unknown
  Bacterial polypeptide expressing nucleotide sequence isolated from the Sargasso Sea
gatgctagaagtaaaaatttttactttatatccagatttgtttcctggtcctttggacattggaatatttaaaaaagcaagggaaaacaaaatttggaatttaaaagtaataaatattagagaatattcgaaagataatcacggcacagtagatgacactccttttggaggaggaagtggaatgcttttacgtcctgatatattagcatcagctcttgataagaatataaaaaaaaaagaaaaaattatttacttatctccaagaggaaaaaaatttgatcaaaacgttgccagatcattaagtaaagagaaaaacttaaaccttatctgtggtcattttgaaggtgttgatcaaaggcttctagagacacgaaacattgaagaatatagtttaggtgatttcgttttatctggaggtgaaccagcttcttttgtactagttgacgctttaattagattattacctggagtg

SEQ ID NO: 226844 - DNA, 136 bp, Unknown
  Bacterial polypeptide expressing nucleotide sequence isolated from the Sargasso Sea
tgggagcagaaatcagtgccagatgtgttattatcaggtgatcacgctaaaattaaagactggcgtttatctcaatctgaggctataacacgcgtccgaagaccagatatgtggcaaaaatataagaagaattaaa

SEQ ID NO: 226845 - DNA, 685 bp, Unknown
  Bacterial polypeptide expressing nucleotide sequence isolated from the Sargasso Sea
atgaaaaatattgacattgtaagcttattccctgaaatcattgatttatatattaagaattctccaataacaaaatctcttgatgataaagatttattaatttctactcatcaactcagaaatttttctttagacaaacataaaagagttgatgataaacaatatggaggcgatccaggcatggttttaatggctgaacctcttatcaaatctatagatcatatctcagaactaagaggttctaaacctttaacaattttaatgtctcctcaaggtaaaaaacttgatccagaattattatatgaaattttagacagagattttatagctgttatttgtggaagatatgagggagtagatgaaagatttatagaagagaaagttgatattgagatttcaataggtgactttattgtatctggaggagaattgccatctttgatattaatagaatcactcttaagattcttaccaggtattataggaaacgaaatgtctttggataatgattcattcggaattaatttccaaaatttattgaaaggtccagtctatactaggccaaaaatcattaatggtagagaggttccagaaatacttttatctggtgaccctaaaaaaatttcaaaatggagagaaaatatttctaaaaaaagaactcaagaaagaagaaaagatttataga

SEQ ID NO: 226846 - DNA, 685 bp, Unknown
  Bacterial polypeptide expressing nucleotide sequence isolated from the Sargasso Sea
atgtttttatctagagtgtttactttgtatccagattattttcctggttatcttaataaaggtctttttggaaagtctaagggaaaagaatggaatttagaaattataaatataagagactacgctttagataaacataaaactgttgatgacactccatatggtggcggaaatggaatgataatgaaagcagatgttttggcaagctcattagatgcaaatgttaaaagtggggaaaaaaccatttatttgagtcctagagggaaagtatttaactcaaaacttgcaagagaattttctaatgaaaattcaataaatttaatttgtggtcacttcgaaggtgtagatgaaaggatactagaaagcagaaatattgaggaaattagtattggtgattttatattgtcaggaggtgaagttgctgcttttgtcgtgattgactctatccttagatttattccaggaattttaggtaatctaaattcatcaagagatgaaagttttgaaaatggtcttctagagtatcctcaatttacaaaaccccaaatttgggaggaaaaaaaggtcccaaatgtactaatttcaggcgatcacgccaaaattaaagactggcgtttatctcaatctgaggctataacacgcgaccgaagaccagatttatggcaaaaatataagaaaaattgat

SEQ ID NO: 226847 - DNA, 688 bp, Unknown
  Bacterial polypeptide expressing nucleotide sequence isolated from the Sargasso Sea
atgtttaaggcgaaaatttttactttgtatcctgaatatttcccaggacctttcgatataggtatttgtaaaaaagcttttgaaaaaaaactttgggatttaaaacttataaacattagggattatgcagacgataaacacaaaaccgttgatgataccccatatggcggtggtgtaggtatgttaatgagaccagatgtagtagcaaaatctttagatgcaaatctcgaagaaaaagaaacagtttactatttaacacctaaagggaaaatttttaatcaaaatattgctcaggatattgttaaaaaaaacaaagtaaatattttatgtgggcacttcgagggagttgatcaacgagtcctagattctagaaacgttgaggagataagtataggagactttatactttcaggaggagagatggcatcttttgttgttttagacacagttttaagattagttcctggagtattaggaaaccttaattccacaaaagatgaaagttttgaaaatggacttttggagtatccacaatataccaaacctcaaatatgggagaaattaagtgttccagacatacttttatctggagatcataataaaattaaaagctggcgtttatcacaatctgaggctataacacggcaccgaaggccagatttatggcaaaaatataagaaggactaaa

SEQ ID NO: 226848 - DNA, 694 bp, Unknown
  Bacterial polypeptide expressing nucleotide sequence isolated from the Sargasso Sea
atgtttatttttcaaatttttacactttaccccgagttttttcctggtccttttaaagatggactttatggaaaagctttggaaaaaaaaatttgggaatttaaaatagtaaatataagagaatacgcaaatgacaaacgcaaaactgttgatgatactccctacggaggaggctctggaatgcttttaaaaccagatgtcattgcaagtgctttagatcaaaatacttctataaatgaaaaaattttttacctttcacctagagggaaggtatttaatcaaaatttagctaaagatttatctaagcaaaaaaaagtaaatgttatctgcgggcattttgaaggaatagatcaaagagttttagatcatagaaaaattgaggaaataagcatcggagattttattttatctggtggagaaacagcttcatatgtttttcttgatgcaatactaagattaattcctggagtaattggtaatgagaattctaaaaatgaagaaagctttgaaaatggtttattagagtatcctcagtatacaaagccacaaatttgggagaaaataagtgtaccaaatgtacttttatcaggagatcacgccaaaattaaagactggcgtttatctcaatctgaggctataactcgcgtccgaagaccagatttatggcaaaaatataataataaaaaaaattaat

SEQ ID NO: 226849 - DNA, 460 bp, Unknown
  Bacterial polypeptide expressing nucleotide sequence isolated from the Sargasso Sea
tctgccaaaggtaaaaaaactcactcaaaaaaaattaactaattataatttaaataaagattttattttactaaatggtagatatgagggcattgaccaaagagtaattgattattatgaatttcaagaaatttctgtgagcgatgtcatattaaacggaggagagatagcatcattattatttattgaggcgttaatgagactccaacccggtgttcttggaaataatgatacccacactattgagtcatttcaaaatggactagttgaacatgatcaattcactagaccaaacccatggataacccctgatcattcagaaatagaagtaccttctatactcgtgagtggtaaacatgctgatatagatctttggaaacaccaaaattcgttggaaaatactgaaaaaaatagaccagatttatttaaaaactatttaaaaaaaaacaaaaatgagtag

SEQ ID NO: 226850 - DNA, 540 bp, Unknown
  Bacterial polypeptide expressing nucleotide sequence isolated from the Sargasso Sea
ttcaagctgaacctattatcaatacagtagaagaaataaaaaaacagagtgatacacatgtagtgctcgtttctcctcatggcatacctttcaaccaagaaaaagctaaagagcttcaatctaagaacaatataaccattgtatgtggaagatacgaaggaatagattatcgatttgaaaactattatgcagatgaagtaatttctgttggagactatgttcttaatgggggtgaattacctgccttagtaattgtggaaagcattgcaaggctagtagaaggttttattggacacaaagattcacttgaagattcttttatgaatgggcttttggaacatcctcagtttacgagacccgaaaaaagtgaatttggtgatgttccagaaattcttttaagtggtgatcataaaaaaatatccagatggaaattaaaggaatctttacgagcaacccttctaagaagaccagatatgcttgaaaaaagaatacttactgaacttgaagaagaactgattattgaaattaaagatgaataat

SEQ ID NO: 226851 - DNA, 288 bp, Unknown
  Bacterial polypeptide expressing nucleotide sequence isolated from the Sargasso Sea
aatgaatttcaatatagtaactatttttcctgagctcgtagataattttgtttcctatgggatcctttcccatgcaattgcaaaaaaaaagatttctattaaaacttggaatccaagagatttttcagaaaataagagcgggcgaattgatgacaagccatatggaggaggtcctggaatggttttacagtcagatcctttaataaaaacaatagataccataaaagaaaaatctgaaacttatgtcatgtgtatggctccccacggaaaacctttaaatcagaataa

SEQ ID NO: 226852 - DNA, 429 bp, Unknown
  Bacterial polypeptide expressing nucleotide sequence isolated from the Sargasso Sea
aatgtttaaggctagaatttttactttgtaccctgaactttttcctggaccatttaatgagggactttttggaaaagcattgaaagaaaaaatatgggaattagaaaaagtaaatataagagattatgctactgataagcataagacagtcgacgatactccatacggaggtggatcaggaatgttgatgagaccggatatcatatcaagagcaattgaagataatattaaaaaatcagaaaaaataatttatttaagtcctagaggaaaattatttaatcatgaaattgcaaaagatctatcaaatcaaaaagtcattaatttgctatgtggacattttgaaggcatcgacgaaagagttttggtaaaaaagaatattgaggaaataagcataggagattttgtattgtcaggaggggaaacagcagc

SEQ ID NO: 226853 - DNA, 718 bp, Unknown
  Bacterial polypeptide expressing nucleotide sequence isolated from the Sargasso Sea
aatgcttgatgtaaaaatattaactgcgtatcctgagatgttccctggaagtttagaacattcattaataggaaaggctctaaaagaaaatattttcaaaatatcaactattgacctccatcaatttggcattgatgaacgaatgagcatagacgatgagccttttggagggggcccaggaatggttctaagacccgatgtagttgaaaaagctctaaattctattcctaaaacacataatatcaaatcaacaaaaatatatcttaccccctcaggggcaccattaaatcaagaaaaattaggaaatttagcaaaaatggagaaaataactattctctgtggccgttttgaaggtgtagatcaaagagctattgatgttttaggttttgaagagattagtatcggggattatgttctcgctggtggagagattgcggcacaagtgttacttgaaggttgtattcgtctcattcctggagtattaggacatccgaaaagtttattagaagagagtttttctaataatcttctagagtatcctcattataccagaccaaagtcctgggaggactctctggggaaaaaacatgatgtaccagaagtattaacatcagggcatcatggaaatattaaaacatggagacataacaagtcagttgaaaaaacaaaaaatattcgaccagatttgtttaataaaaaagaaaaaaaacaggattaa

SEQ ID NO: 226854 - DNA, 429 bp, Unknown
  Bacterial polypeptide expressing nucleotide sequence isolated from the Sargasso Sea
aatgtttttgtctagagtatttacgttgtatcctgaatattttcctggttatttgagtaaaggcctttttggaaagtcaaaaggaaaagaatgggatttagaaacagtaaacattagagattatgctttagataaacataaaactgttgatgacactccttatggtggagggaatggaatgattatgaaagcagatgttttggcaaattcattagatgcaaatatcaaggctaaagaaaaaaccctttatttaagtccaagaggaaaagtttttaattcaaaacttgcaagagagttttcgagtgaaaaaacaatcaatttaatttgtggacacttcgaaggagtagatgagagaatactagaaagtagagaaattgaagagataagcattggcgactttatattgtcaggtggtgaagttgcagcctt

SEQ ID NO: 226855 - DNA, 667 bp, Unknown
  Bacterial polypeptide expressing nucleotide sequence isolated from the Sargasso Sea
aatgaaaatcattgatataataagtgcaacacctgaacttttaaaaagtccattttcaggttcaataatgagcagagctatagaaaagggaattgttcaagttaatattcacgacttaaaagatttttcgaataataataaaaaacaaattgatgattaccaatatggtggtggatctggcatggtcttgatgattgaaccaatagataactgtatctctcatcttaagaagtttaatgattattctgaagttatttttatgacaccagatgcaaaaaaattaactcaaaaaatttcaaataaattatctatctctggaaatctaattatcctatgtggtcattataaaggtattgatcaaagagtaagagacaacttggtaactatggaactttcaattggagattatgttctttcaggtggtgagcttccggctgctgttttatgtgactcaatcataagattgattccaggtgttttaaatgatgaaacttccgcacttgaagattcttttcaagacgggttgattgcaccaccggtttacaccagaccatctaaatacaaaaatttaaaagttccagagatacttctttctggtgacccaaaaaaagtaaaagagtggagagaaaaaaaatctgatgaaaaaacaaaggtaattaagccttaa

SEQ ID NO: 226856 - DNA, 688 bp, Unknown
  Bacterial polypeptide expressing nucleotide sequence isolated from the Sargasso Sea
atgtttcaagcgaaaatttttactttgtatcctgaatattttccaggacctttcgaaataggtatttgcaaaaaagcttttgaaaaaaagctttgggatttaaaacttataaatattagagattacgcagatgataaacataaaactgttgatgatactccatatggcggtggtgtaggtatgttaatgagaccagatgtagtagcaaaatctttggacgcaaatttggatgaaaaagaaacagtttattatctaacaccaaaaggtaaaatttttaatcaagatattgcaaaggatattgttaaaaaaaacaaagttaatattttatgtgggcacttcgagggagttgatcaacgagttctagactcaagaaatgtagaggagataagtataggtgactttatcctttctggaggagagatggcttcttttgttgttttagacacagttttaagattagtgcctggagtgttaggaaatctaaattctacaaaagatgaaagttttgaaaatgggcttttggagtatccacaatataccaaacctcaaatatgggagaaattaagtgttcctgacatacttttatccggagatcataacaaaattaaaagctggcgtttgtcacaatctgaggctataacacggcaccgaagacctgatttatggcaaaaatataaaaaggattaaa

SEQ ID NO: 226857 - DNA, 466 bp, Unknown
  Bacterial polypeptide expressing nucleotide sequence isolated from the Sargasso Sea
atgtggaaagctcgaatatttacactttatccagaaatgtttccaggacctttaggtaggagtttatacgctaaagctttaaaaaaaaagttatgggatttagaagtgataaatatacgagactctgctttggataaacataaaacagttgatgacaacccttttggcggaggaagtggaatgttattaaaaccagatgttttgagcaaatcattagatagcaatattatcaaaggtgaaaaagtattttatctttcgcctagaggaaaaatatttgaccaaaaaattgcgaaaaagttttctaacgaaaaaattattaatttagtatgtggacatttcgaaggagttgatgagcgtattttaaaaactagaaatatagaagaaataagcattggagactatatattgtctggaggagaaactgcagcttttgttattttagatagtgttataagactttgcccag

SEQ ID NO: 226858 - DNA, 638 bp, Unknown
  Bacterial polypeptide expressing nucleotide sequence isolated from the Sargasso Sea
aggggctatatggaaaacgttggctaaaaaaatatggagtttggaggttataaatattcgtgactctgccaaagacaaacacaaaactgtagacgacacgccatttggtggcggaagtggaatggttcttaaaccagatattttaggaaaatctattgataaaaatacaaaaaaaagtgagaggattttttatctttctccaaaaggtaaaagctttaatcagtcaatagccaaagaattatctaaagaaaaaatcattaatttgttatgtggccatttcgaaggagtagatgatcgtattttatctactagaaatattgaagaaattagtattggagattatattttgtctggaggtgaaaccgcatcattcgttataatagatgcagttctaagattattgccaggtatattaggtaacgatctatctaaagaagaagaaagtttcgagaacggcttacttgagtacccccaatatacaaaacctcaaatatgggaaaaaaaaactgttccagaagtattattatcaggtgatcatgccaaaattaaggactggcgtttatctcaatcaaaggatataacacgacgccgaagaccagatttgtggaaaaaatatttaaaaaaagataaaaaatgaa

SEQ ID NO: 226859 - DNA, 370 bp, Unknown
  Bacterial polypeptide expressing nucleotide sequence isolated from the Sargasso Sea
tgtggacactttgaaggagttgatgaaagattattaaaaacaagaaatattgaggaagtaagtataggagactttgttttatctggaggtgaaggagcttcatttgtaattcttgatgcaattttaagatttattcctggtattcttggcaatacaaattcagctaaagaagaaagttttgaaaacggacttttagagtatcctcaatttacaaaacctcaaatatgggaggaaaaaagtgttccagatgtgctattatcaggcgatcacgccaaaattaaagactggcgtttatctcaatctgaggctataacacgcgaccgaagaccagatttgtggcaattatataaaaaggcaaaagagaattaaa

SEQ ID NO: 226860 - DNA, 469 bp, Unknown
  Bacterial polypeptide expressing nucleotide sequence isolated from the Sargasso Sea
aaaaatataaatgcaaatgaaaaaattttttatttgtcgccaagaggaaaaatatttgatcaaaaaattgcaaaacaaatttctaaagaaaatggtattaacttaatttgtggacattttgaaggagttgacgaaagaattttaaatactagaaatatagaagaaattagtattggagactatgttctttctggaggcgaaactgcagcctttgttataatagatagtatattaagactattacctggagttattggaaatgatatgtcaaaaaatgaagaaagttttgaaaatggtttattagaatatccacaatttacaaaacctcagatctgggaagaaaaaacagttccagaagtactattatccggagatcatggcaaaattaaagactggcgtttatctcaatcagaggctataacacgcgaccgaagaccagatttatggcaaaaatataaaaagaactaac

SEQ ID NO: 226861 - DNA, 367 bp, Unknown
  Bacterial polypeptide expressing nucleotide sequence isolated from the Sargasso Sea
ttgaagaaacttgttattgatgaagtaatttctataggagattacgtattaaatggaggtgagcttgcagctctagttctaatggaggccatagcaagacaacataaggatttcattggaaatgaggaatctttaaatgattctttcagtgatggacttttagaacatcctcagtatacaagacctaaaaaaacaccttacggtaatgtgcccgaaatattactcagcggaaatcatgaaaaaattaatagatggaaactcaaagagtcactaagaataactctcaaaaatagacccgatcttataaaaagcaaagatctgtctaacttggagattgaactattaaatgaaattaatgatgaataat

SEQ ID NO: 226862 - DNA, 235 bp, Unknown
  Bacterial polypeptide expressing nucleotide sequence isolated from the Sargasso Sea
aagattgctgccaggtgtattaggaaatgaaaactctaaattagatgaaacctttgaaaatggtcttctagagcaccctcagtatacaaaacctcaaatttgggagaaaaaagctgtgccagacgtactattatcaggtgatcataataaaattaaacactggcgtttatctcaatctgaggctataacacgcgtccgaagaccagatttatgggaaaaatataagaagaattaa

SEQ ID NO: 226863 - DNA, 460 bp, Unknown
  Bacterial polypeptide expressing nucleotide sequence isolated from the Sargasso Sea
taaaaaaggagataaaattttttatctttctccaaaaggtaaaaaatttgatcagaaactagcacaagatatatcaaaaaaaaaatctatatctttaatatgtggccatttcgaaggagtggatgaaagagttttgactacaagaaatatcgaagaaataagtataggagattatgttttatctggaggtgagaccgctgcattagtagtgttagatagcatactaagacttttacctggagttttgggaaataataaatcttccattgaagaaacgtttgaaaatggtctattagagtatcctcaatacacaaaacctcaaatatgggagaaaaaaacagtgcctgaagtattattatctggcgatcatagtaaaattaaagactggcgtttatctcaatctgaggctataacacgcgaccgaagaccagatttatggcaaaaatataagaaagactaa

SEQ ID NO: 226864 - DNA, 730 bp, Unknown
  Bacterial polypeptide expressing nucleotide sequence isolated from the Sargasso Sea
ttgaaaaaagtatccattattacacctactcctgagatcataacttcagttatgcaaaattcaattgttgcaaaagctaaaaatagtaacatagttgattttaaaatcatcaatctgagagactacagtgataaaaagtataaaaaggtcgatgataatccctatggtggtggagcaggcatggtcatgatggctgaaccgttatttaaggccattgatgatgttttaaaaaaaataaattctgataagaattttaaaattatttatcctagccctcaaggcaaaacctgggatcataacaaagcattgagtttttcaagttctaatgaaaatttgatttttatctgtggtcattataaaggcattgatgagagagttgttgaaaaatatgtaactgatgaatactctttgggagattatgttataagtaatggagaactttcttcattagtaattattgattccattgttaggttgatgcctggagttttaaatcaaataagttctgctcaaactgacagtttttataacaatctcttagatgctccttattataccaatccaagagagctagatggcatgaaggttccagatgtacttctttcaggtgatcacaaaaaaataacaagttggaaaaataaaaatagaaaattgaggaccatgacaaatcgtccagatctttggaatagatacattaatgaaaataaatcggagattagaaatgaataac

SEQ ID NO: 226865 - DNA, 703 bp, Unknown
  Bacterial polypeptide expressing nucleotide sequence isolated from the Sargasso Sea
tatgcattttaatttaataacaatttttcctgaattagttgagaattatgtatctcacggaatcattgccaaagcgattgaagcaaagaaactttcgataatggcttggaacccaagagaattcagtgcagataaaaataagaggatagatgagaagccttatggaggagggcctggaatggttttacagcccgagcctttaattgaaacaataaatcatataaaaaagaaaaataagacgtatgtagtgtcaatggccccccatggtagagttttgaatcaaaaaaaattatcagaattaagtaaaaaaaagaacttaacaattatttctggtcgatacgaaggaattgataacagagttgaagaaacttctgtagatgaagtttgctctttaggtgactacgtacttaatggaggagaattaccttccttaattctattagaaggtattgcaagattgatagaaggagtcttaggagatgataactcactatcagaagaatcttttaatcatggtttattagaatttcctcagtatacccgtcctgagaatagtaaatatggtaatgtcccagaagtattgcttagtgggaatcacgcggaaattaaaagatggagacttaaagagtccttaaggaggactttatcttttagacctgacttaattgaattaagaaatctaactgtcgaagaaaaggaactt

SEQ ID NO: 226866 - DNA, 688 bp, Unknown
  Bacterial polypeptide expressing nucleotide sequence isolated from the Sargasso Sea
tatgtggcaagctcaagtgtttacactttatccagaggtttttcctggtccattatctaaaggactttatggaaaagctttatcaaataatttatggaaacttaaagttgtaaatataagagatgcagctgatgacaaacataaaacagtagatgatacaccttatggaggtggttccgggatgttgttaaaagcagatgttcttgcaaaatctctagatgaaaacaaaaataaaagtgaaagaattttgtacttatcaccaaaaggaaaaaaatttgatcaaaatttagcaaaagagctagctaatgaaaaatctctgtctttaatttgtggtcattttgaaggtgtagatgaaagaatactttcaacaagaaatattgaggaaattagtattggagattatgttttgtcaggcggggagtcagcagcatatgtagttatagatagtattttaagactgttgccaggtgttttaggaaatgaaaactctaaattagatgaaacctttgaaaatggtcttctagagtaccctcagtatacaaaacctcaaatttgggaggaaaaagctgtgccagacgtgttattatcaggtgatcataataaaattaaacactggcgtttatctcaatctgaggctataacacgcgtccgaagacctgatttatgggaaaaatataagaagaattaa

SEQ ID NO: 226867 - DNA, 574 bp, Unknown
  Bacterial polypeptide expressing nucleotide sequence isolated from the Sargasso Sea
attatacaattttcaaataacaaaaatggtaaagtagatgaagttccatttggtggtgggccaggaatggttattaatccagaagttttagataaagcccttaaatctgttgctaaagctgttggtcgtagaatctaccttacaccaagaggaaaaaaatttgatcaagaattcgcaaagatattatcacaagaaaaaggtgctgtttttatatgtgggagatacgaaggcgttgatgaaaggtttctaattcataatgaaatagaagaagtaagtgttggagatttcgttttatctggtggagaaattggtgctcaattaatcatggacgcgactataagacttattcctgaggtaattggaaatgctgcagggttggtggatgaaagttttgaaagacatttgttagaatatccattatatactcatccaagagtatggaaagatattgaagtgccagaggtactattatctggaaatcataaaaaaatccaaatgtggaaattaaagaagtctgaaaagcttaccaaatttaggagaccagatttatggtcaaaatatattaaatcttaac

SEQ ID NO: 226868 - DNA, 727 bp, Unknown
  Bacterial polypeptide expressing nucleotide sequence isolated from the Sargasso Sea
gatgaactttaatttagtaacaatttttcctgagattacaaaattattagactttggagttattggaaaggctattgaaaaagatttaatttctataaatggtttgaatccaagagatttctcaaaaaatatcaataaaaatgtggatgatgccccttatggtggaggcgagggaatggttatgatggcagagcccctagcattggcaataaaatcaataaaaaataagggaaaggttcttttgatgagccctcagggagagcatttatccaatgctcatattgataatctactcgacgaaaaatcaattactatcatttgtggtagatatgagggcattgatgaaagatttattgaaaattatgttgatcaagagttttctattggcgactttgttcttagtggtggagaaataccagcattagccttaatagatgcattatccagaaaaattccaggcgttcttggtaatcaggaatcttttaaaaacgattcatttgaaaataatcttttaaaaggacctgtatataccagacctcagatatttgaagaaaaagatgtgccagaaattttattgtcaggggatcatgagaaaattaatgattggaaaattttatcttcattacaacgaaccatcgaaagaagacccgatctcttagatggtgtaaaattaacaaaaaaacaaaaaaaactcttggataatttgttatctaagcgtatcctatag

SEQ ID NO: 226869 - DNA, 461 bp, Unknown
  Bacterial polypeptide expressing nucleotide sequence isolated from the Sargasso Sea
taataaaggagataggattttgtatctttcaccgaaaggtaaagtttttaatcaaaaacttgcgcaagatctatcattagaaaaatccttttccttaatttgtggtcatttcgaaggtgttgatgagagagtattatctacaagaaatattgaagagattagtgtaggagactatgtattgtcaggcggagaaactgctgcgttggtagtgcttgatagtgtattgagacttttacctggagtcttggggaatgataaatcagcttcagaagaaacttttgaaaatggccttttggagtatccacaatataccaaaccccagatttgggaggaaaaatcagttccagatgtgttattatctggtgatcacgctaaaattaaagactggcgtttatctcaatctgaggctataacacgcgaccgaagaccagatttgtggcataaatataaaaagaattaat

SEQ ID NO: 226870 - DNA, 217 bp, Unknown
  Bacterial polypeptide expressing nucleotide sequence isolated from the Sargasso Sea
caccagacctgcggtgttagcagacaaagaggttccaccggtgttgctgagtggacaccatgaaaatatacgacgctggcgtctgaaacaggctcttggtagaacctggttgagacggccggatatgttaaatgccctggctctgactaaggagcaacgcaaattactggatgaattccaattggaacaccaggcgttgcagcaacacgatagttaa

SEQ ID NO: 226871 - DNA, 643 bp, Unknown
  Bacterial polypeptide expressing nucleotide sequence isolated from the Sargasso Sea
aatgacttggaaagcaaatattttaactttatatccagagatatatcctggttatttgagctatagtttacttggtaaagctcttgaaaaaaaaatttgggaaatgaatatatataatttgcgcgattttggagaaggaaagcacaaaactgtagatgataaaccttttggtggcggtgccggaatgataataaagccagatattctaggtaatgctattgaagaaacacttattaaaaaccatgctcaacaatcattagtttatttatcgcctaagggaaggccctttaagcaaattgatgctaaaaatttttcccaaagttctggggtatctatattgtgtggacattttgagggaattgaccaaagggtccttgatatttatgaaatagaagaaatatcaatgggagattatattttaagcggtggtgaagtcgcttcctttacttttttggattcaatattaagattactaccaggtgttcttggaaatgaagcatctattgaagatgagtccttttccgacgatttacttgaatatcctcaatacaccaaaccacaagaatataaaaatattaaggttccagatgtattgctatatggcaatcatgaagaaatagaaaaatggcgtaaagaaaaatct

SEQ ID NO: 226872 - DNA, 688 bp, Unknown
  Bacterial polypeptide expressing nucleotide sequence isolated from the Sargasso Sea
atgttgcaagctcaagtatttacactttatccagatatttttcctgggcctttaggaaaaggtctttacggaaaagcaatgtctaaaaaattgtggagtttgaatgtgataaatataagagatgcagctacagacaaacataaaacagttgatgatactccttacggcggtggaacaggtatgttattaaaacctgatgttttagcaaattctattgatcaaaacataaataaaggagataggatcttgtatctttcaccgaaaggtaaagtatttaatcaaaaactcgcacaagatctatcattagaaaaatccttctcattaatttgtggtcatttcgaaggtgttgatgagagagtattatctacaagaaatattgaagagattagtgtaggagactatgtattgtcaggcggagaaactgctgcgctggtagtgcttgatagtgtattgagacttttacctggagtcttagggaatgataaatcagcttctgaagaaacttttgaaaatggtcttttggagtatccacaatatacgaaaccccagatttgggaggaaaaatcagttccagatgtgttattatctggtgatcacgctaaaattaaagactggcgtttatctcaatctgaggctataacacgcgaccgaagaccagatttgtggcataaatataagaagaattaat

SEQ ID NO: 226873 - DNA, 619 bp, Unknown
  Bacterial polypeptide expressing nucleotide sequence isolated from the Sargasso Sea
atgtttttatctcgtatatttactttatatccagaatatttccccggctatcttaacaaaggcttgtttggaaaagctatgaatgaaaaaatttggaatttagaaacagtaaatatcagagactatacttttgataagcataaaacagtagatgatacaccttatggaggtgggagtggcatgataattaaagctgatgttttggccaaatctctagacgaaaatataaaagaaaaagaaaaaataatttatttaagtccaaaaggtaaattatttgatcacaaatatgctaaagaactttcaactgaaaaaactttaaatcttatatgtggccactttgagggtattgatgaaagaataattcagaatagaaatatagaagaagttagcattggtgattttgttttatctggtggtgaagtagcaacttttgtagttttagatgcaattttaagatttattccaggtgttttaggaaatgaaaattctacacaagatgaaagttttgagaacgggcttttagaatacccacaatacaccaagcctcaaaattgggaggataaaagtgtaccagatgttctattatcgggagatcatgccaaaattaaagactggcgtt

SEQ ID NO: 226874 - DNA, 181 bp, Unknown
  Bacterial polypeptide expressing nucleotide sequence isolated from the Sargasso Sea
gatcagcgtgttcccgacgtattgctaagtggcaatcacgcacacatccggcgttggcgtttacagcagtcccttggtcggacctatgaacgacgcgccgatcttctggaaagccgctcgctttctggagaagagaagaagctgctcgaggaatacatcctcgcgcgggacgatagttaac

SEQ ID NO: 226875 - DNA, 694 bp, Unknown
  Bacterial polypeptide expressing nucleotide sequence isolated from the Sargasso Sea
atgtataaaaatcaactaagtgttaaggttataacactttacccagagctttttcctggcccattgtcagcttcagtgacaggtagagcattggacaaaaatatttggtccttggaaaccgttgatttgaaacagtttggaaaaggtaaacacaaaaaagtggatgataaacccatatcaggtggacctggaatgattttaatgccagatgttatggatgaagccataataaatgcaaatagttcagtcagcagtgaaaataaactaataatttgcatgagcccaaagggtattcctttaagtcagaatgttgtaaagaatatgctgcaatataatgagataataattgtttgtggaagatttgaaggcattgatcaaagagttgttgataaacataatatgaaagaaatatctattggggattttattttaacaggaggtgagctcggggctatggttctattagatactgtagtaagattgcttcccggcaccttgggcaatcccgaatctcttgtttcagaaagtttcacagatgatttacttgaggcaccacagtttacgaaaccaatagattggaacgggatgaaagtacctgaaattcttcaaactggtgatcaccaaaagatattgaaatggaaaaataagacatcccaacaaattacaaaaaaaaatagacctgatttgttcatta

SEQ ID NO: 226876 - DNA, 742 bp, Unknown
  Bacterial polypeptide expressing nucleotide sequence isolated from the Sargasso Sea
atgaaactatataatttactgactgtttatccagaattttttgaatccttcaaaagccatgggcttatcaagaaaggattagatagagggcttatcagtataaatgtaattaatctaagaaattacacgaatgataaacataagagagtcgattttaaaccttttggtggaggtcctggcatgataatccaatacactccggtaaaagaagctctcaaaaagataaagtcttcaaaaacgattcttttatctcctcaaggtaagcttttaaaacaatcaaaacttaatgaactatcagctgaaaatagtattactttcatatgcggcagatatgaaggctttgacgagagaatattagataatcttgtagatgaggagatctcaattggagattacgttttatctggtggtgaaattcccgctgctgtaataatcgagggactcacacgactaatacccggaattccggaaaatatggaatccataaataatgactcgttttgtgatcacttactcgatcatccacactatactaagccaagcgagatagatggtttcagtgttccagacatattactatcaggaaaccatagtgaaataaaactttggagaagaaagcagtcacttggaattacctatctcaaaagacccgatttgctaaaaaacgtgaatcttacagaagaagatgatagactactccaagaatttatagctgaatatcaggaaaagaaaagtgactaaa

SEQ ID NO: 226877 - DNA, 436 bp, Unknown
  Bacterial polypeptide expressing nucleotide sequence isolated from the Sargasso Sea
aaaggtataaattttaatcaaaagaaagccaaagaaatttctaaggaaaaagttataaatttaatatgtggacattttgaaggagtagacgaacgtatattaaatactagaaatattgagcagcttagtattggtgattatgttttatcaggaggtgagtcagcttcatttgtggtaatcgacacagttttaagattattacctggtgtgcttggaaataataattcaaaagatgatgaaagcttcgagcatgatttattggaatacccccaatatacaaaaccacaaatatgggaaaaaaaaagcgttccagaagtgcttttatctggtaatcattctaaaattaaggactggcgtttatcacaatcaaaggatataacacgacgccaaagaccagatatgtggaaaaaatttttagaaaaagaaaaaaaatgaa

SEQ ID NO: 226878 - DNA, 615 bp, Unknown
  Bacterial polypeptide expressing nucleotide sequence isolated from the Sargasso Sea
ggggaccagggatgctgatgaaggctaatcccttagtagattcaatagacttttgtaaggccaaagctgaaaaaaaaacaaaggtgatttatgtcagtcctcaaggtaagttatttgatcaatctctttcgaaagaacttgcgaatgaaaaagatttaatttttttatgtgggaggtatgagggcattgataacagagttttagattccagagtagatttagaaatcagcctaggtaattttattctatctggcggcgaacttgctgcattggctattcatgattccatttgtaggcattatgaaggatttcttggtgatcaggagtcgcttgtagaagaaacttttgtgaataatcttttagagtatccccaatataccaaaccgcgacaatcagaacatggtaatgttccagaagttttgttgagtggagatcacaaaaaaatttcaaattggagaaagaaacaagccttaggaaaaactttcctgaatagacgagatttacttgaaagatcaaaattgaaatcagaggatattgaaatactagaagaatttcttagtgaacttggctatgattctgatagaatcatcgacttactcaatgaaataagatgac

SEQ ID NO: 226879 - DNA, 556 bp, Unknown
  Bacterial polypeptide expressing nucleotide sequence isolated from the Sargasso Sea
gataaacacaaaacagttgatgatactccttatggtggagggacaggaatgttgattaaagcagatgttttagcaaactctcttgataaaaatgttaaaaaaggtgagagaattttttatcttacacctaaaggtaaaaaatttgatcaaaagtttgcacaagatttatcaaaagaaaaatctatatctttaatatgtggtcattttgaaggagtagatgaaagagttttgagaacaaggaatattgaagaaataagtataggcgattatgttttgtctggtggtgagactgctgctttagtggtgctcgatagtatattaagactattacctggaattttaggaaatgataaatcctctattaatgaaacctttgaaaatggtcttttagagtatcctcaatatacaaaacctcaaatatgggagaaaaaatcagttccggatgtattattatcaggtgatcatagtaaaattaaagactggcgtttatctcaatcagaggctataacacgcgaccgaagaccagatttgtggcaaaaatataagaaaaattaaa

SEQ ID NO: 226880 - DNA, 497 bp, Unknown
  Bacterial polypeptide expressing nucleotide sequence isolated from the Sargasso Sea
tatgtggcaagctcaagtgtttacactttatccagaggtttttcctggtcctttatctaaaggactttatggaaaagctttatcaaataatttatggaaacttaaagttgtaaatataagagatgcagctggtgataaacataaaacagtagatgacacaccttatgggggtggttcaggaatgttgttaaaagcagatgttcttgcaaagtctttagatgaaaacaaaaatgagagtgagagaattttatacttatcaccaaaaggaaaaaaatttgatcaaaatttagcaaaagagctagctaatgaaaaatctctgtctttaatttgtggtcattttgaaggtgtggacgaaagaatactttcaaccagaaatattgaggaaattagtattggagattatgttttgtcaggcggtgagtcagcagcatatgtagttattgatagtattttaagactgttgccaggtgttttaggaaatgaaaactctaaattag

SEQ ID NO: 226881 - DNA, 548 bp, Unknown
  Bacterial polypeptide expressing nucleotide sequence isolated from the Sargasso Sea
tatgtggcaagctcaagtgtttacactttatccagaagtttttcctggtcctttgtctaaaggattatatggaaaagctatgtctaagaatttgtgggatctaaaagttgttaatataagagatgcggctgaagataaacacaaaactgtagatgatactccttatggaggaggatcaggaatgttgttaaaggcagatgtgctagctaaatcaatagatcaaaacaaaaatgagggagaaacaattttatatttatctccaaggggaaagaaatttgatcaaagttatgcaaaaaaattagcaagagaaaaatccttatcacttatttgtggtcattttgaaggagttgacgagagagtattgtctacaagaaatatagaggaagttagtattggggactatattttatctggaggggaaactgcagcatatgttgttattgatagtgtccttaggcttttaccaggagttttaggaaacgataactcaaagatggaagaaacatttgaaaatggtctattagagtatccgcaatatacaaaacctc

SEQ ID NO: 226882 - DNA, 688 bp, Unknown
  Bacterial polypeptide expressing nucleotide sequence isolated from the Sargasso Sea
atgtggcaagctcaagtgtttacactttatccagagattttccctggtcctttatctaaaggactttatggaaaagctttatcaaataatttatggaaacttaaagttgtaaacataagagatgcagctgacgacaaacataaaacagtagacgatacaccttatggaggtggttcagggatgttgttaaaagcagatgttctcgcaaagtctttagatgaaaacaaaaatgagagtgagagaattttatacttatcgccaaaaggaaaaaaatttgatcaaaatttagcaaaagagctagctaatgaaaaatctctgtctttaatttgtggtcattttgaaggtgtggacgaaagaatactttcaacaagaaatattgaggaaattagtattggagattatgttttgtcaggcggggagtcagcagcatatgtagtaatagatagtattttaagattgctgccaggtgtattaggaaatgaaaactctaaattagatgaaacctttgaaaatggtcttctagagtatcctcagtatacaaaacctcaaatttgggaggaaaaagctgtgccagacgtactattatcaggtgatcataataaaattaaacactggcgtttatctcaatctgaggctataacacgcgaccgaagaccagatttatgggaaaaatataagaagaattaac

SEQ ID NO: 226883 - DNA, 628 bp, Unknown
  Bacterial polypeptide expressing nucleotide sequence isolated from the Sargasso Sea
tttaggtgtgtcacttttaggtaaggcattagagaaaaaaatttggcaaattagcacaattaacattagagattttgcatttaataaacaaaaaagtgttgatgacactccgtatggtgggggagcgggaatggtaatgagacccgatgtaataagtctcgcactggaatcactttcaaatataaatctacccagaatttgtctaagtgccaaaggctcaaaattaactcaatcaagagccatacagctgtctaaagaaagaggtttaatcctgctttgtggaaggtatgaaggaattgatcaacgtgtcatagatcataataagtttgaagaaataagtattggagactatgttttgccaggaggagaaagcgccgctattgttttgttagaaagtgtggtaagattattacctaatgtattaggaggagaaaacactttaaacgaagaaagttttaataatgaaatgttgctcgaatatccgcactacacaaaacctaaggaatggaaaggaatgcttgttccagaaattttagtatctggcgaccataaaaaaattcaaaattggagaaatgaaaaaaggctggaaataacaaaaaagaaaagaccagaccttttaaacagataa

SEQ ID NO: 226884 - DNA, 522 bp, Unknown
  Bacterial polypeptide expressing nucleotide sequence isolated from the Sargasso Sea
tcgtgagtttgcgcgcgataagcaccgaactgttgacgatgccccgcttggtggtggtgttggcatggtgttaaaaccggatgtggtggcggccgctgtgtctgccgccgcatcatgtcccggtccgcggatttatctgtcaccccgcgggcgactattggatcaggcgctggtacgtgaactggcggtggcatccggcgcggtgtttttgtgtggtagatatgagggtgttgatcaacgggtgatcgacgctaccgatatgatggaagtcagtatcggtgactatgtcctgtcaggcggcgaactcgcggctttgacggtgatggatgccgtaatcaggctgttgcccggggtgatcggtaaagaggctggtcatttggaagaaagttttgagactgggttgctggagcattcacactacacacaaccccggctctggaatggcatcgacgcgccagctgtattggcatcgggccaccaccgcaaaatcgccgaatggcgccaagcggaggcagaaaagga

SEQ ID NO: 226885 - DNA, 604 bp, Unknown
  Bacterial polypeptide expressing nucleotide sequence isolated from the Sargasso Sea
atgtggaatgcaaatataatgactttatttccagaagcttatcctggattattaggaatgtctttagttggcaaagccttagttaataaaatttggtcattaaatgtcattaatttaagagatttttctaataaaaaaggcaaaatcgatgacataccctttgggggaggttcgggtatgattataaagcctgaaattattgatgcagccattacatcaatccaacatgataattttccaaaatattatttatcaccaagaggagtgaaatttaaccaagatattgcctttgaaatgtctaaaaaaaaaggagcaatatttatttgtgggagatatgagggcgttgatgaaagagtgattaagcatcacaacttaaaagaaataagcattggagattatgttctttccggaggagatttagcatgtatggttgttttagacactgtgattaggttaataccaaaagtagtaggaaatgataaaagtttacaagaagaaagttttaataatgacttattagaatatcctttatatactcaaccaagaaagtggaagaatttacaagtacctaatgttttggtctctggagaccataaaaaaataa

SEQ ID NO: 226886 - DNA, 688 bp, Unknown
  Bacterial polypeptide expressing nucleotide sequence isolated from the Sargasso Sea
tatgtggcaagctcaagtgtttacactttatccagagattttccctggtcctttatctaaaggactttatggaaaagctttgtcaaataatttatggaaacttaaagttgtaaacataagagatgcagctgacgacaaacataaaacagtagatgatacaccttatgggggtggttcagggatgttgttaaaagcagatgttctcgcaaagtctttagatgaaaacaaaaatgagagtgagagaattttatacttatcgccaaaaggaaaaaaatttgatcaaaatttagcaaaagagctagctaatgaaaaatctctgtctttaatttgtggtcattttgaaggtgtggacgaaagaatactttcaacaagaaatattgaggaaatcagtattggagattatgttttgtcaggcggggagtcagcagcatatgtagtaatagatagtattttaagattgctgccaggtgtattaggaaatgaaaactctaaattagatgaaacctttgaaaatggtcttctagagtaccctcagtatacaaaacctcaaatttgggaggaaaaagctgtgccagacgtactattatcaggtgatcataataaaattaaacactggcgtttatctcaatctgaggctataacacgcgaccgaagaccagatttatgggaaaaatataagaagaattaa

SEQ ID NO: 226887 - DNA, 688 bp, Unknown
  Bacterial polypeptide expressing nucleotide sequence isolated from the Sargasso Sea
atgttgcaagctcaagtattcaccctttatcctgaaatttttccagggcctttaggcaaaggtctttatggtaaagcaatggcaaaaaaattgtggagcttaaatgtgattaatattagagatgcagccacagataaacataagacagttgatgatactccatatggaggtggaactggtatgttgcttaagcctgatattttggcaaaatctattgatcaaaatattaataaaggggaaaaaattttttatctttcaccaaaaggtaaaatttttgatcaaaaacttgctcaagatttatccaaagaaaaatcattatctctaatttgcggacattttgaaggagttgatgaaagagtattatctactagaaatattgaggaaattagcataggagattacgtgttgtcaggtggtgaaacagctgctcttgttattttggatagtatacttagactcttacctggtgtcttaggtaatgataaatcagtttctgaggaaacttttgaaaatggtcttttagagtatccacaatatacaaaaccacagatttgggaggaaaaatcagtgccagatgtgttattatctggagatcacgctaaaattaaagactggcgtttatctcaatctgaggctataacacgcgtccgaagaccagatttgtggcaaaaatataagaaaaactaaa

SEQ ID NO: 226888 - DNA, 283 bp, Unknown
  Bacterial polypeptide expressing nucleotide sequence isolated from the Sargasso Sea
ttgtcaggtggagaaacggcagcttttgtagtacttgatagtgttttaagacttttacccggagttttggggaatgaaaaatcagtttctgaagaaacttttgaaaatggtcttctagagtatcctcaatacacaaaaccccagatttgggagcaaaaatcagtccctgatgtgttattatcaggggaccacgctaaaattaaagactggcgtttatctcaatctgaggctataactcgcgaccgaagaccagatatgtggcaaaaatataagaagaattaat

SEQ ID NO: 226889 - DNA, 703 bp, Unknown
  Bacterial polypeptide expressing nucleotide sequence isolated from the Sargasso Sea
aatgacttggaaagctaatattttgactttatatccggatatttatcctggttatttaggttacagtttactcggcaaagcacttgaaaaaaaaatttgggaattaaatatttataatttgcgtgattttggagaaggaaagcacaaaactgtcgatgataaacctttcggcggcggagctgggatgatcataaaaccagatatcttaggtgatgctattgaagaaacacttattaaaaatcacgatcagcaaaaactagtgtatttatctcctaaaggaaaaccttttaagcaagtagatgctgaaaaattttctcagagtaatggtgtatcaatattatgtggtcattttgagggaattgatcagagagttatagatatttatgaagttgaagaaatttcgatgggtgattatgtcttaacaggtggcgaagttgcatcttttgcatttttggatgcaattgttcgattattacctggtgtgttagggaatgaaatatcaataaaagatgagtcattttctgataatttattagaatatccacaatacactaaaccgcaagaatacaagaatattaaagtcccagatgtattactatctggtaatcatgaaaaaatagctgaatggcgaagagaaaagtctattgaaataactgaaaaaaatagacctgatctattgaaagataaaaacaccaagaaataa

SEQ ID NO: 226890 - DNA, 570 bp, Unknown
  Bacterial polypeptide expressing nucleotide sequence isolated from the Sargasso Sea
gatgtggactgctcaaatttttacattatacccagatttatttcctggaccattaaatcatggaatttatggcagggctttgaagaaaaaaatttggaaactcaagatcattgacatccgaaaatatgcttttgataaatataaaactgttgatgacactccttatggtggaggtgcgggcatgttaatgaaagctgatgtgttagcaaattctattgatcaaaatctcaaaaaaaaagataaaatttattatctttctccaaaaggtaaaaaatttagccaatcatttgcaaaaaaattgtcaaaaaaaaaaacattaaacttgatttgcggacgcttcgagggcgtggatgaccgtttattaaattcaagaaatatagaggaaataagtataggagactatattttgtcaggcggtgaaacagctgcactcgttattttagatacaactttaagactgttgcctggtgtattaggaaataattcatcaaaaaaagaggaaagttttgagagtggatttgtagagtaccctcaatttacaaagccctcaaatttgggagaaaaaaaagg

SEQ ID NO: 226891 - DNA, 415 bp, Unknown
  Bacterial polypeptide expressing nucleotide sequence isolated from the Sargasso Sea
atggcgccctatcgcctcgatgtggtgagtctggcgccgcaggcctttgcgcccttgctcgagcttggggtgatcggtcgtgccttcggtagcggcatcgccgagttgcatctccacaacccccgcgatttcgccaccgaccgctaccgcaaggtggacgatgagccctatgggggcggcgccggcatggtgctgaagccggaaccggtgttcgcagcggtggagtcgattccccggcgcagcggtgctcgggtgctgctgatgtcaccccaggggcgtcctctgcagcaggccgatctgcagcgttgggcccatgaccacgatcagctggtgctgctctgcggccattacgagggctttgatgaacgcatccgcagccttgtcgatgaggaggtgtccgccggtgatttcgtgc

SEQ ID NO: 226892 - DNA, 543 bp, Unknown
  Bacterial polypeptide expressing nucleotide sequence isolated from the Sargasso Sea
ttgatgacgctccttttggtggtggaagtggtatgctattaaaaccagatgttgtagcttctgctctagataaaaatataaaatcaaaggaaaaaataatttatttatctcctaaaggaaaaagattagatcaaaaaaaggtaaagcttcttagtaaattaaaaaaaataaatatattatgtggtcattttgagggtgtagatcaaagacttttagagacacgaaatattgaagaatatagcattggggattttatcttatctgggggtgagagcgcatcatttgtatttgtagacgctctagtaagattattgccaggcgttttaggaaatattaactctatcaaagaagaaagttttgagaataatcttttggagtaccctcaatacactaaaccaagagattgggagggcaaaaaagtaccagaagtcttattttccggtgatcacgctaaaattaaggggtggcgtttatcccaatctgaggctataacacgtcgccagagacccgatctttggaaaaaatatttagataaaaaatgaa

SEQ ID NO: 226893 - DNA, 511 bp, Unknown
  Bacterial polypeptide expressing nucleotide sequence isolated from the Sargasso Sea
atgtttcagttagatgtagttacgctatttccagaaatatttcattcatcattggataaaggtgtaataggtagagcgataaaaaataatttggtcaagtttagaagttggaatcctcgggattttactaaggataaacataagactgttgatgctcgtccttatggcggcggacctggaatggttatgatgtatgaaccagtttgtgctgccataaacaaagctaaagaaaagcagaagaatgcgaaagtaatttttctttctccccaaggaaaaaaattagaacaagccggtgtaattgaattttctaaacttgatggcatgatattattatgcggaagatacgagggtattgatgaacgcgttattcagtccgaaatagatgaagaatgctcaatcggagattatgtacttagcggtggagaatttcctgcattagtactaattgacagtatatgtcgattacttccaggggttttaggaggagaaaattcagcaaatcaggattcat

SEQ ID NO: 226894 - DNA, 688 bp, Unknown
  Bacterial polypeptide expressing nucleotide sequence isolated from the Sargasso Sea
tatgtggcaagctcaagtatttacactgtatcctgaagtttttcctggacctttgtctaaaggtttgtatggaaaagcattatctaaaggtttgtggaatttaaaagttgtaaacatccgtgattcagctttagataaacataaaacagttgatgatactccttatggaggtggatcagggatgttattaaaagcagatattttagcaaattctttggatcaaaataaaatagaagatgagaagattatttatttgtcacccaaaggtaaaaaatttgatcaactttatgctagagaattatcaaaagaaaaatctgtatctttaatttgtggtcattttgaaggagttgatgaaagagtattatcttcaagaaatattgaagagattagtattggagattatattttgtcaggaggagagacagctgcatttgtaattatagacagtattttgagacttttgcctggaattttaggtaatgagaattcaaaaataaatgaaagttttgaaaatggtttattagagtatcctcaatatacaaaacctcaaatttgggaggaaaaagctgttcctgaggtcttattatctggagatcacaacaaaattaaagactggcgtttatctcaatctgaggctataacacgcgaccgaaggccagatttatggcaaaaatataagaaagattaa

SEQ ID NO: 226895 - DNA, 598 bp, Unknown
  Bacterial polypeptide expressing nucleotide sequence isolated from the Sargasso Sea
ccaagagatttctctaaggggaattatcaacaaatcgatgatacgccatttggtggcggtcctggtatggttatgatggctgagcccttatttaaagctatagattttgttatagataaattttgtggtgcagatggaatgagaattttatacccatctccccaaggcgctctatggacgcaaagtgatgcagaagaaagtatggatattgaaaaaattattattatttgtggtcattataagggtgtcgatcaacgtgttatcgataagtatgttactcatgaatattctatgggtgactttgttctttcatgcggggagattccagcactaatgattgttgacagcattgtaagattattacctggagttctaaatgatataaattcgtcaaaaacagatactttttcatctgaacttttagattctccacactatacgcaacccagagagattgggggtatgaatgtacctgaagttttattatcaggaaatcataagagaatcaggaattggaaaaaaaaagttcaaatcgagactaccaaattaaaacgtcctgacatttggaaaaaatatttaaataataaatcggagtaaa

SEQ ID NO: 226896 - DNA, 547 bp, Unknown
  Bacterial polypeptide expressing nucleotide sequence isolated from the Sargasso Sea
taaaacagtagacgatacaccttatgggggtggttcagggatgttgctaaaagcttatgttctcgcaaagtctttagatgaaaacaaaaatgagagtgagagaattttatacttatcgccaaaaggaaaaaaatttgatcaaaatttagcaaaagagctagctaatgaaaaatctctgtctttaatttgtggtcattttgaaggtgtggacgaaagaatactttcaacaagaaatattgaggaaattagtattggagattatgttttgtcaggcggggagtcagcagcatatgtagtaatagatagtattttaagattgctgccaggggtattaggaaatgaaaactctaaattagatgaaacctttgaaaatggtcttctagagtaccctcagtatacaaaacctcaaatttgggaggaaaaagctgtgccagaagtactattatcaggtgatcataataaaattaaacactggcgtttatctcaatctgaggctataacacgcgaccgaagaccagatttatgggaaaaatataagaaaaattaa

SEQ ID NO: 226897 - DNA, 820 bp, Unknown
  Bacterial polypeptide expressing nucleotide sequence isolated from the Sargasso Sea
tttgatcgatgtaaatttatatgatttaagaaaatatggagaaggttcttacagacaagtagatgataagccgtatggaggaggagcaggtatggtattaaaacctgaacctatttataaggcatatgaatcaattagaaaattacctaaaagtaaaactttgctgatgaccccacagggtaaagtccttaagcaaaaggatcttgcgagatggtctactttggatcaaataataattatttgtggtcaatatgaaggttttgatgaaaggattagatgtatagctgatgaagagatatcgataggcgattatgtactttctggaggtgaaatacctgctatatcaataattaacggtttgactagattgttaccaggaactcttggtgatccagactccttagtcgatgaaagtcataattcttctttattagaatatcctcaatacacgaggccgttaacttttaaagatatgaaagtgccagatattttagtgagcggtaatcatgaagagattaaagcgtggagaagacgaaaaagttttgaaagaacattggagagaagaagtgacttaatttcaaatgaaaactacaaaaaatccccacaaagtaagagaataataaaagaaaataatcaattcatgaaatttagaataggtaatggatacgatattcatagattagttgaggatagagatttaattattggaggtgtaaaattgtgtcatcctgaaaatttaggattagatggtcatagtgatgctgatgttttgagtcactcaataatggatgcattattgggagcactttcactgggcgac

SEQ ID NO: 226898 - DNA, 495 bp, Unknown
  Bacterial polypeptide expressing nucleotide sequence isolated from the Sargasso Sea
gagcaataaaaagtctaaaaaataatgtacatccaaaaattttattaagtccaagaggagaagtttttaaccaaaatctagcaaaagaatttgctaagttagacgaattaacatttatatgtggacgctatgaaggaatcgatcagagagtgattgaaaaatataatttgatggaagtaagtttaggagattatatcttatcaggtggtgaaattgcttgtcaggttttgctcgatgtgatcattaggttattgccgggtgtaataaacaatgaacaaagtgtaaaaaatgaaagctttgaaaatggacttttagagtacccacaatacacaaaaccaagaatttgggaaggaatagaaactccgaaaattctgctttcagggcatcatgaaaaaataaaaaagtggagaattgaacaatctttaaaaatcacagaaaaaagaagacctgacttatggattaaatatttagaaagacaaaataaagatatttaat

SEQ ID NO: 226899 - DNA, 676 bp, Unknown
  Bacterial polypeptide expressing nucleotide sequence isolated from the Sargasso Sea
tatgtggcaagctcaagtgtttacgctttatccagaagtttttcctggtcctctttctaagggcatgtatggaaaagcaatgtcaaaagatttatggaatttaaaagttgtaaatattagagatgcggctgaagataaacataaaactgtggatgatactccttatggaggaggatcaggaatgctattaaaaccagatgtccttgccaaatcattagatcaaaataaagttgaaggtgaaagaattttatatttatctccaaaaggtaaaaaatttgatcaaaattatgcaaagagattggcaaaagaaaaatctatatcacttatatgtggacattttgaaggagttgatgagagagttctatccacaaggaatattgaggaaattagtataggagattatgttctgtctggaggtgaaactgcagcttatgttgttatagatagtgtgcttaggcttttgccaggggtattaggaaatgataattctaagattgaagaaacttttgaaaatggtcttttagagtatcctcaatttacaaaacctcaaatttgggaggaaaaagcagtaccagatgtattattatcaggtgatcatagcaaaattaaagactggcgtttatctcaatcagaggctataacacgcgaccgaagaccagatttatgggaaaatata

SEQ ID NO: 226900 - DNA, 703 bp, Unknown
  Bacterial polypeptide expressing nucleotide sequence isolated from the Sargasso Sea
atgagtaacgttacatggaaaatatctataatcacaacaacgcctgagttattccctgggccacttcagtatagtaatattggcaagtccttagctgaaggaaaatggagtcttgaaataattcctctagaaaagaggcaaagtaataagaaagtaaagatcgacggctctccagcaggtggtggaccgggtatgattatgagagcagatatcgtgcttccaatcattgctaatatgcgacaaaatggtgatacaaggccattaattgtgccggcggcaagaggtattaaatatgatcaaaaaataacaaaagatttagtaaaaaatgaaggtttgatatttctgtgcggaagatttgagggaattgaccaaagaataattgagtcaactggagcactggagctatcaatcggtgattatattctcacaaatggagatgttgcagcgatcaatataattgactcttgtgtaagattattagatggcgtgttgagttcaaaagcttcaacaaagaacgagagctatgaggatgggctattagaatatccccaatacacattaccaagagagtatggtggattgaaaatacccgatgtacttttgtcgggagatcacggggcaataagtaaatggagatttaaccagtcccttctggctacagaaaagaacagaccagacctatacgaaaaatataagaagaaaa

SEQ ID NO: 226901 - DNA, 388 bp, Unknown
  Bacterial polypeptide expressing nucleotide sequence isolated from the Sargasso Sea
gatcaaagagttattgataaatatgtagatgaagaaatttcaataggagattttattttaagtgggggagagtatgctgcagtttgtttaattgatgcaataacaagacacattccaggtacacttggaaataaagactcctacttaaaagatacattctcaaatgggcttttgaaaggagatgtttatgcaaagcctgaaagttttgaatctatgaaagttccagatgttttgctttcagggaatcataaagaaattgattcctggagagagcaaaattcattacttaaaactttcataaaaagaccagaattgttaaatgatgtaaaattaacaaaaaaacaaaaaaaactcttggaagaatgggcatctaaggatatcctatagc

SEQ ID NO: 226902 - DNA, 670 bp, Unknown
  Bacterial polypeptide expressing nucleotide sequence isolated from the Sargasso Sea
tttactctttatccagaagtttttccgggacctttaggtaaaggcctttatggaaaagccttgtctaataatttgtggaacttagatgtaataaatattagagatgcagctactgataaacacaaaacagttgatgatactccttacggaggagggtcaggaatgttgctaaaagcagatgttttagctaaatctttagatcaaaaagtaaataaaggagagagagttttttatctttcacctaaaggtaaaaaatttgatcaaaaacttgctcaagaactgtcaaaagaaaaatctatatctttaatatgtggccactttgaaggagtggatgaaagaattttaactactagaaatatagaggaaataagtataggagattatgttttgtctggaggtgaggctgctgcattagtagtgctagatagtattttaagacttttgccaggagttttgggaaataataaatcctcacttgatgaaacctttgagaatggtcttttagagtatccccaatatacaaaacctcaaatatgggaagaaaaaccagtgccagaggtattattatctggagatcatagtaaaattaaagactggcgtttatctcaatctgaggctataactcgcgaccgaagaccagatttgtggcaaaaatataagaaaaactaat

SEQ ID NO: 226903 - DNA, 538 bp, Unknown
  Bacterial polypeptide expressing nucleotide sequence isolated from the Sargasso Sea
atgatggctgagcctttatttaaagcaatagattttgttatagataaattttgtggtgcagacggaatgagaattttatatccatctcctcaaggagctctatggacgcaaagtgatgcagaagaaagtatggatatcgaaaaaattgttattatttgtggtcattataaaggggttgatcaacgtgttatcgataagtatgttactcatgaatattccatgggtgactttgttctttcatgcggggaaattccagcgctaatgattgttgatagtattgtgagattattacctggagttttaaatgatataaattcctcaaaaacagatactttttcatctggacttttagattctccacattatacgcaacccagagagattgcaggtatgaatgttcctgaagttttattatctggaaaccatgagaggatcagggattggaagaaaaaagttcaaattgagacaactaaattcaagcgtcctgacatttggaaaaaatatataaacaataaatcggagcaaaaagatgaataag

SEQ ID NO: 226904 - DNA, 664 bp, Unknown
  Bacterial polypeptide expressing nucleotide sequence isolated from the Sargasso Sea
atgataaacaataatgcgtttgaggttaaaatactgactttatttcccgaaatgttttcaggtgtattagatcattctttagctggtaaagccttaaaaaaaaatatatggaaattgaatacagtaaatattagagattatgcaactgataattatagaagagtagatgatgttccttacggaggaggaccaggaatgataatgagaccagacatcttatcaaaagcttatgatgctaataaaccatcatctgattggtcgaaaatagtattaacgccaagaggaaaaccgctaaatcaaaatatggttaaaaatatggcatctaagtcaggtattttaatggtttgtggaagatacgaaggtattgatgaaaggtttattcaatctcgttctttagaggaaataagtgtaggagattatattttatcaggaggagagcctgctgctatcataatattagattctataattaggttattagcaggaactgcaggaagcgcagatagtttgaaggaagaaagtttcgaaaataatattttggagtatcctcaatatacaagaccttatgattgggaaggtatgaagccgcctgaagttttagtatctgggaaccataaagaaattgaaaagtggaaaaaagaggtttctattaatgatacaaaaa

SEQ ID NO: 226905 - DNA, 308 bp, Unknown
  Bacterial polypeptide expressing nucleotide sequence isolated from the Sargasso Sea
tattggcgactatattttgtctgggggagagtcagcagctttagttttaattgacagtgtgattagacttttgccaggcgtattgggtaatgatgcctctaaaaatgatgagagcttcgaaaatggtttattagaatatcctcaatataccaaacctcaaatttgggagaaaaaaagtgtcccggaggtcttattatcaggagatcatgggaaaattaaagactggcgtttaagtcaatcagaggctataacacgtcgccagagacctgatttgtggaaaaaatacattagcaaaaagaaaaaatgaa

SEQ ID NO: 226906 - DNA, 703 bp, Unknown
  Bacterial polypeptide expressing nucleotide sequence isolated from the Sargasso Sea
tatgctcgaagtacaaatatttactttgtatccagatttatatcctgggctattagacattggtatctataaaaaagctcaggaaaaacaaaaatggaatctcaaaattatagatataagagactatgcttttgatgataatgggacagttgatgatacaccttttggtggtggaagcggtatgttgttaaaaccagatgttgtagcatctgctttagataaaaacataaaaggtaaagaaaagataatttatctatctcctaaaggtaaaagactagatcaaaaagaaatgaaatacttaagtaagctaaataaaataaatattttatgtggtcattttgaaggtattgatcaaagacttttagagactcgaaatatagaagaatacagcattggagattttattttatctgggggtgaaagtgcatcatttgtattcgtcgatgcattagttagacttcttccgggtgttttgggtaatgctaattctgctaaagatgaaagttttgagaataatcttttggaatatcctcaatacactaaaccaagagactgggagggcaaaaaagtgccagaagtgctactttctggtgatcatgctaaaattaaggggtggcgtttgtctcaatctgaggctataacacaacgccaaagacctgatctttggaaaaaatacttagagaaaaaaaatgaaaaatattga

SEQ ID NO: 226907 - DNA, 424 bp, Unknown
  Bacterial polypeptide expressing nucleotide sequence isolated from the Sargasso Sea
tatgagtaaattaagattcgatgtcgtaagcctttttccagaagcttttaaaaatttttttaatcatggactaataaaaaaagcatttgaagagaagatcgcatcaattcatatacataatcctcgtgaccacgctatggataattatcgaaaagttgatgatgagccatatggcggaggcgcaggaatggtcttaaagccagaaccctatttttcggtttttgatcaaattccaaagctcaataaaaaaagaatacttttgatgactccacaaggtagaaaaatatctcaacctgatttttctagatggtccaaagaagatcaactcatattgatatgtggtagctatgagggatttgatgaaaggattaggtctttagctgatgaagaaatttcaattggagactttgttcttacgggggag

SEQ ID NO: 226908 - DNA, 615 bp, Unknown
  Bacterial polypeptide expressing nucleotide sequence isolated from the Sargasso Sea
aacaattgatcctcgtaagtatacgaaagacaaatataaaaaaaattgatgatacaacagccggtggcgggcctggaatgatttttaaaccagatatcatgggcaaggctattgatgcatgttatagaaatataaaatccaaagaaaaatatcccttgatttacttaagcccaaggggaaagcctctcacgcaaaagaaagttgtcaaattatcaaaaatgaaaggaataaatcttctttgtgggagatatgagggaatcgatcaacgccttttggattactacgctatagaagaattaagtattggagattacattttagcaggcggagagttagctgctcaggtgttagttgagtctatagttagacttcttcctgggactttgggacatagagagtccactgaaacggagtcatttaataatgatttgttagagtatccacaatataccaggccaaaaacatggaaaaatatgactattccaggtgtattactgtcaggtaatcataagaatataagtaaatggcgcttggacatgtccgagaaaataacaaagaaaatgaggccagacatatggaaaaactacaaaaaaaacaagacaagcaagaaataaa

SEQ ID NO: 226909 - DNA, 541 bp, Unknown
  Bacterial polypeptide expressing nucleotide sequence isolated from the Sargasso Sea
ccgtatggtggaggtccgggcatggtattaaggcctgacgtattagatagaactttggaggcgatttcgggtgttccggggcggcgtatttgcctctcaccgcgtgggcgtcgatttgatcaagcctttgccaaagaactagcacacgagccaggagttgtgctagtttgcggccgttatgaaggtattgatcagcgcgttatagaggcccgagaaatggaagaggtcagtttaggagattttgtgcttacgggtggtgaaatagccgcccaagctttgctggatgcgacagtgagactgttaccaggggtaataggttcagagcagggactagatgaagaaagttttgaagacggccttttagagtatccgcagtacacgcacccaaaaatctggaaaggacggtcggtgccagaagttcttttgtcgggtaaccacaaaaagatagccgaatggaaaaaacagcaatcggaattggttacacgtaattatcgtccggacctctgggaagcttatgaaagtgttaaagttcaaatttagg

SEQ ID NO: 226910 - DNA, 589 bp, Unknown
  Bacterial polypeptide expressing nucleotide sequence isolated from the Sargasso Sea
ttaaaaacagttaatattagagaatttgcaaatgataagcataaaacagtagatgatactccctatggtggtgggtctggaatgttaataagaccagatgtgcttgcatcgtcaatagatcaaaatgttcattctaaagaaacaattatttatcttactcctaaggggaagttatttaatcaatctctagcaaaaaaattgtcaaatacaccagttgttaatttaatttgtggaagttttgagggaatagatcagagaataattgattctagaggcatagtggaaattagtgtaggagattttatattatctggaggagaaacagcggcgtttattttattagactcaattttaagattaattccgggagttcttggaaataattcttctattgatgaagaaacttttgaaaatggtcttttggaatatccacagtatacaaaacctcaaatatgggaggaaaaaagtgtacctgatgtactattatcaggagatcacgctaaaattaaacactggcgtttatctcaatctgaggctataacacgcgaccgaagaccagatttgtggcaaaaatataaaaaggattaac

SEQ ID NO: 226911 - DNA, 530 bp, Unknown
  Bacterial polypeptide expressing nucleotide sequence isolated from the Sargasso Sea
aggaggtgaaggtatgttaatgaaagcagatgtattagcaaaatcaatagatatgaatgttaaagatggcgaaaagattatttatctaagtccgaagggtaagttgttcaatcatcaattagcaaaacaactatctcaagaaaaaacaataaatataatttgtggacactttgaaggagttgatgaaagattattaaaaacaagaaatattgaggaagtaagtataggagactttgttttatctggaggtgaaggagcttcatttgtaattcttgatgcaattttaagatttattcctggtattcttggcaatacaaattcagctaaagaagaaagttttgaaaacggacttttagagtatcctcaatttacaaaacctcaaatatgggaggaaaaaagtgttccagatgtgctattatcaggcgatcacgccaaaattaaagactggcgtttatctcaatctgaggctataacacgcgaccgaagaccagatttgtggcaattatataaaaagactaaagagaattaaa

SEQ ID NO: 226912 - DNA, 643 bp, Unknown
  Bacterial polypeptide expressing nucleotide sequence isolated from the Sargasso Sea
atgaactttaatttagtaacaattttccctgaaattacgaaattatttgactttggagttattggaaaggctattgaaaaaaatttaatttctatgaatagtttgaatccgagggatttctcaaaaaataccaataaaaacgtggatgatgcaccttatggtggaggcgagggaatggttatgatggcagagccgttagcattagcaatgaaatcaataaaaaataagggaaaggtgcttttgatgagtcctcagggagagcgtttatctaataaacatattgacgggttgctagacgaaaaatcaattactatcatttgtggaaggtatgagggcattgatgaaagatttattgaaaattatgttgatcaagagttttctataggcgattttgtccttagtggaggagaaataccagcattagctttaatagatgcattatcgagaaagattcctggcgttcttggtaaccaggaatcctttaaaaacgattcatttgaaaataatcttttaaaaggacctgtatacactagacctcagaaatttgaaggaaaggatgtccctgaaattttattatcaggtgatcataagaaaattaatgattggaaaattttatcctcattacaacgaactattgaaagaa

SEQ ID NO: 226913 - DNA, 733 bp, Unknown
  Bacterial polypeptide expressing nucleotide sequence isolated from the Sargasso Sea
catgagcaaaccaacaaaatcccatgggcgcatctcaatcggtgccagcctgcgtccccgcgagttgatgagcgatacgccggaccttgcgggcgtgtggaaggccaagatcctgactctgtttccagaggcctttcccggtgtcttgggcgagagcctgaccggcaaagcgctgcagcaagggctttggcagttggaaaccgtggatctgcgcccctttgggatcggcaagcacaaaaatgtcgacgacacgcctgccggtggtggcgcgggcatggtgctgcgcgccgatgtgctgggcgaggcgattgaacacgccatgcaaggcacacgcggcaactggccactcatttatctgtcgccacgcggtcgccggatggaccagaagatgatgcagaacttcgcccgttgcgacggtatgacgctgctctgtggccgttttgagggcgtcgacgaacgtgtgcttgaacactatggcatccaggaagtctcgcttggggattttgtgatgaccggcggcgagttggccgcgcaggcgctcattgacgcgaccgtccggctgatccccggtgtgctgggcaatcaggcctcaaccgaggaagagagcttctcctctggcctccttgaacatccccaatacacccgtccggcagagtggaaaggacgcgcgatccctgaggttctgatgtccggccaccacgtcaaaatcgcgcagtggcggcaggacatgagc

SEQ ID NO: 226914 - DNA, 697 bp, Unknown
  Bacterial polypeptide expressing nucleotide sequence isolated from the Sargasso Sea
aattatttctccagttccaaatatgatagaatctgtgattgaaaattcaatgatcagaaaagctgttactaatgggattcttgatattcacattgtaaacccaagagatttttctaagggcagttatcagcaaattgatgatacgccatttggaggaggtcctggcatggttatgatggctgagcctttatttaaagctatagattttgttatagataaattttgcggagaagatggaatgagaattttatatccatctccccaaggcgctctatggacgcaaagcgatgctgaagaaactatggatatagaaaaaattgttattatttgtggtcattataagggtgttgatcaacgtgttatcgataagtatgttactcatgaatattctatgggtgactttgttctttcatgcggggagattccagcactaatgattgttgatagcatcgtgagattattacctggcgttctgaatgatataaattcctcaaaaacagatactttttcatctggacttttagattctcctcattatacgcagccaagagagattcggggtatgaatgttcctgaagttttattatctggaaatcatgagaggatcaggacttggaagaaaaaagttcaaattgagactacaaaattaaaacgccctgacatttggaaaaaatatttaaataataaatcggagtaa

SEQ ID NO: 226915 - DNA, 313 bp, Unknown
  Bacterial polypeptide expressing nucleotide sequence isolated from the Sargasso Sea
attgaggaaataagcattggagattttattttatctgggtgtgagtcagctgcttttgtgataatcgactctattttaagattgatacctggagtactcggaaatgacctatcgaaagaagatgaaagctttgaaaacggtcttttagaatatccccagtatactaaaccacagatttgggagaaaaaagctgttccagatgtattattatctggagatcatgctaaaattaaagactggcgtttgtctcaatctgaggctataacacgcgtccgtagaccagatttatgggaaaaatataaaaagaactaaa

SEQ ID NO: 226916 - DNA, 427 bp, Unknown
  Bacterial polypeptide expressing nucleotide sequence isolated from the Sargasso Sea
aaaggtaaattatttaatcatcaatatgctaaaaaactttcaaatgaaaaatctataaattttatatgtggtcattttgaaggtattgatgaaagaataatcaaaactagagatatagaagaagtaagtataggtgatttcattttatctggtggagaagtggcaacttttgtagttcttgatgcgattttgagatttattccaggtgttttaggaaatgagaattccactgaagaagaaagttttgagaatgggcttttagaatacccccaatacaccaagcctcaaatttgggaggataaaggtgtaccagaagtcctattatcgggtgatcatgccaaaattaaagactggcgtttatctcaatcagaggctataacacgcgtccgaagaccagatttgtggcaaaaatataaaaagaattaat

SEQ ID NO: 226917 - DNA, 508 bp, Unknown
  Bacterial polypeptide expressing nucleotide sequence isolated from the Sargasso Sea
aatgctaattaaaccagatgtccttgcgaactctttagataaaaatttaaattctaaagaaaaaataatttatttgagtccaaagggaaaattacttaatcaaaaattagcaaaagaactttccaaagagaaaactattaatttaatatgtgggcattttgaaggtgttgatcaaagagtaatagaatcaagaaacatagaagaagtaagcataggagactttgttttatctggtggtgaaagtgctgcatttgtgatgttagatgcaattataagactattacctggtgtacttggtaatgaaacatcggtggaagaggaaagttttgagaatggacttttagagtatcctcaatatacaaaacctcaaatttgggaagaaaaaacagttccagatgtattattatcaggagatcatgcgaaaattaaagactggcgtttatctcaatctgaggctataactcgcgaccgaagaccagatttgtggcaaaaatataaaaaaaattaa

SEQ ID NO: 226918 - DNA, 376 bp, Unknown
  Bacterial polypeptide expressing nucleotide sequence isolated from the Sargasso Sea
ggagaggtattattgatggtttgcggccgttatgaaggatttgacgaaagggtccgtgaactggtggatgaagaggtttcgggaggcgactatgtttgccttggtggagaagtgattgcgatgctgattattgaatccgtgagccgcctggtgcctggggtgttgggcaattcggattcttcagaaaccgaatcctttgccgcaagtacgctggaatatccgcaatacacgcggcctagaatatataaaggcatggaagtgccggaagaattgctgtccgggaatcatggcctgattgaagcatggagaaagaaccgggcgctggaaagaacccgacaaaggcgtccagatttaataacccgtaatattgagtaag

SEQ ID NO: 226919 - DNA, 691 bp, Unknown
  Bacterial polypeptide expressing nucleotide sequence isolated from the Sargasso Sea
atgtggaaagtaagaatatttacgctgtatcctgaaatgtttccaggacctttggatattgggcttaataaaaaagctcttgataaaaaactttggtctctagaagttataaatattcgggattattctttagataaacacaaaacagtagacgacacaccttttggaggtggcagcgggatgttgatgagagctgatgttatagccagatctttagataaaaatataccaaataaaaatgaacaaattatttttttatcaccaaagggaaaaaagtttgaccaatcctacgcaagaaaaatgttaaataaaaacgttaatataatatgtgggcatttcgaaggagttgatcaaagattattagaaaccagaaatatagaagaagttagtgttggagattttgttatgtctggtggtgaaattggtgcatttatattaatagattcagttgttagattaattccaggagcgattggtaattcagattcgctaaatgaggagtcgtttgaaaaaaacttactagaatatcctcaatatacaaaacctcaaatttgggaggaaaaaagcgttcccgaagtgctattatctggagatcatgccaaaattaaggactggcgtttaacccaatcaaaggatataacacgacgccgacgtcccgaattgtgggaaaaatataaaaaaaataaatgaa

SEQ ID NO: 226920 - DNA, 605 bp, Unknown
  Bacterial polypeptide expressing nucleotide sequence isolated from the Sargasso Sea
gaaaaaatttgggattttaaaaacaataaacattagagagtttgcaaatgataagcataaaactgtagatgatactccttacggtggcggatctggaatgttaataagacctgacgtactcgcatcatcaatagacaaatatattaaatctgatgaaaaaattatttatcttactcctaaaggaaagttatttaatcaatctattgcaaaaaagttgtcaactgcacaaaatgttaatttaatttgtggaagttttgagggcattgatcagagaataattgactctagaggcatagaggaaattagtgtaggagattatatattatctggaggggaaacagctgcatttattttattagactcaattttaagattaattccaggagttgttggaaataattcttctattaatgatgaaacttttgaaaatggtcttttagaatatccacaatatacaaaacctcaaatatgggaggaaaaaagagtacctgaagtactattatcaggagatcacgctaaaattaaacactggcgtttatctcaatctgaggctataacacgcgaccgaagaccagatttgtggcaaaaatataaaaaggattaga

SEQ ID NO: 226921 - DNA, 655 bp, Unknown
  Bacterial polypeptide expressing nucleotide sequence isolated from the Sargasso Sea
tatgttagaggtaaaaatttttactttatatccagatttgtttcccggtcccttagatatcggaatattcaaaaaggcaaaggaaaataaaatttggaatttaaaagtgatcaatatcagggattattctaaagatagtcacggcacagtagatgacacaccttttggaggaggaagtggaatgcttttacgccctgatatactggcttcagcacttgatgataatataaaaaaaggtgaaaaaattatttacttatctccacgaggaaaaaaatttgatcaaaatgaagctagatttttgagtaaagaaaagaatttaaacattatctgtggtcattttgagggagttgatcaaagactcttagagacaagaaatattgaagaatatagtttaggtgactttgtcctatcagggggagaaccagcttcttttgtgcttgttgacgctttagtgagattattacctggagtgttaggaaataaagactccgttaaagaagaaagttttgaaaatcaccttttagaatatcctcaatataccaaaccaagggaatgggaaggcaaaagccctccagaggtcttattttcaggcgatcatgctaaaataaaagggtggcgtttatctcaatcagaggctataacacgtcgccagaga

SEQ ID NO: 226922 - DNA, 652 bp, Unknown
  Bacterial polypeptide expressing nucleotide sequence isolated from the Sargasso Sea
gatgagaacttttaactttattactatttttccagatataataaataatttcttaaaatacggtctagttaatagagcaattgaaaaaaaaatcatcgaaataaatacgatatacttgagggatttttcagatgactctaatttaagaattgatgataaatcttatggtggtggacctgggatggtcatgagatacaagcctgttgaagatgccctcaaaagcattacaagaaaatcctatgtaatttatttatcacctcatggaagtaaactcgaccagcataaaatatctgaacttacaaaagcgcaaaatcttacttttttatgtggtcgttatgaaggatatgatcagagagtagtagatgatttggtagatgagcagatatctctcggagattatgtaatatctggaggtgaattacctagcttaatacttcttgagggtatcactagattactaccaaatgttgctaatgatttagactcgatattaaatgattctttcacagataatttacttgattatccgcattacactagaccagaatcaataaacggccatgaagtgcccgatgttctgcttagtggcaatcacagcgagatagcaaaatggcgaagaaaacagtctttaggtattacctggaaaaatcgc

SEQ ID NO: 226923 - DNA, 508 bp, Unknown
  Bacterial polypeptide expressing nucleotide sequence isolated from the Sargasso Sea
ttggatataaatatagttacgctatttcctgactttttccgttcaccgctaaaatccagtattttagcaagagccattagtcgtgatttggtcagggtaaatacttttgacccacgtgagtttgccttaggcaaacacagaaacgtggatgacgagccctatggcggtggagggggaatggtgtttaaacccgaaccattctttcgcatgtgggaatctatgaagtttaaagaagcccattgtgtttaccttactgctgatggagctaaacttgatcaccagctgtgcatcgagctttctcggaagtcaaacatagtcctactttgtggacattacaaaggaattgatcaaaggattcgagaagacttaattgaccaagaagtatccgttggcgatttcgttttgactggaggagaaccagcagcagtacttactattgatgcaatagtgagacttctgcccggtgtactaggtaatttttgttcagccattggaagattcttttcaa

SEQ ID NO: 226924 - DNA, 475 bp, Unknown
  Bacterial polypeptide expressing nucleotide sequence isolated from the Sargasso Sea
ggctatcatcgtcagctcgggcgcaaggttagaaaaatcctgctgactccgcagggaagtcccttcgaccagaagaaagcaagggaatggagtcaatgcggagaggtattgttgatggtttgcgggcgttatgaaggatttgacgaaagggtccgtgaactggtggatgaagaggtttcgggaggcgattatgtttgcctcggtggagaagtcattgcgatgctgatcattgaatccgtgagccgcctggtgcctgggatattgggcaatccggattcttcggaaaccgaatcatttgccgtaggtgcgctggaatatccgcaatacacgcggcctagaatgtataaaggcatggaagtgccggaagaattgctgtccgggaatcatggccggattgaagcatggagaaagaaccgggcgctggaaagaacccgacaaaggcgtccagatttaataacccgtaacattgagtaag

SEQ ID NO: 226925 - DNA, 610 bp, Unknown
  Bacterial polypeptide expressing nucleotide sequence isolated from the Sargasso Sea
cttagaaataatttgtggtctttaaaaactgtttatattagacatttttcaaatgacaaaaatggtaaagtagataaagttccgtttggtggtggaccgggaatggttattaatccagaagttttagataaagctctaaagtctgtttctgaagctaaaggtcgaagaatttacctttcaccaagaggcaaaaaatttgatcaagaattcgcaaagaaattatcacaagaaaaaggtgctgtttttatatgtggaagatatgaaggtgtagatgaaaggtttttaatttataacgaaatagaagaagtaagtgttggagattttgttttatctggtggtgaaataggtgcgcaattaattatggacgcgactgtaagacttattcctgacgttattggtaatgccaagggattgatggatgaaagttttgaaagacatttgttagaatatccattatatactcatccaagagtatggaatgatatggaagtaccagaaattttattatctggaaatcataaaaaaatccaaatgtggaagttaaagatgtctgaaaagcttacaaaattaaggagaccagatttatggtcaaaatatattaaatcttaac

SEQ ID NO: 226926 - DNA, 688 bp, Unknown
  Bacterial polypeptide expressing nucleotide sequence isolated from the Sargasso Sea
aatgtttactgcaagagtatatacgctttacccagatttattccctggacatctaaacaaaggattatttggtaatgccttagaaaacaaaatttggaatttgaatattattaatattagaaattatgcagaagacaaacacaaaactgttgatgatacgccctatggtggaggatcaggtatgttaatgagaccagatgttttagctagctcaatagataaaaatattttatcaggagaaaaaattatttacctttcacctagaggtaaattattcaaccaagatattgctaaaaatttagctaaagaaaaaacactgaatattatttgcggacattttgaaggagttgatcaaagagttattgaagctagaaacatagaggaaattagtattggggattttattttatcaggaggtgaagcagctacttttgttattttggatagtatacttagattgttacctggcgtagttggaaaccaaaattcaataatagaggaaagttttgaaaacggcttacttgagtatcctcattatacaaaacctcaaatttgggaaaaaaagagggttcccgatgtacttttatctggtgatcatgctaaaattaaagactggcgtttatcacaatctgagagtataactcgcgtccgaagaccagatttgtgggaaaaatataagaaaaattaa

SEQ ID NO: 226927 - DNA, 597 bp, Unknown
  Bacterial polypeptide expressing nucleotide sequence isolated from the Sargasso Sea
aatgaggattgatattttaaccttatttcccgaactatttgataatctaaattctttttcaattatagaaaaggcaattaaatcaaaaaaggtcaagataataacacataatttaagggattatgcagaaaattctagacatgttgacgatagcccttatggaggtgacgctggaatgattataaaaatagaacctattgataattgtataagtaaattaaaaaaagagaataattacgatgagataatttatcttactcccgatggagaagttcttaatcaaaaaaaatcaaactacttatctactaaaaaaaatctaatccttttgtgtggacattataaaggtgttgatcacagagtaagagagtatcttataacaaaagaaatttctattggaaattatgtgttatctggaggtgagctccctgcagcaattttgtgtgattcaataataaggttaattcctggtgtaattggagatgaatcatcagctttatcggatagttttcaagacaacattgtttctgctccaatatatactagaccagcaaattataaaggtctaaaagtaccagatgtccttatctctggtaatca

SEQ ID NO: 226928 - DNA, 421 bp, Unknown
  Bacterial polypeptide expressing nucleotide sequence isolated from the Sargasso Sea
gaagaaatttgatcaaaggtatgcaaaaaaattagcaagagaaaaatccttatcacttatttgtggtcattttgaaggagttgacgagagagtattgtccacaagagatatagaggaagttagcattggggactatgttttgtctggaggggaaaccgcagcatatgttgttattgatagtgtgcttaggcttttgccaggagttttaggaaacgataactcaaagatggaagaaacatttgaaaatggtctattagagtatccgcaatatacaaaacctcaaatttgggataaaaaaacagtaccagatgtattattatcaggtgatcatagtaaaattaaagactggcgtttgtctcaatctgaggctataacacgcgaccgaagaccagatttatgggaaaaatataagaaaagctaa

SEQ ID NO: 226929 - DNA, 590 bp, Unknown
  Bacterial polypeptide expressing nucleotide sequence isolated from the Sargasso Sea
aatatgggacttacaaataactgatattaaaaattttactaataaaagtaataacatcgatgataaaccatatggcggcggtccaggaatgattttaaggcctgatattatgcaaaacgcatatgaagaagcggtatctactatagaaaaaagtactaaaaaatatcaaaaaattatgcttacaccaagaggagaaaggttaaatcaagatattgtaaaagaattaagtaaaaccgaaggtctaattattatatgtggaagatatgaaggtattgaccagaggtttgtcgattacaatgggctaagagaaatttcagtaggagattttgttttaagtggcggtgaacctgcggctgtaactctaattgatgcaatagtaaggttgttaccaaacgtattaggaaaccctagtagtttgctagaagaaagttttaatgataacttaatagaatatttacaatatactaaaccgagagtatggaagaacattaaagttccagacgttttactttcaggtgaccataaaaaaataaaagattggagattaaaaaactctataatttttaaaaagaaaaaaaaagatagataat

SEQ ID NO: 226930 - DNA, 304 bp, Unknown
  Bacterial polypeptide expressing nucleotide sequence isolated from the Sargasso Sea
ttttatattgtctggaggagagacagcttcatttgtttttattgactctgttattcgattattacccggtgttttaggtaatgataattcaacaaaagaagaaagttttgaaaattatctattggaatatcctcaatatacaaaacctcaaaattgggaaggaaaaagtactccagatgtactattatccggcgatcatgctaaaattaaagactggcgtttatcgcaatctgaggctataacacgtcgccagaggcctgatctttggaaaaaatatttaaataaaaaaaatgaaaaacattga

SEQ ID NO: 226931 - DNA, 934 bp, Unknown
  Bacterial polypeptide expressing nucleotide sequence isolated from the Sargasso Sea
gaaaaaaatattaccattgtatgtggaagatatgagggatatgaccagagaataattgatgaatattgtgatttagaaatttctataggtgattatattttaactggtggtgaactagcagcttgtgttttaattgattctgtagcaagaatgataaagggagtagttggtaatgagaactctgttaaatctgatagtctaatgaattctattttgaaaggtccagtttatacaaggcctaaaatatataaaggtaagaaagttccaaatatacttttatctggaaatcatgaaaatattaaaaaatatcttagggaaacatctttagctgcaaccctcaacaaaagagaggatttacttgaaaatgcgaatcttagccaagatgaagtaagtcaacttaagagttcaaaaaaatcaactataaataagaatatttatattgcactagtccactatccgatagaaaatataaaaggtgagataattaaaacatcccttacaaatctagatatacaagatattgcgagatctgctaatacctatggcataaataaatactttattacacaccctgttaaagaacaaagaatgcttgctgaaaaagtgattaaatattggtctaatgagaaagtaagaaagaatgacaacactaaacattcatctattaacaagataatagtaaagaattcacttaatagtgcaattcgtgaaattaaaaagaaacatggaactaagccaattacaattgcaacagatgcaagaatggtgcataatatgacgagttattctactttaagagatcgtatcttaaatattgatgagcctgttttaataatttttggaactggttgggggctacccaaaaatactttagaatcagcagattgtattctaaagcctgtaggtgggtatcatgaatacaaccattgtcagt

SEQ ID NO: 226932 - DNA, 733 bp, Unknown
  Bacterial polypeptide expressing nucleotide sequence isolated from the Sargasso Sea
atgtatgaaaatcatacttggacagcaaatgttattacattatttccagaaatgtttcctggagcattgtcttattctctaattggtaaagctcttaaaaaaaatttatggaatttaaaaacttttaatctgagagaatttgcaactgatacaagaaaaacaatagatggtccaccggttggaggaggtgctggtcaaattttaaaggccgatgttttggacagtgcaataagttatataataaaaaaaaattcagattataaacgagatgattggccaataattgcattatcacctaggggaaaaatattcaaccaaactgaagcattgaaattttcaaaatgtaagggtattacaattatctgtggaagatatgagggatttgatgagagagccctggaacttcataaaatacctgagttatctcttggggactttattttgtcaggaggagaaattgcagctcagctcttgattgattccgtagttaggcttataccacatgtaattgggaatcataaatctcttgaagaggagagttttacaaactatttattggaatatccacagtatactaaacccatatcatggaagaatttatcaattcctaacgagttactttctggtcatcatcagaatataaaaaaatggagattaaataagtctgaagaacttacaaaacaaagacgccccgatttatggaaaaaatataaatcaaaaggaaataaataat

SEQ ID NO: 226933 - DNA, 733 bp, Unknown
  Bacterial polypeptide expressing nucleotide sequence isolated from the Sargasso Sea
agaagcaaagaaagaagaaaaaaaataatgtggaaagctcgagtgtttactttatatcctgaaatttttccaggtccttttgaaaaaggtctatacggtaaagctttaaaaaaaaaaaattgggatttggaaattgtaaatattcgagagtctgctgaagataaacacaagacagtcgatgacacaccttttggtggtggtaatggaatgcttttaaaaccaaatgttctaggaaaatctatagatagtaaaataaaaaaaaatgaaagagtcttatatctttcgcctaagggaaaaaaatttgatcaaatgatggcaaaagatctttcaaaagaaaaaacaattaacctaatttgtggacattttgaaggtgttgatgaacgccttttaagtaccagaaatattgaattaataagtattggtgattatattttatctggtggagagacagcatcatttgttattatcgacgctattttaagattgcttccaggcattataggaaatgagaaatcaaaagaagacgaaacttttgagaatgatttgctggaatatcctcaatatacaaaacctcaaatttgggaaaaacaaagcgttccagatgtactattgtcaggagatcatgcaaaaattaaggactggcgtttatcacaatctaaggatataacacgtcgccagagacctgatctttggaaaaaatatttgaataataaaaaaaatgaaaaatattgaa

SEQ ID NO: 226934 - DNA, 448 bp, Unknown
  Bacterial polypeptide expressing nucleotide sequence isolated from the Sargasso Sea
ttatctaagtccaaagggtaagttgttcaatcatcaattagcaaaacaactatctcaagaaaaaacaataaatataatttgtggacactttgaaggagttgatgaaagattgttaaaaacaagaaatattgaggaagtaagtataggagactttgttttatctggaggtgaaggagcttcgtttgtaattcttgatgcaattttaagatttattcctggtattcttggtaatacaaattcagctaaagaagaaagttttgaaaacggacttttagagtatcctcaatttacaaaacctcaaatatgggaggaaaaaagtgttccagacgtgctattatcaggcgatcacgccaaaattaaagactggcgtttatctcaatctgaggctataacacgcgaccgaagaccggatttgtggcaattatataaaaagactaaagagaattaa

SEQ ID NO: 226935 - DNA, 584 bp, Unknown
  Bacterial polypeptide expressing nucleotide sequence isolated from the Sargasso Sea
agttataaatataagagactctgctgatgataaacacaaaacagtagatgatacgccattcggtggaggattgggaatgttaatgagacctgacactctggcaaaatctattgataaaaacacaaaaaaaaaagaaaaaatattttacttatctccaaagggaaaattatttaaccaaaaaaaagcaaaattgctttcaaaagaaagctgtgtaaacttgatatgtggacactttgaaggtgttgatgaaagattattaaaaacaagaaatattgaggaaataagcattggagattatattttatcaggtggtgaaactgcagcacttacaattatagacagtattttaagactcttaccaggagtgcttggtaacaagcaatctattacagacgaaacatttgaaaataatttgcttgaatatccacagtacacaaaaccacaaatttgggaggaaaaaagtgttcctgaagtcctattatcaggagatcatgcgaaaattaaagactggcgtttgtctcaatctgaggctataacacgcgaccgaagaccagatttgtggcaaaaatataaaaaaaattaat

SEQ ID NO: 226936 - DNA, 715 bp, Unknown
  Bacterial polypeptide expressing nucleotide sequence isolated from the Sargasso Sea
gaaatctttgattcactcaagtacggtgttgtagaaaaggcaataacaaaaaaattaatcactataaaattaattgatttaaaagaattttctttaaatagttatggaagtcttgatgactctccttatggtggaggcgcaggcatggtaatgtctccagaaccaatatcaaatgctttaaaaggtattaataaatcatctcatattatttacctttctcctcaagggaaaacccttgatcaaaaaaaggcaaaacaactatctagaaaaaaggagatgacccttatatgtggtagatacgagggcatagatcaaagaattataaataattatgtagatgaagaaatttcgataggagattatgtcttaagcggaggagaaattgctggttgtgttcttatcgattgtatagctagaaatattaaagatgtattaggaaatgaagaatcacttgaaaaagatagcttatctaacggcagacttaaagggcatcttttcacaagaccagataaatttatgaaatgtgaggtgccaaaagtgctaatgtccggagaccataaaaaaattgaagaatggagaattggaaatagtctttgggtaacaaaacaaaaacgcccagatttatttcaagatttacaactttcagagaaagaaatgatattattacgtcaatacgaagccggcatagcaaatcaggaaacaaaagatgactaaa

SEQ ID NO: 226937 - DNA, 688 bp, Unknown
  Bacterial polypeptide expressing nucleotide sequence isolated from the Sargasso Sea
atgttacgcttcgagattcttacattattcccggaaattttttcttctttcctggaagaaagtttaataaagcgtgctattgaaaaagagcttctgagcgttagccttgtaaattttcgcaaaaatgggcttggcaagcatcttcaagtagatgattcaccatatggtggcggtccaggaatggttttgcgtattgagccggtttatctcacacttgaagaacagaaaaattttcatcaaagtcagggaagaaaaactcatacgatattggtttcgcctcagggacagccttttacacaaaaaaaagcaaaagaaatgagtcataatgattctgttttgacactagtatgtggacgttacgaagggtttgatgaaagaataagaagccttgtagatgaggaaatttctggaggtgattttgtttgcttgggcggtgaagttatttctatggtaataattgaatccgtaagtcgtcttctaccagactttcttggtaataagaaatcatctgagcaggagtcattttctaaatctctactagaatatccacaatatacacgtccagcaaattatgctggtatgggtgttccggaagaattgttgtcaggtaaccatggtaaaatttctcagtggcgtcagcagcaggccttatcacgaacaaaaaaaagacgtcctgatctaatttgaa

SEQ ID NO: 226938 - DNA, 439 bp, Unknown
  Bacterial polypeptide expressing nucleotide sequence isolated from the Sargasso Sea
tatgttgcaagctcaagtatttacactttatccagaaatttttcctggacctttagacaaaggtctttatggaaaagcaagggctaaaaaattgtggagtttaaatgtgataaatattagagacgcagcaactgacaaacataaaactgttgatgatacaccgtatggtggtggaacaggaatgttacttaaacctgatgttttagctaattcaatcgatcaaaacttaaataaaggagatagaattttttatctttcacctaaaggtaaaatatttgatcaaaagctcgctcaggatttatctaaagaaaagtcattttctctaatttgtggtcattttgaaggcgttgatgagagagttttatctactagaaatattgaagaattaagcataggagattatgtattgtcaggtggggaaaccgctgcttttgtagtt

SEQ ID NO: 226939 - DNA, 380 bp, Unknown
  Bacterial polypeptide expressing nucleotide sequence isolated from the Sargasso Sea
gatgtggactgctcaaatttttacattataccctgatttatttcctgggccattaaatcatggaatttacggcagggctttgaagaaaaaaatttggaaactcaaggtcattgacatccgaaaatatgcttttgacaaatataaaactgttgatgatactccttatggtggaggtgcgggcatgttaatgaaagctgatgtgttagcaaattctattgatcaaaatctcaaaaaaaaagataaaatttattatctttctccaaaaggtaaaaaatttagtcaatcatttgcaaaaaaattgtcgaaaaaaaaaacattaaacttgatctgcggacgcttcgagggcgtggatgaacgtttattaaatttcagaaatatag

SEQ ID NO: 226940 - DNA, 468 bp, Unknown
  Bacterial polypeptide expressing nucleotide sequence isolated from the Sargasso Sea
tatgtggcaagctcaagtgtttacactttatccagagattttccctggtcctttgtctaaaggactttatggaaaagctttatcaaataatttatggaaacttaaagtcgtaaacataagagatgcagctgacgacaaacataaaacagtagatgatacaccttatgggggtggttcagggatgttgttaaaagcagatgttctcgcaaagtctttagatgaaaacaaaaatgagagtgagagaattttatacttatcgccaaaaggaaaaaaatttgatcaaaatttagcaaaagagctagctaatgaaaaatctctatctttaatttgtggtcattttgaaggtgtggacgaaagaatactttcaacaagaaatattgaggaaattagtattggagattatgttttgtcaggcggggagtcagcagcatatgtagtaatagatagtattttaagattgctgccagg

SEQ ID NO: 226941 - DNA, 901 bp, Unknown
  Bacterial polypeptide expressing nucleotide sequence isolated from the Sargasso Sea
aattttgaaataattactttgtttcccaaagcttttgaattaataaataatttaggtgttataacaaaagctttagaaaaaaaattgattaatgttaacttgcatgatttaagagaatacggaaaaggctcttataagcaagttgacgataagccttacggaggaggttcagggatggttttaaaaccagaaccgatttataaggctcacgattcaataaaaaaattaccaaaaagtaaaactttgttaatgaccccgcaaggtaaagtcttgaagcaaaaggatcttttaagatggtcttctttggatcaattaataattatttgtgggcaatacgaaggttttgatgaaagggttagatacttggctgatgaagaagtttctataggtgattatgtactttcaggaggtgaaattcctgctatatcaataattaatggcttgacaagattattgccgggaacccttggagatccacgctctttaattgatgaaagtcataattcttctttgttggaatatcctcattacacaagacctcctatttttagagaaatgaaagtaccagatattctagttagtggtaatcatgaagagattaaattatggcgaaagcaaaaaatgttagaaagaactttggatagaaggaatgacttgatttctaatgaagactataaaaaagtaccaaaaagtaagagaataaataaagactcaaatgaaatgatgaaatttcgtattggaaatggatatgatattcatagattagtagagggcagggacttaataattggaggagttaaactgaatcatcctgataatttaggtcttgatggccatagtgacgctgacgtacttagccactcaatcatggatgcgttattaggagctctatctcttggag

SEQ ID NO: 226942 - DNA, 377 bp, Unknown
  Bacterial polypeptide expressing nucleotide sequence isolated from the Sargasso Sea
atgtggtcatttcgaagggattgaccagagacttttagaaaaaagaaatattcaagaatatagcatcggagactatatattatctggtggtgagactgcttcttttgttttgattgactcaataattcgattactaccaggtgttttaggaaatgaaaattcttcaaaagatgaaagtttcgaaaacaatctattagaatatcctcaatacacaaaacctcaaaattgggaaggaaaaagcactccagaggtacttttatcaggagatcatgctaaaattaaagactggcgtttatctcaatctgaggctataacacgtcgccagagacctgatctttggaaaaaatatttagaaaaaaaaaatgaaaaatattgaa

SEQ ID NO: 226943 - DNA, 520 bp, Unknown
  Bacterial polypeptide expressing nucleotide sequence isolated from the Sargasso Sea
cgtccgtacggcggcggtccgggcatggtgatgctggccaggccgctcgaagccgcgatcgatgccgcgaaagcggcgcaggcggagcagggcatcgcgagcacgcgtgtcgtgatgatgtcgccgcagggcgcgccgctcacgcacgatcgtgcggtgcggatggcgcaggaacccggtgtcgtcgtgctgtgcggccgctatgaagcgatcgaccagcgcctgctcgatcgttgcgtcgacgaggaaatcagcctcggcgatttcgtcctgtccggcggagaattgccggcgatggcgatgatggatgccgtcgtgcggttgctgcccggtgtgctgaacgattcgctgtcggcggtacaggacagtttcgctgacggcctgctcgattgtccgcactacacgcgccccgaggaatacgacggtgtgcgcgtgccggacgtgctgctcggcgggcatcatgccgagatcgaaagtgcttatcacagtgaaagcctatcaagaggtcattatcgataat

SEQ ID NO: 226944 - DNA, 396 bp, Unknown
  Bacterial polypeptide expressing nucleotide sequence isolated from the Sargasso Sea
aagatttttcaaaaaaaaaatctatatctttaatatgtggccatttcgaaggagtagatgaaagagttttgactacaagaaatattgaagaaataagtataggagattatgttttgtcaggaggtgagacagctgcattagttgttttagatagcatactaagacttttacctggagttttaggaaataataaatcttcagttgaggaaacgtttgaaaatggtcttttagagtatcctcaatacacaaaaccacaaatatgggagaaaaaaacagtgcctgaagtattattatctggagatcatagtaaaattaaagactggcgtttatctcaatctgaggctataactcgcgtccgaagaccagatttatggcaaaaatataagaaagactgaa

SEQ ID NO: 226945 - DNA, 679 bp, Unknown
  Bacterial polypeptide expressing nucleotide sequence isolated from the Sargasso Sea
atgaatttttacacattatctctttttcccaacctgatcaatgattcacttaaagaaggaattattaaaaatgccatcaaaaataaacatattaagttatacaattatgatttaagagaatttggtgtcggtaaacacaagcaattggatgatacaagttatggaggtggccctggaatgatacttaaaccagaaccaatctttgaggcagttcaacatatcaaacattctaataatatcactaattgtccaataatcttgatgagcccacaaggcaaagttttaaaacaatctatagcaaaaaattttattacagaaactgatttgattataatttcaggtagatacgagggcgttgatcagagagtgatatcaaatttgattacacacgaaattagtattggagattatattttatcaggtggagagcttcctacagctatatttattgaagttttatcaagaacaattccaggagttttaggtaataaggaatcactatctgatgaatcacttaataataacaaaataaaatatcctgtttacacaaagcctaaaagtttcaagggaatggatgttccagaagttttgttgtctggaaatcatgaacaaatatcaaaatggagattaaagaattctgatattaacactaaaataaaaagacctgatctaatttgat

SEQ ID NO: 226946 - DNA, 475 bp, Unknown
  Bacterial polypeptide expressing nucleotide sequence isolated from the Sargasso Sea
aaaaaaggagaaaaaattatttacttatctccaagaggtaaaaaatttgatcaaaacgttgctagatctttaagtaaagaaaaaaacttaaaccttatctgtggtcattttgagggtgttgatcaaagactcatagagacaagaaatattgaagaatatagtctgggcgactttgtcttatcagggggagagcctgcttcttttgtgtttgttgatgctttagttagattattacctggagttctcggaaataaagactccgtcaaagaagaaagttttgaaaatcaccttttagaatatcctcaatatactaaacctagagaatgggaaggtaaaagcccaccagaggtcttattttcaggtgatcacgctaaaataaaagggtggcgtttgtctcaatcagaggctataacacgtcgccagagacccgatctttggaaaaaatatttagagaaaaaagatgaaaaacattgaa

SEQ ID NO: 226947 - DNA, 467 bp, Unknown
  Bacterial polypeptide expressing nucleotide sequence isolated from the Sargasso Sea
aacccgcgtgatttcacgacggacaactaccgcacggtcgacgatcgtccgtacggcggcggtccgggcatggtgatgctggccaggccgctcgaagccgcgatcgatgccgcgaaagcggcgcaggcggagcagggcatcgcgagcacgcgtgtcgtgatgatgtcgccgcagggcgcgccgctcacgcacgatcgtgcggtgcggatggcgcaggaacccggtgtcgtcgtgctgtgcggccgctatgaagcgatcgaccagcgcctgctcgatcgttgcgtcgacgaggaaatcagcctcggcgatttcgtcctgtccggcggagaattgccggcgatggcgatgatggatgccgtcgtgcggttgctgcccggtgtgctgaacgattcgctgtcggcggtacaggacagtttcgctgacggcctgctcgattgtccgcactacacgcgccccgaggaatacga

SEQ ID NO: 226948 - DNA, 778 bp, Unknown
  Bacterial polypeptide expressing nucleotide sequence isolated from the Sargasso Sea
ggttttatttttgatgtaattacattgttccctaaagcttttgaattactaaataatttaggggtcataacaaaagctctagataagagtttgatcaatgtaaatttacatgatttaagagaatatggagaaggttcttacagacaagtagacgataagccttatggaggaggagcaggtatggtattaaaacctgaacctatttataaggcacatgaatcaattagaaaattacctaaaagtaaaactttgctgatgaccccacagggtaaagttctaaagcaaaaggattttgcgagatggtccacgttggatcaaataataattatttgtggtcaatatgaaggttttgatgaaaggattagatttttggctgatgaagagatatcgataggcgattatgtactttctggaggtgaaatacccgctatatcaataattaacggtttgactagattattgccaggaactcttggtgatccagactccttagtcgatgagagtcataattcttctttattagaatatcctcaatacacgaggccgttaacttttaaagatatgaaagtgccagatattctagtgagcggtaatcatgaagagattaaatcgtggagaataagaaaaagttttgaaagaacatttgagagaagaagtgacttaatttcaaatgaaaactacaaaaaatacccacaaagtaagagaataataaaagaaaataatcaattcatgaaatttagaataggtaatgaatacgatatttaccctgattggtagt

SEQ ID NO: 226949 - DNA, 565 bp, Unknown
  Bacterial polypeptide expressing nucleotide sequence isolated from the Sargasso Sea
gatggtaatggaagctgaacctatcataaaagcagtcgaaaacgctaaaaagcagtccaataactctcatgtgatctatttatctcctcaaggacaattgtttaatcaagaaaaagcaaaagagttaagtaataaatccgatattattttaatttcaggaagatatgaaggaatagatcaaagagtagttgatcatattgtagatgaagaaatttctataggagattatgtgatatctggaggagagatagcttcattgattctcattgatagtattagtagacaaatagaaggtgtagtaggcgacttccagtctgtagaagatgactccttgtatgatggccttttgaaacatccccaatatacaagacccgaagaatctgagtatggcattgttcctaaaacgctacttagtggaaatcataaatcaattagatcttggaagttaaggaaatctattagcaatacattaacgaaaagacccgatttattagaaaaagcaaatttagatatggagaagaagaaaattttagaggagattaaaaaagatgaagaaaaaacttaa

SEQ ID NO: 226950 - DNA, 691 bp, Unknown
  Bacterial polypeptide expressing nucleotide sequence isolated from the Sargasso Sea
atgcttaacataaaaatattaacagcataccccgagatgttcccgggcattctagagcattcattaataggaaaagctctaaaagaaaacatttttaaaatagaaactattgacttacataaatttggatttgatgatcgaatgagtatagatgatgaaccttttggaggtggcccgggaatggttctgagacctgatgtagttgaaaaagctctaaactctattcctaaaacacataatatcaattctacaaaaatatatcttaccccttctggaactccattaaatcaagaaaaactaggtaatttagctaatttggagaaaatgactattctttgtggtcgttttgagggtgtagatcaaagggccatagatgttttagattttgaagagattagtataggtgattatgttcttgcgggtggagagattgctgctcaagtactacttgaaggttgtattcgtctcattcctggagtattaggacatccgaaaagtttattagaagagagtttttctaataatcttctagagtatcctcaatataccagaccaaagtcttgggaggactctctaggaaaaaaacatgatgtaccagaggttttaacatcagggcatcatgaaaatattaaaaaatggagacttaacaagtcagtgaaaaaacaaaaaatattcgacctgatttgttagt

SEQ ID NO: 226951 - DNA, 639 bp, Unknown
  Bacterial polypeptide expressing nucleotide sequence isolated from the Sargasso Sea
acagcattatagaacgtgcctgcgaaaaaggtttgttggatatacgggtgcatgacctgagggattatacgttaaataagcaccgcaaggtagatgatacgcctttcggcggtggtgtaggtatgataatgaatgtagagccaattgacctggctcttaaagccataaagaaggaagtgccgaaagctaggacgatcttgctttcaccaagtggtagtactctcagtcagaaaaaagccaatgagctttctaatcatgaaagtttgatcctgatttgtggtcgctacgaaggcattgatgagcgagttcgattacactttgcggatgaagaaatttctattggcgattatattttgactggaggagaaattccggcaatggttctggttgaagccgtgtccaggttaataccgggtgttttgggagattctgagtctattttggaagagtctttctcagagggaatactggagtatccgcagtatacgagaccaagagaatataaaggatttaaggttcccgatgttctggtttctggtgatccaaaaaaaattcgcgaatggcaaaaagctgaagcattgaaaaaaacggctagcgtgcgccctgatctactcgaaaaaatgaaacggtcgcgttagg

SEQ ID NO: 226952 - DNA, 617 bp, Unknown
  Bacterial polypeptide expressing nucleotide sequence isolated from the Sargasso Sea
tatgtggcaagctcaagtatttaccctttatccagaagtttttcctggtcctttatctagaggactttatggaaaagctttatctagtgatttgtggaaacttaaagttgtaaatataagagactcagctgatgacaaacataaaactgtagatgatacaccatatggaggtggctcaggaatgttgttaaaagcagatgttcttgcaaagtctttagatgaaaataaaaatgagaatgaaagaattttatatttgtcaccaaaaggaaaaaaatttgaccaaaatttagccaaagaactagctaatgaaaaatctctgtctataatttgtggtcactttgagggtgtagatgagagaatactttcaacaagaaacattgaagaagttagtattggagattatgttttatctggcggggagtcggcagcatatgtattgatagatagtattttaagattactgccaggtgttttgggaaatgaaaactctaaattagatgaaacctttgaaaatggccttctagagtatcctcaatatacaaaacctcagatttgggaggaaaaagctgtgccagatgtactattatcaggggatcataataaaattaaacactggc

SEQ ID NO: 226953 - DNA, 502 bp, Unknown
  Bacterial polypeptide expressing nucleotide sequence isolated from the Sargasso Sea
tgatgcttgttacaagaatataaaatctaaagatagttatcctatgatatatttaagtcctcgcggtactcctttaactcaaagtaaagttattaatttttcaaagatgaaaggaattaatattctttgtggtagatatgaaggcattgatcaacgtatactcgatttctatcctattgaggaaataagtattggagactatatactggcgggtggtgaaatagcttcccaggttttagtggagtcaatagtgagactgttgccaggaacacttggtgacatgaagtctgccagttcagagaccttctcaaaagaccttcttgaataccctcagtatacaaggcctaaaaaatggaaaaatttgacaattccagacatattgctctctggaaatcacagaaatattagtgagtggcgcttaaaacaatctgaaaaactgacacagaaagttaggccagatttatggaaaaactacaaaaaaagcaagacaaggaagaaataa

SEQ ID NO: 226954 - DNA, 610 bp, Unknown
  Bacterial polypeptide expressing nucleotide sequence isolated from the Sargasso Sea
attagagaaaaaaatatggaaattggaaacagtaaatattagagattatgcaactgataaacataagacagttgatgatactacctacggaggaggttcgggtatgttaattaaacctgatgttcttgcaaattctttagacaaaaatttaaagtctaaagaaaaaataatttatttaagtccaaaaggaaaattatttaaccaacaattagcaaaagaactttctaaggaggtaactattaatttaatctgtggacattttgaaggtgttgatcaaagagttatagaatcaaggaatatagaagaaataagtataggcgattttgttttatccggtggagaaagtgcagcatttgtaatgttagattcgattataagattattatcaggagtgcttggaaatgaaacatcaatggaagaagaaagctttgagaatggacttttagagtatcctcaatatacaaaacctcaaatttgggaagaaaaaacagttccagatgtattattatctggagatcatgcgaaaattaaagactggcgtttatctcaatctgaggctataacacgcgaccgaagaccagatttgtggcaaaaatataaaaagaattaa

SEQ ID NO: 226955 - DNA, 415 bp, Unknown
  Bacterial polypeptide expressing nucleotide sequence isolated from the Sargasso Sea
aaaaaagcaaaagctttatccaaagaaaaaattgtcaatttgatatgtggccattttgaaggagttgacgagcgtattttggaaacaagaaacatcgaagaaataagtattggagactatattttatcaggtggggaaacagcttcctttgtattgattgatgccgttttgagattgttaccaggtgttctgggaaatgaaacatcaaaagaggaagaaagttttgagaatggacttttggagtatccccaatatacaaaacctcaaatctgggaaaaaaaaagtgtaccagatgtcttattatctggtgatcatgctaaaattaaggactggcgtttatcacaatcaaaggatataacacgacgccgacggcctgatttatggaaaaaatatttggaaaaagataaaaaatgaa

SEQ ID NO: 226956 - DNA, 699 bp, Unknown
  Bacterial polypeptide expressing nucleotide sequence isolated from the Sargasso Sea
tgacgtggactgcccgagtattcactttgtatccagaaatatacccaggtcctttgaataaaggactttatggaaaagctttaaaaaagaaattatgggaattagaaattatagatattcgggactcagccactgacaaacacaaaacagtcgacgacactccatttggtggaggcagcggaatgttattaaaacctgatgttttaggaaaatctatagacgaaaatacaaaaaaaggtgaaaaaattttctatctctcaccaaaaggaaaaagatttgatcaaaaaatcgcaaaagaaatatctagagaaaaagttattaatttattatgtggacattttgagggagtagatgagcgaattttggaaacaagaaatatagaagaaattagcattggagattatattttatctggaggagagtcagcttctttcgttgttatcgatactgttttgagattgctacctaacatattaggaaacaatttatcaaaaaatgaagagagcttcgaaggagaattattagagtatcctcaatatacaaaacctcaaatttgggaaaaaaaaagtgtaccaaaggtacttttatcaggagatcatgctaaaattaaggactggcgtttatcacaagcaaaggatataacacgacgccgaagaccagatttatggaaaaaatatttaaataaaaacaaaaaatgaa

SEQ ID NO: 226957 - DNA, 488 bp, Unknown
  Bacterial polypeptide expressing nucleotide sequence isolated from the Sargasso Sea
gatgagctgctttaattttgatgtaattacattgttccctaaagcttttgaattaataaataatttaggggtcataacaagagctctagataagaatttgatcgatgtaaatttacatgatttaagagaatatggagaaggttcttacagacaagtagatgataagccttatggaggaggagcaggcatggtattaaaacctgaacctatttataaggcatatgattcaattagaaaatcacctaaaagtaaaactttgctgatgactccacagggtaaagtcttgaagcaaaaggattttgcgagatggtccactttggatcaaataataattatttgtggtcaatatgaaggttttgatgaaaggattagatgtttagctgatgaagaggtatcgataggcgattatgtactttctggaggtgaaataccagcgatatcaattattaacggtttgactagattattacccggaacacttggggatc

SEQ ID NO: 226958 - DNA, 709 bp, Unknown
  Bacterial polypeptide expressing nucleotide sequence isolated from the Sargasso Sea
tatgaaatttaagattcttactttatttcctgaaatgtttcctgggcccttggctcactcgatttcaggaaaagcattatcaaaaaagttatttgagatagaagtaataaatatcagagatttttcagataataaatcaaattctgtagacgaaaaacccttcggcggaggagcaggaatgataatcaaacctgatgttatgcaaaatgctttggattatgcaacaaaagataatattaaaaataaaaaaattatatttttatctccaggaggtcaaacagttaacactgacgtagtcaataaattagttacatttgatgaattagtaattatatgtggaagatatgagggaattgatgagagatttttaaaatataatgccatagaagaatattcaatcggtgatttcattctatctggcggagaaattccctcaattattttaattgatacttgcgtaagattaattcctgaagtattaggtaataaaaatagtttgaaatttgaaagttttcaaaaccatttattggaatatccacagtataccaaaccaagcaattggaaaggtcttagtgttccagatgttcttcttagtggaaaccataaaaaaatttcagattggaggttgataaaatcaatcgaaaaaactaaaaatgtgagaccagatttgtacaagctatactgtaagatgaataagggggaaaaatga

SEQ ID NO: 226959 - DNA, 367 bp, Unknown
  Bacterial polypeptide expressing nucleotide sequence isolated from the Sargasso Sea
atgcggattgatatcctcacactattccccgagatgtttaagagtttccttgaaggaagcctcattggttcagcacgcaataaagggattctggatatccgggtgacaaacattcgtgattttgcacgaggtgttcatcgacaggtagacgaccggccttttggtggaggtccgggaatgctccttatgcctggtccaattgttgaaggtgtggagtccattcagggagacggtgaacccgggcatcttgtcatgctcactcccgctggtcgtccactgacacaagagtctgtagaggctctggcgaaacaagagcgtattgtactgatttgtggtcgttatgaaggttttgatgaacgcgtcaaga

SEQ ID NO: 226960 - DNA, 406 bp, Unknown
  Bacterial polypeptide expressing nucleotide sequence isolated from the Sargasso Sea
tatgccaaagaactttcaactaaaaaaagtttaaatattatttgtggtcatttcgaaggtattgatgaaagaataattcaaagtagaaatatagaagaaatcagtataggagattttgtgctatctggaggagaagctgcaacttttgttattttagatgcaattttacgatttattccaggggtgttaggtaattacaaatctatacaagaagaaagttttgaaaatggacttttagagtatcctcaatatacaaagcctcaaatttgggagagtcaaagtgttccagaagtactattatcaggagatcacgccaaaattaaaggctggcgtttatctcaatctgaggctataacacgcgaccgaagaccagatttgtggcaaaaatataaaaaattaaaatgaa

SEQ ID NO: 226961 - DNA, 551 bp, Unknown
  Bacterial polypeptide expressing nucleotide sequence isolated from the Sargasso Sea
acacaaaactgtagatgacacactttatggagtgggatcaggaatgttactaaaagcagatgtccttgctaaatcaatagatcaaaacagaattgaaggtgaaaaaattttatatttgtctccaaaaggaaaaaaatttgatcaaagctatgcaaaaaaattagcaactacaaaatccgtatcacttatttgtggtcattttgaaggagttgacgagagagtattatctacaagaaatatagaagaaatcagtataggagactatgttttgtctggaggcgaaacagctgcatatgttgttattgatagtgtgctcaggcttttaccaggggtattaggaaacaataattctaagatcgaagaaacttttgaaaatggtctattagagtatccgcaatatacaaaacctcaaatttgggaggaaaaatcagtaccagatgtactattatcaggtgatcatagtaaaattaaagactggcgtttgtctcaatctgaggctataacacgcgaccgaagaccagatttatgggaaaaatataagaagaactaac

SEQ ID NO: 226962 - DNA, 584 bp, Unknown
  Bacterial polypeptide expressing nucleotide sequence isolated from the Sargasso Sea
tatgtttgaagtaaaaatttttactttgtatccagacttatatcctgggccttttaatacaggtatttataaaaaagccctgcaaaataaaatttggaatttaaaagtgataaatataagagattactcaactgataaacatagttcagtagacgataaaccttttggtggaggaagcggaatgctattgaggccagacgttgtagcttcagcactagacgcaaatctgaaaagtgatgaaatcacaatttatctatctcctaaaggaaaaaggtttgatcagaaagttgctaaggagtttagtaaaaaaaagaaactaaatttattatgtggtcattttgaaggcattgatcaaagacttttagaaacaagaaacattgaagaatatagtattggtgattttatattatcaggtggcgaaacagcatcatttgtttttatagacaccgttgttcgactattgcctggggttttgggaaatgataattctgcaaaagaagaaagttttgaagattatctattagaatatcctcaatatacaaaacctaaagattgggaaggaaaaagcactccagaagtacttt

SEQ ID NO: 226963 - DNA, 496 bp, Unknown
  Bacterial polypeptide expressing nucleotide sequence isolated from the Sargasso Sea
tatgtggcaagctcaagtgtttacactttatccagaagtttttcctggacctctttctaagggtatgtatggaaaagcaatgtcaaaagatttatggaatttaaaagttgtaaatattagagatgcggctgaagataaacacaaaactgtggatgatactccttatggaggaggatcaggaatgctattaaaaccagatgtccttgctaaatcattagatcaaaataaaattgaaggtgaaagaattttatatttatctccaaaaggaaaaaaatttgatcaaaattatgcaaagagattggcaaaagaaaaatctatatcacttatctgtgggcatttcgaaggagttgatgagagagttctatccacaagaaatattgaggaaattagtataggagattatgttctgtctggaggtgaaactgcagcttatgttgttatagatagtgtgctcaggcttttgccaggagtattaggaaatgataattctaggatt

SEQ ID NO: 226964 - DNA, 648 bp, Unknown
  Bacterial polypeptide expressing nucleotide sequence isolated from the Sargasso Sea
aatgtttttatctcgtatatttactttatatcctgaatactttcctggttatttaagcaaaggattatttggaaaagctctgaatgaaaaaatttggaatttagaaactgtaaatataagaaactattcatctgataaacacaaaacagttgatgatacaccctatggaggtggaaatggtatgttaattaaagctgatgttttggcaaaatctttagatgaaaatataaaagaaaaagaaaagataatttatttaagtccaaaaggtaaattatttaatcataagtatgccaaggaactttcatcagaaaaatctttaaatctcatttgtggtcattttgaaggcattgatgaaagaataattgaaagtagaaatatagaagaaattagtattggtgattttgttttgtctggaggtgaagcagcagcttttataattttagacgcggttttaagatttcttccaggagttttaggaaatgaaaattctacagaagaagaaagttttgaaaatgggcttttagagtatccccaatacactaagccccaaatttgggaagataaaagcgttccagatgttctattatcgggcgatcatgccaaaattaaagactggcgtttgactcaatctgaggctataacacgcga

SEQ ID NO: 226965 - DNA, 694 bp, Unknown
  Bacterial polypeptide expressing nucleotide sequence isolated from the Sargasso Sea
aatgcgtaaaaattctcaaacattcaatgttaatatcttaacattattcccagaaattttccctggatctctcgatgtgtcactattaggaaaagcattgaggaaaaaagtgtggcagattaacacaattaacattagagattttgcaattaataaacaaaaaagtgtagatgatactccctatggtgggggagcaggaatggtaatgaggcctgatataattagcctagctcttgaatcaatttccaatctagaccttccaaaaatctgtctaagtgctaaaggctcaaaactaacccaatcaatggctgtaaaactttctaaagaaagtggcttaattcttctttgtggaaggtatgaaggtattgatcaacgagtaatagactataataattttgaagaaataagtataggagattatgttttaccaggaggggaaagcgctgctattgttttgctagaaagtgtgttaagattacttccaaatgttttaggaggagaaaacactttagacgaagaaagttttaatagtgaaatgttacttgaataccctcattacactaagcctaaagaatggaaaggaattcatgttccagaaattttagtatctggcgatcataaaaaaattcaaacttggagaaatgaaaaaaggctggaaattacaaaaaagaaaagacctgaccttataaactag

SEQ ID NO: 226966 - DNA, 349 bp, Unknown
  Bacterial polypeptide expressing nucleotide sequence isolated from the Sargasso Sea
tgaaggcgttgacgatagagtattatctacaagaaatatagaagaagtaagtataggagactatgttttgtctggaggcgaaacagctgcatatgttgttattgatagtgtactcaggctattaccaggggtattagggaatgataattctaagatcgaagaaacttttgaaaatggtctattagagtatccgcagtatacaaaacctcaaatttgggaggaaaaatcagtaccagatgtactattatcaggtgatcatagtaaaattaaagactggcgtttatctcaatctgaggctataacacgcgtccgaagaccagatttatgggaaaaatataagaaagactaa

SEQ ID NO: 226967 - DNA, 703 bp, Unknown
  Bacterial polypeptide expressing nucleotide sequence isolated from the Sargasso Sea
gatgctagaagtaaaaatttttactttatatccagatctatttcctggaccattaaatacagggatatttaaaaaggcaaaggaaaacaagatttggaatttaaaagtaattaatattagagattattcaaaagataatcacggtactgtagacgacactccttttggcggaggaagtggaatgcttttacgtcctgatatattagcatcagcgcttgataataatataaaaaaaggagaaaaaattatttacttatctccaagaggaaaaaaattcgatcaaaacgttgctagaacgttaagtaaagagaaaaacttaaaccttatctgtggtcattttgaaggtgttgatcaaaggcttctagagacacgaaatattgaagaatatagtttaggtgatttcgttttatctgggggtgaaccagctgcttttgtattagttgacgctttaattagattattacctggagtacttggaaacaaagactccgtcaaagaagaaagttttgaaaatcatcttttagaatatcctcaatatactaaaccacgagaatgggaaggtaaaagcccaccagaggtcttattttcgggggatcacgctaaaataaaagggtggcgtttatctcaatctgaggctataacacgtcgccagagacccgatctttggaaaaaatatttagagaaaaaaaatgaaaaacattga

SEQ ID NO: 226968 - DNA, 567 bp, Unknown
  Bacterial polypeptide expressing nucleotide sequence isolated from the Sargasso Sea
tatgtttagagctcaagtatttacactttatccagaagtttttcctggacctttagctaaaggtctttatgggaaagcattagctaataaattatgggatttaaaagtaattaatattagagattcagcgactgataaacataaaactgttgacgatactccttatggtggaggatcaggaatgttacttaaagctgatgttttggcaaaatctttagatcaaaatattaaaaaaggagaaagaattttttatctttcaccgaaaggtaaaaaatttgactacaaaatagctcaagacttatcaaaagaaaaatctatatctataatatgtggtcactttgaaggagtagatgaaagagttttgagtacaagaaatattgaagaagtaagtataggagattatgttttatctggtggagagacagccgcattagtagtgcttgatagtgtactaagacttttgcctggagttttaggaaatgataaatcttctattgatgaaacctttgaaaacagtcttttagagtatcctcaatatacgaagcctcaaatatgggagaaaaaatc

SEQ ID NO: 226969 - DNA, 559 bp, Unknown
  Bacterial polypeptide expressing nucleotide sequence isolated from the Sargasso Sea
atggtgatgatggctgaaccaataattaatactcttaaagaaattaataataaaaatactggaaaaataatttatttatcaccccaaggaaaaaaacttaatcaagaaaaagttaaatctttatctaaattaaaaaatatcactctaatctgcggaaggtatgaaggaatagatcaaagagtaatagatgaatatgttgatgaggagctatcaatcggagacttcattttatctggaggtgaatatgctgcaatttgtataattgacgctatatcaagacatattccaggaacattaggtaacaaaaactcttatttaaaagatactttttcaaacggactcttaaaatgggatatatatgctaagcctgaaaaattaggttcattaaaggttcctgatgtgcttctttcaggaaatcataaagaaatttcaaaatggagagaggaaaattctttacttaaaacttttttgaaaagaccagatttatttgaaaaaataaaattatcaaaaaaacaaaaaaaactcttggaagaattggcatctaaggctatcctatagc

SEQ ID NO: 226970 - DNA, 697 bp, Unknown
  Bacterial polypeptide expressing nucleotide sequence isolated from the Sargasso Sea
atgtggaaggctcgagtatttactttgtatccagaaatttttccaggacctttaaacaaaggtttatatggaaaagcattagaaaaaaaattgtggaatttagaagttataaacatcagggactctgcagaagataaacataaaacagtagatgatactccattcggtggtgggagtggaatgttgcttaaaccagatgttttaggaaaatcaatagataataatataaaaaagggtgaaagaattttttatctttctccaaaaggaaaaaaatttgatcaacaaattgcaaaagatttgtcgaatgaaaaaactattaatttggtttgcgggaacttcgaaggagttgatcaacgtattttggatacaagaaatatagaggaaattagtattggggattatattttatcaggcggggagtcagcttcttttgtggttattgatgctgtattaagattgttgcctaatgttctaggtaatgaaaaatcgaagtctgatgaaagctttgaaaacggattattagagtatccgcaatacacaaaacctcaaatttgggaaaaaaaaagtgttccagaagtgctattatcaggagatcacagcaaaattaaggactggcgtttatcacaatcaaaggatataacacgacgccgaagacctgatttatggaaaaaatatttagataaagaaaaaaaatgaa

SEQ ID NO: 226971 - DNA, 583 bp, Unknown
  Bacterial polypeptide expressing nucleotide sequence isolated from the Sargasso Sea
attgttaatattagagattatgcaacagataaacacaagactgtagatgatactcctttcggaggtggaagtagcatgttaatgagaccagatgttgtagcaaattctttagataaaaatattactaataaaaatgaaccaattatttatttgacacctaaaggaaaaaagtttgatcaaacttatgcgaaaaaaataatgaataaaaatttaaatattatatgtggtcattttaaaggtgtggatcaaagattattggaaacacgaaatatagaagaagttagtataggagattatattttatcaggaggtgaaataggagctctcgtattaatcgatacaattgttagactaattcctggtgtaattggaaattctagatcattacctgaagaaacatttgaacaaaatctattagaatgcccacagtatacaaagcctcaaaaatgggaagaaaaagaggttcctgatgtgttattatctggagatcacaagaaaattaaagactggcgtttatctcaatctgaggctataacacgcgaccgaagaccagatttatggcaaaaatataaaaagaagtaat

SEQ ID NO: 226972 - DNA, 631 bp, Unknown
  Bacterial polypeptide expressing nucleotide sequence isolated from the Sargasso Sea
aatgtttaatgctcaaatattcactttgtatccagatttttttccagggtttctctctaaaggtttatatggaaaggcaatgtctgaaaacaaatggaaactaaaaattgtaaatataagagactatgcatcagataaacataaaacagtggatgactccccttatggaggaggatcaggtatgctgattagacctgatgtaatttcgaaagcaattgactctaatattaaaactgatgaaaaaataatttttctatctccaaaaggaaaattatttaatcaggaaaaagctagagaattttcaaaagaaaaaaaaattaatttattatgtggtcattttgaaggaatagaccagagggtaatagataacagaaatattgaagaactaagtgttggtgactatattttatctggaggggaaacagcagcaatgatagttatggatagtataataagattattgcctggtgttttaggaaatgaaagttcaatttctgaagaaacttttgaaaatggtcttttagaatatcctcaatacacaaaaccgcaaatttgggaaaataaagaggttcccaatatacttttatcaggagatcatgcgaaaattaaagactggcgtttatctcaatct

SEQ ID NO: 226973 - DNA, 482 bp, Unknown
  Bacterial polypeptide expressing nucleotide sequence isolated from the Sargasso Sea
tgctccatatggcggaggaccaggaatggtattgatgcctgaaccgttagacaaagctataacttctagcaaggctgatattaatgtttttctaaccccatcgggacagcaattaactgaaaaccttgtaagtgaattacttgaatacaagtcaattaatttggtatgtggaagatacgagggatttgatcaaagaattttagaaattcattctgattatgaaatttcaattggtcaatctgttgtatctgggggagaagtaccagctttgtatttattagaagcgttgattaggaaaatcccagatgtgttaggaaatcctgaatcattaataagtgaaacttttactgataacaaaattgattatccagtctatacaagacctgaaatctttaaaaataaggaagttccagccgtgcttctgtccggaaatcatcaaaaaatagatgattggaaaaagaataatttaaaagacatataaa

SEQ ID NO: 226974 - DNA, 397 bp, Unknown
  Bacterial polypeptide expressing nucleotide sequence isolated from the Sargasso Sea
ctcagacttatcaaaagagaaatcaatatctttaatttgtggccacttcgaaggggtagatgaaagagttttgactacaaggaatatcgaagaaataagtgtgggagattatgttttgtccggaggtgaaactgctgcactagtagtacttgatagcattttaagacttttgccaggggtattgggaaatgaaaaatcttctattgatgaaacctttgaaaatggtcttttagagtaccctcaatatacaaaacctcaaatttgggaagaaaagtcagtccctgaagtattattatctggagatcatgctaaaattaaagactggcgtttatctcaatcagaggctataacacgcgtccgaagaccggatttgtggcaaaaatataagaaagattaa

SEQ ID NO: 226975 - DNA, 472 bp, Unknown
  Bacterial polypeptide expressing nucleotide sequence isolated from the Sargasso Sea
tatgtggcaagctcaagtgtttaccctttatccagaagttttccctggtcctttatctaaaggactttatggaaaagctttatctaatgatttgtggaaacttaaagttgtaaatataagagattcagctgatgacaaacataaaacagtagatgatacaccatatggaggtggctcaggaatgttgttaaaagcagatgttcttgcaaagtctttagatgaaaatagaaatgagaatgaaagaattttatacttgtcaccaaaaggaaaaaaatttgatcaaaatttagcaaaagaaatagctaatgaaaaatctttgtctataatttgtggtcacttcgagggtgtagatgagagaatactttcaacaagaaacattgaagaagttagtattggagattatgttttatcaggtggggagtcagcagcatatgtagtgatagatagtattttaagattactgccaggtgtt

SEQ ID NO: 226976 - DNA, 526 bp, Unknown
  Bacterial polypeptide expressing nucleotide sequence isolated from the Sargasso Sea
tatggtgggtggaacaggaatgttgctaaaagcagatgttttagcaaatgcgcttgatcaaaaagttaaaaaaggagaaagagttttctatctttcacctaaaggtaaaaaatttgatcaaaaacttgctcaagacttgtcaaaagaaaaatctatatctttgatatgtggccactttgaaggagtggatgaaagagttttatctacaagaaatattgaagaaataagtataggagattatgttttatctggaggtgaaactgctgcattagtagtgctcgatagcattttaaggcttttgccaggcgttttaggaaatgataaatcctcacttgatgaaacctttgaaaatggtcttttagaatatcctcaatatacaaaacctcaaatatgggaggaaaaatcagtgcccgaggtattattatctggagatcacaataaaattaaagactggcgtttatctcaatctgaggctataactcgcgaccgaagaccagatttgtggcaaaaatataagaaaaactaa

SEQ ID NO: 226977 - DNA, 619 bp, Unknown
  Bacterial polypeptide expressing nucleotide sequence isolated from the Sargasso Sea
atgctgttggtatcataaaagtacagatgattctccgttcggcggtggacccggcatggtcatgcgccccgagccaatttatgctgcccttaattcactcggcctccagccaggaacaccagtcattgccctcagtgcgcaaggaaaattattcaatcaaagagaagctgagcgattagcacaaaatgatcgcgttgtcctcttatgtggaagatacgaagggattgatgagagagttttgcaaaattatattactgaagaaataagcgtcggtgactatgtcgttagtggtggtgaaatacctgccatgcttctaattgattcattaatcagacttttacctggtgcactaggacatggcgagaatgcgatatctgacgattcgcatacctccggtattttgcaattcccgcagtacacacgaccagctgtgtttcagggacttaaagtccccgatatattactttctggcgatcacaatgccatagctcaatggcgaaggaatgaggcgctcaagagaaccctcgagcggagaccagagctgcttgattccgcgagtctcgacgagaatgataagaaaaatttaggcgcaatttataaggaaaaaggtattatctaa

SEQ ID NO: 226978 - DNA, 574 bp, Unknown
  Bacterial polypeptide expressing nucleotide sequence isolated from the Sargasso Sea
atgttgcaagctcaagtatttacactttatccagatatttttcctgggcctttaggaaaaggtctttacggaaaagcgatgtctaaaaaattgtggagtttgaatgtgataaatataagagatgcagctacagacaaacataaaacagttgatgatactccttacggtggtggaacaggtatgttattaaaacctgatgttttagcaaattctatcgatcaaaacataaataaaggagataggattttgtatctttcaccgaaaggcaaagtatttaatcaaaaacttgcacaagatctatcattagaaaaatccttctcattaatttgtggtcatttcgaaggtgttgatgagagagtattatctacaagaaatattgaagagattagtgtaggagactatgtattgtcaggcggagaaactgctgcgctggtagtgcttgatagtgtattgagacttttacctggagtgttaggtaatgataaatcagcttcagaagaaacttttgaaaatggtcttttggagtatccacaatataccaaaccccagatttgggaggaaaaatcagttccag

SEQ ID NO: 226979 - DNA, 352 bp, Unknown
  Bacterial polypeptide expressing nucleotide sequence isolated from the Sargasso Sea
tttgaaggaattgatcagagagttatagattctagaaatattattgaattaagcgttggtgattttattttatccggaggcgaatctgctgcatttgtaattatagattcaattttaagattgataccaggagtgattggaaacaatcattcagttgatgaagaaacttttgaaaatggtctattagagtacccacaatacacaaaacctcaaatttgggaggaaaaaagcgttccggatgtacttttatcaggagatcatgctaaaattaaagactggcgtttatcacaatctgaggctataacacgcgaccgaagaccagatttgtggcaaaaatataaaaagaattaaa

SEQ ID NO: 226980 - DNA, 637 bp, Unknown
  Bacterial polypeptide expressing nucleotide sequence isolated from the Sargasso Sea
aatgaaaaacatagatatcataactcttttccctgaaattatcgaaggttatatcttatctcaacccttcgcaaaaaacatttcgcctgaagtaaacattgaaccacatcaattgagagatttttcaccttataaacatcggcaagttgatgataaacaatatggtactgaccctggaatggttttaatgcctgaacctttatctaatgctgtagattttatagaaaaaaaaagaaagagcaattgttataaaatcctattatcaccacaaggaaaattaatagattcagaacttataaataatatctataaaaaaccaaatttgatttttgtgtgtggtcgttatgaaggagttgatgaaagatttattgaagaaaaaattgatttagaaatttctattggagactttgtcctttctgggggtgaattaccagcacttcttattttagaagcaatgtctagattgtctcctggttttttgggtaatgaaaaatctttattaaatgattcttttggaaataatttcaagtcatcgctaaaaggacctgtttatacaaaaccaaatgattataagggcagaaaagttccagaagttttattatcaggagatcacaaaaaaatactagaatggagaaaa

SEQ ID NO: 226981 - DNA, 547 bp, Unknown
  Bacterial polypeptide expressing nucleotide sequence isolated from the Sargasso Sea
cgtgcacaggaaacaggccggctcgagctggccgtgcataatttgcgggattggacccacgatcgttaccgcaaggtggacgatgaaccctacggcggaggcccggggatggtgctcaaacccgaaccgatctttgaggcaattgaggaactgacggaagacaccacgcaggtggtgatgctttgcccgcagggcgaacccttccgacaggccaaggcgaaggaactggccgggcacgagcatttgctgctgctgtgcggcagttacgagggctttgatgagcgcgtacgctcgctggtgcatcatgaactgagcatcggcgattacgtcctcaccaacggcgcgttgcccgccatggttgtgatcgacgcggtcacccggctcctgcccggagtgctgggggatgacagcagcagtgctgaggaaagtttcagcgaagcgtcgctggaatatccgcagtacacgcgcccggctgaatatcgtggcatgaaagtgcccgaggtgctactgagcggcaaccacgccgccgtagaggcatggcgccggg

SEQ ID NO: 226982 - DNA, 718 bp, Unknown
  Bacterial polypeptide expressing nucleotide sequence isolated from the Sargasso Sea
atgaatattaatattttgacaatttttccagatatatttaacgttttaaattcaggagttgtttctaaagcaataaaacaaaaactgataactataaatcttagtgatatcagaaagaatgccatcaataaacacaatcaagttgattcaaaaccttatggtggtggagaaggcatggttatgatggcagagcctttaattaaaactattaaaaatataaacacatcaaaaagaggacatattgtttatatgtctccccaagggacaaaattaaatcaagacaaagtaatttcgctgtcaaaacttgaaaatttaacaataatttgtggaagatatgaaggaattgatcagagagtaattgacaattatgttgatgaagaaatatcaattggtgattttgttctaagtgggggagagtatgcggccatttgcttaatagattcaatttctcggcacataccaggcacattaggaaataaaaattcttatttaaaagataccttctcaaacggactattaaaagaagatgtctatacaaaaccagaaatatatgactcctttaaggttcctgacgtacttctatcaggcaaccatgaaaaaattgaagcatggaaatcagatatgtcattgattaaaacatattcaaaaagacctgatttattaaaaaatagaaaactaacaaaaaaacaaaaaaaactctggaagaatggtcatctaa

SEQ ID NO: 226983 - DNA, 421 bp, Unknown
  Bacterial polypeptide expressing nucleotide sequence isolated from the Sargasso Sea
aatgttgcatgcacgaatatttactttgtatcccgaaatgtttcctgggcctttagataaaggcttatatggaaaagccttatctaataaaacttgggatttagacgttataaatgtaagagatttttctgaagataaacataagacagttgatgatacaccatttggaggaggatctggcatgttaattaaagcagatgtattagctagatcaatagataaacatacaaataaaactgaaaaaattttttatttatctccaaaaggaaaattatttgaccaagaaactgcaagattactttcaaaggaaaaatgtatcaatttaatttgtggacattttgaaggagtagatcagcgtctattagagactaggaatattcaagaaataagtatcggtgactatgttttatctggaggtgaa

SEQ ID NO: 226984 - DNA, 502 bp, Unknown
  Bacterial polypeptide expressing nucleotide sequence isolated from the Sargasso Sea
tgccttaacttttgcaaaaaaaggatttaaaaaaaattgtaaaattttttcgctatctccaagtggaaaaaagattactcagagttttataaaaaacttagtgacctcaaaggagattattctgatttgtggaagatatgaaggcattgaccaaagatttattgactataatcatattgaggagatctccgttggagattatattctttctggtggtgaattagcttcttttattttaattgatgcttgcgtaagattaattcctgaagtattaggtaatagtgaaagtttaagatctgaaagttttcacgactacttattagaatactcacagtacaccaagccttctatttggaaaaagcttaaagtaccagaagttcttttaacaggtaatcataaaaaaatttcagattggagattgaaaaattctttagaaaaaactaaaaagataaggcctgaattatacaatttatttgttaaagaaaaaaagaggaagttatga

SEQ ID NO: 226985 - DNA, 616 bp, Unknown
  Bacterial polypeptide expressing nucleotide sequence isolated from the Sargasso Sea
gatgttgcgcttcgaggtactgacattattcccggaaattttttcttctttcctagatgaaagcctgatcaagcgtggaattgaaaataggcttctgagtgtcagtcttgtaaattttcgcaaacacgggcttggtaagcatcttcaagtagatgattcaccatacggtggcggccctggaatgattttgcgaattgagccggttaatcttacacttgaggaacagaaaaattttcatcaaagccagggacttgagacacatacaattttggtttcaccgcaaggacagccgctcactcaaaaaaaagcaaaagaactgagtcagaacagctctgttttgacattagtctgcggacgatacgaaggatttgatgaaagaataagaagtctggtagatgaggaaatatccggaggtgatttcgtgtgcatgggcggtgaagttattaccatggcaataattgaatccgtcagcaggctcctgcccggcttccttggtaatcaggaatcatctaaacaggaatcattttctcaatccctgctggaatatcctcaatatacacgtccggcaagttatgctggcatgggtgttccggaagaatgctatcggggaacatga

SEQ ID NO: 226986 - DNA, 471 bp, Unknown
  Bacterial polypeptide expressing nucleotide sequence isolated from the Sargasso Sea
gatgagagagttttttatctgttctcctaaaggtaaaaaatttgaccaaaaatttgcaaaagatcttactaaagagagaacaataaatttaatttgtggtcattttgaaggaattgatgcacgtattttaagtacaagaaatatcgaggaaattagtattggtgattatattttatctggaggtgagtccgcatcatttgttgttttagactctgttttaagattacttccaggtgttctaggtaatgaaaaatccaaagatgatgaaagctttgaaaacggtttgcttgaatatccccaatatacaaaacctcaaatttgggaaaaaaaaagcgttccagaagtactattatcgggagatcacgcaaaaattaaggactggcgtttatcacaatctaaggatataacacgtcgccagagacccgatctttgggaaaaatatttaaataacaaaaaaaatgaaaaatattg

SEQ ID NO: 226987 - DNA, 581 bp, Unknown
  Bacterial polypeptide expressing nucleotide sequence isolated from the Sargasso Sea
taataagaaagtaaagatcgacggctctccagcaggtggtggaccgggtatgattatgagagcagatatcgtgcttccaatcattgctaatatgcgacaaaatggtgatacaaggccattaattgtgccggcggcaagaggtattaaatatgatcaaaaaataacaaaagatttagtaaaaaatgaaggtttgatatttctgtgcggaagatttgagggaattgaccaaagaataattgagtcaactggagcactggagctatcaatcggtgattatattctcacaaatggagatgttgcagcgatcaatataattgactcttgtgtaagattattagatggcgtgttgagttcaaaagcttcaacaaagaacgagagctatgaggatgggctattagaatatccccaatacacattaccaagagagtatggtggattgaaaatacccgatgtacttttgtcgggagatcacggggcaataagtaaatggagatttaaccagtcccttctggctacagaaaagaacagaccagacctatacgaaaaatataagaagaaaacaagagattctggctcctaat

SEQ ID NO: 226988 - DNA, 400 bp, Unknown
  Bacterial polypeptide expressing nucleotide sequence isolated from the Sargasso Sea
agcaaaaggactttcaaaggaaaaaactgttaatttaatatgtggacattttgaaggaattgatcaaagagttatagaagcaagaaatatagaagaagtgagtattggtgactttgtattatccggaggagaaagtgctgctattgtaatgttagatgcaattatacgattacttcctggcgtactagggaatgaaaaatctgtagaagaagaaagttttgagaatggacttttagagtatccacagtatacaaaacctcaaatttgggaagaaaaaacagttccagatgtattattatcaggagatcatgcgaaaattaaagactggcgtttatctcaatctgaggctataacacgcgaccgaagaccagatttgtggcaaaaatataaaaagaattaa

SEQ ID NO: 226989 - DNA, 688 bp, Unknown
  Bacterial polypeptide expressing nucleotide sequence isolated from the Sargasso Sea
atgttgaaagctcaagtatttacactatatcctgaaaactttcctgggcctttagataaaggtctttatggaagagcaatggctaaaaatttgtggagtttgaatgtgattaatattagagatgctgcaacagataaacataagactgttgatgatacaccctatggaggtggaacaggaatgttgcttaaacctgatgtcttagctaaatctatcgatgagaacattaacgaaggagagagaattttttacctttcacccaaaggtaaaaaatttgagcaaaatcttgctatggaactatcaaaggaaaaatcattttctctaatttgtggacattttgaaggtgttgatgagagagttttagctactagaaatatagaagaaataagtataggcgattatgtattatcaggaggcgaaacagctgcaatagtagtccttgatagtgtattgagacttttacctggagttttggggaatgaaaaatctaccaatgaggaaacttttcataatggtcttttagaatatcctcaatatacgaaaccgcagatttgggagcaaaaatcagtgccagaagtgctattatcaggggatcacgctaaaattaaagactggcgtttatctcaatctgaggctataacacgcgaccgaagaccagatttgtggcaaaaatataagaaaaattaaa

SEQ ID NO: 226990 - DNA, 691 bp, Unknown
  Bacterial polypeptide expressing nucleotide sequence isolated from the Sargasso Sea
atgtttaaagtcaaaatatttactttgtatccagaattttttccaggaccttttaaaaaaggtatatacagaaaagcaattgagaaaaaaatttgggacatgaatgttataaatataagagattatgcagatgataagcataaaacagttgatgatacgccttatggaggtggatcagggatggtaatgcgggcagatgtaattgccaattcattagacaaaaatttagaatcaaatgaaaaagtatattatttaagtccaagaggaaaattacttaatcaagatattgcaaaaaaaatatcaaatgaaaaatgtttgaatattttgtgcggtcactttgaaggagttgatcaaagagttcttgataatagaaatatcgaagaaataagtataggagactatattatttctggtggtgagacagcatcctatatagttttagatacagttttaagactgttacctggagttttaggaaacaaagactctatagttgatgaaagttttgaaaatgggcttttggagtatcctcaatatacaaaacctcaaatttggcaaaaaaatgaggttcctgaggtattattatcaggagatcatgccaaaattaaaggctggcgtttatctaaatctgaggctataacacgcgaccgaagaccagatttatggcataaacataacaaaaaaaattaaa

SEQ ID NO: 226991 - DNA, 541 bp, Unknown
  Bacterial polypeptide expressing nucleotide sequence isolated from the Sargasso Sea
tttggtggtggaagtggaatgttattaagaccagatgttgttgcttcagctttagatacaaatctaaaaagtgatgaaatttcaatttacttatctccaaaaggtaaaaaatttgatcagaaagttgctaaggagtttagcaagcaaaagaaactaaatttgttatgtggtcattttgaaggcattgatcaaagacttttagaaacaagaaatataaaagaatatagcattggtgatttcgtcctgtccggaggagagatagcttcgtttgttcttatcgattcagttattagattattacctggtgttctaggaaatcataattcaacgaaagaagaaagttttgaagattatcttttagaatatcctcaatatacaaagcctcaaaattgggaaggaaaaagcactcccgaggtgcttttatcaggcgatcatgctaaaattaaagactggcgtttatcccaatctgaggctataacacgtcgcgagagacctgatctttggaaaaaatatttaaacaaaaaaaatgaaaaacattgaa

SEQ ID NO: 226992 - DNA, 772 bp, Unknown
  Bacterial polypeptide expressing nucleotide sequence isolated from the Sargasso Sea
taccgcaaggttgacgatgagccctacggcggcggggccggcatggtgctcaagcccgaaccggtttatgccgcggtggagtccattccccgcagccgtcgatcgcgggtgctgctgatgacaccccagggacggccttttcagcaggccgatctgcagcgttgggcgacagagcatgaccagttgctgctgctctgcggccattacgaggggttcgatgagcgcatccgggctttggcagatgaagaggtgtctgccggggatttcgtgctcaccggcggtgaactgccggcgatgaccgtgatcaatggagtggtgcgcctgctgccgggaacagtgggcacggcccattcgctggtggaggaaagccacagcatcgggttgctcgagcatccccactacacccgtccggcggagttccgtggattgagggttcctgatgtgcttcgcagcggagatcacggtgcgattgaggcttggcgccagcaccagagggaagagcgcaccagggcacgacgcccggatctctatgcgcgctggagaatggctgacgacgtgagtgatcaggccatgcagatccggatcggcaacggctacgacatccaccggttggtggtcggtcggccgctgatcctcggtggcgtcacccttgagcaccccgacgggctgggtctggatggccacagcgatgctgatgtgctggtgcatgcggtgatggatgccttgctgggggcgttgtccctgggggacatcggcaagtacttcccaccga

SEQ ID NO: 226993 - DNA, 688 bp, Unknown
  Bacterial polypeptide expressing nucleotide sequence isolated from the Sargasso Sea
tatgtggcaagctcaagtgtttacactgtatccagagattttccctggtcctttatctaaaggactttatggaaaagctttatcaaataatttatggaaacttaaagttgtaaacataagagatgcagctgacgacaaatataaaacagtagatgatacaccttatggaggtggttcagggatgttgttaaaagcagatgttcttgcaaagtccttagatgaaaacaaaaatgagagtgagagaattttatacttatcgccaaaaggaaaaaaatttgatcaaaatttagcaaaaaagctagctaatgaaaaatctctatctttaatttgtggtcattttgaaggtgtggacgaaagaatactttcaacaagaaatattgaggaaattagtattggagattatgttttgtcaggcggggagtcagcagcatatgtagttatagatagtattttaagattgctgccaggtgtactaggaaatgaaaactctaaattggatgaaacctttgaaaatggtcttctagagtaccctcagtatacaaaacctcaaatttgggaggaaaaagctgtgccagacgtactattatcaggtgatcataataaaattaaacactggcgtttatctcaatctgaggctataacacgcgaccgaagaccagatttatgggaaaaatataagaaggattaa

SEQ ID NO: 226994 - DNA, 603 bp, Unknown
  Bacterial polypeptide expressing nucleotide sequence isolated from the Sargasso Sea
aagataggaatggaagattagatgataagccttatggaggagggcctgggatgattttgcaacctgatccaatcataaagacagttgaagccattaagaaaaaagatgaaacttatgttatttctatggctccccatggaaaggttttaaatcaacaaaaattgttagacttaagccaaaaaaagaacatcaccattatttctggacgatatgaaggtatagataatagggttgaagaatcttgtgtcgacgaagtttgttctgtaggagactatattcttaatggaggcgaattgccggcattaatcctattagagggtatttcaagattagttgaaggaattttgggagatgagaattctgctctagaagagtcatttaatgatggtctattagaatttccacaatacacgagaccagaaaatagtaaatatggaaatgttcctgaagtcttattaagcgggaaccattcagacataagaagatggaggctcaaagaatctctaagaaggacattatctcttagaccagatctaattgaatccagacaacttacttctgaagaaaaagaattaattgatgaaattaaaggtgaaggttaat

SEQ ID NO: 226995 - DNA, 688 bp, Unknown
  Bacterial polypeptide expressing nucleotide sequence isolated from the Sargasso Sea
atgtggactgctaatattttaacattatttcctgatctgtacccaggccctttaggttcttcaatattgggtgaagcaagaaaaaatggtaagtgggatttaaacataacagacttaaaattattttcagaaaaaaataaaagagtggatgattctccatttggtggtggaccaggaatggtcattaaaccagatgtaatagatagagctcttgtttctttgaaatcaaatgattttccaatttattatttgtcaccaaggggtgttaaattagatgcccaaatttctaattcaatatcaaaattagatgggatgactctagtttgtggaaaatatgagggtttagatgaaagagttattaaacattacaacatgattgaaatcagtatcggtgattacattttgtctggtggagatctggcagccatggttcttattgatagtgtagtcaggtgtttaccaaatgttttaggaaatccactgacattaaatgaagaaagttttacaaatcatctgttagaataccctctttacacacaacccagggtatggaaaaattacaaagtaccagatgtattattatcaggagatcacaaaaaaataaataactggaaaataaaacaatctgaggatataacaatgaaaagacgaccagatctttggaaaaaatatttaaaattgaagtaga

SEQ ID NO: 226996 - DNA, 658 bp, Unknown
  Bacterial polypeptide expressing nucleotide sequence isolated from the Sargasso Sea
aatgtggaaggtaaaagtatttactttgtatcccgaagtatttccgggccatttggatggcggcctatataaaaaggcaatagaaaataaaatatggtcaattgaagtaataaatattagagattatgcgaaagacaaacataaaacagtagacgatactccttttggtggaggaagtggcatggttatgagagcagacatattagctagttctttagataaaaatattaccaaaaacaatgaaccaataatttatttatctccaaaaggtaagaaatttgaccaggtttatgcaaaaaaaatttcaaataaaaatttgaatattatatgtggacattttgagggggtggaccaacgaatacttgagacaagaaatatagaagaagttagcgttggtgactttgttttatcgggaggagaagtcgctgctcttttaataattgatactgttgtaagattgcttccaggagtgcttgggaatcctgattcattagccgaggaatcttttgaaaagaatttacttgaatatccccaatacacaaaaccacaaaaatgggagaaaaaagaggttcccgaggtactattaaagggagatcataagaaaattaaggactggcgtttggctcaatctgaggatataacacgacgccgacgtcca

SEQ ID NO: 226997 - DNA, 718 bp, Unknown
  Bacterial polypeptide expressing nucleotide sequence isolated from the Sargasso Sea
aatgcttgatataaaaatattaacagcatatcctgagatgtttcctggcattttagagcattcattaataggaaaagctttcaaagaaaatatttttaaaatagaaactattgacctacatcaatttgggatcgatgatcgaatgagtatagatgatgaaccttttggaggagggccaggaatggttctgagacctgatgtagtcgaaaaagctctaaattctattcctaacgcacataatcaaaattctgcaaaaatatatcttaccccttccggaactccattaaatcaaaaaaaactagtaaatttagctaaattgcagaaaatgactattctttgtggtcgttttgagggtgtagatcaaagggctatagatgttttggattttgaagagattagtataggtgattatgttcttgcaggtggagagattgcggctcaagtgctacttgaaggttgtattcgtctcattcctggagtattagggcatccgaaaagtttattagaagagagtttttctaataatcttctagagtatcctcaatataccagaccaaagtgttgggaggactctctaggaaaaaaacatgatgtaccagagatattaacatcaggtcatcatgaaaatattaaaacatggagacttagcaagtcagttgaaaaaacgaaaaatattcgacctgatttgtttgttaaaaaagaaaaaaaacaggattaa

SEQ ID NO: 226998 - DNA, 367 bp, Unknown
  Bacterial polypeptide expressing nucleotide sequence isolated from the Sargasso Sea
tatgagggaatcgatcaacgtcttttggattattacactatagaagaattaagtattggagactacattttagctggtggagagttagctgctcaggttctagttgagtctgtagttagacttcttcctgggactttgagacatagagaatccagtgaaatggagtcatttaataatgatttgttagaatatccgcaatataccaggccaaaaacatggaaaaacatgactattccagatgtattattgtcaggtaatcataagaatatcagtaaatggcgcttggacatgtctgagaaaataactaagaaaatgaggccggacatatggaaaaactacaaaaaaaacaagacaagcaagaaataaa

SEQ ID NO: 226999 - DNA, 315 bp, Unknown
  Bacterial polypeptide expressing nucleotide sequence isolated from the Sargasso Sea
tagatgagataagtttaggagattttgttctttctggaggtgaaacagcaacttatgtttttttggatgctatattaagattaatacctggagtacttggaaatgaaaaatctactagcgaagaaagctttgaaaatggtttattggagtatccacagtacacaaaacctcaaatctgggaggaaaaaagtgtgccaaatgtgcttttatcaggtgatcatgcgaaaattaaagactggcgtttatctcaatcagaggctataactcgcgaccgaaggccagatttatggcaaaaatataataaaaaaaactaat

SEQ ID NO: 227000 - DNA, 754 bp, Unknown
  Bacterial polypeptide expressing nucleotide sequence isolated from the Sargasso Sea
atgtatgttggcgtagtttctatcttcccggaaattataaaggattattttgctatcggtatcgtggggcgagcgacgcgggaaggcttggttgatttgaatattttcgatgttagagactatgccaacgacgtgcacaagacagtagatgatcgtccgtacggaggaggtccaggcatggtcctgatgtacgagccactgtcattggcggtaaaggcggcaaaaagaagggcgccttcagatacgaaagtgggacttgtgagccctcagggtgagatatttgagcagaggacggccatagataaatcccagatggatgggataatcgtagtctgcggcagatatgaaggatttgatgagaggtttatcgaggagtttgttgacttcgaatggtcgattggtgactacatagtcagcggaggagagctcccagcccttacctgcttggacgcgatcatcagaaacctgcccactgttgtgaataacgcccaatccattttggatgaatcatttcttgatggaatgctcgattacccgcaatatacgcgtccagaactggttgatagttcagaagttccgtcggtccttttgtcagggaaccattcagctataaacagtttcagaaaggcagagtctttaaggaaaacgtatgaaagaaggccagacctgctagtaggtagaactttctccgaggatgaaagaaagcttttagcgaagtatttctctggtgaagacgaacagcggaagagatagt

SEQ ID NO: 227001 - DNA, 448 bp, Unknown
  Bacterial polypeptide expressing nucleotide sequence isolated from the Sargasso Sea
atgaactttaatttagtaacaattttccctgaaattaccaaattacttgattttggagttattggaaaggctattgaaaaagatttaatttctatgaatagtttgaatccgagggatttctcaaaaaataccaataaaaatgtggatgatgcaccttatggtggaggcgagggaatggttatgatggcagagccgttagcactagtaatgaaatcaataaaaaataagggaaaggttcttttgatgagtcctcagggagagcgtttatccaatactcatattgatgggttgctggacgaaaaatcaattactatcatttgtggaaggtatgagggcatcgatgaaagatttattgaaaattatgttgataaagagttttctgtaggcgactttgtccttagtggtggagaaataccagcattagctttaatagatgcattatccagaa

SEQ ID NO: 227002 - DNA, 347 bp, Unknown
  Bacterial polypeptide expressing nucleotide sequence isolated from the Sargasso Sea
gggagttgatgagagagtattatctacaagaaatattgaagaggttagtgtaggggactatgtatgtcaaggtggagaaactgctgcgctagtagtgcttgatagtgtattgagacttttacctggagttttagggaatgataaatcggcttcagaagaaacttttgaaaacggccttttggagtatccacaatataccaaaccccagatttgggaggaaaaatcagttccagatgtattattatctggtgatcacgctaaaattaaagactggcgtttatctcaatctgaggctataacacgcgtccgaagaccagacttgtggcataaatataaaaaaaattaat

SEQ ID NO: 227003 - DNA, 607 bp, Unknown
  Bacterial polypeptide expressing nucleotide sequence isolated from the Sargasso Sea
atgaacattaatgtccttactttatttcctgaaatatttgatatttttgaaagtggtgtaatctctaaagcaattaaaaaaaaatttttattattaaatattcttgatgttagaaaaaattctataaataaacattttcatgttgactcaaaaccatatggaggaggagagggaatggtaatgagagctgaaccaattgtaagaacgctttctgaaataaaaaatttaaaagaaaatcttgttatatacctttctccacaaggaaaaaaattaaatcaaaaaaaggttataaatttatcaaacttgaaagatataactttaatatgtggtcgatatgaaggtatagaccaaagagtaattgataaatatgttgatgaagaaatatcaattggtgattttgttttaagcggaggagaatatgctgctttatgcataattgacgctattgcaagacatattccaggcacattaggcaatcaagattcatataagaaagataccttctctgatggattgcttaaaggtggtgtatacacaaagccagaaatatttgaagaaatgagtgtaccaacaagaacttttatcaggaaatcatcaagaaattgaa

SEQ ID NO: 227004 - DNA, 886 bp, Unknown
  Bacterial polypeptide expressing nucleotide sequence isolated from the Sargasso Sea
agaaggttcttacaaacaagtagatgataagccttatggaggaggagcgggaatgatattaaaacctgaacctatttataaggcatatgaattaattagaaaatcaccaaaaagtaaaactttgttgatgaccccacagggtaaagtcttaaagcaaaaatatcttgcgagatggtctactttggatcaaataataattatttgtggtcaatatgaaggttttgatgagaggattagatgtttagctgacgaagagatatcaataggcgattatgtactttctggaggtgaaatacctgctatatcaataattaacggtttgactagattattaccaggaactcttggtgatccagactccttagtcgatgagagccataattcttctttattagaatatcctcaatacacgaggccattaacttttaaagatatgaaagtgccagatatcctattgagtggtaatcatgaagagattaaatcgtggagaagaagaaaaagttttgaaagaacattggagagaagaagtgacttaatatcaaatgaaaactacaaaaaatccccacaaagtaagagaataataaaagaaaataatcaattcatgaaatttagaataggaaatggatacgatatacacagactagtagaggatagagatttaattattggaggtgtaaaattgcatcatcctgaaaatttaggtttggatggtcatagtgatgctgatgttttaagtcactcaataatggatgcattattgggcgctctttctttgggtgacataggaaagtatttccccccatctgatgaaaaatggaaaaatgctgatagcttgtttttgttatcaaaagtaattgatttgataagacaagatgggttgggaaaa

SEQ ID NO: 227005 - DNA, 688 bp, Unknown
  Bacterial polypeptide expressing nucleotide sequence isolated from the Sargasso Sea
atgtggcaagctcaagtgtttacactttatccagaagtttttcctggccctttgtctaaaggactttacggaaaagctttatcaaacaatttatggaaacttaaagttgtaaatataagagatgcagctggcgataaacataaaacagtagatgacactccatatggaggtggctcaggtatgctgttaaaagcagatgttctagcaaaatctttagatgagaataaaattgaaaatgaaagaattttatatttatcaccaaaaggaaaaaaatttgatcaaaatttagcaaaagagctagctaatgaaaaatctctatctttaatttgtggtcattttgaaggtgtagatgaaagaatactttcaacaagaaatattgaagaaattagtattggagattacgtcttgtcaggcggagagtctgcagcatatgtagttatagatagtattttaagactacttcccggtgttttaggaaatgaaaactctaaattagatgaaacctttgaaaatggtctactagagtaccctcaatatacaaaacctcaaatttgggaggaaaaagccgtgccagacgtgctattatccggagatcataataaaattaaacactggcgtttatctcaatctgaggctataacacgcgtccgaagaccagatttatgggaaaaatataagaagaattaaa

SEQ ID NO: 227006 - DNA, 385 bp, Unknown
  Bacterial polypeptide expressing nucleotide sequence isolated from the Sargasso Sea
aatatcctctgtggtagatatgaaggcattgatcaacgcatactcgatttctatcctattgaggaaataagtattggagactatatactggcgggcggtgaaatagcttcccaggttttagtggaatcaatagtgagactgttgccaggaacacttggtgacatgaagtctgctagttcagagactttctcaaatgaccttcttgaatacccccagtatacaaggcctaaaaaatggaaaaatttgacaattccagacatattgctctctggaaatcacagaaatattagtgagtggcgcttaaaacaatctgaaaaactgacacagaaagttaggccagatttatggaaaaactacaaaaaaagcaagacaaggaagaaataaa

SEQ ID NO: 227007 - DNA, 712 bp, Unknown
  Bacterial polypeptide expressing nucleotide sequence isolated from the Sargasso Sea
atgaaggttcatattataactccatttccagaaatggttaaatcaattattaattgtagtattttagcgaaatctcaacaaaaaggatatgttgagtattatacttataatctatttgattttgcagaaaattctacaaataatagaattgatgattatccatttgggggtggagctggaatgattttaaagccggaacctatatttgaaatttttggttcaattaaaaagagtttaaatgaaaattctaaaattatttatccaactccagatggacaattgctaaatcataatttatcaaaagaattatctcatttagatgatttagttattatcaatggccattataaaggaattgatcaaagaattagagatcatattataacagatgaaatttctataggtgattatgtcttaacgggtggagaattagcaggaatgattatattggactctgtagtaaggttaatgccaggtgttattaattctaaggagtcgtctgatttagattccttttctcatccattattagatggtcctcactatactaggccagctagatataaagatatagatgtgcctgaaattttattatcaggtaatcataaagagatagaaaagtggttcaataaaaaaagagaagaaaaaacaaaattaagaagacccgatttgtgggatgaatataaaaaattaaagaaaagcaaggaataga

SEQ ID NO: 227008 - DNA, 640 bp, Unknown
  Bacterial polypeptide expressing nucleotide sequence isolated from the Sargasso Sea
actgggatcctgggttttaatgactcaaactagttcattgtgggttggggtgataagccttttcccggacatgtttgacgcaattacccaacaaggggttactggtcgcgcagtaaaaaatggattaattgattttaactgctggaatccacgtgactatgctttagataagcacagaactgtagatgatcgtccttacgggggcggacccggtatgttaatgatggttaaaccattggaaaaagctattcttgacgctaaaaaagcggcaggtgatggtgctaaagtaatttatatgtccccacaagggcgcaaacttgatcagcaaggggctagcgaactcgctaactctgataaactgattttgattgccggtcgatatgaaggtatagatgagagaataatagagtcatacgttgacgaagaatggtcaattggtgattttattttgagtggtggtgaactacctgccatgacattaattgacgcagtagcgcgattggtgccaggcgtgttaggtcataaccaatcagcagagcaagattcattttcggatggcttgctagattgccctcactacacacgaccagaaacattggacgacaaacaagttcctgctgtattactcagtggtaatcac

SEQ ID NO: 227009 - DNA, 488 bp, Unknown
  Bacterial polypeptide expressing nucleotide sequence isolated from the Sargasso Sea
tttgatgagccctcagggagagcatttatctaatgcccatattgatggtttgctggacgaaaaatcaattactgtcatatgtggaaggtatgagggaattgatgaaagatttattgaaaattatgttgatcaagagttttctataggcgactttgtactaagtggtggagaaataccagcactagctttaatagatgcattatccagaaagattccaggcgttcttggtaaccaggaatcttttaaaaacgattcatttgaaaataatcttttaaaagggcctgtatataccagaccgcagaaatttgaaggaaaggatgttcctgaaattttattatcaggtgatcatgagaaaattaatgattggaagattttatcttcattgcaacgaactattgaaagaagacctgatcttttagatagtgtaaaattaacaaaaaaacaaaaaaaactcttggataatttgttatctaagcgtatcctatagg

SEQ ID NO: 227010 - DNA, 625 bp, Unknown
  Bacterial polypeptide expressing nucleotide sequence isolated from the Sargasso Sea
acgtgcctgcgaaagggtttgctagatatacgggttcacgatctgcgagattacacgctgaataaacatcgaaaggtagatgatactcccttcggcggcggtgttggcatggtaatgaatgtagagcctattgcacgagccttggaattgttaaaaaaagaggttccgaaggctagaacgattttgctttcgccaggtggcagacctttcgatcaggggaaggccaacgaattgtcacatcaggaaagtttaatcctggtttgcggtcgttacgaaggtgttgacgaacgagtacgattacattttgtcgacgaagaaatttctatcggtgattatattttgacgggcggagaactaccggcaatggttttggttgagacggtatcccgattaataccgggtgttttaggagattcagcatctattattgaagagtctttctctgagggaatgttggaatatccgcaatatacgcgaccgagagattataaaggattcaaggttccggaggttctggtatctggtgatcctaaaaaaattagtgcctggcaaaaaaaagaggcattgaacaaaacagaaagggttcgccccgacctattagaaaaaataaaacggtcgaattaga

SEQ ID NO: 227011 - DNA, 694 bp, Unknown
  Bacterial polypeptide expressing nucleotide sequence isolated from the Sargasso Sea
ataaaaatgtttcaaacgaggatatttacactttacccagatgtatttccaggacctttgaacaagggtctatatgggaaagccttatcaaaaaaaatttgggatttaaaagttataaatataagagattatgcttcagataagcacaaaacagttgacgatacaccttttggaggtggatcaggaatgttaataaaacctgatgtcattgctaaatctttagatgctaatgtttctttaggggaaaagattttttacctcactccaaagggaaatctgttcaatcaggattatgctaaaaaactttcaaaagaaaaaaatataaatttagtttgtggacattttgaaggtatagatcaaagagtaattgatagtagaaaaatagaagaattgagtattggagattttgtattatctggaggtgaggcagcagcatttgtaattatagatgcaatattaaggcttattcctggagtgataggaaataaaaactcaactaaggaagaaagttttgaaaatggtctattagagtatcctcaatacacaaaacctcaaatttgggaaaaaaaaagcgtaccagatgtgcttttatcaggagatcacgctaaaattaaagactggcgtttatctcaatcagaagctataacacgcgaccgaagacccgacatgtggcaaaaatataaaaaggattaat

SEQ ID NO: 227012 - DNA, 454 bp, Unknown
  Bacterial polypeptide expressing nucleotide sequence isolated from the Sargasso Sea
tatgtggcaagctcaagtgtttacactttatccagagatttttcctggtcctttatctaaaggactttatggaaaagctttattaaataatttatggaaacttaaagttgtaaacataagagatgcagctgacgacaaacataaaacagtagatgatacaccttatgggggtggttcagggatgttgttaaaagcagatgttcttgcaaagtctttagatgaaaacaaaaatgagagtgagagaattttatacttatcgccaaaaggaaaaaaatttgatcaaaatttagcaaaagagctagctaatgaaaaatctctgtctttaatttgtggtcattttgaaggtgtggacgaaagaatactttcaacaagaaatattgaggaaattagtattggagattatgttttgtcaggcggggagtcagcagcatatgtagttatagatagtatttta

SEQ ID NO: 227013 - DNA, 542 bp, Unknown
  Bacterial polypeptide expressing nucleotide sequence isolated from the Sargasso Sea
aatgttgcaagctcaagtatttacactttatccagataattttcctgggcctttaggaaaaggtctttacggaaaagcgatgtctaaaaaattgtggagtttgaatgtgataaatataagagatgcagctacagacaaacataaaacagttgatgatactccttacggtggtggaacaggtatgttattaaaaccggatgttttagcaaattctatcgatcaaaacataaataaaggagataggattttgtatctttcaccgaaaggtaaagtatttaatcaaaaacttgcgcaagatctttcattagaaaaatctttctcattaatttgcggtcatttcgaaggtgttgatgagagagtattatctacaagaaatattgaggagattagtgtaggagactatgtattgtcaggcggagaaactgctgcgctggtagtgcttgatagtgtattgagacttttacctggagtcttagggaatgataaatcagcttcagaagaaacttttgaaaatggcctttttgagtatccacaatatacca

SEQ ID NO: 227014 - DNA, 490 bp, Unknown
  Bacterial polypeptide expressing nucleotide sequence isolated from the Sargasso Sea
tgttcttgctaactctatagactcaaatttaaattctaatgaaaaaataatttatttaagtccaaaaggaaaattatttaatcaagaattagcaaaaaaactttctaaagagaaaactattaatttgatatgtggacacttcgaaggtgttgatcaaagagtcatagaatcaagaaaaatagaggaagtaagcataggtgactttgttctatctggcggagaaagtgctgcatttgtgatgttagactctataataagattattacctggtgttcttggaaatgaaatatcagtcgaagaagaaagctttgagaacggacttttagagtatcctcaatatacaaaacctcaaatttgggaggaaaaaacagttccagatgtattattatcaggagatcatgcgaaaattaaagactggcgtttatctcaatctgaggctataactcgcgaccgaagaccagatttgtggcaaaaatataaaaagatttaa

SEQ ID NO: 227015 - DNA, 286 bp, Unknown
  Bacterial polypeptide expressing nucleotide sequence isolated from the Sargasso Sea
atgtttatctggcgggagtcagcagcatatgtagtgatagatagtattttaagattactgccaggtgttttgggaaatgaaaactctaaattagatgaaacctttgaaaatggccttctagagtatcctcaatatacaaaacctcagatttgggaggaaaaagctgtgccagatgtactattatcaggggatcataataaaattaaacactggcgtttatctcaatcagaggctataacacgcgaccgaagaccagatttatgggaaaaatataagaagaattaaa

SEQ ID NO: 227016 - DNA, 763 bp, Unknown
  Bacterial polypeptide expressing nucleotide sequence isolated from the Sargasso Sea
atgacaaacggtgagaaaaaagatcataagatttggatcatttctttatttccagattttttcagggcctttttggagacagggctctccggtcgagctttaaaaggcgagagggagtcaggtctttctgtccacttagttcaattaagagattactcaagtaactcttataaaggtgtagacgatgctccttatgggggagggccaggtatggtgatgaggcctgatacccttcaaaaagctttagttgatggagtcgtgggtcctggaggctatggggataattggaaagaaaagcttcacattgtttttcctggaccaagagggagagtttggaatcagaaaagctgtcaggagttttcccaaagggcctggggagaaaacggccatggaaaagatttagtttttatttgcggtcgttatgaaggtattgatgaaaggtttatccagaaatatgtggatgagcaactaagcctcggtgactatgtattgactggtggtgagctagcagtcatggccattattgactctgctatccgttttaagccaggtgttcttggaaacagggaaagttttcagaaggaatcctttcaaggagggctattagaacaccctcagtacacgagaccccgggtttttgaagacttagaggtcccagaggttcttctttcaggtaaccataaaaaaatagaagagtttgaaaagcttgagtctattcgaataactcaggcagaaagaccagatttattggaggagttatgaa

SEQ ID NO: 227017 - DNA, 562 bp, Unknown
  Bacterial polypeptide expressing nucleotide sequence isolated from the Sargasso Sea
gctacagacaaacataaaacagttgatgatactccttacggtggtggaacaggcatgttattaaaacctgatgttttagcaaattctatcgatcaaaacatgaataaaggagataggattttatatctttcaccgaaaggcaaagtatttaatcaaaaacttgcacaagatctatcatcagaaaaatccttctcattaatttgtggtcatttcgaaggtgttgacgagagagtattatctacaagaaatattgaagagattagtgtaggagactatgtattgtcaggcggagaaactgctgcgctagttgtgcttgatagtgtattgagacttttacctggtgtcttagggaatgataaatcagcttcagaagaaacttttgaaaatggccttttggagtatccacaatataccaaaccccagatttgggaggaaaaatcagttccagatgtgttattatctggtgatcacgctaaaattaaagactggcgtttatctcaatctgaggctataacacgcgaccgaagaccagatttatggcataaatataagaagaattaat

SEQ ID NO: 227018 - DNA, 715 bp, Unknown
  Bacterial polypeptide expressing nucleotide sequence isolated from the Sargasso Sea
tattttttccgaatggaataataagggtcgggccataaacgaaaaccttattgatattcacatacataatattcgtgattttagtaacgataaacacctttcagtagatgattttccttatggaggtggaccaggaatgttaatgaaacctgaaccagtatttaatgctgtgaacaaaattaaaaatgactatcaaatcggcaatacttctccaatcattttgacctcacctcagggcgataaattgactcataatattgctcttcatttttctgaattcgatgaaatgattataatttgtggaagatatgaaggattcgatgaaaggataagacaaaatttagcaacgcatgagattagtttaggagattttgtcctaagcgggggtgaaattccagcaatggcaatagttgattcaatttctagattaatacctaacgtattaggaagtgatgaatctgcaagaaatgattcattttatgaaaactttttgcaatttcctcaatacactcgacctgaaaatttccaaggcatgacagttcctaaaatattgttgtcaggtaatcatcaagatatagaaaaatggcgaaaaacagaatcaatcaggaaaactctcaaaagacgcccagatcttattaactttaaccaactcaatgaagaagaaaaagaaatttactatcaaattttagacgaaaattcaaaggaactagaatga

SEQ ID NO: 227019 - DNA, 368 bp, Unknown
  Bacterial polypeptide expressing nucleotide sequence isolated from the Sargasso Sea
aatatgtgggaggtttgaaggtctcgatcaacggctaatagacgctagaaacttggaagagataagtcttggtgactatgtcttatcaggtggcgaaattgctggcttagccgtccttgatgcctgtgttaggttgttgccaggcgttttagggtcggaagaaggtttaaaagaggaaagttttacaaaagggttgcttgagtaccctctttatactcagccaagggaatggaaaggaaaaactgttccagaagtcttgttgtcaggccaccatggcgatataaaaacatggcagcgtgagcaagcagaaatggttacacgggatcggcgtccagatctttgggcacggtatcgggaaaaaagttgaa

SEQ ID NO: 227020 - DNA, 375 bp, Unknown
  Bacterial polypeptide expressing nucleotide sequence isolated from the Sargasso Sea
ggcattttgagggaatagatgagagagttttaagtacaagaaatattgaggagataagtataggtgactacgttttgtctggaggtgaaagcgctgctattgtttttattgattgtgtagttcgcttactacctaatgttttagggaactccgactcaagagtagaagaaacttttgaaaatgggttattggaatatcctcaatacacaaaacctaaaatttgggagggaaaaggcgtccctgaggtgttattatcaggagatcacgccaaaattaaaggctggcgtttaactgaatctgaggctataacacgtcgccagagacctgatctttggaaaaaatatttaaacaataagaaaaatgaaaaacattgaa

SEQ ID NO: 227021 - DNA, 506 bp, Unknown
  Bacterial polypeptide expressing nucleotide sequence isolated from the Sargasso Sea
gcttttaaaacctgatgtcattgcaaattccttagatcagaatgtaattaaaggagaaaagattatttttcttacacctagaggaaaagtttttaatcaaaagattgcaaaagagatatctaaagaaaaaacaataaatattatatgtggtcattttgaaggaatcgatcaaagagttattgaatctagaaaaattgaagaatatagtttaggagattttgtattgtcaggaggtgaaacagcaacatttgtttttttagatgctgttttaagattagtccctggtataattggaaattataattctatagatgaagaaagttttcaaaatggattattagagtatccacaatatacaaaacctcaaatttgggagcaaaaaagcgtcccagatgtacttttatctggagatcacgctaaaattaaagactggcgtttatctcaatctgaggctataacacgcgtccgaagacccgatttgtggcaaaaatataaaaaggattaaa

SEQ ID NO: 227022 - DNA, 521 bp, Unknown
  Bacterial polypeptide expressing nucleotide sequence isolated from the Sargasso Sea
cctgcgccccgatgtgatgggccgggccatcgacgaagcgcgcagctccatgccccccgccgcgcccatcctctacctcagcccccggggccggcccttcgatcaggccatggcgcgcgatctggccaccacccccggcgcaaccctgatctgtggccgcttcgagggactggacgaacgcgtgatccaacactacggcatccaggaggtcagccttggcgatttcgtattgaccggcggagagatcgccgcccaggccctgatcgacgccaccgtgcgcctgatccccggtgttctgggcaatgcggattcgaccgaggaagaaagcttttccgacggacttctggaacatccgcaatacacccgcccgcccgagtggaagggccacacgatccccgatgtcctgatgtcaggccatcacggcgagatcgccaaatggcgccacgagcaggccaagcagatcaccaaaacccgccgccccgacctttgggccgcttatcagaagcgtaacaaggaatagg

SEQ ID NO: 227023 - DNA, 787 bp, Unknown
  Bacterial polypeptide expressing nucleotide sequence isolated from the Sargasso Sea
aatgtcgcagcaagctggtttgtgggttggggttattactctgttcccgcagatgtttgatgctattacaaagtttggtgtaacaagccgtgctgtaaagcaagggttgttacaggtagagtgctggaatccgcgggattatacttcggataaacacaataccgtcgatgatcgcccctttggtggtggtcccggaatgctgatgatggtgcagccgctgaccgacgctattcgcgccgccaagcaagctgccggaggaaatgtacatacggtgtatttgtcgccgcaaggccgcaaattagaccaaaaaggtgtacaggaactttcacgttacccgaaactgctgttagtggcaggccgttacgaaggcattgatgaacgcgtaattgaaaccgaaattgacgaagaatggtcaattggggattacgtgctgagtggaggcgagttgcctgcgatgacgctgattgatgcggtatcgcgactggtaccaggcgtactggggcacgaagagtcggcagaacaggattcgtttgcaactggtttgttagactgcccacactacaccagacctgcggtgttagcagacaaagaggttccaccggtgttgctgagtggacaccatgaaaatatacgacgctggcgtctgaaacaggctcttggtagaacctggttaagacggccggatatgttaaatgccctggctctgactaaggagcaacgcaaattactggatgaattccattggaacaccaggcgttgcagcaacacgatagttaattccaggtaa

SEQ ID NO: 227024 - DNA, 752 bp, Unknown
  Bacterial polypeptide expressing nucleotide sequence isolated from the Sargasso Sea
gatgagtagttttaattttgatgtaattacattgttcccaaaagcttttaaatcaataaaaaatttaggggttataacaagagctctacataagaatttgatcgatgtaaatttacatgatttaagagaatatggagaaggttcttacagacaagtagatgataagccttatggaggaggagcaggaatggtattaaaacctgaacctatttataaggcatatgaatcaattagaaaatcacctaaaagtaaaactttgttgatgaccccacagggtagagtcttaaagcaaaaggatcttgcgagatggtccactttggatcaaataataattatttgtggtcaatatgaaggttttgatgagaggattagatgtttagctgatgaagagatatcgataggcgattatgtactttctggaggtgaaatacccgctatatcaataattaacggtttgactagattattaccaggaactcttggcgatccagaatcattagtggatgagagtcataataattctttattagaatatcctcaatacacgaggcctttaacttttaaagatatgcaagtgccagatattttagtgagcggtaatcatgaagagattaaatcgtggagaagacaaaaaagtattgaaagaacaatggagagaagaagtgacttaatttcaaatgaaaactacaaaaaatccccacaaagtaagagaataataacagaatataatcaattcatgaaatttagaatag

SEQ ID NO: 227025 - DNA, 688 bp, Unknown
  Bacterial polypeptide expressing nucleotide sequence isolated from the Sargasso Sea
atgtttcaggttagaatatttacactttatccagatttgtttccaggacctttaaaagaaggtttatatggaaaagcattgtcaaataagatttggaatttaaagattataaatatgagagactattctttagataaacataaaacagttgacgatactccttttggaggaggatctggaatggtaattaaaccagatatagttgcaaaatcttttgatgaaaatattttaccaggagaaaaagcatattatttgaccccgaagggaaaaacgttcaatcaaaaaattgcaaaaaaactttctagaaaaaaagtattaaatttaatatgtggtcattttgaaggtatagatcaaagagttattgataaaagagaaatagaagaattaagtattggagattttatattatctggcggtgaatccgcagcttttgtagtaatagattctattttaagattactaccgggagtaattggcaacaataattcagttatagaggaaagttttgaaaatggtctattagagtacccacagtacacaaaacctcaaatttgggaagaaaacaaagtcccggatgtgcttttatcaggagatcatgccaaaattaaagactggcgtttatctcaatctgaagctataacacgcgaccgaagaccggacttgtggcaaaaatataaaaaggattaat

SEQ ID NO: 227026 - DNA, 486 bp, Unknown
  Bacterial polypeptide expressing nucleotide sequence isolated from the Sargasso Sea
tcccggtgcagccgcgccggcgggtgctgctgatgacaccgcaaggccaaccgctgcagcaggccgatctacgccgctgggctgacgattacgagcaattggtgctgctctgcggccactacgaaggcttcgatgagcgcatccgcagcctcgctgatgaagaagtgtcgctcggtgatttcgtgctcaccggcggcgaactgccggcgatgacaatcatcaatggcaccgtgcggctgcggcccggcaccgtgggcaccgccgattccttggtcgaggaaagccacagcgctgggctgctggagcacccccattacacacgccccgcgacgtttcgcgagatggacgtgccggcggtgctgcgcagcggcgaccatggcgccatcgcccgctggcgcgcccaacagcaaaaagagcgcacccagaagcgccgccctgatctctgggcccaatggcaggccgaacatcccagcgaggaaggctgat

SEQ ID NO: 227027 - DNA, 697 bp, Unknown
  Bacterial polypeptide expressing nucleotide sequence isolated from the Sargasso Sea
atgtttaactctcgaatatttactttgtatccagactattttccaggctacctagaaaaaggtttatttggcaaagctatgatggaaaagatttggagtttagaaattgtggatattagaaattatgctgaggataagcacaagacagttgatgatacaccgtatggtggtggcgatggtatgataatgaaagcagatgtgttagcaagatcattggataaaaatttaccacaggatgaaaaaataatttacctaagcccaaaaggaaaagtttttgatcataattgtgcaaaaagattttccgaatttgaatctattaattttatatgtggtcattttgaaggtattgatcaaaggataattgatagcagaaatatagaggaaataagtattggagactttgttttatctggaggtgaaacagctgtatttgtagttcttgatgcgattttaagatttgttccaggcgttttaggcaatgtgaactcatctaaaaatgaaagtttcgaaaatggtcttttggaatatcctcaatatactaaacctcaaattttcgagcaaaaaggtgtgccagaagtgttattatcaggagatcatgccaaaattaaagactggcgtttatcacaatctgaggctataacacgcgtccgaagaccagatttgtgggaaaaatataagaagactaaaaagaactaaa

SEQ ID NO: 227028 - DNA, 751 bp, Unknown
  Bacterial polypeptide expressing nucleotide sequence isolated from the Sargasso Sea
tatgtggattggggtgattagcctcttccctgaaatgttccgagccattaccgagcacggggtaacgggtcgggccgtcaagagtggcctgctgcagattgagtgctggaacccccgggacttcacccacgacaaacaccgtacggtcgatgatcgtccttatggtggtgggcccggcatgttaatgatggttcagccgctgcgtgacgcgattcatgcagccaagcaagcggcgggagacggggcgaaagtcatctatctctctcctcaggggcgcaagctgactcaagcgggcgtgaccgagttggcgacgaatcagaaactgattctggtcgccggtcgatacgaaggtatcgatgaacgcgtgatacaaaccgaagtcgacgaagagtggtctatcggggattacgtgttaagtggtggcgagttgcctgccatgaccctgatcgatgcggtttcgcgtctggtccctggggttttgggcgatcaggccagtgccgagcaggactccttcacggatggcctgctggatcatccccactacactcggccggagttgttggatggattggcggtgccagaggcgctgacaagcggcaatcacgaagtgattcggcgctggcggctcaagcaatcgctcggacgaacctggcagagaaggccggaacttattaacaacctagctctgactgacgagcaagaatcacttcttgccgagtatgtccgcgaagtgcgtgacagcgttaagtag

SEQ ID NO: 227029 - DNA, 688 bp, Unknown
  Bacterial polypeptide expressing nucleotide sequence isolated from the Sargasso Sea
atgtggcaagctcaagtgtttacactttatccagaggtttttcctggtcctttgtcaaaaggattatatggaaaagctatgtctaaaaagttatggaatttaaaagttgttaatataagagatgcggctgaagataaacacaaaactgtagatgacacaccttatggaggtggatcaggaatgttactaaaagcagatgtccttgctaaatcattagatcaaaacagaattgaaggtgaaaaaattttatatttgtctccaaaaggaaaaaaatatgatcaaagctatgcaaaaaaattggcaactgcaaaatccttatcacttatttgcggtcattttgaaggagttgacgaaagagtattatctacaagaaatatagaagaagtcagtataggagactatgttttgtctggaggcgaaacggctgcatatgttgttattgatagtgtactcaggcttttaccaggggtattaggaaacgataattctaagatcgaagaaacttttgaaaatggtttattagagtatccacaatatacaaaacctcaaatttgggaggaaaaatcagtaccagatgtactattatcaggtgatcatagtaaaattaaagactggcgtttgtctcaatctgaggctataacacgcgaccgtagaccagatttatgggaaaaatataagaaaaactaat

SEQ ID NO: 227030 - DNA, 679 bp, Unknown
  Bacterial polypeptide expressing nucleotide sequence isolated from the Sargasso Sea
atgaacatagatatcataactctttttcctgaacttttaaagggccctttcagtgcctcaataattaaaagagcaataaaagaaaagcgtgttgaaataaattttcataatccaagagattttagttccagtaaatataaacaagttgatgattaccaatatggaggtggtgcaggtatggtgatgatgattgatcccattgcaaagtgcatcaaaaaactaaagttaaaaagagattacgatgaggtgatttatcttactccagatggagaaaaactaagtcaatcaatttcaaatcaactatcaaataaaaaaaatttaatcctactttgcggacattataagggagtggatcaaagagttagggacctttacattacaagagaaatatcaattggagatttcgttttgtcagggggtgagcttgctgcagctgtattatgtgattcgatcataagacttatacctggtgttttgggtgatggatgttctgctctttatgatagttttcaagatgatattttagccccaccaatatatacaagaccatcaaaatatgatgggttaagtgtacctaaagtacttctttctggagataaaaataaaatagatctctggagagaacaaaaatcaattgatagaacaaaaaaaaatagaccagatttatataaaaactaat

SEQ ID NO: 227031 - DNA, 637 bp, Unknown
  Bacterial polypeptide expressing nucleotide sequence isolated from the Sargasso Sea
catgaatacatataatgtcattacactcttccctaacttaattgaggagtggaaaaatataggcattgtgaggcaagctattaaaaatcagttggtaaatattcaaactacaaacttaagggaatttggaattggagaatataaacaagtagatgatgctccatatggtgggggacctggaatggtattaatgcctgagccattagataatgcgattaactcttcaaattcagatgttaatgtttttctaacaccatcaggagagcagttggatgaaactctattaattaaattattatcatttaagtccataaatctaattgcaggaagatatgaaggttttgatcaaagaatcttggatatgcatgcagattataaagtttctattggacacacagtcatttctggaggtgaagttccagcgatgtatatgctcgaagctttaataagaaggattccaggagtattaggcaatccagattcattaaagtatgaaacatttaatgacaataaatatgattttcctgtctatacaaggccggaaatatttaaaaatctgtctgtacctgaagttttgctttctggtaaccataaagatatcgaagagtggaaaaagaataatttaaaagacatataa

SEQ ID NO: 227032 - DNA, 373 bp, Unknown
  Bacterial polypeptide expressing nucleotide sequence isolated from the Sargasso Sea
ttaaatattctttgtggacattttgagggaatagaccaaagagtaatagataacagaaatatagaagaaattagtttaggagattttattttatcgggtggtgaaacagcttctctagtttttttggactctattttaagacttatacctggagttttgggaaatgaaaaatctacagaggatgaaacttttgaaaatggtcttttagagtatccacaatataccaaaccacaaatttgggaggaaaaatcggtacctgatgtacttttatcaggagatcatgctaaaattaaacactggcgtttatctcaatctgaggctataacacgcgaccgaagaccagatttgtggaaaaaatataaaaaaaattaat

SEQ ID NO: 227033 - DNA, 703 bp, Unknown
  Bacterial polypeptide expressing nucleotide sequence isolated from the Sargasso Sea
tatgtttgaggtaaagatttttactttatatccagatttatatcctgggccacttaacactggtttgtataaaaaggcgcaggaaaacaaaatctggagtttaaatgtagtaaatattagagattacgcagttgataaaaaaggaactgttgacgatactcctttcggaggaggaagtggaatgttgcttagaccagatgtagttgcctcagctctcgaccaaaatataaaaagcaatgagactataatttacctatctccaagaggtaaaagatttgatcagacaactgcacataagtttagtaagctaaaaaagttaaatttattatgtggtcattttgaaggtattgatcaaagacttttagagacaagaaatattcaagaatatagtattggagattttattttatcaggaggagaaacagcttcatttgtttttattgactctattattagattattgccaggtgttttaggtaatgcaaactcaacaattgaagaaagttttgaaaatgatctattagaatatccccaatacacaaaaccccaaaaatgggagggaaaaagtactccagaagtacttttatcgggagatcatgctaaaattaaagactggcgtttgtctcaatcagaggctataactcgtcgccagaggcccgatctttggaaaaaatatttaaataaaaaaaatgaaaaacattga

SEQ ID NO: 227034 - DNA, 640 bp, Unknown
  Bacterial polypeptide expressing nucleotide sequence isolated from the Sargasso Sea
atgaaaattaatgttcttgctgtttttcctcaaatattagactcccttaattatggggttactgggacagcaattgaaaaaaatattttagaaattcataggattgatttaaaagattatcctttgaattcttatggatctattgatgataaacctttttcaggttctgaaggtatgattatttcacctttaccaatttcaaaagcgatgaacttagttaaaagcaaaggaaaagtaatttatctttctcctcaaggtaaaacactaaatcaaaaaaaggtcaaagagctagcaactttaaatgatttaacaataatttgtggtagatatgaggggatagatcagagaattattgatgaatatgtcgatgaagaaatttcaataggagattatgttttaagtggtggtgaaattgcagctacggtacttattgactcaattgttagaaatttacctggcgctcttggaaatgaaaaatcactaaccaatgacagtttttctgatggcagactaaaaggtcattcatacacaagaccaagagattttgagggaagaaaagttccagatgaattagtttctggaaatcatgaattagtgaaagaatggaaaatagcaaatagtttatgggttacgaagcaaa

SEQ ID NO: 227035 - DNA, 641 bp, Unknown
  Bacterial polypeptide expressing nucleotide sequence isolated from the Sargasso Sea
catgctgcattttgacctgctgacccttttcccggattttttcgggtcgtttctctcagaaagcctgattggcaagtcgattgagaaggaactgctgcaggtggaactgaataacttccgggaatacgggatcggttctcatcgaaaggtggatgatgagccttatggtggaggtccagggatgcttttacgggtcgaaccgatcgccgaagctttggaaacccgagttggctatcatcggcaactcggacgcgaggttagaaaaatcctgctgactccgcagggaagtcccttcgaccagaagaaagcaagggaatggagtcaatgtggagaggtattattgatggtttgcgggcgttatgaaggatttgacgaaagggtccgtgaactggtggatgaagaggtttcgggaggcgactatgtttgccttggtggagaagtgattgcgatgctgatcattgaatccgtgagccgcctggtgcctggggtgttgggcaatccggattcttcagaaaccgaatcgtttgccgcaggtacgctggaatatccgcaatatacgcgacctagaatatataaaggcatggaagtgcctgaagaattgctgtccgggaatcatggccggattgaagcatggaaaaaga

SEQ ID NO: 227036 - DNA, 688 bp, Unknown
  Bacterial polypeptide expressing nucleotide sequence isolated from the Sargasso Sea
atgtggcaagctcaagtgtttacgctttatccagaagtttttcctggtcctctttctaagggcatgtatggaaaagcaatgtcaaaagatttatggaatttaaaagttgtaaatattagagatgcggctgaagataaacataaaactgtggatgatactccttatggaggaggatcaggaatgctattaaaaccagatgtccttgccaaatcattagatcaaaataaagttgaaggtgaaagaattttatatttatctccaaaaggtaaaaaatttgatcaaaattatgcaaagagattggcaaaagaaaaatctatatcacttatatgtggacattttgaaggagttgatgagagagttctatccacaaggaatattgaggaaattagtataggagattatgttctgtctggaggtgaaactgcagcttatgttgttatagatagtgtgcttaggcttttgccaggggtattaggaaatgataattctaagattgaagaaacttttgaaaatggtcttttagagtatcctcaatttacaaaacctcaaatttgggaggaaaaagcagtaccagatgtattattatcaggtgatcatagcaaaattaaagactggcgtttatctcaatcagaggctataacacgcgaccgaagaccagatttatgggaaaaatataagaagaattaat

SEQ ID NO: 227037 - DNA, 640 bp, Unknown
  Bacterial polypeptide expressing nucleotide sequence isolated from the Sargasso Sea
atgttatcaaactttaacgttattactttattccctgagatatttcaaaagtggattaatgttggcgttctttcccatggtattgaagaaaaattatttgaatttagcagcactaatttaagagattatggcattggtagttataaacaagtggatgacgctccatacggtggaggaccaggtatggtattaatggttgagcctttagataatgcaattaaggaatcaaagaaagatatcaacatattcttaacaccaagcggacaacaattaaatgaagatttgatacaagatcttcatggatatgaatcagcaaatattatttgtggaagatatgaaggctttgatcaaagaataatcgaaatgcacagcgattatgaaattgcgatcggacagacggttgtgtctggtggagagattcctgcgatgtttttaattgaagctctagtaagaaaaattccaggaattcttgggaattcagaatctctaacaaatgaatcatttacaaacaacaaatctgattttcctgtgtatacaagacctgaaatttatgaaaatcttaatgttcctgaagttttgctatctggtgatcataaaagaattgaagaatggaaaaagaataatttaaaagacatttaaa

SEQ ID NO: 227038 - DNA, 688 bp, Unknown
  Bacterial polypeptide expressing nucleotide sequence isolated from the Sargasso Sea
atgtggcaagctcaagtatttacactttacccagaagtttttcctggacctttatcaaaaggactttatggaaaagctttatctaaaaaattgtggaacttgaatattgtaaacattagagacgcagctgaggataaacataaaacggttgatgatactccttacggcggtggttctggtatgcttttaaaacctgatgtcttagcaaaatcactagatcaaaatgaaattaaaggtggaagaataatttatttatcaccaagaggtaaaaagtttgatcaaaattatgctcgagaattgtctgatgaaaaatcaatatctctaatttgtgggcattttgagggagttgatgaaagagtgcttgctactagaaatattgaagagataagtattggagattatgttttgtcaggcggtgaaacagctgcatttgttgtaatagatagtgtacttagacttttgcctggcattttgggtaatgaaaattctaaggttgatgaaagttttgaaaacgggttattagagtatccacagtacacaaaacctcaaatttgggaggaaaaagctgtgccagaggtcctattatcaggtgatcacagcaaaattaaagactggcgtttatctcaatctgaggctataacacgcgtccgaagaccagatttatgggaaaaatataagaagaattaat

SEQ ID NO: 227039 - DNA, 697 bp, Unknown
  Bacterial polypeptide expressing nucleotide sequence isolated from the Sargasso Sea
ctgaaagttaatatattaactctttatccagaattatttccaggcccattaggaataggcctttacaaaaaagctatggaaaaaaaaatttggaaattaaatgttgttaatattcgagattatgctggtgataaacataaaactgttgatgacaatccttttggtggtggaaacggaatgttgatgcgagctgacgttatcgcattagctttagataaaaacatagactctaaaacaagcaataaaaatatatacctttctccaaaaggaaagacatttgatcaaaattatgcaaaaaaattatgtaaagaaaaaaatttaaatataatttgtggtcatttcgaaggagttgaccaaaggcttcttgaaagtcgagacatagaagaaattagtgtgggagattatattttatctggtggagaaactgcatctttcgtttttttagatgcgattataagattattaccaggtgttctaggtaataagctttccatcgaagatgaaagttttgaaaaaggcttgctcgaatatcctcaattcaccaaaccacaaaaatgggagaaaaaaagcgtaccagacgtactattatcaggggatcatgccaaaattaaacactggcgtttaagtcaatctgaggctataacacgtcgccagagacctgatctttgggaaaaatataaaaataaaaaaaaatgaa

SEQ ID NO: 227040 - DNA, 688 bp, Unknown
  Bacterial polypeptide expressing nucleotide sequence isolated from the Sargasso Sea
atgttccaagcccaagtatttactttgtacccagaattttttcctggccctcttgctaagggcctgtatggaaaagctctatctaataagttatggaatttaaatgttgtaaatataagggacgcagcaacagataaacataaaactgttgatgacactccgtatggaggtggaacaggaatgttacttaaaccagatatattagcgaaatcgatagaccaaagagtaaaaaaagatgaaagaatcttttatttatcacctaggggaaaaaaatttgaccaaaaatttgcaagagatttatcaaaagaaaaatctatttctctaatttgtggtcattttgaaggagttgatgagagaattttagatacaagaaatatagaggaaataagtataggagattatgttttgtctggtggagaaactgctgcattagttgtgctcgatagcattttaagacttttacctggtgtactaggaaatgaaaaatccgcaattaatgaaacctttgaaaatggtcttttagagtaccctcaatatacaaaacctcaaatttgggaggaaaaatcagtgcccgaggtattattatctggagatcatgctaaaattaaagactggcgtttatctcaatctgaggctataactcgcgaccgaagaccagatttgtggcaaaaatataagaaaaactaat

SEQ ID NO: 227041 - DNA, 703 bp, Unknown
  Bacterial polypeptide expressing nucleotide sequence isolated from the Sargasso Sea
atgcttgaagtaaaaatatttactttgtatccagatttattccctgggcttttagatgtgggcatctataagaaagctaaggaaaaacaaaaatggagtctcaaaattatagatataagagactatgcttttgatgataatcggacagtagatgatacaccttttggtggtggaaatggtatgttgttaaaaccagatgttgtagcatctgctttagataaaaacataaaagacaaagaaaagataatttatctatctcctaaaggcaaaagactagatcaaaaagaagtgaaatccttaagcaagctaaagaaaatcaatattttatgtggtcattttgaaggtgttgatcaaagacttttagaaacacgaaatattgaagaatacagtataggagattttattttatctggaggtgagagcgcatcatttgtattcgtagatgcattagttagacttcttccgggtgttttgggtaatgctaattctgctaaagatgaaagttttgagaataatcttttggagtatcctcaatacactaaaccgagagattgggagggtaaaaaagtgccagaagtcctattttctggagatcatgctaaaataaaggggtggcgtttatctcaatctgaggctataacacaacgccaaagacctgatctttggaaaaaatacttagtgaaaaaaaatgaaaaacattgaa

SEQ ID NO: 227042 - DNA, 727 bp, Unknown
  Bacterial polypeptide expressing nucleotide sequence isolated from the Sargasso Sea
atgaaaaaaaattttaaagttaaagttataacgatatttcctgatgtatttccgggaatcttaaaaattggagttataggaaaagccttgaagagtaaaatttggtctttaaaaatgataaatccacgagatttttctaagggtgttcacaaaagtgttgatgatacaactgctggaggtggtccaggtatgattttaaaatctgatatactaggtaaagcgataaataatgcttacaaaaatataaaagaccgaaaaaaatttccgcttatatatttaactcctagaggaaaacaacttacccaaaataaaattagtcagctttcaaagaaagatggaatgattttactttgtggtcgctatgaaggtattgatcaacgtgtatcggattattataaaattgaagaatatagtattggtgattttattcttgctggaggtgaaattgctgctcaggcattaatagagtcaacagtaagattacttcctggaactttaggccataaaaattcttcaacagaagaaagctttaataacgatttgttagaatttccccaatatacaaggcctaaaatttggaataaccttgaaattcctaaagttttaacgagtggggatcataagaaaatagctctttggaggaaagatatggctgagaaactaacaaaaaaaattaggccggatttatggaaaaaatacaaaaaaaacaagacaataaagaaataaa

SEQ ID NO: 227043 - DNA, 647 bp, Unknown
  Bacterial polypeptide expressing nucleotide sequence isolated from the Sargasso Sea
cctggacctttggaaaaaaggactttatggaaaagctttatctaaaaatatttggaacttaaaagttattaacattagagactattctattgataagcacaagactgttgatgataccccatatggaggaggatctggcatgttaattaaaccagatgtagttgctaaatcgctcgatgacaatattggtttaaatgaaaaaatattttatttaactccaagaggcaaaacatttgatcagaaaattgctaaatcaatcgttagagaaaaaaagattaatttactttgtggtcactttgaaggaattgatcaaagagttatagactctagaaaaatagaagaattgagcattggagactatattttgtctgggggcgaaacagcggcaatagtagttctagatagcattttaagattaatccctggaataattggaaatgagaactcagcaaaagaagaaagttttgaaaatgggctcctggagtatccacagtatacaaaacctaaaatatgggaaaaattaagcgttccagaagtacttttatcaggtgatcacgataaaattaaagactggcgtttatcaaaatcagaggctataacacgcgtccgaagacctgatttgtggcaaaaatataaaaagaattaaa

SEQ ID NO: 227044 - DNA, 700 bp, Unknown
  Bacterial polypeptide expressing nucleotide sequence isolated from the Sargasso Sea
aatgagagtagtaattttaacctgttatcctgagatgttccctggttcactaggatattctgtaatcggaaatgcattaaacaataaaaaattttctctcgagatagtcaatctacataattttggaattgacaaaagaggaagtgttgatgatgaaccttttgggggaggccctggaatggttattcgtccagatgtgatagaaaaagcattaaattcaatcactttcaaaaccgataattactgcaaaatttttctaacaccgtcaggtcagaaattatctcaagccaaacttaataatctatcaaaacatgatgaaatgcttattttatgcggtagatttgaaggggttgaccaaagagctatagaaattcttgattttcaggaaataagtatcggtgattacgtcctttctggtggtgagattgctgcccaggtgttagttgaaggttgtattcgtctcattcctggagtattagggcagccacaaagtttattagaagaatctttttctaataatctgcttgaatatcctcattataccagaccacaaacctgggaagatattcagggaaataaacatgaagttccagatgttttaacatcaggtcatcatgaaaaaattgataaatggagaaaagaaaaatcggttaaaaaaactaaagaattaagaccagatctttttaaaaaggaaatataa

SEQ ID NO: 227045 - DNA, 688 bp, Unknown
  Bacterial polypeptide expressing nucleotide sequence isolated from the Sargasso Sea
atgttgcaagcccaagtatttacactttatccagatatttttcctgggcctttaggcaaaggtctttatggaaaagcaatgtctaaaaaattatggagtttaaatgtaataaatataagagatgcagctacagacaaacataaaacagttgatgatactccttatggtggtggaacaggcatgttattaaaaccagacgttttagcaaattctattgatcaaaacataaataaaggtgatagaattttatatctttcaccgaaaggtaaagtatttaatcaaaaacttgcccaagatctatcattagaaaaatccttttccttaatttgtggtcattttgaaggagttgatgagagagtactatctacaagaaatattgaggaagttagtttaggagactatgtattgtcaggtggagaaactgctgcgctggtagtgcttgatagcgtattaagacttttacctggagttttagggaatgacaaatctgcttctgaggaaacttttgaaaatggtcttttggagtatccacaatatacaaaacctcaaatttgggagaaaaagtcagtaccagaagtgttattatcaggtgatcacgctaaaattaaagactggcgtttatctcaatctgaggctataactcgcgtccgaagaccagatttgtggcaaaaatataagaaagactaat

SEQ ID NO: 227046 - DNA, 688 bp, Unknown
  Bacterial polypeptide expressing nucleotide sequence isolated from the Sargasso Sea
atgttgcgtttcgaggttctgacattattcccggaaattttttcttctttcctggaagaaagtctaatcaaacgcggacttgagaagaaacttttgagtatcagccttgtaaattttcgcaaacacgggcttggtaagcatcttcaagtagatgattcaccatacggtggcggccctggtatgattttgcgaattgagccactagttcttacgcttgaggaaaagaaagattttcatcaaagtcagggacgtaaaacacatacaatattggtttcaccgcaaggtcagccatttactcaaaaaaaggcaaaagaactcagtcagaaaaactctgttttgacattagtctgcggacgttacgaaggatttgatgaaagaataagaagcattgtagatgaggaaatttccggaggtgattttgtttgtatgggcggtgaagttatttctatggcaataattgaatctgtaagccgtcttcggccaggctttcttgggaatcaggaatcatctgaaaatgaatcattttctcaatcactgcttgaatatcctcaatatactcgccccgcaagctatgctggcatggatgtcccgaaagaattgttgtcagggaatcatgaaaaaattgatgcgtggcgacaaaaacaggctttgtcgcgaacgaagaaaagacgtccggatttaatttgaa

SEQ ID NO: 227047 - DNA, 697 bp, Unknown
  Bacterial polypeptide expressing nucleotide sequence isolated from the Sargasso Sea
atgttagaagctcgtatattcacactctatccagatttttttccaggttatttaggtcaaggtatttttggtaaagcactatcagagaataaatggaaaatagatactgtggatataagagagtatgcatttgataaacataaaactgttgatgacactccctatggaggaggtgaaggtatgttaatgaaagcagatgtattagcaaaatcaatagataagaatgttaaagatggcgaaaagattatttatctaagtccgaagggtaagttgttcaatcatcaattagcaaaacaactatctcaagaaaaaacaataaatataatttgtggacactttgaaggagttgatgaaagattattaaaaacaagaaatattgaggaagtaagtataggagactttgttttatctggaggtgaaggagcttcatttgtaattcttgatgcaattttaagatttattcctggtattcttggcaatacaaattcagctaaagaagaaagttttgaaaacggacttttagagtatcctcaatttacaaaacctcaaatatgggaggaaaaaagtgttccagatgtgctattatcaggcgatcacgccaaaattaaagactggcgtttatctcaatctgaggctataacacgcgaccgaagaccggatttatggcaattatataaaaagactaaagagaattaaa

SEQ ID NO: 227048 - DNA, 727 bp, Unknown
  Bacterial polypeptide expressing nucleotide sequence isolated from the Sargasso Sea
atgatcacatttaatatcctcactttattcccagacgctttccctggtattttacaacatggtttgctaggcaaggctcttttaaaaaatcattttaaaatcaatactatcaacataagagactatagtgatctgtctgctaactctgtagatgataaaccatttagcggcggcgcagggatgattttaagaccagatataatttctaaagctattgaggcaaactttaataaggacgagctaaatacctttacaaagatttgtttttctgccaaaggcaaaaatttttctcaaaacgatttaattcaaaataagtcaaatcaaaattttattttattaaatggtagatatgagggaatagaccaaagagtgattgactattatgaatttcaagagatctcagtaagtgatgttattttaaatggaggggaagtggcatcgttattgtttatggaggcatttatgagattacaacctggtgtcctaggtaacgaagatactcactctaatgagtcttttcaaaatgaactagtcgaacacgatcaatttacaagaccaaacccatggttagctcctgaccatacagacattgaagtcccagctgttcttttaagtggtaatcatgcagatatagatttatggaaacaccagaattcaaaggaaaatactgaaaaaaataggccagatttatttaaaaagtatttaaaaaaaaacaaaaatgagtaga

SEQ ID NO: 227049 - DNA, 727 bp, Unknown
  Bacterial polypeptide expressing nucleotide sequence isolated from the Sargasso Sea
atgaactttaatttagtaacaatttttcctgaaattacgaaattatttgactttggagttattggaaaggctattgaaaaagatttaatttctatgaatagtttcaatccgagggatttctcaaaaaatactaataaaaatgtggatgatgcgccttatggtggaggcgagggaatggttatgatggcagagccgttagcattagcaatgaaatcaataaaaaataagggaaaggttcttttgatgagtcctcagggagagcgtttatccaatactcatattgatgacttgctggacgaaaaatcaattactatcatttgcggaaggtatgagggcattgatgaaagatttattgaaaattatgttgataaagagttttctataggcgactttgtccttagtggtggagaaataccagcattagctttaatagatgcattatccagaaagattccaggcgttcttggtaaccaggaatcttttaaaaacgattcatttgaaaataatcttttaaaaggacctgtatacactagaccacagaaatttgaaggaaaggatgtccctgaaattttattatcaggtgatcatgagaaaattaatgattggaagattctatcttcattacaacgaactattgagagaagacccgatctattagatagtgtaaaattaacaaaaaaacaaaaaaaactcttggataatttgttatctaagcgtatcctatagg

SEQ ID NO: 227050 - DNA, 733 bp, Unknown
  Bacterial polypeptide expressing nucleotide sequence isolated from the Sargasso Sea
atgaatattaatataattactttgtttccagaaatttttgattcattaaattatggtttgcttggacaggcattagatagagaggatattaaaattaacatattcaatttacgagaccaccaattgaataagcatggccagattgatgacaagccgtatggaggaggagagggaatggttcttatggcagaaccactagaaaatgctattaaaaatatacctagtgataatttaggaatagttataaatttatcaccacaaggcacaatttttagtcagaaaaaggcaaaagaattatcaaagcttaaaaacataacaatcatatgtggaagatatgagggtatagatgaaagattgatttctcaatatgttgatgatgaaatttccattggagattatgtcttaagtggtggtgaatttgccgcactgacccttatcgatacattatcaagatttattccaggtgttattggtaataaaaaatcagtagaactagattcattcagtcaaggactcttgaaaggaccagtatttacaagacctgaaacttttaattctaatgatgtaccagaagttctcatatctggcgatcataataaaataaaagagtggagagataatcaatctcttattagaacttttgagagaagacctgatcttttaaagaatgcaaaattaacaaaaaaacaaaaaaaactcttggaagaattgtcatctaaggctatcctgtagc

SEQ ID NO: 227051 - DNA, 575 bp, Unknown
  Bacterial polypeptide expressing nucleotide sequence isolated from the Sargasso Sea
aatgggattgggactggaattgattatgaaaatctgtgttgtaagcttatttccggagatggtgaaaaagattttaaacttcggtgttattggtagatcggaagcaaatggaatcatgtccttgtcagtaattaatcctagagattttacttatgataaccatcaaaaagttgatgataagccatatggtggtggacccggtatggtgatgaaatatgagccattaaaacgttcagtagaaatggctaaagaaaaattttcaggtactgcaccagtcattttgttaactcctcaaggagcaagatttaatcaaaaaaccgcaaaaagattttctcaatattcagaattaatttttgtttgtggtagatatgaaggtatcgaccaaagatttattgacagcaatgttgatgaggaaatttccataggtgattttgttttaactggcggagaaattggtgttatggctattattgatgcaacagtaagattgttgcctggcgcactaggtgacgaatcatcacgtactgatgaatcttttgaagatgggcttcttgaatatcctcattatacaagac

SEQ ID NO: 227052 - DNA, 367 bp, Unknown
  Bacterial polypeptide expressing nucleotide sequence isolated from the Sargasso Sea
ttgatttgtggacattttgaaggagttgatgaaaggattttatctacaagaaatatcgaagaaataagtataggggattatgtgttatcaggtggagaaacagcagctcttgtagttcttgatagtgttttgagacttctgccaggtgttttaggaaatgaaaaatcagcttctgatgaaacttttgaaaacggtcttttagagtatcctcaatacacaaaaccacagatttgggaggaaaaatcggttccagatgtcttattatcgggagatcatagtaaaattaaagactggcgtttatctcgatctgaggctataacacgcgaccgaagaccagatttatggcaaaaatataagaaagattaaa

SEQ ID NO: 227053 - DNA, 688 bp, Unknown
  Bacterial polypeptide expressing nucleotide sequence isolated from the Sargasso Sea
atgttgcaagctcaagtatttacactttatccagaaatttttccagggcctctaaataaaggtctttatggaaaagcaatggctaagaaattgtggagcttaaatgtaattaatataagagatgcagcaacagacagacataagacagttgacgatactccttatggtggtggaactggaatgttgcttaaacctgatgttttagcaaattctattgatcaaaatataaataaaggagaaagaattttttatctttcaccaaaaggcaaaatatttaatcaaaagtttgctcaggagctatctaaagaaaaatcattttctttaatctgtggacattttgaaggagttgacgaaagagtattgtctacaagaaatatcgaagagattagtattggagattatgtattgtcaggtggtgaaactgctgctctagtagttcttgacagtgttttgagacttttgcctggagttataggtaatgataaatcagcgactgaggaaacctttgaaaatggtcttttggagtatccacaatacacaaaaccacaaatttgggagaaaaaatcagtacctgaagtgttattatcaggagatcatgctaaaattaaagactggcgtttatctcaatctaaggctataacacgcgtccgaagaccagatatgtggcaaaaatataagaagaattaaa

SEQ ID NO: 227054 - DNA, 733 bp, Unknown
  Bacterial polypeptide expressing nucleotide sequence isolated from the Sargasso Sea
atgaatattaatatcttaactatatttcctgaaatatttgatgcacttaattttggagtagtatcaaaatctttagacaaagagttattaaaagtaaaaacttttgatataagaaagaattcaataaataaacataatcaagttgattctaaaccttatggtggtggagaaggtatggtgatgatggctgaaccaataattaatactcttaaagaaattaataataaaaatactggaaaaataatttatttatcaccccaaggaaaaaaacttaatcaagaaaaagttaaatctttatctaaattaaaaaatatcactctaatctgcggaaggtatgaaggaatagatcaaagagtaatagatgaatatgttgatgaggagctatcaatcggagacttcattttatctggaggtgaatatgctgcaatttgtataattgacgctatatcaagacatattccaggaacattaggtaacaaaaactcttatttaaaagatactttttcaaacggactcttaaaatgggatatatatgctaagcctgaaaaattaggttcattaaaggttcctgatgtgcttctttcaggaaatcataaagaaatttcaaaatggagagaggaaaattctttacttaaaacttttttgaaaagaccagatttatttgaaaaaataaaattatcaaaaaaacaaaaaaaactcttggaagaattggcatctaaggctatcctatagc

SEQ ID NO: 227055 - DNA, 562 bp, Unknown
  Bacterial polypeptide expressing nucleotide sequence isolated from the Sargasso Sea
atgagcagttttaattttgatgtaattacattgttcccaaaagcttttgaattaataaataatttaggagttataactagggctttagataagaatttgattgatgtgaatttacatgatttaagagaatatggagagggttcatatagacaagtagacgataagccttatggaggaggagcaggaatggtattaaaacccgaacctatttttaaggcgtatgaatcaattaggaaattacctaaaagtaaaactttgttgatgacccctcagggtaaagtcttgaagcaagaggatctagcgagatggtccactttggatcaaataataattatttgtggtcaatatgaaggttttgatgaaaggattagatgtttagctgatgaagagatatcgataggcgactatgtgctttctggaggtgaaatacctgctttatcaataattaatggtttgactagattattaccaggaactcttggagatccaggctccttggtatatgagagtcacaattcttctttattagaatatcctcattacacgaggccattaattttaa

SEQ ID NO: 227056 - DNA, 796 bp, Unknown
  Bacterial polypeptide expressing nucleotide sequence isolated from the Sargasso Sea
aatgaaccaggttaccgagagcgcggtgcagttcgacgtcgtcacgctctttcccgagatgttccgtgcactgaccgactgggggatcaccagccgggccgtcaagcaagggcgcttcgggctgcgcacctggaacccgcgtgatttcacgacggacaactaccgcacggtcgacgatcgtccgtacggcggcggtccgggcatggtgatgctggccaggccgctcgaagccgcgatcgatgccgcgaaagcggcgcaggcggagcagggcatcgcgagcacgcgtgtcgtgatgatgtcgccgcagggcgcgccgctcacgcacgatcgtgcggtgcggatggcgcaggaacccggtgtcgtcgtgctgtgcggccgctatgaagcgatcgaccagcgcctgctcgatcgttgcgtcgacgaggaaatcagcctcggcgatttcgtcctgtccggcggagaattgccggcgatggcgatgatggatgccgtcgtgcggttgctgcccggtgtgctgaacgattcgctgtcggcggtacaggacagtttcgctgacggcctgctcgattgtccgcactacacgcgccccgaggaatacgacggtgtgcgcgtgccggacgtgctgctcggcgggcatcatgccgagatcgagaagtggcggcggcaggaagcattgaggaatacgttgcggaagcggccggacctgatcgtccgggcgcgccgcgaaaagttgttgagccgcgccgacgaggcgtggcttgcgaacctcgcacgcgaagcgaaggacgcctcctga

SEQ ID NO: 227057 - DNA, 679 bp, Unknown
  Bacterial polypeptide expressing nucleotide sequence isolated from the Sargasso Sea
aatgaggattgatattttaacactatttcctgaaatttttgatagccttaattctttttcaatcattgacaaagccatcaaatcaaaaaaggtaaatatagtaactcataatctccgagactatgctgataactctagacatgttgatgatagtccttatggtggtggggctggaatgattataaaaattgaacctattgataactgtatagaaaagctaaaagaaaaaaatgattacgatgatatagtttatctaacccctgatggtgagattctaaatcaaaaaatttcaaataatttatctttaaagaaaaaccttatccttttatgtggacactataaaggtattgatcatagggttagagatcatctgataacaaaagaaatttcaattggaaattatgttttatcaggaggtgaacttccagcagctattttatgtgattccattattagacttattccaggtgttataggagatgaatcatcagcattatcagatagttttcaagataatattgtttctgccccaatatatactagaccagcaaactacaaagggttaaaagtgcctgacattcttatttcaggtaatcagaaagaaatagaaaaatggaaagaccagaagtctgttgaaaggacaaaattacttcgcccaaaactctttgataatctttaa

SEQ ID NO: 227058 - DNA, 688 bp, Unknown
  Bacterial polypeptide expressing nucleotide sequence isolated from the Sargasso Sea
tatgtggcaggctcaagtttttacactatatcctgaagtatttcccggtcctttaaataaaggaatatacggaaaggcattgttaaaaaaaatttggaatttaaaagttgtaaatattagagattatgcagaagataaacacaaaacagtagacgatactccatttggtggtggaagcggtatgcttttaaagccagatgttttggcaaagtcaattgatcaaaatataaaaaatggtgaaagaattttttatttatcaccaaagggaaaaaagtttgatcaaaaaattgcaaaagatttgtctaaggaaaaatgtataaatttgatatgtggacattttgaaggaattgatgaacgtattttaacaacacgaaatatagaagaaattagcataggggattttgttttatcaggaggagagacagcagctttagtactaattgacagtatactgagattattaccaggagttattggaaacgatatgtcaaaaaaaaatgaaagttttgaaaatggcctgttagaatatcctcaatatacaaaacctctaatttgggagaaaaagggtgttccagaggtgttattatctggagatcatgccaaaattaaaggctggcgtttatctcaatcagaggctataacacgcgaccgaaggccagatttatggcaaaaatataagaagaattaa

SEQ ID NO: 227059 - DNA, 697 bp, Unknown
  Bacterial polypeptide expressing nucleotide sequence isolated from the Sargasso Sea
aatgtggacagcacgagtattcactttgtacccagatatatttcctggcccgttaaaaaagggactttacggaaaggcaatggagaaaaaaatatggaatttaaaaacagttaatattcgtgactatgctaaagacaaacacaaaacagtagacgatacaccatttggtggtgggagtggcatgcttttgaaacccgatgtattaggtagctctttagataataatataaaaaaaggcgaaagaatattttatctctctccaagaggaaaaaaatttaatcaaaaaatagcaaaagaattatccaaagaaagtactatcaatttgatctgcggacatttcgaaggagttgatgaacgtattttgtctacaaggaatattgaggaaataagtgtaggagattatattttatcaggcggtgagacggcatcttttattataatagacgcagtcctaagattattacctggagtccttggtaataatgtttctaaagaggaagagacttttgaaaatcatcttctggagtatccccaatatacaaaaccccaaatatgggaaaaaaaaagtgttccagaagtcttattatcaggagatcatgccaaaattaaggactggcgtttgtctcaatcaaaggatataacacgacgccgaagaccagatttatggaaaaaacatttagataaagaaaaaaaatga

SEQ ID NO: 227060 - DNA, 418 bp, Unknown
  Bacterial polypeptide expressing nucleotide sequence isolated from the Sargasso Sea
atggccccctaccgccttgatgtggtgagcctggcgccgcaggcgtttgctcctctgctggagctgggggtgatcggtcgtgccttcaacgcgggcattgccgagttgcatctgcataaccccagggacttcgccacggatcgccatcgcaaggtggacgacgagccatacgggggcggtgccggcatggtgctcaagcccgagccggtgttcgccgcaatggaggcgattccccgcagtccccgcagccgggtgctgttgatgtcaccgcaggggcgtcccctccaacaggccgatctgcagcgttggtcctgtgaccacgatcaactggttttcctctgcggtcactacgagggcttcgacgagcggattcgcggcctggccgatgaggaggtgtcgatgggtgatttcgtcctca

SEQ ID NO: 227061 - DNA, 439 bp, Unknown
  Bacterial polypeptide expressing nucleotide sequence isolated from the Sargasso Sea
atgcagttcgatgtcgtgacgctctttccggacatgtttcgtgcgctgaccgactggggtatcaccagccgtgcggcgaagcaggagcgctacgggttgcgtacgtggaatccgcgcgatttcaccaccgacaactaccgcacaatcgacgatcgcccctacggcggcggccccggcatggtcatgctggccaagcctctggaagacgcgatcggtgcggcgaaagccgcgcaggcggagcagggcatcggcgcgccgcgcgtcgtgatgatgtcgccgcaaggcgccacactgaatcacgatcgcgtcatgcagttcgcggccgaaccgggcctgattctgttgtgcgggcgctatgaagcgatcgatcagcgtttgctcgaccgtgttgtcgacgaagaagtcagtctcggcgacttcgtgctgtccggcggcgaat

SEQ ID NO: 227062 - DNA, 733 bp, Unknown
  Bacterial polypeptide expressing nucleotide sequence isolated from the Sargasso Sea
atgaatataaatgttttaacaatttttccagaaatatttgaaattttaaattctggtgtactttcaaaagctatgaaaaaagatatattgtcaatcaaaccttttgatataagaaaaaacgctactaataaacataaaaatgttgattcaaagccatacgggggtggggaaggcatggttattatggcagaaccattgattaagactattaaaagtattgataaaagaaaacttggaccagttatttatatgtcaccacagggacaattactaactcaaaaaaaagtaatttcattatctaaactcaaaaatatgacagtaatatgcggaagatatgagggaattgatcaacgagtaattgataactatgtagatgaggaagtatcaataggagattttattttgagtggcggagagtacgcagcaatatgtttaattgatgcaatttcaagacatttacctggaactcttggaaataaggattcatatctgaaagatactttttctaatggattacttaaagaagatgtttatgcaaaacctgaaatttttgattctaagaaggttcctgaagtattattatccggaaaccacgaaaagattaaggcatggaaatctgagatttcattacttaaaacatttaaaaaaagacctgatttacttaaaaaaataaaattaacaaaaaaacaaaaaaaactcttggaagaatggtcatctaaggctatcctatagc

SEQ ID NO: 227063 - DNA, 703 bp, Unknown
  Bacterial polypeptide expressing nucleotide sequence isolated from the Sargasso Sea
gatgttagaggtgaaaatatttactttatatccagatttatttcctggacctttagataccgggatatttaaaaaggcaaaggataacaagatttggaatttaaaagtaattaatattagagattatactaaagataaacatggttccgtagatgataccccttttggaggtggaagcggaatgcttatgcgccctgatatactagcatctgcacttgatgagaatataaaaaaaggagaaaaaattatttacttatctcctagaggtaaaaaattcgatcaaaacgttgctagatctttaagtaaagaaaaaaacttaaaccttatctgtggtcactttgagggtgttgatcaaagactcgtagagacaagaaatattgaagaatatagtttgggtgactttattctatcagggggagagccagcttcatttgtatttgttgatgctctagttcgattattacctggagtactcggaaacgaagattctgtcaaagaagaaagttttgaaaattaccttttagaatatcctcaatatactaaacctagaaaatgggaaggcaaaagccctcctgaggtgttattttcaggtgatcacgctaaaataaaagggtggcgtttgtctcaatcagaggctataacacgtcgccagagacctgatctttggaaaaaatatttagagaaaaaaaatgaaaaacattga

SEQ ID NO: 227064 - DNA, 718 bp, Unknown
  Bacterial polypeptide expressing nucleotide sequence isolated from the Sargasso Sea
aatgtatcgagtaaaaattatcacacttttcccaaatagttttcctggacttttaaatacaggagtcgtgggtaaggcattaaagaaaaaaatatggtcattaaaaacaattgatccgagaaaatattcaaaaggtaattacaaaaaagtagatgataccacagctggtggcggtcctggtatgattttaaaagcagatgtaatcgggaagtctattgatgcttgttacaagaatataaaatctaaagatagttatccaatgatatatttaagtcctcgcggtactcctttaactcaaagtaaagttattaatttttcaaagatgaaaggaattaatattctctgtggtagatatgaaggcattgatcaacgcatactcgatttctatcctattgaggaaataagtattggagactatatactggcgggcggtgaaatagcttcccaggttttagtggaatcaatagtgagactgttgccaggaacacttggtgacatgaagtctgctagttcagagaccttctcaaaagaccttcttgaataccctcagtatacaaggcctaaaaaatggaaaaatttgacaattccagacatattgctctctggaaatcacagaaatattagtgagtggcgcttaaaacaatctgaaaaactgacacagaaagttaggccagatttatggaaaaactacaaaaaaagcaagacaaggaagaaataa

SEQ ID NO: 227065 - DNA, 751 bp, Unknown
  Bacterial polypeptide expressing nucleotide sequence isolated from the Sargasso Sea
ctgctcggaaatccgccgcgtcagcaagccctcctcgtgagcagcttccggctggatgtggtgagcctggtgccggaggtgttcgacagcctccgcggcctgggggtgatcgggcgcgccttcaatgcaggtatcgccgagctgcacacccacaacccgcgcgattacgccaccgatcgctaccgcaaggttgacgatgagccctatggcggcggcgcgggcatggtgctcaaacccgaaccggtgtttgccgcctttgaggcgatccccgtgcagccgcgccggcgcgtgctgctgatgacaccgcaaggcaagccgctgcagcaggccgacctacgccgttgggcaaccgattacgagcaattggtgctgctctgcggccactacgaaggcttcgatgagcgcatccgcagcctcgctgatgaagaggtgtcgctcggtgatttcgtgctcaccggcggtgagctgccggcgatgacgatcatcaatggcaccgtgcggctgcggcccggcaccctgggcaccgccgattccttggtggaggaaagccacagcgctgggctgctggagcatccccactacacgcgcccagccaactaccgcgaaatggaagtgccggcggtgctgcgcagcggcgaccatggcgccattgcccgctggcgcgccgagcagcagaaggaacgcactgagcaacggcgacctgatctttgggcccaatggcaggccgagcaccccggcgagcagggctgat

SEQ ID NO: 227066 - DNA, 691 bp, Unknown
  Bacterial polypeptide expressing nucleotide sequence isolated from the Sargasso Sea
tatgtttgttgctactgttttcactctctatccagatttatttccaggaccttttagtgaaggattatatggaaaagcattagaaaaaaaaatatggaatttacaaaaagtaaacttaagagattatgcggaagacaaacataaaactgttgatgatacgccatatggtggtggatcaggtatgttaattaagccagatgtgatcggcagagcgttggataaaaatacaaaaaaaggtgaaaaaataatatttttaacaccaagaggaaaagtgtttaatcatgaatgtgctaaaaaactttcgaaagaaaaaatcataaatataatttgtggacactttgagggaattgatcaaagagttatagactctagaaatattgaggagattagtattggcgattttgttttatctggtggtgaaacagcatcttatgtttttttagatgcgattttgagattaattccgggagttattggtaatgaaaattcaattgcagaagaaagctttgaaaatggacttttagagtatcctcaatatacaaaacctcaaatttgggagaaaaaaagtgtgcccgatgtccttttgtcaggagatcatgctaaaattaaagactggcgtttattgcaatctgaggctataacacgcgaccgaaggccagatttgtggcaaaaatataataaaaaaaattaa

SEQ ID NO: 227067 - DNA, 697 bp, Unknown
  Bacterial polypeptide expressing nucleotide sequence isolated from the Sargasso Sea
aatgtttttatctcgtatatttactttgtatccagactactttcctggctatttgaacaagggtttgtatggaaaagctatgagcgaaaaaatttggaatttagaaactgtaaatataagagactattcatctgataaacataatacagcagatgatacaccttatggaggtggaaatggaatgataatgaaagcagatgttttagctaaatctttggatgaaaacattaaagaaaaagaaaaaataatttatctaagcccaaaaggtaaattatttgatcataaatatgccaaacaactttcaaaagaaaaatctttaaatcttatatgtggacatttcgaaggcattgatgaaagaataattcaaagtagaaatatagaagaaattagtattggtgattttattttatctggaggtgaagcggcagcttttataattttagatgcagttttaagatttctcccaggagttttaggaaatgagaattctacagaggacgaaagttttgaaaacggacttttggagtatcctcaatataccaaacctcaaatatgggaagacaaaagtgttccagacgttctattatccggtgatcatgccaaaattaaagactggcgtttatctcaatctgaggctataacacgcgaccgaagaccagatttgtgggaaaaatataaaaaaattaaaaagaactaa

SEQ ID NO: 227068 - DNA, 196 bp, Unknown
  Bacterial polypeptide expressing nucleotide sequence isolated from the Sargasso Sea
agttttgaacacgatttattagagtaccctcaatatacaaaaccacaaatatgggaaaaaaaaagcgttccagatgtgctattatctggcaatcattctaaaattaaagactggcgtttatcccaatcaaaggatataacacgacgccaaagaccagatatgtggaaaaaatttttaaaaaaagaaaaaaaatgaa

SEQ ID NO: 227069 - DNA, 568 bp, Unknown
  Bacterial polypeptide expressing nucleotide sequence isolated from the Sargasso Sea
taagcatggcagtgtagatgatgctccatttggcggtggtagtggaatgcttttaagacctgatgttgttgcttcagctctcgataccaatgtaaaaaaaaatgaaaaaataatttatttgtcacctaaaggtaaaagacttgatcaaaaagaagtaagatctttaagtaaattgaataaagtaaatattttatgtggtcattttgaaggtatcgatcaaagattattagagactagaaatattgaagaatacagtttaggggattttgttttatctggtggtgaaactgcatcttttgtttttgtagatgctttagtaagattattgccaggagttttaggaaataaggagtctattaaagaagaaagttttgaaaatgatcttttggagtaccctcagtacactaaacccaaagattgggagggcaaaagtcctcctgaggtactgttttctggcgatcatgctaaaattaaggggtggcgtttatctcaatctgaggctataacacgtcgccagagacctgatctttggaaaaaatatttaaataaaaaaaatgaaaaacattga

SEQ ID NO: 227070 - DNA, 637 bp, Unknown
  Bacterial polypeptide expressing nucleotide sequence isolated from the Sargasso Sea
atgaattcatacaatgtaataacattatttccacatctaattgaagaatggaaaaataccgggattattaatcaagcattaaaaaataatttagtagctataaattcaacaaacctaagagattttggcataggaacatataaaaaagttgatgatgctccatatggcggtgggccaggaatggttttgatgccagaaccattagacaaagctataacttccagcaaggcagatattaatattttcctgactccatcaggacaacaattaaatgaaaacctcataagtgaattacttgaatacaagtcaattaatttggtatgtggtagatacgagggttatgatcaaagaattttagaaattcattctgattatgaaatatcaattggccaatctgttgtttccgggggagaaatcccagctttgtatttactagaagcattgattaggaaaatcccagatgtgttaggaaaccctgagtcattaaaaagtgaaacttttacagataataaaattgattatcctgtctatacaagacctgaaatctttaaaaataagaaagtaccagaggtacttttgtctggaaatcatcaaaaaatagatgaatggaaaaagaataatttaaaagacatataaa

SEQ ID NO: 227071 - DNA, 733 bp, Unknown
  Bacterial polypeptide expressing nucleotide sequence isolated from the Sargasso Sea
tatgaatattaatattttgacaatttttccagatatatttaacgttttaaatttaggagttgtttctaaagcaattaaacaaaatctgataactataaatcttagtgatatcagaaagaatgccatcaataaacacaatcaagttgattcaaaaccttatggtggtggtgaaggcatggttatgatggcagagcctttaattaagactattaaaaatataaacacatcaaaaagaggacatattgtttatatgtctccccaagggacaaaattaaatcaagacaaagtaatttcgctatcaaaacttgaaaatataacaataatttgtggaagatatgaagggattgaccaaagagtaattgacaattatgttgatgaagaaatatcaattggtgattttgttctaagtgggggagagtatgcagccatttgcttaatagattcaatttctcggcacataccaggcacgttaggaaataaaaattcttatttaaaagataccttctcaaatggactattaaaagaagatgtctatacaaaaccagaaatatatgactcttttaaggttcctgacatacttctatcaggcaaccatgaaaaaattgaagcatggaaatcagatatgtcattaattaaaacttattcaaaaagacctgatttattaaaaaatagaaaactaacaaaaaaacaaaaaaaactcttggaagaatgttcatctaaggctatcctatag

SEQ ID NO: 227072 - DNA, 685 bp, Unknown
  Bacterial polypeptide expressing nucleotide sequence isolated from the Sargasso Sea
gatgttagctcgaatatttacactttatcctgaattttttccaggaccacttggaaaaggtttgtatggaaaggctttagctgcaaatatttgggagttagagacagtaaatattagaaactatgcaactgataaacataagactgttgatgatactacttatggtggaggttctggaatgttgattaaacctgacgttcttgcaaattctttagataaaaatttaaattctaaagaaagaataatttatttaagcccaaagggaaaattatttaatcaaaaattagcgaaagaactttctaaagaaagatctattaatttgatatgtggacattttgaaggtgttgatcaaagagtaatagaatccagaaatatagaagaagttagtataggtgactttgttttgtctggtggagaaagtgctgcatttgtaatgctagactcaattataagattattgccaggggtacttggaaacgaaacttctgcagaagaggaaagctttgagaatggacttttagagtatcctcaatatacaaaacctcaaatttgggaagaaaaaacagtaccagatgtactattatcaggagatcatgccaaaattaaagactggcgtttatctcaatctgaggctataactcgcgaccgaagaccagatttgtggcaaaaatataaaaagaattaa

SEQ ID NO: 227073 - DNA, 370 bp, Unknown
  Bacterial polypeptide expressing nucleotide sequence isolated from the Sargasso Sea
gtcattaatttgtggtcattttgagggtgtggatgaaagaatactttcaacaagaaatattgaggaaattagtattggagattatgttttgtcaggcggtgagtcagcggcatatgtagttatagatagtattttaaggttgctgccaggtgtattaggaaatgaaaactctaaattagatgaaacctttgaaaatggtcttctagagtaccctcaatatacaaaacctcaaatttgggaggaaaaacctgtgccagacgtactattatcaggtgatcataataaaattaaacactggcgtttgtctcaatctgaggctataacacgcgtccgaagaccagatttatgggaaaaatataagaagaattaa

SEQ ID NO: 227074 - DNA, 856 bp, Unknown
  Bacterial polypeptide expressing nucleotide sequence isolated from the Sargasso Sea
atgagtggttttaattttgatgtaattacattgttccctaaagcttttgaattaataaataatttaggtgtcataacgagagctctagataagaatttgatcgatgtaaatttacatgatttgagagaatatggagaaggttcgtacagacaagtagacgataagccttatggaggaggagcaggtatggtattaaaacctgaacctatctataaggcatatgaatcaattagaaaattgcctaaaagtaaaactttgctgatgaccccgcagggtaaagtcctcaagcaaaaagatcttgcgagatggtccactttggatcaaataataattatttgtggtcaatatgaaggttttgatgaaaggattagatgtttagctgatgaagagatatctataggcgattatgtactttctggtggtgaaatacccgctatatcaataattaacggcttgactagattattaccaggaactcttggtgatccagactccttagtcgatgagagtcataattcttctttattagaatatccacaatatacgaggccgttaacttttaaagatatgaaagtgccagatattctagttagcggtaatcatgaagagattaaatcgtggagaaaaagaaaaagttttgaaagaacattggagagaagaagtgacttgatttcaaatgaaaactacaaaaaatccccacaaagtaagagaataataaaagaaaataatcaattcatgaaatttagaataggtaacggatatgatattcacagactagtagagaatagagatttaattattggaggtgtaaaattgcatcatcctgaaaatttagggttggatggacatagtgatg

SEQ ID NO: 227075 - DNA, 640 bp, Unknown
  Bacterial polypeptide expressing nucleotide sequence isolated from the Sargasso Sea
atgttatcaaactttaacgttattactttattccctgagatatttcaaaagtggattaatgttggcgttctttcacatggtattgaagaaaaattatttgaatttagcagtacaaatttaagagattatggcattggtagttataaacaagtggatgacgctccatacggtggaggaccaggtatggtattaatggttgagcctttagataatgcaattaaggaatctaaaaaagatatcaacatatttttaacaccaagcggacagcagttaaatgaagatttgatacaagatcttcacggatatgaatcagcgaatattatttgtggaagatatgaaggctttgatcaaagaataatcgaaatgcatagcgattatgaaattgcgatcggacagactgttgtatctggtggagaggttcctgcaatgtttttaattgaagctctagtaagaaaaattccaggaattcttgggaattcagaatctttaacaaatgaatcatttacaaacaacaaatctgattttcctgtgtatacaagacctgaaatttatggaaatcttaatgttcctgaagttttgttatctggtgatcataaaagaattgaaaaatggaaaaagaataatttaaaagacatttaaa

SEQ ID NO: 227076 - DNA, 748 bp, Unknown
  Bacterial polypeptide expressing nucleotide sequence isolated from the Sargasso Sea
aatgatttaccaaatagacgtagttacgctttttccagatataatttcatcagctttaactcatggagtaattggtcgcgccaagggaaatggactaattgaattaagaaactggaatcctcgaaattacgctcaagataaacataaaactgttgatgatcgtccatacggcggagggcctgggatggttttaaagcaccagcctttaagcgcagcaataaaaaaagctaaggaaaagcaaccaaaaacaaaagttatattactttcgccacaaggtactcagttaaaacaatcaagtgttgccgaattttcaaaaagaaaaggtatgataattgtatgtggacgctacgaaggcgttgatgagcgtataattatgtctgagatagatgaggaatggtcaataggagattatgtacttagtggcggtgaatttgccgccttagtcttaatagacagtgtttgtaggctattaccaggtgttttaggcgataataactcagcaaatgaagattcatttgttgacggcttgctcgactatccgcattatacgcgtccagatgatattaatggtttaacagtcccagagattttacaaagtggaaaccacgaggaaatcagacgctggaggttaaaacaggcaataggtaaaacttggcgaataagaccagatttaatagaatcaatagaacttaatgaagagcaaaaattattattgcaggaatatatagacgaaattaaaaaaaattaa

SEQ ID NO: 227077 - DNA, 727 bp, Unknown
  Bacterial polypeptide expressing nucleotide sequence isolated from the Sargasso Sea
atgaactttaatttactaacaatttttcctgaaattacaaaattattagactttggagttattggcaaggctattgaaaaagatttaatttctataaatggtttgaacccaaggaatttctcaaaaaatatcaataaaaatgtggatgatgcaccttatggtggaggcgagggaatggttatgatggcagagcctctagcactggcaataaaatcaataaaaaataagggaaaggtgcttttgatgagtcctcagggagagcatttatccaatgctcatattgataatctactcgacgaaaaatcaattactatcatttgtggaagatatgagggcattgatgaaagatttattgaaaattatgttgatcaagagttttctattggcgactttgtcattagtggtggagaaataccggcattagccttaatagatgcattatccagaaagattccaggtgttcttggtaaccaggaatcttttaaaaacgattcatttgaaaataatcttttaaaagggcctgtatataccagacctcagatatttgaagaaaaagatgtaccagaaattttattgtcagggaatcatgagaaaattaatgattggaagattttatcttcattacaacgaaccattgaaagaagacccgatctcttagatggtgtaaaattaacaaaaaaacaaaaaaaactcttggataatttgttatctaagcgtatcctatagg

SEQ ID NO: 227078 - DNA, 733 bp, Unknown
  Bacterial polypeptide expressing nucleotide sequence isolated from the Sargasso Sea
atgaatataaatgttttaacaatttttccagaaatatttgaaattttaaattctggtgtaatttcaaaagctatgaaaaaagacatattgtcaattaaagctttggatataagaaaaaacactactaataagcataaaaatgttgattcaaagccatatgggggtggggaaggtatggttattatggcagaaccattgattaagactattgaaagtattgataaaagaaaacttggaccagttatttatatgtcaccacagggacaattactaacacaaaaaaaagtaatttcattatctaaactcaaaaatatgacagtaatatgcggaagatatgagggaattgatcaacgagtaattgataactatgtagatgaggaagtatcaataggagattttattttgagtggtggagagtatgcagcaatatgtttaattgatgcaatttcaagacatttacctggaactcttggaaataaggattcatatctgaaagatactttttctaatggattgcttaaagaagatgtttatgcaaagcctgaaatttttaattcttacaaggttcctgaaatattattatccggaaaccacgaaaagattaaagcatggaaatctgagatttcattacttaaaacatcaaaaaaaagacctgatttacttaaaaaaataaaattaacaaaaaaacaaaaaaaactcttggaagaatggtcatctaaggctatcctatagc

SEQ ID NO: 227079 - DNA, 688 bp, Unknown
  Bacterial polypeptide expressing nucleotide sequence isolated from the Sargasso Sea
atgtggcaagctcaagtgtttaccctttatccagaagtttttcctggtcctttatctaaaggactttatggaaaagctttatctagtgatttgtggaaacttaaagttgtaaatataagagattcagcagatgacaaacataaaacagttgatgatacaccttatggaggtggctcaggaatgttgttaaaagcagatgttcttgcaaagtctttagatgaaaatagaaatgagaatgagagaattttatacttatcaccaaaaggaaaaaaatttgatcaaaatttagcgaaagaactagctgatgaaaaatctttgtctataatttgtggtcacttcgagggtgtagatgacagaatactttcaacaagaaacattgaagaagttagtattggagattatgttttatctggcggggagtcagcagcatatgtagtgatagatagtatcttaagattactgccaggtgttttgggaaacgaaaactctaaattagatgaaacctttgaaaatggccttctagagtatcctcaatatacaaaacctcagatttgggaggaaaaagctgtgccagatgtactattatcaggggatcataataaaattaaacactggcgtttatctcaatcagaggctataacacgcgaccgaagaccagatttatgggaaaaatataagaagaattaac

SEQ ID NO: 227080 - DNA, 733 bp, Unknown
  Bacterial polypeptide expressing nucleotide sequence isolated from the Sargasso Sea
aatgaatattaatattctaactatatttcctgagatatttaatgttttagaatctggtgtggtttcaaaaccaattaagaataaattactttctattcaagccttagatattagaaagaattctgtaaataaacataatcatgtagattcaaaaccttatggtggcggtgaaggaatggtcatgatggctgaaccaattgttaaaacattaaaagaaatagataaaaaaaaacgtggtcgagtaatctttatgtcacctcaaggcaagagactaaatcaacaaaaaattatttctttatctaaattaaaaaatataactttaatttgtggaagatatgaaggcatagatcaaagaataattgataaatatgtggacgaagaaatttctattggcgattttattttaagtggtggcgagtatgcagcaatatgtctagtagatgctatatcgagatacttacctgggactttaggaaacaaagactcatatctaaatgatactttttcaaatggtttgttaaaaggcgatgttttcacaaaacctgaaatatttgaatctatgaaggttcctgacgtgcttttatcaggaaatcataaaaaaattgaaacttggagatctgaaatatcttttgtaagaactttaatgaaaagacctgatttattagatggtataaaattaacaaaaaaacaaaaaaaactcttggaagaatggacatctaaggctatcctatag

SEQ ID NO: 227081 - DNA, 691 bp, Unknown
  Bacterial polypeptide expressing nucleotide sequence isolated from the Sargasso Sea
atgaatatagctaataatttaaaatataacgtaaaaatactttctatttttccagaagtttttcctggacctcttggagtgtctttaattggaaacgctcttaaaaagaaaatttggaatttagatatcattaatattagagattttgcaaaagacaaacataaaagtgtagatgatactccttatggtggcggggcaggtatgataatgaagcctgacataataggattatcaatagattcacttaaagataatagaagtaaaaggatttgtttaacaccaagaggtaaattgctaaatcaagacaaggtaaaagaactctctactgaagatggattgattttgctttgtggcagatatgaaggcatagaccaacgcgtaattgacttttatgattttgaagaagtaagtatagggaattatgtaatatctggtggagagagtgcaacttttgtcttattagaaagcgtattaaggttgcttcctggtgttttaggtggtaatgaaacattaaatgaggagagcttttcagataaagatctgttagaatatccacaatacactaaaccgagagattggaatggaatatgtgttccagaagtattaacttctggcaatcataatgaaattaaaaattggagagataagcaaagaattgagataacaaagtcaagaaaactcgacacttaat

SEQ ID NO: 227082 - DNA, 622 bp, Unknown
  Bacterial polypeptide expressing nucleotide sequence isolated from the Sargasso Sea
tatggcagagcaatggtcaaaaaattgtggagtttgaatgtaattaatattagagatgcagcaacagataaacacaagacagtagatgatgcaccatatggtggtggtacaggaatgttacttaaacctgacgttttagcaaaatctatcgatcagaatataaataaaggggaaagaattttttatctttcacctaaaggtaaaaaatttgatcaaaatcttgctacagaattgtccaaagaaaagtcattttctttaatttgtggacattttgaaggtgttgatgagagggttttaactacaagaaatatagaggaaataagtattggagattatgtgttgtcaggcggtgaaacagctgcacttgtggttcttgatagtgtgctaagacttttgcctggagttttagggaatgaaaaatcagcctctgaggaaacttttgaaaatggtcttttggaatatcctcaatatacaaaaccacagatttgggaggaaaaatcggtaccagatgtgttattatcaggggatcacgctaaaattaaagactggcgtttatctcaatctgaggctataacacgcgaccgaagaccagatttgtggcaaaaatataagaaaaactgaa

SEQ ID NO: 227083 - DNA, 598 bp, Unknown
  Bacterial polypeptide expressing nucleotide sequence isolated from the Sargasso Sea
atttggaatttaaaagtagtaaacattagagatgctgctgaggataaacataaaacagtagatgacactccttacggtggtggcactggtatgttaatgaaacctgatgtattagcaaaatcattagaccaaaataaaaatgaaggagaaaaaatattatatttgtctcctagaggaaaaaaatttgatcaaaattatgctaaagaattatcaaaggaaaaatcgatttcgataatttgtggacacttcgaaggagttgatgaaagagtgttaagcaccagaaacatagaagaagttagtattggagactttattttatcaggaggagagtcagcagcatttgtggtgattgatagtattttgagacttttacccggtgttctgggaaatgagaattctacgataaacgaaagttttgaaaatggattattagagtatcctcagttcacaaaacctcaaatttgggaggaaaaagctgttccagaagtgcttttgtcaggagatcatagcaaaattaaacactggcgtttatctcaatctgaggctataacacgcgtccgaagaccagatttatgggaaaaatataagaagaattaat

SEQ ID NO: 227084 - DNA, 619 bp, Unknown
  Bacterial polypeptide expressing nucleotide sequence isolated from the Sargasso Sea
tctgaatgaaaaaatttggaatttagaaactgtaaatataagaaactattcatctgataaacacaaaacagttgatgatactccctatggaggtggaaatggtatgttaatcaaagctgatgttttggcaaaatctttagatgaaaatataaaagaaaaagaaaagataatttatttaagtccaaaaggtaaattatttaatcataagtatgccaaggaactttcatcagaaaaatctttaaatctcatttgtggtcatttcgaaggtattgatgaaagaataattgaaagtagaaatatagaagaaattagtattggtgattttgttttgtctggaggtgaagcagcagcttttataattttagacgcggttttaagatttcttccaggagttttaggaaatgaaaattctacagaagaagaaagttttgaaaatgggcttttagagtatccccaatacactaagccccaaatttgggaagataaaagcgttccagatgttctattatcgggcgatcatgccaaaattaaagactggcgtttgactcaatctgaggctataacacgcgaccgaagaccagatttgtggcaaaaatataaaggatttaaaaagaattaa

SEQ ID NO: 227085 - DNA, 471 bp, Unknown
  Bacterial polypeptide expressing nucleotide sequence isolated from the Sargasso Sea
gtagcattttaagtcagaaaaaagcaatggaattatctacccaaaaaaatataacaatcttatgtggacggtatgaaggtattgatgaaaggtttatttctcaatatgtggatgatgaaatttctattggagattatattttaagtggtggtgaatttgccgcacttactcttattgatacattagcaagattcattcctggtgtcataggtaataaaaaatcagtagagcaagatacattcagtcaaggactcttaaaaggaccagtgtttacaagacctgaaaattttaattctgatgaagttccagaggttttactgtctggcgatcacaatagaattagagaatggagagataatcaatctctcattagaacttttaagagaaggcctgatcttttgaaggatataaaattaacaaaaaaacaaaaaaaactcttggaagaattgtcatctaaggctatcctgtagc

SEQ ID NO: 227086 - DNA, 334 bp, Unknown
  Bacterial polypeptide expressing nucleotide sequence isolated from the Sargasso Sea
aagaataattcaaagtagggatatagaagaagtaagcataggtgactttattttatctggtggagaagtagcaacttttgtaattcttgatgcaattttaagatttcttccaggcgttttaggaaatgaaaattcttctgaagaagagagttttgagaatggacttttagaatatcctcagtataccaagcctcaaatttgggaagataaaggtgtaccagatgttctattatcgggtgatcatgccaaaattaaagactggcgtttatcccaatctgaggctataacacgcgaccgaaggccagatttatggcaaaaatataaaaagaattaa

SEQ ID NO: 227087 - DNA, 739 bp, Unknown
  Bacterial polypeptide expressing nucleotide sequence isolated from the Sargasso Sea
tatgtggttaggggtaataaccctgttcccagacatgttccgtgccgtaacagactttggggttacgggtcgtgccgtgaagaacggtctgcttgagttgcacacgtggaatcctcgcgatttcacccatgatagacacagtacggtagatgacaggccttacggcggtggtcccggtatgttgatgatggtgcaacccttacgcgatgccatccatgctgcgaaagcggcggcaggcgaagaggcaaaggtgatttacttgtcacctcaaggacgcaagctggatcagcaaggcgttactgagttggctgaatcatcccggttgattctggtgtgtggtcggtacgaaggtattgatgaacgcatcattcaaacggaagtggatgaagaatggtcggttggggattacgtgctttcgggcggcgaattacctgcaatgaccttgatagatgcagtatcgagattggttcctggcgtgctaggaaaacaagcttcggcggagcaagattctttctccgatggtttactggactgtcctcattacacgcgccctgaaagtctggatggactcgatgtacccgcagtactgctaagtggcaaccacgaacaaattagactctggcgtttgcagcaaagccttggtaggacttttctaagacggccagaattatttgaaaatctagctctgactgacgaacaatcgactcttttagcgcagttcgttgaagcaatggacaag

SEQ ID NO: 227088 - DNA, 748 bp, Unknown
  Bacterial polypeptide expressing nucleotide sequence isolated from the Sargasso Sea
tatgtggttaggggtaattaccctgttcccagacatgtttcgtgccgtaacagactttggggttacgggtcgtgccgtgaaaaacggtctgcttgagttgcacacgtggaatcctcgcgatttcacccatgatagacacagtactgtggatgataggccttacggcggtggtcctggtatgttgatgatggtgcaacccttacgcgatgccattcatgctgcgaaagcagcagcaggcgaagaggcaaaggtgatttacttgtcacctcaaggacgcaagctggatcagcaaggcgttactgagttggctaaatcatcccggttgattttggtgtgtggtcggtacgaaggtattgatgaacgcatcattcaaacggaagtggatgaagaatggtcggttggggattacgtgctttcgggcggcgaattacccgcaatgaccttgatagatgcagtatcgagattggttcctggcgtgctaggaaaacaagcttcggcggagcaagattctttctccgacggtttactggactgtcctcattacacgcgccctgaaagtctggatggactcgatgtacctgcagtactgctaagtggcaaccacgaacaaattagactctggcgtttgcagcaaagccttggtaggacttttctaagacggccagaattatttgaaaatctagctctgactgacgaacaatcgactcttttagcgcagttcgttgaagcaatggacaagcatgcttag

SEQ ID NO: 227089 - DNA, 624 bp, Unknown
  Bacterial polypeptide expressing nucleotide sequence isolated from the Sargasso Sea
tgtatggaaaggctctatctaataagttatggaatttaaatgttgtaaatataagagatgcagcaacagataaacataaaactgttgatgacactccgtatggaggtggaacaggaatgttactcaaaccagatatattagcgaaatcattagaccaaagagtaaaaaaagatgaaagaattttttatttatcacctaagggaaaaaaatttgatcaaaaatttgcaaaagatttatcaaaagaaaaatctatctctctaatttgtggtcattttgaaggagttgatgagagagttttagatacaagaaatatagaggaaataagtataggagattatgtcttgtctggtggagaaactgctgcattagttgtgcttgatagcattttaagacttttacctggtgtactaggaaatgaaaaatctgcaattgatgaaacctttgaaaacggtcttttagagtacccccaatatacaaaacctcaaatttgggaggaaaaatcagtaccagaggtattattatctggagatcatgctaaaattaaagactggcgtttatctcaatctgaggctataactcgcgaccgaagaccagatttgtggcaaaaatataaaaaaaattaat

SEQ ID NO: 227090 - DNA, 688 bp, Unknown
  Bacterial polypeptide expressing nucleotide sequence isolated from the Sargasso Sea
tatgtggcaagctcaagtgtttacactttatccagaagtttttcctggtcctctgtcaaaaggattatatggaaaagctatgtctaaaaagttatgggatctaaaggttgttaacataagagatgcagctgaagataaacataaaactgtagatgacacaccttatggtggtggatcaggaatgttactaaaggcagatgtccttgctaaatcattagatcaaaacagaattgaaggtgaaaaaattttatatttgtctccaaaaggaaaaaaatttgatcaaagctatgcaaaaaaattggcaactgcaaaatccttatcacttatttgtggtcattttgaaggcgttgacgagagagtattatctacaagaaatatagaagaagtaagtataggagattatgttttgtctggaggcgaaacagctgcatatgttgttattgatagtgtactcaggctattaccaggggtattagggaatgataattctaagatcgaagaaacttttgaaaatggtctattagagtatccgcagtatacaaaacctcaaatttgggaagaaaaatcagtaccagatgtactattatcaggtgatcatagtaaaattaaagactggcgtttatctcaatctgaggctataacacgcgaccgaagaccagatttgtgggaaaaatataagaaaaactaa

SEQ ID NO: 227091 - DNA, 715 bp, Unknown
  Bacterial polypeptide expressing nucleotide sequence isolated from the Sargasso Sea
attgaaacagaaaatagcaataataacccccgttccagatatgatagaatctgtaatccagaattctatgacaaggaaagctattgaaaaaggtattttggatattcatattgtaaatccaagagattttaccagtgatagttatcgacagatagatgatacaccttatggggggggacctggaatggtaatgatggctgaacctttgtttaaagcaattgacttcgtgatcgaaaaattttgcggtgatgatggtatgcgagttttatatccatcaccgcaaggtatagcttggtcccaagattctgctgaagaaaataaaagtgttgaaaaaattgtaattatttgcggtcattataaaggtgtagaccagcgcgttattgataaatatgttacgcatgaatattcaatgggtgattttgtattatcttgcggtgagatcccagctttaatgattattgatagtattgtaagattattgcctggcgtattaaataatattaattcttccaaaacagataccttttcatctgaattattggatgcgccttattatacccagccaagagaaatcaatggaatgcaagttccagacgtacttttatcgggaaatcatagcaagattactgactggaaaaaagaacagcaaattgaaatcaccaagtcaaggcgtcctgatatatggaaaaaatacttaaataataaatcggagtaa

SEQ ID NO: 227092 - DNA, 733 bp, Unknown
  Bacterial polypeptide expressing nucleotide sequence isolated from the Sargasso Sea
gatgcgaataaacgtaattacaatttttcctgagatatttgatattttgaatgttggtgtaatatctaaatcattaaaaaataaaattattaagttagatgttcgcgatcttagaaaaaacgccactaataaacataacaatattgattcgaaaccatatggaggtggtgaaggtatggttatgatggcagaaccaatagtaaaaactctcaaacaaattaaaaagaaagagcgcggtccagttatttttatgtcaccgcagggtgaaaaactagatcaaaaaaaggttaaatctttttcaaaattaaaaaacataacaatcatatgtggaaggtacgaaggtattgatcaaagagttattgataaatatgtagatgaagaaatttcaataggagattttattttaagtgggggagagtatgctgcagtttgtttaattgatgcaataacaagacacattccaggcacacttggaaataaagactcctacttaaaagatacattctcaaatgggcttttgaaaggagatgtttatgcaaagcctgaaagttttgaatctatgaaagttccagatgttttgctttcagggaatcataaagaaattgattcctggagagagcacaattcattacttaaaactttcataaaaagaccagatttgttaaatgatgtaaaattaacaaaaaaacaaaaaaaactcttggaagaatgggcatctaaggatatcctatag

SEQ ID NO: 227093 - DNA, 624 bp, Unknown
  Bacterial polypeptide expressing nucleotide sequence isolated from the Sargasso Sea
attattcaaaaagtcctagcaaaagagttgatgacaaaccttttggcggtgggtcaggaatggtaatggaggcaggccctatcattaaagcggttgaagaagccaagaaaaaatctattgatgctcatgtaatctacttatctcctcaaggaaaattattcaatcaagagaaagcaaaagaattggctgataaatcaaatattattttgatttctggaaggtatgaaggagtagatcaaagagtagttgatcatatagtcgatgaagaaatttctattggagattatgtactttctggtggagaaatagcctctctgattcttattgatagcataagtagacaaattgaaggcgtagtaggtgatttccaatccgtagaagatgactctttgtatgacggtcttttaaagcaccctcaatatactaggcccgaggaatctgagtatggagttgttcccaaaattctacttagcggcaaccatgaatcaattagatcttggaaaataaaaaaatcgttagaaaatactatgatgaaaaggcctgatttattagagaaggctaatttagacaaggaaaaaaagaaagttttaggtcagattaaaaaagatgaagaaaaaacttaat

SEQ ID NO: 227094 - DNA, 688 bp, Unknown
  Bacterial polypeptide expressing nucleotide sequence isolated from the Sargasso Sea
atgttaaagacacaagtgttaacactttatccagaaattttccctggtcctttaaacaaaggattatatggaaaagcaatggctaaaaagatatggagtcttaatatagtaaacataagagatgcagcaacagataaacacaaaactgtcgatgatactccatatggtggcggatcaggtatgctgttaaaaccagacatactagcaaaatcaattgataaaaatatccggaagggggaaagaattttttatctttcgccaaaaggtaaaaaatttgatcaaagacttgcacaagatttatcaaaagaaaaatcattcagtttaatttgtggacatttcgaaggtgttgatgaaagagtactatccacaagaaatattgaggaaataagtataggagattatgtgctttctggaggggaaacagctgctcttgtagttcttgatagtgtgttaagacttttgcctgaagttttaggtaatgataaatcatcttcggaggaaacttttgaaaatggtcttttagagtatcctcaatatacaaaacctcaaatttgggaggaaaaatcagtaccagatgtcttattatcaggggatcatagcaaaattaaagactggcgtttatctcaatctgaggctataacacgcgtccgaagaccagatttgtggcaaaaatataagaaggattaac

SEQ ID NO: 227095 - DNA, 688 bp, Unknown
  Bacterial polypeptide expressing nucleotide sequence isolated from the Sargasso Sea
aatgtttaatgctcaaatattcactttgtatccagatttttttccagggtttctctctaagggtttatatggaaaggcaatgtctgaaaacaaatggaaactaaaaattgtaaatataagagactatgcatcagataaacataaaacagtggatgactccccttatggaggaggatcaggtatgctgattagacctgatgtaatttcgaaagcaattgactctaatattaaaactgatgaaaaaataatttttctatctccaaaaggaaaattatttaatcaggaaaaagctagagaattttcaaaagaaaaaaaaattaatttattatgtggtcattttgaaggaatagaccagagagtaatagataacagaaatattgaagaactaagtgttggtgactatattttatctggaggggaaacagcagcaatgatagttatggatagtataataagattattgcctggtgttttaggaaatgaaagttcaatttctgaagaaacttttgaaaatggtcttttagaatatcctcaatacacaaaaccgcaaatttgggaaaataaagaggttcccaatatacttttatcaggagatcatgcgaaaattaaagactggcgtttatcccaatctaaggttataacacgcgaccgaaggccagatttatggcagaaatataagaaagattaa

SEQ ID NO: 227096 - DNA, 655 bp, Unknown
  Bacterial polypeptide expressing nucleotide sequence isolated from the Sargasso Sea
atgaatataaatgttttaacaatttttccagaaatatttgaaattttaaattctggtgtaatttctaaagctatgaaaaaagacatattgtcaatcaaagcttttgatataagaaaaaacactactaataagcataaaaatgttgattcaaagccatatgggggtggggaaggtatggttattatggcagaaccattgattaagactattaaaagtattcataaaagaaaacttggaccaattatttatatgtcaccacagggacaattactaactcaaaaaaaagtaatttcattatctaaactcaaaaatatgacagtaatctgcggaagatatgaaggaattgatcaacgagtaattgataactatgtagatgaggaagtatcaataggagattttattttgagtggtggagagtacgcagcaatatgtttaattgatgcaatttcgagacatttacctggaactcttggaaataaggattcatatctgaaagatactttttctaatggattacttaaagaagatgtttatgcaaaacctgaaatttttgattctaacaaggttcctgaaatattattatccggaaaccacgaaaagattaaggcatggaaatctgagatatcattacttaaaacatttaaaaaaagacctg

SEQ ID NO: 227097 - DNA, 733 bp, Unknown
  Bacterial polypeptide expressing nucleotide sequence isolated from the Sargasso Sea
tatgaatataaatattattactctgtttcctgaaatatttgatgtatttgaaaccggtattatatctaaagcaatcaaacaaaaacttttgttattaaatatatttgatataaggaaaaattctataaataagcattttcatgttgattcaaagccctatggtggaggagagggaatggtcatgatggcagaaccaattgtaaaaactttattagaaataaaaaacctaaaaaaaaattcagttatctatctttcccctcaaggaaaaaaaatagatcagaaaaaagtagttgatttatcaaaacttaaaaatataactttaatatgcggtaggtatgaaggaatagatcaaagggtaattgataaatatgttgatgaagaattatcaattggtgattttgttttaagcggtggtgaatatgcagccttatgtttaatcgatgctatttcaagacatatccctggtacattaggaaataaagattcttatatgaaagatactttttctaatggattgttaaaaggaagtgtctatacgaagccagaaatatttgaggaaatgagtgtcccaaaggttcttttatcaggaaatcataaagaaatagaagaatggagagctaataattcattaaaacaaacttttttaagaagacctgatttattaaataatgtaaaattgacaaaaaaacaaaaaaaactcttggaagaatgggcatctaaggatatcctatag

SEQ ID NO: 227098 - DNA, 703 bp, Unknown
  Bacterial polypeptide expressing nucleotide sequence isolated from the Sargasso Sea
atgacttggaaagcaaatattttaactttatatccagagatatatcctggttatttgagctatagtttacttggtaaagctcttgaaaaaaaaatttgggaactgaatatatataatttgcgcgattttggagatggaaagcacaaaactgtagatgataaaccttttggtggcggtgctggaatgataataaagccagatattctaggtaatgctattgaagaaacacttattaaaaaccatgctcgacaatcattagtttatttatcgcctaagggaaggccctttaaacaaattgatgctaaaaatttttcccaaagttctggggtatctatattatgtggtcattttgaaggaattgaccaaagggtccttgatatttatgaaatagaagaaatatcaatgggagattatattttaagcggtggtgaagtcgcttcctttacttttttggattcaattttaagattactaccaggtgttcttggaaatgaagcatctattgaagatgagtccttttccgacgatttacttgaatatcctcaatacaccaaaccacaagaatataaaaatattaaggttccagatgtattgctatctggcaatcatgaagaaatagaaaaatggcgtaaagaaaaatctattgaaataacaaaaaaaaatagacctgatatgctaaaacacgaaaagagtaagaaataat

SEQ ID NO: 227099 - DNA, 697 bp, Unknown
  Bacterial polypeptide expressing nucleotide sequence isolated from the Sargasso Sea
tatggaagtttttataataacgccttttccaagtacgattaatgtattaatcgaaaataatattgctaatcaaggaattaaaaaaaatctcctcaatgttgaagttgttaatcttagagattttactaatgataattataaaaaaattgacgatgagccatatggtggaggcagtggaatggtgatgatgtgtcagcctttatttagtgcgatcgattattgtattgataagtctcaaaaaaaacctaaagtaattttcccctctcctaaaggagaagttttaagtcataaaatgagcagtgatttgagcaatgaaaattcacttatttttatttgtggtcactataaagggattgatgaaagagtaatcgataaatatgttgatttagaagtatctataggagatttcgttatttcgaatggcgaactatcaaccatgattatttttgattcaattgttagattattacctggagttttaaacgatttaaattctgcaatgactgattcttttgttgacgatttactagatgctccttattttacgcggcctaatgaaattgatggattaaaagttccagaagtattattatctggcgatcataaagcaattgaaaaatggcgaaatgataaaaaattagaaattactaaagacagaagacctgatcttttaaaagaagaaaaaaattatgagtaa

SEQ ID NO: 227100 - DNA, 697 bp, Unknown
  Bacterial polypeptide expressing nucleotide sequence isolated from the Sargasso Sea
atgtggaaagcacgagtattcactttgtatccagaaatatatcctggccctttaaacaaagggctctacgggaaagctttagaaaaaaaagtttggaacttagaggtcgtcaatattagagattcagctgaagacaaacataaaacggttgatgacaaaccatttggaggaggaagtggaatgcttttaaaaccagatgtattaggaaaatctattgatgcaaatgtaaaaaaaggtgaaaaaatattttacctaacgcctaaaggaataaactttaatcaaaagaaagctaaagaattttctaaggaaaaagttataaatttaatatgcggacattttgaaggagtagatgaacgaatactaaacacaagaaatattgaacagctaagtattggagattatattttatcaggaggtgagtcagcatcatttgtagtgattgatacagttttaagattattacctgcggtgcttggaaataataactcaaaagatgatgaaagttttgaacacgatttattagagtaccctcaatatacaaaaccacaaatatgggaaaaaaaaagcgttccagatgtacttttatctggtaatcattctaaaattaaagactggcgtttatcccaatcaaaggatataacacgacgccaaagaccggatatgtggaaaaaatttttaaaaaaagaaaaaaaatgaa

SEQ ID NO: 227101 - DNA, 376 bp, Unknown
  Bacterial polypeptide expressing nucleotide sequence isolated from the Sargasso Sea
cttgcaatatttttctattataagcttgtttccggagtttgtagaaacctacaaacatatgggtgttgtcggtaaagccattggtaatcatcttatcgacattaaagctcttaatccaagagactttgctgaaaaagagaggcgggtggacgatgccccttatggtgggggtccaggaatggttatgatgattgaaccaatagtgaaatcaattaggtttgctaagaaatctgtaaacggttcatgttgtgtaattaatttgaccccccaaggagtccctttcgggcaatgtcatgttgcagaattactgtcctttgaacacctcgttttcgtttctgggcggtacgaaggtattgatgaaagggtgcaacattat

SEQ ID NO: 227102 - DNA, 528 bp, Unknown
  Bacterial polypeptide expressing nucleotide sequence isolated from the Sargasso Sea
cttatggaggaggatcaggaatgctattaaaaccagatgtccttgctaaatcattagatcaaaataaaattgaaggtgaaagaattttatatttatctccaaaaggaaaaaaatttgatcaaaattatgcaaagagattggcaaaagaaaaatctatatcacttatctgtgggcatttcgaaggagttgatgagagagttctatccacaagaaatattgaggaaattagtataggagattatgttctgtctggaggtgaaactgcagcttatgttgttatagatagtgtgctcaggcttttgccaggagtattaggaaatgataattctaggactgaagaaacttttgaaaatggtcttttagagtatcctcaatttacaaaacctcaaatttgggaggaaaaagcagtaccagatgtattattatcaggggatcatagcaaaattaaagactggcgtttatctcaatcagaggctataacacgcgaccgaagaccagatttatgggaaaaatataagaagaattaat

SEQ ID NO: 227103 - DNA, 694 bp, Unknown
  Bacterial polypeptide expressing nucleotide sequence isolated from the Sargasso Sea
ttgggggttacgggtcgtgccgtgaagaacggtctgcttgagttgcacacgtggaatcctcgcgatttcacccatgatagacacagtacggtagatgacaggccttacggcggtggtcccggtatgttgatgatggtgcaacccttacgcgatgccatccatgctgcgaaagcggcggcaggcgaagaggcaaaggtgatttacttgtcacctcaaggacgcaagctggatcagcaaggcgttactgagttggctgaatcatcccggttgattctggtgtgtggtcggtacgaaggtattgatgaacgcatcattcaaacggaagtggatgaagaatggtcggttggggattacgtgctttcgggcggcgaattacctgcaatgaccttgatagatgcagtatcgagattggttcctggcgtgctaggaaaacaagcttcggcggagcaagattctttctccgatggtttactggactgtcctcattacacgcgccctgaaagtctggatggactcgatgtacccgcagtactgctaagtggcaaccacgaacaaattagactctggcgtttgcagcaaagccttggtaggacttttctaagacggccagaattatttgaaaatctagctctgactgacgaacaatcgactcttttagcgcagttcgttgaagcaatggacaagaatgcttagt

SEQ ID NO: 227104 - DNA, 685 bp, Unknown
  Bacterial polypeptide expressing nucleotide sequence isolated from the Sargasso Sea
atggaagtttatattataacgccatttcctgattcgataaaaactttaatcgacaacaatatagctaatcaagggctaaaaaaaggtcaccttagtattgagattgtaaatcttagagatttcaccacagataattataaaaaaatagatgatgagccctatggaggaggatcaggaatggtcatgatgtgtgagccactttttggtgctatagaatattgtatatcaaagtcagaaaaaaaaccaaaaataatttttccatccccaaagggtaaagtattaaatcatagtttaagtagtaatcttagcacagaaagctctttaattttcatctgtggtcattataagggtgttgatgaaagagttattgaaaaatatgtcgattttgaaatatcaattggcgattatatcatttcaaacggcgaattatcaacaatgattatttttgattcaattgtacgtttagtccctggtgttttgaatgatataaattcagctttgactgattcttttgttgatgatttactagatgctccttattttacgcggccaagtgaaattgatggattaaaagtcccagatgtattattatctggcgatcataaagcaattgaaaaatggcgaaatgataaaaagttagaattaacaaaagatagaagacctgaccttttggagaaagattaaa

SEQ ID NO: 227105 - DNA, 640 bp, Unknown
  Bacterial polypeptide expressing nucleotide sequence isolated from the Sargasso Sea
gatgttatcaaaatataatgtaattacattatttcctaatttatttgatgaatggataaaaactggaattatttctaacggattagacaaaaatattttaaaatttcaaactactaatttacgagattttggtattggtaattataagcaaacagatgatgcaccctacggaggtggaccaggtatggttatgatggttgagcctcttgataatgcaatattaaataacaaagcagatataaatgtatttttaacaccatcagggtcaaaacttgatgaaaaaacaataaaagatttactcgcttatgaatctataaatataatttgtggaaggtatgaaggctttgatcaaagaataatagatatgcatagtgactatgaagtatcaattggtgacgcagtagtttctggtggtgaagttcctgcaatgttccttatggaggctttaatgagaagagtccctggtgttttaggaaattcagagtccttagtaaatgaatcatttacagatggtacgtatgattttcctgtttatacgaggcctgaaacgtataaagaaatgacagtcccagaagtattattatctggcaatcataaagaaatagataattggaaaaataacaaattaaaagacatttaa

SEQ ID NO: 227106 - DNA, 688 bp, Unknown
  Bacterial polypeptide expressing nucleotide sequence isolated from the Sargasso Sea
tatgttaattgctcgaatatttacactttatccagagtttttcccaggaccacttggaaaaggtttatatggaaaagcactagctgaaaaaatttggaagctagagacagttaatattagagattatacaaatgataaacataagactgttgatgatactacatacggaggaggttcgggaatgttaataaaacccgatgtacttgcaaactctttagataaaaatttaaaatctaaagaaaaaataatttatttaagcccaaagggaaaattatttaaccaacaattagcaaaagaactctccaaagagaaaactgttaatttgatatgtgggcattttgaaggtattgatcaaagagttattgaagcaagaaatatagaagaagtgagcataggcgactttgttttatcaggaggtgaaagtgctgcatttgtaatgttagatgcaattatacgattattgccaggcgtactcggtaatgaaaaatcagtagaagaagaaagctttgagaatggtcttttagagtatcctcagtatacaaaaccccaaatttgggaagaaaaaacagttcctgatgtattattatcaggagatcatgctaaaattaaagactggcgtttatctcaatctgaggctataacacgcgaccgaagaccagatttgtggcaaaaatataaaaagaattaa

SEQ ID NO: 227107 - DNA, 406 bp, Unknown
  Bacterial polypeptide expressing nucleotide sequence isolated from the Sargasso Sea
acaatagtttgtggtagatatgagggtatagacaaaagaattgaagaaacttgtattgatgaagtaatttcaataggggattacgtattaaatggcggtgaactcgcagctttagttctaatggaagctatagcaagacagcataaggatttcattggaaataaggagtctttaaatgactctttcagtgatggacttttagaacatcctcaatatacaagacccgaaaaaacacctcatgggaatgtgcccgaaatattaatcagtggaaatcatgaaaagataaatagatggaaactcaaagagtcattaagaataacacttaaaaacagacccgatcttataaaaagtaaagatctttctgacttggagattgaactattaaatgaaattaaagatgaataat

SEQ ID NO: 227108 - DNA, 733 bp, Unknown
  Bacterial polypeptide expressing nucleotide sequence isolated from the Sargasso Sea
atgaatattaatatcttaactatatttcctgaaatatttgatgcacttaattttggggtagtatcaagatctttagacaaagatttattaaaagtaaaaacttttgatataagaaagaattcaataaacaaacatgatcaagttgattctaagccttatggtggtggagaaggaatggtgatgatggctgaaccaataattagtactcttaaagaaattgataataaaaatactggaaaaataatttatttatctccccaaggcaaaagacttaatcaagaaaaagttaaatctttatctaaattaaaaaatattactctaatatgtggaaggtatgaaggaatagatcaaagagttatagatcaatatgttgatgaggagctatcaatcggagactttattttatctggaggtgaatatgctgcaatttgtataattgatgcgatatcaagacatattccagggacattaggaaacaaaaactcatatttaaaagatactttttcaaacggacttttaaaatgggatacatatgctaagcctgaaaaattaggttcattaaaggttcctgaagtacttctttcaggaaatcataaagaaattataaaatggagggaggaaaattctttacttaaaacttttttgaaaagaccagatctattcgagaaaataaaattatcaaaaaaacaaaaaaaactcttggaagaattagcatctaaggctatcctatagc

SEQ ID NO: 227109 - DNA, 490 bp, Unknown
  Bacterial polypeptide expressing nucleotide sequence isolated from the Sargasso Sea
atgtataaagttaaaatcatatcaatatttcctgactcttttcctggaatactcggacaaggtgttataggtaaagctcatagcaaaaagatatggtcattagaaacaattgatcctcggaaatatactaaagataaacataaaaaaattgatgatacaacagctggtggtggaccaggaatgatttttaaaccagatatcatgggtaaagctattgatgcatgctatagaaatattaaatccaaagaaaaatatcctctaatttacttaagtccaaggggaaaacctcttacgcaaaagaaagttagcaaactatcaaaaatgaaaggaataaatcttctctgcggtaggtatgagggaattgatcaacgccttttggattattacgagatagaagaattaagtattggagactacattttagctggtggagaattagctgctcaggttttagttgagtccatagtcagactccttccagggactttgg

SEQ ID NO: 227110 - DNA, 346 bp, Unknown
  Bacterial polypeptide expressing nucleotide sequence isolated from the Sargasso Sea
aggagtggatgaaagagttttaagtacaagaaatattgaagaaattagtataggagattatgttttatcaggaggtgaaacagcagctcttgtagtgctcgatagcatattaagacttttaccaggtgtcctgggtaatgataaatcctcagctgatgaaacctttgaaaatggtcttttagagtatcctcaatatacaaaacctcaaatatgggaggaaaaatcagtaccagatgtattattgtctggagatcataataaaattaaagactggcgtttgtctcaatctgaggctataacacgcgaccgaagaccagatttgtggcaaaaatataagaagaattaa

SEQ ID NO: 227111 - DNA, 409 bp, Unknown
  Bacterial polypeptide expressing nucleotide sequence isolated from the Sargasso Sea
tctctaagtaaagaaaaaaatgtaaactttatctgtggtcattttgagggtgttgatcaaagactcttagagacaagaaacattgaagaatatagtttgggtgattttgtcctatcagggggagaaccagcttcttttgtgatcattgatgctttagttcgattattaccaggagttcttggaaataaagactctgttaaagaagaaagttttgaaaatcatcttttagaatatcctcaatatactaaaccacgagaatgggaaggtaaaagcccaccagaggtcttattttcaggcgatcatgccaaaataaaagggtggcgtttatctcaatctgaggctataacacgtcgccagagacccgatctttggaaaaaatatttagagaaaaaaaatgaaaaacattgaa

SEQ ID NO: 227112 - DNA, 688 bp, Unknown
  Bacterial polypeptide expressing nucleotide sequence isolated from the Sargasso Sea
atgtggcaagctcaagtgtttacactttatccagaggtttttcctggtcctttatctaaaggactttatgggaaagctttatcaaataatttatggaaacttaaagttgtaaatataagagatgcagctgatgacaaacataaaacagtagatgacacaccttatgggggcggttcagggatgttattaaaagcagatgttcttgcaaagtctttagatgaaaacaaaaatgagagtgagagaattttatacttatcgccaaaaggaaaaaaatttgatcaaaatttagcaaaagagctagctaatgaaaaatctctgtctttaatttgtggtcattttgaaggtgtggacgaaagaatactttcaacaagaaatattgaggaaattagtattggagattatgttttgtcaggcggggagtcagcagcatatgtagtaatagatagtattttaagattgctgccaggtgtattaggaaatgaaaactctaaattagatgaaacctttgaaaatggtcttctagagtaccctcagtatacaaaacctcaaatttgggaggaaaaagctgtgccagacgtactattatcaggtgatcataataaaattaaacactggcgtttatctcaatctgaggctataacacgcgaccgaagaccagatttatgggaaaaatataagaagaattaac

SEQ ID NO: 227113 - DNA, 502 bp, Unknown
  Bacterial polypeptide expressing nucleotide sequence isolated from the Sargasso Sea
tatgtggcaagctcaagtgtttacgctatatccagaagtttttcctggtcctctttctaagggcatgtatggaaaagcaatgtcaaaagatttatggaatttaaaagttgtaaatattagagatgcggctgaagataaacataaaactgtggatgatactccttatggaggaggatcaggaatgctattaaaaccagatgtccttgccaaatcattagatcaaaataaagttgaaggtgaaagaattttatatttatctccaaaaggtaaaaaatttgatcaaaattatgcaaagagattggcaaaagaaaaatctatatcacttatatgtggacattttgaaggagttgatgagagagttctatccacaaggaatattgaggaaattagtataggagattatgttctgtctggaggtgaaactgcagcttatgttgttatagatagtgtgcttaggcttttgccaggggtattaggaaatgataattctaagattgaagaa

SEQ ID NO: 227114 - DNA, 562 bp, Unknown
  Bacterial polypeptide expressing nucleotide sequence isolated from the Sargasso Sea
ttggaaaataataaaattttcaaagtttcaatattaactttatttccagaaatttttcctggccctcttggagtgtctttacttggaaacgcactgcaaaataaattgtgggaattaaatttgattaacatcagagactttgcaaaagatagacataaaagtgttgacgatacaccctatggtggtggtgctggtatggtaatgaaaccagatgtaatagagatggctttaaattctatttcagattttccaggacaaagagtatgcttaactcccagagggaaaagattaagtcaacaaaaagtaaaaaaactttcacttgaagatggtttagtcttgctctgcggaagatatgagggtattgatcagcgcgtaatagattattataattttgatgaaattagcataggtgattatgtagttactggtggtgaaagtgctgcaattgtattattggagagtgttttaaggttgttgccaaatgtcttaggcggtaatgagactttaaaagaggaaagtttttcggacacttccctaattgaataccccccaatatactaag

SEQ ID NO: 227115 - DNA, 640 bp, Unknown
  Bacterial polypeptide expressing nucleotide sequence isolated from the Sargasso Sea
gatgttatcaaactttaacattattacactttttccagaaatttttaaaaattggcttgatattggaattttatcttctggatttgagaaaaacctttttgaattaaccaccacaaacttgagagactttggtattggaaattacaaacaagttgatgatgctccatatggtggaggaccagggatggttttaatgatagaaccaatggacaatgcaatctcacaatctaagaaagatgtaaatatttttttaactcctgatggtcaagaattgaatgaagacttgattgaagaacttcatacctacaaatcagcgaatattatttgtggaaggtatgaaggttttgatcagagaataatcgagcttcacagcgattacgaaatctctattggaaaaacagttgtttcgggtggagaagtgcctgctatgtttctcatggaagcacttttaagaaaattacctggaatacttggtaattcagaatcacttaaatatgaatcatttgttaatgataaatatgaccatcctacctatacaagacctgaagtatataaagggcttaaagtgcctgatgtgttactttccggagatcataagaaaatcgatgaatggaaaaagaataatttaaaagacatttaa

SEQ ID NO: 227116 - DNA, 733 bp, Unknown
  Bacterial polypeptide expressing nucleotide sequence isolated from the Sargasso Sea
tatgaatattaatattttgacaattttcccggaaatatttgatatttttaatgttggattgatttctaagtctatcaaaaaaaagataataaaaatcaatacattcgatattagagaaaattctgtaaataaacataaccatgtggactcaaagccatatgggggtggagagggaatggttatgatggctgaacctttggtcaaaactttatcaagtataaaaaaaagacaacttggtaaagttatatatttgtctccacaaggaaagcaattagatcaaaaaagagttaaatcactggcaaccagaaaaaacattacacttatatgtggaagatatgaggggattgatcagcgagtaattgaaaagtatgtcgatgaagagatttctataggtgattttgtcttaagtggaggtgagtatgcagctatttgtttgattgatgctatatcaagacatataccaggtgttttgggaaataaagattcatatttaaaagatactttttctgatggattattgaaaggaaatgtatatacaaaacctgaaatatttgaagatatgcaagtgcctgaagtacttttatctggaaatcataaagaaattcaaaaatggaagcttgaaaattctcttctccaaacatttcttaaaagaccagacttattagcaaagaaaaaattgtcaaaaaaacataaaaaactcttggaagaattggcatctaaggctatcctatag

SEQ ID NO: 227117 - DNA, 688 bp, Unknown
  Bacterial polypeptide expressing nucleotide sequence isolated from the Sargasso Sea
tatgttgcaagctcaagtatttacactttatccagatatttttcctgggcctttaggaaaaggtctttacggaaaagcaatgtctaaaaaattgtggagtttgaatgtgataaatattagagattcagctaaagacaaacataaaacagttgatgatactccttatggtggtggaacaggtatgttattaaaaccagatgttttagcaaattctatcgatcaaaacattaataaaggagataggattttgtatctttcaccgaaaggtaaagtgtttaatcaaaaacttgcacaagatctatcattagaaaaatccttctcattaatttgtggtcatttcgaaggagttgatgagagagtattatctacaagaaatattgaagagattagcgtaggagactatgtattgtcaggcggagaaactgctgcgctggtagtgcttgacagtgtattaagacttttacctggagtcttagggaatgataaatcagcttcagaagaaacatttgaaaacggccttttggaatatccacaatataccaaaccccagatttgggaggaaaaatcagttccagaagtgctattatccggtgatcatgccaaaattaaagactggcgtttatctcaatctgaggctataacacgcgaccgaagaccagatttgtggcaaaaatataagaaaaattaa

SEQ ID NO: 227118 - DNA, 745 bp, Unknown
  Bacterial polypeptide expressing nucleotide sequence isolated from the Sargasso Sea
aatgaatataaatgtaatatctgtttttccagaaattatagaagcttctatgcatggattaacaggaaaagcttttaaagataaaaaagccaaacttgaattatttgacctaaaaaaattctcaaaaacagaatatggtagtgttgatgattctccttatggtggtggagaaggtatggtcatatctgctgaacctttagttgattgcattaaagaaattaatacacctggacatgtaatttatctcacccctcaaggtaaaagttttaatcaaaaaaaatccttagaactatcaaaatataaagatataacttttgtttgtggaaggtatgaaggtattgatcaaagatttattaataaatatgtgaatgaagaattgtcgattggagattatgttctaagcggcggtgaaatagcagcatgcgtagtaatagactcaatccttagaaacgttgaaggagtcataggaaataaagagtctgtttctagagatagtttttcagatggaaaattaaaaggacacgtatacactagaccaaaagaatttgaaggagatcatgttcctgaaatactactttctggagatcataagaaaatagaagaatggaagttagctaatagtctttgggtcaccaaacaaaaacgcccagatttatttaaacaaatacaactttctgaaaaagaaatgatattattacggcagtacgaagatcagattaacgaaaaaacaaatacaaatggctaa

SEQ ID NO: 227119 - DNA, 733 bp, Unknown
  Bacterial polypeptide expressing nucleotide sequence isolated from the Sargasso Sea
atgaatataaatgtaatatcagtctttccagaaatcatagaagcttctatgcatggactaacaggaaaagcttttaaggaaaaaaaagctagcctggaattatttgatttaaaaaagttctcaaaaacagaatatggaagtgtcgatgattctccatatggtggcggggaaggtatggttatatctgccgaacctttagctgactgttttaaaaaaattgatacacctggacatgtaatttatcttacccctcaaggaaaaaattttaatcaaaaaaaatctctagaattatcaaaacatgaaaacctaacttttgtttgcggaagatatgaaggcatcgatcaaagatttattaataattttgttaatgaagaattatcaattggagattatgttctaagtggtggtgaaatagcggcatgcgtagttatcgacacaattcttagaaacattgaaggagtaataggaaataaggaatctgtttctagagatagcttttcagatggaaaattaaaaggacatgtatacaccaggccaaaagaattcaagggtgagcatgttcctgagctattactttctggtaaccataagaaaatagaggaatggaagctagccaacagcctttgggtgactaaacaaaaacgaccagatttatttaaacaaatacaactttctgaagaagaaatgatattattacggcagtacgaagatcaagttaacaaaaaaacataaa

SEQ ID NO: 227120 - DNA, 454 bp, Unknown
  Bacterial polypeptide expressing nucleotide sequence isolated from the Sargasso Sea
agatgtgctcaataataaaaaatattgttttataggcatagagccgtataaaaaaggctttgccagagcagttgaattttatgaaaaagaaaaaccagaaaatctttttttatacaacggagatgcaagagaatttttagaaataatagactacgaagtttcgtttgtcagaattcattttcccgatccatggcctaagaaaaaacatattaaaagaagattaatatcgcaaaattttttacatcttttagatcaaaaaatttcaaagaaaggaaaaatcgaaattattacagattcaaaaatataccaagaccatatagaagaaattttaggtgaacaaaaaatatttaaacagactgatagttttgaaatctcatatgaagtttcgacatttcatagaaaaggtttgaaaaaaggacatgaggttaaaaggtacgttttgacaaaaatttaa

SEQ ID NO: 227121 - DNA, 415 bp, Unknown
  Bacterial polypeptide expressing nucleotide sequence isolated from the Sargasso Sea
atgtcaggcataggaactttggtttcgagcataaaagaaaacaaaatcaataacataaaaattttttcagacgatatcaggatacttttagatcaaagcccaaaaatagtatttgattcagtgattattatttgtcccgatccttggccaaaagaaaaacatcacaaaagaagactaataaataaatcttttttagaaatggtccatgattttatgaaggacgattcaaatatatacatatctacagattgggaaaactatgcagaaagcatttctgaattatttgtaaaaaataaattatttaagccatcttcaaacaaatcttttcaaaaagactctctttcaaagtttgaaagaagagggaaagatgagggcagagagttatttgaatttaattataaaaaagtatcataac

SEQ ID NO: 227122 - DNA, 427 bp, Unknown
  Bacterial polypeptide expressing nucleotide sequence isolated from the Sargasso Sea
aaaccaggtataggtaaagtattaaagggcattgaaaaacaagggatcaaaaatttaaaactaatttgtcacgatgcgaccgaagttttcaatcacgcttttgaggatgaaacgcttgatcgggtgttagtatttttcccagacccgtggccaaaaaaaaaacacgcaaagcgtcgcatcatccaacctgaatttgtaagtaaagtatctgaaaagcttaaaaataatggttgtcttcatctcgcaactgactggtcaccatatgctgaacacatgattgaagtcatcgataaaattccctctttatcaaacgcgatagcaccaaaagtattttgggaaaaccctgagcgcccagagacaaagtttgaaaagcgcggtaaaaagttaggaaatagaatttgggatctactctatcaaaaagcataag

SEQ ID NO: 227123 - DNA, 703 bp, Unknown
  Bacterial polypeptide expressing nucleotide sequence isolated from the Sargasso Sea
attgctcgacttaaaatctaagtatcctgacttctatagattttacggaagaagagttgcaaaaaaactctcagataaatctatagagtctattaattgttattttaaaaatagctcttttgacgaagaagttattaatagtttcaatgaaagaaaatcacttaagattgataaaaaatttcaaaaaataagtttggaggttggttttgggaatggagagttcttaatcaagcaatcaaatttaaataaggacagcttgttcataggttgtgaagtatacttaaatgggtttagtaaagtattaaataaaattaatgatagaaaaataaacaacatcaaaatttgtagtatcaattttatttacctagttcaggttttaaaaaatgaaactattgaccaaatttattttataaatcctgatccgtggccaaaagctagacacaataaaagaagagttataaatattgaaaatttaaacctaatggcttcaaaattaaaaaaaaattgtagtatagtagttacaactgactctctagattactatgaatacatcgtttcaatatttaaaaataaagatttattctttcataaaatggatcatgaggaattaaagaccacagatcaattatatggtatttcttcttaccaaagaaaagcaataaatagaaatgccaagatatacaaagtagaaatatttaaataa

SEQ ID NO: 227124 - DNA, 456 bp, Unknown
  Bacterial polypeptide expressing nucleotide sequence isolated from the Sargasso Sea
tatgagacagcatgttaatccgcttagtagtaattttaatcagattgagagaattccttctttgagcgacatgtttggaaattctaaattgaatcttcatttggatataggttgtgctgctggtgagtttctattcgatttagctttagttaataccagttggaattatttaggaattgaaattcgtgagaaattagtcaaaaatgctaaattaaaagtgattgaaaaagaaatcaaaaatctatattttttatttggtaatgctaataatattttgagtgatgtccaaagtaaatttattatcaaaaatctaaaaagcatttcttttaattttcctgatccatggtttaaaaagagacattttaaaaggcgtgtaattcagccagaattaattaatattctctcaaagtcattacaaacagggaccctaatttataaaaacagatgtaaaggatc

SEQ ID NO: 227125 - DNA, 367 bp, Unknown
  Bacterial polypeptide expressing nucleotide sequence isolated from the Sargasso Sea
tatgagacagcatgttaatccccttagtagtaatttcaatcaaattgagagaataccttctttgagcgaaatgtttgatgattctaaatcgaatcttcatttggatataggttgtgctgcgggtgagtttttatttgatttagccttagttaataatagttggaattatttaggaatcgaaatccgtgagaaattagttaaaaatgctaaattaaaagttattgaacgagaaatcaaaaatctatattttatatttggtaatgctaataatattttgaatgatgtccaaaataaatttattatcaaaaatctaaaaagtatttcttttaatttccctgatccttggttaaaaagagacattataaaa

SEQ ID NO: 227126 - DNA, 391 bp, Unknown
  Bacterial polypeptide expressing nucleotide sequence isolated from the Sargasso Sea
gttgagatataactttttaccaagctttgctagaagaaaaggaaggattacaaagcttcaggaaaaaaacctaagtttcttagcaaattattcgttggatgatcctaataccttaaataatgatccatcgttcgataagatagcgcttgaaataggttttggtaacggggaagactttttttcctttgcgaaagaaaaaaacaatacattatttttggcttctgaagtttataaatctgggattgggaatttaataggaaaaattagagagtattcactagaaaatatatatattcatgaaggggatataagagatcttatttttgaagaaaaaggttttaaatttgatgaagtttatatcatatgccctgatccatggccaaaagataga

SEQ ID NO: 227127 - DNA, 466 bp, Unknown
  Bacterial polypeptide expressing nucleotide sequence isolated from the Sargasso Sea
ttgaaattattcggaaggaaaaaaggtcgtaagcttagtttaagaaaacaaagcttattaaatattttgcttccgaacatttctttggaaaatgaatcaatatttcaaaaaatatctaattctaattctcaaaaatttttggaaattggatttggtcatggagaaaacttaattaggttatctaaagaaaggccagaatggactttcttaggggttgagccctttacaaatggagtagcaaccttattagaaagaattgataatgaaaaaatttctaatatttatgtattaattggtgatggaagacattttttaacaaagttatctaaagacgctatatcagaagcatgtattttgtttccagatccatggcaaaaatcaaggcatgtttcaagaagaataattcagcaggaatttttaaatgatatgtctaaaattttaaaaaaaaattccaccttacatttat

SEQ ID NO: 227128 - DNA, 620 bp, Unknown
  Bacterial polypeptide expressing nucleotide sequence isolated from the Sargasso Sea
cttgcgtcagcacgtcaatcctctcagcagctttttccagctgcccctagagctgcctggcccggagcagctgttccagagaccggagcaaccgatccatctggacattggctgcgctcggggccgctgcatcctggcgctagcggagctcaaccccgactggaatcatctgggcgtcgagattcgacgctcactggtggcctcagcggaccgcgttgcccaagcctctgaacacggcaatgtgcgcgtgctcttctgcaacgccaacatcagccttgcccaatggcttcaggcccttcctcccggtcgactgcaacgggtgtccatccagtttccggatccctggttcaaacgtcgccatcgcaagcgaagggtggttcaaccggagctgatcctggcgattgcggcagcactccccacagacggagacctgtttctgcagagcgatgtgctcaacgtgatcgaaccgatggtcgctctcaccgaattgtgtggaggattttcgcgtccggaggccgatgcaagaccctggcgggatgccaacccgcttgcagtgcccaccgaacgggagcgttatgtcaccgaacaggggttgccgatctacagggtgctgttcaagc

SEQ ID NO: 227129 - DNA, 364 bp, Unknown
  Bacterial polypeptide expressing nucleotide sequence isolated from the Sargasso Sea
tatgagacagcatgttaatcctcttagtagtaattttaatcaaattgaaagaataccttctttgagcgaaatgtttggtgattctaaattgaaccttcatttggatataggttgtgctgctggtgagtttctatttgatttagctttagttaataccagttggaattatttaggcattgaaatccgtgagaaattagtcaaaaatgctaagttaaaagttattgaaagagaaatcaaaaatctaaattttatatttggcaatgctaataatattttgaatgatgtccaaaataaatttattatcaaaaatctaaaaagtatttcttttaatttccctgatccttggtttaaaaagaggcattat

SEQ ID NO: 227130 - DNA, 670 bp, Unknown
  Bacterial polypeptide expressing nucleotide sequence isolated from the Sargasso Sea
atgacgactcaagaaagtcatattaaaagctttgtaaaaagaagtggaagattaacacaatctcaaaaaacatttttaaataataaagataataatgtaaattttttttctccaaaggagatgattaattttgaggaattatttgaaaataataagaattgtattttagatattggttttggtgacggcaaactattaatacacttagcaagaaaatttcctgaattaaattttattggacttgaagtttatgaatctggaatcggaagtattttaaaacaaatatcttcagataacttaattaatattaaaatatcttgcatggatgcgataaattttttaaagaatcatacaaaaaatgacagtttttatggcattactctattttttccagatccttggccaaagaaaaaacattataaacgaagaattataaataaaacttttcttgatttaattagtaaaaaaatttctaaaaatggtttcataaaagttgttactgactggtcaaattacagtgattatatagtagaagtatttaatgaaaataaccaatttgaaaggacaagtgacatttatatatttaaaaatagatgtttaacaaaatttgagaaaaaaggtattgctgtcgggcataaaatttcagaattcacttataaattaaaataaa

SEQ ID NO: 227131 - DNA, 622 bp, Unknown
  Bacterial polypeptide expressing nucleotide sequence isolated from the Sargasso Sea
attgagaatatttggaagaaaaaaaggaagaaaacttagctataccaaacaaaaattggtagaaggttttcttccaaatatatctttagataatgatgaaaatttaagccatatattgtctttaaaaaaaaaattgtttctagaatttggttttggtcatggagaaaacgttattaaattatcagaaaatagaccaaactgggtattcattgcgatagagccctttttaaatggagtagcatcgttacttgaaaaaataaaaataaaaaatatttcaaatatatatatatatcatggagatggaagattatttttaaaggaattgcctagaaactcaattagtgaatcctgtattttattccctgacccatggccaaaattcaaacataaatctagacggataattcaaagagaatttttaaataaactttcagaagtaatgtttccaaattcttttgtgtatgttgcaagtgatgattatattgcgcaaacgtggatgctaaaaatttttttatacaacgaaaacttcgagtggattgtaaaagatataaatcaaatttatgctaagccagatttttttgaagattcaaaatacttcaaaaaatccttaaaagaaggaaga

SEQ ID NO: 227132 - DNA, 337 bp, Unknown
  Bacterial polypeptide expressing nucleotide sequence isolated from the Sargasso Sea
tctactggagaatatttcgacttaatatggattttttttccagatccttggccaaaaaaaaaacattttaaaagaagattaataacaagtatttttttcaaaaaactatatcaatttattaaaaaaaatggagaattgtgtattgttactgactcaacttcatattctagatttattttaaaaaatattcataattccaaaaatcaatatctttggataaatcaaaacgagttttatttagatctaaaggattattacgatcttgagacgaaattttataaaaaggcaattatttctggtagaaagccttcattatttattttaaaaaaaatatagg

SEQ ID NO: 227133 - DNA, 571 bp, Unknown
  Bacterial polypeptide expressing nucleotide sequence isolated from the Sargasso Sea
ttgcctcaagcccataaggtgacctttagcaaaaaacccaaaagttttgtaacaagacgaggaagaataacatccaatcagaggaatgcgcttgattcgctctggaatcaatacatcgttagtgaagtttctgacattaaggaatttatttcaggtaaatacactttattagatatagggtttggtgctggagaaacattaatcagcttagctgaaagtagaaaagactttagggtcttaggtgcagaagtatatttatcaggtataggttctgttttgagtaaggccgataaccttaagttaaataatattaggattgtaaatgaagatgcaaaagatttacttcagcaaaaaataccagatcacagtatagacgttgtccttatgttttaccctgatccttggcctaaaagaaaacatcataaaaggagactaataaaaaaagaatttattaagctactaaatagcaaattaaaaacgggtggtatcttttactttaaaacagactggaaagattactttaatgaagttagttgcctgtttaaagaagactcagatggaaagaattaag

SEQ ID NO: 227134 - DNA, 617 bp, Unknown
  Bacterial polypeptide expressing nucleotide sequence isolated from the Sargasso Sea
aagaggaagaagcaagaaaaaaattgatttgaaaaaatattatcaaacagttgaaaaatacaagtttaaaaattgtgatgaaaaagttaattatattttagatattggcactggatatggtgaaactagtatatttcttgcaaatcaatttttagacaaagttattatatcttgtgaaaaatacattgatgggaatataattttactaaaaaatattgaaaaaaatgaaataaaaaatattctattacataacggaaatgtatatgatgttctagaatgtacacatagagaatgttttgaccttgtatggatattttttcctgacccttggccaaaaaatagacatgctaaacgcagattggtaactagtgattttttagtaaaacttcataaaaacatgaaagagaatagtgagatatatatagctacagattcagtaatttatgttagatttattttaaactcaatttacaaatgtaaggactattttctctgggttaaccaatccaaaattaatttaggcgtaaaagattattttgatattgagacaaaatattataaaaaagcaattaaatctcaaataaaaccatctttattcattttgagaaaattataag

SEQ ID NO: 227135 - DNA, 511 bp, Unknown
  Bacterial polypeptide expressing nucleotide sequence isolated from the Sargasso Sea
ggctttggtatgggagattttttatttgaaaaagcattggctaatccaaatgttgggtttgtaggttgtgaggtatttgaaaatggtgtagctagcttattagccaagattataaaattcaaaatatctaatattcgaatccattttggaaattgtctagacttaattcataattttaattgcttaacgttaaataaaatttatatattgtttcctgacccctggccaaaaaataaacacaaaaaaagaagattttttaatgaaaataattcaacgtatttatgttcattattaaaaaaaaatgggactatcttcatagcaaccgatatagaagattatgcgaaccaaattttaggaattatgcagagtaaagatgattttaattatattgactcaaattttgttcaaactgaaaaaaaaataaaaaagaaccttgatacaaaatatcaacaaaaagctttaaagtttggaagaaaaataaactatttaaattttaaaaaaaatgactgaa

SEQ ID NO: 227136 - DNA, 432 bp, Unknown
  Bacterial polypeptide expressing nucleotide sequence isolated from the Sargasso Sea
gatgcatttgattcacgatgaggacgcgaatacggacggtttgtctgccaaatccctatttacaagctttagaggtcgaataacctccgcacagaagtctgcaatagaacgctacggacgccaatattttatcactgacttggctaagcatgttgacttggcgagtgcggcatctaggcaaaaactgaagatagagatcgggtttggaatgggggtagagctcgcgcgttgggcaatagaatcgccagatgcgttgatgttgggtattgagctctacaggcctgggataggatcgctattctcgaaactcgttaacgaaggcatagacaacgttagggtcatcgaggctcctgctcaaatcgcaattggtgaactatccaataattcggttgatgagattcgaatcttattccccgatccctggccaaaaaa

SEQ ID NO: 227137 - DNA, 484 bp, Unknown
  Bacterial polypeptide expressing nucleotide sequence isolated from the Sargasso Sea
atgttcgagtcaaaaaataagtattttggaaggaaaaaaggaaagtcttttgttcgtttagaacatttacaaaatagacttaaattaccaacaaaaaaaatttttgaaaatatccttgcaccaagggttttagaaattggaattggtgatggagaaaaaataagtgaagatgcaaaaaatcaagaccatataaatttcataggatgtgatatttttgctgatggtgttttaagagcgataagaaattctctcgatcataatcttaataacctacttgtctttcatttaaatattcaagacattcttccctttattcctgataactatttgcaaggaattagagtttattttccagacccatggcctaagaccaaacataaaaaaagaagaacatttaatgatgagttagtggaaatccttaccaaaaaactcacaaaaaatggctttattcattttgctactgataatagtgactattttttaa

SEQ ID NO: 227138 - DNA, 472 bp, Unknown
  Bacterial polypeptide expressing nucleotide sequence isolated from the Sargasso Sea
cttgagatccataagaagctttgccaaagcaaggtcaagactctctgctaatcataaaaaaattttaaaccaagagaatgatttccttttttcggcgaataccaagtcagctttcgaagaaacattaagaagcactaataataagattcttgaaattggttttggcgaaggagattctcttttcgaaatggctataaacaatccagaactcaacttttttggtatagaagtttatgaaaccggagttgcaagaacttgctcaaaaatagaggactctggtattaaaaatttgaaaatatacttaggcgatgttgtcgacttaatgttggataaagatatcgaaacaacatttgacttgttgttatttctatttcctgacccttggcataaaagaaaacacaataaaagacgccttttaggttcagataatttaaacaaatttcgaagttatctatctaaagagggatttatt

SEQ ID NO: 227139 - DNA, 659 bp, Unknown
  Bacterial polypeptide expressing nucleotide sequence isolated from the Sargasso Sea
tatgcataaacaatctacgcaatatagattatacggcagaacaagaggcagaagtaataaaaatataaatattgataagtatttaaatttattaaaaaaatataaaattaataaacttaataaaaataatagatatatattagatattggttctggttatggtgaaacaactatatatttagcttctaaatacaataattctaaaataatctcatgtgaaaaatttattgatggtaacattaacttaataaaaaaaattcaggatcataaattaaaaaatatttatatatacgatggtaatgcaaataagattttagatgaaattgaaaaaaaagaatattttgaaattatatccatttttttccctgatccttggccaaaaaaaaaacattttaaaagaaggttaataaaagaaattttttttaaaaaaatatatcagtatttaaaatataaaggaaaaatatacatagctacagactctgagtcatatataaaagatattttaaaatctatctatgaaactagatatttatttaaatgggaaaatcagggaacaatttataagtcaattaaggattatttaaatattgagaccaaattttatagaaaagcaattatttctggtaaaaagccctcattatttatcttagaaaaaatat

SEQ ID NO: 227140 - DNA, 347 bp, Unknown
  Bacterial polypeptide expressing nucleotide sequence isolated from the Sargasso Sea
atatggggatggagtagaaattatagaaaatgtctttccagacaaatcattagatgaagttttgatttttttcccggatccttggccaaaaagtaagcataataaaagaaggataattaatgaatacactattagccttatttttaataagcttaaaaagggtggattgtttcattttacaacggatcatataaattatgcatatgatgtcaagagtatgttgcaacacttttttaataaatcaattatatttaactctaatcgaaataaccgaccaattacaaattatgaaaaaagagctctaaaaaggaagaacttcatatttgatataaatttaattaagtagc

SEQ ID NO: 227141 - DNA, 541 bp, Unknown
  Bacterial polypeptide expressing nucleotide sequence isolated from the Sargasso Sea
cttggaggaactttttgttacgccgcaacctgccgagttggagatcggctgcggcgacggcggatttctcctcgagcacgcccaacgtcatcccgagcgcaattttctgggcgtcgaacgattgcttggccgcgtccgcaagctcagcaaaaacggccagcgcgtcgacctcaccaacctgcgcttgctgcgcatcgaggcgcgttatgtattggattatctcctacccgagcgcgccttcagtgccgcgcacatttactttcccgatccgtggccaaaggacaaacacgcgcgccatcgcctgattcagcctgatttcctgccgcgcatccgccgtgtcctcgcgcctggcggcgtgctttacctacgcaccgatgatctgccttacttcgagcaaatgcaggaaacttttcggggcgcggacgggtttacggaagaacccacgcctgctgccttgtcggaaatctccaccgaattcgagcgccaatggttggccgaaggtaaacggacccactacgccgcctatcgcctcaacggttga

SEQ ID NO: 227142 - DNA, 400 bp, Unknown
  Bacterial polypeptide expressing nucleotide sequence isolated from the Sargasso Sea
aattctaaaatataatataaagaatattgttatttggccagatgatgttagaaaaatcttaatgttttttcctaataatagtatttcagaaataaaaatacttttccctgatccatggcccaaaaaaaaacataaaaaaagaaggttaattcaggaagagtttataaaaatattatatcaaattattaaacaccaaggaactattactattgctacagatcatgatctactaaaaaaatgggtgttagataaattccaaaattatacagaatttgaatggttagctgaaagttcaaatgactggcgtttaaggcctaaagattgctttcaaacaaaatatgaacttaaatcaattaataagcaaagaaaaccaagttggttcattttcaaaaaaaaataa

SEQ ID NO: 227143 - DNA, 631 bp, Unknown
  Bacterial polypeptide expressing nucleotide sequence isolated from the Sargasso Sea
atgagacagcatgttaatccgcttagtaaaaatttcaatgaaatggagagaataccttctttgattgaaatgtttggtgatcctaaattgaatctgcatttggatataggttgtgctgcgggtgagtttctatttgatttagctttagttaataccagttggaattatttaggaattgaaatacgtgagaaattagttaaaactgctaaattaaaagtgcgagaaagagaaattaaaaatttatattttgtatttggcaatgctaataatatttttaatgatgtccagagtaaattttttatagagaatgtaaaaagtatttcttttaactttccagatccttggtttaagaagagacattataaaaggcgagtaatccagaaagaatttattaatactctctcaaactcattgcaaaaaggatcactaatttttataaaaactgatgtaaaggatttattcgattatatggattgcactatatcaggaaattctaattttaaaaaaatggataaaaaggattttaattattccgaaagttttaatccaaataaatttaaaactaatagggagaagtatgttattattaaccaacttgatatttttgataggatttatataaaaatttgat

SEQ ID NO: 227144 - DNA, 631 bp, Unknown
  Bacterial polypeptide expressing nucleotide sequence isolated from the Sargasso Sea
atgagacagcatgtaaatccacttagtagtaatttcaatcaaatggagagaataccttctttgagcgaaatgtttgatgattctaaattgaatcttcatttggatataggctgtgcttctggtgattatttatttgatttggctttagtaaataaaaattggaattacttaggaattgaaatccgtgagaaattagtcgaaaatgctaaattaaaattgcttgagagggaagtcaaaaatttatattttgtatttggtaatgctaataatatcttgattgacgtacagagtaaatttattatcaaaaatctaaaaagtatttcttttaattttcctgatccatggtttaaaaagagacattataaaaggcgcgtgattcagccagaatttattaatattctctcaaatttattgcaaaaagggactttaatttttataaaaacagatgtagaggatttgttcgattatatggattggaccatatcaagtaattttcattttaaaacaatagataaaaaagactttaatttttctgaaagttttaatccaaatagagttaaaactaatcgggaaaggtatgtgattgttaaccaacttgatatttttgaaaggatttatataaaaatttgat

SEQ ID NO: 227145 - DNA, 382 bp, Unknown
  Bacterial polypeptide expressing nucleotide sequence isolated from the Sargasso Sea
tttcgagaaaatgatgttgaaaatatgattttatttaatggagatgtaagagagcttttggagaaagttaaattttgttttgatttcattcgcattcatttcccagacccgtggcctaaaaaaaaacacattaagagaagattgattgccaaagaatttttaatctatttatcaaataaattatctggtaatggacttatacaaattatcacagattcacaaaagtatcaggaccatatagaagaagaaataaaattacaaaataaactttcactaagtaaaaggctatttcctataacttataatcaatcaagtttttacaaaaaagctttaattaaaaaaaataagattaaagagtttattttgcaaaaatcaagttaag

SEQ ID NO: 227146 - DNA, 643 bp, Unknown
  Bacterial polypeptide expressing nucleotide sequence isolated from the Sargasso Sea
tatgataaataattcgcattatcgattatatggaagaacaaaaggtagaaaaaataataaaaataacatttcctttttaagaataaaattaataaacattgaccataataaatacaatattttagatattggttcaggttttggagaaagtacaattaaaatagcaaaaaaggataagaaaaaaatagttatatgttgtgaaaaatatattgatggacttaataatctttttaaagaagtgcaaaaagagcaattagataatgtatatatttatcagggaaatgtttatcaaatgcttgatgaatactgtagcaaaaattcactttctgaggtttggatactttttccagatccttggccaaagaaaaaacattttaaaagaagattaattgataaatatttttttcataaaataaaaacatatcttaaatatggatcaacaataaatatagcttcagactcgcaatcatatatctctcaaattctaagaacaatatatgaagtaaaggcagattttttatgggtgaatcaaagtaaatctgagtgggagtatgattcaggaatattgcctgagaccaaatattataaaaaagccttaaaaaatggactcaaaccattttatgtaaagttagagaaattataa

SEQ ID NO: 227147 - DNA, 563 bp, Unknown
  Bacterial polypeptide expressing nucleotide sequence isolated from the Sargasso Sea
tatgagacagcatgttaatccccttagtagtaatttcaatcaaattgagagaataccttctttgaacgaaatgtttgatgattctaaatcgaatcttcatttagatataggttgtgctgctggggagtttctatttgatttagctttagttaataatagttggaattatttaggaattgaaatccgtgagaaattagtcaaaaatgctaaattaaaagttattgaacgagaaattaagaatcttcattttatatttggtaatgctaataatattttaaatgatgtccaaaacaaatttattatcaaaaacataaaaagtatttcttttaatttccctgatccttggtttaaaaagcggcattataaaaggcgtgtaattcagccaggatttattaatatgctctcaaattcattgcaaaaaggaaccctaatttttataaaaacagatgtaaaggatttattcgattatatggattgcactatatcaagtaattttcattttaaaacaataaataaaaaagattttaattgttctgaaagttttaatcccattaaagttaaaa

SEQ ID NO: 227148 - DNA, 664 bp, Unknown
  Bacterial polypeptide expressing nucleotide sequence isolated from the Sargasso Sea
attgagaatatttggaagaaaaaaaggaagaagacttagttataccaaacaaaaattggtagaagattttcttccaaatatatctttagatgatgataaaaaactaaggcatttactgtctttaaaaaaacatttgttactagagtttggttttggtcatggagaaaatattgttaaactatcgttaaatagaccggattgggtattcattgcaatagacccatttttaaatggagtagcatccttacttgaaaaaataaaaacaaaaagtatttcaaatatatatatataccatggagatggtagattattcttaaaaggaatgcctaaaaattcagtcagcgaaacctgtattttatttcccgatccttggccaaaattcaaacatgaatctagacggataattcaaagagaatttttaaataaactttcagaagtcatggcctcaaattcttttgtatatacttcaagtgataaccatattgcacaaacatggatgctaaaaacctttttatacaataaaaattttgagtggattgtaaaagatataaatcaaatttatacaaagccagaattttttgaagatacaaaatacttcaaaaaatctttaaaagaaggaagacaagtatcttggtttaaattcaaaaatataaaagaacattga

SEQ ID NO: 227149 - DNA, 427 bp, Unknown
  Bacterial polypeptide expressing nucleotide sequence isolated from the Sargasso Sea
atgattaagacttttagttcacgggctggccgactatcaccaaaaaacaagaaatttctttcaacagaatcggagtgcttattaaatgctggagaaaaacccatcactcaaaatccgattgcattagacattgggtttggggatgctcaatcattttcagaagatgttactgcaaacgaaactgtgacctttattggcattgaaccctataaaaagggttttgctcgtgcggtagaattctttgaggaaacaaagcctacaaatctttatctctataatggcgatgctcgtgagttcattgagcttatggattttccagtaaactttattcgtattcactttcctgatccttggccaaagaagaaacacacgaaaagaaggcttatttccaagcaatttttaaaaacacttagcagaatacttgctc

SEQ ID NO: 227150 - DNA, 631 bp, Unknown
  Bacterial polypeptide expressing nucleotide sequence isolated from the Sargasso Sea
atgagacagcatgttaatccccttagtagtaatttcaatcaaatcgagagaataccttctttgagagaaatgtttggtgattctaaatcgaatcttcatttggatataggttgtgctgctggtgagtttctatttgatttagctttagttaataccagttggaattatttaggaattgaaatccgtgagaaattagtcaaaaatgctaaattaaaagtgattgagagagaaatcaaaaatctatattttatatttggtaacgctaataatattttgaatgatgtccaaaataaatttattatcaaaaatctaaaaagtatatctttttatttccctgatccctggtttaaaaagaggcattataaaagacgtgtaattcagccaggatttattaatatgctctcaaattcattgcaaaaagggaccttaatttttataaaaacagatgtaaaggatttattcaattatatggatttcactttatcaagtaattttcattttaaaacaatagagaaaaaagattttaattattccgaaagttttaatccaattaaatttcaaactgatcgggaaaggtatgtgattgttaaccaacttgaaatttatgaaaaaatttatataaaagtttaat

SEQ ID NO: 227151 - DNA, 466 bp, Unknown
  Bacterial polypeptide expressing nucleotide sequence isolated from the Sargasso Sea
attgagaatatttggaagaaaaaaaggaagaagacttagttataccaaacaaaaattggtagaagattttcttccaaatatatctttagataatgatgaaaaactaaggcaagtattatctttaaaaaaacagttgtttctagaatttggttttggccatggagaaaatattattaaattatcggtaaatagaccggattgggtattcattgcaatcgacccatttttaaatggagtagcatccttacttgaaaaaataaaaacaaaaaatatttcaaatatatatatacatcatggggatggtagattgtttttaaaagaattgcctcaaaattcaatcagcgaaacctgtattttatttcctgacccttggccaaaactcaaacatgaatctagacggataattcaaagagaatttttaaataaactttcagaagtcatgtcttcaaatctttgtatacacttc

SEQ ID NO: 227152 - DNA, 283 bp, Unknown
  Bacterial polypeptide expressing nucleotide sequence isolated from the Sargasso Sea
ttgaaatacaatgttgtagatattggtcctggttatggtgaaagtacaatcgaaattgcaaaaacaaacaatagtaaaatagtaattgcttgtgagaaatatatcgatggaataaataatcttattaaagaaattgacagaaattctctaaaaaatgtttatatttttgatggaaatgcgaatcaatttttggatgaatattgtactacgcaatcaatttctgaattatggattttatttcccgacccatggccaaaaaaaaaacattttaaaaggcgtttaa

SEQ ID NO: 227153 - DNA, 626 bp, Unknown
  Bacterial polypeptide expressing nucleotide sequence isolated from the Sargasso Sea
aaaaaaaccaagaagacctttaagtaaaaaacaaaagagtatattaaattgttcattaaaaaaattcctattaaataaaaatcatttagataaaaagaaaaagtttttagaaattgggtttggatatggcgagaatttaattaatttatctaaaaaaaataaagaaaaattaattataggttgtgaaatttatgaaccaggaataactaatttagttgaaaatattgaacgtattaatttaaaaaatattaaaatttatccaaaaaatattttttctttatttaacattttaaaaaaaaattctatagaaaaaatttttatactttatcccgatccatggccaaagaaaaaacacttcaaaagaagattaatatcaaaaaatttattaaaaaaattaaataaagtcttaaagctaaatggcgaaatatttatatctacagattctgaagattatttatataaaattttatttgaattttttttaaataaaaatttcttttggattaataataaagttacaaattgttataaaagacctaatgaaattgttgaaacaaaatatgagaaaaaagcaaatttaaaaaaaaataaaaaattttatttaaaatttaaaaaaatatgttgaa

SEQ ID NO: 227154 - DNA, 406 bp, Unknown
  Bacterial polypeptide expressing nucleotide sequence isolated from the Sargasso Sea
aaactttcaaaacttgacctcacaaatgtacgtatctacccgggtgatgtgagagatttattcgatgtactgccagatgcctcaattgataatgtatttttactatatcctgatccttggccaaaaaaacggcatcacagaagaagatttgtaaccagtgaatatttgatagagctacagcgcgtaatgaaaaccggggcgtctttgaggctagctacagatatttcagattacgtccgacaagcacttcaagaagtacttaagcacagattttcttggacggcgtctgagccgcaagattggagggagtgctggagcgattggataccgactagatatgaaaaaaaagctctccaagagggacgcaagccgtattatttaacatttgaaaagcgagagtcctaga

SEQ ID NO: 227155 - DNA, 562 bp, Unknown
  Bacterial polypeptide expressing nucleotide sequence isolated from the Sargasso Sea
tgaagtttctgacattaaggaatttatttcaggtaaatacactttattagatatagggtttggtgctggagaaacattaatcagcttagctgaaagtagaaaagactttagggtcttaggtgcagaagtatatttatcaggtataggttctgttttgagtaaggcctataaccttaagttaaaaaatattaggattgtaaatgaggatgcagaagatttacttcagcaaaaaataccagatcacagtatagacgttgtccttatgttttatcctgatccttggcctaaaagaaaacatcataaaaggagactaataaaaaaagaatttattaagctactaaatagcaaattaaaaacgggtggtatcttttactttaaaacagactggaaagattactttaatcaagttagttgcctgtttaaagaagactcagattggaaagaattaagcttacaagagcttggagagcacttaataaacatgccttcaacatcttttgaaaagaaagcaataaaggcaaagagacttttaaacacaaagattgtcaagaaagttaattaa

SEQ ID NO: 227156 - DNA, 282 bp, Unknown
  Bacterial polypeptide expressing nucleotide sequence isolated from the Sargasso Sea
aaaaaagacatcataaaagaagattaattaaccaaactttttttaagtttattcatggttttcttaaaaaatctggttatttaatgatagctactgattcagaatcgtatttacaatcaatacttacctcaatttcagaagttcaaaaaaaatttttatgggaaaatcatagatttgaactctgggattataaaaatttaaatttacctttaactaaattttacaaaaaatccttaaaatcaaatagaaattcaatgtttttgaaattaaaaagaatataat

SEQ ID NO: 227157 - DNA, 451 bp, Unknown
  Bacterial polypeptide expressing nucleotide sequence isolated from the Sargasso Sea
tttcaagaaaaacatttaattgcaacagaggtttatttatctggaataggaagcctcataggtttaattaataagtataaaatctcaaacattagtatcttcgatgaagatgtaaggttattaatggatcagatgcctaagaagtttttagattcggttaacattctatttcctgatccttggcaaaaagcaaaacatcacaaaagacgactcatcggtgaagactttttgtatcagttgcatcctttacttaagcctaatgcaaaaatttttgtacgaactgactgggaagattatgctgaacaaataagcgaattagctgaagtagtgggttctcattttagattggagagaacacaaaatattgagtttgaatttgagacgcgctttcatcagcgtgcaataaaagagggcagggagataagcagttttttatttacaaaactatgaa

SEQ ID NO: 227158 - DNA, 553 bp, Unknown
  Bacterial polypeptide expressing nucleotide sequence isolated from the Sargasso Sea
tctgcaggagaataagttgcctttacaagatagactcaagagttttgtcttgaggagagggaggttaacctctaatcagtcaagggcactctcggagcattgggacaagtacattctagataatgaagaaaaacttagtaatatctggaaccaagacccttcaattttagatataggttttgggtcaggagaaactactgcatatttagctaagacaaaccccgaaatgttaattttaggagctgaggtttatctgtctggaataggatctcttttaagtaaggcaaatgaagagtcactaaataatgttaaaatattaaactcagatattgttccttttttggaagataaagtatcagacaactgctttgatctaatcttaatgttttatcctgatccgtggccaaagagaaagcatcataaaagaagattgttacaaaaagactttattgacttagttaataaaaaactgaaacaaaacggtatcttctacttcaaaacagactgggttcattacttcgatgaacaaagaagctggttaataatgatataa

SEQ ID NO: 227159 - DNA, 541 bp, Unknown
  Bacterial polypeptide expressing nucleotide sequence isolated from the Sargasso Sea
gataaaaaaataaattatattttagatattggcactggatatggtgaaactagtatatttcttgcaaatcaatttttagacaaagttattatatcttgtgaaaaatacattgatggaaatttaattttacttaaaaacattgaaaagaatgaaataaataatattctattacataacggaaatgtatatgatgttttagaatgtgcacatagagaatgttttgaccttgtatggatattttttcctgatccatggccaaaaaatcgacacgcaaagcgtagattgataactagtgattttttaataaaacttcataaaactttaaaagaggatagcgagatacatatcgctacagattcaacaatatatgtaagatttattttaaattcaatttatagttgtagggattattttgtctggatgaaccaatctgaaatgaatctgcatataaaggattatttcgatattgagacaaaatattataaaaaagcaattaattctcaaagaaaaccatctttattcattttgagaaaattatagg

SEQ ID NO: 227160 - DNA, 569 bp, Unknown
  Bacterial polypeptide expressing nucleotide sequence isolated from the Sargasso Sea
ccgtcggctctcccccgatgagttgttcacaactgaggccccgcttgaggtcgatctcgggtgcggtgatgggacctttgcccttgcgatggcccgccagttccccgagcggaactttctcgcagtcgagcgccttctcgggcgtgtccgcaaggtctgcaggcgggcttccgaggccgacctcgagaacctccgggtgctgcgcctcgaagcacgttataccgttgagtggctccttccacacgcatctgtcagccgactccacctgctctttccggatccctggcccaaggccaggcaccatcgccgccgactcgtccagcaggacttcctcaaggccctcggcaagatcctcgttcccggcggggagttcctcttcaagaccgaccacgaggaatacttcgagtgggcccgcgaggaactggaactcttcggatctttcgaacccctcccctgggacgaaagatgcgaggatctttccttttatccggagaccgacttcgaggcccagtggcgcgccgaggggcgagccgttcaccagctccgtatgcgtaacccggccacctgag

SEQ ID NO: 227161 - DNA, 316 bp, Unknown
  Bacterial polypeptide expressing nucleotide sequence isolated from the Sargasso Sea
tttgtatctaatcttaatgttttatcctgatccgtggccaaagagaaagcaccataaaagaagattattacaaaaagactttattgatctaataaataaaaaactcaaattaaatggcaccttctactttaaaacagactggattcattacttcgatgaaacgaagaagcttttaattaataatccaaattggagagttttacaaaaagagaatctcgaggaatatttagtgaacctccctaggacatcctttgaaaataaggcccttcaggcaaaaagaaaattaaatgagcttattctacaaaagacttgttaa

SEQ ID NO: 227162 - DNA, 691 bp, Unknown
  Bacterial polypeptide expressing nucleotide sequence isolated from the Sargasso Sea
tatggaattaaatcatcaacccctaccctatttcaaacacgataacccctaccacgataaacttaaatcatttgagaattttgttctcagagatgaggagggtgaaaattataaagggcagtggaatcaaaacgcatttaagagaaaggctcctctcattttagaaattggttccgggtacggccacttcatgcgagattattgctcaaaaaacccctcagttaacttcattggcatggattacaaattcaaaagatcatttaacctagccaaaaagttaagtgcgctccaaaaagaaaacttcttttatcttagagcaaatgcagcgagagttgactgtttattcgatgaatcagaaatagataaagtactttattttttcccagacccttggccaaaaaataaacataaaaagaagaggttattccaagaagagttcctaaaaaaaattcataaagttttaaaaccaaacgggaagttttttataaaaactgatcattctgaatatgctgagtggatgaaaagcattctgcttgaatccaatctttttaaaattgaaatgatgtcatttgatgttcgaactgattttccagaccactttctatccagttttaagactaagtttgaaaggatttttttacaaaaaggtctaccgattaaaggttttgagcttacctgcctcaaggactag

SEQ ID NO: 227163 - DNA, 568 bp, Unknown
  Bacterial polypeptide expressing nucleotide sequence isolated from the Sargasso Sea
tatgagacagcatgttaatccccttagtagtaatttcaatcaaattgagagaataccttctttgagcgaaatgtttgatgattccaaatcgaatcttcatttggatataggttgtgctgctggcgagtttctatttgatttagctttacttaatactagttggaattatttaggaattgaaatccgtgagaaattagtcaaaaatgctaaattaaaagttattgaacgagaaatcaaaaatctatattttatatttggtaatgctaataatattttgaatgatgtccaaaataaatttattatcaaaaatctaaaaagtatttcttttaattttcctgatccttggtttaaaaagaggcattataagaggcgtgtaattcagccaggatttattaatatgctctcagattcattgcaaaaaggaactttaatttttataaaaacagatgtaaaggatttattcgattatatggattggactatatcaagtaattttcattttaaaacaatagataaaaaagattttaattgttccgaaagttttaatccaattaaagttaaaaactaa

SEQ ID NO: 227164 - DNA, 403 bp, Unknown
  Bacterial polypeptide expressing nucleotide sequence isolated from the Sargasso Sea
gttgagtgtgctctcaaccaaagagtgtccaaggttttatggaagaagaataggtcgaaaactatctacatcaggtattttggctctgaaagcagggtccaaatatattttacaatatgataaattttcagaagattttttgaattttaacaaaaaaatagttcttgaaattggttttggtgacggcagaaatttaataaattcagcaaaacaaaatcctggaattctttacttaggcgcagatccgtttttaaacacaactgtaaaatgtataaaacaaatcttagaaaataatataaataacattaaaatttggccagatgacattagaaaaattttagatctttttccatcaaaaagtatttcagaagtaaagttattgtttccagatccatgggcctaa

SEQ ID NO: 227165 - DNA, 387 bp, Unknown
  Bacterial polypeptide expressing nucleotide sequence isolated from the Sargasso Sea
taaaaaatattcgattacataatgaaaatgtgtatgatgttttagatagcactcatagaaaatgttttagtcttgtatggatattcttccctgatccatggccaaaaaatagacatgccaagcgcagattgataactagtgattttttgataaaacttcataatatcttaaaagataatagtgagattcacatcgttacagattcaacaatatatgtaagatttattttaaactccatttataattgtaaggattattttatctggttgaatcaatctaaaatgaatctgcttataaaagattattacaatattgagacaaaatattataaaaaagcaattaattctcaaagaaaaccatctttattcattttgagaaaattatagg

SEQ ID NO: 227166 - DNA, 490 bp, Unknown
  Bacterial polypeptide expressing nucleotide sequence isolated from the Sargasso Sea
tatgggtgaaaacttattaaatcttgctgataaaaataaagaaaaaatatttattggtatcgatccgtttcaaaatggtttagcaaatattgcaaaagaagtgtttaaaaaaaaaattaaaaatatatatattttcccttatgtattagaaaaattttttgataaatacaataaaatagaatttaatgagatttatgtcctttttccagacccttggccaaaaaaaaaacacaagaaacgaagactggtcaatgaaaatttattgaccaatattttaagtaaattgagaaaaaaaggaaaatttttttttagaacggataaccttgaatattataataatgtaattaaaattattaggaaaataattagagaagaaaagaagtatatcttaaaaaaacatatttcaaaaaatttagttcaaaccaagtaccataaaaaagctcataaatttttaaatgaaataaaatcattagagcttacaaaaaaataa

SEQ ID NO: 227167 - DNA, 694 bp, Unknown
  Bacterial polypeptide expressing nucleotide sequence isolated from the Sargasso Sea
ttgcagcataaaaaacgtttttatggccgtaggttaattcgtagcttacgacaaaaagaaaaaattctaatggaaacgtttttgcctgaaatagagctcgttccttcgcctgatggaacttttttggatttaagtgctcactttggtgaatctaaaaaggaattttggttagaagtcggttttggcaaaggtgaacatcttttatggcaagcacaaaataataaggaaataggtcttattggagcagagcccttccagaatggagtggcaagcatcttatcaaaaataaaagaaaaaaatataagtaatataagaatttttcctgatgtcgtttctcaaattcttcatagtttaccgtcgcaatctataaacagaatttttgtactatttcctgatccttggccgaaatctcgccaccagaaacgtcgtttaattaatatagaaacccttgatctttttgccaggattatgattgattctgcagaactacgtctggctactgatgattctgagtacgcttcctggatgttacggcttgggttatcacatgcatcatttgagtggacagcacgacgtccagatgattggaggattcgcccagatgattggccagttacgaggtatgaagagaaaaacagaagtggaggattaggtcctgtgtatttgcgctttgttcgattgccacgcaattaaa

SEQ ID NO: 227168 - DNA, 667 bp, Unknown
  Bacterial polypeptide expressing nucleotide sequence isolated from the Sargasso Sea
catgcttatccaagatcgtttaaaaagctttgttctcagaaaaggaagaattacctctaatcaaaaaagagctattaatgagctttggggaaaatttgtcatagatgggagtcgagatttagagtcctcttgggctgaaaaaccttctgctttagacatagggtttggagcgggagagactacaattcacctagctaaaagaaaacctgagatgtcagttttaggagcagaggtttatctgtcaggtataggttcgctacttagtaaggctgatgaggagagtctgaataacatcagtattcttaacgaagatgtagtcccatttttgaaagagagggtccctgatgattgttttaatttaatactcatgttttatcctgatccttggccaaagcgtaaacatcacaaacgaagattattgcaaaaggacttcattgatctgttaaataagaaacttaaggtagggagtgttttttattttaaatctgattgggagcattattttcaggaagttagtaagttactttttaataataatgactggagagttatagaaaggagagagttagaaaattacttagtagatctaccccagacttcatttgaaaggaaagctttagcttctggcagaaaattgaatgaactaattctagaaaagattatataa

SEQ ID NO: 227169 - DNA, 5926 bp, Unknown
  Bacterial polypeptide expressing nucleotide sequence isolated from the Sargasso Sea
ctggctaactcattcagacgggcaggcaaattgtcatccagcaatctgatccgcattcgcggagcgcgtcagcacaacctcaagaacctcgatctcgacctgcgtaccggcgagatgacggtcgttaccggcccgtcgggctccggcaagtccagcctcgtattcgacacgctgtacgcggaaggccagcggcgctacgtcgaaaccttcagcgcgtacgcgcggcagttcctcgaccggatggaccgtccgcaggtcgagcgtgtcgacggcgtgccgccggcaatcgcgatcgaccagaccaacccggtccgtagctcgcgctcgaccgtcggcacgatgaccgagctgaacgatcacctgaagctgctgtacgcgcgcgcggccgagctgttcgatcgcaagaccgcgcggcaggtgcggcacgacacgccggagacgatctacgcggagctcgtcgaacgcacgcgagccgacgatccgcgtgtcgtcgtcacgttcccggtcgagctgccggaagcggtgtccgatgaggaaatcgcgcagtggctgtcggcgagcggctatacgcgcgtgcaggcgcagcgcgaggtcgcttcagccaccgggccgcgcaaggtgctcgacgtggtggccgaccgcttccgcgtgcagggcgccgacaaggtgcgcgtggtcgaggcgatcgaggcgtcgctgaaacgcggcggcggccgcgtgaacgtctatgtgctgccggccgacgccgagaatgcggttgccgagccgctggtgtggcgtttctccaccggcctgcacgatcccgacagcgacctgcgctacgcggagccgcaggcggcgctgttctcgttcaattcggcatatggcgcatgcgaaacctgccgcggcttcggccgcgtgatcggcgtcgatctcggcctcgtgatccccgacgcgcgcaagacgctgcgcggcggcgcgatcaagccgatgcagaccccagcctggaaggagtgccaggacgacctgatgcgctacgcggcgaaagccggcatcccgcgcgacacgccgtggtccgagctgtcggacgcccagcgcgactgggtcgtcaacgggtcgcccgactggaacggcaagtggcagagccagtggtacggcgtgaaacgcttcttcggctatctcgagtcgaaagcgtacaagatgcatatccgcgtgctgctgtcgaaataccgcagctacacgccgtgcgacgtgtgcggcggcgcgcgcctgaagacggaatcgctgcaatggcggctcggctcgaaagagaacgcggacgccgtgctcgcgccggccggccgcttcatgccccgcggcgtcgactggagccgcgcgcagctcgaagcgttgccgggcctgaccgtgcacgacctgatgctgctgccgatcgagcgcattcgccgcttcttcgatgacatcacgctgccgagcgcgctgctcgacgatgcgctgaagctgctgctcgccgaggtgcgcacgcgcctgaaatatctgtgcgacgtggggctcggctacctgacgctcgaccggcagagccgcacgctgtcgggcggcgaggtgcagcggatcaacctgacgacggcgctcggcacgtcgctcacgaaaaccctgttcgtgctcgacgaaccgagcatcgggctgcatccgcgcgacctcacgcggatcgtcgaggcgatgcagcggctgcgcgacgcgggcaatacgctggtcgtggtcgaacacgatccgtcggtgatgctcgcggccgaccggctgatcgacatgggccccggcccgggcgagcgcggcggcacgatcgtgtatgacggcacgccgggcgacattcgttcggcgcacacgctcacgggcgagtatctcggcggccgcaagcatgtcgcgcatgcgtcgaactgggcgcgccgggtggtcgacgcgaacacgccgcgcatcgtgctcgaaggcgcgaccgagcacaacctgcgcgacgtgacggtcgagattccgctgcagcggctcgtctgcgtgacgggcgtgtcggggtccggcaagtccacgctgctgcaggacgtgctctatccggcgatggcccgccaccacggcaaggcgaccgagtcgccgggcgcgtatcgcggcctcacgggcgccgaccaggtcggcgacgtcgtgttcgtcgaccagtcgccgatcggcaagaccacgcggtcgaacccggcgagctacgtcggcgcgttcgacgaaatccgcaagctgttcgcgaaggcgccgctcgcgctgcaacgcggctatggcgccggcacgttcagcttcaattcgggcgacggccggtgcccgacctgcggcggctcgggcttcgagcacatcgagatgcagttcctgagcgacgtctacctgcgctgcccggattgcgacggcagccgctaccgcgccgagattctcgaggtgcgcatcgagcgcgacggccgcgcgctgagcatcgccgacgtgctcgacctcaccgtcagcgaagcggccgcgttcttcgcgaccgacgccgaggtgctgcgcgtgctgcagccgatcgtcgacgtcggcctcgaatacgtgaagctcggccagccggtgccgacgctgtcgggcggcgaagcgcagcggctgaagcttgccggcttcctcgccgaatcggcggcagccgtcaacggccgccgggtcgtcacggaagaagcgcgcatcgcgcgggcgaagctgttcatgttcgacgagccgaccaccgggctgcacttcgacgacatcgcgaagctgatgcaggcgttcggcaagctgctcgccgccggccattcgctgatcgtgatcgagcacaacctcgacgtgatccgcgcggccgactggctgatcgatctcggcccggaaggcggcgacggcggcggcctcgtgctgtgcgcgggcacacccgacgacgtgaaggcttgcgccgaatcgcataccggcgtggcgctgctgcagtacgaccgcgcgatggatgccgagctggcgctcgccgacgaaggcaagccgctgcaggccgtgctgaacgcggcgcgcgagcggcgtgcgatcgaaggcgaagacgtcgtgcggatcgtcaatgcacgtgagcacaacctgaaggcgctcgacgtcgacatcccgcacggcaagttcaacgtgatcaccggcgtgtccggttccggcaagtcgacgctcgcgttcgacatcctgttccatgaagggcagcgccgttacctcgagtcgctgaatgcgtatgcgcgctcgatcgtgcagccggccggccgccctgaagtcgatgcggtgtacggcattccgccgaccgtcgcgatcgagcagcggctgtcgcgcggcggccgcaagagcacggtcgcgaccacgtccgaggtctggcacttcctgcggctgctgtacgtgaagctcggcctgcagcattgcatccacgacggcacgcccgtcacgtcgcagtccgtcgaatcgatcgccgcgcagttgctgcgcgatcatcgcggcgagcacgtcgggctgcttgcgccgctcgtcgtcaaccgcaagggcgtgtatacggatctcgcgaaatgggcgaaggcgcgcggcagcacgcatctgcgcgtcgacggcgagttcgtgcaggtcgatccgtggccgaagctcgaccgcttccgcgagcatacgatcgagctgccggtggccgacatcgtcgtgtcgccggacaacgaggccgaactgcggcgcgtgctcgacgagacgctcgagctcggcaagggcgtgatgcatctgctcgcgccgctcgacgggctgcacgatgcgatgcagaacgatcattcgaccgcgcgcgtcggcacggtcaaggtgctgtcggtcaagcgcgcgtgcccggtgtgcggcacgagctacccggagctggacccgcggatgttctcgtacaacagcaagcacggctggtgcacgacctgcgtcggcaccggcgtcacgctcacacgtgaacagcgcgccgcgtacgacgacaccgtgctcgccggggatgaccgtggccgtgagcagacgctgccgtccgacgagcaggaaccggaaggcgtgggcaacgagccgtgcccggattgcaacggcacgcggctgaacccgtccgcgcgcgcggtcacgttcgacgcgcatccgatcgtcgaggtcgcgcaatggacggtgtccgacacgcggcgctggatcgacgggctggagctgacggggcgcgacgcgcagatcgcacgcgacatcgtcagcgagatcggcagccgcctcgcgtttctcgaggaagtcgggctcggctacctgagcctcgatcgtgcggcgccgagcctgtcgggtggcgaagcacagcgcatccggctcgcggcgcagctcggcagcaacctgcagggcgtctgctacgtgctcgacgaaccgacgatcggcctgcatccgcgcgacaaccagatcctgctggacgcgctgcgcaagctcggcgacaagggcaacacgctcgtcgtcgtcgagcatgacgaggacacgatccgtcgcgccgatcacatcatcgacgtcggcccgggcgccggcaagcgcggcggcacgctggtcgcgcagggggcggtcgcggatctcgccgcgcaatccgattcggtcacggggcgcctgcttgcgcagccgatgacgcacccgctgcagccgcgccgcagcgtgagcccgccgggcaagaaaggcggcgccgcggtgccggaggcctggctgaccgtgcatggcgcgcggctgcacaacctgcgcgacgtcacggtcggcattccgctcgcgcggctcgtcgcggtgacgggcgtgagcggttcgggcaagtcgacgctcgcgcgcgacgtgctgatgacgaacctgctcgacgcggtcggccgctcggtgctgtcgtcgccggccacgcgccgcgcacgcaaggccgcgcagcaggacgcgccggccaccaatcgccggtcgagcgtgctcgcgcgcagcgcgccgcggccgtcgctgaacgtcacgcatgcgtggcagggctgcgagtcgctgagcggctgggagcagatcgatcgcgtgctggaagtcgaccagacgccgatcggcaagacgccgcgctcgtgcccggccacctatatcggcgtgtgggacacgatccgcaagctgttcgccgatacgctcgaagcgcgggcgcgcggctacacggcatcgcgcttctcgttcaataccggcgacgggcgctgccccgcatgcgaagggcaaggcgtgcgcacgatcgggatgagcttcctgcccgacgtgaaggtgccgtgcgacgtgtgccacgggcagcgcttcaacccggagacgctcgccgtcacgtggcgcggccggaacatcggcgacgtgctgacgatggagatcgacgaggcggtggagtttttcgcgccgatctcgaacatcgcgcatccgctgcagctgatgaaggatgtcgggctcggctacctgacgctcggccagccgtcgccgacgctgtcgggcggcgaggcgcagcgcatcaagctcgtcaccgagctgacgaaggtgcgcgacgacatcacgcggcgcggccagaaggcgccgcacacgctgtacgtgctcgacgaaccgacggtcggcctgcacatggccgacgtcgcgaagctgatccgcgtgctgcaccggctcgtcgatgcgggccacagcgtcgtcgtgatcgagcatgacctcgacgtgatcgccgaagccgactggatcatcgatctcgggccggagggcggcgtgggcggcggcacgatcgtcgcggcggcaccgccggaagcgctcgtccaggtgagtgcaagccacaccgggcaggcgctcaagccggtgctggcgcgaaccgggtcggacgaaggggaagccgagcgcgagggcgaagcgcgggtagggtgag

SEQ ID NO: 227170 - DNA, 631 bp, Unknown
  Bacterial polypeptide expressing nucleotide sequence isolated from the Sargasso Sea
atgagacagcacgtaaatccacttagtagaaattttaatcagattgaaagtattccatctttggcagaaatgttttctgattctaaattgaatcttcatttagatataggttgtgcttctggtgattttctattcgatttagctttagttaatactagctggaattatttaggaattgaaattcgtgagagattggttaaaactgccaaatctaaggtgcgagaaagagaaatcaacaatttatattttgtatttggaaatgctattaatattttgaatgatgtccaaagtaaatttattatcaaaaatctaaaaagtatttcttttaattttcctgatccatggtttaaaaaaaggcattataaaagacgtgtagtgcagccagagtttattaataaactttcaaattctttacctaagggatctctgatttttataaaaactgatgttaaggatttattcgattatatggattgcgctatatccagtaattttaattttcaagaaattgataaaaaggattttaatgtttccaaaagttttaatccaaataatcttaaaactaatcgggaaaagtatgtgattgttaatcaacttgatatatttgagaggatttatcgaaaaacctgat

SEQ ID NO: 227171 - DNA, 670 bp, Unknown
  Bacterial polypeptide expressing nucleotide sequence isolated from the Sargasso Sea
aatgttaaaaaaaagaaccataaaaagctttgtaaatagaaaaggaagagagagttcgtctgatatagaagctatccaaaaagctaaagatgccggtgtcctaatatttccaaaaggtaatattataagatttaaaaaaaattttaaaaatgaaaacgatgttgtcattgatataggcttcggtaatggaaatttattatatgagattgcaaaaaaaaatagtgatattaattttgtaggaatagaagtttataagcatggtgttggtaagctcttaaaaaaaattatccaaactaatattaaaaatattaatgttattaatgatgatgctaatgaaatattagagaagaatatcgaggataattcagttaaagggatttcaatttttttcccggacccgtggcctaaaaaaaaacataaaaaaagaagattagttaactctacttttctagaattaatgattagtaaagttaaagaaggtggttttattaaggttgtaactgatattgaagactatgctaaagatatgaaaagtatatttaattactcaaatggtattcaacaaattaatgagttgaagctgtttaataatagggatgttactaaatatgaacttaaaggtatagaaaaaggacactctatttttgatttgtcatataaaatactttaa

SEQ ID NO: 227172 - DNA, 634 bp, Unknown
  Bacterial polypeptide expressing nucleotide sequence isolated from the Sargasso Sea
ttgaggagagggaggttaacctctaatcagtcaagggcactctcggagcattgggacaagtacattctagataatgaagaaaaacttagtaatatctggaaccaagacccttcaattttagacataggttttgggtcaggagaaactactgcatatttagctaagacaaaccccgagatgttaattttaggagctgaggtttatctgtctggaataggatctcttttaagtaaggcaaatgaagagtcactaaataatattaaaatattaaactcagatattgttccttttttggaagataaagtatcagacaactgctttgatctaatcttaatgttttatcctgatccgtggccaaagagaaagcatcataaaagaagattgttacaaaaagactttattgacttagttaataaaaaactgaaacaaaatggtatcttctacttcaaaacagactgggttcattacttcgatgaaacaaagaagctggttaataatgatataaattggagagttttgcagaaagagaatcttaaggaatatttggtaaatttacccaaaacatcctttgagaagaaggccctacaagcaaaaagaaaattaaatgagcttattcttcaaaagagttgttaat

SEQ ID NO: 227173 - DNA, 712 bp, Unknown
  Bacterial polypeptide expressing nucleotide sequence isolated from the Sargasso Sea
gttgcgccagcacgtcaatcccctcagccgcttcttccagctgccgttgcagctgccatctcctggtgagctgttcgaccatcccgagcaaccgattcacctcgacatcggctgtgcccgtggacgctgcatcctggggctggctgaactgaacccgggctggaaccacctgggcgtggagatccgacgccccctggtgaccgccgccgaccgtgatgccctcaacagcggcagcggcaatgtgcgggtgctgttctgcaacgccaacatcagcttggaaagctggcttgcagcgctgccggacgaccgattgcagcgggtctcagtgcaatttccggacccgtggttcaagcggaggcatcgcaagcggcgggtgctgcagccggccctgctgctggccatcgcagccgcccttcagcctgggcgggagctgtttctgcagagcgacgtgctggcagtcatcgaaccgatggtcgccctcaccgaactgagcggttgtttcactcggccggattcggatgccagaccctggcgggcagacaacccgctccccgttcccacggaacgggagcaatacgttctcgagaagaacctccctgtgtaccgcgtgctgtatcgacgcaacgcatctccactcactgatccagaggcactggaaagccgttggcaggagctcgataatcccgctgaaacggtcttcaccgacgtctga

SEQ ID NO: 227174 - DNA, 646 bp, Unknown
  Bacterial polypeptide expressing nucleotide sequence isolated from the Sargasso Sea
atgttcgaatcaaaaaataaatattttggaagaaagaaaggaaagtcttttttaagactcgaacaatatacaaaatatcttgtcgaaccaaaaaaaacattatttaacaaaattaaaactcctagaattttagaaattggaataggggatggagaaaaaataagtgaagacgcaaaatctaattctaaagtcaactttataggttgtgatatttttgctgatggtgtgttgagagctattagaaactctgttgatcataaattaaagaaccttcaagtattccatttaaacatccaagagcttttacctttaatgccagataactattttgaggaaataaggatatattttcctgacccttggccaaaaaataggcataaaaaaaggcgaaccgtgaaccaaacacttgtcaaagaccttactaaaaaactcaaaaaaaaaggctttattctttttgcaaccgaccatggtgattattttattgaagcattggctttgatgaaaaaatttaaatacaccatgccaaatattagcccgaaatcttgggaatacagtgattccaatgctttacacactaaattcgagaaaaaagccttagacaaaaatcataaattattctattttagcgttcttaaaaattattaac

SEQ ID NO: 227175 - DNA, 619 bp, Unknown
  Bacterial polypeptide expressing nucleotide sequence isolated from the Sargasso Sea
aatgataaaaacttttagctctagagcagggcgactatctgaaacaaataaattttatttacataaaaaatcaaaatgcattttttctgagaaaaaattaataattcatgaacaaaaagttcttgatgttggttttggggatagcgattccttttgtaaggatattattgaaaatgacgattttctcttttttggagctgaaccatataaaaaaggcttttcaagagccgtagaattttacgagaaaaataatgttgaaaatatgatcttatttaatggagatgtaagagaccttttggagaaagttaaattttgttttgattttattcgcattcatttcccagatccgtggcctaaaaaaaaacatattaagagaagattggttaccaaagaatttttaatctacttatcaaataaattatctgataatgggcttgtacaaattattactgattcacaaaagtatcaggaccatatagaagaagaaataaaattacaaaataaactttcgctaagtaagaaactatttcctataaaatacaatgaatcaagtttttacaaaaaagctttaataaaaaaaaataatattaaagaatttattttgcaaaaatcaggttaa

SEQ ID NO: 227176 - DNA, 730 bp, Unknown
  Bacterial polypeptide expressing nucleotide sequence isolated from the Sargasso Sea
aatgttgagtagtaattattcaaatcggttatttggaaggacaagaggaagaagcaagaaaaaaattaatctaaaaaattattatgaaacagtagataaatacaagtttcaaaattttaatgaagaaacagaatacatcttggatataggtaccggttatggtgaaaccagtatatttcttgcaaagcaattcccagatgatgttattatatcttgtgaaaaatatattgacggaaatataatcttacttaaaaatattgaaaacaataagataaaaaatattctattacataatggaaatgtttatgaagttttagaaagagctaataaaaaatattttcatcttgtatggatattctttcctgatccttggccaaaaaatagacatgctaagcgcagattgataactagtgattttttaataaaacttcataaaattttaaaggaaaatagtgagatactaatagctacagattcaaaaatttatctaagatttattctaaattcaatttataattgtaaggagttttttctctggttgaaccaatcagaaatgaatttacatataaaggattattacgatattgagacaaaatattataaaaaagcaattaattctcaaagaaaaccatctttattcattttgagaaaatataagcttgaaatctttcaatattatatacgcactattataaggtgggtatcccacctttttttatactatggctaa

SEQ ID NO: 227177 - DNA, 649 bp, Unknown
  Bacterial polypeptide expressing nucleotide sequence isolated from the Sargasso Sea
ttgagatctataagaagctttgccaaagcaaggtcaagactctcagctaatcataaaaaaattttaaaccaagagaatgattttcttttttcagcgatcaccaagtcagctttcgaagaaacattaagaagcactaagaataagattcttgaaattggttttggcgaaggagattctctcttcgaaatggctgtaaacaatccagatctaaatttttttggtatagaagtttatgaaaccggcgttgcaagaacttgttcaaaaatagaggagtctagtattaaaaatttgaaaatatacttgggcgatgttgtcgacttaatgctggataaagatatcgagacaacatttgatttgctgttatttctctttcctgatccctggcataaaagaaaacacaacaaaagacgtcttttaagttcagataatttaaacaaatttcgaagttatctctctaaagagggatttattttttttcgcaccgactggaaagaatacgcagattctgtcaaaaaaatttgtaatgaccagaaagtagaatttcaagatttagaaaagttatcatttcttaatcagttgacccttactaaatatcaaagaaagggaattgaagcaggcagatccattacatcacttctctttaagtaat

SEQ ID NO: 227178 - DNA, 658 bp, Unknown
  Bacterial polypeptide expressing nucleotide sequence isolated from the Sargasso Sea
attgaacgataacttatataagttttatggcagaagaaaaggtagaggttataagcgtattaatcaacaaagccctttttttttagattattttcttaaaggtaatcagtttaaaaattataagtcgtatagtaaaaatattttagaaataggatttggaaatgctgaaaacttaataaaaatgtcagcaagatattcaaatataaattttataggagctgaaccatatttaaattcttgtttaaagttatccaaagtcattgcaaaaaataatattaaaaatattaaaatttggtctgatgatataagaaaattgatagaattttcttcaaataatatctttgatttaattttaatacttcatccagatccttggccaaaaaaaaaacatagtaaacgtcgtttaatacaacaaaactttattgattttttagaaaaaattttaaagaaaaatggccaaattataatatctacagatgttgatattatgaagagttggatattagaacagtttcatataagaaaagattttgaatggcacattaaaaatattaatatttgttcaaaaaaaccattatgtttagtaaattcaaaatattctaaaaaagcaatctcaatgcgtaataaaaatagttggtttatatacagaaaattatag

SEQ ID NO: 227179 - DNA, 496 bp, Unknown
  Bacterial polypeptide expressing nucleotide sequence isolated from the Sargasso Sea
tggggaaacattaataagcatagctcaaaaaaataaagaaataagattgcttggagtagaagtttatctatctggcataggatctgttctcagtaagattaatgaatacaatttatgtaatgtaagagttgttagtgcagatgcagaagaattacttcagaccaaaatacccaacagcagcttagacgcagttattatgttttatcctgatccatggccaaagcgaaagcatcacaaaagacggctgatcaaagaagaatttttagagcttctaaataagaagttaaaaataaacggaattttttatttcaaaactgactggaaagattattttgatgatgttagtgatttgcttatagaagatcccagctggatagaagtggattacaaagctcttgacgatcatctaagagatattccttcgacatcttttgagaagaaagctaaacaatccaatagagctttaaatactaagatattaaaaaaaattaaataa

SEQ ID NO: 227180 - DNA, 478 bp, Unknown
  Bacterial polypeptide expressing nucleotide sequence isolated from the Sargasso Sea
tctgccaaacagaatccagaaaccttttttttaggtgcagacccatttctaaatactaatgctaaatgtataagagaaattcttaacaacaaattaatgaatgtaaaaatttggcctgatgatataagacaaattataaatctttttccatcaaatagtatctcagaagtcaaattacttttcccagacccatggcctaaattaaaacataaaaaacgaagaattgtccaaaatgaatttatagatattctatatcgtattttgattcccaatggtaaagttattttaggcacagatcattctattatgaaaagttggatattagaaatttttcagaacaacttaggctttatttggaaagcagaagttgcaaatgattggagagtaagaccaatagaatgttttcaaacaaaatatgaaaaaaagtctttaattgaaaagagaagccctaattggtttgtttttgtaaaaaaataat

SEQ ID NO: 227181 - DNA, 658 bp, Unknown
  Bacterial polypeptide expressing nucleotide sequence isolated from the Sargasso Sea
atgattagtaataattatagcaatcgcttatttgggagaacaagaggaagaagcaagaaaaaaattgatttaaaaaattatcatcaaaaaattgacaaatacaagtttcataattgcgataaaaaaaaaaattatattttagatattggcaccggatatggtgaaactagtatatttcttgcaaaccaatttttagataaagtaattatatcttgtgaaaaatacattgatggaaatataattttacttaaaaatattgaaaagaataaaataaaaaatattctattacataatggaaatgtatacgatgtgttagaaagtacacatagagaatgttttgaccttgtatggatattttttcctgatccatggccgaaaaatagacacgcgaagcgtagattgataactagtgattttttaataaaacttcataatactttaaaagagaatagcgagatacatatagctacagattcaacaatatatgtaagatttattttaaactctatatataattgtaaggattattttgtctggatgaaccaatctgaaatgaatctgcatataaaagattatttcgatattgagacaaaatattataaaaaagcaattaattctcaaagaaaaccatctttattcattttgagaaaattatagg

SEQ ID NO: 227182 - DNA, 631 bp, Unknown
  Bacterial polypeptide expressing nucleotide sequence isolated from the Sargasso Sea
tatgagacagcatgttaatccgcttagtagtaattttaatcagattgagagaattccttctttgagcgacatgtttgaaaattctaaattgaatcttcatttggatataggttctgctgctggtgagtttttattcgatttagctttagttaataccagttggaattatttgggaattgaaattcgtgagaaattagtcaaaaatgctaaattaaaagtgattgaaaaagaaatcaaaaatctatattttttatttggtaatgctaataatattttgaatgatgtccaaagtaaatttattatcaaaaatctaaaaagcatttcttttaattttcctgatccatggtttaaaaagagacattttaaaaggcgtgtaattcagccagaatttattaatattctctcaaattcattacaaaaagggaccctaatttttataaaaacagatgtaaaggatctattcgattacatggatagcactatatcaagtaatttttattttaaaaaaatagataaaaaagattttaattattccgaaagttttaatccaagtaaagttaaaactgatcgtgaaaagtatgtgattgttaaccaacttgaaatttttgaaaggatttatataaagaattga

SEQ ID NO: 227183 - DNA, 834 bp, Unknown
  Bacterial polypeptide expressing nucleotide sequence isolated from the Sargasso Sea
tatgattaattcaaataataatccaagaggaattttattaattcttatcggaatggctatgttctcggtacaagatgccttgattaaatttatatatcagcattcagcattatatgaactgtattttggaagaacgttaactgctttaatacttttattattatatattttttatagtaaagaaaaattaatacttaaaacttcatatccttttttaacatgtattagagttatttttttcttttttggatttagttttttttatgtttctttaacatatatgtcattagcaatggcaaatgcactttttttttctagtcctttttttgtatctattttagcaataatttttcttaaagaaaaaattggaattagaagatggatggcaatctttgtaggttttattggtgtattcattgttttggacccagacttcgataattttaattatatgaaactagcgccagttgcttgtgcgttgtgctattcgatttcaatgactattacaaagattacttccgataaagataacgtttatactcaaatgatacatttatatattggtgctttaacaattagttttttattttttatatttactggaaaaggacagtttaataatttcagtgatccaacatttcaattcattttaagagaatggtttactaatacttcgtacgcttggcctttcataattggaatgggctttgtagcaacagtttctttttattgtgtcttttcggcttattcgattgcttcaccatctgcagtttctttattcgaatactctcttattatctggtctataatcacaggatatcttttatttcaaga

SEQ ID NO: 227184 - DNA, 658 bp, Unknown
  Bacterial polypeptide expressing nucleotide sequence isolated from the Sargasso Sea
aatgattagtaataattatagcaatcgcttatttgggagaacaagaggaagaagtaaaaaaaaaattgatataaaaaaatatcatcaaacacttgacaaatacaagtttcaaaattgtgataaaaaaataaattatattttagatattggcactggatatggtgaaactagtatatttcttgcaaatcaatttttagacaaagttattatatcttgtgaaaaatacattgatggaaatataattttacttaaaaatattgaaaagaatgaaataaaaaatattctattacataacggaaatgtatatgatgttctagaatgtacacatagagaatgttttgaccttgtatggatattttttcctgacccatggccaaaaaatagacatgcaaagcgtagattgataactagtgattttttaataaaacttcacaatactttaaaagagagcagcgagatacatatagctacagattcaacaatatatgtaagatttattttaaactcaatttataattgtaaggactattttgtctggttgaatcaatctgaaatgaatctgcatataaaagattatttcgatattgagacaaaatattataaaaaagcaattaattctcaaagaaaaccatctttattcattttaagaaaattatag

SEQ ID NO: 227185 - DNA, 496 bp, Unknown
  Bacterial polypeptide expressing nucleotide sequence isolated from the Sargasso Sea
tgatgttggttttggggatagtgattccttttgtaaggatattattgaaaatgacgactttctcttttttggagctgaaccatataaaaaagggttttctagagccgtagaattttacgagaaaaataatgttgaaaatatgatcttatttaatggagatgtaagagaccttttggagaaagttaaattttgttttgattttattcgcattcatttcccagacccgtggcctaaaaaaaaacatattaagagaagattggttaccaaagaatttttaatctacctatcagataaattatctgacaatggactcatacaaattatcactgattcacaaaagtatcaggaccatatagaagaagaaataaaattacaaaataaactttcactaagtaaaacgatatttcctataacttttaatgaatcaagtttttacaaaaaggctttaataaaaaaaaataagattaaagagtttattttgcaaaaatcaagttaa

SEQ ID NO: 227186 - DNA, 314 bp, Unknown
  Bacterial polypeptide expressing nucleotide sequence isolated from the Sargasso Sea
tatttcgaaagtttttgttttgtacccagatccttggcccaaaaaaaggcaccatcgcaggagatttgtaacacaagaatttctaatccctctttatgagtccatgaaacctgggagctttttaagaatagctacagatattgaagactatgtaaggcaagctcttcaagaagtaccaaaagcaggttttgagtggctggcaaatgatgcttcggactggcgcactccttggcaagactgggtttcgacacgctatgagataaaagccttaaaggaggaaagaactccttattatcttacatttattgcttgaa

SEQ ID NO: 227187 - DNA, 619 bp, Unknown
  Bacterial polypeptide expressing nucleotide sequence isolated from the Sargasso Sea
aatgataaagacttttagttctagagcaggaagactatctgaaacaaataaattttatttacataaaaaatcaaaatgcatgttttctgagaaaaaattaatagttcatgaacaaaaagttcttgatgttggtttcggggatagtgcttccttttgtaaggatattattgaaaataacgactttctcttttttggagttgaaccatataaaaaaggtttttctagagccgtggaatttttcgagaaaaatgatgttgaaaatatgatcttatttaacggagatgtaagagagcttttggaaaaagttaaattttgttttgatttcattcgcattcatttccctgacccatggcctaaaaaaaaacacattaagagaagattggttaccaaagaatttttaatctatttatcaaataaattatctgataatggacttatacaaattatcacggattcacaaaagtatcagaaccatatagaagaagaaataaaattacaaaataaactttcactaagtaaaaggctatttcctataacttataatgaatcaagtttttacaaaaaagctttaattaaaaaaaataagattaaagaacttattttgcaaaaatcaagttaa

SEQ ID NO: 227188 - DNA, 471 bp, Unknown
  Bacterial polypeptide expressing nucleotide sequence isolated from the Sargasso Sea
tttttccttttgcgaaagaaaaaaccaatacattatttttggcttctgaagtttataaatccggtatcgggaatttaataggaaaaataagagagcattcactggaaaatatatatattcatgaaggggatataagagatcttatttttgaagaaaaaagttttaaatttgatgaagtttatatcatttgccctgatccatggccaaaagatagacatcacaaaagaagactcttaaataaagatttctttgaacgaattcagccatgcttgaaacaaaattcatttatttttctttctacagactggaaaaactatgctgaacaaattgaagatgtgctaagagcttttgaagataagttttctattgagactataaagcaaatacccgggagagagctttctaagtttcaaagaaaaggtatcaaggaagggagagagatatataacttcaaattaagtcttatttaat

SEQ ID NO: 227189 - DNA, 553 bp, Unknown
  Bacterial polypeptide expressing nucleotide sequence isolated from the Sargasso Sea
gttggatgatcctaatactttaaataatgatccatcgttcgataagattgcccttgaaataggctttggtaacggggaagactttttttcctttgcgaaagaaaaaaccaatacattatttttggcttctgaagtttataaatctggtattgggaatttaataggaaaaattagagagcattcactggaaaatatatatattcatgaaggggatataagagatctaatatttgaagaaaaaggttttaaatttgatgaagtttatatcatttgcccggatccatggccaaaagatagacatcataaaagaagacttttaaataaagatttctttgaacgcattcagccatgcttgaaacaaaattcatttctttttctttctacagactggaaaaactatgctgaacaaattgaagatgtgctaagagcttttgaagataagttttcaattgagactttaaagcaaatacccgggagagagctttctaagtttcaaagaaaaggtatcaaggaagggcgagagatatataacttcaaattaagtcttatttaa

SEQ ID NO: 227190 - DNA, 508 bp, Unknown
  Bacterial polypeptide expressing nucleotide sequence isolated from the Sargasso Sea
ttttggttccggggagcatcttgtggagcaggcgttaaataacccatcaattggatttattggctgtgagccctatatcaatggtgttgcccggatattaaccagcatctcaaaatttggcttgagtaatgtgaggatttttcgagatgatgcccgtgttctattatcagctttgcctgatcaaagtatagcgcgggcttttattttgttccccgacccttggccaaaagcccgccaccacaaaagacgaattgttgggcctaagacaatctctgccttacgtcgtcttatgccggcaggtgcagagcttcggattgctacagatgacccaaactataaagaatggattcttagacatattcaatcctgcgctgggtttgagtggcgcgcgcgtcgacctaaagactggcaggtaaggttaggggactggccggcgacaagatatgaaatgaaagccgatgccgctggcaggcaatgcagcttttttttgtttagtcgtgagctttaa

SEQ ID NO: 227191 - DNA, 495 bp, Unknown
  Bacterial polypeptide expressing nucleotide sequence isolated from the Sargasso Sea
gtgaaaaacttttacaaagcgcaataaattatcctgataatttattcataggtattgaatattataaaaaaggaattgctcaacttcttttaaataatgaaaaatataaattaaaaaatatcagacttttttatggtgatgcttttgattatttgaaattattaaaagcaaactttttagatgaagtattaattatgttcccagatccttggccaaaaaaaagacattggaaaagaaggattatcaataatgctagtgtaagtgaaatttcacgatcacttaaatcaaatggaagagttttattttataccgatgataagggtattgcattttgggggcttagacattttatttttaataataattttatatgggctattgataaacctctagattgtaaaaatagaaattcatcaaattatgtaacaaagtatgaacataaagctctagaaaataatattcagccttattattttaattttgttaaaaaatagt

SEQ ID NO: 227192 - DNA, 496 bp, Unknown
  Bacterial polypeptide expressing nucleotide sequence isolated from the Sargasso Sea
gctggaagacccttactttcttgatactagagaggctccggattggcaacgccaatttggaagcaatcatccattaaacctagagattggatttggcatgggggattttttaatcgctatggctaagagggagccaaacagtaatttcgttggaattgacttctccgaggacggtatccaaaaattacttgagcgtattcattcctctcagttagaaaatatacgcgttgtttttggagatgcccgagaaaaactctcgtatctgtttcatgccgaagaattaaattcaatatatatcaatctccccgacccctggcctaagaaacgacatattaaacgcaggctaattcaacccgaactggtaaagcaaattacacaaaagttggctccccaggggaaagtatatcttgctacagacagtcaaacctatgcaaatgagatgctagagtatttcaatgccgaatctttacttcaaaacataaacggaattttttat

SEQ ID NO: 227193 - DNA, 553 bp, Unknown
  Bacterial polypeptide expressing nucleotide sequence isolated from the Sargasso Sea
gttggatgatcccaatactttaaataatgatccatcgttcgataagattgcccttgaaataggttttggtaacggggaagactttttttcctttgcgaaagataaaaccaatacattatttttggcttctgaagtttataaatctggtattgggaatttaataggaaaaattagagagcattcacttgaaaatatatatattcatgaaggtgatataagggatcttatttttgaagaaaaaggttttaaatttgatgaagtttatatcatttgcccggatccatggccaaaagatagacatcacaaaagaagacttttaaataaagatttctttgaacgcattcagccatgcttgaaacaaaattcatttatttttctttctacagactggaaaaactatgctgaacagattgaagatgtgctaagagcttttgaagataagttttccattgagactttaaagcaaatacccgggagagagctttctaagtttcaaagaaaaggtatcaaggaagggcgagagatatataacttcaaattaagccttatttaa

SEQ ID NO: 227194 - DNA, 530 bp, Unknown
  Bacterial polypeptide expressing nucleotide sequence isolated from the Sargasso Sea
aatgcgtttaaagtttttaccttcttttgttaaaagaagaggaagaatcactaagaagcaacaagaaaatttaaaattcctatctaatttttcaataaagaatataaatgatattaagaatgaatgttctagatttaaatcatgttgcttagaaattggctttggtaattcagataaccttcttaatcaagctattaaaaatcctgaaatattttttgttggctcagaagtttatatgtcaggaataggaactcttattgggaacataaaagaaaatagtttagataatattagaatatttccagatgatataaggatattattagataagaattctgaaaaaatttttgatattgtacaaatactttgtcctgacccgtggccaaaagatagacaccataagagaagactgattaatcataactttttaggaatgcttagtaactctatgaaaaaaaatgcaaatctatatatttctactgattgggaaaattatgcagaaagtattgaaaatgctttaagagatagca

SEQ ID NO: 227195 - DNA, 628 bp, Unknown
  Bacterial polypeptide expressing nucleotide sequence isolated from the Sargasso Sea
tcttttgttaaaagaaggggacgcataacaaaaaaacaagaagaaaatctaaaaaatttatcaaattttgctttagaggatatgaatgatcttcaagaagaatgcattaaattttcttcatgttgtttagaaattggttttggtaatgcagaaaacattactcaacaagctcttagtaacccagaagtgctatttataggctcagaggtatatatgtcaggaataggaactttgttaggaaatataaaagagagcaatattaacaatgtaagaatatttcctgatgatattagaattttattagataaaaattccatagaaatttttgatgctattgaaataatatgtcctgacccatggccaaaagaaagacaccataaaagaagattgattaataatgattttctaagaatgcttaataattcaatgaaaacgaatgcttatttatttatatcgactgattgggaaaattatgctgaaagcattgccgagatattaaataatagtaaattctttaaatcttctacgaaaaaattcttagaaaaagagcgcctttcgaaatttgagaaaagaggtgaagaccagggtagacagatttttaattttaattatcaaaagataaactaat

SEQ ID NO: 227196 - DNA, 557 bp, Unknown
  Bacterial polypeptide expressing nucleotide sequence isolated from the Sargasso Sea
aatgacacctgaaagatcggcatcaaacagacctgatccgggcaccccggttttttatggtcgccgccatggccggaggctgaggcggcaacccgctgaaaacctggaatggggccttgatcattacggtattgacgcagatacggtcgaacgcgctgccgccctgccccctctggcgttgttcaacgatgagcctgacagggaagacaggcctgtgtttttagaaatcggctttggcggcggtgaacatctggcggcccgtgccgaagaaagccccggggcgtgtttcatcggtgccgagccgttcatgaacggggttgcgggcctgtgcggccatatccgccagcgcgggctgaccaatattcgcatctggccagaggacgtgcggctgtttctgcctctattgccggatgcctgcctcgatggcgcgtttatcctttttcccgacccatggcccaaattccgtcatcgggagcggcgtatcctgcaaccggtgatgatcgatcagctggcgcggctgattcgccccgggggtgaattgctgctggccagtgatg

SEQ ID NO: 227197 - DNA, 676 bp, Unknown
  Bacterial polypeptide expressing nucleotide sequence isolated from the Sargasso Sea
aatgaattactctgatgattttaaatttaaaaattattttagttcaagaaatagatcattaactgaagatcagaagtcaatccttgatttttatcaagagaaggtatctttagaatcattttctgaacttgatcaattaaacgaatataaaaatatatccctagaaattggatttggtgtaggtgatattcttcttcataatgctttaaattttcctaataatttatttgtaggaattgaatattataaaaaaggaatagctcagctactattaaatatggaaaaacataatttaaaaaatataaggcttttttacggagatgccctcgattatttaaagctagctaagacaaattatttagatgaaattttaattatgtttccagacccttggcccaaaaaaagacattggaaaagacgcattattaataaagatagtgtaaatgaaatatcaagaatacttaaatcaaatggaagagccctattttatactgataataaaggaatagcttattggggtttaagacattttatattaaatgcagattttaattgggaaattgatatgcctattaattgtagaaataaaattagcacatatcctgtttctcggtatgagcaaaaagcacttaaaaataatacaaatccgttttattttcacttcattaagcaataa

SEQ ID NO: 227198 - DNA, 379 bp, Unknown
  Bacterial polypeptide expressing nucleotide sequence isolated from the Sargasso Sea
attttgggttaaaaatataattttaagcaatttaaatagtttttatttttttgaagcaattccagataaatccattgataaaatttttcttattaaccctgatccttgggtaaagaaaagacatcataaaagaagattaatgtcttacgaaatattaagtcttttaaataaaataacaaaatcaaaaaattcgatatatatgactactgattccccagattattttagagacactgtaagtctcttaaatgaatataaagatagtttcgggacatttagtacatctatacttaaaaaagacgatgaattatatggaatctcaaaatatcagagaaaagcattagaaatcgggggtaaaatctatctattaactttgtga

SEQ ID NO: 227199 - DNA, 563 bp, Unknown
  Bacterial polypeptide expressing nucleotide sequence isolated from the Sargasso Sea
cttttcggcgaacactaagtcagcttttgaggaaacattaagaaatactaataataagattcttgaaattggttttggcgaaggagattctcttttcgaaatggctgcaaacaatccagatctcaacttttttggtatagaagtttacgaaaccggcgttgcaagaacttgttcaaaaatagaggagtctggtattaaaaatttaaaaatatacttaggtgatgttgtcgacttaatgctggataaagatatcgagacaacatttgacttgctgttatttctatttcctgatccctggcataaaagaagacacaataaaagacgccttttaagttcagataatttaaacaaatttagaagttacctatctaaagagggatttattttttttcgcactgactggcaagaatacgcagattctgtcaaaaaaatttgtattgaccagaaagtagaatttcaagatttagaaaagttatctcttcttaaccagctgacccttactaaataccaaagaaagggaattgaagcaggcagatcgatttcatcatttctctttaagtaat

SEQ ID NO: 227200 - DNA, 721 bp, Unknown
  Bacterial polypeptide expressing nucleotide sequence isolated from the Sargasso Sea
aatggataacaaagaaagcaagcccaagaatttcagaaatttctatggaaggttaaaaggaaaaggtcttcgagcgttacaacaaaaacttttgaatgaccaactggaaaagttatcaatacctgccgtcaaatatgagataaatccggataggaggcttatagaactatcagatctttttaagaatgtaacatcattctctcttgaaattggatttggagggggggagcatctagtttatcaggcagagcgcaatccaaatattggtttcattggttgtgaaccatatattaatggcgttgcaatgcttgctggaaaactttcaaaacttgagttgaccaatgttcgtattcatcctggtgatgtacgagatttatttgatgtgctgccggatgattcaattgacagtgtctttttactctatccagatccttggccaaaaaaaagacatcatcgacgaaggtttgtaacaagcgaatatttgatagatctgcagcgagtaatgaaaactggtgcattattaaagttggctaccgatattccagactatgttcgacaatcgcttcaagaagtttgcaagcataatttttcatggacggcgactgatgctcaagactggagagagtgttggagcgattggatgccaactagatatgaacgcaaagccctacgagaggggcgcaggccgtattatttaacatttgaaaagcgagagtcctag

SEQ ID NO: 227201 - DNA, 424 bp, Unknown
  Bacterial polypeptide expressing nucleotide sequence isolated from the Sargasso Sea
tttaaactagctaaaatagtaaaagaaaaaaaaataaaaaatttatatattcataatggtaatgttcatgaatttttagataaattagataaaaatttatattttaattcaatatggattcttttcccagatccttggcctaaaaaaaggcattttaaaagaagattgattaataatttatttttagtaaaaatttctaaatttttaaaaaaaaatgcttatttgaacattgcaactgattcaaaatcatatttgaatgaaatattatttctaatttttaatatgaaaaatcaatttatttgggagaatcaaaataaaatggaatgggaatataaaaatgtatatttggcagaaacaaagtactttaaaaaagctataaaaaatggggctaatcctttttttataaagttgagaaaattataag

SEQ ID NO: 227202 - DNA, 448 bp, Unknown
  Bacterial polypeptide expressing nucleotide sequence isolated from the Sargasso Sea
tttgttgtagaacaatatattaatggtcttgcttctttagcctcaaaaattagagataataatcttacaaatatcaaaattttttctggtgatgttacaaaaatattaaatattctcccccataatttttttgatagtatttatttgctttttccagatccttggccaaagtcaaagcatcataaaagaagaataattcaaaaagaaatagtagaaattttttctaaattattggtaaataatggttatttgtggtttgtttcagatcatgtggagtatagcagatttgctctactccactttcaaaatgacccttcattcaagtggactgctgaaaaacctgaagattggcttaaaaagcctatttcttggattgatacaagatatgaaataaaagcaaaaaaaagaggaatttcccctgtttttctcaaatttgtaaagtcttagt

SEQ ID NO: 227203 - DNA, 496 bp, Unknown
  Bacterial polypeptide expressing nucleotide sequence isolated from the Sargasso Sea
ggttttggaaatggtgaatttttaattaaaaatgcagtttctaaacctgaggaattatttattggtgtagaggtatatctaaatgggatcgcaaaagttctaaaaacaatttcagatttcaaattaacaaatatattactaagtaatttaaattgttcctattttttaccggcaatatcagacaaatcagtagacaggatatttattattaatccagatccttggacaaagaaaagacaccataagcggaggctaatttcttacaaaattatcaaacttttaaaacaaataattaaaacaaaagattcaatatttataaccacagattcagaaagttatctaaaagacataaaaaatctattaagcagttttaaagaaacttttggtgactatactgtaaatataatggcagaaaatgacgaattgtatggaatttctagataccaaagaaaagcaattgaaatagggggtaaaatttatctgctaaaattatgaa

SEQ ID NO: 227204 - DNA, 518 bp, Unknown
  Bacterial polypeptide expressing nucleotide sequence isolated from the Sargasso Sea
attcgataaaactgcacttgaaataggctttggtaacggagaagatttcttttcttttgcgaaagaaagaaacaacacattatttttagcttccgaagtttataaatctggaattggtaatttaataggaaaaattagagaacattcactagaaaatatttgcatttatgaaggggacataagagatcttatctttgaagaagaaggttttagatttgatgaagtttatataatttgtccagatccatggccaaaagatagacatcataaaagaagacttttaagcagagatttttttgaacgcattcaatcatgcttgaagccaaactcatttttatttctctctacagattgggaaaattatgcttttaagattcaagatgtattgagagattttgaagataagttctcaattgagaatgtaaagcaaatacctggcagagagctctcaaagtttcagaaaaaaggaatcaaggaaggacgagatatatatactttcaaattaagtttaatttaat

SEQ ID NO: 227205 - DNA, 379 bp, Unknown
  Bacterial polypeptide expressing nucleotide sequence isolated from the Sargasso Sea
aaaaatgatataaaaaatataagaatattttcagaagatattcgattgcttcttgatgcagatcctacaaagatatttgattcaataaagattatttgtccagatccttggcccaaagacagacatcacaaaagaagactaatcaataaagatttcttaagtatgattcatggctttataaaagagaatggaaatttatttatttcaaccgattgggaaaattatgctgaaagtattaagaatttattagaatcaggaggtttatttatcgagtctgaaaaaatatatttagagaagaataaccttacaaaatttgaacaaagaggggagcttgaaggaagaagggtttttaaatttaactatgagagatcttcatagt

SEQ ID NO: 227206 - DNA, 299 bp, Unknown
  Bacterial polypeptide expressing nucleotide sequence isolated from the Sargasso Sea
tgattttgtacaaataatttgtccagatccatggccaaaagacagacatcacaaaagaagactgattaacgaagatttcctagaaatgcttaataattctatgaaaaaaaatgcaaatttatatatctctaccgattgggagaattatgcgcaaaacattgaatacgttttaaatgatagtaatttctttaaaaaaacttcacaaatatttttaaaaaaagattgcctatcaaaatttgagaaacgaggaagagaccaaggaagaaatatttttgaatttaactatcaaaagaattgat

SEQ ID NO: 227207 - DNA, 652 bp, Unknown
  Bacterial polypeptide expressing nucleotide sequence isolated from the Sargasso Sea
ttgcgatacaaatttttaccaagttttgctagaagaaaagggcgaattaccaatgcgcaaaaaaaatatttgcttcatttagataagttcttaattcattcctgccaagacattcaaactgcggctgcaaagtttgagcatatttcacttgaaattggtttcggcaatggtgaggatttctttaaatttacgcaatcacaaccacaaacactatttatagcagcagaagtctatgacgcagggattggtaatttattgggaaaaatcatagagtcaaattctcaaaatatactgatcttcaataaagatatcagagaattattggatgactcacaccctattactttttatgaaatttttattatttgtcctgatccctggccgaaagatcgacatcataaacgcagactgcttcaaaataatttttttgatatgctcaacaaaaggatgacagcagaatcaagattgtttatttcaactgattgggacaattatgctgatgacatcagtggatcccttaaatcaaaaaatcataattttgactcaagattgatatccagcattccttctcgagacctatcaaaatttcaaaagcgggctgttactgagggacgtcgtctacatttttttgaagttcaaaagattagataat

SEQ ID NO: 227208 - DNA, 670 bp, Unknown
  Bacterial polypeptide expressing nucleotide sequence isolated from the Sargasso Sea
caaaaccttgagtaatttacaaaaaaaaaatcttaataaatatcttaaagatttttcaattttctcaaatgataacgacaatatagataaattaaaaaaaattaatccatacaatttatttcatgatttaaaaacaatggacatcagacttgaaattgggtttggaatgggtgatttcctgtttgataaggccttatcatgcccaaaagtaggatttattggttgtgaaatttttgagaatggagttgcaagtttgttaaataggatcatcaaattcaaaatatctaatttacgtatccattttggaaattgtcttgatttgatttataatttaaactactcaacattaaatgaaatttatgttttgtttccagatccttggccaaaaaataaacataaaaaaagaagattttttaatgaaaaaaatgctttttatttatgttctcttttaaaaataaatggaacaattaaaatagcaacagatattgatgactatgctgctcaaatattaggtattatggagaaaaaaaagaattttgattttattagctcaaatttttttcaaagtgaaattaacaaaaaaataaaattcaacacaaaatatgaaaaaaaagcaatagattcaggaagaaacactaactattttatctttaaaaaaaaatatgagtaa

SEQ ID NO: 227209 - DNA, 664 bp, Unknown
  Bacterial polypeptide expressing nucleotide sequence isolated from the Sargasso Sea
tgatgattttaaatttaaaaattattttagttcaagaaatagatcattaactaaagatcagaagtcaatccttgatttttatcaagagaagatatctttagaatcattttctaaacttgatcaaataaacgaatataataatatatccctagaaattggatttggagtaggtgatattcttcttcataatgctttaaattttcctaataatttatttgtaggaattgaatattataaaaaaggaatagctcagctgctattaaatatggaaaaacataatttaaaaaacataaggcttttttatggagatgccctcgattatctaaagctagctaagacaaattatttagatgaaattttgattatgtttccagacccttggccaaaaagaagacattggaaaagacgcattattaataaagatagtgtaaatgaaatatcaagaatacttagatcaaatggaagagccctattttttactgataataagggtatagcttattggggcttaagacattttatattaaatgcagattttaattgggaaattgatatgcctattaattgtagaaataaaattagcacatatcctgtttctcggtatgagcaaaaagcacttaaaaataatacaaatccgttttattttcagttcatcaagcaataa

SEQ ID NO: 227210 - DNA, 414 bp, Unknown
  Bacterial polypeptide expressing nucleotide sequence isolated from the Sargasso Sea
ttttaaaaaaaatagatgatcatggtttaaaaaatattcaaatttttcatggtgatgctcatgtatttatcaaagagacatcaaaattcttttttgatgaaatttggattttttttcctgacccttggcctaaaaaacgtcatgaaaagagaagatttattcaaattgctactataatcaggctttatgaaattttaaaaccaaatggtgaattatacatatcttctgatgataaaaattatatatcatggacattaagtttaatatttcagagcgataaattcgagtggcttgctgaatccccttttgattggaagaatccatatcgtgagtattatggttctcgctatgagcaaaaaggtatgaagaaaaatagagctccatattttttaaaatttaaaaaaacggattaag

SEQ ID NO: 227211 - DNA, 502 bp, Unknown
  Bacterial polypeptide expressing nucleotide sequence isolated from the Sargasso Sea
tttgttcgacttagcttttgctaatactaattggaattatttaggttttgaaattagagagagattagttaaaacagctaaattaaaagtgcgagaaagagaaatcaaaaatttatattttgtatttggtaatgctaataaaattgttaaaaatttttatactaaatttattaataagaatttaaaaagtatttcatttaatttcccagatccatggttcaagaagagacatcataaaagacgtgtagttcagccagaattaattgatattctctcaaattatatgcaaaaaggatccctaatttttgttaaaaccgatgtaaaagatttattcgatgatatggattggacgatatcaagtaattttaattttaaaaaaatagatcaaaattactttgattattcccagagttttaatccaaataaagttcaaactaatagggaaaagtttgcgattattaatgaacttgatatttatgagggaatttatatgaaaatctga

SEQ ID NO: 227212 - DNA, 352 bp, Unknown
  Bacterial polypeptide expressing nucleotide sequence isolated from the Sargasso Sea
ctgtttgaatatctaaagaacactgtttttacaaaaatattaattttatttcctgacccatggcctaagaaaaggcataaaaaaagaagattaattaactctaattttgttagtcttctagaattgattacttttgaaaaaacgaaaataatcgttgcaactgaccatgaagactatttaactcagatactttatgagttttataaaagtaaatcttttgaactttcaactgaagtaattggctatgaagtttatacttgttttgatattagtttgactaaatatcacaagaaggcaaaaaaaagtaaaaaaagagtatacttcttacttttcgaaaaaaaaaaatcttaaa

SEQ ID NO: 227213 - DNA, 607 bp, Unknown
  Bacterial polypeptide expressing nucleotide sequence isolated from the Sargasso Sea
gatgaataaaacttcttttaattatagaatttatggaagatcaaaaggaagatataaaaaaaacattaaatatgataagtttaacttaattttaagtaaatttgctataaaagatttaaatacaaataatcataatattttagatataggttctggatatggagaaaactcactttttttagctgaaaattatagtgaagcaaaagttatcgcttgtgaaaatttttttgatggtaattacaaacttgttactgaatctgaaaaaaaaagtttagaaaatctttttatctacaatggtaatgttaatgagtttttagataaattgactataaacaaatattttaattctgtttggatactatttcctgatccatggccaaaaaagagacatttaaaaagaagactgttaaatatgatgttttttaataaaatacataaatacttaaaagataatggaagtttaaatatagcgacagattcacagccatatttattaaacatactatatttaataactcatttaaaaaaacaatatatttgggaaaatcagagaaagctagattgggattaccaaaatatttctttagttcaaacaaagtactataaa

SEQ ID NO: 227214 - DNA, 676 bp, Unknown
  Bacterial polypeptide expressing nucleotide sequence isolated from the Sargasso Sea
gttgaatattcacagtttaattgaaaatcctcaattttatggtagaagaagaggtagaaaattgtcaaaatctggtcaattggcaataaaatatgggatagactattttattaaagaagaagaaatttctaatatttttaactatcaaaagcacatagtcctcgaaattggttttggagatggtgaaaacttaattaattctgcaaagataaattctaatttcctttattttggtgctgatccttttttaaatacaacagctaaatgtctgagtaaaattcttaaatataacctaaaaaatatttttatttggccagatgatattagaaaaattttaaagttttttcctgatgatagtgtttcagaaataaaaatactttttcctgatccatggcccaaaaaaaaacatagaaacagaaggttgattcagaacgagtttataaaaacaatatatccaatcatgaaacatcaaggaactattactattgctacagatcatgatttattgaaaaaatgggtgttggaaaaatttcaaaactataaagaatttgaatgggtagttaaaagctcaaatgattggcgtttaaggcctaaagattgctttcaaacaaaatacgaacttaaatcaattaatcaaaaaagaaaacctagttggtttatttttaaaaaaaaataa

SEQ ID NO: 227215 - DNA, 325 bp, Unknown
  Bacterial polypeptide expressing nucleotide sequence isolated from the Sargasso Sea
tttatcaataaatataaaagacttcgtttcgatataatatatgttttatttcctgacccatggcccaaaaaaagacataaaaaaagacgtattgtaaatgaagaatttttaaagaaaatctttgcaattttaaaaaaaaaggggaaagttttttttagcacggacaatttagattatttcttaaatgttaagaatattataaaaaaatttcctaatattaaggttagaaaaataaataaaatagttacaattaaaactaagttttatctaaaagcagaaaaaaagggtaatacgataaattcacttttatttttcaaatattaat

SEQ ID NO: 227216 - DNA, 556 bp, Unknown
  Bacterial polypeptide expressing nucleotide sequence isolated from the Sargasso Sea
atgcgccttaaatttcttccatcatttgttaagagaaagggaagaataacaaaaaaacaactcctcaatctaaattatctgccacattacttggtaaccaatattgatgacgttattgctgactcacataaatataaaaaatgtattttagaaattggattcggtaacgcagaaaatttaatttctcaagcattaaagaatccagactacctatatgttggatcagaagtttatatgtcaggtattggaacattaatctcaaacttgaaagaacaaaagatagcaaatgtaagaatctttccaaatgatataaggcttcttcttgaccaagaatctagagcagtattcgattatatttttattatatgtccagatccatggccaaaagaaaagcatcataaaagaagacttattgatagtaattttttaaaaatgttaaataaatttatgaaaaaaaatgctcaattatatatttctactgattgggaaaactatgctgaaagtattttatgctcaattaatgaagaaaatttatttatggaaactaacaaaaaat

SEQ ID NO: 227217 - DNA, 592 bp, Unknown
  Bacterial polypeptide expressing nucleotide sequence isolated from the Sargasso Sea
gcagacccacagtttaagctctttatcagaattctctgtaaaaagtattcaggaagtagaagatttcagcaaacactttgataaatgttatttagaaattggctttggaaatgctgaaaatattatttttcaagcaataaataatcctaactctctatttataggttctgaagtatatatgtcaggtatcgggactttggtttcgagcataaaagaaaacaatatcaataacataaaaattttttcagacgatattaggctgcttttagatcaaagcccaaaaaaagtatttgatgcagtcattattatttgtcccgatccttggccaaaagaaaaacatcacaaaagaagactaataaataaatcttttttaaaaatggtccatgattttatgaaggacgattcaaatgtatacatatctacagattgggaaaactatgcaaaaagcatttctgaattatttgaaaaaaataaattatttaagctatcttcaaacaaatcttttcaaaaagaatctctttctaagtttgaaagaagagggaaagatgagggcagagagttatttgaatttaattataaaaaagtatcataa

SEQ ID NO: 227218 - DNA, 408 bp, Unknown
  Bacterial polypeptide expressing nucleotide sequence isolated from the Sargasso Sea
aatgaaaaaaaaactttattttggaagagttaaatcaagaaagatttccagaattaaagaaagtagctttaaaaaatatttaaaaacaaagaatataaacagattaaatttaaagaaaaaattgattctagaaattggtattggaatgggtgaaaacctaatttatttatccaaaaaaaatataaaaaaaaatataattggtgtagatccttttaagaatggaatggtaaatgtttcagattattgtattaataacaatatacaaaacatttatctttatccctatgtgtttcaaaaatttatcaataaatttaaaaaacttcgtttcgatataatatatgttttatttcctgacccatggcccaaaaaaagacataagaaaagacgtattataaatgaagagttttt

SEQ ID NO: 227219 - DNA, 454 bp, Unknown
  Bacterial polypeptide expressing nucleotide sequence isolated from the Sargasso Sea
attgaaattagatcaattcaaaattactgaaagatttttcggcagaaggaaaggaagaaaattatctaaatctgacgaacttgcaatagtttatggtaataaatacatacttaaagaaagtaaaatctcaaactactttcgaaatcatcataaaaagataatacttgaaattggatatggagatggcgaaaatttagtaaattctgcaatgaaaaatcctagattttcttttattggtgcagacccttttataaatgggacagcaaaatgtctaaaaaaactcttaaaatataaaattaaaaacgttacaatatggtcagacgatgtcagaaaaataataaaactattccctaatgaaagcatttcagaaatcaaagttctttttcctgatccatggccaaaagaaaagcacaaaaatagaaggctgatacagaatgaatttatagaatcaata

SEQ ID NO: 227220 - DNA, 646 bp, Unknown
  Bacterial polypeptide expressing nucleotide sequence isolated from the Sargasso Sea
aatgaaaaataattttaagtatagattatatggcagatcaaaaggacgaaataaaaataataaaataaatgaaataaattctaaaaaaaaaataaatcttattaataaatcaaagtataatattatagatataggttctggctatggagaaagttcgatagaacttgcaaaattggacaaacaaaatgttgttattgcatgtgaaaaatttattgatggaatcaacaacactttaaataaaatacaaactgactctatagaaaatttatttatatttcatggtaatgcaaatcaatttcttgatgaaaattgtgttgataaatcaatatcagaaatttggattttatttcctgatccttggcctaaaaaaaggcattttaaaagacgtttaattaatttagaatttattaaaaaacttaaaaagttattaaagcaaaatgcaaaaatacatatagcctctgactcaaaatcttatattgctcatatattagattgtgtgcacaaaataaaaaaagattttaaatggataaatcaaagtaaacaagaatgggaatatgcatctttatctttgcctaaaactaaatattataaaaaagcccttaaaaatggccgcaattcgttttatattaagcttatgaaattatag

SEQ ID NO: 227221 - DNA, 611 bp, Unknown
  Bacterial polypeptide expressing nucleotide sequence isolated from the Sargasso Sea
aatgcaaaacctcaataactcgaactacagattatatggcagaacaaaaggtagaaagaaaaagaatagcagtaaagaatttttaaaaataagactaataaaaatagataaaaaaaaatataatattttagacgttggtgctggttttggtgaaagcacaattaaactagcaaagaaagataaaaaaaatacagttatttgttgtgaaaaatatatagatggccttaatagtttatataataaatctaaattagctaacttagataacattaatatttatcagggtaatgttcatcaaatgcttgatgaatattgtaaaaaagactctatttctgaagtttggatactttttcctgacccctggcctaagaaaagacattttaaaagacggttaattgatgaatatttttttacaaatataaataaatatcttaaacatagagcaacgataaatatagcttctgactcaaaatcatatatatctcaaattcttagatcgatttatctttcaaaagaagaatttgaatggttaaatcaaagcaaatcagaatgggactatgataaagatatattacctgaaactaaatattataaaaaagccctaaaaaacg

SEQ ID NO: 227222 - DNA, 655 bp, Unknown
  Bacterial polypeptide expressing nucleotide sequence isolated from the Sargasso Sea
tttaaaaattatcttagttcaagaaatagatcattaactcaagatcagaaatctatttttgatttttatcaaaagaagatatctttagaatcatttcgtgaattagaacaattaaacgaatataaatatatatctttagaaattggatttggaacaggtgatattcttcttcataatgctttaaattttcctaataatttatttgtaggaattgaatattataaaaaaggaatagcgcagctactattaaatatagaaaaatataatttaaaaaatataagaattttttatggagatgcctttgattatctaaagctagttaaaacaaattatttagatgaaattttaattatgtttccagacccttggcccaaaagaagacattggaaaaggcgtattataaataaagatagtgttaatgaaatatcaagaatacttaaactaaatgggaaagcgctcttttttactgataataaggatttggcttattgggggctaagacattttatattaaatacatattttaattgggaaattgatatgcctagtaattgtagaaataagattagtacacatcccgtttcgcgatatgaattaaaagcacttgaaaacaatataaatcctttttattttcagttcattaagcatagttgat

SEQ ID NO: 227223 - DNA, 661 bp, Unknown
  Bacterial polypeptide expressing nucleotide sequence isolated from the Sargasso Sea
aatgaataaattatcaactagtaaaatttataaaatatttggaagaaaaaaaggaagaaaaaaaaacaataattcaattttaaataattcaaaatatttaatttctaattttactaaaaaattacaagataaagaaattataatagatataggttttggcaatggagaaagcacaatatttctctcaaaaaaatatactgataaagaaataattgcttcagacgtttataatgatggaaatattaaattaataaaaaaaattaaagaaaataatttaaaaaatataagtatttttaatcaaaatattcttatgctaattgatcaaattaatttttctattaacctttcgcaggtatggattctttttcctgatccatggccaaaaaaaaaacatcataaaagaagattagttaatgaggattttttacaaaaaattgctaatatgatgaaaaagaatggaaaaattgtaattgccacagattctacacaatattttttttcgattatttgttctatttctaatcttgattgtttgaaatggattaatgatattccaaaaaaatggcaatattccaatcaaaatttaccagaaacaaatttttataaaaaagctctaaaaaataagagaatacctaaaataatcattttatcaaaaatataa

SEQ ID NO: 227224 - DNA, 112 bp, Unknown
  Bacterial polypeptide expressing nucleotide sequence isolated from the Sargasso Sea
gatggcacctacgtgccgcgtcccgaggagcgcccggtgaccaagttcgaacgtcgtggcgagcgtctcggccatggcgtgtgggatctgaagttccagcgtcaggaatgac

SEQ ID NO: 227225 - DNA, 553 bp, Unknown
  Bacterial polypeptide expressing nucleotide sequence isolated from the Sargasso Sea
ctgcttgctgaccgaggagacgctcggcgacgcgtgggcttccggttcatcggtcattgtggacatcggattcggatcaggtgagccggttgcagccatggcacgcagctttcccgagcagatcatcctggccgtcgacgtgcacacacccggcatcggggacctgctcgatcgccgtcgagtcgaggacatcgacaacgtcttcgtcatcgaagccgacgccctcgaactcgtgcccaccattcctggcccggtatcgggtgtgcggacctacttccctgacccgtggccgaagtcccgacaccacaagagacgcctcgtgcaaaccccggtcatcgacgccgtcgccgaacgtgtcatcgacggtggcttctggcacctggcgacggattgggccgaatatgcggaatccatctgcgcggcattcgacgagcacactggatggcagggtggagtgatccctcgccccgcttggcgtccggtgacgcactacgagcgtcgagcgattcgcgagggaagggccgtggtcgacatgtggttcacccgaatctga

SEQ ID NO: 227226 - DNA, 553 bp, Unknown
  Bacterial polypeptide expressing nucleotide sequence isolated from the Sargasso Sea
ttggatgatcctaatatcttaaataatgatccatcgttcgataagattgcccttgaaataggttttggtaacggagaagactttttttcttttgcgaaagaaaaaaacaacacattatttttggcttccgaagtttataaatctgggattgggaatttaataggaaaaattagagagcattcactggaaaatatatatattcatgaaggggatataagagatcttatttttgaagaaaaaggttttaaatttgatgaagtttatattatttgccctgatccatggccaaaagatagacatcataaaagaagacttttaaataaagatttctttgaacgcattcagccatgcttgaaaccaaattcatttatttttctttctactgactggaaaaactattctgaacagattaaagacgtattaagaggttttgaagataagttctctattcaaaccttaaagcaaatacccgggagagagctttctaagtttcaaaaaaaaggaatcaaggaaggacgagagatatataacttcaaattaagtcttatttaat

SEQ ID NO: 227227 - DNA, 568 bp, Unknown
  Bacterial polypeptide expressing nucleotide sequence isolated from the Sargasso Sea
gtattattccagaatatatttaattctgatgttcaaatttttttagaaataggatttggccacggagaaaacttaattcaattatctaaagaaaggccagaatggactttcttaggtgtagagccttttataaatggagtagcatccttattagaaagaattgatacagaaaaaatttctaatatttatgttttaaatggtgatggaagagattttttaaagaagttacctaaagacactatatctgaagcatgtgttttatttccagatccttggcaaaaatccaggcatgtttcaagaagaataattcagcaagaatttttaaatgatatgtctaaaattttaattaaaaattctactttacatttgtctagtgatcaccctaaagcacaggaatggatattaagaagtctgactaataataaaaattatgattgggatatagaaaaaatatacgattgttatcaaaaacctaaaatttttggagaaacaaaatatatgaaaaaatcaataagagaaatgcgcaaggcaatgtggtttaaatttagaaatataaaagaatgttgat

SEQ ID NO: 227228 - DNA, 538 bp, Unknown
  Bacterial polypeptide expressing nucleotide sequence isolated from the Sargasso Sea
gttgagatataactttttaccaagctttgccagaagaaaaggaaggattacaaagcttcaggaaacaaacctaagtttcttagcagattattcgttggatgatcctaatactttaaataatgatctatcgttcgataagattgcccttgaaataggctttggtaacggggaagactttttttcctttgcgaaagaaaaaaccaatacattatttttggcttctgaagtttataaatctggtattgggaatttaataggaaaaattagagagcattcattggaaaatatatatattcatgaaggggatataagagatcttatttttgaagaaaaaggttttaaatttgatgaagtttatatcatttgccctgatccatggccaaaagatagacatcacaaaagaaggcttttaaataaagatttctttgaactcattcagccatgcttgaaacaaaattcatttatttttctttctacagactggaaaaactatgctgaacaaattgaagatgtgttaagagcttttgaagataagttt

SEQ ID NO: 227229 - DNA, 646 bp, Unknown
  Bacterial polypeptide expressing nucleotide sequence isolated from the Sargasso Sea
gttgagatataactttttaccaagctttgccagaagaaaaggaaggattacaaagcttcaggaaacaaacctaagtttcttagcagattattcgttggatgatcctaatactttaaataataatccatcgttcgaaaagactgcccttgaaataggctttggtaacggggaagactttttttcctttgcgaaagaaaaaaccaatacattatttttggcttctgaagtttataaatctggtattgggaatttaataggaaaaattagagagcattcattggaaaatatatatattcatgaaggggatataagagatcttatttttgaagaaaaaggttttaaatttgatgaagtttatatcatttgccctgatccatggccaaaagatagacatcacaaaagaagacttttaaataaagatttctttgaacgcattcagccatgcttgaaacaaaattcatttctttttctttctacagactggaaaaattatgctgaacaaattgaagatgtgctaagagcttttgaagatatgttttctattgagactttaaaacaaatacctgggagagagctttctaagtttcaaagaaaaggtatcaaggaagggcgagagatatataacttcaaattaagtcttatttaa

SEQ ID NO: 227230 - DNA, 554 bp, Unknown
  Bacterial polypeptide expressing nucleotide sequence isolated from the Sargasso Sea
tatgagacagcatgtaaatccactcagtaaaaatttctttgaaatagatcctatacctccattgaatcaagtttttgaaaatccaaacttacctctccatttggatgtcggttgcgcttctggtgattttttattcgaattatcacttaaaaataaaaactggaattatttaggaattgaaattagagaaaaattagttttaaatgctaatttgaagatgaaaagtagagaaaataagaatttatatttttcatttggtaatgcgaataatatttttgatcattctaataataaatcaattattcaatttataactagtatttcttttaattttcctgatccatggtttaaaaagaaacatcataaaagacgtgtaattcaacctaaattaataaatttactttcaaattcaatgaaaaaaggatccttattcttcattaaaacagatgtaagagagctttttgatcatatggaactcacaatatccgaaagtataaagttcaaaaagttagcaaatcaagatgttcaattttatgaaagttttaacccaaata

SEQ ID NO: 227231 - DNA, 649 bp, Unknown
  Bacterial polypeptide expressing nucleotide sequence isolated from the Sargasso Sea
atgcaattaaagtttcttccttcgtttgtaaaaagaaaaggccgaataactaaaaagcagacccacagtttgagctctttatcagaattttctgtaaaaagtattcaggaagtagaagatttcagcaaacactttgataaatgttatttagaaattggctttggtaatgctgaaaatattatttttcaagcaataaataatcctagctatttatttataggttctgaagtctatatgtcaggcataggaactttggtttcgagcataaaagaaaacaatatcaataacataaaaattttttcagacgatattaggctgcttttagatcaaagcccaaaaaaagtatttgattcagtgattattatttgtcccgatccttggccaaaagaaaaacatcacaaaagaagactaataaataaatcttttttagaaatggtccatgattttatgaaggacgattcaaatatatacatatctacagattgggaaaactatgcagaaagcatttctgaattatttgtaaaaaataaattatttaagccatcttcaaacaaatcttttcaaaaagactctctttctaagtttgaaagaagagggaaagatgagggcagagagttatttgaatttaattataaaaaagtatcataac

SEQ ID NO: 227232 - DNA, 349 bp, Unknown
  Bacterial polypeptide expressing nucleotide sequence isolated from the Sargasso Sea
ttttcctcacgacgcaagaattttactagatcaagcaggtgaaagtatttttgacgaggtagtaatattatgtcctgatccatggcccaaagatcgtcatcacaaaagaagattattacaaccagaatttattgagatgttacttaagtttcttaaatggaatgggcgtctatatatttcaactgactggcaacattatgctgatgaaattaaagctaatttaaatcatccttctcttaaaaaaagaaactcttcaagggagtctagagcatcaacaaaatttgaagataggggcataaaagaaggaagaaaaatttatagatttgattatataaagactaaaccatag

SEQ ID NO: 227233 - DNA, 680 bp, Unknown
  Bacterial polypeptide expressing nucleotide sequence isolated from the Sargasso Sea
taaagataacaaaggccgccctgtaagaagttacgtcattcgatctgggagaattacaatctcccaacgtcaagcaattgggcgattgtggaatgatcatgtaattcctttttcgggtggcttattagatttgggggagatttttcaaaattccttgccaattacagttgagattggttttggtatggggtcatctctaatcgatatggcctgtaaaagacctgacactaattttcttggcatcgaggtgcataaaccaggtataggtaaagtattaaagtgcattgaaaaactggggatcgaaaatctaaaactaatttgtcatgatgcggccgaagttttcaataacgcttttgaagatgaaacgcttgatcgggtgttagtacttttccccgacccgtggccaaaaaaaagacacgcaaagcgtcgcatcatccaacctgaatttgtaagtaaagtatctgaaaaacttaaaaataatggttgtattcatctcgcaactgactggtcaccatatgctgaacacatgattgaagtcctcgataaaattccctctttatcaaacgcgatagcaccaaaagtattttgggagaacccagagcgcccagagacaaagtttgaaaagcgcggtaaaaaactaggacatagaatttgggatctactctatcaaaaagaatgag

SEQ ID NO: 227234 - DNA, 646 bp, Unknown
  Bacterial polypeptide expressing nucleotide sequence isolated from the Sargasso Sea
ttgagatataactttttaccaagctttgccagaagaaagggaaggattacaaagcttcaggaaaaaaacctaagtttcctagcagattattcattggatgatcctaataccttaaataataattcatcgttcaataagattgcgcttgaaataggttttggtaacggtgaagactttttttcttttgcgaaagaaaaaaacaatacattatttttggcttccgaagtttataaatctgggattgggaatttaataggaaaaattagagagcattcactggaaaatatatatatccatgaaggggatataagagatcttgtttttgaagaaaaaggttttaagtttgatgaagtttatatcatttgtcctgatccatggccaaaagatagacatcacaaaagaagacttttaaataaagatttctttgaacgcattcagtcatgcttgaaaccaaattcatttatttttatttctactgactggaaaaactattctgaacagattaaaaatgtattaagaggttttgaagataagttctctattgagactgtaaagcaaatacctgggagagagctttctaagtttcaaaaaaaaggaatcaaggaaggacgagagatatataacttcaaattaagtctaatttaat

SEQ ID NO: 227235 - DNA, 676 bp, Unknown
  Bacterial polypeptide expressing nucleotide sequence isolated from the Sargasso Sea
aatgaattactctgatgattttaaatttaaaaattattttagttcaagaaatagatcattaactaaagatcagaagtcaatccttgatttttatcaagagaagatatctttagaatcattttctaaacttgatcaaataaacgaatataaaaatatatccctagaaattggatttggggtaggtgatattcttcttcataatgctttaaattttcctaataatttatttgtaggaattgaatattataaaaaaggaatagctcagctgctattaaatattgaaaaacataatttaaaaaacgtaaggcttttttatggagatgccctcgattatctaaagctagctaagacaaattatttagatgaaattttaattatgtttcctgacccttggccaaaaagaagacattggaaaagacgcattattaataaagatagtgtaaatgaaatatcaagaatacttagatcaaatggaagagccctattttttactgataataagggtatagcttattggggcttaagacattttatattaaatgcagattttaattgggaaattgatatgcctattaattgtagaaataaaattagcacatatcctgtttctcgatatgagcaaaaagcacttaaaaataatacaaatccgttttattttcagtttattaagcaataa

SEQ ID NO: 227236 - DNA, 646 bp, Unknown
  Bacterial polypeptide expressing nucleotide sequence isolated from the Sargasso Sea
gttgagatataactttttaccaagctttgccagaagaaaaggaagaattacaaagcttcaggaaaaaaacctaagtttcttagcaaattattcgttggatgatcctaatatcttaaataatgatccatcattcgataagattgcgcttgaaattggctttggtaacggagaggattttttctcctttgcgaaagaaaaaaatagtacattatttctagcttccgaagtttataaatctggtattggtaatttaataggaaaaattagagagcactcactggaaaatatatatattcatgaaggtgatataagagatcttatttttgaagaaaaagattttaaatttgatgaagtttatatcatatgccctgatccgtggccaaaagatagacatcacaaaagaagacttttaaataaagatttctttgaacgcattcagtcgtgcttgaaaccaaattcatttatttttctttctacagactggaaaaactattctgaacagattcaagatgtattaaggggctttgaggataagttttttattgagactttagagcaaatacccgggagagagctttctaagtttcaaaaaaaaggaatcaaggaagggcgagagatatataacttcaaattaagtcttatttaa

SEQ ID NO: 227237 - DNA, 655 bp, Unknown
  Bacterial polypeptide expressing nucleotide sequence isolated from the Sargasso Sea
atgcgtttaaaatttcttccttcttttgttaaaagaaggggtcgaataacaaaaaagcaagaacattcacttcaaaaattagataaatactcaataaaaactctaagtgaaatcattagcctttctgaagattacaattattgtgtactagaaataggatttggaaactcagaatatttacaaagagaggcattggagaatccaagcactcttttcataggctcagaggtctatttgtcaggtattgggactttaattggagcaattgaagaaaataaaatgaacaacgtcagaatttttcctgaagacgcacgaattttattagatcagggagatgaaaatatttttgatgaggtagtaatattgtgtccagatccatggccaaaagatcgccatcacaaaagaagattattacaatcagaatttattgagatgttacttaagattttaaaatggaatgggaggctatatatttcaactgattgggaacattatgctaatgaaattaaaattaacttaaatcatccctttttaaaacaaagaaattcttcaagggaatctagggtttcaacaaaatttgaaaataggggtataaaagagggtagaaaagtttataaatttgattatataaaaactaaatcacagtcgaattaaa

SEQ ID NO: 227238 - DNA, 640 bp, Unknown
  Bacterial polypeptide expressing nucleotide sequence isolated from the Sargasso Sea
aatgcagcttaagtatctaccatcctttgtgaaaaggaggggtcgcatcactaaaaggcagtcaaaagctctagagcaacttgataattttttggtaactgatgttgatgatatatctgaagcattaaaaaattattcttcttgtcatcttgaaatcggttttggaaacgcaaaacatttgtgcaaagaagctaaattaaacaaagatactctttatataggcagtgaagtttatttatcaggcatcggctcattgttagcaagcattatcgaggagggaattcaaaatattagaatctatgatcaagacattaggttattgttggacaataaaccaaaagaggtatttgataaagttgtaataatttgtcctgatccatggccgaaggagaaacatcataagcgtagattaataaatgatgaatttctttctattgttaagcgaacgatgaaaaatgattccgagatatatatttctacagattgggagaattatgctgaaagtatttttgattcttttgatcgatcagattttgtgaccaaagaaaatctaaaaaagaaaaatgatttctcaaagtttgaagaaagaggtatcaaagagggaagaagaatccacgaattcaactacattaaaaaataa

SEQ ID NO: 227239 - DNA, 472 bp, Unknown
  Bacterial polypeptide expressing nucleotide sequence isolated from the Sargasso Sea
ttgagatataactttttaccaagctttgccagaagaaaaggaaggattacaaagcttcaggaaacaaacctaagtttcttagcagattattcgttggatgatcctagcactttaaataatgatctatcgttcgataagattgcccttgaaataggttttggtaacggggaagactttttttcctttgcgaaagaaaaaaccaatacattatttttggcttccgaagtttataaatctgggattggaaatttaattggaaaaattagagagcactcactggaaaatatatatattcatgaaggagatataagagatcttatttttgaagaaaaaggttttaaatttgatgaagtttatatcatatgccccgatccatggccaaaagataggcatcacaaaagaagacttttaaataaagatttctttgaacgcattcagccatgcttgaaaccaaattcatttatttttcttt

SEQ ID NO: 227240 - DNA, 676 bp, Unknown
  Bacterial polypeptide expressing nucleotide sequence isolated from the Sargasso Sea
aatgaattactctgatgattttaaatttaaaaattattttagttcaagaaatagatcattaactaaagatcagaagtcaatccttgatttttatcaagagaagatctctttagaatcattttctaaacttgatcaaataaacgaatataaaaatatatccctagaaattggatttggagtaggtgatattcttcttcataatgctttaaattttcctaataatttatttgtaggaattgaatattataaaaaaggaatagctcagctgctattaaatatggaaaaaaataacttaaaaaacataaggcttttttatggagatgccctcgattatctaaagctagctaagacaaattatttagatgaaattttgattatgtttccagacccttggccaaaaagaagacattggaaaagacgcattattaataaagatagtgtgagtgaaatatcaagaatacttagatcaaatggaagagccctattttttactgataataagggtatagcttattggggcttaagacattttatattaaatgcagattttaattgggaaattgatatgcctattaattgtagaaataaaattagcacatatcctgtttctcggtatgagcaaaaagcacttaaaaataatacaaatccgttttattttcagttcattaagcaataa

SEQ ID NO: 227241 - DNA, 619 bp, Unknown
  Bacterial polypeptide expressing nucleotide sequence isolated from the Sargasso Sea
aatgattaagacttttagctcaagagcaggaagactatcagacactaataagaaattcttacaattaaagtctaaatcaatactaaagattggagaaaaacccaaaactacaaaaccaattgttatggatattggttttggagatgcacaatcttttgtttgtgatgtggttgagaataagaattatgtttttattggaattgaaccatacaaaaaaggttttgctagagccgtacaattttatgaagagaatgtgcctaaaaatatgtttttattcaatggagacgcaagagaattctttgaagaaacaaaatacaaaatagattttataagaatccattttcctgatccttggccaaaaaaaagacatgccaaaagaagattaataacaaaagattttttattaacctcatacgaccttttaaaaaaaggtggaagtattgagataatcactgactcttcaatatatcaacgacatttagaagaacttattagcgatcaaagctatttcaaaaaaattaaagactttcctattacatgtcagatttcaacatttcataaaaaagctatagaaaaaggccatactgtaaagaaatatgtcttaaaaaagactagctga

SEQ ID NO: 227242 - DNA, 595 bp, Unknown
  Bacterial polypeptide expressing nucleotide sequence isolated from the Sargasso Sea
atgaaattaaaaattaaagaactatctaagtacctaataaattatacatcaataaaattttctgattctctaaaaaattataatgtgatactagatattgggtgcggtgaaggtgagtttatatctagacttgcctatcaataccctaagaagaaattcatagggatagaaattaaatatggaaggatattaaaatccctaaaaaaagctagagctttaaatctttcaaatttaggatttgtgatttcagatgcaacaatttttatagataaagctcttcctgataaatctataaataaaatctttataaataatcctgatccctggcccaaagacaagcatcataaaaacagattgcttaatagtgattttattcggatgcttcatagaaaattaaaaagaaaaggtaacgtatacataaaaaccgatgatatcgattattttaaatatataaaagttaatgtaaaaaattctaatttcaccaaagatgataataaaagctatattgacttatttctcccttcaacaaaatttcaagaattttacgagaagaataataagccaatatactccatgaagcttttaaagaaatagt

SEQ ID NO: 227243 - DNA, 649 bp, Unknown
  Bacterial polypeptide expressing nucleotide sequence isolated from the Sargasso Sea
aatgcaattaaagtttcttccttcgtttgtaaaaagaaaaggccgaataactaaaaagcagacccacagtttgagttctttatcagaattttctgtaaaaagtattcaggaagtagaagatttcagcaaacactttgataaatgctatttagaaattggctttggtaatgctgaaaatattatttttcaagcaataaataatcctagctatttatttataggttctgaggtctatatgtcaggcataggaactttggtttcgagcataaaagaaaacaatatcaataacataaaaattttttcagacgatattaggctgcttttagatcaaagcccaaaaaaaatatttgattcagtgattattatttgtcccgatccttggccaaaagaaaaacatcacaaaagaagactaataaataagtcttttttagaaacggtccatgattttatgaaggacgattcaaatatatacatatctacagattgggaaaactatgcagaaagcatttctgaattatttgtaaaaaataaattatttaagccatcttcaaacaaatcttttcaaaaagactctctttcaaagtttgaaagaagagggaaagatgagggcagagagttatttgaatttaattataaaaaagtatcataa

SEQ ID NO: 227244 - DNA, 625 bp, Unknown
  Bacterial polypeptide expressing nucleotide sequence isolated from the Sargasso Sea
ttgaagaataattcatcccaagaaaagcctaaattctataatgggcatcgtaatcgaaaaaatcatgaagagctaaaaattagcaatgaagatttcaatcaaaaacttaacaatcaaaaccagataaacatactcgatattggtttcggaagtggcgaaagtatagtctcacaggattttgaacaatgtaatatttttggcatagagtcttacttgagaggcatagtaaagatgaataagtataagaatcagatgaatataaaaaatctatttttgtttcatggcgatgcagtagaaataattgaaaatgttattccaaaaaaatctatcaatgtaataaatattttttttcctgatccttggcctaaaaagaagcaccataaaagaaggcttatatctcactacacaatcgggttgttcagaaaaattttaagaaaaaatggttttattcattttgctagcgatcacattgattactcttatcagacaaaatatatatttgaaaatattctcaacaaaaagttatttttttctaactttagacaaaagagacctattactaaatatgaacaaaaagctatcgataaaaaaagatttatttttgatctactgattgaattctaat

SEQ ID NO: 227245 - DNA, 676 bp, Unknown
  Bacterial polypeptide expressing nucleotide sequence isolated from the Sargasso Sea
ttgtacaatcatgatttaaatgacagccctatatttcatggaagaagaaaaggtagaaaactatcaaaatctaatcaatcagcattaaaaattggcagtagatatataattaataaagaagattttgaagctgtgtttctttgtaaaaaaaacgtaattcttgagattggttttggagatggagaaaatttaatcaattctgccaaacaaaattcaaactttgtctatattggagcggatccttttgtaaatacaactgcacaatgtctcagtaaactattattccataaccttaaaaatgttttaatttggcctgatgatgtaagaaaaattttaaatctattcccatataatagtatttcagaaattaaaatattatttccagatccttggccaaaaaagaaacattataaccgaagattaatacaaaatgaatttatagaaataatacaccaaattttaaaaccaaaagggactataactatttccacagatcatgacatgttaaaaaattggatattagaaaaatttcaaaattatagaaaatttgaatggatagtacaaagttcaaaagattggcgtttaagaccaccagattgttttcaaacgaaatatgagctaaaatcaattgctaataaaagaaaaccaagttggtttatctttcaaaaacaataaa

SEQ ID NO: 227246 - DNA, 479 bp, Unknown
  Bacterial polypeptide expressing nucleotide sequence isolated from the Sargasso Sea
aagcgcaataagttatcctgataatttattcataggcattgaatattataaaaaaggaatagctcaacttcttttaaatattgaaaaacataaattaaaaaatatcagacttttttatggtgatgcttttgattatttgaagttattaaaaacaaactttttagatgaagtattaattatgttcccagacccttggccaaaaaaaagacattggaaaagaaggattatcaataatgcaagtgtaagtgaaatttcaagatcacttaaatcaaatggaagagtcttattttataccgatgataaaagtattgcattttgggggcttagacattttattcttgatagagattttatatgggctattgataaacctctagattgtaaaaatagaatgtcatcaaattatgtaacaaagtatgaacttaaagctcttaaaaataatattcagccatattatttcgattttgttaaacaatagt

SEQ ID NO: 227247 - DNA, 697 bp, Unknown
  Bacterial polypeptide expressing nucleotide sequence isolated from the Sargasso Sea
attgaaaaacaaatatcctaagtattattcctttcaaggaagaaaaatatccaaaaaaatttctttacctaaaaaaaacttgataaataagttttatgataatttttctttcgatcaggatgttatcgaatgtctcaacaacgataaaataaatagaaaaatagatatacctgatcgttatgacataaccaatattgaaattggttttggaaatggcgagtttttgattaaaaatgcaatttctagaccaaatgaattatttataggtgtcgaagtttatttaaatggtattgcaaaagttcttgagtcaattttagattttgggttaaaaaacataatgttaagcaatttaaatagtttttattttttagaagcaatgccacataaatccattgacaaaatttttcttattaaccccgatccttgggtaaagaaaagacatcataaaagaagattaatgtcttacgaaatattaagtcttttaaataaaataacaaaatcaaaaaattcaatatatatgactactgactcttcagattatctgagggacactgtaagtctcttaaatgaatataaagatagttttgggacatttagttcatctatacttaaaaaaaacgatgaattatatggaatctcaaaatatcagagaaaagcaatagaaaatgggggtaaaatccatctgttaactctgtga

SEQ ID NO: 227248 - DNA, 655 bp, Unknown
  Bacterial polypeptide expressing nucleotide sequence isolated from the Sargasso Sea
atgcgtttaaagtttcttccttcttttgtaaaaagaaggggccgaataacaaaaaagcaagagcattcacttcgtaaattagataattactctatcaaaaatttaagtgagatcattagtctttctagagcatatgaatgctgtacacttgaaataggatttggaaactcagaatatttgcaaagacaggctatggagaatccaagcactcttttcataggctcagaggtttatttatccggcattggaactttaataggcgcaattgaagaaaaaaaattgagcaatgtcagaattttttctgacgatgcaagaattttactggatcaagggagtgaaagtatttttgatgaggtagtaatattatgtcctgatccatggccaaaagatcgtcatcacaaaagaagattattaaaaccagaatttattgagatgttacttaagactctaaaatggaatgggcgtctatatatttcaactgattgggaacattatgctgatgaaattaaagtcaatttaaatcatccctctcttaaaaaaagaaattctttaaaggagtctagagcatcaacaaaatttgaaaatagaggcataaaagagggaagaaaagtttatatatttgattatataaaaactaaaccacagtcgaattaaa

SEQ ID NO: 227249 - DNA, 733 bp, Unknown
  Bacterial polypeptide expressing nucleotide sequence isolated from the Sargasso Sea
catgggaaagcacagatctcgtagaccttttgaagggcttggtttaaattcatccgggttttacggaagaagaaaagggcataggttaagtgcccgcaaggaatccctgttaagggaagtttttccaaaaatacgtgtagatttagatgccacaaatatacttttagaccctcaattgttattcgattttagacctaaggaagtatggctggagataggatttggtggtggagagcacattgcttatcaatcccaagcaaacccagacatcggcattataggtgtagaaccatttttaaatggattggtttcattagttgacgaaattcagaacaaaaacataaaaaatattaggatatttgacaaagaaatttcaatactcttggagagacttaagcctaatagtctaagcaaggtgtttttgctttttccagatccatggcctaagaaaaaacatttgaagaggagaattttaaatcctaattttttgaatattttgaataagttaatgttggagggcggggaatttcgtttttcctcagatgatgccagttattcaaggctagttgtcgagttagcaagcctaagtgaggatttttcttggtgtccaataagctgcagagactggcagttcagaccagaacgctcaatagaaacacgttatgaaagaaaagctatacaacaaggtagaaaaaacacttatataagcttaataaaaacaagcactctgtag

SEQ ID NO: 227250 - DNA, 560 bp, Unknown
  Bacterial polypeptide expressing nucleotide sequence isolated from the Sargasso Sea
gttgagatataactttttaccaagctttgccagaagaaaaggaaggattacaaagcttcaggaaaaaaacttaagtttcctagcagattattcattggatgatcctaataccttaaataataattcatcgttcgataagattgcgcttgaaattggttttggtaacggtgaagactttttttcttttgcgaaagaaaaaaacaatacattatttttggcttccgaagtttataaatctgggattggaaatttaataggaaaaattagagagcattcactggaaaatatatatatccatgaaggggatataagagatcttatttttgaagaaaaaggttttaaatttgatgaagtttatatcatttgtcctgatccatggccaaaagatagacatcataaaagaagacttttaaataaagatttctttgaacgcattcagccatgcttgaaaccaaattcatttatttttctttctactgactggaaaaactattctgaaaagattaaagatgtattaagaggttttgaagataagttctctattgagactgtaaacaaat

SEQ ID NO: 227251 - DNA, 721 bp, Unknown
  Bacterial polypeptide expressing nucleotide sequence isolated from the Sargasso Sea
gcaagacaccaataccgcagaaagcgccgaaagcggtgcggaaaccggccacccgcgtcgcatccgctcgttcgtgcgccgcgccggccgcacgtctaccggccagcagcgcgctatcgatgaactcggcccgcgcttcctgctgccttacgctgccgagcccttggattgggacgccgccttcggccgcgccggcgccaagcgcatcttcgagatcggctttggcatgggcgagaccaccgcgcacatcgcgcaattgcgcccggacgatgattttctcggtgtggaagtgcatgagcctggcgttggtgcgttgctcaagctgatcggcgaacgcgagatcggcaacatccgcatcgtttcccatgatgcagtcgaagtgctggcgcagatgattccggaaggcacgctcgatggcattcacgtgttcttccccgacccgtggcacaagaagcgccacaacaagcggcgcctgatccagagcccgttcgttgcacgcctggccgcgcacctcaagcccggcggctacctccattgcgcgacggactgggaggaatacgcccaccagatgctcgaagtgctgtccgccgaaccgacgctggaaaacaccgccgacggcttcgcgccgcgccccgactatcggcccgtcacgaagttcgagaagcgcggcctgcgcctcgggcacggcgtgtgggacgtggtcttccgcaagcgggcctga

SEQ ID NO: 227252 - DNA, 124 bp, Unknown
  Bacterial polypeptide expressing nucleotide sequence isolated from the Sargasso Sea
gatgcagtcgatgtgctgtcgcagtgtatggcgcccgcatccctcgatgccgtacatattttcttccccgatccttggcataaaaaacgacaccacaagcgtcgtttgattcaatcctttccag

SEQ ID NO: 227253 - DNA, 664 bp, Unknown
  Bacterial polypeptide expressing nucleotide sequence isolated from the Sargasso Sea
aatgaataaaaccaatatttataaaatttttggaaggcttaaaagtagaaaaaaacaatcaaaattaactgaatataatttaaaaaaattacaagttaatattgatattgacgttaatccaaagcattataatattttagatattgggtcaggtagtggtgaaaatgcaatcaatttgtctttattaaaccctaaagctaaaataatcacatgtgaattatttcaagatggcaatattaatttatctgattcaattattaaaaaaaaaatatcaaatataagattatttataggtaatgttttagagtttttagacataattgaaaataaaaaaatttttgatgagatatggattttgttcccagatccatggccaaaaaaaagacatcataaaagaagattaattaatgatgattttataaaaaaaattttttcttttcaaaaaaataatggtaaactttttatatctagtgatagtccaaactatatagagtcaattttttatacactttacaaaaataaaaatttatatttttggaaaaatcaaaaattccatgattggaattatgagtttctaagtctacctgaaacaaagtattttaaaaaagctaagaaattaaataaaaaatcaatttttttagagttaaaaaaaattaatccttga

SEQ ID NO: 227254 - DNA, 517 bp, Unknown
  Bacterial polypeptide expressing nucleotide sequence isolated from the Sargasso Sea
tatgaaagatggtttagcagtcaaaaaatcaataaaaagttatgtaaaacgagagagacgacttacaaaatcacaactatatggtttagataattattggattaaatatggtatcgagttcagtcctaaaataattaattttgaagaaatcttcgaaagttacaaacctttaattttagatattggttttgggtcaggcgaatcaacaattaatcatgcaatatctcatccagaaaataattatttagcagtcgaagtacaccgacctggaataggtcgtctattaaataaaatagaagaaaatacattaactaatataaaaattattaaacatgatgttatagatatactcaaagaacaaataccagattgttcgctaactcaaatttttatttttttccctgacccatggccaaaaaaaagacaccataaacgtcgtctgattaacaaagaattaataaaactgataaaaaagaaactcgtcttacatgggcgtttacatattgcgactgactgg

SEQ ID NO: 227255 - DNA, 718 bp, Unknown
  Bacterial polypeptide expressing nucleotide sequence isolated from the Sargasso Sea
catgaccgatacccaacagcccgaactgaccgaagacggtcgccagcgccgtaccatcaagagcttcgtgatgcgcgccgggcgcatgaccgaaggccagcagcgcggcctggacaagggctggccgctgttcggcctggaactggaagatggcctgcgcgacttcgaccaggtgttcggtcgcagcgcgccgcgcaccttcgagatcggcttcggtatgggccactccaccctggagatggccgctgccgcgcccgagcaggatttcattggcgtcgaggtacataaacccggcgtcggtgcgttgctgagcggcgcgatgatgcagaatctgcacaacattcgcgtgtacagctgcgatgcgctggaagtactgcgcgactgcgtcgccgatgccagcctcgatcgcgtgctgctgttcttccccgacccctggcacaagtcgcggcaccacaagcgccgcatcgtccagccggctttcgccgagctggtgcgcagcaagctgaaggtcggtggcgtactgcacatggccaccgactgggagaactacgccgagcacatgctcgaagtgatgaatgcagcgccgggctatcgcaacctggcggccgatggcacctacgtgccgcgtcccgaggagcgcccggtgaccaagttcgaacgtcgtggcgagcgtctcggccatggcgtgtgggatctgaagttccagcgtcaggaatga

SEQ ID NO: 227256 - DNA, 715 bp, Unknown
  Bacterial polypeptide expressing nucleotide sequence isolated from the Sargasso Sea
tatgtctgtgacccaagatgtgtttaacgaagacggcaagttcatgcgcaagatccgcagcttcgtccgtcgcgaaggccgcctgaccaaagggcaggagaaggccctggaagagctctggccggtcatgggcatcgatttcgcaccagagccgctcgacatggtggccctgtttggccgcgaggcacccgtggtgctggagatcgggttcggcatgggcgcctccctggtggagatggccaagaacgcccccgagaagaacttcatcggcatcgaggtgcactctcctggtgtaggcgcctgccttggcaccgcccaggaggcgggcgtcaccaacctgcgcgtcatctgccacgatgcggtggaagtgttggagcacatgatcccgaacggttctctctcctgcctgcagctcttcttcccggacccctggcacaagagccgccaccacaagcgccgcatcgtgcagcctgcctttgcccaggatatccgccagaagcttgccatcggtggcgtcttccacatggccaccgactgggagaactacgccgagcacatgctggaggtgatgagtgccgccgaggggtacgagaatacctccgccaccggcaactgggtgccccgtcccgactggcgccccctgaccaaattcgagcagcgtggccatcgtctgggccacggtgtctgggatctgattttcaaacgagtcaactga

SEQ ID NO: 227257 - DNA, 721 bp, Unknown
  Bacterial polypeptide expressing nucleotide sequence isolated from the Sargasso Sea
aatgaggcaattcaaaagtcaggcggaagcagaagccgctggagtatacgtaagcaaggtaaaaagcttcgtgaaacgcgaaggtagacttactaaagcacaagaaaaagcgctagaagatcactggccaaccaagggcattgactacgctgaagcaccgttatcgctgtcagaaatttttggccgaagcgcacctgtcgttgtagaaataggcttcggtatgggcaagtcactggttgaaatggccgcgaatgcccctgagaaagactttatcggcattgaagttcaccgtcctggcgttggcgcatgtttagctgaagcaagcgaacaaggcgttgaaaacctgcgtgtaatggaccatgatgcggtagaagtccttaaaaatatgatcccagacggttcactgtctcgcctacagctgtttttcccagacccttggcacaaaaagcgtcaccacaaacgccgtattgttcaacctgaatttgttgagctggttcgcaccaaattagctattggcggttgttttcatatggcgacggattgggagcaatatgctgagcacatgttagacgttatgatcaatgccgacggttacaccaatactgcaactaacggcgactatgtacctcgtccagactaccgcccaattaccaagtttgaaacccgtggccaaaaactaggtcatggcgtttgggatctaattttcgagcgtactaagtaa

SEQ ID NO: 227258 - DNA, 631 bp, Unknown
  Bacterial polypeptide expressing nucleotide sequence isolated from the Sargasso Sea
actaaagcacaagaaaaagcgctagaagattactggccaaccaagggcattgactacgctgaagcaccgttatcgctgtcagaaatttttggccgaagtgcgcctgttgttgtagaaattggctttggtatgggcaagtcattggttgaaatggccgcaaatgcacctgagaaagactttatcggcattgaagttcaccgtccaggcgttggcgcatgcttagctgaagcgagtgaacaaggcgtcgagaacttgcgtgtaatggaccatgatgcggtagaagtgcttaaaaatatgatcccagacggttcgttgtctcgcctacagctatttttcccagacccttggcacaagaagcgtcaccacaaacgccgtattgttcagcctgaatttgttgagctggttcgcaccaaattagctattggcggttgttttcatatggcgacggattgggagcaatatgctgagcacatgttagacgttatgatcaatgccgacggttacaccaatactgcaactgacggcgactatgtacctcgtccagactaccgcccaattaccaagtttgaaacccgtggccaaaaattaggtcatggcgtttgggatctaattttcgagcgtactaagtaat

SEQ ID NO: 227259 - DNA, 477 bp, Unknown
  Bacterial polypeptide expressing nucleotide sequence isolated from the Sargasso Sea
gatgagcgaccacacaaagcgaaaacgcaccgtccgcagtttcgttcgccgggccggacgcatgacggcatcgcaacaacgcgcgctcgagttagtctggcccgactacggcgtcgaagccgatggcagcctgctcgacctcggtgccttgtttggccgtgaggccgattgcatattcgagatcggattcggtaacggggacacgctggtgcagtcagcggcggaaaatcctgaaaagaattacatcggcgtcgaggttcatgaaccgggcattggtcactgcttgatcatggcacgcgaacacaaggtaacgaacctgcgtgtgatggagggcgacgcaatggaaatcctgagagaccgggttaccgaggcgtcccttgcacgcattaacctgtacttccccgacccctggcccaagaaacgccatcacaagcgacgcattgtgcaggcgccatttctcgaactggctgcgagccg

SEQ ID NO: 227260 - DNA, 495 bp, Unknown
  Bacterial polypeptide expressing nucleotide sequence isolated from the Sargasso Sea
gctttggccatggtgagcatttgctttatttatcaaaaaaattacaaaaaaaaataattattggaattgatccctttcaaaatggattagccaaagtagcaaaatattgcatccaaaataatattaaaaatttatacatatttccttatgtttttgaaaaatttcataaaaaatatcaaaattacatttacgatgacctgtacattctatttccagatccatggcctaaaaaaagacatcacaaaagacgtttattcgatgaaaattttatgagattaatatcaaaaaaaggaagaaaaaatagtaaaatcttttttaaaacggataattataattattacgatcaagtttataatattgctaatgaatttaaaaaaagagaattaattagagatttctataataatcttaatacaaaaattaaaacaaaatatcatcaaaaggcaatcaaaaatgagagcaaaatttattcattgataattgaaaatatttaaa

SEQ ID NO: 227261 - DNA, 598 bp, Unknown
  Bacterial polypeptide expressing nucleotide sequence isolated from the Sargasso Sea
tttggacattgatgaaagaccagattggcaggctcagtttggaaatacgaatcccctcaagctagaaattggatttgggatgggtaactttttgattgaaatggcagcaaaagaacctggcagtaattttattgggatagatttttatcataagggcataagaaaaataatgacccggataaaaaaccttcaattggaaaacgtacgaatcgtttatggagatatcagaagtaagatttctatcctttgtcaagatggggaattagaaactgcttacataaattttccggatccttggccaaaaaagaggcatatcaaaaggagactaatcaaaccggagtttattaatcagttagcgcaaaagttagatttggaaggcagcgtctacctggccactgatagcgaaagctatgcacatgaaatgttggactattttaactctgaaacattatttcaaaacctggatgacaaccaaggttttattaaagagcgtattgatttacctaagtctaaatacgaaaaaaattttatcaatgcaggtgagaaagtattttaccttgagtacctgcgattagcagaaatgacctctatcgcctga

SEQ ID NO: 227262 - DNA, 385 bp, Unknown
  Bacterial polypeptide expressing nucleotide sequence isolated from the Sargasso Sea
atagaacaaagaaaagtaaataatcttaagctcataagcggtgatgcagttgaagttatgaagtttggaattccggacaactccataaatcagatcaatttgttttttccagatccatggccaaaaaaaaggcatcacaaaagaaggattattaataatgagtttattctgctcatgtctaagaaactagcagaaaatggaatagtaaatatctctacagactgggaagattatgcagatcagataggtgatcttttttcaaagaggggagagtttttagaaaagttatctacactaagaaatgtaagcacaaaatttgagaaaagaggcatttccttaggccatgatatttttaacttttgctataagctaatctctcaatgat

SEQ ID NO: 227263 - DNA, 601 bp, Unknown
  Bacterial polypeptide expressing nucleotide sequence isolated from the Sargasso Sea
atgacccacccggaacaaccaaacacagagcctcaaaacgaagagcttcaggaaaacaaatacctgcgccgtattcgtagctttgttttaagggaaggtcgtctgaccaaaggccagcagcgcagcttagatttattctggcctactatgggcctggaataccaaaccacaccttacgatatgcaagctgtattcggccgcgaagctgacttagtgctggaaattggttttggtatgggcaaatctttggtgcaaatggccaaagctgcgcctgaaaaagactttattggcatcgaagtacataaacctggtgttggcgcatgtttaggtgaagccgaaactgaaggcgttaaaaacctgcgggtgtttgagcacgatgccatcgaaattttaaacgactccattgcagacaacagcttaagcactgtgcagctgtttttccctgatccatggcataaaaagcgtcaccataaaagacgtatagtacaggccgagtttgcccagttattacgccgtaagttaaagatcggtggtgtatttcatatggctaccgactgggaaaactacgctgaacatatgctggaagtgatgaaagtagccg

SEQ ID NO: 227264 - DNA, 487 bp, Unknown
  Bacterial polypeptide expressing nucleotide sequence isolated from the Sargasso Sea
attggataaattaaatgatttcaattttaagtcattagaaataggttttggtacaggtgaaaaacttttacaaagcgcaataagttatcctgataatttattcataggcattgaatattataaaaaaggaatagctcaacttcttttaaatattgaaaaacataaattaaaaaatatcagacttttttatggcgatgcttttgattatttgaagttattaaaaacaaactttttagatgaagtattaattatgttcccagatccctggcccaaaaaaagacattggaaaagaaggataataaataattctagtgtaagtgaaatttcaagatcacttaaatcaaatggaagagttttattttataccgatgataaaagcattgcattttgggggcttagacattttattcttaatagaaattttatatgggctgttgataagcctatagattgtaaaaatagaaattcatcaaatcatataacaaag

SEQ ID NO: 227265 - DNA, 550 bp, Unknown
  Bacterial polypeptide expressing nucleotide sequence isolated from the Sargasso Sea
ttggagaaattaaatgatttcaatcttaagtcattagaaataggttttggtactggtgaaaaaattttacgaaacgcaataaattatcctgataatttattcataggcattgaatattataaaaaaggaattgctcaacttcttttaaatattgaaaaatataaattaaaaaatatcagacttttttatggtgatgcttttgattatttgaagttattaaaaacaaactttttagatgaagtattaattatgttcccagatccttggccaaaaaaaagacattggaaaagaaggattatcaataattctagtgtaagtgaaatttcaagatcacttaaatcaaatggaagagttttattttataccgatgataaaggtattgcattttggggacttagacattttatttttaatagtaattttatatgggctattgataaacctctagattgtaaaaatagaaattcatcaaattatataacaaagtatgagcacaaagctctaaaaaaaaatattcagccttattattttaattttgttaaaaaatagt

SEQ ID NO: 227266 - DNA, 664 bp, Unknown
  Bacterial polypeptide expressing nucleotide sequence isolated from the Sargasso Sea
cttgtctgccaagtccctatttacaagctttagaggtcgaataacttccgcacagaagtctgcaatagagcgctacggacaccaatattttattactgacttggctaagcatgttgacttggcgcgcacggcatctaggcaaaaactgaagatagagattgggtttggaatgggggtagagctcacgcgttgggcaatagaatcgccggatgcgttggttgtggggattgaactctataggccaggtataggatcgcttttctcgaaactcgttaacgaaggcatagagaacgttagggtcatcgaggctcctgctcaaatcgcaattgctgaactacccaataattccgttgacgagattcgaatcttattccccgatccctggccaaaaaaacggcaccataagagacggctaattcagaaggaatttatttgccaagtcgagagggtattgataaagggcgggcgcttgcagatagctacagactggaaaccttatgctgattggattctttcctgttttgaagaaaatactggttttgtgaaaattgtggaaaaggctgcgctggctcaaattgaaagagatcgacctacaaaattcgagagtagaggcattaacctcaaacataaggtttttgattttgcctatgaaagaatctcttga

SEQ ID NO: 227267 - DNA, 736 bp, Unknown
  Bacterial polypeptide expressing nucleotide sequence isolated from the Sargasso Sea
atgacccacccggaacaaccaaacacagagccacaggacgatgagcttcaggaaaacaaatacctgcgccgtatccgtagctttgttttaagggaaggtcgtctgaccaaaggccagcagcgcagtttagatttattctggccaactatgggtcttgaacaccaggccacgccttacgatatgacagccgtgtttggccgtgaagccgacttagtgctggaaattggttttggtatgggcaaatctttagtacaaatggctaaagccgcgccggataaagactttattggtatcgaagtacataaaccaggtgtaggtgcttgtttaggtgaagccgaaactgaaggcgttaaaaacctgcgggtgtttgaacacgatgccatcgaaattttaaacgactctattgcagacaacagcttaagcacagtgcaactgtttttccctgatccatggcataaaaaacgtcaccataaaagacgtattgttcaggctgagtttgcccagttattacgccgtaaattaaaaatcggcggtgtatttcatatggcaactgactgggaaaactacgctgaacatatgctggaagtgatgaaagttgccgaaggttacagcaacctgtcagaaaccaatgactatgtgccacgccctgatcatagacctctgactaaattcgaaaaccgtggtgtcaatttaggccatggcgtttgggatttaatgttcaggaaggaaagttaat

SEQ ID NO: 227268 - DNA, 718 bp, Unknown
  Bacterial polypeptide expressing nucleotide sequence isolated from the Sargasso Sea
aatgagcgaagtcactaccgctgaatttaatgaagaaggcaagtatctgcgtaagatcagaagctttgtcctaagagaaggtcgtttgactaaaggtcaagcgcaagccattgagactcagtggccaacaatgggcttagattacagcccaacaccattaaacctgaccgaagtgtttggtcgcgaagccgatactgtactggaaattggtttcggtatgggcgcttctttagtacaaatggcacaagaagctcctgagcagaactttatcggtattgaagtccataagcctggcgttggttcatgcttaagtgacgctgctgccgctggggtgactaatcttcgcgtgtatcaccatgatgctatggaagtattagaacatgctatcgccgatggcagtcttgctcgcgtgcaattgttcttccccgatccttggcataaaaagcgtcaccacaagcgccgcatcgtgcaggcggaatttgctgagcttatccgccgcaaactgaagattggtggcgtgttccatatggcaaccgactgggaaaactacagcgaacatatgctggaagtgatgaatgcggccaatggttataaaaaccaatccgccgatggcaccgtggtaccgcgcccagatcatcgcccactgactaaatttgaagcccgcggtcatcgcctcggccatggcgtgtgggatctgatgtttgagcgtatcgcttaa

SEQ ID NO: 227269 - DNA, 583 bp, Unknown
  Bacterial polypeptide expressing nucleotide sequence isolated from the Sargasso Sea
tggagttgactatcagacgggggtaatgaattttaaaaaaatttttggaaggtatgctcctattattttagatataggagttgggaccggagattcaaccgttagtcacgcattagctcatcctgagaataattatttagctgtcgaagtacaccgtcctggattaggacaacttttgaaaaaaatagagtccctttcattaaaaaatataaagttaatcaatcatgatgttattgatgtattagaaactcaaatcccaaattattctctaagtcaggcatttattttttttcctgatccgtggccaaaaaagaggcatcataagcgtcgacttattaataaaaaaatatttaaattaatgaaaaataaacttgctgcttatggacgtttacatatcgcaacagactggaaagattatgcagattatataaatgagctgaacaatcataattctgaactaattaatctagcaggtaaaaataatttttctcccagaccaatatggcgaagcaaaactaagtacgagcgtcgtggcctaagtctatcgcataagatttatgacttttgttacggtttaccataa

SEQ ID NO: 227270 - DNA, 688 bp, Unknown
  Bacterial polypeptide expressing nucleotide sequence isolated from the Sargasso Sea
cttgatctccgtgaaaaactcctcaacccatagacctgttagaagctttgttcggcgtaaaggcaggataacctcctcgcaaaaatctgcattaaagaatcttctgccaaagtatggtgcagtgtattcatcagatatgggtcaactgtcgtcaagcctgcttggcaatcccgaatttcctttgatagttgatattggcttcggggatggagagttattagtggctactgcagaagaccatgctgaaagcaacttcattggaatagaggtctatgatgctggaataggtcactgcctaaaactcatagaacaaagaaaagtaaataatcttaagctcataagcggtgatgcagttgaagtcatgatgtttggaattgcagataactccataaatcagatcaatttgttttttccagatccatggccaaaaaaaaggcatcacaaaagaaggattattaataatgagtttattctgctcatgtctaagaaactagcagaaaatggaatggtaaatatctctacagactgggaagattacgcagatcagatagatgatcttttttcaaagaggggagagtttttagagaaatcatctactgcaagaaatgtaagcacaaaatttgagaaaagaggcatttccttaggtcatgatatttttaactttcgctataagctaatctctcaatga

SEQ ID NO: 227271 - DNA, 778 bp, Unknown
  Bacterial polypeptide expressing nucleotide sequence isolated from the Sargasso Sea
ctgtcaccgatgatgcacgacgatccgaacgaagccggcctgccgccgcacgacgacgccattcctgacgaagccgccgaaggcgccgacgcagtcaatccgctgcaccaccgccgcatccgcagcttcgtgacgcgcgccggccgcgtatcgaccggccagcgccgcgcaatggacgaactcggcccgcgcttcgtggtgccgtatgcgccggagttgcccgactggaacgcggtgttcggccgcagcgcaccgcgcatcctcgagatcggcttcgggatgggcgcatcgaccgcggaaatcgccgcgaaccgccccggcgacgacttcctcggcgtcgaggtgcacgaaccgggcgtcggcgcactgctgaagctgatcggcgagcaggatctgtcgaacatccggatcatccagcatgacgcggtcgaagtgctcgagcacatgctcgcgccggaaagcctcgacggcgtgcacatcttcttccccgatccgtggcacaaggcgcgccaccacaagcgccggctgatccagccgccgctcgtcgcgcatctcgcgtcgcgcctgaagcccggcgcgtacattcactgcgcgaccgactggcagaactacgcggaacagatgctcgaagtgctcggcgccgagccgacgctcgaaaacacggccgccgactacgcgccgcgccccgactatcgcccggtgacgaagttcgaacggcgcgggctgcggctcggccacggcgtgtgggacctggtgttccgcaagcgcgcaggctgag

SEQ ID NO: 227272 - DNA, 715 bp, Unknown
  Bacterial polypeptide expressing nucleotide sequence isolated from the Sargasso Sea
tatgccagtgacccaagatgtgtttaacgaagacggcaagttcatgcgcaagatccgcagctttgtccgtcgcgaaggccgcctgaccaaagggcaggagaaggccctggaagagctctggccggtcatgggtatcgatttcgcaccggagccgctcgatctggttgccctgtttggccgcgaggccccagtggtgctggaaatcggcttcggcatgggcgcctctctggtggagatggccaagaatgcccccgagaagaacttcatcggcatcgaagtgcactcgccgggtgtcggtgcctgcctcggtaccgcccaggaggcgggagtcaccaacctgcgtgtcatctgccacgacgcggtggaagtgctggagcacatgatcccgaacggctcgctcgcctgcctgcagctgttcttcccggatccctggcacaagagccgtcaccacaagcgccgcatcgtgcagccggcctttgcccaggacattcgccagaagctggccatcggtggcgtgttccacatggccaccgactgggaaaactacgccgagcacatgctggaagtgatgagtgctgccgaggggtatgagaacacctccgccaccggcaactgggtgccgcgtcccgactggcgcccgctgaccaaattcgaacaacgtggccaccgtctcggccacggggtgtgggatctgattttcaaacgtgtcaactaa

SEQ ID NO: 227273 - DNA, 592 bp, Unknown
  Bacterial polypeptide expressing nucleotide sequence isolated from the Sargasso Sea
attgcttaataacttaaatgaatttgattttaatattaaaaaagatttaaacaataaatcattcaatattctcgatattggttcaggaaacggagaaaatgctatttatttatcaaaacttttcccaaattctagaattataacttgtgaaatatttgaagacggtaatattaatttaattaataaaataaataaattacatattaataatattcgtttatttaaaggcaacgttttacagttattagatggattaaaaaaagatataatatttaatcaagtatggatattatttcctgacccatggccaaaaaaaagacaccataaaagacgtttaatcaataatgcttttttaaattatatacataaatttctcaaagactcagggagaattatgatagcaacagactcaagttcttatatgaaattaatatttaatttaatttatgagcttaaacataaatatgagtgggaaaatcaaaattttcaaacatggaactatgattttttagatttagctgaaactaaattttacaaaaaagccctaaattcaaatagaaaatcgacttttttttctctaaaaaagatttaa

SEQ ID NO: 227274 - DNA, 718 bp, Unknown
  Bacterial polypeptide expressing nucleotide sequence isolated from the Sargasso Sea
atgagcgaagtcactaccgctgaatttaatgaggaaggcaagtatctgcgtaagatcagaagctttgtcctaagagaagggcgtttgactaaaggtcaagcgcaagccattgagactcagtggccaacaatgggcttagattacagcccaacaccattggatttagccgaagtttttggccgcgaagctgacactgtactggagattggtttcggtatgggcgcttctttagtgcaaatggcgcaagaagcaccagagctgaactttatcggtattgaagtccataagcctggtgttggctcatgcttaagtgatgccgctgccgcgggcgtgaccaatcttcgtgtgtatcaccatgatgcgatggaagtattagaacatgcgattgccgatggcagcctgacgcgtgtgcagttgttcttccccgatccttggcataaaaagcgccaccacaaacgccgtatcgtacaagctgaatttgccgaattgatccgccgtaaactgaagattggcggcgtattccatatggcaaccgactgggaaaactacagcgaacatatgctggaagtgatgaatgtggcgagcggttacaagaatcaatctgccgatggtactgttgtaccgcgtccggatcatcgtccactcacgaaatttgaagcccgcggtcatcgccttggccatggcgtatgggatctgatgttcgagcgtatcgcttaat

SEQ ID NO: 227275 - DNA, 688 bp, Unknown
  Bacterial polypeptide expressing nucleotide sequence isolated from the Sargasso Sea
ttgatctccgtgaaaaactcctcaacccatagacctgttagaagctttgttcggcgtaaaggcaggataacctcctcgcaaaaatctgcattaaagaatcttctgccaaagtatggtgcagtgtattcatcagatatgggtcaactgtcgtcaagcctgcttggcaatcccgaatttcctttgatagttgatattggcttcggggatggagagttattagtggctactgcagaagaccatgctgaaagcaacttcattggaatagaggtctatgatgctggaataggtcactgcctaaaactcatagaacaaagaaaagtaaataatcttaagctcataagcggtgatgcagttgaagtcatgatgtttggaattccgaacaactccataaatcagatcaatttgttttttccagatccatggccaaaaaaaaggcatcacaaaagaaggattattaataatgagtttattctgctcatgtctaagaaactagcagaaaatggaatggtaaatatctctacagactgggaagattacgcagatcagatagatgatctttttgcaaagaggggagagtttttagagaaatcatctactgcaagaaatgtaagcacaaaatttgagaaaagaggcatttccttaggtcatgatatttttaactttcgctataagctaatctctcaatgat

SEQ ID NO: 227276 - DNA, 718 bp, Unknown; identical to SEQ ID NO: 227268
  Bacterial polypeptide expressing nucleotide sequence isolated from the Sargasso Sea

SEQ ID NO: 227277 - DNA, 661 bp, Unknown
  Bacterial polypeptide expressing nucleotide sequence isolated from the Sargasso Sea
cttgtctgccaaaaccctatatacgagctttagaggtcgaataacctccgcgcagaagtctgcaatagagcgctacggaaaccaatatttgatcactgacttggctaatcatgtcgacttggcgcgcacgacatctaggcaaaaactgaagatagagatcggttttggaatgggggtagagctcgcgcgttgggcaatagaatcgccggatgcgctggtgctgggtgttgaactctataggccaggtatagggtcgcttttctcgaaacttgttgacgaagggatagagaacgttagagtcatcgaggctcccgctcaaatcgcgattgctgaactacctaataattcggttgatgagattcgaatcttattccccgatccctggccaaaaaaaagacaccataaaagaaggctcattcagaaggaatttatctgccaagttgagagggtattgataaaaggcgggcgtttgcagatagctacagactggaaaccctacgctgattggattttttcctgcattgaaaaaaatactgggtttgtgcagattgtcgacaggaccgcgttggctcaaggtgaaagagatcgacctacaaaattcgaaagtagaggcatcaaccttaagcataaggtgtttgattttacctatgaaagaacctag

SEQ ID NO: 227278 - DNA, 649 bp, Unknown
  Bacterial polypeptide expressing nucleotide sequence isolated from the Sargasso Sea
aatgcgtcttgattttttaccttcttttgttaaaagaaaaggccgaataacaaaaaaccaagaagagaatcttaaatttttatctgatctttccataaaaaatttaaaacaaatacgagaggaagcatcaaatttctcttattgttgtttagagattggttttggcaatgcagagcatcttaagtttcaggcattaaaaaattcagacattttatttattggatcagaggtgtatatgtctggaattggaacgcttataggggccataaaaaaacacaatattgataacataagaattttcccagatgacattagaatcttgctagatgatgagggcggaaatatttttgacgcagtaaaaattttatgtcctgatccatggccaaaagagagacaccataaaaggagattaataaataattattttttgagattactacacaaatctatgaaagataaaggaaatttatatatatcaactgattgggaaaactatgcagaaagcattaaaaaattattaaacgatagtacttattttgttagatctgagaagttctttttaaaaaaagaacatttcacaaagtttgagcaaagaggcctagatgatggaagaaatatttttgaatttaattatcaaacaatagattaa

SEQ ID NO: 227279 - DNA, 640 bp, Unknown
  Bacterial polypeptide expressing nucleotide sequence isolated from the Sargasso Sea
gatgagaaaaacaaccagctatcaaagacgatcgggcaaactatcagccaacagcaagcaacaactgcagaaaaacccacacctcatacgtgatgaaattgccaagtcaattgtaaatttacaaaaagactatgacacatgcattattgaaatgggctttggaatgggagatcatttactgggtaacgtgattgaaaattcaaattgcttatatattggtattgacatctacaagccaggcatagcaaggctattgagtacaattgagcaacagagtattttaaactgccatttaattgagcaagatgccacagaaagcgttggagaaatagccaaaaactcagttgatagaattgacattcatcatcctgacccatggccaaaaaaaagacatcataaaagaagattaatcagttcagaattcatcacaacattgcgaggactgttaaaaaaagaaggttatattcacatcatcactgatgatgaaaattattttacagacatcgttgaaatactcaagaacacaccgcaaacaaaaaacaattatacacttgaaaaagataggcaaccgaacagtaaatatggaaaaaaagcgcaacaagaagggcgcaccatcaatggaatcattatcaataaataa

SEQ ID NO: 227280 - DNA, 526 bp, Unknown
  Bacterial polypeptide expressing nucleotide sequence isolated from the Sargasso Sea
gtagtcctagaaataggctttggtatgggcaagtcgcttgtcgaaatggctaaaaatgctccacacctaaactttattggtattgaagtacaccgccctggcgttggtgcatgtttaatggatgccgacgaagcgggcgtaactaatttacgcgtgtttgaacacgatgctgtagaagtgcttgctgattgcttaagcgatgaaagcctaactacattgcaattattcttcccagatccatggcacaaaaagcgccaccataaacgccgtattgtacaaactgaatttgctgaaaagcttcgctcaaaattaaaaataggcggtgtttttcatatggctactgattgggagaactacgcagaacatatgctagaagtaatgcaagcggctccgggttataaaaaccaatcagaaacaaacgactacgtacctcgccctgatttacgccctcttaccaagtttgagcaacgcggccaccgattaggtcacggcgtttgggacttaatgtttgagcgcaccaagtaat

SEQ ID NO: 227281 - DNA, 699 bp, Unknown
  Bacterial polypeptide expressing nucleotide sequence isolated from the Sargasso Sea
tatgaataagttctctaaattttgtcttgagctatcatctttatcagatattaaaccttcaatatttttatcacctgcttctggttacagggctagatgtgagttcggtattagtaaaagctcatacacaatgattgaagatgggaaaaaaatacatatggatgtatctaaaatccctcatcatagcatccaaaaaataatgccaaaattgttaaaatatattaataaatcgagcattttaaaatcaaaattatttcaaattaattttagatcttcaggatcagatattttagctaccatgatttatcacaaaaaacttaaggatgaatggagtattgaagctaaagttactcaagctaaatttaaaaatctttctatcattggaagaagtaaaaatcaaaaaattactaatgataaagaaaatctaaaaataatatgtaaatacaaaaattctagctttgaaatattacaaaatgatgtagttttttttcagcctaatttctacctttattcgatgatgatttcttttattacagattatttaaaagactcaaaggatctacttgaactttattgtggctgtggaggcttcaccctacccctagcttcaaaattcaataaagtttttgcaacagaaaataatcgtcatgcggttcagctattgttagagtcgataaaattaaatggtgttgcaaatat

SEQ ID NO: 227282 - DNA, 502 bp, Unknown
  Bacterial polypeptide expressing nucleotide sequence isolated from the Sargasso Sea
atgatatttaaagttattgatttcatagagaatccagatgacttattagagttatattgtgggataggtacttttactattccgttatcatttatattcaacaaagttctagcaacagaaaataatagaaactctattaaatgccttaacaaagctttaaaagaaaatagtatttcaaacattcataatgctcgtctttcatctgatgaagtatcagaattatttaaaggaaaaattttcaatcgaatgaattcaaaaaatatatctgactttaatttttcacatattcttttggatcctccacggtctggattaacagaggatgtaattaatttagcctctaattttaaaaatattatttatgtttcttgtaatcctgaaacttatatcagagatataaatttaattaggtcacataaaattacaaacatagaattgtttgatcaatttccaaataaaaatcatctagagatagtatctgtattaaaaatgattaaataat

SEQ ID NO: 227283 - DNA, 667 bp, Unknown
  Bacterial polypeptide expressing nucleotide sequence isolated from the Sargasso Sea
tttaaaaaggatatctcttcattttattcaaaaaaaataaatattaactttagtccaccaaatagttttaggcaaaggtgtgaatttggatactataaaaattcatacattatgtatgaaaataataaaaaattattcttaacctcttttgataaagcagttaggccaattcaagctctaatgccaaaactgttaaagataattaatagtaataaccaattaaagacaaaactttttcaaataaacttccgatcaaataacaataataatcttatgatcacattggtttatcataaaactattgatgataatttaataatcgtcatagatgagatatccagattattgcaaattaacatacttataaggtctaaaaattttttatattctacaaattcaaattatcttgctgactatattaataatgaaattaaaatttatcagacagacaactgtttttttcaacctaataaatttatgttacctaaaatggtaaataaagttatatctttgatagaagaacaaatggatctacttgaactatattgtggtgttggaacatttacattacctttatcaaaagtatttaataaaatactagctacagaaaataatagaatatcaattaaatgtctcaataaagctttattagataataatattaata

SEQ ID NO: 227284 - DNA, 334 bp, Unknown
  Bacterial polypeptide expressing nucleotide sequence isolated from the Sargasso Sea
atgaacttagcagcaatggatcccacgacctatgatgcgcaactaactgcaaagcgtatcaagctagagcagacctttgcccaatttgagacaccgagtgttgaagtgtttgcctcagaacctgcccactatcggatgcgagccgagtttcgcgtatggcacgaaggcgacgatttatactattacatgttcgataaagtattgaacgacaaagttcgttgcgatcaatacttacccgcgagtgccttaatcaatcagatgatggcggcactgatcgccgagttaaagccgaaccacagcatacgtcataaactcttccaagttgattttttat

SEQ ID NO: 227285 - DNA, 571 bp, Unknown
  Bacterial polypeptide expressing nucleotide sequence isolated from the Sargasso Sea
tttgtcacctgcttccggttacagggcaagatgtgaattcggttttagtaatgactcatacacaatgattgaagatgggaaaaaggtatttatggatgtatctctaattccccatcatagtatccaaaagataatgccaatattattaacacacataaataaatccaatattttaaaatcaagattatttcaagtaaattttagatcatcgggatcagatgtcttagctactatgatttatcacaaacatctcatggaagattggaatgctgaagctcaacttattcaagctaagtttgacaatctttcaattattggaagaagtaaaaatcaaaaaattgccaatgataaagaaaatctaaaaataatatgtaaatacaaaaattccagctttgaaatattacaaaatgatgtagttttttttcagcctaatttctatctttattcaatgatgatctcttttattacaaattatttaaaagattcgaaagatctacttgagctatattgtggctgtggaggcttcactctcccccttgcttcaaaattcaataaagtttttgcgacagaa

SEQ ID NO: 227286 - DNA, 904 bp, Unknown
  Bacterial polypeptide expressing nucleotide sequence isolated from the Sargasso Sea
gatcatggcattaagtattcaatgtttaaagataatgaacgcgtagagatagatgaataccctattagctcagagtctatacaaactttaatgaaagacttgttgaagatagtcaatctggaagaagtactgtacaaaaaaatttttcaaattgaattccaaagttctaggtctaaagaagtaatggtttctttaatctatcataaaaaattaggatcagattggattgagaaggcaactttaattaaagacaatcttaaatgctcagttataggtagaagcaaaaaacaaaaattaataattggccaagattatgtaactgaagagtacaaatctattaatcagagtttcaaactaaatttatatgaacaatgttttagtcagacaaaccctgatgtctgtgatcagattattaattgggtagaagagattggaaaaaaggattcagatatcctagaacttcattgtggattaggtacctttacgattcctctgagtaagttatttaataacgtaatagctactgaaaatagtcgccctagccttttagctcttgagcataatgttaatctaaataaatgtcataacatcaaatacgcaagactatcaggtaaggaaactcttgaagcttttaatggaaagagagaatttagaaggctaaaaaataaatgtatttcttttaaagattttaatattagatcaatatttgttgacccacctagagaaggtattgacgccaataccttaagaaaaatatcgcaatttgatgagattatttatatatcttgtggttttgagtctttaaaaagagatctagatatactaaagaaaactcataagataaagaaagtagccatgtttgatcaatttccttatacggaacatatgaatctggcgtcatcta

SEQ ID NO: 227287 - DNA, 670 bp, Unknown
  Bacterial polypeptide expressing nucleotide sequence isolated from the Sargasso Sea
atgaataaatttgatagatttcaagacgacattaaaaacaattatgacgaaaaagtagtaattaacctcagtccctcaacatcatttagaagtcgttgtgaattttcttatggaaaaaatcattatgttatgcatgatattaatgaaaaaatttacatcaaaacttttaaagacgcatcattagatattcaaaacttaatgccagtacttttaaagaggataaatgagaataacgtagtaaacaataagttatttcaagttaattttagatcaaatcaacataataaaattatggtcacaatgatttatcacaaaataataaataaatccctaataaatcttgtgaatcaaatatctgaagatctaaaagtaaatataatcattcgatctaaaaactataaatatgaaacaagaggtttatatttagacgatacactcatttataaaaatttaaaaatttatcagactgataatacttttacacaatcaaataaatatttagttgataaaatgatatttaaagttattgatttcatagagaatccagatgacttattagagttatattgtgggataggtacttttactattccgttatcatttatattcaacaaagttctagcaacggaaaataatagaaactctattaaatgccttaacaaatcttaaa

SEQ ID NO: 227288 - DNA, 843 bp, Unknown
  Bacterial polypeptide expressing nucleotide sequence isolated from the Sargasso Sea
actgcctgtagccactgtgcagcacctcgactatcaacctgagcggtgcgaatccctttttcaagaaaaggccgcgaaggcattggaacgactgaaaccactcgcgccgcccacaccgcaacaccacgcctccatcgcaagcggctatcgcctcagggctgagttcagaatctggcacgacggtgatgaactggactacgtgatgtttccgcccggcgaaccccgtaacccgcaaattatcgaagcgtttcccatagcggggccgcgcattacggaggcaatggcgccgctccgtgaagcactgcagggctcaactgagctacgacgcaagctgtttcaggtggagtttctatcgacactcagcggggagctactgatcactttgatataccatcgcccgctcgacgacgcatggcacgcccgcgcccgagcactgactaggtcgctgtcttgtaagatcattgggaggagccgaaaacaaaaacgcgtgctggacaccgactgggttgaagaggtcatcaaggtcgaaggtcgggcgttttgttatcgccaaccggagcagtgctttacgcagcccaatggctttatcaatcaaaaaatgatggggtggctactcgatcagtgcgataagactgatacggatttgctcgaactttactgtggcatcgggaacttcaccctgcctttctcgcaacgttttcgcaatgtgctggccactgagctcagtaagcccgccacggcagctgcgcgctggaatgccgaagcaaaccgaagctacaacatcgaactcgcgcgtttatccgccgaggagatgaccgccgcgatggcaggtgagagaccgtt

SEQ ID NO: 227289 - DNA, 750 bp, Unknown
  Bacterial polypeptide expressing nucleotide sequence isolated from the Sargasso Sea
aatgccagtacttttaaagaagataaatgagaataacgaaataaagcataaattatttcaagttaattttagatcaaatcaacacaatgaaattatggtcacaatgatttatcacaaaataatagataaatccctaataaatcttgtgaatcaaatatctgaagatctaaaagtaaatatgatcattcgatctaaaaactataaatatgaaacaaggggtttatatttagaagatatactcatttataaaaatttaaaaatttatcagactgataatacttttacacaatcaaataaatatttagttgatagaatgatacttaaagttatagatttcatagagaatccagatgacttattagagttatattgtgggataggtacttttactattccgttgtcatttatattcaataaagttctagcaacagaaaataacagaaactctattaaatgccttaacaaatctttaaaagaaaataatatttcaaacattaataatgctcgtctttcatctgatgaagtatcagaattatttaaaggaaaaattttcaatcgaatgaattcaataaatatatctgacttcaatttttcacatattcttttagatcctcctcggtctggattaacagaggatgtaattaatttagcctctaattttaaaaatattatctatgtgtcttgtaatgctgatacttatattagagatattaatttatttagatcacataaaattacaaacatagaatt

SEQ ID NO: 227290 - DNA, 882 bp, Unknown
  Bacterial polypeptide expressing nucleotide sequence isolated from the Sargasso Sea
tttgactctaaacattgtatttattaggatttattatactcgtaataaatttgatatgaataagttctctaaattttgtgatgaactatcatcgtactcagacattaaaccttcaatatttttgtcacctgctagtggttacagggccagatgtgagttcggtattagtaatagctcatacacaatgattgaagatggaaaaaaaatatttatggaagtatctaagatacctcatcacagcattcaattaataatgccaaaattgttaagacacattaataaatccagcattttaaaatcaaaattatttcaaattaattttagatcttcaggatcagatgttttagctaccatgatttatcacaaagaacttttggatgaatggattgttgaagctaaagttatccaagctaaatataaaaatctttccatcattggaagaagcaaaaatcaaaaaattgctagtgataaagaaaatttaaaaataatatgtaaatacaaaaattccagctttgaaatattacaaaatgatgtggttttttttcagcctaatttctacctttattcaatgatgatctcttttattgcagattatttaaaagacacaaaagatctacttgaactttattgtggctgtggaggcttcactcttccccttgcttcaaaattcaaaaaagtttttgcaacagaaaataatcgtcatgcggttaaacttttattagagtccatagaattaaatagtattacaaatattgaaactgccaggctttctgataatgagacagcattagcattaagtaataagcgtatatttagaagattaaagaatattgatttaacttcatataactttagccatatattggtcgatcccccaagagc

SEQ ID NO: 227291 - DNA, 1009 bp, Unknown
  Bacterial polypeptide expressing nucleotide sequence isolated from the Sargasso Sea
tatgaataaatttaatttatttgaacaagatctgacagagctttatattgataaagtcccaataaaccttagcccatcattatcatttagaagtagatgtgaatttggatactctaaaaatgcttacactatgaaggattcatcaaaaacaatctatttaaataaatttttatatgcagacagatcaattcaagaattaatgcccaaaatattagaaataattaacgaatctcaaattgtaaaaaataaactttttcaaattaactttagaacgaattcaaaaaataaaattcttgtaactttgatatatcacttgaaagtaaatgaactacttatcaaaacaattgaagaaatctcaaaaaagttaaatgtagatattattattcgttccaaaaattttattcatgcaaccaatgataactttcttgaggataagctggaatattcaaaactaaatatatttcaaactgataattgtttctatcaaccaaataaattcttattaaatagaatgatttcaaaggtaattaactttgttgaaaatccaaatgatttaattgagctatattgcggtgttggaaccttcacacttcctttatcaaaagtttttaaaaatgtgtttgcaacagaaaataatagaaatgcttataagtgtttattaaaggcaattcagaaaaatgatataaataatatacatcctgcaagactgtcatcaaatgaagtaactgaattagaatgcggaagaaaatttaataggatggatggcatacctttcagttcatttaatttcagtcatgtacttgttgatccgccaaggtctggtcttacagacgatgtaataaatataatttctagatacaagaatataatttacatatcatgtaaccctaagtcttacttaagagatataaagttattgagctctcataaaattaaaaaaattgagttatttgatcaatttccaaatacagaacatcttgaaatcatttcactgttacaaaaaaaataa

SEQ ID NO: 227292 - DNA, 1012 bp, Unknown
  Bacterial polypeptide expressing nucleotide sequence isolated from the Sargasso Sea
tatgaataaatttgatagatttcaagatgacattaaaaacaattatgacgaaaaagtagtaattaacctcagtccctcgacatcatttagaagtcgttgtgaattttcttatggaaaaagtcattatgttatgcatgatattaatgaaaaaatttacatcaaaacttttaaagacgcatcattagatattcagaacttaatgccagtacttttaaagagaataaatgagaataacgaagtaaaccataagttatttcaagttaattttagatcaaatcaacataataaaattatggtcacaatgatttatcacaaaataatagataaatccctaataaatattgtgaatcaaatatctgatgatctaaaagtaaatataattattcgatctaaaaactataaatatgaaacaaggggtttatatttagacgatacactcatttataaaaatttaaaaatttatcagactgacaatacttttacacaatcaaataaatatttagttgataaaatgatatttaaagttattgatttcatagagaatccagatgacttattagaattatattgtgggataggtacttttactattccgttatcatttatattcaacaaagtacttgcaacagaaaataatagaaactctattaaatgccttaaaaaatctttaaaagaaaataatatttcaaacattcataatgctcgtctttcatctgatgaagtatcagaattatttaaaggaaaatttttcaatcgaatgaattcaaaaagtatatctgactttaatttttcacatattcttttagatcctccacggtctggattaacagaagatgtaattaatttagcctctaattttaaaaatattatttatgtttcttgtagtgctgaaacttacataagagatataaatttaattaggtcacataaaattacaaacatagaattgtttgatccatttccaaataaaaatcatctagagatagtgtctgtattaaaaatgattgaataa

SEQ ID NO: 227293 - DNA, 1030 bp, Unknown
  Bacterial polypeptide expressing nucleotide sequence isolated from the Sargasso Sea
aatggataagttcaaaaaatttaaatctgatatctcaaaatattattcagataatattaatataaattttagcccctcatcatcctataggagcagatgtgaatttacttatacaaacaattcttatgcaatgcatgatggtaaatcaaagatatttttaaagtcatttattaatgcatcatcatctattcaaaaagtaatgccaattttactttatgaaattaataattcagaattactaaataaaaaattatttcaaattaattttagatctaattcatgcaaagaagttcttgctacacttatttatcacaaacatctaactgacgaaattaaagacttaagagataaattaaatactaaattaattgatttaaatgtaaaaattattttaagggctaaaaacgaaatatatcctgaaataaatcaattttttaaagacactataagattgaaaaatttaaatttaacaacctatcaaactgacaattgtttttatcagcctaatagattcttgttgacaaaaatgattgataaagttctttcatatacaggttttaataatacaggtgatttaattgaattatattgcggagttggaacatttagcatgcctctagcaagttgttttaatagagtttttgtaactgaaaataatagatcatcaattaaatgtctcaaacaagcaattattaaaaataatataaagaatatagattttgcaagattatcatcatccgaagttgttgaactttttaatggtagaaattttaatagaatgaataataagaatataagtgaatacaatttttcacatatcctggtagacccacctcgctctggattaacgcgtgatgttattcagttaatagataaggtggataatatcatctatatttcatgtaaccctgaaacatatttacgagatatcggcctactcaacaaccataaaattcaaaaaattgaaatatttgatcaatttccaaatactaagcatctagaaatcgtttcattactatcagtcaattga

SEQ ID NO: 227294 - DNA, 1009 bp, Unknown
  Bacterial polypeptide expressing nucleotide sequence isolated from the Sargasso Sea
catgaataaatttaataaatttaaaaaagatttatcagatttatacactgatgatgttccaataaatcttagtccgtcattatcatacagaagcaggtgtgaatttggttattataaaaactgttacaccatgaaagataattttaaaacagtttatttgaaaacctttccagacgcatgtatgccaattcaacaaattatgcctaaattattaaacaaaattaattcatctgaaattgtaaaatttaaattatttcaaattaactttagagcaaactcaaaaaataaaatcttaacaacactgatatatcacacaaaaataagcgaattattaatagagactatttcatctatatctcaatcattagacatagacattattattcgatctaagaattttatacattctgtcaatcaaaattatcttgaagactttctagaaccatcaaatttaaaaatatttcaaactgataactgtttctatcagccaaataaatttcttttaaataaaatgatatcaaaagtaattgagtttatagataaccctaatgatttgatcgagctttattgtggtgttggaacttttacactacctttatcaagaatttttaaaaatgtatttgcaactgaaaataatagaaatgcatataaatgtttattaaatgctatagaaattaacaacataaaaaatattcacgctgcaagattatcatctgatgaagtagcacaattagatactggcagaaagttttttagaatgtctaatatttcaatagatacttttgattttagccatatattgattgatccaccaagatctggtctaacacaaaatgttatcaatattatatctaaatataagaatataatttacatatcctgcaatcctgaaacttacatgaaagatataaaattgttaaatcatcataagataaaaaaaattgaattatttgatcaattcccaaatacgcaacatcttgaaatagtttcgttactccaaaagaactaa

SEQ ID NO: 227295 - DNA, 708 bp, Unknown
  Bacterial polypeptide expressing nucleotide sequence isolated from the Sargasso Sea
tttaccataaaaaaatcactgataaccatattaagttaattgataaattgtctaatgaattaaaaataaatattattattagatcaaaaaacttttgttattcatctcaaaactatttttttgagtaccatttaaagttaaataatttagttttatatcaaaccgacaactgtttctttcaaccaaataaatttcttttagaaaaaatgattactaaagtacaagattttattattaatccaaaagacttattagaattatattgcggtgtaggtacattctcattaccgttatcatctttattcagtaaagttttagcaacagaaaacaatagaaatgcaattcaatgtcttaataaagctattattaaaaattcaatatcaaatatttcttcagcaagactatcatcaaatgaagtatatgaattaataaatggtaaaaaatttaatcgaatgaagcaaaatgaaattacagactttgatttttcacatgttttagttgatccaccaagatcagggttagatcttaatacagttaatattttaaataactttaagaatgttatttatatttcctgtaatcaaaacacatacataagagacataaatttactaaagagtcattatattgaaaaaattgaattatttgatcaatttcctaataccaaacatctagaaattgtttctttattacataaaaaaaattaat

SEQ ID NO: 227296 - DNA, 955 bp, Unknown
  Bacterial polypeptide expressing nucleotide sequence isolated from the Sargasso Sea
aactaagaccccctaccgggtagatgaattcccagcggcttcagaaactattaatgcgttaatgaagcgtattattgagctggtaaagcccaacgctgtgctgcgcaaaaagttgtttcaggtcgattttctcagcggcttatcgcaggagtgtgtaatcagcctgctataccatcgccagttagatgacgaatggcaggcgcaggccgaagcacttcgtaccgaattgaataaagaatttaaggtcagcgttattggtcgtgcccgcaaacaaaaggtcatcctaggtgacgactttattattgaagagttgcccgccgacggaaaaacctaccagtttaaacatatcgaaaacagctttacccaacctaatgcctatgtgaatacccatatgattgaatgggcgattgcacaaagccaggtgttaaccggcgatctgctggagctttattgtggcgcggggaatttttctattccgctggccgcacactttgatcatgtagtaggcacagaaatagcaaagccttcagtggaagcagcgcagtttaatattgcagtcaaccagattgataatgtccagatagcccggctatctgctgaggagtttgttgaggccctggccggtaaacgccagtttgaacggttaaaaggcattgagctggctgagcgacaatttaataccgtgctggtagatccgcctcgagcagggctggatcccgccaccacacaaatgatcagtcagtttgacaacattatctatatatcgtgtaacccgcacacactggttgataaccttgaagcgctatcagcaacccatgaagtaagccgggctgccttgtttgatcagttcccgttcaccgagcacatggaaatcaggtgtgttgctcaccccgcaagcttaagacttttgtgtttggggctctggcatggtttgccagtagggcagactgcccag

SEQ ID NO: 227297 - DNA, 409 bp, Unknown
  Bacterial polypeptide expressing nucleotide sequence isolated from the Sargasso Sea
aatgaacttagcagcaatggatcccacgacctatgatgcgcaactaactgcaaagcgtatcaagctagagcagacctttgcccaatttgagacaccgagtgttgaagtgtttgcctcagaacctgcccactatcggatgcgagccgagtttcgcgtatggcacgaaggcgacgatttatactattacatgttcgataaagtattgaacgacaaagttcgttgcgatcaatacttacccgcgagtgccttaatcaatcagatgatggcggcactgatcgccgagttaaagccgaaccacagcctacgtcataaactcttccaagttgattttttatcaacgctcagcggtgagattttagtgtcactgctgtatcacagacagcttgatgaccaatggcgcagcgaagcc

SEQ ID NO: 227298 - DNA, 874 bp, Unknown
  Bacterial polypeptide expressing nucleotide sequence isolated from the Sargasso Sea
atgaccgcgaccgaacaacaacgctatcaagctcagttggacgaaaaagtagaacgtcttactgcgttactttctccgttcaatgcgcctgacttaaccgtatttccatcgcaaccaacgcactaccgtatgcgcgccgaatttagagtatggcatgagggcgatgatttgtttcacatcatgttcaaccaggaaacaaaagaaaagtaccgcgtagatagctttcctcctgcttgtaaagcaataaacgatgctatggcgctgttgcttgaagaagtaagaccaaatgaagcgctaagaaagaagctttttcaaatcgattatctttctgcactatctggcgagcttgtcatcagccttttataccatcgtcaactagatgagaagtggcaagaggctgcaaaagaattaaaggcgaaactcgaggctcactttccgaaagtaaacatcatcggccgtgcgagaaaacaaaagcttattatcgacaacgattttgttattgagcgcttacccgttaatggcaaagaattcatatttaagcatatcgaaaatagcttcactcagcccaatgccgaagtgaactgtagcatgattgaatgggcactagattgcgtaaagccgctctctggcgatttactggagatgtattgcggtgcaggtaacttctcactgccgctagcgcttcacttcgataatgttgtggggaccgaaatagccaagccctctgtacaagctgcgcagtttaatattgaacaaaatcagcttaataatgtgaagatcgtaagactcgccgctgaagaattcactcaggctatgaaaggtgaacgtacgtttagtcgcttagaaggcattgatctaagtacatataatttca

SEQ ID NO: 227299 - DNA, 1096 bp, Unknown
  Bacterial polypeptide expressing nucleotide sequence isolated from the Sargasso Sea
atggctttagggcaagtatttccggatttatatgaaactcaactggcagaaaagcaagctggtatagagcagctgtttgcctcttatactctgccagagttagagttgttccgctccgaacccagccattatcgtcaacgtgctgaatttcgggtctggcatgaaggagacgatttgttccatattatgtttgactctgaaaccaagcaaaaacagcgcattgattacttccctgttgcctgcaaacaaatagccgattttatgcctgtactgctggaagagctgaaaaagcgtccggcgctgcggaacaagttataccagattgattacctgagtggcttaagtggcgaactgttggtttctcttatttataagaagccattaagtgacgattgggccgaacaagctgctttattaaaagccgacctggcggaacaatggccgctggactttattggccgttcgcgcaaacaaaaagtgttggtgcatcgcgaccatattattgaaaagttgaaggtaaaagatcgtactttaagttaccagcaaattgaaaacagctttacccagcctaacgccaaagtgaatcagcagatgctggagtgggcttgtgatatttcaagccaactcaaaggtgacttgctggagctttattgtggtaacggcaacttctcgctggccctgacgccttatttccgtcaggtggttgctacagagattgcccgcagctcgattaaatcagcgcagctgaatattgaaatgaaccaggtaacgaatctgcaagtgttgcagatgtcagctgaagatgtcagcgcagccatggccacaggcaagcagttaaagactttggatttatcagagctgcagctggatactattctggttgaccctccacgggctggtttagatccagccaccgaagcttttgtcagccagtttaacgatattatttatatctcctgtaaccctgtgactttagagcagaacttacagcagctgagcaaaactcacgaaatcaaagcttttgctttatttgatcagttcccctacacccatcatattgaatcgggtgtctggttacgcaaacttaatctttagg

SEQ ID NO: 227300 - DNA, 594 bp, Unknown
  Bacterial polypeptide expressing nucleotide sequence isolated from the Sargasso Sea
aagaaaatttaaaaataaaatgtaaatacaaaaattccagctttgaaatattacaaaatgatgtggttttttttcagcctaatttctacctttattcaatgatgatctcttttattgcaaattatataaaagacacaaaagatctacttgaactttattgtggctgtggaggcttcactcttccccttgcttcaaaattcaataaagtttttgcaacagaaaataatcgtcatgcggttaaactattattaaagtccattgaattaaatggtattacaaatattgaaactgctaggctttctgataatgagacagcattagcattaagtaataagcgtatatttagaagattaaagaatattgatttaacttcatataactttagccatatattggtcgatccccctagagctggtttaagtaaagaagctgtaaatttatctaatcaattcaaaaatatggtttatatatcatgcaatccagaaacttttttccgtgatttaaaaattatgaaaagagaaattgaatcaattggattgtttgatcagttttcaaatactgatcacttagaagttattgcagtattaaaataag

SEQ ID NO: 227301 - DNA, 753 bp, Unknown
  Bacterial polypeptide expressing nucleotide sequence isolated from the Sargasso Sea
tcgcgagcactaccgcatgcgcgccgagttccgcctgtggcgtgaagacggccagcgccactacgcgatgttcgcgccgggcgacaaacacacgccgatcctgctcgacgacttcctcatcgccagcctgcgcatcaacgagctgatgccgcgcctgcgcgctgcctggcaggccagcgaagcgctgtcgttcaagctgttccaggtagagtttctcaccaccctggccggcgatgcgctgatcaccctggcctaccaccgcccgctggacgagacctggcaggcggaggccgaacaccttgcgaccgagctgaacgtcagcctggtcggccgctcccgtggccagcgcctggtgatcggccgcgattacgtggaagaagaattgagcgtggccggacgcagcttccgctatcgccagccggaaggcgccttcactcagcccaacggccgggtctgcgagaagatgctgggttgggcctatgacgtactcggcgagcgcgacgacgacctgctggaactgtactgcggcaatggcaacttcaccctgccgctggccacccgcgtgcgccgcgtgctggccaccgaaatcagcaagacctcagtgaacgccgccctggccaacctggctgacaacggtgtggacaacgtcgagctggtgcgcctgtccgccgaagagctgacccaggcgctgaatgaggtgcgcccgttccgccgcctggccggcattgacctgaagagctatgagttcggcag

SEQ ID NO: 227302 - DNA, 718 bp, Unknown
  Bacterial polypeptide expressing nucleotide sequence isolated from the Sargasso Sea
gacacctgggatggccccgctcgcacacttgccgcgcagctcggggtacagctgatcggtcgcagccgcggccagaaacgtgtactgcagacagatcatgtagtggaagtgctggatgtagctggccgccagtggcagtaccagcagattgaaggcgggttcacccagcccaacggcggcgtcaaccagcacatgctgggatgggcgctgaatgccgccggccgcaacagtgacgatctgctggagctgtactgcggcaacggcaacttcacgctgccgctgtctaccgcgttccgccgggttatggccaccgaactggccaaaagctcggttcgcgccgcacaggaaaacctgcgtctgaacaacgtggacaatgtcaccctggtgcgcctggccagcgaagaggtgacccaggcactgaccggtgtacgccccttccgccgcttacagggcatcaaccttagcggctttgagttcggcaccgtcttcgtcgacccaccgcgcgccggcctagaccccgccacgctggacctggtcaaggattaccggcgcattctctacatctcctgcaacccggagaccctggcagacaacctgcagacgcttacaaaaacgcaccgcgtagtgcggtgcgctctgttcgatcaattcccctatacccaccatatggagtcgggggtgttgctggagcagaatataagagccgctcagtctgccc

SEQ ID NO: 227303 - DNA, 416 bp, Unknown
  Bacterial polypeptide expressing nucleotide sequence isolated from the Sargasso Sea
catgacccccgaacaccttccgacagaacagtacgacgcccagttagctgagaaagtagtgcgtctgcagagcttaatgacgccattttatgcacaggctccggaagtgtttcgctcaccggtcagccattaccgtatgcgcgccgaattccgcctgtggcatgacggtgatgacctgtaccacatcatgttcgacagccagaccaaaaaccgtattcgcgtcgacagcttcccggccgccagcgagctcatcaacacgttgatgacggcaatgatcgacggcgttcgcaacaaccacgtcctgcgccacaaactgtttcagattgattacctcacaaccctgagcgatcaggcggtggtttcgatgctgtaccataaaaagctggatgatgaatggcgtaaggaagccgaagcgc

SEQ ID NO: 227304 - DNA, 844 bp, Unknown
  Bacterial polypeptide expressing nucleotide sequence isolated from the Sargasso Sea
aatgaacttagcagcaatggatcccacgacctatgatgcgcaattaactgcaaagcgtatcaagctagagcaggcctttgcccaatttgagacaccgagtgttgaagtgtttgcctcagaacctgcccattatcggatgcgcgccgagtttcgcgtatggcacgaaggcgacgatttatactattacatgttcgataaagtattgaacgacaaagttcgttgcgatcaatacttacccgcgagcgtgttaatcaatcagatgatggtggcgctgatcgccgagttaaaaccgaaccacagcctacgtcataaactcttccaagttgattttttatcaacgctcagcggtgagattttagtgtcactgctgtatcacagacagcttgatgaccaatggcgcagcgaagccgccgcacttaaagccaaattgagcagccaatttaaggtcaatatcattggccgtgcgcgcaaacagaaaatcgatttagataaagactttgtggttgagtcgctgcaagtgaatgacaaagttttccattacaaacaaatcgaaaacagttttacccagccaaatgccaaggtggcaatcaagatgttggaatgggctatcgacgtgactcaacgcagccaaggcgatttactggagctttactgtggtaatggcaacttctccatcgccctggcacaaaacttcaataaggtgctggcgaccgagttagctaaaccttcagtagatgcagcccagtacaatatcgaagtcaacaatatcgataatttgcagattatccgtatgtcggcggaagaatttagcgatgcgatggcgaaaaagcgcagctttagacgc

SEQ ID NO: 227305 - DNA, 309 bp, Unknown
  Bacterial polypeptide expressing nucleotide sequence isolated from the Sargasso Sea
tggcggccgaagagtttacacaggcgatgaacggtgttcgcgagttcaaccgtttgcagggaatcgatctgaagagttaccagtgtgaaactatcttcgttgacccaccgcgcagcggtctggacagcgaaacggagaaaatggtgcaggcgtatccgcgcattctgtacatctcctgcaatccggagacgctgtgtaagaacctggaaacgttaagccagacgcacaatgtttcacgtctggcgctattcgatcagttcccatatacgcaccatatggagtgcggagtactgttaacgaagaagtaag

SEQ ID NO: 227306 - DNA, 496 bp, Unknown
  Bacterial polypeptide expressing nucleotide sequence isolated from the Sargasso Sea
aatgaacttagcagcaatggatcccacgacctatgatgcgcaactaactgcaaagcgtatcaagctagagcagacctttgcccaatttgagacaccgagtgttgaagtgtttgcctcagaacctgcccactatcggatgcgagccgagtttcgcgtatggcacgaaggcgacgatttatactattacatgttcgataaagtattgaacgacaaagttcgttgcgatcaatacttacccgcgagtgccttaatcaatcagatgatggcggcactgatcgccgagttaaagccgaaccacagcctacgtcataaactcttccaagttgattttttatcaacgctcagcggtgagattttagtgtcactgctgtatcacagacagcttgatgaccaatggcgcagcgaagccgccgcacttaaagccagattgagcagccaatttaaggtcaacatcattggccgtgcgcgcaaacagaaaatcgatttagataaagac

SEQ ID NO: 227307 - DNA, 714 bp, Unknown
  Bacterial polypeptide expressing nucleotide sequence isolated from the Sargasso Sea
catgactcaatcccagccctcttccgccgacgcccagggcagacggactcctgccgactaccagacccagctcgacgagaagcgcgatcgcctcacccagctgttcgcccccttcaatccgcccgcgctggagctgcacgcctctcccgccgagcactaccggatgcgcgccgagttccgcatctggcacgagggggatgacctcttccactgcatgtatgcaccggccaccaaggagatcatccgggtcgacagcttccccaccgccagcctgctcatcaaccggctgatgcctgtgctgctggccgggctgcgcccgcaccccgtgctgcgcaagaagctgttccagatcgactacctctctacccagtccggccagatctgcgtcagcctgctctaccaccgcaagctggagaacgagtggcagccggccgccgaggcgctgcaggccgacctgcgtgccaaggggttcgagctgcaactgattggccgcgcccacaagcagaagatctgcctcggggatgacttcgtcatcgaacgcctgaccgtgcaggggcgcgagctggtctacaaacaggtggaaaacagcttcacccagcccaacgccgccatcaacgagcagatgctgggctgggccctggacgtgaccaaagagagcgagggggacctgctggagctctactgcggcaacggcaacttctccatcgctctggc

SEQ ID NO: 227308 - DNA, 838 bp, Unknown
  Bacterial polypeptide expressing nucleotide sequence isolated from the Sargasso Sea
atggcggcactgatcgccgagttaaaacctaaccacagcctacgccacaaactcttccaggttgattttttatcaacgctcagtggtgagattctagtatcactgctgtatcacagacagcttgatgaccaatggcgcagcgaagccaccgcgctcaaagctagattgagcagccaatttaaggtcaatatcattggccgtgcgcgcaaacagaaaatcgatttagataaagactttgtggttgagtcactgcaagtgaatgacaaagttttccattacaaacaaatcgaaaacagctttacccagccaaatgccaaggtggcaatcaagatgctggaatgggctatcgacgtgactcaacacagccaaggcgatttgctggagctttactgtggtaatggcaacttctctatcgcgctggcacaaaactttaatcgcgtgctcgcgaccgagttagctaaaccttcggtggatgcagcccaatacaatatcgaagtcaacaatatcgataatctgcaaattatccgcatgtcggcggaagagtttagcgatgcgatggccaaaaaacgcagcttcaggcgcttagaaggcatcgatctggatagctatgtgtgcaacaccatttttgttgacccaccacgagcaggtattgacccagctacgttggacttagtgcaaggttatgagcggattttgtatatctcgtgcaatcccgacaccttaaaagacaatttgcagcaattaaatcagactcacaaggtgacacgttttgcgctattcgatcagttcccttacaccgaccatatggaaacaggtgtgctgttagaacgtcgttagg

SEQ ID NO: 227309 - DNA, 1099 bp, Unknown
  Bacterial polypeptide expressing nucleotide sequence isolated from the Sargasso Sea
aatggcagttattaaaatagataccacacagtaccaagcgcagttaagtgaaaaagaacagcgtataacttcacagtttcaacgttttggtgtggagcagctagaagtatttagctcggagccaattaactaccgccaacgtgccgaatttagagtatggcatgatggagacgatctgtttcatataatgtttgatcagcaaactaaagaaaaaatacgcgttgatacgtttgaccctgcggcaccgcttgttggtgaaatcatgcaggtgatgattgaaaaccttaaaccatgcgaggttttacgccgaaagctatttcaaatagattacctgtctacactcagtggtgaaattttagtgagcttgctttatcacaagccgcttgatgatgaatggctacgtgaaattaagtcactaaaggcaaaactgagtgaaaaatataaaatagattttattggccgagcacgtaagcagaaagaagtgctaggtgatgactttgtaacagagcaattaactgtaaatggccaagaactaatttaccaacaagtagaaaatagctttacgcaacctaatgcaaaagtaaatataagtatgcttgagtgggcacaagatttatgtaaaccacttaaaaatgatttactagagctttactgcggtaatggtaacttttctattgcgctagcgggatcttttaataaagtactcgcaactgaaatatctaaatcgtctgttcactctgctcaatataacattgccaaaaacaatgtagacaacctagatattattcgtatgtcgagcgaagagtttactcaagcaatgaatggcgaacgtactttttctcgtttagacggtattgaccttaaaagctatgactgccaaaccatattagtcgacccgccacgcgctggtatggatgagttaacctgtgatttagtggctaattacgaaaacataatttatatatcgtgtaatcctgacacactggaacgcgatttagatcatttaacgcgttcgcataacgttaagcgctttgcgatatttgatcagttcccttatacacatcacatagagtcgggtgttttcttacagcgtaaataa

SEQ ID NO: 227310 - DNA, 1099 bp, Unknown
  Bacterial polypeptide expressing nucleotide sequence isolated from the Sargasso Sea
aatgaacttagcagcaatggatcccacgacctatgatgcgcaactaactgcaaagcgtatcaagctagagcagacctttgcccaatttgagacaccgagtgttgaagtgtttgcctcagaacctgcccactatcggatgcgagccgagtttcgcgtatggcacgaaggcgacgatttatactattacatgttcgataaagtattgaacgacaaagttcgttgcgatcaatacttacccgcgagtgccttaatcaatcagatgatggcggcactgatcgccgagttaaagccgaaccacagcctacgtcataaactcttccaagttgattttttatcaacgctcagcggtgagattttagtgtcactgctgtatcacagacagcttgatgaccaatggcgcagcgaagccgccgcacttaaagccagattgagcagccaatttaaggtcaacatcattggccgtgcgcgcaaacagaaaatcgatttagataaagactttgtggttgagtcactgcaagtgaatgacaaagttttccattacaaacaaatcgaaaacagctttacccagccaaatgccaaggtggcaatcaagatgctggaatgggctattgacgtgactcaacgcagccaaggcgatttactggagctttactgtggtaatggcaacttctccatcgcgctggcacaaaactttaatcgcgtgctcgcgaccgagttggctaaaccttcagtcgatgctgcacagtacaatatcgaagtcaacaatatcgataatctgcagattatccgtatgtcggcggaagaatttagcgatgcgatggcgaaaaagcgcagctttagacgcttagaaggcatagatctggatagctatgtctgcaacaccatttttgtcgacccaccacgagcaggtatcgaccctgccacattggagttagtgcaaggttatgagcggatcctgtatatctcttgtaatcccgacaccttgaaagacaatttgcagcaattaaatcagacccataaagtcacccgttttgccctgttcgatcagttcccttacaccgaccatatggaaacaggtgtactgctagagcgtcgttag

SEQ ID NO: 227311 - DNA, 1135 bp, Unknown
  Bacterial polypeptide expressing nucleotide sequence isolated from the Sargasso Sea
atgacccaatcccagcaggtttccgccgatccggcgccccttcgaaccccggccgactatcaggcccagctcgacgagaagcgcgagcgcctctgcgggttgtttgccgacttcaccctgcctgcgctggaagtgcacgcctcccccgccgaacactaccggatgcgcgccgagtttcgcatctggcacgacggtgacgacctgtaccactgcatgtatgcaccggccaccaaggagatcatccgggtcgaccagttccccaccgccagccgtctcatcaaccagctgatgccggtgctgctggaggggctgcgcccgcaccccgtgctgcgccgcaagctgttccagatcgactacctctccacccagtccggccagatctgcgtcagcctgctctaccatcgcaagctggagagcgagtggcaacaggccgccgaagcgctgcaggccgacctgcgggccaagggattcgagctgcagctgattggccgcgcccacaagcagaagatctgcctgggggaggagttcgtcatcgagcggctgaccgtgcagggccgcgagctggtctacaagcaggtggaaaacagcttcacccagcccaacgccgccatcaacgaacagatgctgggctgggcgctggacgtgaccaaggggagcgagggcgacctgctggagctctactgcggcaacggcaacttctccatcgccctggcgcagaacttccgcaaggtgctggccaccgagatcgccaaaccgagcgtggactccgcccagttcaacatcgccgccaacggcgtcgacaacctgatcatcctgcgcatgtcggccgaggagttcaccatggcgatgcgcggcgagcgggagttcaaccgcctcaagggggtggatctgggcgcctaccagtgcaacaccatcttcgtcgacccgccccgggccggcctcgacgacgccaccgtcaaactggtgcaggattacgacaacatcctctacatctcctgcaaccccgagaccctgcaggccaacatggcggtactcggcgacacccacgagatcgcccgcttcgccctgttcgaccagttcccctggactcaccacatggaagccggggtctatctcaagcgcaaggcaggctgat

SEQ ID NO: 227312 - DNA, 1027 bp, Unknown
  Bacterial polypeptide expressing nucleotide sequence isolated from the Sargasso Sea
cctgcgtgacctgctcgcaccgttcgacgcgcccgagccgcaggtcttcgactcgccgctgcagcacttccgcctgcgcgcggagttccgcctgtggcgcgaaggcggtgatcgccattacgcaatgttttcccaggacgacaagcgcacgccgatcctcatcgaagagttccccattgccagccagcgcatcaaccagttgatgccgcaactcaaggccgcctggcaagccagcgctgccctgagccacaagctgttccaggtggagttcctcaccaccctggccggcgacgcgatgatcaccctgtgttatcaccgcccgctggacgaacattggcacaccgccgcgaacacattggccgctgagctgaatgtgagcatcatcggccgttccaagggcaagcgcgatgtgatcggccatgactacgtggtggagaaactcgacgtcggtgggcgcaccttcagctaccgccaacccgaaggcgcgttcacccagcccaacggcacggtgaaccagaagatgctcaactgggcctacgaagcgctgggcgatcgcccggacgatttgttggagctgtactgcggcaacggcaacttcaccctgccgctggcgacccgcgtgcgcaaggtgctggccaccgagatcagcaagacctcggtgaatgcggccctgagcaacctggatgaaaatggcgtggagaacgtcaccctggtgcgcctctccgccgaagaactcacccaagccctgaacgaagtgcgcccgttccgccgcctgcacggcatcgacctgaaaagttacgagttcggtagcgtcttcgtcgacccgccccgcgctggcatggacccggacacctgcgagctgacccggcgcttcgacaacatcctgtacatctcctgcaacccggagacgctggcggcgaatatcgcgcaactgcacgacacgcaccggatcacccagtgtgcaatgtttgaccagttcccgtggacgcaccatatggagtcgggtgtgttgctgacccgccgataa

SEQ ID NO: 227313 - DNA, 765 bp, Unknown
  Bacterial polypeptide expressing nucleotide sequence isolated from the Sargasso Sea
gatggaagaaagagagctattaacaacgcttttagatatctacgatcaaaagtttttggcgaattacctgaatgaagaggtaggcagttcgctgtgcagggaaacaatcaatcgatggatgaaaggcaaagctgagccttctcttactcacgcagaatacgaggctttatttaagctgattccccagccaacggttactgaagaaaattgtgattttcgtttcattgacttatttgcgggtatcggaggtatcagaaaaggttttgaagcgcagggcggtatgtgtgttttcaccagtgagtggaataaatattctgtcaaaacttacaaagcaaattttggcaatgcaaatgagcataaattcaacgaagacattcggagtataacactgtctgacgacgattctgtttcagacgaagatgcgtatgaaaatatcaaaagcaatattcctcctcacgatgtattgctagcaggttttccttgtcagcctttttccattgcaggtgtatccaaaaagaattcgctgggccgtgcacacggttttgagtgcaatacccaggggactctgttttttgatgtagctcggattattgctgcccacaggcctaaagcatttgtgcttgagaatgtgaaaaaccttaaatcccatgataaagggaagacctttaaggtgatcatggaaacactcgatgaactaggttatgaagtagcagatcgttcatttgatggtaaagatcctaaaatcattgacggacaacactttac

SEQ ID NO: 227314 - DNA, 775 bp, Unknown
  Bacterial polypeptide expressing nucleotide sequence isolated from the Sargasso Sea
atgggatttagatttattgatttatttgcgggaatcggggggttcagaatcgcatttgaggcagctggcggaaagtgtgtgttttcatcggagtatgacaagtatgctcaactgacctatgaagctttttttggagagaagccagattttgcggaaataaaggctgttgatcctccaggggatattacccaacttgaaccggagcttgttcctgaccacgatgtccttgttgctggttttccatgccagccattctctcttgcgggagtttccaaaaaacaatctctaggtcgccttcacggttttgatgatccaacacaggggacgctattttttaacataaaggaaatcataaagtctaaaaggccttcagctttcgtcttggagaatgtcaaaaacctgaggtctcatgatcggggcaggacttataaagttattattgatattttaagaaatgagcttgaatacgaggttacagatgaggtgttggatgcaagcgagtggttacctcagcatagggaacgaatttttattgttggttttaggaaccgaggtataattagctccaaattatttccacctggcccagagcaatttgatttttcccaacccggccgatttagttttcttgatatcatgaaaaatagatctcaacctccgtgtctctccgaaatactcgagccagaagttgacgccaaatatataattggccccggcacgtgggaaacacttcaacgccataagaaaaagcatttagaaaagggacagggcttgg

SEQ ID NO: 227315 - DNA, 551 bp, Unknown
  Bacterial polypeptide expressing nucleotide sequence isolated from the Sargasso Sea
tatggatataaaatttatagatcttttttgtggtataggtggatttagattaggttttgaaaacgcgtgtaaaaaagaaaaacttttccccaaatgtgtattttcttctgaaattaaatcctctgcaatagatgtatataagtcaaatttcggatcaaattttatagaaggtgatattactaaaataaaggcagaaaatattccttcatttgatgtattgttagcagggtttccttgccaggcatttagttctgcaggacataggcacggtttcagcgataccagaggaacacttttttttgaaatagaacgaattttaaaatttcataaaccaaagtcatttatattggagaatgttgaaggtttagtaaaacacgatcttataaacaaacatgacgatattggttatacattaaaaactatcttagatagattaagagttttaggttataaagtttcttggaaagtattgaatagtctggactttggattagcacaatctcgaaaaagaatatttattgttggtagtaaagttgaatatattcctttaa

SEQ ID NO: 227316 - DNA, 841 bp, Unknown
  Bacterial polypeptide expressing nucleotide sequence isolated from the Sargasso Sea
atgaaaagaatcaaagctttaagtttttttacaggtgcgatgggattagatattggtctcaagaaggcaggaatagatgtaattctagcatgtgaaagtgaaaaattcataagggaaacaattaaattgaataaccctaagcttaaagttttagaggatataaatctttacactcctgaacaaattaaaaaagctgcaggattaaaaaagaatgagaaagttgatttaattgttggagggccgccttgtcaggcttttagcactgctggaaaaagattatcaatcaatgaaaatagaggggttgtttttataaaatttttagaggttataaaaaaattaaaaccaacttattttgttattgaaaatgttagaggcttattaagtgtaccattaaaacacgtgcctcacagaaaaagaaaaggaaaactaaaacccagagaagaaaagggtggaacacttaaattcattttagattatcttaataagtgtggttacaaagtaagttttaatttatataactcagcaaattttggtactcctcaagttagagaaagaattgttatagttgggaacaaaaaagaaaaattaccatatctctctccaactcattcagagcatggaaattatggtttaaaatcttggaatacatttaaatcagcggttaaaggtttacataatatcaatcatgattttgtaaagtttcctgaatatagaattaaatattataaaaaaattaaagagggacaaaattggaaaagtttacccatttcattacaaaaagaagctttaagtagttcttattttgcgggtggaggcaagactggatttttaaggagattag

SEQ ID NO: 227317 - DNA, 226 bp, Unknown
  Bacterial polypeptide expressing nucleotide sequence isolated from the Sargasso Sea
tctgcaagatactataaagatggatcagaaattttaatagatagaggaaaaaataatgaaccaagaaaattaacacctcgggaatgtgctaatcttcagggatttccaagaaaatttattgttagtgaatcaagcactcaatcctacaaacaatttgggaatagtgttcctataccagttgtgaaaagtatattgatagaaatgattaaaagtattggtctataga

SEQ ID NO: 227318 - DNA, 352 bp, Unknown
  Bacterial polypeptide expressing nucleotide sequence isolated from the Sargasso Sea
atgacaaagaattttatagatctttttgcgggcattggaggatttcatctggccattcacgatgatgaatggaattgtgtttacgcttctgaaaatgacaaatatgcaagagaaacatataaaaaaaactttgaagatatttctccttcaatttttaataatcaattatttaatgacgatattttaaaggctaacccaaaagagattccaagtcataatcttctttgcgcaggatttccttgccaacctttttctcaggctgggtataaaaaaggtttctcagaggaccttgagaaaagaggaaatatgttttttgtaattagagatataattgctgaaaaaagaccagatg

SEQ ID NO: 227319 - DNA, 463 bp, Unknown
  Bacterial polypeptide expressing nucleotide sequence isolated from the Sargasso Sea
cacaaaaaaggttttgaagatacaagaggaacactcttttttgatatctgtaaaattattgaaaaaaaaaaacctaaagttgttgttttagaaaatgtaaaacatttcattaatcatgataaaaaaaggacattaaaaaaagtaatccaaagtttagaacaccttggatacaatgttgtgtttaagttattaaatgcaatagattttggattgccccaaaacagagaaagaatatttataattgcttcaaaaaaaggtgtttttgattttgatttattaaaaaagaataaatccaagcaattaggagattttttagaaaataaagaaaattatgaatatctgaaaaaaaaagagtacacgatgatagataaaaaatttgttaaagaacaagagtcaggtttaatttttgttggttatagaaataaaaatggtttttcaaaaggtattagagaaggaacaaaac

SEQ ID NO: 227320 - DNA, 412 bp, Unknown
  Bacterial polypeptide expressing nucleotide sequence isolated from the Sargasso Sea
aatgtactacccaggaaaggaaaaaaataaatcaaatttagacaaatgcaaagtatctaatcatgaatatatgattggtggtttctcaacaatatttatgtcaagaaatagagtaagagcatgggatgagcaatcatttactattcaagcgggaggtagacatgctccaatccaccctcaggcacccgaaatgatatttgtagaaaaaaataaaagaatatttgttccaggaaaagaaaaactatatagaagattatctgtaagagagtgtgcaaggatacagacttttccagataattttatttttgattatgacaatatagcagatggatataagatgattggcaatgctgttcctgtgaaatttgcagaagttttagcaaatacaattaaaaaagatctcaatttatga

SEQ ID NO: 227321 - DNA, 346 bp, Unknown
  Bacterial polypeptide expressing nucleotide sequence isolated from the Sargasso Sea
ttttctggtggagggaaaactggactcgctcgtaggttgtcttgggatgaaccatccttaacacttactgcgccccctgctcaaaaacaaacagaaagatgtcaccctaatgaaacaaggccattaacttttagggagtatgcaagaattcaaacctttccagatgagtggcaattttgtggttctctttcaagtatttataaacaaattgggaatgcagtcccggttaatttagcttatgccgttggtcgttcattaataaatctgcttaatgaaattgaaaatcatgagatgcaaaaaacaaatttaaaagagttgaactttaatgatttaaaagcatcctaac

SEQ ID NO: 227322 - DNA, 757 bp, Unknown
  Bacterial polypeptide expressing nucleotide sequence isolated from the Sargasso Sea
aaataattcttgtagagaagtttacaataaaaactttaagaaaaccaaagcttgggctgatataaaattaattcctaataaattgattaataaaaaaatacctaatcacgatattttattggctggatttccctgtcaaccattctcacaagctggtattgtaaaaagaaattctttaaataaaagtcacggctttaatgacaaaaatcaaggcaatttgttttttaatatattggatatcattaatattaagaaacccaaggcattcttgctagaaaatgtaaagcatcttgctaattacaacgaaggtaaagtattaaaaaaaattctatcttctcttagaaaaaactattttgttcctgatcccaaaattcttaatgcgcgtgattttggtttagctcaaaaaagagaaagaatttacatagttggttttttaaaaaatctacatttcaattttgagtatcctcaaccattgaatacacctacaaaagtagaagattttttagaaaaagatattaatagttcatttactatttctgacagattgtggaacggtcacaaaaaaagaagaaaaagaaataaaaaaatggggaagggttttgggtataaactaacctatcctagtgacagttatactagaacaatttcttctagatactataaggatgggggagaatgtttaatttataggggaaaaggaaaaaatccaagaaaacttactccaagagaatgttttaatttacaaggatttccaaaa

SEQ ID NO: 227323 - DNA, 920 bp, Unknown
  Bacterial polypeptide expressing nucleotide sequence isolated from the Sargasso Sea
aatgaagaatcttaaagctttaagtttttttacaggtgcaatgggtttagacttaggtttaaaaaaagcaggtattgaaattatattagcatgtgaaagtgaaaaatttattagagatacaataaaattaaataatccaaaattaaaagttctagaagatattaatttatattcagcaactgatatcagaaaagccgcaggtttaaaaaaaaatgaaaagatagatttgattgttggtggccctccatgccaagcttttagtacagctggaaaaagattatcaataaatgaaaataggggagtagtatttataaaatttttagatttaattaaaaaattaaatccaacatattttgttattgaaaatgtaagaggattattatctgttcctttaaaacatgttcctcatagtaaacgtaataaaaagcttaaaactgttgaagaaaaaggtggtactttgcaatatattttaagctatttaaaaaagtgcggataccaagttagttttaatctttataattctgcaaattttggaacacctcaaatcagagaaagagttgtcatagttggaaacaaaaaagaaaagttgccatacttaactccaactcattcagaaaatggtttatttggtctaaaaccatggaacacatttaaatccgccgttaaaggacttcataatataaagcatgaacatgtaaatttttctaaagatagacttaaatatttcaagaaaatcaaagaaggtcagaactggaaaagtttaccaaaatctattcaaaaagaagcaatgggcagttcttattttgctggtggaggcaagacaggattttatagaagactagggtggaacaaaccctctccgacattagtaactgacccaactatgccagctacagacttaggtcatcctgataagaata

SEQ ID NO: 227324 - DNA, 374 bp, Unknown
  Bacterial polypeptide expressing nucleotide sequence isolated from the Sargasso Sea
aatgcattctgccaaaaatcataacgagaaacaactgtcattaattgatggctcaaaattctcttacaccaacaaaaaatacgattttgaaaatcgatttagttttatagatttatttgctggtattggtggttttagattgggcttggaagcattagatataaattgtcttttttcatctgaatgggatttaaatgctaaaaaaacttaccaaaaaaattttggtgaattgccccatggagatataaacgatgtgaaaatagaaacaattccgaaatttgatattcttacagctggttttccttgtcagcctttttctaaaattggaatgagacagggttttaaacacaaactcaaggtaatttattttttaa

SEQ ID NO: 227325 - DNA, 733 bp, Unknown
  Bacterial polypeptide expressing nucleotide sequence isolated from the Sargasso Sea
atgtttacagttggtggattattttcaggtattggaggaatagaattaggttttgaaaaagcaggttttaaaatcctatggtcgaatgagaacgatgagaattgtaataaaacatataagaataactttaatcataaattatatactcaaagcataaacgatattaattttagaaaagtaaaacctgtagatttgctcgttggaggttttccatgccaagcattttcagttgctggttatatgaaaggttttaaagatgaaagaggaaatttattctttcaaatatgtagagcaatagaagagcttaaaaaaaaacctaaagctttaatgttagaaaatgttaaaaatctaacaggtcatgataaagggaaaaccgcaagggtaattgtaaattcactaagagaacttggatattcagttttttggaatgtttttaacacctctgtacataccgatataccacaaaatagagaaagaacttttattatttgctttagagatgaagctgactgggaatttagtaataaagtaacttgtagcaaaaaacttaatgatcagcttcctttgccaaaaaacaaaaaaaagaaaaattttagaaagcttctagaaaacagagaggttgaagatagattttattacaaacaagatgcttatatgtacaaagaacttaaaaaagcaatagtatctagagatactgtttatcagtggcgaagagtttatgtgagggaaaata

SEQ ID NO: 227326 - DNA, 559 bp, Unknown
  Bacterial polypeptide expressing nucleotide sequence isolated from the Sargasso Sea
ttggcatataagtacaaaactggaggattatttagtggggttggaggttttgaacttagtttttcacaagctgggtttgagaataaatgggcaatagaaaatgatcagaatgcggcaaaaacatatcggcacaatttttcagatcattttttactagaaaaagatataaaatcaatatcatctaaagaaataaaaaagctaactaatatagatattcttttagctggatttccttgtcaggctttttctgttgcgggttatagaaaaggttttaaagatccgagaggcaatctctttgatgagattattagatttgtcgaagaattgcaaaaaaaaccaaagattctggtattagaaaacgttagaaatttttatggacatgatggtgcaaatacgtggaaatatgtcagagaagcattgcaagaacataattattcacaaattccgatgatcctaaatacttcaacatcaactggaatacctcaaaatagagagcgagcatacattgtatgttttattaacgaaccacaagtaagttatgaaatcctagaaatttaat

SEQ ID NO: 227327 - DNA, 598 bp, Unknown
  Bacterial polypeptide expressing nucleotide sequence isolated from the Sargasso Sea
aggtttaaggtctcatgatcaaggtagaacacttaatattatattagaggttttaagaaatgatttgtcttatttcgttccagatccaaaaatattaaattcaaaagatttcggattgccacaaaatagagaaagaatttttattgttggtttttttaaaaagaataattttacttttcccgaacctcttaaatttaaaacaagagtatctgatatcttaaatccaggtcgtactccaaataaatattttatttctcaaaagttatgggatagtcatagagcaaggaaaataaaaaaccaaacagctaaacctaaaaaaggttttgggtataagtcagtaatttcaagcgatgaatatacaagcacaatatcggcaagatattataaagatggggcagaaattcttataaagagaaaaggtgagcctgaagatatacccccaaggaagcttactccggatgaatctaggcaattacaaggttttcctgatggttttgtcctcaataaaagtgatattcaagcatacaaacagtttggaaacgcagtatcagtgcctgttatcagagaaatatcgaagtctataataaaatatatatag

SEQ ID NO: 227328 - DNA, 703 bp, Unknown
  Bacterial polypeptide expressing nucleotide sequence isolated from the Sargasso Sea
tattggtggaccaccctgtcagtcttggagcgaggcgggcgctcttcgaggtatagaagacaaaagaggacaattattttttgattttataagaatacttaaggcaaaaaaaccaaaatttttcttagcagaaaatgtctctggaatgctggcagcaaggcattcagaagcacttaaaaatataattaaattatttgaaaaaagtggttacaacgtaacttataaactccttaacacaagtgattttggagtcccgcaagatagaaaaagagttattttcgtaggttatagaaaagatttgagaattaaatatgttcatcctgagtccacaacatcttcaattgaaaaaaaactaacgttaaaggatgccatctgggacctaagaaaaaatgcacttccgggaaaggaaaaaaataaatcaaattttgacaaatgcaaggttcctaatcatgaatatatgattggcggtttttcgacaatatttatgtcaagaaatagagtgagagcatgggacgatcaatcgtttaccatacaagcggggggaagacatgccccaattcatcctcaagcacctgagatgatatttgttgaaaaaaataagagaatatttgtgccaggaaaagaaaaactatacagaaggttatcagtaagagagtgtgccaggattcagacttttccagataattttatttttgattatgaa

SEQ ID NO: 227329 - DNA, 584 bp, Unknown
  Bacterial polypeptide expressing nucleotide sequence isolated from the Sargasso Sea
aggaaatactcttaaaacaattttgaaagttttaagggaagattattatgtgccagaacctcaagtcttaaatgcaaaagattttggtttaccacaaaatagggaaagaattttcataattggatttaaaaaaaaaggtacctttaattatccaaaacctaacaaaaataaaactgttctaggaaatattttagagaaaaatcctatggaaaaatacactatatcatcaagattatggtcgggtcataaaagaagaaagagagatcataaaaaaaaaggaaacggttttggatatggtttgtttgatctcaaaagtagttatacaaacactatttcagctagatattataaagatggtagtgaagttttgatttcaagaggtaaaaatagaaatccaagaaaacttaccgagcgagaatgtgctagattacaaggatttccagaaactttcaaaatacctgtaagtacagtgcaggcttataaacaatttggaaatagtgttcctgtaaatgtaatagaggctataagtttaaaaataattgaatatttaacattaaataaagctaggaaaaaagttgcttaaa

SEQ ID NO: 227330 - DNA, 435 bp, Unknown
  Bacterial polypeptide expressing nucleotide sequence isolated from the Sargasso Sea
aatgaaaagaatcaaagctttaagtttttttacaggtgcgatgggattagatattggccttaaaaaggcaggaatagatgtaattctagcatgtgaaagtgaaaaattcataagggaaacaattaaattaaacaacccgaagcttaaagttttagaagatataaatctttacactcctgagcagattaaaaaagcagcaggattaaaaaaaaatgagaaagttgatttaatagttggggggccaccatgtcaggcttttagcactgctggaaaaagattatcaattaatgaaaatagaggggttgtttttataaaatttttagaggttataaaaaaattaaaaccaacttattttgttattgaaaatgttagaggcttattgagtgtaccattaaaacatgtgcctcatagaaaaagaaaaggaaaactaaaacc

SEQ ID NO: 227331 - DNA, 874 bp, Unknown
  Bacterial polypeptide expressing nucleotide sequence isolated from the Sargasso Sea
actgacattgaaaatgtcattgatgatgtccccgagatggacatcatttgtgcgggatttccctgccaaccattcagcaagtctggttcgcaagaaggcttcaaggatcaaacacgagggactctattccatgatatctgctcattggcagagattcacaaacctgcagtaatgttcctagagaatgttccgaatcttgttgcccatgataatgggaatactatgagagtgattgagtctcgaattacagagttaggttacaagcattggtggaagattctctctcctcacaattatggaacctgccaaatacggaagagagtgtacattgtttgtattagggatgatttggtacaagaattcgatttctcatttcccaaagagaggagtttcgaactggatattcgtactgtgctagacgagtctgtagatgccaagtatgacttgaccgaggatgagatttactggctcgacatgtgggaagattttctgaagaatgtcaatacagagactaaattacccggccatccaatttgggctgactgtttccaaggaaaggaggaaatcccaggcgacctcgagcaatatgatgagaatcaactcctagaaattggtaacgaatggagaaattacggatgggttaagccagtcagtcgagaaatgtcaaaggaacagatgattaaagcaatcaatttacctctttggaagcagaatttcatctccaaaaacagactactttttgacgaaaataaacaattcatcagtgattggctgaagaagtggaaagttctagattcggacgaagagggtaagccattcattccagtaagtagaacgaaatacgaatggcaagcaggtcccgagagccgaacaa

SEQ ID NO: 227332 - DNA, 743 bp, Unknown
  Bacterial polypeptide expressing nucleotide sequence isolated from the Sargasso Sea
cattgcaggtgtatccaaaaagaatgcactgggaaaatcacatggcttcttagataaaacacaaggaacattattttttgatattgcaaaaattataagtaaaaggaagcctgatgcttttttgttagaaaatgttaaaaatttaaaatatcataacaaaggtaacacttatcaaacaataatggatactcttgataggttacattatgaagttgaaactcaaattatagacgcaaagaattttgttcctcaacatagagaaagaatatttatcataggctttagaaaaaaatacaagcataaattcacttttcctgagataaaacaaaaacaatattcaatcattaaatatttagaacatgatattgataaaaaatatactttaacatctaatttatggaaatacctcaaagcatataaaaaaaagcataaagcagcggggaatggttttggatatggattgattgagccgggtatagataatcatacaagaactataagtgcaagatattataaagatggagcggaagccttgattagtagaggaaagcatgctcgccctagaaggttgactccaagagaatgtgcaaatcttatgggattccctaaatctcataattttgctggggtatctgatacagaagcatacaagcaatttggtaattctgttgttgttcctgttgctactgtattggctgaagcaatagtagatcagttgaagttattgcaaatcaaaacatagt

SEQ ID NO: 227333 - DNA, 658 bp, Unknown
  Bacterial polypeptide expressing nucleotide sequence isolated from the Sargasso Sea
aggttataaagttcatacaaaccttattaactcagcagaatatggtgttccacaaacaaggaaaagatttttctttgtgggtgttaaagaagattatgaatggttatttccacctaaaacacactctaaagaaaactttgttaccgtaggtgatgccatcttaggagatcttccttctttagaaaataatcaatcaaaaaatagttataaggatgctccaaaaaatcctcttcaacaaacacttagaaaagattgtaaagaactaactaaccatctatctcccaatcatcctcaagcaacaatagatatgataaggaacacaaaacctggtgatccaatgtacaaaagatttaaacaaagaataagattaaatagaaagtgtcccagtccaacacaagtatgtggtggtattcgaccacaatttcaatttggtcacccaactcagtcaagaggtctatcaatacgagaaagagcgagaattcaaacttttccagacagttatgtgtttatgggagggattactcaaggaagggtccaaactggaaatgctgtgccagttttggttgctaaagcattgtccaaacaacttaaaagaatgttcgaaggaaagagattaaaaggcgacaaagggaatctaatgcaaggcgatttgttttaa

SEQ ID NO: 227334 - DNA, 852 bp, Unknown
  Bacterial polypeptide expressing nucleotide sequence isolated from the Sargasso Sea
attcatagacttattcgcaggcattggagggtttcatttagctcttcatagcttaggtgcagagtgcgtttatgcttcagaaattgatgaatatgctagaaaaacctatgaggctaattttaaaagaaaatcacctaatctcttcaaaaaaaattacaaacgtttcaataaagatattttaaccgaagattacgcaaatattccaaattttgatttgttgtgtgctggatttccatgtcagccatttagtcaagctggacacaaaagaggttttgcggaaaactatgagtcaagaggaaatatgttttttgcaattagagatataattaaagaaaaaaaaccaaaggctatatttttagaaaatgtgagacatctaaaaaatcatgatgacggaaatacttttaaggtaattaaaagtactattgaaaatgacttaggatatagttttaattatcaaataattaaagcatcagattatggattaccacaacacagaccgagaatttatattgttggatttagagatgaaactacagacgaaagtgattttatatttccaaaaaaaatacccctaaaattaagtatgtcagatatatttggtgccaaatgcaataaagatattggatttacattgagagttggtggaggaagatctgctattgatgatagaagaaattgggatggatatattgttaaaaataaagttgtaagactctcttcaaatgaaggaagaaaaatgatgggtttaccaaataattttaagtttcctgttacagagaatcaagccatgaaacaactaggtaatagtgttgcagtaacagcggtaaaacatacatcaaaacaaataataaa

SEQ ID NO: 227335 - DNA, 753 bp, Unknown
  Bacterial polypeptide expressing nucleotide sequence isolated from the Sargasso Sea
aaaaattgattttaaaaaattaaaacctgttgatattttagtgggaggttttccttgtcaggctttttcagtcgcaggttatcaaaaaggctttaaagacccaagaggaaatcttttttttgaaatttgtagagcaattacagaattacccaaaatgcccaaagtaattatgcttgaaaatgtaaaaaacattagaggacatgatggaggcaaaactgcaaaggtaataacaaagtcattgagagatttagggtattcagttttttggaatgtgtttaatacttctgtccacacggatattcctcaaaatagagaaagaacctttattataggatttaaagatgaagctgattgggactttgagccaaataaaaaaacatctagttcaatatttaattcttatttacctttaacaaaaagcaaaactaaaaagaagtttagagatatgttggaggttggtgaggttgacgagagatattattataaacaaaacgcttacatgtataaggatttaaaaaaagccattacttcttcaaatactgcttatcaatggcgaagagtttatgtaagagaaaacaaaagtaatgaatgtccaactttaacagccaatatgggtacaggaggacacaatgttccattaattaaaaatggtttaggtataagaaagcttacgccaagagagtgtttaaattttcaaggatttccaaaaagttttaaattcccagatgatatgccagtttcacaaagatataa

SEQ ID NO: 227336 - DNA, 704 bp, Unknown
  Bacterial polypeptide expressing nucleotide sequence isolated from the Sargasso Sea
aatgtataaagttggcggacttttctctggggttggtggtattgaacttggttttgaaaaagcaggttttgaaattgcttgggcaaatgaaattgataaaaactcatgtgttacctatagaaaaaacttctcacataaattgtacgaagaggatgtaagaaaaattaaaggtaaagaccttaaacctgtagatgttttatgtggtggtttcccttgtcaggcattttcaattgcaggatatagaaaaggttttgatgatgacaggggaaatgtattctttgaaatcattagacttattaatgaattaaaaagaaaaccaaaagttctatttttagaaaatgtaaaaaactttaaatctcatgataagggtaaaacttttcaaaccgtcgttaatattattcaggataatggttattcagttttttttgatgtgttaaatacctgtgattacacgccaatacctcaaaatagagaaaggactttcttgatctgttttagaggtgagcataattgggaattttcaaaaaagaaaaatttagttagtagagaatttgctaaaaggtttcctcccaaaagagtcaaaaataataaaggtatccaagagttccttgaatcaggtgaagttatggagaacttctattacagacaagataaatatatgtatccagaactcagaaagactatgaagtcaaaagatactctct

SEQ ID NO: 227337 - DNA, 469 bp, Unknown
  Bacterial polypeptide expressing nucleotide sequence isolated from the Sargasso Sea
atgaataaaaaattaaaatttattgatctatttgctggcataggaggatttcatctagctttaaaatcgttaggaatgaaatgtgtttttacatctgaaattgatgaatttgccagaaaaacttattcatcaaattttaatgacagatacttaactgatcccaatttatttactggtgatatttggaaagtagattttaaaaagattccagattttgatattttgtgtgctggctttccgtgccaacctttttcacaagctggtcataaaagaggatttaaagacaataaagatggtaatttatttttttcaattgaagaaattttaagaattaaaaaacctaaagctttttttttagaaaacgtaaggcatttaaaaaaccatgatgagggtagaacatttaaaataatatacaaaacacttcaaaaacttaattattcgtttgattataagataataaaagcttcaa

SEQ ID NO: 227338 - DNA, 884 bp, Unknown
  Bacterial polypeptide expressing nucleotide sequence isolated from the Sargasso Sea
gaaagaggcgccagattgtgatggtattatgggggttcctccttgccaaagttggagtgaagcaggtgctttgagaggtataaacgattcaagaggacagttattttttgactacataagatttataaaagaaaaaaaaccaaaattttttcttgcagaaaatgtttccggaatactattcaatagacattcagaggcactcaataatatattcgatcattttttaaagattggttataacgtttctttcaaacttcttgatgtaaatgactatggtgtccctcaatcaagaaagagagtgatcattgtagggtacccttcaagttatgaggatttttttactcctcctgaagcagaggattacaaacccacactaaaagatgccatcttccatttaaaagataacgtcgttcctgcgcttaagaaaaataaaactaaccctaaggtcaaaattccaaatcatgagtatatgattggtgacttttcctctatgtacatgtcaaggaatagagtaagaggttgggatgaaccttcttttacaatccaagcaggaggtagacatgctccatgccatcctcaggccccaacaatgaaaaaaattgaaaaagataagtgtagttttgtttccggaaagaaaaaattatatcgaagattatctgttagagaatgtgcagcaatacaaacctttcctgataactttgtgcttgagtacactcaggtagctgatggatataaaatgattggtaatgctgttccagttgagttctccaaaaaattagcccttaaaatcaaaaaagatttaaaaagatttgataataaaccaatcaattttaaaaaaagaggaattctaattaatttgaataatccgcaaaaaaggaattgaa

SEQ ID NO: 227339 - DNA, 307 bp, Unknown
  Bacterial polypeptide expressing nucleotide sequence isolated from the Sargasso Sea
tagagtaagaaattgggatgaaccttctttcacgattcaagccggaggaagacatgctccaatacatcctgacgctccaaaaatgacaaaagttgaaacagatttatttcaattttgtaagaaaaatttaaataaatatagacgcttatcagttagggagtgtgcaaggatacaaacatttccagatgaatttgttttcttttatgaacaagtagctgatgcttataaaatgattggtaatgctgttccagtaaaattagcagagtctctagctgttgaaatcaaaagccagctctttgcttcctaa

SEQ ID NO: 227340 - DNA, 610 bp, Unknown
  Bacterial polypeptide expressing nucleotide sequence isolated from the Sargasso Sea
aatgcctgaaatcacaaatactaacgagccactctccgatcagttagatttaattaactttactaaaactagttggttcaaaaaaaaacttactaacccaaactctttaattcaaataggaacattattctccggcatcggtgcagtcgagcatgctcttaagcgtatgaaaattaactatgaagttctttttgctggagatgttgataaaaaatgtagggagtcatatttctctaactataagatcagtgaagctgattggcattgtgatatcaatgagtttggagcaaaaaagttcaagcataaagttgatttactggttggaggcagcccctgtcaggcattttcaacggttggaaacaggcagggtttaagagatccaaggggatctcttttttatgaatttgcgagagtagtaaaagaatgtcttccaaaaatattcatctttgaaaatgtaaaaggcttagttaaccacgatcagggggctacatggaaaacgatgaaggaagtatttaaaaatgaacttaaatataaaattaactttgaaacattaaatagtaaacattatggaattcctcaaaacagggagaggatatttgttgtaggtttc

SEQ ID NO: 227341 - DNA, 307 bp, Unknown
  Bacterial polypeptide expressing nucleotide sequence isolated from the Sargasso Sea
atgggatttagatttattgatttatttgcgggaatcgggggggtcagaatcgcatttgaggcagctggcggaaagtgtgtgttttcatcggagtatgacaagtatgctcaactgacctatgaagctttttttggagagaagccagattttgcggaaataaaggctgttgatcctccaggggatattacccaacttgaaccggagcttgttcctgaccacgatgtccttgttgctggttttccatgccagccattctcttgcgggagttttctgtcactgatgaagagttgtgttattattacttagc

SEQ ID NO: 227342 - DNA, 334 bp, Unknown
  Bacterial polypeptide expressing nucleotide sequence isolated from the Sargasso Sea
tatgaaaagaatcagagctttaagtttttttacaggtgcaatggggttagatattggccttaagaaggcaggaatagatgtaattctagcatgtgaaagtgaaaaatttataagggaaacaattaaattgaataaccctaagcttaaagttttagaagatataaatctttacactcctgagcagattaaaaaagcagcaggattaaaaaaaaatgagaaagttgatttaattgttggagggccgccttgtcaggcttttagcactgccggcaaaagattatctattaatgaaaatagaggggttgtttttataaaatttttagaggttattaaa

SEQ ID NO: 227343 - DNA, 193 bp, Unknown
  Bacterial polypeptide expressing nucleotide sequence isolated from the Sargasso Sea
ttcgttgctggtaaagaacatctttatagaagactctctgtaagggagtgcgcaaggattcaaactttccctgatgactttatttttgattatgacaatgttgctgagggatacaaaatgattggtaatgccgttccagtggattttgcaaaaatccttgcagatcaaattaaatctgatctaggtttataga

SEQ ID NO: 227344 - DNA, 555 bp, Unknown
  Bacterial polypeptide expressing nucleotide sequence isolated from the Sargasso Sea
aatgaaaaataaaccaaaagtcatttcattatttacatgtggaatgggaatggatattggatttgaaaacagtggttttcaaacaatctatgcaaatgacataacagaatttgcatataatacaatcaaaaaaaataaaaaaaacattgcttgtgatttaggtgatataactaatatttcttccaacgaaattaaaacaaaatctggcctaaaaaataaattgcctgatgtggttattggaggcccaccatgtcaaagtttctcaactgcaggattaagaaaaggaatagaagataaaagaggtattgccctttttgaatttattagaataatcaaagatctacaaccaaaattttttgtttttgaaaatgtacctggtttgttatctattgcgaaaaaaaatatcggattttatgatagaatttcaatggataaatcaaaaatcccagatgaaagtaaacgtggttcactctttgaggaaatcctcaaaaaattctatgaatcattagaaaactatcgaattagcgaacctactattgttaatgcagctgattt

SEQ ID NO: 227345 - DNA, 484 bp, Unknown
  Bacterial polypeptide expressing nucleotide sequence isolated from the Sargasso Sea
gatgtacaaggtaggcggattattctctggagtcggcggtattgaacttggatttaaaaatcaaggatttgatatacgctgggcaaatgataatgatattcattgttctaaaacttataaacttaatcataaacataagtatattctgagagatattcataaattaagtgcttcagaattagaatctgtagatgtcatgactggaggttttccatgtcaagcattctcagttgctggttaccgaaaagggttaaaagatgaaagaggcaatctcttttttgaaattctgagacttatcgatgaatttgataatccacccaaagtattacttcttgaaaatgtaaaaaacttttctactcatgacaaaggtagaactctcaaaattttgagagaacaattagaagggcgtgattattgtgtttttactcatgttctaaataccgcagactatacttcgattcctcaaaatagagaaagaacattt

SEQ ID NO: 227346 - DNA, 1117 bp, Unknown
  Bacterial polypeptide expressing nucleotide sequence isolated from the Sargasso Sea
atgaatgttttagatttgttttctggttgtggaggaatgtcattagggtttgagtggggtggatttaataccgtattagcaacagatattgatataaatgctaaagaaacatacgtttttaattttccaaatgttccttttatcaataaagatttaaaagaagttctgaaaagtgatattgataaattattacaaaataaaaaagttgatgttgttattggaggaccaccttgtcagggttttagtttagcaaataaaaaaagaaataaaataaaagacgatcctcgaaacaagctattctatgaatttttaaaagtggtcaactggtataagcctaaagcattcgtaatggaaaatgttaagggtcttttgtcaatgaaaaatggcaatgtaatcaaagttattttaaaaagcttcgaggatattggatataattctgaatacaaaattttaaaagcttctgactttggagttccacaaaatagagagagggtttttgtaatcggttatttaaaaaaaattggtcttaaagtcgagtttcccaagcctacagtaaaaacctatatttcagttgaagaagcaatttctgatttacctataattagtgctggtgaaggagccgataaggttaattattctatggaacctgttaactcgtatcaagaatttatgaggctggattctaaaaacgttcataatcacgtagccatgaggcacacacaaagattagttgaaaggttcaaggctattactaacggtaaaagcttagttgacgtctgggaagaacatggatcggtatcaagaggtaatcctagtcagaagtctaaaataaaattttcacaaaataattatagagttcatcctaacaaacctgctccaactatagcagcatcttttcaaagtaattttattcacccctatttgcacagaaattttactgccagagagggagcgagattacaatcttttccagattgctttgaatttaaagggatgcgcactaaaatgagttgggaaaagggattaagtcaataccagcaaattggtaatgctgtgcccccattgttagcaaaagcaatagctaaagagatatataaaaaaattggcaatgtgtgat

SEQ ID NO: 227347 - DNA, 976 bp, Unknown
  Bacterial polypeptide expressing nucleotide sequence isolated from the Sargasso Sea
atggagaagagaagtttcatagatcttttttgcggggtcggcgggtttcgccaagctcttgagtcccacggtcatggttgcgtcttctcatccgacgtcgatcccgacgcccgctttacctatgccgagaatttcggggaggagccggcaggggacctgacgcagattcccgggaaggaaatccccccccacgacgttctttgcgggggcttcccctgccagcccttcagcatctcgggaaaccaaggtggattcgaggatgccagaggaaccctcctttacgagatcctgcgcattgcccggcatcacaaacctgccgtcctccttctggaaaacgtcaagaattaccttgggcacgccaaggggcggaccttgtcgatcaccatcgagctgcttgcatcgcttggttatgaggttcactattccgtactgaatgcctcccgctacggggtggctcagaagcgcgagcgcatctatttcgtctgcttccgcaaggacttgggcatatccgattatcgattccccgagccctcggaccaggacgtcgcggttgaggacgtgcttcttccgccggccgacccgaggctgaaggagctcgtaatcgaacgggaggacctttttctctcctccgagttcccgcaggaacgggaaaaccgtcccttgcgcatcggcaccgtaggcaaaggaggccaaggggaacgagtctacagtcccaaggggcatgccatcaccctttccgccttcgggggagggatcggcgcgaagaccggaatgtatctggtcgacggtctcgtcaggcggcttcaccccgaggagtgccgccgcttgatgggctttcccaagggtttccgccttcatccgcgtcgcaacgtctgctacaagcaattcggcaattcggtggccgtcccggtggtccgagaaatcgtcgccacgatcgaccggttcctcgacgggcaatcccggcgggccgcctgac

SEQ ID NO: 227348 - DNA, 808 bp, Unknown
  Bacterial polypeptide expressing nucleotide sequence isolated from the Sargasso Sea
atgttaaaatttattgatttattcgctggcatgggcggaactagagtcggcttcacacaagcttgtaacgcttatggtttaaaggccgagtgcgttttcacatctgaaatcaagccatatgctgttgacctatacaaacacaatttcaataacgaagaggtttacggcgacataactcaaatcgaagcaaaggatattcctgattttgattttctcttaggaggttttccatgccaagcatttagtaccgcaggtaaaagaatgggttttaatgatacgcggggcacacttttttttgatgttgcgagaattttaaaagaaaaaaagccgcaagggtttctgctagaaaatgttgaagggcttgtaacgcacgatagagaaaataagactgatcgaactggaaggactctaaaagtaattattgctactttagaagagcttgggtatcacgtttcttggaaggtccttaatgctaatgatttcggtgttcctcaaaaccgtaaaaggatctacattaccggtaccctaaatggcacacccgacttatcggaattcaaggcttttcacaaaacactggaggatatcctggagagagggttgccttgtgagaagactcagtttcgcgaaaaacttttatctttgtacacaaaagagcagctctatggaaaggccataaaagataaacgtggaggtcgagataatattcatagttgggacttggagttgaaaggaccagtttcaggtgtccagaagcagctcatgggctcgcttcttaaagcgagaagacaaaaaaagtggcacaagaaat

SEQ ID NO: 227349 - DNA, 1150 bp, Unknown
  Bacterial polypeptide expressing nucleotide sequence isolated from the Sargasso Sea
atgtctgaatttgattcccttgcggaagagctggtggaagaggcacgtaatgaagaggccagacaacagcaaagggacctgtcactgatagggaaagtccttgaaatctatgatcagaagtttgttgccgaacttctgcgtaagctgggaaattcagactggaccagggagaccctgaaccgctggattaacgggaaatgtgggcctcgttcacttactgtaactgaggcatcgcttcttgaaagactgctcccgcagccgccagctaaccatcccaattatgcttttcggttcatcgatctcttcgccggtatcggcggtatccgtcatgggtttgaagccattggcggccagtgtgttttcacaagtgaatggaacagctattcagtcaaaacttataaagcaaactggtattgcgatcccgaagcgcatatcttcaattctgacatccgcgatgtgaccctcagtcataaagaaaatgtcagtgaagaagacgcctacgcccacattgataaatcgatacccgatcatgatgttctgctggcgggtttcccgtgtcagccatttagccttgcaggtgtgagcaagaaaaactcacttggccgtaaacacggttttgaatgtgatacccaggggaccctattctttgatgtggctcgtatcatcatggcaaaaaaaccggccatctttgtactcgagaacgtcaagaacctcaaaagccatgataaagggaaaactttccgtgtcattatggataccctgaatgaactcggttacgacgttgccgatgctgaggctacaggtgcggatgatccaaaagttatagatggtaagcatttcatccctcagcaccgggagcgtattgttctggtgggcttcagacgtgacttgaatttaagtcagggatttagccttgctgacatttcttcgctgtttcctgaaagaaaagtattgttcagagagcttcttgacagtgatgttgatgataaatacacactaacgccaaagctgtgggattatctctataaatacgcgaaaaaacaccaagagaaaggtaatggatttggttttggcctggttaaaccagacgatgataaagctatttccagaacaatatcagcaagataccacaaagatggaagtgaatcgc

SEQ ID NO: 227350 - DNA, 1033 bp, Unknown
  Bacterial polypeptide expressing nucleotide sequence isolated from the Sargasso Sea
tcttgatcttttttgtggttgtggaggattttctcttggttttaaaagagaaggtttcgaaattattgctggtgttgattttgataatgattcaattgagacttataaaaataacattacccgtaatgctttaaagctagatctttcaaaccaagactgggtaaatgagctcaaggataaaattcaagataaacaaatcgatatattgattggtggtccgccctgccagggatttagtcttactggaacaagaatgatagatgaccctagaaataaactgtataaggctttttttgatggaataaaaatttttaatccaaaagcagtcttaattgaaaatgttaaagggatgtccactctttttcgtggggaagctaaaaaaagtattattacggaacttgagaaacaaggttatcaagtgtctgataatattcttaattcagcaaagtatggtgttcctcaatttagagagaggctctttattttagggatgaaaggtaatgaaaaaccaacatttcctttggaacttataaatccggagaattatatatcatcaagcatggctatttctgatttgcctcatttgactgacagtttaggaaatgagaaaatgaattatgaatttcaagctgataattattatcagagattaatgagatataaatccaaactcatccataatcacgttgctacaagtcataaatcttttgtaattgaaacaattaagcaagtacctgatggtggaaattataaagatcttccaaagggtgttggcgaaaatagaaagtttaatgaagcttggacaagatacgatagcaaaaaaccatcccgtacgatagacactggtcatagaaatcattttcattatcaatataatagagtgccaactgttcgggaaaatgcaagattgcaatcatttcccgacatttttattttcagcggttcaaagacatctcaaaatagacaggtaggaaatgcagtacctgtattgctttcacaagcactggcatctcatctcctgaagatactatag

SEQ ID NO: 227351 - DNA, 835 bp, Unknown
  Bacterial polypeptide expressing nucleotide sequence isolated from the Sargasso Sea
tatgaataagaatcaaaagttacccttagctatagtcgcagatattcttggaacaagtaagaaagttgtagatagttggtcagataaaaaattaaaagcaattattgataaaaaaactggtaaaaagtacttccacatagatgagctaaggtcgttcccaagtgcaagttttctttttgaaacaaaatggggagaagaggaaagaataaagcctagtagaaattacaaaattattgagttatttgcaggagctggaggtctggctctaggtcttgaaaaagcaggttttcaatccttgttattaaatgaaatcgatcgagatgcttgtgaaacactcaaaaaaaacagagtaaattggaatgtgaaaaactgtgatattaaagaatatgattttacgaaatttaagggagaagttgatttattgactggtggatttccttgtcaagccttttcttatgcagggaaaaagttaggtttcaatgatactcgaggaacgcttttctatgaatttgcaagggctgttaaagaaactaatccaaaagtaattcttgcagaaaatgtaaaaggtttagtttcgcatgattcgggtaaaactctagaaactataaaaaatataatcgaagaaattggttatgaattagttgagccaaaaatcttaaaagcaatattttacaaagtcccacaaaaacgagaaagaatttttcttgttgctattcgcaaagacttaagtagatttgtaagtttcaattacccagcgaaatttccaaagatatttacattaagagatgctctcaaaaaaggagatttattcaataaagatgtccccagaaactga

SEQ ID NO: 227352 - DNA, 475 bp, Unknown
  Bacterial polypeptide expressing nucleotide sequence isolated from the Sargasso Sea
gatgtccccagaaactgaaggtcaaatatatcctcaaagaaaaaaagaaatactaagcaaagttcctcaaggaggatattggagagacttaccagatgacttacagagagagtatatgagaggcagttattttcttggtggagggaaaactggtctcgctcgtaggttgtcttgggatgaaccatccttaacacttacttgcgcccctgctcaaaaacaaacagaaagatgtcaccctaatgaaacaaggccattaacttttagggagtatgcaagaatacaaacctttccagatgagtggcaattttgtggctctctttcaagtatttatagacaaattgggaatgcagtcccggttaatttagcttatgccgttggtcgttcattagtaaatctgcttaatgaaattgaaaatcatgagattcaaaaatcaaatttaaaagagttgaactttaatgatttaaaagcatcctga

SEQ ID NO: 227353 - DNA, 664 bp, Unknown
  Bacterial polypeptide expressing nucleotide sequence isolated from the Sargasso Sea
atgttttctgatattgttaaacaaaagcgggaaagtatgggactatctcaaaaagatttcgccaaattaattggtttgaaagataatggtgaacgtacagtaagaggttgggaaaatgaagagcatcttccatcgttgtcaaaacagaacgcaatccttaaactaaaaacaaatgtcccatttaaacaagtatggaatgataaatcgttaaaatcgatagatctttttgctggtattggaggaatgagacttgcctttcaaagaaatggtgtgtgtaatgttttttcttcagagtgggataaatttgctcaaaaaacatatgcagctaattttggcgaaattcctgaaggagatataacaaaaattgcttcaaactctattcctgaccatgatatacttttagcaggatttccttgccaagctttttctcaagctggtctaaaacagggttttatggatactagaggaactttgttttttgatattcaaagaatacttcatgcaaaacgaccaaagatgtttttacttgaaaacgttaaacaactaaagggtcatgataagggaagaacactgaatataattttagaaattctaaagggtaatgagattaatattcctaaaaaagttgaattgtctaaagaaacaaaagaagcattaggatcca

SEQ ID NO: 227354 - DNA, 859 bp, Unknown
  Bacterial polypeptide expressing nucleotide sequence isolated from the Sargasso Sea
atgtggattgaaggaaaagcttccctcactcctaaggaaactgaccgcgtagaaatattacgcggggagttcccattccagtcgagcgccgcagacaacattccaaattttaggttcatcgacttatttgccggtatcggtggacttcgattgccatttcaacagacgggtggagaatgtgtgttctcctccgaatggaatgctgaagccaaaaagacttattacgctaatttctctgaatatcccagtggagatatcacagagattggcgtcgaatcaatcccacgccatgacctgctcgtagccggtttcccatgccagccattctctcaagcaggcttaaagcaaggatttagtgacactaggggaacattgttttttgatatccaaaggataatttctcatcatcgaccgccgatcgttctcctagagaacgtaaaacaattaaagggtcatgaccaaggcaggacgctaaaaaccattacgtctgtcctcgaaggaaatagtgtcgatatagccactaacgagaccacaatatccgttgatgcgactagagcgcagtatcacgttagctggagaatattaaatgccaaggactatggggtcccccaaaatcgagaacgtatctttattctggctctgcgaacagatctattctcgctgtttgacgctgaagcggtcttttcacgaacaaagacacgcacaaaagattccgagaaattaggatcgatattacagcccacatctgaggtcgatgaatcctatacgctttcagacaaattgtgggcgggtcacaagagaagacgagatgaacacgcaaacaagggttatggattcggatatagcctcttcaacaatg

SEQ ID NO: 227355 - DNA, 640 bp, Unknown
  Bacterial polypeptide expressing nucleotide sequence isolated from the Sargasso Sea
ctgtttttcgatatagccagaatccttgaataccataaacctaaagcttttcttttagaaaatgttaaaggccttagaggtcatgacaaaggaaaaactcttcaaacgatagttagagtcttaaataatatggactacaacctttcaattgaagtcctgaacgcaaaatattttggtttacctcaaaatagagagcgaatcttcataattgggtttaaagatgtagttgatttccagtttcctatgcccccgatgacgcctactcgcttaggaaagattctacacaagaacacttcagacaagtacaccatttcagacagactttgggaaagtcatcaaaacaggaaagaaaaggcaaagacaaaaggttatgggtttggatattctctttttaatagagatgcaactcacacaagcactatgtcagccagatactataaagatgggtcagaaatcttaattgaacagaaaaataaaaaccctagaatgctaacccctagagaagcagcaagattacaaggatttccagaagattttgtaataccagtaagtaagggacaagcttataaacaatttggaaactctgtatctattaatgttataagagcacttgctaaggagatggaaaaatatctataaa

SEQ ID NO: 227356 - DNA, 886 bp, Unknown
  Bacterial polypeptide expressing nucleotide sequence isolated from the Sargasso Sea
ttgcgctcactttttgagacgataaaagaaaacaacacgcagccaagcctttttactgttcaaaatatactttccaacaaatatagtagacttccatttaagtttgtagatttatttgcaggtatcggaggatttcgctctgcaatgacaagactcggtgggaagtgcgtattttcaaatgagtgggacaagtatgctttaaaaacatatcagaactggtatcgagacacagatattaatactactgatatcaatgaggtggatatccaaaacgaaatccccgatcatgacatcttatgtgccgggttcccttgtcagcctttttcaatagctggtgtatcaaagaaaaaatctctgggacgtcttcatggtttcagagataaaaaagatgggaaccttttttacaggattttggatattgttaaagaaaaaagaccccctgttctttttcttgaaaatgtaaaaaatcttagatctcatgatggaggtaaaacatggttaattatagagaactctttagaagaacaggaatattttgtttacaagaatataatcgatgcccgaaattgggtcccgcaacacagggaaagaatatttattgtctgttttgataaactaaaatttggttctgatgttgattttgaatttccgtcttctgaaaaaataaatcagccaaaactaggttcaattcttgacggtaaacctgatagcaaatatatgctctctgataaattatggaaatatctgcaggattatgcagaaaaacacagactcaagggtaatggatttggttatggactatttggcaaggatgatgttgcaagaacgatgagtgcaaggtattacaaagatggatctgagattttgattaagcaaaaaaattgaa

SEQ ID NO: 227357 - DNA, 876 bp, Unknown
  Bacterial polypeptide expressing nucleotide sequence isolated from the Sargasso Sea
ggaaaaagcaaaaataccatttgaagttattggatattctgaaaatgataaatttgctattgaattttatgaaaacaatcatcctggtaacaaaaattatggtgatattacgaaaatagatccaactcaaattcctgattttgatctatttacaggtgggtttccctgtcaaccattttcatctgttggattaggatatggtgaacaggatactagaggaacattatttcatgatataattaggatttgtgatgtaaaaagacctaaacacattttgctagaaaatgtcaaaggattgaaaactaataggcatggaagaacttttaacactatagtaaatagcttagcaagactgggctatgatgtaacttataaagtaattaattcgaaagattatggtattccacaaaatcgtgaaagattatggatttatgcttaccatggagtattaccacttacttttaatttagaacccaaaaaactaaaattaaaaaattattttaaggatcttttagataaaaatcctgcagaagatctatacaaaaataaaactcaaataaacagattaaaggaactttataaactagattttatagtatcagagccctcatgtgctgatttgtataataataatattaggaatgatggtataagcgttacaattttagaaccacatcacaacaaaatgagagtagtagaacccccagtaaatggtcaacttaaagtgagaaaatattctatagaagaacattttcgttttatggggatagatttaaatagaatttcatttggcaaactttcatatcagcaattatgtaaaatggcttctaatgggtgggatgtaaatctagtttctttaatttataaaaaaatctt

SEQ ID NO: 227358 - DNA, 827 bp, Unknown
  Bacterial polypeptide expressing nucleotide sequence isolated from the Sargasso Sea
agagtttgataaatacgctcaacaaacttacgaagctaattttaatgaaatgcctgatggtgatattaaaactatagatttagaacaaattccaaagcatgatttgttgcttgctggtttcccatgccaagcgttttctcatgctggtctgaaaaaaggatttgatgatacaagaggaactctattttttgatatagcaacaatactaaaaatacataaacctaaagcctttcttcttgagaatgtaaaaggattaaagtggcatgatggtggatacacttttaaaaggattatcgatacgttgaatgatattggctatcaaacacttgaacatcaagtgctcaatgcaagagatttcggccttcctcaaaatagagaaagagtattcatagtagggttctggaaaagtacaaatttttattttcccgaaccaccaaagacagaaacaagacttggctcaattcttgaaaaaagagttatagaagataaatatactatttccgaaaaattatggacaagtgcaattaaaagaagagaaagggctatctcaaagggtaatgggtttagttataagctctttaatagagattcaccttatactagcactttatcagctagatattataaagatggtctagaaattcttattgaacaaaaaaataagaatccacgcaggctaacacctctagaggctcgaaaacttcaagggtttcctgatgattttcaaattccggttagcgacagtcaagcatataaacaatttggtaatgccgtgagtgtttctgtgattagggaaatagcaaaaaacatcataaaaaatttatagc

SEQ ID NO: 227359 - DNA, 868 bp, Unknown
  Bacterial polypeptide expressing nucleotide sequence isolated from the Sargasso Sea
agccgcgcagcatattcgcgatacgattcctccgcacgatgttctgctcgcgggctttccctgccagcctttttcgctggccggagtatcgaagaaaaatgcgctgggccgggcccacggtttcgcgtgtgaaacccagggaacgctgttctttgatgtggtcagaattatcgctgcccgcaggcctgccatctttgtactggagaacgttaaaaacctgaaaagccatgataaaggacggacattccgcattatcatgcagacgctggatgagctgggttatgaagtctccgatgccgaccacagcggcgccgacgatccgaaagtgatcgatggacgtcatttcttaccccagcaccgcgaacgtattgtgctggtaggcttccgtcgcgatcttcagctgcacgacggttttaccctgcgcgatatctcaaaattttacccgaccgcgcgcccgacctttggcgatctgctggaaccgacggtggatgctaaatttattctgacgccggtgctgtggaagtatctgtatcactatgcccgcaagcatcaggcgctgggcaacgggtttggttacggactggttgatccacgcaatcctcagagcgtggcgcgcacgctatccgcgcgctattacaaagacggtgccgagattctggtcgatcgcggctgggatcgcccgctgggcgaacaacacttcgacgatacgcaaaatcagcttcgtcgtccgcgtcggctgacgccgcgcgaatgcgcacggttgatggggtttgaaagtccgcagggctatcgcttccgcattccggtttccgatacccaggcctatcgccagttcggtaattcagtcgtggtgccggtgtttgcggcc

SEQ ID NO: 227360 - DNA, 888 bp, Unknown
  Bacterial polypeptide expressing nucleotide sequence isolated from the Sargasso Sea
tatgaaaaaaattacattattcgaagcttttgctggatatggtggtgcatcttttggattaaaaaggtctaaaattccatttaaaactataggtttttctgaaatagataaactaactagtgaattctatgaaaaaaatcatcctggaataaaaaattttggagatataaaaaaaataaatcctaaagatttaccggatttcgatttatttaccggcggatttccttgtcaacctttttctcaagttggtatgggactaggcgaggatgatactcgaggaactttgtttcatgatatcattagaatctgcaaggttaaaaaaccacaacatattttgcttgagaatgtcaaaggacttaaaacaagtaaacatggcagaactttaaaaacaattattattaaacttacaaacttaggctacgatgttgttacggagttgatgaattccaaagactatggaattccacaaaacagagaaagagtatggatctatgcgtataaaggcattcttcctctaacatttaaattagcaccgaatactaaaaaattaaaagtcaattttaaagatcttctcgataaacatcctgatcaatcattatttaaaaatcaaaaacagattaaaagattaaaagaactatataatttagattttatagtaaaagaaccttcttgcgcagacctgtataataaaaatatccgtaaagatggaataagtataacaatacttgagccgcaccataataaaatgagagtcgttcaccctcccaaaaataatcaactaaaagtgagaaaatattcagtttctgaacattttagattcatgggatttaaaaatgaaaaaattgatttatgcaaccaatcatatcaacaattatgtaaaatgctcgc

SEQ ID NO: 227361 - DNA, 1051 bp, Unknown
  Bacterial polypeptide expressing nucleotide sequence isolated from the Sargasso Sea
agatcttttcgcaggtattggtggcatgaggattggatttaattcttttgggaaatgtgtttttacttctgaatgggataagttctgtcaaagaacatacgcagcaaattttggtgaagttccttatggtgatattacaaaaattgaaaaagataatatacctgatcatgatattttgcttgcaggttttccttgtcagccattttcacaagctgggcttggaatggggtttcatgatgtaaggggtacgcttttttttgaaatagaggaaattcttttacacaagcgaccaaaaatgtttctgcttgaaaatgtaaaacgcctcaaaagtcatgagaatggagaaactttgaatacaatattatctgcgcttcgtggaggatcaaatagtgttagcattaaaaagagggagcttaatcgtgaaactcaacaaagtcttggcactttaaattattggtgtgattatagaatcttaaatagtaaagattttgggcttccgcaaaatcgtcaaagaatatttatcgttggttttaataaggatttttatggtgatatcgattttgattatacatttaaatggccagagccaaaaaataaaaaaactcttataggtagtatacttgaaaatgataaggtgattgaccctaagtatacaatatcaaaaaagcttcttgatggtcataagagaagattgagagaacataaaaaaaagggtaatggttttggttactctgttttcaaatcagatgattcatatacaaatacaataagtgcaagatattacaaagatggaagcgagatattgatagatcaaactcatctaaataaaagacctagaaaacttacgcccaaagaatgtgcgaggttacaaggttttccagaaaaatttattattgatgccgtttcagataatcaaatatataaacaatttggaaactcggtcagcgttcccgttattagatcaatttcaaaaagtatgaaaaaatgtcatgaagaagccatagtgaatagaaaaaagaaatcatcagatattcaacatgctgttgcgtaa

SEQ ID NO: 227362 - DNA, 1005 bp, Unknown
  Bacterial polypeptide expressing nucleotide sequence isolated from the Sargasso Sea
ataaattgatagagttatttgcaggagcgggtggtttggcaattggaatgcataaggcaggatttgatacagtgttattaaatgattttgataaagattcttgtgacacaattcaaagaaacagaaactggcacgtagagcacgatgatatttctaatttaagttttaaaaaatataaaggaaaaatagatgttctctctggaggttttccatgtcaggcattcagttatgctgggaaaaggtgcggttttgaagatactagaggaactttgttctttgaatttgcaagagcggtcaaggaatgcaaacctaaagttatacttgctgaaaatgtaagaggtcttgttagtcatgagaaaggtaaaaccttagagactatttcaaatgtgatcgatgaattaggatatgatctagttgaacctcaagtattaaaagcaattttttatcaagttccacaaaaaagagaaagactttttcttgtcggagtaagaaaaaatttaaaagcggcacatttatataaatatcctgatccctttcatagagtaatgactttaaaagacgcacttagaaaaggcgatctttatgacaagaaagttccaaaatctcatggtagtgaatatccagatgcaaagaagaagattcttgatatggttccaccaggtgggtactggagagatcttcctgaaaaatatcaaaaagaatatatgggaggatcgtttcatttgggtggaggtaaaacagggatggcaagaagactatcttgggaagaaccttcattaactcttacgtgcgctcctgctcagaaacaaactgaaagatgccatcctgaagaaacaagaccacttacagtaagagaatatgcaagaatccagacttttccagataattggcaatttatgggatcaatgagttctcaatataaacaaataggcaatgctgttcctgttaaccttggatatgcagttgcaagatcacttattagacttctaaatgatattgaataaa

SEQ ID NO: 227363 - DNA, 1057 bp, Unknown
  Bacterial polypeptide expressing nucleotide sequence isolated from the Sargasso Sea
catgtcttacaaatttatagatcttttctgcggtttaggtggtttcagaatcggatttgaaaaaaatggatacgaatgtgttttttcttctgattttgataagcatattcaggaaacttatgaagtgaattttggtgagaaaccttatggtgatataacaagagtggatccatctgtagatattccagattttgatgttttaacaggtggatttccatgccaacctttcagcatatctggaaaaaaaagaggttttaaggataccagaggtacacttttctttgatatatgtagaattattgatgaaaaaaaaccaaaggttgttgttcttgaaaacgtaaagcattttattcatcacgatagtaaaagaactataaatactgtgttgggttcactaattgaacttgggtataacgtatcctataaagtgttaaatctgaaagattttggtcttcctcaaaatagggaaagaatattcatcatcggttcaaaaaataatctttttgattttggagaaatgaaaataaggaagtcgaaaccacttaaagattttcttgataaaaaaggtgactttgaatttttgaaaagaaatgaatataccctattaaaaaaagatcaaattgttcatcaaccatcaggtctaaagtttgtaggatatagaaataaggacggatttaaacgtggcataagaccaaatacagaacatcttaatcgcgttcataggcaaccaaatagaatatattctgttgaaggatatcacccaaccattccctctcaagaatcctctggaagattttttatttatcttccagatataaaaaaagttagaaaactcacaattaatgagtgttttaagatcatgggtttcaattcaagatataaaaaagtatcaagcactggacaactgtaccgacaaataggaaactctgtaggagtaaatgttgtagatgaaatatctaaacaaatcataagacagaaattgcttaatgaaccacaaacaaaaactcttagaaattcaccaaaagtcattaacgggcaaactcaacttaacttctga

SEQ ID NO: 227364 - DNA, 472 bp, Unknown
  Bacterial polypeptide expressing nucleotide sequence isolated from the Sargasso Sea
catgaaactatataaagtaatcaaatcgaacatagataaaaaaggattagttgcaggtaaaaatattaaatctggaactagaataattcgctataaaggaaaaataatttcaaataaacaagttgaagaaaatccaaaattcgacaattcaaaagacatttatttgttcgatttaaataaaagattttctttagatggagatttttcttggaacacagcaagacttattaatcattcgtgtagtccaaattgtgaagttgagggcactggatttaagatttgggtaacagcaattcgtgatataaaaaaaaatgaggaacttacgtatgactatggatttagctatgactctgactataaacaatttccttgcaaatgtcgatctaaaaattgttgtggatatatagttcgagaagaaagtcgatggagaataaacaaaaaatataagaagagcttacgaattagtagataa

SEQ ID NO: 227365 - DNA, 916 bp, Unknown
  Bacterial polypeptide expressing nucleotide sequence isolated from the Sargasso Sea
gatggatcatttgtttatattccgccaggtgtacgatgcccaatggaactttcgacctatttccgtatcaatgcggagaatactgggcaatttgaacgtacgcttatcatagcggacaagggcagttatgtttcctatcttgagggttgtactgcacctaagagagatacagcccagctacatgcggccgttgttgaaataattgtggaagaggatgcagaagttaaatattctactgttcaaaattggtttcctggtgatgaagatggaaatggaggaatatataacttcgtaaccaaaagagctgactgtcgaggagatagatccaaggttatgtggacccaagttgagacgggttcagcggtcacttggaaatatccttcttgtattttaagaggcgatcatagtcagggtgaattttattcgattgccatcacaaataatcatcagcaagcggatactggcacaaagatggtacacttgggtaaaaactcaaagtcacggattgtctccaagggaataagcgcagggtttgctcaaaatacttatcgtggtctagtttcaatgcacccaaaggcgaaaagcagtagaaattatacgcagtgtgacagtttgttaattggcgataaatgtggtgcacatacggtaccttatattgaagtcaagaataatagttctcgtgttgagcatgaggcaacgacgtcaaaagtagacgatgatcaactattttattgcagacaaaggggtatggatgaggaagaagctgtagctcttgtagtgaatggattttgtaaagacgtacttcaggcactgcctatggagtttgccatggaagctcaacagcttgttgcaattagtttagaagagaagtgttggttaacaacaaaaaaactacattttaagcttttgaacccaa

SEQ ID NO: 227366 - DNA, 447 bp, Unknown
  Bacterial polypeptide expressing nucleotide sequence isolated from the Sargasso Sea
aatgaaatcatatcttaacctgctgtctcacattttagaaaatggagaaaagcgtgaagacagaactaatgttggaactatttcttcatttgggcatcaacttaaatttgatttaagggatggtttccctgctgtaaccacaaaaaaacttgcatggaagggtgtcgtttctgagcttatttggtttcttgagggttctgacgatgaaagaagattagcggagataagatataacaaaaatagagacgaattaactgatatagataaataccctactatttggacagataatgcagataatcaaggaaaaaatttaggatatgaaaattcatcattggtaaaaaagcttggtccggtctatggagttcaatggagaaactggggcgataaagaccaaattaaagaactcttagactcccttgaaaataacccgacaagtagaagaca

SEQ ID NO: 227367 - DNA, 121 bp, Unknown
  Bacterial polypeptide expressing nucleotide sequence isolated from the Sargasso Sea
aaattaccaactctaaaaattaaacgaaaagttgaatcaatttttgattttaaatttgaagattttgaaataataaattacgacccacatccacacataaaaggtgtagtttcagtataat

SEQ ID NO: 227368 - DNA, 421 bp, Unknown
  Bacterial polypeptide expressing nucleotide sequence isolated from the Sargasso Sea
gatgaaacaatacctagatgctttgaaatattgttatgataatggttctgatgttgaaagtagagcgggtggtgttagaaagtcttttggttatcaaatgcattatgatctatcaaaaggttttcctgctataacgactaaaaaactagcatggaaatctgttgtttcagagttattgtggttcatcgaaggttctgacgatgagagaagacttgctgaaattttatacaatgactcaagagaaaatttaaaagataagaaaactatttggacccaaaatgctcaagctgattattggaaatcaaatgctagatttgagggagatgtcggcaaaatttatggagttcaatggagaaattttaatggagaagatcaagtcttaaatctaattaaaggattaaaagaagatccaaatggaaga

SEQ ID NO: 227369 - DNA, 478 bp, Unknown
  Bacterial polypeptide expressing nucleotide sequence isolated from the Sargasso Sea
atgagaggtttatttagttttccacatcctgttaatgaatatgccgcgcgcctcgttgccgggatggttatagtattaatattaacaatcttatttacaaatcaaagtgtgcttctttgggtactgctttatggattcacagctcgagttttaacaggtcccacattgagccccatgggtttaatagcaacaaaaataattgttccagttctaggtaatcctaataaacctgttgcaggtccaccaaaaagatttgcccaacttattggctttctacttagcttattggctataatcgctgaatttgttttttcatcaacaaatattgcttatttattaatttcagttattgggatttttgctgctctggaatcaatacttggattttgtgcaggttgttatgtttttgcaattttaatgaaatatgggttaatacctgaatctacatgcgaaaaatgtaataatatcaacatctaga

SEQ ID NO: 227370 - DNA, 396 bp, Unknown
  Bacterial polypeptide expressing nucleotide sequence isolated from the Sargasso Sea
tatgaaagcatacttagatcttcttcagtatatattggaaaatggagaagaaagaagcgataggactaatacagggacaatatcatcttttgggcatcagtttgagtttgatttagaaaaaggattccctgctgtaactactaaatctctcgcatggaaaggagttgtttctgaactactgtggttcttagaaggttcagatgatgaaagaaggcttgctgaaataaggtttaataaagatagatctgaattaactaatttagaaaaatactcaacaatatggactgataatgcagacaatcaaggcaaagaattaggatatgaaaattcagataccaaaaagattcttggtccagtttatggtgtgcaatggagaaattggtgtggggttgatca

SEQ ID NO: 227371 - DNA, 508 bp, Unknown
  Bacterial polypeptide expressing nucleotide sequence isolated from the Sargasso Sea
aatccaaacagccgaagaatggtgattactgcttgggctcctggtaatgcacaaaatagtggtttacctccttgtcatttgatgtttatttttaatgtacaatatgatgaaaataatgaacctagattatgcgttcatcttactcaacgcagttgcgacgtggcacttggagtgccttacaatatagccggttattcatttttgttacatctatttgcacatctatctggaatgaaagtaggaacatttggtcatacactggttgatgctcacatttacacaaaaaaagctgatggtagtatggaagaatacgaccacatacctggcctaaaagagcaattaaaaagaatgccaaaggatttacctaaactggtaattgatccaagcatcaaaacactcgaagatgtgatggacctgttagatgctgagactgatgaaatactatcaaaatttaaattaaaaaattacatccctgaagcattcattccattcaaggttgctgtatgaa

SEQ ID NO: 227372 - DNA, 852 bp, Unknown
  Bacterial polypeptide expressing nucleotide sequence isolated from the Sargasso Sea
tatgactttaattgatagtattttacttaaagatgaatttattattgatacacaaaatacaaatttattaaatttaggcaatttaactgcaaatgttgaatattgtatatataaacctattcaaacagcagaaacacaatatttaaggttaatggaaaatattatgctaaatggaattgaaaaaaaaggaagaaatggtattactaaatctataattaatcagcaattaacatttaatatcagtcattcatttcctttgttgacaactaaaaaaatgtattggaaaggtattgtagaagaactgttattctttcttcgtgggaacacagatactaaaaaactagaacaaaaaaaggttaatatttggaagggtaatacaaatcgtacatttttagatgaaaataattttgtagattatcctgaaggacaaatgggtccaatgtatggttatcaatggagatatttcaataaattatttttaccaaatgtaaaagataatgatattttagaatataactatgaagactctggtattgatcaattatcagatttaatttctaacattaaaaccaatccaacaagtcgtcgtttgctcatgacaaattacaatcctttacaagtaaatcaaggtgttttatatccatgtcattcattactattacaattttttgtaatcgaaggaaccttaagtgtaagcatgtatcaacggtcagcagatgtatttttaggattacccttcaatatatcttcgacttcattattactattaattatttctaaattaacaaatttaaaaccaggcaatgttactatcaatttaggagattgtcatatttataaagaacattatga

SEQ ID NO: 227373 - DNA, 306 bp, Unknown
  Bacterial polypeptide expressing nucleotide sequence isolated from the Sargasso Sea
accaaagaagtgccgatgtattccttgcgtttccttacaacattgcttcatatgcactgttaactcttatgattgcaaaagtaagtggacttgagcctggagagttcgtgcactcttttggagatacacacatttatttaaaccatttagaacaagtaaatgaacaactaagcagagaccctcattctttacctaagttaaagattaaaaataatagaaatagcctatttgaatttcaaataaatgattttgaattgacagaatacgaccctcacccttttatatctgcgccaatttccgtgtaat

SEQ ID NO: 227374 - DNA, 184 bp, Unknown
  Bacterial polypeptide expressing nucleotide sequence isolated from the Sargasso Sea
tgacactcacatttatttaaatcatctagagcaagttgatcttcagttaacaagagaaccaatgaaactgcctaaactcaaactaaaccctcttataaaaaaaattgaagattttaaatatgaggatatagaaatcttagattataattcacatccatcaataaagggtaagatttctgtttaa

SEQ ID NO: 227375 - DNA, 172 bp, Unknown
  Bacterial polypeptide expressing nucleotide sequence isolated from the Sargasso Sea
gaaggccacgagcgtggtctcgagtatcaactcaagcggggaccccgtccgttcccacgggtccgaatcacagagcgcggccaatcgcgcatagaggattacactgagtgcgattttgttattgagggatacgatccacatcccaggattcagtttccgtttcgtgcgtaaa

SEQ ID NO: 227376 - DNA, 436 bp, Unknown
  Bacterial polypeptide expressing nucleotide sequence isolated from the Sargasso Sea
atgaaacaatacctagatgctttgagatattgttatgataatggctctgatgttgaaagtagagcgggtggtgttagaaagtcttttggttatcaaatgcattttgatctatcaaaaggttttcctgctataactactaaaaaactagcatggaaatctgtagtttcggagttattgtggttcatcgaaggttcagacgatgagagaagacttgctgaaattttatacaatgattcaagagaaaatttaaaagacaaaaaaacaatttggacacaaaatgctcaagctgattattggaaatcaaatgctagatttgagggagatgttggtaaaatttatggagttcaatggagaaattttaatggagaagatcaaatcttaaatctaattaaaggattaaaagaagatccagatggaagacgtcatataatttctg

SEQ ID NO: 227377 - DNA, 238 bp, Unknown
  Bacterial polypeptide expressing nucleotide sequence isolated from the Sargasso Sea
gatgattgctcaggtttgtaattttaaaatgggggattttatacatacttttggagatgctcacatttatttaaatcatattgatcaagttaatcttcaactttcaagagatttctatcctcttccaaagatgaaaataaatcctaatgtaagcgatattttttcattccaatataatgattttgaacttttagattataaatctcatcctcatataaaaggtcaagtttctgtttag

SEQ ID NO: 227378 - DNA, 691 bp, Unknown
  Bacterial polypeptide expressing nucleotide sequence isolated from the Sargasso Sea
ttaaatatcagtcaattgccagatattttgatcttgattgtttctgacgcctttacacccatggcaggagctggtgcagctattggatggggtgtgaggagaggtatttattcaaatgaagccggtcaaggttcaagtgtacatgcagctgcagcagcagaagttgatcatccagcacaacagggcttggttcaagctttctctgtttatattgatacactatttgtttgctcggctaccgctttcatgattttaataactggcgcatacaatgttcatggtgaaggctctcaatttattattcagaatattgcgcctacaatagatgcaaatagcccagcttttactcaatatgcaatggaaaatacaattccagggcttggagcaccttttgtagctgttgcattatttttctttgcatttactacaatacttgcatactactaccaagccgagacaaatattgcttaccttcgtcgaacatataaatttccaggtgacatgttgatactcaaaattgtaatgttggcgtcagtattttatggttcagttaaaacggcacaggttgcttggggcttgggtgatattggtataggtatactgacgtggctgaatgttactagtattttagtcatcttttttatgtctaatcctgcagtgaaagcacttaaagactatgaagaacagaaaa

SEQ ID NO: 227379 - DNA, 403 bp, Unknown
  Bacterial polypeptide expressing nucleotide sequence isolated from the Sargasso Sea
atgaaatcatatcttaacctgctgtctcacattttagaaaatggagaaaagcgtgaagacagaactaatgttggaactatttcttcatttgggcatcaacttaaatttgatttaagggatggtttccctgctgtaaccacaaaaaaacttgcatggaagggtgtcgtttctgagcttatttggtttcttgagggttctgacgatgaaagaagattagcggagataagatataacaaaaatagagacgaattaactgatatagataaataccctactatttggacagataatgcagataatcaaggaaaaaatttaggatatgaaaattcatcattggtaaaaaagcttggtccggtctatggagttcaatggagaaactggggcgataaagaccaaattaaag

SEQ ID NO: 227380 - DNA, 854 bp, Unknown
  Bacterial polypeptide expressing nucleotide sequence isolated from the Sargasso Sea
agcgaatgtcactcaggtaatcgtccctttcatggctttggcttacatcattattgctctcacaataattggtttaaatatcagtcaattgccagatattttgatcttgattgtttctgacgcctttacacccatggcaggagctggtgctgctataggatggggtgtaaggagaggcatttattcaaatgaagccggtcaaggttcaagtgttcatgcagctgcagcagcagaagttgatcatccagcacaacaaggcttggttcaagctttctctgtttatattgatacactatttgtttgctcggctactgctttcatgattttaataactggagcatacaatgttcatggggaaggctctcaatttatcattcagaatattgcgcctacaatagatgcaaatagcccagcttttactcaatatgcaatggaaaatacaattccaggaattggagcaccttttgtagctgttgcattatttttctttgcatttacaacaatacttgcttactactaccaagccgagacaaatattgcgtaccttcgtagaacatataaatttccaggtgacatgttgatactcaaaattgtaatgttggcgtcagtattttatggttcagttaaaacagcacaggttgcatggggcttaggtgatattggtataggtatactgacgtggctgaatgttatcagtattttagttatcttttttatgtctaatcctgcagtgaaagcacttaaagactatgaagaacagaaaagaaaaaaagtaaatgtattcagatttgatcctgtatctcttgatatcaaaaatgcttatttttgggaagatcgtaataaacaacactaaa

SEQ ID NO: 227381 - DNA, 362 bp, Unknown
  Bacterial polypeptide expressing nucleotide sequence isolated from the Sargasso Sea
tatgaagcaatacttaaaagcattaaaacattgctacgagaaagggattgatgttgatagtagggctggcagagttagaaaagcatttggatttcaaatgcgttttgatttaaataaaggttttcctgctttaacaacaaaaaaacttgcgtggaaatcagttatttctgaattaatctggtttttagaaggttctgatgatgaaagaagattggcagaaattcattatcaagatgatagaaaaaatttaaaggataaaaaaacaatttggactgaaaattctcaatcaaaatattggaaagaaagatcaaaatttcaaggcgatgtcggtagaatttatggagtacagtggagggacttta

SEQ ID NO: 227382 - DNA, 446 bp, Unknown
  Bacterial polypeptide expressing nucleotide sequence isolated from the Sargasso Sea
aatttgggacaaggtgtatgaaataaacctaaaaacaatggtttatttatcaaagataataatacctaagatggaaaaaaataaatttggctctatggttcatatatcttctgttgatgccttgtctggagatgacaaaccgcaagatgcttatggctcatctaaagctgcaatgattagactatcaaaatcacttgctattcaatatgcaaataaaaatataaggtctaacataatactacctggtccaatagaaacgggtatgcaaaaaagatggaaaaaaacacctatgatgaaaaaaaatattgaaaaaaatatacctttaagaaaagttggaaaaccggaagatatagcaaatggaataatgtttttgttaagtgatcaaagtaaatatattacgggtaccgaaattacaattgatggtggtataaccgcaaaaccataaa

SEQ ID NO: 227383 - DNA, 934 bp, Unknown
  Bacterial polypeptide expressing nucleotide sequence isolated from the Sargasso Sea
atgagaatacttacattcttctttatattaatgattaatgcattcgcaataagccagcaaatagcactaacaagccaatatattatcaacgaattatctataaacccagctgtggttgggcttaaaggtcatacacaaattggtttgtcatttagaagacaatggtctggaatagacgaagctcctgttactcaaaccttatggggtcatgccccattaagaggaggatttggagttggaggtgttttatacaatgatgtttcgggtccaacaagaagaacaggttttaatcctgtttttggatatcaaatgagattaaacaggaaatatatgttgagttttggtggtggtgcatctttaactcaatattttttagatcgaaaccaaatgcaaacagaattaccaaatgacattgctgttgatgaaaactcaaacaatcagtttgtccctgatgcaaatattggtttttggcttacatcaaaaaatatgtttgctggtatttccgcatggcatctaatacaatctaaaaaagatttattccatatagaagccatggttaaaaatactcttgatagaacatacttttttacatctggatattcattcacattatcaaggaaagctgagtttacaccaagttttgttgtcagaatgatgagaaatgctccattaacatttgatttaaattcaacatttacttatcagaaaaaatattggggaggtatttcatatcgatataaagatgccgtctcaattttaattggaattagatcaggccccgttagaattggatattcatatgatgctggtattagcaaacttaatagctttcacaatggtagtcatgaattattcttagggattgatgctggtgatttatatgcaaaaaaaatacctggaaaagacggaacaaggtcttttcatcattttcaaa

SEQ ID NO: 227384 - DNA, 961 bp, Unknown
  Bacterial polypeptide expressing nucleotide sequence isolated from the Sargasso Sea
atgtgtttttgccgttctggtcatcttcgatggaatgaaactcgcgcggctcgtcagcgggcccgcacggtgagtgaaatgatttcaaaatctcaattgatctaccgggggagccgcatgcggggtaccttgatcgctgttgcgactgtcgcggttcttgccggatgttccacctacgacagcctgacgcagcgcgttgcccagagtattacgccgtaccgtattacggtcgtgcaaggcaatttcgtctcgaaggaagcggctgcacagatgcaggtcggcatgtcgcgcgcccaggtgaagcagttgctcggcacgccgctcctgaccgacatgttccacgcggaccgctgggactacgtgttctatttcaagcgcggctcgaccaacgtcgtgcagcagcgtgacttcgtgatcctgttctcgggcgaccgcgtcgccagctggacgggtggcgacgatctgccttccaacctcgagttgctggctgaaatcgacggcgacaagctcggcaagaagaaggctgccgcgccgaacgtggcaagcgcagccacgggcgccagcgcgccggtcgctgctgcggcgaccgtggacaccacgcgttcgccttccgtcgacggcgccgcggccgctgcggccctgccgtcaacggacgccaacgccgaagccgcgcaggccgccaatcggctgaccaacgcggtgcagacgccgtcgaatgcgcagccgtcggtgcgctcggcggtgccgaccgccaacggtggcggtattccgtcgcaaggcccaacggctgccgggcagccgcagttccagtttcaccgtccgccgccgccgcaggttcagggcgcgcaggacaatccggtggggccaactggctcgcaaagcggcagcggcggcccgacgttgaacgcaccgctgactgcttcgcccgcatctcccgcgtcttcgggaacaggcaactaat

SEQ ID NO: 227385 - DNA, 2131 bp, Unknown
  Bacterial polypeptide expressing nucleotide sequence isolated from the Sargasso Sea
catggcatttgaaacgattaatctaggcacccagccagcaggcacgggtggcgatacggctcgctcagcatttgaaaaaaccaaccgcaactttttagctgtagatgtactctccgcagccatgtcacaagcgcagtttgaagcgatacgttcacaaaacaaagaacgctatgccgcgagtggatgggtcagctttggtaatcatgaatcaggcaagcaagttaacgaatgcaagcccgggctttataccgcgcttactacaccaaacaccttgcttattggtaaagctggcggggttggtggctctaaaaccgataatgcatcggtacatattgatggagtggttttcaacttaaccaatcaatttgtgctaactctgccatcacatcctacatctacacagccagaacgtatggatatgtatggtgttgagtcagaaaaagttgagataagcgcagcatcgcccaatgcttatcaaggcgggttgcgtggtgttggtgccgcagtaaacctatttaccgctacagatcagcagaaaaaagacttcttctcggccaatgccaataccacctatataggtactgatggcaaaatctaccagtggcagttatataaaatctcgtttgcaggcacgactgatggtgtgccatcaccttcagaacagggatattcactgaatgcttttggcgatctatggcttaaagaaggtaaaaacctgctctattttggcaatgtgctccgtttaaatgatggcggatatcatccatcattcaacccgctaggtgccgcaaaatttgttggcgatactttttggtacaacaccgctgctagcatcacatcaagagcagattgtttttaccctgcaaatttgcttgctggttcaggttccatagccagcggaaaatctggacgtcctgaaatcggtgggcgttattacgatgctatttatgctagtggttttggcggagtttgccgagatatgcgctatccagcatacgggataacttctgaggattccgatgaagcagatcagcgagtaaaaaatggtgcttatagggggtttgaaaaacttgtatttagtaaagtaaccaaagctacggcacctagttcttcctcccaatcacaagatatatttgttgctaatgcttctgaatggacagggggggatagaatttcgctatatgatggtgaaacaggaacattgatttttgacaaacagattgtaacagcagttggtgattcatttgtttattgccaaaatgccccacagtacaaccgtgtcgctggtagagattactattctgtgcaagagaagtatactaatgtatccgtgggtggttcattcttgcaaactgatgtagttggtaaccctgatactatcttagtaactcaagcattagttaatggttggcacggtagttggattcctttgattcctgccgctaccggcattatatctgaagaacttattcgcaaaaacctaggttcaattaatgttgatactacatattctttggattttggatcttcttttgaaaaaacaaccagcgatttctcaatagtagataacagcgttgttattggacagaactctaacctagttagtctattacaatataccgcatttgctaaacaaactgaaaacgctgtaaatgcatcagtttatggtggtataggtggtttgcatgatatggcagaatacggtgggtattttgcgtcaatttggggtggtattttttttgaaagtttgctgaataaagttgctattagcgatgcaggcggaggcggagttagtcatttaaatctgacaataaaactcattagaccagatacattcacaatgaacccttactctgatcagacttgttaccatactgcaataagcaaacccagcccaactaatggaagcagtggaattaaggcgttaggttacaacgtcaatatcagccaacaagcatttatccagtacgcttataccgagctaaaacataatggcgccaactggggtgatgatggcaaagtgacaattgtcgataaccaatccacaaaaacagaccttaacggaaactctgttttagtgggcacggccaagttgcgtgagcccatcggttggatcaaaaacaaggtttaa

SEQ ID NO: 227386 - DNA, 3673 bp, Unknown
  Bacterial polypeptide expressing nucleotide sequence isolated from the Sargasso Sea
atgattccgtttttatttaaatgccagccacataatcggttggtatcctctattgctcgtgcttcttcactgatatcccttaacactcgacctcaaaacgttcgtcatacgttaacgtccttcatttctcttattctgtcgagtgtaattgtgagtgcggccagcttatttatggcgccgactcacgccgatgatactgagctttatgttttcgaagcgtcggcccgtaatggctcgcgtccgcaggtgctgattattttcgataactcgggcagcatgagcagtctcgcctatgatgtcgaggcgccctacgagaataagcgcgcagtaaattatgcccaatcgggtaatttattctatagccgaggctcatcggaaaacgcggcagcgcccaaccctaattcacgacgggaaaaacgaaagttcaaaggggcgctcaatggttgcgaaagctcatgggaatatctcaatcgttacggcacctttacggggttctttagggaatatggtttttcgggaagctcggggtcttggagagagttttcagagcttaacggcagttccatttccgctgtcgattgttttgaggatattcaggaaaacaagttcggtaacgcggcaggcgaagaccaaggtttacccgtggatagcctagggacggcaagcaaaccggttcgttacacaaaggccagtactagctcgtcagacagcgcaaagtctgcggctaaggccaaggccgaaaaaaccgcgtttggtacaggtaaagtggttaccgtctataccgaagattacttaaactggctgcatggcccgaaaactaaggtcaataaaacacgactggccttggctaaagatgcgattgaaagtgtgattttaaccacgccgggtgtggattttggcctagcgatttttaatatgaatggcccctatgatggccagcgtgatggtggacggattatctctgggattaagcccatgtccgctgccgctaaaattgatttgctcaaagggatcaatgatattaactacgctcaaaatacccccttatgcgaaaccctctatgaggcgtaccgctattttggcgggcagagtcagtattttggtgacgacgatagcgattaccattattacgatcagtgggggcgctatcaagggacttaccaagcgaaaagaaacccttttaccgatcccgaagcattagtcgtggggaccaataactataactcgcccttcaaacgttgccaaaatgaagcctatatcatctatatcaccgacggtgaacccacgttggataacgcggccgatggtttggtggagcagttaaccaaaggtgtgggaaaacatacctcaagccccgtcagttacctcagtgcgctttcgggctggatgagaaacgaagacgttaatcctaattctgcgggtaaacaaaccgttagaacttttaccatcggctttagtgaaggtgccgccagtgccgaacatttgctgaagcagaccgccgaaaatggcggaggtaagtatttcgatgcgaccgatgccagtaaattacgctcttcattacaaactgccctgaacaatatcctcgaaaaaaatgccagctttacctctccctcggtggcaagtaataactttaaccgaacacaaacctttgattccgcttattactctatgtttttgccgaacaaagggccgagatggttaggcaatatcaagaaatttaaggtgaccagtagtggtgatgttgtcgatagcaaaggcaacaatgcgataggtgaagatggcaacattaaagccgaggcctgctcctattggacctcggccgaagagtgtggtgcgagtggcgatggtaacgatgtgaagcggggtggagtgctaggtgcaatgcagcaggcgagtagtcgcaccttgtacagtaatttaagcacgggattaagcccgtttaccctgtctaatgcttctcgcaaagcggggggcgatgcacgtttggccttgtatatgggggtcgatgaaactgagcttagcgagcattttgattgggccaagggcatcgatgtcgataatgacaagaatcaggacctcagtgccgcgagtggcacaacccccaattggcgcgccgatattatgggggatgctttacattccaaacccttagcactcaattttggctctgaagacaagcccgacattcggattatcgtggggactaaccatgggttcctgcatatgttcaaggatgaaggcgatagcgtgtctgagacttggggttttatcccctatgagttgctgccgaattttcgcgatctgaaggcgaacgcgccaacgggcgtgcactcggtatacggcatcgatggctcgccagtcgcttacaccaaaatgcagggcaaacgtattgaaaaagcgtgggtgtttgtggggatgcgccgtgggggaaatgcttattatgccctcgatatcacctcccccgataatcctagttttatgtggaggattgatgctagttctccgggaatgggcgaattaggtcaatcctggtcgacgcctgtcgtcaccactattccgagcgccacaggggataaacccgtgcttatcttcggggcgggatatacccctgcgactaaggatggcgccgagattggcagcgacgatagccaaggacgaggcgtgtttattgtcgatgccgaaacgggcgcattaattcatcaatttggtggcagtggcgcaaatacccaattgccggggattgcgaacagtattccgagcagtgttgccgtgttagacggtaatggcgatggtagaacggataggatttatgccacagacacccaagggaatgtgtggcgaatggacatgccttcggcaaatacttcgacttggtcgggatttaaatttgccgcattaggggataggagttcggtggctggggataggcgattcttctcggggccgacggttgcgcagaccatggtcaccaataccttcgagttgactcaggtggtgaatgggaaatcgaccaagacggtgactaagcagaatattccatacgatgccgtggttgtaggcagcggtcacagggcgaagcctagcgatgcgtcccgttcggatatgttttttgccttgcaagataggaacatagtgactcaatcgttccaaggtaaacctaatcaaaagccagtgccgagcgccttaaccttaagtgacttatacgatgtaactacggcggcgccaaatgataaagccagcgaaatcgcttttggtcaaaagcggggctggtactataacttctcccgcaaaggtgaaaagagtctatcctccgcgaccatagtacagggcgaggtgtatttcaccagttttgtgcctggcagtgatgcttcggtgaaccaatgtttgagttcgggtaagggctacctctataaaaagaacttacacaagggcacaaatggctacagaaccgatttcttgtatgccggtgaactggttttggatacgccgcaattggtcatccctccggctgcgcagcccgatgaccccaatgctaaggctcccactccagatatgtttttgattgggattggtaaggcggtgcccgaggaggcgacttgtgagagtggtaatcctaagtgtattggcagtggtcctaaggcaaacaagatttactactacgtagatcaatgat

SEQ ID NO: 227387 - DNA, 1150 bp, Unknown
  Bacterial polypeptide expressing nucleotide sequence isolated from the Sargasso Sea
atgggcaattccatgcaatacctgggcgagcgcatcacgttgtgcgcttgcgccaccacctggatcgaaggtgaggccatccggcagctcgaacacgctgccaccctccccggcatgcggcgcgtcgccggcatgcccgatcttcaccccggacgcggctacccggtgggcgccgcgttcttttcgacgggccagctgtatccggcgctgatcggcggcgatatcggctgcgggatggcgctgtggcaaaccgcgctcgatgcgcggcgcgtcagtgcgtcgaagctggcgagccggctcggctcgatcgacgccacgcccgatgcaagctggcagccgctcattgcggccgccgggttcgcggatcacgcgtacgcggcatcgctcggcacgatcggcagcggcaatcatttcgcggaagcgcagcggatcgacgcaatgtacgaaaccgagcccctcgcggcgctcggtctcgatcccgatcgcctgctgctgctcgtgcatagcgggtcgcgcggcttcggccagtcgatcctcgagcaacacatgcgcgagcacggctacaacggcctcgtcgacacggacgccgcatgcacggcatacctcgtgcgtcacgatgcggcgttgcgctacgcgatcgcgaatcgcgacctgatcgcgcggcgcatgctggcacgctggcgcaccgatggccggtgcgtgctcgacgtgaaccacaatctggtgagccgcgcgaacgtcgacggcgagccgggctggctgcatcgcaaaggtgcgacgccggccgatgcggggccggtcgtcattcccggatcgcgcggcgactacagctacctcgtcgcaccggtgcggcccgacgatgcggccagcctggcgtcgctggcgcacggtgcgggccgcaagtgggcgcgcggcgattgcagggggcgcctcgaacggcgcttcacgccgtcgcagctcacgcgcacgccgctcggcagccacgtgatctgcgaagaccgcgaactgctgtacgaggaagcgccgcaggcctacaagccgatcgacagcgtcgtcgacgcgctcgaagcggccgggctgctgcgcaagctggcgcggctcgcgccggtgctgacctacaagacgtccggggaggctggccgatgctgat

SEQ ID NO: 227388 - DNA, 296 bp, Unknown
  Bacterial polypeptide expressing nucleotide sequence isolated from the Sargasso Sea
tatgtatcatagatttgaagaaaataagtatccatcaacaaatataagattagatgtatttaaaaaacatattaatttaataaaagaaaataatttaaatttttataatcctggtgaattttcaataagttttaaaaaggttaaggaacaaaagaaaattttattaactattgacgatgcatttacatctttttatgaaaatgcttggccaatcttaaaagaggaaaaaattccttttattttatttgtctcaacagagtcggttgggaataaaggatatatgagttgggaacaaa

SEQ ID NO: 227389 - DNA, 430 bp, Unknown
  Bacterial polypeptide expressing nucleotide sequence isolated from the Sargasso Sea
atgaaatcatatcttgatctgctatctcacattttagaaaatggtgaaaagcgtgaagacagaactaatgttgggactatttcttcttttgggcatcaacttaaatttgatttaagggatggattccctgctgtaaccacaaaaaagcttgcctggaagggtgtcgtatctgaacttatctggtttttagaaggttctgatgatgaaagaagattagcggagataagatataacaaaaatagagatgaattaaccgatatagataaataccctactatttggacagataatgcagataatcaaggaaaaaaactaggatatgaaaattcaacattggtaaaaaagcttggtccagtatatggagttcagtggagaaattgggatgataaagaccaaattaaagaactcttagactcccttaaaaataacc

SEQ ID NO: 227390 - DNA, 718 bp, Unknown
  Bacterial polypeptide expressing nucleotide sequence isolated from the Sargasso Sea
atggatttttttatcaacaatcaagaactactttggtttcttgtagttttctacgatctaaccctcgtaattttattgtatcgattttttggaaagtatggtctatacgcagcagtaattttaggaatcatccttggcaatcttcaaggaggaaagatttctgagttacaaatttttggaacctcaattaatgtaagcatgggtgcaattttgtactcaggcatctattttgctactgatctattaaacgaaaagtttggaaaaaatgaagctaatcgagctgtttatttaggattttttgcaaatatagccgtgatgataaccctttggctaagtattaattttcttccctcctcattatccggttcagccttagaggtacacaccgctatatcaacgttggcacaatactcaccaatttttattatcggctcattaatggcttatttagccagccaaacatttgatgtttggttctttaattatctaaaagaaaaaacagacgggaaaaagctctggcttcggaataatctttcgaccatgacatctcaattaatagatacactcatttaccaatttacatgggttatcgcgacagatttaacatttgcagaggcattcgggcttgcagtggtaaaatacatatttaaatttattatagctatagttgataccgtatttatttacattgttagaggttggaaggtaccagagtagg

SEQ ID NO: 227391 - DNA, 928 bp, Unknown
  Bacterial polypeptide expressing nucleotide sequence isolated from the Sargasso Sea
tttggcaattaaatatcatagatttgaagaaaataagtatccatcaacaaatataagattagatatgtttaaaaaacatattaatttaataaaagaaaataatttaaacttttataatcctggagaattttcaaaaagttttaaaaaagttaaggaaaaaaaaaaaattttactaactgttgatgatgcatttacatcattttatgaaaatgcttggccaattttaaaagaagaaaaaattccttttattttatttgtttcaacagaagctgttggaaatataggatatatgagttgggaccaaataaaagaagtagaaaaggaaaattttgcatacattggcaatcattcacattcacacgattatttaacaaaatttacttttgaaaagtttgtgaaggatattgaaaaatcaattaacattttcaatgataaattaggctataatccaagctttttttcgtatccttttggtgaatataatttagagcaaaaaaattatatttcaaaaaattttgaatttgcatttgggcaacattcaggtgttattgatttaaataaggataggtatgaactaccaagattccctataaacgaaaaatatggagaaacaaaaagatttaatgaagtaatatcttatttgccacttcagtataaaattattaaaccagaggacaagtttatgaatgaaggggaaaaccctcctaaaatgacgatagaatttttcgaggaccaaaaaaatttagaaaatattaattgcttttcaaatgaaggctcaaaatggagaaaaacaaaaatagtattaattgacaatgtactaaaaattaatttttcagaaaaatttattgaaagaagagggagaattaactgttctttaaaagatgaaaatggatggagattttcaggtttccaatttgttcaaaattaa

SEQ ID NO: 227392 - DNA, 197 bp, Unknown
  Bacterial polypeptide expressing nucleotide sequence isolated from the Sargasso Sea
tttcggagatgctcatatatataaaaactctatagaccaagtaaaagaacagatatcaagaccaccaaaacaactgccaacacttgttattcctgaacttaatgagtttgatgacttaaaaagttgttctattgacgatttcattttggaaggatatgacccacaccctcctataaaagcaaaaatggcggtttaaa

SEQ ID NO: 227393 - DNA, 382 bp, Unknown
  Bacterial polypeptide expressing nucleotide sequence isolated from the Sargasso Sea
gatgaaacaatacctagatgctttgagatattgttatgataatggctctgatgttgaaagtagagctggtgttgttagaaagtcttttggttatcaaatgcattatgacctatcaaaaggttttcctgctataacgactaaaaaactagcatggaaatctgtagtttcagagttattgtggtttatcgaaggttcagacgacgagagaagacttgctgaaattttatataatgattcaagagaaaatttaaaagataaaaaaactatttggacgcaaaatgctcaagctgattattggaaatccaatgctagatttgagggagatgtcggtaaaatttatggagttcaatggagaaatttaatggagaggatcaagtcttaa

SEQ ID NO: 227394 - DNA, 421 bp, Unknown
  Bacterial polypeptide expressing nucleotide sequence isolated from the Sargasso Sea
atgagagaaaataaaattttatcatctgcagcattaataactaaagtattcattttttttattatttttttaaacgttaaagctgaagtagtaaataagaaatattttaaaaatgaacaaggtgttttagcaataatgtatcacagatttgaagaaaataagtatccatcaacaaatataagattagatatatttaaaaaacatattaatttaataaaagaaaacaatttaaatttttataatccaggtgaatttataaaaaattttaagaaggttaaggaacaaaaaaagattttattaactattgatgatgcattcacatcattttataaaaatgcttggccaatcttaaaagaaaaaaaaattccatttattttatttgtctcaacagagtcagttggaaataaaggatacatgagct

SEQ ID NO: 227395 - DNA, 432 bp, Unknown
  Bacterial polypeptide expressing nucleotide sequence isolated from the Sargasso Sea
aatgaaacagtatattgaagctcttaaatattgttttgaaaatggttctgatgttgaaagtagagctggcaaagtcagaaaaaattttggatttcaaatgagatttgatttacaaaaaggttttcccgctatgaccacaaaaaaacttgcatggaaatcagttgtttcagaacttttgtggtttctcgaaggatcagatgatgaaagacgtcttgctgaaatattatatgaagataaaagaaaaaatttgaaacataaaacaactatttggactaagaatgcaaattcaaattattggaaaaataaagctaagtttgaaggagatgttggaagaatttatggagtgcagtggagagattttaatggtgtagatcaagttaataatcttattaaaggaattaagtcagatccaaatgggaggagacatatttt

SEQ ID NO: 227396 - DNA, 476 bp, Unknown
  Bacterial polypeptide expressing nucleotide sequence isolated from the Sargasso Sea
aatgaaacagtatattgaagctcttaaatattgttttgaaaatggttctgatgttgaaagtagagctggtaaagttagaaaaaattttggttttcaaatgagatttgatttacaaaatggttttcctgctatgacaacaaaaaaacttgcatggaaatcagttgtgtcagaactattgtggtttcttgaaggatcagatgatgaaagacgtcttgctgaaatattatatgaagataaaagagaaaatttgaaagataaaaaaactatttggacgcagaatgccaattcaaattattggagagataaagctaagtttgaaggagacgttggaagaatttatggagtgcagtggagagattttaatggtgtagatcaagttaaaaatctaattaaaggaattaagtcagatcctaacggaagaagacatattttatctgcatggaatccagctgaacttcatttaatgtcattacctc

SEQ ID NO: 227397 - DNA, 199 bp, Unknown
  Bacterial polypeptide expressing nucleotide sequence isolated from the Sargasso Sea
atgaaacaatatattcaagcacttgaacacattttagaaaaaggcaaacagagggatgacagaaccggggtcggaaccagaggtgtttttgggtaccaaatgcgctttgatcttagaaacagttttccggccgtaacaacaaaaaagctggcctggaaaagcgttgtgagtgaactgctttggtttttagaaggaagca

SEQ ID NO: 227398 - DNA, 346 bp, Unknown
  Bacterial polypeptide expressing nucleotide sequence isolated from the Sargasso Sea
aatgaaacaatatattcaagcacttgaacacattttagaaaaaggcaaacagagggatgacagaaccggggtcggaaccaggggtgtttttgggtaccaaatgcgctttgatcttagaaacagttttccggccgtaacaacaaaaaggctggcctggaaaagcgttgtgagtgaactgctttggtttttagaaggaagcacagatgaaagaaggctcgcagaaatacactttgggaaaaaaagagaagatatttttgataaaaaaaccatatggacagcaaacgcaaacaagcagggcgttgagcttggatatgttaacaaccaaacacaaaaagagctgggcccc

SEQ ID NO: 227399 - DNA, 178 bp, Unknown
  Bacterial polypeptide expressing nucleotide sequence isolated from the Sargasso Sea
tatgaggcagtatcttgacttgttaagtagaatacttgacgagggtgaggcaaaggaagacaggactgggactgggaccctctcactattcgggcaccagatgaggttcgatctaaaggaaggttttccggcaattacaacgaaaagggtacattggcctagtgtaatacacgagtac

SEQ ID NO: 227400 - DNA, 293 bp, Unknown
  Bacterial polypeptide expressing nucleotide sequence isolated from the Sargasso Sea
ttcctgcgatatgtttttaggagttccatttaatatagctagttatagtcttttaattcatattcttgcaaaagattgcggatatcaagttggggagtttattctttctttaggggatttccatatatatgaagaacatttcgatcaagtaaaaattcaattaacaagagagcctaaggcacaaccacacttacaatttgaacaaaaaaaaattaatgaatacaagacttcagattttgaattaattaattatgaacatcatcctaaaattgtggcatcaatgaatgtttaga

SEQ ID NO: 227401 - DNA, 623 bp, Unknown
  Bacterial polypeptide expressing nucleotide sequence isolated from the Sargasso Sea
tatgcgtacctatgattattgcaggtctcataatattggtatattcaaaaaaagcagcatgaaagcatatttagatcttttaaaatttattctagaaaatggtcaagaaaaagaagacagaacaaatactggaacaatctcttcatttggtcatcaattagaatttgatctgaatgatggattcccagcagttactacaaagtcactagcatggaaaggtgtagtgtctgagttattatggttcttagaaggatcagatgatgaaagaagattagccgaaattaggtttaataaaaatagagatcagcttaaagatctcgataaatactcaacaatatggactgacaatgcagataatcagggtaagcagctaggatatgagaacacagatactaaaaaaatccttggtccagtttatggagtgcaatggaggaactggtcggggagagaccaattggaagatctccttaataatcttaaaaataaccctgatggcagaaggcatatcttgtcagcatggaatgtaggagagattgataaaatggctcttcctccttgtcatgtcatgtcacaattttatattcatgagaatgaaattagctgtcatatgtatcaaagaagtg

SEQ ID NO: 227402 - DNA, 535 bp, Unknown
  Bacterial polypeptide expressing nucleotide sequence isolated from the Sargasso Sea
atgaaatcatatcttaatctgctgtctcacattttagaaaatggagaaaagcgtgaagacagaactaatgttggaactatctcttcatttgggcatcaacttaaatttgatttaagggacggattccctgctgtaaccacaaaaaaacttgcatggaagggtgtcgtgtctgagcttatttggtttctagagggttctgacgatgaaagaagattagcggagataagatataacaaagatagagacgaattaattgatatagataaataccctactatttggacagataatgcagataatcaaggaaaagatttaggatatgaaaattcatcattggtaaaaaagcttggtccggtatatggagttcaatggagaaactgggatgataaagatcaaattaaagaactcttagactcccttaaaaataacccgacgagcagaagacatattctaagtgcttggaatgtagcgatgatagataaaatggctcttcctccatgccatctattagcacaattctatgtctctagcgacc

SEQ ID NO: 227403 - DNA, 880 bp, Unknown
  Bacterial polypeptide expressing nucleotide sequence isolated from the Sargasso Sea
ttgcagcaatatcttgacgtcatccgacgggtgcttgagtccgccaaacggaaggcaaaccgcaccggtgtcgacgccctgtcgaccttcaatgtgaactaccagattgatctcagggaaggctttccgctgctgaccaccaaagaaatctcgtggaaaaatatcgtcgttgaaaatctctggtttttgtccggggacacgcgcattgatcttctgcgcaagcacggctgcaaattctgggaaccctgggctgacgacaacggattggtgccgagcgcctacggcaacttctggcgtaattttcccgtccatgaaaatgggcaggcggcattcaacgaccagatccgctacgtggtcgatgaactcaaggcgcggccccagagccggcgcctggtggtatccgcctgggcacccggcaacgcccagaccagcgcgctgccgccctgtcacgccttctgggtaatgaacgtgcagcagggcgaacacggcgatcccctgctgtgcctgcatctcacccagcgcagctgcgatgtggcgctgggcctgccctacaacattgcgggctatgcgttcctcttggaactgatatcccgctttaccggcatcaagccgggttacttcggccacaccctgatcgatgcccatatctacaccgcaaaggccgacggctcgatggcggaatacgatcatattcccggcctgcgcgagcagcttgcccgcgaaccgcgtgccctgccgcgccttgagatcagcccagagatccagcacctgggcgacatctcagcgcttctggaagccgataccgaatcactgctgcagaccttccgcctgcatgattacgacccgcatcccgcgctgactttcaaagtcgctgtctaac

SEQ ID NO: 227404 - DNA, 289 bp, Unknown
  Bacterial polypeptide expressing nucleotide sequence isolated from the Sargasso Sea
ttgggggttccttttaatattgcctcgtacagtcttttggtgtgcattttttctgaaattcttaatcttgtgccgggtgagtttatatggacaggaggagattgccacatatacaacaatcattttgaacaagtaaaaaaacagattaagcgcaaaccaatgaaggcaccaaaactaaaaattccaaaacttaaatccattgacgatgttttaaaatccaaaccgaaagagtatattttggttgattataacccaatggaaagcattaaggcgccgatggctgtttagc

SEQ ID NO: 227405 - DNA, 313 bp, Unknown
  Bacterial polypeptide expressing nucleotide sequence isolated from the Sargasso Sea
atgaaaaattatttaactgctttagaatattgttttgtaagtggaaattttgttaaaagtcgtgctggcaatgttaaaaaagcatttggataccaaatgcgatttaatctagaagatggatttcctgcagttacaactaagaggcttgcatggaaagcagttgtatctgaattattatggtttttggaaggttcaaatgatgagaggagacttgctgaaattcaatatgaagacaaaaaagcaaatttaaaagataaaaaaactatatggactcaaaatgcaaatgctagattattggaaaaacaaatctaaa

SEQ ID NO: 227406 - DNA, 365 bp, Unknown
  Bacterial polypeptide expressing nucleotide sequence isolated from the Sargasso Sea
aatgaaacaatatattcaagcacttgaacacattttagaaaaaggcaaacagagggatgacagaaccggggtcggaaccaggggtgtttttgggtaccaaatgcgctttgatcttagaaacagttttccggccgtaacaacaaaaaggctggcctggaaaagcgttgtgagtgaactgctttggtttttagaaggaagcacagacgaaagaaggctcgcagaaatacattttgggaaaaaaagagaagagatttttgacaaaaaaaccatatggacagcaaacgcaaacaagcagggcgttgagcttggttatattaataaccaaacacaaaaagagttgggccccgtttatggaaaacagtgga

SEQ ID NO: 227407 - DNA, 95 bp, Unknown
  Bacterial polypeptide expressing nucleotide sequence isolated from the Sargasso Sea
aatgaaacagtacctcgacctgatgcgccacgtgcgcgagcacggcaccttcaaggaagaccgtaccggcaccggcacctacagcgtgttcggtt

SEQ ID NO: 227408 - DNA, 157 bp, Unknown
  Bacterial polypeptide expressing nucleotide sequence isolated from the Sargasso Sea
aatgaaacaataccttgatttacttaagcatataaaagataacggagtcgagaagaaggatagaacaggaactggaaacataaggtgtttcggacatcaaatgagatttaatctttcagatggattttcatgggtactacaaagaaatacatttaag

SEQ ID NO: 227409 - DNA, 593 bp, Unknown
  Bacterial polypeptide expressing nucleotide sequence isolated from the Sargasso Sea
tatgtattcctatgatgattattggattttttatgttgttatattccaggagaaaaatatgaaagcatacttagatcttcttcaatatatattagaaaacggagaagaaaaaagtgatagaactaatactggaacaatatcatcttttggacatcagtttgaatttgacttacagaaaggatttccagctgtaactactaaatctcttgcatggaaaggagttgtctctgagctattgtggttcctagagggctcagatgatgagagaaggcttgctgagatccgatttaataaagatagatctgaattaactgatttggaaaaatattcaacaatatggactgataatgcagataatcaaggcaaagaattaggatacgaaaattcagataccaaaaagattcttggtccagtttatggtgtccaatggagagattggtgtggaattgatcaaatcaaagatttactaaaaggattgaaagaaaatcctgatggaagaagacatattctttctgcttggaatgttggtgaaatagaaaaaatggctctacctccctgtcatgtaatgtcacagttttatattcataataatt

SEQ ID NO: 227410 - DNA, 305 bp, Unknown
  Bacterial polypeptide expressing nucleotide sequence isolated from the Sargasso Sea
attataccaaaggtcgtgtgacatgtttttaggagtgccttttaatattgctagttatagtctgctcactcatattattgcaaaagaatgtagcttagaagtaggtgaatttattcacacacttggtgatttccacatttatgaagagcattatgataaggttaaaattcaacttgaaagaaacactaaaaaattacccactcttttttttgaaaaaaaaagattagaagattaccaagttgatgattttatacttaaaaattataaccaccacgaaagtttgattgcaaagatgaatgtttaag

SEQ ID NO: 227411 - DNA, 440 bp, Unknown
  Bacterial polypeptide expressing nucleotide sequence isolated from the Sargasso Sea
aatgaagcagtatctcgacgctttaaaatactgttttgaaaatggaactgatgttgaaagtagagcaggtaaagttagaaaaagttttggaatccagatgcgttttgatctacaaaaaggctttcctgctataacaacaaaaaaactagcatggaaatctgtagtatcagaacttctttggtttattgaaggctcgaatgatgaaagaagattagctgaaattctttatgatgataaaagagaaaaccttagagataaaaaaacaatatggacacaaaacgcaaaagcagattattggaaacctaatgctaaatttgatggagatgttgggaaaatatatggagttcaatggagagattttaatggagaagatcaactatctaatcttattgacggtcttaaaaaagatccaaacggccggcgtcatataatctcatctt

SEQ ID NO: 227412 - DNA, 820 bp, Unknown
  Bacterial polypeptide expressing nucleotide sequence isolated from the Sargasso Sea
aatgaaatcttatctagatttagtgcagcatgttttagataatggcgtgctgaaaaaaaatcgtactggtacagacactctaatgtcatttgggtatcattataaagtagatttagcaaaagggttccctcttcttactacaaaaaaagtatttttcaactctgttattcatgaacttttatggtatttatcaggtgaaacacatatccgaaatttaagacaacatacaaaaatttgggatgcatggacatctgaagataaaaattgggaagttggaaaaatgtatggctatcaatgggttaattgggaaaaatttaacgaagataaattaactggagaaatacataaagaatacataaaccaaattgatgaggctttaaagctaataaaaaataatcctgattccagaagaattattgtgtcggcatggaatccatcagtgctagatcaaatcgcattacctagttgccatgcattttttattttcagtgttgttaataataaattaaattgtcacttaacgcaaagaagtggtgatattgcgcttggtattccatttaatctagcttgctatgcaaccttaactcagatgatggctcaagaaacaaacttagaattaggtgagttttcacattatattaatgatgctcatatttatgtaaaccatattgatggtatgaaagagcaattaaagcgtaaaccttatgatttaccaacactaattattaaagataaaccattctgggatttgaaatttgaagattttgaattaaaaaattataaacaccatcctgtaattaaatttcctgttgcagtataa

SEQ ID NO: 227413 - DNA, 316 bp, Unknown
  Bacterial polypeptide expressing nucleotide sequence isolated from the Sargasso Sea
catgtatcagagaagtgccgatatgtttcttggtgttccttttaatattgcaagttatgcccttctattatcaatatttgctgaaatattagatcttaagcctaaaaaattcgttcactcttttggggatgctcatatttatttaaattctattgatcaggtaaaagaacaacttgaaagaaagcctaaaaaactaccaaaattaattttacctaaactaaaatgcattgatgatcttaaagaatatacagttaatgactttaaactagaaaattatgatcatcatcctgcaattaaagcaaaaatggcaatctaa

SEQ ID NO: 227414 - DNA, 265 bp, Unknown
  Bacterial polypeptide expressing nucleotide sequence isolated from the Sargasso Sea
aatgaaacaatatataaaagcgttagaacatattcttgagaacgggaaacaaagagacgacagaacaggcgtaggaacaaaaggtgtttttgggtatcagatgcgctttgaccttagaaatagttttccagctgtaacaacaaaaaaactagcgtggaaaagcgttgttagcgaactgctttggtttttagagggaagcacagatgaaagaaggttggcagaaatacattttggtaaaaaaagaaatgagatagtagacaaaaaa

SEQ ID NO: 227415 - DNA, 127 bp, Unknown
  Bacterial polypeptide expressing nucleotide sequence isolated from the Sargasso Sea
catgcaagcgtatttggaccttttgaatcacctgctggaaaacggggtgaagcgagaagaccgcacgggcacaggcactttagggtgttttgggtaccagatgcggttcgatttgagtgagggattc

SEQ ID NO: 227416 - DNA, 529 bp, Unknown
  Bacterial polypeptide expressing nucleotide sequence isolated from the Sargasso Sea
atgaagcaatatcttgagcttttagactatattttgcaacatggtgaagatcgtggagatagaactggcacgggtgttatttcatcttttggtcatcaaatccgctttaatcttgaagatggctttccggcagttacaaccaagtcgcttgcctggaaaggagtagtatcagaactattatggtttctagagggctctgatgatgagcgcaggctagctgaaattcgatttaaaaaagatagatctgagctaaccgatttaagtaaattctcgaccatttggacagacaatgcagacaatcaaggtgttgagcttggctatgaaaatactgagacgactaaaaaactaggtcccgtttatggtgttcaatggagagactggggaggtgttgatcaaattaaaaaactgatcaatgaccttcaatctaatcccaatggacgaagacatatattgagcgcatggaacgttgaaaaaattgattctatggccttacccccctgccatgttatgtctcaattcttattcaaaa

SEQ ID NO: 227417 - DNA, 400 bp, Unknown
  Bacterial polypeptide expressing nucleotide sequence isolated from the Sargasso Sea
aatgaaacaatatataaaagcgttagaacacattcttaagaatgggaaacaaagagatgacagaacaggcgtaggaacaagaggcgtttttggatatcagatgcgctttgatcttagaaacagctttccggctgtgacaacaaaaaagctagcatggaaaagcgttgttagcgaactgctttggtttttagagggcagcacagacgaaagaaggttggcagaaatacatttcggcaaaaaaagagatgagatagtagacaaaaaaaccatttggacggccaacgcaaacaagcagggtgtggagcttggatatttaaacaacgaaacacaaaaagaacgaggacctgtttatggaaaaccagtggaggtcttggggcagagatgttgggcggagaagacc

SEQ ID NO: 227418 - DNA, 503 bp, Unknown
  Bacterial polypeptide expressing nucleotide sequence isolated from the Sargasso Sea
gctgcggcagtgtctcgacacgatcatgcagaatcccgccgaccggcgaattctgtttcatgcctggaaccccgccctgctggatcagatcgcgctgccggcttgccacctgctttatcagttcgtgccgaatgtcgcgcgccgtgaaatttcgctgtgcctgtacattcgcagcaatgatgtcgggctcggcacgccgttcaatctgaccgaaggcgcggctttgctgcatctggttggccgcctgacgggctacacgccgcgctggttcacctatttcatcggcgacgcgcatatctacgagaaccagctcgacatgctgcaacaacagctcacgcgcgagccgtacgaaagcccggccttcgcgatctcggaccgcgtgccggactatgcgaaaaccggcgtgtacgagccggagtggctcgagaaaatcgaaccgtcggatttctcgctggtcggctaccgccatcacgagccgcttacggcgcccatggcggtttgag

SEQ ID NO: 227419 - DNA, 352 bp, Unknown
  Bacterial polypeptide expressing nucleotide sequence isolated from the Sargasso Sea
acagttttatattcataataattctataagctgtcacatgtaccaaagaagtgctgatatgtttctaggggttccttttaatatagcgagttatgctttgctcttatctatttttgctgagattctagatttacaaccaaagagatttatacattcttttggtgacgctcacatatataaaaattcaattgatcaggtaaaggaacaaatatccagagagccaaagccacttcctaaccttaaaattcctaaaattaattctcttgaagatataaaaaaatacagcgtagatgattttattctagaaaattatgacccacaccctcctataaaagcagaaatggcagtatga

SEQ ID NO: 227420 - DNA, 298 bp, Unknown
  Bacterial polypeptide expressing nucleotide sequence isolated from the Sargasso Sea
atatgttcttacggggtaccatttaatatagctagctatgcgctacttttatcaattttcgctgaaatattaggacttaagccaaaaaggtttatacattctttcggtgatgctcatatatataagaactctattgaacaagttaaagaacaaatctctagaacgccaagatcactacccaaacttattcttcctgagcttaattcaatcgatgatttaaaaaaatatagtattgatgattttattcttgaagattacgacccacaccctcaaattaaagcagaaatggcagtctaaa

SEQ ID NO: 227421 - DNA, 290 bp, Unknown
  Bacterial polypeptide expressing nucleotide sequence isolated from the Sargasso Sea
tttgggggttccttttaatattgcatcatacagtcttttggtgtgtattttttctgaaattcttaatcttgtgccgggtgattttatatggacaggaggagattgccacatatacaacaatcattttgaacaagtaaaaaaacagattaagcgcaagccaatgaaggcaccaaaattaaaaattccaaaacttaaatccattgacgatgttttaaaatccaagccgaaagagtatattttggttgattataacccaatggaaagcattaaggcgccgatggctgtttagc

SEQ ID NO: 227422 - DNA, 1609 bp, Unknown
  Bacterial polypeptide expressing nucleotide sequence isolated from the Sargasso Sea
gatgaattacggatttattatagataaccggttatgtattggttgccatgcctgtactgtcgcttgtaaaagcgagcacgatgtgcccattggcgtgaaccgaacccatgtaaagtatattgaaaagggaacattcccaaatagtagcagagaattttccgtccatcgttgtaatcattgtgcagatgctccatgtgtagaaatatgtcctactacggctctatacactcgatctgatggtattgtagactttgacaatgatcgctgtataggatgtaaatcatgtatgcaggcctgtccttatgatgctttatatattgatccagattctcatacggcagcaaaatgtaattactgcgcccatcgtcttgacggtggatatgaacccgcatgtgtgattgtctgtccagtcgaggcgatcgtatctggagatatggatgatccaaattcaaagatatctgatcttttgaccagtgagaaggttatggcaagaaagccagaaaaaatgactcagcctaatctttactacataaatggtacaaatgaaatgttagatccgaatgctgcaaaaccagattgggaatatgtatggtcagaacagtcaaaaggagtaggccactatgcaaaatatgctgataaacgtgttagtgagtcagatacggagaatttattaatacagttagcaatggaaaactctgctcgtagtggtaaacctcttgatcagcgttcgattgatcaagttgcaaaagagatacagcaggatgtggatgaaaagaaggctcgtagagtgtatgattccccaagcaaaggtgtactatggggttgggaggtcacctcttatgtgtggactaaagcaatcgcaactggaacatttttgatgatggctatctaccagttcataaacggaccattagatcatactgttgaaattagtggtctatatattacattgattttcatgggcattacaggtgcgttacttatcaaagatctagataggccagatcgttttttatatgttcttttacgccctcaatggaggtcttggttagttcgaggtgcgtacatcattactgtctttggaggattagtcacactattactaattgatcattatcttgaccttggattttattgggtatggagtcttggtgcagtctttgctatcctcggagcaatctatactgcatttctttttgatcaagcgagagcacgagatctttggcagacgccatatatcggagcaatacatatgttagtccatgctatcattgcaggttctgtatcaatgataattattgatccggaatcaattattataatgaggagcatactctatttttctattttattaaatgttttgatcattgctaaagaggttttaataccccacaatacgccagatagtaaaaaagccatccaattgatgaccaatgggtattactcaaggtatttctggcccggacttattcttggaagcttgctaccctttatgatcttaactgcaaatacaggctttgatctagtggcagggttgcttgcattgattggaatattcttaacagagtttgtgcgtatacgagtaccgcaaatgataccactgagctga

SEQ ID NO: 227423 - DNA, 430 bp, Unknown
  Bacterial polypeptide expressing nucleotide sequence isolated from the Sargasso Sea
agaagacatattctaagtgcttggaatgtggcgatgatagataaaatggcccttcctccatgccatctattagcacaattctatgtctctagcgaccaaagcttagattgccacatgtatcaaagaagtgctgatatgtttcttggagttcctttcaatatcgcaagctactccttgcttatgcatatattagggaaagtattagacttgaccccaagatattttattcactcttttggtgatgctcacatttatttgaactcagttgatcaagttaaagaacagattaaaaggactccacgaggactccctcaattaaagtttccagatataaataatttagaggatcttaagggtctaagcctagatgattttgtacttgaaggatacgatcctcatccagctataaaagctaagatggcaatttaga

SEQ ID NO: 227424 - DNA, 587 bp, Unknown
  Bacterial polypeptide expressing nucleotide sequence isolated from the Sargasso Sea
tttgaaacaatatataagccttctcgaaaatgtaattagaaatggtgttcaaaaagaagacagaacaggaacaggaacaagatcaattttcggatggcaaatgagatttgatctgtctaaagggttcccattattaactaccaaaaaacttcattttaagtccattgcatatgaacttctatggttcattagaggtgatacaaatattgaatatttaaataaaaatggtgtaagcatttgggatgaatgggcagatgaaaatggggacttaggtccagtatatggaagtcagtggcgttcatggcctactcgagatggaggttctatagatcaattacttaaagtagtgcaagatataaaaagcaatccaaattctaggaggatgattgtttctgcatggaaccctgaatatgttgaggaaatggctttacctccttgccattgtcttttccaattttatgtagctaataacaaactatcttgccaactctatcagagaagtgctgatatttttcttggggtcccctttaatattgcatcatattctttgttaacggagatgattgcgaaatcatgtgatttggagg

SEQ ID NO: 227425 - DNA, 415 bp, Unknown
  Bacterial polypeptide expressing nucleotide sequence isolated from the Sargasso Sea
cagtaaattgtcattctcagataatgtagcaaataataaagctgcattacccccttgtcatgctttttttcaattttatgtttcaaatgataaactttcatgtcaactttatcaaagaagtgctgatgtttttttaggagttccttttaatattgcttcatatgcacttttaacaatgatgattgcaaatgtttgtaactataaatttggagagttcattcatacttttggagatgttcatatatacttaaatcatatggatcaaataaatgagcaacttggcagaatacccaaacctttgccaaaaatcaaaattaatcctggaattaaaaatatttttgattttaaatattctgacttcgaacttattggatatgatccacaccctttaataaaaggcaaagttgctatataa

SEQ ID NO: 227426 - DNA, 758 bp, Unknown
  Bacterial polypeptide expressing nucleotide sequence isolated from the Sargasso Sea
aatgaagcaatatcttgacctattagatcacattcttaaaaacggtgaagatcgtggagatagaactggaacaggcgtaatttcttcttttggccaccaaatccgttttgatcttaaagacggattccctgcggttacaaccaaatcacttgcatggaaaggtgttgtatcagaattattatggtttcttgagggctcagatgatgaacgaagattggctgaaattagatttgaaaaagatagatctgaactaactgatttaagtaaattctctactatttggaccgataatgctgacaatcaaggtattaagcttggctatgaaaataatgatattacaaaaaaacttgggccagtatatggagtccaatggagagattggggtggcgtggatcaaattaaaaaactgcttaatgaaattaaatctaaccccaacggaagaaggcatattttgagtgcctggaacgtcgagcaacttgattctatggcattgcctccatgtcatgtcatgtctcaattctatgtttcagaaagcggtcgcttatcatgtcaaatgtatcaaaggagcgcggatatgtttttaggggttccttttaatattgcaagctatgcattactgcagtcaattttggcaaatatcttaaacctggttcctggagaatttatccatacttttggcgacgcgcatatttataaaaatagtttagagcaagttaaagaacaactctcaagggtacctaaaaaacttccaaagctaa

SEQ ID NO: 227427 - DNA, 191 bp, Unknown
  Bacterial polypeptide expressing nucleotide sequence isolated from the Sargasso Sea
attttatatttcagaaaataaattaagttgtcagctctatcaaagatcttgtgatatgtttttaggagtcccatttaatattgctagttacagtttgctaactcacatgcttgcaagagaatgtaatttagaagttaggaaaatttattcattctttgggagatttccatatatacgaagagcattttgaa

SEQ ID NO: 227428 - DNA, 583 bp, Unknown
  Bacterial polypeptide expressing nucleotide sequence isolated from the Sargasso Sea
ttgaaagataacaaagtaactatttgggatgagtgggcagatcaagatggagagctagggccggtttatggatctcaatggcgttcatggccaacccatgatggcaaaaaagttgatcagctaactcaagtcattgaaagcataaaaaataatccaaattccagacgccatatagtaagcgcatggaatgtttcccttattgatgaaatggcattgccaccttgtcatatactctttcaattttatgtagcagatggaaaaatttcttgtcagttatatcaaagaagtgcggatgtctttcttggagtgccgttcaacattgcatcctatgctcttttaacaatgatgattgctcaagtttgtaacctgaagccaaaggaatttattttgactttaggtgatgcgcacctttatcacaatcatcttgatcaagctaaattacaacttgaaagagagcctaaaaaattacctagcctcgaaataaataaagatataaagaatctttttgatttttcgtatgaagattttaaaatacaagaatactatcctcaccctgcaatttcagctcctattgccgtctaat

SEQ ID NO: 227429 - DNA, 145 bp, Unknown
  Bacterial polypeptide expressing nucleotide sequence isolated from the Sargasso Sea
aatgaaacaatatcttgatttgatgaagctcgttaaggagaacggaactaagaaagaagatagaactggaacaggaactttaagtatttttggtcatcaaatgagatttgacttggaagaagggttcccctcttttaacaactaa

SEQ ID NO: 227430 - DNA, 541 bp, Unknown
  Bacterial polypeptide expressing nucleotide sequence isolated from the Sargasso Sea
catgaagcaataccttgatctgcttcgccacgtccgcgagcacggaacgtataaggaagaccgcactggcaccggcacctatgcggtgtttggttaccagatgcgctatgacctgagccagggcttccctatgctcaccaccaagaagctgcatctgcgctcgattattcacgagttactgtggttcctgtctggtgacaccaatatccgttatctaaaggaaaacggcgtgtccatctgggatggctgggcgacaccggagggtgagctggggcctgtctatggtgagcagtggcgcagttggaaaacggcggatggcggggtgattgatcagatcaccgaggtgctggaagagatcaagcgtaatccggactcccggcgcctggtggtcagcgcttggaaccccgcggtgctgccggatccgtccatttcaccggatgccaatgcagcagcaggcaagcaagcgttgccaccctgccactgcttgttccagttctatgtggcagacggcaaacttagttgccagctatatcaacgcagg

SEQ ID NO: 227431 - DNA, 790 bp, Unknown
  Bacterial polypeptide expressing nucleotide sequence isolated from the Sargasso Sea
aatgcaagagtacctagatttattagaaaaagttaagaattctggaaagccaaaaggggatagaactggaacagggacaatctcagtttttggtcatcaaatgagatttaatcttgaggattcttttcctttattgaccacaaaaaagattcatttcaaatctgttgcttatgaattgctctggtttctgaaaggagacactaatatcaattacttaaaagagaatggagtctccatttgggatgaatgggctgataaaaatggagatcttggtccagtctatgggaaacaatggcgcaaatgggagggcaaaaataatattcatgatcaagtaacagaagttattaaacagattaaagataatcctgacagcaggcgtcatatcgtaagtgcttggaatgtagctgatataccaagcatggctttagcgccttgccacatactatttcagttttatgtgcaagatggaaaattatcatgccaactttatcaaagaagtgctgatatatttcttggagtcccatttaatattgcttcgtattccctgcttacgcatatgattgccaatatatgtgatcttaaggtaggagaatttgtgcatactttaggagatgctcatctttacactaatcaccttgagcaagcagaagaacagctatcaagaaaacctttagatccgcctcaaataatagttaaggataaagaatcaatagatgattatgaatttgaggattttgaaatagtgaattatcaatttcatccacatattccagcgaaagtagcaatataa

SEQ ID NO: 227432 - DNA, 274 bp, Unknown
  Bacterial polypeptide expressing nucleotide sequence isolated from the Sargasso Sea
aatgcaagaatatctagacctacttaaaaaagttaaagaaactggtggtcataaagacgaccggactggtaccggcactctttcaatatttggacatcagatgaggtttaacctcagagattcatttccacttttaactacaaaaaaaatacattttcactcagtggctcatgaattactttggtttttaaagggtgaaacaaatataaaatatttgaaagataatagtgtaagaatttgggatgaatgggcagatgataatggggatcttggg

SEQ ID NO: 227433 - DNA, 274 bp, Unknown
  Bacterial polypeptide expressing nucleotide sequence isolated from the Sargasso Sea
gatgaaacaatatcttgatttggttcaacatgtaatggataatggtgtgtcaaaaaatgatcgaacaggcactggtacaaaaagcatttttggatatcaaatgagatttaatcttgaggatggatttcccttaattacaacaaaaaaacttcacttaaagtctattatttatgaattattatggtttctaaaaggtgataccaatatcaaatatcttcaagataacggtgtaaaaatttgggatggatgggcggataaaaatggagatctcgga

SEQ ID NO: 227434 - DNA, 525 bp, Unknown
  Bacterial polypeptide expressing nucleotide sequence isolated from the Sargasso Sea
aatgaaacaatacctagatttgctcaaacatataaaagaaaatggtgttgaaaaaaaagacaggacgggtactggaacaataagtgtattcggacatcaaatgagatttaatcttcaagatggttttcctttagtaactacaaaaaaattacacttaagatcaattattcatgagctaatttggtttataaatggtgagacaaatattaagtatttaaaagataatggagttactatatgggacgaatgggcagatagaaatggagatctaggacctatttatgggcaccaatggagaaactggaacagtgatggggttgatcaacttaatgatgtaataaattcattaaaaacgaacccttttagtagaagaatgattgtaactgcttggaatccaaatataatcccagatagtaaaaagtcttttgaagaaaacgttaaaaatggtaaggcagctttacctccttgccatgcttttttttcattttatgtttctgataataagttgtcatgtcagatgtatca

SEQ ID NO: 227435 - DNA, 796 bp, Unknown
  Bacterial polypeptide expressing nucleotide sequence isolated from the Sargasso Sea
catgaaagcatatttagatcttttaaaatttattctagaaaatggtcaagaaaaaaaagacagaacaaatactgggactatttcttcatttggtcatcagctagaatttgatttaagtgacggattcccagcagttactactaagtcattggcatggaaaggtgttgtgtctgaattattgtggtttttagagggctcagatgatgaaagaagattggctgagattagatttagtaaacatagagatcaacttaaagatctcgataagtactcaacaatatggactgataatgcagataaccaaggtaagcagctaggatatgaaaattcagatacaaaaaagattcttggtccggtttatggtgtgcaatggagaaattggtcaggaaaagaccaattagaaaatctaattcataatcttaaaaataatcctgatggcaggaggcatatcttatcagcatggaatgtaggagagattgataaaatggctctacctccttgtcatgtcatgtctcaattttatattcatgagaatgaaattagctgccacatgtatcaaagaagtgctgacatgtttcttggcgttccttttaatattgccagttatgcacttctgctctccataattgcagaaatattaaacctaaaaccaaaaagatttattcattcttttggagatgcacatatttataaaaattctatagagcaggtaaaacaacaactatctagaaaaccaaaagcatcaccaaaattaaagttaccaaatcttagttcaattaatgatttaaataactgc

SEQ ID NO: 227436 - DNA, 939 bp, Unknown
  Bacterial polypeptide expressing nucleotide sequence isolated from the Sargasso Sea
tcaattagatttataattgaattctataggcagccggactctcacatgggttacattgtatttgatacattaagtatgggtcagattttatgcatacccatgattatttgcgggttgcattatattggtatattcgaaaaaagcatgaaagcatatttagatcttttaaaatttattctagaaaatggtcaagaaaaaaaagacagaacaaatactgggactatttcttcatttggtcatcagctagaatttgatttaagtgacggattcccagcagttactactaagtcattggcatggaaaggtgttgtgtctgaattattgtggtttttagagggctcagatgatgaaagaagattggctgagattagatttagtaaacatagagatcaacttaaagatctcgataagtactcaacaatatggactgataatgcagataaccaaggtaagcagctaggatatgaaaattcagatacaaaaaagattcttggtccggtttatggtgtgcaatggagaaattggtcaggaaaagaccaattagaaaatctaattcataatcttaaaaataatcctgatggcaggaggcatatcttatcagcatggaatgtaggagagattgataaaatggctctacctccttgtcatgtcatgtctcaattttatattcatgagaatgaaattagctgccacatgtatcaaagaagtgctgacatgtttcttggcgttccttttaatattgccagttatgcacttctgctctccataattgcagaaatattaaacctaaaaccaaaaagatttattcattcttttggagatgcacatatttataaaaattctatagagcaggtaaaacaacaactatctagaaaaccaaaagcatcaccaaaattaaagttaccaaatcttagttcaattaatgatttaaataactgc

SEQ ID NO: 227437 - DNA, 537 bp, Unknown
  Bacterial polypeptide expressing nucleotide sequence isolated from the Sargasso Sea
atgacttaaaaaaacttttaggtcctgtttacggagtacagtggagacactgggcaggcatagatcaaattaaagagctgattaatgggttaaaaaataatcctaacagcagaagacatatattatcagcatggaatgttggcgagattgataaaatggcattgcctccatgtcatgtaatgtctcaattttacataaataaaggttatataagttgtcatatgtatcaaagaagtgccgatatgttcttaggagtgccctttaatatagcaagctacgcccttctactttcaataattgcagaaatattagaccttaaaccaaaaagatttatacactcctttggagatgcacacatatataaaaattctatagagcaagttaaagaacaagtcacaagaaagccaagaaccttaccaaagctagttattccaaaacttgataccattgatgatttaataaaatgctctattgatgattttattctagaggggtatgacccacaccctcctataaaagctaaaatggctgtataaa

SEQ ID NO: 227438 - DNA, 597 bp, Unknown
  Bacterial polypeptide expressing nucleotide sequence isolated from the Sargasso Sea
ccaacattggctatctcagggataacaaggtctcgatctgggacgaatgggcagatgaaaatggcgacttggggcgcgtctacggcgcccaatggacggattggaaaaaaccggatggcgggagcgtccatcaaatcgaggaagtcatccgttcgatccgggaaaacccggaaagccgaaggcatctagtatgcgcatggaatcccggagagcttcacataatggccttgccaccttgtcatgccctctttcagttttacgtagccgacggcaagctgagttgccagctttaccaaagaagcgcagatcttttcctcggcgtacccttcaacatcgcatcctatgctttgctcaccatgatggtcgctaagatttgtaacctccaagcctacgagttcgtccacagtttcggcgacctacacctgtacgccaaccacaaggaccaagcggaacttcaactatcccgggatcctcgaccatccccgaaaatgctgatccacggagaccaaagggaaatttctgacttcgtatttgaggactttgagttgaccgactattcgcctcatcccgcgatcaaggctcccattgcagtatgac

SEQ ID NO: 227439 - DNA, 559 bp, Unknown
  Bacterial polypeptide expressing nucleotide sequence isolated from the Sargasso Sea
agacttgggtccagtttatggttttcaatggagacatagtggagctaaatatattaattttgagactaattacgaaggtcaaggagttgatcaattacagaaagcaatagaaatgttgaaaaaagatccctttaatcggagaaatatcgtgtgtgcttggaatccaagtgatctctctcaaatggctctgcccccatgtcatttaatgtttcaatggtatgtagaagctaacaatcgtttaagtctccaaatgtatcagcgctctggggatagttttttaggagttccctttaatattgctagttactcaatgcttattcacatggtagcctgggtaactggattaactccgggtagatttattcatattattggtgattttcatgcttatgaagaacatttaacggctataaaggaacagatagaaaggaatccttatccattccccaaggttcaatttaagagacaaattaatgagattgatgattttaaattagaggatattgaaattatagattataagtgtcatcaaacaattaaagccaaaatggtggtttaa

SEQ ID NO: 227440 - DNA, 373 bp, Unknown
  Bacterial polypeptide expressing nucleotide sequence isolated from the Sargasso Sea
ggctttgccgccgtgccattgcttgttccagttctatgtggctgacggcaagttatcatgccaactctatcagcgcagctgcgacatattcctgggcgtaccgtttaacattgcgtcctatgcgctgctgaccatgatggtggcgcaggtctgcgatttggaacccggggactttgtctacacgatgggtgatgcgcatctgtatgcgaaccatcttgatcaggcggattttcagatgacccgcgaacgcctgccgttgccgaccttaaagataaatcccgacgttaatgacctgttcgccttcacgttcgaggattttgaactggttggctatgaggcgcatccgcatatcgccgcgcccatcgccgtctag

SEQ ID NO: 227441 - DNA, 164 bp, Unknown
  Bacterial polypeptide expressing nucleotide sequence isolated from the Sargasso Sea
aatgaaacaataccatgatttagtgaagcatgtgcttgaaaatggaacagaaaaatctgacagaacaggtacaggaacaaaaagtgtttttggctatcaaatgagatttgatttacaaaaagggttccccttagtcactactaaaaaacttcacttaaaatcaa

SEQ ID NO: 227442 - DNA, 300 bp, Unknown
  Bacterial polypeptide expressing nucleotide sequence isolated from the Sargasso Sea
agaagcgcagacattttttaggagtaccctttaacatcgcatcctatgcgcttctcgtgctaatgatagccaaagcaacagacctaatagctggagattttgtccacacccttggtgatgctcatctatatctaaaccaccttaatcaagttgatgaacagcttgctagagaacctaatgaatctcccagaatgattataagtagagaaagtaaaaacatatttgattataaatatgaagatttttctcttgaaggttataactatcatccacatatatctgctcctatagctatataaa

SEQ ID NO: 227443 - DNA, 475 bp, Unknown
  Bacterial polypeptide expressing nucleotide sequence isolated from the Sargasso Sea
aatgaagcagtatcttgacctaatgcgtttagtattggacacaggctcagaaaaaattgatagaacaggggttggaacaatctctaccttcggtcaccagatgagattcaaccttgaagatggtttcccgattcttacaaccaaaaagctacacttgaagtcaataattcatgagttaatctggttcttgcaaggtgacacgaacataaattatcttaaccaacatggggttcgtatctggaatgaatgggctgatgagagcggagaattaggccctgtatacggcgagcagtggcgttcttggcctgctggcgatggtgaaaccatcgatcaaataagtgaacttgttttaggccttaaaaataacccagactccagaagacatttggtcactgcttggaacccagctgtattaaataaaatggcactgccgccttgtcattgtctcttcccagttttatgtttccaacgaaag

SEQ ID NO: 227444 - DNA, 521 bp, Unknown
  Bacterial polypeptide expressing nucleotide sequence isolated from the Sargasso Sea
tggcccagtatatggagttcaatggagaaattggagcggagttgatcaaattaaaaaattgcttaatgacattaaatctaatccctatggaagaagacatatattgagtgcatggaacgtcgagcaacttgattatatggcgctacccccatgtcatgttatgtctcaattctacgtttctgaaagtgggcgtttgtcatgtcacatgtatcaaagaagcgctgatatgtttttaggagttccatttaatatagctagctatgctttgcttcaatccattttggcaaatatcttgaatcttgttccaggagaatttattcatacatttggagatgcgcatatttataagaatagtttggagcaagttaaagaacagctaacaagaacacctaaaaaacttccaaaacttgtaatgcctcagctagagtcaatcgacgcgttaaaaaattgttctgtaagtgactttattttagaaggctatgaatctcacccagctttaaaagcaaaaatggcaatataga

SEQ ID NO: 227445 - DNA, 652 bp, Unknown
  Bacterial polypeptide expressing nucleotide sequence isolated from the Sargasso Sea
aaaaattcatttcccttctattgttcacgagctcttatggtttttaaagggagattcaaacattagatatcttaatgaaaatggtattacgatatgggatgagtgggctgatgaaaatggtgatcttggaagaatttatggagttcaatggcgttcgtggagaaattctaagggcgaaagtatcgaccaaatatcaaatttaatgaatacgctcaaaaatgaaccagattctagaagacatatagtttcatcatggaatgttggcgatttatctaatatgaatttaccgccatgccatgcgctatttcagttttatgttgttgataacaaactttcttgccaactctatcagaggagcgcagatgtatttttaggtgttccatttaatatcgcatcatatgctcttttagcttcgatgattgcaaagacactaagttttgatcttggtgatttcattcacactcttggagatgcacatctatatactaaccatattgatcaagcaaaacttcagttaacacgtgaacccaaaaaactgccagaattagtaattctgaataagcgcgatgatatcttttcatatcagtttgatgactttaaactaacaaattatgattctcacgatcatataaaagcacctgtatcggtataa

SEQ ID NO: 227446 - DNA, 691 bp, Unknown
  Bacterial polypeptide expressing nucleotide sequence isolated from the Sargasso Sea
gatgaaacagtacctcgacctgatgcgccacgtgcgcgaacacggcaccttcaagaccgatcgtaccggcaccggcacctacagcgtgtttggccatcagatgcgcttcgacctggccgaaggctttccgctggtcaccaccaagaagtgccacctcaaatccatcatccacgagctgctgtggtttcttcagggcgacaccaacatcaagtacctgaaggaaaacggcgtgcgcatctgggacgagtgggccgacgagaacggcgagctgggccctgtctacggctaccagtggcgtagctggccggcgccgaacggtgaatccatcgaccagatcgccaacctgctggcgatgatcaagaagaacccggattcgcgccgcctgattgtttcggcctggaacccggcgctggtcgagcagatggcgttgccgccatgccacgcgctgttccagttctacgtcgccgacggcaagctcagctgccagctgtaccagcgctcggcggatatcttcctcggcgtgccgttcaacatcgccagctatgcgctgctgacgctgatggtggcgcaggtctgcgacctgcaaccgggcgagttcatctggagcggcggcgactgccatctgtacgccaatcacctggagcaggccgacctgcagctgacccgcgagccgctgtcgctgccgaccatg

SEQ ID NO: 227447 - DNA, 868 bp, Unknown
  Bacterial polypeptide expressing nucleotide sequence isolated from the Sargasso Sea
atgaagcaatatattaaagcactagaacacattctgaaaaagggcaagcaaagggatgataggactggggtagggacaaaaggagtttttggataccaaatgcgctttgatctaagaaacagctttccagcagtaacaacgaaaaaactagcctggaaaagcgttgttagtgaactgctttggtttttagagggaagcacggacgagagaaggttggcagaaatacattttggaaaaccaagagaagaaatagtagataaaaagactatttggacagccaatgccaacaagcaaggggtcgagcttggatatctaaacagcgaaacacaaaaagagctaggccctgtttatggcaagcagtggagatcttggggtaaagattttgggggagaagatcagataaaaaagataatattagacctaaaaaacaacccaaacagcagaagacacatagtcagcgcgtggaatgttgaaaaaattgataaaatggccttacccccatgtcataccatgtttcagttccatattcaagacaaagagctaagttgccaactttatcaaagaagcgcagatatgtttttaggggttccttttaatatcgcctcatatagtcttttggtgtgtatcttttctgaaattttagatctcaagccaggagattttatttggacaggtggagattgccacatatacaacaaccattttgaacaagtaaaagagcaaattcagcgcaaaccaatgcaattaccaaccctgcaaattcccaagttcaattctattgaagaggttttaaagtctacacctaaagactttaaacttattgattacagcccgatgaaaagcattaatgcccctatggcagtttagt

SEQ ID NO: 227448 - DNA, 559 bp, Unknown
  Bacterial polypeptide expressing nucleotide sequence isolated from the Sargasso Sea
atgaaaaattatttagatgctctaaaatattgttacgagaatggagattttgtaaaaagtagagctggtaatgtaaaaaaatcttttggatatcaaatgcgtttcaatcttgaaaatggttttccagctgttacgactaaaaaacttgcttggaaagcagtagtttcagaattattatggtttctagaaggttcaaacgatgaaagaagattagccgaaattctttatgatgatataagagaaaatttagaagataaaaaaactatttggactcaaaacgcagaggcagattactggaaagataaatcaaaatttattggtgatgtcggtaaaatttatggagtgcaatggagaaattttaatggtattgatcaaatacaggaattaattgaaggactaaaaaaaaatccaaatagcagaaggcatattcttactgcgtggaatccatcggagatcaatgaaatgtctttgcctccttgtcatgcattttcacaattttttgtttctaataataaattaagctgtcaattgtatcagcgctcttgtgatatgtttttag

SEQ ID NO: 227449 - DNA, 529 bp, Unknown
  Bacterial polypeptide expressing nucleotide sequence isolated from the Sargasso Sea
taaagcaaggtttgaaggtgatgtaggtaagatatatggatttcagtggagaaattttaatggagaagaccaactagaaaatttaataagaggtttaaaaaatgatccaaatgggcgacgacatattatatcttcatggaatccacctgaattgaaaaacatgtctttaccaccttgtcacgtcttttctcaattctttatttccaaaaataaattaagctgtcaactttatcaaagatcatgtgatatgtttctaggagttccatttaatattgctagttatagtttgcttactcatatgctagcaaaagagtgtaatttagaagttggtacttttattcattctttaggagattttcatatttatgaagagcattttgagcaagttaaaattcaactagaaagattaccaaaaaaacttccaattcttgattttgaaacaaagaatttttatgattataatataaatgatttcaaattattagattataaacatgatcctaaaatagaagcaagtatgaatgtttag

SEQ ID NO: 227450 - DNA, 748 bp, Unknown
  Bacterial polypeptide expressing nucleotide sequence isolated from the Sargasso Sea
atgaaacagtatttagatttatgtcagcgtattgttgacgaaggtgtgtgggttgagaacaaacgcacagggaccaagtgtttaaccgttattaatgccgatcttgaatatgatgtggcaaataataagtttccgctaataacaacgcgcaagagcttttacaaagcggcgatagcggagttacttggttatttacgtggttacgacagcgctgcacagtttcgtgatatcggctgtatgacttggaatgctaacgcaaacgaaaataaagcttggctagaaaacccacatcgtcgtggtgaagatgatatgggtcgagtgtatggtgtgcaaggtcgcagttggcaacgtccggatggcagccacctagatcaacttaaaaaagttatagataacttatcaaaagggattgatgatcgcggtgaaatagtcactttttataacccaggtgagtttgagttaggttgtttacgcccttgtatgcatacgcacaccttttctttattgggcgataccctatacttaacatcataccaacgtagctgcgatgtgccgctgggtttgaactttaatcaaattcaatgttttgtgttacttgctttagttgcacaaatcaccggccacaaaccgggtaaggcgtatcataaaatagcgaatgcgcatatttatgaaaaccaacttgagttgatgcgtgatgtgcagcttaagcgtgagccattcgcgtcgccagaattaaaaataaacccaa

SEQ ID NO: 227451 - DNA, 682 bp, Unknown
  Bacterial polypeptide expressing nucleotide sequence isolated from the Sargasso Sea
aatgaaacaatatattcaagcacttgaacacattttagaaaaaggcaaacagagggatgacagaaccggggtcggaaccaggggtgtttttgggtaccaaatgcgctttgatcttagaaacagttttccggccgtaacaacaaaaaggctggcctggaaaagcgttgtgagtgaactgctttggtttttagaaggaagcacagatgaaagaaggctcgcagaaatacattttgggaaaaaaagagaagagatttttgataaaaaaaccatatggacagcaaacgcaaacaagcagggcgttgagcttggttatgttaacaaccaaacacaaaaagagttgggccccgtttatggaaaacaatggaggtcttggggtaaagacgttggaggagaagaccaaataaaaaaaataattgaagatcttaaaaacaaccccaacagcagaagacatatagtaagcgcctggaatgtagacaaaattgaagaaatggctctgccgccatgccacacaatgtttcagtttcacatacaagacaaagaacttaactgtcagctttatcaaagaagcgcagacatgtttttgggggttccttttaatattgcatcatacagtcttttggtgtgcgttttttctgaaattcttaatcttgtgccgggtgagtttatatggacaggaggagat

SEQ ID NO: 227452 - DNA, 754 bp, Unknown
  Bacterial polypeptide expressing nucleotide sequence isolated from the Sargasso Sea
aatgaaaaattatttagatgctcttaaatattgttacgaaaatggagattttgtaaaaagcagggctggtaatgtaaaaaaagcttttggctatcaaatgcgtttcaatcttgaagatggttttccagctgtcacgaccaaaaaactcgcctggaaagcagtagtttcagaactattatggtttctagaaggttcaaacgatgaaagaagattagctgaaattctttacgatgacaaaagagaaaatttagaggataaaaaaactatttggactcaaaatgcagaggcagattactggaaagataaatcaaaatttattggtgatgtcggtaaaatttatggagtgcaatggagaaattttaatggtgttgatcaaatacacgaattaattgatggactaaaaaaaaatccaaatagcagaaggcatattcttactgcgtggaatccatcggagatcaatgaaatgtctttgcctccttgtcatgcattttcacaattttttgtttctaacaataaattaagctgtcaattatatcagcgctcttgtgatatgtttttaggcgttcccttcaacatcgctagttatagtcttttaatacatattatagcagaagaatgtaaattaggagttggagattttgttcactcccttggagattttcatatttatgaagaacattttgatcaagttaagatacaattaacaagagaaccaaagcagttaccaactttaaattttttaccaaaaaagatt

SEQ ID NO: 227453 - DNA, 469 bp, Unknown
  Bacterial polypeptide expressing nucleotide sequence isolated from the Sargasso Sea
atgaaacaatacatagaagcacttaaggattgttatcaaaatggagtagatgttgatagcagagcaggaaaggtaagaaaatcgtttgggtatcaaatgaggtttaatttacaagatggttttcctgcggtgaccacaaaaaaattagcatggaaagcagtagtttcagaattaatttggtttttggaaggctcaaatgatgagagaagattggctgaaatattatatgcagataaaagagaaaatttaagtgataagaaaactatttggactcaaaatgcaaaagctgattattggaaaaataaagcaaatttcgatggtgatgtaggaaaaatatatggcgttcaatggagaaattttaatggaattgatcagatcgaaactttgcttgaacaaattaaaaaaaatcctaacagcaggagacatatattgacagcatggaatcctgctgaacttgatttaatgtcta

SEQ ID NO: 227454 - DNA, 460 bp, Unknown
  Bacterial polypeptide expressing nucleotide sequence isolated from the Sargasso Sea
atggaacaatatctagacttactaaaagaaataaaggccaaaggaaccaaaaaagaggatagaacaggcactggtactattagtatatttggtcatcaaatgaggtttaatttacaagatggtttccctcttgttactacaaaaaaagtaaactttaactcgatccttcatgagctactttggtttgtaaaaggtgatacaaatataaggtatttagttgaaaataacgtaaacatatggaatgaatggccttttcaaaattggcttgaagaaaccaatcaaattaagaatttagaaatgcattctcaggaatggaaagacaaattaattggcttcatagatttaatcaaaacggataatgcatttgctgaacagtatggtgatttagggcccgtgtatggaaagcaatggagagattttgaaggaattgatcagcttaagttagtagttgatgacctaa

SEQ ID NO: 227455 - DNA, 545 bp, Unknown
  Bacterial polypeptide expressing nucleotide sequence isolated from the Sargasso Sea
aatgaaacaatatctagaagccttaaaatattgttttgaaaacggaaacgatgttcaaagtagagcaggtaatgtaagaaaaagttttggatttcaaatgcattatgacttatcaagaggttttcctgcagtcactacaaaaaagctagcatggaagtcagtagtatcagaattattgtggtttatcgaaggctcggatgatgagagaagattagctgaaatactttatgaggataaaagagaaaatcttaaacataagaatacaatttggactcagaatgctgaatcagaatattggaaacctaaagcaaaatttgagggcgatgtaggaaaaatatatggagttcaatggagaaattttaatggagaggatcaactagtaaatttaatcaatagtctcaaaaccgatccaaatggacgcagacatatattatcatcttggaatcctccagaaataaaaaatatgtccttacctgcttgccatgctttctcacagttttttatatctaacaatcaattaagttgtcaattgtatcaaagatctt

SEQ ID NO: 227456 - DNA, 398 bp, Unknown
  Bacterial polypeptide expressing nucleotide sequence isolated from the Sargasso Sea
atggaaccctgaatatgttgaggaaatggctttacctccttgccattgtcttttccaattttatgtagctgataacaaactatcttgccaactctatcagagaagtgctgatatttttcttggggtcccctttaatattgcatcatattctttgttaacagagatgatagcgaaatcatgtggtttggaggcaagtgaattcatcattacacttggggacgctcatttgtatgacaatcataaagaacaagcaaatttacaaattaaaagagaattaaaaaatctacctattttgaaaattaataaaaaagacaacattgaaaattatatttatgatgattttgagataatagattataatccacatccccatatttctggaaaagttgcagtttaat

SEQ ID NO: 227457 - DNA, 575 bp, Unknown
  Bacterial polypeptide expressing nucleotide sequence isolated from the Sargasso Sea
gatgaaacaatatcttgatttaatgaaatatgttcgagagtctggaactgagaaaggtgacagaacgggaacgggtaccctaagtgtatttggttatcaaatgcgttttaaccttgaagaaggcttccctttagttacaacaaaaaaagttcatctaaagtccataatctatgaactcttatggtttttaaagggctctactaatatagattacctaaacgaacatggggtaagtatttgggatgaatgggctgatgaacgaggagaacttggacccgtctatggagctcagtggaggtcttggcctacacaagacggaagttcaatagatcagatttcagaagttattaaccagataacggctaatccagattctagaaggctaatagtaagtgcctggaatgtttctcaaattgatagcatggccctaccgccatgccatgccatgtttcagttttatgttgctgatggaaagctttcttgtcagctatatcaaagaagtgcagacatatttctaggagtgccctttaacattgcctcttatgctttgttggtgctaatgatggctaaagtaa

SEQ ID NO: 227458 - DNA, 764 bp, Unknown
  Bacterial polypeptide expressing nucleotide sequence isolated from the Sargasso Sea
gggaacactgtcggtgtttggtagacagttcagacacaagctttcagatggatttcccctgcttacgacaaaaaaactccatttgaaaagcatcattaacgaattaatatggtttcttaatggagatacaaatgtaggatggctcaatgataatggagttagcatttgggacgaatgggcaacagagcaaggtgatttaggtccaatctatggagcccaatggacagcctggcccggtcgagaaggaaaattgattaatcagattgattatgttgtcgattgtttaaagaataggcccaacagtagacgtatcttgttccatgcatggaatgtggattatctccctgatgaaaccaaaagtgctcaggaaaatgtgaaagcaggcagaatggcattacccccttgtcacctgctatatcaattttatgtggcaaatggagagttatcctcacagctcatgatccgatcaagtgatacatttcttggtctgccatataacactgccagtttggctgtattaacaatgatgctagctcaacaggcaaatcttggtctgggagaaatcattatttgtacgggtgattctcatatatataacaatcatcttaatcaggcaaaaattcagcttaagcgtgagcctaagaacttgcccaagctggagattttgcggcggccagaaagtatttatgattatcgattcgaagattttcatttattagattacgatccgtacccaaatatctctgcgcctatagcggtgtgat

SEQ ID NO: 227459 - DNA, 538 bp, Unknown
  Bacterial polypeptide expressing nucleotide sequence isolated from the Sargasso Sea
gatgcagcaatatcttactcttttacgacgaattcttgatgaaggtgtggatcgtgatgaccggactggaacaggcacgagagcagtgtttggacatcagatgcgttttgacctggctgatggatttccgttactaaccacaaaaaaactgcatatcaaatctattgtccatgaattgttgtggtttatcagcggtagcacgaatattcactatctgcaaaaaaatggcgtttcgatttgggatgactgggccgatgaaaatggcgatcttggaccagtttatggcaaacaatggcgccattggcaaacgccagatggccgcaaaattgatcagcttgccgatttgattgagatgataaagactaaccctaactctcgccgattactgttgacggcatggaacccggctgatgtgccaaatatggcactgccgccctgtcattgtttatttcaatttcaagttgctaatgggcggctgtcttgtcagctttatcagagcagtgcagatagcttcctgggtgttcctttcaacattgcc

SEQ ID NO: 227460 - DNA, 702 bp, Unknown
  Bacterial polypeptide expressing nucleotide sequence isolated from the Sargasso Sea
tgacaacaaagaagtgtcacctaaaatccattattcacgaattgctttggtttcttaaaggcgagacaaacatcgcttatttgaaagagcacggggtgagtatttgggacgagtgggctaccgaagaaggcgaacttggtccggtttatggacaccagtggcgcagttgggatcgcggtgatggcacatcggtggaccaaattgccgaggtagttgagcaaatcaaaaacaacccagactcccgtcgtcttatcgttagcggctggaaccctgcggtactccctgataccagttattctcctaaagaaaatgcagcgatgggcaagcaagcactgccaccctgccatacacttttccagttttatgtattagacggtaagcttagctgccagctttaccagcgaagcggcgatattttcttgggcgttccgttcaatatcgcaagttatgctttactgaccatgatgatggcgcaagtgtgtgatttagagcccggcgattttattcatacgctaggcgatgcgcatttgtattcaaaccatcttgaacaggtagagctacagcttagtcgcgaaccgtttgcgcgtccaactatggaaattaacccagaggttaaagacatttttgggttctctttcgacgattttacgcttaaaaactatcagtcacacccacacattaaagcccctgtagctatttaag

SEQ ID NO: 227461 - DNA, 709 bp, Unknown
  Bacterial polypeptide expressing nucleotide sequence isolated from the Sargasso Sea
cgagttattttggaggatggatttcctctattaactacaaaaaaagttttttttaagtcggtcttaaaagagcttttatggttcattgcaggaaaaaccaatattaatgatggactagattgtgggatctgggacccatgggcagatgaggaggggaacctggggcctgtctatggatatcagtggcggaactgggaaaagtttaattgggatgacagaacccaatcctatcagaaaacatcagttgatcaattaaaaattgcgattgatatgatcaaacaaaatccagattctcgacgcattattgtgaatgcatggaatgtgggcgaccttgataagatggccttgcctccctgccacagcttctttcaattttatgtgattaacggacgtttagatctacaactctatcaacgctctgcagatgttgcgataggggtcccttttaatattgctagttactcactcttacttatgatggtggcacaagaatgtaacttaaagccaggttttttcgttcatacttttggtgatgcgcatttatatcttaaccatatcgatggcgtaaaagaacaattgaaaagagagccaaccgagctccctcaaatcaagattgcaaagaagcctttctttgaattggaatatgaagactttgagcttttaaattatgagccagcgccttttattaagttgcctattgcggtttaat

SEQ ID NO: 227462 - DNA, 334 bp, Unknown
  Bacterial polypeptide expressing nucleotide sequence isolated from the Sargasso Sea
ttttgtttctaacaacaaattaagctgtcaattatatcagcgctcttgtgatatgtttttaggtgtaccattcaacatagcaagttatagtcttcttatacatattatagctgaagaatgtaaattaggagtcggagattttgttcactctcttggagactttcatatttatgaagagcattttgatcaagttaagatacagttaacaagagaaccaaagcagttaccaacattaaagtttttcccaaaaaaaatgattgattacaaaacctcagattttgaattgcataattatgatccacatcctaagatattagcaccaatgaatgtttag

SEQ ID NO: 227463 - DNA, 759 bp, Unknown
  Bacterial polypeptide expressing nucleotide sequence isolated from the Sargasso Sea
catgagacaatatcaagacttattgaaattactcttggagcgaggtgtgaaaaagcaggatagaactggtacgggaacaatatcttattttggacatcaaatgagatttaaattatctgagggatttcctctagttaccacgaaaaaaattcatttcccttcaattgttcacgagctcttatggtttttaaagggagattcaaacattaagtatcttaatgaaaatggtattacgatatgggatgagtgggcggatgaaaatggtgatcttggaagaatttatggagttcaatggcgttcgtggagaaattctaagggcgaaagtatcgaccaaatatcaaatttaatgaattcgcttaaaaatgaaccagactcaagaaggcatattgtttcatcatggaatgtcggagatttaagtgatatgaatctcccgccatgtcatgctttgttccagttttatgtcgttgataataaactttcttgtcagttgtatcagagaagcgcagatgtatttttaggagttccatttaatatcgcatcatatgcgctgttaactctgatgattgcaaaaaccttgggccttggtctgggtgattttattcacactcttggagatgctcacttgtatattaatcatattgatcaagcaaaacttcagataacacgtgaacctaaaaaattacctgaattagtaattttgaataagcgcgatgatatcttctcatatcagtttgatgactttaaactaacaaattatga

SEQ ID NO: 227464 - DNA, 327 bp, Unknown
  Bacterial polypeptide expressing nucleotide sequence isolated from the Sargasso Sea
aatggaacaatatttaaatctacttacagaaataaaatctaaaggaactaaaaaagaggatagaaccggaacgggaacaatcagcatattcggacatcaaatgagattcgatttgaatgacggatttccattagtaaccaccaaaaaagtaaatttcaatgcaatcttgcacgaacttttatggttcataaaaggcgagacaaatattgaatatttagtaaaaaataatgtaaatatctggaatgaatggccatttcaaagttggttggagaaaacaaatcaaaacgaaaggttggtcatgcattcaaaggaatggaaggaaaaatt

SEQ ID NO: 227465 - DNA, 345 bp, Unknown
  Bacterial polypeptide expressing nucleotide sequence isolated from the Sargasso Sea
aaaaaagagcttgggccaatatatggaaaacagtggaggtcttgggggaaagagggtgaaggggtcgaccaaataaaaaaaattattaacgacataaaaaaagacccccacagcagaagacaccttgtaagtgcctggaatgtggaaaaaattgatcaaatggccctcccaccgtgccactcaatgtttcagttttatgtccagggcggcgaactgagctgtcagctttatcaaagaagcgcagacatgtttttaggggtcccttttaacgttgcatcatacagtctcttaacccacatgctttctcaaatattagacctaaagccagccgagtttatttggacc

SEQ ID NO: 227466 - DNA, 450 bp, Unknown
  Bacterial polypeptide expressing nucleotide sequence isolated from the Sargasso Sea
gtgcttggaatgtggcgatgatagataaaatggctcttcctccatgccatctattggcgcaattctatgtctccagcgaccaaagcttagattgccacatgtatcaaagaagtgctgatatgtttcttggggttcctttcaatatcgcaagctactccttgcttatgcatatattagggaaagtattagatttgaccccaagatattttattcactcttttggtgatgctcatatttatttgaactcagttgatcaagttaaagaacagattaaaaggactccacgagagctccctcaattaaagtttccagatataaataatttagaggatcttaaggatctaagcctggatgattttatacttgaaggatatgatcctcatccagctataaaagccgaagatggcaatttagaattaaccttgattttgaatatagtctcttcttagc

SEQ ID NO: 227467 - DNA, 514 bp, Unknown
  Bacterial polypeptide expressing nucleotide sequence isolated from the Sargasso Sea
ggtgatgttggtaaaatctatggagtgcaatggagaaattttaatggcgttgatcaaatacatgaattaattgaaggattaaaaaaaaatccaaatagtagaaggcatatacttactgcatggaatccgccagagttaaatgaaatgtctttacctccttgtcatgcattttcacaattttttgtttctaataaaaaattaagctgtcaattgtatcagcgctcttgtgatatgtttttaggtgtaccatttaacatagcaagttatagtcttcttatacatattatagcagaagaatgtaaattaggagttggagattttgttcattccctaggagattttcatatttatgaagagcattttgatcaagttaaaatacaattaacaagagagccaaaacagttaccaacattaaagtttttaccaaaaaagatgagcgattacaaaaccgcagactttgaattgcataattatgatccgcatcctaaaataattgccccaatgaatgtttaga

SEQ ID NO: 227468 - DNA, 381 bp, Unknown
  Bacterial polypeptide expressing nucleotide sequence isolated from the Sargasso Sea
agataaatgaaatgtctttacctccttgtcatgcattttcacaattttttgtttctaataaaaaattaagctgtcaattgtatcagcgctcttgtgatatgtttttaggtgttccattcaacatagcaagttatagccttctaatacatattatagctgaagaatgtaaattaggagttggagattttgttcactctcttggagattttcatatttatgaagagcattttgatcaagttaagatacaaataaaaagaaaaccaaaacagttaccaatattagagttttcaccaaaaaagatgagtgattacaaaactgcagattttgaattgcataattatgatccacatcctaaaatagtggcaccaatgaatgtttagt

SEQ ID NO: 227469 - DNA, 436 bp, Unknown
  Bacterial polypeptide expressing nucleotide sequence isolated from the Sargasso Sea
attaagtcagatccaaatggaagaagacatattttatctgcatggaatcctgctgaacttcatttaatgtcattacccccttgtcatgctttttcacaattttatgtttcccaaaataaaattagctgccaattatatcaacgatcttgtgatatgtttttaggtgttcctttcaatatagcaagttatagcttatttcttcatttacttgcagctgaatgttcattggaagtgggagaatttatacttactttaggtgattatcatatatatcatgaacactttgaggcagtagaagaacaaatttcgagaaaacctaaacaactaccgaatttagagtttattaaaaaaaatatatttgactattcactaagagattttactttagaaaattatgatcctcatccaactataaaagcaactatgaatgtttaat

SEQ ID NO: 227470 - DNA, 862 bp, Unknown
  Bacterial polypeptide expressing nucleotide sequence isolated from the Sargasso Sea
aaacagtacttacgattaataggtgatattctcagtgaaggaacattagaagaaggtaggaatggtaaaacaatgtctatatttggaagttctatgcatttttctcttgaaaataatgtaatcccactattgacaactaagaaagttgcatggaaaacttgtttacgtgaattactatggttcatgcgaggtgacactagtaacgatcggcttttggaaaaaaatgtaaaaatatggtctgctaatgcttccagaagttttttggatagtcgtggtctcacaaatcttcgtgaaaatgatttaggtcctgtttacggtcatcagtggagattttttaatgctgaatataaagattgtgataccgactacactggcaaaggtgtagatcaactccaatatataatcgaccagttgaaaaatcctgaaacaagaaattcacgaagactagtaatgtctgcatggaatccatgtcagcttgatgaaatggctcttccaccgtgtcatgttttaacacaatttaatgtatctggtggaaacaaattatcatgcgctttatatcaacgaagtggagatgtaggtttaggagttccatttaatatcgcttcttattcatttctcacacatataatcgcaaaacattgtgatttagaaccatatcaattcatatataatttaggaaacgctcatatttatgacgaccatatacaacaattaaaagaacaacaacaacgcaattgttatgaatttcctacaataacaattaaaaacaaacatgaaaatattaatgactatgatgaatcagatattgaaatacataattatcattgtcatgaaacagtaaaaatgaagatgcgtgaataaa

SEQ ID NO: 227471 - DNA, 745 bp, Unknown
  Bacterial polypeptide expressing nucleotide sequence isolated from the Sargasso Sea
gatgaatcaatatttaaaagcacttaataattgtttaaataatggcgttgatgtcgaaagcagggcaggaaaagtaagaaaagcttttggataccaaatgagatttgatttgaaaattggttttccaataattacgacaaaaaaaatggcatggcgatcaatagtttccgaacttttatggtttctagaaggttcaaatgatgaaagacggttagcagaaattcactatggaaagccaaaatctgaattaaaagataaatcaacaatatggactagaaatttgcaagcagattattggaaagagaaatctcagtttgatggagatttaggtaaaatatatggttaccaatggagaaattttggaggtatagatcaaataaaagatttaatagaaagtttaaaaaataatcaagatagtagaagacatattatatcatcttggaatccagggcagttaaaagaaatggcactaccgccttgccatatattagctcagttttatgtggcaaataataaaataagttgccaactttatcagagatcttgtgatatgtttttaggagtccctttcaatatttcaagttatagtcttttgacacatatattggcaaaagagtgtaattttgaaattggtgaatttattcataccttgggtgattatcatatttatcacgcacatttaaaacaagtaaaagaacaattaaaatgtgatcctaagaaacttcctagtttaaaatttgataaa

SEQ ID NO: 227472 - DNA, 265 bp, Unknown
  Bacterial polypeptide expressing nucleotide sequence isolated from the Sargasso Sea
atagcttcgtacgcccttctcacacatatgatagctgatataacaaatttagatgtaggattttttgtacacactctaggcgatgcacatttataccttaatcaccaagaccatgctaaagagcaattgaccagaaaaccaagagacttacctacactagtcattaatgaaaaaaggaaaagcattgatgagtttcaatttgatgattttacatttcaaaattatgcacctgacccacatatcaaagcgccaatagcagtttaat

SEQ ID NO: 227473 - DNA, 595 bp, Unknown
  Bacterial polypeptide expressing nucleotide sequence isolated from the Sargasso Sea
ttgaaacaatatataagccttctcgaaaatgtaattagaaatggtgttcaaaaagaagacagaacaggaacaggaacaagatcaattttcggatggcaaatgagatttgatctctctaaagggttcccattattaactaccaaaaaacttcattttaagtccattgcatatgaacttctatggttcattagaggtgatacaaatattgaatatttaaataaaaatggtgtaagcatttgggatgaatgggcagatgaaaatggggacttgggtccagtatatggaagtcagtggcgttcatggcctactcgagatggaggttctatagatcaattacttaaagtagtgcaagatataaaaagcaatccaaattctaggaggatgattgtttctgcatggaaccctgaatatgttgaggaaatggctttacctccttgccattgtcttttccaattttatgtagctaataacaaactatcttgccaactctatcagagaagtgctgatatttttcttggggtcccctttaatattgcatcatattctttgttaacggagatgattgcgaaatcatgtgatttggaggcaacatgaa

SEQ ID NO: 227474 - DNA, 766 bp, Unknown
  Bacterial polypeptide expressing nucleotide sequence isolated from the Sargasso Sea
atgcaagaatacctagatttacttaaaaaagttaaagattctggtaagcctaagggcgatagaacaggcacaggcactctatcaatatttggtcaccaaatgagatttgacctgcaagattctttccctttgctgactacaaaaaaaattcattttaagtccgtagcatacgaattactttggttccttaagggagataccaatataaaatatttaaaggataatggtgtttcaatttgggatgaatgggctgatgagaatggagacttaggcccagtttatggtaaacagtggcgtgattggaaaggagcaaatggtttccatgatcaaatctcaaatgttattgatcagattaaaaacaaccctaatagtagaagacacattgttagtgcatggaatgttgctgaaattccaagtatggctcttgctccatgccacatcttatttcaattctatgttcaagaaggaaagctatcttgtcagctatatcaaagaagtgctgatatttttttaggtgttccttttaatattgcttcttacgcgttgcttactcatatgattgcaaatgtatgtgacctagaggttggtgattttgttcatactttaggtgatgcacacttatacaataatcatttaacccaagctactgagcagctatctagaacccccttaaagcccccacaaataaaagttgcgaaaaaaaactcaattgatgattacgtttttgaggattttgaaataattgattatgaacatcatcctcaca

SEQ ID NO: 227475 - DNA, 182 bp, Unknown
  Bacterial polypeptide expressing nucleotide sequence isolated from the Sargasso Sea
gatgaagcagtatcttgatttaatgcgttatgtccgagaaaaggggacaaaaaaagaggatcgaactggtacaggaactcttagtgtatttggttatcaaatgcgttttgatttagaggaagggttccctttaattaccaccaaaaagatacacttaaaatctattatctatgaactcttat

SEQ ID NO: 227476 - DNA, 800 bp, Unknown
  Bacterial polypeptide expressing nucleotide sequence isolated from the Sargasso Sea
aatgggagaaacaaaagacgataggactggagttggtactatcggcatttttggtgctcaactaaaattcaatttaaatgaaggttttcctgctgtaacaacaaaaaagcttgcttggaaaggtgtggtgtctgagctactttggtttttggaaggatcagatgatgaaagacggttagctgaaattagatataacaaaacaagatctgagcttgatgatcttgataaatacaaaaccatttggacagataatgctgataatcaaggaaaggcactaggttaccagaatgataatcttgttaagaaacttggtccagtatatggcgtccagtggagaagctggaacggtatagatcaggtcaaagatctgctgagtaacttacaaacaaatccacatagcagaaggcacattttaaatgcgtggaatgtaagtgaaatagagcgtatggcattacctccttgtcatgtgatgtcacagttttatgtaggagaggatgactctctttcatgccatatgtaccaaagaagtgcagatatgtttcttggtgtaccatttaatatagcaagttatgcgctcttaacacatatctttgcatccatattagatcttaaagttggtgcttttgttcacagctttggagactgtcatatctatcttaatgctatagagcaagttaaagagcaaatatctagaaagccattaaaattgcctgaattagtaatgccaaaaatttattcgattgataatattgcagaattgagagtcagcgaatttaaattgcaaggctatgaacatcatc

SEQ ID NO: 227477 - DNA, 346 bp, Unknown
  Bacterial polypeptide expressing nucleotide sequence isolated from the Sargasso Sea
atgatacaatatttagaattactaaagaatgtttttgataatggaataataaaaaaagatagaactggtgttggcacaaaatctatcttcggatggcaaatgagatttgatttaagtaaaggattccctcttttaacaacaaaaaaacttcatattaaatcaatagttcacgaacttttatggtttgtaaaaggagatacaaatatacaatatttaaatgataacgatgtgcatatttgggatgattgggcagatgataaaggtaatttaggtccagtttatggaaagcaatggcgttcttgggaaaataatggagttgagattgaccagttaaaaaatgcaattg

SEQ ID NO: 227478 - DNA, 793 bp, Unknown
  Bacterial polypeptide expressing nucleotide sequence isolated from the Sargasso Sea
agcatacttagatcttcttcaatatatattggaaaacggagaagaaaaaagtgatagaactaatactggaacaatatcatcttttggacatcagtttgaatttgacttagagaaaggatttccagctgtaactactaaatctcttgcatggaaaggagttgtatctgagctattgtggttcctagagggctcagatgatgagagaaggcttgctgagatccgatttaataaagatagatctgaattaactgatttggaaaaatattcaacaatatggactgataatgcagataatcaaggcaaagaattaggatacgaaaattcagataccaaaaagattcttggtccagtttatggtgtccaatggagaaattggtgtggaattgatcaaatcaaagatttactaaaaggattgaaagaaaatcctgatggaagaagacatattctttctgcttggaatgttggtgaaatagaaaaaatggccctacctccctgtcatgtaatgtcacagttttatattcataataattctataagctgtcacatgtaccaaagaagtgctgatatgtttctaggggttccttttaatatagcgagttatgctttgctcttatctatttttgctgagattctagatttacaaccaaagagatttatacattcttttggtgatgctcacatatataaaaattcaattgatcaggtaaaggaacaaatatccagagagccaaagtcacttcctaaccttaaaattcctaaaattaattctcttgaagatataaaaaaaatacag

SEQ ID NO: 227479 - DNA, 247 bp, Unknown
  Bacterial polypeptide expressing nucleotide sequence isolated from the Sargasso Sea
atgaagcaatatttagatatactaagtcatgtgctcaagcacggtgttgaaaaagaagacagaacaggtaccggtacattatcatgttttggatatcagacacgatttgatcttgataaaggatttccgctagtaactacaaagaaacttcacacaaaatcaatcatatatgaactactttggttcttaaaaggggataacaatactcaatatttaaaagatatatggtgtaacaatttgggatgaa

SEQ ID NO: 227480 - DNA, 514 bp, Unknown
  Bacterial polypeptide expressing nucleotide sequence isolated from the Sargasso Sea
aatgaaaaattatttaaacgcccttcaatattgttttgaaaatggagatttagtaaaaagtcgagctggtaatgtaaaaaaagcttttggatatcaaatgcgatttaatcttgatgaaggctttccagcagttacaacaaaaaaacttgcatggaaggcagttgtatcagaattattgtggtttttagaaggttcaaacgatgagagaagattagctgaaattctttatgaggacaaacgagaaaatttaaatgataaaaaaactatttggactcaaaatgcagaagctgattattggaaacataaatcaaaatttgttggtgatgtaggtaaaatttatggagtacagtggagaaattttaatggcgttgatcaaataggaaaactaattgatggattaaaaaaaaatcctgatagcagaaggcatatacttactgcatggaatccgtcagaattaaatgacatgtctttacctccttgtcatgcattttcacaattctttgtttcaaataaa

SEQ ID NO: 227481 - DNA, 725 bp, Unknown
  Bacterial polypeptide expressing nucleotide sequence isolated from the Sargasso Sea
gccgtttaatcttaatgatggtttcccaatattaacaacaaaaaaaattcattttaaatcaattgtatacgaacttctttggtttttaaaaggagatacaaacataaaatatttgactgacaacgggattagaatttggaatgaatgggcagataaaaaaggaaatttaggccctgtttatggtaaacaatggagaaattggaataacgaaggtattgatcagatcaagctagcaatagatactttgaaaaaaaatccggatagtagaagaatacttatttcagcctggaatccatcagtgcttccagataacaaattgtcattttcagaaaatgtagcaaacaataaagctgcattacctccctgtcatgctttttttcaattttacgtttcaaatcatcagctctcatgccaactctaccaaagaagtgctgatgtttttttaggtgtaccttttaatattgcttcatatgcacttttaacaatgatgatagctaatgtatgcaaccttagattaggtgagttcattcatacttttggagatgttcatatatactcaaatcatatggatcaaataaatgagcagctcactagaaaacctaaacctttaccaaaaatcaaaattaatcctgcagttaaaaatatttttaactttaagtacactgattttgaattaattggatatgatccacacccatcgataaaaggtaaagttgcagtataat

SEQ ID NO: 227482 - DNA, 571 bp, Unknown
  Bacterial polypeptide expressing nucleotide sequence isolated from the Sargasso Sea
atgcaatcatttgagtcacaatacctagatctactcaaagacgtcctgtctaatggatcgatgcgttcaaaccgtacaggtgtaggaacaatatccgcattcagcagagaaatgcgtgctgatatctctcaggacttcccagtactcacaaccaagaggatttattggcctgcagtagtgcacgagcttatctggcttttatcaggtaataccaatattgaataccttaaacaacatggagtcagaatatgggatgaatgggcagatgctaacggtaatctaggtcctgtatacggtcatcaatggcgtaagtggccaacctcagatggtaagcatattgatcaaattgccaacctcattgagaacctcaaaaacaatccatactcacgccgacatatcatcaatgcatggaacgtgggcgcaatcgatgaaatggcactccccccctgccaccttctttttcagttctatgttaccaatgaccaaaagctgaactgtaaactattccaacgttctgctgatcttttcttaggtgtaccctttaatatgcttcctacagtctactcgtcta

SEQ ID NO: 227483 - DNA, 304 bp, Unknown
  Bacterial polypeptide expressing nucleotide sequence isolated from the Sargasso Sea
tatgaagcagtatctggatcttataaaacatgttatcgaaaaaggtgatgaaaaaggagatagaacaggaacaggaaccaagagtgtatttggttatcagatgcgttttaatttacaagacggttttcccctagttaccaccaaaaaactgcatctaaaatctattatttacgaattattatggttcataaacggagagaccaatatcaaatatttaaaagaaaatggagtcaaaatttgggatgcatgggcagacaaaaacggagatttaggtcctgtctatggttcacaatggagaaattgg

SEQ ID NO: 227484 - DNA, 484 bp, Unknown
  Bacterial polypeptide expressing nucleotide sequence isolated from the Sargasso Sea
ggaattaagggtggtatagatcaaataaagcagataattcatttattaaaaacggaacctacaagtagacgaattatattatctgcttggaatccagtggatttagacaaaatgtcattaccaccatgtcatgttatgacacaatttaatgttgatggatactatttagatgctcagttatatcaacgttcaggtgatatgtttttaggtgtgccttttaatattgcttcttatgctttcctattacatattttaggaaaacttacagggtatatacctcgttatttacatcatgtgattggtgattgtcatatttataaatcccatattgatgtagttgataaacaattagaaagagtgccattaacgatggctaagatagaaatagggaatattaaagatatcgatgatgtaatggaagcagatattaaaatagtagattataaatgtgataatattattaaggcgcaaatggtagtttaga

SEQ ID NO: 227485 - DNA, 676 bp, Unknown
  Bacterial polypeptide expressing nucleotide sequence isolated from the Sargasso Sea
atgttaaagcgactttctgaacacaataaaataaatggcgattgcatacatgatgaaaatcaatatttaaatttaatcaaagatattttggagcatggagatatggtcaaagggcgtaatggttttgctaaaacagttattggtagttcgatgcatttttctttagaaaataatactattcctattttgaccacaaaaaaagttgcatggaaaacttgcctaaaagagttgttatggtttattagaggttcgacaagtaataaagagttacaggcagaaaatgtgaaaatttggaatggaaatgcctctagggaatttttagatagtagaaatttacatcatttagaagaaaatgatttagggccggtatatggacatcaatggcgacactttaatgcttattataaaaattgcgaagaagattatagtggtgaaggtgtcgaccaattacaatatataattgacaatttaaaaaatcctgaaacgagaactagtcggagattggtcatgtcggcatggaatcctgttcaattagatgaaatggcgcttccaccgtgtcatgttttagtgcaatttaatgtcaccaaacaaaacagattatcttgtagtttgtatcaacgtagcggtgacgtaggattaggggtacccttcaatatagcatcgtatagttttttaa

SEQ ID NO: 227486 - DNA, 469 bp, Unknown
  Bacterial polypeptide expressing nucleotide sequence isolated from the Sargasso Sea
tgatcaaatcaccaatttaattgccgatttaaagtcgaacccagattccagaagattgattgtaactgcttggaatcctagtgatgttagtgatatggcattgccaccgtgtcactgtttgtttcaattttatgtggctcgtgggaaattatcttgtcaattatatcaaaggagtgcggatgtatttctgggtgttcctttcaatatagcttcttatgccctactgacgataatgatagcgcaggtagtagatttgtgtcctggagaatttgttcatactttaggagatgcccacatctataaaaaccacataccccaagccgaacttcaactacaaaggttacccaaaaaactccctcagatgattttagataatgaggtgcgtgatatttttggtttttgttatgaaagtttcgatatcaaggattataatcctgacgctcatatcgcagctaaggttgcagtttga

SEQ ID NO: 227487 - DNA, 113 bp, Unknown
  Bacterial polypeptide expressing nucleotide sequence isolated from the Sargasso Sea
gatgaaagaatatctcgctctaatgcgccatgtacgtgatacgggtgtgaaaaaggaagatcgaactggtacaggtacgttaagtgtattcggctatcagatgcgtttttatc

SEQ ID NO: 227488 - DNA, 724 bp, Unknown
  Bacterial polypeptide expressing nucleotide sequence isolated from the Sargasso Sea
aatgaaacaatatattcaagcgcttgaacacattttagaaaaaggcaagcagagggacgacagaacgggggtcggaaccagaggtgtttttgggtaccaaatgcgctttgatcttaggaacagctttccggccgtaacaacaaaaaggctggcctggaaaagcgtggtgagtgaactgctttggtttttagaaggaagcacagacgaaagaaggctcgcagaaatacattttggtaaaaaaagggaagaaatttttgataaaaaaaccatatggacagcaaacgcaaacaaacagggcgttgagcttggctatattaacaaccaaacacaaaaagagttgggccccgtttatggaaaacagtggaggtcttggggtaaagatgttggaggagaagaccaaataaaaaaaataattgaagatctcaaaaacaaccccaacagcagaagacatatagtaagcgcctggaatgtagacaaaattgaagaaatggccctgccgccatgccacacaatgtttcagtttcacatacaggacaaagaactgaactgtcagctttatcaaagaagcgcagacatgtttttgggggtgccttttaatattgcatcatacagtcttttggtgtgcattttttctgaaattcttgatcttgtgccgggtgagtttatatggacaggcggagattgccacatatacaacaatcattttgaacaagtaaaaaaacag

SEQ ID NO: 227489 - DNA, 421 bp, Unknown
  Bacterial polypeptide expressing nucleotide sequence isolated from the Sargasso Sea
ttgaaacaatatataagccttctcgaaaatgtaattagaaatggtgttcaaaaagaagacagaacagggacaggaacaagatcaatttttggatggcaaatgaggtttgatctgtcaaaagggttcccattattaaccaccaaaaaacttcattttaagtcaattgcgtatgaacttctgtggttcattagaggtgatacaaatattgaatatttaaataaaaatggtgtgagtatctgggatgaatgggcagatgaaaacggggacttaggcccagtttatggaagtcagtggcgttcatggcctacaagagatggtggttcgatagatcaattacataaagtagtgcaagatataaaaaaaaatccaaattctaggaggatgatcgtatctgcatggaaccctgaatatgtagaagaaa

SEQ ID NO: 227490 - DNA, 697 bp, Unknown
  Bacterial polypeptide expressing nucleotide sequence isolated from the Sargasso Sea
aatgcatttcgatctagaagaaggatttcctttagtaactactaaaaaagttcatttgaaatcaattatccacgaattgatatggtttttagccggttcaaccaatattaaatatctaaaagataatggtgtttcaatttgggatgaatgggcagatgaaaatggagatttaggcccagtatatggagcacaatggcgatcttggccagattctaatggtggaaaagttgatcagataaaaaatcttgttgaaagtattaaatataatccaaattcaacaagacacattgtaagcgcttggaatcctgctttagttgacgaaatggcccttcctccgtgtcatgcattatttcaatttttcgtagctaataaaaaaatctcatgtcagctttatcaaagaagtgcggatgtttttcttggagtacctttcaatattgcatcttatgcactgctaacaatgatgattgctcaagtctgtaatttgaagcctggtaaatttgttcataccttaggagatgctcatttgtatttaaatcatcttgatcaagcaaaacttcaaatttctagaaaaccatttaatttacctactataaagataaattctgaaataaatagattagaagatttcgcttatgaggattttgaaattttaaactatgaaagccatccaggtatctccgcgccgatttcagtttaa

SEQ ID NO: 227491 - DNA, 627 bp, Unknown
  Bacterial polypeptide expressing nucleotide sequence isolated from the Sargasso Sea
ttgcttatgagctgctttggtttttaaaaggagatactaatattaactatttaaaagagaatggagtttctatttgggatgaatgggctgatgaaaatggagatcttggtccagtctatggtaaacaatggcgcaaatgggaaggcaaaaacaatattcatgaccaagtaacagaagtcattactcaaattaaaaataatccaaacagtaggcgtcatattgtaagtgcttggaatgtagcagatataccaaacatggctttagcaccttgtcacatactatttcagttttatgtgcaagatggaaagctgtcatgccaactttatcaaagaagtgcagatgtatttcttggcgtaccatttaatattgcttcatattctttattaactcatatgattgccaatatctgtgatctgaaagtaggggagttcgtccacactttaggagacactcatctctatacaaatcaccttgaacaagcagaagagcaattatcaagaaaacctttaacgccacccaaaataatagttaagaataaagaatctatagatgattatgaattcgaagatttcgaattaataaattatgagttccatccgcacattccagcgaaagtagcgatataaa

SEQ ID NO: 227492 - DNA, 732 bp, Unknown
  Bacterial polypeptide expressing nucleotide sequence isolated from the Sargasso Sea
caacaaaaaggctggcctggaaaagcgtggtgagtgaactgctttggtttttagaaggaagcacagacgaaagaaggctcgcagaaatacattttggtaaaaaaagggaagaactttttgataaaaaaaccatatggacagcaaacgcaaacaaacagggcgttgagcttggctatattaacaaccaaacacaaaaagagttgggccccgtttatggaaaacagtggaggtcttggggtaaagatgttggaggagaagaccaaataaaaaaaataattgaagatcttaaaaacaaccccaacagcagaagacatatagtaagcgcctggaatgtagacaaaattgaagaaatggccctgccgccatgccacacaatgtttcaatttcacatacaggacaaagaactgaactgtcagctttatcaaagaagcgcagacatgtttttgggggttccttttaatattgcatcatacagtcttttggtgtgcattttttctgaaattcttaatcttgtgccgggtgagtttatatggacaggaggagattgccacatatacaacaatcattttgaacaagtaaaaaaacagattaagcgcaagccaatgaaggcaccaaaattaaaaattccaaaacttaaatcaattgacgatgttttaaaatctaagccaaaagagtatattttggttgattataacccaatggaaagcattaaggcgccgatggctgtttagc

SEQ ID NO: 227493 - DNA, 433 bp, Unknown
  Bacterial polypeptide expressing nucleotide sequence isolated from the Sargasso Sea
caaagaagatccaaatggaaggcgtcatataatttctgcttggaaccctccggagattaaaaatatgtcattgccagcgtgtcatgcattttcacaattttttatttctaaaaacaaattaagttgccaattataccaaaggtcatgtgacatgttcttaggagttccatttaacatagctagttatagtcttttaactcatatgttagccagagagtgtagtttagaagttggaaattttgttcattctttaggagattttcatatttataaagaacattttgaacaggttaaaattcaattagaaagggtgcctaaaaaattaccagaccttcaatttgaaacaaaagatttttttaaatataacgtagaagattttaaattattaaactatcaacatcatgaaaaaattgatgctttgatgaatgtttaa

SEQ ID NO: 227494 - DNA, 243 bp, Unknown
  Bacterial polypeptide expressing nucleotide sequence isolated from the Sargasso Sea
aatgaaacaatatttagatttacttcaacatataaaagaaaaaggagtaaaaaaagaggacaggactggcactggcacaattagtgtttttggatatcaaatgaggtttaatcttcaagaaggttttcctcttgttactactaagaaactgcatttaagatcaataatacatgaacttatatggtttataaatggtgaaacaaacataaagtacctcaaagaaaatggtgtaacaatatggga

SEQ ID NO: 227495 - DNA, 398 bp, Unknown
  Bacterial polypeptide expressing nucleotide sequence isolated from the Sargasso Sea
agcttggaatccttctgaacttgatcaaaagtcactcccaccatgccacgcattttctcagttttttgtttcaaataataaacttagttgtcaattatatcaaagatcatgtgatatgttccttggagtgccttttaatatagctagttatagtttattaacacatatcattgcaagagagtgtaatttagaagttggtgattttgttcatacacttggtgattatcatatttatcatgaacactttactcaagtaaaattacaacttgaaagatctacaaaagatattcctagtctagaatttgaaacaaaaaaaatagaagaatataaaacagaagattttaaattaattaattatgatccccacccttcaataatagctgaaatgaatatttaat

SEQ ID NO: 227496 - DNA, 754 bp, Unknown
  Bacterial polypeptide expressing nucleotide sequence isolated from the Sargasso Sea
agggatggattccctgcagtaaccacaaaaaaacttgcatggaagggtgtcgtgtctgagcttatttggtttctagagggttctgacgatgaaagaaggttagcggagataagatataacaaaaacagagatgaattaaccgatatagataaataccccactatttggacagataatgcagataatcaaggaaaaaatttaggatatgaaaattcatcattggtaaaaaagcttggtccggtatatggagttcaatggagaaagtggggtgataaagatcagattcaagaactcttagactctattaaaaataacccgacgagcagaagacatattctaagtgcttggaatgtgtcgatgatagataaaatggctcttcctccatgccatctattagcgcaattctatgtctctagcgaccaaagcttagattgccatatgtatcaaagaagtgctgatatgttccttggagtcccatttaatattgctagctattctttacttatgcatattcttggaaagatattgggccttaaaccgagatacttcattcattcctttggtgacgctcacatttatctaaactcggttgatcaagtaaaagagcaaataaaaagagatccaagaccgcttcctacactaacattcccagagataaatagtttagaagatttaaaaagtttaaatcttgatgattttattcttgacggatatgatccccatcctgctattaaagcaaaaatggctatctagg

SEQ ID NO: 227497 - DNA, 580 bp, Unknown
  Bacterial polypeptide expressing nucleotide sequence isolated from the Sargasso Sea
catggataatggcgtctcaatttggaatgagtgggctggccctgatggtgacttggggccagtttatgggaagcaatggcgctcatgggagtgcagagatggcagatctattgatcaaatatctaatttaatctctaacttaaaaaactcaccacattccagacggcatataatttcagcttggaacgttagtgatatagaaaatatggcgctaccgccttgtcattgcttatttcaattttatgtctctaataacaagttaagttgtcatttatatcaaagatcagctgatgtttttctgggtgtgcctttcaatattgcttcctacgcacttctcacacatatgatcgcgcatgtttgcaaatatgaggttggagattttgttcatactttaggtgatgcacatatatattccaaccatctgggacaagtcagagtccagcttgatagatctccattaagattaccaaaactgacattaaatgaaactgtcacggacattttcaacttcaaatatgaagatataattatttctgattatgaggcccatccacacataaaagctaaagttgctgtatga

SEQ ID NO: 227498 - DNA, 777 bp, Unknown
  Bacterial polypeptide expressing nucleotide sequence isolated from the Sargasso Sea
tatgaagcagtatttagatcttatgagacacgttcgggaaaatggagtctttaaagacgaccggacgggtaccgggacctatagcgtgtttggttatcaaatgcgcttcgacttgtctgaagggtttcccctagtcaccacaaaaaaaacctttcttaaaggtattattcatgaacttctgtggtttttatcgggatcaaccaacataaagtatctcgtggatcatgatgttcacatttgggatgaatgggctgatgagcatggcgaactcggaccggtgtatggatctcaatggaggtcctggccaggcccggacggtaaaaccattgatcagatttctcgagtagttgaagatcttaaaactaatccggatagtcgtaggcatatagtcagtgcttggaatgtggctgaagtcgatgagatggccttgccgccatgtcattcgctattccagttttacgtggcggacgggcgtctatcctgtcaactctatcagcgaagcgcagatatctttcttggagtcccttttaatattgcttcctatgcactattaaatatgatgatcgctcaggttgtcgatctagaagttggggattttgttcatactctgggagatgcacacctgtacagcaaccatattgaacaagcagataaacagttgttgagagagccgcgaagcctaccgaccattagaatcaacccggaagtcaaagacattttagggtttaagatcagtgattttgagttgctagagtatgatcctcatcctggtatcaa

SEQ ID NO: 227499 - DNA, 496 bp, Unknown
  Bacterial polypeptide expressing nucleotide sequence isolated from the Sargasso Sea
atgcaacaatatttagaagcacttaaggattgttatcagaatggagtagatgttgatagcagggcaggtaaggtaaggaaatcatttggttatcaaatgcgttttgatttaaatgagggatttcccgcagtaacaacaaaaaaattagcttggaaagcagtcgtttcagaattattatggtttttagagggctctgatgatgaaaggagacttgctgaaattttatataacgacaaaagagaaaatcttaatgataaaaaaactatttggacacaaaatgctaattcaagttattggaaaaagaaagcaaaatttgagggcgatgttggaaaaatttatggagttcaatggcgtaattttaacggagtagatcaaattaaaaatttgatagaaggtttaaaaaaagaacctaatagtagaaggcatatattgactgcgtggaacccaaaagaaatagacttaatgtcacttcccgccatgtcatgctttttctcaa

SEQ ID NO: 227500 - DNA, 670 bp, Unknown
  Bacterial polypeptide expressing nucleotide sequence isolated from the Sargasso Sea
gatgcaagaatatttattagctttaaaacattgttatgaaaatggaacagacgtcagtagtagggcaggcaaggtaagaaaatcatttggatatcaaatgcgatttaatttaaataatggttttcccgcgataacaacaaaaaaattagcatggaaatctgtaacatcggaattgttgtggtttttagaaggttctaatgatgaaagacgtctagctgaaattttgtatcaggataaacgagaaaaccttataaataaaaaaacaatatggacagaaaatgccaattctgattattggaaagaacattctaaatttaaaggtgatgttggaagaatatacggagttcagtggcgtgactttaatggtgtagatcaaataaaaaatttaattgaaggaatcaaaactaatcctgatggaagaaggcatattttatcagcttggaatccagctgaaatacacctgatgtctttacctgcctgtcattcattttcacaattctatattgtaaataataacttgagttgtcagctctatcaaagatcttgtgatatgtttttaggcgtaccttttaacattgctagctatagcttattaacgcatataatcgctgcagaatgtaacttaaatgttggtgaatttattcatacatttggggactttcacaatata

SEQ ID NO: 227501 - DNA, 547 bp, Unknown
  Bacterial polypeptide expressing nucleotide sequence isolated from the Sargasso Sea
atgagacaatatttagatttacttaaacatataaaagataatggagttaaaaaagctgacagaacagggaccggtacaatcagtgtatttggataccagatgagattcaacctacaagaaggcttcccccttgttaccactaagaagctacatttaagatcaataatacatgaattaatttggtttattaatggtgaaacaaacattaaatatttaaaagataatggtgtaacaatatgggatgaatgggccgacattgatgggaatctgggtccaatatatgggcaccagtggagaaactggaattctgatggtatagatcaacttcaagacgtaattcactcacttaaaactaatccatcaagcaggaggatgattgtaacagcgtggaatccaaatattatccctgatagcaaaaagtcgttcaatgaaaacgttgaaaatggaaaagcagcattgcctccatgtcatgctttttttcaatttaatgtatctaacaataaattatcctgtcaaatgtaccaaaggagcgcagatgtattctagg

SEQ ID NO: 227502 - DNA, 559 bp, Unknown
  Bacterial polypeptide expressing nucleotide sequence isolated from the Sargasso Sea
tatcaagatgaggaatttgcttcgcaatacggagatctgggacctgtttatggaaagcaatggagagatttcgaaggagttgatcagttaaacaatgtgatacaggatattaagaaaagtcctgattctagaagattaattgtttctgcttggaatcctaaagatattcctgtgatgattaaatctggtctacctccgtgccatactctttttcagttttatgttagtaaaggaaaattatcttgtcagctataccaaagaagtgctgacgtatttcttggggtcccgtacaacatagcttcgtacgctttattaactcttatgattgccaaggtaactgaacttgaaccaggagaatttgtgcactcttttggggatacacacatttatttaaaccacttagaacaagtaaacgagcaactgagcagagatcctcactctttgcctaagttagaaattattaaaaacagaagtagtatatttgagtttgatataagtgattttgaattaacagaatataatccccacccctttatatcagcaccaattgctgtgtgat

SEQ ID NO: 227503 - DNA, 505 bp, Unknown
  Bacterial polypeptide expressing nucleotide sequence isolated from the Sargasso Sea
ttggcgcagctggccggcgcccaatggcgagtcgattgaccagatcagcaagctgattgccatgatcaagagtaacccggattcacgccgcctgatcgtgtcggcctggaacccggcgctggtcgaccagatggcgctgccgccctgtcatgcactgttccagttctatgtggcagacggcaagctgagctgccagctctatcagcgctcggccgatatcttcctcggtgtgccgttcaacattgccagctatgcgctgctgacgctgatggtggcccaggtctgcgacctgcaaccgggcgagttcatctggaccggtggtgattgccacctgtacgctaaccacatcgagcagaccgacctgcagctgacgcgcgagccgctgccgctgccgaccatgcagctcaatcccgaggtgcgtgacctctttgctttccgctttgaagactttgagttgcagggctatcaggcgcacccgcacatcaaggcgccggtggcggtatga

SEQ ID NO: 227504 - DNA, 340 bp, Unknown
  Bacterial polypeptide expressing nucleotide sequence isolated from the Sargasso Sea
ttatgttgctgataacaaattatcttgtcagatgtatcagagaagtgcagatgtatttcttggtgttccatttaatattgcttcatatgcacttttaacatttatgattgctcaagtgtgtgagttagaaattggagaatttgttcatacccttggagatgctcatatttatcttaatcatttagaacaagtagatcttcaactatcaagggatcctctagaacttcccaagcttaagttaaacccaataattaaaagtattgaagattttaaatatgaggatgttgaaattattgattataaatttcatccccctataaaaggaaaaatatcaatatag

SEQ ID NO: 227505 - DNA, 352 bp, Unknown
  Bacterial polypeptide expressing nucleotide sequence isolated from the Sargasso Sea
atgcaacagtatttagacttgatgaagcatatcttagccgaaggtgtggataaatcagaccgcacaggtaccggcactcgctcggtatttggttatcaaatgcgctttgatttgagtaagggctttcccttagtcactaccaagaagtgccatatgcgctcgattattcatgagttattgtggtttctgaaaggcgataccaatattgcttatctgcgtgagaataaagtcagtatttgggacgaatgggccgatgaaaatggcgatttaggccctgtttatggcgcgcagtggcgcagctggccgacccaaagtggagatgctatcgaccaaatcgctcaggtgatcgcac

SEQ ID NO: 227506 - DNA, 382 bp, Unknown
  Bacterial polypeptide expressing nucleotide sequence isolated from the Sargasso Sea
aatggctttgcctccatgtcatgttatgtcgcatttttatataagcaatggaacaataagttgtcacatgtaccatagaagtgctgatatgtttcttggcgtgccattcaatatagcaagctactcacttttattgagtatttttgcagaaatacttaatctcaaaccaaaaaaattcgttcattcttttggtgatgcccatatttatttgaattctgttgaacaagtcaaagaacaaatatcaagaaaaccatttagtcctcctaagttaatcttaccaaaattaaattctcttgaagatctttcatcatattctatagatgactttaagcttgaaggctatgagcatcatccagcaattaaagcaaaaatggcagtgtaa

SEQ ID NO: 227507 - DNA, 689 bp, Unknown
  Bacterial polypeptide expressing nucleotide sequence isolated from the Sargasso Sea
ttggtttttgaaaggtagtacagatgaaagaaggctagcagaaatacattttgaaaaaccaagagaagaaatagcagataaaaaaactatttggactgccaacgccaataagcaaggagttgagcttggctatcaaaacaacgaaacacaaaaagagctaggacctgtttatggtaagcagtggaggtcttggggtgaagatgttggaggggtagaccaaattaaaaaaatcatctctgacttaaaaagcaatccaaatagcagaaggcacattgtgagcgcttggaatgtggataaaattggtgaaatggcactgcctccatgtcatacaatgtttcaatttcatattcaaaacaaagaattaagttgccagctatatcaaagaagcgccgacatgtttttgggagtaccgtttaatattgcttcatatagtttgcttgtttacatactttcgagcatattagatcttaaccccggtagttttatatggactggtggagattgccacatttataacaaccatcttaatcaagtcaaagaacaggtaaaaagagaacctttagaagctccaacgcttataatgccaaactttaaatcaattgaagaagtccttaagtcaaaacctacagactacgaactgttaaattataaaccaatggacagcataaaagccccaatggcagtataaa

SEQ ID NO: 227508 - DNA, 295 bp, Unknown
  Bacterial polypeptide expressing nucleotide sequence isolated from the Sargasso Sea
tgtgatacattcttgggattgggattcaatattgcttcatatagcttattaacgcatatgattgctcaacaatgtgatttagatgtaggtgaattcatttggacagggggtgacgtgcatctctacctcaatcatttggagcaggcaaatgaacaacttcaaagagaaccatatcctcttccaactctcaaaatcaatcgaaagccggcatcaatttttgaatacaagtatgaggactttgagctcatcaattatgagtcacatccacatatatcagcacctatctcgatataaa

SEQ ID NO: 227509 - DNA, 746 bp, Unknown
  Bacterial polypeptide expressing nucleotide sequence isolated from the Sargasso Sea
aaagggtgaccgaacaggtactggcacactatctgtctttggttatcagatgcgtttcgatctctccgaaggctttccaatggtcactacaaagaagttacacttgcgctcgattgtgcatgaactgctatggttcctcaaaggagataccaacgtcaagtatctacaagaaaacggagttcgaatctggaatgaatgggctgatgagaatggagacctaggtccagtctatggaaagcaatggagaaaatgggaatccaaggatggacgtattatcgaccaagttgaacaagctattgagcagattaagaacaatccaaacagtcgacgtatcatcgtatcagcctggaacgttggtgaacttgatgagatggctttgatgccttgtcatgcctttttccaattccatgttgctgatggtaagttgaattgtcaactgtatcaaagaagcgctgatgtctttcttggagttccattcaatatcgcctcctatgctttgcttacacatatgatggctcaggtttgtggacttgaggctggaacgttcgttcacacccttggtgatgcgcatctgtacatgaatcatctcgatcaagctagagaacaaatcagtcgagatccacttccacttccaacattgaaacttgatgattcgattatggatatcgatgcattcacgtttgagagtatcgaagttgttggctatgaacaccaccctcacatctctgcaccaatttcggtatgat

SEQ ID NO: 227510 - DNA, 280 bp, Unknown
  Bacterial polypeptide expressing nucleotide sequence isolated from the Sargasso Sea
catgaagcagtatctgaccctactgaaaacagttagggaggacggtgtccgtaaagcggatcgcactgggaccgggacgttaagtgtttttggtcaccaactccgctgcgatctcggggttgggttcccggtgctgacgacgaagaagttacatctgcgctcgatcatctacgagttgttgtggtttctacgtggtgagacgaacaccaaatacctgactgaccacgatgttacgatctgggatgagtgggcggatgaggctggagagctcggccccatt

SEQ ID NO: 227511 - DNA, 796 bp, Unknown
  Bacterial polypeptide expressing nucleotide sequence isolated from the Sargasso Sea
atgaaacaatatttagatttgttagactacgtattaaaacatggaaatgtaaaggacgacagaactggaacgggcactaaatctgtttttggttggcaaatgcgttttgatctgaacaaaggatttcctttgctgactacaaaaaaactgcatttaagttcaattatacatgaacttttatggtttataagaggtgatacaaatatatcttatttaaaagacaacaatgtatcaatatgggatgaatgggctgacgaaaatggggatcttggacctgtatatggtaaacaatggagaagatggggtacacctgaagggagggagcttgaccaattatatgatgtgattagtgagattaagaataatccaaattcaagaagaatgattgtgtctgcttggaatccttcagatgtaggttctatggcattaccaccttgtcactgtctttttcaattttatgtagctgacaataaattatcttgtcagttatatcaaaggagtgcagatatttttcttggtgttccatttaatatagcatcctatgcaattttaacacatatgatagcaaatgtatgtgatatatcagttggtgaatttgtgcatactttaggggatgctcatttatataaaaatcattttgaacaagctaaaaaacaattatcaagatcaataaaaaacaaaccacaaataaaacttttgaaaaaacatactaacataaatgattttgtttttgaagatattgaaattattaattatgaccctcatcctcacatttctgctccggtagccgtataaa

SEQ ID NO: 227512 - DNA, 595 bp, Unknown
  Bacterial polypeptide expressing nucleotide sequence isolated from the Sargasso Sea
atgaaacaatatttagatttacttcaacacataaaagaaaaaggagtaaaaaaagaggacaggactggcactggcacaattagtgtttttggatatcaaatgaggtttaatcttcaagaaggttttcctcttgttactactaagaaactgcatttaagatctataatacatgaacttatatggtttataaatggtgaaacaaacataaagtatcttaaagaaaatggtgtaacaatatgggatgaatgggctgataaaaaaggaaatcttggtcctatttatgggcaccaatggagaaattggaattctgatggtatagaccagctccaagatgtaattaattcacttaaaaataatccttcaagtagaagaatgatagtaacagcatggaatccaaatattattcctgacagttcaaaatcatttagtgataatgttaaaaatggaaaggcagctttacctccatgtcatgcattttttcagttttatgtttctaataataaactatcttgtcaaatgtatcagagaagtgcagatgtatttctaggtgttccctttaatatagcttcatatgctcttttaactcatatgatag

SEQ ID NO: 227513 - DNA, 292 bp, Unknown
  Bacterial polypeptide expressing nucleotide sequence isolated from the Sargasso Sea
gctgatatatttcttgggtgttccatttaatattgcttcctatgcattgcttacacatatgattgctaatatatgtggacttgaggtgggggattttgttcatactttgggtgatgctcatctttatacaaatcatcttgaacaagcagaggagcagctttcaagaaaacctttagatcctccaaaaataatagtaaatagtaaagagtcaatagatgattataaatttgaggattttgaaatagtaaattatcaatttcatccacatattccagcgaaagtagcaatttaa

SEQ ID NO: 227514 - DNA, 796 bp, Unknown
  Bacterial polypeptide expressing nucleotide sequence isolated from the Sargasso Sea
atgaagcaatatttagatttattaagacatgttttagaaaaaggtgatgaaaaagctgacagaactggtactggtacaaagtcagtttttggttggcagatgaaatttgatttaaatgatggacttccattactaactactaaaaagctccatttaaaatctattattcatgagttattatggtttattaaaggggataccaatatatcttatttaaaagaaaataacgtttcaatatgggatgagtgggcagatgaaaacggtgatcttggacccgtttatggaaagcaatggagaagatgggatgccccagacggaagaaaacttgatcaattaaatgatgttattaatgaaataaaaaataacccaaactcaagaagaatgatagtttctgcttggaacccagcagaagttggaagcatggctcttccaccatgtcattgtttgtttcaattttacgttgcaaaaaacaaactgtcttgtcaattataccaaagaagtgctgatatttttcttggagttcctttcaatatagcatcttattcaatcttaacacatatgattgctaacgtaactggtttatctgttggtgattttgtttatacactaggtgatgctcatttatatatgaatcattttgaacaaactaaattgcaattgtctagatcttctaaaaaattaccgaaattaaaaatttcaaaaaagcgtaatgatataaatgaatttaaatttgaagattttgaaattacagactatgacccatatccaaatattccagcaccagttgcagtttaaa

SEQ ID NO: 227515 - DNA, 764 bp, Unknown
  Bacterial polypeptide expressing nucleotide sequence isolated from the Sargasso Sea
gctggatgaaggcacacagaaaaacgaccgcaccggaaccggaacgctttccatttttggtcatcagatgcgttttaacctgcaggacggattcccgctggtgacgacaaaacgttgccacctgcgctccatcatccatgaactgctgtggttcctgcaaggtgacaccaacgtggcctatctgcacgaaaataacgtcaccatctgggacgaatgggcggatgaaaacggcaatctgggcccggtgtacggcaaacagtggcgtgcctggccgacgccggatggtcgccacattgaccagatcacgaccgtgctgaaccagttgaaaaatgatcccgattcgcgccgtattatcgtttcggcgtggaacgtcggtgaactggacaaaatggcgctggcgccgtgccacgcgtttttccagttctatgtcgcggacggcaagctctcctgccagctgtatcagcgctcctgcgacgtgttcctcggcctgccgtttaacatcgccagctacgcgctgctggtacacatgatggcgcaacagtgcgatctggaggttggcgattttgtctggaccggtggtgacacgcatctgtacagcaaccacatggagcagacgcacctgcaactgactcgcgaaccgcgcgcgctgccgaagctagtgatcaaacgtaaacccgattctctcttcgactaccgcttcgaggattttgaaatcgaaggttacgacccgcatccggggattaaagcgccggttgctatctaaa

SEQ ID NO: 227516 - DNA, 719 bp, Unknown
  Bacterial polypeptide expressing nucleotide sequence isolated from the Sargasso Sea
aatgcgcacctacctgagccagcttcagcaagttctcgaaaacggcatcgagaaacctgatcgcaccggtgtcggcacgatttcgacatttggtcttcaggcccgctacgacctgtccgagggcttcccggcagtcacaacaaagaagctcgtctggaagtccatgctgtccgagctcttgtggttcgtatcaggatccggcaacatcaacgacctcaaaaccatctacaggcacaacaaactctgggacgggaactacaaggactacctcgaacgacgtggactgacccggagcaacggagaaatgggccgcatctacggcgcgcagtggcggaaatggcggagtaacggcaagactgtcgaccaactccaggatgcgatcgacctgatcaaccacaacccggattcgcgacgcatccttgtcaacgcatggaatgcggcagaagtcagctcggacgacgtcgccttgccgccctgccataccttcttccagttctacgttgccaaagacaggttgtcgttacagatgtatcagcgatcctgtgatatgttcctaggcgtccctctcaacatcgcctcctattcgattctgctttgtatggtcgctcgaatcacgaaccttatcccgcacgagttcattcatactctcggcgacgcccacatctatttgaaccacatcgacgcagttaaggcccagttgggacgcccccccctcccgc

SEQ ID NO: 227517 - DNA, 388 bp, Unknown
  Bacterial polypeptide expressing nucleotide sequence isolated from the Sargasso Sea
atgcaagagtacctagatttattagaaaaagttaagaattctggaaagccaaaaggggatagaactggaacagggacaatctcagtttttggtcatcaaatgagatttaatcttgaggattcttttcctttattgaccacaaaaaagattcatttcaaatctgttgcttatgaattgctctggtttctgaaaggagacactaatatcaattacttaaaagagaatggggtctctatttgggatgaatgggctgatgaaaatggagatcttggtccagtctatgggaaacaatggcgcaaatgggagggcaaaaacaatattcatgatcaagtgacagaagtcattaaacagattaaagataatcctgacagcaggcgtcatatcgtaa

SEQ ID NO: 227518 - DNA, 346 bp, Unknown
  Bacterial polypeptide expressing nucleotide sequence isolated from the Sargasso Sea
tttttctcagttttttatttctgagaataggcttagttgccaactttatcaaagatcttgtgatatgtttttaggggttccatttaatattgctagttatgctttgttaacacatattatagctagagaatgcaatttagatgttggtaaacttgttcatagtttaggagattatcatatttatcatgagcacttcgatcaagtagaaacgcaactttctagatctgttaaacaattgccaagtttaagttttaaaacaaaaaaaattacagaatatagaacaaatgattttaaactattaaactatgatcctcatcccactataacagcatcaatgaatgtttaa

SEQ ID NO: 227519 - DNA, 739 bp, Unknown
  Bacterial polypeptide expressing nucleotide sequence isolated from the Sargasso Sea
cagatgcgttttgatttaagtcagggctttccgttggtgaccaccaaaaagtgtcatctgcgctccattattcatgagttgctatggttccttaagggcgacaccaacattcagtatctgaaagatcataaagtaacgatttgggatgaatgggcgacagagcagggcgatttgggccctgtctatggtgcacagtggcgcagctggcaaacaccggatggtcgggtgattgaccaaatcagccaactgatccatgacattaaaacaaatccggattcacgccgattaattgtcagtggctggaatcctgcagtattaccagataccagattcagcccaaaagacaatgcggctatgggcaaacaggccttgcctccttgccatactttatttcagttttatgtgcacgatggcaaattatcctgccagttgtatcagcgcagcgctgatatttttctgggcgtgccttttaatatcgcaagctacgcgttgctgaccatgatggtagcgcaagtctgtgatttaacacccggtgattttgtgcatacttttggggatgcgcatttgtacagcaaccacctggatcaggtgaatgaacagctcagccgtactccacatccgttaccacagatgaaactcaatcctgccattaaagatatttttggttttactatagacgattttgagctggtcaattatttggcgcatcctgcgattaaagcgcctatagctatttaaa

SEQ ID NO: 227520 - DNA, 373 bp, Unknown
  Bacterial polypeptide expressing nucleotide sequence isolated from the Sargasso Sea
gcattaccgccatgccattgtttatttcaattttatgttgctcaaaataaaatctcgtgtcagctttatcagagaagcgcagatatttttcttggtgtgccatttaatatcgcatcttattcactgttacttcatcttattgcagagcagaccggctacgaagtaggcgatttcatatggacaggaggtgactgccatttgtatcttaatcatattgatcaggccaaaattcaacttcaaagagagccactaaatctgcctgaaattgcaatcaaaaaaaatattagttcaatttttgattataagtttgaggatatagagtttattaactacgtggcacatgaaaaaatattggcaccgatttcggtataga

SEQ ID NO: 227521 - DNA, 764 bp, Unknown
  Bacterial polypeptide expressing nucleotide sequence isolated from the Sargasso Sea
cctggaggagggcgaggccaagggggacaggactgggacaggaaccatttcactttttggccatcagatgaggttcgatctaagagagggttttcctgcaattacaacaaagagagtacattggcctagcgtgatacacgagttactttggttcctttccggggataccaatatcgagtatctaattcaaaacaaagtaaggatatggaacgagtgggcagatgagaatggtgatctcgggcctgtttatgggaaacagtggaggaaatgggaatcaaacgatggtagggttatcgatcaaatcgaaggggcgatagatcttatcaaaaacgatccgaacagtagacgcatcattgtttcagcatggaacgtgggggatctgcgggacatggcattgatgccctgtcacgcattcttccaattctacgtaaacgaagggaggctgtcttgtaacctatatcagaggagtgcagacgttttccttggagtgccattcaatatatcgtcctacagcctcttgacttgcatgattgcccaggtttgcgatctagaacctggcgagtttatctggaccggtggggattgccacctgtaccttaatcacatagagcaagctcgtttgcagatgtctagagagcctctgaatctaccgattctgaaactggatcaatcgataaaatcgattgacgatttcagattcgagcacatatccgtcgtcggatatgaacaccacccacacatagcggccccaatatcggtttagt

SEQ ID NO: 227522 - DNA, 493 bp, Unknown
  Bacterial polypeptide expressing nucleotide sequence isolated from the Sargasso Sea
aatgaaacaatatcttgatttattgcaacatgtcttagatgagggggtaaaaaaagaagatagaaccggcactggaacaatcagtgtttttggacatcagatgcgatttaatttgcaggaaggatttccgcttgttacaacaaaaaccctgcacataccttctatagttcatgaacttttgtggtttttgagtggcaatacaaacataaaatatcttaatgataataaagtttctatatggaacgaatgggcagacgaaaacggtgagttaggtccagtatatggctcacagtggcgaagttggcctcttccagatggaaaacaatttgaccaaattagcgatttaattagtcgaattcaatctgatccaaattcacgcagacatctggtgtcagcttggaatgtgagcttattggatgaaatggcattaccgccgtgccattgtttgtttcaattttatgtagctgaaaataaaatctcgtgtcagctttat

SEQ ID NO: 227523 - DNA, 178 bp, Unknown
  Bacterial polypeptide expressing nucleotide sequence isolated from the Sargasso Sea
aatgaagcaataccaagacctacttaaatatataaaagagaatggcgtagaaaaaaaagacagaaccgggacaggaacaattagtgtttttggttatcaaatgaaatttgacttaaaaaaaggattccctttagtcactacaaaaaaactgcatcttaggtccataatttatgaacta

SEQ ID NO: 227524 - DNA, 661 bp, Unknown
  Bacterial polypeptide expressing nucleotide sequence isolated from the Sargasso Sea
aatggaacaatatttaaatctacttacagaaataaaatctaaaggaactaaaaaagaggatagaaccggaacaggaacaatcagcatattcggacatcaaatgcgatttgatttgaatgatgggtttccattagtaaccaccaaaaaagtaaatttcaatgccatcttgcatgaacttttatggtttataaaaggcgagacaaatattgaatatttagtaaaaaataatgtaaacatatggaacgaatggccatttcaaagttggttggagagaacaaatcaaaatgaagggctaaccatgcattcaaaggagtggaaggataaattacaagaatttattgatctagtaaaaaaagacaattcctttgcaaaagagtatggagatcttggaccagtatatggtaagcagtggagagattttgaaggagtagatcaactagctcaggtaatagaggatttaaagaataacccgaattctagacgtcatattgtctcggcttggaatccaaaggaaattccaatcatgattaagtcaggcttgccaccttgtcatacactcttccagttctatgtggctgatggaaagctctcttgtcagttatatcaaagaagtgccgatgtatttctaggtgttccgtataatattgcgtcttacgccctt

SEQ ID NO: 227525 - DNA, 708 bp, Unknown
  Bacterial polypeptide expressing nucleotide sequence isolated from the Sargasso Sea
aatgcagcaatatctcgatcttctggcacgtgttctcgaagagggggtcgaccgtggcgaccggaccggcaccggcacccgcgccgttttcgggcatcagatgcggttcgacctgtcggcaggctttccccttttgacgacaaagaagctccatacgcgctcgatttttcacgagctgctgtggttcatcaagggcgacaccaacatccgctatcttcaagagcacggtgtctcgatctgggatgaatgggccgacgagaatggcgatcttggccctgtctatggcaagcaatggcgccgatgggagtcccctgacagcaccgaaatcgaccagcttgccgatctggtggcggcgatccgcgcaaccccggaatctcgccggctgatgctgtcgtcatggaacccggccgacctgccgaacatggcgctgccgccctgccactgcctgttccagtttttcgtggccgagggcaggctgtcctgccagctctatcagcgcagcgccgatatctttctgggcgtgccgttcaacatcgcctcctatgcgctgctgacccacatgatcgccgccgtctgtggtctgaagccgggggaattcgtccacacgcttggagatgcgcatctctatcacaatcatttcgatcaggcgcgcctgcagctcacgcgcgaacccgggccgcagccgcagctggtcttacaccgggtgcc

SEQ ID NO: 227526 - DNA, 764 bp, Unknown
  Bacterial polypeptide expressing nucleotide sequence isolated from the Sargasso Sea
taaagttcgaaaatcttttggatatcaaatgcgttttaatcttaacaaaggatttcctgccttaactactaaaaaacttgcttggaaagctgtaacatcagaattgttatggtttttagaaggttctaatgatgaaagacgtcttgctgaaatattgtataaagacagcagaaaaaatttaaaagaaaaaaaaacaatatggacgcaaaatgcacaatctgattattggaaaaatcaatctaaatttgatggtgatgttggaagaatctatggtgttcaatggagagattttgcaggagtagatcaattagtaaatttaattgaaggaataaaaaataatcctaatggaagaagacatattttgagcgcttggaatcctgctgagttggacttaatgtccttacctgcttgtcatgccttttcacaattttttatttctaaaggtaaattaagctgtcaattatatcaacgttcatgcgatatgtttttaggagttccttttaatatagcaagttatagcttactaactcatttaatagcacatgagtgcaaattagaagtagatgaatttattcatactcttggagatttccatatttatcatgaacattttaatcaagtaaaaattcaattaaagagggagcctagaagattgccaacattaaagtttaaatctaaaaatattttttcttatactattgatgattttcagttagttgattacgatcctcaccctacaataaaagctgaaatgaatgtttaaa

SEQ ID NO: 227527 - DNA, 634 bp, Unknown
  Bacterial polypeptide expressing nucleotide sequence isolated from the Sargasso Sea
atgaaacaatatcttgatttattgcaacatgtcttagatgagggagttaaaaaagaagatagaaccggcactggaacaatcagtgttttcggacatcagatgcgatttaatttgcaagaaggatttccgcttgttacaacaaaaaccctgcacataccttctatagttcatgaacttttgtggtttttgagcggcaatacaaacataaaatatcttaatgataataaagtttctatatggaacgaatgggcagacgaaaatggtgagttaggtccagtatatggctcacagtggcgaagttggcctcttccagatggaaaacaatttgaccaaattagcgatttaattagtcgaattcaatctgatccaaattcacgcagacatctggtgtcagcttggaatgtgagcttattggatgaaatggcattaccaccatgccattgtttgtttcaattttatgtagctgaaaataaaatctcgtgtcagctttatcagagaagtgccgatatttttcttggtgtgccattcaatatcgcatcttattcactgttacttcatcttattgcagaacagaccggctacgaagtaggcgattttatttggacaggaggtgattgccatttgtatcttaatc

SEQ ID NO: 227528 - DNA, 772 bp, Unknown
  Bacterial polypeptide expressing nucleotide sequence isolated from the Sargasso Sea
gcaaaaataagagaaaaaggcgtctttaaagaagatagaactggaactggaacctattctatttttgccgagcagatgcgctttgaccttcaaaaaggttttcctcttttaaccactaaaaaacttcacctgcgttcgatcattcacgaacttttgtggtttctctctggtagtacaaatatttcttacctaaaagaaaataaagtaaaaatctgggacgcctgggcagatgaaaaaggtgagctaggtcctgtctacggcaggcagtggaggtcttttccgcgcccaaatggcggttcagtcgatcaaattaaagaactcgttgaaggccttaaaaaaaatcctgattcaagaagacacttagttgtcgcttggaaccctggtgaaattgataagatggcccttccgccgtgtcactgtctttttcagttttgggttggagacggcaaactctctcttcaactttatcaacgctctgctgacttttttttaggggttccttttaatattgcgtcctacagccttctaacccatatgatagccgagcagtgtgaacttgaagtgggtgagtttatttggacaggaggagatattcatctttataaaaatcatcttgaacaagctagcaaacagctttcaaggtctcctttacccctagcaaaacttcttataaaaagacgaccaagtgatcttttttcttataagtttgaagactttgaaatagaaaactaccaatgtcaccctcatattaaagcagctgtttctgtctaaa

SEQ ID NO: 227529 - DNA, 556 bp, Unknown
  Bacterial polypeptide expressing nucleotide sequence isolated from the Sargasso Sea
aatgaaaaattatttagatgctcttaaatattgttacgaaaatggagattttgtaaaaagcagagctggtaatgttaaaaaagcttttggttatcaaatgcgtttcaatcttgaggatggttttccagctgtcacgacaaaaaaactagcttggaaagcagtagtttcagaattattatggtttctagaaggctcaaacgatgagagaagactagctgaaattctttatgataataaaagagaaaatttaaagaataaaaaaactatttggactcaaaatgcagaggctgattattggaaacataaatcaaaatttattggagatgtaggtagaatttatggagtacaatggagaaattttaatggagttgatcaaatacatgaattaattgaaggattaaaaaaaaatccaaatagtagaaggcatattcttactgcatggaatccatcagagttaaatgaaatgtctttacctccttgtcatgccttttcacaatttttcgtttctaataaaaaattaagctgtcaattgtatcaacgctcttgtgatatgttt

SEQ ID NO: 227530 - DNA, 605 bp, Unknown
  Bacterial polypeptide expressing nucleotide sequence isolated from the Sargasso Sea
catgcagacctatctcgaccttctacgccgcattctcgatgagggagtggaacgtggtgaccgcacaggtacgggtacattgtctgtttttgggcaccagatgcgattcgatttatcagaaggttttccggctgtgaccaccaaacgattgcattggcccagcattatccatgagttgctttggtttctctccggggataccaatgtggcctaccttcaggaaaacaaggttcgtatttggaatgaatgggcggatgagaatggagacttggggccagtctatggcaaacaatggcgcaagtgggaaactaaagatggccgcgtaattgatcaaatagctgaggcaattgaactgatcaaaagtaacccctccagtcgaagaattttggtcagtgcatggaacgtcggggaattagaggagatggcgctcatgccatgtcatgcattcttccagttttatgtcgcagatggcaaactctcttgccaattgtatcaacgaagtgcagatgtatttctcggagtccccttcaatatcgcatcatacgccttgctaacccatatgatggcacaagtttgtggacttggcgtgggtgattttgttcata

SEQ ID NO: 227531 - DNA, 733 bp, Unknown
  Bacterial polypeptide expressing nucleotide sequence isolated from the Sargasso Sea
gcattatgatttatcaaaaggttttcctgctataacaactaaaaaactagcatggaaatctgtagtttcagagttattgtggttcatcgaaggttcagacgatgagagaagacttgctgaaattttatacaatgattcaagagaaaatgtaaaaaataaaaaaactatttggacgcaaaatgctgaagcagattattggaagccaaaagctcgatttgaaggtgatgttggtaaaatatatggtgtacaatggagaaattttaatggagaagatcaagtcttaaatctaattaaaggattaaaagatgatccaaatggaaggcgtcatattatttctgcttggaaccctccggagattaaaaatatgtcactgcctccatgtcatgcattttcacaattttttgtttctaataataaattaagttgccaattgtatcaaagatcgtgtgatatgtttttaggagttccatttaatatagctagttatagtcttttaactcacatgttggctagagagtgtaatttagaagttggaacttttatccattccttaggagatttccatatctataaagagcactttgatcaggttaaaatccaattagaaagagtgcctaaaaaattacctgagcttcaattcgaaacaaaagatttttttaaatacaaagtaaatgattttaaattaataaactatcagcatcatgaaaaaattgatgctttgatgaatgtttaa

SEQ ID NO: 227532 - DNA, 532 bp, Unknown
  Bacterial polypeptide expressing nucleotide sequence isolated from the Sargasso Sea
ttgggccccgtttatggaaaacagtggaggtcttggggtaaagacgttggaggagaagaccaaataaaaaaaataattgaagatcttaaaaacaaccccaacagcagaagacatatagtaagcgcctggaatgtagacaaaattgaaaaaatggctctgccgccatgccacacaatgtttcagtttcacatacaggacaaagaacttagctgtcagctttatcaaagaagcgcagacatgtttttgggggttccttttaatattgcatcatacagtcttttggtgtgtattttttctgaaatacttaatcttgtgccgggtgagtttatatggacaggaggagattgccacatatacaacaatcattttgaacaagtaaaaaaacagattaagcgcaagccaatgaaggcaccaaaattaagaattccaaaacttaaatccattgacgatgttttaaaatccaaaccgaaagagtatattttggttgattataacccaatggaaagcattaaggcgccgatggctgtttagc

SEQ ID NO: 227533 - DNA, 151 bp, Unknown
  Bacterial polypeptide expressing nucleotide sequence isolated from the Sargasso Sea
atgaaacaatatcttgatttattaaaactaataaaagaaacaggaataaaaaaagaagacagaactgggactggaactttaagcatcttcggccatcaaatgaggtttaacttagaagaaggcttccctcttatgactacaaagaaagtta

SEQ ID NO: 227534 - DNA, 489 bp, Unknown
  Bacterial polypeptide expressing nucleotide sequence isolated from the Sargasso Sea
gggagggcaaaaataatattcatgatcaagtaacagaagttattaaacagattaaagataatcctgacagcaggcgtcatatcgtaagtgcttggaatgtagcggatataccaagcatggctttagcgccttgccacatactatttcagttttatgtgcaagatggaaaattatcatgccaactttatcaaagaagtgctgatatatttcttggagtcccatttaatattgcttcgtattccctgcttacgcatatgattgccaatatatgtgatcttaaggtaggagaatttgtgcatactttaggagatgctcatctttatactaatcaccttgagcaagcagaagaacagctatcaagaaaacctttagatccgcctcaaataatagttaaagataaagaatcaatagacgattatgaatttgaggattttgaaatagtgaattatcaatttcatccacatattcctgcgaaagtagcaatataaa

SEQ ID NO: 227535 - DNA, 415 bp, Unknown
  Bacterial polypeptide expressing nucleotide sequence isolated from the Sargasso Sea
agtgcttggaatgtggcgatgatagataaaatggctcttcctccatgccatctattagctcaattctatgtatctagtgatcaaagcctagattgccacatgtatcaaagaagtgctgatatgtttcttggcgttcctttcaatatcgcaagctattccttgcttatgcatatattagggaaagtattagatttgaccccaagatattttatacactcctttggtgatgcccacatttatttgaactcagttgatcaagttaaagaacagattaaaaggactccacgagaacttcctcaattaaagtttccagatataaataatttagaggatcttaagggtctgagcctagatgattttgtacttgagggatacgatcctcatccagctataaaagctaagatggcaatttaga

SEQ ID NO: 227536 - DNA, 778 bp, Unknown
  Bacterial polypeptide expressing nucleotide sequence isolated from the Sargasso Sea
atgaaatcgtatcttgatctgctatctcacattttagaaaatggtgaaaagcgtgaagacagaactaatgttgggactatttcttcatttgggcatcagcttaaatttgatttaagggatggattccctgctgtgaccacaaaaaagcttgcctggaagggtgtcgtatctgaactaatctggtttttagaaggttctgatgatgaaagaagattagccgagatcagatataacaaaaatagagatgaattaatcgatatagataaataccctactatttggacagataatgcagataatcaaggaaaaaatctaggatatgaaaattcaacattggtaaaaaaactcggtccagtatatggagttcaatggagaaattgggatgataaagaccaaattaaagagctcttagactcccttaaaaataacccaacaagtagaagacatattttaagtgcttggaatgtggcgatgatagacaagatggctcttcctccttgtcatctgttagcacaattctatgtctccagcgaccaatgcttagattgtcatatgtatcaaagaagtgcagatatgtttcttggggttccttttaatatcgcaagttactccttgcttatgcatatattaggtaaagtattagatctaacaccaaggtattttatccactcttttggcgatgctcatatttatttgaactcaattgatcaagttgaagaacagattaaaaggactccgcgagaactccctcaattaaaatttccaatatataaataat

SEQ ID NO: 227537 - DNA, 505 bp, Unknown
  Bacterial polypeptide expressing nucleotide sequence isolated from the Sargasso Sea
tatgaagcaatatttagatttattaagttatgtcttaaatgaaggtaatcttaaaaacgatagaactggcactggaacaaaatcagtttttggatggcaaatgcgctttgacttaagtaaaggacttcccttgttaactactaagaggctacatttgaagtcaattatacatgagttattatggtttataaaaggtgatactaacatttcttatctgaaaaaaaataaagtttctatttgggacgaatgggcagatcaaaatggtgatcttggtccagtttatggaaaacaatggagaaattgggaaacacctgatggtagaggaatagatcaattaaataatattatcactgaaataaaaaataataataattcaagaagattgatagtttctgcttggaatccatctgatgtcggtagtatggcacttccgccatgtcattgtctgtttcaattttacatttctgaaagtaagttatcttgccaattatatcaaagaagtgct

SEQ ID NO: 227538 - DNA, 720 bp, Unknown
  Bacterial polypeptide expressing nucleotide sequence isolated from the Sargasso Sea
caaaaggctttcttgctataacaactaaaaaactagcatggaaatctgtaatttcagagttactatggtttattgaaggctctgatgatgagagaaggttagcagaaattttatacaatgattcaagaaaaaacttaaaagataaaaaaactatttggacacaaaatgctgaagcagattattggaagccaaaagctcgatttgttggtgatgttggtaaaatttatggtgttcaatggagaaattttaatggagaagatcaaattgtaaatttaataaaaggactaaaagaagacccaaatggcagacgacatataatttcagcttggaatcctcctgaaataaaaaatatgtcattacccgcatgtcatgcattctcgcaattttttgtttcaaataacaaactaagctgccaattatatcaaagatcatgcgatatgtttttgggagttccatttaacatagctagttatagtcttttgactcatatgttagctagagagtgcaagttagaagtaggaatatttattcattctttaggcgattttcatatttacaaagaacattttgagcaggttaaaatacaattacaaagagagcccaaaaaattacctgagcttcagtttgaaacaaaaaacttttttaaatacaacgttaatgattttaaattagttaactatgatcattatgaaaaaattgatgctttaatgaatgtttagt

SEQ ID NO: 227539 - DNA, 447 bp, Unknown
  Bacterial polypeptide expressing nucleotide sequence isolated from the Sargasso Sea
tttgaaacaatatataagccttctcgaaaatgtaattagaaatggtgttcaaaaagaagacagaacaggaacaggaacaagatcaatttttggatggcaaatgagatttgatctgtctaaagggttcccgttattaaccactaaaaaacttcattttaagtccattgcatatgaacttctgtggttcattagaggtgatacaaatatagaatatttaaataaaaatggtgtgagcatttgggatgaatgggcagatgaaaatggggacttaggcccagtatatggaagtcagtggcgttcatggcccacgagagatggtggttcgattgatcagttgctaaaagtagtgaaagatataaagaataatcctgattcaaggagaatgattgtttctgcatggaaccccgagtatgttgagaaaatggctttacccccttgccattgtct

SEQ ID NO: 227540 - DNA, 794 bp, Unknown
  Bacterial polypeptide expressing nucleotide sequence isolated from the Sargasso Sea
gatgaaacaatacctagatgcgttaagattttgttatgataatggctctgatgttgaaagtagagcgggtggtgttagaaaatcatttggttatcaaatgcattatgatttatctaaaggttttcctgctataacgactaaaaaactagcatggaaatctgtagtttcagaattattatggtttattgaaggttcagacgatgagagaagacttgctgaaattttatacaatgattcaagagaaaatttaaaagataaaaaaactatttggacacaaaatgctcaagctgattactggaaattaaaagctcggtttgaaggagatgttggtaaaatttatggagttcaatggagaaattttaatggagaagatcaaatcttaaatctaatcaaaggattaaaagaagatccaaatggaaggcgtcatataatttctgcttggaaccctcccgagattaaaagtatgtcattgccagcatgtcatgtattttcacaattttttatttctaataacaaattaagctgtcaattatatcaaaggtcatgtgacatgtttttgggagttccatttaatatagcaagttacagtcttttaactcatatgttggctagagagtgtaaattagaagttggaacttttattcattctttaggagattttcatatttataaagaacattttgagcaggttaaaatccaattagaaagagcccctaaaaaattacctgcgcttcaattcgaaacaaaggatttttttaaatacaacgtaaatgattttaaactaataaactata

SEQ ID NO: 227541 - DNA, 343 bp, Unknown
  Bacterial polypeptide expressing nucleotide sequence isolated from the Sargasso Sea
ttttatataaatgatggtttcatagatgctcaactttatcaacgttcaggtgatatgtttttaggtgtcccctttaatattgcatcttattcattcttattatatattattggtcatttaactggatataaaccaagaaaacttatacatatattaggtgatgcacatgtttataaagaacatattagtgcagttaaaaaacaatttataagaatacctagaaaatttccaaaattatatataagtaatgaattaaatgatattaatcatataaaagaagaaaattttaaaatattagaatatgaatcatgtttaacaattaaagcaaaaatgattgcttaaa

SEQ ID NO: 227542 - DNA, 673 bp, Unknown
  Bacterial polypeptide expressing nucleotide sequence isolated from the Sargasso Sea
tttccgttggtaacgaccaaaaaggttcacttaaaaagtgttattcatgagttgctttggtttattcagggctctactaacgttaagtatcttcaggaccacggtgttcgtatatggaatgagtgggctgatgcatatggggagttggggccggtgtacggtaaacaatggcgtgcttggaagaaggctgatggtagtactgtcgatcagctggcggacttgctggatggtttgcgtactcaacctgactcccgtcgtcatatattgtctgcttggaatgtgggtgagttggcagagatggcgctgccgccctgccatgccttttcacagttctatgtggcgaacggtgcgttatcgtgtaagttaactcagcggtcggctgatttgtttttaggcgtgccgtttaatatcgcgtcgtattctttattgacgcacatgattgctgagcaagtggggttggacgtgggtgaattcatttggtccggtggtgattgccatatttacctaaaccacatggagcaagtgaatacccaattaacccgtgagccgcgggcgttaccccagctcgcttttgcgcggcgaccggacacgctatttgactacgtgtatgatgacgtggtgatcaccggctatcacccttgtgatgcaataccagcgccgatcgcggtgtagc

SEQ ID NO: 227543 - DNA, 697 bp, Unknown
  Bacterial polypeptide expressing nucleotide sequence isolated from the Sargasso Sea
atgcgctttgatttgtctaaaggttttcctcttttgacgacgaagaagttgcaccttaggtctattattgtcgagcttctttggtttttaaaaggcgatacgaatgttcagtttttgaaggagaacggctgtaatatttggaatgaatggtgcgatgacaaaggggacctaggaccaatttatggaaagcagtggaggtcatgggagtctactgatggtcaaatcattgatcaattgggaagtgttatagagcaaataaaatcaaatccttcctcgagaagacttgttgtaactgcatggaacccaggagatttgagcaaaatggctttgccaccttgccattgcctttttcagttttttgtttctaatggacggttgtcttgtcagctttaccaaagaagttgtgatgtctttttagggctaccatttaatatcgcttcgtattctttactcacacatatggttgctgcggaatgcggtttagatgttggagagtttgtttggactggtggtgatgtccatctttatactaaccacttggaccaggtaaaactccaattaaaaaggcaaacaaaagggttacctaaacttattttgaaaaggaagccttcttctgtatttgattacaaatatgatgatttctcctttgaaaattattttccccacccgcacataaaagcagaagttgcagtttgag

SEQ ID NO: 227544 - DNA, 351 bp, Unknown
  Bacterial polypeptide expressing nucleotide sequence isolated from the Sargasso Sea
tttttcaattttatgtagctgacaacagattatcttgtcaaatgtatcaaagaagtgctgatgtatttcttggtgtaccatttaatattgcctcatactctcttttaacatttatgattgctcaagtatgtgacctagaagttggtgaatttattcataccctgggagatgcgcatatatatcttaatcacttagagcaagtagatcttcaactatcaagagatcctctagaactccctaagcttaaattaaatccagaaatcaaaagtattgaagattttaaatatgaggatattgaaattgttgattataaatttcatccccccataaaaggaaaaatatctatatagt

SEQ ID NO: 227545 - DNA, 685 bp, Unknown
  Bacterial polypeptide expressing nucleotide sequence isolated from the Sargasso Sea
atgcaaaactatcttgagcttttaaaagaaattctagattccggtgaagaaaaatctgatagaactggagttgggacaattggtttatttggcaaacaacttaggtttaacttacaagatggttttcctgcggtaacgaccaagaagcttgcttggaaaggagttgtatcagaattactttggtttttagagggttctgatgatgagcgtagactcgctgaaataagatttaatgactccagggaaaaccttactgatcaaggcaaattttctacgatctggactgacaatgctgataatcaaggtgtctcacttggatacactaattctgaaactgaaaaaagacttgggccgatttatggtgttcaatggagaaattggggaggtaaagatcaaataaaagagctgattataaaccttaaacataatccacacagtcgaaggcacattcttaccgcgtggaatgttggcgagataaatcagatggctcttcctccatgtcatgtgatgtcccaattttatgttagtaacaagtctgagctttcatgtcatatgtatcaacgaagtgcggacatgtttttgggtgtaccctttaatattgctagctatgctcttctcacacatatccttgcaagcatccttgaattggaggttggagattttgttcattcctttggcgattgtc

SEQ ID NO: 227546 - DNA, 555 bp, Unknown
  Bacterial polypeptide expressing nucleotide sequence isolated from the Sargasso Sea
aatgaaacaatatcttactgctttaaaacattgctatgaaaaaggagtggatgttaaaagtcgagcaggtgatgtaagaaaagcatttggttatcaaatgcgatttaatttagaagaagggtttccagctttaacaaccaaaaaacttgcttggaaagctgtagtttcggaattgttatggtttttagaaggttcaaatgatgaaagaagacttgcagaaatattatataatgatgatagaaaaaaccttaatgataaaaaaactatttggacagaaaatgctaaatcagaatattggaaagatcattctaagtttgaaggtgatgtaggacgaatatatggagttcaatggagagacttcaatggcactgatcaaattaaaaatctcatagacggaattaaaaaagacccagatagtagaagacatattatttctgcttggaatccagcagaattacaccttatgtctcttcctccatgtcatgctttttcacaattttttatttctaataaaaaactaagttgtcagttatatcaaagatcttgtgatatgtt

SEQ ID NO: 227547 - DNA, 535 bp, Unknown
  Bacterial polypeptide expressing nucleotide sequence isolated from the Sargasso Sea
attggtaaaaaagcttggtccggtctatggagttcaatggagaaactggggcgataaagaccaaattaaagaactcttagactcccttgaaaataacccgacaagtagaagacatattcttagtgcttggaatgtggcgatgatagataaaatggctcttcctccatgccatctattagcacaattctatgtctctagcgaccaaagcttagattgccacatgtatcaaagaagtgctgatatgtttcttggagttcctttcaatatcgcaagctactccttgcttatgcatatattagggaaagtattagatttgaccccaagatattttattcactcttttggtgatgctcatatttatttgaactcagttgatcaagttaaagaacagattaaaaggactccacgagagctccctcaattaaagtttccagatataaataatttagaggatcttaaggatctaagcctggatgattttatacttgaaggatatgatcctcatccggctataaaagctaagatggcaatttag

SEQ ID NO: 227548 - DNA, 467 bp, Unknown
  Bacterial polypeptide expressing nucleotide sequence isolated from the Sargasso Sea
tttgaaacaatatataagccttctcgaaaatgtaattagaaatggtgttcaaaaagaagacaggacaggaacaggaacaagatcaatttttggatggcaaatgagatttgatctgtctaaagggttcccattattaactaccaaaaaacttcatttcaagtcaattgcatatgaacttctgtggttcattagaggtgatacaaatattgaatatttaaataaaaatggtgtgagtatttgggatgaatgggcagatgaaaatggggaattaggcccagtatatggaagtcagtggcgttcatggcctactcgagatggaggttcgattgatcagttgctaaatgtagttaaagatattaagaataatcctaattcaaggagaatgattgtttctgcatggaaccctgaatatgttgatgaaatggctttgcctccttgccattgtcttttccaattttatgtagctg

SEQ ID NO: 227549 - DNA, 400 bp, Unknown
  Bacterial polypeptide expressing nucleotide sequence isolated from the Sargasso Sea
ttgaatccatcagacgttggaagtatggctcttcctccatgtcattgtttatttcaattttatgttgctaaaaacaagttatcttgtcaattataccaaagaagtgcagatatttttcttggagttccttttaatattgcatcttattcaatattaacacatatgatagctaacgttactggtttgtcggttggtgattttgttcatacattgggtgatgcccatttatatacgaatcactttgatcaagctaaattgcaattgacaagatcgacaaaaaaattacctaaattaaaaattcctaaaaaacattctgatataaacaaatttaaatttgaagattttgatattactgattataacccatatccaaatattccagcacccatagcagtttaaa

SEQ ID NO: 227550 - DNA, 193 bp, Unknown
  Bacterial polypeptide expressing nucleotide sequence isolated from the Sargasso Sea
ctggctaccattggtaggtttggtgatggtgtggaacaatatctaagtttaattcgcagaatcctaaatgagggtgaacagaaaggcgatagaacaggtactgggacgctatcagtatttggacatcaaatgagatttgatttgtctgaaggatttcctatggtcactacaaaaaaattacatttgaagtcta

SEQ ID NO: 227551 - DNA, 793 bp, Unknown
  Bacterial polypeptide expressing nucleotide sequence isolated from the Sargasso Sea
aatggaaccatatattcaattatttcaaatatattaacaaatggaattgataaagacgatagaactggtacaggcacaaaatctatttttggatggcaaatgagatttaatttatccaaaggttttcctttattaacaacaaaaaaacttcactttaaatctatagcatatgaactattatggtttataagaggtgatagcaatatcaagtttttaaatgaaaatggtgtttcaatttggaatgaatgggctgatgaggatggggaattaggacctgtttatggaaagcaatggagaaaatgggaaacttcaaataatagatctattgatcagctatctaatgtaattaatgatattaaggaaaaccccttctctcgaagactaattatctcagcatggaatcctgagcatatcggttctatggcacttccaccttgtcattgtttattccaattttatgtttcccagggtaagttgtcctgtcaattgtatcaaagaagtgccgatgtttttcttggtataccatttaacatcgcttcatatgctctccttacggagatgatagcaaaagtatgtaatttaaaagttggcgattttattatatctctaggagatgcacatctatacgctgatcatattgatttagctcaaaaacaaattttaagaaaaccaagaaaattacctttattgaaattaaactcaagaaaaagtattgatgaattttcttatgaagatatggaaataattggttatgaccctcatccacatatttctgcaaaggtttcaatataaa

SEQ ID NO: 227552 - DNA, 533 bp, Unknown
  Bacterial polypeptide expressing nucleotide sequence isolated from the Sargasso Sea
tttgcaagataaaaaaagtggcgtttctatgcaacaatatctcgatctaatgcatctagtgttgaacacaggctcagaaaaagttgatagaacaggagttggaacactctctatttttggtcatcaaatgaggttcaaccttgaagatggttttccaatgctgacaacgaaaaaactgcatttaaaatccataattcatgagttaatctggttcttaaacggtgacacaaacataacttacctaaatcaacacggtgttcgtatttggaacgaatgggctgacgaaaatggagaattgggccctgtatatggcgaacaatggcgttcttggcccgctggcgatggagaaactatcgatcaaatcgtaaatcttgtttcaggccttaaagataacccagattcacgaaggcatttggtgactgcatggaacccgtcggtattaaaggaaatggcactgccgccatgtcattgtctttttcagttttatgttgcggatgggaaactatcgtgtcagctgtaccagcgaagcgcgg

SEQ ID NO: 227553 - DNA, 341 bp, Unknown
  Bacterial polypeptide expressing nucleotide sequence isolated from the Sargasso Sea
acaattttttatttcaaaaaataaattaagttgccaactatatcaaagatcttgtgatatgtttttgggagttccctttaatattgctagttatagcttacttactcatatgctagctagggagtgtaatttagaagttggaaattttattcactcgcttggcgattttcatatttatgaagaacattttgatcaagtaaaggttcagttagaaagaaagccaaaaaatttaccaactttatattttaaaactaaagatttttttgagtataatgttaatgattttatattagatgattataattatcatccaaaaatagaagcaactatgaatgtttaat

SEQ ID NO: 227554 - DNA, 469 bp, Unknown
  Bacterial polypeptide expressing nucleotide sequence isolated from the Sargasso Sea
ttggaagatctcattaataatcttatgaatgatcctgacggcagaaggcatatcttgtcagcatggaatgtaggagagattgataaaatggctctacctccttgtcatgtcatgtcacaattttatattcatgagaatgaaattagctgtcatatgtatcagagaagtgctgatatgtttcttggtgttccttttaatattgccagttatgctctactgctatgtataatcgcaaaaatattagacttaaaacctaaaagatttattcattcttttggagatgcacacatatataaaaattctatagaacaagtaaaagaacaaatatctagaaaaccaaaaacactaccaaaattaaagttgccaaaccttaattctattgatgacttaaataaatatagcattgatgattttattctggttgactatgaccctcatccatcaattaaagctaggatggctatttaaa

SEQ ID NO: 227555 - DNA, 721 bp, Unknown
  Bacterial polypeptide expressing nucleotide sequence isolated from the Sargasso Sea
acccgcagcgtgttcggctggcagatgcgcttcaacctcaacgaaggcttcccgctggtcaccaccaaaaagctgcacctgcgctcgatcatccacgagctgctgtggttcctgaagggcgacaccaacatcggctacctgaaggacaaccaggtacgcatctgggacgagtgggccgatgcgaacggcgacctcggcccggtctacggcaagcagtggcgcagctgggccaccgccgatggtcgcgagatcgaccagatgcagtggctggtggacgagatcaagcgcaaccccgattcgcggcggctggtggtcagcgcctggaacgtgggcgagctttcgcagatggcgttgatgccgtgccacaaccttttccagttctacgtggtggatggcaagctcagctgccagctgtaccagcgcagcggcgacatcttccttggcgtgccgttcaacattgccagctacgcgctgctgacccacatggttgcgcaggccaccggcctgggcgtgggcgacttcgtgcatacgctgggcgatgcgcacctgtactccaaccatttcgagcaggcccgcgagcagctggcgcgcgaaccgcgcgcgctgccgaagctgtggttgaacccggacgtgaccgacctgttcggtttccagttcgacgacatccgcatcgacggctacgacccgcacccggcgatcaaggcgccggtggcggtatgag

SEQ ID NO: 227556 - DNA, 562 bp, Unknown
  Bacterial polypeptide expressing nucleotide sequence isolated from the Sargasso Sea
ttaggtccaatatatggttttcagtggagacattttaatgcaaattatgaaaattgtgattcaaattatgatggaaaaggaatagatcaactaaataatataataaaagaattaaaagacgtagaaacaagaaattcaaggagactaataatgagtgcttggaatccttgtcaattaaatgaaatggctttacctccttgtcatgtattatgccaatttaatatatcaaataatgatgaattgagttgtgctttatatcaacggagtggtgatgtaggtttaggagttccatttaatatagcatcatatgcatttttaactcatttaatagcgcatcattgtggattaaaagcaaaagaatttatttattatttaggaaatacacatatatatgacgatcatatagaaggtctaaaaatacaaaaaaatagaataccttacaattttcctaaattgtgtatatcaaataaatatactaatatagaagattataaagtagacgattttaagataaataattatgaatattatgataatataaatttattaatgcggcaataat

SEQ ID NO: 227557 - DNA, 430 bp, Unknown
  Bacterial polypeptide expressing nucleotide sequence isolated from the Sargasso Sea
aaaaatccaaatagtaggagacatatacttactgcatggaatccatcggagataaatgaaatgtctttacctccttgtcatgcattttcacaattttttgtttctaataaaaaattaagctgtcaattgtatcagcgctcttgtgatatgtttttaggtgttccattcaacatagcaagttatagccttctaatacatattatagctgaagaatgtaaattaggagttggagattttgttcactctcttggagattttcatatttatgaagagcattttgatcaagttaagatacaaataaaaagaaaaccaaaacagttaccaatattagagttttcaccaaaaaagatgagtgattacaaaactgcagattttgaattgcataattatgatccacatcctaaaatagtggcaccaatgaatgtttagt

SEQ ID NO: 227558 - DNA, 480 bp, Unknown
  Bacterial polypeptide expressing nucleotide sequence isolated from the Sargasso Sea
gagaaacgattgatcagctttgtaacttgattcgtgaaattaagtctacccctgattcaagaaggttaattattaatgcttggaatgtaggccaattaagtgaaatggcgttacctccatgtcatgcctttgttcaattttatgtttctgaaggcaagctttcttgtcagctttatcagcgctcagcagatatatttcttggtgttccctttaatattgccagctatgcattactgacaatgatggtcgcacaggtttgtgatcttgaattgggtgaatttattcatactttaggtgatgctcacctttacgtgaaccatcttgatcaagcaaaagagcagctatctcgaaccccaaagaaactacctcagatgaagttaaacactgatgtcaaaaatattgatgatttttcttttgatgattttgagctagttggttacgaagctcatcctcatattaaaggtgaggtatcaatatgaa

SEQ ID NO: 227559 - DNA, 478 bp, Unknown
  Bacterial polypeptide expressing nucleotide sequence isolated from the Sargasso Sea
atgcaacaatatctatccttgatgcaacatgttctggataacggtgtcaaaaaagaagaccgtacaggcacaggaactctcagcgtttttggccatcaaatgcgttttgacctgcaaaaaggcttcccaatggtcaccacaaagaaatgccatctgcgctcgatcattcatgagcttctctggtttctcaaaggtgatacaaatatcggatatttaaaggaaaatggcgttcgcatctgggatgaatgggccgatgaaaatggcgacctaggccccgtatacggccaccaatggcgcagctgggccgccgcagacggtcacacgatcgaccagatcagcaatgtggtcgatcgcatcaaaacaaaccccgatgaccgccgcctgattgtatcagcatggaatgttggtgagctgcataaaatggcactgccgcccatgtcatgcgttcttcccagttttatgtggctgatgggcgcct

SEQ ID NO: 227560 - DNA, 796 bp, Unknown
  Bacterial polypeptide expressing nucleotide sequence isolated from the Sargasso Sea
atgaaacaatacttggatttaatgacacgcgtaatgcgagaaggaacgctaaaagaagaccgaactggaactggaactaaaagtgtttttggtcatcaaatgcgtttcgatttatctaaaggattcccatgcgtaaccacaaagaaaatacatttaaaatccataatccacgagctcctttggttcttaaaaggagagacaaacatcaaataccttaaagagaatggagtacgtatttgggatgaatgggcagatgaaaatggtgaactaggccacatttatggctatcaatggagatcatggccagattcaaatggaaatcatatcgatcaaattaaacaagtaattgatactttaaagagtaacccaaatagtaggcgtattattgtaagtgcttggaatgtaggagagcttgatcaaatggcactacctccttgtcatgccttttttcaattttatgtagcaaatggaaagctttcttgccagctatatcaaagaagtgcagatatctttttaggagtgccttttaatattgcttcatatgcattgctcacaatgatgattgctcaagtatgtaatttagaaattggtgattttattcacactttgggtgatgctcacatttatactaatcattttgaacaaactaaattacaacttagtagagattgtaaaaaattacctagaatgaaaatcaataaaaatgtaacaaatatattcgattttactattgatgattttgaattagttaactatgaattccacccacatattaaaggaaaagtagcaatataat

SEQ ID NO: 227561 - DNA, 793 bp, Unknown
  Bacterial polypeptide expressing nucleotide sequence isolated from the Sargasso Sea
ctgagtagggttcttcagaacgtcaagacaaagacgtacgaagatgggaggtttgtccacgatgaacatcagtatctttccttaatcagtgatattctcgaatttggagagaaagtgaatgggcgtaatggcgatacgctcactgtgtgtggcagcgcgatgcatttttctcttgaaggcggcgcaatcccgctccttaccacgaaaaaggtcgcgtggaagacgtgtctcagggagttgttgtggtttgtgagcggttccaccgataatgagttgttacaaaaacagaatgtgaagatatgggacggaaacgcatcgcgcgagtttctggatagtcgtgggctgtcaaatctgcgaacgaatgatttggggccggtttatggacaccagtggagacattttaatgcgccttatcagtcgtgtgatacggattacagcggtatgggcgtggatcagttggcgtgggtgatcgcgcagctaaaagaccctgaaacgcggacttcgaggcggattgtcatgtctgcgtggaacccgtgtcaacttgatgaaatggcgcttcccccatgccacgtgttggtccagttcaatgtgttgcctggaaacagactgtcgtgcagtttgtaccaacgcagtggtgatgtgggtttaggcgtgccgttcaacattgcgtcgtatagcttcctgacacacttattggcaaagcattgcgatttggaagcatacgagttgaattatcatttaggaaattgccatatttacgacgatcatatcgaaccgttacggagcaaataag

SEQ ID NO: 227562 - DNA, 742 bp, Unknown
  Bacterial polypeptide expressing nucleotide sequence isolated from the Sargasso Sea
atgaaaaattatttagatgctcttaaacattgttatgaaaatggagattttgtaaaaagcagagctggtaatgtaaaaaaagcttttggttatcaaatgcgtttcaatcttgaagatggttttccagctgttacaactaaaaaacttgcttggaaagcagtagtttcagaattactatggtttctagaaggctcaaacgatgagagaagattagctgaaattctttacgatgacataagggaaaatttagaggataaaagaactatttggactcaaaacgcagaggcagattactggaaagataaatcaaaatttataggtgatgtgggtaaaatttatggagtgcaatggagaaattttaatggtgttgatcaaatacacgaattaattgaaggattaaaaaaaaatccaaacagtagaaggcatatacttactgcatggaatccatcagagataaatgaaatgtctttgcctccttgtcatgcattttcacaattttttgtttctaataaaaaattaagctgtcaattgtatcagcgatcttgtgatatgtttttaggtgttccattcaacatagcaagttatagtctcctaatacatattttagctgaagaatgtaaactaggagttggagattttgttcattccctaggagattttcatatttatgaggaacattttgatcaagttaaaatacaattaacaagagaaccaaagcagttaccaactttaaagttttaac

SEQ ID NO: 227563 - DNA, 796 bp, Unknown
  Bacterial polypeptide expressing nucleotide sequence isolated from the Sargasso Sea
aatgagagcctatctcgacctgatgcagaagatcctcgatgaagggaccgtcaaatccgaccgtaccggtaccggcactgtctccctgttcggccatcagatgcgcttcaatctggcggaaggcttcccgctggtcaccaccaagaagtgccacctgcgctccatcattcacgagctgctgtggttcctcaatggcgataccaacaccgcctatctgaaagagcacggcgtcagcatctgggatgagtgggccgacgagaacggcaatctggggccggtgtatggcgcccagtggcgctcctggccggcggctgacgggtctgtcatcgatcagatccagaaggcggtggacgacatcaagcacaatccggattcgcgccgcatcatcgtctccgcctggaacgtgggcgaactggacaagatggcgctggctccctgccacgccttcttccagttctacgtggccgacggcaagctctcctgccagctctaccagcgcagctgtgacgtgttcctcggcctgccgttcaacatcgccagctacgccctgctgacccacatgatggcccagcagtgtgacctggacgtgggcgacttcgtctggaccggtggtgacgtgcacctctactccaaccacatggagcagaccgcgctgcagctctcccgcgagccgcgcccgctgccgaccctggtgatcaaacgcaagccggactccatcttcgagtacaggttcgaggatttcgagatagagggttacgacccccatcccggcatcaaggcgcccgtcgccatctga

SEQ ID NO: 227564 - DNA, 832 bp, Unknown
  Bacterial polypeptide expressing nucleotide sequence isolated from the Sargasso Sea
gatgaaacaatacctagatgctttgagatattgttatgataatggctctgatgttgaaagtagagcgggtggtgttagaaagtcttttggttatcaaatgcattacgatctatcaaaaggttttcctgcaataacgactaaaaaacttgcatggaaatctgttgtatcagagttattgtggtttatcgaaggttcagacgatgagcgaagacttgctgaaattttatacaatgattcaagagaaaatttgaaagataaaaaaactatttggacacaaaatgctcaagcagattactggaaatcacaagctcggtttgaaggagatgttggtaaaatatatggagttcaatggagaaactttaatggagaagatcaagtcttaaatctaattaaaggactcaaagaagatccaaatggaaggcgccatattatttcagcttggaatcctccagagattaaaaatatgtcattgccagcatgtcatgcattttcacaattttttatttctaataacaaattaagttgccaattatatcaaaggtcatgtgatatgttcttaggagttccatttaacatagctagttatagtcttttaactcatatgttagctagagagtgtaagttagaagttggaacttttgttcattgtttaggagattttcatatttataaagaacattttgaacaggtaaaaattcaattagaaagagagcctaaaaaattacctgaacttcaattcgaaacaaaagatttttttaaatataaagtagatgattttaaattactaaactatcagcatcatgaaaaaattgatgctctgatgaatgtttaa

SEQ ID NO: 227565 - DNA, 832 bp, Unknown
  Bacterial polypeptide expressing nucleotide sequence isolated from the Sargasso Sea
atgagacaatatctagatgcattaaaatattgtttagataatggaactgatgtcaagagcagagctgggaatgttaggaaaagttttggatttcaaatgcattatgatttatcaaaaggatttcctgcaataacgacaaaaaagctagcctggaaatcagttgtatcagagttattatggtttatcgaaggatcaaatgatgagagaagattagctgaaatcttatataatgacaaaagagaaaatttaactgataagagaacaatatggacacaaaatgctgaagcagaatactggaagcctaaagctaaatttaaaggtgatgttggaaaaatttatggtgttcagtggagaaattttaatggtgaagatcaactagctaatcttatttatagtttaaaaaatgatgctaatggacggcgtcatataatatcatcatggaatcctggagagttaaaaaatatggcattaccagcatgtcatgttttatctcaattttttatttctaataataaattaagttgtcaactttaccaaagatcttgtgatatgtttttaggagttccatttaatattgctagttatagtttattaactcatatgcttgctagagaaattaatttagaagtaggtaattttatccattctctaggagactttcacatttacgaagagcattttgatcaagtaaaaattcaattagaacgacaaccaaaaaatcttccaattttagattttaagaccaaaaatttttatgaatacaacatagatgattttaaattattaaattattcacatcatccaaaaatagaagcaagaatgaacatttagt

SEQ ID NO: 227566 - DNA, 750 bp, Unknown
  Bacterial polypeptide expressing nucleotide sequence isolated from the Sargasso Sea
aatgaaatcatatcttaatctgttgtctcacattttagaaaatggagaaaagcgtgaagatagaactaatgttggaactatttcttcatttgggcatcaacttaaatttgatttaagggatggattcccagcagtaacaacaaaaaaacttgcatggaagggtgtcgtgtctgagcttatttggtttctagagggttctgatgatgagagaagattagcggagataagatataacaaaaatagagatgaattaaccgatgtagataaataccctactatttggacagataatgcagataatcaaggaaaaaatttaggatatgaaaattcatcattagtaaaaaagcttggtccagtatatggagttcaatggagaaattgggatggtaaagatcaaattgaagagctcttaagctctcttcgaaataatcctactagcagacggcatattttgagtgcttggaacgtggcgatgatagataaaatggctcttcctccatgccatctcttagcacaattctatgtctctggtgaccaaagcttagattgtcatatgtaccaaagaagtgctgatatgtttcttggcgttcctttcaatatagcaagctactccttgcttatgcatgtattaggaaaagtattagatttagctccaagatattttattcactcttttggtgatgctcatatttatttgaactcagttgatcaagttaaggaacaagttaaaagggttccgcgagcgcttcc

SEQ ID NO: 227567 - DNA, 889 bp, Unknown
  Bacterial polypeptide expressing nucleotide sequence isolated from the Sargasso Sea
atgagtaagttagaatatagtgaagaggaagcttatcttcaattaattcgagatattcataaaaaaggtgaagatgacgagggtagaaatggtcgtgtaagatgtatatttggtgcaaatatgagattttctatgaaaaataataaaattcctatattaacaagtaaacgtgttgcgtggaaaacatgtttaaaggaactgctttggtttattagtggtaatacaagtaataaaacattaaaagctcaaaatgtgcatatatgggatggaaatagttcgcgcgaatttttagattcacgtggattaaagcatttgcacgaagatgatttaggaccagtatatggttttcagtggcgtcattttaatgcagaatataaaacctgtgatgataattatacaaataaaggaatagatcaattgcaacaaataatagatgcattaaaagatcctaaagaccgcaaatcacgtaggttgataatgagtgcttggaatccagagcaaataggtgaaatggcactaccaccgtgtcatgtgttatgtcaatttaatgtaattggcgagaataagttaagttgtgcattatatcaaagaagtggcgatgtaggattaggggttccttttaacatagcatcttatagttttttgttgcatttaatcgctcatcactgtgatttagtagcgtgtgattttgtatattttttaggaaatgcacatatatatgatgatcatatgcctcaattattatcgcaaatagaaaatgaactctatgaatttcctacattatctattaaaaaaaaatacgataagatagaccaatatactttagaagattttgaattagaaaattatacacataattctaccatacccatgaaaatgcgtgtatagt

SEQ ID NO: 227568 - DNA, 427 bp, Unknown
  Bacterial polypeptide expressing nucleotide sequence isolated from the Sargasso Sea
attattccaaatacaaaaaaaacttttagtgaaaatgttaaggaagggaaagccgctctccccccttgtcatgcattttttcaattttatgttgctgataacaaattatcttgtcagatgtatcagagaagtgcagatgtatttcttggtgttccatttaatattgcttcatatgcacttttaacatttatgattgctcaagtgtgtgagttagaaattggagaatttgttcatacccttggagatgctcatatttatcttaatcatttagaacaagtagatcttcaactatcaagggatcctctagaacttcccaagcttaagttaaacccaataattaaaagtattgaagattttaaatatgaggatgttgaaattcttgattataaatttcacccccctataaaaggtaaaatatcaatatagt

SEQ ID NO: 227569 - DNA, 664 bp, Unknown
  Bacterial polypeptide expressing nucleotide sequence isolated from the Sargasso Sea
ttttacaactaaaaaagtacatttaaaatccattatccacgaactattgtggttcctccagggttcaacaaatataaaatacctaaaggaaaatggtgtcagtatttgggatgagtgggcagatgaaagaggtgaattaggtccagtctatggatctcaatggagatcatggcctgttaatgagaaggaatctattgatcaaatatctcaagtcattgatcagattaagaataaccctgactccagaagacttatagtaagtgcctggaatgtctcactagtcgaagacatggccttacctccttgtcatactctatttcaattttatgtagcagacggaaaactttcttgtcagctttatcagagaagtgctgatatctttctaggagttccttttaatatagcctcatatgctttactggtcctgatgatagctaaggtatgcggtctaaagcctggagattttgttcatactcttggcgatgctcatctgtacttaaaccatttagaacaagtagatgaacaactaagcagagcgcctaaaaagttaccagttatgaaaataacaaaagacactaacaatatatttgacctgaagtacgaagacttttctctagaagaatacaacccagaccctcatatttcggcacccgttgctgtttaa

SEQ ID NO: 227570 - DNA, 675 bp, Unknown
  Bacterial polypeptide expressing nucleotide sequence isolated from the Sargasso Sea
aatgaaacaatatttagaagcattaagatactgttttgaaaatggaactgatgttgatagcagagcaggtaaagttagaaaaagttttggatatcaaatgcattatgatttatctgaaggcttccctgctataacaacaaaaaaactagcatggaaatcagttgtatcagaattgttgtggtttattgaaggttctaatgatgagagaagattagcagaaattttgtatgatgatgttagagaaaatcttacaaataaaaaaacaatatggactcagaatgctgaagcaaattactggaaaccaaaagcaaaatttgagggcgatgttggtaaaatatacggtgttcaatggagaaattttaatggagaagatcagttatcaaatttaataaatggactaaagaatgacccaaacggacgaagacatattatttcatcatggaatcctccagagataaaaaatatgtccctaccagcatgtcatgctttttcacaattctttatttctaaaaataaattaagttgtcagttgtatcaaagatcttgtgatatgtttttaggagtcccttttaatatagctagctatagtctttttacacatatgcttgcaagagagtgtggtttagaagttggtaaatttattcattctttaggtgattttcatatttatgaaga

SEQ ID NO: 227571 - DNA, 868 bp, Unknown
  Bacterial polypeptide expressing nucleotide sequence isolated from the Sargasso Sea
gatgatacaatatataagcgcgcttgaacatattttaaaaaagggcaaacaaagagaggacagaaccggaatagggaccaaaggtgtttttggatatcagatgaggtttaacctaaaagaaggttttcccgccgtaacaaccaaaaaactagcatggaaaagcgtagttagtgagttgttgtggtttttagagggaagcacagatgagaggcgattagccgaaattcattttggaaaagacaggggcgacataaaagaaaagaaaactatttggacagcaaatgccaacaaacagggtgtcgaccttggttatacaaataatgatataaaaaaagagctaggacctgtttatggaaagcagtggaggtcttggggcgcagacagcggcggcgttgatcaaataaaaaacataattacagacctttctaacaacccaaacagtagaaggcacatagtaagcgcgtggaacgttgataaaatagatcaaatggcactgcccccctgccacacaatgtttcaatttcatatacaagacggagaacttagctgtcagctttatcaaagaagcgcagacatgtttttgggcgttccttttaacatagcatcatacagtcttttggtttgtattctatcaaacattttaaaactaaagcccggagagtttatatggacagggggagattgccacatatataacaatcactttgagcaggttaaagagcagattaaaagaaaaccaatgaacccccccgcgctcgaaattccaaattttaaatcaattgaagaggttttggcatcaaagccgcaagactataaacttttaaattataaaccgatggatagcattacggccccaatggcagtttaa

SEQ ID NO: 227572 - DNA, 796 bp, Unknown
  Bacterial polypeptide expressing nucleotide sequence isolated from the Sargasso Sea
atgaagcagtatttagatcttatgagacacgttcgggaaaatggagtctttaaagacgaccggacgggtaccggaacctatagcgtgtttgggtatcaaatgcgcttcgacttgtctgaagggtttcccctagtcaccacaaaaaaaacctttcttaaaggtattattcatgaacttctgtggtttttatcgggatcaaccaacataaagtatctagtggatcatgacgttcacatttgggatgagtgggctgatgagcatggcgaactaggaccggtgtatggatctcagtggaggtcctggccaggcccggacggtaaaaccattgatcagatttctcgagtagtcgaagatcttaaaactaatccggatagtcgaaggcatatagtcagtgcatggaatgtggctgaagtcgatgagatggccttgccgccatgccattcgctattccagttttacgtggcggatggacgtctatcctgtcaactctatcagcgaagtgcggatatctttcttggagtccctttcaatattgcttcctatgcactgttaaatatgatgatcgcgcaggttgtcgatctagaagttggggattttgttcataccctgggagatgcgcacctgtacagtaaccatattgaacaagcagataaacagctgttgcgagaaccccgaagcctaccgaccattcgaatcaacccggaagtcaaagacattttagggtttaagatcagtgattttgagttgctggagtatgatcctcatcctggtatcaaagcgccgatcgccgtttaat

SEQ ID NO: 227573 - DNA, 826 bp, Unknown
  Bacterial polypeptide expressing nucleotide sequence isolated from the Sargasso Sea
atgaaatcatatcttaatctgctatctcacattttagaaaatggtgaaaagcgtgaagacagaactaatgttggaactatttcttcatttgggcatcaacttaaatttgatttaagggatgggttccctgctgtaaccacaaaaaagcttgcctggaagggagtagtatctgaactaatatggtttctagagggttcagacgatgaaagaagattggcggagataagatataacaaaaatagagatgaattaaccgatatagataaataccctactatttggacagataatgcagataatcaaggaaaagatttaggatatgaaaattcatcattggtaaaaaagcttggtccggtatatggagttcaatggagaaactggggtgataaagaccaaattaaagaactcttagactctcttaaaaataacccgacgagtagaagacatattctaagtgcttggaatgtggcgatgatagataaaatggctcttcctccatgccatctattagcacaattctatgtctctagcgaccaaagcttggattgccacatgtatcaaagaagtgctgatatgtttcttggagttcctttcaatatcgcaagctactccttgcttatgcatatattaggaaaagtattagatttgaccccaagatattttattcactcttttggtgatgctcacatttatttgaactcagttgatcaagttaaagaacagattaaaaggactccgcgagagctccctcaattaaagtttccagatataaataatttagatgatctcaaagatctaagcctagatgattttatacttgaaggat

SEQ ID NO: 227574 - DNA, 796 bp, Unknown
  Bacterial polypeptide expressing nucleotide sequence isolated from the Sargasso Sea
aatgcagcagtacttaaatcttcttcatcatgttatggaaaacggtgaagaaaaatctgatagaacaggaacaggcactaagtcagtatttggacatcaaatgagatttgatcttgctaatagttttccattattaacaacaaaaaaagttcacttgaaatcgattatttatgagcttttgtggtttctgaagggtgaaacaaatataaaatatttaaaagataatggcgttagtatttgggatgagtgggctgatgaaaatggcgagttaggaccagtttatggacatcagtggagatcatggccctctgaagatggaggaaaaatcgatcaaattacacagcttatagagcaaatagaaaataatcctgactctagaagattaattgtttccgcatggaatccagctgatgtagaaaaaatggctttaccaccatgtcactgtctttttcagttttatgtaagtaatagaaaactgtcttgccaactttaccaaagatcagctgatatttttctcggcgtacctttcaatatcgcatcatatgcgcttttaactatgatgatagctaaggtaacaaaattagagctaggtgaatttgttcatacatttggggatgcacatttatactctaatcatttatctcaagctaaagagcaattagcaaggcctccaaaatcccttcctaaaatgaaaattatatctaatccaaaaacaatttttgattttgaatatgaagattttgttcttgaagattatgatccgcatccacatatatctgcgccagtagcggtctaa

SEQ ID NO: 227575 - DNA, 832 bp, Unknown
  Bacterial polypeptide expressing nucleotide sequence isolated from the Sargasso Sea
aatgaaacagtatttagatgctttaaaatattgttatgaaaatggcacagatgttgaaagtagagctggtggtgttagaaagtcttttggttatcaaatgcattatgatttatcaaaaggttttcctgctataacgactaaaaaactagcatggaaatctgtagtttcagagttattgtggttcattgaaggttcagacgatgagagaagacttgctgaaattttatacaatgattcaagagaaaatttaaaagataaaaaaactatttggacgcagaatgctcaagctgattactggaaatcacaagctcggtttgaaggagatgttggtaaaatttatggagttcaatggagaaattttaatggagaagatcaagtcttaaaccttattaaaggacttaaagaagatccaaatggaagacgtcatataatttctgcttggaaccctccggagattaaaaatatgtcattgccagcatgtcatgcattttcacaattttttatttctaataacaaattaagttgccaattatatcaaaggtcatgtgatatgtttttgggagttccatttaatatagcaagttatagtcttttaactcatatgttggcaagagagtgtaaattagaagttggaacttttattcattctttaggagattttcacatttataaagaacattttgagcaggttaaaatacaattagaaagagtgcctaaaaaattacctgagcttcaattcgtaacaaaagatttttttaaatacaacgtaaatgattttaaattaataaactatcagcatcatgaaaaaattgatgctctgatgaatgtttaa

SEQ ID NO: 227576 - DNA, 796 bp, Unknown
  Bacterial polypeptide expressing nucleotide sequence isolated from the Sargasso Sea
atgaggcagtatcttgacttactaagacgaatccttgaggagggtgagtccaagggagataggactgggacaggaacaatctcacttttcggtcatcagatgaggttcgatcttagcgggggttttcctgcaattacaacaaaaagagtccattggccgagcgttatacacgagttactttggttcctttccggagataccaatatcgagtacctcattcaaaacaaagtaaggatatggaacgagtgggcagatgagaatggtgatctcggtccagtttatggtaaacagtggaggaaatgggagtcaaacgacggtagggtaatagatcaaatcgaaggggcaatagatcttatcaaaaaagatccgaacagtagacgtatcattgtttcagcatggaacgtgggggatctgcgagacatggcattgatgccgtgtcacgcattcttccaattctacgtaaacgacgggaggctgtcttgtaacctatatcagaggagtgcagacgttttccttggagtgccattcaacatatcttcctacagcctcttgacctgcatgattgcccaggtttgcgatctagagcctggcgagtttatctggactgggggggattgccacctgtacctgaatcacatagagcaagctcgtttgcaggtctctagagagcctctgaatctaccgactctgagactggatccatcgataaaatcgattgatgatttcagattcgagcacatatccatagtcggatatgaacatcacccacacatagctgccccaatatcggtttagt

SEQ ID NO: 227577 - DNA, 832 bp, Unknown
  Bacterial polypeptide expressing nucleotide sequence isolated from the Sargasso Sea
atgaaacagtatattgaagctcttaaatattgttttgaaaatggttctgatgttgaaagtagagctggaaaagtaagaaaaaattttggttttcaaatgagatttgatttacaaaacggttttcctgcgatgacaacaaaaaaacttgcatggaaatcagttgtttcagaactcttgtggtttcttgaaggatcggatgatgaaagacgtcttgctgaaatattatatgaagataaaagggaaaatttgaaagataaaaaaactatttggacacagaatgccaattcaaattattggaaagataaagctaagtttgaaggagatgttggaagaatttatggagtgcagtggagagattttaatggtgtagatcaagttaaaaatcttattaaaggaattaagtcagatccaaatggaagacgacatattttatcagcatggaatcctgctgaaattcatttaatgtcactacctccttgtcatgctttttctcaattttatgtttctaaaaataagattagctgtcaattatatcaacgatcatgtgatatgtttttaggtgttcccttcaatatcgcaagttacagcttatttcttcatttacttgcagctgaatgttcattggaagttggagaatttattcttactttaggggattatcatatataccatgaacactttgaagctgtaaaagaacaaatttcaagggaaccaaaagacttaccaaatttagcttttaataaaaaaaatatattcgattattctttaaaagattttactctagaaaattatgatccacatccaacaataaaagcaaagatgaatatttaat

SEQ ID NO: 227578 - DNA, 790 bp, Unknown
  Bacterial polypeptide expressing nucleotide sequence isolated from the Sargasso Sea
atgcaagagtacctagatttattagaaaaagttaaggattctggaaagccaaaaggggatagaactggaacagggacaatctcagtttttggtcatcaaatgagatttaatcttgaggattcttttcctttattgaccacaaaaaagattcatttcaaatctgttgcttatgaattgctctggtttctgaaaggagacactaatatcaattacttaaaagagaatggggtctccatttgggatgaatgggctgatgaaaatggagatcttggtcctgtctatggaaaacaatggcgcaaatgggagggcaaaaacaatattcatgatcaagtaacagaagtcattaaacagattaaagataatcctgatagtaggcgtcatatcgtaagtgcttggaatgtagctgatataccaagcatggctttagcgccttgccacatactatttcagttttatgtgcaagatggaaaattatcatgccaactttatcaaagaagtgctgatatatttcttggagtcccattcaatattgcttcgtattccctgcttacgcatatgattgccaatatatgtgatcttaaggtaggagaatttgtgcatactttaggagatgctcatctttacactaatcaccttgagcaagcagaagaacagctatcaagaaaacctttagatccgcctcaaataatagttaaagataaagaatcaatagacgattatgaatttgaggattttgaaatagtgaattatcaatttcatccacatattccagcgaaagtagcaatataaa

SEQ ID NO: 227579 - DNA, 865 bp, Unknown
  Bacterial polypeptide expressing nucleotide sequence isolated from the Sargasso Sea
catgaaagtatatttagatcttctacgtcacatattagaaaatggcgaagaaaaagatgatagaactaacacaggaacaatatcttcattcggacatcaattagagtttgatttggagcaaggattcccagcagtcaccacaaagtcactagcatggaaaggagttgtttcagagcttttatggtttctagaaggatctgatgatgaacgaaggctagcagaaataaggtttaataaagataggtctgaaattactgatttagaaaaatattcaactatttggacagataatgcagatagccaaggaaaagagctaggttatgagaattctgaaacaaaaaaaattcttggtcctgtctatggagtgcaatggcgaaactggaatggtaatgatcaagtcaaaaatttattagatggtcttaaaaataatccagacgggagaaggcatatcctttctgcttggaatgtaggtgaaataaataaaatggcattgcctccttgtcatgtaatgtctcagttttatatacataaagatacaataagctgccatatgtatcaaagaagtgctgatatgttcttaggggttccatttaatatagctagctatgcgctacttttatcgattttcgctcaaatattaggacttaagccaaaaagatttatacattcttttggtgatgctcatatatataagaactctattgaacaagttaaagaacaaatctctagaacgccaagatcactgcctaaacttattattcctaagcttaattcaatcgatgatttaaaaaaatatagtattgatgattttattctagaagattacgacccacatcctcaaattaaagcagaaatggcagtctaa

SEQ ID NO: 227580 - DNA, 973 bp, Unknown
  Bacterial polypeptide expressing nucleotide sequence isolated from the Sargasso Sea
catgaaacagtatctcgatctcgtccgtaccattctcgataccggcacctggcaggagaaccgcacggggatccgcaccatcagcatgccgggcgcgatgctgcgcttcgacctgcagcaaggcttcccggccgtgacgaccaagaagctagcattcaagtccgcgatcggcgaactggtcggcttcctgcgcgcgacgcgcagcgcggccgatttccgcgcgctcggctgcaaggtgtgggacgcgaacgcgaacgagaacgcgcaatggctcgcgaacccgtatcgccagggcgtcgacgatctcggtgacgtgtacggcgtgcaatggcgccagtggccgggctacaaggtgctcgacgcgggcgccgacgcgcagatcgccgatgcgacgcgccgcggcttccggatcgttacgcgtttcgacgaagacggcgcgccgaaggtgctgctgtacaaggcaatcgaccagttgcgccaatgcctggacacgatcatggagaatccgtccgaccgccgcatcctgtttcacgcgtggaatccggccgtgctcgaccagatcgcgctgcccgcgtgccacttgctgtaccagttcctgccgaatgcgacgaagcgcgaaatctcgctgtgcctgtacatccgcagcaacgacgtcggcctgggtacgccgttcaacctgacggaaggggccgcactgctggaactcgtcggccggctgacgggctacacgccgcgctggttcacgtacttcatcggtgacgcgcacatctacgagaaccagctcgacatgctgcagcgccagctcacgcgagagccgtatgacagcccgcggctcgagattgccgagcgcgtgccggaatacgcgaagacgggcgtctatgcgcccgagtggctggagcagatcgaaccgtccgatttctcgctcgtcggctaccgccaccatgagccgctgaccgcgccgatggcggtctga

SEQ ID NO: 227581 - DNA, 826 bp, Unknown
  Bacterial polypeptide expressing nucleotide sequence isolated from the Sargasso Sea
atgggagaagaaaaagatgatagaactaatactggtaccatatcatcttttggtcatcagttagattttgatctagagtatggttttccagccgttacaacaaaatcccttgcatggaaaggtgttgtttcagaacttttatggtttctagagggatcagatgacgaaagaagattagcagaaataagatttaataaagatagatctgatttaacaaatttagagaaatattcgacaatttggactgataatgcagataaacagggaaaggagcttggttatgagaataatgatttacaaaagcttctaggtccggtttatggggttcaatggagaagctgggctggtatagatcaaattaaagagctgattgatggattaaaaaataatccaaatagcagaaggcatatattatcagcatggaatgttggtgaaattgataaaatggcattgcctccttgtcatgtaatgtctcaattttatgtaaatagaaattatataagttgtcatatgtatcaacgaagtgccgatatgttcctgggagttcccttcaatattgctagctatgcccttttgctttctataattgcagaaatattaggccttaagccaaaaagatttattcactcttttggggatgcgcacatatacaaaaattctatagagcaagtaaaagaacaaatctctagaaaaccaagatcattaccaaggttagttattcctaaacttaatactattgatgatttaaaaacatgctctgttgatgatttcattctagaggggtatgatcctcatcctcctataaaagctaagatggcagtataaa

SEQ ID NO: 227582 - DNA, 796 bp, Unknown
  Bacterial polypeptide expressing nucleotide sequence isolated from the Sargasso Sea
tatgcaacagtacttaaaccttcttcgtcatgttatggataatggtgaagaaaaatctgatagaactggaacaggaacaagatcagtattcggtcatcaaatgagatttgatctagccgaaagttttccattattaacaacaaaaaaagtacatttgaaatcaataatatatgagcttttatggtttttgaaaggcgaaacaaatatcaagtatctaaaagataatggggtaagtatatgggatgaatgggctgacagtaatggagagttgggccctgtttacggtcatcaatggagatcttggccttcagatgatggaggaaaaatcgatcaaattactcaacttattgagcaaatagagaataaccctgactccagaagattaattgtctcagcttggaatccaacggatgttgaaaaaatggctttaccgccatgccattgtctttttcaattctatgttagtaatggaaaactatcctgccagctctatcaaagatctgctgatatttttcttggtgtaccatttaatatcgcttcttatgcgcttttaactatgatgatagcaaaagttacaaaattaaatcttggtgaatttgttcatacttttggtgatgcgcatttatattcaaatcacttttctcaagctgaagagcagctagcaagatcccctaaatcattaccaaaaatgaaaataacctctaatccaaaaacaatttttgatttcgagtatgaggattttattcttgaggattatgatccgcatcctcacatttctgctccagttgctgtttag

SEQ ID NO: 227583 - DNA, 865 bp, Unknown
  Bacterial polypeptide expressing nucleotide sequence isolated from the Sargasso Sea
catgaaagtatatttagatttattaaagtttattttagaaaatggtcatgaaaaagatgatagaactaatactggcaccctatcctcttttggacatcaattagagtttgatttaagtgagggatttccagcaattactacaaagtcacttgcatggaagggtgttgtttcagaattattatggtttttagagggatcgaatgacgaaagaagattggctgaaataagatttggtaagagtagaaatgatcttaaagatttaaataaatattcaacgatatggacggacaatgcagataaacaaggtaaagaattgggatatgaaaatacagacacaaaaaaaatccttggtcctgtctatggtgtgcaatggagaaattggtcaggcaaagaccaactagaagaactcatttataaccttaaaaataaccctgatagcagaagacatatcttatcagcgtggaatgtgggagagattaataagatggctctacctccttgtcatgtcatgtcgcaattttatattcataatgatgaaattagttgtcacatgtatcaaagaagcgcagatatgtttttaggggtgccttttaatattgctagttatgctctgttgctgtcaataattgcagaaatattaaatttaaaacctaagagatttattcattcatttggagatgcgcatatttataaaaattctatagaacaagtaaaggaacagatttctagaaacccaaaaaaattacctaaactgaaaataccaaacctaaattcccttgaagatttaaataaatataaaattgaagattttattttagttgactatgatcctcatccgccgattaaagcaaggatggctgtttaa

SEQ ID NO: 227584 - DNA, 868 bp, Unknown
  Bacterial polypeptide expressing nucleotide sequence isolated from the Sargasso Sea
atgaaatcgtatcttgatctgctatctcacattttagaaaatggtgaaaagcgtgaagacagaactaatgttgggactatttcttcttttgggcatcaacttaaatttgatttaagggatggattccctgctgtaaccacaaaaaagcttgcctggaagggtgtcgtatctgaacttatctggtttttagaaggttctgatgatgaaagaagattagcggagataagatataacaaaaatagagatgaattaaccgatatagataaataccctactatttggacagataatgcagataatcaaggaaaaaatctaggatatgaaaattcaacattggtaaaaaagcttggtccagtatatggagttcagtggagaaattgggatgataaagaccaaattaaagaactcttagactcccttaaaaataatccgatgagcaggagacatattctaagtgcttggaatgtggcgatgatagacaagatggctcttcctccatgtcatctgttagcacaattctatgtctccagcgatcaaagcttagattgccatatgtatcaaagaagtgcagatatgtttcttggagttccttttaatatcgcaagttactccttgcttatgcatatattagggaaagtattagatctaaccccaaggtattttatccactcttttggtgatgctcatatttatttgaactcagttgatcaagttaaagaacagattaaaaggacaccgcgaaagcttcctcagttaaagtttccagatataaataatttagaggatcttaagggtctaagcctagatgattttgtgcttgaaggatacgatcctcatccagctataaaagctaagatggcaatttaga

SEQ ID NO: 227585 - DNA, 328 bp, Unknown
  Bacterial polypeptide expressing nucleotide sequence isolated from the Sargasso Sea
atgagaaattatttaaatttagtagaaaaaattatcaatgaaggtgtagatagagaagatagaaccggaacgggaacaagaagtatttttggagaacaattaaggtttgatttagaaaataacttcccattaataacaactaagaaggtacatctaaaatctatcatttatgaattgctttggtttataaaaggagaaacaaatataaaatttttaaaagataataaagtaactatatgggatgagtgggcagatccaaatggagagctaggaccggtttatggatctcaatggagatcatggccaactcatgatggtaaaaaagttg

SEQ ID NO: 227586 - DNA, 511 bp, Unknown
  Bacterial polypeptide expressing nucleotide sequence isolated from the Sargasso Sea
aatgcttcaatacctaaatctttgtcaaaggattattgataacggtaaatggattcttaacaaacgcaccggtaaaaagtgcttaaccataattgatgcggacatggtctataacgttgcgaaaaatgagtttccattgattactacgaggaaaagttactggaaatctgcaattgcagaacttttgggatatcttcgtggctatgataatgcagctgactttcgagcattaggaacaaagacttgggatgcaaatgctaatgaaaaccagtcttggctgaaaaatccagcgaggcaagggaaagatgacatggggagagtctatggtgtccaaggtcgatcttgggctaaacctgatggtactgtcctagatcaactaactaagattgtagataatcttaccgcaagcgttgacgatagaggcgaaattctcacattttataacccaggagagtttgagttaggctgcctacgtccttgcatgcatactcatactttttctcttagttga

SEQ ID NO: 227587 - DNA, 349 bp, Unknown
  Bacterial polypeptide expressing nucleotide sequence isolated from the Sargasso Sea
tatgtcgctagcgaccaaagcttagattgccatatgtatcaaagaagtgctgatatgtttcttggagttcctttcaatatcgcaagctactccttgcttatgcatatattagggaaactattagatttgaccccaagatattttattcattcttttggtgatgctcacatttatttgaactcagttgatcaagttaaagaacagattaaaaggactccgcgagtgcttcctcaattaaaatttccagatataaataatttagaggatctcaagaatctaagcctagatgattttgtacttgagggatacgatcctcatccagctataaaagctaaaatggcaatttaga

SEQ ID NO: 227588 - DNA, 844 bp, Unknown
  Bacterial polypeptide expressing nucleotide sequence isolated from the Sargasso Sea
cttggagatgattagagaaatcatcgaccaaggtgcggtgaagggagatcgcaccggcacgggcacgatctccacctttggtaaccaaatgcgattcgatctccgccgatcgtttccgctcctcacgaccaagcgcgtgttctggcgcggcgtggcggaggaattgctttggttcgtcgccggcgaaacgaacgcgaacaagctcgccgataagaacgtccgcatttgggacggcaatggaagtcgcgaatatttggactcgatcggtttgactgatcgcgaagtcggcgatctcggacccgtgtacggtttccaatggagacatttcggcgccgagtacacgaacatgcacgccgactacacgggtaagggcgtcgaccaactcgcggaggtgattcacaagattaagaacaatcccacggaccgccgcatcttgctcactgcgtggaaccccgcggcgttgaaggagatggctttgccaccgtgccacatgttttgccagttttacgtcgccaacggcgagctgagctgtcaaatgtaccagcgctcgtgcgacatgggtctcggcgttccattcaacatcgcctcttactctttgctcacgtgcatgatcgcgcaagtctgcggtcttaaaccgggtgatttcgtccactgctgcggggacacgcacgtgtactcgaaccacgtggaaccgctcgaaacacagctcttgtgcgagccgcgaccgtttcccattctcaaaatcaacccggagaagaaggacatcgattccttcaccttcgaagatttcgagatcgtcggttacgatccgcacccgaaaattgcaatggaaatggccgtctga

SEQ ID NO: 227589 - DNA, 868 bp, Unknown
  Bacterial polypeptide expressing nucleotide sequence isolated from the Sargasso Sea
atgaaatcctatcttgatctgctatctcacattttagaaaatggtgaaaagcgcgaagacagaactaatgttgggaccatttcttcatttgggcatcagcttaaatttgatttaagagatggattccctgctgtaaccacaaaaaagcttgcctggaagggtgtcgtatctgagcttatttggtttctagagggttctgatgatgaaagaaggttagcggagataagatataacaaaaatagagacgaattaactgatatagaaaaataccctactatttggacagataatgcagataatcaaggaaaaaatttaggatatgagaattcgtcattggtaaaaaagcttggtccggtatatggagttcaatggagaaactggggtgaaaaagaccaaattaaagaactcttagactcccttaaaaataacccgacgagtagaagacatattcttagtgcttggaatgtggcgatgatagataaaatggctcttcctccatgccatctattggcgcaattctatgtctccagcgaccaaagcttagattgccacatgtatcaaagaagtgctgatatgtttcttggggttcctttcaatatcgcaagctactccttgcttatgcatatattagggaaagtattagatttgaccccaagatattttattcactcttttggtgatgctcatatttatttgaactcagttgatcaagttaaagaacagattaaaagggctccacgagagctccctcaattaaagtttccagatataaataatttagaggatcttaaggatctaagcctggatgattttatacttgaaggatatgatcctcatccagctataaaagccaagatggcaatttaga

SEQ ID NO: 227590 - DNA, 832 bp, Unknown
  Bacterial polypeptide expressing nucleotide sequence isolated from the Sargasso Sea
atgaaaaattatttaaaagctttagaatattgttttgaaaatggagattttgttaaaagtcgtgcaggtaatgtaaaaaaagcatttggatatcaaatgcgatttaatttagaagatggatttccagcagttacaacgaagaagcttgcatggaaagctgttgtatcagagttattatggtttttagagggttcaaatgatgaaagaagacttgctgaaattcaatatgaggatactaaagaaaatttagaagataaaaaaactatttggactcaaaatgcaaacgcagattattggaaaaataaatcaaaatttaaaggagatgttggaagaatatatggagtgcaatggagaaactttaatggagttgatcaaatagttaatctgatagaaggtttaaaaaaaaatcctcatagtagacgacatatccttactgcttggaatcctgctgagttagatcaaatgtctcttcctccatgccatgctttttcacagttttatatttctaataacaaactaagttgtcaattatatcaacgttcatgtgatatgtttttaggagttccatttaatatagctagctacagtcttttaattcatattcttgctaaagaatgcggatatcaagttggggaatttattctttctttaggagatttccatatttatgaagaacattttgatcaagttaaaattcaattaacaagagagccaaaaacacatccaaacttacaatttgaacaaaaaaaaattaatgaatacaagacttcagattttgaattaattaattatgaatatcatcctaaaattgtggcaccaatgaatgtttaaa

SEQ ID NO: 227591 - DNA, 868 bp, Unknown
  Bacterial polypeptide expressing nucleotide sequence isolated from the Sargasso Sea
aatgaagcaatatatcaaagccttagagcacgttcttgaaaaaggaaaacaaagagaggacaggactggcgtaggtaccaggggtgtctttgggtatcaaatgagatttgatcttagaaatagtttcccagccgtaacaacaaagaagctggcctggaaaagcgttgtcagcgaactactttggtttttggagggaagtacagatgaaagaaggcttgcagaaatacacttcggaaaaccaagggaaaaaatagtggataaaaaaaccatttggactgccaacgccaacaagcagggagttgaacttggctatcaaaacaacgaaacacaaaaagagttgggacctgtttatggtaagcagtggaggtcttggggtgaagatgtagggggagtagatcagataaaaaaaatcatctctgatttaaaaagcaacccaaacagcagaaggcacatagtgagcgcctggaatgtggataaaattggtgaaatggcactacccccatgtcatacaatgtttcaatttcatattcaagataaagagctaagctgccagctgtaccaaagaagcgccgacatgtttttgggagtaccgtttaatatagcctcgtatagtttgcttgtttatatactttcgagcatattagatttaaaccctggtaattttatatggacaggtggagattgtcacatttataacaatcacattaatcaagttaaagagcaggtaaaaagagaacctttagaagccccaacgcttataatgccaaacttcaagtcaatcgaagaagttcttaagtcaaaacctacagactatgagctgttaaactataaaccaatggatagcataaaagccccaatggcagtataa

SEQ ID NO: 227592 - DNA, 796 bp, Unknown
  Bacterial polypeptide expressing nucleotide sequence isolated from the Sargasso Sea
tatgagacagtatctggaattacttgagtgtgttcttcataatggcgttaaacgtgaggatagaactggtactggtacaaaatccatttttggatatcaaatgcgttttaatcttttagatggcttccctcttgttaccactaaacgcttgcatatcaaatctataatttatgaactgctgtggtttttagagggaggtactaatataaaatatctcaatgataaaggggtatcaatatgggatgaatgggcagatgatgatggagaactaggtccaacatatggaaatcagtggagatcatggacaagtactgatggagaaaaacatgatcagatttctaaagtgattacctctatcaaagataatccttactctagaagacatattgtttctgcatggaatgttggtgacttggataaaatgaatctaccgccttgccatattttatttcaattttatgtttctaaaggaaaattatcatgtcaactgtatcagcgtagcgctgatatttttttaggaattccttttaacatagcatcttattcacttttaacaatgatggtagctgaccaagttggccttaagtacggagacttcattcatactttgggcgatgctcatttatacgagaatcatattaaacaagccgaagtacagattcaaagatctcctaaaaatcttccggagatgaaaattaataagagcgtaccttctatatttgattatgaatacgatgattttatgctcaataattatgatgctcatgaacatataaaagcagatgtagctgtatga

SEQ ID NO: 227593 - DNA, 832 bp, Unknown
  Bacterial polypeptide expressing nucleotide sequence isolated from the Sargasso Sea
gatgaaacaatacctagatgctttgagatattgttataataatggctctgatgttgaaagtagagctggtggtgttagaaagtcttttggttatcaaatgcattatgatctatcaaaaggttttccagctataactacaaaaaaactagcatggaaatctgtagtttcagagttattgtggtttattgaaggttcagacgatgaaagaagacttgctgaaattttatataatgattcaagagaaaatttaaaagataaaaaaactatttggacacaaaatgctctagctgattactggaaatcacaagctcggtttgaaggagatgttggtaaaatttatggagttcaatggagaaattttaatggggaggatcaagtcttaaatctaattaaaggattaaaagaagatccaaatggaaggcgtcatataatttctgcttggaaccctccggagattaaaaatatgtcattgccagcatgtcatgcattttcacaattttttatttctaataacaaattaagctgccaattatatcaaaggtcatgtgacatgtttttgggagttccatttaatatagctagttatagtcttttaactcatatgttggcaagagagtgtaaattagaagttggaacttttattcattcgttaggagattttcacatttacaaagaacatattgagcaggttaaaatccaactagaaagagtccccaaaaaattacctaagcttcaattcgaaacaaaagatttttttaaatacaatgtaaatgattttaaactaacaaattatcagcatcatgaaaaaattgatgctctgatgaatgtttaa

SEQ ID NO: 227594 - DNA, 355 bp, Unknown
  Bacterial polypeptide expressing nucleotide sequence isolated from the Sargasso Sea
atgcaagagtacctagatttattagaaaaagttaagaattctggaaagccaaaaggggatagaactggaacagggacaatctcagtttttggtcatcaaatgagatttaatcttgaggattcttttcctttattgaccacaaaaaagattcattttaaatctgttgcttatgaattgctctggtttctgaaaggagacactaatatcaattacttaaaagagaatggggtctccatttgggatgaatgggctgatgaaaatggagatcttggtcctgtctatggaaaacaatggcgcaaatgggagggcaaaaacaatattcatgatcaagtaacagaagtcataaacagataaa

SEQ ID NO: 227595 - DNA, 832 bp, Unknown
  Bacterial polypeptide expressing nucleotide sequence isolated from the Sargasso Sea
atgaaacaatatatcacagctcttaaatattgttttgaaaaaggttctgatgttgaaagtagagctggaaaagttagaaaaaattttggttttcaaatgagatttgatttacaaaatggttttcctgctatgacaacaaaaaaacttgcatggaaatcagttgtttcagaactcttgtggtttcttgaaggatcagatgatgaaagacgtcttgctgaaatattatatgaagataaaagagaaaatttgaaagataaaaaaactatttggacacagaatgccaattcaaattactggagagacaaagctaagtttgagggtgatgtcggaagaatttatggagtacagtggagagattttaatggtgtagatcaaattaaaaatcttattcaaggaattaagtcagatccaaacggaagaaggcatattttatctgcatggaatccctctgaaattcatttaatgtcacttcctccttgccatgctttttctcaattttatgtttctaaaaagaagattagttgtcaattgtatcaacgatcatgtgatatgtttttaggtgttcctttcaatatagctagttatagcttatttcttcatttgattgctgctgaatgctcattggaagttggagaatttattcttactttaggggattatcatatataccatgaacactttgatgccgtaaaagaacaaatttcaagggtgccaaaagacttaccaaatttggtttttaataaaaaaaatatattcgattattctataaaagattttactttagaaaattatgatcctcatccaacaataaaagcaaagatgaatatttaat

SEQ ID NO: 227596 - DNA, 325 bp, Unknown
  Bacterial polypeptide expressing nucleotide sequence isolated from the Sargasso Sea
aatgaaacaatatcttgatttattaaaactaatcaaagaaacaggaacaaaaaaagaagacaggaccggtacagggactatcagtatctttggacatcaaatgaggtttgacctgcaagaaggcttccccctgatgacaacaaaaaaagtaaatttagactccattattcatgaactgctttggttcataaaaggagacacaaacataagatatctagttaaaaatggtgtaaatatttggaacgactggcccttccaaagttggctaaatcaaacaggtcaatcagaaaaatacaccatgcattcaaaagaatggaaaaatatg

SEQ ID NO: 227597 - DNA, 907 bp, Unknown
  Bacterial polypeptide expressing nucleotide sequence isolated from the Sargasso Sea
atgaaacagtatcttgatttattaaatttaataaaagaaacagggataaaaaaagaagatagaactggaaccggaactataagtatcttcggtcaccaaatgaggtttgatttgcagaaaggttttccattgatgacaacaaaaagggtaaatttagacgcgattattcatgaattgctttggttcataagaggagatacgaacataagatacctgatccagaataatgtaaatatctggaatgactggccttttcaaaattggcttaatgagacaggcaaagcagaccattaccctatccattcagatgaccgaaaagatatgatgaagatgtttatagagaaagtcatgaatgatgatgaatttgcttctcgttatggagatctaggaccagtttatggaaaacaatggagagattttgagggtgttgatcagttggaattagtgataaaagatatcaagactaatcccaactctagaagactgattgtttctgcatggaatcctaaagatattcctgtgatgattaaatcaggccttcctccttgccatactcttttccagttttatgtaagtaatggaaagctatcttgccaactctaccaaagaagcgcggatgtattcctaggagtaccttataacattgcctcgtacgcgttattgactcttatgatcgctaaggtcactggtcttgaggcaggagaatttatacattctttaggtgatactcacatttacttaaaccacttaaaccaagtagatgaacagctaagcagggctcctcatgatctacctaaacttgaaatctttaatgataaaaatgatatatctaattttgatataagtgattttaagttaacagaatataacccccatccctttataccggcacctatagctgtgtaat

SEQ ID NO: 227598 - DNA, 796 bp, Unknown
  Bacterial polypeptide expressing nucleotide sequence isolated from the Sargasso Sea
atgcaacagtatttagacttgatgaagcatatcttagccgaaggtgtggataaatcagaccgcacaggtaccggcactcgctcggtatttggttatcaaatgcgctttgatttgagtaagggctttcccttagtcactaccaagaagtgccatatgcgctcgattattcatgagttattgtggtttctgaaaggcgataccaatattgcttatctgcgtgagaataaagtcagtatttgggacgaatgggccgatgaaaatggcgatttaggccctgtttatggcgcgcagtggcgcagctggccgacccaaagtggagatgctatcgaccaaatcgctcaggtgatcgcacaaatcaaatctcaacccgattcacgtcgtttaattgtttcggcgtggaacgtgggtgaactggataaaatggcgctggcaccttgccatgcctttttccaattctatgttgccgatggcaaattatcctgtcagctgtaccagcgtagctgtgatgtgttcttaggtttacctttcaatatcgccagttatgcgctgctgaccatgatggtggcacagcaatgtgatttagctttgggtgactttgtgtggacgggcggcgatacccatttgtactccaaccatatggaacaaacggcgttgcagttaagccgcgagccaagatcgttgcccaccatgactatcctgcgtaaacctgcttcaatctttgattatcaattcgaagatttcgagctaactcactacgatccacacccgcatatcaaagcccctgtcgccgtttaat

SEQ ID NO: 227599 - DNA, 922 bp, Unknown
  Bacterial polypeptide expressing nucleotide sequence isolated from the Sargasso Sea
atgtatacccatgatgattattggattttttatgttgttatattccaggagaaaaatatgaaagcatacttagatcttcttcaatatatattggaaaacggagaagaaaaaagtgatagaactaatactggaacaatatcatcttttggacatcagtttgaatttgacttagaaaaaggatttccagctgtaactactaaatctcttgcatggaaaggagttgtctctgagctattgtggttcctagagggctcagatgatgagagaaggcttgctgagatccgatttaataaagatagatctgaattaactaatttggaaaaatattcaacaatatggactgataatgcagataatcaaggcaaagaattaggatacgaaaattcagataccaaaaagattcttggtccagtttatggtgtccaatggagagattggtgtggaattgatcaaatcaaatatttactaaaaggattgaaagaaaatcctgatggaagaagacatattctttctgcttggaatgttggtgaaatagaaaaaatggctctacctccctgtcatgtaatgtcacagttttatattcataataattctataagctgtcatatgtaccaaagaagtgctgatatgtttcttggggttccttttaatatagcgagttatgctttgctcttatctatttttgcagagattctagatttacaaccaaaaagatttatacattcctttggtgatgctcatatatataaaaattcaattgatcaggtaaaggaacaaatatccagagagcctaagccacttcctaaccttaaaattcctaaaattaattcgattgaagatataaaaaaatacagcgtagatgattttattctagaaaattataatccccatcctcctataaaagcagaaatggcagtatgaa

SEQ ID NO: 227600 - DNA, 232 bp, Unknown
  Bacterial polypeptide expressing nucleotide sequence isolated from the Sargasso Sea
tttgaaacaatatataagccttctcgaaaatgtaattagaaatggtgttcaaaaagaagacagaacaggaacaggaacaaaatcaatttttggatggcaaatgagatttgatctgtctaaagggttcccattattaactaccaaaaaacttcattttaagtcaattgcctatgaacttctatggttcattagaggtgatacaaatattgaatatttaaataaaatggtgtga

SEQ ID NO: 227601 - DNA, 538 bp, Unknown
  Bacterial polypeptide expressing nucleotide sequence isolated from the Sargasso Sea
tgaaaaaggtgatttaggtcctgtttatggatcacagtggcgttcgtgggaagcaaaagataaaacaatagatcaaattacagaagttatagagcaaataaaaaataatcccgaatccagaaggttgattgttagcgcatggaatgttggcgaactcgataatatggccctagccccttgtcatgcacttttccaattttatgttgctaatggtaaattatcatgtcaactttaccagcgaagtgccgatatatttcttggtgtaccatttaatattgcttcttacgcactactactaatgatgattgccaaggttacaaaactagatttgggtgaatttgttcatacttttggtgatgcgcatctatatcttaatcatttagaacaggttgatgtacagttaaagcgaaaaccttatgcgctaccacagataaaattaaatccagatattaatgatatatttgaatttcaatacgaagactttaaattaattaattatcaatcacacccaaaaatttccgctccaattgctatttga

SEQ ID NO: 227602 - DNA, 796 bp, Unknown
  Bacterial polypeptide expressing nucleotide sequence isolated from the Sargasso Sea
taatttacaagatggtttccctcttgttactacaaaaaaagtaaactttgactcgatccttcatgagctactttggtttgtaaaaggtgatacaaatataaggtatttagttgaaaataacgtaaacatatggaatgaatggccttttcaaaattggcttgaagaaaccaatcaaattaagaatttagaaatgcattctcaagaatggaaagacaaattaactggcttcatagatttaatcaaaacggataatgcatttgctgaacagtatggtgatttagggcccgtgtatggaaagcaatggagagattttgaaggaattgatcagcttaggttagtagttgatgacttaaagaataatcctaattctaggcgtcatatagtttcagcctggaatccgaaggaaatacctataatgattaagtctggactgccaccttgccatactttatttcaattttatgtcagcgaaggaaggttatcgtgtcagctttatcaaagaagtgcagacgtcttcctaggggttccttataacatcgcctcctatgctttattaacttgcatgattgcttcagttataggcttaaaagtaggagattttgttcattcattaggagatacacatatataccttaaccatttagatcaagttgaggaacaactttcaaggaaaccacatcctttgcccaacataaatatcaataaaaaggatgatctttttgattacgaatttgaagactttactcttgtagattatcaatcacatccctttataagtgctcctatagcagtttga

SEQ ID NO: 227603 - DNA, 758 bp, Unknown
  Bacterial polypeptide expressing nucleotide sequence isolated from the Sargasso Sea
tagacaagagggaaaggagaaaggtgacagaacaggcactggaaccatatcggtttttggataccaaatgagatatgatctatctcaaaacttcccgttacttacaaccaaaaaagttcattttaagtctatggcctatgaacttttatggtttttaaagggcgatacaaatattagttatcttaaagataatggagtttccatttgggatgaatgggctgatgataatggtgatttaggtcctgtctacggtaagcagtggagaaaatgggaaggtctgaatggcgctcatgatcaaatcaaacaagtgatagaaaaaataaaatctaaccctaacagcagaagacatattgtgagtgcatggaatgtaagtgatatacagagcatggctttagctccctgtcatatattatttcaattttatgttgttgaaggaaagctatcttgccaactttatcaaagaagtgctgatattttcttgggagttccgtttaatattgcatcatatgcattgcttacacatatggttgctaaagtatgtaatcttgaagtgggagaatttatccatactctaggcgatgctcatttgtataagaatcattttgaacaagcagatgaacagctatcaagaacgcctcttacaccaccgcaaataaaaattaaaccaagaaataatattgatgattttgtttatgaagactttgaacttataaattatgagcatcatcctcatatagctgcaaaagttgcagtatgat

SEQ ID NO: 227604 - DNA, 837 bp, Unknown
  Bacterial polypeptide expressing nucleotide sequence isolated from the Sargasso Sea
tatgtatacccatgatgattattggattttttatgttgttatattccaggagaaaaatatgaaagcatacttagatcttcttcaatatatattggaaaacggagaagaaaaaagtgatagaactaatactggaacaatatcatcttttggacatcagtttgaatttgacttagaaaaaggatttccagctgtaactactaaatctcttgcatggaaaggagttgtctctgagctattgtggttcctagagggctcagatgatgagagaaggcttgctgagatccgatttaataaagatagatctgaattaactaatttggaaaaatattcaacaatatggactgataatgcagataatcaaggcaaagaattaggatacgaaaattcagataccaaaaagattcttggtccagtttatggtgtccaatggagagattggtgtggaattgatcaaatcaaagatttactaaaaggattgaaagaaaatcctgatggaagaagacatattctttctgcttggaatgttggtgaaatagaaaaaatggctctacctccctgtcatgtaatgtcacagttttatattcataataattctataagctgtcatatgtaccaaagaagtgctgatatgtttcttggggttccttttaatatagcgagttatgctttgctcttatctatttttgctgagattctagatttacaaccaaaaagatttatacattcatttggtgatgctcatatatataaaaattcaattgatcaggtaaaggagcaaatatccagagagccaaaaccacttcctaatcttaaaattcctaaaatgattctctcgaa

SEQ ID NO: 227605 - DNA, 319 bp, Unknown
  Bacterial polypeptide expressing nucleotide sequence isolated from the Sargasso Sea
atcttgtcaattatatcaaagaagtgctgatgtatttttaggtgttcctttcaatattgcatcatatgcgctattactttcattagttgcatcagtaactaattataaagtaggggaatttgtatatacattaggagattttcatatttataaaaatcatattgaacaagcaaaaattcaattagagagagatcctatgaagctatccaaattaaagctcaacgaaaaaattgatgatatttttaagtttacatatgaggatatacaaatcgaagactattcatgccatcctcatattaaagcagatatagcaatatga

SEQ ID NO: 227606 - DNA, 397 bp, Unknown
  Bacterial polypeptide expressing nucleotide sequence isolated from the Sargasso Sea
atgaaacaatatctcgacctcgtccgcacgattctcgacacgggtacgtggcaggagaaccgcaccggcatccgcacgatcagcatgccgggcgccatgttgcgcttcgacctccagcagggatttcccgccgtcactacgaagaagctggcgtttaaatcggcaatcggcgaactggtcgggttcctgcgcgcgtcgcgcagcgccgcggattttcgcgatctgggctgcaaggtgtgggacgcgaacgccaatcagaatccgcaatggctcgccaatccgtatcgtcagggccccgacgacctcggcgacgtgtacggcgtgcaatggcgccagtggccagcctacaaggtgctggacgcaggcgccagcgcgcaactggccgacgccaccgcgc

SEQ ID NO: 227607 - DNA, 415 bp, Unknown
  Bacterial polypeptide expressing nucleotide sequence isolated from the Sargasso Sea
aagtgcatggaatgttgggaaaattgattctatggctttgcctccctgccatgttatgtctcaattctatgtttctaaaaatgatcggctttcatgtcaaatgtatcaaagaagcgcagatatgtttttaggtgtgccgtttaatattgcaagctatgctttacttcaatctattttggcgaatatcttgaacttaataccaggtgaatttgtgcatacatttggagatgctcacatatacaacaacagcattgagcaggttaaagagcagctccttagagagcccaagaaactccccaaattaattatgccaaatctcaattcaatagattcacttaatgactgttctgttgatgactttatattagagggatacgaatctcatcctgctctaaaagctccaatggcaatatag

SEQ ID NO: 227608 - DNA, 751 bp, Unknown
  Bacterial polypeptide expressing nucleotide sequence isolated from the Sargasso Sea
atgaaatcatatcttaatctgctgtctcacattttagaaaatggagaaaagcgtgaagacagaactaatgttggaactatttcttcatttgggcatcaacttaaatttgatttaagggatggattccctgctgtaaccacaaaaaaacttgcatggaagggtgtcgtgtctgagcttatttggtttctagagggttctgacgatgaaagaagattagcggagataagatataacaaaaatagagacgaattaactgatatagataaataccctactatttggacagataatgcagataatcaaggaaaaaatttaggatatgaaaattcatcattggtaaaaaagcttggtccggtatatggagttcaatggagaaactgggatgataaagaccaaattaaagaactcttagactcccttaaaaataacccgacgagcagaagacatattctaagtgcttggaatgtggcgatgatagataaaatggctcttcctccatgccatctattagcacaattctatgtctctagcgaccaaagcttagattgccacatgtatcaaagaagtgctgatatgtttcttggggttcctttcaatatcgcaagctactccttgcttatgcatatattagggaaagtattagatttgaacccaagatattttattcactcttttggtgatgctcacatttatttgaactcagttgatcaagttaaagaacagattaaaaggactccacgaggactccctc

SEQ ID NO: 227609 - DNA, 826 bp, Unknown
  Bacterial polypeptide expressing nucleotide sequence isolated from the Sargasso Sea
atgaagcagtacttagatttggtaagccatgtaatggaaaacggtgtcttgaaagaggatagaacaggaacaggaaccaaaagtgtttttggatatcaaatgaggtttgatttaaatgatggttttccattagtcacaaccaaaaaattacatctaaaatcaataatatatgagctattatggtttctcaagggtgatactaatattaattatttgaaggaaaaaggagtcaagatttgggatggatgggcaaatgaaaatggagacttaggtcctgtttatggttcacaatggagaaattggaacggtgataatattgatcaaatttctgatcttattaatacaattaataataatcccaaaagtagaagaatgattgtttcagcttggaatccaagcgtattacctgacacttctaaaagttttagtgaaaatgttaaaaatggtaaagcagctttaccaccatgtcatgcattttttcaattttatgttgctgaaaataaattatcatgtcaactatatcaaagaagtgctgacatttttttaggagtaccctttaatattgcatcctattcattatttacacatatgatagctcatgtttgcaatcttgaagtcggtgaatttattcacacttttggagatgcacatatttatactaatcacttcgaacaagtcaatcttcaattgagtcgaaaacctaaaaaacttccaaagcttcttataaatagaaaagtaagggatattttcgattttcaatttgaagattttgagattttagattatgacccccacccacatataaaaggggtcgtttcaatctaat

SEQ ID NO: 227610 - DNA, 796 bp, Unknown
  Bacterial polypeptide expressing nucleotide sequence isolated from the Sargasso Sea
aatgcagcagtatttagacttgatgaaacacattttagccgaaggtgtggataaatcagaccgtacaggtacaggcactcgctcggtgtttggctatcaaatgcgtttcgatttgagtaagggcttccccttagtgaccaccaagaagtgccatatgcgctcgattatccatgagctattgtggttcctgaaaggggagaccaatattgcttatctgcgtgacaataaggtcagtatttgggacgaatgggccgatgaaaacggcgatttaggccctgtttacggtgcacagtggcgcagttggccgacccaaggtggtgaggctatcgatcaaatttcgcaggtcattgcgcaaattaaatcgcaacccgactcgcgccgtttgattgtctctgcatggaacgtgggcgaactggataaaatggcactggcgccatgccatgcgtttttccagttttatgtcgccgacggcaaattatcctgccagttgtaccaacgcagttgtgatgtatttttaggtttaccattcaatatcgccagctatgcgttgctgacgatgatggtcgcgcaacaatgtgatttagccttaggtgactttgtttggacgggtggcgatacacatttatactccaaccatatggagcaaactgcgttgcagttgacccgtgagccaagacctttacccaccatgacaattttgcgtaaacctgcctctattttcgattatcaattcgaagacttcgaactgacccactacgatccacatccacatatcaaagcgcctgttgccgtttaa

SEQ ID NO: 227611 - DNA, 733 bp, Unknown
  Bacterial polypeptide expressing nucleotide sequence isolated from the Sargasso Sea
gacgggaacgggtacctatagtgtttttggttttcagatgcgttttgatctcggagaatcttttccgcttttaaccacaaagaaaatgttcttgaagggaatcattcacgaactcctgtggtttctatctgggtcaaccaacattaaatatctggttgataatgacgtgcacatttgggatgagtgggctgacgaacacggcgaactgggtcctgtttatggctctcagtggagatcctggccggggcaagacggtgccacgatcgaccaaatagacaggctggtcggtgatctgaaatctaatccattcagtcgtaggcatatagtaagcgcttggaatgtagccgaggttgacaatatggctcttcccccgtgccatactctattccaattttatgtagcggaaggacgtctctcttgtcagctttatcaaaggagtgcggatatttttttgggagtcccttttaatatcgcgtcatacgctcttttaacactgatggtcgcgagggtatgcgagttgaagccaggtttcttcgttcatacgctgggtgatgcccatctttacgcaaaccacttggaacaaacagaccggcaactagcgagagagcccaaaacaccaccgcaaatgattatcaaagaagggataaaggatatcttctcttttgagtatagcgactttcaattagtcggttatgaatctcacccaggcataaaagctccgatcgcagtctaa

SEQ ID NO: 227612 - DNA, 868 bp, Unknown
  Bacterial polypeptide expressing nucleotide sequence isolated from the Sargasso Sea
atgaagcagtatatcaaagctttagagcacgttcttgaaaaaggaaaacaaagacaggacagaaccggcgtaggtacaagaggtgtctttgggtatcaaatgcgatttcaccttagaaatagttttccagccgtaacaacaaaaaagctggcctggaaaagtgttgtcagcgaactactttggtttctggaaggaagtacagatgaaagaaggctggcagaaatacattttggaaaaccaagggaagaaatagtggataaaaaaactatttggactgccaacgccaacaagcagggagttgaacttggttatcaaaacaacgaaacacaaaaagagctgggacctgtttatggtaagcagtggaggtcttggggagaagataccggaggagtagaccagataaaaaaaattatctctgatttaaaaagcaatccaaacagcagaaggcacatagtgagcgcctggaatgtggataaaattgacgagatggcactacccccatgccacacaatgtttcaatttcatattcaagacaaagagttaagttgccagctataccaaagaagcgccgacatgtttttgggagtaccgtttaatattgcttcatatagtttgcttgtttatatactttcgagcatattagaccttaaccctggtagttttatatggacgggtggagattgtcacatttataacaaccaccttgatcaagttaaagagcaggtaaaaagagaacctttggagcccccaagacttataatgccaaactttaagtcaatcaaggaagtccttgagtcaaaacctacagactatgagctgttaaactataaaccaatggacagcataaaagccccaatggcagtataaa

SEQ ID NO: 227613 - DNA, 853 bp, Unknown
  Bacterial polypeptide expressing nucleotide sequence isolated from the Sargasso Sea
atgaaatcatatcttaatctgctgtctcacattttagaaaatggagaaaagcgtgaagacagaactaatgttggaactatttcttcatttgggcatcaacttaaatttgatttacgggatgggttccctgctgtaactacaaaaaagcttgcctggaagggtgtcgtatctgaactaatctggtttctagagggttcagatgatgagagaagattagcggagataagatatgacaaaaatagagatgaattaaccgatatggataaataccctactatttggacagataatgcagataatcaaggaaaaaatttaggatatgaaaattcatcattggtaaaaaagcttggtccagtatatggagttcaatggagaaactgggatgataaagaccaaattaaagaacttttagactccttaaaaaataacccaacgagcagaagacatattctaagtgcttggaatgttgcgatgatagataaaatggctcttcctccatgccatctattagctcaattctatgtatctagtgatcaaagcttagattgccatatgtatcaaagaagtgctgatatgtttcttggagttcctttcaatatcgcaagctactcattgctcatgcatatattggggaaagtattagacttgactccaagatattttattcactcctttggtgatgcccacatttatttgaactcagttgatcaagttaaagaacagattaaaaggactccacgagaacttccctcactaaagtttccagatataaataatttagaggaatctaaggggtctagcctagatgattttatacttgagggatacgatcctcatccagctataaaagcta

SEQ ID NO: 227614 - DNA, 826 bp, Unknown
  Bacterial polypeptide expressing nucleotide sequence isolated from the Sargasso Sea
atgaaacaatacttagaattggtaagtcatgttatggaaaacggtgtcttgaaacaggatagaacaggaactggaaccaaaagtgtatttggatatcaaatgaggtttgatttaaatgatggttttccattagtcacaaccaaaaaattacatctaaaatcaataatatatgagctattatggtttctcaagggtgatactaatattaattatttgaaggaaaaaggagtcaagatttgggatggatgggcaaatgaagatggagaattaggtcctgtttatggttcacaatggagaaattggaacggtgataatattgatcaaatttctgatcttattgatacaattaataataatcccaaaagtagaaggatgattgtttcagcttggaatccaagcgtattacctgatacatctaaaacctttagtgagaatgttaaaaatggtaaagcagctttaccaccatgtcatgctttttttcaattttatgttgctgaaaataaattatcatgtcaactatatcaaagaagtgctgacattttcctaggagtaccctttaatattgcgtcgtactcattatttacacatatgattgctcatgtttgtgatcttgaagtcggtgaatttattcacacttttggcgatgcacatatttacactaatcacttcgaacaagtcaatcttcaattgagtcgaaaaactaaaaaacttccaaagcttcttattaatagaaaagtaaaagatattttcgattttcaatttgaagactttgagattttggactacgacccacacccacatataaaaggtgctgtttcaatctaat

SEQ ID NO: 227615 - DNA, 865 bp, Unknown
  Bacterial polypeptide expressing nucleotide sequence isolated from the Sargasso Sea
atgaaagcatatttagaccttcttaaatacattattgaaaatggtgatgaaaaagaagatagaacaaacacaggtactatttcttcatttggtcatcagttagagtttaatttagagcatggattcccagcagttactactaaatcattggcatggaaaggtgttgtatctgagctattatggtttttagaaggctcagatgacgaaaggcgcttagctgaaattagatttaataaagataggtctgagcttaaagatttagataaattttctacaatttggacagataatgctgataatcaaggtaaagaattaggatacacaaattctgaaactgaaaagatacttggaccagtctatggtgttcaatggcgggattggtctggaaaagatcagattaaagatcttcttcgtaatttaaaggaaaatccagatagcaggcgtcatattttatcagcctggaatgttagtgagattgataaaatggcattgcctccatgtcatgtaatgtctcaattttatataagtaataaatcaatcagctgtcatatgtatcaaagaagtgcagatatgtttctgggtgtgccctttaacattgcaagctatgccctattactatgtatatttggtgaaatacttaacttgaaaccgaaaagatttattcattcttttggagatgctcatatatatttaaactcaatcgagcaagtaaaagagcaaatttctagagagccaaaatctttgccaaccttaagaatgccaaagctaaattcatttgaagatattaagaattgcaaggttgatgattttattctagaaaattatgatcatcatccaccaataaaagcaaagatggcagtatgaa

SEQ ID NO: 227616 - DNA, 904 bp, Unknown
  Bacterial polypeptide expressing nucleotide sequence isolated from the Sargasso Sea
aatggaacaatatttaaatctacttacagaaataaaatctaaaggaactaaaaaagaggatagaaccggaaccggaacaatcagcatattcggacatcaaatgagatttgatttgaatgatgggtttccattagtaaccaccaaaaaagttaatttcaatgccatcttacatgaacttttatggtttataagaggcgagacaaatatcgaatatttagtaaaaaataatgtaaacatatggaatgaatggccatttcaaagctggttggagaaaacaaagcaaaatgaaggtctgactatgcattcaaaggagtggaaggataaattacaagaatttattgatctgataaaaaaagataattccttcgcaaaagaatatggagatctcgggccagtgtatggtaagcagtggagagattttgaaggagtagatcaactagctcaggtaatagaggatctaaagaaaaaccctaattccagacgtcatattgtctcagcttggaatcctaaggaaattccaacgatgattaaatcaggcttaccaccttgtcatacactctttcagttctatgtagctgatgggaagctctcttgtcagttatatcaaagaagtgccgatgtatttctaggtgttccatataatattgcgtcttacgcccttcttacttacatgatagcttcggtcacagatctagaggttggagattttgttcactctctaggtgatacacatatttatctgaatcatcttgttcaggttgatgagcagctttctagagagccgcatcagctgcctaaaatcgagataaataaaaaagataatctgttcgattataattttgaagatttcaaacttatagattacaactctcacccttttattagtgctcccattgctgtttga

SEQ ID NO: 227617 - DNA, 616 bp, Unknown
  Bacterial polypeptide expressing nucleotide sequence isolated from the Sargasso Sea
aatgggcgtgcatatttgggatgaatgggaaacagattcaggagaccttggccccatttatggattccagtggagaaattgggttgatcacaataatggacagcacattgatcagattcagcaagtcattgatcaaatcagaagcaatccttcatcgagaagaatcattgtcagtgcttggaatgttgccgacttacctgatgaaagcatttcccctcaggaaaatgtgcaagagggaaagatggctttggcaccatgtcatgcaatttttcaattttttgtttcacaaggaaaactgtcatgtcagctctatcaaagaagttgtgatacattcttgggattgggattcaatattgcttcatatagcttattaacgcatatgattgctcaacaatgtgatttagatgtaggtgatttcatttggactgggggtgacgtgcatctctatctcaatcatttggagcaggcaaatgaacaacttaaaagagaaccatatcctcttccaactctcaaaatcaatcgaaagccggcatcaatttttgaatacaagtatgaggactttgagctcatcaattatgagtcacatccgcatatatcagcacctatctcgatataa

SEQ ID NO: 227618 - DNA, 838 bp, Unknown
  Bacterial polypeptide expressing nucleotide sequence isolated from the Sargasso Sea
ttgaagcagtatctagacttattacagaagattctcgatgagggagaggtcaaggacgatcgaactggcacaggtacgaagagtttattcggccaccaaatgcgctttgatctgaatcaaggcttcccaattctgacaacaaagaagattttctttaaaggagttgtctacgaacttttgtggtttctagatggctctaccgacaataccttactcaaagagaatggggttcatatctgggatgagtgggaaaccgataagggagacttgggtccaatttatggttttcagtggagaaattggattgatcacaataatggtcaacatattgatcaaattgaacaagtcatcgagcaaattcgaagcaatccttcttcaagaagaattattgtcaatgcatggaatgttgccgatttacccgatgagagcatttcccctcaggaaaatgtcaaactgggaaaaatgtcattggcaccatgccacgcgttatttcaattttttgtttcccaaggaaaactttcatgtcagctttatcagagaagctgtgacacattcctaggattgggattcaatatcgcatcgtatagtttattgacacatatgattgcccaacaatgcgatttagatgttggtgacttcatttggacgggaggcgatgttcatctctacctcaatcatttggaccaggccaatgaacaactgaaaagagagccctatcctctgcctaaactaaaaataaatcgaaagcccgcatcaatttttgattacaagtatgaagattttgaactcatcaattaccagtctcatccccatatatcggcacctatctcgatataga

SEQ ID NO: 227619 - DNA, 838 bp, Unknown
  Bacterial polypeptide expressing nucleotide sequence isolated from the Sargasso Sea
tttggagcagtatctagacttattacagaaaattcttgatgagggacaggtcaaggacgatagaactggcactggtaccaaaagtttcttcggccatcaaatgcgctttgacctaaatcaaggattcccaattttgacaacaaagaagatttttttcaaaggcgttgtctacgagcttttatggtttttggatggctctacggacaacaatgcactgaaagacaatggcgtgcatatttgggatgaatgggaaacagattcaggagaccttggccccatttatggattccaatggagaaattgggttgatcacaataatggacaacaaattgatcagattcagcaagttattgatcaaatcagaagcaatccttcatcgagaagaatcattgtcagtgcttggaatgttgccgacttacctgatgaaagcatttcccctcaggaaaatgtgcaagagggaaagatggctttggcaccatgtcatgcaatttttcaattttttgtttcacaaggaaaactgtcatgtcagctctatcaaagaagctgtgatacattcttgggattgggattcaatattgcttcatatagcttattaacgcatatgattgctcaacaatgtgatttagatgtaggtgaattcatttggacagggggtgacgtgcatctctacctcaatcatttggagcaggcaaatgaacaacttaaaagagaaccatatcctcttccaactctcaaaatcaatcgaaagccggcatcaatttttgaatacaagtatgaggactttgagctcatcaattatgagtcacatcctcatatatcagcacctatctcgatataa

SEQ ID NO: 227620 - DNA, 790 bp, Unknown
  Bacterial polypeptide expressing nucleotide sequence isolated from the Sargasso Sea
atgcaagaatacctcgatttattagaaaaagttaaaaattctggcaaaccaaaaggggacagaactggaacaggtacggtctcaatttttggccatcagatgaggtttaaccttgaagattcatttccattattaactactaagaagatacattttaagtctgttgcctatgaattactttggtttctaaaaggagaaaccaatattagctatctaaaagagaatggagtatcaatttgggatgagtgggctgatgataatggagatcttggtcctgtctatggaaaacaatggcgtaagtgggaaggtaagaatggtattcatgatcaagtagcagaagttattaaacagattaaggagaatcctaatagtagacgacatattgtaagtgcatggaatgtagctgatataccaagcatggctttagcgccctgccatatactatttcaattttatgtacaggatggaagactttcatgccaactctatcaaagaagtgctgatatatttcttggtgtgcctttcaatattgcttcatatgcattacttacacatatgattgccaacatatgtaatttgaaagtaggggagtttgttcatactttaggagatgcccatctttacaacaatcaccttgaacaagcagaagaacaactctcgagaaagcctctagagccacctaaaattataatcaaagctagagaatcaatagatgattatgaatttgaagattttgagatagtaaactatcaatttcatccacatattccagcgaaagtagcaatataaa

SEQ ID NO: 227621 - DNA, 649 bp, Unknown
  Bacterial polypeptide expressing nucleotide sequence isolated from the Sargasso Sea
atgaaatcctatcttgatctgctatctcacattttagaaaatggtgaaaagcgcgaagacagaactaatgttgggaccatttcttcatttgggcatcagcttaaatttgatttaagagatggattccctgctgtaaccacaaaaaagcttgcctggaagggtgtcgtatctgagcttatttggtttctagagggttctgatgatgaaagaaggttagcggagataagatataacaaaaatagagacgaattaactgatatagaaaaataccctactatttggacagataatgcagataatcaaggaaaaaatttaggatatgagaattcgtcattggtaaaaaagcttggtccggtatatggagttcaatggagaaactggggtgaaaaagaccaaattaaagaactcttagactcccttaaaaataacccgacgagtagaagacatattcttagtgcttggaatgtggcgatgatagataaaatggctcttcctccatgccatctattggcgcaattctatgtctccagcgaccaaagcttagattgccacatgtatcaaagaagtgctgatatgtttcttggggttcctttcaatatcgcaagctactccttgcttatgcatatattagggaaagtattagattgac

SEQ ID NO: 227622 - DNA, 223 bp, Unknown
  Bacterial polypeptide expressing nucleotide sequence isolated from the Sargasso Sea
atggaacaatatttaaatctacttacagaaataaaatctaaaggaactaaaaaagaggatagaaccggaacaggaacaatcagcatattcggacatcaaatgagatttgatttaaatgatgggtttccattagtaaccactaaaaaagtaaatttcaatgccatcttgcatgaacttttatggttcataaaaggcgagacaaatatcgaatatttagtaaaaa

SEQ ID NO: 227623 - DNA, 661 bp, Unknown
  Bacterial polypeptide expressing nucleotide sequence isolated from the Sargasso Sea
tgttgtggttcctcaaaggcgacaccaaatatccagtatctgaaggataacaaagttagtatttgggatgaatgggcgacagagcagggcgatttaggtcctgtctatggtgcgcagtggcgcagctggcaaacgccggatggccgggtgatagaccaaatcagccagctcattcacgacattaaaaccaatccagattcacgccgtttaatcgtcagtggctggaatccagcggtattgcctgatactaagttcagtccaaaagacaatgcggctatgggcaaacaggccttgccaccttgccataccttgttccagttttatgtgcacgacggtaaattatcctgccagttgtatcaacgcagcgccgacatttttcttggcgtgccttttaatatcgccagttatgcgctgctaaccatgatggtggcgcaggtctgtgatttaacgcctggtgattttgtgcatacttttggtgatgcacatttgtacagtaaccatatggaccaagtaaacgagcagttaagccgcacaccgcacccattgccacaaatgcagttgaacccggccatcaaagatatttttggctttagtatcgacgattttgaactagtcaattatttggcacatcctgccatcaaagcccccatcgcgatataaa

SEQ ID NO: 227624 - DNA, 715 bp, Unknown
  Bacterial polypeptide expressing nucleotide sequence isolated from the Sargasso Sea
aaaggtgacacaaatataaggtatctagttgaaaataacgtaaacatatggaatgaatggccttttcaaaattggctagaagaaactaatcaaagtaaaaatttagaaatgcattctcagaaatggaaagacaaattaactggcttcatagatttaatcaaaacggataatgcatttgctgagcaatatggtgatttaggacccgtatatggaaagcaatggagagattttgaaggaattgatcagcttagcttagtagttgatgacctaaagattaatcctaattctaggcgtcatatagtttcagcctggaatccgaaggaaatacctataatgattaagtctggacttccaccttgccatactttattccagttttatgtcagcgaaggaaggttatcttgtcagctttatcaaagaagtgcagacgtatttttaggggttccttataacattgcctcctatgctctattaacttacatgattgcttcagttacaggcctaaaagtaggagattttgttcattcattaggagatacacatatataccttaaccatttagatcaagttgaggaacagctttcaaggaaaccacatcccttacccaacataaatatcaataaaaaggatgatctttttgattacgaatttgaagactttactctcgtagattataaatcccatccctttataagtgctcctatagcagtttgat

SEQ ID NO: 227625 - DNA, 784 bp, Unknown
  Bacterial polypeptide expressing nucleotide sequence isolated from the Sargasso Sea
atgaaaaaaccaagtcatataagagctaaaaaacatttaagccagaattttttaactgatgagaatgtaatcaaaaagatcatcaactcctttgatttgaaaaaagatgaccatgttatagaaatagggcctgggtatggagcaatgacatttccaattatggaaatagttgactcaattgatgtaatagagctcgacaaaaatcttgctaatcatttaaaagatcatgatcaaaaaaaatctatcaatgtaatcaataaagatgctctaagctttgattttacttcgctaaagaaaaaaagaaagattcgactgattgggaatctgccctatcacatttctacacctttgctttttcatttgcttaatttctctgaaatatttcatgactttcatgtaatggttcaaaaggaagttgcagatcgaatggtgagtagtcacaacaaaaaaacatatggcagattatcggtagcaattcagtcaagatgtgttgcattgaaaatgctggacataaagcccggagcattccatccaaagcctaaagttctttcatcaatcgtaaaacttcagccaaaaaaatcactcgagggaaagatacagtctagattggatgaaattataagaatggcctttaatcagaggagaaaaaaaattcgtaattctttaaaagaactatttatccctgaaatgatttttgaatgtggtattgatccgaatcaaagagctgaaaatctcagcgttgatgattacatcaaactatcagaaattgaggggtcgatttaat

SEQ ID NO: 227626 - DNA, 901 bp, Unknown
  Bacterial polypeptide expressing nucleotide sequence isolated from the Sargasso Sea
ggtatgagtggtggtgtcgatagtgctgttgcagcatctgtcctaaaagaaaaaggttatgatgtggaagcccttttcatgaaaaactggcaagaggattctcaatattgtacagctgaacaggactataatgatgccttacaagtatgcgataatttaaaaatacaacttcatacagtgaacttcgcaaaagaatattgggaaaatgtttttgagcatttcttggaagaatataaaaatggtcgaactccaaaccctgatatattgtgcaataatgaaataaagtttaaaaagttcctcaattatgcctttgaattgggagcagataaaatagcaactggtcattacgtgcgaaatgaagaaaaaaatggaaacataaagctaattaaaggcgtagatagtaaaaaagatcagagttattttttacatggtttaaatcaaaaacaagtttcaaactcattgttcccgattggagattatgttaaatccgaggttcgtaaaatggctgaggagcagggatttaataattttaagaaaaaagatagtgtaggtatctgtttcattggtgaaagaaatatgaaagagtttttaaaacaatacttaccagcgaatccagggtatataattaccgataaaggtgaaagtattggtgagcatgatggtttaatgtattatacgataggacagcgaaaaggattgggagttggaggaggccatagtgatttagatgcaccctggtatgtaattgaaaaagatctcgggaataatcaattaattgttgcccaaggtcataataactctgctctataccataaacaactaaaagcttcaaacttgcattgggtatcaggcagtcctccaaatggggataggtataatgcaaaagttcgatatcgtgcaa

SEQ ID NO: 227627 - DNA, 549 bp, Unknown
  Bacterial polypeptide expressing nucleotide sequence isolated from the Sargasso Sea
agcaaggcctgattacccacgataaaaaagacagcacaggcatttgttttatcggcgagcgtaaattaaaagatttcctgcaaaagtatttaccagcccagcctggtgatatttacacagtagacggcgataaaattggccagcacgatggcctgatgtatcacactttaggccagcgtaaaggtttacgtattggtggcttaaaagatggtgatgatcagccatggtatgtggtatcgaaagacttgatcaataaccgtcttattgtcgctcagggtcatgatcatccgagtatgttctccaaaggcttagtggccaaccaactgcactgggtcgatcgcacaggcccacagcaagcactgcgctgcacagtcaaaacccgttatcgtcagaccgatattccatgcaccctgaccccaatgccggatggcactgtggttgtggtatttgatcagcctcaaaaagccgttactccgggtcagtctgctgtgttttacagcgacgagatttgtttgggtggtggcattattaattcggccatacagtaac

SEQ ID NO: 227628 - DNA, 895 bp, Unknown
  Bacterial polypeptide expressing nucleotide sequence isolated from the Sargasso Sea
gaagaggatgacggcaccgaatattgcaccgccaaagaggacctggctgacgctcaatcggtggcggataaattggggatccgcctccatagcgccaatttcgcggcggaatactgggacggcgtgttcgaccacttcctgtcggagtaccgcgccggccggacacccaacccggatattttgtgcaaccgggaaatcaagtttcgcgcctttctcgactacgccacgcagttgggcgccgacctgattgccacaggtcattacgtgcaaaccgatgccgcgggcggcaccacacgactccgcaaaggcgccgacggcaataaagaccagagctacttcctgcaccaagttgatcaccaggcactcggcaggagtctgtttccggtcggtaacgtggacaagacgttggtccgcgagaaagcggcctctgccggatttgtgaccgcgcgcaagaaggacagcaccgggatctgctttattggcgaacgcagatttcgcgactttctcaagcaatatctgcctgcacagcccggacccattgtgtccgtagacggggacgaattgggggaacatgaaggcttgatgtaccacaccatcgggcaacgacagggattgcgaatcggcgggctggccaatcgtcccgaggcgccctggtatgtcgtcaacaaaaacgtgactgacaacgtgctggtggtcgcacaaggcaatgagcatccagccttgttcaagacgcagctcaccgcagctgacgtgatctggatcagcggccagcctcccacgttacccctagcctgtcatgccaaaatccgctatcgacaggcagaccaaccctgcgaggtatccgcttccggcgcaaagatgcaggtcagcttcatcacgccccagagagcggtca

SEQ ID NO: 227629 - DNA, 832 bp, Unknown
  Bacterial polypeptide expressing nucleotide sequence isolated from the Sargasso Sea
aatgagcagagttattgttggaatgagtggtggcgtggatagtgctgttgcagcatctgtcctaatagaacaaggttatgatgtagaggctcttttcatgaaaaattgggaagaagactctaagtattgtacagctgagcaagactataatgatgctctacaagtatgcgataaactaaaaataccacttcatacagtaaactttgttaaggaatattgggaaaatgtttttgagcatttcttggaagagtataagaatggtcggaccccaaaccctgatatattatgcaataatgaaataaagtttaaaaagttccttgattatgcttttgaattaggagcagataaaatagcaactggtcattacgtacgaagtgaagaaaaagatggtaacgtaaaactaattaaaggtgctgatagtaaaaaagatcagagttattttttacatggtttaaatcaaaaacaagtttcaaactcgttattcccgattggaggttatgtaaaatcagaggtccggaaaattgctgaggaacagggttttaataattttaaaaagaaagatagtgtaggtatatgcttcattggtgaaagaaaaatgaaagagtttttaaaagaatatctaccagcgaatccaggagaaataattacgagtaaaggtgaaagtgttggcgaacatgatggcttaatgtattatacaatagggcagcgaaaaggattgggagttggaggaggtcatagtgatttagatgccccctggtatgtaattgaaaaagatctcgtaaataatcaattaattgttgctcaaggtcataataactctgccctataccat

SEQ ID NO: 227630 - DNA, 814 bp, Unknown
  Bacterial polypeptide expressing nucleotide sequence isolated from the Sargasso Sea
atgaatagaataattttaggaatgagtggtggtgttgatagcgcagttgcagcttcagaattaattaaacaaggctatgaagtcgaagcagtctttatgaaaaactgggaagatgattctagattctgtacatcagaaaaagattataaagatgctttacaagtttgcgatacattagacatagctcttcactcagtcaatttcgcaaaagaatattgggatagggtctttaaacactttttgaatgaatataaaaacggtcgcactccaaatccagacatactttgtaatacagaaataaaattcaaagaatttcttaattatgcctttgatcttggtgctaaaaaaattgcaacaggacactacgcacgtttaagagattataattgcgattttcaacttttaaaaggtcttgatgaatctaaagatcaaagttattttttatatggattagatcaaaaacagatatcaaacacaattttcccaatcgggaatcttcaaaaaactgatttaagaaaaaaagcaaaagacttaggttttacaaattttaataaaaaagatagtgttgggatttgttttattggagagcgaaacattaaagaatttttaaaacagtatattcctgaaaatcctggtcatatcattacaagcaaaggtgaaaaaattggccagcatgaaggcttaatgtattatacattaggacagagaaaaggtttgggcatcggtggtggccatagtaaaagcaatggagcttggtatgttattgataaagatttaacaaataatgaattggttgttgcacaaggacatagca

SEQ ID NO: 227631 - DNA, 256 bp, Unknown
  Bacterial polypeptide expressing nucleotide sequence isolated from the Sargasso Sea
aatgtcagataacagcagcaaaaaagtcattgtcggtatgtccggtggtgttgattcctcagtgtccgcctacctgctgatgcagcaaggctatcaggtcgaaggcctgtttatgaagaactgggaagaagatgacgacagcgaatactgcgctgctgctgaagatttaaaggatgctcaggccgtctgtgacaagctgggtatcaagctgcataaagtcaactttgccgctgagtactgggacaatgtgtttgaa

SEQ ID NO: 227632 - DNA, 637 bp, Unknown
  Bacterial polypeptide expressing nucleotide sequence isolated from the Sargasso Sea
gatgagtgaaaaaaaacatgtaattgttggaatgtctggtggagtcgattcatcagtttcagcttatttgctaatcgaatcgggttatcatgttgaaggtctcttcatgaaaaattgggaagaagacgatggcacagagtactgtacagccaaggatgatctaactgatgcaacgagcgtatgcaatgatctcaagattaaacttcatgttgcaaacttctctgctgagtactgggataatgtcttcgagcacttcttaaccgagtatcaatcaggacgcacccccaatccagatatactttgtaataaggaaattaagttcaaagcattcttagaatacgctttagatttaggagccgactttattgctacgggacattacgtaagaagtaagaaaattgatggaaccagtattttactaaaaggattagatgatgaaaaagatcaaagttatttcttaagtcgcgtgccagaattttgtatagataagagtctttttcctattggggctttaaaaaaatctgaagtgagaaaaatcgcaaaagatcataattttgatactcacgataaaaaagacagtaccggaatttgttttatcggtgagcgaaagtttaaagattttttatctaagtatgtt

SEQ ID NO: 227633 - DNA, 1084 bp, Unknown
  Bacterial polypeptide expressing nucleotide sequence isolated from the Sargasso Sea
tatgaattttaatgaaaaaattattgtggggatgtcaggaggcgtagattcatctatttcagcgattatattgaaggacatgggtttcaatataaaggggctttttatgaaaaactgggaagaggatgattatgatggtaattgtaatgcaaaaaatgattataaagatgcaaagagagttgcagataaacttggaatagaattgcttacagtcaatttttctgacagatattggaacctagtttttaaaagattcattgatggcttaaataatgggattactccaaatcctgatatattttgtaatagagaaataaaatttcattattttttaaatcatgttttatcgcttgagtatgataaattagctaccggacactatgcaaaaattaaaactaaagacaataaatataccctcaatataccaaaagataaaataaaagatcagacatattttttatatgtgattaatcaatatattatgaatcatttagtcttccctctgaatgatataagtaaatcagatgttaaaaatattgcgaaaagctttgatataaaactatttgaaaaaaaagaaagtatgggaatttgttttattggtaagaaaaattatacaaatttaatttctaaatatattgaaaatatacctggaaagatcgttgatgatgataataaagtattgggaaaacataatggattgttctactatacaattggtcagcgcaagggtataggaataggtggtactaaaaatagatcagaaaaaccttggtatgtagtagataaaaagattgataaaaattatttagttgtcagtcaagatgtaaacagactagattataagggtgaaattgagctcaatgaaattaactggattaacaatcatcctgatgaaaataaagaatataatgcaagattcagacatggaggcaaactactgccggtaacattaaagcagagagacgaaaagtggtatcttaatctaaaaactagtgagagagctccaacatgtggacaatctgctgttgtatatgataaagatgagtgtataggaggaggcataattagtagattatgtttttaa

SEQ ID NO: 227634 - DNA, 1087 bp, Unknown
  Bacterial polypeptide expressing nucleotide sequence isolated from the Sargasso Sea
atgacaaaaattaataaaacagttgttgttggaatgtcgggtggtgtagattcatctgtcgccgcttatttacttcaacaacaaggatataaagttcaaggcttgtttatgcaaaactggcagaatgaaccaggagaagtctgttcatcagaaattgattttaatgatgcatcaaaaatttgtgatcaacttaatattccactacataaggctaattttagcaatgaatattgggatagagtatttaaagaatttttatctgagcatgaaaaaggcagaacacctaatcctgatatcctatgtaatagagaaattaaatttaagtcttttttagattatgcactaaaaataggagctgattatattgctactggtcattatgcaaaaattgaaaaaagggataatcaatttattttaaaaagatcaaaagatctaaataaagatcagacatattttctacatgaagttaatggaaaagattttgcaaaatgtatttttccattagaagaattaaacaaacatgaagttagagaaattgctgaaaagaataactttattaactatgacaaaaaagattctgttggcatttgttttgttggcgaaagaaatttaaaagactttcttaggcgatttatcaaatttcatactggtgatattaaagattcagatggaaataaaattggtaaacatccaggtgcccttctattcactcaaggacaaagacaaggtttaaatgtaggcggtgttaaagataagcctgagttgccttggtacgtttatgacaagagtattgagttaaatgaagtttatgtatgtcagggtgagtttaatgatttattaatgagtagcggactcatcatggaagagatgaaatggattaatccaattgatcctccgaataaactgaactgcgaagttcaagttcggcatagaggcaaacctgtgaaatgtgaagctcattttcttaatgattgtgtgaagatactattttcagagaatataagggcaattgctccaggccagtcagcagtcttatataaaaataatgaatgtttaggtggggggatcatagcaaaagctctataag

SEQ ID NO: 227635 - DNA, 1084 bp, Unknown
  Bacterial polypeptide expressing nucleotide sequence isolated from the Sargasso Sea
atgaattttaatgaaaaaattatcgtggggatgtctggaggcgtagattcatctatttcagctattattttgaaagacatgggtttcaatataaaaggactttttatgaaaaattgggaagaagacgatcatgatggtaattgtaatgcaaaaaatgattatcaagatgcaaagagaattgcagataagctaggaatagaattgcttacagtaaatttttctgataaatactggagccttgtttttaagagattcattgatgacttgaatagtggaattactccaaatcccgatatattttgtaatagagaaataaaatttcattatttcttaaatcatgttttatcgcttgagtatgataaattagctactggacactatgcaaaaattaaaattaaaaatgacaaatataccctcaatataccgaaagataaaataaaagatcagacgtattttttatacgtaattaatcaatatatcatgaatcatttagtctttccgcttaacgatattagtaaatcagacgtgaaaagtattgcaaagagctttgatataaaactatttgaaaaaaaggaaagtatgggaatttgttttattggtaagaaaaattatacaaatttaatttccaactatattacaaatatacctggaaagattgttgatgatgataacaaggtattggggaagcataatggtttattctactatacaattggtcaacgtaaagggatagggataggcggtactaaaaatagatcagaaaaaccttggtatgtagtagataaaaaaattgaagaaaattatttagttgtcagtcaggatacagatagattaaattataaaggtgaaattgaactcaatgaaataaactggattaacaatcatcccgaagaaaataaagaatatcatgcaaggttcagacatggtggcaaattacttccagtgacaattattcaaagagatgaaaagtggtatcttgatttaaaagctaacgagagagctcctacatgtggacagtctgcagttttatatgatgaagatgagtgcattggtggaggtattattaataaattatgtttctaaa

SEQ ID NO: 227636 - DNA, 175 bp, Unknown
  Bacterial polypeptide expressing nucleotide sequence isolated from the Sargasso Sea
aatgacagacaacagccaaatcaaggtgatcgtcggcatgtccggcggcgtggattcttccgtctcggcctacctgctccagcagcagggctatcaggtcgaaggcttgttcatgaagaactgggaagaagacgacacggacgagtactgctctgccgccccaggatttggctga

SEQ ID NO: 227637 - DNA, 454 bp, Unknown
  Bacterial polypeptide expressing nucleotide sequence isolated from the Sargasso Sea
atgagcgaaaatagtcacattaaagtcatcgttggtatgtccggcggtgttgattcttcagtatctgcatatttgttacaacaacaaggctaccaagtagaaggcctgtttatgaagaactgggaagaagacgacaatgacgaatattgtgccgctgcagaagacctaaaagatgcgcaagccgtgtgtgacaagttaggtatcgaacttcatactgttaactttgcagctgaatattgggataacgtatttgaatactttttagaagagtacaaagcaggccgcacgcctaaccccgatattatgtgtaataaggaaatcaaatttaaagccttcctagaatttgctgcacaagcactcggagctgactttattgcgacaggccattatgtgcgtcgtgagcttcgggacgacaaatatgtaatgtgccgtggtttagataacaacaaagacc

SEQ ID NO: 227638 - DNA, 733 bp, Unknown
  Bacterial polypeptide expressing nucleotide sequence isolated from the Sargasso Sea
aatgtcagataacagcagcaaaaaagtcattgtcggtatgtccggtggtgttgattcctcagtgtccgcctacttgctgatgcagcaagggtatcaggtcgaaggcctgtttatgaagaactgggaagaagatgacgacagcgaatattgcgctgctgctgacgacttaagagatgctcaggcggtctgtgacaagctgggtatcaagctgcacaaagtcaactttgccgctgagtactgggacaatgtgtttgaatatttcctcgaggaatacaaagctggccgtacgccgaacccggatattatgtgcaacaaggaaattaagtttaaagctttccttgaatttgccgccgaagctttaggtgccgactttatcgccacaggccattatgtacagcgccgtgaagtagaaggccattggcagttattgcggggtctggatacaaataaagatcaaagttatttcctctataccataggtgaagaacatgtggcgcaaaccctgttccctgtgggtcatctggaaaaacctctggtacgggctattgctgaagaacaaggtttaattacgcacgataaaaaagacagcactggcatttgttttatcggcgagcgtaaatttaaagatttcctgcaaaagtatctgccagcccagcctggtgatatttacacagtagacggcgataaaattggccagcacgatggtctgatgtatcacactttaggccagcgt

SEQ ID NO: 227639 - DNA, 495 bp, Unknown
  Bacterial polypeptide expressing nucleotide sequence isolated from the Sargasso Sea
gcaaattcaaggacttcctggccaagttcctgcccgcccagcccggccccatcgaaaccgtcgatggcaaggtgatcggcgagcatcagggtctgatgtatcacaccctgggtcagcgcaaggggcttggcatcggcggtcgcaaagatgccaccgaagaggcatggtacgtggtcgtcaaagaggtggagcgcaacaccctggtggtggcacagggcgaacatccccgtctctactccgatggcctgatcgccagccaattgcactgggtggatcgcacccccattcgcgcgccgcgccgctgcaccgtcaagacccgctatcggcaggaagatattccctgcctgatccagcccatcgacgatgagaccatacgggtcatcttcgacgagaaacaggcggcggtcaccccgggtcaatccgccgtcttctacgacggggaagtgtgtctgggcggcggcatcatcgaacaacgtttcagccatccggtctaag

SEQ ID NO: 227640 - DNA, 463 bp, Unknown
  Bacterial polypeptide expressing nucleotide sequence isolated from the Sargasso Sea
atgacatcaatcgaacccactcatacaggaaaaaaagtcattgtcggcatgtccggcggtgtagattcatctgtttcagcctatttgcttatgcagcaaggctatcaggttgaaggccttttcatgaagaactgggaagaagatgacaacaacgagtactgcgccgccgctgaagatttaaaagatgcccaagccgtgtgcgacaagctcgggatcaagctacacacagtcaactttgctgctgaatattgggacaatgtatttgagtatttcctcgccgaatacaaagcgggccgcacgccaaatcccgatattatgtgcaacaaagaaatcaagtttaaggcatttttagaatttgccgatgaaatcctcgacgccgattacatcgccatgggccactatgttcgccgtcgcgacaatagcgacggcagtacgcaaatgctccgtggcgttgatggcaata

SEQ ID NO: 227641 - DNA, 901 bp, Unknown
  Bacterial polypeptide expressing nucleotide sequence isolated from the Sargasso Sea
aatggtaaaaaagtcattgtcggcatgtccggcggtgtagactcttcagtgtcggcctatttgcttatccagcagggctacgaggttgaaggtctatttatgaagaactgggaagaagacgataccgacgaatattgcgctgctgcagatgatttaaaagatgcacaagctgtgtgtgacaaacttggcatcaaaatgcataccgtcaactttgctgccgaatactgggacaatgtgttcgagtattttttggccgaatacaaagccggtcgcacaccaaaccctgacatcatgtgcaacaaagaaattaaattcaaagcattcctagaatttgccgacgagattttagacgccgactatatcgccatgggtcattatgtgcgtcgtcgtgacaaccgcgacggcagcgttgaaatgctccgtggtgtagatggcaataaagatcagagctacttcttatacacccttagccatgagcaagtcgcacgcagcttatttccagtaggtgagcttgaaaaacatgaagtacgtgagattgccaaaaaaatgggcttaatcactcacgacaaaaaagacagcaccggcatttgttttattggcgaacgtaaatttactgatttccttgccacttatttacccgcacaacctggcgacattgaaaacagtgaaggcgaagtcatcggcacgcatcagggcttgatgtatcatacccttggccaacgtaaaggccttggtattggcggccttaaaaacagtagcgaagatccttggtacgtcgttgaaaaagatttaattcgtaatgtactcgtggttgcacaaggcgcaaatcatccacgcctgatgtcacaaggcatgacagttaaccaactgcattgggttgaccgcaaaggcccggccaata

SEQ ID NO: 227642 - DNA, 1120 bp, Unknown
  Bacterial polypeptide expressing nucleotide sequence isolated from the Sargasso Sea
atgacatcaatcgaacccactcatacaggtaaaaaagtcattgtcggcatgtccggcggtgttgattcatccgtttcagcctatttgcttatgcagcaaggctatcaggttgaaggccttttcatgaagaactgggaagaagatgacaacgacgagtactgcgcggccgccgaagatttaaaagatgctcaagccgtttgcgataagcttgggataaaactccacacggtcaactttgctgccgaatattgggacaatgtatttgagtattttcttgccgaatacaaagcaggtcgtacccccaatcccgatatcatgtgcaacaaagaaatcaaatttaaggcctttttagagtttgccgacgatattctcgatgccgactacatcgccatgggtcactatgtgcgccgccgcgacaatgccgatggcacaacgcaaatgctgcgcggggtcgacaataataaagatcaaagctacttcctatacaccttaagccatgaacaagtggcacgcagcctgtttccggtgggtgaactcgaaaaacacgaagtgcgagagatcgccaaacagatgggattaattacccatgataagaaagacagcaccggcatttgctttatcggtgagcgaaaatttactgaatttttaggtaattacttaccagcgcaacctggcaatatcgaaaccgccgaaggcgaagtcattggcacgcaccaaggtttgatgtaccacaccttaggccaacgtaaaggtctggggattggtggcatgaaaaatagcaatgatgacccatggtacgtggtggacaaagatctcaaacgtaacgtgcttgttgttggccaaggtggtcaccatccgcgcttgatgtccaatggcatgtttgtcaatcaactacactgggtcgaccgcaaaggtcccgccgatggcagccaaattgtggtgaaaacccgttaccgccagcaggatatcccttgcaccctcacctatcttgatgacaataccctcaaagtggtgtttgacgagcccgttgccgccgtgacgcctggccaatcagcggtattttacgatggcgaagtgtgcctcggtggcggaattatcgatcaactgatcagaggataaa

SEQ ID NO: 227643 - DNA, 1120 bp, Unknown
  Bacterial polypeptide expressing nucleotide sequence isolated from the Sargasso Sea
tatgacatcaatcgaacccactcatacaggaaaaaaagtcattgtcggcatgtccggcggtgttgattcatctgtttcagcctatttgcttatgcagcaaggctatcaggttgaaggccttttcatgaagaactgggaagaagatgacaacgacgagtattgcgcggccgccgaagatttaaaggatgctcaagccgtttgcgacaagcttgggatcaaactgcacacggtcaactttgccgccgaatattgggacaatgtgttcgagtacttcctcgccgaatacaaggcgggtcgtacccctaaccccgatatcatgtgcaacaaagaaatcaaatttaaagcctttttagactttgccgacgatatcctcgatgccgactatatcgccatgggccattatgtgcgccgccgcgataatgccgatggcaccacgcaaatgctgcgcggagtcgataacaacaaggatcagagctacttcctctataccttaagccatgaacaagtggcgcgtagcctattccccgtcggtgaactcgaaaagcacgaagtgcgtgaaatcgctaagaaaatgggcttaattacccatgataagaaggacagcaccggcatttgctttatcggtgaacgtaaattcactgagttcttaggtaattacttaccggcgcaacctggcaatatcgaaaccgccgaaggcgaaatcattggcaagcaccaaggcttgatgtaccacaccttaggtcaacgtaaaggtctgggcattggcggcatgaaaaacagcaacgacgatccttggtacgtggtcgataaagatctcaaacgtaatgtcttggtggttggccaaggtgggcatcacccgcgtttgatgtccaacggcatgctcgtcaatcaattgcattgggtcgaccgcaaaggtcccgccgaaggcagccagattgtggtgaaaacccgttaccgccaacaggatatcccctgcaccctcacctatcttgatgacaataccctcaaggtggtgtttgacgagcctgttgccgcagtgacgcctggccaatcagcggtattctacgatggcgaagtgtgcctaggtggcgggattatcgatcaactgatccgaggataa

SEQ ID NO: 227644 - DNA, 1102 bp, Unknown
  Bacterial polypeptide expressing nucleotide sequence isolated from the Sargasso Sea
aatgtcagataacagcagcaaaaaagtcattgtcggtatgtccggtggtgttgattcctcagtctccgcctacttgctgatgcagcaaggttatcaggtcgaaggcctgtttatgaagaactgggaagaagatgacgacagcgaatactgcgctgctgctgacgacttaagagatgctcaggcggtctgtgacaagctgggtatcaagctgcacaaagttaactttgccgctgagtactgggacaatgtgtttgaatatttcctcgaggaatacaaagctgggcgtacgccgaacccggatattatgtgcaacaaggaaattaagtttaaagctttccttgaatttgctgccgaagctttaggggctgactttatcgccacaggccattatgtacagcgccgcgaagtggacggtcattggcagttattgcgtggtctggataccaataaagatcaaagctatttcctctataccataggtgaagaacatgtggcacaaaccctgttccctgtaggtcatctggaaaagcctctggttcgggctattgctgaagaacaatgtttaattacgcacgataaaaaagacagcacaggcatttgttttatcggcgagcgtaaatttaaagatttcctgcaaaagtatttaccagcccagcctggtgatatttacacagtagacggcgataaaattggccagcacgatggcctgatgtatcacactttaggccagcgtaaaggtttacgtattggtggcttaaaagatggtgatgatcagccatggtatgtggtatcgaaagacttgatcaataaccgtcttattgtcgctcagggtcatgatcatccgagtatgttctccaaaggcttagtggccaaccaactgcactgggtcgatcgcacaggcccacagcaagcactgcgctgcacagtcaaaacccgttatcgtcagaccgatattccatgcaccctgaccccaatgccggatggcactgtggttgtggtatttgatcagcctcaaaaagccgttactccgggtcagtctgctgtgttttacagcgacgagatttgtttgggtggtggcattattaattcggccatacagtaa

SEQ ID NO: 227645 - DNA, 1102 bp, Unknown
  Bacterial polypeptide expressing nucleotide sequence isolated from the Sargasso Sea
atgtcagataacagcagcaaaaaagtcattgtcggtatgtccggtggtgttgattcctcagtgtccgcctacctgctgatgcagcaaggctatcaggtcgaaggcctgtttatgaagaactgggaagaagatgacgacagcgaatactgcgctgctgctgaagatttaaaggatgctcaggccgtctgtgacaagctgggtatcaagctgcataaagtcaactttgccgctgagtactgggacaatgtgtttgaatatttcctcgaggaatacaaagctggccgcacgccgaacccggatattatgtgcaacaaggaaattaagtttaaagctttccttgaatttgccgccgaagctttaggtgccgactatatcgccacaggccattatgtacagcgccgtgaagtcgaaggccactggcagttattgcggggtctggataccaataaagaccaaagctatttcctctataccataggtgaagaacatgtggcgcaaaccctgttccctgttggtcatctggaaaaacctctggtacgggctattgccgaagagcaaggcttaattacgcacgataaaaaagacagcactggcatttgttttatcggcgagcgtaaatttaaagatttcctgcaaaagtatctgccggcccagcctggtgatatttacacagtagacggcgataaaattggccagcacgatggcctgatgtatcacactttaggccagcgtaaaggtttacgtattggtggcttaaaagatggtgatgatcagccctggtatgtagtatcaaaagatttggtcaataaccgtcttattgtcgctcagggtcatgaccatccgagtatgttctccaaaggcttagtcgccaatcaactgcactgggtcgatcgcactggcccgcagcagatgctgcgctgcactgtgaaaacccgttatcgtcagaccgatattccatgtaccctgacccctatgccagatggcactgttgttgtggtatttgatcagcctcaaaaagccgtgaccccaggtcagtctgctgtgttttacagcgacgagatttgtttgggtggtggcattattaactcggccatacagtaac

SEQ ID NO: 227646 - DNA, 601 bp, Unknown
  Bacterial polypeptide expressing nucleotide sequence isolated from the Sargasso Sea
atgagtgtgcaatccatagtgagtgatattgaatctaacgccagcaaaaaagtgatcgtcggaatgtccggcggtgtcgattcgtctgtttcagcctacctactccaacaacagggttatcaggttgaaggtcttttcatgaaaaactgggaagaagacgacaacgatgaatactgtgccgcagcggaagatttaaaagatgcacaagcggttgctgacaaacttggcattgaactgcacaccattaactttgcagcagaatactgggataacgtgtttgagtatttcttagaggaatacaaagcgggccgtacgccaaacccagatattatgtgcaacaaagaaattaagtttaaagcgtttcttgaatttgcagcagaagaccttggcgctgactacattgctactggtcactatgttcgtcgccgaaaagttgacggtaaatggcaaatgctacgcggtcttgataacaacaaagaccagagctactttctttacacattaggcgaagagcacgttgctaaaacgctcttccctgtgggtgacatcgaaaagccattagttcgcaaaattgccgaggagcaaggtcttatcactcatg

SEQ ID NO: 227647 - DNA, 457 bp, Unknown
  Bacterial polypeptide expressing nucleotide sequence isolated from the Sargasso Sea
tatgagcagctacgttttcaaatcaatcattggcaatattgagcttgtctcaagcaaaaatagaataattgcagttcatagaacaaggaaaaagcctaacaagacagaaaataagcttctaaaaagatctgcgcttcaaattaaaatgtatcttgcgcgcaaaagacgatcccttaattttccaactagacaaatgggcacaaaatttcaaaaccgtgtttggaattatttacaaagaataccttatggtagaacaacaacttatggagacattgcaaggaaattaagaacttcgcctcgagctgttgggggcgcattgggaagaaacaatctgatgatgacagttccatgtcatagggtcgtgggcagtgatggcaaactcactggatttacatcagtgggcgggttaagtaccaaaagaaatttactgaacattgaacaaaaaactaaaaaataa

SEQ ID NO: 227648 - DNA, 241 bp, Unknown
  Bacterial polypeptide expressing nucleotide sequence isolated from the Sargasso Sea
gggtttggaacacttgagacgtgttccttatggccgcactacaagctacggtcagatagccaaaaaattaaggacatctccacgggcagttggtggagcactaggacggaataatttaatgatgtcagtcccatgccaccgcgttgtatccaaagacggcaagcttacaggattcacgtcggtcggagggattaaaacaaaaaagaaattgttaaacgttgaacaaaaaactcgtaaataa

SEQ ID NO: 227649 - DNA, 376 bp, Unknown
  Bacterial polypeptide expressing nucleotide sequence isolated from the Sargasso Sea
attgattggcaatatagaggttatctcaggtaataataaaatcaccggcattagccgaactcgaaaagctattaccaacactaaagataaactattactccgagcagcttttcaaattaacgcctatctagcacgcaaacgaagatcactatcttttccaacaagacagatgggaactcgtttccaaaatcgggtttggaaccacttgagacgtgttccttatggccgcactacaagctacggtcagatagccaaaaagttaaggacatctccacgggcagttggtggagcactaggacggaataatttaatgatgtcagtcccatgccaccgcgttgtatccaaagacggcaagcttacaggattcacgtcagtc

SEQ ID NO: 227650 - DNA, 517 bp, Unknown
  Bacterial polypeptide expressing nucleotide sequence isolated from the Sargasso Sea
atgcttaacttactggaagacaccatcgacacgccgctgggcccgctgtgggttatttgtgatgagcaatttcgcctgcgcgcagtggaatgggatcagcacagcgatcgcatggaacaattgctggatattcattaccgcacagaaggttatcagcgcattaccgccaaaaacccaggtggattaagcgacaaactcgctgagtattttgccggaaacctcagcatcattgacacgctggaaacggcaaccgctgggacacctttccagcgtgaagtctggcaagcgttacgcactatcccctgcgggcaggtcatgcattatggtcaactggccgaacagttgggacgccccggtgctgcaagagccgtcggcgcagctaatggctccaatccagtaagcattgtggtcccctgtcatcgcgtcattggacgtaacggcaccatgaccggatatgccggtggcgtacaacgaaaagagtggttattgcgtcacgaaggttatttgctactctaga

SEQ ID NO: 227651 - DNA, 457 bp, Unknown
  Bacterial polypeptide expressing nucleotide sequence isolated from the Sargasso Sea
atgagcagctacgttttcaaatcaatcattggcaatattgagcttgtctcaagtaaaaatagaataattgcagttcatagaacaaggaaaaagcctaacaaaacagaggataagcttctgaaaagatctgcgcttcaaattaaaatgtatcttgcacgcaaaagacgatcacttaattttccaacaaggcaaatgggcacaaaatttcaaaaccgtgtttggaattatttacgaaggataccttatggtagaacaactacttatggagacattgcaaggaagttaagaacttcgccccgagctgtcgggggcgccttaggaaaaaataatcttatgatgacagttccgtgtcacagagtagttggaactgacggcaaactcacaggatttacatcagtgggtggattaagtaccaaaagaaatttactgaacattgaacaaaaaactaaaaaataat

SEQ ID NO: 227652 - DNA, 460 bp, Unknown
  Bacterial polypeptide expressing nucleotide sequence isolated from the Sargasso Sea
atctcctgttggaaacttttattagtgggagatggtgtgaacatagtgaaactaggatttcccagtgggaaaatgaaattgaggcgtgaacgtaattggactaaagacggacttccttttaaacaagctatctgtcaattagaagcatttttcgaaggtgagctgaaaagcttcgatcttccattagttgttacgggaacatcttttaggaaattagtttgggcagggttaatggatataccgtatggtgagacatggagttatagtcaattagctaatcatatcgggacgccaaatgcatgtcgtgcagttggttccgctaatggggtcaatccaattccgattattattccatgccacagagtggttggaagtgatggcagcctcacaggttttggaggtggactcaaaacaaaagaattccttttagaactcgaatcaaaaaacgttcatcgataaa

SEQ ID NO: 227653 - DNA, 454 bp, Unknown
  Bacterial polypeptide expressing nucleotide sequence isolated from the Sargasso Sea
atgagcagctacgttttcaaatcaatcattggcaatattgagcttgtctcaagcaaaaatagaataattgcagttcatagaacaaggaaaaagcctaacaaaacagaggataagcttctaaaaaggtctgcgcttcaaattaaaatgtatctttcgcgcaaaagaagatctcttaattttccaacaaatcagacaggtacaaggtttcaaaaccgagtatggaattatttaaggagagtgccctatggaaaaaccataacttatggagatattgccagaaaattaaaaacatcacccagagcagttggaggtgcgttaggacgaaatagtcttatgatgtcagtcccttgccatagagtagtaggtacagatggtaagttaacaggatttacttctattggcggcgttaacacaaagagaaaattattaagccttgaaaaaaaatctagataac

SEQ ID NO: 227654 - DNA, 493 bp, Unknown
  Bacterial polypeptide expressing nucleotide sequence isolated from the Sargasso Sea
atgacactgcgctacgacaccttcgacagccccatcggcgccctcaccgtggccggcgacagccgtggcatccaccacatcctcttcgagaacaaccggtacgacgccaagggccgcgagcactggcagcgcgacgcacatgccgtgcgcgatgcacgcctgcagctgctgcagtatctgcgcggcgaacgcaccgccttcgcgctgccgctcgcgccgcatggcacgccgttccagctgcgcgtgtggcgggcgctggcagatatcccgtttggccggacctggagctacgtcgaccttgcccgccacatcgaccatcccaccgccagccgggcggtcggggccgccaacggccgcaacccgctgccgatcgtgctgccctgccatcgggtgatcggcagcaacggtgcactgaccggatttggtggcggactggacaccaaggccgccctgctgaagttggaggcacggcgcgattcgctgttcgcctgag

SEQ ID NO: 227655 - DNA, 457 bp, Unknown
  Bacterial polypeptide expressing nucleotide sequence isolated from the Sargasso Sea
tatgagcagctacgttttcaaatcaatcattggtaatattgagcttgtctcaagtaaaaatagaataattgcagttcatagaacgaggaaaaagcccaacaaaactgaagatgagcttctaaaaagatctggacttcaaattaaaatgtttctagctcgcaaaaggcgaactcttaattttccaacaagacaaatgggaaccaaatttcaaaaccgtgtttggaattatttgcgaagggtgccttatggtaaaactacaacttatggagatattgcaaggaaattaaaaacttcaccaagagctgtaggaggtgccttaggacggaatagcctcatgatgtcagtaccatgtcacagagttgtgggtagtgacggcaaactaactgggtttacatcagtaggtgggttaaatacaaagaaagatttacttaacattgaacaaaaaactaaaaaataa

SEQ ID NO: 227656 - DNA, 487 bp, Unknown
  Bacterial polypeptide expressing nucleotide sequence isolated from the Sargasso Sea
catgaatatttactatgaatattacaaatctcctgttggaaaacttttattagtgggagatggtgtgaacatgatgaaactagggtttcctagtgggaaaatgaaattgaggcatgaacgtaattggactaaagacagacttccttttagacaagctatttgtcaattagaagcattctttgaaggtgagctgaaaagcttcgatcttccattagttgttacgggaacatcttttaggaaattagtttgggcagggttaatggatataccgtatggtgagacatggagttatagtcaattggctaatcatatcgggacgccaaatgcatgtcgagcagttggttccgctaatggggtcaatccaattccgattattattccctgccacagagtggttggaagtgatggtagtctcacaggttttgggggtggactcaaaacaaaagaattccttttagaactcgaatcaaaaaacgttgatcgataa

SEQ ID NO: 227657 - DNA, 433 bp, Unknown
  Bacterial polypeptide expressing nucleotide sequence isolated from the Sargasso Sea
ttgattggcaatatagaggttatctcaggtaataataaaattactagcattagccgaactcgaaaagctattaccaacactaaagataaactattacttcgagcagcttttcaaattaatgcctatcttgcacgcaaacgaagatcgctatcttttccaacaagacagaagggaactcgtttccaaaatcgagtttggaaccacttaagacgtgttccttacggcagcactacaagctacggtcagatagccaaaaagttaaggacatctccacgggcagttggtggagcactaggacggaataatttaatgatgtcagtcccatgccaccgcgttgtatccaaagacggcaagcttactggattcacatcagtcggtgggattaaaacaaaaaaggaattgttaaacgttgaacaaaaaactcgtaaataaa

SEQ ID NO: 227658 - DNA, 204 bp, Unknown
  Bacterial polypeptide expressing nucleotide sequence isolated from the Sargasso Sea
aaactatatcctatctaaaactagcaaatagtttaaacacgtctcccagagccgttggtaatgcatgtggaaaaaatcctttattaatagttattccatgtcacagagtcttatccattaaaaaagaacttacaggtttttctgcattgggaggaattgtaaccaagaaaaaactattacaaatagaaaatatcaaagtttgag

SEQ ID NO: 227659 - DNA, 187 bp, Unknown
  Bacterial polypeptide expressing nucleotide sequence isolated from the Sargasso Sea
attgcaaggaagttgagaacttcgccccgagctgttgggggcgccttaggaagaaataatcttatgatgacagttccatgtcacagagtggttggaagtgacggcaaactcacaggatttacatcagtgggtgggttaagtaccaaaagaaatttactgaacattgaacaaaaaactaaaaaataat

SEQ ID NO: 227660 - DNA, 457 bp, Unknown
  Bacterial polypeptide expressing nucleotide sequence isolated from the Sargasso Sea
atgagttcttatgttttcaaatcattgattggcaatatagaggttatctcaggtaataataaaattactggcatcagccgaactcgaaaagccattaccaacactaaagataaactattacttcgagcagcttttcaaattaacgcctatctagcacgtaagcgaaggtcactatcttttccgacgaggcagatgggaactcgtttccaaaatcgggtttggaaccacttgagacgtgttccttacggacgcactacaagctacggtcagatagccaaaaagttaaggacgtctccgcgggctgttggtggagcactaggacggaataatttaatgatgtcagtcccgtgccaccgcgttgtatccaaagacggcaagcttacagggttcacatcagtcggtgggattaaaacaaaaaagaaattgttaaacgttgaacaaaaaactcgtaaataaa

SEQ ID NO: 227661 - DNA, 460 bp, Unknown
  Bacterial polypeptide expressing nucleotide sequence isolated from the Sargasso Sea
gatgctttataaatcaagcgttctaactcccatagggtctttaggacttctagctaataaagaaaaactactaaagcttagctttaaagggctcgaggatattcctgataaggcaaaaatggattcaaagagatttaaattaatatttaaagagatagaagagtattttgctggagatagaaaacaattttctttcaattatcaggtaaaaagcagtcctttctcagaaagagtttattctgagatgataaagataccttatggagaaacattatcttactcagaattagcaaagaggtctggaaggaaattggcctatagagctgttggaaatgtatgtggtaaaaaccctttacctttgataattccatgtcatagagtaatagcagtcaatagcttgggaggttttggaggtggtttaggtattaaaaaatttttacttaatctagaaaccaattaa

SEQ ID NO: 227662 - DNA, 376 bp, Unknown
  Bacterial polypeptide expressing nucleotide sequence isolated from the Sargasso Sea
atggataaaaatatagatcaaaatgaagtaaataagtttgctgaacttgctgataagtggtgggattcctctggggaattcaagcctcttcacaatataaacccaataagatctgaatatattgcctctaaaatagatttaaaaggaaaaaaagtcttagatgtcggatgtggcgggggtttattagctgaagcactttatgaccttggtgcagaggtcgacggtatcgatgctgccggtcctggtattgaggttgctaggattcatgcagaaagagaggataagcaaattaattatgcaacagctcaagctgaagatttttgcattgataaagaaggttattatgacgtcgttacttgtttagaagttttagaac

SEQ ID NO: 227663 - DNA, 300 bp, Unknown
  Bacterial polypeptide expressing nucleotide sequence isolated from the Sargasso Sea
aatggataaaaatatagatcaaaatgaagtaaataagtttgctgaacttgctgataagtggtgggattcctctggggaattcaagcctcttcacaatataaacccaataagatctgaatatattgcctctaaaatagatttaaaaggaaaaaaagtcttagatgttggatgtggcgggggtttattagctgaagcactttatgaccttggtgcagaggtcgacggaatagatgctgcaggtcctggtattgaggttgctaggattcatgcagaaagagaggataaacaaattaattatgc

SEQ ID NO: 227664 - DNA, 646 bp, Unknown
  Bacterial polypeptide expressing nucleotide sequence isolated from the Sargasso Sea
atgactagcgtaaataaaaaagaaatagataaattttctaaaatggccaatgaatggtgggatcctgaaggtaaattcaaaccacttcataaatttaatccaataagaataaaatatatcaaggaaaatattattaataatttcaaattaaaaaataaactcagacctttatcaggaataaatattctagatgttggttgtggtggaggattgttgtctgaaccaatgtcaagaatgggtgcttatgtaactggtattgatgcatcgaataaaaatataaaaattgcaaaacttcattcaaagaaaaataaactaaaaattaattatatatgttcgtcacctgaaaaaattaaaattacaaaaaaatttgatgttattttaaatatggaaattgttgaacatgtagaggatatagatttttttttaaagtcttgctcaaaacttttaaaaaaagatggactaatgtttgttgcaacaattaataaaactttaaaatcttatgttttagcaattgttggggcagaatatgttttgagatggcttccaattggaacgcacgaatgggaaaaatttgttaaacctgaagatcttgaaaaaattttaataaaatacaagttatctctcattaaattgaatggtatgaatt

SEQ ID NO: 227665 - DNA, 492 bp, Unknown
  Bacterial polypeptide expressing nucleotide sequence isolated from the Sargasso Sea
gctaccaagttgctgcaaccgaccctgctaccagaaatatagaaatcgctagaaaccacgcccagcagatgggtctagacattgattatcatgagggtcttatcgagaacctggagctaaagacttttgatgcaatcctggtgatggaagtagtcgagcatgttcctgatgttcaagagctgttaagtgaatgcattcaaagactcaagcctggaggacatctttttgtcgccaccatcaaccggacgcttgcttcattcgtgactgcaatagtcggtgctgagtacgtctttcgaatgcttccgagaggcactcatcagtggagcaaattcattaaaccagaagaaatcatcagccctctaaccagaagtaacatgacattggtcaaaacgtcgggcatcagcgtcaatcctttggggccaagatttcgactcaccaggtatatgggtgtgaattacatgctggcctttaaaaagcaacttaggcattagc

SEQ ID NO: 227666 - DNA, 641 bp, Unknown
  Bacterial polypeptide expressing nucleotide sequence isolated from the Sargasso Sea
aatgaatactacaattgatgaaaaagaaatagagtttttttctaatctttctaaacattggtgggattttgatggacctcttgggtctcttcataaactagcagatgttagaattgaatttcttttaagaaatatagccagaattaaaaaatataaaaatgttttacctcttcaacacctcaaatgtattgatgttggttgtggtggagggattttgtctgagagattgaaaagactggggggaaatattacaggcatagatacatcaaaccaagccatagatgtcgcaaaagaacatgctaaaaaaagtaacctaaaaatcaattataaatgcatttcaacttcaaaattcttaaaaactcacaaggatttgaaatttgatgttgtcattgcttctgaggtaattgaacatgtaaataatagatctaaatttttacatgatttatcaaacttgttaaaagacaggggattaataattattactaccttgaataaatctctccctagcatagtgctagcaaaatattttgctgaaaatattttgaaaataatcccaaaaggtactcatgatattgaaaagtttgttacccctgaaaaattaatccacgaagcaaaaaagtataatattattttagatgatt

SEQ ID NO: 227667 - DNA, 616 bp, Unknown
  Bacterial polypeptide expressing nucleotide sequence isolated from the Sargasso Sea
agcctcttccaatataaacccaataagatctgaatatattgcctctattatagatttaaaaggaaaaaaagtcttagatgtcggatgtggcgggggtttattagctgaagcactttatgaccttggtgcagaggtcgacggaatcgatgctgccggtcctggtattgaggttgctaggattcatgcagaaagagaggataagcaaattaattatgcaacagctcaagctgaagatttttgcattgataaagaaggttattatgacgtggttacttgtttagaggttttagaacatgttccaagtccagcctctttggttggggcatgctcaaaaatgctcaaaaaagatggtcttttatttctttctacgattaatagaaatcccaggtcgtggataacggcaattgtcggagctgagtatatttttagtattctcccaaaaggaactcatgaatttgaaaaatttataaaaccatctgagcttagtgaatatatggaaaatgcttcagtgaaacttatggaagccaaaggcatgttctataaccctgttactcatcatgtaagcctgaacaatgatttaggagttaattacatgatgtacggaatcaatgaataa

SEQ ID NO: 227668 - DNA, 583 bp, Unknown
  Bacterial polypeptide expressing nucleotide sequence isolated from the Sargasso Sea
aaattttgacattaatattgacaatcccagctcattagaaaaattaaaaatattagatgtaggatgcggtggtggcttactttgtgaaccactgtcaagacttggagcgaaagttacagggattgatgcttcagaaaaaaatatagaaattgcaaaggctcatgcacgaaaaggaaatataaatgttaattacatttgtactagtccagaaaaagtaaatgaaagttatgatgtcatattatgtatggaagttgttgaacatgttgaagatttagatttcttttataaaagttgttcaaaattattgaataaaaatggattaatattttttgctacaattaataaaactattaaatcttatatacttgcaattttaggagcagaatatgtattaagatggttaccaattggtacacacgattggaaaaaatttgtaaagccctctcatatgattaattcattatcccaaataggattatctcataaagacattattggagttgtctttaatcctctaataaacaaatggaaattaagtaaggatttggatgttaactatatgagctattttaaaagaaactaa

SEQ ID NO: 227669 - DNA, 190 bp, Unknown
  Bacterial polypeptide expressing nucleotide sequence isolated from the Sargasso Sea
atggataaaaatatagatcaaaatgaagtaaataagtttgctgaacttgctgataagtggtgggattcgtctggggaatttaaacctcttcacaatataaacccaataagatctgaatatattgcctctaaaatagatttaaaaggaaaaaaagttttagatgtcggatgtggcgggggtttattagctg

SEQ ID NO: 227670 - DNA, 466 bp, Unknown
  Bacterial polypeptide expressing nucleotide sequence isolated from the Sargasso Sea
gatgactaacattgatcaacaagaagttaaaaagttctctgatattgcagaacaatggtggaacaaagatggtgatttcaaacctttgcatgtgataaatcctttgagagctaattacataaaagaaaaaattgagttaaaagataaaaaagtattagatgtaggatgtggtggaggacttctgtgtgagtctttgtatgattttggtgctgaagttactggtattgatgcagcaggtcctggaatcgaagtagcaaaaatacatgcacaaaaaaataataaaaatatcaaatattttgaaaaaactgctgaggaattaaatacagaatatattgaatattatgatgttgttacttgtttggaggttcttgaacatgttcctgatccaaagtcacttgtaaaaacatgtgttcaattacttaagcccagcggcttgttatttctatccacaatcaacaaaaatcca

SEQ ID NO: 227671 - DNA, 361 bp, Unknown
  Bacterial polypeptide expressing nucleotide sequence isolated from the Sargasso Sea
tgttaccgcgatggaaattctcgaacacgttgctgataaggccttttttctggaaacattatcacgagttctgaagcctggtggatccttgttcctctcaacctttaataagacaccaaaatcttacgtcactgcaataatcggtgccgagtatctactcagactgttgcctcgcggaacccatcaatgggagaaatttactcccccatccaaaataatccaaagcttcttaacccatggattaaaaccaatgcatattagaggggtcagatacgccccgttttccaacacttggaccctaactagagatctaagcgtgagctatatccttcacgcctcaaaaccgttaaaccaatcctga

SEQ ID NO: 227672 - DNA, 727 bp, Unknown
  Bacterial polypeptide expressing nucleotide sequence isolated from the Sargasso Sea
aatgactacaataaataaagaagaaattcaaaagttttcaaaactagcagatgaatggtgggatcccaatggaaaattcaaacctctacatttgttcaacccggtcagacttgaatatataatcaaaaaatgtactaactatttcaatttggctaaatccacaggtgctactctttcgaatttgaaaatattggacgttggttgtggtggtggattaattagtgaacccttatgtagattaggaggaaatgtaactggaattgatgcatcatcaaaaaatatagaaattgcaaaaattcatgcaaaaaaaaatggtctcaaaattaagtacctaaatacatctcctgaaaaacaacaaattaatgaaaaatttgatgtaatattaaatctggaagttgttgaacacgtagcaaatttagatctattttttaggtcaacaactaatttattaaaaaaaaatggcattatgtttgtagcgacaataaacagaactttcgaatcttacgtaaaagcaatagttggagcagaatatgttttaagatggttgccgatcggaacccatgattggcaaaaattcctcaaaccacaagaaatagaagaaaaattattaaaactaaatttaaaaaaaattaacttagatggcataaaatataatattctttcaaacgactggaaaatgagcaaagattactctgtaaattatatacttgtagcaaaaaaaaactaa

SEQ ID NO: 227673 - DNA, 565 bp, Unknown
  Bacterial polypeptide expressing nucleotide sequence isolated from the Sargasso Sea
catggcacattcaggaaacgtcgttatttcaggtgatggttacgatgttattgactgcgaaacgtgcggattcaaacatgttacgccacttccagacaagctcgaaaatgagactctttatcgtgacagccattatgatgacggcgaacgagataggctaaactactatgagcgagaccgcgattggtggctcatgagctatcgcgacgtgcttaacgaaatagctcaatttatctcgcctagtgatgataatactctggttgatattggctgcggtgcaggcctgtttttggaagcagccatagaggaagggtggaatacagttggtgtcgaaataagtacaatagcggcaaaccattgccgtgataaaggcttagatatcattaatagcagcttcgatgctgacctaaccagccttccaaaaaatatcaaagtggttcacatgcgcaatattctagaacatgttcccgacccattctctcttatcaatgtggctttcgacaaacttgccagtggtggtgttttagttgtgggtgtccctaatgacttcaaccctctgcaagaa

SEQ ID NO: 227674 - DNA, 607 bp, Unknown
  Bacterial polypeptide expressing nucleotide sequence isolated from the Sargasso Sea
caatataaacccaataagatctgaatatattgcctctaaaatagatttaaaaggaaaaaaagtcttagatgtcggatgtggtggaggtttattagctgaagcactttatgaccttggtgcagaggtcgacggtatcgatgctgccggtcctggtattgaggttgctaggattcatgcagaaagagagaataagcaaattaattatgcaacagcccaagctgaggatttttgcattgataaagaaggtttttatgacgtcgttacttgtttagaagttttagaacatgttccaagtccggcctctttggttgaggcatgttcaaaaatgctcaaaaaagatggtcttttatttctttctacgattaatagaaatcccagatcgtggataacagcaattgtgggagctgagtatatttttagtattctcccaaaaggaactcatgaatttgaaaaatttataaaaccatctgagcttagtgaatatatggaaaatgcttcagtgaaacttatggaagccaaaggcatgttctataatcctgttacgcatcatgtaagccttaacggtgatttgggcgttaattatatgatgtatggaatcaatgagtaa

SEQ ID NO: 227675 - DNA, 631 bp, Unknown
  Bacterial polypeptide expressing nucleotide sequence isolated from the Sargasso Sea
gatggagactttaagcccttgcatgtcattaatcctcttagagcaaattttattaaagataaaactagattaaaaaataaaaatattttagatgttggttgcggtggaggcctgttaaccgaatcattatatgattttggagctaaggtaactggaattgatgctgcaggacctgggattgaagttgcaaaactgcacgcaaaacaaaataaaaaaaatattgattattatgaaaaaactgctgaggaattgaataaagaaaaatctgaaagttttgatgttgttacgtgtttagaggttcttgaacatgttccagatccaaagtcacttgtaaaaacatgtgtaaatcttcttaaaccagatggacttctcttcttatcaactattaataaaaatctaaggtcttggattactgcaatagttggagctgagtatatttttaatatccttccaaaaggaacacacgagtttgataaatttataaagccttccaacttggctttatatgtaagggatgccaatgcagaagttatagagacaaaaggaatgttctataaccctattacacataaggcgaatctaaataatgatctaagtgttaactatttaatgtatgccagaaaattataaa

SEQ ID NO: 227676 - DNA, 460 bp, Unknown
  Bacterial polypeptide expressing nucleotide sequence isolated from the Sargasso Sea
gcagaggctattaaagccgccaaagatcatgcttcggttgtggggctggatatagattacaggattggtgatctgagtactatacctaacgaattagatcaatttgatgttgttattgcttctgaggtaatagagcatgtcccagatcccaagagttttattgaggaaatacataagttaatcagtccaggcggcaaactaataatcacaactttaaaccgatcgctgatgtctttattgggagcaaaaatttttgctgagtatcttttgaaaatcgtacctgttggaacgcatgactggagaaaatttatcaaaccctccgaactgaatgacatgttaacaagcgcgcggtttaaacctgagatcgtaaaaggaatttcatattcttttaatgaggatgagttccagttagtagctaacccggttgtcaattacgcggtcagcgcgtttaaattctaga

SEQ ID NO: 227677 - DNA, 463 bp, Unknown
  Bacterial polypeptide expressing nucleotide sequence isolated from the Sargasso Sea
aatggataaaaatatagaccaaaatgaagtaaataagtttgctgaacttgctgataagtggtgggattcctctggggaattcaagcctcttcacaatataaacccaataagatctgaatatattgcctctaaaatagatttaaaaggaaaaaaagtcttagatgtcggatgtggcgggggtttattagctgaagcactttatgaccttggtgcagaggtcgacggaatcgatgctgccggtcctggtattgaggttgctaggattcatgcagaaagagaggataagcaaattaattatgcaacagctcaagctgaagatttttgcattgataaagaagcttattatgacgtggttacttgtttagaagttttagaacatgttccaagtccagcctctttggttggggcatgctcaaaaatgctcaaaaaagacggtcttttatttctttctacgattaataga

SEQ ID NO: 227678 - DNA, 595 bp, Unknown
  Bacterial polypeptide expressing nucleotide sequence isolated from the Sargasso Sea
tacgatctcaatatattttcctccaaaatagatttaaaagggaaaaaggttttagatgttggatgtggcggcggtttgttggctgaagcactttacgacatgggtgcagaggtcgacggaatcgacgctgctggtcctggcattgaagttgctaagattcatgcgaaaagagtagataagcaaattaattatgcaacagctcaggctgaagatttttgcattgataaagaaagctattatgacgtggttacttgtttagaagttttagaacatgttccgagtccagcctctttggttgaagcatgctcaaaaatgctcaaagaggatggtcttttatttctttctacgatcaatagaaatcctagatcatggataacagcaattgttggagctgagtatatttttaatattctcccaaaaggaactcatgaatttgaaaaatttataaagccatctgagcttagtgaatatatggaaaatgcttcagtgagacttatagaagccaaaggcatgttctataatcctgttacgcatcatgtaagcctaaacaatgatttgggagttaattacatgatgtatggagtcaatgagtaaa

SEQ ID NO: 227679 - DNA, 568 bp, Unknown
  Bacterial polypeptide expressing nucleotide sequence isolated from the Sargasso Sea
catggtggatgagggtgcatgcgtgcagggtggcacgctcgactgcaccgcaggtgacatatggattggagcacgcgcagtcgttgaacctggcgcgctgattcgcggcccgtgcatcattggccaggaatgtaccatccggcgcggcgcttaccttcgaggtgactgcctgctggggccagcgtgtgtcattggttgcgagatgaagaatgctctcacactggatgcagtcgagctacctcatcacggatatgttggtgatagcctgctcggccaccgtgcacactttggctgcggcaccatcaccgccaactttccactattccccacgagcgtgccctccgtcgacattggagctatccggtttgacctcggccgccgcaagtttggagctgttgtaggcgatcattcgcaggtgggctgccagtcggtgctggaaccagggtgcctgcttggcaaagacactcacgcatacccactcagcaggctgccgcgtggtactcatggtccaaacgaactgatcaaaactcgaccgtcggtcgagggtttgtactctaagcgccactga

SEQ ID NO: 227680 - DNA, 619 bp, Unknown
  Bacterial polypeptide expressing nucleotide sequence isolated from the Sargasso Sea
cttcaccaaatcaaaaataatagaatgacttacatactagatcaaattggaaatagagacattaaaaatttaaaaatactagatgtaggttgtggtggaggaataatttgtgagccactagcgagattaggtgcaaaagttacaggaatagattttgctccaaacaatatcagtgctgctaaaatacattccaaaaaaaataaacttaaaattaattatattcataaagatgttgaaaaatcaaaattagatggaaaatttgatttaatactaatgtttgaagttttagaacatttagatgattggagaaaaactattaaaaagataaaaaaaaatttaaataaaaatggtataattataatttccacaattaatagaaattcactttctaagttatttgcaattagtattgctgaaaatattctgaactggatacctaaaggaacacatgattattataaattaattaaacctgaagaattgaaaaaaacattaaacaatgaagaacttcattttaaaaatattaaaggtcttgtttttgatccattaagcggggaatggaaattatcaaataattatatgatcaattatttttgtactgcaaatttaattaattagt

SEQ ID NO: 227681 - DNA, 529 bp, Unknown
  Bacterial polypeptide expressing nucleotide sequence isolated from the Sargasso Sea
aatggataaaaatatagatcaaaatgaagtaaataagtttgctgaacttgctgataagtggtgggattcctctggggaattcaagcctcttcacaatataaacccaataagatctgaatatattgcctctaaaatagatttaaaaggaaaaaaagtcttagatgtcggatgtggcgggggtttattagctgaagcactttatgaccttggtgcagaggtcgacggaatcgatgctgccggtcctggtattgaggttgctaggattcatgcagaaagagaggataagcaaattaattatgcaacagctcaagctgaagatttttgcattgataaagaaggttattatgacgtggttacttgtttagaggttttagaacatgttccaagtccagcctctttggttggggcatgctcaaaaatgctcaaaaaagatggtcttttatttctttctacgattaatagaaatcccaggtcgtggataacggcaattgtcggagctgagtatatttttagtattctcccaaaaagg

SEQ ID NO: 227682 - DNA, 703 bp, Unknown
  Bacterial polypeptide expressing nucleotide sequence isolated from the Sargasso Sea
tatgactgataatatcgaccaaaatgaagttcaaaaatttgcagccattgcggaacaatggtgggatcccactggtgatttcaaacccttgcatgtgattaatccaatcagagcagaatatatctccaaaaaaattgaccttaagggtaaaaaagttttggatgttggatgtggaggcggtcttcttgctgaagcattatttgatgcgggagctgaggtttcagcaatagatgtaacagaaagaaatattgaagtagcaaaacatcatgctaatgctcacaaaaaaaatatttcataccatctcacagatgcgaaaagtttttcaaataatcataaaaactactttgatattgtgacctgtcttgaggttttggagcacgtgcctgacccatcagttttaataaacgaatgctcctctatgcttaagatagatgggtccttgttcctttcaacaatcaataaaaatccacgatcttttgtaacagcaatttttggagccgaatacctctttcaattgttgcctaaaggcactcatgaatatgcaaaatttataaaaccttatgaactagagtcatatatgacttcagcaaatgtaaggcttatggaaagcaagggtcttttttataaccccctctttcatagcgcaacactaaataatgatttaggtgttaactatatgatgcatggtgtgaaagttgattaa

SEQ ID NO: 227683 - DNA, 691 bp, Unknown
  Bacterial polypeptide expressing nucleotide sequence isolated from the Sargasso Sea
atgaatatagataaatccgaaattgagaattttgataattacgcacatgagtggtggaataaaagaggtccatataaatttatacacctccttacgccgttgaggctgaaatatatttcaaacaacttaaaactaaaaggattgaaggtattagacttaggttgcgggggtggactactctgtgaagctatgaccgacagtggagcagatgtagtcggtattgacgcatcacttaaaactatcgaaattgcgaaaaaacatgccaacgaaaaaaatcttaaaattgattatcttcatactgatattgagtcatttaattacaaagagaaatttgatgcagtgatatgctttgagctaattgagcacgttcctgatcctaatgaattaattagacaaattagtaaacatattaagcctaacggaaaattatttctatcaacaataaatcgaaatttattttcatttatgtttgcgaaattagttgcagaatatttacttaatatcatacctcgtggtacacatacatatgaaaaattcatcaaaccatctgaaatgagacaaatgctagaaaataataacttttcaatatcagatatccaaggtttaaaatttaaccctatctctaacacttttaaattatctacgttttctaaaataaattactttataacggcgctgcttaatgaataac

SEQ ID NO: 227684 - DNA, 697 bp, Unknown
  Bacterial polypeptide expressing nucleotide sequence isolated from the Sargasso Sea
atggtcaatatagatttacaagaagtaaaaaaattttctgatattgcagaagactggtggaataaaaatggagattttaagcctttgcatgtaattaatcctttgaggactaagttcattaaagaaagaactgaattaaaaaataaaaatgttttagatgttgggtgcggcggaggcctcctaagtgagtcattgtttgattttggtgcaaaagttacaggtattgatgcagcgggtccaggaattgaagtcgcaaagattcatgcaaaagaaaacaataaagatattaattattttgagaaaactgctgaagagttaagaaaagaaaaatctgaaacttttgatattgttacatgcttagaagttttggaacatgttccagatccaaaatcacttgtaaaaacatgtactgatcttcttaagcctggaggacacctttttctttcaacaattaataaaaatccaagatcttggataactgcaatagttggtgctgaatatatttttaatcttttaccaaagggtactcatgaatttgataaatttattaagccctcaagcttagcctcatatgttagagatgctaatgctaaagttattgaaacaaaaggcatgttctataatcctattacacataaggctaaccttaatgaggatcttggtgttaattatttaatgtatgctagaaaatcataaa

SEQ ID NO: 227685 - DNA, 739 bp, Unknown
  Bacterial polypeptide expressing nucleotide sequence isolated from the Sargasso Sea
atgaattcaactgtagacaaaacagaagttaatcattttgatcagcctaatcaagattggtgggatgagagcggttcattttctgcattacacagattaaccccttgtagagtagagtatatagttaaagtaattaaaagaaatataattaataaacaaataaattctacttctcaaatatgtaataatttgaatattttagatgtaggatgtgggggtggattattatgtgaaccattagcacgattaggtggaaatgtaactggaatagatgtatcagaaaatgccattataacagcaaaacaacatgcatccaaaatggggcttgaaattaactatatttgcacaagtcttgaggaattaaatttgaaaaacgattttgatttaattattgcatcagaagttattgaacatgttttagacagaaaatattttttaaaaatgatcagaaaaatttcatcaaacaaaacctcctttatttttacaactattaataagtctattccaagtctgttatttggaaaatttgcagctgaatatatacttaatttaatacctaaaggcacccatgattgggaaaaatttgtaactccacaaaagttatatttagaggctctggagaatggaatatatctaaataatttttctggattaacaccaaatgtttttaacaaagaatttaatttgacttcttatttgggcataaactatgcagcttccggtatagttagagaataag

SEQ ID NO: 227686 - DNA, 625 bp, Unknown
  Bacterial polypeptide expressing nucleotide sequence isolated from the Sargasso Sea
atgactaacattgatcaacaagaagttaaaaagttctctgatattgcagaacaatggtggaataaagatggtgatttcaaacccttgcatgtgataaatcctttgagagctaattacataaaagaaaaaattgatttaaaagataaaaaagtattagatgtaggatgtggtggaggacttttatgtgagtctttgtatgattttggtgctatggttactggcattgatgcagcaggtcctggaatcgaagtagcaaaaatacatgcacaaaaaaataataaaaatatcaaatattttgaaaaaactgctgaggaattaaatacagaatatattgaatattatgatgttgtaacatgtttggaggttcttgaacatgttcctgatccaaagtcacttataaaaacatgcgttcaattacttaagccgggcggcttgttatttctatcaacaatcaacaaaaatccgagatcatggattactgcaatagtgggcgccgaatatatatttaatttactcccaaaaggcactcacgaatttgataaatttataaaaccatcttcattagctaaatatgtaagagatgctgaagctgaattacttgaaacaaaaggaatgttctacaacc

SEQ ID NO: 227687 - DNA, 594 bp, Unknown
  Bacterial polypeptide expressing nucleotide sequence isolated from the Sargasso Sea
taagatcccaatatatttcctccaaaatcgatttaaaagggaaaaaagtcttagatgttggatgtggtggcggtttattagctgaagcactctatgacctaggggcagaggtcgacggaatcgatgctgctggtcctggtattgaggttgctaagattcatgcgaaaaaagaggataagcaaattaattatgcaacagctcaagctgaagatttttgcattgataaagagggttattatgacgtagttacttgtttagaagttttagaacatgtcccaagtccagcctctttggttgaagcatgttcaaaaatgctcaaaaaagatggtcttttatttctttctacgattaatagaaatcccagatcgtggataacggcaattgtgggagctgaatatatttttagcattctcccaaaaggaactcatgaatttgaaaaatttataaaaccatctgagcttagtgaatatatggaaaatgcttcagtgagacttatagaagccaaaggcatgttctataaccctgttactcatcatgtaagcttgaacaatgatttaggagttaattacatgatgcatggaatcaatgaataaa

SEQ ID NO: 227688 - DNA, 561 bp, Unknown
  Bacterial polypeptide expressing nucleotide sequence isolated from the Sargasso Sea
tatgactcaaaatattgatcaaaatgaagtaaataaatttgctgacatcgctgaaaaatggtgggatccaaccggtgacttcaaacctcttcacgtgattaacccactgagagcaaactatattaataataaatctcctgttgatggcttaaaagtgcttgatgtaggttgcggaggaggcttgttggcagaggctcttgattctaaaggagcagaagtaactgcaatagacgtcacagaagcaaatatagaagttgccaaactgcatgcaaaaaaaatgcaagttaaaatagactatagattggttacagctgaggagttatcacaaaaagaaagtcaatcttttgatgtcgtgtcctgtttggaagttattgaacatgtccctgatccaggtcagttgataaaggcatgttctgaccttttaaagccagatggtcaaatgtttttatctactttaaatagaaaccccagatcatttataacggcaattttaggtgcagagtatatttttaatgttttacccaaaggcactcatgagtgggctaaatttataaaaccatc

SEQ ID NO: 227689 - DNA, 697 bp, Unknown
  Bacterial polypeptide expressing nucleotide sequence isolated from the Sargasso Sea
atgactaacattgatcaacaagaagttaaaaagttctctgatattgcagaacaatggtggaacaaagatggtgatttcaaacctttgcatgtgataaatcctttgagagctaattacataaaagaaaaaattgagttaaaagataaaaaagtattagatgtgggatgtggtggaggacttctatgtgagtctttatatgattttggtgcaatagttactggcattgatgcagcaggtcctggaatcgaagtagcaaaaatacatgcacaaaaaaataataaaaatatcaaatattttgaaaaaactgctgaggaattaaatacagaatatattgaatattatgatgtcgtaacttgtttggaagttcttgaacatgttccagatccaaagtcacttataaaaacatgcgttcaattacttaaaccgggcggcttgttatttctatcaactatcaacaaaaatccgagatcatggattactgcaatagtgggcgccgaatatatattcaatttactcccaaaaggcactcatgaatttgataaatttataaaaccatcttcattagctaaatatgtaagagatgctgaagctgaattacttgaaacaaaaggaatgttctacaaccctcttacacataaggcaaacctgaataatgatttaggtgttaattatctaatgtatgcaagaaaatcataaa

SEQ ID NO: 227690 - DNA, 697 bp, Unknown
  Bacterial polypeptide expressing nucleotide sequence isolated from the Sargasso Sea
tatgacaaatgttgataaacaagaagtaaataaattttcagatatagcagatgagtggtggaataaaaatggtgacttcaaaccattacatgtaattaaccctttaagagcaaaatacataaaagacaaaactgatcttgaaaacaaaaaagtcttagatgttggttgtggtggtggtttgctggcagaggcgcttcatgactttggtgctaaggttactggaatagatgctgcaggcccaggaattgaagttgcaaagcttcatgcgtcaaataatcaaaaagatattgaatattatgaaaaaacagctgaggatttaagtcaagaataccaagagtactatgatgtcgtgacctgtttagaagtgttagaacacgttcctgatccaagttctttggtagctacttgtattgatttgctgaagcctgaaggagatttatttttatctactataaataaaaatccaaggtcatggctgactgcaattgttggtgcagaatatatatttaatatcttgccgaagggtactcacgagtttgataaatttataaagccatcaacattggcaaaatatgttagagatgctaatggaagtgtgattgaaacaaaaggtatgttttataatcccatcactcataaagctcatttaaataatgatcttggagtaaattatttaatctatgcaaaaaaatcatag

SEQ ID NO: 227691 - DNA, 736 bp, Unknown
  Bacterial polypeptide expressing nucleotide sequence isolated from the Sargasso Sea
tatggtcaacaaattcacagatgcagatgaaatagcaaaattttcttccctttatgaagactggtggaaaaatgatggagctttcgggatgctccataaactcacgcctgttagaatgcttttcatacggcaagcgctgagcaatttcttggaacgcgattctgaactttcgaaaacttttgaaggtttgcgaattttagatgttgggtgcgggggaggtttattgacggaacctttaaaaagacttggtgctgacgtgactgggctggatgcttccgcagaggctattaaagccgccaaagagcacgcttcagttgtgggactggatatagattacaggattggtgatctgagtactatacctaacgaattagatcaatttgatgttgttattgcttctgaggtaatagagcatgtcctaaatccccagagttttattgaggaaatacataagttaatcagtccaggcggcaaactaataattacaactctaaaccgatcactgatgtctttattgggagcgaaaatttttgctgagtatttattgaaaattgtacctgttggaacgcatgactggagaaaattcatcaaaccttctgaactgaactccatgttaagaagcgcgcgtttcacacctgagattgtgaagggaatttcgtattctattagtgaggatgaattccggttagccactaacccggttgtcaattacgcggtcagcgcgtttaaatgttag

SEQ ID NO: 227692 - DNA, 178 bp, Unknown
  Bacterial polypeptide expressing nucleotide sequence isolated from the Sargasso Sea
catgaatttgattgtttcatcaaaccatcagaattagaaaaatggtcaaggtcagctgggcttgaactagtcgagttgataggagtgacatataacccaattacgactgtattttcactttcggatgatgtcgatgtcaattacatgatgcattttaaaaagattagcaatgactaat

SEQ ID NO: 227693 - DNA, 262 bp, Unknown
  Bacterial polypeptide expressing nucleotide sequence isolated from the Sargasso Sea
acaatcaacagaaatatcaagtcttatatcatggcaattgttggagcagaatacatactcaatttacttccaaagggaactcatgaatttgattgttttataaaaccatccgaattagaaaagtggtcaaaatcagctggactcgaacttattgagttaattggagtcgtctacaatccaatcactacagtgttttcactctcagacgatgtcgatgtcaattacatgatgcattttaagaagattaatgatggcagataaa

SEQ ID NO: 227694 - DNA, 697 bp, Unknown
  Bacterial polypeptide expressing nucleotide sequence isolated from the Sargasso Sea
aatgtcaaatattgataaacaagaaataaaaaaattttcagacatagctgatgaatggtggaataaggatggagattttaagcctcttcacgttataaatcctcttagagcaaattatattaaagagaaaatagatctaaatagtaaaaaaatcttagatgttggttgtggtggaggtcttcttacagaagcattgcatgattttggagctgaagtgactggcattgatgctgctggtcctggaattaaagttgcaaaaatacatgcagaaaaaaacaaaaaaaatattcaatattttgaaaagactgctgaagaattaatcaaagaaaatgaaggtgcttatgatattgtaacttgccttgaagttttagagcatgtgcctgatcctaaatcattagttgcaacatgcgtggatcttttgaggcctggaggattaatatttctatcaacaattaataaaaatcctagatcttggattactgcaattgttggagctgaatatatctttaatcttttgcctaagggaacacatgagtttgataaatttataaagccatctcttttagctaaatatttgagagatgctggaggagaattaattgaaactaaaggaatgttttataacccaattactcataaagcaaatctaaacaatgatttgggtgttaattatttaatgtatggtaaaaaatcataa

SEQ ID NO: 227695 - DNA, 676 bp, Unknown
  Bacterial polypeptide expressing nucleotide sequence isolated from the Sargasso Sea
atgactcaaaatattgaccaacatgaagtaaaaaaatttgctgaaatagctgaaaattggtgggatccaactggcgattttaaacctttgcatgttattaatccgctaagagcaaactatatcaatcaaaaaatatgtgtagagggtttaaaggttttggatgttggttgtggcggaggacttttagcggaagcgcttaatgctaaaggtgctaatgttactgctattgatgtaactgaagcgaatattggagttgctcaacttcatgcaaaaaagatgcagattgaaattgattacagacatataaccgctgaagagttagcggaacaggaaagcgagtcctttgatgtagtttcctgcctagaagtaattgaacatgttcctgatcctggtcagctaattaaagcatgtgctgatcttttgaaacctaatggtaagatgtttctttcaactctaaacaggaaccctagatcctttgttacagcaattgttggcgcagagtatatttttaatatattgccaaaaggaacccatgagtggaataaatttattaagccatctgaattagaaaaatatatgcgaaatgctggcattaaattaattgagagcaaagggatgttatacaaccctattttccatacagctaacttaaataatgaccttggggttaactaca

SEQ ID NO: 227696 - DNA, 706 bp, Unknown
  Bacterial polypeptide expressing nucleotide sequence isolated from the Sargasso Sea
tatgaacccctcttccaatgttgatccggccgaaattgccaagtttaatgaaatcgcgtcccgctggtgggatccgtccggtgaatttaagccgttacaccaattgaatccttgccgtctggcttttatcagtgatcaggtgcaaggcttatttggtaaaaaaacagtagatgtaggttgtggtggcggcattctggctgaagctatggcgaaagctggtgcagaagtcacaggcattgatatggccgacgaagctttaacagtggccaaattgcatgcgctggaatctgccgtatcagtccagtatcaacaaagcactgcggaagattttgctgctgccaatcaaggttcctttgatttggtgacgtgcatggaaatgctggagcacgtgcctgaacctgcttctgtggtgaaggcttgtgctgatttagccaaacccggcgcgaccttggtgttctcgaccttaaacaaaacctggaaagcctatctgatggctattgttggtgctgagcaagtactcaagctggtgcccaaaggtactcatgagtttgagaagtttatccgcccttctgatttaatgcgttttattgatgatgcgggtttacaggtggtggatgcgacaggcctgcactacaaccctattaatcaatccttccgcactggccctgggctggatgtaaattattttgtggtagcgaaaaagcca

SEQ ID NO: 227697 - DNA, 541 bp, Unknown
  Bacterial polypeptide expressing nucleotide sequence isolated from the Sargasso Sea
aatgaacagtataaataaaaaagaaatagaaaagttttctaaaatggcttctgaatggtggaatcctgaaggaaaatttaaaccactacataaatttaacccaatcagaattaagtatattaaagaaaatataattgaaaattttaatttaaaaaataaaattacacctttatcaggagttaatattttagacattggctgtggtgggggattaatttctgaaccaatgtcaagaatgggtgctaatgtaactggaattgatgcttcagataaaaatattaaaattgcaaaacttcattctaaaaaaaataaattgaaaattaattatttatgctcttcaccagaaaaactaaaagttaaaaaaaaatttgacgtaatcttaaatatggaaattgttgaacatgtagaaaatgttgatttttttctaaagtcttgctcaggacttttaaagaaaaatggtatgatgtttgttgcaacaattaacaaaactttaaaatcttatgtttttgcaattgttggagcagagtatgttttaagatgg

SEQ ID NO: 227698 - DNA, 655 bp, Unknown
  Bacterial polypeptide expressing nucleotide sequence isolated from the Sargasso Sea
aggtaaatttaaaccacttcataaatttaacccaacaagaataaaatatataaaagaaaatattattaataatttcaaattaaaaaataaatctaaacctttgtctggaataagtattttggatattggatgtggtggaggattgttgtctgaacctatgtcaagaatgggtgccaatgtaacgggcatagatgcttctgataaaaatataaaaattgcaaaacttcattcaaaaaaaaataagctaaaaattaattatttatgttcatcacctgaaaaacttaaaattaaaaaaaaatttgacgttattttaaacatggaaattattgaacatgtagaagatatagatttttttcttaagtcatgctcaaaacttttaaaaaaaaatggactaatgtttgttgcaacaataaataaaactttaaaatcttatgtttttgcgattgttggagctgaatatgttttaagatggcttccaataggcacgcacgaatgggaaaaatttgttaaacctgaagaacttaaaaaaattttaatgaaatataatttatctctaaataaattagatgggatgaattttaatattatcaaagataaatggaatatttccaaagatttatctgtgaattatataggaaaatttattaaaaactaa

SEQ ID NO: 227699 - DNA, 193 bp, Unknown
  Bacterial polypeptide expressing nucleotide sequence isolated from the Sargasso Sea
tgatctgcttcctcgaggtactcatgaatacagtaagttcattaaaccatcagaacttgtagaatggtgtcgagaaagtgctctgaaattgaacaatcagattggaatggggtataaccccctcactaagcgctactttctccaaaacagtcttgatgtaaactatattgcttgttttcaaaaaccctattag

SEQ ID NO: 227700 - DNA, 553 bp, Unknown
  Bacterial polypeptide expressing nucleotide sequence isolated from the Sargasso Sea
gatgttggatgtggcggtggaatactcacagaagcacttgcgagtgtcgcatctgaggttcacggaattgatatggctgaaaaaggcttagcagttgcaaatattcataaaaacaaatcaaatataacgaatattaaatatagtcaaagcacaatcgaagattatgccttaaaacatgagaataaatttgatgtcttaacatgtatggaaatgcttgagcatgtaccatcaccagaagaaaccatcaaagcatgttctgatattgtcatcgaaggcggagacctttattttgcgacaatcaataggaatataaaatcttatgtcatggcaataattggtgcagagtacatacttaatttactcccaaaaggaacccatgaatttgattgtttcatcaagccatcagaattagaaaaatggtcaaggtcagctgggcttgaactagtcgagttgatcggagtgacatataacccaattacgactgtattttcactttcggacgatgtcgatgtcaattacatgatgcattttaaaaagattaggaatgactaat

SEQ ID NO: 227701 - DNA, 602 bp, Unknown
  Bacterial polypeptide expressing nucleotide sequence isolated from the Sargasso Sea
aatgaccagtgttaataaaaaagaaatagataaattttctaaaatggccgatgaatggtggaatccagaaggtaaattcaaaccacttcataaatttaatccaacaagaattaaatatttaaaggaaagtatagtttacaattttaaattaaaaaataaatctaaacctttatcaggaataaatattttagatattggatgtggtggagggttattatctgaaccaatgtctagaatgggagctaatgtaacaggcattgatgcatctgataaaaatattaaaattgcaaaactacattcaaaaaaaaataaattaaatataaattatttatgttcatcaccagagaaacttaaaattaaaaaaaaatttgatgtcatcttaaatatggaaattgttgaacatgtggaagatatagatttttttctaaattcatgctcaaaacttttgaaaaaaaaaggactaatgtttgttgcaacaataaataaaactttgaaatcttatatttttgcaattgttggagctgagtatgttttgagatggcttccaatcggaacacatgagtgggaaaaatttgtaaaaccagaggatcttaaaaaatttt

SEQ ID NO: 227702 - DNA, 660 bp, Unknown
  Bacterial polypeptide expressing nucleotide sequence isolated from the Sargasso Sea
gtaaattaaatgaatggtgggatattaatggaaattataaaattttacataaaattaaccctttaaggctagattttattataaataacttcaataaacccttaaataacaagaaagttttagatattgggtgtggaggaggtttaatttctgaattactatcaaaaaaaaaagcaaacgttactggaatagatgaaaatatttataatataaaacaagcaaaaaatcatgcaaaaatttcatctttaaaaattaactacctaaataaatctttaaattcttttaataaaaagaataaacaaaaatatgatttaatattgtgtttagaagttttagaacatgttgaaaacgtagaagaatcattagaaataatatcaaagcttttgaaaacaaatggaaccctaattttatcgactattaatagaaacttaaaatctttaatattcgcaaaaatgtttggagaatatatattaaattggatacccataggaacacaccaatataaaaaatttttaaaacctgaagaaattattcaaatatttaaattaaaaaaaattaattttaaaaaaattaaaggtatggaatttaatccagttttgaataagtggtttttatcaaataatacaaatataaattattttatggtaggaaaaaaataat

SEQ ID NO: 227703 - DNA, 700 bp, Unknown
  Bacterial polypeptide expressing nucleotide sequence isolated from the Sargasso Sea
aatggataaaaatatagatcaaaatgaagtaaataagtttgctgaacttgctgacaagtggtgggattcctcaggagaatttaagcctcttcacaatataaacccaataagatctgaatatattgcctctaaaatagatttaaaaggaaagaaagtcttagatgtaggatgtggtgggggtttattagctgaagcactttatgaccttggtgcagaggtcgacggaatcgatgctgccggtcctggtattgaggttgctaggattcatgcagaaagagagggtaaacaaattaattatgcaacagctcaagctgaagatttttgcattgataaagaaggttattatgacgtggttacttgtttagaagttttagaacatgttccaagtccagcctctttggttaaggcatgttcaaaaatgctcaaaaaagatggtcttttgtttctttctacgattaacagaaatcccagatcgtggataacagcaattgtgggagctgagtatatttttagtattctcccaaaaggaactcatgaatttgaaaaatttataaaaccatctgaacttagtgaatatatggaaaatgcttcagtgaaacttatggaagccaaaggcatgttctataaccctgttactcatcatgtaagcctgaacaatgatttaggagttaattacatgatgtacggaatcaatgagtaa

SEQ ID NO: 227704 - DNA, 657 bp, Unknown
  Bacterial polypeptide expressing nucleotide sequence isolated from the Sargasso Sea
aacttgctgataaatggtgggattcttctggagaattcaagcctcttcacaacataaatccaatacgatctcaatatatttcctccaaaatagatttaaaagggaaaaaggttttagatgttggatgtggtggcggtttgttgaccgaagcactttatgacatgggcgcagaggtggacggaatcgatgctgcaggtcctggcattgaggttgccaagattcatgcgaaaagagaggataagcagattaattatgcaacagctcaagctgaagatttttgtattgaaaaagaaaatcattacgacgtggttacttgtttagaagttttagaacatgttccgagtccagcctctttggttgaagcatgttcaaaaatgctcaaaggggatggtcttttatttctttctacaattaatagaaatcctagatcatggataacagcaattgtaggagctgagtatatttttaatattctcccaaaaggaactcatgaatttgaaaaatttataaaaccatctgagctaaatgaatatatggaaaatgcatcagtaagactcatagaagccaaaggcatgttctataatcctgttacacatcatgtaagcctaaataatgatttgggagttaattatatgatgtatggagtcaatgaataaa

SEQ ID NO: 227705 - DNA, 700 bp, Unknown
  Bacterial polypeptide expressing nucleotide sequence isolated from the Sargasso Sea
atgaacaaaaatatagatcaaaatgaagtaaacaagtttgctgaacttgctgataaatggtgggattcctccggggaattcaagcctcttcataatataaatcccataagatctgaatatatttcctccaaaatagatttaaaaggaaaaaaagtcttagatgtcggctgtggtggcggtttgttagctgaagcactttatgacctaggcgcagaggtagacggaattgatgctgctggtcctggtattgaggtcgcaaggattcatgcagaaagagaggacaagcaaatcaattatgcaatagctcaagctgaggatttttgcattgataaagaagatcattatgatgtggttacttgtttagaagttttagaacatgttccaagtcctgcctctttggttgaggcatgttcaaaaatgctcaaaaaagatggtcttttatttctttcaaccattaatagaaatcccaggtcgtggataacggcaattgttggagctgagtatatttttagtattctcccaaaaggaactcatgaatttgaaaaatttataaaaccatctgagctcagtaaatatatggaaaatgcttcagtgaaacttatggaagccaaaggcatgttctataatcctgtcactcatcatgtaacccttaacaatgatttaggagttaattacatgatgtatggaatcaatgagtaaa

SEQ ID NO: 227706 - DNA, 721 bp, Unknown
  Bacterial polypeptide expressing nucleotide sequence isolated from the Sargasso Sea
aatgaaaataaataccataaataaagaagaaataaataagtttactaaaatggctgatgaatggtggaatcccgagggtaaatttaagccattacacaaatttaatccaattagaataaaatatattaaagataatgttattttacattttaaaaaaaaaaattcattaaagggtttagaatttttagatataggttgtggaggtggactgctatcagagcctttggctagattgggtgcaaatataactgggatagatccttctagtaaaaatataaaaattgctaaaattcattcaaaaaaatcaaatttaaaaataaattacatttgttctgctccagaaaatttaaatttaaataaaaaatttgatgttatattaaatatggaagttgttgaacatgttgaagatttaaatttttttattaataaaagtggaaaatttttaaaaaaaaatggattaatgtttgtggccacattaaataaaacacttaagtcttacatatttgcaattcttggtgcagaatatgttctaagatggctacctataggaacccatgagtgggaaaaatttgtagaaccttcaaaattaataaatattgccaaaaaaaataatttgaaaatcgaccagattgatgggattaaatattaccctatcttggatcaatggaaaattagcaaagatacatctgtaaactatatatcaaaatttattaaatattag

SEQ ID NO: 227707 - DNA, 272 bp, Unknown
  Bacterial polypeptide expressing nucleotide sequence isolated from the Sargasso Sea
catgacgaacgtcgatcaacaagaaatcaataagttctctgaactcgcttctcgatggtgggatccagaaggtgaatttaaaccattgcaccttattaacccgcttcgtttggacttcatcaatcaacacagcgaaggcctgtttgataaaaaagtcgtcgatataggctgtggcggaggtattctagcggaatcaatggcgcgtgcgggtgccacggtaaccggcttggatatggctgaagcgtcgttagaagtggctaagcttcacggtt

SEQ ID NO: 227708 - DNA, 721 bp, Unknown
  Bacterial polypeptide expressing nucleotide sequence isolated from the Sargasso Sea
atgagtactataaataaagaagaaattcaaaagttttcaaacttagcagatgaatggtgggatgttaagggaaaatttaagcctttgcatttatttaatcctgtcagaatagaatatatattagataatattaaaattcattttaatattcaaaataaaaaaggtttattactaaataatcttaaagtgctagatattggttgtggcggaggtttgataagcgaaccacttgctcgactgggtgcagacgtaacaggaatagatgcgtctgaaaaaaatattaaagttgctcaaatacatgctaaacaaaataatttgaatataagataccttaatagttcaccagaaaagtttaatgaatttgaaaattttgatataattttaaatcttgaaattgttgaacacgtggaaaatgttaaactgtatatcgaaagttgccacaaattacttaaaaaaaatggattaatgtttacagcaactataaatcgaactttagtctcatatttgaaagcgattattggcgcagaatatgttttaagatggttgccaatcggaacgcatgattggaataaatttattaaacctgaagagcttgaaaaaaaattatatgacgaaaattttaaaacaatagacattaaaggacttgaatttaatcctcttttaaacaagtggaaaaaatcagaaaatctctcagtaaattatataatttgtagtaaaaaaa

SEQ ID NO: 227709 - DNA, 664 bp, Unknown
  Bacterial polypeptide expressing nucleotide sequence isolated from the Sargasso Sea
atgaaaaataacacaattaataaaaaagaaatagaaaaatttactaaaattgctgaagaatggtgggatcctcaaggtaaatttaaaccattacacaaatttaaccctatcagaatttcatatattaaaaaaaatataattaatacattcaaacttaatcaaaaaataaagcccctcaaaaaagttaaaattttagatataggatgtgggggtggtttgttatctgagcctatgagcagattaggtgctgaagtagtaggtattgatgcatcggatagaaatattagaattgctaaatctcatgcaaaaaaaagtaatttgaatatcaaatatctatgttcatctccagaaaattttaactcaaaaaccaaattcgatgtagtgttaaatatggagatagtagagcatgttcaagatgtagatttttttttaaaatcatgtgcaaaacttttaaaaaaaaatggcattatgtttgtcgctactctaaataaaaccttaaaatcatatttgtttgcaatagtcggggcagaatatgttttacgttggcttccagttggtacacatgaatgggataaatttgttaaaccaaatgatctaattgatatactaaaaaaatatgatttaaaattagactctcttgatggaatgaaatttaatctagtta

SEQ ID NO: 227710 - DNA, 696 bp, Unknown
  Bacterial polypeptide expressing nucleotide sequence isolated from the Sargasso Sea
aattttcaaaactagctaaagattggtggaatcctaatggaaaattcaaacctttgcacctatttaaccctgccagaatcaagtttattaaagaaaaactaatttctcattttaaaattgacccaggtagtgaaaaaccactcgaaaatttgaaaattttagatataggatgtggaggtggtttattatgtgaacctttaagtagattgggagctcacatgactggtatagatgcttccaataataatattgaagtagctaaactacatgccaaagaaatggatttaaaaattacatacatgcgttgcgaacctgaaaattttaattttgaaaataaatttgatgttattttaaatatggagattgttgaacatgttttaaatatagatttatttataaaaaattgttccaaactgataaaaaaaaatggcataatgtttgtagctacaataaataaaaacttaaaatcatatatttttgctatattgggagctgaatacgttttgagatggctaccaattggcactcatgattgggataaatttattacacctcaagatttagaaacggtagcacataaaaatgatttttctacagaagatcttataggtatgaagttcgatttattttccaaaaaatggtcggtaagtaaggatgattctgttaattacatttcaacttttttaagaaattagt

SEQ ID NO: 227711 - DNA, 625 bp, Unknown
  Bacterial polypeptide expressing nucleotide sequence isolated from the Sargasso Sea
aatggataaaaatatagatcaaaatgaagtaaataagtttgctgaacttgctgataagtggtgggattcctctggggaattcaagcctcttcacaatataaacccaataagatctgaatatattgcctctaaaatagatttaaaaggaaaaaaagtcttagatgtcggatgtggcgggggtttattagctgaagcactttatgaccttggtgcagaggtcgacggaatcgatgctgccggtcctggtattgaggttgctaggattcatgcagaaagagaggataagcaaattaattatgcaacagctcaagctgaagatttttgcattgataaagaaggttattatgacgtggttacttgtttagaggttttagaacatgttccaagtccagcctctttggttggggcatgctcaaaaatgctcaaaaaagatggtcttttatttctttctacgattaatagaaatcccaggtcgtggataacggcaattgtcggagctgagtatatttttagtattctcccaaaaggaactcatgaatttgaaaaatttataaaaccatctgagcttagtgaatatatggaaaatgcttcagtgaaacttatggaagccaacaggccatgttct

SEQ ID NO: 227712 - DNA, 424 bp, Unknown
  Bacterial polypeptide expressing nucleotide sequence isolated from the Sargasso Sea
caaatatttcacagagtactggtcgaagattatgctctaaagattaatgaaaacttttatgtcctgacatgcatggaaatgcttgaacatgttccatcaccaggcgaaacaatacaagcttgttctgatattgtcattgatggcggagatcttttttttgcaacaatcaacagaaatatcaagtcttatatcatggcaattgttggagcagaatacatactcaatttacttccaaagggaactcatgaatttgattgttttataaaaccatccgaattagaaaagtggtcaaaatcagctgggctcgaacttattgagttaattggagtcgtctacaatccaattacgacagtgttttcactctcagaagatgtcgatgtcaattacatgatgcattttaagaagattaataatggcagataaa

SEQ ID NO: 227713 - DNA, 667 bp, Unknown
  Bacterial polypeptide expressing nucleotide sequence isolated from the Sargasso Sea
atggatcagagagataatatcaatacagaggaagtagataagttcaatgatttagcgaacgaatggtggaatccatacggaagttttgcaccactccataagctcaatccacttcgtttcgaatacatacgagcaaatagtaacttagacggaaaaacagctattgatgttggatgtggcggtggaatactcactgaagcacttgcgagtgtcgcatctgaggttcacggaattgatatggcagaaaagggtttagcagtggctaatattcataaaaacaaatcaaatataacgaatattaaatatagtcagagcacaatcgaagattatgccttaaaacatgagaataaatttgatgtcttaacatgtatggaaatgcttgagcatgtaccgtcaccagaagaaactatcaaagcatgttctgatattgtcatcgaaggcggagacctttattttgcaaccatcaataggaatataaaatcttatgtcatggcaataattggtgcagagtacatacttaatttactcccaaaaggaacccatgaatttgattgtttcatcaagccatcagaattagaaaaatggtcaaggtcagctgggcttgagctagtcgagttgatcggagtgacatataacccaaattacgacttgtatcctcactttcgga

SEQ ID NO: 227714 - DNA, 658 bp, Unknown
  Bacterial polypeptide expressing nucleotide sequence isolated from the Sargasso Sea
gaaggtaaatttaaaccattacataaatttaacccaattagaatttcatatattaaagaaaatattattaagacattcaaactcgattttaataagactcctcttaaaaacatcaaaattctagatataggatgtggtgggggtttattatcagagccaatgtgcaggttgggcgctaaagtgaccggcattgatgcatcagataagaatatcaaagttgcaaaactccattcagaaaaaaataatcttaaaatagattatttttgctcatcccctgaaaaatttaacacaaaagataagttcgatgttatcttaaatatggaaattgtagaacatgttgaggatgtaaatttttttttgaaatcctgctgtaaacttttaaaaaaaaatggacttatgtttgttgcaactttaaacaaaacattaaaatcttatatttttgcaatagtaggagctgaatatgtattgcgttggcttccaatcgggacacatgaatgggaaaagtttataaaacctgaggaattagtttcaatacttgaaaaaaatgatttgagattagagagggtagatggaatgaattttaatttattaaagaataggtggagtgtaggtaatgataaatctgtaaattacattgccaaatttataaaaaattaat

SEQ ID NO: 227715 - DNA, 727 bp, Unknown
  Bacterial polypeptide expressing nucleotide sequence isolated from the Sargasso Sea
atgactacaataaatcaagaggaaattcaaaagttttcaaagatagctgatgaatggtgggatgcagaaggcaagtttaaacctttacacaggtttaatccaataagaataaaatatattatagataaatgtactaaccattttaatctaaaaaataataacaatgagcttctttcaggattaaaatttttggatatagggtgcggtggaggactcgtaagtgaaccactgtctagattaggtgcaaatgtaacagggattgatgcctcaccaagaaacatagaggttgctaaaatccatgcaaaaaaaaataatttaaaaataaaatatttagccacttcacctgagaaaaaaataattcaagataaatttgatgtaatactaaatcttgaggtcatagagcatgtcgaaaatgttgatttatttatgatagcagcaactgatcttttaaaaaagaatggtataatgtttattgcaacaattaatagaactttagagtcttacattaaggcaatagttggtgctgagtatgttcttagatggctaccaataggaacacatgattggcaaaagtttttaactcctaatgagatagaagaaaaatttagtaggcttaatttagaaaaattagatttaactggtttgaaatttaatttattctcaaatgactggactaaaagtaaagactattctgtaaattatattcttcttgcaaaaaaaaattagt

SEQ ID NO: 227716 - DNA, 703 bp, Unknown
  Bacterial polypeptide expressing nucleotide sequence isolated from the Sargasso Sea
gaaatagaaaaattttcaaatatggcggatgaatggtgggatccccatggaaaatttaaacctttacacaaattcaatccaatccgtattaaatatattaaagaaaatataattagacaatttaaaataaaaaataagaataagcctctttctggaattaatattttagatatcggttgtggtggtggtctgctttctgaaccaatgtgtagattgggtgctgatgtaactggaattgatgcatcaacgaagaatataaagatttcaaaactacatgcaaaaaaagataatcttaaaattaattatatttgttcatctcctgaaaaattaaaaattagtaaaaaatttgatgtaatactcaatatggaaatagttgagcatgtagaggatatttctttttttttaaaatcatgctctaagcttttaaataaaaatggattaatgtttgttgcgacgattaataaaactttaaaatcttatgtattcgctatagttggggcagaatacgttttaaggtggttacctataggaactcatgactgggaaaaatttgttaaaccagaagaacttaaagaaattttatccaaaaataatttattcttaaaaaaattagatggaatgcattttaatataattaaagatgagtggagtattacaaatgacctttcaattaattatattgcaaaatttttaaaaaattaat

SEQ ID NO: 227717 - DNA, 448 bp, Unknown
  Bacterial polypeptide expressing nucleotide sequence isolated from the Sargasso Sea
atgaaagctgttattgatacaatagaccccaaagaagtggctaaatttgaggctatggctgatgagtggtgggatcctgatggaaaatttaaacctttgcatatgctgaacccatgtaggcttgattatattgtaagccaaatagctttagagtttgaccgagatcttaagagtaaagagcccttcaaaggcttggagatattagatatcggttgtgggggaggtcttctatgtgagcctatggcgcgcttaggtgctacagtagttggggtcgatgcagccgaacggaatatacctgtagcaaaagcacatgcgaaccgttctaacctttctattgattacagagtcgggacagctgaagagttagtggaaagtggcaataagtttgacgtagttcttaatatggaagttgttgaacacgtcgctgatccgcttacctatctaacgg

SEQ ID NO: 227718 - DNA, 185 bp, Unknown
  Bacterial polypeptide expressing nucleotide sequence isolated from the Sargasso Sea
aatgaaaaatgtggacgacatagaaattcagaaatttgaagccctcgctcaccgatggtgggaccctaatagcgaatttaaacctctacatgacataaaccctctgcgcgtcaactacatatcgagaaccacaggtttagcggaaaaagaaatactggatattggatgtgggggaggaattttag

SEQ ID NO: 227719 - DNA, 657 bp, Unknown
  Bacterial polypeptide expressing nucleotide sequence isolated from the Sargasso Sea
ttccaaacttcttcacaaattttaatcctattcgattaaaatttattatggatcaaacaatcacaatttttaactgtgaccataaaaatgaatgcccgctaaaaggtataaaaatattagatataggctgtggcgggggtttattatctgaaccactatcacgtcttggtgccgaagtaactggcgtggatgcagcagaaaataatattaaagcagcaagtattcacgctaaaaaagaaaatttagaaattaattatattaatggtgatattgatagtcttaaccctgatgaaaagtttgatataatattgaatatggaagtaattgaacatgtagataatacagattacttcatgaaaagttgttgtgatagagttaggtctaatggacttatctttatggcaactataaataaaacactattctcattaatttttgctaagtatatggctgaatatgttctaggatttttacccaaaggaacacatgattggaataaatttttatctccagaagaaatctatgcttttctaattaaaaatcattttaatgttagagaaacattaggggtaaattataatccaattaaaaataattggtctatttctcgatcaactccagcaaattacatggtgcttggtcaaaaaaataattaag

SEQ ID NO: 227720 - DNA, 557 bp, Unknown
  Bacterial polypeptide expressing nucleotide sequence isolated from the Sargasso Sea
aggctggagagtcttggatatagggtgtggtggtggactattgtctgagccgatggctagattgggtgcagaagtagtaggagctgatcctgcagaaagaaacataccggttgcgaagatccatgcggaacaatctggacttgcaattgactataggcatacgacagcagaagaattagcaaaaaaatcagagaaatttaatattattttaaatatggaagttgtagaacatgttgcaaatcctgccagttacattgaggtatgctattctcttcttgaggataatggtttgatgatgtgctcaacaataaataggaatatcaagagctatcttaatgcaattattggagctgagtatataatgaaatggttaccgaaagggactcatgactggaataagtttctctctcctaacgaactttcagatttgctagaaaaggcaggatttaggatagttgataaaaagggttttgtttttagtaaaattttttggaaatggacgatatctgcaaatgatctttcaataaattatgtgacttcaagtattaggccttaaa

SEQ ID NO: 227721 - DNA, 462 bp, Unknown
  Bacterial polypeptide expressing nucleotide sequence isolated from the Sargasso Sea
ttgcaaatatccataaaaataaatccaaattaacgaatatcaaatattcacagagtactgtcgaagattatgctctaaagagtaatgaaaaatttgatgtcctgacatgcatggaaatgcttgagcatgttccatcaccaggcgaaaccatacaagcttgttctgatattgttatcgatggcggagatcttttttttgcaacaatcaacaggaatatcaagtcttatatcatggcaattgttggagcagaatacatactgaatttacttccaaaaggaactcatgaatttgattgttttataaaaccatccgaattagaaaagtggtcaaaatcagctgggctcgaacttattgagttaattggagtcgtctacaatccaatcacaacagtgttttcactctcagacgatgtcgatgtcaactacatgatgcattttaagaagattaatgatggcagataaa

SEQ ID NO: 227722 - DNA, 637 bp, Unknown
  Bacterial polypeptide expressing nucleotide sequence isolated from the Sargasso Sea
cataaatttaacccaattagaattaagtatatcaaagaaaatataattaataattttgaattaaaaaataaaaccaaacctttgtccggagtaaatattttagacattggttgtggtggaggattactttctgagccaatgtcaagaatgggtgctaatctaactggaattgatgcttcagaaaaaaatataaaaattgctaaactgcacgcaaaaaaaaataaattaaatattaactatttgtgcacatcgcctgaaagacttaaaattaaaaataagtttgatgttattttaaatatggaaattgttgaacacgtagaagatgttgatttttttttaaaatcttgctcagaacttttaaaaaaaaatggactaatgtttgttgcaacaataaataaaactttaaaatcttatgtttttgcgattgttggagcagagtatgttttaagatggctgccaataggaacacatgaatgggaaaaatttgttaaacctgaagatcttaaaaaaattctaatgaaatatagtttatcacttaataaattagatggtatgaattttaatattataaaggatgaatggaatatttctaaagatttatcagtgaactatattggaaaatttattaaaaactaat

SEQ ID NO: 227723 - DNA, 619 bp, Unknown
  Bacterial polypeptide expressing nucleotide sequence isolated from the Sargasso Sea
aatggacgcacaacaggaaatcacaaaattcaataacctagctgaaaagtggtgggacaccagcggacccatggcgccattacatggtttgaattctcttagagtgccatttatccacgagacccttaacccgccttcaacaaacagaccaacaatggatgttttggatgtgggatgtggcgcgggcattctttcggaaagcatggcctcgctaggctaccaagtcgttgcaaccgaccctgctaccagaaatatagaaatcgctagaaaccacgcccagcagatgggtctagacattgattatcatgagggtcttattgagaacctgaagctaaagacttttgatgcaatcctggtgatggaagtagtcgagcatgttcctgatgttcaagagctgttaagtgaatgcattcaaagactcaagcctggagggcacctattcgtagcgaccattaaccggacgcttgcatcattcctgactgcaatagtcggtgctgagtacgtctttcgaatgcttccgagaggcactcatcagtggagcaaattcgttaaaccagaagaaatcataagccctctaacccgaagtgacatgacattgatcaaaacgtcggcatcagcg

SEQ ID NO: 227724 - DNA, 370 bp, Unknown
  Bacterial polypeptide expressing nucleotide sequence isolated from the Sargasso Sea
tatggacaaaataaatgtagatactaatgagattgataaatttaatcgtttatcctcgagatggtgggatctgaatggagatttcaaaccactgcatgaaattaatcctttgcgacttgattttatattaaaaaatatcaatctgaataattgcaatgttgcagatatcggctgtggtggtggtattttatctgaatcaatgattgattatggagcgcgtgttacaggaattgatatggcaccagatgtaataagagtcgcaaacatacacaggaaagaatcaggaaaagatatagaatacaaaaatattacggttgaagaattagctgagcgatcaccaagatcttttgatgtcgttacatgcatggaa

SEQ ID NO: 227725 - DNA, 588 bp, Unknown
  Bacterial polypeptide expressing nucleotide sequence isolated from the Sargasso Sea
tatggttcctgaaatgaataaaaccgttgatcaattggaaataaaaaaattttcaaatatatcttatgattggtggaatcctgaaggaaaatttgcgacattgcataaaattaatccaatcagagtaaagtttatgctcgatttaatttttaaaaacaaccagattgatgtccatgctgtgagacctcttgctaattttcgtgtattggatattggttgtggaggaggactatcatccgaaccttttgcaaagcttggggcccatgtctgcagtgttgacgctgatagccaggcaatagaggttgcgaaaaatcatgcaaaaaatgaaaacttgaaaattgattacaagaactgttctgtcgaagacctatcattaaaaaaagatggtaaatttgatgtcttattaatattggagcttctcgaacacattgacgacacaaatcactttctctcgattgcattaaaatacctgaaaaaaaatggagttgtttttgtttctactataaataaaaatattaaatcgatggttttagcaaaatttgcagcagaatatattctcaacttggttccgaagggaacgcatgactg

SEQ ID NO: 227726 - DNA, 588 bp, Unknown
  Bacterial polypeptide expressing nucleotide sequence isolated from the Sargasso Sea
aatgaaaataaataccataaataaagaggaaataaataagtttactaaaatggccgatgaatggtggaatcccgaaggtaaatttaagccattacacaaatttaatccaattagaataaaatatataaaagataatgttatttcacattttaaaaaaaataaaaaaaaaaattcattaaaaggtttagaatttttagatataggttgtggaggtggactgctatcagagccgtttgctagattgggtgcaaatataactggaatagatgcttctaataaaaatataaaaattgctaaaatccattcaaaaaaatcaaatttaaaaataaattacatttgttcatctccagaaaatttaaatttaaataaaaaatttgatgttgtgttaaatatggaagttgttgaacatattgaagatttaaatttttttattagtaaaagtggaaaatttttaaaaaaaaatggattaatgtttgttgccacattaaataaaacacttaaatcatacatatttgcaattcttggtgctgaatatgttctaagatggctacctattggaactcatgagtgggaaaaatttgtagaacc

SEQ ID NO: 227727 - DNA, 294 bp, Unknown
  Bacterial polypeptide expressing nucleotide sequence isolated from the Sargasso Sea
tatgaacataaaaaatttagaccatgatgaagtaaaaaaatttgatgacctggcggctaaatggtgggatccagatggagaatttaaaccgcttcatcaaattaacccccttagagttggctttataaacgagcgagcaaatttggaaggcattaaagtcttagatgtaggatgtggaggcggaatcttggctgaagctctgagcaaacttggagcgcaagtcacagggatcgatgcttctgaacaaacaatcggtgtagcgcaaaaccattcgaatgcagttggaagtgatgt

SEQ ID NO: 227728 - DNA, 617 bp, Unknown
  Bacterial polypeptide expressing nucleotide sequence isolated from the Sargasso Sea
tattaaatatattaaagaaaacataattagacaatttaaaataaaaaataagaataagcctctttctggaattaatattttggatatcggttgtggtggtggtttgctttctgaaccaatgtgtagattgggtgctaatgtaactggaattgatgcatcaacaaagaatgtaaaaatttcaaaactccatgcaaaaaaagataatcttaaaattaattatatttgctcgtctcctgaaaaattaaaaattagtaaaaaatttgatgtgatactcaatatggaaatagttgagcatgtagaggatatttctttttttttaaaatcatgctctaagcttttaaataaaaatggattaatgtttgttgcaacgattaataaaactttaaaatcttatgtattcgctatagttggggcagaatacgttttaaggtggttacctataggaactcatgactgggaaaaatttgttaaaccagaagaacttaaagaaattttatccaaaaataatttattcttaaaaaaattagatggaatgcattttaatataattaaagatgagtggagtattacaaatgatctttctgttaattatattgcaaaatttttaaaaaattaat

SEQ ID NO: 227729 - DNA, 727 bp, Unknown
  Bacterial polypeptide expressing nucleotide sequence isolated from the Sargasso Sea
aatgaaaagtagcacaattaacaaacaagaaatagaaaaattctcgaaaatagcggcagagtggtgggatcctactggtaaatacaagccattgcacaaatttaatccaactagaattagatacattagagatgaaataattaagcattatgaaataaaaaagaaaggcagaccactggctaacttaaatattttagatattggatgtggaggtggattaatatgtgagccactttctagactaggaggaaatatgaccggtattgatccctctgaaagaaatattaaagtagctaaaatacatgccggtaaaaaatctaacattaaatatttatgtacatctccagaaaaacttaaaataaaaaaaaaatttgatgttgtgttaaatttagaagttattgagcatgttgataatttagatttgtttataagaaaaagctcaaactttttaaaaaaagatgggattatgtttatttcatcaataaataaaactttaaaagcttatttatttgcaattattggtgcagaatatgttttaagatggctacctattggaactcacgaatgggaaaaatttgtagagcctgaaaacttaacaaaaatatgcgaaaaaaattttttgaaagtaaaaaaacaagatggaatgatttttaatccattaaaaaatttatggattttaagtaaagataaatctgtaaattatattgctatatttcagaaggtttaa

SEQ ID NO: 227730 - DNA, 544 bp, Unknown
  Bacterial polypeptide expressing nucleotide sequence isolated from the Sargasso Sea
agaaattttagatattggatgtggtggaggattattgtctgaaccaatgtcaagaatgggtgctaatgtaacaggtatagatgcatcggataaaaatataaaaattgcaaaagttcactcaaaaaaaaataaactaaaaattaattatttatgttcgtcgccagaaaaacttaaaattggaaagaaatttgatgtcattttaaatatggaaattgttgagcacgtggaagatatagatttttttctaaagtcatgctcaaagcttttaaaaaaaaatggacttatgtttgttgcaacaataaataaaactttgaaatcttatgtttttgcaattgtgggagcagagtatgttttgagatggcttccaataggaacacacgaatgggaaaaatttgttaaaccagaggaacttaaaaaaattctaatgaaatacgatttatctctcaataaattagaaggtatgaattttaatattattaaggacgaatggagtatttcaagagatttatctgtaaactatattgcgaagtttattaaaaactaa

SEQ ID NO: 227731 - DNA, 706 bp, Unknown
  Bacterial polypeptide expressing nucleotide sequence isolated from the Sargasso Sea
atggatacacaacaggaaatcacaaaattcgataatctagctgaaaggtggtgggacaccagcggacccatggcaccattacacggtttaaattcacttagggtgccatttattcatgagaccctgaacccgccttcaacaaacagaccaaccatggatattctggatgtggggtgtggcgcgggtattctttcggaaagcatggcctcgctaggctaccaagtcgttgcaaccgatcctgctaccagaaatatagaaatcgctaaaacccacgcccagcagatgggtctagacattgattatcatgaaggtcttattgagaacctggagctaaagacttttgatgcaatcctggtgatggaagtagtcgagcatgttcctgatgttcaagagctgttaaatgaatgcaatcaaagactcaagcccgggggacacctattcgtggcgaccatcaaccgaacgcttgcatcattcgtaactgcaatagtcggtgctgagtacgtctttcgaatgcttccgagaggcactcatcagtggagcaaattcgtcaaaccggaagaaatcatcagccctctaacccgaactaacataacattggtcaaaacgtcgggcatcagcgtcaatccttttgggccaagatttcgactcaccaggtatatgggagtaaattacatgctggccttcaaaaagcaacttaggcattagc

SEQ ID NO: 227732 - DNA, 724 bp, Unknown
  Bacterial polypeptide expressing nucleotide sequence isolated from the Sargasso Sea
atgaatagtataaataaaaaagaaatagaaaaattttctaaaatagcctctgaatggtggaatcctgaaggaaaatttaaaccacttcataaatttaacccaatccgaattaaatatattaaagaaaatgtaattagtaattttaaattaagaaataaagctaaacctttatcaggaataaacattttagacataggttgtggtggaggattgctgtctgaaccaatggcaagaatgggtgctagcgtaacagggattgatgcttctgatcaaaatataaaaattgctaaactacattcaaaaaaaaacaaattaaaaattaattatttatgctcatcacctgaaaaacttaatattaaaaaaaaatttgatgttattttaaatatggaaattgttgaacatgtagaaaatgtagatttttttttaaaatcttcctcaaaccttctaaaaaaaaatgggttaatgtttgttgcgacaataaataaaactctaaaatcttatgtttttgcgattgttggtgcagaatatgttttgagatggcttccaataggaacacacgaatgggaaaaatttgttagtcctgaagatcttaaaaaaattcttataaaatataatttatacattgataaaatggatggaatgagttttaacattttaaaagataaatggaatatttctaaagatttatctgtgaattatataggcaagtttattaaaaactaat

SEQ ID NO: 227733 - DNA, 700 bp, Unknown
  Bacterial polypeptide expressing nucleotide sequence isolated from the Sargasso Sea
atgaacattgatgagagtgaaattaaaaagttcgctgaattggcagataaatggtgggataaaaatggtgactttaaaccacttcacgtgatcaatcctttgagggcaaattatatttttgataaattagatatatctaataaaaaagttttggatgttggttgtggtggtggaatattatcagaggctttgtatgaaaaaggagctgatgttactggaatagatgcagccggtccaggaataaacattgcaaaaatacatgctgaacaaaataataaaaccataacttactatgaaaatacagcagaagaattatatgaaaaatacaaaaaaaattatgatgttgtaacttgtcttgaggtacttgaacatgtcccagatcctgcgatgcttgtttcaacatgcctaaagttgttgaagcctaacggtcatctttttttatcaactatcaacaagaatccaagatcatttataacagcaatagtcggagcagaatatatttttaacattttgccaaaaggaacgcatgaatttaataagttcattaaaccatcaaaattagcagaatacataaggaaagcagatggtaaattaattgaatcaaaaggtatgttttataatccattaactcataaagctaatctcaataatgatcttggtgttaattacatgatgtatgcaagaaaaattgaagactaaa

SEQ ID NO: 227734 - DNA, 724 bp, Unknown
  Bacterial polypeptide expressing nucleotide sequence isolated from the Sargasso Sea
atgactagtgtaaataaaaaagaaatagataaattttctaaaatggctgatgaatggtgggatccagaaggtaaattcaaaccactccataaatttaatccgacaagaattaaatatatcaaggaaaatattattaataatttcaaattaaaaaataagtccaaacctttatcaggaataagtattttagatattggatgtggtgggggattattatctgaaccaatgtcaagaatgggtgctaatgtaatgggtatagatgcatctgataaaaatataaaaattgcaaaacttcattcaaaaaaaaataaactaaaaattaattatttatgttcatcacctgaaaaacttaaaattaaaaaaaaattcgatgttattttaaatatggaaattgttgaacatgtagaagatgtagatttttttctaaaggcctgttcaaaacttttaaaaaaaaatggaataatgtttgttgcaacaataaataaaactttaaaatcttatatttttgcaattgttggagcagagtatgttttaagatggcttccaataggaacacactcatgggaaaaatttgttaaacctgaagatctaaaaaaaattttagttaactacgatttgtctcttaataaattagatggaatgaacttcaatattattaaagatgaatggaatattaccaaagatttatctgtaaactatataggaaagtttattaaaaactaat

SEQ ID NO: 227735 - DNA, 736 bp, Unknown
  Bacterial polypeptide expressing nucleotide sequence isolated from the Sargasso Sea
atgaataaaaccgttgatcaattggaaataacaaaattttcaaatatatcttatgattggtggaatcctgaaggaaaatttgcgacgctgcataaaattaatccaatcagagttaagtttatgctcgatttaatttttaaaaacaaccagattgatgtccatgcagaaagaccccttgctaattttcgtgtattggatattggttgtggaggaggattatcatccgaaccttttgcaaagcttggagcccatgtatgcagtgttgacgctgataaacaggcaatagaggttgcaaaaaatcatgcaaaaaatgataaattgaaaattgattacaagaactgttctgtcgaggacctatcattaaaaaaagatggtaagtttgatgtcatattaatattggagcttctcgagcacattgatgacacaaaccacttcctctcgattgcattaaaatacctgaaaaaaaatggagttgtttttgtttctactataaataaaaatattaaatcgatggttttagcaaaatttgccgcagagtatattcttaactgggttccgaagggaacgcatgactggaataaatttattacaccaagtaatttaagtcagatgatggaacgtcatggttttgatgaggtattaagggcgggtattgtatttgatccagttagtctaaaatggaagcaatcaacggacgtcagtgtcaattacataacatctttttcacagatgtaat

SEQ ID NO: 227736 - DNA, 640 bp, Unknown
  Bacterial polypeptide expressing nucleotide sequence isolated from the Sargasso Sea
atggaaaatatcgacaaacaagaagttaaaaaattttctgaccttgcagaagaatggtggaatgaaaaaggagattttaaaccacttcatgttattaaccctctaagagcaaattacattaaagaaaaaactgatttaacagataaaaatattttagatgttggttgtggtggaggtcttttatcagaagcactgcatgatttaggtggaattgttaccggaatagacgctgctgggcctggaattgaagttgcaaagatacatgccaaaaaaaataataagaatatttcatacttcgaaaagacagcagaagttcttaacaaagaaaggtcaggtacttacgatattgtaacgtgtttagaagtattagagcatgttccagacccaaaaaatttagttaaaacatgtgtagaacttctcaaaccaggtggcctcctttttttatctacaataaataaaaatcctagatcatggattacagccattataggtgctgaatatatttttaatattcttccaaaagggactcatgaatttaataaatttattaagccttctgaacttgcttattatgtcagaaattcaaatgctgaattaattgaaactaaagggatgttttataaccctattactcacaagg

SEQ ID NO: 227737 - DNA, 616 bp, Unknown
  Bacterial polypeptide expressing nucleotide sequence isolated from the Sargasso Sea
aataaaatatattaaggaaaatattatttataatttcaaattaaaaaataaatctaaacctttatcaggaataaaaattttagatattggatgtggtggaggattgttatctgaaccaatgtcaagaatgggtgctaatgtaacaggtattgatgcatctgataaaaatataaaagttgcaaaacttcattcaaaaaaaaataagctaaaaattaattatttatgttcatcaccagaaaaacttaaaattgaaaaaaaatttgatgtcattttaaatatggaaattgttgaacacgtagaagatgtagatttttttctaaagtcatgctcaaagcttttgaaaaaaaatgggctaatgtttgttgcaacaataaataaaactttaaaatcttatgtttttgcgattcttggagcagagtatgttttgaggtggctaccaattggaacacacgaatgggaaaaatttgttaaacctggggaccttaaaaaaattttaatgaagtatgatttatctctcaataaattagagggtatgaattttaatattattaaggatgaatggagtatttctagagatttatccgtaaattatatagcaaagtttattaaaaactaa

SEQ ID NO: 227738 - DNA, 361 bp, Unknown
  Bacterial polypeptide expressing nucleotide sequence isolated from the Sargasso Sea
tttgacgttgttacctgtatggaaatgctcgaacacgttccagaccctgcttcaattattcacgccgttgccaaacttgcaaaacctggcgctgatgtttttttctctaccctcaataaaacaccgaaagcctacttgtacgcaattgtaggtgctgaaaaactattaaaaatggttccagagggaactcacgatcacaaaaagtttattaaaccggcgcagctaattgcgtgggccgagcaagcgggcttaaaagtacgtgcaagctcaggactttcgtataaccccttctctaaacaatacacacttaataatgatgttagtgttaattatatccttcattttgagaagttggtgtaat

SEQ ID NO: 227739 - DNA, 721 bp, Unknown
  Bacterial polypeptide expressing nucleotide sequence isolated from the Sargasso Sea
atgagtcaaaaagaaaatataagctcagaagaagtagaaaagtttaatgatctagccaaggaatggtggaatcctcatggtagctttgctcccctacataaactcaatccacttcgctttgaatacattcgaacaaactctaatttagaaggaaaaactgctattgatgttggatgtggaggcggaatacttaccgaatcattagcaagcgttgcatccaatgttcatggaatagacatggcagaaaaaggtttggctgttgcaaatattcataaaaataaatttgagctaaaaaatatcaaatattcacagagtacggtcgaagattatgctttaaagaataatcagaaatttgatgttctgacatgcatggaaatgctcgaacatgttccatcgccaggagaaaccatacaagcttgttctgatatcgttattgaaggtggcgatctcttttttgcaacaatcaataggaatatcaagtcttatctaatggcaattattggagcagaatacatacttaatttactcccaaagggaacgcatgaattcgattcttttataaaaccatccgaattagaaaagtggtcaaaatctgctgggctcgaacttattgagttaattggagtagtttataatccaatcacgactattttttcactctcagaagatgtcgatgtcaattacatgatgcatttcaagaagatcaaaaatggaagataaa

SEQ ID NO: 227740 - DNA, 700 bp, Unknown
  Bacterial polypeptide expressing nucleotide sequence isolated from the Sargasso Sea
aatggataaaaatatagatcaaaatgaagtaaataagtttgctgaacttgctgataaatggtgggattctaaaggggaattcaagcctcttcacaatataaatccaataagatctcaatatattgcctccaaaatggatttaaaaggaaaaaaagtcttagatgttggatgtggtggtggtttattagctgaagcactctatgacctaggcgcagaggtcgacggaatcgatgctgctggccctggtattgaggttgctaagattcatgctaaaaaagaggataagcacattaattatgcaacagctcaagctgaagatttttgcattgataaagaaggttattatgatgtggttacttgtttggaagttttagaacatgtcccaagtccagcctctttgattgaagcatgtacaaaaatgctcaaaaaagatggtcttttatttctctctacgatcaatagaaatcctagatcatggataactgcaattgtgggagctgagtatatctttaatattctcccaaaaggaactcatgaatttgagaaatttataaaaccatctgagcttagtgaatatatggaaaatgcttcagtgagacttatagaagccaaaggcatgttctataatcctgttacgcatcatgtaagtctaaacaatgatttgggagttaattacatgatgtatggaatcaatgagtaa

SEQ ID NO: 227741 - DNA, 718 bp, Unknown
  Bacterial polypeptide expressing nucleotide sequence isolated from the Sargasso Sea
atgactagcataaataaaaaagaaatagataaattttctaaaatggccaatgaatggtgggatccagatggtaaattcaaaccacttcataaatttaatccaacaagaataaaatatataaaggaaaatattattaataatttcaaattaaaaaataaattcagacctttatcaggaataaatattttagatatcggatgtggtggagggttactatctgaaccaatgtcaagaatgggagcaaatgtaactggtatcgatgcatctgataaaaatataaaaattgcaaaacttcattcaaaaaaaaataaactaaaaattaattatttttgttcttcacctgagaaacttaaaattacaaaaaaatttgatgttattttaaatatggaaattgttgaacatgtagaggatatagatttttttttaaagtcttgctcaaaacttttaaaaaaaaatggactaatgtttgttgcaacaataaataaaacattaaaatcttatatctttgcaattgtcggagcagagtatgttttaagatggcttccgattggaacacacgaatgggaaaaatttgttaaacctgaggatcttaaaaaaattttaatgaaatacaatttatctctaaataaattagagggtatgaattttaatattattaaggatgaatggagtatttctagagatttatctgttaactatatagcaaagttttattaaa

SEQ ID NO: 227742 - DNA, 436 bp, Unknown
  Bacterial polypeptide expressing nucleotide sequence isolated from the Sargasso Sea
catggcttcaaaaagcaacaaagacataaactatattcttggagaagctgaaagcttgcttgttgaaaagaaagcttttgatatcgtttcttgtcttgaagctatagaacatgttcctgatcctgaattgctcgtaaagacttgctcagatttatgtaaaccgggcggcgaagtgtttttttcaactatcaatagaaatccaaaatcctttctttttgcaattattggtgctgaatacattcttaatttattacccaaaggcactcatgattttaataagttcataaaaccatcagaacttcatggttttatgacaaggtcggggttagaagttaaagaaatcattggaatgagctacaacccactttcagggaactattggttaggtgatgatgttaaagttaactatttagttcatgctcataaaccacagtga

SEQ ID NO: 227743 - DNA, 733 bp, Unknown
  Bacterial polypeptide expressing nucleotide sequence isolated from the Sargasso Sea
tatggacatttcttcgattgataaaactgaaattgataagtttaaaaaccttgccaaggaatggtggaagcatgatggcaagtttaaaacactgcataaatttaatcccataagactggaatatataatcaatacaattaaagatcattatgcaatagaccaaaaaaatgaatcacctttaaagggattatcagttttggatattggatgtggtggtggactaatgagtgaaccattagcaagattaggtgcagatgtaaccggcattgatgctttagagaaaaattgtatcactgcaaaaattcatgctgaagaaaataatttagatattaattatcttaatacaactgctgaaagtcttaacaaaaataaaaagtatgacatcattttaaatttggaagtaatagaacatgtaaacaatccaaaaaattttattaaagaatgtagtggcctggtatctaataatggtattatgtttatagcaactattaataaatctatcttttcgcttatttttgcaaaattcatggctgaatatgtattaggatttcttccaaaaggcacacatgattggaataaatttttaactcctgaggatatttactctttttttattcaaaacaactttgatgtgattagtaatataggtgtaaattataatccattaagagacgaatggtttatgtctaaaagaatggatgcaaattttattgtttctggaaaaaaaaattaa

SEQ ID NO: 227744 - DNA, 724 bp, Unknown
  Bacterial polypeptide expressing nucleotide sequence isolated from the Sargasso Sea
aatgagtagtgtaaataaaaaagaaattgaaaaattttccaaaatggctgctgaatggtgggatcctgagggcaaatttaaaccattacataaatttaatccgataagaataaaatatattaaagataatattatttatagttttaaattaaaatctaaggagaagcctttacaaaagattaatatattagatatagggtgtgggggtggacttttatctgaaccaatggcaagattaggagcaaatgtaactggtatagatgcatctgataagaatattcaaattgccaaactacatgcaaaaaaaaataaacttaatattaattatttttgttcatctcctgaaaaactaaaaatcaaaaaaaaatttgatgtaatattaaatatggaaataattgaacatgttgaggatataaatttttttatcaaatcttgctcaaaacttttaaaaaaaaatggcttaatgtttgttgctactttaaataaaacttttaaatcatatgtttttgcaattattggtgctgagtatgtattgagatggctaccaataggaactcatgattgggaaaaatttgtgaaacctgaagatcttaagaatattttaaataagaataatttaaaaatcgaaaaaatagatggaatgaactttgatatattcaaagatgagtggaatatttcaaaagatacttcaattaattatattgcaaaatctttaaaagtttaa

SEQ ID NO: 227745 - DNA, 727 bp, Unknown
  Bacterial polypeptide expressing nucleotide sequence isolated from the Sargasso Sea
aatgactacaataaatagagaagaaattcaaaagttttcaaaaattgcagatgaatggtggaatcctaatggcaaatttaaacctcttcacaaatttaaccctgctagaattgaatatatattagatattacatctgctcactttaatttggacagatcaaaaaaacttccacttaacagtttaaagattttagatattggatgcggtggaggtttaataagtgaaccaatgtctagattgggagctaaggtaacagggatagatgcatctgaaaaaaatattaaggtagcagaaatacatgcaaaaaaaaataatttaaaaatagaatatcaaaacaaatctccagaagaaattaaagatgatttaaaatttgatataattctaaatttagaggttgttgaacatgtcgacaacatagatttatatttaaaggcttgtgaaaaattattaaaaaaaaatggcctcatgtttactgctacaataaatagaacaatgacctcttacattaaagctattgtgggtgcagaatatgttttaagatggttaccgatcggtacccacgactggaataaatttgtaaaaccggaggaactggaaaaaaaattagtagatctaaaattttcaattaaagatataaagggattagactataatttagtatcaggtaaatggcgaagaactgataatttatcagtaaactacattattgttggaaataagaattaa

SEQ ID NO: 227746 - DNA, 724 bp, Unknown
  Bacterial polypeptide expressing nucleotide sequence isolated from the Sargasso Sea
tatgaacagtattaataaaaaagaaatagaaaaattttcaaatatggcggccgaatggtgggatccagaaggaaaatttaaacctcttcataaatttaatcctataagaataagatatattaaagaaaatataattaaggaatttcaacttaaaaataaaaaatatcctctttctggaataaatgtccttgatattggatgtggaggcggattgttatcggagcccatgtgtagattaggtgctaatgttacagcaatcgatgcttcaaacaaaaatattgccatagcaaacttacatgcaaaaaaaaacaatcttaaaataaattatatatgctcatcacccgaaaaactaaaaactacaaaaaaatttgatgtaattttgaacatggagattgttgaacatgttgaggatgttgatttttttttaaaatcatgtgctaatcttttaaaaaaaaatggattaatgtttgttgcaactataaataaaaccttaaaatcttatatatttgcaattgttggtgcagaatatgttttgagatggcttcctattggcacccatgaatgggaaaaatttgttaagcctgaggaattaaaaagtattctaatcaagaacaatctaaatctcaaaaaaattgatggaatgaattttaacattctaaaggatgaatggaatgtttcaaaagatttatcagtaaattatattgctgaatttaagaaaaactaa

SEQ ID NO: 227747 - DNA, 724 bp, Unknown
  Bacterial polypeptide expressing nucleotide sequence isolated from the Sargasso Sea
aatgagtagcgtaaataaaatagaaatagaaaaattttcaaatatggcggatgaatggtgggatccccatggaaaatttaaacctttacataaattcaatccaatacgtattaaatatattaaagaaaacataattagacaatttaaaataaaaaataagaataagcctctttctggaattaatattttggatatcggttgtggtggtggtttgctttctgaaccaatgtgtagattgggtgctaatgtaactggaattgatgcatcaataaagaatgtaaaaatttcaaaactccatgcaaaaaaagataatcttaaaattaattatatttgttcgtctcctgaaaaattaaaaattagtaaaaaatttgatgtaatactcaatatggaaatagttgagcatgtagaggatatttctttttttttaaaatcatgctctaagcttttaaataaaaatggattaatgtttgttgcaacgattaataaaactttaaaatcttatgtattcgctatagttggggcagaatacgttttaaggtggttacctataggaactcatgactgggaaaaatttgttaaaccagaagaacttaaagaaattttatccaaaaataatttattcttaaaaaaattagatggaatgcattttaatataattaaagatgagtggagtattacaaatgatctttcagttaattatattgcaaaatttttaaaaaattaa

SEQ ID NO: 227748 - DNA, 709 bp, Unknown
  Bacterial polypeptide expressing nucleotide sequence isolated from the Sargasso Sea
atgacagagctaaaaaacattgatataaatgaattaaaaaaattctcatcaagagcaaatagttggtgggatcaaagcggagacttcaaaacactacaccacataaattcaactagattgaaatttataactaataaaattaatttaaaagggctgcatgtcctagacattggctgtggcggtggtattttaactgaatcaatagcaaggcaaggaacgtacaccaccggaattgatgcgagtgaggaaaatatagctattgcatcacaacatgcatcaaaaaataatttagaaattaactacctcgtaacaaatgcagaggaattatccaaaaaaattacaaataaatttgacttaataacatgtatggaacttttagaacatgtcccagatccacaatcaattattgaggcatcgtatatgatgataaaaccaggtggtcatattattttttctacaatcaaccgtaatttaaaatcttatatgttagctatagtcgctggagaatatttattaaatcttttaccaaaaggtacgcatcaatatgaaaaatttattcgaccttctgaattaattaaatggtgtaataaatttaatctcacagcaaatgatttatctgctattaagtataatccattacttaagacttgcaccctggcaggtgcgccggatgttaattatatacttgatgtaattgcagatgattaaa

SEQ ID NO: 227749 - DNA, 700 bp, Unknown
  Bacterial polypeptide expressing nucleotide sequence isolated from the Sargasso Sea
tatgactgaaaatatagatcatcaagaggtaaataaatttgcagagctggctgatgaatggtggaataaaaatggagactttaaaccactgcatgttatcaatcctttaagggccaactacattaaggaaaaattagatctcgaaagtaaatctattctagatgttggttgtggtggaggcttgcttacagaagctctatatgactctggtgcaaatgtaactggaattgacgctgcaggtcctggtatagaggttgctaaaatccatgcaagcaaaggtaacaaaaaaattaattactttgaacaaactgctgaggaattattaaacaaaaactcagaattgtttgatgtggttacttgcctagaagttttggagcatgtgcccgatccgaaatcacttgtaaaaacatgtatccaacttttgaaacccaatggtcatctttttttatccactattaatagaaatccaagatcatggatcacagcgattgttggagcagaatatatttttaatctgttaccaaaaggtacccatgaattcgataaatttatcaagccatctgagcttgcatcttatgttcgatctggaaatgcgaacttacttgaaacaaaaggaatgttttataacccaattacgcataaagctaatttgaacaatgatcttggtgtgaattatttaatgcatgcaaaaaaaatataa

SEQ ID NO: 227750 - DNA, 700 bp, Unknown
  Bacterial polypeptide expressing nucleotide sequence isolated from the Sargasso Sea
atggataaaaatatagatcaaaatgaagtaaacaagtttgctgaacttgctgataaatggtgggattcttacggtgaattcaagcctcttcacaatataaatccaataagatctcaatatatttcctccaaaacagatttaaaagggaaaaaagtcttagatgttggatgtggtggcggtttattaactgaagcactttatgacctaggggcagaggtcgacggaatcgatgctgctggtcctggcattgaggttgctaagattcatgcgaaaaaagaggataagcaaattaattatgcaacagctcaagctgaagatttttgcattgataaagagggttattatgacgtagttacttgtttagaagttttagaacatgttccaagtccagcctctttggttgaggcatgttcaaaaatgctcaaaaaagatggtcttttatttctttctacgattaatagaaatcccagatcgtggataacagcaattgtgggggctgagtatatttttagtattctgccaaaaggaactcatgaatttgaaaaatttataaaaccatctgagcttagtgaatatatggaaaacacatcagtgagacttatagaagctaaaggtatgttctacaaccctcttactcatcatgtaaccctcaacaatgatttaggagttaattacatgatgtatggaatcaatgagtaaa

SEQ ID NO: 227751 - DNA, 727 bp, Unknown
  Bacterial polypeptide expressing nucleotide sequence isolated from the Sargasso Sea
aatgactacagtaaatcaagaggaaattcaaaagttttcaaaattggctgatcagtggtgggatgctaatgggaaatttaaacctttgcatacttttaaccctataagaattaaatatattattgataagtgctcctctcattttaaattgaataaacaagagaacaagactctttcaaaattaaaaattttggacattgggtgtggaggcggacttgtatgcgaaccgctaactagattgggtgctcaggtgacgggtatagacgcctcttacaagaatatcgaagtagcaaaaattcatgcaaaaaaaagtaatttaaagattaaatatttaaatgcctctcctgaaaaaaataaaataaatgaaaaatttgatgtaattttaaatctggaagttgtagaacatgtagacaacctagatttatttttaaaatcttcaagtaaacttttaaaaagaaacggaattatgtttatagcaacaataaatagaacatttgaatcttatattaaagcaattattggagcagagtatgtgttaagatggctcccgattggaactcatgactggcaaaaatttctgaaaccagaggaaattgaaaaaaaatttaaacaattaaatttagataagacagatttaaatggactaaaatttaatattttttcaaataattggagtttgagttcagattgttcggtaaactacattattgttgcgaaaaaaagttag

SEQ ID NO: 227752 - DNA, 724 bp, Unknown
  Bacterial polypeptide expressing nucleotide sequence isolated from the Sargasso Sea
atgactagtgtaaataaaaaagaaatagataaattttctaaaatggctgacgaatggtgggatccagaaggaaaatttaaaccacttcataaatttaatccaacaagaattaaatatttaaaggaaaatatagtttacaattttaaattaaaaaataaatccaaacctttatcaggaataaaaattttagatattggatgtggtggaggattgttatctgaaccaatgtcaagaatgggtgctaatgtaacaggtattgatgcatctgataaaaatataaaaattgcaaaagttcattcaaaaaaaaataaactaaaaattaattatttatgttcatcaccagaaaaacttaaaattggaaagaaatttgatgtaattttaaatatggaaattgttgaacacgtggaagatatagatttttttctaaagtcatgctcaaaacttttaaaaaaaaatggactgatgtttgttgcaacaataaataaaactttgaaatcttatgtttttgcaattgtgggagcagaatatgttttgaggtggcttccaatcggaacacacgaatgggaaaaatttgttaaaccagaggatcttaaaaaaattttaatgaaatacgatttatctctcaataaattagagggtatgaattttaatattattaaggacgaatggagtatttctagagatttatctgtaaactatattgcgaagtttattaaaaactaat

SEQ ID NO: 227753 - DNA, 724 bp, Unknown
  Bacterial polypeptide expressing nucleotide sequence isolated from the Sargasso Sea
atgactagtgtaaataaaaaagaaatagataaattttctaaaatggccaatgaatggtgggatccagagggtaaattcaaaccacttcataaatttaatccaacaagaataaaatatataaaagaaaatattattaataatttcaaattaaaaaataaattaagacctttatcaggaataaatattttagatattggatgtggtggagggttactatcagaaccaatgtcaagaatgggagcaaatgttacaggtatcgatgcatctgataaaaatataaaaattgcaaaactccattcaaaaaaaaataaactaaaaattaattatttatgttcatcacccgaaaagcttaaaattacgaaaaaatttgatgtaattttaaatatggaaattgttgaacatgtagaggatatagatttttttttaaaatcttgctctaaacttttaaaaaaaaatggactaatgtttgttgcaacaataaataaaactttgaaatcttatatttttgcaattgttggagcagaatatgttttgagatggcttccaattggaacacacgaatgggaaaaatttgttaaacctgaagatcttaaaaaaattttaatgaaatatgatttctctctaaacaaattagagggtatgaattttaacattattaaagatgaatggagtatttctagtgatttatctgtaaactatatagcaaagtttattaaaaactaat

SEQ ID NO: 227754 - DNA, 277 bp, Unknown
  Bacterial polypeptide expressing nucleotide sequence isolated from the Sargasso Sea
atgaaagctgttattgatacaatagaccccaaagaagtagcaaaatttgaggccatggctgatgagtggtgggaccctgatggaaaatttaagcctttgcatatgctcaacccatgtaggcttgattatattgtaagccaaatagccttggaatttgaccgcgatgtcaagagcaaggagcctttcaaaggtttgaatatattagatatcggttgtgggggaggtcttctctgtgagcctatggcgcgcttaggtgctactgtagttggggtagatg

SEQ ID NO: 227755 - DNA, 730 bp, Unknown
  Bacterial polypeptide expressing nucleotide sequence isolated from the Sargasso Sea
atgaaaagaagcacaataaataaagaagaaatagataaattttcaaagatggcggaggaatggtggaatccagagggaaaatttaagcctttacataaatttaatcctataagaattaaatatattagagatagtattataaaaaatttcaaaatttataatagtaatttaccattaaaaaatattaatattctagatattggatgtggtggtggtttactttcagaaccaattagtaggttaggagcaaatgtaactggaatagatgcatcactaaaaaatattaaaattgccagagcacatttaaaaaaaagtaaactaaaaattgattacaaacatatttcacctgaaaaattaaaagtaaaaaaaaaatttgatgtaatattaaatatggaaattgttgaacacatagaagatctggaactttttattaaaacaagttccaaactcttaaaaactaatggtctaatgtttgttgcaacattaaataaaactttaaaatcatttatatttgctattataggcgcagagtatgtacttagatggttaccgatcggaacgcatgattgggaaaaatttgtagaaccttctaaattaattagttatggaaataaattttcacttaaactaaataaaattgatggtttaaaatttaacccattaaataataagtgggatataagtaatgataaatcagtaaattatattaccgaattcaaaaaattctaat

SEQ ID NO: 227756 - DNA, 412 bp, Unknown
  Bacterial polypeptide expressing nucleotide sequence isolated from the Sargasso Sea
tcagttacgaagaatcgcggcggaagcgctcgcggctcgcgaaccaggcacgtatgacgtcgtcacctgcatggaaatgctcgaacacgtgcctcaaccggcagccatcgtcgaggcgtgcaagacattggtgaaaccgggcgggtgggtattcttctccacgctcaaccgcaacgtgaagtcctatctgttcgcggtcattggcgccgaatatatcgcgcggatgttgcccaagggcactcatgactacgcgcgcttcatccgcccgtcggaactggcgagcttcgtgcgcgccgccggcctgcgcaccgccgatatcaaaggtatcgtttataacccgctcagcaagcatttcacgctgtccaacgacacgagcgtgaactacatgctcgcttgccgccgcgacgcctga

SEQ ID NO: 227757 - DNA, 472 bp, Unknown
  Bacterial polypeptide expressing nucleotide sequence isolated from the Sargasso Sea
tatgactgcagatgcaaaacagccccaagttaacgtcgatccggatgaaatcgctaaatttaacgatatcgcctcacgctggtgggatccggatggtgaatttaagcccttgcatttactaaacccggtacgcctgagttatatcagtgacgagttgcagggcctgtttggtaaaacagttatcgacataggttgtggcggcggtattctggctgaaagcatggcacgcagcggggccaatgtgaccggtcttgatatggcgcaagactcgctgaatgtcgccagactgcatgcactggaagctggcgtgacgattaactatcaacaagccacagccgagcaatatgcagcagaacacggtgagcaattcgatgtcgttacctgtatggagatgctggagcatgtgcctgaacctatgtcagtgattcaggcttgtgcggatttggcaaagccaggcgccaccctattcttc

SEQ ID NO: 227758 - DNA, 712 bp, Unknown
  Bacterial polypeptide expressing nucleotide sequence isolated from the Sargasso Sea
atgaacataaaaaatttagatcatgatgaagtaaataaatttgacgaacttgctgcaaaatggtgggacaaggatggtgaatttaagccacttcatcaaattaatcccttaagagtcggttttattaaagaaagatcttctatggaaggtaagaaagttctagatgtaggatgtgggggtggtatccttgctgaagctctcaacgaattgggtgctagcgttactggtatagatgcttcagaaaatactataggtgttgcaaaaactcactctaagtctataggaagcaatgttaaatacatacaaaatacaattgaagagtttacatcctcatatccagacgaaagatttgatgtaattacttgtctagagatgcttgaacatgtcccttcaccttttgaaattataaagagctgctctaatctcttgaaagaagatggaaacatatttttttcaacaataaatagaaacccgagatcctacctttttgctgttataggagcggaatacatattaaatcttcttccgaaaggaacacatgattacgaaaaatttataaaaccttccgagttagcaaaatggattagagatgcaggcctaaattccaaagaaacaataggactaagttataaccccataaccgataactattggcttggtaaagatatccaagttaactatatggttcatgcaaaaaaggaaagcatttgaa

SEQ ID NO: 227759 - DNA, 633 bp, Unknown
  Bacterial polypeptide expressing nucleotide sequence isolated from the Sargasso Sea
aatggaaaatttggaccctgaggaaattaaaaaattcaatgaaatggcttctacttggtgggacccaaacggcgactttaaagcgctccatgacattaatccaagccgtttagattacattttgagcagggtaagaacaccgctatcagccgttttggatgtaggctgtggcgggggcatcttgaccgaatctttagaagcgcacaccaccgaaataattggaatcgatgccgctcccaaacctctcaaggttgctcagctacacgcgattgatcaggatttagaaatcgactaccgattaagtaccgtggaaaccttgtctaaggaatacagaaaccactttgatgtgttgacctgcatggaattgttagaacacgtcacagattttgcttcgaccgtaagtgcatgtgcagatttgacaagacctggaggccatctcttcttttccacgataaaccgaaaccctatttctttcctcaagttgattattggggcagaagagatattgaaaattctacccagagggacacacgaatatcaaaaattcatcaaaccttcagagctagccaacgctctgaggattgcaaatttaaagctcctcgacatcagtggaatttcttacaacccgtttac

SEQ ID NO: 227760 - DNA, 580 bp, Unknown
  Bacterial polypeptide expressing nucleotide sequence isolated from the Sargasso Sea
atgcacaatatcaacgatgccgaaatcaaaaagttcgacgagctagctcataaatggtgggatagagacggcgaattccgagccctacacgatataaaccaactgcgtctggacttcattcttcagagatgtaatttgacaagtggtccagccattgatatcggctgtggaggaggaattcttacagaaagtctcgccaaaatttctccggcaaacgtcaccggtatagatctagccaataaggcgctggaagtggcaaagctgcacgcacaaatctccggagttgaagtagattacaaagccacctccgccgaagacctgtctatcgaatatgacagccactttgagacactctcatgtatggagatgctggaacacgtgcccagcatagaggagagcattgactcatgtgcaagactcgtcaaacctggcggcaacttgtttttctcaacaattaatagaacgccaaaggcctatctttatttaatcattggtgccgagtatattctgaacattctgccgcgcggcacccatgaatttgacaggttcataaagccttcagaactagccgctgtctgcg

SEQ ID NO: 227761 - DNA, 388 bp, Unknown
  Bacterial polypeptide expressing nucleotide sequence isolated from the Sargasso Sea
aatgaaaaacgtagacgacatagaaattcagaaatttgaagctctcgctcaccgatggtgggaccctaatagcgaatttaaacctcttcatgacataaatcctctgcgcgtcaactatatatcgagaaccacaggtttagcggaaaaagaagtcctagacattggatgtgggggaggaattttagcggaagcactggcaaaccatggggcgagagttactgcaattgatttggcagaagcatctttgtctgtagcaaagatccacctactagaaagtaaactggatatagactatcgtttctcctcggctgaggaaatcgccaaaaaagaatcgcaacgttacgatatagttacctgcttagaaatgctggaacacgtccccgatcct

SEQ ID NO: 227762 - DNA, 619 bp, Unknown
  Bacterial polypeptide expressing nucleotide sequence isolated from the Sargasso Sea
ttgcatgaaattaatccgcttcgtttagactttattaaccttcacagtaaggggctatttgaaaagcaaactttagacgttggttgtggtggcgggattttatccgaaagcatggcaaaattaggcgctaaagtaaccggtattgatatgggtgaagagccacttaatgtggcgaaattacacgcccttgaatccaacattgatattaactacaccaaaacgactgccgaactcttcgctgacagccaccctaatcaattcgatgttgtaacctgtatggaaatgttagagcacgttcccgatcctgaatctatcatttactctctcgctaagatggtcaagcctgatggacatgtgtttatgtcaacgcttaataaatcagttaaaggctatttatatggcattgtagctgcagaacaagtactagggctcgtgccaaaaggcacgcatgattacaataagtttataaaacctgcaaccttaattggttgggctgaaaagtatggcttgaaagcgcgagtgatacgtggactaaattatcacccaattagtcaaacttatagtttaaataacgatgtttcggttaattatatgatccactttgaacggatagcataat

SEQ ID NO: 227763 - DNA, 484 bp, Unknown
  Bacterial polypeptide expressing nucleotide sequence isolated from the Sargasso Sea
atgaatgccgaaaaacagccggtggcccacaacgttgatcatcatgaaattgctaaatttgaagccgtcgcctcgcgctggtgggacttagagggcgagttcaagcccttacatcgtatcaatccgctgcgtcttggctatattgcggagcgttctggcggcctgtttggcaaaaaggtactcgatgttggctgcggcggcggcatccttgccgagagcatggcgcgtgaaggcgcaacggtaaccgggctcgacatgggctttgaaccgctgcaggtagcgaagctgcacgcgctggaaagcggcgttcaggtcgagtatgtccaggagacggtagaagagcacgcggcgaagcacgccggtcagtacgatgtggtgacctgcatggaaatgctggagcacgttccggacccacaatcggtggtgcatgcctgcgcacggctggaaagcccggcggtcaggtcttcttctcgaccattaaccg

SEQ ID NO: 227764 - DNA, 466 bp, Unknown
  Bacterial polypeptide expressing nucleotide sequence isolated from the Sargasso Sea
gaggcgccgctgtcagtcgcgcggctccatcaaatggaaagcggcgtcacagtggattaccagcaaagcaccgcagagtctttagcagagcatcgcgcaggcgagttcgaggtcgttacctgcctcgaaatgctggagcacgtgcccgatccctcgactgtgattcaggcctgtgcggacctttgcaggtcggggggagatctgttcttttcgacgattaaccgcaacccaaagtccttcctattcgccattgttggagcagagtacattttgaatctgctgcctcggggcacacacgaatatgataaattcatcaagccatcagaactggctcgctggattcgcgaggccggtttggagatgcaggaaatgatgggcatgacctacaatccgttgactaagcgatatcggctgacgccagacgatatatcggtgaattatctgatcagagcaaagaaaccgtgac

SEQ ID NO: 227765 - DNA, 745 bp, Unknown
  Bacterial polypeptide expressing nucleotide sequence isolated from the Sargasso Sea
atgaaaacggtatcatcgataaatgttgaagaggtaaaaaaattcgagcaattagcaaacgagtggtggaatacagaaggaaagttcaagccacttcatatgttgaacccatgtagattagaatttatcacagaccacttatccatgcattttaaaaaagatttgaccattgataaaaagcctttaaaggggcttaaaattttagatataggctgtggtggtgggttgttgtgtgagccaatggccaggctgggggcagaagtccttggcatagatgtggttgagaaaaatattaaggttgcgtctttgcatgccaaaaaaatgaaacttgatatagactatcgtcacatttcagcggaagatctactaaggaaaaagcctaaatttgatgtaattcttaatatggaagttattgagcatgtagaaagcccagcttttttcatagaaatatgctcaaatcttcttaagaccagaggtctaatattttgttcaacaatcaataaaaatttcaaaagctacttgttcgcaattttgggggctgaatatataatgcagtggttgccgaaaggaactcatgattggaataagttcatcaagccaagtgaattaagcaagttattttttgactcaggtcttagagtaaaggatacaaaaggttttgtatttaatccacttgcctggagttgggaactgtcaaaaagagactttacagtaaactactctatctgtgccacgaaggaataag

SEQ ID NO: 227766 - DNA, 620 bp, Unknown
  Bacterial polypeptide expressing nucleotide sequence isolated from the Sargasso Sea
catgcaacagaataccaacgtggacccgcaggaaatcgcaaagtttgaacgtatggccgaaacctggtgggatctcaacggcgagtttaagccgctgcatctattaaatcccctgcgccttaactatatcgatcaaacggcaggcgggatttttggtaagaaagtgctggacgtcggctgcggcggcggcattttatccgaaagcatggcgcgcatcggcgcggaagttcacggcctcgatatgggtgaagaaccattagaagtcgcgcgtttacatgcactggaaactggcgtgagcatcaactatgtcaaaaacaccgccgaggcccatcgagaagatcaccgcgaatactacgatgtggtgacttgtatggagatgctcgagcatgtgccagatccacaatcagtcattcaagcctgctgcgatatggttaaacccggcggttttgtgtttttctcaaccatcaaccgtaacattaagtctttcgtcgagaccattatcggcgccgagtacctattaaagatgctgcccattggcacccatgaccataataagttcatcaagccatcggaactcatggccttagtcgataacaccgatcttctctgtaaagatgcac

SEQ ID NO: 227767 - DNA, 736 bp, Unknown
  Bacterial polypeptide expressing nucleotide sequence isolated from the Sargasso Sea
atggaacacagcagcataaatccccaagaagtaaagaaatttactgagcttgctaatgaatggtggaagcctaatggtaaatttaaaactttacacaaatttaatccatcaaggctagattttatcatcagaaatataaaattaaactattccatatctgacaatataaaacaaagaccacttgagggtttatcaattttagatattggatgtggtggtggcttgttatgtgaaccattatcaagactcggtgcaaatgtaactggaattgatgcatcaaaacaaaatatcgaggcagcatcaatacatgcaaaaaataataatctaaatattaattatatccataccacagttgaggagttagatattaaaggaagttttgacacaatactaaacatggaagttgtggaacacgtaaataatcaaaaagtatttataaaaagaagttgtgaactattgaataaaaatggacttatatttattgctacattaaataaaactttattttctcttatttttgcaaaatatactgcagaatatatactcaatttcttaccgagagggacacatgactggaataagtttcttactcctgaagaagtttactcatttctaattcaaaataattgtgaagttaaagaatctgtaggtataaattttaatccactcttaaatagttggaatgtgtcgaaaagtatgaaagcaaactttattgtgacaggtaaaaaaaattaat

SEQ ID NO: 227768 - DNA, 685 bp, Unknown
  Bacterial polypeptide expressing nucleotide sequence isolated from the Sargasso Sea
gacgagatagctaaattcgaggctatggcagaggaatggtgggatccaaacggtaaattcaagcccctgcacatgcttaatccatgccgtttagattatataattgctatgataagaactgagtttggatgtgacccaacaaacgccaagccgtttgatgggttgagaattcttgatataggctgtggtggtggtttgttatgtgaaccgatggctcgtcttggagcacaggttgttggtgttgatgcggcggaacgaaacattcctgtcgctatggcacatgcaaaacaaagtaacctcaagattgattaccgccacgggacagctgagggtttattggccgataccgaaaggtttgacgtcatattaaatatggaagttatagagcatgtagctgatccctccggttatataaaaacttgtgaggctttattgaaagatgggggattgatgatttgttcaacgttaaatcggaatcctaaaagtttcattatggcaataatcggagctgagtacgttatgcgttggttgccaaaaggaacccacgaatggtcgaaatttttcaggccgcgggaattagaggatataatcactaaagcaggtttgaaaatggttgataaaaaaggttttgtcttcaatccgatttcttggcagtggagtatttctgacaaagatctttcagtaa

SEQ ID NO: 227769 - DNA, 640 bp, Unknown
  Bacterial polypeptide expressing nucleotide sequence isolated from the Sargasso Sea
aatgaagaacgtagacgacatagaaattcaaaaatttgaagctttggctcaccgatggtgggaccctaatagcgaatttaaacctctacatgacattaaccctctgcgcgtcaactatatatcaagaaccacagttttagcggaaaaagaaatcctagatattggatgtggcggaggaattttagcggaagcactggcaaaccatggggcaaatgttactgcaattgatttggcagaagcatctttgtctgtagcaaaaatccacttactagagagcaaattagatatagactatcgtttcacatcagctgaggaaatggccgaaaaagatccgcaacgtttcgacatagtaacctgcttagaaatgctggagcatgtccctgatcctgcctccatagtcaacgcatgtttcaaactagttaaacctggaggatttgttttcttttcaacaattaatcgaaatccgaaatcgtatcttttcgcgatagtgggcgcagaatatatcttaaatttactaccaaagggtacacacgaatatagtaaatttattaaaccctctgagttggcaaaatggtgcagagatgtcgatttgaaaactcacgaccagatcggtatgggatataatcctctaacaaaacgc

SEQ ID NO: 227770 - DNA, 247 bp, Unknown
  Bacterial polypeptide expressing nucleotide sequence isolated from the Sargasso Sea
tatgaccgagcatcaaaatgtagataatgcagaaattgcaaagtttgaagccatcgcagaacgttggtgggaccgcgacggagagttcaaaccccttcatgaaataaatcctctacgtttggattttgtcgctgataaagtaggcggcttatttgataaggaaaccttagatgttggctgtggtggcggcatcttaagtgaaagtatggcgcgtatgggcgctaaagtaaccggcatcgatatgggc

SEQ ID NO: 227771 - DNA, 654 bp, Unknown
  Bacterial polypeptide expressing nucleotide sequence isolated from the Sargasso Sea
aatgcccagcagtggcaggaaaaaatcgccggagccgaccgtgactgaacagcaaacccagattcccaatgtagacgccggcgagatcgccaaattcaacgccttggcagagcagtggtgggacccgaattccgagttccgcccgctgcatgacatcaatccgctgcgactaaactacatcgacgagcgcgtcagcctgcccggcaagaaagtcatcgacatcggctgcggcggcggcctgctgtccgagggcatggcccgccgtggcgccgaagtcaccggtatcgacatgggcgaggcaccgctgtcggtggcacgcatccacgcggagaaagccggcgtggcggtggaataccggcagattccggcggaacagatcgccgaggaacggcccgcccagtacgacgtggtcacctgtctggaaatgctggaacacgtgccggatccgtcatccgtgatccgcgcctgcgccaccctggtaaaacccggtgggcagattttcttcagcaccatcaaccgcaaccccaaggccttcctgttcgccatcgtcggcgcggaatacgtgctgcgcctgctgccacggggcacccacgagtacgccaagctgatcaaaccctcggagctggccggctgggcccgggacgcgggactgga

SEQ ID NO: 227772 - DNA, 436 bp, Unknown
  Bacterial polypeptide expressing nucleotide sequence isolated from the Sargasso Sea
agtaatgtggaaattgattatcgacataccacggtggaaaccctcctcgaaaaggaagaaggctcgtttgatgtcgtctgctgtcttgaaatgctcgagcacgttcccgatcccgcctcagcggttgaggcttgttcgaaacttgtgcgtccaggcggcagtatcttcttctccaccattaaccgtaatctgaaggcctttgtgtttgccattgtcggagccgagtatgttctctcgctgcttccccgcgggacacatgattacaaaaagtttattcgcccatccgaactcgacggttgggcgagatccgccctgttatcgctttcctccatcacaggtatgcattacaacccgatcaccaagcgctacaccttaggcgacggtgttgacgtcaactacctctgccactactcaagccccaccggcgctgagtgaa

SEQ ID NO: 227773 - DNA, 442 bp, Unknown
  Bacterial polypeptide expressing nucleotide sequence isolated from the Sargasso Sea
gatgcccctagatgacaacgtcgaccaagatgaaatcgccaaatttgagaaactggcgtcccgctggtgggaccccaacagcgaattcaaaccgctccacgacatcaatccgctgcgcgctggctggattgaccagcatgccgacgtgaaaggcaaaaacgcactggatgtgggttgcggtggcggactgctctgcgaggcactggcgcaccgaggcgccaccgtcacgggcatcgatatgggagaagcgccgttggcggtagctcggcttcatcagctggagagcggtgttgaaatcgactacgtgcagagcaccgccgaggccatggcggccgagcagcgaggcaccttcgaggtggtcacctgtctcgagatgctggagcacgtacccgacccctccaccgtgatccaagcctgcgccgacctggtcagcccggcggcg

SEQ ID NO: 227774 - DNA, 695 bp, Unknown
  Bacterial polypeptide expressing nucleotide sequence isolated from the Sargasso Sea
catgacgaacgtcgatcaacaagaaattaataagttctctgaactcgcttctcgctggtgggatccagaaggtgaatttaagccattgcaccttattaacccacttcgcttagacttcattaatcaacacagtgaaggcctgtttgacaaaaaggtcgtcgatattggctgtggtggcggtattctagcagagtctatggcacgtgcaggcgcgacggtaacaggtttagatatggcagaagcctcgttagaagtagcgaagctgcacggtttagaatcaggtataaaagttgactacgtatgttcaactgccgaagcattcgcagaagcaaatgcgggacagttcgacgtggtgacctgtatggaaatgttggagcatgtacccgacccggcttctgttgtgctggcctgtgctaagttggttaagcctggtggccatgttttcttttctacgcttaaccgaaacctaaagtcgtatctgatggggatcgtaggagcggaatatatccttaaactggttccaaaaggcacccacgatcacagtaaatttataaagccgtctgaacttatgtcgatgacagaccaagcaggtcttttaccccgtgatatgacgggtttgcacatggacccaatttcgcagggcttttatctttcgtctaataatgtagacgtaaactacttactatatacagtag

SEQ ID NO: 227775 - DNA, 709 bp, Unknown
  Bacterial polypeptide expressing nucleotide sequence isolated from the Sargasso Sea
catgagtcttaacgttgatcgcgctgaaatcgccaaattcgaggcgctggcaagccgctggtgggaccgtaacagcgagttcaaaccgctgcacgagatcaacccgctgcgtaccaactggatcgacgaacgcgccagcctggccggcaagaaggtgctggacgttggctgcggtggcggcattctggctgaggccatggcccagcgcggcgcccaggtgaccggcatcgacatgggcgaggcgccactggccgtcgcccgcctgcaccagctggagtccggcgtcagcgtcgactacgagcaaagcaccgccgaggagtttgccgagctgcacgccggcacctttgacgtggtgacctgcctggagatgctcgagcacgtgccagatccaagctcggtgattcgcgcctgcgccaaactggtcaagccgggcggccaggtgtttttctccaccatcaaccgcaatcccaagtcgttcatgttcgccatcgttggcgccgagtacgtcttgcgcatgctgccgcgcggaacccacgaatttgccaagttcatccgcccggccgagctgggccgctgggttcgcgacgccagcctggacctgcaggacatcaccggtctgaccttcaacccgctgacccgcacctacaagctgggcgccgacgtagacgtcaactacatggtgcactgccagcgcgaggcgcaggcttga

SEQ ID NO: 227776 - DNA, 454 bp, Unknown
  Bacterial polypeptide expressing nucleotide sequence isolated from the Sargasso Sea
gcaaagctgcacgcacaaatcgccggagtgaaagtggattatagagctacctccgctgaagatctgtctatcgagtatgacagccattttgagacactctcatgcatggagatgctagaacacgtgcccagcatagaggagagcattgactcttgtgcaaaactcgttaaacccggcggcaacttgtttttctcgacaattaatagaacgccaaaagcctatctttatttaataatcggtgcggagtatgttctgaacattctgccgcgcggcacccatgaatttgaccggttcataaagccttcagagctagccgcttgtctgcgcaaatctcgactagaaatcgttgaaatggctggaatgcaatacgaccctttcaagagaacttgcagtctcaatagtgacctctctaccaactatattgttcacgctcgcaaacccctaacgaaataat

SEQ ID NO: 227777 - DNA, 637 bp, Unknown
  Bacterial polypeptide expressing nucleotide sequence isolated from the Sargasso Sea
ctggcgcagcgcaacatgacgaccactcacgcgaacgccgatcccggcgaactcgaaaaattcagtgaactcgcccaccgctggtgggacccgaacagcgagttcaaacccttgcacgaaatcaacccgctgcggcttgactggattcagtccatcacgccgctggcaggcaaacgcatcgtcgacgtgggctgcggcggcggcatcctctcagagagcatggcgcgtgccggggccatcgtcaaaggcatcgatctctcccgcaaagcattgcgtgttgccgacctgcatagcctcgaggcgggcgttaccgtcgattacgaggagatcgccgcagaagcgttggccgcacgcgagccgggcagcttcgatgtcgtcacttgcatggagatgctcgaacatgtgcctgatccggcgtcggttgtgcgcgcttgcgcgacgctggtcaaaccgggtggatacgtctttttctccaccatccaccggaatgccaaggcgtatctgctggccgtcattggcgcggaatatgtcctcaacatgctgccacgcggcacgcatgattacgctaagttcatccgcccgtcagagctgagcgcgttcgtacgcgcggccggccttcaggcgcaagagatgcgcg

SEQ ID NO: 227778 - DNA, 721 bp, Unknown
  Bacterial polypeptide expressing nucleotide sequence isolated from the Sargasso Sea
tatgacaaataaagctgtaacaaatgtagacccacaagaaattgataaattttctcaactcgcctctcggtggtgggaccctgagggagagtttaagccccttcacctcataaaccctcttcgtctggactttatcaatcaaaatgcacaaggcctctttggtaaaaccgtgatcgacataggttgcggtggtggaatactggctgagtcaatggccaaagccggtgctgcagtcactggcttggacatggcccaagcttctctagaagtggcaaagcttcacggtctggaatcaggcgccaaagttgactacgtttgctcaactgctgaggactttgccgctgataacgctggcaagtttgatgtagtcacctgcatggagatgcttgaacacgttcccgatcctgcctcggtagtttctgcatgcgctgcgctagctaagcctggagggcatgtgttcttttctacgcttaatcgaaatataaagtcgtatttgatggggatcgttggtgctgaatatgtccttaaattggtccctaaaggtactcacgatcacagcaagttcttgaagccttctgaacttatgtcgatgactgacaatgcgggtttacttccccgagacatgacaggccttcatatggatccggtcacacaagggttttatctttctgctgataatgtggatgttaattacctactatatacagtagtaccagattaa

SEQ ID NO: 227779 - DNA, 652 bp, Unknown
  Bacterial polypeptide expressing nucleotide sequence isolated from the Sargasso Sea
atggaaaatttggatcctgaggaaataaaaaaattcaatcaaatggcttctacttggtgggacccaaacggagactttaaagcgcttcatgatattaatccaagtcgtttagattacattttgagcagggtaagcaaaccactagcagcggttttggatgtaggctgtggcgggggtatcttgaccgaatctttagaagcgcacactaacgaaataattggaatcgatgccgctcccaaacctctcaaggtggctcagctacatgcgattgatcaggatttggaaatcgactaccggttaagtaccgtggaaaccttgtctaaagaatatcaaaaccactttgatgtgttgacctgcatggaattgctagaacacgtcacagattttaactcgaccgtacaggcatgtgcagatttgacaagacctggaggccatctctttttttccacgataaaccgaaaccctatttctttcctcaagttgattgttggggcggaagagatattgaaaatcctacccagaggaacacacgaatatcaaaaattcatcaaaccttcagagctagccaatgctctaaggattgccaatttacagctcctcaacatcagcggaatttcttacaacccgttcacccgtaaaactcggatcgaca

SEQ ID NO: 227780 - DNA, 712 bp, Unknown
  Bacterial polypeptide expressing nucleotide sequence isolated from the Sargasso Sea
catgaacatagaaaatttagatcatgatgaagtaaataaatttgatgaacttgccgctaggtggtgggataaagatggagaatttaagcctcttcatcaaataaatccattaagagttggtttcattaaagagagatcagcactagaaggaaaaaaagtgttagatgttggttgtggtggaggtattctttctcaagctcttggagaattaggggcagaagttatcggtattgatgcttcagagagaacaataggtgtagcaaaggcacattcagaattaataaagagtgatgttgaattttttcaacagacaatagaagattttattgcttctaatccgaataaaaaatttgacgtaatcacgtgcttagaaatgctagagcatgttccctcacccggagatataatcaaaagctgctctaatctcttaaatgataatggagatattttcttttcaacaattaatagaaatccaaaatcttatttatttgcagttataggtgcagaatatattttaaatcttcttccaaagggtactcatgactatgagaaatttattaaaccctccgagcttgccaaatgggtaagagatgcaggcttaactagtaaagagacgattggtttgagctataacccgataactgataattattggcttggtaaagatattcaagtcaactatatggtgcacgcaaaaaaggaagtagtttga

SEQ ID NO: 227781 - DNA, 712 bp, Unknown
  Bacterial polypeptide expressing nucleotide sequence isolated from the Sargasso Sea
atgcaacagaataccaacgtagacccacaggaaatcgcaaagtttgaacgtatggccgaaacctggtgggatctcaatggcgagtttaaaccgctgcatctattaaatccccttcgcttaaactatatcgatcagactgctggtgggatttttggtaaaaaagtgctcgacgtcggttgcggcggtggcattttatccgaaagtatggcgcgcatcggtgcagtggttgatggtcttgatatgggtgaagaaccgttagaagttgcacgcttgcatgcgctggaaaccggtgtgagcatcaattacgtgaaaaacaccgccgaggctcatagggaagatcaccgcgaatactatgatgtggtgacctgcatggagatgctcgaacacgtacccaatccccaatcagtgatccaagcctgctgcgatatggtaaaacctggtggttttgtgtttttctctacaattaatcgcaatgttaaatcctttgttgaaaccattattggcgccgaatatttactgaaaatgctgcccatcggcactcatgatcataataagtttattaaaccttccgaattgattgagttagtcgataacaccgacctcatctgcaaagacgcccttgggatcacttataacccgttaacagggatttttaagtacacatctaaggtcgatgtaaactatatgatagcaacgcaaaaggcagattaag

SEQ ID NO: 227782 - DNA, 706 bp, Unknown
  Bacterial polypeptide expressing nucleotide sequence isolated from the Sargasso Sea
atgacgaacgtcgatcaacaagaaatcaataagttctctgaactcgcttcacgctggtgggatccagaaggcgaatttaagccattgcaccttattaacccacttcgcttagacttcattaatcaacacagtgaaggcctgtttgacaaaaaggtcgtcgatattggctgtggtggcggtattttagcagagtctatggcgcgtgcaggcgcgacggtaacaggtttagatatggcagaagcgtcgttagaagtagcgaagctgcacggtttagaatcaggtgtaaaagttgactacgtatgttcaactgccgaagcattcgcagaagcaaatgcgggacagttcgacgtggtaacctgtatggaaatgttagagcatgtacccgaccctgcttctgttgtactggcctgtgctaagttggttaagcctggtggccatgttttcttttctacgcttaaccgaaacctaaagtcgtatctgatggggatcgtgggagcggaatatatccttaaactggttccaaagggcacccacgatcacagtaagttcatcaaaccatctgaacttatggcgatgaccgatcatgctggtttgctgcctcgagatatgacaggtctacacatggacccaatttctcaaggcttttatctctctgcgaataatgtcgacgttaactacttactatatacagtagcgcaaaattaat

SEQ ID NO: 227783 - DNA, 694 bp, Unknown
  Bacterial polypeptide expressing nucleotide sequence isolated from the Sargasso Sea
tatgaataactttgatcaacaagaattagataaattttctaaattagctgatgaatggtggaatccaaatggtaaattcaaaccacttcatttaattaatcctctacgtgttagctatatagaagataaggtagagcttagaggattagatatccttgatatcggttgtgggggaggtattttatctgaagctctatcccaaaaaggtgctaatgtaactgcaatagatctagcagatgggcctttagaagttgcgaagataagacaaaaagaatctaaacttgatatcaggtatgaaaaaaagagcacttcagaacttgtcgatgaaggaaataaatatgatgtaataacttgcctagaaatgttagagcatgtgcctgatccagctgaaatagtaaaagattgtgcagacctaacaaaaaatggaggtcatttattcttttcaaccataaatagaaatttgaagtcgtttgtttttgcaattctcggagcagaatatattttgaatatacttccacaaggcacacatgaatttgagaaacttataaagcctgctgaattaaagaattatgtcgatgcagctaaactagattttgaagaagtaaaaggaatgtcttatatacctattttagatattgtgaggctcactgaagattcatctgttaattacatagtccatgcaagaaaaaaatag

SEQ ID NO: 227784 - DNA, 646 bp, Unknown
  Bacterial polypeptide expressing nucleotide sequence isolated from the Sargasso Sea
tggtgggatcccaacagcgaattcaagccgctgcatgacatcaacccacttcgggctggatggattgaccaacacgcagacgtgaagcacaagagcgtgttggatgtgggttgtggcggaggcctcctctgcgaagcgctcgcgcatcggggtgcagccgtaaccggtatcgatatgggcgaggcgccgctgtcggtcgcgcggctccatcaactggaaagcggcgtcacagtggattaccagcagagcaccgcagagtccatggcagcgcatcgcgcaggcaagttcgagattgttacctgcctagaaatgctggagcacgtgcccgatccctcgactgtgattcaggcctgtgcggacctgtgcaggccggggggagatctgttcttttcgacgattaaccgcaacccaaagtccttcctgttcgccattgttggagcagagtacattttgaatctgctgcctaggggcacacacgaatacgataaattcatcaagccatcagaactggctcgctggattcgcgaggccggtttggacatgcaggaaatgatgggcatgacctacaaccctttgactaagcgatatcggcttacgccggacgatgtatcggtgaattatctgatcagagcaaagaaaccgtgac

SEQ ID NO: 227785 - DNA, 392 bp, Unknown
  Bacterial polypeptide expressing nucleotide sequence isolated from the Sargasso Sea
aatgaaaaactacgctaatgaacataaaaatttagatcctgaagaggttaagaaatttaatgatatagcagaaaagtggtgggacctcgagggtgaatttaaaccactacatcaaattaatcctctaagactaaatttcattaaagaaagaacaagcctaaaaggcaaaagtatcttagatattggttgtggggggggaattttaactgaagcacttagtgaagctggagcggaagttataggaatagatgcctcagcacaaactataggagttgcaaaatctcatgcaaatgcagtaaacagcaaagcaacttatttagagtcaactgtggaagattttttagcgaataaccaaaatgaattatttgatgttattacttgtttagagatgc

SEQ ID NO: 227786 - DNA, 718 bp, Unknown
  Bacterial polypeptide expressing nucleotide sequence isolated from the Sargasso Sea
aatgcacagtgatgccaatgtcgatctgacagaaattgccaaattcgaagccatcgcctcccgctggtgggacatggagggagagttcaagccgctgcaccagataaacccggtgcgccttgactggatcaccgacaagagcggcggcctgttcggcaagcgcatcctcgacatcggctgcggcggcggcattctcgccgagagcatggcccgccggggtgccaaggtcaccggcatcgacatgggcaaggagcccctgggcgtcgctcgcctgcatgcgctggaagcgggcgtggagctcgagtatcgccagatcaccgccgaggcccacgccgatgaggcccccggccagtacgacgtggtcacctgcatggagatgctggagcatgtgccggatcccgcctccgtgctgcgcgccatcgccaccctggtgcgcccgggcggcaaggtgttcgtctccaccatcaaccgcaacccgaaagcctatctgatgatgatcctcggcgccgagtacctgatgaagatggtgcccaagggtacccacgaccacaagaagttcatcacccccgccgaactgtgtcgcatgggtgaagcggctggcctgctggtacgggacatgagcggggtgcactacgcaccgctctccaacagcttcaagctcggtcgcaacgtcgacgtcaactacatggtggcgttcgagcgcccggagcaaggctga

SEQ ID NO: 227787 - DNA, 700 bp, Unknown
  Bacterial polypeptide expressing nucleotide sequence isolated from the Sargasso Sea
atgaccaacgccgatccgcacgaactccagaaattcagcgaccttgcccatcggtggtgggatccgaatgccgaattcaagccgctgcacgacctgaacccggtccggctcggctggatcgatgcgcatgcgcacctcgccggcaagcgcgcactcgacatcggctgcggcggcggcatcctgtccgaatcaatggccggactcggcgcgcaggtgaaaggcatcgacctgtcgaccgaagcactcggcgtcgccgacctgcacagtctcgaaagcggcatctcggtcgattacgaggccatcgcagccgaagcgatcgccgcgcgcgaaccgggcacctacgatgtcgtcacgtgcatggagatgctcgagcacgtgccgtcgcccggcgatatcgtcgccgcctgcgcgacgctcgtgaagccgggtggctgggtgttcttctcgacgctgaaccgcaacctgaaggcttacctgttcgccgtgatcggcgcggaatacatcgcgcaaatgctgccgaagggcacgcacgactacgcgcgcttcatccgtccgtcggaactggccggcttcgtgcgggcaacggatctgcacatcgtggagatcaagggcatcacgtatcacccgatcggcaagcgcttcgcgctgtcgaacgacgccgacatcaactacctcgtcgcgtgccgtcgcggcgcgtgac

SEQ ID NO: 227788 - DNA, 706 bp, Unknown
  Bacterial polypeptide expressing nucleotide sequence isolated from the Sargasso Sea
atgaacataaaaaatttagatcctgaagaggtaaaaaaatttaatgatatcgctgagaagtggtgggatcttgaaggtgaattcaaacctctccaccaaatcaaccctttgagggtaaattttattaaagagagaacacaacttgaaggaaaaagggttctagatataggttgtggaggcggaatattgtcagaagcactaagttcagctggtgcagaagttataggaatagatgcttcaagccaaaccattggagtggctaagtctcatgcaaattcagtcaacagtagagtaacttatatggaatcaacagtagaagaatttttattgaataacaaaaatgatttatttgatgtgattacttgcttagaaatgttagagcacgttcctgcaccaaatctaataattgaaaattgtcactctttgttaaaagatgatggcgatatctttttatcaacaattaacaggaatcctagatcttatttttttgccataattggagctgagtatttattaaatctattacctaaagggacacatgaatattcaaaatttataaaaccatcagagttagcaggttggattagacaagctgggcttaatctaaaagaaactatcggcctaagctataaccccataactgatcattattggcttggaaaagatatacaggttaactatatggttcatgcaagaaaagaataaa

SEQ ID NO: 227789 - DNA, 484 bp, Unknown
  Bacterial polypeptide expressing nucleotide sequence isolated from the Sargasso Sea
cacggcctcgatatgggtgaagaaccattagaagtcgcgcgtttacatgcactggaaactggcgtgagcatcaactatgtcaaaaacaccgccgaggcccatcgagaagatcaccgcgaatactacgatgtggtgacttgtatggagatgctcgagcatgtgccagatccacaatcagtcattcaagcctgctgcgatatggttaaacccggcggttttgtgtttttctcaaccatcaaccgtaacattaagtctttcgtcgagaccattatcggcgccgagtacctattaaagatgctgcccattggcacccatgaccataataagttcatcaagccatcggaactcatggccttagtcgataacaccgatcttctctgtaaagatgcacttgggatcacctataacccgctgacggggatctttaagtacaccccaaaggtcgatgttaactatatgattgcgacgcaaaaggtagattaag

SEQ ID NO: 227790 - DNA, 700 bp, Unknown
  Bacterial polypeptide expressing nucleotide sequence isolated from the Sargasso Sea
atggaaaatattgatcaagaagaagttaataaatttgatgaaatagcagagaaatggtgggatctcgaaggagaatttaaacctctccatcaaataaaccctttaagggttggttttattaacgagaggacaatccttaaaggtgcaaaagtcttagatattgggtgtggaggaggcattctttctgagtctttatctaatttgggtgctgaagttactggtttggatgcatctgaaaaaacaataggtgtagcaagggcaagatcaaataaagttgggagcaatattactttcctgcaaatgagtctagaggaatatataaatagcgaaaatgaaaagaaatttgatgtaataacttgtctagagatgttagagcatgtacctgacccttctaaagttgttcagggctgcaaatcattactaaagaaagatggtaaagttttcttttcaactataaataggaaccctaaatcctacttgtttgccatattgggtgctgaatatatattaaacctattaccaaaaggaactcatgaatttgataagtttattaaaccttcagagctctctagatggataagaaattcgaagcttaaacaagaagaaataattgggttaagctacaacccattaacaaatcactattggttaggaaaagatattcaagttaattatatggtttttgcatctaatgaataaa

SEQ ID NO: 227791 - DNA, 712 bp, Unknown
  Bacterial polypeptide expressing nucleotide sequence isolated from the Sargasso Sea
tatgaacataaaaaatttagatcatgatgaagtaaataaatttgatgaacttgctgcaaaatggtgggacaaggatggtgaatttaagccacttcatcaaattaatcccttaagagtcggttttattaaagaaagatcttctatggaaggtaagaaagttctagatgtaggttgtggcggtggtattcttgctgaagctctcaacgaattgggcgctagcgttactggtatagacgcttcagaaaatactattggtgttgcaaaaactcactctaaatctataggaagcgatgttaaatacatacaaaatacaattgaagagtttacatcctcatatccagacgaaagatttgatgtaattacctgtctagagatgcttgaacatgtcccttcaccttatgaaattataaagagctgctctaatctcttgaaagaagatggaaacatatttttttcaaccataaatagaaatccgagatcctacctttttgctgttataggagcagaatacatattaaacctacttccgaaaggcacacatgattacgaaaaatttataaaaccttccgagttagcaaaatggattagagatgcgggcctaaattccaaagaaacaataggattaagttataaccccataactgataactattggcttggtaaagatatccaagttaactatatggttcatgcaaaaaaggaaagcatttga

SEQ ID NO: 227792 - DNA, 475 bp, Unknown
  Bacterial polypeptide expressing nucleotide sequence isolated from the Sargasso Sea
atggaaaattttgatcaattagaattagaaaaattctcaaaactagctgaccagtggtgggatccaaatggtaagttcaaaccactgcatttaattaatccattacgaactagctacatcgaagacaaagtagacataaaaaatctagaaattttagatataggatgtggtggtggcattcttgctgaacttttgtctcgaaaaggagccgatatgacagctattgatttagctgatggtccattgaacgtagctaagataagacaaaaaaaatcaaagcttgacataaattacagaaaaataagtaccaccgatatggtaaaagagaaaaaaacatttgatgtaattacatgtttagaaatgttagagcatgttccagatccatcacaggttgtagaagaatgtgctcaactttgtaaaccgggtggacatttattcttttcaacaattaatagaaacttaaagtcttttattt

SEQ ID NO: 227793 - DNA, 694 bp, Unknown
  Bacterial polypeptide expressing nucleotide sequence isolated from the Sargasso Sea
tatgaaaaactttgatcaacaagaattagataaattttccaaattggcaaaagattggtggaatccttcaggaaaatttaaacctcttcatttaatcaatcctcttcggtttaattacattaagagtaagattgatcttaagagtaaaaaagttcttgatattggttgtggaggtggaattttatctgaaagcctcgcaagagctggatcagatgtaaaggcaattgatctggcagatggaccccttggtgttgctgaaattcgtagaagagaaacaaacctaaatatatcttatgaaaagtgctctacttctgaactggttgatagaggtgagaaatatgatgttataacttgcctagaaatgttagagcatgtcccagagcccaggctgattgttgaagagtgcaataaactactaaaggcaaacggacatgtatttttttcaacaataaataggaatatgaaatctttttttctcgcaatagtaggagcagagtacgtattgaatatacttccaactggaacacatgattttgataagctcataaagccatcggaattaaaagaatatattgataaaacaagtttgaatttcgaagaaattaaaggaatgctttatcttcctttttttgacattgtaaaattgaatgatgatccatcagttaactacataattcatgcaagaaaaaaataa

SEQ ID NO: 227794 - DNA, 694 bp, Unknown
  Bacterial polypeptide expressing nucleotide sequence isolated from the Sargasso Sea
aatggaaaattttgataaatcagaaatagaaaagtttagttctttagctgatcagtggtgggatccatctggtaagttcaagcctcttcacctaattaaccctctaagagctgattacatttcaagtaaagttaatttaaagaacaaaaaaattctagatgtaggttgtggtggaggcattttagcagagtctttggcgttaaaaggagcgaatgtgaagggaattgatttagctgatggccctttagaagtcgcaaagatacgggagcaaaaaagaaatcttggaataacttatgagaagatcgaaacctccaaattaattaagaaaaaagaaaaatttgatgtaatcacctgtttagaaatgctagagcatgtccccgatccagaaaagaccgttaaagaatgttcagaattattgaataataatggcgatattttcttttcaacaattaacagaaatctaaaagcatttactttagcaattcttggagctgaatatatattgaatatactgccgaagggtacacatgactatgaaaagctcatcaaaccctcagagctcttaacttacatagataaaggtggtttagatttctcagaaattaaaggtatgacatatattccctttttcgatattgtaaaattatcgaatgatccctccgttaactacataattcatgcccgaaaaaaataa

SEQ ID NO: 227795 - DNA, 694 bp, Unknown
  Bacterial polypeptide expressing nucleotide sequence isolated from the Sargasso Sea
atgaataactttgatcaacaagaattagataaattttctaaattagctgatgaatggtgggatccaaatggcaaatttaagccactacatctaattaaccctctacgtattagctacatagaagaaaaaatttcgattaaagacttagatattcttgatataggttgtggtggcggcatcttatctgaagctctagcaaaaaaaggggcaaacgtaacagcaatagatctagccgatggaccgctagaagttgcaagaataagacagaaggaatctaaacttgatattagatatgagaaaaaaagtactacagaactcattgaagaaaaaattcaatatgatgttgttacttgtttagagatgttagaacatgtgcctgatccagctgaaatagttaaggattgtgccaaattaacaaaaaatggaggccatttgtttttctcaacaataaatagaaatttaaaatcatttgtttttgcaatactcggagcagaatacattctgaatatattgcctcagggcacgcatgaatttgaaaaactcataaagccttctgaattaaaaaattatgttgatggggctaaactagattttgaggaagtaaaaggaatgtcttatttacctatttttgatatcgtcaagcttactgatgattcatctgttaattacatagttcatgcaagaaaaaaatagt

SEQ ID NO: 227796 - DNA, 658 bp, Unknown
  Bacterial polypeptide expressing nucleotide sequence isolated from the Sargasso Sea
atggaacccggtttttggcatgagaagtggcagcaacagctgattggttttcaccagcaagatatcaatccctttctcgtaaagtattggcataccttggcattgcccgccgaggcgcaagtcttcgttcccctgtgtggcaaatctttagatatgtgctttttagccgaacaggggcatcaggtgattggttgtgagttaaatgaaatcgcggtgcagcagttttttgaagataaccaattacctatgcagcaaagcgcgctgggtgagcatcagcattatcacacagagcaggtcagtttatatcaaggggatatcttcactttgcctgtgtctattacagccaaggtgagtggtttttatgatcgcgccgccttgattgcttggccagagtgcatgcgggcgcaatacgccaagcaattagcgcagttattgccacagggcagcgtaggtttattagtgactctcgattacccgcaggaggccttaagtgggccgccttttgcggtgtcgccgacttgggtggagacccatttaagtgacgattttgacatccaactcttggattgtcaggacgtgcttgcggacaacccaaggtttgttaagaaagaagttccttggctgaatgaagcggcttatctattaagacgcagataat

SEQ ID NO: 227797 - DNA, 619 bp, Unknown
  Bacterial polypeptide expressing nucleotide sequence isolated from the Sargasso Sea
gaagaccgtatagggttccatcttaaggaagtaaatccttatttgatacaatatgcagatcaactgcttcaccaaaatcctgatagaatatttgtcccactttgtgggaaaactttagacttatgttggcttacaaaaagaactaaaaaagtgataggtattgagctggtcgaaaaggcagttcaggattttttggatgaaaaccatattgaatatttaactcataaagaaggagatttaaaaaaattcaatagcaaatctatcgatatttatcttggtgatttctttgatttaaatcctaataaaacctactcatttaaagcaatttatgaccgagcatctatagttgctatcgagaaatcagatagaaggaaatatgtggatcatttaatttcttttcttgaaaagtcaggtagaattttaatcataactctggaatacaatcaaagtcaaatggaaggtcctcctttcagtgtttctgctgaagaaattaaaagccttttttcatcactaggatcagtcacattactagagacatttgatattcttgatgaccgatctcgtaaaaaaggtttgaccagccttttagaacatgtttttctaattataaaaacttaat

SEQ ID NO: 227798 - DNA, 658 bp, Unknown; identical to SEQ ID NO: 227796
  Bacterial polypeptide expressing nucleotide sequence isolated from the Sargasso Sea

SEQ ID NO: 227799 - DNA, 658 bp, Unknown
  Bacterial polypeptide expressing nucleotide sequence isolated from the Sargasso Sea
tatggaacccggtttttggcatgagaagtggcagcaacagctgattggttttcaccagcaagatatcaatccctttctcgtaaagtattggcataccttggcattgcccgccgaggcgcaagtctttgttcccctgtgtggcaaatctttagatatgtgctttttagccgagcaggggcatcaagtgattggttgtgagttaaatgaactcgcagtgcagcagtttttcgaagataaccaattacctatgcagcaaagcacgctgggtgagcatcagcattatcacaccgagcaggtgagtttatatcaaggggatatcttcactttgcctgcgtctattacggcgcaagtgagtggtttttatgatcgcgccgccttgattgcttggcctgagagcatgcgggcgcaatacgccaagcaattagcgcagttattgccccagggcagcgtaggtttattagtgacactcgattacccgcaagaggccttaagtgggccgccttttgcggtgtcaccaacttgggtggagacacatttaagtgacgattttgacatccaactcttggattgtcaggacgtgcttgcggacaacccaaggtttgttaagaaagaagttccttggctgaatgaagcagcttatctattaagacgcagataa

SEQ ID NO: 227800 - DNA, 571 bp, Unknown
  Bacterial polypeptide expressing nucleotide sequence isolated from the Sargasso Sea
gctctactatcagttccgtgaagagttcaacgccagccaggatcctttccgtcgtgcggttctgttcctgtatctgaaccgatatggttacaacggcctgtgccggtataatctgcgcggtgagtttaacgtgccgtttggacgttacaaaaagccttacttcccggaagctgagttgtatcactttgcggaaaaagcgcagaatgcggaattccactgcctctcatatgatgagtgcatggagcaagcggatgcgaactcggttgtctattgcgatccgccctacgccccgctgtcagcaacggcgaatttcaccgcgtatcataccaatagcttcagcccgaaagagcaggcccatctggctaaaatggccgaaaagctggtcagtaagcagatcccggtgttaatttcgaaccatgacacgccggatacccgcgaatggtataaagcggcggaacattttcaggtcaaagtgcgacgcagtataagcagcaacggcggcacacgtaaaaaggtggacgaactgctggctctgtacaaaccaggagtcgtttcacccgcgaataaataa

SEQ ID NO: 227801 - DNA, 282 bp, Unknown
  Bacterial polypeptide expressing nucleotide sequence isolated from the Sargasso Sea
aatgcagcaaaagagtagagccttccttaaatgggctggcggaaaatacagtctcgttgatgatattaacgcgcgattaaaccaagcaagttcgcatgctgataccttggttgaaccttttgttggtgccggttccgtttttctaaatagcgattttaagcattatattcttaacgatattaatgctgatttaatcaacttatataaagaattaagaaattcacccgatgaatttattagtgatgcaaaaaagctattcgttgatttaaataaccaccccga

SEQ ID NO: 227802 - DNA, 731 bp, Unknown
  Bacterial polypeptide expressing nucleotide sequence isolated from the Sargasso Sea
gggtgccgggtcggtgtttctcaacaccgacttttctcgttatattcttgccgatatcaacagcgaccttatcagtctctacaacatcgtgaagacgcgtaccgatgagtatgtgcaggcttctcgtgagctgtttatgcctgaaaccaatcaggctgaggtgtactatcggttcagagaagaatttaatgccagccaggatccgttccgcagagcagtgctgttcttgtatctgaaccgctttggttacaacggattgtgccgttataacctgcgcggcgagtttaacgtcccgtttgggcgttataaaaaaccttacttcccggaagccgagttgtaccattttgctgagaaagcgcagaatgcggagttccattgcctctcctatgaagagtgcatggatcgtgcggacagcaactctgtggtctattgtgacccgccttatgcaccactttcggcgacggcaaatttcactgcgtatcacaccaacagctttagcccgaaagagcaagcgcatttggccgagatggcagaaaagctggtcagtaagcagatcccagtgttaatttcgaaccacgatacgcccgatacccgtgaatggtaccgagcggcgaaacattttcaggtcaaagtgcggcgcagcataagcagcaatggcggcacgcgtaaaaaggtgaacgaactgctggcactgtataaaccaggagttgtaacgcctgcgaagaaataaa

SEQ ID NO: 227803 - DNA, 651 bp, Unknown
  Bacterial polypeptide expressing nucleotide sequence isolated from the Sargasso Sea
catgaaaaaaacacgcgcttttttaaaatgggccgggggaaaatactccctggttgaagagattgccgagcgtttgccggccgggcgtgtgttgctggagcccttcgtcggggctgggtccgtgtttctcaacaccgactacgacgcctatgtgctcaacgacatcaatccggatctgatcggtctttacaatcatctcaagttgacgccggatcggttcatcgctgagtcgcgcaagctgttcgtgaccgagcacaaccacaaggcggcctactaccggctgcgcacccagttcaaccagaccgacaccagcttcgagcgtgccctgctgttcctgtttctgaatcgacacggtttcaacggcctgtgccggtacaacaagaaggggggcttcaacgtcccgttcggttcctacaagaagccctatttcccggaaaaagagctgtgggccttcgccgagaaggcgcagaaggcgaccttcatctgtgaaagctatgccgatgccatccagcgcgcggaagaggattgggtgatctattgcgatcctccctatgccccgctctccactaccgcgagtttcaccacctattcggccggcggtttcaccctggacgatcaggccgtgctggccaggctggctcgccacaccgc

SEQ ID NO: 227804 - DNA, 900 bp, Unknown
  Bacterial polypeptide expressing nucleotide sequence isolated from the Sargasso Sea
tatgctaaagaagtccagagctttcctgaaatgggctggcggcaaatacaatttagtagatgctatttctctgcaactgccaaaggcgccattattggttgagccttttgtcggcgcaggttcggtgtttttaaataccgattatccagagtatttgctgaatgatattaatgcggatctgattaacctctatcagttgctgcaaactaaacctgctgattttattgcggatgcccagaatttatttgtgcaaagcagcaatgaaaaaagcagctatctttcgttcagggaagagtttaatcaaagcacagacatctatcagcgttccttattatttctgtatttaaaccgccatggttacaacggcttatgccgttataacagcagcggcaaatttaatgtgccttttggcagctataaaaagccgtacttcccggaagctgaattatggttttttgctgaaaaagcgcaaaaagctaagtttgtttgtatggattacaacgaactgatgcatcaaatcaagtcaccggcagtagtgtattgtgatccaccttatgtaccactgagtcgcacggcaagttttacctcgtatgccaaaaatagttttgatttagatgatcaggctgaactggctaatcttgcagaaaattgtcagaaccgtggtgtgagtgtagtgatcagtaatcacgatacaaccttaacccgaaagctgtatgagaaggcaaaattaacttcgattcaggtagggcgctctatcagtcagaagggggcaacacgtggcaaggtcgctgagctttttgcgttatacgcaacaactcatcagcctggaacaacccagttgacgactaatagcaacagcacaataaaagcgacaacagctaagatgcctgcaactaaata

SEQ ID NO: 227805 - DNA, 814 bp, Unknown
  Bacterial polypeptide expressing nucleotide sequence isolated from the Sargasso Sea
atgaaaaaaaatcgcgcttttctgaaatgggcaggggggaaataccccctgctcgatgatattaaaaagcacctgccaaaaggcgagtgtctaatcgagcctttcgtgggtgcgggatcggtgttcctcaacaccgatttttctcgttatatcctggcggatatcaacaacgaccttatcagcctctataacattgttaagctgcgtaccgaagagtatgtcgcagaggcgcgcaaactgtttacgccggagaataatcacccggacgtttactaccagttccgcaccgagtttaatcagagccaggatccgttccgcagagcgttgctgttcctctatctcaaccgtcatggttacaacggcctgtgccgctataacctgcgcggggaatttaacgtgccgtttggtcgctataagcgtccgtatttcccgcaggacgagctgtatcactttgccgaaaaagcgcagaacgcagagtttcattgcctctcctatgaagagtgtatggaactggcaggcgtaaactcggtggtttactgtgacccgccttacgcaccactgtctgcaacggcgaatttcaccgcttatcacaccaacagcttcagcccggccgaacaggcccgtctggcggagatggcggaaaagctggtcagcaaaagaattccggtgttaatttcgaatcacgacacgcctgatacgcgcgaatggtacaaagccgcgaagcattttcaggtcaaagtgcggcgtagcattagcagcaacggcggcacacgtaaaaaggtggacgaacttctggctctttatcgcccctgag

SEQ ID NO: 227806 - DNA, 628 bp, Unknown
  Bacterial polypeptide expressing nucleotide sequence isolated from the Sargasso Sea
gatgcagaagaaaaaccgggcttttttaaaatgggccggtggcaaatacagcttggttgagcatattcaggccagattaccgcaagctaacaaacttatagaaccgtttgttggtgcaggctctgtgtttttgaatacgcaatacaagcgctacctactaaatgacatcaaccccgatcttattaacttatacaacttcctaaaagcccagccagacgcgcttatcaatgacgctcgctcgtttttcgatggtaaacgcaacgaagagaaaatgtactacgcgttacgcgaagaattcaatgctaccgaagacgagtattatcgagctatcctctttttatatttaaaccgccatggctacaacggtttgtgtcgctatagccttcaaggtcgttttaatgtgccgtttggccgttacaaaaagccctactttccagaagacgaaatgtttgtgttttctgaaaaatcacaaaaagccactttcacttgtctaccgtttgagaaggttttttcaagggctaggcgaggcaatgttatttattgcgatccaccctacgcacctatcagtaaaacggctgcctttactagctatgcagcccgtagttttgggcaagagtctcaagaaaaa

SEQ ID NO: 227807 - DNA, 880 bp, Unknown
  Bacterial polypeptide expressing nucleotide sequence isolated from the Sargasso Sea
atgcagaaaaaaaaccgggcttttttaaaatgggccggtggcaaatacagcttggttgagcatattcaggccagattaccgcaagccaataaactaatagaaccgtttgttggtgccggatctgtatttctgaatacgcaatacaaacgctacctgcttaatgacatcaatcctgacctcattaacttatacaatttcttaaaagcgcagcccgatgcactgatcaacgatgctcgttcattctttgatggaaaacgcaacgatgaaaaaatgtattacgcgttacgcgaagagtttaatgctacgcaggacgagtattatcgcgccattctctttctgtatttgaatcgtcacggttacaacgggttatgtcgttacagccttcaaggccgttttaatgtgccttttggtcgctataaaaagccctactttcccgaagacgaaatgttcgtattttctgagaagtcgcaaaaagccacgtttacttgtcttccctttgagaaagtattctctcgggcacggcgtgggaatgttatctactgcgatccaccgtatgctcctatcagcaaaactgcagcgttcaccagctatgccgcgcgaagcttcggtcaagagtcacaagaaaagctggccgagctcgctacccgtgcatctaagaaacgcggtataccagtgctcatctctaaccacgatttgccgttaacccgttcgctttatcagggcgccgattttagcatgctctcggtgaagcgctctattagtcagaatggcgcgaagcgacagcccgtggatgaaatattggcctactttcctcccgccaaagtggcaccaaaacgtaaagcgcgtaaaaagaaaacatttcaacgcccttcactttaac

SEQ ID NO: 227808 - DNA, 241 bp, Unknown
  Bacterial polypeptide expressing nucleotide sequence isolated from the Sargasso Sea
aatgagtaactcaggttttacttttagacgggttcgagaagagatgatcgagactcttctagaattaggcataaaagattttagagttttggatgccatctcacaaattccaagacatacttttcttgatgaagcattatggtcaagagcatatgaaaatagacctttaactataggatacaaacaaaccatttctcagccatatatagttgcaagaatgactgagttactaatttctcat

SEQ ID NO: 227809 - DNA, 502 bp, Unknown
  Bacterial polypeptide expressing nucleotide sequence isolated from the Sargasso Sea
tatgattaataaaggtgaggaacaaagggctcaccttatcatgaagcttagaggacaaggaattcggtcagccagcgtattatcagctatagaaagtgtcccaagagacatattcatcgaaaatgctctaaaaaatcacgcatgggaaaatgtcacacttccaatcggagaagggcaaactattagtcagccgtatatcgtagctttaatgactactgctttgaatttatctggaaaagaaattgtcctagagattggaactggtagtggctatcaagcttcaattttatcacttctatgcagaagagtttacacaatcgaaaggataaaaactttacatgaattttcaaataagaaatttaaggaacttaaaataaataatataacttctaaatttggcaatggttcttttggttggcccgaagtttctccatttgatagaataattttaacatgtgctattaatcaaattcctaagcaattatttctccaactaaaaatt

SEQ ID NO: 227810 - DNA, 355 bp, Unknown
  Bacterial polypeptide expressing nucleotide sequence isolated from the Sargasso Sea
atgaatataaatgaagtaaaaggtgctggactcacctccgaagcagttagaagaaaattaggtgaagaattgaaaactttaggaattaaaaataatgaggtattagatctagtatctagtatgccgagacatttattcatcgattctgcattaacaaatagagcatatgagaacgtatctttaccaataggatttagacagacaatatctcagccttatatagtcgcaaaaatgacagaattaattcacgaaatgacgtcaatgaaaaacgtgttagaaattggaacaggctcaggctatcaaacctcaattctgtcaatgctatttgataaagtcacgactatgaaagaataaa

SEQ ID NO: 227811 - DNA, 580 bp, Unknown
  Bacterial polypeptide expressing nucleotide sequence isolated from the Sargasso Sea
aacaaatgagaaagtaattagtattatggagaaaattcctcgtgagtctttcattgatccagctctaaaacagatggcttatgatgatgacgcattacctattggtcataatcaaacaatctcatctccttatattgttgctaaaatgtcccaaataattatagaagaggataaaatggataaagtgttagagatagggacaggatgtagttatcaaacagttgtactatcatatttgtttaaaaaagttgtgagcattgagaggattaaatctttgtatgtaaaatcaaaaaaaattgtttctgattttaatagaaataatattaaattaatatttggcgatggttatacgggttcgaatattgatgcgccttttgatgctataataattacagctgctccaaatgaaataccaaaatctctaattgaacaactaaagactcatggcagaatgattatgcctctaaataaaaatggcaaacaaatcttaataagaataaagaacacgcctaaaggcattattctaaaagaaattgatgatgttttatttgtacctatgctaaaagggattattcaataa

SEQ ID NO: 227812 - DNA, 242 bp, Unknown
  Bacterial polypeptide expressing nucleotide sequence isolated from the Sargasso Sea
tatgaatatgatcgagacccagatcaaaaaaagaggcattacagaccaaactatccttgatgctatgaaagaagtgaataggcatgaatatgttcaagaaaattttgaaagactagcatattcagaccgtcctgttcctattggttttgggcaaaccatcagtcagccctatattgttgcttttatgagtcataaactaaatgttgctagccatcacaaagtgctagagatcggcaccggtt

SEQ ID NO: 227813 - DNA, 661 bp, Unknown
  Bacterial polypeptide expressing nucleotide sequence isolated from the Sargasso Sea
atgcatttggattcatacaagcacaaaggattgaggattaaattgatcgaattacttcgttctaaaggaattgacaacgaaggagttttaaaagccatcaataaagtgccacggcatttatttttggacaatgcttttgtcaaatttgcgtatcaagatcaagcatttcccattggtgcaaatcaaaccatctctcagccttttacagtcgctttccagagtcaattgttggatgcaaagcgtggccaaaaagtcttagagattggaactgggagtggatttcaaagctgcgttttaatggaattaggtttgaaggtgtttagcattgaacgacaccgttccttgcatcaaagtgcaaaaaaacaattggaaggtatgggttattttccgcgcctcttttttggagatggttatcaaggactggccacctttgctccttttgatcgaatattgatcactgccgccgcaccttatattccagaagcattaaagtcacaattaaagttaggagggaagatggtcatccctttgggtgaaggtgacaaacaagaaatgcagcgcatcacaaaagtctcagagacagaattcaatatagaacgctttggtgattttagttttgtgccgatgttgcaggacaaatccttcggtaaaacacaataag

SEQ ID NO: 227814 - DNA, 370 bp, Unknown
  Bacterial polypeptide expressing nucleotide sequence isolated from the Sargasso Sea
tatgactcgagttgccttaacatcggcggtgaatttagctaaaaagcttcaggaggcggggatccgccatccagccgttcttaaggcaatatcccataccccgcgcgagttgtttcttgataatgcgctggcccataaagcctacgaaaacaccgccttgcccataggccaagggcaaaccatttctcagccttatatcgtggcgcgtatgacagagttactgctgcaacatcagccgcaaaaggtacttgaggtgggaacgggctctggctaccaagcggcgattctcgcgcaattagtgccagaaatgtgcaccattgaacgtatcaaagggttacagatccaagcgagacaaagattaaagcgactc

SEQ ID NO: 227815 - DNA, 601 bp, Unknown
  Bacterial polypeptide expressing nucleotide sequence isolated from the Sargasso Sea
gaaaccaagctgctgagcatcatggagagtatacctcgaagccatttcatcggaaatagcttcaagatttatgcatttgatgacatagcgcttccaatagcctgcggtcaaactagtacgcagccaagtatcgtaggaattatgtctcaatccttgaatataagctcaaggtgcaaagttcttgaaattggaactggatctggttaccaaactgcaattttagcgaaaatggccaggagagtttactctatagaaataataaaacccttaggagtcgctgcgaaagagaaaatggatagcttaaaaatacgaaatgtcaccattttgtgtaaagatggaaccacgggtttaaaagaacaagcaccgtttgatcgaataatactcggagcagcaaccgaagatattccgaaggttttactcgatcaacttaagccccgaggagtactcgtggctcctgtcggaatgacggaaaaaatacaaaaaattgttaaagttgaaaaaaacggtaccaattatgaatatacagacctaaagtctgtacgttttcaccccttaacggagtcaaaaaacgggaatatctctcatgcccaattcttataga

SEQ ID NO: 227816 - DNA, 631 bp, Unknown
  Bacterial polypeptide expressing nucleotide sequence isolated from the Sargasso Sea
atggtagataaacagattaaagatcgtggtgtagttgacccaaaagttctagatataatcagtaatacccctagacacaaatttgtacctaaggatatggttgattatgcatatgatgatagacctttacctataggagaaggtcaaacaatttcacaaccttacattgtagctcttatgacagagctattgagtttgtctggtaaagaaaaagttcttgagataggtactggctctgggtatcaatcagctatattatcatcattatctaataaagtatttacaattgaaatagttaaacctctagcaatacgagcaataaatatattagaagagttacagattaataatgtttatgctcgatggggagatggatacaacggatggccaagtgaagcaccgtttgattgtataatcgtaactgcagcgccagataaaattccagaagctcttattaaacagttaaaaattggaggaaaactagtgattccggttggtaaatattggcaagaattaaaagtaatttcaaaaacatctgattcaaacatacatgaaaaaaccattatacctgttcgttttgttcctatggtgcatccaagcaattctttttttgatgaggatctcaactgat

SEQ ID NO: 227817 - DNA, 682 bp, Unknown
  Bacterial polypeptide expressing nucleotide sequence isolated from the Sargasso Sea
atgagtaactctggatttactttcagaagagttagagaagagatgatagaaactcttctagatcttggtattaaggattttagagttctagatgcaatttctcaaattcctcgtcacatatttcttgatgaggcattatggtcaagagcttatgagaatagatctttaacaatagggtacaaacaaacaatttcccagccatacattgttgctcgaatgacagaattattaatatcacatacaaacagtagaggtaaagtttttgaaaatttactagaacttggttctggttgtggttatcagtcagcagttttatcattttttagtgaaaaggttgatgccattgaaagaattaaacctttagttcataaatctagagagaatctatcaaaccttaaaatcaataatgtgctttttaagcatggagatggtttcgaagattgggataaacagaaaaaatatgatggtattttatgtgcagctgctccaagagcatatccaaatgatttagtttctgtattaaatgataatgccaagttagttattcctgtgggaggctcatcacaaaaattaaacgtaataacaaaaaacaaagatgaagaaattaaagaagaacaatatgatgatgtatcatttgttccaatgttggcaggaaaatcagaagacggtaatgatgtatgaa

SEQ ID NO: 227818 - DNA, 424 bp, Unknown
  Bacterial polypeptide expressing nucleotide sequence isolated from the Sargasso Sea
tatgactcgagttgccttaacatcggcggtgaatttagctaaaaagcttcaggaggcggggatccgccatccagccgttcttaaggcaatatcccataccccgcgcgagttgtttcttgataatgcgctggcccataaagcctacgaaaacaccgccttgcccataggccaagggcaaaccatttctcagccttatatcgtggcgcgtatgacagagttactgctgcaacatcagccgcaaaaggtacttgaggtgggaacgggctctggctaccaagcggcgattctcgcgcaattagtgccagaactgtgcaccattgaacgtatcaaagggttacagatccaagcgagacaaagattaaagcgactcgatcttcataatgtgtcattcaaatatggcgatggctggcagggctggccgaat

SEQ ID NO: 227819 - DNA, 442 bp, Unknown
  Bacterial polypeptide expressing nucleotide sequence isolated from the Sargasso Sea
gatgagtaactctggatttaccttcagacgagttagagaagagatgatagagactcttctagatcttggcattaaagactttagagttcttgatgcaatttctcaggtccctcgtcacatatttcttgatgaggcattatggtcaagagcctatgagaatagatctttaacaattgggtataaacaaacaatttcccagccgtacattgttgctcgaatgacagaattattaatatctcatactaatactagaggtaaagtttttgaaaatatactagaacttggttctggatgtggatatcagtctgcagttttatcattttttagtgaaaaggttgatgctattgaaagaattaaacctttagttcataaatctagagaaaatctgtcaaatcttaaaattaataatgtgctttttaagcatggagatggttatgaagat

SEQ ID NO: 227820 - DNA, 358 bp, Unknown
  Bacterial polypeptide expressing nucleotide sequence isolated from the Sargasso Sea
atgagtaactcaggctttactttcagacgggttcgggaagagatgatcgaaactcttctagaattaggcataaaagattttagagttttggatgccatttcacaaattccaagacatacttttcttgatgaagcactatggtcaagagcatatgaaaatagacctttaacgatagggtacaaacaaactatttctcagccatatatagttgcaagaatgactgagttattaatttctcataccaaaacaagaggtaaagtatttgataaagttttagaccttgggtcagggtgcgggtatcaatcagctgtgctatctttttttagtgaaaaagttggatgcaatagaaagaatcaag

SEQ ID NO: 227821 - DNA, 640 bp, Unknown
  Bacterial polypeptide expressing nucleotide sequence isolated from the Sargasso Sea
ttggttgaccgcgtgagcgagggggcgcgacctgatcatcaccgttttggtggttttatttcccaacggtcacagcagaggttgttggacacccttcgtgccaaaggtataagaaacgaggacgtgttggaggcttttgccaagatccccaggcatgaatttgtcgaagaggcactgcgaagccgtgcatatgaggacaccgctttgccaatcggctatcagcagactatttcccaaccctacgtggttgcactgatgacacaacttctcctgaccgggcgcgagcggcttaaacgcgtgctggagattgggacaggatcagggttccaaaccgcggtactttcccgtgtctctgcccgtgtattttccatagaacggatcggtgcactggctgggcgcgcttatcagaagttgggaagccttggcattgagaacgtctcactacgacacggcgatggcgcaaacggatggagcgccaagggaccgtttgacgggattatcctgaccgccgcgccaaagcgcgtccctgacacccttttttcgcaattatcggaccagggtgtgctggtggcgcctgagggcagcaaccgtcagcaacgcctgctgtactggattaaacaggatggcattgcaattcgcc

SEQ ID NO: 227822 - DNA, 370 bp, Unknown
  Bacterial polypeptide expressing nucleotide sequence isolated from the Sargasso Sea
atgtatgattctcccaaactcataggtttgagaaacgaattaataaagaatcttttcaaaaaggggataaataataaagatattcttaaagcattctttaaagttccaagacatctttttattcataaagattttgaatcgtatgcctataaagatgaggcatttccaatagatgagaaccaaacaatttcacaaccatttactgttgcatttcaaactcaactacttgatgtatttaaaggtgataaagtcttagagattggtactggatctggatttcaaactgcagttttagtttttttaggagcagaagtatatactattgaaagaatacatagcttatataaaaaatcgaaaaagatactagatg

SEQ ID NO: 227823 - DNA, 382 bp, Unknown
  Bacterial polypeptide expressing nucleotide sequence isolated from the Sargasso Sea
atgagtgaacggcttaagcaaaaacaaacacttcacagttactggaaaaacagcaggatgatcacttccgaaaggattctgaaggcattcatggagatcccaagggaatattttgtggaaacctcatttgcggatcaggcctatgcggaccatcccctgcccatcggagaaggtcagaccatctcgcaacccaccactgtgatgctgatgctccaactgcttgaggtcgaaccagaacacagggttcttgaaatcggagccggcagtggatacaacgctgctttgctgggcctgctggcaaaagaggtggtgacgattgaacgtcataaaaaattagccgttctggcacgagctaacctcaaaaaagccggaatctccaatg

SEQ ID NO: 227824 - DNA, 340 bp, Unknown
  Bacterial polypeptide expressing nucleotide sequence isolated from the Sargasso Sea
gctgaattcagggcttgccgaaggctgggaggaagaaaagcgtactaggatgattgacgtggatctgaagccgcgcggtattaccaatcaggaggtactcaaagcgatgatgaatgtgccccgacaggagtttgtacctgagaacatacgtagtctagcttatgcagaccgtccactaccgataggcgaaggacagacaatcagccagccttttgtagttgcttggatgtcgcagctgctggtgatcgaaaagggaatgaaagtgcttgaaattggtactggatcaggataccaggcggcaattctggccgagcttgaggcaagaacgttttccgtggaa

SEQ ID NO: 227825 - DNA, 660 bp, Unknown
  Bacterial polypeptide expressing nucleotide sequence isolated from the Sargasso Sea
ttagaagagtcagagaagatatgatagaaaatcttttagatatgggtatcaaagatttcagagttcttgatgctatgtcacaagtacctagacaccttttcattgaagaagctctatggtctagagcatatgaaaatagatcttggtcgattcaatatggccaaacaatttctcagccttacattgttgcaagaatgactgagttattaatatctcatacaaattcaagaggcaaaatttttgaaaacatattagaacttggttctggctgtggttaccagtcagcagttttgtcattttttagtgaaaaagtagatgcattagagaggataaagccattagttgaagaagccaaaaagaatttatcaaatctaagtattgataatgtattttttaatcatggagatggatatcaagattggaaaaaaaatattaaatatgatggtattttgtgcgcagcggcaccaagggcttatccacacgatttagtatctgctcttaaaccaaatgcaaaattggtaattccagtaggaggtaaagttcaaaaacttaatgtaatttcggtcaatgaaaaaaatgaagttaatgaagaaaaatttgatgacgtttcttttgtgcctatgctgccaggaacctctgaagatggtaatgagctatgaa

SEQ ID NO: 227826 - DNA, 357 bp, Unknown
  Bacterial polypeptide expressing nucleotide sequence isolated from the Sargasso Sea
catgatcgataacgcaactctaaagatgcaatttcttttttcattgcgaaaagcgggtgttgtagacaaacaagttttagatgcaatggaaagaattgatagaaaaaattttgtcaatggtattttttctgagaaggcttatgacgataccccgcttcccattgcatgcggtcaaacgattagccagccaacagtagttggcttaatgacacaaactttgaaagtttcgtcaagagataaagtattggaaataggaacaggatcgggataccaagctgcaattttaagcttattagccaggcgggtttatactgttgaacgccatagtttgcttgttaataatgctgctaaagtttt

SEQ ID NO: 227827 - DNA, 457 bp, Unknown
  Bacterial polypeptide expressing nucleotide sequence isolated from the Sargasso Sea
aatcagacaatttcacagcctactaccgtgatgcttatgctccaactgcttaaagtacttccggagcaacgagtgctcgaaatcggcactgggagtgggtataatgccgctttactttcagaactaaccggtaaagttgtgaccattgaacgtcatatgcagcttgtcaagtttgctcaggataaccttacaaaagcaggttatgatgacgtaattgtactaaagggggatggtaaaaaaggttacgctaagcatgcaccatatgacaggattatggttacagccgccgcacaaaaggtgccacaacatttaaaagatcaactttcaataggaggactgctagttgcaccgataggagaaacttatggatgcgaaatgcttatttttgaaaaaatttccctggataatttcaagatctgcaagaacggcctcttttcatttgtgccattggtctaaa

SEQ ID NO: 227828 - DNA, 540 bp, Unknown
  Bacterial polypeptide expressing nucleotide sequence isolated from the Sargasso Sea
acgaagccttgaggtccagagcatacgaaaatatgtccttacctattggttttaagcaaaccatatcgcagccatatattgttgcgaagatgacagaattattggttagaaactctaaaaaacaaaatgaaaaatttgaaaagattcttgagattggatctggttgtggatatcaatctgctgttctttcttactttgctgatgaggtacattcattagaaagaattaaacaattagtcagtaaagctcgtgtgaatctatcagaactaagaatttataatgtcctaattaagaatagagatggttttgaaggctgggatgaagaaattaaatatgatgggattctttgtgcagcggcgcctccagaaatacctaaaaagcttttagattttttaaaggttggatgttctctcgttcttccagtaggtgggagtaaatctcagaaattaaaaatagttaccaaaactaaaaaaggctttgatgagcaagaattcgagagtgtttcatttgtcccaatgttaggtggtacatcaaaatgaa

SEQ ID NO: 227829 - DNA, 643 bp, Unknown
  Bacterial polypeptide expressing nucleotide sequence isolated from the Sargasso Sea
aatggcttttaagaaagaaaactcaaatttcgagcagcaaaagcaacacctttatagttactggcaaaaaagtagaatgatcaccagtaaaacggttttgaaagcatttctagcggtacaaagggacctttttgttgacccatcctatagagatcagtcctatgcagacaatccccttccaatttgctgcgaacagacaatttctcaaccgaccaccgtaatgctgatgctccaactgcttgaagtaattccaggacaaagagtgcttgaaataggtacaggaagtggttacaatgcggctttactcgcagaactaaccggtaaagttgtgactgttgaacgtcatatgaagcttgtcaaattagcccagcataaccttaaaaaagcaggttgtgaaggtgtaattgtagtaaagggagatggtaaaaagggttatgcttctcatgctccatatgataggattatggttacagcagccacacaaaaggtgccacagcaattgaaggatcagctttcagtaggaggactgctagttgcaccgatcggagcaacttttagatgcgaaatgaaaacttttgaaaaaatttcttccgataatttccggaccctcaatcacggcctcttttcatttgttccattggtt

SEQ ID NO: 227830 - DNA, 406 bp, Unknown
  Bacterial polypeptide expressing nucleotide sequence isolated from the Sargasso Sea
aatggataaagtgttagagatagggactggatgtagttatcaaacagttgtactatcatatttgtttaaaaaagttgtgagcattgagaggattaaatctttgtatataaaatcaaaaaaaattgtttctgattttaatagaaataatattaaattaatatttggcgatggttatatgggttcgacaattgatgcgccttttgatgctataataattacagctgctccaaatgaaataccaaaatctctaatagaacaacttaagactcatggcagaatgattatgcctctaaataaaaatggtaaacaaatcttgataagaataaagaacacgcctaaaggtattattctgaaagaaattgatgatgttttatttgtacctatgcttaaaggaattattcaataa

SEQ ID NO: 227831 - DNA, 471 bp, Unknown
  Bacterial polypeptide expressing nucleotide sequence isolated from the Sargasso Sea
aatgaaattgagtcaacaactaaatttcaatggaataggtatgacttcgttacgaacaagagaacgtttgttggggaggttgatggagcagggaattaaaaatatgcaagttctcgacatcatacgttcgacgccaaggcatatatttctagatgaggctttatcacatcgagcctacgaagatgtagctttaccaattggttacggtcagacgatttcacaaccttatgttgttgcgaaaatgactgaaattgtttcagcctctcgtcagttaaaaagtgttttggagattggaactggctgcggttatcaaacagctgttatctcaagaattgctgaaaaggtttataccattgaacgcattaaacctttacttgacagagctaaaaagaatcttaaattactcggtattagaaatgtcgaatttaaacatgatgacggtagtcttggttgggaggaaagagccccttt

SEQ ID NO: 227832 - DNA, 643 bp, Unknown
  Bacterial polypeptide expressing nucleotide sequence isolated from the Sargasso Sea
gctgcaaaaatgatggtagataaacagattaaagatcgtggtgtacttgacccaaaagttctagatgtaatcagtaatacccctagacacaaatttgtacctaaggatatggttgattatgcatatgatgatagacctttacctataggagaaggtcaaacaatttcacaaccttacattgtagctcttatgacagagctattgagtttgtctggtaaagaaaaagttcttgagataggtactggctctgggtatcaatcagctatattatcatcattatctaataaagtatttacaattgaaatagttaaacctctagcaatacgagcaataaatatattagaagagttacagattaataatgtttatgctcgatggggagatggatacaacggatggccaagtgaagcaccgtttgattgtataatcgtaactgcagcgccagataaaattccagaagctcttattaaacagttaaaaattggaggaaaactagtgattccggttggtaaatattggcaagaattaaaagtaatttcaaaaacatctaattcaaacatacatgaaaaaaccattatacctgttcgttttgttcctatggtacatccaagcaattctttttttgatgaggatctcaactgat

SEQ ID NO: 227833 - DNA, 541 bp, Unknown
  Bacterial polypeptide expressing nucleotide sequence isolated from the Sargasso Sea
atgactcgagttgccttaacatcggcggtgaatttagctaaaaagcttcaggaggcggggatccgccatccagccgttcttaaggcaatatcccataccccgcgcgagttgtttcttgataatgcgctggcccataaagcctacgaaaataccgccttgcccataggccaaggacaaaccatttctcagccttatatcgtcgcgcgtatgacagaattactgctgcaacatcagccgcaaaaggtacttgaggtgggaacgggctctggctaccaagcggcaatcctcgcgcaattagtgccagaactgtgcaccattgagcgtatcaaagggttacagatccaagcgaggcaaagattaaaacgactcgatctgcataatgtgtcattcaaatatggcgatggctggcagggctggccgaatcgcagcccctttgatggcattatggtcacggcggcagcggccaaggttcccgaagccttattgtcccagctagccgaaggcggcgtattaattatccccgttggtggaagagacgcag

SEQ ID NO: 227834 - DNA, 805 bp, Unknown
  Bacterial polypeptide expressing nucleotide sequence isolated from the Sargasso Sea
cgagccgtgctggcgacgctggctgagtttaccggcttgaacctagtcgccagtgatagtgttactgggcgagtaacgctcaacctcaacgatgtgccctgggaccaggcgctggcgctgattttgcaaagccaagggctctctagccgtgaacagggcaatgtgattgtagtagcgccggccagtgagctggccgagattgagcgtcaagagattgaggcccgtagccagcagcaaatcttggcgccgttggtgactgagttcatcgagataaagtacgcacgggccgaagatttagcacagctattgcgtggtggtgacggttttgggctgctcactgagcgtggccgcgttagcgttgaccagcgtaccaacacactgctcattcaagacacggccgaacaggtgcgcgatattatgcggacgctggaccggctggatgtggcggtgcgtcaggtacagatcgaagcgcgcatcgtgattgcccgtgatagcgcttcccgagagttgggggtgaactggggcgtctccagcacccgaggcttcctggaaaacgaagccgggcagttcgtgccgcgcaacatcaatcctggcggcctcaaccgtgcccaaggtggcctggcggtggacttaggctcaacgacagcggctgatacgggcttcagctttggctatctctcaggggatattctgctcgaccttgagttgcgcgcccttgaaagcgaaggcaaaagccagaccatttcgcagcctcgggtgattactgccaacaagcgcaccgcaacgatccgccaaggggaggagc

SEQ ID NO: 227835 - DNA, 247 bp, Unknown
  Bacterial polypeptide expressing nucleotide sequence isolated from the Sargasso Sea
gaagcacggtgacggctggcaaggctggagcagcaaagccccctacgattgtattattgtcactgctgctgccagcagcgtgcccgaggcgctaaccgatcagctaaatgaaggcggccgactggtgatcccggtgggcgatgatcaacaacaattgttgtgcatcgataaaatagagggcgagctacacagcaccactgtggaagccgttcgttttgtgccattagtggccggagatctcctttga

SEQ ID NO: 227836 - DNA, 371 bp, Unknown
  Bacterial polypeptide expressing nucleotide sequence isolated from the Sargasso Sea
cggttatcagaccgctgtactggcgcgtttattttcacaggtttgtagtgtagagcggataaagtcgttgcagtttcaggccaaacgccgtttgcagcagctggatttgcacaatgtgtcgatgaaacatggtgatggctggcttggctgggccagtaaagcgccttttgactgcattatagtgacagctgcacctcatgaagtgccacaagctttattgcagcaactgtcagagggcgggcgtttagtgatcccagtcggctctcaggagcaagtgttacgagtattcacccgcattggggatgagtttgaacaaaaagatgtcgaggccgtgcgttttgtacccttagttccgggtgagctagcttaat

SEQ ID NO: 227837 - DNA, 583 bp, Unknown
  Bacterial polypeptide expressing nucleotide sequence isolated from the Sargasso Sea
ttttcaaattccaagacatacttttcttgatgaagcattatggtcaagagcatatgaaaatagacctttaacgatagggtacaaacaaactatttctcaaccatatatagttgcaagaatgactgagttattaatttctcataccaaaaccagaggtaaagtatttgataaagttttggatcttgggtcagggtgcgggtatcaatcagctgtgctatctttttttagtgaaaaagttgatgcaatagaaagaattaagcctttagtggaaaaatcaagagagaatttagcaaatttaaaaatacataatgttttatttaagtatggagatggatatcaagactgggataagaaacttcaatatgatggaattatctgtgctgctgctccacgagaatatcctcaagatttaatttcaattttgaaaaataatgcaaaattagtaatacctgttggaggatctgaccaaaggttaaatgtaataacaaaactgaaaaataatgaagttgaagaaaaacaatacgaggaagtatcatttgttcctatgcttgcaggaaaatcagaagatggtaatgatgtatga

SEQ ID NO: 227838 - DNA, 644 bp, Unknown
  Bacterial polypeptide expressing nucleotide sequence isolated from the Sargasso Sea
agagatgatcgaaactcttctagaattaggcataaaagattttagagttttggatgccatttcacaaattccaagacatacttttcttgatgaagcattatggtcaagagcatatgaaaatagacctttaacgatagggtacaaacaaactatttctcagccatatatagttgcaagaatgactgagttattaatttctcataccaaaaccagaggtaaagtatttgataaagttttagaccttgggtcagggtgcgggtatcaatcagctgtgctatctttttttagtgaaaaagttgatgcaatagaaagaatcaagcctttagtggaaaaatcaagagagaatttagcaaatttaaaaatacataatgttttatttaagtatggtgatggatatcaagactgggataagaaacttcaatatgatggaataatctgcgctgctgctccgcgtgaatatcctcaagatttaatttcaattttgaaaaatgatgcaaaattagtaatacctgttggaggatctgaccagagattaaatgtaataacaaaactgaaaaataatgaagttgaagaaacacaatatgaggaagtatcatttgttcctatgcttgcaggcaaatcagaagatggtaatgatgtatgaa

SEQ ID NO: 227839 - DNA, 673 bp, Unknown
  Bacterial polypeptide expressing nucleotide sequence isolated from the Sargasso Sea
tctggatttactttcagaaggtttagagaggaaatgattgaaactcttctagatttagggataaaagatttcagagttcttgatgcgatttcacaagtgccaagacatatttttcttgacgaagctctttggtcgagagcctatgaaaatagatcacttactattggttataaacaaacaatttctcagccatatatagtcgcaagaatgactgaattattaatttctcatacaaattcaagaggtaaaatatttgaaaatctacttgaacttggatcaggttgtggatatcaatcagcagtgctatctttttttagtgaaaatgttgacgccattgaaagaattaaacctttagttcataaatccagagagaatttatcttaccttaagattaacaatgttctttttaagcatggtgatggttatgaagattgggataagcagaaaagatatgatggtattttatgtgcagctgccccaagagcatatccaaatgatttagtttctgtattaaataataatgccaaattggtcattcctgtgggaggctcgtcacaaaaattaaatgtgattacaaaaaacaaagatgaagaaattaaagaagaacaatatgacgatgtatcatttgttccaatgttagcaggaaaatcagaagacggtaatgatgtatgaa

SEQ ID NO: 227840 - DNA, 679 bp, Unknown
  Bacterial polypeptide expressing nucleotide sequence isolated from the Sargasso Sea
catggtagctaaatctggatttacatttaagcgagtaagggagcaaatggttgaaatgcttctggagatgggaatcaaagattttagagttttggatgcgatgagtcatattgctcgtcatcaatttcttgatgaggcattatggtcaagagcatatgaaaatagatctttaactattgggtataagcaaacaatttctcaaccgtatattgttgcaagaatgaccgaattgttaattgaaaaagcgagtggaaggggaaaaatttttaaaaagataattgatattggttctggctcaggctaccaaagtgcaatactttcatttttttcagaagaagtaattggtattgagagaataaagccacttgtttcaaaaagcagatcaacccttttaaatttaggaataaaaaatgtctccattattaatggagatggttatgtacttgatggtctaaaaaacgtagatggaatgatatgtgcagcagcaccactggaaatacccgaagatcttatcaagctattaaaaaaagatgcaagactaattttgccagtaggctttaaaaatactcagaaactcatttgcattgaaaaacaaaataaaaattcatatgaaaaatttgaagtggaagatgtagcttttgttccaatgcttggaggtatcagcagaaatggtaattaa

SEQ ID NO: 227841 - DNA, 426 bp, Unknown
  Bacterial polypeptide expressing nucleotide sequence isolated from the Sargasso Sea
catggcgcttcgcggcatgggcgttggcgagaccgaggtccttgcagcgatggagcaggtgccgcgcgagcagttcgttccgccgacacttcgtgatcatgcctatgaaaacgcctcgcttcccattgccatggaacagaccataagccagccctacgtcgtcgccaggatgacggcggccctgcaactcacgggtcgggagcgcgttctggaaatcggcactggaagcggatatcaggcggccatcctgtctttcttgtgccgtcgcgtttattcgattgagcgtcttcgtccgcttcttgtcgaggccgagacccggttccgccagctgaagatcacgaatgtgacaacaaaagtgggcgacggcgccaaaggctggcccgagggggcgcccttcgacaggatcattctgacctgcgcgccgcc

SEQ ID NO: 227842 - DNA, 682 bp, Unknown
  Bacterial polypeptide expressing nucleotide sequence isolated from the Sargasso Sea
aatgagtaactctggatttacttttagaagggttagagaggaaatgatagaaacacttctggatttagggataaaagatttcagagttctcgatgcgatttcacaagtgccaagacatatttttcttgacgaagctctttggtcgagagcctatgaaaacagatcactgactattggttataagcaaacaatttctcagccatatatagttgcaagaatgactgaattattaatttctcatacaaattcaagaggtaaaatatttgaaaatctacttgaacttggatcaggttgcggatatcaatcagcagtgctgtctttttttagtgagaatgtttatgcaatagagcgaataaaaccacttgttcaaaaatcaaaagaaaatttatctcaattaaaaattaataatgtgttatttaggcatggtgatggttatcaagattgggaaaaagaaaaaaaatatgatggtattttatgtgctgccgctccaagagagtatcctaccgatttagtttctgttttaaataatgatgcaaagctagtaattccagttggtggggcatctcagaaattaaatgttataactaaagtcaataatgatgaaataaaagaagaagaatttgatgatgtatcatttgttccaatgcttgcaggaaaatcagaagacggtattgatgtatga

SEQ ID NO: 227843 - DNA, 682 bp, Unknown
  Bacterial polypeptide expressing nucleotide sequence isolated from the Sargasso Sea
atgaatagctcaggttttacatttagaagggtccgagaggatatgatagaaaatcttcttgatatgggtatcaaagactttagagttcttgacgctatgtcacaagtaccaagacacctgttcattgaagaggctttgtggtctagagcatatgaaaatagatcatggtcgattcaatatggtcagacaatttctcagccctacattgttgcaagaatgactgagttattaatatctcacacaaattcaagaggcaaaatttttgaaaacatattagaacttggttctggatgtggctaccaatcagcagttttatcattttttagtgaaaaagtagatgcaatcgaaagaataaagccattggttgaagaggcaaaaaagaatttatcaaatctaagtatagataatgtatttttcaaacatggagatggatatcaagattggaaaaaaaatattaaatatgatggtattttatgtgcagcagcaccaagggttttcccagatgatttagtgtccgctctcaaaccaaatgcaaaattggtcataccagtaggtggtaaagatcaaaaacttaatgtaatttcggtaaatgaaaaaaatgaaatcaatgaagaagaatttgatgatgtttcttttgtgcccatgctgccaggaatctctgaagagggcaatgagctatgaa

SEQ ID NO: 227844 - DNA, 592 bp, Unknown
  Bacterial polypeptide expressing nucleotide sequence isolated from the Sargasso Sea
atgaagcttagaggacaaggaattcggtcagccagcgtattatcagctatagaaagtgtcccaagagacatattcatcgaaaatgctctcaaaaaccacgcatgggaaaatgtcacacttccaattggagaaggacaaaccattagtcagccgtatatcgtagctttaatgactactgctttgaatttatctggaaaagaaatagttctagagatcggaactggtagtggctatcaagcttcaattttatcacttctatgcagaagagtttatacaattgaaaggataaaaactttacatgaatttgcaaataagaaatttaaggaacaaaaattaaataatataactacaaaatttggcaatgggtctttgggttggccagaagtttctccatttgatagaataattttaacatgtgctattaatcaaattcctaagcaattattttttcaactaaaaattgggggaattttaataggacctgaaattttggaagacagcagccaagtattaagttcttattatcaaattgataagaataaatttgaaaaaaagaaaattgaggacgttaagtttgttccaatgttataaa

SEQ ID NO: 227845 - DNA, 637 bp, Unknown
  Bacterial polypeptide expressing nucleotide sequence isolated from the Sargasso Sea
atgactcgagttgccttaacatcggcggtgaatttagctaaaaagcttcaggaggcggggatccgccatccagccgttcttaaggcaatatcccataccccgcgcgagttgtttcttgataatgcgctggcccataaagcctacgaaaacaccgccttgcccataggccaagggcaaaccatttctcagccttatatcgtggcgcgtatgacagagttactgctgcaacatcagccgcaaaaggtacttgaggtgggaacgggctctggctaccaagcggcgattctcgcgcaattagtgccagaactgtgcaccattgaacgtatcaaagggttacagatccaagcgagacaaagattaaagcgactcgatcttcataatgtgtcattcaaatatggcgatggctggcagggctggccgaatcgcagcccctttgatggcattatggtcacggcggcagcggctaaggttcccgaagccctattgtctcagttagccgaagggggcgtgctgattatccccgttggtgaagagacgcagcaattgatgcgctttacccgtcgctcggatcgttttagttccgaagtgatagaaactgtcaaatttgttcccttggtcaatggcgagctcgcttaag

SEQ ID NO: 227846 - DNA, 682 bp, Unknown
  Bacterial polypeptide expressing nucleotide sequence isolated from the Sargasso Sea
atgagtaactcaggctttactttcagacgggttcggaaagagatgatcgaaactctcctagaattaggcataaaagattttagagttttggatgctatctctcaaattccaagacatacttttcttgatgaagcattatggtcaagagcatatgaaaatagacctttaacgatagggtacaaacaaactatttctcagccatatatagttgcaagaatgactgagttattaatttctcataccaaaactagaggtaaagtatttgataaagttttagaccttgggtcagggtgtgggtatcaatcagctgtgctatctttttttagtgaaaaagttgatgcaatagaaagaatcaagcccttagtggaaaaatcaagagagaatttagcaaacttaaaaatacataatgttttatttaagcatggtgatggatatcaagactgggataagaaaattcaatatgatggaattatctgtgctgctgctccacgagaatatccccaagatttaatttcaattatgaaaaataatgcaaaattagtaatacctgttggaggatttgaccagagattaaatgtaataacaaaaatcgaaaataatgaagttgaagaaaaacaatatgaggaagtatcatttgtgcctatgcttgcaggcaaatcagaagatggtaatgatgtatgaa

SEQ ID NO: 227847 - DNA, 682 bp, Unknown
  Bacterial polypeptide expressing nucleotide sequence isolated from the Sargasso Sea
atgtctaactcaggctttactttcagaagagtaagagaggagatgattgaaactctcttagatctaggtataaaagatttcagagtgcttgatgcaatttcacaaataccgagacatatttttctggatgaggccttgtggtcaagagcatatgaaaataggtccttaactattggttacaaacaaacaatttctcaaccttacatagttgcaaaaatgactgagcttttaattgcacatacaaaatctagaggtaagatttttgagagagttttagaaattggttctggttgtggctatcagtcagcagttttatctttttttagcgaaaaagtagatgcaattgagagaattaagccattggtacagaagtctagagacaatatggctaaacttaagattaacaatgtaatgtttaagtttggtgatggatatcaagattgggacgactcaataaaatatgatggtattttgtgtgctgcttccccaagagaatatccaaaggatctgatttcaatattgaaaaaggatgcaaaattggtattacctgttggcggagcatcacagaaacttaatgtaataagaaaatgcgataaagatgaagtagaggaaagttttcacgatgatgtatcttttgtacctatgttagccggaaaatcagaagacggtaatgatgtatgaa

SEQ ID NO: 227848 - DNA, 631 bp, Unknown
  Bacterial polypeptide expressing nucleotide sequence isolated from the Sargasso Sea
gatggtagataaacagattaaagatcgtggtgtagttgacccaaaagttctagatgtaatcagtaatacccccagacacaaatttgtacctaaggatatggttgattatgcatatgatgatagacctttacctataggagaaggtcaaacaatttcacaaccttacattgtagctcttatgacagagctattgagtttgtctggtaaagaaaaagttcttgagataggtactggctctggatatcaatcagctatattatcatcattatctaataaagtatttacaattgaaatagttaaacctctagcaatacgagcaataaatatattagaagagttgcagattaataatgtttatgctcgatggggagatggatacaacggatggccaagtgaagcaccgtttgattgtataatcgtaactgcagcgccagataaaattccagaagctctcattgaacagttaaaaattggagggaaactagtgattccggttggtaaatattggcaagaattaaaagtaatttcaaaaacatctgattcaaacgtaaatgaaaaaaccattatacctgttcgttttgttcctatggtacatccaagcaattctttttctgatgaggatctcaactga

SEQ ID NO: 227849 - DNA, 682 bp, Unknown
  Bacterial polypeptide expressing nucleotide sequence isolated from the Sargasso Sea
atgaatagctcaggtttcacatttagaagagtcagagaagatatgatagaaaatcttctagatatgggtatcaaagactttagagttcttgatgctatgtcacaagtaccgagacacctttttattgaagaagctctatggtccagagcatacgaaaatagatcttggtcgatccaacatgggcagacaatttctcagccttacattgttgcaagaatgacagagttattaatatctcatacaaattctaggggcaaaatttttgaaaacatattagaacttggttctggatgtggttatcaatcggcagttttatcattttttagtgaaaaagtagatgcaatcgagaggataaagccattagttgaagaagcgaaaaagaatttatcaaatctaagtatagataatgtatttttcaaacatggcgatggatatcaagattggaaaaaaaatattaaatatgatggtattttgtgtgcagctgcaccaagaacctatccgcatgatttagtatctgctcttaaaccaaatgcaaaattggtcattccagtaggaggtaaagttcaaaaacttaatgtaatttcagtcaatgaaaaaaatgaaatcaatgaagaagaatttgatgacgtttcttttgtgcctatgctgccaggaatctctgaagacggtaatgagctatgaa

SEQ ID NO: 227850 - DNA, 682 bp, Unknown
  Bacterial polypeptide expressing nucleotide sequence isolated from the Sargasso Sea
aatgaatagttctggctttgctcttcgaagagtcagagaagagatgattgaaaaacttttagagcttggtataaaagactttagagttttagatgcaatttctcaagttcctaggcacatatttgttgacgaggcacttagatcaagggcttatgagaatagatcacttacaatcggatatcagcaaacaatttctcagccttacatagttgcaagaatgactgaattattaatttctcatacaaaatcgagaggaaaagtgcttgataaagttttagaacttggctcaggatgtggttatcaatctgcagttctatcatatttttgtgaaaaggttgatgcaatcgagaggataaaaccccttgtgcaaaaagcacgtgataatcttgcagaattaaaaattcataatgtccaatttaaatacggcgatggttatatcgattatgataagtcagttaaatatgatggcattttatgcgctgctgctccaagatcctatccagaagatttaatatcagttttgaaaaataatgcaaaattagtattacctgttggtggaaattcgcaaaaactaaatgtgataacaaaaaaacatgatgataattttgacgaagacatttacgaggatgtctcatttgttccaatgctttcaggcaagtctgaggacggtaacgatatatga

SEQ ID NO: 227851 - DNA, 676 bp, Unknown
  Bacterial polypeptide expressing nucleotide sequence isolated from the Sargasso Sea
atggagcataaatctggttttacttttaaaagaatgaaagaccaaatgatcgaggcactcttagatgatgggataaaagactttcgtgttctagacgcgatgtcaaaagtagaaagacataaattcgtagacgaggcattgtggtctagagcatatgaaaatagatcattatctatagggcatcgccaaacaatatctcaaccatatattgttgctagaatgacagaacttcttattcagagatttgctggacgtgggctagttatgaaaaatgtgttagaaattggttctggatgtggttatcaaagtgcagtgcttgcgcagctatcagaaaatgttttaggattggaaagaatcaagcctttagtaagaaaaagcagaataaatttacttgaattgagaatatcaaatgtcaagatcaagcatgctgatggttttcaagcggcaaacgaattagaacaatgctttgatgggattttatgcgcatctgcacccagagatatacccatcgaattgatacctcttctaaaaaaagatgcaaatttagtaatccctgttggatcaagtaaccaaacgcttactgttgtaacaaaaaaaagtaaacaaaattacattactgaagaatatgataaggtttcgttcgtcccaatgttaggaggaaagacaaatcattaaa

SEQ ID NO: 227852 - DNA, 613 bp, Unknown
  Bacterial polypeptide expressing nucleotide sequence isolated from the Sargasso Sea
atgaatatggttgaaacacagatcaaacagagaggcattaaagatcaagctatcttggatgccttgtcaaagataaataggcatgaatttgtccaagaaaattttgaaagattggcatattcagaccgccctgttcctataggcttcggacaaacaataagccaaccctatattgtcgcctttatgagcgaaaaactaaatgttaatactcatcacaaagtattagagatcggtacaggctcaggatatcaagcagcggtactagctgaactttcggaacatgtgtacacaatagagatcatatctgaactggcggaaagagcaaaaaaagtattaaataagaataaatacgataacattttttttcgcattggagatggttataaaggatggcctgaagaagctccatttgacagaatcatggtcacagcagcgccaaaagaggttccagaaagacttattgagcaacttgcacctggtggaataatggtcattcccgttggtgagacagttatgatgcaatatctatggtctatcacaaaagagaatgatggttctattataaaagaaaagattttccctgtaaggtttgtaccaatggtaaaggagtgat

SEQ ID NO: 227853 - DNA, 481 bp, Unknown
  Bacterial polypeptide expressing nucleotide sequence isolated from the Sargasso Sea
gatggtagataaacagattaaagatcgtggtgtagttgacccaaaagttctagatgtaatcagtaatacccccagacacaaatttgtacctaaggatatggttgattatgcatatgatgatagacctttacctataggagaaggtcaaacaatttcacaaccttacattgtagctcttatgacagagctgttgagtttgtctggtaaagaaaaagttcttgagataggtactggctctgggtatcaatcagctatattatcatcattatctaataaagtatttacaattgaaatagttaaacctctagcaatacgagcaacaaatatattagaagagttgcagattaataatgtttatgctcgatggggagatggatataatggatggccaagtgaagcaccatttgattgtataatcgtaactgcagcgccagataaaattccagaagctctcattgaacagttaaaaattggagggaaa

SEQ ID NO: 227854 - DNA, 685 bp, Unknown
  Bacterial polypeptide expressing nucleotide sequence isolated from the Sargasso Sea
aatgagcctagataatgaaaatttgcaaggtcagggcatgacctccttaaggacaaggcaaagactaattgaaagactgactgagaaaggtatatcagatgtaagaatattagaggcaatgagagatagccctaggcatttattcttagatgaagctctcgcaacacgggcatatgaagatttgtccttaccaattggttatcagcagacaatctctcagccctacatcgtagctaggatgacagaatgtctgatttcagatgagcgtttatcagaaattccacttaaaaatactctagaaattggaacaggttgcggttatcaaacatatcttttgtctattttttcaaaaaaggttacaactattgaaagaattgagcctcttcaaattaaagctaagaatattcttaagaatctagaggttaataatgtatcttttaagtttggtgatggtaacaacttaggtcagaaacactacgatgccattctttcagcagcagctcctttagaagttccacataaccttaaagagcgtcttactattggtggtaaattaattttacctgtgggcaataatgaacaacaagttcttaccttggtaaaaagaatttcaaaagatgaatttttagaagaaaaactcgaagaggttatgttcgttcctttactcaaaggagtagtttcataa

SEQ ID NO: 227855 - DNA, 646 bp, Unknown
  Bacterial polypeptide expressing nucleotide sequence isolated from the Sargasso Sea
aatggcttttaagaggggaagctcaaattttgagcagcaaaagcaacaccttttccgttactggcaagaaaatagaatgataaccagtaatacggttttgaaggcatttctagctgtaccaagggaactttttgttgaccagtcctatagagatcagccctatgcagacaatccccttccgatttgctgcgagcagacaatttctcaaccaactaccgtaatgctgatgctccaactgcttaacgtaattccaggtcaacgagtgctagaaataggtacgggaagtggatacaatgcggctttactcgcagaactaaccggtgaagttgttactgttgaacgccatctgaagcttgtcaaattagcccagcataaccttaaacaagcaggttatgaaggtgtaattgtagtaaagggagatggtaaaaagggttatgcatctcatgctccatatgatagaattatagttacagcggccgcagaaaaaatgccacagcaattgaaggatcagctttcagtaggaggattgattgttgtaccaataggagtaccttatagatgcgaaatgataacttttgaaaaaatttcctctgataatttccagacccgcaatcacggcctcttttcatttgttccattggtctaa

SEQ ID NO: 227856 - DNA, 553 bp, Unknown
  Bacterial polypeptide expressing nucleotide sequence isolated from the Sargasso Sea
atgactaattctggttttacctttagaagagttcgtgaggaattaatagaaactcttttagatttgggtatcaaagactttagggttcttgatgccatatcacaaatacccagacatattttccttgatgaagctctttggtcaagagcctatgaaaatagatcactaacaattggatataaacaaacaatttctcaaccttatattgttgccaaaatgaccgagttactggtttctcataccaaatcaagagggaaggtatttgaaagtatattagagataggatcaggatgtggatatcaatcagctattttatctttctttagtgaagaggttcatgccattgaacggattaaaccacttgttcagaagtctagagagaatttatcaaacctgaagattaataatgttttagtgaagcatggcgatggatatcaagattgggaaaaagaaaaaaaatatgatggcattatttgtgctgctgcaccaagagaataccccaatgatttaatttctgtcctaaataaggatgcgaaacttgtaattcctgtag

SEQ ID NO: 227857 - DNA, 643 bp, Unknown
  Bacterial polypeptide expressing nucleotide sequence isolated from the Sargasso Sea
ttgattgactctccaaagcataaaggaaaaagaaaaaaattagtcgaagaattaatttccaaaggaataacaagtaaaagagttttgagtgctatatataatataccaaggcatttttttattgagaatgactttcaagattttgcatatgatgataaagcatttcctatatcagcatgtcaaacaatttctcaaccatacactgttgcattccaaactgaaaaactgtgtataaaggaaggagaaaaaattttagaaattggaacaggatcgggttatcaaacagcaattctaatttatttaaaaactgaggtttattctgttgaaaggatttttgaattgaaaagaaaagctaaaacaactttatcaaaattaaaactaaaaccaaaaaaaataatttgggctgacggatatttaggattcgaagaaaaagctccctttgataaaattttagtaacagcagcttcaaaagaaattcctatggaattattgaagcaattaaaaattaacggtaagatgattatacctattggggatttgaatcaaaaaatgattttaataaaaaaaactgatgcaaataattttgaaaaaacagacttagggtcatttaaatttgtacctatgctaaagaaaacgatttaat

SEQ ID NO: 227858 - DNA, 667 bp, Unknown
  Bacterial polypeptide expressing nucleotide sequence isolated from the Sargasso Sea
aatgaataaccctaaagcaatatatgaaagaccgcttgaagagatgattggaaaattgcttgaaatgggcatcaaagactttagtgttttagatgcaatgagaagggtgcctagacatatttttattgatgaagccttaaggtccagagcttatgaaaatatgtctttacctattggctacaaacaaaccatatcgcagccatatattgttgcaaaaatgacagaactattggttcgaaattcagcaaaacaaaatgagaaatttgaaaagattcttgagataggatctggttgtggataccaatctgctgttctttcttactttgctgacgaggtgcattccgtggaaagaattaaacaattagttagcaaggctcgtgagaatctatcagatctaagaattcataatgtcctaattaaaaatagagatggctttgaaggttgggatgaagaaattaaatatgatggcattctttgtgcagcagcacccccagaaatacccaaaagccttttagcttttttaaaggttggatgttgtcttgttcttccagtgggtggaagcaaatctcagaaattaaaaatagttactaaaactaaaaagggttttgatgaacaagaatgcgaaaacgtttcatttgttccaatgctaggtggtacttcaaaatga

SEQ ID NO: 227859 - DNA, 685 bp, Unknown
  Bacterial polypeptide expressing nucleotide sequence isolated from the Sargasso Sea
gatgggattagatcaagaaatatttcaaggtcagggtatgacctctctaaggacgcgtcaaagactcattgaacgcttaactgaaaaaggtatttcagacgtaagagtcttagaggccatgagagatactccaaggcatttatttttagatgaagctttatcaactagagcttatgaagatcttgctttgccaataggctatcaacaaaccatatctcaaccctacatagtagctaaaatgacagaagcattaattcaaaaagacaagatgtctcagaagccattgaaaaaagtattagagataggaactggctgtggctatcaatcttatattttgtcactattttctaagaaagtagtttctatagagaggatcaaacccctccaagaaaaagccaagaaaattttgaagcaacttaaggtaacgaacatagaatttaatcttgatgatggtagttcagtaaaagaaacaaaatttgatgcaatcttgtcagcagcagcgccacttgaagtacctttagaactaaaacaaaagctttctataggtggaaaaatgattattcctgttggtaacaaatctaagcaagttttaactttagtaactaggacatcaaaaaataattttgaggaaaccaaagtagaagatgtactttttgttccattattaaaaggggttgtatcatag

SEQ ID NO: 227860 - DNA, 628 bp, Unknown
  Bacterial polypeptide expressing nucleotide sequence isolated from the Sargasso Sea
ctgagcgaacggcaaaagcaaaaacaaatcctcctccgttactggaaaaacagcaggatgatcacttcggaaaggattctgaaggcattcatggagattccaagggaatattttgtggagacctcatttgcggatcaggcctatgcggaccatcccctgcccatcggagaaggacaaaccatttcacaacccaccaccgtgatgctgatgctccaactgctggaggtcgaatccgaacacagggttctagaaatcggtgccggctgcggatacaacgctgctatgctgggcctgctggcaaaagaggtggtgaccattgaacgtcatgaaaaattggccgttctgtcacgagctaacctccgaaaatccggaatctccaatgtcaccgtcctggccggggatggtaaactcggtgatcttgagcattctccttacaaccggatcattgtcaccgccgctgctcaaaacatcccagtccagctcaaagaacaacttgctctggatggaatcttgctttccccggtggggcattcccatcgctgcgaaatgctgcgaatccttaaaactccaagcaatcaattccaaacctcgacccatggactgttttcctttgtgcccctggtttgag

SEQ ID NO: 227861 - DNA, 607 bp, Unknown
  Bacterial polypeptide expressing nucleotide sequence isolated from the Sargasso Sea
atgattgagacccagatcaaaaaaagaggtattacagaccaaactatccttgatgctatgaaaaaagtgaataggcatgaatatgtccaagaaaattttgaaagactagcatattcagaccgccctgttcctattggtttcgggcaaaccatcagtcagccctatattgttgcttttatgagttataaactaaatgttgctagccatcacaaagtgctagagatcggcactggttcaggataccaggctgcggtattagcagaactttccgattatgtatacacaatagagatcatacctgaactggccaagagggcagaaaaggtattaaaaaagaatgactatgataatattacaattcgaattggggatgggtataaagggtggcctgaacatgcaccttttgataggatcatggttacagcagcgcctaaagagattccagaaaaacttgttgaacaactcgctcctggtggaattatggttcttcctgtaggagagacagttatgatgcaatatctatggttaataacaaaagacaatgatggtcagatcgaaaaggaaaagatcctccccgtaaggtttgtaccgatggtaaaaaagtgat

SEQ ID NO: 227862 - DNA, 607 bp, Unknown
  Bacterial polypeptide expressing nucleotide sequence isolated from the Sargasso Sea
atggttgaagatcagatcattaaaagaggggtagaagacccgcgagtgctggatgtgatgaaggttgttgagaggcacaagtttgtgcctgaaaaatactctgaatctgcttataaagatggaccactacctataggtcacggccaaaccattagccagccttttattgtcgcttttatgacagaaaatctaaaattagagcccagccataaggttctagagatcggtactggttctggataccaggctgcagttttaagcgaactttgtgatcatgtatataccattgagattgttgatgaattagcgaatgaatccgtagaacgtttaggaagattaggattcaataatatcacggttcgtagtggcgatggctataagggctggcctgaagaagctccttttgacaggattatggttactgctgctccagaagaaatacctgagttactcacagagcagcttgcagagggaggggtcatggttatcccagttggcaaacagtatgaaatacaatatctctgggtaattaccaaggaggctggtggttcaataaaaaaagaaaaaattctccctgttagatttgtcccaatgatatctaaatagt

SEQ ID NO: 227863 - DNA, 535 bp, Unknown
  Bacterial polypeptide expressing nucleotide sequence isolated from the Sargasso Sea
atgagtgagatcataaatcataaaaaaaaccaactcatcaatttattaagagataaaggtataacaaatgagaaagtaattagtattatggagaaaattcctcgtgagtctttcattgatccagctctaaaacagatggcttatgatgatgacgcattacctattggtcataatcaaacaatctcatctccttatattgttgctaaaatgtcccaaataattatagaagaggataaaatggataaagtgttagagatagggacaggatgtagttatcaaacagttgtactatcatatttgtttaaaaaagttgtgagcattgagaggattaaatctttgtatataaaatcaaaaaaaattgtttctgattttaatagaaataatattaaattaatatttggcgatggttatatgggttcgacaattgatgcgccttttgatgctataataattacagctgctccaaataaaataccaaaatctctaatagaacaacttaagactcatggcagaatgattatgcctctaaataaaa

SEQ ID NO: 227864 - DNA, 934 bp, Unknown
  Bacterial polypeptide expressing nucleotide sequence isolated from the Sargasso Sea
atgagcggcgagcgcgcgaagcggttcccgctcgcgctcgaagatctcaagcgagcgccacgcaagtcggaaggtcgggccggcgaacgccatgcggcggtcgcggtatcgaaggccgccgacaagcctgcagccgtgctgaaaccggttgcggtgaagcctgccgtggtgcggacggcattgcccggctccgccgcggcgaagcccgcgaccgttccgaagccgaccgcgccgaagcccgccatgccgaagccggccgcgccgagcgtcgcgccggccggcgcgttcgcgcttacgtcggaacgcgtgcgcgaacggatggtcgaacggctgcgcgcgaacggtgtgaccgacgcgcgcgtgctggaagcgatggccgcggtgccgcgacacatgttcgtggatccggggctcgcgacgcaggcttacgaggattcggcgttgccgatcggccaccagcagaccatatcaaagccgtcggtcgtcgcgcgcatgatcgagctcgcgatggccggccgcacgctcgagcgcgtcctcgagatcggcacgggctgcggctatcaggccgccgtgctgagccacgtggcgcgcgacgtgtattcgattgaacgcatcaagccgctctacgagcgcgcgaagctgaacctgcggccgctgcgcgtgccgaacatccgtctgcactacggcgacgggcgtgtcggcctgccgtccgcggccccgttcgacgcgatcgtgatcgcggcggcggggctcgacgtgccgcaggcgctgctcgaacagctcgcgatcggcgggcggctcgtcgcgccggtcggcgcgcagagcgggcagcaccaggtactcacgctcgtcgagcgcgtcgcgcacgcgcaatggcgagcgtcacggcttgatcgcgttttctttgtccctttaaaatccggagtaatttgaa

SEQ ID NO: 227865 - DNA, 613 bp, Unknown
  Bacterial polypeptide expressing nucleotide sequence isolated from the Sargasso Sea
atgaatatgatcgaaacacagatcaaacagagaggaattaaagatcaagttatcttagatgctatgttaaagataaataggcatgaatttgttcaagaaaattttgaaagattggcatattcagaccgccctgttcccataggcttcggacaaacaataagccaaccctatattgtcgcctttatgagcgaaaaactaaatgttaatactgatcataaagtattggagattggtacaggctcaggatatcaggcagcggtactagctgaactttcggagcatgtgtacacaatagaaatcatatctgaactggctaaaagagcagaaaaagtattaaataagaataaatacgataacattactattcgcattggagatggctataaaggatggcctgaagaagctccatttgataggatcatggtcacagcagccccaaaaaagattccagaaagacttattgaacaacttgcgcctggtggaataatggtcattcctgttggtgagacagttatgatgcaatatctatggtctatcacaaaagagaatgatggttctattataaaagaaaagattttccctgtaaggtttgtaccaatggtaaaggagtgat

SEQ ID NO: 227866 - DNA, 649 bp, Unknown
  Bacterial polypeptide expressing nucleotide sequence isolated from the Sargasso Sea
ttgataaccaataaaatagaaaaattagtcaaagtcctttccgagaaaggtatatccgatgttcgagtattacaagcaatgttggaaatcccgcgacatgagtttcttgacggtgtttttgatgcacaagcatatgaagatatgtcactacctattggacacaagcaaactatctctcaaccatttattgtcgcaagaatgacagaattacttatatcagagactgcttttgtagatagaccgcttggagaggtattagaaataggtgcaggttgtggatatcagacagccgtcttatctaaaatttgtcgaaaggtttttgctatagaaagaatagaacagttatgcgctgttgcaaaaaagaatttaaaaaaacttaatatcaataactttgaaattaaatatggcgatggatatgaaggttggaaaattgaaaaaaaatttgacggaattctttgtgctgcagctgctcctttagttccaaaaaaattaaaacaacaactaaacataggagcaaagctagtatgcccagtaggggatcaagaaaatcaaaaattaatgactgtaaaaagaatctctaaagaagggtttgaagaagaattggttgagaatgttttgtttgttccaatgttagaaggagtggattaaa

SEQ ID NO: 227867 - DNA, 657 bp, Unknown
  Bacterial polypeptide expressing nucleotide sequence isolated from the Sargasso Sea
gacgggtttgggaagagatgatcgaaactcttctagaattaggcataaaagattttagagttttggatgccatttcacaaattccaagacatacttttcttgatgaagcactatggtcaagagcatatgaaaatagacctttaacgatagggtacaaacaaactatttctcagccatatatagttgcaagaatgactgagttattaatttctcataccaaaacaagaggtaaagtatttgataaagttttagaccttgggtcagggtgcgggtatcaatcagctgtgctatctttttttagtgaaaaagttgatgcaatagaaagaatcaagcctttagtggaaaaatcaagagagaatttagcaaatttaaaaatacataatgttttgtttaagtatggtgatggatatcaagactgggataacaaacttcaatatgatggaataatctgcgctgctgctccgcgtgaatatcctcaagatttaatttcaattttgaaaaatgatgcaaaattagtaatacctgttggagggtctaatcagaggctaaatgtgataactaaattaaagaataacgaagttgaagaaacacaatatgaggaagtatcatttgttcctatgcttgcaggcaaatcagaagatggtaatgatgtatgaa

SEQ ID NO: 227868 - DNA, 637 bp, Unknown
  Bacterial polypeptide expressing nucleotide sequence isolated from the Sargasso Sea
atgactcgagttgccttaacatcggcggtgaatttagcgaaaaagcttcaggatgcggggatccgcaatccagccgtgcttaaggcaatatcctatacaccacgcgaattgtttcttgataatgcgttagcccataaagcctatgagaatacagccttacctattggtcaagggcaaaccatttctcagccttatatcgtcgcgcgaatgactgagttactgctgcagcatcagccacataaggtgcttgaagttggaacgggctcaggttatcaagcggcgattctcgcccaattagtaccagagctttgcactgtggaacgtataaagacgttacagatccaagcaaggcaaagattaaagcggctcgatctgcataatgtttcctttaagtatggcgatggctggcagggctggcagaatcgtagtccctataatggcattatggtcaccgcagctgccgcaaaggttcctgaagcgttattatcccagttagccgaaggcggtgtattaattatccctgtgggtgaagaaacgcagcaattgatgcggattacgcgtcacttggatagttttagttctgaagtgatagagacagtcaaatttgttcctttagtaaatggtgagcttgcatagc

SEQ ID NO: 227869 - DNA, 640 bp, Unknown
  Bacterial polypeptide expressing nucleotide sequence isolated from the Sargasso Sea
atgattgaaacacttctggatttagggataaaagatttcagagttctcgatgcgatttcacaagtgccaagacatatttttcttgacgaagctctttggtcgagagcctatgaaaatagatcattgactattggttataagcaaacaatttctcagccatatatagttgcaagaatgactgaattattaatttctcatacaaattcgagaggcaaaatatttgaaaatctacttgaacttggatcaggttgtggatatcaatcagcagtactatctttttttagtgaaaatgttgatgcaattgagcgaataaaaccacttgttcaaaaatcaaaagagaatttatctcaattaaaaattaataatgtgttatttaggcatggtgatggatatcaagattgggaaaaagaaaaaaaatatgatggtattttatgtgctgctgctccaagagagtatcctaacgatttagtttctgttttaaataatgatgcaaagctagtaattcccgttggtggagcttctcagaaattgaatgttataactaaaatcaataatgatgaaataaatgaagaagaatttgatgatgtatcatttgttccaatgcttgcaggaaaatcagaagatggaaatgatgtatgaa

SEQ ID NO: 227870 - DNA, 604 bp, Unknown
  Bacterial polypeptide expressing nucleotide sequence isolated from the Sargasso Sea
aatgggcattaaagactttagtgttttagatgcaattagaagagtgccaagacatatttttattgatgaggccttgaggtctagagcttacgagaatatgtctttacctattggttttaagcaaaccatatcgcagccatatattgttgcgaaaatgacagaattattggttagaaactctaaaaaacaaaatgaaaaatttgagaagattcttgagataggatctggttgtggatatcaatctgcagttctctcttactttgcggatgaggtacattctgtagaaagaattaaacaattagttagcaaggctcgtgagaatctatcagatctaagaattcataatgtcctaattaaaaacagagatggctttgaaggttgggatgaagaaattaaatatgatggcattctttgtacagcagcacccccagaaatacccaagaggcttttagcttttttaaaggttggatgtagtcttgtcctcccagtgggtgggagcaaatctcagaaattaaaaatagttactaaaactaaaaagggttttgatgaacaagaattagaaaacgtttcatttgttccaatgctaggtggtacttcaaaatga

SEQ ID NO: 227871 - DNA, 682 bp, Unknown
  Bacterial polypeptide expressing nucleotide sequence isolated from the Sargasso Sea
aatgaatagttctggctttgctcttcgaagagtcagagaagagatgattgaaaaacttttagagcttggcataaaagactttagagttttagatgcaatttctcaagttcctaggcacatatttgttgacgaggcacttagatcaagggcttacgaaaatagatcacttacaatcggatatcaacaaacaatttctcagccttacatagttgcaagaatgactgaattattaatttctcacacaaaatcgagaggaaaggtgcttgataaagttttagaacttggctcaggatgtggttatcaatctgcagttctatcatatttttgtgaaaaggttgatgcaatcgaaaggataaaacctcttgtgcaaaaagcacgtgataatcttgcggaactaaaaattcataatgtccaatttaaatacggcgatggttatatcgattatgataagtcagttaaatatgatggcattttatgtgctgctgctccacgatcctatccagaagatttaatatcagttttgaaacataatgcaaaattagtattacctgttggtggaaattcgcaaaaactgaatgtgataacaaaaaaacatgatgataattttgacgaagacatttacgaggatgtctcatttgttccaatgcttccaggcaaatctgaggacggtaacgatatatga

SEQ ID NO: 227872 - DNA, 667 bp, Unknown
  Bacterial polypeptide expressing nucleotide sequence isolated from the Sargasso Sea
aatgaataaccctaaagcaatatatgaaagaccgcttgaagagatgattggaaaattgcttgaaatgggcatcaaagactttagtgttttagatgcaatgagaagggtgcctagacatatttttattgatgaagccttaaggtccagagcttatgaaaatatgtctttacctattggctacaaacaaaccatatcgcagccatatattgttgcaaaaatgacagaactattggttcgaaattcagcaaaacaaaatgagaaatttgaaaagattcttgagataggatctggttgtggataccaatctgctgttctttcttactttgctgacgaggtgcattctgtggaaagaattaaacaattagttagcaaggctcgtgagaatctatcagatctaagaattcataatgtcctaattaaaaatagagatggctttgaaggttgggatgaagaaattaaatatgatggcattctttgtgcagcagcacccccagaaatacccaaaagccttttagcttttttaaaggttggatgttgtcttgttcttccagtgggtggaagcaaatctcagaaattaaaaatagttactaaaactaaaaagggttttgatgaacaagaatgcgaaaacgtttcatttgttccaatgctaggtggtacttcaaaatga

SEQ ID NO: 227873 - DNA, 655 bp, Unknown
  Bacterial polypeptide expressing nucleotide sequence isolated from the Sargasso Sea
aaagcaatatatgaaagaccgcttgaagagatgattggaaaattgcttgaaatgggtatcaaagactttagtgttttagatgcaatgagaagggtgcctagacatatttttattgatgaagccttgaggtcaagagcttatgaaaatatgtctttacctattggcttcaaacaaaccatatcgcagccatatattgttgcaaaaatgacagaacttttagttcgaaactcagcaaaaaaaaatgaaaaatttgaaaagattcttgagataggatctggttgtggttatcaatccgctgttctttcttactttgctgatgaggtgcattctgtggaaagaattaaacaattagttagtaaggctcgtgagaatctatcagatctaagaattcataatgtcctaattaaaaatagagatggctttgaaggctgggatgaggaaattaaatatgatggcattctttgtgcagcggcacccccagaaatacccaaaaggcttttagcttttttaaaggttggatgttgtcttgttcttccagtgggtgggagtaaatctcagaaactaaaaatagttactaaaactaaaaaaggctttgatgaacaagaatttgagaatgtttcatttgttccaatgttaggtggtacttcaaaatgaa

SEQ ID NO: 227874 - DNA, 532 bp, Unknown
  Bacterial polypeptide expressing nucleotide sequence isolated from the Sargasso Sea
gaaaagtttattagtgaaacttacagaaatcaagcttatgaaaatatagctttaccaattgaaaataatcaaacaattagtcagccctacgttgtagcaaggatgactgaattacttgatgttaaaagtaaccacaaggtgttagaaataggcactggtagcggatatcagtgtgcagtattatcaattttagcaaggcgtgtatacacgattgaaaggattaaaaatttacatgaagtttctaataatatttttgagaaattaaaattaactaatattgtttcaaaatacaatgatggtaataatggttggattgaacaaataccctttgatagaataatatttacagcagcatcaaaaaaaataaataatgaaattttttctcatattgaaaatgaaggaattattgtttgtcctattgttaaaaataataagcaaatacttgtgaaatatataaaacaaaataataaaattatttctgaagaatatgatgatgttttatttgttccaaatcttcaaggtgtagtataac

SEQ ID NO: 227875 - DNA, 601 bp, Unknown
  Bacterial polypeptide expressing nucleotide sequence isolated from the Sargasso Sea
ttgaatcaactgattgcccaggatgtccgcgatttccgcgtattggcggcgattgcgaaggtgccgcgccagctgttcgtggatgaagccatggcccacaaggcctgggacaatacggccctgcccatcggccatgggcagaccatctcccagccttacatcgtggcgcgcatgaccgagctgctgatccagaacgatccggcccatgtgctggagatcgggacgggatcgggctaccagacggcggtactggcccacctggtggagcatgtctacaccatggagcggatcaagtcgctgcagtttcaggcccggcgcagattgcgccagctcgatctgcacaatgtgtcggccaagcacggtaatgggtggctaggttggcccaacaagggccctttcgacgccattctggtgacggcggcggccagtgaggtccccaaggccctgaccgatcagctggctgacggtggtcgtctggtgttgccggtgggtgatggccagcagaccctgcagctcatcgagcgatcgggctcccagctcaccagccggatcctggagccggtacgtttcgttcccctgattgacggagatgtcgagtgaa

SEQ ID NO: 227876 - DNA, 652 bp, Unknown
  Bacterial polypeptide expressing nucleotide sequence isolated from the Sargasso Sea
atgaatagcattgatgaacagaaaatgcagtttattttaactattcgctcaaacggagtagtagataaaaatgtactcaatgcactcgagacagttaatagacagcactttcttaaaggtctatttgcccaaagagcatacgaagacactccacttccaatagaatgtggccaaaccataagtcaaccatctgtagtagggttaatgacccaagctttgaacattaaaagccgcgataaagttttagaaattgggacaggatcagggtatcaaacagcaatattaagcaagctggcccgaagaatttattcaattgaaaggttcaaaccattatacgaagaagcaagagaaattttcaataaattaaatttaaataacgttacatctgtttggggtgatggaagtcagggacttgtggaacaacaaccgtttgatcggataattgtgaccgcggcggctgaagatccacctccaacattactcactcaactaaagatcggcggcatcatggtaatacctgtggggcaatccgatgaaattcaaaaacttattagagtggaaagaacggaaacacacttcaaatatgaagatttatgcgatgtacgctttgtaccattgctcgaaggaaaagaagaagatatctatgtataga

SEQ ID NO: 227877 - DNA, 646 bp, Unknown
  Bacterial polypeptide expressing nucleotide sequence isolated from the Sargasso Sea
tatgaaagatttacgttttcagggtttaagaaataagttagttaatcaattaaaaacaaagggcattagtgataaaaaagttttggatgccatttcaaaggttcctaggcatttgttttttgatgaagtttttcaaaatcaatttgcttacgaagatgttgcttttccaattggtcaagatcaaacaataagtcaaccttatactgtggcatttcaatcggagatgttaaatgtcaaaaaggggcataaagtattggaaataggtactggttctgggtatcaaacggctgttttgtgttttcttggtgcaaaagtatattcaattgaaagacagaaacctttatttgagaaggcttctatttttctttctgaaaatggttacagagctaatttgttttttggtgatggttttaagggtaagaaggtttttgcaccttatgattcaattattgtaacttgtggagcaccttttgttccggatgatttaaaaatgcaattaaaaataggcggcaggatggttatacccgttggagacggagatgtgcaacaaatgaaattaattgtacgttctaaggttgatgtgtttaaagaaacaacctatggtgaatttaaatttgtcccaatgttgaaaaataaaaacaactga

SEQ ID NO: 227878 - DNA, 604 bp, Unknown
  Bacterial polypeptide expressing nucleotide sequence isolated from the Sargasso Sea
ttgatacttgaattaagagagttaggtattagtaatgctaacgttctctccgcaatagaaaaaattccaagagaaaattttataagtgaagcttacagaaatcaagcttatgaaaatatagctttaccaattgaaaacaatcaaacaattagtcagccttacgttgtagccaggatgactgaattgcttgatgttaaaagcaaccacaaggtactagaaataggcactggtagcggatatcagtgtgcagtattagctatcttagcaaggcgtgtatatacaattgaaagaattaaaaatttacatgaaggttctaattatatttttgagaaattaaaattaactaatattgtttcaaaatatgatgatggtaataatggttggattgaacaaataccttttgatagaataatatttacagcagcatcaaaaaaaattaataatgaaattttttctcatattaaaaatgaaggaattattgtttgtcctattgttaaaaataacaagcaaatacttgtaaaatatataaaacaaaataataaaattatttctgaagaatatgatgatgttttatttgttccaaatcttcaaggtgtagtatagc

SEQ ID NO: 227879 - DNA, 348 bp, Unknown
  Bacterial polypeptide expressing nucleotide sequence isolated from the Sargasso Sea
catgactaatataaaagaagaagaaaaggctaatttaatcatgtctttaaggtctatgggtataatttctcatgatgttctttcggccttagagagcactccaagagaaatatttattcctaaacatctctctcattatgcctatgaaaatagggcactcccaataggttttaaccaaacaattagtcaaccatatattgttgctttgatgacagagaagttatccttaaactctaatgatattgttttagaaataggaacaggatctggttatcaaacagcaattatatcaaaattggtcagaaaagtttatacaattgagaggattaatccattgttagtcgaagc

SEQ ID NO: 227880 - DNA, 619 bp, Unknown
  Bacterial polypeptide expressing nucleotide sequence isolated from the Sargasso Sea
acacgagatcgtttaatcgcgaggcttagagagcaagggataagtgatgaacaagtcctagaaacgatgcgaacaacccccagacatattttcattgaagaggctttggcccacaaagcttatgaagatacagccttaccaattggatttaatcagacaatatctcagccgtttgttgtggcgaagatgacgcagctggttctgcaaggagcacatgatagtgttttagaaataggtactggctcaggatatcagactgcaattctggctaaattatgtgccagtgtgcacagtctagagcgcgtgtccgcctttattccaaaagccagggagcgtctaagagctcttaaattatcaaatttcagtctgcatttagctgatggatacaaggggctggaagaatcagggccctttgacactattatttgcacagctgctccgaaatcgatccccttggagttaatgaatcaactgaaagtaggcggacgcatgattattcctgtgggagattcggttcagcaacaacttaaggtaatagagcgtaaagaggaagaatttcagtccaatgtagtggacgatgtaatgttcgttcctttgcaggaagggatagttagctgat

SEQ ID NO: 227881 - DNA, 592 bp, Unknown
  Bacterial polypeptide expressing nucleotide sequence isolated from the Sargasso Sea
tatgacttcgcagcgaacacgagatcgtttaatcgtgaggctcagagagcaagggataagtgatgaacaagtcctagaaacgatgcgaaaaacccccagacatattttcattgaagaggctttggcccacaaagcgtatgaagatacggccttaccaatcggatttaatcagacaatatctcagccgtttgttgtggcgaagatgacgcagttggttctgcaacgagcacataatagtgttttagaaataggtactggctcaggatatcagactgcaattctggctaaattgtgtgccagtgtgcacagtctggagcgcgtgtccgcctttattccaaaagccagagagcgtctaagagctcttaaattatcaaatttcagtctgcatttggctgatggatacaagggattggaagaatcaggcccctttgacactattatttgcacagctgctccgaaatcgatccccgtcgagttaatgaatcaactgaaagtaggcggacgcatgattattcctgtgggagattcggttcagcaacaacttaaggtaatagagcgtaaagaggaagaatttcagtccaatgtagtggac

SEQ ID NO: 227882 - DNA, 523 bp, Unknown
  Bacterial polypeptide expressing nucleotide sequence isolated from the Sargasso Sea
attcctgaaaattataaaaatcaagcatatgaaaatattgctttacctattggagataatcaaactatcagtcagccatatgttgttgctagaatgacagaacttttagaagttaaatctaatcacaaagttttagaaattggaacaggtagtggttatcaatgtgcaattttgtcaaaattagctagaagagtctacactattgaacgaattaaaaatttacatgagaaatcttttagaatttttgaagaactaaaattaaccaatattgtgtccaaatatgatgatggtaataaaggttggaaagagcaaataccctttgatagaataattttcactgcagctacaaaaaaaataacagatgtaatattttctcatattgctgaaaatggtattattatatgccctataataaaaaatgataaacaaattattgtaaaatatattaaaaaagatcaaagaattatttcaaaggaatatgataatgttttatttgtcccaaacttaagtggtaagatttaat

SEQ ID NO: 227883 - DNA, 406 bp, Unknown
  Bacterial polypeptide expressing nucleotide sequence isolated from the Sargasso Sea
atgaatgagtcaaaagcccttcttatactaaaattgagaaaaattggggtttctaatccagaaatattagattgcatagagtcaatagatagaagtcgttttgtctcagagagttttctaagtcgatgcttagaagatatcgcgctccccattgattgtggccaaactattagccaaccttcgttagtagcatttatgacccaacatttagaaattccgcaacgaagtaaagttttagaaataggtactggctctggttaccaaacagcaatactttctagactagcatcaagagtctattcaattgagagacataaaaagcttgtagacatagctaagaataggcttgacaaccttaacatatcaaatgtgataatacttctacaggatggtttctttggttatg

SEQ ID NO: 227884 - DNA, 574 bp, Unknown
  Bacterial polypeptide expressing nucleotide sequence isolated from the Sargasso Sea
gatgagcaagtcttagaaacgatgcgaacgacccccagacatattttcattgatgaggctttggcccacaaagcatatgaagatacggccttaccaattggatttaatcagacaatatctcagccgtttgttgtggcgaagatgacgcagctggttctgcaaggagcacatgatagtgttttagaaataggtactggctcaggatatcagactgcaattctggctaaattatgtgccagtgtgcacagtctagagcgcgtgtctgcctttattccaaaagccagggagcgtctaagagctcttaaattatcaaatttcagtctgcatttagctgatggatacaaggggctggaagaatcagggccctttgacactattatttgcacagctgctccgaagtcgatcccccttgagttaatgaatcaactgaaagtaggcggacgcatgattattcctgtgggagattcggttcagcaacaacttaaggtaatagagcgtaaagaggaagaatttcgggccaatgtagtggactatgtaatgtttgttcctttgcaggaagggatagttagctgat

SEQ ID NO: 227885 - DNA, 664 bp, Unknown
  Bacterial polypeptide expressing nucleotide sequence isolated from the Sargasso Sea
atggatatccaactcagcggcatcggtatgacctctgcacggacccgggataggttagtgcagcggctgcgtgatgccggtatccaggacgagcgcgtactggacgctattcgtaatacacctcgacatttgtttatcgaagaagcgctggctcaccaggcctatgacgataccgccttgcctatcggccatggtcagaccatctcccagccctgggtagtggcacggatgaccgagctgctgattgccaagggcaagccccgcaaggtgctagaaattggcactggctgtggttaccaaacagcggtgctggcgcctttttgcgacgagctttattcggtggaacgtattcgcccgttacaggatctggcacgcaaacgtctgctacagctggggctggccaaggtccagctcaaacatgctgacggcggcttcggctggacagcggaggcgccattcgatgctattcttgcggcctgtgcccgcgtggatattcctgagggtttattatcgcagttggcagatggtggccgcctggtgatgcctgtcggcggcgatcgtcagcaggttctcactgtggttgatcgtgacggtgaccagttccgtagccaaacgctggattcggtacggtttgtgccttttcagcgcggggtgttgaggtaag

SEQ ID NO: 227886 - DNA, 610 bp, Unknown
  Bacterial polypeptide expressing nucleotide sequence isolated from the Sargasso Sea
ttgcttgatttaaaaaaacaaggagtttcagatataaatgttcttaatgtaattgaggatatagatagatcattatttattgacactaatttaaaagaaaaatcgaatcttaatattgctcttccaattgagtgtggtcaaactatctctcaacctttaatagtagcttatatgactcaaatgcttgagataaataaaagaatgagagttttagaaataggaacaggaagtggttatcagtcatttgtcttatctaaactttccagatttgtctatacaatagaaagacataatattttactaaagaaggcaaaaaaccttcttcaaagtatgaatattaacaatgttttttttaaacatgctgatggaggtttggggtggttagaacaagcaccctttgataggataattgtaacagctagtgcaccagaaattcccaataatcttctcagtcaattagtagataatggtattatggttattccaattggtgaggataatgacaatcaagttctaaaaaaaataattaaaaaagatgataatattattgtaaaaaatatgatgaatgttcgttttgttccattgttagaaggtaaagttgagtattgag

SEQ ID NO: 227887 - DNA, 442 bp, Unknown
  Bacterial polypeptide expressing nucleotide sequence isolated from the Sargasso Sea
catggtggcgcggatgaccgagctgctgatccagaacgatccggcccatgtgctggagatcggcactggctcgggttaccagacggcggtgctggctcatctggtggagcacgtctacacggtggagcggatcaagtcgctgcagttccaggcccggcgccggctgcgtcagctcgatttgcacaatgtctccgccaagcacggcaatggctggttgggctggcccaacaagggaccgttcgacgccattctggtgacggctgccgccagcgaggtgccgacggccctcaccgaccagctggccgatggtggccggttggtgttgccggtgggggacagccagcagaccctgcagctgatcgagcggtcgggctcccagctgaccagccggatcctggagccggtccgtttcgtccccctgattgacggagatgtcgagtga

SEQ ID NO: 227888 - DNA, 406 bp, Unknown
  Bacterial polypeptide expressing nucleotide sequence isolated from the Sargasso Sea
attgatactagagttaagagagttaggtattagtaatgctgaagttttatcagcaatagaaaaaattccaagagaaaagtttattagtgaagcttatagaaatcaagcttatgaaaatatagctttaccaattgaaaataatcaaacaattagtcagccctatgttgtagcaaggatgaccgaattacttgatgttaaaagtaatcacaaggtattagaaataggtactggtagcggatatcagtgcgcagtattatcaatcttggcaaggcgtgtatacacgattgaaagaattaaaaatttacatgaaggttcaaataatatttttgagaaattaaaattaactaatattgtttcaaaatacgatgatggtaataatggttggattgaacaaatacctttttga

SEQ ID NO: 227889 - DNA, 355 bp, Unknown
  Bacterial polypeptide expressing nucleotide sequence isolated from the Sargasso Sea
attctggcgcacctggtgcaccatgtgtgctctgttgagcgcattaaaggtttgcagtggcaggcgcgtcgtcgacttaaacagcttgatttacataatgtttctacccgtcatggtgatggatggcaaggctggcaagcgcgagccccgtttgacgctatcattgttacggcagcgccgcctgagatcccaaccgcattgatgatgcagttggatgaaggcggcattctcgtcttacccgtgggtgacgagcaccagtttctgaaacgggtgcgtcgtcggggaggcgaatttattatcgataccgtggaggccgtacgcttcgttcccttagtaaaaggggagcttgcgtaga

SEQ ID NO: 227890 - DNA, 607 bp, Unknown
  Bacterial polypeptide expressing nucleotide sequence isolated from the Sargasso Sea
attggcacaaaaacttcagcaagatgggattaaagacagcaaagtcttatccgctatcgcgcaaacgccacggcatttgtttgttgaagctgtattggcgcataaagcttatgaaaacaccgctttgcctataggccaggggcagaccatttcacagccctacatagtggcgaaaatgaccgagttattgttgcaatcccagcagtgccaaaaggtgctggaaattggtacaggctctggttatcagacggctgtactagcgaggttattttcacaagtttgtagcgtagagcggataaagtcgttgcagtttcaggccaaacgtcgtttgcagcagttggatttgcataatgtgtcgatgaaacatggtgatggttggctcggctgggccagtaaagcgccttttgattgcattatagtcacggcagcaccgcatgaagtgccacaagccttgctgcagcaactctctgaaggaggccgtttagtgatccccgttggtgctcaggaacaagtgttaagagtatttaccagggtgggtgatgagtttgaacaaaaagatgtagaggcagtacgttttgtgcctttagtgcctggcgagctggcttaa

SEQ ID NO: 227891 - DNA, 637 bp, Unknown
  Bacterial polypeptide expressing nucleotide sequence isolated from the Sargasso Sea
catgagagcttctagaaaaggagacgcgttagcacaactgctttataacgagggaatacgttcgcaagcagtattgaacgccattgctggtacgccgcgggaaagctttttacccgacgcgctgaaacataaggcctatcaaaatacggcattgccaataggtcaaggccaaaccatttcgcagccttatattgttgcgaaaatgacagagttgctcctagatagccctaataaacccgagaaagtgttagaaataggcacgggttcaggttatcagaccgctattcttgcgcagctttttgccaaagtattcagtgttgaacgtattaaatcattgcagttccaagcgaaacgtcgaatgaatcagctcgaccttcacaatattgcaatgaaacacggcgatggttggaaaggttgggcgtccaagggcccttacgatgccattattgtcaccgccgccgctgcaagtcttccacaggatttgtgcgatcagcttaaagaaggcgggcggttgattattcccgtaggtaacgagcaacaatcgttactgtgtattgataggattgaaggtgaactaaaaacatcgaccattgaatcggtccgatttgttccccttgtagcaggagagctaatgtga

SEQ ID NO: 227892 - DNA, 802 bp, Unknown
  Bacterial polypeptide expressing nucleotide sequence isolated from the Sargasso Sea
ttgtctacgggtaatttggatttcgaacagttccgggtcttcctggaaaaagcctgtggcatattgctcggtgaaaacaagcagtacctggtatccagccgtctcaacaagctgatggaacagcagggcatcaagtccctgggtgagttggtccagcggatccaggggcagccgcgcagtgggctcaaggaaatggtggtcgatgccatgactaccaacgaaaccttgtggtttcgcgatacctatccctttgaagtgctcaagaacaaagtcttgccggaagccatcaaggccagcccgggccagcgcctgcgtatctggtcggcggcctgttcctcggggcaggagccgtactcgatctcgatgtccatcgacgagttcgagcggaccaacatgggccagttgaaagccggcgcgcaaattgtggccacggacttgtccggcactatgctcaccaactgcaagaccggtgagtacgacagcctggcgttgggccgaggcttgtcccaggagcgccttcaacgttacttcgatcccaaaggggcggggcgttgggcgatcaaggcgccgatcaagaatcgcgtcgaattccgctcgttcaatctgctcgacagctacgccagcctgggcaagttcgacatggtgttctgccgcaatgtgctgatctatttctccgctgaagtgaagaaagacatcctgctgcgtatccatggcacgctcaagcgcggaggttatctgttcctcggtgcttccgaggcgctcaatgggctgccggatcacttccaaatggtgcaatgcagcc

SEQ ID NO: 227893 - DNA, 818 bp, Unknown
  Bacterial polypeptide expressing nucleotide sequence isolated from the Sargasso Sea
tatgttagtggcaaacaaagagctgcaggaaagtgagtatcgactgtttcgggattttctcgaacaacagtgtggtattgtgctgggtgacaacaaacaatatctggtcaaaagtcgtctggcgcctttgatgcagcggtttggcctgtcttcactgtctgaattactcaacaaaaccttaagcccctttgagcggcaattgcgttccgctgtgattgacgctatgaccaccaacgaaacactgtggtttcgcgacaattatccttatgagctgttaaagaaacaaatattgcctgagtttgaaaaagaccataaaaccgtcaagatttggtcagcggccagctcttccggccaggaaccttattcaatcgctatgaccggactggaataccagcaaagccggccttctgcttttcctttgggattgcaaattttgggtacggatatatccaatgcaatgctggaacattgccagcgtgctgaatatgacggtttagccttatcacgcggtttgtcgcctgagcggcggagtaaattttttgacgattccggaaacggcatgatgcggctaaaagatgccgtgcgtaaaaatgtttctttccgtcatttaaacctgctcgatagttataccttgttgggtaagttcgatattattttctgtcgcaatgtactgatttacttttcccctgaagtgaaaatgaagatcattaaacagttcgcacaagccttgaacccgcgtggttacttgtttcttggtgcttcagagtctctctccagcctgaacaacgactttgatatgttgcgttgtaacccaggca

SEQ ID NO: 227894 - DNA, 832 bp, Unknown
  Bacterial polypeptide expressing nucleotide sequence isolated from the Sargasso Sea
attggctaataaagacgtttcgccagcaagttacctcaagtttagagagtttttggaaaagcaatgcggcatagtattaggtgataataaacaatacctggtgcgcagccgtttagcttcattactctataagcataagtatgagtctgctgacgaactgattgacgtggttgtgaaagggttcgacagaactttactacagaacgttattgacgcaatgaccacaaacgaaacgttgtggtttcgagacaactatcccttcgatttacttgtaaaagagttactaccaacactatcggcaaaaaatcagaagcttcgcatatggagtgccgcttgttcgtctggacaagagccttattctattgcgatgtctgtacttgaatatcagcgccaaaggccaggtgcattaagagcgggtgttgaaattgttgctacagatttatcgtcagaaatgctgcaaaagtgtgagttaggtatttatgacgaactgtcccttgcaaggggattgtccccgcaaaggagacaggcctttttccagcaaaatgatagcgggcttatgcaggtaaaacccgacgttcgtcggatggtaagctttagaagtctaaatttactttcgagctatgcagcacttggccgctttgatatcgttttttgccgtaatgttttaatttatttctcggccgaagtaaaacaacgcatcctgcagcaaattgccggacagctgcagcctcagggtgtgcttttccttggcgcctctgaatcaatcagcgctgcaagtgatacctacagtatggttaagtgccaccctggcctttactatcaaaaaaaatga

SEQ ID NO: 227895 - DNA, 547 bp, Unknown
  Bacterial polypeptide expressing nucleotide sequence isolated from the Sargasso Sea
tcctgagtttaaagatttgaggcggcctgtaaaaatttggtctgcagctagttcgtctggtcaagagccttattctattgctatgtcggttgctgagtttcaatctaagcagcctaacgttttaaaaatgggtgctcagatcattggtactgatatttctaacactatgctagacatgtgtaaaaatggcgagtatgacgcgttagctttggcgcgcgggttgtctgcagaacgtcgaaaaaagttttttacagacagcggcaatggtatggcaaaagttaacgacactttgaaaagacaagtgagctttaggcatttaaatttactagattcgtatgcattaatgggtaaattcgatattattttttgccgcaatgtacttatttacttctctccagaggtaaaagcaaaaattattaaacaatttgcacaagcgcttaatcctaaaggttatttatttttaggggcttcggagtcaatggccgggttgagtgacgaatttgatatggttagatgcaaccctggcattatttaccaaaagaaataa

SEQ ID NO: 227896 - DNA, 976 bp, Unknown
  Bacterial polypeptide expressing nucleotide sequence isolated from the Sargasso Sea
catgccgcacgcgcgcgcgccgtttcgacccgatgtaccggatgcctcgcctcgcgcgggcgagccggggcgcgacttcgcgttcaccagcgcggatttcgcacgcattcgcgcgctgatccatcaacgcgcggggatctcgctgtccgagcacaagcgcgacatggcgtacagccgtctcgcgcgccgcttgcgggcacgcggcctcgacacgtttcgcgactacctcgacctgctcgagcaggaagacgatccgctcgagtgggaagcgttcaccaattcgctgacgacgaacctgaccgcgttcttccgcgagtcgcaccatttcccgatcctgtcggagttcgtgaaggggcggccggcaccggtatcggtctggtgctcggcggcgtcgaccggcgaggagccttactcgatcgcgatcacgctgatcgaggcgctcggcgaatcggccgcgcgcggcgcgtcgattctcgcgaccgacctcgacacgcaggtgctcgcgaaggcggaggccggcatctacacgtacgaccaggtcaagcacctggcgccggagcggctgaagcgcttcttcctgaagggcacgggcgcgcaggccggccgcgtgaaggtgcgtcccgagctgcgcgcgatgatccgcttcgagcagttgaacctgaccgatgcggattacggcatcgcgaagccgttcgacgcgatcttctgccgcaacgtgatgatctatttcgacaagccgacgcaggggcaggtgctgtcgcgcttcgagccgctcgtgaagccgggcgggctgctgttcgccggtcattccgaaaacttcacgtacgtcacgcaggcgttccggctgcgcgggcagacggtgtacgaactgacccgcgacgccgcacagggcgcgcggccgcggggcgcgcaggcgcctgcgatgctgtccgccgcgcatgcgcgtgccgcatcagctcctggagtgcgcggatga

SEQ ID NO: 227897 - DNA, 982 bp, Unknown
  Bacterial polypeptide expressing nucleotide sequence isolated from the Sargasso Sea
catgacggcaacgcgcgcacaacaatctccgcgagcggcagctccacaagcggcacgtgccgaccgggctgaaccgcttagatccggcgagcaaggacgggatttcgaattcacgtcggcggatttcgctcgtattcgcgatctgattcatcacagcgcgggtatttcgctgtcggatcacaagcgcgacatggcgtacagccggctggcgcggcggctgcgcgcccgtggcctcgagactttcaagcagtacctggatctgctcgaagcggaaaacgacccggccgagtgggaggcgttcaccaatgcgctgaccaccaacctgaccgcattcttccgcgaagcccatcatttcccgatcctcgccgaattcgtgccgcgccgcccgcaaccggtttcggtgtggtgctcggcggcctcgaccggggaggagccgtattcgatcgcgatgacgctgatcgaagcgctcggcgatagcggcgcgcgccaggccaccgtgctcgcgaccgacatcgacacgcaggtgctggcgaaagccgaagccggcatgtatcagttcgaccaggtgaagcacctgtcgcccgagcggctcaagcgcttcttcctgaaaggcacgggagcgcacgcgggcctcgtcaaggtgcgtccggaagtgcgcgcgatggtgcgcttcgaacaactgaatctgactgaccgcgattaccagttgcgctcgcagttcgacgcgattttctgccgcaacgtgatgatctatttcgacaagccgacccaggcgcaggtgcttgcgcgcttcgagccgctgatgaagtccggtggtctgctgtttgccggccactcggaaaacttcacctatgtgacgcaggcgttcaagctgcgcggccagaccgtctacgaactgacgcgcgacgcaggcgcggcacgcacgcccgcgcgtgccgcgagccatgcggctggcgcaacgacaagcggggtgaccgcatga

SEQ ID NO: 227898 - DNA, 826 bp, Unknown
  Bacterial polypeptide expressing nucleotide sequence isolated from the Sargasso Sea
atgaagacactttcggacgacttatacaaacaattcagcaattttctggcggtacagagcggaatcgtgctgggtgacaacaaacagtatctggtcaagagtcggctttcacccttgatgactcagtttggtattgagagtctgtctgatctggttactcgagcgatgagtgtgcgtgagcgtgacctgaaaatggcagtggttgatgccatgactaccaacgaaaccctgtggtttcgcgatacctaccccttccagctgctgacggacaagatatttcccgagctcggcaagagtggtcgaccgatcaagatctggtctgcggcctcctcttctgggcaggagccctactccattgccatgacggccctggaacagcaggtcaaaaaaccgggcaccttgccaggcggggtgcagatcgtcgggactgatatttccagcaccatgctcaatcagtgcaaggaaggggtgtacgacagtctggcgctggctcgcggtctgtcgcccgagcgcaagaagctgttcttcgaaccttacggtgacaacaagatgcgagtggtggagcgtgtcagaaaattgaccaccttccggccattgaacctgctggaaagctacagcctgcttggcaagttcgacatcatcttctgtcgcaacgtgctcatctattttgcaccggaagtgaagtccaagatcctcaaccagtttgctgccagcctcaatcccggcggctatctgatgctgggggcttccgagtcgctggccgggttgaccgacaggttcgagatgatccggtgcaaccccggcatcgtctacaaggttaaatgat

SEQ ID NO: 227899 - DNA, 358 bp, Unknown
  Bacterial polypeptide expressing nucleotide sequence isolated from the Sargasso Sea
atgtcacaaaaaattgtttttatgggaaccccagagtttgctgttccaattttaaagtcgttaaatgacaatggttatgatttattaagtgtctatactcagccacccaaaaaaaaatcaagaggccagaaaataatttcctctccaattcatcaatttgccgaaaagcttaaattaccagtaagatgtccggatgacgttaatactgaaaaagaatttaattatcttaaacaaataaaacctaattatgtgattgtggttgcttatggaaaactaatatccaaaaaaattttaaatcttccagacactacttttttaaacatacacgcttctatcttgcctaagtggagaggtgccg

SEQ ID NO: 227900 - DNA, 397 bp, Unknown
  Bacterial polypeptide expressing nucleotide sequence isolated from the Sargasso Sea
tgataaaagacttatccaaatcttagagggttacagtcctgatttaattgttttggcaggttttatgagaatattaagcgaaatatttgttgataaatatataggtagattaattaatattcacccttccctgttaccaaaatatcctggattagatacccataagaaggtaattaaaaatcaagacactcatcatggagttaccgtccactatgtggacaagacactggatggggggcctgtatgcgctcaatcagaaatggaagtaacaacaacagatataaataagcttgaagagcaaatccataaactagaacatgaaatatatcctttagtggttaagcaaattgctgatggtaaaatagcatttaaagacggtaaggtaataaaaaaatga

SEQ ID NO: 227901 - DNA, 254 bp, Unknown
  Bacterial polypeptide expressing nucleotide sequence isolated from the Sargasso Sea
aataattaatattcacccatctttgttacctaaatataaaggaataaatacccacgaaagagtaataaataacaacgaaaaattttcaggttgcacagttcattatgtatcatcaagacttgactcaggtaaaataattatgcaaaaaaaaataagaatatctaaaaaagaaacgcctaaatctttagcaaaaaaagttcttaaaatagaacatcaattatacccttcagctataatgaaaatttataattaac

SEQ ID NO: 227902 - DNA, 583 bp, Unknown
  Bacterial polypeptide expressing nucleotide sequence isolated from the Sargasso Sea
aatggttctattgactggctcaaataaaataaaaaccgctgtatttatatctggcaaaggtagtaatttaaaatcattaattaaattctcaaaaaaaaataattctccaatatcaattgatttaattatttgtgataatttaaatgctaagggattaaattttggtaatacttttaaaattaaaaaaaaagtatttaattttaaaaataaagcaaaagctgaaaataaaatactttttgaactaaaaagtaaaaatataaatttaatctgtcttgcaggttttatgaaaattttatcaaaaaattttatcaaaaaatttaaagggaaaatattgaatattcatccatctttacttccaaaatacaaaggattaaacactcatcaaagagtgttggaaaataatgaaaaatattcaggctgtactgttcattatgttagttacaaacttgattctggagaaattatacttcaaaaaaaagttaaaattaagagaaaagagactcctaaatccctcgctaaaaagattttagttcaagaacataaattatatcctaaagcaattttaaaagtttttagactttaa

SEQ ID NO: 227903 - DNA, 865 bp, Unknown
  Bacterial polypeptide expressing nucleotide sequence isolated from the Sargasso Sea
aatgacattagatgttgataaaacaaaagctaaagttgaagatttgaaatcacaaggaaaattaccaaagattgcaatgtttggtggttcggtatttttattcccacacccagtaaaagaattggctgaattcctaaagggtcacggcatgcacattaactatgatgcagcacatgttgcaggattaattgctggtggaaaattccaagacccacttagagaaggaacagatacaatgacaatgagtacccacaaaactttgtttggtcctcaaggaggattagtaataggatctgaagaacatgcagaaccaatcaaaaaggcaatgttcccaggactaacaagtagtcatcacattcatcacatgggtgcaaaggcagttgcatttgccgaagctttagagtttggaaaagattatgcagagcagacaattaaaaatgcaaaagcattagctaccgaattaaacaatgtaggattcaaagtgttaggggagaaaagaggttatacagaatcacaccaaacagttgtaaatgttttagattatggcgatggcggaactatcgaagctgatttagaaaaagcaaacatcattgttaatcgtcaattaattccaggagatttgaaagcaggtcgtcactatatgcatccaggtggaattcgtttgggaacatctgagattactcgtttaggtatgaaagaatctgaaatgaaagagattgcatctttattgaaacaagttgttgttgataagaaagatgcaggagaaattgcggcacgtgttaaagagttcaagacagatttcaagaaaacacagtactgctttgataacaaacttggtgcctacgaatacgtaaaattacgttaa

SEQ ID NO: 227904 - DNA, 232 bp, Unknown
  Bacterial polypeptide expressing nucleotide sequence isolated from the Sargasso Sea
gtgccaaatgatccacaaagcccatttgttacaagcggaataagattaggaactgccgctattacaacaagagggtttatggagtcagagactaaaattctaggaaatctaatatgtgatgttcttgacgatattgaaaatgaaaaaaatatatcatcagttaaagaaaaagttcttaatttaacatctcaattccctgtatattcttctgacaaaaaagctgtagcttagg

SEQ ID NO: 227905 - DNA, 295 bp, Unknown
  Bacterial polypeptide expressing nucleotide sequence isolated from the Sargasso Sea
cagaggttcaggcgttacgggtaaagaaggggaaggagctttggcttctgccggtataactacaaataagaatgcgattccatttgacccattgcctccctcagtagcttcagggattagaataggtacacctggaattactactcgtggcatgaaagaggatgaagttaggcagattggtgaattgatttctaaagttcttttgaattatgacaacgaagccctattagaaacttgtaaaaaagaggttaatgacttatgcgtaagatttcctatctatacaaatttattatag

SEQ ID NO: 227906 - DNA, 328 bp, Unknown
  Bacterial polypeptide expressing nucleotide sequence isolated from the Sargasso Sea
ggaggaacagaaacccatatagttcttgttgatacaagaagcgtagatgaagaactaaccggtaaagaagctggtattttactaaatgataggggagttactttaaatagaaatgcaataccatttgatcctcgatctcctttcataacttcaggtatacgcatgggtaccccagcagtaacaacgtgtggaatgaaagaaaatgaactaactcaggtaggttttctaatatctgagataatgaaaaatagatcagatgtaaataaattaactgagttagaggcacaagtcagatctcttgccacgagttttcaaccatatggctaaa

SEQ ID NO: 227907 - DNA, 496 bp, Unknown
  Bacterial polypeptide expressing nucleotide sequence isolated from the Sargasso Sea
catggatgggaatagaaactataagaccctctttattaaaatagctaaagaaaagggcaaaggtgttttcattttggttaaaacatctaatcaaggatcaaaagatattcaaaacctcgaagtaaatggtgaaagtgtatttttaaaaatatcaaaattgataaaagaaaacttaccattgaatttaggcaaatctggttatagcaatattggtatagtggttggtgcaactaagcctaaagaagcagagttgatcagaaaaattcttcctaatcatttatttttagttccaggtttcggtacacaaggtggaagtgctaaagacgctatttcaggactagtttttaatacaaatacttacgaaggaggattaattaattcttctagagcaattcttttccctgaaagatcaaaaaaatacaataaaatttatgactggagagatagtatcaaaatggcattaaacaaagcaagaaatgaacttataattaattaa

SEQ ID NO: 227908 - DNA, 115 bp, Unknown
  Bacterial polypeptide expressing nucleotide sequence isolated from the Sargasso Sea
aatgataaataaacaaaaaattgaaacttttgatcccgatctttggaaagcgatacaaaatgaaaaaattaggcaagaggaacatatagagctcatagcttctgagaactatact

SEQ ID NO: 227909 - DNA, 139 bp, Unknown
  Bacterial polypeptide expressing nucleotide sequence isolated from the Sargasso Sea
aatgataagagattctttggtctttgatttaatcgaaaaagaaaagcaaagacaaatcaatggaattgaattaatagcatcagaaaattttgttagtaatgaagtttctacttttcatggggagtattctaacaaataa

SEQ ID NO: 227910 - DNA, 631 bp, Unknown
  Bacterial polypeptide expressing nucleotide sequence isolated from the Sargasso Sea
tatggctaagaaactagatgctaaagatgtagagctttacttactagaaaatactgatttctttctttcaagagaatctcttgtaagtgagctaagttttaagcacgatgcagaaggagcaacttcattgcttgaaatgcaagtaagaaaactaagagatgagcaatcaaggctcatgaatatgctttctagttttgtttcaactgggaaagaaaatgaagagctgttctttaaatctaaaaatttaaccttatcattaattgcttctgagaattttgctgaggtaaagaaaactgttgaacttttctttcatgaaaactttgcagttgattcatgtattttggagactttctcagactctgaattaaaagaactagaaacaagaactggcttagatatgaataaagatgtaattcatatgggtcctttatctaaagaaaaaatggcagccttcttttctagcgaatcaataaaatctgcggtaataagcgtaatgaaattaaaaaagggttttggtcttcttaaagtggggtccaatgagcctaccaaataccttggagatggagacacaacctttatagagtatattcgagatattattatcagagtccttgaatcaaaagaggtatga

SEQ ID NO: 227911 - DNA, 934 bp, Unknown
  Bacterial polypeptide expressing nucleotide sequence isolated from the Sargasso Sea
tatgaactatttattaattttccatattggaggaattgaattatttaaagaatttattatttctgcctttaatccaaaaattaataatgaaatcattttcaccttagtaaaaagattaaatgaaactatttttattgcattttttagttggctaataagtattatatttggggttatttttggaatattatcttcagaaattttttataaaatattaaatttacctatatttttaaagagatttttaaatttatttttaacttttataagatcgattcatgaaataatttggggacttatattattgcaaatatatggtataaatttttcaattggaataatagctatttgcattccttatgttgctataaatgcaaaagtttttagtgagcaaatagaaaatattaatcttaaaactattgaatcaattaaacaaattaatggtattaaatcttccactttaataacattagtttgggctccagtgatagaaacctttaaaaattttggtttataccgtttggaatgtgccataagaagtacagcagttttgggattgtttggagttggaggaataggcacaagtatatttttatcctttcaaactttgaatttccgagagctatggacttatctttggggtttagcttttttaattattatctcaaaaaaactattaaaaagattcaacctctctaacacttctaagaattttttgacctcttttgtaatagctttattttgtattagtttattttctttatctttctttgtttattttatatttaataaaaatgcaataccttttaattcaatcaataatcttttgatatcaaactttaattttatttcatacgattttttaaagctattattagaaacaatagttttatgtcttttatctactggaatagctataagttttcctcaaatt

SEQ ID NO: 227912 - DNA, 595 bp, Unknown
  Bacterial polypeptide expressing nucleotide sequence isolated from the Sargasso Sea
taataaagctgtagctcttaaacaagctttgttagctgcaattgacgatactaatgcagactctacagctgaagactcgtttactaatgcattaaatggtattaatggactaagtgcgacttctgatactgaattagctaatcaagtaggtgcacaatctgatggaacagcaggatcaatttcagctacaagagttatgactggaacagtacaaggaattgtatcaagcagaatggcttctttaagatctggagatgcatatattgcaggtgttgcagcaggtgatggtgtaagtaaaaaatctggctttttgcaagtttttggttcagatgtaacacaaaaaaatactgctttaggaagcggtactgagtttggttataattctgaaactgtaggttttgcattaggatttgatggtatgactgacaatggatcgactattggtctttctttatctaactcttacacggacgttgctggaaagggacctggtaaatcaacaaatgacatagaaagttacacagcttcaatttatttagataaagtttctgacaatggttacgttgaaggtagtataacatatggaataaatgac

SEQ ID NO: 227913 - DNA, 326 bp, Unknown
  Bacterial polypeptide expressing nucleotide sequence isolated from the Sargasso Sea
tgtagatctcagaccatttaaagtgacagtaaaagcagccgagattagtttgggtaaagcaaatttaacatgtaataaaaatggaattccttttgacactgaaaaaatgactattacttccgggataagactcgggtctcaggcggctacaactagaggatttggattgaatgaatttaaaaaagttggcgatctaattactaaagtaatcaaaggcttatctataaatactaacgataatagtaaaattgagtctgaagttaaaaaagaagtaattgaactttgttctaaatttcctatatatagtcatttgtttaaaaaataat

SEQ ID NO: 227914 - DNA, 225 bp, Unknown
  Bacterial polypeptide expressing nucleotide sequence isolated from the Sargasso Sea
catttgacactcagagtcctatgataacttcaggaattagacttggaacaccagcatgtactactagaggatttggtgctaatgaatttagtttaattggtgatttgatttcaaaagttgttaaaggattgggtaaaaatggtcaaaataactctaaaatagaaaaagaagtccaaaaagaggtgattgatctttgttcttctttccctatatatagtgattaaa

SEQ ID NO: 227915 - DNA, 245 bp, Unknown
  Bacterial polypeptide expressing nucleotide sequence isolated from the Sargasso Sea
gatgtccgaatccaagaaatttaacgaactgggtgcgtttggcgcctttttcggcgcacagcttcgggagcgcgatgcggaagtgcaggcggcgattgagggtgagcttttgcggcagcgtgaccaaatcgagttaattgcttccgagaatatcgtcagccgcgccgttctggaggcgactggatgcgtgatgacaaacaaatacgccgagggctatcccggggcgtcgatattacggcgggtgc

SEQ ID NO: 227916 - DNA, 483 bp, Unknown
  Bacterial polypeptide expressing nucleotide sequence isolated from the Sargasso Sea
catggctgattcaaacaaagaatcgtacgataaggtattctctagccttgaaaaacatcatgaatggtttgataattcaattccactaattgctagtgagaatattcctagcccggctgttagagaggctgtgatgtcagattttggtaacagatatgcagaaggatggcctggtgagcgagtttacgctggatgtacctacatcgatgaagttgagattcaatgcatggaattggctcaaaaattattcaaagctgaatttgcagatgtcagaagcgtttcaggagtagttgcaaacttggcaatttattctgcttattcaaatccgggagatgttatgattgcatcatcaattcctgccggcggtcacatctcacatggaaagaaagaacattcaggaactgcaggattagttcacggattggatatagagttctttgcatttgatcctgaagaaatgacattagatgttgataaaacaaa

SEQ ID NO: 227917 - DNA, 750 bp, Unknown
  Bacterial polypeptide expressing nucleotide sequence isolated from the Sargasso Sea
gcattgtttgtactcgctgctggtataaccgtattgcaagtatcagctaatccatacgttgcggctcttggcccagataaaaccgcctcttcacgattaaacttagcgcaagcgcttaatgccttgggtactacagtaggaccgtatgtaggaggcattctctttttcggtactgctggtacattggctgcgtctgctgcatcggcagaatcagtaaaagtgccttatttaatgttggctgcagcacttttattaattgccattgtgtttgcatttataaagttacctgaaattgaagcccataaggaagacagcacagacaccgaaactcgctctttaatgcaagcacctcaccttactatgggggttgtagcaatattttgttatgtaggcggtgaagtagctataggtagctttttagttaattactttggtgaagcacacattgctgggcttgaagagcatgctgccgcggcacttattagttattattggggcggagcaatggttgggcgttttgtaggctctgcgttgttacaaaaaattgcgccttctaaagcaattgcctttaatgctatcagtgttattgcgttgttattaatcactatttttacacaaggtgatgtcgctttgtattcagtattggcaatcgggttgtttaattcaattatgtttccaactatattttctgttgcgattgaaaaattaggcccgttaaccagtaaaggctctggttggctatgtttagcg

SEQ ID NO: 227918 - DNA, 922 bp, Unknown
  Bacterial polypeptide expressing nucleotide sequence isolated from the Sargasso Sea
aatttgacggaaaatttagttcacataagtttgactgataacccctcacacctagaggcagttaatccggtagtactaggtcaagttagagcaaaacagttttttcataaagataaagatagaaaaaaagtaataccagttttaatgcatggagatgcagcttttgctggtcaaggaattgttgctgagtgctttgcaatgtcgggtttacctggacataatattggaggaactatacatataatagttaataatcaaattggattcactactgcacctaggtttgcaagatcatctccttatccttcagatgtcgcaaaaactgctcaagctccaatttttcatgtaaatggtgatgaccccgaggcagtagttcactgtgctaagattgcgacagaatacaggcaaaagtttaatcgcgatgttgttatagacatggtctgttatagaaggtttggacataatgagggagatgagccgtcattcactcaaccaattatgtataaaaagataaaaaaacatccaacaaccctaaaaatatatggagaaaagttaataacggagggattaatatctgaaaaaagtttacaacaaaataaattagaatttaagaatttcttagagcaagaatttatttcatctaaaaattataaatctgaacttaaatggtttgacggtgtttggtcaagatttaggccaggtttgggtaaagataaaagaggcattagtggtgtcgatcaaaatatattaaaaaaaattgcacaaaaagtatttagtattccaaataatttcactactcataaaactttgaagagagtctttgaattaagaagtgaaatgatgaaatcaggaaaaatagattggtcaatggccgaaagcttagcaatcggatctttattgacggagggtttttctgttcgat

SEQ ID NO: 227919 - DNA, 556 bp, Unknown
  Bacterial polypeptide expressing nucleotide sequence isolated from the Sargasso Sea
catggctgattcaaacaaagaatcgtatgataaggtattttctagtcttgaaaagcatcatgaatggtttgataattcaattccgctaattgctagtgagaatattcctagtccggctgttagagaggccgtaatgtcagatttcggtaatagatatgcagaaggctggcctggtgagcgagtttacgccggatgtacctacatcgatgaagttgagattcaatgtatggagttggctcaaaaattattcaaagctgaatttgcagatgtcagaagtgtttctggcgtagttgcaaacttggcaatttattctgcttattcaaatccaggagatgttatgattgcatcatcaattcctgccggcggtcacatctcacatggaaagaaagaacattcaggaactgcaggattagttcatggattagatattgagttctttgcttttgatcctgaagaaatgacattagatgttgataagacaaaaactaaagttgaagatttgaaatcacaaggaaaattaccaaaaattgcaatgtttggtggttcggtattttta

SEQ ID NO: 227920 - DNA, 105 bp, Unknown
  Bacterial polypeptide expressing nucleotide sequence isolated from the Sargasso Sea
ccaaatgatcctcaatcaccttttataacaagtggtattggtatcggaacaccttccataactacgcgtggttttgatgaatcagatgcaaagcaagtagctaaa

SEQ ID NO: 227921 - DNA, 454 bp, Unknown
  Bacterial polypeptide expressing nucleotide sequence isolated from the Sargasso Sea
agcagcaaaagcagtatgttttaaggaagctttaacaaaagaatataaagagtatgcaaaacaaatattaaataacgcaaaagcattatctgattcttttcaagaacaaggcttaagggtaattagtggaggaacagaaaaccatatagttcttgttgatacaagaagcgtagatgaagaactaaccggtaaagaagctggtattttactaaatgataggggagttactttaaatagaaatgcaataccatttgatcctcgatctcctttcataacttcaggtatacgcatgggtaccccagcagtaacaacgtgtggaatgaaagaaaatgaactaactcaggtaggttttctaatatctgagataatgaaaaatagatcagatgtaaataaattaactgagttagaggcacaagtcagatctcttgccacgagttttcaaccatatggctaa

SEQ ID NO: 227922 - DNA, 352 bp, Unknown
  Bacterial polypeptide expressing nucleotide sequence isolated from the Sargasso Sea
atgagtgattcaaacaaagaatcgtacgataaggtattttctagtcttgaaaaacatcatgaatggtttgataattccataccactaattgctagtgagaatatcccaagtccggccgttagagaggctgtaatgtcagatttcggtaatagatatgccgaaggatggcctggtgaacgagtttacgctggatgcacctacatcgatgaagttgagattcaatgtatggaattggctcaaaaattattcaaagccgaatttgcagatgtcagaagcgtttctggtgtagttgcaaacttggcaatttattctgcttattcaaatcctggtgatgttatgattgcatcatcaa

SEQ ID NO: 227923 - DNA, 181 bp, Unknown
  Bacterial polypeptide expressing nucleotide sequence isolated from the Sargasso Sea
atgtcaagcgaaagtaaatatttaaacgatcaatataaaagtttttttgaagatagtttgtctaaaactgatccagatttatataaagctataaatgatgaattacaaagacaacaagaacatattgaattaattgcttctgaaaatattgtttctcaagcagtattagaagcacaaggat

SEQ ID NO: 227924 - DNA, 571 bp, Unknown
  Bacterial polypeptide expressing nucleotide sequence isolated from the Sargasso Sea
catggctgattcaaacaaagaatcgtacgataaggtattctctagtcttgaaaagcatcatgaatggtttgataattcaattccgctaattgctagtgagaatattcctagcccggctgttagagaggccgttatgtcagattttggtaataggtatgcagaaggctggcctggtgagcgagtctatgctggatgtacctacatcgatgaagttgagattcaatgtatggagttggctcaaaaattattcaaagctgaatttgccgatgtcagaagtgtttctggtgtggttgcaaacttggcaatttattctgcttattcaaatccgggagatgtaatgattgcatcatcaattcctgccggaggtcacatctcacatggaaagaaagaacattcaggaactgcaggattagttcacggattagacattgaattctttgcatttgatcctgaagaaatgacattagatgttgataagacaaaagctaaagttgaagatttgaaatcacaaggaaaattaccaaagattgcaatgtttggtggttcagttttcttattcccacatccagta

SEQ ID NO: 227925 - DNA, 727 bp, Unknown
  Bacterial polypeptide expressing nucleotide sequence isolated from the Sargasso Sea
atgaaaaaaattaatgttgttatttatggtgctactggaagtattggcagatctacattgtcaataataagtaaaaatttaaacaaaataaatattgagggcataacatgtaataaaaacattttaaaacttcttaagatcgcaaaatcctacaatgtaaaaaaaattggttttaatgaaaagactattcataagttaaataagtttaatttaaataaatacgaagtatttaatgatgattccaaatattataatattatttcaaaaaaaactgatgttattatttttgctacaagtggactaacttctttagatctattattaaaaatattaaaatcaggaaagattgtcggtattgcgaataaagaatgtatcattactcttggaacgaaatttataagtttatcaaaaaaatttaatactaaaattatacctttagactcagagcataattcaatttatcatttgttaagtcaaaatttaggaaaatataaatcaattaccatcacggcaacaggtggaccattcttatatcatacaaaaaagaaattgagcttcgtaagacctcaacaagcaatcaaacatccagtttggaatatgggtagtaagatctcaattgactcagctactatgatgaacaaagcgcttgaaataatagaagcgaaatatttatttaatctgaaaaacaatgaaattaatgctataatacacccacaagctattattc

SEQ ID NO: 227926 - DNA, 793 bp, Unknown
  Bacterial polypeptide expressing nucleotide sequence isolated from the Sargasso Sea
cggcggaaccaaagtagaataaccggaaagttaggtgtggaacatattattgtttctgcagatatccaaaaaaagagagaaaacattgcgaaaaacataagggcttggttgcgtcgtcctgagttaggaatggttcctcttttcatggcaggtgacaagcaattttattattacgccgacctagtccgaaaacagacgggcgtcccacttgtgttttttagtgcgggaaatgagatggaagcgacaggatttaagactggattttgcggaattaaaagacgctctacaggaggtttattggctagcgttccaatggcccaaaagcttgctttaatgttttattacatgaaacactttgtaatcaactcgagctaccttacgacggccttgtttgatactgcccacgcgtttttctcgacctatttgatggaacatgatttccattatctgtatcattatttgtactgggatgagcaagaaataatgaccgttctagagagtgaatacgattggcaaaaagcttctgataccgatgcgacctggcgtataggggatggcacagccgctttttataattatatttatttttttctggccggtcttactgaaaacgacacatttagaagcaatcagatcagggagggaaggttaagtcgagccgaagctctagatctgattgcttctgaaaatacgcctcgctatgacactatacaagaatacctagatatcatcggcttggattttgatactactctggaaattataaatgcccaaaagcctatcttcaggtgac

SEQ ID NO: 227927 - DNA, 401 bp, Unknown
  Bacterial polypeptide expressing nucleotide sequence isolated from the Sargasso Sea
tagtgctaaagttatggcaaaaactttagttgatagaggatttagaattgttactggaggtacagattcacatatagtttggttagacttgacaccaaaaggtttaactggcgataaagctgaaaaaattttagaagaagttggattggcatgtaataaaaatgcaattccatatgaccctaatccaccaaaaataactagtggacttagatttggaaccgcagctgctacgaccagaggttttaatcagaaagattttgaacaagttggaaatatgattgctgatattttggatagtcttttacttgaagaaaatgagagaaatgtagtttttaataaaacaagaaaagatataattgagctttgcaaaaaatatccaatttatagtgaggcattttaaa

SEQ ID NO: 227928 - DNA, 193 bp, Unknown
  Bacterial polypeptide expressing nucleotide sequence isolated from the Sargasso Sea
agacctccatgcaacaagtggaattagattaggaactcctgcagtaactacaagaggcatgggccctaaagaaatggatcaaattgcagattggattgatagagtgataacatctaaaggagattcttcagttcaagaatcagttagaaaagaaatatcttctttttgttcgaattttccattacctcattga

SEQ ID NO: 227929 - DNA, 232 bp, Unknown
  Bacterial polypeptide expressing nucleotide sequence isolated from the Sargasso Sea
aatgctttataattttgatagaagtcaaaatcattattattttaataataaaaattcagttccaataatatttatacacggacttggattaaatcaatcaatgtggaaatcacaaatggatttttttaaaaacaactcttttgtaacgtatgatcttttagggcacggcaagaccccatttagtgagaatacactaacaatgaaaaaacttggtaatcaacttttagttttg

SEQ ID NO: 227930 - DNA, 718 bp, Unknown
  Bacterial polypeptide expressing nucleotide sequence isolated from the Sargasso Sea
actgatcgacctctcgctgggatcctcggatctgccccctccacaaccggtgctggaggccatggcggctgctctgccgtcgccttcaagttcggcctactgcctgcaggccggaacagcgccgtttcgctcagccgtcgccgcatggtgccaccgccgtttcggcgtgaccgttgatccggatcgcgaggttcagctgctcatcggttcgcaggagggaacggcgcacctgcctcttgccgtgctggatcccggagatgcagccctgctgctggatccctgctacccctcccaccggggaggcctgatcctggccgacgccgacattcaagccctccccctccgcgaggccgacggttggcgtcccgatctggagtccctccccggcagtgcctgggatcgcctccgcctgttcgttctcggttacccccacaatccgaccgcccgggttggagatcaggatcttctcgatcaggtgatggcgaagggggtgcggcacgagctggtgatcgcccatgacaatccctatgtcgatctggcactggagggggaggcaccaagcctgctgtgcagtcctggctggcgtttctgggggatcgaattcttctcgctctccaaaggctgggggctcgggggcttccgcctcgctttcgcggtcggtgccccgcccctgattgaggccctgggtcaggtgaaggcggtggtggatttcaatcag

SEQ ID NO: 227931 - DNA, 367 bp, Unknown
  Bacterial polypeptide expressing nucleotide sequence isolated from the Sargasso Sea
aatggatttaagattgtaactggaggaactgattctcatattgtgtggttagatctcactcctaaaaacataacaggtgataaggctgaaaaaatacttgaagaagttggaatagcttgtaacaaaaatgctattccttatgatcctaatccacccaaaatcacaagtggtttgagatttggtacagctgcagctacttctagaggctttgatgagaatgattttagtgaaattggtgatttaatttcagcaatacttgataacattaatcaaaatcaagataatcataaagaatttatttcttcaatgaaaagtaaagttattagtatgtgtaaaaaatatccaatttataatgaggctttttgat

SEQ ID NO: 227932 - DNA, 481 bp, Unknown
  Bacterial polypeptide expressing nucleotide sequence isolated from the Sargasso Sea
catattatagctgcaagagcagtttgctttggtgaagctttaaaaccagaatttgaagattacattaaaaatgttatttctagtgctaaagttatgtctcaaactttagtagacagaggttttagaattgtaacaggtggcacagattctcatatcgtttggttagatctaactccaaaagggttaacgggcgataaagctgaaaaaattcttgaagaagttgggcttgcttgtaataaaaatgctattccgtatgatcctaatcctccaaaagtaacaagtggactcagatttggaactgctgcagctactacgagaggttttaatcaaaaagattttaagcaagtaggtaatatgattgccgatgtattagatagtttacttttatcggaaaacgaaagacaggatgtttttaacaaaactagaaaagatgttattgagctttgcagtaaatatccaatttatgatgaggcattttaaa

SEQ ID NO: 227933 - DNA, 303 bp, Unknown
  Bacterial polypeptide expressing nucleotide sequence isolated from the Sargasso Sea
ttaatgtaaaagggaatcttgcggcagaaagtttatgtagagcaaatattacatgtaataaaaatggtattccatttgataccgaaagcccaatgataacctcaggaattagattaggatctcaagcagcgactactcgtggtttcggattaactgaatttaagatggttggcgaactaattactaaaacaattaaaggattatctgaaaatcaaaacgataatagcaaaattgaagatgaagtaagaaaagaagtagtggaattatgttcaaaatttccaatttataaacatttaaattagg

SEQ ID NO: 227934 - DNA, 132 bp, Unknown
  Bacterial polypeptide expressing nucleotide sequence isolated from the Sargasso Sea
attgattttaaaaaaatttaaagatattgctgataaagttggtgctctttttttagttgatatggcacattttgcaggtcttgttgctaccggattatatcctaatcctcttgaatacgcagatgtagtcac

SEQ ID NO: 227935 - DNA, 130 bp, Unknown
  Bacterial polypeptide expressing nucleotide sequence isolated from the Sargasso Sea
tctttagcaaaaaaacacaggccaaaattacttattgccggattctccgcttactctcgagtgcttgattggcaaaaatttagggatattgctgattctgttggcgcctattttcttgtggatatggcac

SEQ ID NO: 227936 - DNA, 926 bp, Unknown
  Bacterial polypeptide expressing nucleotide sequence isolated from the Sargasso Sea
tcaaatgaatttcgaaaggtaacaaaaaattcatcacttataacagactttagtttaacaaaaggatataaatcctcaataaataataaaaaaaaagacataaatcatctttttttaaaatacgaaaaaaatttaaacttacctagttatttatcgagtaaattagacgcaaaaattgaaagagtaaataacgacacatatctaaaagtatttcaaaataatctttttacaagccctgtgatgccatccaatagagaccttatggtctcagagttaaattttgattttgatcataataattatgatcttacaacaggagttcaaatttttgaaaacttgggtttaccacataacgataggtatcaatacgttttgccctcatatgatttttcaaaaaatataaatccaaaaaatttagatggatcaataaattttttttcatctggtagtaatagattaaaagatacaaataacttaagaacatcgatcgtaaatgatcttgagtttaattcaataaattaccttacaaatacaggctttattaataattttaaagtatattttaaaaatttaaattctttaggaaaaaatgattcaatttacaaatctagtccaagtgttgatgcaatgagtattgctgaaattagaacagctttaccaatgatcaaaaaaaaaacatttagccaagagacgctaacacctaaaatttcttttagagcaaaccctggaaataatatgaaaaatcacagctcatctactaaactcttggatgctaacaatatatttgaaattaacaggctaggaataaatgattcttttgaggctggaaaatcattaacttttggtatcgactataagttagatgtgtttcaaaacaatttgactaacaaagacgacacaagtgataaaataattttagaagataa

SEQ ID NO: 227937 - DNA, 504 bp, Unknown
  Bacterial polypeptide expressing nucleotide sequence isolated from the Sargasso Sea
cgcattgtattcattttgacaatgaagagtggtcgcgattaaacacttcaggatccgttatcgcacactgccctaattcgaatctttttttaggaagcggtcttttttctatgaagtctgctgttgaacacggagtcagagttggaatcggatccgatattggaggaggctgcgagttctctattttgcggacactcgcggacggctacaaggtcgccagactgagaggcgaggatattagtcccttgcaagcattctatttggcgacgctcggaggcgttcgggcacttgatttggaggacaggatcggaaattttttgactgggaaggaggcagatttccttattttagacagagaatctacgccgatcatcaaacatcgtttaaatatcagcaaaaatctgaatgaacagcttttcgccatgatgatgctcggcgatgaccggctagttaaggaaacttggattatgggagaaaagtcccatgatagagacgcgaactgat

SEQ ID NO: 227938 - DNA, 331 bp, Unknown
  Bacterial polypeptide expressing nucleotide sequence isolated from the Sargasso Sea
attgagtctaaataatcaaacttactataattatattaataaaaatactataccaatagtttttattcatggtgttggtttagatcataaaatgtggtctccacaaataaattatttaaacacatattctacgataacatatgaccttcttggacatggaagaacaccatttaaaaaagaaaaaattaaaatgaatgattacgtagagcagttattttctataatcaaatttttagaattagaaaaaattaatttagtaggtttttctattgggtcttttatagcactaaattttgcagcagagtttcaaaaaaaattaaactcattgact

SEQ ID NO: 227939 - DNA, 412 bp, Unknown
  Bacterial polypeptide expressing nucleotide sequence isolated from the Sargasso Sea
aatgtaattgctagtgctaaagttatggcacaaactctagttgatagaggtttcagaattgttactggaggtactgattcacatatagtttggctagatttaacaccaaaaggtttaactggagataaagctgaaaaaattttagaagaagttggattggcatgtaataaaaatgcaattccctatgatccaaatccaccaaaaataactagtggtcttagatttggaactgctgctgctacaaccagaggttttaatcagaaagattttgaacaagttggaaatatgattgctgatattttggatagtcttttacttgaagaaaatgaaagagctgatgtttttaataaaacaagaaaagatgtaattgagctttgtaaaaaatatccaatttatagtgaggcatattaaa

SEQ ID NO: 227940 - DNA, 906 bp, Unknown
  Bacterial polypeptide expressing nucleotide sequence isolated from the Sargasso Sea
catgaacccgaacactcagtattcgacccttgccgtccctgcaacacgtcggtttgattattggaaagaagtggtctgtcgtcattgcctggcggccgatagcaaacccttgtcccagagccgctttgatggctcgctcacccttaatacagtcggcgcgctggacatctgtacgctgtcttcgccgctgcattactgggagcgttccgagcagcacctgcgcagcggtccggccgaagatttatggttgggtttcgctcgaaagggccatgggcaaatcgaacaaggctcaagaaaagccaacctggcgacgggcaacttgtttctttatgacgcaacccaggcgtttcgcttcagcctgggtggtaccgaaaaccacttgatccgtattcccagagcgttgctcaccgaacgcctgccgcgtattgccgagtacaccgcgatggtcctcgacgaccggcgcccaggcgtcgtgcccttgcgtgaaatgctgcaccaggccgcgagcacgcctgcgtcgctgcaggatgagcgcatctcgaatcgttactcaagtgctgtgcttgatctgcttgtaatcagcctggaactccaggacctgaaaaccagccatcaggaaatggatctctacggccgcatcatgcagtacatccaacgccacctgaccgagccggacctgtcgattgaagccatcgccaaagcccacaatgtgtccacccgcaccgttactcgggccttcgcacgctaccagaaaacccccgttgcagagatctggaaagagcgcttgaatgccagccgagaagcaatcgagcgtggccaggtacgcagtgtgtccgaagcggcgctggactttgggttttctgatttctcgcatttcagccatgcgtttcgcaaggcgtttggcgt

SEQ ID NO: 227941 - DNA, 251 bp, Unknown
  Bacterial polypeptide expressing nucleotide sequence isolated from the Sargasso Sea
caataagaatatgattccatatgatgagcggaaacctgttgatccatcaggaattcgattgggcacaccggctcttacaacacgaggaatgggagctgacgagatggagcaggtagctgcttggattcttcaagttcttaaagcaccggaagacgcacaggtgatcgagtcgactcgccgagaagtggcagatttagcagaacagtacccagtcccagcggccaagctggatcaggttgttacaggctgaa

SEQ ID NO: 227942 - DNA, 223 bp, Unknown
  Bacterial polypeptide expressing nucleotide sequence isolated from the Sargasso Sea
cgtggcatcggcatgaccggaaaggtggctgatctgttggtcagtgatgtgcacatcactgcgaacaagaacaccgttcctttcgatccggaatcgcccttagtcaccagcggcctgcggctgggaacagctgcccttaccacccgtggttttgacgtgcaggccttctgggaggtagcagatgtgattgctgatcgtcttctcaatcctgaggatgatgcga

SEQ ID NO: 227943 - DNA, 258 bp, Unknown
  Bacterial polypeptide expressing nucleotide sequence isolated from the Sargasso Sea
taacatgtaacaaaaatggtattccatttgactctgaaagcccaatgataacatctggtattagacttgggtctcaagctgcaacaactagaggttttggtttaaaggaatttgaaaaagtaggtgagcttattacaaaagtaattgacggcttatcaaaaaatcctcatgataatagtaaaattgaagatgaggtaagaaatgaagttgtttctctttgttcatcatttccaatatacaagaatttaagaaaatgat

SEQ ID NO: 227944 - DNA, 121 bp, Unknown
  Bacterial polypeptide expressing nucleotide sequence isolated from the Sargasso Sea
ttgcaagagcaaaaaaattatttgggcgctgaatcagtaaatgttcagcctcattcaggtgcacaagcaaatatggcagttttcttagggtttcttaatccaggagatactgttttaggta

SEQ ID NO: 227945 - DNA, 550 bp, Unknown
  Bacterial polypeptide expressing nucleotide sequence isolated from the Sargasso Sea
cctgaaagctgggaaaactaaaaatggagagtttgaaatattacataaagcaaaaaacacaagaactaagagatatagaaaaaacgttgatgaagcttacgaaactttagatcaaatagtaatgtttataaatgataatgaaaaattaaaagaactttcgccagaaataaaagaattaagaaatactattgataataaaaattttgaaaaatccatttcaataattgatagtctttttgaaaatcttggagaaatctctggaacagaagaatttgcaaataaacttgatgatctaatttctatcatcgataatgatgagattgatgagcagaagttaattgaaacaagttcagaaacttttgatcttttcaacctagaagtttcatggagagatgatgctaataaaaatttattacctgaattaattaaatacaatgatgtaattaaacacaatattggactaagacttcaaagcaggttaactaaagaacaagctaaatttgttgcaagatgtaactcagttcaccgagatatatctttaaacttttaa

SEQ ID NO: 227946 - DNA, 742 bp, Unknown
  Bacterial polypeptide expressing nucleotide sequence isolated from the Sargasso Sea
tgctttggacagagaaaactatggctagttgaccatctttttaaaatctctaacgacaaagtaatgtcaggaccttttaaaggaatgaaattgttaaaaaagtcaagttgggacaaaaaaatttatgaatttaacccagacttatcttcgaaaatagtgggatgctacgaacaagaagtacagagcaagattgtagaacttcaaaaaattaataagaaaaaatattttattaattttggggcaggagaaggttattttgccttaggagttttatattcgggtttttttgaacaatccattgcttttgaaattacagatgagtctagaaatattatgattgaaaattcaaaaataaataaattagataataggctctcaataaaatatgcagcaaattcaagctttttgaaagatattttagattccggaaaaaaattagatgatattttcattttatccgatatagaaggcgcggaatttgaaatttttaatgatgacaacttaagcaaattaataaattgtaatcttataatagaatttcatagacatcctattgatgaggaaaataaaaaatttagagagaaattgaataaatattttaaagtgagtttattatcaacaagtaatagatctttttcagatatctcattattaaaagaactaaacgatgatgatagatggttaatagcttcagaaaacagaccttatttaatgaattggtttgtttgtactcctaaatgaa

SEQ ID NO: 227947 - DNA, 789 bp, Unknown
  Bacterial polypeptide expressing nucleotide sequence isolated from the Sargasso Sea
gatgttgctcgaccagacaggagttggtgaagccaccctccggtcgggccaccacgcagggcgccggaagggctggggccctctctcctacgggtgcttcgtggcgttccagacggtgccgcagggccctaagtcccgcgaactaacggttgggaaggtccttgagaatcgaagggatgatcagcaggttgtcgtgcaccagtaccgtggtctgtggaagcaggttcgagtggtgcacgtccccgcgtatttgggcgcgaatggagaagttctggatccacgcgccgccgtccgcgggtccgcgccttcgcaagtgaccgtgctgtatgcagcgcttgtcctccaggtcgagttgcaagctgggggggagctcacttatacgagtgcctctactctgtccaaacgcggatgggggcttttcgttgagcctgatgagcagctgcgttttgttcgtgagatagcggacgaagtccggacccggagcgcttctgcagcgcctggggctgagtcgcctattcagatgtgggacttcgcatctgtggtagactatgtccgcgatcacccgctcaggaccgatccattctggcaccgccctctcccagcggaatggctgaaccgagacggtgttgccgataccgtgacggaacttcactggacggatcctgcgcgaggtatccacggcgtgtggaaacgcacagacaaaggtgtcaaggtgttcctcacgtcaaagcataagggaacgttcaagcagaaggggccagaatggttcactgtatggaaacgaacaac

SEQ ID NO: 227948 - DNA, 504 bp, Unknown
  Bacterial polypeptide expressing nucleotide sequence isolated from the Sargasso Sea
aatgggtattggtgtttctgaagaaattgctgatgaagtgaaaaaaagattttctaagcaccgtttagggtataatacaagttggcatgatatagatgaaatgtgtttaactttgttttcaaaagagtggaggtatgaagtagctaaatcatcacttacaccatatactatcaactggaattgtttagaccaaattggttttcatttaaatccaagaagaaggcaattaggtccaaatattatttataagtattatgaagagcaaataaatttaaataatatatcatgggatcgcctttactggcattatcatcccattgcttttagtagagaacttaacaagactggcacatctttgaatcattatccctatcattatatcagcctatgtcatcgtattttagattgtcataatttcccggcagtttttagaccaggctatcatattgagcgtactgatttaaatgtatttctagaacagtggattccttttgattatgctaa

SEQ ID NO: 227949 - DNA, 573 bp, Unknown
  Bacterial polypeptide expressing nucleotide sequence isolated from the Sargasso Sea
gcccgcgcttttcgcatctgcgcgtgaatctgtatccggacggcggtctcgctcgtctgcgtgtgtatggccagccaaagcgcgactgggagcgcgtcgaacgcggcacgttgctggacctcgctgcgatcgaaaacggcgcgtacctggttgctgcgaacaatcagcattttggaccggcctcgcagatgctgatgccgggccgcggcgtcaatatgggcgacggctgggaaacgcgccgccgtcgggagccgggcaacgactgggcgattgtcgcgctggcgcggccgggcgtgattcacaagatcgaagtggacacggcgcacttcaagggtaattaccccgatcgctgctcgctgcaggcggcctccgtaacgggcggcaccgacgactcactgatcacgcaggcgatgttctggccggtgctgatcggcgaacagaagttgcagatggaccacgtgcacacattcgcggacggcatcgcatcccttggaccggtgacgcacgtacgtttcaatatcttccccgacggcggcgtgtcgcgcttgcgcttgtggggcgagatcgcgtaac

SEQ ID NO: 227950 - DNA, 1978 bp, Unknown
  Bacterial polypeptide expressing nucleotide sequence isolated from the Sargasso Sea
tatgttttttggagcgttactacctggattagtattagttggcttatatatgctttatgtatttgtatatgcaagattaaatcctaaggcagctcctcctgttccatttagaggaaattttgactcaaaattttggattaaggttttcatggtaattattccaccacttgcattaatttttgcggttctaggatctatacttttaggtattgcaactgttaatcaagctggatctattggagcaataggtgcaactatgatggctggctatcgtttacataaaggaaaaaaagatgcttattatcctattataattgcaattttatcggttattccaatttatattttatcaaagaactataatctaaatatcaaggctgtagaaactagagatcttgcagcaatctttattgcaggattttttacaattacttttttaattgggataatttggagtttttggagagcatataaagttgaaaatgttttgagagaagttgttactgaaacatgtgtaactacttcgatggtatttataattttattaggtgcagcaatgttaacctctggatttagagcatttggtggtgaagaattagtaagagatttcctgcaagatttaccaggaggattttggacacagtttattgttgtaatggcagtgatctttttgttaggtttctttcttgatttcatcgaaatagccgtagttgtagttcctatcatagctccaatattgctggctgaaccaggagctaatgttagtgcaatatggcttggtgtaatgattggggtaaatttacaaacctcatttctaaccccaccatttggatttgcattattttatttaaaaggagtggcttcaaaacttgttaccactttaaatatctggaagggagttgttccatttattgttttacaattaattggtctaggaattgttggtttttacccatcattagtaaattatttaccagctagaacatatttaacatcaaatgttgctccaccaccaatgaatccaaagcttcaacattgtttgcaggaatacaaatttgcaatttacaacaaagaagaacaaagaataacaaacgcaataaaagatatgcaaaaattaactcctacaaatcttccaatcgacaaattagatatttttgaggagcattttgataatgcattaggaacttttgctatagttaaaaaactccaaaaaaccgaggaagagtatcaattatttactgaagattatagagacctacatttcagcgtaagaaaaattgagaaaaaaattagaaaactagatgagaagattaaaaagacaaaagctgaaatcagaaatttagatgatgataatttaactgataaaaataaactagaattaaaaattgagaactacgaattagaaattaaagaacttcaaaataaagttcctgaaacctggaaagctaaaaatggagactttgaaatattactcaaagctaaaaatacaagaacaaagagatacagaaaaaatgttgatgaagcttatgaagctttagatcaaatagtaatatttataaatgacaatgaaaagttaaaagagctttccccagaaataaaagaattaaaatatactatagataataaaaattataaaaatactatctcagtaattgatggactttttgaaaaattaggagaaatttctggaactgaagaatttgcaaataaattagatgatctaatatcagttatagataatgatgaggtggatgagcagaaattaactgaaataagttcagaaacatttgatctctttaatttagaagtttcatggagaaatgaggctaataaaaatttattacctgaattaattaaatataatgacgttattaaacataacattggtctaagacttcaaaacagattaactaaagaacaagccaaatttgttgcgaggtgtaactctgttcatagagatatatctttaaacttttaa

SEQ ID NO: 227951 - DNA, 2119 bp, Unknown
  Bacterial polypeptide expressing nucleotide sequence isolated from the Sargasso Sea
attgatcacagagcaactcgcccatattgcgcaaaaacaacttgttgaaattcgctttgaatatcagcagcaagtctgtagcctgtatctgctcaatgggctgcttgccgcgcagttacatctgcatgccgaggcttatatttcagcattagcgcaaattaaacctgaaatagccgaagaaacaaatacagtcgagcgctgcttaaacagcgcttttaccttggcgaaacgcgattgtactcaggcggttaattgctacgcgcaggcaagcaatcttgccagtcagttgaatgtattagctcaagcggttgaggcattaagtcatcgaacgctagcaggtattacaccaatgcttgatgcgactgatgcagcgcaactgactgagcagcaagcgaaaaagcctactaccctcgccgagaacggctattggtttaccaagccccatcaggcaagggtattaagcctaaatctcttggggaatctcttgggtaagccccctcaagcgagcaccgcccaaagccttatcttaacccaaggcactcggcttttccctcagccgttgctcaatgccaacaggctttttattcccattagcggcaatacacttgaatctttaacggtacagttatcacagctgattgattcattagatttatcggcaaactttcccaatacagattggctcagcagccaaggcagtgattggtttgtgcactatcaagcaaaggatgaattggccttagtgctgatggcaggctcccttgaagagcttatgcaagaagccaaggcgatgcgcgtttatattgaaaagacgcaacagtctccagctccagcgccaacccaaacgccagcgttaatgccatcggccaatctagcctttaaaactccttcgggcagttattttacgccaacgcccctcggcgatacgggcttaacctttgtctaccccggtgtaggcacggtttacccaaatatgttcagtgacttgcatggctatttccctgagctttatcgcgagcttgaacgtgagggggatttagccgccatgttgcaggccgaggcgatttaccacagcgctgcttatgccaaaagtgctgttgatgtaaaagacgcggcagacatgagcttaagccagcttgcgattagcggtgttggcgccagttacctttttagccggctgttgactcgagtctttaatatccaaccacaactggctctgggctattccatgggtgaagcggccatgtgggcaagtttggatatctggcaaacgccacatgccctgattaacgccacccaaaacagcgctatcttcaatcaggagatttcaggcccactgcttgcggtgcgccgcgattggcagttgagtgaagatgctccgctagtgtggaatagctttttagtgcgcgcctctcgcgccgaaattaatgccatgctccctgattttccgcgggtttatctggcaatcgaacagggcgatacctgtattatcgcgggctgcgaagcaagctgcttacaactccttgtaaggctgggtaagcgtggcattgccagcaataaagtcaccgccatgcatactccgccctcgcagtcacagcacagtgcaatccaagggttttataccttaggcttaaaggcgaatgcctgcgagtctcaggtgcgttttattagcgcggcgcagcaaagcgccgtcaatatcgacagccaaagcattgccaagagtattgccgataccttttgtgcgccgcttaattttaccgcgctgattaacaccgcctataaccaaggtgcgcgcttatttgttgaggtgggcgccgatcggcaaaccagcacacttatcgataaaatcggccgccaacttgagttgggtgccgatggcactcaaacacaggggcaaccgatattagccatggcatgtaatgccaagggcagcgatacgatcacttgcttactcaaatgcttagctcaacttatctgccatagagtgccactctcccttgcgccgcttatacctcaatcggcagataaggctagagcgaaaacgatagcgccacattctgccagcgccagcgcattaggccatttttcaaacgtattccaagaaggagaacccctttga

SEQ ID NO: 227952 - DNA, 718 bp, Unknown
  Bacterial polypeptide expressing nucleotide sequence isolated from the Sargasso Sea
catgcacatcaattatgatgcagcacatgtcgcaggattaattgcaggtggaaaattccaagatccacttagagaaggaacagatacaatgacaatgagtacccacaaaactttgtttggtcctcaaggaggattagtaataggatccgaagaacatgcagaaccaatcaaaaaagcaatgttcccaggattaacaagtagtcatcatattcatcacatgggtgcaaaggcagttgcatttgcagaagctttagagtttggtaaagattatgcagagcagacaattaaaaatgcaaaagcattagcatctgaattaaacaatgtaggattcaaagtgttaggagagaaaagaggttacacagaatcacatcagacagttgttaatgttttagattatggtgatggtggaactatcgaagctgatttagaaaaagcaaacataattgttaatcgtcaattaattcctggagatttgaaagcaggtcgtcactatatgcatccaggtggaattcgtttgggaacatcggaaattactcgcttaggtatgaaagaatctgaaatgaaagaaattgcatctttattgaaacaagttgttgttgataagaaagatgcaggagaaattgcagcacgtgtaaaggagttcaagacagatttcaagaaaacacaatactgttttgataacaaacttggtgcctacgaatacgtaaaattacgttaa

SEQ ID NO: 227953 - DNA, 236 bp, Unknown
  Bacterial polypeptide expressing nucleotide sequence isolated from the Sargasso Sea
aatgtcaactgcaacaaaaattagtagagtaacaaatagtttttttgatcaaggcttagaacactcagacaaagaagtgtttaactcaatttcaaaagagtttgttcgacaacaaaatcatatagagcttatagcttcagaaaatattgtttcaaaagctgttttagaagcccaaggttcagttataactaataaatatgctgaaggttattcgggcaaaagatattatggcggat

SEQ ID NO: 227954 - DNA, 358 bp, Unknown
  Bacterial polypeptide expressing nucleotide sequence isolated from the Sargasso Sea
tatgagtgattcaaacaaagaatcgtacgataaggtgttttctagtcttgaaaagcatcatgaatggtttgaaaattcaattccgctaattgctagtgagaatattcctagtccggctgttagagaggctgtaatgtcagattttggtaatagatatgcagaaggctggcctggggagcgagtctatgctggatgtacctacatcgatgaagttgagattcaatgtatggaacttgcacaaaaattattcaaagctgaatttgcagatgttagaagtgtttcaggagtagttgcaaacttggcaatttattctgcttattcaaatccgggagatgtaatgattgcatcatcaattcct

SEQ ID NO: 227955 - DNA, 436 bp, Unknown
  Bacterial polypeptide expressing nucleotide sequence isolated from the Sargasso Sea
atgagtgattcaaacaaagaatcctatgataaggtgttttccagtcttgaaaagcaccacgagtggtttgataattcaattccattaattgctagtgagaatattccaagtccggctgtaagagaggctgttatgtcagattttggaaataggtatgcagaaggttggcctggtgagagagtttatgcaggatgtacctacattgatgaagttgagattcaatgtatggagttagctcaaaaattattcaaagccgaatttgctgatgttagaagcgtttctggagttgttgcaaacttggcaatttattctgcttattcaaatccaggtgatgttatgattgcatcatcaattcctgcaggaggtcacatctcacatggaaagaaagaacattcaagaactgcgggattagttcacggattagacattgaattct

SEQ ID NO: 227956 - DNA, 2878 bp, Unknown
  Bacterial polypeptide expressing nucleotide sequence isolated from the Sargasso Sea
aatgaaaaaccacggcctgtcacggcggggttttctgaaagccagcgtgctggcgggcgtcgcggtgtatgtcgcgcccctgggcagccgcgcattcgcggcgctcttcgaagaaaaactcctcacccccgtcaaatgggatagcgtcaccggcatcccccaattccgcatcgacggcatcgcgaaggtcacgggctcgaaagtgttcgcccgtgacgtgcgcgccgccgacatgccgcactggccgcagcagcagtcgcatgcgctgatcctgcgcgtcacgcaggccgaccggatctacgagggcttcgacctgtcgctgctcggcgacgacctgaagccggaccgcgtggtcacggccgacgatctcgtgcgcgacggcgtcgcgttcccgacgttctacggcgacgacatgctgctgccggccggcaagacgcccgcgtatctcggccatgcggtcgcgatcctcatctatcacgacttcgcgcgctttcgcttcgcgaagaacgcgctcaagttccgcgacgacgtgatccgctacggcgcggtcacgggcccgctcgagcgcgatccgtggggcaccttccgctacgtgcgcgtgggcggcaagacggcctatgacgacgacgtctattcgagcctgaaggacgcgccgatcttcccgagcatgatgcgcaagcacctgccggtgtggccggacggcaaggagcacggcaagctcgacgagcagggcatgttcctcgccgggcagatcgccagcgagctcgaccatccgtcggcagactggctcgtgttcgaccgcgagtacaacacgcagtcggtcgatacgtccgcgctcgagccggacaacgcgaactgctggtacgacgccgcgacgcagtcgctgcacctcgtcgtgccgacccagtcgccgctcgaagtggccgagaacgcggccgcgatggtcgcgaagtgccgcttcccggtgaagaagctgttcgtgcatccgtgctacacggtcggctacggctccaaggatcacttcaacgtgccgttctacggtctcgtctgcgcgctgtacgcggacggccgcccggtgcgtttcgcgaacgaccgctacgagcagttccagacgtcgctgaagcgtcacgcgttcaagatgcactaccggatcgcggtggaccgcaacacgggcctgctgcagtcgttcaagggtgacttcgaggcgaacggcggcgggcgctcgaacttctcgccgtcggtggcgatggtgggggcgacggccgcgcaatcgatctactacttcccgaagagcgacctggccgcggtcgcgatcgcgtcgcgcgcgatcgatgccggttccgcgcgcggctacggcacgctgcagagcatggcggcgaccgagatggcggtcgacgagatcgccgcgcagctgaacatcgacccgatcgatttccgcctgcgcaacgcactgcgttcggggatgaagaacacgcagggggcgattcccgccggcgcgctgcgcgtcgacgaggtgctcgagcgctcgaagcagcatcccctgtggacgcgccgcgcggcgcgcaaggccgaatacgaggccgcgaacccgggcaagcgctacggcgtcggcttcgcgtgcgtgcagaaggacttcggcacgggcgcggaagcgtcgttcgcgaaggtcgaattcgacgagaacggcaaggtgtcgctgcagcacacggcggccgagatcggcaccgggatgtcgacgtcgcaggcggtcgcggtcgcgaaatggctgggtcgtccggcaacggacgtgcgcgtggccgtgaccgaatggccggacctgccggtcgagaccagcggcgatccgtacgtcatgtcgcaggccgaccaggatcgcctgagcgcgaacccgcgctggtcgccgagctatgcgtcgccgtcgagcgcgacgaactccgcgtactacttcacgcacagcacgcgcgaagccgcgcgcgccgtgttccgctacggcctgtggccggccgcgatgtcgatctggacgcgcggcctcggcggcggccaggccgcgccgtatgcgatccgcatcgaggacgcgcgctgggtcgacggcaagctgaccgccgacggcctcgagccgctgagcttcgaacagctcgcgaagcaggcgcatgcgctgggcctgccgaccggcgccgtcgtgcacgtgttcaaccgctggcagtggaccgacgccgagttcgaagtgggcggcacggtcgagcgcctgccgatcgacgggctgtcgctgcgcgtcggcgcgccgaagacgggcgacaacggcccggtgcccggcacggccgcaccggccggcgccaccgcgatgcgcggcacgctggcgccgaccgcgaacggctaccgcgtgctggaccgcaagcgcgtgttcatcccgccgacgagccgcaacaacgcggccgtcacgtactacacggcagtcggcacgctcgtcgagctggccgtgcacgaagcgaccggcaaggtcgagctgctcacgcaccattcgatcatggagtgcggcaaccagatttcgccgcagctcgtgtcggggcagttgcagggcggtctcgcgatgggtatcggccacgcgctgcacgagtatctgccgctgtatgaagacggccctggcaacggcacgtggaacttcaaccgttaccagctgccgcgcgcgtccgacgtcgctgtctggacgcagacgggcgacgtgctgccgccgctgtccgagaccgatccgccgaagggcgtcgccgaagtggtgatgatccccgtcgtcggcgcgatcgtgaacggcatcgcgcacgcgatcggccatcgtttcaccgacctgccggtgaccccgcaaaagattcaggaggtgctcgcatga

SEQ ID NO: 227957 - DNA, 2746 bp, Unknown
  Bacterial polypeptide expressing nucleotide sequence isolated from the Sargasso Sea
tctggtgttacaacaagtcaaaaaattcatcatactaggtgtcagtgccacgatgttaatgtgcactcaagctcaagcgcttactccttctccgcaaatgattgagcaatttaaacaattaccaaaggctgaacagcagcgcctagcaagacaatatggaattgaccctagcattatttccggtagtcaagcacagccccaaatagccaatccacaggtcgtttccgagcgtgaagtgcaacctgagcgctctaacgaaacaagtgataagaaagaaaaggcagaattagatttttctgttgattcttccaatctcaaacttcgccgttttggttatgaaatgtttgcgggtgagcctagtacgtttgcaccagtatctgatgtgcctgttccaagcgaatatctggtgggccctggcgacaacatcaaagtgcagctttatggaaaagagaataaagaatacgacttagtgattaatcgcgaaggagtgattcaattccctgaactaggacctattcccgtaaacggtcttacgttctcagagttgagagatacactttcgcaacgtattcagcaacagatgataggtattgaatccaatattactatgggtgaattacgctctattcgcatatttgttgcgggtgatgcttacaaaccaggttcatatacggtctctagcctatcgacgatcacacaagcgttgtttgttgcgggcggtgttaacgaaatcggctcgttacgtaatgttcaattaaaacgtaatggtaagctcgttggaaccttagacttatatgacttgctgctaaaaggtgatgcatcaggcgacttacgcttacattctggtgatgtagtgtttattccttctattggtggtcttgtaagcgtttctggtgaagtaagacgtcctgctatttatgagttaaaaaacaatgaaaccatggctgatgttattacaatggccgctggtttaaatcctggggcatatcctaaaagcagctctattgagcgttacaacagcaaatcgttaaaaactgttgtcaacgtcgacctcaccagtgatcaggggaaaatgactctagccaaagcgggtgatgtgattcgtgttaaaaacgcctcagaacaatttgaaagtgctgtgaccgttgtgggcgctgttgttcgtcctggtaaataccaatggttcgcaggacaaaaaattagcgatatctttccttctatttggggagatttagccatctctgctgatttagattatgccttagtcgttcgtgaagttaacgaatatggggatattgaagtccatcagttttcacctggaaaagcgattagtaataaaaatagtgaccaagatattgagttaaaagctcgtgataaagtaattgtttttaacttttctgacgatgtgcaaaaccgttttgagcttaacaagttagttaaacaacgtgttgagaaggttacttctttaaacactaataccttgatcagttcagatttattcaaagcaggctttgttcagcttgataagagcagattaactcagcgcacgcagttggctggtgtagttgtaactgacaaaacagagtcagaagatgtggcagtggtcaaaggcgtagtcaacaaaatgttggctaacttatttgatgacactgagttactcaaactcagtaatcaaatggcacgtcaagaattactctaccctgttatggtcaagcttaataatcagggtagagcaggtgcagggattcaggttgttgggattgatggtcaggtacgtttacctggattgtatccactaacagcgggagcaaaagtgaatgatttggttgttgccgctggagggctaaaagaaggcgcgtatacagctagagccgagttaacatcaacggtagttgataattctggctctaaaaccgagcataaaaatatcgaccttgctctagcgctacaaaataactcaagtgccaatttgttgttatctggcagagatattcttaccgtgatgaccacgccagactggcaagagaccaaagtggttgaagtaagaggtgaggtgaaatttcctggccgttacaatattcgtcgtggtgaaaccttaagcgatttaatcacccgtgttggtggttttactgaatatgctgcattaccctcggcagtatttgtgcgtgagtctgtgcgtcagcaagaacagattgaaatcaaaaagctggctgatcagctccgtcgtgatattgctactcgcgggatttctaaagatggcacagtggttaattatgccgatgcacagttaatgctaaccgatcttgaaaacattaaagcggttggccgtttagtcgtggatttaccagcaatttcactcggtattactcaggctgatttgcagttagaagatgctgacattttatatgtcccttcaactaaacaaacgatctctgtgatgggcgaagtccaacatcctgctacccatagatttaaagaaggtttaacaatcgaccagtatctagcaatgtcaggtggtgcgagagaacgtgctgatgagggaagaacctatgttattcaggctaatggttcagttctaatgccttcgcgttcaagctggttcagcggtggtgagcaattgcaacctggtgatactgtgattgttccactagacactgaatataaagataaccttacactttggtcgcaggttactggcattatctataacactgcagtcgctatttcagccatctcagggctataa

SEQ ID NO: 227958 - DNA, 1342 bp, Unknown
  Bacterial polypeptide expressing nucleotide sequence isolated from the Sargasso Sea
tatgtttgattttgatgccaccgtactcgcgaggatccaattcgcttttaccgtttcttttcacattatctttcccgcaatcactattgggttagccacctatttagccgtgttagaagggctctggttgaagacaaacaatcagatttatcagcagctttatcaattctgggtcaaaatttttgccatcaacttcggcatgggcgtggtctcaggcatagtgatggcctaccaatttggcacccactggagtggtttttcggcctttgcgggcagcgtaactggccccttgttgacctatgaagtgctgacagcatttttcctcgaggcgggatttcttggggtgatgctgtttgggcaaaataaggttggcaaaaagctgcacttttttgcgacttgcatggtggccatgggcactgtgatttcaaccttttggatcctcgcctccaatagttggatgcacacacctcagggttttgaaatcattgataaccgagtcgtccccaccgactggtggcaaatcgtgtttaatccttcatttccctaccgtttaacccatatgacggttgccgcctttctctcctcggccttctttgttggcgcctccgccgcgtggcatttactcaaaggcaaggatactcccgcgattcgtaaaatgctctccatggccatgtggatggcattgattgttgcaccgctgcaagcagtgattggtgactttcacgggctaaatacccttgagtatcaaccagtaaaaatcgcggcgatggaaggccactggcgtaatgaaggggatgagcccacgccgctcatcttattcgccatgcccgatatggataagcaaaccaatcacttcagtttggaaattccaggattagccagtctgattttaaaacacgatataaccaagcaagtgccagcactcactgagtttcctgccgaggattggcccaatgtgcccttagtgttttggagttttagggtgatggtgggcttaggcgtgctgatgattttggcgggcgtgtggagcctctaccttagacgcaagcagacgctatacagcaatcacctgttcctgcgcctggtactgctgttaggtcccgcgggattaatcgcgaccctcgcgggctggtttaccactgaacttggccgccaaccttgggttatccaagggttaatgcgtactcaagatgcggtttcgtcccacagtgtggcccatttaagcctcagcctgatgatgtttgttatctgttacttcggcatttttggcgtgggatatcgctacatgatgcggctcatcagtaaagggcctgtaacgcaagggattgagcaccatggataa

SEQ ID NO: 227959 - DNA, 478 bp, Unknown
  Bacterial polypeptide expressing nucleotide sequence isolated from the Sargasso Sea
gtggagatcggccttcccgaaactggctgcaagatcatcggccagcctcaagacgccaaaatcaacccagagagtgttgtcgacggccagttttctatgccgttttgcgccgctgtggtgctgcgcgagggtgccatgggttgggacgattacgccaagcatttgaatgatgaagacacccgcgctctatgccaaaagatctccaccgttcacgacgctaaagctgaggcggcatacccggtgaacatgtccggatcagtgaagataaagaccgctttcggtgagtttagcactttcgtcgaggtgccgaagggtgagccagataattttatgactacaagtgagttccgcgccaagttcgacagcctctgcgcgccctatcttgatgatgtgcgccggactcgcttggctgacgctatcttaaagcttgaagaggcaaacgcggtggcgtctgtctttcaactcagccaaccgtaag

SEQ ID NO: 227960 - DNA, 1699 bp, Unknown
  Bacterial polypeptide expressing nucleotide sequence isolated from the Sargasso Sea
cgacctcaccagtgagcaggggaaaatgactctagccaaagcgggtgatgtaattcgagttaaaaatgcctcagaacaatttgaaagtgcagtgaccgttgtgggcgctgttgttcgtccaggtaaataccaatggttcgcagggcaaaaaattagcgatatttttccctcaatttggggagatttagccatctctgcggatttagattatgccttagtagttcgtgaagttaacgaatacggtgatattgaagtccatcagttttcacctggcaaagccattagcaacaaaaatagtgatcaggatattgagctaaaagctcgtgataaagtgattgtttttaacttttctgacgatgtgcaaaatcgatttgagcttaataagctcgttaaacaacgtgttgagaaggttacttccttaaacactaataccttgatcagttctgatttgttcaaagcgggttttgttcagcttgataagagcagattaactcagcgtacacagttggccggtgtggttatcacggacaaaaaagagtcagaagatgtggctgtggtcaaaggcgtagtcaacaaaatgctggctaatctatttgatgacacagagttactcaaactcagtaaccaaatggcacgtcaagaattactctatccagttatggtcaagcttaataatcagggcagagcaggtgcagggattcagattgttggaattgatggtcaggtgcgtttaccagggctgtacccactaacagcgggtgctaaagttaatgatttagttgttgccgcgggtggtctaaaagaaggggcatacacagccagagccgaattaacctcaacggtagttgataattcaggctctaaaactgagcataaaaatattgacctagcattagcgctgcaaaataactcaactgccaatttgcgactatcaggtagagatattctcaccgtaatgacaacacctgattggcaagaaaccaaagtggttgaagtcagaggagaggtgaaattccccggtcgttataatattcgtcgtggtgaaaccttaagtgacttaatcactcgtgttggtggctttactgaatatgcagcattgccctcagctgtatttgtgcgtgagtcagtccgtcaacaagaacagattgaaatcaaaaagctggcagaccagctccgtcgtgatatagctacccgtgggatttcgaaggatggcacggtagttaattatgccgatgcacaattgatgctgactgatcttgaaaatattaaagccgttggacgtttagtggtagatttgccagcaatttcgctaggcattacccaggcagacttgcagttggaggatgctgatattttatatgttccttctacaaagcaaacgattgccgtaatgggtgaagtgcaacatccaacaacccacagatataaagaaggtttaaccatagaccaatacttatccatgtcaggcggtgcaagagagcgtgctgatgagggaagaacatacgttattcaggctaatggttctgtactgatgccttcgcgttcaagctggtttagcagtggagagcaattgcaacctggtgatacagtgattgttccgctagatactgaatataaagataacctaacgctttggtcgcaagtgactggcattatttataatactgccgtagcaatttctgctatctcaggcctatag

SEQ ID NO: 227961 - DNA, 1672 bp, Unknown
  Bacterial polypeptide expressing nucleotide sequence isolated from the Sargasso Sea
atgtatttaaaaattttaataattttattttctttattatatcagaacactgcacattcaaaagccactgaaaaaaatcaattcaaccagaagtatttatcaaactatttttcagctttagtttcagtcactaatcaaaagaatgacgatgcaattatattttttaattcttcaaaatttttgatgaacaaacatgataattttttaagagaatatgtattttctttagttttaggtggacaggctaaaaatgcaattaatcaaataaaacgctcgaataattcaaatttttttgaaggagatctattattagcattagagagtataacaaaaaaaaattataagcaggctgagaaaagattaaaaaagcttttagcttatcaagaaaatgaagcttatgaatttgttataattaaaattcttgaaagctataatcatttatttctaaactctaggatcaaaaaaaatagcagaaatttgggaagaattgatttaattacaagctcatttcaaaattgttatttaggcacaaaaaaaacagacttgaatttcttaaatttaattaattcttctgaaaatgaatattctagatatttattcttccatttaggcaacattattgaaaaaaaagattatgaattagtaaatgaaatttccaaaacaattgatcctttgatgagtagcttactaattgcacaatctaaaaagtggattgatgaaaataaatacgaaaaatttaataactatttttcatgcaaaagtgaaaatgatctattagccgagttttttttcttaatcgctaacctatattcttcacaagatctatttaaagagtcaaatttttatttaaatttatctaattatttgaatcctaaattttactttaacctttctttgcttgctgaaaactatcacctaaataataatttagaatttgcaaaaaagattttaaatgaattaagcgatgaagaagaagtttatcattggtttaaaactaaaaaaattacacaatttttagctgaacaagaaaaagataatgaggccctcgattattttgaaaagaaaattaataaatttaaaaatccttctactaaaatattatatgatattgcaaatatttataaaaaatttaaaaattatgaaaaagcaattgaatattattctttagttttatctaagattgataaaaacacttcaacttatgcagatgttctttacagaagaggaggatcatttgagagaatgggtaattatgaaatggcagatattgatctattaaaatcattagaaataagacctgacgatccttactcattaaattatttagcttacagctggcttgaaagaaaatttaaaattaaagaagcaatggaaatgttaaataaggcatataacgaaaaagagaacgatccatatataacagactcagttggatggggatattacctaataggagattacgagaatgcggagaagtatttaagaaaggctgtagaattaatgccagatgatccaattgttaatgatcattatggagatgtactatggcaattaaatagaaagatgcaggctaaatatttttggaaaagcgttttagaatttgaagatacagatgataaaatgagagaagatattcagaataaattgcttaatggaccaagtaaaatttagt

SEQ ID NO: 227962 - DNA, 275 bp, Unknown
  Bacterial polypeptide expressing nucleotide sequence isolated from the Sargasso Sea
tcaagcttcgctaggtagagccaatattacttgtaataaaaatggaataccttttgatagcgaaagtccaatgattacctcaggtataagattaggtacaccagcatgtaccactagaggctttgggtctgaagaatttaaattgataggtgatttaatttataaagtgatagaaggtctaagtaaaaatcaagaagataactcaaaaatagaaaaagaagttcaaaaagaaattattgatctgtgctcttcttttcctatatatgataaataat

SEQ ID NO: 227963 - DNA, 314 bp, Unknown
  Bacterial polypeptide expressing nucleotide sequence isolated from the Sargasso Sea
tcacattgtattagttgatacaaacagtgttgacgaagagctaactggtaaagatgcaggtattttactcaatgaaatgggaattacgctaaatcgaaatgccattccatttgatgagagatcaccatttgttacatcaggcataagaatgggtacgccagctgcaacaacatgtggaatgaaggaaagtgaattaacaaaagtaggatatttaatttcagaaattctaaaaaatagatcagattcaaacaagcttgatgaattaaaagatgaagtaaaagagttagcttcacaatacaagccatatgtctaac

SEQ ID NO: 227964 - DNA, 691 bp, Unknown
  Bacterial polypeptide expressing nucleotide sequence isolated from the Sargasso Sea
cgctgcacacgtgatgggccttgtggctggcgggcagttccaagaccccctcagggaaggggcagacgtgatgacggggagcagtcacaagacgttccccggaccacagggaggtttcgtcatctcggactcagaggacgagaagctccaccgccgactcaatagcggcatcttcccaggggtctgctcgtcttaccacctgcaccacgttgccggcaaggcaatcgcactatcggagttcgaggagttcggagactcgtatgccgcagatatcgtctcaaatgcacaggcactgggggaggcactatcgtcggaagggttcgaagtgatagcagaggataggggattcaccgctagccaccaagtggtaacaagacacggggagatagactcgggggccggcagagatgctgcagcaaccttggaagaagccggaataatcacgaacatgaacatgttaccgggcgacacaaaggcgctcacccccagcggactcaggctcgggactccagagctaacccgagtggggatgaaatctggagaaatgggggatgtcgcacgcttcttcgctagggctctcattgagggcgaggacccgtcttcagtgaaggcagacgtcagggagttcaagtctcagttccagaccgtccattactgcttcgaaccaggcccggcataccctggcctgtga

SEQ ID NO: 227965 - DNA, 243 bp, Unknown
  Bacterial polypeptide expressing nucleotide sequence isolated from the Sargasso Sea
tatgaaaaaattatataatcaatcaattaaagaggcagaccctgaagtatatgctactcttgaaaaagaattaataaggcaacaaaatcaaatagagttaatagcttctgaaaatatagcatctcttgctattttgaatgcacaaggatcagtaatgacaaataaatacgctgaaggttattctggcaagcgatattacggaggttgtgaatttgttgatcaagctgaagatatagctattga

SEQ ID NO: 227966 - DNA, 209 bp, Unknown
  Bacterial polypeptide expressing nucleotide sequence isolated from the Sargasso Sea
tccgtatgatcctaaaagtccatttgtcacaagtggaattagaataggctcacccgcaataactacaagaggaatgggagttaatgaggtaaaaattattgttgatttaattgaccaggtgattgtaaatcatgataacaaagaaaaaattcaatcaatcaagaagcatgttaatgaattatgttcatcttatccaatatatgaatgat

SEQ ID NO: 227967 - DNA, 330 bp, Unknown
  Bacterial polypeptide expressing nucleotide sequence isolated from the Sargasso Sea
gatgatagataagcaagttgaaaaattaattcatttagaagctattcgccacaaagaagatataaatcttattgcatctgagaattatccatctaaagaggtattagaagcttgtggttctatattcagtactaagtatgccgaaggttatcctggaaaaagatactacgagggatgtgaggttgcagatgaaattgaaacattagcgataaatagagctaaagatttgtttaactgcgatcatgtaaatgtacagcctcatagtggaactcaagcaaatatggcagtctacttagcagtattaaattcaaatgattctgttctatcaat

SEQ ID NO: 227968 - DNA, 526 bp, Unknown
  Bacterial polypeptide expressing nucleotide sequence isolated from the Sargasso Sea
cattcaaagattataaacagtagagttttccctggtacccaaggaggacccttgatgaattcaatagtggcaaaagcaatcgcttttaaagaagcattggataactcattcaaagattatcaaaaacaggtattaattaattctagacgattggctgagattttaatgaaaaatggttttaattgtattactggtggaacagatacacacctcgttttactcgatttaagagattctggttttacgggcaaagatgctgagaaagctttatcagatgctggtattactacaaataaaaatgctatacctttcgatccacaaccaccagcaattgcctcaggggtgaggattggaactcctggagtaacaactagaggcatgaaagaggaagaaattgatataattggtgaattaattgttgaagcaataaagaatggtgaaaatcaagaagttctgatttcctgtaaaaaaagagttaacgatctgtgttcaagatttccaatatataaagatttacttatttgat

SEQ ID NO: 227969 - DNA, 274 bp, Unknown
  Bacterial polypeptide expressing nucleotide sequence isolated from the Sargasso Sea
tcaggtcgagcacgcgctggaacgcgcgggcatcacctgcaacaagaatggcattcctttcgacagcgagaagccgaccgtcacctccggcgttcgcctcggcacgccggcggccacgacgcgcggcttcggcgtgagcgagttccgcgaagtcgggcggctgatcgtcgaggtgttcgacgcgctgcgagaccacccggaaggccacgccgccaccgaacaacgcgtgcgccgcgagattttcgcgctgtgcgaacgctttcccatctactaa

SEQ ID NO: 227970 - DNA, 349 bp, Unknown
  Bacterial polypeptide expressing nucleotide sequence isolated from the Sargasso Sea
ctggaggacagacacacacttaatgttagtagatttaagaccttttaatgttaaaggtaatttagctgctgaaagtttatctagagcaaacataacgtgcaataaaaatgggattccatttgactctgaaagcccaatgataacatcaggtattagacttggatcccaggctgcaacaacaagaggatttggtttaaaggaatttgaaaaagtaggtgaacttattacaaaagtaatagatggattatcaaaaaacccaaatgataatagtaaaattgaagacgaagttagaaaagaagttgtttcactttgctcttcttttccaatttataaaaatttaagaaaatga

SEQ ID NO: 227971 - DNA, 249 bp, Unknown
  Bacterial polypeptide expressing nucleotide sequence isolated from the Sargasso Sea
aagctggaataactacaaataaaaatatgataccatttgataccaaaagtccaatgataacaagtggtattagaattggtactcctgcgcttacaacaaggggtatgggaaaagaagaaatgattgtaattgcgcaattgattgacaatgttttatctgatattgataatgaaaataatattagtaaaactaaaaaatcagttgaagaattatgtaatgattttgaattatatccctctataaaatgat

SEQ ID NO: 227972 - DNA, 139 bp, Unknown
  Bacterial polypeptide expressing nucleotide sequence isolated from the Sargasso Sea
gttgaaagatgcggaccgagagatgtacgatctcattcaactcgaaaagcgacgacagatcggcgggatcgagctcatcgcgagcgagaatttcacctcggcgccggtgatggaggccctgggatcggcgctgacgaat

SEQ ID NO: 227973 - DNA, 843 bp, Unknown
  Bacterial polypeptide expressing nucleotide sequence isolated from the Sargasso Sea
atggagttcgcaaagacgacggctttatcgacatggatcaagtccaagccttggctgagaaacatcggcctaaacttatcatctgcggtggttccgcgtatccacggtgcatcgacttctcggcgttccggattgtagcggacagcgtggatgcaattcttctagctgatatggcacactttgcgggattggttgctggcggtgcgcaccccagtcctatactgcatgcgcatgtttcgacggccacgacttataaaaaccttcgtggcgtgcggggcgggcttatcctagccagtgatttgagcctgaaacgcaaactaaattctggcgtctttcccggcgtccaggggtcggtgatccttaatgccgtggcggctaaggcggtctgtttgggcgaagcacttaggcctgaattcgaggtctacgctcatgcggtcttgaataatgcccgcgttttggcggcgaccttagttgatcgcggtgttgatgtggtcacgggcggtacagacacaccgttgattctagttgacctacggcctaataggctaaccggcgtggtggcctcaaacagcctggagcgggcaggactgacttgcaataagaacggtgtgccgggcgatattaagccaccgagcatcacatccggtttgcggtttggggtatcggcgggaacaactaggggttttggcgcgcaggagtttgaaacaataggcaatctgattgcggatatattgcacggccttgaaaatagaattgccaaccaaagtcaattggaaacgcgagttgcttcagaagtaggggcgatgacggacagattcccgatttatgacacagatatatgaa

SEQ ID NO: 227974 - DNA, 277 bp, Unknown
  Bacterial polypeptide expressing nucleotide sequence isolated from the Sargasso Sea
aatatttccggaaaagctgcagaaatagctcttgatgaagcaggaatttttgtaaataaaaatatgattccttatgatccaaaaagtccgtttgtaacaagtggaattagagttggttctcctgcaatgactactagaggtatgggagttgaagaagtgaagattatcgttgatttaattgatcaggtaattttaaatcatgataataaagaaaagattaattcagtaagagctcaagtcaatgaattatgttcatcctacccgatatatgaataat

SEQ ID NO: 227975 - DNA, 199 bp, Unknown
  Bacterial polypeptide expressing nucleotide sequence isolated from the Sargasso Sea
catgaataaaaaaggcgcttcccaagaatcacttaataatgtagatgcagaaatttctgagttaattgataacgacttaaatagacaaaatacacatatacacctcatagcatcagaaaactttgcctcaaaagcagtaatggaagcatctggctcaatattgactaataaatactctgagggctttccaggacgtaga

SEQ ID NO: 227976 - DNA, 316 bp, Unknown
  Bacterial polypeptide expressing nucleotide sequence isolated from the Sargasso Sea
ggtagatttaagaccttacaatgttaaaggtaatttagcagcagaaagtctttcaagagctaacattacttgcaataaaaatggaattccttttgatactgaaaaacccatggttacttctggtataagattaggaacacaagcagctacaacacgtggttttggtttaaatgaatttaaaactgttggtgaattaattacaaaaactttaaaagggttatcagaaaacccaaatgataacagtaaagtagaaaatgaggtaaaaaacgaagttatttctttaacttcatcgtttccgatatataagaatttgtag

SEQ ID NO: 227977 - DNA, 259 bp, Unknown
  Bacterial polypeptide expressing nucleotide sequence isolated from the Sargasso Sea
tatgaaatcatcaagaagcgatagtattttttcgaataataacaccataaaagattatgacaatgaattgtgggcatcctttcaacatgaagctgaaagacaagaagatcatattgaattaatagcctcagaaaattatgcatcaaaacgaatccttgaagctcaaggttctcttttgactaataaatatgctgagggatatccctcaaagcgttactatggtggttgtgaaaatgttgatattgcagagaatcttgca

SEQ ID NO: 227978 - DNA, 299 bp, Unknown
  Bacterial polypeptide expressing nucleotide sequence isolated from the Sargasso Sea
caatactataaaaagtgtaggtatggatgggaaaatagcagaagaattacttgatcaatttggattaacaacaaataagcaagttattccagatgatcctaatccccctcttagaccgagtggaataagattaggaacccctgcaataactaccaggggcatggaagaagaagatatgaagaaaattgctaaatggattacaaatattcttaagagcaaaaaaggtcttaatagattagtagaattaaaaagtgaaattaaaactttttcaagtaattttaaactgcctggtatataat

SEQ ID NO: 227979 - DNA, 151 bp, Unknown
  Bacterial polypeptide expressing nucleotide sequence isolated from the Sargasso Sea
aatggaaaatattcgtaaagaagatcctgcattgtatgatgtattatccaaagaaattgatagagaggaaacgactcttgaattgattgcatctgaaaactttactagtaaagctgtgatggaaatggctggaagcgtaatgacaaataaa

SEQ ID NO: 227980 - DNA, 276 bp, Unknown
  Bacterial polypeptide expressing nucleotide sequence isolated from the Sargasso Sea
ctgaaagcttatcaagagctaatattacgtgtaataaaaatggtattccttttgatacagaaaaaccaatggtaacatctggtataagattaggaacacaagctattacaacacgtggttttggtttaaacgagtgtaagaaagtaggtgaattgattacaaaaactcttaaaggattatcagaaaacccagatgataacagtaaagtagaagatgaagttagaaatgaagttattgctttaacttcttcatttccaatatataagaatctttaat

SEQ ID NO: 227981 - DNA, 307 bp, Unknown
  Bacterial polypeptide expressing nucleotide sequence isolated from the Sargasso Sea
tatggatggtttttttaataatcaactttcaataacagaccctgaaatttcaaatgctattgaaaaagaaaaaatgagacaaaaagagcaagttgaactaattgcatctgaaaatattgtttcacaagcagttttggatgctcaaggaagcattttaacaaacaagtatgccgagggatattcaggaagaagatattacggtggatgtgagtttattgatgatttagagacgataggaataaatagagttaaagaattatttaattgtaattatgctaatatacaaccacattcaggtgctcaagct

SEQ ID NO: 227982 - DNA, 331 bp, Unknown
  Bacterial polypeptide expressing nucleotide sequence isolated from the Sargasso Sea
cacagactctcatatggtcttagtagatttaaggtcaaaaaatgttactggaaaagatgctgaagaaagcttggagagagctggaatgacttgcaacaaaaatggtgttgcaaatgatccaaaccccccaactattacctcaggtattagattaggatctccagctgcaacaacaagaggtttcaaagaagaagagtttaaatttataggtgaaaaaatttccacagttataaatgcactatcatcatcaaacgcagatatatcaatgactgaaagttcaatcctcaaagatgtgacagagctctgctctaagtttccaatttacaaataa

SEQ ID NO: 227983 - DNA, 670 bp, Unknown
  Bacterial polypeptide expressing nucleotide sequence isolated from the Sargasso Sea
tatggtttctaatattaatccaatactaaaagaagaaatttctaagctaaatgatttatcaacacttagttctatagcgtatctttcttctctgcaattggtacattcaatagatccatcagtatcaaaatccattattcaggaattaatagatcaaagatcaaatcttaaaatgatcgctagtgaaaatttttcatcaattgcggtacaaatggctcaagcaaatctttttaccgataaatatgctgaaggctttccctttcacaggttttatgcaggttgtgataatgttgatacaatagaatctagggctgctgatctagcaaaggaattatttaacgcagaacacgcttatgttcaaccgcattcaggggcagatgctaacttaattgcatattgggctatactaagtaaaacagtccaagaaccttttcttgataaattagaaaaaaaagatatcactgcgttgactcagtctgagtggtcagaattacgaaaattatttggtaaccaaaagctcctagcaatgaattactattcaggaggacatttaagtcatggctatcgtcataacgtttcttctaggatgtttcaagttgaaaattatgatgtcgataaagattctaaattattggattatgatgttatacgcaagcaggctaaagaattt

SEQ ID NO: 227984 - DNA, 343 bp, Unknown
  Bacterial polypeptide expressing nucleotide sequence isolated from the Sargasso Sea
tggaactgatactcacctcatgttagttgttttaagaccttttaatgtaaaaggtaacgtagctgcagaaagcctttctagagctaatatcacatgtaataaaaatggtattccatttgatagtgaaagcccaatgataacttctggtataagacttggatcacaggctgctacgacaagaggttttgggttaaaagaatttcaaatagtaggcgatttaataacaaaaactataaaaggattagctgaaaaccccgaaaataactctaaaacagaagatgaagtaagaaaagaagttgtaagcctttgttctaattttccgatctataaacacttaggctaa

SEQ ID NO: 227985 - DNA, 313 bp, Unknown
  Bacterial polypeptide expressing nucleotide sequence isolated from the Sargasso Sea
attgaaatcagtagctaaaattgatcctataatccattctgtaataaaaaaagagattaatcgtcaaaaaactcaattagtaatgattgcatctgagaattatgctagttctgcagttcttgaagctacaggttcaatcatgactaataaatatgctgaaggatatcctgggaggagatattatgctggttgtgaaaattttgacacaatcgaaactatagctatgaatagagctaatgaacttttttcttcaaaattttccaatgtccaacctcatagcggaactcaagcaaatatggcagcatattttagt

SEQ ID NO: 227986 - DNA, 281 bp, Unknown
  Bacterial polypeptide expressing nucleotide sequence isolated from the Sargasso Sea
tgcagctgaaagtttatcaagagcaaatattacgtgtaataaaaatggtattccttttgatacagaaaaacccatgattacctcaggtattagattaggcacacaagcagctacaacacgaggatttggattaagtgagtttaaaaccgtaggagaattaatcacaaaaactttaaaaggtttatctgaaaatccgtcagataatagtaaaatagaagaagaagtaaaaaatgaagttatttctttaacttcgtcatttccgatatataagaacctttagt

SEQ ID NO: 227987 - DNA, 469 bp, Unknown
  Bacterial polypeptide expressing nucleotide sequence isolated from the Sargasso Sea
aggtaaggctgttgcttttggtgaggcactaaagccagagtttcaaaattatataaaaaaagttattgcaaacgctaaagtattagcttcttctctagtaaataatggattcaagattgtaactggtggaactgactctcatattgtgtggttagatcttactcctaaaaatataacaggtgataaggctgaaaaaatacttgaggaggttgggatagcttgcaataaaaatgctattccttatgatccaaatccacctaaaataacaagtggtttgagatttgggacagctgcagccacctctagaggttttaatgagaatgattttaatcaaattggtgatttaatttcagaaatacttgataatattaatcaaaatcaagataatcaaaaagaatttatttctttaatgaaaagtaaagttattagtatgtgtaaaaaatatccaatttacgatgaggctttttaa

SEQ ID NO: 227988 - DNA, 164 bp, Unknown
  Bacterial polypeptide expressing nucleotide sequence isolated from the Sargasso Sea
tttgattgaggctcaggatcctgagttggctgtggagttaactaaagaaagaaatcgtcagcaagataagttggagatgattgcatctgagaattttacgtcgttagctgtaatgcaagcgcaaggaacgtggttaacgaataagtatgcagaaggtcttcctg

SEQ ID NO: 227989 - DNA, 268 bp, Unknown
  Bacterial polypeptide expressing nucleotide sequence isolated from the Sargasso Sea
ctgtccgtgtacagatcccccaggttccgtggcattgagctcatcgcttcggagaacttcaccaccgctgcggtcatggaatgcaacggctcctgcttgaccaacaagtactccgagggacaggcgggcaagcgatactacggcggcaacgaggtcatcgacaagatcgagtggctctgcaagaagcgcgcgctgcaggccttctccctcgacgcccaggagtggcacgtgaacgtgcagccctactccggatccccggcgaacttcg

SEQ ID NO: 227990 - DNA, 289 bp, Unknown
  Bacterial polypeptide expressing nucleotide sequence isolated from the Sargasso Sea
catgacaaccaaccttgaactgctccagcaaaatgatccgcttttgtttgatgctttgcagggcgaagaggctcgacaacggtccggtattgagctgattccttccgaaaactatacgcatcccgaggtcctagttaccttgggaagtgtctttacgaacaaatactcagaggggtatccgggtcgtcgttactacggcggtcagacctacaccgacgaaattgaaaacctggcgcgggaccgcgcgaaagctgtgtttcggtgtgaacatgccaacgtccagccattc

SEQ ID NO: 227991 - DNA, 859 bp, Unknown
  Bacterial polypeptide expressing nucleotide sequence isolated from the Sargasso Sea
aaggtattctcaagtcttgaaaaacatcacgaatggtttgataattcaattccattaattgccagtgagaacatccctagcccagctgttagagaagctgtgatgtcagattttggtaatagatatgccgaaggatggcctggtgagcgagtttatgcaggttgtacctacatcgatgaagttgagattcaatgtatggaattagctcaaaaattattcaaagccgaatttgctgatgtcagaagtgtttctggcgtggttgcaaacttggcaatttattctgcttattcaaatccaggtgatgtaatgattgcatcgtcaattcctgctggcggtcacatctcacatggaaagaaagaacattctggaacagcaggattggtacacggattagatattgagttctttgcatttgatcctgaagaaatgacattagatgttgacaagacaaaagctaaagttgaagatttgaaatcacaaggacgattaccaaaaattgcaatgtttggcggttctgtatttttattcccacacccagtaaaggaactagctgattttctaaaaggacatgacatgcacataaactatgatgcagcacatgttgcaggattaattgctgggggaaaattccaagatccacttagagaaggaaccgacacaatgactatgagtactcataaaactttgtttggtcctcaaggtggattagttttaggatttgaaaaacatgcagaaccaatcaaaaaagcaatgttcccaggattaacaagtagtcatcacattcatcacatgggtgcaaaagcagtagcatttgcagaagctttagagttggaaaagattatgcagaacagacaatcaa

SEQ ID NO: 227992 - DNA, 273 bp, Unknown
  Bacterial polypeptide expressing nucleotide sequence isolated from the Sargasso Sea
tatgaaaaaattatataatcaatcaattaaagaagcagaccctgaaatttatgaaactcttgaaaaagaactaacaaggcaacaaaatcaaatagagttaattgcttccgaaaatatagcatctcttgctattttaaatgcacagggttctgtaatgacaaataaatatgccgaaggttattctggaaagcgatattatggaggttgtgaatttgttgatcaagctgaagatattgctattgaaagagtaaaaaaattatatggatgtaaatt

SEQ ID NO: 227993 - DNA, 286 bp, Unknown
  Bacterial polypeptide expressing nucleotide sequence isolated from the Sargasso Sea
atggatggtttttttaataatcaactttcaataacagaccctgaaatttcaaatgctattgaaaaagaaaagataagacaaaaagagcaagttgaactaattgcatctgaaaatattgtttcacaagcggttttggatgctcaaggaagcattttaactaacaagtatgctgagggatattcaggaagaagatattatggtggatgtgagtttatcgatgatttagagacaataggaataaatagggttaaagaattgtttaattgtgaatatgccaaatatacaa

SEQ ID NO: 227994 - DNA, 277 bp, Unknown
  Bacterial polypeptide expressing nucleotide sequence isolated from the Sargasso Sea
ttatgtaaagcaaatataacttgtaataagaatggaataccgtttgatactgaaaagccaactattacttctggaataagactcggatctcaagcagccacaaccagaggctttggactgaatgaatttaagaaagtaggagaattaattactaaagtaattaaaggtttatctgaaaatccagaaaacaatagtaaaaccgagtcagaggttaaaaaagaagtgattgaactttgttctaaatttcctatatataaccacttgatcaaaaaataat

SEQ ID NO: 227995 - DNA, 174 bp, Unknown
  Bacterial polypeptide expressing nucleotide sequence isolated from the Sargasso Sea
aatgtctttacttgataataaatctgaccttaaaactgatgcaattttttcaaataaaaaagatatagaactttatgatattgagctttgggagtcctttgaaaaagaaatgattagacaggaagaacatattgagctcatagcttcagaaaattatgcaagtcaaagagtgct

SEQ ID NO: 227996 - DNA, 196 bp, Unknown
  Bacterial polypeptide expressing nucleotide sequence isolated from the Sargasso Sea
atgtctattgcagtaaaattaaataaatatttaaatagtttctttaaattagatttaaaagaagctgataaagaattatataaatcaattgaggaagaatttgtaagacaacaaaatcatattgaactgatcgcttctgaaaatattgtttctaaagctgtgttagaagctcaggggtctgtgttaaccaataaat

SEQ ID NO: 227997 - DNA, 312 bp, Unknown
  Bacterial polypeptide expressing nucleotide sequence isolated from the Sargasso Sea
gatcgacttgtcttccaagccatacaccggcaagggatgcggatgcggcactggccggtgcctatatcaccgcaaacaagaactcggtgcccaacgacccgcgctcaccttttgtcacttcggggctgcgtatcggcacaccagccgtgaccacgcgcggctttggcgtgaccgagtgtgaacagttagcgggttggctgtgtgacgtgctggatgcgctggagaccggggggcatgcgctaaccacggttcgtgatggggtgcggaaacaggtggtggacctgtgccgccgccatcccgtgtaccaatagc

SEQ ID NO: 227998 - DNA, 406 bp, Unknown
  Bacterial polypeptide expressing nucleotide sequence isolated from the Sargasso Sea
ttgttgccatgcatcggctctggctgagcgtttgatcgctcgcggcatcgatgtggtgtccggtggcaccgacaaccacgtggtgctgctcgatctgcggtgcatcggaatgaccggaaaagtggctgacctgctcgtcagtgatgtgcacatcacggccaacaagaacacggtgccttttgaccccgaatctccattcgtcaccagtggtctgcggcttggaaccgctgctctcaccacccggggattcgatgccgaagcctttgtggaggtggcggatgtgattgccgatcgcctgctcaaccctgaagacgatgcgatccagaagcgttgcctcgatcgggttgagcagctctgcagccgcttccccctctacgccgaacagaaacagccggcgcttgcctga

SEQ ID NO: 227999 - DNA, 712 bp, Unknown
  Bacterial polypeptide expressing nucleotide sequence isolated from the Sargasso Sea
atggctgattcaaacaaagaatcgtacgataaggtattttctagtcttgaaaagcaccatgaatggtttgataattcaattccgctaattgctagtgagaatattcctagtcctgctgttagagaggccgtaatgtcagatttcggtaatagatatgcagaaggctggcctggtgagcgagtctatgccggatgtacctacattgatgaagttgaaattcaatgtatggagttagctcaaaaattattcaaagctgaatttgcagatgttagaagtgtttctggcgtggttgcaaacttggcaatttattctgcttattcaaatccgggagatgtaatgattgcatcatcaattcctgcaggaggccacatttcacatggaaagaaagaacattcaggaactgcaggattagttcacggattagatatagagttctttgcttttgatcctgaagaaatgacattagatgttgataagaccaaagctaaagttgaagatttgaaatcacaaggaaaattaccaaagattgcaatgtttggtggttcagttttcttattcccacacccagtaaaagaattagctgaattcctaaagggtcatggtatgcacattaactacgatgcagcacatgttgcaggattaattgcaggtggaaaatttcaagacccacttagagaaggaacagatacaatgactatgagtacccacaaaa

SEQ ID NO: 228000 - DNA, 712 bp, Unknown
  Bacterial polypeptide expressing nucleotide sequence isolated from the Sargasso Sea
catgagtgattcaaacaaagaatcgtacgataaggtattttctagtcttgaaaaacaccacgaatggtttgataattcaattccgctaattgctagcgagaacattcctagtccagccgttagagaggctgtaatgtcagatttcggtaatagatatgccgaaggatggcctggtgagcgagtctatgctggatgtacctacatcgatgaagttgagattcaatgtatggagttagctcaaaaattattcaaagccgaatttgcagatgtcagaagtgtttctggtgtagttgcaaacttggcaatttattctgcttattcaaatccgggtgatgttatgattgcatcatcaattccagctggcggtcacatttcacatggaaagaaagaacattcaggaactgcaggattagttcacggattagacattgaattttttgcatttgatcctgaagaaatgacattagatgttgataagacaaaagctaaagttgaagatttgaaatcacaaggacgattaccaaaaattgcaatgtttggcggttctgtcttcttattcccacatccagttaaagagttagcagactttctaaagggacatgacatgcacatcaactatgatgcagcacatgttgcaggattaattgctggtggaaaattccaagacccacttagagaaggaacagatacaatgacaatgagtactcacaaa

SEQ ID NO: 228001 - DNA, 235 bp, Unknown
  Bacterial polypeptide expressing nucleotide sequence isolated from the Sargasso Sea
aatgtcgtcagtaactaaaattagaagagtatcaagcaattttttcgatagagatttaaaagactcagacaaggatctttttgattcaatttcacaggaatttgttagacaaaaaaatcatattgaattgattgcatccgaaaatattgtttctagagctattttggaggctccaggttcagttttaacaaataaatatgccgagggttattctggcaaaagatattatgggagg

SEQ ID NO: 228002 - DNA, 197 bp, Unknown
  Bacterial polypeptide expressing nucleotide sequence isolated from the Sargasso Sea
tatgagtaataaaggtgcttctaaagataatctattatctgctgatgaagaaatagcgggcttaattaaaacagatcttgaaagacagaattcacacatacatttaattgcttctgaaaactttgcatcacaagcagtaatggaggcttcagggtcaatacttactaataaatattcagaaggttttccaggtagaa

SEQ ID NO: 228003 - DNA, 295 bp, Unknown
  Bacterial polypeptide expressing nucleotide sequence isolated from the Sargasso Sea
ctggcaaattgctgatttgcttgtaagtgaagttaatattactgctaataaaaatactgttccatttgaccctgaatcaccttttgtgaccagcggtctaaggctaggtactgccgctttaactactagaggttttaatgagaatgcgtttgctgaagttggcgaaattattgctgatagattacttaacccaaacgatgcactgattgaaagtcaatgtaaagaaagagtattaactttatgtaatcgctttcctctttatgaaggcaaacttgaagcatcaacaattaaatga

SEQ ID NO: 228004 - DNA, 1035 bp, Unknown
  Bacterial polypeptide expressing nucleotide sequence isolated from the Sargasso Sea
aatgagtgtaaacatttctgatgtattggacatcttaattagacagaaccaatggagaggccgagaggctatcaatctaattgccagcgaaaatgtgcagtctgaagcagtcaaacaggccgagataaacgattttatggggcggtacgcagaaggacatcccaatacagaccaaaaagacgggcgatattatgaaggtacccgctatatagaccagatagagagcatggctgtcagcgaaatgatcaagctggcaaagtgtcatcaagcggatgtgcgtcctgtcagtggaaatgcggcaaacactgcggtcgctttaggaatacttcgagggaatgacacagtgattgtgaactcaattgagaatggggggcacatcagtcataatcccataggagttgtaggaagaaggattcaagtccgtggaaaagttctcacactaggacgtgaaaattctattaacctgcatttctggccaaccacccaagacggatatcatctggacactccaaaatgtttggatttgctggaacaaacttctcctaatttggttattctgggtaaaagcctgtttctttttcctgagcctgttaaagcaattgctgaaatttgccgggccaaaaacatccccatactatatgacggcgctcatgtgctaggcttaattataggtggcaaattccaagatccttttcaagaaggtgcacattttattaatgccagcactcacaaaacttttcctggacctcaacgcggtgttattttaggcaacatgagcagtgatcaagaaatgaaatggtggaacagtgtggacaggggagtgatgccaggctcttcaagcagtcaccatttacataccttaccagggatgttgatagcaataagggaaatggctgaatatggaaatcaatatgcttcgcaaacagttgctaacgccaaggcattaggccaggctcttgccggcgaaggtgttaatgtagaggctaaagaatttggttttacggaaagtcatcagctggcactaaacgttacgaa

SEQ ID NO: 228005 - DNA, 316 bp, Unknown
  Bacterial polypeptide expressing nucleotide sequence isolated from the Sargasso Sea
ttgttagatctaagatcttttcgtgtaactggtaaagatgcacaagcttctctaggtcgatctaatataacttgtaataaaaacggaattccttttgatacagaaagcccaatgataacttctggtattagactaggtactcctgcatgcactaccagaggttttggagaaaatgagtttaagcttgtaggagatttgatttttaaagtaatagaaggactaagcaaaaacaaagaagacaactctaaaatagaaaaagaagttcaaaaagaaataattgaactttgctcatcttttcctatatatagtagttaaa

SEQ ID NO: 228006 - DNA, 1321 bp, Unknown
  Bacterial polypeptide expressing nucleotide sequence isolated from the Sargasso Sea
atggctgattcaaacaaggaatcgtacgataaggtattttctagtcttgaaaagcatcatgaatggtttgataattcaattccgctaattgctagtgagaatattcctagcccggctgttagagaggctgtaatgtcagattttggtaatagatatgcagaaggctggcctggtgagcgagtctacgctggatgtacctacatcgatgaagttgagattcaatgtatggagttggctcaaaaattattcaaagctgaatttgcagatgtcagaagtgtttctggtgtggttgcaaacttggcaatttattctgcttattcaaatcctggagatgtaatgattgcatcatcaattcctgccggcggtcacatctcacatggaaagaaagaacattcaggaactgcgggattagttcacggattagatatcgagttctttgcatttgatcctgaagaaatgacattagatgttgataagacaaaagctaaagttgaagatttgaaatcacaaggaaaattaccaaagattgcaatgtttggtggttcggtatttttattcccacacccagtaaaagaattagctgaatttctaaagggtcacggcatgcacatcaattatgatgcagcacatgttgcaggattaattgctggtggaaaattccaagacccacttagagaaggaacagatacaatgacaatgagtactcataaaactttgtttggccctcaaggaggattagtaataggatctgaagaacatgcagaaccaatcaaaaaagcaatgttcccaggattaacaagtagtcatcacattcatcacatgggtgcaaaggcagttgcatttgcagaagctttggagtttgggaaagattatgcagagcagacaattaaaaatgcaaaagcattagcttccgaattaaataatgtaggattcaaagtgttaggtgaaaagagaggttatacggaatcacaccaaacagttgtaaatgttttagattatggtgatggtggaactattgaagctgatttagaaaaagcaaacataattgttaatcgtcaattaattccaggagatttgaaagcaggtcgtcactatatgcacccaggtggaattcgtttaggaacatctgagattacccgtttaggtatgaaagaatctgaaatgaaagagattgcatctttattgaaacaagttgttgttgacaaaaaagatgcaggagaaattgcagcacgtgttaaagaattcaagacagatttcaagaaaacacaatattgttttgataacaaacttggtgcctacgaatacgtaaaattacgttaat

SEQ ID NO: 228007 - DNA, 1048 bp, Unknown
  Bacterial polypeptide expressing nucleotide sequence isolated from the Sargasso Sea
atgaaaataaaaactgaagacatccaaaacctggtagaaacacaaaataactggcggggaagagaatgtctgaacctgattgccagtgaaaatgcacaatcccccatggtcagaagtattgaatcgaatgattttatgggacgctacgctgaaggacatcccaatacggattcggaagaccgacgctattatgaaggaacccgctggattgacgagatcgaaaggattgcacaagaggaaatcattgaaatggcgaattgccggcaggcggatgtcagacccattagtggaaacgcggccaacactgcactggctctgggcattctcagaggcggagattcagtcatcgtcaattctattgaacagggtgggcacatcagccataacccaattggcgtcgtggggcggagaatacagaaaagaggtcaggttctcactcctgggaaagaccattcgattgatctccactattggcctaacacccctgatggttatcatttggacgcagatgcctgtgtgaaacttttagaagacaaacgtcccaacctggcgattctcggcaaaagtctttttctttttccggaaccggttaaggaaatcgcagaaacatgtagaaacatgaaaataccattactttttgatggagctcatgttcttggattgattcttgggggatgttttcaggacccactgggtgaaggagcccatttcatcaatgccagtacccacaaaacctttcccgggccacaacgcggagttatcctaggaaaccttgaaggtgatgaagaaatgaaatggtggaccagtatcgaccgaggtgtgatgcctgggtcttcaagcagtcatcatctgcatacacttccaggattggtgattgccatccgggaaatgaaggtttacggaaaagcctatgctgaacaaaccatcagcaatgccaaagctctaggaagggctcttgatgaagaaggtgtagatgttgaagccaaggaatttggatttaccgaaagtcaccagcttgcagtcagtgtcacccgttttggtgaggcaa

SEQ ID NO: 228008 - DNA, 250 bp, Unknown
  Bacterial polypeptide expressing nucleotide sequence isolated from the Sargasso Sea
atgagtaataaaggtgcttctaaagataatctattatctgctgatgaagaaatagcgggcttaattaaaacagatcttgaaagacagaattcacacatacatttaattgcttctgaaaactttgcatcacaagcagtaatggaggcttcaggttcaatacttactaataaatattcagaaggttttccaggtagaagatattacgaaggttgtgaaactgttgatgagatgaacaacttgctaagataga

SEQ ID NO: 228009 - DNA, 1269 bp, Unknown
  Bacterial polypeptide expressing nucleotide sequence isolated from the Sargasso Sea
aacatcatgaatggtttgataattctataccactaattgctagcgaaaacattcctagtccggctgtaagagaggctgtaatgtcagattttggaaatagatatgcagaaggttggccaggcgaaagagtctatgcaggatgtacctacattgacgaagttgagattcaatgtatggagttagctcaaaaattattcaaagccgaatttgccgatgttagaagtgtttcaggagttgttgcaaacttggcaatttactctgcttactcaaatcctggtgatgtaatgattgcatcatcaattccagctggaggtcacatctcacatggaaagaaagaacattcaggaactgcagggttggtacatggattagatatcgagttctttgcatttgatcctgaagagatgacattagatgttgacaagactaaagctaaagttgaagatttgaaatcacaaggacgattaccaaagattgcaatgtttggtggttcagttttcttattcccacatccagtaaaggaactagctgattttctaaaaggacatgacatgcacatcaactatgatgcagcacatgttgcaggattaattgctggtggaaaattccaggacccacttagagaaggaactgacacaatgaccatgagtactcacaaaactttgtttggtccacaaggcggattagttttaggatttgaaaaacatgccgaaccaatcaagaaagcaatgttcccaggtttaacaagtagtcatcacattcatcatatgggtgcaaaggcagtagcatttgcagaggccttagagtttggtaaagattatgcagagcagacaattaaaaatgcaaaagctttagctgcagaactaaacaatgttggattcaaagtgttaggtgagaaaagaggttacacggaatcacatcaaacagttgtaaacgttttagattttggtgatggtggaactattgaagctgatttagaaaaagcaaacattatcgtaaaccgtcaattaattcctggagatttgaaagcaaaccgtcactatatgcatccaggtggaattcgtttaggaacttcagagattactcgtcttggtatgaaagaatctgagatgaaagaaattgcatctttgataaaacaagttgtagttgacaagaaagatgccgttgaagttgcgaatcgagtaaaagaattcaaaactgatttcaagaaaacacaatactgctttgataacaaacttggtgcttacgagtacgtaaaattacgttaat

SEQ ID NO: 228010 - DNA, 166 bp, Unknown
  Bacterial polypeptide expressing nucleotide sequence isolated from the Sargasso Sea
attgcttgataagaaatctagtattaaaactgatgcaatcttttctaacaaaaaagatatagaactttatgatgctgagctttgggagtccttccaaaaggaaatggttagacaagaggagcatattgagcttatagcctcagaaaattatgcaagcaagagagtt

SEQ ID NO: 228011 - DNA, 340 bp, Unknown
  Bacterial polypeptide expressing nucleotide sequence isolated from the Sargasso Sea
atgtcagaaacaacaaaaacagcacaatatgaagattttgaagatttcttttcaaaaaacttaaaagaagctgatccaaaattatatgaatctttatctcaggaatttgataggcaacaagaacacattgaattaatagcatcagaaaatattgtttctagatctgttttagatgcccaaggctccattatgacaaataaatatgctgaaggatattcaggcagaagatattatggaggatgtgaatatgttgatctggcagaggatcttgctatttcaagagcatgtgaattatttgattcaaaatacgccaattccaacctcattcaggatcgcaagc

SEQ ID NO: 228012 - DNA, 1038 bp, Unknown
  Bacterial polypeptide expressing nucleotide sequence isolated from the Sargasso Sea
ggatgtgagcacgttgatggtgctgagactctagctattgaaagagcaaaaatactttttaacgcaaagtttgcaaacgtccaaccacattcaggtgcttcagccaatgccgctgtttttctagctcttttggagcctggcgatacctttttaggcatggctttagatcaaggaggccatttaactcatggatcgaaagtaaatttttccggcaaaaattttaacgcaattcaatatggtttagataaagtaaccggcgatattgattatgtagaaataagaaaattggcgcatgagcataaacccaaaatgattgtagctggcttctctgcttttatggggattgtcaattggaaattatttagagaaatcgctgatgaagttggagcgtttctgatggttgatatggcacacgtatctggtctagtcgctggtggagtttaccctaatcctgtggaatttgctcatgtagtcaccagcacaactcataaatctttaagagggccaagatcaggtattatcttgtctaacgaagatgaggaatttcagaaaaaattaaattttgcggtatttcctggatcacaaggtggaccattaatgcatgttatagctgcgaaggcagtgtgttttaaggaagcaatgactaatgattttaaagattaccaaaaacaaataatctcaaatgcaaaaaccatgtgtggacagttcacatctagaggatttaatttagttcaaaaagatacagataatcatctgattttagttgatcttagaagtaagaatattacaggaaaagaagttgaagaacttctaggcactgtaaatattacagtaaataagaattcaattccggatgatccagaatctccatttgtaacttctggaattcgtattggtactccagccatgacaacacggggctttaagaatgatgaggcaaaacaagtggtcgatttaatttgtgatgcgatagaaaataaagaaaactctgacgaacttgatatagtaaaggataaggtaaaggagttatgcaggaaa

SEQ ID NO: 228013 - DNA, 626 bp, Unknown
  Bacterial polypeptide expressing nucleotide sequence isolated from the Sargasso Sea
gatgcgcgcgtcgacgcgcgcgcaggccaagccgagcccgttcgaggaccagagcgtggaatcgctcgaccccgagctctacggaattctagtgaaggagaaggagcgtcagagactcggtctcgagctcatcgcgagcgagaatttcacgtctaaggctgtgatggaggtgaacgggtcgtgtctgacgaataagtactctgaaggtttgccgggacagcgatactatggagggaacgagttcatcgacgagacggagcgtttgtgccaaagccgcgcgttgagcgcgtaccgactcgatccggcggagtggggcgtcaacgtacaagtgctctccggttccccggcgaactttgccgtgtacacggccatgatgcaaccgcacgaacgtatcatgggtctcgatttgccgcacggcggtcacctcacgcacggtttttacacgccgaagaagaagatttccgcgacgtctgtgtactttgagtccatgccgtaccgtctcaacgaagcgaccggcttggtcgattacgacaagctcgaagagaacgccatgttgttccggcccaagctcatcatcgccggcgcctcggcgtacgctcgtaactttgattacaagcgcctgcgcg

SEQ ID NO: 228014 - DNA, 855 bp, Unknown
  Bacterial polypeptide expressing nucleotide sequence isolated from the Sargasso Sea
aaatatgccgaaggttatccaggaaaaagatattataatggttgtgaacatgttgacgtggctgaaaaattagcactggagagaattaaaaaactttttaattgtaaatatgccaatgttcaacctcattcaggtgcacaagcaaatggagcagtgtttttagcgctacttaaaccgaacgatacatttatgggtatgagcttaaattctggtggtcatataacacatggtcttaaaatatctatgtctgggaaatggtttaatgcaataagctatgatgttgataaaaaatctgaattaattgattacgataatgttgaaaaattagctttagaacacaaaccaaaattaatcatcgctggtggaagtgcttattcaagagttattaattttaaaagatttagagaaattgcagataaagttggagcatatttaatggttgatatggcacatttctcaggattagttgcaggtaaaggatatccaaacccgtgtgattatgcgcatgttgtaacttcaactacgcataaagtttttagaagtgccagaggtggtataatcttatctaacaatgaagacctaggaaaaaaatttgatacagctgtttttcctggttatcaaggtggacctttaatgcatattattgcagctaaagcagcaggtttttatgaggcactaaagccagagtttcagacatatattaaaaacgttttagcaaatgcaaaaatattggctgaaactttaaaaaataatggctttaaaatttattcaggtggaacagatactcatttaatgttagtggatttaagaccttttaatgtgaaaggaaatttggcttctgaaagtttatgtaga

SEQ ID NO: 228015 - DNA, 550 bp, Unknown
  Bacterial polypeptide expressing nucleotide sequence isolated from the Sargasso Sea
tatgtcaagtgaaacaaaatatttgaatagagaatacaaagacttttttgaaaaaagtttattagatagcgatccagaaatttataaagctattaatgatgagttgataagacagcaaaatcatattgaattaattgcatctgaaaatattgtgtctcaagcagtcctagaagctcaaggatcagtattaacaaataaatatgctgagggttatcctggcaaaagatactataatggttgtgaacatgtggatgttgctgaacaattagctatagatagacttaaaaaattatttaattgtaaatttgctaacgctcaacctcactcaggggcacaggcaaacggagctgtgtttctagctttgctaaaacctggtgatacttttttgggaatgagtttaaattcaggtggacatattactcatggtttaaaaatctcaatgtcaggaaaatggtttaatgcaattggttatgaggttgacaaagaatctgaacttattgattatgataatgttgaaaaactgctctcaaacataaacctaaacttataa

SEQ ID NO: 228016 - DNA, 946 bp, Unknown
  Bacterial polypeptide expressing nucleotide sequence isolated from the Sargasso Sea
atgtcaagtgaaggtaaatatttaaacgatcaatataaaagtttttttgaggacagtttatctaaaactgacccagatctttataaagcaattgataatgaattgcaaagacaacaacaacacattgaattaatcgcttcagaaaatatagtttcacaagcagtattagaggcacaaggttcagtactaactaataaatatgcagaaggttattctggaaaaagatattataacgggtgtgaacatgttgatatagccgaaaacctagcaaatgaaagattgaagaaattattcgggtgtaaatttgcaaattctcaaccccattctggtgcccaagctaatggtgccacatttttagctttgcttaaacctggtgatacttttatgggtatgagtttaaattctggaggtcatataactcatgggttaaaaatttcaatgtcaggtaaatggtttaatcctattggatatgatgtagataaaaaatctgaacttattgattacgatcatgttgaaaagctagctttagagcataaaccaaaacttataatagctggaggaagtgcatattctagaattatagattttaaaaagtttagagatatagctgatagagttggtgcatatctaatggttgatatggctcatttttcaggtttagttgctggaaaaggatatcctaatccatgtgagtatgctcatgttgttacttcaactacacataaggtttttagaagtgctagaggaggcattattttaacaaaccatgaagatatagctaaaaaaattaatactgcagtttttccaggctatcagggaggaccattaatgcatattattgctgctaaagcagcaggttttcttgaagcgctaagacctgaatttaaagattatataaagtctgtattagcaaatgcaaaaattttatctgaaactttaaaaaata

SEQ ID NO: 228017 - DNA, 379 bp, Unknown
  Bacterial polypeptide expressing nucleotide sequence isolated from the Sargasso Sea
atgtcgagcgaaaaaaattatttaaacgatagttacaaaagtttctttgaggatagtttatctttaaaagatccagaactttataaagctattaaagacgaattaatcagacaacaacaacatattgagttaattgcctctgaaaatatagtttcacaagcggtattggaagctcaaggttcagttttaacaaacaagtatgcagaaggttaccctggaaaaagatattacaacggttgcgagcatgttgatgtagctgaaaacctagctattgaaaggttaaaaaaattatttaattgtaaatttgcaaacgcacaaccacactcaggtgctcaagcaaatggtgcagtatttttagccttgttaagccccaggtgat

SEQ ID NO: 228018 - DNA, 760 bp, Unknown
  Bacterial polypeptide expressing nucleotide sequence isolated from the Sargasso Sea
atgtcgagcgaaaaaagttatttaaacgatagctataaaagtttttttgaggatagtttatctgtaaaagatccagaactttataaagctattaaagacgaattaatcagacagcaacaacatattgagttaattgcgtctgaaaatatagtatctcaagcagtattagaagcacaaggatcggttttaacaaataaatatgcagaaggttatcctggtaaaagatattacaatggctgtgagcatgttgatgtagcagaaaaccttgccattgaaagattaaaaaaattatttaattgtaaatttgcaaatgcccaaccacactcaggtgcacaagctaatggagcagtttttttagctctgttaagcccaggtgatacgttcatgggtatgagtttaaattcaggtggtcatattactcatggattaaaaatttcaatgtcaggtaagtggtttaacgctataggttatgatgtagataaaaaatctgagttgatagattatgataatgttgaaaaacttgcattagaacataaaccaaaactaatcattgcaggcgggagtgcttattctagagtaattgactttaaaagatttagagagattgcagataaagttggggcatacttaatggttgatatggcacacttctcaggattagttgctggtaaaggataccctaatccttgtgatcatgcccatgtggttacatcaacaactcataaagtatttagaagtgcacgaggaggaataattttta

SEQ ID NO: 228019 - DNA, 948 bp, Unknown
  Bacterial polypeptide expressing nucleotide sequence isolated from the Sargasso Sea
agctcgagccaatggtgctgtttttttagctctattaaaacctaatgatactttcttgggcatgagcttaaattctggtggtcatattactcatggattaaaaatttctatgtcaggtaaatggttcaatgcaataagttatgatgttgataaaaaatctgaactaattgattatgaaaatgttgagaaactagctttagaacataaaccaaaacttattattgctggaggtagtgcttattctagggtaattgattttaaaagattccgtgaaatagctgataaaattggggcttatttaatggttgatatggctcatttttctggattagttgctggaaaaggatatccaaatccttgtgaatatgctcatgtagttacatccacaactcataaagtttttagaagtgcaagaggaggaataatcttatctaacgatttagatctaggaaaaaaatttgatactgcggtttttcctggatatcaaggtggaccattaatgcatataatagctgcaaaagctgctggtttttatgaagctttaaaaccagaatttcaaacttacattaaaaatgttttaagtaatgcaaaaatattagctgaaactttaaaaaataacggttttaagatttattcaggaggtacagatacacatctgatgcttgttgatttaagaccatttaatgttaaaggtaatttagcagctgaaagtttatctagagctaatataacatgtaataaaaatggaataccttttgatactgaaaaacctatgattacttcgggaattagattaggctctcaagcagcaactactagaggttttggtttaaaagaatttgaaaaagtaggagatttaataactaaagttataaaaggtttatcaaaaaacccggaagataatagtaaagttgaagaagatgttagaaatgatgttgtaaatttatg

SEQ ID NO: 228020 - DNA, 703 bp, Unknown
  Bacterial polypeptide expressing nucleotide sequence isolated from the Sargasso Sea
atgtcaagtgaaacaaaatatttaaatagcgagtacaaagacttctttgaaaaaagcttattagatagtgatcctgaaatttataaagctattaatgacgagttagttagacaacaaaatcatatcgaactaattgcatctgaaaatattgtatctcaagctgttctagaagctcaaggatcagtcttaacaaataagtatgctgaaggctatccaggcaaaagatactataatggttgtgaacatgtcgatgtagctgaacaattagctatagacaggcttaaagaattatttaattgtaaatttgctaacgcacaacctcattcaggggcacaggcaaacggcgctgtgtttttagctttgttaaaacctggcgatacttttatgggaatgagtttgaactcagggggacatataactcatggtttgaaaatttcaatgtcaggaaaatggtttaatgcaattggatatgaagttgataaagaatctgaacttattgattatgataatgttgaaaaacttgcacttgagcacaaacctaaacttataattgcaggtggtagtgcttattcaagggtgattgactttaaaagatttagagaaatagctgataaagttggagcatatctaatggttgacatggctcatttttctggtttagttgctggtaagggatatcctaatccctgcgactatgctcatg

SEQ ID NO: 228021 - DNA, 925 bp, Unknown
  Bacterial polypeptide expressing nucleotide sequence isolated from the Sargasso Sea
atgtctagtgaaaaaaattatttaaatgatagctacaaaagtttttttgaagatagtttatcaaagaaagatcctgatcttttcaaagctattaaagacgagcttataagacaacaacagcatattgaactaatagcttcagaaaatatagtttctcaggctgtgttagaagcacagggttctgtactaacaaataaatatgctgaaggttatcccggtaaaagatattataatggttgtgaacatgttgatgttgcagaaaatttagcaattgaaagattaaaaaaattattcgattgtaaatttgctaatgctcaacctcattcaggtgcacaagctaatggagctgtatttttagctttattaagtcctggtgatacttttatgggtatgagtttaaattctggaggacatattactcatggattaaaaatttcaatgtcaggtaaatggtttaatgctgtaggctatgatgtagataaagagtcagagctcattgattatgacaatgtagaaaaacttgctttagaacacaagccaaaattaataatcgcaggtggaagcgcgtattctagagttatagattttaaaagatttagagaaatagctgacaaagttggagcatatctaatggttgatatggcacatttctctggtttagttgcaggtaaaggatatccaaatccatgtgatcatgctcacgtcgtaacctcaactacacataaagtttttagaagtgctagaggcggaataattttaactaattatgaagatcttgctaaaaaatttaatacagcagttttcccaggttatcagggtggacctttaatgcatattattgcagctaaagcagctggttttctggaagctttacagccagaatttcaagattacataaaatctgttttagcaaatgcaaaaatat

SEQ ID NO: 228022 - DNA, 735 bp, Unknown
  Bacterial polypeptide expressing nucleotide sequence isolated from the Sargasso Sea
tatgagtaataaaggtgcttctaaagataatctattatctgctgatgaagaaatagcgggcttaattaaaacagatcttgaaagacagaattcacacatacatttaattgcttctgaaaactttgcatcacaagcagtaatggaggcctctggttcaatacttactaataaatattcagaaggttttccaggtagaagatattacgaaggttgtgaaactgttgatgagattgaacaacttgctatagatagagcctgtgaattatttgaagccgatcatgctaatgtccaacctcactcaggttcatcagcaaatatggcagtttatttaaatcttttagaaccgggggatacggtcatgggtatgtcactagaccaaggtggacatttaactcatggttctcctgttaatttctcaggtaagacttacaactttgtcggttatggattagatagagaaacagaattaatcaacatggaagaagttgctgaattagcatctaaaactaaaccaaaattacttattgctggatactcttcttattctcaagatttagatttcaaaggatttagagaaattgcagattccataggtgcttattttatggttgatgcagctcacttcattggacttgtcgcaggtaaagtagttgaaaaccctgttccatatgctgatgtaataacggctactacccataaggccctaagaggtccgaggggtgggttgatattatc

SEQ ID NO: 228023 - DNA, 689 bp, Unknown
  Bacterial polypeptide expressing nucleotide sequence isolated from the Sargasso Sea
gaattgcagattcataggtgcttattttatggttgatgcagctcacttcattgggcttgtcgcaggtaaagtagttgaaaaccctgttccatatgctgatgtaataacggctactactcataaagccctaagaggcccgaggggtgggttgatattatctaaagaagaatttgctaaaggtatagatcaaaatatttttccaggagcacagggtggtgcaattaacaatcagatagctgcgaaagctgtttgctttaaagaggctatgtcagaagaatacaaatcttatgcacaacaaatattagacaacgcccatgctttggctgaatcctttaaagcagaagggttaagagttgtaagtggtggtacttcaaatcacatagttttagtggatacaggaagtgttgatgatgagctaactggtaaagaggctggaattttattgaatgatatgggcataacactaaatagaaatgcaataccttttgatgaaagatctccatttattacttcaggtatcagaatgggcactcctgcaataacaacatgtggaatgaaagaagaagaatcaactaaggtaggatatttaatttctgaagctttaaaaaatagagataatgaagatagaaggcaggaattagaagaggaaataagaaaccttgcaaaagcattccaaccatatgaatagt

SEQ ID NO: 228024 - DNA, 514 bp, Unknown
  Bacterial polypeptide expressing nucleotide sequence isolated from the Sargasso Sea
ttgtttgtaaatgatccccagatatatgaggcactagataaggaattaaaacgtcaacaaaaccaaattgaattgattgcctccgagaatattgtgtctaattctgttcttgaggcgcaaggctcaattctaacaaataaatatgctgaaggttatccaggtaaacgatactatgggggctgcgaatttgttgatgttgcagaattgctagcacagcaaagagctaaggaactatttggtgttaaatttgcaaatgtgcagccacattcaggttctcaagctaatcaagcagttttccttgctttagttcaacctggtgaaactatactaggtatgtccttagctgccggtggacatttgactcacggggccaaaccaaatgtttctgggaaatggttcaatgctatttcatacggggttgatagagagagccatcttatcgattatcaagaagttagtaaccttgcgattgaacatcaaccccaagcttataattgcagggggttctgcctat

SEQ ID NO: 228025 - DNA, 1053 bp, Unknown
  Bacterial polypeptide expressing nucleotide sequence isolated from the Sargasso Sea
tatgcagaaggttatccttggcaaaaggtattatggcggttgtgaatatgttgacgtcgctgaacaattagcaattgaccgtttaaaagaattatacggtgcagattacgcaaatgtacaaccacactctggttctcaagcaaatgctgcagtttttatggctcttcttcagccacacgatacaatcttaggtatgagtttagcacacggtggacatttgactcacggttctaaagtaaatttctctggaaaaatttataatgctgttcagtatggattgaatccagatactggtgaaattgattatgatcaagttgaagcactagcaaaagaacataagccaaaaatgataattgctggtttttctgcatactctcgtgttttagattggaaacgattccgagatatagctgattcaattggggcttacttttttgtagatatggctcatgtttctggattagttgctggaggagtttacccaagcccagtcccttatgctgatgttgttacttctacaactcacaaaagtttaagaggaccaagaggtggaattataatctgtaaatcaaaccctgaaattgaaaagaagattaactcgatggtattccctggaacccaaggcggcccattaatgcatgtaattgctgcaaaggcagttgctttcaaagaagcattgcagcctgaatttaagcaatatcagcaacagattttaaaaaatgcatcagctatggcagatcaatttataaagagaggttttaaagttgtttcgggtggaacagatgaccatttattccttgtagactttattgagaaaggtattacaggaaaagatgtcgatgctgcccttggcagagcaaatattactgtaaataagaactctgtcccaaatgatccgcagtctccgtttgtaactagtggaattagagttggaactcctgctcctacaactagaggctttaaagaagctgaatgtattgagcttaccaattggatgtgtgatgttatagaaaatcttgataacgaagaagtaattaatgctgtaaacaaaaa

SEQ ID NO: 228026 - DNA, 460 bp, Unknown
  Bacterial polypeptide expressing nucleotide sequence isolated from the Sargasso Sea
catgcacgttattgctgcgaaagcagttgcattcaaagaagcacttgacccttcctttaaaacctatataaagggcgtgcttgataacgcacaatgctttgcagaagagtttttatctaaagggtacaatttaatttctggaggtactgatacccaccaagtgttaatagatttgcaaaacaaaaatatttctggaaaagcagcagaattatctttagatgaagcaggtattactgttaataaaaatatgattccgtatgatcctaaaagcccatttgtcacaagtggaattagaataggctcacccgcaatcactacaaggggaatgggagttaacgaagtaaaaattatcgttgatttaattgaccaggtgattgtaaatcatgataacaaagaaaaaattcaatcaatcaaaaagcatgttaatgaattatgttcatcttttccaatatatgaatga

SEQ ID NO: 228027 - DNA, 733 bp, Unknown
  Bacterial polypeptide expressing nucleotide sequence isolated from the Sargasso Sea
tatgtcaaaaattaagagcaatattaacggaggttaccaggattactttgataaagatttatctttaagagatccagatttatataattcaattaaacttgaacttcaaaggcaacaacagcatatagaacttatcgcgtcagaaaatattgtttcaaaagcagttttggatgctcaaggatcaatcttaactaataaatatgccgagggatatcctggaaaaagatattatggtggatgcgagttcgttgataaagctgaagaattagctttagaaagagttaaaaaattatttaattgcaaatacgcaaatgtacaacctcattcaggtgcgcaagcaaatggagctgtatatttagctttattaaatccaggagacacaatacttggtatgagtttaaactcaggaggacatttaacccatggcgcaaaagtttcgctatcaggaaaatggcttaaagcttttcattatgaagttgataaagaaacaggacttatagactatgatcaaattaaaaaattagctctcgagcataagcctaaaatattaattgctggaggtagtgcgtattcaagaattattgactttaaaaaattcagagaaatagctgatagcattaaagcatatctaatggttgacatggcacatttttctggtttggttgcaggcagaggttatccaaatccaactgaatatgccgatgtcgttacatctacaactcacaaagtttaa

SEQ ID NO: 228028 - DNA, 553 bp, Unknown
  Bacterial polypeptide expressing nucleotide sequence isolated from the Sargasso Sea
catgatactttctaataataaagacttaggcaaaaaatttaattcagctgtattcccagggtatcaaggtggacctttaatgcatgtaatagcaggtaaagctgttgcctttggtgaagctctaaaaccagaattcaaagaatatataaaacaagttattaaaaatgctcaaactcttagtcaaacactagtagatggtggtctcaaaattgtttccggaggcacagacacgcatctaatattagttgatttaaccccaatggacctgacaggcgatgcagcttcaacaagtcttgaggaagctcacattacatgtaataaaaatggaataccaaaggacccgaaacccccaaaaataacttctggaatcagattggggactcctgccgctacaacaagaggttttaaagaaaaggaatttgaaactgttggaaatttaattcttgaaacgttatcaggattaaagcaaaacccaaatgataacagtaaagttgaaaaaatagttaaagagaaagtgataaatctctgtaatcaatttccaatttataattag

SEQ ID NO: 228029 - DNA, 836 bp, Unknown
  Bacterial polypeptide expressing nucleotide sequence isolated from the Sargasso Sea
gatgaattctataaaaaaagctgatattgaagtttacgatattcttcaaaaagaactatccagagagagcgaaacccttgagctgatagcatctgaaaattttgttagttatccagttcttgaaatggctggaggcattatgaccaataaatatgctgaaggctatcctggtgctcgctactatggtggttgtcagcatgttgatgaagcagaaaatttagcacgtgatcgcgcaagaaaactttttaactgcgaatacgtaaacgttcaacctcactcgggttcccaagccaatatggcaactctaatgacatttattgatattggagacacaattatgggtttggatcttgcacatgggggccatctaacccatggtagcaaagttaatttctctggccaaatgtataattcagcggcataccaggttaacaaaaacactggtcgtttggatatggataatgtagctaaaattgctagagaatataaacctaagataattatatgcggaggtagcgcatatccgagacacgtagaatttgccgaatttaaaaccatagctgatgatgtcggtgcttttttaatggctgatatagctcacccttcaggattagttgcagcaggactgcatccatcaccaatgcctttttgtgacgttgtaacaacaaccacccataaaactcttcgtggccccagaggtggtatgattatgatgggtaaggaccgcgaaaacgtatggaatgttgttgcaccaaaatctggccgagtaaaaatgatttccgagctattagattctgctgtgatgccaggcattcaaggtggtccacttatgcata

SEQ ID NO: 228030 - DNA, 829 bp, Unknown
  Bacterial polypeptide expressing nucleotide sequence isolated from the Sargasso Sea
cgtcacgtggcctgaggcgtgcaacaagacgctcgcggagatggaccccgagatcgcggacatcgtggagcgggagaaggcgcgccagtggaagggcctcgagctcatccccagcgagaacttcacctcgcgcagcgtcatggaggcggtcggctccgtcatgaccaacaagtactccgaggggtaccccggcgcgcggtactacggcggcaacgagttcatcgaccaggcggagacgctgtgccaacagcgcgcgctggcggcgttcggcctggacccggcggagtggggggtcaacgtgcagagcctctccggctccccggcgaacttccaggtgtacacgggcctcctcaagccccacgacaggatcatgggcctcgacctgccccacggcggccacctgagccacgggttccagaccgacacgaagaagatcagcgcggtgagcatcttctttgagtccatgccctaccgcctcgacgagtccacggggttgatcgattacgacgcgtgcgagacgctcgccgccgcgtaccgccccaagctcatcgtcgccggcgcgagcgcgtacagccgcctgtacgactacgcgcgcatgcgccagatcgcggataagtccaacgcgttcctgttggcggacatggcgcacatctcgggcctggtggcggcgaagatgatcccgagcccgttcgaacacgccgacgtcgtcacgacgacgacgcacaagtccctgcgcgggccccgcggcgcgatgatcttcttccgcaagggccaaaagggcgtcgacaagaagggcaacccgatcatgtacgacctgaggataagatca

SEQ ID NO: 228031 - DNA, 291 bp, Unknown
  Bacterial polypeptide expressing nucleotide sequence isolated from the Sargasso Sea
tatgttcatcacccaaaagaatttaaaggaatttgatccagaattatggtcttccataaacaatgaaacttcccgtcaagaagagcacattgagctaattgcatctgaaaactacacatccaagagtatcttggaagttcaaggttctgttttaacaaacaaatatgctgaaggttatccaggtaaaagatactacggaggttgtgagcatgttgatgttgcagaatcattagctatagaaagggctaaagaattatatggagctgcttatgcgaatgttcaacctcactc

SEQ ID NO: 228032 - DNA, 343 bp, Unknown
  Bacterial polypeptide expressing nucleotide sequence isolated from the Sargasso Sea
tattctagagtaatcgactttaaaagatttagagagattgcagataaagttggagcatacttgatggttgacatggctcacttctcaggattagttgctggtaaaggatatcctaatccctgtgattatgctcatgtagttacttcaacaacccataaagtttttagaagcgcacgaggaggaataattttaactaatcacgaagaacttgctaaaaaatttaatacagctgtttttcctggttaccaaggaggacctttgatgcatattattgccgcaaaagcagctggtttcttgaagctctacaaccagaatttcaagattatattaaatctgttttagc

SEQ ID NO: 228033 - DNA, 284 bp, Unknown
  Bacterial polypeptide expressing nucleotide sequence isolated from the Sargasso Sea
tatgaattcaaattttttcaatgaaaatgttaagttagctgaccctgaggtttatgcaacattaaaaaaagaacttgaaaggcagcaaaatcaaattgaattaatagcttcagaaaatattacttcaaaagctgttttaaattcacaaggctcagtaatgacaaataagtatgcagaaggatatcctggtaatagatattatggaggttgtgagtttgttgatcaagcagagaacattgctttagaaagagtaaaaaaactttacaattgcaaatatgcaaatc

SEQ ID NO: 228034 - DNA, 971 bp, Unknown
  Bacterial polypeptide expressing nucleotide sequence isolated from the Sargasso Sea
cagagaactctacgcctccatcactaacgaggaacagcgtcagaaagacggggtagaattaatcccgtctgaaaactacgccttccccgaagttcttgcagcgttaggaagtgtttttacaaataaatactcagagggttacccgggccgcaggtattacggaggtcaggagaacaccgattgcatagaaaacctagcccgagagcgcgccaaaagcttgttcaattgcgatcacgccaatgtccagcccttgtcaggttctgggatgaaccaagctgtctaccttgggcttcttaatcccggagatacaattctagcgatggatttatctcatggagggcacctgacccatggtgccccagtttcccatatgggaaagctttttaatttcgttcgttatgttactgatcccttggacgggtctttcgattttgatcaaattttaaaagacgcaaaggcctgcaggcctaaattggttctgtgtgggtacacctcttaccctcgtgatattgattataaaagtttcaaagcaatagctgatgaggtgggtgcgatcagcatgacggacgcctcgcattttggtggcttggtagctggcaaggctatggcgaatccattcgattatgggtttgatattgttacaaccactactcataaatcactcaggggccccaggggcggaatgatcctctgcaaggaagacttcgccgctaaaatagacaagtcggtatttcctggcttgcaaggtgggcctcacatgaacgctgtagcagctttggctgtaactctaaaacttgctgctttgcctgacttcaaaaggtatgctgatcaagtccttaaaaatagcaaggccctggccaacgtatttattcaatcggacacaaaattggttgccggagggactgaccaccacatgttggttctagataccgtgcagagttatgggattgacggacgcattgctgaagaga

SEQ ID NO: 228035 - DNA, 705 bp, Unknown
  Bacterial polypeptide expressing nucleotide sequence isolated from the Sargasso Sea
tagcaaataatataaatgcttatttgttagttgatatggctcattttgcaggtcttgtagcttccaaaacctacccatcaccaatagcaattgcagatattgttaccacaactacacataaaaccttaagaggtccaaggggtggattaattctcactaataatgaggatatttcaaaaaaaataaactcagcaatttttccaggaatacaaggtggaccactcatgcatacaattttagcgaaggctgtagcttttggtgaagcattgagaccagaatttgtaaattattcacaaaatgtaatagacaatgcaaaaatattatcacaaacacttcttgaggatggttttgatatagtttctggaggtacagacagtcaccttgttcttctagatcttagaccaaaaggaatcaaaggtaatgaagctgaggatgtattaggaaaagcaaatataacttgcaataaaaacggcgtcccgtttgatcctgaaaaaccaactataacatcaggtataagactaggaactcctgcaggtacaactagagggtttggacaggcggagtttcataaagttggatcctatatttgtgaagtcctaaatggatttcaatcagatggtgttgatacaaaagctattttagaagttcagaaaaaagtaatacatctttgcagcaaattccctatttatggaggaaatttatgag

SEQ ID NO: 228036 - DNA, 731 bp, Unknown
  Bacterial polypeptide expressing nucleotide sequence isolated from the Sargasso Sea
tgcattttctggaattcttgattggaaaaaatttaaagatattgctgaagagactggagctttattgcttgttgatatggcacatgtttctggtctggttgctgctggcctatacccttctccaattccatatgctgatgttgtcacttctaccacccacaaaactttaagaggaccaaggtctggaattattcttgcaaagaaaaatgaagaaatagaaaaaaaattaaactctgcagtttttccaggatctcaaggaggtccattaatgcatgtcatagctgcaaaagcgatatgctttaaagaagcattagatcctgaatttaaaatctatactcaacaagttatggataatgcaaaacttatggcagaaactcttatctctaataatattgatgttgttacaaatggaacacaaaatcatattgttttagtagacttaagaaataaaaatattagtggtaaagatctagaaagtactttgggttgtgtaaatataacagttaataaaaactctgtgccaaatgatccagcctcaccatttataacatctggtataaggattggaacgcctgctgttacaacaagaggctttaaagaagaagaaattataaaaattagtaactggatatcatcaattattaatgattttggtaatgttgagttgcaaaataaaattaaaaaagaagtccataatctgacacatgaatttccagtatataatttataaa

SEQ ID NO: 228037 - DNA, 431 bp, Unknown
  Bacterial polypeptide expressing nucleotide sequence isolated from the Sargasso Sea
aatgtctagtgaaaaaaattatataaacgataactataaaagcttttttgaggacagtttatcttcaaaagatccagaactttataatgcaattcaagatgaacttctaagacaacaacaacatatagaattgattgcatcagagaatattgtttctcaagcagttttagaagcccaaggttcagtgctcactaataaatacgcagagggttaccctggtaaaagatattacaatggatgtgaacatgttgacgttgctgaaaatttagcaatagaaagattaaaaaaacttttcaattgtaaatttgctaatgcacagccacactcaggagcacaagctaatggagctgtatttttagcactgctaaaacctggtgatacttttatgggtatgagtttaaattcaggaggtcatattactcatggtttaa

SEQ ID NO: 228038 - DNA, 358 bp, Unknown
  Bacterial polypeptide expressing nucleotide sequence isolated from the Sargasso Sea
atgtcaagtgaaacaaaatatttaaacagtgaatataaagacttttttgaaaaaagtttgttggaaagtgaccctgaaatttataaagctataaatgatgagttagttagacaacaaaatcacatagaattaatagcatctgaaaatatagtatcccaagcagttcttgaagctcaaggatcagttctaacaaataaatatgctgaaggttatccaggcaagagatattacaatggttgtgaacacgtcgatgtagctgaacaacttgcaattgacagacttaaagatttatttaattgtaaatttgctaatgcacaacctcattcaggagcacaagcaaatggagcagttttttagc

SEQ ID NO: 228039 - DNA, 363 bp, Unknown
  Bacterial polypeptide expressing nucleotide sequence isolated from the Sargasso Sea
gatgaataatttagaaaaaaaagatccagaattatttgatgttttaaaaagagaggcaaagagagaggagctcacactagagttgatagcctctgaaaatttcacaagtaaagcgataatggaaatggctggcggggtcatgacaaataaatatgctgaaggttaccctggaaagcgatactatggtgggtgtgaggttgtagatgaggctgaaaatatagctcgtgaccgtttaaaaaaactttttggatgtgaatatgcaaatgtgcaaccacattcaggttctcaagcaaatatggctgtttttatgaccttcctcaagcctggtgatacaattatgggcctggatctgcacacggagga

SEQ ID NO: 228040 - DNA, 631 bp, Unknown
  Bacterial polypeptide expressing nucleotide sequence isolated from the Sargasso Sea
atgtctagtgaaaaaaattatataaatgatagttataaaagtttttttgaagacagtttgtcttcaaaagacccagacctttacaaggcaatccaagatgagctattgagacagcaacaacatattgaattgattgcgtcagagaatattgtttctcaagctgttttagaggctcaaggttcagtgctaactaataaatacgcagaaggttaccctggtaaaagatattataatggatgtgaacatgttgacgttgctgaaaatttagcaatagaaagattaaaaaaacttttcaattgtaaatttgccaatgctcagccacactcaggagcccaggctaatggtgctgtatttttggcgctgttaaaacctggtgatacttttatgggtatgagtttaaattcaggaggtcatatcactcatggtttaaaaatttcaatgtcaggaaaatggtttaatccgatagggtatgatgttgataaaaaatctgaacttatagattatgatactgttgaaaaacttgctttagaacataaaccaaaattgataattgcaggtggaagtgcgtattccagagttatagattttaaaagatttagacaaattgcagataaagttggagcatatttaa

SEQ ID NO: 228041 - DNA, 595 bp, Unknown
  Bacterial polypeptide expressing nucleotide sequence isolated from the Sargasso Sea
tatgaaaaaattatataatcaatcaattaaagaagcagaccctgaagtttatgaaactcttgaaaaagaactaacaaggcaacaaaatcaaatagagttaattgcttccgaaaatatagcatctcttgctattttaaatgcacaaggttctgtaatgacaaataaatatgccgaaggttattctggcaagcgatattacggaggttgtgaatttgttgatcaagctgaagatattgctattgaaagagtaaaaaaattgtatgggtgtaaatttgcaaatttacaaccacatagtggcgctcaagctaatcaagctgtttttttagctcttttaaaaccccatgatacatttttaggaatgtcacttgcctctggaggccatcttactcacggagctaaaccgaatatttctggtaaatggttcaatgctattcaatatggagtaaaaaaagatggcaatgataaagatctaatagattatgacgaagttgaaaaattagcaaatgaacataaacctaaaattataattgcaggggcttcggcatatccaagagttatcgattggagaaatttagagatatcgctgataatatag

SEQ ID NO: 228042 - DNA, 949 bp, Unknown
  Bacterial polypeptide expressing nucleotide sequence isolated from the Sargasso Sea
gatgcgaaatgttgatattgcagaaaatcttgcaatagatagggctaaagaactttttaaagcagattatgcaaatgttcaacctcattcaggttcatctgcaaatgctgcagcatatttagctttgcttgaaccaaatgacactattcttggaatgagtcttgatcatggaggtcatcttactcatggatcaaaagtaaatttttctggaagaaattataaaagttttcaatatgggcttcatcctgaaactaatgatataaattatgatgaagtaaggtatcttgcaaaaaaacataatccaaaattaattattgcaggattttcagcatttacaggagttattgattgggaaaaatttagaaacatagcagatgaagttggggcttattttcttgttgatatggctcatgtctctgggcttgttgctgctgagctatacccttcacctatcccttttgccgatgttgttacatctactactcacaaaactttgagaggaccaagatctggaattattctagcaaaagcaaatgaagaaatagaaaaaaaattaaactctgctgttttccctggatctcaaggcgggcctctgatgcatgtggtagctgctaaagctttatgctttaaagaagcgttagatccagaatttaaaatttacatcaagcaagttatggataatgcaaaaattatggcagaaacaatcatgtctaatggtgttgatattgtttgtaacggtactcaaaatcacatagttcttgttgatctaagaagtaaagatatttcaggaaaagatttagaaagagtcttgggatctgtaaatataactgttaataaaaactctgtaccaaatgatcctgcttctccttttattacttctggtataagaattggaactcctgctggtacaactagaggctttaaagaaaaagaattattgaaatcagta

SEQ ID NO: 228043 - DNA, 1009 bp, Unknown
  Bacterial polypeptide expressing nucleotide sequence isolated from the Sargasso Sea
aaataaatatgcagaagggtatcccaaaaagcgttattatgcagggtgccaattcattgacgaggtggagcagttggccatagatagggcatgtgaattgttcaatgtgaaatatgtgaatgtgcagccacattcaggatcacaagccaatttagcagtttttaaagcaattttagagccaggggattgttttatggggctggatttggcgcatggtggacatttatcacatgggtgtaaggcaaatatatctggtcaatattatagaccggtgacttatcagctaaattccaaaactgaggcattggattatgatgaaatagagaggattgcaaaggaaagcaagcccaagttgatcattgcaggatattcagcatatgcattgacgattgattggaaaagactacgagaaatatgcgatcaggtaggagcaaagatgcttgcagacattgctcatgtgtcaggtttgattgcagcgggtttatttccgtgtccgtctaagtatgcagatgtcattacaacaaccacacacaaatccatgcgtggaccaaggggtggtatgattatggttccaaaagatgagaagctggcaaaaaaaattgatcaagcaattttcccaggtttgcagggtgggcctatgatacatacaatcgctgcaaaagcggttgcatttcatgaggcattgcagccagaatttaaagtgtatcaaaagcaggtgataaaaaatgccaaagatttatgcaatcacttaaaagagtatggctataaaattacttcaaatggaacggatacacacctgttcttagtggatttaactgaaaaaaatatcacagggcaagatgcagaaagggctctcgaagagattggtatcattacaaataaaaacacagtgccaaatgacaagcgctctccatttgtgacaagtggtctgcggataggtgcctgcgcaatcaccacaagaggtgttaaagaggagggagtaaaagaaatagcctatctgattgacaag

SEQ ID NO: 228044 - DNA, 992 bp, Unknown
  Bacterial polypeptide expressing nucleotide sequence isolated from the Sargasso Sea
gttagcgatagaacgagcaaaaaagctcttcggtgctgactttgcgaacgttcaaccccattcgggttcctccgctaactcggcggcatatctggctttgttgaacgctggtgatactgttttaggaatgagcttagccgatggaggtcacttgactcatggggctagtgtcaatttttcggggaaactctacaacgctgttcaatatggtttgaacaatgaaactggggaggttgactatgaggcggtggctaaattagcggaggagcataaacccaagttgatcattgcgggattttcggcttactccagaaaaatgaattgggaacgatttcgggaaatagcggattcagtcaatgcttatcttttagttgatatggcgcatgtggccgggttggtggccgcagggctatatcctaatcctgtgcaaatcgctgacgttacaacctctacaacacataagacgctaggtgggccgcgcagtgggattattctggctcgttcaaacgaagagatcgaaaaaaagttaaattcagctttattcccgggcagtcagggcgggcctttaatgcatataattgcggcgaaggccgtatgttttaaagaagctatggaggaagattttgttgcgtaccaaaaacaaactataaaaaacgcccaggtattggcgaacgagttcattcaccggggatatgatgttgttagcggaggaacagataatcatctttttctacttgatctggtttctaagaacattaccggcaaagatgctgatgcagccttgggtcgagctaacataacagttaataaaaatgctgtaccaaatgatcccagatctccctttgtaacaagtggcctaagaataggatctccagcgattactcgtaggggttttaaagaagaggagtgcattcagctagtggattggatgtccaacattctgactgatattaatgatgaagctgcgattgagcgtgtaaagaaagaggtgc

SEQ ID NO: 228045 - DNA, 379 bp, Unknown
  Bacterial polypeptide expressing nucleotide sequence isolated from the Sargasso Sea
atgtctagtgaaaaaaattatttaaacgatagttataaaagtttctttgaagacagtttgtcagtaaaggatccagagctttataaagctattaaagatgaattaatcagacaacagcaacatatagaactaatcgcttctgaaaatatagtttctcaagcagtattagaagcacaaggatcagttttaaccaacaagtatgcagaaggctatcctggtaaaagatattacaatggttgtgagcatgttgatgttgcagaaaatcttgcgattgaaagattaaaaaaattattcaattgtaaatttgcaaacgcgcaaccacattcaggggctcaagcaaatggcgcagtatttttagctttgttaagccccaggtgat

SEQ ID NO: 228046 - DNA, 802 bp, Unknown
  Bacterial polypeptide expressing nucleotide sequence isolated from the Sargasso Sea
aatgaatattcttcaaaatcttaatgatagtgatccagtaatatcaaattttatcaactctgaaaaaaataggcaggaaactcatcttgagttaatcgcaagtgaaaattttgcatcaattgccgttatgcaggcacaaggttctgtccttacaaataaatacgccgagggattacctcaaaaaagatattacgggggatgtgaatttgttgatgaaatcgaagaattagctattcagagagcgaaaaaattatttaatgcaaattgggctaatgttcaaccccatagtggagcacaggcaaatgctgctgttttcctaagtctacttaaacctggcgacacaatcatggggatggatttatctcatggtggacacctaactcatgggtctccagtaaatatgagtggtaagtggttcaatgcagttcactatggtgtaaataaagaaactagtgaattaaattttgatgaaataagagagatagcacttgaaacaaaaccaaaattaatcatatgcggatattctgcttatccaagaacaatagattttgaatcatttagaaatattgcagatgaagttggcgctttcttaatggctgatattgcacatattgccggtcttgtagcaagtaaactccacccaaatccaatcccttattgtgatgtagtaactacaactactcataaaacattaagagggcctagaggggggcttatcttatgtaaagatgcggaatttggaaagaaatttgataaatctgttttaccctggtactcagggtggggcccctggaacatataa

SEQ ID NO: 228047 - DNA, 769 bp, Unknown
  Bacterial polypeptide expressing nucleotide sequence isolated from the Sargasso Sea
cttataattgcaggtggtagtgcttattctagggtgattgactttaaaagatttagagaaatagctgataaagttggagcatacataatggtagatatggctcatttttcaggtttggttgctggtaaggggtatccaaatccatgtgactatgctcatgttgttacgtcaactactcataaggtttttagaagtgcgagaggtggtattattttaacaaatcatgaagacttatctaaaaaatttaatacagccgttttccctggatatcaaggaggaccacttatgcacattatagctgcaaaagctgttggatttaaagaagcgttaaaacctgaatttaaagattatataaaaacagtcttagctaatgcaaaaattttagctgaaactttaaaaaataatggttttaaaatttattcaggtggaacggatacacatctgatgttagttgacttaagaccttttaatgtaaaaggtaatgtcgctgcagaaagcctttctagagctaatattacatgtaataaaaatggtattccgtttgatagtgaaagcccaatgataacttctggaataagacttggatcgcaagcagctacaacaagaggatttggtttaaaagaatttcaaatagtaggtgatttgataacaaaaactataaaagggttagctgaaaaccctgaagataactctaaaactgaagatgaagtaagaaaagaagttgtaagcctttgtgctaatttccctatttataaacacttaggctaaa

SEQ ID NO: 228048 - DNA, 829 bp, Unknown
  Bacterial polypeptide expressing nucleotide sequence isolated from the Sargasso Sea
catgctctacagacccaagctcatcatcgccggcgcgagcgcgtacccgaggaactacgactacgcgaggatgcgagagatctgcgataactgcggcgctctgctgatgtcggacatggcgcacatctccggcctcgtcgcggcggacatcgtggataaccctttcccgcacagcgacatcgtcacgacgacgacgcacaagtccctgcgcgggccccgcggcgggatgatcttttaccgcaaggagcacgagcaggcgatcaacagcgcggtgttcccggggcttcagggggggccgcacaaccacacgatcggcgccctggccgtcgccctgaagcaggcgcagacgcccgagttcgtggagtaccagaagcaggtggtgaagaactgcgcggcgatggcgaaccggctcgtcgagctggggtactcgctcgtgagcggcggcacggataaccacctcatcctgtgcgacctgcggcccaagggcatcgacggcgcgcgcgtggagcgcatcctcgacctgagccacatcaccctgaacaagaactccgtgcccagggacacctccgcgctgatcccaggcgggatccgcatcggcgcgcccgcgatgacgacgcgcgggatgctcgaggaggatttcgtcaaggtggcggatctcatccacaagggcgtcgagatcgccatcgactgcaagtccaaggcggaggggcccaagctgaaggacttcaacgcctacctcgagaccgcgaaccgcgaggacatcgccgcgctgcgcgaggaggtggagagcttctcgggagacttccacatgcccggaggcgtgtactga

SEQ ID NO: 228049 - DNA, 711 bp, Unknown
  Bacterial polypeptide expressing nucleotide sequence isolated from the Sargasso Sea
catgttcagccgtgatttgaccctcgctcgttatgacgccgaactctttgccgcgatggagcaggaagcccagcgccaggaagagcacatcgagctgatcgcctcggaaaactacaccagcccggcggtgatggaagcccagggtagcgtgctgaccaacaagtacgccgaaggctatccgggcaagcgttactacggtggttgcgagtacgtcgacgtggtcgagcaactcgccatcgaccgcgccaaggagctgttcggcgccgactacgccaacgtccagccgcattccggcagccaggccaacagcgccgtgtacatggccctgctcaacgccggcgacaccgtgctgggcatgagcctggcccacggcggccacctgacccacggtgccagcgtcagcttctccggcaagatctacaacgccgtgcagtacggcatcaacgaccagggcctgatcgactacgacgaagtggagcgcctggccgtcgagcacaaaccgaagatgatcatcgccggcttcagcgcctactcgcaggtactggacttcccgcgtttccgcgccatcgccgacaaggtcggtgcctacctgttcgtcgacatggcccacgtggccggtctggtcgctgcgggtctgtacccgaacccgttgccgttcgccgacgtggttaccaccaccacgcacaagaccctgcgcggcccgcgcggcgg

SEQ ID NO: 228050 - DNA, 274 bp, Unknown
  Bacterial polypeptide expressing nucleotide sequence isolated from the Sargasso Sea
actggaaaagatcttgaaagagttcttgggctcagtcaacataacagtatataagaattcagtaccaaatgatccggcatcaccatttgtgacttcaggaataagaattggtacgccagcagctacaactagagggtttaaagaagaagaaattattcaagtagccaattggatatcagatattattaataattttgataatgaagaattactaaagaccatcaaggaagaagtccacaaacttacaagtaattttccagtatataatctatag

SEQ ID NO: 228051 - DNA, 666 bp, Unknown
  Bacterial polypeptide expressing nucleotide sequence isolated from the Sargasso Sea
tatgaataaaaaaggcgcttcccaagaaacactcaataatgtagatgcagaaatttctgagttgattattaatgacttaaataggcaaaacacacatattcatcttatagcctctgaaaattttgcttcaaaagcagtaatggaagcatctggttcaatattaactaacaagtactctgagggttttccaggacgtagatattatgaaggttgtgagactgttgatcaaattgaacaattagcaattgatagagcttgtgaattatttgaagctgatcatgctaatgttcaacctcattctggttcatcagcaaatatggcagtttatttgaccttattagaaccaggggacaccgtactcggaatgtcacttgatcaaggagggcacctcacacacggttcaccagttaatttctcaggaaaagtttataactttgttggctacggtttagacgaggataccgaattaattgatatggaaactgtttacaacatggctttagagcataagcctaaattgattattgctggatattcctcctattcacaatcacttaattttcaaaagtttagagaaattgcagatgaggttggtgcccattttatggtagatgcagcccactttattggattagttgctggaaaaagtgtagataatccaacaaa

SEQ ID NO: 228052 - DNA, 685 bp, Unknown
  Bacterial polypeptide expressing nucleotide sequence isolated from the Sargasso Sea
ctacttcagcctcatgatactatcttaggcatgtcattagcttctggaggccatcttactcatggtgcaaagcctaatctatcaggtaagtggtttaatgcagttcaatatggtgtaaaaaaagatggtaatgatagagatttaattgattatgatgaagttgaagcattggcattaaaacataaaccaaaaatgattattgctggagcttcagcatatccaagaattatagattggaagaaatttagagaaattgcagacaaagttggagcatatttcttagtggatatggcacactattcaggattagttgctggtaaacaatatccaaatccaattgatcatgctcacatagtgacttcaactacacacaaaacattaagaggggcaagaagtgcgatgattttaacaaatcatgaagacttatacaaaaaaattaattctgcagtttttcctggacttcaagggggccctttaatgcatgtaatagcagcaagagctgtttgttttggagaagctctaaagccagagttcgaggaatacattaaaaatgtaatagcaagtgctaaggttatgtcacaaactctcgttgatagggggtttagaattgtaactggtggaactgactctcatatagtctggttggatttgacacctaaaggtttaactggtgacaaagctgaaa

SEQ ID NO: 228053 - DNA, 330 bp, Unknown
  Bacterial polypeptide expressing nucleotide sequence isolated from the Sargasso Sea
tatgagctttttttcttcaccacttaaggatatcgataatgaaattcacaaggcaattaacttagagctagataggcagcaaaatcagattgaattgattgcttctgaaaatatagtttctaaagctgttcttgaagcccaaggttccataatgacaaataagtacgccgaaggctatgctagttctcggtattatggtgggtgcgaatttgttgatattgcagaggaccttgcaataaaaaggcttcaaaagttatacaaatgtgaatatgcaaatgttcagcctcattcgggtgctcaggcgaatggagcagttatgttagctctgat

SEQ ID NO: 228054 - DNA, 412 bp, Unknown
  Bacterial polypeptide expressing nucleotide sequence isolated from the Sargasso Sea
tatgtcaagtgaaggaaagtatttaaacgtagattataaaaatttttttgaaaaaaaactttcagaaaccgatccagaagtttacaaggcagttactgatgaacttattagacaacaaaatcatatcgaacttattgcatctgaaaatattgtatctcaagctgtattagaagctcagggatctgtattgactaataaatatgcggaagggtatcctgggaaaagatattataatggatgtgaacacgttgatgtagctgaatctttagccaatgaaagattaaaaaaattatttaattgtaaatttgctaattcccagcctcattcaggcgcgcaagcgaatggagcagtatttttagctttattaaaacccaggggatacattcatgggtatgagtttggattctggggg

SEQ ID NO: 228055 - DNA, 591 bp, Unknown
  Bacterial polypeptide expressing nucleotide sequence isolated from the Sargasso Sea
aatgtctaaagaatacaaaatcacttataatttttttaatgaaggattgtcaaaaactgatcctgagttgatgtcatttataaaagaagaattaaatagacaacaacatcacttagaattaattgcttctgaaaatattgtttctaaatcaattcttgaaacccaaggatcagtgcttacaaataaatacgccgaaggttacccaggaaaaagatattatggaggatgcgaatttgtagacaaagctgagacattagcaatagaaagagcaaaaaaattgtttaatgttaattttgcgaatgttcaacctcactcaggtgcacaagccaatggtgctgtttttttagcattacttaaaccgggagacacaattctgggaatgggtatagatcagggaggtcacttaacacacggagcaccacccgctcaatctggaaaatggtttaatgcaatacactatggtgttagaaaagataatggtcttatagattatgatcaagttaaggacttagcaaaaaaacacaaaccaaaactaatcatagctggaggaagcgcttactcaagaataatagactttaaaatttttagaga

SEQ ID NO: 228056 - DNA, 628 bp, Unknown
  Bacterial polypeptide expressing nucleotide sequence isolated from the Sargasso Sea
tacaactacaacacataaaacattaagaggtgccagaggaggacttatcatgattggaaaagattatgaaaatccatttggtttaaaatttaaaaatggaaatttaaaaatgatgtcaaaattagttgatttggcagtttttcctggaaatcaaggtggcccattagaacatgtaattgctgcaaaagcggtaggttttggggaagcacttgatgatagtttctataattatattgaaagggttaaaaataatgcttcgacaatgtgtaatgaattcatatcaagaggatataatgttgtttcgaatggaactgataaccacctaatgttgatagatctaaggaataaaaatatcactggaaaagatgctgaaagtgcattagtaaaagctgatatcactgctaataaaaatatggtgccttacgatgataaatcaccctttataacttctggaattagatttggcacacccgctataaccactagaggattagttgaatctgatataaaaaatgttgtagaaatgattgataaagtcatattaaatcatgataatgaaagcgttttgaatgaagtaaaaaaagatgtaaaccagatgatgagcgatagaccgctttttaatccttaa

SEQ ID NO: 228057 - DNA, 733 bp, Unknown
  Bacterial polypeptide expressing nucleotide sequence isolated from the Sargasso Sea
acttttatgagaatgagcttaaattcaggtggccatataacccatggtttaaaaatttctatgtcaggtaaatggtttaatgcaataggttatgatgttgataaagaatctgaacttattgattatgataaagttgaaaaaattgccttagagcataaaccaaaacttattatagcaggtggtagtgcatattctagaataattgattttaaaagatttagagaaattgctgacaaagtaggggcctatctaatggttgatatggctcacttctccggcttagttgcgggtaaaggctatcctaatccttgtgaacatgctcatgtagtaacttcaacaactcataaagtttttagaagtgcaagaggtggaattattctaactaatcatgaagatcttgcaaaaaaatttaacaccgctgtatttccaggttatcaaggtggaccattaatgcatataatagctgctaaagcagcaggttttttagaagccttaaaacctgaatttaaaaattatattaaatcagttttatctaatgctaaaattttatctgaaactttaaaaaataacggatttaaaatttattcaggaggtacagattctcacttaatgttagttgatttaagaccatttaatgtaaaaggaaacatagctgctgaaagtctttcacgtgccaacataacatgtaataaaaatggaataccatttgacagcgaaagtcccatgataacat

SEQ ID NO: 228058 - DNA, 226 bp, Unknown
  Bacterial polypeptide expressing nucleotide sequence isolated from the Sargasso Sea
taaacaaaaatgcagttccaatgatcctgcctcgccatttgttacatcaggaataagaattggtacaccagctgtaacaactagaggctttaaagaaaaagaaataattcaagtttgtaattggatatctaatatcattaatgacttcgataatgaagaattacaaaaaaatatcaaagaggaagtaagaaatctaactattaattttcctgtatataacttataa

SEQ ID NO: 228059 - DNA, 802 bp, Unknown
  Bacterial polypeptide expressing nucleotide sequence isolated from the Sargasso Sea
aacgttgaaaaacttgcgctagagcacaaacctaaacttataattgctggtggtagtgcttattcaagagtaattgattttaaaagatttagagaaatagctgataaggttggagcatacttaatggttgatatggcccatttttctggtttagttgctggtaaaggatacccaaatccatgtgactatgcacatgtagttacatcaactactcacaaagtatttagaagtgcaagaggcggaattatattaactaatcatgaagatctttctaaaaaatttaatactgcagtttttcctggataccaaggtggaccacttatgcatattatagctgcaaaagctgttggatttaaagaggcattaaaacctgaatttaaagattatataaaaactgttttagcaaatgcaaaaattttagcagaaacgttaaaaaataaaggttttaaaatttattcaggtggaacagatacacatttgatgttagttgacttaagaccttttaatgtaaaaggtaacgtcgctgcagaaagcctttctagagcaaacattacatgtaataaaaatggtattccgtttgacagtgaaagcccaatgataacttctggaataagacttggatcgcaagcagccacaacaagagggtttgggttaaaagaatttcaaatagtaggtgatttaataacaaaaactataaaagggttagccgaaaaccctgaagataactctaaaactgaagatgaagtaagaaaagaagttgtaagtctttgttctaatttccctatctataaacacttaggct

SEQ ID NO: 228060 - DNA, 328 bp, Unknown
  Bacterial polypeptide expressing nucleotide sequence isolated from the Sargasso Sea
atgaaacagggcgtcgattataaatttttttcaacttctttatctgaaattgatccgctggtatccgacgtgatttcatcggaattacaaagacagaaagaccaaatcgaactgatcgcgtcggaaaatatagtctcgcaagcggttttagacgcacagggatccgtgcttacaaataaatatgccgaaggttatcctggtaggcgctattatggtgggtgcgaatttgttgataaagcagaagagttggcaatagagagagcaaaagatttgttcgactgcaaattcgttaatgtgcagccacattccggcgcacaagcaaaccaga

SEQ ID NO: 228061 - DNA, 361 bp, Unknown
  Bacterial polypeptide expressing nucleotide sequence isolated from the Sargasso Sea
atgacacaaaaaggagcatctcaagaatccctatcctctgtagatacagagatagctggactaattgactctgatcttggacgtcaaaattcacacatacatttaatagcttctgaaaactttgcatcaaaggctgttatggaggcttctggttcgatcctgactaataaatattctgagggttttcctggtagaagatactacgagggttgtgaagtagttgatgagatagaacaattagctattgatagagcatgtgaattattcgaagcagatcatgctaatgtacaaccacattctggatcatccgcaaatatggcagtttatctatctctcttagaaccaagagatactttttagg

SEQ ID NO: 228062 - DNA, 793 bp, Unknown
  Bacterial polypeptide expressing nucleotide sequence isolated from the Sargasso Sea
attgaaaaaaaaccaaaattaataattgctggaggaagcgcttattcaagagttatagactttaaaaaatttagagaaattgcagataaagtaaatgcttatctcatggtagacatggctcatttttcaggtcttgtagctggcaagggatatccaaatccaattcaatttgctcatgttgttacttcaactacgcataaagttttaagaggtggcagaggtggaattattttaacaaacgatgaaagtatttataaaaaaataaactcagcagtatttcctggatatcaaggaggaccactacttcatgtaatagcagctaaagcagcagcttttcaagaagcattaaaaccaaattttatagattatattaaggctgtacttgctaatgcaaaaattttatctgaaactttaaaaaataatggatttaaaatattttctggaggaactgatacacatttaatgcttgttgatttaagaccttttaatgtaaccggcaaagacgccgaaacaagtttgtgtaaggctaatattacttgtaacaaaaatggtattccatttgacgatgcaaaacctacaataacatcaggtattagattaggaagccaagctgccacaacaagaggctttggtttaaatgaatttaaaaaagtaggagaattaattactaaagttattcaaggattatcaaaaaataatgacgataatagtaaagttgaaactgaagttagaaatgaagtattaaaactttgttctaactttcctatttataatcatttaaaggaagattaaa

SEQ ID NO: 228063 - DNA, 751 bp, Unknown
  Bacterial polypeptide expressing nucleotide sequence isolated from the Sargasso Sea
aaagatttttttgaaaaaagtttatctgaaactgatcctgacttatataaagctataaacgatgaacttgtacggcaacaaaatcatattgaattaatagcatctgaaaatatagtttcacaagctgttttagaagcacaaggttctgttttgacaaacaaatatgctgaaggctacccaggaaaaagatattatgatggttgtgcgcacgttgatgttgcagaaaatttagccattagtagattaaaaaaattatttaattgtaaatttgcaaatgttcaaccacattcaggtgctcaagctaacggagctgtttttttagcattgttaaagccaggagatactatattgggtatgagcttaaattcaggtggtcatttaactcacggttcaaaagcttctgtttcaggaaaatggtttaattcggtttcttatgatataaataaagaaactggtttaattgattatgaagatattgaaaaaatagccttagaaaaaaaaccaaaattaatcatagctggtggaagcgcatattcaagaattatagattttgctaaatttagaaaaatagcagataaaattgaagcatacctaatggttgatatggctcacttttcaggtttagtagccggaaaaggatatccaaatccaattgatcatgctcatgttgtaacttcaactacacataaagtttttagaagtgcaagaggtggcattattttgaccaatgatgaaaaactaagtaaaaaaa

SEQ ID NO: 228064 - DNA, 840 bp, Unknown
  Bacterial polypeptide expressing nucleotide sequence isolated from the Sargasso Sea
aaggttaccctggtaaacgatactatggtggatgtgaagttgtagataaaattgaaaatattgctattgatcgactaaaggccctttttaacgtcgaatatgcaaatgttcagcctcattcaggttcacaggctaacacagcagtatttgatgcttttttgaagcctggagacaagattcttggtcttgatttagctcatggaggtcatctaactcatggttcaaatgtcaatttctcaggaaaaatatataactcaagcttttatggggtcaataatgatggagtatttgattatgaaaaaatccttgaaagagcaaaagaagttaaacctaatctaataattgtaggagcttcagcatactctcgagacattaacttttctaaattcagagaaattgctgatgaagttggtgcatttcttcacgctgatattgctcatccctcaggtctaatagctaagggctttcttagtgatccagtacctcattgtcatgtgattacatccacaactcataaaacattaaggggaccaagaggaggtataatgatgatgggaaaagattttgataatccatttggtcttaaattaaaaaatggaaatttaaagagaatgtcatctattttagattctgctatatttcctggaaatcaaggaggacctctggagcatgtaattgcggcaaaagctattgcttttggagaagctttagatcctcaatttaaaaaatatataaatcaagtaattttaaatgcttctaaactatctaaaaatctaatcgatcttggttataatatagtttcgggaggtacagataatcatcttttgttaattgattaag

SEQ ID NO: 228065 - DNA, 415 bp, Unknown
  Bacterial polypeptide expressing nucleotide sequence isolated from the Sargasso Sea
tatgaatcaagttatcgctaatgcaaacaccttagcacagacaatgatggaacgtggttttgaaattgtatctggtggaacaaagaatcatttgatgttagttagtttagttaagcaaggcattactggcaaagctgcagacgctgctttacacagtgctaacataacagtcaataagaactcagttcctaatgatcctcagtcaccatttgttacaagcggtattcgactaggaacaccagctataacaacgcgtggtttcaaagagactgaaaccaagatattaggaaacctgatatgcgatgtcctagataacatagataatgaagaggagattaaaaaaatcaaagaaaaggttcttaatctatgctcacaatttcctgtctattcatctagtaaacaagcagtagcttaa

SEQ ID NO: 228066 - DNA, 806 bp, Unknown
  Bacterial polypeptide expressing nucleotide sequence isolated from the Sargasso Sea
ctataatggttgtgaacatgtcgatgttgctgaacaattagctatatatagacttaaagaattattcaattgtaaatttgctaacgctcaaccacactctggtgctcaagcaaacggtgctgtgtttttagctttgttaaaacctggtgatacttttatgggtatgagtttgaattcaggaggacatattactcatggtttaaaaatttcaatgtcaggtaaatggtttaatgcaattggatatgaagttgataaagagtctgaacttatcgattatgacaatgttgaaaaacttgcacttgaacataaacctaaacttattatcgctggcggtagcgcttattcaagagtaattgattttaaaagatttagagaaatagctgataaagttggagcatacctaatggttgacatggctcatttttctggattggttgctggcaagggatatccaaatccatgtgactatgctcatgtagttacatcaactactcataaagtatttagaagtgcgagaggtggaattatattaactaatcacgaagacttatctaaaaaatttaatacagcagttttccctggataccaaggaggaccactaatgcatattatagctgctaaagctgttggctttaaagaggcattaaaacctgaatttaaagattatataaaaactgttttagcaaatgcaaaaattttagctgaaactttaaaaaataatggttttaaaatttattcaggtggaacagatacacatctcatgttagttgacttaagaccttttaatgtaaagggtaatgttgctg

SEQ ID NO: 228067 - DNA, 931 bp, Unknown
  Bacterial polypeptide expressing nucleotide sequence isolated from the Sargasso Sea
agcctctgagaattttactagccctgcaatattagaggctgcaggtggaattatgacaaataagtacgctgagggttatcctggaaagagatactatggtggttgtattcatgttgacgaggcagaaaatttagctattgatagattaaaaaatctttttggtgtggaatatggtaatgtacagccccattcaggttcacaggcaaatatggctgtctttatgactttccttaatgtgggagacactataatgggtcttgatcttgctcatggaggtcatctaacccatggaaatgctgtaaatttttcaggtcagctatacaattctgttccttatcaagtaaataaagaaactggcagagtagattttgataatgttagaaaacttgcaaaagagcataaaccaaaaattattatttgcggtggtagcgcttatcccaggtatatcgagtttgagaattttagtgaaattgctaaagaagttggtgcttttctaatggctgatattgcccatccaagtggtttgattgctgctggtattcatccatcgccagttccgtattgtgatgtaattacaagcacaacgcacaagacactaagagggcccaggggcggaatcattatgatgggaagggacaaagaaaatatctggggtaaagttgccccaaaatctggtcgtgttaaaatgatttcagagctgttagattcctctgtgatgccaggcatgcagggtggtccattaatgcatattatatccgccaaggctatcgcatttggtgaggccatgaaagatgaattcaaagtatatgctaataaaattgttcaaaatgcgaagttaatggcacaggagtttatgaatatggattatgatattatatctggaggaacagacactcatgtaattttagctgattttacaaataaaaatatt

SEQ ID NO: 228068 - DNA, 808 bp, Unknown
  Bacterial polypeptide expressing nucleotide sequence isolated from the Sargasso Sea
atgttttctcgcgaaatgaatatagccgacttcgatcctgaattagccgatgcaatgtctaaagaggttgagcgtcaagaacatcacatagagctaattgcctctgagaactactgtagcccacgtgtaatggaagcacagggttcgcagcttactaacaagtacgcggaaggctacccaggcaagcgttactacggtggttgtgagcacgtagacgttgttgaacaacttgctatcgatcgtgcaaaagcactatttggtgcagactacgcgaacgttcaaccgcacgctggttcacaagctaactctgccgtattcatggcactacttgacgcaggcgatacggtattgggaatgagtctttctgaaggtggtcaccttactcacggttcacacgtaaacttctctggtaaaacctacaatgctgttcagtatggtctgaacaaagaaaccggtgaaatcgattacgctcaggttgaggcacttgctaaagagcacaagccgaaaatgattatcggtggtttctctgcgtattctggcattgttgattgggcaaaattccgtgaaatcgctgatagcgttggcgcttacttgctcgtagatatggcgcacgtagcaggtcttgtagcagcgggcgtttatccaaatccgcttcctcacgctcacgtggtaacaacgactactcataaaacccttgctggcccacgtagtggtttaatcctttcttcatgcggcgatgaagcgatttacaaaaagctaaacagctcggtattcccaggcaaccaaggtggccctcttgccacgtgat

SEQ ID NO: 228069 - DNA, 946 bp, Unknown
  Bacterial polypeptide expressing nucleotide sequence isolated from the Sargasso Sea
atatgctgaaggatatcccggaaaaaggtattatggtggttgtgaacatgttgatatatctgaaaatttagctatagaacgcgcaaaaaaattatttaattgtaattttgctaacgtacaacctcactcaggagctcaggcgaatggtgcggtatatttagcattaatcaaaccaggtgatactatattaggtatgagtttgaattcaggtggtcatctaactcatggagctaaaccagctcaatcaggcaaatggtttaatgctattcattatgatgtaaaaaaagatacaggtttaattgattatgagaatatagaaaagttagctttagaaaataaacccaaattaattatagccggcggaagcgcttattcaagagttattgattttaaaaaattcagagaaatatgtgataaggtaaatgcttatttacttgtagacatggcacatttctcaggacttgtagctggaggagtgtatccgaatccaactaaatatgctgatgtagtaacatcaacaactcataaagttttacgaggccctagaggaggaataattcttacaaataaagaagacctaattaaaaagtttaatagcgctatctttccaggtttacaaggaggacccttaatgcatgttattgcagctaaagcagtatgttttaaagaggcattatctgatgaatttaaaaattattctaaagatgtaataaataatgcaaaagttttagctgataaattaattaaaaatggatttaaaatattttctggtggtacagatacacatttaatgcttgtagatttgagagattttaatgttacaggtaaggatgttgaagcatctttagtacgatcaaacattacttgtaataaaaatggaattccttttgatacacaaagtccgatgataacttcaggtataagattgggaacaccagcatgcact

SEQ ID NO: 228070 - DNA, 657 bp, Unknown
  Bacterial polypeptide expressing nucleotide sequence isolated from the Sargasso Sea
gactcgtagcaagtaagctccacccaaatccaatacctttctgtgatgtagtaactacaactacgcataagactttgagaggaccaagagggggcctcattttatgtaaagatgcagaatttggaaagaaatttgataaatctgtctttccaggaactcagggtggtcctttagaacatattattgcagctaaagcggttgcatttggagaagctttacatcccgatttcgttaattattcacaacaagtaataaaaaatgcaaaagttctggcttcaacattaatatccaagggtattgatattgttagtggaggaactgataatcatattgttttactcgatttaagaagcattaatatgactggaaaggttgctgacttgctcgtgagtgaagtgaatataactgctaataaaaatactgtcccatttgatccagaatcaccttttgtaactagtggattaagattaggtactgctgctttaactaccagaggctttgatgaaaatgcttttgctgaagtaggcgaaatcattgctgatagattgctaaatccagatgactcgttaatagaaaataaatgcaaagaaagagttttagctttgtgtaataggtttccactttatgaaaacaaacttgaaccatcaattaagtgat

SEQ ID NO: 228071 - DNA, 856 bp, Unknown
  Bacterial polypeptide expressing nucleotide sequence isolated from the Sargasso Sea
atgtcgagcgaaaaaaattatttaaatgatagttataaaagtttttttgaggatagtttatctgtaaaagatccagagctttataaagcaattaaagatgaattaatcagacagcaacaacatatagagttaattgcgtctgaaaatatagtatctcaagcagtattagaggcacaaggatcagtattaactaataaatatgccgaaggttatcctggcaaaagatattataatggctgcgagcacgtagatgtagcagaaaaccttgctattgaaagattaaaaaaattatttaattgtaaatttgctaatgcacaaccacactctggtgcacaagctaatggagcggtatttttagctttgttaagcccaggtgatacattcatgggtatgagtttaaattcaggtggtcatattactcatggattaaaaatttcaatgtctggaaaatggtttaacgctataggatatgatgtagacaaagaatctgagttgatagattacgataatgttgaaaaacttgcattagaacataaacctaaactaatcattgcgggtggaagtgcttattctagagtaattgactttaaaagatttagagagattgcagataaagttggagccttcttaatggttgatatggctcacttctcaggattagtcgctggtaaaggttatcctaatccttgtgattatgctcatgtggttacctcaacaacccataaggtatttagaagtgctagaggaggaataattttaactaatcatgaagaacttgctaaaaaatttaatacagcagtctttccaggttatcagggaggacctttgatgcatatcattgcagctaaggcagctg

SEQ ID NO: 228072 - DNA, 488 bp, Unknown
  Bacterial polypeptide expressing nucleotide sequence isolated from the Sargasso Sea
aggtggacctcttatgcatgtgattgctgctaaagccgttgcttttggtgaagcccttcaaccagagtttaaaacatacattcaacaagtaaaaaagaacgcatcaattcttggagaagttctcatgtcaaatggaatagacattgtcaccggtggaacagactctcatatggttttagtagatttaagatccaaaaatgtaacgggtaaagatgcagaagagagtttagagagagctggaatgacttgtaataaaaatggtgtcgcaaatgacccaaatcctccaacaattacctcaggtatcagattaggatcaccagctgctactacaagaggtttcaaagaggaagagttcaaatttattggtgaaaaaatttcaacaatcataaatgcgctatcttcatctaatgcagatatatcgatgaccgaaagctcaattctcaaagatgttactgagctctgctctaattttccaatctataaataaa

SEQ ID NO: 228073 - DNA, 592 bp, Unknown
  Bacterial polypeptide expressing nucleotide sequence isolated from the Sargasso Sea
aatgaatattcttcaaaatcttaaagaaagtgatccagtaatatcaaattttataaactctgaaaaaaatagacaggaaactcatcttgagttaatagcaagtgaaaattttgcatcaactgccgtcatgcaggctcaaggatcagtccttacaaataaatacgcagaggggttacctcaaaaaagatattacgggggatgtgaatttgttgatgaaatcgaagaattagctattcagagagcaaaaaaattatttaatgcaaattgggctaatgttcaaccccatagtggagcgcaggcaaatgctgctgttttcctaagtctacttaaacctggcgacacaatcatggggatggatttatctcatggtggacacctaactcatggatctccagtaaatatgagtggtaagtggttcaatgcagttcactatggtgtaaataaagaaactagtgaattaaattttgatgaaataagagagatagcacttgaaacaaaaccaaaattgatcatatgcggatattctgcttatccaagaacaatcgattttgaatcatttagaaatattgcagatgaagttggtgctttctta

SEQ ID NO: 228074 - DNA, 475 bp, Unknown
  Bacterial polypeptide expressing nucleotide sequence isolated from the Sargasso Sea
ggtcctttgatgcatgttattgccgcgaaagcggtcgctttcaaagaagccctgagtgatgagtttgtgcagtatcaaaggcaagtaataaaaaacgcaaaaatacttgctgaaacattacaagatggcggtcttgatttagttaccggagggaccgatactcacgttttacttgttgatcttagaaagaaaaaagtcacaggcgctatagcagaaaaagttcttggggaaggtaatattgtttgtaataaaaatggtattcccttcgacagtgaaaaaccaacgattacatctggaataaggttaggaacccccgccgcaacaactagaggttttaaagagatgcagtttaaacaagttgggtcctggattttgcaaatactagacaatgttcactctgagcaatcttcacaagtaatctcgaaagtaaaaaaagaggtacttgatctttgtagtgagtttccgatctactagc

SEQ ID NO: 228075 - DNA, 397 bp, Unknown
  Bacterial polypeptide expressing nucleotide sequence isolated from the Sargasso Sea
attgataaaagacgataacacattatcaagtttgattgccaaagagcaggcacgacaagaagcgcatatagagctgatcgcttcagaaaactatgccagtcccgcggtgatggctgcgcagggctctgtgctaaccaataaatatgctgagggctatccgggcaagcgttattatggtggttgtgagcatgtagacgaggttgaagtattggctatggagcgcctcaaaacgctgtttggtgctgattacgtcaatgttcagccacactcgggttcgcaagccaatgcagcggtgtatttggctttgctggcgcctggggatacgattttgggcatgagtttggaccatggtggtcatttgacgcatggttcaaaggtcaatttttcagggcgtatg

SEQ ID NO: 228076 - DNA, 799 bp, Unknown
  Bacterial polypeptide expressing nucleotide sequence isolated from the Sargasso Sea
atgtctagtgaaaaaaattacttaaatgatagttacaaaagtttttttgaagatagtttatcaaaaaaagatcccgagctttataaagctattaatgatgagctaataagacaacaacaacatattgaattaattgcttcagaaaatatagtttctcaagcagtgctagaagcacaaggctctgtattaactaataaatatgcagaaggttatccaggcaaaagatattataatggctgtgaacatgttgatgttgctgaaaatttagcaattgaaagattaaagaaattatttaattgtaaatttgcaaatgcacaacctcattctggtgcacaagctaatggagctgtatttttggctttattaaatccaggagatacttttatgggaatgagtttaaattctgggggtcatatcactcacggattaaaaatctcaatgtctggtaaatggttcaatgcagttggatatgatgttgataaaaagtcagaacttattgactatgataatgtagaaaaacttgctttagaaaataaaccaaagttaataatagcaggggggagtgcttattctagagttatagactttaaaagatttagagaaattgctgataaagtaggcgcatatttaatggtagacatggctcatttctcaggtttagttgcaggtaagggttacccaaatccgtgtgattatgctcacgtagtaacttcaactacacataaagtatttagaagtgcacgaggtggaataatattaactaatcacgaagacctttcaaaaaaatttaatacagctg

SEQ ID NO: 228077 - DNA, 883 bp, Unknown
  Bacterial polypeptide expressing nucleotide sequence isolated from the Sargasso Sea
aaatatgcaaacgtacaacctcactcaggtgctcaagcaaatggcgctgttttcttagcactgctcaaacctaatgatacttttatgggtatgagtttaaattcaggtggtcatattacacatggattaaaaatctctatgtctggaaaatggtttaatgcaattagctacgatgtggataaaaaatctgaacttattgattacgataatgttgagaaacttgcattagaacataaaccaaaacttataattgcaggtggaagtgcttactcacgagtgattgattttaaaagatttagagatatagcggataaagttggagcttatttaatggtggacatggctcatttttctggattagttgccggaaaaggctatccaaatccttgtgactacgcacacgtagtgacttctactactcataaagtttttagaagtgcaagaggtggaattatattatcgaacgatattgatttaggtaaaaaatttgacacagcagtttttcctggataccaaggtggacctttaatgcatattatcgcagcaaaagcagctggtttttttgaagcattaaaacctgagtttcaaaattatataaaaaatgttttagctaacgcaaaaatgttagctgagactttgaaaaataatggttttaaaatatattctggtggaacagacacacatttaatgttggttgatttaagaccatttaatgtaaaaggaaatttagcttcagaaagtctatgtagagctaacattacttgcaataaaaatggtataccgtttgatactgaaaaaccaatgattacatcaggtataagacttggttctcaagctgcaacaacaagaggatttggtctaaaagaatttgaaaaagttggaa

SEQ ID NO: 228078 - DNA, 676 bp, Unknown
  Bacterial polypeptide expressing nucleotide sequence isolated from the Sargasso Sea
tatgtctagcgaaagtaaatatttaaacgatcaatacaaaagtttttttgaagatagtttatctcaaactgatcctgatctatttaaggcaattaatgatgaactacaaagacagcaagaacacattgagttaattgcatctgaaaatattgtttctcaagctgtattagaagcacaaggatctgtattaacaaacaagtatgccgaaggttattcaggtaaaagatattataatggatgtgaacatgtagatgttgctgaaaatttagctaatgaaagattaaaaaaattatttagttgtaaatttgcaaattcacagcctcattcaggcgcacaagccaatggtgctacatttttagctttgcttaagcctggtgatactttcatgggaatgagtttaaattctggtggccatataactcatggattaaaaatttctatgtctggaaaatggtttaaccctataggttatgatgttgataaagaatcagaacttattgattatgatcatgtcgaaaaattagcattagagcataaacctaaacttataattgctggtggaagtgcttattctagagttatagattttaaaagatttagagaaatatgcgataaagttggcgcttattttatggtcgacatggctcatttttcaggtttagttgcaggaaaaggt

SEQ ID NO: 228079 - DNA, 448 bp, Unknown
  Bacterial polypeptide expressing nucleotide sequence isolated from the Sargasso Sea
tatgtcaagtgaaggtaaatatttaaatatagattataaaaatttttttgaaaaaaaattatctgaaacagatccagaagtttataaagccgtaacagatgaacttataagacaacaaaatcatatagaacttattgcttctgaaaatattgtttcccaagcagttcttgaagcacagggttcagttttaacaaacaaatacgctgaaggttaccctggaaaaagatactataatggttgtgaacacgttgatgtagctgagtcattagctaatgaaaggttaaaaaaattatttaattgtaaatttgcaaattctcaaccacattctggtgcacaagcaaatggagcagttttcttagctttattaaaacctggtgatacattcatgggtatgagtttagactcaggaaggcatataacacatggtctaaaaatatctatgtctgga

SEQ ID NO: 228080 - DNA, 898 bp, Unknown
  Bacterial polypeptide expressing nucleotide sequence isolated from the Sargasso Sea
ataaaatttgataaacttataaataatttttttaaatctagtttaaaagaatctgataaagaactctataaatctgtaattgatgaattcacaaggcaacaaaatcatatagaacttattgcttctgaaaatatagtttctaaagccgtcttggaggctcaaggttctgttttaacaaataaatatgccgaagggtatccgggtaaaagatattatggagggtgtgaacatgttgacctttctgaaaatttagctatcgaaagagcaaaaaaattattcaattgtaagtttgccaatgtacaacctcattcaggtgcgcaagccaatggagcagtttatttggctttaattaaacctggagacacaattctaggtatgagtttaaattcaggaggtcatttgactcatggcgctaaaccagctcaatcaggcaaatggtttaatgcagttcactatgatgtggacgaaaaaagtggattaattgattatgaaaatattgaaaagttagcagtagaaaacaaaccaaaattaataattgctggtggtagtgcttattcaagaattattgattttaaaaaatttagagatatttgtgataaagttggagcctattttttggttgatatggcacatttttctggtcttgttgctggaggagtttatcctaacccaacggagtatgctgatgttgttacctcaactacacataaagttttgagaggcccaagaggaggtataatattaactaataaagaagatttaattaaaaaatttaatagcgctatttttccaggccttcaaggaggtcctttaatgcacgttattgccgcaaaagctgttagttttaaagaagcattaacttcggattttaaagattatgcgaaagtaagttttaaat

SEQ ID NO: 228081 - DNA, 364 bp, Unknown
  Bacterial polypeptide expressing nucleotide sequence isolated from the Sargasso Sea
atgtcaatagcattaaaattaaataaatacttaaatagtttttttaaattagatttaaaagaagcagataaagaattatataaatcgattgaggaagaatttataagacagcaaaatcatatagaacttattgcatctgaaaacattgcttctaaagcagtgcttgaagctcaaggttctgttttaacaaataagtacgcagagggttatcctggaaaaagatattacggaggatgtgaacatgtagatatttcagaaaacttagctatagaaagggcaaaaaaattgttcgattgtaattttgcaaatgttcagccacattctggtgcacaagctaatggagctgtttatttagctttattaa

SEQ ID NO: 228082 - DNA, 523 bp, Unknown
  Bacterial polypeptide expressing nucleotide sequence isolated from the Sargasso Sea
atgtcgagtgaaaaaaaatatttgaattcaaattatgaggatttttttgaaaaaagtttatcaaaaactgatcctgatttatttaaagccattaatgatgaattaattagacaacagaatcacattgaattaattgcttctgaaaatatagtttctcaagctgttttggaagctcaaggttctgttttaacaaacaaatatgctgagggatatcctggtaaaagatattataatgggtgtgaacatgttgacgttgctgaacaactagctttggaaagaataaaaaaactttttaattgtaaatatgccaatgtccaacctcactcaggtgcacaagcaaatggtgctgtatttttagccttattaaaaccaaatgatacatttatgggcatgagcttaaattcaggtggtcacattactcatggattgaaaatttccatgtctggaaaatggtttaatgcaattagttatgatgttgataaaaaatctgaacttattgattatgacaatgtgaaaagctagc

SEQ ID NO: 228083 - DNA, 598 bp, Unknown
  Bacterial polypeptide expressing nucleotide sequence isolated from the Sargasso Sea
aacaactcacaaggtatttagaagtgctagaggtggtataatattaaccaatcacgaggatttatccaaaaaatttaatacagctgtatttccaggatatcaaggtggaccattgatgcacatcatagctgctaaagctgttggttttaaagaagcattaaaacctgaatttaaggaatatataaaaacagtattggctaacgcaaaaattttagctgaaactttaaaaaataatggttttaaaatttattcaggaggaactgacactcatttaatgttagttgatttaagaccttttaaagttaaaggaaatgctgctgctgaaagtttatcaagagcaaatattacttgtaataaaaacggcattccttttgatactgaaagcccaatggtaacatctggaattagacttggctctcaagccgctacaactaggggatttggtttgaaagaatttcaaaaagtaggtgatttaataacaaaaactattcaaggtctgtcagaaaacccagaagataactctaaaattgaagatgaagtaaggaaagaagttgttagcctatgttcaaattttcctatatataaacatctaggttag

SEQ ID NO: 228084 - DNA, 912 bp, Unknown
  Bacterial polypeptide expressing nucleotide sequence isolated from the Sargasso Sea
cgggccaacagcgccgtgtacctcgcgctgctgaacgcgggcgacaccatcctcggcatgagcctgccccacggcggccacctgacccacggtgccaaggtgtcgtcctcgggcaagctgtacaacgccgtgcagtacggcatcgacgagaacggcctgatcgattacgacgaggtcgagcgtctggccgtcgagcacaagccgaagatgatcgtcgccggtttctcggcctactcgcgcgtgctggatttcccgcgtttccgcgccatcgctgacaaggtcggcgcgctgctgttcgtcgacatggctcacgttgcgggcctggttgcagcgggcctgtacccgaacccggtgccgttcgccgatgtggtcaccaccaccacccacaagaccctgcgtggcccgcgtggcggtctaatcctggcgcgcaagaacgaggagatcgagaagaagctcaactccgccgtattccctggcgcccagggcggcccgctaatgcatgtgatcgcggccaaggcggtgtgcttcaaggaagcactggagccgggcttcaagacctaccagcagcaagtgatcgacaatgcccgcgccatggcggcggtgttcgtcgagcgcggctatgacgtggtctccggcggtaccgacaaccacctgatgctgatcagtctggtcaagcagggcctgaccggcaaggctgccgacgcggcgctgggcgatgcccatatcacggttaacaagaacgccgtgccgagcgatccacagtcgccgttcgtcacctccggcatccgtatcggcaccccggcggtgaccacccgcggcttcaaggaaggcgaatgccgcaccctcgccggctggatctgcgacatcctcgacgacctggaaaacccggccgtgatcgagcgcgtgcgcggc

SEQ ID NO: 228085 - DNA, 718 bp, Unknown
  Bacterial polypeptide expressing nucleotide sequence isolated from the Sargasso Sea
cctgcacaatcaggaaaatggtttaatgctttacattatgaagtagaccaaaagactgggttaattgattacgaaggtgttgaaaaaattgctatagcaaacaaacctaaactaattattgctggtggtagtgcttactctagaataatagattttaaaaagttcagagaaatttgtgataaagtcggtgcatattttcttgtagatatggctcacttttctggcctggttgctggaggcgcatatcctaatcctactaaatatgctgatgttgtaacttcaactacacataaagttttaagaggaccgagaggtggaattattttaactaatagagaagacttaattaaaaaatttaacagttctatatttccgggattgcaaggcggacctttaatgcatgtcatagctgcaaaagctgtttgttttaaagaggcactctctgatgattttaaagactatactaaaaacgtaataaataatgccaaagttctttcagaaagattaactgaaaaaggttttaaaattttttcaggtggaactgatactcacttgatgttgatagatctaagatcttttggtgtaactggtaaagatgcacaagcttctctaggtcgatctaatataacttgtaataaaaacggaattccttttgataccgaaagcccgatgataacctctgggataagattgggcactcctgcatgcactacaagag

SEQ ID NO: 228086 - DNA, 983 bp, Unknown
  Bacterial polypeptide expressing nucleotide sequence isolated from the Sargasso Sea
taatgatgagcttataaggcaacaaaatcatattgaattaattgcatcagaaaatattgtttctcaagcagtattagaagcgcaaggttcagttttaacaaataaatatgcagaaggttatccaggtaaaagatattataatggttgtgaacatgttgatatagccgaaaatttagccatagaaagacttaaaaaattgtttaattgtaaatatgctaatgctcaaccacattctggcgcacaagcaaatggtgcagtatttttagcactgttgaaaccaggtgatactattatgggaatgagtttaaattctggtggacatttaactcatggatctaaagccgctgtttcaggtaaatggtttaaatctatagcttacgatgttgataaaaaaacggaattaataaattatgaagaggttgaaaaaatagctttagaaaataatccaaaattaattattgctggaggaagtgcatattcaagagtaatagattttaaaaaattcagagatatagcagataaagttggagcttatcttatggtggatatggcacatttctcaggtttagttgctggaaaagggtatccaaatcctattgaacatgcccatgtagtaacttctacaactcataaagtttttagaagtgcaagaggtggtattatattaaccaacgatgaaacattatcaaaaaaatttaactctgcagtctttcccggttatcaaggtggtccactaatgcatattatagctgctaaagctgtaggtttttatgaagctttaaagcctgaatttaaagattatattaaagcagtattagaaaatgcaaaaattttatcagaaacattaaaaaataatggttttaaaatttattctggcggtacagacacacatttaatgctagttgatttaagaccatttaatgtaaaaggaaacgttgcagccgaaagtttaagtagagccaatattactttgcataaaatgg

SEQ ID NO: 228087 - DNA, 306 bp, Unknown
  Bacterial polypeptide expressing nucleotide sequence isolated from the Sargasso Sea
gtaacatcaacaactcataagggttttagaagtgctagaggaggtattattcttacaaacaacgaagctttagcaaaaaaatttaattcagcagtttttccgggttatcaagggggtcctttaatgcacatcattgctgcaaaagccgttgggtttctagaagctttaaaacccgaatttagagaatatatcaaatctgttttagccaaggctaaaatcctatcagaaagaataaaaaataatggattcaaaatttattctggaggaactgatacacatttgaagttagttgatcttcgtccattt

SEQ ID NO: 228088 - DNA, 232 bp, Unknown
  Bacterial polypeptide expressing nucleotide sequence isolated from the Sargasso Sea
atgaacccacttaaccagcaccttcacgaacaagacccagatatcgcagcatttattgcgcaagaaaacgaacgccaagaacatcacattgaactgattgcatcggagaactacaccagcaaagcggttatgcaggcgcaaggcagtcagctaactaataagtatgcagaaggctatccgggcaagcgctattacggtggctgcgaggcggtggacaaagtagaacagcaag

SEQ ID NO: 228089 - DNA, 754 bp, Unknown
  Bacterial polypeptide expressing nucleotide sequence isolated from the Sargasso Sea
gcgtattccagaataatagattttaaaaaatttagagaaatagcagatagtattggagcttatctcatggttgatatggcacacttctctggtttagttgcaggacatggatatccaaatccaattgactatgcagatgtagtaacttcaacaactcataaagttttaagaggtggaagaggtggaattatacttacaaaccgagaagatttatttaaaaaatttaattccgcagtatttcctggttaccaaggtggacctttaatgcatgttattgcggcaaaggctgctgcttttcaagaagcacttaaacctgagtttaaagaatatattaaatccgtgcttgctaatgcaaaaatcttatctgaaactttaaagaataatggatttaaaatattttctggtggtacagacacacatttaatgcttgtagatttaagacctttcaaagttacaggaaaagctgccgaagtcagtttatgtaattcgaatataacttgtaataaaaatggtattccatttgatactgaaaaaatgactattacttctggtataagacttgggtctcaagctgcaacaacgagaggttttggattaaacgaatttaaaaaagttggtgaattaattactaaagttgtgaaaggcctttccaaaaatccagatgacaatagtaaaattgagtctgaggtaagaaaagaagtaattgatctctgctcaaattttcctatatataatcatttgtttaaaaattaaa

SEQ ID NO: 228090 - DNA, 226 bp, Unknown
  Bacterial polypeptide expressing nucleotide sequence isolated from the Sargasso Sea
aatgtttacaatggatatgaaaattgcaggatttgatgatgagctcaatgatgcaatgagaaaagagataaaaagacaagaagagcatgttgaactcattgcctcagaaaattacgcaagtccaagagtacttgaggcacaaggttccttaatgactaataaatatgctgagggatatcctggcaagagatattatggtggttgtgaaaacgttgatgttgcagaa

SEQ ID NO: 228091 - DNA, 538 bp, Unknown
  Bacterial polypeptide expressing nucleotide sequence isolated from the Sargasso Sea
tatgtctaaaattaaaagtaatataaacggaagttatcaagactactttgatagagatttgtcatcaagagatccagatttatacaattctataaaactcgaattacagagacaacaagaacacatagaacttatcgcatcagaaaatattgtttcaaaagcagttttagatgcacaaggatcaattcttaccaacaaatatgcagagggttatcccggaaaaagatattatggaggatgtgagtttgttgataaagcggaagaattggctttagagagagctaaaaaattatttaattgtgattatgcaaatgtacaacctcattctggagcacaggcaaatggtgctgtatatcttgcactattaaacccaggagacacaatacttggtatgagtttaaattctggtggtcatttaactcatggagcaaaagtttcattatcagggaagtggcttaaatcttttcattatgaagttgataaaaaaacaggtcttattgattatgatcaagttaaaaaattagctttggagcataaa

SEQ ID NO: 228092 - DNA, 205 bp, Unknown
  Bacterial polypeptide expressing nucleotide sequence isolated from the Sargasso Sea
catgtctaccgcaactaaaataaataaatttttaaacaacttttttgaagactccttgaaaacttcagatagagaaatatttgaatctatacataaagagtcatccagacagcaaaaccacatagaattaattgcatcggaaaatatagtttcaaaagctgttctagaagctcagggctctgtattaactaataaatatgctgaa

SEQ ID NO: 228093 - DNA, 655 bp, Unknown
  Bacterial polypeptide expressing nucleotide sequence isolated from the Sargasso Sea
tgttatgactaataagtacgccgaaggatatcctgggagacgttattacggtggatgtgaatatgtagatatggctgaagaattagctatagaaagaataaaaaaactgttcaactgtaattttgctaatgttcaaccaaactctgggagtcaagctaaccaagctgtttttatgtctttgatgaagccaggtgatacattcttggcaatggatttagcatctggtgggcatcttactcatggtgcaaaacctaatttgtctggaaaatggtttaatgcaatacattatggagtaaatagagaaaccgaaattatagattattctcaagtcgaagagttggcaaaattacacaagccaaaagttattattgcaggtggatctgcagttccaagacaaataaactttaaagaatttaaaagaattgcagaattagttggagcatatttaatggttgatatggcgcatttttctggattagctgcagctggatgccatccaaacccacttgattttgcagatgtggcaacaagcacaacgcataaaaccttaaggggaccaagaggaggtataatcctaactaatgatgaggaattagctaagaaatttaattctgcaatttttcctggccttcaaggaggcccattaatgcataaa

SEQ ID NO: 228094 - DNA, 355 bp, Unknown
  Bacterial polypeptide expressing nucleotide sequence isolated from the Sargasso Sea
atgcaaagaaaaaaaaagttgttcactgataatcttaatatatcagacccagaattattttcagttattgaaaaagagaataataggcaagaacaagaaattgaattgatagcttctgaaaatattacatcattagcagtaatgcaggctcagggatctgttatgacgaataagtacgccgaaggatatcctgggagacgttattacggtggatgtgaatatgtagatatggctgaagaattagccatagagagaataaaaaaacttttcaactgtaaatttgctaatgttcaaccaaactctgggagtcaagctaaccaagctgtttttatgtctttgatgaagcccaggtgat

SEQ ID NO: 228095 - DNA, 192 bp, Unknown
  Bacterial polypeptide expressing nucleotide sequence isolated from the Sargasso Sea
catgttcagccgtgatttgactattgccaagtacgacgccgatctcttcgccgccatggagcaagaagccgtgcgccaggaagagcacattgagctgatcgcttcggaaaactacaccagccctgcggtgatggaggctcaaggttcggttctgaccaacaagtacgccgaaggctacccaggcaagcgcta

SEQ ID NO: 228096 - DNA, 679 bp, Unknown
  Bacterial polypeptide expressing nucleotide sequence isolated from the Sargasso Sea
aatggctcatttttctggattggttgcaggcaaaggttatccaaatcctgttgattatgctgacgttgttacatcaacaactcataaggttttaagaggtgctagaggcggaattattctaacgaatagagaggatttaataaaaaaatttaattctgcagtgtttccaggatatcaaggtggacctttaatgcacgttgttgccgctaaagctgtagcctttcaagaagctttaaaaccttcatttaaagagtatattaaatctgttttagcaaatgctaaaattttgtctgaaactttaaaatctaatggatttaaaattttttccggtggaacagatactcatttaatgttagttgatcttagaccttttaaagttacaggcaaaactgctgaaataagtttatgcaaagctaacatcacatgtaataaaaatggaataccttttgatacagaaaaaatgactattacctcgggtattagacttggttctcaagcagcaacaaccagaggctttggattaaatgaattcaaaaaagttggtgaattaattactaaagttataaaaggtttatcccaaaatccaaatgataatagcattatagagtcagaagtaagaaaagaagtaattgaactttgttctaaatttcctatatataatcatttgctaaaaaactaa

SEQ ID NO: 228097 - DNA, 903 bp, Unknown
  Bacterial polypeptide expressing nucleotide sequence isolated from the Sargasso Sea
gagtttaatttttttaatgacgaaatcaaaaatacagatccagaagtatatgaaactttaaaaaaagaacttgaaaggcaacaaaaccaaatagaattaattgcttccgaaaatattgcatcaaaagccgttctcaatgctcaaggttcagtgatgacaaataaatatgctgaaggttatccaggtaacagatattatggtggatgtgaatttgttgatgaagcagaaaatatagccatagagagagtaaaaaaattgtacaattgtaaatatgcaaatctacaacctcacagtggagctcaagctaatcaagcagtttttttagcacttctaaaacctcatgatactatactcggaatgtctttagcttctggtggacatttaacgcacggagctaaacccaatttgtcgggaaaatggtttaatccaattcagtatggagtaaaaaaagatggaaacgataaagatttaattgattatgacgaagtagaagctttagcaatagaacataaaccaaaattaattattgctggtgcttctgcatatcctagaattatagattggaaaaaattcagagaaatcgcagataagataggagcatattttttggttgatatggcacattactcaggtttgatagctggtaagcaatatcctaatccaattgaatatgctcacattgtaacttcaactactcataaaacattaagaggtgcgagaagtgcaatgatattaacaaatgatgaaactttaataaaaaaaattaatagtgctgtttttcctggattacaaggtggaccactaatgcatgttatggcaggtaaagctgttgcttttggagaggcgcttaagccagaatttgaggaatacataaaaaaagtaattgtaaatgcaaaagttatg

SEQ ID NO: 228098 - DNA, 484 bp, Unknown
  Bacterial polypeptide expressing nucleotide sequence isolated from the Sargasso Sea
tatgcatattattgctgctaaagctgcaggttttcaagaagcattaaaacctgaatttaaagattatataaaatctgttttagcaaacgcaaaaattttgtctgaaacattgaagaataatggatttaaaatatattcgggaggaactgatactcatttaatgttagtagatttaagacctttcaatgtcaaaggtaatacggctgcagcaagtttatctagagcaaatattacttgtaataagaatggaataccttttgatactgaaagtcccatgattacttcaggtatcagattaggttcccaagctgctacaacaagaggttttggattaaaggaatttcaaaaagtaggagagttaattaccaaaacagtaaaaggtttatcaaataatccaaatgataattcgaaaatcgaagatgaggtaagaaaagaagttattcaactttgctcatcgtttccaatttataaaaatttaaaataa

SEQ ID NO: 228099 - DNA, 303 bp, Unknown
  Bacterial polypeptide expressing nucleotide sequence isolated from the Sargasso Sea
tatgacacaaaaaggagcatctcaagaatccctatcctctgtagatacagagatagctggactaattgactctgatcttggacgtcaaaattcacacatacatttaatagcttctgaaaactttgcatcaaaagctgttatggaggcttctggttcaatcctgactaataaatattctgagggttttcctggtaaaagatactacgagggttgtgaagtagttgatgagatagaacaattagctattgatagagcatgtgagctattcgaagcagatcacgctaatgtacaacctcattctgg

SEQ ID NO: 228100 - DNA, 722 bp, Unknown
  Bacterial polypeptide expressing nucleotide sequence isolated from the Sargasso Sea
taaatctatagcttacgatgttgataaaaaaacggaattaataaattatgaagaagttgaaaaaatagctttagaaaataatccaaaattaattattgcgggaggcagcgcatattcaagagtaatagattttaaaaaattcagagatatagcagataaagttggagcttaccttatggtagatatggctcatttctcaggtttagttgctggaaaagggtatccaaatcctattgaacacgcccatgtagtaacttctacaactcataaagtttttagaagtgcaagaggtggtattatattaactaacgatgaaacattatcaaaaaaatttaattctgcagtctttcccggttatcagggtggtccactaatgcatattatagctgctaaagctgtaggattttatgaagctttaaagcctgaatttaaagattatattaaatcagtaatagaaaatgcaaaaattttatcggaaacattaaaaaataatggttttaaaatttattctggtggtacagacacacatttaatgctagttgatttaagaccatttaatgtaaaaggaaacgttgcagccgaaagtttaagtagagcaaatataacttgcaataaaaacggtattccatttgatgatgaaagtcctatgataacatctggtataagacttgggtcacaagcggcaacaactcgtggttttggtttaaaagagtttaaaaaag

SEQ ID NO: 228101 - DNA, 436 bp, Unknown
  Bacterial polypeptide expressing nucleotide sequence isolated from the Sargasso Sea
atgtcagtaattaaaatagataaatatttaaatagtttttttaagttaaaacttcaggatgctgataaggaactttatgagtctattagagatgaatttataagacagcaaaaccacattgaattaattgcatctgaaaatattgtatcaaaagctgttttggaagcccaaggatctgttttaacaaacaagtatgcagagggttatcctggaaaaagatattatggtggttgcgaatatgtagatgtgtctgaaaatttagctattgaaagagctaaaaaattatttgattgtaaatttgcaaatgtgcaacctcattctggcgcccaagctaatggtgcagtttacttagctctattaaaaccaggtgatactactttagcgatgagtttaaactctggtggtcacttgacacatggagcaaagccagctcaat

SEQ ID NO: 228102 - DNA, 700 bp, Unknown
  Bacterial polypeptide expressing nucleotide sequence isolated from the Sargasso Sea
tatgtcaattgctgtaaaactaaataaatatttgaatagtttttttaaattagatttaaaaaatgctgataaagaattgtataaatcaatagaggaagaatttgacaggcaacaaaatcatattgaattaattgcatccgaaaatattgtttcaaaggcagttttggaggcacaaggttctgttttaactaacaaatatgcagagggatatcctggcaaaagatactacggtggttgtgagcatgttgatatttcggaaaatttagcaattgaaagagcaaaaaaattatttaattgtaaatttgcaaatgtacaacctcactcaggtgctcaagctaatggagctgtttatttagcattattaaaaccaggagatactactttagcgatgagtttaaattcaggtggacacttaacacatggagccaagcctgctcagtcaggaaaatggtttaatgccctccattacgaagttgataaagaaactggacttatagattatgagagcgttgaaaagcttgctttagaaaataaaccaaaacttataatcgcggggggaagtgcatattcaagaattattgattttaaaaaatttagggaaatttgtgataaggtaggtgcttacttacttgttgatatggctcacttttcaggattagttgctggcggagcttatccaaatccgactgaatatgctgat

SEQ ID NO: 228103 - DNA, 760 bp, Unknown
  Bacterial polypeptide expressing nucleotide sequence isolated from the Sargasso Sea
gagcataagccaaaaatgctaatagctggagcctccgcttatcctagaaaaatagattggaaaaggtttagagaaatagctgataaagtaggagcatattttttagttgatatggctcactattctggtttggttgcaggtaaacaatatccaaatcctattgagcatgcccatgtagtaacttcaacaactcacaaaactttaagaggtgcaagaagtgcaatgattttaactaatcatgaagatttatataaaaaaattaattctgctgtttttcccggattacaaggtggtccactaatgcatgtaattgcagctagagctgtttgttttggtgaagcacttaaacctgaattcgaagaatatattaagaatgtaattgctagtgctaaagttatggcaaaaactttagttgatagaggatttagaattgttacaggaggcacagattcccatatagtttggttagacttgactccaaaaggtttaactggtgataaagctgaaaaaattttagaagaagttggattggcatgtaacaaaaatgcaattccatatgaccctaatccaccaaaaataactagtggacttagatttggaacagcagctgctactaccagaggttttaatcagaaagattttgaacaagttgggaatatgattgctgatattttggatagtcttttacttgaagaaaatgaaagaactgatgtttttagtaaaacaagaaaagatgtaattgaactttgcaaaaaatatc

SEQ ID NO: 228104 - DNA, 550 bp, Unknown
  Bacterial polypeptide expressing nucleotide sequence isolated from the Sargasso Sea
accaatcatgaggatcttgcaaaaaaatttaatactgctgtctttcctggttatcaaggaggtcctttaatgcatattatagccgctaaggcagcaggatttcttgaagcattacaaccagaattccaagattatattaaatctgttttggcaaacgctaagatgctagcagaaactttaaaaaataatggatttaaaatttattcagatggaacagacacccatttaatgttggtagatttaagaccctataatgtaaaaggcaatattgctgctgaaagtttgtcaagagcaaatattacatgtaataaaaatggtattccttttgatacagaaaaacccatgatcacttcaggtatccgattaggaacacaagcagctacaacacgaggttttggattaagtgagtttaaaacagtaggtgaattaataacaaaaactttaaaaggtttatctgaaaacccaactgataatagtaaaatagaagaagaagtaaaaaatgaagttatttctttaacttcgtcatttccgatatataagaacctttagt

SEQ ID NO: 228105 - DNA, 523 bp, Unknown
  Bacterial polypeptide expressing nucleotide sequence isolated from the Sargasso Sea
atgcgtgagattatggatcatgagttagaaaaaattcttgaaaaagaacaaaatagacaaaaaaattcagcagtatttatagcttcagaaaactatgcttctgaagctgttagaaaatatacttcatcaatacttactaacaagtatgctgaaggatatcctggagcaagatattatgcaggttgtgagtatgttgatcaaatagaaaatttagctattgagcgagggaagaatatttttggtagcaatcatataaatgttcagcctcattcaggctctcaagcaaatatggctgcttatatttcattgttaagtccaggtgacaaaattttaagtttatctttagatcatggagggcatttatcacatggtcacaatgtgaatttttcaggaaaaatatatgagattcataattattttttagataaagattctgaaatgattgattttgatgctttgcagaaagttgcggatactgtacagcctaagttaataatttgtggattttcagcatatttctaga

SEQ ID NO: 228106 - DNA, 493 bp, Unknown
  Bacterial polypeptide expressing nucleotide sequence isolated from the Sargasso Sea
tctgatgcatgtgatagcagcaaaagctgcagcatttcatgaagcattgcaacctagttttagagaatatataaaatctgtcctcgcgaatgcaaaaattctctcagaaacacttaaaaataatggtttcaaaattttttcagggggaaccgatacccatttaatgttggtagatctcagaccttttaaagtaacgggtaaggcagctgaaattagtttgggtaaggcaaacttaacttgtaataaaaatggtataccttttgatacagaaaaaatgactataacatcaggaataaggcttgggtctcaggctgccacaacaagaggatttggattaaatgaatttaaaaaagttggagatcttattaccaaagtaataaaaggcttatcccaaagtccagatgataacagcaaaactgagtcagaagttaaaaaggaagtcattgaactttgttctaaatttcctatatatagtcacttattcaaaaattaa

SEQ ID NO: 228107 - DNA, 631 bp, Unknown
  Bacterial polypeptide expressing nucleotide sequence isolated from the Sargasso Sea
actagtacaacacacaaaacacttcgaggtcctcgcggaggtataattatgatgggagaagattttgaaaataaatgggcgaaagttgctccaaaatctggaagaataaaaatggtatctgaattattagatgcttcggtaatgccaggtgtgcaggggggacctctaatgcatattattgctgcaaaagcgattgcttttcgtgaagcccttaattctaattttaaaaactatgcaaatagtattatatctaatgctaaggtattggctaatgaattaatgaatatggattacaatttgatcacaggcggaacagatactcatgttattcttattgacttaagcaataaaaatattactggtaagaccgctgaacttattttaggtaaggctgggattactgcaaataaaaatatggttccatatgataccaaaagtccatttataacaagtggaatcagattaggaacacctgcaattacaactagaggtatgggtaaaaatgagatgaaaatgatagcttcttggattgatttggcagttagcaatcatgaaaatgacgccattttattacatataaaaagtaaggtaaaggaactttgctcaagctttccgatttacgagaattaga

SEQ ID NO: 228108 - DNA, 358 bp, Unknown
  Bacterial polypeptide expressing nucleotide sequence isolated from the Sargasso Sea
atgtcaaaaattaaaagcgatataaatggaagctatcaggattattttgacaaagatttgtcattaagagatccagatttatataattcaataaaacaagaattacttagacaacaacaacatatagaacttattgcatcagaaaatattgtttcaaaggcagttttagatgcacagggatcaatcttaaccaacaagtatgcagaaggatatcctggaaaaagatattacgggggatgtgaatttgttgacaaggcagaagaattagctttagagagagttaaaaaattatttaattgtaaatatgcaaatgtgcaacctcactcaggtgcacaagcaaacggagccgtatatttag

SEQ ID NO: 228109 - DNA, 955 bp, Unknown
  Bacterial polypeptide expressing nucleotide sequence isolated from the Sargasso Sea
gaaacattatgtaaaaaaagatgcttagaaacatacagattaaatccagaagaatgggatgttaatgttcaaccttattctggcagtagtgctaattttgaagcatatacaggattaataaaacctcatgatagaattatgggtttagatttacctagtggaggtcatttaactcacggattttatacaccaaaaaagaaaatatctgctacatcaatttattttgaatcattaccttacaagttagatgaaaagacagaaagaattaattatgatgaacttgaaaaaaatgctatgttattcagacccaaaatattaattgctggttcaagtgcttatccacgtgattgggattatcaaagaatgagagaaattgccgataaatgtggatcatatttattagcagatatggctcatgttagtggtcttgttgcatcacaaatagcaccagatccatttaaatattgtgatgttgttactacaactacacataaaacattaagaggacctcgtgctggaattatattttatcgcaaagatgaaagaaatttaggtcaaggtattaatgaatctgtatttcctggtttacaaggtggtcctcataatcatataatcgctgctattgctgttgctatgaaacaagctaatacaaaagaatttaaagaatattcagaacaagttgtaaaaaatgctcaatatttagcagaaaaattaatggacaatggatataaaatagttacagatgggacagataatcatacaatactatggaatttaaaaaatactggtttaacaggaagtaaaatggaaaaaatattagaaatgataaatatttctgtaaataaaaattctgttattggtgataaaagtgctcttaacccatctggtataagattaggaacaccatcattaacaacaagaggatttgtagaaaaagatatgatgtatgttgctg

SEQ ID NO: 228110 - DNA, 751 bp, Unknown
  Bacterial polypeptide expressing nucleotide sequence isolated from the Sargasso Sea
tatgtttagtaaaaatgtaaaagttgagggttttgatgacgaattatttaacgctatggaaggcgaaaggcgtcgccaagaagaacatattgagttaattgcatctgagaacatggcaagtccgcgtgttttggaatgtcagggctctgttttaacaaataaatacgcagaaggatatccagctaagcgttattacggtggttgtgaatttgtcgatgttgctgaacaacttgcaattgatagagcaatcgaattatttggtgcagattgggcaaatgttcagtcacattctggctctcaggctaacggcgctgtttttcatgctcttttagaaccaggagatactattatgggtatgagcttggctcacggcggacacttaacccatggagctaccgttaatgtatcagggcgcatatataatgcagttcaatacggtttgaatgctgagactggcgagattgattatgatgaggctgaaaaattggctcttaaaactaaaccaaaactaattataacaggattttctgcttattcacgtgtattggattggcaacgattccgcgatattgctgataaagttggcgcgtatatgttatcagatattgctcatattgctggacttattgctgttgatgagtacccgagtccagtacaaattgctgatgttacaacaacaacaactcacaaaactattcgcggtcctcgttcaggattaattatgggaaaagctaatggaagaaatacaaaa

SEQ ID NO: 228111 - DNA, 427 bp, Unknown
  Bacterial polypeptide expressing nucleotide sequence isolated from the Sargasso Sea
tttggttggcttttttgacgctggattgggggaccgcgatccggcagtttacgcagccattcaacaggagttggaacgccagaaaaatcagatcgaactgatcgcttcagaaaacattgtttcgagagccgtactggaagcgcagggcggcgtcatgaccaacaaatacgccgagggttatccaggacgccgttactatggtggctgcgaattcgtcgatgtcgtcgaagcgctggccatcgaaagggcgaagaagctgttcgactgtcagttcgttaatgtgcaacctcattccggcgcccaagccaacggtgccgtcatgatggcgcttctacaacccggtgatactatccttggactttctcttgccgcaggcggacacctgacccacggcgccaaaccggcgcagtcggggaaatggttcaat

SEQ ID NO: 228112 - DNA, 625 bp, Unknown
  Bacterial polypeptide expressing nucleotide sequence isolated from the Sargasso Sea
atatgctgatgtcgtaacttctactactcataaagttttaagaggtggtagaggtggaattattttaactaatagagaagatatattcaaaaaaataaattcagctgtttttcctggatatcaaggtggacctctcatgcatgtaattgctgcaaaagcagctgcgtttgaggaggctttaaaaccagattttaaagaatatattaaatctgttcttgataatgcaaaaatcttatctgaaactttaaaaaataacggttttaaaatattttctggcggtactgatactcatttaatgcttgtagatttaagaccttttaaagtaacgggaaaagatgctgaaacaagtttaggaaaagccaatataacatgtaacaaaaatggcattccttttgatacagaaaaaatgacaatcacatcaggcataaggcttggaactcaagctgttacaacaagaggtttcggtttaaatgaatttaaaaaagttggagacatgattacgacagttattcaaggcttgtctaaaagtcctacagataatagcaaagcagaatccgaagttaagaaggaagtaattgaactctgttcaaaatttccaatttataactatttgggaaataattaa

SEQ ID NO: 228113 - DNA, 388 bp, Unknown
  Bacterial polypeptide expressing nucleotide sequence isolated from the Sargasso Sea
gttgttacttctacaacacataaaacacttagagggcctaggtctggaattattcttgcaaggaagaatgaagagatagaaaaaaaattaaattcagctgtttttccaggatctcaaggaggtccgttaatgcatgtcatcgctgcaaaggctatatgttttaaagaggcattagatccagaatttaaaagttatatccagcaagtcattgataatgcaaaaattatggcaaaaactattatctcaaatggtatagatgttgtgagtaatggaacagagaatcatatagtgttagtagatttaagaaacaaaggtattactgggaaagatttagaggctgttttaggttcaattaacataacggttaataaaaactctgtgcccaatg

SEQ ID NO: 228114 - DNA, 730 bp, Unknown
  Bacterial polypeptide expressing nucleotide sequence isolated from the Sargasso Sea
ataattgattttaaaaaatttagagaaatttgtgataaagttggagcatatttattagttgatatggcacatttatctggtttagtggctggaggtgcttatcctaatcccactaagtatgctgatgttgtgacttctacaacgcataaagttttaagaggaccaaggggtggaattatattaacaaataatgaagagttagctaaaaaatttaatagtgcaatctttcctggtctacaaggtggcccactaatgcatgtaattgcagctaaagcggtttgttttaaagaagccttgtctaatgaattcaaaatttatactaaaaatgtaattaaaaacgcaaaaattttatcagaaagattatctaaaaaaggttttaaaattttttctggaggaacagatactcatttgatgcttcttgatctaagatcattcaaagttactggaaaagacgcccaagcatcattaggaagagcaaatataacttgtaataaaaatggaattccatttgatacagaaagtccatttataacttctggaattagattaggtacaccagcctgcaccacaagaggctttaaagaagaagaatttaaattaatcgcagatttaattcataaagtaattaaaggtttgagtgagaacaaagcagataattcgaaaatagaggaagaagtaaaaaaagaaattattgatctttgttcttcttttcctatatatggaaattaaa

SEQ ID NO: 228115 - DNA, 680 bp, Unknown
  Bacterial polypeptide expressing nucleotide sequence isolated from the Sargasso Sea
gacacacggtagttctgtgaacttttccggtcaactttacaatactgtgtcttatcaagttgaaaaagatacgggtcttgtgaattttgatcatctacataaaattgcaaaagaacataaacccaaaattattatttgcggaggaagtgcttatccacgacatatagaatttgaaaagtttcgtgatattgcaagcgacgttggtgcttttctcatggcagatattgctcacccgtctggacttgttgctgctggtttacacccatcacctatgccattttgcgatgtagtaactactactacacataaaacgcttcgtggtccaaggggtggcatgataatgatgggggaggattttgaaaatcaatgggatataactgcacctaaatcaggaagaacaaaattagtttctgaattattaaattcggcagttatgcctggagttcaaggtggtccattaatgcatattatcgctgcaaaagctttagcttttggggaagcacttgagccgagttttaaattatatgctcaaaacattataaataatgcaaaagtaatgtcagatgaattgctatctaaaggttacaaattaatttcaggtggtactgatacacacgtaatacttattgatctatcaaataaaaatgttactggaaaatctgcagagaaagctttagaaa

SEQ ID NO: 228116 - DNA, 281 bp, Unknown
  Bacterial polypeptide expressing nucleotide sequence isolated from the Sargasso Sea
tatgtcgagcgaaaaaagttatttaaatgatagttataaaagtttttttgaggatagtttatctgtaaaagatccagagctttataaagctattaaagatgagttaatcagacaacaacaacatattgagctaattgcgtctgaaaatatagtatctcaagcagtattagaggcgcaaggatcggttttaactaataaatatgccgaaggttatcctggtaaaagatattataatggatgcgaacacgttgatgtggctgaaaatcttgctattgaaagat

SEQ ID NO: 228117 - DNA, 817 bp, Unknown
  Bacterial polypeptide expressing nucleotide sequence isolated from the Sargasso Sea
ccacatagtggtgctcaagcaaatcaagctgtttttttagcactacttcagcctcatgatactattttaggcatgtcattagcttctggaggtcatctcactcatggagcaaagcctaatttatcaggtaagtggtttaatgcagttcaatacggtgtaaaaaaggatggtaatgatcgagatttaattgattatgatgaagtagaagcattggcattaaaacataagccaaaaatgattattgctggggcctcagcatatccaagaatcatagattggaataaatttagagaaattgcagacaaagtaggagcttatttcttagtggacatggcacactattcaggattagttgcgggtaaacaatatcctaatccgatagatcatgctcacatagtgacatcaactacacacaaaacattgagaggagcaagaagtgcgatgattttaacaaatcatgaagacttgtacaaaaaaattaactctgcagtttttccaggccttcaaggaggtccattaatgcatgtaatagcagcaagagccgtttgttttggagaagctctaaagccagagtttgaagaatatattaaaaatgtaattgcaagtgctaaagttatgtcacaaactctcattgatagaggttttagaattgtaactggtggaactgactctcacatagtctggttggatttgactcctaaaggtttaactggagacaaagctgaaaaaattttagaggaagtaggattagcatgtaataaaaatgctattccatatgatccaaatccaccaaaaataactagtggccttagattgg

SEQ ID NO: 228118 - DNA, 258 bp, Unknown
  Bacterial polypeptide expressing nucleotide sequence isolated from the Sargasso Sea
tatgtccagtgaaaaaaattatttaaacgatagttataagagtttttttgaggatagtttatctacaaaagatccagaactttataaagctattaaagatgaattaattagacaacaacaacatattgagttaattgcgtctgaaaatatagtctcacaagcagtattagaggcgcaaggatcggttttaactaataaatatgccgaaggttatcctggtaaaagatattataatggttgtgagcatgttgatgtagc

SEQ ID NO: 228119 - DNA, 742 bp, Unknown
  Bacterial polypeptide expressing nucleotide sequence isolated from the Sargasso Sea
atagatagagccaaagaactttttaacgcagattatgcaaatgtgcagcctcattctggttcatctgcaaatgctgcagcatatttagcattacttgaaccaaatgacacaatacttggaatgagtctcgatcatggaggacatctcactcatggatcaaaagtaaatttttcaggaagaaactataagtcttttcaatacggtctaaattctgaaacacatgacattgattatgatcaagttcgtgatttagcaaaaaagtataatccaaaacttataatcgctggtttttctgctttctcgggtttagttgattggagtaaatttagagaaatagcggatgaggttaatgcttatttcttagtagacatggctcatatatctgggcttgttgcagcaggaatgtatccttctccagttccatttgcagatgttgtgacatccacaacacataaaacgttaagagggccaagatctgggattattcttgcaaaagaaaatgaggaaatacaaaagaaattaaactctgcagttttccccggctcacaaggaggtcctttgatgcatgttgtggcagcaaaagcagtttgttttaaagaagctcttgaacctgaatttaaaacttatatgtctcaagttattagtaatgctaaaactatggcgaagactattattggaagaggagtcgatatagtaaaaggtggtactgaaaatcatatgatacttgtcgaccttagaaata

SEQ ID NO: 228120 - DNA, 679 bp, Unknown
  Bacterial polypeptide expressing nucleotide sequence isolated from the Sargasso Sea
tttgcttgataagaaatctaaccttaaaactgatgcaattttttcaaataaaaaagatatagaactttatgatgctgagctttggaaatcctttgaaaaggaaatggtcagacaggaggaacatattgaacttatagcttcagaaaattacgctagccaaagagtgcttcaggcgcagggttcagtattaacaaataaatatgctgagggatatcctgacaaaagatattatggcggctgtgagtttgttgatatcgctgagaagttagcaatagatagagctaaggagctttttaatgctgattatgctaatgttcagcctcattctggttcctctgcaaatgctgctgcatatttagcattacttgagccaaatgacgcaatacttggaatgagtcttgatcatggaggacaccttacacatggatcaaaagtaaatttttcaggaagaaactataagtcttttcaatacggtttaaatcctgaaacgcatgatattgattatgaccaagttcgtgatttagcaaaaaaacataatccaaaactaataattgctgggttttcagctttctctggtttggttgattggagtatatttagagaaattgcagatgaggttaatgcttatttcttggtagatatggctcacatatcaggacttgtagcggcaggcatgtat

SEQ ID NO: 228121 - DNA, 450 bp, Unknown
  Bacterial polypeptide expressing nucleotide sequence isolated from the Sargasso Sea
tatgtctagtgaaagtaaatatttaaacgatcagtacaaaagtttttttgaagatagtttatcaaaaactgatccagatctttataaagctatcagtgatgaattacaaagacagcaggaacatatagaattaattgcatctgaaaacatcgtttctcaagcagttttagaagcacaaggatctgtgctaacaaataaatatgctgaagggtattcaggtaaaagatattataatggttgtgagcacgttgatgttgctgaaaatttagcaaatgaaagattaaagaaattattcaactgtaaatttgcaaattcacaacctcattcaggtgcccaagctaatggtgcaacatttttagctttacttaaaccaggtgatacttttatgggaatgagtcttaattctggtggacatataactcacggattaaaaatttcaatgtctggaaa

SEQ ID NO: 228122 - DNA, 347 bp, Unknown
  Bacterial polypeptide expressing nucleotide sequence isolated from the Sargasso Sea
catgccatggcctagcctaaaagacgaagaattatttgaaatcattaagagagaaattcatcgtcagaataccacactgcaattaatcgcatctgaaaatttcgcatcacctgcggttttagcagcaactggttccgtttttaccaacaagtactcagagggttatccgggaaaaagatattacggcggaaatgttcatgtagatgaagctgaaattctcgcttgtgaacgtataaaagccttgtttggagctgaacacgcgaacgttcagcctcattcaggggcaagtgcgaatatggctgtataccaagccttattagaacccggcgacacagttcttggtttga

SEQ ID NO: 228123 - DNA, 660 bp, Unknown
  Bacterial polypeptide expressing nucleotide sequence isolated from the Sargasso Sea
gataaggttgaagcatacttcttagtagatatggctcattattcgggattggttgctggcaagcaatatcccaacccaattgaacatgcacatgtagtaacatcaacaacacataagacattgaggggtgcaagaagtgcaatgatattaacaaatcatgaagatttatataaaaaaattaattcagctgtatttcctggattacaaggtggtccattaatgcatattatagctgctagagcagtatgctttggtgaggcactaaaacctgaattcgaggattatattaaaaatgttattactagtgcaaaagtcatgtcccaaactttagtcgatagaggctttagaattgtaacaggcggcacagactcgcatattgtttggttagatttaacaccgaagggattaacaggagataaagctgaaaaaattcttgaagaagttggtcttgcttgtaataaaaatgccattccatatgatcctaatccccctaaagttacaagtggactaagatttggtactgctgcagctactactagaggttttaatcaagaagattttaagcaagtaggcaatatgatagctgatatactagatagtttattattatcagaagatgatagaaagaaagtttttaataaaactagaaaagatgttatt

SEQ ID NO: 228124 - DNA, 270 bp, Unknown
  Bacterial polypeptide expressing nucleotide sequence isolated from the Sargasso Sea
tatgtctagtgaaagtaaatatttaaacgatcaatacaaaagtttttttgaagatggtttgtctaaaactgatccggatctatacaaagctattaatgatgaattacaaagacaacaagaacatattgaactaattgcttctgaaaatatcgtttctcaagccgtactagaagcacagggttctgtattaacaaataaatatgctgaaggttattcgggcaaaagatattacaacggctgtgaacatgttgacgttgctgaaaatttagc

SEQ ID NO: 228125 - DNA, 811 bp, Unknown
  Bacterial polypeptide expressing nucleotide sequence isolated from the Sargasso Sea
aatctaaaagaaagtgatccagtaatatccaattttattaactctgaaaaaaataggcaggaaactcatcttgagttaatagcaagcgaaaatttcgcatcaattgccgtcatgcaggctcaaggatccgttcttacaaataaatatgctgagggattaccgcaaaaaagatactacggaggatgtgaatttgttgatgaaatcgaagaattagctattcagagagcaaaaaaattatttaatgcaaattgggctaatgttcaaccgcatagtggagcacaggcaaatgctgctgtttttctaagtctacttaaacctggcgacacaataatggggatggatttatctcatggtggacacctaactcatggatctccagtaaatatgagtggcaagtggttcaatgcagttcactatggcgtaaataaagaaactagtgaattaaattttgatgaaataagagagatagcactagaaacaaaaccaaaattaatcatatgtggatattctgcttatccaagaacaatcgattttgaatcatttagaaatattgcagatgaagttggtgcattcttaatggctgatattgcgcacattgccggactagtagcgagcaaacttcacccaaatccaataccttattgtgatgtagtaaccacaactactcataaaacattaagagggcctagaggtggtcttatcttgtgtaaagatgcagaatttggaaagaaatttgataaatctgttttccctggaactcagggtgggccattagagcatattattgccgctaaagcagttgcattggaga

SEQ ID NO: 228126 - DNA, 823 bp, Unknown
  Bacterial polypeptide expressing nucleotide sequence isolated from the Sargasso Sea
ttggagtcagagcgtaagcgtcaagaacagcatatagaactgattgcttctgaaaactatgcttcgccaagagtcatggaagcccaaggcggtattcttaccaacaagtatgccgaaggttatcctggtaaaagatattatggaggttgtgagtttgttgacgtggcagagcaattggcaattgatagagcaaaaaaacttttcaaagcagactttgccaacgtacagcctcattccggtgctagcgctaatgccgctatatttttagctcttttaaatgctggcgataaaattctaggtatgagtcttgaccatggtggacacttaactcatggctctaaagtaaatttttctggaaaaatatatgaatcttatagttatggaatcaaccccgaaactggtgacatcgattacgacgaagtcaaatcattagccgaagagcatcaaccaaaattaattatttgtgggttctctgctttctcaggcattttagattttaaaaagttcagagaaatagctgattcgatcggtgcataccttttggctgatatttctcatgtttcaggattggttgccgctggtttatatccgaacccttttccgcatgcccatgtcgtgtctactactactcacaaaacccttgtagggccaaggggtggtcttattcttgctggcaaagacgaagaattgcacaaaaaattaaattcagcccttttccctggttctcaaggtggtcctttaatgcatgttattgctgctaaggccgtatgttttaaagaagcgatggagcctgaatttgtcgagtatcaacaacagatcctta

SEQ ID NO: 228127 - DNA, 319 bp, Unknown
  Bacterial polypeptide expressing nucleotide sequence isolated from the Sargasso Sea
aatgcttcttgatttaagatcacttaaagttactggaaaagatgctcaagcttcgttaggaagagcaaatataacatgcaacaaaaacggaattccatttgatacagaaagtccattcataacttctggaattaggttaggtacaccagcttgtactactagaggatttaaagaagaagaatttaagttagttgcagatttaatacataaagtaataaaaggcttaagtgaaaacaaatcggataattcaaaaattgagaatgaagttaaaaaagaaattattgatctttgttcctctttccccatatatggaaattaa

SEQ ID NO: 228128 - DNA, 841 bp, Unknown
  Bacterial polypeptide expressing nucleotide sequence isolated from the Sargasso Sea
agcaaaacctaatctatctggtaaatggtttaatgctgttcaatacggtgtaaaaaaagatggcaatgataaagatttaattgattatgatgaagttgaagctttagctttagagcataaaccaaaaatgataatagcgggagcttccgcttatcctagaacaatagattggaaaaaatttagagaaatagctgacaaagtaggcgcatattttttagttgatatggctcactattctggtttggttgctggtaaacaatatccaaatccgattgagcatgcccatgtagtaacatcaacaactcacaaaactttaagaggtgcaagaagtgcaatgattttaactaatcatgaagatttatataaaaaaattaattctgctgtttttcctggattacaaggtggtccactaatgcatgtaattgcagctagagctgtttgctttggtgaagcacttaaacctgaattcgaagaatatattaaaaatgtaattgctagcgctaaagttatggcaaaaactctagttgatagaggatttagaattgttacagggggcacagactcacatatagtttggttagacttgacaccaaaaggtttaactggtgataaagctgaaaaaattttagaagaagttggattggcatgtaacaaaaatgcaattccatatgaccctaatccaccaaaaataactagtggacttagatttggaactgccgcagcaactacaagaggttttaatcagaaagattttgaacaagttggaaatatgattgctgatatattggatagtcttttacttgaagataatgagagaaatgttgtttttaataaaacaaga

SEQ ID NO: 228129 - DNA, 921 bp, Unknown
  Bacterial polypeptide expressing nucleotide sequence isolated from the Sargasso Sea
ttagctatgagttgaactctggtggacacttgacacatggagctaagccagcccaatctggtaaatggtttaatgcacttcattacgatgttgataaaaaaacaggcttaatcgattatgatgctgtcgaaaaacttgctactgaaaataaaccaaaacttataattgctggtggaagtgcttactcaagagtaattgactttaaaagatttagagagatatgtgataaagtaggagcatatctattagtagacatggcacatttttcaggtttggtagctggtggcgtttatcctaatcctactaaatatgctgacgttgtaacatcaacaacccataaagttttaagaggtccaagaggtggaattatattaacaaataatgaagaattaattaaaaaatttaacagtgcaatttttcctggtttacaaggaggaccattaatgcatgtaatagcagctaaagcagtttgttttaaagaggctctatcggaagattttaaagaatatactaaaaatgtaattaataacgctaaagtgctctccgaaagtttaacagaaaaaggttttaaaattttttctggaggaacagatactcacttaatgcttcttgatttaagatcatttaatgtcactggtaaacatgcccaagcttctttaggacgagcaaatattacttgtaacaaaaatggtataccttttgatactgaaagtcccatgattacatcaggaattagattaggaacacccgcttgtacaacaagaggttttggaaaacaggaatttcgtttaattgcagatttaattcataaagttataaaaggtttgagtgaaaataaattagataattcaaaaatagaaaaagaagttaaaaaagaaataattaaactttgtgcaacttttcctatctatgaaaattaat

SEQ ID NO: 228130 - DNA, 424 bp, Unknown
  Bacterial polypeptide expressing nucleotide sequence isolated from the Sargasso Sea
atgtacgaccgcaaaattcttgtcgaacaaaccgaccccgagctgtttgccgccatccaggccgaaaacgcccgccaagaacaccatatcgagctgatcgccagcgagaactacgcttcccccgccgtgatgtgggcgcaaggcactcaactcaccaacaaatacgctgagggctaccccggcaagcgctactacggtggctgcgagcatgtggatgtggccgagcagctggccatcgaccgcgtgaagaagatcttcggcgccgatgctgccaacgtgcagccccactgcggcgcttcggccaacgaagccgtgttcctggccttcctcaagcccggtgacaccatcatgggcatgagcctggccgaaggcggtcacctgacccacggcatgccgctgaacatgtcgggcaaatggttcaatg

SEQ ID NO: 228131 - DNA, 841 bp, Unknown
  Bacterial polypeptide expressing nucleotide sequence isolated from the Sargasso Sea
atgtcagaaaacttgcaaaagagcataagcccaaaaattattatttgtggtggcagcgcttatcccaggtatattgagtttgagatttttagtgaaattgctaaggaggttggtgcttttttaatggctgatattgctcatccaagtggtttgattgcagctggtgttcatccatctcctgttccttattgtgatgttattactagtactacacataaaacacttagaggtcccagaggtggaatcataatgatgggaagggacaaagaaaatacttggggtaaaattgccctaaaatctggtcgtgttaaaatgatttcagagttattagactcctcagtgatgccaggtatgcagggcggtccattaatgcatattatatccgccaaggccattgcatttggtgaggccatgaaagatgaatttaaagtctatgctaataagattgtagaaaatgcaaaattaatgtcacaagagttgattaatatggattataatatcatatctggtggtacagatactcatgtgattttagttgatttaacaagcaaaaatatttctgggaaagctgcagagagggctcttgaaaaggctggtatcacggtaaataagaatatggtaccgtttgataaaaaaagtccatttattacaagcggaattcgtattggtactcctgcaattaccacaagagatatgggcgtacaagaaatgaaagagattgcaaagttaattgatagggtaattattgatcctgaaaatgatgaaaatattcagaaagtaaagtctgaggttgaagaactttgtgagtcatatccaatctacaaagaattttcaaattaaa

SEQ ID NO: 228132 - DNA, 898 bp, Unknown
  Bacterial polypeptide expressing nucleotide sequence isolated from the Sargasso Sea
atctcaacctcactcaggcgcacaagcaaatggagcagtatttttagctttataaaaccaggggacacattcatgggtatgagcttagattctggtggtcatataacacatggcctaaaaatatctatgtctggaaaatggtttaatgcaatttcctatgatgtagataaaaaaactgagcttcttgattatgatgtaattgaaaaaatggctttagaacataaaccaaagttaattattgctggagctagcgcttattcacgagttattgactttaaaaggtttagagaaatttgtgataaaattgatgcgtacctaatggttgatatggcacatttttctggtctagtcgctggtaaaggctatcctaatcctgttgatcatgcgcacgtagttacatcaactactcataaagtatttagaagtgcaagaggtggaattattttaacaaatcatgaagatcttgctaaaaaatttaatacagctgtctttcctggatatcaaggtggaccattaatgcatataattgctgcaaaggctgtaggatttcttgaagctttaaaaccagaatttagagaatacataagttcagttttagcaaatgctaaaatgttagcagaaacattaaaaaataatggtttcaaaatttattctggtggtactgacacacatttaatgttagttgatttaagaccttttaatgtaaagggtaatatagctgcggatagtttatcaaaagcaaatattacatgtaataaaaacggaatacctttcgatacagaaagcccaatggttacatcaggaattcgattaggatcacaagcagcaactactagagggtttggtttaaaagaatttgaaaaagttggtaatttaattactaaagtcattaaaggat

SEQ ID NO: 228133 - DNA, 580 bp, Unknown
  Bacterial polypeptide expressing nucleotide sequence isolated from the Sargasso Sea
tatgtctagtgaaaaaaattatttgaacgatagttataaaagtttctttgaagacagtttgtctgtaaaggatccagagctttataaagctattaaagatgaattaatcagacaacagcagcatatagaactaatcgcttctgaaaatatagtttctcaagcagtattagaagcacaaggttcagttttaaccaataagtatgcggaaggctatcctggtaaaagatattacaatggttgtgagcatgttgatgttgcagaaaatcttgcgattgaaagattaaaaaaattatttaattgtaaatttgctaacgctcaaccacattcaggggctcaagcaaatggtgctgtatttttagcattgttaagcccaggggatacatttatgggtatgagtttaaattcaggtggtcatattactcacggattaaaaatttcaatgtctggtaaatggttcaacgcaataggatatgatgttgataaagagtcggaattgattgattatgataatgttgaaaaactagctttagaacacaaacctaaattaataattgcaggtggaagtgcttattctagagta

SEQ ID NO: 228134 - DNA, 795 bp, Unknown
  Bacterial polypeptide expressing nucleotide sequence isolated from the Sargasso Sea
gttcagccgcactcaggctcgcaggcaaatgcggcggtttacatggcgttgctctctccgggcgataccattttaggtctcagcctcgatcacggtggtcacctgacacacggtgcaaagccgaatttctccggtaaattgtacaacgctgtgcaatacggtattaacccggaatccggtgaaattgactatgaacaggttgcagagctggcaaaaacccataaaccaaaaatgattgttgccggcttctcggcgtattcccgcatcgttgactggcagcgtttcagagatatcgccgacagtgtaggtgcgtggttaatggtggatatggctcatgttgccggcctggtggccgccggtgtgtaccccaaccctgtgaaagcggcacatgtggttaccaccactacccacaaaacattgcgggggccgcggggagggttaatcctctgtcagtctgcccctgaactggaaaagaaattcaattcattgatttttccgggcattcagggcggtccgcttatgcatgttattgcagccaaagcggtggcgttgaaagaagccatgtctgacgactataaggtgtatcagcaacaggtggtagacaacgccagagcgatggcagaagtcttcattgagcgtggctttgatgtggtatccggcggcacagataaccacatgtttctgttgagcctgatcagcaagggcatgaccggtaaagcagccgatgcgttgctgaacagtgtgaatataaccgttaataagaacacggtgcctgatgatccccagtctccattt

SEQ ID NO: 228135 - DNA, 778 bp, Unknown
  Bacterial polypeptide expressing nucleotide sequence isolated from the Sargasso Sea
ttttttgataataatttatcaaatacagatcctgatttatttaaatcaataaaacaggaaatagaaagacagcagcagcatattgaattaattgcatctgaaaatattgtttctaaagctgtgcttgatgctcaaggctcaataatgacaaataaatatgcagagggttatccggcaaaaagatattatggtggttgcgaatttgtcgatagagcagaagaactagctctagaaagagttaaaaaattatttaatgcaaaatatgctaatgtacagcctcactcaggagctcaagcaaatggagcagtatatcttgcacttttaaaaccaggagaccctatacttggtatgagtttaaattcagggggtcatttaacacatggtgccaaagtctctctttctggaaaatggctaaattcatttcattacgaggttaacaaggaaacaggcttaattgattatgaaaatgttgaatcattagcaattcaacataagccaaaaattataattgctggaggtagtgcttattctagaattattgattttaaaaaatttaaagacatagcaaaaaaagtagatgcttatcttatggttgacatggctcatttttctggactggtggcaggcaaaggttatccaaatcctatagatcacgctgatgttgtcacttcaactacacataaagttttaagaggtgctagaggtggtataatactaactaacagagaagatatatttaaaaagataaactctgctgttttccccaggatatcaggga

SEQ ID NO: 228136 - DNA, 882 bp, Unknown
  Bacterial polypeptide expressing nucleotide sequence isolated from the Sargasso Sea
gcttctgaaattttgtttcagaccagttatggctgctgctggaagtgttttaacaaacaaatatgctgaaggattacctggaaaaagatattatggtggatgtgaagttgttgatgaaatagaagatatagcaagaaacagattaaaaaaattatttggagcaaattgggtaaatgtacagcctcactctggagctcaggcaaatgctgcagtaatgttaggaatattaaatccaggagataaaattttaggattcgatttagcacacggaggtcatctaacccatgggtctaatgtcaacttttcaggaaaaatatattcttcatgtttttatggggtaaaaaaaaacaatggtctactagactataatcaacttgaaaaagttgcttttaaagaaaagcctaaattaataatatgtggagcatcatcttatagtagagactgggattacaaaaaaattagagaaatagctgattcggttaatgcaattttgctggcagatatagctcacccatctggtttaattgcaagggggttattgaatgatccattagatcattgccacattgtaacttcaaccactcacaaaacactaaggggacctcggggtggaatcataatgatgaggaaagattatgacaacccacttggactgaaatctcccaaaggtaatttgaaatctttatcttcagttctagactcggccgttttcccgggtacacaaggtggtccattagaacatatcattgcagcaaaagcggtttcttttgaagaagctttatccgaaaattacatgaaatatatattacaggttaagaaaaatgctaaaaccatggcagagtctttaattgaaaaaaattataatattatttcaaatggaac

SEQ ID NO: 228137 - DNA, 664 bp, Unknown
  Bacterial polypeptide expressing nucleotide sequence isolated from the Sargasso Sea
tatggctcatttttcaggccttgttgctgccgaggagtatccaaatccattagaatatgcagatgtagtaacttctactactcataagactattcgaggagcaagaggaggaatgattttatcaaacaatttagagttgggtaaaaaatttaattctgcagtatttcctggttatcaaggcggcccattgatgcatgtaattgctggtaaagctgtagcttttggcgaagcactaaaaccagaatttaaggaatatattaaacaagtaataacaaacgccaagatattaagtgatactcttgttagcggaggattaaagattgtttctggtggaactgatacccatttaattctagtagatttaactccaatggatttaacaggtgattctgctcaaactagtttggaagcagcaaatataacatgtaataaaaatggaataccaaaagacccgaagccacctaaaattacatcgggcattagacttggaacaccagctgcaacaacaagagggtttaaggaaaatgagtttaagcttgtaggcgaactaatacttgaaacacttgttggcttaaaaagcaatccaactgataacagcaatgtagaaaaagctgtaaaagaaaaagtaattaatttgtgcaaagagtttccaatttatagttag

SEQ ID NO: 228138 - DNA, 946 bp, Unknown
  Bacterial polypeptide expressing nucleotide sequence isolated from the Sargasso Sea
atttacagcattagtacaacctggcgacacaattttagggatgtcattagacgcaggtggtcacctgacacacggtgcaaaaccaaatcaatcaggaaaatggtttaatgccgtacagtatggtgttagaaaacaagataacttgatcgactatgatcaaattgaggaactggcaaaagaacataatccgaaactaattatcgcaggcggatcggcaatacccagaacaatagattttgaaaagatcagaagcatcgcagatagtgtaggggcttacgttttagcggatgttgcacactttgccggacttattgctgctggcgaatatccatcgccatttccccactgccacgttgcaactacaacgacacataaaacgctccgtggtcctcggggaggcatgatcctcacgaatgatgctgacttagcgaaaaaatttaattctgctattttcccaggtattcaaggtggtccattaatgcatgtcatagcagcgaaggctgtcgcttttggagaggcactcaggccagaattcaagcaatatatcaaacaggtaattatcaatgcacaagcattatcagacgagctaataaagggtggtttagacactgtaacgcatggtactgacacacatgttttgttagttgatttgaggccgaagggtgttaaaggaaatacaactgaaaaagctctggaacgagcccatattacttgcaacaaaaacggtgtaccttttgatcctgaaaaaccagccgtcacctccggtattagattgggatcgccagcaggaacaacgcgtggctttgacgaaaatgatttccgccaaataggtcgatggattattgaggtcgttgagggtttggccaagaacggcgaggaagggaattccgctgttgaggaaaaggttaaatcagaagtcgctactctttgcgccaaatatcctctt

SEQ ID NO: 228139 - DNA, 868 bp, Unknown
  Bacterial polypeptide expressing nucleotide sequence isolated from the Sargasso Sea
gatacttttatgggaatgagtttaaattctggtggtcatattactcacggattaaaaatttctatgtctggaaaatggtttaatcctataggttatgatgttgataaagaatcagaacttatcgattatgatcatgttgaaaaactagctttagagcataaacccaagcttataatagccggaggaagcgcttattcaagagtaatagattttaaaagatttagagaaatatccgataaagttggagcatatcttatggtcgacatggcccatttttcaggtttagttgcgggaaaaggttatccaaatccatgtgaacatgcacatgttgtaacatcaactacacataaagtttttagaagtgcaagaggtggtattattttaacaaatcatgaagatatagctaaaaaaattaacactgcagtttttcctggttatcaaggtggacctttaatgcatattattgcagcaaaagcagcaggttttcttgaagcattaaaacctgaatttaaagattatataaaatctgtattagctaatgcaaaaattttatccgaaactttaaaaaataatggttttaaaatttattctggtggtactgacactcatttaatgcttgtagatttaagaccttttaatgttaaaggaaatttagcagcagaaagtttatctaaagcaaatataacatgtaataaaaatggtattccttttgactcggaaagcccaatgattacatctggaattagacttggatctcaagcggcaacaacaagaggctttggttcaaaagaatttgaaaaagtaggcgaacttaatacaaaagtaattgatggattgtcaaaaaaccctaatgataatagtataatga

SEQ ID NO: 228140 - DNA, 556 bp, Unknown
  Bacterial polypeptide expressing nucleotide sequence isolated from the Sargasso Sea
aattttaaccaatcacgaagatctagcaaaaaaatttaatacagctgtatttcccgggtatcagggcggaccacttatgcatgtaattgctgctaaagctgcaggatttttagaggcattacaaccagaatttaaagattatattcagtcagttttagcaaatgctaaaatgttagctgaaactttaaagaataatggttttaaaatttattcagatggaacagatacgcatttaatgctagttgacttaagaccatataatgtcaaaggtaatttagcttcagagagtctttctagggcaaatatcacttgtaataaaaatggaataccttttgatacagaaaaaccaatgattacctctggtataagattaggaacacaggctgcaactactagaggatttggtttaaatgaatttaaaactgttggagagctaattactaaaacattaaaaggattatccgaaaatcctactgataatagcaaaatagaaaatgaagttaaaaatgaggttattgatttaacatcatcgtttccgatatataaaaatttatag

SEQ ID NO: 228141 - DNA, 724 bp, Unknown
  Bacterial polypeptide expressing nucleotide sequence isolated from the Sargasso Sea
gaaaaaatttagagaaatagctgataaagtaggagcatattttttagttgatatggctcactactccggtttggtggctggtaaacaatatccaaatccgattgagcatgcccatgtagtaacttcaacaactcacaaaactctaagaggtgcaagaagtgcaatgattttaactaatcatgaagatttatataaaaaaattaattctgctgttttccctggtttacaaggtggtccactaatgcatgtaattgcggctagagctgtttgctttggtgaagcacttaaacctgaattcgaagaatacattaaaaatgtaattgctagtgctaaagttatggcaaaaactttagttgatagaggatttagaattgttacaggaggcacagattcacatatagtttggttggacttgacaccaaaaggtttaactggcgataaagctgaaaaaattttagaagaagttggattggcatgtaataaaaatgcaattccttatgaccctaatccaccaaaaataactagtggacttagatttggaactgccgctgctacgacaagaggttttaatcagaaagactttgaacaggttggaaatatgattgctgatattttggatagtcttttacttgaagaaaatgaaagaagtgaagtttttaataaaacaagaaaagatgtaattgaactttgcaaaaaatatccaatttatagtgaggcattttaa

SEQ ID NO: 228142 - DNA, 784 bp, Unknown
  Bacterial polypeptide expressing nucleotide sequence isolated from the Sargasso Sea
ggtaagatcactagcaatagaacatcaacctaaattaataattgcaggcttttccgcttttacaggaataattgattggaaaaaatttagagaaattgccgatgagaccggagcctattttcttgttgatatggctcatgtatctggcctagttgctgctgatctatatccatctccagtaccatatgcagatgttgttacgtcaactacacataaaacattacgaggacctagatcaggaattattcttgcaaaggcaaatgaagaaattgaaaaaaaacttaactctgctgtatttccaggttctcaaggcggtcctcttatgcacgttgttgctgcaaaagcactatgctttaaagaagctttagatccagaatttaaaatatatataaaacaggtcatggataatgcaaaaacaatggctgaaacaataatgtcaaatggaatagacattgtgtctaatggaaccgagaatcacataatattagttgatcttagaagtaaaggaattacaggaaaagatcttgaaagagttcttggttcagtcaatataacagtgaataaaaattcagtaccaaatgatccggcatcaccatttgtgacttcaggaataagaattggtactccagcagctacaactagagggtttaaagaaaaagaaattattcaagtggccaattggatatcagatattattaataattttgataatgaagaattacaaaagaccatcaaggaagaagtccacaaacttacaactaattttccagtatataatctatag

SEQ ID NO: 228143 - DNA, 592 bp, Unknown
  Bacterial polypeptide expressing nucleotide sequence isolated from the Sargasso Sea
gatgtagtaactgcaactactcacaaagctttaagaggtccaaggggtggattgattttatcaaaagaggaatttggaaaagatattgataaaaatattttccctggcgcacaaggtggagctattaataatcaaattgcagcaaaagcggtctgctttaaagaagctatgtcacaagaatataaagattatgcacagcaagttataaataacgcaaactctttagcagagtcctttattggtgaaggtttgcgagtcgtaagtggaggtacttcaaaccatttagttttggttgatacgggaagtgtagatgatgagcttaccgggaaggaagcatcgaacctcttaaatgatatgggtatcactttgaatagaaatgcaataccatttgacacaaggtctccattcattacttcagggataagaatgggtactccatgcataaccacctgtggcatgaaggaagaggagtctactaaagttggttacctaatctcggaagcattgaagcagagagacaatcaagatcaaataaaggaattgcaggaagaaatcagaagtcttgcaaaacaattccaaccatatgaatagt

SEQ ID NO: 228144 - DNA, 625 bp, Unknown
  Bacterial polypeptide expressing nucleotide sequence isolated from the Sargasso Sea
cgattatgcgcatgttgtaacttcaactactcataaagtgtttagaagtgcaagaggtggtattattttatctaatgatgaggatttaggaaaaaaatttgatactgctgtctttccaggatatcagggaggaccgttaatgcacataatagctgcaaaagcagccggtttctttgaggcgctaaaaccagaattccaaacttatattaaaaatgttttagctaatgcaaaaatattagctgaaactttgaagaataatggtttcaagatttattcaggtggaacagatactcacctaatgttagttgatctaagaccttttaatgtaaaaggaaatatagcagctgagagtttatgtagagctaacataacgtgtaataaaaatggaataccttttgatacagaaaaacctatgatcacctctggtataagacttggctctcaagccgctacgacaagaggttttgatttaaaagaatttgaaaaaattggtgaattgataactaaagtaattaaaggtctttctaaaaatccagacgataatagtgaagttgaaaatgaagttagaaatgaagttgtcagtttatgttctaattttccaatttataaaaatttgaataaatga

SEQ ID NO: 228145 - DNA, 823 bp, Unknown
  Bacterial polypeptide expressing nucleotide sequence isolated from the Sargasso Sea
tatgtcaaaagaaacaaattatatcgatacaagttatcaaaacttttttgaaaaacatctttctgaaacagatcccgctttgtttaaagcaattaatgatgaattagtcagacagcaaaatcatatagaactaatcgcatctgaaaatatagtttcccaagctgtcttggatgcccaaggttctgttttgacaaataaatatgcagaaggttatcctggtaaaagatattataacggatgtgagcatgtagacgttgctgaacaattagctctagaaagaataaaaaaactttttaattgtaaatatgcaaatgtacaaccccattcgggagctcaagcaaatggagcagtatttttagccttattgaaacctaacgatacatttatgggaatgagtttaaattcaggaggtcatattactcatggattaaagatttctatgtcaggaaaatggtttaatgcaattagttatgatgtagataagaattctgaactaattgattatgacaatgttgaaaaattagctttagaacataagccaaaacttattattgcaggaggtagtgcttattctagagtaattgattttaaaagatttagagaaatagctgacaaagttggagcttatttaatggtagacatggctcatttctcaggcttagttgcaggcagaggttatcctaatccatgtgattatgctcatgttgtaacatcgacaacacataaagtttttagaagtgcgagaggcggtataatactttcgaatgatattgatcttggtaaaaaatttgataccgctgtttttcctggttatcaaggtggt

SEQ ID NO: 228146 - DNA, 715 bp, Unknown
  Bacterial polypeptide expressing nucleotide sequence isolated from the Sargasso Sea
atggatttttttacaaaaccactaaatgagatagatcaagagatttccttagcaattgatggagaattaaaacgtcagcaaaatcaaattgaactgattgcctctgaaaatattgtttcgaaagctgttttggaagcgcaaggttcagttcttacgaacaaatacgcagaaggatatgcaagcgcacgatattatggaggttgcgaatttgttgacattgcagaagatttggccattaaacgacttaaagatctttacaagtgtgagtacgcaaatgttcaacctcattctggagctcaagctaatggagctgtgcttttagctctcattaaacctggtgatacaattttaggaatgagccttgatgcaggtgggcatttaactcatggatctgctccatctttatcaggtaaatggtttaatgctcttcagtatggcttagatgatcagggattaattaattatgatgaagttgagtcaatagctttagaatataaacctaaaataataattgctggcggaagtgcttattctcgaattatagattttaaaaaatttagagaaattgctgacaaagttgatgcctatttgcatgttgatatggcacatttttcaggtcttgttgctgctggagagcaccctaatcctcttgaatatgcagatgttgttacttcaaccacgcataaaacaattagaggagcaagaggtggcatga

SEQ ID NO: 228147 - DNA, 829 bp, Unknown
  Bacterial polypeptide expressing nucleotide sequence isolated from the Sargasso Sea
ttcatttaattatgatgttgataaagaaacaggtcttattgattacaatcaagttgaggatttagcgaaacaacataagccaaaacttattattgctggtggcagcgcttattcaagaattattgatttcaaaagatttagagatatagctgataaggtgagcgcttacttaatggttgatatggcacatttttctggattagtagcaggaaaaggtcatcctaatccaattcaatatgcagatgtggttacatcaactacacataaagttttaagaggcgcaagaggtggaattattttaacaaacagagaagatataataaaaaaagttaattcagctgtttttcctggttatcaaggcggaccgttaatgcatataatcgctgctaaagctgtagcttttcaagaagctttacaaccaagctttaaaaattatattaagtccgtgcttgaaaatgcaaaaattttatcagaaactttaaaaaataatggctttaaaattttttctggtggaactgacacacatttaatgttggttgatttaagaccttttaatgttacaggtaaagacgctgagtctagtctaggaagagctaatatcacatgtaacaaaaatggtatcccgtttgatactcagaaaatgactattacatctggtatcagattagggacgcaggcagctacaacaaggggttttggtttagatgaatttaaaaaagttggtgaattaattacaaaagtaataaatgggctgtctaaaaattctgaggataacagtttaattgagaacgaagttagaaatgaagttataaaactttgtacaaaattt

SEQ ID NO: 228148 - DNA, 398 bp, Unknown
  Bacterial polypeptide expressing nucleotide sequence isolated from the Sargasso Sea
tatgtcaagtgaaacaaaatatttaaatagtgaatacaaagacttttttgaaaaaagtttattagatagtgatccagaaatttacaaagctattaatgatgagttagtaagacaacagaatcatatagaactaattgcatctgaaaatattgtatctcaagcagtccttgaagctcaaggttcagtattgacaaataagtacgctgaaggctatccaggtaaaagatactataatggttgtgagcatgtggatgtagctgaacaattagctatagatagacttaaagaattatttaattgtaaatttgctaacgctcaacctcactcaggggcacaggcaaacggcgctgttttcttagctttgttaaaacctggtgatacttttatgggaatgagtt

SEQ ID NO: 228149 - DNA, 352 bp, Unknown
  Bacterial polypeptide expressing nucleotide sequence isolated from the Sargasso Sea
atgtcgacagctactaaatttactaaattaaaaaatattttttttgagagcaatttatctgaaactgataaagaacttaatgactcaattaaaaaggaatttgttcgacagaatgagcatattgagttaattgcttctgaaaacatagtttctaaagccgttcttggtgctcaaggatcagttttgacaaacaaatatgctgaaggatatgtgggaaaaagatattacggcggttgtgaatttgtcgacatatcagagaaattagcaattgagagggcaaaaaaattatttaattgtaatttcgcaagatgttcagcctcactcaggcgctcaagccaatggtgctgtttat

SEQ ID NO: 228150 - DNA, 598 bp, Unknown
  Bacterial polypeptide expressing nucleotide sequence isolated from the Sargasso Sea
ttcaacaacccataaggtgtttagaagtgcaaggggaggaataattttaactaatcatgaagatcttgctaaaaaatttaatacagctgtttttcctggttatcaaggaggacctttaatgcacatcattgcagcaaaggctgcaggctttctcgaagcattacagccagaatttcaagattatattaaatctgttttagcaaacgctaaaatgttggcagaaactttaaaaaataatggatttaaaatatattcagacggaacagacacacatctgatgttagttgatttaagaccttacaatgtaaaaggtaatcttgcggcagagagtttgtctagagcaaatattacatgtaacaaaaatggtattcctttcgatacagaaaaacctatgattacctcaggaattagattaggaacacaagctgctacaacacgtggatttggtttaagtgaatttaagaccgtaggagaattgatcacaaaaactctaaagggattatcagaaaatccaacagataatagtaaaattgaaaatgaagtaaaaaatgaagttattgctttaacttcgtcatttcctatatataagaacctgtag

SEQ ID NO: 228151 - DNA, 918 bp, Unknown
  Bacterial polypeptide expressing nucleotide sequence isolated from the Sargasso Sea
agcagttttagatgcacaaggttctataatgactaataaatacgcggaaggttatccttcaaaaagatattatggtggatgtgaatttgtggacaaggctgaggaattagctcttgaaagagtaaagaaattatttgatgcaaaatttgcaaatgttcaaccgcattcaggagcacaagctaatggcgctgtatatcttgcgcttttgaaacctggtgacccaatacttggtatgagtttaaattctggtggccatttaacacacggagcaaaagttgctttatcaggaaaatggttaaattcatttcattatgaagtagatgaagaaagcggattaataaattacgataaagtcgaagagttagcaataaaacataaaccaaaacttataatagctggtggtagcgcttattctagaattattgatttcaaaaaatttaaagaaatttctaaaaaagttaatgcttaccttatggtcgatatggctcacttctcaggtctagttgctggcaaaggatatccgaatcctattgaacatgctgatgtagtaacttctactacacataaggttctgagaggtggtagaggaggaattattttaactaatgatgaaggtttatttaaaaaaattaactcagctgtatttcctggttatcaaggaggtcctttaatgcatgtaatagcagctaaagctgtagcttttcaagaagctttacaaccatcctttaaagaatatataaaggcggttcttgctaatgcaaaaattttatctgaaactttaaagagtaatggatttaaaattttttcaggaggaacagatacacatttaatgttagtagatttaagaccatacaaagttactggtaaagatgccgagacaagtttgtgtaaagcaaacattacatgcaataaaaatgg

SEQ ID NO: 228152 - DNA, 362 bp, Unknown
  Bacterial polypeptide expressing nucleotide sequence isolated from the Sargasso Sea
taaaatttactctggtggcacagatactcatttaatgttagttgatctaagaccattcaatgtgaggggaaatgtagcctcagaaagcctgtgtagagcaaacataacttgtaataaaaatggaatcccttttgatactgaaaaacctatgatcacatcaggtattaggcttggttctcaagcggcaacaacaagaggatttggtttaaaagaatttgagaaagttggtaatttaatcacaaaagtaatagaaggtttgtcaaaaaatcctgaggataatagtaaaattgaggaagaagttagaaacgaagttatagacttgtgctctcatttcccaatttacaaaaatctcaatagatgat

SEQ ID NO: 228153 - DNA, 655 bp, Unknown
  Bacterial polypeptide expressing nucleotide sequence isolated from the Sargasso Sea
catggctcatgtatctggacttgtcgcagcaggtttgtacccatctcctgttccatatgctgatgttgttacatcaacaactcataaaacattacgtggtccaagatcagggataattcttgcaaaagcaaatgaagaaatcgaaaaaaaacttaattctgctgtttttccaggatcacaaggtggtcctttgatgcatgttgttgcagcaaaagcaatatgttttaaagaagctcttgatccagagtttaaaatttacatacaacaagtaatggataacgcaaagaccatggctaaaacattaatgtcaaatggcattgatattgtaagcaacggaacagaaaatcatatcattttagttgatcttagatctaaaggcattactggtaaggatcttgagagagtgcttggctctgtaaacattactgttaataaaaattctgtgccaaatgatccagcatctccatttgttacatctggtataagaattggaacacctgctgctaccacacggggttttaaagagaaagaaattattcaagtaagcaattggatatcaaacattattaatgactttgaaaatgaggatttacaacaaagcattaaagaggaagtgcaaaatctgacaagtgattttccagtatataatgtataa

SEQ ID NO: 228154 - DNA, 499 bp, Unknown
  Bacterial polypeptide expressing nucleotide sequence isolated from the Sargasso Sea
cggacctttaatgcatgtaatagcatctaaagctgccgcattccaagaagcacttaaacctgaatttaaagaatacattaaatctgtgcttgctaatgctaaaatcctatctgaaactttaaagaataacggtttcaaaatattttctggtggtacagacacacatctgatgcttgtagatttaagacctttcaaagttacaggaaaagcagccgaagttagcttatgtaattcaaatattacttgtaataaaaatggtattccttttgatactgaaaaaatgacaattacatcaggtattagacttggctctcaagctgcaacaactaggggttttggattaaatgaatttaaaaaagttggtgaattaattactaaagttgttaaaggtctttccaaaaacccagatgacaatagtaaaattgagtcagaagtaaaaaaagaagtaattgatctctgttcaaattttcctatatataatcatttgtttaaaaactaa

SEQ ID NO: 228155 - DNA, 466 bp, Unknown
  Bacterial polypeptide expressing nucleotide sequence isolated from the Sargasso Sea
catgtaatcgcagcaaaagccgtgtgcttcaaagaagcaatgagcgaggaatacaaagactaccaggctcaggtagttaagaattcgcaggcaatggccagcacgttcatcgagcgtggcattaacgtcgtttctggcggcactgatgatcacctgttcctggttgacctgatcggtaaagagtacacaggtaaggatgctgatgcggcacttggtcgcgctaacatcactgtgaacaaaaactctgtaccgaacgaccctcgctcgccgttcgtaacctctggtctgcgtatcggtagccctgcgatcaccagccgtggcttcaaagaagagcaggctacgcaactggcaggttggatctgcgacattcttgatggccttgagaaaggtgaatctgaagccgttgaagcatcagtaaaagaaaaagttgtcgccctttgcgaacagttccctgtgtacaaataaa

SEQ ID NO: 228156 - DNA, 217 bp, Unknown
  Bacterial polypeptide expressing nucleotide sequence isolated from the Sargasso Sea
atgaatattcttcaaaatcttaaagaaagtgatccagtaatatccaatttcatcaactctgaaaaaaatagacaggaaactcatcttgagttaatcgcaagtgaaaattttgcatcaattgccgtcatgcaggctcaaggatcagttcttacaaataaatacgccgaaggattgcctcaaaaaagatattacggaggatgtgaatttgttgatgaaa

SEQ ID NO: 228157 - DNA, 912 bp, Unknown
  Bacterial polypeptide expressing nucleotide sequence isolated from the Sargasso Sea
atttgctaatgttcaacctcattcgggtgcacaagcaaatggtgctgtttatttatcattattaaaaccaggtgacactacattggctatgagcttaaattcaggtggtcacttaacacatggagctaagccagctcagtcaggaaaatggtttaacgcttttcattacgaagtgaataaaaatactggacttatagattacgaaagtgttgaaaaacttgctatagaaaataaacccaaacttataattgctggaggaagtgcatattcaagaattatagattttaaaaaatttagggatatttgtgataaggttggcgcttacttactagttgatatggctcacttttcaggattagtcgctggcggagcctatccaaatccaacacaatatgctgatgtagtaacttctactactcataaagttttaagaggaccaagaggaggaataattttaacgaacagagaagatttaataaaaaaatttaatagtgcaatatttcctggactacaaggaggtcctttaatgcacgtaatagcagctaaagctgtatgttttaaggaagctctttcaccagattttaaaaagtacacacaaaacgtaattaacaatgccaaagttctcgccgaaaaactaaatgaaagaggttttaagattttttctggaggtacagatactcatttaatgttaatagatttaagatcattcggtgttactggtaaagatgcccaggcctcattgggaagagctaatataacttgcaacaaaaatggaattccttttgatagtgaaagtccaatgataacatcaggcataagattaggaacaccggcttgtacgactagaggtttcggtactgatgaatttaaattagttggtgatttgatttataaagtaatagatggcttaag

SEQ ID NO: 228158 - DNA, 553 bp, Unknown
  Bacterial polypeptide expressing nucleotide sequence isolated from the Sargasso Sea
atgacttcatcaaaaagcgacactattttttctaataataactctataaaagagtacgataaggatttatggaaatcttttcataacgaatcgattagacaagaagatcatatcgaattgattgcatctgaaaactatgcatcaaaaagaattcttgaagcacaaggatctattcttacaaataaatatgcagaaggttatccttcaaaaaggtattacggtggatgtgaaaatgtagatattgctgaaaatcttgctattgaaagagcgaaagaactttttaaagctgactatgcaaatgtccaacctcattctggatcttctgcaaacgcagctgcttttttagcccttcttgagcccaatgatatgattttaggaatgagtcttgatcatggaggtcacttgacacatggtgctaaagttaatttttctggaaggaattataaaagtgttcaatatggactacatcctgaaacaaatgatattaattacgaagaggtaagattattagcaaaagaacataaaccaaaattaattattgcagggttttcag

SEQ ID NO: 228159 - DNA, 586 bp, Unknown
  Bacterial polypeptide expressing nucleotide sequence isolated from the Sargasso Sea
atgttcagccgcgatatgacaattgccggattcgatgatgcgctgtttgatgccatgcaaaaagaagtggcacgccaagaagcccacatcgaactgattgcttctgaaaactacgccagcccccgcgtactagaagcgcaaggcagccagctgaccaacaaatacgccgaaggctacccaggcaagcgctactacggcggctgtgaatttgtcgatatcgctgaaaacttggccatcgactacgccaagcagctgttcggcgcgacctatgtcaacgtgcagccgcactctggctctcaagccaacagcgctgttttccaagcgctggtcacaccgggcgacaccatcctcggtatgagcctagacgcgggcggccacctgacccacggtgccaagcccaacttctccggcaagcactacaacgccattcagtacggcctgaacgagcaaggcctgatcgactacgaccaagtcgcttccctggcccgtgaacacaagccgaaaatgatcatcgccggtttctctgcctactctcagattgtcgactgggcaaaattccgtgaaatcgctgacgaagtcggtgcct

SEQ ID NO: 228160 - DNA, 469 bp, Unknown
  Bacterial polypeptide expressing nucleotide sequence isolated from the Sargasso Sea
gatgcatagtttaaagcaaaatgatccagagttatacgatgtcttaaatagagaggctgagagagaagaattaacattagaactaatagcatctgagaatttcactagtaaggctgtaatggaaatggctggtggagttatgaccaataagtatgccgaaggataccctggtaaacgctattatggcggctgtgaggttgtggatgaagcagagaacattgcccgtgatcggttaaaaaaattatttggatgtgaatatgcgaatgttcagccacattccggttctcaagcaaatatggccgtatttatgacctgccttgaacctggtgatactattatgggtttagatctagcccatggtgggcacctaacccacggtagccatgttaatttttcaggtcagttatataaatctgtctcttatcacatatcaaaaacaaatggtcgagtagattttgacgaagttttt

SEQ ID NO: 228161 - DNA, 496 bp, Unknown
  Bacterial polypeptide expressing nucleotide sequence isolated from the Sargasso Sea
atgtctagtgaaaagagttatttaaatgatagctataaaagtttttttgaggatggtttatccgtaaaagatcctgagttatataaagctattaaagatgaactaataagacagcaacaacatattgagttaattgcttcagaaaacatagtttctcaagctgtattggaagcccaaggttcagtattaacaaacaaatatgcagaaggctatccaggtaagcgttattacaacggttgtgaacatgttgatgtcgcagaaaatcttgcaaatgatagattaaaaaaattattcaattgtaaatttgcaaactctcaacctcactcaggtgcacaagctaatggtgctgtatttttagctctattaagtccaggtgatacatttatgggaatgagtttaaattctggtggacatataactcacggtttaaaaatttcaatgtcaggtaaatggtttaatgcaattagttatgacgttgataaaaaatctgaactca

SEQ ID NO: 228162 - DNA, 823 bp, Unknown
  Bacterial polypeptide expressing nucleotide sequence isolated from the Sargasso Sea
atgacacttagtgagaattttttttctagtaacctagaacatgtagataaagatttatatcagagtatttcacaagaactttcaaggcaacagaaccaaatcgaattaatcgcttctgagaatattgtctctaaagctgtgcttgaagcacaaggctccattatgactaataaatatgccgagggttatagtgctaaaagatactatggtggttgtgagttcgtagacatagctgaaaacttagcaattgatcgtttgaaacaattgtatggatgcagttatgctaatgttcaacctcactcgggcgcacaagctaatcaagctgtatttttagcactgattaaaccaggtgacactattttaggaatgtctttagatgctggtggtcacttaacacatggttcaagaccaaatcaatctggaaaatattttaatgctgttcaatatggtataaatcctgaaacttccttaatagattatgatgaagttgaaagattggctattgaacataaacctaccttgatcattgctggtggctcagcttatccaagaaatatcgattttaaaaaatttagagagatagcagataaaattgaagcttatttactagttgatatggcacactattcaggtttagttgctgccaaagaatacccagatccattgccacacgcacatgtggtaacatctacaactcacaagactatcagaggtccaagagggggtatgatactttcaaatgatttagaccttggaaagaaatttaatagttctgtttttcctggtttgcaaggtgggccacttatgcatgtaattgcagcca

SEQ ID NO: 228163 - DNA, 847 bp, Unknown
  Bacterial polypeptide expressing nucleotide sequence isolated from the Sargasso Sea
cttattgactatgatacaatggaaaaaattgcaagtgttgaaaagccaaaaatgattatttgtggtgcttctgcctattcaagagattgggattacaatcgaataagatctatagcagactcaataggagcaattgtattagctgacatatcgcatccagcgggattaattgcaacgaatttactaaatgatccattagaaaaatgtcatatagtaacatcaactactcacaaaacattaagaggaccaagaggtggaatcattatgatgagacataattttgaaaacccatttggtattaaatggaaaaatggaaatttaagaacaatggcatcattacttgatgcagcagtttttccaggaactcagggaggcccattggaacatgtaattgctgcaaaagcagttgcttttggtgaagcattagaaccccaatataaaaactacacaaaagctgtaaaagaaaatgcccaaataatggctcaatgtttcgttgataaaggatacaaaatcatatcagggggaacagacaaccattcaatgctaattgatttgcgatctaaaaatattacagggaaaattgctgaagaatcactggagaaagctgagattacagttaataaaaatatggttccttttgatacagaatctccttttatcacatcgggaatgagagtcggcacatctgcaattacaactcgaggaatcaataaaaatgacatccctaatattgttgacttgatcaataatgttattgagaataatcaaaatgaagaaataatcaaacaaacaaagaataatgttcatgaattaatgagcaatttgcctttgtttaaatgggaatagt

SEQ ID NO: 228164 - DNA, 643 bp, Unknown
  Bacterial polypeptide expressing nucleotide sequence isolated from the Sargasso Sea
atgtcaagtgaaacaaaatatttaaatagtgagtacaaagacttctttgaaaaaagtttattagatagtgatcctgaaatttataaagctattaatgatgagttggttagacaacaaaatcatatcgaactaattgcatctgaaaatattgtatctcaagctgttctagaagctcaaggatcagtcttaacaaataagtatgctgagggctatccaggcaaaagatattataatggttgtgaacatgtcgatgtagcagaacaattagctatagacaggcttaaagaattatttaattgtaaatttgctaacgcacaacctcattctggagcacaggcaaacggtgctgtgtttttagctttgttaaaacctggtgatacttttatgggaatgagtttgaattcaggaggacatatcactcatggtttaaaaatttctatgtcaggaaaatggtttaatgcaattggatatgaagttgataaagaatctgaacttattgattatgataatgttgaaaaacttgcgcttgagcataaacctaaacttataattgctggtggtagtgcttattcaagagtaattgattttaaaagatatagagaaatagctgataaagttggagcatacctaatggttgatatgg

SEQ ID NO: 228165 - DNA, 597 bp, Unknown
  Bacterial polypeptide expressing nucleotide sequence isolated from the Sargasso Sea
ctgataaaatagattttgcggtatttccttcattgcaaggtggtccgcataataatgtaattgctgcattatctgttgcattaaaagaagcattaaattctgattttagagaatatattttaaaagtattaaataattctaaaaaattatctgaagagttaatgaatttaggatatattatttctactaatggaacagataatcatttatttttattggatttaaagaaggaaaatattactggtagtaaaattgaatatattttagaacaaatatcaattagtgttaataaaaatactcttaaaggtgataaaagtgcaatttcaccaagtggaattcgtattggattgtgtgcaatgacaacaaggggattaaaaactcaagattgtattttagttgctttatttatagatcgtgcaattcaaattgcaaaaaatattaaatgtaaaaaattaattgattttaaaaatgttgtaaatagatatttaaacaatcaatatcttgaagaagaaaaagatgatgcttataaattacaagaattaaaagaagaagtatatttattttctagaaagtttaaaaatattaataaattgtaaa

SEQ ID NO: 228166 - DNA, 847 bp, Unknown
  Bacterial polypeptide expressing nucleotide sequence isolated from the Sargasso Sea
agatattatgatggatgtgaacacgttgatgttgctgaaaatcttgcagttgatagattaaaaaaattatttagttgtaaatttgctaatgcacaaccacattctggagctcaagcaaacggagcagtttttttggcattactaaaacccggagatacatttatgggaatgagtttaaactcaggaggtcatataacccacggtttaaaaatatcaatgtcaggaaagtggtttaatgcaattggctatgatgttgataaagaatcagagctcatagattatgacaatgttgaaaaacttgctttagaaaataaaccaaaacttataattgcaggtggtagcgcttattcaagagttatagactttaaaagatttagagaaattgctgataaagtccaggcatatcttatggttgacatggctcatttttcaggtcttgttgctggcaaagggtatcctaatccaacagaatatgcacacgttgttacttctacaacgcataaagtttttagaagtgccagaggtggaattattttaactaacgatgaaaatttaagtaaaaaaataaatactgcagtatttcctggttatcaagggggtccacttatgcacatcattgctgccaaagcagctggttttttagaagcacttaaaccagattttaaagaatatataaaatcagtcttggcaaatgctaaaatcttatcagaaacattaaaaaataatggttttaaaatatattctggtggtacagatactcatttaatgcttgtagatcttagaccatttaacgtaaaaggaaatttaaacgctgaaagtttgtgcagagcaaatattacttgtaata

SEQ ID NO: 228167 - DNA, 536 bp, Unknown
  Bacterial polypeptide expressing nucleotide sequence isolated from the Sargasso Sea
gacattacataaaaaatttaatagtgcagtctttccaggtctgcaaggcggtcctttaatgcatgtaatatcagctaaagcagtatgttttaaagaagctttaagtaatgattttaaaatctacactaaaaatgtaatttcaaatgcaaaagttttaagtgaaactttggtaaaaaacaatttcaaaatattttcaggtggtactgatactcatcttatgcttgttgatttacgaccatataaagtaacaggtaaagatgctgaagaaagtttaggtcgagcaaatataacgtgtaacaaaaatggaattccttttgatacagaaagcccaatgattacttccggaattagattgggaacacccgccgcaactactagaggattcaaatctcaagaatttaaacttgtaggtgaattaattacaaaagttattaaaggtctatctgaaaaccctaaagataattcaaaaattgaaaaagaagttcaaaaagaggtgattgatctttgctcttcttttccgatttacagtgaataat

SEQ ID NO: 228168 - DNA, 682 bp, Unknown
  Bacterial polypeptide expressing nucleotide sequence isolated from the Sargasso Sea
tatgtcgagcgaaaaaagttatttaaacgatagttataagagcttctttgaggatagtttatctgtaaaagatccagaactttacaaagctattaaagatgaattaataagacaacaacagcatattgagttaattgcgtctgaaaatatagtatctcaagcagtattagaagcacaaggatcagttttaactaacaaatatgccgaaggttatcctggtaaaagatattataatggttgcgagcatgttgatgtagcagaaaaccttgctattgaaagattaaaaaaattatttaattgtaaatttgcaaatgctcaaccacactcaggtgcacaagctaatggagcagtgtttttagctttgttaagcccaggtgatacttttatgggaatgagcttaaattctggaggtcacattactcatggattaaaaatttcaatgtctggtaaatggtttaacgctataggttatgatgtagacaaagaatctgagttgatagattatgataatgttgaaaaacttgcattagaacataaacctaaactaatcattgcaggcggaagtgcttattctagagtaattgactttaaaagatttagagaaatagcagataaagttggcgcatatttaatggttgatatggcgcacttctcaggtttagttgcaggtaagggttatcct

SEQ ID NO: 228169 - DNA, 709 bp, Unknown
  Bacterial polypeptide expressing nucleotide sequence isolated from the Sargasso Sea
aatgtttagagaagttgcagaatcggtaggggcctaccttatgtcagatattgcacatcctagtggattggtcgcagcaggcgtccacccatcaccaatggaatattgcgatgtagtaacaagcacaacccacaaaacacttcgcggacccagaggtggtattattatgatgggtaaggatttcgaaaacaaatggggaaaagtcgcaccaaaatcaggtcgaactaaaatggtttctgaattacttgactcgagtgtgatgccaggtgttcaaggagggccattgatgcatatcattgcagctaaagctgttgcttttggcgaggccctagaacctgaatttaaaacatatgctcagaatgttgttgataatgccaaagcaatgggagaggaatttttagatttaggatatgatcttgtatctgggggtacagatactcatgttcttcttattgatctcacaaaaaaaggtatcaatggcaggcacgctgaaaatattctgggcaaggcgggtattgcactcaataagaacatggttccctttgatacccgaagcccgtttgtaacaagtggtataagagttgggactccggcattaaccactagaggaatgggaaaagcagaaatgagacaggttgtccagtggataaataaagctattgtagattcagaaaacgactctaatctaaatagtataagatcagaggta

SEQ ID NO: 228170 - DNA, 583 bp, Unknown
  Bacterial polypeptide expressing nucleotide sequence isolated from the Sargasso Sea
tactacgcataaaacgcttcgcggcgcgcgcggcggcatgatcatggcccggtccaatcccgagatcgagaagaagttgtcatcgctggtttttcctggtacccagggcgggccgctgatgcatgcgatcgccggcaaggcggtggccttcctggaagctttgcagcccgagttcaaagcgtacggtgagcaggtaatcgccaatgcccaagcgatggcgaaggcgtttattgatcgggggtacgacattgtctccggcggtacggtgaatcacttgttcctgttggacctcatcaacaagggcattaccggcaaggacgcggatgcggcgttgggtcgggcgaacattacggtcaacaagaattcggtccccaatgatccccaatcgccgttcgtgaccagcgggttgcgcatcggctcgccggccgggacgacccgcggattcaaagaggcggaaatggcgcaggtcgcagagtggatctgcgatattcttgacaatatgggagacgagtcggtcgtcgacgcgacccgcgagaaagtcaaggagctttgtgctcgcttccctgtgtatcgggaggcgtaa

SEQ ID NO: 228171 - DNA, 894 bp, Unknown
  Bacterial polypeptide expressing nucleotide sequence isolated from the Sargasso Sea
aggatgtgagtttgtagaccaggctgaggaaatcgctattgaaagagtaaaaaaactttttaattgtcagtatgctaatcttcaacctcatagtggagcacaagctaatcaagctgtcttccttgcacttcttcaacctcatgatactattttaggaatgtctcttgcttcgggcggccatttaacacatggagcaaaaccaaacttatcaggaaaatggtttaatgcagttcaatatggtgtaaaaaaagatggtaatgataaagatttaattgattatgatgaagttgaatctttggccttagaacataaaccaaaaatgattattgctggggcatctgcatatccaagagttatagattggaagcgttttagagaaattgcagataaagttggttcatattttcttgtcgatatggcacattattctgggcttgtagcaggtaaacaatacccaaatccaattgaacacgctcatattgtaacttcaacaactcataaaactcttagaggagcaagaagtgcaatgattttaacaaaccatgaggatttatataaaaaaattaattctgctgtttttcctggtttacagggaggtcctttaatgcatattattgctgctagagctgtatgtttcggtgaggcactaaagccagaatttgaaacatatataaaagatgtcattgctaacgcaaaagttatggcacagacacttgttgacagaggctttagaatagtaacaggaggaactgactcacatatagtatggttagatttgactccaaaaggtttaacaggtgacaaagctgaaaaaattctagaagatgttggtttagcttgtaataaaaatgctatcccatacgatcctaatccacccaaggttactagtggatt

SEQ ID NO: 228172 - DNA, 853 bp, Unknown
  Bacterial polypeptide expressing nucleotide sequence isolated from the Sargasso Sea
ctagggatgtcactagacgcagggggtcatctgacacatggtgcgaaaccaaatcaatcagggaaatggtttaatgcagtacagtatggcgttagaaaacaagataatctaattgattatgatcaaattgaagaactggcaaaagaacataatccaaaattgattatcgctggcgggtcggcaatacccagaacaatagattttgcgaggatcagaagcatcgccgatagtgtaggagcttacgttttagctgatgtagctcactttgctgggctgatagccgctggagaatatccatcgccatttccacattgccacgtcgcgactacaactacgcataaaacactccgaggtccacggggaggcatgatcctcacaaatgatgctgacttagcaaaaaaattcaattctgctatttttccaggtattcaaggtggcccattaatgcatgtcatagcagctaaggcggtcgcctttggagaagcattaaagccagattttaaccattatatcaaacaagtaattaagaatgctcaggcattgtcagacgaactaataaagggcggtttagacaccgtgacacacggtactgacacacatgttttgttggtcgacctaagaccaaagggtgttaaagggaatacatctgaaaaggctcttgaaagggctcatataacatgcaacaaaaatggcgttccttttgaccctgaaaaaccagcagtgacatctgggatcagattgggttcaccagctggaacaacccgtggttttgatgagaatgactttcgccagattggacgatggattattgaggttgttgatggtttggccaagaacggcgaggaaggtaatt

SEQ ID NO: 228173 - DNA, 952 bp, Unknown
  Bacterial polypeptide expressing nucleotide sequence isolated from the Sargasso Sea
caaagacaacagcaacatatagaacttattgcatcagaaaatattgtttctaaagctgttttagatgcacaaggatcaattttaacaaataagtatgcagaaggatatcccggaaaaagatattacggtggatgtgaatttgtcgataagacggaggaattagcactagaaagagttaaaaaattatttaatagcaagtatgcaaacgtacagcctcattcaggagcacaagccaatggagctgtatatctagctctattaaatcctggagacacaatacttggtatgagtctaaactcaggtggacatttaactcatggcgcaaaagtttcattatcaggaaagtggcttaaagcttttcattacgaggttgataaagaatctggccttatagattataaccaagttaaaaaactagctcttgatcataagccaaaaatattaatcgctggaggtagtgcatattctagaataattgattttaaaaaatttagggaaattgccgacagtgttaaagcatatttaatggtagatatggcccacttttctggtttggttgcaggtaaaggttacccaaaccctatagattatgctgatgttgttacatctacaactcacaaagttttaagaggtggaagaggaggaattattttaactaatagagaagatctaattaaaaaatttaattctgctgtattcccaggatatcaaggaggacctctaatgcatgtaatagcggcaaaagctgcagcatttcacgaggcgttacagcctagttttagagagtatataaaatctgtacttgcaaatgctaaaattctatcagaaacacttaaaaataatggtttcaaaattttttctggaggaaccgacactcatttaatgcttgtagaccttcgaccatttaaagtaacaggtaaagcagctgaaattagtttaggtaaggcaaatt

SEQ ID NO: 228174 - DNA, 449 bp, Unknown
  Bacterial polypeptide expressing nucleotide sequence isolated from the Sargasso Sea
gcgggtgacgttattctgggaatgagtctagatcatggaggccacctaactcatggagccaaagtaaatttttctggtaagacttatgaatcttaccaatatggattatcacctcaaactggagaaataaattataaagaggttgaagatctagccaaaaagcataaaccaaagatgattgttgctgggttttctgcatattctgggatagttgactggaagaagtttagagaaatttctgatgaagtaggtgcatatttattggtagatatggcccatgtttcaggattaatagctgctgacctctacccttcccctgtaccatatgcagatgtagtaactactactacacataaaacactcagaggaccaaggggaggtttaattttagctaaagaaaatgaagagattcaaaaaaaactaaactctggtattttccccggaactca

SEQ ID NO: 228175 - DNA, 735 bp, Unknown
  Bacterial polypeptide expressing nucleotide sequence isolated from the Sargasso Sea
aatgtcaacagttactaaaataagaaaaacacctaataatttttttgaacaggatttaaaagattccgataaagaattatttaactcaatatcgaaagaattcataagacaaaaaaatcatatagagctcatagcttcagaaaatattgtatctcgagcagttttagaagctcagggttcagtactaacaaataaatacgctgaaggatattctggaaaaagatattacggcggatgcgagtatgtagatatttcagaaaatttagctatagaaagagcaaaaaaacttttcaactgtaagtttgcaaatgttcaacctcattcaggagcacaagctaacggtgccgtatatttggctttaattaaaccaggagatacaatactaggtatgagcttaaattctggaggacatctaacgcatggtgctaaaccagctcaatcaggaaaatggtttaatgccgtacattacgatgtaaaaaaagactcaggtttaattgactatgaaaatgttgaaaaactggcaattgaacataaaccaaaattaatcatagctggaggaagcgcttattcaagagttattgagtttaaaaaattcagggagatttgtgataaagttggagcttatctacttgtggacatggctcatttctcaggactggttgccggcggtgcttatccaaatcctttagactatgctgatgtagttacctcaacaacacacaaggtattgagagg

SEQ ID NO: 228176 - DNA, 493 bp, Unknown
  Bacterial polypeptide expressing nucleotide sequence isolated from the Sargasso Sea
aattttccctggcattcagggtggcccacttatgcacgttattgccgcaaaagcggtagcgcttaaagaagccatgacagcagagttccgcgcttatcaaaagcaggtagttattaatgcacaagctatggctgaggtgtttatgaagcgtggctttgacgtagtatctaatggaaccgacaaccacatgttcctgctaagtcttgtaagcaaaggaatgacagggaaagaagccgacgcgatattaaatagcgtgaatataacggtaaataagaacacagtacccaacgacccgcagtcgccattcgttacaagtggtattcgaattggcacacctgcggtcacttcacgcaattttagtgaagaagactgtggtcaattagcccattggatttgtgatgtgttaacagcgccagaaggcaatgcagtagtacagcgagtgatagataaagtggcaacgctaacagcggctcgccccgtttacactaagtaa

SEQ ID NO: 228177 - DNA, 522 bp, Unknown
  Bacterial polypeptide expressing nucleotide sequence isolated from the Sargasso Sea
tatgacaaagacaaataaatacatttctgataattacggaaacttttttgataatgatttatcgacctctgatccagatttgtataaatcaattaaacttgaactaaaacgtcagcaggaacatatagagttaattgcttcggaaaatatagtttcaaaagcagttctcgatgcacaaggttcagttttaaccaataagtatgctgagggatatccatcaaaaagatattatggtggatgtgaatttgttgacatagcggaaaatttagcacttgaaagagtaaaaaaactctttgagtgtaattatgctaatgttcaacctcattcgggtgcacaagctaacggagcagtatatcttgcgttattaaaacctggtgacactatacttgggatgagtcttaattccgggggtcacttaactcatggtgcaaaagttgctctttcaggtaagtggttaaattctcatcattatgaagtggataaaagaacagggttaattgactatatgcaagtagaaaaaat

SEQ ID NO: 228178 - DNA, 231 bp, Unknown
  Bacterial polypeptide expressing nucleotide sequence isolated from the Sargasso Sea
cggtaaataagaacacagtacccaacgacccgcagtcgccattcgttacaagtggtattcgaattggtacacctgcggtcacttcacgcaattttagagaagaagactgtgctcaattagcccactggatttgtgatgtgttaacagcgccagaagacaatgcagtagtacagcaagtgatagataaagtggcaacgctaaccgcggctcgccccgtttacaccgagtaaa

SEQ ID NO: 228179 - DNA, 604 bp, Unknown
  Bacterial polypeptide expressing nucleotide sequence isolated from the Sargasso Sea
tttgctgacatagttacgactacaactcataaaactttaagatcaggtagaggaggtatgattttaactgacgatgaagatatatttaaaaaaataaattcctcagttttccctggtcttcaagggggaccgttaatgcatataatagcaggcaaagctgcaggttttggtgaagctcttacgcctcagtttagaacatattcaagaaatgtagtagataacgctaagtgtcttgctaacacattattagatagaaacataaatattatttctggtggaactgataatcatatcgttttagttgatttaagcaaaaataatattacaggtaatgtatgtgaagaagctcttgaaaggtctgggataacatgtaataaaaatggaattccatttgacaaaaagccaccaactataacatcaggtatcaggcttggttctgctgcagcaactactagaggtttaatgtatgacgagtttaaagttttaggaaatttaattgctgatgttatgaatggtttttcagataatgtttcaaatgaatttgtagaaaagaagactaaagaagttataaaaacaatttgtaaaaagtttcctatttattagt

SEQ ID NO: 228180 - DNA, 784 bp, Unknown
  Bacterial polypeptide expressing nucleotide sequence isolated from the Sargasso Sea
ttagagcataaaccaaaattgataattgctggtggtagtgcttattcccgagttatagattttaaaaaatttagagaaattgcagataaagttggagcatatctaatggttgatatggcacatttttcaggtttagttgctggaaagggatatccaaacccatgtgactatgctcatgtagttacatctacaacgcataaagtttttagaagtgctagaggtggaataattttaactaatcacgaagaattatcaaaaaaatttaacacggctgtttttcctggttaccagggtggaccattaatgcacgtcattgcagctaaagcagctggttttttagaagctcttcagcctgattttcaagactatattaaatcagttttagcaaatgcaaaaattttagcagaaactttaaaaaataatggttttaaaatttattctgatggaaccgatactcatcttatgttggttgatttacgaccttacaatgtaaaaggaaacctagctgctgaaagtttatcgagagctaatattacttgtaataaaaatggtattccctttgatacagaaaagccaatgataacctctgggataagacttggaacgcaagcaataacaacgcgtggttttggtttaaatgaatgtaagaaagttggtgaattaattacgaaaactcttaaaggattatcagaaaacccaaacgaaaacagcaaaatagaagaagaagtaagaaacgaagttattgctttaacttcttcatttccaatatataagaatctttaat

SEQ ID NO: 228181 - DNA, 814 bp, Unknown
  Bacterial polypeptide expressing nucleotide sequence isolated from the Sargasso Sea
tgctgaaaatttagcaatagaaagattaaaaaaacttttcaattgtaaatttgccaatgctcagccacactcaggagcacaggctaatggtgctgtatttttggcgctgttaaaacctggtgatacttttatgggtatgagtttaaattcaggaggtcatatcactcatggtttaaaaatttcaatgtcaggaaaatggtttaatccgatagggtatgatgttgataaaaaatctgaacttatagattatgacaatgttgaaaaacttgccttagaacataaaccaaaattgataattgcaggtggaagtgcatattccagagttatagattttaaaagatttagagaaattgcagataaagttggtgcatatctaatggttgatatggcacatttttcaggtttagttgctggaaaaggatatccaaacccatgtgactatgctcatgtagtaacatctactacgcataaagtttttagaagtgcaaggggtggaataattttaactaatcatgaagaattatcaaaaaaatttaatacagcagtttttcctggctaccagggtggcccattaatgcacgttattgcagctaaagcagctggttttttagaagctcttcagcctgattttcaagactatattaaatctgtgttagcaaatgctaaaattttagcagaaactttgaaaaataatggttttaaaatttattctgatggaacggatacccatcttatgttggttgacttacgcccttacaatgtaaaaggtaacttagctgctgaaagcttatccagagctaatattacttgtaat

SEQ ID NO: 228182 - DNA, 907 bp, Unknown
  Bacterial polypeptide expressing nucleotide sequence isolated from the Sargasso Sea
taatggtgcagtctatcttgctttattaaatcctggagatacaattttgggtatgagcttaaattctggaggtcatttaactcatggcgcaaaagtttctcaatctggaaaatggcttaaatcttttcactacgaagttgataaagaaactggtcttattgattatgatcaagtaaagaaattagcccaagaacataaaccaaaaattttaattgcaggtgggagcgcatattctcgtataattgattttaaaaaatttagagagatagctgatagtgttaacgcttacctaatggttgatatggcgcatttttcaggtttggttgcaggcaaaggttatcctaatccagttgagtatgctgatgtcgttacatctacaacacacaaagttcttagaggaggaagaggaggaattattttaacaaatagagaggatttgtacaaaaaatttaattcagctgtttttcccggatatcagggtggtcctttaatgcatgttatagcagccaaagccgcttcatttcatgaagctttgcaaccaagtttcagagaatatattaaatcagtaatatcaaatgcaaagatcttatcagagacacttaaaaataatggttttaaaatattttctggaggcactgatacacatttaatgttggtagatttaagaccatttaaggttactggtaaagctgccgaggttagtttaggcaagtcaaatattacctgtaataaaaatggtataccatttgataaggaaaaaatgactgttacctcaggtattagacttggatctcaagcagcaacaactcgaggatttggattgaatgaatttaaaaaagttggtgagttaattacaaaagtaataaaaggtttgtcagaaaatcctgaagataatagtaaaaattga

SEQ ID NO: 228183 - DNA, 487 bp, Unknown
  Bacterial polypeptide expressing nucleotide sequence isolated from the Sargasso Sea
gatgcatatcattgcagccaaggctgttggttttttagaggctttaaaacctgaatttgaattatacattaaaaatgtaatttcaaatgcaaaaactttgagtgagaatttgattagtaacggatttaaaatatattcaggaggtacagacacacatttgatgttagtagatttaagaccatttaatgtcaaaggtaatatagcatccgaaagtttgagtagagctaatataacatgtaataaaaatggaattccttttgacacagaaagtccaatgataacttctggtataagactaggcactcaggcaacaacaacaagaggttttggacctgctgaatttaaaaaagttggagatttaattactaaagttatcacaggtctatctaataacccgaaagataattcaaaaatagagagcgatgttaaacaagaagtgatagagttatgttcaaaatttccaatatataaaaatttaaggaaatag

SEQ ID NO: 228184 - DNA, 355 bp, Unknown
  Bacterial polypeptide expressing nucleotide sequence isolated from the Sargasso Sea
atgacacttagtgagaattttttttctagtaatctagaacatgcagataaagatttatatcaaagtatttcacaagaactttcaaggcaacagaaccaaatcgaattaattgcttctgaaaatatcgtctctaaagcagtgcttgaagcacaaggctccattatgactaataaatatgctgagggttatagtgctaaaagatactatggcggttgtgaattcgtagacatagccgaaaatttagcaattgaccgtttgaaacaattgtatggatgcagttatgctaatgttcaacctcattcgggcgcgcaagctaaccaagctgtatttttagcactgattaaacccaggtgac

SEQ ID NO: 228185 - DNA, 748 bp, Unknown
  Bacterial polypeptide expressing nucleotide sequence isolated from the Sargasso Sea
ggcagcgcatactcaagagtaattgattttaaaaaatttagagatatatgtgataaagttaatgcatatttactagtcgatatggctcacttttcaggactagtggctgggggtgtttatccaaatcctactaaatatgctgatgttgtaacttctacaacccataaagttttaagaggaccacggggaggaataattttaactaatagagaggacctaattaaaaaatttaatagtgcaatattcccgggtttgcaaggtggaccactgatgcatgtgatagcagcaaaagcagtttgttttaaagaagctttgactgaagatttcaaagtgtattctgaaaatgtaattaaaaatgcaaaagctctatctgagagattgagtgaaaaaggttttaaaattttttcaggtggcacagatactcacttgatgttactagatcttaggtcttttggtgttacaggaaaagatgctcaagcatctttagggagatcaaatattacttgtaataaaaatggaattccttttgatacagaaagccctatgataacatcaggtattagacttggcacgcctgcgtgtacaactagaggtttcggtccaaatgaatttaaacatatcggtgacttaatctttaaaattatagatggtctaagtaaaaataaagaaaataattctaaagtagaaaaagaagttcaaaaagaaataattgatctatgttcatcttttcctatttatggagagtaat

SEQ ID NO: 228186 - DNA, 497 bp, Unknown
  Bacterial polypeptide expressing nucleotide sequence isolated from the Sargasso Sea
ttttcctggtctccagggtggcccattgatgcatattattgcaggtaaagctgcgggctttggtgaagcactaaaagacgagtttaaagtttactctcaaaatgttgttaaaaatgcaaaaattttatcaaatacacttattgaaagaggaataaacattgtttctggaggaaccgataatcacatagttttagttgaccttagaaataaaggcattacaggaaataattgtgaacatgctcttgaaagagcaggtataacttgcaataaaaatggagttccatttgatgaaacaccaccatccattacttctggtataagatttggctcttcagcagcaactactagaggattaacagaaaatgattttaaagttttaggtaatcttatttcagatgtgatttgtggttttaaaaataatatttctgataatgaaattgaaaatgaagtaaatagaaaaataatagatatttgtaaaaaatatcctatttactaat

SEQ ID NO: 228187 - DNA, 790 bp, Unknown
  Bacterial polypeptide expressing nucleotide sequence isolated from the Sargasso Sea
aatttgtggtggaagtgcttatcctagatttatagagtttcaacaatttcgagaaattgcagattctgtcaatgcatacttaatggctgacattgctcatcccagtgggctaattgcagcaggggctcacccatcaccattcccatattgtgatgtagttaccagtacaactcataaaacacttcgaggccctcgaggaggaattatcttattaggaaaagattttgaaaatccatggggtaggattgcaccaaagtctggtcgaataaagatgctatctgaattaattgattccacagttatgccgggaatacaaggtggtccattgatgcatattattgcagcaaaaggtgtcgcatttggagaagctttaaaacgagattttaaagattacgcaaaatctattatcgataatgcaaaactaatggcagaagaacttaaatcattgaattataaccttatatctggtggaacagatacccatgtcatactcattgatttatcaaacaaaaatatctcaggtaaagcagctgagaatgcgttaggcaaagcaggaattacagtaaataaaaatatggttcccttcgataaaaaaagtccttttataaccagtggtatacgcattgggacacctgcgattacaactagaggaatgaaagaattagaaattagccagattgtaaaatggattgatcttgtaatccaaaatccggaagacaatcaacttttatcagatatatttgctgatgtaaacgccctttgtagagattaccctgtttatcctgattaa

SEQ ID NO: 228188 - DNA, 514 bp, Unknown
  Bacterial polypeptide expressing nucleotide sequence isolated from the Sargasso Sea
atgtcaagtgaaacaaaatatctaaacagtgagtataaagacttttttgaaaaaagtttattagatagtgatccagaaatttataaagctattaatgatgagttggtaagacaacaaaaccatatagaattaattgcttctgaaaatatcgtatctcaagcagttcttgaagctcaaggatcagtattaacaaataaatatgccgaaggttatcctggcaaaagatactataatggttgtgaacatgtggatgtagctgaacaattagctatagacagacttaaagaattatttaattgtaaatttgctaatgctcaacctcactcaggagcacaggcaaatggtgctgtgtttttggctttgttaaaacctggtgacacttttatgggaatgagtttgaattcaggaggacatattacacatggtttaaaaatttctatgtcaggtaaatggtttaatgcaattggatatgaagtggataaaaagtctgaacttattgattatgacaatgtgg

SEQ ID NO: 228189 - DNA, 823 bp, Unknown
  Bacterial polypeptide expressing nucleotide sequence isolated from the Sargasso Sea
gagtcagaattaattgactatgataatgttgaaaaacttgctttagaacataaacctaaactaataattgcgggtggaagtgcttattcaagagtaattgactttaagagatttagagaaatagcagataaagttggagcatatttaatggttgatatggcacacttctcaggtttagttgcaggtaaaggttatcctaatccttgtgattatgcacatgttgttacatcaactacacacaaagtgtttagaagtgcaagaggtggtataattttaactaatcatgaagatcttgctaaaaaatttaatacagcagtttttcctggttatcagggtggacctttgatgcatattattgcagctaaagctgctggatttttagaggcattacagccagaatttcaaaattatattaaatctgttttagcaaatgctaaaatgcttgcagaaactttaaaaaataatgggtttaaaatttattctgatggaacggatactcacttgatgttggtagatttaaggccttataatgtaaaaggtaatcttgcagctgaaagtttgtctagagcaaatattacgtgtaataaaaatggtattccatttgatacggaaaaacccatgattacctcaggcattcgattaggtactcaagcagctactactcgaggttttggactaagcgaatttaaaactgtaggagaattaataacaaaaactttaaaaggtctatctgaaaacctatcagataatagcaaaatagaagaagaagtaaaaaatgaagttatttctttaacttcgtcatttccgatatataagaaccttt

SEQ ID NO: 228190 - DNA, 976 bp, Unknown
  Bacterial polypeptide expressing nucleotide sequence isolated from the Sargasso Sea
tcccgagcagttttagacgctcaggggtcaattatgacaaataaatatgcagaaggttatccagggcgaaggtattatggcgggtgtgagtgggtcgatttggctgaaactattgctataaaaagagctaaggaattatttggatgtgaatttgttaatgtccaggcccatagcggaagtcaagctaatcaagcggtttttttggcaacccttaaaccgggagataagttgcttggaatgtctttagctgcaggtggtcatttaacgcatggagctagacctaatcagtcaggtagatggttcaacgctgttcaatatggtgtcagggaagaagactctctcatagatattgatgaagtttctaagcttgcaaaaaaacataggccaaagcttatcattgctggtggctcagcttatccacgcatcattgattttaaaagttttcgtaatattgccgatgaggtaggggcgcttcttttggttgatatggctcattttgctggtcttgttgctgcaggtgttcaccctagtccatttcctcatgctgatattgtcacaagtactacacacaagacacttcgtggtccccgaggtggattgattctatctaaacaagaagatcttgctaagaaaatagactctgctatttttcctggtttacaaggtggaccacttgagcatgttattgcagcaaaggcagtagcgtttggtgaggcactaacagatgattttaagggctatgctaaaagagtagttgaaaatgctcgtaagctctcatctacacttgactctgcgggttttaaagttgtttctggtggtacggatactcaccttctacttcttgacttgcgttccaaaggtctaacgggaaaaatagcagagatggctctggaaaatgccggcatgacgtgtaataaaaatagtgtgccttttgaccctgaaaaaccgacggttacatcaggggtaaggttaggtc

SEQ ID NO: 228191 - DNA, 577 bp, Unknown
  Bacterial polypeptide expressing nucleotide sequence isolated from the Sargasso Sea
atgtcaagtgaaacaaaatatttgaattcaaattatgaagatttttttgagaaaagtctctcaaaatctgatccagacttatttaaggcaattaatgatgaattgatcagacaacaaaatcacattgaattaattgcttcagaaaatattgtttctcaagcagtgctagaagcccaaggatcagttttgactaataaatatgccgagggatatcctggtaagagatactataatggttgtgaacatgttgatgttgctgaacaattagctttagagagaataaaaaaattatttaattgtaaatacgcaaatgtgcaaccacattcaggagcacaagctaatggtgctgtttttttagcattactaaaaccaaatgacacatttatgggtatgagtttaaattctggtggtcatattactcatggtttaaaaatttcaatgtctggtaaatggtttaatgcaataagctatgacgtagataaaaaatctgaacttattgattatgacaatgttgaaaaacttgcattggaacataaacctaaattaataattgcgggaggcagtgcttattcaaggg

SEQ ID NO: 228192 - DNA, 310 bp, Unknown
  Bacterial polypeptide expressing nucleotide sequence isolated from the Sargasso Sea
aatgaaattgcaagacgctgataaagaattgtataattcaatcaaagatgaatttataagacagcaaaatcatattgaattaattgcatcagaaaatattgtatcaaatgctgttttagaagctcaaggatcagtcttaacaaacaaatatgctgaaggttatccctcaaaaagatattatggtggatgtgaacacgttgatatttctgaaaacttagctatagagcgagcaaaaaaactttttgattgtaaatttgcaaatgtacaaccacactccggagctcaagctaatggtgcggtttatttagca

SEQ ID NO: 228193 - DNA, 631 bp, Unknown
  Bacterial polypeptide expressing nucleotide sequence isolated from the Sargasso Sea
ttgttgctgcaggtttatatccatcgcctgttcctatgccgatgtagtaacttcaacaactcataaaactctgagaggccctagatcaggaattattattgctaaatcaaatgataatttagaaaaaaaattaaactcagcggtattccctggatctcaaggcggaccattgatgcacgtcatagctgcaaaagcagtatgtttcaaagaggctttagaacctgatttcaaaatatatatccagcaagtaattgataacgcaaaacttatgtgcaaagtcattcaggatagaggaattgatgttgttacaggtaaaactgataatcatatcgtcctgatggatttaagaaagaaagaattgactggtaaagattgtgaattagcattaggccaagcaaatattactgttaacaaaaatgcagtcccaaatgatcctcaatcaccatttgtcacttcaggtataagattgggaacgcctgctgtaaccactagaggttttggaagtgatgaaatagaaatgttaactaattggatttgtgatgtggttctcgatcacaataatgcagataagataaatactattaaaaataaagttgttgaaatgtgtaaaaggtttccagtttataaataa

SEQ ID NO: 228194 - DNA, 708 bp, Unknown
  Bacterial polypeptide expressing nucleotide sequence isolated from the Sargasso Sea
tatgtcaaattttaagagtgatataaatggaagttaccaggatttctttgataaagatttgtcaatgcgagatccggatttatataattcaataagactcgagcttgaaagacaacaacaacatatagaacttattgcatcagaaaatattgtttcaaaggcagttttggatgctcaaggctcaattcttacgaataagtatgccgaaggatatcctggaaagagatattatggtggatgtgaatttgttgataaggcagaagaactagctttagaaagagttaaaaaattatttaattgtaaatacgccaatgtgcaacctcattcgggagcccaagccaatggagcagtatatctagctttattaaatcctggagatacaatacttggtatgagtcttaattctggcggacatttaactcatggtgcaaaagtttctttatcaggcaagtggcttaaggcttttcattatgaagttgataaacaaacaggtcttatagactatgatcaaattaaaaaattagctttagaatataagccaaaaatattgatcgctggaggtagtgcatactctagagtaattgattttaaaaaattcagagaaatagcaaacagcattaacgcatatctaatggtggatatggctcacttttctggtttagttgccggaaaaggttatcctaacccaatagagcatgctgatgtcgt

SEQ ID NO: 228195 - DNA, 676 bp, Unknown
  Bacterial polypeptide expressing nucleotide sequence isolated from the Sargasso Sea
tatgatttcagatttgtttactaaaggaattaaagaagcagacccagaagtttatggtacactaagtcgtgaattagaaagacaacaaaaccaaatagagttgatagcatctgaaaatattgcttcaagatcaattttaaatgctcaaggttctgtcatgacaaataaatatgcagaaggttatcctggtaaacgatattatggcgggtgtgaatttgttgatcaagctgaagagattgctttagaaagagttaaaaaactttttaattgtaaatttgcaaatctacaaccgcatagtggagcacaggcaaaccaagcggtctttcttgcgttacttcaaccacatgatactattttaggtatgtctcttgcatcaggtggccacttaactcatggagcaaaacctaatctatctggtaaatggtttaatgctgttcaatacggtgtaaaaaaagatggaaatgataaagatttaattgattatgatgaagttgaagcattagcattagagcataaaccaaaaatgataatagcgggagcttctgcttatcctagaataatagattggaaaaaatttagagaaatagctgataaagtgggagcatattttttagttgatatggctcactattctggtttggttgctggtaaacaatatccaaatcctattgagcat

SEQ ID NO: 228196 - DNA, 299 bp, Unknown
  Bacterial polypeptide expressing nucleotide sequence isolated from the Sargasso Sea
attgcttgatttacagaaaaaagaggtaaatggaaaggaggcagaagagcttttaggaacagtcaatataacagttaataaaaattctattcccaatgatccagaatctccatttattacatcaggtattaggattggaactccagcaataacaactaggggttttaaagaagaggaagctgaacaagtagtagatttaatgtgtgatgctattgaaaatagaaatgatcaagcctcacttgatagaattaaagatgaggtaaaagacctttgtaataattttccggtttataaataat

SEQ ID NO: 228197 - DNA, 639 bp, Unknown
  Bacterial polypeptide expressing nucleotide sequence isolated from the Sargasso Sea
tatgaattttgtaggcaaaacgaacttatttggtggaactttagcatctcaggatccagaaattttcaactcattagagaaagagtttagtaggcaacagaatgagattgagcttattgcgtctgagaatatcgcttctccagctgtaatggaagctcaaggttcagttatgacaaataaatacgcagagggatatccaggtagaagatattatggtggatgtgaaaatgtggatgtcgctgagcaattggcaatatccagagcttgtcaactctacaattgcaaattcgctaatgtacaacccaactcaggaagccaagccaatcaagctgtttttttggctctaatgaaacctggagacacttttttgtccatggaccttgcttcgggtggtcatctgacacatggagcgaaacctaatcaatccggtaaatggttcaaccccgttcattatgaagtcacaaaagatacaaaccacgttgactatgatcaggtccgtcagcttgcaaagcttcataaaccaatgttaattattgcgggcggctcagcaatccctcgtatcttagactttaaaaagttcagagaaatctgtaatgaaatcggagcttttttattagttgatatggcacatatttcagg

SEQ ID NO: 228198 - DNA, 343 bp, Unknown
  Bacterial polypeptide expressing nucleotide sequence isolated from the Sargasso Sea
atgtctagtgaaaagagttatttaaatgatagctataaaagtttttttgaggatggtttatctgtaaaagatcctgaattgtataaagctattaaagatgaactaataagacagcaacaacatattgagttaattgcttcagaaaatatagtttctcaagctgtcttggaagcccaaggttcagtattaacaaacaaatatgcagaaggctatccaggtaagcgttattacaacggttgtgaacatgttgatgttgcagaaaatcttgcaaatgaaagattaaaaaaattatttaattgtaaatttgcaaattctcaacctcactcaggtgcacaagctaatg

SEQ ID NO: 228199 - DNA, 918 bp, Unknown
  Bacterial polypeptide expressing nucleotide sequence isolated from the Sargasso Sea
ttacatctaatgccattttggcagctcaggggtctattgcaaccaataaatacgcagaaggcctaccaggaaagcgttactatggtgggtgcgaagatgtcgacgcaattgaaacactagcaatagagcgtgcaaaacagttatttgcagcagatttcgctaatgtgcagccacactcaggtagtagtgcaaatctagctgttttttcagcattacttaagccaggtgatacgatactgggaatggatttaaatgcaggagggcacttaacacatggtcaccctgtaaacttttcaggtaaagtttaccaagcctttcactatggtgtgaatgaagaaggtttaattgattatgatcaaattgaaacactagctaaaaagcacaagcccaaacttattattgcgggtttttctgcttattcacaagttatagattgggcactaattagagacattgcatcgcgttatggtgcatattttttagcagatatggcacatgtgtctggattagttgctgcagatttgtacccatcaccaataccttatgcagatgttgtaacaagtacaacacataaaacgctcagagggccaagaggaggaatgatccttgcaggggctaatcagcagatacctaaattggtaaatagggcaattttcccaggtatacaaggcgggcctctaatgcatgttattgctgctaaagcaatttgttaccatgaggcaatgcaaccaggctttaaaacataccagaaacaggtgttaaagaactcagctatgatggctcaaacactacaagcgtcaggatttacgattatctctggctcaccgaagtgtcatatgtttctacttgcattgaatgataaaagcgttaatgggatgcaagcacaaacagcttggagagcgcaggaattgttgtaaa

SEQ ID NO: 228200 - DNA, 956 bp, Unknown
  Bacterial polypeptide expressing nucleotide sequence isolated from the Sargasso Sea
agcattactaaaaccaggtgatactataatgggaatgagtttaaattccggcggtcacctcactcatggatctaaagcttctgtatcaggaaagtggtttaatgctattgcatatgatgtagataaaaaaactgaattattagattatgaatctatagagaaacttgcagttgagaataaaccaaaacttataattgcaggtggaagtgcgtattctagacaaatagattttaaaaaatttagagagatcgcagataaagtaggtgcatattttatggtagatatggcgcacttttctggtttagttgcaggtaaaggttatccaaatccagtagagtatgctgatgttgttacttcaacaactcataaagtttttagaagtgcacgtggtggaattattttaactaataatgaagctttgtctaaaaaatttaattctgcagttttcccaggttatcaaggtggacctttgatgcacataattgctgcaaaagcagttgggttccttgaagcattaaaaccagaatttagaaattatatttcgaatgtaatggcaaatgcaaaaattttagctgagacattaaaaaacaatggttttaaaatatattcaggcggaaccgatactcatttaatgttggtagacttaaggccattcaatgtaaaaggaaatattgcagctgacagtttatgtagagctaacataacatgtaataaaaatggaattccatatgatacagaaagtccaatgataacatctgggataagattaggaacacaagctgcaactacaagagggtttggcttagatgaatttaaaaaagtaggtgaactaataactaaaacaataaaaggtttatcagcaaatccagacgataatgcgaaagttgaatcagaagtaagagaagaagtaatttcactgtgttcaaaatttccgatttataaaaatttaaaatagt

SEQ ID NO: 228201 - DNA, 482 bp, Unknown
  Bacterial polypeptide expressing nucleotide sequence isolated from the Sargasso Sea
aatgaacattgccgattttgatccggaattatggcaatccatgaccaacgaaacccaacgtcaggaagatcacattgagctgatcgcttctgaaaactatgccagcccacgtgtattgcaggctcagggttctcagttaacgaacaaatatgctgaaggttacccgcataaacgttattacggtggttgtgagtacgtggacgtggctgaagatttagctatcgcccgtgcgaaggaattgtttggtgccgattacgcaaacgtgcaaccgcactcaggttcgcaggcgaactcagcggtatttttagctttattaaacgcaggcgacaccattttaggtatgagcctggcgcacggtggtcacttaactcatggtgcatctgtcagctcttcaggtaagttgtacaaagctgtgcaatacggcctgcacccagagacaggtgtgattgattatgctcaggctgaagctttagcgctcgaac

SEQ ID NO: 228202 - DNA, 764 bp, Unknown
  Bacterial polypeptide expressing nucleotide sequence isolated from the Sargasso Sea
gatgttcaacagcggtaacagcttggcagaatttgatccggaaataagcgcggctattgaagctgagagaacgagacaagaagaacatattgagttaatagcatctgaaaatcacacaagtccttttgttatggaagctcagggatcggtgttaacaaacaagtatgcagaaggatatccctcaaagagatattatggggggtgtgaaaacgtcgacgttgtagaggagttggcgattgaacgagctaaagagttatttggtgccgattacgcaaatgttcagcctcattctggttcgcaagcaaatgcttcggcttacatggcgctaatgaagccgggagatacattgttgggcatgagtcttgctgatggtggacacttaactcatggtgcaacagtcagtttctcaggccggatatataactcggttcaatacggtttgaatggtcaaacaggagaaatcgactatgacgaagttgatcgacttgcacacgaacaccggccgaaattaattgttgctggcttttcggcctattcgaaagtggtagattggcaaaaatttagagatattgcagatgaggtaggtgcttactttctggttgatatggcacacgtgtctggtttggttgcagctggagtgtacccaagtccagtaaatatagccgatgtaaccacttctaccacccataaaaccttgcggggtccccgtggcggaataatacttgctcgttcaaaccctgagttggagaagaaattgaatttct

SEQ ID NO: 228203 - DNA, 475 bp, Unknown
  Bacterial polypeptide expressing nucleotide sequence isolated from the Sargasso Sea
atcattgctgctaaagcagctggttttcttgaagccttgcaaccagaatttaaagattatattaaatcagttttagcaaatgcaaaaatgttagcagaaactttaaagaataatggatttaaaatttattcagacggaactgatacgcatctaatgttggtagatttgcgaccttataatgttaaaggcaatcttgctgcagaaagtttatctaaagcaaatattacctgtaacaaaaatggtattccttttgatacagaaaaaccgatgattacttcaggtataagacttgggacacaagcggcaacaactcgaggttttggtttaaatgaatttagaactgttggtgaacttatcacaaaaactttaaagggtttatctgaaaacccaattgataatagcaaaatagaaaatgaagtaaaaaatgaagttatttctttaacttcttcatttccaatatataagaacctctaaa

SEQ ID NO: 228204 - DNA, 305 bp, Unknown
  Bacterial polypeptide expressing nucleotide sequence isolated from the Sargasso Sea
tatgtttgacgtagatatgaagattgcaggttttgatgatgagctgaatgatgccattaaaaaagagatagtaagacaagaagagcatgtagaactaatagcgtctgaaaactatgctagccctagagttattgaggctcaaggctcagttctaaccaataaatatgcagaaggttatcctagcaaaagatattatggtggttgtgaaaatgttgacgttgctgagcaattagctatcgaccgtctaaaagaaatctatggggcagattacgctaacgtacaacctcattctgggtcacaggcaa

SEQ ID NO: 228205 - DNA, 587 bp, Unknown
  Bacterial polypeptide expressing nucleotide sequence isolated from the Sargasso Sea
aactttaagaggcgcaagaagtgcaatgattttaactaataatgaagatatatataagaaagttaattccgcggtttttcctggtttacagggtggtcctttaatgcatgttatggcagctaaagctgtttcatttggcgaagccctcaaacctgaattttcagaatatattagagaagtaatttcaaatgcaaaaatcttagctgaaatatttgtacaaagaggatttagagttgtaacaggaggtactgatagtcatattgtttggttagatttatctccaaaaaatttaacaggagataaggcagaaaaacttcttgaagatgttggtatagcttgtaataaaaatgctataccttatgacccccatccaccaaaaattaccagtggaattagatttgggacagctgctgcaacttctcgaggatttaataatagtgattttaaagaagttggtaatattatttctgatgttttagatagtttattaaaaaataatgaagatcaaaaaattattttaacaaatacaaaagaaaaaattgtaaaaatgtgtaaaaattatcctatatatcatgaggcttattaga

SEQ ID NO: 228206 - DNA, 264 bp, Unknown
  Bacterial polypeptide expressing nucleotide sequence isolated from the Sargasso Sea
tatgaatgaacaaaaaaaaatattattttacgaagaaggattttttgaaaaaagtatccatgattatgatcccattttaagttcatatttagatgaagaaaaaaaaaggcagcagaatcaaattgaaatgatcgcctctgaaaactttgtttcaaggtctgtactagaagctcaaggttctgtgttaacaaataaatacgctgagggttatccaggtaaaaggtattatggaggttgtgaatttgtagataaagttgaagactt

SEQ ID NO: 228207 - DNA, 474 bp, Unknown
  Bacterial polypeptide expressing nucleotide sequence isolated from the Sargasso Sea
gtggtcctcttatgcacgtggttgctgcgaaagcactatgctttaaagaagccttagatccagaatttaaaatttatataaaacaggtcatggataatgcaaaaacaatggctgaaacaataatgtcaaatggaatagacattgtgtctaatggaaccgagaatcacataatattagttgatcttagaagtaaaggaattactggaaaagatcttgaaagagttcttggctcagtcaacataacagtaaataagaattcagtaccaaatgatccggcatcaccatttgtgacttcaggaataagaattggtacgccagcagctacaactagagggtttaaagaagaagaaattattcaagtagccaattggatatcagatattattaataattttgataatgaagaattactaaagaccatcaaggaagaagtccacaaacttacaagtaattttccagtatataatctataga

SEQ ID NO: 228208 - DNA, 283 bp, Unknown
  Bacterial polypeptide expressing nucleotide sequence isolated from the Sargasso Sea
tatgtcgagcgaaaaaagttatttaaacgaaagttataaaagtttttttgaggatagtttatctgtaaaagatccagaactttataaagctattaaagatgaattaatcagacagcaacaacatattgagttaattgcgtctgaaaatatagtatctcaagcagttttagaagcacaaggatcggttttaactaataaatatgcagaaagttatcctggtaaaagatattacaatggttgcgagcatgttgatgtggcaaaaaccttgccattgaaagataaa

SEQ ID NO: 228209 - DNA, 749 bp, Unknown
  Bacterial polypeptide expressing nucleotide sequence isolated from the Sargasso Sea
ggctatgatgtggacaaaaaatcagaattaatagactatgataatgttgaaaaacttgctttagaacacaaacctaaactaattatagctggcggtagtgcttattctagggtaattgactttaaaagatttagagagatagcggacaaagttggagcatacttaatggtagatatggctcacttctctggacttgttgcaggtaaaggttatcctaacccttgtgattatgcacatgttgttacttcaacaactcataaagtatttagaagcgcaagaggagggataattttaactaatcatgaagatctagctaaaaaatttaatacagcagtttttcctggttatcagggtggacctttaatgcatattatagcagcaaaagctgctggatttcttgaggcgttacaacctgagtttcaagattatataaaatcagttttagcaaacgcaaaaatgttagcagagactttaaaaaataatggatttaaaatttattctgatggaactgacactcatttaatgttggtagatttaagaccttataatgttaaaggtaatcttgcagcagaaagtttatcaagagcaaatattacatgtaataaaaatggtataccttttgatactgaaaaaccaatgatcacatcaggtattagattaggtacacaggcagctacaacacgtggttttggattaagtgagtttaaaacagtaggggagttgataacaaaaactctaaaaggtctgtc

SEQ ID NO: 228210 - DNA, 624 bp, Unknown
  Bacterial polypeptide expressing nucleotide sequence isolated from the Sargasso Sea
tggcagccggttgtcatccgaaccctgtccctcatgctgattttgtgactactacgactcacaaaacgcttcggggtcctcgtggaggattgattatggcaaaagagaagtatgccaaagagctcaacagtaatgtgtttcccggaatacaaggcggaccgttgatgcatgtgattgctgcaaaggcagtgtgttttaaggaagcgctttctccagaatttaaggaatatcagcaacaggtagttatgaatgccaaggcacttgctgaagggatggagcggaacggattccgattggtgagtgggggcactgataaccatctgattttagttgatgttcaggcaaagggtctgacaggtaaagaaagtcaagaggcccttgattcagcagggattacagttaacaagaataccattcctttcgaagccttgtcaccattcaaggcaagtggcgtgcgattggggactccagcaatgacttcacgtggtatgcgagagacggaaatggaggcaattgcggacatgatttcagaagttttgggtgatgtaaataatgttgacgttgccaaaaaagtacgccagcgtgtccgtgaactgaccacgcgttttccgctcccttactgac

SEQ ID NO: 228211 - DNA, 826 bp, Unknown
  Bacterial polypeptide expressing nucleotide sequence isolated from the Sargasso Sea
taaagatttaatagattatgatgaggtggaagcgctagctattcagcataaaccaaaattgattatagcaggtgcatctgcttatcctagagttattgattggaaaaagtttagagatattgctgataaggttggggcatattttttagttgatatggctcattactctgggttgattgcaggaaaacaataccctaatcccatagagtatgctcatgtggtgacttctacaactcacaaaactctaagaggtgcaagaagtgctatgatattaactaatgatgagactttaataaaaaaaatcaatagcgcggtgtttcccggactccaaggtggtccactaatgcatgttatggcaggtaaagctgttgcctttggtgaggctcttaagcctgaatttgaagattatataaagaaagttattgaaaatgctaaagtattagcttcttccttagtgaataatggttttaaaattgtaacaggtggaactgattcccatatagtctggttagaccttactcctaaaaacgttactggagataaagcggaaaaaatactggaagaggttggaattgcatgtaataaaaacgctattccttacgaccccaatcctcctaaaataactagtggcttaagattcggaactgccgcagctacttcgaggggttttaatgaaaatgattttagtgaaattggtaatatgatttcagaagtacttgaaaacattaatcaaaatgaggataatcaaaaagaatttatttcttctatgaaaagcaaagttacaaatatgtgcaaaaaatacccaatatacgatgaggcattttaa

SEQ ID NO: 228212 - DNA, 587 bp, Unknown
  Bacterial polypeptide expressing nucleotide sequence isolated from the Sargasso Sea
gatgtcaaaagaaggtaattatataaacaatcagtatcaaagtttttttgaaaatagcttatctaatattgatcctgatatttataaagcaatatctgatgaattaaacagacaacaaagtcatattgaattaatagcttctgaaaatattgtttcacaagctgtattagaggctcaaggatcagttttaacaaataaatatgccgagggttattctggaaaaagatattacaatggatgtgcatatgtagatgtagcagaaaatttagcaaatgagagattaaaaaagttattcaattgtaaatttgcaaattctcaacctcattctggtgcacaagctaacggtgctgtgtttttagctttattaaacccaggtgatacttttatgggtatgagtttaaactcaggcggtcatattactcatggattaaaaattgccatgtccggtaaatggtttaatgcaattggatatgatgtggataaaaattctgaattaattgattacgaaaatgtagaaaaacttgcattggaacataaacctaaattaataattgccggcggtagtgcttattcaagagtaatcgatt

SEQ ID NO: 228213 - DNA, 413 bp, Unknown
  Bacterial polypeptide expressing nucleotide sequence isolated from the Sargasso Sea
catgagcgacagcactgcttctttgatcaacacaggtcttgcggccgccgatcccgccattgcagccctaattgagaaggagcagcagcgtcaggaaacccacctggagctgatcgccagcgaaaatttcgcctcccgggccgtgatggacgcccagggttcagttctgacgaacaagtacgccgaggggctccccagcaagcggtattacggcggttgtgagcacgttgatgccatcgaagagctggcgatcgaacgggccaaggaactcttcggtgcggcctgggcgaatgtgcagccccacagtggtgcccaggccaatttcgctgtcttcctggcgctgcttcagcccggagacaagatcatggggctggacctttcccatggcggtcacctgacccatggctcgcctg

SEQ ID NO: 228214 - DNA, 817 bp, Unknown
  Bacterial polypeptide expressing nucleotide sequence isolated from the Sargasso Sea
tggtttaaggctgtaggctatgatgtagacaaagaatctgaattgattgattatgataatgttgaaaaacttgcattagaacataagcccaaactaatcattgcaggcggaagtgcttattctagagtaatcgattttaaaagatttagagagatagcagataaagttggagcatatctaatggttgatatggctcacttctctggattagttgctggtaaaggatacccaaatccttgtgactatgcacacgtagttacttcaacaacccataaagtgtttagaagtgcaagaggaggaataattttaactaatcacgaagatctttctaaaaaatttaatacagctgtttttcctggatatcaaggtggacctttaatgcacatcattgcagcaaaggcagcaggatttctcgaagcattacaaccagaatttcaagattatattaaatctgttttagcaaacgctaagatattggcagaaactttaaaaaataatggatttaaaatttattcagatggaacagacacacatctgatgttggttgatttaagaccttataatgtaaaaggtaatcttgcggcagagagtttgtctagagcaaatattacatgtaacaaaaatggtattccttttgatacagaaaaacctatgattacctcgggaattagattgggaacacaagcggctacaacacgtggatttggtttaagtgaatttaagactgtaggagaattgatcacaaaaactctaaagggattatcagaaaatccaaaagataatagtaaaattgaaaatgaagtaaaaaatgaagtta

SEQ ID NO: 228215 - DNA, 421 bp, Unknown
  Bacterial polypeptide expressing nucleotide sequence isolated from the Sargasso Sea
atgtcaagtgaaacaaaatatttaaatagtgagtacaaagacttttttgaaaaaagtttattagatagtgatccagaaatttataaagctattaacgatgagttggtgagacaacaaaatcatattgaattaattgcatctgaaaatattgtctctcaagcagtccttgaagctcaaggatcggtattaacaaataaatacgcagaaggctatccaggcaaaagatattataatggttgtgaacatgtagatgtagctgaacaactagctatagatagacttaaggaattgtttaattgtagatttgcaaatgcacaaccacattcaggagcccaatcaaatggagcagtctttttagccttgttaaaacctggtgatactttcatgggaatgagtttgaattcaggaggtcatattactc

SEQ ID NO: 228216 - DNA, 403 bp, Unknown
  Bacterial polypeptide expressing nucleotide sequence isolated from the Sargasso Sea
caaggcctaccagcagcaggtgatcgacaacgctcaggccatggccaaggtgttcatcgagcgcggttacgaagtggtgtctggcggcaccgacaaccacctgttcctgctcagcctgatcaagcagggtctgaccggcaaggaggccgacgctgccctgggtcgtgccggcatcaccgtgaacaagaacgccgtacccaacgacccgcagtcgccgttcgtgacttctggcatccgtatcggcacgccggctgtgaccacccgtggtttcaaggtcgcccagtgccaggcgctggccggttggatctgcgacatcctcgatcaccttggcgatgccgatgtcgaggcgcaggtggccaagctggtcgcagggctgtgcgcggactaccccgtataccgctaa

SEQ ID NO: 228217 - DNA, 260 bp, Unknown
  Bacterial polypeptide expressing nucleotide sequence isolated from the Sargasso Sea
tatgtctagtgaaaaaaattacttaaatgatcattacaaaagtttttttgaagatagtttatcaaaaaaagatccagaattacataaggctattcaagatgaattgttacgacaacaacaacatattgagttaatagcttcagaaaacatagtttcacaagcagtattagaagcacaaggttcagttcttacaaataaatatgctgaaggttatccaggaaaaagatattataatggatgtgagcatgttgatgttgctg

SEQ ID NO: 228218 - DNA, 306 bp, Unknown
  Bacterial polypeptide expressing nucleotide sequence isolated from the Sargasso Sea
attgtcatatattgagaaaattgactctgaattatatcaaataatccagagagagcataaaagagagcacaacaccttagagctaattgcatctgagaattttactagccctgcaatattagaggctgcaggagggattatgacaaataagtatgctgagggttatccaggtaagcgttattatggtggctgtgttcatgttgatgaggcagaaaatttagctattagtaggttgaaaaagctttttggcgtggaatatggtaatgtacagcctcattcgggttcacaggcaaatatggctgtctt

SEQ ID NO: 228219 - DNA, 492 bp, Unknown
  Bacterial polypeptide expressing nucleotide sequence isolated from the Sargasso Sea
tatgaaatcttctaaaagtgatagtgttttctccgataaaagctctataaaggactttgataaagatctatggttatcttttgaaaatgaagctcaaagacaagaggaccatattgagttaattgcttcagaaaattatgcatccaaaagagtgcttgaagcgcaaggatctcttcttactaataaatatgcagagggatatccttcaaaaagatattatgggggttgtgagaatgttgatgttgcagaaaatcttgcaattgagagagcaaaagaattatttcatgctgattatgcaaacgtacagccacactctggttcgtctgcaaattcagcagcattcttagcattattagagcctaatgacactgttcttggaatgagtttagatcatgggggacacttaacccatggctctaaagtaaatttttctggcagaaattataaaagcattcaatacggacttcatccagaaacagatgacattaatta

SEQ ID NO: 228220 - DNA, 940 bp, Unknown
  Bacterial polypeptide expressing nucleotide sequence isolated from the Sargasso Sea
gggtggttgtgaagttgtcgatcagattgagcaactggctatagacagagcaaaagaattgttcggtgctgaatgggccaatgtacaaccccattccggagctcaagcaaacgctgcagtcatgcttgcaattttaaaacctggagacaaactattgggattcaatttatcacatggcggtcacctaacccatggatcacctgttaacttttctggaaagttgtacaacccttctttctatagtgttgaaaaagagacaggtagaatagactacgatgtcatggaaaaaacagctttagaagaaaagccaaagctcattatagccggagcttctgcttattcgagagattgggattatgaaaggatgagatccattgcagataaaatcggagcattgttacttgctgatatagcacacccagcaggacttatagcctctggtttattaaacaacccactacctcattgtcatatcgttacaacaactactcacaaaacacttaggggcccaaggggaggattaataatgatgggagaaaacttcgaaaacccctggggcttaaaaactcctaaaggaaaaacacgaatgatgtcagcaattttagattcaggtgtttttcctggtacacaagggggaccactggaacatgtaattgcatcaaaaggaattgctttcggtgaagctttgggagatagctataaaatctattgtaaacaagttattgcaaatgctcaagcaatggcaagtagttttatagaaaaaggctatcacatcatttcaaatggaacagataatcacagtatgttaattgatatgaggagcaaaggtttaacgggtaaagaagccgaagaaacattagtaaaggcagatataaccttaaacaaaaacatggtaccatttgacacagaatctccttttgtaacttcaggtattagaatc

SEQ ID NO: 228221 - DNA, 874 bp, Unknown
  Bacterial polypeptide expressing nucleotide sequence isolated from the Sargasso Sea
tatgatttcagatttgtttactaaaggaattaaagaagcggacccagaggtttatggcactttaagccgtgaattagaaagacagcaaaatcaaatagagttgatagcatctgaaaacattgcttcaagatcaattttaaatgctcaaggttctgttatgacaaataaatatgcagaaggttatcctggtaaacgatattatggaggatgtgagtttgttgatcaagctgaagagattgctttagaaagagttaaaaaactttttaattgtaaatttgcaaatctacaaccgcatagtggagcacaggcaaatcaagcagtctttctagctttacttcagccacatgataccattttaggtatgtcacttgcatcaggaggtcacttaactcatggagcaaaacctaatctatctggtaaatggtttaatgctgttcaatacggtgtaaaaaaagatggcaatgataaagatttaattgattatgatgaagttgaagcattagcattagagcataaaccaaaaatgataatagcaggagcctccgcttatcctagaactatagattggaaaaagtttagagacatagctgataaggtgggagcatattttttagttgatatggctcactactctggtttggttgctggtaaacaatacccaaatccaattgagcatgctcatatagtaacttctacaacccacaaaactttaagaggcgcaagaagcgcaatgattctaactaatcatgaagatttatataaaaaaatcaattctgctgttttccctggattgcaaggcggtccactaatgcatgtaattgcagctagagctgtttgctttggagaagcacttaaacctgaatttgaaaatata

SEQ ID NO: 228222 - DNA, 653 bp, Unknown
  Bacterial polypeptide expressing nucleotide sequence isolated from the Sargasso Sea
agtagctggtaaaggttatccaaatccagttgaccacgcagatgtagtaacatcaacaactcataaagtttttagaagtgctcgaggtggaataattttaacaaacagagaggatttatctaaaaaatttaattcagcagtttttccaggataccaaggcggaccattaatgcatgtcatagctgcaaaagcagttggttttttggaagcgttgaagccagattttagaaattatatatctaacgttcttgcaaatgctaagatgttagctgaaacattaaagaataatggatttaaaatttattcaggaggcactgatacacatttaatgttagttgatttacgtccatttaatgtaaaagggaatatggcagcagatagtttatgtagagctaacataacttgtaataaaaatggaataccttttgatacagagagtccaatgattacatctggtataagattaggaactcaagcagcaacaacaagaggatttggattagaggaatttaaattagtaggtaatttaattaccaaagtaattaaaggattatcaactaatcaagaggataatagtaaagttgagaatgaagtaagaaaagaggttatcgatctttgctcgaagtttccgatttataaaaatttaaaataac

SEQ ID NO: 228223 - DNA, 290 bp, Unknown
  Bacterial polypeptide expressing nucleotide sequence isolated from the Sargasso Sea
cctgatccgccaaggcctcaccggcaaagaggcggatgccgctctgggtcgcgcccacatcaccgtcaacaaaaacgcggtgccgaatgacccgcagtcgccgttcgtgacctcgggcctgcgcatcggtaccccggcggtgaccacccgtggtttcaaggtgccgcaatgcatcgagctggccggctggatctgcgacatcctcgacaacctcggcgacgccgacgtcgaggccaacgtggccaagcacgtgtctgccctgtgcgctgatttcccggtttatcgctgag

SEQ ID NO: 228224 - DNA, 946 bp, Unknown
  Bacterial polypeptide expressing nucleotide sequence isolated from the Sargasso Sea
atggaagctcagggatctcaacttacaaataaatatgcagagggttattatggtaaaagatattatggtgggtgtaaattcgttgatattgctgaaagacttgccattgaaagagcacaaaaattatttggtgttgactatgctaacgttcagcctcattcaggatcacaagcgaatgctgcagtgtttgatgctattttaaaacctggtgataatttacttggtatgaatctaggtgcaggtggacatctaactcatggcagtaaagttaatttttcaggtaaaaactataatgcaattcaatatagtttagataaaaatggagatataaactataagcaagtagccgaattagcaaaaagatataagccaagaattattattgctggtttttctgcattttcaggaattatagactggaagatattcaaagatatagctacctcagttaatgcagtactaatggctgatatcgctcatatagctggtctaattgctacaggattatatccaaacccctttcctttcgttgatgtcgttacaacaactacccataaaacattaagaggtcctagaggaggattaattctctgtaacaatagtcctaacttagcaaaaaaaattcaatcagctgtctttccaggtattcaaggtggacctttgatgcacatcattgcagctaaagcagtcgcattcaaagaagctttagatcccatttttgttaaatatcaaaaacaggttctaagaaatgctaaagctattgaaagaactctaaaaaaacgggatattgatattgtatctggtggtactaataatcacctacttcttttagatattacaaatacaggattctctggtaaagaagctgaagcgtccttagatagagctcatataactgataataaaaattccatacctaatgaccctcgttcacctttcataacta

SEQ ID NO: 228225 - DNA, 660 bp, Unknown
  Bacterial polypeptide expressing nucleotide sequence isolated from the Sargasso Sea
aatgggccttgatctagcccatgggggacatttgactcatggaagcaaagttaatttttcaggaaaaatgtacaatgcggtttcatatcaagtgaataaagatactggtagagttgatctaaataatgttcatgagatagctaagaaatataaacccaaggttattatttgcggtggtagcgcatatccaagatttgttgaattctcagaatttaaaacaattgcagatagtgttgatgcttatttgatggctgatattgctcatccttcaggattggttgctgcagggattcatccgtctcctatgccgtattgtgatgtcgtaactacaacaacccataagactcttcgtggccccagaggcggtatgattatgatgggaaaagattttgaaaataaatggggtatagttgctcctaaatccggtagagttaaaatggtttctgagatacttgatacggctgttatgcctggaattcaaggtggtcccttgatgcatgttatcgctgcaaaagcaattgcatacggcgaagcgcttgatccgaaattcaaattatatgcagctgatattgtcaaaaatgctaaaactatggctgatgcatttataaaaaaaggttatgatattatatcaggtggaacagatacacacgttgtactaat

SEQ ID NO: 228226 - DNA, 624 bp, Unknown
  Bacterial polypeptide expressing nucleotide sequence isolated from the Sargasso Sea
cggtgaatattgcggatgtgaccacaagcacaacacataaatcactacgtgggccacgcagcggtattatcatggccaagtcgaatcctgagctggagaagaagttaaattcagcggtgtttccaggcatgcagggtgggccattaatgcacgtcattgcggctaaagctgtggcgttcaaagaggcgttagagcctgaatttaaaaactattctcagcaagtgattaagaatgcgcaggcgctggcgaataccatcatcgcgcgtgggtataaaatcgtttcaggtgggacaaaaaaccattgcttcttgattgacttgattgataaaggcatcaccgggaagcaagcagagcatgatttgggtcgcgcacatatcacattgaataaaaactcggttccgggcgatcctcaatcccctttcgtgaccagtggcctgcgggtcggctcaccggcggtgaccacacggggtatgcaagaagcggaaatggttgagttggccggcttaatgtgcgatattctcgataatattggtgataatgatgttgttgccagggtcgcaacacaggtaagcgcgttaagtggtcgttttccggtgtatgagaaagcagaatcaaccgtatagg

SEQ ID NO: 228227 - DNA, 361 bp, Unknown
  Bacterial polypeptide expressing nucleotide sequence isolated from the Sargasso Sea
atgaaatcatcaagaagcgatagtattttttcgaataataacaccataaaagattatgacaatgaattgtgggcatcctttcaacatgaagctgaaagacaagaagatcatattgaattaatagcctcagaaaattatgcatcaaaacgaatccttgaagctcaaggttctcttttgactaataaatatgctgagggatatccctcaaagcgttactatggtggttgtgaaaatgttgatattgcagagaatcttgcaatagatagagcaaaagaactttttaaagcagattatgcgaatgttcaacctcattcaggatcatcagctaatgcagcagcctacttagctcttttgcaaccca

SEQ ID NO: 228228 - DNA, 775 bp, Unknown
  Bacterial polypeptide expressing nucleotide sequence isolated from the Sargasso Sea
cctaaacttataattgctggtggtagtgcttattcaagagtaattgattttaaaagatttagagaaatagctgataaagttggagcatacttaatggttgatatggctcatttttctggtttggttgctggtaaaggatacccaaatccatgtgactatgcacatgtagttacatcaactactcacaaagtatttagaagtgcaagaggaggaattatattaaccaattatgaggatctatctaaaaaatttaataccgcagttttccctggataccaaggaggaccattaatgcacatcatagctgccaaagcagttggatttaaagaagcattaaaaccagaatttaaagattatataaaaacagttttagcgaatgcaaaaattttagctgaaactttaaaaaataatggttttaaaatttattcaggtggaactgatacacatctgatgttagttgacttaagaccttttaatgtaaaagggaatgttgctgctgaaagcctttctagagctaatataacatgtaataaaaatggaattccatttgacagtgaaagcccaatgataacttctggaataagacttggatcacaggcggctacaacaagaggttttggattaaaagaatttcaaatagtaggtgatttaataacaaaaactataaaaggattggcagaaaatccagaagacaactctaaaacagaggatgaagtaagaaaagaagttgttagcctatgctcaaattttcctatatataagcacttaggttaac

SEQ ID NO: 228229 - DNA, 877 bp, Unknown
  Bacterial polypeptide expressing nucleotide sequence isolated from the Sargasso Sea
gaatggtgctgtatttttagctcttctcaagcctggtgatacaattatgggattaagccttaattcgggtggacatctaacacatggatctaaggctgccgtatctggtaaatggtttaatgctattgcttatgaagtagataaagaaactgagttacttgactataacgcaattgaaaaattagcgattgagcacaaacctaaacttatcatagcgggtggaagtgcttattctagagttattgattttaaaaaatttagagaaatttctgataaggttggtgcatatttcatggtggacatggctcacttttcaggactggttgctggtaaaggatatccaaatccagtagatcacgctgatgtagttacttctacaactcataaagtatttagaagtgcgagaggcggaataattttaacaaacagagaagatttagcaaaaaaattcaattctgctgttttcccaggctaccagggtggacctttgatgcacattatagcagctaaagctgttggttttcttgaggcactaaaacccgagtttagagaatacattaagtctgtgttagcaaatgcaaaaatattagctgagacattgaaaaataatggttttaaaatatattcaggcggaacagatacacatttaatgttagttgaccttagaccatttggagtaaaaggtaatattgcgtctgacagtctatcaagagcgaatattacttgtaacaaaaatgggattccttttgatacagaaagtccgatggttacatcaggtattagattaggatctcaagccgcaacgacaagagggttcggtttaaaagaatttgaaaaaattggtgagcttataactaaaacaattaatggattatca

SEQ ID NO: 228230 - DNA, 385 bp, Unknown
  Bacterial polypeptide expressing nucleotide sequence isolated from the Sargasso Sea
ttggctgcgaccctaaataggggcgggctcgatatcgtgacgggtgggacggatacccatgtcgttcttgtcgatttgagaccgatggggctcacgggtaaggacgcagaagcagtgatggagcgggtcggattgacatgcaataagaatgcagtgccgttcgattcggagaagccgacgatcacgtccggtgtacggctcggtacgccggcagcgacgagccgtgggttcgggcaggcggaattcaaacgtgtaggcgaattgattataaaagttttgcaggggcttgcggagcggccggatgatcaggacgtgatggaagccgatgtccgctctggagtaggtgaactgtgcaaacggttcccgatctatccaactctgtgag

SEQ ID NO: 228231 - DNA, 556 bp, Unknown
  Bacterial polypeptide expressing nucleotide sequence isolated from the Sargasso Sea
tttactaatgatgaggaaatacataaaaaaattaattctgcagtttttccaggtttgcaaggtggtcctctcatgcacgtaatggctgctaaagctgtttcttttggagaggctcttaaacctgaatttaaagaatattctaaaaaagtgattctaaatgcaaaagtattatctgaaacattagttaacaaaggttttagagttgttacaggaggtacagattctcatattgtatggctagatttgacaccaaagaatttaactggagataaagctgaaaaaatattagaggatgtgggtattgcatgtaataaaaatgcaataccttatgatcctcatcctccaaaaattactagtggtttaagatttggtacagctgcagctacatcaagaggttttaatgaagatgactttaaaaatgttggagaaatgattagtgaaatattagatagtttaaagttaaatgaagatgaaatgaaattagtttttttaaatattagaaaaaaggttttagaattatgtaataagcaccctatatataatgaggctttttaat

SEQ ID NO: 228232 - DNA, 298 bp, Unknown
  Bacterial polypeptide expressing nucleotide sequence isolated from the Sargasso Sea
tatgcttgttgatttatctgctcttgatacttcaggaaaagaggtagcctcagcattagataaagctgcgattaccgtaaataaaaactctattccattcgataaaaagagtccatttgttacatctggtataagagttggaacgcccgcggtaacaactcgcggaatgcgtgaaaaagaaatggttcttattgcagaaatgattaaaaagatagcgcacgatccttctaatgaatacttaatttcaacaattagagaggaagcgataagcttatcgtctgattttccaattctttaa

SEQ ID NO: 228233 - DNA, 316 bp, Unknown
  Bacterial polypeptide expressing nucleotide sequence isolated from the Sargasso Sea
atgaataattttaaatttaaaaacaattactttaaagaaggtttttttgaaaaaagtttaattgactatgacccagagttaggaaaaattttacagaatgaattgtatagacaaaaaaaccagattgaaatgatagcttcagaaaatattgtctcaagggctgttcttgaagctcaaggctctgttttaactaacaaatacgctgagggctatccagggaaacgatattatggaggttgtgaggagtatgacaaactagaaaatttagcaatatctagggcaaagaaactctttaatgctaaatttgttaatgtgc

SEQ ID NO: 228234 - DNA, 555 bp, Unknown
  Bacterial polypeptide expressing nucleotide sequence isolated from the Sargasso Sea
tatgtctagtgaaaaaaaatatttaaatgatagctacaaaagtttttttgaagacagcttatcaaagaaggatcctgatctttataaagctattaaagatgaacttataagacaacaacaacatattgaattgatagcttcagagaatatagtttcacaagcagtcctagaagcacaaggatcagtattgacaaataaatatgccgaaggttatccgggcaaaagatattataatggttgcgaacatgttgatgttgctgaaaatttagcaattgaaagattaaaaaaattatttgattgtaaatttgctaacgcacaacctcattcaggtgctcaagctaatggagctgtattcttagctttattaaatcctggagatacttttatgggaatgagtttaaattctggtggacatattactcatggattaaaaatttcaatgtctggcaaatggtttaatgctatagggtatgacgttgacaaagagtctgaacttattgattatgacaatgttgaaaaacttgctttagaacacaaaccaaagctaattatagc

SEQ ID NO: 228235 - DNA, 476 bp, Unknown
  Bacterial polypeptide expressing nucleotide sequence isolated from the Sargasso Sea
aatgtctgcacaaactaagtatagtagcaacaagcataaagatttttttgaaaaaaaattgtcagacacagatccagaaatatacagcgcaataaatgatgaattagttagacaacaaaatcatattgaactaatagcttctgaaaatatagtttctcaagctgtcttgcaagctcaaggatctgttttaactaataaatatgctgagggatatcctggaaaaagatattacaacggatgtgagcatgtagatgtagctgaaaatcttgctatagaaagattaaagaaattatttgaatgtaaatttgcaaatactcaaccacactcaggagcacaagctaatggtgctgtttttttagctttattaaagccaggtgatacctttatgggcatgagtctaaattctggtgggcatattactcatggtttaaaaatatcaatgtcaggaaaatggtttaatgctataggttatgatg

SEQ ID NO: 228236 - DNA, 793 bp, Unknown
  Bacterial polypeptide expressing nucleotide sequence isolated from the Sargasso Sea
gcgattcagtatggcttgaacccagaaactggtgaaattgactatgaccaagtagaagccttggctaaagagcacaaaccaaaaatgattgtagcgggcttttctgcttactctcgcgtggtcgactggcagaagtttagagacatcgctgatagcgtaggcgcgtatttactcgtagatatggcacatgttgcaggccttgttgcggccggtgtttatccctcgccaattaacgcggctcacgtggttactactactacccataaaacactacgtggtcctcgtggcgggcttattatgtgtaagtcaaaccccgagcttgaaaagaaattcaattcattaattttccctggcattcagggtggcccacttatgcacgttattgccgcaaaagcggtagcgcttaaagaagccatgacagcagagttccgcgcttatcaaaagcaggtagttattaatgcacaagctatggctgaggtgtttatgaagcgtggcttcgacgtagtatctaatggaaccgacaaccacatgttcctgctaagtcttgtaagcaaaggaatgacagggaaagaagccgacgcgatattaaatagcgtgaatataacggtaaataagaacacagtacccaacgacccgcagtcgccattcgttacaagtggtattcgaattggcacacctgcggtcacttcacgcaattttagtgaagaagactgtggtcaattagcccattggatttgtgatgtgttaacagcgccagaagacaatgcagtagtacagcaagtgatagataaag

SEQ ID NO: 228237 - DNA, 656 bp, Unknown
  Bacterial polypeptide expressing nucleotide sequence isolated from the Sargasso Sea
tatgtcaagtgaaactaaatatttgaattctgagtataaagatttttttgaaagaagtctttctgatgctgatcctgatttgtttaaagctattaatgatgaattagtaagacaacaaaatcatattgaacttattgcatcagaaaatattgtttctcaagcagtgcttgaggctcaaggctctgttcttacaaataaatatgctgaaggttatccaggaaaaagatattataatggttgtgaacatgttgacgttgcagaacaattagctttagaaagaattaaaaaactatttaattgtaagtatgctaacgttcaacctcactcaggtgctcaagcgaatggagctgtatttctagcattacttaaacccaacgatacatttatgggtatgagcttaaattcaggtggtcacataactcatggtttgaagatttctatgtctggaaaatggtttaatgcaataaattatgatgttgataaaaaatctgaattaatcgattatgataatgttgaaaaattagctttagagcacaaaccaaaactaattatcgctgggggtagtgcctattcaagagttattgattttaaaagatttagagaaattgcagataaagttggagcttatttcatggttgatatggcacatttttctg

SEQ ID NO: 228238 - DNA, 760 bp, Unknown
  Bacterial polypeptide expressing nucleotide sequence isolated from the Sargasso Sea
atgtcaagtgaaggtaaatatataaattctagttatcaggacttttttgaaaaaagtttgtcagagacagatccagaattgtttaaagctattaacgatgaattaataagacaacaaaatcacatagagttaattgcttcagaaaatattgtatccaggtcagttttagaagcacaaggttctgtattgacaaataaatatgccgaaggatatcctggtaaaagatattatgatggttgcgaacatgttgatgtagctgaaaatcttgcaattgaaagattaaaaaaaatttttgattgcaagtttgcaaatgtccagcctcactcaggagcacaagcaaatggtgctgtttttttagccttattaaaaccaggtgataagataatgggtatgagtttaaattctggtggtcatttaactcacggttctaaagcatcagtttctggaaaatggtttaattcaatttcgtacgatatcgacaagaattctggtttaattgattacaatgaagttgaaaaaatcgcactagaaaatcaaccaaagttaattattgcaggcggaagtgcatattcaagaataatagattttaaaaaatttagagaaatatcagataaagttggcgcttatttgatggtagatatggcacatttttccggtttagttgctggcaaagggtatccaaatcccattgaacatgctcatgttgtaacttcaaccacacataaagtttttagaagtgcaagaggcggcattatcttaa

SEQ ID NO: 228239 - DNA, 244 bp, Unknown
  Bacterial polypeptide expressing nucleotide sequence isolated from the Sargasso Sea
atgtcaatagcagtaaaattaaacaaatacttaaatagcttttttaaacttaatttaaaggatgcagataaggaattgtataaatctatcgaagaagaattttcgcgacaacaaaatcatattgaacttattgcatcagaaaatatagtttccaatgcagtgcttgaagcacaaggatccgttttaacgaataaatatgctgaaggatatcctggtaaaagatattatggaggatgcgagcatg

SEQ ID NO: 228240 - DNA, 886 bp, Unknown
  Bacterial polypeptide expressing nucleotide sequence isolated from the Sargasso Sea
tatttcttatcacgttgataaagagacgggtagagtcaattttgacgaggtcagatcactagctctagagtataagcctaaaatgataatttgtggggggagtgcatatccccgttatgtagagtttgataaattttatgaagttgctcaagaaataggagcttttttgatggcagatattgctcaccctagcggtcttgtagctgctggtgttcatccatctcctgtaccttactgtgatgtaataacaagcactactcataaaacgcttcgtgggcctagaggtggtatcataatgatgggaaaagatagagaaaatacttggggtaagatcgcaccaaagtcagggagaactaaaatgatttcagaacttcttgattcttctgtaatgccaggaatgcagggtggtccgctaatgcatataatttctgcaaaggccattgcttttggagaggctatcaaagatgaatttaaagtttatgcaaagaaaattgttgataatgcaaaagtaatggctcaagagtttattgaaatggattatgatatagtctctggtggcactgatacacatgttgtattaatggatctatccaataaaggtatatccggcaaagctgcagaaaaagcccttgaaaaagctggtattacagtaaataaaaatatggttccatttgatcaaagaagtccttttattactagtggaataagagtaggaactccagctatcacgacaaggaatatgggtagtaatgaaatgaaaaagattgctacctttattaatactgtagtaactgatgctgataacgacgatactattcaaaatattaaattgcaggttaaagagctttgtgattcctttccaatctacgaagaatcttctcattaa

SEQ ID NO: 228241 - DNA, 770 bp, Unknown
  Bacterial polypeptide expressing nucleotide sequence isolated from the Sargasso Sea
atttcttctgctatagaccaagaactgtcacgtcaacaaaaccaaatagaattaattgcatctgaaaacattgtttcaaaagcagttttggaagcacaaggttctgttctaacaaataaatatgctgaaggctacgtaggtgcaagatattatggtggttgcgagtttgttgacatcgcggaagaccttgcaataaaaagacttaaagaactttacaagtgtgaatatgcaaatgttcaacctcactctggagctcaagcaaacggagctgtttttttagcattgattaagcctggagataaaattttaggaatgagtcttgatgcaggagggcatttaacacatggatcagcaccgtcattatctggaaaatggttcaatgctgttcaatatggattggatgataagggattaattaattatgaagaagttgaatcagttgcattagaacataaaccaaaaataattattgctggtggcagtgcttactctcgaattatagactttaaaagatttagagaaatagctgataaagttgatgcttatttgcatgtagatatggcccatttttctgggctagttgctgctggagagcatcccaatcctttagaatatgcggatgtagtcacttcaactactcataaaacaattagaggcgcaagaggtgggatgatattatcaaataataaagatcttggaaaaaaatttaactcagcggtatttcctggttatcaaggaggccccttgatgcatgttattgcagcaaaagc

SEQ ID NO: 228242 - DNA, 517 bp, Unknown
  Bacterial polypeptide expressing nucleotide sequence isolated from the Sargasso Sea
aatagtgcaatttttcctggccttcaaggcggacctttaatgcatgttatagctgctaaggctgtttgcttcaaagaagctctatctaaagattttaaagaatatacaaaaaatgtaattaataatgctaaagttctttcaaatagactaactgaaaaaggttttaagattttttcaggaggcactgacacacacttaatgttaatagatttaagatcttttggtgttactggtaaagatgcgcaagcttctttaggaagagcaaatatcacttgtaataagaatgggattccttttgatacagagagtccgatgataacatctggaattagattagggactccagcatgtactacaagagggtttggagcaaatgaatttaaattagttgccgatctaatttttaaagttatagagggactaagcaaaaataaagaagacaactcaaaaatagaaaaagaagttcaaaaagaaataattgatctttgttcttcatttcctatatatagtagttaaa

SEQ ID NO: 228243 - DNA, 727 bp, Unknown
  Bacterial polypeptide expressing nucleotide sequence isolated from the Sargasso Sea
tgtattagaagcccagggatctgtattaacgaacaaatatgcagaaggatatactgctgcccgttattacggtggttgtgagtttgttgatattgctgaggaccttgcaattcagagactaaaaaaactctataaatgtgaatatgctaatgttcaaccccattcaggagcacaggctaatggtgcagttatgttagctctaataaagccaggagatactattttaggaatgagtttagatgccggtggacatttaactcatgggtcagcaccttctatgtcaggaaaatggtttaatgcagtccagtatggtttagatgatgaagggttaattgattatgatgaagttgaatcgcttgcaaaagaacataagccaaaaataataattgcaggaggaagtgcttactcgagaataatagacttcaagaaattccgtgaaatttgtgacctagtgggagcatacctgcatgttgatatggctcatttttcaggcctagtagctgctgaggagtacccaaatcctctagagtttgcggatgttgttacttcaacaactcacaaaactataagaggcgctagaggaggtatgatactatccaataacagcgacttaggtaaaaaatttaattcagctgtattcccgggatatcaaggtggacctctaatgcatgtaatagcaggtaaggctgttgcctttggtgaagcactaaaaccagaattcaaagaa

SEQ ID NO: 228244 - DNA, 679 bp, Unknown
  Bacterial polypeptide expressing nucleotide sequence isolated from the Sargasso Sea
aatggttgatatggcacatttttcaggtttggttgctggaaagggatatccaaacccatgtgactatgctcatgtagttacatctactacgcataaagtttttagaagtgcaagaggtggaataattttaactaatcacgaagaattatcaaaaaaatttaacacagcagttttccctggctaccagggtggaccattaatgcatgtaattgcagctaaagcagctggctttttagaagctcttcaacctgattttcaagactacattaaatctgttttagccaatgcaaaaattttagcagaaactctaaaaaataatggttttaaaatttattctgatggaaccgatactcatcttatgttggttgatttacgaccttacaatgtaaaaggaaacttagctgctgaaagtttatcaagagctaatattacttgtaataaaaatggtattccctttgatacagaaaagccaattataacatctggtataagacttggaacgcaagcaataacaacacgtggttttggtttaaatgaatgtaaaaaagtgggtgaattgattacaaaaaatcttaaaggattagcagaaaacccagaggacaacagcaaaatagaagaagaagtaagaaatgaagttattgctttaacttcttcatttccgatatataagaatctataa

SEQ ID NO: 228245 - DNA, 900 bp, Unknown
  Bacterial polypeptide expressing nucleotide sequence isolated from the Sargasso Sea
gcggccacttaactcatggagccaaaccagcacaatcaggtaaatggtttaatgctgtacactatgacgtcaaagaagatactggtttaattgactatgaaaatgtagaaaaattagctttagaacataaaccaaaacttataattgctggaggcagtgcttattctagagtcataaattttaaaaaattcaaagatatttgtcaaaaaataaatgcttacttattagttgatatggcgcatttttctgggttggtagctggcggcgcttatcctaatcctttagagtatgctgatgttgttacatctacaacccataaagttttaagaggtccgcgtggtggaataatcttaactaataatgaaactctttataaaaaatttaatagcgctgtttttccaggacttcaaggtggaccgttaatgcatgttattgcagctaaagctgtttgctttaaagaagctctaagtggtgaatttaaaaaatatacttctgatgtaatatctaatgcaaaaattttgagtgaaacacttgttgaaaacaattttaaaatattctcaggcggaactgatacacatcttatgttagttgacctaagaccatataaagtgactggtaaggacgcagaggaaagtttaggtagagctaatataacttgtaataaaaatggcattccttttgatacagaaagtccgatgattacctctggaataagactaggaactcctgcggctacaacaagaggctttaaatcacaagaatttaaattagtaggaaaattgattacaaaagttattaaagggctttcagaaaacccaaaaaacaatacaaaaattgaaaaagaagtacaaaaagaggttgttgatctctgctctgatttccctatatatagtggataaa

SEQ ID NO: 228246 - DNA, 919 bp, Unknown
  Bacterial polypeptide expressing nucleotide sequence isolated from the Sargasso Sea
ctaacacatggatctagtgtgaatttttcaggaaaaatatattcttcatgtttttatggggttaaaaaaaacaatgggctactggattataatcaactagaaaaggttgcttttaaagaaaaacctaaactaataatttgcggagcatcttcttatagtagagactgggattataaaaaaattcgagaaatagcagattcagttagtgcaattgtacttgcggatattgctcacccatctggtcttattgcaagaggattattgaatgatccactagatcattgtcatatagtaacctcaactactcataaaacattaaggggtcctaggggtggcatcataatgatgcggaatgactatgacaatccccttggaacgaaatctcctaaaggaaatttaaaatctttgtcatcagttttagactccgctgttttcccaggtacccaaggggggcctttagaacatatcattgcagcaaaagcgatttcgtttgaagaagctttatccgataattatatgcaatatattttacaggtgaaaaaaaatgccaaaatgatggcaaaatgtttgattgaaaaggggtataatatcatttcaaatgggacagaaaatcacctaatgcttattgacttaagcaataaagatataacaggtaaagttgctgaaaacactttgggaaaagctgatataactattaacaaaaacatggttccttttgataaggagtctcccttcataacttcaggaatgagaataggaagtgcagcaatcacaactagaggaatgaaagaaaaagaaatgaaaaaggtcgttttttatatcgatgaagtattaaaaaacagaaacaatgaaaaaagaataagagaaatcaaaaatgaaattaacaattggatggtagattatcctttatttaaatgaa

SEQ ID NO: 228247 - DNA, 421 bp, Unknown
  Bacterial polypeptide expressing nucleotide sequence isolated from the Sargasso Sea
tatatatctaatgttttagctaatgcaaaaattctcgcagaaacattaaaaacaaatggatttaagatttattctggaggtactgatactcatttaatgttggtagatttaagaccctttggtgtcaaaggtaatgctgcagctgaaagtttatcaagagccaatataacatgtaataaaaatggaattccttttgatacagaaagtccaatggttacttctggtataagattaggatctcaggctgcaactactagaggttttggtttaaatgaatttaaaattgttggtgaactaattactaaagtaattaaaggtttgtcatcaaaccctgaagataataaaaaaatagaagacgaagtaagaaaagaagttgttgatttatgttcaaatttcccaatttataaaaatttgggataat

SEQ ID NO: 228248 - DNA, 625 bp, Unknown
  Bacterial polypeptide expressing nucleotide sequence isolated from the Sargasso Sea
atgaatattcttcaaaatcttaaagaaagtgatccagtaatatccaattttattaactctgaaaaaaatagacaggaaactcaccttgagttaatagcaagtgagaattttgcatcaattgctgtcatgcaggctcaaggatctgtccttactaataaatacgcggaaggattacctcaaaaaagatattacggtggatgtgaatttgttgatgaaatagaagaattagctattcagagagcgaaaaaattatttaatgcaaattgggctaatgttcaacctcacagtggagctcaggcaaatgctgccgttttcttaagtcttcttaaacctggcgacacaatcatgggaatggatttatctcacggcgggcaccttactcatggatctccagtcaatatgagtggtaagtggttcaatgcagttcactatggtgtaaataaagaaactagtgaactgaattttgatgaaataagagatatagcactagaaacaaaaccaaaattaatcatatgcggatattctgcttatccaagaacaattgattttgaatcatttagaaatattgcagatgaagttggtgcattcttaatggcggacattgcacacatcgcggggctcgtag

SEQ ID NO: 228249 - DNA, 703 bp, Unknown
  Bacterial polypeptide expressing nucleotide sequence isolated from the Sargasso Sea
gcactttttcaacctcatgacacaatattaggaatgtcacttgcatccggtggtcacttaactcatggagcaaaacctaatctatatggtaaatggtttaatgctgttcaatatggtgtaaaaaaagatggtaatgataaagatttaatagactatgatgaagttgaggcattagctttggaacataagccaaagatgattattgcaggtgcttctgcatacccaagaattattgattggaagaagtttaggaatattgcagataaagttggtgcttattttcttgtagatatggcccattactcaggattaatagcaggtaatcaatatccaaatcctattgatcatgctcacattgtaacttgtactactcataaaacattaagaggagcaagaagtgcaatgatactaactaatcacgaggatttatataaaaaaattaattctgcggtttttcctggactgcagggtggccccctaatgcacataatagcagcgagagctgtttgttttggtgaagcattaaagcctgaatttgaagaatatattaaaaatgtcatagcaagcgcaaaagtaatgtcccaaacattagttgatagaggttttagaattgtaacaggaggaacagattctcatattgtatggttagatttaacacctaaaggtttaactggtgataaagctgaaaaaatactcgaagatg

SEQ ID NO: 228250 - DNA, 559 bp, Unknown
  Bacterial polypeptide expressing nucleotide sequence isolated from the Sargasso Sea
tactaataacgaagaaatatttaaaaagattaattctgcagtttttccaggctatcagggaggacctcttatgcatgttattgcggcaaaagctgtagcttttcaagaagctttacaacctagttttaaaatttatataaaatcagttttagaaaatgctaaaattttatccgaaactttaaaaaataatggatttaaaatattttctggtggaaccgatacacatttaatgctggttgatttacgaccttttaaagttacaggaaaaaatgcagaagcaagtttatgtcgagctaatattacttgcaataaaaacggtattccatttgatagtgctaaacctacaataacttcaggtatcaggttgggatcacaagctgcaaccacaaggggttttggtttaaatgaatttaaaaaagtgggagatttaattacaagagtaattaaagggctttctacaaatccagaagataacactaaaacagaacaggaagttagaaaagaagttgttacactttgtgctaaatttcctatatataatcatttaataaaaaaataa

SEQ ID NO: 228251 - DNA, 372 bp, Unknown
  Bacterial polypeptide expressing nucleotide sequence isolated from the Sargasso Sea
aaacaaatggttttaaaatttattcagatggaacagatactcatttgatgttggttgatttaagaccatttgatgttaaagggaatgttgctgccgaaagcttgtcgagagcaaatattacttgcaataaaaacggaattccatttgacagcgaaagtccaatgataacatctggtataagattaggttctcaagcagctacaactagaggatttggtttgaatgaatttaaattagttggtgaactaattactaaaactattaaaggtttgtctttaaatccaaacgataatagcaaagttgaggatgaagttagaaaagaagttgtagatttatgctcaaattttccaatatataaaaatttaggataat

SEQ ID NO: 228252 - DNA, 592 bp, Unknown
  Bacterial polypeptide expressing nucleotide sequence isolated from the Sargasso Sea
aatgtctagtgaaggaaaatatttaaatccagaatatcaaaactttttcgaaaaaaaactttcggaaatcgatcctgaaatttcaaaagctatagatgatgaattaatcagacaacaaaatcacatcgagcttattgcctctgaaaatatagtttcacaagctgtattagaagcacaaggttctgtactaacaaacaagtatgcagagggctaccctggaaaacgatattataatggatgtgagcatgttgatgtagctgaaagcttagctatagaaagacttaaaaaattatttgattgtaaatttgcaaatgctcaaccccactctggagctcaggcaaatggtgcagtttttttagcattacttaaaccaggtgatactattatgggattaagtttaaattctggtgggcatttaactcacggttcaaaggctgcagtatcgggaaaatggtttaatgctatagcttatgaggttgataaagagaccgaattgttagattataatgaaattgaaagacttgctttagagcataaaccaaaaatgttaattgctggaggaagcgcatattcaagaattatcgatttaaaa

SEQ ID NO: 228253 - DNA, 859 bp, Unknown
  Bacterial polypeptide expressing nucleotide sequence isolated from the Sargasso Sea
gatttgtttactaaaggaattaaagaagcagacccagaggtttacggaactttaagccgtgaattagaaagacagcaaaaccaaatagagttgattgcatctgaaaatattgcatcaagatcaattttaaatgctcaaggctctgttatgacaaataaatatgcagaagggtatcctggtaaacgatattatgggggatgtgaattcgtagatcaagcagaagaaattgctttagaaagagttaaaaaacttttcaattgtaaatttgcaaacttacaaccacatagtggagcgcaggcaaaccaagcagtttttctagcgttacttcaaccgcatgatactattttaggtatgtcacttgcatctggaggtcacttaactcatggagcaaaacctaatttatctggtaaatggtttaatgctgttcaatatggtgtaaaaaaagatggtaatgataaagatttaattgattatgatgaagttgaagctttagcattagagcataaaccaaaaatgataatagcgggagcttccgcttatccaagaacaatagattggaaaaagtttagagaaatagctgataaagttggagcatattttttagttgatatggctcactactctggcctggttgctggtaaacaatatccaaatccgattgagcatgcccatgtagtaacttcaacaacgcataaaactttaagaggtgctaggagtgcaatgattttaactaatcatgaagatttatataaaaaaattaattctgctgtttttcctggattacaaggcggtccattaatgcatgtaattgcagctagagctgtttgttttggtgaagcacttaaacctgaattcgaag

SEQ ID NO: 228254 - DNA, 637 bp, Unknown
  Bacterial polypeptide expressing nucleotide sequence isolated from the Sargasso Sea
atgtcaatagctgtaaaatttaataagtatttaaatagtttttttaaattaaatttaaaagaagctgataaagaactctatacttctattgaacaagaatttttaagacaacaaaatcacatagaattaattgcctcagaaaatattgtttcgagagctgtccttgaggctcaagggtcagtgttaaccaataaatatgcagagggttaccctggaaaaagatattacggtggttgtgagaatgtagatatttcagagaatttagctattgagagagctaaaaaattgtttaattgtaaatatgctaatgttcaacctcattctggtgctcaagcaaatggtgcagtttatttagctttattaaaacctggtgacactactttagcgttgagtttaaattcaggaggtcatcttacacatggagctaaaccagctcaatctggaaagtggtttaatgctttgcattacgaagtggaaaaaaattcaggattaattgattacaacagtgttgaaaaactggctttagaaaataaaccaaaactaataattgctggaggtagcgcttactctagaataattgattttaaaaagtttagaaaaatttgtgataaggttggtgcattcttgcttgtagata

SEQ ID NO: 228255 - DNA, 852 bp, Unknown
  Bacterial polypeptide expressing nucleotide sequence isolated from the Sargasso Sea
gccggcgaactggcggtgtacacggcgctcttgcaaccgcacgatcggatcatgggtttggatctgccgagcggtggtcacctgacgcacggatattacacggcgcacgggaagaagatttcggcgacgtcgatcttttttgaatctttgccttacaaggtggatccgaagacgggttacatcgattacgacaagttggaggagaaggcgatggatttcagaccgaagatgatcgtgtgcggtggttcggcgtacgcgagagattgggattacgcgcgcttccgcgaaatcgccgacaagtgcggcgccatgttgatgagcgacatggcgcacatctctggtttggtcgccgcggaagaacaggcgcagccgttcgactactgtgacatcgtcaccacgacgacgcacaagtccctccgaggcccgcgctctggtatgattttcttccgtcgcggtatcaacccgaagacgggtaaggattacaactacgagtcccgcgtcaacatgtccgtcttcccggcgttacagggcggtccgcacaaccaccaaatcggtgcgttggccgtcgccctcaagcacgcgcagacgcccgagttcaaggcgtacatcaagcaagtcaaggcgaacgccaaggcgtgcggcgaagctctcatggccaagggctacagcctcgtcaccggcggcaccgacaaccacttggtgctctgggatttgcgtccgctcggcttgactggaagcaagatggagtacttgtgcgaccttcttcacatcactttgaacaagaacgccgtcttcggcgacgccagcgcgttgtccccgggcggcgtccgcatcggcgctccggcgatgacc

SEQ ID NO: 228256 - DNA, 313 bp, Unknown
  Bacterial polypeptide expressing nucleotide sequence isolated from the Sargasso Sea
tgatgctgttggatctcatcggcaggagtacaccggtaaagatgcggacgcggcactgggtgaggcgtatatcacggtgaataaaaatgccgtgccgaatgacccgcgctcgccctttgtgacgtcggggctgagattgggcacccccgccatcacaacccgaggtttcagcgtggaagagaccgagctgttgaccggttggatctgcgatgtgttggcctctctggaggcagggacatcggaccaagtcatcccggcaatccgcgagcaggtgaagacgctctgcgccaagatgccggtctacgcgaactga

SEQ ID NO: 228257 - DNA, 703 bp, Unknown
  Bacterial polypeptide expressing nucleotide sequence isolated from the Sargasso Sea
tttagagagatagctaataagattaatgcttattttttagtagatatggctcatttttcaggcctagttgcaggtggtgttcatccaaaccctattgatcatgcagatattgtcaccacaactacacataaaactcttagatctggaagaggtggaatgattttaacaaataatgaagaactttttaaaaaaataaactctgctgttttccctggtcttcaaggtggccctttaatgcacgtaatagctggtaaagcggcaggttttggagaagcactaacaaacgaatttaaaacgtattcaaaaaacgttgttttgaatgctcaatgtttatctaaaacactaattaaaagaggttatgaaatagtttctggaggaactgataatcacatagttttattaaatttaaataataagaatataacaggatctagcgcagaattagcacttgaaaatgctggtctaacttgtaataaaaatggtattccattcgaccctttaccaccatcaattacatcgggtgttagatttggttcagcagctgcaacaactagaggctttcaagaaaaggaatttgaattaataggaaactttattgcagatgttttggacggaattaaagataataaatctgacgaagaaaaagaaaaacttatttatgaaaaagttaaaaatttatgtgcaagttttccaatttactagt

SEQ ID NO: 228258 - DNA, 769 bp, Unknown
  Bacterial polypeptide expressing nucleotide sequence isolated from the Sargasso Sea
ttaattattgcaggaggaagtgcatattctagagttattaattttgaaaagttcagaaatattgctgacaaaatcggagcttactttatggtagatatggcacatttctccggattagtagcgggcaaaggttatccaaatccagttaaatttgcagatgtagtaacatcaacaactcacaaagtatttagaagtgcgagaggtggaataattttaactaatagagaagatttatcaaaaaagtttaattctgcagtctttccaggatatcaaggtgggcctttaatgcacataatagctgcaaaagcagttggatttttagaagcactaaaaccagaatttcaagattatattaagtctgtattagcaaatgctaaaattttatctgaaacattaaaaaataacggatttaaaatatattcaggtggtacagatactcatttgatgttagttgatttaagaccattcggtgtaaaaggtaacattgcatcagacagcttatcaagagcaaatattacatgtaacaaaaatggcattccatttgatactgaaagtcctatgattacatcaggtataagattaggatcacaagctgctacaacaagaggtttcggtttaaaagaatttgaaaaaattggtgaactaattacaaaaactattaagggtcttgaaaagaacccttctgataatagtaaaattgaagaagaagtacgtaatgaagttatagatttgtgtagtaaatttcctatatacaaacatttgagataaa

SEQ ID NO: 228259 - DNA, 880 bp, Unknown
  Bacterial polypeptide expressing nucleotide sequence isolated from the Sargasso Sea
catgaaccctctaaaccatcatcttcaacaacaagacccagatatcgcacagtttattgcgcaagagaatgatcgccaagagcatcacattgaactgattgcatcggaaaactacaccagtaaagccgttatgcaggcgcaaggtagtcagctaactaataagtatgccgaaggctatccgggcaagcgctattacggtggctgcgaggcggtagacaaagtagaacagcttgccatcgacagagctaaagcgctgtttgaggcagattatgtgaatgtgcagcctcactctggctctcaagcgaataccgcagtttatatggcgttgttaaaccctggcgataccattcttggattgagtcttgatcacggtgggcacctgactcacggagctaagccaaatttttcaggcaagctctataacgccattcagtatgggctaaacactgaaaccggtgaaattgactatgcacaggtagaagctttggctaacgagcacaagcctaaaatgattgtagcaggcttctctgcttattctcgcgtggtcgactggcagaggttcagagacatcgccgatagcgtaggcgcgtatttactcgtagatatggcacacgttgcaggtcttgtggcagcggatgtctatccctctccaattaacgcggcgcatgtggttactaccactacccacaaaacgttacgtggtcctcgtggcgggctgattatgtgtaagtctaatccagagcttgaaaagaaattcaactcactgatttttcctggtattcagggcggcccacttatgcacgttatcgcagctaaagctgttgcgttcaaagaagccatgacagcggaattcaagacttatcaaaagcaagtgatcacc

SEQ ID NO: 228260 - DNA, 257 bp, Unknown
  Bacterial polypeptide expressing nucleotide sequence isolated from the Sargasso Sea
tatgtctaaaacaaaaaaaattacaaatggcagttatcaagaatattttgataatgatctatcactcagggatccagaattatataattctataaaattagagcttgagagacagcagcaacatattgaattaattgcatcagagaatattgtttctaaagcagttttagatgctcaaggttcaatacttacaaataaatatgccgaaggttatccaggtaaaagatattacggtggttgtgagtttgtagataaag

SEQ ID NO: 228261 - DNA, 858 bp, Unknown
  Bacterial polypeptide expressing nucleotide sequence isolated from the Sargasso Sea
tcagagaattacgcttcaaaaagagtgctagaagcacaaggcagtgttttaactaataaatatgctgaaggttaccccaacaaaaggtattacggtggttgtgagcatgttgatggagccgagactttggctatagaaagagcaaaaacactttttaatgcaaaatttgcaaatgtccaaccacattcaggcgcttcggcaaatgccgctgtttttcttgccctcatggagccaggcgatacttttttaggtatggctcttgatcaaggcggccacttgacgcatggatctaaagtaaatttttcagggaaaaactttaatgctattcaatatggtttagataaggttagtggtgatattgattacgcagaggtaagaagattagcgcacgaacacaaccccaaaatgattgtagctggattctcggcttttatgggaatcgtagattggaaattattcagagaaattgcagatgaagttggagcatacctgatggtagatatggctcatgtatcaggtttagttgctggcggtgtttatcccaatcctgtggaatttgctcacgttgttacgagtacaacgcataaatctttaagaggaccaagatcaggcattattttatctaatgaagatcaagagtttcaaaaaaaactaaactttgcagtatttcctgggtcacaaggaggacctttgatgcatgtgatagcagcaaaagctgtctgttttaaagaggcaatgacagatgattttaaagattaccaaaaacagattatttctaatgcacaaataatgtgcgaacagttcaaattaagaggatttgatttagttcaggagaatacagataaccacctaatttta

SEQ ID NO: 228262 - DNA, 752 bp, Unknown
  Bacterial polypeptide expressing nucleotide sequence isolated from the Sargasso Sea
tattatggcaggaggctcagcatatcctagaataatagattttaagagatttagagaaattgcgaataaaattaatgcttatttcttagtggatatggcgcatttttcagggttagtagcaggaggtatgcatccaaaccctatcgattatgctgatatagtaactacaaccactcataaaacccttagatctggaagaggtggtatgattttaacaaataatgaagacctgtttaaaaaaataaattctgctgtttttccaggccttcagggtggccctttaatgcacgtaattgctggtaaagcagcaggttttggagaagccctcacaaatgaatttaaaatatatgctaaaaatgttgttttgaatgcacgatgtttatctaaaatattaattaaaagaggatatgaaatagtttctggaggaacagacaaccatatagttttattaaatttaaataataaaaatataacaggggcaagtgcagagttggcacttgaaaatgctggtttaacttgtaataaaaatgctattccatttgatccactaccaccgtctatcacgtcaggtgttagatttggcacagcagcagctactactagaggttttcaagaaaaagaatttgaattaataggaaatctaattgcagatgttttagacggatttaaagataataaatctaacatgcaaatagaaaaacttatttatgaaaaagttagaaatttatgtgaaaattttccaatttactagt

SEQ ID NO: 228263 - DNA, 366 bp, Unknown
  Bacterial polypeptide expressing nucleotide sequence isolated from the Sargasso Sea
ttttaaaaatttatcagggcggtacagatacacatttaatgttagttgatctaagaccatttaatgttaaagggaatttagcagcagaaagtttagatagagcaaatataacatgtaacaaaaatggtataccatttgatacagaaagccctatggtaacttcaggtatcagactgggaactcaagctgcaacaacaagaggttttggattagaagaatttagaaaggttggtaatttaattacaaaaacgattaaaggactttcagaaaatcctgatgataactctaaaattgaaaaagaagtacaagaagaagtaattgaattgtgttcaaaatttccgatttataaaaacttaaggaaataaa

SEQ ID NO: 228264 - DNA, 499 bp, Unknown
  Bacterial polypeptide expressing nucleotide sequence isolated from the Sargasso Sea
cggccccttaatgcacataattgcagcaaaagcagtacctttccaagaagcgttacaaccaaattttaaagaatatattaaatctgtattagataatgcaaaaattttatcagaaacattaaaaaataatggttttaagatattttctggtgggacagatacgcatttaatgcttgttgatttgcgtccttttaatgttacaggaaaagatgcagaaacaagtttatgtaaggcaaatattacatgtaataaaaatggaataccttttgatgcagctaaaccaactattacatctggtatccgattgggaagtcaagctgctacgactagaggctttgggttaaacgagtttaaaattgttggaaatttaataactaaggtaattaaaggccttgaaaaaaataaagacaataatacagaaattgaaaacgaagttaagaaggaagttgtagaattgtgttctagatttccaatctataaacatttgaataggaaataa

SEQ ID NO: 228265 - DNA, 292 bp, Unknown
  Bacterial polypeptide expressing nucleotide sequence isolated from the Sargasso Sea
gatgtcagaattatttaaaaaaggaatcagagagactgatccagaggtatatggtactttaagtcgtgagttagaaagacagcaaaatcaaatagaactaattgcatctgagaatattgcttcaaagtcaattttaaatgcacaaggttcagtaatgacaaacaaatatgcagagggatatcctggtaaaagatattatggaggatgtgaatttgtagatcaagctgaagagatagctctagaaagggtaaaaaaactttttaattgtcaatacgctaacttacaaccacat

SEQ ID NO: 228266 - DNA, 439 bp, Unknown
  Bacterial polypeptide expressing nucleotide sequence isolated from the Sargasso Sea
aaaaccagactttaaggaatatattaaatctgttttagataatgcaaaaattctttctgagacattaaaaaataatggttttaaaatttactcaggaggaacagatacacacttaatgcttgtagatttgagaccatttaatgtaaaaggcaatattgcagcagaaagtctttccaaagcgaatattacttgtaataaaaatggaattccatttgatgatgaaagtccaatgattacatcgggaataagattgggatcccaagctgctactactagggggtttggcttaaatgaatttaaattagttggtgaattaattacaaaaacaataaaaggattatcggaaaaccctaatgataatagcaaagtagaagatgaagttagaaaagaagttgttgatttatgttcaaatttcccaatttataaaaatttgggataa

SEQ ID NO: 228267 - DNA, 901 bp, Unknown
  Bacterial polypeptide expressing nucleotide sequence isolated from the Sargasso Sea
tattacggtggctgtgaatttgtagacaaagccgaagaattcgctttagaaagagttaaaaaattattcaattgtaaatatgcaaatgttcaaccgcactctggtgcacaagcaaatggagctgtatatctagcacttttaaaacctggagacacaatactaggtatgagtttaaattctggtggtcatttaactcatggagcaaaagttgctcaatctggaaagtggttaaatgcatttcattacgaggtagataaagttactggattaatcgattacgatcaggttaaagaattggcgttaaaaaataaacctaaactattgatagccggcggaagtgcgtattcaagaataatagattttaaaaaatttagagaaatagcagatagtattggagcttatctcatggttgatatggcacacttttctggtttagttgctggacatggatatccaaacccaattgattatgcagatgtagtaacttcaacaactcacaaagttttaagaggtggaagaggtggaattatacttacaaaccgagaagatttatttaaaaaatttaattccgctgtatttcctggttatcaaggtggacctttaatgcatgtaattgcggcaaaagccgctgcttttcaagaagcacttaaacctgaatttaaagaatatattaaatcagtactcgctaatgcaaaaatattatctgaaactttaaagaataatggatttaaaatattttctggtggtacagacacacatttaatgcttgtagatttaagacctttcaaagttacaggaaaagctgccgaagtcagtttatgtaattcgaatataacttgtaataaaaatggtattccatttgatactgaaaaaatgactattacttctgggtatagacttg

SEQ ID NO: 228268 - DNA, 934 bp, Unknown
  Bacterial polypeptide expressing nucleotide sequence isolated from the Sargasso Sea
gaagcagacccagaggtttacggaactttaagccgtgaattagaaagacagcaaaaccaaatagaattgattgcatctgaaaacattgcatcaagatcaattttaaatgctcaaggttctgttatgacaaataaatatgcagaagggtatcctggtaaacgatattatggcgggtgtgaatttgttgatcaagctgaagagattgctttagaaagagttaaaaaactttttaattgtaaatttgcaaatctacaaccgcatagtggagcacaggcaaatcaagcagtttttctagctttacttcagccacacgatactattttaggtatgtcacttgcatcaggaggtcatttaactcatggagcaaaacctaatctatctggaaaatggtttaatgctgttcaatacggtgtaaaaaaagatggcaatgataaagacttaattgattatgatgaagttgaagctttagcattagagcataaaccaaaaatgctaatagctggagcctccgcttatcctagaacaatagattggaaaaggtttagagaaatagctgataaagtaggagcatattttttagttgatatggctcactattctggtttggttgctggtaaacaatatccaaatccgattgcgcatgcccatgtagtaacttcaacaacacacaaaactttaagaggtgcaagaagtgcaatgattttaactaatcatgaagatttatataaaaaaattaattctgctgtttttcctggattacaaggtggcccactaatgcatgtaattgcagctagagctgtttgttttggtgaagcacttaaacctgaattcgaagaatatattaaaaatgtaattgctagtgctaaagttatggcaaaaactttagtggatagaggatttagaattgttacaggaggcacagattcacatatag

SEQ ID NO: 228269 - DNA, 811 bp, Unknown
  Bacterial polypeptide expressing nucleotide sequence isolated from the Sargasso Sea
gaaaatgttgaaaagctcgctttagaacataaaccaaaattaattattgcaggtggtagtgcgtattcaagagttattgattttaaaagatttagagaaattgctgataaagttggcgcatatcttatggtagatatggctcatttctcaggtttagttgcagggaaagggtatccaaatccatgtgactatgcacatgtcgtaacatccacaacacacaaagtattcagaagtgcacgtggtggaattattttatctaatgatttagatcttggaaaaaaatttgatacagctgtttttcctggatatcaaggtgggcctttaatgcatatcatcgctgctaaagcagcaggtttttttgaagcgttaaaaccggaatttcaaacttatataaaaaatgttttagcaaatgctaaaatgctagcagagactttaaaaaataatgggtttaagatttattcaggcggcacagatacacatttaatgttagttgaccttagaccattcggtgtaaaaggaaatacagcctctgagagtttatgtagagctaatattacttgtaataaaaatgggatcccttttgatacagaaaaaccaatgataacttcaggtatacgacttggttcacaagcagcaactaccagagggtttggtttgaaagaattcgaaaaagttggtgaattaataacaaaagtaataaaaggattatctaaaaatccagaggataatagacaagtagaggaagaagtgcgaaaagaagtgataaatttatgctctaattttccgatttataaaaatttaaatagatgat

SEQ ID NO: 228270 - DNA, 849 bp, Unknown
  Bacterial polypeptide expressing nucleotide sequence isolated from the Sargasso Sea
aatagagcaaaagaactttttggcgccgaatatgcatttgttcaacctcattctggttctcaagcaaatacagcagttttttctgcttttctaaaaccaaatgactcaattcttggttttgatttatctcatggaggtcatttaactcatggctctccggtaaatttttcaggacaattatataaagctcatttttatggagttgaaaaacaaactggaaggcttgattatgataaaatacatatgattgctttaagagtaaaaccaaaaatgatcattgcaggagcctcatcatattcaagagacatggattttaaaaaattcagaaatattgctgatgaggttggagcttttttattggctgacattgcgcatccagcaggacttatagcatctggattattgagtgatccattaccattttgtgatgtaataactactacaactcacaagacacttagagggccaagaggaggtctgattcttatgggcaaggattttgaaaatccttttggtattactttgaaaaatggatctttgcgtagaatgtcccatttgattaatatgtcagttttccctggtaatcaagggggtccattagaacatgtaatcgctgccaaagcaattgcctttggggaggccttagaaccaaagtttaaagactatatgaaaagggtccaaacaaatgcatcattaatggcagatttatttatagaaaaaggatataatgttatctcaggtggaacagataatcatatgcttcttattgatctgagaaataaaaatattactggcaaggatgcggaggagattttagccaaagctgagataacagtaaataaaaatatg

SEQ ID NO: 228271 - DNA, 361 bp, Unknown
  Bacterial polypeptide expressing nucleotide sequence isolated from the Sargasso Sea
tatgtctagtgaaagtaaatatttaaacgaccaatataaaggcttttttgaagatagcttatccaaaactgatccagaattatataaagctatcaacgacgaattaaagagacaacaagaacacattgaattaatagcttcagaaaatattgtctctcaagcggttttagaagctcaaggctcggtcttaactaataaatatgcagaaggttatcctggtaaaagatattataacggatgtgaacatgttgatgttgcagaaaatctagctattgaaagattaaaaaaaatatttgattgcaaatttgcaaatgcacaaccacattctggagctcaagctaatggagctgtattcttagct

SEQ ID NO: 228272 - DNA, 506 bp, Unknown
  Bacterial polypeptide expressing nucleotide sequence isolated from the Sargasso Sea
aatgtctaaagaactaaagataaataataacttttttgaacaaagtttaaaagatagcgatccagaattatattcttcaatatctgaagaattggatcgacaaaaaaatcaccttgaattaattgcatcagaaaatattgcatcaaaagctgttattgaagcgcaaggctcagttttaacaaataagtatgcggagggctatccaggtaaaagatattatggtggctgcgagtttgtagataaatcagaaaatttggcaattcaaagagctactaaattgtttaatgtacaatttgcaaatgttcaaccacattcaggagctcaagcaaatggcgctgtatttttagcattattaaatcctggtgatacaattcttggaatgggtattgatcaaggtggtcatttaacacacggtgcaccgccagctcaatcaggcaagtggtttaaagcagtagcgtatggagttgataaaaaaaccggattaatagattatgatcaagtaaaaa

SEQ ID NO: 228273 - DNA, 996 bp, Unknown
  Bacterial polypeptide expressing nucleotide sequence isolated from the Sargasso Sea
taatggatgtgaacatgttgatgtagctgaaaaattagctttagaaagaattaaaaaactttttaattgtaaatatgcaaacgttcaacctcactcaggagctcaagctaatggtgcagtatttttagctttattaaaacctcatgatacatttatgggaatgagtttaaattctggtggacatattactcacggattaaaaatttctatgtcaggtaaatggtttaatgctgtgagctacgatgtagataaagaatctgagcttatagattatgacaatgttgaaaaacttgcccttgagcataaacctaaattaattattgctggaggtagtgcttactcaagagttatagatttcaaaagatttagagagatagcagataaagttggagcatatttgatggtagatatggctcacttttcaggtttagttgcaggaaaaggatatcctaatccatgtgattatgctcatgttgttacttctactacgcataaagtatttagaagtgcaagaggtggaattattttgtctaatgaagaagatttaggtaaaaaatttgatacagccgtatttccaggttatcaaggtggtccattaatgcatgttattgcagcaaaggccgctggtttttatgaagctcttaaacctgattttcaaacttatataaaaaatgttttagctaatgcaaaaatgttagcagagactttaaaaaataatggattcaaaatttattctggtggtacagatactcacttaatgttagttgatctaagaccatttaatgtaaaaggaaatttagcatcggaaagtttatgtagagctaatattacatgcaataaaaatggaataccttttgatactgaaaaaccaatgattacttctggaattcgtttgggttctcaagcagcaacaacaagaggttttggtttaaaagaatttgaaaaagttggtaacttaataacaaaagttataaaaggtttatcagaaaacccaga

SEQ ID NO: 228274 - DNA, 728 bp, Unknown
  Bacterial polypeptide expressing nucleotide sequence isolated from the Sargasso Sea
aagacaagaagatcatattgagttaattgcatctgaaaactatgcatctaaaagaattcttgaagcccagggatctctacttactaacaaatatgctgaaggctatccttcaaaaaggtattatggaggatgtgaaaatgtagacattgcagaaaatttagcaattgaaagagctaaaaaactatttaaagcagattatgcaaatgttcaaccacattctggttcatcagcaaatgcagcagcatatttagcacttcttgaaccaaatgatactattcttggcatgagtcttgatcatggaggacatttaactcatggctctaaagtaaatttctcaggcagaaattataaaagtgttcaatacggtttacaccctgaaacaaatgacattaattatgaagaagtgagatctcttgcaaaagaacatagaccaaaacttataattgctggcttctcagcattttctggcattgtaaattggaagaaatttagagaaattgctgacgaagttgatgcatattttctagttgatatggctcatgtttctggtctagttgctgctgatttatatccctctccagttccttatgcagacgttgttacttcaactactcataaaactctaagaggtcctagatcaggtattattcttgcaagagcaaatcaagaaattgaaaagaaattaaattctgctgtttttcctggatcacaaggaggacctttaatgc

SEQ ID NO: 228275 - DNA, 757 bp, Unknown
  Bacterial polypeptide expressing nucleotide sequence isolated from the Sargasso Sea
gttgaatttgaaaaatttagagaagttgctgatgaagttggagcatttttacacggagatatatgtcataattcaggactaattgctgctgagatgcatccttcaccttttccgcactgccatgttgtttctaccagtacacacaaatcgcttagaggtccaagaggtggcataattttgcttggcagcgactatgaaaatccatttggaaaagttgcaccaaaatctggaagaattaaaatgatgtcagagctaatcgatagcgctgtaatgcctggaatgcagggtggaccccttatgcatatcattgccgcaaaagcagtagcatttaaagaggcgcttgaaccatcttttaaaacttatataagaggagtgcttgataatgcacaatgttttgctgaagagtttaagtctaaggggtacaaattaatttctggcggaacagacactcacttagttttaattgatttacagaataaaaatatatctggtaaagctgcagaaattgctctagacgaagcaggaattaccgttaataaaaatatgataccttttgatcccaaaagtccgtttattacaagtggaattagaattggttctccagctatgacgactaggggaatgggtacagatgaagttaaaattattgttgatttaatagatcaagtcattttaaatcatgataataaagaaaaaattcaatcagttaaaaagcgcgtcaatgagctatgctcatcttttcaaatatatgattaat

SEQ ID NO: 228276 - DNA, 352 bp, Unknown
  Bacterial polypeptide expressing nucleotide sequence isolated from the Sargasso Sea
atgaaatcattaagaagcgatagtattttttcgaataataacaccataaaagattatgacaatgaattgtgggcatcctttcaacatgaagctgaaagacaagaagatcatattgaattaatagcctcagaaaattatgcatcaaaacgaatccttgaagctcaaggttctcttttgactaataaatatgctgagggatatccctcaaagcgttactatggtggttgtgaaaatgttgatattgcagagaatcttgcaatagatagagcaaaagaactttttaaagcagattatgcaaatgttcaacctcattcaggatcatcagctaatgcagcagcctacttagctcttt

SEQ ID NO: 228277 - DNA, 469 bp, Unknown
  Bacterial polypeptide expressing nucleotide sequence isolated from the Sargasso Sea
atgaaacaatccagtaaccaaaatattttttcgacaaaaattacaaaatcatctaaaagcgacagtattttttctaacgaagagtctattaaaaattatgatgctgagttatggaaatcttttgaatacgaagctgacagacaagaggatcacatcgagcttattgcttctgagaattatgcttcaaaaagaattttagaggctcaaggatctctgctaacaaataaatatgccgaaggttatccttccaaaagatactatgggggatgtgagaatgttgatatagctgaaaatcttgccattgaaagagcaaaaaaattatttaaagctgattatgcaaatgtgcaacctcattctggttcttcagcaaatgctgcggcgtatctcgcgcttcttgaaccaaatgacttaattctaggaatgagtcttgatcatggaggtcatttaactcatggatcaaagggttaat

SEQ ID NO: 228278 - DNA, 663 bp, Unknown
  Bacterial polypeptide expressing nucleotide sequence isolated from the Sargasso Sea
ggcaatcgaacgcgcaaaagagctgtttggctgtaaatttgtgaatgtgcagccgcattcgggcgcgcaggccaatcaggctgtgtttctaagcttgctgcaacctggcgacacaattttgggcatgtcacttgccgctggtgggcatctgacacatggtgcggcgccgaatttgtcgggtaaatggtttaatgctgtgcaatatggtgtcgatgaaggcaccgcgcagatcgattttgacgaattgcaaaaactggctgaacagcataagccaaaaatgattcttgccggtggttcagcctatccgcggacaattgattttgccacattccgcaagattgcagactctgtcggtgcctatttcatggtcgatatggcgcatatttccggccttgttgccgctggtgtgcacccatcaccattgccgcatgcagatgttgtaacatcaacaacgcataaaaccttgcgggcatcgcgcggtggtctgatcatgaccaataacgaggcgctgggaaaaaaattcaattcagctgtattccccggactgcaaggcgggcctttgatgcatgcaatcgcgggcaaggctgcggcctttgccgaagcattgcggccagaatttaagtcctacatccaaacggtcgtcagcaatgccagaattctctc

SEQ ID NO: 228279 - DNA, 873 bp, Unknown
  Bacterial polypeptide expressing nucleotide sequence isolated from the Sargasso Sea
aatgacaaataagtatgcggaaggatatgctagttctcgatactatggagggtgtgaattcgttgatattgcagaagaccttgcaattaaaagacttcaaaaattatataaatgtgaatatgcaaatgttcagcctcattcgggtgcccaggcaaatggagcagttatgctagctctaattaagccaggagatactattcttggaatgagtttagatgctggcggacatttaacacatggttctgccccgtcgatgtctggtaagtggtttaatgctgtgcaatacggcttagaagacaatgggctaattgactatgatgaagttgaaagattagcaaaagaacacaacccaaaaattattattgccggaggaagtgcttattcaagaattatagattttaaaaaatttagagagatttgtgatcaagttggcgcatttcttcatgtagatatggctcatttttcaggccttgttgccgctgaggagtatccaaatccattagaatatgcagatgtagtaacttctacaactcataagactattcgaggggcaagaggaggaatgattttatcaaacaatttagaactgggtaaaaaatttaattctgctgtatttcctggctatcaaggcggtccattgatgcatgtaattgccggtaaagctgtagcttttggcgaagcattaaaaccagaatttaaggaatatataaaacaagtaatagcaaacgccaagatattaagtaacacgcttgttaatggaggattaaagattgtttctggtggaactgatactcatttaattttagtagatttaactccaatggacttaacaggtgattctgctcaaactagtttggaagcggctaacataac

SEQ ID NO: 228280 - DNA, 781 bp, Unknown
  Bacterial polypeptide expressing nucleotide sequence isolated from the Sargasso Sea
gcaaatatggcagtttatttgtccatactggaaccaggggataccgtacttggaatgtcacttgatcagggaggacacctcacacacggttcaccagttaacttctcaggacaagtttataactttgttggctacggtttagacgaggataccgaattaattaatatggaaactgtttacaatatggctttagagcataagcctaaattgattattgctggatattcctcttactctcaatcacttgattttcaaaaatttagagaaattgcagatgaagttggttcccattttatggttgatgcagcacactttattggattagttgctggaaaagttgtagataatccaacaaaatatgctgatgttgttaccgcaacaacacacaaagctttacgcggaccacgtggtggaattattttaacaagggaagaatttgcaaaggatattgataaaaacatatttcctggagctcaaggtggagcattaaacaatcagattgcagcaaaagctgtatgttttaaagaagccttaacaaatgaatatcaagagtatgcaaagcaaatattaaataacgcaaaagcattatctgattcttttcaagaacaaggcttaagggtaattagtggaggaacagaaaatcatatagttcttgttgatactagaagtgtagatgaagaactaaccggcaaagaagctggtattttgctaaatgataggggagttactttaaatagaaatgcaataccatttgatcctcgatcaccttttataacttcag

SEQ ID NO: 228281 - DNA, 296 bp, Unknown
  Bacterial polypeptide expressing nucleotide sequence isolated from the Sargasso Sea
actgcttgataagaaatctagtattaaaactgatgcaatcttttctaacaaaaaagatatagaactttatgatgctgagctttgggagtccttccaaaaggaaatggttagacaagaggagcatattgagcttatagcctcagaaaattatgcaagcaagagagttttgcaagctcaaggctcagtgttaacaaataaatatgctgaggggtaccctgagaaaagatattatggaggttgtgaatttgttgatattgctgagaagttagcaattgagagagccaaagaacttttta

SEQ ID NO: 228282 - DNA, 892 bp, Unknown
  Bacterial polypeptide expressing nucleotide sequence isolated from the Sargasso Sea
aaaccaggtgatacgatattaggtatgagcttaaattctggaggtcatttaactcatggtgctaaagttgctcaatcaggaaaatggttaaacgcatttcattatgaagtagacaaagtcactggattaatcgattatgaccaggttaaagaattagcattaaaacacaaacctaaactattaatagcaggcgggagtgcttactcaagaataatagatttcaaaaaatttagagaaattgcagatagcgtagaagcttatcttatggttgatatggcacatttttccggactagttgctggacatgggtatccaaatccaattgattatgccgatgtagttacttcaacaactcataaagtattaagaggtggaagaggtggtataatacttacaaacagagaagatttgttcaaaaaatttaattctgctgtttttcccggttaccaaggtggacctttaatgcatgtaattgcgtccaaggctgcagcttttcaagaagctcttaaacctgaatttaaagaatatatcaaatcagtgcttgctaatgcaaaaatattatctgaaactttaaagaataatggatttaaaatattttctggtggtacagacacacatttaatgcttgtagatttaagacctttcaaagtcacaggaaaagctgccgaagtcagtttatgtaattccaatataacttgtaataaaaacggtataccttttgatactgaaaaaatgacaattacatcaggtataaggttaggttctcaagcggctacgaccagaggctttggactaaatgaatttaaaaaaataggagaattaattactaaagttgttaaaggactctcaaacagcccaaatgacaacagcaaaatcgagtcggaggtaagaa

SEQ ID NO: 228283 - DNA, 910 bp, Unknown
  Bacterial polypeptide expressing nucleotide sequence isolated from the Sargasso Sea
ggcaacccttcgcgagagtgatcctgaaatcgcggcagcaatcgaacatgaactgatccgccagcaggaccaaatagagatgatagcctctgaaaacattgtaagtgttgcggtgatggaggcacaaggatcggtcttcaccaacaaatatgccgagggctattcgggtcgtcgctattacggtggctgtgagtatatggatgttgttgaaacgcttgcaattgagcgggcaaaacagctgttcaactgcaaatatgtaaatgtacagccgcattccggtgcgcaggctaatcaggcagtgtttctgtcgctgctgaagcctggcgataccattcttggtatgtcactggccgcgggtggccacctaactcatggggcggcgcctaacctgtctggtaaatggtttaaggctgaacaatatggtgttaacgctgaaaccggccgaattgattacgatgagttaatggtaaaagctaaggaatgccagccaaagctgattcttgggggtggctcagcctatcctcgcacgcttgattttgcggctttccgcaagattgctgatgaggtaggggcgtatctgatggtagacatggcgcacatctctggtctagttgccgctggagtacatcccaacccagtagaacacgcccatgtcgttacgtcgacaacgcacaagacacttcgcgctggtcgtggcggcatcatactgtgtaatgacgaggcgcttggcaaaaagttcaattccgctgtctttcccggacttcagggcggaccgttgatgcatgccattgctggcaaagcggtcgcctttggcgaagcattgcggcctgaatttcgcgactatattgagcgcgtggtggcgaatacccatatcctatctgatacactcgtagagcgtggtgcagcgatt

SEQ ID NO: 228284 - DNA, 697 bp, Unknown
  Bacterial polypeptide expressing nucleotide sequence isolated from the Sargasso Sea
ctcggtcgaagcttatttgttgtgcgacatggcgcacttcgccggtcttgtggctgccggcttacacccgtcgccgttaccttatgcgcacgtggcaaccacaactacgcataagaccctacgcggcccgcgcggcggcatgatccttagcaattaccaagacctcggcaagagattcaactcggccgttttccctggtttgcaaggcgggcccctcatgcacgtgatcgccgccaaagccgtagcgttcggcgaggcgctggaacccaagttcacagattactgtcattccgttgtcaacaatgcggatgcgctggcgagcaccctggtcgatcggggcctggatattgttgcgggtgggacggacacacatcttgtgctggttgacctgcggccaatgggcctgaagggcaatgacactgaggtcagcctcgaacgcgctggcatcacctgcaacaagaacgccattccgttcgacccggaaaagccggcggttacctcaggggtccgtttaggaaccccggccgcaacgacgcgcgggtttggcatcgatgaattccgtcacgttgggaatttgattggggatgttcttgatggcctcgcggcgaatcctgaggacaattcagtggcagaaaacaaggcgcgtaaggaagtggccgcgctatgcagcaagtttcctatttatcagcaaatttga

SEQ ID NO: 228285 - DNA, 226 bp, Unknown
  Bacterial polypeptide expressing nucleotide sequence isolated from the Sargasso Sea
tatggtaccatttgatcaaagaagtccttttattacaagcggaattcgcattggtacgcctgcaattaccacaagaaatatgggtattgaggaaatgaaagatattgcaaagctgattgatagggtaattattgatcctgaaaatgatgaaaatattcaaaaagtaaagtcagaggttgaagaactttgtgagtcatatccaatctacaaagaattttcaaattaa

SEQ ID NO: 228286 - DNA, 367 bp, Unknown
  Bacterial polypeptide expressing nucleotide sequence isolated from the Sargasso Sea
atgggaaagactttagaaaaattacgtgaggattacagggatttttttgataaagatttatcaattagtgatcccgaattatttaattcaatcaaacttgaactaaaaagacagcaagaacatattgaactaattgcatctgaaaatatagtttcaaaagcagtcttagatgcacagggctctattcttacaaacaaatatgcagaaggttatcctggaaaaagatattatggaggttgcgagtttgttgataaagctgaggatttagctctagatagagtaaaaaagttatttaattgtaaatttgccaatgtgcaacctcactcaggcgctcaagccaatggagccgtatatctagctctttaaa

SEQ ID NO: 228287 - DNA, 493 bp, Unknown
  Bacterial polypeptide expressing nucleotide sequence isolated from the Sargasso Sea
atgatatcagatttgtttaaaaaaggaataaaggaagcagacccagaagtttatggtacattaagtagggaattagagagacaacaaaaccaaatagaattaattgcatcagaaaatattgcctcaagatctattttaaatgctcaaggttcagtaatgacaaataaatatgctgaaggatatcctggtaaaagatattatgggggttgtgagtttgttgatcaagctgaagagattgcattagaaagagtaaagaaactttttaattgtcaatatgcaaatctgcaaccacatagtggtgcccaagcaaatcaagcagtatttctagcactacttcagccacatgatacaatattaggaatgtcacttgcttctggtggacatttaactcatggtgctaaacctaatctatcaggtaaatggtttaatgcagtgcagtatggtgtaaaaaaagatggtaacgacaaagatttaattgattatgatgaagtcg

SEQ ID NO: 228288 - DNA, 898 bp, Unknown
  Bacterial polypeptide expressing nucleotide sequence isolated from the Sargasso Sea
gagctgatcgccagtgagaacttcgcctcaccagcggtcatggctgcgcagggttcggttctgaccaacaagtacgccgagggactccccaacaagcgctattacggcggctgtgagcacgtcgatgccattgaagagctggcgatcgaaagggccaagcagctctttggcgccgaatgggccaacgttcagccccacagcggcgcccaggcgaatttcgctgtgtttctggccctgctgcagccaggcgacacgatcctgggcatggatctctcccacggcggccacctcacccacggttcacctgtgaatgtcagtggcaaatggttcaaagccgtgcactacggcgtcgatcccgacacgcagcggctcaacctagagtccatccgtgaactggcgcttgagcacaagcccaagctgatcatctgcgggtactcggcttatccacgcacgattgatttcgctggtttccgtgccatcgccgatgaggttggcgcctacctgctggccgacatggcccacatcgccggactggttgccgccggggtccaccccaacccagtgccgcactgccatgtggtgacgaccaccactcacaaaacccttcgtggcccccggggtggcttgatcctctgcaatgacgccgcatttgcaaagcagttcgacaaagccgtctttcctggcactcaaggtggccccctagagcatgtagtggctgccaaggctgtggccttcggagaggccttgcagccaagcttccgcgattacagccgacaggtcgtggccaacgcccaggccctggctgcacgcatccaggcacgcggcatcgctgtcgtcagcgggggcaccgacaaccacgttgtgctgcttgacctccgcggcattggcatgaccggca

SEQ ID NO: 228289 - DNA, 346 bp, Unknown
  Bacterial polypeptide expressing nucleotide sequence isolated from the Sargasso Sea
ggtactgatacacatttaatgttagtggatttaagaccatttaatgtaaaaggaaatttagcctcagaaagcttatgtagagcaaatattacttgtaataaaaatggtatcccatttgatactgaaaaaccgatgattacttcaggtattagattaggttatcaggcagcaacaacaagaggatttggtttaaaagaatttgaaaaagttggcaacttaataacaaaagttattaaaggattatctgaaaatccggaggataatagtaaagtggaaaatgaagtaagaaatgaagttatcaacttatgttcaaattttccaatttataaaaatttgaataaatgat

SEQ ID NO: 228290 - DNA, 772 bp, Unknown
  Bacterial polypeptide expressing nucleotide sequence isolated from the Sargasso Sea
caaacctaaagttcttattgctggtgcaagttcttattcacaaattattgactttaaaaaaatgcgagaaattgcagataaagttggagcttacttattagttgatatggctcacattgcaggacttgtagcaactggctgccatcctagcccaatccctcacgctcatgttgtcactacaactactcacaaaactttgcgtggccctagaggagggttaatactttggaatgatgaaagcctgacaatacaaataaacaaaggagtattccctggaactcaaggaggacctctcgagcatgttattgcagctaaggctgtgtgcttcaaagatgcagctagtaaaaaattcaaagattaccaagaacaagttataaaaaacaccaaagtcttagccgatagtttgatggaatacgactttaagctcgtcagtgggggaactcaaaatcatttagttttgatcaacctttctggtagcacagtttcaggaaaagactttgaacaaactctagaaaaaatagctattactgtaaataaaaacactgtcccaaacgaaactagaagcccttttgttacaagtggaatcaggatagggacccctgctctaacttctcgtcatatgcgtgaatctgaaatgaagcaaattgcaaaatttattaaagaagcttttgacgctcaccataataaggatgacttaagtcatctacgcaaaaaagtagttgcttttgcaaaaaaattccctctttacgataactggacttgtggaaactaa

SEQ ID NO: 228291 - DNA, 517 bp, Unknown
  Bacterial polypeptide expressing nucleotide sequence isolated from the Sargasso Sea
gctgtttttcctggattacaaggaggtccattaatgcatgtaattgcagctagagctgtttgctttggtgaagcacttaaacctgaattcgaagaatatataaaaaatgtcattgctagtgctaaagttatggcaaaaactttagttgatagaggatttagaattgttactggaggtactgattcccatatagtgtggttggatttaacgccaaaaggtttaacaggtgataaagctgaaaaaattttggaagaagttggattggcatgtaataaaaatgcaattccatatgatcctaatccaccaaaaataactagtggacttagatttggaactgccgctgctacgaccagaggttttaatcagaaagattttgagcaagttggaaatatgattgctgatattttggatagtcttttacttgaagaaaacgaaagaagtgaagtttttaacaaaacaagaaaagatgtaattgagctttgcaaaaaatatccaatttatagtgaggcattttaaa

SEQ ID NO: 228292 - DNA, 754 bp, Unknown
  Bacterial polypeptide expressing nucleotide sequence isolated from the Sargasso Sea
ttattctcagttattgaaaaagagaacaacagacaagaacaagaaattgaattgatagcctctgaaaatattacatcattagcagtaatgcaggctcagggatctgttatgactaataagtacgccgaaggatatcctgggagacgttattacggtggatgtgaatatgtagatatggctgaagaattagctatagaaagaataaaaaaactgttcaactgtaattttgctaatgttcaaccaaactctgggagtcaagctaaccaagctgtttttatgtctttgatgaagccaggtgatacattcttggcaatggatttagcatctggtgggcatcttactcatggtgcaaaacctaatttgtctggaaaatggtttaatgcaatacattatggagtaaatagagaaaccgaaattatagattattctcaagtcgaagagttggcaaaattacacaagccaaaagttattattgcaggtggatctgcagttccaagacaaataaactttaaagaatttaaaagaattgcagaattagttggagcatatttaatggttgatatggcgcatttttctggattagctgcagctggatgccatccaaacccacttgattttgcagatgtggcaacaagcacaacgcataaaaccttaaggggaccaagaggaggtataatcctaactaatgatgaggaattagctaagaaatttaattctgcaatttttcctggccttcaaggaggcccattaatgc

SEQ ID NO: 228293 - DNA, 685 bp, Unknown
  Bacterial polypeptide expressing nucleotide sequence isolated from the Sargasso Sea
tatctagctcttttaaaacctggagatacaatattaggtatgagtttaaattctggcggccatttaactcatggtgctaaagttgcgcaatctggcaaatggttaaacgcatttcattatgaagtagataaagtaactggtttaattgattacgatcaagttaaggagttagcgcaaaaaaataaacctaaattattaattgctggtggaagtgcatactcaagaataatagattttaaaaaatttagggaaatagctgataatattggtgcctatttaatggttgatatggcacacttttctggtctagttgccggacacggatatccaaatccaattgattatgcagatgttgtaacttcaacaactcataaagttttaagaggtggtcgcggaggaattattttaaccaatagagaagatttacataaaaaatttaattctgctgtatttcccggttatcaaggtggaccattaatgcatgttattgcagcgaaagccgcagcatttcaagaagcacttaaacctgaatttaaaaattatattaaagaagtgcttgctaatgcaaaaattttatctgaaactttgaaaaataacggcttcaaaattttttctgggggaaccgacactcatcttatgttagtagatttgagaccttttaaagttactggaaaagctgctgagg

SEQ ID NO: 228294 - DNA, 649 bp, Unknown
  Bacterial polypeptide expressing nucleotide sequence isolated from the Sargasso Sea
atgagtgtaaatttttttaacgacagtatcaaaacttctgatccagaagtatacgcaactcttcaaaaagagcttgaaagacaacaaaatcaaatagagttaattgcttcagaaaatatagcatctaaagcagtcttaaatgctcaaggctcagtgatgacaaataagtatgctgaaggttacccaggcaacaggtattatggtgggtgtgaatttgttgatcaagctgaaaatattgctcttgaaagagtaaagaaactatacaattgtaaatatgcaaatttacaaccgcacagtggagcccaagctaaccaagcagtttttttagctcttttacaacctcatgacacaatacttgggatgtcattagcatcgggaggacatttaactcatggggcaaaaccgaatttatcaggtaaatggtttaatcctgttcaatacggagttaaaaaagatggaaatgataaagatttaatagattatgacgaggtggaagcgttagctactcaacataaacctaaattgattatagcaggagcatccgcataccctagaattattgattggaaaaaatttagagatatagctgataagattggagcatattttttagttgatatggctcattactctgggctgattgcaggaa

SEQ ID NO: 228295 - DNA, 325 bp, Unknown
  Bacterial polypeptide expressing nucleotide sequence isolated from the Sargasso Sea
tatgtctagtgaaggtgaatatttaaattcaacttatcgagatttttttgagaaaaaattatcagaatcagatcctgaattatttaaagctatagatgatgaattaaaacgacaacaacaacatatagagttaattgcttcagaaaatatagtttcacaagcagtattggaagctcaaggttcggtccttacaaataagtatgctgaaggctatccaggtaaaagatactatgatggatgtgaacatgttgatgttgccgaaaatttagctatagaaagattaaaaaaactttttgattgtaaatttgctaacgctcagcctcat

SEQ ID NO: 228296 - DNA, 537 bp, Unknown
  Bacterial polypeptide expressing nucleotide sequence isolated from the Sargasso Sea
ctaaaaaaattaacactgcagtctttcctgggtatcaaggaggacctttgatgcatattgttgccgcaaaggcagcaggattttttgaagcactaagacctgaatttaaggattatataaaatctgtattagctaatgctaaaattttatctgaaactttaaaaaataatggttttaaaatttattctggtggtacagatactcatttaatgcttgtagatttaagaccttttaatgttaaaggaaatttagctgcagaaagtttatccagagcaaatataacatgtaataaaaatggcattccttttgacactgaaagcccaatgataacatctggaattagacttggatctcaagcagcaacaactagaggttttggattaaaggaatttgaaaaagtaggcgaacttattacaaaagtaattgatggagtatcaaaaaacccaaatgataatagcaatattgaagacgaagttagaaaagaagttatttcgctttgttcttcttttccaatttataaaaatttaagaaaatgat

SEQ ID NO: 228297 - DNA, 805 bp, Unknown
  Bacterial polypeptide expressing nucleotide sequence isolated from the Sargasso Sea
taattacgatgaagttgaagaacttgcaaaagagcataagccaaaaataataattgcggggggtagcgcatactcaagaattattgattttaaaaggtttagagaaatagcgaatgaagttggggcatttcttcatgttgatatggctcatttttcaggcttggttgcagcagaagaataccctaatccattagaatatgcagatgttgtaacttctactacgcataagacaattagaggcgctagaggaggcatgattctttctaacaatcctgatttgggcaaaaagtttaattctgcagtatttcctggatatcaaggtggccctttgatgcatgtaattgctggtaaggcagttgcatttggtgaggctcttaagcctgaatttaaagattatataaagcaggtaattcagaacgcaaaaactctcagtcaaacactggttgatggcggtcttaaaattgtatcaggaggtacagatacccatttgatacttgttgatttaacacccatgagtcttacaggagatgctgcttctacaagtcttgaggagtcacatatcacatgcaataaaaatggtataccgaaggatccaagaccgccaaaagtaacttctggaattagactgggaacgccagctgccacaacaagaggttttaaagaaaaagaatttgaaatcgtaggtaatttaatactagaaacattaagaggtcttcaacaaaaccctgaaaataataacgaagttgagaaagtagtaaaaaataaggttattaaactttgtgaacaatttccaatttacagttag

SEQ ID NO: 228298 - DNA, 867 bp, Unknown
  Bacterial polypeptide expressing nucleotide sequence isolated from the Sargasso Sea
catggggttaaaaatttcaatgtctggcaaatggtttaatgccatagggtatgatgttgacaaagaatctgaacttattgattatgataatgttgaaaaaattgctttagaaaataaaccaaaacttataatagcaggtggaagtgcttattctagaataattgatttcaagagatttagagagatcgctgataaagttggagcatatctgatggtagatatggctcatttttcaggattggtagctggtaaaggttatccaaatccgtgtgaatatgcacatgtggtaacttcaacaactcataaagtttttagaagtgcaagaggtggaattattttaacaaaccatgaagatctttcaaaaaaatttaattctgcagtgtttccaggatatcaaggcgggcccttgatgcatataatagctgctaaagctgctggttttcttgaagcattaaaacctgaatttaaagattatattaaatcagtactagctaatgccaaaattttatctgaaacacttaaaaataatggatttaaaatttattcaggcggcacagattcacatttaatgttagttgatttaagaccttttggagttaaaggaaatatggctgctgaaagtttgtcgcgagcaaatataacttgcaataaaaatggaattccatttgatagtgaaagccctatgatcacatctggtattaggcttggcactcaagcagcaacaactagaggttttggtttaaaagaatttgaaaaagttggtaaattaatcacaaaaacaattaatggcttatcaaaaaatctaaatgataatagcaaaattgagtatgaagtaagaaaagaagttgttgatttatgttcaaattt

SEQ ID NO: 228299 - DNA, 643 bp, Unknown
  Bacterial polypeptide expressing nucleotide sequence isolated from the Sargasso Sea
atgtcaagtgaaacaaaatatttaaatagtgagtacaaagacttttttgaaaaaagtttattagacagtgatcctgaaatttataatgccattaatgatgagttggttcgtcaacaaaatcatattgaattaattgcatctgaaaatatcgtatctcaggctgttctagaagctcaaggttcaatattaacaaataagtatgccgaaggctatccaggcaaaagatactataatggttgtgaacatgtggatgttgcggaacaattagctatagatagacttaaagaattatttaattgtaaatttgccaacgctcaacctcattcaggagcgcaggcaaacggtgccgtgtttttagctttgttaaaacctggtgatacttttatgggaatgagcctgaattcaggtggacatattactcatggtttaaaaatttctatgtcaggaaaatggtttaatgcaattggatatgaagttgataaagaatctgaacttattgattatgataatgttgaaaaacttgcacttgaacacaaacctaaacttataatagctggcggtagtgcttattctagggtgattgactttaaaagatttagagaaatagctgataaagttggagcatacctaatggttgatatgg

SEQ ID NO: 228300 - DNA, 802 bp, Unknown
  Bacterial polypeptide expressing nucleotide sequence isolated from the Sargasso Sea
aggttattctggtaaaagatattatggaggctgtgaattcgttgatatttctgaaaatttagcgattgaaagagctaaaaaactttttaattgtaagttcgctaatgttcaaccacactctggcgcccaagctaatggagcggtatatttagctttaatcaaaccaggagacactatattaggtatgagtttaaattccggcgggcatttgacccatggagcaaaaccagcacaatcaggcaaatggtttaacgcagtacactacgatgttaaagaggacacaggtttaattgattatgaaaatgtagaaaaattagctttagaacataaacctaagttaattattgctggaggcagtgcttattcacgaattataaactttaaaaaattcaaagatatttgtaaaaaagttaatgcttatctattagttgatatggctcacttttctgggttagtggctggtggtgcgtaccccaatcctttagaatatgcagatgtagtaacttctacaactcacaaagttttaagaggaccgcgtggtggaataattttaactaatgatgaaactctttataagaaatttaatagcgctgtttttcctggtcttcaaggaggtccactaatgcatgttgtggcagctaaagcagtttgctttaacgaagctttgagtgacgaatttaaaaaatatacttcaaatgttatttcaaatgcaaaggttttaagcgaaacacttattgaaaataactttaaaatattttcagggggaactgatacccatttaatgttagttgatctaagacca

SEQ ID NO: 228301 - DNA, 379 bp, Unknown
  Bacterial polypeptide expressing nucleotide sequence isolated from the Sargasso Sea
ttctgagaaacttaaagaaaaaggttttaaaattttttctggaggtactgacacacatttaatgctaatagatttaagatcgtttggagtaaccggtaaagacgctcaagcctccttgggaagagctaatataacttgtaataaaaatggaattccttttgatagtgaaagtccaatgataacatcaggaataagattaggaactcccgcttgtacgactagaggtttcggagctgatgaatttaaattaataggtgatcttatttacaaagtaattgatggtttaagcaaaaataaagaagataactcaaaaatagaaaaagaagttcaaaaagaaataattgaactttgttcttcttttcctatatatagtagttag

SEQ ID NO: 228302 - DNA, 415 bp, Unknown
  Bacterial polypeptide expressing nucleotide sequence isolated from the Sargasso Sea
tatgtcaagtgaaactaaatatttaaattctgaatataaagatttttttgaaagaagtctttctgaagctgatcctgatttatttaaagcaattaatgacgaattagtaagacaacaaaaccatatagaacttattgcatcagaaaatattgtttctcaagcagtgttggaagctcaaggatcagttcttacaaataaatatgctgaaggctatccaggaaaaagatattataatgggtgtgagcatgttgacgttgcggaacaactagcattagaaagaataaagaaattatttaattgtaaatatgcaaacgtacaacctcactcgggagcccaagcaaatggctcagtttttttagctttattaaaacctggcgatacatttttaggtatgagcttaaattccggaggacac

SEQ ID NO: 228303 - DNA, 184 bp, Unknown
  Bacterial polypeptide expressing nucleotide sequence isolated from the Sargasso Sea
gttacatcaggtattagaattggaactcccgctattactactagaggccttaaagaagaggatatgggatttattgcagagtctataaatgatgtaataaataattatgaaaacaatgaaaagttaaattctatatcagataatgtaaagtcagaaatgaaagacaggcctttatttgcttaat

SEQ ID NO: 228304 - DNA, 670 bp, Unknown
  Bacterial polypeptide expressing nucleotide sequence isolated from the Sargasso Sea
ttgaaggaattcttcaataattcaattggaagcgcagatgctcaggttgcttcattcataaactctgagttcaatcgacagaatgagcaaattgaactcatagcatcagaaaatattgtttccaaggcggttttagaggcacaaggttcagtgctaaccaataaatatgcagagggttacccggggcgtcgatattatggaggatgtgaattcgttgacctagctgagaaactggcacaagaaagagtcaagaaactgtttaattgtttattcgcaaatgtccaacctcactcgggggctcaagccaaccaaacagtgtttttagcatgtttgaagcccggagatacaattttaggtatgtcattggatgcaggcggccacctaacccatggcgctcctccaaaccagtctggcaaatggtttgattcggtccaatatggtgtcaaaaaagataccgccttaattgattatgaagaggtagaaaaactcgctcattcccaccgcccaaagcttataatagctggagggtctgcatattcaaggatcattgattttagaaggtttaaggaaattgcggattcagttggggcttatttgttagtagatatggcccacttttctgggttagtggctggtggcgtacatcccaacccttgccgcatgccgacat

SEQ ID NO: 228305 - DNA, 598 bp, Unknown
  Bacterial polypeptide expressing nucleotide sequence isolated from the Sargasso Sea
ttgagtcagccctattcttttattgaagaaaatgattctgaattatataaagttttattaagcgaggtttctagagaagaagagactctcgaactaattgcctcggaaaattttgttagttaccctgtgctgcagatggctggatcagtaatgacaaataaatatgctgaaggatatccaggtgcaagatattacggtggttgtgagtttgttgatcaggcggaaaacttagctagggatagagcaaagacattattcagctgtgaatatgctaatgtacagccacattcgggctcccaagcaaatatggctgtattaatgacatttatttctgttggtgacactataatggggctcgatttagctcatggaggtcaccttacgcatggaagttcggttaatttttcaggaaaactttacaataccgtttcatatcaagtagatagaaagacaggtcgagttaattttgatgaagttaggaaaattgcaaaagagaataagccaaaattaattatttgtggaggaagtgcgtatccaagatttgtagaatttagcaattttcgtgagattgctgatgaggtgggagcttatttaattg

SEQ ID NO: 228306 - DNA, 487 bp, Unknown
  Bacterial polypeptide expressing nucleotide sequence isolated from the Sargasso Sea
atgaaatccgaaaaaataatctttgatttaatcaaaaaagaagaagaaagacagattaacggtattgagctaattgcttcagaaaattttgttagcgaaaatgtcatgaaagctgctggatctgttttaacgaataaatatgcggagggctatcctggaaaaagatattatggaggttgcgaagttgtagatgaagtagaatcaatagctattgatagggctaaagaattgtttggtgcagaatatgccaacgttcaacctcactctggaagtcaagctaatgcatcggtgtttcatgcttttttaaatcctggagataaattacttggttttgatctttctcatggcggtcatctaactcacggttctagcgttaatttttctggaaaaatatataatacttcattctatggtgttgaaaaagattcaggaacactagattatgaaaatattcttcgaattgcacataaagaaaaacctcagatga

SEQ ID NO: 228307 - DNA, 856 bp, Unknown
  Bacterial polypeptide expressing nucleotide sequence isolated from the Sargasso Sea
ttgtcatatattgaaaaaatcgaccctgaattacatgaaataattcagagagagcataaaagagagcatagtaccttagagttaatagcctctgagaattttactagtcctgcaatattagaggctgcaggaggaattatgacaaataagtatgccgaaggctatcctggtaagagatattatggtggctgtgttcatgttgatgaggcagaaaatttggctattagcaggttgaaaaagctttttagggtagaatattgtaatgtgcagcctcattcaggatctcaggcaaatatggctgtttttatgacttttctcaatgtgggagatactataatgggtcttgatttagctcatggaggtcatctaacccatgggaatgctgtaaatttttcaggtcagctatataattctgtgctttatcaagtaaacaaaaaaactgggagagtagattttgataatgtcagaaaacttgcaaaggaacataagcccaaaattattatttgcggtggtagcgcttatcccagatatattgagtttgagatttttagtgagattgccaatgaagttgatgcctttttaatggctgatattgcccatccaagtggtttgattgcagctggtgttcatccatccccagttccttattgtgatgttattacgagtacaacacacaagacgctaagagggcccagaggcgggatcataatgatgggaaaggataaagaaaatatctggggtaaagttgccccaaaatctggtcgtgttaaaatgatttcagagctgttagattcctcagtgatgccaggcatgcagggtggtccattaatgcacatcatatctgcgaaagccatcg

SEQ ID NO: 228308 - DNA, 678 bp, Unknown
  Bacterial polypeptide expressing nucleotide sequence isolated from the Sargasso Sea
tatgtatgacacctccctgaccctcaccgatttcgaccccgaactggccgaagccgttcagcacgaagagcgccgccaggaagatcacgtcgaactgatcgcttccgagaattacgccagcccgctggtgatggccatccagaactcggtgttcaccaacaagtacgccgaaggctatccaggcaagcgctactacagcggatgcgagcatgtggacgtggccgagcgcctggccatcgaacgggtcaaggtgctgttcgactgcgactacgccaacgttcagccccatgctggcgctcaggccaacgcggcggtgttcctggcactgaccaaccctggcgataccgtgatgggcatgaatttagctcagggtggccacctgacccacggcaatccgtccaatttctccggtcgccactacaaaattgtgccctacgggcttgatcccgagacgggactgatcgactacgacgaaatggaacgcatcgcgttggaaacccgccccaggatgctcatcggtggcttctcggcctattcacgccacaaagactgggcgcgcatgcgcgccatcgccgataaagcgggcgctatcttctgggtggacatggcccacgtcgccggtctggtggcggtggggcgatacccggaccactgcacacgctcatgtggtgacagcac

SEQ ID NO: 228309 - DNA, 822 bp, Unknown
  Bacterial polypeptide expressing nucleotide sequence isolated from the Sargasso Sea
tatgtcaagcgaaggaaaatatataaataatagttacaaagatttctttgaaaaaagtttatcagagactgatccagaactttataaagcaatcaatgatgaattaataagacaacaaaatcacattgaactgattgcatcagaaaatatagtatcccaagcagttttggaagctcaaggatctgttcttacaaacaaatatgctgagggttatcctggaaaaagatattataatggatgcgaacatgttgatgtagcagaaaatcttgcaattgatcgtttaaaaaaactttttgattgtaaatttgcaaatgcgcaaccacattcaggagcacaggcaaatggagctgtttttttagctttgttgaaacctggcgatacttttatgggaatgagtttaaactcagggggacatattacacacggtttaaaaatttcaatgtcaggaaaatggttcaatgctgttggatatgatgtagataaaaaatcagaattaatagattacgatgttgtggaaaaattagctttagagcataagccaaaattaataattgctggtggaagtgcatattctagaataattgattttaaaaggtttagagaaatttgcgataaagtaggagcttactttatggttgatatggcccacttttctggcttagttgcaggaaaaggttatcctaacccatgtgaatatgctcatgtggttacatcaactactcataaagtttttagaagtgctagaggtggaattattttaactaaccatgaagatctagcgaaaaaatttacacagcagtattttcaggctacccaggagga

SEQ ID NO: 228310 - DNA, 679 bp, Unknown
  Bacterial polypeptide expressing nucleotide sequence isolated from the Sargasso Sea
atgtctaaatttagcaaatatacttcaaatgattatcaaaattactttgataatgatttatcaaacactgaccctgaattattcagttctattaaacttgaacttcaaagacaacaagaacatattgaactgattgcatctgaaaatatagtttctaaagctgttttagatgctcaaggatctatcatgacaaataaatatgcagaaggttatccttcaaaaagatattatggtggttgtgaattcgttgataaagcagaagaacttgctctagagcgagttaaaaaactttttaactgtaagtacgctaatgtacaaccgcattctggagctcaagcaaatggagcagtatatcttgcgcttttaaatcctggagacccaatacttggtatgagcttaaattctggaggtcatttaacacatggagctaaagttgcgcaatcaggtaaatggttaaaagcttttcattatgaagttgatgaagttacgggattgattgactacgacaagattgaggagttagcgttagagcacaaaccaaaactgattatagctggtggtagcgcttactcaagagttatagattttaaaaaatttagaaaaatagcagataaaataaattcttatttgatggtagacataacacatttttctggtctagtagcaggtaaaggttatc

SEQ ID NO: 228311 - DNA, 591 bp, Unknown
  Bacterial polypeptide expressing nucleotide sequence isolated from the Sargasso Sea
ataaagtttttagaagtgcaagaggtggaataattttaactaatcacgaggatttatctaaaaaatttaatactgcagttttccctggataccaaggtggaccacttatgcatattatagctgcaaaagctgttggatttaaagaagcattaaaacctgaatttaaagattatataaaaactgttttagcaaatgcaaaaattttagcagaaacgttaaagaataatggttttaaaatatattcaggtgggacagatacacatttgatgttagttgacttaagaccttttaatgtaaaaggtaacgtcgctgcagaaagcctttctaaagccaacattacatgtaataaaaatggtattccgtttgacagtgaaagcccaatgataacttctggaataagacttggatcgcaagcagccacaacaagaggatttgggttaaaagaatttcaaatagtaggtgatttaataacaaaaactataaaagggttagccgaaaaccctgaagataactctaaaactgaagatgaagtaagaaaagaagttgtaagtctttgttctaatttccctatctataaacacttaggctaac

SEQ ID NO: 228312 - DNA, 442 bp, Unknown
  Bacterial polypeptide expressing nucleotide sequence isolated from the Sargasso Sea
tatgtcgagtgaaaaaaattatttaaacgatagttacaaaagcttctttgaggatagtttatctttaaaagatccagaactttataaagctattaaagatgaattaatcagacaacaacagcacattgaattaattgcatctgaaaatatagtttctcaagcagtactagaggcacaaggttcagttttaacgaacaaatatgcggagggttatcctggtaaaagatattacaatggatgtgagcacgttgatgtggctgaaaaccttgctatcgaaagactaaaaaaattatttaattgtaagtttgcaaacgcacaaccacactctggtgcgcaagctaatggagcagtatttttagctttattacgaccaggagatacattcatgggcatgagtttaaattctaggtggtcaccattactcataggattaaaaatttca

SEQ ID NO: 228313 - DNA, 538 bp, Unknown
  Bacterial polypeptide expressing nucleotide sequence isolated from the Sargasso Sea
atgcaaaaagataagcagatttttgatttaattgatgttgaaaaaaaacgtcaagtagagggtatagagctaatagcatctgaaaacttcactagtgagcaggttatgtcagctacaggatcaatacttacaaataaatatgctgaaggttaccctggaaaaagatattatggtggttgtcaagttgttgatgaaattgagaccctagctatttccagagcaaaagaattatttggtgcttgttgggcaaatgttcagcctcattctggaagtcaagctaattctgctgtgttttttgcttgcttgaagcctggtgatacgatacttggttttgatttagcacacggaggtcatctaacccatggctctagtgtaaacttttcaggtagactttataatcccgttttttacggagtagatgaaaccacaggaatgttagattatgacgagatagaaagaatcgcaaacaaagaattgcctaaaatgattattgcaggtgcctctgcttattccagggatattgatttaagagattaga

SEQ ID NO: 228314 - DNA, 786 bp, Unknown
  Bacterial polypeptide expressing nucleotide sequence isolated from the Sargasso Sea
tttagctttattaaacgcaggcgataccattttatgtatgagtctggcgcacggtggtcacttaactcacggtgctaccgtcagctcttcaggtaagttgtacaaagctgtgcaatatggtctgcaccctgaaactggtgttattgattatgctcaggcagaagctttagcactggagcacaaaccaaaattgatcatcgcaggtttctctgcttattcaggtattatcgattggcagaaattccgtgaaatcgcggataaagtgggtgcctacctgatggtggatatggctcacgttgctggtttagttgccgctgggttgtatccaaacccggtgccagttgctgatgttgtaacaactactactcacaaaactttagccggtcctcgtggtggtttaattcttgcccgcaaaaacgaagagatcgaaaagaaactgaattctgcagttttccctggtggtcagggtggtcctttaatgcatgtgattgccgctaaagctgtagctttcaaagaagcgctgcaaccagaatttaaagtttaccagcaacaagtactgaaaaatgctgtagctatgtgcgatgaaatgatcaaacgtggttataaaatcgtgtctgggggtacgcaaaaccacttattcctgatggatttaatcgacaaagacatcacaggtaaagaagcggatgcttggttaggccaggcccatatcacagtgaacaaaaactctgtgccaaatgacccgcgttctcctttcgtgaccagtggcttacgtatcggtactcctgc

SEQ ID NO: 228315 - DNA, 850 bp, Unknown
  Bacterial polypeptide expressing nucleotide sequence isolated from the Sargasso Sea
gttcagtacggcgtcgacaaggagacccaacgcctcgatatggaggcgatccgccagctggctttggagcacaagccgaagctgattgtttgcggctattccgcgtatccacgcaccatcgacttcgcctccttccgtgccatcgctgatgaagtgggtgcgtatttgctggctgatatggctcacatcgccggcctcgtggccgctggagtgcatcccagcccggtgccccattgcgatgtggtgaccaccaccacccacaagactctgcgcggcccccgcggcggcctgatcctctgccgcgacgctgagttcgccaaaaagttcgataaagccgtgttccctggcagccagggcggccctctggagcacgtgatcgctgccaaggctgtggccttcggtgaagcgttgcagccttcgttcaaggcctacagccagcaggtggttgccaatgcggcagccctcgctgaacagctgattgcccgcggcatagatgtcgtcagcggcggcaccgacaaccatgtggtgctgctggatctgcgtggcatcggcatgaccggaaaggtggctgatctgttggtcagtgatgtgcacatcactgcgaacaagaacaccgttcccttcgaccccgaatctcctttcgttaccagtggcctgcggctgggaacagctgcgcttaccacccgtggttttgacgctcaggccttccgggaggtcgcagatgtgattgccgaccgtctgctcaatcctgaggatgatgcgattcgccagcgttgcctcgatcgggtggccgccctctgcgagcgctttcccctctacgccgacagcaagcagccggttctggcctgag

SEQ ID NO: 228316 - DNA, 624 bp, Unknown
  Bacterial polypeptide expressing nucleotide sequence isolated from the Sargasso Sea
tatgccaaaaactttagaaaatacacgagaagattttagagatttttttgactctgatttgtcaaaaactgatcctaaattatataattcaattaaacttgaacttcaaagacagcaggaacatattgaattaatagcctcagaaaatattgtttctaaagcagttctagatgcacaaggttctattttgacaaataaatatgcagaaggttaccctggaaaaagatattacggtggctgtgaatttgtggacaaagccgaagaactagctttagaaagagttaaaaaattatttaactgcaaatttgcaaacgttcaaccgcattcaggtgcacaagcaaatggagcagtatatctagcacttttaaaacctggtgacacaatactgggtatgagtttaaattctggcggtcatttaactcatggagctaaagttgctcaatctggaaagtggttaaacgcatttcattacgaggtagataaagttactggattaatcgattacgatcaggtcaaagaattagcgttaaaaaataaacctaaactattgatagcaggtggaagtgcgtattccagaataatagattttaaaaaatttagagaaatagcagatagtattggagc

SEQ ID NO: 228317 - DNA, 514 bp, Unknown
  Bacterial polypeptide expressing nucleotide sequence isolated from the Sargasso Sea
taatagttctgtttttcctggtttgcaaggtggaccacttatgcatgtgattgctgctaaggccgttgcttttggtgaagcccttcaaccagagtttaaaacatatattcaacaagtaaaaaagaatgcatcaattcttggagaagttctcatgtcaaacggaatagatattgtcacaggtggaacagactctcatatggttttagtagatttaagatcaaaaaatgtaacgggcaaagatgcggaagaaagtttagagagagctggaatgacttgtaataaaaatggtgttgcaaatgatccaaaccctccaacaattacttcaggtataagattaggatcaccagctgctactacaaggggctttaaagaggaagagttcaaatttattggtgaaaaaatctcaacaatcataaatgcactatcttcatctaatgcagatatctcgatgaccgaaagctctattctcaaggatgttactgagctctgctctaattttccaatctataaataa

SEQ ID NO: 228318 - DNA, 607 bp, Unknown
  Bacterial polypeptide expressing nucleotide sequence isolated from the Sargasso Sea
atgtctagtgaaacaaaatatttaaacagtgattacaaagacttttttgagaaaggtttattagatagtgatccagaaatttacaaagctattaacgatgagttggttagacaacaaaatcatatcgaattaattgcatctgaaaatattgtatctcaagctgttctagaagctcaaggatcagtattaacaaataaatatgcagagggctatccaggcaaaagatactataatggttgtgagcatgtagatgtagctgagcaattagctatagatagacttaaagaattatttaattgtaaatttgccaacgctcaacctcattcaggagcacaggcaaatggagcagtgtttttagctttgctaaaacctggtgatacttttatgggaatgagtttgaattcaggaggacatataactcatggtttaaaaatttcaatgtcaggaaaatggtttaatgcaattggatatgaagttgataaagcatctgagcttattgattatgataatgttgaaaaacttgcgcttgagcacaaacctaaactcataattgctggaggtagtgcttattcacgggtgataactttaaaagatttagagaaatagc

SEQ ID NO: 228319 - DNA, 288 bp, Unknown
  Bacterial polypeptide expressing nucleotide sequence isolated from the Sargasso Sea
ccggaagtgaagctgaattaaatcttgaagaagcgggcataacatgcaacaagaatggaattccaaatgatccacatccgccaaaaatcacatctggcattagattgggtacaccagcaggcacaactcgaggctttaaagaagatgaatttaaacttgttggaaagctaattttggatgttcttaacggcatgcagggctcacctgaggagagaaagtcaattaatgagaacgtaaagtcaaaagttagtgcactttgtgcagaatttcctatatatagtaattaaa

SEQ ID NO: 228320 - DNA, 784 bp, Unknown
  Bacterial polypeptide expressing nucleotide sequence isolated from the Sargasso Sea
atgtcaaatctgaaaaatcaagaccctgatattgcatcaataattgattctgaggttaaacgacaaaacaacttcttagaattgattgcttcagaaaattttactagcaaagctgtattagaagctgttggctcatccctaacaaacaaatatgctgaaggatatcctggtagaagatattatggtggttgtattcatgttgatgaagctgagaatctagccattgatcgtgcaaaaaaattattcaaagcagagtacgcaaatgtacagcctcattctggttcctcttcgaatatgggtatttatttagcgatgttagagcctggagattgcattatgggtctcgatttaagtcacggaggacacttgactcatggtagtaaggtaagtttttcaggacaaatatataattcagtaacatttcatgtaaaaaaagaagatggattaattgattttgatgatttattaaaaaaggcaaaagaacataaaccaaaattaattatttgcggagctagtgcatatccaagacaagttgagtttgaaaaatttcgagaaatagctgatgaggtaggtgcttttttacatggtgatatatgtcataatgcaggattaattgcagcagaaatgcatccttctccatttccatattgtcatgtggtttctactagcacgcataaaacattaagaggtccaagagggggaattatactactaggaaaagattttgaaaatccatacggcatcgttgctccaaagagcggtagagtaaaaatgatgtcagaat

SEQ ID NO: 228321 - DNA, 913 bp, Unknown
  Bacterial polypeptide expressing nucleotide sequence isolated from the Sargasso Sea
caagctgtttttttggctcttttaaagccccatgatacatttttaggaatgtcacttgcatctggaggccatcttactcacggagctaaaccaaatatttctggtaaatggttcaatgctattcaatatggagtaaaaaaagatggcaatgataaagatttaatagattatgatgaagttgaaaaattagcaaatgaacataagcctaaaattataattgcgggggcttcagcatatccaagaattattgattggaaaaaatttagagatatcgcagataatatcggagcttatttcatggttgatatggcacattattcagggttaattgctggaaaacaatatcctaatcctatagaatatgctgatattgtaacttctactactcacaaaactttaagaggtgcaagaagtgcaatgattttaacgaataatgaagatatatataaaaaagttaattctgcagtttttcctggcttacaaggagggcctttaatgcatgttatggctgctaaagctgtttcatttggagaggccttaaaacctgaattttcagaatatattagtgaagtaatttcaaatgctaaaatcttagctaatatatttatacaaagaggctttagagttgtaacaggaggtacagatagtcatatagtttggttagatttatcgcctaaaaatttaacaggagataaagctgagaaactcctggaagatgttggtatagcttgtaataaaaatgccataccatatgatcctcatccaccaaaaattactagtggaataaggtttggaacagctgctgcaacttctcgtggatttaataataatgattttaaagaagttggaaatattatttctgatgttttagatagtttactaaaaaatgcagaagatcaaaaaattatttaac

SEQ ID NO: 228322 - DNA, 850 bp, Unknown
  Bacterial polypeptide expressing nucleotide sequence isolated from the Sargasso Sea
ccaaacgatactattcttggtatgagtcttgatcatggtggtcatttaacacatggttcaaaagtaaatttttctggtagaaattataaaagcgttcaatatgggcttcatcccgaaactcatgatataaattatgatgaagtgagatcacttgcaatagaacatcaacctaaattaataattgcaggtttttctgcatttacaggaataattgattggaaaaaatttagagaaattgctgatgaaatcggagcttattttcttgtagatatggctcatgtatctggcctagttgctgctggtctatatccatcgccagttccatatgcagatgttgttacatcgactactcataaaacattacgaggacctaggtcaggaatcattcttgcaaaggcaaatgaaaaaattgaaaaaaaacttaattctgccgtatttccaggttctcaaggtggtcctcttatgcacgtggttgctgcaaaagcactatgttttaaagaagctttagatccagaatttaaaatttatataaaacaggtcatggataatgcaaaaataatggctgaaacattaatgtcaaatggaatagacattgtatctaatggaaccgagaatcacataatattagttgatcttagaagtaaaggaattactggtaaagatcttgaaagagttcttggtacagtcaatataacagtaaataaaaattcagtaccgaatgatccagcatcgccatttgtgacttcaggaataagaattggtactccagctgctacaactagaggatttaaagaaaaagaaattattcaagtggctaattggatatcagatattattaatgattttgata

SEQ ID NO: 228323 - DNA, 521 bp, Unknown
  Bacterial polypeptide expressing nucleotide sequence isolated from the Sargasso Sea
tatggaaagaataaaatttattgaagcgtatgaccctgaagttgcaaatgccataaaacaagagctaaatcgtcaacgtgatactattgaattaatcgcatctgaaaactttacttctaaagaagtgatggatgctcaaggaacatggcttacaaataaatatgctgaaggccttccatctaaacgttactatgggggttgtgaatatgttgatattgttgaagatttagcacgagatagagctaaaacattattcggagcagatcatgcaaatgttcagccacactctggtgctcaagccaatgttgctgtatttactgcatttttaaaaccaggtgatactatcatgggaatgaatctctctcatggaggacatttaacccacggatctcctgtaaatttttcaggaaagttttacaacattgttgcctatggagtcgataaagaaacagggctaattgattatgatgctttagaaagcttagctattgaaacacagccaaaacttattattggtggag

SEQ ID NO: 228324 - DNA, 585 bp, Unknown
  Bacterial polypeptide expressing nucleotide sequence isolated from the Sargasso Sea
ctttaagaggtgcaagaagtgcaatgattttaactaatcatgaagatttatacaaaaaaattaattctgctgttttccctggattacaaggtggtccactaatgcatgtaattgcagctagagctgtttgctttggtgaagcacttaagcccgaattcgaagaatatattaaaaatgtaattgctagtgctaaagttatggctaaaactttagttgatagaggatttagaattgttacagggggcacagattcacatatagtttggttagacttgacaccaaaaggtttaactggtgataaagctgaaaaaattttagaagaagttggattggcatgtaacaaaaatgcaattccatatgatcctaatccaccaaaaataactagtggacttagatttggtacagcagctgctacgaccagaggttttaatcagaaagattttgaacaagtcggaaatatgattgctgatattttggatagtcttttacttgaagaaaatgagagaaatgtagtttttaataaaacaagaaaagatgtaattgagctttgcaaaaaatatccaatttatagtgaggcattttaaa

SEQ ID NO: 228325 - DNA, 874 bp, Unknown
  Bacterial polypeptide expressing nucleotide sequence isolated from the Sargasso Sea
gggtacccaggaaaaagatattatggaggatgcgaatttgtagacaaagctgagacattagcaatagaaagagcaaaaaaattatttaatgttaattttgcgaatgtccaacctcactcaggtgcacaagctaatggtgcagtttttttagcattacttaaaccgggagacacaatcctaggaatgggaatagatcagggaggtcacttgacacatggagcaccgcccgctcaatctggaaaatggtttaatgcagtacactatggtgttagaaaagataatggtcttatagattatgatcaagttaaggacttagcaaaaaaacacaaaccaaaactaatcattgctggaggaagcgcttattcaagaataatagactttaaaatttttagagaggtcgcggatagtgtaggagcttatttattagttgatatggctcatttctccggtcttgtagccggcaaagtttatcctaatccgtgtgattttgcagacgtggtaacttctactactcataaagttttaagaggaccaagaggaggaattattttaacaaataatgaagagttagctaaaaaatttaattcggctgtattcccgggcttacaagggggtccactaatgcatgttatagccgcaaaagcagtttgttttggagaagctcttaaagatgaatttaaaatttattcgagaaacgttgtagacaatgcaaaaatattatctgaaacattaaaaaattcaggttttgaaattttttctggaggaactgacacccatttaattttgctagacttaagaccaattcatgtcacaggcaaagatgcagagaaatcaatggttagtgcaaacttaacatgtaacaagaacggtatac

SEQ ID NO: 228326 - DNA, 859 bp, Unknown
  Bacterial polypeptide expressing nucleotide sequence isolated from the Sargasso Sea
tggtgcacaagcaaatggagctgtatatctagcacttttaaaacctggagacacaatactaggtatgagtttaaattctggtggtcatttaactcatggagcaaaagttgctcaatctggaaagtggttaaatgcatttcattacgaggtagataaagttactggattaatcgattacgatcaggttaaagaattggcgttaaaaaataaacctaaactattgatagccggcggaagtgcgtattcaagaataatagattttaaaaaatttagagaaatagcagatagtattggagcttatctcatggttgatatggcacacttttctggtttagttgctggacatggatatccaaacccaattgattatgcagatgtagtaacttcaacaactcacaaagttttaagaggtggaagaggtggaattatacttacaaaccgagaagatttatttaaaaaatttaattccgctgtatttcctggttatcaaggtggacctttaatgcatgtaattgcggcaaaagccgctgcttttcaagaagcacttaaacctgaatttaaagaatatattaaatcagtactcgctaatgcaaaaatattatctgaaactttaaagaataatggatttaaaatattttctggtggtacagacacacatttaatgcttgtagatttaagacctttcaaagttacaggaaaagctgccgaagtcagtttatgtaattcgaatataacttgtaataaaaatggtattccatttgatactgaaaaaatgactattacttctggtataagacttgggtctcaagctgcaacaacgagaggttttggattaaacgaatttaaaaaagttggtgaa

SEQ ID NO: 228327 - DNA, 763 bp, Unknown
  Bacterial polypeptide expressing nucleotide sequence isolated from the Sargasso Sea
gtctgcggttactccgcatatccgcgcacgatcgacttcgctgcgttccgttcgatcgctgatgaggtcggggcctatctgctggcggacatggctcacatcgccggtctcgtggctgcgggagtgcatccaagccctgtgcctcattgcgatgtggtcacaaccaccacgcacaagaccctgcggggaccccgcggtggactgatcctatgtcgcgatgctgaattcgccaagaagttcgacaaggcggtcttccccggcagccagggtgggcccctggaacacgtgatcgccgccaaggcagtcgctttcggagaggcgttgcagccggccttcagggcctacagccagcaggtggtggccaatgcagctgccctggcggcacggttgatcgagcgcggcatcgatgtggtgagcggcggcacggacaaccatgtggtcctgctcgaccttcgctgcatcggcatgaccggcaaggtggccgatctgctggtgagtgatgtgcacatcaccgccaacaagaacacggttccgttcgacccggaatcccctttcgtcaccagcggtctgcgtctgggtacagcggctctcaccaccagaggtttcgatgcggaggcctttcgtgaagtggctgatgtgatcgctgatcgattgctcaatcctgaagacgacgccattcagcagcgctgtctcagccgtgtggaggtgctctgcagccggttccctctctatgtggaacagagagagccggcgattgcctgac

SEQ ID NO: 228328 - DNA, 811 bp, Unknown
  Bacterial polypeptide expressing nucleotide sequence isolated from the Sargasso Sea
cgacgcactgctggcggcgatgaatgccgaggagcagcgccaggaagatcatatcgagctgatcgcgtcggagaactacaccagcaagcgcgtgatggaagctcaaggcagtggccttaccaacaaatacgccgaaggctacccgggcaagcgctactacggcggctgcgagcatgtggacaaggtcgaagccctggccatcgagcgcgccaagcagctgttcggtgccgattacgccaacgtgcaaccgcactccggttcctccgccaacagcgccgtgtacctggcgctgatcaatgccggcgacaccattctgggcatgagcctggcccacggcggtcacctgactcacggcgccaaagtgtcatcctcgggcaagctgtataacgcggtgcagtacggcatcaacaccgacaccggcctgatcgactacgacgaagtcgagcgcctggcggtcgagcacaagccgaagatggtcgtggcaggtttctcggcctactccaagaccctggatttcccacgcttccgtcagatcgccgacaaggtaggcgcgctgctgttcgtcgacatggcccacgttgccggcctggttgccgctggcctgtacccgaacccgctgccttacgccgacgtggtcaccaccaccacccacaaaaccctgcgcggtccacggggcggtttgatcctggccaaggccaacgaagaaatcgaaaagaaactcaacgctgcggtattccccggcgcccagggcggcccgctgatgcacgtgatcgccggcaaggccgtgtgcttccaggaagcgctcgagccc

SEQ ID NO: 228329 - DNA, 634 bp, Unknown
  Bacterial polypeptide expressing nucleotide sequence isolated from the Sargasso Sea
tatgtctagtgaaagtaaatatttaaacgatcaatacaaaagtttttttgaagatagtttatctcaaactgatcctgatttatttaaggctattaatgatgaattacaaagacaacaagaacacattgagttaattgcatcagaaaatattgtttctaaagccgtactagaagctcaaggatccgtattaacaaataaatatgccgaaggttattcgggtaaaagatattacaatggatgtgaacatgtagatgtagctgagaatttagcgaatgaaagattaaaaaaattatttaattgtaaatttgcaaattcacaacctcattcaggggcccaagctaacggagctacatttttggctttacttaaacctggtgatacatttatgggaatgagtttgaattctggtggtcacataactcacggattaaaaatttcaatgtctggaaaatggtttaatcctataggttatgatgttgataaagaatctgaacttattgattatgatcatgttgaaaaattagcattagaacataaacctaaacttataatagctggtggaagtgcttattctagaattatagattttaaaaaatttagagaaatatgcgataaagtgggagcatattttatg

SEQ ID NO: 228330 - DNA, 594 bp, Unknown
  Bacterial polypeptide expressing nucleotide sequence isolated from the Sargasso Sea
cacataaaacgcttcgagggccacggggaggcatgatcctcacaaatgattctgacttagcaaaaaaatttaattctgctatttttccaggtattcagggcggcccattgatgcatgtcatagcagcgaaggccgtcgcctttggagaggcactaaggccagaattcaagcattacatcaaagaagtaattatgaacgcacaagcgttatcagacgagctaattaagggcggtttagacactgtaacgcatggtactgacacacatgttttgttagttgatttgagaccgaagggagttaaaggaaatgcaactgaaaaggctctggaacgagcccatattacctgcaacaaaaacggtgtaccttttgatcctgaaaaaccagccgtcacctccggtattagattgggatcgccagcaggaacaacccgtggctttgacgaaaatgatttccgccagataggtcgatggattattgaggttgttgatggtttggccaagaacggcgaggaaggaaattctgctgttgaggaaaaggttaagtcggaagtcgcgacactttgcgctaaataccccctttaccctaatctctaga

SEQ ID NO: 228331 - DNA, 875 bp, Unknown
  Bacterial polypeptide expressing nucleotide sequence isolated from the Sargasso Sea
tttggcaaactttatgggacttgagttgtctcggcaagaagagcacattgagttaattgcctcagagaactatgcatctaagagagtgttggaagcacaaggcagtgtgcttacaaataaatatgctgagggttatccaaataagcgatactacggtggatgtgagcatgtagatggtgtagaaagtattgctattgaaagagcaaaaaaattatttagtgcaaaatttgctaatgtacaaccccactctggagcttcagctaatgctgcagtttttctagcattattggagcctggcgatactattttaggtatggctctcgatcaagggggccacttaactcatggtgcaaaggtaaatttttctggaagaaatttcaatgcgatacagtatggtttaaaaaaagatactggaacaattgattatgaagaagttgagaaacttgctgatgaacacaaaccaaaactaataattgctggtttttcagcttatatgggtatagtcgactggaagcgttttagggaaattgctgatagaaataattcttttcttttagttgatatggcacatgtttcaggactggtagctggtggtgtttacccaaatcctgttgaatatgcccatgtagtaactagcacaacacataaatccttaagaggtcctagatcagggataattctctctaacgaagacgaagaatttcagaaaaaaattaactttggtgtttttccaggctctcaaggaggtccgctcatgcatgttattgccgcaaaagctgtgtgttttaaagaggccatgacggatgattttgtaaattatcaaaagcagataataaagaatgcaaaatcaatgtgtgaagatttcaaaaactagg

SEQ ID NO: 228332 - DNA, 295 bp, Unknown
  Bacterial polypeptide expressing nucleotide sequence isolated from the Sargasso Sea
gatggatttaacaggcgactctgctcaaactagtttggaagcagcaaatataacttgtaacaaaaatggaataccaaaggatccaaagcctcctaaaatcacatcaggtattagactcggaacgccagctgcgacaacaagagggttcaaggaaaacgagtttaagctcgtaggagaactaattcttgaaacacttgttggcttaaaaagtaacccgactgataatagcaatgtagaaaaagccgtaaaagaaaaagtaattaatttatgtagagagttcccaatttatagttag

SEQ ID NO: 228333 - DNA, 787 bp, Unknown
  Bacterial polypeptide expressing nucleotide sequence isolated from the Sargasso Sea
atgaatccaggagataagtatgctagtttagttctttcagatggagggcatttgagtcatggtttgaagataaatatatccggtaaatactttgagccagttcattatcctttaatttatgacgaggacgacgatggatttgaaacaataaattatgatgcagtaagagaggtatgtttagaacataaaccaaaaatgttgctttgcggatattctgcatatccacgaattattcattttgataaaatgcgagaaattgctgatgagtgtggtgcttatttgatgtgtgacattgcgcacatagctggcctagttgccggcggagttcatccttcaccatttcctcatgcacacgttgtaacaacaacaactcacaaaacattgcgaggtccaagaggtggattaattctcactaatgatgaaaagatagcaacaagaatagacagagccgtatttccaggttctcaaggtggcccactgatgcatattatttcaggcaaggcagtttgttttggtgaagctttacaacctgatttcaaagattattctaggaaaatagttgagaatgcacaagctttggccagaggtttatcaagtagaggatttagactagtcagtggaggtactgataatcacctaatgctagtagatttgcgtgataagttaccagataatacgggaaaagaggtagcagtatggatggaaagtgcggggatgattgcaaatcacaatggaattcctaaagatcctaggcctccaatgcagactagcggaattcgtttaggaa

SEQ ID NO: 228334 - DNA, 312 bp, Unknown
  Bacterial polypeptide expressing nucleotide sequence isolated from the Sargasso Sea
tatgtcaagtgaaggcaaatatttaaatatagaatatcaaaatttctttgaaaaaaaattatctgaaactgatcctgaagtatataaagctgttacagatgaattaattagacaacaaaatcatattgaactaattgcatctgaaaatatagtttctcaagccgtgcttgaagctcaaggttccgtattaacaaataaatatgctgaaggatatcctggaaagagatattacaatggatgtgaatacgttgatgttgcagagactttagctaacgagcgattaaaaaaattatttaattgtaagtttgcaaa

SEQ ID NO: 228335 - DNA, 412 bp, Unknown
  Bacterial polypeptide expressing nucleotide sequence isolated from the Sargasso Sea
aacagttttagcaaatgcaaaaattttagctgaaactttaaaaaataatggttttaaaatttattcaggtggaactgatacacatctgatgttagttgacttaagaccttttaatgtaaaaggtaatgttgctgcagaaagcctttctagagccaatattacatgtaataaaaatggtattccatttgatagtgaaagcccaatgataacttctggaataagacttggatcgcaggccgctacaacaagaggttttggattaaaagaatttcaaatagtaggtgatttaataacaaaaactataaaaggattggcagaaaatcctgaagataactctaaaactgaagaagaagtaagaaaagaagttgttagcctctgctcgaattttcctatatataagcatttaggttag

SEQ ID NO: 228336 - DNA, 839 bp, Unknown
  Bacterial polypeptide expressing nucleotide sequence isolated from the Sargasso Sea
attgtctacagcaattaaaatagatcaatttttaaataatttctttaaattgagtctaaaggaatccgataaagaactttataattcagttaaagacgagtttgtaagacaacaaaatcacattgaactcattgcttctgagaacattgtatctaaagctgttttggaagcgcaaggatcagtcttaacaaataaatatgctgaaggttatcctggcaaaagatattatggtggatgtgaacatgtagatctgtcagaaactttagctatagaacgtgcaaaaaaactttttaattgtaattttgcaaatgttcaacctcattcaggcgctcaggctaacggagctgtttatttagctttaataaaacctggtgatacaattttaggcatgagtttaaattcaggcgggcatttaactcatggagctaaacctgctcaatctggtaaatggtttaatgctatacattacgatgtagataaaaatactggtctgattgattatgaaaatgttgaaaaattagcgatagaaaacaaacctaaattgattattgcaggaggtagtgcctactcaagagttattgactttaaaaaatttagagaaatttgtgataaagtaaatgcatatctattagttgatatggctcatttttccggtttagttgctggtggagtttatcctaaccctacaaagtatgctgatgttgtgacttcaacaacacataaagttttaagaggtccaagaggagggattatacttacgaataaagaagatttaattaagaaatttaatagtgcgatatttcccggtcttcaaggaggtcctttaatgcacgtaattg

SEQ ID NO: 228337 - DNA, 376 bp, Unknown
  Bacterial polypeptide expressing nucleotide sequence isolated from the Sargasso Sea
catgaaatcatctaaaagcgatagtattttttctaactcaaactctattaaagattatgattctgatttgtgggcatcatttgagcatgaggctgatagacaggaagatcatattgagttaattgcatctgaaaattatgcttcaaaaagaattcttgaagcacaaggctcgattcttacaaataaatatgcagaaggatatccatcaaaacgatattatggtggatgtgaaaatgttgatattgcagaaaatcttgctatagaaagagctaaaaaactttttaaagcagattatgcaaatgttcaacctcactctggctcatcagccaatgctgcagcatatttagctcttctagaacaaatgatactatcctag

SEQ ID NO: 228338 - DNA, 805 bp, Unknown
  Bacterial polypeptide expressing nucleotide sequence isolated from the Sargasso Sea
caatgttgaaaagttagcattagaacataaacctaaacttattattgctggcgggagtgcttattctagaataattgattttaaaagatttagagaaattgctgacaaagtaggtgcttatttgatggttgatatggctcatttttctggtttggttgcaggaaaaggttatccaaatccatgtgactacgcgcatgtagtaacttcaacaactcacaaagtttttagaagtgctagaggtggaataattttaacaaatcatgaagatctatctaaaaaatttaatactgctgttttccctggctaccaaggcggtcctttaatgcatgttattgcagctaaagctgctggttttttagaggcattaagacctgaatttaaagaatatattaaaaatgttttagctaatgcaaaaattttatctgaaacacttaaaaataatggttttaaaatttattcaggtggaactgatactcatttaatgcttgttgatttaagaccgtataatgttaaaggaaatgctgctgcagaaagtttatctaaggcaaatataacatgcaataaaaatggtattccattcgatacagaaaaaccaatgattacatctggaataagattaggaacacaagcagctacaacgagaggttttggtttaaatgaatttaaaactgttggagaattaataactaaaacgattaaaggattatcagaaaatccaaatgataatagtaagattgaggaagaagtaaggaatgaagttattgacttaacatcatcatttcctatttacaaaaatctaacataa

SEQ ID NO: 228339 - DNA, 760 bp, Unknown
  Bacterial polypeptide expressing nucleotide sequence isolated from the Sargasso Sea
aacgaaaatacgagacaagagcaggaaattgaactcatagcatcagaaaatatcacatctttggcggttatgcaggcacaaggatccgtaatgacaaacaagtatgccgaaggttaccccggtagacgatattatgggggatgtgaatttgtagatgttgctgaaaatctcgcaatcgagagggtaaaaaaattatttaactgtaactttgcaaatgtccaaccgaattcgggaagtcaagcaaatcaagctgtgttcatgtctttaatgaaacccggagacacattcttagcaatggatctagcctcaggtggacatctcacacatggagcaaaacctaacctttcgggcaaatggtttaatgctgtgcactatggagtaaggaaagacactgagcaaattgattatgaggaaataagagatcttgcaaagaaccatcaaccaagattgatcatagcaggtggttccgctgtacctagacaaattgattttgaaaaattcagaaacattgcagaggaaattggttcctttttcatggttgatatggctcatttttctggtcttgtggcggctggaaagcaccctaatcctttagaatttgctgatgttgcgactagtactacacataaaaccctccgtggacctagaggtggtataatacttacaaacgatgaagatcacgcgaaaaaatttaactctgccgttttccctggactacagggtggccctctaatgcatgtcatcgcagcaaaagctgtcg

SEQ ID NO: 228340 - DNA, 454 bp, Unknown
  Bacterial polypeptide expressing nucleotide sequence isolated from the Sargasso Sea
tttgcttgataaaaaatctaatattaaaactgatgcaatcttttctaacaaaaaagatatagaactttatgatgctgagctttgggaatccttccaaaaggaaatggtcagacaagaagagcatattgagcttatagcctcagaaaattatgcaagcgaaagagtcttacaagctcaaggttcagtattaacaaataagtatgctgaggggtatcctgacaaaagatattatggaggttgtgagtttgttgatattgctgagaaattagcaatagatagagctaaagaactttttagtgcagattatgcaaatgtgcagcctcattctggttcatctgcaaatgctgctgcgtatttagcgttacttgagccaaatgacacaatacttggaatgagtctcgatcatggaggacacctcactcatggatcaaaagtaaatttttcaggaagaaac

SEQ ID NO: 228341 - DNA, 608 bp, Unknown
  Bacterial polypeptide expressing nucleotide sequence isolated from the Sargasso Sea
acctgttccgtatgcagatgttgtgacatctacgactcacaaaacactaagaggtccaaggtctgggattattcttgcaagagagaatgaagatatacaaaaaaaattaaactctgcagtttttccaggatcacaaggaggccctttgatgcatgttgttgctgctaaagcagtttgttttaaagaagctcttgaacctgaatttaaaacctatatgtcgcaagttattagtaatgctaaaactatggcgaagactattattggaagaggagttgatatagtaaaaggtggtactgaaaatcatatgattcttgtcgaccttagaaataaaggtataacaggaaaggactctgaatataaactcggtttagctaatatcacagtaaataagaacgctgttcccaatgatccacagtctccctttgtaacatcaggaataagacttggaacacctgcagttacaacaagaggctttaaagaagatgaaattattcaaatttcaaattggatctgcgatatagtccttgatttagataatgagaaaaaaattgaggaaattaaagataaagctctgtctttatgcaaagaattcccagtatataagtaat

SEQ ID NO: 228342 - DNA, 805 bp, Unknown
  Bacterial polypeptide expressing nucleotide sequence isolated from the Sargasso Sea
aatgctcgactatgacgagatgaattctctggcaaaggaattccgtcctttagttattgtcgccggatattctgcctacccgcgaaaagtcaatttcgctacaataagagagatcgctgattcagttggtgcaacattcatggtagatatggcacattttgctggacttgttgcaggaaaggtattcgttgatgacttcgacccaatatcgaatgcccatatagtcacttctaccacccataagtcccttcgtggccctcgtggtggaatcgtcttgtcgaacgaagaagaattatcagaattcatcgataagggttgtccgatggtcctcggagggccgttggcgaatgtcatggctgctaaagctgtagcatttgctgaggcacgccgaccggagttcagagaatacgcaagcaatgttgttaacaacgcttcggcattggcttcgggaattgagaaacgaggcggtcggcttgtaacaggtggaacagaaaaccatcttgttttagtcgatgttcggaagtttgggcttactggaagacaagctgaaagcgcccttgaggacgcaggtgttgtagtcaatcgaaactcaattccatttgatccaaatggtgcttggtatacatctggaatcagattaggaactccggcacttacaactttggggatgggtgaaaatgatatggacgaagtagcagatattatctgctctacgttggaggctacagaacctacaaaaacttcatctggtaagcaatcacaagcgaactatactcttgcgaacgagattcagatcagcaaccgg

SEQ ID NO: 228343 - DNA, 403 bp, Unknown
  Bacterial polypeptide expressing nucleotide sequence isolated from the Sargasso Sea
atgacaggacaaacattttttgaaagtagcttaacacaaaccgatccaactattctcgaagctatcgagaaggagtaccacagacaaaatgaccaaattgagttgatagcttcagagaacattgtttcaaaagcagttcttgaagcacagggtacaatacttactaacaaatatgccgagggttattctggtaaaagatattacggtggatgcgaacacgttgatgttgttgaggacttatgtattgatcgtataaaaaagctttttaatgctgactttgcaaatgtccaagttcattctggatcgcaggcaaatcaggccgtatttctagctcttctaaagcctggtgatactattatgggtatgtcactggctgctggtgggcaccttacccatggcgcac

SEQ ID NO: 228344 - DNA, 670 bp, Unknown
  Bacterial polypeptide expressing nucleotide sequence isolated from the Sargasso Sea
aatgtctagtgaaggtaagtatttaaacccagaataccaaaattttttcgaaaaaaaactttcggaaatagatccagaaatttcaaaagctattgatgatgaattaattagacaacaaaatcatatagaacttattgcgtctgaaaatatagtttctcaagctgttcttgaagcccagggttctgtactaacaaataaatatgctgagggttatccaggtaaaagatactacaatggttgtgagcatgtggatgtagctgaaagtttagctatagaaagacttaaaaaattatttaattgtaaatttgcaaacgctcaacctcattctggagctcaagctaatggtgcagtatttttagctttattaaagccaggagatacaattatgggattaagtttaaattcaggaggacacttaactcatggttcaaaagcagctgtatcaggtaaatggtttaatgctatagcttacgaggttgataaacaaacagaattattagattacaatgaaattgaaaaattagcagttgaacataaacctaagatgttaattgctggaggtagtgcttattcaagaattatagattttaaaaaatttagagaaattgcggataaggttggagcatattttatggtggacatggctcatttttcaggtcttgttgctgga

SEQ ID NO: 228345 - DNA, 270 bp, Unknown
  Bacterial polypeptide expressing nucleotide sequence isolated from the Sargasso Sea
aatgaacgaatttaaaacaaatcaaaataaagatatttcaaactatgatccggaattatcagtatttcttgatcgagaactaaacagacaagaagagcatatagagctgattgcatcagaaaattatgcttcaaagcgtattcttgaagctcaaggtagcgtgctgacaaataagtatgcagaaggttatccaaacaagcgttactatggtggatgcgaacatgtagacggagcagaaactctcgctattgagcgtgctaaacagctttt

SEQ ID NO: 228346 - DNA, 256 bp, Unknown
  Bacterial polypeptide expressing nucleotide sequence isolated from the Sargasso Sea
aatgtcgagtgaaaaaaattatataaatgatagctataaaagtttttttgaagacagtttatcttcaaaagacccagacctttacaaggcaattcaagatgaactcttgagacagcaacaacatatagaattgattgcttcagagaatattgtttctcaagctgttttggaggcccaaggttcagtgctaacaaataaatacgcagaaaggtaccctggtaaaagatatataatggttgtgaacatgttgacgttg

SEQ ID NO: 228347 - DNA, 893 bp, Unknown
  Bacterial polypeptide expressing nucleotide sequence isolated from the Sargasso Sea
atcagtgcttacaaataaatacgccgaagggtacccaggaaaaagatattatggaggatgcgaatttgtagacaaagctgagacattagcaatagaaagagcaaaaaaattgtttaatgttaattttgcgaatgttcaacctcactcaggtgcacaagccaatggtgcagtttttttagcattacttaaaccgggagacacaattctaggaatgggtatagatcagggaggtcacttaacacatggagcaccgcccgctcaatctggaaaatggtttaatgcaatacactatggtgttagaaaagataatggtcttattgattatgatcaagttaaggacttagcaaaaaaacacaaaccaaaactaatcatagctggaggaagcgcttactcaagaataatagactttaaaatttttagagagatcgcagatagtgtgggagcttatttgttagtcgacatggctcatttctctggtcttgtagcaggcaaagtttatcctaatccgtgtgattttgcggacgtggtaacttctactacacataaagttttaagaggtccaagaggaggaattattttaacaaataatgaagagttagctaaaaaatttaattcggctgtattcccgggcttacaagggggcccactaatgcatgttatagctgcaaaagcagtttgttttggagaagctcttaaagatgaatttaaaatttattctagaaatgttgtagataatgcaaaaatattatctgaaacattaaaaaattcaggttttgaaattttttctggaggaactgacacccacttaattttgctagacttaagaccaattcatgtcacaggcaaagatgcagagaaatcaatggttagtgcaaacttaacatgtaacaaga

SEQ ID NO: 228348 - DNA, 439 bp, Unknown
  Bacterial polypeptide expressing nucleotide sequence isolated from the Sargasso Sea
atgacttttttttcatctccacttcaagaaatcgataatgaaattcatgaagcaataaataaagaactttcaagacagcaaaatcaaattgagttaattgcatcagaaaatatagtttcaaaagctgttttagaagctcaaggatccgtattaacaaataaatatgcagaagggtatactgcagctcgctattatggaggttgtgaatttgttgatattgctgaggacttagcaattcaaagattaaaaaaactctataaatgtgaatatgctaatgttcaaccacattcaggagcacaggctaatggtgcggtaatgttggctctcattaagcctggagatactattttaggaatgagtttagatgcaggaggacatttaactcatggatcagctccttctatgtcaggaaaatggtttaatgcagttcagtatggtt

SEQ ID NO: 228349 - DNA, 752 bp, Unknown
  Bacterial polypeptide expressing nucleotide sequence isolated from the Sargasso Sea
tatgacttttttttcatctccacttcaagaaattgataacgaaattcatgaagcaataaacaaagaactttcaagacaacaaaatcaaattgagttaattgcatcagaaaatattgtttcaaaggctgtattagaagctcaaggatctgtattaacaaataaatacgcagagggatatactgcagcccgttattacggaggttgtgaatttgttgatattgcagaggatcttgcaatccaaagattaaaaaaactttacaaatgcgaatatgctaatgttcaacctcattctggagcacaggctaacggtgcggtaatgttagctctcataaaacccggagatactattttaggcatgagcttggatgctggtgggcatcttactcacggatcagctccctcaatgtctggaaaatggtttaatgcagttcagtacggtttagatgacgctgggttaattaattatgaagaagttgaaatgcttgcaaaagaacacatgcctaaaataataattgcaggtggcagtgcttactccagaataatagactttaaaagatttcgtgacatatgtgatcagattggtgcatatcttcatgtggacatggctcatttttcaggccttgttgccgctgaggagtatcctaatcctctagaatttgcagacgttgttacttcaacaactcacaaaacaataagaggagctagagggggcatgatactttccaataatactgacttgggtaaaaaattta

SEQ ID NO: 228350 - DNA, 589 bp, Unknown
  Bacterial polypeptide expressing nucleotide sequence isolated from the Sargasso Sea
atgtctacagaaagtaaatatataaattctgaatacgaaaatttttttgaaaaaaaattatctgaaagtgatcctgaaatttttaaagcaatcaatgacgaacttataagacaacaaaatcatattgaattgatagcttcagagaatatagtctctcaagctgtcttagaagctcaaggttctgttttaaccaataaatatgcagaaggttatcctggaaaaagatattataatggttgtgaacatgtggacgttgcagaaaaacttgccatcgataggttaaaaagtttatttgaatgtaaatttgcaaatgcacaaccacactcaggtgcccaagcaaatggtgctgtatttttagcactacttaaaccgggagatacaataatgggtatgagtttaaattcaggaggtcatttaacgcacggatctaaagcatctgtttcgggaaaatggttcaaatcaatagcctatgacgtagataaagattctgaattaattgattatgatgttgttgaaaatatggccttagaaaataaacctaaattaataatagctggtggaagcgcatactcaagagttattgatttaa

SEQ ID NO: 228351 - DNA, 440 bp, Unknown
  Bacterial polypeptide expressing nucleotide sequence isolated from the Sargasso Sea
cgcttacccaaaccctactacatatgctgatgtagtaacatccacaacacacaaagttctcagaggtccaagaggtggaataattttaaccaacaaagaagaattaatcaaaaaatttaacagtgcagtttttcctggattacaaggtggaccgttaatgcatgtaatagccgctaaagcagtttgttttaaagaggctttatctgaagacttcaaaatttatacaaaaaatgtcgtcaataactcaaaagtactgtctaatagattgagtgaaaaaggttttaaaattttttcaggaggaactgatacacatttaatgttattagatcttagatcatttggtgtaacaggaaaagatgctcaagcatcattgggaagatcgaatataacttgcaataaaaatggtatcccttttgatacagagagtccaatgattactt

SEQ ID NO: 228352 - DNA, 319 bp, Unknown
  Bacterial polypeptide expressing nucleotide sequence isolated from the Sargasso Sea
aatgctggtcgatttaagaccatataatttgactggtaaagatgctgaaaaatctttaggcaatgccaacattacttgtaataaaaatggtattccttttgatacacagagcccaatgattacttccgggataagactagggacacctgcttgcacgacaagaggctttggaaaagaagagttcattttaattggtcaactaataactaagactcttaaaggcttatctaagaatctcgaagataactctaaaatagagcaagaggttaaaaaagaagtgattgatctatgtacatcttttccaatatatagtaattaa

SEQ ID NO: 228353 - DNA, 901 bp, Unknown
  Bacterial polypeptide expressing nucleotide sequence isolated from the Sargasso Sea
atgtcaagtgaaggtaaatatttaaattctaattataaagatttttttgaaaaaaaattgtctgagaccgatcctgagctattcaaagctctgaatgatgagcttataagacagcaaaatcatattgagttaattgcatcagaaaatattgtttctcatgctgttcttgaggcacaaggttcagtattaacaaataaatatgcagaaggataccctggtaaaagatattataatggttgtgagcatgtggatgtagctgaaaacttagcaaacgaaagactaaagaaattatttaattgtaaatttgctaatagccaacctcattctggggctcaagctaatggagcagtcttcttagcactattaaaaccaggtgatactataatgggaatgagtttaaattccggtggtcaccttactcatgggtcaaaagcatctgtttcgggaaaatggtttaacgctattgcgtatgatgtagataaaaaaacagaattattagattatgaatctatagaaaaacttgctgtagagaataaacctaaacttattattgcaggtggaagtgcgtactctagacaaatcaattttaaaaaatttagagagattgcagataaagtaggtgcatatttcatggtagatatggcgcacttttctggtttagttgctggtaaaggttatccaaatccagttgagtatgctgacgttgttacttcaacaactcataaagtttttagaagtgcacgtggtggaattattttaactaataatgaagctttgtctaaaaaatttaattcagcagttttcccaggttatcagggtggacctttaatgcatataattgctgcaaaagcagtagggttccttaaagcattaaaaccagaatttagaaattatatttcaa

SEQ ID NO: 228354 - DNA, 793 bp, Unknown
  Bacterial polypeptide expressing nucleotide sequence isolated from the Sargasso Sea
ttggcaatagaacataagccaaaaattataatagctggtgcttcagcttatccgaggataatagattggaaaaagtttagagaaatctctgataaagtaggtgcatattttatggttgatatggctcattattcaggactaatagctggaaagcaatatcctaaccctgtcgaatattctgatgttgtcacatcaacaactcacaaaacgcttcgtggggctagaagtgctatgattttaaccaataatgaagaaatttataaaaaaattaattcagctgtgttccctggtcttcaaggtggtccattgatgcatgtaatggcagcaaaagctgtttcttttggagaagctctagacccttcttttgaagaatatattaagaatgtaatttctaatgctaaacacctttctgaaattttggttaaaagaggttttagaatagttacaggtgggactgattctcatatagtttggttagacttgactcctaaaaaactaactggcgacaaagcagaaaaaattttagaagatgtaggtatagcatgtaataaaaatgctattccctatgaccctcatccaccaaaaataactagtggacttagatttggtaccgctgctgctacttcaagaggttttaatgaaagtgattttgagttagttggtgagatgatcagtgatattttagatagtttgaactcagatgaggaagaaatgaaaaaagtttcacaaatcacaaaaaacaaagttatagaaatgtgcaataagtatccgatttataacgaggctttttaat

SEQ ID NO: 228355 - DNA, 637 bp, Unknown
  Bacterial polypeptide expressing nucleotide sequence isolated from the Sargasso Sea
atgtcaacagcattaaagattaataaatttttaaatgatttttttaaatcaactttagaagattcagacaaagagctgtttgattcagttagaaaagaatttataagacaacaaaatcatattgaactaatagcttctgaaaatatagtttctaaagctatcttagaagcccaaggttctgtattaactaataaatatgctgaaggatatcctggaaaaagatattatggagggtgtgaacacgttgacctttcagaaaccttagcaatagaacgtgcaaaaaaattatttaattgtaaatttgctaacgttcaacctcattcaggagctcaagcaaatggtgctgtatatttagctttaattaaacctggtgatacaattttaggtatgagcttgaattcaggtggccaccttactcatggagcaaaacctgctcaatctggaaaatggtttaatgcaattcattatgacgtagataagaaaactggttttatagattatgaaggcgtagaaaaattggctttagaaaataaaccaaagcttataattgctggtggaagtgcatactctagaattatagattttaaaaaatttagagatatttgtgataaagttaatgcttatttgctagtagaca

SEQ ID NO: 228356 - DNA, 745 bp, Unknown
  Bacterial polypeptide expressing nucleotide sequence isolated from the Sargasso Sea
gaattagaagacccgacaatttggtcatcaatcgctgcggagcaaactcggcaagcagaaggcctcgaaatgattgcaagtgaaaactttaccagcccagcagttatgcaggcagtcgggagcgtcttgaccaataagtatgccgaagggtatcccggcaaaagatattatggcggttgtgaatttgttgacacggtcgaagacctcgcgcgcaacagggccaagcagcttttcggcgctgagcacgtaaatgtgcagccacactctggaagccaagcaaactcagcggtctacctcgcagctatcaagccaggcgatacagtgctcgcgttcgacttggcgcatggtggtcacctcactcatggaatgcgactgaatagctcaggcatcttgtatcgttttgttcactacggtgttcggcaggatgaccatcttcttgattttgatcagatcgttcgacttgcccgtgaacataagccaaagttgatagttgctggagcaagcgcatatccgagggaaatcccacacgaacgttttgcggagatagccaatgaagttggagcaaaattattggtcgatatggcacactatgcaggccttgttgctgcacggtgttcacaacagtccggtgcctcatgcagactttgtgacaagcacaacacacaagactttgagagggccacgtggcggaattgccatgtgccgagcaaaacatgcaaaagatctcgaccgggctgtgttccca

SEQ ID NO: 228357 - DNA, 727 bp, Unknown
  Bacterial polypeptide expressing nucleotide sequence isolated from the Sargasso Sea
atgtctagtgaaaaaaattatttgaatgatagctataaaagtttctttgaggatagtttatctgtaaaagatcctgaattatataaagctattaaagatgaattaacaagacaacaacaacatattgaattaattgcttccgaaaatatagtttcacaagctgtcttagaggctcagggttcggttttaactaataaatatgcagaaggttatccaggtaaacgttattataacggatgtgaacatgttgatgttgcagaaaatcttgcaaatgaaagattaaaaaaattattcaactgtaaatttgcaaacgctcaacctcattcaggtgcacaggctaatggtgctgtattcttagcattattaagcccaggtgatacttttatgggtatgagtttaaattctggtggtcacataactcatggtcttaaaatttctatgtcaggtaaatggttcaatgcaattggatatgatgtagataagaaatctgaactaatagattatgataatgttgaaaaacttgctcttgaacataagccaaaattaattattgctggtggaagtgcttattcaagagtcatagattttaaaagatttagagagatcgcggataaagttggtgcttatcttatggtagatatggcacatttttctggcctagtagctggaaaaggatatcctaacccttgtgattatgctccatgttgttacatcaacaacacataaa

SEQ ID NO: 228358 - DNA, 498 bp, Unknown
  Bacterial polypeptide expressing nucleotide sequence isolated from the Sargasso Sea
actccgcagtttttccaggatcacaaggaggccctttgatgcatgttgttgctgctaaagcagtttgttttaaagaagctcttgagcctgaatttaaaacttatatgtctcaagttattagtaatgctaaaaccatggcgaagactattattggaagaggggtcgacataataaaaggcggcaccgaaaatcatatgattcttgtcgaccttagaaataaagggataacaggaaaggactctgaaaataaacttggtttagctaatatcacagtaaataagaacgctgttcctaacgatccacagtctccctttgtaacatcaggaataagacttggaactcctgcagttacaacaagaggctttaaagaggatgaaattattcaaatttcaaattggatctgcgacatagtccttgatttagataatgagaaaaaaattgagggaattaaaaataaagctttgtctttatgcaaagaattcccagtatataagtaat

SEQ ID NO: 228359 - DNA, 901 bp, Unknown
  Bacterial polypeptide expressing nucleotide sequence isolated from the Sargasso Sea
attgcatcctgaaaatcacacaagtccatttgtgatggaggcgcaaggatcggttctcacgaacaagtatgctgaagggtatccttcgaaaagatactatggaggatgcgagaatgtggatgttgtggaagagttggctatcaagcgagctaaagaattatttaatgctgattatgcaaatgtccagcctcattctggctcacaagccaacgcttcagcctatatggcattaatgaagccgggggataccctgctcggaatgagtcttgcggacggtggtcacttaactcatggggcaacggttagcttttccggccggatatataatgcggtgcagtatggtttaaacgccgatacaggtgagatcgattacgatgaggttgatcgtcttgcgcaagaacatagaccgaaattgattgttgcaggtttttcagcttattcgaaagtggtggattggcaaaaatttagagatattgcagatagcatagacgcatattttttagtcgacatggcacacgtttctggcttggtagctgcaggagtttatccaagcccgataaatatagcagacgtaactacttcgaccacacataagactctccgtgggccgcgtggcgggataatcttagcgaggtccaacccagagctagaaaaaaggctaaatttttcagtttttccagaaagtcagggtgggccactaatgcatgtgattgcagctaaggctatatgttttaaagaggcaatggatgagactttcaaagcttatcaggaacaaactataaagaatgcgcaggccatggcctctggtttcatgaaacgaggattccatgtgatttctaatggcactgatgatcatttgttcttattaagtctcattaaacaaggactaacaggaaaagaa

SEQ ID NO: 228360 - DNA, 396 bp, Unknown
  Bacterial polypeptide expressing nucleotide sequence isolated from the Sargasso Sea
tatgtttgataatactaaaaccattaaagactttgatcctgaactttggtcttctatagataatgagatggcaagacaagaagatcatattgaactaatagcctcagaaaattacacctcgaagagagttctcgaagctcagggctcagttttaaccaacaaatacgcagaagggtatccaggaaaaagatattatgggggttgtgaaaatgtagatattgcagaatcacttgccatagaaagagcaaaagaaatttatggagccgcttttgcaaatgttcaacctcactcgggagcaagtgcaaattcagctgtttacttagcactttgtgatgctggagataccatattaggaatgagtcttgatcatggtgggcacttaacacatggagctaa

SEQ ID NO: 228361 - DNA, 946 bp, Unknown
  Bacterial polypeptide expressing nucleotide sequence isolated from the Sargasso Sea
ctttttaaggcagattatgctaacgttcagccacattcagggtcttccgctaacgcagctgcttttttggcaatgcttgaacccaacgatactattcttggtatgagtcttgatcaaggcggtcatttaacccatggggcaaaagtaaatttttcaggcaaaaactatcaagctattcagtacggcttgcatcctgaaacttttgatatcgactacgataatgtaagagatttggctaaaaagtatagaccaaaaatgatcattgcaggattttcagctttttcagggataatagattggaaaatttttagagatatcgccgatgaaacaaactcttattttctagtagatatggcgcatgtatcaggacttgttgctgcaggtttatatccatcgccagttccttatgctgatgtagtaacttcaacaactcataaaactcttagaggccctagatcaggaattattattgctaaatcaaatgaaaatttagaaaaaaaagtaaactcagcagtattccctggatctcaaggtgggccattgatgcacgtcatagcagccaaagcagtatgttttaaagaggctttagaacctgatttcaaaatatatactcagcaagtaattgataatgcaaaacttatgtgcaaggtcatccaggacagagggattgatgttgttacaggtaaaactgataatcatatcgtcctgatggatttaagagacaaggaattgactggtaaagattgcgaattagcattaggcaaagcaaatattactgttaacaaaaatgcagttccaaatgatcctcaatcaccatttgttacttcaggtataagattggggacgcctgctgttaccactagaggtttcggaaatgatgaaatagaaatattaactaattggatttgtgatgttgttctcgatcacaataatgctgataagataa

SEQ ID NO: 228362 - DNA, 844 bp, Unknown
  Bacterial polypeptide expressing nucleotide sequence isolated from the Sargasso Sea
aattcattacgacgttaataaggaaacaggattgattgattacgaaaatgttgagagactagctatagaaaataaaccaaagttaattattgctggcggaagtgcatattcaagagttatagattttaaaaaatttagagatatttgcgacaaagtaaaagcttatttgcttgtagatatggctcatttttcaggactagtggctggaggagtttatcctaatcctacaaaatatgcagatgttgtaacctcaacaactcataaagtattacgaggtccaagaggtggaattatacttactaataacgaggagttaattaaaaaatttaatagtgcaatttttccaggtcttcaaggaggacctttaatgcatgttatagcggctaaagctgtttgttttaaagaagctttatctgatgaatttaaagattattctaaaagcgttatcgctaatgcaaaaattttatcagaaaaattaataaaaaatggttttaaaatattttctggtggcacggacactcatttgatgcttgttgatttacgagattttaatgtcacaggcaaagatgcagaagcttctttagttcgttcaaacataacatgcaataaaaatggaattccattcgatactcaaagcccaatgataacatcaggaattagactaggaactcccgcttgtaccactagaggatttggtcctaatgaatttagcttaatagctgatttaatttcaaaagtcgttaaaggtttaagcaaaaatggtgcaaataactcaaaaatagaaaaagaagttcaaaaagaggtgattgatctttgcgcttctttccctatatatagtgattaa

SEQ ID NO: 228363 - DNA, 610 bp, Unknown
  Bacterial polypeptide expressing nucleotide sequence isolated from the Sargasso Sea
aatgtcggtaataaaattagataaatatttaaacagtttttttaaattaaaattacaagatgctgataaagagctttataattcaattagagatgaatttaaaagacaacagaatcatatcgaattaattgcatcagaaaatattgtttctaaagctgttctagaagcgcaaggttcagttttaacaaacaaatatgccgaaggttatccttctaaaagatattatggagggtgcgagcacgttgatgtttctgaaaatttagctattgagcgagcaaaaaaactatttgattgtaaatttgcaaatgtacaaccacactctggcgctcaagctaatggtgcagtttatttagcgcttttaaaaccaggtgacacaactctagcaatgagtttaaactcaggtggtcacttgactcacggagcaaaaccagctcagtctggtaaatggtttaacgcaattcattatgaagttgataaggaaacgggtctgattgattatgatgccgtcgaaaaacttgctttagaaaataaaccaaaacttattattgctggcggtagtgcctactcaagaataatagattttaaaaaatttagagaaatatgtgataac

SEQ ID NO: 228364 - DNA, 310 bp, Unknown
  Bacterial polypeptide expressing nucleotide sequence isolated from the Sargasso Sea
tatgtcaagtgaaagcaaatatataaacgatcaatacaaaagtttttttgaagatagtttatcaaaaactgatccagagttacataaagcaataaacgatgaactaagaagacagcaacaacatatagagttgatagcttcagaaaatattgtgtcccaagctgtgttagaagctcagggttcagttttaacaaataaatacgcagaaggttatcctggaaaaagatattataacggttgtgaacatgttgatgttgctgaaaatttagccattgaaagattaaagaaattatttaattgcaaatttgct

SEQ ID NO: 228365 - DNA, 872 bp, Unknown
  Bacterial polypeptide expressing nucleotide sequence isolated from the Sargasso Sea
atcctataaaacacaagatcttgaagtttattctatcattaaagacgagatacttcgtcaagaaaacgaactccagatgatcgcatcagaaaattatgcaagtagggcagttatggatgccgtgggatccgtattaacaaataagtatgctgagggatatccgaataagagatactatggtggttgtaggcatgtagatgaggctgaagagctagcaattttaagagcaaaagaacttttcggtgctgagtctgttaatgtccaacctcattctggtgcccaagctaatatggcagtttttttaggtttcttaaatcctggcgatacagttcttggaatgagtctagatcatggaggtcacctctcccatggttccaaagttaacttttctggaagaatttataattcagttttttatggtgtaaaagaggagacttttttaattgattatgatcaagtagaggaaatggctttaaagcataagccaaaacttataatagctggctggagctcttatcccagagatttagattataagagatttcgtgaaattgctgataaatcaggatcgttattacttgctgatatagcacatccatctggtttaattgcagcggacttatattcagatccaattccgcactgtgattttgtcacttcaacaactcacaaaactctaagaggaccaaggggcggaataataatgatgaaagaggaacattctaaaattataaacagtagggtttttcctggtactcaaggaggacctttgatgaattcaatagttgcaaaagcaattgcttttaaagaagcgttagatgactccttcaaagattatcaaaagcaagtactggaaactccaaacgattagc

SEQ ID NO: 228366 - DNA, 276 bp, Unknown
  Bacterial polypeptide expressing nucleotide sequence isolated from the Sargasso Sea
tatgtctagtgaaaaaaaatatataaattcagattatcaaaacttttttgaaaaaagtttatcagaagctgatccagatttgtttaatgctattaatgatgagttagttagacaacaaaatcatatcgaattaatcgcttctgaaaatattgtttcacaagctgtattggaagctcaaggttctgttttaacaaataaatatgctgaaggttatcctggtaaaagatactacaatggatgtgagcatgtagatgtagctgacaaactggctctaga

SEQ ID NO: 228367 - DNA, 425 bp, Unknown
  Bacterial polypeptide expressing nucleotide sequence isolated from the Sargasso Sea
tatgacacttagtgagaattttttttctagtaatctagaacatgcagataaagatttatatcaaagtatttcacaagaactttcaaggcaacagaaccaaatcgaattaattgcttctgaaaatatcgtctctaaagctgtgcttgaagcacaaggctccattatgactaataaatatgctgagggttatagtgctaaaagatactatggtggttgtgaattcgtagatatagctgaaaatttagcaattgaccgtttgaaacaattgtatggatgcagttatgctaacgttcagcctcactcaggcgcacaagctaatcaagctgtatttttagcactgattaaaccaggtgatactattttaggaatgtctttagatgctggtggtcacttaacacatggttcgagaccaaatcaatctggga

SEQ ID NO: 228368 - DNA, 852 bp, Unknown
  Bacterial polypeptide expressing nucleotide sequence isolated from the Sargasso Sea
gatgttcagcaagcaggatcagattcagggttacgacgacgagttgctcgcggcgatcgatcaggaagaacgccgtcaggaagagcacatcgagctgatcgcctcggagaactactgcagccagcgggtgatggaagcgcagggcagtggcctgaccaacaagtacgccgaaggttatccgggcaagcgttattacggtggctgcgagtacgtcgacaaggtcgagcaactggccatcgaccgcgccaaggcgctgttcggcgccgattacgccaacgtccagccgcattccggctcttcggccaacagcgccgtgtacctggcgctgctcaatgccggcgacaccatcctcggcatgagcctggcccacggcggccatctgacccacggcgccaaggtgtcgtcctcgggcaaactctacaacgccgtgcagtacggcctggacaccgctaccgggctgatcgactacgacgaggtcgagcgcctggccgtggagcacaagccgaagatcatcgtcgccggcttctccgcctactccaagaccctcgacttcccgcgctttcgcgccatcgccgacaaggtcggcgcgctgctgttcgtcgacatggcccacgtcgcgggcctagtcgccgcgggtctgtacccgaacccgattccctttgccgacgtggtcaccaccaccacgcacaagaccctgcgcggcccgcgcggcggcctgatcctggccaaggccaacgaagagatcgagaagaagctcaactccgccgtcttccccggcgcccagggtggcccgctgatgcacgtgattgcggccaaggcggtgtgcttcaagggagccatggaaccgggagt

SEQ ID NO: 228369 - DNA, 382 bp, Unknown
  Bacterial polypeptide expressing nucleotide sequence isolated from the Sargasso Sea
tatgaaaacatctagaagcgatagtatattttctgataatgattctattaaagaatatgattctgagttgtgggcatcattcgaatatgaagccgaaagacaagaagatcatattgaattaatagcttcagagaattatgcatccaaaagaatccttgaagctcaaggttcaatcatgacaaataaatatgcagagggatatcctgcaaaaagatattatggtggttgtgaaaatgttgatattgctgaaaaccttgcaattgatagagcaaaagagcttttcaaagcagattatgcaaatgttcaacctcattcaggatcatcagctaatgcagcagcctatttagctcttttggaacaaatgataccatccttggtatga

SEQ ID NO: 228370 - DNA, 366 bp, Unknown
  Bacterial polypeptide expressing nucleotide sequence isolated from the Sargasso Sea
tatgtctagcgaaagtaaatacttaaacgatcaatacaaaagtttttttgaagatagtttgtctaaaactgatccagatttatataaggcaattaatgacgaattacaaagacaacaagaacatattgaattaattgcttcagaaaatattgtttctcaagctgtattagaggcgcaaggatctgtattaacgaataaatatgccgaaggttattcaggtaaaagatactataatggatgcgaacatgtagacgttgctgaaaatttagcaaatgaaagattaaaaaaattatttaattgtaaatttgcaaattctcaacctcattcaggagcccaggctaatggagctacatttttagccttact

SEQ ID NO: 228371 - DNA, 529 bp, Unknown
  Bacterial polypeptide expressing nucleotide sequence isolated from the Sargasso Sea
aatgttcaatagcggtaaaagcttggcagaatttgatccggaaataagcgcagctattgaagctgagagaacgagacaagaagaacatattgagttaatagcatctgaaaatcacacaagcccttttgttatggaagcccagggatcggtgttaacaaacaagtacgcagaaggatatccctctaagagatattatgggggatgcgaaaacgttgacgttgtagaggatttggcaataaaacgagccaaagagttatttggtgctgattacgcaaatgttcagcctcattctggttcgcaagcaaatgcttcggcttacatggcgctaatgaagccgggagacacattgttgggaatgagtcttgctcatggtggacacttaactcatggtgcaacagtcagcttctcgggccggatatataactcggttcaatacggtttgaatggtcaaacaggagaaatcgactacgacgaagttgatcgacttgcacacgaacaccggccgaaattattgttgctggcttttcgg

SEQ ID NO: 228372 - DNA, 761 bp, Unknown
  Bacterial polypeptide expressing nucleotide sequence isolated from the Sargasso Sea
cccagaattcaaacaaattgcagatgaagtaggcgcatttttaatggcagatattgcacatccatctggtttggttgctgcaggaattcatccttctccagttccctattgtgatgtaattacaactacgacacataaaacattgcgaggaccaagaggaggaatgattatgatgggaaaagatgggctaaatccatggaatatcactgctccgaaatcaggaagggtgaaaaatatatcagaattgttagataattctgttatgcctggagtgcaaggcggaccattgatgcatattattgcggcaaaagccgttgcgtttggagaagcattattaccagaatttaaagtttatgcacaacaaattgttgctaatgcaaaagaaatggctgacgagttccttaaaagagattataaattggtttctggtggaaccgatactcacgtggttcttattgatttaacgaataaaggaattactggtaaagtcgcagagaaatccctagagaaggctggaatagctgttaataagaatatggtgccttttgatgagaagagcccttttattacaagtgggattcgaataggaaccccagctataactactagaggaatgaggaaagatgatatgaagaaaatagtttctcttattgatattgtgattaaaaactctaatgatgaccataaagttgcttcagtaaaagctgaagtaaatgaattatgtaaattttttcctttatatccagaattgagagactaaa

SEQ ID NO: 228373 - DNA, 835 bp, Unknown
  Bacterial polypeptide expressing nucleotide sequence isolated from the Sargasso Sea
actaaaatacatagtctagttaataatttttttgaagatgatttaaaaaaatctgataaagaaatttatgactcaatttttcaagaacatgaaagacaacagtttcatatagaattaatagcgtctgaaaatatcgtttcgaaagctgtgttagaaacccagggttcagttttgactaataaatatgctgaaggttactctggaaaaagatattacggtggatgcgagtttgtggataaagcagagaccttagcaatagaaagagcaaaaaaattatttaattgtaagtttgctaatgttcagcctcactcaggtgctcaagctaacggcgcagtttacttagcgctgttaaaacctggcgatacaatattaggtatgagtttaaactcaggtggacaccttacacatggagctaaacctgctcaatctggcaaatggtttaatgctgtacattatgatgtaaaaaaagaagatggtttaattgattacgatagtgttgaaaaacttgctattgaacataagcctaaacttttaatcgcgggtggaagtgcttactctagagtaattgattttaaaagatttaaagaaattgcttcaaaaataaatgcatattttttggtagatatggcacatttttctggtttagttgcaggtaaggcatatcctaatcctgtagattatgcagatgtggtgacttctacaacacacaaagttttaagaggtccaagaggtggaataatattaactaacagtgaagatctaaataaaaaatttaacagtgcagtatttcccggtttacaaggtggacctttaatgcatgttattgcagctaaag

SEQ ID NO: 228374 - DNA, 367 bp, Unknown
  Bacterial polypeptide expressing nucleotide sequence isolated from the Sargasso Sea
atgtctagtgaaaaaaattatttaaacgatagttataaaagtttctttgaggacagtttgtcagtaaaggatccagagctttataaagctattaaagatgaattaatcagacaacagcagcatatagaactaatcgcttctgaaaatatagtttctcaagcagtattagaagcacaaggttcagttttaaccaacaagtatgcagaaggctatcctggtaaaagatattacaatggttgtgagcatgttgatgttgcagaaaatcttgcgattgaaagattaaaaaaattatttaattgtaaatttgcaaacgcgcaaccacattcaggggctcaagcaaatggcgcagtatttttagctttgttaa

SEQ ID NO: 228375 - DNA, 442 bp, Unknown
  Bacterial polypeptide expressing nucleotide sequence isolated from the Sargasso Sea
aaagcagtagcatttaaagaagcattagatccttcatttaaaacctatataaagggagtgcttgataatgctcagtgctttgcagaagagtttatttcaaaagggtataatttaatttctggaggtacggatacgcatcaagttttaatagatttacaaaacaaaaatattaccggaaaagctgcagaaatagctttggatgaagcagggataactgttaacaaaaatatgattccatacgaccctaaaagtccatttattacaagtggaattagaataggctcgcctgcaattactactagaggaatgggagttgacgaagtaaaaattgttgttgatttaattgaccaggtaattttaaaccatgataataaagagaaaattcaatcaatcaaaaaacacgtaaatgaattatgttcatcttttccaatatatgaatgac

SEQ ID NO: 228376 - DNA, 703 bp, Unknown
  Bacterial polypeptide expressing nucleotide sequence isolated from the Sargasso Sea
tgatgaagtcggtgcatatttactagctgatgtagcccactttgctggcttgattgcagctggagtttatccatccccattcccccatgtgcatgctgctactagtacaacacacaaaacgttgaggggcccaaggggtggcattattttgactaatgacgaggcgatagctaaaaaagcaaattcagctatttttcctggtattcaaggtggtccattgatgcatgtgattgctgctaaggctgtagcatttggtgaagcacttcggccagactttaaactctatcaacagcaagttatcaaaaatgcacaagcattggcagacacccttatgacagggggactggatatcgttactggtggcacggatacccatgtgatgcttgtagacctaaggcctaaaggtgtaaaagggaatgctactgaaattgcgctcggtagagctaacatcacgtgcaacaaaaatggggtcccctttgatgacgaaaaaccaacaataacctcaggtgttcgattaggtagtccagccggaactactcggggatttggtgaggttgagtttcggcaaattggtgaatggattattgaagttgtggacggtttggccgagcatggcgaaggaaacaacggagcagctgaaaaacgtgtaaaggctgctgttaaagagctctgcgcaaattacccattgtatccaaacctataa

SEQ ID NO: 228377 - DNA, 391 bp, Unknown
  Bacterial polypeptide expressing nucleotide sequence isolated from the Sargasso Sea
atcagagacacttaaaaataatggatttaaaattttttctggaggtactgatacacatttaatgctagttgatttaagaccatataatgttactggtaaggatgctgaagcaagtttgtgtagggcaaatatcacatgtaataaaaatggtattccctttgatagcgctaagcctactataacatctggtatacgattgggctcccaagctgttactacaagaggttttggattaaatgaatttaaaaaagttggtgaattaattacaagggttattgaagggttatcaaaaaatacgcaagataatagtaaaatagaaaatgaagttagaaacgaagttattgacctgtgttctaagtttcctatttataatcatttgataaaaaaataa

SEQ ID NO: 228378 - DNA, 873 bp, Unknown
  Bacterial polypeptide expressing nucleotide sequence isolated from the Sargasso Sea
ggttatcctggtaaaagatattatggaggatgtgagtttgttgatcaagcagaagaaatagctctagagagagttaaaaaactttttaactgtaaatttgcaaaccttcaaccacatagtggagcacaggcaaatcaagcagtctttctagctttacttcaaccacatgatactattttgggaatgtctcttgcatcaggaggtcatttaacacatggagcaaaacctaatctttcgggtaaatggtttaatgctgttcaatacggtgtgaaaaaagatggaaatgataaagatttaattgattatgatgaagtagaagctttagcattagagcatcaaccaaaaatgataatagcaggagcctccgcatatcctagaacaatagattggaaaaggtttagagaaatagccgataaggtaggtgcatattttttagttgatatggctcactactctggtttggttgctggtaaacaatatcccaatccgattgagcatgctcatgtagtaacttcaacaacgcacaaaactttaagaggtgcaagaagtgcaatgattttaactaatcacgaagatttatataaaaaaatcaattctgctgtttttcctggattacaaggtggtccattaatgcatgtaattgcggctagagctgtttgcttcggtgaagcacttaaacctgagttcgaagagtatattaaaaatgtgattgctagtgctaaagttatggcacaaactttagttgatagaggattcagaattgttactggaggcacagactcacatatagtttggttagacttaacaccaaaaggtttaactggtgataaagctgaaaaaattttagaagaagttggattggcatgtaataaa

SEQ ID NO: 228379 - DNA, 815 bp, Unknown
  Bacterial polypeptide expressing nucleotide sequence isolated from the Sargasso Sea
ggacgctttaatcgattttgaacaattagaagctgatgctatgaagtatcaacctaaattaattattgctggtggatcagcttaccccagaactctagactttaagagatttagacaaattgctgataaatgtggagcaatgcttttagtagatatggcgcatatttctggtttggtagccacaggtgaacatccaagtccaattccacacgctcatgttgtaacctcaacaactcataagacattaagatgtggaagaggcggcatgatcctaactaatcacgaagatatagccaagaaggtaaattctgctgttttccctggcttgcaaggtggaccacttatgcatgcaattgcaggtaaagttgttggctttggagaagctttaaagcctgaatttagagaatatattaaatcagttttgagaaatgctaaaaccttatcagaaggacttttaaaacgtggtctggatattgtaagtggaggaactgatacacatgtagttttggttgatttgcgtcccaaaaatttaactggaaatatagttgaggatgctctcgaaagagctggtattacgtgcaataaaaatggcattccatttgaccctgaaaaaccctctattacatcaggaataagattgggaactccagctggaacttcaagaggttttggtcaagaggaattttctctaatttcaaatttaatatgtgatgttttagattcacttaatgtaaaaagtaaaatatcttcaaaagtagaattagaagtaaaagataaaatcaaaaatttatgttatcagtttccaatttattagt

SEQ ID NO: 228380 - DNA, 731 bp, Unknown
  Bacterial polypeptide expressing nucleotide sequence isolated from the Sargasso Sea
gataaatttctaaataatttttttagttctggtttaaaagactcagaccaggaactttacaattcagtaaaagatgaatttattaggcaacaaaatcatattgaattaattgcatcagaaaatattgtttcaaaggctgtattagaagcgcaaggatcggtattaacaaacaaatatgctgagggttatccaggtaaaagatattacggtggatgtgaacatgttgatttatcagaaacacttgcaattgaacgagcaaagaaactttttaattgtaagtttgctaatgtacaacctcattcaggtgcgcaagctaatggcgctgtttatctagccttgataaaaccaggagatactattttaggaatgagtcttaactcaggcggtcacttaactcatggagctaaacctgctcaatcaggtaagtggttcaacgcaattcactatgatgttaacgaaaaaacaggtttaatagattacgacagtgtagaaagattatcgattgaacataagcctaaattaataatcgcaggaggaagtgcatactcaagagttattgattttaaaaaatttagagaaatttgtgataaagttaacgcttacttcctagtagacatggctcatttttcaggtttagtggctggtggagtttatccaaatcctgtagtgtatgcagatgctgtaacatctacaacacataaagttttaagaggtccacgaggggggattat

SEQ ID NO: 228381 - DNA, 612 bp, Unknown
  Bacterial polypeptide expressing nucleotide sequence isolated from the Sargasso Sea
tatgtcaagtgaaactaagtatttaaattctgaatataaagatttttttgaaagaagtctttcagacgccgatcctgatttatttagagctattaatgatgaattgataagacaacaaaatcatattgaacttattgcgtcagaaaatattgtttctcaagcggtactagaggctcaaggctcagttcttaccaataaatatgccgaaggttatccaggaagaagatattataatggttgtgagcatgtagatgttgcagaacaattagctttagaaagaataaaaaaactttttaattgtaaatatgccaacgtacaaccacactcgggagcccaggctaatggtgcagtttttttagctttattaaagcctaacgatacatttcttggtatgagcttaaattctggcggccatatcactcatggattaaagatttctatgtcaggaaagtggtttaacgcaattagttatgatgttgataaagaatctgaacttattgattatgataatgtagaaaaattagctttagaacataaaccaaaactgattattgctggaggtagtgcttattctagagttattgattttaaaagatttagagaaattgcaga

SEQ ID NO: 228382 - DNA, 384 bp, Unknown
  Bacterial polypeptide expressing nucleotide sequence isolated from the Sargasso Sea
tggcagaaactttaaaaaataatggatttaaaatttattcagacggaacagatacacatctgatgttggttgatttaagaccttataatgtaaaaggtaatcttgcagcagagagtttgtctagagcaaatatcacatgtaataaaaatggtattccttttgatacggaaaaaccgatgataacatctggtataagattgggaactcaagcagctacaactcgtggatttggtttgagtgagtttaaaactgtaggtgaattgatcacaaaaactttaaaaggattatctgaaaatccaacagataatagtaaaattgaaaatcaagtaaaaaatgaagttattgctttaacttcgtcatttccgatatataagaacttgtagt

SEQ ID NO: 228383 - DNA, 802 bp, Unknown
  Bacterial polypeptide expressing nucleotide sequence isolated from the Sargasso Sea
tatgatattgactacgacaatgtaagagatttagctaaaaagcataggccaaaaatgatcattgctggattttcagctttttcagggataatagattggaaaatttttagagatatcgctgatgaaacaaactcttattttctagtggatatggctcatgtatcaggtcttgttgctgcaggtttatatccatcgcctgttccatatgccgatgtagtaacttcaacaactcataaaactctgagaggccctagatcaggaattattattgctaaatcgaatgataatttagaaaaaaaactaaactcagcagtattccctggatctcaaggcgggccattgatgcacgtaatagcagcaaaagcagtatgtttcaaggaggctttagaacctgatttcaaaatatatacccagcaagtaattgataacgcaaaacttatgtgcaaagtcattcaggatagaggaattgatattgttactggtaaaactgataatcatatcgtcctaatggatttaagaaagaaagaattgactggtaaagatattgaattagcattaggccaagcaaatattactgttaacaaaaatgcagtcccaaatgatcctcaatcaccattcgtcacttcaggtataagattgggaacgcctgctgtgacgactagaggttttggcagtgatgaaatagaaatattaactaattggatttgtgatgtggttctcgatcacaataatgctgataagataaatattataagaaataaagtggttgaaatgtgtaaaaggtttccagtttataaataag

SEQ ID NO: 228384 - DNA, 742 bp, Unknown
  Bacterial polypeptide expressing nucleotide sequence isolated from the Sargasso Sea
ggttatcctggcaaaagatattataatggttgtgaacatgttgacgttgcagaacaattggctttagaaagaattaagaaattatttaattgtaaatatgcaaatgtacaacctcattcaggagcacaagctaatggtgccgtgttcttagctttgttaaaaccaaatgatacatttatgggaatgagcctaaactctggtggtcatattactcatggtttaaaaatttcgatgtcaggtaaatggtttaatgcaattagttatgatgtcgacaaaaaatctgaactcattgattatgataatgttgaaaaacttgctctagaacataaaccaaaacttattattgctggcggtagtgcttactcaagagtaattgattttaaaagatttagagaaatagctgataaggttggagcatatttaatggttgatatggcgcatttttcaggtttggtggctggaaaaggttatcctaacccgtgtgattatgcgcatgtagtaacttctacaacacataaagtttttagaagtgcaagaggtgggataattttgtctaatgatgctgatctaggaaaaaaatttgatacagcagtttttccaggataccaaggaggacctttgatgcatattattgcagcaaaagcagctggtttttttgaagcattaaaacctgagtttcaaacttatataaaaaatgttttagcaaacgctaaaatattagctgaaactcttaaaaacaacg

SEQ ID NO: 228385 - DNA, 586 bp, Unknown
  Bacterial polypeptide expressing nucleotide sequence isolated from the Sargasso Sea
caaagtttttagaagtgcaagaggcggtataattttaactaatctcgaggatcttgctaaaaaatttaatacagcagtttttcctggttatcagggaggacctttgatgcatatcattgctgctaaggctgctggatttttggaggccttacagccagaatttcaaaattacataaaatctgttttagcaaacgctaaaatgcttgcagagacactaaaaaataatggatttaaaatatactcagatggaacggatactcatttgatgttggtagatttaagaccgtataatgtaaaaggcaatcttgcagctgaaagtttatctagagcaaatattacgtgtaataaaaatggtattccttttgatacagaaaaacctatgattacctcaggtattagattgggcacacaagcagctacaactcgaggatttggattaagtgagtttaaaactgtaggagaattaatcacaaaaactttaaaaggtttatctgaaaatccgtcagataatagcaaaatagaagaagaagtaaaaaatgaagttatttctttaacttcgtcatttccgatatataagaacctttag

SEQ ID NO: 228386 - DNA, 745 bp, Unknown
  Bacterial polypeptide expressing nucleotide sequence isolated from the Sargasso Sea
ttctagagtaattgattttaaaagatttagagagatagctgataaagtaggtgcttatctaatggtagatatggctcatttttcaggtcttgttgcaggaaaaggatatcctaatccatgtgaatatgcacatgttgtaacttcaacaacacataaagttttcagaagtgcaagaggtggtattattttaacaaaccatgaagacttagcaaaaaaatttaattctgctgtttttccaggttatcaaggaggacccttgatgcacgtgatagcagctaaagccgcgggatttttagaagcattaaaacctgaatttaaagattatattaaagcagttttagcaaatgctaaaattttatcagaaacacttaaaaataatggatttaaaatttattcaggaggtacagattctcatttaatgttagttgatttaagaccctttaatgtaaaaggaaatttagctgcagaaagtttatgtagagctaacattacctgtaataaaaacggtataccttttgatagtgaaagtcctatggttacatctggcataagacttggtacccaagcagcaactactagaggttttggtttaaaggaatttgaaaaagtaggtgaattgattacaaaagttattgatggcctatctaaaaaccccagtgataacagtaaagttgaagaagaagtaagaaaagaagttatttcactttgttcatcatttccaatatataagaatcttagaaaatga

SEQ ID NO: 228387 - DNA, 331 bp, Unknown
  Bacterial polypeptide expressing nucleotide sequence isolated from the Sargasso Sea
atgaaatcatcaagaagcgatagtattttttcgaataataacaccataaaagattatgacaatgaattgtgggcatcctttcaacatgaagctgagagacaagaagatcatattgaattaatagcctcagaaaattatgcatcaaaacgtatccttgaagctcaaggttctcttttgacaaataaatatgctgagggatatccctcaaaacgttactatggtggttgtgaaaatgttgatattgcagaaaatcttgcaattgatagagcaaaagagctttttaaagctagattatgcaaatgttcaacctcattcaggatcatcagctaat

SEQ ID NO: 228388 - DNA, 912 bp, Unknown
  Bacterial polypeptide expressing nucleotide sequence isolated from the Sargasso Sea
gcgattgagcgtgcgaaagcgttgttcggcgccgacttcgcgaacgtgcaaccgcattcaggctcccaagcaaacgcagcggtttatcttgctttgctcgaaggaggcgacacggtgctgggcatgagccttgccgatggtggtcacctaacccacggcgcgacggtgaatttctccggcaagctatataacccggtgcagtacggtatcgatactgccacgggtgaggtcgactacgaggacatcgcgcgcctggccaaggaacaccagccgaaaatgatcgtcgcgggtttttctgcctattcgcgtcgattggattggcaaaagtttcgtgacatcgccgactcggttggcgcctacctgctggtcgacatggcgcatgttgccggactcgtcgccgcggacgaatacccaaaccctgtgccctatgccgatgtggtgacctccaccacgcacaagacgctgtgcggcccgcggggcggcattattttggcgcgctcaaatcctgagatcgaaaagaagctgaattcggcacttttccctggcagtcagggcgggccactgatgcatgtgattgctgcaaaggcggtggccttcaaagaagccatgacgccggagtttaaagactatcaagtgcaaacgctggccaatgctcgtgccatcgccaaagggctgatggatcgcggttactcgattgtttctggcggcacggacaatcacctgctgttgctcgatctcgtcgacaaagacattaccggcaaggctgctgatgcagcactaggtgcagcaaacattacggtgaataagaatgcggtacccaatgacccgcgctcaccctttgtaaccagcggtattcgcattggttcgccagcggtaacgcgtcgcggttttcaagaagccgaatgccgacag

SEQ ID NO: 228389 - DNA, 811 bp, Unknown
  Bacterial polypeptide expressing nucleotide sequence isolated from the Sargasso Sea
tatggtggatgtgaacatgtagacatttctgaaaatttagcaattgaaagagccaaaaaattatttaattgtaaatttgctaatgttcaacctcactctggtgcacaagctaacggagcagtttatctagctcttttaaaaccaggcgatacaacactcgcaatgagtcttaactcagggggtcacttaactcacggtgcaaaaccagcacaatcaggaaaatggtttaacgcactacattatgaggttgataaaaaaactggtttaattgattatgaagtgttagaaaaacttgctgttgaaaataaaccgaaactcataattgcaggcggaagtgcttattcaagaattatagattttaaaaaatttagagaaatttcggataaagtaggagcttttcttctggtagacatggctcacttttcaggactagtggctgggggtgcttatccaaatcctaccaaatatgctgatgtagttacgtctacaacacataaagttttaagaggacccagaggcggaataattttaaccaacaaagaagatttgatcaaaaaatttaatagtgcaatatttcctggattacaaggtggacctttgatgcacgtaatagctgcgaaggcagtttgttttaaagaagcattatcagatgatttcaaagaatatactaaaaatgtaattaataatgctaaagttttatctgataggttaacagaaaaaggttttaaaatattttctggaggaacagatacccatttaatgttaattgatcttagatcatttggtgttaatggaaaagacgcacaagctt

SEQ ID NO: 228390 - DNA, 800 bp, Unknown
  Bacterial polypeptide expressing nucleotide sequence isolated from the Sargasso Sea
tgaaaaacttgctttagaacataatcctaaattaataattgcaggtggtagcgcatactcaagaataatagactttaaaagatttagagaaatagcagataaagttaatgcctatttaatggttgatatggcgcacttctccggtcttgttgcaggaagtggctatcctaatccaactgagtatgctcatgtagttacttcaacaacacataaagtttttagaagtgcaagaggtggaattattttaactaatgatgaaagcttaagtaaaaaaataaattctgcagtatttcctggttatcaaggtggaccattaatgcatattattgcagctaaagctgctggttttctggaggctttaaaaccagattttaaggattatataaaatccgtcatatcaaatgctaaaattttggcagaaactttaaaaactaatggttttaaaatatattctggcggcacagacacacatttgatgcttgttgatttaagaccttttaatgttaaaggtaatataacggcagaaagtttaagtagagccaatatcacatgtaataaaaatggaataccttttgatactgaaagcccaatgattacttcaggtatcagacttggctcccaagcagctactacccgtggttttggtttaaatgaatttaaaaaagtaggtgaattgattaccaagatcgtcaaaggtttggcttcaaaccctagcaataactctaaagttgaaaatgaagtaagaaatgaagttattgacttatgttcaaattttcctatttataaaaatttaagataat

SEQ ID NO: 228391 - DNA, 268 bp, Unknown
  Bacterial polypeptide expressing nucleotide sequence isolated from the Sargasso Sea
aatgtcagtaataaaattagataaatatttaaacagtttctttaaattaaaattacaagatgctgataaagaactttatgattcaattagagatgaatttacaaggcagcaaaatcacatcgaattaattgcatcagaaaatatcgtatcaaaagcagttttagaagcacaaggttcggttttaactaataaatatgctgaaggatatccttcaaaaagatattatggtggttgtgaacacgtagatgtttcagaaaatttagctatc

SEQ ID NO: 228392 - DNA, 310 bp, Unknown
  Bacterial polypeptide expressing nucleotide sequence isolated from the Sargasso Sea
atggactctcaggccgattcaatttttgctaataaaaaaaatatagagaaatatgattccgagctttggaaagctctcagtcaggagtcttctcgacaagaagaacatatagaactaatagcatcagaaaattatgcaagcaagagagttatggaggctcaaggaggaattctgacaaataaatatgccgagggctatcctcataaaagatattacggtggttgtgaatatgttgatgttgctgaagaaattgcgattaaaagagcaaaagagctttttaaagcagactttgcaaatgtccagcctcact

SEQ ID NO: 228393 - DNA, 271 bp, Unknown
  Bacterial polypeptide expressing nucleotide sequence isolated from the Sargasso Sea
atgaatgagtttaaaaagacacaaaatcaaaatatttcagaatatgatgcagatcttgcaacattcttagataaagagctattaaggcaagaagagcacatagaactaatagcttcagaaaattatgcttctaaaagagttttggaggctcaaggtagtgtattaactaataaatatgctgaaggttaccctaataagagatattacgggggttgtgagcatgttgatggggcagaaacactagcaatgaaagagctaaagaacttttaag

SEQ ID NO: 228394 - DNA, 592 bp, Unknown
  Bacterial polypeptide expressing nucleotide sequence isolated from the Sargasso Sea
atgacaccaactaatttaatagataatgaagtttcatctttaattaaggatgaaataaaaagacaagaatttgagcttcaaatgattgcttctgagaattacgcaagtccagcggtaatggaagttatgggttcagttttgacaaataaatatgctgaaggatatcctggaaagcgatattatggcggttgtcaatttgttgatattgccgaagagcttgcaattaaaagagcaaagaaactttttggtgcagaggcagtaaatgttcaaccacattcaggtgctcaagcaaatatggccgttttcttaggttttttggagcctggagatacagttttaggaatgagtcttgatcatgggggacatttatcccatggatcaaaggttaatttctcaggcagaatttataactctatttcatacggtgttgatgaaaatacttttttgattgactatgatcagatagaagaattggcaattaagaataaaccaaaaattattattgctggctggagttcatatcctagagacttagactataaaagatttagagagatagctgataagtctggctcacttcttttagcggata

SEQ ID NO: 228395 - DNA, 828 bp, Unknown
  Bacterial polypeptide expressing nucleotide sequence isolated from the Sargasso Sea
ttcgtcttatgacgaagagttatcaaactttatgacaaaagaatttaatcgacaagaagagcatattgagcttattgcctctgagaattatgcgtcaaaaagagttctagaggctcaaggaagtgtgcttaccaataaatatgctgaaggctatccaaataaaagatattacggtggatgtgagcatgtcgatggtgttgaatcaattgcaataaaaagagcgaatgaattatttggatcaaaatttgcgaatgttcagcctcactctggtgcatctgcgaatgcagctgtcttcttagctttgcttgagcctggagatactattcttggtatggcacttgaccaaggtggacatttgacacacggtgcaaaagtaaatttctctgggaaaaattttaatgctgttcaatatggacttcatagtgaaacaaatgaaattgactatgatcaagtccaaaaacttgctctaaagcataaaccaaaggttattatagctggcttttctgctttcatgggaatagtggattgggcaaaatttagaaatattgctgatgaggtaggtgcatatctcatggttgacatggcacatgtttcagggctagttgctggcggggtttacccaaatcctgttcctcatgctcacgtcgttacaagtacgacacataaatccctacgtggtcctagatctggaataatcctttcaaatgaagatgaggactttcaaaaaagactaaattttgctgtatttcccggctcccaaggtggcccactaatgcatgttattgcggcaaaagctgtttgttttaaggaagctctcacagaagaatt

SEQ ID NO: 228396 - DNA, 422 bp, Unknown
  Bacterial polypeptide expressing nucleotide sequence isolated from the Sargasso Sea
aatggatggtttttttacaacttcactagttgaatcagatcctgaattggcaaattctattaaggaagaacttattagacaaaaagatcaagttgaattaatagcttctgaaaatattgtttctcaagcagttcttgaggctcaaggaagtgtattaactaataaatatgcagaaggttattcagggaaaagatattatggaggatgtgattttattgatcaacttgaaactttaggtattaatcgtctgaagaaactttttggttgtcaatttgctaatattcaacctcattcaggtgctcaagctaatcaagcagtttttatgtctttattaaaccctggagatgttataatggggatgtctcttgcagcggggggacatcttactcatggagcccctcccaacctttctggaaaatggt

SEQ ID NO: 228397 - DNA, 866 bp, Unknown
  Bacterial polypeptide expressing nucleotide sequence isolated from the Sargasso Sea
atccgggaaaagatattataatggttgtgaacatgttgacgtggctgaaaaattagctcttgagagaattaaaaaactttttaattgtaaatatgctaatgttcaaccccactcaggtgcacaagcaaacggagcagtatttctagcgctacttaaaccgaatgatacgtttatgggtatgagcttaaattctggtggtcatataacacatggtttaaaaatttctatgtctgggaaatggtttaatgcaatcagctatgatgttgataaaaaatctgaattaattgattacgataatgttgaaaaattagctttagaacataaaccaaaacttatcattgctggtgggagtgcttattcaagagttattgattttaaaagatttagagagattgcagataaagttggagcatacttaatggttgatatggcacatttctcaggattagttgcaggtaaaggatatccaaacccatgtgattatgcacatgttgtaacttcaactacacataaagtttttagaagtgctagaggtggtataattttatctaacgatgaagacttaggaaaaaaatttgatacagctgtttttcctggttatcaaggtggacctttaatgcatatcattgcagctaaagcagctggtttttacgaggcattaaagccagagttccagacatatattaaaaatgttttggcaaatgctaaaatgttggctgaaactttaaaaaataacggctttaagatttattcaggtggaacagatactcatttaatgttagtggatttaagaccttttaatgtgaaaggaaatttagcttctgaaagtttatgtagagctaacataacatgtaataaaaatggaa

SEQ ID NO: 228398 - DNA, 823 bp, Unknown
  Bacterial polypeptide expressing nucleotide sequence isolated from the Sargasso Sea
tcagaaaatattgtttcaaaagccgtactggatgctcaaggatctgtactaacaaataaatatgctgaaggttatcctggaaaaagatattatggaggttgtgaacatgtagatctttcagagtcactagcaatagaacgtgcaaaaaaattatttaattgtaattttgctaatgttcaaccacattcaggtgcacaagcaaacggagccgtatacttagctttaattaaacccggtgacacaatcttaggtatgagtttaaattcaggaggccaccttacacatggcgctaaacctgctcaatcaggaaaatggtttaatgctattcattacgatgttgataaaaaaactgggttaattgattatgcaaatatcgaaaaattggctctagaaaataaacctaagttaattattgctggaggtagcgcatattcaagagttattgattttaaaaagtttagagaaatttgcgataaagtaaaagcttatttgttggtagacatggcccatttttctggtcttgtagctggtggtgtttatcctaatccaataaaatacgcagatgttgtaacatccactacacataaagtattaagaggaccaagaggcgggattatacttactaataatgaagacttgattaaaaagtttaatagtgcaatttttccaggtcttcaaggtgggcctctaatgcatgtaattgcagctaaagctgtttgttttaaagaagctttatctgatgaatttaagaattattcaaaaaatgtaattaataacgcaaaaattttatctgacacattagttaaaaatggattcaaaatat

SEQ ID NO: 228399 - DNA, 774 bp, Unknown
  Bacterial polypeptide expressing nucleotide sequence isolated from the Sargasso Sea
aattaataattgcaggtggaagcgcatattcaagagtaattgattttaaaagatttagagaaatagcgaataaagtaggcgcatatctaatggttgatatggctcatttttctggtttagttgctggcaaaggttatccaaatccagttgaccatgcacatgttgttacttcaacaacacataaagtatttagaagtgcaagaggcggaattattctaacgaaccatgaagatcttgcaaaaaaaattaatacagctgttttcccaggataccagggtggtcctttaatgcatattattgctgctaaagcagtagggttcttggaagcattaaaaccagaatttcaaacatatattaaatctgttttgtcaaacgcaaaaattttaagtgaaacattaataaataatggatttaaaatatattctggcggaactgatactcatttgatgttggtagatttaagaccttttaatgttaagggaaatttagcagctgaaagtcttgatagagcaaatataacgtgtaataaaaacggcattccatttgatactgaaagtcctatggtaacttcaggtataagattaggtacgcaagctgcaactacacgtggttttggtttagaagagttcagaaaagttggtaatttaattacaaaaactattaaaggtctctcagaaaatccagaagataattcaaaaatagaaaaagaagtacaaaaagaagtgacagatttgtgttcaaaatttccgatttataaaaacctaaggaaataaa

SEQ ID NO: 228400 - DNA, 532 bp, Unknown
  Bacterial polypeptide expressing nucleotide sequence isolated from the Sargasso Sea
aagattaatactgcagtttttccaggttatcaaggtggacctttaatgcatattattgcagcaaaagccgcaggttttcttgaagcactaagacctgaatttaaagaatatataaaatctgttttgactaacgcaaaaattttgtcagagactttaaaaaataatggttttaagatttattctggtggaactgatacacatttaatgttagttgatttaaggccatttaaagttaaaggtaatttagcagcagaaagtttgtctagagcaaatataacatgtaataaaaatggaattccttttgattcagaaagtccaatgattacatcgggaattagacttggatcacaagctgcaactactagaggctttagtttaaaagaatttgaaaaagtaggtcaattaattactaaagttatagttggattatcaaaaaatcctggtgataatagcaaaattgaaaatgaagttagaaaagaagttgtttcactttgttcattatttccaatatataagaatttaagaaaatgat

SEQ ID NO: 228401 - DNA, 933 bp, Unknown
  Bacterial polypeptide expressing nucleotide sequence isolated from the Sargasso Sea
ttggtatgagtctgatttccggcggacatttaactcacggagcaaaagtcgctttatcgggcaaatggcttaaagcttttcattatgatgttaataaagaaacaggtcttattgattacgatcaagttgaaaagttagccaaagaacataagcctaaacttataattgctggtggaagtgcatattctagaataattaattttaaaaaatttaaagatatagcaaaaagtatcgatgcatatctaatggttgatatggcacacttttcaggtttagtcgccggtaaaggttatccaaatccaattgaacatgctgatgttgttacttccacaacacataaagttttaaggggtggaagaggcggaattattttgactaacaaagaagatttatttaaaaaaattaattctgcagtatttccaggttatcagggcggtccattaatgcatgtcatagctgctaaagctgcggcatttcatgaagccttacaacctggttttagagaatatataaaatctgttcttgctaatgcaaaaattttatcagaaaccttaaaaaataatggatttaaaattttttctggaggaacggatacacatttaatgttagtggatttaagaccttttatggttaaaggaaaagatgccgaagttagtttatgtagagctaatataacttgtaataaaaatgggataccttttgatactgaaaaaccaactgttacttctggaataagactcggatctcaagctgctacaaccagaggctttggactgaatgaatttaagaaagtaggagagttaattactaaagtaattaaaggcttgtctgaaaatccagaaaataatagcaaaattgagtcagaagttaaaaaagaagtcattgaactttgttctaaatttcctatatataatcacttggtcaaaaaataaa

SEQ ID NO: 228402 - DNA, 696 bp, Unknown
  Bacterial polypeptide expressing nucleotide sequence isolated from the Sargasso Sea
aatgtcgattgttagaaaaattaaaagtaatcaaaacaatttttttgaaaatgatcttaaaaattcagataaagaattatttgattcaatctcgaaggaatttgttagacaaaaaaatcatattgaattaattgcctcggagaatattgtttcaagagccgttctagaggctcaaggttctgttcttacaaacaaatatgctgagggttattctggaaaaagatactatggtggctgtgaatttgtagatatctcagaaaatttagctattgaaagagcaaaaaaacttttcaattgtaacttcgcaaatgtgcaacctcactcaggagctcaagctaatggagccgtatatttagctttaattaaaccaggtgacactatattaggtatgagtctaaattctggcggacatttaactcatggagctaaaccagcccaatctggaaagtggtttaatgccgttcattatgatgtaaataaagaaactggattaattgattatgagagtgttgaaaaattggctttagaacataaaccgaaattaataattgcaggtggaagcgcttactcaagaataattgattttaaaaaatttaaagaaatttgtgaaaaagttgatgcttatcttcttgttgatatggcacacttctctgggatagtagcaggaggagcgtatcctaatccgcttgaatatgc

SEQ ID NO: 228403 - DNA, 675 bp, Unknown
  Bacterial polypeptide expressing nucleotide sequence isolated from the Sargasso Sea
tcaatgtcaggaaaatggtttaatccgatagggtatgatgttgacaaaaaatctgaacttatagattatgacaatgttgaaaaacttgctttagaacatgaaccaaaattgataattgcaggtggaagtgcttattccagagttatagattttaaaagatttagagaaattgcagataaagttggagcatatctaatggtagatatggcacatttttcaggtttggttgctggaaagggatatccaaatccctgtgactatgctcatgtagtaacatctactacccataaagtttttagaagtgcaaggggtggaataattttaactaatcacgaagaactatcaaaaaaatttaatacagcagtttttcctggctatcagggtggaccattaatgcatgttattgcagctaaagcagctggttttttagaagctcttcaacctgattttcaagactatattaaatctgttttagcaaatgcaaaaattttagcagaaactttaaaaaataatggttttaaaatttattctgatggtacggatacgcatcttatgttggttgacttacgtccttacaatgtaaaaggtaacttagctgcggaaagtttatcaagagctaatattacgtgtaataaaaatggtattccttttgatacagaaaagccaatggtaaca

SEQ ID NO: 228404 - DNA, 847 bp, Unknown
  Bacterial polypeptide expressing nucleotide sequence isolated from the Sargasso Sea
aaatatgcagaaggatatccaggaaaaagatattataatggatgcgaacatgtagatgttgctgaaaatttagctattgaaagattaaaaaaattattcaattgcaaatttgctaatgttcaaccacactccggagctcaagctaatggagctgtttatttagcattattaaaacctggagatacaataatgggaatgagtttaaattcaggtggtcatttaactcatggttctaaagcatcaatatctggtaaatggtttaattctatagcatatgatgttgatgaaaaaagtgaattaattaattatgaccaagtagaaaaaatagccttggaaaacaaaccaaaattaattattgcaggtggaagtgcatattctagattaatagattttaaaaaattcagaaatatttgtaataatgtgggtgcatattttatggtagatatggcacatttttcaggattagttgccggaaagggatatccaaatccaattgaatatgcagatgtggttacatcaactacccacaaagtttttagaagcgctagaggtggaataattttaactaatgatgaaagtttaagtaaaaaaattaattcagcagtttttccaggatatcagggtggacctttaatgcatataattgcagcaaaggctgctggatttcttgaagcacttaaaccagaatttaaagaatatataaaatcagtattagcgaatgctaaaattttagctgaaacattaaaaaataatggatttaaaatttattccggtggaacagatacacatctgatgttggttgatctaagaccatttaatgttaaaggtaatttagcagcagaaagtt

SEQ ID NO: 228405 - DNA, 881 bp, Unknown
  Bacterial polypeptide expressing nucleotide sequence isolated from the Sargasso Sea
catgagcctagcacacggtggccatttaactcatggctcacacgtaaacttttcaggtaaaacatataacgcaattcagtatggcctaaacgaagagactggcgaaattgattacgcacaagttgaagcgttagcactagagcacaagccaaaaatgattatcgcaggtttttctgcttattcaggtattgttgattgggctaagtttcgcgaaattgcagacaaagtagatgcttacttgtttgttgatatggcgcatgttgcaggtttaattgctgcgggtgtttacccaagcccagtaccatttgcacatgttgttactacaacaacgcataaaacattagcgggccctcgtggcggtttaattatttctgcatgtggtgacgaagcaatttacaaaaagcttaacagtgctgtattccctggtggccaaggtggtcctttatgtcacgttattgctgcaaaagcagtggcattcaaagaagctttacaaccagagtttaaagaataccaaacacaagttgttaaaaatgcgcaagcaatggttagcgtattacaagagcgtggctacaaagttgtttctggtaaaacagacaatcacttgttcttacttgatttaatcgataaagacattacaggtaaagatgctgatgcagcattaggcaatgcgaacattacggttaacaaaaactcagttccaaatgatccgcgttctccatttgtaacgtctggcttacgtattggttctcctgcaatcacgcgccgtggtttcaaagaggctgaatctaaagagcttgctggctggatctgtgatgtactagacaacattgctgatgagtctgttcaagcgcaagtaaaagaaaaagtgaaagcaatttgtg

SEQ ID NO: 228406 - DNA, 688 bp, Unknown
  Bacterial polypeptide expressing nucleotide sequence isolated from the Sargasso Sea
atggttgatatggcacacttttctggtttagttgctggacatggatatccaaacccaattgactatgcagatgtagtaacttcaacaactcataaagttttaagaggtggaagaggtggaattatacttacaaaccgagaagatttatttaaaaaatttaattccgctgtatttcctggttaccaaggtggacctttaatgcatgttattgcggcaaaggctgctgcttttaaagaagcacttaaacctgaatttaaagaatatattaaatccgtgcttgctaatgcaaaaatcttatccgaaactttaaagaataatggatttaaaatattttctggtgggacagacacacatttaatgcttgttgatttaagaccttttaatgttacgggaaaagctgctgaagtcagcttatgtaattccaatataacttgtaataaaaacggtataccttttgataccgaaaaaatgactattacttccggtataagacttggatctcaagccgcaacaactagaggctttggattaaatgaatttaaaaaagttggagaattaattaccaaagttgttaaaggtctttccaaaaatccagatgacaatagcataattgagtctgaggtaagaaaagaagtaattgatctctgctcaaatttccctatatataatcatttgtttaaaaattaaa

SEQ ID NO: 228407 - DNA, 685 bp, Unknown
  Bacterial polypeptide expressing nucleotide sequence isolated from the Sargasso Sea
ggggaaaagatactatggagggaatgattttattgatgaaatggagcagctctgtaaagatagagcattagacctatacaaattaaataaagatgaatgggatgttaatgttcaaccttattctggatctcccgctaattttgctacgtatacagcgttattagaacctcatgatagaattatgggattaggattaccaagtggtggacatttaactcacggctattacaatgataaaaaaagagtatctgcaacgagcatttattttgaatctttatcttatgaagtaaatgaagaaactggattaattgattatgatgaattagaagaaagggcgaaattatttttaccgaaatgtatcattgctggagggtctgcttaccctcgtgattgggactatgagagattttctaaaattgcaagcaatgtcggagcatatttactagttgatatggctcatatttctgggttagttgctgtaggtgaagcaaataatccttttctatatgcggatgtagtaacaacaacaactcataaaagtttaagaggaccgcgttctggtatgatttttagtaagaaacatctttcagataaaatagattttgctgtatttccctcacttcaaggtggtcctcataacaatgtcatttcagccgtagcagtcgctcttaaagaagcatcaacg

SEQ ID NO: 228408 - DNA, 347 bp, Unknown
  Bacterial polypeptide expressing nucleotide sequence isolated from the Sargasso Sea
ttcagatggaactgacactcatttaatgcttgtagatttaagaccttataatgttaaaggtaatcttgcagcagaaagtttatctagagcaaatattacatgtaataaaaatggtattccttttgatacagaaaaacctatgattacatcaggaattagattgggaacacaagcagcaacaacacgtggatttggcttaagtgagtttaagacagtaggtgaattgatcacaaaaactttaaaaggattatcagaaaatccaacagataatagtaaaatagaaaatgaagtaaaaaatgaagttatttctttaacttcatcatttccgatatataagaacttataat

SEQ ID NO: 228409 - DNA, 742 bp, Unknown
  Bacterial polypeptide expressing nucleotide sequence isolated from the Sargasso Sea
agtgcttattcaagaataatagacttcaaaagattccgtgaaatttgtgatatggtcggtgcgtttctacatgtggatatggcccacttctcaggattagtcgcagctgaagagtatcccaacccgcttgagtttgcagatgttgttacatcaactactcacaaaactataaggggcgcaagaggtggcatgatactctctaataatatagacttgggtaaaaaatttaattcagcagtttttccaggatatcaggggggacctttaatgcacgtcatagcaggtaaggcagtcgcatttggtgaagctcttaaaccagaattcaaacaatatataaaacaagtgattaaaaatgctcaaactcttagtcatacgcttgtggacggtgggctcaaaattgtctctggcggtacagacactcatcttatactagttgatttaactccgatggatctaacaggggatgccgcttctacaagccttgaggaagcacatattacttgcaataaaaatggaataccaaaggatccaaaacctccaaaaataacatcaggcataagattgggtacaccggctgctaccacgagaggttttaaggagaaagaatttgaaacagttggagatttaatacttgaaactttatctggattaaagcaaaacccaaatgataatactaaagttgaaaagatagtgaaagagaaagtgataaatctctgtaatcaatttccaatttataattagg

SEQ ID NO: 228410 - DNA, 757 bp, Unknown
  Bacterial polypeptide expressing nucleotide sequence isolated from the Sargasso Sea
catgatcccgtcgcccttcgagtattccgacgtggtgaccaccaccacgcacaagtcccttcgcggcccgaggggcgcgatgatcttctaccgcaagggccagaagggcgtcaacaagaagggcgcgccgatcatgtacgacctggaggacaagatcaacttcagcgtcttccccggcctccagggcggtccccataaccacaccatcgcgggtttggccgtcgcgttgaagcaggcggcgtcgcccgagttcaaggcgtaccagacgcaggtgatgcgcaacatgcacgccatgtccgagaggctcaagagccacggcatcgagctcgtctccggagggaccgataaccacctcgtgctcgcggaccttcgcccgctcggcgtggacggctcgcgcgtcgagcgcgtcctcgagctcgcgcacgtcgcgtgcaacaagaacaccgtgccgggagataagagcgcgatggtgcccggcggcttgcgtttgggcacccccgcgctgaccacgcgcggattcgtcgaggcggatttcgagaaggtggcggacttcgtcgtccgcggcatccacatcgcgaaggacctcaagacgaagctcgggccgaagctgaaggatttccgcgacggtttggcgaacgcgcccgagggtaagttcccggagatcgacgcgctcaaggcggaggttgaggcgttcgcggccgagttccccaccatcgggttcgacaaggctgagggcaagtacactcaatcgctgtga

SEQ ID NO: 228411 - DNA, 286 bp, Unknown
  Bacterial polypeptide expressing nucleotide sequence isolated from the Sargasso Sea
atgtccagtgaaaaaaattatttaaatgatagttacaaaagtttttttgaggatagtttgtcaaaaaaagatcctgaacttcataaagctatcaatgatgaattaataagacaacaacaacatattgaattaattgcttctgaaaatatagtttctcaagctgtacttgaagcacagggttctgtattaactaataaatacgccgaaggttatccaggtaaaagatattacaatggttgtgaacatgttgatgttgctgaaaatttagcaattgaaaggttaaaaa

SEQ ID NO: 228412 - DNA, 357 bp, Unknown
  Bacterial polypeptide expressing nucleotide sequence isolated from the Sargasso Sea
agatttattctggaggaacagatactcatttaatgttggtagatttaagaccttttggtgtcaaaggtaatgctgcagctgaaagtttatcaagagctaacataacatgtaataaaaatggaattcctttcgatacagaaagtccaatggtaacgtcaggtataagactaggttctcaggcagcaactactcgaggatttggtttaaatgaatttaaaatagttggtgagttaattactaaagtaattaaaggtttgtcatccaaccctgatgacaatactaaaatagaagacgaagtaagaaaagaagttgttgatttatgttcaaatttcccaatttataaaaatttgggataat

SEQ ID NO: 228413 - DNA, 776 bp, Unknown
  Bacterial polypeptide expressing nucleotide sequence isolated from the Sargasso Sea
tgcatcagaaaattacgcttcacctagaatccttgaagctcaaggttcaattttgaccaataaatatgccgaaggctatcctggcaaaaggtattacggtgggtgtgaatttgttgacgtagccgagcaacttgcgattgatcgagccaaagaattatttaaagcagattttgccaatgttcaaccgcattctggcgcgagtgcaaatgctgcggtttttttagccctactcaatgctggcgataaaattctaggaatgagtttggatcatggtggtcacttgacgcatggttcaaaagtaaacttttcaggaaaaatttacgaatcctacagttatggtatcgatgaaactggtgacattgattatgaagaggttcagagattagcgaacgagcataaaccaaaacttatcatttgcggtttttcagctttttctggtgttttagattttccaaaatttagagaaatcgctgattcgattggcgcttaccttttagcagatatttctcacgtgtcaggtttagttgcagctggtctctatcctagtccagttccttatgctgacgtagttactaccacaactcataaaactttaattggtccccgaggtggtttaattttggctagagaaaacgaagatttgcataaaaaattaaactctgctttattcccaggatcgcaaggcggtcctttaatgcatatcattgcagctaaagcggtttgctttaaagaggctatggaacctgaatttatagactaccaaaagcagatttaac

SEQ ID NO: 228414 - DNA, 541 bp, Unknown
  Bacterial polypeptide expressing nucleotide sequence isolated from the Sargasso Sea
atagctaaaaaaattaatactgcagtttttccaggttaccaaggtggtcccttaatgcatattattgcagcaaaagcagctggatttcttgaagcattaagacctgaatttaaagattacataaaatcagttttagctaatgcaaaaattttatctgaaactttaaaaaataatggttttaaaatttattctggcggaaccgatactcatttaatgttagttgatttaagaccttttaaagttaaaggtaatttagcagctgaaagtttatctcgagctaatataacatgtaataaaaatggtattccctttgattctgaaagtccaataattacatctggcattagacttggatctcaagcggcaactactagaggttttagtttaaaagaatttgaaaaagtaggtcaattaatcactaaagtaatagatggattatcaaaaaatccaaatgataatagtaaaattgaaaatgaagttagaaaagaagttgtttcactttgttcattatttccaatatataagaatttaagaaaatgat

SEQ ID NO: 228415 - DNA, 419 bp, Unknown
  Bacterial polypeptide expressing nucleotide sequence isolated from the Sargasso Sea
gtttaaaagctatattcaacaagtcaaaaagaacgcatcaattctaggcgaagtacttatgtcaaatggaatagatatcgttactggtggcacagattctcatatggtcttagtagatttaagatcaaaaaatgtaaccggtaaagatgctgaagaaagcttagagagagctggaatgacttgtaacaaaaatggtgttgcaaatgacccaaatcccccaactattacctcaggtattagattaggatctccagctgcaacaacaagaggtttcaaagaagaagagtttaaatttattggagaaaaaatctcaacaataattaataatctttctgtatctaattctgacatttctatgcttgaaagttctattaataaagaagttcaggacctttgctctaagtatcctatttattaaa

SEQ ID NO: 228416 - DNA, 717 bp, Unknown
  Bacterial polypeptide expressing nucleotide sequence isolated from the Sargasso Sea
tatgggaagcgaagaaaaaatatctgatgtttcagccgctttcaacacagcactggacgtgatcagcacaagcgaacctactatcgcagatcacatccgcggagaattggctaatcaaagaagtcagctgaaactaatagcttccgaaaattatgcttctcctgcagttctactcgcaatgggcaattggttcagcgacaaatacgccgaagggactccgggccatagattttatgctggttgtgaatacgtcgataaggtggagacacttgcgagcaaccatgccaaagaattgtttaacgctaactacgcttatgttcagcctcactctggcatcgacgctaacttggttgcgttttggtctattcttgctcacagaatcgaggctccttttctagcgtcccatgacaaaaggcatgtcaacgacctgacccattctgactgggagactttacgaacatctttcggtaatcaacgaatgattgggatgtctttagacgctggtggtcatttaacacatggatttcgtccaaacatatcaggaaaattatttgaccagcgatcatacggggttaacccagaaactgaaatgcttgattatgcagaaattgacaaattggcgaaggagttccgccctttagttgtcgttgccggatattctgcccatccgaggaaagtcaacttcgctaaaatgagagagatcgccgactccattga

SEQ ID NO: 228417 - DNA, 496 bp, Unknown
  Bacterial polypeptide expressing nucleotide sequence isolated from the Sargasso Sea
atgaaacaggaactagactataactttttttcttcctctctgtctaaaattgatccgctaatttctagtgctattgaattagagttgcaacgacagaaagatcagattgaactaattgcatctgaaaatattgtctcccaagccgttttagaggcgcaaggatcggttcttacaaataaatatgcagaaggatatccagaccgtcgttactatggcgggtgcgaatttgttgataaagctgaagaacttgcaatagcgcgagcaaaagacctattcgattgtaaatatgtcaatgtacagccacattctggagcacaagcaaaccaaactgtttttttatccctcctggagccaggtgatacaatattgggtatgtcgttagctgccgggggtcatttaacgcacggagctaagcctaaccaatctggtaagtggttcaatgccgtgcaatatggtgttaaaaggaagagctcattgatagacttcgacgaagtcg

SEQ ID NO: 228418 - DNA, 786 bp, Unknown
  Bacterial polypeptide expressing nucleotide sequence isolated from the Sargasso Sea
gatgttcagcaagcaggatcagattcagggttacgacgacgagttgctcgcggcgatcgatcaggaagaacgccgtcaggaagagcacatcgagctgatcgcctcggagaactactgcagccagcgggtgatggaagcgcagggcagcggcctgaccaacaagtacgccgaaggttatccgggcaagcgctactacggcggttgcgagtacgtcgacaaggtcgagcagctggccatcgaccgcgccaaggcgctgttcggcgccgattacgccaacgtccagccgcactccggttcctcggccaacagcgccgtgtacctggcgctgctcaatgccggcgacaccatcctcggcatgagcctggcccacggcggccacctgacccacggcgccaaggtgtcgtcctcgggcaagctctacaacgccgtacagtacggcctggacaccgccaccgggctgatcgactacgacgaggtcgagcgcctggccgtggagcacaaaccgaagatcatcgtcgccggcttctccgcctactccaagaccctcgacttcccgcgctttcgcgccatcgccgataaggtcggcgcgctactgttcgtcgatatggcgcacgtggcgggcctggtcgctgcgggtctgtacccgaacccgattccctttgccgacgtggtcaccaccaccacgcacaagaccctgcgtggcccgcgcggcggcctgatcctggccaaggccaacgaagagatcgagaagaagctcaactccgcggtggttcccggggcgcccag

SEQ ID NO: 228419 - DNA, 850 bp, Unknown
  Bacterial polypeptide expressing nucleotide sequence isolated from the Sargasso Sea
cacgttgatgttgttgaagatatatgtatcgacagaataaaaaaattgttcaatgcagattttgctaatgttcaagttcattcaggttcacaagctaatcaggctgttttcttagctcttttaaagcctggtgacacaattatgggtatgtctcttgctgcaggtggccatttaactcatggagctccccccaatgaatcaggaaaatggttcaatgcagttcaatatggtgtcaataaagatacaacactcattgattttgacgaggttgagggtcttgccctagaacataagcccaaattaattattgctggtggctcttcttatcctagaatcattgactttaaaaaattcaaagaaatcgctgataaagtcggtgccttatttcttgtggatatggctcactttgctggtctagttgctacaggtgtttaccctaaccctcttgaatttgcagacgttgttacatctactactcacaaaacactgagaggtcctagaggaggaatagtattgactaacaatcctgatcatgcaaaaaaaatcaattccgcagtttttccaggtcttcaaggaggtccacttatgcatgttatctgtgctaaagcagtagcatttggtgaagctcttaaacctgagtttaaggattatattaacgcagtagtaagtaattccaaggttctttctaatgtcatgctagaaagaggtcttgcagttgtttccggtggaacggatactcacttagtacttgttgatttgagaccaaaaaaattgacaggaaaggcggctgaaaggtcccttgaaaatgctggtattacctgcaacaaaaatggagtaccatttgatcctg

SEQ ID NO: 228420 - DNA, 778 bp, Unknown
  Bacterial polypeptide expressing nucleotide sequence isolated from the Sargasso Sea
atgtcaagtgaaaacaaatatttaaacgatcaatataaaggtttttttgaagatagtttatcaaaaactgatccagaattgtataaagcaataagcgatgaacttaaaagacaacaagagcacattgaattaattgcttcagaaaatattgtatctcaagctgtgttagaagctcaaggatcagttttaaccaataaatacgcagaaggctatccaggtaaaagatattataacggatgtgagcatgttgacgtggcagaaaatctagcgatagaaagattaaaaaagttatttgattgtaaatttgccaatgcacaaccacattctggtgctcaggctaatggtgctgtatttttagcattgcttaaaccaggtgatacctttatgggtatgagtctaaattcaggtggtcatataactcatggattaaaaatttctatgtcaggtaaatggtttaacgccataggatatgatgttgataaagagtctgaacttattgattacgattatgtagaaaaaattgctttagaaaataaaccaaaactaataattgctggaggtagtgcatattctagagttatagattttaaaagatttagagaaatagctgataaagttgatgcttatctaatggttgatatggcacatttttcaggcttggttgcaggaaaaggttatccaaacccatgtgaatatgcacacgtagttacatctacaacacataaagtttttagaagtgcaagaggtggtattattttaactaaccacgaagattagc

SEQ ID NO: 228421 - DNA, 810 bp, Unknown
  Bacterial polypeptide expressing nucleotide sequence isolated from the Sargasso Sea
gccttactaaaaccaggtgatacatttatgggcatgagtttaaattctggaggtcatataactcacggtttaaaaatttcaatgtctggtaagtggtttaatgcagtaagttatgatgtagataaagagtctgagcttattgattatgataaagttgaaaaaattgctactgaaaataaacctaagttaataattgctggtggtagcgcatattcaagaataattgattttaaaagatttagagagatcgctgataaagtgggagcttatcttatggtagatatggctcatttttcaggccttgtagcaggaaaaggatatcctaatccatgcgaacatgctcacgttgtaacttcaacaactcataaagtttttagaagtgcaagaggtggtattattttaacaaaccacgaagatcttgcaaaaaaatttaattctgctgtatttccaggttatcaaggaggacctttgatgcatataattgcagccaaagccgcaggattcttagaagcgttaaaacctgagtttaaagattatattaaagccgtcttggcaaatgctaaaattttatcagaaacacttaaaaataatggatttaaaatttattcaggaggtacggactctcatttaatgttagttgatttacgaccttttaatgtaaaaggaaatgtggctgcagaaagtttgtgtagagctaatattacctgcaataaaaacggtataccttttgatagcgaaagtcccatggttacatctggtataagacttggcactcaagctgcaactactagaggttttggcttaaaagaa

SEQ ID NO: 228422 - DNA, 626 bp, Unknown
  Bacterial polypeptide expressing nucleotide sequence isolated from the Sargasso Sea
catagagtacgctcatgtggtgacttctacaactcacaaaactcttagaggtgcaagaagtgccatgatattaactaatgatgagactttaataaaaaaaatcaatagtgctgtatttcccggtttgcaaggtggtcctctaatgcacgttatggcaggcaaagctgttgcttttggtgaggcacttaagcctgagtttgaagattatataaagaaagtcattgaaaatgctaaagtattagcgtcttccttagtaaataatggtttcaaaatcgtaacaggcggaactgactctcatatagtctggctagaccttactcctaaaaacgttactggagataaagctgagaaaatactggaagaggttggcattgcatgtaataaaaacgctattccttacgaccctaatcctccaaaaataactagtggattaagatttggaactgccgcagctacttctaggggttttaatgaaactgattttagtgaaattggtaatatgatttcagaagtacttgaaaacattaatcaaaatgaggataatcaaaaagaatttatttcttctatgaaaagtaaagttataaatatgtgcaaaaaatacccaatatacgatgaggcattttaat

SEQ ID NO: 228423 - DNA, 867 bp, Unknown
  Bacterial polypeptide expressing nucleotide sequence isolated from the Sargasso Sea
catgggagcaaaaccagcccaatctggcaagtggtttaatgcactacattatgaagttgataaagagacaggtttaattgattataaagctgtagaaaagcttgcagtagaaaataaaccaaaactaattattgcaggaggtagtgcatattcaagaataattgattttaaaaaatttagagaaatatgtgataaagttggagcataccttctagttgatatggcgcatttatctggattagtagctggaggagcttatcctaatcctacaaaatatgctgatgttgtaacttctacaacacataaagttttaagaggaccaagaggcggaattattttaacaaataatgaggagttagcaaaaaaatttaatagtgcaatttttccaggtttacaaggcggaccattaatgcacgttattgcagccaaagcagtttgtttcaaagaggctttgtctgaagattttaaaatttatactaaaaatgtaatcaaaaacgcaaaagttttatcaaaaagtttatccgaaaaaggttttaaaatcttttctggtggaacagatacacatttaatgcttcttgatttaagatcatttaaagttactggaaaagatgctcaagcctcgctaggaagagcaaatataacatgcaataaaaatggaattccattcgacacagaaagtccattcataacctctggaattagattaggtacaccagcctgtactacaagaggattcaaggaagatgaatttaaattaattgcagatctaatacataaagtaattcagggtttaagtgagaaaaaatcagataattcaaaaatagagaatgaagttaaaaaaagaataattgatctttgttcctcctt

SEQ ID NO: 228424 - DNA, 766 bp, Unknown
  Bacterial polypeptide expressing nucleotide sequence isolated from the Sargasso Sea
agagtatcagcctaagttaataattgcaggtttttctgcatttacaggaatttttgattggaaaaaatttagagaaatatctgacgacgtcggagcatacttcttagtagatatggctcatgtttctggtttagttgctgctggtttatacccttctccagttccatacgcagatgttgtaacatcaactactcacaaaacattacgtggacctaggtcaggaattattcttgcaaaggcaaacgaagaaattgaaaaaaaacttaactctgctgtatttcctgggtctcaaggtggtcctcttatgcatgttgttgctgcgaaagcattatgttttaaagaagctttagatccagaatttaaaatttatataaaacaggttatggataatgcaaaaactatggctgaaacaataatgtcaaatgaaatagacatcgtatctaacgggactgaaaatcacatagtattagttgatctcagaagtaaaggaattactggcaaagatcttgaaagagttcttggatcagtcaatataacagtaaataaaaattcagttccaaatgatccagcatcaccattcgtgacttcaggaataagaattgggacaccagcagctacaactagagggtttaaagaaaaagaaattatacaagtaggtaattggatatctgatattattaataactttgatgataaagaactactaaatgctattagagatgatgttcacaaacttacaactaattttccagtatataatttatag

SEQ ID NO: 228425 - DNA, 719 bp, Unknown
  Bacterial polypeptide expressing nucleotide sequence isolated from the Sargasso Sea
tatgtctagtgaaaaaaaatacttaaatgaaaattatcaggatttttttgaaaaaagtctttctcaatctgatccagatttatttaaagctattaatgatgaattagttagacagcaaaatcatattgagcttatagcatcagaaaatattgtatcccaagctgttctagaagctcaaggttctgtgctaacaaacaaatatgctgaaggttatccaggtaagagatattacaatggatgtgaacatgtagatgttgcagaaaaattagctttggaaagaataaaaaaactttttaattgtgaatatgcaaacgtacaacctcattcaggagcacaagcaaatggagctgtatttttagctttattaaaacctaatgatacttttatgggtatgagtttaaattcaggtggtcatattacacacggattgaaaatctcgatgtccggaaaatggtttaatgcaataagttatgatgtagataaaaaatctgaacttattgattatgataatgttgaaaaacttgcactagaacacaaaccaaaacttattatagctggaggaagtgcttattctagagtgattgatttcaagagatttagagaaatagccgataaagttggtgcttatttaatggtggacatggcccatttttctggtttagtagctggaaagggctatccaaatccttgtgattatgcacatgttgtaacttcaacaa

SEQ ID NO: 228426 - DNA, 427 bp, Unknown
  Bacterial polypeptide expressing nucleotide sequence isolated from the Sargasso Sea
aaagattatataaaatcagttttagcaaatgcaaaaattttagccgaaacacttaaaaataatggtttaaaaatatattcaggtgggaccgacacacacctgatgctagttgatctaagaccatttaatgttaagggaaatattgctgctgaaagcttatgtaatgcaaatataacatgtaataaaaatggtatacctttcgatactgaaaaaccgatgattacttctggtattcgtttaggaactcaagctgcaactacaagaggttttggacttaaagagtttcaaaaagttggtgatttaataacaaaaactataaaaggtttgtcaaaaaatccagatgacaatagtaaaattgaatctgaggttagggaggaagtaattaatctatgctcctcttttccgatttacaaaaatcttaaataaa

SEQ ID NO: 228427 - DNA, 832 bp, Unknown
  Bacterial polypeptide expressing nucleotide sequence isolated from the Sargasso Sea
atgaataaaaaactacataatgtagatccagtgatttcagatattatttcacgtgagaatgttcgtcaaaacaatgtattagaaatgattccttctgagaattatgcgagcatggctgtcatggacgctgtaggaagtatattaactaataaatattctgaaggttaccccggagctcgatattaccaaggtaatgatattgttgatgaagccgaaaatttagctcgtgatcgggcaaaagaagtttttaattttgctcatgctaacgtgcaacctcattctggtacgcaggcgaatatggctgtctatttaggcttgctaaaacctggagatacagttatgggtatgcaattagatgctggtggtcatctaacacatggccatccagtaaatgcgagcgggaaattatacaattttgtgagttatggtgtggatcgtgaaactgaaataattgattacgacgccatgcttgatatagcaaaatcacatcggcccaagcttctagttgttggcgctactgcttatcctcgacaaattaattttgcgcatgccagagaaattgcagatgaagttgatgcaatattgatggctgatatggcccatatttctggtctcattgcaggtggagcacaccctagcccttccggatttgctcatgtagtaacctcatcaacgcataagacgctcaggggccctcgaggtgggatgatactttgtgatcaagattatgccagaagagtagacagaggtgttttccctggatctcaaggagggccgatgatgaatattattgcgggtaaggcagtcatgttgtccgaggctagtactcaag

SEQ ID NO: 228428 - DNA, 501 bp, Unknown
  Bacterial polypeptide expressing nucleotide sequence isolated from the Sargasso Sea
aatgaatatccttcaaaatcttaaagaaagtgatccagtaatatttaattttattaactctgaaaaaaatagacaggaaacgcatcttgagttaatcgcaagcgaaaatttcgcatcaattgccgtcatgcaggcacaaggttcagtccttacaaataaatacgcagagggattacctcaaaaaagatattacggaggatgcgaatttgttgatgaaatcgaagaattagctattcagagggcaaaaaaattatttaatgcaaattgggctaatgttcaaccccatagtggagcacaggcaaatgctgctgttttcctaagtttacttaaacctggcgacacaatcctggggatggatttatctcacggtggacacctaactcatggatctccagtaaatatgagtggtaagtggtttaatgcagttcactatggtgtaaataaagaaactagtgaattaaattttgatgaaataagagagatagcactagaaacaaaacc

SEQ ID NO: 228429 - DNA, 881 bp, Unknown
  Bacterial polypeptide expressing nucleotide sequence isolated from the Sargasso Sea
aggttctgttttactaataaatatgccgaaggatatcctggaaaaagatattatggtggctgtgaagttgtagatatagtagaacaaatagcaattgacagagcaaaagctttatttggagcagaatatgtaaatgttcaaccgcatagtggttcgcaagctaatacagctgtgttttttgcatgtttaaaaccaggagataaaatcttaggatttgatttgtctcatggtggacatttaactcatggttctcctgttaatttttctggaagattatatacacctgttttttatggagtagatcaagaaacaggaatgctagattatgaaaaaattcaggaaattgccacaaaagaacaaccaaaaatgataattgcaggagcttctgcctattcaagagatatggattttgctaaatttagagctatagctgattctgttggagcaattttattagctgatatttcgcatcctgcaggtttaatagcaaaaggattgctaagtgatcctattccgcattgtcatatcgttacaacaacaactcacaaaacactacgtggtccaagaggaggaatgattatgatgggtaaagattttgaaaatccttggggtttaaaaacaccaaaaggagaaataagaatgatgagtcatgttttagatatggctgtttttcctggaaatcaaggtggtccattgatgcatattattgcggctaaagcagttgcttttggagaagcattaacggatgagttctttagatatactatgcaagtccaaaaaaatgccaaagccatggctgaagcttttgtaaaaagaggatataatattatttctggaggaacagataatcatatgatgttgattgatttgagaaataaaaa

SEQ ID NO: 228430 - DNA, 400 bp, Unknown
  Bacterial polypeptide expressing nucleotide sequence isolated from the Sargasso Sea
tatgtctagtgaaagtaaatatttgaatgatcagtataaaggtttttttgaagatagtttgtcaaaaactgatcctgagctttatggcgcgataagcgatgaattaaaaagacaacaagaacatattgagttaatagcttcagagaatatagtctcacaagcagtccttgaagctcaaggctctgttttgacaaataaatatgctgaaggttatcctggtaaaagatattacaatggatgtgaacatgtcgatgttgctgaaaatttagctattgaaagattaaaaaaattatttgattgtaaatttgcaaatgctcaaccacattcaggagctcaagcaaatggcgctgtctttttagctctacttaagccaggagatacttttatgggtatgagttaa

SEQ ID NO: 228431 - DNA, 777 bp, Unknown
  Bacterial polypeptide expressing nucleotide sequence isolated from the Sargasso Sea
gcaacaaaatcatattgaattaattgcatcagaaaatattgtttctcaagcagtattagaagcgcaaggttcagttttaacaaataaatatgcagaaggttatccaggtaaaagatattataatggttgtgaacatgttgatatagccgaaaatttagccatagaaagacttaaaaaattgtttaattgtaaatatgctaatgctcaaccacattctggcgcacaagcaaatggtgcagtatttttagcactgttgaaaccaggtgatactattatgggaatgagtttaaattctggtggacatttaactcatggatctaaagccgctgtttcaggtaaatggtttaaatctatagcttacgatgttgataaaaaaacggaattaataaattatgaagaggttgaaaaaatagctttagaaaataatccaaaattaattattgctggaggaagtgcatattcaagagtaatagattttaaaaaattcagagatatagcagataaagttggagcttatcttatggtggatatggcacatttctcaggtttagttgctggaaaagggtatccaaatcctattgaacatgcccatgtagtaacttctacaactcataaagtttttagaagtgcaagaggtggtattatattaaccaacgatgaaacattatcaaaaaaatttaactctgcagtctttcccggttatcaaggtggtccactaatgcatattatagctgctaaagctgtaggtttttatgaagctttaaagcctgaatttaa

SEQ ID NO: 228432 - DNA, 574 bp, Unknown
  Bacterial polypeptide expressing nucleotide sequence isolated from the Sargasso Sea
acacacaaatcattaagaggtcctaggtctggaatcatactttctaatgaagatgaagattttcagaaaaaattaaattttgcagtatttcctggttcacaaggtggccctttaatgcatgttatagcagctaaagctgtatgttttaaagaagctatgactgatgattttaaggattattcgaaacaaataattaagaatgctcaagctatgtgtaaaaaatttatagctagagggtatgatttagtgcacccgatgacagagaaccacttattattgcttgatttacagaaaaaagaggtaaatggaaaggaggcagaagagcttttaggaacagtcaatataacagttaataaaaattctattcccaatgatccagaatctccatttattacatcaggtattaggattggaactccagcaataacaactaggggttttaaagaagaggaagctgaacaagtagtagatttaatgtgtgatgctattgaaaatagaaatgatcaagcctcacttgatagaattaaagatgaggtaaaagacctttgtaataattttccggtttataaataat

SEQ ID NO: 228433 - DNA, 432 bp, Unknown
  Bacterial polypeptide expressing nucleotide sequence isolated from the Sargasso Sea
tttgcttgataagaaatccaatattaaaactgatgcaatcttttctaacaaaaaagatatagaactttatgatgctgagctttgggaatccttccaaaaggaaatggttagacaagaagagcatattgaacttatagcctcagaaaattatgcaagcgaaagagtcttacaagctcaaggttcagtattaacaaataagtatgctgaggggtatcctgacaaaagatattatggaggttgtgagtttgttgatattgctgagaaattagcaatagatagagctaaagaactttttaatgcagattatgcaaatgtgcagcctcattctggttcatctgcaaatgctgctgcatatttagcgttacttgagccaaatgacacaatacttggaatgagtctcgatcatggaggacatctcactcatggatcaaa

SEQ ID NO: 228434 - DNA, 652 bp, Unknown
  Bacterial polypeptide expressing nucleotide sequence isolated from the Sargasso Sea
attgcctggtaaacaatatcctaaccctatagattatgcgcatgttgttacttctacaactcataaaactctaagaggtgctagaagtgcaatgatattaactaatgatgaaacattaataaaaaaaattaacagtgctgtttttccaggattacaaggtggtccgctaatgcatgtaatggcaggtaaggcggttgcttttggcgaagcattaaaacctgaatttgaaaattatatcagaaaagttatttcaaatgctaaagtattagcttcatctttagtaaataacggatttaaaattgtaactggtggaactgattctcatattgtatggttagatctcactcctaaaaacataacaggtgataatgctgaaaaaatactagaagaagttggaatagcttgtaacaaaaacgccattccttacgaccccaatccacccaaaataacaagtggtttgagatttggcacagctgcagctacttctagaggctttgatgagaatgattttagcgaaattggggatttaatttcagaaatacttgataatattaatcaaaatcaagataatcaaaaagaatttatttcttcaatgaaaagtaaagttgttattatgtgtaaaaaatatccaatttataatgaggctttttga

SEQ ID NO: 228435 - DNA, 1279 bp, Unknown
  Bacterial polypeptide expressing nucleotide sequence isolated from the Sargasso Sea
atgtacagtgattactctaatgtagccgaatttgatgccgaattagcgcaggcaattgcgcatgagcaacaacgtcaagaagatcatattgagcttatcgcctcagagaattatgccagccctcgcgtgttggaaatgcagggctctgtgcttacaaataaatacgcggaaggttatcctggaaaacgctattacggcgggtgtgagtttgctgatcaagttgagcagctggcgattgagcgtttgaaacacttattttcagcggattatgctaatgtgcagccccactcaggctcacaagccaatgcggctgtgtatttggctttattgtcaccgggtgatgttattttgggcatggatttgtctaatggtgggcatttaacgcatggctctaacgtgaatttttcgggaaaaacctatcaatcgtatttttatggtttggatgacaatggtgaggtagattatgatcaggttgaagcgttggctaaaaagcatcgcccgaaattgttggtcaccggattttctgcctattctggtgtaattgactgggagcgttttcgaaccattgcggatagtgtcaatgcttacatgttggcagatattgcgcatgtggccggattaattgctgcaggcgtctatccctcaccggttaatattgctgatgtaacaacgagtacgactcataagtctcttcgtgggcctcgaagcggggttattatggcaaaggcaaatccagagattgaaaagaaattacgttctgctgtttttccaggaacacagggtggtcccttgatgcacgtcattgctgcaaaagcggtggcttttaaagaggcgatgcagcctgagtttattgaatatgctaagcaagttgttcgtaatgcacaagccatggcaaaggtaatattggaccgcggttattctattgtgtccggtgggacagaaaatcatatgttcttattggatttgcgagattatgcgttgagcggtaaggaagtggaagcgatccttgaaaaagcattcattacgactaataaaaactcagttccaaacgagccacgctcaccttttgtaaccagtggagttcgaattggaacgcccgccattacaacccgaggttttaaagagcaggagtcgacacagttggctaactggatttgtgatattttggatcatcaaggtagcgaacaggaggttcagcgtgttttgggttgtgttcgtgagctgtgttcccgattcccggtgtatgctaagcctgttgttacatcgggagcgagttagt

SEQ ID NO: 228436 - DNA, 994 bp, Unknown
  Bacterial polypeptide expressing nucleotide sequence isolated from the Sargasso Sea
catgtttagccgttccaacgatattgccactttcgatgctgatctctgggctgcaatggagcaggaagctgtccgtcaggaagagcacatcgagctgattgcctctgagaactacaccagcccggcagtcatgcaggcgcagggctccgtactgaccaacaagtacgccgagggctatccgggcaagcgctactacggtggctgcgagcacgttgatgttgttgaacagctggccattgaccgcgccaaggaactgttcggtgccgattacgccaacgtgcagccgcacgctggctcgcaagccaacgccgctgtctatctggcgctgttgcaggccggtgacaccattctgggcatgagcctggcacacggcggtcacctgactcacggtgcttccgtttcgtcctccggcaagctgtacaacgccgtgcagtacggcatcaacgatcagggcctgatcgattacgacgaagtcgagcgtctggccgttgagcacaagccgaagatgatcgttgctggtttcagcgcctactcccaagtgctggattttgcacgttttcgcgccatcgccgacaaggttggtgcttacctgttcgttgatatggcccacgttgccggcctggttgctgcaggtgtctacccgaacccggtgccgttcgcagatgtggttaccaccactacccacaagaccctgcgtggtccgcgtggtggtctgattctggcgcgtgccaacgaagagatcgaaaagaaactgaactccgctgtgttcccgggcgcccagggtggtccgctcgagcacgttatcgcggccaaggcgatctgcttcaaggaagcactgcagcccgagttcaagacctaccagcagcaggtggtcaagaacgcccagaccatggccaaggtatttgtcgagcgcggctttgacgtggtatccggcggcacccagaaccacctgttcctgctgtcgctgatcaagcaggacatcaccggtaaggat

SEQ ID NO: 228437 - DNA, 1150 bp, Unknown
  Bacterial polypeptide expressing nucleotide sequence isolated from the Sargasso Sea
tatgtcaagtgaaacaaaatatttgaatagtgagtacaaagacttttttgaaaaaagtttattagaaagtgatcctgaaatttataaagctattaatgacgagttggttagacaacaaaatcatatcgagttaattgcatctgaaaatattgtatctcaagcagttctagaagctcaaggttcagtcttaacaaataaatatgctgagggttatcctggtaaaagatattataatggttgtgaacatgtggatgttgcggaacaattagctatagatagacttaaagaattatttaattgtaaatttgcaaacgctcaacctcactcaggtgcacaagcaaacggtgctgtgtttttagctttgttaaaacctggtgatacttttatgggaatgagtctgaattcaggaggacatattactcatggtttaaaaatttctatgtcaggaaaatggtttaatgcaattggatatgaagttgataaagaatctgaacttattgattatgataatgttgagaaacttgcgctagagcacaaacctaaacttataattgctgggggtagtgcttattcaagaataattgattttaaaagatttagagaaatagctgataaggttggagcatacttaatggttgatatggctcatttttctggtttagttgctggtaaaggatacccaaatccatgtgactatgcacatgtagttacatcaactactcacaaagtatttagaagtgcaagaggcggaattatattaactaatcatgaagatctatctaaaaaatttaatactgcagttttccctggataccaaggaggtccattaatgcacattatagctgccaaagcagttggatttaaagaagcattaaaaccagaatttaaagattacattaaaacggttttagcaaatgcaaagattttagctgaaacattaaaaaataatggttttaaaatttattcaggtggaactgatacacatttaatgttagttgacctaagaccttttaatgtaaaaggtaatgttgctgcagaaagcctttctagagctaatataacatgcaataaaaatggtattccatttgatagtgaaagcccaatgataacctctggtataagacttggatcgcaggcagctacaacaaga

SEQ ID NO: 228438 - DNA, 439 bp, Unknown
  Bacterial polypeptide expressing nucleotide sequence isolated from the Sargasso Sea
aatgaatattcttcaaaatctttacgaaagtgatccagtaatatcaaattttattaactctgaaaagaatagacaggaaactcaccttgagttaatagcaagtgaaaattttgcgtcgattgctgtcatgcaggctcaaggatctgtccttactaataaatacgctgagggattacctcaaaaaagatattatgggggttgtgaatttgttgatgaaatcgaagaattagctatagagagagcaaaaaaattatttaatgcaaattgggctaatgttcaacctcacagtggtgcacaggcaaatgcggctgttttcttaagtcttcttaaacctggcgacacaatcatggggaatggatttatctcatggaggacatcttactcatggatctccagtcaatatgagtgggtagtggttaatgcagttcactatggagta

SEQ ID NO: 228439 - DNA, 823 bp, Unknown
  Bacterial polypeptide expressing nucleotide sequence isolated from the Sargasso Sea
ttgatagactatgataatgtagaaaaattggctttagaaaacaaaccaattttaattattgctggtggtagtgcttattcaagagtaatttattttaaaaggtttagagaaattgcagataaagtaggagcatatttaatggtagatatggcacatttttcaggattagttgccggaaaaggatatccaaatccatgtgattatgctcatgttgttacttcaacaactcataaagtttttagaagtgcaaggggtggaattattttaacaaaccatgaagatctggctaaaaaatttaatacagcagtatttccagggtatcaaggtggaccattaatgcatattattgctgctaaggctgttggatttttagaagctcttaagccagagtttcaaaattatataaaaactgtcttagctaacgcaaaaattctttccgagacattaaaaaataatggatttaagatttattcaggtggtacagatactcatttaatgcttgttgatttaagacctttcaacgttaaaggtaacttagcttctgaaagcttatcaagagcaaatataacttgtaataaaaatggaattccttttgatacagaaagtcctatggttacatcaggtatcagacttggttctcaggcagctacaactagaggctttggtttaaaagagtttaaagaagttggaaatttaataacaaaaaccattaaaggattgtctatgaatcctaacgacaatagcaaagtagaagaagaagtaagaaatgaagttgtatcactttgctcttcatttcctatttataaaaatctctataaatgat

SEQ ID NO: 228440 - DNA, 1039 bp, Unknown
  Bacterial polypeptide expressing nucleotide sequence isolated from the Sargasso Sea
cgagcgggccaaggaactgttcggtgcggcctgggcgaatgtgcagccccacagcggtgctcaggccaatttcgcggtgttcctggcgctgctgcagcccggcgacacgatcatgggcctggatctttcccatggtggtcacctgacccacggctcgccggtgaacgtgagcgggaagtggttcaacgttgttcagtacggcgtggatcgtgagacccagcggctggacatggaggcgatccggcagctggccttggagcacaagccgaagctgatcgtctgtggtttttcggcctacccccgcaccatcgatttcgccgccttccgctccattgccgatgaggtgggtgccttcctactggcggatatggcgcacatcgctggcctggtggcggctggcgtccaccccagccctgtgcctcactgcgatgtggtgaccaccaccacccacaagaccctgcggggtccccgtggtggtctgatcctctgccgggatgccgacttcgccaagaaattcgacaaggcggtcttccccggcagtcagggtggccccctggaacacgtcatcgctgccaaggcggtggccttcggtgaggcgctgcagccagcgttcaaggcctacagcctgcaggtggtggcgaacgcagcggccctggccgatcgcctgatcgcccgggggattgatgtcgtcagcggcggtaccgacaaccacgtcgttctgctggatctgcgctctgtcggcatgaccggcaaggtggctgatctgctggtcagcgatgtccacatcaccgccaacaagaacacggtgcccttcgatccggaatcccccttcgtcaccagtggtctgcgtttggggaccgccgcactgaccacccggggttttgatgttgaagccttccacgaggtggcggatgtcatcgctgaccgtctgctgaatcccgaggacgatgccgttcagcagcagtgcctgcggcgggttgaagcgctctgccagcgcttcccgctgtatgccgttgagcgccagccggcgcttgcctga

SEQ ID NO: 228441 - DNA, 720 bp, Unknown
  Bacterial polypeptide expressing nucleotide sequence isolated from the Sargasso Sea
ttaataaattcaaagatatttgtaaaaaagttaatgcacatttgttagttgatatggctcacttttccgggctggtcgctggtggtgcttatcccaatcctttagaatatgctgatgttgtaacatctacaactcataaagttttaagaggaccgcgtggtggaataattttaactaatgatgaaactctttataagaaatttaatagtgctgtttttcctggtcttcaaggcggtccactaatgcatgttgtggcagccaaagccgtttgctttaaagaagctttaagcgaagaatttaaaaaatatacttcaaatgttatttcaaatgccaaggttttaagcgaaacacttattgaaaataattttaaaatattttcaggaggaaccgatactcatttaatgttagttgatttaagaccatatggagttacaggtaaagatgctgaagaaagtttaggtagagcaaacattacttgtaataaaaatggtattccttttgacacacaaagtccgatgattacttcaggtattagattaggaacacctgctgctacaacaagaggttttcaagcagaagaatttaaattagttggaaaacttataacaaaagttattaaaggactttcagaaaacccaaaaaataatataaaaattgaaaaagaagtacagaaagaggttgttgaactctgttcagattttccaatatatagcggataat

SEQ ID NO: 228442 - DNA, 1276 bp, Unknown
  Bacterial polypeptide expressing nucleotide sequence isolated from the Sargasso Sea
atggaatctaaagctgattcaatcttcgctaatagacaaactattgagaaatatgatgttgaactttggcaagcacttgacaaagaatcaatgcgtcaagaagagcacatagagctcatagcgtctgaaaattacgccagtaaaagggttatggaggctcagggaggcctacttacaaacaaatatgctgagggttatccaaataaaagatactacggtggatgtgagtatgttgatgttgccgaagaaattgcaatcaacagagccaaagaactttttaaggcagattacgctaacgttcaacctcactcaggatcttctgcaaacgctgctgcatttctagccatgctcgaacctaacgatttgattcttggaatgagtctcgatcaaggcggtcacctaactcatggtgcaaaagtaaatttttcaggcaaaaactatcaagcgattcaatacggcttgcatcctgaaacatttgatattgactacgatagtgtcagagatttggctaaaaaacataaacctaagatgatcattgctggattttcagctttttctggaattatagattggaaaatttttagagatattgctgatgaagtaaatgcttattttcttgttgatatggctcatgtttctggacttgttgcggcgggtttatatccctcaccagttccatacgctgatgtagtaacttcaacgactcataaaactcttagaggccctagatcaggcattattattgctaaatcaaatgaaaatttagaaaaaaaattaaactcagcagtattccctgggtctcaaggtgggccattgatgcatgtcatagcagcaaaagcagtgtgttttaaagaagctttagagcctgatttcaaaatatatactcagcaagtaatcgataatgcaaaactgatgtgcaaggtcattcaagacaggggaattgatgttgtgacaggtaaaactgacaatcatatcgtcttaatggatttaagaaaaaaaggattaacgggtaaagattgcgaacatgcattaggtcatgcaaatatcactgttaataaaaatgcagtccccaatgatccccaatcaccatttgtgacttctggtataagattaggtacaccagctattaccacaaggggttttggtagtgatgaagtagaaatattaactaattggatttgtgatgttgttcttgatcacagcaatgttgataagataaataccattaaaaacaaagtagttgaaatgtgtaaaaggtttccagtttatcaataaa

SEQ ID NO: 228443 - DNA, 994 bp, Unknown
  Bacterial polypeptide expressing nucleotide sequence isolated from the Sargasso Sea
aatgttctctaatacttcatcaatttctgcttttgattctgagttgtatgacgctattcaaaaagaagaaaatcgtcaagagcagcacatcgaattaattgcttctgaaaattatgccagtccaagggttatggaggcacagggatcagtactcacaaacaaatatgctgagggttatccctcaaagcgatattatggtggttgtgaatatgttgacatagcagaagatttagctattcagcgtgtcaaagagctctatggcgctgattatgcgaacgttcagccacattctggatcgcaagctaacacggctgtatttttagccttactcaatgccggcgacaaaattcttggcatgagtttgtctgatggaggtcatcttacccatggaacatcagttaacttttcaggcaaactttttgatgctgcacaatatggcgtgaatccagaaacaggattgattgattatgacgaagtagaatctttagcaaaaaaacacagaccaaaattacttattgccggattttccgcatactctcgagtgcttgattggcaaaaatttagggatattgctgattcagttggcgcctattttcttgtggatatggcacacgtctctggtttgatagccagtggccactatccaaatccagttggtatagccgatgtggttacctcaacaactcacaaaacattgagagggccaagaggaggtattatccttgccaaagaaaatcctgatttgaccaaaaagttcaattctttagtttttcctggaactcagggcgggccattaatgcatgttattgccgcaaaagccgttgccttcaaagaggcattgagcccagaatttaaggattatcaggagcgggtaattcaaaacgcacaaatgatgtctcagactcttatcgatagaggttacagtattgtgtcacgcggcacagacaatcatttagttttagtaagcctaattgataaaggcttaactgggtag

SEQ ID NO: 228444 - DNA, 472 bp, Unknown
  Bacterial polypeptide expressing nucleotide sequence isolated from the Sargasso Sea
atgtctattgttaaagataaagacaagaaaatttacaatatcattcagtctgaattaaatagacaaaatggttatttagagctcattgcatctgaaaatttcactagtaaagccgttcttgaaaccgcaggatctgttttaacaaataaatatgctgagggatatcctggaaaaagatactacggtgggtgtgtacatgtagatgaggctgaaaatttagcgatagatagagcaaagagacttttcaaagcagagtatgtaaatgtacaacctcattcaggttcatctggagtaatgggtgtttattttgcctttttacaacctggagactgtattatgggtctagatttaagtcatggtggtcacttaacacatggatcgaaagtgagcttttctggacaaatttataattctgcaacattcaaagtaaaaaaagaatcaggattggtagattttgatgatttattaaaaa

SEQ ID NO: 228445 - DNA, 1167 bp, Unknown
  Bacterial polypeptide expressing nucleotide sequence isolated from the Sargasso Sea
ccgaaaatatggcaagcccaagagtactggaatgccagggatctgtgctaacaaataagtatgcggaaggctacccagcaaaacgttattatggtggatgcgaatttgttgatgttgcagaacagcttgcaattgatagagctaaaaaactgtttggagctgattgggcaaatgtacaaccacattctggttcgcaagcaaatggagctgtttttcatgccttactagaacctggtgatacaattatgggtatgagtctagcgcacggcggtcatctaactcatggagcaacagtaaatgtttcgggccgaatatataatgctattcaatatggtttgaatgctgatacaggcgagattgattatgatgaggcagaaaaattagctttagaaaataaaccgaaattaattattaccggtttttcagcatattcacgcattcttgattggcaaagatttagagatattgcggataaggttggtgctttattactatctgatattgctcatattgctggccttgttgctgtcggcgaatatccaagtccaattcaaatagctgatataacaactacaacaacacataaaacgttacgcggtccacgttccggtttgattatgggtaagagtaatgaggaaatagaaaagaaagttaattttactgttttcccttcataccaaggtggacctctgatgcatataattgcagcaaaagccgttgcatttaaagaagcgatggaacccgaattcaaaacttatattcaacaagtaaaagagaatgctaaagcaatggctgaaacctttgttgagcgcgggctaaaaattgtttctggcggaactgataatcatttgtttcttgttgatatggttgacaaaggattaaccgggaaagatgttgatgctgcattaggttcggctaacataactgttaataaaaatgctgttccaaacgatcctcaatcgccttttgttactagtggcatcagaataggtacaccgtcaatcacaacaagaggttttgataaatcagatgcgattcaggttgcaaactggtgttgtgatattatggataacatgggcgatgattcagtaataaagcgtgtgaaagctgaagttttggaactttgtaagagccgcccattatatgaattcaatcaggatctgtaga

SEQ ID NO: 228446 - DNA, 700 bp, Unknown
  Bacterial polypeptide expressing nucleotide sequence isolated from the Sargasso Sea
aatgtcgtcagtaactaaaattaaaagaatatctagtaactttttcgagagagatttaaaagactcggatagggatctctttgactcaatttcacaggaatttgtaagacaaaaaaatcatattgaattgattgcatctgaaaatattgtttctagagctgttttagaggcccaaggttcagttttaacaaataaatatgctgagggttattctggcaaaagatattatggaggttgcgaatttgttgatatttcagaaaatttagcgatagagagagcaaaaaaactttttaattgtaaatttgcaaatgtacagccgcactcaggcgcacaagctaatggagctgtatatttagctttaattaaaccaggagacactatattaggtatgagtttgaattctggtgggcatttaacccacggagcaaaaccagcacaatcaggtaaatggtttaacgcagtacactatgaggttaaagaagacacaggtttaattgattatgaaaatgtagaaaagttagctttagaacataaaccaaaattaataattgctggaggaagtgcttattcacgaattataaattttaaaaaattcaaggatatttgtaaaaaagttaatgcttacctgttagttgatatggctcacttttccgggttagtggctggtggtgcttacccccaatcctttagaatatgctga

SEQ ID NO: 228447 - DNA, 772 bp, Unknown
  Bacterial polypeptide expressing nucleotide sequence isolated from the Sargasso Sea
atgtctagtgaaagtaaatatataaataatcaataccaagatttttttgaaaaaagtttaaaacaaagtgatccagatatttataaagcaattaatgatgaattaataagacaacaaaatcatattgaattgattgcatctgagaatatagtttcgcaagcagtacttgaagcacaaggttctgttttaacaaacaaatatgctgaaggttatccaggaaaaagatactataatggttgtgagcatgtagatgtagctgaggaattagcaatagaaagattaaaaaaacttttcaattgtaaatttgcaaatgcacaacctcactctggagctcaggctaatggtgctgtatttttagctttattaaaaccaggcgatacgtttatgggaatgagtttaaattctggtggacatattacacatggattaaaaatatctatgtcgggaaaatggtttaatgcaattggatacgatgttgataaacaatctgaattgattgattatgataatgttgagaaattagctttagaacataaacctaaattaattattgctggtggtagtgcttattcacgagtaattgactttaaaagatttagagaaatagctgataaaattggtgcttatttcatggttgatatggcacatttttcaggtttggttgctggtaaagggtatccaaatccagttgaccatgctcacgttgttacatcaactacgcataaggtatttagaagtgctaggggcggtataattttaactaatcacgagg

SEQ ID NO: 228448 - DNA, 491 bp, Unknown
  Bacterial polypeptide expressing nucleotide sequence isolated from the Sargasso Sea
tatgaactcatcaaaaagcgacaatatattttcaaataatcaatcaataaaagattatgattcggaactttggctatctttccaaaaagaagctgaaagacaagaagatcatattgagttaattgcatctgaaaactatgcatctaaaagaattcttgaagcccaaggatctctacttactaacaaatatgctgaaggctatccttcaaaaagatattatgggggatgtgaaaatgtagacattgcagaaaatttagcaattgaaagagctaaaaaactatttaaagcagattatgcaaatgttcaaccacattctggttcatcagcaaatgcagcagcatatttagcacttcttgaaccaaatgatactattcttggcatgagtcttgatcatggaggacatttaactcatggctctaaagtaaatttctcaggcagaaattataaaagtgttcaatacggtttacaccctgaaacaaatgacattaatt

SEQ ID NO: 228449 - DNA, 806 bp, Unknown
  Bacterial polypeptide expressing nucleotide sequence isolated from the Sargasso Sea
cctgcattccggatatttcacccaaagcctggaatccattgatccgcaggttttccaatctcttacagcagaagagcaacgtcagcaggaggggattgaactgatcgcctcagaaaatctcgtcagccgtgcgactctggaagccctgggcaccgcgattgtcaacaaaaccgtcgagggctatcccggagcccgctattatggcggctctcaaaatgcagaccgtctggaaaacctggcgatcagtcgggctgaacaactttttgaatgcggatatgccaacgttcagccacattccggaagccaggcgaacctggctgtctttctggctttcttgaaaccaggggataccgtgctcagcatggacctttccgcaggaggacatctcagccacggatctcctgccaatctgaccggtaagtggttcaatatcatacattatggagtttcaaaagaggatggaaggattcaaatggatcaggtctgggatctggctgatgcacatcaacctaaattaatcatctgcgggggatcggcctacccgagaaccattgactttgaaggattccggaaaatcgctgatgattgcggtgccaagctgattgcggatatggcccatttcgcaggactggtcgcgggaggagttcatcccagcccgattccccatgcccatgtggttacggcaacgacttacaaaaatctgcgtggagtccgcggagggttgatcctttctaaggaaaccgattcagaaagaaaactcaacagcgctgtttttccgggggttcagggatcagtgatcttgaatg

SEQ ID NO: 228450 - DNA, 934 bp, Unknown
  Bacterial polypeptide expressing nucleotide sequence isolated from the Sargasso Sea
tggagacactatattaggtatgagcttaaattcatgtggacatcttactcatggagctaaaccggcgcaatctggaaaatggtttaatgcgattcactatgatgtaaataaggagacaggactaatcgattatgaaaatatagaaaaattagctttagaacacaaaccaaaattaattatagctggtggaagcgcttactcaagagtaatagatttcaaaaaatttagaaatatttgcgacaaggttaacgcctacctacttgttgacatggctcatttctcggggttagttgcgggcggagtttatcctaatccaactgaatttgctgatgtagtaacttcaacaactcacaaagttttaaggggcccaagaggaggaattatcttaactaacaaagaagatttaattaaaaaatttaatagtgcaatttttcctggactacaaggagggcctctcatgcatgttattgccgctaaagcagtttgttttaaagaagctttatctgaagattttaaaatttattcaaaagatgtaattaacaatgcaaaaactttatctaataagttgattgaaaatggatttaaaatattttctgggggcacggatacacatttgatgcttgtagatttaagagaatttaatgttacaggtaaagatgcagaagcttcattaggaagatcaaatataacatgtaataaaaacggaattccatttgacactcaaagtccaatgataacgtcaggtattagacttggaacgccagcgtgcactactagaggatttggttctaatgaatttattttgattgcagatttaattacaaaagtagtaaaaggcttaagcaaaaatcccgaaaataattcaaaaatagaaaaagaggtgcaaaaagaggttattgatctttgctcatctttccctatatatagtaattaa

SEQ ID NO: 228451 - DNA, 1321 bp, Unknown
  Bacterial polypeptide expressing nucleotide sequence isolated from the Sargasso Sea
atgggcgatataaatgagccctattcatttataaaagataaagattctcaattatataatattttattagatgaggtatctagagaagaagaaacccttgagctaattgcatctgaaaattttgttagttaccccgtattagaaatggctggatcagtcatgacaaataaatatgcagaagggtatcctggagcaagatattatggcggatgtgaatttgtagataaagctgagaatttagctcgtgagagagcaaaaacattatttaagtgtgattacgctaatgtgcagcctcattcaggttctcaagcaaatatggcagtattgatgacatttatttcggccggagatacaattatgggcttagatttatctcatggtggccacctcacacatggaagctcagttaatttttcaggtcagctttacaatagcgtctcatatcaagttgataaggaaactggacgaattaattttactgatgttaaaaaaattgcaaaagaatataaaccaaaattaattatttgtggaggtagtgcctaccctaggcatgtggagtttagccattttcgtgaaattgcaaatgaggtaggagcttatttaatggcagatattgctcatccttccggattagtcgcaacaggcttacatccatctcctatgccacattgtgatgttgtcacaactacaacccataaaaccttacgcgggcctagaggcggtatgattatgatgggcaaagattttgaaaacaagtggggcattaaagcactcaagtctggtaggactaagcaagtttctgaattattagattcagcagtcatgcctggtgttcaaggtggccctttaatgcatattatcgctgcaaaggctcttgcttttggagaagcattagatccaggatttaaaatatatacccagaacattattaacaacgctaaaacaatggccgatgaattacttagtaaggactacaagttaatttctggtggcactgatactcatgtaattcttattgatcttacaaataaaaatattactggtaaatcagctgaaaaagcacttgagcaggcagggattactgtaaataaaaatatggtcccattcgatgaaagaagtccttttattactagtggtatgcgtataggtactcctgcaattactaccagaggtatgggtgaagtagaaatggttcaaatcgtagagcttattgatgaagttatcaatgatattgaaaatgaaactctaatcgctaatgttaaatctaaagtaaaatctttgtgtaaatctttcccaatttaccgtgagcttcacgaataat

SEQ ID NO: 228452 - DNA, 1168 bp, Unknown
  Bacterial polypeptide expressing nucleotide sequence isolated from the Sargasso Sea
gacagcaaccaacatattgagttaattgcttcagaaaatatagtttctcaagctgtgttggaagcccaaggttcagtattaacaaacaaatatgcagaaggttacccaggtaagcgttattacaacggttgtgaacatgttgatgtcgcagaaaatcttgcaaatgaaagactaaagaaattattcaattgtaaatttgcaaattctcaacctcactcaggcgcacaagctaatggtgctgtatttttagctctattaagtccaggtgatacatttatgggaatgagtttaaattcaggtggacatataactcacggtttaaaaatttcaatgtcaggcaaatggtttaatgcaatcagttatgatgttgataaaaaatctgaacttatagactatgataatgttgaaaaacttgctttagaacataaaccgaaattaattatagctggtggaagtgcttactcaagagtaatagattttaaaagatttagagaaattgctgataaagttggtgcttatctcatggttgatatggcacatttttctggcttagttgcaggaaaagggtatccaaacccatgtgatcatgctcatgttgttacatcaacaacacataaagtttttagaagtgcaagaggtggaataattttaactaatcatgaggatcttgcgaaaaaatttaacactgcagtttttccaggataccaaggtggtccattaatgcacgttatcgcagctaaagccgcaggttttctagaagctttacaaccagaatttaaagattacataaagtcagtcctagccaatgcaaaaatgttagctgaaactttaaaaaataatggttttaaaatttattctaacggaactgatacacatttaatgttggtagatttgagaccttacaatgttaaaggtaatcttgctgctgaaagtctttcaagagcaaacattacttgtaacaaaaatggaattccttttgatactgaaaagccaatgattacatcaggtataagattaggaactcaagcagctactacacgtggttttggtttaaatgaatttaaaactgttggtgaattaattacaaaaactttaaaaggattatccgaaaatccaaatgataacagcaaagtagaaaatgaagtaaaaaatgaagttatttctttaa

SEQ ID NO: 228453 - DNA, 514 bp, Unknown
  Bacterial polypeptide expressing nucleotide sequence isolated from the Sargasso Sea
agaaaagaaattaaattcagcagtttttcctggatcacaaggtgggccgcttatgcatgttgttgctgctaaagctttatgcttcaaagaagctttagaccctgagttcaaaatttatattaatcaagtaatggaaaatgcaaaaactatggccagtacattaatgtcaaatggtatagatattgttagcaatggaacagaaaatcatataatacttgttgatctaaggaataaagggatttcaggaaaagatctcgaaagagtccttggatctgtaaatattactgttaacaagaattctgttccaaatgatccggcctcaccttttgttacttcgggtattagaattgggacacctgctgcaacaactagaggatttaaagaaaaagaaatcattcaagtaagtaattggatatcagatattattaatgattttagcaatgaagaactccaaaaaaatataaaaggggaagtgcataatctgacgagtaattttccagtatataatgtatag

SEQ ID NO: 228454 - DNA, 1027 bp, Unknown
  Bacterial polypeptide expressing nucleotide sequence isolated from the Sargasso Sea
ttttaaaatgaataacgataaagaaatctttgatttaatacagaaggaaaaagaaagacaaattaatggtcttgagctgattgcatctgaaaattttgccagtgagaatgttatgaaagctaccggttcagttctaacaaataaatatgctgaaggttatcctggaaaaaggtactatggtggatgtgagatagttgatgaagttgaaaatatcgctatatcgagactaaaagatttattttctgttgaatatgctaatgttcagcctcattcaggttcccaagcaaatacagctgtttttgatgcatttttaaaacctggagataaaattttaggtttagatctatctcatggaggtcatttaactcatggctctccagttaacttttctggaaaaatatataattcaagtttttatactttaaataaggatggagtttttgactatgaacagatactacaaagagcaaaagaggaaaatccaaatttaataattgttggagcttcagcgtattcaagagacatagacttttcaaaatttagagaaattgcagatgaagtaggaagtattttacatgcagatatagcacatccatcaggtctaattgcaaaagggttactatctgatcctgttccttactgtgacgtaataacttcaacaacacacaagacgcttagagggccaaggggaggtataataatgatggggaaagattttgataatccatttggcttgaagtttaaaaatggtaatcttaaaaaaatgtcatctgttttagatggagctatttttcctggtaatcaaggaggtccattagagcatgttatagctgctaaagctgttgcatttggagaagctctagactcttcttttaaagattatgcaaaacaaattcagaggaattctaaaaaattatcttctgatttagtagatctcggttttaatattgtttcaggaggtaccgataatcatcttctgttaattgatttaaggaataagaatgtaaccggaaaagatgctgaaacc

SEQ ID NO: 228455 - DNA, 820 bp, Unknown
  Bacterial polypeptide expressing nucleotide sequence isolated from the Sargasso Sea
ctgatcgattacgatgaagttgagagactagcaaaagaacataaaccaaaaatgttgattggtggtttttcagcatattctcaaataattgactggaagagaatgtctgagattgcaaaatcagtgggagcgtatttccatgtcgatatggcccatgtttctggattagtagctgcgggagtatatccaaatcccgtcccttatgcagatgtcgtaacttcgacaacacataaaacattgagagggccaagaggcggaattattatttgtaaagcgaacgaagaacttgagaaaaaatttaattctctagtattccctggtactcaaggtggtcctttaatgcacgttattgctgctaaagctgttgcatttaaagaagcactcgaacctgaattcaaagactatatgaatcaagttatcgctaatgcaaatgttttagcacagacaatgatggaacgcggttttgaaattgtatctggtggaacaaaaaatcatttaatgttagtgagtttagtcaagcaaggcctgactggcaaagctgcagatgctgctctacatagtgcaaatataacggtaaataagaactcagttcctaatgatcctcagtcaccttttgttacgagcggtattcgacttggaacaccagctataacaactcgtggttttaaagagactgaaacaaaaatattaggtaatctgatatgtgatgtcctagataatatagataatgaagaggagattaaaaaaatcaaggaaaaggttcttaatctatgctcacaattccctgtatattcgtctagtaaacaagcagtagcttaag

SEQ ID NO: 228456 - DNA, 709 bp, Unknown
  Bacterial polypeptide expressing nucleotide sequence isolated from the Sargasso Sea
tatgatttcagatttgtttactaaaggaattaaagaagcagacccagaggtttataggactttaagccgtgaactagaaagacagcaaaaccaaatagagttgatagcatctgaaaatattgcttcaagatcaattttaaatgctcaaggttctgttatgaccaataaatatgcagaagggtatcctggtaaacgatattatggaggatgtgaattcgtagatcaagccgaagagattgctttagatagagttaaaaaactttttaattgtaaatttgcaaatctacaaccgcatagtggagcacaggcaaaccaagcagtttttctagctttacttcaaccacatgatactattttaggtatgtctcttgcgtcaggtggtcacctaactcatggagcaaaacctaatctatctggtaaatggtttaatgctgttcaatacggtgtaaaaaaagatggtaatgataaagatttaattgattatgatgaagttgaagctttagctttagaacataaaccaaaaatgataatagcgggagcctctgcctatcctagaacaatagattggaaaaaatttagagaaatatctgataaagtaggagcatattttttagttgatatggctcactactccggtttggtggctggtaaacaatatccaaatccgattgagcatgctcatgtagtaacttcaacaactcacaaactt

SEQ ID NO: 228457 - DNA, 1312 bp, Unknown
  Bacterial polypeptide expressing nucleotide sequence isolated from the Sargasso Sea
tatgtctagtgagagcaaatatttaaacgatcaatacaaaagtttttttgaagatagcttgtctaaaactgatccagatttatataaagcaattaatgatgaattacaaagacaacaagaacatattgaattaattgcttctgaaaatattgtttctcaagctgtattagaagcgcaaggttctgtattaacgaataaatatgctgaaggatattcaggtaaaagatattataatggttgtgaacatgttgatgttgctgaaaatttagctaatgaaagattaaagaaattatttaattgtaaatttgcaaactctcaacctcattcaggagcccaagctaatggagctacatttttagctttacttaaacctggcgatacttttatgggaatgagtttaaattcaggtggccatataactcatggattaaaaatttcgatgtctggaaaatggtttaatccaataggttatgatgttgataaagaatctgaactaattgattatgatcatgttgaaaaattagcattagagcacaaaccaaaacttataattgccggtggaagtgcatattctagagttatagattttaaaagatttagagaaatttgcgataaagtaggagcatatcttatggtagatatggcccacttttcaggattggttgctggaaaaggttacccaaatccgtgtgaacatgcacatgttgtaacttcaactacacataaagtttttagaagtgcaagaggtggcattatattaacaaatcatgaagatattgctaaaaaaattaatactgcagtatttccaggctaccaaggtggacctttaatgcatatcattgctgcaaaagcagcaggttttttagaagcacttagacctgaatttaaagattatataaaatctgttttagctaatgcaaaaattttatctgaaactttaaaaaataatggatttaaaatttattctggaggaacagatactcatttaatgttagttgatttaagaccttttaaagttaaaggcaatttagctgccgaaagtttatctagagcaaatataacatgcaataaaaacggtattccttttgactcagaaagcccaatgattacatctggtattagacttggatctcaagctgcaacaacaagaggttttggattaaaagaatttgaaatagtaggtaaactaattactaaagtaattgacgggttatctaaaaatccaaatgataatagtaaagttgaagatgaagttagaaaacaagttgttgctctttgttcatcatttcctatatataaaaatttaagaaaa

SEQ ID NO: 228458 - DNA, 1294 bp, Unknown
  Bacterial polypeptide expressing nucleotide sequence isolated from the Sargasso Sea
tatttaaatgatcaatataaaggtttctttgaggacagtttgtcaaaaactgatcctgaattatataaagctataagtgatgagcttaagagacaacaagaacacattgaattaattgcttcagaaaatattgtatctcaagctgtcttagaggcacaggggtcagttttaaccaataaatatgcagagggttaccctggtaaaagatattataatgggtgtgaacatgttgatgtggcagaaaacctagcaatagaaagattaaaaaaattatttgattgtaagtttgctaatgctcaaccacattctggcgctcaggccaacggcgctgtatttttagcattacttaaaccaggtgatacttttatgggcatgagtctaaattctggtggtcatataactcatggtttaaaaatttctatgtcaggtaagtggtttaacgccataggatatgatgtagataaagagtctgaacttattgattacgacaatgtagaaaaaattgctttagaaaataaaccaaaactaataattgctggaggtagtgcatactctagagttatagattttaaaagatttagagaaatagctgacaaagttggtgcttatctaatggttgatatggcacatttttcaggcttggttgctggaaaaggttacccaaatccatgtgaatatgcgcatgtagttacatctacgacacataaagtttttagaagtgcaagaggtggtattattttaactaaccacgaagatttagcaaaaaaatttaacactgctgtatttcctggttaccagggtggacctttaatgcatatcattgccgcaaaggctgctggtttcttagaagctttaaaaccagaatttaaagattatataaaatctgttctagctaatgctaaaattttatctgaaacacttaaaaacaatggctttaaaatctactcagggggcactgactcacacttaatgttagtagatttaagaccttttaatgttaaaggaaatttagcatcagaaagtctatcaagagcaaacattacatgtaacaaaaatggaattccttttgatagtgaaagtccaatgattacatcaggaattagacttggaactcaagcagcaacaacaagaggttttggattaaaagaatttgaaaaagttggagaattaataacaaaaacaatcaaaggactatcaaaaagtcccgatgataatagtaaaatcgaagatgaagttagagctgaggttgttgatttatgttcaaattttccaatttataaacatttaagataaa

SEQ ID NO: 228459 - DNA, 1318 bp, Unknown
  Bacterial polypeptide expressing nucleotide sequence isolated from the Sargasso Sea
aatgccaaaaattttagaaaatacacgtgaggattataaagattttttcgataatgatttatctaagaatgatcctgaactatataactctataaaacttgaacttaagagacaacaagagcatatcgaattgattgcttcggagaacattgtttccaaagcagttttagatgcacaaggatctattctgacaaacaagtatgcagaaggctatccaggaaaaagatattacggcggatgtgaatttgtagataaagctgaggatttagctttagaaagagtaaaaaaattatttaattgtaaattcgctaatgttcaaccacactcaggtgctcaagctaatggagcagtatatctagctcttttaaaacctggagatacaatattaggtatgagtttaaattctggtggtcatttaactcatggtgctaaagttgcacaatctggtaaatggttaaatgcttttcattatgaagtagataaagtaactggtttaattgattacgatcaggttaaggagttagcattaaaaaataaacctaaactgttaattgctggcggaagcgcatattcaagaataatagattttaaaaaatttagggaaatagctgatagtataggtgcttatctaatggttgatatggcacatttttctggtctggtagctggccatggatatccaaacccaattgattatgcagatgttgtaacttcaactacccacaaggtcttaagaggtggtcgtggaggaattattcttaccaacagagaagatctatataaaaaatttaattcagctgtatttcctggctaccaaggtggacctttaatgcacgttattgcagctaaagcagcagcctttcaagaagctcttaaacctgaattcaaagattacattaaagcagtgcttgctaatgcaaaaattttatctgaaactttgaaaaataatggttttaaaattttttctgggggaactgatacacatctcatgttagtagatttgagaccttttaaagttaccggaaaagctgctgaggtaagcttgtgcaattcaaatataacatgcaataaaaatggtattccttttgatactgaaaaaatgacaattacttcaggaataaggcttggatctcaagcagccaccactagaggctttggtctaaatgaatttcaaaaagtaggcgagttaattactaaagttgtaaaaggtctttctcaaaatcctaacgacaataaaaaaattgagtcagaagtgagaaaagaagtaattgatctctgttctaatttccctatatacaatcatttgtttaaaaattaa

SEQ ID NO: 228460 - DNA, 1273 bp, Unknown
  Bacterial polypeptide expressing nucleotide sequence isolated from the Sargasso Sea
aatgaatatccttcaaaatcttaaagaaagtgatccagtaatatcaaactatatcaactctgaaaaaaataggcaggaaactcatcttgagttaatcgcaagtgaaaatttcgcatcaattgccgttatgcaggcacaaggatccgtccttacaaataaatacgccgagggtttacctcaaaaaagatattacgggggatgtgaatttgttgatgaaattgaagaattagctattcagagagcaaaaaaattatttaatgcaaattgggctaatgttcaaccccatagcggagcacaggcaaatgctgctgttttcctaagcctacttaaacctggcgacacaatcatggggatggatttatctcatggtggacacctaactcatgggtctccagtaaatatgagtggtaagtggttcaatgcagttcactatggtgtaaataaagaaactagtgaattaaattttgatgaaataagagagatagcacttgaaacaaaaccaaaattgatcatatgcggatattctgcttatccaagaacaatcgattttgaatcatttagaaatattgcagatgaagttggtgctttcttaatggctgatattgcacacattgccggtcttgtagcaagtaaacttcacccaaatccaataccctattgtgatgtagtaactacgactactcataaaacattaagagggcctagagggggacttatcttatgtaaagatgcagaatttggaaagaaatttgataaatctgttttccctggaactcaaggtgggccactcgaacatattattgccgctaaagcagttgcatttggagaagccttgcagcgagatttcgttaattattcccaacaagtaataaaaaatgcaaaagttctagcttcaactttaataaatagaggtatcaatattgtgagtggaggcactgataaccatattgttttactcgatttaagaagtatcaatatgactggtaaaattgctgacttacttgtaagtgaagtgaatatcactgctaataaaaatactgttccatttgaccctgaatcaccctttgtaaccagcggtctaaggttgggaactgctgctctaactactagaggatttaatgagaatgcttttgctgaagttggcgaaattattgctgatagattacttaatccagacgattcactgattgaaagtaaatgtaaagaaagagtattaaccttatgtaatcattttcctctttatgaaggcaaacttgaagcatcaattaaatga

SEQ ID NO: 228461 - DNA, 826 bp, Unknown
  Bacterial polypeptide expressing nucleotide sequence isolated from the Sargasso Sea
tcaatatggtctagatccttcaactggagagatagattacgatgaggtagaaaaattagctaaggcacataatccaaaaatgatagttgcaggattctctgcatactcaggaatagtggattgggaaaaatttagagaagttgcagacgctgtaggagcttacttattagttgatatggctcatgtttctggactcattgcagctgatgagtacccttcacccataccatttgcagatgtagtaacaactacaacacataaaactttacgaggccctagaggtggattaattcttgctaaagaaaacgaagaaattcataaaaaacttaattccggtatatttcctggaactcaaggtggtcctttgatgcatgttatagccgctaaggctgtttgttttaaagaagccttagagccgggttttaaagattatcaaaaacaggttaagcttaacgctaaaaaaatggcagctacttttatggaacgtggaattaatattgtctcaaatgggactgaaaatcatatgttccttgtagaccttatagataaagggctgactgggaaagaggctgatgctgctcttgggaaagcaaatattactgtcaataaaaatgcagtccccaatgacccggaatcaccttttgtaaccagtggtctaaggattggaacgccagcatcaacaacaagaggatttaaagagaccgaagtgtctgaagtcgcttcttggatatgcgatattctggatgatataaaaaacgaggaaataaatagagaagtgaaaaacaaagttaaagaactttgttctagattccctgtttattcttaa

SEQ ID NO: 228462 - DNA, 1094 bp, Unknown
  Bacterial polypeptide expressing nucleotide sequence isolated from the Sargasso Sea
aatggtagataaagaaatattagatcttgttttaaaagaaaatattagacaaacgaatggtattgaactcatagcatctgaaaattttaccagtcccgatgttatgaatgttactggctctgttcttactaataaatatgctgaaggataccctacgaaaagatactatggtggctgtgaagtagttgataaaatagaggaaattgcaataaatagagcaaaaaaactttttggatgtgaatatgcaaatgttcaacctcattctggttcacaagcaaatacagctgtttttcatgcttttttatctcctggagataaaattttaggtttcgatttgtcccatggcgggcatctaactcatggatcccccgtaaacttttcgggaaaattatataatgcaaatttttatggtgttgatagaaagactggagtattagattatgatgaaattgaatcaatagcaaaaaaagttaaaccaaaaatgataattgctggggcatcagcctattctagagatattgactttaaaagatttagaagtatagctgataaaatgggatcatttttacttgccgatatttctcatccctcaggaatgattgctgctgggctattaaataatccagttcctcattgtcatgttattacaactacaactcataaaacgttaaggggtccaagaggtggtcttatactcatgggtaaagattttgataatccttttgggcaaaaattaaaaaatggttctttaaaaaagatgtcaaatttgttaaatatggcagtatttcccggaaatcaaggaggacccttaatgcatgttatcgctgcaaaagctatagcttttagggaggcactttctcctttatttatagattatcaaaaaagagttgtagaaaattctcaaatgatggctagtttatttaataaattaggatataagattatttctaatggaactgacaatcatttaatgttaattgatctaagaaataagaatatttccggaaaagaagcagaagaggcactggtgagagcagaaattacagtgaataaaaatatggttccttttgatgataaatcaccttttcgtaaca

SEQ ID NO: 228463 - DNA, 1079 bp, Unknown
  Bacterial polypeptide expressing nucleotide sequence isolated from the Sargasso Sea
gatgttcaatagcggtaaaagcttggcagaatttgatccggaaataagcgcagctattgaagctgagagaactagacaagaggaacatattgagttaatagcatctgaaaatcacacaagtccttttgttatggaagctcagggatcggtgttaacaaacaagtatgcagaaggatacccctctaagagatattatggggggtgcgaaaacgttgacgttgtagaggagttggcaataaaacgagccaaagagttatttggtgccgattacgcaaatgttcagcctcattctggttcgcaagcaaatgcttcggcttacatggcgctaatgaagccgggagatacattgttgggcatgagtcttgctgatggtggacacttaactcatggtgcaacagtcagcttctcgggccggatatataactcggttcaatacggtttgaatggtcaaacaggagaaatcgactacgacgaagttaatcgacttgcacatgaacaccggccgaaattaattgttgctggcttttcggcctactcgaaagtggtagattggcaaaaatttagagacattgcagatgagataggtgcgtactttttggttgatatggcacacgtatctggtttggttgcagctggagtgtacccaagtccagtaaatatagccgatgtaaccacttctaccacccataaaaccttgcggggtccccgtggcggaataatacttgctcgttcaaaccctgagttggagaagaaattgaatttctctgtgttcccggaaagccaaggaggccccttgatgcatgtaatagctgctaaggcgatatgttttaaagaggctatgggagaaaattttagaaagtatcaggaacaaacagtaaagaacgcccaggttatggcgaacgggttcattcgacggggctttgaggtagtttctgatggaacagacgatcatttatttcttcttagtttgattaagcagggacttactggaaaagatgcggatgccgcgttaggacgcgctaatattacggtaaataaaaacgcagttccgaatgatcctaacccaccgtttgtgacaa

SEQ ID NO: 228464 - DNA, 1255 bp, Unknown
  Bacterial polypeptide expressing nucleotide sequence isolated from the Sargasso Sea
atgctgaaaaaagatatgaatatcgcagattatgatccggaactgttcaacgcaattcagaacgaaactctgcgtcaagaagagcatattgagctgattgcttctgaaaactacaccagtccacgcgtgatgcaagcgcaaggttcacaattaaccaacaagtacgccgaaggttatcctggcaagcgctactacggtggttgtgagtatgtggacgtagttgaaaccttagcgattgagcgtgcaaaacaactgtttggtgcgacttacgcaaacgtacaacctcattcaggttctcaagcaaacagcgccgtttacatggcattgttaaaaccaggcgataccgttttaggtatgaaccttgctcacggtggtcacttgacccacggttcacctgtaaacttctccggtagactgtacaacatcattccttacggcatcgatgaatcaggcaaaatcgactacgacgaaatggaacgtctggcggttgaacataagcctaagatgatgatcggtggtttctctgcttactcaggcatcgttgactgggcaagaatgcgcgaaatcgcagacaaaatcggtgcttacctgtttgttgacatggcgcacgttgcgggtcttatcgccgctggtgtgtatccaaacccagtgccacacgcgcacgttgtgacgtcaaccactcacaagaccttagccggtcctcgtggcggtatcattctgtctgctgccgatgatgaagagttatacaaaaagctgaactctgcagtattcccaggcggccaaggtggtcctctgatgcacgttatcgcgggtaaagcggtagccttcaaagaagctttagagccagagttcaaagcttaccaacaacaagtagttaagaatgctaaagccatggttgaagtgttcttagagcgcggttacaagatcgtttctggcggtactgacaaccacttaatgctggtggacttaatcggtcgcgacctgacgggtaaagaagctgatgccgctttaggtagcgcgaacatcacagtaaacaaaaactctgtgccaaacgatccacgttctccattcgtgacctctggtgtgcgtatcggtacgcctgcgatcactcgccgtggctttaaagaagctgaagcgaaagagttaaccggttggatctgtgacatcctcgacgatgcccataacccagcggtcatcgagcgcgtaaaaggccaagtattggcactgtgcgcccgtttccctgtttacggttaat

SEQ ID NO: 228465 - DNA, 1264 bp, Unknown
  Bacterial polypeptide expressing nucleotide sequence isolated from the Sargasso Sea
tatgacttttttttcatctccacttcaagaaatcgataacgaaattcatgaagcaataaacaaagaactttcaagacaacaaaatcagattgagttaattgcatcagaaaatatagtttcaaaagccgtattagaagctcaaggatctgtattaacaaataaatatgcagaagggtatacggctgcccgttattatggaggctgtgaatttgttgatattgctgaggaccttgcaattcagagactaaaaaaactctataaatgcgaatatgctaatgtgcagcctcattcaggagcgcaggctaatggcgcggttatgttagctctaataaaaccaggagatacaattttaggtatgagcttggatgctggtggacatttaactcatgggtcagcaccatccatgtcaggaaaatggtttaatgcagttcagtatggattggatgatgaagggttgataaattatgatgaagttgagtcgctcgcaaaagaacataaacctaaaataataattgcaggaggaagtgcttactcgagaattatagacttcaaaagatttcgtgaaatttgtgacttggtaggagcatatctgcatgtagatatggctcacttttcaggattagttgcagctgaagagtatcctaatcctatagaatttgcagatgttgttacttcgacaacccacaaaactataagaggtgctagaggtggcatgatactttctaataataaagacttaggcaaaaaatttaattcagctgtattcccaggttatcaaggtggacctctaatgcatgtaatagcaggtaaagctgttgcctttggtgaagctctaaaaccagaattcaaagaatatataaaacaagttattaaaaatgctcaaactcttagtcaaacactagtagatggtggtctcaaaattgtttctggaggtacagacacgcatctaatattagttgatttaaccccaatggacctgacaggcgatgcagcttcaacaagtcttgaggaagctcacattacatgtaataaaaacggaataccaaaggacccgaaacccccaaaaataacttctggaatcagattggggactcctgctgctacaacaagaggttttaaagaaaaggaatttgaaactgttggaaatttaatccttgaaacgttatcaggattaaaacaaaacccagatgataatagtaaagttgaaaaaatagtaaaagagaaagtgataaatctctgtaatcaatttccaatttataattag

SEQ ID NO: 228466 - DNA, 1021 bp, Unknown
  Bacterial polypeptide expressing nucleotide sequence isolated from the Sargasso Sea
tatggaaaatactggagcattaaacacagaattatttgagactgatgacgagattgcatctttaattaataatgatttagaacgtcaaaactctcatattcaccttatagcttcagaaaattttgcttcaaaagccgttatgcaagcatcaggatcaatccttaccaacaagtactcagaaggatttccaggaaaaagatattacgaaggatgtgagactgttgatgaaatcgagcaactagcaatagatagagcttgtaaattatttgaggcagatcatgcaaacgttcaaccccattctggatcctcagcaaatatggcagtgtatctgaacttactagaagctggagataccgttatgggcatggcactagatcaaggaggtcacttaacccatggatcaccagtgaatttctctgggagaatatacaactttgttggatatggattagatcaagatactgaattaatcgatatggacaaagtaaaacaattagctgaggaaactaagccaaaattattaattgctggatattcttcttattcacaaaatttggattacgcagcattccgagaaatagctgattcagttggtgcttattttatggttgatgcagcacacttcataggacttgttgcaggcaaagctgttgaaaatccaatgaaatacgctgacgtagttacagcaacaactcacaaagcacttagagggcctaggggtggaattattctttctactgaggaatttgcaaaaggtgtagacaaaaatatttttccaggagctcagggtggagctttaaataatcaaattgcagctaaagctgtttgtttcaaagaagcattgtccagtgagttccaagactacacaaaacaaattctaaaaaatgcttcagctctatctgattcctttataaatgaagggctaagagttgtcagtggaggtacaaccaatcatattgtattagtagatactggaagtgttgatgaagaattgactggaaagatgcaggaacgttattaa

SEQ ID NO: 228467 - DNA, 952 bp, Unknown
  Bacterial polypeptide expressing nucleotide sequence isolated from the Sargasso Sea
tatgagctttttttcttcaccacttaaggatatcgataatgaaattcacaaggcaattaatttagagcttgataggcagcaaaatcagatagaattgattgcttctgaaaatatagtttctaaagctgttcttgaagcccaaggttccataatgacaaataagtatgcggaaggctatgcaagttctcgatactatggtgggtgcgaattcgttgatattgcagaagaccttgcaataaaaagacttcaaaaattatataaatgtgaatatgcaaacgttcagcctcattcgggtgcccaggcaaatggagcagttatgctagctctgattaagccaggtgacactattcttggaatgagtttagatgccggtggacatttaacacatggctctgccccgtctatgtctggtaagtggtttaatgctgtacaatacggcttagaagacaatggactaattgactatgatgaagttgaaaggttagcaaaggatcacaacccaaaaattattattgccggaggaagtgcttattcaagaattatagattttaaaaaatttagagagatttgtgatcaagttggtgcatttcttcatgtagatatggctcatttttcaggcctggttgctgctgaggagtatccaaatccattagaatatgctgatgtagtaacttctacgactcataagactatacgaggggcaagaggaggtatgattttatcaaacaatttagaactaggtaaaaaatttaattccgcagtatttcctggttatcaaggcggcccattaatgcatgtgattgctggtaaagctgtagcttttggcgaagcattgaaaccagaatttaaggaatacattaaacaagtaataacaaatgccaagacattaagtgacactctagttagcggaggattaaagattgtttctggtggaactgatactcatttaatt

SEQ ID NO: 228468 - DNA, 1072 bp, Unknown
  Bacterial polypeptide expressing nucleotide sequence isolated from the Sargasso Sea
tatgtctagtgaaagcaaatatttaaacgatcaatataaaagtttttttgaagatagtttatctaaaactgatcctgatttatttaaagcaattaatgatgaattacaacggcagcaagaacatattgaattaattgcatctgaaaatattgtttctcaagctgtactagaagcacaaagttctgtattaacaaataaatatgccggaagttattcgggtaaaagatattataatggatgtgaacatgtagatgttgctgaaaatttagctaatgaaagattaaaaaaattatttaattgtaaatttgcaaattcacaacctcattcaggggcccaagctaatggtgctacatttttagctttacttaaacctggtgatacttttatgggaatgagtttaaattctggtggccatataactcacggattaaaaatttctatgtctggaaaatggtttaaccctataggttatgatgttgataaaacatctgaacttattgattatgatcatgttgaaaaattagcattagagcataaacctaaacttataattgcaggtggaagtgcatattctagagttatagattttaaaagatttagagaaatatgcgataaagtgggtgcatattttatggtagacatggctcatttttcaggtttagttgctggaaaaggttatccaaatccatgtgaacatgcgcatgttgtaacatcaactacccataaagtttttagaagtgctagaggtggtattattttaacaaatcatgaagatatttctaaaaaaattaacactgcggtttttcctggttaccaaggaggacccttgatgcatattattgcagcaaaagcagcgggttttcttgaagctttaagacctgagtttaaagattatataaaatctgtattagctaatgctaaaattttatctgaaactttaaaaaataatggttttaaaatttattctggaggcacagatactcatttaatgcttgtagatttaagaccttttaaagttaaaggaaatttagctgcagagagtttatctagagcaaatataacatgtaataaa

SEQ ID NO: 228469 - DNA, 1249 bp, Unknown
  Bacterial polypeptide expressing nucleotide sequence isolated from the Sargasso Sea
tatgtttgatagagcccaaagcaccatcgccaacgtcgatcctgaactctggagcgtcatccagcaggaaaaccgccgtcaggaagagcacatcgaactgatcgcgtcggaaaactacacgagcccggccgtgatggctgcgcagggctcgcaactcaccaacaagtacgccgaagggtacccgggcaggcgctattacggcggctgcgaatacgtcgacatcgccgagcagctggcgatcgaccgcgtcaagcaactgttcggcgccgaagccgccaacgtgcagcccaactccggctcgcaggcgaaccagggcgtgttcttcgccatgctcaagccgggcgacacgatcatgggcatgagcctcgcgcacggcggtcacctgacgcacggttcgccggtcaacatgtcgggcaagtggttcaacgtggtgagctacggcttgaacgaagctgaagacatcgactacgaagccgccgagaagctggctcaggaacataagccgaagctgatcgtggcgggcgcctccgcattcgcgctgcgtatcgatttcgaacgcctgtcgaagatcgccaagtcggttggcgcgtatttcatggtcgacatggcgcactatgccggcctgatcgccgcgggcgtctacccgaacccggtgccgcacgctgatttcgtcaccaccaccacgcacaagagcctgcgcggcccgcgcggcggtgtgatcctgatgaaggccgagttcgaaaagcagatcaactcggcaattttcccgggcattcaaggtggtccgctgatgcacgtgatcgccggcaaggccgtcgcgttcaaggaagcactgtcgcctgagttcaaggcctatcagcaacaagtcgttgagaacgcgcgcgtgctggctgaaacgctggtcaaacgtggtctgcggatcgtctcggggcgcaccgaaagccacgtgatgctggtcgatctgcgcgcgaagaagatcaccggcaaggcagcggaagctgcgctcggcgcggcgcacatcaccgtcaacaagaacgcgattccgaacgacccggaaaagccgttcgtcacgagcggcgtgcgtctcggttcgcccgccatgaccacgcgcggcttcggcgtcaaggaagcggagcaggtgggtaacctgatcgccgacgtgctggacaacccggaagacgcagccacgatcgaacgcgtgcgtgcacaagtcgctgagctgacccagcgcttcccggtctaccgttaa

SEQ ID NO: 228470 - DNA, 1282 bp, Unknown
  Bacterial polypeptide expressing nucleotide sequence isolated from the Sargasso Sea
atgaaatcttctaaaagtgatagtgttttctctgataaaagctctataaaggactttgataaagatctatggttatcttttgagaatgaatcaaaaagacaagaagatcatattgaattaattgcgtcagaaaattatgcatctaaaagagtgcttgaagcccaaggatcgattcttactaataaatatgcagaaggatacccatcaaaaagatattatggaggttgtgagaatgttgatattgcagaaaatcttgcaattgaaagagcaaaggaattatttaatgctgattatgcaaatgttcaaccacactctggttcgtctgcaaattcagcagcatttttagcattattagagcctaatgacactattcttggaatgagcctagatcatggagggcatttaacccatggttctaaagtaaatttttctggtagaaattataaaagtattcaatacggacttcatccggaaacagatgatattaattatgatgaagtcagaactttagcgaaaaaacataatccaaaattaattattgctggcttctctgcattttctggaattcttgattggaaaaaatttaaagatattgctgaagaaactggagctttattgcttgttgatatggctcatgtttctggtttggttgctgcaggcctatacccctctccaattccatatgctgatgttgtaacttctaccacccataaaactttaagaggaccaaggtctggaattattcttgcaaagaaaaatgaagaaatagaaaaaaaattaaactctgcagtatttccaggatctcaaggaggtccattaatgcatgtcattgctgcaaaagcaatatgttttaaagaagcattagatcctgaatttaaaatctatactcaacaagttatggataatgcaaaacttatggcagagactcttatctctaataatattgatattgttacaaatggaacaaaaaatcatattgttttagtagacttaagaaataaaaatatcagtggtaaagatctagaaagtaccttgggctgtgtaaatataacagtaaataaaaattctgtgccaaatgatccagcctcgccatttgtaacatctggtataaggattggaactccagctgttacaacaagaggctttaaagaagaagaaattataaaaattagcaactggatatcatccattattaatgattttgataacgttgaattgcaaaataaaattaaaaaagaagtccataatatgacacatgaatttccagtatataatttataaa

SEQ ID NO: 228471 - DNA, 580 bp, Unknown
  Bacterial polypeptide expressing nucleotide sequence isolated from the Sargasso Sea
aatgaatatagccgacttcgatcctgaattagccgatgcaatgtctaaagaggttgagcgtcaagaacatcacattgagcttattgcctctgagaactactgtagcccacgtgtaatggaagcacagggttcgcagcttactaataagtacgcggaaggttacccaggcaagcgctattacggtggttgtgagcacgtagacgttgttgaacaacttgctattgaccgtgcaaaagcactttttggtgccgactacgcaaacgttcagccacacgctggttcacaggcaaactctgccgtattcatggcattacttgacgcaggcgacacggtattgggaatgagcctttctgaaggtggtcaccttactcacggttcacatgtaaacttctctggaaagacgtacaacgctgtacagtatggtttaaacaaagaaacgggtgaaatcgattacgctcaggttgaagcgctagctaaagagcacaagccgaaaatgataatcggtggcttctctgcctactcaggcattgttgattgggcgaaatttcgcgaaatcgcagatagcgtaggcgcatacttg

SEQ ID NO: 228472 - DNA, 1282 bp, Unknown
  Bacterial polypeptide expressing nucleotide sequence isolated from the Sargasso Sea
tatgaaatcttttaaaagcgacaatatcttttctaattctagttctattaaggactttgataaagacttatggaagtcttttaagaatgaatcagagagacaagaggatcatattgagttaatagcttcagaaaattatgcatcaaaaagagttctggaggcacaaggttcagttctaacaaataaatatgctgaaggatatccttcaaaaagatattatggaggatgtgaaaatgttgatattgctgaaaaccttgcaatagaaagagccaaagaattatttaatgcagattatgcaaatgttcagcctcattctggttcatctgctaacgcagctgcatttttagcattattaaagccaaatgacactattcttggaatgagtcttgatcatggaggacatttaacacatggttcgaaagttaatttttctggaagaaactacaaaagtgttcaatatgggcttcatcctgagacaaatgatataaattatgatgaagttagatctcttgcaaaacaatataatccaaaattaattattgctggcttttctgcattttctggtattgttgattggaaaaaatttagagatattgcagatgaagtaggtgcattttttcttgtagatatggcacatgtatcaggtctaattgctgcagatctttacccttcaccgattccttatgctgatgttgtaacttctacaacacataaaactctaagggggccaagatctggaattattcttgctaaaaaaaatgaagagatagaaaaaaaattaaattcagctgtttttcctggatctcaaggaggtccattaatgcatgtcattgcagcgaaggctatatgtttcaaagaagcactagatcctgaatttaaaagttatatccagcaggtgatggataatgcaaaaattatggctaaaactattatagagaatggtattgatgtcgttactaatggaacagaaaatcatatagttttggtagacttaagaaataaaaatattactggcaaagacttagaacatgtcctaggctcaattaacataacagttaataaaaactctgtaccaaatgacacagcttctccatttgttacttctgggattagaattggaacaccagcagtcacaactagaggttttaaagaaacggaaattatacaaattagtaattggatatcttcaataattaatgactttggtaatgttgaattacaaaataaaatcaaaaaagaagtacataatctgacaaatgagtttccagtatataatttataa

SEQ ID NO: 228473 - DNA, 1309 bp, Unknown
  Bacterial polypeptide expressing nucleotide sequence isolated from the Sargasso Sea
atgtctagtgaaaaaaattatataaatgatagctataaaagtttttttgaagacagtttgtcttcaaaagacccagacctttacaaggcaattcaagatgaactcttgagacagcaacaacatatagaattgattgcttcagagaatattgtttctcaagcagtattagaagctcaaggttcagtgctaactaataaatacgcagaaggttaccctggtaaaagatattataatggttgtgaacatgttgatgttgctgaaaatttagcaatagaaagattaaaaaaacttttcaattgtaaatttgccaatgcgcagccacactcaggagcacaggctaatggtgctgtatttttggcgctattaaaacctggtgatacttttatgggtatgagtttaaattcaggaggtcatatcactcatggtttaaaaatttcaatgtcaggaaaatggtttaatccgatagggtatgatgttgataaaaaatctgaacttatagattatgacaatgttgaaaaacttgccttagaacataaaccaaaattgataattgcaggtggaagtgcatattccagagttatagattttaaaagatttagagaaattgcagataaagttggtgcatatctaatggttgatatggcacatttttcaggtttagttgctggaaaaggatatccaaacccatgtgactatgctcatgtagtaacatctactacgcataaagtttttagaagtgcaaggggtggaataattttaactaatcatgaagaattatcaaaaaaatttaatacagcagtttttcctggctaccagggtggcccattaatgcacgttattgcagctaaagcagctggttttttagaagctcttcagcctgattttcaagactatattaaatctgtgttagcaaatgctaaaattttagcagaaactttgaaaaataatggttttaaaatttattctgatggaacggatacccatcttatgttggttgacttacgcccttacaatgtaaaaggtaacttagctgctgaaagcttatccagagctaatattacttgtaataaaaatggaattccttttgatacagaaaaacctatggtaacatccggtataagacttggaactcaagctattacaacacgtggttttggtttaaatgaatgtaagaaagtgggtgaattgattacaaaaactctcaaaggattatcagaaaacccagatgataacagtaaagtagaagatgaagttagaaatgaagttattgctttaacttcttcgtttccgatatataagaatctttaat

SEQ ID NO: 228474 - DNA, 1312 bp, Unknown
  Bacterial polypeptide expressing nucleotide sequence isolated from the Sargasso Sea
atgtcagaaacaacaaaaacagcacaatatgaagattttgaagatttcttttcaaaaagcttaaaagaagctgatccaaaattatacgaatctttatctcaggaatttgataggcaacaagagcatattgaattaatagcatcagaaaatattgtttctagatctgttttagatgcccaaggctccattatgacaaataaatatgctgaaggatattcaggcagaagatattatggaggatgtgaatatgttgatctagcagaggatcttgctatttcaagagcatgtgaattatttgattcaaaatacgccaatgtccaacctcactcaggatcgcaagctaatcaagctgtttttcaagctcttctaaagcctggagatacaattttaggtatgagcttagatgctggaggtcacttaactcatggcgcaaaacccaatcaatcaggcaagttatttaatgcgattcaatatggtgtaaaaaaagatgacagcttaatagattttaatgaagtagagtctcttgcaaatcagcataaaccaaaactaattattgctggaggatctgcttatccaagagtaatagattttgcaaaatttagagaaatagcaaataatgtaaatgcttatttgttagttgatatggctcattttgcaggtcttgtagcttccaaaacctacccatcaccaatagcaattgcagatattgttaccacaactacacataaaaccttaagaggtccaaggggaggattaattctcactaataatgaggatatttcaaaaaaaataaactcagcaatttttccaggaatacaaggtggaccactcatgcatacaattttagcgaaggctgtagcttttggtgaagcattaagaccagaatttgttaattattcacaaaatgtaatagataatgcaaaaatattatctcaaacacttcttgaagatggttttgatatagtttctggaggtacagacagtcaccttgttcttctagatcttagaccaaaaggaataaaaggtaatgaagctgaggatgtattaggaaaagcaaatataacttgcaataagaacggtgttccatttgatcctgaaaaaccaactataacatcaggtataaggttaggaactcctgcaggtacaactagagggtttggacaggcggagtttcataaaattggaacttatatctgtgaagtcctaaatggatttcaattagatggcgttgacacaaaagctattttagaagttcagaaaaaagtaatagatctttgcagaaaattccctatttatgggggaaatttatgag

SEQ ID NO: 228475 - DNA, 1282 bp, Unknown
  Bacterial polypeptide expressing nucleotide sequence isolated from the Sargasso Sea
tatgaaatcatcaagaagcgatagtattttttcgaataataacaccataaaagattatgacaatgaattgtgggcatcctttcaacatgaagctgaaagacaagaagatcatattgaattaatagcctcagaaaattatgcatcaaaacgaatccttgaagctcaaggttctcttttgactaataaatatgctgagggatatccctcaaagcgttactatggtggttgtgaaaatgttgatattgcagagaatcttgcaatagatagagcaaaagaactttttaaagcagattatgcaaatgttcaacctcattcaggatcatcagctaatgcagcagcctacttagctcttttgcaaccaaacgatactattcttggtatgagtttagatcatggtggtcatttaacacacggttcaaaggtaaatttttctggaagaaattataaaagtattcaatatgggctacatcccgaaactcatgatatagattatgatcaggtaagatcacttgcaatagaacataaacctaaattaataatcgcaggtttttcggcttttacaggaataattgattggaaaaaatttagagaaattgccgatgagaccggagcctattttcttgttgatatggctcacgtatctggcctagttgctgctgatctatatccatctccacttccatatgcagatgttgtaacgtcaactacacataaaacattacgaggtcctaggtcaggaattattcttgcaaaggcaaatgaagaaattgaaaaaaaacttaactctgctgtatttccaggttcacaaggtggtcctcttatgcacgtggttgctgcaaaagcactttgctttaaagaagccttagatccagaatttaaaatttatataaaacaggttatggataatgcaaaaacaatggctgaaacaataatgtcaaatggaatagacattgtgtctaatggaaccgagaatcacataatattaattgatcttagaagtaaaggaattactggaaaagatcttgaaagagttcttggctcagtcaacataacagtaaataagaattcagtaccaaatgatccggcatcaccatttgtgacttcaggaataagaattggtacgccagcagctacaactagagggtttaaagaagaagaaattattcaagtagccaattggatatcagatattattaataattttgataatgaagaattacaaaaaaccattaaggaagaagtccacaaacttacaagtaattttcctgtatataatctatag

SEQ ID NO: 228476 - DNA, 1264 bp, Unknown
  Bacterial polypeptide expressing nucleotide sequence isolated from the Sargasso Sea
tatggaaaatactggcgcattaaatactgaattatttgaaacagataatgagatagcatcattaattgataatgatttagcacgtcaaaactcacatatacatttaattgcttcagagaactttgcatcaaaagcagtgatgcaggcgtcaggttctattcttacaaacaagtattcagaaggttttccaggaagaagatattacgagggttgtgagactgttgatgagatagaacaactcgcaattgacagagcatgtgaattatttgaggcagatcatgcaaacgtccagcctcattcaggatcatcagcaaacatggcagtctacttaaacctcctagaagctggtgacaccgttatgggtatgtctcttgaccaaggtggacatttaacacacggttctcctgttaacttttctggaagaatgtataactttgttggttatggattagataaagaaactgaactgatcaatatggatgatgttgcaaaattagcagaggaaacaaaaccaaaattactaattgcaggatactcatcttattctcaggagcttgattacaaggcttttagagagattgctgattcagttggagcttattttatggttgatgccgcacattttattggccttgttgccggtaaagttgttgagaatccaatgaaatatgctgatgttgtgactgcaacaactcacaaagcactgagaggtccaagaggtggaatgattttatcaacagaggaatttgcaaaaggtgtagataaaaatattttcccaggagcacaaggtggagcattaaataaccagattgcagcaaaggccgtttgctttaaagaagcactatcaaaagattttcaagattataccgctcaaattttaaagaatgcttcagcactctctgactctttcataaatgaaggtctaagagttgtaagcgggggaacaactaatcacattgtattagttgatacaaacagtgttgacgaagagctaactggtaaagatgcaggtattttactcaatgaaatgggaattacgctaaatcgaaatgccattccatttgatgagagatcaccatttgttacatcaggcataagaatgggtacgccagctgcaacaacatgtggaatgaaggaaagtgaattaacaaaagtaggatatttaatttcagaaattctaaaaaatagatcagattcaaacaagcttgatgaattaaaagatgaagtaaaagagttagcttcacaatacaagccatatgtctaa

SEQ ID NO: 228477 - DNA, 1267 bp, Unknown
  Bacterial polypeptide expressing nucleotide sequence isolated from the Sargasso Sea
aatgaatgagtttaaaaagacacagaatcaaaatatttctgaatatgatgcagatcttgcaatattcttagatagagaattagttagacaagaagaacatatagaattaatagcttcagaaaactatgcatcaaaaagagttttagaagctcaaggtagtgtattaactaacaaatatgctgaaggctacccaaaaaaaaggtattacgggggttgtgagcatgttgatggtgcagagacacttgcaattgatagagcaaaagagctttttaaagcaaaatttgcaaatgtgcagccccattccggtgcttcagcaaatgcagctgtttttttagctctgcttgaaccgggagatacttttctaggcatggcgctagatcaaggaggtcacttaacacatggagcaaaagtaaatttttctgggcgaaattttaatgctattcagtatggattacacccagaaacaggcgaaattgactatgaggccgttaataagctggccttagaacataaacccaagcttatattagctggattttcagcttatatgggtattgttgattggcaaaggtttagagagatagcagatagtgtaggggcatatttaatggtagatatggctcatgtttcaggtttaattgctgctggagtatacccaagcccaatagagcatgcacatgtagtcacaagcacaacacataaatcgctaagaggacctagatctggaattatactttctaatgaagatgaagattttcagaaaaaattaaattttgcagtgttcccaggctcacaaggtgggcctttaatgcatgtcatagcggctaaagctgtgtgttttaaagaagctatgactgctgattttaaagattactcaaaacaaataattaagaatgcacaggctatgtgcaaaaaatttggtgaaagaggatacgatctggtgcacccaatgacagaaaatcatttattactacttgatttacaaaataaagaagtaaatggaaaggaagctgaagaacttttaggtacagtaaacataactgtaaataaaaactctattcccaatgatccagaatctccctttgtgacctcaggtataagaattggcactccagcaataacaacaagaggattcaaagaaaaagaagctcaaagtgtagtagatttaatatgtgatgctattgagaatagagatgatcaagcttgtcttgataaaattaaaaatgaggtgaaggaactttgcaataattttccagtttataactaa

SEQ ID NO: 228478 - DNA, 913 bp, Unknown
  Bacterial polypeptide expressing nucleotide sequence isolated from the Sargasso Sea
tcaggtggtcatattactcatggattaaaaatttcaatgtctggaaaatggtttaatgcaattagttatgatgtagataaaaaatctgaacttattgattatgacaatgttgagagacttgcgttagaacacaaaccaaaacttatcattgcaggaggtagtgcctattctcgagtaattgattttaaaagatttagagaaatttgtgataaagttggtgcatacctaatggtcgatatggctcatttttcaggattagttgctggaaaaggttatccaaatccttgtgattatgcacatgttgttacatccacaacgcataaagtttttagaagtgctagaggaggaattattttatcaaatgatttagatctaggaaaaaaatttgatacagctgtatttcctggttatcaaggtggacctttaatgcatataatcgcagctaaagctgcaggattttttgaagcccttaaacctgaatttcaaacttatatcaaaaatgttttagccaatgcaaaaatattagctgaaactttaaaaaataatggttttaaaatttattcaggaggaacggatacacacttaatgctagtagatttaagaccattcaatgttaagggtaatttggcatcagaaagtttatgtagagcaaatattacttgtaataaaaatggaattccatttgatactgaaaaaccaatgataacctcaggtattagattaggttctcaggcagcaacaacaagaggttttgggttaaaagaatttgaaaaggttggagagttgattacaaaagttattaaaggattatctgaaaatccggaggataatagtaatgtggaaaatgaagtgagaaatgaagttattaacttatgttcaaattttccaatttacaaaaatttgaataaatgat

SEQ ID NO: 228479 - DNA, 637 bp, Unknown
  Bacterial polypeptide expressing nucleotide sequence isolated from the Sargasso Sea
ttgtccaatacatcaaaatccttttcccatatagaaaattcagatcagcaaatttatgatatattagttcgcgaattaaatcgagaacacaatacattggagctgatagcttctgagaattttgtaagttatccagtgcttgaaatggctggtggaataatgaccaacaaatatgctgagggctatcctggtgcaagatattatggtggctgtcagtttgttgatgaagcagaaaatttagctagagatagagcaaaagaactttttcaatgtgaatatgccaatgtacagcctcattcaggttctcaagctaatatggctactttaatgacctttattgatattggtgataccattatgggtttagatttagctcatggtggtcatttaacacatggaagtaaagtaaatttttctggacaaatgtataactctgcttcatatcaagtggataaagacactggtagagttgattttgattcagtcaaaaagatagcgcatgaatataaaccaaaaataattatttgcggtggaagtgcttatcctaggcatgtagaattttcagaatttaaaacgatcgcagatgaagttggtgcatttctgatggctgatattgcgcatccatctggattagttg

SEQ ID NO: 228480 - DNA, 1045 bp, Unknown
  Bacterial polypeptide expressing nucleotide sequence isolated from the Sargasso Sea
ttgtccaatacatcaaaatctttttcccatatagaaaattcagatcagcaaatttatgatatattggttcgcgaattaaatcgcgaacacaatacattagagctgatagcttctgagaattttgtaagctatccagtgcttgaaatggctggtggaataatgaccaataaatatgctgagggttatcctggcgcaaggtattatggtgggtgtcagtttgttgatgaagcggaaaatttagctagagatagagcaaaagaactttttcaatgtgaatatgctaatgtgcaacctcattcaggttctcaagctaatatggctactttaatgaccttcattgatattggtgataccattatgggtttagatttagctcatggtggtcatttaacacatggaagtaaagtaaatttttctggacaaatgtataactctgcttcatatcaagtggataaagaaactggtatggttgattttgattcagttaaaaagattgcgcatgaatataaaccaaaaataattatttgcggtggaagtgcttatcctaggcatgtagaattttcagaatttaaaacgatcgcagatgaagttggtgcatttctgatggctgatattgcgcatccatctggattagttgcagcaggcctacacccatccccaatgccatattgtgatgttgtaacaacgactacgcataaaaccttacgaggtcctcgaggtggtatgattatgatgggtaaggattttgaaaataaatggaatattgttgcacccaaatccggtagagttaaaatggtctctgagattttagattctgcagttatgccaggaattcagggtggtccattgatgcatatcattgctgcaaaggctattgcattcggtgaagctttagatcctagttttaaagtttatgcccaagaagtaattaacaatgcacaaacaatggctgccgctttttcagataagggctatgatttaatatcgggtggaactgatactcatgtagttttgattgatttatctaacaaaaatgtaaatggaa

SEQ ID NO: 228481 - DNA, 515 bp, Unknown
  Bacterial polypeptide expressing nucleotide sequence isolated from the Sargasso Sea
catgagtcagcaatccgagcgttcgatcaacagggatctggcccaggccgatccggcgatcgccggactgatcgaccgggaacagaatcgacaggaaactcacctcgagctgatcgccagcgagaacttcgcctccagtgccgtgatggaggcccagggctcggtgctcaccaacaagtacgccgagggcctgccgaacaagcgttactacggggggtgtgaacacgtcgatgccatcgaggagctggccattgagcgggccaagcagctgttcggggcggcctgggcgaatgttcagccccatagcggagcccaggccaatttcgccgttttcctggctcttctccagcccggcgacacgatcatgggcctggatctctcccacggcggtcacctcacccatgggtctccggtcaacgtcagcggcaagtggttcaaggtcatccagtacggcgtcgaccgagagactcagcgtctggacatggacgcgatccgcgcgctggccagggagcaca

SEQ ID NO: 228482 - DNA, 544 bp, Unknown
  Bacterial polypeptide expressing nucleotide sequence isolated from the Sargasso Sea
tcgaataatttagagctaggtaaaaaatttaattctgcagtatttcctggttatcaaggtggcccattaatgcatgtgattgctggtaaagccgtagcttttggagaagcattgaaaccagaatttaaggaatacataaaacaagtaataacaaacgctaagacattaagtgacaccctcgttagtggaggattaaaaattgtttctggtggaactgatactcatttaattttagtagatttaactccaatggatttaactggcgactccgctcaaactagtttggaagcagcaaatataacatgtaataaaaatggaatacctaaggacccgaagccacctaaaatcacatcaggcattagacttggaactccagctgcaacaacaagaggttttaaggaaaatgagtttaagcttgtaggagagttgatactagaaacacttgttggcttaaaaagtaatccaactgataatagcaatgtagaaaaagctgtaaaacaaaaagtaattaatttgtgcagcgagtttccaatttatagttagg

SEQ ID NO: 228483 - DNA, 691 bp, Unknown
  Bacterial polypeptide expressing nucleotide sequence isolated from the Sargasso Sea
cttggttgctgcaggtattcatccttctccagttccatattgtaatgtaattacaactacgacacataaaacattgcgaggaccaagaggaggaatgattatgatgggaaaagatgatctaaatccatggaatatcactgcgcccaaatcaggaagggtgaaaaatatatcagaattgttagataattctgttatgcctggagtacaaggcggaccattgatgcatattattgcggcaaaagccgttgcgtttggagaagcattattaccagaatttaaagtatatgcacaacaaattgttgctaatgcaaaagaaatggctgatgaattccttaaaagagattataagttggtttctggcggtaccgatacacatgtggttcttatagatttaacaaataaagggattactggtaaagtcgcagaaaaatccttagagaaagctggaattgctgttaataagaatatggttccttttgatgagaagagcccttttattacgagtgggattagaataggaaccccagctattacaactagaggaatggggaaagatgatatgaagaaaatagtttctcttattgatattgtgattaataaccctaatgatgaccataaagttgattcagtaaaagctgaagtaaatgaattatgtaaattttttcctttatatccagaattgagagattaa

SEQ ID NO: 228484 - DNA, 886 bp, Unknown
  Bacterial polypeptide expressing nucleotide sequence isolated from the Sargasso Sea
tggaggacacctcactcatggatcaaaagtaaatttttcaggaagaaactataattcttttcaatatggtctaaattctgaaacgcatgacattgattatgatcaagttcgtgatttggcaaaaaagcataatccaaaactattaatcgctggtttttctgctttctcgggtttagttgattggagtatatttagagaaatagcagatgaggttaatgcttatttcttagtagatatggcgcatatatctgggcttgttgctgcaggaatgtacccttctccagttccatttgcagatgttgtgacatccacaacacataaaaccttaagagggccaagatctggaattattctggcaaaagaaaacgaggaaatacaaaaaaaattaaactctgcagttttccccggctcacaaggaggtcctttaatgcatgttgttgctgcgaaagcagtttgttttaaagaagctcttgagcccgaatttaaaacttatatgtctcaagtaattaataatgctaaaaccatggcaaagactattattggaagaggagtcgatatagtaaaaggtggtactgaaaatcatatgattcttgtcgacctgagaaataaagggataacaggaaaggattctgaatataaacttggtttagcaaatatcacagtaaacaagaatgctgttcctaatgatccacagtctccatttatcacatcaggaataaggcttggaacacctgcagttactacaagagggtttaaagaggatgaaattattcaaatttcaaattggatctgcgatatagtccttgatttaggtaatgaacaaaaaattgaggaaattaaaaacaaagctttgtctttatgcaaagagtttccggtttataagtaa

SEQ ID NO: 228485 - DNA, 1207 bp, Unknown
  Bacterial polypeptide expressing nucleotide sequence isolated from the Sargasso Sea
aagaagacaacaacaacatatagagttaatagcatcagaaaatattgtttctcaagctgtgctagaagctcaaggttcagttttaacaaataaatacgctgaaggataccctggtaaaagatattataatggttgtgagcatgttgatgttgcggaaaatttagcaatcgagagattaaaaaaattatttaattgtaaatttgcaaatgctcaaccacactcaggtgctcaagcaaatggtgcagtttttttagctttgctaaaacctggtgatacttttttaggaatgagcttaaactcagggggacatataactcatggattaaaaatttctatgtcaggtaaatggtttaatgcaattggttatgatgtcgataaaaaatcagaattaattgattatgacaacgttgaaaaattagcattagaacacaaaccaaaattaattattgctggcggtagtgcctactcaagagtaattgactttaaaagatttagagaaatagcagataaagttggagcttacctcatggtagatatggctcacttctcaggtcttgtagctggcaaaggttatcctaatccatgtgattatgctcatgtagtaacatctacaacacataaagtttttagaagtgcaagaggtggtataattttaactaatcacgaagatctttcaaaaaaatttaacacagccgtttttcctggatatcaaggaggaccattaatgcatgttatagctgcgaaggctgctggttttcttgaggcattacgaccagattttcaagattacataaaatctgttttatccaatgcaaaaattttagctgagacattaaaaaataatggttttaaaatttactctggaggcacagatactcacttgatgctagtcgatctaagaccgtttaatgtaaaaggaaacttagcagcagaaagcttatgcagagctaatattacttgtaataaaaatggaattccatttgatactgaaagcccaatggttacatcgggaataagactgggctctcaagctgcaacaactagaggatttggtttaaaagaatttgaaatggtgggacaacttattacaaaagtgattaaaggcctttcgtcaaatccagaagataatagcaaagtggaaaatgaagtaagacaggaagtaattgaactatgttcaaaatttccaatttataaacacttaggttaa

SEQ ID NO: 228486 - DNA, 228 bp, Unknown
  Bacterial polypeptide expressing nucleotide sequence isolated from the Sargasso Sea
tatgatttcagatttgtttactaaaggaattaaagaagcagacccagaggtttatggaactttaagtcgtgaattagaaagacagcacaatcaaatagagttgatagcatctgaaaatattgcttcaagatcaattttaaatgctcaaggttctgtcatgacaaataaatatgcagaaggttatcctggtaaacgatattatggaggatgtgaattcgtagatcaagc

SEQ ID NO: 228487 - DNA, 829 bp, Unknown
  Bacterial polypeptide expressing nucleotide sequence isolated from the Sargasso Sea
ttgcttgataagaaatctaaccttaaaactgacgcaatcttttcaaataaaaatgatatagagctttatgatgctgagctttgggaatcctttgaaaaggaaatggttagacaggaagaacatattgaacttatagcttcagaaaattatgcaagtcaaagagtgcttcaggctcagggttctgtattaacaaataaatatgctgaaggatatcctgacaaaagatattatggcggctgtgagtttgttgatattgctgagaagttagcaatagatagagccaaggagctttttaacgctgattatgccaacgttcagcctcattctggttcctctgcaaatgctgctgcatatttagcattacttgaaccaaatgatgcaatgcttggaatgagtcttgatcatggaggacaccttacacatggatcgaaagtaaatttttcaggaagaaactataaatcttttcaatacggtttaaatcctgaaacacatgatattgattatgaccaagttcgtgatttagcaaaaaaacataacccaaaactaataattgctgggttttcagctttctctggtttagttgattggagtatatttagagaaattgctgatgaggttaatgcttatttcttggtagatatggcccacatatcgggacttgtagcggcaggcatgtatccctcacctgttccgtatgcagatgttgtgacatctacgactcacaaaacactaagaggtccaaggtctgggattattcttgcaagagagaatgaagatatacaaaaaaaattaaactccgccagtttttccaggatcacagaaggaggcc

SEQ ID NO: 228488 - DNA, 227 bp, Unknown
  Bacterial polypeptide expressing nucleotide sequence isolated from the Sargasso Sea
agtaaataagaatatggttccttatgatgaccagtcaccatttgttacatcaggtattagaattggaactcccgctattactactagaggccttaaagaagtggatatgggatttattgcagagtctataaatgatgtaataaataattatgaagacgatcaaaagttaaattctatatcagataatgtaaagtcagaaatgaaagacaggcccttatttgcttaat

SEQ ID NO: 228489 - DNA, 1069 bp, Unknown
  Bacterial polypeptide expressing nucleotide sequence isolated from the Sargasso Sea
atgtcaatagcattaaagttaaataaatatttgaacagtttttttaaattagatttaaaagaagctgataaggagttgtttaaatccatacaagaagaattttcaagacaacaaaaccacattgaattaattgcttctgaaaatattgtttcaagagctgtgcttgaagcccaaggatctgttttaacaaataaatatgcagaaggttacccaggtaaaagatattatgggggatgtgaacatgtcgatgtttctgagaatttagcaatcgaaagagctaaaaaattgtttgattgtaattttgctaatgtacaaccacactcaggggcacaagctaatggtgctgtctatttagctttattaaaacccggggatactacacttgcaatgagtttaaattcaggtggacacctaactcatggagctaaacctgcacaatcaggtaaatggtttaatgctttacattatgaagtagatcaaaagacaggtcttatagattatgagagtgttgaaaaaattgctactgaaaacaaacctaagcttattatagctggaggtagtgcttactcaagaattatagattttaaaaagtttagagaaatttgtgataaagttggcgcatatcttcttgtagacatggctcacttttctggtttagttgctggaggtgcatatccaaatcctactaaatatgctgatgttgtaacttcgactacacataaagttttaagaggcccaagaggtggaattattttaactaatagagaagatttaattaaaaaatttaatagtgctatatttccgggattgcaaggcggacctttaatgcatgtcattgccgcaaaagctgtttgttttaaagaggcactctctgctgatttcaaagattataccaaaaacgtaataaataatgctaaggttctttcggaaagattaactgaaaaaggttttaaaattttttcaggaggaactgatactcacttgatgttgatagatctaagatcttttggtgtaactggaaaagatgcacaagcttctctcggtcgatctaatataacttgtaataaaa

SEQ ID NO: 228490 - DNA, 745 bp, Unknown
  Bacterial polypeptide expressing nucleotide sequence isolated from the Sargasso Sea
catgtcgaacccgaatcctttcttcgaagaatcgcttgccacgcgtgatgcggcggtgcgcggcgccattttgaaagagctggagcgccagcagtcgcaagtcgaattgatcgcgtctgaaaacatcgtgtcgcgcgcggtgctcgaagcacagggttcggtgctcaccaacaagtacgcggaagggtatccaggcaagcgctactacgggggttgtgaatacgccgacgtgatcgaaacgctggcgctcgaccggatcaagcaactgttcaacgcgaaattcgctaacgtgcagccgcattcgggcgctcaggctaacggcgccgtgatgctcgcgctggtgaagccgggggacacggtcctcggcatgtcgctcgatgccggcggccacctgactcacggcgccaagccggcgatgtcgggcaagtggttcaacgcggtccagtacggcgtgaatcgcgacacgatgctgatcgattacgagcagatcgaggaactcgcgcagcagcataaaccggcgctgctgatcgccggcttctcggcttatccgcgcgcgctggatttcgcccggctgcgcgcgatcgccgacggcgtgggcgcaaagctgatggtggatatggcgcacattgccggggtgatcgcggccgggcgtcaccagaatccggtcgagcacgcacacgtcgtcacatcgaccacgcacaagacgttgcgcggtccgcgcggcggctttgtacgaccaagacga

SEQ ID NO: 228491 - DNA, 1063 bp, Unknown
  Bacterial polypeptide expressing nucleotide sequence isolated from the Sargasso Sea
agacagggctaaaaggcttttcaaggctgaatatgcaaacgtacaacctcattccggctcatcagccaatatgggcgtttttttggcttatttagaacctggagattgtataatgggtttagatttaagtcacggaggtcatttgactcatggatccaaggttagtttttctggacaaatttataattctactacctttaaagtaaaagaaaatactggactagtcgattttgatgatatgcttaaaaaagcgaaagagtttaaacctaaaattattatttgtggtgctagtgcttatcctagaacggtagaatttgaaaaatttagagaaatagcagatgaagttggtgcttttttacatggagatatttgtcataattcaggtttaattgctgcagaaatgcatccatcaccttttccccattgtcatgtagtttctacaagtactcacaaatctttaagaggtcctagaggaggaataattctattaggaaaggattatgaaaaccctttcggtaaagttgctccaaaatctggaagagttaaaatgatgtctgagttaattgatagcgcagtaatgcctggcattcagggaggaccattgatgcatgtgattgcggcaaaggctgttggatttaaagaagctcttcatccttcatttaaatcatatattaaaagcgtgcttgataatgctcaatgttttgccgatgaatttaaaaataaggattataatttgatatcagggggtactgatacgcatttagtattaattgatttacaaaacaaaaatatttcaggaaaagctgcagaaatagctcttgatgaagcaggaataactgtaaataaaaatatgattccttatgatccaaaaagtccgtttgtaacaagcggaattagagttggttctcctgcaatgactactagaggtatgggagttgaagaagtgaaaattattgttgatttaattgatcaggtaattttaaatcatgataataaagaaaagattaattcagtaagagctcaagtcaatgaactatgttcatcctacccgatatatgaataa

SEQ ID NO: 228492 - DNA, 1291 bp, Unknown
  Bacterial polypeptide expressing nucleotide sequence isolated from the Sargasso Sea
tttgcttgataagaaatctaaccttaaaactgatgcaattttttcaaataaaaaagatatagaactttatgatgttcagctttgggagtcctttgaaaaggaaatggtcagacaggaggaacatattgaacttatagcttcagaaaattatgctagccaaagagtgcttcaggctcagggctcagtattaacaaataaatatgctgagggatatcctgacaaaagatattatggcggctgtgagtttgttgatatcgctgagaagttagcaatagatagagctaaggagctttttaatgctgattatgctaatgttcagcctcattctggttcctctgcaaatgctgctgcatatttagcattacttgagccaaatgacgcaatacttggaatgagtcttgatcatggaggacaccttacacatggatcaaaagtaaatttttcaggaagaaactataagtcttttcaatacggtttaaatcctgaaacacatgatattgattatgaccaagttcgtgatttagcaaaaaaacataatccaaaactaataattgctgggttttcagctttctccggtttggttgattggagtatatttagagaaattgcagatgaggttaatgcttatttcttggtagatatggcccacatatcaggacttgtagcagcaggcatgtatccttcacctgttccgtttgcagatgtcgtgacatctacaactcacaaaacacttagaggtccaaggtctgggattattcttgcaagggagaatgaagatatacaaaaaaaattaaactctgcagtttttccaggatcacaaggaggccctttgatgcatgttgttgctgctaaagcagtttgttttaaagaagctcttgagcctgaatttaaaacttatatttctcaagttattagtaatgctaaaactatggcgaagactattattggaagaggaatcgatatagtaaaaggcggcactgaaaatcatatgattcttgtcgacctgagaaataaagagataacaggaaaggattccgaatataaacttggtttagctaatatcacagtaaacaagaatgctgttcctaatgatccacagtctccatttatcacatcaggaataaggcttggaacacctgcagttacaacaagaggctttaaagaggatgaaattattcaaatctcaaattggatctgcgatatagtccttgatttagataatgagcaaaaaattgaagaaattaaaaataaagctttgtctttatgcaaagagttcccggtttataaataa

SEQ ID NO: 228493 - DNA, 1273 bp, Unknown
  Bacterial polypeptide expressing nucleotide sequence isolated from the Sargasso Sea
atgaatatccttcaaaatcttaaagaaagtgatccagtaatatcaaattttattaactctgaaaaaaataggcaggaaactcatcttgagttaatcgcaagcgaaaatttcgcatcaattgccgttatgcaggctcaaggttccgtccttacaaataaatacgccgagggattaccccaaaaaagatattacgggggatgtgaatttgttgatgaaatcgaagaattagctattcagagagcgaaaaaattatttaatgcaaattgggctaatgttcaaccccatagtggagcgcaggcaaatgctgctgttttcctaagtctacttaaacctggcgacacaatcatggggatggatttatctcatggtggacacctaactcatgggtctccagtaaatatgagtggtaaatggttcaatgcagttcactatggtgtaaataaagaaactagtgaattaaattttgatgaaataagagagatagcacttgaaacaaaaccaaaattaatcatatgtggatattctgcttatccaagaacaatcaattttgagtcatttagaaatattgcagatgaagttggtgcattcttaatggctgatattgcacacatcgccggtcttgtagcaagtaaacttcacccaaatccaataccttattgtgatgtagtaaccacaactactcataaaacattaagagggcctagagggggacttatcttgtgtaaagatgcagaatttgggaagaaatttgataaatctgttttccctggaactcaaggtgggcccctcgaacatataattgcagctaaagcagttgcatttggagaagccttgcagccagatttcgttaattattcccaacaagtaataaaaaatgcaaaagttctagcttcaactttaataaatagaggtatcaatatcgtgagtggaggcactgataaccatattgttttactcgatttaagaagtatcaatatgactggtaagattgctgacttacttgtaagtgaagtgaatatcactgcaaataaaaatactgttccatttgaccctgaatcaccttttgtaaccagcggactaaggttgggaactgctgctttaactactagaggctttaatgaggatgcttttgctgaagttggcgaaattattgctgatagattacttaacccagacgattcactgattgaaagtcaatgtaaagaaagagtattaagcttatgtaatcgttttcctctttatgaaggcaaacttgaagcatcaattaaatgag

SEQ ID NO: 228494 - DNA, 1117 bp, Unknown
  Bacterial polypeptide expressing nucleotide sequence isolated from the Sargasso Sea
tatgcagaaggatattcttggaaaaagatattacaacggttgtgaacatgtagatgtcgcagaaaatttagccaacgaaagactaaaaaaattatttgattgtaatttcgctaattcacaacctcactcaggagctcaagcaaatggtgcagtttttttagcattattaaaacctggagacactttcatgggaatgagcttgaattcgggaggacatattacacatggtttaaaaatagctatgtctggaaaatggtttaatgctattggttatgatgtagatgaaaaatcggaacttatcgactatgataaagttgagaaaattgctttggaaaataaaccaaaattaataattgctggtggcagtgcatactctagagttattgattttaaaagatttagagaaatcgcagataaagttggtgcttatcttatggtagatatggcacatttttctggactagttgctggaaaaggatatccaaatcctgtgaagtttgctcatgttgtcacttcaactacacataaagtttttagaagtgcacgaggaggaattattttgaccaacgatgaaggtttatccaaaaaaataaactcagcagtttttccaggatatcaaggtggtccattaatgcatataattgcagctaaagccgttggttttttagaagctttaaaacctgaatttgagacctatataaaaaatgttatgtctaatgcaaaaattttgagtaaaaatttaatcaataatggttttaaaatttattctggaggtactgatacgcatttaatgttagtggatttaaggccttttaatgttaaaggaaatgctgcagccgaaagtttaagtagagccaatataacatgtaacaaaaatggtattccattcgatactgaaagtccgatggtcacatctggcattcgattaggtactcaggctgctacaaccagaggatttggtgttgatgaatttaataaagtaggagatctaattactaagactataaaaggtctttctgaaaaacctaatgataattcaaaaatagagagcgaagttagagcagaagtggtagaattatgttctaaatttccaatatataaaaatttaaggaaataa

SEQ ID NO: 228495 - DNA, 229 bp, Unknown
  Bacterial polypeptide expressing nucleotide sequence isolated from the Sargasso Sea
atgttagatcaacttaataacaaaagtggtttttttactgacactttagcacagagtgacgctgaattattcgcatctatctcttcagagctaggccgtcagagagatgagattgaactaatcgcatcagaaaatattgtttcagcggccgtcatggaagcccaaggtagtgctctgacaaataaatatgctgaaggttatcctggacgtagatactatggtggttgcc

SEQ ID NO: 228496 - DNA, 1291 bp, Unknown
  Bacterial polypeptide expressing nucleotide sequence isolated from the Sargasso Sea
tatgatttcagatttatttactaaaggaattaaagaagcagacccagaagtatatggcactttaagccgtgagttagaaaggcaacaaaatcaaatagaactaattgcatctgagaatatcgcttcaaaatcaatactaaatgcacaaggttcagtaatgacaaacaaatatgctgagggatatccaggtaaaagatattatggaggttgtgaatttgtagatcaagcagaagaaatagctttagaaagggtaaaaaaactttttaattgtcaatatgcaaatcttcaaccacacagtggagctcaagctaaccaagctgtttttctcgctcttcttcagcctcatgatactattttaggaatgtctctagcttcaggaggtcatttaactcatggagcaaaaccaaatttatcaggtaagtggtttaatgctgttcaatatggtgtaaaaaaagatggcaatgataaagatctaatagactatgatgaagttgaagctttagcgttagaacataagccaaaaatgattattgcaggagcttctgcgtatccaaggattatagattggaaaaaatttagagatatatcagataaagtaggtgcttatttcttagttgatatggcacattattcaggtttagttgcaggtaaacagtatcctaatccaattgagcatgcacacattgtaacttcaacaactcataaaacattaagaggcgcaagaagtgccatgatattaactaatcatgaagatttatataaaaaaattaactctgctgtttttccaggattacaaggcggacctttaatgcacgttatagctgctagagcagtatgttttggtgaagctctaaaaccagaatttgaaaattatattaaaaatgtaattgcaagtgcaaaagttatgtcgcaaactttagttgatagaggttttagaattgtaactggaggaacagactcacatatagtttggttagatttaacaccaaaaggattaacaggtgataaagctgaacaaattctcgaggaagttggactagcgtgcaataaaaatgcaatcccttatgatcctaatcctcccaaagtaacaagcggactaagatttggtactgctgcagctactactcgaggttttaatcaagaagattttagacaagttggaaatatgattgctgatattttagatagtctccttctttcagaaaatgaaagacaagaagtttttaataaaactagaaaaaacgtaattcaattatgttctcgttatccaatttacgatgaggcattttag

SEQ ID NO: 228497 - DNA, 1219 bp, Unknown
  Bacterial polypeptide expressing nucleotide sequence isolated from the Sargasso Sea
ttgaaaacattagataaaaaaattgaacaaattttagaaaaggaatcaattcgtcaaagaaattctgctgtctttattgcttcagaaaattatgcatcagaaagggtaagaaattattcaaactctatttttacaaataaatatgctgaaggttatcctggtaaaagatattatgcaggatgcgaaaatgctgacgaagttgaaaatctcgctatctctagaggtaaaaaactattttcttctaaacatataaatgttcaaccacattcaggctcccaagctaatatggcagcttatgtttctttgttaaaacctggggataaaattttgagtttatcattagatcatggtggacacttatctcatggacataatgtaaatttttctggcaagatatatgaaattcataattattacttgaatagagattctgaattattagattatgatcaaattaatgaaattgccgaaaaagtaaaaccaaaattaataatttgtggttattcagcatattcaagaattatagattttaataaatttaaaacgatatcacaaaaagtaggttcacttttgatggctgatattgcacatatagctggccttgtagtatctggtaaacatccatctcctgtaggtatagcagacataataacctctactacccataaaactcttagaggtccaagaggaggattagcaataattagagaagatctttcgtcaaaatatgacagaggtgtttttcctgctattcaaggaggacctttgatgaatactatactggctaaagctgcagcctttgaagaagctctttctgataattttattgaatactctcaacaaattattgataatgcaaaggttcttgcaaatttatttatagatagaggcttaagactagtttcaggagggacagataatcatctaatgctaatagatacaagatcaattgggattaacggagatgaagcagaaaataagcttaatgaagtaggaatagttgtaaataagaatgcaattccttttgatccaatgccacctaaaataacatcaggtattagaatcggtactccagctataacttctagacaaatttcaaatgaagatttaattaaaattggtaatgtcatagttgattgtttaagtacttcatctaaaaatacttcagtatttactaaagaagtacaaaaaattatgaataagctaccacttccataaa

SEQ ID NO: 228498 - DNA, 498 bp, Unknown
  Bacterial polypeptide expressing nucleotide sequence isolated from the Sargasso Sea
aatgtcaatcgttaaagataaagataagaaaatttacgatataattcagtctgaattaaatagacaaaatggttatcttgaacttattgcatccgaaaatttcacaagtaaggctgttcttgaaactgcaggatctgttttaactaataaatatgccgaaggatatcctggaaagagatattatggtggatgtattcatgttgatgaggctgaaaatttagccatcgatagagcaaagaggcttttcaaagcagagtatgcaaacgtacaaccacattcaggttcatctggtgtaatgggtgtttacttagcctttttgcaacccggagattgtattatgggtctagatttaagtcatggcggtcacttaacacatggttcaaaagtaagcttttctggacaaatttataattctgcaacatttaaagttaaaaaagattcaggtttagtagactttgatgatttgttaaaaagagccagagaatttaaaccaaaatt

SEQ ID NO: 228499 - DNA, 433 bp, Unknown
  Bacterial polypeptide expressing nucleotide sequence isolated from the Sargasso Sea
gaatttaaagattatataaaatcagttttatctaatgcaaaaattctatcagagacgttaaaaaataatggttttaaaatatattctggaggcactgatacacatttaatgttagttgacttaagaccttttaatgtaaaaggaaatgtagctgcagaaagtttgtcaaaagcaaatatcacttgcaataaaaatggcataccttttgactcagaaagcccaatgattacttctggaataagattgggttctcaagccgctaccacaagaggatttggacttaaagaatttgaaattgttggcaacttaataaccaaattaataaaaggtctttcaataaacaccaaagataatagtaaaatagaagatgaagttagaaaagaagttgtagaattatgttcaaaatttcctatatataaacatttaaggtaat

SEQ ID NO: 228500 - DNA, 503 bp, Unknown
  Bacterial polypeptide expressing nucleotide sequence isolated from the Sargasso Sea
aatgaatatccttcaacatcttaaagaaagtgatccagtaatatcaaattttattaattctgaaaaaaataggcaggaaactcaccttgagttaattgctagtgaaaatttcgcatcaatggctgtcatgcaagctcaaggatcagtacttactaataaatacgcggaaggattacctcaaaaaaggtattacggaggatgtgaatttgttgatgaaatcgaagaattagctattcagagagctaagaaattatttaatgcaaattgggctaatgttcaacctcatagtggagctcaggcaaatgccgcgattttcttaagtcttctcaaacctggcgacacaatcatgggaatggatttatctcatggtggacaccttactcatggatctccagtcaatatgagtggtaagtggttcaatgcagttcactatggtgtaaataaagaaactagtgtattaaattttgatgaaataagagagatagcactaaaaacaaaaccaa

SEQ ID NO: 228501 - DNA, 442 bp, Unknown
  Bacterial polypeptide expressing nucleotide sequence isolated from the Sargasso Sea
aaagctgtatgttttaaagaggccatgacagatgattttgtaaattatcaaaagcagataataaagaatgcaaaatcaatgtgtgaagattttcagaaattggggttcgaaaccgtgcaacctcaaacagataaccacctcctactactagatctaagaaataagaatattacaggtaaagatgcagaagaattgttaggaaaagtaaatattactttgaataaaaactccatccctaatgatcctgaatcaccttttgtaacttccggagtaagaattggtacagcagcagttactacaagaggttttaaagaagaggaatgctcagaaattgttaaactaattggagaggctatagaaaataaagataaaccagaaatccttcaaaaagtgaaaatgaaagcctctgatctttgttcaaaatttcctgtctataaataat

SEQ ID NO: 228502 - DNA, 1009 bp, Unknown
  Bacterial polypeptide expressing nucleotide sequence isolated from the Sargasso Sea
tatgtcaagtgaaagtaaatatataaacgatcaatacaaaagtttttttgaagacagtctttctaaaactgatcctgaactttataaagctattaatgacgaattacaaagacagcaggagcatattgaattaattgcttcagaaaatattgtatctcaggctgtacttgaagcacaaggctctgttctaacaaataaatatgcggaaggttatccaggaaaaagatattataatggatgcgaacatgtggatgtagctgaagatttagctaatgagagattaaaaaaacttttcaattgcaaatttgcaaattcacaacctcattctggtgcccaggctaatggagctacatttttggctttattaaaaccgggtgatacttttatggggatgagtttaaattctggtggacatattactcatggtttaaaaatttcaatgtctggcaaatggtttaatccaataggatatgatgttgataagcaatcagaacttattgactatgaccatgttgaaaaacttgcactagaacataaaccaaaactaataattgctggtggaagtgcctattctcgagttattgattttaaaagatttagagaaatagctgataaagttgatgcttatcttatggtagatatggctcatttttcaggtcttgttgctggaaagggatatcctaatccatgtgattatgctcacattgtaacttcaactactcataaagtttttagaagtgcaagaggtggtattatcttaacaaatcatgaagacatcgctaaaaaaattaatacagctgtatttccaggttatcaaggtggtcccttaatgcatattattgcagctaaagctgcaggttttctagaagctttaagacctgatttcaaagattatattaaatctgttttagcaaatgcaaaaattctatctgaaacattaaaaaacaatggttttaaaatttattctggaggtacagatacacatttaatgttagttgatctaagacct

SEQ ID NO: 228503 - DNA, 868 bp, Unknown
  Bacterial polypeptide expressing nucleotide sequence isolated from the Sargasso Sea
atgacacttagtgagaattttttttctagtaatctagaacatgcagataaagatttatatcaaagtatttcacaagaactttcaaggcaacagaaccaaatcgaattaattgcttctgaaaatatcgtctctaaagctgtgcttgaagcacaaggctccattatgactaataaatatgctgagggttatagtgctaaaagatactatggtggttgtgaattcgtagatatagctgaaaatttagcaattgaccgtttgaaacaattgtatggatgcagttatgctaatgttcaacctcactcaggcgcacaagctaatcaagctgtatttttagcactcattaaaccaggtgacactattttaggaatgtctttagatgctggtggtcacttaacacatggttcgagaccaaatcaatcaggaaaatattttaacgctgttcagtatggcataaatccagaaacttctttaatagattatgacgaagttgaaagattagctattgaacataaaccgaccttgattattgctggtggttcagcttatccaagaaatatcgattttaaaaaatttagagatatagcagataagatcgaggcatatttactagtcgatatggcacactattcaggtttagttgctgccaaagaatacccggatccattgccacacgcacatgtggttacatctacaactcacaagactattagaggtccaagaggtggtatgatactttcaaatgatttagacctcggaaagaaatttaacagctctgtttttcctggtttgcaaggtggaccacttatgcatgtgattgctgctaaagccgttgcttttggtgaagcccttcaaccagagtttaaaacat

SEQ ID NO: 228504 - DNA, 1282 bp, Unknown
  Bacterial polypeptide expressing nucleotide sequence isolated from the Sargasso Sea
atgaaatcttctaaaagcgatagtgttttctccgataaaagctctataaaggactttgataaagatctatggttatcttttgagaatgaagcacaaagacaagaggatcatattgagttaattgcttcagaaaattatgcatccaaaagagtgcttgaggcgcaaggatctcttcttactaataaatatgcagaaggatatccttcaaaaagatattatgggggttgtgaaaatgttgatattgcagaaaatcttgcaattgaaagagcaaaagaattatttaatgctgattatgcaaacgtccagccacactctggttcgtctgcaaattcagcagcattcttagcattattagaacctaatgacactattcttggaatgagcctagatcatggggggcacttaacccatgggtctaaagtaaatttttctggaagaaattataaaagcattcaatatggacttcatccagaaacagatgatattaattatgatgaggtaagggatttagcaaaaaaacataatccaaaattaattattgctggcttctctgcattttctggaattgttgattgggaaaagtttaaagatattgctgaagaagttggggcattcttgcttgttgatatggcacatgtttctggtctgattgctgcaggcctatacccttccccaattccatatgctgatgttgtaacttctactactcacaaaactttacgagggccaagatctggaattattcttgcaaagaaaaatgaagaaatagaaaaaaaattaaactctgcagtatttccaggatctcaaggaggtccattaatgcatgttattgctgcgaaagcgatatgttttaaagaagcattagatcctgaatttaaaatctacactaaacaggttatggataatgcaaaacttatggcagaaactcttatctctaataatattgatattgttacaaatggaacaaaaaatcatattgttttagtggatttaagaaataaaaatatcagtggcaaagacctagaaagtactttgggtcatgtaaatataacagttaataaaaattctgtgccaaatgatccagcctcaccatttgtaacatctggaataaggattggaacaccagctgttaccacaagaggctttaaagaagcagaaattataaaaattagcaactggatatcatcaattattaatgattttgataatgttgagttgcaaaataaaattaaaaaagaagtccataatctgacacatgaatttcccgtatataatttataaa

SEQ ID NO: 228505 - DNA, 563 bp, Unknown
  Bacterial polypeptide expressing nucleotide sequence isolated from the Sargasso Sea
catgactaaaacccctcttaaaacctcggatcctgaactatataatattctattaaaagaagtagtccgtgaagacaccactttagaattaatcgcttcagaaaactttgttagttatccagtcttagaaatggctggaggtgtaatgaccaataaatacgcagaaggctacccagggaatcggtattatggtggctgtgaatttgttgatcaagcagaaaatatagctaaggatagagctaataagttatttggagttaaatactcaaatgttcagccgcactctggttcacaagcaaatatggctgttttaatgacatatcttaaccctggagatacgattttaggccttgatcttgcacatggaggtcatttaacgcatggaagtaaagtaaacttttctggaaagctatataattcaatcttttaccaagttgataaaggttcaggtttagtgaattttaatgaagtacttaagttagctcgagagcataaacctaaattgattatttgtggaggctctgcatatccaagatttattgaatttccagaattcaaacaaa

SEQ ID NO: 228506 - DNA, 814 bp, Unknown
  Bacterial polypeptide expressing nucleotide sequence isolated from the Sargasso Sea
actgatagattacgataacgttgaaaaacttgctcttgagcataaacctaaattgataattgctggtggtagtgcttattcaagagttattgattttaaaagatttcgtgaaatagcagataaagttggtgcatacttaatggtagacatggctcatttctcaggtttagttgctggaaaaggttatccaaatccatgtgattatgcccacgttgttacttccacaacccacaaggtatttagaagtgctagaggtggaataattttatcaaatgatgaagacttaggtaaaaaatttgataccgcagtttttccagggtatcaaggtggacctttgatgcatatagttgctgcaaaagctgcaggtttttttgaagcacttaaaccagaatttcaaacttatattaagaatgttttagctaatgcaaaaatgttagctgaaactttaaagaacaatggtttcaaaatttattcaggtggtactgacactcacttaatgcttgttgatctaagaccttttaacgttaaaggaaatatggcttctgaaagcttatgtagagctaatattacatgtaataaaaatggaataccttttgatacagaaaaaccgatgattacttctgggatacgacttggctctcaagctgcaactacaagaggttttggtttaaaggaatttgaaaaagttggtaatttaataacgaaggtgattaaaggtttatctgaaaatcctgaggataatagtaaagttgaggaagaggttagaaatgaagtgttgatttatgttctaactttccaatttataaaaatttga

SEQ ID NO: 228507 - DNA, 946 bp, Unknown
  Bacterial polypeptide expressing nucleotide sequence isolated from the Sargasso Sea
ccaggtgacacttttatgggaatgagtttaaattctggtggtcatatcactcatgggttaaaaatctcaatgtctggtaaatggtttaatcctataggttatgatgttgataaaaattctgaacttattgattatgataaagttgaaaaacttgccttagagcataaaccaaaacttataatagctggtggaagtgcatattctagagttatagattttaaaaaatttagaattatagctgataaagtaggtgcatatcttatggttgatatggctcatttttcaggtttggttgcaggaaaaggttatcctaatccatgtgagtatgcgcatgttgtaacttcaactacacataaagtttttagaagtgccagaggaggtattattttaacaaaccatgaagatatagcaaaaaaaattaatactgcggtttttccaggttaccaaggtggacctttaatgcatattattgctgcaaaagccgcagggtttcttgaagcattaaggcctgaatttaaagattatataaaatctgtgctagctaatgcaaaaattttatctgaaactttaaaaaataatggatttaaaatttattcaggaggtacagacacacacttaatgctagttgatttaagaccttttaatgttaagggcaatttagctgcagaaagtttatctaaagctaatataacttgcaataaaaatggtattccatttgattcagagagtccgatgattacatctggcattaggcttggttctcaggcagctaccacaagagggtttggattaaaagaatttgaaaaagtaggagaattaattactaaagtaattgatggattgtctaaaaatccaaatgataatagcaaaattgaagatgaagtaaggaaagaagttgtttcactttgttcatcctttccaatatataagaatttaagaaaatgat

SEQ ID NO: 228508 - DNA, 1006 bp, Unknown
  Bacterial polypeptide expressing nucleotide sequence isolated from the Sargasso Sea
aaactctcaaccgcattcaggagctcaagctaacggagcaacatttctggctttacttaaacctggtgatacatttatgggaatgagtttaaattctggtggccatataactcatggtttaaaaatttcaatgtctggaaaatggtttaatccaataggttatgatgttgataaagaatctgaacttattgattatgatcatgttgaaaaattagcattagaacacaaacctaaacttataattgcgggtggaagtgcttattctagagttatagattttaaaagatttagagaaatttgcgataaggtaggtgcataccttatggtcgacatggcacatttttcaggtttggttgctggaaaaggttacccaaatccgtgcgaacatgcccatgttgtaacttcaactactcataaagtttttagaagtgcaagaggtggtattatattaacaaatcatgaagatattgctaaaaaaattaacactgcagtatttcctggctaccaaggtggacctttaatgcatatcattgctgcaaaagcagcaggctttttagaagcacttagacctgaatttaaagattatataaaatctgttctagctaacgcaaaaattttatctgaaactttaaaaaataatggatttaaaatttattctggaggaactgacactcatttaatgttagttgatttaagaccttttaaagttaagggtaatttagccgccgaaagtttatctagagctaatataacatgtaacaaaaatggtattccctttgactcagaaagcccaatgattacatctggtattaggcttggatctcaagctgcaacaacaagaggttttggattaaaggaatttgaaatggtagggaaactaattacaaaagtaattgatgggttatcaaaaaatccagatgataatagtaaagttgaagatgaagttagaaaacaagttgttactctttgttcatcatttcctatatacaaaaatttaagaaaatga

SEQ ID NO: 228509 - DNA, 1255 bp, Unknown
  Bacterial polypeptide expressing nucleotide sequence isolated from the Sargasso Sea
atgtttgataacaataaaacacttaaagattttgaccctgacctttggtcttcaatagataacgaaaaaactagacaagaagatcacatagaactaattgcatcagaaaattacacctctaaaagagttttagaagcacaaggttcagttttaacaaataaatatgctgaaggctatcctggggctagatactatgggggttgcgaaaacgttgatattgcagaatctctagctatagaaagagccaaaaaaatttacggcgcagcttatgctaacgttcaacctcattctggtgctagcgcaaatgctgcagtctacctagctctttgcgaagccggagattccatactggggatgagtcttgaccatggtggacatttaacgcatggagctaaagttaacttttctggaaagacttatgaatcatttcaatacggacttgatccttcaaccggcgaaatagactatgaagaagttgaaaaattagctaagcaacataatccaaagatgatagttgcaggattctcggcttactcagggatagtagactgggaaaaatttagagaagttgcagatgcagtaggagcatatttgttagttgatatggctcatgtttctggactcattgcggctgatgaatacccttcgcctataccattcgcagatgtagtaacaaccacaacccataaaacgttaagaggtcctagaggcggcttaattcttgctaaagaaaatgaagaaattcataaaaaactaaattcaggcatattcccaggaactcaaggaggtccgttaatgcatgttatagctgctaaagccgtttgctttaaagaggctttagagccaagttttaaagattaccaaaaacaggttaagctaaacgcaaaaaaaatggctgctacttttatggaacgaggaattaatattgtttctaatggaactgaaaatcatatgttccttgttgacctcatagaaaaaggcctaactggcaaggatgcagacgctgcattaggtcaagcaaatattacagtaaataaaaacgctgttcctaatgatccgcaatcaccttttgtcactagcggtctaaggattggtactcctgcatcaacaacaaggggattcaaggaagctgaagtagctgaagtaacatcttggatatgcgacattctggatgatataaacaacgagcaggtaattaacgaagtgaagaacaaagtgaaagatatttgttcaagatttcctgtctattcttagt

SEQ ID NO: 228510 - DNA, 932 bp, Unknown
  Bacterial polypeptide expressing nucleotide sequence isolated from the Sargasso Sea
tatgaactcatcaaaaagcgataatatattttcaaataatcaatcaatcaaagattatgattcagagctttggctatctttccaaaaagaggctgaaagacaagaagatcatattgagttaattgcatcagaaaactatgcgtccaaaagaattcttgaagcacaaggatctctactcaccaataaatatgcagagggctatccttcaaaaaggtactatggaggatgtgaaaatgttgatattgcagaaaacctagctattgaaagagctaaagagctgtttaaagcagattatgcaaacgttcaaccacattcaggatcatcagcaaatgcagcagcatatttagcccttcttgaaccaaatgatactattcttggaatgagtcttgatcatggaggacatttaactcatggctctaaagtaaatttttcaggcagaaactataaaagtattcaatatggtttgcatcctgaaacaaatgacatcaattatgaagaagtaaggtctcttgcaaaaaaacataaaccaagactaataattgctggtttttcagcattttctggaattgtaaattggaaaaaatttagagaaattgctgatgaagttgatgcatattttctcgttgatatggctcatgtttctggtctggttgcagctgatttatatccctctccagtaccttatgcagatgttgttacatcaacaacccataaaactctaagaggtcctaggtctggtattattcttgcaaaagcaaatcaggaaattgaaaaaaaattaaattctgctgttttcccaggatcacaaggaggacctttaatgcacgtagttgccgctaaagctttatgcttcaaagaggctttaaatccagaatttaaaatatacattcaacaagtaatgcaaaatgcaaaaattatggcagaaacaatca

SEQ ID NO: 228511 - DNA, 1309 bp, Unknown
  Bacterial polypeptide expressing nucleotide sequence isolated from the Sargasso Sea
atgtcgagtgaaaaaaattatttaaatgatagttataagagcttctttgaggacagtttatccttaaaagatccagaactttataaagctattaaagatgaactagtaagacaacaacaacatattgaattgatagcctctgaaaacatagtttcacaagcagtattagaggcacaaggatcagttttaacaaacaagtatgccgaaggttatccaggaaaaagatactacaacggttgtgagcatgttgatgtagctgaaaaccttgccattgaaaggttaaaaaaattatttaattgtaaatttgcaaacgcacaaccacactcaggtgctcaagcaaatggtgcagtatttttagctttgttaagcccaggtgatacttttatgggaatgagtttaaattcaggaggtcatataactcatggattaaaaatttcaatgtctggtaagtggtttaatgcagtaggttacgatgttgataaggaatcagaattaattgattatgataatgttgaaaaacttgctttagaacataagcctaaacttataatagcaggtggaagcgcttattctagagtaattgattttaaaagatttagagatatagcggataaagttggcgcatatctaatggttgatatggcacacttctcaggtttagttgcgggtaaaggttatcctaatccttgtgactatgcacatgttgttacctcaactacacataaagtatttagaagtgctagaggaggtataattttaaccaatcacgaagatcttgctaaaaaatttaatacagcagtctttcctggttatcaggggggacctttgatgcatatcattgcagctaaggcagctggatttttggaggccttacagccagaatttcaagattatattaaatctgttttagcaaatgccaagatacttgcagaaactttaaaaaataatggatttaaaatttattcagatggaacagacactcatttgatgttggtagatttaaggccttataatgtaaatggcaatcttgcagctgagagtttatcaagagcaaatattacatgtaataaaaatggtattccttttgataaagaaaaacctatgattacttcaggaattagattaggcacacaagcagctacaacacgaggttttggattaagtgagtttaaaacagtaggggagttgatcacaaaaactttaaaaggattatcagaaaatccaacagataatagtaaaatagaaaacgaagtaaaaaatgaagttatttctttaacttcatcatttccgatatataagaacctataat

SEQ ID NO: 228512 - DNA, 457 bp, Unknown
  Bacterial polypeptide expressing nucleotide sequence isolated from the Sargasso Sea
caagaagcacttaaacctgagtttaaagaatatattaaatccgtgcttgctaatgcaaaaatcttatctgaaactttaaagaataatggatttaaaatattttctggtggtacagacacacatttaatgcttgtagatttaagacctttcaaagttacaggaaaagctgccgaagtcagtttatgtaattcgaatataacttgtaataaaaatggtattccatttgatactgaaaaaatgactattacttctggtataagacttgggtctcaagctgcaacaacaagaggttttggattaaacgaatttaaaaaagttggtgaattaattactaaagttgtgaaaggcctttccaaaaatccagatgacaatagtaaaattgagtctgaggtaagaaaagaagtaattgatctctgctcaaattttcctatatataatcatttgtttaaaaattaaa

SEQ ID NO: 228513 - DNA, 913 bp, Unknown
  Bacterial polypeptide expressing nucleotide sequence isolated from the Sargasso Sea
atgtctagtgaaaaaaattatttaaacgatagttataaaagtttctttgaagatagtttatcagtcaaagatcctgaactttataaagcaattaaggatgaattaatcagacaacaacagcatatagaactaatcgcttctgaaaatatagtttctcaagcggtattagaagcacaaggttcagttttaacaaataaatatgcagaaggttatcctggtaaaagatattacaatggttgtgagcatgttgatgttgcagaaaacctagcaattgaaagattaaaaaaattatttaattgtaaatttgcaaacgcacaaccacattcaggtgctcaggcaaatggtgcggtatttttagcattgctaagcccaggagacacattcatgggtatgagtttaaattcaggtggtcatataacccatggattaaaaatttcaatgtctggtaaatggtttaacgcaataggatatgatgttgataaagaatcagaattaattgactatgataatgttgaaaaacttgcattagaacataaacctaaactgataatagctggtggaagtgcttattctagagtaattgatttcaagagatttagagagattgcagataaagttggagcatatttaatggttgatatggcacatttctcaggtttggttgcaggtaaaggttatcctaatccttgtgattatgcacatgttgttacatcaactacacacaaagtatttagaagtgcaagaggtggtataattttaactaatcacgaagatcttgctaaaaaatttaatacagcagtctttcccggttatcagggaggacccttgatgcatatcattgcagctaaggcagctggatttttggaggccttacagccagaatttcaaaattatattaaatcagttttagcaa

SEQ ID NO: 228514 - DNA, 1276 bp, Unknown
  Bacterial polypeptide expressing nucleotide sequence isolated from the Sargasso Sea
tatgtcgaatacccagcctttcttctcgcagcccctcgccgagcgcgacgcgccggtgcgcagcgccatcctgaaggaactcgagcgtcagcagtcgcaggtcgagctgatcgcgtcggaaaacatcgtgtcgcgcgccgtgctagaggcgcagggctcggtgctgaccaacaagtacgcggaaggctatcccggcaagcgctattacggcggctgcgaattcgcggatgaagtcgaggcgctggcaatcgagcgcgtgaagcagatcttcaacgccggctatgcgaacgtgcagccgcactcgggcgcgcaggcgaacggctcggtgatgctcgcgctggccaagccgggcgacacggtgctcggcatgtcgctcgacgcgggcggccacctgacgcacggcgcgaagccggcgctgtcgggcaagtggttcaacgccgtgcagtacggggtgaaccgcgacacgatgctgatcgactacgaccaggtcgaggaactcgcccagcagcacaagccgaacctgatcatcgccggcttctcggcctacccgcgtgcgctcgacttcgcgcgcttccgtgcgattgccgatggcgtgggcgcgaagctgatggtcgacatggcgcacatcgccggcgtgatcgccgcgggccgccacgcgaacccggtcgagcatgcgcacgtcgtcacgtcgaccacccacaagacgctgcgcggcccgcgcggcggcttcgtgctgaccaacgacgaggagatcgcgaagaagatcaactcggccgtgttccccggcctgcagggcggcccgctgatgcacgtgatcgccggcaaggccgtcgcgttcggcgaagtgctgcacgcggacttcaagacctacatcgacaacgtgctcgcgaacgcgcaggcgctcggcgaagtgctgaaggcgggcggcgtcgatctcgtcacgggcggcaccgacaaccacctgctgctggtcgacctgcgcccgaagggcctgaagggcgcgccggtcgagcaggcgctggagcgcgcgggcatcacctgcaacaagaacggcattccgttcgacaccgagaagccgaccgtcacgtcgggcatccgcctcggcacgccggccggcacgacgcgcggcttcggcgtcgcggaattccgcgaggtgggccgcctgatcctggaagtgttcgacgcgctgcgcgcgaatccggaaggcgaccacgcgaccgaacagcgcgtgcgccgcgagatcttcgcgttgtgcgaacgcttcccgatctattga

SEQ ID NO: 228515 - DNA, 1258 bp, Unknown
  Bacterial polypeptide expressing nucleotide sequence isolated from the Sargasso Sea
tatgttcatcacccaaaagaatttaaaggaatttgatccagaattatggtcttccataaacaatgaaacttcccgtcaagaagagcacattgagctaattgcatctgaaaactacacatccaagagtatcttggaagttcaaggttctgttttaacaaacaaatatgctgaaggttatccaggcaaaagatactacgggggttgcgagcatgttgatgttgcagaatcattagcaatagatagggctaaagaattatatggagctgcatatgcgaatgttcaacctcactcaggtgctagtgccaattccgcagtctatctagctttatgtgaggccggcgattctatcttaggtatgagcctagatcatggtggtcatttaactcatggcgctaaggtaaacttctcgggaaaaacgtatgagtcttttcagtatggtctcgatccatctacaggtgaactaaattatcaagaagttgaagatttagctaaaaaacataatcctaaaatgattgttgcaggattctcagcatattcaggaatagttgattgggaaagattcagaaaaattgcagattcagttgatgcttaccttcttgttgatatggctcacgtatctggtttagtggctgcaggagaatacccctctcctatcccttatgcagatgtggttacgaccactactcataaaacattgagaggaccaagaggtggcttaatcttggcaaaggagaacgaagagatacataagaaacttaactctgctatttttccaggaacacaaggggggccattaatgcatgtcatagcagcaaaagctgtttgttttaaagaagctctggatcctgcctttaagaattaccaaaaacaagtcaaagcaaatgcaaaacaaatggctgctacattcatggaaagaggaattaaaatcgtttcgaatggaactgaaaaccatatgttcttggtagatctcgtcgaaaaaggtttaacaggtaaagatgctgacgctgctctaggtcaggccaatataacagtcaataaaaatgctgtgcctaatgaccctcagtcaccgttcgtaactagcggcttaagaataggcacacctgcggcaactacaagaggattcaaagaagaagaaatcactctggtagcaacctggatatgcgatgttcttgaggacattaataatgaacaagtcatagaagaagtaaaaactaaagttattgaactttgttctagatttccagtatattctaattag

SEQ ID NO: 228516 - DNA, 956 bp, Unknown
  Bacterial polypeptide expressing nucleotide sequence isolated from the Sargasso Sea
aaatgctgctgcctatctagccttgctagacccaaacgatactattttaggaatgagtctagatcatggaggtcatttaactcacggatcaaaagtaaatttttctggtagaaattataaaagttatcaatatggtctacatcctggaactaatgatataaattatgatgaagtaagatcgcttgcaaaagaacataatccaaaactaattattgcaggattttctgcttttactggaattattgattggcaagaatttagaaaaattgctgatgaagttggagcttattttttagttgatatggctcatgtttcaggtcttgtagctgctgacttatatccatcgcctattccatatgctgatgttgtaacatcaactactcataaaactctcagaggaccaaggtctggaatcattcttgccaaagaaaataaagaaatagaaaaaaaactaaactctgctgtttttcctggatcacagggcggccccctaatgcatgtagttgcagcaaaagctttatgctttaaagaagctctggaacctgattttaaaatctatattcaacaagttatggataatgcaaaaattatggctaaaacaattatgtctaatggtattgatattgtatgtaatggtactgaaaatcatatagtgttagttgaccttagaagtaagaatattacaggaaaggatttagaaagggtattaggagatgtgaacataactgtcaataaaaactcagttccaaatgaccctgcctcaccatttattacttcaggtattagaattgggacccctgctgtaactacaagaggatttaaagaaaaggaaataattcaaattagtaattggatctcagatattatcgatgattttgaaaacacagaattgcaaaaaagtattaaagagaaagtgcttaatcttacaagtaattttccggtatatagtgtttaaa

SEQ ID NO: 228517 - DNA, 373 bp, Unknown
  Bacterial polypeptide expressing nucleotide sequence isolated from the Sargasso Sea
tttaaaaaataatggatttaaaatttattcagatggaacagacacacatttgatgttggttgatttgagaccttacaacgtaaaaggaaatcttgcggcagagagtttgtctagagcaaatattacatgtaataaaaatggcattccatttgatacagaaaaacctatgattacttcaggcattagactgggtacgcaagcagctacaacacgaggatttggtttaaatgaatttaaaacagtaggtgaattgattacgaaaactctaaagggattatcagaaaatccaacagataatagtaaaatagaagatgaagtaaaaaatgaagttatttctttaacttcatcatttccgatatataagaacttataa

SEQ ID NO: 228518 - DNA, 1255 bp, Unknown
  Bacterial polypeptide expressing nucleotide sequence isolated from the Sargasso Sea
atgactttttcagaaacattatcaaaacttgacccagatctcgctactgcgattgagtcggaacaaaagaggcaagaggagcacatcgagttgattgcctctgaaaattatacctcatcagaggtcatggagatccaaggatcggttttaacaaataagtatgcggagggttatccgggcagaagatactatggggggtgtgagcatgtggatgaagctgaagtgctcgcaattgaaagagttaaggagcttttcaatgccgattatgccaacgtgcaacctcattctggttcacaagccaatatggctgtatacatgtctttgcttgatcaaggggacaagattcttggcatgagtttatccgatggcggtcatcttacgcatggagcaaaagttaatttttctgggcagttatacgaattcttctcatacggcatcaatcccgatacggggagaatagattatgatcaggtgtctgcactggcagagaaacatcgtccaaagatgatcgtcgctgggttttctgcatactcaagattggttgattggacaaagtttagagaaattgcagactccattgacgcatactttatggtggatatggctcatatatcgggactcatagcaggagattgttatccaaatcctgtaccaatagcagatgtgacaacctccacaacacacaagacactgagaggccccagaggcggtatcatacttgcacgtgaaaatgaggaaatacaaaaagccatcaataagcaggtttttcctggaacacaaggcggacctttgatgcatgttattgctgccaaagcccacgcatttaaagaagcactcaggccagaatttaaaacttaccaacaagcagtcgtgaagaatgcacaagccatggcatcaagatttcaggaactcgggtacaaaattgtatccgatggaaccgattgccatttatttttagttgatctcagtgatacagacatcaccggtgccgatggtgagaaagtattgggcaaagccaatattacattgaataaaaattcagttccgaacgagcaaagatcacccatggtaacgagtggccttaggataggctcgccagccatcacaacaagagggtttgacgtcaatgaatctgtgtatgttgttgacctcatccactctgttttgggcgatattgataatgaaagcaacatttcttctgtgaagaataaagtcacggatctctgcaaaggttttcctgtttatttaaagtaag

SEQ ID NO: 228519 - DNA, 658 bp, Unknown
  Bacterial polypeptide expressing nucleotide sequence isolated from the Sargasso Sea
atgaaacaatcaagtaactataatatctttactacaaaaattgaaaagtcgtcaaaaagcgataatatttttgccaataaagagtctataaaagattatgactcagaattatggacatcttttgaatatgaagcacacagacaagaggatcatattgaattaatagcatctgaaaattatgcgtcaaaaagaattcttgaggcacaaggatctttattgacaaataaatatgctgaaggatatccatcaaaaagatactatggtggttgtgaaaatgttgatattgctgaaaatctagctataaaaagagcgaaacaactgtataaagcagattatgcaaatgttcagccccattcaggctcatctgcaaatgctgcagcttatttggcattattagagccgaatgacactatacttggaatgagtcttgatcatggtggtcacttaactcatggttcaaaagttaatttttctggtaaaaattataaaagcgttcaatatgggcttcatcctgaaacacatgatattaattacgaccaagttagagcattagcaaaagagcataagcctaagttaataattgctggtttttctgcatttaccggaataatagactggaaaaaatttcgtgaaatatctgacgaagttggtgcatatt

SEQ ID NO: 228520 - DNA, 1312 bp, Unknown
  Bacterial polypeptide expressing nucleotide sequence isolated from the Sargasso Sea
atgtcaagtgaaacaaaatatttaaatagtgagtacaaagacttttttgaaaaaagtttattagatagcgatccagaaattcataaagctattaatgatgagttagtaagacaacaaaatcatatagaattaattgcatctgaaaatattgtatctcaagcagtccttgaggctcaaggttcagtattaacaaataaatatgctgaaggttatcctggtaaaagatactataatggctgtgaacatgtggatgttgcagaacaactagctatagagagacttaaaaaattatttaattgtaaatttgccaacgctcaacctcactcaggggcacaggcaaacggtgctgtatttttagctttgctaaaacctggggatacttttatgggaatgagtttgaattcaggaggacatattactcatggtttaaaaatttctatgtcaggaaaatggtttaatgcaattggatatgaagttgataaagaatctgaactcattgactatgataatgtagaaaagcttgcgctagagcacaaacctaaacttataattgctggtggtagtgcttattcaagagtaattgattttaaaagatttagagaaatagctgacaaggttggagcatacttaatggttgatatggctcatttttctggtttggttgcaggtaagggatatccaaatccgtgtgactatgctcatgtggttacatcaactactcataaagtttttagaagtgcgagaggtggaattattttaactaatcacgaggatttatctaaaaaatttaatacagctgttttccctggataccaaggaggaccacttatgcatataatagctgctaaagcagttggattcaaagaggcattaaaaccagaatttaaagattatattaaaactgttttagcaaacgcaaaaattttagctgaaacattaaaaaataatggttttaaaatctattcaggcggaacagatacacatctgatgttagttgacttaagaccttttaatgtaaaaggcaatgttgctgcagaaagcctttctagagctaacataacatgtaataaaaatggtattccatttgatagtgaaagcccaatgataacttctggcataagacttggatcgcaggctgccacaacaagaggatttgggttaaaagaatttcagatagtaggtgatttaataacaaaaacaattaaaggattggcagaaaatcctgaagataactctaaaattgaggatgaagtaagaaaagaagttgttagcctatgttcaaattttcctatatataagcacttaggttaac

SEQ ID NO: 228521 - DNA, 1164 bp, Unknown
  Bacterial polypeptide expressing nucleotide sequence isolated from the Sargasso Sea
cgaaagcagtacttgatgctcaaggatcaattttaacaaataaatatgcagaaggttatcccggtaaaagatattacggcggatgtgaatttgtagacaaagctgaagagttagctttagatagagttaaaaaattattcaattgtaaatttgcaaatgttcaacctcattcaggggcgcaggcaaacggagctgtttatcttgcacttttaaatccaggtgatccaattcttgcaatgagtttaaattcaggaggtcatttaactcatggagcaaaggttgctcagtcgggaaaatggtttaaagcttttcattacgaagtaaacaaagaaactggtcttattgattatgatcaaatccaaaaactagctaccgagcataaacccaagatattaattgctggcgggagcgcatattcaagaataatagattttaaaaagtttcgtaaaattgcagacagtgttaacgcatatctcatggttgatatggcccacttctcaggtttagttgctggaaagggataccccaatcctgttgaatatgctgatgttgttacttctacaacgcacaaagttttaagaggtggtagaggaggaattattttaaccaatagagaagatttgcataaaaaatttaactctgcagtatttcctggttatcaaggcggacctttaatgcatgtagtagcagcaaaagcagtagcatttcatgaagccttacaaccaaactttagagaatatataaaatctgtgttagaaaatgctaaaattttatcagaaacactcaaaaacaatgggttcaagattttttcaggcggaacagatacccatttaatgcttgtggacttaagaccttttaaagttacaggcaaagctgcagaagttagtttgtgtaattcaaatattacatgtaataaaaacggtataccttttgatactgaaaagatgacaattacatctggaattagactcggatcacaagcagctacaacaagaggatttggattaaatgaatttaaaaaagttggagaattaattacaaaagtaatcaaaggtttatctgctaatcctgacgataattccaaaaccgagtcagaggttagaaaagaagtgattgaactttgttctaaatttcctatatacaatcatttgttcaaaaattaaa

SEQ ID NO: 228522 - DNA, 1282 bp, Unknown
  Bacterial polypeptide expressing nucleotide sequence isolated from the Sargasso Sea
atgaactcatcaaaaagcgataatattttttcaaataatcaatcaataaaagattatgattcagaactttggctatctttcgaaaaagaggctgaaagacaagaagatcatattgagttaattgcatcagaaaactatgcgtccaaaagaattcttgaagcacaaggatctttacttaccaataaatatgcagagggttatccttcaaaaaggtactatggaggatgtgaaaatgttgatattgcagaaaacctagctattgaaagagctaaagagctatttaaagcagattatgcaaatgttcagccacattctggttcatcagcaaatgcagcagcatatttagcccttcttgagccaaatgatactattcttgggatgagtcttgatcatggaggacatttaactcatggctctaaagtaaatttttcaggtagaaattataaaagtgttcagtatggtttgcatcctgaaacaaatgatattaattatgaagaggtaaggtctcttgcaaaagagcataaaccgaagctaataattgctggtttttcagcattctctggaattgttaattggaaaaaatttagagaaattgctgatgaagttgatgcatattttctcgttgatatggctcatgtttctggtctggttgcagctgatttatatccctctccagtaccttatgcagatgttgttacatcaacaacccataaaactctgagaggtcctaggtctggtattattcttgcaaaagctaatcaggaaattgaaaaaaaattaaattctgctgttttcccaggatcacaaggaggacctttaatgcacgtagttgccgctaaagctttatgcttcaaagaggctttaaatccagaatttaaaatatacattcaacaagtaatgcaaaatgcaaaaattatggcagaaacaatcatgtccaatgatgttgatgttgttagtaatggtacagaaaatcatattgtattggttgatttaagaaataaggatatgacaggcaaggatctagaaaaagtgcttggttctgtaaatattacagttaataaaaattctgtgccaaatgatcctgcttctccatttgtgacttcaggaattagaataggaacacccgcagttacaactagaggtttcaaagaaaaagaaattatccaagtaagtgaatggatatgtgaaatcattaataattttgatgatgaaaaattgcaaaacaatattaaaaaagaggtatcaaatctcacagataattttccagtatataattcataga

SEQ ID NO: 228523 - DNA, 204 bp, Unknown
  Bacterial polypeptide expressing nucleotide sequence isolated from the Sargasso Sea
catgagtgacagcactgcttcttcgatcaacacaggtcttgcggccgccgatcccgccattgcagccctgattgagaaggagcagcagcgtcaggaaacccacctggagctgatcgccagcgaaaatttcgcctcccgggccgtgatggacgctcagggttcggtgctgacgaacaagtacgccgaggggctccccagcaagcg

SEQ ID NO: 228524 - DNA, 441 bp, Unknown
  Bacterial polypeptide expressing nucleotide sequence isolated from the Sargasso Sea
cggtagcgcttaaagaagccatgacagcagagttccgcgcttatcaaaagcaggtagtcattaatgcacaagctatggctgatgtgtttatgaagcgtggctttgacgtagtttctaatggaaccgacaaccacatgttcctgctaagtcttgtaagcaaaggaatgacggggaaagaagccgacgcgatattaaatagcgtgaatataacggtaaataagaacacagtacctaacgacccgcagtcgccattcgttacaagtggtattcgaattggcacacctgcggtcacttcacgcaattttagtgaagaagactgtgctcaattagcccattggatttgtgatgtgttaacagcgccagaagacaatgcagtagtacagcaagtgatagataaagtggcaacgctaacagcggctcgccccgtttatactaagtaaa

SEQ ID NO: 228525 - DNA, 982 bp, Unknown
  Bacterial polypeptide expressing nucleotide sequence isolated from the Sargasso Sea
acatcttccggcgcacaagcaaaccaaacagtttttctatctcttttggagccgggtgataccatattaggtatgtctctggctgctgggggtcatttaactcatggagcaaaacctaatcagtctggaaagtggttcaacgccgtgcaatatggggtcaaaaaggaaacttcgttaatagactttgatgaagtggcgactttagcaaaggcccataggccaaaacttattattgcgggcggttccgcctatgcaagaattatagacttcaagcgtttccgcgaaatagccgatgcaattggagcctatcttctcgtcgacatggctcatttctctggattagttgccgggggtgtttatcccaacccccttcgctatgcgcacgtagtgacctctacaactcataaaacgttaagggggccacgcggcggtattatattaacgaatgacgagaacttagcgaaaaaaattaattccggactattcccgggtcttcaaggagggcctttgatgcatgtcattgcggcaaaagccgtggcatttggggaggctcaacacgaaacgtttaaaaactatgtttcgcaagtgattagtaatgcaaacgagctttcaaaccaattaaagtcgagaggaatcgatattgtttccggaggtacggatactcatttggtgcttgttgatcttcgtagtttaaagattacaggtttactggccgaaactagcttggaaagcgttggcataacctgtaataaaaatggagttccatttgatcccgaaaagcccacggttacatctggcattagattgggtactcccgcagcaaccacacgcggatttcgtgaaatggactttaaaaagatagctgacttgatagccaatgttttgaaaaatcttagtgaacaaaaatcgttagacgtggaagtaagtcaacagacgtgtatggaggttcgttccttgtgtgaacgtttcccaatatattaaa

SEQ ID NO: 228526 - DNA, 1291 bp, Unknown
  Bacterial polypeptide expressing nucleotide sequence isolated from the Sargasso Sea
tatgcttgaaaataaatctaatcttaaaactgatgcaatcttttcaaataaaaaagatatagaactttacgatgctgagctttgggaatcctttgaaaaggaaatggttagacaagaagaacatattgaacttatagcttcagaaaattatgcaagtcaaagagtgcttcaggctcaaggttctgtattaacaaataaatatgctgagggatatcctgacaaaagatattatggtggctgtgagtttgttgatattgctgagaggttagcaatagatagagctaaggagctttttaatgctgattatgccaacgttcagcctcattctggttcctctgcaaatgctgctgcatatttagcattacttgagccaaatgacgcaatactcggaatgagtcttgatcatggaggacaccttacgcatggatcgaaagtaaatttttcaggaagaaactataaatcttttcaatacggtttaaatcctgaaacacatgatatcgattatgaccaagttcgtgatttagcaaaaaaacataacccaaaactaataattgctgggttctcagctttctctggtttagttgactggagcatatttagagaaattgcagatgaaattaatgcttatttcttagtagatatggcccacatatcaggacttgtagcggcaggtatgtatccttcacctgtgccgtatgcagatgttgttacatctacgactcacaaaacacttagaggtccaaggtctgggattattcttgcaaggaaaaatgaaaaaatacaaaaaaaattaaactctgcagtttttccaggatcacaaggaggtcctttgatgcatgttgttgctgctaaagcagtttgttttaaagaagctcttgaacctgaatttaaaacatatatgtctcaagttattagtaatgctaaaaccatggcgaagaccattattggaagaggagtcgacatagtaaaaggcggcaccgaaaatcatatgattcttgtcgacctcagaaataagggtataacaggaaaggactctgaatataaacttggtttagctaatatcacagtaaataagaacgctgttcctaatgatccacagtctccctttataacatcaggaataagacttggaacacctgcagttacaacaagaggctttaaagaggatcaaattattcaaatttcaaattggatctgcgatatagtccttgatttagataatgagaaaaaaattgaaggaattaaagataaagctttgtctttatgcaaagaattcccagtatataagtaa

SEQ ID NO: 228527 - DNA, 301 bp, Unknown
  Bacterial polypeptide expressing nucleotide sequence isolated from the Sargasso Sea
atgaaatcatcaagaagcgatagtattttttcgaataataacaccataaaagattatgacaatgaattgtgggcatcctttcaacatgaagctgaaagacaagaagatcatattgaattaatagcctcagaaaattatgcatcaaaacgaatccttgaagctcaaggttctcttttgactaataaatatgctgagggatatccctcaaagcgttactatggtggttgtgaaaatgttgatattgcagagaatcttgcaatagatagagcaaaagaactttttaaagcagattatgcgaatg

SEQ ID NO: 228528 - DNA, 301 bp, Unknown
  Bacterial polypeptide expressing nucleotide sequence isolated from the Sargasso Sea
atgtcgagtgaaaagaattatttaaacgatagttacaaaagtttctttgaggatagtttatctgtaaaagatccagaactttataaagctattaaagatgaattaattagacaacaacagcatatagaattgatcgcgtctgaaaatatagtatctcaagcagtattagaggcacaaggatcggttttaactaataaatatgcggaaggttatcctggtaaacgatattataatggttgcgagcacgttgacgttgcagaaaacctagctattgaaagattaaaaaagttatttaattgta

SEQ ID NO: 228529 - DNA, 319 bp, Unknown
  Bacterial polypeptide expressing nucleotide sequence isolated from the Sargasso Sea
atgagtaatagcaaaaaaatttttgatttaataaaaaaagaagaacagagacaactttctggaattgaattaattgcatctgaaaattttaccagtcccgatgttatgcttgcatgtggatcagttttaactaataaatatgctgaaggttatcctggaaaaagatactatggcggatgtgaagttgtagatgaaattgaaacattggccattgaaagagcaaaatctttatttggagctgagtatgctaatgttcagccacattctggaagtcaggcaaatgctgctgtattccatgcttttttaaagcccaggtgat

SEQ ID NO: 228530 - DNA, 574 bp, Unknown
  Bacterial polypeptide expressing nucleotide sequence isolated from the Sargasso Sea
cttgaatccatggaatatcgttgccccaaaatctggaagagtaaaaaatatttccgaggttttggataattctgttatgcctggcattcaaggcggaccattaatgcatattattgcagcaaaagctgtagcatttggcgaagctttaaaacctgaatttaaattatacgcacaacaaattattgataatgcgaaaatcatggctgatgagtttatttctaaagaatatcaactaatttctgggggtacagatacacatgttattttaattgatttaactaataaaaagattactggtaaagctgcagagaaaactttggaggtagctggtattactattaataaaaatatggttccttatgacgaaaagagcccatttgttacaagtggtattaggataggtacgcctgcagttactacaagaggtatgcaaggggaagaaatgaaaaagattgtttctttaattgattctgcgattagtaatcacgataatcaacaaaaattgttatctatcaaagatgaagtaaacgacttatgtaaatcatttcctttatattccgaactgcaaaattaa

SEQ ID NO: 228531 - DNA, 604 bp, Unknown
  Bacterial polypeptide expressing nucleotide sequence isolated from the Sargasso Sea
ccccacgcccacgtggtcacctccaccacccacaagaccctggccggtccgcgtggtggtctgatcctctccgccgccgacgacgaggagctctacaagaagctcaactccgccgtcttcccgggtggtcagggtggtccgctgatgcacgtcatcgccggtaaagcggtggccttcaaagaggcactggaacccgagttcaagacctaccaagctcaggttgtcaagaacgccaaggcgatggcagcgaccttcatcgagcgcggctacaagatcgtctctggcggtaccgacaaccatctgatgctggttgacctgatcggccgcgagctgaccggtaaggacgctgacgctgcgctgggtaaagccaacatcaccgtcaacaagaactccgtgcccaacgacccgcgctccccgttcgtcacctccggcgtgcggatcggtaccccggctatcacccgccgtggtttcaaggaagccgagtccatccagctgaccaactggatctgtgacgtgctggacaaccacgacaacgatgccgtgctggccaccgtacgtgaacaggtgctggacatctgccgtcgtttcccggtgtatgcctgat

SEQ ID NO: 228532 - DNA, 1097 bp, Unknown
  Bacterial polypeptide expressing nucleotide sequence isolated from the Sargasso Sea
tatgtcaagtgaaggaaagtatttaaacgtagattataaaaacttttttgaaaaaaaactgtcggagactgatccggaggtttacaaagctgttactgatgaacttattagacaacaaaatcatattgaacttattgcatcagaaaatattgtatcacaagctgtattagaagctcagggatctgtattgactaataaatatgcagaaggttatcctgggaaaagatattacaatggatgtgaacacgttgatgtagctgagtctttagctaacgaaagattaaaaaaattatttaattgtaaatttgctaattcccaacctcattcaggtgcacaagcaaatggagcagtttttttagctttattaaaaccaggtgatacatttatgggtatgagtttggactccgggggtcatataactcatggcctaaaaatatctatgtctggaaagtggtttaatgcaatttcctatgatgtggataaaaaaactgagcttcttgattatgatgtaattgaaaaaatggcattagaacataaaccaaaattaattattgctggagctagcgcttattcacgagttattgactttaaaaaatttagagaaatttgtgataaaattggtgcgtacctaatggttgatatggcgcatttctctggtctagtcgctggtaaaggttatcctaatcctgttgatcatgcacacgtagttacatcaacaactcataaagtatttagaagtgcaagaggcggaattattttaacaaatcatgaagatcttgctaaaaaatttaatacagctgtatttcctgggtatcaaggtggaccattaatgcatataattgctgcaaaagctgtaggatttcttgaagctttaaaaccagaatttagagaatacattagttcagttttagcaaatgctaaaatgttagcagaaacattaaaaaataatggtttcaaaatttattctggtggtactgacacacatttaatgttagttgatttaagaccttttaatgtaaagggtaatatagctgcagatagtttatcaaaagcaaatattacatgtaataaaaacggaataccctttcgatacagaa

SEQ ID NO: 228533 - DNA, 298 bp, Unknown
  Bacterial polypeptide expressing nucleotide sequence isolated from the Sargasso Sea
atgtcaagtgaaagtgattacataaatgctcaacatcaaagtttttttgaagatagtttatccaaaacagatcctgaactatttaaagcaattaatgaggaattaaataggcagcaagaacatattgaacttattgcttctgaaaatattgtttctcaagctgtgttagaagctcaaggctcagtattaacaaacaaatatgcagaaggttatcctggaaaaagatattataatggatgtgaacatgtagatgtagctgaacaactcgctttagagagaataaaaaaacttttttaat

SEQ ID NO: 228534 - DNA, 1020 bp, Unknown
  Bacterial polypeptide expressing nucleotide sequence isolated from the Sargasso Sea
aatgtacacagaaaatttatctatccaatcttttgatgaagaactttggagttctttggaaaatgaaaaaaaacgtcaagaagaacacatagaacttatagcctctgaaaattatacttcaccaagagtcttagaagcccaaggttcagttcttacaaataaatatgctgagggatatcctgggaaaagatactacggaggatgtgaatttgttgatgtagcagaacagcttgctattgatagagcaaaagaattatttggagctgattatgccaatgtacaacctcattcaggagcaagtgctaatgcggcagttttcttagctttatgtgacgcaggagataaggtgcttggaatgagtcttgatcaagggggtcatttaacgcatggcgctaaagtaaatttttctggaaaaatttatgagtcattcagctatggtttggataaaagtggagacatcaattacgacgaggtgcaagctttagctgaggaacataaacccaaagttattatttctgggtttagtgcattttctggaattattaaatgggatagattcagagaaatagctgattcagttggagcttatttactggcagatatgtcacatgtatctggattagtggctgcaggaatttatccctcgccagtaccttatgcagatgttgttacaaccacaactcataagacgcttgtaggtcctagaggtggacttatcctagctaaagaaaatgaggatattcacaaaaaattaaattcggcactctttcctggctctcaaggagggcctttaatgcatgtgattgcggcaaaggcagtatgtttcaaagaagcaatggagcctgaattcaaagagtatcaaaatcaagttcttaaaaatgcgcaacacttaagcaagaaaataatggataaagggatagatattgtctcaaatggaactaacaatcatatgttcctagtcaatcttgttagtaaagatcttacaggaaaggaagttgacaatgcgttaggtagagcgaa

SEQ ID NO: 228535 - DNA, 862 bp, Unknown
  Bacterial polypeptide expressing nucleotide sequence isolated from the Sargasso Sea
atgtttacaatggatatgaaaattgcaggatttgacgatgagctcaatgatgcaatgagaaaagagataaaaagacaagaagagcatgttgagctgatagcctcagaaaattacgcaagtccaagagttcttgaggctcaaggatcattaatgactaataaatatgctgaaggttatcctggcaagagatattatggtggttgtgaaaacgttgatgttgcagaacaacttgctatcgataggctcaaagaattatatggtgcagattacgcaaatgttcagccacactctggttcgcaggctaatgcagctgtctatcttgctctcctaaagccaggcgacacaattttgggaatgtcattagatgcaggcgggcatcttacacacggtgcaaaggttaatttttcagggaaaatatttaacgctgtacaatatggtattaatgaagatggattgatcgattacgatgaagttgagagacttgcaaaagaacacaaaccaaaaatgttaattggcggtttttcagcttattctcaaattattgactggaagagaatgtctgagattgcaaaatcagtcggagcatatttccatgttgatatggcccatgtttctggattggtagctgctggagtctacccaaatcctgttccttatgcggacgtcgtaacttcgactacacacaaaacattgagaggcccaagaggcggaattattgtctgtaaagcgaatgaagagcttgagaaaaaatttaactctctagtatttccaggtactcaaggcggtcctttaatgcacgttattgctgctaaagctgttgcatttaaagaagcacttgaaccagaatttaaagaatatatga

SEQ ID NO: 228536 - DNA, 1213 bp, Unknown
  Bacterial polypeptide expressing nucleotide sequence isolated from the Sargasso Sea
aatgaatagtcaagaaaaaatatttagtttaattgaaaaagaaaaaattagacaacttggtggacttgaattaattgcatctgagaactttactagtgaagatgttatgaaggcaacaggatctattttgacaaataagtatgctgaaggttatccaggtaaaagatattatggaggttgtgaagtagtagatcaaatagaactaactgcaatcgatagattaaaagagttatttaaagttgaatatgccaatgtacaacctcattcaggttctcaagctaacacagctgtatttgatgctttccttaagccaggggataagatattaggtcttgatctttctcatggtggacatttaactcacggttccaatgttaatttttcaggtaaaatatattcatctagtttttatggtgtgactaaagaaggaatttttgattatagtgaaattctaacaaaagctaaggaggttatgcctaatttaataattgttggagcttcagcatattcaagagatattgatttttcaaaatttagagaaattgctgatgaagttggagcttttcttcatgcagatattgctcacccatcaggtttgattgcaaaaggctttttaagtgatccagttccttattgtcatgttattacctcaactacccacaaaactctgagaggtccaagaggcggtataataatgatgggtaaagattttgataatccctttggtttaaaacttaaaaatggaaatttaaaaaagatgtcatctattcttgactctgctatttttcctggaaatcaaggtggtccattagaacatgtaattgctgctaaaggaattgcctttggtgaagccttagaatcaaactttgaaaaatacataggtcaagtaataattaatgctaaaaggttatcagaaaatcttatcaatatgggttataatattgtctcaggcggaacagataatcacttaattcttattgacttaagaaataagaatattactggaaaggaagctgaaagagtgcttggtatttcaaatattaccgtaaataagaatatggtgccttttgatgatcaatcaccctttgtaactagtggtattagaattggtacacctgctattactacaagaggactaaatgagcaggacatggattttgttgcagaaactattaactcgtctatagaaaattctgaaaaagaaaatctctaa

SEQ ID NO: 228537 - DNA, 1207 bp, Unknown
  Bacterial polypeptide expressing nucleotide sequence isolated from the Sargasso Sea
catgaatgaatttaaattaacacaaaatcaaaatattgaagagtacgatcctgatttggcaaactttatgggacttgagttgtctcggcaagaagaacacattgaattaattgcttcagagaactatgcgtctaaaagagtgctggaagcacaaggcagtgtgcttacaaataaatacgctgagggctatccaaataagcgatattacggtggatgtgagcatgtagatggtgtagaaagcattgctattgaaagagcaaaaaaattatttggtgcaaaatttgctaatgtacaaccacactctggggcttcagctaatgctgcagtttttttagcattattggaacctggcgatactattttaggtatggctctcgatcaaggaggtcacttaactcatggtgcaaaagtaaatttttctggaagaaattttaatgccatacagtatggtttaaaaaaggatactggaacaattgattatgaagaggttgagaaacttgctgacaaacacaaaccaaaacttataattgctggtttttcagcttatatgggtatagttgactggaaacgttttagggaaattgcagatagaaataaatcttttcttctagttgatatggcccatgtttcaggtctggtagctggtggtgtttatccaaatcctgttgaatatgcgcacgtagttacaagcacaacacacaaatccttgagaggccctagatccgggataattctctctaacgaaaatgaagaatttcagaaaaaattaaactttggtgtttttcccggctctcaaggagggccgcttatgcatgttattgccgcaaaagctgtgtgttttaaagaagctatgacagatgactttgtaaattatcaaaaacagataataaaaaatgcgaaatcaatgtgtgaagattttcagaaattaggattcgaaactgtacaacctcaaactgataatcatctgcttctattagatctaagaaataaaaatatttctggaaaagatgcagaagaattattaggtaaggtgaatattactttgaataagaactcaatacctaacgatcctgaatcaccttttgtaacttctggggtaagaattggtacagcagcaataaccacaagaggctttaaggaagaggaatgctcagaaattgttaaactaatttcagaggctatagaaaatgaaaataaacctgaaatt

SEQ ID NO: 228538 - DNA, 1312 bp, Unknown
  Bacterial polypeptide expressing nucleotide sequence isolated from the Sargasso Sea
tatgtctagtgaaggtaaatatacaaatatagagtatcaaaacttttttgaaaaaaacttatcagatactgatccggaaatttataaagctattaatgatgaattagctaggcaacaacaacatattgaactaattgcatcagagaatattgtttctaatgctcttcttgaagctcaaggatctgtattaactaataagtatgctgaaggttatccaggaaaaagatattataacggatgcgatcatgttgatgtagctgaaaacttagctaacgaaagactaaagaaattatttaattgtaaatttgctaatagccaacctcattccggagctcaagctaatggagcagtcttcttagcattactaaaaccaggtgatactataatgggaatgagtttaaattccggcggtcaccttactcacgggtcaaaagcatctgtttcaggaaaatggtttaacgcaatcgcatatgatgtagataaaaaaacagaattattagattatgagtctatagagaaacttgctgttgagaataaaccaaaacttataattgcaggtggaagtgcgtactctagacaaattgattttaaaaaatttagggagattgcagataaagtaggagcatattttatggtagatatggctcacttttctggtttagttgcaggtaaaggatatccaaatccagtagagtatgctgatgttgttacttcaacaactcataaagtttttagaagtgcacgtggtggaattattttaactaataacgaagctctgtctaaaaaatttaattctgcagttttcccaggttatcaaggtggacctttgatgcacataattgctgcaaaagcagttgggttccttgaagcattaaaaccagaatttagaaattatatttcaaatgtaatggctaatgcaaaaattttagctgagacattaaaaaacaatggttttaaaatatattcaggcggaactgatactcatttaatgttggtagacttaagaccattcaatgtaaaaggaaatattgcggctgacagtttatgtagagcaaacataacatgtaataaaaatggaattccatatgatacagaaagtccaatgataacatctgggataagattaggaacgcaagctgcaactacaaggggttttggtttagatgaatttaaaaaagtaggtgaactaataactaaaacaataaaaggtttatcagcaaatccagacgataatgcgaaagttgaagcagaagtaagagaagaagtaatttcactgtgctcaaaatttccgatttataaaaatttaaaatag

SEQ ID NO: 228539 - DNA, 367 bp, Unknown
  Bacterial polypeptide expressing nucleotide sequence isolated from the Sargasso Sea
tatgaattcatcaaaaagcgacaatattttttcaaataatcaatcaatcaaagattatgattcagaactttggctatctttccaaaaagaagcagaaagacaagaagatcatattgagttaattgcatctgaaaactatgcatctaaaagaattcttgaagcccaaggatctctacttactaacaaatatgcggaaggctatccttcaaaaaggtattatggaggatgtgaaaatgtcgacattgcagaaaatttagcaattgaaagagctaaaaagctatttaaagcagattatgcaaatgttcaaccacattctggttcatcagcaaatgcagcggcatatttagcactccttgagccaaatgat

SEQ ID NO: 228540 - DNA, 695 bp, Unknown
  Bacterial polypeptide expressing nucleotide sequence isolated from the Sargasso Sea
tttctccccttcgggtttaattgcaaaaggaattttaaatgatcctcttccttattgtcatgttgttacaacaactactcacaaaacattacgtggcccgcgtggtggtttaattttaatgggtaaggattttgagaatccatttggaaaaaaatttaaaaatgggaatttaaaacctatgtcaaatcttttagatttagcagtatttccaggaaatcaaggtggtccactagaacatattattggagctaaagcaattgcatttggagaagcaattgaagactcttttatggattatattgttagggttagaaataatgctaaaacaatggctaatgagcttattagcagaaattataacataatatcaagaggaacagataatcatatgatgttaatagatctaagaaataaaaatataaacggaaaagatgctgaaaaagcactagttaatgcagatataactgctaacaaaaacatggtgccatttgatgataagtcaccatttattacatccggaataagatttggaactgcagctgtaactacaagaggtctaaaagaaaatgacatgaaaataattgttgattttattgatcaaacgattactaaccatgaaaatgaaaatttgattactaaaattaaaagtgaagtaaacgaattcatgtcagatttgcctttgtttagaccttaaa

SEQ ID NO: 228541 - DNA, 1312 bp, Unknown
  Bacterial polypeptide expressing nucleotide sequence isolated from the Sargasso Sea
atgtctagtgaaaaagattataaaaactcagaatttaaaaactttttcgaaaaaagtttattagatacagatccggatatttataatgcaattaatgatgaacttataagacaacaaaatcatattgaattgattgcttcagaaaatattgtttcgcaagctgtattagaagctcaaggttcagttttaaccaataaatatgctgaaggatatcctggtaagcgatattataatggatgtgagcacgttgatgttgcagaatctttggcaatagaacgtttaaaaaaattgtttgattgtaaatttgcaaatgctcaacctcattctggtgctcaagcaaatggagctgttttcttagcattacttaaacctggtgatacctttatgggcatgagtttgaattcgggcggacacattactcatggtttaaaaatttcaatgtcaggaaaatggtttaatgcgataggttatgatgtagataaagagtctgagctaattgattatgataatgtagaaaaacttgcactagaacataaacctaaacttataattgcaggtggtagtgcttattcaagagtaatagattttaaaagatttagagaaattgcagataaagttggggcatatcttatggttgatatggctcatttttctggtttagttgcaggtaagggatatccaaatccttgtgattatgcgcatgtagttacatcaacaacacataaagtattcagaagtgctagaggtggtattatattaactaatcacgaagatttatcaaaaaaaattaatacagcagtttttcctgggtaccaaggtggcccgttaatgcatattatagctgctaaggctgttggatttcatgaagcattaaagccagattttaaagaatatattaaatccgtgttagctaatgctaaaattctatcagagacactcaaaaataatggttttaagatttactcaggaggtactgacactcatttaatgctggttgatctaagaccatttaatgtcaaaggtaatttggctgctgaaagtctttctaaggcaaatataacttgtaataaaaatggaataccttttgatagcgaaagcccaatgattacatctggtataagattaggatctcaagctgctaccacaagaggctttggattaaatgaatttaagatagtaggtgaattaattacaaaaacaattaaaggattgtccgaaaatcctgatgataatagtaaagtggaaaatgaagttaagaaagaagtagtagatctctgttctaactttcctatttataaacatttaaggtaat

SEQ ID NO: 228542 - DNA, 478 bp, Unknown
  Bacterial polypeptide expressing nucleotide sequence isolated from the Sargasso Sea
aatagcagctaaagctgcaggttttttagaagcattaaaacctgagtttaaagattatattaaagcagtattagcaaatgctaaaattttatcagaaacacttaaaaataatggatttaaaatttattcaggtggtacagactctcatttgatgttggttgatttaagaccctttaatgtaaaaggaaatttagctgcagaaagtttatgtagagctaacattacctgtaataaaaacggcataccttttgataacgaaagtcccatggtaacatccggtataagacttggcactcaagcagcaactactagaggttttggcttaaaggaatttgaaaaagtaggtgagttgattacaaaagtcattgatggactatctaaaaacccaagtgataacagcaaagttgaagaggaagtaagaaaagaagttgtttcactttgttcgtcttttccaatatataagaatcttagaaaatga

SEQ ID NO: 228543 - DNA, 1264 bp, Unknown
  Bacterial polypeptide expressing nucleotide sequence isolated from the Sargasso Sea
tatggattttttctcaaagccacttaatgaaatagatcaagaaatttcttttgcaatagaccaagagttgtcacgtcaacaaaaccaaatagaattaattgcgtctgagaatattgtttcaaaagcagttctagaagcacaaggatctgttctgacaaataaatatgccgaaggctacgtaagtgctagatattatggtggttgtgagtttgttgatatcgcagaagaccttgcaataaaaagacttaaggaactttacaagtgtgaatatgcaaatgttcaacctcactctggagctcaagcaaatggagctgtttttttagctttgattaagcccggtgatacaattctaggaatgagtcttgatgcaggtggacatttaacacatggatcagcgccgtctttatctgggaaatggtttaatgctgttcaatatggattggatgataagggattaatcaattatgatgaagttgagtttttagcaattgaacataagcctaaaattataattgctggaggtagtgcctattcacgtataattgattttaaaagatttagagaaattgctgataaggttggagcctatcttcatattgatatggcccatttttcaggacttgttgctgctggagaatatcctaaccctttagagtatgcagatgttgttacatccactacacataaaactataagaggtgccagaggcggaatgatattatcaaatgataaagagcttggtaaaaaatttaattcagcagtatttcctggatatcaaggaggtcctttgatgcatgtaatagctgctaaagctgttgcatttggagaagctctgaagcctgagttcaaagaatatattaaacaagttgttttaaacgctaaaaaattaagcgaagtgttagtacatggtggtttaaaaatagtatctgggggcaccgatactcatttacttttggttgatttgactcccaagagtttaacaggagcagctgcttcaacaagtttagaaaatgcaaacattacttgtaacaaaaatggtataccaaaggacccaaatcctccaaaggttacctcaggaattagactaggaactcctgcaggaacaactagaggctttaaagaagaagaattcgagaaagttggggaattaattctagaaactttaaatggacttcaggaaaatcctaatgataatagtttagttgaatcgaaagtaaggcaaaaagtaaaagaactttgtgataagtttccaatttataggtag

SEQ ID NO: 228544 - DNA, 1174 bp, Unknown
  Bacterial polypeptide expressing nucleotide sequence isolated from the Sargasso Sea
tatagcatctaaagcagtcttaaatgctcaaggctcagtgatgacaaataagtatgctgaaggttatccaggaaacaggtattatggtgggtgtgaatttgttgatcaagcggaaaatattgctctagaaagagtaaagaaattatacaattgtaaatatgcaaatttacaaccgcacagtggagctcaagcaaatcaagcagtttttttagctcttttacaacctcatgacacaatacttgggatgtctttagcatcgggaggacatttaactcatggggcaaaacctaatttgtcaggtaaatggtttaatccagttcaatatggcgtcaaaaaggatggaaatgataaagatttaatagattatgatgaagtggaagcattagctattcagcataaaccaaaattgataatagcaggagcatctgcatatcctagagttattgattggaaaaaatttagagatattgctgataaggttggggcatattttttagtggatatggctcattactctgggttgattgcaggaaaacaatatcctaatcctatagagtacgctcatgtggtgacttctacaactcacaaaactctcagaggtgcaagaagtgctatgatattaactaatgatgagactttaataaaaaaaatcaatagtgctgtatttcctggtttgcaaggtggtccactgatgcacgttatggcaggcaaagctgttgcttttggtgaggcacttaagcctgaatttgaagattacataaagaaagttatcgaaaatgctaaagtattagcgtcttccttagtaaataatggtttcaaaatcgtaacaggcggaactgactctcacatagtctggctagaccttactcctaaaaacgttactggagataaagctgagaaaatactggaagaggttggcattgcatgtaataaaaacgctattccttacgaccctaatcctcctaaaataactagcggattaagattcggaactgccgcagcaacctctaggggttttaatgaaaatgattttagtgaaattggtaatatgatttcagaagtgcttgaaaacattaatcaaaatgaggataatcaaaaagaatttatttcttctatgaaaagcaaagttataaatatgtgtaaaaaatatccaatatacgatgaggcattttaa

SEQ ID NO: 228545 - DNA, 1273 bp, Unknown
  Bacterial polypeptide expressing nucleotide sequence isolated from the Sargasso Sea
tatgtttagtgtagataccaaaattgcaggctttgacgatgaattaaacgaagccatcaaaagagaaattaaacgccaagaagaacatgtagagcttattgcttctgagaattatacgagccctcgagtgcttgaggcacaagggtctgtattaactaacaaatatgcagaagggtatccctctaaaagatattatggtggttgtgaaaatgttgatgttgcagagcaactcgctatcgaaagattgaaggaactttattcatgtgactatgcaaacgttcagcctcattctggttcacaagcaaatgctgctgtttatttagctctgttaaatgctggtgatacaattctaggaatgagtctagatgctggcggtcacctaacacatggttctaaggttaacttctcaggaaaattatttaacgcaattcagtatggtattgatgataatggtttgttagactacgaacaaattgaaaaattagctaccgaacataaacctaaacttttaattggaggattttctgcatattctcaaataattgattgggagaggatgtctgaaatagctaaaaaagtcggcgcttattttttagtagatatggcgcatgtttctggcttggtcgcaggcggagtctatccttctcctgtaccttatgccgatgtagttacttcgactacacataaaactcttcgaggcccaagaggtggtataattatttctaaatctaaccctgaactagagaaaaaatttaattccttagtgttcccaggtacgcaaggaggccctttgatgcatgttatcgcggctaaagcagttgctttcaaggaagcacttgagccagaatttaaaatctatatgaaaaatgttgttaataatgctgatattttagccaaaacaataattgatagagggtatgatattgtatcaggtggtactaaaaatcatcttatgttagttagtttagtcaaacaaggcttaaccggcaaagctgcagatgccgctctccataaagctaatataaccgtaaataaaaactctgtgccaaatgatccacaaagcccatttgttacaagcggcataagattaggaactgctgctattacaacaagagggtttatggagtcagagactaaaattctagggaatctaatatgtgatgttcttgacgatattgaaaatgaaaaaaatatatcatcagttaaagaaaaagttcttaatttaacatctcaattccccgtatattcttctgacaaaaaagctgtagcttag

SEQ ID NO: 228546 - DNA, 460 bp, Unknown
  Bacterial polypeptide expressing nucleotide sequence isolated from the Sargasso Sea
gatgtcagatttgtttaaaaaaggaataaaggaagcagaccctgaagtttacggtaccttaagccgtgaattagaaaggcaacaaaatcaaatagagttaatagcatcagaaaatatcgcttcaagatcaattttaaatgctcaaggttcagttatgacaaacaaatatgccgaaggttatccgggtaaaagatattatggaggatgtgagtttgttgatcaagcagaggaaatagcacttgagagagttaaaaaacttttcaattgtaaatatgctaatcttcaaccacatagtggtgcacaagcaaatcaagctgtgtttcttgctttactccagcctcatgatacgattttgggtatgtcacttgcctcaggtggacatttgacacatggtgcaaaacctaatctatcaggtaagtggtttaatgccgttcagtatggtgttaaaaaaagatggtaa

SEQ ID NO: 228547 - DNA, 488 bp, Unknown
  Bacterial polypeptide expressing nucleotide sequence isolated from the Sargasso Sea
ttttatgcatattattgcagcaaaagcagtaggctttaaagaagcattaaaacctgagtttatagaatatatcaaaactgtattagcaaacgcaaaaattttagctgaaactttaaaaaataacggatttaaaatttattcaggtggaactgacacacacttaatgttagttgatttaagaccttttaatgtaaaaggtaatgttgcggctgaaagtctgtcaagagctaatattacttgtaacaaaaatggcattccttttgatagcgagagtccaatggtcacctctggaattagacttggatctcaagctgctactacgagaggatttggattaaaagaatttcaaaaagttggtgatttaattacaaaaactattcaaggcctttcagaaaaccctgatgataactcaaaaattgaaaatgaagtcaggaaagaagttgttagcctatgttcaaattttcctatatacaaacatctaggttagt

SEQ ID NO: 228548 - DNA, 288 bp, Unknown
  Bacterial polypeptide expressing nucleotide sequence isolated from the Sargasso Sea
aatgtcgtcagttaaaaaattttctaagttatccaataagttctttgatgaaaatttaaagagtgcagataaagatatttttaattcaattaaaaatgaattaaatagacaacaaaatcacatagagttaattgcatcagaaaatattgtatcaaaagctatgcttgaagctcagggatcaataatgacaaataaatatgcagagggatattctggcaaaagatactatggtggatgtgaacatgttgatgttgctgaaaatttagcaattgagagagcaaaaaagtt

SEQ ID NO: 228549 - DNA, 660 bp, Unknown
  Bacterial polypeptide expressing nucleotide sequence isolated from the Sargasso Sea
ttccgtattgtgatgttattactagtactacgcataaaacacttagaggacctagaggtggaatcataatgatgggaagggacaaagaaaatatctggggtaaaatagccccaaaatctggtcgtgttaaaatgatttcagagctgttagattcctcagtgatgccaggcatgcagggtggtccattaatgcatattatatcggccaaagctatcgcatttggtgaggccatgaaagatgaatttaaagtatatgctaataaaattgttcaaaatgcgaagttaatggcacaagagtttatgaatatggattatgatatcatatctggtggtacagatactcatgtgattttagctgatttaacaaacaaaaatatttcaggaaaagttgcagagaaggcactcgaaaaagctggtattacggtcaataaaaatatggtcccgtttgatcaaagaagcccctttattactagtggaattcgcattggtacccctgcaattaccacaaggaatatgggtgcccaggaaatgaaagagattgcaaagttggttgatagtgtaattatggatcctgaaaatgataaaaatatcaaaaaagtaaagtctgaggttgaagaactttgtgagtcatatccaatctacaaagaattttctaattaaa

SEQ ID NO: 228550 - DNA, 491 bp, Unknown
  Bacterial polypeptide expressing nucleotide sequence isolated from the Sargasso Sea
gcccctcgaacatattatcgccgccaaagcagttgcatttggagaagccttgcagccaggtttcgttaattattcccaacaagtaataaaaaatgcaaaagttctagcttcaactttaattaatagagggattaatatcgttagtggaggcactgataaccatattgttttactcgatttaagaagtatcaatatgactggtaagattgctgacttacttgtaagtgaagtgaatatcactgcaaataaaaatactgttccatttgaccctgaatcaccttttgtaaccagcggactaaggttgggaactgctgctttaactactagaggctttaatgaggatgcttttgctgaagttggcgaaattattgctgatagattacttaacccagacgattcactgattgaaagtcaatgtaaagaaagagtattaaccttatgtaatcgttttcctctttatgaaggcaaacttgaagcatcaattaaatgag

SEQ ID NO: 228551 - DNA, 791 bp, Unknown
  Bacterial polypeptide expressing nucleotide sequence isolated from the Sargasso Sea
acgattagcattagaacataagcccaagatgattattgcaggcggaagtgcatattccagaataatagattttaaaagatttagagatatttgcgataagattgatgcatatctgcatgttgatatggctcactactctggtttaatagctgctgaagagtatccgaatccaattgagcatgcgcacgtagttacatcgacaacccataaaacaatcagaggacctagaggtggaatgattttgtctaatgatttagatttgggaaaaaaatttaattcatctgtctttcctggccttcaaggtggaccattgatgcatgttattgcagctaaagcagtagcttttggagaagctttagatccgtcttttaaagagtacattaagcaggttttaaaaaatgcgcatgttctaagtgaaacgttggtcgaaggtggtttaaaaataatttctggaggaaccgatactcatttaatgcttgtagatcttacagctaaaaatgttaccggaagtgaagctgaattaaatctggaagaagctggcataacatgcaataagaatggaatcccaaatgatccacatccaccaaaaatcacatctggcattagattgggtacaccagcaggcacgactcgaggctttaaagaaaatgagtttaaactggttggagagctaattttggatgttcttaacggcatgcagggctcacctgaggagagaaagtcaattaatgagaacgtaaagtcaaaagttggtgcactttgtgcagaatttcctatatatagtaattaaa

SEQ ID NO: 228552 - DNA, 646 bp, Unknown
  Bacterial polypeptide expressing nucleotide sequence isolated from the Sargasso Sea
ttgcctgtagatgtaaatactcgcgtatatttaaggtttttttctagcccaataaatttatggcctttatggtaccatattacacatggtttaaaaatttcaatgtcaggtaaatggtttaatgcaattggatatgaagttgataaagagtctgaacttattgattatgacaatgttgaaaaacttgcacttgaacataaacctaaacttattattgctggtggtagcgcttattcaagagtgattgattttaaaagatttagagaaattgctgataaggttggagcatacctaatggttgacatggctcatttttctggtttagttgccggtaaaggatatccaaatccatgtgattatgctcatgtagttacatcaactactcataaagtatttagaagtgcgagaggtggaattatattaactaatcacgaagacttatcaaaaaaatttaatacagcagttttcccaggataccaaggaggaccacttatgcatattatagctgctaaagctgttggatttaaagaagcattaaaacctgaatttaaagattatataaaaactgttttagcaaatgcaaaaattttagctgaaacgttaaaaaataatggttttaaaatttattcaggtggaactgatacac

SEQ ID NO: 228553 - DNA, 346 bp, Unknown
  Bacterial polypeptide expressing nucleotide sequence isolated from the Sargasso Sea
agctagagggtatgatttagtgcacccgatgacagaaaaccacttattattgcttgatttacagaaaaaagaggtaaatggaaaggaggcagaagagcttttaggaacagtcaatataacagttaataaaaattctattcccaatgatccagaatctccatttattacatcaggtattaggattggaactccagcaataacaactaggggttttaaagaagaggaagctgaacaagtagtagatttaatgtgtgatgctattgaaaatagaaatgatcaagcctcacttgatagaattaaagatgaggtaaaagacctttgtaataattttccggtttataaataa

SEQ ID NO: 228554 - DNA, 1267 bp, Unknown
  Bacterial polypeptide expressing nucleotide sequence isolated from the Sargasso Sea
aatgaatgagtttaaaaagacacaaaatcaaaatatttcagaatatgatgcagatcttgcaacattcttagataaagagctattgaggcaagaagaacacatagaactaatagcttcagaaaattatgcttcaaaaagagttttagaggctcaaggcagcgtattaaccaacaaatatgctgaaggttatcctaataagaggtattacgggggttgtgagcacgttgatggggcagaaacactagcaattgaaagagctaaagaactttttaaggctaaatttgctaatgttcagccacattcgggcgcttcagcaaatgcagctgtgtttttagcgctacttgaaccaggagatacattcctaggaatggcgctagatcaaggaggtcacttgactcatggagcaaaagtaaatttttctggtagaaattttaatgctattcaatatgggctacatccagaaacaggtgaaatagactatgaagctgttaatgagcttgcattaaaacataaacctaaacttatattggctggattttcagcttatatgggtattgttgattggaaaaaatttagagaaatagcagatagtgttggagcttatctaatggtggatatggctcatgtttcagggttggttgctgctgaagtatacccaaatcctattgaatatgcgcatgtagtaacaagcacaacacataaatcattaagaggtcctagatctggaatcatactttctaatgaagatgaagattttcagaaaaaattaaattttgcagtatttcctggttcacaaggtggccctttaatgcatgttatagcagctaaagctgtatgttttaaggaagctatgactgatgattttaaggattattcgaaacaaataattaaaaatgctcaagctatgtgtaaaaaatttatagctagagggtatgatttagtgcacccgatgacagagaaccacttattattgcttgatttacagaaaaaagaggtaaatggaaaggaggcagaagagcttttaggaacagtcaatataacagttaataaaaattctattcccaatgatccagaatctccatttattacatcaggtattaggattggaactccagcaataacaactaggggttttaaagaagaggaagctgaacaagtagtagatttaatgtgtgatgctattgaaaatagaaatgatcaagcctcacttgatagaattaaagatgaggtaaaagacctttgtaataattttccggtttataaataa

SEQ ID NO: 228555 - DNA, 208 bp, Unknown
  Bacterial polypeptide expressing nucleotide sequence isolated from the Sargasso Sea
tatgtcaagtgaaacaaaatatataaatccaagttaccaagacttttttgaaaaaagtctttctaaagctgatccagatttatttaaagcaataaatgatgaattaattagacagcaaaatcatatagagcttattgcttcagaaaatattgtatcacaagctgtattagaagcacaaggttcagttcttacaaataaatatgccgaa

SEQ ID NO: 228556 - DNA, 472 bp, Unknown
  Bacterial polypeptide expressing nucleotide sequence isolated from the Sargasso Sea
gcaaaggctgcaggctttctgaaagcgctaagacctgaatttaaagactatataaaatctgtattagctaatgcaaaaattctatctgaaactttaaaaaataatggttttaaaatttattctggaggaacagatactcatttaatgcttgttgatttaagaccttttaaagttaaaggaaatttagctgcagaaagtttatctagagcaaatataacatgtaataaaaatggtattccttttgactcggaaagcccaatgattacatctggtattagacttggatctcaagcagcaacaactagaggttttggtttaaaggaatttgaaaaagtaggtgaattaataactaaagtaatcgatggattatctaaaaatcctgatgataatagtaaggtagaagatgaagttagaaaacaagtagtttcactttgttcttcttttccaatttacaaaaatttaagaaaatgat

SEQ ID NO: 228557 - DNA, 823 bp, Unknown
  Bacterial polypeptide expressing nucleotide sequence isolated from the Sargasso Sea
atgaatgagtttaaaaagacgcaaaatcaaaatatttcagaatatgatgcagatcttgctacattcttagatagagaattaattagacaagaagaacatatagaattaatagcttcggaaaactatgcatcaaaaagggttttagaagctcaaggtagtgtattaactaacaaatatgctgaaggctacccaaaaaaaagatattacggaggttgtgaacatgttgatggtgcagaaacacttgcaattgatagagcaaaagaactttttaaagcaaaattcgctaatgtgcagcctcattcaggcgcttcagcaaatgcagctgtttttttagcgttacttgaacctggagatacattcttaggtatggcattagatcaaggtggtcacttaacacatggagccaaagtaaatttttctgggcgaaattttaatgctattcagtatggattacacccagaaaccggcgaaattgactatgaggccgttaataagctagccttagaacataaacccaagcttatattagctggattttcagcttatatggggattattgattggcaaaagtttagagaaatagcagatagtgtaggggcatatttaatggtagatatggctcatgtttcaggtttaattgctgctggagtatacccaagcccaatagagcatgcacatgtagtcacaagcacaacacataaatcgctaagaggacctagatctggaattatactttctaatgaagatgaagattttcagaaaaaattaaattttgcagtgttcccaggctcacaaggtgggccttttatgcatgtcatagcgg

SEQ ID NO: 228558 - DNA, 1300 bp, Unknown
  Bacterial polypeptide expressing nucleotide sequence isolated from the Sargasso Sea
tatgtttattacagataaaggtttagaagaatttgatccagagttatggcaatccatatctaaagagtctgttcgtcaagaagagcacatagaattaattgcatcagaaaactacacttcaaaaggaattctagaaatccaaggctctgtgctgacaaacaagtatgcagaagggtatcctggaaaaagatattatggtggctgcgaaaatgttgatgtagcagaatccctcgcaatagaaagagccaaggaactttatggagctgcttatgcaaatgttcaacctcattctggtgcaagtgctaattctgctgtctttctagctctatgcgatgctggagacactatccttggaatgagcttagatcatggtggacaccttactcatggcgcaaaagtaaatttttctgggaagacatataattcatttcaatatggactggatccaaaaactggtgaacttaattaccaagaagtggaagatcttgctagagagcataatccgaagctaattatagctggcttctcagcctattctggaattgttgattgggcaaaatttagagagattgctgattcagtcaatgcttaccttttggttgatatggcacatgtctctggtttagtagcagcaaaggaatatccctctcccatacctcatgcagacgttgtaacaactacaacacataaaacattaagaggtccgagaggcggattaattcttgctaaagataatgaagaaatacataaaaagcttaactcagccatctttcctggtacgcaaggggggcctttgatgcatgtaattgctgctaaagcattgtgcttcaaagaagcactagatccagcttttaaagattatcagaagcaagtgaaagcaaatgcaaaacaaatggccgctacgttcatggaaagaggcataaatattgtctctaacgggacagaaaatcatatgttccttgttgatctagttgaaaagggtttgaccggaaaagatgccgatgcagctcttggaaaagctaatattacagttaacaaaaatgctgttcccaatgatccacaatcaccatttgtaacgagtggtctaagaataggaacaccagctgcaacaacaagaggcttcaaagagccagaggtgacattagttgcaaactggatttgtgatattttggaagatattaataaccaaattttaattaacgacgttaagggcaaggttatcgagctttgttctagttatccagtttactccgatgaattatgcactgcccctactgtggcttctctgatacaaaagtaa

SEQ ID NO: 228559 - DNA, 1291 bp, Unknown
  Bacterial polypeptide expressing nucleotide sequence isolated from the Sargasso Sea
ttgcttgataagaaatctaaccttaaaactgatgcaatcttttcaaataaaaaagatatagaactttatgatgctgagctttgggaatcctttgaaaaggaaatggtcagacaggaagaacatattgaacttatagcttcagaaaattacgctagtcaaagagtgcttcaggctcagggttccgtattaacaaataaatatgctgagggatatcctgacaaaagatattatggcggctgtgagtttgttgatattgctgagaagttagcaatagatagagccaaggagctttttaacgctgattatgccaacgttcaacctcattctggttcatctgcaaatgctgctgcatatttagcattacttgagccaaatgatgtaatgcttggaatgagtcttgatcatggaggacaccttacacatggatcgaaagtaaatttttcaggaagaaactataaatcttttcaatacggtttaaatcctgaaacacatgatattgattatgaccaagttcgtgatttagcaaaaaaacataacccaaaactaataattgctgggttttcagctttctctggtttagttgattggagtatatttagagaaattgctgatgaggttaatgcttatttcttagtagatatggcccatatatcgggacttgtagcggcaggtatgtatccttcacctgttccgtacgcagatgttgtgacatctacgactcacaaaacactaagaggtccaaggtctgggattattcttgcaagagagaatgaagatatacagaaaaaattaaactccgcagtttttccaggatcacaaggaggtcctttgatgcatgttgttgctgctaaagcagtttgttttaaagaagctcttgaacctgaatttaaaacctatatgtctcaagttataagtaatgctaaaactatggcgaagactattattggaagaggagtcgatatagtaaaaggtggcactgaaaatcatatgattcttgtcgaccttagaaataaagggataacaggaaaggactctgaatataaacttggtttagctaatatcacagtaaacaagaatgctgttcctaatgacccacagtctccctttgtaacatcaggaataagacttggaacacctgcagttacaacaagaggctttaaagaggatgaaattattcaaatttcaaattggatctgcgacatagtccttgatttagataatgagaaaaaaattgagggaattaaaaataaagctctgtctttatgcaaagaattcccagtatataagtaat

SEQ ID NO: 228560 - DNA, 523 bp, Unknown
  Bacterial polypeptide expressing nucleotide sequence isolated from the Sargasso Sea
tttgaatagtgaatacaaagatttttttgaaaaaagtttattagaaagcgatccagaaatatataaagctattaacaatgaattagtaagacaacaaaatcatattgaattaattgcttctgaaaatattgtatcccaagcagtgcttgaagcacagggctcagtgttaacaaataagtatgcagagggttatccaggaaaaagatattataatggatgtgaacatgtagatgtcgctgaacaattagcaattgataggttaaaggaactatttaattgtaaatttgctaatgctcaacctcattctggagcacaagcaaatggtgcagtatttttagctctgcttaaaccaggtgacactttcatgggaatgagtctgaattcaggaggacacattactcatggtttaaaaatttctatgtcaggtaagtggttcaatgcaataggttatgaagttgataaagattcagaacttatagattatgataatgtcgaaaagcttgccctagaacataaacctaag

SEQ ID NO: 228561 - DNA, 952 bp, Unknown
  Bacterial polypeptide expressing nucleotide sequence isolated from the Sargasso Sea
atgtctacaatagaaaaaataaataattttttaaataatttttttgacgatagtttagaaaaagctgatatggaactttataagtctattaaagctgagtctgatcgtcaacaaaatcatattgaacttattgcttctgaaaatatagtatctaaagctgttcttgaggctcaaggctcacttttaacaaataaatatgccgagggatatcctaataaaagatattatggaggttgcgaatatgttgatatttcagaaaatttagcaatagaaagagcaaaaaaactttttgactcttcttttgctaatgtacagccacattctggagctcaggccaatggtgcagtttacctagctcttgttaagccaggagatacaattttatctatgagtttaaattcaggcggtcatttgactcatggcgctaagccagcacaatcagggaaatggtttaaagccattcattatgaagtagataaagatacaggactaatagattatgaaagtgttgaaaagctagctttagaaaataatccaaaaattattatagcgggaggaagtgcttattctagaattattgatttcaaaaaatttagagatattgctgataaagtaaaagcatatttaatggttgatatggctcatttttcaggattagttgctggtggcgcttatccaaatccaattaaatatgctgatgtagttacgtctaccactcataaagttttaaggggacctagaggtggaattattcttacaaacaaagaggaattagctaaaaaatttaatagtgcagttttcccaggtcttcaaggtggcccattaatgcacgtcatagcagccaaggccgtttgttttcacgaggctttaagtcctaattttaaaaaatatactcaggatgtaattaaaaatgctaatgctttagctgagtcacttatcaaaaataatttaa

SEQ ID NO: 228562 - DNA, 1024 bp, Unknown
  Bacterial polypeptide expressing nucleotide sequence isolated from the Sargasso Sea
ttggtagtgcataattcatcaaatatttttcaaagcgatcctgaagtatataaaatcttacaatcagaggaaacaagagaagaacgcaccattgaattaattgcatcagagaattttaccagtgttccaattttggaaatggcgggatcagtaatgacaaacaaatacgcggaaggttaccctggtaaaagatattatgggggatgtgaatttgtagaccaaattgaagatatcgcgaatagtcgtttggcaaaattatttaatgctggttatacaaatgtacaaccgcattcgggatctcaagcaaatatggccgtatttatgtcttttttaaaagaagatgatttagtaataggtttagaccttgctcatggtggacatctcacccatggcagtagagtaaatttttctggaaaattatataattttttatcctacggagtatccaaagatacagagagggttgattttgatttagttaacaagatatgcaaagaaaataaacctaagctaattatttgtggagggagtgcatacccaaggtttattgaatttgcgttatttcgtgaaattgctgactcaataggtgctacattgatggcagatatcgcacatcctagtggactaattgctgctggtgttcatccttcgccgttcccattttgtgatgttgtaactagtactactcacaaaactcttagggggccgcgtggcggcattattatgatgggagaaaataaagaaaacccttggggtattgtcgctccaaaatcaggaagaacaaagttaattggtgagatcatagattcaagtgtaatgcctggtatccaaggtggtccgttaatgcatataattggtgctaaagcaattgcttttggagaagcattaaagcccgaatttaaaaaatatgctaacaatgttgttaaaaatgcaaaatgcatggctaatgagcttttaagtctggactataagttgacttctggagggacagatacccatgttattttgatcgatttaacaaata

SEQ ID NO: 228563 - DNA, 874 bp, Unknown
  Bacterial polypeptide expressing nucleotide sequence isolated from the Sargasso Sea
tatgagtctaaatttttttaatgatgaaattataaaaacagaccctgaagtatatgcaactttaaaaaaagaacttgagagacagcaaaatcagatagaattaattgcttcagaaaatattgcttcaaaagcagttcttaatgctcaaggatccgttatgactaataaatatgctgaaggataccctggaaacagatattatggtggatgtgaatttgttgatgaagcagaaaatattgctttagaaagagttaagaagttatatggatgcaattatgcaaatttgcaacctcatagtggagctcaagctaaccaagctgtttttttagctttattacaaccccatgacactatactcggtatgtctttagcttctggtggacatctaactcatggagcaaaacctaatttatctggaaaatggtttaatccgattcagtatggtgttaaaaaagatggtaatgataaagatttaattgattatgaagaagttgaatctcttgcaattgagcataatcctaaattgattattgctggagcatctgcatatcctagaattatagattggaaaaaatttagagaaatagccgataaggttggagcatattttttagttgatatggcacattactcaggattaattgctggtaaacaataccctaaccctatagagcacgcacatgtcgttacttctacaactcataaaactctaagaggtgctagaagcgcaatgatattaactaatgacgaaacattaattaaaaaaattaacagtgctgtttttccaggattacaaggtggtccgctaatgcatgtaatggcaggtaaggctgttgcttttggagaagcattaaaacctgaatttgaaaattat

SEQ ID NO: 228564 - DNA, 1159 bp, Unknown
  Bacterial polypeptide expressing nucleotide sequence isolated from the Sargasso Sea
ctgaaaatatgtttcacaagcagttttgatgctcaaggaagcattttaccaaacaaatatgctgagggatattcaggaaaaagatattatggtggatgtgagtttatcgatgatttagagacgataggaataaatagggttaaaaaattatttaattgtaaatatgccaatatacaaccacattcaggtgctcaagctaaccaagctgtatttatgtcgcttattaaaccaggtgatacaattttgggtatgtctttagctgctggtggacacttaacacatggagcgccgccaaacttatcagggaagtggtttaatgctattcaatatggtgtaagaaagcaggatgctttaatcgattttgatcaattagaggctgatgctataaagtataaacctaaattgattattgctggtggatcagcttatccaagaactctagactttaagagatttagacaaattgctgataaatgtggttcaatgcttctagtagatatggcgcatatttctggtttggtagccactggtgaccacccaagtccaattccacacgctcatgttgtaacatcaacaactcataagacattaagatgtggaagaggaggcatgatcttaaccaatgacgaagatattgctaaaaagataaattctgctgttttccctggtttgcaaggtggaccacttatgcatgcaattgcaggtaaagttgtaggctttggagaagctttaaagcctgaatttaaagagtatattaaatctgtcttgagaaatgctagaaccttatcagaagagcttttaaaacgtggtcttgatattgtaagtggtggaactgatacacatgtagttttagttgatttacgtcccaaaaatttaactggaaatatagttgaggatgctctcgaaagagctggtattacgtgcaataaaaatggtataccttttgatcccgagaaaccttctgttacatcgggaataagattgggaactcccgctggaacttcaagaggttttggtcaagctgaattttctctaattgcaaatttaatatgtgatgttttagattcacttaatgaaaaaagtgaaatttcttcaaaagtagaattagaagttaaagataaaatcaaaaatttatgttataagtttccaatatattaga

SEQ ID NO: 228565 - DNA, 781 bp, Unknown
  Bacterial polypeptide expressing nucleotide sequence isolated from the Sargasso Sea
atgtctagtgaaagcaaatatttaaacgatcaatataaaagtttttttgaagacagtttatctaaaactgatccagatctatacaaggctattaatgatgaattacagaggcagcaggaacatatcgaattgatcgcttctgaaaacattgtttctcaagcagtgttagaagcccagggatctgttttaacaaacaaatatgcagaaggttattcaggtaaaagatattacaatggatgcgaacatgtagacgttgctgaaaacttggcaaatgaaagattaaaaaaattatttaattgtaaatttgcaaattctcaacctcattcaggtgctcaagcaaatggagcaacatttttagctttactcaaaccaggtgatacatttatgggaatgagccttaattccggtggtcacattactcacggattaaaaatttcaatgtctggtaaatggtttaatccaataggttacgatgtagataaagagtctgaacttattgattatgatcatgttgaaaaattagcattagagcacaaacctaaacttataatagccggtggaagcgcttattctagagtaatagactttaaaagatttagagaaatatgcgataaggtagatgcgtatcttatggtcgacatggctcatttttcaggtttagtggccggaaaaggatatccaaatccatgtgatcatgcacatgttgtaacttcaactactcataaagtttttagaagtgcaagaggtggtattattttaacaaaccatgaagatatagcaa

SEQ ID NO: 228566 - DNA, 1213 bp, Unknown
  Bacterial polypeptide expressing nucleotide sequence isolated from the Sargasso Sea
ttaataagacaacagaatcatattgagttaattgcatctgaaaacatagtctcccaagctgttttagaagctcaaggttctgttttaacaaataaatatgccgagggatatccaggcaaaagatattataatggatgtgaacatgttgatgttgctgaggaattagcaatacaaagattgaaaaaactatttaattgtaagtttgcaaatgcccaacctcattcaggcgctcaagctaatggtgcagtctttttggcattgttaaaacccggagatacttttttgggtatgagtttaaattcaggtggacatataacacatggcttgaaaatttctatgtctggaaaatggtttaacgcaataggttacgatgtagataaaaaaagtgaattgatagactatgataatgtagaaaaattggctctagaaaacaaaccaaaattaattattgctggtggtagtgcttattcaagagtaattgattttaaaaggtttagagaaattgcagataaagttggagcatatttaatggtagatatggcacacttttcaggattagttgccggaaaaggatatccaaatccatgtgattatgctcatgttgttacttcaacaactcacaaagtttttagaagtgcaagaggtggaattattttaacaaaccatgaagatctggctaaaaaatttaatacagcagtatttccagggtaccaaggtggtccattaatgcatattattgcggctaaggctgttggatttttagaagcacttaagccggagtttcaagattatataaaaactgttttagctaacgcaaaaattctttccgagacattaaaaaataatggatttaagatttattcaggtggtacagatactcatttaatgcttgttgatttaagacctttcaacgttaaaggtaatttagcttctgaaagcttatcaagagcaaatataacttgtaataaaaatggaattccttttgatacagaaagtcctatggttacatccggtatcagacttggttctcaggcagccacaactagaggctttggtttaaaagagtttgaagaagttggaaacttaattacaaaaactattaaaggattgtctatgaatcctaacgataatagcaaagttgaagaagaagtaagaaatgaagttgtatcactctgctcttcatttcctatttataaaaatctttataaatgat

SEQ ID NO: 228567 - DNA, 1312 bp, Unknown
  Bacterial polypeptide expressing nucleotide sequence isolated from the Sargasso Sea
aatgtctagtgaaaaaaaatatttaaatactcaatatgaaaacttttttgaaaaaaaactgtctgaagctgatccagaaatatttgatgcagtaaataaagaattaatcagacaacaaaatcatatcgaattaatcgcatcagaaaacattgtttcacaagctgttttagaggcacaaggttcagtactaacaaataagtatgccgaaggttacccaggtaaaagatattataacggttgtgaacatgttgatgttgctgagtcacttgctaacgatagattaaaaaaactctttaattgtaaatttgcgaattcacaacctcattctggtgcgcaagctaacggagcagtgtttttagcattattaaagccaggtgatacttttatgggaatgagtttaaattctggtggccatattactcatggtcttaaaattgcgatgtcaggcaaatggtttaatgcaataagctatgatgtagataaaacctctgaattaatcgactatgatgaagttgaaagattagcaattgaaaataaacctaaacttataattgctggaggtagcgcatattctagggttattgattttaaaagatttagagaaattgctgataaggttggagcattctttatggtagatatggctcacttttcaggtcttgttgctggtaaaggttatccaaatcctgttgatcatgctcatgtcgttacatctacaactcataaagtttttagaagtgctagaggtggaattattttaacaaatcacgaagatatttataaaaaaattaatacagctgtatttcctggttatcagggtggccctcttatgcatataatagcagcaaaagcagttggatttaaagaagcattagatccttctttcaaagaatatatatctaatgttttagctaatgcaaaaatactcgcagaaacattaaaaacaaatggatttaagatttattctggaggaacagatactcatttaatgttggtagatttaagaccttttggtgtcaaaggtaatgctgcagctgaaagtttatcacgtgctaatataacgtgtaataaaaatggaattccatttgatacagaaagtccaatggtaacttcaggcataagactagggtctcaagcagcaactactcgaggttttggtttaaatgaattcaaaattgttggtgaactaattactaaagtaattaaaggtttgtcatcaaaccttgaagataatacaaaaatagaagacgaagtaagaaaagaagttgttgatttatgttcaaatttcccaatttataaaaatttgggataa

SEQ ID NO: 228568 - DNA, 1255 bp, Unknown
  Bacterial polypeptide expressing nucleotide sequence isolated from the Sargasso Sea
tatgtttgataacagtaaaacaattaaagagtttgatcctgaactttggtcttcgatagagaatgagatgataagacaagaggatcatattgagctcattgcatccgaaaattacacctccaaacgagttctagaagctcaaggttctgtcttaaccaacaaatacgcagaagggtatccagggaaaagatactatgggggttgtgaaaatgtagatattgctgaagggcttgccatagaaagagcaaaagaaatttatggagcagctttcgccaatgtgcaacctcactcgggagcaagtgcaaattcagctgtttacttagcactttgtgatgctggagataccatactaggaatgagtcttgatcatggtgggcacttaacacatggagctaaagttaatttttctggtaaaacttatcaatccttccaatatggtcttgatccttcaacgggagaaataaattatgcggaggtagagaaattagctaaaaaacataatcccaaaatgattattgcaggattctctgcttattcaggtatagttgattgggaaaaatttagagaagttgcagatgctgtaggggcttatctattggttgatatggctcatgtatctggactaattgcagctggagaatatccttctccaattccctttgcagatgttgtcacaactacaactcacaaaaccttaagaggccccagaggtggcttaatactggccaaagaaaatgaagaaattcacaaaaaactcaattcggctatctttccaggcactcaaggaggtcctttgatgcatgttatagctgctaaagcggtgtgttttaaagaagcactagagccaagttttaaagagtatcaaaaacaagttaagcttaacgcgaaacaaatggttactacatttatggagcgaggtattaatattgtttcaaatggaactgaaaaccatatgtttcttgtagatttaatagaaaagggtctgactggaaaagaagcagatgctgcgctaggtagagcaaatataacagttaacaaaaatgctgtaccaaatgatccacaatcaccttttgtaacaagtggcttaaggataggaacaccagcctcaacaaccagaggattcaaggaaaccgagatatctgaagtagcttcttggatatgtgatattctagatgatgtaaacaatgaggaaataattagtgaagtaagaaacaaagtaaaaaatctttgttctagattccctgtttatagttaa

SEQ ID NO: 228569 - DNA, 904 bp, Unknown
  Bacterial polypeptide expressing nucleotide sequence isolated from the Sargasso Sea
atgttcataactgaaaagaatttaaaggaatttgatcctgaattatggaactcaataaataacgaaacggccagacaagaggagcatatagagctaattgcttcagaaaattacacctctaaaagtgtattggaagttcaaggttccgtgctcactaataaatacgctgaaggctatccgggtaaaagatactacggcggctgcgagcatgtagatgttgcagaatcactagccatagatagagcaaaggagctatatggtgcagcttatgcaaatgttcaaccacattccggagcaagtgctaactctgctgtgtaccttgcattatgcgaagcaggtgactcaatacttggaatgagtttggatcacggaggtcatttaactcacggagcaaaagttaacttttctggcaaaacttatgaatcttttcagtatggtcttgatccttcgactggagaattaaattatcaagaagttgaagatttggcgaggcaacacaatcccaaaatgatcgttgctggcttttcagcttattctggaatcgttgactgggaaagatttagatctatagcggacgccgtaggagcatacttattggttgatatggcccatgtttctggactggtggctgctggagagtacccatcaccaataccctttgctgatgttgttaccacaactacccacaaaacactcagaggtcctagaggaggattaattttagccaaggagaatgaagaaattcataaaaagttaaactcagctattttccccgggactcaaggaggtcctttaatgcatgttatagctgcaaaagctgtctgctttaaggaggcattggatcctgcctttaaagattatcaaaaacaagtgaaagtaaatgccaaaaggatggctgagactt

SEQ ID NO: 228570 - DNA, 1282 bp, Unknown
  Bacterial polypeptide expressing nucleotide sequence isolated from the Sargasso Sea
atgaaatcatctaaaagcgataatatattttctaatatttcatctatcaaagaatacgatagagatttgtggacatcttttgaaaatgaggcacaaagacaagaagaccatattgagttaattgcatcagaaaattacgcttcaaaaagaatacttgaagctcagggttcattattaacaaataagtatgctgaaggctacccttcaaaaagatattatggaggatgtgaatttgttgatgttgcagaaaatcttgcaatagagagagctaaacaactatttgatgcagattatgcaaatgttcaaccacattctggatcttctgcaaatgcagctgcatttttagctcttttagaaccaaatgacactatcttgggcatgagtctcgaccacggaggtcatcttacacatggttctaaagtgaatttttctggacgaaattacaaaagcattcagtacggcctgcatcctgaaactaatgatataaattatgatgaagttctttctttggcaaaagagcataaaccaaaacttattatcgctggtttttcagcattttcaggcatcgtagattggaaaaaatttagggaaatagctgatgaagttggcgcatattttcttgtagatatggctcatgtatctggtttggttgcagcaaaactttatccgtcaccagttccatatgcagacgttgtaacatcaaccactcataaaactcttagaggaccaagatctggaataattcttgcaaaagagaatgaagaaatcgaaaaaaaacttaattcagcagtctttcctggttctcaaggaggtccattgatgcatgtaatagcagcaaaggccctttgttttaaagaagctttggaaccagattttaaaaattatattcaagacgtcatggataacgcaaaattaatggcaacaacaattatgtctagagatattaatgttgtttccaatggaacagaaaatcatattgttcttgtagatttaaggagtaaaaacatcactggaaaagatcttgaaaaggttcttggatctgtaaacatcactgttaataaaaattcagttccaaatgatactgcttctccttttatcacttcaggaataagaattggaacaccagcaataacaacaagagggtttggtaaaaaggaagttgttcaagtagcaaattggattgcagatatcattgaaaatatcgatgatgagttagttcacgagaaagttaaaaatgaggtaagttctttaacgtcagaatacccagtatacaggttataaa

SEQ ID NO: 228571 - DNA, 883 bp, Unknown
  Bacterial polypeptide expressing nucleotide sequence isolated from the Sargasso Sea
tatgtctagcgaaagtaaatatattaattctagttatcaggatttttttgaaaaaagtttatcagaagctgatccagatttgtttaaagcaattaacgatgaattaattagacaacaaaatcacattgaattaattgcttctgaaaacatagtatctcaagctgtactagaggcacaaggttcagttttaaccaacaaatatgcagaagggtatccaggtaaaagatattacaatggttgcgaacatgtagatgttgcagaagaacttgcgattgaaagattaaaaaaactatttaattgcaaatttgctaatgcacaacctcattcaggtgctcaagctaatggagctgtatttttagctttacttaagcctggtgatacatttatgggcatgagtttaaattcaggtggccacataacacatggtcttaaaatttcaatgtcaggaaaatggttcaatgcaattggatacgatgttgataaaaaaagtgaattaattgattatgatcacgttgaaaaactagctttagaaaataagccaaaattaattatcgctggaggaagtgcatattctagagttatagattttaaaagatttagagaaattgctgataaagtaggtgcatatctaatggttgatatggctcatttttctggtttggttgcaggcaaaggttatccaaatccatgtgaatatgctcacgtagttacatccactacacataaagtatttagaagtgcaagaggtggcattatcttaaccaatcatgaagatttagcaaaaaaatttaatactgctgtatttccaggatatcaaggcggtccacttatgcatattattgcagcaaaggcggttggttttctagaagcacttaaacctgat

SEQ ID NO: 228572 - DNA, 476 bp, Unknown
  Bacterial polypeptide expressing nucleotide sequence isolated from the Sargasso Sea
aggaggacctttaatgcatgtagttgcagcaaaagctttatgtttcaaagaagctttaaatccagaattcaaactatatattcaacaggtcatgcaaaatgcaaaagtcatggcagaaaccatcatatccaatggtgtggacgtcgttagtaatggaacacaaaatcatattgtattagttgatttaagaaataagaatattactggaaaagatttagaaaaagttcttggttctataaatattacagttaacaaaaattctgtgcctaatgatcctgcttctccatttgttacatcaggaattagaataggaacgcctgcagttacaactagaggatttaaagaaaaggaaattattcaagtaagtaattggatatgtgaaattattaataattttgataatgaggaattgcaaaacaaaataaagaacgaagtatcaaatctcactaataattttccagtatataatttataga

SEQ ID NO: 228573 - DNA, 361 bp, Unknown
  Bacterial polypeptide expressing nucleotide sequence isolated from the Sargasso Sea
atgtctagtgaaacaaaatatttaaattcagattataaagatttttttgaaaaaagtctttcacagtctgatcctgatttatttaaagctattaacgatgagttaataagacaacaaaatcatattgagcttatagcttcagagaatattgtttctcaagcagttttagaagctcaaggttcagttctgacaaataaatatgccgaaggttatccaggaaaaagatattataatggttgtgaacatgtagatgtggctgaaaaattagctcttgagagaattaaaaaactttttaattgtaaatatgccaatgttcaaccccactcaggtgcacaagcaaatggagcagtgttcttagcgc

SEQ ID NO: 228574 - DNA, 1255 bp, Unknown
  Bacterial polypeptide expressing nucleotide sequence isolated from the Sargasso Sea
atgctgaaaaaagatatgaatatcgcagattatgatccggaactgtttaacgcgattcagaacgaaactctgcgtcaagaagagcatattgagctgattgcttctgaaaactacaccagtccacgcgtgatgcaagcgcaaggttcacaactaaccaataagtacgccgaaggctatccaggcaagcgttactacggcggttgtgagtatgtggacgtagttgaaaccttagcgattgagcgtgcaaaacaactgtttggcgcgacttacgcaaacgtacaacctcactcaggttctcaagcaaacagcgccgtttacatggcattgttaaaaccaggcgataccgttttaggtatgaacctcgctcacggtggtcacttgacccacggttcacctgttaacttctccggtagactgtacaacatcattccttacggcatcgatgaatcaggcaaaattgactacgacgaaatggaacgtctggcggttgaacataagcctaagatgatgatcggtggtttctctgcttattcaggtatcgttgactgggcaagaatgcgcgaaatcgcagacaaaatcggtgcttatctgtttgtcgacatggcacacgttgcgggtcttatcgccgctggtgtgtatccaaacccagtgccacacgcgcacgttgtgacctcaaccactcacaagaccttagccggtcctcgtggcggtatcattctgtctgctgccgatgatgaagagttatacaaaaagctgaactctgcggtattcccaggcggtcaaggcggtcctttgatgcatgttatcgcgggtaaagcggtagccttcaaagaagctttagagccagagttcaaagcttaccaacaacaagtggttaagaacgctaaagctatggttgaagtgttcttagagcgcggttacaaaatcgtttctggcggtactgacaaccacttaatgctggtggacttaatcggtcgcgacctgacgggtaaagaagccgatgccgctttaggtagcgcgaacatcacagtaaacaaaaactctgtgccaaatgacccacgttctccattcgtgacctctggtgtacgtattggtacgcctgcgatcactcgccgtggctttaaagaagctgaagcgaaagagttaaccagttggatctgtgacatcctcgacgatgctcacaatccagcggtcatcgagcgcgtaaaaggccaagtattggcactgtgcgcccgtttccctgtttacggttaat

SEQ ID NO: 228575 - DNA, 598 bp, Unknown
  Bacterial polypeptide expressing nucleotide sequence isolated from the Sargasso Sea
ctacaagaaggagtacgaacaagccatcaactcggccgttttcccgggtcttcagggcggtccgcacaaccacagcatcggtgcgttggccgtggcgttgaagcaagcgcaaacgccggaattcgtcaagtaccaagagcaagtcatcaagaactgcgcctccatggcggagcgcttgatggcgctcgggtacagtctcgtctctggcggcaccgataaccacttgattttgtgcgatttgcgtcccaagggtatcgacggcgcgcgcgtggagaagattctcgacatggcgcacatcacgttgaacaagaactccgttccgggcgacacctcggcgctcgttccgggcggtattcgcatcgggagcccggcgatgacgacgcgcggcatgacggaggaagactttgttcgcgtcgccgatctcatcgataagggcgtcaacatcgcgatcgacatcaagaagaagacggaggggggtaagttgaaggacttcaaggcctacttagaacaaaacaaggtgcccgccatcgccgaacttagagccgaagtcgaagccttcgccgacgagttccacatgccgggaggtccggtgatttaa

SEQ ID NO: 228576 - DNA, 1312 bp, Unknown
  Bacterial polypeptide expressing nucleotide sequence isolated from the Sargasso Sea
atgtctagtgaaaataaatatttaaatgatcaatataaatctttttttgaagatagtttatcaaaaactgatcctgatttgtataaagcaattagtgatgaactaaaaagacaacaagaacatattgaattaattgcttctgaaaatattgtttcccaagctgtactagaagctcaagggtctgttttaactaataaatatgcagaaggatatccaggcaaaagatattataatggatgtgaacatgtggacgttgctgaaaatttagcaattgaaagattgaaaaaattatttaattgtaaatatgccaatgcacaacctcactcaggagcccaagcaaatggagctgtatttttagctttactaaaacctggtgatacatttatgggaatgagtttaaattctggtggacatataactcatggattaaaaatatcaatgtcaggtaaatggtttaacgctataggctatgatgttgataaagaatccgaattaattgattatgataatgttgaaaaaattgctttggaaaataaaccaaaacttataatagcaggcggaagtgcttactctagggtaattgatttcaaaaaatttagagagatagctgataaagtaggggcatatctaatggtagatatggctcatttttctggtttagttgctggcaagggttatcctaatccttgtgaacatgcacacgtagtaacttcgacaactcataaagtttttagaagtgccagagggggaattattttaactaatcatgaagatttagcaaaaaaatttaattctgctgtatttccaggttatcaaggaggaccattaatgcatataatagcagctaaagccgcaggttttttggaagcattaagacctgaatttaaagattatataaaatctgtattagctaatgcaaaaattttatcggaaacattaaagaacaatggatttaaaatttattcaggcggcacagattctcatttaatgttagtcgacttaagaccttttggtgttaaaggaaatctggctgccgaaagcttatcaagagcaaatatcacttgtaataaaaatggaattccatttgatagtgagagcccaatgatcacatctggtattagacttggtactcaagctgcgactactagaggatttggcttaaaagaatttcaaaaagttggagaactaataactaaagttataaaaggtttgtctgaaaatcataaggataatagtaaaactgaaaatgaagttaaaaatgaagttattaaactaacttcttcttttccaatatataaaaatttgaaataaa

SEQ ID NO: 228577 - DNA, 1279 bp, Unknown
  Bacterial polypeptide expressing nucleotide sequence isolated from the Sargasso Sea
atgaatatccttcaaaatcttaaagaaagtgattcagtaatatctaattttattaactctgaaaaaaatagacaggaaactcatcttgagttaattgcaagcgaaaatttcgcatcaactgccgtcatgcaggctcaaggatctgtcctcacaaataaatatgcagagggattacctcaaaaaagatattacggaggatgtgaatttgttgataaaatcgaagagctagctattcagagagctaaaaaattatttaattcaaattgggctaatgtacaaccccatagtggagctcaggcaaatgctgctgttttcctaagtttgcttaaacctggggacacaataatggggatggatttatctcatggtggacatctaactcatggatctccagtaaatatgagtggtaagtggttcaatgcagttcactatggtgtaaataaagaaactagtgaattaaattttgatgaaataagagagatagcaatgcaaacaaaaccaaaattgatcatatgcggatattcagcttatccaagaacaatcgattttgaatcattcagaaaaattgcagatgaagttggtgcattcttaatggctgatattgcacacatcgcaggtcttgtagcaagtaaacttcatccaaatccaattccttattgtgatgtagtaactacaactactcataaaacattaagaggccctagaggtggacttattttgtgtaaagatgcagaatttggaaagaaatttgataaagctgttttcccaggaactcagggtggacccctagaacatattattgcagctaaagcagttgcatttggggaagccttacagccagatttcgttgattattcccaacaagtaataaaaaatgccaaagttctagcttcaaccttaataaatagaggtattgatatcgttagtggaggcactgataatcatattgttttactcgatttaagaagtatcaatatgactggtaaaattgctgacttgctcgtaagtgaagtgaatatcactgcaaataaaaatactgttccatttgaccctgaatcaccttttgtaaccagcgggctaaggttgggtactgctgctttaactactagaggctttaatgagaatgcttttgctgaagttggcgaaattattgctgatagattacttaacccaaacgattcactgattgaaagtcaatgtaaagaaagagtattaacttatgtaatcgttttcctctttatgaaggcaaacttgaagcatcaattaaatgagtcctaat

SEQ ID NO: 228578 - DNA, 333 bp, Unknown
  Bacterial polypeptide expressing nucleotide sequence isolated from the Sargasso Sea
atacacatttgatgttagttgatttaagaccttataatgtaaaaggtaattttgcggcagagagtttgtctagagcaaatattacatgtaacaaaaatggtattccttttgatacggaaaaacctatgattacctcaggaattagattgggaacacaagctgctacaacacgtggatttggtttaagtgaatttaagactgtaggtgaattgatcacaaaaactctaaaaggattatcagaaaatccaacagataatagtaagatcgaaaatgaagtaaaaaatgaagttattgctttaacttcatcatttcctatatataagaacctatagc

SEQ ID NO: 228579 - DNA, 274 bp, Unknown
  Bacterial polypeptide expressing nucleotide sequence isolated from the Sargasso Sea
cttggaagagctaacattactgtaaataaaaattcagtaccaaacgatcctcaatcaccttttgtaacaagtggaattagagttggcactccagctccaactactagaggctttaaggaagctgaatgcaaagatattgtagattggatgtgtgatgttattgagaacatggataacgacgaagttattaacgaagttaaaaataaagttgttggtctttgcaaaaaatttccagtctatggaaaatctcaatctaaggcggctgcagcctagt

SEQ ID NO: 228580 - DNA, 250 bp, Unknown
  Bacterial polypeptide expressing nucleotide sequence isolated from the Sargasso Sea
atgtttgataacaataaaacacttaaagattttgacccagacctttggtcttcaatagataaagaaaaaactagacaagaagaccacatagagctcattgcatcagaaaattacacctctcagagagtccttgaagctcaaggctctgttttaaccaacaagtatgccgaaggttacccgggagctcggtacaacgggggttgcgagaacgtggatattgccgaatcacttgctatgaaagagctaaaga

SEQ ID NO: 228581 - DNA, 682 bp, Unknown
  Bacterial polypeptide expressing nucleotide sequence isolated from the Sargasso Sea
aatgtctagtgaaaaaaattatataaacgataactataagagtttttttgaagacagtttatcttcaaaagaccctgaactttataaggcaattcaagatgaactcctaagacaacaacaacatatagaattaattgcttcagaaaatattgtttctcaagcagtattagaagctcaaggatcagtactaacaaataaatatgctgaaggttatcctggtaaaagatattataatggatgtgagcatgtcgatgttgcagaaaatttagcaatagaaagattaaaacaacttttcaattgtaaatttgctaacgcccagccacactcaggagctcaagctaatggcgctgtatttttggcactgttaaaacctggtgatacttttatgggcatgagtttaaattcaggaggtcatattactcatggtttaaaaatttcaatgtcaggaaaatggtttaatccgataggatatgatgttgataaaaaatctgaacttatagattatgataatgtagaaaaactagctttagaacataaaccaaaattaataattgcaggtggaagtgcatattccagagttatagattttaaaagatttagagaaattgcagataaagttggagcatatctaatggttgatatggcacatttttcaggtttggttgcggaaaaggatatccaa

SEQ ID NO: 228582 - DNA, 275 bp, Unknown
  Bacterial polypeptide expressing nucleotide sequence isolated from the Sargasso Sea
tatgaaatcatctaaaagcgataatatattttctaatatttcttctattaaagaatatgataaagatttgtggacatcttttgaaaatgaggcgcaaagacaagaagaccatattgagttaattgcatcagaaaattacgcttcaaaaagaatacttgaggctcagggttcattattaacaaataagtatgctgaaggctacccttcaaaaagatattatggaggatgtgaatttgttgatgttgcagaaaatcttgcaatagagagagctaaac

SEQ ID NO: 228583 - DNA, 745 bp, Unknown
  Bacterial polypeptide expressing nucleotide sequence isolated from the Sargasso Sea
atgaaatcatcaagaagtgatagtattttctctaatgataatccaataaaggattatgattctgagctgtgggcttcttttgaaagtgaagctgaaaggcaagaagatcatattgaattaatagcatctgaaaattatgcatctaaaagaattcttgaagctcaaggttcagtcttaactaataagtatgcagaaggatatccatctaaaagatattatggtggttgcgagaatgttgatattgctgaaaaccttgctatcgaaagagcaaaaaaacttttcaaagcagattatgcaaatgttcaacctcattctggctcttctgcaaatgctgcagcatatttagctttactagaaccaaatgacactattcttggaatgagtcttgatcatggaggtcatttaactcatggctccaaggtaaatttttcaggtagaaactataaaagcgttcaatatgggcttcatcctgaaactcatgatattaattatgatgaggtaagatctcttgcaaaagaacacagacctaaattaataattgcaggtttttcagcgtttactggaataattgactggaagaaatttagagaaatagctgatgaggttggagcatattttcttgtagatatggctcatgtatctggtttggtagcagctgatttatacccatctcctgttccttatgcagatgttgttacatccactactcataaaacattacgtggtcctaggtctggaattattc

SEQ ID NO: 228584 - DNA, 1453 bp, Unknown
  Bacterial polypeptide expressing nucleotide sequence isolated from the Sargasso Sea
tatggaaagcgaagaaaatatatcggacgtttcaactgctttcagtaaagctttggaagtgatcagcacaagcgaacctactgttgcagaacatattcgaggagaattagacaatcaaagaagccagctgaagttaatagcttccgaaaactatgcttcacctgcagttcttcttgcaatgggtaattggttcagcgacaaatacgccgaagggacacctggccatagattttatgcgggttgtgagttcgtcgataaggttgaaacgcttgcaagcaaccatgcaaaagaactatttagcgctaactacgcatatgtgcagcctcactcaggtatagatgcgaacctagtcgcattctggtctattcttgctcaccgaattgaagctccttttcttgcatctcatggtaaaaggcacgtcaacgatctaacagattcagactgggaaactttacgaacatctttcggcaaccaacgaatgattggaatgtctttggatgccggaggtcacttaacccacggattccgcccgaatatatctggtaaattatttgatcagcggtcatatggtgtgaacccagaaactgaaatactcgactatgacgaaatcaatacgctggcaaaggaatttcgccctttagttattgtcgccggatattctgcctacccgcggaaagtcaatttcgctaaaataagagagatcgctgattcggttgatgcaacattcatggtggacatggcacactttgctggacttgtagcaggaaaggtattcgccgatgacttcgacccaatatcgaatgcccatatagtgacttctaccacgcataagtctcttcgtggccctcgaggtggaattgtcttatcgaacgaagaagaattggcagaattcatcgataagggttgtccgatggttctcggaggaccattggcgaatatcatggctgcgaaagctgtagcttttgccgaagcgcgccagcccgagtttagagagtacgcaagcaatgtcgttaacaacgcttctgcattggcttcgggaattgaaaagcgaggcggtcggcttgtaacagggggaactgagaaccaccttgtcttagtcgatgttcggaagtttgggcttactggacggcaagctgaaagtgcccttgaggatgcaggtgttgtagttaatcgaaactcaattccgtttgatccaaatggtgcttggtatacatctgggatcagattaggaactccggcgcttacaactttggggatgggcgaagatgatatggacgaggtagccgatattatctgctcaaccttgaaggcagcagagcctacaaaaacttcatccggggagcaatcgaaagcgaactatatccttgcaagcgaaattcaggccagcaaccgagaaagagctggagatctattgcgtttaaatcctctttacccagacctcaatctgatctaa

SEQ ID NO: 228585 - DNA, 541 bp, Unknown
  Bacterial polypeptide expressing nucleotide sequence isolated from the Sargasso Sea
atgtctagtgaaaaaaattatttaaacgatagttataaaagtttctttgaagatagtttgtcagtaaaggatccagaactttataaagctattaaagatgaattaattagacaacagcagcatatagaactaatcgcttccgaaaacatagtttctcaagcagtattagaagcacaaggttcagttttaaccaataagtatgcagaagggtatcctggtaaaagatattacaatggctgtgagcacgttgatgttgcagaaaatcttgcgattgaaagattaaaaaaattatttaattgtaaatttgcaaacgcgcaaccacattcaggagctcaagcaaatggcgcagtatttttagctttgttaagcccaggagatacatttatgggtatgagtttaaattcaggtggtcatattactcatggattaaaaatttcaatgtctggtaaatggtttaacgctataggatatgatgttgataaagagtcagaattgattgactatgataatgttgaaaaacttgctttagaacataaacaaa

SEQ ID NO: 228586 - DNA, 1008 bp, Unknown
  Bacterial polypeptide expressing nucleotide sequence isolated from the Sargasso Sea
tatgtcaaaaattaaaaaagatattagtaattactatcaggattattttgataaaaatttatccgaaagagatccagatttatataattcaattaatgatgagcttaatagacaacaacagcatattgaattaatcgcatctgaaaatatcgtctcaaaagcagtgcttgatgctcaaggatcaattttaacaaacaaatatgcagaaggttatcctggtaaaagatattacggtggatgtgaatttgttgataaagcagaagagttagctttagatagagttaaaaaattattcgattgtaaatttgcaaatgtccaacctcattcaggggcgcaggcaaacggagctgtttatcttgcgcttttaaatccaggtgatccaattcttgcaatgagtttaaattcaggaggtcacttaactcacggagcaaaggtggctcagtcgggaaaatggtttaaagcatttcattacgaagtagataaagaaactggtctaattgattatgatcaaatccaaaaactagctacggagcacaaacccaagatattaattgctggcgggagtgcatactcaagaataatagatttcaaaaagtttcgcgaaatcgcagacagtgttaacgcatatctaatggttgatatggcccacttctcaggtttagttgctggaaagggatatcccaatccagttaaatatgccgacgttgttacatctacaactcataaagttttaagaggtggtagaggaggaattattttaaccaatagagaagatttatataaaaaatttaactctgcagtatttcctggttatcaaggtggacctttaatgcatgtgatagcagcaaaagcagcagcatttcatgaagcccttcaaccaaactttagagaatatataaaatctgtattagaaaatgctaaaattttatcagaaacactcaaaaataatgggttcaagattttttcaggcggaacagatacccatttaatgcttgtagatttaagacc

SEQ ID NO: 228587 - DNA, 619 bp, Unknown
  Bacterial polypeptide expressing nucleotide sequence isolated from the Sargasso Sea
tatggacttttttagagacaagttagatgtgagtattgatgaatatgataaagagctcagtgtctttattaatgctgaaaaagagcgacaagaaaaacatattgaactgattgcctctgaaaactatgcatccaaaagaattcttgaagctcaaggaagcgttttaaccaataagtatgccgaaggctatcctgctaaaagatattatggtggctgtgaatttgtagatggtgctgaaaatttagccattgaaagagcaaaatctttatttaaagcaaagtttgctaatgttcaaccacattctggggcctctgcaaatgcagctgtattcttggctcttcttgaacctggggatactgtgcttggaatggcattggatcaagggggccatcttacacatggatcgaaggtgaacttttctggaagaaattataattcagtacaatatggacttgataacgtttcaaaagaaattgattatgaccaggttcagtctttagctgaagaacataaaccaaagttgattatcgctgggttttctgcatacatgggaattgtcgattggaaaaaatttagagaaattgctgatagcgtaagtgcatatttacttgtagatatg

SEQ ID NO: 228588 - DNA, 1273 bp, Unknown
  Bacterial polypeptide expressing nucleotide sequence isolated from the Sargasso Sea
atgaatattcttcaaaatcttaaagaaagtgatccagtaatatccaattttattaactctgaaaaaaatagacaggaaactcatcttgagttaatagcaagtgagaattttgcatcaattgccgtcatgcaagctcaaggatcagtcctcactaataaatatgcggaaggattacctcaaaaaagatattacggtggatgtgaatttgttgatgaaattgaagaattagctattcagagagcgaaaaaattatttaatgcaaattgggctaatgttcaacctcacagtggagctcaggcaaatgctgccgttttcctaagtcttcttaaacctggtgacacaatcatgggtatggatttatctcatggtggacacttgactcatggatctccagtcaatatgagtggcaagtggttcaatgcagtgcactatggtgtaaataaagaaactagccaattacattttgatgaaataagagagatagcactagaaacaaaaccaaaattaatcatatgcggatattctgcttatccaagaatgattgattttgaatcatttagaaatatcgcagatgaagttggtgcattcttaatggcagatattgcacacattgcgggtctcgtagcaagtaaacttcaccctaatccgataccatattgtgacgtagtaactaccactactcataagacattgagagggcctagagggggacttatcttatgtaaagatgaagaatttgggaagaaatttgacaaatctgttttccctgggactcagggtggtcccctagaacatattattgccgctaaagcagttgcatttggagaggccttacaaccggatttcgttaattattcccaacaagtaataaaaaatgccaaagttctggcttcaacattaataagtagaggtattgatattgttagtggaggcactgataatcatattgttttactcgatttaagaagtattaatatgactgggaaaattgctgatttgctagtaagcgaagttaatatcacagctaataaaaatacggttccatttgatcctgaatcaccttttgtgaccagtgggctaaggttgggtactgctgctttaactaccagaggctttaatgaaagtgcttttgctgaagttggggaaattattgctgatagattacttaatccaaatgattcatcaattgaaagtcaatgtaaagaaagagtattagccttatgtaagcgttttcctctttatgaaggcaaacttgaagcatcaattaaatgaa

SEQ ID NO: 228589 - DNA, 682 bp, Unknown
  Bacterial polypeptide expressing nucleotide sequence isolated from the Sargasso Sea
tatggtagatatggctcatttttctggaattgttgcaggtaaaggatatcctaatccttgtgatcatgctcatgtagtaacttcaactactcacaaagtatttagaagtgcaagaggaggtattattttaactaatcatgaagatctagctaaaaaaattaatacggcagtatttccaggataccaaggaggaccattaatgcatataattgcagcaaaagcagttggattttttgaggcattaaaaccagattttcaagattatattaaatctgtattagctaacgctaaaattctttctgaaaaactaatatcaaatggttttaaaatttattcaggtggtaccgatacccatcttatgttggtcgatttaagaccgtttaatgtaaagggcaatatggcggcagaaagtttatctagagctaacattacatgcaataaaaatggaattcctttcgacacagaaagtccaatgataacatcgggaataagattgggctctcaagcagcaacaacaagaggttttggattaaatgaatttaaattagttggtgatttaataacaaaaataatcaaaggtttgtcaaataatacaacagataatagtaaaattgaagatgaagttagaaaagaagttgtagatttatgttcaaattttcctatatataagaatttaggataa

SEQ ID NO: 228590 - DNA, 1291 bp, Unknown
  Bacterial polypeptide expressing nucleotide sequence isolated from the Sargasso Sea
tatgcttgataataaatctaatcttaaaactgatgcaatcttttcaaataaaaaagatatagaactttatgatgctgagctttgggaatcttttgaaaaggaaatggttagacaagaagaacatattgaacttatagcttcagaaaattatgcaagtcaaagagtgcttcaagctcaaggttctgtattaacaaataaatatgctgagggataccctgacaaaagatattatggtggctgtgagtttgttgatattgctgagaagttggcaatagatagagctaaggagctttttaatgctgattatgctaatgttcaacctcattctggttcctctgcaaatgctgctgcatatttagcattacttgagccaaatgacgcaatactcggaatgagtcttgaccatggaggacaccttacacatggatcgaaagtaaatttttcaggaaggaactataaatcttttcaatacggattaaaccctgaaacacatgatattgattatgaccaagttcgtgatttagcaaaaaaacataacccaaaactaataattgctgggttttcagctttctctggtttagttgattggggtatatttagagaaattgctgatgagattaatgcttatttcttggtagacatggcccatatatcgggacttgtagcggcaggtatgtatccctcacctgttccgtatgcagatgttgtgacatctacgactcacaaaacactaagaggtccaaggtctgggattattcttgcaagagagaatgaagatatacaaaaaaaattaaactctgcagtttttccaggatcacaaggaggccctttgatgcatgttgttgctgctaaagcagtttgttttaaagaagctcttgaacctgaatttaaaacctatatgtcgcaagttattagtaatgctaaaactatggcgaagactattattggaagaggagttgatatagtaaaaggtggtactgaaaatcatatgattcttgtcgaccttagaaataaaggtataacaggaaaggactctgaatataaactcggtttagctaatatcacagtaaataagaacgctgttcccaatgatccacagtctccctttgtaacatcaggaataagacttggaacacctgcagttacaacaagaggctttaaagaagatgaaattattcaaatttcaaattggatctgcgatatagtccttgatttagataatgagaaaaaaattgaggaaattaaagataaagctctgtctttatgcaaagaattcccagtatataagtaa

SEQ ID NO: 228591 - DNA, 1288 bp, Unknown
  Bacterial polypeptide expressing nucleotide sequence isolated from the Sargasso Sea
aatgtctattgtcaaagaaaaagacaaaaaaatctatgatataattcaatctgaattaaatagacaaaataattatttagagctgattgcatctgaaaattttaccagcaaagccgttcttgaaactgcaggttctgttcttacaaacaaatatgctgagggctatcctggaaaaagatattacggtggatgtattcatgttgacgaggcagaaaatttagcgattgatagagctaaaagactttttaaggcagaatatgctaacgtacaacctcattcaggttcatctggtaatatgggtgtttatcttgcttatttacagcctggagactgtattatggggttagatttgagtcatggtggacacttaacacatggatctaaagttagcttttcaggtcaaatttataattctgttacttttcaagtaaaacaagatactggattagtagattttgatgatctgctaaagaaagctagagaatacaaacctaaaattattatttgtggtgcaagcgcttatccaagaacaatagaatttgaaaaatttagggaagttgccgatgaagttggggcatttttacacggggatatttgccataattcaggattaatagctgctgaaatgcatccttcaccatttccgtactgtcatgttgtttctaccagtacacacaaatcgcttagaggcccaagaggcggtataattttgcttggtagtgattataaaaatccatttggaaaagttgcaccaaaatcaggaagagttaaaatgatgtcagagctaatcgatagcgctgtaatgcctggaatgcaaggtgggccacttatgcatatcattgccgcaaaagcagtagcatttaaagaggcgcttgaaccgtcttttaaaacttatattagaggagttcttgataatgcacaatgttttgctgaggagtttaagtctaagggatatgaattaatttctggtggaacagacactcacttagttttaattgatctacagaacaaaaatatatctggaaaagccgcagaaattgctcttgacgaagcaggaattaccgtaaataaaaatatgatcccttttgatcccaaaagtccatttgttacaagcggaattagaattggttctccagctatgacgactaggggaatgggcgtagatgaagttaaaattattgttgatttaattgatcaagtcattttaaatcatgataataaagacaaaattcaatcagttaaaaagcatgtcaatgagctgtgctcatcttttcaaatatatgattaa

SEQ ID NO: 228592 - DNA, 613 bp, Unknown
  Bacterial polypeptide expressing nucleotide sequence isolated from the Sargasso Sea
gatgttgaaacgtgacatgaccattgccggctatgatccagagctgtggcaggccatcacagacgagacccgtcgtcaggaagagcatatcgagctgattgcgtccgagaactacaccagcccccgtgtcatggaagcccagggctcccagctgaccaataagtacgccgagggttacccctccaagcgttactacggtggttgcgagtatgtggatgtggttgaaaccctggctatcgagcgcgccaaagagctgttcggtgccacctacgccaacgtgcagccgcactccggctcccaggccaacagcgctgtctacatggccctgctgcagccgggcgacaccgtgctgggcatgaacctggcccacggcggtcacctgacccacggctccccggtcaacttctccggcaagctgtacaacatcatcccctacggcatcgacgagtctggcaagatcgactacgacgacatggaacgtcaggcggtcgagcacaagccgaagatgatgatcggtggcttctccgcctactccggcatcgtcgactgggctcgcatgcgcgaaatcgccgacaaggtcggtgcctggctgtttgtcgacatggctcacgtg

SEQ ID NO: 228593 - DNA, 1255 bp, Unknown
  Bacterial polypeptide expressing nucleotide sequence isolated from the Sargasso Sea
atgactttttcagaaacattatcaaaacttgattcagaacttgcttctgcaattgagtcagaacaaaagaggcaagaggagcatatcgagctgattgcttctgagaactatacctctaaggaggtcatggagatccaaggctcggttctgacaaataaatatgcagaaggttacccgggtagaagatactatggtggttgcgttcatgttgatgaagctgaagtgcttgcaattgagagagtcaagcaactcttcgatgccgattatgcaaatgttcaaccgcattctggctcgcaggccaatatggctgtttacatgtctcttcttgatcatggagataaaattcttggcatgagcctttcagatggaggacatcttacacacggagcaaaagttaacttttctggtcaaatgtatgagtttttctcatatggaatcaatcctgatactggaaggattgactatgatcaagtctctaaacttgccgagacgcaccgtccaaaaatgattgtcgctggtttttctgcatactcaagattagtcgactggaatgttttcagagatattgctgactctattggtgcttatttcatggtagatatggctcatgtctcagggctgatagcgggaggttgttatccaaatccagttccaatcgctgatgtaacaacttcaaccacccataaaactctgagaggccccagaggcggaatcattctagcgcgcgaaaatgaggacatagaaaaggcaatcaataagcaagtattcccaggcacacagggcggacctttaatgcatgttattgctgccaaagctcatgcattcaatgaagcgcttaaaccagagttcaagacttatcaagaagctgtggtaaagaatgcaaaagccatggcatcaaggtttcaagaacatggatatcagattgtatccgatggaacagattgtcatctatttttggttgatctaagtaatacagatatcactggcgccgatggtgagagagtattgggagaggcaaatatcactctaaataaaaattcagttccaaatgaacaaaggtcaccgatgataaccagtgggctaagaattggttcaccggccattacaacaagaggatttggcgtttcagaggcagagtatgttgtagatctgattcatgaagttctgagcgatatcaataatcaaagcaatatttcttctgtgaagaataaagttaaggatctctgtaagggttttccagtttaccttcagtaag

SEQ ID NO: 228594 - DNA, 764 bp, Unknown
  Bacterial polypeptide expressing nucleotide sequence isolated from the Sargasso Sea
acttataattgcaggaggaagtgcatattctagagtcatagattttaaaaagtttagagacatctgtgataaagtaaaagcctatttacttgtagacatggctcatttttctggactagttgcaggaggagtatatcctaaccctactaaatatgctgatgctgtaacttcaacaacacataaagttttaagaggccctagaggaggaataatacttactaataatgaagaattaattaaaaaatttaacagtgcaatctttccgggtcttcaaggtggaccactaatgcatgttattgctgctaaagctgtttgttttaaagaagctttgtctgatgaatttaaaagctactctcaaaatgtaataagtaatgcaaaaattttatcaaataaattaatagaaaatggatttaaaatattttcaggtggtacagacactcatttaatgcttgtagatttaagagactttaacgttacaggtaaagatgttgaagcatctttagttcgtgcaaatataacttgtaataaaaatggtattccttttgatactcaaagcccaatgattacatctggaattagactaggaacacctgcatgtactactagaggatttggaccaaatgaatttagattaattgcagatttaatttccaaagttgttaaaggattaagtaaaaatggtcaaaataactctaaaatagaaaaagaagtgcaaaaagaggtgattgatctttgctcttctttccctatatatagtgattaaa

SEQ ID NO: 228595 - DNA, 525 bp, Unknown
  Bacterial polypeptide expressing nucleotide sequence isolated from the Sargasso Sea
acactgcagtttttcctggttaccaaggagacccattaatgcatatcattgcagctaaggcagcagggtttctagaagcgctaagacccgattttaaagattatattaaatcagtactagctaatgcaaaaattttgtctgaaactttaaaaaataatggttttaaaatttattctggaggaactgacacacatttaatgttagttgatttaagaccttttaaagttaaaggaaatttagctgctgaaagcttatctagagcaaacataacatgtaataaaaatggtattccatttgattctgaaagcccaatgataacatctggtattagacttggatctcaagcggcaacaacaagaggttttggtttaaaggaatttgaaaaagtaggtgaattaatcactaaagtaatcgatggattatctaaaaatccaaatgacaatactaaggtagaagatgaagttagaaagcaagttgtttctctttgtttatcatttcctatatataaaaatttaagaaaatgat

SEQ ID NO: 228596 - DNA, 934 bp, Unknown
  Bacterial polypeptide expressing nucleotide sequence isolated from the Sargasso Sea
atgatttcagatttgtttactaaaggaattaaagaagcagacccagaggtttatggaacgttaagccgtgaactagaaagacagcaaaaccaaatagagttgatagcatctgaaaatattgcttcaagatcaattttaaatgctcaaggctctgtcatgacaaataaatatgcagagggttatcctggtaaacgatattatggtgggtgtgaatttgttgatcaagctgaagagattgctttagaaagagttaaaaaactttttaattgtaaatttgcaaatctacaaccgcatagtggagctcaggcaaaccaagcggtctttctagcgttacttcaaccacatgatactatattaggtatgtctcttgcatcaggtggtcacttaactcatggagcaaaacctaatctatctggtaaatggtttaatgctgttcaatacggtgtaaaaaaagatggcaatgataaagatttaatcgattatgatgaagttgaagctttagctttagagcacaaaccaaaaatgctaattgcgggagcctccgcttatcctagaacaatagattggaaaaaatttagagaaataactgataaagtaggagcatattttttagttgatatggctcactattctggtttggttgctggtaaacaatatccaaatccgattgagcatgcccatgtagtaacttcaacaactcacaaaactttaagaggtgcaaggagtgcaatgattttaactaatcatgaagatttatataaaaaaattaattctgctgttttcccaggattacaaggtggtccactaatgcatgtaattgcagctagagctgtttgctttggtgaagcactcaaacctgagttcgaagaatatattaaaaatgtaattgctagtgctaaagttatggcaaaaactttagttgatagaggattta

SEQ ID NO: 228597 - DNA, 1223 bp, Unknown
  Bacterial polypeptide expressing nucleotide sequence isolated from the Sargasso Sea
aatgaatattcttcaaaatcttaaagaaagtgatccaatcatatccaacttaattaattccgaaaaaaatagacaagaaacgcatcttgaattgatcgctagtgagaattttgcatcaatggctgtaatgcaggctcagggttcggttttaacaaataaatacgctgaaggtcttccacaaaaaagatattacggtggttgtgaatttgtagatgagatagaagaactagcaatcgaaagagcaaaacaactttttgatgcagactgggccaatgttcaaccccatagtggagcacaagcaaatgcagctgtttttctaagtttacttaaacctggtgacactatattaggaatggatctatcgcatggaggacatttaacccacggatccccagtcaatatgagcggaaagtggttcaatgctgttcactatggagttgataaagaaactaataaattgaattttaaagaaattagagatattgcattagctacaaaaccaaaactaattatttgtggatattctgcttatccaagaaaaattgatttcgagtcgttcagaagaatcgctgatgaagttggagcttttttaatggctgatattgctcatattgcaggacttgtagcaaccaaactacaccctaatccaattccttattgtgatgtggtaactacgacaacacataagacattgagaggtccaagaggaggattaattttatgtaaagataaggaatttggaaagaaatttgataaatctgtgttccctggaactcagggtgggcctttagaacatattatcgcagctaaagctgttgcctttggagaagctttacagcccaactttattaattactcaaaacaggttatcaataatgcaaaagttttgtcttcaactttaattaaaagaggaatagatattgttagtggaggtactgataatcatattgtattgcttgacttaagaagtattaatatgactggtaaagttgctgacttacttgtaagtgaagttaacataacagcaaataaaaatactgtcccgtttgatcctgaatcaccttttgtaacaagtgggttgagattgggcactgcagctctaactactagaggttttaatgatgatgcttttgttgaagttggtgaaattattgctgatagattactcaatccagatgatttattaatagaaaaaaaatgcaaggaaaggggtattaacttta

SEQ ID NO: 228598 - DNA, 1291 bp, Unknown
  Bacterial polypeptide expressing nucleotide sequence isolated from the Sargasso Sea
atgtttaacctagaacaaaatgatccagaattatacgatgttttaaatagagaggctgagagagaagaatcaacattagaactaatagcatctgaaaatttcaccagtaaggctgtaatggaaatggctggtggagttatgaccaataagtatgccgaaggataccctggtaaacgctattatggcggctgtgaggttgtggatgaagcagagaacattgcccgtgatcggttaaaaaaattatttggatgtgaatatgcgaatgttcagccacattccggttctcaagcaaatatggccgtatttatgaccttccttgaacctggtgatactattatgggtttagatctagcccatggtgggcaccttacccatggcagccatgttaatttttcaggtcaattatataagtctgtctcttatcacatatcaaaaacaaatggtcgagtagattttgacgaagtttttagtcttgcgaaagaacataagcctaaattgattatttgtgggggtagtgcctatccacgatttatagaatttgaaatgtttagagaggttgcagatactgtaggagctcatcttatgtcagatattgcacaccccagtggcctggttgctgcaggtgtgcatccatcgccaatgcaatactgtgacatcgtcactagtacgacgcataaaacacttcgtggtccaagaggcggaattataatgatgggcaaggattttgaaaacccctggggtaagatcgcaccaaagtcaggtcgtattaaattggtttcagaattaattgattccatggttatgccaggcgtacaaggaggtcctttaatgcatattattgctgctaaggcagttgcttttggtgaagcattaagacctgattttaaaaagtatgctaaggatattgtttccaatgctaaagtcatggctgaggaatttttacatctaggctatgaccttgtctctggtggtacggatactcacgttctcctgatcgatctttcaaataaagatattactggaaaacatgctgaaaatatattgggaaaagctgggatcgctcttaacaagaatatggtaccttttgatcgtagaagtccatttgtaacaagtggcataagggtcggtacgccagcattaactacaagagggatgggggaaacagagatgaggaaagttgtacaatggatcgatagtgccattagtgatcctgataatgatcaacttctaactagtattcggtcggatgtagaagccctttgctcaaatttcccaatctatgaacattaat

SEQ ID NO: 228599 - DNA, 1309 bp, Unknown
  Bacterial polypeptide expressing nucleotide sequence isolated from the Sargasso Sea
atgtcgagcgaaaaaagttatttaaacgatagttataaaagtttttttgaggatagtttatctgtaaaagatccagagctttataaagctattaaagatgaattaattagacagcaacaacatatagagctaattgcgtctgaaaatatagtatctcaagcagtattagaagcacaaggatcagttttaactaacaaatatgctgaaggttatcctggtaaaagatattataatggttgcgaacatgttgatgtagcagaaaaccttgctattgaaagattaaaaaaattatttaattgtaaatttgcaaatgctcaaccacactcaggtgcacaagctaatggagcagtgtttttagccctattaagcccaggtgatacgttcatgggtatgagtttaaattcaggtggtcacattactcatggattaaaaatttcaatgtctggtaaatggtttaacgctataggttatgatgtagacaaagaatctgagttgatagattatgataatgttgaaaaacttgcattagaacataaacctaaactaatcattgcaggcggaagtgcttattctagagtaattgactttaaaagatttagagaaatagcagataaagttggagcatatctaatggttgatatggctcacttctcaggattagttgctggtaaaggataccctaatccatgtgactatgctcatgtagttacttcaacaactcacaaagtatttagaagcgcaagaggaggaataattttaactaatcatgaagatcttgctaaaaaatttaacacagctgtttttcctggttaccaaggtggacctttaatgcatattattgctgcaaaagcagctggctttcttgaagcgttacaaccagaatttcaagattatattaaatctgttttagcaaacgcaaaaattttggccgaaactttaaaaaataatggatttaaaatttattcagatggaacagatacacatttgatgttggttgatttgagaccctacaatgtaaaaggaaatcttgcggcagaaagtttgtctagagcaaacattacatgtaataaaaatggtattccatttgatacagaaaaacccatgattacatctggaataagattaggaactcaagcggctacaactcgtggatttggattaaatgagtttaaaacagtaggtgaattaataacaaaaactctgaaaggtttatctgaaaaccctacagataacagtaaaatagaaaacgaagtaaaaaatgaagttatttctttaacttcttcatttccgatatataagaacctttagt

SEQ ID NO: 228600 - DNA, 433 bp, Unknown
  Bacterial polypeptide expressing nucleotide sequence isolated from the Sargasso Sea
tatgaaatcatttaaaagtgacaatatcttctctgatgcaagttctattgagaactttgataaagaattgtgggaatcattcaaaaatgaagcagaaagacaagaagatcatattgaattaatagcttcagaaaattatgcatctaaacgagttcttgaagcacaaggatcagttcttacaaataaatatgctgaaggatatccatcaaaaagatattatggaggatgtgaaaatgtagatatagctgaaaatctagcaatagaaagagcaaaagaactatttaatgcagattatgcaaatgttcaacctcattctggttcatctgctaatgcagctgcatttttagcgttgttaaacccaaatgatactattcttggcatgagtcttgatcatggaggacatttaacacatggatcaaaagttaacttttct

SEQ ID NO: 228601 - DNA, 778 bp, Unknown
  Bacterial polypeptide expressing nucleotide sequence isolated from the Sargasso Sea
atgtctacagcaattaaaattaataagtttttaaataatttttttaaatcgagtttaaaagactctgacaaagaactttacgactcagtaaaaaatgaatttataagacaacaaaaccatattgaactaatagcatctgaaaatatagtttctaaggcagtacttgaagctcaagggtctgtcttgactaacaaatatgctgaaggatacccgggaaaaagatattatggaggatgtgaacatgtagatctctccgaatctttggcaattgaacgtgcaaaaaaactatttaattgtaattttgcaaatgttcagccgcattcaggagctcaagctaatggtgctgtatatttagctttgattaagcctggtgatactattctaggtatgagtttaaattctggcggacaccttactcatggcgctaaacctgctcaatctggaaaatggtttaatgcaattcactacgatgtagataaagatacaggtttactcgattatgaaaatatagaaagattagctctagaacataaaccaaagttaattattgcaggaggaagcgcttactcaagaattattgattttaaaaaatttagagatatatgtgacaaggtgaatgcttatttccttgttgacatggctcacttttctggacttgttgctggtggcgtttatcctaatcctgttatgtatgctgatgtagttacatcaactactcataaagttttgcgtggaccaagaggtggtattattctaacaaataaagaagatttaatta

SEQ ID NO: 228602 - DNA, 817 bp, Unknown
  Bacterial polypeptide expressing nucleotide sequence isolated from the Sargasso Sea
atgtctagtgaaactaaatatttaaattcaaattatcaggatttttttgaaaagagcctttcaaaatctgatccagatttatttaaagcaattaatgatgaattaataagacaacaaaatcatatagaattgattgcttctgaaaatatagtttctcaagcagttttagaagcgcaaggttcagttttaacaaataaatatgccgaaggttatcctggtaaaagatattataatggatgtgaacatgttgatgttgctgaacaattagctatagagagaataaaaaaactttttaattgtaaatatgctaatgttcaacctcattctggtgctcaagcaaatggtgctgtattcttagccttattaaaacctaatgatacatttatgggaatgagcttaaattcaggtgggcacattactcatggtttaaaaatttcaatgtcaggaaagtggtttaatgcaattagttatgatgtagataaaaaatcagaattaattgattatgataatgttgaaaaacttgctttagaacataaaccaaaacttataattgctggaggtagtgcatattcaagagttattgattttaaaagatttagagagatagctgataaagttggagcataccttatggttgatatggcacacttttcaggattagttgctgggaaaggttatcctaatccttgtgattatgctcatgtagtcacatcaacgacccataaagtttttagaagtgctagaggaggtatcattttatcaaatgatatagatttaggaaaaaaatttgataccgcagtatttcctggttaccaag

SEQ ID NO: 228603 - DNA, 224 bp, Unknown
  Bacterial polypeptide expressing nucleotide sequence isolated from the Sargasso Sea
tatgtcgagtgaaaaaaattatttaaacgatagttacaaaagtttctttgaggatagtttatctttaaaagatccagaactttataaagctattaaagacgaattaatcagacaacaacaacatattgagttaattgcctctgaaaatatagtttcacaagcagtattggaagctcaaggttcagttttaacaaacaagtatgcagaaggttatcctggaaaaa

SEQ ID NO: 228604 - DNA, 733 bp, Unknown
  Bacterial polypeptide expressing nucleotide sequence isolated from the Sargasso Sea
gagtaatagattttgcaaatttagagaaatagcaaataatataaatgcttatttgttagttgatatggctcattttgcaggtcttgtagcttccaaaacctacccatcaccaatagcaattgcagatattgttaccacaactacacataaaaccttaagaggtccaaggggaggattaattctcactaataatgaggatatttcaaaaaaaataaactcagcaatttttccaggaatacaaggtggaccactcatgcatacaattttagcgaaggctgtagcttttggtgaagcattaagaccagaatttgttaattattcacaaaatgtaatagataatgcaaaaatattatctcaaacacttcttgaagatggttttgatatagtttctggaggtacagacagtcaccttgttcttctagatcttagaccaaaaggaataaaaggtaatgaagctgaggatgtattaggaaaagcaaatataacttgcaataagaacggtgttccatttgatcctgaaaaaccaactataacatcaggtataaggttaggaactcctgcaggtacaactagagggtttggacaggcggagtttcataaaattggaacttatatctgtgaagtcctaaatggatttcaattagatggtgttgatacaaaagctattttagaagttcagaaaaaagtgatagatctttgcagaaaattccctatttatggaggaaatttatga

SEQ ID NO: 228605 - DNA, 1013 bp, Unknown
  Bacterial polypeptide expressing nucleotide sequence isolated from the Sargasso Sea
agcaaaagagctatttgaaatgcctcacgcaaacgtacaaccccatagtggagcacaggctaacatggcagcatactttgctgtcttagaaccaggggatactgttcttggaatgagattagaccaaggaggccatctaacccatggtgccaaagtaagtttctcaggaaatctttacaatttcataccttatggcgtaaccaaagatagtgaaaccatcgactataacgagattgaatctcttgcaaaagaacattctcctaaactaatagttgcaggatgcagtgcatacccaagagtactagattttcaaaaattaaagacgatcgctgataatgcgggtgcccttcttatggtagatatggctcatatttccggcttgatagctggaggcgcacacccctcacctgctggatttgctgacatcataacttctacaactcaaaaaactctccgagggccaagaggcggtatcatactaactacagaagatttagccaaaaaagtagattatggggtgtttccttattctcaaggaggacccttcatgcatgtaattgcagcgaaagcggtatgttttggagaggctttaactccggaattctcaaattatgcccaccaagtggtgagaaatgcagatctgatggcaaaacaactagcagaatcaggaatgcgattgatttctggaggtaccgacaaccatcttattctagctgacgtcacacctttaggattgacaggccaagacgcagaacgaaccctgcaagatattggagtcatagtgaacaaaaactcaataccttgggatccaaaacctgcaagagtaaccagtggacttcgagtaggtacagccgccattacaagtcgtggtttcactgaacctgaagttatagaagtttctgaaatcattattagtgcgttgagtaatcacactgatacatcactgctaggccaattagcagatcaagtcaagaatttagcaagcagccacccagtacctgggatagattaat

SEQ ID NO: 228606 - DNA, 724 bp, Unknown
  Bacterial polypeptide expressing nucleotide sequence isolated from the Sargasso Sea
gtttcgtgatattgcagacagcgttaacgcatatctaatggttgatatggctcacttctcaggtttagttgctggaaaaggatatcctaatcctgttaagtatgccgacgttgttacatctacaactcataaagttttaagaggtggaagaggaggaattattttaaccaatagggaagatttgtataaaaaatttaactctgcagtatttcctggttatcaaggcggacctttaatgcatgtgatagcagcaaaggcagcagcatttcatgaagccttacaaccaaactttagagaatatatcaaatctgtattagaaaatgctaaaattttatcagaaacactcaaaaacaatgggtttaagattttttcaggtggaacagatacccatttaatgcttgtagacttaagaccttttaaagttacaggcaaagctgctgaagtcagtttgtgtaattcaaatattacatgcaataaaaacggcataccttttgatacagaaaaaatgactgtcacatccggaattagactaggatcacaagctgctacaacaagaggatttggattaaatgaatttaaaaaagttggtgaactaatcacaaaagtaatcaaaggtttatctaatagtcctaatgacaattctaaaactgagtcagaggttagaaaagaagtgattgaactttgttctaaatttcctatatacaatcatttgttcaaaaattaa

SEQ ID NO: 228607 - DNA, 789 bp, Unknown
  Bacterial polypeptide expressing nucleotide sequence isolated from the Sargasso Sea
acgatcatgtaagagatttagctaaaaagcataatcccaaaatgattattgctggcttttcagctttttcaggcactatagattggaaaatattcagagatattgcagatgaggttggttcttattttctggtcgatatggctcatgtttcagggctggttgctgctggagtgtatccttctccagtgccctatgcagatgtcgtgacctctacaactcataaaactttaagagggccaagatcaggaataattattgcaaaatcaaatgaagctttagaaaaaaaattgaactcagctgtatttcctggatctcaaggcgggccactaatgcacgtaatagcagcaaaagctatttgttttaaggaggctcttgaaccaaatttcaaaatatacatgcaacaagttattgataatgcaaaactcatgtgcaaggttattcaagatcgtggcattgatgttgtaaccggtaaaactgataatcatattgttttaatggatttaagaagcaaaggattgactggcaaagattgtgagctcgctttaggtcaagcaaatataactgttaataaaaatgcagttccagacgatcctcagtcaccatttgtaacctcaggaataagattgggcacacctgctatcaccacaagaggttttagaaatgatgaagtggaacaattaactaattggatctgcgatattgtccttgatcttggcaatcctgataaaattaatctaatcaaagaccaagtggttcaactatgcagcaagtttccggtatataaataac

SEQ ID NO: 228608 - DNA, 715 bp, Unknown
  Bacterial polypeptide expressing nucleotide sequence isolated from the Sargasso Sea
aatagattggaagaagtttagagatattgcagacgaggttggagcatactttttagttgatatggctcatgtttctggtttggttgcagcaaatttatatccatcacctataccttttgctgatgttgttacatctacgacccacaagacattaagaggtccaagatcaggtattattcttgcaaaagcaaatgaagaaattgaaaaaaaacttaattcagcagtattcccaggatcacaaggcggccctcttatgcatgttgttgctgctaaagcattatgttttaaagaggcacttgatccagaatttaaaatttacattcaaaatgtaatggataacgcaaaaataatggcgaaaactttaatgtcaaatggtatagatattgtcagcaatggaactgaaaatcatattattttagttgacttgaggtctaaaggcataactgggaaagaccttgaaaaacttcttgagagtatcaatattacagtaaataaaaattcagtaccaaatgatccagcttcaccatttgtgacatctggtatcagaattggaacacctgcagttacaaccagaggatttaaagagaaagaaattattcaagttagtaattggatttcaaatattatcaatgattttgataatgatgagcttcaaaaaaatattaaagaagaagttcaaaatcttacaagcaattttccagtatataatgtgtag

SEQ ID NO: 228609 - DNA, 841 bp, Unknown
  Bacterial polypeptide expressing nucleotide sequence isolated from the Sargasso Sea
ggcgtcgatcgggagacccagcggctggacatggaggccatccggcagctggctgtcgagcacaagccgaagctgatcgtctgtggctattcggcctatccccgcactattgatttcgccgccttccgcgccattgccgatgaggtgggtgcgttcctgctcgccgatatggctcatatcgctggtctggtggcggcaggcgtgcatcccagcccagttccccactgcgatgtggtcaccaccaccacccacaagaccctgcgcggtccccgcggtggtctgatcctctgccgggatgccgacttcgccaagaaattcgacaaggctgtgttccctggcagtcagggcggacctttggaacacgtcatcgcggccaaggcggtggccttcggcgaggccctgcaaccagcgttcaagacctacagccagcaggtggtggcgaatgcagccgctctggcagagcggttgatcgcccgcggcatcgacgtcgtcagcggaggcaccgacaaccacgtggtgttgcttgaccttcgctctgtcggcatgaccggcaaggtggctgatctcctcgtcagtgatgtccacatcacggccaataagaacacggtgccgtttgatcccgaatcccccttcgtcaccagcggcctgcgcctgggtaccgcagcacttaccacccggggctttgatgccgatgcgttccgcgaggtggcggatgtcatcgccgaccgcctgctgaaccctgaggatgacgctgttcagcagcagtgcctgcgtcgggttgaagcgctctgccaacgcttcccgctctatgccgctgcgcgtcagccggcgcttgcctgac

SEQ ID NO: 228610 - DNA, 1168 bp, Unknown
  Bacterial polypeptide expressing nucleotide sequence isolated from the Sargasso Sea
catacatttaattgcttctgaaaactttgcatcacaagcagtaatggaggcttcaggttcaatacttactaataaatattcagaaggttttccaggtagaagatattacgaaggttgtgaaactgttgatgagattgaacaaattgctatagatagagcctgtgaattatttgaagccgatcatgctaatgtccaacctcactcaggttcatcagcaaatatggcagtttatttaaatcttttagaaccaggggataccgttatgggtatgtcattagaccaaggtggacatttaactcatggttctcctgttaatttctctggaagaacttacaactttgttggttatggattagatagagaaacagaattaatcaacatggaagaagttgcagaattagcttccaaaacaaaaccaaaattacttattgccggatactcctcttattctcaagatttggattttaaaggattcagagaaattgcagattctataggtgcttattttatggttgatgcagctcacttcattgggcttgttgcaggtaaagtagttgaaaaccctgttccatatgccgatgtaattactgcaactactcataaagcactaagaggcccaaggggtggtttgatattatctaaagaagaatttgctaaaggtatagatcaaaatatttttcctggggcacagggtggtgcaattaataatcagatagctgcaaaagcggtttgttttaaagaggctatgtcagaagaatacaaatcttatgcacaacaaatattagacaacgcccatgctttggctgaatcctttaaagcagaagggttaagagttgtaagtggtggcacttcaaatcacatagttttagtggatacaggaagtgttgatgatgagctaactggtaaagaggctggaattttattgaatgatatgggcataacactaaatagaaatgcaataccttttgatgaaagatctccatttattacttcaggtatcagaatgggcactcctgcaataacaacatgtggaatgaaagaagaagaatcaactaaggtaggatatttaatttctgaagctttaaaaaatagagataatgaagatagaaggcaggaattagaagaggaaataagaaaccttgcaaaagcattccaaccatatgaatag

SEQ ID NO: 228611 - DNA, 784 bp, Unknown
  Bacterial polypeptide expressing nucleotide sequence isolated from the Sargasso Sea
tagaccaaaattaataatagcaggagcatcagcttattccagacatatagattttgagaagattagattaattgcgaataaagtggaggcatatttacttgcagatatagctcattattctggtctaattgctgctggcgagtatcctaatccacttaaatatgcccatgttgcaactacaactactcacaaaaccttaaggggcccaagaggaggtatgatattaagtaatgatatagaattaggtaagttatttgataaggctatttttcctggaatacaaggggggcctttaatgcatgtaattgctgcaaaagcggcggcatttggagaagctctcaaacctaactttaagcaatatgttttacaaataattaataatgcaaaagctttagctaacgaattagaaaatcaaggtgtaaaaattgtttctggtggaactgatagtcatgtaattttatgtgatttaagacctttaaatattacaggaaaaatatctgaagaaagtttggatagggctggtattacatgtaataaaaatgcagttccatatgatactcaaaagccttttataacatctggattaaggataggtactcccgcagttacaactagagggtttaaagaaaaagaaatgttgaaaatagggcagttaataggtaaagttttaaaatctatagcaaaaaattcagatgatcttgcttcagttgaagaggaagtgaagaaagaagttataactttatgtaaagaatttcctctttattcttctttaagttataattag

SEQ ID NO: 228612 - DNA, 1072 bp, Unknown
  Bacterial polypeptide expressing nucleotide sequence isolated from the Sargasso Sea
catgaataaaaaaggcgcttcccaagaatcacttaataatgtagatgcagaaatttctgagttaattgataacgacttaaatagacaaaatacacatattcatctgatagcttctgaaaattttgcttcaaaagcagtcatggaagcatctggatcaatattgactaataaatattctgagggttttccaggacgtagatattacgaaggctgtgagactgttgatcaaattgaacagctagcaattgatagagcttgtgaattatttgaagcggatcatgctaatgttcaaccccattcaggatcatctgcaaatatggcagtttatttgtccatactggaaccaggggataccgtacttggaatgtcacttgatcaaggaggacacctcacacacggttcaccagttaacttctcaggacaagtttacaactttgttggctacggtttagacgaggataccgaattaattaatatggaaactgtttacaacatggctttagagcataagcctaaattgattattgcaggatattcctcttattcacaatcacttgattttcaaaagtttagagaaattgcagatgaagtcggtgcccattttatggttgatgcagcacactttattggactagttgctggaaaagttgtagataatccaacaaaatatgctgatgtcgttaccgcaacaacacacaaagctttacgcggaccacgtggtggaattattttaacaagggaagaatttgcaaaggatattgataaaaacatatttcctggagctcaaggtggcgcattaaataatcaaatagcagcaaaagctgtatgttttaaagaagccttaacaaatgaatatcaagagtatgcaaagcaaatattaaaaaatgcaaaagcattatctgattcttttcaagaacaaggtttaagggtaattagtggaggaacagaaaaccatatagttcttgttgacactagaagtgtagatgaagaattaaccggtaaagaagctggtattttattaaacgataggggagtaactttaaatagaaatgcaataccatttgatcctcga

SEQ ID NO: 228613 - DNA, 1297 bp, Unknown
  Bacterial polypeptide expressing nucleotide sequence isolated from the Sargasso Sea
aaaaacaacacaatatgaagattttgaaaattttttttctaaaagtttaaaagaatctgatccaaagctttatgattccttggctcaagaattttcaagacaacaagaacatatagaattaatagcatcagaaaatattgtttctagatctgtcttagacgcgcaaggctccataatgacaaataaatatgctgaagggtattcaggaagacgatattatggtggatgtgaatatgttgatttagcagaggaccttgcaatatcaagagcttgtgagctatttgaatcaaaatttgcaaatgttcaacctcactcaggatcgcaagccaaccaagcagtatttcaggcacttttaaaacccggcgatactattctaggtatgagtcttgacgctggaggtcatttgacacatggcgccaaacctaatcaatcgggaaaattatttaacgcaattcaatatggtgtaagaaaagaagatagtttaatcgattttgatgaagttgaaacactagcaaataaacataaaccaaagcttattattgcaggaggatctgcgtatccaagagttattgatttcgtaaaatttaaagaaattgctgataaagttaatgcatattttttagtcgatatggctcactttgcaggtcttgttgcatcaaaaacttatccatcaccattaccccatgcagatattgtaactactaccacccataaaactcttcgaggcccaagaggtggtcttattcttacgaataatgaggatattgctaaaaaaataaattctgcaatatttccaggaatacagggcggacctttaatgcatacaattttggcaaaagctgttgcatttggggaggccttaaaaccagaatttgctcattactctcaaaatgtaatagataatgcaaaaattttatcccaaactcttctagaggatggtttcgatattgtttcgggcggaacagatagtcatttagttcttctagatttaagaccaaaaggcattaagggtaatgaggcggaggatgttttgggaaaggccaatatcacatgtaataaaaatggcgttccatttgatcctgaaaaaccaactattacatctggtattagattaggtactccggccgggacaactagaggttttggccaagctgaatttcataaagttggaacttatatttgtgaggttttaaatggatttcaatctgaaggcataaatacacaatctatttttgaggttcaacaaaaagtaatagatctctgtcgaaagtttcctatttatggaggaagcttatga

SEQ ID NO: 228614 - DNA, 928 bp, Unknown
  Bacterial polypeptide expressing nucleotide sequence isolated from the Sargasso Sea
atgcggatgttaaagcgtgaaatgaacattgccgattatgatgccgaactgtggcaggctatggagcaggaaaaagtacgtcaggaagagcacatcgaactgatcgcctccgaaaactacaccagcccgcgtgttatgcaggcgcagggttctcagctgaccaacaaatatgctgaaggttatccgggcaaacgctactacggcggttgcgagtacgttgatatcgttgagcaactggctatcgatcgtgcaaaagagctgtttggcgctgactacgctaacgtacagccgcactctggttctcaggctaacttcgctgtttacaccgctctgctgcaaccgggcgataccgttctgggtatgaacctggcacaaggcggccacctgactcacggctccccggttaacttctccggcaaactgtacaacatcatcccttacggtattgatgagtctggcaaaattgactacgaagacatggcgaagcaggccaaagagcacaaaccgaagatgatcattggtggcttctctgcttactccggcgttgttgactgggcaaaaatgcgtgaaatcgctgacagcatcggtgcatacctgttcgtcgatatggcgcacgttgcggggctgattgccgcaggcgtttatccgaacccggttccacatgcacacgttgtgaccaccaccacccacaaaaccctggcgggtccacgcggtggcctgatcctggcgaaaggcggtgacgaagagctgtacaaaaaactgaactctgctgtgttcccaagcgcgcagggcggcccgctgatgcacgtgatcgcagcgaaagccgtggcgctgaaagaagcgatggagcctgagttcaaggtttaccagcagcaggttgctaaaaacgccaaagcgatggtggaagtgttcctgaaccgtggataca

SEQ ID NO: 228615 - DNA, 840 bp, Unknown
  Bacterial polypeptide expressing nucleotide sequence isolated from the Sargasso Sea
aaatgtaaaaaagttggcaattgggcaagttgtatatacggctatgtgttatgaaaatggtactatgattgatgatggtactttgtttaaactaggtgatgctaacttcagatgggttggaggaagtgactattctggtgagtggttaagggagttaggtaaaaaattagatttaagggtatccgtcagatcttcatctgatcaattacataatatttctgttcaaggaccaaacagtagaaaggtattgtcgaaaattatgtggacaacacctgcaagtccagggattgaagatttaaagtggtttcattttaacatcagtcgtttaaatgaccatcttggtattcccgtaatgttatctcgaacaggctatacaggtgaacttggatacgaggtttactgtcatccaaaagatggtccaaaagtatgggatgcgatttgggaggcaggtcaggagtttgatatagttccaatgggatttgctgcattagatatgttaaggattgaagcgggtctgattcttggaggcaatgaatttagtgatgaaacagatccatttgaagcaggtatctcatttacagtgcctcttaaatcaaaagatgcaaattttattggtcgcgatgctcttgttaaaaggaaggagagccctttacgtaaactagtcggattggaaattgaaggtaatgaacattgtggtaatggagattgtgtacacataggaagaggacaggtgggggttatcactagtagcatgatttctccaactctaaataaaaatatagcattgtgcaggattgatatccattcatctgacgagggcacagaggttgaagttggtaa

SEQ ID NO: 228616 - DNA, 880 bp, Unknown
  Bacterial polypeptide expressing nucleotide sequence isolated from the Sargasso Sea
gatgaactatacattaacaaaaaatataaaaaaactttctataggacaaattgtttactctgcaatgtgttatgaaaatggaatgatgtttgatgatggaactttattaaaacttagtgataccggatatcgatggatatgtggagatgagtatggaggagaatggttaaaagagattgctaagaaaaaaaattataaagtaataattaaaaattcaacagatcaaataagtaatgtttctatacaaggccctaatagtagaaaaatattaaacaaaataatttatactcctccaactcaaccttctatagatgaacttcagtggtttagatttactatatgcagaatagataatttaaatggaattcctcttgttatatctagaactggttacacaggagaacttggttatgaaatatggtgtcatcataaggatgcttctaaagtttgggataaattaatggaatcaggaaaagatgaaggattaattcctgcaggatttgcggcactagataaacttagaatagaggctggtttaattttatttggaaatgaatttgatggtcaacaagatcccttcgaagcaggcataggatttgctgtgccattaaaaactaaagaagatgattttattggaaaaaaaattttaattgatagaaaggcaaatcctcaaaaaaaactagttggtcttgagctaatttcaaaagagcctgcagctcatggtgattgtgttcatataggtagatctcaagttggaatagtaacgagtggatgtttttcaacaattttaaataaaaatatttctttatgtagaatagatcaaaaatattcagaaataggaactgatgttgaggttggaaaaatcgatggccatcagaaa

SEQ ID NO: 228617 - DNA, 329 bp, Unknown
  Bacterial polypeptide expressing nucleotide sequence isolated from the Sargasso Sea
catggatttgctaaaaagtcctctttattcaaaatatgttgaatccaatgcaaaattagtggattttgcaggttgggaaatgcccatatcattttcaggattaattaaagagcatgaatcagttagatcttcagcaggattatttgatatttctcacatgggtgtgatttctatcaagggagtcaatccaaaggattatattcaaaaactttttcctactaatttatactccttttctgaaggtcagggactttatacagtaatgctcaatgataaaggaggaataatagatgacttaataatttatgaccttggtatacaagaaaatg

SEQ ID NO: 228618 - DNA, 643 bp, Unknown
  Bacterial polypeptide expressing nucleotide sequence isolated from the Sargasso Sea
tatggaaataaaaaaaacacctctgtttaaattacatacagcatacggcgctaagttcgtagagtttgctggctatcaaatgcccattcaatacaaaaatggtgtaattcaagaacataatattacaagaacaaaatcaggaatatttgatgtttctcatatgggtcaattgtttattaaaggaaaagaagaattaataaatgatttagaaaaaatattacccacagacctaaataaactttctatcaatcaatgcaaatattcttttttaatgaaggataatggaggaatatatgatgatttaattataactaaaattgaaaatggttttatgattatattaaatgctgcttgcaaagaaaatgatttaaaaatattaagctcagttttagaaaataaatatagtttaaatttaagggaagatttatctttagtggcaatacaaggtcctgagtccaaagacattctcgaaaaaataattaaaggtatttcaaatttaaaattcatgaatggaaataaatttaattataaatcaacaagtttatacataacgagatctggatatacaggagaggatggttttgaaatatctttaccaaacaatattgcagaggaatttgtaaaaaaattaattgaaaatggt

SEQ ID NO: 228619 - DNA, 970 bp, Unknown
  Bacterial polypeptide expressing nucleotide sequence isolated from the Sargasso Sea
taaaaaaaaggaatttacaaaatcatttgcatttagaatgaaagcagactcagaaactaaattaactaagaatacaggtttctacgaaagaacatctaaacttactagaaattttgtagatgcgagaggttattggttgccaaatgattatactaaacatggtgtaataaatgaatataccgcttgtcgagaaaaagctgtcgtaattgatttatcatctttaagaaaatttgaaattcttggccctgatgctgaagaattaatgaattacacattaactagaaatgtaaaaaaactatcagttggtcaagtagtttattcatcaatgtgctatgaaaatggaagtatgtttgacgatggaacattattaaaaatgagcgatcatggttttagatgggtttgtggtgatgaatatgctggagaatggctaaaagaacaagcgaagaaaaaaaattacaaagtgttaattaaaaattcaactgatcaaatcaataatatttcattgcaaggaccaaatagtaggaaaatacttgaaaaatttatttttactcctccaacacaaccttctatctctgagttggaatggtttagatttacaatttgcagagtaaaagaattaagtggaataccgttgatgatttctagaactggttatactggtgaattaggttatgaaatatggtgccacccttctgatgcgcctaaagtttgggacgaagttatggaagcgggtaaagatgaaggtttaattcctgcaggttttggagcactcgacctattaagaattgaagctggattaattttatttggaaatgaatttgatggacaagttgacccttttgaagctggtgtaggatttactgttcctttaaaaactaaaactgataattttattggtaaagaaaacttaattaaaagaaaagaaaatccacaaaaaaaattggttggtcttgaattaattagcaaagaa

SEQ ID NO: 228620 - DNA, 901 bp, Unknown
  Bacterial polypeptide expressing nucleotide sequence isolated from the Sargasso Sea
ggtgtgggtgaagaatataacgcatgcagagaaaaagctgtgttaattgatttaacatctttaagaaaatttgaaattattggaccagacgctgaagagttaatgaatttcacattaacaagaaatattaagaaactatcaattgggcaagttgtctattctgcaatgtgttatgaaaatgggatgatgttcgatgatggaactttattaagattaagtgaaactggttttagatggatatgtggagatgagtatgcaggtgaatggctaaaagaagtagcaaagaaaaaaaaatttaaagtaaatattaaaaattctacagaccaaattagtaatgtttcagttcaaggacctaaaagtagagaaattttaaaaaaattaattttcacaccaccaactcagccatcaatagatgagttagagtggtttaggtttactatttgtagagtagaagatcttcaaggaattccattgattatttcaagaacaggatacacaggtgaacttgggtatgaagtgtggtgtcatcctaaacatgcaccagaagtatgggataaacttatggaaagtggtaaaaatgaaggtcttattcctgcggggtttgcagctttagataaattgagaattgaagcaggtttaattttatttggtaacgaattcgacggtcaacaagatccttttgaagcaggaattggttttgctgttccacttaaaactaaagaggatgactttataggtaaaaatgttttaaaagaaagaaaagcaaatcctcaaaaaaaactagtaggtcttgaactcatcggtaaagagatagcaagtcacggagattgtgttcatgttggtaggtctcaggtaggtataattactagtggctgtttgtctacaaaactcaacaaaaata

SEQ ID NO: 228621 - DNA, 787 bp, Unknown
  Bacterial polypeptide expressing nucleotide sequence isolated from the Sargasso Sea
tgttcctggtagtaacgcggcctgcaaggcgcaggacctggctcacctgcaagcgcacatcggcagccgctgcgaggtgcagccgctgttcgaggagcgtgccctgctcgccctgcaaggcccggctgcggtcaaagtgctggaacgcctggctccagaagtggccggcatgatcttcatgcagttgcgccgggtaaagctgctggacgtggactgcttcgtcagccgctcgggctacaccggcgaagacggctacgagatctcggtaccggtcaacgctgccgacgccctggcccgccgcctgctggccgagccggaagtacagccgatcggcctgggcgcacgcgactcgctgcgcctggaagctggcttgtgcctgtatggccatgacatgaacaccgagactacgccgatcgaagccagcctgctgtgggcgatttccaaggtgcgccgtgccgagggtgcacgtgctgccggcttccctggtgccgaggcgatcttcgcccacgtgcgcgacggggtcgcgcgcaaacgcgtaggcttgttgcctcaggagcgtacgccagtacgcgaaggcgcggacattgtcgacgcaaacgataaaccggtgggtaaagtatgcagcggaggctttggtccgacactcgctgcacctgtcgcaatgggttatatcgatagtgaacatgctgcactcgacactgcactgtttgccgtggtgcgtggaaagaaggtggccttgaaagtcagcaaaatgcctttcgtgacaccacgttactaccgtggctga

SEQ ID NO: 228622 - DNA, 968 bp, Unknown
  Bacterial polypeptide expressing nucleotide sequence isolated from the Sargasso Sea
tttttacacctcttctacaggtcttaattccgtaatttctgatgaatcttacgctttacctggagattatgtaatgtttaaagcgttaaaagatttaacaatcggaaccacagcatgtcctagtgatattgatccttgcaattcatggaatccaactgatatctttgttagaacatatgacaaaaaaaaagaattttccaaatcgtttgcctttagaatgaaaacagactcagaaaaaaaactcactagaaattctggttttcacgatagaacttcaaaattaactcgaaactttattgatactaggggattttggttaccaaatgattacactaaacatggtttagttgaagaatatactgcgtgtcgagagaaggctgttttaattgatctttcatcattaagaaaattcgaaatcattggacccgatgctgaggaattaatgaattatacgctgacaagaaacataaaaaaactttcagttggtaaagttgtttactctgctatgtgttatgaaaatggaatgatgtttgatgatggtactttattaagattaagtgaaactggtttcagatggatatgtggtgatgaatattcaggagaatggttaaaagaaattgcaaaaaagaaaaattataaagtaagtataaaaaattctacagatcagataagtaatgtttccattcaaggaccaaaaagcagagaaatattaaaaaaaataatttttactccacctacccaaccttctattgatgaattagaatggtttagatttactgtttgtagagtcgaagaacttcaaggtattccattaattgtatcaagaacaggatatactggtgaacttggttatgaaatatggtgtcatccaaaacatgctcctgaagtttgggataaactaatggtagctggaaaagatgatggtctaataccagcaggatttgccgctttagataaattaagaattg

SEQ ID NO: 228623 - DNA, 448 bp, Unknown
  Bacterial polypeptide expressing nucleotide sequence isolated from the Sargasso Sea
atggaaacacaaagaacagctttatataattatcacaaaagccttggagcgaaatttgttccatttgctggttatgaaatgcctgtacaatattcttcaggaatagtagatgaacataaacttactaggagtagtgctggcatgttcgatgtctctcatatgggacaattgtcaatagaaggtaacgaagagttagcaatagaattagaaaaaattattccaacagatctaaagaaaataaaactcaatcaatcgaaatattctttccttactaatgaagaaggtggaatttatgatgatttaattgtaacaaaagttgaaaaaggttttaatattattctcaatgctgcatgcaaaaatagcgattttaaaataattagtagcctgctaaagaataaattcaaaataattttacataaaaatttatctctgattgcttgcaaggacc

SEQ ID NO: 228624 - DNA, 667 bp, Unknown
  Bacterial polypeptide expressing nucleotide sequence isolated from the Sargasso Sea
ttgatagcacttcaaggacccaaggcggttgaaattctagaaaaacttatacctggtgtagccaagttaaaatttatgactggagactattttaaatttgatgatgaaaacttatatattacaagatccggatatactggggaagatggcttcgaaatctctatacctaatttaaaagttgaaaaactaatcaaatttttaaatgaaaataaagttcatccagtaggtttgggtgccagagatactttgagacttgaggctggtttatgtttgtatggccatgatttgaatgaaaaaataaatcctattgaagctaatttaaaatgggccatagcaaagaggagaagagaagaaggcggctttaatggttgggaaaaaatcaaagacttaataaccaatggaagtgaaaaaaaaagagttggtattttgcctgaaggaaggattattgctagggaaaatactaaagttttttcagagacaggagatgagattggcttaatcacaagtggcacatttggtccgagtgtaaacgcgccagttgcaatgggttatgtaagtaaagattttgcagaagttggaacaaaaattcaattagaggttagaggcaagaaacatgggggtaaagtttctgaacttccattttttaagaaaagttatgttaaataat

SEQ ID NO: 228625 - DNA, 382 bp, Unknown
  Bacterial polypeptide expressing nucleotide sequence isolated from the Sargasso Sea
aatgcttgagaatgaaataaaatcatcaccaatagaagaaattcattctttaaatgatgctaaatttgtgaattttgccggctggtcaatgccgattcaattccctgatggaataataaatgaacatatttcaacacgatcctcttgtggcctttttgatatttcacatatgggacaaatacttataaacggtgatgaaagcagattattacttgaaaaaataacacctacagatattagcaaaattcaaactggaaaagttagatatagttttctcttaaataatgaaggtggaattattgatgacttaatgataacaaatgaaggagattgtttttatcttgttgttaacgcaagccgaataaatgaagatttagaagaa

SEQ ID NO: 228626 - DNA, 829 bp, Unknown
  Bacterial polypeptide expressing nucleotide sequence isolated from the Sargasso Sea
gacatgatggattcatctgggttttggattcctaataaatttaataattacggaactattaaagaatatacagaatgcagaaacaatgttgttatgatggatctttcttcattaagaaaatttgaggttgttggacctgatgcagaagagttacttaatgttgctcttacaagaaacattaaaaagttatccgttggtcaagtagtgtacacggcgatgtgttacgaaaatggtactatgattgatgatggaacactatacaaattaggagatcataattttcgatggatttgtggaagcgattattcaggtgaatggttaactgaattaagtgaagagtttaaacttcacgtaaatatcaaatcttctacagatcaccttcataatatttcagttcaaggaccaaatagcagaaaagtcttatctaaaataatatggacacctccagctcaccctgatgtcaataatttagaatggtttcattttacaattagtcgcattggtgaccacacaggaattccagttatgttatcaagaactggctatacaggagagcttggttatgaaatttattgccatcctgatgatgcagcaaatgtttgggatattgtttgggaagctggaaaagaatttaatattgcgccaatgggatttgaggcacttgatatgcttagaattgaagcgggattaattttaggtggtaatgaatttagtgatgagacagacccctttgaagccggaataagttttacagttcctttaaaatctaaggaacaaaattttattggtaaagaagcattgatagaaagaaaggcccatccgcatagaa

SEQ ID NO: 228627 - DNA, 988 bp, Unknown
  Bacterial polypeptide expressing nucleotide sequence isolated from the Sargasso Sea
aacatgggtttggttaatgagtacaatgcttgtagaaatgatgctgtattaattgatttatcatcactaagaaaatttgaaataattggtcctgacgctgaagaattaatgaacttcactcttacaagaaatataaaaaaactttctgttggacaagttgtgtattctgcaatgtgttacgaaaatggaatgatgttcgatgacggaactcttttaagattaagcgaaacgggttttagatggatatgtggagatgagtacgctggagaatggctaaaagagattgcaaaaaaaaagaattttaatgctattgttaaaaactctactgatcaaataagcaatgtatctttgcaaggtccaaaaagtagagaaattttaaaaaaaattatctttacaccgccaacacagccttccatagatgagttgggctggttcagatttacaatttgtagaattgaggaacttcaaggtattccattaattgtttctagaacaggttacactggggaattaggttatgaagtttggtgtcatccaaaaaatgcccctgaagtttgggataaattaatggaagcaggtaaagatgaaggattgataccagctgggtttgctgcattagataaactaagaattgaggcgggtttaattttatttggcgctgaatttgatggagagcaagatccttttgaagccggtataggttttgctgttccattgaaaacaaaagaagaagattttattggcaaagaggaattgatcaaaagaaaagctaaccctcaaaagaaattagtaggtctagaacttaatggaaaagaaatagcaggccatggagactgtgttcatattggaagatcacaagttggtatagttaccagtggatgcttatcctctactttgaataaaaatattgctctttgcagaatagatgttcaatactcagaaatcggtactgaagttgaaataggtaaaattgatgtcatcaaaaaag

SEQ ID NO: 228628 - DNA, 217 bp, Unknown
  Bacterial polypeptide expressing nucleotide sequence isolated from the Sargasso Sea
atgccccaaataaagcttgataagacaccgcttgaaatgttccataaagagcatggggcgacgatggttgagttcgccgggtacagtatgcctctgcaatatcaattaggcattaaaagggaacaccttcatacgcgatcaaaatctggtctttttgatgtctcgcacatgggacagattcgtcttaaaggtgaaggtgtcttgaaggatctcgaaa

SEQ ID NO: 228629 - DNA, 970 bp, Unknown
  Bacterial polypeptide expressing nucleotide sequence isolated from the Sargasso Sea
gtaatgagggttgtgagagatacagttggaagacatgatacttttaattacgcatgtacagcaaaatattatgaggatatgggatattttggacatataaattgttctacaaattttaataatgcgctaaaaaaatatgatgtaaaaccacgaaaaggctggatagcgattaatcttttttttaatacagccattgatgcaaacaatgttgcatcctttgatgagccttggtctagaccaggagattatgtgttatttagagcactgaaagatttaacatgtgcctcttcagcatgtccttgcgatatagatgctgcaaatggatggaatccaactgatatatttgttagaacttatgctaaagataaaaaaatttcaaaaggagttgcttttagagtgaatacagattcggaaccaaaacttactcgagaaactggctttcacgccaaaacatctaagttaactaaaaattttattaactacaatggatattggcttgcaaataattatacaagttatggtgcggtcaaagaatacacttcttgtagagagagtgcgattgctacagatttgtctccgctgagaaaatttgaaattttaggaccagatgctgaaaatttaatgcagtacacccttacacgtaacgtaaaaaaactctcttcaggacaagttgtgtactctgcaatgtgctacgaaaatgggtgtatgattgatgatggtacattaatgaaatttgggcaagataatttcagatggattggtgggcaagaatacggtggtgaatggttaaaagaacaagcaaaaaagaaaaattttaaagtttgggtaaaatcatcaacagatcaaattcataatattgcggttcagggaccaaatagtagaaaaattttggaaaaatttgtgtggacacctgatactcagccatcaattaaagatttagaatggtttagattgacaattggaagaattg

SEQ ID NO: 228630 - DNA, 874 bp, Unknown
  Bacterial polypeptide expressing nucleotide sequence isolated from the Sargasso Sea
aagaaattttatagatgcaagaggtttttggctgcctaacgattatactaaacatggtgtagttgaagaatataatgcatgtagagaaaatgctgtattgatagatctttcatcgctaagaaagtttgaaataattgggccagacgctgaagagcttatgaattacactttaacaaaaaacattaaaaaactctcagttggtcaagttgtttattcagcaatgtgttatgaaaacggaatgatgtttgatgatggcacattattaagattaagtgagactggtttcagatggatttgtggtgatgaatatgctggagaatggttaaaagaagtagtaaaaaagaaaaattataaagtaaatattaaaaattctacagaccaaatcagcaatgtttctattcaaggaccaaagagtagagaaatattaaaaaaattaatttttactccacctactcaaccttctattgacgaattagaatggtttagatttactatttgtagaatagaagagcttcaaggtattccattaattgtatctagaactggatatacaggcgaacttggatatgagttatggtgtcatccaaaacatgcacccgaagtatgggacaagcttatgaaagcaggaaaagataaaggtttgatacctgctggattcgcagctttggataaattaagaattgaggcaggtctaattttatttggtaatgagtttgacggccaacaagatccgtttgaagcaggtataggttttgctgttcctttaaaaactaaagaagaagatttcattggtaaagatattttaaaggaaagaaaatcaaacccacaaaaaaaacttgtaggattagaacttatcggtaaagaagcttctgga

SEQ ID NO: 228631 - DNA, 145 bp, Unknown
  Bacterial polypeptide expressing nucleotide sequence isolated from the Sargasso Sea
ctcgcctacgctgaacaagtccatcgccctggcgcgggtgccggcggccacgggggatcgtgccgaggtggaaatccgtggcaagtggtacccggtgcgagtggtccgccccggcttcgtgcgcaacggcaaaacccttatctga

SEQ ID NO: 228632 - DNA, 571 bp, Unknown
  Bacterial polypeptide expressing nucleotide sequence isolated from the Sargasso Sea
atgattaaaaaaacacctttatacaatttacatatccagcacggtgcaaaaatggttgagtttgcaggttatcaaatgcctattcaatataagagcggaataatccaagaacataaatttactagagaaaatgctggtatatttgatgtgtcacatatgggacaactatttataactggttcagatcagcttacagatgatcttgaaaaaatatttccagttaatttaaaaaatttaaagataaatcaaagtaaatattcttttttaatgaatgagcagggaggaatttacgacgatttaattattacaaaattaaaagatggttacttaattattctaaatgcagcatgtaaaaagcaagactttgaaatcataaaaacaaaattagatgacaaatatgaattaaatttagatgaaagcttatctttgattgcaatacaaggaccaaaagcaaaagatgtattaggaaaagcagtttcaaatataactaatcttaaattcatgaatggaggagaatttgaatatgataattcaatatatttacataacaagatctggttatactggtgag

SEQ ID NO: 228633 - DNA, 388 bp, Unknown
  Bacterial polypeptide expressing nucleotide sequence isolated from the Sargasso Sea
catggatttgcttaaaagtcctctacattcaaaatatgttcaatccaatgcaaaattagtgaattttgcaggttgggaaatgccaatatcattttcaggattactcaaagagcatgaatcggttagatcttcagcaggattgtttgatatttctcacatgggtgtaatttccatcaagggaatcaatccaaaggattatattcaaaaattttttcctacaaatttatactccttttctgaaggtcagggactttatacagtaatgctcaatgaaaaaggaggaataatagatgacttaataatttatgaccttggtatccaagaaaatgatataacagaagtattattaatagttaatgcaagtagatatgacatagactttcagtgg

SEQ ID NO: 228634 - DNA, 817 bp, Unknown
  Bacterial polypeptide expressing nucleotide sequence isolated from the Sargasso Sea
agtaaaaaaggggtttaatattatacttaatgcggcatgtaaaaataatgattataaaatttttaagtcagtattaaaaaataaatacaaattatttttacaagacaatttgtcattgctagctttacaaggaccaaaatcatcacaaattttagaaaatctattaaaaggagtctcttcactcaaatttatgaatggaaacagttttttatttgaagctactgatcttaataatagttttacttttaaaagccttaaatctatttatgttacaagatccggatatacgggcgaagatggttttgaaatttctataccaaataatgcagtagaagaatttgctagatcattaattaaattaggagcaaagccagctggcttaggtgcgcgtgatacattaagattagaagctggtttatgcctttatggtcatgatataaatgaaagtacaagtccaatcgaagcaaatcttaaatgggcaatatctaaaagaagaatagaagaaggtggattttcaggttatgaaaaaattaaatcggatatgaatggaagtttagctcgattaagggtaggcataaaacccgaaggaaaaattatagcaagagaaggggttaaggttttttccgatgataataatgaaattgggtccattacaagtggtacttttggtccaagcgtaaatagatccattgcaatgggttatgtaaaaataaatttttcaaaaccaggaacaaaggtctatttggaagttagaggaaagaaacatgaagctaagatatctgaacttccgttttataaaaaaagttatgtgaggtaa

SEQ ID NO: 228635 - DNA, 502 bp, Unknown
  Bacterial polypeptide expressing nucleotide sequence isolated from the Sargasso Sea
aatttgggatgcggtttggagtgctggtcaagaatttaatataacacccatgggatttgaagctttagatatgctaagaattgaggcaggattagttcttggtggaaatgaatttagtgatgaaactgatccttttgaagcaggtattggctttacagtacctttgaaaacaaaagaacaaaattttataggtaaagaagcattaattaaaagaaaagaacatccacaaaaaaaattagttggattagatatagaggggaacgaaaaagtaaatcatggagactgcgttcatagtggaagaggacaagttggtataattactagtggaactttctctccaacgctcaataaaaatattgctttatgcagactagatattcactcttcagaattaggaacaaaacttgaggttggaaaattagatggccatcaaaaaagaattccagctacagtagtacgctttcctttttatgatccagacaaatcaagagttagatcatag

SEQ ID NO: 228636 - DNA, 271 bp, Unknown
  Bacterial polypeptide expressing nucleotide sequence isolated from the Sargasso Sea
atgactaatatatataaatccacagaaaatcttctcaagacttctttgcactcttggcataatgttcacggagggaaaatgataaattttggaggatgggaaatgccattgcattatgagacaggaattttaaaagaacatttggtaacacggcgctatggtggattgtttgatgtaagccacatgggacggtttcacattaagggaaatgacaaaactgcttatttgcagtatgtgttgagtagtaatgtggcgtctcttcaaccatgag

SEQ ID NO: 228637 - DNA, 390 bp, Unknown
  Bacterial polypeptide expressing nucleotide sequence isolated from the Sargasso Sea
catgacttctcctgaactccttagaacgcccctccatgcctggcattgtgaaaacggggggaagatggttcctttcggcggttgggacatgccggtccaatatgcagatggaatcctctcagaacatttggccacccgtcggtgtggaggcctgttcgatgtcagccatatggggcgtttcagagtggaaggtggggatacaatggcatttctgcagcgggtgctgacgaatgatgcctccctcttggaaccatggcaggcccaatacaccttgattgccaacgaaaacggaggagtgatcgatgatgcctatctttatcacccggaaggagaattcctgatcgtcgtcaacgcttccaaccgcaaaaaggactgggaacattttcagga

SEQ ID NO: 228638 - DNA, 598 bp, Unknown
  Bacterial polypeptide expressing nucleotide sequence isolated from the Sargasso Sea
atggaaattaaaaaaacatctttaaataaattacatcaagataatcaagctaaatttgttgaatttgctggctatgagatgccaattcaatatagcaaaggtgttattgaagagcataaatttacgagagcacatgcaggaatttttgatgtttcacatatgggtcaattatttgtttatggaaatgaaaacctaacatctgatcttgaaaaaatttttcctttagatttaaaaaatctgcaacaaaattgttctaagtatagttttcttatgaatgaagaggccggtgtttatgatgaccttataattaccaaactaaaagatggatatttaattattttaaatgctgcatgcaaagaaaaagattttgaaattttaagcactaaattgtctaaaaaatataaaatggaactcaatactgatagagcgttggttgcaatacaaggtccaaaatcagtagatattttaaatgaaattataaatggagttaaagacttaactttcatgactggtaattggtttgaatttaatgatcaaaaggtattcgttactagatctggatacacaggagaagatggtttgaagttcgatcataaat

SEQ ID NO: 228639 - DNA, 363 bp, Unknown
  Bacterial polypeptide expressing nucleotide sequence isolated from the Sargasso Sea
attgattttaaacagcaaagagtatttgttacaagatctgggtataccggtgaagatggatttgagatatcaataataaataatttagctgaagaatttactcaaaaattaatagataaaggagcacaacttataggtcttggggcaagagataccttgagactagaagcaggattatgtttatatggtcatgaattagatattaataaaactccagttgaagcaaacctaaaatgggcaatatcaaaagaaagattatcaaatggggggtttattggatctaaaaaaattattaaccaaattcaaggcggaacaagtcaaataagagttggtattaaaccagaaggcagattaattgcgaga

SEQ ID NO: 228640 - DNA, 787 bp, Unknown
  Bacterial polypeptide expressing nucleotide sequence isolated from the Sargasso Sea
tttttgttgttttaatgccgcctgcaaagactcagatatagtgcatttaagaacccttttagagccagatatttcaattgaggaaatagaaaaccgggcactaatcgctttacaagggccagcttctgaagctgttctaggcgaattcaactcgcagattgcggctatgaaattcatggatgtagaaaccctttctattgccggagctgaatgctggatatcgagatctggatatactggagaagacggtttcgaaatatcgataccttccagcgctgccgagttagtaacaagaagtattttatcaaaagatgaagtcgaatttattggtttaggagctcgtgacagtcttcgattggaagcaggattatgcctttatggccatgatatagatgaggccaccacaccagtggaagcgtctttgacgtgggcaattcaaaaagccagaagagcccatggagaaagagccggcggctttatgggtagtgagattatctcccagcaacttgaagagggaactgataaaaaaagagtggggtttctgccacaaacccgagcaccgatgcgggaaggtgtggaaatatttgcaacagaaacttcaaagaacgttattggaaaaataacctcaggtgggttcggcccaactgtcgggtatcctattgcaatgggatacattgctagcgaatttgcaaatagcgaagatgatttatttggcgaactccgaggcaaacgggtaccagtaaaagttgcaaaaattccttttgtcccattaaattttaaacgttaa

SEQ ID NO: 228641 - DNA, 880 bp, Unknown
  Bacterial polypeptide expressing nucleotide sequence isolated from the Sargasso Sea
aaagatttaacaattggaacaacagcttgtcctagcgatattgatgcatgtaattcgtggaatcctactgatatttttgttagaacttatgataaaaataaagaattcagtaaatcatttgcgtttcgaatgaaaacagactcagaaaaaaaattaactagaaattccggattttacgaaagaacttcaaagcttactagaaactttgttgatgcaagaggtttttggttaccgaatgattatactaaacatggtttagttaatgaatacaatgcttgcagaaaagacgctgtgttaattgatttatcttcattaagaaaatttgaaataataggtcctgatgcagaagagttaatgaactacacacttacaagaaatataaaaaaactttctgtaggtcaggtggtttattcagctatgtgttatgaaaatggaatgatgtttgatgatggaactctcctaagattaagcgaaacaggttttagatggatttgtggtgatgaatatgctggagaatggttaaaagaaattgctaagaaaaaaaatttcaatgccaatgttaaaaattcaacagatcaaataagtaacgtttctttacagggaccgaaaagtagagaaattttaaaaaaaattatttttacaccacctactcaaccatcgatcgatgaattaggatggtttaggttcaccatttgcagaatagaagaactacagggaattcctctaattatttcaagaactggttacaccggagaacttggttatgaaatatggtgtcatccaaaacatgctcctaaagtttgggataaattaatggaagcaggaaaggatgatggtttaattcctgctggttttgctgctcttgataaacttagaatag

SEQ ID NO: 228642 - DNA, 940 bp, Unknown
  Bacterial polypeptide expressing nucleotide sequence isolated from the Sargasso Sea
gactctgaaaaaaaacttactagaatttctggtttttataaaaagacctcaaaattaacaagaaactttattgatgctagaggtttttggttaccaaatgattatactaaacatggagtagtggaagaatatagtgcttgtagagagaaagctgtacttattgatttatcctctttgagaaaatttgaagttattggacctgacgcagaggaattaatgaattacacacttaccaggaacattaagaaactctcagtcggtcaaatagtttattccgcaatgtgttatgaaaatggaatgatgtttgatgatggtactctttttagattaagtgaaactggttttagatggatttgtggtgatgagtacgctggacagtggttaagagatatagcaaggaaaaaaaattataaagtcaatattaaagattctactgatcaaattagcaatgtttctattcaaggtccagaaagtagaaaaattttagaaaaattaatttttactccacccactcaaccctctattgcagaattagagtggtttagatttacaatttgtagaattgaaagccttcaaggtattcctcttattgtttcaagaacaggttatactggtgaacttggttatgaggtatggtgtcatccaaaacatgctccagaagtatgggataaactgatggaggctggaaagaaagaaggtttaattcctgccggatttgctgcgttagataaattaagaattgaagctgggctaattttatttggtaatgaatttgatggccagcaagacccttttgaggctgggataggttttgcagttcctcttaaaacaaaaaaagataattttattggaaaaaaaattttagtagaaagaaagttaaatccacaaaagaagcttgttggtcttgagcttataggtaaagaagcctctgggcatggag

SEQ ID NO: 228643 - DNA, 259 bp, Unknown
  Bacterial polypeptide expressing nucleotide sequence isolated from the Sargasso Sea
atgacttctcatgaactcctaaaaaccccacttcatgcctggcattgtgaaaacggggggaagatggttcctttcggcggttgggacatgccggtccaatatgcagatggaatcctctcagaacatctggccacccgtaggtgtggaggcctgttcgatgtcagccatatggggcgtttcagagtggaaggtcgggatacaatggcatttctgctacgggtgctgacgaatgatgcctccctctggaaccaggcaggcc

SEQ ID NO: 228644 - DNA, 573 bp, Unknown
  Bacterial polypeptide expressing nucleotide sequence isolated from the Sargasso Sea
tttcaagatcaggctacacaggcgaagatggttttgaaatatcaatgaaagatgaactaaccgaagaatttgcaactgatttacttaaaggcgatgatgttaagttggctggtctaggtgcaagagactctcttcgcttggaaggatctctctgtctttatggtcaggatatcaaggaagacatttccccagtcgaagcgggattaacttgggcaattcaaaaatctcgacgggaagatggcgagaggggtagaaattttcctggagctgctgttatatatgatcaaatcagaaatggagtggagaaagttagaattgggctgattcctgaaggtagagctccagttcgaggtggagttaaactttttaaagaacaagagggaacaagcttaataggagaagttacttcaggaggctattcaccgtccttaggtcatccaatatcaatgggctatctctttagtaaaactaggaacgattttggagacacaatttttgcagaagtaagaggcaaattattgccaataagtgtagttgacataccttttgtgccaaataggtttaaaagataac

SEQ ID NO: 228645 - DNA, 820 bp, Unknown
  Bacterial polypeptide expressing nucleotide sequence isolated from the Sargasso Sea
aaatttgaaatcttgggtcctgattctgaagaactaatgaattatacgctaacaaggaatgttaaaaaactttcagttggacaagttgtttattcatctatgtgttatgaaaatggaacaatgtttgatgatggtacattgttaaaaatgagtgatcacggctttagatggatatgtggagatgaatatgctggtgaatggctaaaggaacaagcaaagaaaaaaaactataaagtttttataaaaaattcaacagatcaaattaataatatttcacttcaagggcctaatagtaggaagatacttgaaaaatttatttttacacctccaactcaaccttctatttctgaactccaatggtttagatttaccatttgtagagttaaagatttaaaaggaatacctttaatagtctcaagaacaggttacacgggagaattaggttatgaaatttggtgccatccattagatgctcctaaagtttgggatcaagtaatggaatcaggaaaagacgaaggattaattcctgctggttttggtgccttagatttattaaggattgaagctggattaatactttttggaaatgaatttgacggacaggttgatccttttgaggcaggtgttggttttacagttcctcttaaaactaaaactgaagattttattggaaaagaaagtttgattaaaagaaaagaaaacccacaaaaaaaattggtaggattagagctaattggaaaagaaaaagctaatcatggtgattgtgtacatttggaaagatcccaaattgggataattactagtggttgtatatctccaa

SEQ ID NO: 228646 - DNA, 880 bp, Unknown
  Bacterial polypeptide expressing nucleotide sequence isolated from the Sargasso Sea
aaaaaattatctattaatcaaagtaaatattcttttttaatgaaagaaaatggtgggatttatgatgatttaattataacaaaaatagaagatggttatatggttattctaaatgctgcatgtaaagaaaatgatttgtcaattataaaatccaaactggatagtaaatttgaattaattttaagagatgatttatctttagttgcgattcaaggacctgagtcaaaagatattttagaaaaaataattccgggtgttaaaaaaataaaatttatgaatggaaataaatttagctttaactcagtagatatttatataaccagatcaggatatacaggagaagatggctttgaaatatcaataaagaataacttagtaaacaaattagtggaaaagatgattgagcttggttcaaatctaataggattaggtgctcgcgacactttaagactcgaagcaggactttgcttatatggtcacgatattaatgaagagactagtccgattgaagcaaatttaaaatgggcaatttctaaaaatagaattaatgatgaatttactggagctaaagaaataaaaagacaatttgatgaaggtgtaaaaaaattgagggttggaattaaacctgatagcagagttatagctagagaatctacaaaaatatttgatgaaaaaaataatcaaataggaaaaataacaagtggaacatttggaccaagtgtaaatggtcctatagcaatgggttatgtttcaaatttattttcaaaatcaaatacaagagtatttttagaagttagagggaaaaaaatacctgccagtatatgtgatttgccgttttataaaaaaaactatgtgaaaggagaaattaatgtcagaagtt

SEQ ID NO: 228647 - DNA, 664 bp, Unknown
  Bacterial polypeptide expressing nucleotide sequence isolated from the Sargasso Sea
tgcatttagaatgaaaacagactctgaaaaaaaattaacaaagaattcaggtttctacgaaagaacttctaaattaactagaaattttattgatgctagaggtttttggctgcccaacgattatacaaaacatggtttagtaaacgaatacaatgcttgtagagataaagctgttttaattgatttatcttctttaagaaaatttgaaattttaggtcctgatgcagaagaattaatgaactatactttaacaagaaatgttaaaaaattgtcagttggacaagttgcttattccgctatgtgctatgaaaacggtcaaatgtttgatgatggtacaatttttaaacttagcgaccatggatttagatggatttgtggagatgaatatagtggagagtggttaaaagaaatagcaaagaaaaaaaattataaagttgttatcaaaaattctacagatcaaattagcaatgtttcaatacaaggtccaaatagtagaaagattttaaataaaataatttttactccaccaactcaaccatctattgatgagcttcagtggtttagatttacaatatgtagagtcgaagacttgcagggaattcctctagtaatttcaagaactggttatactggagaattaggatatgaaatttggtgccatcct

SEQ ID NO: 228648 - DNA, 755 bp, Unknown
  Bacterial polypeptide expressing nucleotide sequence isolated from the Sargasso Sea
ttgtaaacaaaatgatcttcaaattataaaaaataaattaaatgatcaaagtttagatataaacaatgatttgtcccttgtagcaattcaaggtccagagtccaaaacaatacttgaaaatgtagtttcaaatgtatcaaaattaaaattcatgaatggtgacaactttacttttaaaaacaaagaaatatatattacaagatctggatatacaggtgaagatggctttgaaatatcattgcctaataaagttgcaatctcttttgtagaagaattaatttctaaagggtcaactttaattggattgggtgcgagagatactttgagattagaggcaggtttgtgcttgtatggtcatgacattaatgaaaatactagccctgttgaagcaaatttaaaatgggcaatttcaaaaaatagaatgaatgataactttacggggtctcaaaaaataaagaaacaaatagaagaaggtgtttcaaaattaagagttggtattaaaccagaaacaagagtgattgcgagagagtcaacaaaaatttttgatgaaaaaaacaatgaaattggaaaagttactagcggtacatttggaccaagtgttaatgcatcaattgcgatgggttatatttcaaattctcattctaaaacagacacaaaggtttacttggaagtaagaggaaaaaaagttcctgctaatgtttgtgatttgccattttataaaaaaagttatgtgaaaggagaagctaatgtctaat

SEQ ID NO: 228649 - DNA, 368 bp, Unknown
  Bacterial polypeptide expressing nucleotide sequence isolated from the Sargasso Sea
tatgggtgtacaaaaaacagctttatacgatttgcacaaaagtttgggagctaaatttgttccatttgcaggttatgaaatgcctattcaatacaaggatggtatagttaaagaacatatttctacaagaacacatgctggtttttttgacgtctcacacatggggcaattttttgtagagggagacgaaacattgattgaagcattagaaaaaattattccttcagatttaaaatcattaaaagttaatcactcaaaatattcttttttattaaatgataacggtggaattatagatgatttaattgttacaaaaacaaataaaggtttctgtataattttaaatgcagcttgtaaggaaaacgata

SEQ ID NO: 228650 - DNA, 722 bp, Unknown
  Bacterial polypeptide expressing nucleotide sequence isolated from the Sargasso Sea
aatagcaaaatgtttagactcagaaagtaaatatgaattaagaaaagatctttctcttattgctcttcagggtccaaaatcagagtctattttagattttattgttaacggcgtaaaacaactcaagtttatgaatggtaattactttgaatttcaaggaaagaaaatttatgtaactagatctggctataccggagaggatggttttgaaatttcagtgccaaatacaaatgctgaaaattttacaaaacttctttcaaacaaaggtgcaaaaccaataggtcttggagctagagatacactcagattagaggctggtctatgtttatacggtcatgaactaaatcaagatatcaaccctattcaggcaaatttaaaatgggctatctctaaaagaaggagagaagaaggtgggttcaaaggttgggagagtataaaaaatgatttacaaaacggagtttcaaaaattagagttggtattaaaccgtctggacggattattgccagagaaggtacaaaaatattttcatcttctggtgaggaaataggtgttattactagtggaacatttggtccaagcgttaacagccctgttgcgatggggtatatcaaaagtaaattttctgaaatcaataacaaaattcttttagaagtaagaggaaaaaaacacgatgcagtggtttcaaaactaccattttataaaaaaagttatgttaaatgag

SEQ ID NO: 228651 - DNA, 616 bp, Unknown
  Bacterial polypeptide expressing nucleotide sequence isolated from the Sargasso Sea
actgggagtttctaatttaaaatttatgaccggaaacaactttaattttgataatgaaaatttatatataacaagatcaggttacacaggagaagatggttttgaaatttctatctcaaataaaaaagtagaaaaactaattaattttttaatttcaaatggagtcaaaccaataggtttaggtgccagagatacattaagattagaggcaggtctttgtttgtatgggcatgatttaaatgaaaaaattaatcctatagaggcaaatttaaaatgggctattgcaaaaaaaagaaaagatgtaggtggttttaatggatgggataagataaaaaatttattaactaacggaagtgaaaaaataagagttggtattaagcccgaaggcaaagtaatagctagggaaaatacgaaaatattttcaactgacgaaaaagaaataggtcttgtcactagcggaacttttggtccaagcgtaaaagcacctgttgcaatgggatatgttaagtcaaattttgctaaagttgggacatcaataaaactagaagtaagaggaaaaaaatacgaaggtaaagtctcagagcttccattttataaaaaaagttatgttaaataa

SEQ ID NO: 228652 - DNA, 928 bp, Unknown
  Bacterial polypeptide expressing nucleotide sequence isolated from the Sargasso Sea
actgggcttctacgaaaagacttctaagcttactagaaactttgtctatgctagaggtttttggttaccaaatgattatacgaaacatggtgtgattaatgaatacacagcatgtcgagaaaaatctgttgtaattgatttatcctctttaagaaaatttgaaatattaggacctgatgcagaagagttaatgaattatactttaacaagaaatgtaaaaaaactttcagttggtcaggtggtttattcttcgatgtgttatgaaaatggactcatgtttgatgatggaacattgttaaaattgagtgatcatggttttagatgggtatgtggagatgagtatgctggagaatggctaaaagaacaggcaaaaaagaaaaattataaagttttaataaaaaactcaacagatcagataaataatctctccttgcagggaccaaatagtagaaaaattctcgaaaagtttatttttacgccaccaactcaaccaactatttctgaattacaatggtttagatttaccatctgtagaattgaagatttgaatggtattcctctaattgtttcaagaacaggttatactggtgagttaggttacgaaatttggtgtcatccatctgatgctcctaaagtatgggataaagttatggaagccggaaaagatgagggcattatacctgctggatttggtgcattagacttactaagaattgaagcaggattaatattatttggaaatgagtttgatgggcaagttgatccttttgaagctggtgttggttttacagttccgttaaaaactaaaacagatgattttattggtaaagaaagtttaattaaaagaaaagaaaatcctcagaaaaaattagtaggccttgaacttactggaaaagaaaagcaaatcacggtgattgtgttcatatag

SEQ ID NO: 228653 - DNA, 526 bp, Unknown
  Bacterial polypeptide expressing nucleotide sequence isolated from the Sargasso Sea
tttgaaatttcaatttctaacgataaagctgaaaatttcgttgaaaatttaatagaaaagggagcacaacttataggacttggggcaagagataccttgagattagaagctggattatgtttatatggtcacgaattagatattaataaaacaccagttgaggcaaaccttagatgggcaatctcaaaatctagattatcaaacggggattttattggatcgaaaaaaattatgaaccaaatgcaagatggagcaagccaaataagagtagggattaaacccgaaggtagattgattgctagagaaaaaactaaaatatttgatgatacagatacacaaatcggcgagataactagtggtacgtttggaccaagtgtaaatggtcctattgcgatgggttatgttaataaagatttttcaaaagttgatactaaaattttgcttgaggtaagaggaaaaaaacatccagcaaatgtttgcgcattaccattttataaaaaaaattatgtgaaaggagtaaattaat

SEQ ID NO: 228654 - DNA, 874 bp, Unknown
  Bacterial polypeptide expressing nucleotide sequence isolated from the Sargasso Sea
atgtaattcatggaatcctactgatatatttgttagaacttatgacggaaaaaaagaatttaaaagatcgtttgcgtttagaatgaaaacagactcagaaaaaaaacttactaaacattcaggcttctatgaaagaacatcaaaacttactaggaactttgtagatgctagaggattttggttaccaaacgactatacaaaaaatggattagtaaatgaatataatgcctgtagagaaaaagcagttttaattgatctatcggctttaagaaaatttgaaattttaggtcctgatgctgaagaactaatgaactacactttaacaagaaatgtaaaaaaactttctataggacaagttgtttactctgcaatgtgttatgaaaacggaatgatgtttgatgatggaactttattaaaacttagtgatactggatacagatggatttgtggcgatgagtatggtggagagtggcttaaagaggttgcgaagaaaaaaaattttaaagtaataattaaaaattccacagatcaaataagcaatgtttcaattcaaggtcctaatagtagaaaaatattaaataaaataatatttactcctccaacacagccaactatagatgaactccaatggtttagatttacaatatgtcgaatggatgatttaaatggaatccctttggtaatatcaagaacaggttatacaggagaactaggatatgaagtttggtgccatcctaaagatgctcctaaagtttgggataaattaatggatgctggaaaaaacgatggattaattccagccggttttgctgcacttgataaactccgaatagaagctggtttaattttatttggaaatgaatttgatggacaa

SEQ ID NO: 228655 - DNA, 331 bp, Unknown
  Bacterial polypeptide expressing nucleotide sequence isolated from the Sargasso Sea
atgacttctcctgaactcttaaaaacccccctccatgcctggcattgtgaaaacgggggaaagatggttcctttcggcggttgggacatgccggtccaatatgcagatggaatcctctcggaacatttggctacccgtcggtgtggaggcctgttcgatgtcagccatatggggcgtttcagagtggaaggtcgggatacaatggcatttcttcagcgggtgctgacgaacgatgcctccctgctggaaccgtggcaggcccaatacaccttgattgccaacgaaaacggagaggtgatcgatgatgcctacctttatcacccggaagcag

SEQ ID NO: 228656 - DNA, 715 bp, Unknown
  Bacterial polypeptide expressing nucleotide sequence isolated from the Sargasso Sea
atggatttgctaaaaagtcctctttattcaaaatatgttgaatccaatgcaaaattagtggattttgcaggttgggaaatgcccatatcattttcaggattaattaaagagcatgaatcagttagatcttcagcaggattatttgatatttctcacatgggtgtgatttctatcaaaggaatcaatccaaaagattatattcaaaaactttttcctactaatttatactccttttctgcaggacagggactttatacagtaatgctcaatgataaaggaggaataatagatgacttaataatttatgaccttggtatacaagaaaatgacatatcagaattattgttaatagttaatgcaagtagatatgaagaagattttcagtggataaaaaataatttaaatatgtctgaaatttcgataacaaactttaaaaaagataaagtacttttagcactacagggaaaaaactcattcaatttatttgaagaatggattgaatcttcgatctcacatatccctaactttggatgcgaatataaaatttttgaacatatttcgcctaaagaaaaaattttcttttcaaagactggctatacaggggaaaatggcctagaaatacttttatctaaaaaagcagcaactaatttatgggatttctcaatttccaaaaatgttgcaccttgtggtttaggagcccagagatactcttaga

SEQ ID NO: 228657 - DNA, 637 bp, Unknown
  Bacterial polypeptide expressing nucleotide sequence isolated from the Sargasso Sea
atggaaacaaaaaaaacatcgctttaccaattacatcaagattgtaaagcaaagtttgttgaatttgcaggttatcagatgccaatccaatattctgaaggtattgtagaggagcataaattcacaagaaatcactctggtatttttgatgtttcacatatgggtcaattatttatttatggtggtgaagaattaattaaagatttagaaaaaatttttccattagatttgaaaaatttgaaattaaatcactctaagtacagctttttaatggataaagatgctgggatacaagatgatttaatcataacaaaaattgatgaaggttttttaataattcttaatgcagcctgtaaagacaatgattttaaaatcttaaaagaacttttaaaagaaaagtacaaaatggttttggatgaaagtagatctttaatagcaattcagggacctaaatcatcgcaaatcttaaatgatgtcattgatggagtaaaagatttaaattttatgtctggaaactggttcttatttgataatcaaaaagtatacattactcgatcggggtacacaggtgaagatggtttcgagatatcaattcaaaataactttgcagaaaaattgactagagaattaattgata

SEQ ID NO: 228658 - DNA, 862 bp, Unknown
  Bacterial polypeptide expressing nucleotide sequence isolated from the Sargasso Sea
ttcaaaattaactagaaactttgttgatgctagagggttttggcttccaaacgattacaccaaacatggtttggttaatgagtacaatgcttgcagaaatgatgctgtattaattgatctatcatcactaagaaaatttgaaataattggtcctgatgctgaagagttaatgaactacactcttacaagaaatattaaaaaactttctgttgggcaggttgtgtattctgcaatgtgttacgaaaatggaatgatgtttgatgacggaactcttttaagattaagtgaaacaggttttagatggatatgcggagatgagtatggtggagaatggctaaaagaaattgcaaagaaaaagaattttaatgctattgttaaaaactctactgatcaaataagtaatgtgtctttgcaaggtccaaaaagtagagaaattttaaaaaaaattatctttacaccaccaacacagccctcgatagatgagttgggatggttcagatttacaatttgtagaatagaagaacttcaaggtattccattaattgtttctagaacaggttatactggtgaattaggttatgaagtttggtgtcatccaaaacatgctcccgaagtttgggataaattaatggaagcaggtaaagatgatggattaataccagcagggtttgctgctttagacaaactaagaattgaggcgggtttaattttatttggcgctgagtttgatggagagcaagatccttttgaagctggtattggttttgccgttccactaaaaacaaaagaagaaaattttattggtaaagaggaattaactaaaagaaaagctaaccctcaaaagaaattggtaggactagaa

SEQ ID NO: 228659 - DNA, 784 bp, Unknown
  Bacterial polypeptide expressing nucleotide sequence isolated from the Sargasso Sea
aagcttacaagaaattttatcgatgccagaggtttttggctacctaatgattatactaagcacggagttgttgaagagtacaacgcttgtagagaaaaagcagttttaattgacttatcttctttaagaaaatttgaaattataggtcctgatgctgaagaattaatgaactatacacttacaagaaatattaaaaaacttgctgttggtcaggttgtttattctgcaatgtgttatgaaaatggaatgatgtttgatgatgggacattattgagactaagtgaaactggttttagatggatttgtggggatgagtatggtggtgagtggcttaaagaaatagctaaaaagaaaaactttaaggtcaatgtaaaaaattcaacagatcaaatcagtaatgtatcaatacaaggtccaaagagtagagaaatattaaaaaaactgatttttactccaccaacacaaccgactatcgaagaattagaatggttcagatttactatttgtagagttgagaaccttcagggtattccattaattgtttcaagaactgggtatactggtgaacttggttatgaagtatggtgccatccaaaacatgcctctaatgtttgggataaacttatggaagctggaaaagatgagggtttaatacctgctggatttgcagccttagataaacttaggattgaagctggtttaattttatttggaaatgaatttgatggacaacaagatccttttgaggctggaataggctttgctgttccattaaaaactaaag

SEQ ID NO: 228660 - DNA, 634 bp, Unknown
  Bacterial polypeptide expressing nucleotide sequence isolated from the Sargasso Sea
tttagaaaaatttctaatcacaatattaattcattaaaattttatcatttttgttatgtatcaataaacggaatagacttgatgatatcaaggactgggtatactggtgagcttggatatgagctatatgttaaatctgataaattagtcgagttgtggaaatatataataaatgaagggaaaaatttgggtattgaaccagtcggattaggttgcagagatacgctgagaatggagatgaattatctcctatatggatcagatattaatgaaaaaacaaatccgattgaagcaggtttaaaatggataactaaatttgaggaaaaagagtttattggtaaaaataatctcaaaaagctttataaaacccccttcaaaaaacttatttgtattgagatgaaagagagagctataccaagaaatggaaatagtatctactataataatgatttaattggtgaagttacaagcggtactatgagcccgtctttgaaaaaaggtatatgtttggggtacatatattcaaaacaatctcaaattggcactaatcttctaatagatattcgtggtaagaagaaaaaagggtgtattgttgatccgccgttttacaagaatggatctttaatgaattaag

SEQ ID NO: 228661 - DNA, 637 bp, Unknown
  Bacterial polypeptide expressing nucleotide sequence isolated from the Sargasso Sea
atgataataaaaaaaacatctttaaataacttacatcagaaatatcgagctaaacttgtagagtttgctggttatgaaatgccaattcaatacaaagatgggatagtacaagagcataaatttactagatccaattcaggagtttttgatgtttcacatatgggtcaattatttgtatctggccatgaagacttagctcatgatttagaaaaaatttttccagctaatttgcaaagtttaaatttaaatcaaagcaagtattcttttcttatgaatgataatggaggaatacaggatgatttaattataactaaaacaaaagacggctttctaataatattaaatgcagcatgtaaattgaatgattatgaaataattaaatctaaacttaaaaataaatataaaattaaattagatgaaacactttctttggttgctattcaagggccagatgcaaaaaatattttagataaaattataccaggttgtaatgatttaaaatttatgaatggtaataattataattttgaaggttcaaatatttatataactagatcgggttatacaggtgaagatggttttgaaatatctatcaaaaatgaaaaagcagaaaattttgttgaaaaacttattgaaa

SEQ ID NO: 228662 - DNA, 862 bp, Unknown
  Bacterial polypeptide expressing nucleotide sequence isolated from the Sargasso Sea
tatgggacaattatttattacaggcagcgatgatttaattaatgagttagaaaaaatattcccaactgatttaaaaaatttatcaattaataagagcaaatattcatttttgatgaacgacaatgctggaatacatgatgatttaataataaccaaagtaaaaaatggttttatgatcattttgaatgctgcttgtaaagaaaatgatcttaaaattatagagaaaaaactcgataaaaaattcgatttaaaaattagagaagatctatccttagttgctttacaaggaccagaagctaaaaatgttttagaaaaaatcattccacaaacaaacaatttaaaatttatgcatggaaatagttttacttttaaggatataagtatttatataacaagatcaggatatactggagaagatggttttgaaatctctatagacaattctaaagttgaaagtttagtagagattttattgaacagtggatcaaaattaattggccttggagctcgagatactcttagattagaagcaggcttatgcttatatgggcatgatttaaatgaaaaaatcagtccgatagaagcaaatttaaaatgggcgatacctaaaagtagaattaattccatttttccaggttctaatattataaaaaaacaaatagacgaaggagtagaaaaaattagagttgggattaaaccagcaactaaagtgatcgctagggaaaaaacaaaaatatttgatcaaaatgataaattaattggaaatgttacaagtggaacatttggacctagtgtgcagggccctatttgcatggggtatgtttcaaatgaccactcttcattaaatacaaagtttatttag

SEQ ID NO: 228663 - DNA, 490 bp, Unknown
  Bacterial polypeptide expressing nucleotide sequence isolated from the Sargasso Sea
gttgaaaaatttattgattttcttattaagcataatgttaaaccaataggtttaggcgcgagagacacgttgagattagaagcaggcttatgcttatatggccatgatttaaatgaaaaaattaatccaatcgaagcaaatttaaagtgggcaattgcaaaaaatagaaaagagactggaggttttaatggatgggaaaagattaaaaaacttctagagaacggatgcgagaaaacaagagttggaattaaaccagacggaaaaataattgctagagaaaatacaaaaattttttcaatagatgataaggagataggatttatcacaagcggaacttttggtccaagtgttaacgcaccagttgcaatgggatatttaaattccgattttacagctgttggaactaaaattcagctcgaagtaagagggaaaaaatatgggggtaaagttactgaacttccgttttataaaaaaagttatgttaaataaa

SEQ ID NO: 228664 - DNA, 807 bp, Unknown
  Bacterial polypeptide expressing nucleotide sequence isolated from the Sargasso Sea
tcagaaaataaactcacaagaaataccggtttttatgagagaacatcaaaattaactagaaactttgtagatgctagaggtttttggttaccaaatgattatacaaaacatggcgtaattaatgaatacaatgcatgtagagaagacgctgtcttaattgatttatcttcgttaagaaaatttgaaattcttggtccagatgctgaagaattaatgaattatacattaactcggaatgtaaaaaaactttcagttggtcaaattgtttactcagcaatgtgttatgaaaatggaaccatgtttgatgatggtacgttattaaaacttagtgaccatggttttagatgggtttgtggtgatgaatatgggggtgaatggctaaaagaacaagcgaagaaaaaaaattataaagctcatatcaaaaattctactgaccaaataaataatttatctttacaaggtcccaaaagtagaaaaattctagaaaaaataatttttaccccacctacccaaccttccatatctgaattggaatggtttagatttacaatttgtcgattggaggaattaaacggaataccattaattgtttcaagaacaggttatacgggtgaacttggttttgaaatttggtgtcatccaagtgatgctcctacagtttgggataaagtaatggaagcaggaaaagatgaaggtctgataccagctggttttgcggctttggatcttttaagaattgaagctggtttaattttatttggtaatgaatttgacggacaacaagatccgtttgaagctggcattgga

SEQ ID NO: 228665 - DNA, 412 bp, Unknown
  Bacterial polypeptide expressing nucleotide sequence isolated from the Sargasso Sea
gatgggtggagaggacggggagcaggcggtcgagaccaccccgctgcatgattgccatgtggccgctggcgccaagatggtgcccttcgccggctatgctatgccactcaactatcccgccggtataattgctgagcatcttcacacccgcgaaaaggcctcgctgttcgatgtcagccatatgggccaaatcagcatctggggtgatggtgcggcccatgccctcgaatcgctggtacccggcgatatcatcggcctgcagacctggcgctcgcgctacactcagttcactaataacaacggtggcatcatagacgatcttatcgtcaccaatgccagcggccgtttaatgttggtagttaatgcggatcacaagcatgctgatcttaaccatttggagacgacctttagc

SEQ ID NO: 228666 - DNA, 525 bp, Unknown
  Bacterial polypeptide expressing nucleotide sequence isolated from the Sargasso Sea
ttgagatatcaattgtaaatgattttgtagaccaattaaccagagaattaatcaacaaaggatctaaattgataggtcttggagcaagagatacactaagattggaagcaggtttatgtctttatggtcatgatcttgataaaaacaaaactccagtggaagcaaatttaaagtgggctatttcaaaagaaagaatctctaagggagattttattggctctgacataattattaaacaattaaatgatggagtcagtaaaataagagttggaattaaacctgaaggcagaattattgctagagaaaaaacaaaaatatttaaccaatcagatattcatattggagaaatcacaagtggtacatttggaccaagtgttaatggacctgttgcaatgggttatgtggaaaatgaattttcaaaaaaaaatactaaagtatttttagaagtcagaggtaaaaaacatcctgcaagtatttgcagcttaccattttataaaaaaagttatgtcaaaggggtaaactaat

SEQ ID NO: 228667 - DNA, 890 bp, Unknown
  Bacterial polypeptide expressing nucleotide sequence isolated from the Sargasso Sea
ttcagctatgtgttacgacaacggatgcatggttgatgatggaactttacttaaatttggacaggatatttttaggtgggttggtggacaagaatatggaggtgagtggctaaaagagcaggcaaaaaagaaaaattttaaagtgtgggtaaaatcatctactgatcaaattcacaacattgcagtccaaggacctaatagtagaaaaattcttaaaaaatttgtttggacacctgatacccaaccttcaattgatgatcttcaatggttcagattaactatagcaagaattgatagtgttacaggaactccaatagttatatctaggacgggatacactggggagttaggtttcgaaatttggtgtcacccaaaagacgcttccacggtttgggataaagtgtgggaagctggtaaagaatttaatatttcacctcttgggttagaggctttagatatgcttcgaatagaagctggattaattttttatggttatgaatttgatgataaaactgaccctttcgaagctggaattggttttacagttccgctaaaaacaaaagaagatgattttattggaaaagaagaattaataaaaagaaaaaataatccacaaaaaaaacttgttggtctcgaacttgtaggtcatgaaccagcaactaatggtaactcagttcatataggcagaggacaggttggcataattacgagtgcaatgttatctaaaactttgaacaaaaatatagctttatgtagaatagattccaaatactcagaaattggtacagaagtagaagttggtaagatagatggtcatcaaaaaagaattcctgcaaaagtaatacaatttcctttttacgatccccaaaaattaaaagtcaaagcttaat

SEQ ID NO: 228668 - DNA, 588 bp, Unknown
  Bacterial polypeptide expressing nucleotide sequence isolated from the Sargasso Sea
caggaaacaactttaattatgatggtgaaaatttatatattactagatcaggctatacaggagaagatggttttgaaatttctatttcaaataaaaaagtagaaaagctaattaattttttaatttcaaacgatgtcaaaccaattggattaggtgctagagacactcttagattagaggcgggactttgtttgtacggacatgatctaaatgaaaaaattaatcctatagaagcaaatttaaaatgggctattgcaaaaaaaagaaaagacgttggtggttttaacggctgggataaaattaagattttattaacaaatggaagtgaaaaaattagggtaggtattaagccagagggcaaagttatagctagagaaaatacaaaaattttttcagctgatgatagtgaaataggtttagttacaagtggaacctttggtccaagtgtaaatgcacctgttgcaatgggatatgttaaatcaaattttgcagaaattggaacgcctataaaactagaagtaagaggaaaaaaataccaagggaaagtttctgagcttccattttataaaaaaaattatgttaaataaa

SEQ ID NO: 228669 - DNA, 559 bp, Unknown
  Bacterial polypeptide expressing nucleotide sequence isolated from the Sargasso Sea
atggagatacagaaaacagctttatataattatcacaaaaaccttggagcaaagtttgttccttttgcaggttatgaaatgcctattcagtataaagaggggatagttaaagagcatatttctacaagaactcacgctggattttttgacgtctcacacatgggccaattttttctagaaggtgatgaaacattaattgagtctcttgaaaaaataataccagcagatctaaaaaatttaaaaatcaatcattcgaagtattcctttttactcaataacgaaggcggaataattgatgatttaattattacaagaacagaaaaaggcttttgtataattttaaatgctgcttgcaaagagaacgacataaaacaaatttcacaatttttaaaagataatcataaacatcttttaaacaacaatttatctttgatagcattacaaggtccaaaatctgtagagattttagataaattaatacctggtgttgcaaatttaaaatttataacaggaaataattttgattatgacggtgaaaaactttatgtaacaagatcgg

SEQ ID NO: 228670 - DNA, 757 bp, Unknown
  Bacterial polypeptide expressing nucleotide sequence isolated from the Sargasso Sea
tggatcggcggcgaggacttcggcggcgagtggctgcgtcagcaggcagcgaaactgggcatgaaggtctggatcaagtccgcttccgagcagatccacaacatcgccgtgcagggcccgctgagccgcaccctgctcagccagatgatctggacgcccgcgacccagccgacgctggaggagctgggctggttccgcttcctgatcggccgcctgaacgactatgacggcccgcccgtgatggtgtcgcgcactggctacaccggcgagctgggctatgaaatctggtgccacccggaccacgccatgcaggtctggcagcgcctctggcagctcggcgagccgctgggcctggcgccactggggctgcatgcgctggacatgctgcgcatcgaggccgggctgatcttcgccggctacgaattcagcgaccagaccgacccgttcgaggccggcatcggtttctgcgtgcccctcaagagcaagcaggacgacttcatcggccgcgcggctctgctgcggcgcaaggagcacccgcaacagcgcctggtcggcctcgagctggatggcaacgagccggctgcgcatggcgactgcgtgcacgtcggccgtgcccaggtcggggtggtgaccagcgccacgcgctcgcccagcctgggcaagaacatcgccctgtgccgcctggcggtcgactactgcgaaccgggcacccgtgtggaaataagcaagctcgacggccagcagaagcgcatcggcg

SEQ ID NO: 228671 - DNA, 295 bp, Unknown
  Bacterial polypeptide expressing nucleotide sequence isolated from the Sargasso Sea
gatgctgcacacccccttgtttgagctctgccgtgaagccggcggccgcatggtgccgtttgccggttgggagatggccgttcagttcgaaggcttgatggccgagcacagggccgtacggcagcgcagcggtgtgttcgacatctcccacatgggtgtgctgacgctccgtggttcaggcgtgaaagacaaactccaaggcctggtgcccagcgacctgcagcgcattggacccggtgaagcccaatacaccgtgctgctcaacgaaaccggcggcatccgcgacgatctgatc

SEQ ID NO: 228672 - DNA, 922 bp, Unknown
  Bacterial polypeptide expressing nucleotide sequence isolated from the Sargasso Sea
aatacttccgctggtggtttaaattcagtactttcagacgaatcttttgcaagacctggtgattatgttttgtttaaagcattaaaagacattacttgtggtacttctgcttgtccaagtgatatagatgcatgtaattcgtggaatccaactgatatttttgttagaacttacgataaaaaaaaagaatttaaaaaatcttttgcatttagaatgaagacagactctgaaaaaaaattaacaaagaattcaggtttctacgaaagaacatctaaattaactagaaattttattgatgctagaggtttttggctacctaacgattatacaaagcatggtttagtaaacgaatacaatgcctgtagagacaaagctgttttaattgatttatcttctttaagaaaatttgaaattttaggtcctgatgcagaagaattaatgaattatactttaacaagaaatgtaaaaaaattatcagttgggcaagttgcttattctgctatgtgctatgaaaacggtcaaatgtttgatgatggtacagtttttaaacttagcgaccatggatttagatggatttgcggagatgaatatggtggtgagtggttaaaagaaatagcaaagaaaaaaaattacaaagttgttatcaaaaattcgacagatcaaattagcaatgtttcaatacaagggccaaatagtagaaaaattttaaataaaataatttttactccaccaactcaaccatctattgatgaacttcagtggtttagatttacaatatgtagagtcgaagatttacaaggaatccctctagtaatttcaagaactggttatactggagaattaggatatgaagtttggtgtcatcctaaagatgctccaaaagtttgggataaattaatggaagctggagaaaaagatggat

SEQ ID NO: 228673 - DNA, 967 bp, Unknown
  Bacterial polypeptide expressing nucleotide sequence isolated from the Sargasso Sea
aaaatgacaaaagagactggatttcataaaaaaacatcaaagctcacaagaaacttcattgattataatggatattggctagcaaataattatacaaaatacggaacaattaaagaatataattcgtgcagagaaaaggctattgcaattgacctttcacctttaagaaaatttgaaataaatggaccagatgcagaaagtttaatgcaatatgcattgacacgtaacgtaaaaaaactttcaataggacaagtaagttattcggcaatgtgctatgaaaatggttgcatgatagacgatggaacaatttttcgtcttggaaaagaaaatttcagatggattggtggacaagagtatggtggtacttggctaagagaattagctaaaaaaaaaaattacaatgcatgggtaaggtcttctacggatcaaattcacaacatctcagtccaagggccaaatagtagaaaaattttagaaaaattcttttggagttctcctttgcaaccaacattaaatgagcttcaatggtttagattttctattggtagaattggtaatgaaatgggaacgccaattattatttctagaacaggatatactggagaattaggctttgaagtatggtgccatccaaaagatgcttcggaagtttgggataaagtttgggaaaatggaaaagatttaggtatagttcctatgggattagaagctttagacatggtcagaattgaagcaggactaattttttatggatatgaatttgatgatcaagtagacccttttgaggctggaattggttttgctgttgctcttaaaactaaagaagatgattttgttggtaaagagtctttaataaaaagaaaatcatcgcctcaaaaaaaattagttggtttggagttaattggtaaagagcaagcaaatcatggagactgtgtacatgtaggaaaggctcaaataggaataatca

SEQ ID NO: 228674 - DNA, 841 bp, Unknown
  Bacterial polypeptide expressing nucleotide sequence isolated from the Sargasso Sea
aattctgttacatctgatgagtcttatgcaaggcctggtgattacgtcatttttaaagctctaaaagatttaacatgtggaactactgcatgccctagtgatattgatagctgtaatggatggaaccctactgatatttttgttagaacttatgagaaaagcaaagaatttactaaatcatatggttttagaatgaaaacagattcagaaaataaacttacaagaaataccggtttctatgaaagaacatcaaaattaactagaaactttgtcgatgctagaggtttttggttaccaaatgattatacaaaacatggcgtaattaatgaatacaatgcatgcagagaagacgccgtcctaattgacttatcttcattaaggaaatttgaaattcttggtccagatgctgaagaattaatgaattatacattaactcgaaatgtaaaaaaactttcagttggtcaaattgtttattcagcaatgtgttatgaaaatggaactatgtttgatgatggaacgttattaaaacttagtgatcatggttttagatggatttgtggtgatgaatatggaggtgagtggcttaaagaacaagctaagaaaaaaaattataaagttcatatcaaaaattctactgaccaaataaataatttatctttacaaggtcccaaaagtagaaaaattttagaaaaaataatttttactccccctacccaaccctctatattagaattggaatggtttagatttacaatttgtcgattggaagaattaaacggaataccattaattgtttcaagaacaggttacactggtgaacttggttttgaaatttggtgtc

SEQ ID NO: 228675 - DNA, 575 bp, Unknown
  Bacterial polypeptide expressing nucleotide sequence isolated from the Sargasso Sea
catggatttgctaaaaagtcctctttattcaaaatatgttgaagccaatgcaaaattggtggattttgcaggttgggaaatgcccatatcattttcaggattaattaaagagcatgaatcagttagatcatcagcaggattatttgatatttctcacatgggggtgatttctatcaagggaatcaatccaaaggattatattcaaaaactttttcctactaatttatattccttttctgagggtcaagggctttatacagtaatgctcaatgataaaggaggaataatagatgacttaataatttatgaccttggcattcaagaaaatgacatatcagaattattattaattgttaatgcaattagatatgaagaagattttcagtggataaaaaataatttaaataaatatgaaatttcgataacaaactttaaaaaagacaaagtacttttagcactacagggaaaaaactcattcgatttatttgaagaatggattgaatcttcgatctcacatatccctaactttggatgcgaatataaaatttttgaacatatttcgcctaaagaaaaaa

SEQ ID NO: 228676 - DNA, 802 bp, Unknown
  Bacterial polypeptide expressing nucleotide sequence isolated from the Sargasso Sea
gatttatcttcgttaagaaagtttgaaattataggacctgatgcagaagagttaatgaactatacattaacaagaaatatcaaaaaactttctgttggacagattgtatattccgcaatgtgttatgagaatggtacgatgtttgatgatggtacattattaagattaagtgaaactggctttagatgggtttgtggagacgaatatgcaggcgagtggctaaaagaacaagcaaaaaagaaaaattttaaagtaataatcaaaaactcaacagatcagattaacaatatttctgtgcaaggtccaaacagtagaaaaattttagaaaagataatatttactcctccaactcaacctactatttctgaacttcaatggtttagatttactatttgtagactggaagaactgaatggaattccattgattgtatcaagaactggctatacaggagaactcggttatgaagtttggtgtcatcccgaccatgcccctcaagtttgggacaaggttatggaggcaggtaaagatgatggaattatacctgctggatttggtgctttagatttattaagaattgaagctggattagttttgtttggaaatgaatttgatggacaacaagatccttttgaagctggaatagggtttgctgttcctcttaaaacaaaaactgatgattttattggtaaagaaagtttaataaaaagaaaagaaaccccacaaaaaaaattggttggtctagaattaattggtaaagaaaaagctaatcacggagattgtgtacatatggaagagcaca

SEQ ID NO: 228677 - DNA, 779 bp, Unknown
  Bacterial polypeptide expressing nucleotide sequence isolated from the Sargasso Sea
gcgtgtcgagagaaggctgtcttaattgatctttcatcattgagaaaattcgaaataattggacccgatgctgaagaattaatgaattatacgctgacaagaaacataaaaaaactttcagttggtcaagttgtttactctgctatgtgttatgaaaatggaatgatgtttgacgatggtactttattaagattgagtgaaacaggttttagatggatttgtggtgatgaatattcaggagaatggttaaaagaaattgcaaaaaagaaaaattataaagtaaatataaaaaattctacagaccaaataagcaatgtttctattcaaggaccaaaaagtagagaaatattaaaaaaaataatttttactccacctacccaaccctctattgacgaattagaatggtttagatttactatttgtagagtagaagaacttcaaggtattccattaatcgtatcaagaacaggatatactggtgaacttggttatgaaatatggtgtcatccaaaacatgctcctgaagtttgggataagctaatggcagctggaaaagatgagggtttaataccagcaggatttgccgctctagataaattaagaattgaagcgggtttaattttgtttggtaatgaatttgatggtcaacaggatccttttgaagctggaataggttttactgttccattaaaaacaaaggaaggggattttattggaaaagaagttctgaaagagagaaaggtaaatcctcaaaaaaaacttgtaggtcttgagcttat

SEQ ID NO: 228678 - DNA, 922 bp, Unknown
  Bacterial polypeptide expressing nucleotide sequence isolated from the Sargasso Sea
atcttttctttatacatctgctggaggtcttaattcagtaacctctgacgagtcatatgcaagaccaggcgattatgtaatttttaaagcacttaaagatttaacatgtgggacaacagcttgtcctagtgatatagatagctgtaatggatggaaccctactgatatttttgttagaacttatgaaaaaagtaaagaatttacaaagtcttatggatttagaatgaaaacagactcagaaaataaacttacaaggaacacggggttttatgagagaacttcaaaactaactagaaactttgttgatgctagaggtttttggttaccaaatgattacacaaaacatggagttattaacgaatataatgcatgtagagaaaaagctgttttaattgatttatcttctttaagaaagtttgaaattcttggtcctgatgctgaagaattaatgaattacactttgactcgaaatgttaaaaaactttcagtaggccaaattgtttattcagcaatgtgctatgaaaatggtactatgtttgatgatggcactttattaaaacttagtgatcatggttttagatgggtttgtggagatgagtatggtggggaatggcttaaagaacaagcaaaaaagaaaaattataaagtacatgtaaaaaattctacagaccaaataaataacctatctttacaaggaccaaaaagtagaaaaattttagaaaaaataatttttacacctcctacacagccctctatatctgaattagaatggtttagatttagtatttgtagattagaagaattaaatggaataccattaattgtttcacgaacaggttatacaggtgaacttggtttcgaaatttggtgtcacccaagcgatgcaccaactgtttgggataaagtaatggaagccaggtaa

SEQ ID NO: 228679 - DNA, 636 bp, Unknown
  Bacterial polypeptide expressing nucleotide sequence isolated from the Sargasso Sea
tatgaatataaaaaaaactgcactttacgaattacacaaaaaacacaacgctaagttcgttgagttcgccggttatagtatgccaattcaatactctgaaggaattgtaaaagagcataatattacaagaaataagtctggaatttttgatgtttcgcatatgggacaattaataattaaatacagtgatgacataacagataagctacaagaaattttaccgactgatcttaaaaatttaaaaattaatcaaagtaagtattcgtttttaatgaaagagaatgggggaatatatgatgatcttatcatcactaggaagaaagatcattatatgattattttaaatgctgcttgtaaacaaaacgatcttcagattattaaaaataaattgaatgatttaaatttggatatcaacaatgatttatctcttatagccatacaaggaccagagtctaaaataattcttgaaaatgtggtttcaaatgtatcaaaattaaaattcatgaatggaggagatttttattttaaagataacgaaatttttataacaagatctggatatacaggtgaggatggatttgaaatatcattacctaataaagttgcaatcccttttgtagaagaattaatttctaa

SEQ ID NO: 228680 - DNA, 776 bp, Unknown
  Bacterial polypeptide expressing nucleotide sequence isolated from the Sargasso Sea
attaaatgcagcatgtaaagaaaatgatttattgatcataaaatctaaaatagatagtcaatttcaattaaacttaagaaatgacttatctctaattgcaattcagggacctgagtcgaaggatattttagaaaaaataattccaggtgttaataagctaaagtttatgaatggaagtaaatttaattttaattcagaaaaaatttacataacaagatcggggtatacaggagaagatggttttgaaatatctattaaaaataatattgttaatgaattagttgaaaagatgattcaacttggttcaagtttagtaggattaggtgctcgtgacacattaagacttgaagcaggactttgtttgtatggtcatgatattaatgaagaaactagtcccattgaagcaaatttaaaatgggcaattcctaaaagtagaataaatgatgaatttacaggagcaacggaaataaaaaaacaatttgaaaaaggtgtaaatagattacgagtgggaattaaaccggatacaagagttatagcaagagaatttacaaaaatatttgataataaaaataatgaaataggaaaaataacaagtggaacatttggcccaagtgtaaatagtccgatagcaatgggatatgtatcaaatattttttcgaagtctaatacgaaagtatttttagaagttagaggaaaaaaaatacctgccagtatatgtgatctgccattttataaaaaaaactatgtgaaaggagaaatcaatgacagaagttaaa

SEQ ID NO: 228681 - DNA, 341 bp, Unknown
  Bacterial polypeptide expressing nucleotide sequence isolated from the Sargasso Sea
tctgaaaaattttcatcaaaataatggtgcaaagatattaccatttgcaggctttaatatgcctattaattataaaactggaataattaatgaacacaaaaacgttagaaatcactctggtatttttgatgttagtcatatggggcaaattttaattgaaaataataattcttatttacataaattagaaaaatatattccattacaattaaaaaaattaattaaaaatagatcgcattattcatttttactcaataaagatggcggtgttattgatgatctgattatttcaaatattgatattaaagataagtcatatttatatattgtttataatgcat

SEQ ID NO: 228682 - DNA, 343 bp, Unknown
  Bacterial polypeptide expressing nucleotide sequence isolated from the Sargasso Sea
catgacttctcctgaactccttaaaactcccctgcatggctggcattgtgaaaacggggggaagatggttcctttcggcggttgggacatgccggtccaatatgcagatggaatcctctcggaacatttggcaacccgtcggagtggaggcctgttcgatgtcagccatatggggcgtttcagagtggaaggtcgggatacaatgacatttctgcagcgagtgctgacgaacgatgcctccctactggaaccatggcaggcccaatacaccttgattgccaacgaaaacggaggggtgatcgatgatgcttacctttatcacctggaaggagaattcctgatc

SEQ ID NO: 228683 - DNA, 948 bp, Unknown
  Bacterial polypeptide expressing nucleotide sequence isolated from the Sargasso Sea
acaatttaaatgattcaatgaaaaaatatggtgtgaagaaaaaaaaaggttggcatgcaattaatcttttttttaatacatcttcgggaggtcaaaattctgttacatcagatgaatcttatgcaagaccaggtgattatgttatttttaaagctttaaaggatttaacgtgtggaactactgcctgccctagcgatattgatagttgtaatggatggaaccctactgatatttttgttagaacttatgaaaaaagtaaagaatttactaaatcatatggttttagaatgaaaacagactcagaaaataaacttacaagaaataccggtttttatgagagaacatcaaaattaactagaaactttgtagatgctagaggtttttggttaccaaatgattatacaaaacatggcgtaattaatgaatacaatgcatgtagagaagacgctgttttaattgacttatcttcattgagaaaatttgaaattcttggtccagatgctgaagaattaatgaattatacattaacacgaaatgtaaaaaaactttcagttggtcaaattgtttattcagccatgtgttatgaaaatggaaccatgtttgatgatggaacgttattaaaacttagtgatcatggttttagatgggtttgtggtgatgaatatggaggtgaatggcttaaagaacaagctaagaaaaaaaattataaagttcatattaaaaattctactgaccaaataaataatttgtctttacaaggtcccaaaagcagaaaaattttagaaaaaataatttttactccacctacccaaccttctatatctgaattagaatggtttagatttacaatatgtagattggaagaattaaacggaataccattaattgtttcaagaacaggttatacaggtgaacttggatttgaaatttggtgtcatccaaagtgat

SEQ ID NO: 228684 - DNA, 577 bp, Unknown
  Bacterial polypeptide expressing nucleotide sequence isolated from the Sargasso Sea
tatgaatataaaaaaaactgcactatacgaactacataaaaagcacaacgctaagtttgttgagtttgccggctacagtatgccgatacaatactctgagggaattgtaaaagagcataatattacaagaaataaatctggaattttcgatgtttcccatatggggcagttatttattaaatacagtaacgatataacagacaaactccaagaaattttaccaactgatcttaaaaatttaaaaattaatcaaagcaagtattcgtttttaatgaaagagaatgggggaatatatgatgatctcatcatcacaagaatgaaagatcagtacatgattattttaaatgccgcttgtaaacaaaacgatcttcagattattaaaaatacattggatgatcaaaatttggacatgaacaataatttgtctcttgtagcaatacaaggtccagagtctaaaacaattcttgaaaatgtagtttcaaatgtatcaaaattaaagtttatgaacggagaaaattttacttttaaaaataatgaaatctatattacaagatctggatatacaggtgaagatgga

SEQ ID NO: 228685 - DNA, 943 bp, Unknown
  Bacterial polypeptide expressing nucleotide sequence isolated from the Sargasso Sea
ggctttaaaagatataactgttggtacctctgcctgtcctagtgatatagatgcatgtaattcatggaatcctaccgatatatttgttagaacttacgacggaaaaaaagaatttaaaaaatcttttgcgtttagaatgaaaacagactcagaaaaaaaacttaccaaacattcaggattttatgaaagaacatctaaactaactagaaattttgtggatgctagaggtttttggctacctaacgattatacaaaaagtggtattactaatgaatataatgcttgtagggaaaaagcggttttaatagatctttcagctctcagaaaatttgaaattttaggtcctgatgctgaggaactgttaaattataccttaacaagaaatattaaaaaactttctgttggtcaagttgtctattctgctatgtgttacgagaatggaatgatgtttgatgatggaactttgttaaaattaagtgatacaggttatagatggatttgtggagatgaatatgggggagaatggctaaaacaaatagcgaagaaaaaaaactacaaagtaattattaaaaattccacagaccaaattagcaatgtttctatacaaggacctaatagcagaaagattttaaataaattaatttttacacctcctacacaaccaaccattgatgaattgcaatggtttagatttaccatttgtagaatggatgatttaaatggcatacctcttttaatctcaaggacaggatatacgggagaattaggttttgaagtttggtgtcatccaaaagatgcccctaaagtttgggataaattaatggatgctggaaaagaagatggattaatgcctgctgggtttgcggccttagataagcttagaattgaagctggattaattttgtttggaaatgaatttgatggccagccaagatccctttcg

SEQ ID NO: 228686 - DNA, 970 bp, Unknown
  Bacterial polypeptide expressing nucleotide sequence isolated from the Sargasso Sea
gatttaatatgtgcatcttctgcctgcccgtgcgatgttgatcctgcaaatggatggaatccaacagatatatttgttagaacttatcctaaggaacaaaaatattcgaaggcgatagcatttagaatgaaagaagactcagaaccaaaactaactaaagaaactggatttcataaaaaaacatccaagcttacgagaaattttgttgattataacggctattggctagcaaataattatacaaattatgggactataaaagaatatacagcttgcagagaaaaagctattgcgattgatttatctcctctaagaaaatttgaaatagtaggtcctgactcagaaaatttaatgcaacatgctttaacacgtaacgtaaaaaaaattgcaataggccaagttagttactcggcaatgtgctacgaaaatggttgtatgatagatgacggtacaatctttcgtttaggaaaagataattttagatggattggcggtcaggagtatggcggtacatggcttagagaactagcaaaaaagaaaaattataaagcttgggtaaaatcttctacggatcaaatacataatatttctgttcaaggacctaacagtagaaaaattctagaaaaatttgtttggacagcgccagctcaaccaacaataaaagaacttcaatggtttagattttctattgcaagaattgatgatcatgtcggaataccaattattgtttctagaactgggtatactggtgagctgggttttgaaatttggtgccatcccaatgatgcttctaaagtttgggaaaaagtatttgagcatggaaaagatctaggcataactccaatgggtttagaaggtttggatatggttagaattgaagctggacttatattttataattatgaatttaatgatcaaactgatccttttgaggctggaattggtttttctgtaccgctaaaaacaaaag

SEQ ID NO: 228687 - DNA, 810 bp, Unknown
  Bacterial polypeptide expressing nucleotide sequence isolated from the Sargasso Sea
tggtaaagttgtttactctgctatgtgttatgaaaatggaatgatgtttgatgatggtactttattaagattaagtgaaactggtttcagatggatatgtggtgatgaatattcaggagaatggttaaaagaaattgcaaaaaagaaaaattataaagtaagtataaaaaattctacagatcagataagtaatgtttccattcaaggaccaaaaagcagagaaatattaaaaaaaataatttttactccacctacccaaccttctattgatgaattagaatggtttagatttactgtttgtagagtcgaagaacttcaaggtattccattaattgtatcaagaacaggatatactggtgaacttggttatgaaatatggtgtcatccaaaacatgctcctgaagtttgggataaactaatggtagctggaaaagatgatggtctaataccagcaggatttgccgctttagataaattaagaattgaagcaggtttaattttatttggtaatgaatttgatggtcaacaggatccatttgaggctgggataggttttgctgttccattaaaaacaaaggaagaggattttattggcaaagaagttctgaaagagagaaagataaatcctcaaaaaaaacttgtagggcttgaacttattggtaaagaggcatctggacatggtgattgtgtacatgttggtagatctcaagtaggtgtaataacaagtggctgtttatctacaactttaaataagaatatagctttatgtagaatcgatactcaatactcaagtgagggcactgaagttga

SEQ ID NO: 228688 - DNA, 934 bp, Unknown
  Bacterial polypeptide expressing nucleotide sequence isolated from the Sargasso Sea
tttgaaattcttggtccagatgctgaagaattaatgaattatacattaactcgaaatgtaaaaaaactttcagttggtcaaattgtttattcagcaatgtgttatgaaaatggaactatgtttgatgatggaacgttattaaaacttagtgatcatggttttagatggatttgtggtgatgaatatggaggtgagtggcttaaagaacaagctaagaaaaaaaattataaagttcatatcaaaaattctactgaccaaataaataatttatctttacaaggtcccaaaagtagaaaaattttagaaaaaataatttttactccccctacccaaccctctatattagaattggaatggtttagatttacaatttgtcgattggaagaattaaacggaataccattaattgtttcaagaacaggttacactggtgaacttggttttgaaatttggtgtcatccaagtaatgctactacagtttgggataaggtaatggaagcaggaaaagatgaaggtttgataccagctggttttgctgctttagatcttttaagaattgaagctggtttaattttatttggtaatgaatttgacggacaacaagatccgtttgaagcaggaattgggttttcagttcctttaaaatccaaaacagaggattttattggaagagaaaatttaattaagagaaaagaaaatcctcaaaaaaaactagtagggctagagttaataggtaaagaaattgcaaatcatggagattgcgttcatattggaagatctcaggttggaattataactagtggatgcatttctccgacattaaataaaaatattgcattatgtagaatagatgtaggtcactcagaattaggtaatgaagttgaaattggaaaaatagatggacatcaaaaaagaatacctgcaaaaattgttg

SEQ ID NO: 228689 - DNA, 379 bp, Unknown
  Bacterial polypeptide expressing nucleotide sequence isolated from the Sargasso Sea
tcttcaatgtgttatgaaaatggtttcacgtttgatgatggaacattgttaaaattgagtgatcatggctttaggtgggtatgtggtgatgaatatgctggagaatggttaaaagagcaggcaaagaaaaaaaattataaagttctaataaaaaattcaacagatcaaattaacaacatctctttacaaggtccaaatagtagaaaaattcttgaaaaatttatatttacgccgccaactcagccaactatttgtgaactgcagtggtttagatttactatatgcagagttgaagatttgaatggtattcctttaattgtttcgagaactggctataccggtgagctaggttatgagatttggtgtcatccatctgatg

SEQ ID NO: 228690 - DNA, 805 bp, Unknown
  Bacterial polypeptide expressing nucleotide sequence isolated from the Sargasso Sea
ttgactagaaatattaaaaagcttgctgttggccaagttgtttattctgcgatgtgttatgaaaatggaatgatgtttgatgatggtacattattgagattaagtgaaactggttttagatggatttgtggagacgagtatggtggtgaatggcttaaagaaatagctaaaaaaaaaaattttaaggtcaatgtaaaaaattcaacagatcaaattagtaacgtatcaatacaaggtccaaaaagtagagagatattaaaaaaaatgatttttactccaccaacacaaccatctatcgatgaactggaatggttcagatttactatttgtagaattgaaaaccttcaaggtattccattgattgtttcaagaacaggatatactggcgaacttggttatgaagtatggtgtcatccaagccatgcctctgacgtttgggataaacttatggaagctggaaaaaatgaaggcatgattcctgcgggatttgcagctttagataagcttagaattgaagctggtttaattttatttggtaatgaatttgatggtcaacaagatccttttgaggccggaataggttttgctgttccattaaaaactaaagatgaagattttattggtaaagaggttttgaaggaaagaaaagcaaatcctcaaaaaaaacttgtgggtttagaacttattggaaaagaagcagctggacatggtgattgcgtgcacgttggaagatctcaagtaggtgtgataacaagtggttgtttatccacgactttaaataaaaatatagctttatgtagaatcg

SEQ ID NO: 228691 - DNA, 235 bp, Unknown
  Bacterial polypeptide expressing nucleotide sequence isolated from the Sargasso Sea
atggaaacgcaaaagacaactttatacgaatatcacaaaagtcttggagcaaagtttgttccatttgcagggtatgaaatgcctgtacaattttcttcaggaattgtagatgaacataaactcaccagaagcagtgcggggatgtttgacgtttcacatatgggacaactgtcattagaaggcaatgaagaattagcaactgaattagaaaaaattattccaatagatctaaaga

SEQ ID NO: 228692 - DNA, 469 bp, Unknown
  Bacterial polypeptide expressing nucleotide sequence isolated from the Sargasso Sea
ttgcacctatcgcttccgcaaaggttcgtgtcagatagtccaccagtgcgtactgcgttgtatgcttgccatctagagtcagaggcaaagatggttgatttccatgggtttgaattgccaatatggtacagctcaatccaagaggaacatctggcttgcagatcttcagcaggaatgttcgatgtttcacacatgggcttcttctccttccgaggcgacaaagttagacagtggctcgagagtatatcaactcagagagtttcttcctttgctccaggccgttgcggttacacacattttcttgaccatgagggtcaaattatcgatgacatgattttcgcaattaaatcggatgattgtgtattgggagtgccgaatgcctccatggttccaaccatgtggaaatggttcagtgaattattacctgatgatggctcggtaactgtagagaatctttcagatgagacaa

SEQ ID NO: 228693 - DNA, 871 bp, Unknown
  Bacterial polypeptide expressing nucleotide sequence isolated from the Sargasso Sea
gatttatctgctttaagaaaatttgaaattataggtcctgatgccgaggaattgatgaattacacattgactagaaatattaaaaagcttgctgttggccaagttgtttattctgcgatgtgttatgaaaatggaatgatgtttgatgatggtacattattgagattaagtgaaactggttttagatggatttgtggagacgagtatggtggtgaatggcttaaagaaatagctaaaaaaaaaaattttaaggtcaatgtaaaaaattcaacagatcaaattagtaacgtatcaatacaaggtccaaaaagtagagagatattaaaaaaaatgatttttactccaccaacacaaccatctatcgatgaactggaatggttcagatttactatttgtagaattgaaaaccttcaaggtattccattgattgtttcaagaacaggatatactggcgaacttggttatgaagtatggtgtcatccaagccatgcctctgacgtttgggataaacttatggaagctggaaaaaatgaaggcatgattcctgcgggatttgcagctttagataagcttagaattgaagctggtttaattttatttggtaatgaatttgatggtcaacaagatccttttgaggccggaataggttttgctgttccattaaaaactaaagatgaagattttattggtaaagaggttttgaaggaaagaaaagcaaatcctcaaaaaaaacttgtgggtttagaacttattggaaaagaagcagctggacatggtgattgcgtgcacgttggaagatctcaagtaggtgtgataacaagtggttgtttatccacgactttaaataaaaatatagctttatgtagaatcg

SEQ ID NO: 228694 - DNA, 367 bp, Unknown
  Bacterial polypeptide expressing nucleotide sequence isolated from the Sargasso Sea
atggaaaaaacagctttatataattttcacaaaaacttaggagcaaagtttgttgcttttgctggatatgaaatgccgattcaatacaaagacggtattgttaaggaacacataagcacaagacagaccgcaggtttttttgacgtatcacatatggggcagctttttatttctggaagcaaatcattagaacaaaatttagaaaaaatcattcccttagatttcaaagaaattaaaataaatcaatctaaatattcttttttgataaatgataaaggcggagttattgatgacctaattataactagagttgacggaggttttaatattatactgaatgcagcatgtaaggataatgacactaaag

SEQ ID NO: 228695 - DNA, 871 bp, Unknown
  Bacterial polypeptide expressing nucleotide sequence isolated from the Sargasso Sea
gtcgtcggcatcgccgaggggcgggtgcgctattccatgttcctgaacgagaccggcggtgtgctcgacgatctgatgatcgcgcgtctcgacggcatgctgcagctggtggtgaatgccggccgcgccgaacaagacatcgcccatctagaagcgaatctggccgccagcgtggacatgacggtgcgccgcgaacgcgcccttctcgcccttcagggaccggccgcaccggatgtgctggcccggctcggcgtcgatctcgacggtttcttcttcatgcaggtgggccatttcgacattgccggcatcccctgcatcatcacccgctccggctacacaggcgaggacgggttcgagatttccataccagtcgaagcggcgcagacgctggccgaacggcttgtcgccgacgaagacgtcagccttgccggacttggcgcccgcgacacgctgcggctcgaggccgggctgccgctctgggggcatgagctcgacgagacaatcaacccggtggctgccgggctgcgctttaccttgtcgaagcgacggcgtgaagcaggcgatttccccggcgccggactggtcatgcaggatttcaccaaaggcgcaccgcgggtgctgaccggcttgctgccgcagggcggccggccggtccgcgacggcgccgagctggcgctggacggcaatattgtcggccatgtcacatcgggcggctttgcgccaagccttgatgcgccggcggcgctcggcttcgtcgacgccgcgctagccacccccggcaccgaaattatggccgtcgtgcgcggccgcgagacccccgtcttcaccgcggcactgccgctagtgccgcaccgttatatccgcggatgac

SEQ ID NO: 228696 - DNA, 876 bp, Unknown
  Bacterial polypeptide expressing nucleotide sequence isolated from the Sargasso Sea
catgtgttatgaaaatggatgtatgattgacgatggtacaattttccgcttagctaaagataattttagatggattggtggtcaagaatatggtggaacatggcttagagaactcgcaaagaaaaaaaattataaagtttgggtaaaatcctcaacagatcaaattcataatatttcggttcaagggcctaatagtagaaaaattttagaaaaatttgtttggactcctcctactcaacctacaataaatgaactgcaatggttcagatttgcaattgctagaatagatgatcatattggaataccaattattgtttctagaactggatatactggagaactaggttacgaaatttggtgtcatcctaaggacgcttctacagtttgggataaagtattcgatcatggaaaagatttaggtataattccaatggggcttgaaggactggatatggtgagaatagaagctggtttgatattttatggttatgaatttaatgatcaaacagatccctttgaatcaggaattggtttttctgtaccattaaaaactaaagaggacgattttgtaggtaaagaatcattaataaaaaggaaagcgtcacctcaaaagaaattagttggattagaattaataggcaaagaacaggctattaatggcgatggtgtacacgttggacgtgctacagttggcgtagttactagtggaatgatatcacctattttaaacaaaaatattgcactttgcagaatggatgttaaatattcagaaataggaacgaaagtagaaataggtaaaattgatggtcatcaaaaaagaattggagctaaagttgttaagtttcctttctatgatccagataaaacaaaagtaaa

SEQ ID NO: 228697 - DNA, 676 bp, Unknown
  Bacterial polypeptide expressing nucleotide sequence isolated from the Sargasso Sea
cgtagatgctagaggtttttggttacctaatgattatactaaacacggggtcgttaatgaatacactgcctgcagagaaaaagcagtaattgttgatttatcttctcttagaaaatttgaaattttaggcccagattcagaagagctaatgaactataccttaacaagaaatattaaaaaactttcagttggacaggtggtttattcctcgatgtgctatgaaaatggattaatgtttgacgatggtacactatttaaaatgagtgatcacggtttcagatggatatgtggcgatgagtatgctggtgaatggttaaaagaacaggctaaaaagaaaaattataatgtccttattaaaaactccactgatcaaataaataatatttctttgcagggtccaaatagtagaaaaatattagaaaaatttatttttacccctccaactcagccgtctgtaagtgaattagaatggtttagatttacaatatgtagagttaaagaattaaatggaattcctttgattgtttctagaacaggctacaccggtgaattgggttatgaaatatggtgtcatccatctgatgctccaaaagtttgggatgtagtaacggaacacgggaagaatgaaggattaattccagcaggttttgctgctttagactttgttaagaattga

SEQ ID NO: 228698 - DNA, 334 bp, Unknown
  Bacterial polypeptide expressing nucleotide sequence isolated from the Sargasso Sea
gttgtttttccaccgtatgccgtcagcgaggaatatggaaggggggctgatccgaacttcactatttgactcccatgtgtcggcaggagcaaagatggtcgactttcatggttatgagttgccaatatggtactcttcgatccaagaagagcatatgcaaactcgaagatcagcgggtcttttcgatgtttcacatatggggttattccgctttcgtggtgaaggtgttcgctcatggttgagtgaagtatcgactcagaactatatgaagttccaaccaggtaggtgtggctattgtcactttttggattacgatggaaaaataattgacgat

SEQ ID NO: 228699 - DNA, 905 bp, Unknown
  Bacterial polypeptide expressing nucleotide sequence isolated from the Sargasso Sea
atttattttttacacctcagctggaggattaaattctgttatttccgatgaatcttattcaaggcctggtgattatgtaatgtttaaagctttgaaagatttaacaataggaacgactgcatgtccaagtgatatagatccttgtaattcatggaatcctacaaatatatttgttagaacttacgataaaaataaagaatttagaaagtcatttggttttagaatgaaaacagactctgaaaataaacttactagaaattctggcttttatgaaagaacttcaaaattaactagaaactttgttgatgcaagaggattttggcttccaaacgattacaccaaacatggtttggttaatgagtacaatgcttgcagaaatgatgctgtattaattgatctgtcatcactaagaaaatttgaaataattggtcctgatgctgaagagttaatgaactacactcttacaagaaatataaaaaaactttctgttgggcaggttgtatattctgcaatgtgttacgaaaatggaatgatgttcgatgatggaactcttttaagattaagcgaaacaggttttagatggatatgcggagatgagtatggtggagaatggctaaaagaaattgcaaagaaaaaaaattttaatgctattgttaaaaactctactgatcaaattagcaatgtatctttgcaaggtccaaaaagtagagaaattttaaaaaaaattatctttactccaccaacacagccctccatagatgagctgggctggtttagattcacaatttgtagaatagaagaacttcaaggtattccgttaattgtttctagaacaggttatactggtgagttaggttatgaagtttggtgtcatccaaaacatgctccgcgaagtttgggataaa

SEQ ID NO: 228700 - DNA, 655 bp, Unknown
  Bacterial polypeptide expressing nucleotide sequence isolated from the Sargasso Sea
caagggcctaagtcggtcgaaatattagaaaaattaatacctggagtttcaagtttaaaattcatgactggaaataaatttaattatgatagtgaaaatttgtatataactagatcaggttatacaggagaggatggttttgaaatttctatctcaaataaaaaagtagaaaaacttattaattttttgatttcaaatgaagtcaaaccaattggtttaggggctagagacacactaagattagaggcaggtctttgtttgtatgggcatgatttaaatgaaaaaatcaatcctatagaggcaaatttaaaatgggctattgccaaaaaaaggaaagatgttggtggtttcaatggatgggataagattaaaaatttattaactaaaggaagtgaaaaaatcagggttggtattaagcccgagggtaaagttatagctagggaaaataccaaaatattttcaactgaagataacgagataggtcttgttacaagtggtacctttggtcctagtgttaatgcgccagttgcaatgggatatgtaaaatcaaattttgctaaagtcggaactgcaataaagctagaagtaagaggaaaaaaatatggaggtaaagtttcagagcttccattttataaaaaaagttatgttaaataaa

SEQ ID NO: 228701 - DNA, 316 bp, Unknown
  Bacterial polypeptide expressing nucleotide sequence isolated from the Sargasso Sea
atggaaaaaacagctttatataattttcataaaaactcaggggctaagttcgttcctttcgctggttatgaaatgcctatccaatacaaagatggcatagttaaagaacatataaatacaagacagtccgcaggtttttttgatgtatcacatatggggcagttttttgtctctggaggtcgatcaacagaacttagtttagaaaaaatcataccattagattttaaagaaattaagatgaaccagtctaaatattcctttttaattaatgatgaagggggagttatagatgatcttatatataacaagagttgaa

SEQ ID NO: 228702 - DNA, 904 bp, Unknown
  Bacterial polypeptide expressing nucleotide sequence isolated from the Sargasso Sea
aatgaattacacacttacaagaaatataaaaaaactttctgtaggtcaggtggtttattcagcaatgtgttatgaaaatggaatgatgtttgatgatggaactctcttaaaattaagtgaaacaggttttagatggatatgtggagatgaatatgctggagaatggttaaaagaaattgctaagaaaaaaaattttaatgcaaatattaaaaattcaacagatcaaattagtaatgtttctttacaaggtccaaaaagtagagaaattttaaaaaaaattatttttacaccccctactcaaccatcgatagatgaattaggttggtttagatttactatttgcagaatagaagaattgcagggaattcctctaattatctcaagaactggttatactggtgaacttggttatgaaatatggtgtcatccaaaacatgctcctgaagtttgggataaattaatggaagcaggaaaagatgatggtttgataccagctggatttgctgcattagacagacttagaattgaagctggattaattttatttggaaatgaatttgacggacaacaagatccttttgaagctggcataggatttgcagtgcctttaaaaacaaaagaagaggattttattggtaaagaagaattaattaaaagaaaagccaacccacaaaaaaaacttgttggtttagaactagtgggaaaagaaattgcaggtcatggagactgtgttcatataggcagatcacaagtaggtattgttacaagtggatgtttatcatcaaccttaaataaaaatgttgctctgtgcagaattgatttacagtattctgaaataggtacagaagtagaggtaggaaaaatagatggacaccaaaaacgaattaatgcaaaggtagttggt

SEQ ID NO: 228703 - DNA, 838 bp, Unknown
  Bacterial polypeptide expressing nucleotide sequence isolated from the Sargasso Sea
ggattgaattctgttatttctgatgaatcttattcaaggcctggggattatgtaatgtttagggctttgaaagatttaacaataggaacaactgcatgtccaagtgatatagatccttgtaattcatggaatcctacaaatatatttgttagaacttacgataaaaataaagaatttaaaaagtcatttggttttagaatgaaaacagactctgaaaataaacttactagaaattctggcttttatgaaagaacttcaaaattaactagaaactttgttgatgctagagggttttggcttccaaacgattacacaaaacatggtttggttaatgagtacaatgcttgcagaaatgatgctgtattaattgatctatcatcactaagaaaatttgaaataattggtcctgacgctgaagagttaatgaactacactcttacaagaaatataaaaaaactttctgttgggcaggttgtatattctgcaatgtgttacgaaaatggaatgatgtttgatgatggaactcttttaagattaagcgaaacaggttttagatggatatgtggagatgagtatggtggagaatggctaaaagaaattgcaaaaaaaaagaattttaacgctattattaaaaactcaactgaccaaataagtaatgtatctttgcaaggtccaaaaagtagagaaattttaaaaaaaattatctttacaccaccaacacagccttcgatagatgagttgaactggtttagatttacaatttgtagaatagaagagcttcaaggtattccattaattgtttctagaacaggttatactggtgaattaggttatgaag

SEQ ID NO: 228704 - DNA, 785 bp, Unknown
  Bacterial polypeptide expressing nucleotide sequence isolated from the Sargasso Sea
actgggcttctacaaaagaacttcaaaacttacgagaaattttgttgacgctaggggcttctggttaccaaatgactatacaaaacatggtataatcaatgaatacacggcgtgtagagaaaaatcagttgttattgatttatcttccctaagaaagtttgaaattttaggacctgatgctgaagagttaatgaattatactttaacaagaaatataaaaaaactttctgttggtcaggtcgtctactcctctatgtgttatgaaaatggtttcatgtttgatgatggaacattattaaaattgagcgatcatggctttaggtgggtatgtggtgatgaatatgctggagaatggttaaaagagcaggcaaagaaaaaaaattataaagttttaataaaaaattcaacagatcaaattaataatatttctttacaaggtccaaatagtagaaaaattcttgaaaaatttatatttacaccaccaactcagccaactatttctgaactgcagtggtttagatttactatctgtagagttgaagatttgaatggtattcccttaattgtttcgagaactggttacactggtgagttaggttatgagatttggtgtcatccatctgatgctcctaaagtatgggataaagttatggaagctggaaaagatgaagggattatacctgctgggtttggtgcactagatttattaaggatcgaagcaggattaatattatttggaaatgaatttgatggtcaagttgatccatttgaagctggtgtaggtt

SEQ ID NO: 228705 - DNA, 568 bp, Unknown
  Bacterial polypeptide expressing nucleotide sequence isolated from the Sargasso Sea
atgggtgtacaaaaaacagctttatacgatttgcacaaaagtttaggagcaaaatttgttcctttcgcaggttatgaaatgcctatccaatataaagatggaatagttaaagagcacatttcaacaaggacccatgcaggttttttcgatgtctcacatatggggcaattttttttagagggagatgaaacactagttgagtccttagaaaaaattattccttcggatttaaagtcattaaaagtcaatcactcaaaatattcttttttactaaatgaaagtggtggaattatagatgatttaatcgttacaaaaacaaataaaggcttctgtataattttaaatgcggcttgtaaagaaaatgacatcaaacatatatctaaatttttagataaaaatcataagtattttttgaacaatgatttatctttaatagctttacaaggaccaaagtcagtagaaattctggaaaaactcataccaggcgtttcagaattaaaattcatgtcgggaaataattttagttatgatagtgaaagtctttacataacaagatctggatacacag

SEQ ID NO: 228706 - DNA, 812 bp, Unknown
  Bacterial polypeptide expressing nucleotide sequence isolated from the Sargasso Sea
aggagttatagacgatcttattataccaagagtggaaaatggttttaatattatattgaatgcagcttgcaaggataacgatattaaagaaattacaaaatgtttaaattctgaaagcaaatacgaattaagaaaagatttatcacttatagctttacaaggccccaaatcagagacaatccttgaaacaattataaaaggcgtaaaagagctcaaatttatgaatggcaattattttgaatttctagataagaaaatttacattactcgttctggttatacaggcgaagatggttttgagatttcagtaccaaattcaattgttgaaaatcttatcaaactactcacagacaaaaatgcaaaacctataggcttaggagcaagagatacgcttagattagaagcgggtctatgtttgtatggccatgaactaaatcaaaagattaacccaatacaagcaaatttaaaatgggctatttcaaaaaaaagaagagaaaccgggggattcaaaggctgggaaaatattaaaaaggatttacaaaacggagtatcaaaaattagagttggcattaaaccagcaggtaaaattatagcaagggaaggaacaaaaatttattctaatactggtcaggaaataggagtcatcacaagtggcacatatggaccaagcgtaaatagtccagttgctatgggatatgtcaaaagtaaattttcagaaattgataataaaattttaattgaggtaagaggaaaaaggcatgagggcacaatatctaaattaccattttataaaaaaagttatgttaaatagg

SEQ ID NO: 228707 - DNA, 927 bp, Unknown
  Bacterial polypeptide expressing nucleotide sequence isolated from the Sargasso Sea
tgtgtctcttccgcttgtccggatgacaccagccctgcaaacggatggcaaccaactgacatacacgtccggatatatccggaaaaaaataatttcaccaaagcaatcacaacaagaatgactcccgattctgacgcaaaattaacacaggagaccgcatttcacccccgtacatcggctcttacgcgcaactttactgaataccgggggtattggctgcctacctgcttccgaaataaaggagcagttgaggaatattacgcctgcagggaaaaggcaatattaactgacctgtccccgctgaggaaatttgaagtactgggtcctgatgccgaagcactcttgcaatggactttgacaaggaatgtgcgcaaacttgctgtagggcaggtagtgtattcttctatgtgctaccccaatggggggatgatggacgatggtacattgctcaggcttggccaggataatttccgctggattggtggagatgactatggaggaatttggctcagggagcaggcgcaaaagcttggattaaaagtttgggtgaaatcttcaacggatcaaattcataatattgcagttcagggtccaaagagcagagaaattcttaaggaagtcgtctggactccacccactcagccaaagttggaagagattacatggttccgatttacagtagggcgaattggtgatatgaacggcatccccataatggtttcaagaactggctatactggagaactaggttacgaggtctggtgtcatcccaaagacgccgctgaagtatgggatgctgtctgggaatctggccaggcgcatgaaattatgccgcttggactggacgctctggacctgctgcgaatagagtcgggtcttgtatttgctggatatgaattcagtgacgaaactgatccgttgaagcag

SEQ ID NO: 228708 - DNA, 550 bp, Unknown
  Bacterial polypeptide expressing nucleotide sequence isolated from the Sargasso Sea
gtaacaagatcaggatatacaggtgaagatggttttgaaatctcaatttctaataaaaaggtcgaaaaattaattgattacttaatttcaaatgaagttaaaccgataggtttaggagctagggatacattaagactagaagctggtttatgtttatatggccatgatttaaatgagaaaataaatccggtagaggctaatttaaaatgggctatagcaaaaaaaagaaaagaagttggtggcttcaatggatgggaaaaaataaaaaatttactagccaatggaagtgaaaaaattagagttggtataaaaccagatggaaaggttatagctagagaaaatacgaaaatcttttcatcaaataatgatgaaattggattcgtcacgagtggatcttttggaccgagtgtaaacgcttcggttgcaatgggatatgtaaaatctgagtattctgaaataggaacatctattcagcttgaagtgagaggtaaaaagtacgggggtaaaatttcagaacttccgttttataaaaaaagttatgttaaataag

SEQ ID NO: 228709 - DNA, 218 bp, Unknown
  Bacterial polypeptide expressing nucleotide sequence isolated from the Sargasso Sea
aatggaggaaattttaaattttcagacattaatatattcattacaagatcaggatatacagggtgaagatggttttgaaatttcaattaaaaataattatgtagaaaaatttgtggaggaaatgctcagtaatggatctaaaatgattggattaggcgcaagagatacacttagaatggaagcgggattatgtctttatggtaatgatattgataaga

SEQ ID NO: 228710 - DNA, 498 bp, Unknown
  Bacterial polypeptide expressing nucleotide sequence isolated from the Sargasso Sea
catgactgaaaaaaatatatccactgaagatcttctcaggacatcactgtactcttggcatactgcaaatggaggcaaaatggttgattttggcggctgggaaatgccggtgcagtatgagaacggtattttaaaagaacatctaggcacacggcgctatggggggttatttgatgtcagtcacatgggacgcttccgtattcagggccaggacacaattgctttccttcagcatgtgcttagcaacaatgccgaatcgctggaaccatggcaggcacagtacaccttaattcctaacaataacggtggcctacttgacgatgcttacctttaccgtcctggaaatgaatattttctggtggtgaacgcctctaaccgtgacaaggactggaatcatctccatgaacaggcaaaagcctatgatgtttcaattgaagaccaaacttcacaaatatccatgatcgcattccagggtcccttgacaggaaggattcttgc

SEQ ID NO: 228711 - DNA, 640 bp, Unknown
  Bacterial polypeptide expressing nucleotide sequence isolated from the Sargasso Sea
tggaaaaataatttcaggtgttaataaactaaaatttatgcatggtaataaatttaaatttaattcagacgatgtttatataaccagatcaggctatacaggagaagatggttttgaaatatcaataaaaaataaggatgtagttcaattagtagaaaaaatgattaaacttggttcaaaaatgataggcttaggagcacgtgatacacttaggctagaagcaggactttgtttgtatggacatgatattaacgaagaaacaagtccaattgaagcaaatctaaaatgggcaatatcaaaaaaaagaattgctgatgattttcctggctctgaaaaaataagaaaacaattaaatgaaggcgtaaacaaactaagagttggaataaagcctgacaataaaattattgcaagagaatttactaaaatatttgatgataaaaataatgaaataggaaatgttaccagtggtacatttggtccaagtgtaaatggtcctatagcaatgggatatgtctctaataatttttcaaaactcaatacaaaagtatttttagaagttagaggcaaaaaaatatctgcatgtatatgtgagttacctttttataaaaaaaactatttgaaaggagaggcaaatgtctga

SEQ ID NO: 228712 - DNA, 814 bp, Unknown
  Bacterial polypeptide expressing nucleotide sequence isolated from the Sargasso Sea
gatatagatgcctgtaattcgtggaatccaactaatatttttgttagaacatacgacaagaaaaaagaatttactaaatcatttgcattcaggatgaaaacagactcagaaaaaaaacttacaagaaattctgggttttatgagagaacttcaaaattaacaagaaacttcatagatgctagaggtttttggcttccaaatgattacacaaaacatggtcttgttaatgagtacaacgcttgtagaaatgatgcagttttaattgatttatcttcattaagaaaatttgaaattattggtcctgatgctgaagaattattaaattatacacttacaagaaacattaaaaaattatcagtaggtcaagttgtatattctgcaatgtgctacgaaaatggaatgatgtttgacgacggtactcttttaagattaagtgagactggttttagatggatttgtggagatgaatatggaggtgaatggttaaaagaaattgcaaaaaagaaaaatttcaatgcaaatataaaaaattcaacagaccaaataagtaatgtttcattacaaggtccaaaaagtagagaaattttaaaaaagataatttttacacctcctactcaaccttctatagatgagcttggttggtttagatttagcatttgcagaatagaagagttgcaaggaataccattgattgtttcaagaaccggttatactggtgaacttggatatgaaatttggtgtcaccctaaacatgcttctgaagtctgggataaattaatggaagcaggaaaaaaagatggtttgattcctgcag

SEQ ID NO: 228713 - DNA, 520 bp, Unknown
  Bacterial polypeptide expressing nucleotide sequence isolated from the Sargasso Sea
tatggaaaaaacagctttatacaattttcataaaaaccttggagcaaagtttgttgcctttgctggatatgaaatgcctattcaatataaagatggtattgttaaggaacatataagcacacgacaaacagcaggtttttttgatgtctcacacatggggcagctttttatttcagaaagtaaatcattagaacaaaatttagaaaaaattattcccttagatttcaaagaaatcaaaataaatcaatctaaatattcttttttgataaatgataaaggcggagtaattgatgacctaattatcacacgagttgagggaggttttaatattatattgaatgcagcctgtaaggataacgacactaaagaaatagcaaaatgcctagactcagatagtaaatatgaattaaaaaaagatctttctcttgtagctttacaaggtccaaaatcagaaactattttagagtctataattccaggtgtaaaacaacttaagttcatgaatggagattacttttaa

SEQ ID NO: 228714 - DNA, 658 bp, Unknown
  Bacterial polypeptide expressing nucleotide sequence isolated from the Sargasso Sea
tatgataattttgaatgctgcttgcaaagtaagtgatttaaaaattatagaacgaaaacttagtaaaaattttaatttaaaaattagagatgatctgtcactagttgctttacaaggaccagactcaaaaaatgtattagaaaaaattattccacaatcaagcgaattaaaattcatgcatggaaataattttacctttgaagatataaatatttatataactagatcaggatatacaggagaagatggctttgaaatttctatagataattctaaagttgaaagttttgttgagattttattaaaaaatggatcgaaattaattggtcttggagctcgcgatactcttagactagaagcaggtttatgtttatatggtcatgatataaatgaaaaaataagcccaatagaagcaaatttgaagtgggctatatctaaaaatagaattaattcaagttttccaggatccagtattattaaaaaacaaatagacgaaggtgtaaaaaaaattagagtgggaataaaaccagaaactaaagtgattgctagggaaaaaacaaaaatattcgatcaaaatgataaattaattggaagtgttacaagtggaacatttggtcctagtgtacaaggtcctatagcaatgggttatgtcacgaat

SEQ ID NO: 228715 - DNA, 721 bp, Unknown
  Bacterial polypeptide expressing nucleotide sequence isolated from the Sargasso Sea
attattggctttgcaggggcccttatcagaaaaaatacttaaaagtttggtaccaaatgtcgccagaatgcaattcttgaacgtactagactttattttccagaatgaagaatgctggatttcgagatcaggctataccggagaggatggttttgaaatttctttaccagattctatcgtagaaaattttgtaagtaagcttttgcaaaatccagaagtcgagctaattggtcttggtgctagagatagtttaagaatggaagctggtttgtgtctatatgggaatgaattaagtagatcaattactcctgtcgaggccggtttaacatgggctataaagaaaaatcgattgtttgataaatttaatgacgaaagttttgttggtgctaaaaagattttggaacaactgaagaatggggtgaattttaagagagttggattgcttccggttggtcgcgctcccattaggcaggaagtagagcttttcgctgaagaacattcaaagcaggttattggtaaggtaacttcaggaggttttagtcccacactgaacaaaccaatttcgatagcgcgtttggagaataagtattgtgagataaataaacaagtttttgcagaagttagaggtgttagattaccggttacggtttgtaaactaccttttattaagctaaattatagaagaaagaggaaaaatgatgagatatactcaagaacatga

SEQ ID NO: 228716 - DNA, 802 bp, Unknown
  Bacterial polypeptide expressing nucleotide sequence isolated from the Sargasso Sea
atgatagttcataacttcgattctgtgcttgttgatttgggtttttttcaaatcaaatggtactctattgcttatattcttggaatagttttaggttgggtttatgctttaaaaataatcaaaaatgaaaaactcactaataataaaatcaaaatttctgacttcgatgatttaatagtttatttaataattggaataatacttggtggaagattgggctatataattttctataattttgaatattatagcgaaaatttttttgaaatttttaaaatttggcgaggcggaatgtcctttcatggaggcttaattggcgtaataattgggacgtttatattttcaaaaaaaacgagcaataacttttttcaattaactgatattgttgcatgtgtagctccaattggccttttctttggaagaatcgcaaattttataaatggtgaactttatgggaaaatatcaaaccttccttggactgtgatttttccagaagcaggaaatttaccaagacacccttctcaaatttatgaatctattctggaaggtattttactttttataatattaaactaccttgctttaaaaaaaaatttactgttaaagagtggttatatttcagttctttttctaatattatattctatcttaagaattttttcagaaacttttagagagccagacgcacatataggatatatttataattatttttcaatgggaactctattgagtataataactttactcgctggagttattataattttctttatcaaaaaaaatgaacaaaataattaat

SEQ ID NO: 228717 - DNA, 798 bp, Unknown
  Bacterial polypeptide expressing nucleotide sequence isolated from the Sargasso Sea
atttaaatattacaagaacagaaaaagttttttgtataattttaaatgctgcttgtaaggagaatgatattaaacaaatttcacaatttttattaaaaaatcataaatatcttttaaataacgatttatctttaatagctttacaaggtccgaaatctgttgagattttggaaaaattaataccaggtgttgcaaacttaaaatttatgactgggaataattttaattacgaaggtgaaaaactttatgtaacgagatctggctatacaggtgaagatggctttgaaatttctatttctaatcaaaaagttgaaaaattaattgattacttagtttcaaatgaagttaaaccgataggtttaggagcaagagatacacttagattagaagcaggtctatgcttatatggtcatgatttaaatgaaaaaataaatccagttgaggctaatttaaaatgggctatagccaaaaaaagaaaagaagctggtggttttaacggatgggataaaataaaaaatttattagtcaatggaagtgaaaaaattagagttggcattaagccagatggaaaggttatagcaagagaaaatacaaaaatcttttcattagataataatgaaataggattcgttacaagcggtacctttggtccaagtgtaaacgctccggttgcaatgggatatgttaaatctgaattttctgaaataggtacatctgttcagcttgaagttagaggaaaaaaatatgggggtaaaatttctgaacttccattttacaaaaaaagttatgttaaataga

SEQ ID NO: 228718 - DNA, 484 bp, Unknown
  Bacterial polypeptide expressing nucleotide sequence isolated from the Sargasso Sea
gaaatacttaaaaagggtgctaaacttattggacttggcgctagagacactcttagaatggaagctggtttatgtctttatggaaatgatattgataagaatacaactcctatagaagcaaatcttaaatgggcgatttctaaaaacagaattgatacagattaccctggatcgaaaattattaaaaaacaaattcaatcaggtgtagaaaaaattagagtaggaataaaaccagagtctagagtaatagctagaggaaacacgaaaatatttagtaatgatgataaagaaattggaaaaattacaagtggtacttttggtccaagtgttgatcattcaatagcgatgggttatgttgataataagtattcagatttaaatacaaaactgtttttagagataagaggaaaaaaaatacctgcaaatgtttgtaatttaccattttataaaaaaaactatgtcaaaggaggaataaatgtctgat

SEQ ID NO: 228719 - DNA, 745 bp, Unknown
  Bacterial polypeptide expressing nucleotide sequence isolated from the Sargasso Sea
gatttatcaatcattaaatcaaaattggggcgaaaaatttgaattaacattaaaagatgattcgtctttagttgcaattcagggtccagagtcaaaagatattctagaaaaaataattccaggagtaaataaactaagatttatgaatggaaataaatttaattttaacgcagaagatacttatataactagatcaggatatacaggagaagatggcttcgaaatatccattaaaaataatgttgtaattaaattggttgaaaaaatgattgagcttggttcaaacttgatcggattaggtgctcgtgacactttaaggctagaagcgggactttgcttatatggtcatgatattaatgaagagactagtccaattgaagcaaatttaaaatgggcgatttctaaaaatagaattaatgaagaatttcctggagctaaagaaataaaaaaacagtttaacgaaggtgtaaaaaaattaagagttggaatcaaaccagataatagagttatagctagagaatctacaaaaatatttgatgataaaaataatgaaataggaaaaataacaagcggaacatttggaccaagtgtaaagggtccaatagctatgggctacgtatcaaatattttttcaaaattaaatactaaagtttttttagaagttagaggaaaaaaaatacctgcaagcatatgcgagcttccattttataaaaaaaactatgtgaaaggagagataaatgtctga

SEQ ID NO: 228720 - DNA, 860 bp, Unknown
  Bacterial polypeptide expressing nucleotide sequence isolated from the Sargasso Sea
ttgtggcacttctgcttgtcctagtgatattgacccttgtaattcatggaatccaactgatatttttgttagaacttatgataaaaaaaaagaatttacaaaatcttttgcatttagaatgaaagcagactcagaagctaagctaactaaaaacacaggtttttacaaaaaaacatctaagcttacaagaaactttattgatgcaagaggctactggttgcctaatgattatacaaagcatggagttattaatgaatatactgcttgcagagaaaaagctgttgtaatcgatttatcttccttaagaaaatttgaaattctgggtccagatgctgaagaattaatgaattatacattaacaagaaatataaaaaaactttctgttggccaaatagtttattcatcaatgtgttatgaaaatgggagtatgtttgacgatggaacattgcttaaaatgagtgatcacggttttagatgggtttgtggggatgaatatgctggtgattggttaaaagaacaagcaaagaaaaaaaattataatgttttgataaaaaattcgactgatcaaataaacaatatttcacttcaaggacctaaaagcagaaaaattctggaaaaatttatttttacacctccaacacaaccttctatttctgagttgcagtggttcagatttacaatttgtagagtgaaaaaattaaatggtattcctttaattgtctcaagaacaggttatacaggagaattaggttatgaaatatggtgtcatccatctgatgcgcctaaggtttgggacgaagttatggaagcaggcaaagatgaaggtttaattcctgcggggtttggggcactagaccttt

SEQ ID NO: 228721 - DNA, 869 bp, Unknown
  Bacterial polypeptide expressing nucleotide sequence isolated from the Sargasso Sea
tctaaagaaaataaaacttaatcaatcaaaatattctttccttactaatgaagaaggtggaatctatgacgatttaattgttactaaagttgagaaaggttttaatattattctcaatgctgcatgcaaaaataacgattttaaaataattagtagttcactcaagaataaatttaaaataactttacatcagaatttatctcttattgctttacaaggaccacaatcatcacaaatattagaaaaaataattaacggagtttcttctcttaaatttatgaatggaaataaatttttttataatagcaaagatgtttatatcaccaggtcaggatatactggagaagatggatttgaaatttcaatatcaaatgaattagcagaagattttgcaaaaaaattaatttcagaaaaagtaaagccaataggtttaggggctagagatactttgagactggaagctggattgtgtctttacggacatgatataaatgaatctacaagtccgatcgaagcaaatcttaaatgggctatttctaaaagaagaagagaggaaggtggatttgtgggttacaataaaattcaatcggatttgaatgggagtttaagccgattacgagttggtttaaaacctgaaggaaaaattattgctagagaaggagtcaagattttttctgaaaatggtaaagaaattggatctattacaagcggtacttttggtccaagtgttaacgggtctattgctatgggttatgtaaaattaaatttttcaaaacctggaacaaagatctttttggaagttagaggaaagaaacatgaagccaaagtgtctgaacttccgttttataaaaaaagttatgtgaggtaaa

SEQ ID NO: 228722 - DNA, 592 bp, Unknown
  Bacterial polypeptide expressing nucleotide sequence isolated from the Sargasso Sea
tatgaatggaaataaattttcttataaagatgaaaatatttatatcactagatcaggttatacaggagaagatggatttgaaatttctatatcaaataaactagcagaagatcttgcaaaaaaattaatatcacaaaaagtaaaaccaattggtttgggagctagagatactttaagattagaagctggattgtgtctttacggtcatgatataaataaatccacaagtccgatcgaagcaaatcttaaatgggcaatatctaagagaagaagagaagagggtggttttgtaggttatgaaaaaattaaatcagatttaaatggaagtctaagtagattaagagttggtattaaacctgaaggaaaaattatagcaagagaaggagttaaagttttttctgacgatgataaagaaattggatctattacaagtggtacttttggaccaagtgtaaacggacctattgccatgggttatgtaaaattaaatttttcaaaacctggaacaaaggtctttttggaagttagaggaaaaaagcatgaagcaaagatagcagaacttccgttttataaaaaaagatatgtgaggtaa

SEQ ID NO: 228723 - DNA, 616 bp, Unknown
  Bacterial polypeptide expressing nucleotide sequence isolated from the Sargasso Sea
catgattccgacatccgatattaccggcctgatcctggccggcggccggggcagccgcatgggtggcgtcgacaaaggcctgcagacgtttcgcggcgcgccgatggcgatgcacacgctgatgcgcctgtcaccccaggtgggccacatgctgatcaacgcgaatcgcaacttggccgcgtacgagtcgtttggcgtgccggtggtggcggattcggtgccggattttgccggccctttggcgggcatcctggccgggctggagcaatgtgagacgcgctacctgctgactgcgccttgcgattcgccgttcgtgccgaccgacctggcagtcaagctctcgcacgcaatggatgaggcccgcgcgcgcatcgccatgccggtgacgatggagccggacgaacaaggtcacccgcgccggcaagtgcagccggtattctgtttgatcgatgcgctgctggccgacgacctgatcgtctatctgcaaggcggtggccgcaagatcgaaagctggaccgcgcgccacccgacggtggacgtgttgtttgacgacagttccgccttcgccaacatcaacacgctggaagaactgcaccagctggccgagcgccgctag

SEQ ID NO: 228724 - DNA, 885 bp, Unknown
  Bacterial polypeptide expressing nucleotide sequence isolated from the Sargasso Sea
agatttaacttgtggaacaacagcttgcccctttgacattgatgcttgtaattcatggaatccaactgatatttttgttagaacttatgataaaaaaaaagaatttacaaaatcttttgcatttagaatgaaaacagactcagaaacaaaattaactaggaatactggcttctacgaaagaacttcaaaacttactagaaattttattgatgctagaggcttctggttaccaaatgattatacaaaacatggtgtaattaacgaatacacagcttgtagagaaaaatcagttgttattgatttgtcttcactaagaaagtttgaaatcttaggacctgatgctgaagagttaatgaattatactttaacaagaaatataaaaaaactttctgttggtcaagtcgtctactcctcaatgtgttatgaaaatggtttcatgtttgatgatggaacattattaaaattgagtgatcatgggtttagatgggtatgtggtgatgaatatgctggagaatggttaaaagagcaggcaaagaaaaaaaattataaagttttaataaaaaattcaacagatcaaattaataacatctctttacaaggtccaaatagtagaaaaattctcgaaaagtttatttttacaccaccaactcagccaactatttctgaactgcagtggtttagatttacaatttgtagagttgaagatcttaatggtattcctttaattgtttcgagaactggctacacaggagagttaggttatgagatttggtgtcatccatctgatgctcctaaagtatgggataaagttatggaagctggaaaagatgaggggattatacctgctggatttggtgcactagatttactaaggatagaagcagg

SEQ ID NO: 228725 - DNA, 867 bp, Unknown
  Bacterial polypeptide expressing nucleotide sequence isolated from the Sargasso Sea
tgatgaatcgtttgcaagaccaggtgattatgtattgtttagagctcttaaaaatttaacctgtggaacaactgcatgtccaagtgatatagatccatgtaattcgtggaatccaactgatatttttgttagaacttatgataaaaaaaaagaatttaccaaatcatttgcatttagaatgaaagcagactctgaaaaaaaactaactagaaatactggatttcatgagagaacatctaagctcacaagaaattatgttgatgcaagaggattttggctaccaaatgattatactaagcatggaataataaatgaatatactgcatgtcgtgaaaaagctgttgtaattgatttatcttcgttaagaaagtttgagattcttggtccggatgctgaagaattgatgaactttaccttaactagaaatatcaaaaaactttcggttggacaaatagtttattcttcaatgtgttatgaaaatgggactatgttcgatgatggtacactttttaaattaagcgatcatggttttagatggatttgtggagatgaatacgcaggagaatggctcaaagagcaagcaaaaaagaaaaattataaagttttaattaaaaattctaccgaccagattagcaatatttcattgcaggggcctaatagtagaaaaattttagaaaaatttatttttacatccccaactcaaccaagcatatctgagttacaatggttcaggttttctatttgtagaattgaagatcttaatggaatacctttaattatttcaaggactggttacacaggtgaattaggttatgaaatttggtgcagcccatcagatgcaccaaaagtttgggacaaagtttttga

SEQ ID NO: 228726 - DNA, 1274 bp, Unknown
  Bacterial polypeptide expressing nucleotide sequence isolated from the Sargasso Sea
agaaagaaaaaaaggatggcatgctataaacttattttttaatacttccgctggtggtttaaactcagtgctttcagatgaatcttttgcaagacctggagattatgttttgtttaaagcattaaaagacattacctgcggtacttctgcttgtccaagtgatatagatgcatgtaattcatggaatccaactgatatttttgttagaacttacgataaaaaaaaagaatttaaaaaatcttttgcatttagaatgaagacagactcagaaaaaaaattaacaaaaaattcaggtttctacgaaagaacatctaaattaactagaaattttattgatgctaggggtttttggctacctaacgattatacaaaacatggtttagtaaacgaatacaatgcttgcagagataaagctgttttaattgatttatcttctttaagaaaatttgaaattttaggtcctgatgcagaggaattaatgaactatactttaacaagaaatgtaaaaaaactgtcagttggacaagttgcttattctgctatgtgctatgagaatggtcaaatgtttgatgatggtacagtttttaaacttagcgaccatggatttagatggatttgtggagatgaatatggtggagaatggctaaaagaaatagcaaagaaaaaaaattataaagttgttatcaagaattcgacagatcaaattagtaatgtttcaatacaaggtccaaatagtagaaagattttgaataaaataatttttactccacctactcagccatctattgatgagcttcagtggtttagatttacaatatgtagagttgaagatttacaaggaattcctctagtaatttcaagaactggatatactggagaattaggttatgaagtttggtgtcatcctaaagatgctccaaaagtttgggacaaattaatggaggctggaaaaaacgaaggattaattccagctggatttgcagctttagataaacttagaatagaggctggtttaattttatttggcaatgaatttgatggacaacaagatcctttcgaagctggtataggtttttctgttcctttaaaaactaaagaagatgattttattggaaaaaaagttttaattgaaagaaaagccaatccacaaaaaaaattagtaggtttagagttaattgcaaaagaacctgcgggacatggagattgtgtccatatcggcaggtcacaaataggcgttgtgactagcgcatgtttttctacaattcttaataaaa

SEQ ID NO: 228727 - DNA, 1258 bp, Unknown
  Bacterial polypeptide expressing nucleotide sequence isolated from the Sargasso Sea
tctcctgcaaatgggtggaatccaacggacatttacgttagaacatataaggataataaattattttctaaatcaatagcttttagaaaaaacgctgaggcaaaaccatttatgacaaaaaatacaggtttccatgaaaaaacatcagaactaactagaaacatgatggattcatcaggctactggatacctacaaaatataacaattatggtcctgcagtagaatataatgcatgccgaactaatgtagttatgatggatttatcctcattaagaaaatttgaaatattaggtcctgactcagaagaattaatgaatattgccctaacaagaaatgttaaaaaattgtctataggtgaagttgtatattcggctttatgttatgaaaatggaatgatgattgatgatggaacactctataaactaggggatcataattttagatggatttgtggtaacgattattctggtgaatggttaagagagctagcagaaaaattaaagcttgatgtatgggttaaatcatctacagaccaattaaacaatttatctgttcaaggaccaaatagcaggaaccttttgaaagaaattatttggacaccaccggcacaacccaaactagaagaattaaaatggtttcatttttcagttggaagactattcaaagatcaaggaactccaataatggtttcgagaactggttatactggcgaattaggttatgagattttttgccatccaaaagatggtaaccaaatttgggaagcaatttggaatgaaggaaaaaaatacaaaattgtacctatgggatttgatgctttagatatattgagaatagaagcaggtttaattttaggaggtaatgaatttagtgatcagacagatccatttgaagcaggcataggtttcaccatacctttaaaaagcaaaaatgttgattttattggaaaaaatgcattaatagaaagaaagaaccatcctcaaaaaaaattagttggattagaaatagaaggcaatgaaaaagcaaatcacggagatttggtccattctggtagaggtcaagttggtataatcactagcggaactatgtcaccaattttaaacaaaaacattgcaatgtgtagagttgacacaaaatattcagaaataggaacttccttagaaattggtaaattagatagtcatcaaaaaagattaatggctaaagtagttaaatttccattttatgatccggataaatctagggtcaaatcataaa

SEQ ID NO: 228728 - DNA, 385 bp, Unknown
  Bacterial polypeptide expressing nucleotide sequence isolated from the Sargasso Sea
atgataaataaaaacgatagtagtgatccaattgataatttagagtatgaaaaagttctagaagaagaaataataaattcatacgaaagtaaattccaaaaagatactgatgaaaatagtaaaaagattaaattttacagacttaaaagaactccattagaaatactaaataggacatttttccttttctttattggaagttttcttttctctttgtttttagcttattcagaaagtaagttgtggttcatactttatgtaataagtgcattgtcatgtgttttctatactcctaacagaaaggcacttaaagaattaatagcagcttggccaaatatagaggatctcattaaagggaggagtttatggagaaaaggcaagtaaa

SEQ ID NO: 228729 - DNA, 1792 bp, Unknown
  Bacterial polypeptide expressing nucleotide sequence isolated from the Sargasso Sea
ataaagaaagaaagttgtatatcttatgaggttaaggaaggagattatattcaagtgataagtccaactggtagacaatgttctgactttgtggcattcgatacaagaaaattagaaaaagggattgaaaaaggattagactggcaaaccacaagaacattcatgggtaatactttcccgggaccaggtttgttctcaaaattttatgacacagaccatgagccacttgttgaagtaataagagatactgttggaaaacatgatacttttaatcttgcatgtacatcaaagtattatgaagattcaggatattttggtcatccaaattgttcagataatttaactgaaagtatgtctaaatatggtgttcagaaacaaaaaggttggcatgcaattaatttgttttttaacacctctgctggaggattgaattctgttatttctgatgaatcatattctagacccggtgattatgtaatgtttaaggctttgaaagatttaacaataggaacaactgcatgtccaagcgatatagatccttgtaattcatggaatcctactaatatatttgttagaacttacgacaaaaacaaagaatttaaaaagtcatttggttttagaatgaaaacagactctgaaaataaacttactagaaattctggtttttatgaaagaacttcaaaattaactagaaactttgttgatgctagaggcttttggcttccaaatgattacaccaaacatggtttggttaatgagtacaatgcttgcagaaatgatgctgtgttaattgatctatcatcactaagaaagtttgaaataattggtcctgatgctgaggagttaatgaactacactcttacaagaaatataaaaaaactttctgttggacaggttgtgtattcagcaatgtgttacgaaaatggaatgatgttcgatgacggaactcttttaagattaagcgaaacaggttttagatggatatgtggagatgagtatggtggagaatggctaaaagagattgcaaagaaaaagaattttaatgctattgttaaaaactctactgatcaaattagcaatgtgtctttgcaaggtccaaaaagtagagaaattttaaaaaaaattatctttacaccaccaactcagccctcgatagatgagttgggatggtttagatttacaatttgcagaatagaagaacttcaaggtattccattaattgtttctagaacaggttatactggtgaattaggttatgaagtttggtgtcatccaaaacatgctcctgaagtttgggataaattaatggaagcaggtaaagatgatgggttgataccagctgggtttgctgcattagataaactaagaattgaggcgggtttaattttatttggcgctgaatttaatggagagcaagacccttttgaagccggtataggttttgctgttccattgaaaacaaaggaagaagattttattggtaaagaggaattaattaaaagaaaagctaaccctcaaaagaaattagtaggactagaacttaatggaaaagaaatagcagggcacggagactgtgttcatattggaaggtcacaggttggcatagttaccagtggatgcttatcttctacgttgaataaaaatattgctctttgcagaattgatgtccaatactctgaaatcggtactgaagttgaaataggtaaaatcgatggtcatcaaaaaaggattggtgctaaagttgttggttttccattctacgatccaaccaaatcaagagtcagagcttaaa

SEQ ID NO: 228730 - DNA, 385 bp, Unknown
  Bacterial polypeptide expressing nucleotide sequence isolated from the Sargasso Sea
aatgataaataaaaaggatagtagtgatccaattgataatttagagtatgaaaaagttctagaagaagaaataattaattcgtacgaaagtaaatttcaaaaagatactgaagaagatagtaagaagattaaattttacagacttaaaagaactccattagaaatattaaataggtcatttttctttttctttattggaagttttcttttctctttgtttttagcttattcagaaagtaagttatggttcattctttatgtaataagtgcattgtcatgtgttttttatactcctaatagaaaagcacttaaagaattaatagcagcttggccaaatatagaggatctcataaaagggaggagtttgtggagaaaaggcaagtaa

SEQ ID NO: 228731 - DNA, 2338 bp, Unknown
  Bacterial polypeptide expressing nucleotide sequence isolated from the Sargasso Sea
aatgaaaacaagtttcgatattaaagaaccgggtttaaatgtattaccacctggagttgagcgtcatgtaattaatggtggaggactaaccggcttacaaatttttcctgatgatgaaattgaaatcattaatgatgaaggaaatcaagtttgtgaaattgttgtatttgataaagatggaaaatctgatcttggaatattaaatcttaaagaaaattcaaaaaattcagaaataaaaaaaatcttaactagcaaagatgaaagttctttaattgcaaaccatcaacttaaaaaaagaaatttagatattactaagtcaaaatcttcattgatttttagtaaggactcaatttcaggcgataaaataaattttaaatcaaaagataagtgttacgttatttttgccgctccaggggaagatatgttggtacacgaacaaaatcctgtaacagatttaacaatatttattaaaagagcaaatgtaataaatgataaagaattatctgtaattccagatcctgtatacgacccaaagcatgaacagaatattgatagaactacagcaatttcatatgaagtaaaagaaggagactatattcaagttattacaccaactgggagacaatgctctgactttgtggcatttgatactcaaaaattagataaaaaaatagaaaaaggattggactggcaaactactaggacttttatgggtcatacttttccaggaccaggtttattttcgaaattttacgataccgatcaccagccgttagttgaagtaataagagacactgttggaagacatgacacttttaatctagcatgtacctcaaaatattatgaagatgcgggttattttggacatgcaaattgctcagataatttaagtaatgcaatggagcaatacggagttcaaagaaaaaaaggttggcatgcaataaacttattttttaatacttcagcaggcggattaaactcggtgctgtctgatgaatcttttgcaagacctggagattatgttttatttaaagccttaaaagatataactgttggtacttcagcatgtccaagtgatattgatgcatgtaattcatggaatcctacagatatttttgttagaacttatgacggaaaaaaagaatttaaaaaatcttttgcatttagaatgaaaacagattcagaaaaaaaacttaccaaacattctggcttctatgacagaacatcaaaattaactagaaactttgtagatgctagaggtttctggttaccaaacgactatacaaaaagtggactagtaaatgaatataatacttgtagggaaaaagcagttttgattgatctctcggcattaagaaaatttgaaattttaggtcctgatgcagaagaattaatgaattacactctaacaagaaatattaaaaaactttctataggacaagttgtgtactctgctatgtgttatgaaaatggaatgatgtttgatgatggaactttattaaaactcagtgatactggatatagatggatttgtggcgatgagtatggtggagaatggcttaaagaggttgcgaagaaaaaaaaatataaagtaataattaaaaattctacagatcaaataagcaatgtttcaattcaaggtcctaaaagcagaaaaatattaaataaaattatatttactccaccaacacagccaactataaatgaactacagtggtttagatttactatatgcagaatggatgatttaaatggaatacctcttgttatatcgagaactggttatactggagaattaggttatgaagtatggtgtcatcctaaagatgcaccaaaagtatgggacaaattaatggatgcaggaaaagatgatggattgatacctgctggatttgctgcgttagacaagcttagaatagaagcaggcttaattttatttggaaatgaatttgatggccagcaagacccttttgaagccggtataggatttgccgttccattaaaaacaaaagaagacgattttattgggaaaaaagttttagtagaaagaaaaaccaacccacaaaaaaaattagtcggccttgagcttatcgcaaaagagcccgctgcacatggagattgtgttcatgtgggaagagcacaaattggaatagttacaagcgcatgtttttcaacaattttaaataaaaatatagcgctatgtagaattgatcctaagtatgcagaaataggaacagaagtagaagtgggtaaaattgacggacatcaaaaaagaatttcagcaaaagttgttagatttcctttctacgatcctgacaaaactaaagtaagatcttga

SEQ ID NO: 228732 - DNA, 1304 bp, Unknown
  Bacterial polypeptide expressing nucleotide sequence isolated from the Sargasso Sea
tttaaaagatttaacaataggaacaactgcatgtccaagtgatatagatccgtgtaattcatggaatcctactaatatatttgttagaacttatgacaaaaataaagaatttagaaagtcatttggttttagaatgaaaacagactctgaaaataaacttactagaaattctggcttttatgaaagaacttcaaaattaactagaaactttgttgatgctagaggcttttggcttccaaatgattatactaaacatggattagtcaatgagtacaatgcttgcagaaatgatgctgtattaattgatctatcgtctttaagaaagtttgaaataattggtcctgatgctgaagagttaatgaactacactcttacaagaaatataaaaaaactttctgttggacaggttgtatattctgcgatgtgttacgaaaatggaatgatgttcgatgacggaactcttttaagattaagcgaaactggttttagatggatatgcggagatgagtatggtggagaatggttaaaagaaattgcaaagaaaaagaattttaatgctattgttaaaaactctactgatcaaattagcaatgtatctttgcaaggtccaaagagtagagaaattttaaaaaaaattatatttacaccaccaacgcaaccttcgatagatgagttaggctggttcagatttacaatttgcagaatagaagagcttcagggtataccattaattgtttcaagaactggttatacaggtgagttaggttatgagatatggtgtcatccaaaacatgcgcctgaagtttgggataaatttatggaagcgggtaaagatgatggacttattccagctgggttcgcagctttagataagcttagaattgaggcgggtttaattttatttggtgctgagtttgacggtgaacaagatccctttgaagctggtataggttttgctgttcctttgaaaacaaaagaagaagatttcattggcaaagaggaattaattaaaagaaaggcaaaccctcaaaaaaaattagtaggattagaacttgctggcaaagaagcagctggtcatggagactgtgttcatgttggaagatctcaagttggtatagttacaagtggatgtctgtcctctactttaaataaaaatattgcactttgtagaatagacgttcagtactctgagattggtactgatgtagagattgggaaaattgatggtcatcaaaaaagaattagtgcaaaagtagttagttttcctttttatgatccaactaaatcaagagtcaaagcttaag

SEQ ID NO: 228733 - DNA, 946 bp, Unknown
  Bacterial polypeptide expressing nucleotide sequence isolated from the Sargasso Sea
aatgaattatactttaacaagaaatgtaaaaaaactttcagttggtcaagtggtttattcttcaatgtgttacgaaaatggtttcatgtttgatgatggaacattattaaaattgagtgatcatggttttagatgggtatgtggagatgagtatgctggagaatggttaaaagagcaggcaaagaaaaaaaattataaagttttaataaaaaattcaacagatcaaattaataacatctctttacaaggtccaaatagtagaaaaattcttgaaaaatttatatttacgccgccaactcaaccaactatttctgaactgcagtggtttagatttactatatgcagagttgaagatttaaatggtattcctttaattgtttcgagaactggctacactggtgagctgggttatgagatttggtgtcatccaactgatgctcctaaagtatgggataaagttatggaagctggaaaagatgaagggattatacctgctggatttggtgcgctagacttattaagaatagaagcaggattaatattatttggaaatgaatttgatggtcaagtcgatccatttgaagctggtgtaggttttacagttccattaaaaactaaaacagatgattttattggtaaagaaagtttaattaaaagaaaagaaaatcctcaaaaaaaacttgtaggtcttgagcttactggaaaagaaaaagcaaatcatggagattgtgttcatattggtagatctcaagttggtgtaataactagtgggtgtatctctccaactttaaataaaaatattgcactatgtagaatagatattggtcattcagaattagaaactgaagttgaagttgggaaaatagatgggcatcaaaaaagaattcctgcaaaaattgttacttttcctcattacgatccagctaaatctagagtaagatcttaa

SEQ ID NO: 228734 - DNA, 592 bp, Unknown
  Bacterial polypeptide expressing nucleotide sequence isolated from the Sargasso Sea
atgacaggaaacaattttgattatgaaggcgaaaaactttatgtaacgagatccggatatacaggcgaggacggatttgaaatctcaatttctaacaaaaaagttgaaaaatttattgattacctaatatcaaacgaagttaaacctattggattaggtgctagagacacattaaggttagaagctggtctatgtttatatggtcatgacttaaatgaaaaaatcaatccggttgaggctaatttaaaatgggctatagcaaaaaaaagaaaagaagttggtggatttaatggatgggaaaaaataaaaactttattagcaatcggaagtgaaaaaattagagttggtataaaaccagatggaaaagttatagctagagaaaatacaaaaatcttttcttcagataataatgaaataggattcgttactagtggaacttttggcccgagtgtgaacgctccagttgcaatgggatatgttaaatctgaattttctgaaataggcacatctattcagcttgaagtaagaggaaaaaaatatgggggtaaaatttctgaacttccattttataaaaaaagttatgttaaataaa

SEQ ID NO: 228735 - DNA, 3295 bp, Unknown
  Bacterial polypeptide expressing nucleotide sequence isolated from the Sargasso Sea
atgaaacgtatgttaatcaatgcaactcaatcagaagagttgcgtgttgccctggttgacgggcaacaactgtacgatctggatattgaaagtcctggtcacgagcaaaaaaaatccaacatttacaagggtaaaattacccgcgtagaaccttctttagaagccgctttcgttgattatggtgccgagcgccacggctttttaccgctaaaagaaatcgccagagaatacttccctaaaggttattctttccaaggtcgcccaaacatcaaagaagtcgtcagtgaaggacaagaagttattgttcagattgacaaagaagagcgcggcaacaaaggtgcggcactgacgacctttatcagcttagcgggttcttacttagtcttgatgccaaacaaccctcgtgctggcggtatttctcgccgtatcgaaggtgacgagcgcaccgaattaaaagaagccatggccgatttagaagtcccagcgggtatggggcttatcgtacgtaccgcgggtgttggcaaagaatcgactgaactgaagtgggacttaaaagttctacagcaccactgggcagctattaccgaagcggcgcaaagcaaagcggcgcctttcttaattcaccaagaaagtaacgtgattgtacgtgcaattcgtgattatctgcgccgcgatgtgggcgagattttaatcgaccacccacgtatttttgaagaagccaagcagcatatcgcactggtacgccctgatttcgttgagcgcgtaaaactctacgaagccgaagtgccattgttcactcacttccaaatcgagtcgcaaatcgaatcggccttccaacgtgaagtgcgtctgccatcgggcggttcgattgttatcgacccaacggaagcattaacctcaatcgatatcaactctgcccgcgcaactaaaggcggcgatattgaagaaaccgcattaaacaccaaccttgaagccgccgatgagattgcccgtcaattacgtctgcgagacttaggtggtttagtcgttatcgactttatcgatatgacgccagtgcgccatcaacgtgaagttgaaaaccgcctgcgcgatgccgtgcaccacgaccgtgcccgcgtgcaattaggtcgtatttctcgcttcggtctgatggaaatgtcccgtcaacgtctgcgcccttcgttagaagaatcagctgcgcatatctgccctcgctgtcatggccaaggcactattcgtagtaccgaatctttagcgctgtcgattctgcgtttgatggaagaagaagccatcaaagaaaacacctcacaaatcgaagccatagtgcctgtcgatgtagccgccttcctgctgaacgaaaaacgcaaagcgattcgtattaccgaacaacgtcatgatgtggaagtctatgtgatcccagatccgcacatgatgaccccagattatcgcgtcattcgtcaccgcactgacgatgaaatcgatgaatccagctataagcgcatcgaacagcctgaagccaagttatatgagccccgtaaactggaacgcactgctgcgccagcaccagccctaaaaggcttcgctgcaccacagaaagtagaacaagccgccgcaccagctgccaacaaagtggaagcaaccgagccaggtttcttcagcaaactgttcagtgccattggcgccttcttcagctcaagcgataagcctgcggctgaaaagactacagaaaccaaaaagtctgacagccaaacggccaatgcgaaccgtcgtaatcgtcgtaatgacactcgccgtactcgcaataaccaagatgcagacaaagcgaaagaaggcacccgtgagccacgcacccgcaatgccaagaagtcggctgatgcacctcaggctcaggagcgtccagctcgtgaaaaagacgagaatgcaaaacgcactaagccagagcctaagagccgtaaccaagcaccaaaagaagtggtcgcggagtctcaagacgacacgccaaagcaagaagtggcccgtgagcgtcgtcagcgccgtaacatgcgtcgtaaagtacgcatcgataacgccaatgacaccactgaagcgccaattcaagaagaagtggtattagccgaagtggccgctgttaatgctgccaatactgacgttgcaactgaaccacaagctgaaaccaaagcaccgcgctcacgtcgccaaccacgcaaagaagctgcggttgccaacgagacagcagaagcgactgatacagtaagccaagctgaagcaagtgctgaagtggctgtagaagcacctgtagtagaaaaccgtgctgatgcgcctgctgacgtaacagaaagcgttaagactgaagccgagaccgatgcggataacgcagacgtcagcgccgatgcagatgataaagcgaaacgtgaatctcgcgatggacaacgtcgtagtcgccgcagcccacgtcatttgagagcagctggtcaacgtcgtcgccgtgatgaagatgagcaaggcgcctctgcacctgcgcaattcgtaccaaacgacgcactcggtgacgatcaagactaccctgctccaagcgctcaaacggcagaagcacctgagaccactgaagcaaaagcaattgcagttgtggctgaaccgactgtgacttctccagcaactgtagtcgaagcggcagatgtcagtgtggttgcagaaaccaccgccaataacgctgttgagactgaagttgttgaggctgtcgctaccgagcaagtggctgagattaaagccgaggttgctgcaacagaagctccagctgacactgcggtaaacaacaaggctgagacaagcgttaaaactgaagaagttgctgttgagccagtgaaaactgtagaagcggtaacggaagccgttgtggccccagccgaaactccagctcaacccaaagctgaagcaaaggccgttgcggttgaagccgtaacgcctgaagcagaccaagccgaagcaaaagaagccgtaaaatctgtggcctctgcgccaatggcaaaacccgctcctatcgttaaaccacaggcaaaacctgttgtgactcaagccgcagcagcgtctacagcagaagctgtggtgagcaaacccaaagcggcgagtcgttttggttctatggtgtcatcagaaatgaccaagccaacggtagaagttagagctcaggttgaagtaccaaaaggtcgcgagtatgacagtgtcgcctccgccgaagcggctgcgcctaaactgaaacacagcaacagcgccgaatcggatatggctcgtccataat

SEQ ID NO: 228736 - DNA, 1973 bp, Unknown
  Bacterial polypeptide expressing nucleotide sequence isolated from the Sargasso Sea
aatgttaggcacaagcaaagatatcaaatatcctggtttgaatattttaccacctggagttgaaagacatgttgttaatggtggtggtctaactggttttcaaatttttcctgatgatgaagtagaaataatcaataatgaaggaaatcaaatatgtgagattatttgttttggaaaagatggaaattcagatcttggaattttaaatcttaaatcaaacaatgaaaaaaactttataagaaatattcttaatgggaatgatgaaacaattttagcgacaaactatcaattaaaaaaaagaaatttaaaaatttctaattcaaaatcatcaattatatttgatctagacgcagaacctggcgaaaaaattaaattaaaatcaaaagataaatgttacgcaatattttcagcacctggcgaagatatggatgttacaaaacaaaatccaccaactgatttaacaatatttgttaaaagagctaaaattgttaatgataaggaattaaatgtaattcctgatcctgttttcgaaccagtttacgaagaaaatataaataaagaaacttcaatatcttatgaggttaaagaaggagattatattcaggtgataagtccaactggcagacaatgttctgactttgtggctttcgatacaagaaaattagaaaaaggaattgaaaaaggattagactggcaaaccacgagaacattcatgggtaatactttcccaggaccaggtttgttctctaaattttatgatacagatcatgagccacttgttgaagtaataagagatacggttggtaaacacgatacttttaatcttgcatgtacttcaaaatattatgaagatgcggggtactttggtcacccaaactgttcggataatttaactgaaagtatgtcgaaatatggtgttcagaaacaaaaaggttggcatgcaattaatttattttttaacacctctgctggaggattaaattctgttatctctgatgaatcttattcaagacctggtgactatgtaatgtttaaggctttaaaagatttaacaataggaacaactgcatgtccaagtgatatagatccgtgtaattcatggaatcctactaatatatttgttagaacttacgataaaaataaagaatttagaaagtcatttggttttagaatgaaaacagactctgaaaataaacttactagaaattctggcttttatgagagaacttcaaaattaactagaaattttgttgatgctagaggcttttggcttccaaatgattacactaaacatggattagttaatgagtacaacgcttgcagaaatgatgctgtattaattgatctatcatcactaagaaaatttgaaataattggtcctgatgctgaagagttaatgaactacactcttacaaggaatataaaaaaactttctgttggacaggttgtgtattccgcaatgtgttacgaaaatggaatgatgtttgatgatggaactcttttgagattaagcgaaacaggttttaggtggatatgtggagatgagtatggtggtgaatggcttaaagaaattgtaaagaaaaagaattttaatgctattgttaaaaactctactgaccaaattagcaatgtatctttgcaaggtcctaaaagtagaggaattttaaaaaaaatcatctttacaccaccaacacagccttcgatagatgagttgggctggttcagatttacaatatgcagaatagaagaacttcaaggtataccattaattgtttcaagaactggttatactggtgagttaggttatgagatatggtgtcacccaaaacatgcgccagaagtttgggataaattaatggaagcaggtaaagatgatcggctcattccagctgggtttgcagctttagataaacttagaattgaggcaggtttaattttatttggtgctgagtttgatggtgaacaagatccct

SEQ ID NO: 228737 - DNA, 1441 bp, Unknown
  Bacterial polypeptide expressing nucleotide sequence isolated from the Sargasso Sea
atgtcgaaatttggtgtgcagaaacaaaaaggttggcatgcaattaatttattttttaacacctctgctggaggattgaattctgttatttctgatgaatcttattcaaggcctggtgattatgtaatgtttaaggctttaaaagatttaacaataggaacgactgcatgtccaagtgatatagatccgtgtaattcatggaatcctactaatatatttgttagaacttatgacaaaaataaggaatttagaaagtcatttggttttagaatgaaaacagactctgaaaataaacttactagaaattctggcttttatgaaagaacttcaaaattaactagaaactttgttgatgctagaggcttttggcttccaaatgattacactaaacatggattggtaaatgagtacaatgcatgcagaaatgatgctgtattaattgatctatcatcactaagaaaatttgaaataattggtcctgattctgaagagttaatgaactatactcttacaagaaatataaaaaaactttctgttggacaggttgtgtattccgcaatgtgttacgaaaatggaatgatgtttgatgatggaactcttttaaaattaagcgaaacaggttttaggtggatatgtggagatgagtatggtggtgaatggcttaaagaaattgcaaaaaaaaagaattttaatgctattgttaaaaactctactgaccaaattagtaatgtatctttgcaaggtcctaaaagtagagaaattttaaaaaaaataatctttacaccaccaacacagccttcgatagatgagttgggctggtttagatttacaatttgtagaatagaagaactccaaggtataccattaattgtttcaagaactggttatactggtgaattaggttacgagatatggtgtcatccaaaacatgcgacagaagtttgggataaattaatggaagcgggtaaagatgatggacttattccagctgggtttgcagctctagataaacttagaattgaagcaggtttaattttatttggtgctgagtttgacggtgaacaagatccctttgaagctggcataggttttgctgttccattgaaaacaaaagaggaagatttcattggtaaagaggaattagtaaaaagaaaggcaaaccctcaaaaaaaattagtaggattggaacttgctggcaaagaaatagctagtcatggagactgtgttcatataggcagatctcaaattggtatagttacaagtggatgcttgtcctctactttaaataaaaatattgcactttgtagaatagacgttcaatactctgagatcggtactgatgtagagattggtaaaattgatggtcatcaaaaaagaattggtgcaaaagtagttggttttcctttttatgatccaactaaatcgagagtcaaagcttaat

SEQ ID NO: 228738 - DNA, 1066 bp, Unknown
  Bacterial polypeptide expressing nucleotide sequence isolated from the Sargasso Sea
aaatgattatacaaaacatggtgtaattaatgaatacaatgcatgcagagaagacgccgtcttaattgacttatcttcattgagaaaatttgaaattcttgggccagatgcagaagaattaatgaattatacattgacacgaaatgtaaaaaaactttcagttggtcaggttgtttattcagcaatgtgttatgaaaatggaaccatgtttgatgatggtactttattaaaacttagtgatcatggttttagatgggtttgtggtgatgaatatggaggtgagtggcttaaagaacaagcgaagaaaaaaaattataaagttcatatcaaaaattctactgaccaaataaataatttatcattacaaggtcccaaaagtagaaaaattctagaaaaaataatttttactccacctacccaaccttctatatctgaattggaatggtttagatttacaatttgtcgattggaagaattaaacggaataccattaattgtttcaagaacaggttatactggtgaacttggttttgaaatttggtgtcatccaagtgatgctcctaccgtttgggataaggtaatgaaggcaggacaagatgaaggtttgataccagcaggatttgcagctttagatcttttaagaattgaagctggtttaattttatttggtaatgagtttgacggacaacaagatccatttgaagctggcattgggttttctgttcctttaaaatctaaagtagaagattttattggaagagaaaatttaattaaaagaaaagaaaaccctcaaaaaaaactagtaggattagagctgattggtaaagagatagcaaatcatggagattgtgttcatattggaagatctcaggttggtattataacaagcggatgtatttcaccgactttaaataaaaatattgctttatgcagaattgatgttggtcattctgaaataggtaatgatgtagaagttggtaaaatagatgggcatcaaaaaagaatacctgcaaaaattgttggatttccacattacgatcctaagaaaactaaagttagatcataa

SEQ ID NO: 228739 - DNA, 2143 bp, Unknown
  Bacterial polypeptide expressing nucleotide sequence isolated from the Sargasso Sea
tatgaaaactagtttcgacataattgaaccaggtttaaatgttttgccacctggggttgagcgtcatgtagttaatggaggtggtctaactggtttacaaatttttccagatgatgagattgaaataattaatgatgaaggaaatcaaatttgtgaaattgttgtatttgataaagatggtaaatccgatcctggcattttaaatctaaaagaaaatactaaaaattcagaaataaaaaaaattcttagtagtaaagatgaaagttcgttagttgcatcttatcaattaaaaaaaagaaattttgatgttttaaaatcaaaatcatctttagtttttagtaaagattctgtttcaggagataaaattaattttaaatcaaaagataaatgttatgtaatttttgccgcacctggaaaagatatgttggtgcacgaacaaaatccttcaacagatttaacattgtttattaaaagatcaaaaattgtaaatgataaagaattatcagttatccctgatccagtatttgatcctaaatatgaaaaaaatattgatcgtgctactgcaatttctttccaggtaaaagaaggtgattatattcaagttattaccccaacaggaagacagtgctcagactttgtagcatttgatacacaaaaattagataaaagaattgagaaaggactagattggcaaactacacgaacttttatgggacaaacttttcctggacctgggctattttctaaattttatgacacagatcatgagcctttagttgaagttatcagagatactgttggaagacatgatacttttaatttagcttgcacttctaaatattatgaagatgctggttattttggtcatccaaattgttcggacaatttaagcaatacaatggaaaaatacggcttagaaagaaaaaaaggatggcatgccattaacttatttttcaatacttctgcaggtggtttaaactcagtactctcggatgagtcatttgctagacctggcgattatgttttgtttaaagctttaaaagacattacttgcggcacttccgcttgtccaagtgatatagacgcatgtaattcatggaatccaaccgatatttttgttagaacttacgataaaaaaaaggaatttaaaaaatcttttgcatttagaatgaagacagactctgaaaaaaaattaacaaaaaattcaggtttctacgaaagaacatctaaactaactagaaattttattgatgctagaggtttttggctaccaaacgattatactaagcatggtttagtaaacgaatacaatgcttgtagagataaagctgttttaattgatttatcttctttaagaaaatttgaaattttaggtcctgatgcagaagaattaatgaactatacgttaacaagaaatgtaaaaaaattatcagttggacaagtggcttattctgctatgtgctatgaaaacggtcaaatgtttgatgatggtacaatttttaaacttagcgaccatggatttagatggatttgtggggatgaatatggtggagagtggttaaaagaaataggaaagaaaaaaaattataaagttgttataaaaaattcgacagatcaaattagtaatgtttcaatacaaggtccaaatagtagaaaaattttaaataaaataatttttactccaccaacccaaccatctattgatgagcttcagtggtttagatttacaatatgtagagtcgaagacttacagggaattcctctagtaatttcaagaactggttatactggagaattaggatatgaagtttggtgtcatcctaaagatgctccaaaagtttgggacaaattaatggatgctggaaaaaatgatggattaattccagctggatttgcagctttagataaacttagaatagaggctggtttaattttatttggaaatgaatttgatgggcaacaagatcctttcgaagcaggtataggtttttctgttcctttaaaaaccaaagaagacgattttattggaaaaaaagttttaattgaaagaaaagccaatccacaaaaaaaattagttggtctagaactaattgcaaaggaacctgcgggacatggtgattgtgttcatattggcagatcgcaa

SEQ ID NO: 228740 - DNA, 2338 bp, Unknown
  Bacterial polypeptide expressing nucleotide sequence isolated from the Sargasso Sea
atgcctactagtttagacataagagaaccaggattaaatactctaccacttggagttgaaagacatgtagttaatggtggaggacttactggcgttcaaatttttccagatgatgaaattgaaattgtaaacgatgaaggtaatcaaatttgcgaaattttagtttttaataaagatggaaaatctgaattatcaattttaaatttaaaagaaaataaagactcctcagaaataaataaaatactttcaaaaaaagatgaaagttcgtttattgccttataccaattaaaaaaaagaaatttggatgtaaaaaaatctaagtccgctgtagtttttgataaagattctacttctggagaaaagataaaactagtttctaaagataagtgttattgtattttttcagcacctggtactgatatgttaattcatgaacaaaatccttctacaagcttaactgtttttgtaaaaagagcaaatatagttaatgataaagaacattcaataattcctgaccctatgtttgatcctctaaatgaaacaaacatagataagaaaactgcaatttcttttgaagttaaagaaggagattatattcaaattatttgtcctacaggaagacaatgttcggacttcgtggcttttgatacatcaaaattaagtaaaggaattgaaaaaggtttggattggcaaactacaagaacttttatgggaaatacttttcctggacctggattattttctaaattttatgatactgaccatgaaccattagtagaagttataagagatactgttggaagacatgatacatttaatctagcatgtacttcaaaatattatgaagatgctggatattttggtcatccaaattgctcagataatttaagcaattctatgggaaaatttggtgttgaaaagaaaaaaggatggcatgcaataaatcttttttttaatacatctgctggaggacaaaactctcttttctctgatgaatcttttgctagacctggtgattatgtaattatgagagctttaaaagatttaacttgtggaacttctgcatgtcctagtgatattgacccatgtaattcgtggaatccaacaaatatttttgttagaacttacgataaaaaaaaagaatttacaaaatcttttgcatttagaatgaaagcagactctgaaactaaactaactaagaacaccggtttctatgaaagaacatctaaacttactagaaactttattgatgcaagaggatattggttaccaaatgattacactaaacatggagtaattaatgaatatacagcttgtagagaaaaagcagttgtaattgatttatcttctttaagaaaatttgaaattcttggcccagactctgaagaattaatgaattacacattaactagaaatataaaaaaactttctgtgggacaaatagtttattcttcaatgtgctatgaaaatggaaccatgtttgacgatggaacattattaaaaatgagcgatcatggttttagatgggtttgtggagacgaatatgctggagaatggctaaaggagcaagctaagaaaaaaaattacaaagtattaattaaaaattcaacagatcaaattaataatatttcattacaaggaccaaatagtagaaaaatacttgaaaaatttatttttacatcgccagctcaaccaactatctctgaattagaatggttcagatttacaatttgtagagttaaggatttaaatggaattccactaatggtttctagaacaggttacactggtgaattaggttatgaaatttggtgccatccatcagacgcccctaaagtatgggacgaagttatggaagctggtaaaaatgaaggtttaatacctgcaggttttggagcactagatttgttaagaattgaagctggattgattttatttggaaatgaatttgatgggcaagttgatcctttcgaagctggagtaggatttacagttcctttaaaaacaaaaaccgatgattttataggaaaggaaagtttgattaaaagaaaagaaaatccgcaaaaaaaattagttggtcttgaattaataagcaaagaaaaagctaatcatggtgactgtgttcatattggtagatctcaagtaggtgttataactagtggctgtatatcaccaacacttagtaaaaatatagcattatgcagaatagatatatctcattctgaaataggaacagaagttgaggttggaaaaattgatggtgagcaaaaaagaattgcagcaaaaatagttggttttccccattatgatcctaaaaaaactagggttagatcataaa

SEQ ID NO: 228741 - DNA, 2341 bp, Unknown
  Bacterial polypeptide expressing nucleotide sequence isolated from the Sargasso Sea
atgttaggaactagtaaagaaataaaatatccaggactaaatattttaccaccaggagttgaaagacatattgtaaatggtggtggccttactgctttttatatttttcctgatgatgaaatagagattattaataacgatggaaatcaaatttgtgaaattatatgtttcaataaagatggaaaatcagatgtaggtattttaaaccttaaaagtaacaataataaaaattttattagagatatcttaagtaaaaaagatgagagtattctagcaaccaattatcaacttaaaaaactaaatttaaatatttcaaattcaaaatcctcaatcgtatttgatattgatagtcaaattggcgaaaaaattaaattaaagtctaaagataattgttttgcaatatttgcagctcctggacaagacatggatgttacaaagcaaaatcctcctacagatttaattatttatattaaaagagcaaatattattgatgacaaagaattaaatgttattccaaaccctgtctttgaaccatcgcacgaggagaatataaaaaaagcaagtagtatatcttatgaagttaaagaaggtgactacatccaagtgataagtccaactggaagacaatgttcagactttgtggcatttgacacaaagaaattagaaaaaggaattgagaaaggtttagattggcaaacaactagaactttcatgggaaatacatttccaggtccaggattattttctaaattttatgatactgaccatgagcctttggtagaagtaattagagataccgttggtaaacatgatacgtttaatcttgcctgtacttcaaagtactatgaggatgctggttattttggccatgcaaattgctcagataatcttacagaaagtatgtctaagtatggtcttcaaaaacaaaaaggctggcacgcaatcaatttattttttaatacctctgaaggtggtttaaactcagtcatttccgatgaatcttattctcgtcctggagattatgtcatgtttagagcgttaaaagatttaactattggcacaacagcgtgtccaagtgatatagatccttgtaattcatggaatccaactaatatttttgttagaacatatgacaaaaaaaaagaatttactaaatcatttgcatttaggatgaaaacagactctgaaaaaaaactcacaagaaattctggcttttatgaaagaacatccaggctaactagaaattttatagatgccagaggtttttggcttccaaatgattacacaaaacatgggcttgttaatgagtacaacgcttgcagaaatgatgcggttttaattgacttatcctcgttaagaaaatttgaaattattggccctgatgcagaagagttattaaattatacacttacaagaaacattaaaaaattatcggtaggtcaagttgtgtattctgcgatgtgctacgaaaatggaatgatgtttgatgatggtactcttttacgattaagtgagactggttttagatggatttgtggagatgaatatggcggcgaatggttaaaagaaattgcaaaaaagaaaaattttaatgcaaacattaaaaattcaacagaccaaataagtaacgtttcattacaaggaccaaaaagtcgggaaattttaaaaaagataatttttacacctccaactcaaccttccatagatgaacttggttggtttagatttagcatttgtagaatagaagagttgcaaggaataccattgattgtttctagaactggttatactggtgagttaggttatgaaatttggtgtcaccctaaacatgctcctgaagtctgggataaattaatggaagcaggaaaagaagatggtttgattcctgcaggatttggagctttagacaaacttagaattgaagcaggattaattttatttggtaatgagtttgatggtcaacaagatccttttgaagcaggaattggttttgctgttcctttgaaaacaaaagaagaggattttattggtaaagaagaattaataaaaagaaaaaataaccctcaaaaaaaacttgttgggttggaattagctggtaaagaaattgctggtcatggtgactgtgttcatattggaagatctcaagttggtgtggttacaagtggatgcctatcatcaactttaaataaaaatatagcattgtgtagaattgatatgcagtattcagagattgggactgaggttgaagttggtaaaattgatggtcatcaaaaaagaatagctgccaaagtagttgcctttcctttttatgacccaactaagtctagagtaagatcataaa

SEQ ID NO: 228742 - DNA, 454 bp, Unknown
  Bacterial polypeptide expressing nucleotide sequence isolated from the Sargasso Sea
atgaaaaaaacgcctctgtacaatcttcatcaaaaacatggtgcaaaatttgtgcaatttgctggttatgaaatgccaattcaatatgaaactggcatagtaaaagaacatataaccactagaaataattcaggaatatttgatgtatctcacatgggtcaattatttttaaaaggcggcgatgaattaacaaatgatttacagaaaatattcccaattgatttagcaaaaatttcaataaaccaaagcaagtattcttttttgatgaaagataatggtggaatatatgatgatctaataattacaaaattaaaagatggttacatgataatattaaatgctgcttgtaaagaggcagatctaaatattttaaaaagtaaaattggtgaaaaatatcaaattaatttatcagataacttatctttaatagcaatacagggacctaaagcaaaag

SEQ ID NO: 228743 - DNA, 266 bp, Unknown
  Bacterial polypeptide expressing nucleotide sequence isolated from the Sargasso Sea
gatgagtgattataaaaaaactatattatacgactctcataaaactttgaaagctaaattagttcctttttcaggattttggatgccacttcagtattctagtatcgttaaagaacatcaccatgttagacagaaatgtggaatttttgatgttagtcatatgggtgaatttatagtctcaggacaaaatgcagaaaaattcttacaaatggtcactactaacgatgttacagtactcaagccaagaaaagtacagtattctgctt

SEQ ID NO: 228744 - DNA, 1813 bp, Unknown
  Bacterial polypeptide expressing nucleotide sequence isolated from the Sargasso Sea
tatgcaaacaagtttaaacataaaagaacctggcttaaatgtatttccacttggagttgaaagatatgtagtaaatggtggaggactaactggtgttcaaattcttcctgatgatgaaattgaaattattaacgatgaaggaaatcaaatttgcgaaattacagtttttaacaaagatggaaaatctgagttaggaattctaaatttaaaagaaagtaaaaatagctctgaaataaaaaaaattttatttaacaaaaacgaaacatctttacaggctctctatcaattaaaaaaaagaaacctagatatagaaaaatctaaatcagcaattctttttaataaagatacagttgctaaagaaactataaaattaaaatctaaagacaaatgttattgcataatttctgcaccaggaaatgcaatgttagtacatgaacaaaacccatcaactgatttaactgttttagttaaaagagctgaaaaaaagcaagataaagaattctcggtaattcctgatcctgtatatgatccatctggagaaatagatattaaaagaacaactgctgatgcttatcaagttaaagaaggagattatatacaagtaattacacctacaggaaggcagtgctcagattttgtagcttttgatactgctaaattagataaaggacaagaaaacggtttggactggcaaacaacaagaactttcatgggtcatacttttcctggacctggtttattctcaaaattttatgatattgaccatgagcctttaattgaagttataagagatacggttggtattcatgatactttcaatttagcttgtacatctaaatactatgaagatgctggatattttgggcacgctaattgttcagataatctaaatgaaagtatggaaaaatatggtgttcaaaaaaaaagaggttggcatgcaataaacttatttttcaacacatctgcaggtggtcaaaactctgtgttgtctgatgagtcttatgcaagaccaggtgactatgtaatatttagagcactaaaagatttaacttgcggaacaacagcttgtcctagtgatatcgatagctgtaatggttggaatccaactgatatttttgttagaacttatgacaaaaaaaaagaattcacaaaatcatttggttttagaatgaaaacagactctgaaaataaacttacaagaaatactggtttttatgaaagaacttcaaagttaactagaaactatgttgatgcaagaggtttttggttgccaaatgattacacaaaacatggagtaataaatgaatacactgcttgtagagaaaaagcagttgttattgatttatcttctttgagaaagtttgaaatcattggacctgatgcggaagagttaatgaattatacattaacacgtaatgtaaaaaaattgtcagtcggtcaaattgtttactctgcaatgtgttatgaaaatggaatgatgtttgatgatggaaccttattaagattaagtgaaacaggatttagatgggtttgcggtgatgaatacgctggagaatggttaaaagaacaagctaagaaaaaaaattacaaagtaataattaaaaattctacagatcaaattaataatatttcattgcaaggaccaaacagtagaaaaattttggaaaaatttatttttacaccacccacacaaccaactatttctgaacttcaatggttcagatttactatttgtagagcagatgatttaaaaggaattccattaattgtttcaagaacaggttacactggtgaacttggatttgagatttgg

SEQ ID NO: 228745 - DNA, 873 bp, Unknown
  Bacterial polypeptide expressing nucleotide sequence isolated from the Sargasso Sea
cacatggtggaatgatggacgacgggaccttgctgagacttggaccagataatttccgctggattggtggagatgactatggaggtatttggctaagggaacaggcccaaaagcttggattaaaagtttgggtaaaatcttcaacagatcaaattcataatatagcagtgcagggtccaaagagcagagaaattcttaaggaagttgtctggacgccacccactcagccaaagttggaagagattacatggttccgattcaccgttgggagaattggtgatatgaacggaattccgataatgatttctagaactggctatactggagaacttggttatgaagtctggtgtcatcccaaagatgcacctgaagtttgggatgctgtttttgaagctggtcaggtacatgaaattatgccgctcggactggacgctttggaccttctgcgaatagaatcaggtcttgtatttgctggatatgaattcagtgacgagacagatccgtttgaagcaggtgtgggtttcactgtacctctgaaaactaaggaagatgattttgtaggtagggaagttcttatcaaccggaaggcaaatcctcagcgaaagttggttgggcttgagcttgaaggaaatgagcctgcttctcatggtgactgtgttaatgtcgggcggggccaggttggagttattaccagtggaatgcgatcccccattcttcgtaagaacattgcgctctgcaggatagacgtaacaaattcagaaattggaacagaggttcaggtaggcaagcttgacggtcaccagaaacggattcctgctgtggttgtgccttttccattttatgacccggaaaaacttaaacctcgttcttgac

SEQ ID NO: 228746 - DNA, 1066 bp, Unknown
  Bacterial polypeptide expressing nucleotide sequence isolated from the Sargasso Sea
tttggaacctcttgtagaggtagttcaagacacaattggtaggcatgatacttttggcacagcttgcactagaaaattatatgaagatcaaggttactttggtcatataaattgctcagataactttaattatgccttggataaatatggagttgaaaaacgaaatggttgggcggcaattaacttattttttaatacaggcattgatgcaaacaatgtaatattctctgatatgccatggtcaagacctggtgactatgtattatttaaagcacaaaaagatttagtatgtgtttcctcctcatgcccagatgatattgatactgcaaatgactggaacccaacagatatatacgttagagtttattctgaaaaaaatagttttgcaaaatcaattggatatagaaaaaatgcaagtagtgattttatgttaactaaagaaactggcttccatccacgtacatcaaaattaacaaatgatatgatggactcatcgggcttttggataccaaataagtttaataattatggtacaatcaaagaatatacagaatgtagaaataatgtagtaatcatggatctatcttctcttagaaaatttgaaattctgggtcctgatgctgaagaattaatgaatgttgcacttacaagaaacgttaaaaaactttctataggtcaagttgtatattcagcaatgtgctatgaaaatggaacaatgattgatgatggaactctatataagatgggtgaaaataattttagatggatttgtggaaatgattattcaggtgaatggttaaataaattaagtgaagaattaaaacttcatgcaaatattaaatcttcaacagatcaacttcacaatatatcaattcaaggtccaaacagtaggaaagttttatcaaaaattatatggacttcacctgctcatcctgatgtaaacaatttagattggtttaattttactattagtagaattagtgactcttctggtatacctattatgttatcacgcacaggctatacaggtgaacttggttttgaaatatattgtcaccccagatga

SEQ ID NO: 228747 - DNA, 561 bp, Unknown
  Bacterial polypeptide expressing nucleotide sequence isolated from the Sargasso Sea
aatgctaaaaacaatttttcatcagaatcatgtagataatagtgcaaaaatggtagattttgcaggttgggacatgccaattaattaccctacagggataattaaggaagcaaattttgttaggcaggattcagggttttttgatgtttctcatatggggagagtcgaaatatttggaaaagacagagaatcatttatagaaaaaatattaccaataaaccttgaatcattagatattggttctgcaaaatacactcttttgattgatgaaaatcaaaagatccttgatgacctaattgtttataaatattctgatcattttttacttattatcaatgcttcaaatactaaaaaggacttagactggataaactctcaaataactggtgatactaaaatcaaaaatgttacttctgaaacaggaatgttagcgattcagggtccaaatgtattagaaaagcttcagacattatcaagttcatttaatgaagttggtagatataaatttaagaatatatctattgaagataatatgatttttgttgcaagaacaggttatac

SEQ ID NO: 228748 - DNA, 2341 bp, Unknown
  Bacterial polypeptide expressing nucleotide sequence isolated from the Sargasso Sea
aatgttagaagaaaatttaagaataaatgaacctggtttaaatgttttgccacctggggttgaaagatatgtagttaatggcggtggattaacaggagttcaggtttttccggatgatgaaattgaaattattaataatgaaggaaatcaaatttgtgaaatagttgtttttaattctgatggaaattcagatccatcaattttaaatttaaaatcatctaaatcagaaaatgatataattaaaattttaaatagaaatgaagaaagttcgaaaattgctttgcgccaattagaaaaaagaaatcttaaaattgcaaaatctaaatcttcaatcctttttgataaagacactccaccaggagaaaaaattaaaataagttcaaaagataaatgttattgcattttttctgcacctggtaatgatatgttggttcatgaacaaaatcctcctacagaattaactttatttattaaaagaaataatattgttgactataaagaacatagaataattccagatccaatttttgatcctctagatgaaaaaaatattgcaaaacaatctgcgatttcttttgaagttaaagaaggagattatattcaaataatttgtccaactggtagacaatgttcagattttgttgcttttgatacagctaaattgggtaaaggtattgagaaaggtttagattggcaaacaactaggacctttatgggaaatacatttccaggaccaggattgtattcaaaattttatgatacagaccatgaacctttggtagaagtaataagagatactgttggtagacatgatacttttaatcttgcttgtacatcgaagtattacgaagatgctggttattttggacatccaaattgctcagataacttaagtggtgctatggaaaattttggggttaatagacaaaaaggatggcacgctataaatttattttttaatacttcagcaggaggtttaaatactgtactttctgatgagtcgtttgctagacctggagattatgtaatattaagagctttaaaagatttaacctgcggaacatcagcctgtccaagtgatatagatccatgtaattcatggaaccctacagatatttttgttagaacttatgaaaaaaaaagagaatttacaaaatcttttgcatttagaatgaaaccagactcagaattaaaactaacaaaaaatacaggatttcatgaaagaacttctaagttaacaagaaactttgttgatgctagaggatattggctgcccaatgattacactaaacacggagtaataaatgaatatacagcgtgtagagaaaaagcagttttaattgatttatcttctttaagaaaatttgaaatattaggtccggatgcagaagaattaatggactatactttaactagaaatgttaaaaaattgtcagttggacaaattgtttattcttcgatgtgttatgaaaatggttctatgtttgatgatggaacattgttaaaaatgagtgatcatggatttagatgggtatgtggtgatgaatacgcaggtgaatggttaaaagaacaagcaaaaaagaaaaaatttaatgttttagttaaaaactctactgatcaaataaataatatttctctacaaggaccaaacagtagaaaaattttagaaaagtttatttttactccaccaacacaaccttctatttcagaattacaatggtttaggtttacaatctgtagagtaaaagaacttagtggaattccattaatggtttctagaactggatacacaggcgagttaggatacgaaatatggtgtcacccttcagatgcaccagcagtttgggatgtgcttatggaagctggcaaagatgaaggaataatacctgctggttttggagcattagatttattaagaattgaagctggactaatattatttggtaatgaatttgacggccaagttgacccttttgaagctggtgttggatttacggttcctttaaaaacaaaaacagcagatttcattggtaaagaagcattaataaagagaaaagaaaatccgcaaaagaaattagttggattagaacttgtaggcaaagaaaaagctaatcacggtgattgcgttcacattggaagatcccaagttggcgtagttacaagcggatgtctatctcctactttgaataaaaatattgctttgtgcagaattgatgtaggtcattcagaaataggtatgaacgttgaagtcggtaaaattgatggacatcaaaaaagaatacctgctaaagttgttggtttcccgcattacgatcctcaaaaaacacgtgtaaaatcttaa

SEQ ID NO: 228749 - DNA, 1417 bp, Unknown
  Bacterial polypeptide expressing nucleotide sequence isolated from the Sargasso Sea
tcaaaatccaccttcggatttgactgtattagttaaaagagcaaatattaaaaattctgaaaaagaattttcaataatccctgatccaatttacgatcctgactatgaagttaatatagatagaaaaactgcaacaggatatcaagttaaggctggggactatatccaaataattacaccaactggaagacaatgttcagatttcgttgcttatgacacagctaaattagaaaaaggcaaagagagaggtcttgattggcaaacaactagaacttttatgggaaatacttttcctggtcctggtttattttcaaaattttatgatactgatcacgagccactggtagaagttataagagatactgtaggtatacatgacacatttaatttagcatgtacttcaaagtattatgaagattctggatattttggtcatgcaaattgctctgacaatttaaatgattcaatgaaaaaatatggtgtagaagaaaaaaaaggttggcatgcaattaatcttttttttaatacatcttcgggaggtcaaaattctgttacatcagatgaatcttatgcaagacctggagattacgtcatttttaaagccttaaaagatttaacatgcggaacaactgcatgccctagtgatattgatagctgtaatggatggaaccctactgatatttttgttagaacttatgaaaaaagtaaagaatttactaaatcgtatggttttagaatgaaaacagattcagaaaataaactaacaagaaatactggtttttatgaaagaacatcaaaattaactagaaactttgttgatgctagaggtttttggctaccaaatgattatacaaaacatggggtaattaatgaatacaatgcatgcagagaagacgccgtcctaattgacttatcttcattgagaaaatttgaaattcttgggccagatgctgaagaattaatgaattatacattaacacgaaatgtaaaaaaactttcagttggtcagattgtttattcagcaatgtgttatgaaaatggaaccatgtttgatgatggtacgctattaaaacttagtgatcatggttttagatgggtttgtggtgatgaatatggaggtgagtggcttaaagaacaagcaaagaaaaaaaaatacaaagttcatatcaaaaattctactgaccaaataaataatttatctttacaaggtccaaaaagtagaaaaattctagaaaaaataatttttaccccacctacccaaccttctatatctgaattggaatggtttagatttacaatttgtcgattggaagaattaaacggaataccattaattgtttcaagaacaggttatactggtgaacttggttttgaaatttggtgtcatccaagtgatgctcctaaggtttgggacaag

SEQ ID NO: 228750 - DNA, 760 bp, Unknown
  Bacterial polypeptide expressing nucleotide sequence isolated from the Sargasso Sea
atggattcaaaaaatgtaattgcagcaatttcattgagtgcagctgtaataattttatactctcttttctttgcaccaagtccgcaggaacttaataaaataaataaagataacgttaaaaatgaattaagttctgaaactcctatgcttgaggaaaataataagttaactgaagtatcaaggatagatgctttaaatttaaataaaagatttagtttcaaaaataaacagatgacagggtcaatatcattaataggtggagtgattgacgatttaacttttgaaaactacacgcagactcttaatggaaacgataaaattgtattattaaatccaaaacaagttaaaaacggttactttgttgagacaggatgggtaacaaataataaaaatatagatattcctaattccaaaacagagtggagtattagtggtaataataaacttacaccaaataatcctgttacattggtatggaaaaataatcaaaatttagaatttcaaaaaactttcaatattgatgataattttctatttaatgttgaccaaaaaatcattaataaatctgaaaaaatatttaatttctatccgtatggacaaatcataagaaatgaagctccagaagtaacaaatttttatatcctgcatgaaggacttataggtgtttttgatgaagaacttgttgaagaggattacgatgatattgtagataaaaaattttcacagaaatgcagatcaaggttggtttggaattactgat

SEQ ID NO: 228751 - DNA, 2104 bp, Unknown
  Bacterial polypeptide expressing nucleotide sequence isolated from the Sargasso Sea
tatgcctacaagcttagacataaaagaaccaggattaaatgttttaccacttggagttgagcgtcatattgttaatggtggtggacttactggtattcaaatttttcccgatgatgagatagaaattataaatgatgaaggtaatcaaatttgtgaaatttcagtatttaataaagaaggtaaatctgaattatcaattttaaacttaaaagaaaatagaaactcttctgaaataaaaaaaatactttcaaaaaaagatgaaagttcattaattgcatcttatcaattaaaaaaaagaaatttagatattaataaatcaaagtctgcaatagtttttgataaagatgctactttaggagaaaaggtaaaactcgtttcaaatgataagtgttattgtattttttcagcaccaggtgctgacatgttaattcatgaacaaaatcccacaaccaacttaactatctttgttaaaagggctaatataattaaagataaagagcattcaataatacctgatcctatatacgatcctttaaatgaaacaaacattgatagaaagacagctatctcatttgaggttaaagaaggagattatattcaaattatttgtccaactggtagacaatgttcggattttgtagcttttgatacatcaaaattaagtaaaggaattgaaaaaggattggattggcaaacaacaagaacatttatgggaaatacatttccaggtcctgggctgttttcaaaattttatgatactgatcatgagcctttggttgaggtgattagagataccgtaggaagacacgatacatttaatctagcttgtacagcaaaatattatgaagatgctggatattttgggcatcctaactgttctgataatttgagtaactcgatggaagaatttggggttgctaagaaaaaaggatggcatgcaataaatcttttttttaatacatctgcgggtggacaaaactctcttctttcagatgaatcttttgcgagaccaggagattatgtgattatgagagctttaaaagatttgacttgtggtacttcagcatgtccaagtgatatagacccatgtaattcatggaatccaacagatatttttgttagaacttatgataaaaaaaaggaatttacgaaatcttttgcatttagaatgaaagcagactctgaaactaaactaactaaaaatacaggtttttatgaaagaacatctaaacttactagaaactttgtcgatgcaagaggatattggttaccaaatgattatacaaaacacggtataataaacgaatacacagcatgtagagaaaaagcagttcttatagatttatcttcgttaagaaaatttgaaattcttggtccagactctgaagaattaatgaattacacattaactcgtaatgtaaaaaaactatccgttggacaaatagtttattcttcaatgtgctatgaaaatggaaccatgtttgacgatggaacattattaaaaatgagcgatcatggttttagatgggtttgtggagatgaatatgctggagaatggctaaaagaacaggctaagaaaaaaaattacaaagtattaattaaaaattcaacagatcaaattaataacatttcattacaaggaccaaatagtagaaaaatacttgaaaaatttatttttacatcacctgcacaaccaaccatctcagaattagagtggttcagatttacaatttgtagagttaaggatttaaatggaattcctctaatggtttctagaactggttacactggtgaattaggttatgaaatatggtgtcacccttcagatgctcctaaagtttgggacgtagttatggaagcgggtaaagatgaaggtctaattcctgcagggtttggtgctctagatttattaagaattgaagctggattaattttatttggaaatgaatttgatggacaagttgatccttttgaggctggagtaggctttactgttcctttaaaaacaaaaaatgataattttattggaaaggaaagtttgattaaaagaaaagaaaaccctcaaaaaaaattagtaggtcttgaattaattagtaaagaaaaa

SEQ ID NO: 228752 - DNA, 469 bp, Unknown
  Bacterial polypeptide expressing nucleotide sequence isolated from the Sargasso Sea
gaagatgttaaacttgctggtttaggcgcaaggaattctctaagaatggaggcaggattatgtttgtatggtaatgacatatctattctaacttctcctgtcgaagctggtttgacttggtctataccaaaggaaagaattgagaatggtggctttattggtcatgagaatattaaaaaagatttgattgatggagttgaaaaaaaattagtaggcataaagccacttggaaaacttccagcaagagaaggaactcagattttaagcaaaaatggaaaaataattggggaaataactagcggaggatactccccttcacttcaagcgccgattgcgatgggttacatcaatgcagaaatcttacaaaaaaattgtgagatcttattaaatgttagaggcaattcattgcccgcggaaatagtttcactcccctttgttgagcataaatattttagaggtaaaaagtaaa

SEQ ID NO: 228753 - DNA, 2341 bp, Unknown
  Bacterial polypeptide expressing nucleotide sequence isolated from the Sargasso Sea
aatggaaacaagtttaagtattaaagaacctggtttaaacgtattaccacctggagttgaaagatatgtggtcaatgcaggtggaattactggtattcaaatatctcctgaagatgaaattaaaattataaataatgagggaaatcaaatttgcgaaataaatatttttgataaacatggaaaatcagaattaggaattttaaatttaaaagaaaatacaaaatcatcagaaataaaaaaaatacttttgaaaaatgaagaaagttctttgcaagcattacttcaattaaaaaaaagaaatttacaaattgagaaagctgcttcatcagtaatttttgataaaaacacctctgcaggagaagaaataattctaaattcgaaggatgactgttattgcatctttgctgctccaggagccaatatgcttgttcatgatcaaaatccaccttcagatctaactgtattagttaaaagagcaaaaattaaaaattctgaaaaagaattttcaataattcctgatccaatttacgatcctgactatgaagttaatatagatagaaaaactgcaacaggatatcaagttaaagctggagactatattcaaataattacaccaacgggaagacaatgctcagattttgttgcatacgacactgctaaacttgaaaaaggtatagaaaggggtcttgattggcaaactactagaacctttatgggacatacttttcctggtcctggtttattttcaaagttctatgatactgatcatgagccattggtagaagttgtaagagatacagtgggtattcatgatacatttaatttagcttgtacctcaaagtactacgaagactcaggatattttggtcatgcaaattgctctgacaatttaaatgactcaatgaaaaaatatggcgtagaagaaaaaaaaggttggcatgcaattaatcttttctttaatacatcttcgggaggtcaaaattctgttacatctgatgagtcttatgcaaggcctggtgattacgtcatttttaaagctctaaaagatttaacatgtggaactactgcatgccctagtgatattgatagctgtaatggatggaaccctactgatatttttgttagaacttatgagaaaagcaaagaatttactaaatcatatggttttagaatgaaaacagattcagaaaataaacttacaagaaataccggtttctatgaaagaacatcaaaattaactagaaactttgtcgatgctagaggtttttggttaccaaatgattatacaaaacatggcgtaattaatgaatacaatgcatgcagagaagacgccgtcctaattgacttatcttcattaaggaaatttgaaattcttggtccagatgctgaagaattaatgaattatacattaactcgaaatgtaaaaaaactttcagttggtcaaattgtttattcagcaatgtgttatgaaaatggaactatgtttgatgatggaacgttattaaaacttagtgatcatggttttagatggatttgtggtgatgaatatggaggtgagtggcttaaagaacaagctaagaaaaaaaattataaagttcatatcaaaaattctactgaccaaataaataatttatctttacaaggtcccaaaagtagaaaaattttagaaaaaataatttttactccccctacccaaccctctatattagaattggaatggtttagatttacaatttgtcgattggaagaattaaacggaataccattaattgtttcaagaacaggttacactggtgaacttggttttgaaatttggtgtcatccaagtaatgctactacagtttgggataaggtaatggaagcaggaaaagatgaaggtttgataccagctggttttgctgctttagatcttttaagaattgaagctggtttaattttatttggtaatgaatttgacggacaacaagatccgtttgaagcaggaattgggttttcagttcctttaaaatccaaaacagaggattttattggaagagaaaatttaattaagagaaaagaaaatcctcaaaaaaaactagtagggctagagttaataggtaaagaaattgcaaatcatggagattgcgttcatattggaagatctcaggttggaattataactagtggatgcatttctccgacattaaataaaaatattgcattatgtagaatagatgtaggtcactcagaattaggtaatgaagttgaaattggaaaaatagatggacatcaaaaaagaatacctgcaaaaattgttggatttcctcattacgatccaaagaaaactaaagtaagatcttaa

SEQ ID NO: 228754 - DNA, 1993 bp, Unknown
  Bacterial polypeptide expressing nucleotide sequence isolated from the Sargasso Sea
caaattgggggagaaaaaataaaacttaagtcaaaagataaatgttattgtatttttgctgcacctggtgaagtaatgttaatacatgaacaaaaccctccaactgatttaactatttttataaaaagagcaaaaattacaaaagacaaagagttatcagtaattccagatcctatgttcgatccacttgatgaaataaatatagagcggcaaactgcaatttcttttcaagttaaagaaggtgattatattcaaattatttcaccagctggaagacaatgctcagattttgtagcttttgatacagataaattagataaaaaaattgaaaaaggtctagactggcaaacaacaagaacttttatgggtaatacttttcctggaccaggattattttctaaattctatgataccgatcatgaaccattaatagaagtggttagagatacagttggaagacacgatacgtttaacttagcatgtacatctaaatattacgaagacgctggttattttggacatccaaactgctctgataatttaaatagttctatggaaaaatttggagtacaaaaaaaaagaggatggcatgcaataaaccttttttttaatacttctgctggagggttaaattctgtattatcagatgaatcttttgcaagaccaggtgattatgtgatatttaaagctcttaaagatttaacttgtggaactacagcttgtcctagtgatatagatgcttgtaattcatggaatccaaccgatatttttgttagaacttatgataaaaaaaaagaatttacaaaatcttttgcatttagaatgaaagcagattcagaaacaaaattaactaggaatacaggtttttatgaaaaaacctcaaaactgacaagaaactttgttgatgcaagaggtttttggctgccgaatgattatacaaaacacggggtaattaatgaatacaatgcctgtcgtgaaaaagcagttgttattgatttatcttcattaagaaagtttgaaatcttaggaccagatgccgaagagttaatgaactaccccttaacacgaaacataaaaaaactatcagttggtcaggtagtttactcttcaatgtgctatgaaaatggatccatgtttgatgatggtacattgctgaaaatgagtgaccatggtttcagatggatatgcggtgacgaatatgcgggagagtggttaaaagaccaagctaagaaaaaaaattataaagtttttataaaaaattctaccgatcaaatcagtaatatttctttacaggggccaaatagcagaaaaattcttgaaaaatttatttttacacctccaactcaaccttctatttctgaattacaatggtttagatttacaatttgcagagtaaatgatttaaaaggaattcctttaatagtttcaagaactggctacactggtgaattaggatatgaaatatggtgtcacccatctgatgctcctaaagtatgggatacagtaatggaggctggaaaagatgagggtttaataccagcaggttttggtgcattagatttattaagaatagaggctggattaattctttttggaaatgaatttgatgggcaaattgatccctttgaagctggagttggttttactgttcctttaaaaactaaaacagatgattttattggtaaagaaagtttagttaaaagaaaagaaaaccctcaaaaaaaactcgtaggacttgagttgattggtaaagaaaaggctaatcacggagattgtgttcatattgaaaggtcacaaatcggcgtaattactagtggttgtatatctccaactctcaacaaaaatattgctctttgtagaatagatgttaatcattcaaaaatggggacaaaagtagaagtaggaaaaattgacggacatcaaaaaagaatatctgcgaaagttgttggatttccattttatgatccagaaaaaactaaagttaaagcatgag

SEQ ID NO: 228755 - DNA, 2341 bp, Unknown
  Bacterial polypeptide expressing nucleotide sequence isolated from the Sargasso Sea
tatgcaaactagtttagcaatcaaagaacctggtttaaatgttctaccacctggagttgaaagatatattgtcaatgcaggcggaatcactggaatacaaatttttcctgatgacgaaattcaaataattaataatgagggaaatcaaatttgcgaaataaattcttttgataaaaacggaaaatcagaactaagccttttaaatttaaaagaagataaaaattcttctgaaattaaaaaaattctttttaaaaaagaagaaagctccatgcaggctttgcttcaattaagcaaaagaaatttgaaaatagaaaaagctaagtcagcaattttatttgacaaaaataccaaagctggtgaaaaaataattttaaaatctaaagataaatgttattgcatatttgctgcacctgcagatgacatgcttgttcatgatcaaaatccaccatcagatttaactattataattaaaagagctaaaattaaaaacaatgataaagaattttcattaatacctgacccaatttatgatcctgatcatgaagtaaatattgatagaaaaactgcaaatggctatcaagtcaaggctggtgattacattcaaattataaccccaactggaagacagtgctcagactttgtagcatatgatacagccaaattagaaaaaggtttagagagaggtcttgattggcaaacaactagaacttttatgggtcacacttttcctggtccaggtttatattcaaaattttatgacactgatcatgaacctttaattgaagtgataagagatactgttggtatacatgatacattcaacttagcgtgtacttcaaagtactacgaagactcaggatattttgggcatgcaaattgttctgacaatttaaatgattctatggaaaaatatggagtagagaaaaaaaaaggttggcaagcaataaatcttttttttaacacatctgctggaggtctaaattcagtaacctcagacgagtcttatgcaagaccaggtgattatgtaatttttaaagcgctaaaagatttaacctgtggaacaactgcttgtcctagtgatattgatagctgtaatggatggaaccctactgatatttttgttagaacttatgaaaaaagtaaagaatttacaaaatcttatggatttagaatgaaaacagactcagagaacaaacttacaaggaacacaggattttatgaaaggacttcaaaactaactagaaactttgttgatgctaggggtttttggttaccaaatgattatacgaaacacggagttattaacgaatataatgcttgtagagaaaaagctgttttaattgatttatcatctttaagaaaatttgaaattttaggtcctgatgctgaagaattaatgaattatactttaactcgaaatgttaaaaaactttcagtaggccaaattgtatattcagcaatgtgctatgaaaatggcaccatgtttgatgatggtactttattaaaacttagtgatcacggttttagatgggtttgtggtgacgaatacggtggggaatggttaaaagaacaagcaaagaagaaaaattataaagttcatataaaaaattctacagaccagataaataatctttctttacaaggtccaaaaagcagaaaaattttagaaaaaataatttttacacctcccacacagccttctatatctgaattagaatggtttagatttacaatttgcagattagaagaattaaatggaataccattaattgtttcacggactggttatactggtgaacttggttttgaaatttggtgtcacccaagcgatgcaccaactgtttgggataaagtaatggaagcaggtaaagacgaaggtatgatacctgctggttttgctgctttagatcttttaagaattgaagctggattaatactatttggtaatgaatttgacggacaacaagatccctttgaagcagggattggtttttctgtacctttaaaatctaaaacggaagattttataggaagagaaaatctaattaagagaaaagaaaaccctcaaaaaaaattagttgggttagaattgattggtaaagaacaagcaaaccacggagactgtgtacacattggaagatctcaagttggagtgattacaagtgggtgtatttcaccaacactaaataaaaatattgctttatgcagaatagatgtaggtcattcagaaataggaaatgaagttgaaattggaaaaatagatggtcatcaaaaaagaattccagcaaaaattgtaggatttcctcattacgatcctaagaaaactaaagttagatcataa

SEQ ID NO: 228756 - DNA, 1156 bp, Unknown
  Bacterial polypeptide expressing nucleotide sequence isolated from the Sargasso Sea
atggatcttagaaacgtaatctttgctatagctttatcatttgcagttctgttcggctggtcagtaatttttgaaacaccagaaattgaaaagcaaaaaaaattagagcaggcagaaagtcaggatcaagaatcaagtgccccaagcgtaaacttggaaaatacaagtactccaattgtaaccagagaagaagccattaaatcaacagatagaataagcttcgaaaatgaaaatgttaaaggcacaattgctattaagggtggaataatagacgacattacttttaaaaaatataacaaaactattcaatctgataataaagtaacctacttgaatccttcggaaacaaacgaaggttatttcgttgaaaccggatgggctgccagtaatcttggaaaaatgtcacttccaaatacagaaactatttggaaagtaaaaggaaacaaaaaattatcagatggaagtcctgtaataatagaatggaataataattcaggattaatattcagaaaaaaaatagagctggacgacaaatttttatttagaataactcaagaaattcaaaataaatctagtcagaaaatagaactttatccttatgcccaaataactagaaatcaaaatcctgatgttacagatttttatattttgcacgagggttttatcggagtatttgatgaggagcttaaagaggaaagctataaagatattgaggaaagaaaaaaggaatttaacgctgaagatggttggttaggtataacggataagtattggatgactgcattggttccagaaaaaaatcaaccttttaagggagagtttgtatttaaaaatggctttaaagcaaattatattcaaaataaacctgttttaatccaaccatctgcttctggaacatctaaaacaaatatttttattgcggctaaagaagtaaaagttattgatggatacgctgagtctgagggcataaataaatttgatttaactattgattggggctggttttatttttttacaaaacccttattttttataatgaattacctgtttgagttaacgaaaaattttggaatagctatacttttagtaacagcagctgtaagattattattctttccgttagccaactattcttttagatccatggcaaaaatga

SEQ ID NO: 228757 - DNA, 969 bp, Unknown
  Bacterial polypeptide expressing nucleotide sequence isolated from the Sargasso Sea
ttgggccagatgctgaagatttgatgaattatacattaactagaaatattaaaaaactgtctgttggtcaggtagtttattcagcaatgtgctatgaaaatggaatgatgtttgacgacggtacgttgttaagattaagtgaaactggttttagatggatttgtggcgatgaatatgcaggagagtggttaaagaaaatagctaagactaaaaattataaagtaaatataaaaaattccacggatcaaattagtaatgtttctattcaaggacctaaaagtagagaaatattaaaaaaattaatttttactccacctactcaaccatctattgatgaattagaatggtttagatttaccatttgtagggttgaagaacttcaaggtattccattaattgtttcaagaacaggttacactggtgagcttggatatgaagtttggtgtcatccaaaacatgcttctgaagtttgggataaacttatggaagctggaaaaggtgaaggtttaataccagctgggtttgccgctttagataaattgagaattgaagcaggattaattttatatggaaatgaattcgatggccaacaagatccttttgaagctggaattggttttgctgttccactaaaaactaaagaggaagattttgttggtaaaaatattttgaaagaaagaaaagcaaatcctcaaaaaaaacttgttggattagaacttattggtaaagaagcctctggacatggagactgtgttcacgttggaagatctcaagttggagtggttacaagtggttgtttatctacaactctaaataaaaatattgcattatgtcggattgatactcaatattcagagcctggcacagaagttgaggttggaaaaatagatggtcatcaaaaaaggatttctgcaaaagttgttgcctttccacactttgacccaaaaaagactagagtaagatcttaat

SEQ ID NO: 228758 - DNA, 304 bp, Unknown
  Bacterial polypeptide expressing nucleotide sequence isolated from the Sargasso Sea
tatggaaggacaaaaaacagcattatataatattcataaaaacctcggagcaaagtttgttccttttgcaggttatgaaatgccaattcaatataaagacgggattgtaaaagagcatatctctacaagaacttatgcaggattttttgatgtttctcatatgggacaattttttttagagggtgacgaaacattaacagaagctttagaaaggattatacctgcagatttaaaatctttgaaaattaatcattcaaagtattctttcttacttaataatgatggaggaataattgatgactta

SEQ ID NO: 228759 - DNA, 1187 bp, Unknown
  Bacterial polypeptide expressing nucleotide sequence isolated from the Sargasso Sea
gatggaaggtagaaatgtcataatcgctattgctctttctttgtcagttattcttttctgggaggcttttatgactgtgccaaaaaaagagttacagagtaattcaacatctcaaagcaaacaatcaaaagaagcaaatgacaataataaagacgatagtatcgctccaagtataaatgaaaataaaataccaaaatctgtctctagaaatgagtctataggcagtgttcaaagaattaaaattaataatgaaaaaattgaggggtctatttctttaaaaggaggaattattgatgatgtatctttcaaaaattacaaacagtccttagagaaaaatgataatgttgttttcttaaaccctaaacaaacaacagatggatattttgtagaaactggatggactagtataggaaataaaatcaaagttccaaatataaattctaattggaaagttaagggcaacaatattttgtctccggataagccagtaattttagagtggagtaatcaagaaggacttatttttagaaaaaaaataaacttagataaaaaatacttatttaatattgatcaagaggttcaaaataatacaagtcaaacgattcaattatatccttatgctcaaataactaggaataaaaaacctgacgatcttatgggcttttatattctacatgagggttttattggagtttttgatgaagaactaaaagaagatgactatgacgatgtcgaagataaaaaaattgttagagaagctacaagtggatggcttggtattacagataaatattgggtaacggcaatagtacctccaaaaaatgaaaattttaaatcaacatttttatttaaaaataattataaggccaactatattttaaataatccaattaatttagctccatcaactaaaaaaaataatcaagtcaggttattcgttgctgcaaaagaagtaaatactattgacggttacgctgaaagccaaaatattgaaaagttcgacctggttatagattggggttggttttattttttcacaaaaccattattttttttaattgattatttgtttaaaatgactggtaactttggagttgcgattatattaatcacagcagctataagaattatcttttttccgcttgcaaactactcttttagatcaatggccaaaatgaaggctcttc

SEQ ID NO: 228760 - DNA, 612 bp, Unknown
  Bacterial polypeptide expressing nucleotide sequence isolated from the Sargasso Sea
tatgggtgaagatccgaacttacagaatttgaggcgcactcccctctatcccctctatgcccaacacggcgcgaaagtcgcgccttttgcggggttcgagcttcctctcagtttcgatggggtaatcagcgaacatctagccactcgcacttctgccggtttatttgatgtaagccacatgggaatagttgatctagttcccaaaagagggcagtcgctagagaccgttagccgcgctctggaaaaaatcactcccgctggtatcgcagatctcggaaacgaccagctgcaatacgcgctattaacaaatgctcacggcggaatcgttgatgacttcattgtcagtcgcaacgaatcgcggctccgtttggttctgaatgcctcacgaacagatcgcgatctcgcctatatccaggacgcaatgcatgaggtcaccgagattaatcttcggcaggacctggctcaggtagcacttcaaggaccagaggccgaagccattcttggcctatttcatcaaggtgtcgcaaacctcagcttcatgcagtctgttcgacttcagctagatggggtcgactgcgaagtgagtagaagtggatataccggagaagagga

SEQ ID NO: 228761 - DNA, 412 bp, Unknown
  Bacterial polypeptide expressing nucleotide sequence isolated from the Sargasso Sea
aatgcttgagaatgaaataaaatcatcaccaatagaagaaattcattctttaaatgatgctaaatttgtgaattttgccggctggtcaatgccgattcaattccctgatggaataataaatgaacatatttcaacacgatcctcttgtggcctttttgatatttcacatatgggacaaatacttataaacggtgatgaaagcagattattacttgaaaaaataacacctacagatattagcaaaattcaaactggaaaagttagatatagttttctcttaaataatgaaggtggaattattgatgacttaatgataacaaatgaaggagattgtttttatcttgttgttaaacgcagccgaataaatgaagatttagaagaaataaataaagcatcaaaatctttttcaaaa

SEQ ID NO: 228762 - DNA, 402 bp, Unknown
  Bacterial polypeptide expressing nucleotide sequence isolated from the Sargasso Sea
ttagagttgaagctgggatgaatctcaatggtacagacatgactataaagaataatccctttgaatcaaatttaggctgggttgtcgattttgatgatgcccaaagagacttcatcgctaaagaaaaccttattgaaattaaaaaaaacaacaagcttaaccttgttggtgttttgcttgatgaaaaaggaatcttgagaggtggccaaaagatcatcaaagatgattttgagggtgaaattacaagcggaacattttctccttttatgaaaaaaagtataggcttagctagagttccatttgatatgaaagaagatgccaatgtacatataagaaataaactattaaaagtaagaattttatcgctaccttttgtaagaaaaggtaaaattgttttatgag

SEQ ID NO: 228763 - DNA, 790 bp, Unknown
  Bacterial polypeptide expressing nucleotide sequence isolated from the Sargasso Sea
ccagggaccacagtccgaagaagtgatttcggagttcctggaatccggaagcctccccgaacgaagacacaaccgtctctcaaaaatcagcatcatgggcgaagaaatgctgatctcccggacgggttacaccggggaacctctatgttttgaaatgttcatgtccgccgatgcagtaacgggaatctggggaaaacttcaccaatccggaatttccaagggaatgactgcggcggggcttggcgctcgggataccttgaggttggaggcacggcttccgctttatggacacgaacttggagacgacccagaaggagcggaaatcctcgcctatgcttttccgctcagtgcctatgcggtcagtttttccgaagccaagggagatttcatcggtaaagaggctttgttacaacaacaccgggatcttgaagaactgcgctccggaaatgcccaagaaactcctgcacttccaaaaaggatctttgccctccaccttcaggaccgtggtgtcatgcgtcagggggatggggtttaccagggagatattcggttgggaagcgttaccagcggaaccgtagtcccctattggaaattcagcgatagtggagaatcttccaaaatcaccgagcagcaagaccgccgcagtatcggcctcgccctgctcaatgcaagaacacagatcggcacagaactcgaaattgaagtccgtgggagacgattgaaagcgatcgttgtacgccgccatggaagttcaaaaaccccaccttacttcagagccttgattccctga

SEQ ID NO: 228764 - DNA, 679 bp, Unknown
  Bacterial polypeptide expressing nucleotide sequence isolated from the Sargasso Sea
ctggaaagagaattattctcgccgaaggagcaaatctctcaggcaccaagacagagggggcaaagaagagttaatatggaaataaaaaaaacatcactaaataaacttcatcaaagtaacaacgctaagtttgttgaatttgctggctatgaaatgcctattcagtatagcaaaggtattattgaagagcataaattcacaagatcgcattctggaatatttgatgtatctcatatgggccagctattcatatatggtaatgaaagtttaacagaagaattagaaaaaatttttccattagatttaaaaaatttaaaacaaaactgctctaagtatagttttttaatgaatgaagatgctggaatttatgatgatttaatcatcactaaaatagaggaaggatatttaattatccttaatgctgcatgtaaagataaagattttgagattttatctaatttactaggctcgaaatttaaaatgaatttagataacaatagatctttgatagcaattcaaggacctaagtctgttgaaattttaaactcaattataaatggggttgatcaactaaattttatgacaggaaattggttcgattctgataatcaaaaattatttgtcacaagatcaggttatacaggggaagatgggattgaaatttcaatttctaacgata

SEQ ID NO: 228765 - DNA, 241 bp, Unknown
  Bacterial polypeptide expressing nucleotide sequence isolated from the Sargasso Sea
ttgactgaagaagctctacaaaatatttatctaaaagattttcatagaaaaaatgatgcaaaatttgtaccttttgctggttatgagatgccaattaattacaaattaggtattataaatgaacatatccatgtaagaactcatgcaggtctctttgatgtttcccatatgggacaaatcttaatccctctaactagtgaaaatataattgctttagaaatttatattcctctagatatta

SEQ ID NO: 228766 - DNA, 1762 bp, Unknown
  Bacterial polypeptide expressing nucleotide sequence isolated from the Sargasso Sea
tgtgagatttcagttttaaccaaagaaggaaaatcagagccagcaattttaaatttgaaagaaaataaagatgcatctgaaattaaaaaaatacttttaaaaaaagatgagagttctctcatagcgctacatcaacttaaaaaaagaaatttggatattttaaaatctaaatcttcaattgtttttgataaagatacaggctggggtgaaaaagtaaaaataaaatctaaagataaatgttattgtatctttgcagctcctggtgctgaaatgttgattcatgagcaaaatcctccaacagatttaactatttttgttaaaagagctaaaatcacaaaagataaagaacatcatgtaattcctgatcctatgtttgatccgcttagtgagacaaatattgatcgagcaactgcaatttcttttcaagtaaaagagggtgattatattcaagttatttcaccgacaggaagacaatgttctgattttgtggcattcgatacagcaaaattgaataaaagaattgaaaaaggtttagattggcaaacaacaagaacttttatgggaagtacttttcctggaccaggattgttttctaagttttatgatactgatcatgaacctttgattgaagtaataagagatacagttggaaaacatgatactttcaacttagcatgcacatcaaaatattacgaagattcaggatacttcggtcacgcaaattgctcggataatctaaattcttctatggaaaaatttggggttcaaaaaaagaaaggttggcatgcaataaatcttttttttaatacctctgctggaggcttaaattcagtattatcagatgaatcttttgctagacctggtgattatgtaacttttagagcccttaaagatttaacttgtggaacaacagcttgtccaagtgatattgatgcttgtaattcatggaatccaacagatatttttgttagaacttatgataaaaaaaatgaatttacaaaatcttttggatttagaatgaaaacagactcagaaaataaattaactcggaatactggtttctacgaaagaacttcaaaacttaccagaaattttgttgatgctagaggtttttggttgccaaatgattatacaaagcacggtctaattaacgaatacacagcttgtagagaaaaatctgttgtaattgatttgtcttcattaagaaaattcgagattttgggacctgatgctgaagaactaatgaattatacattgacgagaaatgtaaaaaaactttcagtaggtcaagtagtttactcttcaatgtgttatgaaaatggattcatgtttgatgatggaacattactaaaattgagtgaccatggttttagatggatatgtggtgatgaatatgctggagaatggctaaaagaacaagcaaagaaaaaaaattacaaagtgttaataaaaaattcaactgatcaaattaataatatttctctacaaggtccaaatagtagaaaaattcttgaaaaatttatttttacacctccaactcaaccaacaatttctgaattacaatggtttagatttactatatgtagaattgaagatttgaatggtattccattaattgtttcaagaactggttatactggtgagctaggttatgaaatatggtgtcatccatcagatgctcctagtgtatgggataaagttatggaagctggaaaagacgaaggaattatacctgcgggatttggtgctttagatttattaa

SEQ ID NO: 228767 - DNA, 781 bp, Unknown
  Bacterial polypeptide expressing nucleotide sequence isolated from the Sargasso Sea
atgtctatagaaaaaatcataaatgatgcttgggaaataagagataaaataaagcctgatactgatcaaaatttaaatcaatctgtcaaagaaatgattgatggtctaaatgacggcaaaatagctatttctgagaaacaaggtaatgaatggaaagttaatggctgggtacagaaaggtatacttctctcttttaggataaataaaagaaaaataattagtggtccttataatgcatggaatgattttgaacacttaccaggaaagacagcaggctggacagaaaaggaatttgagaaagcaggatttagattaattccaaacgctgtggttagaaatggctgttttgttggtcgtggagctgtcataatgcctaactcttttatgaatattggatctcatcttggcgagagatctatgttagatggcggagcacgacttggttctggaagttatcttggagatgattgtcatttatctggtggtgcagcacttggaggtattttagaaccttatggatcaagaccaacaatcgtagaggaaaaaaccttcataggagctaatagtgagatagcggaaggagttattgttagaaaaggaagtgtcatttcaatgggttgccaaatcggaaaatcgactaagatagtaaacagagaaacaggtgaaattacctcaggtgaagtgccagaaggtagtgttgtagtgcctggtacattaccatcaaaaaaactaggcgggccaaatttatattgtgtagtaattataaaaaaagttgatgaga

SEQ ID NO: 228768 - DNA, 328 bp, Unknown
  Bacterial polypeptide expressing nucleotide sequence isolated from the Sargasso Sea
atggaagtgcaaaaaacagctttatacgattatcataaaaatttaggagcaaagtttgttccttttgcaggttatgaaatgcccattcaatacaaagacggtattgttaaggaacatatttctacaagaactcacgctggattttttgatgtctcgcatatggggcaattttttttagaaggggatgaaacattaataactgctttagaaaaaattataccagcagatttaaataatttaaaaattaatcattcaaaatattcttttttacttaacaatgaaggtggaataattgatgatttaattattacaagaacagaaaaaggtt

SEQ ID NO: 228769 - DNA, 589 bp, Unknown
  Bacterial polypeptide expressing nucleotide sequence isolated from the Sargasso Sea
aacggagattactttaaatttcaaggaaaaaaaatttatgtcacaagatcaggttatacaggtgaagatggttttgaaatttctttatcaaacacaaatgcagaaaactttacaaaacttctgtcaaataaaggagctaaaccaataggtcttggagcaagagatacacttagattagaagcaggtctgtgtctatatggtcatgaactaaaccaagatattagtcctatccaggcaaatttaaaatgggcgatttcaaaaagaagaagagaagagggtggttttaaaggttgggaaaatatacaaaacgatttaaaaaatggtgtttcaaaaataagagttggtattaaaccatctggaaaaattatagcaagagaaggtactaaaatattctcatcttctggtgatgagattggtgttgtaactagtggaacatttggcccaagtgttaatgcacctgttgccatgggttatattcaaagtaaattttctgagattgataacaaaattttgttagaagtaagaggaaaaaaacatgatgcagtggtttctaagttaccattttataaaaaaagctatgttaaatagg

SEQ ID NO: 228770 - DNA, 656 bp, Unknown
  Bacterial polypeptide expressing nucleotide sequence isolated from the Sargasso Sea
tatggaaataaaaaaaacatcgctaaataaacttcatcaaaataataacgctaagtttgttgaattcgctggttatgaaatgccaattcagtatagcaaaggcattattgaagaacataaattcacaagatcaaattctggaatatttgatgtatctcatatgggtcaattatttatatatggtgacgaaagtttaacagaagaattagaaaaaatttttccattagatttaaaaaatttaaaacaaaactgctctaagtacagttttttaatgaatgaagatgctggaatttatgatgatttaattattaccaaaattaaggaggggtatttaattattctaaatgctgcatgcaaagataaagattttgaaattttatcgaatttactaggttcaaaatttaaaatgaatttagacaacaatagatctttgatagcaattcaaggacctaagtctgttgaaattttaaactcagttataaatggggttgatcaattaaattttatgacaggaaattggttcgattctgataatcaaagattatttgtgacaagatcaggttatacaggggaagatggatttgaaatttcaatttctaacgaaaaagctgaaaaatttgttgaaaattttataggaaagggagcacaacttatag

SEQ ID NO: 228771 - DNA, 661 bp, Unknown
  Bacterial polypeptide expressing nucleotide sequence isolated from the Sargasso Sea
cttgtccccaggacacgcagcaccgccgaaggcgcaggcagcagccgaacgctcaggcaaaaggactggcaaccgcccgcagcgatgcgggcgttcccttgctggagagaggtggccccacagaaaagaaactgtgtgcaggccatccaccgaaggagcaaaccgcacggccagccagggcgctgcggtgaatctctcaggtaaagcggacagcagggcaaatcccgtagccaccctgtggctgcggcccccatttgccccggagtccgccatgtcagccaccgcccccctgctcaccacgcccctgaacgccctgcacatcgagttgggcgctcgcatggtgccttttgcaggctattccatgcccgtgcaataccccgctggcctgatggccgagcatgtgcacacccgcaccgccgccggcctgtttgacgtgtcgcacatgggccagctcaagctcatcggcgccgatgctgccgcagcgtttgaaaccctgatgcccgttgatgtgatcgacctgcccgtgggcaagcagcgctacggtctgctgctgaccgacgaaggcacgatcattgacgatctgatgttcttcaaccagggcgtggtggatggtgagcctaccctgttcgtcatcgtcaacggcgcctgcaaggtgggcgac

SEQ ID NO: 228772 - DNA, 1965 bp, Unknown
  Bacterial polypeptide expressing nucleotide sequence isolated from the Sargasso Sea
aatgttaggaacaagtaaagaaataaaatatccaggtttaaatattttgccacctggggttgaaagacacattgtcaatggtggaggtctaactggttttcagatttttcctgatgatgaaatagaaataatcaataatgaaggaaatcaaacatgcgagattatttgttttgacaaagatggcaactcagatgttggaatattaaatcttaaatcaaacaatgacaaaaacttcataagaaatattcttagtggcaatgatgaaacaattttagctaccaactatcaattaaaaaaaagaaatttaaaaatttctaattcaaaatcatcaattatatttgatctagacacaaagcctggtgaaaaaattaaattaaagtcaaaggataaatgttacacaatattttctgctcctggcgaagatatggatgttacaaaacaaaatccaccaactgatttaaccatattcgttaaaagagctaaaattgttaatgataaggaattaaacgtaattcctgatcctgttttcgaacctgcatatgaagaaaatataaataaagaaagttgtatatcttatgaggttaaggaaggagattatattcaagtaataagtccaactggcagacaatgttctgactttgtggcattcgatacaaaaaaattagaaaaaggaatagaaaagggattagactggcaaactacaagaacatttatgggtaatactttcccaggaccaggtttgttctctaaattttatgacacagaccatgagccacttgttgaagtaataagagatactgttggaaaacacgacacttttaatcttgcatgtacttcaaagtattatgaagactcaggatactttggtcatccaaactgttcagataatttaactgaaagtatgtcgaaatacggtgttcagaaacaaaaaggttggcatgcaattaatttgttttttaacacctctgctggtggattaaactctgttatttctgatgaatcttattcaagacctggtgattatgtaatgtttaaggctttaaaagatttaacaataggaacaacagcatgtccaagtgatatagatccttgtaattcatggaatcctacaaatatttttgttagaacttatgacaaaaataaagaatttagaaagtcatttggttttagaatgaaaacagactctgaaaataaacttactagaaattctggcttttatgaaagaacttcaaaattaactagaaactttgttgatgctagaggattttggcttccaaatgactacactaaacatggtttggttaacgagtacaatgcgtgcagaaataatgctgtattaattgatctatcatcactaagaaaatttgaaataattggtcctgatgctgaagagttaatgaactacactcttacaagaaatataaaaaaactttctgttggacaggttgtttattctgcgatgtgttacgaaaatggaatgatgttcgatgatggaactcttttaagattaagcgaaacaggttttagatggatatgtggagatgagtatggtggagaatggctaaaagaaattgcaaagaaaaaaaattttaatgctattgttaagaactctactgatcaaattagtaatgtgtctttgcaaggtcctaaaagtagagaaattttaaaaaaaattatctttacaccaccaacacagccttcgatagatgagttgggctggttcagatttacgatttgtagaatagaagaacttcaaggtataccattaattgtttcaagaacaggttacactggtgagttaggttatgaagtttggtgtcatccaaaacatgctcccgaagtttgggataaattaatggaagcaggtaaagacgatggattgataccagctgggtttgctgcattagataaactaagaattgaagcaggtttaattttatttggagctgagtttgatggagagca

SEQ ID NO: 228773 - DNA, 1480 bp, Unknown
  Bacterial polypeptide expressing nucleotide sequence isolated from the Sargasso Sea
tttggtcatattaactgttcagataattttaattactctctttcttcatatggaatagaaaaaagaaatgcatggcaggcagtaaatttattttggaatacgggtattgatgaagcaaatacgtttacttctgaaatgccatggtcgagacctggtgattatgtgttatttcaagcacaaaaagatttagtttgtgtttcttcaggttgcccagatgatattgatcctgcaaatgactggaatccaacagatatttttgttaggatatatagtgaaaaaaataaattttctaaatctattggatatagaaaaagtgctgattcagattttatgttaacaaaagaaacagggtttcatccaagaacatcaaaacttactaaagatatgatggaaagtgcaggctattggataccttctaaatacaacaactatggaagtatagctgaatatacagcatgtagagaaaatgtagttatgatggatttatcatcactaaaaaaatttgaagtagttggaccagatgctgaagaattaatgaatactgctttaactagaaatgtaaaaaagctatctattggacaagtagtatattcagcaatgtgctacgaaaatggcacaatgattgatgacggaacactttacagaatgacagaacataattttagatggatatgtggaagtgattattctggtgaatggctcagagagctctcaaaaaaacttgatttacgagcttggattaaatcttcttcaggtcaattacataatatctcaattcaaggaccaaatagtagaaaagttttaagtaaaattatttggactactccaaaccaacctcaattaaatgacttacaatggtttcacttctctattagtagaattggtgatcataaaggagtacctataatggtgtcaagaacaggttatactggtgaattgggttatgaaatatattgtcatcctaaagatgctgttagtgtgtgggatgctgtttgggaagctggtaaagaatttgaaattactccaatgggttttgaggcattagataaattaagaattgaagctggattaattcttgctggccatgaatttagtgaccaaacagatccatttgaagcaggaattggatttacagttccacttaaatctaaagaagctaattttattggaaaagaagaattgataaaaagaaaaaataaccctcaaaaaaaattagtaggcttagaaataactggtaatgaaatagcacaacatggtgattgtgttcacatcggtagaggtcaagtaggagttgtcacaagtggaacattatccccttctttagataaaaatattgcattgtgtcgaattgatgtaaaatattctgacttaaatactcaagttgaaataggaaaactagatggtcatcaaaaaagaattcctgctaaagttattggttttcctttttatgatcctacaaaatcaagagttaaagcttaag

SEQ ID NO: 228774 - DNA, 1326 bp, Unknown
  Bacterial polypeptide expressing nucleotide sequence isolated from the Sargasso Sea
aaacaacacggacttttatgggaaatacatttccaggacccaggattattctcaaaattttatgatgctgatcatgagcctctagttgaagtaattagagatacggttggaagacatgacactttcaatttagcttgtacatcaaaatattatgaagattctggatactttggtcacccaaattgttcggataatttaaatgactgtatggaaaaatttggtgctcaaaaaaagaaaggttggcatgcaataaatcttttttttaatacatctgcaggaggccttaattcagtattatcagatgagtcttttgctagacctggtgattatgtcatatttaaagctttaaaggatttaacttgcgcaacaacagcgtgtcccagcgatattgatgcatgtaattcgtggaatccaactgatatttttgttagaacttatgataaaaaaaaagaattttctaaatcatttgcttttagaatgaaaacagactctgaaaaaaaacttactagaaactctggcttttacgaaaagacatcaaagcttacaagaaattttatcgatgccagaggtttttggctacctaatgattatactaaacacggagttgttgaagagtacaacgcttgtagagaaaaggctgtcttaattgacttatctgctttaaggaaatttgaaattataggtcctgatgctgaggaattaatgaactatacacttacaagaaatataaaaaaacttgctgttggtcaggttgtttattctgcgatgtgttatgaaaatggaatgatgtttgatgatgggacattattgagactaagtgaaactggttttagatggatttgtggagatgaatatgctggtgagtggctaaaagaaatagctaaaaagaaaaactttaaggtcaacgtaaaaaattcaacagatcaaattagtaacgtctcaatacaaggtccaaagagtagagaaatattaaaaaaactgatttttactccaccaacacagccaactatcgaagaattagaatggttcagatttactatttgtagagttgagacccttcagggtattccattaattgtttcaagaactgggtatactggtgaacttggttatgaagtatggtgccatccaaaacatgcctctgatgtttgggataaacttatggaagctggaaaaaatgaaggtttaatacctgctggatttgcagccttagataaacttaggattgaagctggtttaattttatttggaaatgaatttgatggtcaacaagatccttttgaagctggaataggctttgctgttccattaaaaactaaagaggaa

SEQ ID NO: 228775 - DNA, 1227 bp, Unknown
  Bacterial polypeptide expressing nucleotide sequence isolated from the Sargasso Sea
tttttgttagaacttatgataaaaaaaaagaatttacaaaatcttttgcatttagaatgaaagcagactcagaaactaagctaactaaaaacacaggtttttatgaaaaaacatctaagcttacaagaaactttgttgatgcaagaggctactggttgcctaatgattatacaaagcatggagttattaatgaatatactgcttgcagagaaaaagctgttgtaattgatttatcttccttaagaaaatttgaaattctaggtccagatgctgaagaattaatgaattatacactaacaagaaatgtaaaaaaactttctgttggtcagattgtttattcatcaatgtgttatgaaaatggtagtatgtttgatgatggaacattacttaaaatgagtgatcacggttttagatgggtttgtggggatgaatatgctggtgattggttaaaagaacaagcaaagaaaaaaaattataatgttttgataaaaaattcgactgatcaaataaacaatatttcacttcaaggacccaacagtagaaaaattctcgaaaaatttatttttacacctccaactcaaccttctatttctgagttacagtggttcagatttacaatttgtagagtgaaagaattgagtggaattcctttaatggtttcaagaacaggttatacgggagaattaggttatgaaatatggtgtcatccaactgatgcacctaaggtttgggatgaagttatggaagcgggtaaagatgaaggtttaattcccgcaggttttggagcactagacctattaagaattgaagctggattaattttatttggaaatgaatttgatggacaagttgatccttttgaggcaggggtaggattcactgttccattaaagacaaaaactgatgattttattggaaaagaaaatttgattaaaagaaaagaaaatccacaaaaaaaattagttggccttgaattaattagcaaagaaaaagctaatcatggtgattgtgttcatattggcagatcccaagtaggtattattactagtgggtgtatatctccaacacttagtaaaaatatagctttatgtagaattgatattgggcattctgaaattggaacagaagttgaagttgggaaaattgatggtgagcaaaaaagaatcccagcaacagtagtggatttcccacattacgatcctcaaaaaactcgtgtaagatcataaa

SEQ ID NO: 228776 - DNA, 727 bp, Unknown
  Bacterial polypeptide expressing nucleotide sequence isolated from the Sargasso Sea
ataaaaaataatataaatatttctgaaattttgatatttaactttaaaaaagacaaagtacttttagcactacagggaaaaaactcattcgatttatttgaagaatggattaaatcttcgatatcatatatccctaactttggatgcgaatataaaatttttgaacatatttcgcctatagaaaaaatctttgtttccaagacaggatatacaggggaaaatggtctagaaatacttttatctaaaaaagcagcaattaatttatgggatttctcaatttccaaaaatgttgcaccttgtggtttaggagctagagatactcttagacttgaagccggcatgcatctttatggccaagacataaatgaagaaacttctccatatgaagcagggttaggatggctagtacatctagaaaataatcacgaattcattggaagaagatttcttgaagagcagtcaagattaggtattcaaaaaaagttagttggtctctctatagatggtaaagcaataggaagaaaaggttgcgcagtactaaagggagaagagaatattggaactataactagcggcagttggtctccaactaaacatcaagctatagcttttgcatacatcaatacttcgcatgccttaataaataatgaagttcaaatactaataagaggcaaaaaattcaaaggggttataacaaaaagagcgttttataaaaaaaattattaac

SEQ ID NO: 228777 - DNA, 925 bp, Unknown
  Bacterial polypeptide expressing nucleotide sequence isolated from the Sargasso Sea
cgaagaacataaagttacaaggagtaatgcgggtttgtttgacgtctcacatatggggcaactgctaatagaaggaaatgaaaatttagtaacagaattagaaaaaattattcctacagatttaaaaaaaacaaaacttaatcaatcaaaatactcttttcttatgaatgagcaaggtgggatttatgacgatttaattataactaaagttgaaaagggatttattattattctaaacgcagcatgtaaaaataatgattttaaaattattaaaaatgcacttggaagtaaatttcaattaactttatacaagaatttatctttggttgccttgcaaggaccaaaatcatcagaaattttagaaaaaacaataaacgggatttcttctcttaagtttatgaatggaaataaattttcttataatggcaaagatatttatataacaagatctggttatactggcgaagatggatttgagatttctataccaaatcaactagtcgaagattttgcaaaaaaattaattgctcacggagtgaaaccaattggtttaggagctagagacaccctaagattagaagccggattatgtctttatggtcatgacattaatgaatcaactagtccaatagaagcaaatcttaaatgggcaatttctaaacgaagaagagaagaaggcgggtttgtaggttataataagattaaatcagatatgaatgggagtttagctcgattaagagtaggtgttaatcccgaaggaaaaattatagcaagggagggagttaagattttttccaaggataacgaagagattggattggttacaagcggtactttcggtccaagcgttaatcggtctattgctatgggttatgtgaaattaaatttttcaaaacctggtacaaaagttctactgggaagttag

SEQ ID NO: 228778 - DNA, 750 bp, Unknown
  Bacterial polypeptide expressing nucleotide sequence isolated from the Sargasso Sea
tatggaaattaaaaaaacatctttaaataaattacatcaagataatcaagcaaaatttgttgaatttgctggatatgagatgccaattcaatatagcaaaggtgttattgaagagcataaatttacgagagcacatgcaggaatttttgacgtttcacatatgggtcaattatttgtttatggaaatgaaaacctaacatctgatcttgaaaaaatttttcctttagatttaaaaaatctgcaacaaaattgttctaagtatagttttcttatgaatgaagaagctggtgtttatgatgaccttataattaccaaacttaaagatggatatttaattattttaaatgctgcatgcaaagaaaaagattttgaaattttaagcactaaattgtctaaaaaatacaaaatggaactcaactctgatagagcgttggttgcaatacaaggtccaaaatcagtagatattttaaatgaaattataaatggagttaaagacttaactttcatgactggtaattggtttgaatttaatgatcaaaaggtattcgttactagatctggatacacaggagaagatggttttgaagtatcgatcataaatgatgaagcagaagaatttacaaaaagtttgataaacaagggtgcaaaactgatcggacttggagcaagagatactttgagattagaagctggattatgtttatacggccacgaactagatcttaataaaacgcctgtagaggcaaacct

SEQ ID NO: 228779 - DNA, 883 bp, Unknown
  Bacterial polypeptide expressing nucleotide sequence isolated from the Sargasso Sea
ttgaataagaaaacttctctatatcaaaaccacctggaagccaaggctaaaatggtagacttccatggctgggacatgccaataaattatggctctcaaatcgaagagcaccactcagtgagacaaggttgtggtatttttgatgtatctcacatgacaattcttgacttcgatggcagcgaatccgaactttttatcagaaaactgattgcaaatgacgtaagaaaactttcagagaattattctggtctttactctgctatgttaaacgataaaggctgtgttatagatgacctaatagcttatcgcatgaacaaggggtttagactagttgttaactgtgcaactagaggtgaggacttaaagtggatatcggcgagagctaaagaatatgatgtaaacatgctagaaagagaggatctgtcaatggtcgctattcaaggtccacaatctccaaatgtacttaagaactttcctgcaccaatagattttcttaaagagaaaaagagacagcaaggaatttttcaagatgatatctttgcagcaaaaactggttacactggggaactaggctttgaagttatactgcctaatgaaaaagccatagatctttggaatatagccatcagtgaaggagcaaaaccgatcggtcttgcagctagagatacacttagacttgaggctggaatgaatttgtatggttttgagatggatgagactatttcgccctttgaatgtaatatgggttggacagtttgctggcaagatgaccaaagagatttttttggtaaagaaagcttaataaaacaaaaagaatcaaatgatcttaaagaacttgttggtataattacagacgaaaaggtgatactaaggcaaggacaga

SEQ ID NO: 228780 - DNA, 759 bp, Unknown
  Bacterial polypeptide expressing nucleotide sequence isolated from the Sargasso Sea
catgcgtgacgagcttgttcgaaccgctctatacgatttccatgtttctgccggcgcgaaaattgtagatttccatggatatgaacttccaatatggtactcttcgatacaggaagagcatcttgccacacgaagttccgccggtcttttcgatgtctctcacatgggcctttttcgattccagggggaggaagtgaggtcatggctgagttcagtatctactcaagagtatatgaagttccagcctggaaggtgcggctatacccatttcttggatcatgatggacgaataattgacgatatgatctttgcagtttccggtgaatcagaggttcttggagtgcccaactctacgatggtgggcataatgttccagtggctttcagaccaacttccttccgatggatctgtcaccattttggatatgtctgataacactagcatcatcgctttacaggggccactatctggaaagataatctcagaagtactaggtttcgacaatggcgttggagtatttagatgccaagaaatcaaacagaacgaacttggaatctccggatggatccaaggaactggatataccggagaagcaggagtagaaattttcgtgcctaatgagcaggcacccctcctttgggatgctctaaacgcccacccctcatccaccccggtaggtcttggtgccagagatactctcagaatggagaaggggtacctactttccggacaagacttcctttggcctggaatttctat

SEQ ID NO: 228781 - DNA, 790 bp, Unknown
  Bacterial polypeptide expressing nucleotide sequence isolated from the Sargasso Sea
aatgagtaatcttttaactacccaattttataactttcatttagaacaaaaatctaaacttattgaatttgctggatgggatatgccattttcttatgatggtactttaaaagaacataattatgtaagaaatgattgtggattttttgacgtatctcatatgggaagaatagttttaaatattgatcagatagaaaatataagtaaattaatatgttcaaacattcttaatttagaaaatacaaaagctttgtatacgatatttactgatataaatggtaaagcattggatgatgttatattttggaagtttgaaaataaattaattttaatttgcaatgcaagtaatagagaaaaaatatcaaaacacttaacaagcaacaatattgaatttgaagataaaacttttgatactagtttgattgctattcaaggtccaaattcagcaaagcatttaaaaaaattgttagatttacctgaacatttttctgccaaggacagtggtgaatatatctatgcaagaactggttacacaggagaggatggatttgaaattatgtttgataattctaaagtcgaagagatattaaattttattactaataacgacattaaaccctgtggattaggatctcgagatactttaagattagaagcttcattgccactttatggatttgaattaactgaagaaatatcacctgtagaagctaatttaaaatgggttttaacaaacgaaaataattatttaggaaaagatgtcatagatgatgaattaaataacggaaat

SEQ ID NO: 228782 - DNA, 598 bp, Unknown
  Bacterial polypeptide expressing nucleotide sequence isolated from the Sargasso Sea
acaggaaattggttttgattctgataatcaaaaattatttgtcacaagatcaggttatacaggggaagatggatttgaaatttcaatttctaacgataaagctgaaaaattcgttgaaaatttaatagaaaaaggagcacaacttataggacttggggcaagagataccttgagattagaagctggattatgtttatatggtcacgaattagatattaataaaacgccggttgaggcaaaccttagatgggcaatctcaaaatctagattatcaagtggggattttattggatcgaaaaaaattatgaaccaaatgcaagatggagcaagccaaataagagtagggattaagcctgaaggtagactgattgcaagagaaaaaactaaaatatttaatgatacagataaacaaattggtgagataactagtggaacatttggaccaagtgtgaacggtccaatagcgatgggttatgttgataaagatttttcaaaggttgatactaaaattttgcttgaggtaagagggaaaaaatatccagcaaatatttgcgcattaccattttataagaaaaattatgtgaaaggagtaaattaa

SEQ ID NO: 228783 - DNA, 721 bp, Unknown
  Bacterial polypeptide expressing nucleotide sequence isolated from the Sargasso Sea
aaataatttaaatatgtctgaaatttcgataacaaactttaaaaaagacaaagtacttttagcactgcagggaaaaaactcattcaatttatttgaagaatggattgaatcttcgatctcacatatccctaactttggatgcgaatataaaatttttgaacatatttcgcctaaagaaaaaattttcttttcaaagacaggctatacgggggaaaatggtctagaaatacttttatctaaaaaagcagcaattaatttatgggatttctcaatttccaaaaatgttgcaccttgtggtttaggagctagagatactcttagacttgaagcaggcatgcatctttatggtcaagacataaatgaagaaacttctccatatgaagcagggttaggctggctagtacatctagaaaataatcacgaattctttggaagaagatttcttgaagagcagtcaagattaggtattcaaaaaaagttagttggtctctctatagaaggtaaagcaataggaagaaaaggttgcgcagtttttaaaggtgaagaaaatattgggactatcacaagcggcagttggtctccaactaaacaacaagctatagcttttgcatacatcaatacttcgcatgccttaataaataatgaagttcaaatatcaataagaggcaaaaaattcaaaggggtaataacaaagagagcgttttataaaaaaaattattaa

SEQ ID NO: 228784 - DNA, 899 bp, Unknown
  Bacterial polypeptide expressing nucleotide sequence isolated from the Sargasso Sea
aactaagaataacattatctcattagaaaaatttattcctctcaatttagataatttaaaattaggtaaatcctattactcatttattttaaatgataaaggtggaataatagatgatataatagtttcactagccaatataaataatcatgaaaacttttatatagtttacaattcttctagaaaaaatacagatgaaaaaatttttaaatcaatcgtagaaaattattcaattctagaaaacaattcattgattgcgatacaagggccaatctcgaaagatgcattagattttttaaaaatagattatcctaattcttttatgaaaaacatctcagtaaaattttgtaatgaaacaattttaataagtagaacaggttatactggtgaagatggttttgaaatatctattcctaattctattgtagaaaaatttataaatgatttaataaaatttgaaaatataaaattatgcggattaggttcaagagattcattaagattagaagctgggttaagtttatatggcaatgatttaaatgaagaaattacgcctattgaagctcaatttaaatgggcaatagataaagatagactttttaattcttcattaaatggatataaaatattaaattcacaaattaatgatggtgttaaaaaaataaaagttggattaaaacttttatcaaattctattataagatctaaaatgaaattatttgatttagaggataacgaaataggattaataactagtggaggtttttctccttcattaaaagtatcaataggtattggttacattaatagcgaatatcgttacgataaagttaaaagtgtaataagaaaatctatggaaaatattaatattgttaacttaccatttattccccacataa

SEQ ID NO: 228785 - DNA, 415 bp, Unknown
  Bacterial polypeptide expressing nucleotide sequence isolated from the Sargasso Sea
aaaggcggagtgattgatgacctaattatcactagagttgacggaggttttaatattatactgaatgcagcatgtaaggataatgacactaaagaaatagcaaaatgcttagactcagatagtaaatatgaactaaaaaaagatctctctcttgtagctttacaaggtccaaagtcagaaactattttagaagctataatcccaggtgtaaaacaacttaagttcatgaatggagattactttaaatttcaaggaaaaagaatttatgtcacaagatcaggttatacaggtgaagatggttttgaaatttcattatcaaatacaaatgcagaaaattttacaaaactcctatctaataaaggagctaaaccaataggtcttggagcgagagatacacttagattagaagcaaaaa

SEQ ID NO: 228786 - DNA, 851 bp, Unknown
  Bacterial polypeptide expressing nucleotide sequence isolated from the Sargasso Sea
gatttaaaaaatttaaaacaaaactgttctaagtatagttttttaatgaatgaagatgctggaatttatgatgatttaattatcactaaaatagaggaggggtatttaattatcttaaatgctgcatgtaaagataaagactttgagattttatctaatttattaggttcaaaatttaaaatgaacttagataacaataaatctttaatagcaattcaaggacctaaatctgttgaaattttaaactcaattataaatggggttgatcaactaaattttatgacaggaaattggtttgattctgataatcaaaaattatttgttacaagatcaggttatacaggggaagatggatttgaaatttcaatttctaacgataaagctgaaaaattcgttgaaaatttaatagaaaagggagcacaacttataggacttggggcaagagataccttgagattagaagctggattgtgtttatatggtcacgaattagatattaataaaacaccagttgaagcaaatcttagatgggcaatctcaaaatctagattatcaaatggtggttttattggatcgaaaaaaattatgaaccaaatgcaagatggagcaagccaaataagagttgggattaaacctgaaggaagactgattgcaagagaaaaaactaaaatatttaatgatacaggtaaacaaatcggtgagataactagtggcacgtttggaccaagtgtaaatggtcctatagcgatgggctatgttgataaagagttttcaaaggttgatacaaaaattttgctcgaggtaagaggaaaaaaacatccagcaaatgtttgtgcattaccattttataa

SEQ ID NO: 228787 - DNA, 373 bp, Unknown
  Bacterial polypeptide expressing nucleotide sequence isolated from the Sargasso Sea
aaacatattaaataaaattgttccaggatgtattgatttgaaatttatgaatggaaataattatagcattgaaggatcaaatatatatgtaactagatctggttatactggtgaagatggttttgaaatatctattaaaaatgaaaaagctgaaatatttgttgaaaaacttttagaaaatggatctaagctcatagggttgggagcaagagacactttaagattagaggcaggattgtgcttatatggaaacgatctagatataaaaacaagtccaattgaagcaaaatttaagtgggcaataccaaaaagtagaattaatactgaatatcctggatcaaaaattctaaattttcaattgaaaaggagttaa

SEQ ID NO: 228788 - DNA, 898 bp, Unknown
  Bacterial polypeptide expressing nucleotide sequence isolated from the Sargasso Sea
attgtacgaattacacaaaaagcacaacgctaagttcgttgagttcgttggttatagtatgccgattcaatattccgaaggaattgttaaagaacataatattacaagaaataaatctggaatttttgatgtttcgcatatggggcagttattcattaaatatagtgatgacgtaacagataagctccaagaaattttaccgactgaccttaaaaatttaaaaattaatcaaagcaagtattcgtttttaatgaaagagaatgggggaatatatgatgatcttattatcaccaggatgaaagatcattacatgattattttaaatgctgcatgtaaacaaaacgatcttcagattattaaaaataaattgaatgataaagatttggatatgaacaatgatttatctcttatagcgatacaaggtccagaatctaaaataattcttgaaaatgtagtttcaaatgtatcaaaattaaaattcatgaatggaggaaacttttcttttgaaaataatgaaatctttataacaagatctggatatacaggtgaagatggttttgaaatatcaatacctaataaagttgcaatctcttttgtagaagaattaattttaaaagggtcaactttaatcggtttaggtgcaagagacactttaagattagaggcaggattatgcttatacggtcatgacataaatgaaaataccagtccagttgaagcaaatttaaagtgggctatttcaaaaaaaagaattaatgataattttacagggtcgcaaaaaataaaaaaacaaattgaagaaggtgtatcaaaattaagagttgggattaaaccagagactagagtcatagcaagagagtcaacgaaaatttttgatgaaaaaaatatgagattggaa

SEQ ID NO: 228789 - DNA, 868 bp, Unknown
  Bacterial polypeptide expressing nucleotide sequence isolated from the Sargasso Sea
atgtagagaaagtgcgattgttacagatttatctccacttagaaaatttgaaattttaggacctgatgctgaaaacttaatgcaatatacacttactcgtaatgtaaaaaaactttctgcgggtcaagttgtttattctgcaatgtgctacgaaaatggctgtatgatagacgatgggacattaatgaaatttggacaagataattttagatggatcggcgggcaagaatatggtggtgagtggctaaaagagcaagcaaaaaagaaaaattttaaagtttgggtaaaatcatcaacagatcaaattcataatattgcagttcagggtccaaatagtagaaaaattttggaaaaatttgtatggacaccagacactcaaccgtcaattaaagatttagaatggtttagattgactattgcaagaattgactccgtaaccggaacaccaattatgatatcaaggaccggttatacaggtgaattaggattcgaaatctggtgccacccgaaagatgcgggtacagtttgggacaaagtttttgagtctggtaaagaatttaaaatatcccctttgggattagaagctttagatatggttcgtatagaagctggactaatattttatggttacgagtttgatgataaaacagacccttttgaagcaggcatagggtttacggtaccacttaaaactaaagaagatgatttcattggtaaagaagagttaataaaaagaaaaaataatccacaaaaaaaacttgttggtcttgaattggtgggccatgaaccagcagtaactggtaatacagttcatattggaagaggccaagtaggagtaattactagcggtatgctatccaagacttta

SEQ ID NO: 228790 - DNA, 767 bp, Unknown
  Bacterial polypeptide expressing nucleotide sequence isolated from the Sargasso Sea
catgacttctcctgaactccttaaaactccactgcatgcctggcattctgaaaaaggggggaagatggttcctttcggcggatgggacatgccggttcaatattcaaatggaatcctctcggaacatttggcaacccgtcggtgtggaggcctgttcgatgtcagccatatggggcgtttcagagtggaaggtcgggatacgatgacatttctgcagcgggtgctgacgaacgatgcctcccaactggaaccatggcaggcccaatacaccctgattgccaacgaaaacggaggggtgatcgatgatgcctacctttatcacccgggaggagaattcctcatcgtcgtcaacgcgtccaaccgcaaaaaggactgggaacattttcaggagcaagcacggcaattcgaagatttaaggcttgaggacttaagcgaggaagtggcaatgatcgcggtccagggtccacagtccgaagaactgatttcagagttcctgaaatctggaagcctccccgaacgaagacacaatcgtctctcaaaaatcagcatcatgggcgaagaaatgctgatctcccggacgggttacaccggggaacctctatgttttgaaatgttcatgtccgccgatgcagtaacgggcatctgggaaaaactcctccaatccggaatttccaggggaatgacggcggcggggcttgggcgctcggataccttgaggttggaggcaaggcttccgctttatggacacgaacttggagacgatccgg

SEQ ID NO: 228791 - DNA, 688 bp, Unknown
  Bacterial polypeptide expressing nucleotide sequence isolated from the Sargasso Sea
tatggaaaaaacagctttatataattttcataaaaatttaggagcaaagtttgttgcttttgctggatatgaaatgccaattcaatacaaagatggtattgttaaggaacatataagtacacgacagactgcaggtttttttgacgtctcacatatggggcagctttttatttcaggaagcaaatcattagaacaaaatttagaaaaaatcattcccttagatttcaaagaaattaaaataaatcaatctaaatattcttttttgataaatgataaaggcggagtgattgatgacctaattatcactagagttgagggaggttttaatattatattgaatgcagcatgtaaggataatgacactaaagaaattgcaaaatgtttagattcagatagtaaatatgaactaaaaaaagatctctctcttttagctttacaaggtccaaagtcagaaactattctagaagctataatcccaggtgtaaaacaacttaagttcatgaacggagattactttaaatttcaaggaaaaaaaatttatgtcacaagatcaggttatacaggtgaagatggttttgaaatttctttatcaaacacaaatgcagaaaattttacaaaacttctgtctaataaaggagccaaaccaataggtcttggagcgagagatacacttagattagaagccagg

SEQ ID NO: 228792 - DNA, 595 bp, Unknown
  Bacterial polypeptide expressing nucleotide sequence isolated from the Sargasso Sea
gttgactaaaaattttattaactacaatggatattggcttgcgaataattatacaaagtatggtgcagttaaagaatacacctcatgtagagaaagcgcgattgttacagatttatctccacttagaaaatttgaaattttgggaccagatgccgaaaatttaatgcaatacacacttacacgtaatgtaaaaaaattatctgtgggtcaagttgtgtattctgcgatgtgttacgaaaatggctgcatgattgatgatggtacattaatgaaatttggacaagataattttagatggattggtggacaggaatatggtggtgaatggcttaaagaacaggcaaaaaagaaaaattttaaagtttgggtaaaatcatctaccgatcaaattcataatattgctgttcaaggaccaaacagtagaaaaattttagaaaaatttgtttggacacctgatactcaaccatcaattaaagatttacaatggtttagattaacaattggtagaattgatagtgttactggtactccaattatggtgtcaagaaccggatatacaggagaattaggtttcgaaatttggtgccatccaaaa

SEQ ID NO: 228793 - DNA, 751 bp, Unknown
  Bacterial polypeptide expressing nucleotide sequence isolated from the Sargasso Sea
agttgtcatgcagctaatattgaaaaagattgggaatggattcaaaagaatttaaaaaattatgattgtgctattaaaaatttatccgatgaaattggtcttatctctgtacaaggacctaattcattaaatctaattaatgaagtatttaattttgattttagtcaattaaagaagttttctttccataatattaaaataaataataaatcaattatagtttcaaacacaggttacactggatcgaaaggctatgaattatacattgatgtgaatatagtaagtgatatttggaatcaattatttttaaagggtgagaaatatcaaatacaagctattggcttaggagctcgtgatactttaagaatggaaatgggttattgtttatatggaaatgatattgatgatactactacaccatttgaggctaacttaatgtgggtcacaaatattgaaaaagattttataggtaaagaaaaattactcaattcaataagttcatcatccaaaaagatgataaattttaaaatggttgacagaggtattccaagaaatggatatgacatatgtaataaagaaggagataaaattggcaatgtaacttcaggaacattttcaccaaccaacaaagtaggtataggaattggctatgtaaatatcaaacattcattgggtgatgaaatttttcttttaataagagataaattggttaaagctgaaatcactaaacttccactaaagaatgggtaga

SEQ ID NO: 228794 - DNA, 582 bp, Unknown
  Bacterial polypeptide expressing nucleotide sequence isolated from the Sargasso Sea
tatggaaacacaaaaaacagctttatacgattatcataaaagtcttggagcaaaatttgttccattcgcaggatatgaaatgcctgttcaatattcttcaggaattgtagatgagcataaactaacgagaagtagcgctggtatgttcgatgtctctcatatgggacaattatcaatagaaggaaatgaagatttggcaaatgaattagaaaaaattattccaatagatctaaaaaaaataaaacttaatcaatcaaaatattcttttcttactaatgaagagggtggaatctacgatgatttaattgtaactaaagttgaaaaaggttttaatattattcttaatgctgcatgcaaaaataacgattttaaaataattagtgactcacttaagaataaatttaaaataactttacataacaatttgtcacttattgcgttgcaaggcccaaaatcatcacaaatattagaaaaaataattagtggagtttcttcccttaaatttatgaatggaaataaattttcttttaaaaacacagatgtttatattacaagatcaggatatacaggagaagatggatt

SEQ ID NO: 228795 - DNA, 835 bp, Unknown
  Bacterial polypeptide expressing nucleotide sequence isolated from the Sargasso Sea
atggaaataaaaaaaacatcgctaaataaacttcatcaaagcaacaacgctaagtttgttgaatttgctggttatgaaatgcccattcagtatagcaaaggtattattgaagaacataaatttacaagatcacactctggaatatttgatgtatctcacatgggacagttattcatatatggtgatgaaagtttaacagaagaattagaaaaaatttttccattagatttaaaaaatttaaaaaaaaactgctcaaagtatagttttttaatgaatgaagatgctggaatttatgatgatttaatcattactaaaatagaagaaggatatttaattattctaaatgctgcatgtaaagataaagattttgagattttatacaatttaataggttcaaaatttaaaatgagtttagacaacactagatctttgatagcgatacagggacctaagtctgttgaaattttaaactcaatcataaatggggttgatcaactaaattttatgacaggcaattggtttgattctgataacaaaaaattatttgtcactagatctggttatacaggggaagatggatttgaaatttcaatatctaacgaaaatgctgaaaaatttgtagagaatttaatagaaaagggagcacaactaataggacttggggcaagagataccttgagattagaggctggattgtgcttatatggtcacgagttagatataaataaaacaccagttgaagcaaaccttaaatgggcaatctcaaagtctaggttatcaaatggtggttttataggatcaaaaaaaattatgcatcaaatgcaagatggagcaa

SEQ ID NO: 228796 - DNA, 709 bp, Unknown
  Bacterial polypeptide expressing nucleotide sequence isolated from the Sargasso Sea
atgattaaaaaaacacctttatacaacttacatatccaacacggtgcaaaaatggttgagtttgcaggttatcaaatgccaattcaatatgagagtggaataatccaagaacataaatttaccagagaaaatgctggtatatttgatgtatcacatatgggacaactatttgtaaccggttcagatcagcttacagatgatcttgaaaaaatatttccagttaatttaaaaaatttaaagacaaatcaaagtaaatattcttttttaatgaatgaaaagggaggaatttacgatgatttaattattacaaaattaaaagatagttacttaattattttaaatgcagcatgtaaaaagcaagactttgaaattataaaaaaaaaattagatgacaaatatgagctaaatttagatgaaagcctatctttgattgcgatacaaggaccaaaagcaaaagatgtattaggaaaagtagtttcaaatacaagtaatcttaaatttatgaatggagaagaatttgaatatgataattcaaatatttatataacaagatctggttatactggtgaagatggttttgaagtatctttaaaaaacgaaaaagtcgaaaaatttgttgatcaattaatcaatcatggtgctagacttatagggctcggtgcaagagacacattaagattagaggctggattatgtttatatggtaacg

SEQ ID NO: 228797 - DNA, 756 bp, Unknown
  Bacterial polypeptide expressing nucleotide sequence isolated from the Sargasso Sea
aatgaataaaacctatctaaataagtttcatcaagaaaacaatggtcatttagttgattttgccggctgggaaatgcccatcaattatggttctcaaataaacgaacataatttagtgagaatggatgtcggtattttcgatgtttctcacatggctgtttttgacctacttggcagcaatcaaacagaatttcttaagtttttaataccgaatgacgtaaggaagatattggatagtaaaagagcattgtactcacctttattgaacgaaagtggggggattctggacgatttgattgtataccatttaggtaatgataattttagaatcgtttctaattgtgctacacgtgagcaaaactatgcttggttcaacaaaattgcctcagagtttaatgttcagattgattttaaatcggacgcatcaattattgccttgcaaggaccaaactccataaataatttatcgagtttgtataacgttgaattagaaaggtttcatctctatcaagatgatgatgtcatgatagcaagaactggatatacaggggagcttggagttgaaattatatctaacgctagtaaagggttagaaatttgggaacattttatctcaaaagatattcaaccgattggtcttgctgcaagagatactttaagactagaggcaggctttaacttatatggttcagatatgactgcaaagaacaatccatacgattcaaatcttgaatggacggttgaccatagtgatga

SEQ ID NO: 228798 - DNA, 913 bp, Unknown
  Bacterial polypeptide expressing nucleotide sequence isolated from the Sargasso Sea
catgggtggagaggacttaactgctgatcttgaaaaaatttttccacttgatttaaaaaatttgaaacaaaactgttctaaatatagttttttaatgaacgatagtgctggaatttatgatgatttgataatcactaaaattgaaaatggatatttaattattttaaacgcagcctgcaaagataatgattttaaaattttatcagatttactgaacagtaaatatgaaatggctctagatgatcaaagagcactaattgcaattcaaggtccaaagtcagttgagattttaaacaatacaatagagggtgttgaaaaacttaattttatgacagggaactggtttgattataaagatcagaaaatttttataacaagatctggttacactggagaggatggttttgaagtatctattaataacgatttagctgaaggatttactcaaaatttgatggaaaaaggagcacaacttataggacttggggcaagagataccttgagattagaagctggattgtgcttatatggacatgaacttgatactgagaaaacaccaattgaagcaaacttaaagtgggcgatttctaaagagagaatttcaaatggtggatttgttggttctgataaaattatgaaagaaataaaagagggtacttctaaaataagaattgggattaagccagaaggtagattgattgcaagagaaaaaaccaaaatctttgatgagtcagaaaaacttattggtgaagtaactagtggaacttttggcccaagtgtaaatggtccaatagcaatgggctacattgataaagagttttctaaagttgatacaaaagttttactagaagtaagaggaaaaaaacatcctgcaagtgtttgtgggttacattttataaaaaaagttatttga

SEQ ID NO: 228799 - DNA, 849 bp, Unknown
  Bacterial polypeptide expressing nucleotide sequence isolated from the Sargasso Sea
atgccaattcaatactcagaaggtattgtagaagagcataaatttacaagaaatcactctggtatttttgatgtttcacacatgggtcaattatttatttatggtggcgatgaactaatcaaagatttagaaaaaatttttccattagatttgaaaaatttgaaactaaatcattctaaatacagcttcttaatggataaagatgctggaatacaagatgatttaatcattacaaaaattaatgagggttttttaataattcttaatgcagcatgtaaagacaatgattttaaaattttaaaggaactgttaaacgaaaagtataaaatggttttggatgaaaatagatctttaatagcaattcagggacctaaatcatcacaaattctaaatgatgtcattgatggagtaaaagatttaaattttatgtctggaaactggttcttatttgataatcaaaaagtatacattactcgatctgggtatacaggtgaagatggtttcgagatatcaattccaaataattttgcagataaattgaccagggaattaattgataaaggttcgaagctagcgggtttgggagcaagagacacactaaggttagaagctggcttatgtttgtacggtcatgatcttgacaaagacaaaaccccggtggaagcaaatttaaagtgggcaatttcaaaagagagaatatctgaaggaggctttattggttcagatattattattaaacaattgaacaatggtgttacaaaaattagagttggaattaaacctgagggaagggtaattgctagagaaaaaacaaaaatatttaatcaatcagacgttcatatggagaga

SEQ ID NO: 228800 - DNA, 658 bp, Unknown
  Bacterial polypeptide expressing nucleotide sequence isolated from the Sargasso Sea
ccaggggaagcactcagaggcacttgttcaaaaactatgtgatacttctcttagcgaaattgaatactaccattttaaaaaagcaaaaatctataattatgaatgcattgtggcacgtactggctataccggtgaagatggatttgaaatatacaccgattcaaatgatatccagtccatatttaaaaaaattatcgagcaaggaaaaccctttaacctacaacctattggtttgggtgcgagagacaccctgaggttggagatgggctatgccctttatggcaatgaaattaatgaaaacagtaaccctctggaagctggtttgggctgggtcataaaattgaaaaaggatgattttttggggaagtcaatacttaaaaaacaaaatgatgcggggctttctcgaaaacttgtcggcatccgattgcttgagcgaggggtaccacgtccccactaccgggttttacatgaaggatccgctgttggagaattaaccagtggaacattttctccttccttgaatacgggaatcggtttatgttatgtatccactaaatatgcaaaacccggaaccaaactggatttggaaatcaggaaatcgagtgtacctgctgaggtcgtaaaaccacctttcctgccaagccgtgtaaaaaaataa

SEQ ID NO: 228801 - DNA, 875 bp, Unknown
  Bacterial polypeptide expressing nucleotide sequence isolated from the Sargasso Sea
tgtatatcatctgcatgtccttgtgatgtagatgctgctaatgggtggaaccctacagatatttttgttagaacttatgcaaaaaataataaatattcaaaagcaattacatttagaatgaaaacagattctgaaccaaaattaactcaagaaacaggttttcataaaaagacatctgaattaacaagaaattttgttgaatacaaaggtttttggttggctaataattttacaaattcaggaaccataaaagaatacaatgcttgtagagaaagtgcgatagcaactgatctttctccattaagaaaatttgaaatcttgggccctgatgctgaaaatttaatgcaatacactttaactagaaatgttaaaaaattatctgtagggcaagtagtctatacagcaatgtgttatgaaaatggatgcatgttagatgatggtacattgtttaaatttggacaagataattttagatggattggtggagatgagtacagtggagagtggttaaaagaacaggctaaaaagaaaaattataaagtttggatcaaatctgcaacagatcacattcataacattgcagttcaaggaccaaacagcagaaagattttagaaaaatttgtttggacagcccctattcaaccatcaataactgagcttgaatggtttagatttaatattgctcgaattgatcatgaaactggaacaccaattgtaatttcaagaactggttacacaggtgagcttggctatgaaatttggtgccatccgaaagatgcttctgaagtttgggataaagtatgggaagctggtaaagaatttgatataacgcctctaggtttagaagctttagatatgggtcgtattgaagctgg

SEQ ID NO: 228802 - DNA, 837 bp, Unknown
  Bacterial polypeptide expressing nucleotide sequence isolated from the Sargasso Sea
aaatatacagatgggtaaatagagttagtatggatattaaaaaaacatctttaaataaattacatcaggatagcgaagctaaatttgttgaatttgctggttatgagatgccaattcaatacagtaaaggtgttattgaagagcataaatttacaagatcgcatgctggtatctttgatgtttcacatatgggtcaattatttatttacggaaatgaaaatctaacatccgatcttgaaaaaatttttcctttagatttaaaaaaccttcaacaaaattgctctaagtatagttttcttatgaacgaagaggcaggtatttatgatgatcttataattactaaactggaagatggatacttaattattttaaatgctgcatgcaaagaaaaagattttgaaattttaagcaatatattgtctaaaaaatataaaatggaactaagtaataatagagcgctagttgcaatacaaggtccaaaagcagtagaaattttaaatgaaaccataaatggcgtcaaaaatttaacttttatgactggtgactggtttgattataatagtcaaaagttatttattactagatcaggatacacaggagaggatggctttgaagtatccattataaatgctttagctgaagaattcacaaaaagcttaattaagaagggtgcagaattaattggtcttggagcaagagatactttgagattagaggcgggactatgtttatatggtcatgaattagacctaaataaaactccagtagaggcaaaccttaaatgggcaatatcaaaagaaagattatcgaatggaggttttgtgggctccggataaa

SEQ ID NO: 228803 - DNA, 812 bp, Unknown
  Bacterial polypeptide expressing nucleotide sequence isolated from the Sargasso Sea
agggttattacaaaatgggaaaaaacagctttatataattaccataaagatcttggtgctaaatttgtttcctttgcaggttatcaaatgccgatacagtacaaagatggaattgtaaaagaacatatttccacaagatcatacgcaggtttttttgacgtttctcacatggggcagtttttcttagagggagacggaacattagctgatgctttagaaaaaattattccggcagatcttaaatctttaaaattaaatcattccaaatactctttcttattaaataacgagggtggaattatagatgatttaattattacaaaaacttctaaaggattctgcattattttaaatgcagcatgtaaagagaacgacgtaaaacaaatccagaaatttttacacaaggatcacaattattttttaaataatgatttatctttaatcgcattacaaggaccaaaagcagttgagattttagaaaaacttatacctgaagtttcaaatttaaagtttatgactggtgataattttagatttgataatgaaaacttatatataactcgatcaggatatactggtgaagatggatttgaaatatctattcctaataacaaagttgaaaaactcatttcgtttttaaaagaaaataaagttatagctgtaggattaggcgccagagatacattaagacttgaagccggattatgcttatacggtcacgatttaaatgagaagattaatccaatagaagctaatttaaaatgggcgatagccaaaaggagaagagaagagggcggctttaatggttggga

SEQ ID NO: 228804 - DNA, 310 bp, Unknown
  Bacterial polypeptide expressing nucleotide sequence isolated from the Sargasso Sea
aatgaaatcaacagcactattacaattccatattaaactgggcgcaaaaatggctgagttcgctggatataacatgccaatatcatatacaagcattaatgaagaacatgactgcgtgcgcaataatgtaggcgtatttgatgtatctcatatgggagagtttttaataagtggctctggtgctaaagaattagttcaaaaggttacatctaataatgtaaatactttggagccaggaaaagcacagtactcctgttttcctaataaaagtggaggtatagtagatgaccttattgtttactgtctaaaa

SEQ ID NO: 228805 - DNA, 930 bp, Unknown
  Bacterial polypeptide expressing nucleotide sequence isolated from the Sargasso Sea
tatgggtcaattatttatttatggagatgaaagtttaacagaagaattagaaaaaatttttccattagatttaaaaaatctaaaacaaaactgctccaagtatagttttttaatgaatgaagatgctggaatttatgatgatttaattattaccaaaattgaggatgggtatttaattattctaaatgctgcatgcaaagacaaagattttgagattttattcagtctactaggtttgaaatttaaaatgaatttagtcaaaaatagatctttgatagcaattcagggacctaaatctgttgaaattttaaactcatttataaatggggtcgatgaactaaattttatgacaggaaattggtttgactatgataatcaaaaaatatttgtcacaagatcaggttatacaggggaagatggatttgaaatttcaatttctgatgataaagctgaaaaatttgtagaaaatttaatagagaagggagcacaacttataggacttggggcaagagataccttgagattggaggctggattatgtttatatggtcacgaattagatattaataaaacaccggttgaggcaaaccttagatgggcaatttcgaaatctagattatcaaacggaggctttattggatcaaaaaaaattatgaaccaaatccaagatggagcaagccaaataagagtagggattaagcccgaaggtagattgattgctagagaaaaaactaaaatatttgataataaagatacacaaattggtgaaataactagtggaacgtttggaccaagtgtaaatggtccaattgccatgggatatgttgataaagagttttcaaaagttgatactaaaattttgcttgaggtgagaggaaaaaaatatccagcaaatgtttgtgcattaccattttttaaaaaaaattatgt

SEQ ID NO: 228806 - DNA, 892 bp, Unknown
  Bacterial polypeptide expressing nucleotide sequence isolated from the Sargasso Sea
aaaatttttccaacagatttaaaaaatatttcagtcaatcaatctaaatatagttttttaatgaatgataacgctggaatttatgatgatttgattattactaaagtaaaaaatggatttaatattgtattaaatgcagcttgtaaaaattcagattttaaaattttaaaaaaattattaaaaaacaaatatgaaatgaatttaaaagaaagctactctcttattgctattcaaggacctgaatcagtaaaagtattggaaaaagtagttagtggagtatcagaactgaaatttatgcatggtaattattttaattatttagatgaaaatatttatattacacgatcaggctatactggagaagatggatttgaaatctcaattaaaaataaaaatgttgagagattgaccgaaacattaataaaagagggaggaaaactcattggtttaggagcaagagatactttaagattagaggcaggcctatgtttatacggtcatgatatggatataaacaaaagtcctgttgaagctaatttaaaatgggctatatcaaaaaatagaattagttcaggtggttttattggttttaagaaaattaagtcacaaatagaaaatggagttaaaaaagttagagttggaattaaaccagatggaaaaataattgctagagaaaaaactgtaatattcagtgaagataataaaaatattggagaaataacaagtggaacattcggaccaagcgtcaaagcacctgttgcgatgggttatattgaaaattcttttgcaaaaacaaatacaaaaattttcttggaagtaagaggaaaaaaacatccagcgagtataagtaatttaccattttataaaaaaaaattatgtgaaaggagcaaac

SEQ ID NO: 228807 - DNA, 631 bp, Unknown
  Bacterial polypeptide expressing nucleotide sequence isolated from the Sargasso Sea
aatgagtaatcttctaactacccaactttacaattttcatgtagatcaaaaatctaaactaattgaatttgctggatggaatatgccattctcttatgatggaactttaaaagaacacaattatgtaagaaataattgtggcttttttgatgtatcccatatgggcaggttagttttggatattgatcaaatacaaaatgtaagtaaattaatatgttcagatattctcaatttaggcaattcaaaagctttatatacaatattcactaatgaaaatgggaaagcgttggatgatgttatattttggaaatttgaagataagttaattttgatttgcaatgcaagtaatagagagaaaatttcaaaacacttaataaataataatattgaatttgaagacgaaacctttaatacttgtttgattgcaattcaaggtcctaatacagaaaatctcttaaaagaatatttagatttacctgaacatttttccgctgtagacaatggagaatatatatgtgcaagaacgggctatacaggagaagatggatttgaaattatgtttaagaattctaaaatcgatgagatattaaattatattgttagtaacgaaattaaaccatgtggattaggt

SEQ ID NO: 228808 - DNA, 853 bp, Unknown
  Bacterial polypeptide expressing nucleotide sequence isolated from the Sargasso Sea
atggaaataaaagaaacatctttaataaaccttcataaatcacatggcgctaagcttgttgagtttgcaggttaccatatgcccattcaatactcagaagggattttaagtgaacataggtttactagatcaaattgtggaatttttgatgtttcgcacatgggtcaattatttatttatagtaatgaaaatttaacaaaagatcttgaaaaaatatttcctatagatttacaaagtttaaaaataaatcagagcaagtactcatttttaatgaatgaaaaaggaggtatctgtgatgatttaattattactaagattaataaaggttacatgattattttgaatgctgcatgcaaaaataacgattttaaaattcttaaagaaaagttaaatgataattataaattagaacttaaagaaaatttatctttaattgcattacaggggccaggagccaaaactatacttggaaaaattatacctgaaattactaatctaaaatttatgcatggtggagagtttagctataatgacttaaaaatttatattactagatcaggttacactggtgaagatggatttgagatatcaattccaaatgaaatagctgaacattttacaaaagtattactgaaaaatgggtcaaaattaattggtttaggtgcaagagatacattacgtttagaggctgggctttgtttatatggaaatgacctagatacagaaaccactcctatagaagctaatttaaagtgggcaatatcaaaaaaaagaattgatgaccaatatccaggatctgaaattataaaaaaacagattgagactggtgtaaaaaaattgagagtggaataaa

SEQ ID NO: 228809 - DNA, 682 bp, Unknown
  Bacterial polypeptide expressing nucleotide sequence isolated from the Sargasso Sea
atggaaacaaaaaaaacatcattatataatcttcatcaaaagaatggagcaaagtttgtggatttcgcaggctatcaaatgcctgtacaatataaagaaggtataattgaggaacacaaatacaccagagcttgttcaggaatatttgatgtttctcatatggggcaattattcattaatggcaacgatgatttaaccaaagaattagaaaaaatatttcctactgacttaacaaatttatcaataaataagagtaaatattcatttttgatgaatgaaaatgctggaatacatgatgatttaataataactaaaatagaaaatggctttatgatcattttgaatgctgcttgtaaagaaaatgattttaaaattataaaaaaaaaacttgataaaaaatttgatttaaaaattagagaagatttatccttagttgctttacaaggaccagaagctaaaaacgttttagaaaaaatcattccacaatcaaacaatttaaaatttatgcatggaaatagttttccttttaaagatataaatatttatataacaagatcaggatatacaggcgaggatggttttgaaatctctatagacaattctaaagctgagagctttgtagaggttttattaaaaaatggatcaaaattaattggtcttggggcccgagacactcttagac

SEQ ID NO: 228810 - DNA, 808 bp, Unknown
  Bacterial polypeptide expressing nucleotide sequence isolated from the Sargasso Sea
gatgtcggagttacttaacccttggcaggcgcattatactttgattccgaacaataatggcggactgattgatgatgcatatcttttccgtacgggagatgaatattttctggttgtgaatgcttctaaccgagaaaaggactggaatcatctccatggacaagcaggttcctttaatgtttcattggaagaccaaacttcacatatttccatgatcgcattccaggggcctttgaccgaaagtattctggtcaagcttttagaagggggaagcatgccagaaacatcacgtaatagactttctgaaattacagttgcagggacaaaaataattgtatctagaacgggatacactggtgaaccattaggatttgagctctttatcccctctgaaaaggttgaagaggtatggaattgtctttatcaggcaggatttgatgatggtattgttactgttggacttggtgcaagggatacccttagacttgaagcaggtatgcctctatttggacacgaatttggaatggatcaggaaggcaaggagatacctgcatttgcattccccctaacttcagttgcagtaaaattttcagcaagaaaaggtgattttatcggccgtcaggcactcaatgatcagttcaaagaagtccgtaaattgaaaatgggacagtatcagtcttcagaaatacttcccaagcgcatccttcctttagcactaacagacaatggtattgcgcggcaaggcgatcctgttttcctgaatggctcaaaagtagggttggtaaccagcggaacaatggttccatat

SEQ ID NO: 228811 - DNA, 961 bp, Unknown
  Bacterial polypeptide expressing nucleotide sequence isolated from the Sargasso Sea
cgagttaccattagatattcctcttaaaaactttcacgaagctaatggtgctaaaatggttacgtttgctggttttaatatgccaattaattataagccaggcataattaatgagcataaaaatgttagaaaccattctggtatttttgatgtaagtcatatggggcaagtgttaatagaagttaacagcttgaatattaaaaatttagaaaaatatattccattaaaattaaataatttaagaaaaaataaatcaaattacacatttttacttaataaaaatggcggtgtagtagatgacttaattgtttctttaatagaaataaatagtaaatcttttttatacattgtttacaatgcatctagaaaaaatgaagatgaaaaaattttcttcaaatgtgctcctaatgcagaaattttacatgttaaaaactgtttgtttgctattcaaggtcctgaatcaattgaagttcttaataatataattgaattaccaattgatatgaattttttagacattgacgtaataaaatataaaaaaaattcagtaattataagtagatctggttatacaggcgaagatggatttgagatttctatatcaaccgaagattctgaagtattcataaaagatttattaaagaataaaaacactatgctttgtggtctaggatcaagagactcattaagattagaagctggattgagtttatatggtcatgaacttaatgaaagcataacaccaatagaagcaggattattgtgggcacttgataaagatcgattaaaagattctgcactcaatggtaataaaattttatcagatcaattatataataaaccttcgattaaaaaaataggattagtttcagctaataggtcaatgctaagagatggaatgattttatttgataataataaaaaaaatataggtaaaattacgagtggttgctttagccct

SEQ ID NO: 228812 - DNA, 797 bp, Unknown
  Bacterial polypeptide expressing nucleotide sequence isolated from the Sargasso Sea
aaaaattactggaggatatttaattattctaaatgcagcgtgtaaagaaaatgattttaaaataataaaagaaaaattgaatgataaatatgatttacaattaagtgataagtactcattaattgctattcaaggcccagaggcaaaaaacattttagagaaaaatatcaatggagtaaataaattaaaatttatgaatggtggtaactttaaatttcaaagttcagatgtttacgttacaagatcaggatatacaggagaagatggttttgaaatttcaattggaaataattatgctgaaagttttgtagaagaaatgcttaatatgggagcaaaattagtaggacttggagcaagagatacattaagacttgaagcaggcctatgtctttatggcaatgatattggaatgaatactacgccaatagaagcaaacctaagatgggcaatttctaaaaatagaatagatactgaatatcctggatcaagaattattaaaaaccaaattaaatctggtgtagacaaaattagagtaggaattaaacctgaaaatagagttatagctagaggaaatacaaaaatatttaataacgaaaagaaagagataggaaagattacaagcggtacatttggtcctagcgtggaacactcaattgcaatgggctatgttgagaataaatatgcagttttaaatacaaaattatttttagaggttagaggaaagaaaattcctgctaatgtttgtaatttaccattttataaaaaaaactacgttaaaggagaaataaatgtctgat

SEQ ID NO: 228813 - DNA, 884 bp, Unknown
  Bacterial polypeptide expressing nucleotide sequence isolated from the Sargasso Sea
ctttaaaaacttccatgaattaaatggtgctaaaatgattgaatttgcaggttataaaatgcctattcattataaatctggaattattaatgaacataaaaatgttagaaaaaaatcaggtatatttgatgtgagtcatatggggcaaatcttaataccagataatgagataaatattttaaatttagaaaaatatattcctttgaatttaaatagattattttctaataagtctaactattcttttttactaaataataatgcaggaattattgatgatatattaatttcaaaaattgaatatgaaaaaaaatcatatttttatattgtctataacgcatcaagaaaaataattgatgaagatatattcataaactctactaataattttaaaattttaaataataattgccttatcgcaatacaaggacccgaatcagaaaatgttttgaaatctataattgaaatacctaaagaaatgaattttttagatatacaaacttataattataatagtaaagatattattattagtagaacagggtatacaggtgaagatggttttgaaatttctatttctaaagatcatgctgaaaattttataaaaaaactaatattaaataataaatctattctttgtggattaggttccagagattctttaaggttagaggcaggactaagcctatatggacatgaactaaatgaacaaataacaccaattgatgctggcctatcttgggctattaataaagacagactaaaagatgattctttaaatggtaataaaatattattagataaattaaataataatcctacaaataataaaattggcattatatcattaaataaatctatgattagagatggtatgaaattac

SEQ ID NO: 228814 - DNA, 847 bp, Unknown
  Bacterial polypeptide expressing nucleotide sequence isolated from the Sargasso Sea
ggtcagttatttttaaaaggaggcgatgaattaactaatgacttacagaaaatattcccaattgatttagcaaaaatttcaataaatcaaagcaagtattcttttttgatgaaagaaaatggtggaatatatgatgatcttataattacgaaattaaaagatgggtacatgataatactaaacgctgcttgtaaagaggcagatctaaatattttaaaaaataaaattggtgaaaaatatcaaattaatttatcagataacttatctttaatagcaatacaggggcccaaagcaaaagatgttttagattcaattgtaccaggtgttactaaacttaaatttatgaatggtaaccaatttaagtacaacgacttagatatctatataactagatctggctatactggtgaagatggtttcgaaatttcgattgacaataaaattgtggagagtttcgtagaaaaacttattgaaaaaggttctacaatgattggtttaggagctagagacactttaagattagaagctggactttgtttatatggtcatgatttagatgagaatactagtccaatagaggcaaatctaaaatgggcaatttcaaaaagcaaaattaatgaaaagtttcctggttcagattttattaagaaacaatataacgaaggtgtttcaaaacttagagttggaataaaacctgaaacaaaagtaatagcaagagaatctacaaaaatatttgatgaaaaagataacgaaattggaaaagtaactagtggaacttttggaccaagcgttaatggtcctatagcaatgggatatattcataatgattattctaaaaaaaatacaa

SEQ ID NO: 228815 - DNA, 595 bp, Unknown
  Bacterial polypeptide expressing nucleotide sequence isolated from the Sargasso Sea
aatgagtaatcttctaactacccaattttacaactttcatttagaacaaaaatctaaacttatcgaattcgctggatgggatatgccattttcttatgatggtactttaaaagaacataattatgtaagaaatgattgtgggttttttgatgtatctcatatgggcagaatagttttaaatattgatcaaatagaaaatataagtaaattaatatgttcagacattgttagtttagaaaataccaaagctttgtatacaatatttactgatataaatggaaaagcattggatgatgttatattttggaagtttgaaaataaattagttttaatttgtaatgcaagcaatagagagaaaatatcaaagcacttaactaacaacaatatcgaatttaaagatcaaacttttgatactagtttgattgctattcaaggtccaaattcagcaaattatttaaataaattgttagatttacctgagcatttttttgccaaggagagtggtgaatatatttatgcaagaactgggtacacaggagaagatggatttgaaattatgtttgataattctaaagtcgaagaaattttaaatttt

SEQ ID NO: 228816 - DNA, 303 bp, Unknown
  Bacterial polypeptide expressing nucleotide sequence isolated from the Sargasso Sea
attgattaaaactaccccactctataacagtcatgtcaagttgggtgcaaagatggttgattttgctggttataaaatgccgattcaatacaccggtatcactgctgagcatcttaatgtcagagataatgttggtatttttgatgtttcacatatgggagagttcatagttcatggtcctgagtcagaacaattcttaaattatatatgttcaaataaaattgaaaacataaaaattggaaaagctcaatataatttacttattaataaaaatggaggaataattgacgatcttattgttta

SEQ ID NO: 228817 - DNA, 601 bp, Unknown
  Bacterial polypeptide expressing nucleotide sequence isolated from the Sargasso Sea
tatgtcaggaaactggtttaaatttgaaaatcaaaaagtttatattacgcgatctggttatacaggcgaagatggttttgagatatctattgcaaacgattttgtagacaaactaaccagagaattaattaacaaaggatctaaattgataggtcttggagcaagagatacattaagactggaagctggtttatgtctttatggtcatgatcttgataaagacaaaactccagtggaagcaaatttaaagtgggctatttcaaaagaaagaatttctaaaggagattttattggctctgatataattattaaacaattaaatgatggtgttagtaaaataagagttggaattaaacctgagggaagaattattgctagagaaaaaacaaaaatatttaatcaatcagatgttcatattggagaaatcacaagtggtacatttggaccaagtgttaatgggcctgttgcaatgggttatgtggaaaatgaattttcgaaaaaaaatactaaggtatttttagaagtaagaggtaaaaaacatcctgcaagtatttgcagcttaccattttataaaaaaagttatgttaaaggagtaaattaa

SEQ ID NO: 228818 - DNA, 637 bp, Unknown
  Bacterial polypeptide expressing nucleotide sequence isolated from the Sargasso Sea
ggtttatttgaagaatggattgaatcttcgatctcacatatccctaactttggatgcgaatataaaatttttgaacatatttcgcctaaggaaaaaattttcttttcaaagacaggctatacgggggaaaatggtctagaaatacttttatctaaaaaagcagcaattaatttatgggatttctcaatttctaaaaatgttgcaccctgtggtttaggagctagagatactcttagacttgaagcaggcatgcatctttatgggcaagacataaatgaagaaacttctccatatgaagcagggttaggatggctagtacatctagaaaataatcatgaattcattggtagaagagttcttgaagagcagtcaagattaggcattcaaaaaaagttagttggtctctctataaaaggtaaagcaataggaagaaaagggtgcgcagtgcttaaaggtgatgagaatattggaactatcactagcggcagttggtctccaactaaacaacaagctattgcttttgcatacatcaatacttcgcatgccttaataaataatgaagttcaaatatcaataagaggcaaaaaattcaaaggggtaataacaaagagagtgttttataaaaaaaattattaac

SEQ ID NO: 228819 - DNA, 814 bp, Unknown
  Bacterial polypeptide expressing nucleotide sequence isolated from the Sargasso Sea
tatgattacaaatgaaggtgatggatattttttagttgtaaatgcaagccgaactaaagaagggcttgatgaaatagaacatgcagcagactcattttcagagattaatatcaatcatcttgaagaaaatgggatgatagcaatacaaggaccaaaggctaaagatgttgctggtgaatattttaaagaggtcaatgaaactatgtattttatggactttataaatacaaaatataatggcaatgaagtaagaatttctagaataggttatacaggtgaagatggttttgaaatttcatcaaatagtgaaactatttttgaaattactaaaagtatttcaagtgatgaaagagtaaccatgtgtggtttaggagctagggatacactaagactcgaagcaggattacctttatacggtaacgaattaaatgaggatataacacctgttcaagctgacctaagctttgcaatctctccttcaagaattaacgaaaaaaattttagaggagcagaaagaataataaatgaaattaaaaacggaagtgagtatacaaggattggcctacttccagaaggaaggcgtccagttagaaaaggtactgaaattataaaaaatggaaagaaaattggcgagataagcagtggcggttatggccctactattaaatcaccaatagctatgggaatcataaaaagtgaattcttaaatctaaatgaaaaccttcaagctaaattaggtgatagtttaataacaatgaaaattatagaactgccatttgttgagcataaatattataggaaagggaaaaactaa

SEQ ID NO: 228820 - DNA, 796 bp, Unknown
  Bacterial polypeptide expressing nucleotide sequence isolated from the Sargasso Sea
ttattctggagaatggctaagagaattagcaaataaactaaaattaagtgcttgggtaaaaacttcaactgatcaacttcataatatttcagttcaaggacccaatagcagaaaattattatcaaaagttatatggactgctcctgatcatccaagtgtaaatgatctaaaatggtttaattttacaattagtcgtattggcgatcataaaggggcgcctttaatggtttctagaactggttatactggtgaactaggttatgaactctattgtcatccaaaggacgcaccaacaatttgggatgcagtttggagtgctggtcaagaattcaatataactccaatgggatttgaagctttagatatgttaagaattgaggcaggtttagtacttggtggaaatgaatttagtgatgaaactgatccctttgaagctggtattggttttactgtacctttgaaaacaaaagaacaaaattttataggtaaagaagccttaattaaaagaaaagaataccctcaaaaaaaattagttggattagaaatagaaggtaacgaaaaagtaaaccatggagattgtgttcatagtggaagaggacaagtaggtataattaccagcggaactttttctccaactctgaataaaaatatagctttatctagagtagatattcattcatcagatttagaaacaaaacttgagataggaaaattagatggccatcaaaaaagaataagggctaaagttgttaaatttcctttttatgatccagacaaaacaagagttagatcataa

SEQ ID NO: 228821 - DNA, 450 bp, Unknown
  Bacterial polypeptide expressing nucleotide sequence isolated from the Sargasso Sea
ttagaaaaaatggagcagacgaaataggcttaggagcaagggatgttttaagattagaagcctctctgcctttacatggcaatgaaattactgaaaatacaaatcctttcgcagcaaaacttggtatgtttgtaaaattagatagagaaaactatttgattaattcaaagctaacttctttgaaatctactagtcaagaaaaagtattagttggatttgaaattcaaggcagaaatatagctagatctcataacagtgtattagattccgaaaataatatcattggagaagtaacaagtggttctttttcacccactttgaataccagcattggcttagcttatgttaaaaacagttttacagaccttaattctgaagttaaaataaatataagatcaaaaaatataactgctaaaataataaaaacaccattctataaaaggagttaaa

SEQ ID NO: 228822 - DNA, 535 bp, Unknown
  Bacterial polypeptide expressing nucleotide sequence isolated from the Sargasso Sea
aaaaaactcattcgatttatttgaagaatggattggatcttcgatctcacatatacctaactttggatgcgaatataaaatttttgaacatatttcgcctaaagaaaaaattttcttttcaaagacaggatatacaggggaaaatggtctagaaatacttttatctaaaaaagcagcaattaatttatgggatttctcaatttccaaaaatgttgcaccttgtggtttaggagctagagatactcttagacttgaagcaggcatgcatctttatggtcaagacataaatgaagaaacttctccatatgaagcaggattaggctggctagtacatctagaaaataatcacgaattctttggaagaagatttcttgaagagcagtcaagattaggtattcaaaaaaagttagttggtctctctatagaaggtaaggcaataggaagaaaaggttgcgcagttcttaaaggtgaagaaaatattgggactatcacaagcggaagttggtctccaactaaacaacaagctatagctttt

SEQ ID NO: 228823 - DNA, 878 bp, Unknown
  Bacterial polypeptide expressing nucleotide sequence isolated from the Sargasso Sea
tataagcacaagacaggccgcaggtttttttgatgtttctcatatgggacagctatttatatctggcgataaatcttcagaaaaaagtttggaaagaattatacctttagattttaaagaaattaagattaatcaatcaaagtattcttttttaattaacgacaaaggtggagtcattgatgatcttattattacccgtgttgatggaggctttaacatcatattaaatgcagcttgtaaagataacgatatcaaagaaatagcaaaatgtttaaattcagaaagtaaatacgaattaagaaaagacctttcccttattgcgctacaaggcccaaaatcagaaactattttagaatcttttgtgggaggagtaaaagaacttaaatttatgaatggtaattattttaagtttcaaggaaaaaaaatttatataactcgatctggttacaccggtgaagatggctttgaaatttcagttcctaatacagatgcagaaaacttcacaaaacttctttcagataaaggagcaaagccaattggtcttggagcaagagatacattgagactcgaagctggtttatgtttatatggaaacgaactaaaccaagatataagtcctgtacaggcaaatttaaaatgggctatttctaaaagaagaagagaagagggcggtttcaagggctgggaaaatataaagaatgatttactaaatggtgtttctaaaataagagttgggattaaaccatccggacgagttattgcgcgagagggaacaaaaatattttcatcatctggtgaagaaataggcatagttactagcggaacatttggtccaagcgtcaatgcccctgtttccatgggatatattcaagagtaaa

SEQ ID NO: 228824 - DNA, 457 bp, Unknown
  Bacterial polypeptide expressing nucleotide sequence isolated from the Sargasso Sea
ttgacagagcttaaaaagacagctttattcgatcttcatcgatctctcggtgctaaagcgatacctttcgctggatatgaaatgcctgttaattaccctttaggaattatgaaagagcacttatattgcagaaagtctgcaggcctttttgatgttagtcatatggggcagctagtcatttcgtctaatacacagtctatgcaattcattgcttctgagttggaaaaacttcttcccatcgatgtattaggtcttagtgaagacagacagaggtatgggtttttaccaaataaagagggaggaatcatagacgacctgatggtatcaaatagaggcgatcactattttgttgttataaatgcttcgagaaaggaaattgattttaaatatctaagagaaaatatttctaaagaaatcgatgttgactttattaagacaagagcacttattgctatca

SEQ ID NO: 228825 - DNA, 875 bp, Unknown
  Bacterial polypeptide expressing nucleotide sequence isolated from the Sargasso Sea
ttcgacatctcccacatggggcgtgctcaccctcactggcccgggcgtgaaagacacgctgcaggggctggtgcccagtgacctgcagcgcattggccctggggaggcccaatacaccgtgctgctcaacgaagccggcggaattcgcgatgacctgatcgtttacgaccgcaacgacaacgaagtgttggtggtaatcaacgctgcctgcgccgacagtgacaccgcctggctcaaagcacagctcgagccccagggggtcacagtgagcgatcgcaaggacggcggggtgctgctggcgctgcagggccctgaggcggtgggccggctggagcagatctgcagcgaaagcctggcaggggtgccgcgcttcgggcatcgggacctgcacatcaacggcagcaccatcttcgctgcccgcaccggctacaccggtgaagacggctttgagttgctgctcagtgcccaggccggtgccgagctttggcagcaactgctggcctccggggtcacaccctgcggcctgggggcacgggacagcctgcgcctggaggcggccatgcacctgtacggcaatgacatggacgagcagaccagcccgctggaatgcagcctgggctggctggtgcatctggagatgccaatcgacttcatcggccgcgaagcccttgaacgccagaccagcgagggcgtcaaacgccgcctggtgggactgcagctgccaggccggaccattgcgcgccacgactaccccgtgctgcacggcggtgagcgggtgggcgtggtcaccagcggcaccttctctcccaccctgcagcaaccgatcgccctggcgtcagtgccggcgggcctggccaaggtgggcaccgagctgg

SEQ ID NO: 228826 - DNA, 1024 bp, Unknown
  Bacterial polypeptide expressing nucleotide sequence isolated from the Sargasso Sea
ttttgctgggtacgaaatgccaattcaatataaagatggaattgtcaatgaacacaaaaccacaaggacaaaatcaggaatatttgatgtgtctcatatgggtcaattgtttatttatgaagctgattatctcacagaagatttagagaaaatatttccaatagatttaaaaaaattaaatttaaatcaaagtaaatattcttttttaatgaacgaagatggaggtatttttgatgatttaattattacaaaaatcaaagaaggttacttaataattttaaatgcagcatgtaaaaacaatgattttaaaattattagttccaaattaaataataaatacaaaataaaattaagtgatgaattatctttaattgcaatacaaggaccggaatcaaaaaatgtattgggcaaagttataccagaaatagccaatttgagatttatgcatggtgaaagttttgaatttaaatcatcaaatatttatataactagatctggctacaccggtgaagacggttttgaaatatcaatacataacgataaagctgaaaattttgtaaaacaattactagaatatggttcaaaacttattggcttgggagctagagatactcttagattagaagctggattatgtttatatggaaatgacattgatataaaaactagtccaatagaagctaatctaaaatgggctatagctaaaaatagaataaattcaaattaccctggatcgaaaattataaaaaatcaaattgaaagtggtgtaaagaagttgcgagtaggaattaaacctgaaactagaacgattgccagaggtgaaaccaaaatatttaatgatcaaaataaagaaatcggaaaagttacaagtggtacttttggacctagtgtagaacattcaatagctatgggctatgttgataataattatacctctataaatacaaaagtatttttagaagtaagaggtaaaaaaataccagcaaatatttgtaatctaccattttataaaaaaaatatgtga

SEQ ID NO: 228827 - DNA, 643 bp, Unknown
  Bacterial polypeptide expressing nucleotide sequence isolated from the Sargasso Sea
atgaatccaaaagaaaaagaattaattctaaaaacaaagttatttgacttgcatgctgtgtatggtgctaggtttattgagtttgcaggttatcttgttcctcttgcttacgggactggtactataaaagaaacaatagtttctcggcaaactgcgtcagcttttgatgtatcacatatgggtcagataaatatttttggtgatagcgcctcttcagaaatagataagttggttccttctaatatttcttcgctagaattaaataaatcttgttacagtgttctattaaattcaaatggtggaataatagatgatctgataatcacaaagaaaaacaattgtctatccttagttgttaatgcttcacaaaaaactaaagttatgaaaattctaagtgaacaattaacttcaaagctaacagttgaaagtttagatcagaactcgctaatttctgttcaaggtccaaaatcaagtgaagtattaaaagtatactttaaaggaattgataaacttaaatttatgcatggatataatgcaacatataataatactgagatatatatctctagatctgggtatacaggtgaggatggttttgagttaagtcttccaaatgatagtgttgagaatttttttgagacat

SEQ ID NO: 228828 - DNA, 1006 bp, Unknown
  Bacterial polypeptide expressing nucleotide sequence isolated from the Sargasso Sea
gaacatatctctacaggacagtcagcaggattttttgatgtttctcatatgggtcagctttttatatcaggaaacaaatcatccgaacaaagtttggaaaaaattattcctttagattttaaagaaattaaaatcaatcaatctaaatattcttttttgattaatgataaaggtggagtaattgatgatatcattattactagggtagaaggcggttttaatattatattgaatgcagcttgcaaagataatgacattaaagaaattgcaaaatgtttaaattcagatagcaagtatgaattaaaaaaagatttttcacttattgctttgcaaggcccaaaatcagaaaatattttagactctattgtccaaggagtaaaacaacttaaatttatgaatggtgattatttcaaatttgaaggacaggaaatttatatcactcgatcaggttatacaggtgaggatggatttgaaatatcagtacagaacaaaaatgtagaaaattttatcaaacttctatcaaataaaggtgccaaaccaataggacttggagcaagagatacactgagattggaagcaggtttgtgtttatatggacatgaattgaaccaagatattagtccagtacaagcaaatttaaaatgggctatttcaaaaagaagaagaaaagaaggtggcttcaatggttggaaaaatataaaaaatgatttacaaaacggtgtatcgaaaataagagttggaatcaaaccatctggaagaatcatagcaagagagggtaccaaaattttttcaccatctggagaggaaataggaattgttactagcggaacatttggtccaagcgttaacgctccagttgctatgggatacatattgagtaaattttctgagattaataataaaattcttttagaagtaagaggtaaaaaacatgatgcagtgatttctaagttgccattttataaaaaaaagttatgtcaaataggagggaaaatgaggaaaaaaa

SEQ ID NO: 228829 - DNA, 661 bp, Unknown
  Bacterial polypeptide expressing nucleotide sequence isolated from the Sargasso Sea
acctgaagcaaaaaacatattaaataaaattgttccaggatgtattgatttgaaatttatgaatggaaataattatagcattgaaggatcaaatatatatgtaactagatctggttatactggtgaagatggttttgaaatatctattaaaaatgaaaaagctgaaatatttgttgaaaaacttttagaaaatggatctaagctcatagggttgggagcaagagacactttaagattagaggcaggattgtgcttatatggaaacgatctagatataaaaacaagtccaattgaagcaaatttaaagtgggcaataccaaaaagtagaattaatactgaatatcctggatcaaaaattctaaaatttcaaattgaaaaaggagttaaaaaaataagagttggtattaaacctgaaacaaaggtaatagctagaagtgatacaaaaatatttaatgatagcaatgaagaaataggaaaaattaccagcggcacttttggaccaagcgtagagcattcaattgctatgggatatgttgaaaataactattcatcattagatacaaaagtatttttagaagttaggggaaaaaaggtgcctgctaacgtatgtaatttaccattttataaaaaaaattattttaaaggagaaataaatgtctga

SEQ ID NO: 228830 - DNA, 937 bp, Unknown
  Bacterial polypeptide expressing nucleotide sequence isolated from the Sargasso Sea
gccacaagacgatatggaggaatttttgacgtcagccatatgggacgtttcagaatctttggaaaagatacagtatctttcttgcagcatacactaaccaacaacgtagagtctattgattcttggcaggctcagtacactttgattgctaatgaaaacggaggagtgattgatgatgcatatctttatcatccaggcgaagaatattttctcgtagtaaatgcttccaatcgagagaaggactggaatcatttgcataagcagtcggagaactttgatgttattttggttgatgaaacaactaaagtgggaatgattgcttttcaaggccctctctctggacaaattctatctgaaataaagcgagaaggcactatgccagagactttcaggaatagtctatccaaaataactattcttggaacagaagttttactcgcaagaactggttacacaggagaacctcttggttttgaattgtttgcaccagctgaaaagattagttcgatttgggcgcgtattgaagaggaaggtcacaataaaggagttgttgcggcgggtctaggagcacgtgatactttacgattggaagctggaatgccactttatggtcatgagtttggtatagatccagaaggaaatgaaatccctgcttttgcatttccacttactacagttgcggtcagtttttcggaaagaaaagggaattttataggacgaaatgctttgaggaaacagtttgaggaagtacgtaaaattagattgggtacgtatgaaccatctgcaattttgccaaaaagatttttgccacttgctgtaaaggataagggtgttgctcgtcagggtgatgaaatattcctttctgaaaaaaaagttggatttgttacaagtgggacaatggtaccttattggaagtttgagggagagaggtgcgacc

SEQ ID NO: 228831 - DNA, 829 bp, Unknown
  Bacterial polypeptide expressing nucleotide sequence isolated from the Sargasso Sea
tgaagaagctggaatatatgatgatttgataataacaaaaattgaagaaggttatctcatcatattaaacgcagcatgcaaagataaagattttcaaattttatcaaaattattaggtagtaattttaaaatgattttagataacgaaagatctttaatagcactgcaaggacctaaatctgttgaaattttaaactcaattttaaatggagttgataaattaaattttatgactggtaaatggattgattttaaacagcaaagagtatttgttacaagatctgggtataccggtgaagatggatttgagatatcaataataaataatttagctgaagaatttactcaaaaattaatagataaaggagcacaacttataggtcttggggcaagagataccttgagactagaagcaggattatgtttatatggtcatgaattagatattaataaaactccagttgaagcaaacctaaaatgggcaatatcaaaagaaagattatcaaatggggggtttattggatctaaaaaaattattaaccaaattcaaggcggaacaagtcaaataagagttggtattaaaccagaaggcagattaattgcgagagaaaaaacaaaaatttttagagaaacagacaagcaaattggagaaattacaagtggaacttttggaccgagtattaatggacctatagcaatgggatatgttgataaagaattttcaaaaatagatactaagattttgcttgaagtaagaggaaaaaaatatccagcaaatatctgtggattaccattttataaaaaaaattacgtgaaaggagcaaattaa

SEQ ID NO: 228832 - DNA, 358 bp, Unknown
  Bacterial polypeptide expressing nucleotide sequence isolated from the Sargasso Sea
ttgaacaaaagaacctctctataccaagctcacgtcgaactgaatgccaaaatggtggactttcatggctggtctatgcccataaactatggctcacaaattacagagcacaatgaggtaagagagagctgtggcatatttgatgtctctcatatgaccattcttgattttcatggaaaagattcagagttatttatacgtaaattaattgcaaatgatgttaagaagttaaaacaagatttcgaggggctatattctgcaatgctaaatgacaatggaggagtcatagacgatttgattgcatatcgattggattctggatacagacttgtagtgaactgtgcaacaagaggtgaag

SEQ ID NO: 228833 - DNA, 515 bp, Unknown
  Bacterial polypeptide expressing nucleotide sequence isolated from the Sargasso Sea
catgtcccaaatgaaacttgagaaaacaccgcttgaaatgctccacaaggaaaatggagcaacgatggttgagttcgctggttataatatgcctctgcaatatcggctaggcatcaaaggtgaacaccttcatacacgatcgaactctggtctctttgacgtctcccacatggggcaggttcttcttagaggtgaaagtgtcctgaaggatcttgaaaaattagtgccaagcgaccttcaagcgctagaggtagggggaatgcgttatacggtttttacaaatgagtggggaggtataatagacgacctaattgtgacaagatgcgatggatatgttctgcttgttttgaatgccgcatttaaagaaactgatataacgcttataagaaaaaatttaaattgtgaaatagaagtgatgaccgatagtgcacttctggctcttcagggaccagcttcagaaaaaatcctcaacgaaatagtccctggtgttaaggaactgttttttctgcaggctg

SEQ ID NO: 228834 - DNA, 895 bp, Unknown
  Bacterial polypeptide expressing nucleotide sequence isolated from the Sargasso Sea
agcaaaatttgttccatttgctggatatgaaatgccaattcaatataaagatggcattgtaaaagaacatatttctacaagaacgcacgctgggttttttgacgtctcacacatggggcaattttttctagaaggtgatgaaacattaatcgagtctcttgaaaaaattataccagctgatctaaaaaatttaaaaaccaatcattcgaagtattcctttttactcaataacgaaggtggaataattgatgatttgattattacaagaacagaaaaaggtttctgtataattttaaatgcagcttgcaaggagaacgacataaaacaaatttcacaattcttaaaaaataatcataaacatcttttaaacaacgatttatctttgatagcattgcaaggtcctaaatccgtagagattttagataaattaatacctggtgttgcaaatttaaaatttatgacaggaaataattttaattatgacggtgaaaaactttatgtaactagatcgggatatacaggtgaagatggttttgaaatctcaatttctaacaaaaaagttgaaaaattcatcgattacttaatttcaaatgaagttaaaccaattggtttaggagctcgagatacattaagattagaagctggtctatgcttatatggccacgatttaaatgaaaaaataaatccggttgaggctaatttgaaatgggctatagcaaaaaaaagaagagaagttggcggctttaatggatgggaaacaataaaagaacttttagctaaaggaagtgaaaaaattagagttggcattaagccagatggaaaagtaattgctagagaaaatacaaaaattttttcatcagaaaataatgaaattggattcgttactagtggcact

SEQ ID NO: 228835 - DNA, 604 bp, Unknown
  Bacterial polypeptide expressing nucleotide sequence isolated from the Sargasso Sea
tatggaagtacaaaaaacagctttatacaattatcataaaaacttaggagcaaagtttgttccgtttgctggctatgaaatgcccatccaatataaagatggtattgtaaaggaacatatttctacaagaacacacgctggattttttgatgtttcacatatgggacaattttttttagaaggggatgaaacattaataatgtctttagaaaaaattattccagcagatttaaaaaatttgaaagttaaccattcaaaatattcttttttactaaataatgaaggtgggataattgatgatttaattattacaagaacagaaaaaggtttttgtataatcttaaatgcagcttgtaaggaaaacgatattaaacaaattttacaatttttaaataaagatcataaacatcttttaaacaatgatttatctttaatagctttacaaggacccaaatctgtagagattttagaaaagttaataccaggtgtcgctaatttaaaatttatgacaggaagtaattttgattatgagggcgaaaaactttatgtaacaagatctggatacacaggcgaagatggtttgaaatctcaatttctaatacaa

SEQ ID NO: 228836 - DNA, 673 bp, Unknown
  Bacterial polypeptide expressing nucleotide sequence isolated from the Sargasso Sea
atggggatacaaaaaacagctttatacaattttcataaaaatttaggagcaaagtttgtaccttttgctggatacgaaatgcctattcaatacaaggatggaatagtaaaagaacatattaacacaagacagtcagcaggtttttttgatgtatctcacatgggtcagttttttgtgtccgaaaataattcatcggaacaaagcttagaaaaaatcattcctttagattttaaagaaattaaaatgaatcaatcaaagtattcttttttaattaatgacaagggtggagttattgatgatcttattattactcgagtagagggtggatttaatattatattgaatgcggcatgcaaagataacgatgttaaggaaatagcaaaatgtttaaattcaaagagcaaatatgaattaagaaaagacatttctcttatcgctcttcaggggccaaagtcagagtctattctagaatctattgttaaaggtgtaaaacaacttaaatttatgaatggcggttattttgaatttaaagcgaagaaaatttatataactcgatctggctacacaggagaagatggttttgaaatttcagttccagactcaaatgtagaaaattttactaaactactttcagataaaggcgctaaacctataggccttggcgcaagagata

SEQ ID NO: 228837 - DNA, 745 bp, Unknown
  Bacterial polypeptide expressing nucleotide sequence isolated from the Sargasso Sea
atggaagtgcaaaaaactgctttatataattatcataaaaaccttggagcaaaatttgttccatttgctggttatgaaatgccaattcaatataaagatggcattgtaaaagagcatatttctacaagaactcacgctggattttttgacgtatcacacatgggtcaattttttttagaaggtgatgaaacattagtagaagctttagaaaaaattataccagcagatttaaaaaatttgaaaattaatcattcaaaatattcttttttactaaataatgaaggaggaataattgatgatttgattattacaagaacagaaaaaggtttctgtataattctgaatgcggcatgtaaggaaaatgatattaaacagatctcacaatttttaaaaaaaaatcataaatatcttttaaataatgatttatctttaattgcgttacaaggacccaagtctgtagaaattttagaaaagctaataacgggtgttgcaaatttaaaatttatgactggaagtaattttgagtatgaaggagaaaaactttatgtaacaagatctggatatacaggtgaagatgggttcgaaatctcaatttctaacacaaaagttgaaaagttgatcgattacttaatttcaaatcaagttaaacctataggtttaggagctagagatacattaagattagaagctggtctctgtttatatggtcatgatttaaatgaaaaaataaatccagtagaggcta

SEQ ID NO: 228838 - DNA, 817 bp, Unknown
  Bacterial polypeptide expressing nucleotide sequence isolated from the Sargasso Sea
ttatagtgtcataacgaataatgaaggtgggataatagatgacataatcgtttataaatttaacaatgaaaaattcagagttgtatcaaactgttctactttccatgatgtaaataacttctttgaatcaaatattatcaaatttgattgtgagttcctccataaaccaagtctaggcattctagctatccaaggaccaaaatctgagattgctcttgaaaatatccttgaactagagctttcaaactatcgaagtttttcatttactgaaagaaatgaacttttcgtttcaagaactggttatacaggcgaagatggttttgaggttattggcgagcctgaagaactacaaagcatttgggatttatgtatttctgagagtattcctccaattggtttagctgcaagagatactttaagaattgaagctggaatgaatctgaatggtgcagacatgaccatgaagaataatccctttgagtctaatttaggttgggttgtcgattttagtgatgtcgaaagagacttcattgctaaagaaaatctcattgaaattaaaaacactaacaaggttaagcttgttggtgttttacttaatgaaaaaggaattttgagaagtggtcaaaagatcattaaagataattttgagggagaagttacaagtggtactttttcgccgtatatcaagaaaagtattggcttagctaggatacccatggatatcaatgaaaatgccaatgtgctgataagaaataagcttttaaatgtaaaaatattatcgctaccttttataagaaaaggtaaaattatgatatga

SEQ ID NO: 228839 - DNA, 633 bp, Unknown
  Bacterial polypeptide expressing nucleotide sequence isolated from the Sargasso Sea
ttattgataaatcattagagacagtttggatagccgttcaaggaccaaaaacaatcgaacttattgacgatagatttgaaatacctgaaaagttcagtacagcaaaatcagataactttatgtatgctcgaactggttacacaggagaagatggtattgaaattatggcaaacaatgctgaagcagattcccttattagttttcttatcgaaaaaggtataaaaccatgtggattaggttcaagagatacacttagacttgaagcatcacttccattatatggttttgaattaacagaagatataacacccgtggaagcctctttatcttggacaattacaaacgagcttgattttttaggttcagaaagaattaaagctcaacttgaagatggaaatcataaaagtttaaaaaaatttactattgagtctagaaaaattgcgagaactgagacaattggtatggctggtgatattagtggggttgttacttctggtaatttctcaccaatattaaataaaagtattggatttattctctttgaaaataagccttctcaggatttaatagagtttgatattcgtggtaatttaatagaaggaaatatagttaataagaggtttttaagctgat

SEQ ID NO: 228840 - DNA, 577 bp, Unknown
  Bacterial polypeptide expressing nucleotide sequence isolated from the Sargasso Sea
ctgacaccactaaacgacgcacacgtcgccttgggtgctaagatggtgccgttcgctgggtattcgatgcccgtgcaataccctaccggcataaaggcagagcacgccgcagtgcgagagacggccggtcttttcgacgtctcgcacatgggggaatttatcgtacgaggtcctgaagcccttggcttaatccaaaggatctcggtgaacgacgcttcgattatccaagttggtcaagcgcagtattcagcgatgtgtcttgagacaggatgtgtgatagacgatttaatcatttaccgtttccctgaccaatttatgctcgttgtgaatgcctctaatctggcgaaggattgggcatgggtgtctaagcacgcaagcgattttgaggtagaagttaaggatgtgtctgaccaaacagcacttctggcccttcaggggccctgtgcccgtgaaatcctacgtcctcttgcgagcctcaatgtggaggaggtcaaatactaccgttttgctgaaggagaagtcgctggcgttcctgccgtgataagtggcactggttacacaggtgaggatggtttcg

SEQ ID NO: 228841 - DNA, 614 bp, Unknown
  Bacterial polypeptide expressing nucleotide sequence isolated from the Sargasso Sea
gatgagtgactatagaaaaactaaattgtatgattctcatcaaagtttaaaagcaaaattagtcccattctctggattttggatgcctctccaatattcaagtataataaaagagcatcatcatgtgcgttcaaagtgtggattatttgatgtaagtcatatgggggagtttattgtttctggaaataatgctaaaacttttttacagaatgtaactaccaatgatattcgaaacctggaagctggaaaagttcaatattctgctttctgtaacgattccggtgtagttattgatgatttactggtgtatcatcttggcgattactacatgttggtagtaaatgcttcaaatattgaaaaaaactctaaatggctttcttcaaagttaattgatgatgtatcattggaagataaatctgacaccatgtctttgttagctttgcaaggccctttatcaagaactcatctaaaaaaactctatccaaaaattaaagatttaaaatattatgaaacattgcttccagacaaaaacgaagttatagttgcaagaactggttattcaggtgagttaggttttgaaatttatgcacctaattcaatcattttaaaactgt

SEQ ID NO: 228842 - DNA, 499 bp, Unknown
  Bacterial polypeptide expressing nucleotide sequence isolated from the Sargasso Sea
atgaaaaaaacaatcttaaatgaaattcataaagaattaggagctaaaatgggagagtttgctggatatgaaatgccaattcaatatgctggggttaaacatgaacatttgaacgtaaggaacaatgttggcgtttttgatgtttcgcacatgggagagtttgttgttagtgggccaaatgcagaaaaattattacaaaaaatatgtagtaatgatattcaaaaaattaaagttggtcaagctcaatacaattgtcttcccaatgaaaaaggaggagttattgatgatttgattatttacagaacaaaaaaagaagaatatttattagtagttaatgcatcgaacataaaaaaagactggaattggattataaaatggaatatgatttataatgcagaaattaatgatatatctgatgaaacatgcttgattgcaatacaaggtccaaatgcaatgaaattagtaaaaaaactatcaaaaattgattcccttccttact

SEQ ID NO: 228843 - DNA, 875 bp, Unknown
  Bacterial polypeptide expressing nucleotide sequence isolated from the Sargasso Sea
gctgtaccaattacacaaagatagtaatgcaaagtttgttgaatttgcaggatatcaaatgccaattcaatattccgagggcattgtagaagagcataaattcacaagaaatcactctggtatttttgatgtttcacatatgggtcaattatttatttatggtggcgaggatttaattaaagatttagaaaaaatctttccattaaatttgaaaaatttaaaattaaatcattcaaaatacagtttcttaatggataaagatgctgggatacatgatgatttaataattacaaaaattaatgagggttttttaattattcttaacgcagcatgtaaagataatgattttaagattttaaaggaattgttaaatgaaaagcacaaaatggttttggatgtaaatagatctttaatagcaattcagggaccaaaatcgtcacaaatactaaatgaaattgttgatgaagtaaaaaatctaaattttatgtcaggaaattggttcttatttgaaaatcagaaagtatatattactcgatctgggtatacaggtgaagatggttttgagatatcgatcccgaataattttgcagataaattaaccagagaattaatcaataaaggttctaagttagtagggttaggagcaagagacactctaaggctagaagctggtttatgtttatatggccatgaccttgataaagataaaactccagtagaagcaaatttaaagtgggcaatctcaaaagaaagaatatctaaaggagactttataggctctgatataattattaaacaattaaccgatggtgtaagtaagattagagttggtataaaacctgaaggaagaataatagcaagagaaaaacaaaaat

SEQ ID NO: 228844 - DNA, 586 bp, Unknown
  Bacterial polypeptide expressing nucleotide sequence isolated from the Sargasso Sea
atgacttctcctgaactccttaaaactcccctccatgcctggcattctgaaaacggggggaagatgtttcctttcggcggttgggacatgccggtccaatatgcagatggaatcctctcagaacatttggcaacccgccggtgtggaggcctgttcgatgtcagccatatggggcgtttcagagtagaaggtcgggatacaatggcgttccttcagagggtgctgacgaacgatgcctccctgctggaaccatggcaggcccaatacaccttaattgccaacgaaaacggaggggtgattgatgatgcctacctttatcacccggaaggagaattcctgatcgtcgtcaacgcgtccaaccgcaaaaaggactgggaacattttcaggagcaagcacggcaattcgaagatttaaggcttgaggacttaagcgagaaagtggcaatgatcgcggtccaggggccacagtccgaagaactgatttcggagttcctcgaatcgggaagtctccccgaacgaagacacaaccgtctctcaaaaatcagcattatgggcgaagaaatgctgatctctcggacaggttaca

SEQ ID NO: 228845 - DNA, 622 bp, Unknown
  Bacterial polypeptide expressing nucleotide sequence isolated from the Sargasso Sea
catgactgaaaaaaatatatctactgaaaatcttctcaggacatcactgtactcatggcatactgcaaatggagggaaaatggttgattttggcggctgggaaatgccagtgcagtatgagaacggtattttaaaagaacatttgggaacacggcgctatggcggtttatttgatgtcagtcacatgggacgcttccgtattcagggcaaggacacaattgctttccttcagcatgtgcttagcaacaatgccgaatctctggaaccatggcaggcacagtacactttgattcctaataataacggaggcctacttgacgatgcttacctttaccgtcctggaggagaatattttctggtggtgaacgcctctaaccgtgagaaggactggaatcatctccatgaacaggcaaaagcctatgacgtttcaatggaagaccaaacttcacaaatttctatgatcgcattccagggtcccttgacaggaaggatccttgccaggctgttggagggcggtagcatgccggaaactttccgcaacagtatctctgaaatcatgcttgccggcacaagaattattgcagcaagaacaggctacactggcgaaccggtgggatttgag

SEQ ID NO: 228846 - DNA, 905 bp, Unknown
  Bacterial polypeptide expressing nucleotide sequence isolated from the Sargasso Sea
tactgatatatttgttagaacttatcctaaagaaaaaaaaatttcgaaaggggtagcttttagagtgaatactgattcagaaccaaaattaacacaagaaactgggtttcataaaaaaacatctaatcttacaaaaaattttataaactataatggattttggttggctaataattacactaaatatggagcagtcaaagaatacactgcatgtagagaaagtgctattgtaaccgatctttctccattaagaaaatttgaaattttaggtccagatgcagaaaatttaatgcaatatactcttactcgtaatgtaaaaaaactatcagttggacaaattgtttatacagcaatgtgctatgaaaatggctgcatgattgatgacggaacaataatgaaattaggacaagataatttcagatgggttggtggccaagagtatggtggcgaatggttaaaagaacaagctaaaaagaaaaactttaaagtttggataaaatcatcaactgatcaaattcacaatattgctgttcaaggaccaaatagtagaaaaattttacaaaaatttgtatggactcctgatacgcagccatccatcgaaagtcttgaatggtttagattaacaatagcaagaatagatagtgtaacaggtattccaattgttgtatcaagaacaggttatactggagagttaggatacgaaatatggtgccatccaaaagacgctggtgctctttgggataaagtttgggaagcaggcaaagaatttaatatatctcctcttggcttagaagctttagatatggttcgtatcgaagcaggactaattttttatggatacgagtttgatgataaaactgatccgtttgaagcaggaataggctttactgtacctcttaaacaaa

SEQ ID NO: 228847 - DNA, 849 bp, Unknown
  Bacterial polypeptide expressing nucleotide sequence isolated from the Sargasso Sea
aatcaatccaaaggattatattcaaaaactttttcctactaatttatactccttttctgaaggtcaggggctttatacagtaatgctcaatgataaaggaggaataatagatgacttaataatttatgaccttggtatacaagaaaatgacttatcagaattattgttgatagttaatgcaagtagatatgaagaagattttcagtggataaaaaataatttatatatgtctgaaatttcgacgacaaactttaaaaaagacaaagtacttttagcactacagggaaaaaactcattcgatttatttgaagaatggattgaatctccgatctcacatatacctaactttggatgcgaatataagatatttgaacatatttcgcctaaagaaaaaatcttcgtttcgaagacgggatatacaggggaaaatggtctagaaatacttttatctaaaaaagcagcagttaatttatgggatttcttaatttccaaaaatgttgcaccttgtggtttaggagctagagatactcttagacttgaagcaggcatgcatctttatggtcaagacataaatgaagaaacttctccatatgaagcggggttaggctggctagtacatctagaaaataatcacgaattctttggaagaagatttcttgaagagcagtcaagattaggtattcaaaaaaagttggttggtctctctatagaaggaaaagcaataggtagaaaaggttgcgcagttcttaaaggtgaagaaaatattgggactatcacaagcggcagttggtctccaactaaacaacaagctatagcttttgcatacatcaatacttcgcatgccttaat

SEQ ID NO: 228848 - DNA, 784 bp, Unknown
  Bacterial polypeptide expressing nucleotide sequence isolated from the Sargasso Sea
atgggtgtacaaaaaacagctttatacgatttgcacaaaagtttaggagcaaaatttgttccatttgcaggttatgaaatgcctatccaatatagggatggtattgttaaggaacatatttcgacaagaacacacgcaggtttttttgatgtatcacatatggggcaattttttttagagggagacgaaaccttagaagaagccttagaaaaaattattccttcagatttaaagtcattaaaactcaatcactcgaaatattcttttttacttaatgataatggtggaattattgatgatttaatcgttacaaaaactaataaaggtttctgtataattttaaacgcggcttgtaaggaaaatgatataaaacatatatcaaaatttttagataaaaatcataattattttttgaacaatgatttatccttaatcgcattacaagggcctaagtcagtagaaattttagagaaactcataccaggtgtttctgaattaaaatttatgacaggaaataattttagttatgatagtgaaagtctttacataacaagatctggatatactggcgaggatggttttgaaatttcaatttctaataaaaaagtaaaaaacttaattaattttttgataaaaaatggagtcaagccaataggtttaggtgctagagatacattaagattagaagctggactttgtttatacggtcatgatttaaacgaaaagattaatcctatagaagccaatctaaaatgggctattgcaaaaaaaaggaaagagactg

SEQ ID NO: 228849 - DNA, 744 bp, Unknown
  Bacterial polypeptide expressing nucleotide sequence isolated from the Sargasso Sea
tatgaatataaaaaaaacatcgttaaataatctccacattaaatacggcgcaaagcttgtagagtttgctggatatcaaatgcccatccaatataaagatggaattatacaagaacataaatacacacgttcacactctggtatttttgatgtttctcatatgggtcaattatttatatcgggtggtgatgatcttacaaatgatcttgaaaagatttttcctgcggatttgaaaaaattgaaaactaatcaaagtaagtattcatttttaatgaataacaaaggaggcattcaggacgatctgataattaccaaaacatctgatggatttttaattatcttgaatgctgcatgcaagtataatgattatgaagtaataaaatctaaacttgataatcaatataaattaaatcttgacgagtcattgtcattaattgcattgcagggccccgaagcaaaaaatgttttaaataaagttatacctggttgtaacagtctaaaatttatgaacggaaacaaccatgtctataaaaatgaaaaagtatacataactagatcaggatatactggtgaggatggatttgaaatttctataaaaaatagtgatgctgaaacttttgtagaaagtttgatagaaaatggatctaaattgattggtttaggagcaagagatacattaagaatggaagctggactctgcttgtatggaaatgatttagacaatgatacaagtcctatcgaagc

SEQ ID NO: 228850 - DNA, 592 bp, Unknown
  Bacterial polypeptide expressing nucleotide sequence isolated from the Sargasso Sea
catgggaggagatttcaattacaataattttaatctttatgtcactagatctgggtatacgggggaagatggattcgagatttcaattcccaatgaaatagcagagaattttacaaaaattttgcttaaaaatggatcaaaattaattggtttaggtgcaagagatacgttacgtttagaggccgggctttgcttatacggaaatgacttagatacagaaactactcctatagaggctaatctaaagtgggcgatatcaaaaaaaagaattgatgatcaatatccaggatcagaggtaattaaaaaacaatttttttctggagtaaaaaaattaagagttgggataaagccagataccaaagttatcgctcgagctaacacaaaaatatataatgatgataataaagaaattggaaaaattactagtggaacttttggaccaagtgtagaatatccaatatctatgggttatatagacaataattattcgtcaatagacacaaaaatatttttagaaattagagggaaaaaaattgccgcaaatgtctgcaagttacctttttatcaaaaaaactatttaaaggagatttaa

SEQ ID NO: 228851 - DNA, 217 bp, Unknown
  Bacterial polypeptide expressing nucleotide sequence isolated from the Sargasso Sea
aatgaaaaagacgcctctttatgattggcatatttcgaacagcaataatttagtgccattcggagggtttttacttccagtatattacagtagtattgttgaagaacataaaaatgttagaagtagagctgggcttttcgatgttagtcatatgggagagtttataatttcaggctcagcatcagaaaaatttatgcaactagtaactatcaatgat

SEQ ID NO: 228852 - DNA, 532 bp, Unknown
  Bacterial polypeptide expressing nucleotide sequence isolated from the Sargasso Sea
atgaaatttaaaaaaacaactctatatgaaaatcataaaagcttaaaaggtaatatggttaattttgctggatttttactacccacacactattcaagcattaaagaagaacatctttctgttagacattttgctggtttatttgatgtaagtcatatgggtgaaataattattgagggcccaaatgcaaaaagatttcttcaattcattactactaataatattgaattattgtcttatggaaaagcacaatattcaattatctgtaatcatgaaggaggaattattgatgatgttttaatttaccaaaagcaaaaaaattatatgatggtagttaatgcttcaaacaagcaaaaaatagttaaatggttaaactcttatgatttaaaaggtgttaacatcaaagacattagcgatgaaattggcttaattgcaattcaaggtcctaaatctattaaaatattagataaagctttaaacttaaatctaaatcatcttctattttaccgatttatcgataaaaaggtaaaag

SEQ ID NO: 228853 - DNA, 693 bp, Unknown
  Bacterial polypeptide expressing nucleotide sequence isolated from the Sargasso Sea
tatggatacaaaaaaaacaccgctttatcaattgcatcaagacagcaaagcaaaatttgtagaatttgcaggttatcaaatgccaattcaatatgctgagggtattgttgaagagcatagatacacaagaaaccattctggtatttttgatgtttcgcacatgggtcaattatttatctatggccaagaagatttagttgatgatttggagagaatttttccgttagacttaaaaaatttaaagttaaatcactcaaaatatagttttttaatgagtgacaatgccggaatttatgatgatttaataattactaaaatcaaagatggttttttaattattctaaatgctgcttgcaaagaaaatgattataaaattttaaaagaactattgaacgataaatataaaatgattttggatgaggaaagatctttaatcgcaatccaaggacctaaatctgtagaaattttaaaaagtgttattcaaggtgttgaaaatttaaattttatgtcaggcaattggtttacactggatgatcacaacatttacgtcacgagatcaggatatacaggtgaagatggtttcgaggtatcactaactaatgaatttgcagttaggtttacaagaagattaatcgataaaggtgcaaaattaattggtcttggagctcgtgatacattaagattggaagctgg

SEQ ID NO: 228854 - DNA, 637 bp, Unknown
  Bacterial polypeptide expressing nucleotide sequence isolated from the Sargasso Sea
atgaaaactacccccctttatgaattccatgacaaaatgggtgcaaagtttgtagaattcaacggatggcatatgcccgtatggtttgaaggactgaaagaagagcatttgtgtgtcagagagagcttaggcatatttgatgtaagccatatgggagaaatagagatttcaggaacagactccgaagtttttgttgactatattttcacgaactcaattttaaatttatccgatgggcaggctcgttatggatttatttgtaatcaatcaggtggagtggttgacgatgtaattatatacaaaatgcttaatggtgcttatttcatatgtgtaaatgccggtaatgtatccaaagtatttgattggttgttagaaaattccaacacatataatgtagagataaaaaacctatctgacttctatgggcaattagcaattcaaggacctaactcaattgatttcatggacgaattgtttcctttgtcagaaatcaaatcaattaaaaaatatcgtattgcatctattctagagctagaagaaagctacgcggataatcttaaatggaaatgtccgaatggaaacaatttcttaattgctcgtactggatatacaggagaagaaggttttgagttatttg

SEQ ID NO: 228855 - DNA, 556 bp, Unknown
  Bacterial polypeptide expressing nucleotide sequence isolated from the Sargasso Sea
taaaaaagacaaagtacttttagcactacagggaaaaaactcattcgatttatttgaagaatggattggatcttcgatctcacatatacctaactttggatgcgaatataaaatttttgaacatatttcgcctaaagaaaaaattttcttttcaaagacaggatatacaggggaaaatggtctagaaatacttttatctaaaaaagcagcaattaatttatgggatttctcaatttccaaaaatgttgcaccttgtggtttaggagctagagatactcttagacttgaagcaggcatgcatctttatggtcaagacataaatgaagaaacttctccatatgaagcaggattaggctggctagtacatctagaaaataatcacgaattctttggaagaagatttcttgaagagcagtcaagattaggtattcaaaaaaagttagttggtctctctatagaaggtaaggcaataggaagaaaaggttgcgcagttcttaaaaatgaagaaaatattgggactatcacaagcggaagttggtctccaactaaacaacaa

SEQ ID NO: 228856 - DNA, 203 bp, Unknown
  Bacterial polypeptide expressing nucleotide sequence isolated from the Sargasso Sea
catgacgctccaacacacgccgctcaatgccatccaccgctcgctgggcgcccgcatggtcgactttggcggctgggacatgcccgtcaactacggctcccagatcgaagaacatcacgccgtgcgccaggacgccggcgtcttcgacgtctcgcacatgtgcgtggtcgacctcaccggtgcgcgtgtgcgcgacttcctgc

SEQ ID NO: 228857 - DNA, 322 bp, Unknown
  Bacterial polypeptide expressing nucleotide sequence isolated from the Sargasso Sea
aatgaaaaagactcctttatacgaatggcatgtattaaatagcaataatgttgtgccttttggagggtatttgctgccaatatattatagtagtatagttgaagaacatttgaatgtaaggagcaaagcagggctttttgatgttagtcacatgggagaatttataatatcaggacctgcatcagaaaaatttatgcagctagtgactatcaatgatgtatctagactcagtaatgggcaggcgcaatacaatgcaatgtgcgataataatggtgggctaattgatgatgttatatttataaaaaagatagcgaattcatga

SEQ ID NO: 228858 - DNA, 835 bp, Unknown
  Bacterial polypeptide expressing nucleotide sequence isolated from the Sargasso Sea
tttatatatggcgatgaaaacttaacagaagaattagaaagaatttttccattagatttaaaaaacttaaaacagaattgctctaagtatagttttttaatgaacgaagacgctggaatatacgatgatttaataattactaaaattgatgggggttatttaataattctcaatgctgcatgtaaagataaagattttgagattttatccaaattattaggtaagaaatttaaaatgaatttagatagtaatagatctttgatagcaattcagggacctaagtcagttgaaattttaaattcaattataaatggagttgatcaactaaaatttatgacaggaaattggtttgtttctgataaacaaaaattatttgttacaagatcaggttatacaggagaagatggatttgaaatttcaatttctaacgataatgctgaaaaatttgtacaaaatttaatagaaaagggagcacaacttataggacttggggcaagagataccttgagattggaagccggattgtgtttatatggtcacgaattagatacaaataaaactccagtagaggcaaaccttagatgggcaatctcaaaatctagattatcgaatggaggttttattggatcgaaaaaaattatgaaccaaatgcaagaaggagtaaaccaaataagagtagggattaaacctgaaggtagattaattgctagagaaaaaacaaagatatttaatgatacagatacacaaatcggtgagataactagcggaacgtttggaccaagtgtaaatggacctatagcgatgggttatgttgatagggagttttcaaaagttg

SEQ ID NO: 228859 - DNA, 706 bp, Unknown
  Bacterial polypeptide expressing nucleotide sequence isolated from the Sargasso Sea
ctggaaagagaattattctcgccgaaggagcaaatctctcaggcaccaagacagagggggcaaagaagagttaatatggaaataaaaaaaacgtcactaaataaacttcatcaaagtaacaacgctaagtttgttgaattcgctggctatgaaatgcctattcagtatagcaaaggtattattgaagaacataaattcacaagatcgaattctggaatatttgatgtatctcatatgggtcaattatttatatatggtgatggaagtttaacagaagaattagagaaaatatttccattagatttaaaaaatcttaaacaaaattgctctaagtatagttttttaatgaatgaggacgcgggaatttatgatgatttaatcattactaaaattgaggaaggatatttaattatacttaatgctgcatgcaaagataaagattttgagattttatctaatttactaggttcgaaatttaaaatgaatttagataacaatagatctttgatagcaattcaaggacccaagtctgttgaaattttaaactccattataaatggagttgatcagctaaattttatgacaggaaattggttcgattctaataatcaaaaattatttgtaacaagatcgggttatacaggtgaagatggatttgaaatttcaatttttaacgaagaagctgaaaaattcgtgaaaacttaat

SEQ ID NO: 228860 - DNA, 817 bp, Unknown
  Bacterial polypeptide expressing nucleotide sequence isolated from the Sargasso Sea
gatggaggaataattgatgatttaattgtaacaaaaactgaaaaaggattttgtataattttaaacgctgcttgcaaggaaaatgatattaaacaaatttcaaaatttttaggaaataatcataaatatcttttaaataatgatttatctttaatagctttacaaggaccaaagtcggtgaaaatattagaaaaattggtgcctggcgtttctaacttaaaatttatgaccggcaacaaatttaaatttgataatgaaaacttgtatataacaagatcaggttatacaggagaagatggttttgaaatttctatttcaaataaaaaagtggaaaaactaattaattttttaatttcaaatgaagtcaaaccaataggtttaggcgccagagatacattaagattagaagcgggtctttgtttgtatggacatgatttaaatgaaaaaatcaatcctatcgaggcaaatttaaaatgggctattgcaaaaaaaagaaaagatgtcggtggttttaatggatgggataagattaaaaatttattaactaatgggagtgaaaaaattaggatcggtattaagccagaaggcaaagttatagctagggaaaatacgaaaatattttcaaaagatgataaggagataggcctcgttacaagcggaacctttggtcctagcgtaaatgcgcctgttgcaatgggatatgttaaatcaaattttgctaaagttggaacaccaataaagctggaagtaagaggaaaaaaatatgaaggtaaagtttcagagcttccgttttataaaaaaagttatgttaaataaa

SEQ ID NO: 228861 - DNA, 610 bp, Unknown
  Bacterial polypeptide expressing nucleotide sequence isolated from the Sargasso Sea
tatgaaaaaaacagcattatttgaaaagcatcatgaattaggtgctaagatggttccttttgcagggtatgaaatgcctgttcaatataaaggagttaatattgaacatcaaactgttagggaaaatgtaggtatttttgacgtatctcatatgggagaatttattattagtggacctaatgcattaaatttaattcaaaaattatccagtaatgatgcttctaaactttttcctggaagggctcaatatgcctatttacctaatgcaaatggtggggtagtagatgatttaatcatttacatgattgatgatcaaaaatacatgcttgtagttaatgcatctaatatagagaaagattggaactggattagtgaacacaatcataatgcagatattaaaaacatttctgatgacatgtcattactagctgttcaaggacccaaagcaattgatcttcttcaagaactcacagatgaaaacctttcagaaatatcattttatcatttcaaaactatgtcttttgcaggatatgatgatataatcgtatcttctactggatatactggttcaggaggatttgaattgtatgttccaaatgaatatgcagct

SEQ ID NO: 228862 - DNA, 810 bp, Unknown
  Bacterial polypeptide expressing nucleotide sequence isolated from the Sargasso Sea
aagaattagaaaaaatttttccattagatttaaaaaatctaaaactgaactgctctaagtatagttttttaatgaatgaagatgctggaatttatgatgatttaatcattactaaaattgaggagggctatttaattatattaaatgctgcatgcaaagataaagattttgagattttatctagtctactaggttcgaaatttaaaatgaatttaaataataatagatctttaatcgcaattcaaggacctaagtctgttgaaattttaaactcaattataaatggggttgataaactaaattttatgacaggaaattggtttgattctgataatcagaaattatttgtcacaagatcaggttatacaggggaagatggatttgaaatttcaatttctaacgataaagctgaaaaatttgtacaaaatttaatagaaaagggagcacaacttataggacttggggcaagagataccttgagattggaagctggattatgtttatatggtcatgaattagatattaataaaacaccagttgaggcaaaccttagatgggcaatctcaaaatctagattatcaaacggaggttttattggatcgaaaaaaattatgaaccaaatacaagatggagtaagcaaaatgagagtagggattaaacctcaaggtagattgattgccagagaaaaaactaaaatatttgatgatacagacacacaaattggtgagataactagtggaacgtttggaccgagtgtaaatggacctatagccatgggttatgttgataaagtgttttcaaaaagttgat

SEQ ID NO: 228863 - DNA, 676 bp, Unknown
  Bacterial polypeptide expressing nucleotide sequence isolated from the Sargasso Sea
tttgttgaatttgcaggatatcaaatgccaattcaatattttgagggcattgtagaagagcataaattcacaagaaatcactctggtatttttgatgtttcacatatgggtcaattatttatttatggtggcgaggatttaattaaagatttagaaaaaatctttccattgaatttgaaaaatttaaaattaaatcattcaaaatacagtttcttaatggataaagatgctgggatacatgatgatttaataattactaaaataaatgaaggttttttaattattcttaatgcagcatgtaaagacaatgattttaagattttgaaggaattgttaaacgaaaagcacaaaatggttttggatgtaaatagatctttaatagcaattcagggaccaaaatcgtcacaaatactaaatgaaattgttgatggagtaaaaaatctaaattttatgtcaggaaattggttcttatttgaaaatcagaaagtatatattactcgatccgggtatacaggtgaagatggttttgagatatcaatcccaaataattttgcagacaaattaaccagagaattaattaataaaggttctaagttagtagggttaggagcaagagacactctaaggttagaagctggtttgtgtttatatggccatgaccttgataaagataaaa

SEQ ID NO: 228864 - DNA, 919 bp, Unknown
  Bacterial polypeptide expressing nucleotide sequence isolated from the Sargasso Sea
gctggaatatgccccttttgtttttcctctttggagaatgaacaccttcaagtcagagctgattcaggtgtttttgatgtgagccatatgggagaaataataatagaggggaatgatgccttatcttttctcgattttacttttacaaataagatatcctcattaaaaaatggacaggcaaaatacggatttttctgcgattctaatggaaatgtcattgatgatgtaattgcctacaaactagatgaaaataaatattttttatgtgttaatgctggaaatatacatattgtatttgattggttagttactaactcaaaaagttatgatgttgatataaaaaatctcagtgatttttatggacaactagctattcaaggtcccaactctatggaatatctttcaaaaatctttcccctaacattttctgaggaatttaaaaaatatactataattaacataatggacttagatgaaaaataccaatcaaaatcattgtttgattccttgattgaagataattttctaatcgctagaaccggctatactggcgaggatggatttgagttgtttgtgccaaatgaattgattaaagagatttatgaaaacattttagaagactgtccaaatataaaaccttgtggattaggctcaagggataccctaagaattgagaagggatttcctcttcatggaaatgaatttacaaaaggtacgtctccttccgattttaatttagataagtttatagatagttcaaagcacaattttattggaaaagatgcaattttaaaaaaaatttctgaaaacgaattttcatttgttggttttttaatggaagataattccatagcaaggaatgattatgagattttcaataacggttctaacattggtaaagttacaagtgaactatcgc

SEQ ID NO: 228865 - DNA, 873 bp, Unknown
  Bacterial polypeptide expressing nucleotide sequence isolated from the Sargasso Sea
cacatttcgacaaggactcatgctggattttttgatgtttcacacatgggacaattttttttagagggagatgaaacattaatagatgcattagagaaaattattccctcagatttaaaatcattaaaagttaatcattcaaaatactcttttttacttaatgacaacggtggaattatagatgatttaatcgtaacaaaaacaaaaaaaggtttttgtataattttaaatgcggcttgtaaggaaaatgatataaaacatttatcaaaatttttaggtaaaaatcataaatattttttgaacaatgatttatctttaatagctttacaaggacctaagtcggttgaaattttagaaaaactcatacccggtgtttctaaattaaaatttatgactggaaataattttggtcatgatggtgaaaatctttatataacaagatctggatatacaggtgaagatggttttgaaatttcaatttgtaataaaaaagttaaaaacctaattgattttttaataaatagtggagtcaagcctataggtttgggcgctagggatacattgagattagaagctggactatgtctatatggtcatgatttaaacgaaaaaattaatcctgtagaagctaatcttaaatgggcaatcgcaaaaaaaaggaaagaagacggcggctttaatggttggaataaaattaaaaatttattaacaaacggaagtgaaaaaataagagtgggtattaaacctgagggaaaagttatagcgagagaaaatacaaaaattttttcttctaacggtgaagaaattggttttgtaacaagtggaacttttggtccaatgtgtaaacaggccagtagccatgggttatgttaa

SEQ ID NO: 228866 - DNA, 601 bp, Unknown
  Bacterial polypeptide expressing nucleotide sequence isolated from the Sargasso Sea
tatgacaggaaattggttcgattctgataatcgaaaattatttgtcacaagatcaggttatacaggggaggatggatttgaaatttcaatttctaacgataaagctgaaaaatttgttgaaaatttaatagaaaagggtgcacaacttataggacttggggcaagagataccttgagaatggaggctggattatgtttatatggtcacgaattagatattaataaaacaccagttgaagcaaaccttagatgggcaatatcaaaatctagattatcaaatggaggttttattggatcgaaaaaaattatgaaccaaatgcaagatggagcaaaccaaataagagtagggattaagcctgaaggaagattgattgcaagagaaaaaactaaaatatttgatggtacagaaaatcaaattggtgagataacaagtggaacgtttggaccaagtgtaaacggtccaatagcgatgggttatattgataaagagttttcaaaagttgatactaaaattttgcttgaggtaagagggaaaaaacatccagcaaatgtttgtgcattaccattttataaaaaaaattatgtgaaaggagtaaattaa

SEQ ID NO: 228867 - DNA, 725 bp, Unknown
  Bacterial polypeptide expressing nucleotide sequence isolated from the Sargasso Sea
tatgggacaactatttataactggttcagatcagcttacagatgatcttgaaaaaatatttccagttaatttaaaaaatttaaagataaatcaaagtaaatattcttttttaatgaatgagcagggaggaatttacgacgatttaattattacaaaattaaaacatggttacttaattattctaaatgcagcatgtaaaaagcaagattttgaaattataaaaaaaaaattagatgacaaatatgagttaaatttagatgaaagtttatctttgattgcaatacaaggaccaaaagcaaaagatgtattaggaaaagtagtttcaaatataactaatcttaaattcatgaatggaggggaatttgaatatgataattcaaatatttacataacaagatccggttataccggtgaagatggttttgagatttctttagaaaacaaaaaagttgaaaaatttgtagatcaattaattaattatggtgctaaacttataggacttggtgcaagagacacattaagattagaagctggattatgcttatatggtaatgatcttgatgaaaaaacaagtccgatcgaggcaaacctgaaatgggcaatacccaaatcaagagttgatagtgattaccctggttcaaatattataaaaaaacaacttgatgatggagtaaagactttaagagttggtatcaaacctgaaacaagagttatagcaagaggaa

SEQ ID NO: 228868 - DNA, 627 bp, Unknown
  Bacterial polypeptide expressing nucleotide sequence isolated from the Sargasso Sea
aaggtgtcgaagatttatcttttatgtcagggaaatggtttttgtttgaagaacaaaaaatttacattacacgatctggttatacaggagaagatggatttgaaatttccttacctaacgataaagctgaaaaatttacaaaaaaattaattgaaaaaggagcaaaattaattgggcttggtgcaagagacactcttagaatggaagctggtctatgcttgtatggacatgagctagataaaaacaaaacgccagtagaggcaaatttaaaatgggcaatttcaaaagatagagtttcaaaaggaaattttattggatcaaatataattaataaacaacttaatgatggtgttagtaaaatcagagttggcattaaaccggagggaagggtaattgccagagaaaaaactaaaatattcaatcaatcagactcacacataggtgagataacaagtggaacatttggcccaagtgttaatggaccagttgcaatgggttatgttgaaaatgaattctcaaaaaaagatacaaaagtttttttagaggtaagaggaaaaaaacacccagcaaatatttgtgggttaccattttataaaaaaagttatgtgaaaggggcaaacaaatgag

SEQ ID NO: 228869 - DNA, 515 bp, Unknown
  Bacterial polypeptide expressing nucleotide sequence isolated from the Sargasso Sea
ggcgcacatcaacgcggcgttggccaaggccaaggcgaacggaatggacgtcgatttcatcgtgcactccgatcgctccctcttggcttttcaaggaccgaaggcgatggaggtgttgcaacgcgtgacggagtttgatttgtcgaaattgtactttggcatgttcacgtcgatgaaggtgaacggcggcgacgtgtgggtgacgagaacggggtacaccggggaggatggatttgaaatttccgtcccgaacgccgacgccgtggcgctcgccgaaaagttggagtcatacgacgaggtgcgcttcgccgcgctcggaccgagagattctctgcgtctcgaagctggcttgtgtctgtacgggaacgacctcaccgaggacatcaccccgcccgaagctggattgacgtggacgatcggtaaggcgcgtcgcgaactgtgcgatttcacgggaggcgacatcatcaagaagcaacttgaagatcctaaatccatcccgcgcagacgcatcggtc

SEQ ID NO: 228870 - DNA, 772 bp, Unknown
  Bacterial polypeptide expressing nucleotide sequence isolated from the Sargasso Sea
atgagtataaaaaaaacatcgttaaataatctccacatcaagtatggcgcaaagcttgtagagtttgctggatatcaaatgcccatccaatataaagatggaattatacaagagcataaatacacacgtacacactcaggtatttttgatgtttctcatatgggtcaattatttatatcaggtggtgatgatcttacaaatgatcttgagaagatttttcctgcggatttgaaaaaattgaaaattaatcaaagtaagtattcttttttaatgaataacaaaggaggaattcaggacgatttgataattaccaaaacatctgatggatttttaattatcttgaatgctgcatgcaagtataatgattatgaagtaataaaatctaaacttgataatcaatataaattaaatcttgacgagtcattgtcattaattgcattacagggccctgaagcaaaaaatgttttaaataaagttatacctggttgtaacagtctaaaatttatgaacggtaacaactatgtctataataataaaaaaatatatataactagatcaggatatactggtgaggatggatttgaaatttctataaaacatagtgatgctgaaacttttgtagaaagtttgatagaaaatggatctaaattgattggtttaggagcaagagatacattaagaatggaagctggactgtgcctgtatggaaatgatttagacaacgatacaagtcctatcgaagctaatctaaaatgggcaatacctaagagca

SEQ ID NO: 228871 - DNA, 696 bp, Unknown
  Bacterial polypeptide expressing nucleotide sequence isolated from the Sargasso Sea
atatacaatattcacaaatgaaaatggaaaagcattagatgatgttatattttggaaatttgaagataaattaattttgatttgtaatgctagtaatagagagaagatatcaaaccatttaataaataataatattgaattcgaagatcaaacttttgatacttgtttgattgcggttcaaggtcctaatacagaaaatcacttaaaagatttattagatttacccaatcatttttctgctgttgacaatggagaatatatatgtgcaagaactggctacacaggagaagatggatttgaaattatgtttaataactctaaagtcgatgagatattaaattatattgttcgtaaagaaattaaaccatgtggattaggttctcgtgatactttaagattagaggcttcattacctctttatggttttgaattaacggaagaaatttcacccgttgaagcaaatttaaaatgggttataactaatgaagacgattatttaggaaaagaaatcataaacaatgagttaaatagtagtaatcataaaacattaaaaaaattcgtgataaattcaaaaaaaattgctagaactggtacaacagtaaaaagcaataatattaatggagtagttacatctggtaattattcaccaatacttgaaaagtcaataggatttgctttgtttgatagttctcctga

SEQ ID NO: 228872 - DNA, 841 bp, Unknown
  Bacterial polypeptide expressing nucleotide sequence isolated from the Sargasso Sea
tcctttaatgtttcattggaagaccaaacttcgcatatttccatgatcgcgttccaggggccattgtcagaaagtattttgaccaggcatttagagggcggaagcatgccagaatcttcccgaaatagactatctgaaataatgctagcaggtacgaaaataattgcagctagaactggatatactggagaaccattgggatttgagctctttattccttctgaaaaggttgaagatgtctggaactgtctttatgaggcaggatctgatgaaggtattatttcagttggtcttggtgcaagggataccctcagacttgaagcaggtatgccgctttttggacatgaattcggaattgatcaggaaggtaaagagatacctgcatttgctttccccctaactacagttgcagtaaaattttcagcaagaaaaggtgattttattggccgccaggcgctcaatgatcaattccaagaagtccgtaaatttaaaatgggacagtgtcagtcttcagaaatacttcccaagcgcatctttcctatagcactaacagataatggtattgcgaggcaaggcgatcctgttttcttgaacgactcaaaagtaggtttggttacaagcggaaccatggttccattttggaaatttgaaggtgaagggggcacgaagagcataactgatgagcatgaccgcagggcaattgctatggcatatatagatgcacatattcccactcagcaggtactagaggtagaagtacgtgggagacgaattaattctcagcttgtgtcattgcatggtagttcaaaaattcctccatattttcgtgcaatttctgaaa

SEQ ID NO: 228873 - DNA, 790 bp, Unknown
  Bacterial polypeptide expressing nucleotide sequence isolated from the Sargasso Sea
tatgaatataaaaaaaacatcgttaaataatctccacgttaagtacggcgcaaagcttgtagagtttgctggatatcaaatgcccatccaatataaagatggaattatacaagagcataaatacacacgttcacactctggtatttttgatgtttctcatatgggtcaattatttatatcgggtggtgatgatcttacaaatgatcttgaaaagatttttcctgcggatttgaaaaaattgaaaactaatcaaagtaagtattcatttttaatgaataacaaaggaggaattcaggacgatctgataattaccaaaacatctgatggatttttaattatcttgaatgctgcatgcaagtataatgattatgaagtaataaaatctaaacttgataatcaatataaattaaatcttgacgagtcattgtcattaattgcattgcaaggccctgaagcaaaaaatgttttaaataaagttatacctggttgtgacagtctaaaatttatgaacggaaacaaccatgtctataaaaatgaaaaagtatacataactagatcaggatatactggtgaggatggatttgaaatttctataagaaatagtgatgctgaaatttttgtagaaagtttgatagaaaatggatctaaattgattggtttaggagcaagagatacattaagaatggaagctggactctgcttgtatggaaatgatttagacaacgatacaagtcctatcgaagctaatctaaaatgggcaatacctaagagcagaattgagactgaattt

SEQ ID NO: 228874 - DNA, 670 bp, Unknown
  Bacterial polypeptide expressing nucleotide sequence isolated from the Sargasso Sea
gtacttttagcactacagggaaaaaactcattcggtttatttgaagaatggattgaatcttcaatctcacatatccctaactttggatgtgaatataaaatttttgaacatatttcgcctaaggaaaaaattttcttttcaaagacaggttatacgggggaaaatggtctagaaatacttttatctaaaaaagcagcaattaatttatgggatttcttaatttctaaaaatgttgcaccttgtggtttaggagctagagatactcttagacttgaagcaggcatgcatctttatgggcaagacataaatgaagaaacttctccatatgaagcagggttaggatggctagtacatctagaaaataatcacgaattcattggcagaagagttcttgaagagcagtcaagattaggcattcaaaaaaagttagttggtctctctataaaaggtaaagcaataggaagaaaagggtgtgcagtgcttaaaggtgatgagaatattggaactatcactagcggcagttggtctccaactaaacaacaagctattgcttttgcatacatcaatacttcgcatgccttaataaataatgaagttgaaatattaataagaggcaaaaaattcaacggggttataacaaaaagagcgttttataaaaagaattattaac

SEQ ID NO: 228875 - DNA, 716 bp, Unknown
  Bacterial polypeptide expressing nucleotide sequence isolated from the Sargasso Sea
tatggaaacacaaaaaacagcattatacgaatatcacaaaagcctcggggcaaagtttgttccgtttgctggttatcaaatgcctgttcaatatacttcaggaattatagatgaacataagctaactagaagcagtgctggcttatttgacgtttcacatatgggacaattatcaattgaaggaaatgaagatctagcctcagaattagagaaaattattccaacagatctaaagaaaataaaactcaatcaatcaaaatattcattccttactaatgaagcaggaggaattcatgatgatttaattgtaactaaagttgaaaaaggatttaatattattcttaatgctgcatgcaaaaatagtgattttaaaataattagtagctctcttaataataattttaaaataattttacatgaaaatttgtctcttatagctttacaaggaccaaaatcatcgcaaatattagaaaaaataattaatggagtttcttctcttaaatttatgaatggaaataaattttcttattatggaaaaaatatatatattactagatcaggctatactggagaggacggtttcgaaatttctatttcaaatgaattagtagaagattttgcaaaaaaattaatatcgcagaatgtcaagccaattggcttgggagccagggacactttaagactagaagcaggattgtgtctttacggtcatgaca

SEQ ID NO: 228876 - DNA, 501 bp, Unknown
  Bacterial polypeptide expressing nucleotide sequence isolated from the Sargasso Sea
aatgaatagaacctttctatatgaatctcatctgggcttgggatcaaaatttgttaatttctcaggatgggaaatgcccatacattatggctctcagattaatgaacataattctgtaagaaatagtgctggtatttttgatgtttctcatatgaatatctttgatttctgtggtgttgaagcaaaagaatttatgagatatgtgctaacaaatgatgtgaataaaattgacgatggttctgcactttatagtgtaataacgaataataaaggcgggataatagatgatctaatcgtttataaatttaataatgaaaaattcagagttgtatcaaactgttctacttttgatgatgtaaataacttctttgaatcaaatattatcaaatttgattgtgagttccatcataaaccaagtttaggcattctagctatccaaggaccagaatctgagattgctcttaaaaatatccttaaagtggagctttcaaactataaaag

SEQ ID NO: 228877 - DNA, 778 bp, Unknown
  Bacterial polypeptide expressing nucleotide sequence isolated from the Sargasso Sea
atgagtataaaaaaaacatcgttaaataatctccacatcaagtatggcgcaaagcttgtagagtttgctggatatcaaatgcccatccaatataaagatggaattatacaagagcataaatacacacgtacacactcaggtatttttgatgtttctcatatgggtcaattatttatatcaggtggtgatgatcttacaaatgatcttgagaagatttttcctgcggatttgaaaaaattgaaaattaatcaaagtaagtattcttttttaatgaataacaaaggaggaattcaggacgatttgataattaccaaaacatctgatggatttttaattatcttgaatgctgcatgcaagtataatgattatgaagtaataaaatctaaacttgataatcaatataaattaaatcttgacgagtcattgtcattaattgcattacagggccctgaagcaaaaaatgttttaaataaagttatacctggttgtaacagtctaaaatttatgaacggtaacaactatgtctataataataaaaaaatatatataactagatcaggatatactggtgaggatggatttgaaatttctataaaacatagtgatgctgaaacttttgtagaaagtttgatagaaaatggatctaaattgattggtttaggagcaagagatacattaagaatggaagctggactgtgcctgtatggaaatgatttagacaacgatacaagtcctatcgaagctaatctaaaatgggcaatacctaagagcagaatga

SEQ ID NO: 228878 - DNA, 692 bp, Unknown
  Bacterial polypeptide expressing nucleotide sequence isolated from the Sargasso Sea
tatgataaaaaaaacatcgttatataatcttcataaaaagcataatgctaagcttgtagagtttgcaggctatgaaatgccaattcattataaagatggaattatccaagaacataaatttacgagatctaattgtggaatttttgatgtatctcacatgggacaactatttatatatggcaaagaaaatcttactcaagatcttgaaaatattttcccaatagacctagaaaaattaaatctaaatcaaagcaagtattcttttttaatggatgagaatgcatgtattcacgatgatttaataataactaaaattttaggaggatatttaataatacttaatgctgcatgtaaagaagatgatttaagaataattaagaaaaaattaaataataaatatgatttacaattaaaggaggatctctcattaattgctctacaagggccagaggcaaaaaatattttagaaaaaaaagtagagggagtaagtaaattaaagtttatgaatggaggaaattttaaattttcagatattaatatatttattacaagatcaggatatacaggagaagatggttttgaaatttctattaaaaataattatgcagaaaaatttgttgaggaaatgcttagtaatggatctaaaatgattggattaggagctagagatacacttagaatggaagcgggat

SEQ ID NO: 228879 - DNA, 526 bp, Unknown
  Bacterial polypeptide expressing nucleotide sequence isolated from the Sargasso Sea
ttgacagagcttaaaaagacagctttatacgatcttcatcgatcacttggtgctaaatcgataccttttgctggatatgaaatgcctgtcaattaccctttaggaattatgaaagaacacttatattgcagaaagtctgcaggcctgtttgatgttagtcatatggggcagttggtcatttcatctaactcaaagtcaatggaattcatcgctactgagttagaaaaactactccctattgatgtgttgggtcttgacgaagacagacagaggtatgggtttttaccaaataaagagggaggaatcatagatgacctcatgatatcaaatcgaggcaatcactattttgtagttataaatgcttccagaaaggaaattgatttcaagtatcttaaagaaaatatttctaaagaaatcgatgttgacttaattcagacaagagcacttatcgctattcagggccctcaatcagaaaagatattatccacccagatcggagatttaagttcccttaaaatatcttgat

SEQ ID NO: 228880 - DNA, 499 bp, Unknown
  Bacterial polypeptide expressing nucleotide sequence isolated from the Sargasso Sea
atgaaaagaactgttctttttgataggcataaaaagcttaatgcgaaaattgtcaattttgctggatacatgatgccaataagctactcctctgttaatgaagaacatattcatgtaagaaataaagttgggatattcgatgtttcccatatgggtgaatttgaaatttcaggattaaattctcttaaattcgtccagtatttatgttctaatgatatttcaaaaattgatgttggtaaagcacaatataattgtttaactaatgagtctggaggaattattgacgatcttatagtatacagactagatcttgataaatttttattggtagttaatgcatccaacatttcaaaaaattggaaatggataacaagtattaatgaaaaatttaattgttcaatatctaatttatcagatgatatttcacttctggctattcaaggaccagaggcagaatcattatgtcaaaaacatacggataaaaatttatcaacttaaa

SEQ ID NO: 228881 - DNA, 662 bp, Unknown
  Bacterial polypeptide expressing nucleotide sequence isolated from the Sargasso Sea
tatgggtgtacaaaaaacagctttatatgatttgcacaaaagtttaggagcaaaattcgtaccatttgcaggctatgaaatgcctatccaatataaggatggtatcgtcaaggaacatatttcaacaaggactcatgctggttttttcgatgtctcacacatggggcaattttttttagagggagacgaaacattagtagaagccttggaaaaaattattccttcagatttaaaatcactaaaagtaaatcactcaaaatattcttttttattaaatgatgacggtggaattatagatgatttaatcgttacaaaaacaaagaaaggtttctgcataattttaaatgcggcttgtaaggaaaacgatatcaaacatatttcaaaatttttagataaaaatcataaatatcttttaaataatgatttatctttaatcgctttacaaggacctaagtcagtagagattttagaaaaacttataccgggcgtttctcaattaaaatttatgactggaaataattttagttacgatagtgaaagtctttacataacgagatcaggatacacaggtgaggatggttttgaaatttcaatttctaataaaaaagtaaaaaacttaattgatttattgatgaaaaatagagtcaagcctataggtttag

SEQ ID NO: 228882 - DNA, 1024 bp, Unknown
  Bacterial polypeptide expressing nucleotide sequence isolated from the Sargasso Sea
aatgtctgatattaaaaaaacttccttacatgattttcataaaagcaaaaatgcaaaaatgatagattttgctggatggtcaatgccattttcttatgatgggacattaaaagaacataactatgtaagagaatctgcaggttattttgatgtatctcatatgggtaggcttcgattaaattattcacaaattgaggaaataaattatctgatatgttctgacttaataaatattagtaacactaaggcgttgtattcaatttttacttctgacgatggcactgcaatagatgatgtaatattttggaaatttgaagatgatttaatacttatctgtaatgctagcaatacaaataaaataaaaactcatttagatattcattctattgattatgaagacctcacaatgaccacggaccttatagcagtacaaggtaagaatgcaattgaactaattaatagctttatgccaattcctgataagttttctactcaaaaagataataatataatctatgcaagaacaggttacacaggtgaagatggcgttgaagtaatgcttgacaataaagatacaatgaattttatcaacaaactcgaatctaacggtataaaaccatgcggtttaggttctagagatactttaagactagaagcatcgttaccactatatggttttgaattaactgatgaaattactcctgttgaagctggcttaaagtggactattacaaataaagatgactatttaggtaaagcagttattgatgagcagattacatcaagagatcataagcatcttaaaagatttaaattaaatgctaaacaaattgctaggacaggaactatttgcaaatctgatggagttgaaggtattgtaacgtctggtaatatctcacctattttaggttatccaattgggtatgttttatttaaaagtaatccctctgacgatttagtagagtttgatattcgtggtaatttagtagaaggaaatttgttatataagaggtttttaagttaa

SEQ ID NO: 228883 - DNA, 886 bp, Unknown
  Bacterial polypeptide expressing nucleotide sequence isolated from the Sargasso Sea
tcttgaatatgtttgctcaaatgacattagtagcatggatataggaagagctcaatacaatgttttcgtaaaccctagtggaggaattgtggatgatttaattgtatacaggactgatgtaaataaatttatgttagttgtaaatgctgccaatattcaaaaagattggatgtggttgaatacaaatttaaatcgatttgattgtacaattacagacgtttcagaaagtactggactaatttcaattcaaggtcctaaatcactcattcttatttcagagttgtttgattgtaaatttgaaaacttaaaaaaattttcttttaaaaacattatttttcaaaatgaaaatattatggtatcaaacacgggttacactggttcacctggatatgagctttatgcacacaataaaataattccaaatgtttgggaacaattattaaataaaggagagaaatataatattaaaccaataggattaggtgctagagatactttacgcatggaaatgggttactgtttatacggaaaagatattgacgataaaaccacaccgtttgaagctaaattaatgtggatcactaacctaaagaaagaatttattggaaaagaaaaagttcttagttcaattgaaaattcatcaaaaaccatgataaattttaaaatgattgaaagaggtattccaagaaatggttatgaaataaaaaataagaaaggagtcaaaatcggatttgttacttctgggacattctcaccgtcaaataaagtgggattaggaattggctatatcaatgatagttataaaatgagtgataaaatctttatttcaataagaaacaaattagtaaaagcagaaataataaaacttccaataaatcatgggtag

SEQ ID NO: 228884 - DNA, 1090 bp, Unknown
  Bacterial polypeptide expressing nucleotide sequence isolated from the Sargasso Sea
aatggaaaaaacagctttatataattttcataaaaattcaggagcaaagttcgttccttttgcaggatatgagatgcctatccaatataaagatggcatagtcaaagaacatataaacacaagacagtctgctggtttttttgatgtatcacatatggggcaattttttgtttctggaggtcgatcaactgaacttagtttagaaaaaattatcccattagattttaaagaaattcagatgaaccagtctaaatactcctttttgattaatgatgaagggggagttatagatgaccttattataacacgagttgaaaatggttttaatattatactaaacgcagcttgcaaggataacgatattaaagaaattgcaaaatgtttaaattctgaaagcaaatacgaattaagaaaagatttatctcttatagctttacaaggtcccaaatcagagtcaattcttgaatcaattataaaaggtgtaaaagaactcaaatttatgaatggaaattattttgaatttcaggaaaagaaaatttacataactcgttctggatatactggcgaagatggttttgagatttctgtgccaaattcaattgttgaaaatcttatcaaacttcttacagataaagatgcaaaacctattggtttaggagcaagagatacacttcgattagaagcaggattatgtttgtacggtcatgaattaaatcaagagattaaccctatacaagcagatttaaaatgggctatttcaaaaaaaagaagagaaacaggaggattcaaaggttgggaaaatattaaaaaagatttacaaaatggagtttcaaaaattagaatcggcattaaaccagcaggtaaaattatagcaagagaaggtacaaaaatttattctcaaagcggagaggaaataggagttatcacaagcggcacatatggaccaagtgttaatagtccagttgctatgggatatattaaaagtaaattttcagaaattaataataaaattttaatagaagtaagaggaaaaaaacatgaggctaaagtatctaaattaccattttataaaaaaagttatgttaaatag

SEQ ID NO: 228885 - DNA, 1117 bp, Unknown
  Bacterial polypeptide expressing nucleotide sequence isolated from the Sargasso Sea
atgcatacgccattaaataatttgcataaaaagagtcatgccagaatgacgccttttgctggttacgagatgccacttcaatataaaaacggaattatgagcgaacatctccacacacggagccacgcagggcttttcgatgtcagccatatgggacaggtcgttttaagaggtaatgacttcaaacaaacggcaaaagcacttgaaacattgatcccaatggaggttgaaactttaaaagccgaccggcaaaggtatgggtttttcacaaacagtactgggggaatatccgatgattttatgttttccaatcgtggtgatcacatatacatggtagttaacgcttcgcgaaaagaagacgatattaaatacttacgagagaatttagaaccgctcggggttagtgttaggaatctagaaaatagagccttgattgcattgcaaggacctacctcacagaaagtgcttgaggaacatttccccgagattgccaaaatgcgctttatggatgtatctacaatacccatagcaggagcggagtgctgggtatcaagatcaggttataccggtgacgatgggtttgaaatttcaataccaagccaggcggcagaaattgtaaccactagtttgttgaagcatgaaactgtcgaacttgccggcttaggagctagggactctctaagattggaagcaggactttgtctttatggacaagatattgatgctacaacctctccagttgccgcaggcttgaagtgggccatgcataactcaagattaagcggaggatataaagaaggaaaatttcctggagcggaaaaaatattatctgaaataagtgatgggacagaatataaattggtgggatttgttccccttggtaaagccccaatcagagcaaacaccgagctttttggtcacggttcatcttcagataaaataggatggataacatcaggttcattcagccccacattaaaacacccaattgcactcgggtatgtgaaaaaagaatattcaattcaaggtaatagagtgaatgcgcaagttcgaggaaagttgctcgaaatagaagtcactcagctaccgtttgtaaagaaaaattttaaaaaataaa

SEQ ID NO: 228886 - DNA, 994 bp, Unknown
  Bacterial polypeptide expressing nucleotide sequence isolated from the Sargasso Sea
atggaaattaaaaaaacacctctgaataaacttcaccaagacaataacgctaaatttgtcgaatttgctggatatgaaatgcctatacaatatagcaaaggtattattgaagagcacaaattcacaagatcgcactctgggatattcgatgtatctcatatgggccagttatttatatatggtgatgaaagtttagcagaagagcttgaaaaaatttttccattagacttaaaaaacctgaaactaaattcttctaaatatagttttttaatgaatgatgaagctggaatttatgatgatttgattattacaaaaattgaacaaggttttttaattattttgaatgctgcatgcaaagaaacagattttaagattttatcaaatatattaggtacaaaatttaaaatgaatttagacaacgatagatctttgatagcaatacaaggacctaaatctgttgaaattttaaactcaattataaatggggtagatcaattaaattttatgacaggcaattggtttgactctgataatcaaaaattatttgtcacaagatcgggttacacaggggaagatggatttgaaatttcgatttctaacgataatgttgaaaaatttgtagaaaatttaatagaaaaaggagcacaacttataggacttggggcaagagataccttgagattggaagctggattatgtttatatggtcatgaactagatattaataaaacaccagttgaagcaaaccttagatgggcaatttcaaaatctagattatcaaatggaggttttattggatcaaaaaaaattatgaaccaaatgcaaaatggtgcaagccaaataagagtaggtattaagccagaaggtagattgattgctagagaaaaaactaaaatatttgacaataaggatactcaaattggtgagataactagtggaacgtttgggccaagtgtaaatggtcctatagcgatgggttacgttgatacagagt

SEQ ID NO: 228887 - DNA, 1105 bp, Unknown
  Bacterial polypeptide expressing nucleotide sequence isolated from the Sargasso Sea
tatggaaacaaaaaaaacaccgctgtaccaattacatcaagattgtaatgcaaaatttgttgaatttgcaggttatcaaatgccgatacaatattcggaaggtattgtagaagagcacaaattcacaagaaatcattcaggtatttttgatgtttctcatatgggtcaactatttatatatggtggtgaagacttaattaaagatttagaaaaaatttttcctttagatctaaaaaatttgaaattaaatcattcaaaatatagcttcttaatggacaaagatgctgggatacatgatgatttaattatcacaaaaacaaatgaaggttttttgataatccttaatgcagcatgcaaagaaaatgactttaaaattttaaaagagctacttaaagagaaatataaaatggttttggatgaaagtagatctctaattgccattcagggtcctaaatcatcagaaattcttaatgaagttatcaatggtgtgaaagatcttaattttatgtctggaaactggtttacatttgaaaatcagaaagtttatattacgcgatctggttatacaggtgaagacggttttgagatatcaattgcaaatgattttgtagacaaattaactagagaattaattaacaaaggatctaaattaattggtcttggagcgagagatacattgagattggaagctggtttatgtctttatggtcatgatcttgataaagacaaaactccagtggaagcaaatttaaagtgggctatttcaaaagaaagaatctctaagggagattttattggctctgacataattattaaacaattaaatgatggtgtcagcaaaataagagttggaattaaacctgagggaagaattattgctagagaaaaaacaaaaatatttaatcaatcagatgttcatattggagaaatcacaagtggtacatttggaccaagtgttaatggacctgttgcaatgggttatgtggaaaatgaattttcaaaaaaaaatactaaagtatttttagaagtcagaggtaaaaaacatcctgcaagtatttgcagcttaccattttataaaaaaagttatgtcaaaggggtaaattaa

SEQ ID NO: 228888 - DNA, 800 bp, Unknown
  Bacterial polypeptide expressing nucleotide sequence isolated from the Sargasso Sea
aatgaaggctacctacctaaatagcaaacataaagatttaggtggttttatggttgatttctctggctgggaaatgcctttacattacggctctcaacttaacgaacataatgaggtcagaacaaatgtaggtatttttgatgtttcccatatggctgtttttgatttagatggtgaaaaacaagaagattttttaagatttcttcttccaaatgacataaaaaagattaacggtcagaacaaggcgatgtattctccaatgctaaattatgaaggtgggattcttgatgatctgatagtttattatctaggaaataaaagttttaggattgtttcaaactgcgctacaagagagaagaaccttagttggttaagcaagattgcagaacctttcgacgtaggaattgactttaagtctgattattcaattttagctcttcagggtcctaattctcataaattcataaaaagtcatattgaaaaagatatatcaaaattttctgttcacaatacagatgatgtgatgattgcttcaaccggctatacaggagaattaggttatgaaattatttgtgaccaagaaaaaggtattaagttttggaatgagtttatttcaaacgatattcaaccaatcggattggcagcaagggatactttacgccttgaagcaggtctaaatctctacggaacagacatggatcagactaatacaccttacgattcaaatattggatggacaatagatttaaatgataaagatagagacttcattggaaaaaatgctctgaagaaaaaaaaga

SEQ ID NO: 228889 - DNA, 1135 bp, Unknown
  Bacterial polypeptide expressing nucleotide sequence isolated from the Sargasso Sea
catgaggggtgcaccgttgcgaacttctctgtaccaatcgcacatctcagagggggcgaatatggttgacttccatggatacgagttgccaatttggtactcttcgatacaggaggagcacctagcgacacgtaactcagcaggactattcgacgtatctcatatggggctattccgattcgtaggagagggagttcgctcatggttgagctcagtatcgactcaagagtatattaagttccaaccggggagatgcggatatagccatttcttggatcacgaaggacatattatcgatgatatgatcttcgccatttcaagcgaagaggaagtactgggagtgccaaattcgaccatggtcagtatcgtttttgattggctttccaccaaccttccctcagatggatcagtcaagatcgaggacctgtcacaagaaactagcattattgcactgcaggggcctaagtcgggggcagttctggaggatgtacttggaagcgagaaccgtgttaagagattcagatgccaagagatggctagtaacgaacttggattgacgggctggattcaggggaccggttacacaggagaggaaggagtggagatattcatctcaaatgaagactctacgaatctctgggaggccctaatttcgcatccggatgtgtctcccgtgggccttggggccagagatactctgagattggagaaagggtacttgctctctggtcaggatttcctgtggcccgaaatttcagagaatactgatttccctaccggttttcttggaaggactacagctcagactgccgttcctttcggtttagacctcaatcacgaatttatcggcagagaagcattggtcatttccatggatagtgcgtctaaattttggggcattgaatgccttgaaagggggccatcgccgcgcccaggccacaaagttatggacggccaaggagaagactccaaaatcatcggttacgtaactagtggagggccgtccccgagcaagaagatgactggaatcgctctcggatacctggaaaattgccaagttggcgacgaagtatggattcaatcaagcagcaggaggagaatcaggtcagaagtaaagagaccacctttcgtctga

SEQ ID NO: 228890 - DNA, 1105 bp, Unknown
  Bacterial polypeptide expressing nucleotide sequence isolated from the Sargasso Sea
atgaatgtaaaaaaaacagcactgtacgaattgcacaaaaagaacaacgctaagttcgttgagttcgctggttatagtatgccaattcaatactctgagggaattgtaaaagaacataatactacaagaaataagtctggaatttttgacgtttcgcatatggggcagttattcattaaatacagtgatgacataacagataagctccaagaaattttaccaactgacctgaagaatttaaaaattaatcaaagtaagtattcgtttttaatgaaagaaaatgggggaatatatgatgatcttattatcaccaggatgaaagatcagtacatgattattttaaatgctgcatgtaaacaaaacgatcttcagattattaaaaataaaataaataatcaaaatttggatataaacaatgatttatctcttatagcgatacaaggtccagagtctaaaacaattcttgaaaatgtggtttcaaatgtatcaaaattaaaattcatgaatggaggaaacttttcttttgcaaataatgaaatctttataacaaggtccggatatacaggtgaagatggctttgaaatatcattacctaataaagttgcaatctcttttgtagaagaattaattttaaaagggtcaagtttaatcggtttaggtgcaagagatactttaagattagaggcaggtttatgcttatatggtcatgacataaatgaaaataccagtccagttgaagcaaatttaaaatgggctatttcaaaaaatagaatcaatgataattttacagggtcacaaaaaataaaaaaacaaattgaagaaggtgtatcaaaattaagagttggtatcaaaccagagactagagttatagcaagagagtcaacgaaaatttttgatgaaaaagacaatgaaattggaaaagttacaagcggcacatttggaccaagtgttaatgcatctattgcgatgggttatatttcaaattctcattctaaaacagatacaaaagttttcttagaagtaagagggaaaaaagtacctgctaatgtttgtgatttaccgttttatagaaaaagttatgtgaaaggagaagctaatgtctaat

SEQ ID NO: 228891 - DNA, 937 bp, Unknown
  Bacterial polypeptide expressing nucleotide sequence isolated from the Sargasso Sea
aatgtcagaaagtaaaaccacttctctttacgattttcatttaagtaaaaatgcaaaggtaatagattttgctggttggtctatgccattttcatatgatggaacattaaaagaacatcattatgtaagagagtcggcaggatattttgatgtatctcatatgggtaggctacgtttaaattactcccaaatagaagaaattaattatttaatttgttctgaccttaaaaacataagtaatacaaaagcactatattctatttttacttctgaagaaggaacagccatagatgatgttatattttggaaatttgaagatgatttaatacttatttgcaatgcaagtaatactaacaaaataaagacacatctagatattcattcaattaactatgaagatctcacgacatctacagatttaatagctgttcagggtaagaatgcgatagatattgttagcaatattatgtctgttcctgataaattttcaacttcaaaagaaggaaaatatgtttatgcgagaacaggttatacaggtgaggatggccttgaggtaatgcttgatacaaaggatacactcagttttatatctgaattggaggataagggtgttaaaccttgtggtttaggctcaagagatacattaagactagaagcgtctttacctttatacgggtttgaattaactgatgacatttcaccagttgaagctggacttaagtggactgttaccaataaagaagattatttaggaaaagatgtaatcgatcaccaaattgaatccaaagaacacaagcacctaaaaagattcaagttgaatgcaaaacagatagctcgtactggaacattttgtacatctgatggggtagaaggtatggtaacttctggcaatatttcgcctatattaggctacccaattggctttgtattattcaaa

SEQ ID NO: 228892 - DNA, 700 bp, Unknown
  Bacterial polypeptide expressing nucleotide sequence isolated from the Sargasso Sea
aatgaatttagataacaatagatctttaatagcaattcaaggacctaaatctgttgaaattttaaactcaattataaatggggttgatcaattaaattttatgacaggaaattggtttgattctgataatcaaaaattatttgtcacaagatcaggttatacaggggaagatggatttgaaatttcaatttctaacgataaagctgaaaaatttgttgaaaatttaatagaaaagggagcacaacttataggacttggggcaagagataccttgagattagaagctggattatgtttatatggtcacgaactagatattaataaaacaccagttgaggcaaaccttagatgggcaatctcaaaatctagattatcaaatgggggttttattggatcgaaaaaaattatgaaccaaatgcaagatggagcaagccaaataagagttgggattaaacctgagggtagactgattgcaagagaaaaaactaaaatatttaatgatacagataaacaaattggtgagataactagtggaacgtttggaccaagtgtaaacggtcctatagcgatgggttatgttgataaagagttttcaaaggttgatacaaaaattttgcttgaggtaagagggaaaaaacatccagcaaatgtttgcgcattaccattttataagaaaaattatgtgaaaggagtaaattaa

SEQ ID NO: 228893 - DNA, 1108 bp, Unknown
  Bacterial polypeptide expressing nucleotide sequence isolated from the Sargasso Sea
tatgagtataaaaaaaacatcgttaaataatctccatatcaagtatggcgcaaagcttgtagagtttgctggatatcaaatgcccatccaatataaagatggaattatacaagagcataaatacacacgttcacactctggtatttttgatgtttctcatatgggtcaattatttatatcgggtggtgatgatcttacaaatgagcttgagaagatttttcctgcggatttgaaaaaattgaaaactaatcaaagtaagtattcatttttaatgaataacaaaggaggaattcaggacgatctgataattaccaaaacatctgatggatttttaattatcttgaatgctgcatgcaagtataatgattatgaagtaataaaatctaaacttgataatcaatataaattaaatcttgacgagtcattgtcattaattgcattacagggccccgaagcaaaaaatgttttaaataaagttatacctggttgtgacagtctaaaatttatgaacggaaacaactatgtctataaaaatgaaaaagtatacataactagatcaggatatactggtgaggatggatttgaaatttctataaaaaatagtgatgctgaaacttttgtagaaagtttgatagaaaatggatctaaattgattggtttaggagcaagagatacattaagaatggaagctggactctgcttgtatggaaatgatttagacaacgatacaagtcctatcgaagctaatctaaaatgggcaatacctaagagcagaattgagactgaatttgttggatcagaagttttaaaaaaccaatttcaaagcggagtaaaaaaattgagagttggcataaaaccagacagcaaagtaattgctagaggaaataccaaaatttacaatgataaaaatcaagaaattgggaaagtaacaagtggcacatttggaccaagcgttgaacatccaatagcaatgggatatgtcgataatagttattcaactgtaaatacaaaaatatttcttgaagttagaggaaaaaaaattcccgcaaatatttgtaacttaccgttttataaaaaaaattacgtaaaaggggaaattaatgtctga

SEQ ID NO: 228894 - DNA, 886 bp, Unknown
  Bacterial polypeptide expressing nucleotide sequence isolated from the Sargasso Sea
tttgaaccagttaccattagacattccgctgaaaaattttcatcaaaataatggtgcaaagatattgccatttgcaggttttaatatgcctattaattataaaactggaataattaatgaacacaaaaatgtcagaaaccactctggtatttttgatgttagtcatatgggacaaattttaattgaaaataatgaatcgtatttacataaattagaaaaatatattccattacaattaaaaaatttaattaaaaatagatcgcattattcatttttgctcaataatgatggcggtgttattgatgatctaattatttcaaatattgatattaaagataagccatatttgtatattgtttataatgcatctcgaaaaaaagaagacgaagaaatatttatttcttgtgctcctaatgcagaaaaaatttataacaaaaattgtttatttgcgatccaggggcctgactctattaatgttttaaaaaatattattgatattccaaataatatgaatttttttgatattttaataagtaaatacgataacaatgaaataatagtaagtagatcaggttatactggtgaagatggttttgaactttctattccaaatgaaagtgcagaaaatttaattactgatttacttaaaaatgaaaatacaatgctttgtggtttaggttctagagattcattgaggcttgaggctggattaagtttatatggtcatgaattaaatgaaaatattacaccaattgaagctggtttatcatgggctctagataaagaaagattagaagataaaaatttaaatggaaataagattttatctgatcaattaaaaaataaattatctaataaaaaaataggtttaatttcaactaataaa

SEQ ID NO: 228895 - DNA, 1093 bp, Unknown
  Bacterial polypeptide expressing nucleotide sequence isolated from the Sargasso Sea
aaaaacatcgctttaccaattacatcaagattgtaacgcaaagtttgttgaatttgcgggttatcagatgccaatccaatattctgaaggtattgtagaggagcataaattcacaagaaatcactctggtatttttgatgtttcacatatgggtcaattatttatctatggtggcgatgaattaattagagatttagaaaaaatttttccattagatttaaaaaatttgaaattaaatcattctaaatacagcttcttaatggataaagatgctgggatacaagatgatttaatcatcacaaaaattgatgaaggttttttaataattctaaatgcagcctgtaaagataatgattttataatattaaaggaactattaaaccaaaagtacaaaatggttttggatgaaaatagatctttaatagcaattcagggacctaaatcatctcaaatcttaaatgatgttgttgatggagtaaaagatttaaattttatgtctggaaactggttcgtattcgaaaatcaaaaagtatacattactcgatctggatatacaggtgaagatggttttgagatatcggttccaaataattttgcagataaattgacaagagaattaattgataaaggatctaaattggtagggctaggagcaagagatactttaagattagaagctggcttatgcttgtatggtcatgaccttgataaaaacaaaactccagttgaagcgaatttgaaatgggcaatttcaaaagaaagaatatctaaaggtgactttattggttcagatatcattaataaacaattgaatgatggtgtcaccaaaataagagttgggattaaacctgagggaagaataattgccagagaaaaaacgaaaatatttaatcaatcagatgttcatattggagagattactagtggtacattcggacctagtgtaaatggccctgtagcaatgggatatgtagaaaatgaattttcaaaaaaaaatactaaagtatttttagaggtgaggggcaaaaaatatgcagcaaacatttgtagcctaccattttataaaaaaagttacgtaaaaggagcaaattaa

SEQ ID NO: 228896 - DNA, 1114 bp, Unknown
  Bacterial polypeptide expressing nucleotide sequence isolated from the Sargasso Sea
atgaatgtaaaaaaaacaacactatttaatcttcataaaaaacatggtgcaaagtttgttaactttgctggttatgaaatgccaattcaatataaagatggaattattaccgagcataatttgacaaggaacaaatcaggaatttttgatgtttctcatatgggacaactatttattacaggtaaagatgatctaactgaaaatttacaaaaaattttaccaactgatcttaaaaaactatctattaatcaaagtaaatattcttttttaatgaaagaaaatggtgggatttatgatgatttgattataacaaaaatagaagatggttacatgattatactgaatgctgcatgtaaaaaaaatgatttgttaattataaaatccaaactggataataaatttgaattaatcttaagagaagatttatctttagttgcaattcaagggcctgagtcaaaagatattttagaaaaaataattccgggtgtaaaaaaaataaaatttatgaatggaaataaatttagctttaactcggaagagatttatataactagatcgggatatacaggagaggatggctttgaaatatcaataaaaaataactcagtaaataagttagtggaaaagatgattgagcttggttcaaacctcattgggttaggtgcccgtgacactttaagacttgaagcaggactttgcctatatggtcacgatattaatgaagaaactagcccgattgaagcaaatttaaaatgggcaatttctaaaaatagaattaatgatgaatttactggagctaaagaaataaaaagacaatttaatgaaggtgtaaaaaaaataagggtaggaattaaaccagatagcagagttatagctagagagtctacaaaaatatttgatgaaaaaaataatcaaataggaaaaataactagtggaacatttggaccaagtgttaatggtcctatagcaatgggctatgtttcaaatttattttcaaaatcaaatacaaaggtatttttagaagttagaggaaaaaaaatacctgcgagtatatgtgatttgccattctataaaaaaaactatgtgaaaggagaagttgatgtcagaagttaaa

SEQ ID NO: 228897 - DNA, 1045 bp, Unknown
  Bacterial polypeptide expressing nucleotide sequence isolated from the Sargasso Sea
aatgaagaaaacttatttaaatgaattccatgcaaataatggtgggcaaatggttgattttgccggctgggagatgccagtaaattatggttctcaaatttcagaacacaaagacgttagagaaaatgtgggaatctttgatgtttctcatatggctgtttttgattttgaaggttcaagacaagttgagtttttagagcatcttttaccaaacgatgtgaataagattctagctagcacaagagctctatattcgcctttacttaatgatgaaggcatgattcttgacgatcttattgtttaccatcttggagatgagaatttcagaataatttcgaattgcggcacaagagatcaaaacaatgcttggtttaagaaagtagctcttaactttgatgtcgcggtggactttaaagaagaagcatcaatcattgctctgcaaggtccaaaagcaaaacaatacttaggtgaaatgtttgatgttgatctagagcccttccatattcagactcatgatggagtaatgatagctagaacaggttatacaggagaagttggttttgaaattatttctaatgcatcccgtggtttagagttatgggattatttcattgacaagggcattaaacctgtgggtttagcggccagagatactctacggcttgaagcaggttttaatctatatggttctgatatgacagccgataatcatccatatgaatctaatctaggctggacaatagatatgtctaatgatgtaagagattttatcggtaaaagtgctctattagatttgcaatcagattctaagaagcttgtaggatttcatactgatgcaagaggagttcttagatctggtaccgaaatttactttgatggaggtactggcattgtgactagtggaacttggagcccaacttttggaaagaatataggattatgtagagttgatagcaatcatccagatactggaaatgcaaaattgcgagataaagagattaatttgtatttttgtgagacaaattttttaaaatatttaaaataa

SEQ ID NO: 228898 - DNA, 1108 bp, Unknown
  Bacterial polypeptide expressing nucleotide sequence isolated from the Sargasso Sea
tatgactacaaaaaaaacatcgctgtatcaattacatcaagaaagcaatgcaaaatttgttgaatttgcaggttatcagatgccaattcaatattcagaaggtatagtagaggagcataaattcacaagaaatcattctggtatttttgatgtttctcatatgggtcaattatttatttatggtgatgaaaacctaattaaagatttagaaaaaatctttcctttagatttgaaaaatttaaaattaaatcattctaaatatagtttcttaatggataaagatgctgggatacacgatgatttaattataacaaaaacaaatgaaggttttttaataatccttaatgcagcatgcaaagataatgacataaaaattttaaaggaattactagaagaaaagtacaaaatggttttagatgaaaacagatctttaattgcaattcagggtcctaaatcgtctcaaatccttaacgatattattgctggagtaaaagatctaaattttatgtcaggaaactggttttcatttcaagatcacaaagtttatattactcgatctgggtatacaggggaagatggttttgagatatcgatcccaaatgattttgtagataaattaaccagagaattaatcaacaaaggatccaaattaataggtttaggagcaagggatactttgagattggaagctggtttatgtttatatggccatgatcttaataaagacaaaactccagtggaagcaaatttaaaatgggcaatttcaaaagaaagaatatctaagggagattttattggctctggtataatcattaaacaattaaataatggtgttagtaaaattagagttggaattaaacctgagggaagaataattgctagagaaaaaacaaagatatttaatcaatcagatgttcatattggagaaattacaagtggtacgtttggaccaagcgtaaatggacctgtagcaatgggctatatagaaaatgaattttcaaaaaaagatacaaaagttttcttagaagtaagaggaaaaaaacatccagcaaatatttgtggattaccgttttataaaaaaagttacgtgaaaggggcaacaaaatga

SEQ ID NO: 228899 - DNA, 1045 bp, Unknown
  Bacterial polypeptide expressing nucleotide sequence isolated from the Sargasso Sea
atgaagaaaacttatttaaatgaattccatgcaaataatggtgggcaaatggttgattttgccggttgggagatgccagtaaattatggttctcaaatttcagaacacaaagaagtcagagaaaatgttggaatctttgatgtttctcatatggctgtttttgattttgcaggttcaagacaagttgagtttttaaaacatcttctaccaaacgatgcaaataagattctagatagtacaagagctctatattcacctttgcttaatgatgaaggaatgattcttgatgatctaattgtttaccatctcggagatgagaatttcagaataatttcaaattgcggcacaagagatcaaaacaatgcctggtttacaaaagtagctcttaactttgatgtcgcggtggactttaaagaggaagcatcaatcattgctctgcaaggaccaaaagcaaaacaatgcttagatgaaatgtttgatgctgatctagacccttttcatattaaaactcttgatgatgtaatgattgctagaacaggctacacaggcgaagttggttttgaaattatatctaatgcatctcgtggtttagagctatggaatcattttattgaaaagggcattaaacccgtgggtttagcagcaagagatactctaaggcttgaagcaggcttcaatctgtatggttctgatatgacaatcgaaaatcatccttatgaatctaatttaggttggacaatagacatgtctaatgatgcaagagattttatcggtaaaagtgctctattagatttgcaatcagattctaagaagcttgtaggatttcatactgatgcaagaggagttcttagagctggcactgaagtttattttgatggtggcagtggtattgtgactagtggaacctggagtccaacttttggaaagaatataggattatgtagagttgatagcaatcatccagatactggaaatgcaaagttgcgagataaagagattaatttgcatttttgtgagacaaattttttaaaatatttaaaataat

SEQ ID NO: 228900 - DNA, 1045 bp, Unknown
  Bacterial polypeptide expressing nucleotide sequence isolated from the Sargasso Sea
atgaagaaaacttatttaaatgaattccatgcaaataatggtgggcaaatggttgattttgccggttgggagatgccggtaaattatggttctcaaatttcagaacacaaagaagtcagagaaaatgttggaatctttgatgtttctcatatggctgtttttgattttgaaggttcaagacaagttgagtttttaaaacatctcctaccaaacgatgtaaataagattctagatagtacaagagctctatattcacctttgcttaatgatgaaggaatgattcttgacgatctaattgtttaccatcttggaaatgagaatttcagaataatttcaaattgtggcacaagagatcaaaacaatgcttggtttaagaaaatggctcttaactttgatgtcgcggtggactttaaagaggaagcatcaatcattgctctgcaagggccaaaagcaaaacaatgcttaggtgaaatctttgatgttgatctagagcctttccatattcaaactcttgatgatgtaatgatagctagaacaggttatacaggagaagttggttttgagattatctctaatgcatctcgtggtttagagctatggaatcattttattgagaagggcattaaacctgtgggtttagcagcaagagatactctaagacttgaagcaggtttcaatctgtatggttctgatatgacaatcgaaaatcatccttatgaatctaatttaggttggacaatagacatgtctaatgatgcaagagattttatcggtaaaagtgctctattagatttacaatcagattctaagaagcttgtaggatttcatactgatgcaagaggagttcttagatctggtactgaagtttattttgatggtggcagtggcgttgtgactagtggaacttggagtccaacttttggaaagaatataggattatgtagagttgatagcaatcatccagatactggaaatgcaaagttgcgagataaagagattaatttgcatttttgtgagacaaattttttaaaatatttaaaataat

SEQ ID NO: 228901 - DNA, 1826 bp, Unknown
  Bacterial polypeptide expressing nucleotide sequence isolated from the Sargasso Sea
tcaaaaggaaaaaatgatttatcaattcttaatttaaaagaaaattcaaatggagactatttaaaaaaagcaattaataacgatgaaaaaattttaaatttatttaaaaaaaaaaatcttgaactaaataaatctaaatcctcaattatatttaacgaggattgtccaatgggtgaaaaaataatcataaaatcaaaggatgaatgtaccgttatggtttcttccccaggagataaaatgaatgttcataatcaaaatcccccaacaagtttaactattttcttacatagagctaaatttgaaataaaaaaagaacaatatgtcttacctgagcccctttatgatcctaattcagaaaaatttattaaaagaatgactgctgaaacttatgatgtaaaagaaggagaatatattcaaattattgatacaagtggaagacagtgttcagattttttagcctttgataaaaaaaaacttgataaaggtatagaaagtataattgatcctaccgcaacaagaacgtttatgggtgctgcttaccctatgccaggtttgttttctaaattctttgatgctaaccatgatcctgttattgaagtggttagagatactgttggaagacatgatacttttaattacgcttgtactgcaaaatattatgaagatatgggatattttggccatataaattgttctacaaactttaatggtgtcctaaaaaaatatgacgtaaagccaagaaaaggctggatagcaattaatcttttttttaatacagcaattgatgcaaacaatgttgcttcttttgatgagccttggtctaggcctggagattatgtgctatttagagcgttaaaagatttaacatgcgcttcttcggcatgcccttgtgatgtagatcctgcaaatggatggaatccaacggatatttttgttagaacttattctaaagataaaaaaatttctaaaggagtggcatttagagtgaatacaaattcggaaccaaaaattactcaagaaactggctttcatgcaaagacttctaagttaactaaaaattttatcaattataatggatattggcttgcaaataattatacaaagtatggtgcagttaaagaatacacttcatgtagagaaagcgcgattgttactgatttatctcctcttcgaaagtttgaaattttgggaccagatgctgaaaatttaatgcaatacacactaacacgaaatgtaaaaaaattatctgcgggtcaagttgtttattctgccatgtgttatgaaaatggctgcatgattgatgatggtacgttaatgaaatttggacaagataattttagatggatcggtggacaagaatatggcggtgaatggcttaaagaacaagcaaaaaagaaaaattttaaagtttgggtaaaatcatctactgatcaaattcataatattgctgttcaaggaccaaatagtagaaaaattttagaaaaatttgtatggacacctgatactcaaccatcaattaaagatttacaatggtttagattaacaattggaagaattgatagtgttactggtactccaattatagtgtcgagaactggatatacaggagaattaggtttcgaaatttggtgccatccaaaagatgcttcgattgtttgggataaagtttgggagtctggtaaggagtttaatatttcaccacttggtttagaggctttagatatggttcgtacagaggcaggattaatattttatggttatgaatttgacgataaaacagatccatttgaagcaggaataggatttacagtgcctcttaaaaacaa

SEQ ID NO: 228902 - DNA, 601 bp, Unknown
  Bacterial polypeptide expressing nucleotide sequence isolated from the Sargasso Sea
cttatatctatgctcgccatcgctccctaggcgaggtcctgcttgtgcatatgaaggtggtgatcttttcatatcaaggacaggctatacgggcgaagatggttttgaggttataggtgatcaccaaaaactccaaataatttggaatttatgtattgctgaaaatattgctccaattggcctaggtgcaagagacactttaaggattgaagctgggatgaatctgaatgggacagatatgaccatagaaaataatccctttgaatctaatcttggttgggttgtagattttagtgatattgaaagagatttcattgctaaagaaaatctcactgaaattaaagaatctaataagcataagcttgtcggtgttttgcttgaagaaaaaggaattttgagaggcggtcaaaagatcatcaaaaatgatcttgagggggaagttacaagtggaacattttctccatttatgaagaaaagtattggcttagctagagttccatttaatatgaacgaaaatgccaatgtgcttataagaaataagctcttaaatgtaaaaattttatcgctaccttttgtgagaaaaggtaaaattatgctatga

SEQ ID NO: 228903 - DNA, 1675 bp, Unknown
  Bacterial polypeptide expressing nucleotide sequence isolated from the Sargasso Sea
gatgattggttctcctggcgaattaatgactgttcataatccaaatccgccgacaagtcttacaatttttatacatagggcaaaatttgacataaacgaagaacaatatgttctaccagaacctctttatgatccaatatcagaaatatttgttaatcgaatgtcatctgaaacttatgaagttaaagctggagaatatattcaaataattgatccaggtggaacacaatgttcagattttttaccattcaataaaaggaaacttgataaaggaatcgagagcataatagaccccacagcaacaaggacttttatgggtgctgcatatcctatgccaggtttattttcaaagttttttgatgctgatcatgaacctgtaattgaggttgtaagagatacagttgggaggcatgacaccttcaattacgcttgtacatcaaaatattatgaggacatgggctatttcggtcacattaattgttcaacaaattttaataattcattaaaaaaatatgaagtgaaaccaagaaaaggttggatagcgataaatttattttttaatactgcaatcgatgctaataacgttgcaacttttgatgaaccttggtcaagacctggtgattatgtgctttttagagcattgaaagatcttacgtgtgcatcttctgcatgtccatgtgatgtagatgcagcaaatggatggaatccaactgatatatttgttagaacatatgcaaaagataaaaagatctcgaaaggggtagcttttagagtgagcacagattcagaaccaaaaattacaaaagaaacaggctttcatgaaaagacttcaaagctaacaaaaaattttattaattataatggatattggttagcaaataattatacaaattacggcgcagtaaaagaatatacatcttgtagagaaagtgtcattgtaacggatctttcacctttaagaaaatttgaaatacttggaccagatgcagaaaatttaatgcaatatacacttacaaggaatgttaaaaaactttccgcaggacaagttgtctattctgctatgtgctatgaaaatggttgtatgattgacgatggaactctgcttaaatttggtcaagataactttagatggattggtggtcaagaatacggcggtcaatggttgaaagaacaagctaaaaagaaaaattttaaggtatgggttaaatcctcaactgatcaaatacataatattgctgttcaaggtcctaatagcagaaaaattttaaaaaaatttgtttggactcctgatactcagccttccatagatgatctacaatggtttagattgactatcgcaagaatagatagtgtgacaggaactccaatagttgtctcacgaacaggttacacaggtgaattaggatttgaaatcaggtgtcatccaaaagatgcttctgttgtatgggataaagtttgggaagctggaaaagaatttaatatttctccattaggtttagaagctttagatatggtaagaattgaagctgggctaattttttatggttatgaatttgacgataagacagatccttttgaggctgggataggttttacagttcctttaaaaacgaaagaagatgattttattggaaaagaagagttaataaaaagaaaaaataatccacaaaaaaaa

SEQ ID NO: 228904 - DNA, 745 bp, Unknown
  Bacterial polypeptide expressing nucleotide sequence isolated from the Sargasso Sea
tatgggaacaaaaaaaacatcgctttaccaattacatcaagattgtaacgcaaagtttgttgaatttgcaggttatcatatgccaatccaatattctgaaggtattgtagaggagcataaattcacaagaaatcactctggtatttttgatgtttcacatatgggtcaattatttatttatggtggtgaagaattaattaaagatttagaaaaaatttttccattagatttgaaaaatttgaaactaaatcattctaaatacagcttcctaatggataaagatgctgggatacaagatgatttaatcattacaaaaattgatgaaggttttttaataattcttaatgcagcgtgtaaagacaatgattttaaaattttaaaggaacttttaaatgaaaagtacaaaatggttttggatgaaaatagatctttaatagcaattcagggacctaaatcatcacaaatcttaaatgaagctgttgatggggtaaaagatttaaattttatgtctggaaactggttcttatttgataatcagaaagtatacattactcgatctgggtatacaggtgaagatggttttgaaatatcaattctaaataattatgcggataaattgaccagagaattaattaataaaggatctaaattggcaggcttaggagcaagagatactctaagattagaagctggcttatgcttgtatggtcatgaccttgataaagataaaactccagttgaagcg

SEQ ID NO: 228905 - DNA, 1096 bp, Unknown
  Bacterial polypeptide expressing nucleotide sequence isolated from the Sargasso Sea
tatggaagtacaaaaaacagcattatataatattcataaaagccttggagctaagtttgttccttttgcaggttatgaaatgccaattcaatataaggatggtattgtaaaagaacatatctcaactagaacatttgctggtttttttgatgtttcccatatggggcaattttttttagaaggtgatgaaactttaacagatgctttagaaaaaatcattcctgcagatttaaggtctttgaaaattaatcattcaaaatactcttttctacttaatgatgacgggggtataattgatgatttaattgtaacaaaaactgagaaaggattttgtataattttaaatgcagcatgtaaagaaaatgatattaagcaaatttcacaattcttaggaaaaaaccataagcatcttttaaataaccaattatctttaatagctttgcagggacctaaatctgtggagatactggaaaaacttattcctggtgtttctaatttaagattcatgactggaaataaatttaactttgatggtgaaaatttgtacattacgagatcgggttatactggagaagatggttttgaaatttctatttcaaataaaaaagtagaaaaacttatcaattttttaattttgaataacgttaaaccaataggtttaggtgcaagagatacattaagattagaagcaggtctttgtttatatggacacgatttaaacgaaaaaattaatcccattgaggctaatttaaaatgggccatagcaaagaaaaggaaagatgttggtggatttaacggatgggacaagattaaaattctattaactaatgggtgtgaaaaaataagagttggtattaaacctgaaggtaaaataattgctagagaaagaacgaaaattttttctaaagatggaaatgaaataggctttgttactagcggtacttttggtcctagtgtaaatgctccagttgcaatgggttatgttaaatcaaaatttgcagaggttggaacacctattcaactagaaattagagggaaaaaatatggaggtaaaatttctgagctaccattttataaaaaaagttatgttaaataa

SEQ ID NO: 228906 - DNA, 1105 bp, Unknown
  Bacterial polypeptide expressing nucleotide sequence isolated from the Sargasso Sea
tatgaatataaaaaaaactgcactatacgaactacataaaaagcacaacgctaagtttgttgagtttgctggctacagtatgccgatacaatactctgagggaattgtaaaagagcataatattacaagaaataaatccggaattttcgatgtttcccatatggggcagttatttattaaatacagtaacgatataacagacaaactccaagaaattttaccaactgatcttaaaaatttaaaaattaatcaaagcaagtattcgtttttaatgaaagagaatgggggaatatatgatgatctcatcatcacaagaatgaaagatcagtacatgattattttaaatgccgcttgtaaacaaaacgatcttcagattattaaaaatacattggatgatcaaaatttggacatgaacaataatttgtctcttgtagcgatacaaggtccagagtctaaaacaattcttgaaaatgtagtttcaaatgtatcaaaattaaagtttatgaacggagaaaattttacttttaaaaataatgaaatctatattacaagatctggatatacaggtgaagatggatttgaaatatcattacctaataaagtcgcaatctcttttgtagaagagttaatttctaaagggtcaactttaattgggttgggtgcaagagatactttaagattagaagcaggtttatgcttgtacggtcatgacataaacgaaaataccagtccagttgaagcaaatttaaagtgggcaatttcaaaaaatagaataaatgataactttataggatcacatcaaataaaaaaacaaatcgaagaaggcgtgtcaaaattaagggttggtatcaaaccagagactagagttatagcaagagagtcaacgaaaatttttgatgaaaaagacaatgagattggaaaagtcactagcggaacatttggaccaagcgttaatgcttcaatcgcaatgggctatatttcaaattctcattctaaaaaagatacaaaagtttacttagaagtaagaggaaaaaaagtgcctgccaatgtttgcgatttgccattttataaaaaaagttatgtgaaaggagaagccaatgtctaa

SEQ ID NO: 228907 - DNA, 1114 bp, Unknown
  Bacterial polypeptide expressing nucleotide sequence isolated from the Sargasso Sea
atgaatgtaaaaaaaacaacactattcaatcttcataaaaaacatggcgcaaagtttgttaactttgctggttatgatatgccaattcaatataaagatggaattattgctgagcataatatgaccaggaataaatcaggaatttttgacgtttctcatatggggcaactatttattaaaggcaaagatgatctaactgaaaatttacaaaaaatctttccaactgatcttaaaaaattatctattaatcaaagcaaatattcttttttaatgaaagaaaatggtgggatttatgatgatttaattataacaaaaatagaagatggttatatggttatactaaatgctgcatgtaaagaaaatgacttgtcaattataaaatccaaactggatagtaaatttgaattaattttaagagatgatttatctttagttgcaattcaaggacctgagtcaaaagatgttttagaaaaaataattccaggtgtaaaaaaaataaaatttatgaatggaaataaatttagctttaattcagcagatatttatataacaagatcaggatacacaggagaagatggctttgaaatatcaataaataataacttagtaaataaattagtggaaaaaatgattgagcttggttcaaacctaataggattaggtgctcgcgacactttaagactcgaagcaggactttgcttatatggtcacgatattaatgaagagaccagtccacttgaagcaaatttaaaatgggcaatttctaaaaacagaattaatgatgaatttactggagctaaagaaataaaaagacaatttgatgaaggtgtaaaaaaattaagggttggaattaaaccagaaagcagagttatagctagagaatctacaaaaatatttgatgaaaaaaataatcaaataggaaaaataacaagtggaacatatggaccaagtgtaaatggccctatagcaatgggttatgtttcaaatttattttcaaaatcaaatacgagggtatttttagaagttagaggaaaaaaaatacctgcgagtatatgtgatttgccattttataaaaaaaactatgtgaaaggagaagttgatgtcagaagttaaa

SEQ ID NO: 228908 - DNA, 832 bp, Unknown
  Bacterial polypeptide expressing nucleotide sequence isolated from the Sargasso Sea
agtagttgatgatctaatagtttctttaatagaaattaataacaaatccgttttgtacatagtttacaatgcttctaggaaaaatgaagacgagcaaattttctttaaatgtgcaccaaaagccgagattattcatacaaaaaattgtttattcgctattcaaggtccagagtctatagaagttcttaataatattattgaagttccaaatgatatgaattttctaaatattgctttacttgattacaataaaataaaattaatagtaagtcgaactggatatactggagaagatggttttgaaatttcaattcctattgaacaatctgaagttttcttaaaagatatattgaagaataaaaatacgatgctttgtggtcttggatcaagggactcattaagattggaagcaggattaagtttatatggtcatgaacttaatgaatatattacacctattgaagcaggattgtcttgggcattagataaagatcgcttaaatgatactgcactaaatggttataaaatattatcagatcaattacataataaaccttcaaataaaaaaatcggattaatttcagttaatagatcaatgttaagagatggaatgattttatttgatagtaataaaaataatattggaaaaattacgagtggttgttttagtccaaatctaaataagtcaatagctattggatatgtaaattcacattttgatgaaaaaaaagaaattttttgtgaaattagaaataaaatggaattagtaaaaaaaactagtctaccatttgttagaaaaaattataaaaaaaatgggagtaacaatgagtga

SEQ ID NO: 228909 - DNA, 1096 bp, Unknown
  Bacterial polypeptide expressing nucleotide sequence isolated from the Sargasso Sea
atggaagtacaaaaaacagctttatacaattatcataaaaatttaggagcaaagtttgttccgtttgctggctatgaaatgcctattcaatataaagatggtattgttaaagaacatatttctacaagaacacacgctggattttttgatgtctcacatatggggcaattttttttagaaggggatgaaacattaatagagtcattagagaaaattataccagcagatttaaaaaatttgaaaattaatcattcaaaatattcttttttacttaataatgaaggtggaataattgatgatttaattattacgagaacagaaaaaggtttttgtataatcttaaacgcagcttgtaaggaaaatgatataaaacaaatttctcaatttttaaaaaaacatcataaacatcttttaaacaacgatttatctttaatagcgttacaaggacctaaatctgtagagattttagaaaaattaattccaggcgttgctaatttaaaatttatgacaggaaacaattttgagtatgaaggtgaaaatctatatgtaacaagatctggatatacaggtgaagatggttttgaaatctcaatttcaaacacaaaagttgaaaagctcatcgattacttaatttcaaatgaagttaaaccgataggtttaggagctagagatacattaagattagaggcaggtctgtgtttatatggtcatgatttaaatgaaaaaataaatccagtagaggctaatttaaaatgggctatagcaaaaaaaaggaaagaagttggcggctttaatggatgggaaaaaataaaaaatttattagcaaacggaagtgaaaaaattagagttggtataaagccagatggaaaagttatagctagagaaaatacgaaaatcttttcgtcagataataatgaaataggattcgttactagcggtacttttggcccgagtgtgaacgctccagttgcaatgggatatgttaaatcagaattttctgaagtaggtacatctattcagcttgaagtaagaggaaaaaaatatgggggtaagatttctgaacttccattttataaaaaaagttatgttaaataag

SEQ ID NO: 228910 - DNA, 688 bp, Unknown
  Bacterial polypeptide expressing nucleotide sequence isolated from the Sargasso Sea
atggaagtacaaaaaacagctttatataatattcataaaaaccttggggcaaagtttgttccttttgcaggttatgaaatgccaatccaatataaagacggcgttgtaaaagagcatatttctacaagaacttatgctggattttttgacgtttctcatatggggcaattttttttagaaggtgatgaaacattaacagaggctttagaaaagattattccagcagatttaaagtctttaaaaattaatcattcaaaatattcttttttacttaataatgatggaggaataattgatgatttaattgtaacaaaaaccgaaaaaggatttagtataattttaaatgctgcttgcaaggaaaatgatatcaaacaaatttcaaaatttttagaaaaaaaacataagtatcttttaaataatgatttgtctttaatagctttacaaggacctaagtcggtcaaaatattggaaaaattgatacctggcgtttctaatttaaaatttatgactgggaacaactttgattatgataatgaaaatttatatattacaagatcaggttataccggagaagatggttttgaaatatctatttcaaataaaaaagtagaaaagctaattagttttttaatttcaaatcaagtcaaaccaataggtttgggtgctagagacacattgagattagaag

SEQ ID NO: 228911 - DNA, 838 bp, Unknown
  Bacterial polypeptide expressing nucleotide sequence isolated from the Sargasso Sea
atgttaaccaccgatgccggtacaatcatagacgacatactggtgacccgcggggacgacgggttgttcgtggtagtaaatgcatcccgttttgacgtagatctgccgcatatgcagacggaaatcggtgccgatgtggagatcaaggttcttacagatcaggcacttatcgccctacaaggcccaaaagcggccgcggctcttagcaatttatcactagaggtggcggccatgccgttcatgtccgccagaacaatcaccattggcggcatagaagctctcataaaccgatgcggctacacgggtgaagatgggttcgaaatctccgttcccgctgacggggccgaagacttggtccgcacaatgcttgccgataaccgcgttgagatggccggtctgggcgcacgggatacgttacgcctggaagctgggctctgcctttatggccaagatatcgacgaaacgacgacacccatcgaagctggccttaagtggaccatcgccaagcgccgtcgtgaggaaggcggatttccgggtgctaaggtgattttaaaccagatcgctaatggaacaacgcgtaggctcgttggcatccggcctgcaagccgtgccccggcacgcgccgggacggccatcaaaagtctcgatggcgaaccgctgggcgaaattaccagcggcgcatttggtccgacgatcggtggtccagtcgcaatgggctatgtcgccgaggggtccaacaacaccggcacaaccgtgcaactagatatccgcggcaataccgttccggcaacaatcaccgccttacccttcacgccacgccgctattttgagaattgaa

SEQ ID NO: 228912 - DNA, 961 bp, Unknown
  Bacterial polypeptide expressing nucleotide sequence isolated from the Sargasso Sea
atggaaacgaaaaaaacatctttaaacagtttgcatcagaaatacggagctaagcttgttgaatttgcaggctatgaaatgccaatccagtataaagatggaatagttcaagagcataaatttaccagatctagttcaggtatatttgatgtttcacacatgggtcaattgtttatatctggctctgataacttaactaaagatttagaaagaatttttcctgcaaatttagaaaatttaaatttaaatcaaagcaaatattcatttcttatgaataatgaagggggaatatacgacgacttaattattactaaaatagagaaaggatatttaataatacttaatgcggcatgcaaacacaatgattatgaaattattaagtctaaacttaaagacaaatatgaaattaaattagatgaaacactttctttagttgctatccaaggaccagaggcaaaagtaattttgagtaaaattatacctggttgtaatgatctaaaatttatgaatggaaataattttatttttgaagatactaatatttatataactagatcaggatacacaggtgaagatggttttgaaatatcaattaaaaatgaaaaagccgaagattttgtagaaaaacttattgaaaaaggatctaaaatgataggcttgggtgccagagatactttaagattagaagccggtttgtgtttatatggaaatgatttagatacaaaaacaagtcctatcgaagcaaatttgagatgggcaattccaaaaaatagaattaatagtgagtatccgggttcaaatgttttgaaaaaacaaatagaaaacggtgttaaaaggttacgagtcggcattaagcctgagactagaataatcgcaagaggagagacaaaaatatttaatgataataaccaacagataggtaaaattaaaagcggtacatttggcccaaagcgtagataga

SEQ ID NO: 228913 - DNA, 1008 bp, Unknown
  Bacterial polypeptide expressing nucleotide sequence isolated from the Sargasso Sea
aatggaaaaaacagctttatacaattttcataaaaatttgggagcaaagtttgttccttttgccggttatgaaatgcctatccaatataaggatggaatagtaaaagaacatattagcacaaggcagtcagcaggtttttttgatgtctctcacatgggacagctttttgtatcaggaaacaagtcatcagaacaaagtttagaaaaaattatccctttagacttcaaagaaattaaaatgaatcaatccaaatattcctttttgatcaatgataaaggtggggtgatcgatgaccttattattacccgggtagaaggcggctttaatattatattgaacgcagcttgcaaagcaaatgacataaaagaaatagcaaaatgtttaaattcagaaaacaaataccaactaagaaaagacctctcccttattgctctccaaggtccaaaatcagaatccatcctggagtttattgttaagggagcaaaacaacttaagtttatgaatggaggttactttgaatttcaaggaaagaaaatttatataactcgatctggctatacaggagaggatggttttgaaatttcagtgccgaatacaaatgtagaaaactttactaaacttctctcagacaaaggtgcaaaaccaataggccttggagcaagagatacactgagattggaagctggtttgtgtttatacggacatgaattgaaccaagatattaatcctgtacaagcaaatttaaaatgggctatttcaaaaagaagaagagaagagggtggcttcaagggctgggaaaatataaagaatgatttacaaaatggtgtttcaaaaattagagtcggaatcaaaccttctggaagaattatagccagagaaggtacaaaaatattttcattatcaggtgaagaaataggtgttattactagcggaacatttggtccaagcgtcaacagtcctgttgcgatgggatatataaaaagtaaattttctgagattaataacaa

SEQ ID NO: 228914 - DNA, 193 bp, Unknown
  Bacterial polypeptide expressing nucleotide sequence isolated from the Sargasso Sea
cactgccgccggtgacggcgagatcaccagcggcacgttcagcccgagcctgtcgctctccatcgcactggcgcgcctgcccaaggacgtgaccattggcaccgacgtacaggtcgaaattcgcgaccgcaagttgaccgcgactgtggttaaactgccgttcgtgcgcaatggcaaggcgctggtcagctga

SEQ ID NO: 228915 - DNA, 1087 bp, Unknown
  Bacterial polypeptide expressing nucleotide sequence isolated from the Sargasso Sea
atggaaaagactgccttatataattttcataaaaatttaggagcaaaatttgttccttttgccggctatgagatgccaattcaatacaaagaaggaatagtaaaagaacatataagcactagattgtatgcagggttttttgatgtctcacatatggggcaactttttatttcaggaaataaattttcagaagacagtttagaaaaaattatacctctagatttcaaagaaattaaaatgaatcaatctaaatattcttttttaattaatgatgaaggcggggtaatcgatgaccttatcataacaagagttgaaggaggttttaacattatattaaatgcagcctgtaaagataatgatattaaagaaatatcaaaatgtttaaattcagatagcaaatatgagctaagaaaagacctttctcttattgctctgcagggcccaaaatctgagtctattttagagtctatagttaatggagtaaaacaacttaagtttatgaacggcggttactttgatttcgagggtaataaaatttatataactcgatctggttatacaggcgaggatgggtttgaaatttcaataccaaatacgaatgttgaaagctttacaaagcttctttcggataagggagctaaaccaataggactaggagctagagacactcttagattggaggccggtttatgtttatacggtcatgaattaaatcaaaatattaatcctatacaggcaaatttgaagtgggctatctccaaaagaagaagagaagaaggtggatttaaaggttgggaaaatattaaaaaagatttacaacatggagtttcaaaaattagaataggtgtcaaaccatctgggagaattattgcaagagaaggaacaaaaatattttcatcatctaatgaagaaataggtgttattacaagcggaacatttggtccaagtgtaaatagtcctgtagccatgggttacattaaaagtaaattttcagagattaataataaaattttcttagaagtaaggggaaaaaaacacgaagctgtagtttcaaagctaccattttataaaaaaagttatgtcaaat

SEQ ID NO: 228916 - DNA, 955 bp, Unknown
  Bacterial polypeptide expressing nucleotide sequence isolated from the Sargasso Sea
tttgaaccagttaccaatagacattccgctgaaaaattttcatcaaaataatggtgcaaagatattgccatttgcaggttttaatatgcctattaattataaaactggaataattaatgaacacaaaaacgttagaaatcattctggtatttttgatgttagtcatatggggcaaattttaattgaaaataatgaatcttatttacataaattagaaaaatatattccattacaattaaaaaaattaattaaaaatagatcgcattattcatttttgctcaataaagatggtggtgttattgatgatctaattatttcaaatattgatattaaagataagtcatatttatatattgtttataatgcatctcgaaaaaaagaagacgaagaaatatttatttcttgcgctcctaatgcagaaaaaatttataacaaaaattgtttattcgcgatccagggacctgactctattaatgttttaaaaaatattattgatattccaaataatatgaatttttttgatattttaatcagtaaatataacaacaatgaaataatagtatgtagatcaggttatactggtgaagatggttttgagctttctattcaaaacgaaagtgcagaaaatttaattactgatttacttaaaaatgaaaatacaatgctttgtgggttaggttctagagattcattaagactcgaggccggattaagtttatatggccatgaattaaatgaaaatattacaccaattgaagctggtttatcatgggctctagataaagaaagattagaagataataatttaaatggaaataaaatattatctgatcaattaaaaaataaattatctaataaaaaaataggtttaatttcaaccaataaatcaatgctaagagatggaatgacgttatttgataataataataatgaaattggtaaaattacaagtgga

SEQ ID NO: 228917 - DNA, 1126 bp, Unknown
  Bacterial polypeptide expressing nucleotide sequence isolated from the Sargasso Sea
tttgaaccagttaccaatagacattccgctgaaaaattttcatcaaaataatggtgcaaagattttgccatttgcaggttttaatatgcctattaattataaaactggaataattaatgaacacaaaaacgttagaaatcactctggtatttttgatgttagtcatatgggacaaattttaattgaaaataatgaatcttatttacataaattggaaaaatatattccattacaattaaaaaaattaattaaaaatagatcgcattattcatttttgctcaataaagatggcggtgttattgatgatctaattatttcaaatattgatattaaagataagtcatatttatatattgtttataatgcatctcgaaaaaaagaagacgaagaaatatttatttcttgtgctcctaatgcagaaaaaatttataaaaaaaattgtttattcgcaatccaagggcctgattctattaatgttttaaaaaatattattgatattccaaataatatgaatttttttgatattttaataagtaaatacaataataatgaaataatagtaagtagatcaggttatactggtgaagatggttttgaactttctattccaaatgaaagtgcagaaaatttaattactcatttacttaaaaatgaaaatacaatgctttgtgggttaggttctagagattcattaagactcgaagctggattaagtttatatggtcatgaattaaatgaaaaaattacaccaattgaagctggtttatcatgggctttagataaagaaagattagaagatgaaaatttaaatggaaataaaattttatctgatcaattaaaaaataaactatctaataaaaaaataggtctaatttctacaagtaaatcaatgctaagagatggaatgacattattcgataataataataatgaaattggcaaaattacaagtggatgtttttctcctaatctaaacaaatctattgctattggttatataatatctgaattcaatactgataatcaaattttttgtgaaattagaaaaaaattagaattagtaaaaattaataatctaccttttgtaaaaaaaaattataaaaaaaatgggagcgtatatgagtga

SEQ ID NO: 228918 - DNA, 867 bp, Unknown
  Bacterial polypeptide expressing nucleotide sequence isolated from the Sargasso Sea
tatgaatataaaaaaaacatctttatacaatttacatattaaatatggagcaaagcttgttgaatttgcaggatatcaaatgccaattcagtataaagatgggattgttcaagaacacaaatttactagatcaaattcaggaatttttgatgtttctcatatgggccaattgtttattcatggttctgagaaactaattgaagacttagagaaaatatttcctgctaacctaaaagatttaaagttaaatcaaagcaaatactcttttttaatgaatgatgatggtggaatacaagatgatttaataattacaaaaatgaaaaatggttttttaattattttgaacgcagcctgcaaatataaagattataatcaaattaaatcaaaacttaatgataaatacgatttaaaattagatgaatatttatctttagttgcaattcaaggtcctaaggtaaaaaatatactaaatgaaattataccgggttgtaatgaattaaaatttatgaatggaaatagttatgattatgatggaacaaaaatttatgtaactaggtctggttatacaggagaggatggttttgaaatatccattaaaaatgaaatagttgaaaaatttgtagaaaaattaattgaaaagggatctaaaatgattggtttgggtgctagagatactttaagattagaggcaggactatgtttatatggcagcgatcttgaccactcaacaagtccaatagaggctaatttgaggtgggctatacctaaaagtagaattgatagcgattttccaggatcaaaaattttaaaaaaacaaatagaggatggagtaaaaagattgagagttggaattaagccagaaacaag

SEQ ID NO: 228919 - DNA, 860 bp, Unknown
  Bacterial polypeptide expressing nucleotide sequence isolated from the Sargasso Sea
aaatcattcaaaatacagtttcttaatgaataaagatgctgggatacaagatgatttaatcattacaaaaataaatgagggatttttaataattcttaatgcagcgtgtaaatacaatgatttgagaattttaaaggaattattaagtgaaaaatatgaaatggttttggatgaaaatagatctttaatagcaatccagggtcctaaatcatcacaaattctaaatgaagttgttataggagttaaagatctaaattttatgtcaggaaattggttttcttttgaaaagcaaaaaatatacatcactcgatctggatacacaggtgaagatggttttgagatttcaatctcaaatgactttgcagataaattaacaagagaattgattaacaaaggttctaaattagtaggtttaggagctagagatactttaagattagaggctggcttatgtttgtatggccatgatcttgataaagacaaaactcccgtagaagcaaatttgaaatgggcgatttctaaagaaagaatatctaaaggagattttataggttctgacatcatcattaaacaattaaataatggtgtcactaaaataagagttggaattaaacctgacggaagaataattgctagagaaaaaacaaaaatatttaatcaatcagatgttcatattggagagattaccagtggtacatttggaccaagtgttaatggaccagtagcaatgggttatgtagtaaatcaattttcaaaaaaagatactaaagtatttttagaggttagaggtaaaaaacatgcagctagtatttgtagtttaccattttataaaaaaagctatgtgaaaggaaccaactaat

SEQ ID NO: 228920 - DNA, 1859 bp, Unknown
  Bacterial polypeptide expressing nucleotide sequence isolated from the Sargasso Sea
tccaaaaaataataaattagagagaattttacctgaacctctagcttcgcctaaagaagaaattttaataaaagatagttctgcaattgcctatgaaattaaaaaaggagactatattcaaattattgatttatttggaaggcagtgctcagacttcatggcctttgatagtaatgcacttcaaagtggtaatgaactatcgattgatactacagcaagtagagctattttaggtggttcgtatgcaatgcctggtttacactcaaaatattttgataaaaatctagaacctctggtcgaggtagtacaagacactattggtaggcatgacacttttggaactgcttgcacaagaaaattatatgaagatcaaggatattttggtcatataaattgctcagataattttaatttcgcacttgataaatatggagttgaaaaaagaaatggttgggcggctattaatttattttttaatactggtatagatgccaacaatgtaattttttctgacatgccatggtctcgccccggagattacgtcctctttcaagcacagaaagatcttgtatgtgtgtcatcatcttgccctgatgatattgatactgcaaatgactggaaccctacagacatatacgttagagtttattcagaaaaaaataaatttgcaaaatctattggttatagaaaaaatgctggaagtgattttatgctaacaaaagaaacaggttttcatccaagaacatctaaattaacaaatgatatgatggactcttcaggtttttggattcccaataaatttaataattttggaactattagagaatacactgaatgtagaaataatgtagtaatgatggacttatcatcattaagaaagtttgaagttcttggacctgatgctgaagaattacttaatgtagcacttacaagaaacataaaaaagctagcagttggtcaagtagtatattcagcaatgtgttacgagaatggaaccatgattgacgatggtacactctacaaattaggagatcataattttcgatggatttgcggtagtgattattcaggagagtggctcactcaattaagtgaagaattaaaactccatacaaatattaagtcctcaacagatcacctacataatatttcagtgcaaggaccaaacagtagaaaagtgttatccaaaattatatggactcctccttcccacccagatgttaataatttagaatggtttcattttactattagtagaattggagatcataaaggaattccaattatgttatcacgaactgggtacacaggtgagctaggctttgaaatatactgccaccctaatgatgcgcctaaagtttgggatgcagtatgggatgcaggaaaagaatttaatatttcgccaatgggatttgaagcgcttgatatacttagaattgaagcaggtttaattttaggaggtaatgaatttagtgatgaaacagacccttttgaagctgggataagttttacggttcctcttaaaactaaagagcaaaattttataggtaaagaagctttaattgagagaaaagcacatcctcatagaaaattagttgggttagaaattgaaggtaatgaaaaagttaatcacggtgattgtgtgcatagtggaagagctcaagttggaattataacaagtggaacaatttctccaactttaaataaaaatattgccttatgcagaattgatgttcgttcatcagagcttgatacaaaacttgaaattggtaagcttgatggtcatcaaaaaagaatatcagctaaagttgtgccttttcctttttatgaccctacaaaaagtaaagttagagcttaat

SEQ ID NO: 228921 - DNA, 149 bp, Unknown
  Bacterial polypeptide expressing nucleotide sequence isolated from the Sargasso Sea
gatggctcaaaaaacagtgttattcgccaagcatgtagaatgtggcgcaaaaatggtggactttcacggctgggatatgccgctgaactacggttcacaaattgaagaacacccacatgtccgccaggacgctggtatgttcgacgtct

SEQ ID NO: 228922 - DNA, 1092 bp, Unknown
  Bacterial polypeptide expressing nucleotide sequence isolated from the Sargasso Sea
aaacatctttataccaactgcatcaagataataatgcaaaatttgttgaatttgcaggctatcaaatgccaattcaatattctgatggaatagtcgaagagcataaatttacaagaagccattctggtatttttgatgtttcacatatgggccaattatttattcatggtagtgaggatttagtaaatgatcttgaaaaaatttttcctctagatcttaaaagattaaaattaaatcactcaaagtatagttttttgatgaacaatgctgctggaatatatgatgatctcataattactaaaatagataatggttttttgattatacttaatgctgcatgtaaagatagtgattatgaaattctaagtaaattattgaataacaaatacaaaatggttttagatgaaaaaagatctttaattgcaattcaaggacctaaatcagtagagattttaaatgatgttattaagggtgtcgaggatcttaattttatgacaggtaattggtttttatttaatgataaaaaagtttacattactcgttccggatatactggtgaggatggatttgaaatttctgtagacaatgaattggcagatcaattcacaagaaatttgattaaaaaaggagctaaattaattggacttggagctagagatactttgagactagaggctggactatgtttgtatggtcacgagctagacaaaggcaagacacccattgaagctaatctaaaatgggcaatttcaaaagagagaatttcaaagggagattttattggatcagatataattattaaacaacttaatcatggggttcagaaagttagagttggaattaaacctgaaggaagaattatagctcgagaaaaaactaaaatatttaatcagtctgatctgcatattggagagataactagtggaacatttggtccaagtgtgaatggaccagtggcgatgggctatgttgaaaatgaattttcaaagaaagatacaaaagtatttttagaagttagaggaaaaaaacatccagcaaatatttgtggattaccattttataaaaaaaattacgtgaaaggagtaaactaat

SEQ ID NO: 228923 - DNA, 814 bp, Unknown
  Bacterial polypeptide expressing nucleotide sequence isolated from the Sargasso Sea
gatgacttaataattacaaaaattagtcgaggatatttaattattctaaatgcagcgtgtaaagaaaatgattttaaaataataaaagaaaaattgaataataaatttgatttaaaattaaatgataaactttcattaattgctattcagggtccagaagcaaaaacaattttagaaaaaaatatcaatggagtaagtaaattaaaatttatgaatggtggaaactttaaatttcaaaagtcagatgtttatgtcacaagatcaggatatacaggagaagatggttttgaaatttcaatcgaaaataattatacagaaagttttgtagaagaaatgcttaagatgggagcaaagttagcaggacttggcgcaagagatacattaagacttgaagcaggcttatgtctttatggtaatgatattgatatgaatactacaccaatagaggcaaatctaaaatgggcaatttctaaagatagaatagatacagaatatcctggatcaaaaattattaaaaaccaaattaaatcgggagtagataaaatcagagtaggaattaaacctgagaatagagttatagctagaggaaatacgaaaatatttaataatgacaagaaagagataggaaaaattacaagcggcacatttggtcctagcgtggaccattcaattgcaatgggctatgttgagaataaatatgcaaacttaaatacaaaattattcttagaagtaagaggaaaaaaaatccctgcaaatgtttgtaatttaccattttataaaaaaaactatgttaaaggagaaataaatgtctgat

SEQ ID NO: 228924 - DNA, 849 bp, Unknown
  Bacterial polypeptide expressing nucleotide sequence isolated from the Sargasso Sea
ataatgagggaggcgtaattgatgacgttatcatatacaggctatctatagatagattcttcatttgcgttaatgcaggaaacataactcaagtctttgaatggctcaactcaacatctgtaaattttgatattgaagtaaaaaatcttactgatttttatggacaattggctattcaaggacctgatgctgttaaatgtatatctaatcttttttcctcctcaaatattgatgtgataaaaaaatattcaatttcatctattattgaattagaagatagatttaaacaaaagttaaaaaacccctgtcccaatggctacaattttttgatagctagaacgggatacactggtgaagatggatttgaactttttgtccccaacgaagttttgcctgatatttattctttactattagaacaagttaagaatattaaaccatgtggcctgggctctagagatactttgagattagaaaaaggtttcccactccatggaaatgaactaagtgataaattaaaccctattgagtcgaatttaagtaaatttgttgattttagtaaaccagatttcataggaaagaattctctggaattaatttcacaaaacagaacttctactttaattggttttaagatggacgaaaaatgcattcctagatcaggatataaaattttttcaaatgatagtgaaattggttatgtaacaagtggaactttttctccttcactgcaggaaggaatagggctaggagttataagcggtaatttctctgaagttactgatattgaagtcaaaataaggagtgataaaaagaaagcaaaaagatctgcttatccatttatttaga

SEQ ID NO: 228925 - DNA, 1027 bp, Unknown
  Bacterial polypeptide expressing nucleotide sequence isolated from the Sargasso Sea
aatgtctgaagcttactggggtttagaacaaaatcttaaaaccacacccctatataaaatacataataataatgcagctaagctcgtttcttttgctgggtatcatctacccattcaatacgcaaatggtattattgctgaacataatcataccagaaaagctgtcagtgtttttgatgtttcacatatggggcaaattaaaatatctggaccaatgatttatgatgcattagaaaagattcttcctatttctttttctagaatagcccctggccagattaaatacactcaatttcttaataaagaaggaaagattattgatgatttaatgattcatagatctttcaaagacaatcaaatctggttggttgttaatgcggactgtactgaaaaagatcttgatcatttatacagcaaccttaatagaagttacaaaattgaattaattgatgatagggcgctaatagcaatacagggaccaaaatcatcaaatattcttaaagaattttttaacgaaattgacaatatgccttttatgacaggtgattggtttacatatgataatgagcaattttttgtttctaggtgtggctatacaggtgaagatggatatgaagtgtcaataaaagacagatatgctgaggaatttattaacaaattattaaaatttgaagatgttaaacttgctggtttaggcgcaagaaattctctaagaatggaggcaggattatgtctgtatggtaatgacatatctattctaacttctcctatcgaagctggtctgacttggtctataccaaaggaaagaattgagaacggtggctttattggtcatgcgaatattaaaaaagatttgatcgatggagttaaaaaaaaattagtaggcataaagccacttggaaaacttccagcaagagaaggaactcagattttaaacaaaaatggaaatataattggagaaataactagcggagggtactccccttcacttcaagcaccgattgcgatgggttatattaatgcagaa

SEQ ID NO: 228926 - DNA, 191 bp, Unknown
  Bacterial polypeptide expressing nucleotide sequence isolated from the Sargasso Sea
gatgatccagactacagtactgcatcccaagcacctggaagccggcgccaagatggtggacttccacggttgggaaatgcccatcaactacggctcacagctggaagagcaccaccaggtgcgcaccgatgccggcatgttcgacgtctcccacatgaccatcgtcgatttgaccggcgagcgggtcaaag

SEQ ID NO: 228927 - DNA, 748 bp, Unknown
  Bacterial polypeptide expressing nucleotide sequence isolated from the Sargasso Sea
tatggaaacaaaaaaaacatcgctatataaattacatcaagattgcaaagcaaaattcgttgaatttgccggttatcaaatgccaattcaatattcagatggaatagttgaagaacataaatttacaagaaatcattcaggtatatttgatgtttctcacatgggtcaattatttatttatgggggtaaaaatttaattgaggatttagaaaaaatttttccattaaacttaaaaaatttaaaattgaatcattcaaaatatagttttttgatgaatgatgaagcaggtatatatgatgatttaattttaaccaaaattgagcaaggttttttaataattcttaacgcagcttgtaaaaaaaatgattttaaaattttaagtaaattactagaaaataaatatacaatggtcttagacgaaaaaagatctttaattgcaattcaaggaccaaaatcagtagaaatattaaatgatattattagcagtgtagaagatttatcttttatgtctgggaattggtttttgttcgatgaccaaaaaatttatattacacgatctggttacacaggagaggatggatttgaaatttctatacctaatgatcaagtagaaaagtttacaaaaaaattaattgaaaagggagcaaaattaattggtcttggtgcaagagatactcttagattggaagcaggtttgtgtttatatggacacgagctagataaagacaaaacaccagtagaggcaaat

SEQ ID NO: 228928 - DNA, 1030 bp, Unknown
  Bacterial polypeptide expressing nucleotide sequence isolated from the Sargasso Sea
aatggttcccttcgctggatataatatgccgatctggtattcctctatttcagaggaacacaattttgtaagaaatcaggtaggtatatttgatgtttcccatatgggtgaatttatcattaaaggaaaagaatcaaaaaaatttcttcaaaaagtaacatcaaatgatttagataaaataactcaaggaaaaattcaatactcatcaatacttaatgaatctggtggaattattgatgatttactaatttataatttaggaaatgaaaaatatatgcttgtagttaatgcatcaaataaatcaaaagatcttgaatggttaaagaaacacaataatttacaagttactattgaagacgcatctgattattattcactttttgctattcagggaccaaaatcaatagatgttgttaatgatatttttaataaagatttttctgatcttaaatattataactttataaaatttgaagataaaaattttgaatcaattttgatttcgtcaactggttatactggatcgaaaggatttgaaatatatattaaaaataatttagcagagaatctttggaaacaatcaataaaattagggaaaagacatggaatacagccaattgggctaggagctagagatacattaagattagaaatgggattctgccttcatggaaatgatattgatgaaactattaatccgattgaggcaggtctaggttggatatgtaaaaagaattttgaatatattggaaaaaatattgttgataaaaatagagaaaacaatccatcaaaaactctaattggatttgagctaaaagaaaaaggaattgcaaggaaaggctataaaattctaaataaaaatgaagtggttataggaaatgttaccagtggaacaatatctccttatagcatgaagtctattggaatgggttatgtaaattttgatgaaaataaaatttctaattccatatatattaaagtaagaaataaaaaaattaaagctgtaatttgtaaaagacctttcatatga

SEQ ID NO: 228929 - DNA, 1087 bp, Unknown
  Bacterial polypeptide expressing nucleotide sequence isolated from the Sargasso Sea
cctgcacctcgaactcggcgcgcgcatggtgcccttcgccggctatgacatgcccgtgcaatacccgttgggcgtgatgaaggagcacctgcacacccgcgaggccgccggcctgttcgacgtttcgcacatgggccagatcctgctgcgtggcgagaacgccgcgcgcgccttggaaaccctggtgccggtggacatcatcgacctgccggtgggcctgcagcgctatgccatgttcaccgatgcccagggcggcatcctcgacgacctgatggtcgccaacctgggtgacgacaccctgtacctggtggtcaacgccgcctgcaaggatcaggacctggcccacctgcagaagcacatcggcgagcagtgccagatcgagtgcctgttcgaggagcgcgccctgctcgccctgcaaggcccgaaagcggtcgacgtactggcccgcctggcgcctgaagtgagcaagatgaccttcatgcaggttgcccgcgtgcgcctgctgggcagcgagtgcatcgtcagccgcagtggctacaccggcgaagacggcttcgagatttccgtcgccgtcgaccaggccgaagccctggcgcgcagcctgctggccgaagtggaagtcgaggccatcggcctgggggcgcgtgactcgctgcgcctggaagccggcctgtgcctgtacggccacgacatgagcagcgccaccacgccgatcgaggccagcctgctgtgggccatctccaaggtgcgtcgtgccgatggcgagcgcgccggcaacttcccgggcgccgagcgcgtattcgagcagcagcagaaaggcgtggcgcgcaagcgcgtcggcctgctgccgcaggagcgcgtaccggtgcgtgaaggcgcggaaatcgtcgatgccgacggcaccgtgatcggccaggtatgcagcggcggcttcggcccgaccctcggcgcgccggtggccatgggttacgtcaacgccagccacaccgccatcgatagcgacgtctgggccgtggtgcgcggcaagcgcgtggcgatgaaagtggccaagaccccgttcgtgccgcagcgctactaccgcggctga

SEQ ID NO: 228930 - DNA, 803 bp, Unknown
  Bacterial polypeptide expressing nucleotide sequence isolated from the Sargasso Sea
tatgaatataaaaaaaactgcactatacgaattacataaaaagcacaacgctaagtttgttgagtttgctggctatagtatgccgatacaatactctgagggaattgtaaaagagcataatattacaagaaataagtctggaattttcgatgtttcccatatggggcagttattcattaaatacagtaacgaaataacagacaaactccaaaaaattttaccaactgatcttaaaaatttaaaaattaatcaaagcaagtattcgtttttaatgaaagagaatgggggaatatatgatgatcttatcatcactagaaagaaagatcagtacatgattattttaaatgctgcttgtaaacaaaacgatcttcagattattaaaaataaattgaatgatcaaaatttggacatgaaaaataatttgtctcttgtagcgatacaaggtccagagtctaaaacaattcttgaaaatgtagtttcaaatgtatcaaaattaaaatttatgaatggagaaaacttttcttttaaaaataatgaaatctttataacaagatctggatatacaggtgaagatggctttgaaatatcattacctaataaagttgcaatctcttttgtagaagaattaatttctaaagggtcaactttaattgggttgggcgcaagagatactttaagattagaggcgggcttgtgcttgtacggtcatgacataaacgaaaataccagtccagttgaagcaaatttaaagtgggcaatttcaaaaaatagaataaatgataattttataggatcacatcaaa

SEQ ID NO: 228931 - DNA, 1075 bp, Unknown
  Bacterial polypeptide expressing nucleotide sequence isolated from the Sargasso Sea
aatgatgctaaatttgtaaattttgccggctggtcaatgccgatacaattccctgatggaataattaatgaacatatttcaacacgaacctcttgtggcctttttgatatttcacatatggggcaaatacttatagacggtgatgagagtagattactacttgaaaaaattacacctacagatattggtaaaattcaaactggcaaagttaaatatagttttctcttaaataatgaaggcggaattattgatgacttaatgataacaaatgaaggtaattgtttttatcttgttgttaacgcaagccgaataaatgaagatctagaagaaataaataaagcatcaaaatctttttcaaaaataaatatcaaacatcttcagcaaaatggaatgattgctttacagggtccaaaagcgaaagatgtagtatcgagtttttttaaagaaatagacgattcttttttctttatgagttttaaaaaaattacactaaatggagatgaggtcagagtttcccgtgttggttacactggagaagatggatttgagatatcttcaacaaaaaaaacaatattagaattaactaaatactttcttgatgatgaaagagtaactctatgtggccttggcgcaagagatactctaagactagaagccggtttgcccctatatggcaatgaactccatgaaaaaatgacaccagtcgaagctgatctagcttttgctatttctccatcaagaataaaagatggtaattttagaggagctaataaaatccttaacgaaattgaaaatggatctcaatttgtaagagttggtctactacctgaaggcagaagaccagtgagaaaaggaacaccaattttcaataatgatgagaaaattggtgaaataagcagtggtggatacggacctacaattaaatcacccattgcgatgggaataattaaaagtgagtttaataagccaaataataagcttactgcaaaattaggtgaaaactcaattccaatgacaattacttcgttgccatttgttgaacatagatactttaagaaaggtaataaacaatgaa

SEQ ID NO: 228932 - DNA, 955 bp, Unknown
  Bacterial polypeptide expressing nucleotide sequence isolated from the Sargasso Sea
ttgaaattgtctggagatgatgctgaaagtttcactgatttcatctttactaataatattttaaacttgaaaattggacaagctcgttatggttttatttgtgactttgatgctcaagtacttgatgatgtaatagtttataaaatgtctaacaagagattttttctttgtgttaatgctggaaataaggatagtgtttatgaatggctctttaagcttgaccataaatttaatgtagaaataaataatttaagtaacttttatggtcaattggcagttcaaggtcctgaatcaattgaagaaataaataaaatttttcctaaatcaaatttggactctttaagtaaattttatatgactaaaattgttgatttagaagaaaaattttcgagttcccttgaagtaaaatgtcctaatggtgataattttttaattgcaaggactggttatacaggcgaggatggatatgagatctttgcaccaaatgaagtgataaaatctgtatatcaatatttgttagaaaattgtaatgaaataaaaccatgtggtttagcttcaagagatactttaagaattgaagcaggatttccacttcatggaaacgaactcataaaaggaaccactcctatagattttaatttaaatcgatttatagatttaaataaacctaactttgtaggtaaggaagtcattgaaaaacgtttagcagataagaaatacttctttattggttttatgatggatgataattcaatagcaagaagtggatatgatgtattaaaaaacgatactaaaatcggatttgttacatcagggaccttttctcccgttttaaaaaagggtattgggtttgcattattagattatgaatattctaacattaaagactttgaaataaggattaggaagtcacttaaaattgcacaaaaagtcgattatccttttataaggtagg

SEQ ID NO: 228933 - DNA, 1114 bp, Unknown
  Bacterial polypeptide expressing nucleotide sequence isolated from the Sargasso Sea
ttgactgaagaagctctacaaaatatttatttaaataattttcacaaaaataataatgctaagtttgtaccttttgcaggttataatatgccaataaattacaaacatggaattattaatgaacatattcatgtcagaactcatgcaggtctctttgatgtttcacacatggggcaaatcttaatttctcttactaacgaaaatattcatgctttagaggtttatattccactagatattaagctattgcaattcaataagtgtcactattcatttattttaaactcacatggaggagttgttgatgatattatgttatcaaagattaaaattgaagatgaggaatttatttacattgtttataatgcatcaagaaaaaaagttgttaatacaatatttgaaaagaaaattttaaattataaaatcattcaagatagatgtttgattgccttacaaggtccagattcattttcagtgattaactcaatactaaacttatcctcttcaatgaaatttttagatattgaaatattagaatatgaaaatactaaagtttttatttctagatctggttatacaggtgaagatggttttgaaatatctatattggaaaatattgctgaaaattttgttcaaaaaattattcaaaataaaaatacaattttatgtggattaggatgtagagactcccttagaatggaggcaggccttagtttatatggaaatgaattaaatgaagatattaatccaatacaagcaggtttatcatgggctttagataaaaatagacttaaagataaaaacttaaactgttttcaagcattatcagaagaaataaatacatctcaatccatcaaaagaattggactgagtcctgtaaataagagtatgttgcgtgctcagatgaccttacataataaaaataataaaaaaattggcaaaattactagtggctgttattctccaattctaaaaaaatcaattgccataggttatataaataaaactttggatatgtcagaaaaattatatgtgaatattcgtgataaattagaagaaattcaaattgagaaaattccatttgttaaaaaaaattataaaaaaggagattaat

SEQ ID NO: 228934 - DNA, 1105 bp, Unknown
  Bacterial polypeptide expressing nucleotide sequence isolated from the Sargasso Sea
tatggagacacaaaaaacagctttaaataatcttcaccaaagaaatcaagctaagtttgtcgagtttgctggttacgagatgcccatacaatatagcaaaggtattattgaagaacataaatttacaagaaaacattctggaatttttgatgtttctcatatgggtcagttatttatttatggaggtgaaaatttaactatagaacttgaaaaaatttttccactagatttaaagaatttaaaacaaaacagttcaaaatatagttttttaatgaatgaagaggctggaatatatgatgatttgataatcacaaaaattgaagaaggttatctcatcatattaaacgcagcatgcaaagaaaatgattttcaaattttatcgaaattattaggtgataattttaaaatgattttagacaacgaaagagctttagtggcactgcaaggacctagatctgttgaaattttaaactcaattttaaatggagttgagaaattgaattttatgacaggcaaatggattgattttaaaaatcaaagattatttgtgacaagatctgggtacaccggtgaagatggattcgaaatatctatattaaataattttgctgaagaatttactcaaaaattaattgataaaggagcacaacttataggacttggagcaagagatactttgagattagaagctggactgtgtttatatggtcatgaattagatattaataaaaccccagttgaagcaaaccttaaatgggcaatatcaaaagaaagattgtcaaatggagggtttgttggatctgagaaaattatgaaccaaattcaaggtggaacaagccaaataagggttggtattaaaccagaaggtagattaattgcgagagaaaaaacaaaaatttttaaagaaactgacaagcaaattggagaaatcacaagtggaacttttggtccaagtataaatggacctatagctatgggatatgttgataaagaattttcaaaaatagatactaagattttgcttgaagtaagaggaaaaaaatatccagcaaatatttgtgagttaccattttataaaaaaaattatgtgaaaggagtaaattaa

SEQ ID NO: 228935 - DNA, 1087 bp, Unknown
  Bacterial polypeptide expressing nucleotide sequence isolated from the Sargasso Sea
aatgaaaaaaacaccactaaactctgaacatataaaacttggggcaaagctcgttgaatttgcgggctatgaaatgccagtacattataagggcattgttgatgagcatttggctgttagaaagtcatgtgggatttttgatgttagtcatatgggtgaattttttgtttctggtgatggtgcattggattttttaaatcatattaccattaatgacgtagcttgcttagacatttggcaggcacaatattctgctatgtgcttagaagacggcggcattcttgatgacattttagtttatagatatccagattattttatgcttgtggttaattgttcaaatattgaaaagaattttgattggcttattgcgcataagccagaaaatgtgacaattgcagatgtaagtaatcaaattggactgattgccattcaaggtccgaatgctcgtgagatattaaacaactacacagatattgatttaaataaagtagaatattatcgtttttctattgcaaatattaatggataccctgcaactgtgtccaggacaggatacacaggtgaacttgggtttgaaatttacgcagataacgtatctactgaacaaatatggaagataatcttatcaggctcaaagcatgaaatttaccccgctggtcttggctgtcgtgatactttaaggatggaaatgaaatatgttctttatggaaacgacatagatcagagcactaatcctattgaagctggcttaggatggataacaaaaatgaataagcaaaattttattggaaaagaaagattgaatcaaattaaatccaatttatctcgtgaactcgtatgtattgaaatgatcgatagagggattcctcgtaaaggatattcgattataaaagattcgctaaatattggctacataacaagcggtacgcagtcaccttcgctacaaaaaggcattggtctggcatttattgatactaactattctgaattaggaagtgagctattcattgaggtaagaaataaacatttaaagtgtaaaattattgaagctcctttttacaaaactggaacagtattggactaa

SEQ ID NO: 228936 - DNA, 1015 bp, Unknown
  Bacterial polypeptide expressing nucleotide sequence isolated from the Sargasso Sea
tattctgagggtattgtagaagagcataaatttactagaaatcatgcaggtatttttgatgtttctcacatgggccaattatttatttatggtggagatgacttaatcaaagatttagaaaaaatctttccattagatttgaaaaatttaagactcaataattcaaaatacagtttcttaatggataaagatgctgggattcaggatgatttaatcattacaaaaattaatgatggttttttaataattcttaatgcagcatgcaaagacaatgactttaaaattttaaaggaattattaaaggaaaagtataaaatggtattggatgaaaataggtctttaattgcaattcaaggccccaaatcatcacaaatcttaaacgaattttttgatggtgtaaaagatctaaattttatgtcaggaaactggtttttatttgaaaatcagaaaatttatattactcgatctgggtatacaggtgaagatggttttgagatatctattccaaatgattttgtagataaattaactagagaattaatcaacaaaggatccaagttaataggtttaggagcaagagatactttaagattggaagctggtttatgtttatatggtcatgatcttgataaaaacaaaaccccagtggaagcaaatttaaaatgggcaatttcaaaagaaagaatatcaaagggagattttataggctcagacataattattaaacaattaaataatggtgtcagtaaaattagagttggaattaaaccagagggaagagtaatcgctagagaaaaaacaaaaatatttaatcaatctgatactcatattggagaaattacaagtggcacatttggaccgagcgtaaatggacctgtagcaatgggctatgtagaaaatgaattttcaaaaaaaaatactaaagtatttttagaggtaagaggtaaaaaacatccagctagtatttgtagtttgccgttttataaaaaaagttatgtgaaaggagtaaattaat

SEQ ID NO: 228937 - DNA, 643 bp, Unknown
  Bacterial polypeptide expressing nucleotide sequence isolated from the Sargasso Sea
atgaataaaacctttctatacgaatcccatctgggcttgggatcaaaatttgttaatttctcaggatgggaaatgcccatacattatggctctcagattaatgaacataattgtgtaagaaatggtgctggtatttttgatgtttctcatatgaatatctttgatttctgtggtgttgaagcaaaagaatttatgagatatgtgttaacaaatgatgtgaacaaaattgacgatggctctgcactttatagtgtcataacgaataatgaaggcgggataatagatgatctaatcgtttataaatttaacaatgaaaaattcagagttgtatcaaactgtgctacttttgatgatgtaaataacttctttgaatcaaatattattagatttgattgtgagttccttcataaaccaaatctaggcattcttgctatccaaggaccagaatctgagattgctcttaaaaatatccttgaactaaaactttcaaactataaaagtttttcatttactgaaagaaatgaactttttatttcaagaactggttatacaggcgaagacggttttgaggttattggtgagcctgaagaattacaaaacatttgggatttatgtatttctaagagtattcctccaattggtt

SEQ ID NO: 228938 - DNA, 1074 bp, Unknown
  Bacterial polypeptide expressing nucleotide sequence isolated from the Sargasso Sea
gacaagctctacgacacgcatgtctcgcttaaaggacatttagtaccttttggtggttatctacttcctacacactactcgagtatcaaaaacgaacatgaattagttcgttctaaggcgggtttatttgatgtgagccacatgggtgaattcgttatttcaggtaatgatgcattttcttttcttcaaaaagtcacaattaatgatttagaacttttaaaggttggacaggcgcaatattccgcaatgtgttttgaggatggtggaattgttgatgacttaattgtttacagacaagaagattactttatgatggttgtcaacgcagcaaatcgaaaaaagaatttgaattggctgaaaaagaattgtgaatataatgttaccataaaagatatcagtgatgaaatgggccttcttgcaatacaaggaccaaggtcaaaagatatacttcaaacattaactgattctaatctgagctcaatagaattttataatttcatcaatggtaaaataactggctttgatgctgtcatttcaaggaccggatatacaggtgaacttggatatgagatttatgtaagctccgataatactaagaatgtttggaatcgtattatggatgctggttcggaacatggcatagggccagcgggtctgggttgtagagacacattgagattggaaatgaagtaccccctttacggtaatgatattaatgaaacaacaaatccgattgaagcgggcctagggtggataactagattgggtaaaaatgactttatcgggaaaagtgccttaattgaaaaaaagaagaaagttaatcggcgattggtatgtattgaaatgaacgagagagcaataccaagaaatggttgtcagatatataatgataatgaattagttggtaccatcacaagtggaacgatgagcccctcacttggcagaggtattggattaggttatgtaaaaattccttttactgaagcaggcgcggaattacagattgatattagaggtaataagaagagttgtgtaattattaaacccccattctataaaaaggttcgctgttag

SEQ ID NO: 228939 - DNA, 843 bp, Unknown
  Bacterial polypeptide expressing nucleotide sequence isolated from the Sargasso Sea
aaccaggaaaagctcaatataactgtttattaaatcgtagtggagggataattgatgacttgatagtttacaaaatagaagaagaaaagtttttattggttgttaatgcttctaacatagataaagaccttgattggataaaaagtctcaataaagactttagttgttctattaataatatatcagataaaacatctcttcttgctgttcaaggaccaaaggctgacttattatgtaaaagatttaccaaagaagatttagagtctttatcaaactattcattcatactgggaacatttgctggaattgataatgtaataatatcaaagacaggttacacgggttcaggaggttttgaattatatgtatctaatgataatgttgagcacatttgggatgaactttttagtgttgaaaatcttgaagttaagccaataggtcttgctgctagagatacattaagactagaaatgggttattgtctctatggaaacgatataaatgaatcagtaactccaattgaggcaaaccttgggtggataacaaaagtagatacaaattttgttggttctaagtcaattaaagaacaaattgaaaatggaattaagaaaaaattagttggatttgtaattaatgataaaggtattccaagaaaaggttatgaaatttttgataaatcagaaaacctaataggagaagtaacttccgggacattctctccagttcttaaaaaaggtattggtcttgcatacatagaaaataatatatcttcaaaagaaatttatctaaagatcagaaacaatcttatcaaattagaggttgtaaaaactccgtttatataaa

SEQ ID NO: 228940 - DNA, 642 bp, Unknown
  Bacterial polypeptide expressing nucleotide sequence isolated from the Sargasso Sea
ggccgaaggcgcgcgcacgcgtttccgaactgctgagccaggcacgtgccgcactgatccacgagctcaagccattccagggcctgcccgagggcgactggttcatcgcgcgtaccggttataccggcgaagatggcctggaaatcgtgctgccggtgaccgaggtggcgtctttcctcaacgacctggtcggtgctggtatttcgcccatcggccttggcgcccgtgacaccctgcgcctcgaagcgggtatgaacctctacggccaggacatggatgaacaggtcagcccgctggccgccaatatggcctggaccatcgcctgggagccggccgagcgcgacttcatcgggcgcacggcgctgcaggcgcagcgtgctgtcggctgcccgagcaagctcgttggcctggtgctggaggagcgcggcgtgctgcgcgcacatcaggtggtgcgcgtcgaaggtatcggtgacggtgagatcaccagcggcagcttctcgcctacgctgaacaaatccatcgcgctggcacgggtgcctgcagccactggggatcgtgccgaggtggagatccgcggcaagtggtacccggtgcgggtggtcaggccaggtttcgtgcgtaacggcaaaacccttatctgaa

SEQ ID NO: 228941 - DNA, 580 bp, Unknown
  Bacterial polypeptide expressing nucleotide sequence isolated from the Sargasso Sea
gatggcccaacaaacagtattattcgcaaagcatgtcgaatgtggcgcaaaaatggtggactttcacggctgggatatgccgctgaactacggttcacaaattgaagaacaccacaatgtccgccaggacgctggtatgttcgacgtctctcacatgactatcgttgacctgaaagggccaaacactcgtaacttcctgcgttatttacttgccaacgacgtcaacaaactgactgtgtcaggcaaagccttatacagcggcatgttaaacgaagccggtggcgtgattgacgacttaatagtgtatttcctggcagaagacttcttccgtttagtcgtcaactcagccacccgcgaaaaagacttagcctggatcaaccagcaagccgcagcttataacgtcactgtaaccgagcgcccagagttcgccatgattgcagtgcaaggcccacaagccaaagccaaagtagccaccttattaacagaagagcaaaaagcagctgtagctggtatgaagccattttttggtgttcaggcaggttctttgtttattgcaaccactggctacacaggcgaagac

SEQ ID NO: 228942 - DNA, 844 bp, Unknown
  Bacterial polypeptide expressing nucleotide sequence isolated from the Sargasso Sea
aggattatttgatatttctcacatgggtgcaatttctatcaagggaatcaatccaaaggattatattcaaaaactttttcctactaatttatactccttttctgaaggtcaggggctttatacagtaatgctgaatgatgaaggaggaataatagatgacttaataatttatgatcttggtatacaaaaaaatgacatatcagaattattattaatagttaatgcaagtagatatgaagaagattttctgtggataaaaaataatttaaatatgtctgaaatttcaataacaaactttaaaaaagacaaagtacttttagcactacaggggaaaaactcattcgatttatttgaagaatggatcaaatcttcgatctcatatatccctaactttggatgcgaatataaaatttttgaacatatttcgcctaaagaaaaaattttcttttcaaagacaggctatacaggggaaaatggtctagaaatacttttacctaaaaaagcagcaattaatttgtgggatttctcaatttccaaaaatgttgcaccttgtggtttaggagctagagatactcttagacttgaagcaggaatgcatctttatggtcaagacataaatgaagaaacttctccatatgaagcagggttaggctggctagtacatctagaaaataatcatgaattctttggaagaagatttcttgaagagcagtctagattaggtattcaaaaaaagttagttggtctctctgtagaaggtaaagcaataggaagaaaaggttgtgcagttcttaaaggtgaagaaaataagggactatcacaagcggcagttggtctccaacta

SEQ ID NO: 228943 - DNA, 895 bp, Unknown
  Bacterial polypeptide expressing nucleotide sequence isolated from the Sargasso Sea
ttaataaaagagcatgaatcagttagatcttcagcaggtttatttgatatttctcacatgggtgtaatttccatcaagggaatcaatccaaaggattatattcaaaaactttttcctactaatttatactccttttctgaaggtcagggactgtatacagtaatgctcaatgataaaggaggaataatagatgacttaataatttatgaccttggtatacaagaaaatgacatttcagaattattgttaatagttaatgcaagtagatatcaagaagatttgcagtggataaaaaataatttaaataaatatgaaatatcgataacaaactttaaaaaaaacaaagtacttttagcactgcaaggaaaaaactcattcgatttatttgaagaatggattgaatcttcgatctcacatatccctaactttggatgcgattataaaatttttgaacatatttctcctaaagaaaaaattttcttttcaaagacaggatatacaggggaaaatggtctagaaatacttttatctaaaaaagcagcaattaatttatgggatttctcaatttccaaaaatgttgaaccttgtggattaggagctagagatactcttagacttgaagcaggcatgcatctttatggtcaagacataaatgaagaaacatctccatatgaagcagggttaggctggctagtacatctagaaaataatcacgaattctttggaagaagatttcttgaagagcagtcaagattaggtattcaaaaaaagttagttggtttgtctatagaaggtaaagcaataggaagaaaaggttgcgcagttcttaaaggtgaggaaaatattgggagtatcacaagcggcagttggtctccaactaaacaacaagcgatag

SEQ ID NO: 228944 - DNA, 829 bp, Unknown
  Bacterial polypeptide expressing nucleotide sequence isolated from the Sargasso Sea
catgactgaaaaaaataaatccacgaaaaatcttctcagaacatcactacactcatggcataccgaaaatgggggaaaaatggtggactttgagggctgggaaatgcccgtgcagtatgaaaacggtataataaaagaacatctgggaactagacgctacggtggtttatttgatgttagccacatgggaagattcagaattaatggtaaggacacaattgctttcctacagtatgtactgagtaatgatgcggaatcacttaaaccttggcaggctcagtacactctcattccaaacaataacggaggactagttgacgatgcatacctttttcgttctggagatggatattttctagtggtaaacgcttctaaccgtaaaaaagattggaatcatctccacgaacatgcaggtaactacgatgtttcattagaagaccaaactttaaaaatttcaatgattgcattccaaggccccttgacaggaaggattcttacaagtcttttagagggtggaaatttaccagaaaattcccgtaatagactctcagaaataatgctagcaggtacaagaataattgcagctagaacgggatacaccggtgagcctttgggatttgagctctttatccccactgaaagggttgaggaggtatggagacttctttaccaagcaggatctagagaaggtatcgttcctgttggtcttggagcaagggatacccttagacttgaagcaggtatgccactttatggacatgaattcggaattgatcaagaaggtaaggaaattcctgcattcgctttcccgctgacttcagttgcagtt

SEQ ID NO: 228945 - DNA, 652 bp, Unknown
  Bacterial polypeptide expressing nucleotide sequence isolated from the Sargasso Sea
atgaaaaggacagttctttttgacagacataaagaattaaatgcaaagattgttgattttgcaggatatatgatgccaattagctattcgtcagttaatgaggagcatattcatgtgagaaatagtgtaggaatatttgatgtttctcatatgggcgagtttgaaatttcagggttgaattcaactgaatttattcaaaggttatgttcaaatgatatatcaaatattgagattggtaaagctcaatataattgtatgattaatgaatcaggaggaataatcgatgatttaattgtatataggctagaaactaacaaatatcttttagtagtaaatgcatcaaacatatcaaagaactggaaatggatagtggataaaaataacaagtttaattgttcaacatctaacttatctgacgatatttcactccttgcaatccaaggccctatggcagaatcattatgtcaaaattttactagcgaaaatctatcatcactaaaaaatttttctttcataaatggggagtttgctggatgtgaagatattattatttctaaaactgggtatacaggttctggtggttatgagttatattgtccaaataataaagctttaaaaatttgggatactttattttcaaataaagaataga

SEQ ID NO: 228946 - DNA, 880 bp, Unknown
  Bacterial polypeptide expressing nucleotide sequence isolated from the Sargasso Sea
cctctttattcaaaatatgttgaagccaatgcaaaattagtggattttgcaggtggggaaatgcccatatcattttcaggattaattaaagagcatgaatcagttagatcatcagcaggattatttgatatttctcacatgggggtgatttctatcaagggaatcaatccaaaggattatattcaaaaactttttcctactaatttatattccttttctgaaggtcaaggactttatacagtaatgctcaatgataaaggaggaataatagatgacttaataatttatgaccttggcatacaagaaaatgacatatcagaattattattaatagttaatgcaagtagatatgaagaagattttcagtggataaaaaataatttaaataaatatgaaatttcaataacaaactttaaaaaagaaaaagtacttttagcactacagggaaaaaactcattcgatttatttgaagaatggattaaatcttcgatctcacatatccctaactttggatgcgaatataaaatttttgaacatatttcgcctaaagaaaaaattttcttttcaaagacaggatatacaggggaaaatggtctagaaatacttttatctaaaaaagcagcaattaatttatgggatttctcaatttccaaaaatgttgcaccttgtggtttaggagctagagatactcttagacttgaagcaggcatgcatctttatggtcaagacataaatgaagaaacttctccatatgaagcagggttaggctggctagtacatctagaaaataaccacgaattctttggaagaagatttcttgaagaacagtcaagattaggtattcaaaaaaagttagtgtggtctctctatagagggtaaa

SEQ ID NO: 228947 - DNA, 868 bp, Unknown
  Bacterial polypeptide expressing nucleotide sequence isolated from the Sargasso Sea
ggcgagggatttttgcgtcatgttttagcaaacgatgtaaagagcctgactgagaatcaggctctttacagtttaatgcttaacgatacgggaggaataatagacgaccttatagtctacaaattgaaagatagatatcgctgcgtattcaatggagcaacggaatcagcagttcgatcttggataacgggttttaattcggaagatgttattttgaatttttcaaggatggtgatgatcgcattgcagggaccgagtgcaatagcgagcttgttgtcctttgagtcaatatctggattagagcaactgaaaagttttttctcaatgcaatttgggtcttggctaatagcacgtactggttacacaggggaggatggactcgaaattatgttgccagaacaagagggaatgagtctttggcgtagactacttgagtccggcgttaaacccgcgggtttgggagcaagagataccctaagactcgaggcaggcttgaatctttatggtcaggacatggatgaaaagacgatgcccgctgagagcaacctaaattggactatagcctgggatccaccggacagagattttatcggccgtgctgcgatagaaaaattgggaaaggacagcaacatgaaattgacaggtttggtcatgagggagaaatcaatacctcgtcaaggcttgagagttttgacggaggaaggggagggggtgatcactagcggcacgttttcgccgactttcaatgtaggcattggattagcgaggattcctaagatggcaaaaggcgattgtcaggttgagatcaggggaaaagtgaaatcagcactgatatacaaaccaccgttttttaagaggggtcggttag

SEQ ID NO: 228948 - DNA, 909 bp, Unknown
  Bacterial polypeptide expressing nucleotide sequence isolated from the Sargasso Sea
tacagtggattgctagatgagcactatgccgtgaggaatgatgtaggaatgttcgatgtttcacatatgggagaatttattcttcgaggagagggggcatttgatttgttacaaaaagtgagcagcaatgatgcctctaaattgaccccaggcaaggtgcaatattcttgtatgccgaatggaaaaggaggcattgtagatgatttgttgatttattgtcttgaagacaatgcatatatgcttgttgtgaatgcctcaaatatccaaaaggactgggagtggatcaaaagccacaacacttttggcgccgaaatgattgacatttcagacaaaacatctctgcttgcagtgcaaggtcctaaagccatcgcagcactcaagaagctgactgacatcaatttggaagaaatgaagtactatacctttgaaaaaggaaattttgcaggaaaagagaatgtacttgtttctgccacaggatatactggctcaggaggctttgagttgtattttgacaatgagcatgcagaggaaatttggaatgatattttggaagcaggaaaagcttcaggaataaaacctgcaggattaggtgctagagacaccttaaggttagaaaaaggattttgtctttacggtaatgacattgatgacgcaacttctcccatagaagcgggtttagggtggatcacgaaattcaccaaagatttcgtggactcagaatatctcaaaaagcaaaaagaagatggaacaagaagaaaattggtcgcctttaaaacccttgaaagaggaatccctaggcaaggctatgtcattctcgacgctgaagataatactataggtactgtgacctcaggaaccaactcgcctatgttgaatcaaggcattggtatggggtatgtaaaaaaagag

SEQ ID NO: 228949 - DNA, 859 bp, Unknown
  Bacterial polypeptide expressing nucleotide sequence isolated from the Sargasso Sea
atgaaaaggacagttctttttgaaagacataaagaattaaatgcaaaaattgttgattttgcaggatatatgatgccaattagctattcgtcagttaatgaggagcatattcatgtgagaaatagtgtaggaatatttgatgtttctcatatgggcgagtttgaaatttcagggttgaattcaactgaatttattcaaaggttatgctcaaatgatatatcaaatattgagattggtaaagctcaatataattgtatgattaatgaatcaggaggaataatcgatgatttaattgtatataggttagaaacaaaaagatatcttttagtagtaaatgcatcaaacatatcaaagaactggaaatggatagtggaaaaaaataacaagtttaattgttcaatattaaacttatctgatgatatttcacttcttgcaatccaaggtcctaaggcagaattattttgtcaaaatttctctagtgaaaatctatcagagctaaaaaattattcttttataattggagattttgctggatgtgaagatattattatttctaaaactgggtatacaggttctggtggttatgagatatatactccaaataataaagctttgaaaatttgggatactttattttcaaataaagaatatgacataaaacctattggacttgctgcaagagacactttaagaattgaaatgggttattgtttgtatggtaatgatattactgaggaaacttctccattagaagctaatttaagatggattactaagactcaaacaaattttataggaagtaatattattgaggtagaaattcagacaggttctaaaagaaaactagttgggtttaaat

SEQ ID NO: 228950 - DNA, 463 bp, Unknown
  Bacterial polypeptide expressing nucleotide sequence isolated from the Sargasso Sea
aaaaatctctgattttgctggatttcaaatgcccattagttattcttctgttaataaagaacacttacatgttagggaaagtcttggaatattcgatgtatctcatatgggagagatttttatttcaggaaaaaactctgaaaatcttttacaaagaatttgcagtaatgatatttcaaagctaattcctggaatggctcaatataactgtatgacaaattttaaaggaggaattattgatgatctgattgtttataagattgaaatagataaatatatgctagtggtaaatgcctcaaatattcaaaaagattatgaatgggttttatcccaaaataaagagtttaacgcaactataattgatgactctaataattattcacttcttgcaatccaaggtcccaaagcaattgattattgtcaaaactttacaaatgtggatttaaatagtatgaaaaacttt

SEQ ID NO: 228951 - DNA, 763 bp, Unknown
  Bacterial polypeptide expressing nucleotide sequence isolated from the Sargasso Sea
gtcaactccgccacccgcgagaaggatctggcctggatccgccaccacgcccaggacttcggggtgaccgtgaccgagcgccccgagctcgccatgatcgcggtgcagggccccaacgccaaggccaaggcggccaaggtgttcagcgccgagcaaaatgccgcagtggaaggcatgaagcccttcttcggcgtgcaggccggcgagctcttcatcgccaccaccggctacaccggtgaagacggctacgagatcgtggtgccgcaagagcaggcgtgcgatctgtggcaggcgctgctggacaacggcgtggccccctgcggcctgggtgcccgtgacaccctgcgcctcgaggccggcatgaacctctacggccaggacatggacgaaaccgtctctccccttgccgccaacatggcctggaccatcgcctgggaaccgagcgatcgccagttcatcggccgcgccgcgctggaagcccagaaagccgccggcagccagcccaagctggtggggttggtgatggaagagaagggggtgctgcgcagcggcatgccggtcacctttaccaccgccgcaggagaagagcgggaaggtgtgatcacctccggctctttctcgcccaccctggggtacagtattgccctggcgcgggtgccccgtgatatcggcgaacaggcctcggtggagatccgcaagaagctggtcaccgtcaaagtgaccaagccggctttcgtgcgcaacggccagaagctggtgtaac

SEQ ID NO: 228952 - DNA, 614 bp, Unknown
  Bacterial polypeptide expressing nucleotide sequence isolated from the Sargasso Sea
aatgaatagaacctttctatatgaatctcatctgagcttgggatcaaaatttgttaatttctcaggatgggaaatgcccatacattacggctctcagattaatgagcataattgtgtaagaaatggcgttggcgtttttgacgtttctcatatgaacatctttgatttctatggcgttgaagcaaaagaatttatgagatatgtgttaacaaatgatgtcaacaaaattgacaatggttctgcgctttatagtgtaataacgaataatgaaggcgggataatagatgatctcatcgtttataaatttaacaatgaaaaattcagagttgtatcaaactgctctacttttgatgatgtaaataatttctttgaatcaaatattatcaaatttgattgcgagttccttcataagccaagtttaggcattctagctatccaaggaccagagtctgagattgctcttaaaaatatacttgaactagagctttcaaactataaaagtttttcatttactgaaaaaaataaaattttcgtttcaaggactggttatacaggagaagatggttttgagattattggtgagcctgaagaattacaaaacatttgggatttat

SEQ ID NO: 228953 - DNA, 474 bp, Unknown
  Bacterial polypeptide expressing nucleotide sequence isolated from the Sargasso Sea
tatggctcatcgcacagctttatacgacgctcatctcgccgccggtggcaagatggtggatttcggcggctgggatatgccgattaactatgggtcgcagatcgaagaacatcacgccgtgcgccaaaatgccggtgtgttcgacgtttctcatatgaccgtagtggatatcgccggcgccggcgcccgtgactacttacgccagctgctggcaaacgatgtggaccgcattgatccgggccgcgccctgtataccgggatgcttaacgataatggcggcgtgatcgatgaccttatcgtctacaaacgggacaatgactaccgtctggtggtaaattgcgcgacccgtgaaaccgatctgggctggatggaaaaacacgcgggcggttttgccgtggatatccatgagcgtccggaactggccatgttggcgattcaggggcccaaggcccgtgacattctcgctggcctttt

SEQ ID NO: 228954 - DNA, 916 bp, Unknown
  Bacterial polypeptide expressing nucleotide sequence isolated from the Sargasso Sea
tgttatttctcaggatgggaaatgcccatacatttatggctctcagattaatgagcataattgtgtaagaaatggtgctggtatttttgacgtttctcatatgaatatctttgatttctatggcgttgaagcaaaagaatttatgagatatgtgttaacaaatgatgtcaacaaaattgacaatggttctgcgctttatagtgtaataacgaataatgaaggcggaataatagatgatctcatcgtttataaatttaacaatgaaaaattcagagttgtatcaaactgttctacttttgataatgtaaataacttttttgaatcaaatattattaaatttgattgtgagttccttcataaaccaagtttaagcattctagctatccaaggaccagaatctgagattgctcttaaaaatatccttgaactagagctttcaaactataaaagtttttcatttactgaaaaaaataagattttaatttcaaggactggttatacaggagaagatggttttgaggttattggtgagcctgaagaattacaaaacatttgggatttgtgtatctctgtgggtattcctccaattggtttaggtgcaagagacactttaagagttgaagctgggatgaatctcaatggtacagacatgactataaagaataatccctttgaatcgaatttaggctgggttgtcgattttgatgatgcccaaagagacttcatcgctaaagaaaacctcattaaaatcaaaaaaaccaataagctcaaccttgttggtgttctgcttaacgaaaaaggaattctgagaagtggtcaaaagatcatcaaagatgattttgtgggggaaattacaagcggtactttttctccgtatatgaagaaaagtattggcttagctaggataccaatgaat

SEQ ID NO: 228955 - DNA, 720 bp, Unknown
  Bacterial polypeptide expressing nucleotide sequence isolated from the Sargasso Sea
catgacttctcctgaactccttaaaactcccctccatgcctggcattctgaaaacagggggaagatggttcctttcggcggttgggacatgccggtccaatatgcagatggaatcctctcggaacatttggcaacccgtcggtgtggaggcctgttcgatgtcagccatatggggcgttttagagtggaaggtctggatacaatggcattccttcagagagtgctgacgaatgatgcctccatactcgaaccatggcaggcccaatacaccttgattgccaacgaaaacggaggagtgatcgatgatgcctatctttatcacccggaaggagaattcctgatcgtcgtcaacgcttccaaccgcaaaaaggactgggaacattttcaggagcaagcacggcaattcgaagatttgaggcttgaggacttaagcgaggaaatggcaatgatcgcggtccagggaccacagtccgaagaactgttttcggagttcctggaatcgggaagcctccccgaacgaagacacaaccgtctctcaaaaatcagcatcatgggggaagaaatgctgatctcccggacgggttacactggggaacctctatgttttgaaatgttcatatccgccgatgcagcaacgggaatctgggaaaaacttcaccaatccggaatttccaggggaatgacggcggcggggcttggcgctcgagataccttgaggtt

SEQ ID NO: 228956 - DNA, 805 bp, Unknown
  Bacterial polypeptide expressing nucleotide sequence isolated from the Sargasso Sea
gaatcaggaggtaaattagtcgagtttgccggctggtctatgcctctgcattacgggtctcaaatagaagagcaccactatgttcggcaagccgccgggatatttgatgtatcccatatgacaatagtcgatgtcattggtgcaggctccgaaacttattttaggcgcttgattgcgaatgatgttgcaaaactaaaaactaacggcgcagctctgtacggcgttttgcttaatgaagaaggcggtattattgatgatgttattgtgtatcgtcagcccgctgggtttcgaatgatttccaatgcctctactcgtaataaagttgtagcctggttgcgcaggcaaaattctgagggtatcgagatagctgaggcagaattggccatggtggccattcaaggccctcaagcaattcaggcatttaaagcggttaatgggggtgcagtgcctccaaaagcattctcggctattaatagtggggagctgtttgtggcgcggaccgggtattcgggtgaggatggcttggaagttattttaccagaaagattagcgatagaattctggaaagaaatggtggatcagggagttaggcctattggcttaggtgctagagatagtctccggttggaagcagggctcaacctatatggactagatatgactgaaaatactagtccgcttgtctctagcttatcatggacgttatgctggaaagcacgagaccgacgcttcataggtaaagaagctttggaaagtcagctagcgcaaggtatatcgcacaagctcacgggtttggttttagaag

SEQ ID NO: 228957 - DNA, 613 bp, Unknown
  Bacterial polypeptide expressing nucleotide sequence isolated from the Sargasso Sea
catgatagccgtacaaggtcctaacgctaaagccaaagctgcgcaggtatttaccgctgatcaaaacgctgcagtagacggcatgaaacccttttttggcgtgcaatcgggcagcttatttattgcaacaacgggttataccggcgaagcaggctacgaaatcattgttccagaagccgaagcagaagccttatggcaagcactattagacacaggcgttaagccatgtggcttgggtgcacgcgacacgctacgtttagaggctggcatgaacctctatggccaagacatggatgaatcgattaatccgctcgctgccaacatgggctggactgttgcatgggagccaagcgatcgtgactttattggtcgtgcagcattgaccgcaattaaggcggcaggtacagataaattagttggtctagtcatggaagaaaaaggtgttttacgccatgatatgccagtgttctttaccgatgcagagggtgtagagcatcaaggtgtgatcaccagcggttcgttttcgccaacattaggctactctattgccatggcccgtgtacctaatggtatcggcgctactgctgaagttgaatgcgtaaaaaacgcgtag

SEQ ID NO: 228958 - DNA, 826 bp, Unknown
  Bacterial polypeptide expressing nucleotide sequence isolated from the Sargasso Sea
atgaaaaaaacttcactttataaaaggcatgttgaacttggagccaagttggttgattttgcagggtatcaaatgccaatccaatattctggtgttgtaaatgaacataatatggtccgtaaaagtgctggtttgttcgatgtcagtcatatgggtgaattcatcatatcaggcgatggcgctgaagattttttaaattatataacggttaatgacttaaatgttatcaagccatggcaagcacaatattcagcaatgtgctttgaagatgggggaattattgatgatttaattatttatcgttaccctgatcattttatgttagtagtcaactgtgcaaatattgaaaaggatttagattggcttatggctaataagcctcaagatgtagatataatggatattagtcaacaaaccagcttaatagctttgcaagggccaaattctaggaaaattcttcaatctatcagtgaagttcaaatagacgatattgacttctattgttttaaattagaaaaaatttgtgacatcactgttacgattgctcgaacaggatatacgggtgaattgggatatgaaatttatggaaataatgaaataatcattgaaatttgggataaaattattaacctaggtgaaaagcgtattcttcctgttggtcttgcatgtagagatacactaagaactgaaatgaaatatgctttatatggcaatgatatagatgaatctaccaatactcttgaagcaggccttggatggataacaaaattagaaaaaagtaactttataggaaaagaagtactaacaaagataaataatagttgaa

SEQ ID NO: 228959 - DNA, 694 bp, Unknown
  Bacterial polypeptide expressing nucleotide sequence isolated from the Sargasso Sea
atggataatctactaaaaacacagttatatgaaatacatgcctcctctggagctagaatggttccttttgcaggatgggaaatgccaatacaatactcatcaattattaatgagtgtaatgcggtaagaaataaagcagggatttttgatgtttctcacatggggagattcatgattacaggtaaagacgcttctttagctttagataaaattttaagtgttgaccctagcttaatagaaatagggcaaggaaaatacaacttgatatgcgatactaacggaggagtaattgatgattgcattgtatacaaaatgtctgacacgaaattcttattaatacctaatgcatctaatgcagaatccgtaaatgaatggctcaatattaatactgtgggattagaataccaaacagaagtaatcacttcaaaatcaactatgattgctttacaaggacctgaatcaggaaatattttatcttcatccatacccgaaataggaaaaataaagagatttagatttattgaacatactctaaaatctacaaatatgattatttgtagaacaggatatacaggagaagatggttacgaaataattttagacaattcaatagcagttgaattttgggatttactaaaaactaatggagcatctgagtgtgggttagacgcaagagatgtactaagactagaag

SEQ ID NO: 228960 - DNA, 643 bp, Unknown
  Bacterial polypeptide expressing nucleotide sequence isolated from the Sargasso Sea
atgaaaaaaacagttttattggaaaagcatataaaattaggagcaaaaattattgattttgctggttttaagatgccaataagttatagctcagtgactgaagagcataatcatgttagagaaaatgttggggtatttgatgtttctcacatgggtgagtttgagatatcaggtaagaattctgatagatttgttcaattcatttgttctaatgatataatgaagctcaaaccaggaaaagctcaatataactgtttattaaatcatagtggagggattattgatgacttgatagtttacaaaatagaaaaagaaaagtttttattggtcgttaatgcttctaacatagataaagactttaattggatcaaaagtcttaataaagagtataattgttctattaataatatatcagacaaaacatctcttattgctgttcaaggaccaaatgctaacttattatgtgaaagatttaccaaagaagatttagaatctttgtcgaattattctttcgtactgggaacatttgctggaattgataatgtaataatatcaaagacaggttacactggatcaggaggttttgaattatatgtatctaacgataatgttgggcacatttgggatgaactttttagtgtga

SEQ ID NO: 228961 - DNA, 354 bp, Unknown
  Bacterial polypeptide expressing nucleotide sequence isolated from the Sargasso Sea
aatggctaataaaactgttctgtttaacaagcacttagaatcaaacgctaagatggttgacttccacggttgggatatgcccctcaactatggttcacaaatcgaagaacaccacgccgtgcgtcaagacgcaggtatgttcgacgtgtcccacatgactgtggttgatgtgaccggaaccgacgcttgtgcattcctccgtaagttgctcgccaacgatgtggccaaacttaaagttcctggtaaagccttatacggcggcatgttagatgacaatgccggcatcatcgacgacctaatcacttactacctcaccgacactttctaccgtgttggtgttaacagcgcgacccg

SEQ ID NO: 228962 - DNA, 789 bp, Unknown
  Bacterial polypeptide expressing nucleotide sequence isolated from the Sargasso Sea
gaaaatgttggggtatttgatgtttctcatatgggtgaattcgagatatctggtaagaattccactaagtttattcaatttatttgctcaaatgatatcatgaaactaaaacctggaaaggctcaatataactgtttagtaaaggataatggagggataattgatgatttaatagtttacaaaatagatgaagaaaaatatttattggttgttaatgcctctaacatagaaaaagacctaaattggattaaaagtctcaataaaaattacagttgttccattaataatatatcagatagaatatctcttcttgctgttcaaggaccaaaggcaaacttattatgtcaaagatttaccaaagaagatttaaaatctttatcaaaatattcattcatattgggaacatttgcaggaattgataatgtaataatatctaagacaggttatacaggatcaggaggttttgagctatatatatctaatgaaaatgttgaaaaaatttgggatgagctctttaatgttaaagattttgaagttaagccaataggtcttgctgccagagatacattaagattagaaatgggttattgtctatatggaaacgacataaatgaattagtaaccccaattgaagcaaaccttggatggataacaaaattagatacaaattttattggttcggagtcaattaaaaaacaaattgaaaatggagttaagaaaaaattagttggatttataattaatgataaaggtattcctagaaagggttatgaaatttttgacaaatca

SEQ ID NO: 228963 - DNA, 774 bp, Unknown
  Bacterial polypeptide expressing nucleotide sequence isolated from the Sargasso Sea
atgaacatctaaaagtgagagagaatgttggaatgtttgacgtctctcatatgacagtttttgaagtctttggaaaagatgcagaagaatttcttaagaaaattctttcaaatgatattgctaaaattaaaactaatggagaagccatctacagtcttcttttgaatgaggctggcaaaatcttagatgaccttattgtatacaatcttaatgaaaaatattttattgtttcaaattgtgcaaccaaagaaagggatgaggagtggctcaaagaaaatgctatggcttttgaggttaaagttgagcataaagaggattttggaataatcgcaattcaggggcctgatgtaagtgatttttttgaaaaaaatataggtgcatcaattgtgaacctaaaaaattttgaatgtgcatctcacaaaggccttattttcgcccgtactggctacacgggtgaggatggatttgagatcatcggtaacaaagaagcattattagaactatggaatgaattcaatgatgcaggtgttgaccccattggattgggcgcaagagataccctcagaattgaagcaggattatgcctatacgggactgatatgaatgataaaacacatccctatgagtgtaaccttggatggactgttgacatgaacgataaagaaaggcatttcattggaaagaaaagcttaatgaaaattgatccaaaaaaatcaaaaaaactagtgggtgtagttttagaagacaaaggtattcttagagcgaggttatgaa

SEQ ID NO: 228964 - DNA, 940 bp, Unknown
  Bacterial polypeptide expressing nucleotide sequence isolated from the Sargasso Sea
aaatttgttccattcgcaggttattcaatgcctgtacaatatagaagtggtgtaatatcagaacacttacatacaagaagcaacgctggtttttttgatgtaagtcatatgggacaaattaaaatttggccaaaaaataatgagaaagaaaaactaattcaagaattagaaagactaatgccttgtgatttgtataatttaaaagaaaaccgacaaacatactcactattaacaaatagtaacggaggtgtaattgacgatttaatgattgcaaataaagtttcttattttcaactggttgtaaatgcaagtcaaaaaatggttgattatcaacatcttaaagataatatctctcaagatttcaatattgaacttgaggaaaataaatcacttttagcaatacagggacctcaatctgaggatattctatcagccataaatttaactattaaaactatgaaattcatggactctgttgatatttctcttgcagatattgactgctcaatttcacgatcaggttatactggtgaagatggctttgaaatatctgtccacaataataatgtattacaattagttgaaattttgttcaaaaaaagtgatcttttaccaattggtctaggtgcaagggatagtcttcgtttagaggcgggactttgtttatatggaaatgatttaacttctgacatctctccaatagaagctaatcttaattgggtaattcataaacgtagaagaaaccaaggttcttcaaatattaaatttctaggaaatacaaaaatattaaatcaattagaaaaaggaccttcttttttaagaattgggttacttcctgtagaaaaagctccgatgaggaatggtaatattatatatcttgataatgaaagagagacagaaattggaattgttacatctggcgggtatagtccaccttaaa

SEQ ID NO: 228965 - DNA, 738 bp, Unknown
  Bacterial polypeptide expressing nucleotide sequence isolated from the Sargasso Sea
gatgctaccaactaccgcatggtggtgaactcggcgacccgcgaaaaagacatgaactggctgttaaagcaaaccgaaggctttgacgtaacggttaccgaacgtcctgagtttgccatgattgcagtgcagggaccagaggccaaagccaaagcggccgaggtgtttactaacgcacaaaatgaagcggtagcaggcatgaagccgtttttcggtgtacaggccgaagacctgtttatcgccactaccggttataccggtgaagctggttacgaaattatggtaccggtagaaaaagcaccggagctgtggcagaacctgctggatgccggggttaaacccagcggactgggcgcgcgcgatacgctgcgtttggaagcgggcatgaatttatatggccaggatatggacgagaccatttctccgctggaagcgaacatggggtggaccgtaacctgggagcctgccgaccgtgactttgtggggcgcgcagcgcttgaggcgcaacgtgagcagggcacccaaaaactggttggcctggtgatgaaagaaaaaggcgtattgcgcgccggactaaacgtcaaaacagcagaaggcgaagcgggcattattacttcgggtaccttctcacctaccttaggacatgccatagccatggcgcgtattcctgcgactaacagcagcactgtagaggtggaaatgcgtaaaaagtgggttaaagtagaagtggttaagccc

SEQ ID NO: 228966 - DNA, 466 bp, Unknown
  Bacterial polypeptide expressing nucleotide sequence isolated from the Sargasso Sea
atgaaaaaaacagttttattagataagcacataaaattaggagcaaaaattgttgattttgctggttttaatatgcccataagttacagctcagtaactgatgaacataatcatgttagagaaaatgttggggtatttgatgtttctcatatgggtgaattcgagatatcaggtaataattccactcagtttattcaattcatttgctcaaatgatattatgaagctaaaaccaggaaaggctcaatataactgtttagtaaatgataatggaggaataattgatgatttgatagtttacaaaatagacgaagaaaaatatttattagttgttaatgcctctaacatcgaaaaagacctgaattggatcaatagtctcaatgaaaattacaattgttctattaataacatatcagataaaatatctcttcttgctgttcaaggaccaaaggcagaaatattatgtg

SEQ ID NO: 228967 - DNA, 850 bp, Unknown
  Bacterial polypeptide expressing nucleotide sequence isolated from the Sargasso Sea
ccgccgttcgcgaaggcttggggtcttcgacatctctcacatgggagtgctgaggttggagggtcccagccccaaagacgccctgcagcagctggtgcccagtgacctgcaccggatcggccctggcgaagcctgttacacagtgatgctgaatgcatcggggggtatccgcgacgatctgatcgtttacgaccttggagccatcgacagccagagaggtgctctgatcgtggtgatcaatgccgcctgcgctgagagcgatacggcctggatccgtgaacagatggaacccgctggcctaacggtcactgacatcaaggacggtggcgttttgttggccctgcaagggccaggggccatcagccttctggagcggctcagcgacagtgatctcagcggtgtaccacggttcggacatcgagagttgaagctcgatgggctcagccatcccgtcttcaccgcccggaccggctacaccggcgaagacggggtggagatgctgctcaatgcgcaggatggtcgtctgctgtggaagcgactgctcgcagaaggagtgactccctgcggacttggcgcccgcgacaccttgcggcttgaagcggcaatgcatctgtacggacaggacatggacgagacaaccaccccctttgaagcggggctcggctggctggtgcacctggaaatgccagctgacttcattggccggaaagccctcgaaatcgctgccgagcaaggtcctaacaaacgactggttggactgaaactgccaggacgagccatcgcacggcatgactatccggtactgcacaacaacgaaacggtcggggcgatcaccagtggcagctggtcg

SEQ ID NO: 228968 - DNA, 894 bp, Unknown
  Bacterial polypeptide expressing nucleotide sequence isolated from the Sargasso Sea
cataactcgaacacatgctggtttttttgatgtatcgcatatgggacaattttttttagagggtgacacttctttaactgttgctttagaaaagataatccctgcagatttaaataaacttaaattaaatcactctaaatactcatttttgttgaataaagacggaggaataatagacgatttaataataacaaggactaagaaaggatttagtataattctcaatgccgcttgtaaagaaaatgatattaaacaaatctcaaaagtcctaaacgaaacacataaatcctggttaaaaagtgacttatcacttatagctttacaaggcccaaaagctgccgacgttctagaaaaattaattccaggggtatcaaatttaaaatttatgactggaaataattttaattttgatgaagcaaatttatatattactaggtcaggctataccggagaagatggttttgaaatttctattccaaacaataaagttgaaaaattgattgattttttaattactaataaagttaaaccagtgggtttaggcgctagagatacactaaggttagaagcaggtttatgtttgtatggtaatgacttaaccgaaaaaattacacccattgaggcaaatttaaaatgggcaattgcaaaaaagagaaaagaggagggtggtttcaatggttgggaaagaataaagaacttaatttcaaacggtagcgaaaaaataagagttggtattctaccagagggaagaattatagctagagaaggcacaaaaatattctcaacagataatattgaaattggatatgttactagtggtacttttggtccgagcgtaaatgcttctgtcgctatgggatatattaatttggaattcgcagaggttggaactaa

SEQ ID NO: 228969 - DNA, 867 bp, Unknown
  Bacterial polypeptide expressing nucleotide sequence isolated from the Sargasso Sea
tatgcctttctcatatgaaggtacattaaaagaacatgatgttgttagaaattcatctggtttctttgacgtatctcatatgggtcgtttagaaatcgattattcagaactagataagatatcatcgttaatttgttctgatttaataaatataccgatgaacaaagcattgtattctatttttacaaatgaaaatggtaatgctttagatgatgtaattttttggaaatttgaagataaaatcattttgattcctaatgcatcaaatgcatctaaaattaaatcacatttagtagatcacaaggttgattttattgataaatcattagagacagttttgatagctgttcaaggaccgagaacaatcgaacttattaacgatagatttgaaattcctgataagttcagtacagcaaaatcagacaactttatgtatgctcgaactggttatacaggagaagatggtattgaaattatggcaaataatgctgaagcagactctcttattagttttcttatcgaaaaaggtataaaaccatgtggattaggttcaagagatacacttagacttgaagcatcacttccattgtatggttttgaattaactgaagatataacacccgttgaagcctctttgtcttggacaattacaaacgaacatgattttttaggttcagacagaataaaagctcaactacaggatggaaatcataaaattttaaagaaatttactattgattctagaaaaattgcaagaactgagacaattggtatgtccagtgatattaaaggggttgttacctctggcaatttctcgcccatattaaataaaagtatcggatttattctttttgaaaataagcctcc

SEQ ID NO: 228970 - DNA, 841 bp, Unknown
  Bacterial polypeptide expressing nucleotide sequence isolated from the Sargasso Sea
cgcaggtttttttgatgtatcacatatggggcagttttttgtctctggaggccaatcaacagaacttagtttagaaaaaatcataccgttagattttaaagaaattaagatgaaccagtctaaatattcctttttaattaatgatgaaggaggagttatagatgatcttattataacaagagttgaaaatggttttaatattatattgaatgcagcttgcaaggataacgatattaaagaaattgcaaagtgtctaaattctgaaagcaaatacgaattaagaaaagatttatctcttatagctttacaaggtcctaaagctgaaacaattctagaatcaattataaaaggtgtaaaagaactcaaatttatgaatggtaattattttaaatttcttgaaaagaaaatttacataactcgttctggttacaccggcgaagatggttttgagatttcagttccaaatgtaattgttgaaaatcttatcaaactacttacagataaagatgctaaacctataggtttgggagcaagagatacacttagattagaagcgggtttatgtttgtatggtcatgaattaaatcaagagattaatccgattcaagcaaatttaaaatgggcaatttcgaaaaaaagaagagaaactggaggattcaaaggctgggaaaatattaaaaaagatttacaaaacggagtttctaaaattagagttggcgttaaaccagcaggtaaaattatcgcaagggagggtacaaaaatttattctaatactggtgaggaaataggaattataacaagcggaacctacggaccaagcgtaaatagtccagttgccatg

SEQ ID NO: 228971 - DNA, 760 bp, Unknown
  Bacterial polypeptide expressing nucleotide sequence isolated from the Sargasso Sea
attgttgatttacacggcagccgtacccgcgaattcttacgctacttactggctaacgatgtagctaaattgaccacgccaggcaaagcgctttacagcggcatgctaaacgaagccggtggcgtaattgatgacttaattgtgtatttcctgcaggaagatttcttccgtctggtggttaactccgccacccgcgaaaaagacttagcgcacattacagcgcaggcaaaagcgttcgaggttactgtaaccgaacggcctgaatttgccatgattgcggtgcaaggccctaatgcaaaagcaaaagtggccacgttattaaccgcggagcagcaagctgcagtagcgggcatgaagccattttttggtgctcaagcaggtgatctgtttatcgctaccacaggttataccggtgaagatggctatgaaattgcgctgccaaatgagcaagctgccgatttctggcaaaaactgctggatgccggtgtagcccctgctggtttaggcgcacgtgatacgctgcgcctggaagccgggatgaatttatatggccaggatatggatgaaaccgtatcgccactggcggcgaatatgggctggactattgcctgggcaccggaagaacgtaattttattggccgtaaggcacttgagcagcataaagctgaaggcacccagaagctggttggcctggtaatggaagccaaaggcgtgctgcgccacggccaacgtgtggtcgtcgccggtggtgaaggtgaaa

SEQ ID NO: 228972 - DNA, 957 bp, Unknown
  Bacterial polypeptide expressing nucleotide sequence isolated from the Sargasso Sea
tatgaataaaacagctttatacaatttacacaaaaaatttaatgcaaaatttgtatcttttgctggctatgaaatgcctatccaatataaagatggaataattaccgagcataatctaacgagagaaaagtcagggatatttgatgtatcacatatgggtcaattatttattgtgggtgatgataaattaacagacaaactacaagatatatttccaacagacttaaaaaatttatccgtaaatcagagtaaatactcgtttttaatgaatgagaacgcaggaattcacgacgatttaataattacaaaaatttctaatggttatatgataattcttaatgctgcatgtaaagaaaaagattttgaaataatcaaatctaaattaggtgaagattttaaaatatcattaagtaaagacctatctcttgttgccgtacaaggtcctgactcaaaagatttaattgaaaaaattattccaggtgtaaataaactaaaatttatgtttggtggagattttaaatttaattcaaacaatatttatgtaacaagatcgggatatacaggagaagatggttttgagatttcgataaataataatgatgtggttaaatttgttgagacattaatcagtttaggatctaatcttataggccttggtgccagagatacattaaggcttgaagcagggttgtgtttatacggcaatgacattgatgaaaataccagtccattagaagcaaatttaaaatgggcaatttcaaaaaatcgaatcaacagcaattttccaggggcaaaacaaattcagagacaaattaatgaaggtgtcacaaaattaagagttggcattaaacctgaaggtaaaattatagcacgagaatcaacaaaaatatttgatgaaaataataatcaaataggaaaaattactagcggttcttttggcccgagtgttaaaagtcc

SEQ ID NO: 228973 - DNA, 777 bp, Unknown
  Bacterial polypeptide expressing nucleotide sequence isolated from the Sargasso Sea
gatgtttctcatatggggggaaattttaatttctggaaaaaattctactaatcttttacaaagaatttgtacaaatgatatttcaaaattaaatccaggaatggctcaatataactgtatcacaaattttgaaggtggaattattgatgatttaattgtttataaaactgaaatagataagtatctattagttgtgaatgcatcaaatattgaaaaagattttaattggatattaacccaaaataaagagtttaatgcgactataattgatgagtctaataattactcccttcttgcaatacagggccctaaagcaattgattattgtcagaagtttacagatgtagaattaaataagatgaaaaactttactcattcaatatcaaaatttgcaaactgtgatgatattattttgtctaagactggatacactggttctggaggattagagatatacatacccaataaagatgcgatcaatatttgggatgctctgtttaaatcgaattataatgaacttttaatgccaataggtctagcagctagagatacactaagaatcgaaatgggctactgcctatacggcaatgacattaatgaaaatacttcccctattgaagcaggattaggatggataacaaaacctgaaactgaatgtattggttttgagatttttcaagatcaaataataaatggggttaaaaagaagctagttggattcaaacttaagggcagagggatacctagagctgggtatagaatttttgattccaatga

SEQ ID NO: 228974 - DNA, 684 bp, Unknown
  Bacterial polypeptide expressing nucleotide sequence isolated from the Sargasso Sea
acggaggaggacatctacatcgtcctcaacggcgcgtgctcggagaaggaccaggcccacatcaacaagcacctggcggagtggaaggcgaaggggaaggacgtcgatttcgtcgtccacggcgatcgctcgctgctcgcgttccagggccccaaggcggtggacgtcctccagccgctcacggacctggacctgtctaagctgtacttcgggatgttcaccgagaccacgatcgcgggcaagccggtctggctcacgcgcacggggtacacgggcgaggacgggttcgagatttctctgctcaagtcggacaccgtccacctgacgaagacgctcctcgagaaccccgcggcgaggatgtgcggcctcggcgcgcgcgactccctgcgcctcgaggccggcctgtgcctgtacggcaacgacctcgacgagaccatctccccgctcgaggctggcctgacgtggacgatcggcaagtcccgccgcgacgcgtgcgacttcgtcggcggcgacgcgatcaagaagcagctcgccgagggcgtcgcccgcaggcgcgtcgggctcaagttcacgggcaagggcgcgcccgcgcgaggcgggagcaagatcttcacccccgagggcgaggaggtcggccacgtcaccagcggcgggttctcgcccgtgctcggcgagaacatcgcc

SEQ ID NO: 228975 - DNA, 898 bp, Unknown
  Bacterial polypeptide expressing nucleotide sequence isolated from the Sargasso Sea
atggatttgctaaaaagtcctctgtattcaaaatatgttgaatccagtgcaaaattagtggattttgcaggttgggaaatgcctatatcattttcaggattaattaaagagcatgaatcagttagatcttcagcaggattatttgatatctctcacatgggtgtgatttctatcaagggaatcaatccaaaggattatattcaaaaactttttcctactaatttatactctttttctgaaggtcaggggctttatacagtaatgctcaatgataaaggaggaataatagatgacttaataatttatgaccttggtattcacgaaaatgacatatcagaattattattaatagttaatgcaagtagatatgaggaagattttcagtggataaaaaataatttagataaatatgaaatttcgataacaaactttaaacaagacaaagtacttttagcacttcaggggaaaaactcattcgatttatttgaagaatggattgaatcttcgatctcacatatccctaactttggatgcgaatataaaatttttgaacatatttcgcctaaagaaaaaatcttcttttccaagacaggatatacaggtgagaatggtctagaaatacttttatctaaaaaagcagcatttaatatatgggatttcttaatttccaaaaatgttgcgccttgtggtttaggagcaagagatactcttagactcgaagcaggcatgcatctttatggtcaagatataaatgaagaaacttctccatatgaagcagggttaggctggctagtacatctagaaaataatcacgaattctttgggagaagatttcttgaagagcagtcaagattaggtattcaaaaaaaagttagttggactctctatagaaggtaaa

SEQ ID NO: 228976 - DNA, 890 bp, Unknown
  Bacterial polypeptide expressing nucleotide sequence isolated from the Sargasso Sea
aatgagtgatttaaaaacaaaactatatgacactcatatatctcttggcgggcacatggtatcttttggtggttatttactaccaacacatttttcaggaattaaccatgagcatgagatagttagatctaaagtaggtttatttgatgtgagtcatatgggtgagtttattatttcaggtaatgatgctttatccttccttcagagggtcacagttaacgatatagaattattaaatgttggccaggcgcaatactctgctatgtgttatgacgatggtggaattatagatgacctcatagtatataggcaagaagatcactatatgatggtggttaatgcatcaaatagagaaaaaaatataaaatggcttgagaaaaattgtgaaggcaatgttcatttagaagatataagcgatgatatgggtcttattgcagtgcaaggtccaagatctcgtgaagttttacaaatgttaacagataataatttgcgttcagtagagttttataattttattaatggaaaaataaatggatacgaagccataatatcaagaacggggtatactggtgagcttggttacgaaatttatgcaaatactaatttccttgttgatctatggaattctattttagatgcggggtcagagtatggtattgaaccggtcgggttaggttgcagagacacactaaggatggaaatgaaatacccattatatggtaatgacattgatgagaccactaatccaatagagtcaggccttggttggataacaagattggggaaacaggattttattggaaaaaatgctatcattaaaaagaagaaaaaagttgaacggcgtttggtctgtatagagatgaccgagaaagctataccaaggtctgggt

SEQ ID NO: 228977 - DNA, 703 bp, Unknown
  Bacterial polypeptide expressing nucleotide sequence isolated from the Sargasso Sea
gcagattgatgagcaccacgcggtgcgcaccgatgccggtatgttcgacgtgtcccacatgacgattgtcgatctgcgcggtagccgcacccgggagtttttgcgttatctgctggcaaatgacgtcgccaaactgaagacgccgggtaaagcgctctacaccggcatgctgaatgcctcgggcggcgtgattgatgaccttatcgtctactacttcactgaagatttcttccgcctcgttgtcaactccgccacccgcgaaaaagacctctcctggatcacccaacacgccgaaccttatgccatcgacatcaccgtccgtgacgacctgtcgctgatcgccgtacaggggccgaacgcgcaggcgaaagccgcgtctctgtttaacgacgagcaacgcaaagcaaccgaaggcatgaagccgttcttcggcgtgcaggcgggcgatctgtttatcgccaccaccggctacaccggtgaagcgggctacgaaattgccatgccgaacgagaaggccgctgatttctggcgtgcgctggtggaagcgggcgtgaagcctgcgggtctgggcgcgcgtgatacgctgcgtctggaagcggggatgaacctctacggtcaggagatggacgaaggcgtctctccgctggccgccaatatgggctggaccattgcatgggaaccggctgaccgtgactttattggc

SEQ ID NO: 228978 - DNA, 725 bp, Unknown
  Bacterial polypeptide expressing nucleotide sequence isolated from the Sargasso Sea
tatggaattaaaaaaaacagcattatacgatttacataaaaaatttaacgcaaagttcgttcagtttgcaggttacgaaatgccaattcaatataaaaatggaattatttctgagcataatataaccagacaaaaatcaggtattttcgacgtatctcatatgggtcaactttttattaaaggagataaaactttaactaataaattgcaaaatatttttcctacagacttagaaaatctaccgacaaatcatagcaaatattctttcttaatgaatgaaaatggtgggatatatgacgatttaataataacaaaaatcaaagatggctatatgataattttaaatgcagcatgtaaggaaaaagattttaaaattatcaaatcaaaattagacaatactttttcaatgatattaagagaagatttgtcattaattgcaattcaaggacctgaatcgaaagatgtgcttgagccaatagtacctggtgtgagtaatttaaaatttatgagtggaaatgaatttaaatatcaatctgattttatttatataactagatctggatacacaggagaagatggttttgaaatatcaattaataacaaagatgccttaaaatttacagaattacttattaagaatggttcaaatttaattggtttaggggcaagagatacattaagattagaagcaggtttgtgtttgtatggaaatgatatagatgaaa

SEQ ID NO: 228979 - DNA, 1105 bp, Unknown
  Bacterial polypeptide expressing nucleotide sequence isolated from the Sargasso Sea
atgattaaaaaaacacctttatacaatttacatatccaatacggtgcaaaaatggttgagtttgcaggttatcaaatgcctattcaatataagagtggaataatccaagaacataaatttactagagaaaatgctggtatatttgatgtgtcacatatgggacaactatttataactggttcagatcagcttacagatgatcttgaaaaaatatttccagttaattttaaaaatttaaagataaatcaaagtaaatattcttttttaatgaatgagcagggaggaatttacgacgatttaattattacaaaattaaaagatggttacttaattattctaaatgcagcatgtaaaaagcaagactttgaaattataaaaaaaaaattagataacaaatgtgagttaaatttagatgaaagcttatctttgattgcaatacaaggaccaaaagcaaaagatgtattaggaaaagtagtttcaaatataactaatcttaaattcatgaatggaggggaatttgaatatgataattcaaatatttacataacaagatccggttatactggtgaggatggttttgagatttctttagaaaacaaaaaagttgaaaaatttgtagatcaattaattaattatggtgctaaacttataggacttggtgctagagacacattaagattagaagctggattatgcttatatggtaatgatcttgatgaaaaaacaagtccgattgaggcaaacctgaaatgggcaatacctaaatcaagagttgatagtgattaccccggttcaaatattataaaaaaacaaatttatgatggagtcaagactttaagagttggaatcaaacctgaaacaagagttatagcaagaggaaatactaaaatttttgatcagaacaataaagagataggtaaagttacaagtggtacatttggaccaagtgttgagtgctcaattgcaatggggtatgtcgaaaacaattattcaccaacaaatacaaaaatctttttagaagtcagaggaaaaaaagttccagctaatgtttgtgatttaccattttataaaaaaaactatgtaaaaggagaaaaaaatgtctgaa

SEQ ID NO: 228980 - DNA, 1093 bp, Unknown
  Bacterial polypeptide expressing nucleotide sequence isolated from the Sargasso Sea
tttgaaacgaacggctctctttgataatcatatctctttaaacgctaaaatggttccctttgcagggtactctatgcctatgtcttattctggaattattgaggagcataaagctgttagaaatacagctggtgtttttgatgtaagtcatatgggagaatttaaaattcatggaaaaggagcggagaatttccttcaattagtaactgtaaatgacgtaaaaaatatttccaatgggcaagcgcaatattctgctatgtgtacaagtaatggaggcataatagatgatgtaatactgtatcgttttaatgaatattttatgatggttgtgaatgcagctaacattaaagatgattttaattggttgttggaaaattcgaatgatgaagtttttattgaggatataagcgatgatttaaatttaattgctatacaggggcctaaatcagcagctttgctaaatgaaatactagaatatgatctaagcaaattaaaatattataattttattcaagaaaaatataataacgatactatcactgtatctaggactggttatacaggtgagcttggttttgaaatatatggcaataataattcaattatttctttatgggaaattatttttaattatgaagcatttgaaattttgccaattggattaggagcaagagatactttacgattagaaatgaattatgcactttatggaatggatataagcaaatctacgaatcctatcgaagctggcttaggttggattactaaatttaataaaggagattttattggaagagatgctttgttaatcgaaaaaaataagattcatagaagccgtatttcatttgaaatgttggatcgagctgtaccgaggcataactataatataattgttgatggtaatgttgttggtaaagtaacaagtggaacccaatcaccttctttaaataaaggtattggtatcggttatattcaaattgaacattcttctcctggaactgaaatttatattgaaataagatctacactcaaacccggagtaattattaatcctccattctataaaaaaggtacagttaacattatttattag

SEQ ID NO: 228981 - DNA, 1138 bp, Unknown
  Bacterial polypeptide expressing nucleotide sequence isolated from the Sargasso Sea
tatgtctgaggcttattggggtttagaacaaaatcttaaaactacccctttatacaaagttcacaacgataatagagcaaaattagtaccttttgctggatattatttacctattcaatacgaaaacggtattattgctgagcataatcatacaagaaattctgtaagcatttttgatgtttcacatatggggcagattaaaatatcgggaccaatgatttatgatgcaatggaaaagatacttcccatttcattttctaagatagctcctggtcaaattaaatatacacaatttcttaataacgaaggtaagattattgatgatctaatgatctgtagaacttttgaggaagatcatgtttggcttgttgttaatgcagattgcacccctaaagaccttgatcatttatataataatctaaataaaacctataaaattgaattgattgaggatagagctctaatagccttacaaggaccaaactcatcaaatattttaaagactttttttcaagaaattgatgatatgcctttcatgacagctgattggtttaattataataatgaaaaattttttatttctagatgtggatatactggtgaagatggttttgagatatcgataaaagataggtatgcagaaaaatttataaacgaactcttacaatgcgaaggtgttaaacttgctggtttgggcgctagaaattctttaagaatggaagcaggactttgtttgtatggaaatgacatatcatcctctgtatcaccaatcgaagctggtttaaaatggtctattccaaaagaaagaatagaaaatggcggttttattggccatgaaccgatcaaaaaagatttagaaaatggggttgaaagaaaattagttggcattaagcccttgggtaaacttccagctagagaaggaacacaaatttttgataaaaatgaaaaaacaataggcgaaatcactagcggagggtattcaccttcactccaaacaccaattgctatgggatacattaattcagatatcctaaaaagtgaatgtgaagtgttgttaaatgttagaggtaatttaataccagcagaaataacttcacttccttttgttgagcataaatattttaggggtaacaaataa

SEQ ID NO: 228982 - DNA, 826 bp, Unknown
  Bacterial polypeptide expressing nucleotide sequence isolated from the Sargasso Sea
tctgtcagaagaattaaaaaaagtttttttacataattttcataaaaaaaatcatgcaaaatttgttccttttgcaggtttttctatgcctataaattatcaaaagggcattttaaatgaacacttacaagtaagagagtcggctggattatttgatgtttcacatatggggcaaatattaatacctgttaatgaaaaaaatacaatttctctttccaaatttattcctttagattttgataaaattaattttaatagatgttactattcttttttattaaataatgatggaggaataatagatgatttaattatttcaaaaattaaatatcaacaaaaggattttttttatattgtttataatgcaagtagaaaaaaaaatgatgaagaaatatttattaatcatttaaataattatattttacttactaataattctttattagcgatacaaggtcccaattcagaaaaaattattaattttattaatgaatctaaaaatcttttttttatgcaaacaaatacttctaattttttaaataaagaaattataataagtagaacgggatatactggcgaagatggatttgaaatttctattccaaatgatgtaagtaatcaatttatagaaatattattagaaaattcactaattaagttatgtggattaggagctcgagattcactgcgaatagaggcaggattaagtttatatggcaatgaattaaatgaaaaaataactcctatagaagctagcttaacatggtctttgcataaatctagacttaatgatgaaagtttaaatggtaacaaaattttatttaac

SEQ ID NO: 228983 - DNA, 1096 bp, Unknown
  Bacterial polypeptide expressing nucleotide sequence isolated from the Sargasso Sea
tttgaataagaaaacttctctatatcaaaaccacctggaagcaaaggctaaaatggtagacttccatggttgggatatgccaattaattatggctctcaaatcgaagagcaccatgcagtgagacaaggttgtggtatttttgatgtatctcatatgacaattcttgattttgaaggcagcgaatctgaactttttatcagaaaactgattgcaaatgacgtaagaaaacttcaagagaactattctggcctttactctgctatgttgaatgataaaggctttgtaatagatgacctaatagcctatcgcatggataaaggatttagactggttgttaactgtgcaaccagaggtgaggacttaaaatggatatctgcgagagctaaagaatatgatgtaaacatgctagaaagagacgatctgtcaatggtcgctattcaaggtcctcaatctccaaatgtccttaagaactttcctgcaccaatagattttctaaaagagaaaaagagacagcaaggaatttttcaagatgatgtctttgcagcaaaaaccggttacaccggggaattaggttttgaagtgatactgcctaatgaaaaagccatagatctttggaatatagcaatcagtgaaggagccaaaccaatcggacttgcagctagagatacacttagacttgaagctggaatgaatttgtatggttttgagatggatgagaccatctcgcctttcgaatgtaatatgggctggacagtttgttggcaagatgagcaaagagatttttttggtaaagaaagtttaataaaacagaaagaatcaaatgatcttaaagaacttgttggtataattacagacgaaaaggtgatcctaaggcaaggacagaaaatacaccttgagaaagagaatcatgcacgcggagttgtcactagcggaacttactcaccaagcctaaagatgcctatagcattagcaagattaccaaaaagtgatagcacttcttgttttgctgaaattagaggtaaaagagtaaaagctataataggttcaccgaaatttattaaagagggaaaagttattttcaaggaaaaagtatga

SEQ ID NO: 228984 - DNA, 1051 bp, Unknown
  Bacterial polypeptide expressing nucleotide sequence isolated from the Sargasso Sea
aatgagtgatttaaaaacaaaactatatgacactcatatatctcttggcgggcacatggtatcttttggtggttatttactgccaacacatttttcaggaattaaccatgagcatgagatagttagatctaaagtaggtttatttgatgtgagtcatatgggtgagtttattatttcaggtaatgatgctttatccttccttcagagggtcacagttaacgatatagaattattaaatgttggccaggcgcaatactctgctatgtgttatgacgatggtggaattatagatgacctcatagtatataggcaagaagatcactatatgatggtggttaatgcatcaaatagagaaaaaaatataaaatggcttgagaaaaattgtgaaggcaatgttcatttagaagatataagcgatgatatgggtcttattgcagtgcaaggtccaagatctcgtgaagttttacaaatgttaacagataataatttgcgttcagtagaattttataattttattaatggaaaaataaatggatacgaagccattatatcaagaacgggatatactggtgagcttggttacgaaatttatgcaaatactaatttccttgttgatctatggaattctattttagatgctgggtcggagtatggtattgaaccggtcgggttaggttgcagagacacactaaggatggaaatgaaatacccattatatggtaatgacattgatgagaccactaatccaattgagtcaggccttggttggataacaagattggggaaacaggattttattggaaaaaatgctatcattgaaaagaagaaaaaagttgaacggcgtttggtctgtatagagatgaccgagaaagctataccaaggtctgggtgtcaaatctacatagataatgaattagtagggagggtaacgagtggtactatgagcccgtcattaggaaaaggtataggaattggttatgtaaatactccttatacggaagctggcatagatattcatgttgatattagaggtaaaatgaaaaaaggtgtg

SEQ ID NO: 228985 - DNA, 1105 bp, Unknown
  Bacterial polypeptide expressing nucleotide sequence isolated from the Sargasso Sea
atgaccctgcagcgcacgcctctccatcagctctgccaggacggcggcggccgcatggtgcccttcgccggttgggagatgccggtgcagttcagcggcctgatccaggagcacaaggccgtacgggaacaggtggggatgttcgacatctcccacatgggcgtcttgcgactggaaggcccgaatccgaaagatgcgctgcaacagctggtgccgagcgatctgcatcgcatcggacccggcgaagcctgctacagcgtcctgctcaacgagagcggtggcatccgcgatgacctgatcgtttacgactgcggcgccgttgatgccgaacggggtgccctggtgctggtgatcaatgcagcctgcgcagaggcggacaccgcctggatccgtgaccaaatggaaccggctggcctcacggtgagcgacctcaaggcgggcggcgtgctgctggccctgcaaggcccgcaggccatccctctgctggaggagctgtccggcgagagcctcagcgacttgccccgctttggacatcgcaccctgagcctgaaagatcttgcccatcccgtgttcacgggccgtacgggctacaccggtgaggacggtgctgagttgctgctgaccgccgacgacggacaaaagctctggcagattctgctggatcgcggcgtcagcccctgtggcctgggcgcacgggacaccctgcgtctcgaagctgccatgcatctctacggcatggacatgaatgccgaaaccaccccttttgaagcagggctcggctggctggtgcatctggagatgcccgtggatttcgtcggtcggcaggccctggagcaggccgcagagtccggtccctcaaaacgactcgtgggcctcaagttgcagggacgcgccatcgcccgtcacgactaccccgtgctccacaacggcgagaccgtcggtgtggtgaccagcggcacctggtctccaaccctggaggagcccatcgcgctggcttacgtccccacagccttggccaaactcggaacggaactcagcgttgaaatccgcggtaaggcccaacccgcctgcgtggtcaaacgccccttctaccgccggtcctgag

SEQ ID NO: 228986 - DNA, 1087 bp, Unknown
  Bacterial polypeptide expressing nucleotide sequence isolated from the Sargasso Sea
tatgaaacaaacacttctttataataaacactaccaattaggcgcaaaaatctctgattttgctggatttcaaatgccaattagttattcttctgttaataaagaacacttacatgttagagaaagtcttggaatattcgatgtatctcacatgggggagatttttatttatggaaaaaactctgaagatcttttacaaagaatttgcagtaatgatatttcaaagctaattccaggaatggctcaatataactgtatgacaaattttaaaggaggaattattgatgatctgattgtttataaaattgaaatagataaatatatgctagtggtaaatgcctcaaatattcaaaaagattatgagtgggttttatcgcaaaataaagagtttaatgcaactataattgatgagtctaataattattcacttcttgcaatccaaggtcccaaggcaattgattattgtcaaaactttacaaatgtggatttaaatagtatgaagaacttttcacattcaatatcaacatttgctaactgtaataatattcttttatctaagactggatatactggttctggaggattagaaatatatattcctaatgaatgtgtagtggatatatgggaccatcttttcaaattcaataaaaatgaaactttaatgccaataggtttagcagccagagatacattaagaatcgaaatgggatactgtctatatggtaatgagattaatgagaacatatctcctattgaggctggattaaactggataactaaacctgaaactgaatgtattggctctgaaatttttaaaaaacaaattaataatggagttaaaaaaaagttagttggattcaaacttaaaaacagaggtattcctagatcgggatataaaatttatgattctagggataaagagattggaattaccacttcgggaactttttcccctgttttaaaaataggaattggtttaggatatataaactttgaatcattaggaactgttaaggatatccatattaaaattagagatgaatttattgaattagaaattataaaacccccattcattgaaatataa

SEQ ID NO: 228987 - DNA, 943 bp, Unknown
  Bacterial polypeptide expressing nucleotide sequence isolated from the Sargasso Sea
tttgatgtatcacatatgggtgagttttatgttgagggaaatgaagctaaagattttctaaattacatttgctctaatgatattttaaaaattgaagttaatagagctcaatacaattgttttattaataataacggtggtatagtcgatgatttaattgtttatagaattgaggagaaaaaatacatgttagttgtcaatgcagctaatattgaaaaagattggaaatgggttcaaaagaatttaaaaaagtatgattgtactattaaaaatttatccgatgaaattggtcttatctcggtacaaggacctaattcattaaatctaattaatgaagtatttaattctgattttagtcaattaaagaagttttctttcaataatattaaaataaataataaatcaattatggtttcaaacacaggttatactggatcgaaaggctatgaattatacattgatgtaaatatattaagtgatatttggaatcaattatttttaaagggtgaggaatatcaaatacaagctattggattaggagcacgtgatactttaagaatggaaatgggttattgtttatatggaaatgatattgatgataccactactccatttgaagctaacttaatgtgggtcacaaatattgaaaaagattttataggtaaagaaaaattactgatttcaataaattcatcaaccaaaaagatgataaattttaaaatgattgacagaggaattccaagaaatggatatgacatatgtaataaagaaggggataaaatcggtaatgttacatcaggaacattttcaccaactaataaagtaggtataggaatcggttatataaatatcaaacattcattgggtgatgaaatttatcttttaataagagataaattggttaaagccgaaatcactaaacttccactaaaaaatgggtaga

SEQ ID NO: 228988 - DNA, 1096 bp, Unknown
  Bacterial polypeptide expressing nucleotide sequence isolated from the Sargasso Sea
atggctaataaaactgttctgtttaacaagcacttagaatcaaacgctaagatggttgacttccacggttgggatatgcccctcaactatggttcacaaatcgaagaacaccacgccgtgcgtcaagacgcaggtatgttcgacgtgtcccacatgactgtggttgatgtgaccggaaccgacgcttgtgcattcctccgtaagttgctcgccaacgatgtggccaaacttaaagttcctggtaaagccttatacggcggcatgttagatgacaatgccggcatcatcgacgacctaatcacttactacctcaccgacactttctaccgtgttgttgttaacagcgcgacccgcgaaaaagacttagcctggatcgccaaacaatcccaaggttttgatgtcacagtgaccgagcgtcctgagctggcgatgatcgccgttcaaggtcctaacgctaaggccaaagccgccgccgtattcagtagcgagcaaaatgccgccatcgaaggtatgaaacctttcttcggtaagcaagcgggttctctgttcattgcgaccacaggttacactggtgaagcgggctacgagatcatcgtgccagaagcggaagccgaagctctgtggcaagctctgttagatcaaggcgttaaaccctgtggtttaggcgcccgcgatacattacgtctcgaagccggtatgaacctctacggcttagatatggacgaaaccatcaacccgctggccgccaacatgggctggaccattgcatgggagccaaccgaccgtgactttattggtcgtaaggcgcttgaagccctgcgcgatgcgggaaccgacaaattagtcggcctggtgatggaagaaaaaggcgtgttacgccatgatatgccagtatttttcaccgatgcagcgggtgttgagcagcaaggcgtgatcactagcggtactttctcacctacattgggctattctattgcgatggcgcgtgttcctagttcaattggggatacggcggaagtcgagatgcgtaaaaagcgcgtggctgttagagtagtagcgccaaactttgtgcgcaacggtaaacaagcattttaaa

SEQ ID NO: 228989 - DNA, 838 bp, Unknown
  Bacterial polypeptide expressing nucleotide sequence isolated from the Sargasso Sea
aaagccttatacagcggcatgttaaacgaagccggtggcgtgattgacgacttaatcgtttactttatgactgaagacttcttccgcttagtggtgaactcagccacccgcgaaaaagatttagcctggatcaaccaacaagctgccgcctttaacgttactgtgaccgaacgcccagagttcgccatgatcgcagtgcaaggcccacaagccaaagccaaagtagccaccttattaactgaagagcaaaaagctgctgttgctggtatgaagccattttttggtgttcaggctggttctctgtttattgcaaccactggctacacaggcgaagacggttacgaaatctctttaccaaacgaagaagccgctgacttctggcaaaaactgctggacgctggtgtaaaacctgctggtttaggcgctcgtgatactttacgtttagaagccggtatgaacctgtatggccaggatatggacgaaaccgtctctccactggctgccaatatgggctggactatcgcctgggagccaagcgaccgtaattttatcggccgtgcagcactggaacagcaaaaagctgctggcaccatgaagctggttggtttagtgatggaacaaaaaggcgtattacgtcacggccagaaagtggtgactgaaggcggcgaaggcgaaatcacgtctggtactttctctcctactttaggtttcagtattgcgatggcccgtgtaccagcttcgactggcgacactgccgaagtagatatccgtggcaaactggttcaggtaaaagtagtgaagcctaactttgtgcgtatgggtaaaaaagtaatctgat

SEQ ID NO: 228990 - DNA, 877 bp, Unknown
  Bacterial polypeptide expressing nucleotide sequence isolated from the Sargasso Sea
gaatttatgagatatgtgttaacaaatgatgtgaacaaaattgatgatggttctgcgctatatagtgtcataacgaataatgaaggtgggataatagatgacctaatcgtttataaatttaacaatgaaaaattcagagttgtatcaaactgttctacttttgatgatgtaaataacttctttgaatcaaatattatcaaatttgattgtgagttccttcataaaccaactcaaggcattctagctatccaaggaccagaatcttcgattgctcttgaaaatatccttgaactgaagctctcaaactataaaagtttttctttcactgagaaagatgatcttttcatttcaagaactggttatacaggtgaagatggttttgaggttattggtgagcctgaagagttacaaaacatctgggatttatgtatttctaaaagtattcctccaattggtttaggtgcaagagatactttaagagtcgaagctgggatgaatcttaatggcacagacatgacaataaagaataatccctttgagtctaatttaggttgggttgtcgattttagtgatgtcgaaagagactttattgctaaagaaaacctcattgaaattcaaaaaatcaacaagcttaaacttgttggagttttgcttaatgaaaaaggaattttgagaagtggtcaaaagatcatcaaagatgattttgagggagaaattacaagtggaacattttctccatttatgaaaaaaagtattggtatagctagagttccatttgaaatgaatgaagatgccaatgtgcttataagaaataaactgttaaaagtaaaaattctatcgctaccttttgtaagaaaaggtaaaattatattatgag

SEQ ID NO: 228991 - DNA, 1075 bp, Unknown
  Bacterial polypeptide expressing nucleotide sequence isolated from the Sargasso Sea
attggaattaaaacggacctttctcaatcaagctcatgtggatcagggcggtaagctagtcgatttttcaggttggtctctgcctattcattatggttctcaaataaaagagcatcttgcagttcgacatggagtaggcatttttgatgtgtcgcacatgacgataattgattgtaaaggaccaatggttagggattttttacgcagagtactcgcaaatgatgtggggtctttagcaattaaccaggctctatacagcgttttattgaacgaacgaggaggggttgttgatgatttgatcgtctatcgtttgtcggattgctacaggctagtgactaacgcggccacgaaagacaaagtcctggcctggctcgatttgcaaaatctcgagcagattcaactcgaagaacttgacttgtcaatgatcgcaatccaaggaccgcgttctcttgaggcgatcggtagttggagtaagacctatgactttgaatcgctaaagcccttttcttgcgtactaatcgacgaagtacttgtagcccgaacaggttataccggtgaagatggattcgaattgatagtgccgaatgaacaagttgtcggcgcatggaatttttttgttaacgaaggcgccgtgccagccggtttgggagctcgggacaccttaaggcttgaggctgggcttaatttgtatgggcaggacatggacgaagaggttgatccgttggtctcaaatcttggctggacggttaagtgggagcctgaagaccgagattttgtaggccgtgatgctctccaaataagaagacacgagctagatgagaagttggttggacttatattgataggaaaaggtgtcctccggcatggtcaaagagtgctaacagatcatggtgagggtgttattacgagtggcagtttcagccccagcatggattgcagtatcgccttggcgcgagtaccaaaattggcccgagaaaggtgtcgagtggaaattcgtgataaactggtcgatgctgtggtagtgaagcctccgtttgtaaaacacggcaaggtccttgttgaatggaaagaatag

SEQ ID NO: 228992 - DNA, 725 bp, Unknown
  Bacterial polypeptide expressing nucleotide sequence isolated from the Sargasso Sea
aatgtctagtaccaccgccctacacgcaaagcacctagaagccggtgcgaaaatggtcgatttcttcggctgggatatgccaattaactatggttcacaaattgaagagcatcacgctgtgcgtcaagacgccggtatgtttgatgtgtctcacatgaccattgttgacgtaaaaggcgcgcaagccaaagcgtatcttcagtatcttttagccaacgacgtggcaaaattaaaagacaaaggcaaagcgctatacagcggcatgcttaacgaagaaggcggtgttgtagacgaccttatcgtttatcacttcgacgaaactaactatcgcctagtggttaactcagcgacacgcgaaaaagacatgaactggttaatgagcaaagcagaaggctttgacgtaaccatcaccgagcgccctgagtttgccatgattgccgtacaaggccctaacgcaaaagaaaaagcagccaccttgttcagcgcagcgcaaaaagaagcggtagcgggcatgaagccattttttggcgtacaagcagaagacttgttcatcgccaccacaggttacaccggtgaagcaggctacgaaattatggtgccagctgaacaagcggaaagcttctggcaagcactactagacgcgggcgttaagccatgcggcctaggagcacgcgacacccttcgcctagaagcaggtatgaacctgtacggccaagatatggatg

SEQ ID NO: 228993 - DNA, 1021 bp, Unknown
  Bacterial polypeptide expressing nucleotide sequence isolated from the Sargasso Sea
atggataaaaaaactactcaactacataaatatcatctatctcaagaagctaagtttattgattttggtgattggtcaatgcctttttcttatgaaggtactttaaaagaacatgatattgttagaacatcatcaggtttttttgacgtatctcacatgggtcgtttagagatccaatatactgaaattgaaaaaatatcaaaattaatttgttctgaaattgtcgatattccgtctaacaaggcactttattctatctttacaaatgcagatggcaatgctcttgatgatgttattttctggaaatttgatgataagatcatactgattccaaatgcatctaacttagagaagattaaatcccacttagttgcacataatgtcgagtttattgataaatcaccagacactgttctcatagcagtacaaggaccagatactattgaattaattcaagatagatttgagattccagataagttttcaacaaattatacagaaaactttctttacgctcgaacaggttatacgggagaagatggagtcgaaattatggctaataatgaggacgcagagtcattattaactttcttaacagaaaaaggtgtaaaaccttgtggattaggttccagagatacactcaggctagaggcttcacttccattatatggttttgaactgacagaagatataacacctgttgaagcatctttaaattggacaattactaataaaaatgagtatttaggctcaaatagaataaatgatcaattgtcgggtgaaagccataaagttttaaagaaatttacaattgactcaagaaagatagcaagaacagaaactgttggtattgctggagaaactaagggtatagttacatctggtaacttctccccagtattaaataaaagtattggctttatattatttgaaaataagccctctcacgatttaatagagtttgatattcgtggtaatttaatagaaggcaatatagttaataaaaggtttttaagttaat

SEQ ID NO: 228994 - DNA, 415 bp, Unknown
  Bacterial polypeptide expressing nucleotide sequence isolated from the Sargasso Sea
cgctcgtgacaccttacgtttagaagcaggtatgaacctgtatggccaggatatggacgaaactgtatctccgctggctgccaacatgggttggactattgcctgggaaccaagcgaccgtaactttattggccgtgctgctttagaacagcaaaaagctgctggcactatgaagctggtaggtttagtgatggaacaaaaaggcgtattacgtcacggccaaaaagttgtgactgaaggcggcgaaggcgaaatcacttctggtactttctctcctactttaggtttcagtatcgcaatggcccgtgtaccagcttcgactggcgacacagctgaagtggatatccgcggcaaactggttcaggtgaaagtcgtaaaacctaactttgttcgtatgggtaaaaaagtaatttaa

SEQ ID NO: 228995 - DNA, 1090 bp, Unknown
  Bacterial polypeptide expressing nucleotide sequence isolated from the Sargasso Sea
atgaaaaaaactcctctttatgaaaagcatattgaattaaatgcaaaattagttgattttgctggatatatgatgcccatccaatatgatagcattacaaaagagcattttgctgttcgcgaatctgcaggtatctttgatgtaagtcacatgggcgaaatcatcatttcaggaaaaggatcacaagaatttcttgaatatataactgttaatgacatcaccaatttagaaccatggcaggtacaatattctgcaatgtgttttgaggatggaggtatagttgatgacctacttgtttataggtatcctgattattttatgcttgtagtaaattgttcaaatgccactaaagactttgattggcttatggctcacaagccaaaggatgtggatataattgatattagccagaaagtaggattgattgcacttcaaggccctaagtcacgagaaatacttaataatttgatcgatgttgaaattaataagttgaagtattatcaattcgaaattgcaaaatttgataatttcccatgtacaatttccagaacgggttacaccggagaacttggttatgaaatatatgcagataataaaaatatagtgaaaatttgggatgcaattataacaggaggttctgatctgattcatcctgctgggcttggttgccgagacactctcagattagaaatgaaatatgcactatatggtaatgatatcgatgaaaatacaaatccaattgaagcaggattaggttggataactaagttaagtaaaaaaaataattttgttggtaaagatgctcttgaacagataaataattcattaagtcgagatttagtatgcattaaaatggttgacagaggaattcctagaaaaggttatgagcttttttataatgacactatgatcggcaaaattacaagtgggactcaatctcctactttgaatgttggaattggtctaggatatgtccaaaaagatttttcaaagataggtattgaattgtatatgttagtaagagggaaaaaaataaaatgtaaaatagttgattctccttttttcaggaagggtagtttaaaaaactaaa

SEQ ID NO: 228996 - DNA, 1114 bp, Unknown
  Bacterial polypeptide expressing nucleotide sequence isolated from the Sargasso Sea
catggatttgctaaaaagtcctctttattcaaaatatgttgaatccaatgcaaaattagtggattttgcaggttgggaaatgcccatatcattttcaggattaattaaagagcatgaatcagttagatattcagcaggattatttgatatttctcacatgggtgtgatttctatcaagggaatcaatccaaaggattatattcaaaaactttttcctactaatttatactccttttctgaaggtcaggggctttatacagtaatgctcaatgataaaggaggaataatagatgacttaataatttatgacctcggtatacaagaaaatgacatatcagaattattgttaatagttaatgcaagcagatatgaagaagattttctgtggataacaaataatttaaatatgtctgaaattttgataacaaactttaaaaaagacaaagtacttttagcactacagggaaaaaactcattcgatttatttgaagaatggattgaatcttcgatatcacatatccctaactttggatgcgaatataaaatttttgaacatatttcgcctaaggaaaaaattttcttttcaaagacaggctatacgggggaaaatggtctagaaatacttttatctaaaaaagcagcaattaatttatgggatttctcaatttctaaaaatgttgcaccttgtggtttaggagctagagatactcttagacttgaagcaggcatgcatctttatgggcaagacataaatgaagaaacttctccatatgaagcagggttaggatggctagtacatctagaaaataatcacgaattcattggcagaagagttcttgaagagcagtcaagattaggcattcaaaaaaagttagttggtctctctataaaaggtaaagcaataggaagaaaagggtgcgcagtgcttaaaggtgatgagaatattggaactatcactagcggcagttggtctccaactaaacaacaagctattgcttttgcatacatcaatacttcgcatgccttaataaataatgaagttgaaatattaataagaggcaaaaaattcaacggggttataacaaaaagagcgttttataaaaagaattattaa

SEQ ID NO: 228997 - DNA, 811 bp, Unknown
  Bacterial polypeptide expressing nucleotide sequence isolated from the Sargasso Sea
ttgaataaacaaacctctttatatcaaaaccacatagaagcaaacgccaagatggtagattttcatggttggtctatgcctataaattatggatctcagataaatgaacataattgtgtaagggaaaattgcggcatttttgatgtttctcatatgacaattctggacttcgaaggagaggatgttgagcaatttataagaacattaattgccaatgatgttaaaaagctaagtgaaacttatgaaggtctctattctgctatgttgaatgaggatggtggggtcatagatgacctgattgcctataagctagaaaatggttacagattggtggttaattgcgctactcgaggtgaagatctgagatggatatcgaaaaaggcgaagaattattcagtgcaaatgaaagaaagagatgatttgtcaatggttgctattcaaggacctaaatctgcagaagtcctctctaattgtccggctcctattgttagagaactagaatctaaaaaaaagcagcaaggtgtatatggcaatgatatgtttgcaactaaaacaggctataccggagaaaaaggttttgaagtaatactgccgcatgctcttgctgttggtctctggagaaacgcaatcaaagctggcgctcagcccattggcttaggtgcaagagatacattaagacttgaagcaggcatgaacctctatggatttgaaatggatgattctatttctccatttgaatgtaatatgacatggactgtcgatttctctgataaagaaagaaatttctatggcaaagaagcacttggcagaa

SEQ ID NO: 228998 - DNA, 1072 bp, Unknown
  Bacterial polypeptide expressing nucleotide sequence isolated from the Sargasso Sea
ttgagtaacaaaactgcccttcactctctgcatttagcctcttctgcaaagatgattaattttcatggatgggaaatgccaattcactatggctctcagataaaagagcatgaaatagtaagaaatacatgcggaatatttgatgtttcccatatgaccatacttgatttttctggcaatcaatcaaagagtttcttaagaaggctactttccaatgacatagaaaagttaaaagaaagctcagatgggctttattccgccatgcttaacgataaaggttacgtattagatgatttgattgtttataaaatgaaatttggatatagattaatcgtcaactgtgcaactagaaataaagacattagttggataaatgaaaatctcataaattgggatgtgtctatggaggaaagaccagatttaagtatcttgtctgtacagggaccaaaaaccaatgaagtcttatctagtataaaaaatgatttatttataaatagtttaaacaggcgccctttctctggtgcctacatggatcaaacgcttgttacaagaactggctatacaggcgaaaaaggagttgaagttgttctgcctgatgaagaagctagagtcttatgggaagaacttttaagtgcaggggcatatcccataggcttgggtgctagagacacattaagacttgaagctggttttaacttatatggaaatgaaatggatgaaacaatttctcccttagagtgcaatatggcctggacagttgatcttgaagatatgaatagaaatttcataggaaaatctagttatatagataaaaagaaacaagcaagtcatagcatccagaaaggtctaatatttgaagaaaaaataattgtcagacctggccagaatatacattttgaagaaaatggctcctatcaaggtacagttactagtggaagttactctccaacgctgaaaaaacctatagctttagctagaatgtctatgaataacaatgattattgctatgctcaagttagaggaaagaaaataagagctaaaattactaaaccaaaatttttaaatctctaag

SEQ ID NO: 228999 - DNA, 1063 bp, Unknown
  Bacterial polypeptide expressing nucleotide sequence isolated from the Sargasso Sea
atgaatagaacctttctatacgaatctcatctaaccttgggatctaaatttattaatttctctgagtgggaaatgcccatacattatggctctcagattaatgaacataattctgttagaaatagtgctggtatttttgatgtttcccatatgagtatctttgatttctatggtgttgaagcaaaagaatttatgagatatgtgttaacaaatgatgtgaacaaaattgacgacggttctgcactttatagtgtaataacgaataatgaaggcgggataatagatgatctaatcgtttataaatttaacaatgaaaaattcagagttgtatccaactgttctacttttgatgacgtaaataacttctttgaatcaaatattgtcaaatttgattgtgagttccttcataaaccaagtctaggtattattgctatccaaggaccaaaatctgagattactcttggaaacatacttggtctagacctttcaaattataaaagcttttcttttactgaaagaaatgaactttttatttcaagaaccggttatacaggcgaatacggttttgaggttattggtgagcctgaagaattacaaaacatttgggatttatgtatttctaagagcattcctccaattggtctgggtgcgagagacactttaagggtggaagctgggatgaatctcaatggtatggacatgaccataaagaacaacccttttgaatctaatttgggttgggttgtagattttaatgatattgaaagagacttcattgctaaggaaaatctcattgaaattaaaaaattaaataagcttaagcttattggtgttttactagatgaaaaaggaatcttgagaagtggtcaaaagattatcaaagatgattttgagggagaaatcacaagtggaactttttctccgtacatgaaaaaaagtattggcttagctagggttccttttgatatgaaggaaaatgccagtgtgcttataagaaataaccttttaaatgtaaggattgtatcgctaccttttgtaagaaaaggtaaaattatgatatgaa

SEQ ID NO: 229000 - DNA, 625 bp, Unknown
  Bacterial polypeptide expressing nucleotide sequence isolated from the Sargasso Sea
atggataaaaaaacaactcaacttcattcatttcacgaatctaacaacgcaaaatttatagattttggtgattggtctatgcctttttcatatgaaggcactttaaaagaacatgatatcgttagaaactcatccggtttctttgatgtatctcacatgggacgtttagaaataaattacacagaattagataaaatttctacattaatctgttccgacttaattaatattccggataacaaagcactttattcaatttttacaaatgaaaatggtaacgcattagatgatgtaattttttggaaatttgaagataaaattatcttaattccaaatgcatcaaatgaatctaaaataaaatctcatttacttgaccacaagataaattttattgataaatcaacagaaacagttttaatagctgtacaaggaccaaaaacaatcgaattaattaatgaaagatttgaaatacctgacaaatttagtactggtcaatctgaaaattatatttatgctcgtaccggttatacaggcgaagatggtattgagattatggttaataactctgatgcagattcacttataagttttcttacacaaaaaggcataaagccatgtgactagg

SEQ ID NO: 229001 - DNA, 1090 bp, Unknown
  Bacterial polypeptide expressing nucleotide sequence isolated from the Sargasso Sea
aatggaaaaaacagctttatataattttcataaaaactcaggagctaagtttgttcctttcgctggttacgagatgcctatccaatataaagatggcatagttaaagaacatataaatacaagacagttcgcaggtttttttgatgtatcacatatggggcagttttttgtcaatggaggccgatcaacagaacttagtttagaaaaaatcataccgttagattttaaagaaattaagatgaaccagtctaaatattcctttttaattaatgatgaaggaggagttatagatgatcttattataacaagagttgaaaatggttttaatattatattgaatgcagcttgcaaggataacgatattaaagaaattgcaaagtgcctaaattccgaaagtaaatacgaattaagaaaagatttatctcttatagctttacaaggtcctaaagcggaaacaattctagaatcaattattaaaggtgtaaaagaactcaaatttatgaatggtaattattttaaatttcttgaaaagaaaatttacataactcgttctggttatactggcgaagatggttttgagatttcagttccgaatgtaattgttgaaaatcttatcaaactacttacagataaagatgctaaacctataggtttgggagcaagagatacgcttagattagaagcaggtttatgtttgtatggtcatgaactaaatcaagagattaacccaatacaagcaaatttaaaatgggctatttcaaaaaaaagaagagaaactggaggattcaaaggctgggaaaatattaaaaaagatttacaaaacggggtatcaaaaattagagttggcattaaaccagcaggaaaaattatagcaagggagggtacaaaaatttattctaatactggtgaggaaataggaattatcacaagcggtacatatggaccaagcgtaaatagtccagttgccatgggatatgtaaaaagcaaattttcggaaattgataataaaattttaatagaggtaagaggaaaaaagcatgaggctaaagtatccaaattaccgttttataaaaagagttatgtcaaatag

SEQ ID NO: 229002 - DNA, 1096 bp, Unknown
  Bacterial polypeptide expressing nucleotide sequence isolated from the Sargasso Sea
atggctaataaaactgttctgtttaacaagcacttagaatcaaacgctaagatggtcgacttccacggttgggatatgcccctcaactatggttcacaaatcgaagaacaccacgccgtgcgtcaagacgcaggtatgttcgacgtgtcccacatgactgtggttgatgtgaccggaaccgacgcttgtgcattcctccgtaagttgctggcaaacgatgtggccaaacttaaagttcctggtaaagccttatacggcggcatgttagatgacaatgccggcatcatcgacgacctgatcacttactacctgaccgacactttctaccgtgttgtcgtcaacagcgcgacccgcgaaaaagacttagcgtggatcgccaaacaatcccaaggttttgatgtcactgtgactgagcgtcctgagctggcgatgatcgccgttcaaggtcctaacgctaaggccaaagccgccgccgtattcagtgccgatcaaaatgccgctatcgaaggcatgaaacctttcttcggtaagcaagctggttctctgtttattgccaccacaggttacacaggtgaagtgggttacgagattatcgtgccagaaactgaagccgaagccctgtggcaagctctgttagatcaaggcgttaaaccctgtggcttaggcgctcgcgatacattacgtctcgaagctggtatgaacctgtacggcttagatatggacgaaaccatcaacccgctggccgccaacatgggctggaccatcgcatgggagccaactgaccgtgactttatcggtcgtcaggcgcttgaagccctgcgcgatgcgggtaccgacaaattagtcggtctggtgatggaagaaaaaggcgtgttacgccatgatatgccagtatttttcaccgatgcagcgggtgttgagcagcaaggcgtgatcactagcggtactttctcgccaacattgggctattctattgcgatggcgcgtgttcctaactcgattggggatacggcggaagtcgaaatgcgtaaaaagcgcgtggctgttagagtagtggcgccaaactttgtgcgcaacggtaaacaagcattttaaa

SEQ ID NO: 229003 - DNA, 1081 bp, Unknown
  Bacterial polypeptide expressing nucleotide sequence isolated from the Sargasso Sea
gatgctgcacacccccttgtttgagctctgccgtgaagccggcggccgcatggtgccttttgccggctgggagatggccgttcagttcgaaggcttgatggccgagcacagggccgtacggctgcgcagcggtgtgttcgacatttcccacatgggtgtgctgacactccgtggctcaggcgtgaaagacaaacttcaaggcctggtgcccagcgacctgcagcgcattggccccggtgaagcccaatacacggtgctgctcaatgaagccggcggcatccgcgacgatctgatcgtttacgaccgcagcaacgatgaagtggtggtggtgatcaacgctgcctgcgccgacagcgacaccacctggatcaagcaacagctcgagccgcaaggggtgagcatcaccgaccgcaaagctgaaggagtgctgctggcgctccaggggcccgaggctgtgggacggcttgaacagctctgcggcgagagcctggcgggggtaccgcgctttgggcaccgcgatctgagcattcacggccaaaccgtgtttgctgcccgcaccggctacaccggcgaggacggctttgaactgttgctcacagcttcagccggccaagccctctggcgtcagctgctgaccgaaggtgtcgctccctgcggtttgggtgcgcgcgacagcctgcggctggaggctgccatgcatctctatggcaacgacatggatgccaacaccagcccactggaatgcagccttggctggctggtgcatctggagatgcccatcgactttgtaggccgcgaagccctcgagcgccaaaccgctcaaggcgtcagtcgcaagctggtgggactgcagctgcaaggacgcgccatcgcacgccacgactacccagtgctgcatagcggcgagcgggttggggtggtcaccagcggcaccttctcgccaacccttgagcaacccatcgctctggcctcggtgcgcgcagatctggctaagcgcggcacggaactcatggtggagattcgcggccgtcaggaaccggctgttgtggtgaagcgtcccttctaccggcggcaggggtaa

SEQ ID NO: 229004 - DNA, 1063 bp, Unknown
  Bacterial polypeptide expressing nucleotide sequence isolated from the Sargasso Sea
atgaatagaacctttctatatgaatctcatctgggcttgggatcaaaatttgttaatttctcaggatgggaaatgcccatacattatggctctcagattaatgaacataattctgtaagaaatagtgctggtatttttgatgtttctcatatgaatatctttgatttctatggtgtggaagcgaaagaatttatgagacatgtgttaacaaatgatgtgaataaaattgacgatggttctgcactttatagtgtaataacgaataatgaaggcgggataatagatgatctaatcgtttataaatttaacaatgaaaaattcagagtcgtatcaaactgttctacttttgatgatgtaaataacttctttgaatcaaatattatcaaatttgattgtgagttccatcataaaccaagtttaggcattctagctatccaaggaccagaatctgagattgctcttaaaaatatccttaaactagagctttcaaactataaaagtttttcatttactgaaaggaataaacttttcgtttcaaggactggttatacaggggaagatggttttgaggttattggtgagcctgaagaattacaaaacatttgggatttatgtatttctaggagcattcctccaattggtttgggtgcaagagatactttgagagttgaagctgggatgaatctcaatggcacagacatgaccataaagaataatccctttgagtctaatttaggttgggttgtcgattttagcgatatcgaaagagattttatagctaaagaaaagcttcttgaaattaaaaataccaacaagattaagcttgttggtgttttacttaatgaaaaaggaattctgagaagtggtcaaaagattatcaaagatgattttgagggagaagttacaagtggtactttttcgccgtatatgaagaaaagcattggcttagctaggataccgatggatatcagtgaaaatgcaaatgtgctgataagaaataagcttctaaatgtaaaaatattatcgctaccttttataagaaaaggtaaaattatgatatgaa

SEQ ID NO: 229005 - DNA, 649 bp, Unknown
  Bacterial polypeptide expressing nucleotide sequence isolated from the Sargasso Sea
tttgactgttggggatttaaaagcagcaaaaggaaaaagaaaatttacacaagttacagcaaatagtgttgaagaagctgaggcagctgaaaaggcaggatttgacatgattatatcaaatgcaaaaaatgtaatttctgtaagagaaggttcaaaaaatttatttttaacagctgctttggtgttgaatgagtttgtaactgcagaagatattatgcgtggagcttttaaagcattagagaatggcgcggatgcagttatgacgccaagaagtatggatatagttgaaatgttggctaaggaagatgttccagtaatggggcatttaggtttagttccaagaaaatctacttggattggtggcttgagagcagtaggcaaaactgctgatgaagcttacgaactttttcaaaagtttaaaagattagaagatgcaggtgctttttcggctgagtgtgaagtaatacctgaaaacgtaatgggtgaaatttcaaaacgtacagatatagttactgtttcattaggctcaggtaaaaacgctgatgtaatgtatttatttatggaagatatctgtggtgatacagaaaatcccccaagacattcaaaagcatatggaaatttactgagacttagaaatgaaattaaacta

SEQ ID NO: 229006 - DNA, 487 bp, Unknown
  Bacterial polypeptide expressing nucleotide sequence isolated from the Sargasso Sea
atgaatattaaaataaaaaaaattttaaaaaaaaagaataagtcaaaaattgtaagtttgactgcctattcaaaaaatatcgcgaaaattttagataattactgtgatattattttggttggtgattcaatggcaaacgttctatatgggctagatgatacacacaaaataaaccttaatacaataattaatcatactttgagtgttaaaaaaggagtgaaaaaatctttattagtagtagacatgcctaaaggatcttacaacaacaaaaaaaatgcaaaaaaaaatgcaagattaataattaaattgacaaaatgtgatgcagttaaactggaaagcaataataaaaattttgatataatagaagaccttgttaaggctaaaattccagttatggggcatataggttatacaccacaatataaaaaaaaatttagaatagaaggtcagtcaatctccggagcaaataaacttttaaaagaagcaa

SEQ ID NO: 229007 - DNA, 661 bp, Unknown
  Bacterial polypeptide expressing nucleotide sequence isolated from the Sargasso Sea
atgagtaaaaaaattaaaaaaattttattaaaaaaaaataaatctaaaatagtgagtctgactgcttactcaaaaagtattgcaaaaattttagataagtatctagatattgttcttgtaggtgactcgatggcaaatgttttgtatggacataaaagcacccataaaattagtttagaaaatataatacaacatacacaaagtgtaaaaatgggaattaaaaaatctttactcgtagttgatatgcctaaaggcagctataagaataaaaaaattgcagaaaaaaatgcaaaattagtaattagacgaactgcttgtgacgcaatcaagttagaaagtaataaaaaaaactttgagattattaaatttttagtgcaaaaaaaaattcatgtaatgggtcacattggatatacacctcaatttaaaaaaaaatttagagttgaagggcaaacaaaaaatgaatctttaaaacttttagaggaggctaaaactatagaaaaagctggagccttctctatagttttagagtgtctgacacctcacgcagcaaaattaattacaagtaatttgaaaatacctacaattggcattggttcctcatcttattgtgacggtcaaattttagttacagatgacatgctaggtttaagtggattttatc

SEQ ID NO: 229008 - DNA, 253 bp, Unknown
  Bacterial polypeptide expressing nucleotide sequence isolated from the Sargasso Sea
tttggaatgtgttgaaacttctttagcaaaacttgtaactcaaaacttaaaagttccaactattggaatcggagcctctaaatattgtgatggccaaatactagttgttgatgatctaattggattaaatccaatgaactacaagtttgtaaaaaaatatgccaatattaagagcgaaatttctaaagctgtttcaaattattccaaagaagtaagaaaaaaaagatttccaaataaaaaaaactcttattaa

SEQ ID NO: 229009 - DNA, 713 bp, Unknown
  Bacterial polypeptide expressing nucleotide sequence isolated from the Sargasso Sea
aatgaaaaagatttatacttgggccgctcaacctgccaacagaactcttacagttgatgatcttaaaaaagcaaaaggaaaaaaaaaatttactcaagtcacagctaatacaacagatgaagctgaggccgcagagaaggctgggtttgatatgataatctgcaatgcttttaatgtaaaacaggtgagagagggatcaaagaatctatttttaactgctgcactagcattaaataagtttgtcacttcagaagacataatgaggggagcgtttgaagccctagaaaatggagctgatgctgtaatgacacctagaagtatgaagattatagagatgcttgctaatgaggatgttccagttatgggacatcttggtttagttccaagaaaatctacatggattggtggtttaagagcagtaggaaaaaatagcgaagaggcacatgagctttttttaaaatttaaaagattagaagatgcgggagctttttctgctgaatgtgaagttattccagaaaatgttatgggagaaatctctaaaagaacaaatatagttacagtttctttaggttcaggaaaaaaagcagatgtaatgtatttgttcatgaaagatatatgtggagatactttaaatcctccaagacattcaaaagcttatggaaatttattaaaattaaaaaatgaaataaaaattgagagagttcgagctctta

SEQ ID NO: 229010 - DNA, 601 bp, Unknown
  Bacterial polypeptide expressing nucleotide sequence isolated from the Sargasso Sea
gctgctttagtgttgaatgagtttgtaaccgaagaggatattatgcgtggtgcttttaaagcattagaaaacggtgcagatgcagtaatgacaccgagaagtatggacatagttgaaatgttagctaatgaagatgtgccggtaatgggtcatttaggtttagttccccgaaaatcaacttggatcggtgggttaagagctgtaggaaaaactgctgatgaagcttacgatctttttcaaaaatttaaaagattagaagatgcaggtgctttttctgcagagtgtgaagttatacctgaaaatgtgatgagtgaaatttcaaagcgtacaaatatagttactgtttcattgggttcaggtaaaaatgctgatgtaatgtatctgttcatggaagatatctgtggtgatactgaaaatcctccaagacattccaaagcgtatggaaatttattaagattaagaaacgaaataaaattagaaagagtaaaagctcttaaggcatttaaaaaagattcaatgaatggaaaatttccaggtaaaaaacaatcatctaatttagaaaaaaaacaatttgaggaatttttaaaccagcttgattaat

SEQ ID NO: 229011 - DNA, 772 bp, Unknown
  Bacterial polypeptide expressing nucleotide sequence isolated from the Sargasso Sea
aactgttaatgatcttaaatcttctaaaggaaaaaaaaaatttactcaagttagggcaaatacatttgatgaagcttttgcagcagaagaagctggtattgatatgattgttgcaaatgcaagaaatattgttgaagttagaaaaggttcaagtaatttattcttaacagcgtcattattttgggaggaatttgttactaaagaagaaattttaaaaggtgcgtttaaagcattagaaaacggagctgatgcaatttttactccgagaaacactgaagttatagaaatgttatctaatgaagatattcctgtaatgggtcatcttggtttagtaccaagaaaatcatcttggtttggtggtttaagagctatcggtaaaactccaaaagaagcttatgagcttttcaaaaaatttaaagatttagaaaatgcaggagcctttgcagtagaaggtgaagtcatcccagaaaatgtaatgaaagaaatttcaaatagaacaagtatgataactgtgtctatgggctcaggtaaaaaaactgatgttatatatttatttatggaagatatttgtggtgatactccaataccacctaggcatgcgaaagcctacggaaatttattaaaacttaaacaacaagtaaatattgagagattaaaagcattaaaagcttttaaaaaagatgtattaagtggaaaattccctcaaaaaaaacaatcagtaaatataagcaaccaagaatttaaaaaatttttaaatttactgaattcatag

SEQ ID NO: 229012 - DNA, 193 bp, Unknown
  Bacterial polypeptide expressing nucleotide sequence isolated from the Sargasso Sea
atgccttcgaaaataagtaggcttatattaaaaaaaaaaaataagtcaaaaatagtctgcttaacagcctactcgaaaaatattgctgaagaagttgataagtacacagaccttgtactcgttggagattccttgggttctgttttgtataattttgacacaacaagaaaagtaaatctatctatgatgattg

SEQ ID NO: 229013 - DNA, 261 bp, Unknown
  Bacterial polypeptide expressing nucleotide sequence isolated from the Sargasso Sea
tcatcgtattagaatgtgttgaaagttctttagcaaagtttgtaactcaaaatttaaaggtaccaactattggaattggtgcttctaaatattgtgatggtcaaatattagtttttgatgatttaattggattaaacccaattaattatagatttgtaaaaaaatatgcaaatattagaaatgaaatttctaaggctgtttcaaattattcgaaagaagttagaaaaattaaatttcctaataaaaacaactcttattaat

SEQ ID NO: 229014 - DNA, 643 bp, Unknown
  Bacterial polypeptide expressing nucleotide sequence isolated from the Sargasso Sea
aatgaaaaatatttatacttgggcggctaatcctgcaaaaagaactgtcactgtagatgatattataaaagctaaaggaaaaaaaattcttacacaagtaactgcaaataattcattagaggcaaaagcagctgaagaagctggttttgacatgataataggaagtgcttcaaatgttaagaaggttcggggaggatctaaatctcttttttatacagcagcacttgaactacataattatcctacagccgaagatgtgttacgtggtgcctttaaagctttagagaatggtgctgatgcggttatgactgctagaagtatggatgttgttactatgcttgcaaaagaagatgttccagttatgggtcatttaggtttagttcctagaaaatcaacatggattggtggattaagagctgtaggtaaaactgctgatgaagcatacgaattatataaaaaatttaaacgtttagaagatgctggtgccttttcagccgaatgtgaagttattcctgaaaatattatgggggaaatatcaaaaaggacaagtattgttactgtatctcttggatctggaaaaaaagccgatgttatgtatctcttcatgaatgatatctgtggtgagcaagaaaagtcccctaga

SEQ ID NO: 229015 - DNA, 471 bp, Unknown
  Bacterial polypeptide expressing nucleotide sequence isolated from the Sargasso Sea
aatgaagaatatctatacatgggctgctaaaccagcaaagcgaactttaactgttggagacttaaaaacagctaaaggaaaaagaaaatttacgcaagttactgcgaacagtattgaagaagcagaggcagcagaaaaggcgggatttgatatgattatatcaaacgcaaaaaatgtaattcctgtaagagaaggttcaaaaaatttatttttaacagctgctttagtattaaatgagttcgtaactgcagaggatgttatgcgaggagcttttaaagctttagaaaatggtgcagatgcagttatgacacctagaagtatggatatagttgaaatgctagctaaggaagatgttccagtaatggggcatttgggtttggttccaagaaaatctacttggattggtggcttgagagcagttggcaaaactgctgatgaagcatatgatctatttcaaaaatttaaaagatt

SEQ ID NO: 229016 - DNA, 391 bp, Unknown
  Bacterial polypeptide expressing nucleotide sequence isolated from the Sargasso Sea
aatgaatgagaagattaaatatataatagctaaaaaaaataaatcaaaaatagtttctctaacagcttattcaaaaaatattgcgcagataattgacaaatacgtggatatgattttagttggagactccgtggcatcagttctttataattacgatacaacaagaaagatctcacttgatactatgatcgaacatgcaaaaagcgtaagaaagggtatagataaaagtcttatggtttttgatatgccgtataatacgtacagagataaaaaaattgctttaatcaatgctaaaaaaataattaaaaaaaccaaatcagatgcagtaaaacttgaaggtggttctaaaattaaagatatagtgaaacacttaataaaaaataaaattcct

SEQ ID NO: 229017 - DNA, 480 bp, Unknown
  Bacterial polypeptide expressing nucleotide sequence isolated from the Sargasso Sea
tgaaaaaaactaaatgtgatggagttaactttgaaggaggtaaaaagattattcctatagttaagaatttaactaaaaataaaatacctgttatgggccatgtaggaattttacctcaaacagataaaaaatttagttttaaaggaaaaaagcaaaaagagattaatagaattttaaacgatactaaacttttagaaaatgctggtgcgttttcaattgtacttgagtgtgtagaaacaaaactttcaaaacaaataactaaaaatataaagattccaacaattggaataggttcatcgttaaattgtgatggtcaggtattagtaattgatgacttaattgggatgagcgatagcaaatttaaatttgtaaaaaaatatgttgatttaagtaaagttattaattctgcagttaaaaaatataaaaatgaagtaaaaaacaaacaattccctaaagcgaaacactcctttgctaattaaa

SEQ ID NO: 229018 - DNA, 150 bp, Unknown
  Bacterial polypeptide expressing nucleotide sequence isolated from the Sargasso Sea
aatgaataaaaagattaaaaaaattcttaataaaaagaataaatcaaaaattatttgtcttacagcatactccaaaaatgttgccacaatacttgataaacattgtgatttagtattggttggggactcattaggatcagttttgtataa

SEQ ID NO: 229019 - DNA, 424 bp, Unknown
  Bacterial polypeptide expressing nucleotide sequence isolated from the Sargasso Sea
ttagtagataaaaaaataaatgttatttctcatataggagtgacaccacagagttataggaattttaataaaattaaagttttaggaaaaactaataaagaaaaacaaaatttattaaaattagcaaaagagtctgaaaaaattggagctaaagctgtattgttagaatgtataacagccgatacagctaaactgattacagaaaatatttctataccaacaataggtataggtgcttcaagatattgtgatggtcaagtcttagtatttgatgatttaataaatttaagtacaaatgataaaaaaccaaaatttgtaaaaaattattttaattttaataaaattgctagtaatatagttaaaaaatataatagagaagttaagcttaaaaaatttcctaatgctaaatttacttatatttaat

SEQ ID NO: 229020 - DNA, 211 bp, Unknown
  Bacterial polypeptide expressing nucleotide sequence isolated from the Sargasso Sea
atgaaaataacagtacctaaaatattagatttaaaatctgaacgtcagataacaatgatgacagcttatgactttcctacatcaaaggctgtttcagaagcacagatagacataatactcgtgggtgattcattagcccaagttgtattaggccacgatgataccttgtctgtaactatggacgaaatgctccaccatgttcaagctgtac

SEQ ID NO: 229021 - DNA, 736 bp, Unknown
  Bacterial polypeptide expressing nucleotide sequence isolated from the Sargasso Sea
aagaaatttacacaagttacggcaaatagtattgaagaagctgaagcagctgaaaaggcaggttttgatatgattatatcaaacgcaaaaaatgtaattcctgtgagagaaggttcaaaaaatttattcttaacatcagctttagtattaaatgagtttgtaacagcagatgatattatgcgtggtgcttttaaagcgttagaaaatggtgcagatgcaattatgactcctagaagtttagatgtagttgaaatgctagctaaggaagatgttccagtaatggggcatttaggtttggttccaagaaaatctacttggatcggcggcttgagagcagtaggcaaaactgcagatgaagcatatgatctatttcaaaagtttaaaagattagaagaggcaggtgctttttctgcagagtgtgaggttatacctgaaaatgtaatgggtgaaatttcaaagcgcacaaatatcgttactgtttcattaggttcaggaaaaaatgctgatgtaatgtatttatttatggaagatatttgtggtgatactgaaaatcctccacgacattctaaagcatacggaaatttgttaagactaagacatgaaattaaaattgaaagagtaaaagctcttaaagcctttaaaaaggactcaatgactggtaaatttcctggaaaaaaacaatcatctaatttagaaaaaaaacaatttgagaaatttttagatcaactagattagt

SEQ ID NO: 229022 - DNA, 445 bp, Unknown
  Bacterial polypeptide expressing nucleotide sequence isolated from the Sargasso Sea
aatgaacaaaaatatcagagatttattaaaaaaaaaaaatagagaaaagatagttagtttaacagcttactcaaaaaatatagctaaaattttagacaaacatattgatatcattttggtaggggactcaatggccaatgttctttatggtcataaaaatactcacaaaattaatttagaaaatattattcagcatactcaaagtgtaaaacaaggagttaataaatcattacttgtagttgatatgcctaaagggagttatcttaatcctaaaattgcagaaaaaaatgcaaaaagagttatttatttaacaaaatgtgatgcgataaaattagaaagtaataaaagaaattataaaataattaaatatttagtaaaaaaaaagatcccagtaatgggtcatattggctatacgcctcaattcaaaaaaaaatttaaagtagaa

SEQ ID NO: 229023 - DNA, 596 bp, Unknown
  Bacterial polypeptide expressing nucleotide sequence isolated from the Sargasso Sea
aatctggagactctctatggatcagtactatataattatgatacaacaagaaaagtaagtctggatatgatgatcgaacataccaagagtgccagaatgggggttaaaaaaagccttttagtaattgacctcccttataatacctacagaaataaatctgaagcacttaaaaattctaagagatcaatcaaagagacaaaatgtgatgctgttaaagttgagggagggacaagagtgaaagaaatcgtaaaacatttggttaaaaatagaatacccgtactaggtcatattggcataacaccacaaacaactaaaggaaaatttagatctaaaggtaagaatgaatcagaaaaaaaaaaacttttaaaggatgctcaagatttagagcaaagtggagcttttggaattgttttagaatgtatttacagcgatatctcaaaacaaataacaaacttaataaatataccaacaattggaattggtgcttcagtaaattgtgatggtcaggttcttgtaactgatgatttaattggtttgaacgaggctaaatttaggtttgtaaaaaaatttgggaatattaaaaaaaatataaaaga

SEQ ID NO: 229024 - DNA, 565 bp, Unknown
  Bacterial polypeptide expressing nucleotide sequence isolated from the Sargasso Sea
atgtcaaaaaaaattaaaaaattacttttaaaaaaaaacaaacaaaaaattgtaagcttaactgcctattcaaaaaatattgcaaaaattttagataaatattgcgatataattttagtaggcgactctatggcaaatgttttatataatatgaaagatactaatcaaattacgatagataatgttattcaacatactatgagcgttaggcaaggagtgaaaaaatctttattagttgtagatatgccaagaaaaacttgtaaaaaccttaccaaagcaaaaaaaaatgctaaaatgattttaaagcgaacaaaatgtgatgctgttaaagtagaaagcaataataagaattttaatattatcaaaggccttgttaattctaatataccagtcatgggtcatataggttatacccctcagtttaaaaaaaagtttaatgttgaaggaaaaaataaatttgaagaatacaaattaattaaagaggccattttaattgaaaaggctggggcattttctattgtattagagtgcataacaccttccgttgcaaaaaaaataactagta

SEQ ID NO: 229025 - DNA, 760 bp, Unknown
  Bacterial polypeptide expressing nucleotide sequence isolated from the Sargasso Sea
ttggggattttaaaagcagcaaaaggaaaaagaaaatttacacaagttacagcgaatagtgttgaagaagctgaagcagctgaaaaagcaggctttgatatgattatatcaaatgcaaaaaatgtaattcctgtaagaaaaggttcaaaaaatttatttttaacagctgctttggtgttgaatgagtttgtaactgcagaagatattatgcgtggagcttttaaagcattagagaatggtgcggatgcagttatgacaccaagaagtatggacataattgaaatgctggctaaggaagatgttccagtaatggggcatttaggtttagttccaagaaaatctacttggattggtggcttgagagcagtgggcaaaactgctgatgaagcgtacgaactttttcaaaagtttaaaagattagaagatgcgggtgctttttcggcagagtgtgaagtaataccagaaaatgtaatgggtgaaatttcaaagcgtacagatatagtcactgtttcattaggttcaggtaaaaacgctgatgtaatgtatttatttatggaagatatatgtggtgatgcagaaaatctcccaagacattcaaaagcatatgggaatttattaagacttagaaatgaaataaaactagaaagagttaaagctcttaaggcttttaaaaaagattcaatgaatggaaaatttccaggaaaaaaacaatcttctaatttagaaaaaaaacaatttgaggaatttttaggtcaactcg

SEQ ID NO: 229026 - DNA, 529 bp, Unknown
  Bacterial polypeptide expressing nucleotide sequence isolated from the Sargasso Sea
aataaaactgatgcgtataaaaatgctaaaatacttttaaatcactgtgaacctgatttaataaagatagaaattaataaaaataaattaattattttaaaacacttagttagtaaaaaattaaatatcatttctcacataggagttacaccacaaagttataagaattttaataacattaaaatttttggaaaaactttaaaagaaaaaaataatttattaaaattagcacaggaatctgaaaagcttggagctaaggctgttttacttgaatgtgtaacagcagacacagcaaaactaattacagaaaatatttcgatacctacaatcggtataggtgcttcaaaatattgtgatggtcaagttttagtatttgatgatctaataaatttaagtttaagtgataaaaaaccaaaatttgtaaaaaattattttaattttaataaaattgccagcaatgttgtgaagaagttcaatcaagaagttaagtttaaaaagtttcctggggctaaatttacttataattaat

SEQ ID NO: 229027 - DNA, 520 bp, Unknown
  Bacterial polypeptide expressing nucleotide sequence isolated from the Sargasso Sea
attagtaaaaagaatgcaaaattaattatgaaaaaaactggatgcgatgctgtaaaaattgagagcaataaaaaaaattttaagattattaatacactcgtaaatgctaaaattccagttatgggtcacataggttatacaccacagtttaaaaaaaaatttaaaattgaaggggacacacctaaaaaagctaatttgctattaaaagaagcactaaaaattgaggaagcaggtgccttttctattgttttagaatgtgttgcgcccctagcctcaaaactaataacaagtaaattaaaaataccaaccattggaataggttcatcaaccttctgtgatggccaagtattagtcacagacgatatgctaggcttaagtggattttatccaaaatttgtgaaaaaatatgtctcattagatagaataattgaaaaagctgttaaaaaatatactagagaggtaaaattaaaaaaatttcctaagtggaataatttcttaaatggatcaaaatctagataga

SEQ ID NO: 229028 - DNA, 443 bp, Unknown
  Bacterial polypeptide expressing nucleotide sequence isolated from the Sargasso Sea
tgatattattaaatcaattaaaattttaaggaaaaacaaaatacctgtaatgtctcatattggattacaacctcaaaaaatatctaatgaaaaaaaatttaaagttttaggaaaaaaaaatatagaggaaagaaaaattattaacgatcttatatctgtacaaaagggaggatcttttgctgtagttttggagtctgtaactgaaaatttagcaaaaaaaattaataaatttgccaagatcccagtcattggaataggagcctcaaaaaattgtgatggacaaatattggtcacagaagatttgttggggctatttgataagtcgccaaaatttgtaaaaagatatgaaaatttaagagttagaattacaaaagcagtaaaaaaatattatcatgatgtagtaaacgctaattttccaggtaaaaataatatttataaataaa

SEQ ID NO: 229029 - DNA, 607 bp, Unknown
  Bacterial polypeptide expressing nucleotide sequence isolated from the Sargasso Sea
atgaaattaataaataaaattaaaaaattaaaaaaattaaaaagaaaattagtttgtttaaccgcatactctaagcctacaggtaaaattttagatagatattgtgacatacttcttgtcggagactcattagcgacagctttttatggtatgaaaaatacaaaagctattgatttggaaaccatgatcaatcacgcaattagtgttaaaaaaaactctaaaagaagcgtgcttgtgtttgacatgccatttaaaacgtacagaaattttaaagaagcaaaaaaaaatattaaaacagttataaaaagaactaattgtgatgctgttaaactagaaagtaatggaaaaaattttaatataataaaaaaattagttaaatctggaattcatgttatgggccacattggttatactccacaatataaaaaatcatttaccccccaaggtttaaaaaaaaatgaagaaaaaaaactattatatgaagcaaagcaaatagaaagatctggagcatttgcaatagttttagaatgcgttaatttaaaaacagccaaaaaaataaccgagtcaattaatataccaactataggaataggatcctcaaactaag

SEQ ID NO: 229030 - DNA, 560 bp, Unknown
  Bacterial polypeptide expressing nucleotide sequence isolated from the Sargasso Sea
gatgaaaaaaaagattattagaattaaaaagctaaaatcaaagcgtaagcttgtttgtttaacagcttactctaaaccactcgctaaaatattagacaaacattgtgatatcattttagttggcgattcaattgcaacagcattttatgggatgaaaaatacatggtctctaagtttagagactataattaatcatgctaaagctgtaagagcgggtataaaaaaaagtacatttgtcgtggacatgccatttaatacttacaaaaatatttttgtggcaaaaaaaaatgttaaaaaagtttttaaacttacaaaatgtgatgctataaaaattgaaagcaatggtagaaatttcaaaattattagcaagctagtaaaactaggttatccagtcatgggtcacattggttttactcctcagtataaaaataaatttaaaccagaaggtataaataaaattcaagaaaataagcttattaacgaggcaaaaaaaattgaaaattcaggagctttttcgattgttttagagtgcataaatgcaagaactgctaaaaaattac

SEQ ID NO: 229031 - DNA, 317 bp, Unknown
  Bacterial polypeptide expressing nucleotide sequence isolated from the Sargasso Sea
acagagaaatgaaataatcagagactgtaaactaatagaaaatgcaggcgctttttcaatagttctagaatgtgttcaaagaaaattggctatggagattagcaattcaataaaaatacctactattgggattggatcttctaataattgtgatggtcaaattttagtaattgatgatgttttaggtttcaccgactccaaaatgaagtttgtaaaaaaatttattgatttaaaaaaaattataactaatgcagctaaaaaatttaatatagatgtaaaatctaaaagatttccaacaaaaaaacactcatactaaa

SEQ ID NO: 229032 - DNA, 478 bp, Unknown
  Bacterial polypeptide expressing nucleotide sequence isolated from the Sargasso Sea
aattttaaaaaaactggttgcgatgcaatcaaaattgaaaatacagtaaaaaatattaatatagttaatgctattgtgaaatctaatatccctgtaatgggccatatagggttcacacctcaatttaaaaaaaaatttaaagtagagggagaaaattcaaaagagttaaagaaattactaaatcttgcaaaaaaaattgaagaagcgggggccttttcaattgtgttagaatgcattaataaaaaatcatctaaaaaaattactcaagaaataaaaattccaactataggaataggatcgtcgcaatattgtgatggacaagttctggttacagacgatattttaggattaagtggattttatccaagatttgtaaaaaaatatgcaaatttagatcagattataaaaagtgctgtaaaaaattttaaaaaagaagtacaaaaaggaatttttccaaaaaatataaatagtttttaaa

SEQ ID NO: 229033 - DNA, 219 bp, Unknown
  Bacterial polypeptide expressing nucleotide sequence isolated from the Sargasso Sea
aatgaataaaaaaataaaaaaaattcttaataaaaaaaataaatcaaaaattgtttgtcttaccgcatattcaaaaaatattgctgaaatcttagataaacattgtgatttagtgctagtaggagactctttgggctcagtgctttacaattttaagtcaactaaagaagtgacactttcaacaatgattaaccattctaagagtgtaagacttggtgt

SEQ ID NO: 229034 - DNA, 310 bp, Unknown
  Bacterial polypeptide expressing nucleotide sequence isolated from the Sargasso Sea
agaaaacttttaaatgatgctcaagatctagaacaaagcggagcttttggaattgttttagaatgtatttatagcgatatctctaaacaaataacaaactcaataaatataccaacaattggaattggtgcttcagtaaattgtgatggtcaggttcttgtaactgatgatttaattggtttgaatgagactaaatttagatttgtaaaaaaatttggaaacattaaaacaaacattaaaagtgcagttataaaatataaaaattcagtaaaaaaaagaaaatttccctcaaaaaaaaacagctattaat

SEQ ID NO: 229035 - DNA, 542 bp, Unknown
  Bacterial polypeptide expressing nucleotide sequence isolated from the Sargasso Sea
ttttgaccttccttataacacttatagaaataaatctgaggcacttaaaaattctaagagagcaattaaagagacaaagtgcgatgctgtaaaagttgaaggaggaacaagagtaaaagaaatagtaaaacatttagtaaaaaatagaatacccgtattaggacatattggcgtaacaccacaaacaactaaaggaaagtttaggtctaaaggtaagaatgaatcagaaaaaagaaaacttttaaaagatgctcaagatctagaacaaagcggagcttttggaattgttttagaatgtatttatagtgatatttcaaaacaaataacaaactcaattaatataccaacaattggaattggtgcttcagtaaattgtgatggtcaggtccttgtaactgatgatttaataggtttgaatgagactaaatttaggtttgtaaaaaaattcgggaatatcaaaaaaaatattaaaggcgcagtaataagatataaaaactcagtaaaacaaaaaaaatttccaacaaaaaaaaatagctattaat

SEQ ID NO: 229036 - DNA, 586 bp, Unknown
  Bacterial polypeptide expressing nucleotide sequence isolated from the Sargasso Sea
aatgaaaaaaaaaatttttcgaataaaaaaacttaaatcgaaaagaaaattagtttgtcttaccgcatactccaaacccactgcaaaaatattagataaatactgcgatatcattcttatgggtgattctatcgcaacagctttctacggaatgaaaaatacaagatctattagtttagatactatgattaaccattcattagctgtaaaaaagggtattcaaaaaagtgtttttgtatttgatatgcccgttaatacatacaaaaatttcactcaggcaaaaaaaaacgcaagaataatccttaagactgttggttgtgatgcggtaaaaatagaaagcaatggaaaaaattttaatataataaaacatcttgtaaaatctggaattccagtaatgggtcatataggcttcactcctcaatacaaaaaaaattttacagcatctggattaaaaaaaaaggaagaggaaagattaattgaagagtcaaaaaagatagaaaaagctggagccttttctatagttttagaatgtattgccgaaaaagctgccaaaaaaataacaaagctaattaatatacctaccatt

SEQ ID NO: 229037 - DNA, 439 bp, Unknown
  Bacterial polypeptide expressing nucleotide sequence isolated from the Sargasso Sea
aaaaaaataattccgatagtcaaaaaactagttcaaaataaaatacctgttatgggacatgtaggaatattgcctcaaactgataagaaatttagatttaaagggaagaagcaaagagaaagcaatagaattttaaacgaaactaaacttttagaaaatgcaggggttttttctattgtattggaatgtgttgaaacaaagctttcaaaaaaaattactgatcaagtgaatataccaaccataggtataggctcatctgtaaattgtgatggtcaagttttagtagtcgatgatttaattggtttaagtcaaagtaaatttaaatttgttaaaaagtatattggtattaataaaattattgaaggtgcagttaaaaagtacaaatttgaagtattaaagaaacgatttcctaccagaaaacattcatttaataattaat

SEQ ID NO: 229038 - DNA, 361 bp, Unknown
  Bacterial polypeptide expressing nucleotide sequence isolated from the Sargasso Sea
tataaattttggcacctataccgttagagctaaagaagaagcagaagcagaaatgttaatggaagatgccttgttgcttcaagaaaaaggctgttttgcaattatattagaaaaagttcctgcaaaacttgcagaaaaagtagcaaaaaaactaacaattcctgtaataggtattggagctggtggaggagttgatggtcaagttttggttttacacgatatgttaggcatcactcaagaattttctccacgttttttaagaaggtatcacgatttgcataccgaaatgcttggtgcttttgaaaattacattaaagatgtaaagtccaaagattttcctaattcagaagaacaatactaa

SEQ ID NO: 229039 - DNA, 427 bp, Unknown
  Bacterial polypeptide expressing nucleotide sequence isolated from the Sargasso Sea
aatgaataaaaaaattaataaatttcttataaaaaaaaataaatcaaaaattgtttgtttaacagcttattcaaaaagtattgcaaaaattttagataaatacgttgacattgttttagtaggagactcagtagcaaacgttttatatggtcataaaaacactcacgcgataagtttaaaaaatattattcaacattccataagcgtaaaaatgggtgttaaaaaatcacttcttgtagttgatatgccaataggaagttataataatttaaataatgctaagaaaaatgccaaattaatattaaaaaaaactaaatgtgatgctgttaaaatagaaagcaataagaataatcataagattattaaatttttagttaaccataaaatacccgttatgggacacattggatttacacctcaatttaaa

SEQ ID NO: 229040 - DNA, 494 bp, Unknown
  Bacterial polypeptide expressing nucleotide sequence isolated from the Sargasso Sea
aatagtagagatgttggctaatgaagatgttccggttatgggacatcttggtttagttccaagaaaatctacgtggattggtggattaagagcagtaggaaaaaatagtgaggaagcatacgacctatttttaaaatttaaaagattagaaaatgcgggagctttttctgctgaatgtgaggttatcccagaaaatgtaatgggagaaatttctaaaagaacgaatatagttacagtttctttaggttcaggaaaaaaagcagacgtaatgtatttgttcatggaagatatatgtggggatactttaaatcccccaagacactcaaaagcttatggaaatttattaaaattaaaaaatgaaataaaaatcgagagagttcgagctctcaaggcatttaaaaaagattctatgactggaaaatttcctggaaaaaaacagtcttcaaatttaaataaaaatgagtttgagtcttttcttgataaactcgattaat

SEQ ID NO: 229041 - DNA, 390 bp, Unknown
  Bacterial polypeptide expressing nucleotide sequence isolated from the Sargasso Sea
ctgtaatgggccatataggtataacaccacaatctgtaagaggaaaatttagatacaaaggtaaaacagatatagaaaaaaaaaatttattaaaagattcaaaatcattagaaaatgctggagtatttgcaattgttttagaatgtattgaaaaaaaagtttcaaaaaaaattacagagtcaattaacattcctacaatagggataggttcatcaaatttttgtgatggtcagattttagttacagatgatttattgggactaacagataataaaataaaatttgtaaaaaaatatgctgatttgaaaagtaatgtaaggaaagcagttaaaaaatttaaattagatgttaagaaaggctcatacccatcaattaaatattcttattaaa

SEQ ID NO: 229042 - DNA, 229 bp, Unknown
  Bacterial polypeptide expressing nucleotide sequence isolated from the Sargasso Sea
tgccaagaaaatatcaaaaaaactaaaaattcccactataggaattggatcatctaaattttgtgacggtcaaatactagttattgacgatctaattggattaaatgaaacaaaagtaagatttgttaaaaaatttggtcaaataaaaaaaaatatctctagagcagctaaaaattttagcaaagaggtaaaaaataaaaaatatccttcaaaaagatattcttattaa

SEQ ID NO: 229043 - DNA, 304 bp, Unknown
  Bacterial polypeptide expressing nucleotide sequence isolated from the Sargasso Sea
attaatacgtgatgctcaagttttagaagaggcaggagcatttggtatagtcttagaatgcatttatagcgacgtttcaaaaaaaatctctaatttgattaaaattcctaccataggaattggtgcttccgtaaactgtgatggtcaagttttagtaacagatgatattttaggattgactaattcaaaagcaaagtttgtaaaaaaatatgcaaatatcagaaaaacaattaattcagcagtccacaaatttaagcgggaagttaaatttaaaaaatacccatcaaaaaagttttcctactaa

SEQ ID NO: 229044 - DNA, 253 bp, Unknown
  Bacterial polypeptide expressing nucleotide sequence isolated from the Sargasso Sea
tttagagtgtattaattcagacacagcaaaaaaaataactaatacaattaacattccaacaataggtataggttcctcaaattcttgcgatggacaaatattagttttcgatgatttaattggtttaagtggattttacccaagatttgtaaaaaaatatacaaatttgcaaaaaattattgataatgttttaaaaaaatttagaagagacgtaataagttctaggtttcctagtaaactacatacatactaa

SEQ ID NO: 229045 - DNA, 304 bp, Unknown
  Bacterial polypeptide expressing nucleotide sequence isolated from the Sargasso Sea
attgattgaagagtcaaaacaaatagaaaaagctggagctttttcaatagtgttagaatgtattgcagagaaaacagcaaaaaaaataacaaaaattattaatatacctactattggcatagggtcttcaaaattctgtgatggacaaattttggttacagacgatctaattggattgagtggtttttatcctaaatttgtaaaaaaatatttaaatttacaaaaaattttagaaaaaggtataagaagatttaaagacgatgtaataaaaggtaaatttccaaaaaaaataaatacatattaa

SEQ ID NO: 229046 - DNA, 598 bp, Unknown
  Bacterial polypeptide expressing nucleotide sequence isolated from the Sargasso Sea
atggtcttgcagtaaaaaatatattaataaatcactaacaattgttgatatgccatacaaaagttacaatacaaaaaaaaatgcgttaaaaaacgcaaaaaatattattaattttactaattgtgattttgtcaaaatcgaaactaatgaaaatgatgtaaaaatagttgaatatttatctaaaaataaaattaatgtagttgcacatataggtatcacacctcaacaatttactaattttaataaaataaaaagtgttggaaaaaacacaaaacaaatgatgtctttggttttacttgctaaaaaattagaagatgcaggagctaagtttattgtgttagaatgtattattgataagactgcaaaagaaataactaataatctaaaaatacctacaataggaattggcgcttcaaaacattgtgatgggcaggttttagtaattgatgacctaattaactttaactctggaaagaaaaaaataaagtttgtaaaaaaatatacaaatatagaacaatttataaataaagcggttaaaaaatttgttcaagaagttaaatgtagaaaatttccttcaaaaaaatattcatatagataa

SEQ ID NO: 229047 - DNA, 583 bp, Unknown
  Bacterial polypeptide expressing nucleotide sequence isolated from the Sargasso Sea
aatgcaaaagaaaataaagaaaattcttgataaaaaaaataaatcgaaaattgtttgtttaaccgcatattcaaaaaatattgcatcaattttagataaacactgcgatatagttcttgtaggagactcattaggctcagttctttataattacaaatctacaaaagaagtaactttgcaaacaatgataaatcattctaaaagcgtgaggcttggtgttaaagactccctgatgatagttgatatgccttacaatacttatcgcaattctaaagaggcacttaaaaatgctaaattgatgataaaaaaaacaaaatgtgatgctttgaaattagagggaggcaagaaagttatttctattgtaaaacatttggttaaaaacaaaataccaatcatgggacatattggaatacttcctcaaactgataaaaaattcacttataaaggaaaaaagttatttgaaagaaatagaattttagaggaagcaaaattattagaatcagcaggagtttttgcattagttttagaatgcattgaaacaaaactttcaaaggaacttactagaaagttaaatattcccact

SEQ ID NO: 229048 - DNA, 562 bp, Unknown
  Bacterial polypeptide expressing nucleotide sequence isolated from the Sargasso Sea
aatgaaaaatatttatacttggtcagccaaacctacacaacgaaatctcacagttgctgatcttaagtctttcaaaggaaaaaaaaaatttactcaagttagagcaaatacatttgatgaagcctttgcggcagagaaagctggtattgatatgattgttgcaaatgcaagaaatattattgaagttagaaaaggttcaaataatttattcttaacggcatcattattttgggaggaatttgttactaaagaagaaattttaaaaggtgcgtttaaagcattagaaaatggagctgacgcaatttttactccgagaaacactgaagttatagaaatgttatctaatgaagatattcctgtaatgggtcatcttggtttggtaccaagaaaatcatcttggtttggtggtttaagagctatcggtaaaactccaaaagaagctcatgaacttttccaaaaattcaaagatttagaaaatgcaggagccttcgcagtagagggtgaggttataccagaaaatgtaatgaaagaatttcagatagacaagcatgataactgtgtc

SEQ ID NO: 229049 - DNA, 662 bp, Unknown
  Bacterial polypeptide expressing nucleotide sequence isolated from the Sargasso Sea
taaatatcttgaaacccaaggagttaatattgtacttgtaggtgattctttggggcaggtcatcaaaggtgataaatctacacacaatgtttcatttgaagaaataacttatcacgcaaaatgtgtcacatcaggaactaagaaggcaaccgttatggttgatcttccaaaaaatacttataatactaaatcgactgcatgcaaaaattcaaaaaaattaataaataataacctagctgatcttataaaaatcgaagttaattctgataacttagatattgttaaatatcttgttcaaaaaaatatacctatatgtggtcatctaggccttttgccacaatcggtaaaaaataagtcaggatttagaaaatatggtaaaactaaaaaggaagctaactcgatatataataatgcaatattctgtgatgaaatcggagctaaaattattcttttagaatgtgtagaagttgcgttagctagaaaaatagcaaacacatgcagttgtccagttataggtattggctcaggcttaggtctagatggacaggttgctgtcatctatgatctcttagggattagttttaataaaattacatcacttactaaaaaaaatgaaaaagtcataaataaagtaatacaagcgttcataaaaaaaacctagg

SEQ ID NO: 229050 - DNA, 347 bp, Unknown
  Bacterial polypeptide expressing nucleotide sequence isolated from the Sargasso Sea
accacaaggtctcaaaaataacgaagaaataaaattaattaaagaagccaaaaatatcgaagaggccggagcttttgcaattgttcttgaatgtgtgaatgtggacctagcaaaaaaaattactaaaaacttgcacatacccactattggtattgggtcatccaagtattgcgatggacaaattttagtattagatgatttaattggtttaagtggtttttatcctaaatttgttaaaaaatatattagtttagataaaattttaaataaagtaatcaaaaagtttaggaacgatgttataagaaataatttccctaaaaattcaaacgcatatcaaataaaatgaa

SEQ ID NO: 229051 - DNA, 511 bp, Unknown
  Bacterial polypeptide expressing nucleotide sequence isolated from the Sargasso Sea
aatgagcaagcttattcttaaaaaaaaaaataagtcaaaaattgtttgtttaactgcttattctaaaaatatagcagaagagattgataactacacagatttaatacttgtaggcgattcaatgggttcagttttatataattttgaaaccacaagaaaagtaaatttatcaatgatgattgaacactctaagagtgtaagaaaaggagtaaaaaaaagtttaatgattgtagatatgcctttcaatacatataaaaataaatctcaagcgcttaaaaattgcaaaaaagtgatgaaagaaacaaaatgtgatggaataaaattagaaggaggaaaaaaaattatagatattgttaaacatttaattaaatttaaaattccagttatgggtcatataggtataatgccacaatctgtgagaggaaaatttagatataagggcaaaacaaaaatagaaaaaaaaaatttgttaaaagattctaaatcattagaagatgcaggagtatttgca

SEQ ID NO: 229052 - DNA, 451 bp, Unknown
  Bacterial polypeptide expressing nucleotide sequence isolated from the Sargasso Sea
ctagaaactatcattgaacatgcaaaaagtgtttctaaaggaataaaaagttctttgttagtagtagatatgcctaaaggaacatatagtaatattaaaaatgcaataagaaatgcaaaatatatcataaaaaagacaaagtgtgacgcagtaaaattagagagtaataataataattataacgtgattaaaaaattagtaagtttaaatattccagtgatggggcatgtaggattcactccacaatttaagaaaaaatttaaagtttatggatcaagctcgagcgaaagtaaaaaaattcaaaatgaggctaagaaaattgaaaaagcaggggcattttcaatagttttagaatgtgtgaagaaatctacttctaataagattactaaattactaaaaatcccaacaattggaataggatcttcaattgaatgtgacggtcaaattttgg

SEQ ID NO: 229053 - DNA, 572 bp, Unknown
  Bacterial polypeptide expressing nucleotide sequence isolated from the Sargasso Sea
aatgaataataaaataaagaaattaattaaaaaaaaaaatatatcaaaaattgtttgtctaactgcctattcaaaaaatattgcagaaataatagataatcatgttgatattgttttggttggagattctcttggttcagttctttataattacaacactacaagaaaagttaatttaaaaatgatgatagagcatacaaaaagtgtaaggatgggtataaaaaaaagtcttttaattatagaccttccttacaacacttatagaaataaaactgaagctctaaaaaactcaaaaaaagcaattaaagaaaccaagtgtgatgcagtgaaaatagagggtggaattaaagttaaagaaatagttcgccacctagtaagaaataaaatacctgtattgggccatattggtgtcacgcctcaaacagccaaaggaaaaattaaatcaaaaggtaaaactgaattagaaaaaaaacaattagttaaagatgcagtagcgctagaacaaaatggagcttttgcgatagttttagagtgcgtatattctgatattgcaaaaaaaattaccaatcaaa

SEQ ID NO: 229054 - DNA, 286 bp, Unknown
  Bacterial polypeptide expressing nucleotide sequence isolated from the Sargasso Sea
aaaaatagaaagttcaggagctttttccattgttttagaatgttttttttcccatgctgcaaaaaaaataacagaatcagttaatattcccaccattggcataggatcttctaatacctgtgatggacaaattttagttatcgatgatttaattggtcttagcggtttttatccaaagtttgtaaaaaaatatgtagatttagaaaaaatattaaataatgccataaaaaaattcagaactgatgttataagaagaaaatttccaactaaagcaaacacatattaa

SEQ ID NO: 229055 - DNA, 394 bp, Unknown
  Bacterial polypeptide expressing nucleotide sequence isolated from the Sargasso Sea
atgaacaaaaaaataaaaaaaattcttagtaagaaaaacaaatcaaaaattgtttgtcttactgcatattcaaaaaatatagctgaaattttagataaacattgtgatttagtgttagtaggagactcgttaggatcagtgctttataactataaatcaactaaagaagtaactctagaaacaatgatcaatcactcaaagagtgtaaggcttggagttaaaaaatctttaatggtgtttgatatgccgtacaatacataccgaaacccgaaagaagcgttaaaaaatgcaacacttgcaattaaaagaactaaatgtgatgctgttaaagtggaaggtggaaaaaaggtaatttctatagtcaaaaaattggttcaaaacaaaatacccgtta

SEQ ID NO: 229056 - DNA, 240 bp, Unknown
  Bacterial polypeptide expressing nucleotide sequence isolated from the Sargasso Sea
atggcaatatttcaaaaaaaataaccaacttaattgaaattccaacaattggaattggagcttcagtgcactgtgatggtcaagttttagttacagatgatatcttgggtttgaccaatgctaaaataaaatttgtaaaaaagtatacgaatgttaaaaaaataataaattctgctgtattgaaatttaaaaaagaggttaaatcaaaaaaatatccatcaaaaaaatattcttactaaa

SEQ ID NO: 229057 - DNA, 562 bp, Unknown
  Bacterial polypeptide expressing nucleotide sequence isolated from the Sargasso Sea
ttaaaagcagctttcagtgctctttcctctggagcagatgctgtcatgactgctagaagtttgtctgtaattagcttgcttgcaaatgaagatatccctgttatggggcacctaggtcttgtgccaagaaaatgtagctgggttggcggggtaagagcagttggaaaaacttcagatgaggcttttgaactttttcagcaatttcgaagacttgaagatgcaggtgctttttcagttgaagcagaagttattccagctcgtgttatggaggaaatttccaaaagaactggtcttgtaacagtttcaataggatcaggacaaggtggggatgtaatttatttgttcatggaggatatttgtggtgcacatgaaaaagcaccaaaacatgcgaggtcttttggaaatatttttaaattaaacgaattgattaaagaagagcgcctgtctgcattgaaaaaatttcagcattcatcaacaattggagaatatccttcagagaaggaaattgctaaaattgaggataatgagtatgaatcattcttaaaaaaattaaatagttaaa

SEQ ID NO: 229058 - DNA, 313 bp, Unknown
  Bacterial polypeptide expressing nucleotide sequence isolated from the Sargasso Sea
ttattaaagttagcaaaagaatctgaaaaacttggagctaaagctgtattgttagaatgtgtaacagccaatacagctaaactaattacggaaaatatttcgatacctacaataggtataggtgcttcaaaatactgtgatggtcaagttttagtttttgatgatttaataaatctaagtataaatggtaaaaaaccaaaatttgtaaaaaattattttaattttaataaagttgctactaatgtagttaaaaagtacaatagagaagttaaactaaaaaaatatcctagtactaaatttacttacaattaat

SEQ ID NO: 229059 - DNA, 313 bp, Unknown
  Bacterial polypeptide expressing nucleotide sequence isolated from the Sargasso Sea
atgaattataaaataaaaaaaataattaataaaaaaaaaaaatctaagattgtttgtctaacagcttattcaaaaaatattgcagaaatagtggacaaacatgccgatatagttttagtaggtgattcccttggctctgttctttataattacaacactacaagaaaagtaaccttagaaatgatgctagagcacacgaagagtgtaaggatgggagtaaagaaaagcctacttgtaattgacttgccatacaatacatacagaaataaatttgaggctctcaaaaattctaaaatagcaataaaagaaacta

SEQ ID NO: 229060 - DNA, 484 bp, Unknown
  Bacterial polypeptide expressing nucleotide sequence isolated from the Sargasso Sea
aatgttagcaaaagaggatgtaccagttatggggcatttaggtttagttcctagaaagtcaacttggataggtggattgagagcagttggaaaaaactcaaacgaggcttatgatttgtttcaaaaatttaaaagactagaagaagctggagccttttctgctgagtgcgaagtaatacctgaaaatgttatgggggaaatttctaaacgaactgatatagtcactgtttcacttggttcaggaaaaaaagcagatgtaatgtatttatttatggaggatatttgcggagatactattaaccctcctagacattcaaaagcatacggtaatttgttaaaacttagaaatgaaatcaaaaatgcgagagttaaagcattaaaagcttttaaaaaggattctattactggtaaatttccaggaaaaaaacaatcttccaatttaggaaaaaaagaatttgaaaattttctagacctattggattag

SEQ ID NO: 229061 - DNA, 636 bp, Unknown
  Bacterial polypeptide expressing nucleotide sequence isolated from the Sargasso Sea
tttacaattataatactactagaaaagttaatttaaaaatgatgattgagcatactaaaagtgtaagaatgggagttaaaaaaagtcttttagttattgatcttccttataatacatacagaaataaatatgaagcgcttaagaattcaaaaaaagcaataaaagaatcaaaatgcgatgcagtgaaactagaaggtggatcaaaagttaaagatatagttaaacatttagtaggtaataaaattcctgtattaggacatataggtattactcctcaaacaacaaaaggtaaatttaaatcaaaaggtaaaacaaatttagaaaaaaaaaagttacttagagatgcaaaagcactagaagatagtggagtttttggaatagttttagaatgtatttatgcagatgtgtcaaaaaaaattacaagtttaataaaagttccaacaataggcattggtgcttcagtatactgtgatggtcaagtcttagttacagatgacatattaggattgaccgatgtgaagatgaagtttgttaaaaaatacacaaacattaaaaaagttataaattcagcagtttctaaatttaaagaggatgtaaaatctaaaaaatatccttcaaaaaaatattcttattaaa

SEQ ID NO: 229062 - DNA, 359 bp, Unknown
  Bacterial polypeptide expressing nucleotide sequence isolated from the Sargasso Sea
aagtatggtaggaaaatttaagtctaaaggtaaaactgaaaaagaaaaaaatacacttattaaagactctaaaatgttggagtcgctgggtgtcttcgcaatagttttggaatgtgtaaattcaaatacggcaaaaaaaataactaattccataaaaattccaacaattggaataggatcttcttttcactgcgatggtcaaattcttgtaacagatgatttacttggtttgaatgaaactaaaatcaaatttgttaaaaagtttataaatattcgcaaaaatatagaacagggtattaaaaaatttaaatttgaggtaattaacaaaaaatatccatcaaaaaaatattcttactaaa

SEQ ID NO: 229063 - DNA, 563 bp, Unknown
  Bacterial polypeptide expressing nucleotide sequence isolated from the Sargasso Sea
agatgtgcttcgcggtgcttttaaggcgttagaaaatggagctgatgctgtaatgactgcgagaagtatggatgtggtaagtatgttggcaaaagaggatgttccagtgatgggtcatttaggattagttcctagaaagtcaacctggattgggggtttaagagctgttggaaaaaccgctaatgaagcttttgaactttttaaaaaatttaaaagattagaagatgctggcgctttcagtgctgaatgtgaagttatcccagaaaatgtgatgactgaaatttctaaaagaacaagtattaccactgtttcacttggatctggaaaaggcgcggatgtaatgtatctatttatggaagatatttgtggtgaaaacgaaaaattacctagacattcgaaagcatttacaaacttaagaaagcttagagaaaatattgaaatagagagggttaaagccttaaaattatttataaaagacagtatagaaggaaaatttcctacaaaagaaaattcagtaaatgttgatgaaaatgtattaaaagaatttttgagtaagatttaat

SEQ ID NO: 229064 - DNA, 204 bp, Unknown
  Bacterial polypeptide expressing nucleotide sequence isolated from the Sargasso Sea
aaggggtataaaaaaaagtttaaggatcgttgacatgccgcataacacctatcgaaatcctaaagaagctttgaaaaatgcaaaacagaaaatgaaaaaaactagatgtgatggagtaaaattagaggggggaaaaaaaatttatgaaacagttaaaactttagttaaaaataaaattccagttatgggtcatttagggttact

SEQ ID NO: 229065 - DNA, 201 bp, Unknown
  Bacterial polypeptide expressing nucleotide sequence isolated from the Sargasso Sea
aatgaaaaaaataaaaaaaataattaataaaaaaaataagtctaaaattgtttgtcttaccgcatattcaaaaaatattgcacaagaggtagacaaatatgttgatattgttttagtgggagactcactaggttcagtattatacaattattcaactactagaaaagttactctaactgaaatgataaatcattctaagaa

SEQ ID NO: 229066 - DNA, 367 bp, Unknown
  Bacterial polypeptide expressing nucleotide sequence isolated from the Sargasso Sea
taaaggaaaattgaaatctgaatggaaaaaatatatagatgatgctaaggcggttgaaaatgctggagcattcgctattgtgctagagggtatgactgagccattggcagctgaaataacatcaattctaaatataccaacaataggcataggagcatcgccaaaatgtaatggtcaaattctagttacagaagatatgcttggattaacaaatgttgcacctaaatttgtgaaaaaatacgccacattagatgaaaatataaatgatgccgtgcaagcgtatgtatacgaagttaaaaaaagaatttttccatctaaagagcatgtttatcatatgcagcccgagatagtaaaaaacaataagtag

SEQ ID NO: 229067 - DNA, 314 bp, Unknown
  Bacterial polypeptide expressing nucleotide sequence isolated from the Sargasso Sea
gggaggaactagagttaaggatatagttcgtcatctagtaaaaaataaaatacctgtattaggtcatataggtgtaactccacaaacagtaaaaggaaaatttaaatcaaaaggtaaaactgaaacagaaaagaaaaaattaattaaagatgctaaagcgctagaagaaagtggagcatttggaattgttttggaatgtatttacggcaatatttcaaaaaaaattacaaaattaattaaaattcctacaattggaataggggcttccgttcattgtgatggccaagttttagttacagatgatattttaggtt

SEQ ID NO: 229068 - DNA, 531 bp, Unknown
  Bacterial polypeptide expressing nucleotide sequence isolated from the Sargasso Sea
tttctcttcttgcaaatgaagatatacctgtaatgggacatttagggcttgttcctagaaaaagtacttgggtaggaggacttagagctgtcggaaaaaattcagatgaagcatttgatctgtttcaaaagttcaagagattagagaccgctggagctttttccgttgaagcagaagtgatacctggtctagtactcagggaaatttctaaaagaacttctctgataactgtgtctctcggatccggcaaagggggtgatgtaacatacttgtttatggaagacatttgtggtgagaacgcagaagcacctaaacatgcaaaatcatttggaaatttatacaaattgagagaaatgataaaagaagagaggataaaatctttaaaagaattccgtaaatcttctttggatgaaaagtttccttctgatcaagaaactgcaaaaataaacgatcgagaatttgaattatttatggaaaaactcgatactcaagtaagtaatcagatgcataataatccctatacaaactaat

SEQ ID NO: 229069 - DNA, 226 bp, Unknown
  Bacterial polypeptide expressing nucleotide sequence isolated from the Sargasso Sea
atgaacaagaaagtaaaaaagttcctcaataaaaaaaataaagccaaggttatatgtcttactgcctattcaaaaaatgtagcatcaattttagataaacattgcgatctagtattagtaggagactcacttggttcagttctttatgattataaatctacaaaacaagtaactttagatacaatgattaatcattcaaaaaggtgtaaggattggtgtaaagaaa

SEQ ID NO: 229070 - DNA, 385 bp, Unknown
  Bacterial polypeptide expressing nucleotide sequence isolated from the Sargasso Sea
atgggtcaccttggtcttttgcctcaaactactaaaggtaagtttaaatcaaaaggaggaactgatagagaaagaaaaaaattgataaacgattcagaactactccagaatagtggagtattttcaattgttttagaatgtataaaaacatctacagctaaaaaaattacggaaaaattgaagatcccaactattgggattggatcatctgttaattgtgatggtcaagttcttgtaactgatgatttaattggactaaataatactgaaataaaattcgttaagaaatttgttaatattaagaaatacctgcatctaggtttaaaaagatttgcttctgaagttaaattaaaaaaatatccttcaaaaaaatattcttattaaa

SEQ ID NO: 229071 - DNA, 541 bp, Unknown
  Bacterial polypeptide expressing nucleotide sequence isolated from the Sargasso Sea
aatgaaaaatatttatacttggtcagccaaacctacacaacgaaatctcacagttgctgatcttaaatctttcaaaggaaaaaaaaaatttactcaagttagagcaaatacatttgatgaagcctttgcagcagaagaagctggtattgatatgattgttgcaaatgcaaaaaatattattgaagttagaaaaggttcaaataatttattcttaacagcgtcattattttgggaggaatttgttactaaagaagaaattttaaaaggtgcttttaaagcattagaaaatggagctgacgcaatttttactccgagaaacactgaagttatagaaatgttatctaatgaagatattcctgtaatgggtcatcttggattagtaccaagaaaatcatcttggtttggtggtttaagagctatcggcaaaaccccaaaagaagctcatgaacttttccaaaaattcaaagatttagaaaatgcaggagccttcgcagtagagggtgaggttataccagaaaatgtaatgaaagaaatttcagat

SEQ ID NO: 229072 - DNA, 291 bp, Unknown
  Bacterial polypeptide expressing nucleotide sequence isolated from the Sargasso Sea
ctagaacagtctggtgcaagcatgctttgttagagtgtgttctttcgggaatagcaaaaaatataactgaatctctggagatacctgtaataggaataggagctggtgtcgaagtagatggtcaaataatggtaaattatgatctacttggtattactcaaatggaaaagccacctaaatttgtgaagaattatctgctagaagcatctagtattgaggaagccataaaaaattatgtctcagaagtaaaagaaaaaaaatttcctggtatagaacatagtttcaagtaat

SEQ ID NO: 229073 - DNA, 591 bp, Unknown
  Bacterial polypeptide expressing nucleotide sequence isolated from the Sargasso Sea
tatgaattaccatcggcaacgcatcacgataaaggatattgcgaccagaaaaggaggcactcccttggtatgccttacggcatatactgccccattcacacgagtgttggataaatatgccgatattttgctggtaggtgatacgctgggaatgcttatctatggtatggactctacacaggacgtgacggtagatatgatggtggcacacggtaaagcggtggtaaaagcctcaagccgatcttgtgtggtcattgatttgccttatggtagttacgaacaatgccctgaacaggcattggcaacggctaacagaatgatgaaggaaacgggtgcagatgcggtgaaacttgaaggcggtgctagcatgcaggaaacaatctcatttttagtcaagcattccattccggtgatggggcatatcggcttgttaccacaacatatttccaagaaagatgattttcgttacaaaggcaggcaggcggatgaagcccagcagattcttgcagatgcaaaagccgtggaggcggcgggggcattttcaatggtagtggaggcagtgccggcatcgctggcgcaagagacgacaca

SEQ ID NO: 229074 - DNA, 294 bp, Unknown
  Bacterial polypeptide expressing nucleotide sequence isolated from the Sargasso Sea
aatgaataaaaaaataaaaaaaattcttaataaaaaaaacaaatctaaaattgtttgtcttacagcttattcaaaaaatgttgctgaaattttagataatcattgtgatctggtgttggtaggggactctttaggatcggttctttataattataaatcaactagagaagtaactttagagacaatgattaatcattccataagtgtcaggtcaggagtaaaacaatcattaatggttgttgatatgccttataatacataccgtaatccaaaagaagcattaaaaaatgcgaa

SEQ ID NO: 229075 - DNA, 205 bp, Unknown
  Bacterial polypeptide expressing nucleotide sequence isolated from the Sargasso Sea
ttccctttgattggtataggcgctggaaattatgttgacggccaggttttagttttacatgatttaattggattaacaaatgaatttaatccaaggtttttaagaagataccttgatttaaatacctcgatcaaggatgctgtttccagatatattgatgatgttaagtcagaatcttttccgagcaaagatgaaatgtattagt

SEQ ID NO: 229076 - DNA, 444 bp, Unknown
  Bacterial polypeptide expressing nucleotide sequence isolated from the Sargasso Sea
tatgaaaaatatttatacttgggcggctaatcctgcaaaaagaactttcactgtaggtgatattatagaagctaaaggaaaaaaaattcttacacaagtaactgcaaataattcattagaggcaaaagcagctgaggaagcaggttttgacatgataataggaagtgcttcaaatgttaagaaggttcgggaaggatctaaatctcttttttatacagcagcactcgaactacataattatcctacagccgaggatgtgttacgtggtgcctttaaagctttagagaatggtgctgatgcagttatgaccgctagaagtatggatgttgttactatgcttgcaaaagaagatgttccagttatgggtcatttaggtttagttcctagaaaatctacatggattggtggattaagagctgtaggcaaaactgctgatgaagcata

SEQ ID NO: 229077 - DNA, 653 bp, Unknown
  Bacterial polypeptide expressing nucleotide sequence isolated from the Sargasso Sea
tatgagtgcagcgtgggccgaacgagctggtgtcgacattattggtattggcgacagtcttggaatgacgcttcatggtcatgcgaacactctctcaatctcagttgaccagatgatagatcacgccagagcggttcgccgtggtgcgcccaacacattttctctagcctcaatgccatatggttcctatgcgacaagggaacttgccgtaaaaaacggtttcaagttgatgaaaaaaggtggcgtggatgcgataaaactacagggtggccgagaaatatataaaattattgaagccgtagcgaatgccggcatacctgtaatgagccacgttggattagtgccacatcgagttcacctagctggtggctttaaaatgcagggcagaacatgtgaggaagctatcgcgattatagacaacgcaagagcaattgaagaggcaggcgccataggattggaaatagaggctgttcccgaggaggttggtcgagccgtaaatgatgccgttagcatctttacattttctattggaggtggatcaagtggcacatgccaactattgaatgggtatgatttgataggcgcttttgacaatttcagacccaagtttgccaaacgttacggtaatgtatcagaagtagccacaaaatcgt

SEQ ID NO: 229078 - DNA, 553 bp, Unknown
  Bacterial polypeptide expressing nucleotide sequence isolated from the Sargasso Sea
atgtctcaaaaaataaaaaagatattagcaaaaaaaaataaaaaaaaaattgtaagtttaacagcatattcaaaaagtattgcccaaattttagataaacattgcgatataattttagtaggagattctatggctaacgttttatacggaatgaaaaatactcataaaattacattaaatacaatcattcagcacagcattagtgttcgtaaaggaactaaaaaatctttattagttgttgatatgccaaaaggtacatataaaaatccctcacaggcaaaaaaaaatgcaaaattaatttttaaaaaaacaaaatgcgatgctgtaaaaatagaaagtaataataaaaattttaaaattatcagagaaataactaaagcaaaaatacctgtaatgggccacataggatatacgcctcaatttaaaaataaatttaaagtcgagggaaaaaagaatcaggaggttaaaaaattaattaaagaatcaattttaattcaaacaggctggtgctttttcgattgttttagagtgtattacaccaaacacagctaaa

SEQ ID NO: 229079 - DNA, 328 bp, Unknown
  Bacterial polypeptide expressing nucleotide sequence isolated from the Sargasso Sea
tttgaacaaaaaaaataaaagaaaattaatttgtttaacatcatatactaaatctatgtcaagaatattggataaacactgtgatttaattttagttggggactcactggcgaatgttttatatgggatgaaaactacccacgatttaaaattagaaacaatgattaaccatgcaaaatctgtaaaactcggaacaaaaaattctttacttgtggtagatatgcctaagaatagttataaaaacccaaatcaagctgttaaaaatgcaaagttaattataaaaaaaacagggtgcgatgcgattaaaattgaaaataatttatataat

SEQ ID NO: 229080 - DNA, 668 bp, Unknown
  Bacterial polypeptide expressing nucleotide sequence isolated from the Sargasso Sea
attgaaagaaccaatagagtactcgattttaggacaaggaaaaagattgagaccgttgctatgcatggagacatcaaaagttttcaatattccaagtgaaatatctatcttctgtgctattgcaattgaatgcattcatacctactctcttgttcacgacgatctcccttcaatggatgatgatgatatgcggcgaggtcaaccaactgtccacaaaaaatggaatgaagcaattgccattttagttggagactcacttcaaagtttgagttttgaggtgcttagtgatgacgaatttaaagtacgcgataaggtaaaaaataaattaatttatagtttggctgaaaagtccggcgcctccgggatggtattaggtcaggcattagatattgaagccgagtcttcccagaaacaacttgaaatggaccaaatttcgagtttgcaggaatataaaactgggaagttaatatcctggtcatgtgaagttggtccaataatagccggcgaaaacactgacccttttaccttatatgcctcgaagattggcctggcttttcaaattattgatgacatcttagatgttaccagctcttccaaaatcttaggaaaaaaggcaggtaaagataaagaaaaaaataaggctactttcgtttcaaaattgggtcttg

SEQ ID NO: 229081 - DNA, 652 bp, Unknown
  Bacterial polypeptide expressing nucleotide sequence isolated from the Sargasso Sea
tatgagaaaaaatattttaaatattctaaaaaaaaagaataaaacaaaaatagtttgcttaacagcgtattcaaaaagtgttgcaaaaatattagataaaatctgcgatatagtgttagtaggagattcaatggcccatgtattgtatggtcaaactaatacacattctgtgtctttaaaaaatattattcaacacactatgagtgttaaaaaaggaataaaaaaatccttgcttgtagtagatatgcctaaaaatagttacaacagcttaaaaaaagcaaagtttaatgcaaaaaagattttgaatttaacaaaatgtgatgcagttaaaattgagaacaataatggtaatttcaaaattttagaaggtttggtaaaagcaaaaattccagtaatggggcatataggatacacacctcaatttaaaaaaaaatttaaattagaaggtgactcaacttctaaaaaagaaaaattacttcaagaagctcaaagaatagaaaaagctggtgccttttcaattgtattagagtgtgtttcaccagctcctgcaaagcttataactcaaaaactatcaataccaactattggtattgtttcttcaaaattttgtgatggacaaattttggtaacagatgacatgttaggtttaagc

SEQ ID NO: 229082 - DNA, 209 bp, Unknown
  Bacterial polypeptide expressing nucleotide sequence isolated from the Sargasso Sea
tattaaagtgccaacaatagggattggagcttctaaatattgtgatggtcaaatattagtttttgatgatttaattggattaaatccaactaattacaaattcgtaaaaaaatatgccaaaattagagatgatatttctaaagctgtttcaaattattcaaaagaagttagaaaaattaaatttcctaataaaaaaaattctttttaat

SEQ ID NO: 229083 - DNA, 280 bp, Unknown
  Bacterial polypeptide expressing nucleotide sequence isolated from the Sargasso Sea
agaaaaagctggagtgttttctattgttttagaatgtgttgaaacctctttagcaaagcttgtaactaaaaaaattaaagtaccaacaattggaattggagcttcaaaatattgtgatggtcaaatactagtttttgatgatttaatagggttaaatccaatgaaatacaaatttgttaaaaaatatgccaatataagaaatcaaatttctaaagccgtttcaaattattcaaaagaagttagaaaaattagatttccaaatagaaaaaactcttactga

SEQ ID NO: 229084 - DNA, 778 bp, Unknown
  Bacterial polypeptide expressing nucleotide sequence isolated from the Sargasso Sea
gatgaataaaaagattaagcagattattaacaaaaaaaatagagcaaaaattatttctttaactgcctactcaaaaaatattgctcagataattgataagtacgttgatatgactttagttggagactcaatggcgtcagttttatataattataatactacaagaaaaatttcacttgatacgatgatagagcatgcaaaaagtgtaagaatgggagttaataaaagcttaatggtttttgatatgccttataatacttataaaaataaaaaattagcactttttaatgtaaaaaaagttttaaaaaaaactaaatcagatgcaattaaacttgagggaggttttaaaataaaagaaatagtaaagcatttagttaaaaataatattcctgtattgggacacttaggtattatgccacagtcagttagaggaaaatttaaatcaaaaggtaaaacagaaatagaaaaaaaaaaaattttaaaagaggctaaattacttgaacaattaggagtttttgcaatagttttagaatgtatagagaaatctttagcaaaaaaaattacaaatgaaataaaaatcccaacaattggtataggttcctcagctaattgtgatggtcaaattttagtaactgatgatgttatcggtctgacaaatactaaaattaaatttgttaaaaaatatatgagcatttctaaaaatattggaaatgctgtcaaaagatttaaacaagaagtacagctaaaaaaatatcctaataaaaaatactcttattaa

SEQ ID NO: 229085 - DNA, 817 bp, Unknown
  Bacterial polypeptide expressing nucleotide sequence isolated from the Sargasso Sea
aatgaaaaatatttatacatgggcagctaaaccagctaagagaacagtaacagttggagatctgaaagctttaaaaggtaagaaaaaatttactcaagtaactgcaaatagcactgaggaagcttcggctgcagaaattgcaggttttgacatgataatatcaaatgctaaaaatgttgaacaagtaagacaaggatctaaaaatttgtttttaacagccgcattagttttaaatgagttcgttacaaaagaagacataatgaggggggcattcaaggctcttgagaatggagctgatgcagtaatgacacctagaagcatggatatagttgaaatgttagcaaaagaggatgtaccagttatggggcatttaggtttagttcctagaaagtcaacttggataggtggattgagagcagttggaaaaaactcaaacgaggcttatgatttgtttcaaaaatttaaaagactagaagaagctggagccttttctgctgagtgcgaagtaatacctgaaaatgttatgggggaaatttctaaacgaactgatatagtcactgtttcgcttggttcaggaaaaaaagcagatgtaatgtatttatttatggaggatatttgcggagatactattaaccctcctagacattcaaaagcatacggtaatttgttaaaacttagaaatgaaatcaaaaatgcgagagttaaagcattaaaagcttttaaaaaggattctattactggtaaatttccaggaaaaaaacaatcttccaatttaggaaaaaaagaatttgaaaattttctagacctattggattag

SEQ ID NO: 229086 - DNA, 778 bp, Unknown
  Bacterial polypeptide expressing nucleotide sequence isolated from the Sargasso Sea
atgaataagaagataaaagatataatagcaaaaaaaaataaatcaaaaatagtttctctaacggcctattcaaaaaacattgcacagataattgatcaatatgttgacatgacgttagttggagattcagtggcatcagttctttataattataatacaacaagaaaaatttcacttgatactatgatcgaacatgcgaaaagtgtaaggatgggtgtacataatagtcttatggtttttgatatgccgtacaatacatataaagacaaaaaaaatgctttacttaatgctaaaaaaataattaaaaaaactaaatcagatgcagtgaaacttgaaggtggttctaagattaaagatatagtgaaatacttaataaaaaataaaattcctgttttaggacatctgggtattatgcctcaatcagtaagaggcaaatttaaatcaaaaggcaaaacagatagtgaaagaacaaaaattttaaaagatgctaaagtattagagaaactgggtgtttttgcaatcgttttagagtgtattgaaaaatctctagcaaaaaaaataactaatgaagttaaagttccaacaattggaataggctcttctgtttattgtgatggtcaaattttagtgaccgatgaccttattggtctaactaattctaaaattaaatttgtaaaaaaatatattaatatttctagtaatattgcaactgcagttaaaaaatttaaacaagaagttaaattaaaaaaatatcctactaaaaaatattcttattaaa

SEQ ID NO: 229087 - DNA, 610 bp, Unknown
  Bacterial polypeptide expressing nucleotide sequence isolated from the Sargasso Sea
tgatgaaactcatggggtagctgttaataaagaaattaagagaagtttaaaggttttagatatgccttataagacatataataataaaattgatgcatatagaaatgctaaaatacttttaaatcactgtaagcctgatttattaaagatagaaattagtgcaaaaaaattagtcgttttgaaacacttagtagataagaaaataaatgtcatttcccatataggagtaactccacaaagttataagaattttaataaaattaaagttttaggaagaactaataaagaaaaacaaaatttattaaagttagcaaaagaatctgaaacacttggagctaaagccgtattgttagaatgtgtaacagccaatacagctaagctaattacagaaaatgtttcgatacctacaataggtataggtgcttcaaaatactgtgatggtcaagttttagtgtttgatgatttaataaatctaaatataaatgataaaaaaccaaaatttgtaaaaaattattttaattttaataaagttgctactgatgtagttaaaaagtacaatagagaagttaaacttaaaaaatttcctagtactaaatttacttacaattaa

SEQ ID NO: 229088 - DNA, 817 bp, Unknown
  Bacterial polypeptide expressing nucleotide sequence isolated from the Sargasso Sea
aatgaaaaagatttatacttgggccgctcaacctgccaacagaactcttaccgttgatgatcttaaaaaagcaaaaggaaaaaaaaaatttactcaagtcacagctaatacaatagatgaagctgaggccgcagagaaggctggatttgacatgataatctgcaatgcttttaatgtaaaacaggtgagagagggatcaaagaatctatttttaactgctgcgctagtattaaataagtttgtcacttcagaagatataatgagaggagcgtttgaagccttagaaaatggagctgatgctgtaatgacacctagaagtatgaaaatagtagagatgttggctaatgaagatgttccagttatggggcatcttggtttagttccaagaaaatccacatggattggtggattaagagcagttggaaaagatagtgatgaggcacacaaactttttttaaaatttaaaagattggaagatgcgggagctttttctgctgaatgtgaagttattccagaaaatgttatgggagaaatctctaaaagaacaaatatagttacagtttctttaggttcaggaaaaaaggcggatgtaatgtatttgttcatggaagatatatgtggagatactttaaatcctccaagacattcaaaagcttatggaaacttattaaaattaaaaaatgaaataaaaattgagagagttcgagctcttaaggcattcaaaaaagattctatcgcaggaaaatttccaggaaaaaaacagtcttcaaatttaaataaaaaggagttcgaatcttttcttgataaacttgattaa

SEQ ID NO: 229089 - DNA, 373 bp, Unknown
  Bacterial polypeptide expressing nucleotide sequence isolated from the Sargasso Sea
atataaaaattttactaaaattcgttcagttggtaatactaacgatgaaaaagaaaaaatatgcaaacttgcacttaaattggaaaaggcaggttcaagtctaataatcctagaatgcatgaaagaaagtttagcaaaaaaaattactgaaattttaaaaatcccaacaataggtataggagcatctataaactgtgatgggcaagttttagtaattaatgacatattaaacactgatacaagttttaaaaaacctaaatttgttaaaacttatgctaaaataaataagataattgaaaatgccgttaagaaatattgccttgaagtcaaaatgaaaaaatttccaaagaaaaaaaatacctatttaatttaa

SEQ ID NO: 229090 - DNA, 643 bp, Unknown
  Bacterial polypeptide expressing nucleotide sequence isolated from the Sargasso Sea
tatgaaaaatatttatacttgggcggctaatcctgcaaaaagaactgtcactgtaggtgatattattgaagctaaaggaaaaaaaattcttacacaagtaactgcaaataattcattagaggcaaaagcagctgaagaagcaggttttgacatgatcataggaagtgcttcaaatgttaagaaggttcgtgaaggatccaagtctcttttttatacggcagcactcgagctacataattatcctacagccgaggatgtgttacgtggagcctttaaagctttagagaatggtgctgatgcggttatgactgccagaagtatggatgttgtttctatgcttgcaaaagaagatgttccagttatgggtcatttaggtttggttcctagaaaatctacatggattggtggcttaagagctgtaggtaaaactgctgatgaagcatacgaactatttaaaaaatttaaacgtttagaggatgctggggccttttcagccgaatgtgaagtaattcctgaaaatattatgggggaaatatcaaaaaggacgggtattgtaactgtatctctaggatctggaaaaaaagctgatgttatgtatctattcatgaatgatatctgtggagagcaagaaaagtcccctaga

SEQ ID NO: 229091 - DNA, 154 bp, Unknown
  Bacterial polypeptide expressing nucleotide sequence isolated from the Sargasso Sea
atgactaaaaaaacaattaaagctatacaacaacaaaagggagtaaaaaaaattacatgtttgaccgcttatacttctgctgttgctaaaatcattgataattatgtagatattgttttagtaggtgattctttgggatcaacaatttatggaa

SEQ ID NO: 229092 - DNA, 772 bp, Unknown
  Bacterial polypeptide expressing nucleotide sequence isolated from the Sargasso Sea
tttgactgttagggacttaaaagcagcaaaaggaaaaagaaaatttacacaagttacagcgaatagtgttgaagaagccgaagcagccgaaaaagcaggctttgatatgattatatcaaatgcaaaaaatgtacttcctgtaagagaaggttcaaaaaatttatttttaacagctgctttggtgttgaatgagtttgtaactgcagaagatattatgcgtggagcttttaaagcattagagaatggtgcggatgcagttatgacaccaagaagtatggatatagttgaaatgctggctaaggaagatgttccagtaatggggcatttaggtttagttccaagaaaatctacttggattggtggcttaagagcagttggcaaaactgctgatgaagcttacgaactttttcaaaaatttaaaagattagaagacgcaggtgctttttcggctgagtgtgaagtaatacctgaaaacgtaatgggtgaaatttcaaagcgtacagatatagttactgtttcattaggttcaggtaaaaacgctgatgtaatgtatttatttatggaagatatatgtggggatacagaaaatcccccaagacattcaaaagcttatggaaatttattgaaacttagaaatgaaattaaactagaaagaataaatgctctaaaggcttttaaaaaagattcaatgaatggaaaatttccaggaaaaaaacaatcttctaatttagaacaaaaacaattcgaggaatttttagaacaacttgattag

SEQ ID NO: 229093 - DNA, 532 bp, Unknown
  Bacterial polypeptide expressing nucleotide sequence isolated from the Sargasso Sea
atgaaaaatatttatacttgggcggctaatcctgcaaaaagaactgtcactgtaggtgatattataaaagctaaaggaaaaaaaactcttacacaagtaactgcaaataattcattagaggcaaaagcagctgaagaagctggttttgacatgataataggaagtgcttcaaatgttaagaaggttcgggaaggatctaaatctcttttttatacagcagcacttgaactacataattatcctacagccgaagatgtgttacgtggtgcctttaaagctttagagaatggtgctgatgcggttatgactgctagaagtatggatgttgttactatgcttgcaaaagaagatgttccagttatgggtcatttaggtttagttcctagaaaatcaacatggattggtggattaagagctgtaggtaaaactgctgatgaggcatacgaattatataaaaaatttaaacgtttagaagatgctggtgccttttcagccgaatgtgaagttattcctgaaaatattatgggggaaa

SEQ ID NO: 229094 - DNA, 781 bp, Unknown
  Bacterial polypeptide expressing nucleotide sequence isolated from the Sargasso Sea
ctgcaaaagaactgtcactgtaggtgatattattgaagctaaaggaaaaaaaattcttacacaagtaactgcaaataattcattagaggcaaaagcagctgaagaagcaggttttgacatgataataggaagtgcttcaaatgttaagaaggttcgtgaaggatccaagtctcttttttatacagcagcactcgagctacataattatcctacagccgaggatgtgttacgtggagcctttaaagctttagagaatggtgctgatgcggttatgactgccagaagtatggatgttgtttctatgcttgcaaaagaagatgttccagttatgggtcatttaggtttggttcctagaaaatctacatggattggtggcttaagagctgtaggtaaaactgctgatgaagcatacgaactatttaaaaaatttaaacgtttagaggatgctggggccttttcagccgaatgtgaagttattcctgaaaatattatgggggaaatatcaaaaaggacgagtattgtaactgtatctctaggatctggaaaaaaagctgatgttatgtatctattcatgaatgatatctgtggagagcaagaaaagtcccctagacatgcaaaagcttatacaaatttaaaaaagatgaaagatgaaattgaaattgaaagagttaaagccttaaaagcatttatcaaagatagtttagaggggaaatttcctgggcctgaaaattcagtaaatgttagtgaagaaattctagaaaattttaaaaagaaactttaa

SEQ ID NO: 229095 - DNA, 788 bp, Unknown
  Bacterial polypeptide expressing nucleotide sequence isolated from the Sargasso Sea
tgccagacgtaatttaactgtagctgacatcaaagcaaagaagggtaaagaggaaattacgcaagtgactgcaaatactgctgatgaagctcatgcagcaggagaagcaagtattgatatgcttatttgtgattctaaaaatgttgagatagttcgtaaaggcaatagtgaactgtttttaacagcggctcttgtaataccggaatatccaactgactcagatttattaagaggggcatttaaggccctagcgctaggggctgatgctgtcatgactgcaaggagtatgtcaattgtttctcttcttgcaaatgaagatatccctgtaatgggacatttagggcttgttcctagaaaaagtacctgggtaggaggacttagagctgttggaaaaaatgcagatgaagcattagatctgtttcaaaaattcaagagattggagaacgctggggctttttccgttgaagcagaagtgatacctggtccagtactcagtgaaatttctaaaagaacttctctgataactgtgtctctcggatccggcaaagggggtgacgttacgtacttgtttatggaagacatttgtggtgagaacgcagaagcacctaaacatgcaaaatcatttggaaatatttacaaattgagagaaatgataaaagaagagaggataaaatctttaaaagaattccgaaaatcatctttggatgaaaagtttccttctgatcaagaaactgcaaaaataaacgatcgagaatttgaattatttatggaaaaactcgatacttaag

SEQ ID NO: 229096 - DNA, 618 bp, Unknown
  Bacterial polypeptide expressing nucleotide sequence isolated from the Sargasso Sea
tatgaaaaatatttatacttgggcggctaatcctgcaaaaagaactgtcactgtaggtgatattatagaagctaaaggaaaaaaaattcttacacaagtaactgcaaataattctttagaggcaaaagcagctgaggaagcagattttgacatgataataggaagtgcttcaaatgttaagaaggttagggaaggatctaaatctcttttttatacagcagcactcgaactacataattatcctacagccgaggatgtgttacgtggtgcctttaaagctttagagaatggtgctgatgcggttatgaccgctagaagtatggatgttgttactatgcttgcaaaagaagatgttccagttatgggtcatttaggtttagttcctagaaaatctacatggattggtggattaagagctgtaggtaaaactgctgatgaagcatacgaactatttaaaaaatttaaacgtttagaagatgccggggccttttcagccgaatgtgaagttattcctgaaaatattatgggggaaatatcaaaaaggacgagtattgtaactgtatctctaggatctggaaaaaaagccgatgttatgtatctattcatgaatgatatctg

SEQ ID NO: 229097 - DNA, 505 bp, Unknown
  Bacterial polypeptide expressing nucleotide sequence isolated from the Sargasso Sea
tatgaaaaatatttatacttgggcggctaatcctgcaaaaagaactgtcactgtaggtgatattattgaagctaaaggaaaaaaaattcttacacaagtaactgcaaataattcattagaggcaaaagcagctgaagaagcaggttttgacatgataataggaagtgcttcaaatgttaagaaggttcgggaaggatccaagtctcttttttatacggcagcactcgaactacatagttatcctacagccgaggatgtgttacgtggagcctttaaagctttagagaatggtgctgatgcggttatgactgccagaagtatggatgttgtttctatgcttgcaaaagaagatgttccagttatgggtcatttaggtttggttcctagaaaatctacatggattggtggcttaagagctgtaggtaaaactgctgatgaagcatacgaactatttaaaaaatttaaacaattagaggacgctggggccttttcagccagaatgtga

SEQ ID NO: 229098 - DNA, 136 bp, Unknown
  Bacterial polypeptide expressing nucleotide sequence isolated from the Sargasso Sea
atgttaccttctgaactagttaattataaaaaaaaatctcgcaaaatcattgcactcactgcatgggactccatatcaggatcccttgcagaacaagctaatgtagatctagtactagtaggggattcattaggca

SEQ ID NO: 229099 - DNA, 466 bp, Unknown
  Bacterial polypeptide expressing nucleotide sequence isolated from the Sargasso Sea
tatgaaaaatatttatacatgggatgcgaaacctgccagacgtaatttaactgtagctgacatcaaagcaaagaagggtaaagagaaattaacgcaagtgactgcaaatactgctgatgaagctcatgcagcaggagaagcaagtattgatatgcttatttgtgattctaaaaaagttgagatagttcgtaaaggcaatagtgaactgtttttaacagcggctcttgtaataccggaatatccaactgactcagatttattaagaggggcatttaaggccctagcgcaaggggctgatgctgtcatgacagcaaggagtatgtcaattgtttctcttcttgcaaatgaagatatacctgtaatgggacatttagggcttgttcctagaaaaagtacctgggtaggaggacttagagctgttggaaaaaatgcagatgaagcatttgatctgtttcaaaaattcaag

SEQ ID NO: 229100 - DNA, 817 bp, Unknown
  Bacterial polypeptide expressing nucleotide sequence isolated from the Sargasso Sea
aatgaaaaatatttatacttgggcagcaaagccagctaagagaacagtaacagttggagatctgaaagctttaaaaggtaagaaaaaatttactcaagtaactgcaaatagcactgaggaagcttcggctgcagaaattgcaggttttgacatgataatatcaaatgctaaaaatgttgaacaagtaagacaaggatctaaaaatttgtttttaacagccgcattagttttaaatgagttcgttacaaaagaggacataatgagaggagcattcaaggctcttgaaaatggagctgatgcagtaatgacacctagaagcatggatatagttgaaatgttagcaaaagaggatgtaccagttatggggcatttaggtttagttcctagaaagtcaacttggataggtggattgagagcagttggaaaaaactcaaacgaggcttatgatttgtttcaaaaatttaaaagactagaagaagctggagccttttctgctgagtgcgaagtaatacctgaaaatgtcatgggggaaatttctaaacgaactgatatagtcactgtttcacttggttcaggaaaaaaagcagatgtaatgtatttatttatggaggatatttgtggagatactataaaccctcctagacattcaaaagcatatggtaatttgttaaaacttagaaatgaaatcaaaaatgcgagagttaaagcattaaaagcttttaaaaaagattctattactggtaaatttccaggaaaaaaacaatcttccaatctaggaaaaaaagaatttgaaaattttctagacctattggattag

SEQ ID NO: 229101 - DNA, 682 bp, Unknown
  Bacterial polypeptide expressing nucleotide sequence isolated from the Sargasso Sea
tgaagaagctggttttgacatgataataggaagtgcttcaaatgttaagaaggttcggggaggatctaaatctcttttttatacagcagcacttgaactacataattatcctacagccgaagatgtgttacgtggtgcctttaaagctttagagaatggtgctgatgcggttatgactgctagaagtatggatgttgttactatgcttgcaaaagaagatgttccagttatgggtcatttaggtttagttcctagaaaatcaacatggattggtggattaagagctgtaggtaaaactgctgatgaagcatacgaattatataaaaaatttaaacgtttagaagatgctggtgccttttcagccgaatgtgaagttattcctgaaaatattatgggggaaatatcaaaaaggacaagtattgttactgtatctcttggatctggaaaaaaagccgatgttatgtatctcttcatgaatgatatctgtggtgagcaagaaaagtcccctagacatgcaaaagcttatacaaatttaaaaaagatgaaagatgaaattgaaatcgaaagagttaaagccttaaaagcatttattaaagatagtttagaggggaagtttcctgggcctgaaaattcagtaaatgttagtgaagaaattctagaaaattttaaaaagaaactttaa

SEQ ID NO: 229102 - DNA, 580 bp, Unknown
  Bacterial polypeptide expressing nucleotide sequence isolated from the Sargasso Sea
ttgactgttggggatttaaaagcagcaaaaggaaaaagaaaatttacacaagttacagcgaatactgttgaagaagccgatgcagctgaaaaggcaggctttgacatgattatatcaaatgcaaaaaacgttattcctgtaagagaaggttcaaaaaatttatttttaacagctgctttggtgttgaatgagtttgtaactgcagaagatattatgcgtggagcttttaaagcattagagaatggtgctgatgcagttatgacaccaagaagtatggacatagttgaaatgctagctaaggaagatgttcctgtaatgggacatttaggtttagttccaagaaaatctacttggataggtggactaagagcagttggtaaaacagcaaatgaagcttatgagttatttcaaaaatttaaaaggctagaagatgcaggagctttttctgctgagtgtgaagtaatacctgaaaacgtaatgggagaaatttctaaacgaacagatattgttaccgtctctttaggatctggaagaaatgcagatgtgatgtatttatttatggaagaatatttgtggtgat

SEQ ID NO: 229103 - DNA, 817 bp, Unknown
  Bacterial polypeptide expressing nucleotide sequence isolated from the Sargasso Sea
atgaaaaagatttatacttgggccgctcaacctgctaacagaactcttacagttgatgatcttaaaaaagcaaaaggaaaaaaaaaatttactcaagtcacagctaatacaatagatgaagctgaggccgcagagaaggctgggtttgacatgataatctgtaatgcttttaatgtgaaacaggtgagagagggatcaaaaaatctatttttaactgctgcgctagtattaaataagtttgtcacttcggaagatatcatgagaggagcgtttgaagccctagaaaatggagctgatgctgtaatgacacctagaagtatgaagatcatagaaatgctggctaatgaggatgttccagttatgggacatcttggtttagttccaagaaaatctacgtggattggtggtttaagagcagtaggaaaaaatagtgaagaggcacatgaactttttttaaaatttaaaagattagaagatgcaggagctttttctgccgaatgtgaggttattccagaaaatgtaatgggagaaatctctaaaagaacgaatatagttacagtatctttaggttcaggaaagaaagctgacgtaatgtatctgttcatggaagacatatgtggagatactttaaatcctccaagacattcaaaagcttatggaaatttattaaaattaaaaaatgaaataaaagttgagagagttcgagctcttaaggcattcaaaaaagattcaatggcaggaaaatttccaggaaaaaaacaatcttcaaatttaaataaaaaagagttcgagtcttttcttgataagcttgattaat

SEQ ID NO: 229104 - DNA, 259 bp, Unknown
  Bacterial polypeptide expressing nucleotide sequence isolated from the Sargasso Sea
gatgaacgcggagcgaaagaaactaaccatcccagatcttaagacgaaaaaaactgcgggcgaacggctggtaatggtcgccgtcggtgaggtgctcagcgccgcctgggcggaacgcgctggggtcgacatcctgggtatcggcgatagcctcggcatgacgctgtacggccatgagaacaccttagccatcactgtcgatcaaatgatcgaacacacccgcgcggttcgccgtggcgcaccgaatacctttacgata

SEQ ID NO: 229105 - DNA, 502 bp, Unknown
  Bacterial polypeptide expressing nucleotide sequence isolated from the Sargasso Sea
tatgtcaattgtttctcttcttgcaaatgaagatatacctgtaatgggacatttagggcttgttcctagaaaaagtacctgggtaggaggacttagagctgttggaaaaaatgcagatgaagcatttgatctgtttcaaaaattcaagagattggagaacgctggggctttttccgttgaagcagaagtgatacctggtccagtactcagtgaaatttctaaaagaacttctctgataactgtgtctctcggatccggcaaagggggtgacgttacgtacttgtttatggaagacatttgtggtgagaacgcagaagcacctaaacatgcaaaatcatttggaaatatttacaaattgagagaaatgataaaagaagagaggataaaatctttaaaagaattccgaaaatcatctttggatgaaaagtttccttctgatcaagaaactgcaaaaataaacgatcgagaatttgaattatttatggaaaaactcgatacttaa

SEQ ID NO: 229106 - DNA, 263 bp, Unknown
  Bacterial polypeptide expressing nucleotide sequence isolated from the Sargasso Sea
tgttttacttgagaaaataccaaatctgctttctaaaaaagttttctcaaaattaaacgttccaattataggaataggtgctggaaatcatgtagatggtcaggttctgtttttacaggatatgcttggaatgaataaggattttagtcccagattcttaagaagatatcttgatttagatactttaattagtaaagctgttaaaaaatattctactgatattaaaagtggagatttccctaacaaagaagagcaatactaac

SEQ ID NO: 229107 - DNA, 859 bp, Unknown
  Bacterial polypeptide expressing nucleotide sequence isolated from the Sargasso Sea
catgacggaaacaaatacaaaattaaccgtacctgacctaatcaaaaaaaaacaaaatcgcgaacgcgtggtgatggtagctgccgccgattttttgatggctcaatgggcagagcgctctggtatagattttatcggaatcggtgactccctggggatgacgttgtacggccactctacgactctccccatgaccgtggacaccatgatagaacatacaaaggccgtacgaagaggtgcccctaataccttaacaataactgccatgccctttggttcctatgctacgccggatattgctgttcagaacgcattaagaatgatgaaagaaggtggcgccgaagtagtgaaaatgcagggcgggcgtgaaaaatttgaaataattaaggcaattgctgacgctggtgttccagtaatgagccatgtgggaatgtgtcctcactttgtaaactcttacggcggctttaaacttcaagggcgtacggcggaggaagcactaaagatagtcgataatgctaaggctatagaagaagctggagccattgggatggaagttgaagcagttccacctgaagttggagaagccgttgagcaggcagtaaacatattcactttctcgattggagctggcggagcaagctgcggtcaacttttaaatggtgccgatctaattggttcttttgacagctttaagccaaaattcgctaaaaggtacggcaatgtcggcgaagtggctatgagagctatgtccgactatgctgaagaagtgagatcaggaacctttccggacgcagatcacgtctacaaaatgaaacccgaagaggctgaactattaaaaaaagcccttcaaaacgtctga

SEQ ID NO: 229108 - DNA, 427 bp, Unknown
  Bacterial polypeptide expressing nucleotide sequence isolated from the Sargasso Sea
aatgaaaaagatttatacttgggccgctcaacctgctaacagaactcttacagttgatgatcttaaaaaagcaaaaggaaaaaaaaaatttactcaagtcacagctaatacaatagatgaagctgaggccgcagagaaggctggatttgacatgataatctgcaatgcttttaatgtaaaacaggctagagagggatcaaagaatctatttttaactgctgcgctagtattaaataagtttgtcacttcagaagatataatgagaggagcgtttgaagccttagaaaatggagctgatgctgtaatgacaccaagaagtatgaagatcatagaaatgctggctaatgaagatgttccagttatgggacatcttggtttagttccaagaaaatccacatggattggtggtttaagagcagtaggaaaa

SEQ ID NO: 229109 - DNA, 1048 bp, Unknown
  Bacterial polypeptide expressing nucleotide sequence isolated from the Sargasso Sea
ttgataattttttggattggagaaatcaatctttactcagctgcaggtggctctcttgatccgtgggcatcaaatcaattaataagatttttattttttctacctttgttttttttagtaatcatgttggagccaaagtttatttataattttgcagagatttttttaattttagttttgattgggcttatcactacgttaatctttggttatacagggatgggcgctacaagatggatcagaattgctggatttaatttacaggtatcagaatttactaaaatagctttagtcatattcatggcaaaatactttcataaactcaacgcagaaaaaaccataggcttgtttaaatcaatactacctcttgttgtatcaataatatttttcatattagttgctatacaaccagatttgggtactgctgtaattattctagctttaggtcttgttgttattttttatgcaggtattaaactaatatatcctttattatctttaggcgttattttgtcaatgagtccaattttatggacatttttaaagccctaccaacaaaatagaattcaaattttcttaaaccctgaccttgaccctcttggaaagggatatcatattattcaatcgaagattgcaataggttctggcggacttaaaggtaatggttttctcgagggttcccaaagtagcctagattttcttccagaaaaagagacagattttgtttttgcaattttttctgagcagtttggtttcacaggatcaatattattaatttcacttttcttcatcatgtttttaattcctattttaaaaacatacaagttaacacaagtttttaataaaataatcttatttgtattatcttttaaaattttttttgaatttcttataaatatatcaatgactattggtatcttaccagtagttggagttgctttgccatttatgtcttatgggggaagttctttgttgagtaatttaattatttgtgcactaatactaaattttatgtctatcaacgaaaataagagaatgtttacatgat

SEQ ID NO: 229110 - DNA, 772 bp, Unknown
  Bacterial polypeptide expressing nucleotide sequence isolated from the Sargasso Sea
tttgactgttggggatttaaaagcagcaaaaggaaaaaaaaaatttacacaagttacagcgaatagtgttgaagaagccgacgcagctgaaaaggcaggatttgatatgattatatcaaatgcaaaaaatgtaattcctgtgagagaaggttcaaaaaatttatttttaacagctgctttagttttaaatgagtttgtaactgcagaggatattatgcgtggtgcttttaaagcattggagaatggtgcggatgcagttatgacaccaagaagtatggatatagttgaaatgctggctaaagaagatgttccggtaatggggcatttaggtttagttccaagaaaatctacttggattggtggcttaagagctgtgggtaaaacttctgatgaagcatacgagctttttcaaaagtttaaaagattagaagatgcaggtgctttttcagctgagtgtgaagtaatacctgaaaatgtaatgggagaaatttcaaagcgtacagatatagttactgtttcattaggctcaggtaaaaacgctgatgtaatgtatttatttatggaagatatctgtggcgatacagaaaatcccccaagacattcaaaagcatatggaaatttattgagactcagaaatgaaataaaactagaaagagtaaaagctcttaaggcttttaaaaaagattcaataaatggaaaatttccaggaaaaaaacaatcgtcaaatctagaaaaaaaacaatttgaggaatttttagaccaacttgattag

SEQ ID NO: 229111 - DNA, 1174 bp, Unknown
  Bacterial polypeptide expressing nucleotide sequence isolated from the Sargasso Sea
ttgaagaattttcgaatcacggatgatggtggtcaatttatcaatatcacgtttgatgtgcctattttacctggtgattatggagtgtttacgaaaaatggtgatgcatcagcaaatgggggtgttgatagtgattattcctatagtacttctagtttttcattaagcaatgcagatgatgaaattgcaatatacgatggaaatgattcgttggtgaaccgtgtggcgtatgatgatggggttacgtttcctgattcttctggtttttccatggaattgagggctccatattttgataatagcttgggttcgaattgggcaaattcctatgcaatctatggagaaggcgatcgtggtactccagggtatcaaaatgattcctattctggtaaaatttctgcttctcaatatgcatatgactttggaggtattgtggaaggaaacaatgctacatcctccatgcaaatttataatacgggtctgcgcaccttgatggtagattctctaacaaaccagttagcagattttattattactccatctagtgggcatatacttgtaggggattcgttagagatacaattacagtttgcccctacgggtcctggaagaaaatacgatactttacgagtgtacaatcaggacaacagcaatgggctgtttgaggtttctttgtatggtcttggaatcagttccgtagcggatattgtaatatatcttgatggagatgatagtgtttccagttatgaatatctatccacaagagttggtttcccgcgaaccgaaatttttcagattgccaatattggtaatactccgctggatgtagaagatattagcattgagggaggcggtggagcatttagtacggatgtgaataattggtctgggatagatctgtatgatacgattgatgtgccggtgcaatttaacccaccagcaaccggttcttattctgctacattaagttttacgagttcggatgcagatgaaggaatttatacggtggatctcagtggtgcagggtctttgtatctgaatcattatgttccattagagtatagttctatccaaagtgcaattaaatcttcgttttccaatgacactatcattgttggagaaggatcctatacagaatccattatatttcctgatcataatttggttattcgcg

SEQ ID NO: 229112 - DNA, 814 bp, Unknown
  Bacterial polypeptide expressing nucleotide sequence isolated from the Sargasso Sea
tatgaaaaatatttatacttgggcggctaatcctgcaaaaagaactttcactgtaggtgatattatagaagctaaaggaaaaaaaattcttacacaagtaactgcaaataattcattagaggcaaaagcagctgaggaagcaggttttgacatgataataggaagtgcttcaaatgttaagaaggttcgggaaggatctaaatctcttttttatacagcagcactcgaactacataattatcctacagccgaggatgtgttacgtggtgcctttaaagctttagagaatggtgctgatgcagttatgaccgctagaagtatggatgttgttactatgcttgcaaaagaagatgttccagttatgggtcatttaggtttagttcctagaaaatctacatggattggtggattaagagctgtaggcaaaactgctgatgaagcatacgaactatttaaaaaatttaaacgtttagaagatgctggggccttttcagccgaatgtgaagttattcctgaaaatattatgggggaaatatcaaaaaggacaagtattgttactgtatctcttggatctggaaaaaaagccgatgttatgtatctcttcatgaatgatatctgtggtgagcaagaaaagtcccctagacatgcaaaagcttatacaaatttaaaaaagatgaaagatgaaattgaaatcgaaagagttaaagctttaaaagcatttattaaagatagtttagaggggaaatttcctgggcctgaaaattcagtaaatgttagtgaagaaattctagaaaattttaaaaagaaactttaa

SEQ ID NO: 229113 - DNA, 462 bp, Unknown
  Bacterial polypeptide expressing nucleotide sequence isolated from the Sargasso Sea
acatttcgggcttaactccccaatcaaaaaacatgatgggtggatataaagttcaaggtaaaacattagagttggcaacagaactgttagaggaggcggtactactagaaacactgggatgtttttcaatggttcttgaaggagttccctcagttgttgcagaagtacttacagaaaaagtatctataccaataataggcataggtgctggtgctaatgttgatggacaggttttagtattccatgatcttataggaatgaagtctaaagaatatattgacgctaagtttgtaaaaagatatgcaaatcaacacaaagaagttgtaaaagctctagaaaattttaaaaaagaagtagaaaataaagcattcccaaccgaacaccactcatatgaagctggcaaaattactgaaaatgatgttaaagagtggaaaaaagaaattaaaaaaattctgtcatagt

SEQ ID NO: 229114 - DNA, 270 bp, Unknown
  Bacterial polypeptide expressing nucleotide sequence isolated from the Sargasso Sea
ggtgcttttgcattgttttagaatgcatttctaaaaaagctgcgcaaaagataacaaaaagtataaaaatacccactattggtattggctcatcatcagaatgtgatggacaaatacttgtaacagaagacatactgggtataagcggtttttatccaaaatttgttaaaaagtatttaaatttagaaaaattaataaaaaaagctgttaaaaaattctcaaatgatgttaagtctggaaaatttccgtcaaaaaaaaatagtttttaac

SEQ ID NO: 229115 - DNA, 495 bp, Unknown
  Bacterial polypeptide expressing nucleotide sequence isolated from the Sargasso Sea
aaaatgtaaaaaaaatcatgaaagaaacaaaatgtcatggagtaaaacttgaaggtggaaagaaaattaaaaatatagttcaacatttaataaaaaataatattccagttttgggtcatcttggaataatgccacaatcagtgaaaggaaatttcaaatcaaaaggaaaatctttaaaagaaaggaaacagttaatgaatgattctattcttcttgaaaaaataggggtttttggaattgttctcgaatgtgtagaaaaaagtcttgcaaaaaaaattactaataaaatttcaattccaaccattggtatcggatcctcaaatagttgtgacgggcaaattcttgttacagatgatattttgggattaacgcaatccaaaataaaatttgttaagagatatattgatttaagaggtcatatcagaaaagcaataaaacaatttaaaacagaagttaaaaacaaaaaatatccgagtaaaaaatattcctattaaa

SEQ ID NO: 229116 - DNA, 242 bp, Unknown
  Bacterial polypeptide expressing nucleotide sequence isolated from the Sargasso Sea
ttatagtgatatttcaaaaaaaatttctaaattattaaaaattccaactataggtatcggagcttcagtttactgcgatggacaggttttagttacagatgatattttaggtttaactgatgctaaaattaaatttgttaaaaaatatgtaaatatcaaaaaaattataaatgtagcagtttcaaaatttaaatctgaggttaaatcaaaaaaatatcctacaaaaaaatactcttattaga

SEQ ID NO: 229117 - DNA, 772 bp, Unknown
  Bacterial polypeptide expressing nucleotide sequence isolated from the Sargasso Sea
ttgactgtagcagatttaaaagcagtcaaaggaaaaagaaaatttacacaagttacagcgaatagctttgaagaagctgatgcggctgaaaaggcaggctttgatatgattatatcaaacgcaaaaaatgtaattcctgtaagagaaggttcaagaaatttattcttaacagcagctttagtattaaatgagtttgtaacagcagatgatattatgcgtggcgcttttaaagcgttagaaaatggtgcagatgcagttatgactcccagaagtatggatatagttgaaatgttagctaaggaagatgttccagttatggggcatttaggtttggttccaagaaaatctacttggattggtggcttgagagcagtgggcaaaactgcggatgaagcatatgatctatttcaaaagtttaaaagattagaagatgcaggtgctttttctgcagagtgtgaagttatacctgaaaatgtaatgggtgaaatttcaaagcgcacagacatcgttactgtttcactaggttcaggaaaaaatgctgatgtaatgtatttatttatggaagatatttgtggtgatactaaaaatcctccgcgacattctaaagcatacggaaatttattaaaactaagaggtgaaattaaaattgaaagagtaaaagcacttagagcttttaaaaaggactcaatgactggtaaatttccaggaaaaaaacaatcatcaaatttagaaaaaaaacaatttgagaaatttttaaatcaattagattagt

SEQ ID NO: 229118 - DNA, 1105 bp, Unknown
  Bacterial polypeptide expressing nucleotide sequence isolated from the Sargasso Sea
atgtttaaagaatttagaagtatatttaatttaaattggatttatatttttatccttttgataattttttggattggagagatcaatctttattcagctgctggcggttctcttgatccatgggcatcaaaccaattaataagatttttattttttctccctttatttttactagttatcatgttggagccaaagtttatttttaattttgcagagatttttttaattttagttttgattgggttaataacgacattaattttcgggtatacaggaatgggagctacgagatggataagaattgctggtttcaacttacaagtatcagaatttactaaaatagctttagttatatttatggctaaatattttcataaattaaatgcagaaaaaactataggtctttttaaatcaatattacctctcattgtatcggtaattttttttgttttggttgctattcaacctgatttaggcactgctgtaattattttagcattgggcctggtagttattttttatgcaggaattaaattaatttatcccttaatatcaataggtatcattttatcgataagcccaattttatggacttttttaaagccctaccaacaaaatagaatacaaatttttctaaaccctgatttggatccacttggaaggggatatcatattattcagtctaagattgcaataggttcaggtgggttaaaaggaaatggttttcttgagggttcacaaagtagtttagattttcttcctgaaaaagagacagattttgttttcgcaattttttctgaacagtttggttttacaggatcaattttgttgatttcattatattttatcatgtttttaatacccgttttaaagacattcaaactgactcaagtatttaataaaataatcttgtttgttttgtcctttaaaatttttttcgaatttctaataaatctatccatgacaatagggatcttgccagtggttggagtagctttaccatttatgtcttatggaggaagttctttgttgagtaatctaattatttgtgcactattgttaaactttatgtctatcaacgaaaaaaagagaatgttctcatgac

SEQ ID NO: 229119 - DNA, 1030 bp, Unknown
  Bacterial polypeptide expressing nucleotide sequence isolated from the Sargasso Sea
actgaactggtgtcttgccgaatgtgacagtacatttacttattataatgaattaccaaataatgtgaccattttagttggagattcttgcctatctaatgatgatgttgctgttttagatagtatagtgtctctaaatgaattagactatgattcccctcttgaattaggtacacagacctggtttaatggtcgcttacgctttttagtggcaggaaactatggtaatagctctggagttaatgacactatatatacactaccagaaaattttggtgaccttaatgaacttgcttcactttatctcgaatggaatagaatatcagaattgccagcatcatttagcaatttatctggtttattctctgtctatttaaacaataatattttatccacgatcgtagacagcataggcagcctttctaatctatattttttggacttaggatataattatctagaatcattacctgaatccatatgcaacttggagaacttagaatatttatggcttttcaataaccagcttacccagttgccagaatgtttttgtaatatggaattagattggaataataatgacaatggaggatttccatattttgcaataggtgctaattacttatgtgatagtgtggcaacctgcgtggcagagagtgataattttgaactgagccttgaccaattctattattcatttccagtattttctccacaggattgcgatagtactacaacgaataccgaaagctcattatacccttatcaatatcacgtttcagcgccctatcctaatccattcaacccaacggtaaagatcaatataaatattccatatgatcgcaaaatggacattcatgtatacaatagccttggtcaagaaaccagcgtcatatctcttaataaatattttaccacaggcacacactctgtatactggaatggtagtcaatatgcttcaggagtctattatattaaattctcggatggttttgaaactcaaatccgaaaaattatccttttaaaataa

SEQ ID NO: 229120 - DNA, 214 bp, Unknown
  Bacterial polypeptide expressing nucleotide sequence isolated from the Sargasso Sea
aaaaaactcaaaattcctactataggaattggatcttcaaaattttgtgatggccaaatactagttattgatgatctaattggattaaatgatacaaaagtaagatttgttaaaaaatttggtcaaataaaaaaaaatatttctaaagcagctaaaaattttagcagagctgtaaaaaataaaaaatatccttcaaaaatatattcttattaaa

SEQ ID NO: 229121 - DNA, 499 bp, Unknown
  Bacterial polypeptide expressing nucleotide sequence isolated from the Sargasso Sea
tatggatatagttgaaatgttagctaaggaagacgttccagtgatgggtcatcttggtttagttccaagaaaatctacttggattggtgggttgagggctataggcaaaactgctgatgaagcatatgaattatttcaaaagtttaaaagattagaagatgctggtgctttttcagcagagtgtgaagttatacctgaaaatgtaatgggagaaatttctaagcggactgatatagttacggtgtctctaggtgcaggcagaaatgcagatgttatgtatctatttatggaagatatttgcggtgatacagctaatcctccacgacattcgaaagcttatgggaatttattaaagcttaggaatgaaataaaagttgaaagagttaaggcactcaaagctttcaaaaaagattcaatggagggaaagtttcctggaaaaaaacaatcttctaatttagataaaaagcaatttgaagaatttttagatcaattaaactaa

SEQ ID NO: 229122 - DNA, 808 bp, Unknown
  Bacterial polypeptide expressing nucleotide sequence isolated from the Sargasso Sea
tgaacggatcaagcgtacttcagtgccagatatttttaataataagggtggcgtaccattagtatgtttaaccgcctatacgtaccctatggcaaaaatcctagataaacatgttgatattctattagtgggcgactcggttggagtagttttatatggaatggaaaatactcataatgttactttggaaatgataattggacatggtaaggcagtcgtaaaagggtctgaacacgcctgcgttatttgtgatatgccttttgcttcatatcaggagtcaccagagttagccttccgaaacgccgctaaagttattgctgaaacaggttgcgctggtattaagattgagggcggagtagaaatggcagaaactgttgagtttttagtaaaaaggggtattccagtgatgggtcatgtgggattaaaaccgcaatctatcaatactgttgggggttacaagtctcaaggccatagtgaagatgaagtattagctattcagagggatgcgaaagccataagtgaagccggtgcgttttctgtagtattggagtgcatggttgaagaggttgccgcagaggttactaaaaatattacggctgtcacgatcgggattggggcttctgcgagatgcgacgggcaagtattggttacagaagatatgctaggaatttttactgattttcagccaaaatttgtaaagcagtacatcgatctacaaaagcaaattgatgaagcagctcaattatatgctagagaagtaaaagatagaatatttccatcaagtaaacatgtttatcagaaaaaatag

SEQ ID NO: 229123 - DNA, 778 bp, Unknown
  Bacterial polypeptide expressing nucleotide sequence isolated from the Sargasso Sea
atgataaacaaaattaaaaaaattattttaaagaaaaataaatccaagattatttgcttaacatcttattctaaaaattttgcctcaattattgataaacattcagatataattttggttggtgactctcttgggtcagttctttataatcataataccactagaaaggttacacttaataatatgattgagcattctaaaagtgtgagaatgggagttaataaaagcttaatggtagtcgatatgccatttaaatcatataggaataaaattgaagcattaaaaaatgctagaaaaattattaaagccacaaaatgtgatgctattaaacttgagggtggatataaaattaaggaaataattaaacatttagtaaaaaataaaatttttgttatgggccacttgggagtactaccacagagcatctcagaaaaatttaaatctaaaggaaaatttaaaaatgaaagaaacaagttaataaaagatgcaaagctattagaatctctaggagttttttcaattgtattagaatgtattcattcaaatacagcaaaaataataacaaattcaattaaaattccaacaattggaataggatcttcctcaaattgtgatggacaagttcttgtgacagatgatttaatcggacttaatgaaactaaaataaaatttgtaaaaaaatttgttaacattagaaaagtaattgagattggaattaaaaaatataagtctgaggtaattagaagaaaatatccatcaaaaaaatattcatactaaa

SEQ ID NO: 229124 - DNA, 360 bp, Unknown
  Bacterial polypeptide expressing nucleotide sequence isolated from the Sargasso Sea
tatgaaaaatacagtacctaaaatagtaaatttaaagaatgaaagagtcatctctatgatgacagcatatgactacccttcagcaaaagcagtttcagaagcagagattgatattatcttagttggtgactcactagcccaagttgttcttggtcacgacgatactttatcagtaactattgatgaaatgttacatcatgttaaagcagttactaatgctaaaccaacatcacttgtagttgcagatatgccttacatgagttttcacagcacacctaaagaaacacttcacaatgcatcaagattcatacaagagggaaaagcagatgcagttaaattagaaggtggttctaaaagaaa

SEQ ID NO: 229125 - DNA, 475 bp, Unknown
  Bacterial polypeptide expressing nucleotide sequence isolated from the Sargasso Sea
catgaaaaaaactaaaagtgatggagtaaaactagaaggtggaaaaaaaattactagaataattaatactttagttaaaaataatatacctgtaatgggtcatcttggagtgctgcctcagtcagataaaaagtttaaatttaagggtgagaataaagtagaaaaagaaaatattttaagagacgctaaattattagaacagtcaggtgctttttcaatggttttagaatgtattgaaacttcattagcgaaacttgttacagatagtattggcattccaacaattggtataggtgcatctaagaactgtgatggtcagattttagtatttgacgatttaatagggctaaatcctattaaagttagatttgtaaagaaatacacaaatataaagagagagttatcaaaagcagtttctaaatatgcaaatgatgttaaaaaaagaaaatttccatcaaaaaaatactcttattaa

SEQ ID NO: 229126 - DNA, 336 bp, Unknown
  Bacterial polypeptide expressing nucleotide sequence isolated from the Sargasso Sea
actgcagggtgagcaagtggtttccagcagagcgaagaaggtgactacgcacatattgcaagaaatgaagcgttcgaatgagaaaatagcaatgctcaccgcctacgactattccctagcaaggcttgttgacggagccggagtggacgtgatactcgtaggcgactctgcttcaaacgtgatggcggggaatgatactacggtccccataacactggaacacatgatctaccacgctcagtgtgtcgtgaatgctgtggacagggccttggtagttgtggacatgccattcggcagctatcaaggcgattcgaagcttgcactggagagcgctat

SEQ ID NO: 229127 - DNA, 635 bp, Unknown
  Bacterial polypeptide expressing nucleotide sequence isolated from the Sargasso Sea
gatacgtttcacaacagctgtaaaaaatgcaaaaactgattcattaattgttgctgatcttccaattaattcctatgaaaatgaggattctgccattactaattcaaaaagacttgtacaagcaggggcacatgcagtaaaacttgaaggtggaaggaaggttgcagatattatcaaagctgtagttgattcaggaattccggttatgggacatttaggattgcttccacaaactgcagaaaaatattctgttcaagcaaagaagagcagtgatgcattaaatttgttaaaagatgcaaaaattttagaaaaagcaggagtgttcagtattgtttttgaaatggtcaccagtaatgttgcaaaaattattacagaaagtgtaaaagttccaacaataggtattggttcaggcataaattgtgatggtcaagtattggttgttcatgatatgttaggaatgtttgaaaaaataaagccaaaatttgcaaaaagatatctaaatttatcagaggatattagaaatgcaataaattcatacgtaaaagatgtaaaagaagagaaatttcctgaagaagaacatacgttctctatggaaaaagaagagttagaaaaattggagaaagagattggctaaa

SEQ ID NO: 229128 - DNA, 489 bp, Unknown
  Bacterial polypeptide expressing nucleotide sequence isolated from the Sargasso Sea
atgctagaaaagttataaatacagttggttgcgatgctgtaaaaatagaaagtaatggcagaaatttcagggtaatcaaaggacttgttgaatcaggcatacctgttatgggtcatataggatatacacctcaaaacaaaaataaatttaaaccacaaggaactaatctgaaagaaacaaaaaaattaatttttgaagcaaaaaaaatagaaaaagccggagcattctctatcgttcttgaatgtatagcgagaaatgctgcaaaacaaataacaagcttaataaaaattccaacaattgggataggatcatcaaatttttgcgacggtcaaattttagtgaccgatgatcttataggtttaagtggattttatcctaaatttgtaaaaaaatatttagatctagaaaagattctaggaaaaagtattaaaaaatttcgagatgatgtaagagtaggaaattttccaaaattaaataatacttattaaa

SEQ ID NO: 229129 - DNA, 226 bp, Unknown
  Bacterial polypeptide expressing nucleotide sequence isolated from the Sargasso Sea
aatataaaaattaaaaaaatattaaaaaaaaaaaataaatctaaaattatttgtttaacctcctattcaaaaaatatttctgaaattttagataagcatactgatataattttagttggcgactcacttggttcagttttatattccttcgatacgaccaaaaaagttagtctaaacatgataatcgagcattctaaaagcgttaggcaaggagtaaaaaaaagct

SEQ ID NO: 229130 - DNA, 262 bp, Unknown
  Bacterial polypeptide expressing nucleotide sequence isolated from the Sargasso Sea
atgaaatcgaaaataaaaaaaattttatcaaaaaaaggtaagtctccaattgtaactttaacagcatattctaaaaatatttcaaaaattttagacaaatattgcgacataattcttgtaggagactctttaggaaatgttttatatggtatgaaaaatacccatgaagtaactttggatatgatgatacggcatgcgtctagtgttaatttaggagttaaaaaatctaggggtatagtagatatgccaaaaaactcttaca

SEQ ID NO: 229131 - DNA, 577 bp, Unknown
  Bacterial polypeptide expressing nucleotide sequence isolated from the Sargasso Sea
aatgctttcaagaataagcaaattcactttaaaaaaaaataaatctaaaattatttgtcttacagcatattcaaaaaatattgcagaagaaatagataaatatacagatatgatactagttggcgactctttagggtcagttttgtataattataaaacaactagaaaagttaccttacaaatgatgattgaacatgcaaaaagcgttcgattgggaattaaaaaaagtttaatgattgttgatatgccttacaaaacttatcgaaataaatatgaagcattaagaaattgtaaaaaaatcatgaaagaaagtaaatgtgatggagtaaagcttgaaggaggaattaaacttaaaaaaataattcagtatttggtaaaaaataaaattcctgttatgggacatattggaattatgcctcaaacagtaagaggtaaatttagagttaaaggaaaatctaaaaaagaaaaaaatgaaatttttagagatgcaaaaactttagaaaatgtaggagcttttgctattgttcttgaatgtgtagaaaacaaactttctagagaaataacaaacaatattaaa

SEQ ID NO: 229132 - DNA, 420 bp, Unknown
  Bacterial polypeptide expressing nucleotide sequence isolated from the Sargasso Sea
tatgcttacaaaaacaagtaggcttgttcttaaaaaaaaaaataaatcaaaaatagtttgtttaactgcttattcaaaaaatatagcagaggagattgataacttcacagatttaatacttgtgggagattcattgggttcagttttatataattttgatactacaagaaaagtaaatttatcaatgatgattgagcactccaagagtgtgagaaaaggaattaaaaaaagtttaatgattgtagacatgccttacaatacatacaaaaataaaactcaagcacttaaaaattgtaaaaaagtaatgaaagaaacaaaatgtgatggaataaaattagaaggaggtagaaaaattttagaaattgtaaaatatttaattaaatttaaaatacctgtaatgggccatataggtataacacc

SEQ ID NO: 229133 - DNA, 251 bp, Unknown
  Bacterial polypeptide expressing nucleotide sequence isolated from the Sargasso Sea
catgaagttaaaaaacaaaattagaaaattctttaaaaattcacatcctttggttggccttacagcgtattcatacgatatggcaaaaatattagataaatacgtagattttatattagtaggagatagtttaggaatgactttatatggtatgaataatactagaaaagtaactttagacatgatgattaatcatggtaaagcagtcgtaaaagcagcaaaaaataccttggttattattgacttaccat

SEQ ID NO: 229134 - DNA, 534 bp, Unknown
  Bacterial polypeptide expressing nucleotide sequence isolated from the Sargasso Sea
atatgccttttaatacttatagaaatattaaagaggcaaaaaaaaatgctagaaaaatttttaaagaaactcattgtgatgctataaaattagaaagcaatggaaagaattttaatatactaaaaagtttagtaaaatccgggatgcctgttatgggacatataggttatactcctcaatacaaaggcaaatttaaaccccaaggtctgaacaaaggacaagaaagaaaattaattaatgaggcaataaaaatagaaagctcaggagctttttctattgttttggaatgtattagctacgatactgcaaaaaaaataacagagtcaattaatatacccaccattggaataggatcttccaatgcttgcgatggacaaattttagttattgatgatttaataggtcttagtggattttatccaaagtttgtaaaaaaatacgcagatctagaaaaaatactaaataatgctttaaaaagattcagaagcgatgttataagagctaaatttccgactaaagcaaacacatattaac

SEQ ID NO: 229135 - DNA, 337 bp, Unknown
  Bacterial polypeptide expressing nucleotide sequence isolated from the Sargasso Sea
ttaaggggtgagaataaagtagaaaaagaaaatattttaagagacgctaaattattagaacagtcaggtgctttttcaatggttttagaatgtattgaaacttcattagcgaaacttgtaacagatagtattggcattccaacaattggcataggtgcatctaagaattgtgatggtcagattttagtatttgacgatctaatagggctaaatcctattaaagttagatttgtaaagaaatacactaatataaagagagagctatcaaaagcagtttctaaatatgcaaatgatgttaaaaaaagaaaatttccatcaaaaaaatactcttattaat

SEQ ID NO: 229136 - DNA, 324 bp, Unknown
  Bacterial polypeptide expressing nucleotide sequence isolated from the Sargasso Sea
aatgagcaaaataaaaaaaataatttctaaaaaaaacaaaactaaaatagttagtcttactgcatattcaaaaaatattgcatctattttagataattattgcgatattatacttgttggagattctcttggatctgttttgtataattataaatctacgagagaagtaactttgaacacaatgattgaacattctaaaagtgtcagaatgggtataaaaaaaagtttaatgattgttgatatgccatataaaacttatcgaactcctaaagaggccttgaaaaatgcaaagcaaataatgaaaaaaacaaaatgtgacggagt

SEQ ID NO: 229137 - DNA, 402 bp, Unknown
  Bacterial polypeptide expressing nucleotide sequence isolated from the Sargasso Sea
aatgaatagtaagattaaaaaaattataaaaaaaaaaaataaatctaaaattatctgcttaaccgcttattcaaaaaattttgcagaagaagtggataaatatgctgatattactttagtcggagattcattgggatctgttttatataattataatacaactagaaaagttacattgaaaaatatgattgaacattcaaaaagtgttcgaatgggtactaaaaaaagtttaatggttgtggatatgccatacagaacttatcgtaacaaaaaagaagcacttaaaaattcaattaaagttatgagagaaacaaagtgtgatgcagtaaaattggaaggtggttttaatataaaagagataataaaatatttggtaaaaaataaaataccagttatgggtca

SEQ ID NO: 229138 - DNA, 446 bp, Unknown
  Bacterial polypeptide expressing nucleotide sequence isolated from the Sargasso Sea
taataataaaaactttaaaattataaaagcaattagaaaggctaaaatacctgtgatgggacatattggttttactccacaatttaaaaaaaaatttagagttgaaggtaaaaacaaaaaagaaattcgaaaactaattaaggaagcggtttcaatacaaaatgctggagcattttcagtagtcttggagtgtatcacaccaaatactgcaaaaataattacaaaacttttaaagataccaacaataggaataggctcatcctcatattgcgacggacaaattttagtaacggatgatatgttgggtttaagtggtttttatccaaaatttgtaaaaaaatatacaaatttaaacacaataattgaaaaagctgtaaaaaaatatagtaaagaagtaaaaaataaagtgtttcccaacaataagaattttttatatggaagatgaa

SEQ ID NO: 229139 - DNA, 757 bp, Unknown
  Bacterial polypeptide expressing nucleotide sequence isolated from the Sargasso Sea
attaaaaaaaggaaaaaaaaagattgtaagtttaacagcttattcaaaaaactatgcgaaaatactagatagatattgcgatattattttagttggagactcaatggcaaatgtcttgtacggcatgaaaaatactcataaaattactttagagactattattcagcacggtatcagtgtgagaaaaggggtaaaaaaatctttattagttgttgatatgcccaaaggaacatacaaaaatccgtctgaagcaagaaaaaatgcaaataagattgttaaaagaacaaattgtgatgctgtaaaaattgaaagtaataataaaaattttaaaataattaaagaaattataaaagctaaaatacctgtaatgggtcatataggctatacgccacaatttaacaataagtttaaagtgaaaggaaaaaataagaatcaagtcaaaaagttaattaaggaagcaacttcaattgaaaaagctggagctttttccatagttttagaatgtataacgccaaacacgtctaagataattacaaaattactaaaaatacctactgttggaattgggtcatcctcatattgtgatgggcaaattttagtgacagacgacatcctgggtttaagtggtttttacccaaaatttgtaaagaaatacattaatttaaatacagtaattgaaaaagctgtaaaaaaatatagtaaggaagttaaaaatagacgatttcccaaaaacaaaaattttttatatggaaaatga

SEQ ID NO: 229140 - DNA, 649 bp, Unknown
  Bacterial polypeptide expressing nucleotide sequence isolated from the Sargasso Sea
ttaggttcagttctttataattatgaaacaactagaaaagttactttaaataatatgatagaacattcgaaaagtgtgcgaatgggtgttaaaaaaagtttattggttgtggacatgccatacaaaacttatcaaaataaaaaagttgctttaaaaaattcaattaaagttattaatgaaacaaaatgtgatgcaataaaattagagggtggaaataaaattaaagatataattaaacaccttgttaaaaacaaaataccagttatgggtcatttaggtttgctgcctcaaagcgttagaggtaaatttaaatctaaaggaaaaataaaaagtgaaaaaaaacaattattgaaagattctaagctacttgaaaaacttggtgtgtttgcaatagtcttagagtgtgttgaaacatctacagctaaattaattactaaatctatcaaaattcctacaattggaattggatcatcagttttctgtgatggacaggtattagttacagatgatttattaggtttaaatgaaactaatataagatttgttaaaaaattttccaatttaaaaaaaaatataaatcaaggcttaaaaagatttaaaaaagaaattatattaaaaaaatatccatctaaaaaattttcttattaga

SEQ ID NO: 229141 - DNA, 703 bp, Unknown
  Bacterial polypeptide expressing nucleotide sequence isolated from the Sargasso Sea
aaaagttttgctgaagtaaccgataaatatgcagatataactttagtaggcgactctctaggatctgtattgtacaattacgacaccactaaaaaagttactttaaaccaaatgatagaacattctaaaagtgtaaggaaaggaataaaaacaagccttatggtggttgatatgccgtacaacacttatagaaataaaaaagaagcattaataaatgctaaaaaaataattaaaagtactaaatgtgatgccgtcaaaatggaaggtggtacaaaaataaaagatataactcaacatcttataaaaaataaaatacctttaatggggcatttaggtttacttccacaaacagcaggcaagttcaggtttcaaggtaagaataaatctgagaaaaacaaacttcttaaagaggccaaacttttggaaagtctaggtgttttttcaatgatccttgagtgtgttgaaacatcaacagcaaaagaaattaccaaaagtattaaaataccgacaattggaattggatcttctgtgcattgtgatggtcaggttttagtgacggatgacttattaggattaaatgaaaccaatataagatttgttaaaaaatttgctaatattaaatctgtaataaaaagtggccttaaaaaatttaagaaagaagtgacaaataaaaattatccatcaaaaaaatactcttattaaa

SEQ ID NO: 229142 - DNA, 601 bp, Unknown
  Bacterial polypeptide expressing nucleotide sequence isolated from the Sargasso Sea
aatgaaaaaaaaaattcttgatataaaaaagttcaagtttaaaaaaaaactagtctgtttgacagcatattcaaaaccaatctcaaaagttttagataaatactgtgatattattttagtgggagattctgttgctacggcattttatgggatgaaaaatacaagatacattagtttagaaaccatgatcaatcattcaatagctgtaagcaaaggaattaagcaaagcacttttgttgtagatatgccttttggtagctacaaaaatctaaaacaagcgaaaaaaaatgttaaaaaagtttttaaaaaaacccattgtgatgcagtcaaattagaaagtgatggtaaaaattttagtataataaataatcttgtaaaattaggatttccggttatgggccatatagggtttactccacaatataaaaaaaaatttaaaccacaagggcttaaaaaaaatgaagagataagattaattgaggagtctaagaagatagagaaggcaggagcattttctttggtattagaatgcgttgctgaaaaaactgcaaaaaagattacaaaattaataagtataccaaccattggaatagttcctcaa

SEQ ID NO: 229143 - DNA, 269 bp, Unknown
  Bacterial polypeptide expressing nucleotide sequence isolated from the Sargasso Sea
tgcattttcaatggttttagaatgcattgaaacttcattagcaaaacatgttacaaatagtattggtattccaacaattggtataggtgcatctaagaattgtgatggtcagattctagtatttgatgacttaatagggttaaatcctattaaagtaagatttgtaaagaaatacactaatataaagagagagctatcaaaagcagtttctaaatatgcaaatgatgttaaaaaaagaaaatttccatcaaaaaaatactcttattaat

SEQ ID NO: 229144 - DNA, 644 bp, Unknown
  Bacterial polypeptide expressing nucleotide sequence isolated from the Sargasso Sea
cctatatgggatgaaaaatactcataaaattacattagatactattattcagcacagtataagcgttagaaaaggaattaaaaaatctttaatggtggttgatatgccaaaagattcatacaaaaatccttctcaagcaaaaaaaaatgcaaaattaatttttaaaaaaacaaattgcgatgctgtaaaaatagaaagcaacaataaaaattttaaaattattagagcgataacaaaatctaaaatacctgtaatgggccacataggttatactcctcaatttaaaaataggtttaaagttgaaggtaaaaaaaaacaggaggctaaaaaattaattaaagaatcaatatcaattgaaaaagctggtgctttttcaattgttttagaatgcatcacgccaaacacagcaaagacaattacaaatttattaaaaatacctacgataggaataggatcatcatcacactgcgacggtcaaattttagtaactgatgatattattggtttaagcggtttttacccaagatttgtaaaaaaatatgtcaatctaaatacaataattgaaaaagctgtaaaaaaatatagtaaagaagtaaaaactaaagtatttcccaaaaacaaaaattttttatatggaaaatgaa

SEQ ID NO: 229145 - DNA, 156 bp, Unknown
  Bacterial polypeptide expressing nucleotide sequence isolated from the Sargasso Sea
tatgaaattaaaaaaaaaaattacaaagttttttaataataaacgcccaatagttggtttaacagcttattcttataaaatgtcaaaagttttggacaactatgtagattttatattagttggagatagccttggaatgactttatacggaatgaa

SEQ ID NO: 229146 - DNA, 640 bp, Unknown
  Bacterial polypeptide expressing nucleotide sequence isolated from the Sargasso Sea
gatgaataagaaagtaaaaaaaataattaataaaaaaaataaatctaaaattgtttgtctaacagcttattcaaaaaatattgcatctattgaagataagcattgtgatattgttttagttggggattccttaggctcagttctttataattataaatctacaaaagaagtaactttagatacaatgattaatcactctaaaagtgtgagactcggggtaaaaaaatctctcatggtagttgatatgccttataatacatatcgaaatcctaaagaagctttaaaaaatgtaaaattagttatgaaaaaaactaaatgtgacgcagtcaagctggaaggtggaaaaaaaattatttctatagtcaagaaacttgttaagaataaaatacctatcatgggtcatttgggtattttgcctcagactgataaaaaatttacatttaaaggaaaaaaattagctgaaaaaaatagaattataaaagaatctaaattattggagaaagctggaattttttcaattgtattagaatgtattgaaactaaattagcaaaaaaaattactgaacaattaaatattccaactattggaattggctcttctgttaattgtgatggtcaagtattggtaattgatgattta

SEQ ID NO: 229147 - DNA, 301 bp, Unknown
  Bacterial polypeptide expressing nucleotide sequence isolated from the Sargasso Sea
gagagacgcaaagttacttgaagaagctggttcattttgtatggtattagagtgtgttcaaacatcattagcaaaacaagtaacaaaaagtgttagcattccaacaattggtataggagcatctaataattgcgatggtcaaatcttggtatttgatgatataataggtttaaatccaatcaaatttagatttgttaagaaatacacaaatataaaaacagaaatatcaaaagcagtctctaaatatgcaaatgaggttaaaaaaataaaatttccctcaaaaaaatattcttttaattaa

SEQ ID NO: 229148 - DNA, 169 bp, Unknown
  Bacterial polypeptide expressing nucleotide sequence isolated from the Sargasso Sea
gatgaatagtaagattaaaaaaattcttaaaaaaaaaaataaatctaaaataatttgtctaacatcttattcaaaaaatattgctgaagaagctgacaaatatgcagacataatattggttggagattctttaggctcagttttgtataattatgacactacaagaaaa

SEQ ID NO: 229149 - DNA, 714 bp, Unknown
  Bacterial polypeptide expressing nucleotide sequence isolated from the Sargasso Sea
ttcaaaaaagtattgctaaaattttggataaacattgtgatataattttagttggagactcaatggctaatgttctttatggccagaaaacaactcataaaattagtatgaataatatcattcaacacactcgaagcgtcaaattaggaataaaaaaatcattactagtagttgatatgccaaagaatagttacacttcaattactgaagcttataaaaatgcaaaacttattatgagagaaacaaaatgtaatgcagttaaattggaaaactataaaaataattttaaagtaataaaatatcttgttaaaaaaaaaatacctgtcatgggacatataggatatacacctcaatttaaaaaaaaatttaaatttgaaggtcaatcaaaaaaagaaattagtaaattaattaagctagctaagttaatagaaaatgcaggcgctttttctttggttctagaatgtttaaccgctcgtgcagcaaaactgattactaaaaaagtaaaaattccaactattggcataggttcatctctttattgtgatggccagatattagttactgatgatatgcttggattaagtggtttttaccctaaatttgttaaaaaatacgctaatcttaatagaataattgaaaaagccgtaaaaaaatatactagagatataaaattgaataaatttccttcaaaaaaatattttttaaatggataat

SEQ ID NO: 229150 - DNA, 250 bp, Unknown
  Bacterial polypeptide expressing nucleotide sequence isolated from the Sargasso Sea
aatgaacgtgcatggcttcgccaaatgtaaggctagcgcgcgcaaaatctctatggtgacctgctacgactactggtcggcacagatcattaacaagaccgatgtcgactgcattctcgtgggggacagtctcgctatggtcatgcacgggtttgattccaccgtacatgccactattgaaatgatggctatgcatgtgtccgcggtgcgccgcggcgcaccgagtaagtttatcatcggcgacatgccg

SEQ ID NO: 229151 - DNA, 286 bp, Unknown
  Bacterial polypeptide expressing nucleotide sequence isolated from the Sargasso Sea
aatgaaaaaaaagaaaatcataaaaatcataaaaaaaaaaaacaaagtcaagatagtttgtttgactgcatattctaaatctatggctaagatcatcgatgagtattgtgatataattttggttggagactctcttggaaatgtattatacggatttaacaatactcatacggtatcactccaaatgatgataaatcatgcaaaaagtgtcagtaaaggtattaaaaaatcagtatttgtagtggatatgcctaaaaattcttataacaatattaaaaatgcaaaa

SEQ ID NO: 229152 - DNA, 282 bp, Unknown
  Bacterial polypeptide expressing nucleotide sequence isolated from the Sargasso Sea
ctgcagaagctgcaggagcatgtgcggtagtccttgaatgtatacctcacgacatcgcgggatctattactgaagcacttacgattccaacaattggaatcggtgcaggacctcaatgtgatgggcaagtacttgtttaccatgatcttatcggattatcacttggacatgtgccaacgttcgttcgacaatacgctgatatgaaagacgttgtctcacgcgccgttgcacaatggcgatccgatgttgcatctggccaatttccagatgcttctccataac

SEQ ID NO: 229153 - DNA, 722 bp, Unknown
  Bacterial polypeptide expressing nucleotide sequence isolated from the Sargasso Sea
tagttataattatacaaaaattattgatgatctagttgatgtagttctagttggtgactcaatgagtaacgtactttatggaatggactcaacaaggactattgatgatcaaataatgatcaatcatgctactgcagtaaaaaaaggtgcagataaatcgctggtttttttcgatttaccttacaataaagatttcagtgagtctaacactgtaaaacgtgtcttatccataatgaaaaaaacttcttgcgatggggttaaaattgagggtaatactgaattagaagatgtaataaaatatttgaagaaaaaaaaagttccagttatggcacatttaggattacaaccacagaaatttagttctacaaaaaaatttagaatatatggaaaaaagaaagaggatttaaataaaattatttcggactcattgtgtttagaaaaggctggtgctgtatccatcctattggagggaatgttaacaaaaatagcaaagcaagttaccacagtattggcaatacccactataggaattggagcatctgaattttgtgacggtcaaatattagtatctgaggatatgcttggaatgtatggaaataatcatccaaaatttgtaaaaagatatgaagatttatctaaaaatatcaaaattgctgtaaaaaaatactctaaagaggtaaataacaataaatttccaaataaaaaatttagatatgactaat

SEQ ID NO: 229154 - DNA, 253 bp, Unknown
  Bacterial polypeptide expressing nucleotide sequence isolated from the Sargasso Sea
gtgtgttccaactgaagtcgccgcatgcatttcgcataaaatcgacatcccgactattggaatcggcgcgggcccgcaggctgacgggcaggttttggtattgcaggacctgctgggtgccaaccctgacttcaagcctaaattcctgcggacctatgccgacagtcatggggtggtggttgacgctttaaaccgtttccatgccgaagtggtggcggaagagttccccagctccaaagagtcctatcgatga

SEQ ID NO: 229155 - DNA, 469 bp, Unknown
  Bacterial polypeptide expressing nucleotide sequence isolated from the Sargasso Sea
gatggcaatctcaagtcgcgctaagaaggtcacgacacacaccctgcaggagatgaagcaagccggtgagaaaatcactatgctgacatcatatgattactccttagcaagattagtcgatgcagccggaattgatgtgattctagttggagactctgcttctaacgtcatggctggtaacgagaccaccgttccgattactctcgaccacatgatctaccacgctcaatgtgtagtcaacggggttgaccgtgctttggtcgtagtcgacatgccattcggtagttaccaaggtgactccaagactgcacttgactccgcaatccgcataatgaaggaatctggaggtcacgcggtcaaactagagggtggagaagaggtcgctgagtcaattcagagaattgtcagcgcgggtattccagtacagggtcaccttggcctgacaccgcaatcaatctacaagttcgga

SEQ ID NO: 229156 - DNA, 367 bp, Unknown
  Bacterial polypeptide expressing nucleotide sequence isolated from the Sargasso Sea
gatggatttttttaaaataaataaaattaataaaaaaaagaacaaagaaaaaattgtttgtttgactgcttattcaaaaaatattgcaagcatattagacaatcactgtgatataattttggttggggactcgttaggatcggttctttataattatgatactacaagaaaagttaatttgagcatgatgattgaacattctaaaagtgtaaaaaaaggtattaaaaaaagtttaatggtagttgatatgccatacaatacttacacaaatcaatctttggcattaaaaaatgcaaaaaaaattattaaatcaactaaatgcgatgctgttaaacttgaaggtggctttaaaatttctaagataatt

SEQ ID NO: 229157 - DNA, 645 bp, Unknown
  Bacterial polypeptide expressing nucleotide sequence isolated from the Sargasso Sea
aatgattaataaaaaaataaaaaaacttttattaaaaaaaaacaaaacaaaaatagtaagcctaacagcttattcaaaaaatatagctaaaattttagataaatacgcagatgtaatcttagttggtgattctatggcgaatgtattgtatggacataaaaatactcataaaattagtttagaaaatattattcaacatacattaagtgtaaaaatgggcataaaaaaatctttacttgtagttgatatgccgaaaggtagttataacaataaaaaaaatgccttaaaaaatgctgaatttgttatcaaaaaaactggatgtgacgctattaaattagaaaacaataaaaaaaactatgaaatcatagaggctctagttaaaaaaaaaatccctgtcatgggccacataggttacacaccgcaatttaataaaaaatttaaaattgctggtcaaacacaattagaaataaaaaaactactaaaacaggccaaactaattgaaaaggtaggagcattttcaatagttcttgagtgtttatccccagactcagcaaaattaattaccaatgaattaagtattcctactattggcattggatcttcctcaaactgtgatggacaaatattagtaaccgatgacatgct

SEQ ID NO: 229158 - DNA, 441 bp, Unknown
  Bacterial polypeptide expressing nucleotide sequence isolated from the Sargasso Sea
gatgaaaaaaaaaatttcaaatttaattaaaaaaaaaaataaacataaaattgtaagtttaactgcttactcaaaaaacatagcatcaattttagataatcattgtgatattacacttgttggagattctcttggttcggttttatataattataaatcaacaagagaagtaactttgagcactatgattgaacactctaaaagtgtgagaatgggtataaaaaaaagtttaatgattgttgatatgccacataacacctatcgcactcctaaagaagccttgaaaaatgcaaaaaaaataatgaaaaaaacaaaatgtgatggtgtaaaattagaaggtggaaaaaaaatttatgaaacagtcaaatctttagttaaaaacaaaattccagttatgggccacttaggtttacttcctcagtcagataaaactttcaaatt

SEQ ID NO: 229159 - DNA, 376 bp, Unknown
  Bacterial polypeptide expressing nucleotide sequence isolated from the Sargasso Sea
agaggaaaagtaaaatctgagtggcaaaaatatattgatgatgcaattgctgttgaagaagcgggagcattttcagtggttttagagggtatggctgagcctttagctgcagaaataacttcgattttaaatattcctactattggaataggagcatctccaaattgtgatggccagatattagtaacagaagatatgttgggattaacaaacgttgctccaaaatttgtcaaaaaatacgttgatttagataacactattaagaaagcagtaagtaagtatgctgaagaagttaaagatagaacttttccttcatcagaccatatttatcatatgcgtccacagattgtaagtaataacggtaaagatcaatgag

SEQ ID NO: 229160 - DNA, 261 bp, Unknown
  Bacterial polypeptide expressing nucleotide sequence isolated from the Sargasso Sea
caatggttttagaatgtattgaaacttcattagcgaaacttgttacagatactattggcattccaacaattggtataggtgcatctaagaactgtgatggtcagattttagtatttgacgatttaatagggctaaatcctattaaagttagatttgtaaagaaatacacaaatataaagagagagttatcaaaagcagtttctaaatatgcaaatgatgttaaaaaaagaaaatttccatcaaaaaaatactcttattaat

SEQ ID NO: 229161 - DNA, 586 bp, Unknown
  Bacterial polypeptide expressing nucleotide sequence isolated from the Sargasso Sea
tctaagagtgtaagacttggagttaataaatctttgatggtatttgacatgccttataacacttatcgaaatcctcaagaagcttttagaaatgcaaaattggttattaaagagaccaaatgtgatgcagttaaattagagggtggaaaaaagataatacctatagttaaaaaattagttcaaaataaaatacctgttatgggtcatgttggtatattacctcaaacagacaagaaatttactttcaaaggtaaaaaacaagaagaaagtgatagaattttaaatgatacaaaacttttagaaaaagcaggagctttttcaattgtattagaatgtatagaaacaaagttatcaaaaaaaattactaataatctcatgataccaacaattggtataggttcatctgctaattgtgatggtcaagtattggtaattgatgatttgattggtttaagtaaaagcaaatttaaatttgttaaaaagtacatagatattagtagaattattgaaaatgcagttaaaagatataaatcagaagtcacaaaaaaaagatttcctaccagaaaacattcatttaatacataat

SEQ ID NO: 229162 - DNA, 535 bp, Unknown
  Bacterial polypeptide expressing nucleotide sequence isolated from the Sargasso Sea
atgccttacaaaacataccgtaataaaaaagaagcactaaaaaattgtaaaaaggttattaaagaaactaaatgtgacggggttaaacttgaaggtggattaaaaattaaaaatatagttaatcatttaactaataatagaattccagtaatgggccatataggaattttgcctcaattagttagaggaaaatttaaatcaaaaggaaagtcagaaaacgaaaaaaagcaattaatgaaagatgctataattttagaaaaattaggttgctttggaatagttttagaatgtatagaaaaaaatttatcaaaaaaaattaccaaaacaattaaaattcctactattggaattggatcttcacatcattgtgatggacaaattttagtaacagatgatcttcttggtttaacgaactctaaaataaaatttgtaaaaaaatatgttgatttaaaaaaatatgtaagagaaggagttaaaaagtttagatcagaagtaataaataataaatatccaactaaaagttattcatattaaa

SEQ ID NO: 229163 - DNA, 682 bp, Unknown
  Bacterial polypeptide expressing nucleotide sequence isolated from the Sargasso Sea
aatgagttcaatccaaaagattaataagttaaaaaatttaaaatttaaaagaaagttagtatgtttaacagcatattcaaaaccaatctcaagaatactagataaattttgtgacattattttggtaggagattcagtagctacagcattttatggtatgaaagacacaagaagcattacacttgaaacaatgattaatcatggtgaaagtgttaagaaatctaccaaaaaaagtattttagtttttgatatgccaattaatacctatagaaacttgaaagaggccaaaaaaaatattcaaaaggtttttaaaaaagttaaatgtgacgctgttaaaatagagagcaacggaaaaaatttcaccattgtcaaagaacttgtaaaatatggaatgcctgttatggggcatataggttatacacctcaaatcaaaaaaaaattcaaacctcaaggtcttaaaaaaatagaaactgcaaaattaatttatgaagctaaacaaattgagaaggccggagctttttctattgtattagaatgtattgcagagaaagcagcaaaggagattacaaactcagttaaaataccaacaattggtattggctcatcatattattgtgatgggcagatattagttaccgatgatcttttgggtcttagtggtttctatcctaaatttgtaaaa

SEQ ID NO: 229164 - DNA, 526 bp, Unknown
  Bacterial polypeptide expressing nucleotide sequence isolated from the Sargasso Sea
tatggctaaaaagacaattcaaacaattcaaaatcaaaaaaatcaaaaaaagattacttgtctaacagcttatacttcttcaattgcaagaattgttgataattatgtagatataatattagtaggagattctttgggttcaacaatatatggaatgaaaaatacacagcatgtaacacttgaaatgatgaaggagcatggcagggcagttgctaaaaattgtaaaaaatcatttacaattgttgatatgccttacaatacttataatggtaataaaaaagcattactaaatattagaaatctgcttaattatactaagtgtcaagcagtcaaaattgaaacagatgaaagtaagataaatttaataaagtatttaactaaaaaaaaaataaaggttgtttcacatattggtgtaacaccacaaaaatacaaaaattttgataaaattcgttcagttggaaattctaatgaagaaaaagaaaaaatacttaatttggctttaaatatgaaaaggctggatcgtgtc

SEQ ID NO: 229165 - DNA, 172 bp, Unknown
  Bacterial polypeptide expressing nucleotide sequence isolated from the Sargasso Sea
atgtcaataaaatcagataaagatcttataacaatttcgaccctaaaacgactaaaagaaaaaggtgaaaaatttgcatgtttaactgcttatgaagcaactatagcagaaaaaataagtaaatcaggaatagaggtaattcttgtaggtgatagtctaggaatggttatac

SEQ ID NO: 229166 - DNA, 649 bp, Unknown
  Bacterial polypeptide expressing nucleotide sequence isolated from the Sargasso Sea
cttggatctactctatataattataaatctacaagaagtgtaactttagatataatgataaatcattctataagtgtacgccaaggtatttcagatagcttgatggtagttgatatgccgtacaatacttacaataatccttttcaagcactaaaaaattgtaaaaaagtgatgaaattaacaaaatgcgatgctgtaaaattagaagggggtttaaaaatatttaaaattcttaaacacttaataaaaaataaaattccagttatgggacatctcggaatattacctcaatcaaataaaggaaagtttaagtcaaaaggaaaatctattaaagaaaaaaatcagttgataagagaatgtaaaattttagaagaagtgggagtattttcattagttctagaatgtgttgatagaaagttatctaagcatataactaatatgttaaagatcccaacaattggaataggatcatcaattaattgtgatggtcaaatattagttacagatgatgtattaggtttaacaaattcacaaatgaaatttgttaaaaagtttgttgatgtaaaaaaattaataaatgaaggggtcaaaaaatttaaaaaagaagtaaaatcaaaaaaattcccatcaaaaaaatattcttactaaa

SEQ ID NO: 229167 - DNA, 328 bp, Unknown
  Bacterial polypeptide expressing nucleotide sequence isolated from the Sargasso Sea
aatgaaaagaaaaaaattatcaaattagctttaaatcttcaagaagctggctcatgtttgattgttcttgaatgcatgaaggaaactttagccaaagagatatcaaaaaaattaaaaattccaactattggtataggtgcttctcaagattgtgatggtcaaattttggtaatagatgacattctaggaatgtcaaactttgaaaaaaaacctaagtttgttaaatcatatgctaattttgaatcaataattaataaatcagtaaaaaaatattgcttagatgttattcaaaaaaaatttcctaataaaaaaaatgtttataagtagt

SEQ ID NO: 229168 - DNA, 213 bp, Unknown
  Bacterial polypeptide expressing nucleotide sequence isolated from the Sargasso Sea
aatgaagaaatttaaagttttacataaaagtttttctaaaccaataagctgtttaactgcatattctccatcaattgcaaaaattttagatggaaaagtagatttaatactagttggagactctctaggttcaacactctatgggatgaagaatactcaaggagttactatggatatgatgaaaaatcatggggcagttgtaaataaggaaat

SEQ ID NO: 229169 - DNA, 375 bp, Unknown
  Bacterial polypeptide expressing nucleotide sequence isolated from the Sargasso Sea
tatgaatgacttgaaagaaaaaaagctacgcggcgaaaaaattacttcgatcactgcctatgactacagtttcgccagagtggctgatgaggctgggtttgacataattctagtcggcgattcccttggaaatgtggtgctcgggtatgacaccactattccagtttctatcgatgatatggaatatcatactcgggccgtttctcgcggcactcgtaatggtttgctgatctcggatatgccatttatgacctacagtagcaccgccagtgccctgaaaaatgccgctatactaatgcaagccggtgctcaaatggtaaaattggagggcggcgaatggttaagcgaaacggtcaaccaactttccaatgcggt

SEQ ID NO: 229170 - DNA, 487 bp, Unknown
  Bacterial polypeptide expressing nucleotide sequence isolated from the Sargasso Sea
gaaaaaaattattaaattaacaaaatgtgatgctgttaaattagaagggggtaaaaaaatttcaaaaataatccaatatctcgttaaaaaaaaaataccagtaatgggacatgtaggtctgttacctcaaacttcgaataattttaaattgaaaggtaaaaattatgttcaaagaaaaagaatactggaggatgcaatatctgtttctaaatctggagcgtttgcaatagttatagaatgtgttgtagaaagtttggccaagaaaattacgaaaaacgttagcgtaccaacaataggtataggtgcgtctaaatattgtgatggtcaaatactcgttactgatgatatgttaggattaagcgacttttcaccaaaatttgttaaaaaatattcaaatttaagaaatattatagataaaagcataaaaaattatactagagatgtaagaactagaaaatttcctgctataaaaaacgtttataaataa

SEQ ID NO: 229171 - DNA, 393 bp, Unknown
  Bacterial polypeptide expressing nucleotide sequence isolated from the Sargasso Sea
aacttgcaaaagaattattggaagacgcaatcctcttggattcattaggatgcttttcttttgttttagagggagtgccaaaggtagttgctcaaactataaccgaacaagtttctattcctacaattggaattggggctggggtacatgtagacggacaagtacttgtttatcatgatcttcttggtatgaaatctaaagagtatatagatgcaaaatttgtaaagaggtatgacaaccaatatgacagggttgttaaagcgatggaaaatttcaaaaaagacatcgaaaacaaagagtttcctaccgatgatcactcctatgattcgggtgactccttatcagaaaaccttgaagagtggaaaaaagaagttaaaaaaattctgtcataac

SEQ ID NO: 229172 - DNA, 287 bp, Unknown
  Bacterial polypeptide expressing nucleotide sequence isolated from the Sargasso Sea
aaaagctggatcatgtttgattgttcttgagtgtatgcaagaaactctagctagagagatatcaaaaaaattaaaaattccaactattggtataggtgcttctaaagattgtgatggtcaaattttggtaatagatgacatattaggaatatcaagctcagaaaaaaaacctaagtttgttaaatcatatgccaattttgaatcagaaattaataaatctgtaaaaaaatattgtttggatgttattcaaaaaaaatttcctaataaaaaaaatgtttataagtagt

SEQ ID NO: 229173 - DNA, 529 bp, Unknown
  Bacterial polypeptide expressing nucleotide sequence isolated from the Sargasso Sea
atgttagataaagtaaaaaaaataaaacaaaaaaaaaacaagtcaaaaattgtttgtctaacagcatattcaaaaaatattgcagaagaagtagataaatttacagatcttattttagttggggactctcttggatcggttctttacaattacaagtcaaccagacaagtcacacttgaaaaaatgatagaacactcaaagagtgttagattaggaatatctaaaagtctaatgattgtagatatgccatataatacttatagaaataaagttgaggctttaaaaaactgcaaaaaagtaatgaaagaaacgaaatgtgatggagtaaaattagaagggggacttagaattaaagatatagttaaacacttaattaaaaacaaaattcctgttttaggtcaccttggaataactcctcaaactgttagaggaagatttaaatcaaaaggaaagtctgtacgtgaaagaaaccgtcttttaagtgatgctacacttttagaaaaatccggagcatttgcaatagttcttg

SEQ ID NO: 229174 - DNA, 533 bp, Unknown
  Bacterial polypeptide expressing nucleotide sequence isolated from the Sargasso Sea
gccttataacacttatacaagtaaatttattgcatataaaaatgcaaagaaagtaatgagattaacaaaatgtgatgccattaaattagaaggtggaaaaaaagtagttaacataattaagtatcttacaaaaaaaaaaattcctgtcatgggccatgttggattgctgccgcaaacatcaactaattttaaagtaagaggaaaaaattttgttcaggaaaataaaatattagatgacgcaaaggccatttctaattctggtgtttttgcaattgttgtagaatgtgttgtcgaaaatttagctaataagattacaaaaaatgtttccgttcctactataggcattggagcatctaaatattgtgatggtcaaatactagttagtgatgatatgctaggcttaagtgatctttttccgaaatttgttaaacaatattctaatttaaaaaaaatcatagaaaaatctataaaaagttacgctaatgatgttatgttaaaaaaatttccttctagaaagaatgtatataaataag

SEQ ID NO: 229175 - DNA, 263 bp, Unknown
  Bacterial polypeptide expressing nucleotide sequence isolated from the Sargasso Sea
aataacttcaattttaaatattcctactattggaataggagcatctccaaattgtgacggccagattttagtaacagaagatatgttgggattaacaaacgttgccccaaaatttgtcaaaaaatacgttgatttagacaacactattaagaaagcagtaagtaagtatgctgaagaagttaaagatagaacttttccttcctcagaccatatttatcgtatgcatccacaaattgtaagtaacaacggtaaaggtcaatgag

SEQ ID NO: 229176 - DNA, 247 bp, Unknown
  Bacterial polypeptide expressing nucleotide sequence isolated from the Sargasso Sea
atgaatagaaatattaaaaatattttaaataaaaaaaataaatctaaactagtttgtcttacagcttattcaaaaaatattgcttcaattttggataatcattgtgacataattttagtaggcgactcactaggttctgttctttataattataaatcaacaaaggaagtaactcttgatacaatgattaatcaatcaaaaagtgtaagacttggagttaagaaatctttgatggttgtagacatgc

SEQ ID NO: 229177 - DNA, 421 bp, Unknown
  Bacterial polypeptide expressing nucleotide sequence isolated from the Sargasso Sea
tatgttaagaaagaccgcaaatgatattaggactctcaaaggaaagacaccaatagtttgtctgacagcatatacggcaccaattgcgcgcgcgattgatgataaaatagatttaatgttagtaggcgactctcttggcatggttctttatgattttgaaaatacattgcaggttactctggaacagatgatacagcatgccaagtcagttgttggtgcatcaagaaaatcctgtgtgattgttgatatgccttttggtacatatgaagagtctgttgataaagcttttatgaacgctgctcgagttatgaaagaaacaaattgtaatggagtaaagcttgagggtggtaaaaaaatagccaaaacaattaaacatcttgccaagagttcaattcctgtaatgggtcatattggccttcaa

SEQ ID NO: 229178 - DNA, 247 bp, Unknown
  Bacterial polypeptide expressing nucleotide sequence isolated from the Sargasso Sea
tatgaaaaatacagtacctaaaatagttaatttaaagaatgaaagagtcatctctatgatgacagcatacgactatccttcagcaaaagcagtttcagaagcagagattgatattatcttagttggtgattcattagcacaagttgttcttggtcatgacgacactttatcagtaactattgatgaaatgttacaccatgttaaagcagttactaatgctaaaccaacatcgcttgtagttgcagac

SEQ ID NO: 229179 - DNA, 295 bp, Unknown
  Bacterial polypeptide expressing nucleotide sequence isolated from the Sargasso Sea
aagagagaggcttcaattcttgaagaattaggatgtttttcaatagttcttgaacatattcctgatttgcttgctaaagaaatacaaaattctttaacaattcccacaataggtatcggcgcaggtaattattgcgatggacaagtaagagttactgcagatttgttaggccttaatgataaccaacccccattttgccaaccaattatccaaggaaagaaattatttaaggataaattaaaagaatgggtagactctgaaagacttagtggtttatctcatcccaccacttaaa

SEQ ID NO: 229180 - DNA, 748 bp, Unknown
  Bacterial polypeptide expressing nucleotide sequence isolated from the Sargasso Sea
atgagcaaacttagtaaattactgaatctctatagaagaggaaagaaaatatcatgtattactgcatatgacgccagtatgagtaaataccttgagtcttctggagtagatattattctagttggagattcacttgggcaagttattaaaggtgaaaaaaatacacatggcgtgactttagatgaaataacatatcacacgagatgtgtgaaatcaggattaaaaacctctatcctaatgatagatcttccaaaaaattcatataatacaaaatttaaggcttataaaaatgccaataagtttattttaacaagacttgctgatcttattaaaattgagatagatgtaggtaatctagatatagcaaaatatcttatagagaaaaatataccactatgtgcacatataggtttacttcctcaaactattaaatctagatctgggtatcgtaagtatggtaaaagtaaacatgaggcaaaacaattgtatgatctcgcaataagtctagataaattaggagtacaggtgatattgattgaatgtttagagaatagtctagccaggagaattagtgaaaattgcaatgcacctgtgattggaattggttccggaagaggcatcgatggtcaagtggctgtcatatacgacctacttggtattagttttaataaaatagacggatttttcaaaaatgataaaacatcacttgacaaacagattgcagagtttagaaaaaaattgaaataat

SEQ ID NO: 229181 - DNA, 271 bp, Unknown
  Bacterial polypeptide expressing nucleotide sequence isolated from the Sargasso Sea
gatgaataaaaagatttcagattttataaaaaaaaaaaataaaacaaaattagtaaccttaactgcttactctaaaaatattgctttagtactagataattattgtgatttaattttggtaggagactcacttggttcagttttatacaattataaatctacaagagaagtaactttaaatactatgattgaacattccaaaagtgttcgtaagggcattaaaaaaagtttaatgattgtagatatgcctcataacacttatcgaaatcct

SEQ ID NO: 229182 - DNA, 433 bp, Unknown
  Bacterial polypeptide expressing nucleotide sequence isolated from the Sargasso Sea
atgagtaatttaaaaaataaactgcaaaattttaagaaaagaaaagagcaaattacttgcttaacttgctatgactcttcttttagtaaaattttgaatgattcaaaaatagatatagtcttagttggtgattccttgggaatggttataaaagggaaagaaaatactcattctgttacaatggatgagattttatatcattcaaagtgcgtatcaacttataaagaaaatttcattttaatggcggatatgccaataaattcttatgataatatcgatattgctacattgaatgcaaaaaagcttttggaacaagaagtagatattgtaaaagtagaatatcaagataaacactttgaagtgattaaaggttttgttaatgcaaaaattcctatttgcgcccaccattggataccttcctcagaaaagtaaa

SEQ ID NO: 229183 - DNA, 163 bp, Unknown
  Bacterial polypeptide expressing nucleotide sequence isolated from the Sargasso Sea
gatgcataaaaaaatattatctataattagaaaaaaaaataaaaccaaaatagtaagtttatctgcttactctaaaaacgtagcatcaattttagacaatcattgcgatattatacttgtcggagactcgctcggatctgttttatataattataaatctaca

SEQ ID NO: 229184 - DNA, 514 bp, Unknown
  Bacterial polypeptide expressing nucleotide sequence isolated from the Sargasso Sea
gtcttgagaatgctaaaaagattaatgcaagcaggagcaaattctgtaaaaattgaaggcggacaatggatctctaaaatggcacaagttttatctgatagaggaattcctgtttgtgctcatatgggacttaccccccaaacaattaatagaattggcgggcatcgtgttcaaggaagagacccttctcaaaaagaaaaaataattaatgaagctattgctcttgagaaggcgggcgcctcaatgttgttattagaatgtgtacctggtgaacttgcaaaaactattacaaaagaattaaaaatacctgttattggtataggggcaggtgttcatacagatggtcaaataatggttgtacatgatttattgggaatatcgtgcctcgataaacctcctaaatttgttaaaaactttatgaaaacatcaacatcaattccaggtgcaataaaaaggtatgtcaaagaggtaaaaaatattaaatttccttcaaaagaacatacatttgaataag

SEQ ID NO: 229185 - DNA, 427 bp, Unknown
  Bacterial polypeptide expressing nucleotide sequence isolated from the Sargasso Sea
tatagaaatcattaaacatttaataaaatataaaattcctgtaatgggccatataggtataacaccacaatctgtaagaggaaaatttagatacaaaggtaaaacagatatagaaaaaaaaaatttgttaaaagattcaaaatctttagaagatgctggagtatttgcaattgttttagaatgtattgaaaaaaaagtttcaaaaaaaattacagaatcaattaacattcctacaataggaataggttcatcaaatttttgtgatggtcagattttagttacagatgatttattgggactaacagataataaaataaaatttgtaaaaaaatatgccaatttgaaaagtaatgtaaggacagcagttaaaaaatttaaattagatgttaagaaagggtcatacccatcaattagatattcttattaa

SEQ ID NO: 229186 - DNA, 373 bp, Unknown
  Bacterial polypeptide expressing nucleotide sequence isolated from the Sargasso Sea
aatgaataaaaaaatattatctataataagaaaaaaaaataaaataaaaatagtaagcttatctgcttactctaaaaatgtagcggaaattctagacaattactgcgatatagttcttgtaggtgattcacttggatctgttttatataattataaatctacaagagaggtttcattaaatacgatgattgaacactctaaaagcgtcagactgggtattagaaaaagtttaatggttgttgatatgccttataacacttatcgtaattccaaagaagcgcttaggaatgcaagacaagtaatgctaaaaaccaattgtgatgcagtaaaattagagggcggaaaaaaatttgtgaaattattaaaatattag

SEQ ID NO: 229187 - DNA, 409 bp, Unknown
  Bacterial polypeptide expressing nucleotide sequence isolated from the Sargasso Sea
actttagttaaaaataatatacctgtaatgggtcatcttggagtgctgcctcagtcagataaaaagtttaaatttaagggtgagaataaagtagaaaaagaaaatattttaagagacgctaaattattagaacagtcaggtgctttttcaatggttttagaatgtattgaaacttcattagcgaaacttgtaaccgatagtattggcattccaacaattggcataggtgcatctaagaattgtgatggtcagattttagtatttgacgatctaatagggctaaatcctattaaagttagatttgtaaagaaatacactaatataaagagagagctatcaaaagcagtttctaaatatgcaaatgatgttaaaaaaagaaaatttccatcaaaaaaatactcttattaat

SEQ ID NO: 229188 - DNA, 282 bp, Unknown
  Bacterial polypeptide expressing nucleotide sequence isolated from the Sargasso Sea
ctggagctttttctatagttttagaatgtgtgactccaagtgtagcaaaaaaaattactaacacattaaaaattccaacaataggaataggatcttcttcatattgtgatgggcagattttagttactgatgatattcttggattaagtggattttatccaaagtttgttaaaagatatgcaaatctaaatacaataattgaaaaagctgtaaaaaaatatagtaaagatataaaaactaaagtatttcctaacaaaaaaaactttttatatggaaaatgaa

SEQ ID NO: 229189 - DNA, 648 bp, Unknown
  Bacterial polypeptide expressing nucleotide sequence isolated from the Sargasso Sea
catgaaaagatcaattaaatcagtatttaataaaaaaaacaaaaaaaaaattatttgtctaacgtcttatagctataattatacaaaaattattgatgatttagttgatgtagttctagttggtgactcaatgagcaatgtactgtatggaatggactcaacaagaactattgacgatcaaataatgattaatcatgctaatgcagtaaaaaaagctgcagagaaatctctagttttttttgatttgccttacaatagagatttcagtgaggctaatactgtaaaacgtgtcttatctataatgaaaaaaacttcttgcgatggtgtcaaaatcgaaggtaatactgaattggaggatgtaataaagtatttgaagaaaaaaaaagttcccgtaatggcacatttaggtttacaaccacagaaatttagttctacaaaaaaatttaagatatatggaaaaaagaaggaggatttaaataaaattatttcggactccttgtgtttagaaaaggctggtgctgtatccatcttattggagggaatgttaacaaaaatagcaaagcaagttaccacagtattagcaatacccactataggaattggtgcatccggaatttgtgacggtcaaatattagtatctgaggatat

SEQ ID NO: 229190 - DNA, 530 bp, Unknown
  Bacterial polypeptide expressing nucleotide sequence isolated from the Sargasso Sea
ttcttacaaaaatccttctgatgcaaagaaaaatgcaaaattaattttaaaaaaaacaaattgtgatgctgtaaaaatagaaagcaataacagaaattttaaaattataagagagataacaaaagctaaaatacctgtaatgggtcatataggttacactcctcaatttaaaaatagttttaaagtcgaaggaaaaaagaaacaggaggttaaaaaattaattaatgaatcaatattaatagaaaaagctggtgctttttctattgtcttagaatgtattactccgaatacggctaaaataattaccaatttattaaagataccaacgattgggataggttcttcaacaaactgtgacggccaaattttagtaactgatgatattattggtttgagcggtttttatcctaaatttgtaaaaaaatatatcaatctaaacacaataattgaaaaagctgtaaaaaaatatagtaaggaggtaaagaccaaagtatttcccaaaaataaaaactttttatatggaaaatgaa

SEQ ID NO: 229191 - DNA, 481 bp, Unknown
  Bacterial polypeptide expressing nucleotide sequence isolated from the Sargasso Sea
gttatttccaatacaaaatgtgatgcagtcaaattagaaggaggaaataaaattaaaaaaattgtcaaatatttagtaaaaaaaaaaataccggtcatgggacatttaggcatactgcctcaaagtgtaagaggaacttttaagtcaaagggcaaaactgaaagagaaacttttaaattaataagtgacgcaaagatgctcgaagaggctggttgttttgctatcgttttagagtgtgttaaatctaaaacatcaaaattaattacaaaaaatttaaaaataccaacgattggtataggatcttcagtattttgtgatggccaagtattggttactgatgatttacttggccttaatgaaacaaatataagatttgtaaaaaaatttattaatctaaaaacatttataaacaaaggtttaagaaagtttaaatatgaagttttgagtaaaaaatatccttcaaaaaaatattcatattaga

SEQ ID NO: 229192 - DNA, 622 bp, Unknown
  Bacterial polypeptide expressing nucleotide sequence isolated from the Sargasso Sea
aatggcagaggaacgtaaaaaactgacgatcccagatttggctttgaagaaagcggccggtgaacgacttgtgatggttgctgttggtgaggtgctaagcgccgcgtgggcggagcgggctggtatcgatattgtcgggataggggacagtcttgggatgacgttatatggccacgaaaatacgttggcagtgactgtcgatcagatgatccatcatacgcgagcagtgcgccgcggtgcgccgaataccttctcgctgatggctatgccctatggttcttacgccacgaaagatttggctgttcaaaatgctgtaaaaatcatgaaggagagtggcgttgacgctgtgaaactgcagggtggtcgtgaaatctttgatactatcaaggcggttgctgatgccggcgtccccgtgatgagccatgttggcttagtgcctcatcacgtccacaaacatggcggctttaagatgcagggccgaactgcggaagacgcgcttaagattatcgataacgccaaggctattgaggaggctggcgctatcggtcttgagattgaggctgtgccatatgaggttggtaaagctgtcgatgatgctattttcattttcactttctcaatc

SEQ ID NO: 229193 - DNA, 622 bp, Unknown
  Bacterial polypeptide expressing nucleotide sequence isolated from the Sargasso Sea
acaacaagaaaagttaatcttaaaatgatgatagaacattcgaagagtgtaagaaaaggtgtcaagaaaagcttaatgatagttgatatgcctttcgatacttataaaaacaaatctcaagctctaaaaaattgtaaaaaagtcttaaaagaaacaaagtgtgatggtataaaactagaaggtggtagagagctaaataacataattaagtatttgattaataataaaattccagtcatggggcacataggcataactccacaaacaataagaggaaaatatagatataaagggagaacagcttttgaaaaaaaaaaattactcaaagattctaaatcattagaggaagcgggtgtatttgcaatagttttagaatgtattgaaagaaagttgtctcaagaaattactaaaactatcaaaatacctacaataggaattggatcttcaaaatattgcgatggtcagattttagttacagatgatattttaggtttgacaaactcaaaaatgaaatttgtaaaaaaatatactaacttaaaaaaaaatataagaaacgcagtaaaaaaatttcaaacagatgttaagaatggttcttacccatcaataaaatactcatattaaa

SEQ ID NO: 229194 - DNA, 334 bp, Unknown
  Bacterial polypeptide expressing nucleotide sequence isolated from the Sargasso Sea
gatgcaatcgctggttgaagaagcaggagcattttcaatagttttagaaggaatgaccgaacctttagctgcagaaataacttcaattttaagcatacctacgattggtattggggcttcaccaaaatgtgatggccaaatattggtaaccgaagatatattgggcttgtctaacgtagctccaaaatttgttaaaaaatacgatgatttagaaaaaagtattaagagcgcagtaaataagtttgccaatgaggtaaaagatagaagattcccatctcaagatcatatttatcatatgagaccacaaatagtaaaagaaaataccaaaatctaa

SEQ ID NO: 229195 - DNA, 562 bp, Unknown
  Bacterial polypeptide expressing nucleotide sequence isolated from the Sargasso Sea
atgaataccaagattaaaaatattctcaaaaaaaaaaataaatctaaaattttgtgtctcactgcatattcaaaaaattttgctgagctaatagataaatatgttgatatcactttaatcggagactcattgggatctgttttatataattacgatactacaaaaaaagtaactttaactaatatgattgatcattcaaaaagtgttaggcttggtgtcaagaaaagtttaatggttgtagatatgcctttcaatacatataggtctaatttatctgcttataaaaatgcgaaacgagttattaaagaaacaaaatgtgacgcagttaaattagagggtggaaaaaaaattattacacagattaaatatcttattaaaaaaaagattccagttatgggccatttaggtcttcttcctcaatctgccaaaggaaaatttaagtcaaaaggtaaatcaactagggaaacaaaacaattaataaaagatgctcttctactccaaagtagtggggtatttgctatagtcattgaatgtgtaaaaggagctactgctaaaaaaatta

SEQ ID NO: 229196 - DNA, 591 bp, Unknown
  Bacterial polypeptide expressing nucleotide sequence isolated from the Sargasso Sea
atagcataagtgttaaaaaaggtataaaaaaatctttaatggttgtagacatgccaaagggctcatatcaaaatccattacaagcaaaaagaaatgcaaaattgatagttaaaaaaacaaaatgtgatgctgtaaaaattgagagtaataataagaattttaaaattattaaagaaattataaaagctaatatcccagtcatgggtcatattggctatacgcctcaatttaaaaataattttaaggtagagggtaaaaataaaaaagaaattaaaagattaataggggaggcaaaatctatcgaaagagcaggtgcattctcaattgttttagaatgcttaacaccagatactgctaaaataataacaaatttactcagaataccaactattggaattggatcatcttcttattgtgacggacaaatacttgttacagatgatatgcttggcttgagtggattttatccaaaatttgtaaaaaaatatataaacctcaactcattaattgaaaaagctgtaaaaaaatatagtaaagatgtaaaagcaaaaagatttcctaataacaaaaattttttatatggaaaatgaa

SEQ ID NO: 229197 - DNA, 604 bp, Unknown
  Bacterial polypeptide expressing nucleotide sequence isolated from the Sargasso Sea
tcctgtgtaattgtcgatatgccatttggaacctacgaagaatctgttgataaagcatttatgaatgcagctcgtgttatgaaagaaactaattgcaacggtgttaagcttgaaggcggacaaaaaatgtccaaaacaattgaacatcttactaaaagttcaattcccgtcatgggccatataggccttcagccacagagcgtattgattgatggaggatataaagtacgaggaaaagttaaatctgagtggcaaaagtatattgatgatgcaattgctgttgaagaagcgggagcattttcagtggttttagagggcatggctgagccattagccgcagaaataacttcaattttaaacattcctactattggaataggagcatctccaaattgtgatggccagatattagtaacagaagatatgttgggattaacaaacgttgctccaaaatttgtaaaaaaatatgtcgatttagataacactattaagaaagctgtaagtaagtatgctgaagaagttaaagatagaacttttccttcatcagaccatatttatcatatgcgtccacagatcgtaagtaataacggtaaagatcaatgag

SEQ ID NO: 229198 - DNA, 369 bp, Unknown
  Bacterial polypeptide expressing nucleotide sequence isolated from the Sargasso Sea
tatgtcaagcattaattacacaagaattacaactaaatcattgcaagaaatgaagtcaaaaggggaaaaaattgcaatgcttacagcttatgattatagttttgctagactagtcgataaatcaaaaatagacgttattttagtaggagattccgcttcaaatgttatggctggacatgaaactaccttacctgtaacacttgatcagatgatttaccatgctacaagtgttgttaaagctgctaaaagagctttggtaattgttgatttaccatttggatcatatcagtcagatccaaatgcagcactaagatcagccataagaataatgaaagaatctggggctcacggtgtaaaattagagggtgg

SEQ ID NO: 229199 - DNA, 291 bp, Unknown
  Bacterial polypeptide expressing nucleotide sequence isolated from the Sargasso Sea
cagaaaatttaacaataccaacaattggcataggtgctggaaagtatacagatggacaagttcttgtaatccatgatctcatcggcatgaaatctaaagagtacatagatgctaaatttgttaagaggtatggtgagcagtatgattcaacagttaaggctctatctgaatataaaaaagatatagaaaattctgactttccaagtgaagaacattcctatgatatgggttctgatattcaggattcacttaaagagtggaaaaaagaaattaaaaaaattctgtcatagt

SEQ ID NO: 229200 - DNA, 367 bp, Unknown
  Bacterial polypeptide expressing nucleotide sequence isolated from the Sargasso Sea
atgttatcaaaaataaacgaatttaaattaaaaaaaaacaaatctaaaattgtttgtttgaccgcatattcaaaaaatatcgcaaaaattattgataaacatgctgatttaattttagtaggagattctcttggatctgttctatataatttcaattcaacaagaagtgtaactttggatatgatgataaaacattcaaaaagtgcacgactaggtatttcaaatagtttgatgatagttgatatgccattcaacacttataataatccagttcaagcattaaaaaattgcaaaaaaattatgaagttcacaaaatgtgatggtgttaaacttgaaggtgggttgaaaattgtaaaaattattaaaa

SEQ ID NO: 229201 - DNA, 437 bp, Unknown
  Bacterial polypeptide expressing nucleotide sequence isolated from the Sargasso Sea
aatggttgtaaaaatatttaaaattaaatcaaaaaaaaatatttctaaaattgtttgtcttaccgcttactcaaaaaatattgctcaagcaattgataaatatacagatataattttagtaggagattcgcttggatctacattgtataattttaaatctacaagaagtgtaactttagaaatgatgataaaacattctataagtgtacgccaaggtatttcaaatagtttgttggtagttgatatgccatataatacttacaacaatccatctcaagctttgaaaaattgcaaaaaagttatgaaattgacaaaatgtgatgctgttaaaattgaaggaggattaaaaatgataaaaattattaaacatttggtcaaaataaaattcctgtcatggggcaccttggaatattacctcaatctacaaaaggtaaatt

SEQ ID NO: 229202 - DNA, 415 bp, Unknown
  Bacterial polypeptide expressing nucleotide sequence isolated from the Sargasso Sea
aaggctctaacaaaaaataatattcccgttatgggtcatcttggattattacctcaatctgcaaaaggaaaatttagatctaaaggaaaaaccactaaagaaattaatcaattaattaatgatgctttattactccagaaaaatggggtttttgcaattgtgctagagtgtattaaaacaccaatagctaaacaaataactaaaagtttaaagattccaactattggaattgggtcttctgtttattgtgatggtcaagtcctagtaactgatgatttaattggtttaaatcaaactaatattaaatttgtaaaaaagtttctaaatgtaaaaaaatatattaattcaggattaagaaaatttgcttatgaagtaagaactagtaaatacccaaccaaaaaacattcatattaaa

SEQ ID NO: 229203 - DNA, 531 bp, Unknown
  Bacterial polypeptide expressing nucleotide sequence isolated from the Sargasso Sea
tgccacataatacctatcgaactcccaaagaggctttaaaaaatgcaaaacaaataatgaaaaaaactaaatgtgatggagtaaaattggaaggtggaaaaaaaatttatgagacaattaaaactttagttaaaaacaaaattccagttatgggccatttagggctacttcctcagtcagataaaacttttaaatttaaaggcaaaaaaaagctagaaagagataacattctaagagactcacaattgttagaaaaagctggagtattttctattgttttagaatgtgttgagacttctttagcaaaacttgttagtcaaaatattacagtaccaacaatagggattggagcttctaaatattgtgatggtcaaatattagtttttgatgatttaattggcttaaatccaatgaattataagtttgtaaaaaaatatgcaaatattagaaaagatatttctaaagctgtttcaaattactctaaagaagttagaaaaattaaatttcctaataaaaaaaattctttttaat

SEQ ID NO: 229204 - DNA, 286 bp, Unknown
  Bacterial polypeptide expressing nucleotide sequence isolated from the Sargasso Sea
gatgaaaaaaaaaatttctgatttaattaaaaaaaaaaataaagaaaaaattgtaagtttaactgcttactcaaaaaacgtagcatcaattttagataaacattgtgatatcattcttgtaggagactcacttggttcagttttatataattataaatctacaagagaagtatctcttcatatgatgattgaacattcaaagagtgtcagaatgggaattaaaaaagctttaatggttgtagatatgccacataatacttaccgaaattcaaaagaagctttaaaa

SEQ ID NO: 229205 - DNA, 304 bp, Unknown
  Bacterial polypeptide expressing nucleotide sequence isolated from the Sargasso Sea
tttttcattgtgcttgagggtatggcagaaccattagctgcagaaattacttctcaagtttctatacctacaattggtattggagcatctctaaaatgtgatggtcaaatattagtaacagaagatatgataggtctaacaaacatcaccccaaagtttgttaaagaatatatcaacattagaaaactaatcgaagaagcagcaaattcttatagcaatgaagtaagaaacaaagaatttccaaccagaagtcatacctattctatgaatccgactattgttaaattaaataaaggtgattaat

SEQ ID NO: 229206 - DNA, 781 bp, Unknown
  Bacterial polypeptide expressing nucleotide sequence isolated from the Sargasso Sea
atgaataaaaagataaaaaaaattcttaataaaaaaggtaaatctaaaatcatttgtttaactgcttattcaaaaaatatttcatcaattttagacaagcattgtgatttagtattagtcggggactcgctcggttcagttctctataactataaaactactaaagaagtaactttggaaacaatgattaatcattcaaaaagtgtgagacttggtgttaagaaatcattaatgatagttgatatgccttataatacctatcgaaatccaagagaggccttaaagaatgttaaactagtaatgaaagaaactaaatgtgatgggattaaacttgaaggtggcaaaaagataatttcaataataaaaactttaattaaaaataaaatacctgttatgggacacctgggtattttacctcaaactgataaaaaatttagttttaaaggaaagaaacaaagagaaagcgcaagaattttgaatgacactaaacttttagaaaaagctggcgttttttcaattgtattagaatgtgtagaaacaaaactatcaaaaaaaattactgagcaaataaaaattccaacgattggaattggttcttctgcaaattgtgatggtcaagtattagtaattgacgatttaattggtatgagtgaaagtaaatttaaatttgtaaagaaatatgttgatgttagtaaaattattaatagtgcagttaaaaaatataaatctgaggtcctaaaaaaaaaatttccaagtgctaagtattcttttaaaaattaaa

SEQ ID NO: 229207 - DNA, 255 bp, Unknown
  Bacterial polypeptide expressing nucleotide sequence isolated from the Sargasso Sea
agaaaaataccatcacaattagcgaaaaagtcactatgaaaatttctatacctactatcggaataggggcgggtccaaatgtagatggtcaagttctagtattacatgatcttcttggaattacacacgaatttaatcctagatttttaaggcgatatttgaacctccatgatgaaattatgggagctatttctaaatatgttgcagatgttaaatctcttgatttccctaatgaaaatgaaagttataattagt

SEQ ID NO: 229208 - DNA, 787 bp, Unknown
  Bacterial polypeptide expressing nucleotide sequence isolated from the Sargasso Sea
aatgaagaaaattaaaattttacacaaaagattttctaaaccgataagctgtttaactgcatactctccatcaattgcaaatattttagatggaaaaattgatttaatactagttggagactctataggttcaacactctatgggatgaataatactcaaggagttacaatggatatgatgaaaaatcatggagcagctgtgaataaaacaattaagaaaagtttaaaagtattagatatgccctataaaacatatgataataaaattgatgcatataaaaatgctaaaatacttttaaatcactgtaagcctgatttattaaagatagaaattagcgaaaaaaaattagttgttttaaaacacttagtagataaaaaattaaatgttatttctcatataggggtaacaccacaaagttataagaattttaataaaattaaagttttaggaaaaactaataaagaaaaacaaaatttattagagttagcaaaaaagtctgaaacacttggagctaaagcagtgttgttagaatgtgttacatctgatacagctaaactaattacagaaaatatatcgatacctacaattggtataggtgcttcaaaatattgtgatggtcaagttttggtatttgatgatttaataaatctaactacaaatgataaaaaaccaaaatttgtaaaaaattattttaattttaataaagttgctagcaatgtagtaaagaaatataatagagaagttaaacttaaaaaattttctagtactaaatttactttacattaa

SEQ ID NO: 229209 - DNA, 193 bp, Unknown
  Bacterial polypeptide expressing nucleotide sequence isolated from the Sargasso Sea
atgattttaaaactaaaaaaaataataaataagaaaaataagtctaagattatatgcataacgtcatactcaaaaaatgttgctgaagcaattgatccttacactgatattatactagtaggggactctctgggttcagttctttataattattccactactagaaaagtcactctaaatcagatgatagaac

SEQ ID NO: 229210 - DNA, 661 bp, Unknown
  Bacterial polypeptide expressing nucleotide sequence isolated from the Sargasso Sea
tatgggcaatgttctttatggtatggatactactagatctgtagatgatcaaataatggttaatcatgcaaccgctgtaaaaaaaggtgcagataaatccttagtgttttttgatctcccatataatagagattttagtgagtccacaacagttaaacgggttttaagcattatgaaaaagacatcttgtgatggtgtaaaaatcgagggaaatactgaattaaaagatgttataaagtatttaagtaaaaaaaaagttccagtaatggcacatttaggtttacagccacagaaatttagctcttctaaaaaatttaaaatttatggaaaagataagagggacctagataatataatttctgactcattgtgtttagaaaagtcgggagctgtatctatattgttggagggaatgctaaccaatattgcaaaagaggtcaccaagacattatctatacccacaataggaattggtgcctctgagtattgtgatggtcaaatactggtatctgaagatatgttaggaatctttagagataatcatcctaaatttgtaaaaaaatatgctgatttatctaaaaatattagggttgctgtaaataaatactccaatgaagtgaacaataacaaattcccaaataaaaagtttaggtatgattaa

SEQ ID NO: 229211 - DNA, 775 bp, Unknown
  Bacterial polypeptide expressing nucleotide sequence isolated from the Sargasso Sea
tatgaatgcttttgtaaaaattaaaaaatttaagacaattaaaagaaaaattgtttgtttaacagcttattcgagaccaattggaaaaattttagataaatattgcgatattattcttgttggagactcagttgcaacggcattttatggaatgaaaaatacaaaagaaattgatttaaatacaatgataaatcacggaaagagtgttggtaaatctgtgaaaaagagcattcttgtttttgacatgccgtataatacgtacaaaaatataaaagatgccaaaaaaaatgttaaaaaagttttgaaaaaaactaaatgtcatgcagtaaaacttgaaagtaatggaaaaaattttaatattttaaataacttagtaaaatctggggtaaaagtgatgggtcatattggttatactcctcaatacaaaaaaaaattttcaccacaaggtttaaaaacaaatgagatgaaaaaattaataaatgaagcaaaaaaaattgaacaggccggagcttttgctatagttcttgaatgtgtacatttcaaattagctaaaaaaatcacagactcaattaaaattccgacaataggaattggatcatcccacttttgtgatggacaaattttagttttagatgacctattaggtttaagtggtttttatccaaaatttgttaaaaaatatttaaatcttgaaaagttaatcaatatagcagtcaaaaggtttaaaaaagatatattaagaaaaaaatttcctaataattcaaacacttattga

SEQ ID NO: 229212 - DNA, 778 bp, Unknown
  Bacterial polypeptide expressing nucleotide sequence isolated from the Sargasso Sea
atgaataataagatcaagaaaattattaataaaaaaaataggtctaaaattgtttgtttaactgcatactcaaaaaatatagcagagattattgataatcatgtagacataactttagttggagattctttaggatctgttctttataattataatactacgagaaaagttaatctaaaaatgatgcttgagcatacaaaaagtgtaagaatgggtgtaaaaaaaagtcttttagtaatagatctaccatacaatacatatagaaacaaatctgaagctcttaaaaactctaaaaaggcaattaaagaaactaaatgcgatgctgtaaaaatagaaggaggaattaaagttaaagatatagttcgtcatttagtgaaaaataaaatacccgttttaggtcacataggaataactccacaaaccgtaaaagggaaatttaaatcaaaaggtaaaacagaaactgaaaaaagaaagttaattaatgatgctaaagaacttgaaaaaagtggtgcttttggaattgttttagaatgtatttatagtgatatttcaaaaaaaattaccaacttaattaaaatcccaacaatcggaattggagcctcggtgcattgcgatggtcaagttttagttacagatgatatattaggtttaacaaatgctaaaataaaatttgtaaaaaaatacaccaatgttaaaaaaatagtaaattctgctgtattgaaatttaaaaaagaggttaaatcagagaagtatccatcaaaaaaatattcttactaaa

SEQ ID NO: 229213 - DNA, 655 bp, Unknown
  Bacterial polypeptide expressing nucleotide sequence isolated from the Sargasso Sea
gactctttaggctcagttttatataattttaaaactacgagaaaagtcaatctttcaatgatgattgaacactcaaagagcgtaagacagggagttaaaaaaagtttaatgattgtagatatgcctttcaatacatacaaaaataaatcgcaagcacttaaaaattgtagaaaagtaatgaaagaaactaaatgtgatggaataaaattggaaggaggaagaaacattaatgaaattgttaaacacttaatcaaacataaaatacctgtgatgggacacataggtatcacaccacagtcagtaagagggaagttcagatacaaaggtaaatcagatattgaaaaaaaaaatttattaaaagactcaaaatctctagaagacgcaggcgtatttgcaattgttttggaatgtgtcgaaagaatagcttctaaagaaattacagagtcaattaaaattcccacaataggaattggttcatcaaatttttgtgatggtcagattttagttacagatgatttattgggactaacagatactaaaataaaatttgtaaaaaaatatgctgatttaaaaagtaatgtgaggaaagcagttaaaaaatttaagtcagatgttaagaaaggctcatatccgtcaattaaatattcttattaaa

SEQ ID NO: 229214 - DNA, 431 bp, Unknown
  Bacterial polypeptide expressing nucleotide sequence isolated from the Sargasso Sea
actgcagggtgagcaagtggtttccagcagagcgaagaaggtgactacgcacatattgcaagaaatgaagcgctcgaatgagaaaatagcaatgctcaccgcctacgactattccctagcaaggcttgttgacggagccggagtggacgtgatactcgtaggcgactctgcttcaaacgtgatggcggggaatgatactacagtccccataacactggaacacatgatctaccacgcacagtgtgtcgtgaatgctgtggacagggccttggtagttgtggacatgccattcggtagctatcaaggtgattcgaagcttgcactgaagagcgccatcagaataatgaaggagtccggcggtcatgcagtaaaaatcgagggcggcaaggaaatagtagactccgtgaaaaggatcctaactgcagggatcc

SEQ ID NO: 229215 - DNA, 229 bp, Unknown
  Bacterial polypeptide expressing nucleotide sequence isolated from the Sargasso Sea
atgagcagaaaatcagtcatagatatcaaagaaatgaaatctaagacccctattgtttgtttaacagcatatacagctacaattggacgggttttagatgaggaagcagatttactcttagtaggagactctcttggaatggttttgtatgatcacgaaaacactctttctgtaacgcttcaacaaatgattaaccattcacaggcagttggagatcgacatcaaaagc

SEQ ID NO: 229216 - DNA, 508 bp, Unknown
  Bacterial polypeptide expressing nucleotide sequence isolated from the Sargasso Sea
atgttaagaaaatcggcaaatgatataaaatctctcaaaagaaagactccgattgtatgtctaactgcttatacggcaccaattgctagagctattgacgaacaggttgatttaatgttggttggagactcgcttggtatggttctttatgattatgagaatacacttcaagttacacttgaacaaatgattaagcatgcgaagtctgttgttggagcttcaaataaatcttgtgtaattgttgatatgccatttggaacttatgaagaatctgttgataaagcatttatgaacgcagcccatgttatgaaagaaaccaattgcaacggtgttaaacttgaaggtggtcaaaaaatgttcaaaacaattgaacatcttactaaaagctcaattcccgttatgggccatataggtcttcaaccgcagagtgtattgattgatggaggctataaagtaagaggaaaagtaaaatctgagtggcaaaaatatatggatgatgcagttgctg

SEQ ID NO: 229217 - DNA, 478 bp, Unknown
  Bacterial polypeptide expressing nucleotide sequence isolated from the Sargasso Sea
tatgttaccttcagacctagttacttataaaaaaaaatctcgcaaaatcattgcactaacagcatgggactccatatcaggatctatagcagaacaagcaaatgttgatcttgtactagtaggagattcattagcaatggtgtgcttgggatacaaatcgacattgccattaactttagaaaacataatttatcataccaatgctgtttcaagaggatttatgaagaaaattgaggaacaacctctagtcgtttcagatatgccttttctgacttaccaatgtggtgaaaataaagctgttgagtatgcaggaaaaatcattcagagcacttatgcaaaagctgtaaaagtagaaggagctgaaccagaaatacaaaaagttatttctagattaataagaatgggaatccctgttatgggtcatataggtcttacaccacaaagctatctaaatattggattaaaaaaacaaggagaa

SEQ ID NO: 229218 - DNA, 286 bp, Unknown
  Bacterial polypeptide expressing nucleotide sequence isolated from the Sargasso Sea
atgaagaaattaaaaattttacataaaagtttttccaaaccgataagctgtttaactgcgtattcttcatcaattgcaaagattttagatggaaaaattgatttaattctagttggagattctctaggctcaacactctatggaatgaaaaatactcaaggagtaaccatggatatgatgaaaaatcatggagcagctgtcaataaggaaattaagagaagtttaaaagttctagatatgccttataaaacatatgataataaaattgatgcatatagaaatgcta

SEQ ID NO: 229219 - DNA, 445 bp, Unknown
  Bacterial polypeptide expressing nucleotide sequence isolated from the Sargasso Sea
atgtcaaaaaaaattgaaaaaataattaaaaaaaaaaataaaaaaaagatagtatgtcttactgcctattcaaagaatattgctaaaatattagataaatattgtgatattacattagtaggtgattcattagcaaatgttttatacggaatggaaaatactcacaaagtaagtttggacttaatgatacaacacagtgtaagtgtaaaaagaggaattaaacactctttatttgttgttgatatgcctaaaggctcgtacacgacacctttcaaagcaaaaaaaaacgctattttaattaagaaaaaaacaggatgtgatgctgtgaaaattgaaagtaataaaaaaaattttaaagtgataaaagaaattaaaaaagtaggaattccagtgatgggacatataggttttacaccacaatttaaaaaaaaattcaaagtttgaa

SEQ ID NO: 229220 - DNA, 490 bp, Unknown
  Bacterial polypeptide expressing nucleotide sequence isolated from the Sargasso Sea
aatgataaaaaaaaatctacaatatctattatctttaaaaaaagagaatatcttaataacatcggttacatcctatgatgcaagttttgcaaaattagctgatgactgcggcgttgatataatattggtaggtgattcattaggtgaagtaataaaaggtgctaagaatacccattctgttacagtggacgatatttgctatcatacaaaaagcgtttctaaaggaataaaatatgcatatttgatttcagatatgcctaagcattcttttagaactaaacgtcaggctttatccaatgctattaaaataacagagaaaggtttggctgacatgataaaaattgaatcgactccaaaacaattggatatagttaaacatcttattaataataacattaaggtttgtggtcatatcggtatacagcctcaaaatattaataaaaaatcttatagaaaaattggaatcactactagagagtgtaaaagttga

SEQ ID NO: 229221 - DNA, 772 bp, Unknown
  Bacterial polypeptide expressing nucleotide sequence isolated from the Sargasso Sea
atggctagggcttcattccaaaaaattaaattattgaagaaaaaaaatattggtattgtagccattactgcttatgatgcaagttttgcaagatattttgatgaattaggttttgatataatccttataggagactccctcggcgaagtcatcaaaggtcaaaaaaatacacataatgtctcactagaaaatatgatatatcactctcaatctgtccgtagagctgtaaaaaattcatatttaatatctgacttgcctagagaatcatcgctgaataaattgaccgcatacaagcatgctaaaaaaattattagtgagtgcaaagtaaatatgattaaaattgaatgtaataaaaacaatattgatgttgttgagcatcttgtaaaaaataagattccaatttgctgtcatttgggtttaacaccgcaacttatatcacaaaaaaatagctttagaaaatatggaaaatcaccaaaagaattctcttctattattaagattgcacagataattcaggaaattggagtaaaaatgattctgattgagtgtgtaacagatttactagctaaggagttaagaaaaataattaatgttccaatcattggcataggatctggtaaatcatgcgacggccagatattagtctcatatgacattcttgggataagctataactcaataccaaagatagttgagaaaaaatattttaaaataaaagatttcgaatcacgcgttaaaaaatacatttataatacaaaaaacttcctgtaat

SEQ ID NO: 229222 - DNA, 382 bp, Unknown
  Bacterial polypeptide expressing nucleotide sequence isolated from the Sargasso Sea
atgttaaataaaattaaaaaaattatatcaaagaaaaataaatcaaaaattatttgtcttaccgcctattctaaaaattttgctgaagaaatagataaatatactgatattgttttggttggtgatagtcttggatctgttttgtataattacaattccactagaaatgtaaacttagaaaatatgataaaacattctaagagtgtaagaatgggtgtaaaaaaaagtttaatggtagtagatatgccatacaaaacatatagaaacagaaaagaagcattaaacaacgcaaaaaaaataattaaagaaactaaatgtgaagcagttaaacttgaaggtggaacaaaaattataaacataattaaacacttaataaataata

SEQ ID NO: 229223 - DNA, 793 bp, Unknown
  Bacterial polypeptide expressing nucleotide sequence isolated from the Sargasso Sea
atgaatattaaaattaaaaagattttaaaaaaaaaaaataaatctaaaattgtaagtttaactgcttactctaaaaatattgcagaaattcttgataatcactgtgatattattttagtgggtgactctatggcaaacgtcctttatgggcttagtgatactcataagattaatctgaatactataattaaccacactattagcgttaaaaaaggagtaaaaaaatcattgttagtagtagacatgccgaaagggtcttacggtagtaaaaaaactgctaagaaaaatgcgaaattaattatgaaattaacaaaatgtgatgcagttaaactagaaagtaacaataaaaatttttatataattaaagaactagtgaaatctaaaattcctgttatggggcatattggttatactccacaattcaaaaaaaaatttagagttgaaggaaagtcgactcttggggcacaaaaacttttaaaagaagcaaagttaattgaaaaagctggagcattttcaatagttcttgaatgtttgacacctaatgcttctgcactagttacaaaaggtttaagaataccaactattggaattggttcttcctctcattgtgacggtcaaatacttgttacagatgatatgcttggtattagtgggttttatccaaaatttgtaaaaaaatacgcatctttaaatacaacaattgaaaaagctgtaaaaaaatatactagagatgtaaaaaaaggaaaatttccacttaaaaaaaactttctgaatggatcaaaacttagataac

SEQ ID NO: 229224 - DNA, 457 bp, Unknown
  Bacterial polypeptide expressing nucleotide sequence isolated from the Sargasso Sea
gatgctgttaactagagggcggaaaaaaattatcagtcaggtgaagtttttaattaaaaataagataccagtaatgggccatcttgggttgttgcctcaatctgcgaaaggtaaatttaaatctaaaggaaaaacacctaaagagatcaatcaactcatgaacgatgctgtattgcttcaaaaaactggtgtgtttgcaatagttttagagtgtattaagtcatcaatagcaaaacaaataacaaaaaaattgaaaattccaacaattggtattggttcatcggtctattgcgatggccaagtgttagttacagatgatttaattggtttaaatcaaacaaaaattaaatttgttaaaagatttgtaaatataaaaaaatatattaaagcaggaataagaaaatttgcttcagaagtgagatcaaagaaatatccaacaaaaaaatattcttattaa

SEQ ID NO: 229225 - DNA, 433 bp, Unknown
  Bacterial polypeptide expressing nucleotide sequence isolated from the Sargasso Sea
aatgaataaaaaaataaaaaaaattcttaataaaaaaaataaatcaaaaattgtttgtcttactgcatactcaaaaaatattgctgaaatcttagataaacattgtgatttagttttagtaggagattcactaggttcagttctttataattttaagtcaactaaagaagtgactcttcaaacaatgattaaccattcaaagagtgtaagactcggagtgaataagtctttaatggtatttgatatgccgtataacacttatcgaaatcctctagaggctttaagaaatgcaaaattggttattaaagaaaccaaatgtgatgcagtcaaattagagggtggaaaaaagataatcccaatagttaaaaaattagttcaaaataaaatacccgttatgggacatgttggtatattacctcaaacagacaagaaa

SEQ ID NO: 229226 - DNA, 640 bp, Unknown
  Bacterial polypeptide expressing nucleotide sequence isolated from the Sargasso Sea
aatgaaaaagaaaattttttttattaaaaaacttaaatcaaagagaaaaatcgtttgtctaacagcctactcaaaacctataacaaaaatattagacaaacattgtgacattattttagtcggcgactccgttgctactgctttttatggaatgaaaaatacaagattaattagttttgaaacaataattaaccactcaatttcagtaagcaaagctataaagaaaagtacacttgttatagatatgccttttaaaacttataggaactactcactagcaaaaaaaaatgtaaaaaaaatttttaaaaaaactaattgtgatgcaataaaaatagagagtaatggtaaaaactcatcaataatttctaagcttgttaaatcaggttatccagttatgggacatattggttttactcctcagtttaaaaaaaaatttcaacctcaaggtatgagtttaaaagatgaaaaaaaactaattgtagagtctttaaaaattgaaaaagccggtgccttttcattagttttagaatgtgtttcagaaagtgtggctaaaaaaattacaaaaatattaagaataccaacgatcggaataggttcatcaaaattttgtgacggacaaatcctggtaactgatgattta

SEQ ID NO: 229227 - DNA, 457 bp, Unknown
  Bacterial polypeptide expressing nucleotide sequence isolated from the Sargasso Sea
agcagtggttgactcaggtattccagtaatggggcatttgggattacttccacaaactgcagaaaaatattctgtgcaagcaaagaaaagcgaagatgcagtaaatttgatacaagatgctaaaatcttagaagaatctggagtgtttagtgttgttctagaaatggtaactagtgatgtgacagaaattattacaaaaagtatcaaagttcctacaataggcataggttcaggcataagttgtgatggtcaagtattagtagttcatgatatgttagggatgtttgaaaaaataaagccaaaatttgctaaaaggtacctaaatttgtctgaagagattagaaatgcagtaaattcgtatgtaaaagatgtaaaagaaaaacgatttcctgagaaagaacatacattttccatggaaaaagatgagttagaaaaattggagaaagaaattggctaa

SEQ ID NO: 229228 - DNA, 191 bp, Unknown
  Bacterial polypeptide expressing nucleotide sequence isolated from the Sargasso Sea
attgatcaccattgatactctcaataacctaaaagccaatggtgaaaaatttacatgtttaactgcatatgaatcaactttagcaaatgtaattagttctgctggagttgaagttatattggttggtgatagtttaggaatggtcattcaaggccataatagtactttgccagtaacaatgaatgatctta

SEQ ID NO: 229229 - DNA, 775 bp, Unknown
  Bacterial polypeptide expressing nucleotide sequence isolated from the Sargasso Sea
atgaaatcaaaactacaaagaattctaaaaaaaaaaaataaatcaaaattagtttgtcttactgcttattcaaaaaatttttctaaaatactagataaatactgtgacatagttttagtgggtgattctttagctaatgttttatatggaatgaaaaatactcacgaagtaacgttagaaatgatgatcaaacatacgataagtgtcaaatcaggattaaaaaaatcgctatgtgttatagatatgccattaaattcatacagcaacattcgtttagcaaaaaaaaatgcaaaaaaagcaataaaaaaaactaaatgtgatgctgttaaaattgagagtaataataaaaatttctcaattattaaagccttggttaaatcaaatataccagtaatgggccatataggatatacgcctcaatttaaaaaaaaatttaaagtagctggaagatcagaaattgaagaaaaaaagttaattactgaagccaaaagaattgaagaggcaggtgctttttcaatagttttagaatgtgtaaaaaaagaaactgcaaaacgcataactaaaaatcttaaaattccaacgatcggaataggttcttcatctagttgtgatgggcaaattttagttactgatgacattttaggtttaagtggttttaaaccaaaatttataaaacaatatataaatttaaataaaataattgaaaaaggtattcaaaaatatagaagagaggttataaataaaaaatttccaaaagatattaatagttattgat

SEQ ID NO: 229230 - DNA, 357 bp, Unknown
  Bacterial polypeptide expressing nucleotide sequence isolated from the Sargasso Sea
aagcaggctgcttcgctatcgtattagagtgtgtcccgaaagaggttgcggattcaattacatccgcgctgcatataccgactattggaattggtgccggtagtggaacaagtggacaagttttagtgtttcatgacttactaggcttcctacaacatcctcaccatgcaaaggtctctcctaagttctgcaagcagtatgctcgtgtaggtgaaaacatccaaagtgcattagcaaagtttattaatgaagtgggtacacaccaattcccggatgaacgctttacaccatacactttagaagctgatgagcttgaacttttcaaagacagacttgccaaagcaggtttttcctgac

SEQ ID NO: 229231 - DNA, 787 bp, Unknown
  Bacterial polypeptide expressing nucleotide sequence isolated from the Sargasso Sea
aatgaagaaaattaaaattttacacaaaagtttttctaaaccgataagctgtttgactgcatactctccatcaattgcaaatattttagatggaaagattgatttaatactagttggagactctataggttcaacactctatgggatggataatactcaaggagttactatggatatgatgaaaaatcatggagcagctgtaaataaaacaattaagaaaagtttaaaagtattagatatgccatataaaacatatgataataaaattgatgcatataaaaatgctaaaatacttttaaatcactgtaagcctgatttattaaagatagaaattaataaaaaaaaattagttgttttaaaacacttagtagataaaaaagtaaatgttatttcacatataggagtaacaccacaaagttttaagaattttaataaaattaaagttttaggaaaaactaataaagaaaaacaaaatttattagagttagctaaagaatctgaaaaacttggggctaaagcagtattgttagaatgtgttacaaccgatacagctaaactaattacagaaaatatttcaatacccacaataggtataggtgcttcaaaatattgtgatggtcaagttttagtatttgatgatttaataaatctaactacaaatgataaaaaaccaaaatttgtaaaaaattattttaattttaataaagttgccagcaatgtagttaaaaaatataatcgagaagttaagcttaaaaaatttcctagtactaaatttacttacaattaa

SEQ ID NO: 229232 - DNA, 505 bp, Unknown
  Bacterial polypeptide expressing nucleotide sequence isolated from the Sargasso Sea
atgttacctgcagaccttattaaatataaagaaaaatctcaaaaaattattgcacttactgcatgggactccatttcaggatcaattgcagagcaagctcatgttgatctcgtcttagtaggagattccttagcaatggtatgtttgggatacaaatccacattgccattaactttagaaaatataatttatcatactaatgctgtttcgagaggatttaaaaaggacattgaagaacaaccgttggttgtttcagatatgccatttcttacttaccaatgtggagaagataaagctgtggagtatgcaggtaaaattattcagagcacatatgcaaaagcggtaaaaatagaaggggctgaaccagaaatacaaaaagttatttctagattaataagaatgggaatacctgttatgggtcatattgggcttacaccacaaagctatttaaatctaggatttaaaaaacaaggagaaagccaagaaagtcaaagaaaaaattaag

SEQ ID NO: 229233 - DNA, 223 bp, Unknown
  Bacterial polypeptide expressing nucleotide sequence isolated from the Sargasso Sea
atgactaatcaaaatcaatctagagtaacaattaaagttcttaatcagatgaaaaataaatctgaaaaaatctctatgctaacggcttatgatttcagttttgctaaaataattgatgaggctggtatagacataattttagttggagattctgcttctaatgtaatggctggccatgaaacaacactgccaattactttagatcaaatgatttatcacgcaa

SEQ ID NO: 229234 - DNA, 368 bp, Unknown
  Bacterial polypeptide expressing nucleotide sequence isolated from the Sargasso Sea
tatgaaatcgaaaataaaaagaattctattaaaaaaaaataaatcaaaaattatttgtttaacatcttattcaaaaaattttgcttcaattgtcgacaagtattcagatataattttagtcggagattctcttggatctgttttatacaattataattcaactagacatgtaacgcttaaaaatatgatcgatcattctaaaagtgtgagaatgggtgttagtaaaagtttaatggtagttgatatgccttataaatcttacagcaacaaatcagaagctctaaaaaatgctaaaaaaattattaaatatactaaatgtgatgcagttaagcttgagggaggtcgaaaaattaaaaatattgtaaaac

SEQ ID NO: 229235 - DNA, 214 bp, Unknown
  Bacterial polypeptide expressing nucleotide sequence isolated from the Sargasso Sea
aatgacagtacctaaaataattaaattaaaagacgaacgtgtcatatctatgatgaccgcgtatgattatccttcatcaagagcaatatctgatgcagaaatagatatcattcttgtaggagattcacttgctcaagtagttttagggtatgatgatacactttcagttactgttgatgaaatgctccaccatgtcaaagctgttacaagagca

SEQ ID NO: 229236 - DNA, 778 bp, Unknown
  Bacterial polypeptide expressing nucleotide sequence isolated from the Sargasso Sea
aatgaacaacaaaataaaaaagattttaaagaaaaaaaataaatcaaaaattgtttgccttacagcatattccaaaaatattgctgaaattgttgatgatcatgcagatatagttctagtcggagactctcttggatctgtattatataattatgatacaacaagaaaagtaagtctaaatatgatgatcgaacataccaagagtgccagaatgggtgtaaaaaaaagccttttagtaattgaccttccttataatacctacagaaataaatctgaagcgcttaaaaattctaagagatcaattaaagagacaaaatgtgatgctgttaaagttgaggggggaacgagagtgaaagaaatcgtaaaacatttggttaaaaatagaatacccgtattaggtcatattggcgtaacaccacaaacaactaaaggaaaatttagatctaaaggtagaaatgaggtggaaaaaagaaaacttttgagggatgctaaagatctagaacaaagcggagcttttggaattgttttagaatgtatctacagcgatatctcaaaacaaataacaaactcaataaatataccaacaattggaattggtgcttcagtaaattgtgatggtcaagttcttgtaacggatgatttaattggtttgaatgagaccaactttaggtttgtaaaaaaatttggtaatgttaagaaatatattaaaaatgcagttataaaatataaaaactcagtaaaacaaaaaagatttccctccaaaaaaaacagttattaa

SEQ ID NO: 229237 - DNA, 349 bp, Unknown
  Bacterial polypeptide expressing nucleotide sequence isolated from the Sargasso Sea
aatgaaaaaaaaaatctcagatttaattaaaaaaaaaaataaacaaaaaattgtaagtttaactgcttactccaaaaacgtagcatcaattttagataatcattgcgatattatacttgttggagattctcttggatctgttttgtataattataaatcaacgagagaggtaactttgaataccatgattgaacattctagaagtgtcagaatgggtataaaaaaaagtttaatgattgttgacatgccacataatacgtatcgaactccaaaagaagctttgaaaaatgcaaaaaagataatgaaaaaaaccaaatgtgatggagtaaaattagaaggtggaaaaaaa

SEQ ID NO: 229238 - DNA, 299 bp, Unknown
  Bacterial polypeptide expressing nucleotide sequence isolated from the Sargasso Sea
tttttcagttgttcttgaaggaatggctgaaccattagcagctgaaattactgaattagtatcaattccaaccataggaattggagcttcgtcaaaatgtgatggtcaaatacttgtaacagaagatatggtgggcctaacagatatttcacctaaatttgttaagcaatatattaacataggagaactaattaaagatgccgcagtgcaataccgaaaagaagtaattagtagagagtttccaaccaaaaatcatgtttatggcatgacacccacaattgtaaaaaaagagaaataat

SEQ ID NO: 229239 - DNA, 300 bp, Unknown
  Bacterial polypeptide expressing nucleotide sequence isolated from the Sargasso Sea
aatgaataataagattaaaaaaattattaataaaaaaaataaatctaaaattatttgtttaacagcatattcaaaaaattttgcaaaagagattgataaatatgctgatataaccttagttggagattcattgggctctgtactatataattataatacaactagaaaagttacattgaaaaatatgattgaacattcaaaaagtgttcgcatgggtactaaaaaaagtttaatggtcgttgatatgccatataaaacttatcgaaataaaaaagaagctcttaaaaattcaattaaagt

SEQ ID NO: 229240 - DNA, 304 bp, Unknown
  Bacterial polypeptide expressing nucleotide sequence isolated from the Sargasso Sea
aatgaaaaaaaaaatttcaaattttataaataaaaaaaataaatcaaagatagtaagtttaacagcttactcaaaaaatattgcttctattttagataatttttgtgatttaattttagtaggtgattctcttggatctgttttatataattataaatctacaagagaggtcacattaaatatgatgattgaacattctaagagtgtgagaatgggagttaaaaaaagcttaatggttgttgatatgccttacaatacttacagaaactctaaagaagcattaataaatgctaaaaaaatcatg

SEQ ID NO: 229241 - DNA, 859 bp, Unknown
  Bacterial polypeptide expressing nucleotide sequence isolated from the Sargasso Sea
catgagcgctcatacccgcaccacccgcaagaccgtcaccgcgatccgttcgaccaagggcatcggcagcctcgtgtcgctgaccgcttactccgctccgatggcgacgctcgtcgacgaagtggccgacgtgatcatcgtcggcgactccgtcggcatggtgctgtacgggatgcccgatacgctgcgcgtcacgctcgacatgatgattgcacacggcgcggccgtcgtgcgcggcgccgcgcaggcgtgcgtcgtcgtcgacctgccgttttcgacgtatcaggaatcgcccgcgcaagcgtatcgctccgccgcgcgcctgctcgccgaaaccggcgcgcagggcgtgaagctcgaaggcggcagcgagatgggcgacacgatccgcttcctcaccgcgcgcggtatcccggtgatggcgcacatcgggctcatgccgcagcaagccaacgcgacaggcggcttccgcgcgcagggaatggacccgcgttcggccgcgcaggtgttcgacgccgcgtgttcggctgaacaggccggcgcgttcagcgtcgtcgtcgaaggcactgccgaagcgctcgcgcgccatatcaccgaaacgctgccgatcccgacgatcggcatcggcgcatcgcccgcgtgcgacgggcaggtgctcgtgaccgaggacatgatcggtgccttcgatgcgtacacgccgcgcttcgtgaagcgttatgccgatgcgaatacggtgatgcgcgatgcgattcgtcagtacgcacatgacgtgcggcagcgggtgtttccggagcccgcgcattgcttcgggtatggcaagccgttgcaactcgtgggcgcggctgacgctgctgcgtga

SEQ ID NO: 229242 - DNA, 256 bp, Unknown
  Bacterial polypeptide expressing nucleotide sequence isolated from the Sargasso Sea
tatgaaaataacagtaccaaaaataattggattaaagaatagtcgtgtcatatccatgatgactgcttatgattatccttcttcaaaagcaatatctgatgcagaaatagatattattctcgtaggagactcacttgcccaggtagttttaggctatgacgacactctatcggttaccgttgatgaaatgctccatcatgttaaagctgttaccagagcaaatccaaactcccttgttgtagcagatatgccttat

SEQ ID NO: 229243 - DNA, 682 bp, Unknown
  Bacterial polypeptide expressing nucleotide sequence isolated from the Sargasso Sea
aatgttagataaaataagaaaaattatattaaagaaaaataaatcaaaaattatttgtttaactgcatattcaaaaaattttgctgaagaaatagataaatatacggatatcattttagttggtgatagtcttggatcagttttgtataattataattccactagaaaagtaaaattagaaaatatgataaaccattctaaaagtgtaagaatgggcgtgaaaaaaagtttaatggtagtagatatgccatacaatacatatagaaacaaaaaggaagcattaaataatgcgaaaaaaataattaaagaaagcaagtgcgaggctgttaaacttgaaggtggaacaaaaattataaaaataattaaacatttaataaataataaaattccagttatgggacatttaggagtcttgccgcaaagtataaaaggaaaatttaaatttaaaggaagaacagaaaaagagaaaacaaaactaataaaagaagcaaaacttttagaaaatgcaggagtctttgcaattgttttagaatgtataaaaacaactacttcgaaacttataacaaactctataaaaatacctactattggaattggatcatcagtttattgtgatggacaagttttagttactgatgacatgcttggtttaaacaaaactaacataagatttgttaaaaat

SEQ ID NO: 229244 - DNA, 548 bp, Unknown
  Bacterial polypeptide expressing nucleotide sequence isolated from the Sargasso Sea
aatgactaatcaaaatcaatctagagtaacaattaaagttcttaatcagatgaaaaataaatctgaaaaaatctctatgctaacggcttatgatttcagttttgctaaaataattgatgaggctggcatagacataattttagttggagattctgcttcaaatgtaatggctggccatgaaacaacactaccaattactttagatcagatgatttatcacgcaagctctgtggtaagagctgtaaaacgagctcttgttatagttgatctaccttttggtacatatcaagcagattctaaagaggcattgaaatctgctattaaaattatgaaggaatcaggtgctcatgcagttaaattagaggggggttatcaggcgaaggaatcaattgagagaattattcaagctggaattccagtaatgggtcatttaggtttaaccccacagtcaatatataagtttgggacatatgaagtaagagcaaaggacaaagatgaggcatctactctgttaaatgatgctataatgcttgaggaaattggttgct

SEQ ID NO: 229245 - DNA, 559 bp, Unknown
  Bacterial polypeptide expressing nucleotide sequence isolated from the Sargasso Sea
atgataagtgtgtatgactatccgactgctaaatatgcagaggaggcgggaataaatgcattattagttggagacagtttagctatgacggtcttgggtcacaaagacacagtatcagtaacaatggaagaaatgcttcatcacgttaaagcggtttccagagcggcgcgacagtcaatggttgtcgctgatatgccttttatgtcataccaaatatccttacaacaagctgtgagaaatgctggaaggtttttaaaagagggaagagcggatgtagtaaaaattgagggaggctatcaaatggctgacactgttaaatcgattttttcagcgggaatttcagttattggacatataggacttactcctcaaagttctggtcaactgggtggtctaaaagtgcaaggcaagacggtggagactgcaaaaaaattattaaatgatgcgatttgtcttgaagaagcaggcgcttttgcaatcttaatggagtgtgttccatcgaaagttgcttccataataaatgaaagacttagtgtgcctacaatcagttatgggtctg

SEQ ID NO: 229246 - DNA, 624 bp, Unknown
  Bacterial polypeptide expressing nucleotide sequence isolated from the Sargasso Sea
aatgcctgacgttaccctgaccaccctgcagagcctcaagcagaacggtgaaaagatcgccatgcttacctgctatgacgccacctacgcccatgcggcctgccaggcgggtgtcgacgtgttgctggtcggcgactccctgggcatggtcctgcagggccacgacagcaccctgccggtcagcgtcgaggaaatggcctaccacactgcctgcgtcaaacgcggcaaccaaggcgcactgatcgtcaccgatctgccattcatggcgtacgccaccaccgagcaggctctgcacaacagcgccaagctgatgcaggccggcgcgcatatggtcaaactggaaggcgccggctggctggccgagcctattcgcctgctggccgaacgtggcgtaccggtgtgcgcgcacctgggcctgaccccacaggcggtgaacattctcggtggctacaaggtgcagggccgccaggaagcacaggcacggcagatgcgcgccgatgccatggcactggagcaggccggcgctgccatgctgctgctcgaatgcgtgccgagcgaactggccgcagaaatcacccaggcggtgaagattccggtgatcggcatcggcgctggcagcgccac

SEQ ID NO: 229247 - DNA, 760 bp, Unknown
  Bacterial polypeptide expressing nucleotide sequence isolated from the Sargasso Sea
aagaaagaaggcgttcctatttcaatggtcacttgctatgacgcttggtccgcgaagatactagatcaaaccaacgttgattgcttacttgttggcgactctttagctgaaataattcatggattcgactctacaattcatgccacggatgaaatgatggctctgcacactgctgccgtcgctagatccgcaaagaaaaaattcatagtggctgatatgccttttctatcttgctctcgcggaatcatccatgcaatgaaaactgtagagaaactaatgagagcgggtgcaaatgctataaaaatagaaggagcttctcatcagctggaaatcatcgagcatattgtttcctcgggaatacctgttatgggtcatttaggtttacaacctcaggcaattcataatttaggtgggaataaggttcaagggaaagagaaagcgggagctgacaagattctggctgaagctaaagaccttgagaaagttggctgtttctctatagttttagagtgtatccctagagagctaggtcaatgtgtgactcaaaacctgaagatacctactattggtataggggctggatcaaagacagatggacaggttttagttcttcaggatttgttaggccttgatgaaaacttctctccgaaatttttaaggaaatatgctcatctgcacgagatcgtttcttcagcagttgacaaatatcacgctgatgttcgttctagcgaattcccttctttgagcgagtgttattaat

SEQ ID NO: 229248 - DNA, 706 bp, Unknown
  Bacterial polypeptide expressing nucleotide sequence isolated from the Sargasso Sea
ctcaaaaaacgttgcatcaattttagataatcattgtgatattatacttgttggagattctcttggatctgttttgtataattataaatccacgaaagaagttactttgaatactatgattgaacattctaaaagtgtcagaatgggtattaaaaaaagtttaatgattgttgatatgccatataacacttatcgaactcctaaagaggctttaaaaaatgcaaaacaaataatgaaaaaaactaagtgtgatggagtaaaattggaaggtggaaaaaaaatttacgaaacaattaaaactttagttaaaaataaaattccagttatgggtcatttagggttacttcctcagtcagataaaacttttaaatttaaaggcaaaaaaaaggtagagagagatcacattctaagagattcgcaattggtagaaaaagctggaatattttctattgttttagaatgtgttgagacttctttagcaaagcttgtaactcagaatttaaaggtaccaactattggcattggagcttctaaatattgtgatggtcagatattagttattgatgatttaatcggtttaaatccaatgaattataggtttgtaaaaaaatatgcaaatattagaaacgaaatttctaaagctgttttaaattattcaaaagaagttagaaaaattaaatttccaaaaaagaaaaattcttattaa

SEQ ID NO: 229249 - DNA, 493 bp, Unknown
  Bacterial polypeptide expressing nucleotide sequence isolated from the Sargasso Sea
gctacggtcatgcgtgccggcgccaatatgatcaaaatggaaggcggcgcatggcttgctgataccgtcaaaatgctggccgagcgcgcggtgccggtctgtggccatctgggactaacgccgcagtcggtgaatgtgtttggcggctataaaattcagggtcgtggcgatgccggagacgttctgctggcagatgcgctggcgctggaagccgcaggcgcacagctcctggtactcgaatgcgtaccggttgagctggcgaaacgcgtcaccgaggcactgtcaattccggtgattggtattggcgcaggtaacgtcaccgatggtcagattctggtgatgcacgatgcgttcggcattaccggtggccacattccaaaattcgccaaaaatttcctcgccgaagcgggcgacatgcgcgccgcagtacggcagtatattaccgaggttgaatccggcgtctatccgggtgaagaacacagtttccattaag

SEQ ID NO: 229250 - DNA, 655 bp, Unknown
  Bacterial polypeptide expressing nucleotide sequence isolated from the Sargasso Sea
tatgaaaataaaaaagttcataaataagaaaaataaaactaaaatcgtagctttaactgcctattcaaaaaatatagcttcagttttagataattattgtgatcttattttagtaggagattcacttgggtcagttttatacaattataaatctacaaaagaagtaactttaaatactattattgaacattctaagagtgttcgaatgggtattaaacgaagtttaatgattgttgatatgccatataacacttatcgaaatcctaaagaggcattgaaaaatgcaaaactaatcatgaaaaaaactaaaagtgatggagtaaaactagaaggtggaaaaaaaattactaaaataattaatactttagttaaaaataatatacctgtaatgggtcatcttggagtgctgcctcagtcagataaaaagtttaaatttaagggtgagaataaagtagaaaaagaaaatattttaagagacgctaaattattagaacagtcaggtgctttttcaatggttttagaatgtattgaaacttcattagcgaaacttgtaacagatagtattggcattccaacaattggcataggtgcatctaagaattgtgatggtcagattttagtatttgacgatctaatagggctaaatcctatttaa

SEQ ID NO: 229251 - DNA, 259 bp, Unknown
  Bacterial polypeptide expressing nucleotide sequence isolated from the Sargasso Sea
tatgtcgactaaatcaaataaaaaaatagttacattaagtactttaaataagtttaaaaagaattctgaaaagtttacttgtttaactgcatatgaggccacgatggcatcagtgataagctctgctggtgtagacgtaatcttggttggtgatagtttaggtatggtcatacaaggtcatgacagtactcttccagtcacaatggatcaattaatttatcacttagaatgtgtggttaaaggtaataaaggatcccat

SEQ ID NO: 229252 - DNA, 598 bp, Unknown
  Bacterial polypeptide expressing nucleotide sequence isolated from the Sargasso Sea
aatgatttcaaaaataaaaaaaatattaaataagaaaaataagtctaagattatatgtttaacctcatattcaaaaaatatttctgaggcaattgatccacatgcagatattatcctagtaggagattcattaggttcagttctttataattattctactaccagaaaagtaaccctcaatcagatgatagaacattctaaaagtgcaagattaggaattaaaaatagtttaatggttgtcgacatgccgtataaaacttatagaaataaaaaaattgctcttaaaaacgcaaaaagaattttaagggaaaccaaatgtgatgcagtcaaacttgaaggtggatcattaattattaatgttattgaacatttaattaaaaataaaattccagttatgggacatttgggaatattacctcagagtgttaaaggaaaatttaagtttaaaggaaaaaaaaatagtgagagaaaaaaaatttttaatgattcaaggttactggaaaagacaggtgtattttcaatagtccttgaatgtgttgagtcgactctcgcaaagaaaatatcaaaaaaactcaaaattcctactataggaattgga

SEQ ID NO: 229253 - DNA, 544 bp, Unknown
  Bacterial polypeptide expressing nucleotide sequence isolated from the Sargasso Sea
gaggaacaacctttagtcgtttcagatatgccttttctgacttatcaatgtggtgaggataaagctgttgagtatgcggggaaaatcattcagagcacttatgcaaaagctgtaaaagtggaaggagctgaaccagaaatacaaaaagttatttctagattaataagaatgggaatccctgttatgggtcatataggtcttacaccacaaagctatctaaatattggattaagaaaacaaggagaaagcttagcaagccaagaaaaaatcaagaaagaggcttctattcttgaaaaattaggatgcttttcaatagttcttgaacatattcctgatttgcttgctaaagaaatacaaaattctttatcaattcccacaataggtatcggtgcaggtaattattgcgatgggcaagtaagagttactgcagatttgttaggcctcaatgatgatcaaccgccattttgcaaaccaattatccaaggtaagaaattatttaaggataaattaaaggaatgggtagcctctgaaaggcttaattaat

SEQ ID NO: 229254 - DNA, 820 bp, Unknown
  Bacterial polypeptide expressing nucleotide sequence isolated from the Sargasso Sea
atgagcacacaagcagactctcaagaaaaagtaacgaaccggaccctcggtttaatgaaaacgcaaaacgaaaaaatcgcatgtatgaccgcttacgacgccgcatttgcggctgttttagagcgttctggaatagaagtgattctagtcggcgattccgttggaatggtagtgcaaggtcagaccacgactattccggtgactatagacgaaattatttatcatactcagctagtttgcagaggtgcatcacgcgcaatgattatggccgacatgcctttcatgagttattcgtctccctatgattgcctgacgaacgctgcgcgactaatgaaagaaggaggagctgaggttgttaaactagaatggggagagctcgaaattgacatggtaagacgcctcacagagtgtggtgtccctgtttgtgcacatcttggtttaaccccgcaagctatacacaaatacggaggatatcgagttcaaggtcgagaagtcgaagcagcaaaaaaaatgcaagaagatgccttagcactagaggaagctggcgcggatatcatccttctggaatgcgtcccgatgagtctagctagtgagataacaagacaagcgaatgtcccagtgatcgggatcggggcaggccccgaatgcgacggacaaatcttggtgctctatgacgtcctagatattgctcctggcaaacgcacccgtttttccaaaaactatatggacatagagggttctatccatggcgctcttaaacactacgtcaaggaagttaagtcagggtcctttcctactgaagaatacgccttcaaatagc

SEQ ID NO: 229255 - DNA, 574 bp, Unknown
  Bacterial polypeptide expressing nucleotide sequence isolated from the Sargasso Sea
tcgcggcgcccccattgcctgctgctcgctgacctgccgtttatggcctacgccaccccggaacagaccttcgctaacgccgccattgtgatgcgcgcaggcgccaacatggttaagcttgaaggcggcgcctggcttgcggaaacggtgaaaatgctggcggaacgcgcggtgccggtttgcggccaccttggtctgaccccacagtcggtcaatattttcggcggctataaagtgcagggccgcggcgacgcggcgcaggcgctgttcaacgacgcgctggcactggaagcggctggtgcacagctgctggtccttgagtgcgtcccggtcgagctggctcaacgtatcaccgaggcgttaaccattccggttatcggcattggtgcgggtaacgtcaccgacggccagatcctcgtgatgcatgacgctttcgggatcaccggcggccatatccctaagttcgctaaaaatttcctcgctgaagcgggcgacatgcgcgccgcagtgcggcagtatattgccgacgtggagtccggcgtttatccgggcgaagaacacagtttccattaag

SEQ ID NO: 229256 - DNA, 794 bp, Unknown
  Bacterial polypeptide expressing nucleotide sequence isolated from the Sargasso Sea
aatgaccaataattcaaatcaatctagagtaacaataaagattcttaatcagatgaaaagtaaatctgaaaaaatctcaatgcttactgcttatgatttcagttttgccaaaataattgatgaagctggtattgatattattttagttggtgattctgcatcaaatgttatggctggtcatgaaacaactcttccaattactcttgatcaaatgatatatcatgctagttcagtagtaagagctgttaatagagctctagttattgttgacttaccttttggaacctatcaagctgattctaaggaggcattaaaatctgcaatcaaaataatgaaggaatcaggagctcatgctgttaaattagagggaggatatcaagctaaagagtcaattgaaaggattatccaagctggaattcctgtaatgggtcatttaggtctaactccacaatctatatataagtttggaacatatgaagtaagagcaaaaaataagcaagaagcagatacattattaaatgatgcattaatgcttcaagagattggctgtttttctgttcttctagaaaaaataccaaatatactttcgaaaaaagtttcttcaaaattaactgttccaattattggaattggagcagggagtagtgtagatggtcaggttctagtattacaagatatgctcggtatgaataaagactttagtccaaggttcttgagaagatatcttgatatggataggttaatttgtgaagctgtaaaaaaatactctactgatattaaaagtggagattttc

SEQ ID NO: 229257 - DNA, 479 bp, Unknown
  Bacterial polypeptide expressing nucleotide sequence isolated from the Sargasso Sea
aatgcctaacacagttaatgatattattcagatgaaatctagagaaaaaattactgtcttaactggatatgattcgactatggcaacattatgtgataaggttgatgtaattttggtaggagatagtgcgggaatggtaatgctcggatatgatgatactcgagatgtgacaatggatgatatgatacgttttacaacagctgtgaaaaatgcaaaaactgattcattaattgttgcggatcttccaattaattcgtatgaaaatgaggattctgctattactaattcaaaaagacttgtacaagcaggtgcacatgcggtaaaacttgaaggtggaaaagaaattgcagatattatcaaagccgtagttgattcaggaattccggttatgggacatttaggattactaccacaaactgcagaaaaatattctgttcaagcaaagaagagtagtgatgcagtaaatttgttagaagatg

SEQ ID NO: 229258 - DNA, 616 bp, Unknown
  Bacterial polypeptide expressing nucleotide sequence isolated from the Sargasso Sea
cacattgccattaactttagaaaacataatttatcatactaatgctgtgtcgagagggtttaaaaagacaattgaggaacaacctttggtcgtttccgacatgccttttctgacttaccaatgtggagaggataaagctgtggagtatgcaggtaaaatcattcaaagcacttatgcaaaagcggtaaaagtagagggggctgaaccagaaatacaacaagttatttctagattagtaagaatgggaatccctgttatgggacatatagggctcacaccacaaagctatttaaatctaggattaaagaaacaaggagaaagcttagcaagccaagaaaaaatcaagaaagaagcttatattctcgagaaattaggatgtttttcaatagttcttgaacatattcctgagttgcttgctaaagaaatacaaaataacttatcaattcctacgataggcattggtgcaggtaatttttgcgatggacaagtaagagtcactgccgatttgttaggccttaatgatgatcaaccaccattttgcccgccgattattcaggggaaaaaattatttaaagataaattaaaagaatgggtagcctctgaaagaaagaattaa

SEQ ID NO: 229259 - DNA, 637 bp, Unknown
  Bacterial polypeptide expressing nucleotide sequence isolated from the Sargasso Sea
aatggctaagatcaccaccgccgtattacagaaaatgaaacaacaaggtaataaaatcagcatgctgacagcttatgatgccagtttcgctaaattatttgccgagcaaggcattgaagttttattaatcggcgattctcttggcatggtgctacaggggcatggcgatacgttaccggtaaccgtcagcgatatcgcctaccatacccgtgcagttcgcgcaggtgcaccggatgcctttgtgattgccgatatgccgtttatgagttacggcacgctggagcaggcgttgcagaatgttgtacctttgatgcaggccggtgccaacatggtgaaattggaaggcggagattttctgctgcccacagtaaaggccctgacagaacgtggcgtaccggtatgcggtcacctggggctgacaccacagtcagtgcatgtttttggtggttataaagtacagggtaaaactgacgcagctgccgatgctatggtagcgcaggcaaaagccctgcaagaggccggcgcccagctgctggttcttgagtgcattccaactgcattggctaaacgtattaccgaggccctgaacatacctgtgattggtatcggcgccggccacgtcactgatggtcaggta

SEQ ID NO: 229260 - DNA, 427 bp, Unknown
  Bacterial polypeptide expressing nucleotide sequence isolated from the Sargasso Sea
aattgatagaattataaaagctggtatacctgtgatgggacaccttggattaacgcctcagtctatttataaatttggtacttatacagtaagagcccgagaggaaaaagaagcaaatctattagttaataatgctaaatttttagagaatattggatgttttgctgctgtcttagaaaaaattccctctgagttatcaaaaaaagttactaaagaaactaatttcccaattataggcattggtgcaggtaatcatgttgatggacaagtacttgtattacatgatttattaggtttaactcatgagttcaacccaagatttttgagaaggtacatggatttaaataaaacagtaaaatcagcaataaaaaaatatgttggtgatataaaaagtcatgattttcctaacaaaaatgaaatatactag

SEQ ID NO: 229261 - DNA, 711 bp, Unknown
  Bacterial polypeptide expressing nucleotide sequence isolated from the Sargasso Sea
tattaagattaaaaaaattattaaaaaaaaaaataaatctaaaattgtttgcttaactgcatattccaaaaattttgcagaagaaatagacaagtatgcagatataattttggttggagactcccttggatcagttctttacaactaccatactaccagaaaagtaacattaaataatatgatacaacactctaaaagtgttaaaatgggtgttaaaagaagtttaatggtagttgatatgccttataaaacttataggaacaaaaaagaagctttaaaaaattcaaaaaaagtaatttccaatacaaaatgtgatgcagtcaaattagaaggaggaaataaaattaaaaaaattgtcgaatatttagtaaaaaaaaaaatcccagttatgggacacttaggcatactacctcaaagtgtaagaggaacttttaagtcaaagggtaaaactgaaaatgaaacttttaaattgataagagacgcaaagatacttgaggaggctggttgttttgctatcgttttagagtgtgttaaatctaaaacatcaaaattaattacaaaaaatttaaaaataccaacaatcggtataggatcttcagtattttgtgatggccaagtattggttactgacgatttacttggtctaaatgaaacaaatataagatttgtaaaaaaatttattaatctaaaaatatttataaacaaaggttt

SEQ ID NO: 229262 - DNA, 723 bp, Unknown
  Bacterial polypeptide expressing nucleotide sequence isolated from the Sargasso Sea
attttagtttcgcaaaaattattgatgaggctgggatagatattattttagttggagattctgcatcaaatgtaatggcaggccatgagactacgcttcctataactttagatcaaatgatttatcatgcaagttctgtaataagagctgtgaaaagagctttagtagttgtcgacctcccttttggtacttatcagtcagattctcaagaagcattaaaatcagcaatcagaataatgaaagagtctggagctcacgctgttaaattagagggaggatatcaagctaaagactcaatagaaaggattatccaagctggaattcctgtaatgggtcatttaggcttaactcctcaatctatatataagtttggaacatatgaagttagagcaaaaaataagcaagaagcagatacattattaaatgatgcattattacttgaagagattggctgcttctctgttctattagaaaaaataccaaatacactctcaaaaaaagtttattcaaaattaacagttccaattattggaattggagcaggaagtgatgtagatggtcaggttcttgtattacaagatatgcttggtatgaataaagactttagtccaaggttcttaagaagatatcttgatatgaacacgttaatttgtgaagctgtaaaaaaatactccactgatattaaaagtggagactttcctaataaagaagagcagtactgat

SEQ ID NO: 229263 - DNA, 487 bp, Unknown
  Bacterial polypeptide expressing nucleotide sequence isolated from the Sargasso Sea
aggcggtcagaaaatggcaaagacaattaaatacctcacaaaaagttcaatcccagtaatgggccatattggtttacagccgcagagcgtgctacttgatggaggttacaaagttagaggtaaagtaaagtctgaatggcaaaagtatatagacgatgcaattgcggttcaagaagctggtgcttttgcagtcgttcttgaaggaatggcagagcctttagctgcagaaataacttctattcttaatataccaactattggaataggagcttcgccaaaatgtgatggtcaaatattagtaactgaagatatcttagggttatcaaatgtagctccaaagtttgtaaaaaaatacattgatttagatgacgttatcaaatctgcggtacataagttttcagatgaggttaaaaatagaagttttccatcatcagatcatatttataacatgcgaccgcaaatagttagtaacgaaggtaataattaa

SEQ ID NO: 229264 - DNA, 577 bp, Unknown
  Bacterial polypeptide expressing nucleotide sequence isolated from the Sargasso Sea
tggtgtcaacgccgcttttgttattgccgatatgccgtttatgtcatatgccacaccggcccaggcttatgaaaacgccgcagccttaatggccgccggtgccagcatggtaaaactggaaggcggcgcctggttgtgcgagaccatcaccggcctaaagcaacgcggtgtgccggtttgtggtcatctggggctcaccccgcaatcggtgaatgtctttggcggctttaaagtacagggccgtgaagaagacaaagcccaacagctgatagatgacgcgctggcattagaagccgctggggcgcagatgctggtgcttgagtgtgtgcccacaccactgggtaaagaggtcagcgaacagctaagcattccggttatcggcattggcgccggcgtacacaccgatggccagatcctggtgatgcacgacatgtttggcgtaagtgccaactatatgccgaagttttcaaaaaactatcttagcgagacaggtgatctgcgcaaagccgttgccctgtatattgaacaagtaaccaacggccagttccccggccccgaacatagctttgacaaataa

SEQ ID NO: 229265 - DNA, 689 bp, Unknown
  Bacterial polypeptide expressing nucleotide sequence isolated from the Sargasso Sea
gtcaaaaattaattataaaaaaatattattaaaaaaaaataaagagcccattacttgtcttactgcttattctaaacctctagcaaatattttagatggtaaagtcgatttaattttagttggagactcattaggaacaactttatatggaatgaaaaataccagatctgtaaatcttgaaatgatgaaaaatcatggaaaagcagtagtgagtaatactaaaaaatcaatgacaataattgatatgccatacaaaacatatcgtaataaaaaagaagctctaaaaaatgctttaaatattttatcttttacaaaagcagacttcattaagcttgaaacagataataaaaatattgatatagttagatatttaacaaaaaataaaattaaaattatatctcatataggtgtaacccctcaaaaattctcaaatttcagtaaaattaaaagtgttggaaaaaatttcaaagaatcaaataatttaataaatctagcaaaaaaacttgaaaaagctggatcgaaattaatcgttttggaatgtatagaaatgaatacttcaaaagaaataactaataaattaactataccaactatagggataggagcttcaaaatattgtgatggtcaagttttagttatagatgatattataaatttagattcaagtatgaaaaaaccaaagtttatca

SEQ ID NO: 229266 - DNA, 644 bp, Unknown
  Bacterial polypeptide expressing nucleotide sequence isolated from the Sargasso Sea
aatgaatttaaagataaatcaaataatctctaaaaaaaataaatctaaaattgtttgccttacagcttattcaaaaaatattgctcaggctatagataaacaaacagatattatactagtaggagattctcttggatccacattatataattttaaatctacaagaaatgtcactttagacatgatgataaagcattctaaaagtgtacgacaaggtgtttcaaatagcttaatggtagtagatatgccatataatacttacaacaaaccatctcaagcattaaaaaattgtaaaaaagttatgaaattaacaaaatgtgatgcagttaaaattgaaggtggattaaaaaaatataaaattattaaatatttaataaaaaataaagttcctgttatgggtcatcttggaatattgcctcaaacaacaaaaggtaaatttaaatcaaaaggaaagtctattaaagaaaaaaaggaaataataagagattgtaaaattttagaagatgcaggtgtgttttctatagtcctagaatgtgttgaaacaaaacttgcaagatatataaccaatttaataaaaattcctactatcggcattggttcatcgaataattgtgatggacaaatattggttatagatgacattt

SEQ ID NO: 229267 - DNA, 662 bp, Unknown
  Bacterial polypeptide expressing nucleotide sequence isolated from the Sargasso Sea
tatgcttacaaaaataagtaggctttcaatacaaaaaaaaaataaatctaaaattgtttgtttaactgcatattcaaaaaatatagctgaagaaattgacaaatatgcagacttaatacttgttggagattctttaggttcagttttgtataattatgataccacaaggaaagtaagtcttaagatgatgattgaacattcaaaaagcgtcagaaaaggtgtgaaaaaaagcttaatgatagtagatatgcctttcaatacttataaaaataaatttcaagcacttaaaaattgtaaaaaagtattaaaggagacaaagtgcgatggtattaaattagagggaggcagaaaattaaatggagttattaggtatttaaccttgaacaaaattccagtaatgggtcatataggcataactcctcaaacaataagaggaaaatatagatacaaaggtaaaacaaatttagaaaaaaaaaaattaataaaggactctaaatccttagaggaagcgggtgtgtttgcgatagttttagaatgcgttgaaagaaaattatcaaaacaaattacagaaactgttaaaataccaactattggaattggctcgtccaaattttgtgatggtcaaatattagtaacagatgatatgttgggtttgacagaat

SEQ ID NO: 229268 - DNA, 511 bp, Unknown
  Bacterial polypeptide expressing nucleotide sequence isolated from the Sargasso Sea
atgagcaaaattaaaaaaataatttctaaaaaaaacaagactaaaatagttagtctttctgcatattcaaaaaatgttgcatctattttagataattattgcgatattatacttgttggagattctcttggatctgttttgtataattataaatctactaaagaagtaactttgaatacaatgattgaacattctaaaagtgtcagaatgggtataaaaaaaagtttaatgattgttgacatgccgcataacacctatcgaaatcctaaagaagctttgaaaaatgcaaaacagataatgaaaaaaactagatgtgatggagtaaaattagaaggtggaaaaaaaatttatgaaacagttaaaactttagttaaaaataaaatcccagttatgggtcatttaggcttacttcctcaatcagataaaactttcaaatttaagggtaaaaatgaactagagagaaataatattatcagagacgcacaattattagaaaaagcaggagtatttt

SEQ ID NO: 229269 - DNA, 826 bp, Unknown
  Bacterial polypeptide expressing nucleotide sequence isolated from the Sargasso Sea
atgagttcagaacaaaatttaaaaagagaaccgaagccaattgaagaaagaattgcaacctctattgtaacattaaggaataaaaagaaaaaaggaatcagtgcagttattgttactgcatatacataccctgaagcgttattagctgatcaagctggagtagatataatacttgttggtgattcactaggcatgacaacacaaggatacaaaagcacgatagcagttactatggacgacatgatttcacattgtcgtggcgtatggagggcaaaccagaaatccttccaaataggggatatgccttttatgtcttatcaagaatcaagcaagcttgctattcgaaatgccggacgattcttaaaagaaggagggtgtgatgctgtaaagatagaaggagcaatgattgatagagtcaaagcaattgtagatagtggaattattgtaatgagccacttggggcttacacctcaatcacgggcagcacttggaggctatagagtacagggaaaaagtatggatgctactgaaaaaattctaaacgatgctcttaagttacaagatgcaggttgttcgttcttattgcttgaagcaatgccaaaagaatcagcagctataattgcaaatgaactctccattcccgtttatggtgtgggagcaggtgaccaagttgatggtcagcttgttattttacatgacttaatcggaatgtttttcgattttaaatcaaagtttgtaaaaagatattgtgatgcaggcgaaatgattttagaagcgttgaaagattatgcatatgaagttagaacagggaaatttccaacaaaag

SEQ ID NO: 229270 - DNA, 772 bp, Unknown
  Bacterial polypeptide expressing nucleotide sequence isolated from the Sargasso Sea
atgagtaaaattaaaaaatttattgcaaaaaaaaacaagtcaaaaatagttagtctaactgcctattcaaaaaatattgcttccatattggataattattgtgatttaattttagtaggagattctcttggttcggttttatacaattataaatccacaagagaagtaactttgaacactatgattgaacattctaaaagtgtcagaatgggtataaaaaaaagtttaatgattgttgatatgccacataacacctatcgaactcctaaagaagcagtaaaaaatgcaaagcaaataatgaaaaaaacaaaatgtgatggtgtgaaattagaaggtggaaaaaaaatttatgaaacaattaaatctttagttaaaaataaaattccagttatgggccatttaggattgcttcctcagtcagataaaactttcaaatttaaaggaaaaaaaaagttagagagaaacaacattataagagactcgcaattattagaaaaagctggagtgttttcaattgttttagaatgtgtagaaacttcattagcaaagcttgtcactcaaaatttaaagataccaaccattggtattggagcttctaaatattgtgatggtcaaatattagtttttgatgatttaattggtctaaatccaatgaattataagtttgtaaaaaaatatgcaaatattagaaatgatatttctaaagctgtttcaaattattcaaaagaagtcagaaaaattaaatttcctaataaaaaaaattctttttaat

SEQ ID NO: 229271 - DNA, 430 bp, Unknown
  Bacterial polypeptide expressing nucleotide sequence isolated from the Sargasso Sea
atgagttcaaatcaaaatttaaaaagagagccaaagccgattgaagaaagaattgctacttcaattgttacgttaagaaataaaaagaaaaaaggaataagtgcagtcattgttactgcttatacatatccagaagctttattagctgatcaagctggagttgatataattcttgttggtgactcacttggtatgacaacacaaggatataaaagcacaatagcggttactatggatgatatgatttcacattgtcgtggtgtttggagggcaaatcaaaaatcctttcaaataggagatatgccatttatgtcatatcaagaatcaagcaagcttgctattcgaaatgcggggagattcttaaaagagggaggatgtgatgcggtaaaaatagaaggcgcaatgatcgatagagtcaaggcaattgttg

SEQ ID NO: 229272 - DNA, 757 bp, Unknown
  Bacterial polypeptide expressing nucleotide sequence isolated from the Sargasso Sea
cgcggtgacaagataagtatggtcacttgctatgacttttggtctgcgcaaattttggattcaacttcgattgattctctgttagttggagatagcctggcaatggttatgcatggtttcgattctaccgttcatgcggacgttgagcttatggcacttcatataaaagccgtgcgaaaaggagcgccaaataaatttttggttggagatatgccctttttagccctaaggaaaggattagctccagctatggaggcagttcagatcctaatgcaagcgggctgcaatgcaataaagcttgaaggagaggtggggcaagccgagttaatccgacatattgttgaatcaggagttccagttatggggcatttgggtctaacccctcagtctgtaaatgcttttggtggacataaagttcaagggcgaggcgaaattgaagaagagaaaataattgagtcggctactttgcttgctgatgccggctgtttttcggtggtcttagagtgtattcccgcaactttagcagcaaaagttacgcgggcaatagagattcctactataggtataggagctggttctgaaaccgatggacaggtattagttctccaagatatgttaggaatgaatccagactttaaaccaaagtttttgcgccattatgcgcaaggacattctcttgtctcccaggccgttaataaatttcatgaggaaacctcgcttggttgtttcccttcaaactcagaatcttattcatgaa

SEQ ID NO: 229273 - DNA, 616 bp, Unknown
  Bacterial polypeptide expressing nucleotide sequence isolated from the Sargasso Sea
tattttaattggtgattcgctgggcatggtattacaaggccacagtgacacattacccgtgacaacagctgaaatcgcctaccacacccgctgcgtccgcgctggcgcaccgctggcttttgtcatcgccgatatgccttttatgagttacgccacagtagaacaggcgatgcaaaacgctactccgctgatgcaagctggcgccaatatggtcaagcttgaaggtggcgatttcttattaccgaccatcaaagctttgactgaacggggtattccggtctgtggccatttaggcttaactcctcagtctgtgcatgtgtttggtggctttaaagtgcaaggtcgcgatgaacaggccgcagaggctatggtgcaacaggctatagctttacaggacgctggtgctcaacttttagtagttgaatgtattccgtctacgttggctgagcgtatctccaaagcactggtgatcccggtgattggcataggtgcaggcaaagacactgatggtcagattttagtgatgcacgacttgttaggcatcagctcgggttatattccaaaatctcgaaaaacttcctgcaggaaaccggtgagattaaacaagccatcggca

SEQ ID NO: 229274 - DNA, 787 bp, Unknown
  Bacterial polypeptide expressing nucleotide sequence isolated from the Sargasso Sea
aatgaaaaaaatcaaaattttaaacaaagcttttactaaaccgataagctgtttgactgcatactctccatcaattgcaaaaattttagatggaaaaattgatttaatactagttggtgactctcttggctcaacactttatggaatgataaatactcaaggagttacaatggacatgatgaaacatcatggaaaagctgttaatagagaaattaagagaagtttaaaggttttagatatgccctataaaacatatgataataaaattgatgcatatagcaatgctaaaatacttttaaatcactgtgcgccagatttattaaagatagaaattagtgaaaaaaaattagttgttttaaaacacttagttgataaaaaaataaatgtcatttctcatataggagtaacaccacaaagttataaaaattttaataaaattaaagttttaggaagaactaataaagaaaaaaaatatttattaaatttagcaaaagaatctgaaacacttggggctaaagctgtattgttggaatgtataacagctgatacagctaaactaattacagaaaatatttcgatacctacaataggtataggtgcttcaagatactgtgatggtcaagttttagtatttgatgatctaataaatttaacaacaaataataaaaaacccaaatttgtaaaaaattatcttaattttaataaaattgctagcaatgcagttaaaaaatataatcaagaagtaaagcttaaaaaatatcctagtgctaaatttacttataattaa

SEQ ID NO: 229275 - DNA, 800 bp, Unknown
  Bacterial polypeptide expressing nucleotide sequence isolated from the Sargasso Sea
gaaacagaaaggtaaagaagctatagtttgcttaacggcctatacagctccaattgctagagcaatagacaaatatgtcgatgttttacttgttggagattctttaggaatggttctttatgactatgaaaatactttgccggttacacttaatcaaatgatagaacattcaaaatctgttgttggagcttctgaaaatgcctgtgttgttgttgacatgccttttggaacgtatgaggagtcaaagaatctagcttttaacaacgctgtccgcataatgaaagaaacacattgtgatggcgttaagcttgaaggtggtcaaaatatgtttgaaactgttagatatttaactgatcggtctattccagttatgggacatataggtctgcaacctcaaagtgtagttatagatggcggttataaaataaaaggaaaaaataagtttgattggagcaaatacattgatgacgccaaggcactggaagatgcaggtgccttttcaatggtcttagagggtatggcagaaccattagcggcagaaattacatcacaagtatctattccaacaataggtattggggcttcacctaattgtgatggtcaaatattagtaacagaagatatgattggacttactaacatcactccaaaatttgttaaggaatatattaatattggcaaattaattgaagaagcggcaaactcatatagcaacgaagtaaggaacaaagaatttccagctaagaatcatacatattctatgaatccaaccattatcaaatcaaagaagggcaagtaat

SEQ ID NO: 229276 - DNA, 555 bp, Unknown
  Bacterial polypeptide expressing nucleotide sequence isolated from the Sargasso Sea
aaaaaattgaggaacaacctcttgtcgtttcagatatgccttttctgacttaccaatgtggtgaggataaggctgttgagtatgcagggaaaattattcagagcacttatgcaaaagctgtaaaagtggaaggagctgaaccggaaatacaaaaagttatttctagattaataagaatgggaatccctgttatgggtcatataggtcttacaccacaaagctatctaaatattggattaagaaaacagggagaaagcttagcaagccaagaaaaaattaagagagaggcttcaattcttgaagaattaggatgtttttcaatagttcttgaacatattcctgatttgcttgctaaagaaatacaaaattctttaacaattcccacaataggtattggcgcaggtaatttttgcgatggacaagtaagagttactgcagatttgttaggccttaatgatgaccaacccccattttgccaaccgattatccaaggaaagaaattatttaaggataaattaaaagaatgggtagactctgaaagacttagtagttaat

SEQ ID NO: 229277 - DNA, 724 bp, Unknown
  Bacterial polypeptide expressing nucleotide sequence isolated from the Sargasso Sea
ctgcggcaacgcaagcaacagggccaaccgattgctgtactgaccgcctgggatgccctcagcgccagctgggcagaagccgcgggggtggatctggtcttggtcggcgattcgctggccatggtggccctcggccacgccaccaccttgccggtgacgctcgaggcgatggtgcagcacaccgctgcggtcgagcgggggcttcggcacaccccaatcgttagcgacctgccctttttgagctatcaatgcgggcctgagaaggccgtcgctgctgctggacgctttctcaaagaaaccggctgcgccggcgtgaagctggagggagctgagccagaaaccattggggtgattgatcgtttggtgcgcagtggcatcccggtgatgggccatctggggctgacgccgcaatcggtgcatcagctgggctaccggcgccaagccactgatcctgtggcccaagagcggctctggcagcgggccctggagttggagcagaccggctgctttgccctagtgctcgagcacgtccccgccgaactggccacgcgactgagttccgaattgagcgtgccggtgatcggcattggtgctggtgaaggctgtgatggccaggttcgcgtcagtgcagatctgttgggactcaccccacagcagccgcccttttcacccgccttgctggatggccatgcgctattcagcaaagcttacgccagtgggtgca

SEQ ID NO: 229278 - DNA, 601 bp, Unknown
  Bacterial polypeptide expressing nucleotide sequence isolated from the Sargasso Sea
gttagaaaatatgattcatcatacaaatgcagtttcaagagggttcagcaaaggaataaaagaacaatcattattagtttgtgatatgccttttctttcttatcaatgcggagaagataaggcagtagaatatgccggaaaaattattaaaaacacttatgcaaaggcagtaaaaattgagggtgccgaaccagaagtccaaaaagttatttcaaggctaataaggatgggaattcctgtaatggggcacttagggcttaccccacagaactatttaaatctaggattaaaacagcagggaaacaattcagaaagtcaagaaaaaatcaaaagagatgcggcgtcattagaaagattaggatgtttttctatagtcttagaacatattccagaattacttgctaaagaaattcaaactgatttagaaataccaacaataggtattggtgctggaaatttttgtgatggtcaagtaagagttatggctgatttattaggattaaatgataagcaacctcctttttgcagcccaatcattgatgggaaaaaatattttgtagaaaaactaaaagagtgggtagcctctgaaaggcttagttaa

SEQ ID NO: 229279 - DNA, 667 bp, Unknown
  Bacterial polypeptide expressing nucleotide sequence isolated from the Sargasso Sea
gatgaatagtaagattaaaaaaattattaataaaaagaataagtctaaaattgtgtgtttaacagcatactcaaaaaacattgctgagatagtagatgctcatatggatattatattagttggcgattctcttggatctgtactttataattatagcactacaagaaaagttaatttaaaaatgatgattgagcatacaaaaagtgtaagaatgggtgttaaaaaaagtcttttggtaattgatctcccatataatacatataggaataaatcagaagcccttaaaaattcaaaaaaggcaattaaagaaactaaatgtgatgctgtaaaaatagaaggaggagttaaagttaaagacatagtttgtcatttagtaaagaacaaaatacctgtgttaggccatataggcattacaccgcaaacagtaaaaggaaaattcaaatcaaaaggtaagacgcaagctgaaaagaaaaaattatttaatgatgctaaagtacttgagcaaagtggtgcatttggaattgtcctagaatgtatctatagtgatatttcaaaaaaaataactaaattaattaaaattccaacaatcggaataggagcctctgttcattgtgatggccaagttttagttactgatgatattttaggattacaaatgcaaaaataa

SEQ ID NO: 229280 - DNA, 799 bp, Unknown
  Bacterial polypeptide expressing nucleotide sequence isolated from the Sargasso Sea
aatgaaaatccaggatttcagcacaagaaaacaagtaaaaagaccgattagcatggtcacttgttatgattcaaactctgctcaaatcatctctgagacctcaatcgatgtcatcttggttggagactctgtcgctatgacgatgcacggacaccagaacaccattccagcaaacatcgaacttatggcgttacatactgaagccgtgagtaaaatggtccaaaaacagtttatcgttggggaccttccattcctgtcgacgagaaaatcaataagtgaaaccatgaatgcggtagaaaaactgatgcgagctggagcccacgcagtcaaactcgaagggctcaccggacaggaggatcatatcgcacaaatcgtggctgcaggtgtgcccgtcatggggcatgtcggtctaactccacaatttttacatcaacttggtggattccgaatgcaaggacgaaaacaagaagaggcacaaaaaattgccacagcttcgcaaagactcgaagacctggggtgcttcagcgttgtggttgagtgtgtccccgaaaggcttgctcaagagatcacagaaacgattaagatcccaactattggaatcggtgccggcccgcatgtggatggacaagttcttgtctggcacgacttacttggactaaatccgagcttcaagcctaaatttgtcaagacctatatgaatgcccatgacgagttcaaacgagctctgcaaacctatgactcagaagtgaagaacaaggcttttccaaccaaggaccatctttttagagtgttaccatga

SEQ ID NO: 229281 - DNA, 638 bp, Unknown
  Bacterial polypeptide expressing nucleotide sequence isolated from the Sargasso Sea
catgcctgatgtaaccctgaccaccctgcaaagcctcaagcagagcggcgagaaaatcgccatgctgacctgctatgacgccacgttcgcccagacggcctgccaggccggtgtcgatgtgctgctggtgggcgattccctcggcatggtcttgcaaggccatgacagcacactgcccgtcactgtcgccgaaatggcgtaccacaccgccagcgtcaaacgtggcaaccagggcgcgctgattctcgccgacctgccctttatggcctacgccacccttgagcaggccctgaacaacagcgcagcactgatgcaggcaggcgcccatatggtcaagctggaaggtgccgcctggctggccgagccaattcgccagttggccgaacgcggcgtgcctgtctgcgcccacctgggtttgaccccgcaagcggtcaacatcctcggtggctacaaggtacagggccgccaggaagcccaggcccggcaaatgcgtgccgacgccatggcgctggagcaggccggcgcggccatgctgctgctcgaatgcgtgcccagcgagctggccgctgaaatcagccaagcggtgaagatcccggtgatcggcatcggtgccggcgtggccaccgacggccaggtgc

SEQ ID NO: 229282 - DNA, 775 bp, Unknown
  Bacterial polypeptide expressing nucleotide sequence isolated from the Sargasso Sea
aataaaaagatttcagattttataaagaaaaaaaataaaactaaattagtaaccttaactgcttactctaaaaatattgcttctgttttagacaattactgtgatctaattttagtaggggattcacttggatcagttttatataattataaatctactagagaagtaactttaaatactatgattgaacattccaagagcgttcgtatgggtattaaaaaaagtttaatgattgtcgatatgcctcataatacttatcgcaattctaaagaggcattgaaaaatgcaaaattaattatgaaaaaaactaaatgtgatggtgtcaaattagaaggcgggaagaaaattatgaatactattaaaactttagttaaaaataatattcctgtaatgggccacttaggggttttgcctcagtcagataaaacatttaaattcaaaggtaaaatacaaaaagaaaaagaaaatattatgagagatgcaaaattacttgaagaagctggttcattttctatggtcttagaatgtgttcagacatcattagcaaaacaagtaactaaaagtgtaaatattccaacaattgggataggtgcatctaataattgcgatggtcagattttggtatttgatgatttgataggtttaaatccaattaaatttagatttgttaagaaatattcaaatataaaagcagaaatatcaaaagcagtttctaaatatgcaactgaggttaaaacaagaaaatttccctcgaaaaaatattcttttaattaaa

SEQ ID NO: 229283 - DNA, 535 bp, Unknown
  Bacterial polypeptide expressing nucleotide sequence isolated from the Sargasso Sea
acctttggtcgtttcagacatgccttttctaacttaccaatgcggagaggataaggctgtagagtatgcagggaaaatcattcaaagcacttttgcaaaagctgtaaaggtagagggagcggaaccagaaatacttcaagttatttctagattaataaggatgggaatccccgttatgggtcatctaggactcacaccgcaaagctatttaaatttaggtttaaagaaacaaggagaaagcttagaaagccaagaaaaaattaaaaaagaggcttctattcttgaagaattaggatgtttttcaatagttcttgaacatattcctgagttgcttgctaaagaaatacaaagtaatttaataattccaacaattgggatcggagccggtaatttttgcgatgggcaaataagagttactgcggatttgttaggtcttaatgatagtcaaccgccattttgccaaccgattattcagggcaagaatttatttaaggataaattaaaacaatgggtagcctctgaaagacttaattaa

SEQ ID NO: 229284 - DNA, 521 bp, Unknown
  Bacterial polypeptide expressing nucleotide sequence isolated from the Sargasso Sea
aatgaaaaaaaaaattttaaattttataaaaaaaaaaaataaatctaagattgtgagcttaacagcttactcgaaaaatattgcctcaattttagataatttttgtgatttaattttggtgggcgactcccttggatctgttttatataattataaatctacaagagaggtcacattaaatatgatgattgaacattctaagagcgtgagaatgggagttaaaaatagtttaatggtcgttgatatgccttataatacttacagaaactctaaagaagcattaataaatgcaaaaaaaatcatgaaaaaaactaaatgtgatgcagtgaaattagaaggtggaaagaagatttttaaaattgttaaattattagtaaaaaataatattcctgttatgggacatcttggtgttttgcctcaatcggcaaaaaattttaaatttaagggaaataaaatttcagaacgtaaaaaaatactaaatgaagcaaaactattagaatctgctggagcattttcaatgg

SEQ ID NO: 229285 - DNA, 744 bp, Unknown
  Bacterial polypeptide expressing nucleotide sequence isolated from the Sargasso Sea
gatgaaaaaaaagattttagatttaattaaaaaaaaaaataaacaaaaaattgtaagtttaactgcttactcaaaaaacatagcctcaattttagataattattgcgatattatacttgttggagattctcttggatctgttttgtataattataaatctactagaaaagtaactttgagtactatgattgaacattccaaaagtgtcaggttgggtataaaaaaaagtttaatgatagttgatatgccacataatacgtatcgaaatccaaaggaagctttgaaaaatgcaaaacagataatgaaaaaaactaaatgtgatggagtaaaattagaaggtggaaaaaaaatttgtgaaacagttaaaactttagttaaaaacagaattccagttatgggtcatttaggtttgcttcctcagtcagataaaacttttaaatttaagggcaaaaaaaaattagagagagacaatattattagagactcgaaattattagaaaaagctggagtgttttcaattgttttagaatgtgttgaaacttctttggcaaagtttgtgactcaaaatttaaatatactaactattggtattggagcatcaaaatattgcgatggtcaaatattagtttttgatgatttaattggtttaaatccaatgaattataggtttgtaaaaaaatatgccaatataagaaatcatatttctaaagctgtttcaaattattcaaaagaagttagaaaaat

SEQ ID NO: 229286 - DNA, 799 bp, Unknown
  Bacterial polypeptide expressing nucleotide sequence isolated from the Sargasso Sea
atgtctactcataaaaataaaccaataactatttcaacattacgtaagctaaaaaaaacttctgaaaagtttagttgtttaactgcttatgaagctactatagctcaaaagataagcgaggctggagtagaagttattcttgttggcgatagccttggaatggttattcaaggtcatgatagtaccctgccagtaactatggatcagttaatttatcatcttgaatgtgtcgcaaggggtaacgttaattctcatataatggctgatatgccatttatgagttattcgacagatgagttagctttggaaaatgctacaaaattaatgcaaaatggagctcattcagtaaaaattgaaggtggttcatggatatgtaaaatgacaagtactttagctgagcggggtataccagtatgtgctcatatgggtttaacaccacaatcaataaacagaattggcggatactttgttcaaggaagagatacaaagaaaagacaaaaactcatagaggaagctcagtcattagaaaatgcgggtgctgaaatgttacttctcgaatgtgttcctaatgatttatcaaatgaaattacaagtttacttaaaataccagttattggtattggtgctggcccagaaactgatggtcaaattatggtcatacatgatttattaggaatttcatgtttagaaaagccaccaaaatttgtaaaagattttttaaagggctcatcatctgttgaatcagctttgaaaaaatatgttaaaagtgtgaaaacaaaaaagttccctcaagagctca

SEQ ID NO: 229287 - DNA, 634 bp, Unknown
  Bacterial polypeptide expressing nucleotide sequence isolated from the Sargasso Sea
tatgaacaataaaataaaaaaaatattgtcaaaaaaaaataaaacaaaaattatttgtctaacatcttactcaaaaaatatctctgaaatattagataaatactcagatattattcttgttggtgattctttaggctcagttttatattcatataatacaacaaagaatgtaacacttaacatgatgattgagcattctaaaagtgtaaggcaaggcgtgaagaaaagtttaatggttgtagatatgccttacaacagttacaatagtaaatctgaggcgttaaaaaacgcgaaaaaaataatcaaatattcaaaagcagatgcagtaaagcttgaaggtggaaaaaaaattttaagtataattaaacatttaagaaagaataaaattaatgttatggggcacttaggaatattgcctcaaagtcaaattggtaaatttagatttaaaggaaaaacaacttttgagagaaaacgtttgctaaacgatgcattattgcttcagggtagtggtgttttctcaatcgtgcttgagtgtatagagacaaaattggcgaaagaaattacgaaaaatcttaaaattccaacaataggaataggatcatctgtaaattgtgatggtcaaagttttagttac

SEQ ID NO: 229288 - DNA, 809 bp, Unknown
  Bacterial polypeptide expressing nucleotide sequence isolated from the Sargasso Sea
cacagttaatgatattattcagatgaaatctagagagaaaattactgtcttaacaggatacgattcaactatagcaacattatgtgataaggttgatgtaattctggtaggagacagtgcaggaatggtaatgctaggttatgatgatactcgagatgtgacaatggatgatatgatacgtttcacaacagctgtaaaaaatgcaaaaactaattcattaattgttgcggatcttccaattaattcctatgaaaacgaggattctgctattactaattcaaaaagacttgtacaagcaggtgcacatgcagtaaaacttgaaggtggaaaagagattgcagatattatcaaagctgtagttgattcaggaattccagttatgggacatttaggattattgccacagactgcagaaaaatattctgttcaagcaaagaagagtagtgatgcagtaaatttgttagaagatgctagaattttagagaaagcaggagtgttcagtattgtttttgagatggttaccagagatgttgcaaaaattattacagaaagtgtaaaagttccaacaattggtattggttcaggcataaattgtgatggtcaagtattggttgttcatgatatgttaggaatgtttgaaaaaataaagccaaaatttgcaaaaaggtatctaaatttatcagaggatattagaaatgcaataaattcatacgtaaaagatgtaaaagaagagaaatttcccgaagaagaacatacattctctatggaaaaagaagagttagaaaagttggagaaagagattggctaaa

SEQ ID NO: 229289 - DNA, 757 bp, Unknown
  Bacterial polypeptide expressing nucleotide sequence isolated from the Sargasso Sea
ccttaagtataaagaaaaatctcaaaaaatcattgcacttactgcttgggactccatatcaggatctattgcagaacaagcaaatgttgatctcgtactagtaggagattctttagcaatggtttgtttaggatacaaatcgacattgccgttaactttagaaaacgtaatttatcatactaatgctgtttcaagaggatttaagaagaaaattgaggaacaacctttagtcgtttcggatatgccttttcttacttaccaatgtggagaggataaagctgttgagtatgcagggaaaatcattcagagcacttatgcaaaagctgtaaaagtagaaggagctgaaccagaaatacaaaaagttatttctagattaataagaatgggaatacctgttatgggtcatataggtctgacgccacaaagctatctaaatattggattaaaaaaacaaggagaaagcttagaaagccaagagaaaattaagaaagaggctttaattcttgaaaaattaggatgtttttcaatagttcttgaacatatccctgaattgcttgctaaagaagtaaaaaataatttaaaaattcccactattggtatcggagcaggtaactattgcgatgggcaagtaagagttactgcagatttgttaggtcttaatgatgatcaaccacccttttgcaaaccaattattgaagggaagaaattattaatggaaaaattaaaaggatgggtagaatcggagagaattaactaa

SEQ ID NO: 229290 - DNA, 718 bp, Unknown
  Bacterial polypeptide expressing nucleotide sequence isolated from the Sargasso Sea
aacagcatattcaaagaatgttgctgaagcaattgatccttattctgattttgtattggtaggagactcattaggctctgttctttataattattccactacaagaaaagtaactttagatcagatgatagaacattctaaaagtgccagattgggcatcaaaaatagtttaatggttgtcgatatgccgtatagaacttatagaaataaaaaaattgcacttaaaaacgctaaaagaattctaaaggaaactaaatgtgatgcagtcaaacttgaaggtggatcattaattattaatgtaattaaacatttaattaaaaataaaattccagttatgggacacttgggaatattacctcaaagcgttaaagggaaatttaaatttaaaggaaaaaaaaatagtgaaagaaataaaatttttaatgattcaaagcaactggaaaagataggtgtattttcaatagttcttgaatgtgttgagtcgattctcgctaagcaaatatcaaaaaaacttaaaattcccactataggaattgggtcttcgaaattttgtgatggccaaatactagttattgacgatttaattggattaaataacactaaagtgagatttgttaaaaaatttggtcaaattaaaaaaaatatttctaaagcagctaaaaattttagcaaagatgtaaaaaataaaaaatatccttcaaaaagatattcttattaa

SEQ ID NO: 229291 - DNA, 522 bp, Unknown
  Bacterial polypeptide expressing nucleotide sequence isolated from the Sargasso Sea
tatgaaaataacagtacctaaaatattagatttaaaatctgaacgccagataacaatgatgacagcttatgactttcctacatcaaaggctgtttcagaagcacagatagacataatactcgtaggtgattcattagcccaagttgttttaggccacgatgataccttgtctgtaactatgaatgaaatgctgcatcatgttcgagcagttactcgtgcaaaaccaaactgtctagtagtagcagacatgccttacatgagctatcacaacacaaaagaagaagcagttaaaaatgccgcaaggtttattcaagaaggcaaagccgacgcagttaagcttgaaggaggctttaaaagaaaagatattatagaggcaataattagtgcagaaataccagtaatgggacatttaggtttaactccccaatcaaaaaacatgatgggtggatataaagttcaaggtaaaacattagagttggcaacagaactgttagaggaggctgtactactagaaactctagg

SEQ ID NO: 229292 - DNA, 630 bp, Unknown
  Bacterial polypeptide expressing nucleotide sequence isolated from the Sargasso Sea
ataccaagcctgtggtaagaggtagcaacaatgcaatgatcgtcacagatatgccgttcatgtcatatcacggggaccacggggttaccatggctaacgctgcccgcctgatccaagaaggaggagccggggcagttaaagttgaagggggaaagactgtatgtccaacgatcacagccttagctaactccggaattcccgttatgagccatattggactcactcctcaatcggtgcatgcactaggaggtttcaaattgcaagggaacaccttaaaaggagcaagagctttattagaggatgcgaaagccgtagaagccgctggagcgttcgcagtggtcctagaattagtgcctgctgaactttcaaagatcataagtgaacgtcttacaattcccactataggaatcggagctggaccgaattgtgacggccaagtacaagtagcgcacgatatattaggcctatctattgattacacccccagacatgctctcaaatatgcggattctggagcccttgcccttcaggcatttaaagactacaaaacggatgtgtcatctggaaggttcccatcaaagaaacatttccgaaccttagacccctcagttatcgaacagctaagttaaa

SEQ ID NO: 229293 - DNA, 735 bp, Unknown
  Bacterial polypeptide expressing nucleotide sequence isolated from the Sargasso Sea
ctaaaattatatgcttaacttcatattcaaaaaatattgctgaagcaattgatccatatactgatattatattagtaggggattcgctaggttcagttctttacaattactcaactaccagggacgtaaacctagtacaaatgatagaacattctaagagtgccagattaggtattaaaaatagtttaatggttgtcgacatgccctacagaacttatagaaataaaaaaattgctcttaaaaacgcaaaaagaattataaaggaaactaaatgtgatgcagttaaacttgaaggtggttcatcaattttaaaaataatagattatttaattaaaaacaaaattgctgttatgggacatttaggaattttacctcaaagtgttaaaggaaaatttaaatttaaaggaaaaaaaattaaagagagaaataaaatttttaatgatgctaagttactacaagacaaaggtgtattttctattgtgttagaatgtgtagaaactaaacttgcaaaacaaatcactaaatcattgataatcccaactattggtattggttcttcacatcattgtgatggacaggttttagttttagatgatttaattgggttaaacgaaacaaaaataaaatttgttaaaaaatttggtaatataaaaaaaaatattcgcaaagctgtaaataaatttaaaaaagaagtactaagtaaaaagtaccctacaaaaaaatattcttattaga

SEQ ID NO: 229294 - DNA, 646 bp, Unknown
  Bacterial polypeptide expressing nucleotide sequence isolated from the Sargasso Sea
aatccaaactcccttgttgtagcagatatgccttatatgagttatcacgtttctgaagaagagacaattaagaacgcagcaagattcatccaagagggaaaagcagatgccgtaaaaattgagggtgggaaaaaaagagaaaatatgattaaagcattaattaatgctgaaattcctgtaatgggtcatctcggattaactccacaatctaaaaatgtaatgggtggttataaaattcaaggaaaaactttagaacttgcaaaagaattattagaagatgcaatcctcctagattctctaggatgcttttcttttgttctagagggagttccaaaggtagttgctcaaactataactgaacaagtttccattcctacaattgggataggtgccggggtacatgtcgatggacaagtacttgtttatcatgatcttcttggtatgaaatctaaagagtatatagatgccaaatttgtgaaaaggtatgacaaccaatatgacagggttgttgatacgatgaaaaatttcaaaaaagacattgaaaataaagagtttcctactgatgatcactcctatgattcgggtgattctttactagaaaaccttgaagagtggaaaaaagaagttaaaaaaattctgtcataac

SEQ ID NO: 229295 - DNA, 800 bp, Unknown
  Bacterial polypeptide expressing nucleotide sequence isolated from the Sargasso Sea
taaaaaaatagttacattaagtactttaaataagtttaaaaagaattctgaaaagtttacttgtttaactgcatatgagtccactatggcatcagtgataagttctgctggtgtagatgttatattggttggtgatagtttgggcatggtcatacagggtcatgacagtactcttccagtaacaatggatcaattaatttatcacttagaatgtgtggttaaaggaaataatgggtcacacataatggccgatatgccatttatgagctactctacagatgatttgggtcttgaaaatgccaaaagattaatgcaagcaggggcaaattctgtaaaaattgagggtggacaatggatctccaaaatggcacaagttttatctgatagaggaatccctgtttgtgctcatatgggactcacccctcaaacaattaatagaattggtgggcatcgtgttcaaggaagagatccttcccaaaaagaaaaaataattaatgaagctatagcgcttgaaaaggctggtgcctcaatgttgttattagaatgtgtcccgggtgagcttgcaaaaactattacaaaagaactaaaaatacctgttattggtattggtgctggtattcatacagatggtcaaataatggttattcatgatttattaggaatatcatgtcttgataagcctcctaaatttgttaaaaactttatgaaaacatcaacatcaatttcaggtgcaataaaaaggtatatcaaagacgtaaaaaataataaatttccttcaaaagaacatacatttgattaag

SEQ ID NO: 229296 - DNA, 790 bp, Unknown
  Bacterial polypeptide expressing nucleotide sequence isolated from the Sargasso Sea
tagcaatatttatgcttacaaaataagtaggcttattctaaaaaaaaaaaataagtcaaaaattgtttgtttaactgcttattcaaaaaatattgcagaagagattgatagctacgtagatttaatacttgtaggtgattcattagggtcagttttgtataattttgaaactacaagaaaagtaaatttatcaatgatgattgagcactccaagagtgtaagaaaaggagttaaaaaaagtttaatgatcgtagacatgcctttcaatacatacaacaataaatctcaagcacttaaaaattgtaaaaaagtaatgaaagaaacaaaatgtgatggaataaaattagagggaggcagaaaaattacagaaattataaaatatttaattaaatttaaaattcctgtaatgggtcatataggtataacaccacaaactgtaagaggtaaatttagatacaaaggcaaaactgatctagaaataaaaaatttgttaaatgattctaagtcattagaagaagctggagtatttgcaattgttttagaatgtattgaaaaaaaagtttcgaaagaaattacagggtcaattaaaattcccacaataggaataggttcatcaaaattttgtgatggtcagattttagtcacagatgatttattgggtttgacagatacgaaagtcaaatttgtaaaaagatatactaatttgaaaagcaatgtaagaaatgcagttaaaaagtttaaattagatgttaaaagtgggtcatacccctcatctaaatattcctactaa

SEQ ID NO: 229297 - DNA, 700 bp, Unknown
  Bacterial polypeptide expressing nucleotide sequence isolated from the Sargasso Sea
tatgttaccttcagacctcgttaagtataaagaaaaatctcaaaagattattgcattaactgcttgggactccatatcaggatccattgcagaacaagcaaatgctgatcttatcttagtaggagattccttagcaatggtctgtttaggatacaaatccacattgccgataactttagaaaatattatttatcatactaatgctgtttcgagagggtttaaaaagaaaattgaagaacaaccattgatcgtctctgacatgccttttctgacttaccaatgtggagaggataaagctgttgaatatgcaggtaaaattattcaaagcacttatgcaaaagctgtaaaggtagaaggggctgaaccagaaatacaaaaagttatttcgagattaataagaatgggaatccctgttatgggtcatatagggcttacacctcaaagctatttaaatctaggattaaagaaacagggagaaagtttagaaagccaagagaaaattaagagagaggcttctattcttgaaaaattaggatgtttttcaattgttctggaacatattcctgagttgctttctaaagaaatacaaaataattcaaaaatccccataattggcattggcgcaggtaacttttgcgatggacaagtaagagttactgcagatttattaggccttaatgatgaccaaccgccattttgc

SEQ ID NO: 229298 - DNA, 443 bp, Unknown
  Bacterial polypeptide expressing nucleotide sequence isolated from the Sargasso Sea
catgcgtccagccgatctgatccgcttcaagcaagacagccgaccgatcacgatgctcaccgcatgggacagcctgtctgcggccctggtggagctcgccggggccgatgccgtgctggtgggtgactcgctgggaatggtggctctcgggcatgccaccacccttccggtcaccctcgagcagatggtgcaccacacgcaggccgtggagcgcggctttcaggcgatgccggcccagcagcccctgctcatctccgacttgccgtttctcagctatcagtgcggtgaggacgcagcggtggccgctgccgggaggctgctgaaggaatccagcgccgcggccgtgaagctggaaggcgccgaaccggaggtagtgagggtcattgatcggctggtgcgcatgggcatcccggtgatggggcactgggggctgacgccgcagg

SEQ ID NO: 229299 - DNA, 754 bp, Unknown
  Bacterial polypeptide expressing nucleotide sequence isolated from the Sargasso Sea
tctgacggcctatgacgccccgatggctgagttgcttgatccgcattgcgatattctcttggtcggcgacagtgttggaatggttgtgcacggcctaccgtcgacggtcggggtcacgcttgaaatgatgatacttcatggccaagccgtgatgcgcggatcgaaagaagcgctcgtcgtggttgatatgccgtttgggtcttatgagaccaatgcggaccaagcgttcttaaatgcagccaaagtcatgaaagagacgggatgccaggcgatcaaaattgagagcggcacatatgcagcggctcaaatcgagcatttggtggcgcgcggtatccctgtgatgggccatatcgggcttcgtcctcaagccgttaatgtcgatggtggcttccgcgccaaaggacggacgagtgtcgaacgagaacaagcgctcgccgaagcagttgccgcggacagcgcgggtgcatttgcgattgtggtagaaggcgtggcgaccgacttagcggcagatatcaccgcggctgtgtcctgcccaacaatcgggatcggcgcatcggccgcctgtgatggtcagatcctggtcacagacgacatgcttggtaagttcgattggacgccgaaatttgtccgtcgctatgccgatcttcgcaaccaaattgattcggcgatctctcgctatgccgacgacgtccgacaacggaagttcccggcgactgaagaagtctatcacctgccaaaggcggtttctgactga

SEQ ID NO: 229300 - DNA, 408 bp, Unknown
  Bacterial polypeptide expressing nucleotide sequence isolated from the Sargasso Sea
ggggtgtcccggtttgcgcccacctgggactgactccccaatcggtcaacgtgtttggtggttaccgtgtgcaggggcgaacaccaaaggaagcgaaatccattttggccgacgcggtagagattcaggacgccggggccagcctgctcgtactcgagtgtattcctgcagagctcgccgccgacatctcatcgaaactcgatatcccggtcatcggtattggcgcaggcagcggtaccgatgcacaggtgctcgtgcttcacgacatgctgggcatgacggaaaccgcacccaagtttgtgcagaacttcatggagggtgccccctcgattcaggatgcactcaaagcttttgtcgatgcggtgaaggcgggtgagtatcccagggaagagcacacctactcgtagg

SEQ ID NO: 229301 - DNA, 391 bp, Unknown
  Bacterial polypeptide expressing nucleotide sequence isolated from the Sargasso Sea
ctgcagacttttagagatcttaaacaaaaaggagaaaagtttgctgcattgacttcctatgaagcaactttgtcttctatgatgtgcgatgccggcgtggaacttattcttgttggagatagcttgggtatggtgattcaaggtcacgattctaccgtcccagtttcaatggaagatattttgtatcatttaagatgcgtaaagtcgggaaataagggagcccatttaatggcagatatgccatttatgagctatgcaacagagcaacttgcatatgaaaatgccacaaggttaatgcaagctggagcaaattcggtaaaagtggaaggcggggaagtaattaataaaataacagaacttttgtcagaaagaggaatacctgtttgtgctc

SEQ ID NO: 229302 - DNA, 803 bp, Unknown
  Bacterial polypeptide expressing nucleotide sequence isolated from the Sargasso Sea
tatggtaagcagagataagcgcgtgacgatccttgacctgcaaaaaatgcagcagcaaggaattaagattccaatgctgacagcctatgactatccctcagcccgtttagcggagagggccggctgtcccatattactagtcggagatactttgggcatggtcgttttaggttatgactccactctgccagtgacccttgaagacatgatccaccatggacgagctgctaggcgaggcgcatctaacgcgcacatcgtcgtagatttacctttcggcagttatcagtcagatgtcaccacggctatgaacgctgccatgcgcgtaatgaaagagaccgagtgcgactcggtgaaaatcgaaggcggaaatagtcaggcaatcgagaccgttgcgaaattagtcaccgcaggggtacctgtaatggcccatataggactgaccccccaatctgtaaatgcgcttggcggctttaaactgcagggacgtaccccacgagacgccatccgccttttgtctgaagcccaaaaattgcaggaggcaggggcatttgccatagtattagagtctattccggcagttctggcggccaagatcactgaggttctcaacatcccgactataggtataggtgcaggaccgtattgtggcggtcaggtgcaagtctggcatgatttattgggtctgtatgattcatttaaacctcgacatgcccgacgtttcgatgatattggtgcatctataagaggtgcccttgtggattatatagaggcagttgaagctggtgactttccgaacagttccg

SEQ ID NO: 229303 - DNA, 823 bp, Unknown
  Bacterial polypeptide expressing nucleotide sequence isolated from the Sargasso Sea
atgagcagaaaaactattcatgatattcaagctaaaactggtaaagaaaagattacttgtttaactgcttatacggcaccaatagcaagattactcgaccagcatgtagatattttattggttggtgactcacttggtatggtattgtatgaatacgaaaatacgcttcccgttactctagatcaaatgattgagcacacaaaatcagttattaaagcaacttcagattcatgtgtaattatggatcttccatttggcacatatgaggagtcaaagcaattagcattaaaaaacgcactaactgcaattaaggatactaactgtgctggtgtaaaattagaaggtggtactctaatagaagaaactgttaagtacataaccgagagaggagttcctgtaatgggacatattggattgcaacctcaaagcgtaataattgatggtggatataaaattaaaggtcgcgataaatttgaatggaaaaaatatattgatgatgctgttgcattagaaagagctggtgcttttagtgtagtgttagagggtatggcagagcccttagctgaggagataacaaaaacaataaatattcctactataggtattggtgcttcagcaaaatgtgatggccaagttttggtaacagaagacatgcttggattgacaaatatttcacctaaatttgttaaggagtatgcaaaccttagagctccaatagaaaaagctgtgaaacaatatgtcagtgatgtaaaattaggtaaatttcctgagcaacagcatacttatcaaatgaaaccttcaattgtgaaagataataagtaaa

SEQ ID NO: 229304 - DNA, 592 bp, Unknown
  Bacterial polypeptide expressing nucleotide sequence isolated from the Sargasso Sea
tatgttaccttcagacctcgttaaacataaagaaaaatctcaaaaaataattgcattaactgcatgggactccatctcaggatctattgcagaacaagccaatgttgatgtcgtcctcgtaggagattccttagcaatggtctgcttaggatataaatcgacattgccattaactttagaaaacataatttatcatactaatgctgtttcaagaggatttaaaaagaaaattgaggaacaacctttggtcgtttcagatatgccttttttgacttatcaatgtggcgaggataaagctgttgagtatgcagggaagattattcaaagcacttatgcaaaagctgtaaaggtcgaaggagctgaaccggaaatacaaaaagttatttcaaggttaataagaatgggaatccctgttatgggtcatctagggcttacaccacaaagttatttaaatcttggattaagaaaacaaggagagagcttagaaagccaagaaaaaatcaagaaagaggcttctatactagaaaatttaggatgtttttcaatagttcttgaacatattcctgagttgcttgctaaagaaatacaaaat

SEQ ID NO: 229305 - DNA, 655 bp, Unknown
  Bacterial polypeptide expressing nucleotide sequence isolated from the Sargasso Sea
atgcctaacacagttaatgatattattcagatgaaatctagagagaaaattactgtcttaacaggatatgattcaactatggcaacattatgtgataaggttgatgtaattctggtaggagacagtgcaggaatggtaatgctaggttatgatgatactcgagatgtgacaatggatgatatgatacgtttcacaacagctgtgaaaaatgcaaaaactaattcattaattgttgcggatcttccaattaattcctatgaaaacgaagattctgccattactaattcgaaaagacttgtacaagcaggtgcacatgcagtaaaacttgaaggtggaaaagagattgcaaatattatcaaagctgtagttgattcaggaattccggttatgggacatttaggattactaccacagactgcagaaaaatattctgttcaagcaaagaagagtagtgatgcagtcaatttgttagaagatgctagaattttagagaaagcaggagtgttcagtattgtttttgaaatggtcaccagtaatgttgcaaaaattattacagaaagtgtgaaagtcccaacaataggtattggttcaggtaaaaattgtgatggtcaagtattggttgttcatgatatgttaggaatgttgaaaaaataaa

SEQ ID NO: 229306 - DNA, 823 bp, Unknown
  Bacterial polypeptide expressing nucleotide sequence isolated from the Sargasso Sea
tatgtctaccaatacgaacaatcgcgaaaaaagggtaactactcatgttcttcaagccatgaaggcaagaggggaaaagatatcaatgctcactgcctatgattattccatggcgaaaattgtagacgatggtggtgtagatgtgatattggtaggtgactcagcttccaatgttatggcgggtcatgaaactactctgcccattaccttagaccagatgatatatcacgcatcctcggtagtaagggctatccaaagatctttagtggtggtagacttaccttttggagcctatcaaggcaattcaaaagaagcgctaacttcatccattcgtattatgaaagagtcaggtgctcatgccgtaaaaatggaaggtggtgaggagattttagaatcagtgaaacgaattctttctgcggggattccagtaatgggacatttaggcttgacacctcaatctatttataagtttggcacttatgttgtaagagccaaggaggaggaagaggcagagaaacttctcagggatgcaaaagcattggaggctgcaggttgttttggtattgtacttgaaaagattcctgcatctttggccaaaaaagtggccaatgaagttgatatcccaacaattgggataggagctggcaaggatgttgacggtcaggtattggtaatacatgatatgttaggcatcaacaaagaatttagtccacgttttttaagaagatacaatgatctttacaatggaattaaggactctgtagaaaattacattgcggatgtaaagtcaaaggattttccaaatgaaaaggaacaatactga

SEQ ID NO: 229307 - DNA, 472 bp, Unknown
  Bacterial polypeptide expressing nucleotide sequence isolated from the Sargasso Sea
atgaaaataacagtacctaaaattttagctttaaaatctgaacgtcagataacaatgatgacagcttatgacttccctacttcaaaggctgtttcagaagcacaaatagacataatactcgtaggtgattcattagcccaagttgttttaggccacgatgataccttgtctgtgactatggatgaaatgctacatcatgttcgagctgttacccatgcaaaaccaaactgtctagttgtagcagacatgccttatatgagctatcacaatacaaaagaagaagcagttaaaaatgccgcaaggtttattcaagaagggaaagcggacgcagtcaagcttgaaggaggctttaaaagaaaagatattatagaggcaataattagtgcagaaataccagtaatgggacatttaggcttaactccccaatctaaaaatatgatgggtggatataaagttcagggtaaaacattag

SEQ ID NO: 229308 - DNA, 676 bp, Unknown
  Bacterial polypeptide expressing nucleotide sequence isolated from the Sargasso Sea
aaatgttgatcttgtactagtaggagattcattagcaatggtctgcttaggatacaaatcgacattgccaataactttagaaaacataatttatcatactaatgctgtttcaagaggatttaagaaaaaaattgaggaacaacctctagtagtctcagatatgccttttctgacttaccaatgtggtgaggataaggctgttgagtatgcagggaaaatcatacagagcacttatgcaaaagccgtaaaagtagaaggagccgaaccggaaatacaaaaagttatttctagattaataagaatgggaatccctgttatgggtcatataggtcttacaccacaaagctatctaaatattggattaagaaaacaaggagaaagcttagcaagccaagaaaaaattaagaaagaggcttcaattcttgaagaaataggatgtttttcaatagtgcttgaacatattcctgatttacttgctaaagaaatacagaattctttaacaattcccacaataggtatcggcgcaggtaattattgcgatgggcaagtaagagttactgctgatttgttaggtctaaatgataatcaacccccattttgccaaccgattatccaaggaaagaaattatttaaagataaattaaaagaatgggtagactctgaaagactaaactaa

SEQ ID NO: 229309 - DNA, 610 bp, Unknown
  Bacterial polypeptide expressing nucleotide sequence isolated from the Sargasso Sea
aatgcaaagattaacaattcaaaaaattataagaaaaaaaaataaaataccaataacatgtttaactgcttacacaaaagatattgcagaaattgcagataagtattgtgatattatattggtaggagactcattgggaatggtcttatatggaatgaaaaatacaagaaatgtaaagattgatactatgattgcacatgcaaaagttgtaagaaattttactaaaaaaagtttgatagtagtagatatgccatttaaaacttatacaaataaatttttagcattaaaaaatgcaaaaaaaataattaaatcaacaaagtgtcatgctgttaaattagaaggcggaaaagagatagttaacacaataaattatttagtaaaaagatcaattcctgttatgggtcacattggattattgcctcaaagttctaaaaattttacactaaaaggaaaaaaaacaagtgaaaaaaaaagaattttaaaagatgcaatagcaatttccaatgcgggtgtttttgcaatggttatagaatgtgttgttgaagatttagcaaaaaaaatttcaaggactgttcctgttcctacaattggaataggagcgtcaaaacat

SEQ ID NO: 229310 - DNA, 704 bp, Unknown
  Bacterial polypeptide expressing nucleotide sequence isolated from the Sargasso Sea
tatgttaccttcagacctagtgaattataaaaaaaaatcacgcaaaatcattgcactgactgcatgggactcaatatcaggatctattgcagaacaagccaatgttgatctcgtactagtaggagattcactagcaatggtctgcttaggatacaaatcgacattgccattaactttagaaaacataatttatcatactaatgctgtttcaagaggatttaagaagaaaattgaggagcaacccttagtcgtttcagatatgccttttctgacttaccaatgtggagaggataaagctgttgagtatgcagggaaaatcattcagagcacatatgcaaaagctgtcaaagtagaaggagccgagccagaaatacagaaagttatttctagattaataagaatgggaatccctgttatgggtcatataggtcttacaccacagagctatctaaatattggtttaaaaaaacaagggggaaccttagcaagccaagaaaaaataaagaaagaggcttcaatactagaagaattaggatgtttttcaatagttcttgaacatattcccgatttgcttgctaaagaaatacaaaattctttaacaattcccataataggtatcggcgcaggtaatttttgcgatgggcaagtaagagttactgcagatttattaggcctcaatgatgatccaccaccatttttgcaac

SEQ ID NO: 229311 - DNA, 784 bp, Unknown
  Bacterial polypeptide expressing nucleotide sequence isolated from the Sargasso Sea
atgaccaataactccaatcaatcaagagtgacaattaagattcttaatcagatgaaaaacaattctgagaaaatctctatgcttactgcttatgatttcagttttgcaaaaataattgatgaagcaggcattgatattattttagttggtgattctgcttcaaatgtgatggctggtcatgagactacacttccaattactcttgatcaaatgatatatcatgctagttcggtagttagggcagtcaatagagccctagttattgttgacttaccctttggaacctatcaagctgattctaaggaggcattaaaatctgcaattaaaataatgaaggaatcaggagctcatgctgttaaattagaaggaggatatcaagctaaggagtcaatagagagaattatccaagcgggaattcctgttatgggtcatttaggtttaaccccacaatccatatataaatttgggacatatgaagttagagcaaaagataagaaagaggctgatgcattgttaaatgatgcattaatgcttgaagagattggctgtttctctgttctattagaaaaaataccaaatacactttcaaaagaagtctcctcaaaattaacagttccaatcatcggaattggggcgggaagccatgtggatggacaggttcttgtactgcaagatatgcttggaatgaataaagacttcagtccaagattcttaagaagatatcttgatctaaactcattagttagcgatgctgtaaaaaaatactctactgatataaaagcgg

SEQ ID NO: 229312 - DNA, 768 bp, Unknown
  Bacterial polypeptide expressing nucleotide sequence isolated from the Sargasso Sea
aaatgaaaaaaaatggagaaaaaattagcatgttaacatcttatgatttcacattcgctaaaattttagatgaggcaaacattgatatcatacttgtcggagattctgcatcaaacgtttttgcaggaaatgaaactactgttccaattacattgaatgaaatgatttatcatgccaaatctgttgtaaaaggtgtaaaaagagctcttgttgttgttgatttaccttttggaacatatcaatctgatcctcaagaggcacttaggtcagccataagaattatgaaagaatctggtgctcatgcagtcaaattagagggtggaattgaagtaagcgaatcaataacaaggattatcaatgctggtattccagtaatgggtcatttaggtcttaccccacaatctatatataagttcggaacctataacgtaagaggagctaataaaactgaagcagatcaactaataagtgatgcacaagatttggaaagaattggttgctttgcctctgtattagagaaaattcccgctcagcttgcaaaaaatatttcaaaaaaaacaaaattccctttgattggtataggcgccggaaatcatgttgacggccaggttttagttttgcatgatttaattggattaacaaatgagttcaatcccaggtttttaagaagataccttgatttaaatacctctatcaaggatgctgtttttagatatattgatgatgttaagtcagaatcttttcccaataaagatgaaatgtattagt

SEQ ID NO: 229313 - DNA, 749 bp, Unknown
  Bacterial polypeptide expressing nucleotide sequence isolated from the Sargasso Sea
aatgcctaacacagttaatgatattattcagatgaaatctagagaaaaaattactgtcttaacaggatatgattcaactatggcaacattatgtgacaaagttgatgtaattctggtaggtgatagtgccggaatggtaatgctaggttatgatgatactcgagatgtaacaatggatgatatgatacgtttcacaacagctgtaaaaaatgcaaaaactgattcattaattgttgctgatcttccaattaattcctatgaaaacgaggattctgccattactaattcaaaaagacttgtacaagcaggtgcacatgcagtaaaacttgaaggtggaaagaaaattgcagatattatcaaagctgtagttgattcaggaattccagttatgggacatttaggattactaccacagactgcagaaaaatattctgttcaagcaaagaagagcagtgatgcagtaaatttgttagaagatgcaaaaattttagaaaaagcaggagtgttcagtattgtttttgaaatggttaccagagatgttgcaaaaattattacagaaagtgtaaaagttccaacaataggtattggttcaggcataaattgtgatggtcaagtattggttgttcatgatatgttaggaatgtttgaaaaaataaagccaaaatttgcaaaaagatatctaaatttatcagaggatattagaaatgcaataaattcatacgtaaaagatgtaaaagaagagaaatttc

SEQ ID NO: 229314 - DNA, 559 bp, Unknown
  Bacterial polypeptide expressing nucleotide sequence isolated from the Sargasso Sea
atgtcagctcatcaatctcaaccattggttactatcaatactttgcaaagcttaaaggcaaaaagggaaaaatttacatgtttgaccgcttatgaatctactcttgcaaatatcatcagccaggctggtgttgaggttattttagttggcgatagtttggggatggttattcagggacatgagagcacacttccagtaactatggatgacttaatctatcatttaaaaaatgtttctagaggtaacgtgaactcccatctgatggcagatatgccttttatgagctatgcaaccaaagatgctgctttatcaaatgcaggccttttgatgcaaaatggagctcactctatcaaacttgaaggcggttattggatttgtgatttaaccaatacattagctgaaagaggaatgccagtttgcgctcacatgggtctcacacctcaatctattaataggattggtggatattttgttcagggtagagataccgataagagggatgagatgatttctgaggagaaggctttagagtctgcaggagcctcgcttttgttactag

SEQ ID NO: 229315 - DNA, 570 bp, Unknown
  Bacterial polypeptide expressing nucleotide sequence isolated from the Sargasso Sea
aatgaccatcgccaactggaagaaaaaatacattgatcaaatcccaatttgtttactaacagcatatgatgccacctttgcgcagcttattgaagaagcatcaatcgatggcattttggttggggattcattacgtcatacattctttggtgactcgaccaccgttaccatgacactggatgacatggtttaccacactaaagcagttaaaaatggcgctaaaaaatcactcattatttcagatatgccatttatgacttacaacatttcggtagaagacaccttgcgaaatgcaacacaattgattcaagcaggtgcccaagcggttaaatgtgaagtgagggatatccacttgccaaccattgaccgattggttcaagaaggaattcccgtaatgggtcacattggccttcaacctcaatacattcatgaatcaggcggttactcacttaaaggcacctccaaagatgaacaaaaagaacttttgcatgttgccaaatcactatctgaacttggtgcattttcaatcgtactagaaaaagtccccattgatgtcacccaatcaatcac

SEQ ID NO: 229316 - DNA, 529 bp, Unknown
  Bacterial polypeptide expressing nucleotide sequence isolated from the Sargasso Sea
aatgagcaaaattaaaaaaataatttctaaaaaaaacaaaactaaaatagtcagcttaaccgcatattcaaaaaatattgcatcaatcttagataatcattgcgatataattcttgttggagattctttaggttcagttttatataattataagtctactagggaagtatctttagagataatgattgaacattccaagagtgtgagaatgggaattaaaaaagctttaatggttgttgatatgccacacaatacttatcggaattcaaaagaagctttaaaaaatgcaaaaaaaatattatcaaaaaccagatgtgacgctgtgaaattagaaggtggaaagaaaatttacgaaataatcaaaattttagttaaaaataaaattccagttatgggccatttaggattgcttcctcagtcagataaaactttcagatttaaaggcaaaaaaaaattagagagagatggtattataaatgattcgaaattaatagaaaaagccggagtattttcaatcgtattagaatgt

SEQ ID NO: 229317 - DNA, 641 bp, Unknown
  Bacterial polypeptide expressing nucleotide sequence isolated from the Sargasso Sea
tatgaacattcttgaatttccagcgatgaaagctaggaaagagaaaatttcgatggtgacttgttacgacttctggtcggcagaactcttagaaaaaacagatattgatatgcttttagtgggggacagcctagccatggttatgcatggattccccagtaccgttcacgccacgatcgagctgatggagatgcactctgccgcagttcggagaggagctcctaaaaagtttgtagttggagatcttccatttctgaaggcgaggtactcgcgagatttggttttggacaatgtttgcaggctcatgcaagcagggtgtaatgcgattaagatcgagggagctgaagggcatttggaagtgatcgagcatgtcgttgagtcaggagtgcctgtaatgggtcatctggggctcactccccaatcagttgaagcttttggtggccacaaggttcagggaaaaacagaatgttctgcagaaaaaataaggaaaagcgctgtcgcgcttgaaaaggcgggctgttttgctctcgttctcgagtgtgttccgcaaaagttagcggatcaaataaccaaggagttaagcatcccaacaattggaattggagccggcccgcacacagatggtcaggtcttggttctac

SEQ ID NO: 229318 - DNA, 532 bp, Unknown
  Bacterial polypeptide expressing nucleotide sequence isolated from the Sargasso Sea
aatgaaaaaagcgccctacagacgaatcactactaaaactctttcagaaatgaaacatgagggtgaaaaaataagcatgttaactgcttatgatttcacattcgcaagaattattgatgaatctaatattgatattgttttagtcggtgactcagcttctaatgttattgcaggaaacgaaacaactgttcctatcaccttagatgaaatgatttatcacgctaaatctgtagttaaagcagttaaaagagcgcttgtagtagtcgatcttccttttggaacttatcaatctgaccctcaagaggctctaagatcagcaatcagaattatgaaagaatctggagctcatgctgtcaaattggaaggaggaagtgaaataagtgactctatttcaaaaataataaatgcagggatacctgtcatgggacacttaggattaacaccacaatctatatataaatttggcacctacagtgtgagaggtgcagataaatctgaagctaaccaattattaaaagatgttaagaaatta

SEQ ID NO: 229319 - DNA, 797 bp, Unknown
  Bacterial polypeptide expressing nucleotide sequence isolated from the Sargasso Sea
attgaattggaataatataatgatttcaaaaattaatagaataaaatctaaaaaaaataaatctaaaattgtttgtcttactgcttactcaaaaaatattgccaatgcaatagacagacatacagacataattttagtaggagattcacttggatctacgttatataattttaaatcaacaagaagtgtaactttagagatgatggtaaaacattctcaaagtgtgcgccgaggcatttcaaatagcttaatggtagttgatatgccttataatacttacaataatccatctgaagcttttaaaaattgtaaaaagattatgaaattgacaaaatgtgatgctgttaaaattgaaggaggtttaaagataataaaaattattaaacacttaattaaaaataaaattcctgtaatgggacatgttggtatattaccacaaactacaaaaggtaaattcaaatctaaaggcaaatcaattaaagaaagaaatcaattaatcagagattgtatgctgatagaaaaagcaggtgctttttcaatagttttagaatgtgttcaaagacaattagcaaagaaaattagtaattcaataaaaatacctactattggtattggttcttctaataattgtgatggtcaaatattagttatagatgatattctaggtttaactgactctaaaatgaaatttataaaaaaatatattaatgtaaaaaaaattataactaatgctgctaaaaaatttaagatagaagtaaaaagtaaaaaatttccaacaaaaaagcattcttactaaa

SEQ ID NO: 229320 - DNA, 760 bp, Unknown
  Bacterial polypeptide expressing nucleotide sequence isolated from the Sargasso Sea
tctaacaggatatgattctacaatgaccacactatgtgatagtgtagatgtaattctggtcggagatagtgcagggatggtaatgctcggatatgatgatactcgagatgtaacaatggatgatatgatacgctttacaactgctgtaaaaaatgcaaagacagattcactaattgttactgatttaccaattaattcttatgaaaatgaagattctgcagttgcaaattcaaaaagacttgtagaagcaggagctcatgcagtaaaattagaaggaggaaagaaagtttcaaagattatcagggcagtggtagactctggcattccagtaatgggacatttgggattattgccacaaactgcagaaaaatattctgtgcaagcaaagaataatgaggatgcagtgaatttgatacaagatgctaaagtcttagaagaatctggagcattcagcattgtattagagatggtaactagtgatgtgacagaaattattacaaaaagtgtcaaagttccaacaataggcataggttcaggaatagattgtgatggacaagtactagtagttcacgatatgttaggaatgtttgaaaaaataaagccaaaatttgctaaaaggtacctaaatttgtctgaagagattagaaatgcagtaaattcgtatgtaaatgatgtaaaagaaaaaagatttcctgaaaaagaacatacattttccatggaaaaagatgagttagaaaaattggagaaaaaaattggctaa

SEQ ID NO: 229321 - DNA, 452 bp, Unknown
  Bacterial polypeptide expressing nucleotide sequence isolated from the Sargasso Sea
gatgcagaaaataacaattaaaaatcttaaggaaatgaaagagtcaggtgaaaaaattgcatgcctaacttcttatgatgccagttttgctaaaatacaagatgaagccgggatagatttgcttctggtcggcgattctttggggatggtcttgcagggcggcgataacacgctcaaggtaagtatctcagatatgatttatcattcaaaactggttagtaatgtagcaaagcgagcagttatagtaaccgatatgccattcatgagttattcgactccaccacaagcacttggtaatgcagcaagattgattagtgagggaggtgcccatgttgtgaaaattgagggcggtagtgaattatctgaagtagtaaacttgctctctcaacatggcataccagtttgtggtcatttaggattaacacctcagtctatacataagataggtgggt

SEQ ID NO: 229322 - DNA, 740 bp, Unknown
  Bacterial polypeptide expressing nucleotide sequence isolated from the Sargasso Sea
gatgcgccccgccgatctgatccggttcaagcaaaccggtcgatccatcaccatgctcacggcctgggacagtctttccgctgcctgggttgaagccgctggagcagatgccgttctggtgggggactcgctggccatggtggctctcggccacgccacaacgcttcccgtcacgcttgagcagatgttgctgcacacgcaggccgtcgagcgtggttttcagtcgctgccgtcggcacagcctctgctgatcagtgatcttccctttctcagctatcagtgcggcgaagatctcgcggtgcaggcagccggaaaactgctgaaggaatcgagtgccgccgctgtgaagctggagggatcggaaccggaagtggtgtcggtgatcaatcgcctggtgcgcatggggatccccgtgatgggtcatttgggactgacgcctcaggcggttcaccgcatgggatatcgccggcaggcggaagatcccgtcagccaggaacgcctgctgtcaagagctttggagctggaacaggcgggctgcttctctctggtgctggaacatgttccagctgatctggccggcaaggtccgtcgtcaactgacgattcccgtgatcgggatcggggctggtgacgactgcgatggtcaggtgcgagtgactgctgatctgctggggctcaccgcccagcaacccccattcagcccagcgctgctcccggggcgagagctgtttgagcaggctt

SEQ ID NO: 229323 - DNA, 586 bp, Unknown
  Bacterial polypeptide expressing nucleotide sequence isolated from the Sargasso Sea
gatgcgcgcacaacccactgccttgtgcattaccgacctaccctttgccacatacaccacccccgaagatgcgctcatccacgccaagcaagccatgcaggcgggtgcgcagatggtcaaaatcgaaggtgggcaacatgtatgcaccaccgtctccaccctcaagcaatggggcatccctgtctgtgggcacttggggctgacaccgcagtcagtccatgcactgggtggttttcgcacgcaagggcgacaggaagaccaggcacacaccatcgcccaacacgcgcaagaactccaagaagctggcgctgatctgttggtcctagagtgcataccctcctcgctggcacaacgcatcacgcaagatctgcgcattcccaccataggcattggtgcaggcccacactgcgatggtcaaatcttggtcacccatgacatcctggggctcgggcccgcggctcccatgcgctttgtcaaaaccttcttggatgccgagcaccctggcgtcttgccagcactcaaagcttatgtccacgctgtaaaaacacggacattcccccaacctgagcatgaagtggcgccatga

SEQ ID NO: 229324 - DNA, 403 bp, Unknown
  Bacterial polypeptide expressing nucleotide sequence isolated from the Sargasso Sea
caaaaagttatttctagaattataagaatgggaatccctgttatgggtcatctagggcttactccacaaagctatttaaatctaggattaaagaaacaaggcgaaagtttagaaagccaagaaaaaattaagagagaggcttcaattcttgaaaaattaggatgtttttcaatagttcttgaacatattcctgagttgcttgctaaagaaatacaaagtaacttaagaatccccacgataggtattggtgccggtaattattgcgatggacaagtaagagttactgccgatctgttaggcctcaatgatgatcaaccaccattttgccaaccgataattcaagggaagaaattatttaaggataagttaaaagaatgggtggcctcggaaagacttaattaat

SEQ ID NO: 229325 - DNA, 711 bp, Unknown
  Bacterial polypeptide expressing nucleotide sequence isolated from the Sargasso Sea
tcgcaaagattttagatcagcacgttgatatattgctggttggagattcgttaggtatgactgtatatggtcataataacacgttagcagttacaaaaaggatgatgatagatcatggaaaatgtgtagttgataatagtaaaaaagccctagttgtagttgatcttccatttggttcttatgaaactgataaaattaaagcttttgataccgctgctgaaataatttctctaactaatgctgcagcagtcaagcttgagggtggaaaagaaattgaagaaacagttgactttattgttagcagaggaatacctgttatgggtcatatagggttaatgccgcaaaaaattaatttaaaaggtaagtttttatcagtaggaaaaaacaaaattgaggaagataaaattttagaagatgctaaatctttaacagctgctggcgcattttcttatgttttagaggcaatgaaaagtgaacttgctaaaaaaattactaaagatttggatacaattagtttaggaatcggcgcaggtcggcattgcgatggccaaattttagttatagatgatttattgggactttacagtaattttacaccaaagttcgtcaaaaaatactcaaaccttgaaagtattgttgataaatcagtaaaacaattttcaaatgatgtaaagaatcttaaatttccaactaaaaagtatagttattaat

SEQ ID NO: 229326 - DNA, 465 bp, Unknown
  Bacterial polypeptide expressing nucleotide sequence isolated from the Sargasso Sea
ggggggcggaacccgaggttgtcgccgtaatcgaccgtcttgtgcgcatgggtattcccgtgatggggcatctgggcctcaccccgcaggccgtgcatcgcctggggtacaggcgccaggccacggacgccatcagccaggaacgcctggtcgatcaggcgcgcaccctcgagcagaagggctgcttctccctggtgctggaacatgttcctgccgagctggcgtgccgggtgcagcaggcgctgaccatcccggtgatcggcatcggggcaggtgacggctgcgacggccaggtgcgcgtcaccgcagacctgctgggactcaccgccaaacaacctcccttcagccaagcgctggtggatggccgccgcctgttcatcgacgtgttgaagggttgggtccagcagacccggaacaacactcttcccaccacagaatcacctcaatcagcacctgattgctgag

SEQ ID NO: 229327 - DNA, 745 bp, Unknown
  Bacterial polypeptide expressing nucleotide sequence isolated from the Sargasso Sea
tatgttaccttcagacctcgttaagtataaaaaaaaatctcaaaaaattattgcattaactgcgtgggactctatatcaggatccattgcagaacaagcaaatgttgatctcatcttggtgggagattctttagcgatggtatgtttaggatacaaatcgacattgccattaactttagacaacataatttatcatactaatgctgtttcgagaggatttaaaaagaaaattgaggaacaacctttgctcgtttcagatatgccttttctaacttaccaatgtggggaggataaagctgtggaatatgcagggaaaatcattcagaacacttatgcaaaggctgtaaagttagaaggggccgaaccagaaatacaaaaagttatttctagattaataagaatgggaatccctgttatgggtcatataggtcttacaccacaaagctatctaaatcttggattcaagaaacaaggagagagcttagaaagccaagaaaaaataaagcaagaagcttccattcttgaaaaattaggatgttttgcaatagttcttgaacatattcctgatttactttctaaagaaatacaaaacactttatcaattcccacaataggtatcggtgcagggaattattgtgatgggcaagtaagagttactgcagatttgttaggcctaaatgatgatcacccaccattttgtcaacctattattaagggtaaggaattacttaaggataaattaaaa

SEQ ID NO: 229328 - DNA, 422 bp, Unknown
  Bacterial polypeptide expressing nucleotide sequence isolated from the Sargasso Sea
tttttttgtgaatcgcggtgtacccgtatgtggccatctcggattaacccctcaatcggtaaatcagttgggcggttttcgtgtgcaggggcgtcaagagtcggtcgctgaccaacttcgacaggacgcgcagagtctgcaggacgcgggggcctctgtgctggttcttgaggcagtgccctcgggtctcgccaaggagattacccaaaacctcgcaatccccaccatcggaatcggcgccgggccggataccgatggtcaggttctcgtcctctatgatcttcttggtatctatccccaaaagagtccgaaattcagcaagaactttttagacggggcggggtctgtctcaggcgcagtccaggcctttatcgaggacgttagatcgcgtcagtttccaggccctgaacacagtttttgat

SEQ ID NO: 229329 - DNA, 352 bp, Unknown
  Bacterial polypeptide expressing nucleotide sequence isolated from the Sargasso Sea
ctgccccagcgccgccccgtgagcctgccgcgcctggcgcagatgcgcgcagcgggcgaaaaaatcagcatgctcaccgcctacgacgccacctttgccgccgtggccgatgcggcgggggtggaatgtattctggtgggtgattcgctcggcatggtgtgccagggcctgccgagcacggtgggagtgacgctggacaccatggcctaccacacggccagcgtggcgcgcggcctgcaccgcgtgcaaggcacggcctggctggtggccgatctgccctacggcacctatgccgaaagccgcgagcaggccctgcgcagcgcctgtgtgctgatgcaggcgggggcgcaca

SEQ ID NO: 229330 - DNA, 649 bp, Unknown
  Bacterial polypeptide expressing nucleotide sequence isolated from the Sargasso Sea
gatgaaaatcaccacaaatacgttgcaagaaatgaaacgtagtggtgaaaaaatcaccatgctgaccgcctatgactactcgatggcgcgtatactagatggtgcaggaatcgatgtgattctagttggagattccgcttcaaatgtaatggcaggtaacgatacgaccgttccgattactctggatcaaatgatctaccacgcgcaatgtgtcgtgaatggagtggaccgtgctctaatcgtctgcgacatgccatttggtagctatcaaggcgactcaaagcaggccctgaatagtgccattcgaatcatgaaagaatctggggcccatgctgtgaagcttgaggggggggccgaggttgttgaatcgattgaacgaattctcacagctggaattcccgtgatgggacatcttggactgactccacaatcaatctacaagtttggaacatattcggtgcgcgctcgcgaggaagaggaagcggcaaaactgattgaagatgcaaaattgctggaagaagcaggttgtttctccatagttcttgagaaaatacctgccgaattggctgcgaaagtaacggcggcagtcaacatcccaaccatcggaatcggtgctggggcggatgtcgatggacaagtattggtgata

SEQ ID NO: 229331 - DNA, 517 bp, Unknown
  Bacterial polypeptide expressing nucleotide sequence isolated from the Sargasso Sea
atgagtattccatcagcgtctaacccaataacaatttcgcatctaaatgatatgaagactagaggtgaaaaaattgtttgtctcactgcctatgatgcaactttttcagctattgagagtttaaatggaatagaggtaattttagttggagattctttaggaatgatcttgcaaggtcacgacagtacattacctgtaactatggaagatatcatttaccatttagaaaatgtaaaacgcacaaataaaggttctttgattatggcagatatgccttttatgagttatgcctcggaagaacaaacacttgaaaatgcagcctcacttatgcgtgccggtgcgaattgtgtaaagttagaaggcacagcatggataggtaaatcaacagaacttctagcagaaagaggtattcctgtttgtgctcacatgggtttaactcctcaatctgtaaatagaataggtggttatataattcaaggaagagaccccaataaagcagaggaattattcaagaggc

SEQ ID NO: 229332 - DNA, 534 bp, Unknown
  Bacterial polypeptide expressing nucleotide sequence isolated from the Sargasso Sea
ctttggtcgtttccgacatgccatttcttacttaccaatgtggggaggataaagctgtagagtatgcagggaaaattattcaaaacacttttgcaaaagctgtaaaggtagaaggagctgaaccagaaatacaaaaagttatttctagattgataagaatgggaatccctgttatgggtcatattgggcttacaccacaaagttatttaaatctaggattaaagaaacaaggagaaagcttagcaagtcaagaaaaaatcaagaaagaagcctcaattcttgaaaagttaggatgtttttctatagttcttgaacatattcctgagttgcttgctaaagaaattcaaaagaacttaaaaattcccacgataggaatcggtgctggtaattattgcgatgggcaagtaagagttactgcagatttgttaggccttaatgatcatcaaccaccattttgccaacctattattcaaggcaagaatttatttgaggataaattaaaagaatgggttgcctctgaaagacttaattaat

SEQ ID NO: 229333 - DNA, 696 bp, Unknown
  Bacterial polypeptide expressing nucleotide sequence isolated from the Sargasso Sea
cagaagaaatagacaagtatgctgatataattttggttggagactctcttggatcagttctttataactaccacactaccagaaaagtaacactaaataatatgatacaacattctaaaagtgttaaaatgggtattaaaaaaagtttaatggtagtcgatatgccttataaaacttatagaaacaaaaaagaagctttaaaaaattctaaaaaagttatttccaatacaaaatgtgatgcagtcaaattagaaggaggaaataaaattaaaaaaattgtcaaatatttagtaaaaaaaaaaataccggtcatgggacatttaggcatactgcctcaaagtgtaagaggaacttttaagtcaaagggcaaaactgaaagagaaacttttaaattaataagtgacgcaaagatgctcgaagaggctggttgttttgctatcgttttagagtgtgttaaatctaaaacatcaaaattaattacaaaaaatttaaaaataccaacgattggtataggatcttcagtattttgtgatggccaagtattggttactgatgatttacttggccttaatgaaacaaatataagatttgtaaaaaaatttattaatctaaaaacatttataaacaaaggtttaagaaagtttaaatatgaagttttgagtaaaaaatatccttcaaaaaaatattcatattaga

SEQ ID NO: 229334 - DNA, 807 bp, Unknown
  Bacterial polypeptide expressing nucleotide sequence isolated from the Sargasso Sea
cgatcaccgttcccgaactccgtgcacggaagggaaaaaccccgatcgtctgcctaaccgcctacacgatgccgatggcgaagtggctggacgcccacgtcgatttgctgctggttggcgattcgctcggcatggtcctttacggaatggagagcacactcggggtcacggtggaaatgatgctcgcgcacacgcaagccgtcatgcgcggcgcagagcatgcctgcgtgatcaccgatcttcccttcggcagttatcaggaatcaccggaagccgcctaccggacgtcggctcgcgtgctagccgaaacaggcgcggccggcgtcaagcttgagggcggtgaagagatggcggaaaccgtttcctttttgaccgaacgcggcattcccgtgctgggccatgtcggcatgatgccgcaatccgtcaacgcctatgggggctttggggcacgcgggaagacgcaggccgaagcgaagaagattcttgccgacggaaacgcaatcgcaaaggccggcgcgtttgccgtcgtcgtcgagggaaccctggagccggttgcccgtgaacttaccgcacggctttccgtgccgaccattggcatcggggcctctgcggcgtgcgacgggcaaatcctggtgtcagaggatctccttggtttgtttagtggtttcgctcctaaattcgtgaagcgctatgcggatctaggtgccgaggtcgagaaggcgacggcaaaatacgccgccgatgtaaggaagcggcgttttccaggaccggagcattgcttcggcgcgaagaagcagaaacgctagc

SEQ ID NO: 229335 - DNA, 675 bp, Unknown
  Bacterial polypeptide expressing nucleotide sequence isolated from the Sargasso Sea
tggttggtgatagtttgggcatggtcatacagggtcatgacagtactcttccagtaacaatggatcaattaatttatcacttagaatgtgtggttaaaggaaataatgggtcacacataatggccgatatgccatttatgagctactctacagatgatttgggtcttgaaaatgccaaaagattaatgcaagcaggggcaaattctgtaaaaattgagggtggacaatggatctccaaaatggcacaagttttatctgatagaggaatccctgtttgtgctcatatgggactcacccctcaaacaattaatagaattggtgggcatcgtgttcaaggaagagatccttcccaaaaagaaaaaataattaatgaagctatagcgcttgaaaaggctggtgcctcaatgttgttattagaatgtgtcccgggtgagcttgcaaaaactattacaaaagaactaaaaatacctgttattggtattggtgctggtattcatacagatggtcaaataatggttattcatgatttattaggaatatcatgtcttgataagcctcctaaatttgttaaaaactttatgaaaacatcaacatcaatttcaggtgcaataaaaaggtatatcaaagacgtaaaaaataataaatttccttcaaaagaacatacatttgattaag

SEQ ID NO: 229336 - DNA, 280 bp, Unknown
  Bacterial polypeptide expressing nucleotide sequence isolated from the Sargasso Sea
atgcttaggaaatcagctaatgatattaaacttcttaaaggcaaagcccctatagtttgcctaactgcctatactgctccgattgcaagagctattgatgaaaatgtcgatttgatgttagtcggtgactcccttggcatggttctttatgattatgaaaatactttacaagtcactattgagcaaatgattgagcatgcaaagtctgttgttggcgcttcaaacaaatcatgtgtaattgttgatatgcctttcggttcttatgaagagtcggctgata

SEQ ID NO: 229337 - DNA, 739 bp, Unknown
  Bacterial polypeptide expressing nucleotide sequence isolated from the Sargasso Sea
ccggctcttggtagctcgatgaaaaaaaaaatttcagatttaattaaaaaaaaaaataaacaaaaaattgtaagtttaactgcttattcaaaaaacgtagcaacaattttagacaatcattgtgatattatacttgttggagactctcttggatctgttttgtataattataaatctacgagagaagtaactttgaatattatgattcaacattctaaaagtgtcagaatgggtataaaaaaaagtttaatgattgttgatatgccacataacacctatcgaactcctaaagaggccttgaaaaatgcaaaacaaataatgaaaaaaactaaatgtgatggagtaaaattggaaggtggaaaaaaaatttacgaaacaatcaaaaaattagttagaaataaaattccagttatgggccatttaggcttactgcctcaatcagataaaactttcaaatttaaaggcaaaaaaaagtttgagagagataacattataagagactcgcaattattagaaaaagctggtgtattttcaattgttttagaatgtgttgaaacttctttagcaaagcttataactcagaatttaaaggtaccaaccattggtattggatcttctaaatattgtgatggtcagatattagttattgatgatttaatcggtttaaatccaatgaattataggtttgtaaaaaaatatgtaaatattagaaacgaaatttctaaagctgtttcaaatt

SEQ ID NO: 229338 - DNA, 683 bp, Unknown
  Bacterial polypeptide expressing nucleotide sequence isolated from the Sargasso Sea
taaacatgttgatattgtgctagtgggagattcactaggatcagtattgtataattattcaactaccagaaaagttactctaacagaaatgatcaaccattctaagagcgtaagacttggagtaaaaaaaagtttgatggttgttgatatgccatttaatacttattcaacaccaaacgccgctctaaagaatgctaaaaaaataattaaggaaaccaagtgtgatgcagtgaagttagaaggcggaaaaaaaataatccatcaaattaaactattaaccaaaaacaaggttcctgtgatgggacatcttggattattaccccaatcaactaaaggtaaatttaaatctaaaggaaagaccactaaagagatcaatcaattgattaatgatgctttattacttcaaaataatggagtttttgcaattgtcctggagtgtataaaaacaccaatagcaaaacaaattacaaaaaatttagatatccctacaattggaattggttcttctgttcattgcgatggtcaggttcttgttacggatgatttaattggtctaaaccaaacaaaaataaaatttgttaaacaatttctaaacgtaaaaaaatatatcaatgccggattaagaaaatatgcttcagaggtaagatctaagaaatatccaactaaaaaacattcgtattaaa

SEQ ID NO: 229339 - DNA, 577 bp, Unknown
  Bacterial polypeptide expressing nucleotide sequence isolated from the Sargasso Sea
atgtcttttcaaaacataaaacctttagtcactatcaatacattaaataagttaaagtctgatggagaaaagtttgcctgtcttactgcttatgaggctaccttggccaatgttattagtaaggctggagttgaagtaattttgattggtgatagtttaggtatggttatacaaggccatgacagcacactacctgtaactatggaggatttaatttatcatctaaaaaatgttgcaagaggaaatataaattcacatcttatggctgatatgccttttatgagttatgcaacccaagatactgctctatcaaatgcaactttgcttatgcaaaatggagctcattctgttaaattagaaggaggaagttggatatgtgatttaacaaatcttctgagtcagagaggtataccggtttgtgctcatatgggcctaacacctcaatctataaatcgtattggtggctattttgttcagggaagagatacagataagcgagatgagatgattgctgaagctaaagatcttgaatctgcaggtgcgtctattcttctgctagaatgtgttccagatgatt

SEQ ID NO: 229340 - DNA, 832 bp, Unknown
  Bacterial polypeptide expressing nucleotide sequence isolated from the Sargasso Sea
gggagaaacgtcatgagtgccaccaaaaaaatggggcgggtttccgtcccggaacttcgcgcccgcaagggtggtgaacccatcgtctgcctgactgcatatacaatgccgatggcccagcgccttgatgaacattgcgacctgcttttggtcggtgattcattgggcatggttctctatgggatggacagtacccttgctgtcagcgtcgatatgatgatcaatcacggcaaggctgtgatgcgcggctcgaaaaatgcctgcgttgtcgtcgacctgccctttggcagctatcaggaatccaaggaacaggccttccggactgcatcgcgcattctggccgaaaccggctgtgcggcggtcaaacttgaaggcggcgccgaactggccgaaaccatcgagttccttaatcagcgtggcgtgcccgtcatggcccatatcggcctgatgccccagcaggtcaacaccatgggcggcttcaaaagccaaggccgtggtgaagaaggcgctgaaaaggtcgtcaatgacgccatcgccgttgccaaggccggtgccttttcggttgtggtcgaaggcacggttgaaccggttgcacggcgcatcaccgaaaccatcgatattccgaccatcggcattggcgcatcggttgcctgtgacggtcaggttctggtgaccgaagacatccttggcctgttttccgatttcacaccgaaattcgtcaaacgctatgccaatctgggcgacgaaatttccaaagccgttggtgaatatgccagcgaagtgcgcacccgtcagttcccgacggatgaacattgctttggcgttgccaaaa

SEQ ID NO: 229341 - DNA, 718 bp, Unknown
  Bacterial polypeptide expressing nucleotide sequence isolated from the Sargasso Sea
aatgaataaaaaaataaaaaaaattcttaataaaaaaaataaatcaaaaattatttgtcttacggcatactcaaaaaacattgctgaaatcttagataaacattgtgatatagttttagtaggagactcattgggctcagtgctttacagttataaatcaactaaagaagtaacccttcagacaatgattaatcatgctaagagtgtaagacttggagttaaaaaatccttaatggtatttgacatgccttataacacttatcgaaatcctcaagaggctttaagaaatgcaaaattggtatttaaagaaactaaatgtgatgcagttaaattagagggtggaaaaaaaataatctctatagttaaaaaattagttcaaaacagaatacctgttatgggtcacgttggtatattaccccaaacagacaagaaatttacattcaaaggaaaaaaacaacaagagagtaatagaattcaaaatgatacaaaatttttagaaaatgcaggagctttttcaattgtattagaatgtatcgaaacaaaattatcaaaaaaaattactgataatcttgtgataccaacaatcggaataggttcatctgttaattgtgatggtcaggtcttagtaattgatgatttgattggtttaagtaaaagtaaatttaaattcgttaaaaaatatatagatattagtagaattattgaaaatgtagttaaa

SEQ ID NO: 229342 - DNA, 676 bp, Unknown
  Bacterial polypeptide expressing nucleotide sequence isolated from the Sargasso Sea
atgcctagaacagtttcagatatagttcaaatgaaatcaaaagagaagattaccgttgtaacaggatatgattctacaatggctacactatgtgatagtgtagatgtaattctggtcggagatagtgcagggatggtaatgctcggatatgatgatactcgagatgtaacaatggatgatatgatacgctttacaaccgcagtaaaaaatgcaaagacagattcactaattgttactgatttaccagttaattcttatgaaaatgaagattctgcagttacaaattcaaaaagacttgtagaagcaggagctcatgcagtaaaattagaaggtggaaaagaagtttctaaaataatcaaagcagtggtagactctgggattccagtaatggggcatttgggattacttccacaaactgcagagaaatattctgtacaagcaaagaaaagtgaagatgcagtaaatttgatacaagatgccagaatcttagaagaatctggaacattcagtattgttctagaaatggtaactagtgatgtgacagaaattattacaaaaagtatcaaagttccaacaataggcataggttcaggcataagttgtgatggtcaagtgctagttgttcatgatatgttaggaatgtttgagaaaataaagccaaaatttgctaaaaggt

SEQ ID NO: 229343 - DNA, 397 bp, Unknown
  Bacterial polypeptide expressing nucleotide sequence isolated from the Sargasso Sea
tatgagtgcagatagaaaaacaaaaaaaacaattttaacattaaataaaaacaaaaaagaaggaacaacttctgttttagtaacagcatatgattatcctcaagccagaattgctgataaagcaggagtagattgtattcttgttggagattctttagggatgactactttaggacataaaacaacaattcctgttacaatggatgatatgattagatcatctgaagcagtaagtagaggagcagatgatgcactattaattggagatatgccatatatgtcttatcaaccatcaaatcagttagcaattgaaaatgctgggagattcattagatcaggtatggatatggtcaaggtagaagggtgcatgacagatagaattaggggcattttgtga

SEQ ID NO: 229344 - DNA, 731 bp, Unknown
  Bacterial polypeptide expressing nucleotide sequence isolated from the Sargasso Sea
cgcacaaatggcaagtttaataaatgatcacgtagatattattctagtaggagatagtataggaatgactatatacggttatgaaaatacattatccgtaacattagatatgatgattaatcacggagcagctgtagtgagatcaactaaccagcctcatattgttgtagatatgccatttggcagctatgaagaatcaccagaagtagcatttagatctgctagtagaatcatgagggaaacaggagctcaatcagtaaaattagaaggtggcgaagaatttgcagaaactattcattttttaagtcaaagaggtattccagttatggggcacattggccttatgccacagagaatgcaaacattaggtggtttttttactcaaggtaaaacagataaagaatcatctaggcttatgaatgatgcaaaatctatatcccaagctggagcgttctcaatggtaattgaagccatacctgaagaagtagcttcagatattactcaaagtatcgaagttccaactattggaataggcgcaggaagaaattgtgatgggcaaattctagtttctcatgatattcttaacttatatggtgcatttactccaaaatttgtaaaaaaatatggcaagatagatgaaagtattgttaatgctgtaaaagactattctcaagaggtaaaaaagaaaaaatttcctactaaagataatattttcactattaaaaaataat

SEQ ID NO: 229345 - DNA, 289 bp, Unknown
  Bacterial polypeptide expressing nucleotide sequence isolated from the Sargasso Sea
tatgactgaaaaaataacaattaattctttaaagaagatgaaagagataggcgaaaaaattgcctgtttaacatcctatgattcatcttttgctaaattacaagatgatgctggagtcgatatgctgttggtcggcgactctttggggatggttttacagggcgctgacaatacattgagagttaaaatgtcagatatgatctaccactctcgaatcgttagtgatgtagttaaacgcgcgattattatttctgatatgcccttcatgagttattcaactccaagacag

SEQ ID NO: 229346 - DNA, 721 bp, Unknown
  Bacterial polypeptide expressing nucleotide sequence isolated from the Sargasso Sea
actgactgcttgggactcaatatcaggatctattgcagaacaagcaaatgttgatctcgtactagtaggagattcattagcaatggtctgtttgggatacaaatcgactttgccattaactttagaaaacataatctatcatacgaatgcagtttcaagaggatttaagaagaagattgaggaacaacctttagttgtttcagatatgccttttctgacttaccaatgtggtgaggataaagctgttgagtatgcaggaaaaataattcagagcacttttgcaaaagctgtaaaagtagaaggggcagaaccagaaatacaaaaagttatttctagattaataagaatgggaatccctgttatgggtcatataggtcttacaccacaaagctatctaaatattggatttaaaaaacaaggggaaagcttagaaagccaagaaaaaatcaagaaagaggcttcaattcttgaagaattaggatgtttttcaatagttcttgaacatattcctgattttcttgctagagaaatacaaaattctttaacaattcccataataggaatcggtgcaggcaattattgcgatgggcaagtaagagttactgcagatttgttaggcctcaatgatgatcaaccaccattttgccaaccgattatccaagggaagaaattatttgaggataaattaaaagaatgggtagactctgaaagacttaattaa

SEQ ID NO: 229347 - DNA, 778 bp, Unknown
  Bacterial polypeptide expressing nucleotide sequence isolated from the Sargasso Sea
aatgaaaaataaaatatcaaatataattaagtctaaaaataaaaggaaattaatttgtttgactgcttattcaaaaaattttgcagaagaagtagacagatatgcagacattactttagttggtgattcacttggatcagttctctataattttaaatctactagagaagtaactatagagaatatgatacaacattcgaaaagtgtaaagcttggtattaaaaaaagtcttatggtcgtagatatgccatatcttacttacaaaaataaaaaagaagcattaaagaatgctaaaaaaatttttaaacaaacaaaatgtgatgctattaaggttgaaggcgcatcaaacatttctagcataattaaacatttaattaaaaacaaaattcctgtaatgggacatcttggacttttgccccaaactgttagaggaaaatttaggtaccaaggaaaaaatattcatgaaagaaaaaaattaatcaaggaagcaattttacttgataaacttggagttttctcaattgttttagagtgtattgaaacacaaacagcaaaaaaaataactaaaattgttaaaatcccaacaattggaattggctcatcaaaatattgtgatggtcaagttcttgtaacggatgatctgcttggtattaataaaacaaaaataagattcgtaaaagaatttataaatttaaggagatatataaaaaaaggaataaagaaatttaaatacgatgttaaaacaaaaaagtatccctcaaaaaaacattcgtattaa

SEQ ID NO: 229348 - DNA, 778 bp, Unknown
  Bacterial polypeptide expressing nucleotide sequence isolated from the Sargasso Sea
atgatttctaaaataaaaaaaatattaaataaaaaaaataaatctaagattatatgtttaacagcatattcaaaaaattttgctgaagccattgatccatattcagatattatattagtaggcgattctttaggctcagttctttataattataactctacaagagaagtaactttaaataaaatgatagatcatgctaaaagtgccagattgggaatcaaaaatagtttaatgattgtcgatatgccatacagaacatacacaaataaaagaatagctctaaaaaatgcaaaaataattatgaaaaaaaccaaatgtgatggtgttaaacttgagggaggttcatcaatctcaagaattatagagcatttggtaaagaacaaaattcctgttatgggacatttgggaattttacctcaaagtgaaaaaggaaaatttaaatccaaaggtaaaaatcctaggcagaaaaaaaaaatgttaagtgatgctaagatgttgcaaaatataggggtattttctattgttttagaatgtgtagaaaaaacactttcaaaggaaattacaaatatattaaaaataccaactattggtataggctcttcatatcattgtgatggacaggttttagttttagatgatttaattggattaaatgaaacaaaaattaaatttgttaaaaaatttggaaatattaaaaaaaatattcaactagctgttaagagctttcgaaaagacgtattaaataaaaaataccctagaaaaaaacattcttattaaa

SEQ ID NO: 229349 - DNA, 676 bp, Unknown
  Bacterial polypeptide expressing nucleotide sequence isolated from the Sargasso Sea
tatgttaccttcagacctagttaattataaaaaaaaatctcgcaaaattattgcactaactgcttgggactccatatcaggatctattgcagaacaagcaaatgttgatctcgtactagtaggagattcattagcaatggtctgcttaggatacaaatcgacattgccaataactttagaaaacataatttatcatactaatgctgtttcaagaggatttaagaaaaaaattgaggaacaacctctagtcgtttcagatatgccttttctgacctaccaatgtggtgaggataaggctgttgagtatgcagggaaaatcattcaaagtacttatgcaaaagctgtaaaagtggaaggagctgaaccagaaatacaaaaagttatttctagattaataagaatgggaatccctgttatgggtcatataggtcttacaccacaaagctatctaaatattggattaagaaaacaaggagaaagcttagcaagccaagaaaaaattaagaaagaggcttcaattcttgaagaattaggatgtttttcaatagttcttgaacatattcctgattcgcttgctaaagaaatacaaaattctttaacaattcctacaataggtatcggcgcaggtaattattgcgatgggcaagtaagagttactgcagatttgttaggcctc

SEQ ID NO: 229350 - DNA, 649 bp, Unknown
  Bacterial polypeptide expressing nucleotide sequence isolated from the Sargasso Sea
tatgaaaaaagaaaaattcacacctcattcagcttttgactgtagaagagaaaaaagaaaatttagcatgataagtgtttatgattatcctactgctaaatgtgcagaagaagcaggcatcaattctttgttggttggtgatagtttagctatgactgtcttaggacaccaggacactatctctataactatggaagaaatgcttcaccacgttaaagctgtctctagagcgtcgcaatactcaatggtagtggctgatatgccctttatgtcttatcaaatttcttcccaacaagccgttgaaaatgccggtagatttttaaaagaagggagagcagacgcggtaaaagttgaaggaggaaatcaaatggctgaaactgttaattcgattttttcagctggtatttctgttataggtcacattggactaactcctcagagctcaggtcaactaggtggattaaaagttcaaggtaaaacagtagatagcgcaaaaaaattattaaatgatgctatttctcttcaagaagcgggtgcttttgcaatcctaatggaatgtgttcctgcaaaaattgcttctgtgattaatgaaaaacttgatgtcccaacaataagctacggctctggcccaagtttggatgctcaagga

SEQ ID NO: 229351 - DNA, 778 bp, Unknown
  Bacterial polypeptide expressing nucleotide sequence isolated from the Sargasso Sea
aatgaatagtaaaattaaaaaaattcttaaaaaaaaaaataaatctaaaattatatgtctaacagcttattcaaaaaatattgctgaagaagttgataagtatacagatataactttagtaggagattctcttggatctgttttatataattataaaacaacaagaaaagtaactttaattaacatgattgatcattcaaagagtgtaagacttggagtaaaaaaaagcttaatggtagtggatatgccttataaaacttatagttcaaataattcagctttgaaaaatgcaaaaaaaataattaaagaaactaaatgtgatgctgttaaattagaaggtggaaaaaatattattaatcaaatcaaaattttagttaaaaataaaattccagtaatgggtcatttgggtcttcttccacagacagccaaaggtaaattcaaatctaaaggaagaactgctaaagaaaaaaaacaattaataaatgatgcgcttctacttcaaagcagtggagtatttgcaatcgttttagaatgtgtaaaaacatttacagcaaaacaaattactcaaacattaaaaattccaactattggaataggatcatctgtatattgcgatggtcaagtattagtaactgatgacttaataggtttaaataatacaaatataaaatttgttaaaaaatttgttaatattaaacaaaatattaatttaggattaaaaaaatttactatagaagtaaagtctaaaaaatatccgtctaaaaaacattcttattaa

SEQ ID NO: 229352 - DNA, 781 bp, Unknown
  Bacterial polypeptide expressing nucleotide sequence isolated from the Sargasso Sea
atgcttacaaaaatacgtaggcttactttaaaaaaaaaaaataaatcaaaaattgtttgtttaactgcatattcaaaaaacatagctgaagaaattgaccgacaagcagacttaatacttgtaggagactctctaggttcagttttatataattatgatacaacaagaaaagttaatcttaaaatgatgatagaacattcgaagagtgtaagaaaaggtgtcaagaaaagcttaatgatagttgatatgcctttcgatacttataaaaacaaatctcaagctctaaaaaattgtaaaaaagtcttaaaagaaacaaagtgtgatggtataaaactagaaggtggtagagagctaaataacataattaagtatttgattaataataaaattccagtcatggggcacataggcataactccacaaacaataagaggaaaatatagatataaagggagaacagcttttgaaaaaaaaaaattactcaaagattctaaatcattagaggaagcgggtgtatttgcaatagttttagaatgtattgaaagaaagttgtctcaagaaattactaaaactatcaaaatacctacaataggaattggatcttcaaaatattgcgatggtcagattttagttacagatgattttttaggcttgacaaactcaaaaatgaaattcgtaaaaaaatatattaatttaaaaaaaaatataagaaaagcagtaaaaaaatttcaaacggatgttaagaatggttcttatccatcaataaaatactcatattaaa

SEQ ID NO: 229353 - DNA, 799 bp, Unknown
  Bacterial polypeptide expressing nucleotide sequence isolated from the Sargasso Sea
agagatattagaagaaaaaaattaagtgataaagaccaagagcctatttcatctcttgtatgctataccgcacaaatggcaaggttaataaatgatcacgtagatattattctagtaggagatagtatgggaatgactatatacggttatgaaaatacattatccgtaacattagatatgatgattaatcacggagcagctgtagtgagatcaactaaccagcctcatattgttgtagatatgccatttggcagctatgaagaatcaccagaagtagcatttagatctgctagtagaatcatgagggaaacaggagctcaatcagtaaaattagaaggtggcgaagaatttgcagaaactattcattttttaagtcaaagaggtattccagttatggggcacattggccttatgccacagagaatgcaaatattaggtggtttttttactcaaggtaaaacagataaagaatcatctaggcttatgaatgatgcaaaatctatatcccaagctggagcgttctcaatggtaattgaagccatacctgaagaagtagcttcagatattactcaaagtatcgaagttccaactattggaataggcgcaggaagaaattgtgatgggcaaattctagtttctcatgatattcttaacttatatggagcatttactccaaaatttgtaaaaaaatatggcaagatagatgaaaatattgttaatgctgtaaaagactattctcaagaggtaaaaaagaaaaaatttcctactaaagataatattttcactattaaaaagtaat

SEQ ID NO: 229354 - DNA, 781 bp, Unknown
  Bacterial polypeptide expressing nucleotide sequence isolated from the Sargasso Sea
tatgcttacaaaaataagtaggcttgttcttaaaaaaaaaaataagtcaaaaattgtttgtttaactgcttattcaaaaaatatagctgaagagattgataacttcacagatttaatacttgttggggactctttaggttcagttttatataattttgaaactacaagaaaagtaaatttatcaatgatgattgagcattccaagagtgtaagaaaaggagttaaaaaaagtttattgattgttgacatgcctttcaatacatacaaaaataaatctcaagcacttaagaattgtaaaaaagtaatgaaagaaacaaaatgtgatggcataaaattagaaggagggggaaaaattatagaaattgttaaacatttaataaaatataaaattcctgtaatgggccatataggtataacaccacaatctgtaagaggaaaatttagatacaaaggtaaaacagatatagaaaaaaaaaatttgttaaaagattcaaaatctttagaagatgctggagtatttgcaattgttttagaatgtattgaaaaaaaagtttcaaaaaaaattacagaatcaattaacattcctacaatagggataggttcatcaaatttttgtgatggtcagattttagttacagatgatttattgggactaacagataataaaataaaatttgtaaaaaaatatgctaatttgaaaagtaatgtaaggacagcagtcaaaaaatttaaattagatgttaagaaagggtcatacccatcaattagatattcttattaa

SEQ ID NO: 229355 - DNA, 790 bp, Unknown
  Bacterial polypeptide expressing nucleotide sequence isolated from the Sargasso Sea
atgtccattaccattcgaaccctgcaaaagcgcaaacaggacggtggcaaattttccgtgctaaccgcttacgacgcctgtttttcccgactcatttccgaggctggcgtcgaagcgattctggtcggcgactccctaggcaatgttatccagggccagaccagcactgtaccggtgacactggagcaaatggtctatcacacccaatgcgtggcccggggcaatcaaggcagtttgatcattgccgacatcccttttatgggggctgccaccctggagcgcacgctgaacgctgccaccgcgctgatgcaagccggcgcaaacatggtaaaactagaaggcagcgcctggctggctgaagccatcgaggttctcaaccgtaacggcgttccggtctgcgcgcatatgggcctgaccccgcaagcggtgaactcattgggcggctaccgggtgcaaggtaaggatgacgacggtgccgcagagctgctcaacgccgccaagattctcgatcaagcaggcacagccctgtttgttttggaatgcgtaccgcgagcgctgagcgcagagatcacccgtgaagttgcggcaccggtcatcggtatcggggccgccccggaatgcgatggccaggtgctggtgatgcatgacatgctcggcatcagccccggcaaacctgcccgtttcgtccgtaactttatggccgaaactggcgatatgcgcgcagcgttcaaggcctatgacgacgcggtgaaagacggcagtttcccggccgacgaacattgtttttaaa

SEQ ID NO: 229356 - DNA, 775 bp, Unknown
  Bacterial polypeptide expressing nucleotide sequence isolated from the Sargasso Sea
atgctacctgcagacctaattaaatataaagaaaaatctcgaaaaattgttgtacttactgcatgggactccatctcaggatcaattgtagaacaggccaatgtagatctcgtcttagtaggagattccttagcaatggtatgtttaggatacaaatctacattgccattaactttagaaaacataatttatcatactaatgctgtttctagaggatttaaaaagaacattgaagaacaacctcttattgtttccgacatgccatttcttacttaccaatgtggagaggataaagctgtagagtatgcaggaaaaattattcaaagcacctatgcaaaggcagtaaagatagaaggggctgaaccagaaatacaaaaagttatttctagattaataagaatgggaatccctgttatgggtcatatcgggcttacaccacaaagctacttaaatctagggttaaaaaaacaaggagaaagccaagaaagccaagaaaaaattaagaatgctgcctttgttcttgaaaagttaggatgtttttcattagttctcgaacacatccctgattcgcttgctagagaaatacgaaataacttaaaaattcccacaataggaatcggtgctggtaaatattgcgatggacaagttagagttacggcagatttattaggactgaatgattatcaaccaccattttgccaaccgatcattcaaggtaaggatttatttagagataaattgagagaatgggtagactctgaaaaatttaaataac

SEQ ID NO: 229357 - DNA, 774 bp, Unknown
  Bacterial polypeptide expressing nucleotide sequence isolated from the Sargasso Sea
aatgtcggtaaaatcagataaaaaccttgtgacaatagcaacattaaaagctttgaaagaaaaaggtgataaattttcatgtttaactgcttatgaagcaactttagcagaaaagataagtcaatctggggtcgaggtgatactagttggtgacagcttaggaatggttatacaaggcaatgatagtactcttccagtaactatggatcatttagtttaccatttgcaatgtgtggtaaaaggtaatgttaattcccacatcatggctgatatgccctttatgagctattcaactgatcatttggcattagagaatgctactaagcttatgcaaaacggtgcacattcagtaaaaattgagggcggaacatggatttgtaaattaacatcaattcttgcagaaagaggtataccagtttgtgcacatatgggtttgacaccccaatcaatcaatagaattggagggtattttgttcaaggaagagatgttaataagaaaaaaaatatgatccaagaggctaaagcattagaagatgctggtgcagcaatgttactactagagtgcgttcctgataatttaacttcagatataatgaagagcataagtatacctgttataggaattggtgctggccaaaaaacagatggtcaaattatggttatacatgatttacttggagtatcttgtttagagaaaacacctaaatttgttaaagattttcttaaagaatccaatagtatagaggaagcaataagcaattatgttaaaagtgt

SEQ ID NO: 229358 - DNA, 809 bp, Unknown
  Bacterial polypeptide expressing nucleotide sequence isolated from the Sargasso Sea
gtttcaatggaaaataccggctcttggtaagtcgatgaaaaaaaaaatttcagatttaattaaaaaaaaaaataaacaaaaaattgtaagtttaactgcttactcaaaaaacgttgcatcaattttagataatcattgtgatattatacttgttggagattctcttggttcggttttatacaattatcaatctacaagagaagtaactttgaatactatgattgaacattctaaaagtgtcagaatgggtattaaaaaaagtttaatgattgttgatatgccatataacacctatcgaactcctaaagaggcagtaaaaaatgcaaagcaaataataaaaaaaacaaaatgtgatggtgtaaaattagaaggtggaaaaaaaatttatgaaacaatcaaatctttagttaaaaacaaaattccagttatgggtcatttaggtttgcttccccagtcagataaaaccttcaagtttaaaggaaaaaaaaagttagagagaaacaacattataagagattcgcaattattagaaaaagctggagtattctcaattgttttagaatgtgttgaaacttctttagcaaagcttgtcactcaaaatttaaagataccaactattggtattggagcttctaaatattgtgacggacaaatattagtttctgatgatttaattggcttaaatccaatgaattataagtttgtaaaaaaatatgccaatattagaaaagatatttctaaagcagtttcaaattattcaaaagaagttaaaaaaattaaatttcctaataaaaaaagttctttttaat

SEQ ID NO: 229359 - DNA, 769 bp, Unknown
  Bacterial polypeptide expressing nucleotide sequence isolated from the Sargasso Sea
atgaaaataaaaaagttcgtaaataagaaaaataaaactaaaatcgtagctttaactgcctactcaaaaaatatagcttcagttttagataattattgtgatcttattttagtaggagattcacttgggtcagttttatacaattataaatctacaaaagaagtaactttaaatactattattgaacattctaagagtgttcgaatgggtattaaacgaagtttaatgattgttgatatgccatataacacttatcgaaatcctaaagaagcgttgaaaaatgcaaaactaattatgaaaaaaactaaaagtgatggagtaaaactagaaggtggaaaaaaaattactaaaataattaaaactttggttaaaaataatatacctgtaatgggtcatcttggagtgctgcctcagtcagataaaaagtttaaatttaaaggtgagaataaagtagaaaaagaaaatattttaagagacgctaaattattagaactatcaggtgctttttcaatggttttagaatgcattgaaacttcattagcgaaacttgtcacagatagtattggcattccaacaattggtataggtgcatctaagaattgtgatggtcagattttagtattcgatgatttaatagggctaaatccaattaaagttagatttgtaaagaaatacactaatataaagagagagctatcaaaagcagtttctaaatatgcaaatgatgttaaaaaaagaaaatttccatcaaaaaaatactcttattaat

SEQ ID NO: 229360 - DNA, 787 bp, Unknown
  Bacterial polypeptide expressing nucleotide sequence isolated from the Sargasso Sea
gatgaaatctagagagaaaattaccgtcttaactggctatgattcaactatggccacattatgtgataaggtcgatgtaattttggtaggagatagtgcggggatggtaatgctcggatatgatgatacgcgagatgtaacaatggacgacatgatacgttttacaaaagctgtaaaaaatgcaaaaactaattcattaattgttactgatcttccaattaattcgtatgaaaatgaagattctgctattactaattctaaaagacttgtagatgcaggagcacatgcagtaaaacttgaaggtggaaaagaaattggaaaaattatcaaagcagtagttgattcaggaatccccgttatggggcatttaggattacttccacagactgcagagaaatattctgttcaagcaaagaaaagtgaagatgctgttgatttattgcaagatgctaagaaattagaagaatcaggagtattcagtattgtttttgaaatggttaccagtgatgttgcaaaaattattacaaaaagtgtcaaagttccaacaataggcataggttcaggcataaattgtgatggtcaagtacttgttgtacatgacatgttaggaatgtttgaaaaaataaaaccaaaatttgcaaaaagatatctaaatttatcagaggagattagaaatgcaattaattcatacgtaaaagatgtaaaagaagagagatttcctggtcaagaacatacattttctatggaaaaagaagagttggaaaaattggagaaagagattggctaa

SEQ ID NO: 229361 - DNA, 832 bp, Unknown
  Bacterial polypeptide expressing nucleotide sequence isolated from the Sargasso Sea
catgttaagaaaatcagctaatgatataaaatctctcaaaagaaagaatccaattgtatgtctaactgcttatacggcaccaattgctagagctattgacgaacaggttgatttaatgttggttggagactcgctcgggatggttctttatgattatgaaaatacacttcaagttacgcttgaacaaatgattaagcatgcgaaatctgtagttggagcctcaaataaatcttgtgtaattgtcgatatgccatttggaacctatgaagaatctgttgaaaaagcatttatgaatgcagctcgtgttatgaaagaaacgaattgtaacggtgttaagcttgaaggcggtcaaaaaatgtccaaaacaattgaacatcttacaaaaagctcaattcccgttatgggtcatataggtcttcaaccgcagagtgtattgattgatggaggttataaagtaagaggaaaagtaaaatctgagtggcaaaaatatattgatgatgcggttgctgttgaagaagcgggagcattttcagtagttttagagggcatggctgagccattagccgcagaaataacttcaattttaaacattcctactattggaataggagcatctccaaattgtgatggccagatattagtaacagaagatatgttgggattaacaaacgttgctccaaaatttgtaaaaaaatatgtcgacttagatagcactattaagaaagcagtaagtaagtatgctgaagaagttaaagatagaacttttccttcatcagaacatatttatcatatgcgtccacaaatcgtaagtaataacggtaaagatcaatga

SEQ ID NO: 229362 - DNA, 817 bp, Unknown
  Bacterial polypeptide expressing nucleotide sequence isolated from the Sargasso Sea
aatgtcaataaaatcagatagagatcttataacaatttcaaccctgaaacgactcaaagaaaaaggtgaaaaatttgcttgtctaactgcttatgaagcaactatagcagaaaaaataagtaaatcaggaatagaggtaattcttgtaggtgatagtctaggtatggttgtacagggccatgatagcacattaccagtaactatggagaatttaatttatcatttaaaatgtgtggttagaggtaacattaattcacatattatggccgatatgcccttcatgagttattcaactgatcatctagctttggagaatgcaaccaaacttatgcaaaatggcgcacattcaataaaaattgaaggaggaacctggatttgtaaactaacttcaattcttgcagagagaggtattcctgtttgtgctcatatgggtttaacccctcagtcaattaataggatcggtggatattttgttcaaggcagagatgtaaataagaaaaagaatatgattgaagaagctaaagcattagaagatgctggtgcagaaatgatattactagaatgtgttcctgatgatttaacagctgatatactagaaaaaattactatacctgtaattggtataggggcaggtcaaagaacagacggtcagattatggtaatacatgatttattaggcatatcatgcctagaaaaatcccctaaatttgttaaagactttttaaaggactcatcaagtattgaggaagcaatatctaactactctaaaagtgtaaagaataaatcatttccgtctgataatcatacttttttttaa

SEQ ID NO: 229363 - DNA, 817 bp, Unknown
  Bacterial polypeptide expressing nucleotide sequence isolated from the Sargasso Sea
atgacctatttgcaggaaacgagccggaacgccatcaccgtgccgaaactgcaggcgatgcgcgatgccggcgaaaagatcgccatgctgacctgctacgacgcgagcttcgcggcgctgctggatcgctcgggtgtcgacgtcctgctgatcggcgactcgctcggcaacgtgctgcaaggccagacgaccacgctgccggtgtcgctcaccgacatcgcctatcacacggcgagcgtcgcgcgggcgcgaccctcggcgctggtggtcgccgatctgccgttcggcacgtacggcacgccggaggacgcctttaaaagctcagtagaactcatgcgcgccggcgcgcagatggtgaagctcgaaggcggtgagtggctcgcggacacggtgcgttttctggtcgaacggtcgattccggtgtgcgcgcacgtcggcctgacgccgcaatcggtgcatgcgtttggcggcttcaaggtgcaaggcaaaaccgaggccggtgcgagccagttgttgcgcgactcgctcgccgtacagaacgcgggcgcccaactgatcgtcatggaagcgatcccgacactgctcgcgagcgaagtcacgaagcaattgcggattccgacgatcggtatcggtgcgggtctcgactgctcaggtcaggtgctggtgctgcacgacatgctgggaattttccccggcaagcggccgcgcttcgtgaaggatttcatgcagggtcaaccgagcattcaggcggccgtggaagcgtatgtgcacgctgtgaaggacggtacgttcccggggccggaacatacgttctaag

SEQ ID NO: 229364 - DNA, 775 bp, Unknown
  Bacterial polypeptide expressing nucleotide sequence isolated from the Sargasso Sea
aatgaaaaaaaaaattacagatttaattaaaaaaaaaaataaaaaaaaaatcgtaagtttaactgcttactcaaaaaacgtagcatcaattttagataactattgtgatattgttcttgtaggagattctcttggttcagttttatataattataaatctactagagaagtatctctaagtatgatgatagaacattcaaagagtgtcagaatgggaattaaaaaagctttaatggttgttgatatgccacataatacttatcgaaattcaaaagaagctttaaaaaatgcaaaaaaaataatgtttaaaactaagtgtgacgctgtaaaattagagggtggaaaaaaaatttacgaaacagttaaaactttagttaaaaataaaattcctgttatgggtcacttaggtttgcttcctcagtcagataaaacatttaagtttaaaggcaaaaaaaagttagagagagacaacattataaaggactcacaattattagaaaaagctggagtattttcagtcgttttagaatgcgttgaaacatctttagcaaaacttttgacacaaaatttaaaggtaccaacaattggaattggagcttctaaatattgcgatggtcaaatactagtttttgatgatttgattggattaaatccaatgaattataggtttgtaaaaaaatatgcaaatattagaaataaaatttctaaagctgtttcaaattattcaaaagaagtaagaaaaattaaatttccaaataaaaataactcttattaa

SEQ ID NO: 229365 - DNA, 817 bp, Unknown
  Bacterial polypeptide expressing nucleotide sequence isolated from the Sargasso Sea
atgacctatctccaggaatcgagccggcctgccgtcacggtgcccaagctgcaggcaatgcgcgacgccggcgagaagatcgcaatgctcacctgctacgacgcgagcttttccgcactgctcgaccgttcgggcgtcgacgtgctgctgatcggcgattcgctcggcaacgtgctgcagggccactcgaccacgctgcccgtgtcgctcgacgacatcgcgtatcacaccgcctgcgtcgcccgcgcgcagccgcgcgcgctgatcatggccgacctgccgttcggcacgtacggcacgccggccgaggcattcgcgagcagcgtcaagttgatgcgcgccggggcgcagatggtcaagctggaaggcggtgaatggctcgccgagacgatccgcttcctcgtggagcgcgcggtgcccgtgtgtgcgcacgtgggcctcacgccgcagtcggtgcacgcgttcggcggtttcaaggtgcaaggcaagaccgaagccggcgccgcgcaactgctgcgcgacgcgcgcgcggtcgaagcggccggtgcgcaggtcgtgctgctcgaagccgtgccgacgctgatcgggtccgaagtcacgcacatgctgcgcgtgccgacgatcggcatcggcgcaggcgccgactgctcgggccaggtgctcgtgctgcacgacatgctcggtgtgttccccggcaaacggccgcgcttcgtgaaggatttcatgcagggcgaatcgaatatccaggcggccgtcgaagcgtacgtgcgcgcggtgaaggacggttcgttccccggcccagagcattcgttctgac

SEQ ID NO: 229366 - DNA, 766 bp, Unknown
  Bacterial polypeptide expressing nucleotide sequence isolated from the Sargasso Sea
atgaaaaacaattctgagaaaatctctatgcttactgcttatgatttcagttttgcaaaaataattgatgaagcaggcattgatattattttagttggtgattctgcttcaaatgtgatggctggtcatgagactacacttccaattactcttgatcaaatgatatatcatgctagttcggtagttagggcagtcaatagagccttagttattgttgacttaccctttggaacctatcaagctgattctaaggaggcattaaaatctgcaattaaaataatgaaggaatcaggagctcatgctgttaaattagaaggaggatatcaagctaaggagtcaatagagagaattatccaagcgggaattcctgttatgggtcatttaggtttaaccccacaatccatatataaatttgggacatatgaagttagagcaaaagataagcaagaggctgatacattattaaatgacgcattgatgcttgaagagattggctgcttctctgttctattagaaaaaatacccaatacactttcaaaagaagtttcctcaaaattaacagttccaatcatcggaattggagcgggaagccatgtggatggacaggttcttgtactgcaagatatgcttggaatgaataaaggcttcagtcctagattcttaagaagatatcttgatttagactcattagttagcaatgctgtaaaaaaatactctactgatattaaaagcggagattttcctaataaaaaagagcagtactgat

SEQ ID NO: 229367 - DNA, 681 bp, Unknown
  Bacterial polypeptide expressing nucleotide sequence isolated from the Sargasso Sea
tatgagcgcagtaaaatcttctgaaattacaattgaaaattttagaaagcacaaaaagaataaaactaaattctctgcgcttacttgctacgacgctactctttcaaaaactttaagtgacaatggcgtcgagatgatcttagttggagatagcttgggtatggtcatacaagggcacgattcaactcttccggtttctgttgaagatattatttatcatttgagatgtgtaaaaaaaggaaacttgagtgcacacattatggcggatatgcctttcatgagttgtgcaaccgaagatctcgcttttgagaatgcttctaggattatgcaggcaggagcaaattcaataaaaattgagggtggtcaatggatgttgaacattacaaaaactttatcctcgcaaggcattccgatatgtgctcatattggtcttactcctcaatcaataaatagaattggaggttattctgtacaaggaagagatccagaggataagaaaaaaatacttaaagaagctattgaacttcaagatgcgggagccgaaatgattttatttgaatgcattcctgattctttgacaaattctttagtggataatttatcaataccaacaattggtataggagcggggcccaaaacagatgggcaaattatggtcttgcacgatatgttaggaatttc

SEQ ID NO: 229368 - DNA, 805 bp, Unknown
  Bacterial polypeptide expressing nucleotide sequence isolated from the Sargasso Sea
atggccgaaccgcccattaatgttgccaccctaaaaaaaatgaaatccaataaggaagcaattgcgtgcatcacagcttacgatgcaagtttttctttgttagtcgataaggcaggtatcgatgttgtgcttgttggggattctctaggtatggttattcaaggtcatgatacgactgtgcctgtgacagtagatgacgtggtctatcatagtaataatgtggcaaaaggcctaagcagagcttttttaatcgctgatatgccttttatgagctattcagatcctaatcaagcattagaaaattctgttcgtctaatgcaagaagggggggcgatgatgattaagcttgaaggtggagaagatcaaatatctattgttgagcatcttgcaagacatgatattgctgtctgtgcccatcttggtttaaaaccacaatcggttcataaaattggaggtttcaaagttcaaggaagagataaagatgaatcagataaaatgctcaagaatgcgatatccctccaaaatgctggagcagatttgattcttcttgagtgcgttccaaatgaattgggtaagttaataagagataagttggatattccagtaattggaattggggcgggacccaatgtcgatggtcagatattagtgctctatgatgttcttggaatcactcagggaacaatgccaaaattcgttaaaaatttcatgctcggtcatgattcgcctctcaatgccatagaatcttatgttaaggcagtaaaggaaggagattatccatctcctgagcattgtttttcatagc

SEQ ID NO: 229369 - DNA, 712 bp, Unknown
  Bacterial polypeptide expressing nucleotide sequence isolated from the Sargasso Sea
tgcctattcaaaaatattgcttctatattggataattattgtgatttaattttagtaggagactcacttggttcggttttatacaattataaatctacaagagaagtgactttgaacaccatgattgaacattccaaaagtgttcgtatgggtgtaaaaaaaagtttaatgattgttgatatgccgcataacacctatcgaaatcctaaagaggcagtgagaaatgcaaaactgataatgaaaaaaacaaaatgtgatggagtaaaattagaaggtggaaaaaaaatttatgaaacagtcaaaactttggttaaaaataaaattccagttatgggtcatttggggttacttcctcagtcagataaaactttcaaatttaaaggcaaaaaaaagtttgagagagataacattataagagactcacaattattggaaaaagctggagtattttcaattgttttggaatgtgttgaaacttctttagcaaagcttgtcactcaaaatttaaaaataccaactattggtattggagcttctaaatattgtgatggtcaaatattagtttttgacgatttaattggcttaaatccaatgaattataagtttgtaaaaaagtatgcaaatattagaaaagatatttctaaagctgtttcaaattattcaaaagaagtaagaaaagttaaatttcctaataaaaaaaattctttttaat

SEQ ID NO: 229370 - DNA, 793 bp, Unknown
  Bacterial polypeptide expressing nucleotide sequence isolated from the Sargasso Sea
attgatcacaatagatacgctgaataactttaaagctattggagaaaagtttgcttgtttgactgcatatgaatcaactttagcaaatgtaattagcagtgctggggttgaagtaatattagttggtgacagtttaggaatggttattcaaggccatgatagtactctgcctgtaacaatgaatgatctcatatatcatctcaagaatgttagccgtggaaatattaattctcatttaatggctgacatgccatttatgagttattcaactaaggataaagctctgtctaacgctgctttgttaatgcaaaatggagcacattcaattaaattagagggaggttattggatctgtgatttaacaaacgcccttgctgagcgaggtataccagtgtgtgctcatatgggattaactcctcaatcaattaatcgtattggtggatattttgttcaaggtcgtgatacagataaaaaagaagaaatgatctctgaagctaaagagcttgaatctgcaggagcttctattttattgctcgaatgtgtaccaaataatttagcagcagaaattacacaatcattaaatattccagttattggaataggcgcaggcgcatcaaccgatgcacaggttatggtaatccatgatttgcttggtatttcttgcctagagaagccaccaaaatttattaaaaattttcttgctgaaaatgattctgtgcaaagtgcaatagctgcatatgttaaagaagttaaatcacaaaaatttccagcaaaagagcataccttcttttaa

SEQ ID NO: 229371 - DNA, 817 bp, Unknown
  Bacterial polypeptide expressing nucleotide sequence isolated from the Sargasso Sea
gatgtcaataaaatcagataaagatcttataacaatttctaccttgaaattactaaaagaaaaaggtgaaaaatttgcttgtctaactgcttatgatgcaactatagcagaaaaaataagcaaatcaggaatagaggtaattcttgtaggtgatagtcttggtatggttgtacagggccatgacagcacacttccagtaactatggagcacttaatttatcatttaaaatgtgtggttagaggtaacattaattctcatattatggccgatatgccctttatgagttactcaactgatcatttagctttggaaaatgctactaaacttatgcaaaatggagcacactcaataaaaattgaaggaggaacctggatttgtaaattaacttcaattcttgcagagagaggcattcctgtttgtgctcatatgggcctaactcctcaatcaataaatagaattggtggatattttgttcaaggaagagatgtaaataagaaaaaaaatatgattgaagaggctaaagccttagaagatgctggtgcagcaatgatattattagaatgcgttcccgatgatttgacggctgatatattagaaacagttactgtacctgtaattggtataggggcaggccgaagaacagatggccagattatggtaatacatgatttattaggtatatcatgcttagaaaaaacccctaaatttgttaaggattttttgaatgactcatcaagcattgaggaagcaatatctaactattctaaaagtgttaagaataaatcatttccctccgatgatcatacttttttttaa

SEQ ID NO: 229372 - DNA, 796 bp, Unknown
  Bacterial polypeptide expressing nucleotide sequence isolated from the Sargasso Sea
atgagcaagatcaccaccaccaacctgctgaagatgaagcaggaaggccaacgaatcaccgccatcaccgcctatgatgccacctttgccaagctgttcgacgacgagggcgcccacgtgctgctcatcggcgactcgctgggcatggtgctgcaggggagtcaggataccctgggcgtcagcatggatgagatggtctatcacacccgttgcgtggtgcgcggcaccaccaatgctctggtggtgaccgacatgccgttcatgagctatgccaccccggagcagacctatcagaacgccgcccggctgatggcagccggtgcccgcatggtgaagatggaagggggcgactggctgtgcgactccatccgccacctgacccgcaacggcgtgccggtgtgtggccacctcggcctcactccgcaatccgtgcacgtattcggcggcttcaaggtgcaggggcgagacgagttccaggcccaggagatctaccgtcaggccctcgaactgcaggctgccggcatccagttgctggtgctcgagtgcgtgcccacttcgctggccgagcgcatcagcaaggcgctgcgcattccggtgatcggcatcggtgccggtcccgccaccgacggccagatcctggtgatgcacgatgccttcggcatcacctccggctatgtgcccaagttcaccaagaacttcctggccgagaccggcgacatgcgcgccgccatccggctctatgtgaagcaggtgagcgaaggcaccttcccgggcccggaacactgcttcaactgat

SEQ ID NO: 229373 - DNA, 775 bp, Unknown
  Bacterial polypeptide expressing nucleotide sequence isolated from the Sargasso Sea
atgttaccttcagacctagttaattataaaaaaaaatctcgcaaaatcattgcactaacagcatgggactccatatcaggatctatagcagaacaagcaaatgttgatcttgtactagtaggagattcattagcaatggtgtgcttgggatacaaatcgacattgccattaactttagaaaacataatttatcataccaatgctgtttcaagaggatttatgaagaaaattgaggaacaacctctagtcgtttcagatatgccttttctgacttaccaatgtggtgaaaataaagctgttgagtatgcaggaaaaatcattcagagcacttatgcaaaagctgtaaaagtagaaggagctgaaccagaaatacaaaaagttatttctagattaataagaatgggaatccctgttatgggtcatataggtcttacaccacaaagctatctaaatattggattaaaaaaacaaggagaaagcttagcaagccaagaaaaaatcaagaaagaggcttcgatacttgaagaattaggatgtttttcaatagttcttgaacatattcctgatttgcttgctaaagaaatacaaaattctttatcaattcccacaataggcatcggtgcaggtaattattgcgatggacaagtaagagttactgcagatttgttaggcctcaatgatgatcaaccaccattttgccaaccaattatccaaggcaagaaactatttaaggataaattaaaagaatgggtagactctgaaagacttaattaat

SEQ ID NO: 229374 - DNA, 781 bp, Unknown
  Bacterial polypeptide expressing nucleotide sequence isolated from the Sargasso Sea
atgaataaaaagattaaaaaaattcttaataaaaagaataaatcaaaaattatttgtcttacggcatactcaaaaaatgttgccaaaatccttgataaacattgtgatttagtattggttggtgactcgttaggatcagttttgtataatttcaagtccaccaagcaagtgactttagagaccatgattaatcattctaaaagtgtcagacttggtattaagaaatcattaatggttgttgatatgccttataatacatatcgaaatccaagcgaagctttgaagaattcaagattggttatgaaagaaaccaaatgtgatgctgttaagttagaagggggaaaaaagataattcctatcgttaaaagattaattaaaaataaaataccagttatgggacatgttggaatattacctcagacagataaaaaatttacctttaaagggaaaaaactaaaggaaagtgagagattacttaaagacactaaacttttagaaaatgctggagttttttcgattgtattagaatgtgtagaaacaaagttatcgaagaaaatttccaatcatataaaaattccaacaataggaattggttcttcagtcaattgtgatggtcaagttttagtaattgatgacttaacaggattaagtcaaagtaaattaaaatttgttaaaaaatttgttgatataacaaagttgatcgaaaatggtgtgaaaaaatttaaatctgaagtattaaaaaaacaatttcctaaagccaaacattctttttcaaaatgaa

SEQ ID NO: 229375 - DNA, 817 bp, Unknown
  Bacterial polypeptide expressing nucleotide sequence isolated from the Sargasso Sea
aatgtatactaataatgaattaaaaaccgttaccctaaatactctgagagatttaaaatcaaaaggtgagaaaattgcgtgccttacagcctatgacgcaacttttgcaaatttagtcgacaaggctggaacagaaataattcttgttggtgactctctaggaatggtggtgcagggacataaaacaacggtaccagttaaaattgaagatatgatttatcacacaaaaatcgttgcatcatcggtgaattattctttcttaatttctgatatgccctttatgagtttttataatgccaatgttgcccttgataatgcaaaaagactgatgcaggatggtggggcacaaatggtaaaattagaagggaataggtctcaaataaatattattaaaaagctagcgctttcagatataccgatatgcgcacacattggattgagaccgcaatcagtaaataagatgggaggttataaagttcagggcaagagttcaaatgaggcaaatgcactcattcaagaagcaaagaaaatagaggactcaggtgctgatctattacttcttgaatgtgtttcctcacaaacagcaaaagaactagcaagtgagatatccataccaataattggcatcggcgcaggttcagaagttgatgggcaaatactagttctatacgatattttgggtatttctcaaggtcaattaccaaagttctcaaagaattacatggatggaaataacacaatagaggatgcaataaagcaatacattcaagaagttaaaacactaaaataccccacagataaacactcgttcaaatag

SEQ ID NO: 229376 - DNA, 630 bp, Unknown
  Bacterial polypeptide expressing nucleotide sequence isolated from the Sargasso Sea
ttgtagcagatatgccttatatgagctatcacgtttctgaagaagaaacaataaaaaacgctgcgagatttattcaagaaggtaaagccgacgctgtaaaaatagaaggtggaaaaaaaagagaaagaatgataaaagcattaatcaacgccgaaattcctgtaatgggtcacttaggattaacaccacaatcaaaaaatgttatgggcggatataaagttcaaggaaaaacattagagcttgcaaaagaattattagaagatgcaattttattagattcactgggctgtttttcttttgttcttgaaggagtaccaaaagtagtcgctcaaacaatgacagaaaaagtttcaattcctaccattggaattggtgcaggagttcatgtagatggacaagttcttgtttaccatgatctccttggtatgaaatccaaagaatatattgatgcaaaatttgtaaaaagatatgacaatcaatatgaaaaagttgttgaagtaatgaaaaaatttaaacaagatattgaaaacaaagattttccaacagatgatcattcctatgattcaggagattctttacctgaaagcttaaaagagtggaaaaaagaagttaaaaaaattctgtcataac

SEQ ID NO: 229377 - DNA, 775 bp, Unknown
  Bacterial polypeptide expressing nucleotide sequence isolated from the Sargasso Sea
atgttgccttcagacctggttaattataaaaaaaagtctcgaaaaatcattgcactaactgcatgggactccatatcaggatctattgcagaacaagtcaatgttgatctcgtcctcgtaggagattccttagcaatggtctgtttaggatacaaatcgacattgccattaactatagaaaacataatttatcataccaatgctgtttcaagaggatttaaaaagaaaattgatgaacaacctttggtcgtttcagatatgccttttctgacttaccaatgtggagaagataaagctgttgagtatgcagggagaatcattcagagcacttatgcaaaagctgtaaaggtagaaggagctgaaccagaaatacaaaaagtgatttctagattagtaagaatgggcatccccgttatggggcatataggcctcacaccacaaagctatctaaatattggattaaaaaaacaaggagaaagcttagaaagccaagaaaaaatcaagaaagaggcttctattcttgaaaaattaggatgtttttcaatagttcttgaacatattcctgatttgcttgctaaagaaatacaaaattctttatcaattcccacaataggtatcggtgcaggtaattattgcgatgggcaagtaagagttactgcagatttgttaggcctcaatgatgatcaaccgccattttgccaaccaattatccaaggtaagaaattatttaaggataaattaaaagaatgggtatcctctgaaaggcttaattaat

SEQ ID NO: 229378 - DNA, 817 bp, Unknown
  Bacterial polypeptide expressing nucleotide sequence isolated from the Sargasso Sea
atgtcaactcatgcatacaaaaaacctataacgctgacaacgttaggtaatcttaaaaaaaattctgagaaatttacatgcttaactgcatatgagtccacaatggcatcagtcattagtgaaaatggtgttgatgttatattagttggagatagtttgggtatggtcgtgcaaggacatgacagcactctcccagtaacaatggatcaattgatctatcatctagagtgtgtagtaaatggaaattcaggttctcatattatggctgatatgccatttatgagttattcaacagatgatctaggtctcgaaaacgccaaaagacttatgcaagcaggtgctaattctgtaaaaattgaaggtggagaatggatatcaaatatggctcaagctttgtcagatagaggcattcctgtgtgtgcacatatgggtcttactcctcaaactattaacagaattggtggtcatcatgttcaaggcagagatccatcacaaaaagaaaaaattattaatgaagctattgcgcttgaaaaagcaggtgctgcaatgctgttgttagaatgcgtccctggtgatttagcacaagagataacatccaccttaaaaatacctgttataggaataggtgcggggatacatacagatggtcaaattatggttgtgcatgatttacttggtatttcatgtttagacaccccaccaaaatttgtaaaaaattttatggaagagtcatcatcaattcaggatgcaattcatagatatgttgatgaggtaaagaatcttaaatttccatctgaagaacatacctttaagtaag

SEQ ID NO: 229379 - DNA, 322 bp, Unknown
  Bacterial polypeptide expressing nucleotide sequence isolated from the Sargasso Sea
atgtcccacaaaaaaccagttaccatcacgactttaaataaatttaaagaaagctctgaaaaatttacatgtttaactgcatatgagtcaacaatggcttctgtaataagtcaatcaggagttgatgttattctagtcggagatagtttgggtatggttattcaaggtcatgatagcactctgcctgttactatggatcagttgatataccatcttgaatgcgttgtaaatggaaatgaaagttctcacataatggctgatatgcctttcatgagtttatgcactgatgatttaggattagagaatgctaaaaaacttatgc

SEQ ID NO: 229380 - DNA, 778 bp, Unknown
  Bacterial polypeptide expressing nucleotide sequence isolated from the Sargasso Sea
atgaataaaaaaattaaaaaaataattgataaaaaaaataaatctaaaattgtatgtttaacagcatactcaaaaaatattgctgagatagttgataatcatgctgatatagttttggttggtgattctttgggttcagttctttataattacaaaacaacaagaaaagttaatctcaaaatgatgattgaacacactaaaagtgttaggatgggtgttaaaaaaagccttctcgtaattgatttaccttataatacatatcgaaataaatctgaggctttaaagaattcaaaagttgctattaaagaaactaagtgtgatgcagtaaaagtggaaggtggagaaagggtgcaacatatagtgagtcatttagtcaaaaacaaaataccagttctgggccatataggtttaacaccacagactgtaaaaggaaaatttaaatcagtaggtaaatcacaaaaagaaaaaaataaattaataagagatgcaaaagctctagaaaaaaatggtgcttttggaatagttttagagtgcacttatagtgatatttcaaaaaaaatttctaatcttattaaaatacccacgattggaattggagcttctgtttattgtgatggtcaagttttagttacagatgatattattggtttaactgatgctaaaattaaatttgttaaaaaatacgttgatataaaaaaaataataaattcagcggtacttaaatttaaacaagaggtaaaatctaggaaatatccgacaaaaaaatattcttactaaa

SEQ ID NO: 229381 - DNA, 745 bp, Unknown
  Bacterial polypeptide expressing nucleotide sequence isolated from the Sargasso Sea
aatgaaagccaataaagaatacattgtggcattaactgcgtacgactatcaaacagcaattattattgataattattgcgactttgttttagttggggattcgctagggaatgtattccaaggtgaagaaaccactctgggtgtaacagttgaccagatgaaataccatgggtctatagtttctaaagctattaaaaatgcccatttgtgtattgatatgccttttatgtcatatcaatcatcagtttcagaagccctaaagaatgctggagatataatcaaatccacaaaagctcaatctattaaacttgaaatcaacattgacactattccgacaattcaaagacttgctaatgctgggataccagtagttgcgcatgttggtctttgccctcagtctttcaatctatatggtggatataagaagcaaggtaaaaataaatcagatcaagattatatactaatgctttcaaaagaggctgagaaaaatggagcatctattgtcgtaatcgagggagtcccagacaatttaggattaaaaataaccagggccttaaaaatcccaactataggtattggagctggtaataagtgtgatgggcagatacttgttacagaagatatgctaggattaaccccaccgccctacccatcttttgtaaaaaattattctaatatgagagggttattaaaaaaatccgcaagcaaatataaaaatgaagtcaaaaaaaataagttcccttaa

SEQ ID NO: 229382 - DNA, 796 bp, Unknown
  Bacterial polypeptide expressing nucleotide sequence isolated from the Sargasso Sea
atgtctaaagttactagctcaaccctgttgaaatacaaacaggaaggtagaaaattcaccgctctgacagcctatgatgccagctttgccagtgcgttcgacggcgaaggcatcgatgtgctactggtcggcgattctttgggaatggttctgcaaggccacgatgataccctgcccgtcacgacagccgaaatcgcctatcacactcgttgtgtgcgtcgcggtatcgagcgctcactgctgatcgccgacatgccatttatgagttatgccacgccagaacaagccatggaaaacgccactgcattgatgcaggcgggtgccaatatggtcaagctggaaggcggtcactggttactcgaaaccgtgactaaactgaccgaacgcggtattcctgtctgcgcccacttgggcctcaccccgcaatcggtacacgtttttggtggctttaaagtacaaggccgcgatgctgaaaatgcccagcgcattctcgatgaagccaaggccttagaagccgctggcgcgcagctgttagtggttgaatgtattccggcatcacttgccaccgccatcactcaagcattaactatcccagtgatcggcattggcgctggtgccacgacagatggccagatcctagtaatgcacgacgtactcggtatttcgagtggttatatcccacgtttttcaaagaactaccttaagcaaacgggtgaaatccgctcggcggtacgcgcttatattgaagaagtggccaatggcagcttcccaagtgctgatcacacgttcaactaag

SEQ ID NO: 229383 - DNA, 784 bp, Unknown
  Bacterial polypeptide expressing nucleotide sequence isolated from the Sargasso Sea
atgaaggataaaattaaaaaaattattaaaaaaaaaaataaacaaaaaattttatgtttaacttcttattccaaaaatattgctgagattttagatcgatttgttgatataattttagttggagactcattgggttctgttctttataattataattctacaagaaaagttttacttagaaacatgattgagcattctaaaagtgtcagaatgggtataagaaaaagtttaatggtagtagatatgccatttcaaacttatagaactaaaaatgaagcactatctaacgcaaaaaaattaatgaaaattacaaaatgtgatgctgtaaaacttgaaggtggaaaaaaaattataaatattgttgattatttaattaagaataaaatcccggtgatgggacacattggaatacttccgcaaagtgtgaagggaaaatttagatttaaaggaaaaaataaatcagataaaaaaaaattaattagtgacgcaaaactattagaagaaagaggagttttttcaattgtattagaatgtatcgaaagctctacatcaatggcaattactaatagtttaaaaataccaacgattggaattgggtcatcatcaaattgtgatggtcaagttttagtaactgatgatatgataggactaaatcctaattcttttcgttttgtaaaaaaatatggaaatgtaaaaaaatatatagaaagttctgtaaaaaaatttcgtagcgatgttttaaataaaaagtttccaacaaagaaatacagttttgtttactaaa

SEQ ID NO: 229384 - DNA, 685 bp, Unknown
  Bacterial polypeptide expressing nucleotide sequence isolated from the Sargasso Sea
ggataaatatgccgacctaatccttgttggagattctttaggatcatttttgtataattataaatctacaaggaatgttactttagattccatgattgaacattctaaaagcgttcgattaggtgttaaaaaaagtttaatgattgttgatatgccttacaatacatatcgtaataaaaaagaagctttaagaaattgcaaaagagttattaaggaaaccaaatgtgatggtgttaaagttgaaggaggaattaaaattaaaagtatagttaaacatttaactaaaaataaaatttcagtaatgggtcatataggaattttacctcagtcaattagaggtaaatttaaatctaagggaaagtcagaaaaagaaaaaaaacagttaatcaaagatgcatcatttttagaaaaagcaggtagttttgcaatagttttggaatgtatagaaaaaaacttatcaaaaaaaattaccaacacgcttaaaattcctactataggaattggatcatcacactattgtgatgggcaaattctggttactgacgatcttcttggtttaacaaactctaaaattaaatttgtaaaaaaatatatagatttaaaaatatatataagaaaaggtgttaaaaaatttaagtcagatgtattaaaaaacaaataccctaataaaagatattcatattaa

SEQ ID NO: 229385 - DNA, 823 bp, Unknown
  Bacterial polypeptide expressing nucleotide sequence isolated from the Sargasso Sea
ctgaggccctatgcgcccgtgcgtccagctgatctgatccgacagaagcagaacggtcgaccgatcacgatcctcacggcctgggacagtctgtctgcggcgctggtggaagccgctggcgccgatgctgttctggtgggtgactccctggcgatggtcgccctgggccatgccaccacgctgccggtgacgctcgatcagatgcggcaccacaccctggcggtgagccgcggattcaacgcagaaccctcgcggcaaccgctgctgatctgcgaccttcccttcctcagctatcaatgtgggccggacctcgccgtacaggcggcaggaacgctgttgaaggaaacccccgccgccgccgtcaagctcgagggagcggaggctgaggttctggccgtgatcgaccggctggtgcggatggggattcccgtgatgggccacttggggctcacaccgcaggcggtgcatcgcctcggctacaggcgtcaggctcaagacccggtcagtcaggaacggctgctcaaccaggcgattgccttagagcaggcagggtgcttcgcgctcgtgctggaacatgtcccctcggatctggcaggggtggtgcgtcgtcgtcttcagatccctgtgatcggcatcggtgccggagacgactgcgatggccagatccgcgtcaccgcagacctgctcggcctgacgcagcaacagccacccttcagtccggccttgattcctgggcagcagctgtttgtggaggcccttcggacgtgggttgctgaacagactcccaccacaacaccacctccagcagcacccgattgctgag

SEQ ID NO: 229386 - DNA, 457 bp, Unknown
  Bacterial polypeptide expressing nucleotide sequence isolated from the Sargasso Sea
tatgtcaactaaagctaataaaaaatcggtaactttaacagatttaaaaaattttaaagaaacatcggagaaatttacttgtctaactgcttatgagtcaacaatggcatctgtgataagtgaatgcggtgtcgatgttattttggtaggagatagtcttggaatggtgatacagggtcatgacagcacacttcctgttactatggatcaacttatttatcatctcgaatgtgttgtgaatggcaataagggctcacatattatggcagatatgccatttatgagttattcaacagatgatttgggattagaaaatgctaagagattaatgcaagcaggagctaattcagtaaaaattgaaggaggtgaatggatatcaaagatggctcaggttctatcagatagaggaatacctgtatgtgctcatatgggcctaactcctcaaacaataaataga

SEQ ID NO: 229387 - DNA, 817 bp, Unknown
  Bacterial polypeptide expressing nucleotide sequence isolated from the Sargasso Sea
aatgcctaacacagttaatgatattattcagatgaaatctagagaaaaaattactgtcttaacaggatatgattcaactatggcaacattatgtgacaaagttgatgtaattctggtaggtgatagtgctggaatggtaatgctaggttatgatgatactcgagatgtgacaatggatgatatgatacgtttcacaacagctgtaaaaaatgcaaaaactgattcattaattgttgcggatcttccaattaattcctatgaaaacgaggattctgctattactaattcaaaaagacttgtacaagcaggtgcacatgcagtaaaacttgaaggtggaaaaaaaattgcagatattatcaaagctgtagttgattcaggaattccagttatgggacatttaggattattgccacagactgcagaaaaatattctgttcaagcaaaaaaaagcagtgatgcagtaaatttgttagaagatgcaaaaattttagaaaaagcaggagtatttagtattgtttttgaaatggtcaccagtaatgttgcaaaaattattacagaaagtgtaaaagttccaacaataggtattggttcaggcataaattgtgatggtcaagtattggttgttcatgatatgttaggaatgtttgaaaaaataaagccaaaatttgcaaaaagatatctaaatttatcagaggatattagaaatgcaataaattcatacgtaaaagatgtaaaagaagagaaatttcctgaagaagaacatacgttctctatggaaaaagaagagttagaaaagttggagaaagagattggctaa

SEQ ID NO: 229388 - DNA, 778 bp, Unknown
  Bacterial polypeptide expressing nucleotide sequence isolated from the Sargasso Sea
atgaatgctaaaataaaaaaaattctaaaaaaaaaaaataaatcaaaaatagtatgtttaacagcatattcaaaaaactttgcagaggaagttgataaatacgttgatattaccttggttggggattctttaggatcagttttatatgattataattctacaaaaaaagtaactttaacaaatatgattgatcactcaaaaagtgtgcgactgggcataaaaaaaagtttaatggtagtcgatatgccttataatacatacagttctaataatactgcttttaaaaatgcgaaaaaaatacttaaagaaacaaaatgtgatgcagttaaattagaaggtggaagaaaaattattaatcaagttaaatatttaattaaaaaaaagattccagtcatgggtcatttgggtcttcttcctcaaacagccaaaggaaaatttaaatctaaaggaaaatcagtcaaggaaacaaaagaacttataaaggatgctcttttacttcaaaatagcggtgtctttgcgatagttttagaatgtataaaaacaactagtgctaaaaaaattactcaatcactaaatattccaacgataggtattggatcttcagttcattgtgatgggcaagtacttgtaactgatgatttaataggtttaaataatacaacaattagatttgttaaaaaatttgttaatataaaaaaatacattaatttaggtttaaaaaaattctccatagaagtaagatctaaaaaatacccaacaaagaaatattcctactaaa

SEQ ID NO: 229389 - DNA, 607 bp, Unknown
  Bacterial polypeptide expressing nucleotide sequence isolated from the Sargasso Sea
atgtcgagtaagtcagaaaaaaaattagttactttagatactttaaacagatataaagagaaaaatgagaaatttacatgtttaacagcttatgaatcaacaatggcatctgttattagtaaagctggtgtagatattattttagttggtgatagcttaggtatggtagttcaaggtcatgatagcactcttcctgtaaccatggatcagcttgtatatcatcttgaatgcgttgttaatggcaataatggatcacatataatggctgatatgccttttatgagctatgcaactgatgatcttggattggaaaatgcaaaaagattaatgcaagctggtgctaactcagtaaagattgagggtggtgaatggatatcaaaaatggctcaagcactttctgatagaggaatacccgtttgtgctcatatgggacttacacctcaaacaattaacagattaggaggtcatagagttcaaggcagagacccatctcagaaagaaaaaattatcaatgaagcaatgtcacttgaaaaagcaggcgcagccatgcttttgttggagtgtgttcctgatgagttagctaaagaagtaactaaagaattaaaaa

SEQ ID NO: 229390 - DNA, 793 bp, Unknown
  Bacterial polypeptide expressing nucleotide sequence isolated from the Sargasso Sea
actgatcaccatagatacgctgaataactataaagttaatggagaaaaatttgcttgtctaactgcatatgaatcaactttagcaaatgtaattagtggtgctggagttgaagttatattagttggcgacagtttaggaatggttattcaaggtcacgatagtactttaccggtaacaatgaatgatcttatctatcatctaaagaatgttagtcgcggaaatataaattctcatttgatggctgacatgccatttatgagctattcaaccaaggataaagctctatctaatgctgctttgctaatgcaaaatggtgcacattcaattaaattagagggaggtcgttggatctgtgacttaacaagcaccctagctgagcggggcataccagtgtgtgctcatatgggattaacacctcaatcaattaatcgtattggcggatattttgttcaaggtcgtgatacagataaaaaagatgaaatgatctctgaagctaaagaacttgaatctgcaggagctgccattttattgctcgaatgtgttccggataatttagcagcagaaattacacaatcactatccattccagttattggaataggtgcaggcgcatcaaccgatgcgcaggtaatggtaattcacgatttgcttggtatttcttgcctagagaagccaccaaaatttatcaaaaattttcttgctgaaaatgattctgtgcaaagtgcaatagctgcatatgttaaagaagttaaatcacaaaaatttccagcaaaagagcataccttcttttaa

SEQ ID NO: 229391 - DNA, 772 bp, Unknown
  Bacterial polypeptide expressing nucleotide sequence isolated from the Sargasso Sea
aatgagtaaaattaaaaaatttattgcaaaaaaaaataagtcaaaaatagttagtctaactgcctattcaaaaaatattgcttctatattggatagttattgtgatttaattttagtaggagactcacttggttcggttttatacaattataaatccacaagagaagtaaatttgagctctatgattgaacattctaaaagtgtgagaatgggtataaaaaaaagtttaatgattgttgatatgccgcataacacttatcgaactcctaaagaggcagtgaaaaatgcaaaacaaataatgaaaaaaacaaagtgtgacggtgtaaaattagaaggtggaaaaaaaatttatgaaataatcaaatctttagttaaaaacaaaattccagtcatgggccatctagggttgcttcctcagtcagataaaactttcaaatttaaaggaaaaaaaaagttagagagaaacaacattataagagactcacaattattagaaaaagctggagtgttttcaattgttttagaatgtgttgaaacttctttagcaaagcttgtcacgcaaaatttaaagataccaactatcggtataggagcttctaaatattgtgatggtcaaatattagtttttgatgatttaattggcttaaattcaacgaattataagtttgtaaaaaaatatgccaatataagaaataatatttctaaagctgtttcaaattattcaaaagaagtaagaaaaattaaatttcctaataaaaaaaattctttttaa

SEQ ID NO: 229392 - DNA, 686 bp, Unknown
  Bacterial polypeptide expressing nucleotide sequence isolated from the Sargasso Sea
tatgcttacaaaaataagtaggcttgctcttaaaaaaaaaaataagtcaaaaattgtttgtttaactgcttattcaaaaaatatagcagaagagattgataaccacgcagatttaatacttgtgggtgattcattgggttcagttttatataattttgaaaccacaagaaaagtaaatttatcaatgatgattgagcactccaagagtgtgagaaaaggagttaaaaaaagtttaatgattgtagacatgccttacaatacatacaaaaataaatctcaagcacttaaaaattgtaaagaagtaatgaaagaaacaaaatgtgatggaataaaattagaaggaggcagaaaaattatagaaattattaaatatttaatcaaatataaaattcctgtaatgggacacataggtatcacaccacaatccgtaagaggaaaattcagatataaaggtaaatcagaaattgaaaaaaaaaatttactaaaagactcaaaatctttagaagatgcaggtgtatttgcaattgttttagaatgtattgaaaaaaaagtttcaaaaaaaattacagattcaattaacattcctacaatagggataggttcatcaaatttttgtgatggtcagattttagttacagatgatttattgggactaacagataataaaataaaatttgtaaaaaaat

SEQ ID NO: 229393 - DNA, 778 bp, Unknown
  Bacterial polypeptide expressing nucleotide sequence isolated from the Sargasso Sea
atgatttctaaaattaaaaaaattttaaataaaaagaataagtcaaagattatatgcttaacttcatattcaaaaaatatatcagaagcgattgacccatattctgacattatattagtaggagattcattgggttctgttctttataattattctactaccagaaaagtaactttagatcagatgatagaacattctaaaagtgccagattaggcattaaaaacagtttaatggttgtagacatgccatatagaacttatagaaataaaaaaattgctcttaaaaacgctaaaagaattttaaaggaaaccaaatgtgatgcagtcaaacttgaaggtggatcattaattattagtgtaattgatcatttaattaaaaataaaattccagttatgggacatttgggaatattacctcaaagtgttaaaggaaaatttaaatttaaaggaaaaaaaaatagtgaaagaaataaaatttttaatgaggcaaaactattggaaaaaataggtgtattttcaatagtccttgaatgcgttgagtctactctcgccaagcaaatatcaaaaaaactaaaaattccaactataggaattggatcttcaaaattttgtgatggccaaatacttgttattgatgatctaattggattaaatgacacaaaagtaagatttgttaaaaaatttggtcaaataaaaaaaaatatttctaatgcagctaaaaattttagtaaagaagtaaaaaataaaaaatatccttcaaaaatatattcttattaaa

SEQ ID NO: 229394 - DNA, 865 bp, Unknown
  Bacterial polypeptide expressing nucleotide sequence isolated from the Sargasso Sea
atgaaaataacagtaccaaaaataattggattaaagaatagccgtgtcatatccatgatgactgcttatgattatccttcttcaaaagcaatatctgatgcagaaatagatattattcttgtaggagactcacttgcccaggtagttttaggctatgacgacactctctcagttaccgttgatgaaatgctccatcatgttaaagctgttaccagagcaaatccaaactcccttgttgtagcagatatgccttatatgagctatcacatttctgaagaagagactattaagaacgcagcaaggtttattcaagaaggaaaggcagatgccgtaaaaattgagggcggaaaaaaaagagaaaatatgattaaagcattaattaatgctgaaattcctgtaatgggtcatcttggattgacaccacaatctaaaaatgtaatgggtggttataaaattcaaggaaaaactttagaacttgcaaaagaattattagaagatgcaatcctcctagattctttgggatgcttttcttttgtcttagagggagttccaaagatagttgctcaaactataactgaacaagtttctattcctacaattggaattggagctggggtacatgtagacggacaagtacttgtttatcatgatcttcttggtatgaaatctaaagagtatatagatgcaaaatttgtgaaaaggtatgacaaccaatatgacagggttgttgaaacgatgaaaaatttcaaaaaagacattgaaaataaagagtttcctactgatgatcactcctatgattcgggtgattctttactagaaaaccttgaagagtggaaaaaagaagttaaaaaaattctgtcataac

SEQ ID NO: 229395 - DNA, 787 bp, Unknown
  Bacterial polypeptide expressing nucleotide sequence isolated from the Sargasso Sea
atgaagaaaataaaaattttacacaaaagtttttctaagcctataagctgcttaactgcatactctccttcaattgcaaatattttagacggaaaaattgatttaatactagttggagactctcttggttcaacgctttatgggatgaagaatactcaaggagttactatggatataatgaaacatcatggagtagctgttaataaagaaattaagagaagtttgaaggttttagatatgccttataagacatatgataataaaattgatgcatatagaaatgctaaaatacttttaaatcattgcaagcctgatttattaaagatagaaattagtgaaaaaaaattagttgttttgaaacacttagtagataaaaaagtaaacgtcatttcccatataggagtaactccacaaagttataagaattttaataaaattaaagttttaggaagaactaataaagaaaaacaaaatttattaaagttagcaaaagaatctgaagcacttggggctaaagctgtgctattagaatgtgtaacagctgatacagctaaggttattacagaaaatatttcgatacctacaataggtataggtgcttcaagatattgtgatggtcaaatactagtatttgatgatttaattaatctaaacacaaataataaaaaaccgagatttgtaaaaaattattttgattttaatgaaattgcaagcaacgtagttaagaaatacaatcaagaagttaagcttaaaaaatttcctagtcggaaatttacgtataattaat

SEQ ID NO: 229396 - DNA, 811 bp, Unknown
  Bacterial polypeptide expressing nucleotide sequence isolated from the Sargasso Sea
catgcaagaccaagataacgaatctcgttcccttacgattcgtgacttagcacgtgctaagcagagtggtcgaccaataagtatggttacggcctatgactggtggtcgggtagccttgctgattccgctggtgtcgactgtgtgctcgtcggtgatagtctcgcgatggtggtagctggtcgagagacaacactttcggccacaattgaacagatgatttatcacggagaaattgtttctcgtgcagttcaacgcgcgattgtatttgttgatctcccatttcccttacagcatttgggcgttgggaaagcaattgaatctgcagctagaattctgcaggaaacagggtgtcaagcaattaagcttgaaggaacatcaggccaacaagatgtcatcgctggaatcgttgaggccggaattccggtgatggcccatgtaggacttcgtccccaggcggtgcatcaactcggcggatatcgaattcaaagagacagagaacaacttctcgcggatgcgacagcagcagcagcagcaggcgcgtgtggcgttgtgctcgaatgcgtgccttcaaagctagcagcagagataacagctgcaatagaaataccaacgatcgggattggagcaggccttgactgtgacggtcaggttcttgtcctgcatgacttaattggtctctctattgatcgtatccctcggtttgtcaggtcttatgctgatacgaaggggacaattttggatgccgtaacttcatggcgacaagatgttgagtccaaaaaatttcccacagaatcagagaccttggcttag

SEQ ID NO: 229397 - DNA, 775 bp, Unknown
  Bacterial polypeptide expressing nucleotide sequence isolated from the Sargasso Sea
aatgaaaaagattaaaagaataattaataaaaagaataaatctaaaattgtttgtcttacagcttattcaaaaaatatagctgaagaagtggacaagtatgttgatattgttctggttggagattctttaggttctgtattatacaattattcaactactagaaaagttactctgactgaaatgataaatcattctaagagtgcaagacttggagtaaaaaaaagtttgatggttgtcgatatgccatttaatacatatgctaccaagaactctgctttaaaaaatgccaaaaagataattaaagaaactaagtgtgatgcagttaagcttgaaggtggaaaaaaaatcataaaccaaatcaaactattgatcaaaaataaaattcccgtaatgggacaccttggcttactacctcagtctgccaaaggtaaattcaaatctaagggaaatactattaaagagatcaatcaattacttgatgatgcaaaattacttcagaaaaatggagtttttgcaattgtacttgaatgtatcaaaacaccaatagctaaaaaaatcacaaggaatttaaacataccaacaattggaattggatcatctgttcattgtgacggccaggttcttgttacagatgatttaattggtttaaatcagacaaacattaaatttgttaaaaaatttttaaatgttaaaaaatatatcaatacaggattaagaaaatttgcttcagaggtaaggtctaaaaaatatccaaacaaaaaacattcttattaa

SEQ ID NO: 229398 - DNA, 814 bp, Unknown
  Bacterial polypeptide expressing nucleotide sequence isolated from the Sargasso Sea
gatgagccaatctaaacaagacaggattacaataaaagtgctagaagagatgaaaagtaacaatgaaaaaatttctatgcttacttcatatgattatagttttgcaaaaataattgatagcgcaggtattgacataatattagttggtgactctgcttcaaatgttatggctggacatgaaactaccctgccaattactttagatcaaatgatttatcatgcaagctcagttgtgagagctgtaaaaagagcattagttgttgtcgatctgccatttggaacttatcaagcagattctaaagtagcattaaaatcagcaataagaattatgaaagaatcaggagcacatgctgtaaaacttgaaggcggtaaacttgtaaaagattcaatagaaagaattctaaaagctggtattcctgtgatgggacatttaggactaactccacaatcaatctataagtttggaacatataatgttagagcaaaagaagaaaaagaggcaaaagtattaatagatgatgcattattacttgaggaaattggttgtttttctttagtccttgaaaaaatacctaacatactctctaaagaggttctaaacaaaacaaaaattccaattataggtattggtgctggatcaagtctagatggccaagttcttgtctcgcatgacatgcttggtatgaacaaagatttcagccctcgattccttagaagataccttgatctagactcgttaattagcaatgctgttaaaaaatactcaaaagacataaaaagcggtaactttcctgataagaaagaacaatattaa

SEQ ID NO: 229399 - DNA, 619 bp, Unknown
  Bacterial polypeptide expressing nucleotide sequence isolated from the Sargasso Sea
atgaagaaagtaactgtatcgggcttgcttaagaaaaagcaggccggggaaaagatcacctctttaaccgcttacgacgccagcttcgccaaaatgttcgacgaacaaggcgttgacgcccttcttattggcgactctttaggcatggtccttcaaggtgaagacgacaccctaccggtaaccatcgatgacattgcctaccacacgaaaagtgtgcgtcgcggcactgaacgcgccttcgtattagccgatatgccgtttatgtcttacgccactcctgagcaaacctacgccaatgcagcaaagcttatggctgcaggtgcaagtatggttaagatggaaggtggaagctggttgtgcgacaccatcaaaggcttaaacctgcgcggcgtccctgtgtgtggccatttaggcttaacgcctcagtcagtgcacgtattcggtggttttaaagtacaaggccgcgaagcgagccaggctgaaaaactgcttagcgaagcgaaagcgttggaagaagccggtattcagttattagtgcttgagtgcgtgccttcatcgctaggcaaagcggttagcgaagccctaaccataccggtaatcggtataggcgcaggcaaag

SEQ ID NO: 229400 - DNA, 775 bp, Unknown
  Bacterial polypeptide expressing nucleotide sequence isolated from the Sargasso Sea
ttgaagaaaacactacaagaattacatgcaatgaagcaaagaggagaaaaaatagtagcacttacctcttatgattttcaaactgcacaaattatagatgaccattgtgactttattctagttggcgactcattaggtaatgtattccaaggaaatgaaacaactcttagtgtcgaactcgaacatatgatttatcatggtcaaatagttggaaaggcactaaagaatgctcatttatgtgttgacatgccttttatgagttatcaggcatctgaagccgatgcactacttaacatgggtaatattataaaaaaaactggtgctcaatcagtaaaaattgaaatgaatttttcattacttaatcttattggactggccagccaatctggtatacctattgtggcccatgtaggtctttgcccacaatcttacaatacttatggtggttataagaaacaaggaaaaaataaagatgaaagagactttatatatgaattagcaattgaatcttataaaaatggagctgctttgatagtgattgaaggtgttcctgaagatcttgccaagaagattactgaggatgtgaatattcctacaattggaataggtgctggtatatatactgatggacaaattctagttgctgaagatatgttaggaatcactccttctcccaggccttcatttgtcaaagcatattcaaatttgagagaatcaataaaaaaagctgtggtagaattcaaaaaggatgtcaaaaaaagaaaattcccttaag

SEQ ID NO: 229401 - DNA, 571 bp, Unknown
  Bacterial polypeptide expressing nucleotide sequence isolated from the Sargasso Sea
aatgcctaacacggttaatgatattattcagatgaaatctagagaaaaaattactgtcttaacaggatatgattcaactatggcaacattatgtgataaggttgatgtaattttggtaggagacagtgctggaatggtaatgttaggttatgatgacactcgagatgtgacaatggatgatatgatacgtttcacaacagctgtaaaaaatgcaaaaactgattcattaatcgttgcggatcttccaattaattcctatgaaaacgaggattctgccattactaattcgaaaagacttgtacaagcaggtgcacatgcagtaaaacttgaaggtggaaaagagattgaaaaaattatcaaggctgtagttgattcaggaattccggttatgggacacctaggattacttccacaaactgcagaaaaatattctgttcaagcaaaaaaaagtgatgatgcagtaaatctgttagaagatgctagaattttagagaaagcaggagtgtttagtattgtttttgagatggttaccagagatgttgcaaaaattattacagaaagtgtgaaagtc

SEQ ID NO: 229402 - DNA, 781 bp, Unknown
  Bacterial polypeptide expressing nucleotide sequence isolated from the Sargasso Sea
atgccttcgaaaataagtaggcttatattaaaaaaaaaaaataagtcaaaaatagtctgcttaacagcctactcgaaaaatattgctgaagaagttgataaatacacagaccttgtactcgttggagattccttgggttctgttttatataattttgatacaacaagaaaagtaaatctatctatgatgattgaacattctaaaagtgtaagaaaaggagtaaaaaaaagtttaatgattgtagatatgccatttaatacttataaaaataaattgcaggcgctaaaaaattgtaaaaaaataattaaagaaacaaaatgtgatggtatcaaattagaaggaggtagtaagatcaaagatataattaaacatttagtaaataataaaattccagtaatgggccacataggtataactccacaatctcaaagaggtagatttagatataaaggtaagactgaaaaagaaaaaaaaaatttattaaaagattcaaaaatcttagaagaggcaggtgtttttgctattgtactagaatgtattgagaaaaaactttcaaaaaaaattactgagacgattgaaattccaacaataggaattggatcatcaaagttttgtgatggtcagattttagttttagacgatttattaggtttgactaatagtaaaataaaatttgttaagaaatatgctaattttaaaattaatattagaaatgcagttaaaaaatttgggtcagacgtgaaaagaggttcatatccatcattaaagcattcttactaaa

SEQ ID NO: 229403 - DNA, 630 bp, Unknown
  Bacterial polypeptide expressing nucleotide sequence isolated from the Sargasso Sea
aatggctaaaacagtttcggatatcgttcaaatgaaatcaaaagagaagattactgttctaacaggatatgattctacaatggctacactgtgtgatagtgtagatgtaattctagttggggatagtgcaggaatggtcatgcttgggtatgatgatactcgacatgtgacaatggatgatatgatacgctttacaactgctgtaaaaaatgcaaaatcaaattcactaattgttactgatttaccaataaattcttatgaaaatgaagactctgctgttacaaattcaaaaagacttgtacaagcaggagctaatgcagtcaaattagaaggaggaaaagaagtttctaaaattattagagcagtagtagactcgggtattccagtaatgggacatttgggattactgccacaaactgcagagaaatattctgttcaagcaaagaaaagtgaagatgcagtaaatttgatacaagatgctaaaatcttagaagaatctggagcatttagtatagtgttagaaatggtaactagtgatgtaacagaaattatcacaaaaaatgtgaaagttccaacaataggcataggttcaggcatagattgtgatggtcaagtattagtggttcatga

SEQ ID NO: 229404 - DNA, 531 bp, Unknown
  Bacterial polypeptide expressing nucleotide sequence isolated from the Sargasso Sea
tatgggttacaagagagttactacaagaacattattggaaatgaaaagcaataatgagaaaatatctatgttgacagcatatgactatacttttgcaaaaattattgatcaatcaaatgttgacgttatacttgtaggcgattctgcatcaaatgttattgcgggtaatgaaacaacagttccaattacgctagatgaaatgatttatcatgcaaagtcagttgtaaaggctgcccaaagagctttagttgttgttgatttgccttttggtacatatcaatctgattcaaaattagcactgaggtcagccataaggattatgaaagaatcaggagctcatgcggtcaaattggaaggtggcagtgaaattaaagactctgtctcaaaaataattaaagctggcatacctgtcatgggtcatttagggctaactcctcaatcaatatataagtttggaagttacacagtcagagctaaagaaaagcatgaggcagaacaattaattacggatgcactccttctggaaaaaat

SEQ ID NO: 229405 - DNA, 858 bp, Unknown
  Bacterial polypeptide expressing nucleotide sequence isolated from the Sargasso Sea
tatgaaaataacagtacctaaaatattagatttaaaatctgaacgtcagataacaatgatgacagcttatgactttcctacatcaaaggctgtttcagaagcacagatagacataatactcgtgggtgattcattagcccaagttgtattaggccacgatgatactttgtctgtaactatggacgaaatgctgcaccatgttcaagctgttactcgtgcaaaaccaaactgtctagtcgtagcagacatgccttacatgagctatcacaacacaaaagaagaagcagtcaaaaatgcagcaaggtttattcaagaaggcaaagccgacgcagtcaagcttgaaggaggctttaaaagaaaagatattatagaggcaataattagtgcagaaataccagtaatgggacatttaggcttaactccccaatcaaaaaacatgatgggtggatataaagttcaaggtaaaacattagagttggcaacagaactgttagaggaggctgtactactagaaacactggggtgtttttcaatggttcttgaaggagttccctcagttgttgcagaagtactcacagaaaaagtatctataccaataataggcataggtgctggcgccaatgttgatgggcaggttttagtattccatgatcttataggaatgaagtccaaagaatatattgacgctaagtttgtaaaaagatatgcaaatcaacacgaagaagttgtaaaagctctagaaaattttaaaaaagaggtagaaaataaagtatttccaaccgaacaccattcatatgaagctggcaaaattactgaaaatgatgttaaagagtggaaaaaagaaattaaaaaaattct

SEQ ID NO: 229406 - DNA, 781 bp, Unknown
  Bacterial polypeptide expressing nucleotide sequence isolated from the Sargasso Sea
atgcttgcaaaaacaagtaggctcattcttaaaaaaaaacataaatcaaaaattgtttgtttaactgcttattcaaaaaatattgcagaggaaattgatagctatacagatttaatacttgttggcgactctttaggttcagttttatacaattttgatactacaagaaaagtaaatttaacaatgatgattgaacactcaaagagtgtaagaaagggagtaaaaaaaagtttaatgattgtagatatgcctttcaacacatacaaaaataaatctcaagcgcttaaaaattgtaaaaaagtgatgaaagagacaaaatgcgatggaataaaattagagggaggaaaaaaaattttagatattgttaaacacttagtcaaattcaaaattccagtgatgggccatataggtataatgccacaatctgtgagaggtaaatttaaatacaaaggtaaaacaaacacagagaaaaataaattattaaaagactctaaattgttagaagaagcaggtgtatttgcaattgttctagaatgtattgaaagaaaactttcaaaagaaatcacagattcaattaatattcctacaataggaattggttcatctaatttttgtgatggtcagattatggtcacagatgatttattgggcttaacagatactaaaataaaatttgttaaaaaatatgctgatttgaaaggcagtgtaaagaatgcagttaaaaagtttaaattagaagttaaaaaaggctcttacccttcaattaaatattcttattaaa

SEQ ID NO: 229407 - DNA, 775 bp, Unknown
  Bacterial polypeptide expressing nucleotide sequence isolated from the Sargasso Sea
aatgaataaaaaaatattatctataataaaaaaaaaaaataaaaccaaaatcgtaagcttatctgcttactctaaaaatttaggagaaattttagataattattgcgatatagttcttgtgggtgattcacttggatctgttttatataattataaatctacaaaagaagtttcattaaatacgatgattgaacattctaaaagtgtgagattgggtattaaaaaaagtttaatggttgttgatatgccttataacacttatcgaaattccaaagaggcgcttaagaatgcaaaaaaaataaaattaaaaaccaaatgtgatgcagtaaaattggaaggtggaaaaaaaatttctgcaattattaaaacattagtaaaaaataatattcccgttatgggtcatttgggacttcttcctcagtcagctaagaattttaagtttaaaggtaaaaaaaattacgaaagagaaaaaattttaaaagaagcaaaattacttgaaaccgcaggggttttttcaatagtactagaatgtatagaaagctcactagcaaaaaccatcacaaaaaatataaaaatcccaacaattggtataggagcatcaaataattgtgatgggcaaattttagttttggatgaccttattgggttaaatcctattaatgtaagatttgtaaaaaaatacacaaacattagaaaagaaatttccaaagctgttttaaattatgctagagaagtgaaaagtaagaaatttccactaaaaaagcactcttattaa

SEQ ID NO: 229408 - DNA, 617 bp, Unknown
  Bacterial polypeptide expressing nucleotide sequence isolated from the Sargasso Sea
aacattgccaataactttagaaaatataatttatcatactaatgctgtttcaagaggatttaagaaaaaaattgaggaacaacctctagtcgttgcagatatgccttttatgacttaccaatgtggcgaggataaggctgttgagtatgcagggaaaatcattcagagcacttatgcaaaagctgtaaaagtggaaggagctgaaccagaaatacaaaaagttatttctagattaataagaatgggaatccctgttatgggtcatataggtcttacaccacaaagctatctaaatattggattaagaaaacaaggagaaagcttggcaagccaagaaaaaattaagaaagaggcttcaattcttgaagaattaggatgtttttcaatagttcttgaacatattcctgatttgcttgctaaggaaatacaaaattcattaacaattcccacaataggtatcggcgcaggtaattattgcgatgggcaagtaagagttacagcagatttgctaggcctcaatgatgatcaacccccattttgccaaccaattatccaaggaaagaaattatttaaggataaattaaaagaatgggtagactctgaaaggcttagttaat

SEQ ID NO: 229409 - DNA, 817 bp, Unknown
  Bacterial polypeptide expressing nucleotide sequence isolated from the Sargasso Sea
aatgtcaataaaatcagataaagatcttataacaatttcgaccttaaaacacctaaaagaagaaggtaaaaaatttgcttgtctaactgcttatgaagcgactatagcagaaaaaataagtaaatccggaatagaggtaatacttgtaggtgatagcctaggtatggttgttcaaggccatgacagtacacttccagtaactatggaacacttaatctatcatttaaaatgtgtggttagaggtaatattaattctcatattatggcagatatgccttttatgagttattcaactgatcatttagccttggaaaatgctactaaacttatgcaaaatggagcacattcgataaaaattgaaggaggaaactggatttgtaaattaacttcaattcttgcagagagaggtatccctgtttgtgctcatatgggtttgacacctcaatcaatcaatagaattggtggatattttgttcaaggaagagatgtaaataaaaaaaaaaatatgattgaagaagctaaagcattggaatctgctggtgcagcaatgatattattagaatgtgttccggatgatctgacagccgatatactagaatcgattagtatacctgtaattggtataggtgcaggtcaaagaacagatggtcagattatggtcatacacgatttattaggcatatcatgtttagagaaaacccctaaatttgttaaggactttttaaaggactcatcaagtattgaggaagctatatccaattattcaaaaagtgttaaaagtaagtcatttccctctgatgatcatacctttttttaa

SEQ ID NO: 229410 - DNA, 781 bp, Unknown
  Bacterial polypeptide expressing nucleotide sequence isolated from the Sargasso Sea
atgaataaaaagataaaaaaaattcttaataaaaagaataaatcaaaaattatttgtctaacagcatactcaaaaaatgttgcctccattttggataaacattgtgatttagtattagttggagattcattgggatcagttttgtataactttaactccactaagcaagtaactttggaaactatgattaatcactctaaaagtgtcagacttggtatcaagaaatcattaatggtcgttgatatgccatataatacatatcgaaatccaagtgaggccttgaagaattcaaagttagttatgaaagaaacgaaatgtgatgctgtcaaattagagggaggaaaaaagataattcccatggttaaaagattggtaaaaaataaaataccagtgatggggcatgttggaatattacctcagacagataaaaaatttacctttaaaggaaagaaacttagagaaagtaagaggttgttaaatgatactaaacttttagaaaatgctggagttttttcaattgtgttagagtgtgtagaaacaaagttatcaaagaaaatttccaatcatattaatattccaacaatagggattggttcctcagtcaattgcgatggtcaagttttagtaatagatgatttaattggtttaagtcaaagcaaattaaaatttgtaaaaaaatttgttgatattactaagttgattgaaattggagtaaaaaaatataaatcagaagtattaaataaacagtttccaaaggctaagcattctttttcaaaatgaa

SEQ ID NO: 229411 - DNA, 775 bp, Unknown
  Bacterial polypeptide expressing nucleotide sequence isolated from the Sargasso Sea
tatgcttaaaaaaattttaaaaattaaaaaaagtaaatcaaaaagaaaacttgtctgtttaactgcatattcaaagccaatatcaaaaatacttgataaatattgcgacataattctagtaggagattcagttgcaacagcaatgtatggaatgaaaaataccaaggaaataaatttagaaactatgttaaaccacgcacaaagtgtaaaaaaatctgtaaaaaaaagcttacttgtatttgatatgcccaatggtacgtacagaaatgcaaaagaagctaaacaaaatgtaaaaaaagttttaaagaatgttagattcgacgcagtaaaaattgaaagtaatggaaaaaattataaaattgtagaaactttagtaaagtcaggtattcctgttatgggtcacataggatatacaccacaatttaaaaaaaactttaaagtacacggtctcaacagcaaagaagacaagagattaattttggagtcaaaaaagatagagagtgcaggcgcattttcaatcgttcttgaatgtatcgcaaaaaaaacatccaaaaaaataactaattcaattaaaattccaacaattggaattggatcttcaagcttctgtgatggacagattcttgtaacagacgacctcttgggcttaagtggtttttatccaagatttgttaaaaagtacgcaaacttacaaaaaattataaaaactgctattaaaaaatttaaaaaagatgtaagaaatgaaaaatttccgtccaattcaaatactttttaa

SEQ ID NO: 229412 - DNA, 319 bp, Unknown
  Bacterial polypeptide expressing nucleotide sequence isolated from the Sargasso Sea
atgtcggtaaaatcagataaaaaccttgtgacaatagcaacattaaaagctttgaaagaaaaaggtgataaattttcatgtttaactgcttatgaagcaactttagcagaaaagataagtcaatctggggttgaagtgatactagttggtgacagcttaggaatggttatacaaggcaatgatagtactcttccagtaactatggatcatttagtttaccatttgcaatgtgtggtaaaaggtaatgttaattcccacatcatggctgatatgccctttatgagctattctactgatcatttggctttagagaatgcta

SEQ ID NO: 229413 - DNA, 775 bp, Unknown
  Bacterial polypeptide expressing nucleotide sequence isolated from the Sargasso Sea
atgaataaaaaaatattatctataataaaaaaaaaaaataaaacaaaaattgtaagcttgtctgcttactctaaaaatgtagcagaaattctagataattactgcgatatagttcttgtaggcgactcactcggatctgttttatataattataaatctacaagagaagttttattaaatacaatgattgaacattctaaaagtgtgagattgggtattaaaaaaagtttaatggttgttgatatgccttacaacacttatcgaaattccaaagaggcgcttaagaatgcaaaacaaataatattaaaaactaaatgtgatgcagtaaaactggaaggtggaaaaaaactttgtgaaattattaaaacattagtaaaaaataatattcctgttatgggtcatttgggacttcttcctcagtcagcaaaaaattttaagtttaaaggtaaaaaaaattatgaaagagaaaaaattttaaaagaagcaaagttacttgaaacagctggtgttttttcaatggtattagaatgcatagaaagttcactggcaagggccattacaaaacaaatcaaaatcccaaccattggtataggagcctcaaataattgtgatgggcaaattttggtttttgatgatttaatcggtttaaatcaaattaatgttagatttataaagaaatacacgaacattagaaaagagattgccaaagctgtatcaacttatgcgagagaagtgagaagtaagaaatttcctttaaaaaaacactcttattaat

SEQ ID NO: 229414 - DNA, 724 bp, Unknown
  Bacterial polypeptide expressing nucleotide sequence isolated from the Sargasso Sea
gtagttttaggctatgacgacactctctcagttaccgttgacgaaatgcttcatcatgttaaagcagttacaagagcaaatccaaattcccttgttgtagcagatatgccatacatgagctatcacatttctgaggaagagactattaagaacgcagcaaggtttattcaagaaggaaaagcagatgctgtaaaaatagagggtggaaaaaaaagagaaaatatgattaaagcattaatcaatgctgaaattcctgtaatgggtcaccttggattgactccacaatctaaaaatgtaatgggtggatacaaaattcaaggaaaaaccttagaactcgcaaaagaattattggaagacgcaatcctcttagattcattaggatgcttttcttttgtcctagaaggagtgccaaaggtagttgctcaaactataactgaacaagtttctattcctacaattggaattggagccggggtacatgtcgatggacaagtacttgtttaccatgatcttcttggtatgaaatctaaagagtatatagatgcaaaatttgtgaaaaggtatgacaaccaatatgacaaagttgttgaaacgatgaaaaatttcaaaaaagacatcgaaaacaaagagtttcctactgatgatcactcctatgattcgggtgattctttatcagaaaaccttgaagagtggaaaaaagaagttaaaaaaattctgtcataac

SEQ ID NO: 229415 - DNA, 829 bp, Unknown
  Bacterial polypeptide expressing nucleotide sequence isolated from the Sargasso Sea
actgcagggtgagcaagtggtttccagcagagcgaagaaggtgactacgcacatattgcaagaaatgaagcgctcgaatgagaaaatagcaatgctcaccgcctacgactattccctagcaaggcttgttgacggagccggagtggacgtgatactcgtaggcgactctgcttcaaacgtgatggcggggaatgatactacggtccccataacactggaacacatgatctaccacgcacagtgtgtcgtgaatgctgtggacagggccttggtagttgtggacatgccattcggcagctatcaaggcgattcgaagcttgcactgaagagcgctatcagaataatgaaggagtccggcggtcacgcagtaaaaatcgagggcggcaaggaaatagtagactccgtgaaaaggatcctaactgcagggatcccggtaatggggcatctcggcctgactccccagtcgatttacaagttcggaacttactcagtcagagcgaaggaggagtccgaggcgaacaagttgatggaagacgcgatggccctccaggaggcaggttgcttctcggtagtcttcgagaagattcctgcggacctagcaaagaaggtcagtgaatccctcgatatccccaccatcgggattggtgccggaccccactgcgacggacaggtcctagtccttcacgacatgcttgggattaccaaggatttctcacctagattcctaagacgctactctgacgtgggcggcgcagttgacaaggcagttagggattacatcgatgatgtcaggggaggttccttccccgcacaagaagagagttactga

SEQ ID NO: 229416 - DNA, 865 bp, Unknown
  Bacterial polypeptide expressing nucleotide sequence isolated from the Sargasso Sea
atgaaaaatacagtacctaagatagttaatttaaagaatgaaagagtcatttctatgatgacagcatatgactatccttcggcaaaagcagtgtcagaagcagagattgatattatcttagttggagactcactagcacaagttgttcttggtcatgacgacactttatcagtaactattgatgaaatgttacaccatgttaaagcagttactaatgctaaaccaacatcacttgtagttgcagatatgccttacatgagttttcatagcacccctaaagaaacactttacaatgcatcaagattcatacaagagggaaaagcagatgcagttaaattagaaggtggttctaaaagaaaaaatatgatagaagcattaattgatgcagaaataccagttatgggtcatttaggtttaacacctcaatcaaaaaatgttatgggtggttataaaatacaaggaaaaactttagagctagcaacaaaactattagaagatgctgtcttattagatgagcttggttgttttgctattgttctagagggagttccctctgttctcgctgaaactatctcagaaaatatatctatcccaacaattggtataggagctggagtaaatgttgacggacaagttcttgtatatcatgatttgattggcatgaaatcaaaagaatatatagatgcaaaatttgttaaaagatattcaaaccaatatgaagatgtattagaaagcatgaaaagttttaaaaaagatatagaaaatagggattttcctactgaaaaccattcttatgaggccggagagctcacagaagagaatattaaagagtggaaaaaagaagttaagaaaattctgtcataag

SEQ ID NO: 229417 - DNA, 817 bp, Unknown
  Bacterial polypeptide expressing nucleotide sequence isolated from the Sargasso Sea
atgtcgactaaatcaaataaaaaaatagttacattaagtactttaaataagtttaaaaagaattctgaaaagtttacttgtttaactgcatatgagtccactatggcatcagtgataagctctgctggtgtagatgttatcttggttggtgatagtttaggcatggtcatacagggtcatgacagtactcttccggtaacaatggatcaattaatttatcacttagaatgtgtggttaaaggaaataatggttcacacataatggctgatatgccatttatgagctactctacagatgatttggggcttgaaaatgccaaaagattaatgcaagcaggggcaaattctgtaaaaattgaaggcggacaatggatctctaaaatggcacaagttttatctgatagaggtattcctgtttgtgctcatatgggactcactcctcaaacaattaatagaattggtgggcaccgtgttcagggaagagatccatcccaaaaagaaaaaataattaatgaagctatagcgcttgagaaagctggtgcctcaatgttgttattagaatgtgttccgggtgagcttgcaaaaactattacaaaagaacttaaaatacctgttattggaattggcgcaggtgttcatacagatggtcaaataatggttgtgcatgatttattaggaatatcatgtctcgataagcctcctaaatttgttaaaaactttatgaaaacatcaacatcaatttcaggtgctataaaaaggtatgtcaaagacgtaaaaaataataaatttccttcaaaagtacatacatttgattaag

SEQ ID NO: 229418 - DNA, 796 bp, Unknown
  Bacterial polypeptide expressing nucleotide sequence isolated from the Sargasso Sea
tatgtctaaagttactagctcaaccctgttgaaatacaaacaggaaggtagaaaattcaccgctctgacagcctatgatgccagctttgccagcgcgttcgacggcgaaggcatcgatgtgctactggtcggcgattctttgggaatggttctgcaaggccacgatgatacgctgcccgtcacgacagccgaaatcgcctatcacactcgttgtgtgcgtcgcggtatcgagcgatcactgctgatcgcagacatgccgtttatgagttacgccacgccagaacaagccatggaaaacgccaccgcactcatgcaggcgggtgccaatatggtcaagctggaaggcggtcactggttactcgaaacggttactaaactgaccgagcgcggtattcctgtctgcgcccacttgggcctcaccccgcaatcggtacacgtttttggcggttttaaagtgcagggccgtgatgctgaaaatgcccagcgcattctcgatgaagccaaagccttagaggcggcaggcgcgcagctgttagtggttgaatgtattccagcatcgcttgctaccgccattactcaagcattaactatccctgtaattggcattggcgcgggcgccagcaccgatggtcagattctggtgatgcacgacgtgctcggtatttcgagtggttatattccacgtttttcaaagaactacctcaagcaaacgggcgaaatccgctcggcggttcgcgcttatattgaagaagtggccaatggcaccttcccgagtgcagatcacacgttcaactaa

SEQ ID NO: 229419 - DNA, 645 bp, Unknown
  Bacterial polypeptide expressing nucleotide sequence isolated from the Sargasso Sea
ttgggtctgttttatataattataaatctacaagagaagtttcattaaatacgatgatcgaacattctaaaagtgtgagattgggtgttaaaaaaagtttgatggtcgttgatatgcctcataatacttatcgaaattccaaagaagcacttaagaatgcaaaacaaataatatcaaaaacaaaatgtgatgcagtaaaattagaaggtggaaaaaaaatttatgaaattattaaaatattagtaaaaaacaatatccctgttatgggtcatttgggactacttcctcagtcagctaagaattttaaatttaaaggcaaacaaaattacgaaagagaaaaaattttaaaagaagcaaaattacttgaaactgcaggtgttttttcaatggtactagaatgcatagaaagctcactagcaaaaaatatcacaaaaacaatcaaaatcccaacaattggcataggtgcttcaaataattgtgatgggcaaattttggtttttgatgatttaatcggtttaaatccaattaatgttaggtttgtcaaaaaatatacaaacattagaaaagatatttccaaagctgttttaaattatgcgagagaagtgagaaatatgaaatttcctttaaaaaaacactcttactaac

SEQ ID NO: 229420 - DNA, 721 bp, Unknown
  Bacterial polypeptide expressing nucleotide sequence isolated from the Sargasso Sea
tgttcttggtcatgacgacactttatcagtaactattgatgaaatgttacaccatgttaaagcagttactaatgctaaaccaacatcacttgtagttgcagatatgccttacatgagttttcatagcacccctaaagaaacactttacaatgcatcaagattcatacaagagggaaaagcagatgcagttaaattagaaggtggttctaaaagaaaaaatatgatagaagcattaattgatgcagaaataccagttatgggtcatttaggtttaacacctcaatcaaaaaatgttatgggtggttataaaatacaaggaaaaactttagagctagcaacaaaactattagaagatgctgtcttattagatgagcttggttgttttgctattgttctagagggggttccatctgttctcgctgaaactatctcagaaaatatatctatcccaacaattggtataggagctggagtaaatgttgatggacaagttcttgtatatcacgatttgattggcatgaaatcaaaagaatatatagatgcaaaatttgttaaaagatattcaaatcaatatgaagatgtattagaaagtatgaaaagttttaaaaaagatatagaaaatagggattttcctactgaaaaccattcttatgaggctggagaactcacagaagagaatattaaagagtggaaaaaagaagttaagaaaattctgtcataa

SEQ ID NO: 229421 - DNA, 865 bp, Unknown
  Bacterial polypeptide expressing nucleotide sequence isolated from the Sargasso Sea
aatgaaaaaaacagtaccttatataactaatttaaaaaatagccgtgttgtttctatgatgacggcgtatgattatccatcagcaaaggcagtttcggaagcagaaatagatataatcttggttggcgattccctagcacaagttgttcttggccatgatgacacactttccgttactgtagatgaaatgttacatcatgttaaagctgtaactaatgcaaaaccttcaagccttgttgttgctgatatgccttatatgtcttatcacgtcagtaaagaagatacgataaaaaatgctggaagatttattcaagaaggtaaagctgatgctgtaaaaattgaaggtggaaaaaaaagagaagaaaccattcaagctctattagaggcagaaatacccgtaatgggccatcttggtctaactcctcaatcaaagaatcttatgggtgggtataaagttcagggcaaaaccttagatttggctagacaattatttgaagatgctttacttcttcaagagcttggttgtttttcaatggtcttagaaggtgttccaacagttgttgcacagtcaatttctgagaatatcaatattcctactattggcataggtgctgggaatttaacagatggtcaagtccttgttttacatgatttactaggaatgaagtcaaaagaatatatcgatgcaaaatttgttaaaagatacgatcagcagtacgaagctaccttaaaagcattaaaaacatacaaagatgaaatagaaaaaagagattttccaactgatgattactcatatgatatgggtaacgacattaatgactcgcttaaagagtggaaaaaagaaattaaaaaaattctgtcatag

SEQ ID NO: 229422 - DNA, 832 bp, Unknown
  Bacterial polypeptide expressing nucleotide sequence isolated from the Sargasso Sea
gatgtcgttcaatgaaaacctgaataaatcgattttttatgcaggctccgatactttttctattcgaccactcgagaggctgctaaacctaaaatataaaaggataactgtgcttacaggtcctccaaagaggcaagggcgaggaatgaaaataaaaaacaaccctctagctgagtatgcagctcaacacaatttagagacccttacgcctataagcccaaacgataatagcttcttagaaaaactggctcaaagaaaaccggatgcacttattacatcagcatatggcaagatattgtcagaagcattcttagatagtttttgtttgggtaatatcaatattcatccatcacttcttccaagatggaggggcccttccccgatagagtctgctctacttgagggcgataaagcaacaggcgttaccctaatgcaaatgacagacgaacttgatgctgggccaatataccaacaagagtcaattcaattgttaggggaaaattcaaagaccttatctaaaaaactctccctgcttgcagcagatatggttcagaagtttctccccgtttttcttgatggcaactctgacgctaagcatcaggatgaaaaccttgttacctatagtaaaattataaaaaaagagcatgctcgcatagactggaatgagacctcacaaaccatagacaaaaaaataaaggcttactatccatggcctgtagcacacacttatcttgataataagtaccttagaatatgggactcagaagccttggttggtgatgaagagaaatgcaaaccaggcgagataatgacaccaacaaggaaggggtta

SEQ ID NO: 229423 - DNA, 848 bp, Unknown
  Bacterial polypeptide expressing nucleotide sequence isolated from the Sargasso Sea
gatgagggcgcgacgagcgagcgcggtgcgaagcgcggggacggaggagggggcgagaggggtcgagaagtcgcggttggtgtttttggggacgccggagtgcgcggcggacgtcttgggacgggtgctggacgcggcggagagggcggacgcgcggttcgaggtggcggcggtggtgtcgcaaccgggacggccgcgagggcgagggcggaagagcgctgaatccgcgccgtcgccggtggcggaactggcgatgaagcgagggatcgcggaggataggatactgtgtccggtgaaggcgaacgaggagtggtttctggacgcgttgcgggcgctcgacgtcgacttgatggtgacggcggcgtacggaaactttttaccgcaaaaatttctcgacattccgaggtatggaacgctgaacattcacccgagcctcttgccgcagtggcgcggggcggcgccggtgcaacgggcgttggagagtggacaagccgagactggcgtgtctgtggcgtacactattctcaaaatggatgcgggtcccgtgcttagacaaatcaagaaaccgctgaacggagacgaaaaggcaccagaaatgttgactgaactcttcgagaagggcgtggaggctttgctggaggagttgccatccgtgtttgccggcgaagcggcggcgcgcgccgtgccgcaagatgagaaaacgctcagtcacgcggcaaaggtgagcccagacgagggagaattagattttaagaaacaatccgcacttgagtgtcacaacaaagtgcgtggcttcgcgggttggccgggtacgaaggcggtgctcaagatcgcgcaaacgggaagag

SEQ ID NO: 229424 - DNA, 855 bp, Unknown
  Bacterial polypeptide expressing nucleotide sequence isolated from the Sargasso Sea
aatgattttaaaaaatagaataattttttttggtactccatcttttgctgttgtttgtttaaaagagcttcttgagcaaaattttaatattctagctgttgttactacagcagataagaaagctggcagaggtaaaaaattaagatcatctgaagttaaaaattttgcacttcaaaatggattgaatttgtttcaacccaaaaatatgaaagacgatttgtttattgaaaaaataaaatcattaaaaccagattttataattgttgtagcgtttagaatgataccaaaaataatttgggaaataccagatattggaactataaatcttcatgcttctttattgcctaattatagaggagcagcaccaataaattggaccataataaataatgaaaagtttactggagtttcaactttttttataaatgaaaaaattgattcaggggatattcttcttcaaaagagaatagaaatcagcgaaaaggaaactgcaggtagtcttcatgataaactttcacttcaaggaagtaaattactctgtgaaacaattaataagctctcaaaaaataaaatagaggcaaaaccccaaaatttctcccatggggttaaactagcaccaaaaattaactctgataattctcatataaatcttaaaaaaagattagatgaaatcaactcaatgattagaggtttatccccatcaccaggtgcctgggtagaattatataataaaaaaacatctattatcatgaaaatttttgattcagatacagtaatatttgacaatgaacataagcattcaaaattaatcatcaaagacaaaaaaatattgatttctcacaaggaggggatatc

SEQ ID NO: 229425 - DNA, 922 bp, Unknown
  Bacterial polypeptide expressing nucleotide sequence isolated from the Sargasso Sea
atgaaagttttatttgctggctcccccgaatcatctgcgcgtatactaaactctcttgttaaagaagggttcaaggttgttggggcaataagtcagcctgataaaagatcaaaaagaggtaaaatcaaagaagcatctcctgtttctagagaggctttcaaacttggaataccaacttttaaacctatttctcttgatagatactttaaaaatgaaattgatgttttagattttgattttttattagtttcagcctatggaaaaatattgccagattggttgcttgaaagtccaaatatttctccggtaaatattcatttttctcttttgcctaaatatagaggagcttctcctatacaaacggcaatattaaatggtgataacaaaacaggcatctcaatcatgaagatgattcaaagcatggataaagggccggtttattgtattcatgaaacagagattttgagagatgaaaacaaaagagagcttgaggataaactaacctctttatgtattaaaaacattgctacagaccttaataatatttttcataaaaggctttcgcctgctgaacaaaatgatgctgaagcaagctattgtaaaaagataaataaattgtcaggcagggttgaatttagcaaagaaaataccgccaacataattcaaaagcataaggcctatattggctggccaggtctgtattttgaaaaaaataatacggtgattaagatccatggattagaagaatataaaggtaacaaaggaagccataaagtcaatgaatttagatttttatctagtggtttagttgtaaaaacaatagattctcatatagtaatcactcacttacaatttccaggaaagcgtattatccccgctatagatgctgcaaattcatatgcaaagttttttgaaggttaat

SEQ ID NO: 229426 - DNA, 677 bp, Unknown
  Bacterial polypeptide expressing nucleotide sequence isolated from the Sargasso Sea
caatagtagtagcatatggacaatattgccaaaaggtattttacatgtttgcaagaagggatttataaatattcatgcatccttactacctaaattaagaggtgctgcaccaattcaacgttcaattatgaatctagataatgaaactggcataagtatcatgcaaattaacgagaaattggatcaaggaaaagtttacagtcagtataaaatcaacataaatagagatgataatgctgaggatttatcatttaggctatctaaccttgctgctgaaaaaattgttgatgatattgagagtatttttgcgaacaaaaaaaatttttttgaacaagatcattctaaagcaacatacgcaaataaaattaacaaagaggaaggaagaatagattggaatgataaagctgaaaatatcattggtaaaattaatggtttatatcctgtcccaggagcatggttttactttgatggtgctagatacaaaatattaaaagcaagcgtttcaaaaaatagtgctactcctggcaaagtaataaatgataatattgaagtatcttgtgggacaaattctatcaaaattttagaaattcaaagagagggtaaaaaaattcaaaatatcaaagatttcatcttaggcacaaaaataaaaaaaggtgttaatttaatcaatgcataga

SEQ ID NO: 229427 - DNA, 981 bp, Unknown
  Bacterial polypeptide expressing nucleotide sequence isolated from the Sargasso Sea
gatgccatccaacgaaaatctgaataaatcaattttttatgcaggctctgatactttttctgttcagacacttcagcggttacaaagtttaaaatataaaagaataaccgtgcttacaagtcctccaaagaggcaagggcgaggaatgaaaataaaaaataatcctcttgctgagtatgcaacccaacacgatttagagacccttatgcccataaatccaaacaataataatttcttggtaaagctggctgaaaaaaaacctgacgcactcatcacatcagcatatggcaagatattatcagaagcgttcttggatagtttttgtttaggcaatatcaatattcacccgtcactccttccaagatggagggggccttccccaatagagtctgctctacttgagggcgataaaacaacgggcgttactctaattcaaatgacagacaaacttgatgctggaccaatatatcaacaagaatcaattcaattatcaggagaaaactcaagggccttatctaaaaagctctccatgcttgcggcagatatgatcgaagagtttctacctgtttttcttgacgggaactctactgctaaggatcaggatgaaagccttgtcacctatagtaaaattataaaaaaagagcatgctcgcatagactggaatgaaacctcacaagtcatagacaaaaaaataaaggcatactatccatggcctgtcgcacacacttatcttgatgataaatatcttagaatatgggattcagaggctttggttggtgatgaagacaaaagcagcccaggcgagataatggacatcaataaggaaggagttattgtgaaatgcaatgacagcaaaattatactcaagggggttcagcctgagggtaaaaaagagatgcttgcagcagactttgctagggggaacaaatttaaacggcagacgattttcatgattagaagactacaaaacgccacccccat

SEQ ID NO: 229428 - DNA, 784 bp, Unknown
  Bacterial polypeptide expressing nucleotide sequence isolated from the Sargasso Sea
gttggatgcaggttatgaaatcgctgccatttttacgcataccgacaatccgggtgaaaaagcgttttttggatctgtttcccgcctcgcggccagcgccggtattccggtttacgccccggacgaggttaatcatcccctgtggattgagcgcattagccaactggcacctgatgttatcttctcgttctactatcgccatttactgagtgatgagatcctcagccttgcccctaagggtgcatttaatctgcacggctcgctactgcccaaataccgtggccgcgcaccgctgaactgggtactggtcaatggtgaaaccgaaaccggcgtcacgcttcaccggatggtcaaacgcgcggatgccggtgccattgttgcccagcagcgggttgctatttcgcccgatgatgtggcgttaacgctgcaccataagttgtgccaggctgcgcgtcagttactggaagaggcgctgcccgcgattaaaacgggagattatgcagaacaccctcaacaggaagcagaagcgacctgttttggtcgccgtacgccggaagatagcttcctcgactggaacaaaccagccgcagagttgcataaccaggtacgcgccgtcagcgatccatggccgggcgcatttagctatgttggtacgcaaaaattcaccgtctggtcgtcacgtgtttgcaaaaatgaccgcgcagcccagccaggaaccgtcatctccgtttctcctttgctgatcgcctgcgctgatggcgcactggagattattaccgggcaa

SEQ ID NO: 229429 - DNA, 930 bp, Unknown
  Bacterial polypeptide expressing nucleotide sequence isolated from the Sargasso Sea
ccgctgtggatcgaacgctcgccagctgaacccggagtacatcttctcgttctactaccgcaacctgctgagcgagccgctgttggccaccgcccgcaaaggcgcgttcaacctgcacggctccttgctgcctaaataccgtggccgcgccccggccaactgggtgctggtcaacggagaaaccgaaaccggcgtgaccctgcatcgcatggtcaagcgtgccgatgccggcgcgatcctggcccagcagaaagtcaccatcgagcgcagcgataccggcctgagcctgcacgccaagctgcgcgatgcggcgactgccctgctgcgtgatgccctgccacagctggcccagggcaagctgagcgaaaccgcccaggacgagagcaaagccacctacttcggtcgtcgcaccgccgccgatggcaagctggactggaaaaagcccgccgagcaactgttcaacctggtacgtgcagtgacccagccgtacccgggcgccttctgcgccgtgggcgagcacaagttgatcgtgtggcaagccgacgtggtcaagggcaacgaaggtctggcgcctggccgtgtaatcagcgtcaacccgctgcgcattgcctgcggtgaagattccctggtggtcaagttcggccagcgcaacgaaaacggcctgtacctggccggcccgtccctggccgatgaactgggcctggtggatggctccgtgctacgcggcgccgagtcgggtcgcaagccgcgccgtacccgtgtgctgatcctgggcgtgaacggttttatcggtaaccacttgtccgagcgcctgctgcgtgacgaccgctacgaagtctatggcctggacatcggctccgacgccatcgagcgcctgcgcagccacccgaaacttcattacgtggaaggcgacatcagcatccacaccga

SEQ ID NO: 229430 - DNA, 813 bp, Unknown
  Bacterial polypeptide expressing nucleotide sequence isolated from the Sargasso Sea
tatgaaagttttatttgctggctcccccgaatcatctgcgcaaatactaaactctcttgttaaagaagggtttaaggttattggggcgataagtcagcctgataaaagatcaaatagaggaaaaggcaaagaagcatctcctgtttctaaagaagcttttaaacttgggatcccaacttttaaacctgcatctctggataaatcctttaaaaaagaaattgagctcttagattttgatttcttgttggtttcagcctacggaaaaatattgccggattggttgcttatgagtccgaacgtctctccggtaaatatccatttttctcttttgccaaaatatagaggggcttctcctatacagacagcattattaaatggtgataaaaaaacaggtgtctcgctcatgaagataattcaaggcatggatgaaggaccggtttattgttttcatgaaacagagattttaagagatgaaaataaaagagaacttgaagataggcttacttctctatgtattaaaaatattgctgcagacctcgttaatatttttcataaaaagcttctacctgctgtgcaaaatgattctgaggcaagctattgtaaaaagataaataaattgtcaggcaaagttgaatttaagaaagaaaataccgccgatataattcaaaaacataaggcctatattggctggccaggtctgtattttgaaaaaaataataaggtgattaagatccatggattggagaagtataaaggtggcaatacggaccttaaagtcaaaggttttagatttatatctagtggtttgcttgt

SEQ ID NO: 229431 - DNA, 322 bp, Unknown
  Bacterial polypeptide expressing nucleotide sequence isolated from the Sargasso Sea
atgattgataaaaaaataatttttatgggtacgccagatatagcagctcaacatctaaatattttgattaaaaataaattaaatttagttggtgtgtttacacaacctccaagaaaaaaaaacagaggtatgcgcgttgaagaaagtgcagtacatcaaattgcaaaaaaaaataatattcagatttattatccctctacaatcgattacaaagttattgaactgacaaaaagtttacagcctgatttaattattgttgttgcttatggtataattttacctacatcatttataaatattcccgaaatatggatgcattaat

SEQ ID NO: 229432 - DNA, 420 bp, Unknown
  Bacterial polypeptide expressing nucleotide sequence isolated from the Sargasso Sea
tcgaaaatctcggcaccgaaagaatccgcacgacaccgcagccggggacaggagtcacctatgcccggcaattgactcgggaagaggcctggctgaactggcgacgccccgcccaggtgctcgcgcgacaaatccgtgccttcaatccctggccgctggcacgcaccaccctggacggtatcgactaccggattcaccaggcgagatcgcaaccaggcgataccactgccacgcctgggacgatcacggtcaccgacgggggcgctcttcaagttcagacgggagaggggactctggaggtgctgacgctgcagcgacccggaggcaaagcattagagacgagcacctttctcaacggccactccatccgctcgggttcagtgttcaccttgccgatagataggcatgcccagcgctgag

SEQ ID NO: 229433 - DNA, 646 bp, Unknown
  Bacterial polypeptide expressing nucleotide sequence isolated from the Sargasso Sea
aatgtcatcaggaaaagttatttttatgggaacaccagaaatttcttctatatatttacaatctttaattgattctaatcaaaatatcattgctgtttttactcagcctccaagaaaaaaaggaagaggtatgaaaattcaacaatcccctgttcataaattatcagtagataattcaattagtgtttttactcccacagatctgaatttaaatactgcattaaatgaaattaaaaacttaaatccagatttaatcataataatgggatatggacttaaaattccatcaaatatattagatttaccaaagtatggttgcattaatattcatgtatctttacttccaaggtggagaggagcatcaccaattgaatatactttattaaatggagataaagaagcaggtataacaattttcaaacttattgaaaaaatggatgcagggccaattatttttcaagactctatagaaattgataataaaattaataaagatgagcttactaataaattaaataatataggtaaaaaatctttaataagaattttaccaaatatatttaataataaaattaaatttaagattcaagataatagcaaagttacctatacaaaaaaaatatcatcagatatgagaaaaattgat

SEQ ID NO: 229434 - DNA, 826 bp, Unknown
  Bacterial polypeptide expressing nucleotide sequence isolated from the Sargasso Sea
atgaagattttatatgcgggctcatctcaatcatcctcattaattcttgaatcattggtagctagttctaacgaagtaattggggtcattagtcaaccagacaaaaggtcaaaaagaggggctgccattgaaccatcttatgtttcatctgtagcagaaaaaaataatatacctgtttataaaccccaaaccttagatgaaaattttaaagatacaatattaaaacttaactttgatattttattagttgtggcttatggaaaaatattgcctgcatggttgctgaaaagtcccttaaaagaatctattaatatccattattccttattaccaaaatatagaggggcatcgccaattcaatccgctcttttgaatgatgaaaaagtaactgggatttcagtaatgaaaatgactgatggattagatgagggaccagtgtatgttttgcataaacaaaaaatattacataaagataatagaaatacccttgaagataagcttacatctttggctataaaaaatattgataaagatctttctgatatatatcttggtaaactagccccaattgaacaaggctcaaaaaacataagttattgcaaaaagataaataagctttcaggcaagattgctttagaccaggaagaaagtgatagtgtttttaggaaatataaagcctattatgattggccaggtctgtattttgaatttaaaaatttaaagatcaagatccatggtattgacttaaaagttaaaaaagatacaaactttgtgaaaaacaaaattttatttcgtatgataatttattgcatgccaaaacaataga

SEQ ID NO: 229435 - DNA, 522 bp, Unknown
  Bacterial polypeptide expressing nucleotide sequence isolated from the Sargasso Sea
caataaaaaacaatcttctaacgcttcagcctgaaaatttaaaagaccctgaattcattaatcaacttcaggaattaaatgccgatttatttgttgtaatagcctttagaatgcttcctgaagtagtttggggaatgcctaaaaaaggaaccattaatttacacgcatctctactccctcaatatagaggagcagcacctattaactgggctattattaatggagaaaaagaatctggtgttactactttttttatagaaaaagaaattgatacagggaaaataattgaacaattaaagttagagattggtccaaatacaaatgttggtgatttgtattctcaattgattgtacttggaaaaaaaataattggttctactgttgataaaattagttcaaacaactttatctccattgatcaaaaaagcattataaatggtgaaattaaaaatgctcctaaaattttcaaaaaagattgcattataaattggaatgaaaccataacaaaatattcacaataaa

SEQ ID NO: 229436 - DNA, 235 bp, Unknown
  Bacterial polypeptide expressing nucleotide sequence isolated from the Sargasso Sea
atgcaacgaaaaattggctttatgggaacaccagattttgctgttccaatactaaaaaatatttatcaaaatggatatgaagttgtatcagtatatactcaaccacctaaaaaatctaatagaggacaaaaaaaattagaaaaatcgccaatacatttgtttgctgaaacattgaattttaatgtaagaacaccagatcaactaaagaataatatattagagtacgatcatataa

SEQ ID NO: 229437 - DNA, 775 bp, Unknown
  Bacterial polypeptide expressing nucleotide sequence isolated from the Sargasso Sea
aatgaaaagtttgaaaattattttctttggtagcccctattattcagttcctttattagataaaactattgaattaggtcatgatgtatcactagtagtttctcaaggaactactaaaacacgacgaggaaaaattattaagacatcggttcatcaatgttgtgaagaaaaaaatatcaaatacatactcccagatcggttcactgatccagtgattaaaaagattatggtttccaattatgaccttggtattatttatgcatatggtaagttagtccccatcagtttaatagagcattgcaagtatggcattatgaatttgcattgttcattgcttcctagctatagaggagcagctccaatacaacatgcacttattaacggtgaggattatactggttatacctatttcaggataaacgaaaaattagacgaagggaatgttatacttcaagaaagatatcgaattttacgaagtgacaattgttcatcaattcaagatagtctgacaatgctagcagtaaataatctatcagttgctatcaacaggctagttcagcgagaatttctagttagttctcaatccgataaaatttcatatgcaaataagatcaaaaaagaagacagtatttttgcctgggatttagatgtcgttactatttttaatagaatcagggcactgagcacctggcctgttgcacgaaacagttacttggagaaatatcaaaatatagatgctaatatgttgacaagatcatggtatgacttttggtga

SEQ ID NO: 229438 - DNA, 736 bp, Unknown
  Bacterial polypeptide expressing nucleotide sequence isolated from the Sargasso Sea
tttgaagattattttctttggaagtccttattattcagtttctttattagaaaaaatcattgaacttggatatgatgtgtctctagtcatcactcagggaagtactaaggctcgtagaggaagaattattaaaacagcagtccatgagtattgtgaagacaacaagataacctaccttattccttcaagcttagatgattctgtttgtaacaagataatgaatacaaaatttgaccttggtgtcgtatatgcatatggtagactcatcccaaagcgtttaatatcgcatattaaatatgggattatgaatttacattgctctcttttacccagctatagaggagcagctccaatacagcatgcacttatcaatggcgacagacaaacaggttatacctacttcaagattaacgagaagctggatgaaggtaagattattctccaagaaaaatataaaattctaaaaaaagacaactgttccacaatacaagataatttgacaaagcttgctattgataaacttccacttgccattagcatgattactgatgggaaaaatatggacaataatgaatcatatcgtgcttcatatgctaataaaatcaagatagaggatgcatattttgattggaatacggacgtcgaaactatattcaataaaattagggcactcaatgtttggccgattgcacgggcgaatattatttggcgaggaagtaaaaatattggaggctga

SEQ ID NO: 229439 - DNA, 832 bp, Unknown
  Bacterial polypeptide expressing nucleotide sequence isolated from the Sargasso Sea
tggacaaaagttaaccccctcgcctgtaaaagaatgtgcactggagaataacattcctgtttttcagcctgctcgattaggagacaacgaagcaacgttgatgcgccgagagaatattgatgtgatgattgttgccgcctttggccagattgttccccgcgctattcttgaggctcctcggttagggtgtgttaatatacatgcatcgatattgccacggtggagaggcgcctctcctattgtgcagtctatactttcaggggataaagacagtggcgtcagtttgatgcagatggatgagggcctggatacaggtagtgtctttatgacaaagaaagttcccgttggtcagatgacacagggcatgttagagaatgcgctttctcacgctggatctgtttgcttaaaagaggctttaactaaccttgaggcctggctttctaaagcgcaaccccagcccgaggatggcatcacttatgcgccaaaagttaagaaggcgcaggctcaagtgaattggtctcaatccggagatgttgtttgttgtcatgttcgtgcatataaccccgcccctatggcgttcacttttttagatgatcttcggtgtcgaattatagcggcacaacctttttcagatgatgttttgacaagccctatacaggccggttctgtcttagatgtgaccgctgctggtattcttgtggcttgtgggcaaggaggcgtccttattgagcaaatacagctgcctggtaaggctgttcttcatgtgggggagcaccctcgtttgtgccgtgatttgttttatggaaaacggtttgcttttaaggttggctga

SEQ ID NO: 229440 - DNA, 292 bp, Unknown
  Bacterial polypeptide expressing nucleotide sequence isolated from the Sargasso Sea
atggcgttaaaaatcatatttatgggaacaccaaacttttctgttccaattctagactctatctataactcaaagcataaaattataagtgtttatactaagtctccaaaaaagaaatatcgtggtcaaaaaaaaaattatacacctattcatgaatatgcaataaaaaataagattgatataagatatccagaaaagctagatactactgaagagctaaattttataaaagaattgaaacccgatgtagtagtagtagtcgcttatggaaaaatcattccatcaaattttt

SEQ ID NO: 229441 - DNA, 382 bp, Unknown
  Bacterial polypeptide expressing nucleotide sequence isolated from the Sargasso Sea
aatgcctaagaaaatcatctttatgggtacacccatgtttgcagttccaatattgaaatctctttatcaaaatggttttccaataaatttggtttatacacaaccacctcaaaaatctcaccgaggtcagaaaataaataaatcaccagtccaaggtatatctgaaactttgaatattgaatttagatctccacaaaacttgaaaaataatactgaagaatatgagtttttaaaaaaaatggatgctgatcttgcaattgttgtagcgtatggacaaataattcctaaagaatttttaagtttaacaaaaaaaggttttataaatattcatgcatcaatactcccaaaaatggagaggtgccgcacccattcagagagctat

SEQ ID NO: 229442 - DNA, 343 bp, Unknown
  Bacterial polypeptide expressing nucleotide sequence isolated from the Sargasso Sea
atgagagataaaaaaataatatttatgggtacgccaaatatagctgctcagcacttaaatattttgattgaaaaaaatttaaatatagttggagtgtttacacaacctccaagaaaaaaaaacaggggaatgcgtattgtagagagtgaagtatatcaaattgctaaaaaaaataatctaaaactttatcttcctacatcaattgatagaaatactatagaactaactaaaagtttagaacctgatttaattattgttgttgcttatggtattattttacctgcgccatttcatgatatacctaaatatgggagcattaatgtacatgtatcattattaccta

SEQ ID NO: 229443 - DNA, 789 bp, Unknown
  Bacterial polypeptide expressing nucleotide sequence isolated from the Sargasso Sea
tttatagatctagcaaagggtaaaaaaagaatgggaggaagcattttagctcaagttaataaacagatgggaggtgactccccagatgtagaatgcttggaagaaatgccgaactttgttgaagctatttacaagcttttaactgataaaaagatattggcttaccatgaccgatcagatggtggactaataaccaccttaatcgagatgtcatttgcaagcagattgggcttagagattaatttagatagtgttttggaggataataagaaattaatagattttctctttaatgaagaattaggagcagtaatacaggttcataataaagatctagattgtgtacattatctgcttgatgaatcgggtctcaaagatcattctcataacctaggctgcatttctgcagaaaaagaaattaattttagctatagagacaagaaaatattgtcttttcctcttaaaactttactggagaactggcataaagtaggttttgaaattcagtctctaagagataaccctgtcacagcagaggcggagtttagaaacgacactgatatcaataattcaggattgagaccgaaaataaatttttctatacctaaaaaaattcaattaaatagtactagacctagagttgctatactaagagaacaaggagttaatggtcaaaacgagatggctgcagcttttaatgaagttggttttgactgcattgatgtacatatgactgatctgatttcagctagacacaccctagctgaatttgaaggtttagttgcttgt

SEQ ID NO: 229444 - DNA, 316 bp, Unknown
  Bacterial polypeptide expressing nucleotide sequence isolated from the Sargasso Sea
tatgaaaatcggagtgcttgcaagtggaaatttaggactagatgtgcttgggaaaattaattctgattatgatatttcatttgtgtttacagacaattcatcaaatgatatattaaaactttgcaaagaaaataaaattcctttttttgttgggaatcctagaaacggaattgggtataatttcatcaagaacatttgtgttgatattattgtttctgtaaattatttatttttaatagaaaaggatattattcaacattccagattaattacctttaatattcacggttcattattaccaaaatatagaggaaga

SEQ ID NO: 229445 - DNA, 707 bp, Unknown
  Bacterial polypeptide expressing nucleotide sequence isolated from the Sargasso Sea
ttttttagaaaaattagatgctgatatagcaatagtagtagcatatggacaaatattgccaaaaagtattttacatgtttgtaaaaagggatttttaaacattcatgcgtctttattacctaaattaagaggcgccgcaccaattcaacgttcaattatgaatttagataaagaaactggtattagcattatgcaaattaacgaaaaattagatcaaggaaaagtttacagtcagtataaaattaaaataaataaagatgataatgctgaggacttatcacttaagttgtctaatcttgctgctgaaaaaattattgatgatattgagggtatctttgaaaataaaaaaaattttttcgaacaagatcactctaaagcaacatacgcaaataaaataagtaaagacgaaggaagaatagattggaatgataaagctgaaaatatcatcggtaaaataaatggtttataccctgtaccaggagcatggttttattttgatggtgttagatataaaatattaaaagcaagtatttcaaaaaatattgctactcctggtacagtaataaataataatatcgaggtggcttgtgggacaaattccatcaaaattctaaaaatccaaaaagaaggaaaaaaaattcaaaatgtcaaagatttcattttgggcacaaaaataaaacagggggttaatttaataaatgcataga

SEQ ID NO: 229446 - DNA, 346 bp, Unknown
  Bacterial polypeptide expressing nucleotide sequence isolated from the Sargasso Sea
gttgatatttatgggaagctcgtcattttgtatccctattctcaaaacgttgctgaagactaatattgatgtcatgcgagtttacactcagccaccgaaacttgctggacgtggaaaaaaattatttgaggttccagtttcttcattcgcaagagatatgggattggaggtttgtcagccagaaagctttttattgccgagtgaagttgaaaaccttcgactaatgcagccagatattattcttgtagtagcctatggtttattattaccaaaaaaagtattagatatacctaaattagccgccataaatttacatgcatctatcttgcctaagtggagaggtgct

SEQ ID NO: 229447 - DNA, 262 bp, Unknown
  Bacterial polypeptide expressing nucleotide sequence isolated from the Sargasso Sea
atgcctaaaaaaatcatttttatgggtacacccatgtttgcagttccaatattgaaatcactctatcaaaatggttttccaataaatttggtttatacacaaccaccccaaaaatctcaccgaggtcagaagataaataaatcaccagtccaaggtatatcggaaactttaaatatagaattcagatctccacagaacttgaaaaacaacactgaggaatatgagtttttaaaaaaaatggaggctgatcttgcgattgttg

SEQ ID NO: 229448 - DNA, 808 bp, Unknown
  Bacterial polypeptide expressing nucleotide sequence isolated from the Sargasso Sea
gggcttaaaataaggacctctgcagttaagcaatatgctcttgataatggtctgaaaatattacagcctacaaacctaaagtcagaagaatttctcagtgagcttaaaggattaaatgctgaccttcaaatagttgttgctttccgaatgcttcctgaaatagtatggaatatgcccccacttggaagtatcaatctacatgcctcactattaccagagtatcgtggtgcagcacctataaactgggcaattataaatcaagaaaaagaaactgggataactaccttctttataaggcaagagattgatactggcgatattttaatgcagaaaagctgccagatagatagcagagaaacagctggaagtctccatgataaattaatgattttgggagctgaaacacttgtgaggacaattaaaatgatagctgacaaggattttaaaatgcaggctcaaggcattaatataaattcaaaaaaagcgcccaagatatataaggatgattgcagaataaaatgggactctactgcaaaagaaatagatcattttatcaggggcttatacccatacccaatagcatggactagcttgaataacaaatcattaagaatctataaagcaaatcccagtcagataaacacactaaagccaggggagcttagtataaagaacaaaaaagtctatgtaggaacaggaacttttgatattgaactgatcaatcttcaaatagaaggtaaaaaaaagatgtctcaagcagactttattaatggttttagagttgatgaatcaattattttaaaataat

SEQ ID NO: 229449 - DNA, 745 bp, Unknown
  Bacterial polypeptide expressing nucleotide sequence isolated from the Sargasso Sea
cagtgatactgtaatcaaaaagattatgagttccaattttgtccttggtattatttatgcatatggcaagttagttcccatcagtttgatagagcattgtaagtttgggattatgaatttacattgttcattgctccctaggtacagaggcgcagctccaatacaacatgcactaattaacggcgaggaatatactggttataccttttttaggataaacgaaaaattagacgaaggtaatattatacttcaagaaagataccaaattttaaaaagtgataattgttcatcaattcaagagaatttgacagagttagcagtaaataatttatcagttgctatcaacaggctaattcagggagaatttctagatagtgaccaacccgatgaaatttcatatgcaaataagatccaaaaagaagacagtattttctactgggatttagatgtcgttactatttttaatagaatcagagcactaagcacatggcctgttgcacgaacaaatttacttggagaggatattaaaattatagatgctaattatattcaacaggatcatgatatgacttttggtgagatcaagactttttcaaaagacgaattgcttgtgagtgcaaaaggaggatacatatcaattaataaactacagctagaggggaaaaagatcattacaaatagagatttatttaactctaactcagaattcaaagatagactgctcaataatctcggtttaaattag

SEQ ID NO: 229450 - DNA, 823 bp, Unknown
  Bacterial polypeptide expressing nucleotide sequence isolated from the Sargasso Sea
tatgaataaaaagatagtttttatgggaaccccaaattttgctgttcctgttctaaaaaatatttatcagaacggatttgaaatatcagcagtttatacacaacctccaaaaaaatcatatagaggtcaaaaaattacaaaatcaccaatacataaattagcagaaacgttgaatttggaagtaagaacacctgaaaaaattaaaaataatatagaagaatatgaatatttaaaaaaaattaatgcaagtctaggtgtagtggtagcttatggtcagcttctgacaaataatattttaaatttaagtaaaaatggtttcataaacttacatgcttctattctgccattaaatcgaggcgcttctcctattcagagatcaataatgaatttagataaacaaacaggaataagtgtaatgaaaataaatgaaaaattagattctggtgatgtttcaaatatatttaaaatagatattttagaaaatgaaaatgcccaaagtttaagcgagagactttcattgctggcagcagaaaagatttcagatgttattgataaaatttttgatggaactgtaatttatgaggaacaaaatcataaaaatgccacttatgcaaaaaaaattgataaatctgaaggcaagattaattggaatgaagatgcaaaaaaaataatagggcaaattaatggcttatttccttattgttatttcatatttaatggggtgaggtataagattttaaaagcattattgtctggttcaatgggtaagcccggacatgtattaagtgaacatcttgagatagcctgtggaaatattctataa

SEQ ID NO: 229451 - DNA, 664 bp, Unknown
  Bacterial polypeptide expressing nucleotide sequence isolated from the Sargasso Sea
agtcgtggctttcagaatgctgcctgaagtggtctggaatatgccgcctctaggttttttcaacctccatgcctcggttcttccacagtatcgtggtgcagctccgatcaactgggccatcataaatggagaaaaagaaacaggtgtctctactttttttctgaaacatgaaatcgatactggtaagatcatttttcaggaaaaggaaacggttcattctgatgacacggtaggatcgctgtatgatcggctcatgaaaagaggcggacagctcgttgtgaaaactgttcaagctattgaggatggggattatcctgaagaagagcaagtagccactaccgcccttaaacatgcaccaaaaatctttcgagaagattgtgaaattgactggaatcgatcttctgaagaaattagaaacttcgtcagaggacttaatccctacccgggtgcctggacattttttggagatctcaacttcaaaattttcgaagtgaaaccttcggaattcgcaagcaagaaaccaattggtgaggtggatactgacaacaagacctttatccgaataaaaactaatgaccattctgtggaggtcacggatttacaacttcagggaaaaaaaaggttgcgagtcgaagatttcctgagaggattcaactttgactag

SEQ ID NO: 229452 - DNA, 363 bp, Unknown
  Bacterial polypeptide expressing nucleotide sequence isolated from the Sargasso Sea
catggctaagaaaattatttttatgggtacacccatgtttgctgtaccaattttgaaatctctttatcaaaatggatatcctgtgacatgcgtttatactcaacctccacaaaaatcacatcgtggacaaaaaattaataaatctcctattcaaggaatttctgaaactttaaatttagagtatagggcaccgtcaactttaaaagaaaataaagaagaatacgaattttttaaatcagtagatgcagatctagcaattgttgtagcctatggacaaattatacctaaagaatttttaagtttaacaaaaaaaggatttataaacatacatgcatctattctacccaagtggagaggagcggc

SEQ ID NO: 229453 - DNA, 571 bp, Unknown
  Bacterial polypeptide expressing nucleotide sequence isolated from the Sargasso Sea
actgagtcctaaaaaagtaaagtgtgcagtatttatttctggaacaggaagcaacttaaaatcactaattcatttttcaaaaaagaaaaaatcaccaatatcagtaaatttgataatttctgataattcaaaagcaaaaggattaaagtttggtaaaatttataaaatttcaaaaaaagttataaattataaaaatagaataattgctgaaaataaaataatttctgaaattaaaaataataatatcaaatttatttgtcttgcaggatttatgagaatactgtctaaaaatttcatacgaaattttaaaggaaaaatattaaatattcatccatcccttctgcccaagtatagaggtttaaatactcaccaaagagcgatagccaataatgaaaaatactcaggttgtacagtgcattttgttagttctaaattagattccggaaaaattattcttcaaagaaaggttaaaataagtaagcttgatacggctaaatctttagcaaaaaaagttttaattcaagaacacaaactttatccaaaagcaatcaggaaagtatttagtctttaa

SEQ ID NO: 229454 - DNA, 689 bp, Unknown
  Bacterial polypeptide expressing nucleotide sequence isolated from the Sargasso Sea
taaagcagatttgatcatcgtaattgcttatggattgataatacctaatgaaattcttaacctccctatctttgggtgcattaatattcatttatcccttttaccaaggtggagaggagcttcaccaattgaacacactttactaagtggagacagtcaatcaggtataacaataattaaacttatcaaaaaattagatgcgggaccaattttagcacaggaaaaaattattgtagaaaaagaaattaataaagatgatttaatagataaacttaaaaaaattggttcaactttattgataaataatcttcctaaattatttaataatgaaataattttgcgtaatcaaacagaacaatatgcaacttatgctggaaaaataaattccgaaatgagaaaattagattttagagcaacatctataaatgtttataataaaatacgtgcttattcaccttccccaggcgcatggtttaagtataaaaatgaacgtattaaaataattagtgcaaaaataaataaaataaaagctgaacctcaaacaattttaaacaaaaattttgaaataggttgtttagaaggttctataagccctatttatctgcaaagagaaggaaaaaaagtaatgtcaatcaaagaatttttaagaggttttgatctagttgtgggtgataagcttgatgaataaa

SEQ ID NO: 229455 - DNA, 835 bp, Unknown
  Bacterial polypeptide expressing nucleotide sequence isolated from the Sargasso Sea
atgaaagttttatttgccggctcccccgaatcatctgcaacaatattaaatgcccttattggtgagggatttgaagttgtaggggtaataagtcaacctgataaaagatcgaagaggggcaagggcaaagaggcatcacccgttgccaaagaagctttaaaacttcagattcctacttttaaacccatctcactagacaaatcctttaaaaaggaaattgagcttttggattttgattttttattggtttcagcctatggaaaaattttaccagattggttacttgaaagcccaaatatttcgtcagtaaatatccacttttctcttttacctaaatatagaggggcttctcctatacagacagcaatattaaataatgataaaaaaacgggcgtctcgattatgaagatgattaaagaaatggatgaggggcccgtttattgttttcatgagatagagattttgggcgaagaaactaaaatagaccttgaaaaaaaacttacctatctatgtattaaaaatatttccaaggatctcaataatatttttcataaaaaacttgatcctattgaacaaaacaattctgaaacaagttattgtaaaaagataaataaattgtcaggcaaggtagaatttaccaaagagaatgctgctgacatatttcaaaaacacaaggcgtatattgggtggcctgggctgtattttaaaaaaaataatacagtaattaaaatccatgagttagagaaatatcaaggtaacagagaagatttaaaaataaaaaactttagatttgtttctaatggactagcagtaaaaacaatggatacagtgatag

SEQ ID NO: 229456 - DNA, 760 bp, Unknown
  Bacterial polypeptide expressing nucleotide sequence isolated from the Sargasso Sea
gacaaaaaatcaggaagagggttgaaaatgaatgtaagtgaagttaaaagcttttcatctgataacaatatcccaattaaacaacctgagaaccttacaaatgaggattttttaaatgagatttcatctttaggtgcagaattatttattgtagttgcatttaaaaaattaccaaaagaagtattctcgataccagcacttggcacaattaaccttcatgcatctcttcttcctgactatagaggagcggcaccaattaattgggttttaataaataatgagagaattacaggtgttacaactttttttattaatgaaaaaattgatcatggagacattatactaaaacaagaaattttaataaatgataatgatgattttaaaagtctatataataaactgtcagttattggttcagaggttttgttaaaaacgattaaaattgtttctagcggtaaagctaaaattcaaaagcaaggtgacagcaaagatttaaatttagctcctaagttaaatgcaagaaatacaaaaattaactggaatgacaacactgataaaatcttagggatgattagaggtctatcacctagacctggctcttggacaactttaaaaaatggagataaggaaattagagtaaagattttaaaggcaagtttatcgagtagaagaagttttagtgaatcatctattggaaaagtattaattaataataatcaaatacatatttatacaaaagatggagtaattaattgcacca

SEQ ID NO: 229457 - DNA, 529 bp, Unknown
  Bacterial polypeptide expressing nucleotide sequence isolated from the Sargasso Sea
tggtgagtacatcgatatgaaatacatcaccactgatcgggtgacgttgatctacgaattacctctggcggaggtggtgaccgacttcttcgaccagatgaagacgcgcacccagggctatgcctcgatggagtacagcctgatcggctatcgcaagaaccagctggtgcggctggatgtgttgatcaatggggagcgggccgatgccctcaccaccattgttcaccaggacaaggcctacaacgtgggcaaggccttggtggagaagctcaaggaactgattcctcgccagcagttcaagattccgattcaagcttcaatcggcagccgcatcattgcctccaccagcatcagcgccattcgcaaggatgtgctagccaagtgctatggcggtgatatctcccgtaagaagaaactgctgaagaagcaggccaaaggtaagaagcggatgaaggccatgggcaaggtggatgtgcctcaggaggcctttatggctgtgctcaagttgaacgatggtggggggagctga

SEQ ID NO: 229458 - DNA, 1792 bp, Unknown
  Bacterial polypeptide expressing nucleotide sequence isolated from the Sargasso Sea
atgaaacacattagaaacttctcaattattgcccatatcgaccatggtaaatcgacgctatcagatcgtcttattcaggtttgtggcgggttaagcgaccgtgaaatggatgcgcaagttcttgattctatggatctagagcgtgagcgcggtatcacgattaaggcccagagcgtcacgttggaatacaaagccaaaaatggcgaaacttaccaacttaactttattgataccccaggccacgttgacttttcctatgaagtatctcgttcattagccgcctgtgagggcgcactgctcgtggtggatgcgggtcaaggcgttgaagctcagacgctcgctaactgttacaccgcgctggatatgaatctggacgtagtacctatcctgaacaaaatcgacttaccccaagctgatcctgagcgcgtagccgctgagattgaagacattgtgggtattgatgcgatgaacgctgtgcgttgctcggccaaaaccggcgtgggtattgacgaggtattagaagtcatcgttgatcaaattccgccgccagaaggcgacccagaggcgccgctacaagcgctgatcatcgactcttggtttgacagctacttaggcgttgtttctctcgtacgtattaaaaacggcgtgctgaagaaaggcgacaagtttaaggtgatgtctactggacaaaaccacaccgcagaccgcgtgggtattttcacgcctaaacaaaccgataaaaccgagctgaaaaccggtgaagtaggtttcgttattgcgggtattaaagaaattcatggtgcacccgtaggtgataccttgacgctggctaagcatggcgctgaaaagccattacccggctttaagaaagtgaaacctcaggtttacgctggtgtgttcccaatttcgaccgatgaatatgaaaacttccgcgatgcgctgaacaaactcagcctcaacgatgcgtcattattcttcgagcctgaaagttcatcagccctgggttttggtttccgtattggctatttaggcctgctccacatggaaatcattcaagagcgtttagagcgtgaatacgatcttgaccttatcacgacggcgcctaccgtagtgtatgaggtgctgttgaccagtggtgaaaccatctatgttgataacccagcggacttgccggcgattaacaacatcgaagagatgcgtgagcctatcgttgaagctaacattctggtgccaaaagaatacttaggtaacgtgattaccctctgtatcgaaaaacgcggtacccaagtgaacatggtttaccacggtaatcaagtggccgtgacttaccatctgccgatggcagaagtggtgatggacttcttcgaccgcttaaaatcaaccagccgtggttatgcatcgttagaatacaacttcatccgcttcgatcctgcggacatggtgcgcttagacatcttaatcaacggcgaccgtgttgacgcattggcgatgattattcaccgttcaaacattcgtcaccgtggtttggcgttggttgagaagatgaaagagctgatcccacgtcagatgtttgatatcgcgattcaagccgctgttggcagccaaattattgcccgttctacagtaaaagccttacgtaaagacgtaacggctaagtgttacggtggtgacgtttcccgtaagaagaaactcttgaataaacaaaaagagggtaagaaacggatgaaacaagtgggtaacgttgaggtgccgcaagaggcgttcttagcggtacttaagctaaacgagtaac

SEQ ID NO: 229459 - DNA, 1465 bp, Unknown
  Bacterial polypeptide expressing nucleotide sequence isolated from the Sargasso Sea
ctgcatgctgcgcgcgtacagccgccgcatcatcgacacgatcaacgtgtgcggcgaagtcaacacgttcatccccgccctcgcgtacacgttcgcgcagaaaccgaccgaaatcgaggtcgcgcacgaggagcgcttcgccggcgagtcgaagtactcgctgtacagcctgatccggctgaacttcgacctcgtgacgggcttctcggtcgtgccgctgcagtggctgtcgttcatcggcgtgatcctgtcgctcggctcagccgcgttgttcgtgctgctgctcgtgcgacgcttcatcgtcggcgcggaagtgcaaggcgtgttcacgctgtttgccatcacgttcttcctgctcggcgtgatcatcttcgcgctcggcctgctcggcgaatacgtcggccgcatctaccagcaggtgcgtgcacggccgcgctacctgatccaggccgtgctcgagcagcacgacggcgtgccggcagtgccggccggcgcaaaccgcacgggtgccacgcaatgaagccgcgcgcagtcgtcttcgcatatcacaacgtcggcgtgcgctgcctgcaggtgctgctcgcgcgcggcgtcgacgtcgcgctcgtcgtcacgcacgaggacaacccgaacgagaacatctggttcggcagcgtcgcgtccgtcgcggccgagcacggcattccggtcgtcacgccggccgatcccgccgatccggcgctgcgccgcgcggtttccgacgcgcagccggacttcatcttctcgttctactaccggcacatgctgccggtggacctgctcgcgatcgcgccgaagggcgcgtacaacatgcacgggtcgctgctgccgaaataccggggtcgggtaccgaccaactgggcggtactgaacggcgaaagcgaaaccggcgcgacgctgcacgagatggcagcgaaacccgacgccggcgcgatcatcggccagaccgcggtgccgatcctgccggacgacaccgccacgcaggtgttcgacaaggtcacggtagccgccgagcagacgctctggcgcgtgctgcccgcgctactcgccggcgaggcgccgcacctgccgaacgatctcgccaccggcagctactacggcgggcgcaagcccgaggacggtcgcatcgactggtcgaagccggccgcgcaggtctacaacctggtgcgcgcggtcgcgcccccgtatccgggcgcgttcacggacgtcgacggcacgcgtttcgtgatcgcgcgcgcgcgcctcgcggcgcccggcagcgcggcagcggccgccgcggcagatttgccgcccggcctgcacgtaagcgataatgcgctattcggcgtctgcggcgacagccgcgccctatccattctcgagctgtggcagcagcgggacggcagcgaaaccgtcgtgacgcccgcggaattcgcgcagttcattcattcttcccgtcattcatgaa

SEQ ID NO: 229460 - DNA, 952 bp, Unknown
  Bacterial polypeptide expressing nucleotide sequence isolated from the Sargasso Sea
gatgttggacaatcagcacccgaacaaaacaattgtttatgcaggctctgatgctttctcgattcagccgcttaaaaaagtattaagtttgaaatacaaaaaagtcactgtcctaacaaggccgcccaaaaggcagggccgagggatgaaagaaaaaaacaatccgcttgcagagtttgcattacacaataatcttgagacactcatgccagagagcccaaacgacaataatttcttatcaaaacttgaagaaaaaaaatatgacttacttatttcatgcgcctatggaaggatcatgtctgaaagactctttggctgctttcatatgggcaatatcaatattcacccttcacttcttcctagatggagaggtccttcaccaatagagtcatctatactcgagggcgataagataaccggcgttagtttgatgcagatgacaaaagaacttgatgccggcccagtatacgagcagcgatccattaacatgaatggcgaaaatacaaaaaccttgtcagagaaactcgcgcttcttgctggagacatgattgagagttttctcccatctttttttgaaggcgatataaaagcaaagcagcaggatgaacgccttgtaacagaaagcaaaatcataaaaaaagaggacgcacgagtagattggaacgagacctcagaggttatagatagcaaaataaaggcctactatccatggccggtagctcacacctatcttgatgacaaatacctcagaatattggattcagaagcaatactagaagatgaagacggcaccgacccaggccaaatagtggacatcaataacaagggcgtcactgttaagtgcaagagaggcaagatcatactcaagggcattcaacctgaaggcaaaaaagaaatgctcgcagctgattttgcaagaggaaacaagctagagggtaagcgattttcatga

SEQ ID NO: 229461 - DNA, 2845 bp, Unknown
  Bacterial polypeptide expressing nucleotide sequence isolated from the Sargasso Sea
catgaatcgtcccgatccagaccaactcctcgacaagctgcagcgtgacgaagaaaagcagcggcgcggccagctcaagattttcttcggcgcgtcggccggtgtcggcaagacctacgcgatgctgcaggccgcgcgccagcgcctgcaggaaggcgtcgacgtcgtcgtcggcatcgtcgagacccacgggcgcagcgaaaccgccgcgctgctcgacggcctcgacgtgctgccgctcgcgcgcatcgactatcgcggccgcacacttgccgaattcgatctcgacggcgcgctcgcgcgccagccgcaactgatcctcgtcgacgaactcgcgcattcgaacgtgcagggcgcgcggcacctgaagcgctggcaggatgtgtacgagctgctcgacgcgggcatcgacgtctacacgaccgtcaacgtccagcacctcgaaagcctgaacgacgtggtcggcgcgatcaccggcatccgcgtgtgggagaccgtgcccgatcgcgtattcgacgcggccgacgaagtcacgctcgtcgacctgccggccgaggaactgctcgagcggatgcgcgacggcaaggtctatctcgcgcagcaggccgagcgcgcggtgcgcaacttcttccgcaagggcaacctgatcgcgctgcgcgaactggcgctgcggcgcacggccgatcgcgtcgacgcgcagatgcgcgaatatcgcgccgatcgttcgatccagcgcatctggcaggcgcgcgagcggctgctcgtgtgcgtcggcccgggccctgaggcgccgacgctcgtgcgggcggccgcgcggctcgccgcgagcctgaaggccgactggatcgccgtctatgtggagacgccgcgcctgcagcgcctgcccgacgcacggcggcagcgcacgctcgacgctctgaagctcgcggccgagctcggcgcggagacggccacgctcgccggcgcagacgcggtcgccgcgctgatcggctatgcgaaggtgcgcaacgtgtcgaagatcgtcgcgggcggctcgccgaaggtcgggctcgtgcgccgcttcgtgcggcccttcggcgagaagcttgccgaacgcgcgggcgacgtcgacctgatgctgatccgggcgtccgcgagcgacgaggcgcgtgcagcgcccctcgacgcgcgtgcgcgcgactggcgcgacgcgttcgcgcagttcggcacgcatcgttcgccgccgcggcactacgtgtatgcggccgcgatctgcgcggcgatcacggtcgtcgcgagcctcgtgtccgagcggctcgacctcacgaacctcgtgatgctgtacctgctcggcgtcgtgttctcggccgtgcggctcgggcgcggcccgggcgtgctgcagtcgttcctgtcggtggccgcgttcgattttttcttcgtgccgccgcgcatgtcgttctcggtcagcgacacgcagtacctgctgaccttcttcgggatgctgctgacgtcgctcgtgatcagccacctgacgtcgacgctgacgcgccaggcgagcgtcgcgcagcgccgcgagcgccgcaccggcgcgatctacgcgatggcgcgcgagctgggcgcggcgctgaccaccgaacagatcgtcgagatcggcagccgtcacgtgggcgaggtgttccgcgcgcgcgtcgcattcctgctgcccgacagcgcggacaaggtgcgccagaagatcgaggagcccgatgcggccgtcacgctgacgggcgccgatctcgacagcgacgtcggccagtgggtgtacgaccagcagaagccggccggccgcggcaccgatacgttgcccgcgacggccgcgctgtacctgccgctgaaggcgccgatgcgcacgcgcggcgtgctcgcggtcgcatcgcgcgagccgcgcgaactcgaggtgccggagcagcagcggatgctcgacgcgttcgccgcgcagatcgcgctcgcgctcgagcgcgtgcactacgtcgagatcgcgcgcgacgcgctcgtcaacatggaatccgagcggctgcgcaactcgctgctgtcggcgatctcgcacgacctgcgcacgccgctcacgacgatcgtcggcttctcgtcgatgctcgcgaacgggcgcgcggccgcacagggcggcgatgcggcggcggccgaacgcttcgcgcagcgcgagggagaactcgtcgacgcgatccacgacgaggcgctgcggatgacgggcatcgtcacgaacctgctcgacatggcgcggctgcaggccggcagcctgcagttgaagcgccagtggtcgctgctcgaggaaaccgtcggcgccgcactcgccgcctgcaagcgcgtgcttgcgcgccatccggcgcgcgtcgtgctgccggccgacctgccgctcctgcagatggacgcggtgctgatggagcgcctgttcaccaacctgttcgagaacgcggcgaagtacacgccggccgatacgccgctcgacatcggtgcggagcgcgtgaccgacgacgggctgccgttcgtgcgcgtgctcgtcgacgactacggtcccggcctgccggccgggatggaaacgcggatcttcgacaagttcacgcgcggcgagaaggaatcggcgacgccgggcatcggcctcggccttgcgatctgccgcgcgatcgtcgaagcgcacggcggtaaaatcggcgcgttcaaccgtacagcacccgacggccatgtgacgggcgcgcgtttctggttcacgctgccggtcgagacaccgcctgccgcgcctgccgtacccgacgacgaacccgaagtgccgggtgcgtcgtctccatccgaatcattgccagaccatgagtga

SEQ ID NO: 229462 - DNA, 962 bp, Unknown
  Bacterial polypeptide expressing nucleotide sequence isolated from the Sargasso Sea
cctgcccatcgcttcagttcaggcgagtgagagttgcaccccattgaccggcaaggaagccggcctcgataccggccgcagcagcgcagcgcgctgcctgcccggcatcaacccgctgcaggatcagcagtggcacctgctcaacagcggccagaatgccttcagctcccgtggtggcgtggcaggcaacgacctcaacctctggtgggcacaccgtaccggcgtgcagggtcagggcatcaacgtggccgtggtggatgacggcctggccatcgcccacccggacttggccgacaatgtgcgccccggctcgaagaacgtggtgaccggcagcagcgaccccaccccgaccgatccggacagtgcccacggcacctcggtctccggtctgatcggagcggtcgacaaccgcatcggcaccctgggggtggcgccccgtgtccagctgcaggggttcaacctgctggatgagcgcagcaagcaactgcagaaagactggatctatgcgctgggcggcagcaccgccaccgccgacaaccgggtcttcaaccagagctacggcatgagcctggtggatccgcaaagcgccagcgggctggatcaggttcagctcgatcgcctgtttgagcagcagacccagcaggcgcagggcgcggcctatatcaaggcggcaggcaacggcttcaaccgcatcgccgcgggtgactacatgttcagccgcaccggtgtcctgcccaagctgccgttcgagaacagcaacatagatccctccaacagcaacttctggaacctggtagtgagcgccatcaacgccgacggagtgcgttcctcctactccagcgtcggcagcaacgtcttcctgagcgcccccggcggggagtacggcaccgatgccccggccatggtgaccacggatctgcccggctgcgacatgggttacaaccgcaccgacgatcccagca

SEQ ID NO: 229463 - DNA, 767 bp, Unknown
  Bacterial polypeptide expressing nucleotide sequence isolated from the Sargasso Sea
gatgtgggacaatcagcacccaaacaaaacaattgtttacgcaggctctgatgctttctcagttcagccgctaaaaaaagtactaagtttgaaatacaaaaaagtcactgtcctaacaaggccgcccaagaggcagggccgagggatgaaagaaaaaaacaatccgcttgcagagtttgcattacaaaataatcttgagacactcatgccagagaacccgaatgacaatgggttcttgacaaaacttgaagaaaaaaaatatgacttacttatttcatgcgcctatggaaggatcatgtctgaaagactctttggatgctttcatatgggcaatatcaacattcacccatcgcttcttcctagatggaggggcccttcaccaatagagtcatctatactcgagggcgataagataacaggggttagtttgatgcagatgacagaagagcttgatgccggaccagtatacgaacagcgatccattaatatgaatggtgaaaatacaaaaaccttgtcagagaaactcgcacttcttgctggagacatgattgaagattttcttccctctttttttaaaggcgatataaaagcaaagcagcaggatgaacgacttgtaacagaaagcaaaatcataaaaaaagaggacgcacgagtagattggaacgagacctcagaggttatagatagcaaaataaaggcctactatccatggccggtagcacacacctatcttgatgacaaatacctcagaatatggattcagaagc

SEQ ID NO: 229464 - DNA, 1234 bp, Unknown
  Bacterial polypeptide expressing nucleotide sequence isolated from the Sargasso Sea
tctgcagaggaactcaagtcaacacgaggacagcacctctgtcagaacatattcatttgaggaatgcgaggttctacggaaacgtgttgcagacctccaagcactcggcctcgacaacccgttcctcctggcgcatgaatcggttacgggtaagcatgcatcgattcgtggaaaagatgtaatcagtttcactagctttgattaccttggccttaccagccatccagcggtgacatcggccgcaaaaacagcaattgatcaatttggctgcggagctactgcgagccgtatggttggtggtaacaccactctgctcaatgcactcgacaaagctattgcagattttattggtaccgagcgggcaacggttttcccatgtgggtttggtaccaatgcgtccgtatttggtcatttatttaatgcccaagacctcatcctctatgacgaattagcacataaaagtattaccgaaggagcgatgacctcgcaggcagcaagccgcagtttccgccacaatgactttgaccaactcgatggcctcctccaagacattcgtcacaagtacagacgtacggttattgcaattgaaggcgtctacagcatggatggggattacccagatcttcccgagtttattgaggtaaaacaacgacacgacgcacttctctacatcgacgaggcgcactcccttggaacaatgggagacaacgggcgaggaattgctgaattttttggaattgacccaaaaactgttgatatttggatggggacgatcagcaaatctcttggatcgggcgggggctacctggctggatctcgtgaacttattgattatctcggactgacaacgcctgcatttgtcttctcgacggcgtgctcacctccaaatactgccgctgcgcttgcttcactgcaaaccctacaggcagaaccatggcgtgttcgccaacttcacgaaaggtcagctcttttcctttctttggcaaaagaagctggactcgacaccggcccaagcctgaacactccagtgattccgattattgttggcagttctcaaaaagctctcgctgtttcacaacggcttttagcagcgggcattaacgcccgtcctattttgtatcctgctgttcgagaatctgccgctcgaattcgattttttattacctgcgaacatacagactcagatattcatcaagctgtcaaagcggtcacagaagcagtagcaacctgttaa

SEQ ID NO: 229465 - DNA, 952 bp, Unknown
  Bacterial polypeptide expressing nucleotide sequence isolated from the Sargasso Sea
atgtcgagcaacgacaacctcaataaattaattgtttatgcgggctccgacaccttttctattcaaccacttcagaggctattgagccttaactatagaaggataaaagtgcttaccaggcctccaaagaggcaagggcgaggaatgaagataaaaaacaacccccttgctgaatttgcaattcaacacaatttagagacctttcttccagaaagaccaaacgataatagattcttagaaaagttggccgaaagaaagcctgatgtactaatttcatcagcatatggcaagataatgtcagaagctttcctcaactgtttttctttgggcaacatcaatattcatccatcgcttcttccaagatggaggggcccctctccaatagagtcaacactccttgagggcgataacataacaggcgttagtctaatgcaaatgacagacgaacttgatgcgggaccaatataccaacaggaatctattcaattatcaggagaaaactcaaagactttatctgaaaaactctccttgcttgcggcagacatggtccagaaatttctccccgtttttcttcagggtaattctaaccctaagcatcaggatgaaagccttgttacatacagtaaaattataaaaaaagaacatgcccgaatagattggagcgagacctcagaagtcatagataaaaaaataaaggcctattatccgtggccggtagcccatacttaccttgatgataagtatctcaggatattggactcagaaaccttgatgggagacgaagacaaaagcccccccggcaagatagtgaacgccaataaaaaaggggttgttgttaaatgcaagcatagcaaaattatcatcaaaggagtccagcctgagggcaaaaaagagatgcttgcagcagattttgcgagaggaaaaaaactggagggcaagcagttttcatgaa

SEQ ID NO: 229466 - DNA, 527 bp, Unknown
  Bacterial polypeptide expressing nucleotide sequence isolated from the Sargasso Sea
tatgaacattatattttttggatcttcagatgaatcaatacaattattagatgaaatatctaaaaatcatactattttggcaatagtatctaaacctcttcctaaaaattcaaaaagaagaaaatttaccaatccaaaactttttgaatacaccaataaaaataatatattatttcttgatcccttaaaattggatgtttcttttgttgaaaaaatccattctcttgagcctgatttatcaatagtcatgtcctatggaaaaattctcaagaaagatttaatagatattcctaaatatggaacaataaatattcacccttctttattacctaaatatagagggccttcacctgttcaatctacaatattaaatcaagataatgaaacggggtttactgttattcaaatggatgaaggcgtagacactggggacatattgtatataagcaaaaaatatgatcttggtttggaagaaacttacctagaattattaagatttctatttaatgaatcttcaaaaaatataa

SEQ ID NO: 229467 - DNA, 928 bp, Unknown
  Bacterial polypeptide expressing nucleotide sequence isolated from the Sargasso Sea
atggcatcaagaagaattatttttatgggaacaccagaaatttcttctatatatttacaatctttaattgattccgatcaaaatattattgctgtttttactcaacctccaagaaaaaaaggaagaggaatgaaaattcaacaatctcctgttcataaattagctgaagataattcaattagtgtttttactccaacagatttaaatttgaatatttcattaaataaaattaaagaattaaaaccagatttaatcgtaataatgggctatggacttaaaattccaaaaaatattttagatttaccagagtatggttgcattaatatccatgtatctttacttccaagatggcgaggagcatcaccaattgaatatactttattaaatggagatacagaagctggaataacaatttttaaacttattgaaaaaatggatgcagggccaatcatttttcaagactctatagaaattgataatacaattaataaagatgatcttactagtaaattaaataatataggtaaaaaatctttaataagaattttaccaaatatatttgataataaaattaaatttaaggatcaagataataacaaggttacctatactaaaaaaatattaccagatatgagaaaacttgattttaatgaaaatgttgaaactattcataataaaatcagagctttttcaccttatccttgtgcttggtttgaattaaataacgaaagaattaaaatcattaaatctaattttgttaaaggaaattggctaccatcaactataataaatgatcaatttcatattggttgtacttttgggaaaatttgtcctcagataattcaaagagaaggaaaaaaaccaatgctgctaagtgattttttaaagggatataattttgaaattggcactaagataaatgcataaa

SEQ ID NO: 229468 - DNA, 649 bp, Unknown
  Bacterial polypeptide expressing nucleotide sequence isolated from the Sargasso Sea
tacatggcaaccttccttaaaaaaatttgcaaaaaaaaatggatttaaaattactagtttaaaaaatttatataaaattgaaaatttaatttttttttctatagaatttgaaaaaattattaatgtggataaatttaaatctaatgagctttttaatctacatttcagtttgttaccaaagtacagaggttgtcatactaacttttaccaaatctataaaggtgaaagatattcaggagtaactctacataaaatcaataatggtattgatgaaggcgatattatagatcaaaaaaaatttaaagttaagataaatgacactgcttttgataactactttaaattaatgaaatgctcggtaattctgtttaaaagaaatatagttaacattataaaaacaaaatataatacaaaaaagcaaaacctatctaagggtgattattatagtagaagtagtgttaattataaaaaaattttaaaattgaatatgaaaaagcctacacttaaatttcataataaaataagatcactcatatttccaccttatcaactacctatagttaatggcattaaagttaaaaagtctttttataaaaataacaaaatttatttaattgaatcttctactaataagtttaaaaacagataa

SEQ ID NO: 229469 - DNA, 577 bp, Unknown
  Bacterial polypeptide expressing nucleotide sequence isolated from the Sargasso Sea
tatgaatattttatttgcaggaactccaaaaagctcagcagatatacttcagtgtttaatagataatgatgatttcaatattgtcggagcccttacccagccagataaaaaaggtaaaagaggaaacaaactcttagaatcagaggtttcttctttagctaaaaaatataatattcctttatataagcctagtgacttaaaagatagtcatatacttgataagataaaattaataaaagttgattatttaatagttatagcttatggaaaaatattacctgattggcttatagagatacctgcaatttgctcgatcaatattcatttttctttattacctaaatatagaggtgcctcacctattcagtcagcacttttaaatggagataaaaaaactggaataacttatatgaaaatctcgagtgaattagatgctggggatattctttcatcttatgaaatagatatcaaagattctgataataaattaatacttgaagaaaacttaacatcattatgtgtggatagtatttcagaagttttaaacaatatttcgaataataaaatttcaatcaaa

SEQ ID NO: 229470 - DNA, 1260 bp, Unknown
  Bacterial polypeptide expressing nucleotide sequence isolated from the Sargasso Sea
gcaggttccagtttcagattacggcttatgtaaaactagctttgcaggcaagtctggtgaggctatggcgataggtgagcgaactccactatcattgataagctctaagtcggctgcaaaaatttctgtagctgaggtcatcacaaatataattccttctggtattgctaagctttcagatataaaactttctgctaattggatgggctcacctggaaaattagatggaaataaagacctatttgaggcggtagaagctattggaatggatctgtgtcctaaatggaatataactattcctgttggaaaggattccttatcaatgtccacagaatggactgatgttaaaaatgataagtcagtaatatctccattatcattaatagtttctggttttgcggctgttgaggacatcagcattgcgacaacccctcaattaaaggcagataaagatacttccttaatttttatagatctagcaaagggtaaaaaaagaatgggaggtagcattttagctcaagttaataaacagataggaggcgactcgcccgacgtagaatgcctgcaagaaatgccgaactttgttgaatctattcacaagcttttaactgataaaaagatattggcttaccatgaccgatccgatggtggacttataaccactttaatcgagatgtcatttgcaagcagattgggcttagaaattaatttagatacttctttggaggatgataagaaattaatagattttctttttaatgaagaattaggagtagtgatacaggttgctacaaaagatctagattgtgtttatgatctacttgatgaatcgggtctcaaagatcattttcataaccttggctgcatttctgcaaacaaagaaattaattttagttatagagacaagaaaatattatcttttcctcttaaagctttactagaaaactggcataaagtaggttttgaaattcagtctctaagagataaccctgttacagcagaggcggaatttagaaatgacactgatatcaataattcaggattgagaccgaaaataaatttttctatacctaaaaaaattcaattaaatagcactagacctagagttgccatactaagagaacaaggagttaatggtcaaaacgagatggctgctgcttttaacgaagttggttttaattgcattgatgtacatatgactgatctgatatcagctaggcacaccctagctgaatttgaaggtttagttgcttgtggagg

SEQ ID NO: 229471 - DNA, 604 bp, Unknown
  Bacterial polypeptide expressing nucleotide sequence isolated from the Sargasso Sea
atgaatatcatctattttggcacagataataactcaaaactagtcttagaagatttagttaattcagaaaataaggttgttcttgttataactgctgaagattctgtaagaactcgaggaaataagaaaacgccgtcagttgttaaggattattgcataaaaaataatattaactgtatagacaaaatcccagattacaagcaattagagaccttaaattcggatataattattgttgcttcttttggaaagattataccaatggaaattcttgaaaccccgaaatacggggcgttaaatttgcacccatcccttttacctaaatataggggcccttcgccagtacatacagcaataaaaaatggtgaagaggatttcggggtttcaataataaggctttcagaagatattgacgctggtccaatagtatgtcaaaacatatatcccggttcttcaataattctggatacagaggacctaactaaaaaactttttactttggggtctaagataattctaaatatattatcaagcccagaagtaataaagaatgcaaaagaacaagatcattctttatcaacaatgacaaaaaaaataagaaaga

SEQ ID NO: 229472 - DNA, 574 bp, Unknown
  Bacterial polypeptide expressing nucleotide sequence isolated from the Sargasso Sea
atgataaacatcggagtcttgggatcaacaaacggaactgacttacaggcaatactcgatgctataaaaaataaaattattgatgctacagtaaagatcgttgtctctaatcgggaaagtgcatttatccttgagcgggctaaaaatcatggggtagatgctcactacatatctcacaaacataaaactcgcgaggaatttgacagagaggtaacctcactccttgaaaagaaaaatgtagatctagttttacttatcggttttatgcgaatactatccaaagagttttgtcaaaaatggcaagataaaatactaaacgttcatccttctctccttcccaaatatgctggtggaatggacaccaatgttcatgaagaagtactcaaaaatggagatacagaaacaggctgcacaattcattttgtaactgaagaggtcgacggtggtccaatcttgatacaaaagtcctgctcagtggaaaaagatgacaccatagaatcattaaaaacaaaggtccagtctctagaggggcaggcatttatcgaagcgattaacctcataaccaataaataat

SEQ ID NO: 229473 - DNA, 565 bp, Unknown
  Bacterial polypeptide expressing nucleotide sequence isolated from the Sargasso Sea
gatggtaaaaagaagtgtttgtgttttcatatcaggtaaaggcaccaatcttaacaatttgattaaaagatcaagagattataattttcctatcaatgtaaaattagtaattagtaataagaaagacgcattaggaatcaaatacgcgaaaaaaaactctattccttttatttttataaatactaaacacaaaaggtatgaaaatttagttttaaataaactaaaagaattcaaaatagaactaatttgtttagcaggatttatgaaaattatctcaaaaaaatttttgagaagttatagaaaaaaaataataaatatacatccatccttacttccgaagtataggggtttaaatacatttgaaaaagttttaaaaaatcaggatgcaaaaactggttgcacaatacattatgtaaatgaaaaactagatgctggtaaaataatagtgcaaaaaagaattaatgttgataaaaaggataatattattacgttgaaaaaaaagacacaaaaacttgaatatttagcatatcctgaggctgtcattaaaattttcagaaattgttaa

SEQ ID NO: 229474 - DNA, 904 bp, Unknown
  Bacterial polypeptide expressing nucleotide sequence isolated from the Sargasso Sea
aatgattaagatatcaattattggacaatctgcttttggtgaaagcgttgcagaagaaatcttgaaaatgaacggaactataatttcttctattttttcctcttctaatccaaaagatcccttaaatcagtttggtattgaaaatgatttaccagttaaaaatttcaaaagactaagagataatgaagcaattgaaagctttaagtcttttgatgtagatctccttgttatggcttatgtcacagatatagtacctatggaaatcatcaaaagtccgagattaggaactattcaatatcatccttctttattacctcttcacagaggaccttcttcaatcaattgggctatcattaacggagataaaaaaacaggaatctcaattttttggcctgatgaaggtttggatacaggtccaatacttttacaaaaagaagtcgaaatagataaatctgacacaacaggaagcttatattttaataaactattccctattggagttgaatcaattattgagtctataaaattagtgattcaaaataaagctccaaaaattgatcaaaatgaaaactatgcttcctatgaatcttggtgttcagaaaagcaaattgattggaatgattctcctaataaaatttatgacttaattagaggttgtgacccccaacctggttcttggacaattataaattcgaaaaaagtattcttgtatgactgtaagatgataaaaaatgataagaagataaaaaaacaggaactatatttttctgataaacaggtatgtataggaattgatgaaaacttattggttataggaagaatgaaaacagaaggtgaaaaaaaaataagctcaatcgaatgggtaagaaaaaataaaattgaagggaaaatttttgtaggataa

SEQ ID NO: 229475 - DNA, 949 bp, Unknown
  Bacterial polypeptide expressing nucleotide sequence isolated from the Sargasso Sea
gttgaacaatcagcacccgaacaaaacaattgtttatgcaggctctgatgctttctcagttcagccacttaaaaaagtactaagcttgaaatacaaaaaagtcactgtcctaacaaggccgcccaagaggcagggccgagggatgaaagaaaaaaacaatccgcttgcagagtttgcactacacaataatcttgagactctcatgccagagagcccaaacgacaataatttcatagcaaaacttgaagaaaaaaaatatgacttacttatttcatgcgcttatggaaggattatgtcggaaaaactctttggctgctttcatatgggcaatatcaacattcacccatcacttcttcctagatggaggggcccttcaccaatagagtcatctatactcgaaggcgacaagataaccggcgttagtttgatgcagatgacagaagagcttgatgccggaccagtatacgaacagcgatccattaacatgaatggcgaaaacacaaaagccttgtctgataggctcgcactacttgctggagaaatgattgagagctttctcccattattttttgagggcgatgcaaaaacaaagcagcaggatgaacgccatgtaacacatagcaaaatcataaaaaaagagcatgcacgagtagactggaatgaggcctcagaagttatagatagtaaaataaaggcttactatccttggccggtagcacacacctaccttggtgacaaatacctcagaatatgggactcagaagcgttattagaagatgaagatggaagcgatccaggacaaatactgggagccaataaagaaggcgttatcgttaagtgcaaaagcggcaagatcatactcaaaggcattcagcctgagggtaaaaaagaaatgcttgcagctgattttgcaagaggaaacaaattagagggtaggcgattttcatga

SEQ ID NO: 229476 - DNA, 1818 bp, Unknown
  Bacterial polypeptide expressing nucleotide sequence isolated from the Sargasso Sea
ccgacgcccccgtctcacggatccgcaacttctgcatcattgcccacatcgaccacggcaagtcgaccctggcggatcggttgctgcaggacaccggcacggtggccaaccgggacatgcaggagcagttcctggacaacatggatctggagcgggagagggggatcacgatcaagctccaggccgcccggatgaactacaccgcggccgatggggaggagtacgtcctcaacctgatcgacacccccggccatgtggacttctcctatgaggtgagccgcagcctgcaggcctgtgaaggggcgctgctggtggtggatgccagtcagggcgtggaagcccagacgctggccaacgtgtatctggcgctggacaacgatctcgagatcattccggtgctgaacaagatcgatctgcctggggcggatccggatcggatcaaggaggaggtggaggcgatcatcgggttggattgcgacaacgccatcccctgttcggccaagaccggccttggtgttcctgaaatcctgcaggccgtggtggatcgggttcccccaccgaaggatgcggtggcggaacccaccaaggcgctgatcttcgattcctattacgacccctaccggggcgtgatcgtgtatttccgggtgatgagcggccgcatcaactgcaaggacaaagtgctgttgatggccagcaagaagacctatgagctcgatgagatcgggatcatggcgccggatcagaagaaggtggatgagctccacgccggtgaggtgggctatctggcggcttcgatcaaggccgtggccgatgcccgggtcggcgacacgatcaccctgctgaacgcgccggcggatgaggccttacccggatacaccgaggccaagccgatggtgttctgcggcctgttccccacggaggccgatcagtacccggatctgcgcgatgccctcgacaaactgcagctgtcggatgcggcgctgaagtacgagccggaaaccagcagcgcaatgggcttcggtttccgctgcggcttcctgggtctgctgcacatggaaatcgtgcaggagcggctcgagcgtgagtacgacctcgatctgatcgtcaccgcaccatcggtgatctacaaggtgaacatgatcgatggcacagaagtgatggtggataaccccgccacgcttcccgacccgcagaagcgcgaatcgattgaagagccctacgtgaagatggagatctatgcgccgaatgattacaacggtgcgctgatgggcctctgccaggaacggcgcggtgagtacatcgacatgaaatacatcaccaccgatcgggtgacgttgatctatgaattaccgctggcggaagtggtgaccgacttcttcgatcagatgaagacgcgcacccagggctatgcctcgatggagtacagcctgatcggctaccgcaagaaccagctggtgcgcctggatgtgctgatcaatggtgagcgggccgatgccctcaccacgattgttcatcaagacaaggcctacaacgtgggcaaggcgctggtggaaaaactcaaggaactgattccccgccagcagttcaagattccgattcaggcctcgatcggcagccgcatcattgcctccaccagcatcagcgccatccgcaaagatgtgctggccaagtgctatggcggtgatatctcccgcaagaagaaactgctgaagaagcaggccaagggtaagaagcgaatgaaggccatgggtaaggtggatgtgccgcaggaggccttcatggcggtgctgaagctgaatgatggcgggggtggctaaa

SEQ ID NO: 229477 - DNA, 451 bp, Unknown
  Bacterial polypeptide expressing nucleotide sequence isolated from the Sargasso Sea
gaccgatttcttcgatcagatgaagacgcgcacccaaggttacgcctcgatggaatacagcctgattggctaccgcaagaaccagctggtgcgcctcgatgtgctgatcaacggcgatcgggccgatgccctcaccacgatcgtccatcaggacaaggcttacaacgtgggcaaggccctggtggagaaactgaaggaactgatcccccgccagcagttcaagattcccattcaggcctcgatcggcagccggatcattgcctccaccagcattagcgccatccgtaaggatgtgctcgccaagtgctacggcggtgatatttcccgcaaaaagaaactgctgaagaagcaggccaagggcaagaagcggatgaaggccatgggcaaggtggatgtgccgcaggaggccttcatggctgtgctgaagctcaatgatggtggggggagctga

SEQ ID NO: 229478 - DNA, 926 bp, Unknown
  Bacterial polypeptide expressing nucleotide sequence isolated from the Sargasso Sea
gatgctttccaatgaaaacctgaataaatcgattttttatgcaggctccgatactttttctattcagccacttcaaaggttgctaagcctaaaatataaaaggataactgtgcttacgagtccaccgaagaggcaagggcgaggaatgaaaataaaaaacaaccctctggctgagtatgcagctcaacacaatttagagacccttatgcccataagcccaaacgataataacttcctagaaaacctggacaaaagaaaaccggatgcgcttattacatctgcatatggcaagatattgtcagaagcattcttaaatagtttttgtttgggtaatatcaacattcatccatcgcttcttccaagatggaggggcccttccccgatagagtctgctttgcttgagggtgatgaagcaaccggcgttaccctaatgcaaatgactgacaaacttgatgctgggccaatataccaacaagaatcaattcaattgtcaggggaaaattcaaaggccttatctaaaaaactctccctgcttgcagcagatatggttcagaagtttctccccgtttttctcgatggcaactctgccgctaagcatcaggatgaaagacttgttacctatagtaaaattataaaaaaagagcatgctcgcatagactggaatgagacctcacaaaccatagacaaaaaaataaaggcttactatccatggcctgtagcacacacttatcttgatgataagtaccttagagtatgggactcagaagccttagttggcgatgaagagaaaagcaaacccggcgagataatggacaccaacaaggaaggggtcattgtgaaatgtaatggcagcaaaattatactcaagggagttcagcctgagggcaaaaaagagatgctcgcagcagacttgcgagagggaacaa

SEQ ID NO: 229479 - DNA, 1792 bp, Unknown
  Bacterial polypeptide expressing nucleotide sequence isolated from the Sargasso Sea
aatgaaacacattagaaacttctcaattattgcccatatcgaccatggtaaatcgacgctgtcagatcgtcttattcaggtttgtggcggtttaagcgaccgtgaaatggatgcacaagttcttgattctatggatttagaacgtgagcgcggtattaccattaaggcgcagagcgttacgttggaatatacagccaaaaatggcgaaacctaccaactcaactttattgacaccccaggtcacgtcgacttttcctatgaagtatctcgttcattagccgcctgtgagggtgcgctgcttgtggtggatgctggccaaggcgttgaagctcaaacgctggcaaactgttacaccgcgttggatatgaatctggacgtggtacctatcctgaacaaaatcgacttacctcaagctgatcctgagcgtgttgccgccgagattgaagacatcgtcggtattgatgcgatgaacgcggtgcgttgttctgcaaaaaccggtgtgggtattgatgatgtattagaggttatcgtcgagcaaattccaccgccagaaggcaatcctgatgcgccgttgcaagccctcattattgactcgtggtttgacagctacttaggcgttgtttctttagtgcgtattaaacatggcgtgctcaagaagggtgataagttcaaggtgatgtctacagggcaaaaccataccgcagatcgtgtcggtattttcacgccaaaacaaaccgataaaaccgagctaaaaaccggtgaagtaggtttcgttatcgcaggtattaaagaaattcacggtgcgccagtgggtgataccttaacactggctaaaaatggtgccgataagccattacccggctttaaaaaagtgaagcctcaggtttatgctggtgtgttcccgatttctaccgatgaatatgaaaacttccgtgatgcactgaacaaactcagcctgaacgatgcctcattgttctttgagcctgaaagttcatctgcgttaggctttggtttccgtattggctatttaggcctgctccacatggaaatcattcaagaacgtttagagcgcgaatacgatcttgacctgatcacgaccgcacctacggtagtctatgaagtgctgatgactagtggtgagactatctatgttgataatccagcagatttacctgcaattaacaacatcgaagagatgcgtgaaccgattgttgaggccaatattctggtaccaaaagaatacttaggtaacgtaattacgctgtgtatcgaaaaacgcggtactcaagtgaatatggtttaccacggtaatcaagtggccgtgacttaccatctgccaatggcggaagtggtgatggacttctttgatcgcttaaaatcaactagccgtggttatgcgtcattagagtacaactttatccgcttcgatccggcggacatggtgcgcttagatattctgatcaacggcgaccgcgtggatgcgctggcgatgattattcaccgttcgaatattcgtcaccgtggtttggcgttggttgaaaagatgaaagagcttattccgcggcagatgtttgatatcgcgattcaagccgcggtcggtagccagattattgcccgttctaccgtaaaagcgttacgcaaagacgtaacagctaagtgttatggtggtgacgtttcccgtaagaagaaactcttaaataaacaaaaagagggtaagaaacggatgaaacaagttggtaacgttgaggtgccacaagaggcgttcttagcggtacttaagctaaacgagtaa

SEQ ID NO: 229480 - DNA, 795 bp, Unknown
  Bacterial polypeptide expressing nucleotide sequence isolated from the Sargasso Sea
tatgaacattttattcgcaggaacacctcatagctcagcttcaatattgaaatatttagcaaatcatgaaaatatctccgttaaaggagtaataactcaaccaaacaaacgaggcaaaagaggcaagaaattaaacgaatctcctgttgctattcaagctaaagatttagaacttgatatttttaagcctaaatctcttgataataaagaattaaaagataatttaggcaaatttgatgatatagattatcttgttgttgtagcttatggaaagatggttcctgcctggttaataagcttaccaagagtagcttcagtaaatgcgcatttttctatattgccaaaatatagaggtgcatcaccaattcagtctgcattattaaatggtgatactgaaacaggtatttcttttatagaaataaatagcgacttggatgctggagatataatttcattgcataaaatcaaaatactcagtcatgataataaattaactcttgaaaaaaagttaactgataaatgtattaataaaatcgttaaaactttatctgattttaaggatcataaaattcttgcatatcttcaagataattccaaagctacttactgcaaaaagataagcaagaatgattcttttacaaattttaatgaaaagagtctaaatattattaacaagtttcgagctttttatgagtggccgggactagcatttaatcataatgatatcactattaaaatacatggtattgagttatctaaagaaaatagtgaggggaaacctggtaaaataaaaaa

SEQ ID NO: 229481 - DNA, 454 bp, Unknown
  Bacterial polypeptide expressing nucleotide sequence isolated from the Sargasso Sea
atgaacaaaaagatagtttttatgggaacatcaaattttgctgttcctatattaaagtcactttatcaaaatggatatccaatctctgttgtttacacacagcctccaaaaaaatctaataggggtttaaaattaagtaagtcaccaataaatttattcgccgaaaatataactttagacgtaagaactccccaatctttaaaaaataataatgaagaagagttatttctgaatgaattaaaaccagacattattttggtggtttcatttggtcaaatgattcccaaaaatcttttaaatattcccaaatatggatttttaaatattcatgcttctttacttccaaaattgagaggcgcagctcctatacaaagatcaataatgaatagagataaagaatcaggaattagcataatgaaaataaatgaaaatttagatgaggggccagtttgta

SEQ ID NO: 229482 - DNA, 949 bp, Unknown
  Bacterial polypeptide expressing nucleotide sequence isolated from the Sargasso Sea
ttggacaagcagcacccgaacaaaacaattgtttatgcaggctctgatgttttctcggttcagccgcttaaaaaagtactaagtttgaaatacaaaaaagtcactgtcctaacaaggccgcccaagaggcagggccgagggatgaaagaaaaaaacaatccgcttgcagagtttgcattacacaataatcttgagacactcatgccagagaacccaaacgacaataatttcttaacaaaacttgaagaaaaaaaatatgacttacttatttcatgcgcctatggaaggatcatgtctgaaagactctttggttgctttcatatgggcaatatcaacattcacccatcacttcttcctagatggaggggcccttcaccaatagagtcatctatactcgagggcgataagataaccggcgttagtttgatgcagatgacaaaagaacttgatgcaggaccagtatacgagcagcgatccattaaaatgaatggcgaaaatacaaaaaccttgtcagagaaactcacacttcttgctggagacatgattgagagttttctcccatctttttttgaaggcgatataaaagcaaagcagcaggatgaacgccttgtaacagaaagcaaaatcataaaaaaagaggacgcacgagtagattggaacgagacctcagaggttatagatagcaaaataaaggcctactatccatggccggtagctcacacctatcttgatgacaaatacctcagaatattggattcagaagcaatagtagaagaagaagacggcaccgacccaggccaaatagtggacatcaataacaagggcatcactgttaagtgcaagagaggcaagatcatactcaagggcattcaacctgagggcaaaatagaaatgctcgcagctgattttgcaagaggaaacaagctagagggcaagcaattttcatgaa

SEQ ID NO: 229483 - DNA, 913 bp, Unknown
  Bacterial polypeptide expressing nucleotide sequence isolated from the Sargasso Sea
atgaaaattattttttttggaacgcccccttcatgtataaatattttaaattcattacttaaaaatcacaacattgtaagtattgtttcaaagaagcaaccggaagcttcaaaaagaagaaaatttaaggtttctgaaatatccttgtttgcttctcaaaacaatattccctatatggaccctagtatccttgattctaaattggaaaatcagctaaaaaaaatgaatccggatttattccttgtgtgtgcatatggaaagattttatccaatgactttataaatattccaacttatggaactattaatatccacccctctttgttaccaaagtataggggaccttctccaatacaaagcacaataattaatcttgatgataagtctggatatactataatcaagatggataaaggtattgatacaggagatatactgtttaagagcgatccaattttattgagaaaagatgaaaaatacttagatttattaaattttcttctatccgaatcttccaagggaattactcaggcaattaataatttaataaataataaaaatattgataaacaagataatgaaagagcatcttatactaaattaattaaaaaaagcgatggcttaattgagtggaactcttcagctgaaaaaattgaagcccggtttagagcttttagcacttggcctcaatcatactcatttcacaataataagagatttaaaatattagatatggaaataacaaatctggaatctgaactttgtggaaaaataagtaaatttgaaaataatattcttgtagacactaaaactaaaaaattaagtattaaaaacattcagtttgatgggaaaaaacctgttgatgccttagcttattttggaaattttgatttactaaaaacaaaactttgaa

SEQ ID NO: 229484 - DNA, 1311 bp, Unknown
  Bacterial polypeptide expressing nucleotide sequence isolated from the Sargasso Sea
gagattctttttggaaagccaccaaaaactcatttaagttttcagagttcaaataaaaatagttcctcattaaatttgccgaaaaaaattacagaagatttactttgcgaagtactcagacatccaactgtcgcaagcaaaggttttttaattactattggagatagatccgttacaggtttaatcgctagagatcagtttgtgggcccttggcaggttccagtttcagattatggcttatgtaaaactagctttgcaggtaattctggtgaggctatggcgataggtgagcgaaccccactatcattgataagctcaaagtcggctgcaaaaatttctgtagctgaggccatcacaaatataattccttctggtattgctaagctttcagatataaagctttccgctaattggatgggctcaccaggaaaattagacggaaataaagacctattcgaggcggtagaagccattggaatggatctgtgtcctaaatggaatataactattcctgttggaaaggattccttatccatgtccacagaatggtctgaaggtaaaaataataagtcagtaatatctccattatcattgatagtttctggttttgcggctgtcaaggacatcagaattgcggcaacccctcaattaaaagcagatgaagctacttccctaatatttatagacctagcaaagggtaaaaaaagaatgggaggtagtattttagctcaagtgaataaacagataggaggcgactcacccgacatagaatgcctagaagaaatgccgacctttgttgaagctatttataagcttttaactgataaaaagatattggcttatcatgaccgatccgatggtggactaataaccactttaatcgagatgtcttttgcaagcagattgggtctagagattaatttagataacgttttagaggataataataaattaatagatttactctttaatgaagaattaggagtagtaatacagattcatacaaaagacctagattgtgtttatgatctacttgatgaatcgggtctcaaagatcattctcataaccttggctgcatttcttcagaaaaagaaattaatttcagctatcgagacaagaaaatattatcttttcctcttaaagctttactggaaaattggcataaagtaggttttgaaattcagtctctaagagataaccctgtcacagcggaggcggaatttagaaacgacactgatatcaataattcgggattgagaccgaaaataaatttctctataccaaaaaaaattcaactaaatagtactaga

SEQ ID NO: 229485 - DNA, 135 bp, Unknown
  Bacterial polypeptide expressing nucleotide sequence isolated from the Sargasso Sea
aatgccaaaaaaaattatttttatgggcacaccaatgtttgctgtgccaattttaaagtctttgtatcaaaatggatttcctatttcgacagtatatactcaacctccccaaagatctaatcgaggtcaaaaaat

SEQ ID NO: 229486 - DNA, 772 bp, Unknown
  Bacterial polypeptide expressing nucleotide sequence isolated from the Sargasso Sea
atgcgcaaagtaattttcttaggtactccaaacttcgcagtaccaattctaaataggataattaaagatgaattagaaataatatgtgtgtttactcagcctccaaaaaaatcaaatagagggcaaaaaatcctaaaatctcctgtacataattacgcagaaaaatttaatttaaaaattaaaaccccagaaaatttaaaaaaagaggaaaattatataaaaactgctgaatttgatttaggtatagttgtggcgtatggtcaaattattcctgaaccaatattagaaagttgtaaatttggatttataaatattcatgcgtctttgttgccaaaatatagaggggcagcgccaattcaacgttccttgattaatctagaaaaatttactgggataagttttatgaaattaaataatgttttggacagtggtcctattttcaatcaatataaaatcccgattaataaaaccgataatagcgaaacattgtctaaaaaattaagcgaattgagtgcagagaaaattaccaaaaatattgaattaatattttcaaacaaagcaacatttgtggatcagatccacaatcaagctagttatgctgaaaaaataaacaaaaaggagggtaaaattaattggaatgaaagtgcacaaaatattctaggcaaaataaatggtctttttccaaatcctggtgcatggtttgaatttagaaaggaaagatataaaattactaaatctgagctatctgaattaagcggaaaaccaggagagg

SEQ ID NO: 229487 - DNA, 760 bp, Unknown
  Bacterial polypeptide expressing nucleotide sequence isolated from the Sargasso Sea
tggcttaccagtaagatcgccaagtattcttaaaaataatattgatgaatataattttataaaaaaaataaagcccacaatagttatagtaatttcttatggtcaaattataccaaaggaatttttggaactttctgaaaaaggtttttttaatatacatgcatctattttgcctaaattcagaggcgctgctccaatacaaagagcaataatgagtcagaacactgagacgggaataagttttatgaaaattaatgaaaatctagatactggtcctgttcttgaaacttataaaattaaaattgacttaaatttaaatgcaactgagcttgaaaaaaaattatctcaattggcggctgaaaaaataattgaaaacatcaataatattattaaaggcaaagtaaagctcaaagaacaagaccattcagaagcaacatatgctgaaaaaataaataaaaaagaagggaagataaattggaatgataattctaagaaaattattggaaaaataaatggtttacaccctaatccaggagcatactttatatttaatggagatcgatacaaaattttaaaagctgaaattggaaatggatcaggacatcctggtgaagttttaaatgataaacttgagatagcatgctttaataatgaaagtataaaagtcattgaaattcaaaaagaaggaaaaaaaattcaagagatagatgaatttttgaacggttcaaaaatacataaaggttgtactcttaatgaatag

SEQ ID NO: 229488 - DNA, 460 bp, Unknown
  Bacterial polypeptide expressing nucleotide sequence isolated from the Sargasso Sea
cgcgcaacccccatcggggccaccgaaaccaccggcgaattgcacgaccgcctttctgccatgggggccgaggccattgtcgaggcgcttgcccatctcgacagcctcacgcccgagccacaacccaatgccggcgttacctatgccgagaagatcgacaaatccgaggcccgcgtcgactggtcccaccccgcgccagaggtcgatgcccatatccgcggcctctccccctttcccggcgcctggaccgaggccggggggcaacgcatcaagctgctggcctcgaccctcacagacggcaccggccaacccggcgacatcctcgacaacaccctgaccgtcgcctgcggcacaggcgccgtgcggcttttgcgcttgcaacgggcgggcaagggcgcgcaggatgtcgaaaccttcctgcgcggcatggcccttcccgcaggcacgacactgacctgag

SEQ ID NO: 229489 - DNA, 283 bp, Unknown
  Bacterial polypeptide expressing nucleotide sequence isolated from the Sargasso Sea
taaaaaatttctaagcttaactaaaacaggctttataaatatacacgcatctttactgcctaaatggaggggtgctgcaccaattcaaagatctattatgaatttagatcaggaaactggaataagtataatgagaattgctgaaaaattagatacagggccagtttgtaataattataaaattcaacttgatgaaaatttgaacgcgttagaaattagtgaaaaactttcaaatttagcagcagaaaaaattttagataatgtttatgatattttagaggat

SEQ ID NO: 229490 - DNA, 841 bp, Unknown
  Bacterial polypeptide expressing nucleotide sequence isolated from the Sargasso Sea
ggtggccttggatcaggatttcccggtattcgccccggaatttcctagtggagaggcgttccttgaggagataggtcaattggggccggatatctcagttgtggttgcctacggccatatactgcggccggaggtgcttgaccttccgcctatgggctccatcaacgtacatgcgtcgctgctgcctgagcttcggggcgctgccccgataaattgggcgatagcgcgtggtttctcggagacgggtgtaaccattatgcgcatggcagaaggaatggactccggcgcgattatcagtcaggtagcagagccgatcttggaggacgagacgacgagtgagttgacggtccggttgtcggaaatcggagcggtggctttggtcgaggcgttagcgttgatcagtgaaggggcgactgatgagcaagaacaggaccataccgcagccacatttgctcccaaggtgtcgcgccacgtggctcgtattagttggacaaagccagcgcacgaggtgtcagcgcatgttagggcgatggatgcggttccgggtgcttggacgaaattagtagatgcccctgtgaaactttttcggcccgctgtgtggagtgaagcgagggtcaaggcgctcgggagcgagttccttgaggataacgttaggccaacgatcacgggggataatgatggcggcttggtaatccgagcgacggtttcagacggcttggtggttcggtgtgcccaaggagcggtggcgttttctgaagtacagccgccgggaaggaaacgcatgctagtttctgactggattaatggacggggtatcaatgaaggtcagcggttagtgtga

SEQ ID NO: 229491 - DNA, 845 bp, Unknown
  Bacterial polypeptide expressing nucleotide sequence isolated from the Sargasso Sea
aatagacattatttacaattctgaccataaactatgtgcgatatatactcaaccaccttctatttcaggaagaggtatgagattgagagataatgcaataggtgtaaaggctaaggaattaaatattcaacttttttatccctctaacattaataacacaattgaaataaataaatttaaaagtttaaatccagatattgctatagtatctgcttatggtcaaatactgtcttcaaatttacttaaagtacctaaatttggatttataaatttacacccgtctttgttaccaagatggcgtggagcagcaccaattgaaagagctttaatgtcaggtgataaagaaactggaatttgcaccataaaaatggttagggaacttgactcaggtcctatattggctagagaaaaatttgtaattaattctaatgaaactaacaccagtttatcgcacaaactaagtaaaattggagcacttcaactattagaagttataaataattttgaatttatttctgaaattcctcaagaaagtgatggaattacttacgcatctaaaatccaaaaaagtgaaacaagaattaattggaatttatctggtatagtagttgataggatgattagaagtttatctgaaaaacctggggcttggtgtattttgaatggtgctagagtaaaaatattgaactcgaaatatttaaaattagaaggaaaaacaggtcataatattatatcttctgcaaataaatcatctcttattattgcttgtagagaaggtgcagtagagataatgactcttcaaaaagaaggaaaaaaacctatttctgcaaaaggaatttcttagt

SEQ ID NO: 229492 - DNA, 367 bp, Unknown
  Bacterial polypeptide expressing nucleotide sequence isolated from the Sargasso Sea
gatgagtgaaaagatagtttttatgggcacccctgaatttgctgtgcctattttgaaatctatttatcaaaatggttttcctatatcagcagtttatactcaaccaccaaaaaaatctaaccgtggtcaaaaattaaataaatcaccagttcacttaatttctgaaacattaaatttagatgtaaggactccttttactttattaggcaatcaagaagaaacaaattttttaaaaaatcttaatttcgatttagctatagttgttgcttatggtcaaataattccaaaaaattttttggattttgcaaaaaagggatttataaatattcatgcatcactacttcctaaatggagaggtgctgctcca

SEQ ID NO: 229493 - DNA, 418 bp, Unknown
  Bacterial polypeptide expressing nucleotide sequence isolated from the Sargasso Sea
atggctcaaaaaattgtttttatgggtacaccaaagtttgcagtacctattttaaaatctttatatcaaaatggatatccaattacacatgtatatactcaacctcctcaaaaatcgcaaagaggacaaaaaataaataagtccccaattcaaggtattgctgaaactttaaatttagaattcagaataccaaaataccttaaagataacgaagaagaatacaaatattttaaaagtatagatgctgatcttgctatagtagttgcttatggacaaataataccaaaggaatttttgaatttaacaaaaaaaggttttattaatattcatgcatccttacttccaaaatggagaggagcagcacctatacaaagatcaataatgaatcttgataaagagataggcttcagcgttatga

SEQ ID NO: 229494 - DNA, 790 bp, Unknown
  Bacterial polypeptide expressing nucleotide sequence isolated from the Sargasso Sea
cctggttggaaatctagcaagaaaactcaatttagatttatttacaccagaaaaactttcaaatccaaatttgaaagaatggatagtggatttaaagccagatatccttgtagtagtagcttttaaaatccttccaaaaactattactgatatttcaaatcttaaagcagtcaatcttcatgcatcattacttccaaaatatcgaggagctgcacccattcatcatgccctgatgaatggagaaacagttactggaaatacaacttttttaatccaatcaaaagttgatactggaaatataatacttcagcaaaaaatagatattaaacccaacgataactttgcaactttatcaaagaaaatgtcaaagcttggagcagaacttcttgttgaatcattgagcgttattgaaaatccagattttaaacctatgtcacaagacgattctgttgcaacttttgcacctaaaatagataaatcatttggaaagatagattggagcgaatcggcacatataatctattcaaaaattaaagccttatctttttctcctggaactttcgctagtattaatggaaaaagactaaaaatatatgaatcaaaactaacttcaaaaaaattagatgaccagccaggagtagtgatctgtatcaacaataaagtttttgtttcatgtttagatttttctcttgaattgattcatgttcagtttgaaggaaagaaaaaaatgtcagcaatagattggtatagaggtataaatgaacagtctggattaaagtttgataaataa

SEQ ID NO: 229495 - DNA, 765 bp, Unknown
  Bacterial polypeptide expressing nucleotide sequence isolated from the Sargasso Sea
aatgtcaaataagattgtttttatgggtacgcctatgtttgcagtgccaatacttaaatctctatatcaaaatggatacttcgtttctgaagtttatactcaacctcctcaaaagtctcagaggggacaaaaaataaataaatctccagtacaaagtatggctgaaactttaaatttaaattttcgaacaccggattctctaaaaaataactttgatgaatatgactattttaaaaaaatagatgttgatcttgcaattgtcgttgcttatggacaaattattcctaaagaatatttagatttacctaaaaaaggatttattaatattcatgcttcaatactacctaactggagaggtgcagctccaattcaaagatcaataatgaatcttgataaagaaacaggtattagcatcatgaaaatttctgaaaaattagatactggtccagtttctaaaatatataaaataagtcttaaaaatgatttaaatgcattagatgttacagaaaaactctcaacaatcgcagctgaaaaaattttagataatattgatgatatattggatggaaatgctaaatttgaagaacaggatcattcaaaagcaacttatgcacataaaatagaaaaatcagagggaaaaattaattggaatgagtctgcagaaaaaattattggaaaaattaatgggctgtatcctgctccgggtgctttttttatatttagtggcgaaagatataaagttttaaaaggtgaaattggaaatgg

SEQ ID NO: 229496 - DNA, 580 bp, Unknown
  Bacterial polypeptide expressing nucleotide sequence isolated from the Sargasso Sea
atgagaattgtattttttggaactccggattttgctatccctagcttagaatctattttgaattcaaaacatgagttgttaagcgtcgttactaatcctgataaaaaatcaggtagagggcttaaaacaaagccttcaccaataagtactttttgtagtagcaagtcaatagaatgtttgcactattctgattttgaaaatcaagatgtctataatgctcttgaaaacatgaatcccgatctatttgtggttgtagcatttaaaattctgcctgaaaaaataataaatattcctaagcatggatcaattaatgtccacccttcattgctgcctaagtatcgtggctcttctcctatacaacatgctatattaaacggagatcgagaaacaggggttactgttttcaaactaaatgaaaaggttgattcaggacatgttatcaatcaaaataaatatattattaaagaccaaattaatttttctgatttatatattgaattatcaaaatttggagctaaaacattgatggaagctattgagctgattgaatctggaaaagttgactatgtagcacaagaca

SEQ ID NO: 229497 - DNA, 808 bp, Unknown
  Bacterial polypeptide expressing nucleotide sequence isolated from the Sargasso Sea
catgaataaaaaaatacttttcatgggtacgcctagtatctctgctcaaatattgaaaactttataccaaaatggttttgaaattgaaattgtctatactcaaccaccaatagcatcaaatagagggcaaaaagtaaacaaatcaccagttcatattatggctgagatatttaatctacaagtaagaacgccgtcagtattaaatggttctgaagaaataaattttttgaaaagtaaagacatagctttaggagttgtagttgcttatgggcagattttaaaaaaagatattttagatatacctaaatatggattcataaatatccactattctttgctaccaaaactaagaggtgcagctccaatacaaagagctattatgaataacgaaaaaacaacaggtatttccataatgaaaattgatgaaggattagaccatggacctatttgtaaccaatattctttaaatattttagaaaatgaaaatagtgaggaactatctttgagattatcaaatttagcttcagaaaaaattttagaaaatatagataatattttagagaataaagctttatttaaagatcaaaaccatagtttaactacatatgcaaaaaaaattttaaaagaagaaggaaaaattaattggctagaaagtaataaaaaaattattggaaaaataaatggtttatatccaaaccctggagcttggtttgaatttaaaggtgaaagatataaggtacttaaggccgaattatctattaagactgggaaatcaggttatgttttaacagatagtttagaaattggt

SEQ ID NO: 229498 - DNA, 825 bp, Unknown
  Bacterial polypeptide expressing nucleotide sequence isolated from the Sargasso Sea
catgtttgctgtacctattttaaaatcactctatcaaaatggatatccaatatcttgtgtttatactcaaccacctcaaagatctaaaaggggtcaaaaaattaataaatctcctattcaattaatttcagaaactttaaacatagaatttagaacaccaaattcattaaaagaaaatccaaaggaatttgaatatttaaaatcattagaggcagatttagcaatagttgttgcttatggtcaaataataccaaagtcatatttaaatttaactaaaaaaggatttattaatatacatgcatctattcttccaaagtggagaggtgccgctccaattcaaagatcaataatgagtttagataaagagacaggtattagtattatgaaaattagagaggagttagatacaggtccagtatgtaatgtttataaaattaatttagaaaataatttaaatacagaagatataaatgaaaaactttcaagtttagctgcagagaaaattttagataatatagatgatatatatgaggataaagcaaattttatagaacaggatcactcattagctacatacgcatcaaaaattgaaaaaatagagggtcagattaattggaaagaggatgcaaaaattataattggtaaaataaatggactttatccagttccaggagcttattttatgtttaacggtgagagatataaaatattaaaagcagaaatcggacatgcacaaggaaaaccaggtgaggttttatctgactatttagaaatttcgtgtggagataaaaaatcaataaaaattaaagaaatacaaagacaagg

SEQ ID NO: 229499 - DNA, 742 bp, Unknown
  Bacterial polypeptide expressing nucleotide sequence isolated from the Sargasso Sea
aatgagcaaaaaaattgcttttatgggtactcctaccatttctgggcaaatactcaaatcattgtatcaaaatggttttgatattgaggttgtttatactcaaccacctgtagcatcaaatagaggtcacagattaaataagtcacctgttcatataatggctgaaatattaaatatacctgttagaactccaattgtactaaataatacagaagagaaaaattttcttaaaaaacaaaatataagtttaggtatcgttgttgcttacgggcagattcttaaaaaagatattttaaaaatcccaaaatatggatggataaatattcattattcacttttaccaaaattacgaggtgcagctcccattcaaagagcaattatggaaaatgaaacatcaacaggtatttctataatgaaaattaatgagggtttagactctggtcccgtctgtaatcaatattcaataaatattttagaaaatgaaaatagtgaggatttatctcaaagattaagtaatttagcatccgaaaaaatactacaaaatattgatgatatatttgataacaaagcacattttaaagaacaagatcatagcaaatctacatatgcaaaaaaaattaaaaaagaagagggaaaaattaattgggaggacagtaatttaaaaacaataggaaaaattaatggtctatatcctaatccaggaggttggtttgaatttaaaggggaagatacaagatactaa

SEQ ID NO: 229500 - DNA, 627 bp, Unknown
  Bacterial polypeptide expressing nucleotide sequence isolated from the Sargasso Sea
aatgagcaaaaaaattgctttcatgggcaccccaaccatttctgggcaaatactcaaatcattatatcaaaatggttttgatattgaggttgtttatactcaaccgcctatagcatcaaatagaggacatagattaaataagtcacccgttaatataatggctgaaatattaaatattcctattagaactccaatagtattagatgaccctgaggaaaaaaatttccttgaaaaacaaaatataagtttgggtattgttgttgcttatgggcagattcttaaaaaagatattttagaaataccaaaatatggatggataaatattcattattcacttttaccaaaattccgaggtgctgctcccattcaaagggcaattatgaacaatgaaaaatcaacaggtatttctataatgaaaattgatgaaggtttagactctggtcccgtctgtaatcaatattctataaatattttagaaaatgaaaatagtgaggatctgtctcaaagattaagcaatttagcatctgaaaaaattctacaaaatattgatgatatatttgataacaaagtgcattttaaacaacaagatcatagtaaatctacatatgcaaaaaaaattaaaaaaga

SEQ ID NO: 229501 - DNA, 673 bp, Unknown
  Bacterial polypeptide expressing nucleotide sequence isolated from the Sargasso Sea
aatgtcaaaaaagttagtttttatgggtacgcccatgttcgctgtaccaattttaaaatctttatatcaaaatggatataacatttcttgtgtatatactcagccacctcaaaaatcaaaaagaggacaaaaaattaataagtctccaatacaaggtatttctgaaactttaaatttagaatacagaacaccaccaattttaaacaatgaagaggaatataattttttaaattctttagatgccgatttagcaatcgttgttgcttacggacaaatcatacctaaaaaatttcttagcttaactaaaacaggtttcataaatatacacgcatctttactgccaaaatggagaggtgccgcaccaattcaaagatctattatgaatttagatcaggaaactggaataagtataatgagaattgctgaaaaattagatacagggcctgtttgtaataaatataaaattcaacttaaagaaaatttgaacgcgttagaaattagtgaaaaactttcaaatttagcagcagaaaaaattttagatgatgtagatgatattttagaggataaagcaaattttattgagcaagatcatttgaatgccacttatgcctctaaaattcaaaaaactgaaggtcaaattaattgggatgaaaatgctgaaaaaattattggt

SEQ ID NO: 229502 - DNA, 322 bp, Unknown
  Bacterial polypeptide expressing nucleotide sequence isolated from the Sargasso Sea
atgcgcgtcctgaccccggttttcatcgacgccttcaagggccggatgctcaatatccatccctcgctcctgcccaagtaccgtggcctcaacacccacgcccgcgccatcgaagccggcgatgccgaggccggctgcaccgtgcatgaggtcacgcccgaactggacgatggcccgatcctggggcaggcccgcgtgccgatccggcccgacgatacagcccaaacccttgcggcccgtgttttgatacaggaacacaggctctacccggcggtcctgcgccgcttcgccgaaggcgaccgcagcccgctttacctgtaaa

SEQ ID NO: 229503 - DNA, 781 bp, Unknown
  Bacterial polypeptide expressing nucleotide sequence isolated from the Sargasso Sea
gcaaataaaaaattctcctgttcataaattagctcaagaaaaaaaaataactatttatcatcctgagaattttaattcgtctaaaataatagatgagtttaaaaaaataaagtcagatatagtagtggtaatgggttatggtttaattcttcccaaaaaaattttaaacattccaacttatggttttattaatatacatttatcgcttctaccaaggtggcgtggagcagccccaatagagcacgctattttacatggagataaaattacaggtgtatcaatatttcaaattgaacaaaaattagactcagggcctattatcagttctaagtcagttaaaatcaaaaataattattcaaaggataaattgactaaattacttaatgaagcaggttctaatttattaaacttatctttacctaaaatattcgaaaaaaaaatattatttaaaaaccaagataattctaaagctacttatgctgcaaaaattacttcagaattaagaaaaataaattttaatcaaaaagttgatgatgtttataaccatataagagccttttcccctaaaccatccgcatggtttttttttgaaaataaaagaattaatattataaaatgttcaaaacaaatttgtaattcaaaaaaatctactattttaaataaagaatttcacattggttgtaatgatgggaaaataattcctgaaattattcaaaaagaaggaaaaaaaccaatggatattaaagagtttttaagaggctttaactttagtattgatcaa

SEQ ID NO: 229504 - DNA, 538 bp, Unknown
  Bacterial polypeptide expressing nucleotide sequence isolated from the Sargasso Sea
aatgagcaaaaaaattgcttttatgggtacgcctgttatttctgggcaaatactaaaatcattgtatcaaaatggatttgatattgaggttgtttatactcaaccacctgtagaatcaaatagaggacataaattaaataaatctcccgttcatattatgtcagaaatattgaatattcctgtaagaacaccttttaaattagataattctgaagaaaataaatttcttcaaagtaagaatataagtttaggcattgttgttgcatatggacagattttaaaaaaagatattcttgatataccaaaatatggatggataaatattcattattcacttctacccaaattacgaggtgcagctccaattcaaagggcaattatgaataatgaaataaaaacagggatttctataatgaaaatgaatgaaggtttagatacaggcccaatttgtaatcaatactctgtgaatattttagaaaatgaaaatagtgaggatttaggacaaagattaactaatttagcatctgaaaaaatttta

SEQ ID NO: 229505 - DNA, 730 bp, Unknown
  Bacterial polypeptide expressing nucleotide sequence isolated from the Sargasso Sea
atgcgaatcgtatacatggggacgcctgactttgccgtcccggctcttgaacgattacacgcgtcagaccacgagatcgtctctgttgttacgcgaccggattctaagcgcggacgaggtcgaggcctgtccgcctcggagatcaaggttgcagccgagtcgctggggcttcccgttctgcagcctgaatcgctcaaggatccgactctacacgaagagctcagagaccttgagccggatctgttcgtggtggtcgcttttctgatcctgcccagatctgtcttgaagattccgaaacatgggtccctcaaccttcatccgtctcttctgccgcgatacaggggagcagccccgatccagtgggcggtgatcaatggagagtctgaaacgggaatctccacattcctgctcaacccgagagtcgacgcaggggatatcctgattcagcgaccggtgtcgatcagttcagaggagacggcgggtgcgttatacgagcggttgagggtcaagggtgctgatgtggtcctcgagaccgtagatggtttcgaggcagggacattgaacccgactcaacaggatgacgcacgagcgacacccgcgccgaagctgacgaaggagaccggtcggatcgactggaccaagaaggctgaaacgatccgaaatttggttcgaggaaccaacccattcccgggcgcgttaacagaatggaaaaacgggatcctgaagatac

SEQ ID NO: 229506 - DNA, 643 bp, Unknown
  Bacterial polypeptide expressing nucleotide sequence isolated from the Sargasso Sea
atgagcaaaaaaattgctttcatgggtacccccaccatttctgggcaaatactcaaatcattgtatcaaaatggttttgatattgaggttgtttatactcaaccgcctgtagcatcaaatagaggacacagattaaataagtcaccagttcatgttatggctgaaatattaaatattcctgttagaaccccaattatattagataatactgaagaaaaaaatttccttgaaaaacaaaatataagtttgggtattgttgttgcttacgggcagattcttaaaaaagatattttagaaattccaaaatatggatggataaatattcattattcacttttaccaaaattacgaggtgcagctcccattcaaagagcaattatggaaaatgaaaaaacaacaggtatttctataatgaaaattaatgagggtttagactctggtccagtctgcaatcaatattcaataaatattttagaaaatgaaaatactgaggatttatctcaaagattaagtaatttagcatctgaaaaaatactacaaaatattgatgatatatttgataacaaagcacattttaaagagcaagatcatagtaaatttacatatgcaaaaaaaattaaaaaagaagaaggaaaaataaatg

SEQ ID NO: 229507 - DNA, 743 bp, Unknown
  Bacterial polypeptide expressing nucleotide sequence isolated from the Sargasso Sea
tttgcgaattgtaatttttgctagttcaaagttttctattccattattagaaaaacttcacaaatctgaacacgagatatgtgcagtttattctcaaccaccaagtatttcaggaaggggaatgaagttaaaagaaaatgaagtatgcttaaagtctagtgaattaaatctaaaacttttatttccagataacattaataaagatgttgagataaataaactagaacaaatgaaaccagatattgcagttgtttctgcttatggtcaaattttatcatcaaaattacttagagttccaaaatttggatttgtaaatttacacccttctttattaccaaggtggcgtggagctgcgccaattgaaagagctctgatggcaggagacaaagaaactggagtttgtacaataaaaatgataaaggagcttgatgccggtcctattttagcgaaagaacgttttttaattaattttgatgaaacaaattcaagtttatcacaaaaattaagtataattggtgcaaatcaattattggacgtaattaataatttagaacttatttctgaaatacctcaagagagtgaaggtgtcacttatgcatttaaaattcataaaagtgaaaccagaattaattggaacttgcctggaaaaatagttgatagatttattagaggattatccgaaaaacctggtgcatggtctatgatgaatggttcaagagtgaaaatattaaaatcaaaatatg

SEQ ID NO: 229508 - DNA, 877 bp, Unknown
  Bacterial polypeptide expressing nucleotide sequence isolated from the Sargasso Sea
atgagcaaaaaaattgctttcatgggcactcccatcatttctgggcaaatactcaaatcattgtatcaaaatggttttgatattgaagttgtttatacacaaccacctgtagcatcaaacagagggcatagattaaataagtcaccagttcatataatggctgaaatattaaatattcctgttagaactccaatggtattagataatactgaagaaaaaaactttcttcataaacaaaatataagtttaggtatcgttgttgcttatgggcagattcttaaaaaagatattttaaaaattccaaaatatggatggataaatattcattattcacttttaccaaaattacgaggtgcagctcccattcaaagagctattatgaataatgaaacatcaacaggtatttctattatgaaaattgatgagggtttggactctggccccatctgtaatcaatattctataaatattttagaaaatgaaaattgtgaggatctgactcaaagattaagtaatttagcatccgaaaaaattcttcaaaatattgatgatatattggatgataaagcatattttaaagagcaagatcatagtaaatctacatatgcaaaaaaaattaaaaaagaagaaggaaaaataaattgggaggacagtaatttaaagatcataggaaaaattaatggtctatatcctaatccaggaggttggtttgaatttaaaggggaaagatacaagatactaaaagcagaaaaatcgattttaagtggaaaattaggatatgtcttatcagacaattttgaaattggttgtggtgaaaattcaataaagatcattgagatacaaagacaaggtaaaacagttcaaaaaactaaggaat

SEQ ID NO: 229509 - DNA, 559 bp, Unknown
  Bacterial polypeptide expressing nucleotide sequence isolated from the Sargasso Sea
atgagcaaaaaaattgcttttatgggtactcccaccatttctggtcaaatactcaaatcattgtatcaaaatggttttgatattgaggttgtttatactcaaccacccgtagcatcaaatagagggcacagattaaataagtcacccgttcatataatggctgaaatattaaatattcctgttagaactccaattgcattagataatgctgaagaaaaaaactttcttaataaacaaaatataagtttgggtatcgttgttgcttacgggcaaattcttaaaaaaaacattttagaaattccaaaatatggatggataaatattcattattcacttttaccaaaattacgaggcgcggctcccattcaaagagcaattatgtacaatgaaacttcaacaggtatttctataatgaaaattaatgagggtttagactctggtcccgtttgtaatcaatattccataaatattttagaaaatgaaaatagtgaggatttatctcaaagattaagtaatttagcatctgaaaaaatactacaaaatattgatgatatatttg

SEQ ID NO: 229510 - DNA, 846 bp, Unknown
  Bacterial polypeptide expressing nucleotide sequence isolated from the Sargasso Sea
aattctgatcataaaattttagcggtatactctcagcaagctactaaggctaatcgtggccaaaaaatacttccatctattattgaaaattttgccaaaaaaaaatctttaagattaagaactccaattaaattagacacggatgaagaatataattttattaaaaaattgaaacccgatattggaattgtagttgcttatggtaaaattatacccaaaagatttttaaatttaacaaaatacggttttatcaatctacatgcatcacttctgcctaaatggcgaggagctgctcctatacaaagatcaatcatgaatttggataatgaaactggaataagtataatgaaaatagttgaaaaattagatgcaggaccagttatgcatcaagatagaataaacattggtgaaaattttgatagtttaactttatcaaaagttctagcaaagttgggggcaaaatctattttagatgcaataaacaagataggaaaaggggaggctcaatttaaagagcaggatcatagtaaagctacatatgcaaaaaaaatttcaaaagatgaaagcaagctggaatggaatgaaagtgctaaaaaagtcttagcgaaaatcaacggtttaaatcccaatcctggcgcctggtttaaatataaaaatatgcgatataaagtttggaaggcaaaaatagtaaatcaaaatggtatagctggtcaaactttagataattctctaacaattgcttgtaaggaaaaatcgataaaaattgtcgagattcaaaaagaaggaaaaagtaagcaattaattgatcagtttttgcttggaaataatattaaacaagacgaaacc

SEQ ID NO: 229511 - DNA, 559 bp, Unknown
  Bacterial polypeptide expressing nucleotide sequence isolated from the Sargasso Sea
atgagtcaaaagatagtttttatggggacatccaattttgctgttcctattttaaagtcactttatcaaaatggatatccaatctcagttgtttatacacaaccacccaataaatctaacagaggccaaaaattaaataaatcaccaataaatttattctctgaaaatataagcttagatatcagaactcctcaatctttaaagaataattatgaggaagaatcatatttgactgaattaaaaccagatataattttagtagtttcatatggacaaattattcctaaaaatcttttaactattcctaaatatggatttttaaatattcatgcttctctacttccaaaatggagaggggcagcaccgatacaaagatcaataatgaatctagatgcagaaacaggaattagtataatgaaaataaatgaaaacctagatgaaggtccagtatctaatcaatattctataaatatttcagaaaaaataaactcagaagaattgtctgaaaaattatcagcaatagcttcagaaaaaattttaaatatcttagataatgttt

SEQ ID NO: 229512 - DNA, 598 bp, Unknown
  Bacterial polypeptide expressing nucleotide sequence isolated from the Sargasso Sea
atgctaaaaaaaatagtttttatgggcacacccatgttcgctgttccaattttaaaatcactttatcaaaatggatatcctatttcttgtgtttatactcaaccacctcaaaaatctaaaagaggtcaaaaaattaacaagtcacctattcaattaatttcagaaactttaaatatagaatttagaacaccaaattcattaaaagaaaatttagatgaaattgaatattttaaatcattagaggcagatttggcaatagttgttgcttatggccaaattataccaaagtcatatttaaatttaactaaaaaaggatttattaatatacatgcatctattcttccaaagtggagaggtgctgctccgatccaaagatcaattatgaatttagataaagagacagggattagtattatgaaaataggagaggaactagacacaggacccgtatgtaatgtttataaaattaatatagaaaataatttaaatgctgaagatattaatgaaaagctatcaaatttggctgcagagaaaattttagacaacatagatcacatatatgaggataaagcaaatttgaagaacaagatcactcttt

SEQ ID NO: 229513 - DNA, 682 bp, Unknown
  Bacterial polypeptide expressing nucleotide sequence isolated from the Sargasso Sea
tgctattgtggtagcctatggaaaataatacctaaagaatttttaaatttaacaaaaaagggatttataaatattcacgcttctattcttccaaaatggagaggcgcggctcctatacaaagatcaataatgaatttggatacagaaaccggaatcagtattatgaaaataaatgaggaattagacagtggaccaataagcaatatttacaaaatgaagcttgatcaaaacattaatgctcaagaggtttcggaaaagctctctttattagctgcagataagatattagatgttgtagataatatttttgagggaaaatcaaagtttattgatcaagatcattcaaaagcaacctacgcaaagaaaattattaagagcgaggggcaaattaattggaatgatgaagctccacaaatcattgccaaaataaatggcttatttccgtcaccaggagccttttttaactttggagggcaaagatataaaattttgaaagctaaaattggaaatggtatcggaaaaagtggtgaagttatctcagacaatcttgaaatagcatgtgctaaaaataaatctattaaaattcttgaaattcaaagagagggaaaaaaaattcaaaaagttgaggaatttatgcttgggtcaattataaaaaagggttcgataattttgaatgtttaaa

SEQ ID NO: 229514 - DNA, 847 bp, Unknown
  Bacterial polypeptide expressing nucleotide sequence isolated from the Sargasso Sea
atgtcaaataaagatataaatataattttttttggtaatactgatttttcaaacccaactcttctagcctgtaaaaagaaatttaatcttaaagcaatagtcactaacaaatcaaaaaaaatgggtcgtggacaaaaaattcttgatacacctgtgatgactttagccaaaaaagaaaatttaaaaattattgaaggcgaagacttaagtgacgcaagttttattgatcaactgaaagatttaaatcctgatttctttgttgtagtagcgtatagaattcttccaaagtatttattggatatacctaaatatggttccattaatattcattcttcattgctaccaaaatatagaggagctgcacccattcaacatgcattattaaatcaagaagattcaacaggagtttctacttttttgatagagccgaaagttgatactggaaaaataattgatcaattaaaaattgtaataacaaaagatgataattatggttcattatctaaaaaacttagtgaagcaggagcaggtcttattgaatcttcaataaataaatgtttgcaccattcttcagaattaaccgaacaaaataatagtatggctactttagcacctaaaatttcaaaggaagatttaaaaattaattggaatgataagtctgatgtaatactagctcaagtcaaggctttctcgccaacacctggtgcttttactaccataaatagcaaaagattaaaaatctttaaagccgagtcaattagaaatgataataatcacaaaattggttctatataccatgtaggtaaaaatttttttgacgttcagtgtggaaaaaatgcccattaag

SEQ ID NO: 229515 - DNA, 172 bp, Unknown
  Bacterial polypeptide expressing nucleotide sequence isolated from the Sargasso Sea
tctttcggccatgatattcgtgcggtgtacacccaaccaccacgcccggcaggtagaggtaaaaaaaataaggtttcgccagtacagtgtttagcagagcttaacggattaactgtcaaaactcctcatagtttaaaaaccgacgaggaacaagaatattttgagaaactag

SEQ ID NO: 229516 - DNA, 804 bp, Unknown
  Bacterial polypeptide expressing nucleotide sequence isolated from the Sargasso Sea
aaaatgtagaaaaatcaccaatacatttgtttgctgaaacattgaattttaatgtaagaacaccagatcaacttaagaataatgtgtcagagtatgatcatattaaaaatttagatttagatttagtaattgtagttgcttatggccaaattattccaaatgattttttgtcattaagcaaagaaggttttattaatcttcatgcatcaatacttcctaaatggagaggggcggcaccaattcaaagatcaataatgaaccaagataaagagacaggtattagtgttatgaaaatcaaagaaaaattagatgagggagatgtttcacatatcattaaaataaatattaaagagaacgagaatgctcaaagtttaagcgaaaggctttctgctttagcctctgaaaacattccagatataattgatagtatttttgacaaaaaaattagttttaaacctcaagaccattcaaaagccacatatgcaaaaaaaattgaaaaaacggaaggattaataaattggaatgatagctccgaaagtattattggaaaaataaatggattatatccatatccaggaggttattttttatttaaaggagaaagatataaaattttaaaggcagaaaaatcattttctaaagaaaatccaggaaaagtattaaccaacgatcttgaaattagctgtggaactaattcaattaaaattttagaaattcaaagagaaggaaaaaagtctcaaaaaataaatgagtttttgcctggttctcaaatcaaaaagggcaataatctattagatgcataga

SEQ ID NO: 229517 - DNA, 746 bp, Unknown
  Bacterial polypeptide expressing nucleotide sequence isolated from the Sargasso Sea
catgagtcaaaagatagtttttatgggaacatccaattttgctgttcctattttaaagtcactttatcaaaatggatatcaaatctcagctgtttatactcggccacccaagaaatctaacagaggccaaaaattaaataaatcgccaataaatttattctctgaaaatataagtttagatgtaagaactcctcaatcgttaaaaaataatgacgaggaagaatcatatttaactgaattaaaaccggatataattttagtagtttcatatggccaaattattcctaaaaatcttttaaatattcctaaatatggatttttaaatattcatgcttctctacttccaaaatggagaggagcagcccccatacaaagatcaataatgaatcttgatagagaaacaggtattagcataatgaaaataaatgaaaacttagatgaaggtccggtatgtaatcaatattcgataagtatttcagaaaaaatgaactcagaagaattgtctgaaaaattatcagcaatagcttcagagaaaattttagatatattggataatatttacgaagacaaaatagaatttaaagatcaagattattcacaagcgacctacgcaaaaaaaattcaaaaaatagaaggaaaaattgattggaatgaaaatgcagaaaaaataattggaaaaataaatggattatatccatatcctggggcctttttttcatttaatggagaaagatataaaatattaa

SEQ ID NO: 229518 - DNA, 800 bp, Unknown
  Bacterial polypeptide expressing nucleotide sequence isolated from the Sargasso Sea
catgttcgctgttccaattttaaaatcactttatcaaaatggaccttttatttcttgcgtttatacacaaccacctcaaaaatctaaaagaggtcaaaaaattaacaagtcaccaattcaattaatttcagaaactttaaacattgaatttagaacgccaaattcattaaaagaaaatttagaggagttagagtattttaaatctttagaagcagatttagtaatagttgttgcttatggtcaaattatacccaagtcatatttaaatttaactaaaaaaggatttattaatatacatgcatctattcttccaaaatggagaggtgctgctcctattcaaagatcaattatgaatttagataaagagacaggaattagtattatgaaaataggagaggaactagatacaggacctgtatgtaatatttataaaattaatatagaaaacaatttaaacgctgaagatattaatgaaaagctatcaagtttggctgcagagaaaattttagataatatcgatgaaatatatgaggataaagcaaactttatagaacaagatcactcttcagcgacatacgcaccaaaaattcaaaaatttgaggggcagattaattggaaagaagatgctaaaattataattggtaaaataaatggactttatccagtaccaggagcttatttcatgtttaacggtgagagatataaaatattaaaagcagaaattggacaaacactaggaaaaccaggtgaggttttatctgaccatttagaaatttcgtgcggagataaaaaatcaataa

SEQ ID NO: 229519 - DNA, 804 bp, Unknown
  Bacterial polypeptide expressing nucleotide sequence isolated from the Sargasso Sea
aggacaaaaaattaacaaaagtccaattcaaggtatctctgaaactttaaatatagattatagaatacccaagacacttaaagataatcatgaggagtatgaatttttaaaagaattaaatgccgatcttgcaatagtgtgtgcatatggacaaataattcctgaaaattttttaaacttaactaaaaaaggctttgtaaatattcacgcctcaattcttcctagttggcgaggcgcagcgccaatccagagatcaattatgaatttagatcctgaaacaggcataagtattatgaagatcaaaaaagaattggatagcggaccagttagtaatatttataaaatcaaaatagatcaaaaccaaaatgctcaagaaatttcagaaaaactatccgctttagctgctgaaaaaattttagataatgtggatgatatacttgaagataaggcgaagtttattgatcaggatcattcaaaagctacttatgcaaaaaaaattgataaggaggagtcacggattgattgggacgaggatgcctctaaaataattggaaaaataaatggattatttccctccccaggtgcttcttttagttttaatggcgaaagatataaaattttgaaagccgaaattggtaatggcataggtcaagttggagaaataatttcaaatcagctggaagtagcatgtaagaacaatcaatctattaagattcttgaaattcaaagacaaggaaaaagaccacaaaaaattagcgaattcatgttgggctctcaaattaaaaagggctcaaagttatcaaa

SEQ ID NO: 229520 - DNA, 766 bp, Unknown
  Bacterial polypeptide expressing nucleotide sequence isolated from the Sargasso Sea
tattgcggaacattaagtatagaagtaagaacaccaaaaactttaaaaaaaaattttgaagaatttgaatatttaaaaaaattaggcgcagatattgctatagtaattgcttatggtcaaattatcccagaaaattttttaactttaacaaaaaaaggattcataaatgtgcatgcatctttacttcctaaatttagaggagcagcaccaattcaaagagctataatgaacttaaataaggaaaccggaataagtattatgaaaattaactcaaaattagatgaaggaccagtgtgcagttcttatagtctaaatatcaatgaaaatgataatacagaagttttatctgaaaaactttcaatgctagctgctgaaaaaatattagatgatatcgataaaattttagatgataaggcaatttttaaagaacaagataatagcaaagcaacttatgcaaaaaaaattgataaaaaagaagcaagcattaattggaatacacctgcaaaaaatatagttgcaaacataaatggtttaaatggagcctattttttttttaaaggtactagatataaaattttagaagctaaaacaattaatttagctggaaaacccggagaagttttaagcgatagccttgagataggatgtaaggaaatgtcattaaaagttttaaaaatacaaagagaaggtaaaaggccacaaaaaatttctgaatttttattgggttctcaaattaaaaaaggttcctttttagctaatgcataga

SEQ ID NO: 229521 - DNA, 595 bp, Unknown
  Bacterial polypeptide expressing nucleotide sequence isolated from the Sargasso Sea
ttcttgcttccatgttggagaggagcagcacctattgaacatgctttgcttagcggagatcaaaatactggagttactatttttaaactagtagaaaaaatggatgctgggccaattattactcaagaatcaattaatatagatgataagattagcaaagaagaacttaccaaaagattgaattatgttggagtcaatcttttaaaatcagttttaccaataatttttaatcaaaaaataaattataaaactcaagatgataacaaagcaacatatgctaaaaaaattacccctgatattagaagacttaattttaatgaaaatgctaaatcagtttataataaaattagagctttctctcccaaacctggtgcatggtttaattataaaaaagaacgaattaaaataattaaatcaaattttgttgaaggtgattttgaatcatctagaattttgaataataaatttcatattggatgtaaatttggtaaaatttgtccagaaatcattcaaaaagaaggaaaaaaaccattgaatttggaaaattttttgagaggttttaaaattaaggttggcgataaagttaatgaataaa

SEQ ID NO: 229522 - DNA, 839 bp, Unknown
  Bacterial polypeptide expressing nucleotide sequence isolated from the Sargasso Sea
gttgtactatagattaaatggctttaaaaataatgttttatggggaacaccaaactttgctgttcctacactcaaagcaattcataagtctgatcataaaattttagaagtttatactcaacctgcaactaaaagcggtagaggacaaaaattaaaacattcagacatttttaattgtgcaaaacaactgaacttaagcattagatcccctgataaacttgaaacaaatgaggaaataaatcacataaaaaaactaaaaccagatttagcagtagtagtcgcttatggaaaaatattgccatccagtctgttaagtattgaaaaattactttttataaatgctcatgcgtctttattacctaaatggagaggagcagctccaatgcaaagagcgattatgaaccaggaatccgaaacgggtgtatcaattatgaaaattatacctcaactagatgctggtcctgttattttacaagagaaaattaaaatttcaaaagaaatgtcttatgaagatttaagtgaaagaatttcatatatcggagcaaaattaattttggactcaatgaaattaattgaaaataacaaggcaatttttattgatcaagaagagtctaacgcaacctatgcaaaaaaaattcataaaaatgaatctaaaattgattggaatgaggacgcaaataaaattattgcaaagattaacgctttccatccaaatcctggttgctggtttaaactctcaaatgcaagaataaaaattgtaaaagcaatagaggttgaaaaatcaggtgaaacaggcacaattcttgatgataaaatgacaatcgcttgtgcaaaaaatt

SEQ ID NO: 229523 - DNA, 479 bp, Unknown
  Bacterial polypeptide expressing nucleotide sequence isolated from the Sargasso Sea
tttgcaaattatactttttgccagttcagaattttctcttcccttattagacattattaataattctgaccataaactatgtgctatatatactcaaccaccttctatttcaggaagaggtatgagacttagagataatgctataggtataaaggctaaggaattaaacattcaacttttttatccctccaacgttaataacacaattgagataaataaatttaaaagtttaaatccagatattgctatagtatctgcttatggtcaaatactgtcttcaaaattacttaaagcacctaaatttggatttttaaatttacacccttctttgttaccaagatggcgtggggctgcacccatagaaagagctttaatgtcaggtgataaagaaactgggatttgcaccataaaaatggttagagaacttgactcaggtcctatattggctagagaaaaatttgtaattaattctaatgaaa

SEQ ID NO: 229524 - DNA, 785 bp, Unknown
  Bacterial polypeptide expressing nucleotide sequence isolated from the Sargasso Sea
tctgttttggggaacgccggcctatgccgtgcccaccctggaagccctgcatggggcaggtcatcagatcgtcggtgtggtgacccaacccgatcgccggcgcggacgcggcagctctttgatgccctctccggtcaaggcgcgcgctttggaattgactggagacgtcacagtgctgacgcctcagcgcattcgccgtgagcctgagacccaggcgcagttggctgctttgcaggctgatctctcggttgttgtggcctttggtcagttgctgccgccggaggtgttgcagcaacctcccttggggtgttggaacggccacggctcgttgttgccgcgctggcgtggtgcggggccgattcagtggtgcctgatggagggcgatgcccaaaccggtgtcggcatcatggccatggagccagggttggatacgggtccggtgctgctcgagcgtgccctcgatgttcagctgctggagaacgcagcggccttggccgggcgactgagccatctcactgcagaactgtttgtggaggcgttgccgcagattgaggcggcaggtcctggccctgaagccgagcgcctcagccgcttggcggtgacaccgcaaagcgatgacggcgtcagcttggctcgcctgctcagcaaagacgactaccgccttgattggagtgagcgcgccttggcgatccaccgcaaggtgatggggttgttccctggggcctattgcagctggcgcggcaagcgtttgaagctcctggccaccgagccgttggtggcccgtt

SEQ ID NO: 229525 - DNA, 883 bp, Unknown
  Bacterial polypeptide expressing nucleotide sequence isolated from the Sargasso Sea
aaaaaattatttttatgggtacttctatgttcgctgtgccaattttaaaatctttatatcaaaatggttatcaaatatcagtggtttatactcagcctcctcaaaaatctcatcgtggacaaaaataaacaaatcgccaattcagggaatttcagaaacattaaatatagactttagatcaccacaatctttgaagagtaataataaagaaataaactttataaagaatttaaatgttgatctagcaatagtagttgcctatgggcaaataattccaaaagaatatttaaatttaactaaaaaaggctttataaatatacatggatctattcttcctaagtggaggggtgcagcacccatccaaagatcaattatgaatttagatgaagaaacaggtattagcataatgaaaattgttgaagagttagatagtggaccaattagtaaaatttataagataaaattagatcaaaataataatgcactagaaatatcagagcaattatcaaatctggctgcagaaaaaattttagattatgttgatgaagtattagaggataaagtaaaatttaatgaacaagatcactcaaaagctacttatgcaaaaaagatagataaatctgagggtcagatagattggaacgatgaagctttaaagattattggaaagataaatggcttgttcccttcacctggggcttattttaattttaatggagaaagatataaaattttaaaagctgaaattggaaatggcataggtaaaattggtgaggtaatatcagatagattagaaattgcttgcggtaataataaatctattagaattattgaaattcagagacaaggaaaaaaatcccaaaaaattggtgaatttatgcat

SEQ ID NO: 229526 - DNA, 784 bp, Unknown
  Bacterial polypeptide expressing nucleotide sequence isolated from the Sargasso Sea
aatgcgtgttgtgtttatgggtaatcctgaatttgcgattcctacattaaaattacttcaaaaatctcgacatgatttattagcggttgtttctaataaacctaagcctatgggtagaggtcgtgctctaagatctactccagtaggccaatttgccaaggaaaataaaataaagttactcgaacctgatagtctcaacgcaattgattttcaaaaccagctgaaaaatttagaagcagatatatttgtagtagttgcatacagaattttacctgaaaaagtaataggaattcctaaacatggagcaataaatcttcatgtctctttattaccaaaatacagaggagctgcaccaatccaatgggcattgatgaatggggacactgaaactggcgtaactgtattccaaataaatagaaaagtagatacaggagatattttggttcaaaaaaaatttcccatttataaagatgacaatatgttgactcttggaacaagattatgtaactcaggcgcaaaaattataattgatgcaattggtaaaatagaagaggggtctattaaaatcttaaaacaaacccaagaatctgtaagctttgctccaaaaattactaaaaaaatgcgatgtattaattgggattggccagcaataaaaattaacaactgggtacgtggtttatctccatatccttcaatgtatacatttttaaatggtaaaaatttgaaagtatttaagacctttattgaaaaaagttctatttctaaaccggggagaaatcattaa

SEQ ID NO: 229527 - DNA, 410 bp, Unknown
  Bacterial polypeptide expressing nucleotide sequence isolated from the Sargasso Sea
tgaggtcgttaatgaatttgatcgttacacgcccaccaaacaagacgactctcaagcgacctacgcgaaaaagctatcaaaagaagaagccctgattaattgggcagacgatgctgagcaaatagagcgaaatatccgcgccttcaacccttggcctgtagcgtggatgcaggtcgaagatcagaacgttaaagtatggtctgccagcgttgttcctttaaataaaggtgccacgccaggtacggtagtcagtgccaataaagagggcattactatcgctacggggcgcgatgcgctttgcattacaactcttcaaattcctggcaaaaaggcgcttccagcgtcagacgttatcaatgctcgccaaacgtggtttgaagtgggtcgttgtctgacacaagcggactaaa

SEQ ID NO: 229528 - DNA, 668 bp, Unknown
  Bacterial polypeptide expressing nucleotide sequence isolated from the Sargasso Sea
agtcgtcgcttatggacaaataatacccaaaagatttttagatattcctaaatttgggtttgttaatgttcacgcttcattgttaccgaagtggaggggagcagctcctatgcaaagatctataatgaatttagacaaagaaactggtgtaagtattatgaaaattgttgaaaaacttgacgcaggtcctgttattcatcaggataaaattaatttaaatgaaaatatagatacctcaatattatcaaagttgctctctcagttaggtgcaaaatctttgatgaatgcaattgaaaaaatagaaaacaaggaagctaacttcgttgagcaaaatcataatgaagctacatatgcaaaaaaaattacaaaacaagaggctgaattaaaatggagtgaaaatgcaaatataattttagcaaaaattaatggattaaacccaaaccctggagcttggtttaaatataaaaatgaaagatataaagtgtggaaagcaaaaatatccaatgcgagtggtttacagggatcaactattgataataatttaacgattgcatgtaaagataaatcaataagtatacttgaaatacaaaaagaggggaaaagtagacaagcaaccgatcaatttctacttggcagcaaaattcctaaaggtgaaaaaattttataat

SEQ ID NO: 229529 - DNA, 854 bp, Unknown
  Bacterial polypeptide expressing nucleotide sequence isolated from the Sargasso Sea
catgcaaaaaaaaatcggttttatgggtacgccaaactttgctgtcccaattttaaaaaatatttatcaaaatggttatgaggtttctgttatttatacacagccaccaagcaaatcaaatagaggacaaaagtttgaaaaatctccaatacattcttttgctgaaacacttagctatgttataagaactcctaatcagttaaaaaataataaatctgaatatgaatacttcaaaaatctagatttagatttagttattgtggttgcttatggaataataatcccaaaagaattcttatcactaagcaaacaaggttttattaatcttcatgcatcgatacttccaaaatggaggggcgcagctccgatccaaagatcaataatgaacaatgataaagaaactggaatcagtgtgatgaaaataaatgaaaaacttgacgagggagatatttcagatgtatttaaaattagcattatggaaaatgaaaatgctcaggttttatcagatagactttcaaatttagcatcagaaaaaatttcatacataatagatggtattattgataaagaagtaaattttaaacctcaagatcacacccaggccacatatgcagaaaaaataaaaaaaatggaaggtttaattgactggaatgataaagcagaaaacatcattggaaaaataaatggtttatatccttatcccggtgggtattttatttataggggagaaagatacaaaattttaaaagcgcaaatatctttaaataaagatcaaccaggcaaagtattatctaatgatctagaaattagttgtggtgaaaattcaattaaaattttagaaattcaacgcgaag

SEQ ID NO: 229530 - DNA, 532 bp, Unknown
  Bacterial polypeptide expressing nucleotide sequence isolated from the Sargasso Sea
atgaacgttgtatttatgggtacccccgcatttgtggtgccagttctcaatgtagtaaatcaaatatgtaaagaagaaaaatggaaactgacctgtgtctatacggccccagataagccaaaaggtagaggccaagtacttactgcatctccggtaaaggaacgagctcaagagttaggaatcgaagttctatcacctcctaaactaacggaggcaggtacaatagcgcaatttagaagattagaaccaacagtggtaattcttgcggcgttcggtttacttttacctcctccttttttatttgaccctccttttggatcaattaatattcacccctccctattaccaaaatatagaggagctgctcctgtcgctggggcaattttggaaggagcgatggaaacgggaacgtcaataattcgcatggacgaaggcttggacacgggccctttactgagccaaagaaaagtagcacttcaaggcaatgaaacgagcgaaaagctaacgcggcaattgttttctctgggggcag

SEQ ID NO: 229531 - DNA, 676 bp, Unknown
  Bacterial polypeptide expressing nucleotide sequence isolated from the Sargasso Sea
atgagcaaaaaaattgcttttatgggtacacccagtatttcgggtcaaatattgaaatctttgtatcaaaatggttttgatattgaaattgtatacacccagccacctattgcatcaaatagaggacataaattaaataaatctcctgttcatatcatggctgaaatattaaatattccagttagaactccagtaaaattagataatcttgaggaaaagaaatttattaaaaataaaaatattgatttaggtattgttgttgcatatggccaaattttaaaaaaagatatcttagtattgccaaaatttggatggataaacatccattattcacttctaccaaaattacgaggtgcagctccaatccaaagggccattatgaataatgagaatttaacaggaatttcaattatgaagatggatgagggattagacacaggtccagtttgtaaccaatatccaataaacatattagataatgaaaatagtgaggatttgtctaaaagattaagtaatttagcttctgaaaagattttagaaaatattgataatatttttgaaaatagagctttattcaaagatcaagatcatagtcaatcatcatatgcaaaaaaaatcaaaaaagaagagggaaaaataattggcaagaaaataataaaaagattatcggaaaaat

SEQ ID NO: 229532 - DNA, 686 bp, Unknown
  Bacterial polypeptide expressing nucleotide sequence isolated from the Sargasso Sea
aaacccagatttaattatagttgtttcttatggtcaaattattccaaaaaatttattaaacattcctaaatatggatttttaaatattcatgcttctttgttaccggtatggagaggagccgcacccatacaaagatcaatcatgaatttagataaagaaactggaattagtataatgaaaataaatgaaaacttagacgaaggtccggtttgcaaacaatactctttggaaatttcagaacaaatgaattcagaagaattatctgaaaaattatcactacttgcttcagaaaaaattttagatgttctagacaatatttatgatggaaacattaattttcaggatcaagatcattcaaaagcaacgtatgcaaaaaaaattgaaaagactgagggaaaaattaattggaatgaaaatgcaagtaaaataattgcaaaaataaacggtctttatccatatccaggagcttttttcttatttaatggagaaagatataaaatattaaatgctgaaaaatcttactcaagtggaaaacctggaaatattataactgaagattttgaaatatgttgcggagaagattctataaaagtattaagtattcaaagagaaggcaaaaaagttcaaaaaattaaggagtttttgcttggaagcaaaataaataaaggcaccaatatctcttaat

SEQ ID NO: 229533 - DNA, 799 bp, Unknown
  Bacterial polypeptide expressing nucleotide sequence isolated from the Sargasso Sea
tatgagaaatatcttcatgggaaccccttattttgggaaggaaatcttaaaaaaacttcatacagatttttctgttcacactgttgtttgtcaaccagataaacctgtaggtagggaaaaaaaaattatctatagtgaagttaagaattttgctttaaaagcaaacctaaagatacttcaacccgaaaaaataaaaaataatgaagcattcttaaatgaattaagaaaaatcaaccctgattttatttttgttgctgcttatggaaaaatccttactaatgatatattggatattcctaaatttggatgtataaatgttcattcatcattactaccaaagtatcgaggagctgcacccattaactggtctataataaatggtgataaagaaactggagttacaattatggaaatggatgaaggtatggatacagggaacatcattttatcgaaaaaaattgctattgcagaaagtgataatgtctcgtcattgacagagaaactagcctcatgtggttgtgatgcgattggtgaatttgttcaaaagtttttaaaaactggaagtatagattcaaagccacaagataatgcgcttgctagcattgcaccaaagatagataaagaaaaatgtaaaattgattggagtggaaaatcatttgatatattaaatctaattaggggatctaatccatggcctggagctacaacaactttgtttaaaaataaaataacaatatgggaagctaaaaatgcaggtcctgcattagcaaaacctggttctatcagaaaaatgaaaaaa

SEQ ID NO: 229534 - DNA, 440 bp, Unknown
  Bacterial polypeptide expressing nucleotide sequence isolated from the Sargasso Sea
aatgtcaaagaaaatagtttttatgggcacacccatgtttgctgttcctattttaaaatcactttatcaaaatggatatcctgtttcttgtgtttatactcaaccacctcaaaaatctaaaagaggtcaaaaaattaacaagtcacctattcaattaatttcagaaactttaaatatagaatttagaacaccaaattcattaaaggaaaatttggaggaattagaatattttaaatcattagaggcagatttggcaatagttgttgcttatggtcaaattataccaaagtcatatttaaatttaactaaaaaaggatttattaatattcatgcatctatccttccaaagtggagaggtgctgctccgattcaaagatcaattatgaatttagataaagagacagggattagtattatgaaaataggagaggaactagata

SEQ ID NO: 229535 - DNA, 790 bp, Unknown
  Bacterial polypeptide expressing nucleotide sequence isolated from the Sargasso Sea
gatgaatatcatttttatgggcactccagatttcgcaataccagtgcttgaacgcctacataaacaccatggcatacctgcagtatttaccgcccccagcaaacggacaggtagatcacaagtgatgactaactctccggtccaacagtgggcacaaagttacgacatccctgtctatacacccaaatcattaaggctgcctgacgtacaagaactaatcgaaagtatcgaacccgatctagttgtcgttgcagcttatggattatttatacctgatactattttgacccttcctagacttggatgctggaatatacatccttcattactccctaagcttagagggcctagcccggtcgtcacaagtatcttgcagagagacatagttaccggagtctccatcatgaaactagatcaaaatatggacagcgggccaatccttgcgcagcattcttatcacatgagtttctcagagacggccagctcattaacaagatcactgtttgaaattggagcagatttactgcacgactgcatagcaagagcggatagagataatttagtggagactatcgcccaaaacgatgctgaagccacttttacatcgaaacaaaggaaagaggacggattaataaactgggacagtaccagccaagacatagaagcgcaaattcgggcgtatactccttggcctggctcattcacatactggaatgggaaaaatttaagatattatctgcgaatctcccaactgcagactcagaccgccaattccctaccggtactgtca

SEQ ID NO: 229536 - DNA, 793 bp, Unknown
  Bacterial polypeptide expressing nucleotide sequence isolated from the Sargasso Sea
aaaaaggttataccttctccggtaaaagaaattggcattaataatggtatcggggttttacaaccctactccttgaaagacgaaagcattgtaagatctttagagtccttaaaacctgatcttttactcgtcgttgcctatgggcttttaatacccaataaagtattagatattgctgaaaaggggtctatcaatattcatgcctccattcttccaagatggcggggggcggcgccaatggaatactccatatattctggagacaatgagtctgggattagctatatgcgaatgaccgaaggccttgatgaggggccaaccttagagatccataaatgtaaaattgaaaaagaagacgacttaggtacgctagaaaataaatttatggaactaagcaaaaaaagcctattaaattttttagaaaaatttgagagaggagaattaaaagaaacacctcaagaaaattctaaagcgacgttcgcaccgaaaattgattctgattttcaaaaaatagattggaattgtttgtctaatgaaattgaccaaaaaataagatcactcaacccaaaatacggggcttatacattcttaggaaataaaaggataaaaatttacaaaagttcgcccgctaaaaatacttcaaagcttgaccccgggaagatagaaatttcagaagatggaaaattattagttggctgcagtcaagaaacagcaattataattgatacagttcaaatggaaggcaaaagcgctattcaatcggaagagtttataagagggtatcgctctttaa

SEQ ID NO: 229537 - DNA, 393 bp, Unknown
  Bacterial polypeptide expressing nucleotide sequence isolated from the Sargasso Sea
tttgcgaattgtaatttttgctagttcaaagttttctattcctttattagaaaaacttcacaaatctgatcatgagatatgtgcagtttattctcagccaccaagtattgcaggaagaggcatgaggttaatagaaaatgaagtatgcttgaagtctagagaattaaatttacaacttttatttccagataatataaataaagatattgaaattaataaactagaaagtatgaaaccagatattgcagttgtttctgcttatggtcaaattttgtcatcaaaattacttagagttccaaaatttggatttattaatttacacccgtctctattaccaaggtggcgtggagctgcaccaattgaaagagctttgatggctggagacaaagaaac

SEQ ID NO: 229538 - DNA, 841 bp, Unknown
  Bacterial polypeptide expressing nucleotide sequence isolated from the Sargasso Sea
gggatttacacacaagagccaaagaaaaaatttagaaggacaaaaaaaatttaacacaccagttcaacgatgggcagagagtcaacttctacctgtttttactcctaaaatacttgatgataaatctcttacagaatttcaatcattaaagcctgaccttgcaatactttttgcttatggaaaaatagttccactaaattggttaaacacccctttaaatggttttattaatattcatgcatcgcttctaccaagatggagaggagcagcacctgttcaaagagccattgaaaataatgataaagagacaggtattagtattatcaaaatgaatgataaaattgatgaaggcccaattttagcccaacagaatattgaaattaatgaattaactgatggaaagcaattaattgatcaaattagtcatgactcttgctcattattattcaacacgctaaaaaaatattttctaggccaagtccaattaaaagaacaagaccattcacaatccacatacgcaaaaaaaatagataaagttgaaacacgagtggattggggactatctgcagatataattgaaaaaaaagtaagagccttttacccatcaccagcaatgtggtttaaatataagggtcaaagattcaaaattttgaaagctaaaatttctaacaaacaagatgatgagggtaagataattaatttacctcttactgtagcatgtaaaaataacagcctagatattttaaaaattcaagccgaaggaaagaaaccactagatatcaaagaatttattttaggaaataatcaatttcaattaaatgcaatgatcgataatgactaa

SEQ ID NO: 229539 - DNA, 565 bp, Unknown
  Bacterial polypeptide expressing nucleotide sequence isolated from the Sargasso Sea
aatggcaaaaaagttagtctttatgggtacgcctatgtttgctgtaccaattttaaaatctttatatcaaaatggatataatatttcttgtgtgtatacacagccacctcaaaaatcaaaaagaggacaaaaaattaataagtctccaatacaaggtatttctgaaactttaaatttagaatatagaacgccgccagttttaaataatgaagaggagtataattttttaaattctttagatgctgatttagcaatagttgttgcttacggacaaatcatacctaaaaaatttctaagcttaactaaaataggttttataaatatacatgcatccttactgcctaaatggagaggtgctgcaccaattcaaagatcaattatgaatttagatcaagaaactggaataagtataatgagaattgctgaaaaattagatacaggaccagtttgtaataattataaaattgaactcaatgaaaatttgaatgcgttagaaattagtgaaaagctttctaacttagcagcagaaaaaattttagataatttagatgatattttagaggat

SEQ ID NO: 229540 - DNA, 661 bp, Unknown
  Bacterial polypeptide expressing nucleotide sequence isolated from the Sargasso Sea
atgagcaaaaaaattgctttcatgggtacacccactatttctgggcaaatactcaagtcattgtaccaaaatggttttgatattgaggttgtttatactcaaccacctgtagcatcgaatagagggcatagattaaataagtcacccgttcatataatggctgaaatattaaatatacctgttagaactccaattgtattagataatactgaagaaaaaaattttcttaagaaacaaaatataagtttgggtattgttgttgcctacggtcaaattcttaaaaaggatattttagaaattccaaaatatggatggataaatattcattattcgcttttaccaaaattaagaggtgctgctcctattcaaagagctattatgaacagcgagaaatcaacaggtatttctataatgaaaattgatgaaggtttagattctggtcccgtctgtaatcaatattctataaatattttagaaaatgaaaatagtgaggatctttctcaaagattaagtaatttagcatctgaaaaaattctacaaaatatcgatgatatattggataataaagtttcttttaaagagcaagatcatagtaaatctacatatgcaaaaaaaattaaaaaagaagaaggaaaaataaattgggaggatagtaattaaa

SEQ ID NO: 229541 - DNA, 778 bp, Unknown
  Bacterial polypeptide expressing nucleotide sequence isolated from the Sargasso Sea
agcattgagctttttgcaaaaaaacattcactaaatacaagaactccaacaaaattagatatcgatgaagaatataattttttaaaagagcttaagcctgacatcgtaattgtagtggcttacggtaaaattataccaaaaagatttttaaatttatcaaaatttggttttataaatatccatgcttcactattgccaaaatggaggggagctgccccgattcaaagatcaattatgaatttagataatgaaaccggaataagtattatgaaaatagttgaaggcctggattcaggacctgtgatgcaacaaaataaaattaaaataaatgaaaacatagatagtctaaccctttcaaaagttctttctaagctcggggcaaaatccattatcgaagcaataaaaaagatagaaaaaggagaagcaaaatttgtagaacaagaccacaaccaaacaacctatgcaaaaaaaattttaaaaacagaagcacgaattcaatgggatgaaacagctagaaaaattctttcaaaaattaatggcttaaatcccaacccaggggcttggttcgaattcaaaggtcaaaggtataaagtttggaaagcaaaaatattaagtcaaaaaggtgttcctgggaaaatattagacaacaaactaacagttgcttgtaaagataaggcaataaaaattcttgaaattcaaaaagaaggcaaggacagacaagaaacagaacagtttctgcttggcaataaaatgaaacaaggggagagcatattttaat

SEQ ID NO: 229542 - DNA, 763 bp, Unknown
  Bacterial polypeptide expressing nucleotide sequence isolated from the Sargasso Sea
ttttcagaaaaagaaggaattaaagttagaacaaatcatactaaaagatggaaaagtttatgatgaattcatgggattacaagctgatttagttgttgttatagcttatggaaaaataattcctgaaaattatttaaaaaattctaatttaatatttttaaatgtacatgcttctttacttccaaagtggagaggtgctgctcctattgaaagggccatcctaaataaagatattgaaacaggtatttcaattatgaaaatagaaaaaacactagacacaggaccttttataaaacaaataaaagttaagatagataaagacacaaatagcggtgaattgattaaaaaattatcagttgtgggagccaaagctttattagagtcaattgaactggtgtcttcaggtaaagcaattttcatcaaacaaaatgaaaaagatgcaacttatgcaaaaaaaattgacaaagctgaaacaagaattaattggaaagaaaattctgaaaacattattgcaaagattaacgcttttaatcccaaacctggtgcatggtttttatttaacggtgaaagaataaaaattttaaaggctaagtccgttataatgaatggtgaagaaggaaaaattctcgacaacaaactgactgtgggttgttcaaataactcaatacaaattttaagaatacaaagagagggtaaaaaggagatgaacgctgaggaatttttggttggcaataatttaaaaaaaggggttaaattaaattga

SEQ ID NO: 229543 - DNA, 409 bp, Unknown
  Bacterial polypeptide expressing nucleotide sequence isolated from the Sargasso Sea
gatgaaaattatttttatgggcaatcctgaatttgcttgccccccactcaaagctttttttgactctgatcacgatttagttggtgttattagcaataaaccaaaaagaatgaagcgatcaatgaataaaagctttactccattgggaaggttagcgattgatcttgatcaaaatttatttacaacggataacctttctgatgtaaatctacagacatgggcaaaaaaattaaaaccagacatctttattgttgttgcctttaaaattttaccgaatactcttctcaaaattccaaaaattggcgctatcaatcttcatgcatccttattgccaaggtacagaggggcagctccaattcagcacgctctaattaatggtgacaaagtaactggaaactctacttttttt

SEQ ID NO: 229544 - DNA, 595 bp, Unknown
  Bacterial polypeptide expressing nucleotide sequence isolated from the Sargasso Sea
atgacaaatatagtttttatgggtacaccaaaatttgctgtaccaactttaagacatttatctaataaatttaatattaaatgtgtatttactcaaccacctagtaaatcaaatagaggtcaaaaatttacgaaatccccaattcacataagcgcagaagaacttaatttaaaaattaaaacaccaaaaaatattgatgaagaatttgaatacttaaaagaactaaatttagatcttggaattgtagttgcttatggtcagattcttccaaagaaagttttaaatttaagtaaaaaagggtttttaaatattcatgcttcattactacctaaatggagaggagcagccccaatacaaagatcaatattgagtaatgaaaaagaaacaggtgtatcatttatgagaattaatgaaaaattagactcaggaccaatatgcagcaaatataaaataaaaatttcagaccaagataatactgaaattttatcagaaaaattatctaatcttagtgcagaaaaaatctttgaaaatgtacagaaaattttaaaggacgaagcaatttttgaggatcaaaatgaagcacaagctacatagc

SEQ ID NO: 229545 - DNA, 884 bp, Unknown
  Bacterial polypeptide expressing nucleotide sequence isolated from the Sargasso Sea
tatgaacaatattcaagtgaaaaaaacaaaaataattttttttggaactccagattttgcagtaaaatcattaaaagtaattaatgacaactttgatgttttatgtgttgttacgtcaccagataaaaaatcaggaagagggttaaaaattaatgagagtgaagttaaaaggttttcatctaataataatatcccagttaaacaacctgagaacctcacaaatgaagattttttaggtgaaatttcatctttaggtgctgaattatttattgtagttgcatttaaaaaattgccaaaagaagtattttcgataccagcacttggcacaatcaatcttcatgcgtctcttcttcctgactatagaggagctgcaccaattaattgggttttaataaataatgagagaattacaggtgttacaacattttttattaatgaaaaaattgatcatggagatattatattaaaaaaagaaattttaataaatgatgatgataattttaaaagtctatataatagactttcagttattggttcagaggttttgttaaagacgattaagattgttgctagcggtaaagctaaaattcaaaagcaagaagaaaataaagatttaaatatggcccctaagttaaatgcaagaaatacaagaattaactggaatgataatattgataaaattttggggatgattagaggtctatcacctcaacctggatcatggacaactctaaaaaatggagaaaaagagattagaatgaagattttaaaggcaagtttatttagtagaaataattttagagagtcatctattggaaaagtattagtttataatgataacatacatattaattcaaaagatggtattgtaaattgtatcaaaa

SEQ ID NO: 229546 - DNA, 322 bp, Unknown
  Bacterial polypeptide expressing nucleotide sequence isolated from the Sargasso Sea
aatgaagatcgtatttatgggaacgcctgaatttgcaattcctaccatacaaaaaatccacaactcttcccactcccttttatccgtggtaacccaacctgaccggcccaaaggccgagggcaaaaacaggtctcttcccctattaaaaattttgcagttgaaaataacattcccgttctgcaacctgaaaaggtcaacacggaagattttataagttcccttttaaaaaatagacccgattacattatagtggttgcttttggacagatacttggtgaaaaatttctaaaaattccaaaacagtttgcatcaattacactc

SEQ ID NO: 229547 - DNA, 547 bp, Unknown
  Bacterial polypeptide expressing nucleotide sequence isolated from the Sargasso Sea
gcaatgttgatggatgaagggcttgataccggcaagctgttggcgcggcgcacctgtcagatagacgataccgaaacagccggcagcctgcatgataaactggccgcgctgaatgcaaagctgctagatgatgtggtcatggatatcgccagtttacgcgcggcagcaacaccgcaagatgacagtcaagccatatatgcggccaaaatatcgtcacaagaggcggaaattgactggtcgcgcgacagcgccacattggattgccatatccgcgcctttacgccgtttccgggggcatggtgtcacgggccaaaaggccgcttgcggattctgcgcgcccggccagtggcaatggaatggccgcaaaatgcagccgccggcagcgtcgtttttgtcagtaaaaacaccctgcatctggctactggcgatggcgctctggcaattgaacagctgcagccggctggcaaaaaaccaatgtcagtggcggattttctgaatgggcaaaaactgaccagcggccagctatttatcgcacaggcaggctgac

SEQ ID NO: 229548 - DNA, 802 bp, Unknown
  Bacterial polypeptide expressing nucleotide sequence isolated from the Sargasso Sea
atgagattgagagataatgctataggaagaaaggctaaggaattaaatattaaactcttttatccctctaacattaataacacaattgaaataaataaatttaaaagtttagatccagatattgctatagtatcagcttatggtcaaatactgtcttcaaatttacttaaagtacctaaatttggatttttaaatttacacccttctttgttaccaagatggcgtggggctgcacccattgaaagagctttaatgtcaggtgataaagaaactggaatttgcaccataaaaatggttagggaacttgactcaggtcctattttggctagagaaaaatttgtaatcaattctgatgaaactaacactagtttatcgtataaacttagtaaaattggagcacttcaactattagaagttataaataattttgaatttatttctgaaattcctcaagaaagtgatggaattacttacgcatctaaaatccaaaaaagtgaaacaagaattaattggaatttatcaggtatagtagttgatagattgattagaagtttatctgaaaaacctggggcttggtgtattttaaatggttctagagtaaaaatattgaactcaaaatatgtaaaattagaaggaaaaacaggtcataatattgtatcttctgcaaataaatcatctcttattattgcttgcagagaaggcgcagtagagataatcactcttcaaaaagaagggaaaaaacctgtttctgcaaaggaatttcttagtggttataaagaaaacaatatatattttaattaag

SEQ ID NO: 229549 - DNA, 595 bp, Unknown
  Bacterial polypeptide expressing nucleotide sequence isolated from the Sargasso Sea
ttttttgcctttttggaggggagcagcccctataaatcatgtgatttttaatagagacccctatacaggagtatccataatcaaaatgagtgaagaattagatgccgggcctatattgcgtcaggagaaagtaatgcttgatcataaggaaacctttgggtctttgcatcgagtattgagtgaactaggggcaaaaaatctgttgaaaacgctaaataacttttttgaaattgaggaaatatcacaaaatgaaaagttcgttagttatgcccccaagattaaaaaattggatgcaaaattagacttcaatagccatgcctctgccttagaggccagaattagaggcttagcgccaacaccaggcgcctggtttgaatataagaaggagcgcttcaaagtatttagtgctgaagtagtggaaggtaatggaaaagctggctcaattattaatgaaaatttgactatcgcctgtggtgagaaagcattaaacattcttaaaattcaaaggcagggaaaagatattatgagcgtaagtgacttgcttagaggtttcaaattcaaaaaaggtgacaccgttaaccattcaactcattag

SEQ ID NO: 229550 - DNA, 493 bp, Unknown
  Bacterial polypeptide expressing nucleotide sequence isolated from the Sargasso Sea
gatgaaaaaaaatagaaagataaatatagcttttgcaggtacccctgaaattgctttcaatatatttgaagaattatccaaaaaagattttcaaataaactttattcttactcaaactgataaaaaagctggcagaggtgcccatcttaagagttctaggtttttagaaaaaaaagagacatataaccttctccaacctgagaatttaaatgatggtaactttaaaaaaattattcttaatcagagcatagatcttcttattgttgtggcctatggcaaaattttaccaagatggctcttggaacatccaaaatatggctgcttaaatgttcatttttctaagttgccgaaatggcgaggtgcagcgcctatgcaaagagctattgctaatggtgataaaagctttggagtcagttttatgaagatagaggaaaaacttgatacaggagggatatataaaactttttctactagcaatcgtggccaagatatt

SEQ ID NO: 229551 - DNA, 952 bp, Unknown
  Bacterial polypeptide expressing nucleotide sequence isolated from the Sargasso Sea
aatgaaaaaaacaaaaataattttttttggaactccagattttgcagtaaaatcattaaaagcaataaatgacagttttgatgttgtttgtgttgttacttcacaagacaaaaaatcaggaagagggttaaaaatgaatgaaagtgaagttaaaaggttttcatctgataacaatatcccaattaaacaacctgagaatcttacaaatgaggattttttatatgaaatttcgtctttaggtgctgaattatttattgtagttgcatttaaaaaattaccaaaagaagtattttcgataccagcacttggcacaatcaatcttcatgcgtctcttcttcctgactatagaggagcagcacccattaattgggttttaataaataatgagagaattacaggtgttacgactttttttattaatgaagaaattgatcatggagacattatactaaaacaagaaattttaataaatgataatgatgattttaaaagtctatataatagactgtcagttattggttcagaggttctgttaaagacgattaagattgttgctagcggtaaagctaaaattcaaaagcaagatcaaagcaaagatttaaatttagctcctaagttaaattcaacaaatacaagaattaactggaatgacaacactaataaaatcttggggatgattagaggtttgtcacctagacctggctcttggacaactttaaaaaatggagataaggaagttagagtaaagatcctaaaagcaagtttattgagaagaagaagttccaatgaatcatcaattggaaaagtattagttattaataatgaaatacatattttttcaaaagacggtgtaattaattgtattagaattcaactagagaacaaaaaggagatgttgtcaaaagacctattaaatgggtataaattttatgataattcaattgtttattag

SEQ ID NO: 229552 - DNA, 827 bp, Unknown
  Bacterial polypeptide expressing nucleotide sequence isolated from the Sargasso Sea
aatggcaaaaattattttttttggtactccagaatttgcattgcctattttaagaaaaataaataacagcaaacatgaaatactaacagtatatactcaatcacctaaaaaatctctgagaggtcaaaagataaacaaaagtgttattcatgaatttgctgaaaaaaataaattaaatgtaaagactcctgaacgtttagaagttgaagaaaatttcttagaaagtaatagttttgatctaggaatagtcgttgcttatggaaaattaattccaaagaaaattttaaatttttctaagtatggctttataaatatacatgcatcgttattaccaaaatatagaggtgctgcacccatacaaagatctattataaatcgagacaaggaaactggtattagttttatgaaaataattgaaaaattagatgcgggtccaatctgtaaaaaatacaaaatagaaattaagaaaaatgaaaattataattcattattagacagacttagcaatctagctgaggaaactgtaattgagattattgataaaattatcgaaaacaaaatcaaatttgttgatcaaaatcatcacgaggcaacatatgcaaacaaaattgaaaaaatagacggtaaaattaattggagtgaaagtgctgaattaattcaagccaaaattaatgcactaaatccaaacccaggaggttggtttatatttaataatgaaagatataaaattttagatgctgacatttcttccaaatatggacaaccaggtgaagtgcttgatgagaatttgattattggttgtggaaataattctcttaaaatcttaa

SEQ ID NO: 229553 - DNA, 718 bp, Unknown
  Bacterial polypeptide expressing nucleotide sequence isolated from the Sargasso Sea
tatgagagtagcatttatgggtaatcccaactttgcaatttctagtttggaaagtattttacaaagtagacatcatgtagtagctgttatttctaatcctcctaaaccaatgggcaggaaaaagatcttaaagcatactgaagttggtagctatgctataaaaaacaatttagaattaattgagctagactcctttaataatgatgatatttataaaaaaattatgtcattaaagatagatatatttgtggtcgtagcttttagaatattgcctgaaaaatatatatcaatacctcgctgtgggtcgatcaatttacatgcatcactcttacctaaatatagaggagcagcgccaatacaatgggctctaatgaatggagaaaaagccacaggtgttagtgtgtttcagattgaaaaaaaagtagacaccgggaaaataatttatcaaaaaaaattagatattaatgaaagtgataattttgaatcattatcgaatagattatcaaatcttggtgctgaagtaatattaaaagcattgaatagtattgaagttggagtacacaatcttcttgaacaggataacaccttatcaacaaaagctccaaaaatatctaaggaaatgttacgaataaaatgggattggtctgctgtcaaaatcaataactggattcgaggtctatctccgaggcctggtatgactacaaatttagaaaaaaga

SEQ ID NO: 229554 - DNA, 853 bp, Unknown
  Bacterial polypeptide expressing nucleotide sequence isolated from the Sargasso Sea
ttgctgtggtctatactcaaccaccacaaaaatctccatagaggacaaaaaattaataagagtccaattcaaggaatatctgaaactttgaatatagattatagaacaccaaagacactcaaggataatcatgaagagtatgaatttttaaaagagttaaatgctgacctaagtgtagtttgcgcttatggtcagattatcccaaaaaactttttaaaattgcctaaaaaaggttttattaatattcacgcttctatactccctagctggcgtggggcagcgccaattcaaagatcgattatgaatttagatgctgagactggattaagtatcatgaagatgaatgaagaactagatagtggaccggtatgtaatacatataaggttaagatagataaaaataaaaatgctcaagaaatttcagaaatactttctgctttagctgcagaaaaaattttagataatgtagatgatattattgaagataaagcgaagttcattgatcaagatcattcaaaagcaacttatgcaaagaagatttataaggaagagtcacaaattgattgggaagaggacgcctctaaaattattggtaaaataaatggattatttccctccccaggagctacttttagttttaacggtgaaagatataaaattttgaaagctgaaattagtaatggcataggacaagttggagaaataatttcaaatcagctagaagtagcatgtaataacaatcaatccattaagattcttgaaattcaaaggcaaggaaaaaggccacaaaaaataagtgaatttatgttgggctctcaaattaaaaaaggctcaaaattattaaatgtttaga

SEQ ID NO: 229555 - DNA, 925 bp, Unknown
  Bacterial polypeptide expressing nucleotide sequence isolated from the Sargasso Sea
gatggcaaaaaagattgtttttatgggtaccccaatgtttgcggtaccaattttaaaatctttatatcaaaatggttatcctatttcagatatatatactcaacctcctcaaaaatctcaaagaggacaaaaaataaataaatctcccatccaaggtattgctgaaactttaaatttaaaatttagatcaccgaaaagtttgaaaaataacgacgaagaatatgaatattttaaaaaaatagatgctgatcttgcaatagtggtagcatatggtcaaataattccaaaaaaatttttagatttaacaaaaaaaggctttataaatattcatgcatccattcttcccaagtggagaggagctgcaccaattcaaagatctataattaatcttgataaaaaaactggaattagcattatgaaaataacagaaaaattagatactggtccagtttgtaatatttataatcttaatttatcaagcaatttaaatgcgagagaggtgtctgacaaactttcgttgttggcggcagaaaaaatattagagaatattgatgatatattagatgatagagcaaattttatagaacaagatcattccaaggctacttatgcctctaaaattaaaaaagaagagggaaaaattgattggaatgaaaatgctcaaaatattattggaaaaataaacggtttatatcctgcacccggtgcattctttatttttaaaggtgtaagatataaaattttaaaagctgaaattggagtgagagaaggaaatccgggtgaaattatttctgatgaattagaggttgtttgtggagataaaagatcaattaaaattaaagaaattcaaagagagggaaaaaaacctcaaaacattagtgaatttaagcttggcactcatatcaaaaaaggttcaattatttaa

SEQ ID NO: 229556 - DNA, 937 bp, Unknown
  Bacterial polypeptide expressing nucleotide sequence isolated from the Sargasso Sea
atgaaaatagcttttgctggaactccagaaattgccgctacaattcttcaatcaattattgataaaaaagatcatcaagttgtatgcgttataacatcagttgataaaccctcggggagaggcagaaaattaaagccttcgccagtaaaagaaattgccttagagaataacttaaccttgatgcagccagattcacctaaatctgaagaattcatcaatgaatttaaaaattatcaatgcgatgttcttttagtagtggcttatggtcatattttgacagaagaattacttgagacacctaaatacgggagtgtaaatattcatgcgtctcttttgccaaaatacagaggagccgcaccaatacaaagagccatcctgaacggcgataaaaaaagtggactgactttcatgaagatgacgaaaggacttgattcgggacctatgtcaaaacggtttgaaattaagatagaaaaagacgacaccactgctgatttaacatcaaagatggcttctatagccgcaaaagaagttaatgaattttgttctgattggccaaacttaattgatagtttggaggagcaaaatgaaacagatgcgtcttattgtccgaaaattacgagaaatgatgcagtgattgaatggtctgatgaggccaaaaaaatcagtaagactattaacgcaatgtaccctaacccaataatatctatcgacgttaacggagttgggatcaacctttgcaaatcaaaggtaaataaaaagttaattggcgatccaggcgaaattattgaatttaataaagatattctagcgataggttgtggagattttgcagtggaagttactgaactttgcaggacaggaaaaaataaactttccattaaagatttttataatggtgctcaaaaacttttaaaggaaggcgatattatttcttgaa

SEQ ID NO: 229557 - DNA, 928 bp, Unknown
  Bacterial polypeptide expressing nucleotide sequence isolated from the Sargasso Sea
tatgagagtagcatttatgggtaatcccaactttgcaatttctagtttagaaagtattctgaaaagtagacatcatgtggtaactgttatttctaattcgcccaaaccaatgggtagaaaaaagattttaaaacacactgaagttggaagctacgcgataaaaaataatatagaattaattgagctaggttcttttgatgatgataatatttataaaaaaatagtgtccttagatatagatatctttgtggtcgtagcctttagaatattacctgaaaaatatatatcaatacctcgttttgggtcgatcaatttacatgcttcactcttacctcaatacagaggagcagctccaatacaatgggctcttatgaacggagacaaagctacaggtgttagtgtgtttcagattgaaaaaaaagtggacaccgggaaaataatctgtaaaaaaaaagtaaatataaatgaaagtgataattttgaatcattatcgaatagattatcaaatcttggtgctgaagtgattttaaaagcattgaataatattgaggatggagaaactaattttattgaacaggataacaccttatcaacaaaagctccaaaaatatctaaggaaatgttacgaataaaatgggattggcctgctgtcaaaatcaataactggattcgaggtttgtctcctaagcctggtatgactacaattattagaaaaaagaaaataaaaattttaaagtcagtggttattgataaagtaacgaaaggagtgccaggtacagtgagtaacgttaataagtcattattagagatatatacaggcagcggtttgctttcaataaaggagcttcaacaagagggtaagaagtgtttgcctattgaagaatttctaaaaggtaatgatattaacgataaagatattttttcttaa

SEQ ID NO: 229558 - DNA, 931 bp, Unknown
  Bacterial polypeptide expressing nucleotide sequence isolated from the Sargasso Sea
atgaaaaaaaaacgtgtagtttattttggctcaccagaattttctcttcctcctcttaagaccctctatcttggaggatatgatttagtgggggtttacacacaagagccaaaaaaaaaatttagaggacaaaaaaaatataacacaccagttcaacaatgggcagaaagtcaacttctacctgtttttactcccaaaatacttgatgatacatctttgaaagaatttcaatcattaaagcctgatgtcgcaatcctttttgcttatgggaaaatagttccactgaattggttaaacactcctttaaatggttttataaatatacatgcctcgcttctaccaagatggagaggagcagcacctgttcaaagagccattgaaaataatgataaagagacaggtattactattataaaaatgaacgataaaattgatgaaggtcctattttagtccagcagaatatagaaattaatgatttaactgatggtaaacaattaattgatcaaatcagtcatgactcttgctcattgttatataatacattaaaaaaatattttttaggtcaaatccaattaaaagaacaagatcattcacaatctacatatgcaaaaaaaatagacaaatttgaaacacaagtagattggggattatctgcaagtataattgaaaaaaaagtaagagctttttacccatcaccagcaatgtggtttaaatataagggtcagagatttaaaattttaaaagctaaaatatctaacttacaagatgaaaagggtaagattataaatttacctctcactatagcatgtaaaaataacagtctagatattttagaaattcaagctgaaggaaagaaaccattaagcattaaagaatttattttagggaataatcaatttcaattaaatgcaataatcgataatgactaat

SEQ ID NO: 229559 - DNA, 922 bp, Unknown
  Bacterial polypeptide expressing nucleotide sequence isolated from the Sargasso Sea
aatgagcaaaaaaattgctttcatgggtacccccaccatttctgggcaaatactcaaatcattgtatcaaaatggttttgatattgaggttgtttatactcaaccacctgtagcatcaaatagagggcacagattaaataagtcacccgttcatataatggctgaaatattaaatattcctgttagaactccaattgtattagataatactgaagaaaaaaactttcttcataaacaaaatataagtttaggtatcgttgttgcttacgggcagattcttaaaaaagatattttagaaattccaaaatatggatggataaatattcattattcacttttaccaaaattacgaggtgcagctccaattcaaagagcaattatggaaaatgaaacatcaacaggtatttctataatgaaaattaatgagggtttagactctggtcccatctgtaatcaatattcaataaatattttagaaaatgaaaatgctgaggatttatctcaaagattaagtaatttagcatctgaaaaaatactacaaaatattgatgatatatttgataacaaagcacattttaaagaacaagatcatagcaaatctacatatgcaaaaaaaattaaaaaagaagaaggaaaaataaattgggaggacagtaatttaaaaataataggaaaaattaatggtttatatcctaatccaggaggttggtttgaatttaaaggggaaaggtacaagatactaaaagcagaaaaatcaattttgagtggaaaatcaggatatgtcttatcagataattttgaaattggttgtggtgaaaattcaataaagatcattgagatacaaagacaaggtaaaacagttcaaaaaactaaggaatttctgcgtggtagccaaattactaaaggcactgatttgaattaa

SEQ ID NO: 229560 - DNA, 928 bp, Unknown
  Bacterial polypeptide expressing nucleotide sequence isolated from the Sargasso Sea
aatggctaatataatttttgcagggacgccagagttttccgttccttcattgatggccctgacagaaatagggtttaatccctccttagtcattactcaacctgatcgaagagctgggagaggaaaaaaaatcaagaaaagcccagtaaaaatagcagctgaaaaacttcagatcccaattagccagccagtttcgataaatgaatctgaatatttagaatacttaaatcaacttgatatcgaaataattgtagttgcagcttatggaatgattttttcagaagagcttctggctattcctaagttggggtgtattaatattcatgcttcactgttaccgtcctggagaggtgcatcacctgttcaggcgacaataatgaatggcgagaaagaaaccggtatcacgcttatgaaaatgacaaaaggtttggactgtgggccaatatattctcagcataaaatgaaattaacacagactgaaagtggtgatattctgatggaaatgctcggaaatctcggtgctaaggcgataagaaatgattttaaatcaattctgaaacaaaacctcaaagctgaatctcaaattaatagcaaagcatcatattcaggtaagatagataaaaaagacgctaagctagattggtcaaagtcttctgaaatacttgcaagagaagttagggccttcaattcaaatccaggcgcatattttatgtataaaaatgaggctattaagtgttggcatgctataccaaaagacacggatagccttcctggcaaagtgatatcatccgataaaagtggtatagaaataggatgtggaagcggttcactagtcatgcttgagctacaacgacctgggaagagaagaataactgcgggtgaatttgccgcacaagtagatttgaataataaagaattgctgagctaa

SEQ ID NO: 229561 - DNA, 943 bp, Unknown
  Bacterial polypeptide expressing nucleotide sequence isolated from the Sargasso Sea
gatgaaaaaaaatagaaagatcaatatagcttttgcaggtacccctgaaattgcattcgatatatttgaggaattatccaacaaagatttccaaataaactttattctcactcaaactgacaaaaagtctggtagaggtgctcagctcaagagttctaagtttttggaaaaaaaagatatatgtaacgttctccagcctgagaacttaaatgatgatgattttaaaaaaattattcttaatcagaatatagatcttcttattgttgtggcctatggcaaaattttaccaagctggctcttggaacatcctaaatatggctgtttaaatgttcatttttctctattaccgaaatggcgaggtgcagcgcctatgcaaagagctatcgcaaatggtgataaaagctttggagtaagttttatgaaaatagaggaaaaacttgatgcaggaggaatatataaaactttttctacaaataatcatggccaagatatttatgctctagaggaagagttagttgaaattaccaatatggatttgagtaatactattattgaaatttgttcggaaaaaataatacctgaaactcaagaagaggaaaaagcaacatatgcagataagattgcaaaagaagaagggttgataaattggaatatagattcttctcagatatttagaaactttctagcattcaaaaggtggccaggatgctattttaaattaaatgacgaattagtaagagcaataaacatagaaaatattaaaactatcaaaggtaatccaggggaaatttcctctttcaataaagatggcatgatagtttgctgtaacaaaggagcgataaatttaaaaagtgttcagtttccaggtaaaaaagtaatttcatcaaatgatttctttaattcaaaaagagatataattcctcttaaggaaaatttgatttga

SEQ ID NO: 229562 - DNA, 778 bp, Unknown
  Bacterial polypeptide expressing nucleotide sequence isolated from the Sargasso Sea
atgctaaaaaaaatagtttttatgggtacacccatgtttgctgttccaattttaaaatcactttatcaaaatggatatcctatttcttgtgtttatacacaaccacctcaaaaatctaaaagaggtcaaaaaattaacaagtcaccaattcaattaatttcagagactttaaatatagaatttagaacaccaaattcattaaaagaaaatttagatgaattagaatattttaaatctttagaggcagatttggcaatagttgttgcttatggtcaaattataccaaagtcatatttaaatttaactaaaaaaggatttattaatatacatgcatctattcttccaaaatggagaggtgctgcccctatccaaagatcaattatgaatttagataaagagacaggaattagtattatgaaaataggggaggaactagatacaggaccggtatgtaatgtttataaaattaatattaaaaataattttaatactgaagatattaatgaaaagctatcaagtctggctgcagagaaaattttagataatatcgatgatatatatgaggataaagcaaactttgtagaacaagatcactcatcagcgacatacgcatcaaaaattcaaaaattagaggggcagattaattggaaagaagatgctaaaattataattggtaaaataaacggactttatccagttccaggtgcttatttcatatttaacagtgagagatataaaatattaaaagcagaaattggacaagcacaaggaaaaacag

SEQ ID NO: 229563 - DNA, 940 bp, Unknown
  Bacterial polypeptide expressing nucleotide sequence isolated from the Sargasso Sea
aatgtcaaataaagatataaatataattttttttggtaatactgatttttcaaacccaactcttctagcttgtaataacagttttaatcttaaagcagttgttacaaacaaatcaaaaaaaatgggtcgtggacaaaaaattcttgatacacctgtgatgactttagccaaggaagagaatttaaaaattattgaaggtgtagatttgaatgacgcaagtttaattgatcaacttaaagatttaaatcctgatttttttgtagtagttgcgtatagaattcttccaaagtctttactgggtatacctaaatatggatccattaatatccattcttcattgctaccaaaatatagaggagccgcaccaattcaacatgcattattaaatcaagaagattcaacaggagtttccacttttttgatagaaccgaaagttgatactggaaaaataattgatcaattaaaaattgaaataacaaaagatgataattatggttctttatcaaaaaaattaagtgaagctggagcagatcttattgaatcttcaattaataaatgtttgcaccattcttcagaattaatcgaacaagataatagtatggctactttagcacctaaaatttcaaaggatgatttaaaaattaattggaatgataagtcagatacaatactggctaaagtgagggctttctcgccaacacctggtgcttttactaccataaatagcaaaagattaaaaatcttcaaagctgagtcaattaataatgataataatcacgaaattggttctatatatcatgtagataaaaattttttcgacgttcagtgtggtcaaaatgcattaaggcttcataacgtacaattagagggtaaaaaagcaatggattcaaaagattttattgtaggttatcaagatttaggttcaaatattcttatatga

SEQ ID NO: 229564 - DNA, 940 bp, Unknown
  Bacterial polypeptide expressing nucleotide sequence isolated from the Sargasso Sea
atgaaaattatctttatgacaaattcagaattttctttccctagtcttaatttattagtgaaatctaattatgatattttaaatgtagttacaaatcctccaaaagcaataggtcgtaaaaaaaagaatatcagtaataatattatattaaaatgtaaagagtttggaattgatattataaagcaaaaagacttaagtgatttaaattttgaaaatgagctaaaaaagtgtaaacctgatctatttgttgtagtagcttatcgcattttaccaaagtctttattaagtattccaaagttagggagtatcaatctacacggatcattattaccagcttatagaggcgctgcgccgatccaatggtctttaattaatggagatactcagacagggttaagtaccttttttattgaatctagagttgatactggtaaaataattagtcaaaagaaaataaaaatattagataatgataattatggttctctaagtgcaaaaatggctctaaagggttcaaaattattacttgattcaattcaattaattagtaatggaaaaactttacttattaaacaggatgagggctctgtttcttatgcgcccaaaattaccagtgatattactgatatagattggaattctagtgcattaagtattcataatcttataagaggtcttactcctaatccaggagcaaagtcaaagattaatggtaagcagatcaaaattcaagacactattttaaattataataacttaaatatatcttcttttaaacctggacaagttgttgatatttcaaagaataatttatctattctaactggcaatggagtattatctattaaccgacttcaattagaagggaaaaaatctttagatataaaatcttttctgaatggttatataataaatattggtgattctttcggtaattgat

SEQ ID NO: 229565 - DNA, 922 bp, Unknown
  Bacterial polypeptide expressing nucleotide sequence isolated from the Sargasso Sea
atgtcattacaaataatatttatgggtacgcccgaattttcaattaatacactcaaattattaattgataatggtcacgagatattaagagtatatactcaacctccaaaaaaaaagcaaagaggacacaaaattataaaaacaccacttcacatagtcgcagaagaattaaaaatagatgtaaagacatcaaataatcttgacaacgaggaagattattctttttttaaagataaaaagattgattacgttgtcgtcgttgcttatggaaatatcatacctgaaaggtttctaaagatacctaaattggtttttttaaatttgcatgcttcactactcccaaagtggagaggtgctgctccaatagaaagatctatcttatctcatgaaaaagaaactggtatctctataatgaaaatagttcctggactagatgaaggaccttacatgatgcaagaaaaatttatgataaataaaaatatgtcaactggagagctcaaaaaaaatctctccttaatcggtgcaaaagctatggtccgttcaattaagctaatctcagagggaaaagcagttttcgtagagcaagatcactcgaagtcttcatatgcaaaaaaaattaaaaaatctgaaaccgagattaattggaatgacaaagcagaaaatattgttgctaagattaatgcatttaatccgaaaccaggtgcttggtttttatataaaaaagaaaggataaaggttttcaaagccaatgagattgaacaaaacggcaatccaggagaaatcctagacaacgaactaataattggaacaggacataatgcaataaagattcttgaacttcaaaaagaaggaaaaaacactcttaattcaaaagaatttttaaagggaaataaactattcaaaggaacaaaattactttgaa

SEQ ID NO: 229566 - DNA, 925 bp, Unknown
  Bacterial polypeptide expressing nucleotide sequence isolated from the Sargasso Sea
aatgtttaaaaaaattgttttcatgggtacttcaaattttgctgtaccgattttaaaatcattgtatcaaaatggataccctgtttcagttgtttacacacagccacctaaaaaatcaaatagaggacaaaaatttaacaaatcaccaataaatttattttctgaaaatattagcttagaaattagaacacctaatattttaaaaaataatattgaagaagaacaatacttaaataaattagaacctgatctaattttggttgtttcatatggccaaattattccaaaaaatcttttaaaaattcctaaatatggatttctgaatattcatgcttctttattaccaaaatggagaggagcggccccaatacaaagatcgataatgaatttagacaaagaaacaggaattagcattatgaaaataaatgaaaatttagacgaaggtccagtttgtaatcaatacaaaattaaaatttctgaaaatatgaacgcagatgaattatcagataaactatcattactggcttcagaaaaaatactagatattttagataatatttaccgtcataaaacacaatttaaagatcaagatcattcaaaagccagctatgcaaaaaaaatagaaaaaattgagggaaaaattaattgggatgaaaactcagataaaataattggaaaaattaatggactttatccatttccgggagctttttttttattcaatggagagaggtataaaatacttaaagcagaaaaatcccatactaatggagaacccggaagtgtaataagtgaagatttagaaatatgctgcggagaaggatcggttaaagtgttaattatccaacgggaaggaaaaagagttcaacaaataaatgaatttttgcctggaaatcaaataaaaaaaggctccaaaattacttaa

SEQ ID NO: 229567 - DNA, 562 bp, Unknown
  Bacterial polypeptide expressing nucleotide sequence isolated from the Sargasso Sea
atgctaaaaaaaatagtttttatgggtacacccatgttcgctgttccaattttaaaatcactttatcaaaatggatatcctatttcttgcgtttatacacaaccacctcaaaaatctaaaagaggtcaaaaaattaataagtcaccaattcaattaatttcagagactttaaacatagaatttagaacaccaaattcattgaaagaaaatttagaggaattagaatattttaaatctttagaggcagatttggcaatagttgttgcttatggtcaaattataccaaagtcatatttaaatttaactaaaaaaggattttttaatatacatgcatctattcttccaaaatggagaggcgctgctcctattcaaagatcaattatgaatttagataaagagacaggaattagtattatgaaaataggggaggaactagacacaggacctgtatgtaatgtttataaaattaatatagaaaataatttaaatgctgaagatattaatgaaaagctatcaagtttggctgcagagaaaattttagataatatcgatgatatatatg

SEQ ID NO: 229568 - DNA, 841 bp, Unknown
  Bacterial polypeptide expressing nucleotide sequence isolated from the Sargasso Sea
tcagtcgtctatactcaaccacctcaaaaatctaaaagaggacaaaaaattaataaatctcccgtacaggccattgctgaaactttaaacttagaatttagaacgcctgaaaatttaaaagataatgatgatgaatttgaattctttaaaaaaatagatgctgatctcgtaatagttgtagcttacgggcaaataattccaaaaaaatttttggatttaacaaaaaaaggattcataaatattcatgcatctttacttccaaaatggagaggagcagcacctatacaaagatcaataatgaatcttgataaagaaacaggcataagtgttatgagaatagtcgaacaattagatgcaggcccagtatgtaattcttataaaatagatttgaaaaataatttaaatgctagtgatgttactgacaaactatctctaatagcatctgaaaaaatattagataatattgatgatatattagatgataaagcaaattttattgaacaagatcattcaaaagcaacatatgcatctaaaattcaaaaaacagaaggtgaaataaattggagtaataatgctaaagatataaatggaaaaataaatggattatatcctgtaccaggtgctttttttatttataaaggggagagatataaaattttaaaagcagaaattggtaatggtgttggagatccaggagaggttgtttcagattatttagaagttgcctgtggagatagaaaatcgattaaaattaaagagattcaaagggagggaaaaaagccacaaaatattggagaatttatgcttggttctcaaataaaaaaaggaataagaatttaaa

SEQ ID NO: 229569 - DNA, 922 bp, Unknown
  Bacterial polypeptide expressing nucleotide sequence isolated from the Sargasso Sea
atgagcaaaaaaattgcttttatgggtactccggccatttctgggcaaatactcaaatcattgtatcaaaatggttttgatattgaggttgtttatactcaaccacctgtagcatcaaatagagggcacagattaaataagtcacccgttcatataatggctgaaatattaaatattcctgttagaactccaattgtattagataatactgaagaaaaaaactttcttcataaacaaaatataagtttaggtatcgttgttgcttacgggcagattcttaaaaaagatattttagaaattccaaaatatggatggataaatattcattattcacttttaccaaaattacgaggtgcagctcccattcaaagagcaattatggaaaatgaaacatcaacaggtatttctataatgaaaattaatgagggtttagattctggtcccgtctgtaatcaatattcaataaatattttagaaaatgaaaatactgaggatttatctcaaagattaagtaatttagcatctgaaaaaatactacaaaatattgatgatatatttgataacaaagcaaattttaaagaacaagatcatagtaaatctacatatgcaaaaaaaattaaaaaagaagaaggaaaaataaattgggaggacagtaatttaaaaataataggaaaaattaatggtctatatcctaatccaggaggctggtttgaatttaaaggggaaagatacaagatactaaaagcagaaaaatcaattttaagtggaaaatcaggatatgtcttatcagataattttgaaattggttgtggtgaaaattcaataaagattattgagatacaaagacaaggtaaaacagttcaaaaaactaaggaatttctgcgtggtagccaaattactaaaggcactgatttaaattaaa

SEQ ID NO: 229570 - DNA, 598 bp, Unknown
  Bacterial polypeptide expressing nucleotide sequence isolated from the Sargasso Sea
aatgctaaaaaaaatagtttttatgggtactcccatgtttgctgttccaattttaaaatcactttatcaaaatggatatcctatttcttgtgtttatactcaaccacctcaaaaatctaaaagaggtcaaaaaattaacaagtcacctattcaattaatttcagaaactttaaatatagaatttagaacaccaaattctttaaaagaaaatttagaagaattagaatatttaaaatctttagaggcagatctggcaatagttgttgcttatggtcaaattataccaaagtcatatttaaatttaactaaaaaaggatttataaatatacacgcatctattcttccaaagtggagaggtgctgctccgattcaaagatcaattatgaatttagataaagagacagggattagtattatgaaaataggagaggaattagatacaggaccagtatgtaacgtttataaaattaatatagaaaataatttaaattctgaagatattaatgaaaagctatcaagtttggctgcggagaaaattttagataacatagataacatatatgaggataaagcaaactttgtagaacaagatcactca

SEQ ID NO: 229571 - DNA, 721 bp, Unknown
  Bacterial polypeptide expressing nucleotide sequence isolated from the Sargasso Sea
agataatcatgaagaatttgaatattttaaaaatatagaagccgatcttgcaatagttgtagcttacggtcaaataatcccaaaaaattttttaaatttaaccaaaaaaggatttattaatattcatgcttctatacttcctaaatggagaggagcagcacctatacagagatcaataatgaatcttgataaagaaactggaattagcatcatgaaaataacagaagaattggatactggtccagtatgtaatatttacaaaattgatttagaaaaaaatctaaatgttaatgatatttctgaaaagctttctttattggctgctgaaaaaatattagataatattgatgatatattaaacgaaaaagcaaaatttatagaacaagatcattcaaaagcaacctatgcttctaaaatacaaaaagcagaaggtaaaattgattggaatgagtctgcacaaaatattattggaaaaataaatggtttatatccaatacctagtgcgttttttacatttaagggtgaaagatataaaattttaaaaggagaaattggcaatagtgttggtaatccaggtgaggttgtttctgactatttagaagttgcatgtggcaataaacagtcaatcaaaattaaagaaattcaaagagaaggaaaaaaacgtcaaaatattaatgaatttatgctgggttcacagataaaaagaggttcaactatttaa

SEQ ID NO: 229572 - DNA, 940 bp, Unknown
  Bacterial polypeptide expressing nucleotide sequence isolated from the Sargasso Sea
atgccaaataaacaaataaatataattttttttggaaatactaatttttctaatccaactcttttagcctgtaataagaattttaatcttaaagctgttgttacaaataaatcaaagaaaatgggtcgcggtcaaaagattcttgatactcctgtaatgagcttagcaaaagaaaaaagttttaaagtcattgaagtagaagatttaaatgataaaagtttcataaatcaacttaaaaatttaaatcctgatttttttgtagttgttgcatatagaattttaccaaaatctttactgaagattcctaagtttggttcgattaatatccactcctcattattgccaaaatatcgaggagctgcaccgattcaacatgcattattaaatcaggaaaaattgacaggaatttctacttttttaatagagcctaaggttgataccggtaaaattatagatcaatttcaagttgaaataagccctgaagacaactatggttctttgtcaaaaaaattaagcgaagctggtgctgagcttattgaatcctctgtaactaaatgctatacaaattctgccgatttgattaaacaaaacgatagtgaagcaacactagctcctaaaattttaaaggatgatttaaaaataaattggaatcaagattctaaagtaatattagcaatgataaaggctttttctccaactccaggcgcttttacaacaattaattctaaaagattaaaaatttttaaagcagaagtaatagattgtaatagcaataatgatgtaggagtaatatataacgtttctaaaaattattttgatgttcaatgtaaacataattctttaagaatacatcgcacgcagcttgaaggtaaaaaggttatggattcaaaagatttcattttaggctatcaaaacttagattcaagttctctgttatgaa

SEQ ID NO: 229573 - DNA, 607 bp, Unknown
  Bacterial polypeptide expressing nucleotide sequence isolated from the Sargasso Sea
tatgagtaaaaagatagtttttatgggaacctccaattttgctgttcctattttaaagtcgctttatcaaaatggatatccagtctctgttgtttatacacagcctccaaaaaaatctaatagaggtttaaaattaagaaagtcaccaataaatttatttgctgaaaatataactttagatgtaagaagtcctcaatctttaaaaaataataaagaagaagagctatatctgaatgaattaaaaccagatattattttggtggtttcatttggtcaaatgattcccaataatcttttgaatattcccaaatatggatttttaaatattcatgcttctctactcccaaaatggagaggagcggcacctatacaaagatccataatgaatcgagatgaagaaacaggaattagcataatgaaaataaatgaaaatttggatgagggaccagtttgtaatcaatactcattaaaaatttcagaaaaaatgaatgcagaagaattatctgaaaaattatcactaatcgcttcagaaaaaattttagatattttagataatatttttgataataatgtggaatttaaagatcaagatcattcaaaagcttag

SEQ ID NO: 229574 - DNA, 229 bp, Unknown
  Bacterial polypeptide expressing nucleotide sequence isolated from the Sargasso Sea
atgtcgacaccgctcaaagtggttttcgcgggcaccccggacttcgccgcccgacatcttcagggtctcattgattcaccccaccggatcgttgcggtgatgagccagcccgatcggcccgcgggccgaggaaaacgcctgcaaccctccccagtcaaggcggtggcactcgaagcagaactgcctatctggcaaccagcgtcactgaaaaacgctgacagcgaggcca

SEQ ID NO: 229575 - DNA, 1120 bp, Unknown
  Bacterial polypeptide expressing nucleotide sequence isolated from the Sargasso Sea
atgacctatctcgcagatgaacgcatcgttttgacggcagcggaatccagtcatatccggacgacgctcggcgcactggcctatgatccggccggcggcgcgggctacatcagcgcggtgcgcaagctcgcctacaacgcgtttcccgaccgggtcgtcgacgcgttcgatcgcgcgaaggcgccgaccgccgatgcgcacggctcgatcgagatcgacaacctgccgatcgacgagggcgtgaagggcagcccgaggttcgaggaaaccggccgctcgttcaaggccggcgtgttgagcgagaacgtcctggtcgcgttgagcacgctggccggcgagccgtattcgattgcgcacgaaggccgcgagctcgtgaacaacctcacgccgcacaaggcgaccgcgcgcgactatacgggcctgggctccgaggtcgagctcgatttccatatcgagaacgccgcgcaggcgcacatgccggaaggcgatacgtcgccgttcgcgttgctgctgctcggcgtgcgcagtgaagcaggcggcggcccgtacacgcggctcgccgatgcgcgtcgcgcactgcagctgctgtcgccggaggatatcgcgcagctctacggcgagcactacatcatccgcgtgccataccggtggcgcggggcggcgccgacgccgcgcgacaacaccgacctgagcgcggtgctgtcggggccgctcgatgcgccgcgcgtgacggtcgcgttctatccggacatggtgctggcggtcaacacgcgcgcgcaggaggcgctggccaacctgtatcgcgcggtgcgcgaggtgtcgttcggcgtgcagattcaaccgggcaagctggtgctgatcaacaatcatttcacgctgcattcgcgcgaccgtttcgatccgcaatacgacgagaacgaccgggcattgcgctgggttcagcgcgtgttcgtcgcacgcagcctgtggaacttccgcgcgttcacgccgctgcaggcgcgcgtgttcgatccgaaggcgctgtatgcgggcgagtcgcaagcaacgcgcccgtcgccggttgcgcaaccggtcacgcaacgcgcggccgcggccgaactcgaggcgacgcccgcctgag

SEQ ID NO: 229576 - DNA, 925 bp, Unknown
  Bacterial polypeptide expressing nucleotide sequence isolated from the Sargasso Sea
atgctaaagaaaatagtttttatgggtacacccatgttcgctgttccaattttaaaatcactttatcaaaatgaatatcctatttcttgcgtttatacacaaccacctcaaaaatctaaaagaggtcaaaaaattaacaagtcaccaattcaattaatttcagaaactttaaacatagagtttagaacaccaaattcattaaaagaaaatttagaggaattagaatattttaaatctttagaggcagatttggcaatagttgttgcttacggtcaaattataccaaagtcatatttaaatttaactaaaaaaggatttattaatatacatgcatctattcttccaaagtggagaggtgctgctccgattcaaagatcaattatgaatttagataaagagacgggaattagtattatgaaaataggagaggaactagatacaggaccggtatgtaatgtttataaaattaatatagaaaataatttaaatgctgaagatattaatgaaaagctatcaaatttggccgcagagaaaattttagataatatagatgatatatatgaggataaagcaaactttatagaacaagatcactcatcagctacatacgcaccaaaaattcaaaaattagaggggcagattaattggaaagaagatgctaaaattataattgctaaaataaacggactttatcctgttccgggtgcttatttcatgtttaatggtgagagatataaaatattaaaagcagaaattggacaagcacaaggaaaaccaggcgaggttttatctgaccatttagaaatttcatgtggagataaaaaatcaataaagattaaagaaatacaaagacaaggaaaaaaacctcaaagtattggagaatttgttttaggaacacaaattaaaaagggttcatttttataat

SEQ ID NO: 229577 - DNA, 946 bp, Unknown
  Bacterial polypeptide expressing nucleotide sequence isolated from the Sargasso Sea
aatggacaatagtataatatttatgggtactccagattttgcagttaaatctctagattttttaataaaaaaaaatctaagtatagattgtgttgtgacctcaccagataaaaaatcagggagaggccttaaaataaatgagtcagaagtaaaaaagtattctaaactaaataaaataaaattacttcaacctaataatttaactgaccctgattttataaaacaaataaaagaacttaatccagctttgatagttgttgttgcctttagaaaattaccaagaattttatatgagataccaaagcatggtacaataaatcttcatgcatcattactcccagattatagaggagctgcgccaattaattggtgtcttattaataacgaaaagtttacgggtgtttctattataaagattaatgaaaagattgattacggaaagatacttatgcaagaaaaagttataattgataaagacgaggattatggaacgttaaaaaataaactatccttaattggatctaaaattttatacaagactattgatttaatttttaaaaatcaaataaaagagaaggctcaaattataacagaaaatgataagaaagctccaaaacttacttctgaaaatactagaattgattgggatagctcgatagattcaataataggaaaaattagaggattagctccaaaacctggtgcttggacaattttaattaacgatgaggatgagataagaatgaaaatccttaaagctagaccagcaagctattctaagagtaattcaaagagtattttactaactcaagataaaagaatattcatttctaccccaaatggtgagattgagtgtgatataatacaattagaaaacaagaaagcaatgacagcaaaggatacccttaatggttacaatttttcttcaaaatgccttgtaaagtag

SEQ ID NO: 229578 - DNA, 745 bp, Unknown
  Bacterial polypeptide expressing nucleotide sequence isolated from the Sargasso Sea
atgagcaatgaaataatctttatgggtacaccagattttgctgttaaatctttagattccctattaaaaaaaaatctaaatataagttgtgttgtaactagtccagacaaaagatctggaagaggtcttaaaattggtaaatcagaagtaaaaagatattctgaattaaataatataagactacttcaacctgataatttaagtgatcctagctttataaatcaaataaaaaaaattaatccagttttgattgtagtagttgcttttaaaaaattaccaagcattttatatgaaataccaaagtatggaacaataaatctacacgcatcattacttcctaactatagaggagcagctcctattaattggtgcttaataaataatgaaacttatacaggtgtttctataattaagattaatgaaaaaattgattgtggagatattcttatgcaaaaaaaggttttgattgacaagaatgatgattttgaaacattaaaagacaaactatctgtaatcggatccagaattttatataagactattgtcctaatcttaaagaatcaaatacaggggaaaaaacaagttatatcaaaaaatgacaaactagctccgaaacttaatacaaaaaatactagaattgactgggatgactcaatagatttaataataggaaaaattaaggggctaaatccaaaacctggtgcttggacaattttattaaatggtgatgatcaagtaaggataa

SEQ ID NO: 229579 - DNA, 934 bp, Unknown
  Bacterial polypeptide expressing nucleotide sequence isolated from the Sargasso Sea
atgaaaaataaaattgtttttatgggtactccaatattttctgtgcctatattaaaatcattgtatcaaaatgggtatcctgtttcagttgtttatacccagcccccaaaaaagtctcaaagaggtcaaaaattaaaaaattctccaattcataacatttcagagattttaaatttagaagttaggactccattaaatctaaaaaataatgaaaatgaatataattatttaaaaaatttaaatgctgatttagcaattgtagttgcatatggtcaaataattcctgaagaatttttaaatcttactaatcatggatttataaatattcatgcatcattacttccaaaatggagaggtgcagcaccaattcaaagatctataatgaatttagataaagaaactggaatcagttttatgaaaatagtaaaaaaattagacgagggtccagtttgtaaaaaatttaatattaaaatctccgaaaaagataattatgagactgtgtctgataaattgtcatctttggcttctgaaaatatgctagacataatagatgatatttttgaagaaaaagttttatacgaagagcaaaatcatgaagaagctacttatgcaaacaaaatacttaaatctgagggagaaattaaatggaccgaaaacgcagaaaacattttaggtaaaataaatggattgtatccatcaccaggagcgtggtttgtttataaaggtgaaagatataaaattttaaatgctgaattaggttttaaatccgatcaagctggcaaagttgttgataataatttagagattgcttgtggaaataataaatcaataaaagtaattcaaatacaaagacagggaaaaaatatccaaaatattggagaattcatgcttggatcgtctattaaaaaagataccaaccttaataatgcataga

SEQ ID NO: 229580 - DNA, 925 bp, Unknown
  Bacterial polypeptide expressing nucleotide sequence isolated from the Sargasso Sea
atgctaaagaaaatagtttttatgggtactcccatgttcgctgttccaattttaaaatcactttatcaaaatggatatcctatttcttgtgtttatacacaaccacctcaaaaatctaaaagaggtcaaaaaattaacaagtcaccaattcaattaatttcagagactttaaatatagaatttagaacaccaaattcattaaaagaaaatttagatgaattagaatattttaaatctttagaggcagatttggcaatagttgttgcttatggtcaaattataccaaagtcatatttaaatttaactaaaaaaggatttattaatatacatgcatctattcttccaaaatggagaggcgctgctcctattcaaagatcaattatgaatttagataaagagacaggaattagtattatgaaaataggggaggaactagatacaggaccggtatgtaatgtttataaaattaatatagaaaataatttaaatgctgaagatattaatgaaaagctatcaagtttggctgcagagaaaattttagataatatagatgatatatatgaggataaagcaaactttatagaacaagatcactcatcagctacatacgcatcaaaaattcaaaaattagaggggcagattaattggaaagaagatgctaaaattataattggcaaaataaatggactttatccagttccaggtgcttatttcatatttaacggtgagagatataaaatattaaaagctgaaattggacaagcacaaggaaaaccaggtgaggttctatctgaccatttagaaatttcatgtggagataaaaaatcaataaaaattaaagaaatacaaagacaaggaaaaaagcctcaaagtattggagaatttgttttaggaacacaaattaaaaagggtttatttttataat

SEQ ID NO: 229581 - DNA, 913 bp, Unknown
  Bacterial polypeptide expressing nucleotide sequence isolated from the Sargasso Sea
ttttgcagggacgccagagttttcagttccttcattgatggccctgacagaaatagggcttaatccctccttagtcattactcaacctgatcgaagagctgggagagggaaaaaaatcaagaaaagcccagtaaaaatagcagccgaaaaacttcagatcccaattagtcagccagtttcgataaatgaatctgaatatttagaatacttaaatcaactggatatcgaaataattgtagttgcagcatatggaatgattttttcagaagagcttctggctattcctaggttggggtgtattaatattcatgcatcactgttaccgtcctggagaggcgcatcacctattcaggcgacaataatgaatggtgacaaagaaactggcatcacgctcatgaaaatgacaaaaggtttggactgtggaccaatatattctcagcataaaatgaaattaacacagactgaaagtggtgatgttctaatgaaaatgcttggaaatctcggtgctaaggcgataagaaatgattttaaatcaattctaaatcaagatctcatagctgaatctcaaattaatagcaaagcatcatattcaggtaagatagataaaaaagatgccaagctcgattggtcgaagtcttctgacactcttgcaagagaagttagggccttcaattcaaatccaggctcatattttatgtataaaaatgaggctattaagtgttggcatgctataccaaaagacacggatagccttcctggcaaagtgatatcatctgataaaaatggcatagaaataggatgtggaagcggttcactagtcatgcttgagttacaacgacctgggaagagaagaataactgcaggtgaatttgccgcacaagtagatatgaataataaagaattactgagctaa

SEQ ID NO: 229582 - DNA, 328 bp, Unknown
  Bacterial polypeptide expressing nucleotide sequence isolated from the Sargasso Sea
gctctccaaggaagaggcccgcatcgactggtcgatggaggctgtcgccatcgaacgctgcatccgcgccttcaacccctggcccatcagctggtttgaagtcgccggccagaccgtcaaggtatggcaggccgaggtcgtcgcacaggatcacggccaggcggccggtaccctgctcaaggctgacaagcagggaatcgacatcgccaccggcaagggcgtgctgcgcctgctgaccctgcagccgcccggcaagaaggccatgtccgtgactgacctgctcaactctcgccgcgactggtttgaacccggcacgcaattgaattga

SEQ ID NO: 229583 - DNA, 922 bp, Unknown
  Bacterial polypeptide expressing nucleotide sequence isolated from the Sargasso Sea
atgagcaaaaaaattgctttcatgggtactcccactatttctgggcaaatactcaagtcattgtatcaaaatggttttaatattgaggttgtttatacccaaccacctgtagcatcaaatagaggacacagattaaataagtcaccagttcatataatggctgaaatactaaatattcctgttagaactcctattgtattagataatactaaagaaaaaaatttccttaaagaacaaaatataagtttaggtattgttgttgcttacggacaaattcttaaaaaagatattttagaaattccaaaatatggatggataaatattcattattcacttttaccaaaatttcgaggtgctgctcccattcaaagggcaattatgaacaatgaaaaagcaacaggtatttctataatgaaaattgatgaaggtttagactccggtcctgtctgtaatcaatattctataaatattttagaaaatgaaaatagtgaggatctgtctcaaagattaaacaatttagcatctgaaaaaattctacaaaatattgatgatatatttgataacaaagcatcttttaaagagcaagatcatagtaaatctacatatgcaaaaaaaattaaaaaagaagaaggaaaaataaattggaaggacagtaatttaaagatcataggaaaaattaatggtttatatcctaacccaggaggttggtttgaatttaaaggagaaagatataagattctaaaagcagaaaaatcaattttaagtggaaaatcaggatatgtcttatcagataattttgaaattggttgtggtgaaaattcaataaagatcattgagatccaaaggcaaggtaaaacagttcaaaaaactaaggaatttctgcgtggtagccaaattactaaaggcactgatttgaattaag

SEQ ID NO: 229584 - DNA, 895 bp, Unknown
  Bacterial polypeptide expressing nucleotide sequence isolated from the Sargasso Sea
acagttggttcctcaccggtgaaggcgagggctgaagaacttggtctttttgtgttcacccctgaacggatccgacgggatgacgattgcaaagccaagcttgctgcactcggtgctgatacctcggtggtcgttgccttcggacagatccttcccaaagatgtgttggaacagcctcctctgggttgctggaacggccacggatcacttctaccgcgttggcgcggtgctggtcccatccagtgggccctgctcgaaggagatcaggaaacgggtgtggggatcatggccatggaagaagggctcgatacaggtcccgttctgctcgagcaacgcactccgatccccctgctggaaccttccatcgccttggccgaacggctcagcgctctcactgcagagctgatggtgcaggccatgccgctgattgaagcggtgggtccgggtccagaagacgagagatgggcaaggctcaacgtgcgtattcaagccaagggttctacatacgcccgcatgctggagaaggaggatttccaattggattggtcagcctctgccctcagcattcatcgcaaggtgatggggcttcatcccggtgcgttcacccagtggcagggcaaacgcctgaaggtgttgcgcacggagccgttgatcgagcgccttgaggatcaactcagcgctgagggacgcaacctcgtgggccaatggcccaccggcgggcatccccctgggacgatccttgcattgatcgaggatctggggcttgtggtcagcagttcaggttgtccccttctaattcgggaagcacagctgcaaggaaaagcacgcagcacggcccccgttttgttgcagcaactcaaagccactcccggagatcgattgggcgagcgctgat

SEQ ID NO: 229585 - DNA, 631 bp, Unknown
  Bacterial polypeptide expressing nucleotide sequence isolated from the Sargasso Sea
tttttaaatttaacaaaaaaaggatttataaatattcatgcgtctttactccctaaatatagaggagctgctccaattcaaagagccataatgaatttagaaaaaaaaactggaataagtattatgaaaattaattctcaattagatgaaggaccagtatgtaagtcttatgaaattgatatcaatgaaaaggatagctcagatgatttatcagaaaaattatctgatttagcagttgaaaaaatattagatgatatcgatgacatattagatgataaagctaaatttaaagaccaagaccacagcaaggctacttatgcaaaaaaaattaataaaaaagagagtagtattgattggaacgcaccagcaaagagtgttatcgcaaaaataaatggattaaatggtgctcattttatcttccaaggagctagatacaaaattcttaaagctgaattaaataatttgagtggaaagcctggtgaaattattggagatagcttagagattgcttgtaaagaaaagtctattaaagtcatggtgatacaaagagagggaaaaaagcctcaaaaaacagcagaattcttattaggctctcaaattaaaaaaggtctttttttaagcaatgtataga

SEQ ID NO: 229586 - DNA, 925 bp, Unknown
  Bacterial polypeptide expressing nucleotide sequence isolated from the Sargasso Sea
atgcaaaagaaaatagtttttatgggtactcccatgtttgctgtgcctattttaaaatcactttaccaaaatggatatcctatatcttgtgtttatactcagcctcctcaaaaatctaaaaggggtcaaaaaattaataagtctcctattcaattaatttcagaaactttaaatatagaatttagaacaccaaattcattaaaagaaaatacagaggaatttgaatattttaaatcattggaggcagacttagcaattgttgttgcttatggtcaaataataccaaagtcatatttaaatttaactaaaaaaggatttattaatatacatgcatctattcttccaaaatggagaggtgctgctccaattcaaagatcaattatgaatttagataaagagacaggaattagtattatgaaaataggagaggaattagatacgggaccggtgtgtaacatttataaaattaatatagaaaataatttaaatgctgaagatattaatgaaaagctctctagtttggcggcagaaaaaattttagataatatagatgatatatatgatgataaagcaaactttatagaacaagatcattcatcagctacatacgcatctaaaattctaaagttagaggggcagattaattggaaagaagatgctaaaattataattgcaaaaataaatggactttatccagttcctggtgcctatttcatgtttaacagtgagaggtataaaatattaaaggcagaaattggacaagggcaaggaaaaccaggtgaggttttatctgattatttagaaatttcatgtggagataaaaaatcaatcaaaattaaagaaatacaaagacaaggaaaaaagtcccaaagtattggtgaatttattttaggaactcaaatcaaaaagggttcatttttataat

SEQ ID NO: 229587 - DNA, 637 bp, Unknown
  Bacterial polypeptide expressing nucleotide sequence isolated from the Sargasso Sea
aaacttaaccaaaaaaggtttcataaatatccatggatctattctacctagttggagaggggctgctccaattcaaagatcgattatgaatttagataaagaaacaggtataagtattatgaaattagttgaggcgttagatagtggacctgtcagtaatgtttacaaaattaaattagatcaaaataatagtgccgaagaaatttcagaaaaactatcctttttagctgctgaaaaaattttagatgatattgatgatatattagatgataaagcaaagtttatagatcaagatcattcaaaagcctcttatgctaaaaaaattgaaaaaatcgagggtgaaattaattgggatgatgaagcactaaaaataattggaaaaataaatggtttatttcctgtacctggtgccttttttaattttaagggtgaaaggtacaaaattttaaaagctgaaataggaaatggtataggtcaagctggtgaagtgttatctgataaattagaaattgcatgcacgaataatcaatcaataaaaattcttgagatacaaagacaaggaaaaaaacctcaaaaaattggggaatttatgcttggatcaagtataagaaaaggttcattattatctaatgcctag

SEQ ID NO: 229588 - DNA, 727 bp, Unknown
  Bacterial polypeptide expressing nucleotide sequence isolated from the Sargasso Sea
ttgaatataatatttatgggaacaccagattttgcagtcccaagtctaaaattagttgcgtctaatttcaatgtcatagctgttttttctcaacctgcccgtcctaacggaaggggaatgaaatcaaaaaaatcttctgtagagattgctgcaagagaattaaatctaaatgttgtaactcctatcactttacaaaacgaagatatattttatgaatttaatcttcttaaacctgatatagtagttgttgtagcatacgggttacttcttccagaaaaatatctgaaagttccaaaatatggatgtataaatggccacgctagtcttttacctagatggcgtggggctgccccaattcaaagagctatagaagctggtgataataagaccggaacttgtataatgttaatggaaaaaggaatggatacagggccaataatatcttctgaaattattgatataaaaaaaaatgatacttctaaaataattcatgataaattatccaaatctactgcaaaattgctgcttcaagctattaaaaattacgaagaagggattgttttcccaataaatcagaaacttgatggtattaaatatgctaataaaattcataaaaatgaagctgaaattgattgggaattaacctccattgaaatatttaacaaagttagagcatttgatccttttccaggaacctatactaaatattcaaataaaaaattataaa

SEQ ID NO: 229589 - DNA, 548 bp, Unknown
  Bacterial polypeptide expressing nucleotide sequence isolated from the Sargasso Sea
aatgtcacaaaaaattgtttttatgggaacacccgagttctcggtgcctactttagagtctttagtaaattctaataatcaaattttagctgtatattctcaacctcctagcaaagcaaatcgtggtcaaaaaattaccccatcaagtgttgaagctttcgcaaaagaacattctttaaatttaagaactcctgacaacctgaataatgataaagaatacaattacttgaaaaaattaaatccagacattgttgtagtaatagcttacggtaaaattataccaaaaaagtttttagacttgtcaaaacacggttttataaatgttcacgcttcattacttccaaaatggagaggagccgctcctattcaaagagcaattatgaatttagataatcaaactggaataagcattatgaaaatagtggaggagttagatgctggaccagtaatgcaacaagacaaaattcagataaatgaaaacatagatgctttaaccttatcaaaagttctatctaaattaggagccaattctattcttaatgctataa

SEQ ID NO: 229590 - DNA, 824 bp, Unknown
  Bacterial polypeptide expressing nucleotide sequence isolated from the Sargasso Sea
aatgaaaaacaaaaaaataatttttatgggaactcctgatatttctgcaaaatatttaaatactttgattgaaaaaaatatacaaattcatacagtctttacacaggcccctaaaaaacaatcaagaggtatgaaattaagcaaaacgccagttcatctattagcaaataaaaaaaatattaatgtttttcatcctcaaaattttgatattgaaacaattaatatattaaaaaaaataaaaccagatctaattatagtaatggcctatggaaaaatacttccaaaggttattttagaattaccaaattacggctgtataaacatacatgtatctattttaccacgttggaggggagcggcgccaatagaacacgcattaatgaatggcgataaagaaacaggtatttctataattaaactgattgaaaaattagatgcgggaccaataattgttcaaaaaaaattcattattccagagaattgtaataaattagaacttactgataatttaacaaaaataggtacaaaattactagttgatgtaatcccacgtatcttgaatgataatattaaactaaaaattcaagatgaaaaaaaagcaacatatgcaaaaaaaataaattcaataacaagaaaaattaattttaataattcaatgaaagatataattaatcaaatcagggctcatgcacctaaacctggagcttggttttttataaataaagaaagaattaaattaattgatgctaaaaaaggaactggaagaggaaaattatctacagttttaaataataaatttgagataggttgtaatgatggaagta

SEQ ID NO: 229591 - DNA, 953 bp, Unknown
  Bacterial polypeptide expressing nucleotide sequence isolated from the Sargasso Sea
attatattctggggaacacctgaatattcaattcctagtcttgatatttttattaaatctaagcacgaggtaattgcagtagttagccaaccggataagaagagatctaggggaaataaattaatagcctcacctgtaaaaagcattgctgagaaagaatctataaaaatttatactccagaaaaaatcaggggcaatatagattttataaatgaactcaaatcactttcttgtgatttatttattgttatagcttacgggaaaattttacccaaagagatattggaaatcccaaaatttggttgttggaacgcacatgcttcattactgccaagatggcgtggtgccgccccaattcaatggtccctaataagaggtgatgaatttactggtgtaggaattatgaaaatgaatgagggactagatactggcgacatattgttggaagaaaaaattaaaattaataataacgataatttaaatacactttcggaaaaacttagtattttatcggcaaaattatttttaaatgctacatcactaatcgaagaaaatattaataaaaatactaatcctcaattaataaaacaaaatacccttggaagagaaattacttatgcaagaatgattgaaaaatcagactttaaagttgattggggtaacgaggcaattaaaatttctcaaaaaataaaaggattatacccacgaacaaatacaaattttagaggtaagaaccttaaaatacttaaaatcaaagttttgactagtgatgtaatgaaaaatgaaaaataccttttcatgagcaattattcaagaccaggtattattcttgctgtaatagaaaatgaaggaattataatttcaactaaaactgatccgattattttattagaagcaaaacttgaaggcaaaaacatttctagcaaaaagcaattgattcaacagttaaagcc

SEQ ID NO: 229592 - DNA, 502 bp, Unknown
  Bacterial polypeptide expressing nucleotide sequence isolated from the Sargasso Sea
tatgggcactccagacatagctgcccaacatttaaatattctaattgaaaataatttaaatattattggtgtatttacacaacccccaagaaaaaaaaacagaggtttgagaattcatgaaactcaagtacatcaaattgctaaaaaaaataatatagaggtttattcccctactgtaatagacaacaaagttataaaaaaaattaaaaatttagatcctgacttaattattgttgttgcttatggtataattttacctaaatcttttttaaatataccaaaatatggatgtattaatattcatgtttctttattacctagatggagaggagcagctcctatagagcatgcattgttggcaggtgatgagaaaacaggaattactataattaacatttctccaaaacttgatgcgggagacattctaatgcaaaagactctttccattgataataatatttacagtgatgacttaactttaaatcttacaaatcttggaaaa

SEQ ID NO: 229593 - DNA, 262 bp, Unknown
  Bacterial polypeptide expressing nucleotide sequence isolated from the Sargasso Sea
tttgaccactcctttacgtattatttttgcgggcacaccagattttgctgcccgccatctcgccgccctgctggattcccctcatcaggtgattgccgtctacagtcaacccgacagacctgcaggtcgtggtcatcagttacaacaaagcccggtgaaacaactggcattgcaacatgatattccggtgtatcagccgaagtcgttaaaaaaggccgctgctcaacaagaattagcggcgttaaatgccgatctgatgata

SEQ ID NO: 229594 - DNA, 644 bp, Unknown
  Bacterial polypeptide expressing nucleotide sequence isolated from the Sargasso Sea
tatgaagataatttttgctggtactccgcaatttgctgctgaacatttaaaaattttggttgccagcgatcaccacatcggctgtattttgacgcaacccgacaggcgctctggtcgcggtaaacaaataaaactatcacctgtaaaagaagttggtcttgagaataggattgaggttttacagcccagctccctaaaagataagcttactgtagaggctttaaagttgaatgaaccagatctaatgcttgtcgttgcttacggacttttagtgcctaaagaagttttagatattccgaaaatggggtgcgtaaacgtacacgcctctattcttcctcggtggcggggggctgctccaattgaaaattctatatattctggagataaagagactggaataacttacatgctaatgagcgaaggtcttgatgaagggcctatcttagaagtacacaaatgcagaattgaagacgaagacaacctgggaacaatagaaaataaatttgttaatctaagcaaggccaatttgttaaattttctcgaagaatttgaaaaaggaaaaattaaagaggttcaacaggatcactccaaagcaacccttgctcctaaaattacttctttagatcaagaaataaactgggatc

SEQ ID NO: 229595 - DNA, 850 bp, Unknown
  Bacterial polypeptide expressing nucleotide sequence isolated from the Sargasso Sea
tatccaatctctgttgtttacacacaaccaccaaaaaaatctaatagaggtcaaaagtttaacaaatctccaataaatttattttctgaaaatataagtctggatgtaagaactcctcgatctttaaaaaataatcttgaggaagagttatatttaaataaattacagcctgatattgttctggtagtttcttatggccaaattattccaaaaaatattttaaaaattgctaaaaatggatttataaatgttcacgcttctttactcccaaaatggagaggggcagcgcctatacagagatcaataatgaatcttgattcagagacaggtattagcataatgaaaataaatgaaaatttggatgaaggtccaatatgtaatcaatattcactaaatatttctgaaaaaatgaattcagaagaattatctgaaaaattatcattaatggcgtcagaaaaaattttagatattttagataatatttatgatggcaatatagaatttaaagaccaagatcattcaaaagcaacttacgcaaaaaaaattcaaaaaatagaaggaaaaattgattggaatgaaaatgcagaaaaaataattggaaaaatcaatggactctatccatatccaggagcctttttttcatttaatggagaaagatataaaatattaaaagcagaaaaatcaagtacaacaggaaaacctggggatatagtaagtgaaaattttgaagtatgctgtggaaaggggtcaataaaagtattaactattcaaagagaaggcaaaagagttcaacaaataaatgaatttttactaggtacccaaattaaaaaaggcactaatattgtttaat

SEQ ID NO: 229596 - DNA, 759 bp, Unknown
  Bacterial polypeptide expressing nucleotide sequence isolated from the Sargasso Sea
ttaattttagaactccagaaaaattaaaaaataacaatgaagaatatcaatttataaagaatatgaatgctgatcttgcagttgttgttgcatatggacaaattattcctccagaatttttgaaattaactaaaaaaggtttcattaatattcatggatctatactccctaaatggagaggggctgcaccaattcaaagatcaattatgaatttagataatgaaacaggaattagcataatgaaaatagttgaaaaattagatagtggaccagttagtaatatttataaaattgaattaaataataaaaataatgctcaagaaatttcagaaaagctatcaatattagctgctgaaaaaattatagataatgtagatgaaatattagaggatagtgcaaaatttgttgaacaagataactcgaaagcgacttatgcaaaaaaaataaaaaaaacagaaggtaaaattaattggaatgataaagctataagtattgttggaaaaataaatggtttatttccaactccgggtgccttttttaattttaatagtgaaagatataaagttttaaaagctgaaattggtaatggtttaggagaaataggtgaggtgttatcagataaattagaagttgcttgtgctaataatcaatcaataaaagttcttgaaattcaaagggagggaaaaaagcctcaaaaaattggtgaatttatgcttggatctcaaattaaaaaaggttcagtaatatctaatgtttaga

SEQ ID NO: 229597 - DNA, 817 bp, Unknown
  Bacterial polypeptide expressing nucleotide sequence isolated from the Sargasso Sea
aatgcaacaaaaaattgcttttatggggacaccaaattttgctgttccaatactaaagtgcatctatcagaatggtcatgcaatctcagcagtttatacacagccaccaaaaaaatctaatagagggcaaaaaattgaaaaatctcctatacacttattagcagaaactttaaatcttaatgttaggatacctgataaactcaaagaaaatgattcagagtatgagtatattaaaaatttagatttagatctagcaatagtaatagcatatggccagattataccaaaaaattttttatcattaagcaaaaatggcttcataaatcttcatgcatctattcttcccaaatggagaggtgctgcaccaatacaaagatcaataatgaatcaagataaagagactggcataagtgttatgaaaattaatgaaaggttagatgagggggacatttctaatatttttagaataaatatcttagaaaatgaaaatgcagaaagtttgagtgataggctttctattttagcgtctaagaatatttcaaatataatagattgtatttttgaaaaaaaagttagttatcaatctcaagatcattcgaaagcgacatatgcaaaaaaaataaaaaaaacagagggtttaatcgattggaatgatactgctgaaaatattattggaaaaataaatggattatatccatatccaggaggctattttttatttaaaggtgaaagatataaaatcttaagggcagaaaaatcattttctaaagaaaatccaggaaaagttttaacaaatgatcttgagggtgggctgtgg

SEQ ID NO: 229598 - DNA, 690 bp, Unknown
  Bacterial polypeptide expressing nucleotide sequence isolated from the Sargasso Sea
gaaaattttacccaaagagatattagaaatcccaaaatttggttgttggaatgcacatgcttcattacttccaagatggcgtggggctgccccaatccaatggtccctgatgaaaggtgatgaatttactggagtaggaattatgaaaatggatgagggactagatactggcgacttattgttggaagaaaaaattaaaatcgataataacgataatttaaatacactaacagaaagacttagtattttatctgctaaattatttttaaatgctacatctttactcgaagaaaatattaataaaaaaactaattctcatttaacaaaacaaactactcttgaaagagaaattacgtacgcaagaatgattgaaaaaacagactttaaagtagattggggtaatgatgcaattaaaatttctcgaaaaataaaagcattatttccacgagcaaatacaacttttagaggtaagaatctaaaaataattaaaattaaagttttgagtagtaatgaaattaaaaatgaaaaataccttttcataagcaattattcaaaaccaggtattattattgctgtcatagaaaatgaaggaataataatttcaactaaaactgatccgattattttgatagaagcaaaacttgaaggcaaaaacatctctagcaaaaagcaattgatacaacagttaaa

SEQ ID NO: 229599 - DNA, 718 bp, Unknown
  Bacterial polypeptide expressing nucleotide sequence isolated from the Sargasso Sea
aataagcaagaaattaaattttttgaaaagattaaccctgatgtagcaattgttgtagcatatggaaaaatattaccaaaaaaaatattagatttaaaaaatattaaatttctaaacatacatgcttctttgttaccaaaatggagaggagcagcccccattcaaaggtcaataataaatatggataaagaaactggtatatcaatcatgaaaattttgccaaaactagatagcggcccaattatgcttcaagagaaaatcaaaattacaaatgatgacgattacaactcattaagtagaaaattgtcaattctaggctcaaaactcattcttgaaacattgaatttaatagaaaaaaaatcgttcaaatttattgatcaagacgagcaattagcaacatatgcaaaaaaagtaaataaagatgaagcgatggctgattggaatatgactgccgagcaaattgttgcaaaagtaaaaggtttaaacccattccctggagtatggtttgttcataagagagtaaggataaaaattattagtgcttcagttactagttcaagaggaaatccaggtgaagttttagatgatgagttaaccattgcatgcaaagaaaagtccataaagatttctatgttgcaaaaagagggtaaaaaaaaactaacaagcaaagatttcttaattggttataagataaaaaaaggtgaaaaattatcttgat

SEQ ID NO: 229600 - DNA, 538 bp, Unknown
  Bacterial polypeptide expressing nucleotide sequence isolated from the Sargasso Sea
aatgaaaaataaaaaaataatttttatgggcacacctgatattgctgctcaacatttaaatattttaattgaaaataatttcaacatagttggtgtttttacacaacctccaagaaaaaaaaatagaggcatgcgtattgaaaaaagtgatgtacaccaaattgcagaaaaaaataatatagaagttttttatcccacctccattgataatacagtgacagaacaggttaaaagtttaaaacctgatttaattattgttattgcatatggaataattttaccctcaaaatttttatatattcctacatatggatgtattaatatccacttatctttattaccaagatggagaggggcagcgcctattgaacatgccttgttggcgggtgatgtaaaaacaggaataagtgtaattagcgtttcccctaagcttgatgcaggggatattcttatgcaggagagttttgcacttgatacatatatgaatagtgatgatttgactttaaatcttactaatcttggtaaaaaaatattaata

SEQ ID NO: 229601 - DNA, 487 bp, Unknown
  Bacterial polypeptide expressing nucleotide sequence isolated from the Sargasso Sea
atggcaaataagattatctttatgggtacaccaatattttgtgttcctatcttaaaatctctatatcaaaatggttataatatttccgtggtttttactcaaccaccacaaaaatctcatagaggacaaaaaattaacaaaagtccaattcagggtatctctgaaactttaaatatagattatagaacacctaagacacttaaggataatcaagaagagtatgaatttttaaaagaattaaatgctgatcttgcaatagtgtgtgcatatggacaaataattcctgaaaattttttaaacttaactaaaaaaggttttgtgaatattcacgcctcaattcttcctagttggcgaggcgcagcgccgatccagagatcaattatgaatttagatcctgaaaccggcataagtattatgaagatcaaaaaagaattggatagcggaccaaaaagtaatatttataaaatcagaatagatcaaaaccaaa

SEQ ID NO: 229602 - DNA, 886 bp, Unknown
  Bacterial polypeptide expressing nucleotide sequence isolated from the Sargasso Sea
gctgcaagcgcggcaagggaagacaagcgacatgcgtattgcgtttctcggcacgccggatttctcagttccggccctcgatgcgctcctgtcggcggggcacgaagtcacatgcgtgtacactcagccgccacgcccagcgggccgcggaaaggctgagcggcgttcgcctgtgcacgaccgcgcagaggccgtgggtatctcggtgcgaacaccgaaaaccctgcgcgatccaaatgtacaagcggcgtttgccgcactgaaccttgacgccgcggtggtcgtcgcctatggcttgatattgccccagccagtgctcgactcaccggcccatggctgcatcaacatccatgcctcgctgttgccacgctggcgcggtgcggcaccgatccagcgggcgatcctagccggtgacgccgagaccgggatcacaatcatgcagatggacgctgggctcgacaccggacccgaactcctgcgtaagcccgtgctgatcgccccggacaccaacgcgggcatgctgcatgaagcgctcgccgaaacgggaggccggctgatcgtcgcggcgctggcgggaatcgaggacggtacgttgcaggcggtgccacagtccgaaacgggcgacacctatgcccagaagatcaagcgcggtgaggaacggatcgactggtcgcagccagccacgatgctcgaccgccatgtgcgtgcgttcgcgccgtggccgggcgcgtggttcgagcatgacggcgatcggattaaggtcctcaaggcggcgatcgctgccaccgacggtgcgcctggcgaggtcatggatgatgcgctcaccgttgcatgcggcgaaggcgcgctgcggctgatgacccgtccaacgggctggcagggcggc

SEQ ID NO: 229603 - DNA, 828 bp, Unknown
  Bacterial polypeptide expressing nucleotide sequence isolated from the Sargasso Sea
tatgagcggccttcgcctcgccttcatgggcactccggatttcgcggtgccgagtctggtggcgcttcatgaggcgggacacgagattgccgctgtctatacccagccgccccgtcgggccgggcgcggccagaaggaacgaccgacaccggtgcaagcctgggcggtggagcacggtcttccggtatacacgcccacaagcctgcgggatgagagcgctcagacggcgttttcggcacttggtctcgacgcggccgtcgtggccgcatacgggctgatcctgccgctgccgatcctcgcggcgccgcgccttggttgcgttaacgtgcatgcctcattgctaccgcgttggcgaggagccgctcccatccaacgttcgatcctcgccggggatgtggagaccggtatctcgatcatgatgatggaagaggggctcgacaccggacccgtgttgtcgatggaaagtatcgcgactgttggtgagacgacggcgggcgagctgcacgaggctcttgcggaacttggggggcggatgatcgtatcggctctcgaggaatatgccgcgggcgcgatcacgccccagccccaggtcgatgccgacgcgacttatgccaggaagatcgataaatcagaagcgcgcatcgattggtcggaagactcgatggccgtccaacggcgcatcaatgcttttgcgccatggccgggtgcgtggttcgaagtcgcgggtgagcggatcaaggtgctcgctgccgaaacggtcgacgcctcgggtgcgaagggcgagacgctcgacgacgacctgaccgtcgcctgtggcatggtgcgctg

SEQ ID NO: 229604 - DNA, 442 bp, Unknown
  Bacterial polypeptide expressing nucleotide sequence isolated from the Sargasso Sea
atggcattaaaattaatttttatgggtacccctgaatttgctgtaccaattttaaaaactattcatagctccgaacataagattttatgtgtatatacccaaccaccaaaaagaaaacatagaggacaaaaaatttactcttctcctgttcaacagtatgctgaacgttctaatttaaaattaagatacccatctgatttaaatgaagaagaatatcaatatatcaaaactttgaaaccagaagcagttatagtagtagcatatggaaaaatcttaccaaaaaaaatattaggtttaaaaaacatagaatttctcaatgttcatgcatctctattaccaaagtggagaggagctgctcctattcaaagagcaattatgaatttagataaaacctcaggaatttcaataatgaaaatagtctcaaaacttgacgcaggtccta

SEQ ID NO: 229605 - DNA, 596 bp, Unknown
  Bacterial polypeptide expressing nucleotide sequence isolated from the Sargasso Sea
catgattgataaaaaaataatttttatgggtacgccagatatagcagctcaacatctaaatactttgattgaaaataaattaaatttagttggtgtgtttacacagcctccaagaaaaaaaaacagaggtatgcaaattgaagaaagcgcagtacatcaaattgcaaaaaaaaataatatagagatttattatccctctaaaatcgatgacaaagttattgaacatacaaaaattctaaagcctgatttaattattgttgttgcctatggtataattttacctacatcatttataaatattcccaaatatggatgtattaatattcatgtctctttattgccgagatggagaggggcagctcctatagaacatgcattactggcaggtgataataaaactggaattagtataattaatattacctcaaaacttgatgcaggagatattttgatgcaagatagttttttacttgatcagaatatgtacagcgatgatttagctttaaatcttacaaatcttgggaaaaaagcaatgataaaaattctaccactaatatttaaaaataaaattattggaaaaaaacaagatgaaaaaa

SEQ ID NO: 229606 - DNA, 729 bp, Unknown
  Bacterial polypeptide expressing nucleotide sequence isolated from the Sargasso Sea
cttacggaaaaattttacccaaagaaatattggaaatcccaaaatttggttgttggaacgcacatgcttcattacttccaagatggcgtggtgccgcaccaattcaatggtccctaataaaaggcgatgaatttactggcgtaggaattatgaaaatgaatgagggactagatactggcgacatattgttggaagaaaaaattaaaattaacaataacgatgatttaaattcagtatcggaaaaacttagtattttatcggcaaaattatttttaaatgctacatctttaatcgaagaaaatattaataaaaatactaatcctcaattaacaaaacaaaataccctaggaagagaaattacttacgcaagaatgcttgagaaatcagattataaagttatttggagtattgaggcatttaaaatttctcaaaaagtaaaagcattatatccaagagcaaatacaacttttagaggtaagaacctaaaaataattaaaatcaaagttttgagtagtgatgaagttaaaaatgaaaaataccctttaatgagtaattattcaaaaccaggtattattattgctgtcatagaaaatgaaggaataataattgcaactaaaactgatcctattattttgttacaagccaaacttgaaggcaaaaacatatctagcaaaaatcaattgatacaacagttaaagccaacagtaggtgattatttctcagattaag

SEQ ID NO: 229607 - DNA, 749 bp, Unknown
  Bacterial polypeptide expressing nucleotide sequence isolated from the Sargasso Sea
aatgactaattttcgaattctttttatgggtacagcccctttttctatacccactttacaaaaaattattacgagtggacatgagctcaaaggtgtatacacatcgccgtctaaaaaagctaatcgcggaatgcaaatttcaaagtcaccagtagcattgtatgcagaagagaataatttagagatatattcaccaaaagaattacgttctccagaagagattaaatttatcaaagatatgaatcttgacttcatagttgttattgcctatggcctcatactccctgaagagattcttaatcttccaaaatttggatgctataatctccatgcctcgattttgccaagatggagaggggcagcacctattcaaagatccatgattgaaggagacgaaatgactggagtgaccattatgaaaatgaataagggattagataccggagatattgttttacaagacaaaatcaaaattaatatttcagagagttacacagaattagaaacaaggctttcattaatgggagctgaattatttgaaaaatttttcaaagactctttattcaaaaatattatgcagaagcaagatgatactttctcttcttacgcagaaaaaatatctaagcaagaaactaagatagattggaaagaggatgccttaaaaatagtaagacgaattaatgcatacaatcccaatccaggcgcctgggttatgtggaaaaataaaagagtaaaaataataaaagcaa

SEQ ID NO: 229608 - DNA, 438 bp, Unknown
  Bacterial polypeptide expressing nucleotide sequence isolated from the Sargasso Sea
aatgaccaattttcgaattctttttatgggtacagcacctttttctatacctactctaaaaaaaatctctactagtggatacgagcttaaaggtatctacacgtcgccgtcaaagaaagcaaatcgtggaatgaaactttcaaagtcaccagtagcattatatgcagaagaaaataacttaaagttgtattcaccaaaagaattaagctctacagaagaaattaaattcatcaaagacatgaagcttgattttatagttgttattgcctatggccttatactgcctgaagagattcttaatcttccaaaatttgggtgctataatctccatgcctcgatattgccacgatggagaggggcagcaccgattcaaagatccatgattgagggagatgaaatgactggggtgactattatgaaaatgaataaaggattaga

SEQ ID NO: 229609 - DNA, 748 bp, Unknown
  Bacterial polypeptide expressing nucleotide sequence isolated from the Sargasso Sea
atggcatatgaaattttatttatgggaaccccagaattttctgtcccgattttaaaatgtttaaattcaaaacataaaattctatctgtttatactcaaccaccaaaaaaaaaatctagaggtcaaaaaatagtaaaatccccaattcatctagagtcagaaaaattaaaacttcctataagattcccagaaaatttaaataataacgaagagtataaattcataaaagagtctaaagcaaagttcgtaattgtagtagcatacggacaaataattcctgaaaattttttaaatacaaaaaatttaatatttttaaacattcatgcatctttacttcctagatggagaggcgctgcaccaattcaaagatcaataatcgaaatggataaagaaacaggaattacaataatgaaaatcataccaaagcttgatgcaggaccctacatgttgcaaaaaaaaattgttataaatgataatgacaattttgtatctttaagcaaaagattatctgatttgggttcagaatcaattttagaagctttatcattatttgaaaataataaggttcatttcataaatcaacaagaacaaatgattacttatgccaagaagatcaataaaaaagagtcagagattgattggaatgactccgctaaaaaaatcgtagctaaaattaatgggcttaatccatatccaggtgtttggtttgaacacaaaggcacaagaataaaaataattaaagctgaaa

SEQ ID NO: 229610 - DNA, 565 bp, Unknown
  Bacterial polypeptide expressing nucleotide sequence isolated from the Sargasso Sea
atgaataataaaaaaataatttttatgggttcgcctaaaatagcctctgactatctcgaggctttaattaaaaataatttcacaatttccgcagtattttcacaacccccaaaaaagaaatctagaggaatgaaaataattaaatctgaagtccatcaacttgcaaataaaaataacatagaagttttttgtccaaatatatttgataaagatactattgagacagtgataaaattaaatcctgatttaattattgtcatggcatacggtaaaatattgccaaatgatattttagatttaccaccatttggttgtatcaatatccatgtctctttgttacctagatggaggggtgcagcaccaatagagcattctttaatgagtggtgataaagaaacgggtgtgtcaataatacaattaatcgaaaaattagatgctggaccaattatcaagcaaaaaaaaatagatatagaacatgattgcaataaaaatgaattaagtcaaaaattaacagagactggaatacaattattagtggaaactattcctcttatatttaataaaa

SEQ ID NO: 229611 - DNA, 661 bp, Unknown
  Bacterial polypeptide expressing nucleotide sequence isolated from the Sargasso Sea
gatggcaaataagattatctttatgggcacaccgatattttgtgttcctatcttaaaatctctatatcaaaatggttataacatttctgtggtttttactcaaccaccgcaaaaatctcatagaggacaaaaaataaacaagagtccaattcagggtatctctgaaactttaaatatagattatagaacacctaagattcttaaggataatcaagaagagtacgaatttttaaaggagttaaatgctgatcttgcaatagtgtgtgcatatggacaaataattcctgaaaattttttaaatttaaccaaaaaaggttttgtcaatattcacgcatccatacttcctagctggcgaggcgcagcgccaattcagagatcaattatgaatttagatcctgaaactggcataagtattatgaaaatcaaaaaagaattggacagcggaccagttagtaatatttataaaatcaaaatagatcaaaaccaaaatgctcaagaaatttcagaaaaactatccgctttagctgctgaaaaaattttagataatgtggatgatatacttgaagacaaggcaaagtttattgatcaagatcattcaaaagcaacttatgcaaaaaaaattcaaaaagaggagtctcaaattgattggaataaggatgct

SEQ ID NO: 229612 - DNA, 763 bp, Unknown
  Bacterial polypeptide expressing nucleotide sequence isolated from the Sargasso Sea
aatggcttttaatatcatatttatgggaacgcctgtttttgccgttcctattcttaaggcaatatttgagtcaaaacataatgttctagaggtctacacacaacctccaaaaaaaatgtatcgtggtcaaaaaattaatttttcaccaattcacaagtattgcttggataataaaattaaagtaagacatcccgaaactctggatacaattacagagtgtaactacttttcaaaattaaaagcagacttggtagtagttgtagcttacggcaaaattttaccaaaaaatcttttgagtataaaaaatttaaaattcataaatattcatgcttcattattacctaaatggagaggtgctgctccgatacaccgagctataatgaatttagaccaggaaacaggaatttctatcatgcaaattattccaaagctagatgctggcccagtcatgatgaattcaaaaattaacatcacaaaaacaactaactttgaaacattaagtaatgagttatcaatgttaggatctagattaatattagaatccttagataaaattgaaaaaggtgaagaaaaatttattccacaaaatgaaagcaaggcaactttcgcaaaaaagattaccaagtccgagtcaagaatagattggtgcgatagtgctagcaaggtagttgcaaagattaatgcgttaaatcctcaacccggcacatggtttgaatataataagtcgagaattaaagtgattaaagcaatcgaactgaagaaa

SEQ ID NO: 229613 - DNA, 584 bp, Unknown
  Bacterial polypeptide expressing nucleotide sequence isolated from the Sargasso Sea
gatgtctcttaaaattctatttatgggaacccccgaatttgctgttccagtgctcaaatcactaagtgagtctgaacataaaattttatctgtttacactcaaccccccaaaaaaaagtttagaggtcaaaaagtaatagagaccccagttcacattttgtctaaaaaattaaattatgaaatcagatgtccaaaaaatctttcaaatgataatgaatatgattttataaaaaaattatcacctaatgttgtaattgttgtagcatatgggcaaataattcccgaaaaaattctcaatataccacacatactttttttaaatgtacatgcatctttacttccaaagtggagaggagccgctcctatacaaaggtcaattatggaaatggatgaagagactggtgtatcaattatgaaaattataaaaaaattggatgctggaccttatttgcttcaagaaaaaattaaattaaaaaaaaatgaaaacagtgagagtctagcttttaaattatcaaaaattggttcaaaactaattattaaagcgttaaaactaataagttcaggagatgcaatatttaacgaac

SEQ ID NO: 229614 - DNA, 619 bp, Unknown
  Bacterial polypeptide expressing nucleotide sequence isolated from the Sargasso Sea
aatgaaaaaaaaaattatttttatgggtaccccattatttgcagtacctatattaaaatctttatatcaaaatggatatccagtttcagttgtttatacacaaccaccaaatagatctcaaaggggtcaaaaattaaaaaattcaccaattcaaaatatgtcagagattttaaatctagaagttagaactcctaaaaatttaaagaacaataaggaggaattaaatttttttcaaagtttaaatgctgacttaggattagtagttgcatatggtcaaataattcctgaggaatatctaaatcttactaaatatggatttataaatatacacgcatctttacttccaaaatggagaggtgctgctccaattcaaagatcaataataaatttagaccaagaaaccggtataagttttatgaaattagttaaaaatttagatgagggtccggtgtgcaagaaatttaaaattacaattaataaaaaagataattatgagactttatctgataaattatcttctttagcctcagagaaaatactagatattatagatgatatttttgatgaaaaagttttatttgaaaagcaaaagcataatgaggcttcctacgctaataaa

SEQ ID NO: 229615 - DNA, 262 bp, Unknown
  Bacterial polypeptide expressing nucleotide sequence isolated from the Sargasso Sea
catgagaatcgtttttgccggtacgccggaattcgccgtcgcctcgctcggcgcggccgcgcgccaccacgaggtggtcgcggtctacacccagcccgaccgcccggccggccgcggccgcggcctgatgccgtcgccggtcaagctcgacgctatcgcccgcggcattccggtgttccagcccgagagccttaagacccccgaggcccagcggcaactgcgcgacctgcagccggacctgatgatcgtggtcgcctatggg

SEQ ID NO: 229616 - DNA, 505 bp, Unknown
  Bacterial polypeptide expressing nucleotide sequence isolated from the Sargasso Sea
aatgcaacaaaaaattgttttcatgggaacgccagagttctcaattccaactttagaggctttaataacttctaaacacaaggtattaactgtatattctcaaccagcaaaaaaagctaatcgtggacaaaaaattatatcctctagtgttgaaacgtttgcaagaaataaatctttaaatgttaggacacctactaatttaaatacgaataatgagtataatttttttaagaaaataaaaccagatattgttattgtcgttgcatatggaaatatcatacctaaaagatttttaaatttagcaaaaaatggttttattaatttacatgcttctctgcttccaaaatggagaggagcggccccaatccagagatcaataatgaatttagacaacgaaacaggggtaactataatgaaaatcgaagaagaattagatgcaggccccattatacatcaagataaaattaaaattaatgaaaaaataaatacacttaaacttgtctaa

SEQ ID NO: 229617 - DNA, 634 bp, Unknown
  Bacterial polypeptide expressing nucleotide sequence isolated from the Sargasso Sea
atgaaaatagtttttatgggaaccccatcttttgctctccctgtattgaatgccttatccttatcaaaaaataaaatttgtactatatacacacaggcacctaaaaaatctggcagaggtaagaaggtaaataaatctgctgtacataattttgcggttgaaaacaatattcaagttaaaacccctaaaaaattaactacagatacggatgcttaccatataaaaaaaattaaagcagacatttgtgttgtcgcagcttatggtttgattcttccagaaagtgttcttagtgcaccattattaggttgtataaatattcacgcttccttattacctaaatggagaggggctgcaccgattcaaaggtcaattctagccggagataatgagacaggaattacaattatgagaatgaataaagaactagattctggcaatattttgtcacaggcaaaaataaaaattactcagaaaactaattttagtgatttggaaaatagtttatccataattggagcaaatgaattaatgaaggttcttaaaaacttttcagaaaataaaataaaagagatagagcaagagcataagttagcaacatacgcaactaaattaaaaaagatgaaagtaaaattaa

SEQ ID NO: 229618 - DNA, 784 bp, Unknown
  Bacterial polypeptide expressing nucleotide sequence isolated from the Sargasso Sea
aagaagtgaagtacatcaaattgcaaaaaaaaataatatagagatttattatccctctgcaattgatgaaacagttattcaacaaataaaaaatttagagcctgatttaattattgttgttgcttatgggataattttacctgcatcatttataaatattcccaaatatggatgcattaacattcatgtctctttattaccgagatggagaggggcagctcctatagaacatgcattgttggcaggtgataataaaactggaattagtataattaatattaactcaaaactcgatgcaggagatattctcatgcaggaaagttttttacttgatcagaatatgtacagtgatgatttaacttttaaacttacaaatcttgggaaaaaagcaatgataaaaattttaccactcatatttaaaaataaaattattagaaaaaagcaagatgaaaataaagttacttttgcgaataaatttttaaatgaagatagaaaaattaattttcataactctacttcagatgtttataatcacatacgtgcacatggaccaaaaccaggatcatggtttatttataaaggtgagagaataaaaataattaaagcaaaaaaaactaaggagtctggtcaaagctcaacaattttaaataaagactttattataggatgtaaagacggaggtattattccgctacttatacaacgagaaggaaaaaaaatagttaacctagttgattttttgcgaggctttactttctccattcatgataaattaaatgtataa

SEQ ID NO: 229619 - DNA, 745 bp, Unknown
  Bacterial polypeptide expressing nucleotide sequence isolated from the Sargasso Sea
aatgaagattgtatttgccgggactccagaattcgcctctaaacatttagaaatgattttaaaatcagaacatgaaattgtaggtgttatgacccaacctgatagaaaatcaggacgagggaaaaaaattaatttttcaccggtaaaacaattggctgagttagaaagattgaatttattgcagccaagtaacttaaaaaacgatgagttcattgagagttttacttcacttgaaccagatttgtttctagtagttgcttatgggttaatcattccaaaacaaattttaaaaatacctaatctagattcgataaacgtccatgcctctatcttacccaggtggagaggtgcctcgcctatggaatacgcgattctaaatggggacaacaaaacaggcatcagttacatgagaatgaatgaagggctagatgaaggaccaatttatgaaattcacgaatgcgaaatctcgctatcggatgggttagaggaaattgaaaataagcttatctccttgagtgatcaatatttaatcaacttcctagatagaatatctgaggacaacatgtctccaacaagtcagccagaaactggcataacttttgctccaaagattgggaaagacctcctctctattaggtgggataaagacagggctgaagagatagtcaaaaagataaatgctctaggaacaaaatacggaacttacactttcctcggcagagatagggtaaagataattaaagct

SEQ ID NO: 229620 - DNA, 397 bp, Unknown
  Bacterial polypeptide expressing nucleotide sequence isolated from the Sargasso Sea
catggctaagaaaattatttttatgggtacacccatgtttgctgtaccaattttgaaatctctttatcaaaatggatatcctgtgacatgcgtttatactcaacctccacaaaaatcacatcgtggacaaaaaattaataaatctcctattcaaggaatttctgaaactttaaatttagagtatagggcaccgtcaactttaaaagaaaataaagaagaatacgaattttttaaatcagtagatgcagatctagcaattgttgtagcctatggacaaattatacctaaagaatttttaagtttaacaaaaaaaggatttataaacatacatgcatctattctacccaagtggagaggagcggcacctatacaaagagctataatgaatttagataaa

SEQ ID NO: 229621 - DNA, 731 bp, Unknown
  Bacterial polypeptide expressing nucleotide sequence isolated from the Sargasso Sea
agatacacttgaaacgagcgaggaaattaatcatttcaaaactttaaaacctgacttagtagtagtagttgcttatggaaaaattttaccttctaaactattgaatattgataaacttcttttcattaatgcgcatgcctctttattacctaaatggagaggggcagcacctattcaaagagctattatgaatatggattcagaaacaggaatatcaataatgaaaattattccaaaactagacgcaggcccagtcatgttacaagaaaaaattaaaatttctaaagaaatgtcttatgaaaatttaagtaataaaatgtcagaaattggagcaaaattaattcttgagtcgattaaattaatcgaaaataataaagtcaattttattgaacaaaaagagtcagaagcatcttatgcagaaaaaattagaaaaaacgagtctaaaattaattggaacgaaagcgcaaaaaaaattattgcaaaaatcaatgcactgcatccaaacccaggttgttggtttaaattttctgagtcgagaattaaaattattaaagcaatagaagttgagaaaacaggcgaagcaggtactattcttgatgataaaatgacaatcgcttgcgcaaaaaatgcagtacaaattttagaacttaaaaaagaaggaaaaaaacaaatgctgatagatgaatatttaaaaggtaatgagataaagattggtcagaaattaaattaaa

SEQ ID NO: 229622 - DNA, 396 bp, Unknown
  Bacterial polypeptide expressing nucleotide sequence isolated from the Sargasso Sea
aatgtcaaaaaaaatagtttttatgggaacgccagcgttcgcagtcccctctttggaagctttaaaaaattccaatcataatattctagcagtttattcacaacctgctagcagagctaatagaggtcagaaattagttgagtcaaaagtagaaattactgcgaaaaaattttcattaaacattagaaccccttcagtattagatagtaaaacagaatataatttttttaaatcaattcaaccagatatagtaatagtagttgcttatggtaaaattattccaaaaaagttcttaagcattccaaaatatggatttataaacgttcatgcatcgttattacctaagtggagaggtgctgctcctatacaaagatctataatgaaattagataaaga

SEQ ID NO: 229623 - DNA, 636 bp, Unknown
  Bacterial polypeptide expressing nucleotide sequence isolated from the Sargasso Sea
aattattaaatttagacaaagttttattcataaatgttcatgcctctttattgcctaagtggagaggggccgccccgattcaaagagctatcatgaatttagataacgaaacaggtgtctctattatgaaaatagtaactgaattagatgctggtccagttttaatgcaatcaaaaataaaaattacaaaagaaactaactacaaagaattaagtggtcaaatgtcagaattaggagctaaattaattttagatacattaaaattaattgaaaataaaaaggctaattttgtagagcagaatgatacagaggctacttacgctaagaaaattgaaaaaaaagagactaaaataaattggaatgatgatgctgaaaaaattatagctaaaataaatgctttttacccgaatccagggtgttggtttgaatttgagggaattagaataaaaataattaaagctaaagagataattataaaggctatacctggtaagatattagatgataaatttacaattgcatgttcaaaaaacgctgtgcaaataattgaacttcaaaaagagggaaaacaaaaaatgacagtagatcagtttttaagagggaataaaattaaaattggccagaacttaaattaat

SEQ ID NO: 229624 - DNA, 429 bp, Unknown
  Bacterial polypeptide expressing nucleotide sequence isolated from the Sargasso Sea
catggctaagaaaattattttcatgggtacacctatgttcgctgtaccaattttgaaatctctttatcaaaatggatatcctattacatgcgtttatactcaacctccacaaaaatcacatcgtggacaaaaaattaacaaatctcctgttcaaggaatttctgaaactttgaatttagattacagggcaccatcaactttaaaagaaaataaagaagaatatgaattttttaaatcagtagatgcagatctagcaattgttgtagcctatggacaaattatacctaaagaatttttaagattagcaaaaaaaggatttataaacatacatgcatctattctacctaagtggagaggagcggcacctatacaaagagctattatgaatttagataaagaaactggggtcagtattatgaaaatagatga

SEQ ID NO: 229625 - DNA, 557 bp, Unknown
  Bacterial polypeptide expressing nucleotide sequence isolated from the Sargasso Sea
aaaataatttgtgtttatacgcagccaccaaaaaaaaaggcaagaggacaaaaaattatttcttcaccaatatacgaatacgccaaaaaattgaacctttctacaagatgcccgatcaaattaaatgatgataaagaatatgattttataaaaaaaaaaaaccctagtattgtaattgttgttgcttatggacagatcataccaaaaaaattcttagatttaccaaaagttatttttttaaatattcatgcttcaattttaccaaaatggagaggggccgctccaatacaaagagcaatcatgaatttagataaagagagcggtatatcggttatgaaaattgaaccaaaattagacacagggccggtaatgatgaagtcgaaagttattatttataaagaaacaagctatgaggatctaagcaaaaaattatcaaatctaggtgctaaattaattttagactcgttaaatttaattcaaaataaaaaagcaaattttgttgatcaagatgagaaggaagcaagttacgcaaaaaagatagaaaaaaaggagtcaaa

SEQ ID NO: 229626 - DNA, 700 bp, Unknown
  Bacterial polypeptide expressing nucleotide sequence isolated from the Sargasso Sea
gttcattcaaaaactaaatcccgatataattgtagttgtggcttatggaaaaatcatacctccggaatatttgaaaattaaaaacattaaatttataaatattcacgcatcgttgttaccaaagtggagaggagcggctcctattcaacgatcattaatggagatggatgaggaaacagggatctcaataatgaaaataatcccaaaattagactctggtccatttttacttcaagaaaaaattcaaattaaaaaaagtgataattatgactctttaagtgctaagctagcaaatttgggatcaaggttaattataaaatcattaaatctgatagaagcaaataattttaagttgattgatcaggatgagacaaaagctacttatgcgaggaaaatagataaaaaagagtcaaaaattgattggaacatacccgcaaaaaaattaattgctaaaattaatggactcagcccttttccaggagcgtggttcgaacataaaaaaaagagaattaaaattcttgaggcactagaagttgaacaaaccggtgaaactggagaaattctagacgataatttaactatcgcttgtaaagaaaaagctattaaggttttgtccgtacaaaaagaaggaaagaaaattttaaaaactaaagaatttttgtctggttacttggttagaaaaggagagaaacttatttga

SEQ ID NO: 229627 - DNA, 745 bp, Unknown
  Bacterial polypeptide expressing nucleotide sequence isolated from the Sargasso Sea
aatgtcacttaatgtaatttttatgggaaccccaaagttctctttgcctgctcttgaagaactaattagaaataattttaatattttaacaatttatactcaacccccccaaaaatcaaaaagaggacaaaaaataaatccctctgcaattgaagaattttcaaggaaaaaaaatctaaatttaagaagtcctaaaagtttaaataatggtgaagaacttaaatttttcaaaaatttatctccagatttagtagttgtcgtagcctatggacagataattccaaaaaattttttagaaataccaaagtttggttttattaatattcatgcttctttgttaccaaaatggcgtggggctgcgccaattcaaagagctataatgaatcaggataaaaaaataggagttagtattatgaaggtagaagaaaaattagacactggaccagtactaaattctaaagaaatggaattaaataaaaattcaacatatggcgagattgaaaaaaaactttctattattggcgcaagtttattggttgagactttaaaaaaattaagtattaaaaaaatagaatttataaaacaagataataacaaagttacttatgcaaaaaaaataagcaaagatgaaacaagaataaactggaatttagaagcagataaggtaatagctcatatacatgggttaagtccgagcccaggagcttggtttgaacacaaaggagatagatttaaagtattttaa

SEQ ID NO: 229628 - DNA, 623 bp, Unknown
  Bacterial polypeptide expressing nucleotide sequence isolated from the Sargasso Sea
aatgtctaaaaaaattatttttatgggtacaccattttttgctgtaccgatattaaaatcattataccaaaatggatatccgatttcagtagtatacactcaaccaccaaaaaaatctaaacgtggtcagaaaataaataaatcacccatccaaggtctctctgaaacacttaatataaattttagatcacctataacattaaaaaataatcaagaggaatatgaatttttgaaagaaatgaaagcagatcttgcaattgtagttgcttatggtcaaataattccaaaagagtttcttaatttaactaaaaaaggttttattaatattcatggctctatacttcctaagtggagaggtgcagctccaattcaacgttctataatgaatttagataaagaaacaggaataagtattatgaaaatcgttgaagagttagatagtggcccagtttgtgatgtttataaagtaaaaatgaattatttgaataatgctcaagaagtttcagaaaaattggcagttttagcatcagaaaaaattctggctaatattgatgatattttagatgataaagcaaaatttattgaacaggatcactcaaaagcaacttatgcaaaaaaaattg

SEQ ID NO: 229629 - DNA, 664 bp, Unknown
  Bacterial polypeptide expressing nucleotide sequence isolated from the Sargasso Sea
agtttcaaatctgataaagatcgaactatttttaggaacttaaaggctgatatagccgtcgttgtagcttatgggttaatacttcctaaccaaattctatcagcaccaaaattcggatgcctcaatatacacgcctctcttttgccacgttggcgaggggctgcgccaattcaaagagcaattatggaaggagatgatgaaacaggtgtttgcatcatgaaaatggaagagggtcttgacacaggtccaatactatcttccagaaaaattcaaattagagaaaatgataatgccaaaattttatcagaaagattaagttcagtaggatcaaagcttatagtaaaggtgctggatacgttatctgaatttaggccctatagccagtccgctgctggtgttacgtatgcgcgtaagatcgagaagtctgagacaaaaattgactggtcgttgcctgcaaaaactatcgatcgaaaaataagagctctgtctccttttccaggagcttggacggaaataaatggcgagcggataaaactattggcatccaaggtcataaacaaagaaaatgaacctgggatggtcctagataaagggttttcaattgcttgtggtcaaaaagcagtcgaaataacggaagcgcaaagaccaggaaagtctgctcaaa

SEQ ID NO: 229630 - DNA, 607 bp, Unknown
  Bacterial polypeptide expressing nucleotide sequence isolated from the Sargasso Sea
tataaatcttcatacatcattattaccaaagtggagaggagcagcaccaattcaaagagcaataatgaatggagacaaaactattggtatgagcattatgaagatcgaagaaaaattagattgtggtccgattttactatcaaaagaaataaacctagatcaaaaaaccacatatggtgagattgaaaaaaaactttctataatgggcgcaaatttattaattgaaagtttaaaaaatattgaggctggagatgtaaaatttacggaccaagatcattccaaagcgacttatgcaaaaaaaatagataaaaacgaaacaaaaattaactggaaccaagacgccaataaggttttggctcacattaatggtctaagcccaattccaggtgcatggtttgaatacaaaaacgagcgatttaaaattttaaaagcaaaaatatcatcacaaaaaggaaaatatagtacagttttagatgactatttaactattggatgcaagtcggactctattcaagtattagaattacagcggcaaggaaaaaataaacaaaccactaaagaatttttgttaggtaataaaattcctaaaggtttaattttaaactaa

SEQ ID NO: 229631 - DNA, 703 bp, Unknown
  Bacterial polypeptide expressing nucleotide sequence isolated from the Sargasso Sea
catgccaaagaaaatagtttttatgggtactcccatgtttgctgttccaattttaaaatcactttatcaaaatggatatcctgtttcttgtgtttatactcaaccacctcaaaaatctaaaagaggtcaaagaattaacaaatcacctgtccaattaatttcagaaactttaaatatagattttagaacaccaaattcattaaaagaaaatttagaggaattagaatattttaaatcattaaaagcagatttggcaatagttgttgcttatggtcaaattataccaaagtcatatttaaatttaactaaaaaaggatttattaatatacatgcatctattcttccaaagtggagaggtgctgctccgattcaaagatctattatgaatttagataaagagacgggtattagtattatgaaaataggagaagaattagatacaggaccagtatgtaacgtttataaaattaatatagaaaataatttaaatgctgaagatattagtgaaaagctatcgagtttggctgcggagaaaatattagataatatagatgatatatatgaggataaagcaaactttatagaacaagatcaatcatcagcaacatacgcatcaaaaattcaaaaatttgaggggcagattaattggaaagaagatgctaaaaatataataggtaaaataaatggactttatccggttcca

SEQ ID NO: 229632 - DNA, 463 bp, Unknown
  Bacterial polypeptide expressing nucleotide sequence isolated from the Sargasso Sea
aatgctaaaaaatattgtttttatgggtacaccagaattttcagtcccaatcctaaaatctttatatcaaaatggttaccctataaagacagtttatacccaagcacctcagaaatcaaatagaggacaaaaaattaataaatctccaatacataaaatttcagaattactaaatttagaggttcgaacacctatcacatttaagaataacaaagaagaattcgaatacttaaaaaaaatagatgctgatttagttattgtggtagcttatggtcaactaattcccgaaagttttttaaaacttgcaaaaaaagggtttataaacgtacatgcttcactattacctaagtggagaggagctgctccaattcaaagagctattatgaatttagatgataagacaggaattagtattatgaaaattactaaagagcttgattctggaccaatttgtaatttatat

SEQ ID NO: 229633 - DNA, 673 bp, Unknown
  Bacterial polypeptide expressing nucleotide sequence isolated from the Sargasso Sea
gatgaaaattatttttgctggtacaccagaaattggattggaaactttgaaaactattcatggttcaaatcatgaaattagtttggtgcttaccaacgaagacaaaccttctggtcgaggaaaactaatttcgaaaagcccagttaaaatttttgctgaagacaatgaaataatgttgaagcagcctaaaaatttaaaagaaaaggggttagtgacgtatcttaaaaacattaatgcagatcttttagtagtgttcgcatatggacatattatcccggaagaaattttagaaatttttgagaagggagcattgaacgttcacacttctttacttccagagctaagaggggccgcgccaattcaaagagcaattatgaacggggatacggaaacaggtatttcttttatgaaaatggaaaaaggactggacactggtcctatttattcgcaagaaaaaatagagatagaagaaaatgaaacttctgaaacgttaactgcaaaaatgtctgaagtgagttcttctagaattctacaaattattgatttaattgataaaaataattttaaattaactccacaaaattcaagtaatgccacttatgcgcctaagataatgaaagaagaagcaaaaataaattgggatgaatctgcaataaaaattgtaaatcttata

SEQ ID NO: 229634 - DNA, 680 bp, Unknown
  Bacterial polypeptide expressing nucleotide sequence isolated from the Sargasso Sea
aatgcttaaaaaaattatctttatgggtacacccatgtttgcagttccaattttaaaaaaactatatcagaatggttatcaaatatctgccgtttatactcaaccaccaaaaaaatcaaatagaggtcaacaattaaaaatctcacctatacatggaatttctgaaactttaggtcttgatattagatcgccaaattatcttaatggtaatgaaaaggaaattaattttataaaaaatttagatgcagatttagcaatagttgttgcgtatggacagattattccaaaggaatttttaagtttaaccaaaaaagggtttattaatattcatgcttccttgttaccaaaatggagaggagcagctccaattcaaagatcaataattaacttagataatgaaactggaattagtataatgaaaattaatagtaagcttgatgcaggaccagtttgtaagttctataaagtgccaatatatgaacaagataattttttaagtttatctgaaaaattatcagatttagcatctgaaaaactgttagataatattgatgaaatattagaaggatcaatgaaatttattgatccagacaatactaaagcaacatatgcaaaaaaaattttaaaatctgagggaaaaataaattggaatgagtcagcaattcagattattgggaaaa

SEQ ID NO: 229635 - DNA, 928 bp, Unknown
  Bacterial polypeptide expressing nucleotide sequence isolated from the Sargasso Sea
atgaaaattatttttatggccaatcctgaattttcttgcccctcactcaaggctttttataactctgatcacgatttagttggtgtaattagcaataaaccaaaaagaatgaagcgatcaatggataaaagctttactccattgggaaatttggcgattgatcttgatcaaaatttatttacaacggataacctttctgacacaaatctacagacatgggcaaaaaaattaaaaccagacatctttattgttgtcgcctttaaaattttaccaaatactcttcttgaaataccaaaaattggcgctattaatcttcatgcatccttattaccaaagtacagaggggcagcgccaattcagcacgctctaattaatggtgacaaagtaactggaaactccactttttttattaagccaaaagttgatacaggtaaaataattttacaggagaaaattttaatagatgataaagataattatgaaagtctttcaaaaaaaatgtccaccagtggggcagaattattacttaaatcattagataaaattaatgaatcgagctttaaagctttagagcaaaatgataaaaaagcaacatatgcccctaaaattgataaatctttttgtaagattaattggaatgaatcagctcagagtattcattcaaaagttagagcattatctccagtgcctagtgctttcacattgttaaatggcaaaagattgaaaatatatgatactagattggttaaagatccattaaaaagtcctcccggctcaataactcatatcaatgataaaattttgatttcttgttttgactatcaattagaattaataagtgtacaatatgaaggcaaaaagagaatgtccgcaatcgattggattagaggaataaattatacttctggatttagctttgataaagaaa

SEQ ID NO: 229636 - DNA, 637 bp, Unknown
  Bacterial polypeptide expressing nucleotide sequence isolated from the Sargasso Sea
cttgggtttatactcggatagatttataaatattcacgcatcattgctgcctaaatggagaggtgcagcaccaattcagagatcaataatgaatttagataaagaaacaggcataacaattatgaaaattaatgaaaaattagatcaaggagatttttgtagtcagtataaattaaaaattgaaaataatgaaaatgctgaaaatttagcccaaaggttatcaaaccttgcagcaaataaaattataggggacttagacgatatacttgaaaacaaaaaattatttattaaacaaaataacaatgaagcatcgtatgcaaaaaaaattagtaagactgaaggtaaaattaattgggataaaagtgcagagcaaataatagcaaatattaatggattatatccaaaacctggcgcctggttttattttaaaaaaaatagatataaaatattaaaagcagaagtttcaaataataattcagtaccaggtttagtagttaatgaaaatcttgagatatcatgtggttctaattcaataaaaataattaagattcagagagaagggaaaaaagagcagaatattgaagactttattttaggtacaaagataaaaaagggagtgaatttgaaagatgtatag

SEQ ID NO: 229637 - DNA, 830 bp, Unknown
  Bacterial polypeptide expressing nucleotide sequence isolated from the Sargasso Sea
tatactcaaccttcctcaaaaatccaaaaggggccaacaagtaaatagatcacctattcagtctatgtctgaagttttaaatatagagtttagaactccacaaactttaaaaaataataatgaagaatatgagtatttaaaaaaactggatgcagatatagcaatcgttgttgcttatggtcaaattatacctccagaaatacttaaattaacaaaaaaaggttttattaatattcatgcctctctacttcctaaatggagaggagccgcacctattcaacgagcaatcataaatttagataagctcacaggaataagtataatgaaaattaatgaaaatctagatagtggaccagtttgcaactcttacaaagtagatattttgaataatgaaaatgcagaagaaatttcaaataaattatcaagtttagctgctgaaaaaattttagaaaatttagatgatatttttggtgataaggcaaattttacagaacaagatcactcccaggctacttatgcaaagaaaataaacaaactagaaggaaaaataaactggaacgaaaaatctatggcaattattggaaaaataaatggtttatatccaaatcctggtgcatggtttatttttaaaggcgagaggtataaaattttaaaagcaattatatctgaaaaagaaggagagccaggtatcgtcttaaatgattatttagaaattgcatgtaatgacaagtcaataaagattcttgaaatacagagagaaggcaaacgacagcaaaaaattgaagagtttgtacttggatcaaaaattaaaaaaggatcaaatttaaata

SEQ ID NO: 229638 - DNA, 811 bp, Unknown
  Bacterial polypeptide expressing nucleotide sequence isolated from the Sargasso Sea
atgaatgataaaaaaataatttttatgggcacaccgcatatagccgcccaacatttgcagtacttaattgataatagtttaaatataattggtgtgtttacacaaccaccaagaaaaaaaaatagaggtatgcatattgaagaaagcccagttcatcaaattgctaaaaaaaataatttacaaacctactatccaagctctatagattactcagtaatagaaaaaataaacagtcttaatcctgatataattattgtcgttgcctatggtattattttgccatcacaaattttagatacaccaaaatttggatgcatcaatatccatgtatcattacttccgagatggagaggggcagcaccaattgaacatgctttgctagcaggagatgtaaaaactggcataagtgttataaaaatctcacccaaacttgatgctggagatattcttcatcaagaaagcttaaatataagtgcagatatgtacagtgatgaattgacagtggctcttacaaatttaggtaaacaaacaatacttaaagttttgcctaaaatttttgaaaacaaaactttatctaaaaaacaggaatcgaataaagtgacatacgcgaagaagttcatatcaaatgatagaaaaataaattttaataattctactactcaagtttataatcacattcgagctcatggaccaaaaccaggttcatggtttgtttatcgaggcgagagaattaaaattttaaaagctataaagcataaagaaaaaggtcagcaatctacaatcttaaataataaatttatgctcgcatgta

SEQ ID NO: 229639 - DNA, 409 bp, Unknown
  Bacterial polypeptide expressing nucleotide sequence isolated from the Sargasso Sea
aatgcaacaaaaaattgcttttatgggaacaccagattttgctgttccgattctaaagaatatttatcaaaatggatatgaaattttaacagtttatactcagtcacctaaaaaatctaatagagggcaaaaagtagaaaaatcaccaatacatttatttgctgaaacattgaatcttaatgtcagaacaccagatcaactcaagaataatattttagagtatgatcatataaaaaatttagatttagatttagtagtagtagttgcttatggtcagattattccaagtgattttttatcattaagcaaagaaggttttattaatcttcatgcatcaatacttcctaaatggagaggtgcggcaccaattcaaagatcaataatgagcccagataaagagacaggtatt

SEQ ID NO: 229640 - DNA, 808 bp, Unknown
  Bacterial polypeptide expressing nucleotide sequence isolated from the Sargasso Sea
aatgccaaaaaaaattatctttatgggtacacccatgtttgcagttccaatattaaaatctctctatcaaaatggttttccaataaatttagtttatacacaaccaccccaaaaatctcaccgaggtcagaggataaataaatcaccagttcaaggtatatcggaaactttaaatatagaattcagatctccacaaaatttaaaaaacaatactgaggaatatgagttttttaaaaaaatagatgctgatcttgcaattgttgtagcctatggacaaataattccaaaagaatttttaagtttaacaaaaaaaggttttataaatattcatgcatccatacttccaaaatggagaggtgctgcacccatacagagagctataatgaatttagacacagaaacagggatcagtataatgaaaataaatgaagaattagatagtggacctgtaagtaacatttataaaattaaacttgaccaaagccttaatgcaaaagaagtctcagaaaaacttgctctaatagcagcagaaaaaattttagatgttgtagatgaaatttttgagggtaaatcaaattttgtagatcaagataattccaaagccacttatgcaaaaaaaatcagtaaaaatgagggtcaaatagactggaaaagtgatgctttaaaaataattggaaaaattaatggcttatatccctctccaggagctttttttaattttaacggccaaagatataaaattttaaaagcaaaaattggaaatgggattggtaaaatggtgaggttatatcagacgatctttgaatag

SEQ ID NO: 229641 - DNA, 567 bp, Unknown
  Bacterial polypeptide expressing nucleotide sequence isolated from the Sargasso Sea
catgacgcgctatcgtattgtgtttatgggcagtccagattttgcaattccagcgctgcaaaaactggccaaaacccataatatctgcgcggtatatacccaaccagccagacctgctgggcgcggcatggatccaacgccagtgccagttgccgcctatgccgctgacaaatcactgaagttattttcaccagcatctctaaaaaccgatgatactcaacatcaacttgccgcgcatgatgctgatctttttgttgttgtcgcctatgggctgttattgccaaaaattgttttaaacatgccaaagcttggctgtatcaatggacatgcatcattgttgccacgctggcgcggcgcagcgcccatccagcgtgccattgccgctggcgatgctgtgaccggcatttcagtcatgttaatggatgaagggcttgacactggcaaagtgctgatgcggcgttctatcaaaattgatccggccgaaaccgctggtagcctgcatgataaattggcgacgctaaacgccgaaacgcttggtgaagtggtcggggatatcaccagtttgct

SEQ ID NO: 229642 - DNA, 661 bp, Unknown
  Bacterial polypeptide expressing nucleotide sequence isolated from the Sargasso Sea
ccggcctatgccgtccccaccctgagaaagctgcatcaggccgggcacacgatcgttggggtggtgagtcagccggatcgccgccgagggcggggtcaacagctggtggcttcggccgtgaaacaagaggccctgaacctcaacctgccggtgttcacaccggaacggatcaagaaagattctgactgccaggcgcagttggcagccctccaggctgatgcatctgtggtggtggcctttggccagatcctgccgctcgaggtgttggaacaaccgccactggggtgttggaacggtcacggttcattgttgccgcgctggcgcggggcggccccgattcaatggtcgattctcgacggtgatgcggaaaccggcgtcggcgtgatggccatggaggaaggcctggacaccggtccggtgctgctggaacgccgattgagcatcgggcttcaggacaatgcccatgaactggcggagaaactcagtgacctaacggcggagctgatggtggaggcgatgccgctgatcgaagcagcgggtgcgggtccaaccgatgaacggttgaaacggctcagcgtgcagcaccaggccgacgccagctgctatgcccgaatgatctgcaaacaggattaccagattgattggagcaactcagccctgg

SEQ ID NO: 229643 - DNA, 685 bp, Unknown
  Bacterial polypeptide expressing nucleotide sequence isolated from the Sargasso Sea
tatgaataaactaaaaatcgtgttcgcaggaacaccgcaatttgcagagagttatttggcatcactcattagttctaggcatgatgtggtatgcgttttcacgcaaccaagtaaaagatctggaagaggtttaaaatttaatcacagtccagttagaaatactgcccaagctaataatatcgatataaggcagcctgaaaaaataacaattgtagaaacagatgctctttcggagataaatccagatatagtcattgttgttgcatatggattaatgctaagtaaagaatttatgtctgttcctcgctttggatgtgttaacgtacatccatctcttcttccaagatggaggggtgctgcacctattcaaagatcaatagaatcaggtgataaactttcaggtataaccataataaaaatgaaagagaagcttgatgctggagatataatttaccaggagccagttaaaattgacactaacgattcatcgttaagcttgcataagaaattcgttgaagttgggaccgacattctattattgacacttgactcaattaccgagaataattatatgatgtatcctcaagatgaaaatctagcaacatacgcaaagaaaattaaaaaggaagaagctaaaataaattgggacaatagtgcagaaaaaatccatagaaaaataatggcc

SEQ ID NO: 229644 - DNA, 624 bp, Unknown
  Bacterial polypeptide expressing nucleotide sequence isolated from the Sargasso Sea
aatgtcacttaatgtagtttttatgggaactcctgagttctccgttccaacactaaatgctcttatcaagaataagcataatgttataaaagtttatactcaacctccaaaaaaatctaaacgagggcaaaaagttaacccatcgccaatagaagagttttgtaaaaaaaataacataaatttaagcaatccgacaaaccttaataataaagaagagttagagattttaaaaaaactatctcccgatatagttgtagtagttgcttacggtcaaataattccaaaaaattttttagatatagctaaatttgggtttattaatattcatgcatctttacttcctaagtggaggggggcagcaccaatccaaagagcaataatgaatggagataaaaaaattggcgtaagtatcatgaagatcgaaaaaaaattagatagtggacctattttggcttcagaagaattagaactagatcaaaacgcaactcatggtgaaatagaaaaacaactttctataatgggggcaaatttattaattaaaagtttaaaaaatatagaagatggtaactcaaaatttgtagatcaagttcattctgaagctacttatgcaaaaaaaatagacaa

SEQ ID NO: 229645 - DNA, 820 bp, Unknown
  Bacterial polypeptide expressing nucleotide sequence isolated from the Sargasso Sea
aaatctttaaaagtttatactccagcaaaaatcaagaacaatacacaatttataaatgaacttaaatcactatcttgtgatttatttattgttatagcctacggaaaaattttacccaaagaaatattggaaatcccaaaatttggttgttggaacgcacatgcttcattacttccaagatggcgtggtgctgctccaatccaatggtccctaattaaaggcgatgaatttactggtgtaggaattatgaaaatgaatgagggactagatactggggacttattattggaagaaaaaattaaaatcgataatgacgataatttaaatacactatcggaaaaacttagtattttatctgcaaaattatttttaaatgcaacatctttaataggagaaaatattaataaaaattctaattatcaattaacaaaacaaaatacccttggaagagaaattacttacgcaagaatgattgaaaaatcagactttaaagttgattggggtaatgaggtaattaaaatatctcaaaaaataaaagcattatacccacgtgcaaatacaacttttagaggtaagaaccttaaaatacttaaaataaaagttttgactagttatgaaattaaaaaagaaaaataccttttcataagcaattattcaagaccaggtattattcttgcagtaatagaaaatgaaggaataataatttcaactaaaactgatccaattattttgttagaagcaaaacttgaaggcaaaaacatatctagcaaaaatcaattgatacaacagttaaagccaacagtaggagaattttctcaga

SEQ ID NO: 229646 - DNA, 763 bp, Unknown
  Bacterial polypeptide expressing nucleotide sequence isolated from the Sargasso Sea
aatgagtaaaaaaatagtttttatgggcacacctagttttgctgttccaattttaaaaaatatttatcagaatggttttgatatatcagctgtatatactcagccacctaaaaaatcaaatagaggacaaaaattaaataagtctcccatacatctgtttgcagagactttaaacttagaagtaagagtaccaaaaaatttaaaagataatagagaagagatagaatttttaaaaaaattaaatatagatctagtaattgtagtagcctatggacaaattattccatccaactattttgaattaagtaaaaataattttataaatattcatgcatcaattttaccaaaatggagaggggcagctccaatacaaagatcaataatgaattctgatacagaaactggaataagtataatgaaaataaataataaattagatcaaggagatattctagatgtatacaagcttcaaatagtaaaaaatgaaaattcacaaagtttagccgacaggttgtcagaattagcatcagttaaaatttgtgaggtaattgacaaaatatttgatggtaaagtaaattatagaagtcaggataattcaaaagcgacttatgctaaaaaaattgaaaaatctgagagtaaaattaactggaatgagaaagctaaaaaagttttggccaaaataaatggtctttatcctcatcctggaagttattttgtatttaatggagagaggtataaaatcttaaaagctgaaatttcaatt

SEQ ID NO: 229647 - DNA, 574 bp, Unknown
  Bacterial polypeptide expressing nucleotide sequence isolated from the Sargasso Sea
atggatgatttaacgggagtaaaaattggtttttttggtacacctgactttgctttaaaatttcttaattatttatatgaaaataatgctgatatatcattcattgtaacacaaccagcctctgtgtccggaagaggaaaaaaaattactccctcacctgtagaaagatggggagtagaaaaaaatttaaaggtatattctccaaaaaaagtaaatgaccaaagttttcgaaaagaaataaagagaaaaaatgttgattttatagttgttgttgcgtatggaaatttagtagataattttataattaattttccaaaatttttaacaattaatgtccatgcctcactacttccaaaatggagaggagctgctcctatacaaagatctattcttaataatgataaagaaacgggtatttgtattatgaaggtagatgaaaaattagatgcaggacccataataaaatttgaaaaaattaaaataaattttgatgataatgccggttccatatacaaaaaaatgatttcagtaggcctacctttattagttaaagcaataaaagatattagaaaaa

SEQ ID NO: 229648 - DNA, 874 bp, Unknown
  Bacterial polypeptide expressing nucleotide sequence isolated from the Sargasso Sea
tttaaagtcactttatcaaaatggatatccaatctcagctgtttatactcagccacctaaaaaatctaatagaggtcaaaaattaaataagtcaccaataaatttattttctgaaaatataagtttagatgtaagagttcctcaatccttaaaaaataacaatgaggaagaattatatctgaccaaattaaaaccagatataattttggtagtttcgtatgggcagattattcctaaaaatatcttaaatattcctaaatatgggtttttaaatgttcatgcttctctacttccaaaatggaggggagcggcccctatccaaagatcaataatgaatcttgatagaaaaacaggaattagcataatgaaaataaatgaaaatttagatgaaggtccggtatgtaatcaatattctactaatatttcagaaaaaatgaattcagaagaattatctgaaaaattatcactaatagcttcagaaaaaattttagatattttagacaatatttatgatggaaatatagaatttagagatcaagatcattcaaaagcaacctatgctaaaaaaattcaaaaaatagaaggaaaaattgattggaatgaaaatgcagaaaaaatcattggaaaaataaatggactatatccatatccaggcgcttttttttcattcaatggagaaagatataaaatattaaaagcagaaaaatctaatacaaatggaaaagctgggagcattgtaagtgaaaattttgaggtgtgttgtggagaaggatcaataaaagtattaagtattcagagagaagggaaaagagttcaacaaataaatgaatttttgcttggcacccaaattagaaaaggttccaatattgcctaa

SEQ ID NO: 229649 - DNA, 499 bp, Unknown
  Bacterial polypeptide expressing nucleotide sequence isolated from the Sargasso Sea
atgccaaagaaaatagtttttatgggtaccccgatgtttgctgttccaattttaaaatcactttatcaaaatggatatcctgtttcttgtgtttatactcaaccacctcaaaaatctaaaagaggtcaaaaaattaacaaatcacctgtccaattaatttcagaaactttaaatatagattttagaactccaaattcattaaaagaaaatttagaggaattagaatattttaaatcattaaaagcagatttggcaatagttgttgcttatggtcaaattataccaaagtcatatttaaatttaactaaaaaaggatttattaatatacatgcatctattcttccaaaatggagaggtgctgctcctattcaaagatctattatgaatttagataaagagacagggattagtattatgaaaataggagaagaattagatacaagaccggtatgtaacgtttataaaattaatatagaaaataatttaaatactgaagata

SEQ ID NO: 229650 - DNA, 679 bp, Unknown
  Bacterial polypeptide expressing nucleotide sequence isolated from the Sargasso Sea
atgaagcaacatagaatcttatttatgggtacagcccaatttgcagtgccttcgttaattaaattattagaattagatcagaagatcataaatatttattcatcaccttcaaaaaaagcaaatagagggatgagattttcaaaatctccagtaacagaatttgcaatgaggaatggatatcaaattttaaaaaataatctatatcagcctgaatctttagataattataaacagatcagaagaattgaaatacttgatccagatattatcattgttattgcctacggtttgattattcccaaagagattttatcgattccaaaattaggatgctttaatcttcatggctcacttttaccaagatggagaggggcagcaccaatacaaagagcaatgattgaaggtgatacaaaaacaggaataacttttatgaaaatggatgaaggactagatacaggagatatagttttatcaaaagaaatcagcgttaatgtgaatgataactataaaaatttagaggaaaagctgtcaaatttaggagcagatagtttttcagaattttttaatttaattgaaaataagaaggattttgtaaggcaaaacaatgatttatctacgtacgcaaaaaaaattgaaaaatctgaaactagattaaattggagtgagtctgctgaaaaga

SEQ ID NO: 229651 - DNA, 634 bp, Unknown
  Bacterial polypeptide expressing nucleotide sequence isolated from the Sargasso Sea
aatgaaaaattatcgcatcctattcatgggcacagccccattcgcagtgccatctttaaaaaagattttttcttcaaacaatcatttggtgggagtatacacatctcccgcaaaaaaggctaaccgaggaatgaaattatcaatttcacccgtggcagaatttgctgaagctgaaaatattgaaattagctcgcctccttcgattagttcatcagaggaattaaaaaaactacaagaaatgaatttggatatgataattgtcgttgcttatggactgatattgcctgaagaagtaatcaatttacctaaacttggttgttttaatgtacatgcatctttactccctcggtggaggggtgctgcaccaattcaaagagcaatgattgaaggtgatcagactacgggcgttacaattatgaaaatggataaaggccttgatacaggagatattgggctgcaaaaagaaataaaaatagatcaacaaaactacagtgaattagaaaaagaactcgcaaatgaaggagctgaattacttataaactttcttgatagattagatggctctattcagtttgctaagcaaaatgacatgcaggcctgctatgcgaagaaaatacaaaaacaagaagcttta

SEQ ID NO: 229652 - DNA, 820 bp, Unknown
  Bacterial polypeptide expressing nucleotide sequence isolated from the Sargasso Sea
aaaaagcttaccgccagtccggttaaagtattagcagaagaaaacgccattccagtttaccagcttcagtcgcttaaagctcaagacgctcaggaagaattagcctcgctcaatgccgatttaatggtagttgttgcttacggactaatactgcctaccacggtgttaaatgcacctaagctagggtgcattaacgtgcacggctcaattctgcccaagtggcgaggcgcggcaccaatacagcgttcaatctgggcgggtgacgctgagaccggcgtaactataatgcaaatggacgaaggtttagatacgggtgacatgcttcacatagcaacattacctattacctctgaagataccagcgccaccttatatgaaaagcttgcagagctaggaccacaagcgttggttgaggtcgttaatgagtttgatcgttacacgcccaccaaacaagatgattctcaagcgacctacgcgaaaaagctatcaaaagaagaagcccttattaattgggcagacgatgcggagcaaatagagcgaaatatccgcgccttcaacccttggcctgtagcgtggatgcaggtcgaagatcagaacgttaaagtatggtctgccagcgttgttcctttaaataaaggtgccacgccaggtacggtaatcagtgccaataaagagggcattacgatcgctacggggcgcgatgctcttcgcattacatctcttcaaattcctggcaaaaaggcgcttccagcgtcagacgttatcaatgctcgccaaacgtggtttgaagtgggccgttgtctgacacaagcggactaaa

SEQ ID NO: 229653 - DNA, 361 bp, Unknown
  Bacterial polypeptide expressing nucleotide sequence isolated from the Sargasso Sea
atgcataataaaaaaattatttttatgggaaccccaaatattgctgcagattatttaaactcacttataaaaaataaaataaatatttttagtgttattacacagccaccaaaaaaacagtcaagaggaatgaagattataaaatctccagtacatactttagcagaagaaaatgacttaaaagttttaactcctcaaatctttgataatgaaataatttatgatttcaagaaaatacaaccagatctaattatagtagttgcttatggcaaaatacttccaaaaaaaattttagaactaccaaaattaggctgtatcaatattcatttgtctatcttaccaagatggcgaggtgcagcac

SEQ ID NO: 229654 - DNA, 727 bp, Unknown
  Bacterial polypeptide expressing nucleotide sequence isolated from the Sargasso Sea
aatgagcattcagaaatacaaaatcatctttatgggaacaccagatttctctgtcaaacccttaaatgccctaatcgaagcaggtcatgatgtcgttgctgtttacgcgcagcctccgcgaccaaaagacagaggccaaaagcttcaaaaaagccccgtacatctttttgcagaagaaaagaatattcccgtctttacgcccaactcatttaaaaaagatctagaagctgttgcacattttcagtctttaaaagcagatttcgcagttgttgcggcttatggtttgctccttccaaaagtgattttagatgcgccaaaatatggctgtgtgaatattcatgcttctctcttgcccagatggcgcggggcagccccgatacaaagatccattttagcaggggatcagagtacggggattacgatcatgcaaatggatgaaggtatggatacaggagatatgttactgaaagacgaggtggcaatcactgatcaaacgacagcttcctctcttcatgatcagctctcagagataggctcagatttaatcgtccaggctttaatagaacatgctaaaaaaggattttcacccattgcacaaagtgagcatgaagcgacgcatgcacctaagcttcaaaaagaagaaggcgctattaactggcaaatgagggctattgagattggttgtaaaatcagagctttcactccatggccaggtgtatatttttga

SEQ ID NO: 229655 - DNA, 775 bp, Unknown
  Bacterial polypeptide expressing nucleotide sequence isolated from the Sargasso Sea
gatgtcaaaaaaaattatttttatgggaaccccttttttttcagttcctattttgaagtcactatatcagaatggctatccaatttctgtcgtttacacacaaccaccacagagatcaaatagaggacataaaataaataaatcaccaattcaaggtatatcagaaacacttaatattgattttagagctccaataactctaaaggataatcagaaagaatatgaatttttgaaagaattgaatgctgatttggcaattgtcgttgcgtatgggcaaattatcccaaaggagtttttagaattaactaaaaaaggttttattaatatacatggatcaatacttcctaaatggagaggggctgcaccaattcaaagatcaatcatgaacctagatgaagaggtaggaataagtataatgaaaattgtagaagaacttgatagcggacctgtatgtaatagctataaatttaaattagataagaaacataatgcacaggaaatttcagaaaaactatccatactcgcggcagaaaaaattttagataatatagatgatatttttgaagataaatctaaatttatcgagcaagatcattcaaaagcaacttatgctaaaaaaattgataaaaaagaaggccagattgattggagacaagaagcatctaaaattattggaaaaataaatggcttatttccttctccaggggctttttttaattttcacggagagagatataaaattttaaaggctgagattgttaatggtgtaggtaaa

SEQ ID NO: 229656 - DNA, 749 bp, Unknown
  Bacterial polypeptide expressing nucleotide sequence isolated from the Sargasso Sea
cagattatctgaaagaataataaaaaataattttcttatttctgcccttttatcccaacctcctaaaaaaaaatcgagaggaatgaaaataattgaatctgaagtccatcaacttgcaagtaaaaacaatattgaagttttttgcccaaatatatttgatagaaatattattgagactgtgaaaaatttaaaccctgatcttattattgtaatggcatatggtaaaattttaccaaaagagattttagatctgccagtattcggttgtattaatattcacgtttctttactacctaggtggagaggtgctgcacccatagagtattctttaatcaatggagacaaagaaactggtatatcaataatacaacttactgataaattagatgctggaccaattattactcaaaaaaaagttgttatagaagataattgtaataaaaaagagttaagtgaaaaattaacaaaagttggaaaaaaattattaattgaaactatcccactaatttttaataaaaaaataacttattctgtgcaggatgaaaattatgcaacttatacaagaaaaatttcttcagaagatagaaaaattaattttaataaatcagtaaaagaggttttaaatcttataagagctcactcacctaaacctggggcatggttcaccattaaaaatgaaagaattaaaattataaaagcacgaaaatcaaattacactggtaatgcatcaactattattgataagagtt

SEQ ID NO: 229657 - DNA, 821 bp, Unknown
  Bacterial polypeptide expressing nucleotide sequence isolated from the Sargasso Sea
tatggctttaaaaattatttttatgggcacgccagaatttgctgtcccaattcttgaaaaaattcataaatctaatcataaagttttgtgtgtttatactcaaacacctaataaaagggatcgaggacaaaaaattagtattacacctgttcacgaaatttcaaaaaaaaaaaaaattgatgttaaacatcccttgaatttagatcatgatgagtatgaatatattaaaaaattaaagccagatgtagtagtagttgtcgcttacggaaaaattattccagcaaaaatattagaattaaaagatgttcaattcttaaatattcatgcatctttgttaccaaaatggagaggagccgcacccattcaaagagcgattatgaatctggataaagaaactggaatatctattatgaaaattgttccaaaactagactcaggtccgataatgatgcaatcaaagatagaaatttttgaaagcacaacatttgaggaacttagtagcaaaatgtcaaatttaggagctcaaatgatactcgactcacttaatctaattgaaaaagataaagcaaaattttttcctcaacaggaaaaaaacgcgtcatacgcaaaaaagattaaaaaatctgagggaaaaatagattggaaagataatgcaaaaaaaataattgccaaaattaatgcattgaccccaaaccctggttgctggtttgaacttaatggaattaggataaaaattattagcgctgagatggtaaaggcaaatgggacaccaggcgagatcttaaatataattttactatcgcatgttcagaaaatgcaat

SEQ ID NO: 229658 - DNA, 505 bp, Unknown
  Bacterial polypeptide expressing nucleotide sequence isolated from the Sargasso Sea
aatgaataataagaaaataatttttatgggttcgccaaaaatagcctctgactatcttgaagctttaattaaaagtaatttcataatttctgcagtattttcacaacccccaaaaaagaaatctagaggaatgaaaataattgaatctgaagtccatcaactagctaataaaaataacattgaagttttttgtccaaatatatttgataaaaatactattgagacagttaaaaaattaaatcctgatttaattattgtcatggcatacggtaaaatattgccaaaagatattttagatttaccaccatttggttgtatcaatatccatgtctctttgttgcctagatggaggggtgcagccccaatagagcattctttaatgaatggcgataaagagacgggtataacaataatacagctaatcgaaaaattagattccggaccaattattaagcaaaaaaaagtagatatagaagacgattgtaataaaaatgaattaagtcaa

SEQ ID NO: 229659 - DNA, 774 bp, Unknown
  Bacterial polypeptide expressing nucleotide sequence isolated from the Sargasso Sea
aatgtcacaaaaaattgtttttatgggaacgccagagttctcagtgcctactttagagtctttagtaaaatctaatcataaaattttagctgtatactctcagcctgctagtaaagctaagcgaggtcaaaaaataattccatctcaagtagaagtatcagcaaaagagcattctttaaatttaagaactcctgatattttagataataatgaagagtttaatttttttaaaaaattagaaccagacattgttattgtagtagcttatggaaaaattataccaaaaaaatttttaaatttatcaaaatatggttttataaatgtccatgcttcactacttcctaagtggagaggtgctgctcccattcaaagatcaattatgaatttagataatgaaaccggcataagtattatgaaaatagttgaagaactagatgccggaccagtaatgcatcaagacaagatacaaattaacgaaaatgtagatgctttaactttgtcaaaaattttatctaaattgggtgctaagtccataatcaatgcaatagataaaatggaaaaaggagaggcaaggtttatagaacaaaatcatggggaagcgacttatgcaaaaaaaattttaaaaactgagggaaggattaattggaatgagagtgcaaaaaaagtattagctaagataaacggtctaaacccaaatcctggtgcttggtttgagtataaaaatgagagattcaaagtatggaaagctgaaatagtaaatcaaaatagcaatgc

SEQ ID NO: 229660 - DNA, 433 bp, Unknown
  Bacterial polypeptide expressing nucleotide sequence isolated from the Sargasso Sea
gatgaatataatttttatgggaaccccacaatttgcagttccgatattgaaagcaataaacgactcaggtcataagattttagaggtttatactcaacctgcaactaaaagtggcagaggtcaaaaatttagccaatcagaaatttttaattttgcagaaaaactaaatttaaaagtcaggtctcctaattctttagaaactagtgaagaaattaatcatatcaaaaaattaaatcctgatttagtggtagtcgttgcttatggaaaaattttaccaatcaaactccttgatataaataaactttcattcattaatgtacatgcatctttacttcctagatggagaggagctgctccaattcaaagagcaattatgaacatggactctgaaacagggatatcaataatgaaaatcataccacaacttgatgca

SEQ ID NO: 229661 - DNA, 667 bp, Unknown
  Bacterial polypeptide expressing nucleotide sequence isolated from the Sargasso Sea
atgaacattatttttatgagctcttcagaatttgggctacctgctttgaaaaagcttgttgagtcgcaaaataaaatttcatcagtttacacacagccaccaaaaaaatctggcagaggtctgaagatgaataagtctgtaattcatcaatttgccttgcaaaataatctgtgtgttagaacgccaacaaacttagagatacagactgaaatagattttttaaaaaaatcaaatcctgatcttggtattgtagtatcttacggattgataataccaaccgagatattggagatccctagatttggttttttaaatatccacccatctcttctaccaaggtggaggggtgctgcaccaatacagagagcaataatgaacggggatgagaaaacaggtgtaaatataatgaaacttgacgatggattggacacaggggatatttgcaagaaaattgaaattgaaattaagacgacggataataatgagtcactatcacttaaattatcaaaattaggcgctgaagttttgatgcaagcagtcattgagctccaagatggaaacttaaatttcacaagacaagataatagaaatataacctatgcaaaaaaaattgataaaaaagaaacagaattagatttcaactgtgcagcccaaggagatacataac

SEQ ID NO: 229662 - DNA, 447 bp, Unknown
  Bacterial polypeptide expressing nucleotide sequence isolated from the Sargasso Sea
atgaagatagtttttgcaggcactccgcaatttgctgctgaacatttaaaaattttgattgctagcgatcaccaaatttgctgtattttgacgcagccagacaggcgctctggtcgcggcaaacaaataaagctatctcctgtaaaagaagttggtcttgagaataggattaaagttttacagcccagcaccctaaaagagaaacttactgtagaggccttaaagttgattgaaccagatctaatgcttgtcgttgcttacggacttttagtgcctaaagaagttttaaatattccaaaaatggggtgcgtaaacgttcacgcctccattcttcctaattggcggggggctgcgccaattgaaaattctatatattctggagataaagagaccggaataacttacatgcaaatgagcgaaggtcttgatgaagggcctatcttagaa

SEQ ID NO: 229663 - DNA, 736 bp, Unknown
  Bacterial polypeptide expressing nucleotide sequence isolated from the Sargasso Sea
atggacattatttttgctggcacccctcaatttgctgctgatcatttaaagttattaattgatagtccccacaaaattaaatgtattttgactcaaccggatagaggttcaggtcgaggcaaaaaaattaaatcttctccagtaaaagaaattggcctagataatggcattgaggttttgcagcctacctcgctgaaagacgaaagtattttaagatctttaaagtccgataagcctgacctcatgttggtagttgcctacggacttttaatacccaaagaggttctagaaattgctgaaagggggtgtgtcaatgttcatgcctctattcttccaaggtggcggggggcggcaccaatggaatactctatatattctggtgacagcgagtctgggattagttacatgcgaatgaacgaaggccttgatgaggggccaatcttagagatccacaaatgtaaaattgaaaaagaagatgacttgggctctttagaaagcaaatttgtagaactgagtaaaaaaagccttttaaattttcttaaaaaatttgagaaaggagaattaaaagaaactcctcaagaagaatctaaggcaacattcgcacctaaaattaattctgattttcaaaaaatagattggagttgtgtatctagtgaaattgagcgcaaaataagagcgctcaatccaaagtacggggcctttacattcttaggaaataaaagggtaaaaattacaa

SEQ ID NO: 229664 - DNA, 838 bp, Unknown
  Bacterial polypeptide expressing nucleotide sequence isolated from the Sargasso Sea
tatgagcaaaaagatagtttttatgggaacatctaattttgctgttcctattttaaagtctctttatcaaaatggatatctagtctcaattgtttacactcaaccgcctaaaaaatctaatagaggtcaacaattaactaaatcaccgataaatttattttctgaaaatataagtttaaatgtaagaactccccaatctttaaaaaataataaggaagaggagttgtatttgactaaattaaaaccagatataattttagtagtttcttacggccagattattcctaaaaactttttaaatattccaaaatatggatttttaaatgttcatgcttctttactcccaaaatggagaggagcggcacctattcaaagatcaataatgaatttagataaagaaacagggattagcatcatgagaataaacgaaaatctagatgaaggtccagtttgcaatcaatactctttaaaaatttcagaagaaatgaattctgaagaattatctgaaaaattatcgttaatagcttcagaaaagattttagatattttagataatattgatgatggcaatgtagaatttaaagaacaagatcattcaaaagcaacctatgcaaaaaaaatagaaaaaactgaaggaaaaattgattggaaagaaaatgcagaaaaaataattggaaaaataaatggactttatccatatcctggcgcttttttttcatttaatggagaaagatataaaatattaaaagccgaaaagtctagcacaacaggaaaacctggggatatagcaaatgaaaatttcgaggtgtgctgtggagaaggatcaataaaagtatta

SEQ ID NO: 229665 - DNA, 560 bp, Unknown
  Bacterial polypeptide expressing nucleotide sequence isolated from the Sargasso Sea
aatgaaaaataaaaaaataatttttatgggtacacctgacatatcagcagagtatttaagtgctcttctcaaagaaaatatacctatttctgctgtttttacacaatctcccaaaagacaatcaagaggcatgaaattaattaaatcagctgttcatacattagcaaataagaaaaatatcgatgtttatcatcctgaaaattttgacaatgaaataaccaatgtattaaaagaaatggatccagatttaattatagtgatggcgtacggcaaaattcttcctaaggatattttagaattaccaaagcatgggtgtattaatattcatgtgtctatcttaccacgctggaggggtgctgctccaatagaacattcattaattaacggtgacaaagaaacaggtatttctataattaaactgattgaaaaattagactcaggaccaataatagttcaaaaaaaattaattattcctgaaaattgtaataaattacaacttactgataatttgaataaaataggcacaaaattattagttaatactattccgcttatattaa

SEQ ID NO: 229666 - DNA, 544 bp, Unknown
  Bacterial polypeptide expressing nucleotide sequence isolated from the Sargasso Sea
atgttaaaaaacattgtttttatgggtacttcaaattttgctgtacctatacttaaatctctttaccaaaatggatacgcaatatcatgtgtatatactcagccacctagtaaatcaaatagaggacaaaagttaaataagtcaccggtaaatttaatttctgaaacactaaatatagatgtaagaacacctcatagattgaaaaataataaagtagaagaaatttttcttaaaaaaataaatcctagtttaataattgtagtttcttatggtcagctaattccaaaaaatttattagaaattccaaaaaacggatttataaatgttcatgcatcattgttgccaaaatggagaggtgcagcacctattcaaagagccatcatgaacttggatggtaaaacaggaataagtattataaaattaaatgaaaatcttgatgaaggacctataatcaacaaatatgaatttaaaatttccgaaaatatgaatgcatctgaattatcagaaaatttagcaaatttagcatcacaaaaaattatagata

SEQ ID NO: 229667 - DNA, 751 bp, Unknown
  Bacterial polypeptide expressing nucleotide sequence isolated from the Sargasso Sea
atgaaagataaaaaaattatttttatgggcacaccagatattgctgctcaacatctaaatattttaattgaaaataatttaaatgttgttggcgtttatacacagcctccaagaaaaaaaaatagagggatgcgtattaaaaaaagtgatgtacaccaaattgcagataaaaataatattgaggtcttttatccctctgcaattgatgacataaccatagaacaagttaaaaaattagaacctgatttaattattgttgtcgcttatggaataattttaccttcaaaatttttaaatattcccaaatatggatgtattaatatccacgtatccttattgcctagatggaggggagcagcccctattgaacatgccttgttgtcgggtgatgtaaaaacaggaataagtataattagtgtctcccctaagcttgatgcaggtgatattcttatgcaggagagttttgcaattgatatagatatgtatagtgatgatttaactttaaatcttactaatcttggaaaaaaaacattaataaaaactttaccacttttatttgaaaataaactaactagtaaaaaacaagaagaaagcaaagcaacttatgcaaataaatttttgtctaaagatagaaaaattaatttttataattcagccgatcatgtttataaccacatacgtgcacacggaccaaaaccaggatcatggtttacatataaaggcgagaggataaaaattataaaggcaaaaa

SEQ ID NO: 229668 - DNA, 682 bp, Unknown
  Bacterial polypeptide expressing nucleotide sequence isolated from the Sargasso Sea
ttgtgttgcatacggattattattccagagatcattttaaaaatcccatcatatggctgcataaacggacatgctagtttgttaccaaaatggcgaggagcagctcctatccaaagagccattgaagcaggagataaaaaaactggctgtacatcaatgttaatggaaaaaggtttagatacaggacccatgatccacaaaaaagaaataataataaagatggaagatgatgtaattgatttatttaaaagattatcattactaactgctgaatgcctggatgaaacaataaaaaaattaatttatggagagtctaaacaaacacctcaaaataattcagaagcttcatacgcaaataaattgagtaaagaagagggattaattaactggaataataattcattaaatattttcaacaaaatgagagcatttaaaattttccctggatcatattttcactacaaaaatgatacaattaatataattgatggtttccccttaaataaaaaacataatgcaaatccaggaacaattttgacaacatcagataatatccaaattgcttgtagtaaaaatactgttttccaaataaattcattaaagaaatctggaaaaaaaagtatgtccgcaaaagaatttttaaatggtaataatttgaatgttggtgagcaaattgattaat

SEQ ID NO: 229669 - DNA, 483 bp, Unknown
  Bacterial polypeptide expressing nucleotide sequence isolated from the Sargasso Sea
aatgaataattacaatattttattcatgggaacttcttctttcgctgtcccaattttaaaagaattaattattttaaatcaaaacattactaaagtttttacttctcctccaaaaaaagcaaatagagggatgaaaagttcattatcaccgatagcattagcagctaaagaattaaacttacaactagagtctccagaggatttaagagatccatctataattaattcaattaaatcgatgaaattagatttaataattgttattgcttatggatttattattcctaaagaaatattgaatataccaaaatatggatgctataacattcatgcatcaatacttcctcgttggaggggtgctgcaccaattcaaagatcaataatagaaggcgatcaggtttctggagtttcttttataaaaatagatgaaggtttagatactggcgatatagtttttattgatgagattgaaattaaaaaaaa

SEQ ID NO: 229670 - DNA, 703 bp, Unknown
  Bacterial polypeptide expressing nucleotide sequence isolated from the Sargasso Sea
gcgtgaggccttcgcggagttgagcgccgatgctgccgttgtcgtggcttatggtctgatcctgcctcaggcggtgctggatgcgccgcggctgggatgcttcaacatccatgcctcactgctgccgcgctggcgcggggccgcgccgatccagcgggcgatcatggcgggcgatgccgaaagcggtgtgtgcatcatgcagatggaggcaggtctggacaccggcccggtcctgatgcgtgaggtgacaccgctgacgccgcacgataccgccgcgaccctgcacgaccgtctggccgatatcggcgcgcgtctgatggtggatgcgctggcccggttgccggacctgacgcccgcaccgcaacccgaggacggcgtgacctatgccgcgaagatcgacaaggccgaggcccgcatcgactggacccgccccgccatcgaggtcgaccggcaaattcgcggtctgtccccctttcccggtgcctggacgacgcatgggggcaagcgcctgaaactgcacctgagcgcgttgaccgatggtcacggttcaccgggcaccgcgctggacgatgcgctgaccatcgcctgcggtgacggtgcgatccgtctgatccggttgcaacgtgaggggcgcggcgtgcaggatgcggatgaattcctgcgcggacatcctatatgtaccgctgacagattaggagaatga

SEQ ID NO: 229671 - DNA, 415 bp, Unknown
  Bacterial polypeptide expressing nucleotide sequence isolated from the Sargasso Sea
atgtcacttaaaatagtttttatgggaactccagagttttcagttcctaccttggacttattgattaagaataaatttaatgttgtaagagtttatactcaaccacccaaaaaatcaaaaagaggtcaaaaagttaatccgtcatcagtagaagagtattgtaaaaaaagtaaaataaattttaaaaatcctataagtttggatagcgaagatgaatttaagagttttgatgaattgtcggcaaatttggtagttgttgttgcttacgggcaaataattccaaaaaattttttaggaatagttaaatttggatttattaatattcatgcttcattattgcctaagtggagaggcgcggcaccaattcaaagagctataatgaatggggataaaaggataggagttagtattatga

SEQ ID NO: 229672 - DNA, 430 bp, Unknown
  Bacterial polypeptide expressing nucleotide sequence isolated from the Sargasso Sea
atgtcacttaatattatttttatgggaacaccaaagttttccgtacctattctagagtctatatataattcaaaatatcaaatcctagctgtatatactcaaccacccaaaaaaaaatctagaggacaaaaactgattgagtctccaataaatgcgaaagcaaaaaaacttagtttacaagtaagatgtccaaaaaatttagatagtaaagaagaatataattttatcaaaaaattgtctccagacatagttgtaatttctgcttacggtaaaataatacctagtagtttgttgaatattccaaacatacaatttatcaatgttcatgcttcactacttccaaaatggagaggggcagcacctatccaaagatcaatcatatcaatggaaaaagaaacaggcatttctatcatgaaggtaataccctaag

SEQ ID NO: 229673 - DNA, 427 bp, Unknown
  Bacterial polypeptide expressing nucleotide sequence isolated from the Sargasso Sea
catggcgctaaatataatttttatgggaacaccagattttgctgttccaattttaaaatctataaataatttaaatcataatatcttagaagtttatactcagccgcctaataaaaaaaatcgtggacaaaaaattcaaaattctccaattcatgatttttcaaataagttaaatttacctgttagatatcccattgcttttgatgaggaagaaattaatcacattaaaaaattgaatcctgatcttgtagttgtagttgcttatggaaaaattttacctgttaaactattaaatttggataaagttttatttataaatgttcatgcctctctactgcctaagtggagaggagctgccccaattcaaagagcaattatgaatttggatcatgaaacaggcgtttctattatgaaaatagaaaccaaa

SEQ ID NO: 229674 - DNA, 627 bp, Unknown
  Bacterial polypeptide expressing nucleotide sequence isolated from the Sargasso Sea
attgaaaatagtttttatgggtacaccagagttttcaattcctactttaaaaagtcttataaactctgaacataaaatagtatgtgtctacactcagccgtctcaaaaaaaatttaggggtcagcaaattcaaaaaactccagtccacattttctctgaaacaaaagggatacaagtaagaacaaataaactcacagacgataatgaattaataaaatttaaaaatctaaaaccagatttagttgtcgtcgtagcttttggtcaaataattccagatatatatttacaaattcctaacttaatttttttaaatgtacatgcatcattgttgccaagatggaggggggcagcacctattgaaagagcaattttaaacggagatgaagaaacaggtatatccattatgaaaatcgtaaaaaaattagatgctggcccatatatcaaacaaacaaaaattaatattgatagtgatactagtagtggagagttgagagaaaaactctctttaatgggcgctgaagccttaaaagactcaattgatttaattttattgaagaaagaagattttaaggagcaaaacgacaaaaaagcaacgtatgcaaaaaaaattgaaaaagtggaaacaaa

SEQ ID NO: 229675 - DNA, 397 bp, Unknown
  Bacterial polypeptide expressing nucleotide sequence isolated from the Sargasso Sea
aacagctgggctgcggcacaaataaaccccgtggtacaagatgaatcactggttacgcatgcagaaaaactcagcaaagaagaggcccgtatcgactggtcgctttcggctgctcaattggaacgctgcatccgcgcctttaacccatggccaatgagctggcttgaaatcgacggtcaaccagtgaaagtctggcaagcttcggttattgcggaaaacactcaggctgcgccaggcaccattctggaggcaacaaagcagggtattcaggtcgcaacgggcgacggcatcctgaatctcgtctctttgcagcctgccggtaaaaaagccatgagcgcgcaggatctgcttaattcacgccgggaatggtttgtacccggtaaccgtctggtctgac

SEQ ID NO: 229676 - DNA, 819 bp, Unknown
  Bacterial polypeptide expressing nucleotide sequence isolated from the Sargasso Sea
aatgcaacgaaaaattgcttttatggggacaccaaattttgctgttccaatactaaagtgtatttatcagaatggctatgaagtctcagcagtttatacgcagcctccaaaaaaatctaatagagggcaaaaattagaaaaatcaccggttcatttatttgcagaaactttaaactttaacgttaggaccccaaatcacttgaaagaaaacaactcagagcacgagtattttaaaaatttagatttagatatggttatagtagttgcatacggacagataattccaaaaaattttttgttgttaagtaaacagggattcataaatattcatgcatcaatattgccaaaatggagaggtgctgcaccaattcaaagatcaataattaaccaagataaagagacaggcatcagtgttatgaaaattaacgaaaacttagacgaaggagatatttctcatatttttaaaataaatattagagaaaatgaaaacgcaaacagtttaagtgagagactttccgttttggcctctgagaatatatcaaatgtaatagatagtatttttgataatgaagttaattttaagcctcaagatcattcaaaagcgacatatgcaaaaaaaataaaaaaaacagaaggtttaattgattggaatgatagtgccaaaaatattattggaaaaataaacggattatatccatatccaggaggttattttctatttaaaggcggaagatacaaaattttaaaggcagaaaaatcattttctaaagaaaatcctggaaaagttttaacaaatgatcttgaaattagctgcggaac

SEQ ID NO: 229677 - DNA, 427 bp, Unknown
  Bacterial polypeptide expressing nucleotide sequence isolated from the Sargasso Sea
atgaaaaaaagaattatatttatgggcactcctgaaatgtctgcagattatttagatttattaattgaaaatgattttaaagtaatagctgtttacacccaaccccctaaaagaagtggaagaggtatgaaaataactaattcccctgttcatgatttagctttaaataacaatatacctataaattatccaaaagattttaattctgaaatagataaaaaaaagtttaaaaaattaaatcctgacttagtagttatcatggcctatggattattattaccaaaagaaattttaaacttccctaagtttggctgtataaacatccatgtttctttgctgcctaggtggcgtggtgcagctccaatagaacactcaataataaatggagataaaaaaactggtattactattttcaaattagaggaga

SEQ ID NO: 229678 - DNA, 885 bp, Unknown
  Bacterial polypeptide expressing nucleotide sequence isolated from the Sargasso Sea
tagcagctcaacatttaagtattttgattgaaaataaactaaatttagttggtgtgtttacacaacctccaagaaaaaaaaacagaggtatgcacgttgaagaaagtgcagtacatcaaattgcaaaaaaaaataatatagagatttattatccttctacaatcgatgacaaagttattgaacagacaaaaaacttaaagcctgatttaattattgttgttgcctatggtataattttacctacatcatttataaatattcccaaatatggatgcattaatattcatgtctctttattaccgagatggagaggggcagctcccatagaacatgcattactggaaggtgataataaaactggagttagtataattaatattacctccaaacttgatgcaggagatattctcatgcaagagagttttttaattgatcagaatatgtacagtgatgatttaactttaaaccttacaaatattgggaaaaaagcaatgataaaaactctaccactcatatttgaaaataatattattgggaaaaaacaagatgaaaataaagttacttttgcgaataaatttttaagtaaagatagaaaaattaattttcataattctactgcagatgtttataaccacatacgtgcacatggaccaaaaccaggatcatggtttacatataaaggagagagaataaaaataatcaaagcaaaaaaaactaaagagtctggtcaaagttcaacaattttaaataaagattttattataggttgtaaggatggaggtattattccactacttatacaacgagaaggaaaaaaaacagttaacctagatgattttttgcgagggtttactttctccattcaagataaactgaatgtataat

SEQ ID NO: 229679 - DNA, 664 bp, Unknown
  Bacterial polypeptide expressing nucleotide sequence isolated from the Sargasso Sea
aatgaaaaattatcgcatcctattcatgggcacagccccattcgcagttccatctttaaaaaaaattgtttcttcaaataatcatttggtgggtgtatatacatcccccgcaaaaaaggctaaccgaggaatgaaattttcaatttcaccagtggcagaatttgctgaagctaaaaatatagaaattagctcgcctccttcgattagttcatcggaggaattaaaaaaactacaagaaatgaatttggatatgataattgttgttgcttatggaataatattacctgaagaagtaatcaatttacctaaacttggttgttttaatgtacatgcgtctttacttcctaggtggaggggtgctgcaccaattcaaagagcaatgattgaaggtgatcagactacgggcgtcacaattatgaaaatggataaaggccttgatacaggagatattgggctgcaaaaagaaataaaaatagaacaacaaaactacagcgagttagaaaaagaactcgcaaatgaaggagctgaattgcttataaactttattgatagattggatggctctattcagtttgctaagcaaaatgatacgcaggcctgttatgcgaagaaaatacaaaaacaagaagctttaatagactggactgaaaatgctgagaaataa

SEQ ID NO: 229680 - DNA, 703 bp, Unknown
  Bacterial polypeptide expressing nucleotide sequence isolated from the Sargasso Sea
aatgactaattttcgaattctttttatgggtacagctcctttttctatacccactttacaaaaaattattacgagtggacatgagctcaaaggtgtatacacatcgccgtctaaaaaagctaatcgcggaatgcaaatttcaaagtcaccagtagcattgtatgcagaagagaataatttagagttatattcaccaaaagaattacgttctccagaagagattaaatttatcaaagatatgaatcttgacttcatagttgttattgcctatggcctcatactccctgaagagattcttaatcttccaaaatttggatgctataatctccatgcttcgattttgccaagatggagaggggcagcacctattcaaagatccatgattgaaggagacgaaatgactggagtgactattatgaaaatgaataagggattagataccggagatattgttttacaagacaaaatcaaaattaatatttcagagagttacacagaattagaaacaaggctttcattaatgggagctgaattatttgaaaaatttttcaaagactctttattcaaaaatattatgcagaagcaagatgatactctctcttcttacgcagaaaaaatatctaagcaagaaactaagatagattggaaagaggatgccttaaaaatagtaagacgaattaatgcatacaatcccaatccaggc

SEQ ID NO: 229681 - DNA, 895 bp, Unknown
  Bacterial polypeptide expressing nucleotide sequence isolated from the Sargasso Sea
gctgattaactcacaccacaatgtgattgctgtttacacacagccggatagacccgcagggcgcggtaaaaaactcaccgccagcccagtgaaagagctcgcgctcgcccacaatattccagtttatcaacccggttcgctacgcaaagaacccgcgcagcaacaactggccgcccttgatgccgatattatggtggtggttgcctacggtttgatcctgcctaaagtcgtgcttgatacgccacgtttaggctgtatcaatgttcacggttcaattctgcctcgttggcgcggtgcggcgccgattcaacgcgcattgtgggcaggtgataaagaaaccggcgtgacgattatgcagatggatatcggcctagatacgggtgatatgctgctaaaaacctacttgccaattgaagatgacgatacttcggcaagtctttacgagaagttagcccagcaaggacccgatgcgctactgcaagctctcgagggtttagccaacggcaccttagccgctgaaaaacaagatgaaaccttagcgaactacgccgaaaaactcagtaaagaagaagcgaggttagattggactaaatccgcgacccaattatggcaggaagttcgcgccttcaatccttggccagtgagctactttgagcaccaaggcaatactattaaggtgtggcagacccaagtcagcaccaccagcagcaatgccacacccggcacgattatcagcgccagtaaaaaaggtattgaagtcgccaccggcgatggtgtgttaaccctactcagcatgcaattacccggcaagaaacccctcagcgttgcagatattctcaatgcccgcggcgagtggtttaccccaaatactcgtctcaataacgaggcgcaataa

SEQ ID NO: 229682 - DNA, 901 bp, Unknown
  Bacterial polypeptide expressing nucleotide sequence isolated from the Sargasso Sea
tatgggaactcccgagttcgcggttccttccctagaagcgttaaaaaaatccaaccataatattttggtagtttactcgcagcctgctagtaaagctgaaaggggtcagaggctagtaaaatcaaaaatagaaattactgcaaaaaaactttcattaaatatcaggacaccgccaaacctggacaacgaagcagaatacaattttctaaaatctattgaaccagacattatcgtagtagttgcttacggaaaaattattccaaaaagatttttaactataccaaaatttggatttatcaatgtccatgcctcactattacccaaatggagaggtgcagcacctattcaaagatcaataatgaatttagatagcgaaacaggagtaagcataatgaagatagtcgaggagttagacgcgggaccagttatgcatcaggataaaattaaaattaatgaaaatatagactctttggttttatcaaaacttttatcccaactaggtgcgaattctataattagtgcgataagcaaaattgaaaatggggaagcaaattttttagagcagaatcacaaagaagcaacttacgcaaagaaaatctcaaaaaaagaatctgaaattaattggaacgaaagtgcaaaaaaagttttagccaaaataaatggattaaaccctaatcctggtgcttggtttaaatataaaaacgaaaggtataaagtttggaaagccaaagtagcaaatgttaatggagatgtcggaaaaactctagatgataaacttactgttgcctgcaaagaccaatcaataacaattctcgagattcaaaaagagggaaaaagcaggcaaccaaccgatcagtttttgcttggtaataagattaaacaaggcgagagcatagcctaa

SEQ ID NO: 229683 - DNA, 796 bp, Unknown
  Bacterial polypeptide expressing nucleotide sequence isolated from the Sargasso Sea
aatgaaaataattgaatccgaagtccatcaacttgcaaataagaataacattgaatttttttgtccaaatacatttgataaagatactattgagacagtgaaaaaattaaatcctgatttaattattgtcatggcatatggtaaaatattgccaaaagatattttggatttaccaccatttggttgtatcaatatccatgtctctttgttgcctagatggaggggtgcagccccaatagagcattctttaatgaatggcgataaagagacgggtatatcaataatacagctaatcgaaaaattagatgctggaccaattattaagcaaaaaaaagtagatatagaagatgattgtaataaaaatgaattaagtcaaaaattaacagaggttggaatcaaattattagtggaaactattcctcttatatttgataaaaaaatttcttattctgatcaggatgataatgatgcaacatatgcaaataaaatttcttcactaaacagaaaaattaattttaataaatctgtaaatgaagttttaaatcttataagagcacattcacctaaacctggtgcttggtttactatacaaaatgaaagaattaaaatcattaaagcaagaaaatcaaactctaacggtaatgcatcgacaattcttaacaagacctttgatattgggtgcaatgacggaagtattgagccactaattttacaaagagaaggcaaaaatgctatttctaaagatgattttcttcggggatatagttttaaggttaatgaagtaataaatgcctaa

SEQ ID NO: 229684 - DNA, 931 bp, Unknown
  Bacterial polypeptide expressing nucleotide sequence isolated from the Sargasso Sea
atgaaaaaaaaaatagccttcatgggtacacctattttttctgtaccgattctaaaaaatatatatcaaaacggttatgagatatctgctgtttacactcaaccacctagaaaatcaaagagaggacaaaagtttgaaaaatctccgatacacttatttgctgaaacaattagctttgatgtaagaactcctgaccaattaaaaaacaataaatctgaatatgattacttcagaaatctagacttagatctagtaattatagttgcatatggaataattataccaaaagaattcttaccattaagcaaagagggttttattaatcttcatgcatcaatacttccacaatggagaggtgctgcgccaatccaacgatcaataatgagtcaagataaagaaacaggtataagtgtaatgaaaattaatgaaaaattagatgagggtgatatttcacatatttttaaaattgacattgaagaaaatgaaaatgctgaaagtttgagcgaaagactttcaactttagcatctgaaaaaatttctgatgtaatcgatagtattttaaataaagaagttaattttaaatcccaagaccactccaaagctacatatgcagaaaaaataaataaaactgaaggattaattaattggaatgaaaacgcacaaaaaattattggcaaaataaatggattatttccctttcctggtggatactttatttataaaggggaaaggtacaaaattttaagagctcaaatatctttcaataaagaccgaccagggaaagttctatcgaacgatcttgaaattagttgtggagaaaattcaattaaaattttggaaattcaacgtgagggcaaaaagccacaaaaagtaaatgagtttatacttggttctcaaatacaactaggaaccaatttatgtaatgtttaga

SEQ ID NO: 229685 - DNA, 925 bp, Unknown
  Bacterial polypeptide expressing nucleotide sequence isolated from the Sargasso Sea
atgattgataaaaaaataatttttatgggtacgccagatatagcagctcaacatttaagtattttgattgaaaataaactaaatttaattggggtgtttacacagcctccaagaaaaaaaaacagaggtatgcgtgttgaagaaagtgcagtacatcaaattgcaaaaaaaaataatatagagatttattatccttctactatcgatgacaaagttattgaacagacaaaaaacttaaagcctgatttaattattgttgttgcctatggtataattttgcctaaatcatttataaatattcctaaatatggatgcattaatattcatgtctctttattgccgagatggagaggagcagctcccatagaacatgcattattggaaggtgataataaaactggaattagtataattaatattacctcaaaacttgatgcaggagatattctcatgcaagagagttttttaattgatcagaatatgtacagcgatgatttagctttaaaccttacaaatcttgggaaaaaagcaatgataaaaactctaccactcatatttgaaaataatattattgggagaaaacaagatgaaaataaagttacttttgcgaataaatttttaagtaaagatagaaaaattaattttcataattctactgcagatgtttataaccacatacgtgcacatggaccaaaaccaggatcatggtttacatataaaggagagagaataaaaataattaaagcaaaaaaaactaaagagtctgggcaaagttcaacaattttaaataaagattttattataggttgtaaggatggaggtattattccactacttatacaaagagaaggaaaaaaaacagttaacctagatgattttttgcgagggtttactttctccattcaagataaactgaatgtataat

SEQ ID NO: 229686 - DNA, 952 bp, Unknown
  Bacterial polypeptide expressing nucleotide sequence isolated from the Sargasso Sea
atgaaaattatttttgcaggaactcctgaatttgctgccagacatttagagatagtcttgcagtctgagcatgaagtcttgagtgttctgacacaaccagataggaaatcaggtcgagggaaaaaaataaattttagtccagtaaagaaaaccgctttagacaatggcataagtatccatcaacctgaatctcttggaatagaaaaggtatttagtgatttaaaaaatataactccagatcttatattagtagttgcatatggactgctagtaccaaaaaaaatattagagttacccaagtatggctgcataaatattcacgcctcccttctgccaagatggagaggcgcctcaccaatggagcatgcaattatgtcaggagacaaaaatattgggataagttacatggaaatgtcagaaggtttggatgaaggtccagtttatgaaatgcatgaatgttcacttaaagaatacgatacacttcatacagttgaagaaaagtttattcaactaagtgaaaaatacttagtttcttttttggataacctcgaatctggctctatcaagcataaagctcaagatgaaaacaaagcaacattttctcctaaaattgataagaaattcttacagatcgattggcaaggggattcttcaatagaaataattagaaaaataaacgccttaggctccaaatatggaactcattcttttttgggaggaaaaagggtcaagatacacagggccaggaggattgaatcagggataaaacatgatccaggatatataagcgtgaaagacgataagttagttgtattttgtaaggatgcttcttcaatattgattgagcagatacaaatggagggaaaaaataaagtttcgggcaaagattttattgctggatacttagatctgattaagaaaaatggaaatttcgaacttactattcaataat

SEQ ID NO: 229687 - DNA, 931 bp, Unknown
  Bacterial polypeptide expressing nucleotide sequence isolated from the Sargasso Sea
aatgctaaaaaaaataatttttatgggtactccatattttgctgtaccaattttaaaatctttataccagaacggttacaacattcctgcagtttatactcaaccaccgcaaaaatctaatagaggacaaaaaataaataaatctcctattcaaggtttttcagaaacattaaatatagaatttagaacaccatcatcacttaaagacaataaagaagaatatgaatttttaaaaaaattaaatcccgatcttgctattgttgtagcttatggtcaaattattcctaaagaaatattaagtttatcaaaaagaggttttatcaacattcatgcttcgatattaccaaagtggagaggagctgcacctatacaaagatcaattatgaatttagataaagaaactggcattagtataatgaaaattaatgataagttagactccggaccagtatgtgcttattataaaatagaaattaaggaaaacgataacaccacatcactatcagataaattatctttattggctgctgaaaaaatcttagatgttgttgacgatattatggatggtaatttaaaatttgaagaacaaattcattcgaaagcatcatatgcaaataaaattaataaaatagaaggaaaaatagactggaacaattctgcaagaaaaataattggaattattaatggtttatatccaaacccaggcggatggttcaattttgaaggtgaaagatataaaattttaagtgcgaaaatttctgagaaaaaaggtcaaattggtgaagttttaagtgaaaacttagaagttggttgtgctgacttatctataaaagtgttagagattcaaagagaaggaaagcaatcacaaaagataggtcaatttatgcttggatcaaagataaaaaaaggatccaatctacaaaatgaatag

SEQ ID NO: 229688 - DNA, 931 bp, Unknown
  Bacterial polypeptide expressing nucleotide sequence isolated from the Sargasso Sea
atgtcagataatattatttttatgggtacttcaaaatttgctgtacctattcttgaaaagattagtgaaagcaaacttaatatttctgctgtttacacacaaccaccaaaaaaatctagcaggggaatgagaattcaaaaaactccaatacatgtcaaatctgaattacttggcttaccaattagaactccaaatagtcttaaaaataatattgatgagtacaactttataaaaaaaattaaacccacaattatagtagtaatttcatatggtcaaattataccgaaggaatttttggacctttctaaaaatggttttttaaatattcatgcatccatcttgcccaaatttaggggtgctgcaccaatacagagagcaataatgtcccaggatatagaaacaggaattagttttatgaaaattaatgaacatttagatgctggtcctgttcttgaaacttataaaattaaaattgacttagatttaaatgcaactgagctccaagaaaaattatctcaactagcagccttaaaaattattgaaaatatagatagtattataaatggtaaagcgaattttaaagaacaagaccattccaaggcaacatatgctgaaaaaataaataaagcagaggggaagatattttgggatgatagtgccaagaaaatcattggaaaaataaatggtttacaccctaacccaggagcgtattttatgtttaaaggagatagatataaaatattaaaagctgaaattggaaatggatcaggaccctctggtgaagttcttaatgacaaacttgagatagcatgctcaaataatgaaagcataaaggttattgagattcaaaaagagggaaaaaaaattcaagaaataaatgaatttttgaatggttcaaaaataagtaaaggctgcatccttaatgaataga

SEQ ID NO: 229689 - DNA, 931 bp, Unknown
  Bacterial polypeptide expressing nucleotide sequence isolated from the Sargasso Sea
aatggataactataaaatattttttatgggtacgcctcctatagctggtgaatatctgaattttttaataaaaaataaaataaatatttcagctgtttattctcaacctccaaccaagcaatcaagaggaatgaaactgattcaatcggctgttcataaaatagctattactaataatattgatacctttactccaaaaagttttgataatgaagcattagatcatatcagcaaaattaaacctgaccttataattgtaatggcttatggaaaaattcttccaaaacgagtcttagaaattcctaaatatggctgtattaatctgcatgtttctcttttaccaaggtggagaggcgcagcacctatagaacacactttaatgaatggagatttagaaactggtatttcaattataaaacttgttgaaaagcttgatgcagggcctatcatagcacaaaaaaaaattttgattccagataatttcaataaattacaactcagcaacacattaacagaaattggaaccaaattgttagttgaagttattcctttaatttttaaagaagaaattaaatttgtaactcaaaatgaaaatttagctacatacgcaaataaacttacaactgataatagaaaaattaattttaataattcatcaaaaaatataatcaatcaaataagggctttcgcacccaaaccaggtgcatggtttaatctaaataaagaaagaattaaaattattgatgctaaaaaagggaaatataaaggtagagtatcaacaattttaaatgaaaaatttgaaattggttgtgaagatggcagtattgaaccattgattttacaaagagaaggaaagaacataatttcaaaagatgaatttttaagaggatataaaattaatttaaacgataagattaatgcagaattataa

SEQ ID NO: 229690 - DNA, 874 bp, Unknown
  Bacterial polypeptide expressing nucleotide sequence isolated from the Sargasso Sea
aggggaaataaattaatagcctcacctgtaaaaagcattgctgagaaagaatctataaaaatttatactccagaaaaaataaggggcaatatagattttataaatgaacttaaatcactttcttgtgatttatttattgttatagcttacgggaaaattttacccaaagagatactagaaatcccaaaatttggttgttggaacgcacatgcttcattacttccaagatggcgtggtgccgccccaattcaatggtccctaataaaaggcgatgaatttactggtgtaggaattatgaaaatgaatgagggactagatactggcgacatattgttggaagaaaaaattaaaatcaataataacgataatttaaatacactttcggaaaaacttagtattttatcggcaaaattatttttaaaagctacatcttttatcgaagaaaatattaataaaaatactaatcctcaattaacaaaacaaaatacccttggaagagaaattacttacgcaagaatgattgaaaaagcagactttaaagttgattggggtaatgaggcaattaaaatttctcaaaaaataaaagcattatacccacgagcaaatacaacttttagaggtaagaatcttaaaatacttaaaatcaaagttttgactagtgatgtaattaaaaatgaaaaataccttttcatgagcaattattcaagaccaggaattattcttgctttaatagaaaatgaaggaattataatttcaactaaaactgatccgattattttgttagaagcaaaacttgaaggcaaaaacatttctagcaaaaagcaattgattcaacagttaaagccatcagcaggtgaatatctctcaggttaag

SEQ ID NO: 229691 - DNA, 730 bp, Unknown
  Bacterial polypeptide expressing nucleotide sequence isolated from the Sargasso Sea
aatgtttgcggtaccaattttaaaatctttgtatcaaaatggataccctatctcaaatgtatatacacaacctcctcaaaaatctcaaagaggacaaagaataaataaatcaccaatacagggaatagcagagactttgaatttggattttaaaacaccaaaatcattaaaaaataacaatgaagagtatgagtcttttaaaaagatagaagcagatcttgttgtagttgttgcttatggacaaattataccaaaagaattcctgagtttatctaaaaaaggttttataaatattcatgcatcaatacttccaagatggagaggtgcagctcctatacaaagatcaatcatgaacttagacaaagaaactggtgtaagtattatgaaaatagcagagaagcttgatacgggtccagtatgtaacacttataaaatagatttagacaataatttaaatgctcaggatattggagagaaactttctttattagccgcagaaaaaattttagataatattgatgatatattagatgataaggctacttttattgaacaagatcattcaaaagtaacttatgcgtcaaaaattcaaaagtctgaaggagaaattgattggacagagtctgcaaaaaacattattggcaaaattaatggtctgtatccaacacctggtgctttttttatatataatggcgaaagatataagatattaaaagcagaaattggtaat

SEQ ID NO: 229692 - DNA, 934 bp, Unknown
  Bacterial polypeptide expressing nucleotide sequence isolated from the Sargasso Sea
atgtttaaaaaaatcatttttatgggtacacccatgtttgcagttccaatattgaaatcactctatcaaaatggttttccaataaacttagtttatacacaaccgccccaaaaatctcatcgaggtcagaggataaataaatcaccagtccaaggtatatcggaaactttaaatatagaattcagatctccacagaatttgaaaaacaacaccgaggaatatgagtttttaaaaaaaacggaggctgatcttgcaattgttgtagcctatggacaaataattcctaaagaattcttaagtttaacaaaaaaaggttttataaatattcatgcatctatactcccaaaatggagaggtgccgcacctattcagagagctataatgaatttagatacagaaacagggatcagtataatgaaaattaatgaagaattggatagcggacctgtaagtaacacttataaaataaaacttgatcaaagtctcaatgcaaaagaggtctcagaaaaacttgctttaatagcagcggataaaattttagatgttgtagatgaaatttttgagggtaaatcaaattttgttgatcaagataattctaaagctacttatgcaaaaaaaattactaaaaatgaagggcaaatagactggaaaagcgatgctttaaaaataattggaaaaattaatggcttatatccctccccgggggcttttttcaattttaacggacaaagatataagattttaaaagcagaaattggaaatgggattggtaataatggtgaggttatatcagacgatcttgaaatagcgtgtgggggtgaaaaatctattaaagttgttgaaatacagagagaggggaaaaaggctcaaaaaattggagagtttatgcttggatctcaaatcagaaaaggctcaattatatctaatgtttaga

SEQ ID NO: 229693 - DNA, 952 bp, Unknown
  Bacterial polypeptide expressing nucleotide sequence isolated from the Sargasso Sea
aatgaatattgtttttgctggaactccaaaatttgctgccgatcatttggagatattgcttaatagcgaacataaagttacttgcattttaacgcaaccagataaagcttcaggacgtggaaaaaaggtcaaattttcgccggtaaaagaaattgccataagagaaggcattgaagttttgcaacctaactctttatcgggtgaaaaaatactaaaagctttggaaaatacaaaaatagaccttatgcttgttgtagcttacgggcttttgattcctaaaaaagtcttagaggttccaaaaaagggttctgtcaatatacacgcgtctattcttccgaattggagaggagcagctcctatagaatattctatatgctcaggggacaaagaaaccggtataagttacatgcgaatgacagaggggttagatgaagggcctattctagaggtccacaagtgcaaaatagaagaaaaagataacctggggacattagaaaataaatttatagacttaagtaaaaaaaaattattaccttttcttaaaaaatttgcgagaggagagataaaggaggttcaacaagaaaactctaaagctacattcgctcctaaaataaatacttcatatcaacaaatagactggagctgtaattctaatgagatagatagaagaataaggtcaatgaatccaaaatatggtgccttctcctttcttggaagtaagagaataaagatatataagagctcgcccacacaaagcaacttaaaacttaagccgggtgttatagaaatttctgaaacaggagaattattagttggatgtaaaaatcatactgtccttaaaattgatgaaattcaaattgaaggcaagaaagttgtcagctcaaaagaatttattcaaggctataaagccttaattcagcgagaaataaagtttagtggtaatgctcgataa

SEQ ID NO: 229694 - DNA, 913 bp, Unknown
  Bacterial polypeptide expressing nucleotide sequence isolated from the Sargasso Sea
atgcttaaaaaaattatttttatgggaacaccaatttttgctgtacccatattaaaatcgttatatcaaaatggatatccagtttctgttgtttattctcaacctcctaaaaaatcaagtagaggaatgaaaacccaaaaatcccccgttcatcttatggctgagaccttaaacattgaagctagaactccagatgtcctaaaaggaaattctatagaagaaaactttcttaaaaaacttgatgccgatcttgcaatagtagtcgcttatggaaaattattgcctgaaagttttttaaatttaacaaaaaaaggatttataaatattcatgcatcaattttgccaagttggagaggggctgcgccaatacaaagagcaataattaatttagataaaaaaactggaattagtgtaatgaaaattaataataaactagattctggtccagtatgcaataaatatgaaattgaaattaaaaaacaggataattctgagacaatatctgaaaaactttcgctaatcgcatcagaaaaaatacttgatgaaatagataatattatagacggcaaagcaaattttatagagcaagaacatgataaagcaacttatgcaaataaaattgaaaagactgaaggtaaaataaattggaatatcaaggcagaggaaatattaggattaataaatggattatttccatttcctggagcatggtttacctttaaaggagaaagatataaaatacttaaagcagaggtaggaaattcaaaaggtgagccaggaattgttttaggccaaaatctagagataggatgtaaggaaggatccttaaaaataactgaaattcaaagagagggaaaaaaagttcaaaaaataggtgaatttttacttggatcaaggataaaaaaaggttcaa

SEQ ID NO: 229695 - DNA, 463 bp, Unknown
  Bacterial polypeptide expressing nucleotide sequence isolated from the Sargasso Sea
gatggtgaaaaaaattatttttatgggtacccctttatttgccgtacccattctaaaatctttatatcaaaatggctatcctatctcagtagtttatacccaaccacctcagaaatctaaaagaggtcaacaaattaacaaatcaccaattcaaggtatctctgaaacattaaatttagatttaagatctccaaatactctaaaagataatgaggaggaatataattttttaaaagatctaaaagctgatttagcagtggttgttgcctatggacaaattataccaaaaaaatttttaaatttaaccaaaaaaggttttattaatatacatgcgtctcttctaccaaaatggaggggtgctgcacctatacagagatcaataatgaatttagactctgaaacaggaattagtgttatgaaaattaatgaggaactggatagtggacctgttagcaatatatat

SEQ ID NO: 229696 - DNA, 707 bp, Unknown
  Bacterial polypeptide expressing nucleotide sequence isolated from the Sargasso Sea
catgactagaaagattatttttatgggtacacctttgtttgctgtaccaattttaaagtctttatatcaaaatggttttccaatttcagtggtctacactcaaccaccacaaaaatctcaaagaggtcagaaaattaataaatctcctattcaaggtatctcagaaactttaaatatagattttagaactccacaatctttaaatgataatgaagaggaatataattttataaaagcattaaatgctgatcttgcaatcgtagttgcttatggacaaattattccgaaaaactttttaagtttaaccaaaaaaggttttattaatattcatggatctatccttcctaattggagaggagcagcacctattcaaagatcaattatgaatttagataaagagacaggaataagtataatgaaaattgttgaagaattagatagtgggccagttggcaatatctacaagattaaggttgagtataatgataatgctatggaagtttcagaaaaattatcacttttagctgctgaaaaaattttggataatatagatgatatattagatgataaaatgaaatttattgagcaagatcattcaagggcaacttatgcaaaaaagatagaaaaattcgagggaaatattaattggagcaataaagcatctcatattattggaaaaattaatggattatttcctcttccaggtg

SEQ ID NO: 229697 - DNA, 237 bp, Unknown
  Bacterial polypeptide expressing nucleotide sequence isolated from the Sargasso Sea
gctctactcgatatggctgctttaatgttcacccttccttgctcccaaggtggcggggtgcggctcccatacaaagagctttattagaaaatgatgctagtactggagtgtgcataatccggatggatgaagggctcgataccggcccaatctgtctacgagaagagctttgcattgataaaaacgataattatggttctttgcatacaaagttgagtttaataggtgccaactaat

SEQ ID NO: 229698 - DNA, 768 bp, Unknown
  Bacterial polypeptide expressing nucleotide sequence isolated from the Sargasso Sea
ttacttcagagaaattatctctaaatttgagaaccccatcattattggataatgatgaagaatataattttctaaaatctataaaaccagatatggttgttgttgtagcttatggaaaaattattccgaaaagatttttaaatttaccaaaatttggttttataaatgtccatgcatctttattacccaaatggagaggagcagctccgatgcaaagatcgataatgaatttagataatgaaacaggaataacaattatgaaaattgtagaagagttagatgctggcccaattattcatcaagataaaattaaaataaatgaaaatgttgatactctgagtctatcaaaacttttatctcaattaggagctaaatcattaataaaagcaatgaataaaatttttaatggagatacctcctttaaagaacaaaatcataaagaggcaacctatgcaaaaaaaatttcaaaagaagaggcaaaaattagttggaataattctgccaagacaattttagctaaaattaacgggcttaacccaaacccaggggcatggtttaaatatcaaaacgagaggtacaaggtatggaaagctaaaatagaaaatacttccggtagtcctgggataattttagataaaatgcttacaattgcttgtaaagaacaatcaattaaaattttagagattcaaaaagaaggaaagagcaggcaaaaaatcgatcagttcttgttaggcaataatattaaaataggcgaaagaatagattaat

SEQ ID NO: 229699 - DNA, 925 bp, Unknown
  Bacterial polypeptide expressing nucleotide sequence isolated from the Sargasso Sea
gatgaatgataaaaaaataatttttatgggcacaccgcatatagctgctcagcatttacagtacttagttgataatagtttaaatatagttggtgtgtttactcagccaccaagaaaaaaaaatagaggtatgcatattgaagaaagcccagtgcatcaaattgctaaaaaaaataatttacaaaccttttgtccaaactctatagattactcagtaatagaaaaaacaaagagtcttaatcctgatataattattgtagttgcatatggtataattttaccatcgcaatttctaaacataccaaaatttggatgtattaatattcatgtatctttgctcccaagatggagaggggcagcaccaattgaacatgctttgctagcaggagatgtaaaaactggcataagtgtaattaagatttctcctaaacttgacgctggagatattctttatcaagaaagcttaaaaataagtgaagatatgtatagtgatgaattaacaagtgccctcacaaatttaggcaaaaggacaatgcttgaagttttgccaataatttttgaaaaaaatatttcatctaataaacaggactcaaataaagttacgtacgcaaaaaagttcacatcaaatgatagaaaaataaattttaataattctactactcaagtttataatcacattcgagctcatggaccaaaaccaggttcatggtttgtttatcgaggtgaaagaattaaaattttaaaagctacaaagcataaagataaaggtcagcaatccacaatcttaaataataaatttatgctcgcatgtagtgatggaagtatacttcctactcttatacaacgtgaaggtaaaaaagcagttgaggtaaaagattttattaaaggcttcacttttacagttaatgataaaataaatgcctaa

SEQ ID NO: 229700 - DNA, 750 bp, Unknown
  Bacterial polypeptide expressing nucleotide sequence isolated from the Sargasso Sea
tatgaatatcatatttatgactaactcagaattttcatttcctagcttggaattattagttcaatctaaaagtaaaattttatgtttagtcacgaatccatcaaaaaggataggacgtaaaaaaagaattattagtgatacagtaaaattaaaatgtaatgaattaggcattgatataattgagcagcaagatttaaatgatattagttttaaaaataaattaaaaaaatatgaacctgatttatttgtagtcatagcttatcgaatcctcccaaaatccttgttaaatataccaaaattaggaagtataaatttacatgggtcattattgcctaaatacagaggagctgccccaattcaatggtctttaataaatggtgacaagcaaacaggtttaagtactttttttattgattctaagatagatacaggtgcaataattaagcaaaaaaatattcagattaaggaatatgaaaattatggaatattaaaagaaagaatggcgattcaaggatctatattattattggatactattaattctatttataatggaggagctactcctgttatgcaaaatgatgagtctgttacatatgctccaaaaattacaaagaaaatgaccattattgactggaattctagttcagatggtattcataatcttattagaggtctttcacctcttcctggggcacaatcaagaattaatggtaaaaagattaaaattttagaaacaagaataattga

SEQ ID NO: 229701 - DNA, 820 bp, Unknown
  Bacterial polypeptide expressing nucleotide sequence isolated from the Sargasso Sea
atggcaaaaacaaaaattaaagttggttttgctggcacaccaaagattgccttcgatatattttcagaaattttgtcatcaaaagatatttcaactgaatttgtgcttactcagcctgataaatcatcaggtaggggccttgttacatcaaaatcattgtttgcaaacattgataatgtgccggtgttgcagccagaaagcttaagtgaagaagaactaatcaaaaagatagaggctttcaatattgatttattggttgttgttgcttacggaaaaatacttccctcatggttgctcaatacacctaaatttggttgtctcaacatccatttttccaaccttccaaaatatagaggtgctgcaccaattcaaagagcaatagaaaatggcgaaaaagaaacaggaataagttttatgaaattaactgaaggtcttgatgaaggcccaatctataagaattttgtcataaacatagaaaataaagattattttgaggtcgagtcattgttattagaagaatcgttaagtagtgtttgctatgttattaaagctgtaacagaaaacttacaacccaaagagcaagaccactcactggcaactttagcgaacaaaataaccaaaaatgaagggcaaattgattggactaatagaggaagagaaatagtgaataagtttttggcctttaaaaaatggccaaaagtattttttaagtttggaggaatggatgtagaggctgtcaatttacatatacattcaaatgatatcggaaggcccggtgaaatttctgaattcaacgaagagtctttaaaaatttattgtg

SEQ ID NO: 229702 - DNA, 439 bp, Unknown
  Bacterial polypeptide expressing nucleotide sequence isolated from the Sargasso Sea
gcgcggggcggctcctatccagcgagccattatggcgggtgataccgaaacaggcgtaagcatcatgcaaatggatgagggtttagatacaggacctatcatcaaaaaatatcgtacatcgattaatgccgatactacagcaaatagtttgcacgataaacttgcgcagttagcggcccttgcgatttgtacaaccctaaaagaatcggatgaaggacaatttcaatcaattcctcaatcctcagaaggagtttcctacgcaaaaaaaataatgcgggaagagggtttaattaattggcaacattcgtctgctgatttagtacgacggatccgtgcattaaatccgtggcccggaacttggttcgaatatggaggcgaacgcatcagaattttatcagcggaggaggaggaagatctggcaagccgggagcggttttag

SEQ ID NO: 229703 - DNA, 424 bp, Unknown
  Bacterial polypeptide expressing nucleotide sequence isolated from the Sargasso Sea
atgaatatttttttcatgggaacacccgaatttgctgttcctactttaaatatattaaatagaaattataatgtaattggtatttttactcaaccacctcgtccatctggaagaggaatgaaagaaataaaatcttcaattcaacaatattcagaaaaaaacaaattgaatttctacacacctaataaccttaaaaatgatgaaaccttaaaacttttagtaagccttaatccagatttgatagttgtagttgcatatggattattaattccagaagtcattttaaaaattccattatatggttgcataaacggtcatgctagtttgttaccaaaatggcgaggagcagctcccatccaaagagcaattgaagcaggagatataaaaactggatgcacgtccatgtttatggaaaaaggtttag

SEQ ID NO: 229704 - DNA, 934 bp, Unknown
  Bacterial polypeptide expressing nucleotide sequence isolated from the Sargasso Sea
atgccaaaaaaaatcatctttatgggtacacccatgtttgcggttccaatattaaaatctctatatcaaaatggttttccaataaatttggtttatacacaaccacctcaaaaatctcaccgaggtcagaagataaataaatcaccagtacaaggtatatctgaaactttaaatatagaattcagatctccgcagaacttgaaaaacaacactgaagaatatgagtttttaaaaaaaatagaggctgatctcgcaattgttgtagcttatggacaaataattccaaaagaatttttaaatttaacaaaaaaaggttttataaatattcatgcatctatactcccaaaatggagaggtgcagcacctattcagagagctataatgaatttagactcagaaacagggatcagtataatgaaaattaatgaagaattggatagtggacctgtaagtaacacttataaaataaaacttgatcaaagtctgaatgcaaaagaggtctcagaaaaactcgctttaatagcagcagataaaattttagatgttgtagatgaaatttttgagggtaaatcaaactttgttgatcaggataattcaaaagcaacttatgcaaaaaaaattactaaaaatgaagggctaatagattggaaaagcgatgctttaaaaataattggaaaaattaatggcttatatccctccccgggggcttttttcaattttaacggacaaagatataaaattttaaaagcagaaattggaaatgggattggtaaaaatggtgaggttatatcagacgatcttgagatagcatgtggaggtgaaaaatctattaaagtttttgaaatacagagagagggtaaaaaggttcaaaaaattagagagtttatgcttggatcccaaatcagaaaaggttcaattatatctaatgtttaga

SEQ ID NO: 229705 - DNA, 928 bp, Unknown
  Bacterial polypeptide expressing nucleotide sequence isolated from the Sargasso Sea
aatgaagataatttttatgggaactccagattttgcactaaaaagcttagagtccatcaatcaacattttgacgttagtcttgttgttactcaacctgacaagccgacaggaagaaaaaaagaaataattttttccccagtaaaaacctactgcattaatagaaaagttaaatttttacaaccagaaaaaattaaagataataaagattttttatttcaaattaatgatattaaaccagatattattgttgtggcagcttatggtaaaattcttcctaaagaaatcttatcgataccaaaaattggctgtataaatattcatgcatcattgcttccacagcttagaggcgcggcgcctataaatagagccattataaatggtaacaaagaaacagggataacattaatggaaatggatgaaggaatggattcaggaaatataatatctacctctaaaatcgagattcaaagtactgacacaactacatctcttacagaaaaattagcaaatctaggggctagtcaaatagttaagctaatcaaagagcttgatattagcccaattattaattcaaagaagcaggatcatagcaaggcaacaattgccccaaaaatgactaaagaagatggtttaattgattgggaaaaaagttttaatgagattaatgacttaatccgggggtgtaatccttggccggttgcatacactaaacttgataaatctatgataaagatttatgaagttacccagaataattcagaaaaaattccccctggagttattaaaaaagttaagggctctatggttgtaggctgtaaggataaaaatattgagatattacatattcaaaaaagtgggcaaaaaaaaatttcaggtaaagacttcattaacgggatttcatttaaatctcatattaaatttatttaa

SEQ ID NO: 229706 - DNA, 943 bp, Unknown
  Bacterial polypeptide expressing nucleotide sequence isolated from the Sargasso Sea
atgaatattgtctttgcgggtactcctcaatttgctgcggatcatttgaaaatattattagatagcgaacatgtcattaaatgtattcttacgcaaccagatagggtttctggacgcgggaaaaaaataaagacttcccctgtaaaagaaattgctcttataaatgagatcgagattctgcaaccaacctctttgacagatgaatcaactatcaaggctctaaaatctgtaaaagctgatcttatgatcgtagttgcttatgggcttttaatacctaaaaagattttagatattccagaaatgggctgtgtaaatattcacgcctctattcttcctaattggaggggcgctgcaccaatagaatactcaatattttctggagataaggaaactggtattagctacatgaggatgacggaaggtcttgatgaagggccaattttagaagttcataaatgcaaaattagaaaagaagacgaccttggatcaatagagaataaatttatagagcttagcaagttaaacttattacctttccttgataaatttaaaaaaagagacttaaaggaggtgcgacaagaaaattcgcttgctacatttgcaccaaaaattaacccttctgatcaacagatagactggaataaagtttctgatgaaatagacagaaaaataagatctctctaccctaaatatgttgcttatacttttttaggtgataaaagaattaagcttcataagtgctttcctgcagaatcatcaggcctcaagccaggttttatagggttttctgaagaaaaaaaaatcttggtaggatgtaaggataatacctgtattagaattgataagatccaaattgaaggaaaagatgttgttaagtcagaagattttgttagaggatacaaggctttaattgattcagaaagaaagtttagcagtaattagc

SEQ ID NO: 229707 - DNA, 937 bp, Unknown
  Bacterial polypeptide expressing nucleotide sequence isolated from the Sargasso Sea
attgaacattattttttttggtagcccatcatactcatcagatgttttaagttatttagttagcagcaaacactcagttgaagctgttgtcacacaagatattaaagctagtaaaaaaaagaaagaggctaaaactccggtaggcatattcggcgagcagtataatatacagacttattatccaaataatttatcagatcctagttttatacaaatactaaaaaaatttgaatcagatatttttgtaatatatgcctatggtaaaattctaccaaaagaaattatagaaattcctaaatatggagtaattaatattcactgttctcttctgccaaaatggagaggtgctgcaccaatacaaagagcattactaaataatgataagattaccggaattactttttttagaatagatgaaaagcttgatacaggaaaaatcatatcaaaatatgagtacgaaatttctaattctgatgactcattatcacttcaaaaatcattgacagctttagcagtgaaaaacattgaggatgttttcgagaaagtaatgttagattctaattttatctctcaagatgatagcgcagcaacatatgctaagaaattatctaaagcagagtcatttatcaaatgggaggaagatgctgaaataataatttctaagattaaagcttttgcaggttggcctggagttgaggcagaaatacatggcgtaaggtttaaaattattaaagccaaatattataaagatgtatcatccctgagtaacggaaaagtactaaactttaatcatgatcaatttgaagtgaaggcaaaaaatgggattatacagattgataaactacagttaccaggcaagaatattataacatgtagagacttttacaactcaaatagtgttttttcaatgaaaataaagaatgattctgttaaataa

SEQ ID NO: 229708 - DNA, 370 bp, Unknown
  Bacterial polypeptide expressing nucleotide sequence isolated from the Sargasso Sea
atgaagttggtttttatgggaacaccaaacttttctgttcctgctcttcaggcattgaatgagagcagccatcaaatatgtgcagtttattctcaaccaccaagacccgctgggcgtggtaaaaaattaaaggtatctgaagtgcatcgagaagccgttgatatgggtttaactgtccatcatcctgagaacttcaaatctgaaaaagatcaaattatttttaagaacctaaatgctgatgtggcggttgttgttgcttacggtttgttacttcctaagccaattttattatcgcctaagcttggatgcgttatatacacgcatctcttttgccacggtggcgtggtgcggctccaattcaaagagcaat

SEQ ID NO: 229709 - DNA, 961 bp, Unknown
  Bacterial polypeptide expressing nucleotide sequence isolated from the Sargasso Sea
tttgaccactcctttacgtattatttttgcgggcacaccagactttgctgcccgccatctcgctgccctgttggattctcctcatcaggtgattgctgtctacagccaacccgacagacctgcaggtcgtggtcatcagttgcaacaaagcccggtgaaacagctggcactgcaacacgatattccggtgtatcagccgaaatcactaaaaaaggccgcggctcaacaagaattagctgccttaaatgccgatttaatggtggtggtggcttatggcttgattttgcctcaggctgtgctggatgcaccacgtttaggttgtatcaatgtgcatggctcgttattaccacgctggcgcggtgctgcgcctattcagcgcgccatttgggcgggcgatgccgaatctggtgtcactattatgcaaatggatatagggctggatacaggcgctatgctaagcaaggtcagcacgcctatagctgttgatgagaccagcaccagcttatacgataagttagctttaacaggccctgtagctttggtagaagctttagctaatctgcaagcactgcaggcccaggctcagccacaacaggatgagttagccagctacgccgaaaagctatccaaagaagaagccctgctcgattttactaaaccagcagtagcgcttgagcgtgaaatccgtgcttttaacccatggcccgttagctatctgcaactgggtaaccaacagctgaaaatctggcgcgctgtgactgagcatggctcaggccagccaggccaggtactacgggtggataaaaaaggcatcgccattcaaacttgtgacggcgtgttagtgatcaccgagttacaacctgcaggcaaaaaagccatgaaagtggtggattttcttaatggtcgcgccgactggtttcaaccaggtcagatcttgccccctgttgatgggcagagctga

SEQ ID NO: 229710 - DNA, 946 bp, Unknown
  Bacterial polypeptide expressing nucleotide sequence isolated from the Sargasso Sea
gatggcaaagcctgaaaagattaaaatagggtttgcagggactcctgagatcgcgttcgcacattttaatcatcttttaaatagcccgaatatagacgttggtttcgttctgacacagccaaacaaaaaatcaggtagaggtttagaagaatctaaaacattatttgataatattgatagagacatcccaattattcagccagacaatctcaatgatcaagacatcatcaatgagataagcaaaatgaaaatagatcttctcgtagtggttgcttatggcaaaattttgccagattgggtgcttgagcatcctaaatttggatgcttaaacgttcacttctcgttgcttcctaagtggagaggggctgcgccaatacaaaaagcaattgccaatggagacaaactttctggtattagttttatgaaaatagtaaacgaactagatgcagggccaatttatgcaagttttaatgtagatattgaagataatgacttttttcaagctgaagaaaagctattagaagtctctttgatgcatattagctctgtaataaatgaaatagtcgtaaataataaacagcctaaagaacaagatagcagagaagtcacttatgctgagaaaatagatcgtggtgatgggcttgtaaattggtcatggggcgctaaagagataaaaaataaatttttagcctatagaaagtggcctcttctaagttttatgtttaaaaatgaggaagttcaaatacatgatttagagatagcttctgatcaagccggcactcctggtaccataacggagtttactaaggaatctctaagtgttttttgtggtgatggagtcataaatataaaagcagttaagtttcctggaaaaaaagttatatcttcaatagatttctttaatgcaaaaagagatataatttcatcaggggatatattggtttga

SEQ ID NO: 229711 - DNA, 718 bp, Unknown
  Bacterial polypeptide expressing nucleotide sequence isolated from the Sargasso Sea
aatggctaaaaaaataatttttatgggtacgcctatatttgctgtaccaattttgaaatcactctatcaaaatggatatccaatatcagttgtatatacccaaccacctcaaaaatcacaacgcggtcaaaaaataaataaatcacctgttcaaggtatttcagaaactttaaacatagattttagatatccaaaaactttaaaagataatgatgaagaatataattttataaacaacttgaatgcagatttggcagttgtagttgcgtatggccaaatcatacctaaaaaatttttaaatttaactaaaaagggttttataaatattcatggatctattcttcctagatggagaggagctgccccaattcaaagatctattatggaattggataatgaaaccgggataagtataatgaaaattaacgaggagttagacagtggacctgttagcaatacttttaaaataaatatagattataatagtaatgcacaagaaatttcagaaaaattatccttattagctgctgagaaaattttggatattatcgatgatgtattggaggataaagtaaaatttattgatcaggatcattcaaatgcaacatacgccaaaaaaatagataaagcagagggtaaaattaattggagtgataaagctattaatattcttggaaagataaatggtttatttccccacaccttggtgccttcttta

SEQ ID NO: 229712 - DNA, 826 bp, Unknown
  Bacterial polypeptide expressing nucleotide sequence isolated from the Sargasso Sea
atgacgaacaacaatgatttaataaaaaaactcaaaattggtttcatgggaactcctagtttcgcagtacctattttaaatagccttataaaagataattatcatattgaatttgtttatacgcaatccggaagacctgctggtagggggctaagaaaaaaaaattcggaaatatatgaagttgcgaaaacgaaaaatattaacattagagttccagagaaattagatcatgaagagattaattttatctcaaacaaagaaattgatattataattgtagctgcatacggtcttatactacctgaaagaatattaaaaattccaaagtatggatgtctgaatgttcatgcctctttgttaccaaaatggcgaggggctgctcctatacaaagatcaattatggcaggagataaaaaaacaggcatttcttatatgcttatggacaaaggattggatacaggtcctgtaattcttcaaaaagaaactcaaataggtgaaaatgataatttcttaaaagttcatgactctttatcactcatagcatctcagacaataagtgaaacaattcttaaatttattgaaggcaaattagccactaaagagcaaaatgatgatattgcatcttatgcagataaaattgagaaacatgaaacaaaaatagattggaatttaactgctaaagaaattagaaatttaatttattctttgagtccattaccaggggcgtggactataacaaaagaaggcaaaagactgaaaatactgagtgcgtcaattgaagaagctaaagaagaaatagctgttttaggagaaaatcaaatattag

SEQ ID NO: 229713 - DNA, 925 bp, Unknown
  Bacterial polypeptide expressing nucleotide sequence isolated from the Sargasso Sea
atgaaagataaaaaaataatttttatgggttcgcctaaaatagcttctgactatcttgaggtattaattgaaaataattttataatctctgcagtattttctcaacctccaaaaaagaaatctagaggaatgaaaataattgaatctgaagtccatcagcttgcaaataaaaataacattgaagttttttgtccaaacatatttgataaaaatactattgagatagtaaaaaaattaaatcctgatttaattattgtcatggcatatggtaaaatattgccaaaagatattttagaccttcccccatttggttgtatcaatatacatgtatccttgttgcctagatggagaggtgcagcaccaatagaacattctttaatgagtggggataaagagacgggtatatcaataatacaactaatcgaaaaattagatgctggaccaattattaatcaaaaaaaagtagatatagaagatgattgtaataaaaatgaattaagtcaaaaattaacagacgttggaataaaattattagtggaaactattcctcttatttttgataaaaaaatttcctattctgatcaggatgataatgatgcaacatatgctaataaaatttcttcactaaacagaaaaattaattttaataaatctgtacatgaagttttaaatctcataagagcacattctcctaaacctggtgcttggtttaccatacaaaatgaaagaattaagatcattaaagcaaaaaaatcaaattctagtggtaatgcatcgacaattcttaacgagacatttgatattgggtgcaatgatggaagtattgagccactaattttacaaagagaaggcaaaaatgctatttctaaagatgattttcttcggggatatagttttaaggttaatgaagtaataaatgcctaac

SEQ ID NO: 229714 - DNA, 958 bp, Unknown
  Bacterial polypeptide expressing nucleotide sequence isolated from the Sargasso Sea
ttgaaaccactcaatatcatcttcgccggaacaccggatttcgccgctcgccatttacaggcgctgattaactcacatcacaatgtgattgccgtctacactcagccggacagacccgcagggcgcggtaaaaaactcaccgccagcccagttaaagaactcgcagtcagccacgacattccggtttatcaaccgggttcactgcgtaaagaacccgcacagcaagaacttgccgccctcaatgccgatattatggtggtggtcgcctacggcttaatcctgcctaaagtcgtgctcgacacgccgcgtttaggctgtatcaatgttcacggttctattctgccacgctggcgcggtgcggcgccgattcaacgcgcgttgtgggcaggcgataaagaaaccggcgtgactatcatgcaaatggatgtcggcctagatacaggcgacatgctgctgaaaacctacttgccgattgaagatgatgatacttctgccaccctttacgagaagttagctctgcaagggccagacgcgctgctgcaagcactcgaaggtttagccaacggcaccctagcggccgagaaacaagatgaagtcttagcgaactacgccgaaaagctcagtaaagaagaagcgagactcgattggagcaaatccgcgacccaactatggcaagaagttcgcgccttcaatccttggcctgtgagctattttgagcaccaaggcaataccatcaaggtatggcagacccaagtcagcaccagcagcagtaatgccgcacccggcactattatcagcgccagtaaaaaaggcattgaagtcgccactggcgatggtgtgttaactctgctcagcatgcaattacccggtaaaaaaccactcagcgtggccgacatactcaatgcccgcggcgattggtttaccccaaacactcgtcttaataacgaggcgcaataat

SEQ ID NO: 229715 - DNA, 177 bp, Unknown
  Bacterial polypeptide expressing nucleotide sequence isolated from the Sargasso Sea
attgaaagtgatttttgccggtactccggattttgcagctaaacatctatcagcgttactcgagagcgagcacgaagtcattgctgtttacacccagcctgatagacctgcagggcgaggtaagaaacttacggctagcctgggtaaagtattagcagaagaaaacgccattcctgt

SEQ ID NO: 229716 - DNA, 931 bp, Unknown
  Bacterial polypeptide expressing nucleotide sequence isolated from the Sargasso Sea
tatgtcctcattaaaaattttatttgcaggtacatcaaaatttgcagaatatcatcttcaaaaattaattgaatcaaaacataatgtgataagtgtttttactcaacctggaaaaagatctgggagaggattgaaatttacacaaagtccagttagagaaatggcttttaataataatattgaaatatggcaaccagaaaaaatatctaacaaagaagtaagtattattaaagaactgaatccagatataataattgtagtttcttacggacttttaataccaaaagaaattctatcgattccaaagttgggttgtattaatgttcatccatccttattaccaagatggaggggtgctgcgcctattcaaagatcaatagagtctggggatactattacaggagtcacaataatgatgatgaatgaaaaattagatacgggcgacattatttatcaagaaccacatagaatagatagccataaaaaagcatgggagttagaggaagaattaatgaatcttggcggacacattttattgttagccttagagtcaatcttaaataataaatttgttctatacccacaggaacataggttaagcacttatgcaaaaaaaataacaaaagaagaatctaaaattgattggaatatgacagcacaagaaatccataataagataatggcatttaattcttggcctatagctgaaacaacgctgtctggagagcgaattagaatttatgacagtaagtataatgaaaatgatataataggcatacctgggaacataaaatcatatgaaaataacattgaggtttttacgaaaaaaggtaccttaagtattctttcacttcaaaaagaaaattctaaagttttaggtgtcaaagattttctaaattcaaatgatttaagtgggaaaaagtttaattaa

SEQ ID NO: 229717 - DNA, 967 bp, Unknown
  Bacterial polypeptide expressing nucleotide sequence isolated from the Sargasso Sea
aatgagaaataaaaaaagtgttattttcatgggtacgcctgacttcgctgttccaagtctagaaaaaatacataaggaatatcatctattaagtgtatatacacagcctccaaaaaagtctgggagaggattaagaacaaaacttaacccaatacatgaaatgtcaaatgactataatttacctgttaaaacacctcaaaatttcaaaagttttgatattatcaaagaaattaaaaatctaagacctgattttattatagttgtagcatatggaataattcttccaaaaacagtattagatattcccaattttttctgtcttaatggtcatgcgtctgatttgccaaggtggagaggggctgctcctattcaaagagcaattgaagcaggagataaaacaactgctgcatgtgcaatgattatggaagaaacccttgatacagggcctgttatagctaagaaaaaaattaatatcctaaataaagatactgcaagcagccttcatgataagttatcaaaactgactgcaaatgttcttatcgaatctatggataagattatccaaaacaaatacaaaccaattaaacaaaaaattactggtatcacatatgcaaataaaatcacatctaatgatactttaattaattggtcccagaacaatgaagaaatattaagaaagttaagatcactttctaattggcctggaggatggacttatcataatcaaaacaggattagaattcatgaggcaaagaaaattgaattctcagttggcaaagaaaatataaaacctggtgagtttataggttattctggtaatggttcaccaataatacaatgtggaagcaattcctttttggaaattactcaaatccaaaaagaaggaaaaaagaaaatgaatagtcaggattttctaagaggatataagatcaatattggtgataaatttagaagagataaaatgtaa

SEQ ID NO: 229718 - DNA, 844 bp, Unknown
  Bacterial polypeptide expressing nucleotide sequence isolated from the Sargasso Sea
aatgttaagaaaaattgtttttatgggcacatcaaattttgctgttcatattttaaagtcactttatcaaaatggatatccaatctctgctgtttacactcaaccgcctaaaaaatctaatagaggtttaaaattagttaagtcaccgataaatttattttctgaaaatataagtttatatgtgagaactcctcaatctttaaaaaataataaggaagaagaattatatctctccgaattacagccagatattattttggtaatttcatttgggcagattatccctaaaaatcttttaaatattccaaaacatggatttctaaatgtccatgcttctttacttccaaaatggagaggagcggcacctattcaaagatcaataatgaatttagataaagaaacagggattagcattatgagaataaacgaaaatttagatgagggtccagtctgtaatcaatactctttaaaaatttcagaagaaatgaattcagaagaattgtctgaaaaattatcattaatagcttcagaaaagattttagatattttagataatattaatgatggcaatgtagaatttaaagatcaagatcattcaaaagcaacctatgcaaaaaaaatccaaaaaacagaaggaaaaattgattggaatgaaaatgctgaaaaaataattggaaaaataaatggactttatccctatccaggcgcttttttttcatttaatggagaaagatataaaatattaagagccgaaaagtctagcacaacaggaaaacctggggatatagtaagtgaaaattttgaagtatgttgtggagaaggttcaataaaagtattaactatt

SEQ ID NO: 229719 - DNA, 783 bp, Unknown
  Bacterial polypeptide expressing nucleotide sequence isolated from the Sargasso Sea
taaattttataaatgaacttaaatcactatcttgtgatttatttattgttatagcttatggaaaaattttacccaaagagatattagaaatcccaaaatttggtagttggaacgcacatgcttcattacttccaagatggcgtggtgctgccccaatacaatggtccctaatgaaaggcgatgaatttaccggagtaggaattatgaaaatgaatgagggactagatactggcgacatattgttggaagaaaaaattaaaatcgataataacgataatttaaaaacactaacggaaaaacttagtattttatccgcaaaattatttttaaatgctacatctttactcgaagaaaatattaataaaaatactaattctcaattaacaaaacaaaatacccttggaagagaaattacttacgcaagaatgattgaaaaatcagactataaagtggattgggataatgaggcaattaaaatttctcgacaaataaaagcattatacccacgagcaaaaacaacttttaaaggtaagaacctaaaaataattaaaattaaagttttgagcagtgatgaacttaataatgaaaaatactttttcatgagcaattattcaaaaccaggtattattcttgctgttatagaaaatgaaggaataataatttcaactaaaactgatccgattattttgatagaggcaaaacttgaaggcaaaaacatatctagcaaaaagcaattaatacaacagttaaagccatcagtaggtgaatatctctcagattaag

SEQ ID NO: 229720 - DNA, 916 bp, Unknown
  Bacterial polypeptide expressing nucleotide sequence isolated from the Sargasso Sea
aatgtcaaatattgtattcatgggcacaccgcagtttgctgtacctatcttaaaaaaaattaatcaaaaatataaaattaattgtgtatttactcagcctccaagtaaatcaaatagaggtcaaaagtttacgaaatcatcaattcatatatgtgcagaggaacttaatctagaagttaaaactccaaaaaaaattgatgaagaatttgaatatcttaaagaattaaatttagatcttgtaattgttgttgcatacggacaattaatttcaaaaaaaattcttgatttgagtaaaaagggttttttgaatattcatgcttcattattaccaaaatggagaggggcggcaccaatccaaagatcgattttaaacaatgaaaaaaaaactggtatatcatttatgaaaattgatgaaaaattagattctggaccagtatgtaataaatattcaatagatattcttgatcaagataacgcagaaattttatcagaaaaattatcttatttgagtacagaaaaaattttagaaaatgtgcaaaaagttttagacggagaggcaatatttaaagagcaagatcattcaaaagctacatacgcaaagaaaattcaaaaaatagagggaaagatagattggaataatagtgctcgtaaaataattgctcaaataaatggattatatccaaaacctggggcatggtttgagcttaacaacaaaagacataaaatattaaaagccaaaataaacaagcagtcagcaaaaatcggtgaagtaatcgacgaacaaatgacaatagcatgtggtgaaaattcaataaatattattgagatacaaaaagagggcaagaatcctcaattaattaaggaatttttattagggaataagattagaaaaggaacaataattacaagtgaatag

SEQ ID NO: 229721 - DNA, 595 bp, Unknown
  Bacterial polypeptide expressing nucleotide sequence isolated from the Sargasso Sea
aatgcatagtaaaaaaataatctttatgggaacaccactcattgctaaagaatatttaaatacacttattgaaaataacattaaagtcgaggcggtttttacacaacctccaaagaaacaatccagaggaatgaaattaacaaaatcacctgttcatgaattagcaattaaaaacaatataaacgtttttcatcctataatttttgatactgaaattattaatcaaataaaaaaaatagagccagaattaattatagtaatggcttacgggcatatacttcctaagtcagtattagagttaccgaataatggatgtataaatattcatttatcaatattgccgagatggagaggtgcagcaccaatagaatactgcttaatgaatggagataaagaaacaggtatttcaataattaaacttgttgaggaattagatgcaggacctataattgtgcaagaaaaattagctattccatcaaactttaataaactagaactaagtaaccatctaaccactataggaaaaaaattattaattgatacaattcctagaattctaaaaaacgaaattacattgaaagaccaagataaagaa

SEQ ID NO: 229722 - DNA, 934 bp, Unknown
  Bacterial polypeptide expressing nucleotide sequence isolated from the Sargasso Sea
atggctaaaaaaattatttttatgggtacacctttatttgctgtaccaaccttgaagtcattatatcaaaatggttatccaatttctgtcgtttatacccaaccacctaaaaaatctcatcgaggtcaaaaaataaataaatctccgattcaggacatttctgaaacattaaacatagattttagatgtccagaaaatttaaaagataatgatgaagaatataaatttataaagaatttaaatgctgatcttgctattgtagtggcttatggcaagctaattcctaaaaattttttaaacttgacgaaaagaggtttcataaatattcatggatctattctgcctaattggagaggggctgctccaattcaaagatcaattatgaatttagataaagaaacaggtataagtattatgaaattagttgagaaattagatagtggacctgttagtaaaattcacaaaatcaaattagatcaaaataataatgctgaagaaatttcagaaaaactatcctttttggctgccaaaaaaattttagatgaaattgatgatatattagatgataaagcaaagtttatagatcaagatcattcgaaagcctcttacgctaaaaaaattgaaaaaatcgagggtgaaattaattggaatgatgatgcacaaaaaataattggaaaaattaatggtttatttcctgttcctggtgcattttttaatttcaaaggtgaaaggtacaaaattttaaaagctaaaataggaaatggtataggtccagctggtgaagtgttatctaataaattagaaattgcatgcacgaataatcaatcaataaaaatccttgagatacaaagacaaggaaaaaaacctcaaaaaattggggaatttatgcttggatcaggtattagaaaaggttcattattatccaatgcctaga

SEQ ID NO: 229723 - DNA, 518 bp, Unknown
  Bacterial polypeptide expressing nucleotide sequence isolated from the Sargasso Sea
gctgaaactgatttttgccggtactcccgacttcgccgcccgtcacctggcggcgttgttgtcttccgaccacgaggtcgtcgccgtttatacccagcccgacaagcctgccggccgcggccagaagctcaccgccagcccggtcaaggagctggcgctggcccacgatctgccggtctatcaacccgccaccctgcgcaaggaagaggcccaggccgagctggccgcccttggcgccgacctgatggtggtggtggcctacggcctgatcctgcccaaggccgtgctcgacactccgcgtctgggttgcatcaacgtgcacggctccctgctgccacgctggcgcggtgccgccccgatccagcgctccatctgggcgggcgatgccgaaaccggcgtcaccatcatgcagatggatgtgggactggataccggcgccatgatccgcaaggtgaactgccccatcgccgccgacgaaacctctgccagcctctatgacaagctggccgggctgggcc

SEQ ID NO: 229724 - DNA, 688 bp, Unknown
  Bacterial polypeptide expressing nucleotide sequence isolated from the Sargasso Sea
aatggctttaaatattattttcatgggaacgccagaatttgcagttccatctctgaaatcaataaataattcaaaacataatttattacatgtatacactcaatcacctaaaaaaagtaaacgtggtcaaaaaactaatatatcatcaattcatcatatctctaaaatactcaaattaaatgtgagacatcctgaggatcttaacagtgaggatgaaataaaatatttggaaaaacttaaacctgatgtggtagttgttgtagcatatggaaaaataattcctgaaaaaattttgaatataaaaaatataaagtttataaatttacatgcttccttattgcctaaatggagaggtgctgcccctatacaaagatcgataatgaatatggataaagaaacaggtatttcaataatgaaaattataaataaacttgatgctggaccatatatgcttcaaaaaaaaataattgttcagaaagatgacaactatacttcattgagcaagaaattagctgatataggttctatttcaatattggatgcacttgaaatgattgagaaaaataattttaaatggttcgaccaagatgaaaccaaagcaacatatgcaaaaaaaatatctaaaaaagaatctgaagttaactggagtcaaaatgcagatcaattgatagcgaaaattaaaggttga

SEQ ID NO: 229725 - DNA, 982 bp, Unknown
  Bacterial polypeptide expressing nucleotide sequence isolated from the Sargasso Sea
ttgttttggggtacgccggacttcagtgtgccttcactcagagcactttcggcagagggctacgaggttgtaggcgtggtgacacaacccgatagaccagcaggacgtggacgtaggctgcggccctcctcggtaaagaaggtggccttggatagggatttcccggtgttcactccggaatttcccagtggagaggcgttccttgaggagataggtcaattggggccggatatctcagttgtcgttgcctacggccatatactgcggccggaggtgcttgaccttccggctaagggctccatcaacgtacatgcatcgctactccctgacctccggggcgctgccccgataaattgggctatagcgcgtggtctctcggagacgggtgtgaccattatgcggatggcaaaaggaatggactccggcgcgattatcagtcaggtagcagagccgatcttggaggacgagacaacgagtgagttgacggtccggttgtcggaaatcggagcggtggctttagtcgaggcgttagggttgatcagtgaaggggagactgatgagcaagaacaggaccataccgccgccacatttgctcccaaggtgtcgcgccacgtggctcgtattagttggacaaagccagcgcacgaggtgtcagcgcatgttagggcgatggatgcagtcccgggtgcttggacgacattagcagatgcccccgtgaaactttttcggcccgctgtatggagtgaagcgagagtcaaggcactagggagcgagtgcctcgaggataacgttaggccaacgatcccaggggatagtgatgacggcttggtaatccgagcgacggttttagacggtgtggtggttcggtgtacccaaggagcagtggcgttttctgaagttcagccgccgggaaggaaacgtatgctagtttctgactggattaacggacggggcatcaatgaaggtcagcggttagtgtgat

SEQ ID NO: 229726 - DNA, 934 bp, Unknown
  Bacterial polypeptide expressing nucleotide sequence isolated from the Sargasso Sea
gatggcaaataagattatctttatgggtacaccaatattttgtgttcctatcttaaaatctctatatcaaaatggttataatatttctgtggtttttactcaaccaccacaaaaatctcatagaggacaaaaaattaacaaaagtccaattcagggtatctctgaaactttaaatatagattatagaacacccaagacacttaaggataatcatgtggagtatgaatttttaaaagagttaaatgccgatcttgcaatagtgtgtgcatatggacaaataattcctgaaaattttttaaacttaactaaaaaaggttttgtaaatattcacgcctcaattcttccaagttggcgaggcgcagcaccaatccagagatcaattatgaatttagatcctgaaacgggcataagtattatgaagatcaaaaaagaattggatagcggaccagttagtaaaatttataaaatcaaaatagatcaaaaccaaaatgctcaagaaatttcagaaaaactatccactttagctgctgaaaaaattttagataatgtagatgatatacttgaagataaggcgaagtttattgatcaggatcattcacaagctacttatgcaaaaaaaattaataaggaggagtcacggattgattgggacgaggatgcttctaaaataattggaaaaataaatggattatttccctccccaggtgcttcttttagttttaatggtgaaagatataaaattttaaaagccgaaattggtaatggcataggtcgagttggagaaataatttcaaatcagctggaggtagcatgtaataaaaaccaatctattaagattctcgaaattcaaagacaaggaaaaagaccacaaacaattagcgaattcatgttgggctctcaaattaaaaagggctcaaagttatcaaatgtttag

SEQ ID NO: 229727 - DNA, 922 bp, Unknown
  Bacterial polypeptide expressing nucleotide sequence isolated from the Sargasso Sea
aatgactgatcaaagaatcttatttatgggcacagctcagtttgcagtaccttcacttgctaaattgttaagtttaaaaaaaaatataataaatgtttattcgtcccctccaaaaaaagctaatagaggtatggagcttacagattcaccaatcattagatttgctaaatcaaatggcttagatttcagtcatccaactaatttacatgatgaatctgaagtcaaaaaaataagagaactaaatcctgacatcatcattgtaattgcatatggttacataattccaaatgaaattttaaaaattccaaaagtaggttgttttaatcttcatggctcacttttaccaagatggcgtggagctgccccaattcaaagagcaatcatagaaggggaccaaaaaactggaataacatttatgaaaatggatgaaggtttagatactggagacatggttttttcaaaagagattgctgttaccatcaatgatagttacaaatatctagagcaaaaactttctgatcttggagcagaaagttttccagaattttttaatttaattcagaggaatacaacttttacaaagcaaaacaatgacttagtaacatatgcaaacaaaattgaaaaatctgaaacaaaattaaattggactgaaactgcagataaaattattagaagaattaatgcttataatcctaatcctggtgcatggtttgaatttaatggaaagaggataaagattttagaagcttcattgcatgatcaatcaggtataccaggaactattcttagtgatgattttattattggatgtggaaataaatctattcaacctcaaacattaaaaaaggaaggcaaagaggaagtgagtctcgaagactttttaagagggaataagataccgaaagattattctattcaatga

SEQ ID NO: 229728 - DNA, 928 bp, Unknown
  Bacterial polypeptide expressing nucleotide sequence isolated from the Sargasso Sea
atgtataaaaaaattgtttttatggggacttcatattttgcagttcctatccttaaatcattgtatcaaaatggatatccaatctcagttgtttatactcagccacctaaaaaatcaaacagaaatcaaaaattaaataaatcagcaataaatttattttgtgagaacataagtttagaagttagaactcctcaaattttaaaaaataataatgaggaagaattatatttaagaaatttaaaacctgatataattgtagtagtctcatacggtcatattataccaataaatcttttaaacattcctaaaaaaggatttttaaacgttcatgcttctctattaccaaaatggagaggagcagctcctatacaaagatcaataatgaatttagataaggaaactggaattagcatgatgaaaataaataaaaatttagatgaaggcccggtttgcaatcaatatactttaaaaatttcagaaaaaatgaattcagaggaattatctgaaaaattgtcactattagcttcagaaaaaattttagatattttagataatattcatgatgatagtataaaatttatagatcaagatcattcaaaagcaacttatgcaaaaaaaattcaaaaagttgagggaaaaattgattggaatgaaaatgcagataaaataattggaaaaataaatggactttatccattcccaggagctttttttatatataatggagaaagatataaaatattaaaagcagaaaaatcttacacaaaaggcaaagctggcaatataataagtgaagattttgaaatatgctgtggagagggatctctaaaagtactaactattcagcgagaaggtaaaagagtccagcaaattagtgagtttttgcttggcactcaaattaaaaaagggtcaatattgttaatgcata

SEQ ID NO: 229729 - DNA, 946 bp, Unknown
  Bacterial polypeptide expressing nucleotide sequence isolated from the Sargasso Sea
atggccaaggatgaaaagattaaaatagggtttgcaggaactcctgagattgcgttcgcgcattttaatcatcttttgagtagtccagacatagacattagttttgttctgacacaaccaaacaaaaaatcaggtaggggcttagaagaatctaaaaccttatttaatgatattgataaagacataccagttcttcagccagagaatctaaatgatcaagacaccatcagtgcgataaacaaaatgaaaatagatcttctggtggtagttgcttatggcaaaattttgccagattgggtgcttgagtacccaaagtttgggtgcttgaacattcacttctcattgcttcctaagtggagaggagctgcaccaatacaaaaggcaattgctaatggagacaagctttctggcattagttttatgaaaatagtaaatgaactagatgcagggccaatttatgagagatttaatgtagatattgaagataatgacttttttcaggctgaagaaaaactgctagaaacctctttgatgcatattagctctgtaataaatgaaatagtcgcaaataataaacagcccgaagagcaaaacagcaaagaagtcacttatgctgaaaaaataggtcgtggtgatgggcttgtgaattggtcatggagcgccaaagagataaaaaataaatttctagcatatagaaaatggcctgttctaagttttatgtttaagaatgaagaagttcaaatacatgatttagaaatagtctctgaagaagctagtactcctggtgttataaaggaatttactaaggattctctaagtgtttcttgtggtgatggaattataaagataaaggcagttaagtttcctgggaaaaaagttatatcttcaatagatttctttaatgcaaaaagagatataatttcatcaggggatatattggtttgag

SEQ ID NO: 229730 - DNA, 673 bp, Unknown
  Bacterial polypeptide expressing nucleotide sequence isolated from the Sargasso Sea
gtaattgcatatggtcagattatcccaaaaaattttttgtcattaagcaaaaacggttttataaatttacatgcatcaatacttccaagatggaggggcgctgcaccaattcaaagatcaataattaaccaagataaagagacaggcataagtgttatgaaaattaatgaaaatttagatgagggagacctttctcatatttttaaaataaatattatagaaaatgaaaatgcacaaagtttaagtgatagactttccattttggcttctgagaatatatcaaatgtaatagatagtatttttgataaagaagttaattttaaacctcaagatcactcaaaagcaacatatgcaaaaaaaataaaaaaaatagaaggattaattgattggagtgataacgctgaaaatattattggaaaaataaatggattatatccttatccaggaggttattttttatttaaaggagaaagatataaaattttaaaggcagaaaaatcattttctaaagaaaatcctggaaaagttttaacaaatgatcttgaagttagctgtggaattaattctattaaaatattagaaattcaaagagaaggaaaaaagtctcaaaaaattaatgagtttttgcttggttctcaaattaaaaaaggaaccagtttgatagatgtttaga

SEQ ID NO: 229731 - DNA, 946 bp, Unknown
  Bacterial polypeptide expressing nucleotide sequence isolated from the Sargasso Sea
atggccaaggatgaaaagattaaaatagggtttgcaggaactcctgagattgcgttcgcgcattttaatcatcttttgaatagttcagatatagacattagtttcgttctgacacaaccaaacaaaaaatcaggcaggggcttagaagagtctaaaaccttatttaatgatattgataaaaacataccaattcttcagccagagaatctcaacgatcaagataccatcagtacgataagcaaaatgaaaatagatcttctggtagtagttgcttatggcaaaattttgccagattgggtgcttgagtacccaaagtttggatgcttgaacattcacttctcattgcttcctaagtggagaggagctgcaccaatacaaaaggcaattgctaatggagacaagatttctggcattagttttatgaaaatagtaaatgaactagatgcagggccaatttatgagagctttagtgtagatattgaagataatgacttttttcaggctgaagaaaaactgctagaaacctctttgatgcatattagctctgtaataaatgaaatagtcgcaaataataaacagcccgaagagcaaaacagcaaagaagtcacttatgctgaaaaaatagatcgtggtgatgggcttgtcaattggtcatggagcgtcaaagagataaaaaataaatttctagcatatagaaaatggcctgttctaagttttatgtttaagaatgaggaagttcaaatacatgatttagaaatagcctctgatcaagctggtgatcctggtgttataacagagtttactaaggattctctaagtgtttcttgcggtgatggaattgtaaagataaaggcagttaagtttcctgggaaaaaagttatatcttcaatagatttctttaatgcaaaaagagatataatttcatcaggggatatattggtttgag

SEQ ID NO: 229732 - DNA, 697 bp, Unknown
  Bacterial polypeptide expressing nucleotide sequence isolated from the Sargasso Sea
ctgactgaattaaaaccggatataataatagtagtttcgtacggtcagattattccaaaaaatcttttaactattcctaaatatggatttttaaatgttcatgcttctctacttccaaaatggaggggagccgcaccaatacaacgttcaataatgaatcttgatagagaaacaggaattagcataatgagaataaatgaaaacttagatgaaggtccagtttgtaatcaatattctttaaatatttcagaaaaaataaattcagaagaattatctgaaaaattatcagtaatagcttcagaaaaaattttagatatattagataatatttatgatgacaatatagaatttaaagaccaagatcattcaaaagcaacctatgcaaaaaaaattcaaaaaaaagagggaaaaatcgattggaatgaaaatgcagaaaaaataattggaaaaataaatggactttatccatatccaggtgcttttttttcatttaatggagaaagatataagatattaaaagcagaaaaatctaatacaaatggaaaagctgggaatatagtaagcgaaaattttgaagtgtgttgcggagaaggatcaataaaagtattaagtattcaacgagaaggtaaaagagttcagcaaataaatgaatttttacttggtacccaaatcagaaaaggtaccaatattgcttaat

SEQ ID NO: 229733 - DNA, 655 bp, Unknown
  Bacterial polypeptide expressing nucleotide sequence isolated from the Sargasso Sea
atgaataataaaaaaataattttcatgggttcgcctaaaatagcctctaactatcttgaggctttaattaaaagtaatttcataatttctgcagtattttcacaacccccaaaaaagaaatctagaggaatgaaaataattgaatctgaagtccatcaacttgcaaataaaaataacatagaagttttttgtccaaataagtttgataaagacactattgagacagtgaaaaaattaaatcctgatttaattattgtcatggcatacggtaaaatattgccaaaagatattttagatttaccaccatttggttgtatcaatatccatgtttctttgttgccgagatggaggggtgcagccccaatagagcactctttaatgaatggtgataaagagaccggaatatcaataatacagctaatcgaaaaattagatgctggaccaattattaataaaaaaaaagtagatatagaagatggttgtaataaaaatgaattaagtcaaaaattaacagaggttggaatcaaattattagtggaaactattcctcttatatttgataaaaaaatttcttattctgatcaggatgataatggtgcaacatacgcaaataaaatttcttcactaaacagaaaaattaattttaataaatctg

SEQ ID NO: 229734 - DNA, 534 bp, Unknown
  Bacterial polypeptide expressing nucleotide sequence isolated from the Sargasso Sea
aatgtcaaaaaaaattatttttatgggtacgccaatgtttgctgtaccaattttaaagtcattgtatcaaaatggttatccaatttctgtagtatatactcaaccaccaaagaaatctaacagaggtcataaaataaataaatcaccaattcaaggaatttctgagacactgaatatagaatttagatctccaaaaaatttgaaggaaaataaagatgaatatcaatttattaaaaatctaaatgctgatctagctgttgttgttgcatatggtcaaattattcctaaagagtttttggagttaactaaaaaaggttttattaatattcatggatcacttttacctgcatggagaggggcagcacctattcaaagagcaattatgaatttagatgaagaaataggaataagtattatgaaaattgtagaaaaacttgatagtggacctgtaaataaagtgtataagtttaaactggataaaaataataatgcacaagaaatttcagaaaaattatccttactgcagcagaaaaa

SEQ ID NO: 229735 - DNA, 925 bp, Unknown
  Bacterial polypeptide expressing nucleotide sequence isolated from the Sargasso Sea
catggctaagaaaattatttttatgggtacacccatgtttgctgtaccaattttgaaatctctttatcaaaatggatatcctgtgacatgcgtttatactcaacctccacaaaaatcacatcgtggacaaaaaattaataaatctcctattcaaggaatttctgaaactttaaatttagagtacagggcaccatcaactttaaaagaaaataaagaagaatacgaattttttaaatcagtagatgcagatctagcaattgttgtagcctatggacaaattatacctaaagaatttttaagtttaacaaaaaaaggatttataaacatacatgcatctattctacccaagtggagaggagcggcacctatacaaagagctataatgaatttagataaagtaactggggtcagtattatgaaaatagaagaaaaattagacacaggtccagtttgcaatacctataaaatcaatatggagaataattttaattctgctgaaattgctgaaaagttatcttttattgccgcagaaaaaattttagataatattgatgacatacttgaagacaaagcaactttcgtggatcaagatcattcaaaagcaacttatgctccaaaaattcaaaagatagagggtttaattgattggactagtaatgcagaaaatattatagggaaaataaatggtttatatccggtcccaggtgctttttttatatcaagtggtgagagatataaaattttaaaaggagaaatcagcaatgggattggaaatccgggagaggttcttaacgattatttagaaattgcttgtggagataagaaatcaattaaagtcacggagatacaaagacaaggaaaaaggcctcaaaatattggtgaatttatgcttggttcaagaattagaaaaggccatcagatttaa

SEQ ID NO: 229736 - DNA, 560 bp, Unknown
  Bacterial polypeptide expressing nucleotide sequence isolated from the Sargasso Sea
tatgtctttcaatcttatttttatgggaacacctgaatttggtcgagagtttttggagtatattcattcaaatgttgagtttaatattaaagctgtttacactcaagcaccaaaaaaatctaatcgaggtcaaaaagtaaatttatctccagttcataaatacgctaaagataaaaatctcaatgttttttttccatctaaatttacaaaatcagaaattgaaaatattaaaagaattaagccagatgtaattttagtggtagcttacggtttaattttaccagaggaagttttaatgattccttcgtgcggttcagtaaatgttcatgcatcattattaccaaaatggagaggagccgcacctattcatagagccataattaacggcgatgaaaagactggtatttcaattatgagaatggagaagggtttagacgagggtccaacctatttacaaactgctattccaataggtgaaaatgatacttatggagacatatataatactttagtggaagctgggaagaaaactttaaacgactatttcttccttctagcca

SEQ ID NO: 229737 - DNA, 928 bp, Unknown
  Bacterial polypeptide expressing nucleotide sequence isolated from the Sargasso Sea
ttgataaaaaatcttaagcttgggtttatgggcactccaagttttgctgcccctatattagagcgtcttatagcagataattattatatagattatgtttatacacaatctggaagaccagctggaagagggatgaaagttagaaattcaataatatatgaagttgcaaaaaagaataatattgaaattagagtaccaaaaaaattagatgatgaggagttcagttttcttaaagaaagagaagttgatattataattgtagctgcttatggacttatattacccgaaaaaatcttagctatccctaaatttggttgtttgaatgttcatgcttctttactacctagatggcgaggggctgcccctatacagagatcaattatgtcaggagatgaaaaaacaggaatttcttttatgattatggagaaaggattggataccggtcctgtaattttacaaaaggaaatcaaaataggcaaaaaagataatttcttgaaagttcacgactctttatcaaatttagctgctgaaacaataagtaatacagtaagtaaatatattgaaggaaaattacctatagaaaaacaaaataatgttgaagcaacttatgccgataaaatagagaaacatgaaacaaaaattaattggagcttagctgctaatgaaattagaaatcttatttattcaataagcccttcgccaggagcttggacgatgacaaaagaaaagaaaagattgaaaatattaagtgcttcaattcaagaaattgacggagaagagggagtgttactgaaaaatcaatttgtaggatgtggtttaaaatctttgaaaattacagaagttcaacctgaaggaaaaaaagcaatgccttttgaagactacttgcgaggaaaaaatttttcagttagtgaaagaatttttgattaaa

SEQ ID NO: 229738 - DNA, 302 bp, Unknown
  Bacterial polypeptide expressing nucleotide sequence isolated from the Sargasso Sea
catgccgcgctatcgtattgtgtttatgggcagtccaaattttgccattccagcgctgcaaaaactggccgaagcccatgatatctgtgcggtatatacccaaccaaacaagcctgctgggcgcggcatgaaatcaacgccagtgccagttgccacctatgctgctgacacatcactgtctttattttcaccagcttcgctaaaaaccgatgatgcgcaacagcaacttgccgcgcatgacgctgatctatttgttgttgtcgcctatgggctgttattgccagagattgttttagacattc

SEQ ID NO: 229739 - DNA, 869 bp, Unknown
  Bacterial polypeptide expressing nucleotide sequence isolated from the Sargasso Sea
aatgtcaaaaaaaattgtttttatgggaacaccagagtttgcagttcctactttagaagctttaaaaaattccaataatgaaattatagttgtttattctcaaccagctagcaaagcaaatagaggtcaaaaattattagattcaaaagttggaagtttagcaaaaaaattttctttaagtttaagaacacctaaaactttagatagtgatgaagagtttaaattttttagctcattaaaaccagacatcgctgttgtcgttgcatacggccaaataatacccagaagatttttagatattcccaaatttggtttcattaatgttcacgcttcactgttgccgaagtggagaggggcagctcctatacaaagatctataatgaatttagataaggaaactggcgtaagtataatgaaaattgttgaaaaactagacgctggacctgttattcaacaggataaaattaatttaaatgaaaatatagatacttcaatattatcaaagttactctctcagttaggtgcaaaatctttaatgaatgcgatcgataaattagaaaagaacgaagtcaactttgttgagcaaaatcataatgaagctacatacgcaaaaaaaattacaaaagaagaggctgaattaaaatggaatcaaaatgcaaaaataattttagcaaaaatcaatggattaaatccaaatccaggagcttggtttaaatataaaaacgaaagatataaggtgtggaaagcaaaaatatccaatacaagtggtttacaaggatcaacaatagataataacttaaccattgcatgtaaagataaatcaataagtattcttgaaatacaaaaggagggtaaaagtagacaagcaa

SEQ ID NO: 229740 - DNA, 512 bp, Unknown
  Bacterial polypeptide expressing nucleotide sequence isolated from the Sargasso Sea
aatgttaaaaaacattgtttttatgggtacctcaaattttgcagtacctatacttaaatctctttatcaaaatggatacgcaatatcatgcgtatatactcaaccaccaagtaaatcaaatagaggacaaaagttaaataagtcaccagtaaatttaatttctgaaacactaaatatagaagtcagaacacctcatagattaaaaaataacaaagaagaagaaatttttcttaaaaaaataaatcctagtttaataattgtagtttcctatggtcagttaattccaaaaaatttattagaaattccaaaaaacggatttataaatgttcatgcatcattgttgccaaaatggagaggtgcagcacctattcaaagagccatcatgaacttagacggcaaaacaggaataagtattataaaattaaatgaaaatcttgatgaaggacctataatcaacaaatatgaatttaaaatttccgaaaatatgaatgcatctgaattatcagaaaatt

SEQ ID NO: 229741 - DNA, 776 bp, Unknown
  Bacterial polypeptide expressing nucleotide sequence isolated from the Sargasso Sea
agtacatcaaattgcaaaaaaaaataatatagaaatttattatccctcaacaatcgataacaaagttattgagcagacaaaaattttaaagcctgatttaattattgttgttgcctatggtataattttacctacatcatttataaatattcccaaatatggatgcattaatattcatgtctctttattaccgagatggagaggagcagctcctatagaacacgcattactggcaggtgatgataaaactggaattagtataattaatattacctcaaaacttgatgcaggagatattttgatgcaagagacttttttacttgatcagaatatgtacagcgatgatttagctttaaatcttacaaatattgggaaaacagcaatgataaaaattctaccactcatatttaaaaataaaattattggaaaaaaacaagatgaaaataaagttacttttgcgaataaatttttaaatgaagatagaaaaattaatttttataagtcaagtagagatgtttataaccacatacgtgcgcatggaccaaaaccaggatcatggtttacttataaaggagagagaataaaaataattaaagcaaaaaaaactaaagagtctgggcaaagttcaacaattttaaataaagattttatgatagggtgtaaggatggaggtattattccgttacttatacaacgagaaggaaaaaaaatagttaatctaaatgattttttgcgaggctttactttctccgttcaagataaattaaatgtataat

SEQ ID NO: 229742 - DNA, 895 bp, Unknown
  Bacterial polypeptide expressing nucleotide sequence isolated from the Sargasso Sea
gggtagtccagatttttcaatcccatctttaaagatgttgattgataaaaatcacaaaccaatttgtgtgtatacccaatctccacaaaaaaaaatgagaggtcaaaaagttcttaaaactccagtacatatttactctgagaaaatggatatcgaagtaagaaccagaaaactcgattttgaaaacgagtatgttaatttcaaaaatttaaaaccagatttagtagtggttgtagcttatggtcaaattattcctgagtcttatttaaaaataccaaatttactctttttaaatgtgcatgcatctttactaccaaaatggagaggagctgcgcctattgagagagcaattttaaatggagataaagaaacaggagtatccattatgaaaattgaaaaaaaattagatgctggaccatatattatgcaatcgagaataaaaatagatagcgagactaatagtggggaactaaaagaaaaactttctatcttaggggccaagtccttaatacagtcaattgatctcattttgtcaaaagagggaagctttatagatcaaaacgataaagaagcaagttatgcaaaaaaaattgaaaaggaagagtccaaaattaactggcaagaagatgctgagaaaattattttgaaaattaatgcttttagccctaagccgggtgcttggttttattttaataaattaagaataaaaatacataaagctaaaatcgttaatttaaatggaaaaccaggaaccgtattagatgataaacttactatagcaacaaaaaaaaatgcaattaaaattcttaagttacaaaaagaaggtaaaaatataattgaagcaacagattttcttaaaggaaacaaagttaataaaaacattatattaaattga

SEQ ID NO: 229743 - DNA, 519 bp, Unknown
  Bacterial polypeptide expressing nucleotide sequence isolated from the Sargasso Sea
aatgtctaaaaagattatttttatgggcaccccgttttttgcagtgccaatattaaaatctttatatcaaaatggttatgaaatatcagttgtgtacacacaaccaccacaaaaatctcagcgtggtcaaaaaattaacaaatcgcccattcaaggtatttctgaaactttaaacatagattttagaactccaaatatactaaaagataatcaggaagaatttgaatttttacaaaggctaaatgctgatctagcaattgtagttgcttatggtcagattattccaaaaaaatttttgaatttaactaaaaagggttttattaatattcatggatctgtacttcctaaatggagaggagctgccccaattcaaaggtcgattatgaatttagatgctgaaacaggaataagtattatgaaaattgaagaagagttagatagtgggcctattagcaaaatctataggattaaaattgaccctaatcataatgcccaagaaatatctgaaaaactatcttc

SEQ ID NO: 229744 - DNA, 637 bp, Unknown
  Bacterial polypeptide expressing nucleotide sequence isolated from the Sargasso Sea
atgaacaaacatttcttagacttaaataatttttctaaagacgatattgatagaatcttaagcaattctctcgaaatgaagtccaaagggaaaaatttaaaaattttagagggcaaatttctaagtcttgtatttgaaaaatcttcaactagaaccagagtttcgtttgaagttggaatggcacaacttggtggcagagcatcctttctttctgttaatgatctacaaatgggacgaggtgagcctattgaggacacatcaaaagttttaagttctatggtagacggcatcgtgctcagaacacttgaacataaaacgcaaataaagtttgctgaaaattcttcagttccaataattaatggtttgagtgacagatctcatccatgtcaattacttgcagatttacttactttttgtgaagaaaaaggatcgatagaagggaaaaaagttacgtggtgtggagatttcaataatgtttgctttagttatgcgcaggccgcagagttattgaatttcgaacttattattgcatgccctaaagaattttgtcctgaagatacagagaactataaaaatgtgtcctttactcaatctatatcgaaagccgtagaagccagtgatttggtttctacatgat

SEQ ID NO: 229745 - DNA, 493 bp, Unknown
  Bacterial polypeptide expressing nucleotide sequence isolated from the Sargasso Sea
atgaataaacatttcctagacctagataatttttccaaagacgatattgatagaatcttaagcaattctctgcaaatgaagtccaaagggaaaaatttaaaaattttagaaggcaaatttctaagtcttgtatttgagaaatcttcaactagaactagagtttcgtttgaagttgcaatggcacaacttggtggcagagcatcctttctttctgtgaatgatcttcaaatgggacgaggtgaacctattgaggatacttcgaaagttttaggttctatggtagatggcatcgtactcagaacactcgaacataaaacacagataaagtttgctgaaaattcgtcaattccaataattaatggtttgagtgacagatctcatccatgtcaattactggcggatttactaacttttcgtgaagaaaaaggatcaatagaaggaaaaaaagttgcgtggtgtggagatttcaataatgtttgttttagttatgctc

SEQ ID NO: 229746 - DNA, 301 bp, Unknown
  Bacterial polypeptide expressing nucleotide sequence isolated from the Sargasso Sea
actggcgtcatcccctttctttccaaaggcgaaagtcgaaaacaacaaatctcgccttccaagcttccttcacatatccgattacgaggagagccaaatagacttgatcctagaacgagctactgaggtgaaagggtttttgcgtgccggtgaccgttcgttccgaccgttcaaagggagaacgctttgtatgatattcacgaaaccatcgctccggaccagggtctcgtttgagactggtttccatcttcttggagggcatgcgatttatcttggccctgatgacatagggttaggcggg

SEQ ID NO: 229747 - DNA, 439 bp, Unknown
  Bacterial polypeptide expressing nucleotide sequence isolated from the Sargasso Sea
catgagtaaacattttttaaatttaaatgatttaactaaaactgaaatattagatttagttaaacaagctatagacctgaaaggttcagagaaaaattctgattaccttcgtggaaaatatcttgcattaatttttgaaaaatattcaactagaacaagagtttcttttgaggtagccatgtcgcaacttggtggaactgctagctttttatcaaccaaagatttgcaattaggaagaggcgaacccttagaagatactgctaaagtcataagctccatggctgatgcaattgttctaaggacaattaatcattcaacagttgaaattttcgcagagaattcatctgtacctatcattaatggactctcagatttgtctcatccgtgtcaactgttagctgacttaacaacataccaagaaagaaaatggagacataga

SEQ ID NO: 229748 - DNA, 328 bp, Unknown
  Bacterial polypeptide expressing nucleotide sequence isolated from the Sargasso Sea
atgaataaacatttcctagacctaaataacttttctaaagacgatattgatagaatcttaagcaattcaatagaaatgaagtctaaaggtaaaagtctaaaaattttagagggcaaattcctaagtcttgtatttgaaaaatcttcaactaggactagagtgtcttttgaagttgcaatggcacaacttggtggcagagcatcctttctttctgtgaatgatctgcaaatgggacgaggtgaacctattgaggacacatcaaaagtattatcttctatggtagacggtatagtactcagaacactgcaacataaaacacagataaagt

SEQ ID NO: 229749 - DNA, 242 bp, Unknown
  Bacterial polypeptide expressing nucleotide sequence isolated from the Sargasso Sea
aatgaagcattttttacatatttcagattataccgatacagaattatgggagatattaaaattagctaaagatttaaaatctaaatttcatcaaagacaagatttcaagcattttaagaacagatcactcgcaatgatatttgcgaaaccatctgcaagaacaagagtttcttttgaaactgggtttgaatggatgggggggcatgcgttatttctaggtcccaatgatattggtattggga

SEQ ID NO: 229750 - DNA, 241 bp, Unknown
  Bacterial polypeptide expressing nucleotide sequence isolated from the Sargasso Sea
atgagtattaaacattgtataaaagtagatgattttagtagaaatgagattttagatttatttcaattagcttctgagctaaaatctaaatacagaaataaagaaagttaccagccattcaaagatcactccatagccatgatattcgcaaagccttctgcaagaacaagagtttcatttgagacaggttttgcttggatgggtggacatgcaatctatttagctccacaagatattggtt

SEQ ID NO: 229751 - DNA, 258 bp, Unknown
  Bacterial polypeptide expressing nucleotide sequence isolated from the Sargasso Sea
aatggcaaaacactttttacatatttcagattacagtaccgatcaaatttgggagattcttcatctttctaaagaactaaaaactaaatttcataataaagaaaattttaaaccatttagagatagatctcttgcaatgatattcgcaaaaccatctgctcgtacgcgagtttcttttgaaacaggttttgaatggatggaggggcatgcactattcttgggccctaatggacataggaataggaaaaagggaagcaa

SEQ ID NO: 229752 - DNA, 790 bp, Unknown
  Bacterial polypeptide expressing nucleotide sequence isolated from the Sargasso Sea
atggctaataatttactatcaataaatgatttatctaaaaaagagatattagaacttattgaatttgcaaataatttctttaatgatgaaggtagttttcgtagagaaagtttatttcctgataaaactatagctaatgttttttgtgagccaagcactagaacaaaatcttcgtttgcaatagccgcaaaaaatttaggatgttctgtaatagacttcaatattgaaaattcttctgtgcaaaaaggagaatcaatttacgagactattgatgcacttaatttaatgggagtagatctatgcgttcttagacatcccgaatctattattcgagaattagcagaaacattaccagaaatggtatttgtaaacgcaggagaaggatctatttctcatcctacacaagctcttttagatttaaaaacaataattgatcacaaggataaattagatgacttaaatattgtaatcattggagatcttgatcattcaagagttacctcatcttttgtagaaggcatctcaaactttgatataggttctttaacattttgtggacatcctgaaatgtgtacaaaatacagagatccaaaaatgggcagatacgaagctgacatggcaacagcattgcaagatgctgatgttgttatgacattaagaatccaatacgaaagattcgagaaggaattaaatttagatttagaaacttataaaagcgaatatcaactttcgtcagaaaacttgagaatgctaaaggagatgcaattattatgcatccaggacctgtaaa

SEQ ID NO: 229753 - DNA, 880 bp, Unknown
  Bacterial polypeptide expressing nucleotide sequence isolated from the Sargasso Sea
atgagacatcttttagattttcaagatgtaaataaaaaccatttagaaaatctaattgaaaaaaccagaagtcttgaatttaaatcagaaaatatagactctttagccctcttgaagtttgacgaaccttcaacaagaactaggctctcttttgcaatagcagcagaaaaacttggaattaaaactttcgaatcttcagatgttatatcggcaaaacaaaaaggagaaattcttaaacatgaaatagagacatacatttctatgggtattgagattctagtgttaaggacaaaagaaaataatattgatgattatcgagaatttaaagacattggtgttataagtgctggttttggaaataaatctcatccaactcaagcattgattgatatatctacactgtttagtttgaataaaatcaatgaaaaacttaccccaataacttatattggagacgtaaaacattcaagagtatttgaatcgggaagacaactgctaaatttattaggattcaaagttggtgtctttacggataaaaatctattacctgaaaataaaaatgaccttgaaatttatgaatcgtgggatgaggtatttgagagttctaacgcaattgaacttctaagagtacagaaagaaagattacaagataatgaagaaataaactttgatgaatatataaataattatcaacttacacaagaaattttaggaaaatcacaaagtgatttggctgttcttcatccaatgccaatcaatattggtattgagatttctaaagatgctattgatgataggaaaataaaatataaggaccagctttcacacgctataccttcacgaattgcagcattcaaatatgtaagggatgaaatatgat

SEQ ID NO: 229754 - DNA, 217 bp, Unknown
  Bacterial polypeptide expressing nucleotide sequence isolated from the Sargasso Sea
aatggcggttataaaaaaattttcagctgttaaaaaaatccaaaaacaccttttaggaatccaaaatttatccattgaagaagctaatcttattttaagtgaagcaaaaaacttcataaaactgaacagaagtgcatctaaaaaattggatttactaagaggaaaaacgcaaattaatttattttttgagccctctactagaactccaagttctttt

SEQ ID NO: 229755 - DNA, 236 bp, Unknown
  Bacterial polypeptide expressing nucleotide sequence isolated from the Sargasso Sea
tgaaagattaaaagataatgagaatatagatatggaagcttttaagtcgacatatcaaattaacgaatcttttattgaaaaaactaaatttactggctcagttatgcaccctggaccaattaatattgatttagagatttctgatgctgttgccacatcagaaaaatcacttatttctacacaagtagaaaatggactctatattagagcggcattattaggccttatttcttaaa

SEQ ID NO: 229756 - DNA, 340 bp, Unknown
  Bacterial polypeptide expressing nucleotide sequence isolated from the Sargasso Sea
aatgtgtaccaagtatcataatcctaagattggcaagtatgaatctcacttagagtcagcccttgaaaatgcagatgttgtaatggctttgagaattcagtacgaaagatttgaaaaagagcttaatttagatcttgaaacatataaatcagagtatcaattgtcttctgaaaaacttgagtctgcaaaaggtgacgcaattgtaatgcatccaggaccggttaattatgttgaaataacagaagctgtatatgactcagaaaattctgtaattaggcaacaggtggcaaatggcgttgctataagaatggctgtattatcaagatttttgggcagctaa

SEQ ID NO: 229757 - DNA, 376 bp, Unknown
  Bacterial polypeptide expressing nucleotide sequence isolated from the Sargasso Sea
aatggcagttaagaaaaacaatacagctattaaaaactctcccaaacatcttcttggtattcaaaacctttcaattttagaagctaaatcaatattagatgaagcaaaaaaatttattgaattaaacagaagtagctcaaaaaaattagatgttctaagaggaaaaactcaaattaatttattttttgaaccatccacaagaacccaaagttcgtttgatctagcaggtaaaagattaggtgcagatgtaatgtctatgaacatggacaactcagcccttaaaaaaggtgaaacttttatcgatactgcaatgacttttaacgcgatgcaccctgacttaattgtaattagacatcaagactctggtgcaccaaat

SEQ ID NO: 229758 - DNA, 406 bp, Unknown
  Bacterial polypeptide expressing nucleotide sequence isolated from the Sargasso Sea
atgaatttaatcgatattaaatctctaaatataaaagaaatagaagacattgtttcgcttgcttctcaatttaggtctgatttaggagggtttaatcaagagccaatttatgaagataaaaaggcagcattattattttttgaaccaagcacccgaacgaaatcttcatttcaaatagcattaatgaaccttggtgccagctttatagacataaatccagatacttcatcaattgtcaaaggagaatcagttagcgataccatagaaactttagctttaatgggagtacacctttttataattaggcattcagaacctataattagtgatcttgcaaatcaatatcctgatctttgctttgtaaacgctggagcaggagcagaatctcatccaacccaagcatgac

SEQ ID NO: 229759 - DNA, 169 bp, Unknown
  Bacterial polypeptide expressing nucleotide sequence isolated from the Sargasso Sea
attagaacatgctaagtctgatgctttaattatgcatcctggaccaatgaatagaggtattgagatagacacaattttagctgatgacataaataaaagtgtaattaaagaacaagttgagctgggtgtagcagtaagaatggcttgtttaaagatattttgtaaataa

SEQ ID NO: 229760 - DNA, 715 bp, Unknown
  Bacterial polypeptide expressing nucleotide sequence isolated from the Sargasso Sea
tatgaaaaatatcattaatttaattgttgagcaaaattcagacaaaaaaaggattgatacatttatttttgataaatgtcctgaaattagtaggacaagaatcaaaaaattgattttagataaaaaactaaaaattaatgggaaaataaattgctttccttcaaaaaaagtattcatgggagataatattgctctagaaatacctaaaccaaaaaaatcttcattaaaaccatttaattttaagttagatatactttatgaggatgatgatttaattgtaattaataaaccagcaggaatttcgatgcatcctggtccaggcaattacgataatacgattgtaaacgcattgatgaattatgaaaaaatacaattatcatcaataggagatgaacttagaccaggtattattcatagaattgataaagatacatcaggcttagttgtgattgcaaaaaataacctcagtcatgaaatcatttcaaaacaatttagtgaacattcaattgatagaatttacaatgccttaatatggggaaagttgagacctcaatctggagttatcgaaacatttataactagaagttcaaaaaatagacagttgatggatgttagttttatgaaaggaaagaaggcaatcactaagtataaaacactaaaagtttttgagggtacaaatattcctaccctcagtcttgtagaatgtaaactttga

SEQ ID NO: 229761 - DNA, 224 bp, Unknown
  Bacterial polypeptide expressing nucleotide sequence isolated from the Sargasso Sea
aatggcaactaatacaaaagctattaaaatttcacaaaaacatctattaggtattcaagatttatcaattgatgatgttaacatcattttaaatgaagctagtaaatttattgaattaaacaaaagtagaaataaaaagtcagatattcttaaagggaaaactcaaataaacttattttttgaaccgtctacaagaactcaaagttcttttgagcttgcaggaa
